(19) United States
(12) Patent Application Publication
(10) Pub. No.: US 2021/0196806 A1
(43) Pub. Date: Jul. 1, 2021

(54) SHARED ANTIGENS

(71) Applicant: Gritstone Oncology, Inc., Emeryville, CA (US)

(72) Inventors: Roman Yelensky, Newton, MA (US); James Xin Sun, Newton, MA (US); Michele Busby, Needham, MA (US); Jennifer Busby, Burlington, MA (US); Brendan Bulik-Sullivan, Cambridge, MA (US); Mojca Skoberne, Cambridge, MA (US); Wade Blair, Gaithersburg, MD (US); Karin Jooss, Emeryville, CA (US)

(21) Appl. No.: 17/058,128

(22) PCT Filed: May 23, 2019
(86) PCT No.: PCT/US2019/033830

§ 371 Date: Nov. 23, 2020

Related U.S. Application Data
(60) Provisional application No. 62/675,649, filed on May 23, 2018.
(60) Provisional application No. 62/675,559, filed on May 23, 2018.

(51) Int. Cl. A61K 39/00; C07K 14/47; C07K 14/74; C12N 15/86; A61K 9/51; A61K 39/395; C12Q 1/6881; C12Q 1/6886; A61P 35/00

(52) U.S. Cl. CPC A61K 39/0011; C07K 14/4748; C07K 14/70539; C12N 15/86; A61K 9/5123; C12Q 2600/156; C12Q 1/6881; C12Q 1/6886; A61P 35/00; C12N 2710/10343; A61K 2039/53; A61K 39/3955

(57) ABSTRACT

Disclosed herein are compositions that include antigen-encoding nucleic acid sequences and/or antigen peptides. Also disclosed are nucleotides, cells, and methods associated with the compositions including their use as vaccines.

### CROSS REFERENCE TO RELATED APPLICATIONS

[0001] This application is the National Stage entry of International Application No. PCT/US2019/033828, filed May 23, 2029, which application claims the benefit of U.S. Provisional Application Nos. 62/675,649 filed May 23, 2018 and 62/675,559 filed May 23, 2018, each of which is hereby incorporated in its entirety by reference for all purposes.

### SEQUENCE LISTING

[0002] The instant application contains a Sequence Listing which has been submitted electronically in ASCII format and is hereby incorporated by reference in its entirety. Said ASCII copy, created on Nov. 23, 2020, is named GSO_019_WOUS_Sequence_Listing.txt and is 6,969,554 bytes in size.

### BACKGROUND

[0003] Therapeutic vaccines based on tumor-specific antigens hold great promise as a next-generation of personalized cancer immunotherapy.¹⁻³ For example, cancers with a high mutational burden, such as non-small cell lung cancer (NSCLC) and melanoma, are particularly attractive targets of such therapy given the relatively greater likelihood of neoantigen generation.^{4,5} Early evidence shows that neoantigen-based vaccination can elicit T-cell responses⁶ and that neoantigen targeted cell-therapy can cause tumor regression under certain circumstances in selected patients.⁷

[0004] One question for neoantigen vaccine design is which of the many coding mutations present in subject tumors can generate the “best” therapeutic neoantigens, e.g., antigens that can elicit anti-tumor immunity and cause tumor regression.

[0005] Initial methods have been proposed incorporating mutation-based analysis using next-generation sequencing, RNA gene expression, and prediction of MHC binding affinity of candidate neoantigen peptides⁸. However, these proposed methods can fail to model the entirety of the epitope generation process, which contains many steps (e.g., TAP transport, proteasomal cleavage, and/or TCR recognition) in addition to gene expression and MHC binding⁹. Consequently, existing methods are likely to suffer from reduced low positive predictive value (PPV).

[0006] Indeed, analyses of peptides presented by tumor cells performed by multiple groups have shown that <5% of peptides that are predicted to be presented using gene expression and MEW binding affinity can be found on the tumor surface MHC^{10,11}. This low correlation between binding prediction and MEW presentation was further reinforced by recent observations of the lack of predictive accuracy improvement of binding-restricted neoantigens for checkpoint inhibitor response over the number of mutations alone.¹²

[0007] This low positive predictive value (PPV) of existing methods for predicting presentation presents a problem for neoantigen-based vaccine design. If vaccines are designed using predictions with a low PPV, most patients are unlikely to receive a therapeutic neoantigen and fewer still are likely to receive more than one (even assuming all presented peptides are immunogenic). Thus, neoantigen vaccination with current methods is unlikely to succeed in a substantial number of subjects having tumors.

[0008] Additionally, previous approaches generated candidate neoantigens using only cis-acting mutations, and largely neglected to consider additional sources of neo-ORFs, including mutations in splicing factors, which occur in multiple tumor types and lead to aberrant splicing of many genes¹³, and mutations that create or remove protease cleavage sites.

[0009] Finally, standard approaches to tumor genome and transcriptome analysis can miss somatic mutations that give rise to candidate neoantigens due to suboptimal conditions in library construction, exome and transcriptome capture, sequencing, or data analysis. Likewise, standard tumor analysis approaches can inadvertently promote sequence artifacts or germline polymorphisms as neoantigens, leading to inefficient use of vaccine capacity or auto-immunity risk, respectively.

[0010] In addition to the challenges of current neoantigen prediction methods certain challenges also exist with the available vector systems that can be used for neoantigen delivery in humans, many of which are derived from humans. For example, many humans have pre-existing immunity to human viruses as a result of previous natural exposure, and this immunity can be a major obstacle to the use of recombinant human viruses for neoantigen delivery for cancer treatment.

[0011] In addition, targeting antigens that are shared among patients with cancer hold great promise as a vaccine strategy, including targeting both neoantigens with a mutation as well as tumor antigens without a mutation (e.g., tumors antigens that are improperly expressed). The challenges with shared antigen vaccine strategies include at least those discussed above.

### SUMMARY

[0012] Disclosed herein is a composition for delivery of an antigen expression system, comprising: the antigen expression system, wherein the antigen expression system comprises one or more vectors, the one or more vectors comprising: (a) a vector backbone, wherein the backbone comprises: (i) at least one promoter nucleotide sequence, and (ii) at least one polyadenylation (poly(A)) sequence; and (b) a antigen cassette, wherein the antigen cassette comprises: (i) at least one antigen-encoding nucleic acid sequence, comprising: (I) at least one tumor-specific MHC class I antigen-encoding nucleic acid sequence, comprising: (A) a MHC class I epitope encoding nucleic acid sequence, wherein the MHC class I epitope encoding nucleic acid sequence encodes a MHC class I epitope selected from the group consisting of SEQ ID NO: 57-29,357, (B) optionally, a 5′ linker sequence, and (C) optionally, a 3′ linker sequence; (ii) optionally, a second promoter nucleotide sequence operably linked to the antigen-encoding nucleic acid sequence; and (iii) optionally, at least one MHC class II antigen-encoding nucleic acid sequence; (iv) optionally, at least one nucleic acid sequence encoding a GPGPG amino acid linker sequence (SEQ ID NO:56); and (v) optionally, at least one second poly(A) sequence, wherein the second poly(A) sequence is a native poly(A) sequence or an exogenous poly(A) sequence to the vector backbone.

[0013] Also disclosed herein is a composition for delivery of a antigen expression system, comprising: the antigen expression system, wherein the antigen expression system comprises one or more vectors, the one or more vectors comprising: (a) a vector backbone, wherein the backbone comprises: (i) at least one promoter nucleotide sequence, and (ii) at least one polyadenylation (poly(A)) sequence; and (b) an antigen cassette, wherein the antigen cassette comprises: (i)

[0014] at least one antigen-encoding nucleic acid sequence, comprising: (I) at least 10, 11, 12, 13, 14, 15, 16, 17, 18, 19, or 20 tumor-specific MHC class I antigen-encoding nucleic acid sequences linearly linked to each other, comprising: (A) a KRAS_G12A MHC class I epitope encoding nucleic acid sequence, wherein the KRAS_G12A MHC class I epitope encoding nucleic acid sequence encodes a MHC class I comprising the sequence of SEQ ID NO: 19,831, (B) a KRAS_G12C MHC class I epitope encoding nucleic acid sequence, wherein the KRAS_G12C MHC class I epitope encoding nucleic acid sequence encodes a MHC class I epitope comprising the sequence of SEQ ID NO: 14,954, (C) a KRAS_G12D MHC class I epitope encoding nucleic acid sequence, wherein the KRAS_G12D MHC class I epitope encoding nucleic acid sequence encodes a MHC class I epitope selected from the group consisting of SEQ ID NO: 19,749 and 19,865, and (D) a KRAS_G12V WIC class I epitope encoding nucleic acid sequence, wherein the KRAS_G12V MHC class I epitope encoding nucleic acid sequence encodes a MHC class I epitope selected from the group consisting of SEQ ID NO: 19,976; 19,979; 19,779; 11,495; and 19,974, wherein each of the tumor-specific MHC class I antigen-encoding nucleic acid sequences comprises a class I epitope encoding nucleic acid sequence, optionally wherein each WIC I epitope encoding nucleic acid sequence encodes a MHC class I epitope selected from the group consisting of SEQ ID NO: 57-29,357, and wherein each of the tumor-specific WIC class I antigen-encoding nucleic acid sequences comprises; (A) optionally, a 5′ linker sequence, and (B) optionally, a 3′ linker sequence; (ii) optionally, a second promoter nucleotide sequence operably linked to the antigen-encoding nucleic acid sequence; and (iii) optionally, at least one WIC class II antigen-encoding nucleic acid sequence; (iv) optionally, at least one nucleic acid sequence encoding a GPGPG amino acid linker sequence (SEQ ID NO:56); and (v) optionally, at least one second poly(A) sequence, wherein the second poly(A) sequence is a native poly(A) sequence or an exogenous poly(A) sequence to the vector backbone.

[0015] Also disclosed herein is a composition for delivery of an antigen expression system, comprising: the antigen expression system, wherein the antigen expression system comprises one or more vectors, the one or more vectors comprising: (a) a vector backbone, wherein the backbone comprises: (i) at least one promoter nucleotide sequence, and (ii) at least one polyadenylation (poly(A)) sequence; and (b) an antigen cassette, wherein the antigen cassette comprises: (i)

[0016] at least one antigen-encoding nucleic acid sequence, comprising: (I) at least 20 tumor-specific MHC class I antigen-encoding nucleic acid sequences linearly linked to each other, comprising: (A) a KRAS_G12A WIC class I epitope encoding nucleic acid sequence, wherein the KRAS_G12A MHC class I epitope encoding nucleic acid sequence encodes a MHC class I comprising the sequence of SEQ ID NO: 19,831, (B) a KRAS_G12C MHC class I epitope encoding nucleic acid sequence, wherein the KRAS_G12C WIC class I epitope encoding nucleic acid sequence encodes a WIC class I epitope comprising the sequence of SEQ ID NO: 14,954, (C) a KRAS_G12D WIC class I epitope encoding nucleic acid sequence, wherein the KRAS_G12D WIC class I epitope encoding nucleic acid sequence encodes a MHC class I epitope selected from the group consisting of SEQ ID NO: 19,749 and 19,865, and (D) a KRAS_G12V MHC class I epitope encoding nucleic acid sequence, wherein the KRAS_G12V MHC class I epitope encoding nucleic acid sequence encodes a MHC class I epitope selected from the group consisting of SEQ ID NO: 19,976; 19,979; 19,779; 11,495; and 19,974, (E) a KRAS_G13D MHC class I epitope encoding nucleic acid sequence, (F) a KRAS_Q61K MHC class I epitope encoding nucleic acid sequence, (G) a TP53_R249M MHC class I epitope encoding nucleic acid sequence, (H) a CTNNB1_S45P MHC class I epitope encoding nucleic acid sequence, (I) a CTNNB1_S45F MHC class I epitope encoding nucleic acid sequence, (J) a ERBB2_Y772_A775dup MHC class I epitope encoding nucleic acid sequence, (K) a KRAS_Q61R MHC class I epitope encoding nucleic acid sequence, (L) a CTNNB1_T41A MHC class I epitope encoding nucleic acid sequence, (M) a TP53_K132N MHC class I epitope encoding nucleic acid sequence, (N) a KRAS_Q61L MHC class I epitope encoding nucleic acid sequence, (O) a TP53_R213L MHC class I epitope encoding nucleic acid sequence, (P) a BRAF_G466V MHC class I epitope encoding nucleic acid sequence, (Q) a KRAS_Q61H MHC class I epitope encoding nucleic acid sequence, (R) a CTNNB1_S37F MHC class I epitope encoding nucleic acid sequence, (S) a TP53_S127Y MHC class I epitope encoding nucleic acid sequence, (T) a TP53_K132E MHC class I epitope encoding nucleic acid sequence, (U) a KRAS_G12C MHC class I epitope encoding nucleic acid sequence, and wherein each of the tumor-specific MHC class I antigen-encoding nucleic acid sequences comprises; (A) optionally, a 5′ linker sequence, and (B) optionally, a 3′ linker sequence; (ii) optionally, a second promoter nucleotide sequence operably linked to the antigen-encoding nucleic acid sequence; and (iii) optionally, at least one MHC class II antigen-encoding nucleic acid sequence; (iv) optionally, at least one nucleic acid sequence encoding a GPGPG amino acid linker sequence (SEQ ID NO:56); and (v) optionally, at least one second poly(A) sequence, wherein the second poly(A) sequence is a native poly(A) sequence or an exogenous poly(A) sequence to the vector backbone.

[0017] In some aspects, the at least one antigen-encoding nucleic acid sequence excludes the MHC class I epitope selected from the group consisting of SEQ ID NO: 19,749 and 19,865.

[0018] Also disclosed herein is composition for delivery of an antigen expression system, comprising: the antigen expression system, wherein the antigen expression system comprises one or more vectors, the one or more vectors comprising: (a) a vector backbone, wherein the vector backbone comprises a chimpanzee adenovirus vector, optionally wherein the chimpanzee adenovirus vector is a ChAdV68 vector, or an alphavirus vector, optionally wherein the alphavirus vector is a Venezuelan equine encephalitis virus vector; and (b) an antigen cassette integrated between the 26S promoter nucleotide sequence and the poly(A) sequence, wherein the antigen cassette comprises: (i) at least one antigen-encoding nucleic acid sequence, comprising: (I) at least 10, 11, 12, 13, 14, 15, 16, 17, 18, 19, or 20 tumor-specific and MHC class I antigen-encoding nucleic acid sequences linearly linked to each other and each comprising: (A) a WIC class I epitope encoding nucleic acid sequence, wherein the MHC class I epitope encoding nucleic acid sequence encodes a MHC class I epitope 7-15 amino acids in length, and wherein at least one of the WIC class I epitopes is selected from the group consisting of SEQ ID NO: 57-29,357, (B) a 5′ linker sequence, wherein the 5′ linker sequence encodes a native N-terminal amino acid sequence of the WIC class I epitope, and wherein the 5′ linker sequence encodes a peptide that is at least 3 amino acids in length, (C) a 3′ linker sequence, wherein the 3′ linker sequence encodes a native C-terminal acid sequence of the WIC class I epitope, and wherein the 3′ linker sequence encodes a peptide that is at least 3 amino acids in length, and wherein the antigen cassette is operably linked to the 26S promoter nucleotide sequence, wherein each of the MHC class I antigen-encoding nucleic acid sequences encodes a polypeptide that is between 13 and 25 amino acids in length, and wherein each 3′ end of each MHC class I antigen-encoding nucleic acid sequence is linked to the 5′ end of the following MHC class I antigen-encoding nucleic acid sequence with the exception of the final WIC class I antigen-encoding nucleic acid sequence in the antigen cassette; and (ii) at least two WIC class II antigen-encoding nucleic acid sequences comprising: (I) a PADRE WIC class II sequence (SEQ ID NO:48), (II) a Tetanus toxoid WIC class II sequence (SEQ ID NO:46), (III) a first nucleic acid sequence encoding a GPGPG amino acid linker sequence (SEQ ID NO: 56) linking the PADRE MHC class II sequence and the Tetanus toxoid MHC class II sequence, (IV) a second nucleic acid sequence encoding a GPGPG amino acid linker sequence (SEQ ID NO: 56) linking the 5′ end of the at least two WIC class II antigen-encoding nucleic acid sequences to the tumor-specific WIC class I antigen-encoding nucleic acid sequences, (V) optionally, a third nucleic acid sequence encoding a GPGPG amino acid linker sequence (SEQ ID NO: 56) at the 3′ end of the at least two WIC class II antigen-encoding nucleic acid sequences.

[0019] Also disclosed herein is a method of assessing a subject having cancer, comprising the steps of: a) determining or having determined: 1) if the subject has an HLA allele predicted or known to present an antigen included in a antigen-based vaccine, and one or both of: 1) if a subject's tumor expresses a gene associated with the antigen, optionally, wherein the gene is aberrantly expressed in comparison to a normal cell or tissue, 2) if the subject's tumor has a mutation associated with the antigen, b) determining or having determined from the results of (a) that the subject is a candidate for therapy with the antigen-based vaccine when the subject expresses the HLA allele, and the subject's tumor expresses the gene, and/or the subject's tumor has the mutation, wherein the antigen comprises at least one MHC class I epitope sequence selected from the group consisting of SEQ ID NO: 57-29,357, and c) optionally, administering of having administered the antigen-based vaccine to the subject, wherein the the antigen-based vaccine comprises: 1) the at least one MHC class I epitope, or 2) a MHC class I epitope encoding nucleic acid sequence encoding the at least one MHC class I epitope.

[0020] Also disclosed herein is a method of assessing a subject having cancer, comprising the steps of: a) determining or having determined if the subject expresses: 1) an A0301 HLA allele and the subject's tumor has a KRAS_G12A mutation, 2) an A0201 HLA allele and the subject's tumor has a KRAS_G12C mutation, 3) an C0802 HLA allele or an A1101 HLA allele and the subject's tumor has a KRAS_G12D mutation, or 4) an A0301 HLA allele or an A1101 HLA allele or an A3101 HLA allele or an C0102 HLA allele or an A0302 HLA allele and the subject's tumor has a KRAS_G12V mutation, and b) determining or having determined from the results of (a) that the subject is a candidate for therapy with the antigen-based vaccine when the subject: 1) expresses the A0301 allele and the subject's tumor has the KRAS_G12A mutation, 2) expresses the A0201 allele and the subject's tumor has the KRAS_G12C mutation, 3) expresses the C0802 HLA allele or the A1101 HLA allele and the subject's tumor has the KRAS_G12D mutation, or 4) expresses the A0301 HLA allele or the A1101 HLA allele or the A3101 HLA allele or the C0102 HLA allele or the A0302 HLA allele and the subject's tumor has a KRAS_G12V mutation, and and c) optionally, administering of having administered the antigen-based vaccine to the subject, wherein the the antigen-based vaccine comprises: 1) at least one MHC class I epitope comprising the KRAS_G12A mutation, the KRAS_G12C mutation, the KRAS_G12D mutation, or the KRAS_G12V mutation, respectively, or 2) a MHC class I epitope encoding nucleic acid sequence encoding the at least one MHC class I epitope comprising the KRAS_G12A mutation, the KRAS_G12C mutation, the KRAS_G12AD mutation, or the KRAS_G12V mutation, respectively.

[0021] In some aspects, steps (a) and/or (b) comprises obtaining a dataset from a third party that has processed a sample from the subject. In some aspects, step (a) comprises obtaining a sample from the subject and assaying the sample using a method selected from the group consisting of: exome sequencing, targeted exome sequencing, transcriptome sequencing, Sanger sequencing, PCR-based genotyping assays, mass-spectrometry based methods, microarray, Nanostring, ISH, and IHC. In some aspects, the sample comprises a tumor sample, a normal tissue sample, or the tumor sample and the normal tissue sample. In some aspects, the sample is selected from tissue, bodily fluid, blood, tumor biopsy, spinal fluid, and needle aspirate. In some aspects, the gene is selected from the group consisting of: any of the genes found Table 34. In some aspects, the gene is selected from the group consisting of: any of the genes found Table 32. In some aspects, the cancer is selected from the group consisting of: lung cancer, microsatellite stable colon cancer, and pancreatic cancer. In some aspects, the HLA allele has an HLA frequency of at least 5%. In some aspects, the at least one MHC class I epitope is presented by the HLA allele on a cell associated with the subject's tumor. In some aspects, the antigen-based vaccine comprises an antigen expression system. In some aspects, the antigen expression system comprises any one of the antigen expression systems disclosed herein. In some aspects, the antigen-based vaccine comprises any one of the pharmaceutical compositions disclosed herein.

[0022] Also disclosed herein is a method for treating a subject with cancer, the method comprising administering to the subject an antigen-based vaccine to the subject, wherein the the antigen-based vaccine comprises: 1) at least one MEW class I epitope, or 2) a MHC class I epitope encoding nucleic acid sequence encoding the at least one MHC class I epitope, wherein the at least one MEW class I epitope sequence is selected from the group consisting of SEQ ID NO: 57-29,357. In some aspects, the at least one MHC class I antigen-encoding nucleic acid sequence is derived from the tumor of the subject with cancer. In some aspects, the at least one MEW class I antigen-encoding nucleic acid sequence are not derived from the tumor of the subject with cancer.

[0023] Also disclosed herein is a method for inducing an immune response in a subject, the method comprising the method comprising administering to the subject an antigen-based vaccine to the subject, wherein the the antigen-based vaccine comprises: 1) at least one MEW class I epitope, or 2) a MHC class I epitope encoding nucleic acid sequence encoding the at least one MEW class I epitope, wherein the at least one MEW class I epitope sequence is selected from the group consisting of SEQ ID NO: 57-29,357. In some aspects, the subject expresses at least one HLA allele predicted or known to present the at least one MEW class I epitope sequence. In some aspects, the subject expresses at least one HLA allele predicted or known to present the at least one MEW class I epitope sequence, and wherein the at least one MHC class I epitope sequence comprises a mutation selected from the group consisting of mutations referred to in Table 34. In some aspects, the subject expresses at least one HLA allele predicted or known to present the at least one MHC class I epitope sequence, and wherein the at least one MEW class I epitope sequence comprises a mutation selected from the group consisting of mutations referred to in Table 32.

[0024] Also disclosed herein is a method for inducing an immune response in a subject, the method comprising administering to the subject an antigen-based vaccine to the subject, wherein the antigen-based vaccine comprises: 1) at least one MEW class I epitope, or 2) a MEW class I epitope encoding nucleic acid sequence encoding the at least one MEW class I epitope, wherein the at least one MHC class I epitope sequence is selected from the group consisting of SEQ ID NO: 57-29,357, and wherein the subject expresses at least one HLA allele predicted or known to present the at least one MHC class I epitope sequence.

[0025] Also disclosed herein is a method for inducing an immune response in a subject, the method comprising administering to the subject an antigen-based vaccine to the subject, wherein the the antigen-based vaccine comprises: 1) at least one MHC class I epitope, or 2) a MHC class I epitope encoding nucleic acid sequence encoding the at least one MEW class I epitope, wherein the at least one MHC class I epitope sequence selected from the group consisting of SEQ ID NO: 57-29,357, and wherein the subject expresses at least one HLA allele predicted or known to present the at least one MEW class I epitope sequence, and wherein the at least one MEW class I epitope sequence comprises a mutation selected from the group consisting of mutations referred to in Table 34, and wherein the subject expresses at least one HLA allele shown in Table 34 that is matched to the corresponding mutation shown in Table 34 (e.g., KRAS_G13D and C0802).

[0026] Also disclosed herein is a method for inducing an immune response in a subject, the method comprising administering to the subject an antigen-based vaccine to the subject, wherein the the antigen-based vaccine comprises: 1) at least one MHC class I epitope, or 2) a MHC class I epitope encoding nucleic acid sequence encoding the at least one MEW class I epitope, wherein the at least one MHC class I epitope sequence selected from the group consisting of SEQ ID NO: 57-29,357, and wherein the subject expresses at least one HLA allele predicted or known to present the at least one MEW class I epitope sequence, and wherein the at least one MEW class I epitope sequence comprises a mutation selected from the group consisting of mutations referred to in Table 32. In some aspects, the antigen-based vaccine comprises an antigen expression system. In some aspects, the antigen expression system comprises any one of the antigen expression systems described herein. In some aspects, the antigen-based vaccine comprises any one of the pharmaceutical compositions described herein.

[0027] In some aspects, an ordered sequence of each element of the neoantigen cassette is described in the formula, from 5′ to 3′, comprising:

Pa-(L5b-Nc-L3d)X-(G5e-Uf)Y-G3g

[0028] wherein P comprises the second promoter nucleotide sequence, where a=0 or 1, N comprises one of the MHC class I epitope encoding nucleic acid sequences, where c=1, L5 comprises the 5′ linker sequence, where b=0 or 1, L3 comprises the 3′ linker sequence, where d=0 or 1, G5 comprises one of the at least one nucleic acid sequences encoding a GPGPG amino acid linker (SEQ ID NO: 56), where e=0 or 1, G3 comprises one of the at least one nucleic acid sequences encoding a GPGPG amino acid linker (SEQ ID NO: 56), where g=0 or 1, U comprises one of the at least one MHC class II antigen-encoding nucleic acid sequence, where f=1, X=1 to 400, where for each X the corresponding Nc is a epitope encoding nucleic acid sequence, and Y=0, 1, or 2, where for each Y the corresponding Uf is an antigen-encoding nucleic acid sequence. In some aspects, for each X the corresponding Nc is a distinct MHC class I epitope encoding nucleic acid sequence. In some aspects, for each Y the corresponding Uf is a distinct MHC class II antigen-encoding nucleic acid sequence.

[0029] In some aspects, a=0, b=1, d=1, e=1, g=1, h=1, X=20, Y=2, the at least one promoter nucleotide sequence is a single 26S promoter nucleotide sequence provided by the backbone, the at least one polyadenylation poly(A) sequence is a poly(A) sequence of at least 100 consecutive A nucleotides (SEQ ID NO: 29358) provided by the backbone, each N encodes a MHC class I epitope 7-15 amino acids in length, L5 is a native 5′ linker sequence that encodes a native N-terminal amino acid sequence of the MHC I epitope, and wherein the 5′ linker sequence encodes a peptide that is at least 3 amino acids in length, L3 is a native 3′ linker sequence that encodes a native nucleic-terminal acid sequence of the MHC I epitope, and wherein the 3′ linker sequence encodes a peptide that is at least 3 amino acids in length, U is each of a PADRE class II sequence and a Tetanus toxoid MHC class II sequence, the vector backbone comprises a chimpanzee adenovirus vector, optionally wherein the chimpanzee adenovirus vector is a ChAdV68 vector, or an alphavirus vector, optionally wherein the alphavirus vector is a Venezuelan equine encephalitis virus vector, and, and each of the MHC class I neoantigen-encoding nucleic acid sequences encodes a polypeptide that is between 13 and 25 amino acids in length.

[0030] In some aspects, the neoantigen cassette is integrated between the at least one promoter nucleotide sequence and the at least one poly(A) sequence. In some aspects, the at least one promoter nucleotide sequence is operably linked to the neoantigen-encoding nucleic acid sequence.

[0031] In some aspects, the one or more vectors comprise one or more +-stranded RNA vectors. In some aspects, the one or more +-stranded RNA vectors comprise a 5′ 7-methylguanosine (m7g) cap. In some aspects, the one or more +-stranded RNA vectors are produced by in vitro transcription. In some aspects, the one or more vectors are self-replicating within a mammalian cell.

[0032] In some aspects, the backbone comprises at least one nucleotide sequence of an Aura virus, a Fort Morgan virus, a Venezuelan equine encephalitis virus, a Ross River virus, a Semliki Forest virus, a Sindbis virus, or a Mayaro virus. In some aspects, the backbone comprises at least one nucleotide sequence of a Venezuelan equine encephalitis virus. In some aspects, the backbone comprises at least sequences for nonstructural protein-mediated amplification, a 26S promoter sequence, a poly(A) sequence, a nonstructural protein 1 (nsP1) gene, a nsP2 gene, a nsP3 gene, and a nsP4 gene encoded by the nucleotide sequence of the Aura virus, the Fort Morgan virus, the Venezuelan equine encephalitis virus, the Ross River virus, the Semliki Forest virus, the Sindbis virus, or the Mayaro virus. In some aspects, the backbone comprises at least sequences for nonstructural protein-mediated amplification, a 26S promoter sequence, and a poly(A) sequence encoded by the nucleotide sequence of the Aura virus, the Fort Morgan virus, the Venezuelan equine encephalitis virus, the Ross River virus, the Semliki Forest virus, the Sindbis virus, or the Mayaro virus. In some aspects, sequences for nonstructural protein-mediated amplification are selected from the group consisting of: an alphavirus 5′ UTR, a 51-nt CSE, a 24-nt CSE, a 26S subgenomic promoter sequence, a 19-nt CSE, an alphavirus 3′ UTR, or combinations thereof.

[0033] In some aspects, the backbone does not encode structural virion proteins capsid, E2 and E1. In some aspects, the neoantigen cassette is inserted in place of the structural virion proteins within the nucleotide sequence of the Aura virus, the Fort Morgan virus, the Venezuelan equine encephalitis virus, the Ross River virus, the Semliki Forest virus, the Sindbis virus, or the Mayaro virus.

[0034] In some aspects, the Venezuelan equine encephalitis virus (VEE) comprises the strain TC-83. In some aspects, the Venezuelan equine encephalitis virus comprises the sequence set forth in SEQ ID NO:3 or SEQ ID NO:5. In some aspects, the Venezuelan equine encephalitis virus comprises the sequence of SEQ ID NO:3 or SEQ ID NO:5 further comprising a deletion between base pair 7544 and 11175. In some aspects, the backbone is the sequence set forth in SEQ ID NO:6 or SEQ ID NO:7. In some aspects, the neoantigen cassette is inserted to replace the deletion between base pair 7544 and 11175 set forth in the sequence of SEQ ID NO:3 or SEQ ID NO:5

[0035] In some aspects, the insertion of the neoantigen cassette provides for transcription of a polycistronic RNA comprising the nsP1-4 genes and the at least one antigen-encoding nucleic acid sequences, wherein the nsP1-4 genes and the at least one antigen-encoding nucleic acid sequences are in separate open reading frames.

[0036] In some aspects, the at least one promoter nucleotide sequence is the native 26S promoter nucleotide sequence encoded by the backbone. In some aspects, the at least one promoter nucleotide sequence is an exogenous RNA promoter. In some aspects, the second promoter nucleotide sequence is a 26S promoter nucleotide sequence. In some aspects, the second promoter nucleotide sequence comprises multiple 26S promoter nucleotide sequences, wherein each 26S promoter nucleotide sequence provides for transcription of one or more of the separate open reading frames.

[0037] In some aspects, the adenovirus vector is a chimpanzee adenovirus (ChAd) vector, optionally a C68 vector. In some aspects, the adenovirus vector comprises the sequence set forth in SEQ ID NO:1. In some aspects, the adenovirus vector comprises the sequence set forth in SEQ ID NO:1, except that the sequence is fully deleted or functionally deleted in at least one gene selected from the group consisting of the chimpanzee adenovirus E1A, E1B, E2A, E2B, E3, E4, L1, L2, L3, L4, and L5 genes of the sequence set forth in SEQ ID NO: 1, optionally wherein the sequence is fully deleted or functionally deleted in: (1) E1A and E1B; (2) E1A, E1B, and E3; or (3) E1A, E1B, E3, and E4 of the sequence set forth in SEQ ID NO: 1. In some aspects, the adenovirus vector comprises a gene or regulatory sequence obtained from the sequence of SEQ ID NO: 1, optionally wherein the gene is selected from the group consisting of the chimpanzee adenovirus inverted terminal repeat (ITR), E1A, E1B, E2A, E2B, E3, E4, L1, L2, L3, L4, and L5 genes of the sequence set forth in SEQ ID NO: 1.

[0038] In some aspects, the neoantigen cassette is inserted in the adenovirus vector at the E1 region, E3 region, and/or any deleted AdV region that allows incorporation of the neoantigen cassette.

[0039] In some aspects, the at least one promoter sequence of the adenovirus vector is inducible. In some aspects, the at least one promoter sequence of the adenovirus vector is non-inducible. In some aspects, the at least one promoter sequence of the adenovirus vector is a CMV, SV40, EF-1, RSV, PGK, or EBV promoter sequence.

[0040] In some aspects, the neoantigen cassette of the adenovirus vector further comprises at least one polyA sequence operably linked to at least one of the sequences in the plurality, optionally wherein the polyA sequence is located 3′ of the at least one sequence in the plurality.

[0041] In some aspects, the adenovirus vector is generated from one of a first generation, a second generation, or a helper-dependent adenoviral vector.

[0042] In some aspects, the adenovirus vector comprises one or more deletions between base pair number 577 and 3407 and optionally wherein the adenovirus vector further comprises one or more deletions between base pair 27,141 and 32,022 or between base pair 27,816 and 31,332 of the sequence set forth in SEQ ID NO:1. In some aspects, the adenovirus vector further comprises one or more deletions between base pair number 3957 and 10346, base pair number 21787 and 23370, and base pair number 33486 and 36193 of the sequence set forth in SEQ ID NO:1.

[0043] In some aspects, the one or more neoantigen expression vectors are each at least 300 nt in size. In some aspects, the one or more neoantigen expression vectors are each at least 1 kb in size. In some aspects, the one or more neoantigen expression vectors are each 2 kb in size. In some aspects, the one or more neoantigen expression vectors are each less than 5 kb in size.

[0044] In some aspects, at least one of the at least one neoantigen-encoding nucleic acid sequences encodes a polypeptide sequence or portion thereof that is presented by MHC class I on the tumor cell. In some aspects, each antigen-encoding nucleic acid sequence is linked directly to one another. In some aspects, at least one of the at least one antigen-encoding nucleic acid sequences is linked to a distinct antigen-encoding nucleic acid sequence with a nucleic acid sequence encoding a linker. In some aspects, the linker links two MHC class I sequences or an MHC class I sequence to an MHC class II sequence. In some aspects, the linker is selected from the group consisting of: (1) consecutive glycine residues, at least 2, 3, 4, 5, 6, 7, 8, 9, or 10 residues in length (SEQ ID NO: 29359); (2) consecutive alanine residues, at least 2, 3, 4, 5, 6, 7, 8, 9, or 10 residues in length (SEQ ID NO: 29360); (3) two arginine residues (RR); (4) alanine, alanine, tyrosine (AAY); (5) a consensus sequence at least 2, 3, 4, 5, 6, 7, 8, 9, or 10 amino acid residues in length that is processed efficiently by a mammalian proteasome; and (6) one or more native sequences flanking the antigen derived from the cognate protein of origin and that is at least 2, 3, 4, 5, 6, 7, 8, 9, 10, 11, 12, 13, 14, 15, 16, 17, 18, 19, 20, or 2-20 amino acid residues in length. In some aspects, the linker links two MHC class II sequences or an MHC class II sequence to an MHC class I sequence. In some aspects, the linker comprises the sequence GPGPG (SEQ ID NO: 56).

[0045] In some aspects, at least one sequence of the at least one antigen-encoding nucleic acid sequences is linked, operably or directly, to a separate or contiguous sequence that enhances the expression, stability, cell trafficking, processing and presentation, and/or immunogenicity of the at least one antigen-encoding nucleic acid sequences. In some aspects, the separate or contiguous sequence comprises at least one of: a ubiquitin sequence, a ubiquitin sequence modified to increase proteasome targeting (e.g., the ubiquitin sequence contains a Gly to Ala substitution at position 76), an immunoglobulin signal sequence (e.g., IgK), a major histocompatibility class I sequence, lysosomal-associated membrane protein (LAMP)-1, human dendritic cell lysosomal-associated membrane protein, and a major histocompatibility class II sequence; optionally wherein the ubiquitin sequence modified to increase proteasome targeting is A76.

[0046] In some aspects, at least one of the at least one neoantigen-encoding nucleic acid sequences encodes a polypeptide sequence or portion thereof that has increased binding affinity to its corresponding MHC allele relative to the translated, corresponding wild-type, nucleic acid sequence. In some aspects, at least one of the at least one neoantigen-encoding nucleic acid sequences in the plurality encodes a polypeptide sequence or portion thereof that has increased binding stability to its corresponding MHC allele relative to the translated, corresponding wild-type, nucleic acid sequence. In some aspects, at least one of the at least one neoantigen-encoding nucleic acid sequences in the plurality encodes a polypeptide sequence or portion thereof that has an increased likelihood of presentation on its corresponding MHC allele relative to the translated, corresponding wild-type, nucleic acid sequence.

[0047] In some aspects, at least one mutation comprises a point mutation, a frameshift mutation, a non-frameshift mutation, a deletion mutation, an insertion mutation, a splice variant, a genomic rearrangement, or a proteasome-generated spliced antigen.

[0048] In some aspects, the tumor is selected from the group consisting of: lung cancer, melanoma, breast cancer, ovarian cancer, prostate cancer, kidney cancer, gastric cancer, colon cancer, testicular cancer, head and neck cancer, pancreatic cancer, bladder cancer, brain cancer, B-cell lymphoma, acute myelogenous leukemia, adult acute lymphoblastic leukemia, chronic myelogenous leukemia, chronic lymphocytic leukemia, T cell lymphocytic leukemia, non-small cell lung cancer, and small cell lung cancer.

[0049] In some aspects, the at least one neoantigen-encoding nucleic acid sequence comprises at least 2-10, 2, 3, 4, 5, 6, 7, 8, 9, or 10 nucleic acid sequences. In some aspects, the at least one neoantigen-encoding nucleic acid sequence comprises at least 11-20, 15-20, 11-100, 11-200, 11-300, 11-400, 11, 12, 13, 14, 15, 16, 17, 18, 19, 20 or up to 400 nucleic acid sequences.

[0050] In some aspects, the at least one neoantigen-encoding nucleic acid sequence comprises at least 2-400 nucleic acid sequences and wherein at least two of the neoantigen-encoding nucleic acid sequences encode polypeptide sequences or portions thereof that are presented by MHC class I on the tumor cell surface. In some aspects, at least two of the neoantigen-encoding nucleic acid sequences encode polypeptide sequences or portions thereof that are presented by MHC class I on the tumor cell surface. In some aspects, when administered to the subject and translated, at least one of the neoantigens encoded by the at least one neoantigen-encoding nucleic acid sequence are presented on antigen presenting cells resulting in an immune response targeting at least one of the neoantigens on the tumor cell surface. In some aspects, the at least one neoantigen-encoding nucleic acid sequences when administered to the subject and translated, at least one of the MHC class I or class II neoantigens are presented on antigen presenting cells resulting in an immune response targeting at least one of the neoantigens on the tumor cell surface, and optionally wherein the expression of each of the at least one neoantigen-encoding nucleic acid sequences is driven by the at least one promoter nucleotide sequence.

[0051] In some aspects, each MHC class I neoantigen-encoding nucleic acid sequence encodes a polypeptide sequence between 8 and 35 amino acids in length, optionally 9-17, 9-25, 8, 9, 10, 11, 12, 13, 14, 15, 16, 17, 18, 19, 20, 21, 22, 23, 24, 25, 26, 27, 28, 29, 30, 31, 32, 33, 34 or 35 amino acids in length.

[0052] In some aspects, at least one MHC class II antigen-encoding nucleic acid sequence is present. In some aspects, at least one MHC class II antigen-encoding nucleic acid sequence is present and comprises at least one MHC class II neoantigen-encoding nucleic acid sequence that comprises at least one mutation that makes it distinct from the corresponding wild-type, parental nucleic acid sequence. In some aspects, the at least one MHC class II antigen-encoding nucleic acid sequence is 12-20, 12, 13, 14, 15, 16, 17, 18, 19, 20, or 20-40 amino acids in length. In some aspects, the at least one MHC class II antigen-encoding nucleic acid sequence is present and comprises at least one universal MHC class II antigen-encoding nucleic acid sequence, optionally wherein the at least one universal sequence comprises at least one of Tetanus toxoid and PADRE.

[0053] In some aspects, the at least one promoter nucleotide sequence or the second promoter nucleotide sequence is inducible. In some aspects, the at least one promoter nucleotide sequence or the second promoter nucleotide sequence is non-inducible.

[0054] In some aspects, the at least one poly(A) sequence comprises a poly(A) sequence native to the backbone. In some aspects, the at least one poly(A) sequence comprises a poly(A) sequence exogenous to the backbone. In some aspects, the at least one poly(A) sequence is operably linked to at least one of the at least one antigen-encoding nucleic acid sequences. In some aspects, the at least one poly(A) sequence is at least 20, at least 30, at least 40, at least 50, at least 60, at least 70, at least 80, or at least 90 consecutive A nucleotides (SEQ ID NO: 29361). In some aspects, the at least one poly(A) sequence is at least 100 consecutive A nucleotides (SEQ ID NO: 29358).

[0055] In some aspects, the neoantigen cassette further comprises at least one of: an intron sequence, a woodchuck hepatitis virus posttranscriptional regulatory element (WPRE) sequence, an internal ribosome entry sequence (IRES) sequence, a nucleotide sequence encoding a 2A self cleaving peptide sequence, a nucleotide sequence encoding a Furin cleavage site, or a sequence in the 5′ or 3′ non-coding region known to enhance the nuclear export, stability, or translation efficiency of mRNA that is operably linked to at least one of the at least one antigen-encoding nucleic acid sequences.

[0056] In some aspects, the neoantigen cassette further comprises a reporter gene, including but not limited to, green fluorescent protein (GFP), a GFP variant, secreted alkaline phosphatase, luciferase, a luciferase variant, or a detectable peptide or epitope. In some aspects, the detectable peptide or epitope is selected from the group consisting of an HA tag, a Flag tag, a His-tag, or a V5 tag.

[0057] In some aspects, the one or more vectors further comprise one or more nucleic acid sequences encoding at least one immune modulator. In some aspects, the immune modulator is an anti-CTLA4 antibody or an antigen-binding fragment thereof, an anti-PD-1 antibody or an antigen-binding fragment thereof, an anti-PD-L1 antibody or an antigen-binding fragment thereof, an anti-4-1BB antibody or an antigen-binding fragment thereof, or an anti-OX-40 antibody or an antigen-binding fragment thereof. In some aspects, the antibody or antigen-binding fragment thereof is a Fab fragment, a Fab′ fragment, a single chain Fv (scFv), a single domain antibody (sdAb) either as single specific or multiple specificities linked together (e.g., camelid antibody domains), or full-length single-chain antibody (e.g., full-length IgG with heavy and light chains linked by a flexible linker). In some aspects, the heavy and light chain sequences of the antibody are a contiguous sequence separated by either a self-cleaving sequence such as 2A or IRES; or the heavy and light chain sequences of the antibody are linked by a flexible linker such as consecutive glycine residues.

[0058] In some aspects, the immune modulator is a cytokine. In some aspects, the cytokine is at least one of IL-2, IL-7, IL-12, IL-15, or IL-21 or variants thereof of each.

[0059] In some aspects, the at least one MHC class I neoantigen-encoding nucleic acid sequence is selected by performing the steps of: (a) obtaining at least one of exome, transcriptome, or whole genome tumor nucleotide sequencing data from the tumor, wherein the tumor nucleotide sequencing data is used to obtain data representing peptide sequences of each of a set of neoantigens; (b) inputting the peptide sequence of each neoantigen into a presentation model to generate a set of numerical likelihoods that each of the neoantigens is presented by one or more of the MHC alleles on the tumor cell surface of the tumor, the set of numerical likelihoods having been identified at least based on received mass spectrometry data; and (c) selecting a subset of the set of neoantigens based on the set of numerical likelihoods to generate a set of selected neoantigens which are used to generate the at least one MHC class I neoantigen-encoding nucleic acid sequence.

[0060] In some aspects, each of the at least one MHC class I neoantigen-encoding nucleic acid sequence is selected by performing the steps of: (a) obtaining at least one of exome, transcriptome, or whole genome tumor nucleotide sequencing data from the tumor, wherein the tumor nucleotide sequencing data is used to obtain data representing peptide sequences of each of a set of neoantigens; (b) inputting the peptide sequence of each neoantigen into a presentation model to generate a set of numerical likelihoods that each of the neoantigens is presented by one or more of the MHC alleles on the tumor cell surface of the tumor, the set of numerical likelihoods having been identified at least based on received mass spectrometry data; and (c) selecting a subset of the set of neoantigens based on the set of numerical likelihoods to generate a set of selected neoantigens which are used to generate the at least one MHC class I neoantigen-encoding nucleic acid sequence.

[0061] In some aspects, a number of the set of selected neoantigens is 2-20.

[0062] In some aspects, the presentation model represents dependence between: presence of a pair of a particular one of the MHC alleles and a particular amino acid at a particular position of a peptide sequence; and likelihood of presentation on the tumor cell surface, by the particular one of the MHC alleles of the pair, of such a peptide sequence comprising the particular amino acid at the particular position.

[0063] In some aspects, selecting the set of selected neoantigens comprises selecting neoantigens that have an increased likelihood of being presented on the tumor cell surface relative to unselected neoantigens based on the presentation model. In some aspects, the selected antigens have been validated as being presented by one or more specific HLA alleles. In some aspects, selecting the set of selected neoantigens comprises selecting neoantigens that have an increased likelihood of being capable of inducing a tumor-specific immune response in the subject relative to unselected neoantigens based on the presentation model. In some aspects, selecting the set of selected neoantigens comprises selecting neoantigens that have an increased likelihood of being capable of being presented to naïve T cells by professional antigen presenting cells (APCs) relative to unselected neoantigens based on the presentation model, optionally wherein the APC is a dendritic cell (DC). In some aspects, selecting the set of selected neoantigens comprises selecting neoantigens that have a decreased likelihood of being subject to inhibition via central or peripheral tolerance relative to unselected neoantigens based on the presentation model. In some aspects, selecting the set of selected neoantigens comprises selecting neoantigens that have a decreased likelihood of being capable of inducing an autoimmune response to normal tissue in the subject relative to unselected neoantigens based on the presentation model. In some aspects, exome or transcriptome nucleotide sequencing data is obtained by performing sequencing on the tumor tissue. In some aspects, the sequencing is next generation sequencing (NGS) or any massively parallel sequencing approach.

[0064] In some aspects, the neoantigen cassette comprises junctional epitope sequences formed by adjacent sequences in the neoantigen cassette. In some aspects, at least one or each junctional epitope sequence has an affinity of greater than 500 nM for MHC. In some aspects, each junctional epitope sequence is non-self. In some aspects, each of the MHC class I epitopes is predicted or validated to be capable of presentation by at least one HLA allele present in at least 5% of a population. In some aspects, each of the MHC class I epitopes is predicted or validated to be capable of presentation by at least one HLA allele, wherein each antigen/HLA pair has an antigen/HLA prevalence of at least 0.01% in a population. In some aspects, each of the MHC class I epitopes is predicted or validated to be capable of presentation by at least one HLA allele, wherein each antigen/HLA pair has an antigen/HLA prevalence of at least 0.1% in a population. In some aspects, the neoantigen cassette does not encode a non-therapeutic MHC class I or class II epitope nucleic acid sequence comprising a translated, wild-type nucleic acid sequence, wherein the non-therapeutic epitope is predicted to be displayed on an MHC allele of the subject. In some aspects, the non-therapeutic predicted MHC class I or class II epitope sequence is a junctional epitope sequence formed by adjacent sequences in the neoantigen cassette. In some aspects, the prediction is based on presentation likelihoods generated by inputting sequences of the non-therapeutic epitopes into a presentation model. In some aspects, an order of the at least one antigen-encoding nucleic acid sequences in the neoantigen cassette is determined by a series of steps comprising: (a) generating a set of candidate neoantigen cassette sequences corresponding to different orders of the at least one antigen-encoding nucleic acid sequences; (b) determining, for each candidate neoantigen cassette sequence, a presentation score based on presentation of non-therapeutic epitopes in the candidate neoantigen cassette sequence; and (c) selecting a candidate cassette sequence associated with a presentation score below a predetermined threshold as the neoantigen cassette sequence for a neoantigen vaccine.

[0065] In some aspects, any of the above compositions further comprise a nanoparticulate delivery vehicle. The nanoparticulate delivery vehicle, in some aspects, may be a lipid nanoparticle (LNP). In some aspects, the LNP comprises ionizable amino lipids. In some aspects, the ionizable amino lipids comprise MC3-like (dilinoleylmethyl-4-dimethylaminobutyrate) molecules. In some aspects, the nanoparticulate delivery vehicle encapsulates the neoantigen expression system.

[0066] In some aspects, any of the above compositions further comprise a plurality of LNPs, wherein the LNPs comprise: the neoantigen expression system; a cationic lipid; a non-cationic lipid; and a conjugated lipid that inhibits aggregation of the LNPs, wherein at least about 95% of the LNPs in the plurality of LNPs either: have a non-lamellar morphology; or are electron-dense.

[0067] In some aspects, the non-cationic lipid is a mixture of (1) a phospholipid and (2) cholesterol or a cholesterol derivative.

[0068] In some aspects, the conjugated lipid that inhibits aggregation of the LNPs is a polyethyleneglycol (PEG)-lipid conjugate. In some aspects, the PEG-lipid conjugate is selected from the group consisting of: a PEG-diacylglycerol (PEG-DAG) conjugate, a PEG dialkyloxypropyl (PEG-DAA) conjugate, a PEG-phospholipid conjugate, a PEG-ceramide (PEG-Cer) conjugate, and a mixture thereof. In some aspects the PEG-DAA conjugate is a member selected from the group consisting of: a PEG-didecyloxypropyl (C₁₀) conjugate, a PEG-dilauryloxypropyl (C₁₂) conjugate, a PEG-dimyristyloxypropyl (C₁₄) conjugate, a PEG-dipalmityloxypropyl (C₁₆) conjugate, a PEG-distearyloxypropyl (C₁₈) conjugate, and a mixture thereof.

[0069] In some aspects, the neoantigen expression system is fully encapsulated in the LNPs.

[0070] In some aspects, the non-lamellar morphology of the LNPs comprises an inverse hexagonal (H_{II}) or cubic phase structure.

[0071] In some aspects, the cationic lipid comprises from about 10 mol % to about 50 mol % of the total lipid present in the LNPs. In some aspects, the cationic lipid comprises from about 20 mol % to about 50 mol % of the total lipid present in the LNPs. In some aspects, the cationic lipid comprises from about 20 mol % to about 40 mol % of the total lipid present in the LNPs.

[0072] In some aspects, the non-cationic lipid comprises from about 10 mol % to about 60 mol % of the total lipid present in the LNPs. In some aspects, the non-cationic lipid comprises from about 20 mol % to about 55 mol % of the total lipid present in the LNPs. In some aspects, the non-cationic lipid comprises from about 25 mol % to about 50 mol % of the total lipid present in the LNPs.

[0073] In some aspects, the conjugated lipid comprises from about 0.5 mol % to about 20 mol % of the total lipid present in the LNPs. In some aspects, the conjugated lipid comprises from about 2 mol % to about 20 mol % of the total lipid present in the LNPs. In some aspects, the conjugated lipid comprises from about 1.5 mol % to about 18 mol % of the total lipid present in the LNPs.

[0074] In some aspects, greater than 95% of the LNPs have a non-lamellar morphology. In some aspects, greater than 95% of the LNPs are electron dense.

[0075] In some aspects, any of the above compositions further comprise a plurality of LNPs, wherein the LNPs comprise: a cationic lipid comprising from 50 mol % to 65 mol % of the total lipid present in the LNPs; a conjugated lipid that inhibits aggregation of LNPs comprising from 0.5 mol % to 2 mol % of the total lipid present in the LNPs; and a non-cationic lipid comprising either: a mixture of a phospholipid and cholesterol or a derivative thereof, wherein the phospholipid comprises from 4 mol % to 10 mol % of the total lipid present in the LNPs and the cholesterol or derivative thereof comprises from 30 mol % to 40 mol % of the total lipid present in the LNPs; a mixture of a phospholipid and cholesterol or a derivative thereof, wherein the phospholipid comprises from 3 mol % to 15 mol % of the total lipid present in the LNPs and the cholesterol or derivative thereof comprises from 30 mol % to 40 mol % of the total lipid present in the LNPs; or up to 49.5 mol % of the total lipid present in the LNPs and comprising a mixture of a phospholipid and cholesterol or a derivative thereof, wherein the cholesterol or derivative thereof comprises from 30 mol % to 40 mol % of the total lipid present in the LNPs.

[0076] In some aspects, any of the above compositions further comprise a plurality of LNPs, wherein the LNPs comprise: a cationic lipid comprising from 50 mol % to 85 mol % of the total lipid present in the LNPs; a conjugated lipid that inhibits aggregation of LNPs comprising from 0.5 mol % to 2 mol % of the total lipid present in the LNPs; and a non-cationic lipid comprising from 13 mol % to 49.5 mol % of the total lipid present in the LNPs.

[0077] In some aspects, the phospholipid comprises dipalmitoylphosphatidylcholine (DPPC), distearoylphosphatidylcholine (DSPC), or a mixture thereof.

[0078] In some aspects, the conjugated lipid comprises a polyethyleneglycol (PEG)-lipid conjugate. In some aspects, the PEG-lipid conjugate comprises a PEG-diacylglycerol (PEG-DAG) conjugate, a PEG-dialkyloxypropyl (PEG-DAA) conjugate, or a mixture thereof. In some aspects, the PEG-DAA conjugate comprises a PEG-dimyristyloxypropyl (PEG-DMA) conjugate, a PEG-distearyloxypropyl (PEG-DSA) conjugate, or a mixture thereof. In some aspects, the PEG portion of the conjugate has an average molecular weight of about 2,000 daltons.

[0079] In some aspects, the conjugated lipid comprises from 1 mol % to 2 mol % of the total lipid present in the LNPs.

[0080] In some aspects, the LNP comprises a compound having a structure of Formula I:

[chemical structure]

[0081] or a pharmaceutically acceptable salt, tautomer, prodrug or stereoisomer thereof, wherein: L¹ and L² are each independently -0(C=0)-, —(C=0)0-, —C(=0)-, —0-, —S(0)ₓ—, —S—S—, —C(=0)S—, —SC(=0)-, —R^{a}C(=0)-, —C(=0) R^{a}—, —R^{a}C(=0) R^{a}—, —OC(=0)R^{a}—, —R^{a}C(=0)0- or a direct bond; G¹ is Ci-C₂ alkylene, —(C=0)-, -0(C=0)-, —SC(=0)-, —R^{a}C(=0)- or a direct bond: —C(=0)-, —(C=0)0-, —C(=0)S—, —C(=0) R^{a}— or a direct bond; G is Ci-C₆ alkylene; R^{a} is H or C1-C12 alkyl; R^{1a} and R^{1b} are, at each occurrence, independently either: (a) H or C₁-C₁₂ alkyl; or (b) R^{1a} is H or C₁-C₁₂ alkyl, and R^{1b} together with the carbon atom to which it is bound is taken together with an adjacent R^{1b} and the carbon atom to which it is bound to form a carbon-carbon double bond; R^{2a} and R^{2b} are, at each occurrence, independently either: (a) H or C₁-C₁₂ alkyl; or (b) R^{2a} is H or C₁-C₁₂ alkyl, and R^{2b} together with the carbon atom to which it is bound is taken together with an adjacent R^{2b} and the carbon atom to which it is bound to form a carbon-carbon double bond; R^{3a} and R^{3b} are, at each occurrence, independently either (a): H or C₁-C₁₂ alkyl; or (b) R^{3a} is H or C₁-C₁₂ alkyl, and R^{3b} together with the carbon atom to which it is bound is taken together with an adjacent R and the carbon atom to which it is bound to form a carbon-carbon double bond; R^{4a} and R^{4b} are, at each occurrence, independently either: (a) H or C1-C12 alkyl; or (b) R^{4a} is H or C1-C12 alkyl, and R^{4b} together with the carbon atom to which it is bound is taken together with an adjacent R^{4b} and the carbon atom to which it is bound to form a carbon-carbon double bond; R⁵ and R⁶ are each independently H or methyl; R⁷ is C4-C20 alkyl; R⁸ and R⁹ are each independently C1-C12 alkyl; or R⁸ and R⁹, together with the nitrogen atom to which they are attached, form a 5, 6 or 7-membered heterocyclic ring; a, b, c and d are each independently an integer from 1 to 24; and x is 0, 1 or 2.

[0082] In some aspects, the LNP comprises a compound having a structure of Formula II:

[chemical structure]

or a pharmaceutically acceptable salt, tautomer, prodrug or stereoisomer thereof, wherein: L¹ and L² are each independently -0(C=0)-, —(C=0)0- or a carbon-carbon double bond; R^{1a} and R^{1b} are, at each occurrence, independently either (a) H or C₁-C₁₂ alkyl, or (b) R^{1a} is H or C₁-C₁₂ alkyl, and R^{1b} together with the carbon atom to which it is bound is taken together with an adjacent R^{1b} and the carbon atom to which it is bound to form a carbon-carbon double bond; R^{2a} and R^{2b} are, at each occurrence, independently either (a) H or C₁-C₁₂ alkyl, or (b) R^{2a} is H or C₁-C₁₂ alkyl, and R^{2b} together with the carbon atom to which it is bound is taken together with an adjacent R^{2b} and the carbon atom to which it is bound to form a carbon-carbon double bond; R^{3a} and R^{3b} are, at each occurrence, independently either (a) H or C₁-C₁₂ alkyl, or (b) R^{3a} is H or C₁-C₁₂ alkyl, and R^{3b} together with the carbon atom to which it is bound is taken together with an adjacent R^{3b} and the carbon atom to which it is bound to form a carbon-carbon double bond; R^{4a} and R^{4b} are, at each occurrence, independently either (a) H or C₁-C₁₂ alkyl, or (b) R^{4a} is H or C₁-C₁₂ alkyl, and R^{4b} together with the carbon atom to which it is bound is taken together with an adjacent R^{4b} and the carbon atom to which it is bound to form a carbon-carbon double bond; R⁵ and R⁶ are each independently methyl or cycloalkyl; R⁷ is, at each occurrence, independently H or C₁-C₁₂ alkyl; R⁸ and R⁹ are each independently unsubstituted C1-C12 alkyl; or R⁸ and R⁹, together with the nitrogen atom to which they are attached, form a 5, 6 or 7-membered heterocyclic ring comprising one nitrogen atom; a and d are each independently an integer from 0 to 24; b and c are each independently an integer from 1 to 24; and e is 1 or 2, provided that: at least one of R^{1a}, R^{2a}, R^{3a} or R^{4a} is C1-C12 alkyl, or at least one of L¹ or L² is -0(C=0)- or —(C=0)0-; and R^{1a} and R^{1b} are not isopropyl when a is 6 or n-butyl when a is 8.

[0083] In some aspects, any of the above compositions further comprise one or more excipients comprising a neutral lipid, a steroid, and a polymer conjugated lipid. In some aspects, the neutral lipid comprises at least one of 1,2-Distearoyl-sn-glycero-3-phosphocholine (DSPC), 1,2-Dipalmitoyl-sn-glycero-3-phosphocholine (DPPC), 1,2-Dimyristoyl-sn-glycero-3-phosphocholine (DMPC), 1-Palmitoyl-2-oleoyl-sn-glycero-3-phosphocholine (POPC), 1,2-dioleoyl-sn-glycero-3-phosphocholine (DOPC), and 1,2-Dioleoyl-sn-glycero-3-phosphoethanolamine (DOPE). In some aspects, the neutral lipid is DSPC.

[0084] In some aspects, the molar ratio of the compound to the neutral lipid ranges from about 2:1 to about 8:1.

[0085] In some aspects, the steroid is cholesterol. In some aspects, the molar ratio of the compound to cholesterol ranges from about 2:1 to 1:1.

[0086] In some aspects, the polymer conjugated lipid is a pegylated lipid. In some aspects, the molar ratio of the compound to the pegylated lipid ranges from about 100:1 to about 25:1. In some aspects, the pegylated lipid is PEG-DAG, a PEG polyethylene (PEG-PE), a PEG-succinoyl-diacylglycerol (PEG-S-DAG), PEG-cer or a PEG dialkyoxypropylcarbamate. In some aspects, the pegylated lipid has the following structure III:

[chemical structure]

or a pharmaceutically acceptable salt, tautomer or stereoisomer thereof, wherein: R¹⁰ and R¹¹ are each independently a straight or branched, saturated or unsaturated alkyl chain containing from 10 to 30 carbon atoms, wherein the alkyl chain is optionally interrupted by one or more ester bonds; and z has a mean value ranging from 30 to 60. In some aspects, R¹⁰ and R¹¹ are each independently straight, saturated alkyl chains having 12 to 16 carbon atoms. In some aspects, the average z is about 45.

[0087] In some aspects, the LNP self-assembles into non-bilayer structures when mixed with polyanionic nucleic acid. In some aspects, the non-bilayer structures have a diameter between 60 nm and 120 nm. In some aspects, the non-bilayer structures have a diameter of about 70 nm, about 80 nm, about 90 nm, or about 100 nm. In some aspects, wherein the nanoparticulate delivery vehicle has a diameter of about 100 nm.

[0088] Also disclosed herein is a pharmaceutical composition comprising any of the compositions disclosed herein (such as an alphavirus-based or ChAd-based vector disclosed herein) and a pharmaceutically acceptable carrier. In some aspects, the pharmaceutical composition further comprises an adjuvant. In some aspects, the pharmaceutical composition further comprises an immune modulator. In some aspects, the immune modulator is an anti-CTLA4 antibody or an antigen-binding fragment thereof, an anti-PD-1 antibody or an antigen-binding fragment thereof, an anti-PD-L1 antibody or an antigen-binding fragment thereof, an anti-4-1BB antibody or an antigen-binding fragment thereof, or an anti-OX-40 antibody or an antigen-binding fragment thereof.

[0089] Also disclosed herein is an isolated nucleotide sequence or set of isolated nucleotide sequences comprising the neoantigen cassette of any of the above composition claims and one or more elements obtained from the sequence of SEQ ID NO:3 or SEQ ID NO:5, optionally wherein the one or more elements are selected from the group consisting of the sequences necessary for nonstructural protein-mediated amplification, the 26S promoter nucleotide sequence, the poly(A) sequence, and the nsP1-4 genes of the sequence set forth in SEQ ID NO:3 or SEQ ID NO:5, and optionally wherein the nucleotide sequence is cDNA. In some aspects, the sequence or set of isolated nucleotide sequences comprises a neoantigen cassette disclosed herein inserted at position 7544 of the sequence set forth in SEQ ID NO:6 or SEQ ID NO:7. In some aspects, the isolated nucleotide sequence further comprises a T7 or SP6 RNA polymerase promoter nucleotide sequence 5′ of the one or more elements obtained from the sequence of SEQ ID NO:3 or SEQ ID NO:5, and optionally one or more restriction sites 3′ of the poly(A) sequence. In some aspects, the the neoantigen cassette disclosed herein is inserted at position 7563 of SEQ ID NO:8 or SEQ ID NO:9. In another aspect, the sequences set forth in SEQ ID NO:8 or SEQ ID NO:9 further comprise an additional adenine nucleotide inserted at position 17.

[0090] Also disclosed herein is an isolated nucleotide sequence comprising a neoantigen cassette disclosed herein and at least one promoter disclosed herein. In some aspects, the isolated nucleotide sequence further comprises a ChAd-based gene. In some aspects, the ChAd-based gene is obtained from the sequence of SEQ ID NO: 1, optionally wherein the gene is selected from the group consisting of the chimpanzee adenovirus ITR, E1A, E1B, E2A, E2B, E3, E4, L1, L2, L3, L4, and L5 genes of the sequence set forth in SEQ ID NO: 1, and optionally wherein the nucleotide sequence is cDNA.

[0091] Also disclosed herein is an isolated cell comprising an isolated nucleotide sequence disclosed herein, optionally wherein the cell is a BHK-21, CHO, HEK293 or variants thereof, 911, HeLa, A549, LP-293, PER.C6, or AE1-2a cell.

[0092] Also disclosed herein is a vector comprising an isolated nucleotide sequence disclosed herein.

[0093] Also disclosed herein is a kit comprising a vector or a composition disclosed herein and instructions for use.

[0094] Also disclosed herein is a method for treating a subject with cancer, the method comprising administering to the subject a vector disclosed herein or a pharmaceutical composition disclosed herein. In some aspects, the at least one MHC class I neoantigen-encoding nucleic acid sequence is derived from the tumor of the subject with cancer. In some aspects, the at least one MHC class I neoantigen-encoding nucleic acid sequence are not derived from the tumor of the subject with cancer.

[0095] Also disclosed herein is a method for inducing an immune response in a subject, the method comprising administering to the subject any of the compositions, vectors, or pharmaceutical compositions described herein. In some aspects, the subject expresses at least one HLA allele predicted or known to present the MHC class I epitope. In some aspects, the subject expresses at least one HLA allele predicted or known to present the MHC class I epitope, and wherein the MHC class I epitope comprises a mutation selected from the group consisting of mutations referred to in Table 34. In some aspects, the subject express at least one HLA allele predicted or known to present the MHC class I epitope, and wherein the MHC class I epitope comprises a mutation selected from the group consisting of mutations referred to in Table 32.

[0096] In some aspects, the vector or composition is administered intramuscularly (IM), intradermally (ID), or subcutaneously (SC), or intravenously (IV).

[0097] In some aspects, the methods described herein further comprise administration of one or more immune modulators, optionally wherein the immune modulator is administered before, concurrently with, or after administration of the composition or pharmaceutical composition. In some aspects, the one or more immune modulators are selected from the group consisting of: an anti-CTLA4 antibody or an antigen-binding fragment thereof, an anti-PD-1 antibody or an antigen-binding fragment thereof, an anti-PD-L1 antibody or an antigen-binding fragment thereof, an anti-4-1BB antibody or an antigen-binding fragment thereof, or an anti-OX-40 antibody or an antigen-binding fragment thereof. In some aspects, the immune modulator is administered intravenously (IV), intramuscularly (IM), intradermally (ID), or subcutaneously (SC). In some aspects, the subcutaneous administration is near the site of the composition or pharmaceutical composition administration or in close proximity to one or more vector or composition draining lymph nodes.

[0098] In some aspects, the methods described herein further comprise administering to the subject a second vaccine composition. In some aspects, the second vaccine composition is administered prior to the administration of the composition or the pharmaceutical composition described above. In some aspects, the second vaccine composition is administered subsequent to the administration of the composition or the pharmaceutical compositions described above. In some aspects, the second vaccine composition is the same as the composition or the pharmaceutical compositions described above. In some aspects, the second vaccine composition is different from the composition or the pharmaceutical compositions described above. In some aspects, the second vaccine composition comprises a chimpanzee adenovirus vector encoding at least one antigen-encoding nucleic acid sequence. In some aspects, the at least one antigen-encoding nucleic acid sequence encoded by the chimpanzee adenovirus vector is the same as the at least one antigen-encoding nucleic acid sequence of any of the above compositions or vectors.

[0099] Also disclosed herein is a method of manufacturing the one or more vectors of any of the above compositions, the method comprising: obtaining a linearized DNA sequence comprising the backbone and the neoantigen cassette; in vitro transcribing the linearized DNA sequence by addition of the linearized DNA sequence to a in vitro transcription reaction containing all the necessary components to transcribe the linearized DNA sequence into RNA, optionally further comprising in vitro addition of the m7g cap to the resulting RNA; and isolating the one or more vectors from the in vitro transcription reaction. In some aspects, the linearized DNA sequence is generated by linearizing a DNA plasmid sequence or by amplification using PCR. In some aspects, the DNA plasmid sequence is generated using one of bacterial recombination or full genome DNA synthesis or full genome DNA synthesis with amplification of synthesized DNA in bacterial cells. In some aspects, the isolating the one or more vectors from the in vitro transcription reaction involves one or more of phenol chloroform extraction, silica column based purification, or similar RNA purification methods.

[0100] Also disclosed herein is a method of manufacturing any of the compositions disclosed herein, the method comprising: providing components for the nanoparticulate delivery vehicle; providing the neoantigen expression system; and providing conditions sufficient for the nanoparticulate delivery vehicle and the neoantigen expression system to produce the composition for delivery of the neoantigen expression system. In some aspects, the conditions are provided by microfluidic mixing.

[0101] Also disclosed herein is a method of manufacturing a adenovirus vector disclosed herein, the method comprising: obtaining a plasmid sequence comprising the at least one promoter sequence and the neoantigen cassette; transfecting the plasmid sequence into one or more host cells; and isolating the adenovirus vector from the one or more host cells.

[0102] In some aspects, isolating comprises: lysing the host cell to obtain a cell lysate comprising the adenovirus vector; and purifying the adenovirus vector from the cell lysate.

[0103] In some aspects, the plasmid sequence is generated using one of bacterial recombination or full genome DNA synthesis or full genome DNA synthesis with amplification of synthesized DNA in bacterial cells. In some aspects, the one or more host cells are at least one of CHO, HEK293 or variants thereof, 911, HeLa, A549, LP-293, PER.C6, and AE1-2a cells. In some aspects, purifying the adenovirus vector from the cell lysate involves one or more of chromatographic separation, centrifugation, virus precipitation, and filtration.

### BRIEF DESCRIPTION OF THE SEVERAL VIEWS OF THE DRAWINGS

[0104] These and other features, aspects, and advantages of the present invention will become better understood with regard to the following description, and accompanying drawings, where:

[0105] FIG. 1 illustrates development of an in vitro T cell activation assay. Schematic of the assay in which the delivery of a vaccine cassette to antigen presenting cells, leads to expression, processing and MHC-restricted presentation of distinct peptide antigens. Reporter T cells engineered with T cell receptors that match the specific peptide-MHC combination become activated resulting in luciferase expression.

[0106] FIG. 2A illustrates evaluation of linker sequences in short cassettes and shows five class I MHC restricted epitopes (epitopes 1 through 5) concatenated in the same position relative to each other followed by two universal class II MHC epitopes (MHC-II). Various iterations were generated using different linkers. In some cases the T cell epitopes are directly linked to each other. In others, the T cell epitopes are flanked on one or both sides by its natural sequence. In other iterations, the T cell epitopes are linked by the non-natural sequences AAY, RR, and DPP.

[0107] FIG. 2B illustrates evaluation of linker sequences in short cassettes and shows sequence information on the T cell epitopes embedded in the short cassettes. Figure discloses SEQ ID NOS 29365-29366, 29369, 29368, 29367, and 29494-29495, respectively, in order of appearance.

[0108] FIG. 3 illustrates evaluation of cellular targeting sequences added to model vaccine cassettes. The targeting cassettes extend the short cassette designs with ubiquitin (Ub), signal peptides (SP) and/or transmembrane (TM) domains, feature next to the five marker human T cell epitopes (epitopes 1 through 5) also two mouse T cell epitopes SIINFEKL (SEQ ID NO: 29362) (SII) and SPSYAYHQF (SEQ ID NO: 29363) (A5), and use either the non natural linker AAY- or natural linkers flanking the T cell epitopes on both sides (25mer).

[0109] FIG. 4 illustrates in vivo evaluation of linker sequences in short cassettes. A) Experimental design of the in vivo evaluation of vaccine cassettes using HLA-A2 transgenic mice.

[0110] FIG. 5A illustrates in vivo evaluation of the impact of epitope position in long 21-mer cassettes and shows the design of long cassettes entails five marker class I epitopes (epitopes 1 through 5) contained in their 25-mer natural sequence (linker=natural flanking sequences), spaced with additional well-known T cell class I epitopes (epitopes 6 through 21) contained in their 25-mer natural sequence, and two universal class II epitopes (MHC-II0, with only the relative position of the class I epitopes varied.

[0111] FIG. 5B illustrates in vivo evaluation of the impact of epitope position in long 21-mer cassettes and shows the sequence information on the T cell epitopes used. Figure discloses SEQ ID NOS 29365-29366, 29369, 29368, 29367, 29496-29498, 29370, and 29499-29510, respectively, in order of appearance.

[0112] FIG. 6A illustrates final cassette design for preclinical IND-enabling studies and shows the design of the final cassettes comprises 20 MHC I epitopes contained in their 25-mer natural sequence (linker=natural flanking sequences), composed of 6 non-human primate (NHP) epitopes, 5 human epitopes, 9 murine epitopes, as well as 2 universal MHC class II epitopes.

[0113] FIG. 6B illustrates final cassette design for preclinical IND-enabling studies and shows the sequence information for the T cell epitopes used that are presented on class I MHC of non-human primate, mouse and human origin, as well as sequences of 2 universal MHC class II epitopes PADRE and Tetanus toxoid. Figure discloses SEQ ID NOS 29426-29431, 29362-29363, 29456, 29511, 29460-29462, 29458-29459, 29367-29369, 29365-29366, 29494, and 29512, respectively, in order of appearance.

[0114] FIG. 7A illustrates ChAdV68.4WTnt.GFP virus production after transfection. HEK293A cells were transfected with ChAdV68.4WTnt.GFP DNA using the calcium phosphate protocol. Viral replication was observed 10 days after transfection and ChAdV68.4WTnt.GFP viral plaques were visualized using light microscopy (40× magnification).

[0115] FIG. 7B illustrates ChAdV68.4WTnt.GFP virus production after transfection. HEK293A cells were transfected with ChAdV68.4WTnt.GFP DNA using the calcium phosphate protocol. Viral replication was observed 10 days after transfection and ChAdV68.4WTnt.GFP viral plaques were visualized using fluorescent microscopy at 40× magnification.

[0116] FIG. 7C illustrates ChAdV68.4WTnt.GFP virus production after transfection. HEK293A cells were transfected with ChAdV68.4WTnt.GFP DNA using the calcium phosphate protocol. Viral replication was observed 10 days after transfection and ChAdV68.4WTnt.GFP viral plaques were visualized using fluorescent microscopy at 100× magnification.

[0117] FIG. 8A illustrates ChAdV68.5WTnt.GFP virus production after transfection. HEK293A cells were transfected with ChAdV68.5WTnt.GFP DNA using the lipofectamine protocol. Viral replication (plaques) was observed 10 days after transfection. A lysate was made and used to reinfect a T25 flask of 293A cells. ChAdV68.5WTnt.GFP viral plaques were visualized and photographed 3 days later using light microscopy (40× magnification)

[0118] FIG. 8B illustrates ChAdV68.5WTnt.GFP virus production after transfection. HEK293A cells were transfected with ChAdV68.5WTnt.GFP DNA using the lipofectamine protocol. Viral replication (plaques) was observed 10 days after transfection. A lysate was made and used to reinfect a T25 flask of 293A cells. ChAdV68.5WTnt.GFP viral plaques were visualized and photographed 3 days later using fluorescent microscopy at 40× magnification.

[0119] FIG. 8C illustrates ChAdV68.5WTnt.GFP virus production after transfection. HEK293A cells were transfected with ChAdV68.5WTnt.GFP DNA using the lipofectamine protocol. Viral replication (plaques) was observed 10 days after transfection. A lysate was made and used to reinfect a T25 flask of 293A cells. ChAdV68.5WTnt.GFP viral plaques were visualized and photographed 3 days later using fluorescent microscopy at 100× magnification.

[0120] FIG. 9 illustrates the viral particle production scheme.

[0121] FIG. 10 illustrates the alphavirus derived VEE self-replicating RNA (srRNA) vector.

[0122] FIG. 11 illustrates in vivo reporter expression after inoculation of C57BL/6J mice with VEE-Luciferase srRNA. Shown are representative images of luciferase signal following immunization of C57BL/6J mice with VEE-Luciferase srRNA (10 ug per mouse, bilateral intramuscular injection, MC3 encapsulated) at various timepoints.

[0123] FIG. 12A illustrates T-cell responses measured 14 days after immunization with VEE srRNA formulated with MC3 LNP in B16-OVA tumor bearing mice. B16-OVA tumor bearing C57BL/6J mice were injected with 10 ug of VEE-Luciferase srRNA (control), VEE-UbAAY srRNA (Vax), VEE-Luciferase srRNA and anti-CTLA-4 (aCTLA-4) or VEE-UbAAY srRNA and anti-CTLA-4 (Vax+aCTLA-4). In addition, all mice were treated with anti-PD1 mAb starting at day 7. Each group consisted of 8 mice. Mice were sacrificed and spleens and lymph nodes were collected 14 days after immunization. SIINFEKL (SEQ ID NO: 29362)-specific T-cell responses were assessed by IFN-gamma ELISPOT and are reported as spot-forming cells (SFC) per 106 splenocytes. Lines represent medians.

[0124] FIG. 12B illustrates T-cell responses measured 14 days after immunization with VEE srRNA formulated with MC3 LNP in B16-OVA tumor bearing mice. B16-OVA tumor bearing C57BL/6J mice were injected with 10 ug of VEE-Luciferase srRNA (control), VEE-UbAAY srRNA (Vax), VEE-Luciferase srRNA and anti-CTLA-4 (aCTLA-4) or VEE-UbAAY srRNA and anti-CTLA-4 (Vax+aCTLA-4). In addition, all mice were treated with anti-PD1 mAb starting at day 7. Each group consisted of 8 mice. Mice were sacrificed and spleens and lymph nodes were collected 14 days after immunization. SIINFEKL (SEQ ID NO: 29362)-specific T-cell responses were assessed by MHCI-pentamer staining, reported as pentamer positive cells as a percent of CD8 positive cells. Lines represent medians.

[0125] FIG. 13A illustrates antigen-specific T-cell responses following heterologous prime/boost in B16-OVA tumor bearing mice. B16-OVA tumor bearing C57BL/6J mice were injected with adenovirus expressing GFP (Ad5-GFP) and boosted with VEE-Luciferase srRNA formulated with MC3 LNP (Control) or Ad5-UbAAY and boosted with VEE-UbAAY srRNA (Vax). Both the Control and Vax groups were also treated with an IgG control mAb. A third group was treated with the Ad5-GFP prime/VEE-Luciferase srRNA boost in combination with anti-CTLA-4 (aCTLA-4), while the fourth group was treated with the Ad5-UbAAY prime/VEE-UbAAY boost in combination with anti-CTLA-4 (Vax+aCTLA-4). In addition, all mice were treated with anti-PD-1 mAb starting at day 21. T-cell responses were measured by IFN-gamma ELISPOT. Mice were sacrificed and spleens and lymph nodes collected at 14 days post immunization with adenovirus.

[0126] FIG. 13B illustrates antigen-specific T-cell responses following heterologous prime/boost in B16-OVA tumor bearing mice. B16-OVA tumor bearing C57BL/6J mice were injected with adenovirus expressing GFP (Ad5-GFP) and boosted with VEE-Luciferase srRNA formulated with MC3 LNP (Control) or Ad5-UbAAY and boosted with VEE-UbAAY srRNA (Vax). Both the Control and Vax groups were also treated with an IgG control mAb. A third group was treated with the Ad5-GFP prime/VEE-Luciferase srRNA boost in combination with anti-CTLA-4 (aCTLA-4), while the fourth group was treated with the Ad5-UbAAY prime/VEE-UbAAY boost in combination with anti-CTLA-4 (Vax+aCTLA-4). In addition, all mice were treated with anti-PD-1 mAb starting at day 21. T-cell responses were measured by IFN-gamma ELISPOT. Mice were sacrificed and spleens and lymph nodes collected at 14 days post immunization with adenovirus and 14 days post boost with srRNA (day 28 after prime).

[0127] FIG. 13C illustrates antigen-specific T-cell responses following heterologous prime/boost in B16-OVA tumor bearing mice. B16-OVA tumor bearing C57BL/6J mice were injected with adenovirus expressing GFP (Ad5-GFP) and boosted with VEE-Luciferase srRNA formulated with MC3 LNP (Control) or Ad5-UbAAY and boosted with VEE-UbAAY srRNA (Vax). Both the Control and Vax groups were also treated with an IgG control mAb. A third group was treated with the Ad5-GFP prime/VEE-Luciferase srRNA boost in combination with anti-CTLA-4 (aCTLA-4), while the fourth group was treated with the Ad5-UbAAY prime/VEE-UbAAY boost in combination with anti-CTLA-4 (Vax+aCTLA-4). In addition, all mice were treated with anti-PD-1 mAb starting at day 21. T-cell responses were measured by MHC class I pentamer staining. Mice were sacrificed and spleens and lymph nodes collected at 14 days post immunization with adenovirus.

[0128] FIG. 13D illustrates antigen-specific T-cell responses following heterologous prime/boost in B16-OVA tumor bearing mice. B16-OVA tumor bearing C57BL/6J mice were injected with adenovirus expressing GFP (Ad5-GFP) and boosted with VEE-Luciferase srRNA formulated with MC3 LNP (Control) or Ad5-UbAAY and boosted with VEE-UbAAY srRNA (Vax). Both the Control and Vax groups were also treated with an IgG control mAb. A third group was treated with the Ad5-GFP prime/VEE-Luciferase srRNA boost in combination with anti-CTLA-4 (aCTLA-4), while the fourth group was treated with the Ad5-UbAAY prime/VEE-UbAAY boost in combination with anti-CTLA-4 (Vax+aCTLA-4). In addition, all mice were treated with anti-PD-1 mAb starting at day 21. T-cell responses were measured by MHC class I pentamer staining. Mice were sacrificed and spleens and lymph nodes collected at 14 days post immunization with adenovirus and 14 days post boost with srRNA (day 28 after prime).

[0129] FIG. 14A illustrates antigen-specific T-cell responses following heterologous prime/boost in CT26 (Balb/c) tumor bearing mice. Mice were immunized with Ad5-GFP and boosted 15 days after the adenovirus prime with VEE-Luciferase srRNA formulated with MC3 LNP (Control) or primed with Ad5-UbAAY and boosted with VEE-UbAAY srRNA (Vax). Both the Control and Vax groups were also treated with an IgG control mAb. A separate group was administered the Ad5-GFP/VEE-Luciferase srRNA prime/boost in combination with anti-PD-1 (aPD1), while a fourth group received the Ad5-UbAAY/VEE-UbAAY srRNA prime/boost in combination with an anti-PD-1 mAb (Vax+aPD1). T-cell responses to the AH1 peptide were measured using IFN-gamma ELISPOT. Mice were sacrificed and spleens and lymph nodes collected at 12 days post immunization with adenovirus.

[0130] FIG. 14B illustrates antigen-specific T-cell responses following heterologous prime/boost in CT26 (Balb/c) tumor bearing mice. Mice were immunized with Ad5-GFP and boosted 15 days after the adenovirus prime with VEE-Luciferase srRNA formulated with MC3 LNP (Control) or primed with Ad5-UbAAY and boosted with VEE-UbAAY srRNA (Vax). Both the Control and Vax groups were also treated with an IgG control mAb. A separate group was administered the Ad5-GFP/VEE-Luciferase srRNA prime/boost in combination with anti-PD-1 (aPD1), while a fourth group received the Ad5-UbAAY/VEE-UbAAY srRNA prime/boost in combination with an anti-PD-1 mAb (Vax+aPD1). T-cell responses to the AH1 peptide were measured using IFN-gamma ELISPOT. Mice were sacrificed and spleens and lymph nodes collected at 12 days post immunization with adenovirus and 6 days post boost with srRNA (day 21 after prime).

[0131] FIG. 15 illustrates ChAdV68 eliciting T-Cell responses to mouse tumor antigens in mice. Mice were immunized with ChAdV68.5WTnt.MAG25mer, and T-cell responses to the MHC class I epitope SIINFEKL (SEQ ID NO: 29362) (OVA) were measured in C57BL/6J female mice and the MHC class I epitope AH1-A5 measured in Balb/c mice. Mean spot forming cells (SFCs) per 10⁶ splenocytes measured in ELISpot assays presented. Error bars represent standard deviation.

[0132] FIG. 16 illustrates cellular immune responses in a CT26 tumor model following a single immunization with either ChAdV6, ChAdV+anti-PD-1, srRNA, srRNA+anti-PD-1, or anti-PD-1 alone. Antigen-specific IFN-gamma production was measured in splenocytes for 6 mice from each group using ELISpot. Results are presented as spot forming cells (SFC) per 10⁶ splenocytes. Median for each group indicated by horizontal line. P values determined using the Dunnett's multiple comparison test; ***P<0.0001, **P<0.001, *P<0.05. ChAdV=ChAdV68.5WTnt.MAG25mer; srRNA=VEE-MAG25mer srRNA.

[0133] FIG. 17 illustrates CD8 T-Cell responses in a CT26 tumor model following a single immunization with either ChAdV6, ChAdV+anti-PD-1, srRNA, srRNA+anti-PD-1, or anti-PD-1 alone. Antigen-specific IFN-gamma production in CD8 T cells measured using ICS and results presented as antigen-specific CD8 T cells as a percentage of total CD8 T cells. Median for each group indicated by horizontal line. P values determined using the Dunnett's multiple comparison test; ***P<0.0001, **P<0.001, *P<0.05. ChAdV=ChAdV68.5WTnt.MAG25mer; srRNA=VEE-MAG25mer srRNA.

[0134] FIG. 18 illustrates tumor growth in a CT26 tumor model following immunization with a ChAdV/srRNA heterologous prime/boost, a srRNA/ChAdV heterologous prime/boost, or a srRNA/srRNA homologous primer/boost. Also illustrated in a comparison of the prime/boost immunizations with or without administration of anti-PD1 during prime and boost. Tumor volumes measured twice per week and mean tumor volumes presented for the first 21 days of the study. 22-28 mice per group at study initiation. Error bars represent standard error of the mean (SEM). P values determined using the Dunnett's test; ***P<0.0001, **P<0.001, *P<0.05. ChAdV=ChAdV68.5WTnt.MAG25mer; srRNA=VEE-MAG25mer srRNA.

[0135] FIG. 19 illustrates survival in a CT26 tumor model following immunization with a ChAdV/srRNA heterologous prime/boost, a srRNA/ChAdV heterologous prime/boost, or a srRNA/srRNA homologous primer/boost. Also illustrated in a comparison of the prime/boost immunizations with or without administration of anti-PD1 during prime and boost. P values determined using the log-rank test; ***P<0.0001, **P<0.001, *P<0.01. ChAdV=ChAdV68.5WTnt.MAG25mer; srRNA=VEE-MAG25mer srRNA.

[0136] FIG. 20 illustrates antigen-specific cellular immune responses measured using ELISpot. Antigen-specific IFN-gamma production to six different mamu A01 restricted epitopes was measured in PBMCs for the VEE-MAG25mer srRNA-LNP1(30 μg) (FIG. 20A), VEE-MAG25mer srRNA-LNP1(100 μg) (FIG. 20B), or VEE-MAG25mer srRNA-LNP2(100 μg) (FIG. 20C) homologous prime/boost or the ChAdV68.5WTnt.MAG25mer/VEE-MAG25mer srRNA heterologous prime/boost group (FIG. 20D) using ELISpot 1, 2, 3, 4, 5, 6, 8, 9, or 10 weeks after the first boost immunization (6 rhesus macaques per group). Results are presented as mean spot forming cells (SFC) per 10⁶ PBMCs for each epitope in a stacked bar graph format. Values for each animal were normalized to the levels at pre-bleed (week 0).

[0137] FIG. 21 shows antigen-specific cellular immune response measured using ELISpot. Antigen-specific IFN-gamma production to six different mamu A01 restricted epitopes was measured in PBMCs after immunization with the ChAdV68.5WTnt.MAG25mer/VEE-MAG25mer srRNA heterologous prime/boost regimen using ELISpot prior to immunization and 4, 5, 6, 7, 8, 10, 11, 12, 13, 14, 15, 16, 17, 18, 19, 20, 21, 22, 23 or 24 weeks after the initial immunization. Results are presented as mean spot forming cells (SFC) per 10⁶ PBMCs for each epitope (6 rhesus macaques per group) in a stacked bar graph format.

[0138] FIG. 22 shows antigen-specific cellular immune response measured using ELISpot. Antigen-specific IFN-gamma production to six different mamu A01 restricted epitopes was measured in PBMCs after immunization with the VEE-MAG25mer srRNA LNP2 homologous prime/boost regimen using ELISpot prior to immunization and 4, 5, 6, 7, 8, 10, 11, 12, 13, 14, or 15 weeks after the initial immunization. Results are presented as mean spot forming cells (SFC) per 10⁶ PBMCs for each epitope (6 rhesus macaques per group) in a stacked bar graph format.

[0139] FIG. 23 shows antigen-specific cellular immune response measured using ELISpot. Antigen-specific IFN-gamma production to six different mamu A01 restricted epitopes was measured in PBMCs after immunization with the VEE-MAG25mer srRNA LNP1 homologous prime/boost regimen using ELISpot prior to immunization and 4, 5, 6, 7, 8, 10, 11, 12, 13, 14, or 15 weeks after the initial immunization. Results are presented as mean spot forming cells (SFC) per 10⁶ PBMCs for each epitope (6 rhesus macaques per group) in a stacked bar graph format.

[0140] FIG. 24A and FIG. 24B show example peptide spectrums generated from Promega's dynamic range standard. Figure discloses SEQ ID NO: 29364.

[0141] FIG. 25 shows the correlation between EDGE score and the probability of detection of candidate shared neoantigen peptides by targeted MS.

[0142] FIG. 26 shows expanded TILs from a patient stained with mutated peptide HLA-A*11:01 tetramers. The flow cytometry gating strategy on CD8+ cells (left panel) and the staining of CD8+ cells by KRAS-G12V/HLA-A*11:01 tetramer (right panel) are shown.

[0143] FIG. 27 illustrates the general TCR sequencing strategy and workflow.

[0144] FIG. 28 shows the TCR sequencing strategy for a representive example using a KRAS-G12V/HLA-A*11:01 tetramer.

[0145] FIG. 29 illustrates the general organization of the model epitopes from the various species for large antigen cassettes that had either 30 (L), 40 (XL) or 50 (XXL) epitopes.

[0146] FIG. 30 shows ChAd vectors express long cassettes as indicated by the above Western blot using an anti-class II (PADRE) antibody that recognizes a sequence common to all cassettes. HEK293 cells were infected with chAd68 vectors expressing large cassettes (chAd68-50XXL, chAd68-40XL & chAd68-30L) of variable size. Infections were set up at a MOI of 0.2. Twenty-four hours post infection MG132 a proteasome inhibitor was added to a set of the infected wells (indicated by the plus sign). Another set of virus treated wells were not treated with MG132 (indicated by minus sign). Uninfected HEK293 cells (293F) were used as a negative control. Forty-eight hours post infection cell pellets were harvested and analyzed by SDS/PAGE electrophoresis, and immunoblotting using a rabbit anti-Class II PADRE antibody. A HRP anti-rabbit antibody and ECL chemiluminescent substrate was used for detection.

[0147] FIG. 31 shows CD8+ immune responses in chAd68 large cassette immunized mice, detected against AH1 (top) and SIINFEKL (SEQ ID NO: 29362) (bottom) by ICS. Data is presented as IFNg+ cells against the model epitope as % of total CD8 cells

[0148] FIG. 32 shows CD8+ responses to LD-AH1+(top) and Kb-SIINFEKL (SEQ ID NO: 29362)+(bottom) Tetramers post chAd68 large cassette vaccination. Data is presented as % of total CD8 cells reactive against the model Tetramer peptide complex. *p<0.05, **p<0.01 by ANOVA with Tukey's test. All p-values compared to MAG 20-antigen cassette.

[0149] FIG. 33 shows CD8+ immune responses in alphavirus large cassette treated mice, detected against AH1 (top) and SIINFEKL (SEQ ID NO: 29362) (bottom) by ICS. Data is presented as IFNg+ cells against the model epitope as % of total CD8 cells. *p<0.05, **p<0.01, ***p<0.001 by ANOVA with Tukey's test. All p-values compared to MAG 20-antigen cassette.

[0150] FIG. 34 illustrates the vaccination strategy used to evaluate immunogenicity of the antigen-cassette containing vectors in rhesus macaques. Triangles indicate chAd68 vaccination (1e12 vp/animal) at weeks 0 & 32. Circles represent alphavirus vaccination at weeks 0, 4, 12,20, 28 & 32. Squares represent administration of an anti-CTLA4 antibody.

[0151] FIG. 35 shows a time course of CD8+ anti-epitope responses in Rhesus Macaques dosed with chAd-MAG alone (Group 4). Mean SFC/1e6 splenocytes is shown.

[0152] FIG. 36 shows a time course of CD8+ anti-epitope responses in Rhesus Macaques dosed with chAd-MAG plus anti-CTLA4 antibody (Ipilimumab) delivered IV. (Group 5). Mean SFC/1e6 splenocytes is shown.

[0153] FIG. 37 shows a time course of CD8+ anti-epitope responses in Rhesus Macaques dosed with chAd-MAG plus anti-CTLA4 antibody (Ipilimumab) delivered SC (Group 6). Mean SFC/1e6 splenocytes is shown.

[0154] FIG. 38 shows antigen-specific memory responses generated by ChAdV68/samRNA vaccine protocol measured by ELISpot. Results are presented as individual dot plots, with each dot representing a single animal. Pre-immunization baseline (left panel) and memory response at 18 months post-prime (right panel) are shown.

[0155] FIG. 39 shows memory cell phenotyping of antigen-specific CD8+ T-cells by flow cytometry using combinatorial tetramer staining and CD45RA/CCR7 co-staining.

[0156] FIG. 40 shows the distribution of memory cell types within the sum of the four Mamu-A*01 tetramer+CD8+ T-cell populations at study month 18. Memory cells were characterized as follows: CD45RA+CCR7+=naïve, CD45RA+CCR7-=effector (Teff), CD45RA-CCR7+=central memory (Tcm), CD45RA-CCR7-=effector memory (Tem).

[0157] FIG. 41 shows frequency of CD8+ T cells recognizing the CT26 tumor antigen AH1 in CT26 tumor-bearing mice. P values determined using the one-way ANOVA with Tukey's multiple comparisons test; **P<0.001, *P<0.05. ChAdV=ChAdV68.5WTnt.MAG25mer; aCTLA4=anti-CTLA4 antibody, clone 9D9.

### DETAILED DESCRIPTION

### I. Definitions

[0158] In general, terms used in the claims and the specification are intended to be construed as having the plain meaning understood by a person of ordinary skill in the art. Certain terms are defined below to provide additional clarity. In case of conflict between the plain meaning and the provided definitions, the provided definitions are to be used.

[0159] As used herein the term “antigen” is a substance that induces an immune response. An antigen can be a neoantigen. An antigen can be a “shared antigen” that is an antigen found among a specific population, e.g., a specific population of cancer patients.

[0160] As used herein the term “neoantigen” is an antigen that has at least one alteration that makes it distinct from the corresponding wild-type antigen, e.g., via mutation in a tumor cell or post-translational modification specific to a tumor cell. A neoantigen can include a polypeptide sequence or a nucleotide sequence. A mutation can include a frameshift or nonframeshift indel, missense or nonsense substitution, splice site alteration, genomic rearrangement or gene fusion, or any genomic or expression alteration giving rise to a neoORF. A mutations can also include a splice variant. Post-translational modifications specific to a tumor cell can include aberrant phosphorylation. Post-translational modifications specific to a tumor cell can also include a proteasome-generated spliced antigen. See Liepe et al., A large fraction of HLA class I ligands are proteasome-generated spliced peptides; Science. 2016 Oct. 21; 354(6310):354-358. Exemplary shared neoantigens are shown in Table A and in the AACR GENIE Results (SEQ ID NO:10,755-29,357); corresponding HLA allele(s) for each antigen are also shown. Such shared neoantigens are useful for inducing an immune response in a subject via administration. The subject can be identified for administration through the use of various diagnostic methods, e.g., patient selection methods described further below.

[0161] As used herein the term “tumor antigen” is a antigen present in a subject's tumor cell or tissue but not in the subject's corresponding normal cell or tissue, or derived from a polypeptide known to or have been found to have altered expression in a tumor cell or cancerous tissue in comparison to a normal cell or tissue.

[0162] As used herein the term “antigen-based vaccine” is a vaccine composition based on one or more antigens, e.g., a plurality of antigens. The vaccines can be nucleotide-based (e.g., virally based, RNA based, or DNA based), protein-based (e.g., peptide based), or a combination thereof.

[0163] As used herein the term “candidate antigen” is a mutation or other aberration giving rise to a sequence that may represent a antigen.

[0164] As used herein the term “coding region” is the portion(s) of a gene that encode protein.

[0165] As used herein the term “coding mutation” is a mutation occurring in a coding region.

[0166] As used herein the term “ORF” means open reading frame.

[0167] As used herein the term “NEO-ORF” is a tumor-specific ORF arising from a mutation or other aberration such as splicing.

[0168] As used herein the term “missense mutation” is a mutation causing a substitution from one amino acid to another.

[0169] As used herein the term “nonsense mutation” is a mutation causing a substitution from an amino acid to a stop codon or causing removal of a canonical start codon.

[0170] As used herein the term “frameshift mutation” is a mutation causing a change in the frame of the protein.

[0171] As used herein the term “indel” is an insertion or deletion of one or more nucleic acids.

[0172] As used herein, the term percent “identity,” in the context of two or more nucleic acid or polypeptide sequences, refer to two or more sequences or subsequences that have a specified percentage of nucleotides or amino acid residues that are the same, when compared and aligned for maximum correspondence, as measured using one of the sequence comparison algorithms described below (e.g., BLASTP and BLASTN or other algorithms available to persons of skill) or by visual inspection. Depending on the application, the percent “identity” can exist over a region of the sequence being compared, e.g., over a functional domain, or, alternatively, exist over the full length of the two sequences to be compared.

[0173] For sequence comparison, typically one sequence acts as a reference sequence to which test sequences are compared. When using a sequence comparison algorithm, test and reference sequences are input into a computer, subsequence coordinates are designated, if necessary, and sequence algorithm program parameters are designated. The sequence comparison algorithm then calculates the percent sequence identity for the test sequence(s) relative to the reference sequence, based on the designated program parameters. Alternatively, sequence similarity or dissimilarity can be established by the combined presence or absence of particular nucleotides, or, for translated sequences, amino acids at selected sequence positions (e.g., sequence motifs).

[0174] Optimal alignment of sequences for comparison can be conducted, e.g., by the local homology algorithm of Smith & Waterman, Adv. Appl. Math. 2:482 (1981), by the homology alignment algorithm of Needleman & Wunsch, J. Mol. Biol. 48:443 (1970), by the search for similarity method of Pearson & Lipman, Proc. Nat'l. Acad. Sci. USA 85:2444 (1988), by computerized implementations of these algorithms (GAP, BESTFIT, FASTA, and TFASTA in the Wisconsin Genetics Software Package, Genetics Computer Group, 575 Science Dr., Madison, Wis.), or by visual inspection (see generally Ausubel et al., infra).

[0175] One example of an algorithm that is suitable for determining percent sequence identity and sequence similarity is the BLAST algorithm, which is described in Altschul et al., J. Mol. Biol. 215:403-410 (1990). Software for performing BLAST analyses is publicly available through the National Center for Biotechnology Information.

[0176] As used herein the term “non-stop or read-through” is a mutation causing the removal of the natural stop codon.

[0177] As used herein the term “epitope” is the specific portion of an antigen typically bound by an antibody or T cell receptor.

[0178] As used herein the term “immunogenic” is the ability to elicit an immune response, e.g., via T cells, B cells, or both.

[0179] As used herein the term “HLA binding affinity” “MHC binding affinity” means affinity of binding between a specific antigen and a specific MHC allele.

[0180] As used herein the term “bait” is a nucleic acid probe used to enrich a specific sequence of DNA or RNA from a sample.

[0181] As used herein the term “variant” is a difference between a subject's nucleic acids and the reference human genome used as a control.

[0182] As used herein the term “variant call” is an algorithmic determination of the presence of a variant, typically from sequencing.

[0183] As used herein the term “polymorphism” is a germline variant, i.e., a variant found in all DNA-bearing cells of an individual.

[0184] As used herein the term “somatic variant” is a variant arising in non-germline cells of an individual.

[0185] As used herein the term “allele” is a version of a gene or a version of a genetic sequence or a version of a protein.

[0186] As used herein the term “HLA type” is the complement of HLA gene alleles.

[0187] As used herein the term “nonsense-mediated decay” or “NMD” is a degradation of an mRNA by a cell due to a premature stop codon.

[0188] As used herein the term “truncal mutation” is a mutation originating early in the development of a tumor and present in a substantial portion of the tumor's cells.

[0189] As used herein the term “subclonal mutation” is a mutation originating later in the development of a tumor and present in only a subset of the tumor's cells.

[0190] As used herein the term “exome” is a subset of the genome that codes for proteins. An exome can be the collective exons of a genome.

[0191] As used herein the term “logistic regression” is a regression model for binary data from statistics where the logit of the probability that the dependent variable is equal to one is modeled as a linear function of the dependent variables.

[0192] As used herein the term “neural network” is a machine learning model for classification or regression consisting of multiple layers of linear transformations followed by element-wise nonlinearities typically trained via stochastic gradient descent and back-propagation.

[0193] As used herein the term “proteome” is the set of all proteins expressed and/or translated by a cell, group of cells, or individual.

[0194] As used herein the term “peptidome” is the set of all peptides presented by MHC-I or MHC-II on the cell surface. The peptidome may refer to a property of a cell or a collection of cells (e.g., the tumor peptidome, meaning the union of the peptidomes of all cells that comprise the tumor).

[0195] As used herein the term “ELISPOT” means Enzyme-linked immunosorbent spot assay—which is a common method for monitoring immune responses in humans and animals.

[0196] As used herein the term “dextramers” is a dextran-based peptide-MHC multimers used for antigen-specific T-cell staining in flow cytometry.

[0197] As used herein the term “tolerance or immune tolerance” is a state of immune non-responsiveness to one or more antigens, e.g. self-antigens.

[0198] As used herein the term “central tolerance” is a tolerance affected in the thymus, either by deleting self-reactive T-cell clones or by promoting self-reactive T-cell clones to differentiate into immunosuppressive regulatory T-cells (Tregs).

[0199] As used herein the term “peripheral tolerance” is a tolerance affected in the periphery by downregulating or anergizing self-reactive T-cells that survive central tolerance or promoting these T cells to differentiate into Tregs.

[0200] The term “sample” can include a single cell or multiple cells or fragments of cells or an aliquot of body fluid, taken from a subject, by means including venipuncture, excretion, ejaculation, massage, biopsy, needle aspirate, lavage sample, scraping, surgical incision, or intervention or other means known in the art.

[0201] The term “subject” encompasses a cell, tissue, or organism, human or non-human, whether in vivo, ex vivo, or in vitro, male or female. The term subject is inclusive of mammals including humans.

[0202] The term “mammal” encompasses both humans and non-humans and includes but is not limited to humans, non-human primates, canines, felines, murines, bovines, equines, and porcines.

[0203] The term “clinical factor” refers to a measure of a condition of a subject, e.g., disease activity or severity. “Clinical factor” encompasses all markers of a subject's health status, including non-sample markers, and/or other characteristics of a subject, such as, without limitation, age and gender. A clinical factor can be a score, a value, or a set of values that can be obtained from evaluation of a sample (or population of samples) from a subject or a subject under a determined condition. A clinical factor can also be predicted by markers and/or other parameters such as gene expression surrogates. Clinical factors can include tumor type, tumor sub-type, and smoking history.

[0204] The term “antigen-encoding nucleic acid sequences derived from a tumor” refers to nucleic acid sequences directly extracted from the tumor, e.g. via RT-PCR; or sequence data obtained by sequencing the tumor and then synthesizing the nucleic acid sequences using the sequencing data, e.g., via various synthetic or PCR-based methods known in the art.

[0205] The term “alphavirus” refers to members of the family Togaviridae, and are positive-sense single-stranded RNA viruses. Alphaviruses are typically classified as either Old World, such as Sindbis, Ross River, Mayaro, Chikungunya, and Semliki Forest viruses, or New World, such as eastern equine encephalitis, Aura, Fort Morgan, or Venezuelan equine encephalitis and its derivative strain TC-83. Alphaviruses are typically self-replicating RNA viruses.

[0206] The term “alphavirus backbone” refers to minimal sequence(s) of an alphavirus that allow for self-replication of the viral genome. Minimal sequences can include conserved sequences for nonstructural protein-mediated amplification, a nonstructural protein 1 (nsP1) gene, a nsP2 gene, a nsP3 gene, a nsP4 gene, and a polyA sequence, as well as sequences for expression of subgenomic viral RNA including a 26S promoter element.

[0207] The term “sequences for nonstructural protein-mediated amplification” includes alphavirus conserved sequence elements (CSE) well known to those in the art. CSEs include, but are not limited to, an alphavirus 5′ UTR, a 51-nt CSE, a 24-nt CSE, or other 26S subgenomic promoter sequence, a 19-nt CSE, and an alphavirus 3′ UTR.

[0208] The term “RNA polymerase” includes polymerases that catalyze the production of RNA polynucleotides from a DNA template. RNA polymerases include, but are not limited to, bacteriophage derived polymerases including T3, T7, and SP6.

[0209] The term “lipid” includes hydrophobic and/or amphiphilic molecules. Lipids can be cationic, anionic, or neutral. Lipids can be synthetic or naturally derived, and in some instances biodegradable. Lipids can include cholesterol, phospholipids, lipid conjugates including, but not limited to, polyethyleneglycol (PEG) conjugates (PEGylated lipids), waxes, oils, glycerides, fats, and fat-soluble vitamins. Lipids can also include dilinoleylmethyl-4-dimethylaminobutyrate (MC3) and MC3-like molecules.

[0210] The term “lipid nanoparticle” or “LNP” includes vesicle like structures formed using a lipid containing membrane surrounding an aqueous interior, also referred to as liposomes. Lipid nanoparticles includes lipid-based compositions with a solid lipid core stabilized by a surfactant. The core lipids can be fatty acids, acylglycerols, waxes, and mixtures of these surfactants. Biological membrane lipids such as phospholipids, sphingomyelins, bile salts (sodium taurocholate), and sterols (cholesterol) can be utilized as stabilizers. Lipid nanoparticles can be formed using defined ratios of different lipid molecules, including, but not limited to, defined ratios of one or more cationic, anionic, or neutral lipids. Lipid nanoparticles can encapsulate molecules within an outer-membrane shell and subsequently can be contacted with target cells to deliver the encapsulated molecules to the host cell cytosol. Lipid nanoparticles can be modified or functionalized with non-lipid molecules, including on their surface. Lipid nanoparticles can be single-layered (unilamellar) or multi-layered (multilamellar). Lipid nanoparticles can be complexed with nucleic acid. Unilamellar lipid nanoparticles can be complexed with nucleic acid, wherein the nucleic acid is in the aqueous interior. Multilamellar lipid nanoparticles can be complexed with nucleic acid, wherein the nucleic acid is in the aqueous interior, or to form or sandwiched between

[0211] Abbreviations: MEW: major histocompatibility complex; HLA: human leukocyte antigen, or the human MEW gene locus; NGS: next-generation sequencing; PPV: positive predictive value; TSNA: tumor-specific neoantigen; FFPE: formalin-fixed, paraffin-embedded; NMD: nonsense-mediated decay; NSCLC: non-small-cell lung cancer; DC: dendritic cell.

[0212] It should be noted that, as used in the specification and the appended claims, the singular forms “a,” “an,” and “the” include plural referents unless the context clearly dictates otherwise.

[0213] Unless specifically stated or otherwise apparent from context, as used herein the term “about” is understood as within a range of normal tolerance in the art, for example within 2 standard deviations of the mean. About can be understood as within 10%, 9%, 8%, 7%, 6%, 5%, 4%, 3%, 2%, 1%, 0.5%, 0.1%, 0.05%, or 0.01% of the stated value. Unless otherwise clear from context, all numerical values provided herein are modified by the term about.

[0214] Any terms not directly defined herein shall be understood to have the meanings commonly associated with them as understood within the art of the invention. Certain terms are discussed herein to provide additional guidance to the practitioner in describing the compositions, devices, methods and the like of aspects of the invention, and how to make or use them. It will be appreciated that the same thing may be said in more than one way. Consequently, alternative language and synonyms may be used for any one or more of the terms discussed herein. No significance is to be placed upon whether or not a term is elaborated or discussed herein. Some synonyms or substitutable methods, materials and the like are provided. Recital of one or a few synonyms or equivalents does not exclude use of other synonyms or equivalents, unless it is explicitly stated. Use of examples, including examples of terms, is for illustrative purposes only and does not limit the scope and meaning of the aspects of the invention herein.

[0215] All references, issued patents and patent applications cited within the body of the specification are hereby incorporated by reference in their entirety, for all purposes.

### II. Methods of Identifying Antigens

[0216] Methods for identifying shared antigens (e.g., neoantigens) include identifying antigens from a tumor of a subject that are likely to be presented on the cell surface of the tumor or immune cells, including professional antigen presenting cells such as dendritic cells, and/or are likely to be immunogenic. As an example, one such method may comprise the steps of: obtaining at least one of exome, transcriptome or whole genome tumor nucleotide sequencing and/or expression data from the tumor cell of the subject, wherein the tumor nucleotide sequencing and/or expression data is used to obtain data representing peptide sequences of each of a set of antigens (e.g., in the case of neoantigens wherein the peptide sequence of each neoantigen comprises at least one alteration that makes it distinct from the corresponding wild-type peptide sequence or in cases of shared antigens without a mutation where peptides are derived from any polypeptide known to or have been found to have altered expression in a tumor cell or cancerous tissue in comparison to a normal cell or tissue); inputting the peptide sequence of each antigen into one or more presentation models to generate a set of numerical likelihoods that each of the antigens is presented by one or more MHC alleles on the tumor cell surface of the tumor cell of the subject or cells present in the tumor, the set of numerical likelihoods having been identified at least based on received mass spectrometry data; and selecting a subset of the set of antigens based on the set of numerical likelihoods to generate a set of selected antigens.

[0217] The presentation model can comprise a statistical regression or a machine learning (e.g., deep learning) model trained on a set of reference data (also referred to as a training data set) comprising a set of corresponding labels, wherein the set of reference data is obtained from each of a plurality of distinct subjects where optionally some subjects can have a tumor, and wherein the set of reference data comprises at least one of: data representing exome nucleotide sequences from tumor tissue, data representing exome nucleotide sequences from normal tissue, data representing transcriptome nucleotide sequences from tumor tissue, data representing proteome sequences from tumor tissue, and data representing MHC peptidome sequences from tumor tissue, and data representing MHC peptidome sequences from normal tissue. The reference data can further comprise mass spectrometry data, sequencing data, RNA sequencing data, expression profiling data, and proteomics data for single-allele cell lines engineered to express a predetermined MHC allele that are subsequently exposed to synthetic protein, normal and tumor human cell lines, and fresh and frozen primary samples, and T cell assays (e.g., ELISPOT). In certain aspects, the set of reference data includes each form of reference data.

[0218] The presentation model can comprise a set of features derived at least in part from the set of reference data, and wherein the set of features comprises at least one of allele dependent-features and allele-independent features. In certain aspects each feature is included.

[0219] Methods for identifying shared antigens also include generating an output for constructing a personalized cancer vaccine by identifying one or more antigens from one or more tumor cells of a subject that are likely to be presented on a surface of the tumor cells. As an example, one such method may comprise the steps of: obtaining at least one of exome, transcriptome, or whole genome nucleotide sequencing and/or expression data from the tumor cells and normal cells of the subject, wherein the nucleotide sequencing and/or expression data is used to obtain data representing peptide sequences of each of a set of antigens identified by comparing the nucleotide sequencing and/or expression data from the tumor cells and the nucleotide sequencing and/or expression data from the normal cells (e.g., in the case of neoantigens wherein the peptide sequence of each neoantigen comprises at least one alteration that makes it distinct from the corresponding wild-type peptide sequence or in cases of shared antigens without a mutation where peptides are derived from any polypeptide known to or have been found to have altered expression in a tumor cell or cancerous tissue in comparison to a normal cell or tissue), peptide sequence identified from the normal cells of the subject; encoding the peptide sequences of each of the antigens into a corresponding numerical vector, each numerical vector including information regarding a plurality of amino acids that make up the peptide sequence and a set of positions of the amino acids in the peptide sequence; inputting the numerical vectors, using a computer processor, into a deep learning presentation model to generate a set of presentation likelihoods for the set of antigens, each presentation likelihood in the set representing the likelihood that a corresponding antigen is presented by one or more class II MEW alleles on the surface of the tumor cells of the subject, the deep learning presentation model; selecting a subset of the set of antigens based on the set of presentation likelihoods to generate a set of selected antigens; and generating the output for constructing the personalized cancer vaccine based on the set of selected antigens.

[0220] Specific methods for identifying antigens, including neoantigens, are known to those skilled in the art, for example the methods described in more detail in international patent application publications WO/2017/106638, WO/2018/195357, and WO/2018/208856, each herein incorporated by reference, in their entirety, for all purposes.

[0221] A method of treating a subject having a tumor is disclosed herein, comprising performing the steps of any of the antigen identification methods described herein, and further comprising obtaining a tumor vaccine comprising the set of selected antigens, and administering the tumor vaccine to the subject.

[0222] A method disclosed herein can also include identifying one or more T cells that are antigen-specific for at least one of the antigens in the subset. In some embodiments, the identification comprises co-culturing the one or more T cells with one or more of the antigens in the subset under conditions that expand the one or more antigen-specific T cells. In further embodiments, the identification comprises contacting the one or more T cells with a tetramer comprising one or more of the antigens in the subset under conditions that allow binding between the T cell and the tetramer. In even further embodiments, the method disclosed herein can also include identifying one or more T cell receptors (TCR) of the one or more identified T cells. In certain embodiments, identifying the one or more T cell receptors comprises sequencing the T cell receptor sequences of the one or more identified T cells. The method disclosed herein can further comprise genetically engineering a plurality of T cells to express at least one of the one or more identified T cell receptors; culturing the plurality of T cells under conditions that expand the plurality of T cells; and infusing the expanded T cells into the subject. In some embodiments, genetically engineering the plurality of T cells to express at least one of the one or more identified T cell receptors comprises cloning the T cell receptor sequences of the one or more identified T cells into an expression vector; and transfecting each of the plurality of T cells with the expression vector. In some embodiments, the method disclosed herein further comprises culturing the one or more identified T cells under conditions that expand the one or more identified T cells; and infusing the expanded T cells into the subject.

[0223] Also disclosed herein is an isolated T cell that is antigen-specific for at least one selected antigen in the subset.

[0224] Also disclosed herein is a methods for manufacturing a tumor vaccine, comprising the steps of: obtaining at least one of exome, transcriptome or whole genome tumor nucleotide sequencing and/or expression data from the tumor cell of the subject, wherein the tumor nucleotide sequencing and/or expression data is used to obtain data representing peptide sequences of each of a set of antigens (e.g., in the case of neoantigens wherein the peptide sequence of each neoantigen comprises at least one alteration that makes it distinct from the corresponding wild-type peptide sequence or in cases of shared antigens without a mutation where peptides are derived from any polypeptide known to or have been found to have altered expression in a tumor cell or cancerous tissue in comparison to a normal cell or tissue); inputting the peptide sequence of each antigen into one or more presentation models to generate a set of numerical likelihoods that each of the antigens is presented by one or more WIC alleles on the tumor cell surface of the tumor cell of the subject, the set of numerical likelihoods having been identified at least based on received mass spectrometry data; and selecting a subset of the set of antigens based on the set of numerical likelihoods to generate a set of selected antigens; and producing or having produced a tumor vaccine comprising the set of selected antigens.

[0225] Also disclosed herein is a tumor vaccine including a set of selected antigens selected by performing the method comprising the steps of: obtaining at least one of exome, transcriptome or whole genome tumor nucleotide sequencing and/or expression data from the tumor cell of the subject, wherein the tumor nucleotide sequencing and/or expression data is used to obtain data representing peptide sequences of each of a set of antigens, and wherein the peptide sequence of each antigen (e.g., in the case of neoantigens wherein the peptide sequence of each neoantigen comprises at least one alteration that makes it distinct from the corresponding wild-type peptide sequence or in other cases of shared antigens without a mutation where peptides are derived from any polypeptide known to or have been found to have altered expression in a tumor cell or cancerous tissue in comparison to a normal cell or tissue); inputting the peptide sequence of each antigen into one or more presentation models to generate a set of numerical likelihoods that each of the antigens is presented by one or more WIC alleles on the tumor cell surface of the tumor cell of the subject, the set of numerical likelihoods having been identified at least based on received mass spectrometry data; and selecting a subset of the set of antigens based on the set of numerical likelihoods to generate a set of selected antigens; and producing or having produced a tumor vaccine comprising the set of selected antigens.

[0226] The tumor vaccine may include one or more of a nucleotide sequence, a polypeptide sequence, RNA, DNA, a cell, a plasmid, or a vector.

[0227] The tumor vaccine may include one or more antigens presented on the tumor cell surface.

[0228] The tumor vaccine may include one or more antigens that is immunogenic in the subject.

[0229] The tumor vaccine may not include one or more antigens that induce an autoimmune response against normal tissue in the subject.

[0230] The tumor vaccine may include an adjuvant.

[0231] The tumor vaccine may include an excipient.

[0232] A method disclosed herein may also include selecting antigens that have an increased likelihood of being presented on the tumor cell surface relative to unselected antigens based on the presentation model.

[0233] A method disclosed herein may also include selecting antigens that have an increased likelihood of being capable of inducing a tumor-specific immune response in the subject relative to unselected antigens based on the presentation model.

[0234] A method disclosed herein may also include selecting antigens that have an increased likelihood of being capable of being presented to naïve T cells by professional antigen presenting cells (APCs) relative to unselected antigens based on the presentation model, optionally wherein the APC is a dendritic cell (DC).

[0235] A method disclosed herein may also include selecting antigens that have a decreased likelihood of being subject to inhibition via central or peripheral tolerance relative to unselected antigens based on the presentation model.

[0236] A method disclosed herein may also include selecting antigens that have a decreased likelihood of being capable of inducing an autoimmune response to normal tissue in the subject relative to unselected antigens based on the presentation model.

[0237] The exome or transcriptome nucleotide sequencing and/or expression data may be obtained by performing sequencing on the tumor tissue.

[0238] The sequencing may be next generation sequencing (NGS) or any massively parallel sequencing approach.

[0239] The set of numerical likelihoods may be further identified by at least MHC-allele interacting features comprising at least one of: the predicted affinity with which the MHC allele and the antigen encoded peptide bind; the predicted stability of the antigen encoded peptide-MHC complex; the sequence and length of the antigen encoded peptide; the probability of presentation of antigen encoded peptides with similar sequence in cells from other individuals expressing the particular MHC allele as assessed by mass-spectrometry proteomics or other means; the expression levels of the particular MHC allele in the subject in question (e.g. as measured by RNA-seq or mass spectrometry); the overall neoantigen encoded peptide-sequence-independent probability of presentation by the particular MHC allele in other distinct subjects who express the particular MHC allele; the overall neoantigen encoded peptide-sequence-independent probability of presentation by MHC alleles in the same family of molecules (e.g., HLA-A, HLA-B, HLA-C, HLA-DQ, HLA-DR, HLA-DP) in other distinct subjects.

[0240] The set of numerical likelihoods are further identified by at least MHC-allele noninteracting features comprising at least one of: the C- and N-terminal sequences flanking the neoantigen encoded peptide within its source protein sequence; the presence of protease cleavage motifs in the neoantigen encoded peptide, optionally weighted according to the expression of corresponding proteases in the tumor cells (as measured by RNA-seq or mass spectrometry); the turnover rate of the source protein as measured in the appropriate cell type; the length of the source protein, optionally considering the specific splice variants (“isoforms”) most highly expressed in the tumor cells as measured by RNA-seq or proteome mass spectrometry, or as predicted from the annotation of germline or somatic splicing mutations detected in DNA or RNA sequence data; the level of expression of the proteasome, immunoproteasome, thymoproteasome, or other proteases in the tumor cells (which may be measured by RNA-seq, proteome mass spectrometry, or immunohistochemistry); the expression of the source gene of the neoantigen encoded peptide (e.g., as measured by RNA-seq or mass spectrometry); the typical tissue-specific expression of the source gene of the neoantigen encoded peptide during various stages of the cell cycle; a comprehensive catalog of features of the source protein and/or its domains as can be found in e.g. uniProt or PDB http://www.rcsb.org/pdb/home/home.do; features describing the properties of the domain of the source protein containing the peptide, for example: secondary or tertiary structure (e.g., alpha helix vs beta sheet); alternative splicing; the probability of presentation of peptides from the source protein of the neoantigen encoded peptide in question in other distinct subjects; the probability that the peptide will not be detected or over-represented by mass spectrometry due to technical biases; the expression of various gene modules/pathways as measured by RNASeq (which need not contain the source protein of the peptide) that are informative about the state of the tumor cells, stroma, or tumor-infiltrating lymphocytes (TILs); the copy number of the source gene of the neoantigen encoded peptide in the tumor cells; the probability that the peptide binds to the TAP or the measured or predicted binding affinity of the peptide to the TAP; the expression level of TAP in the tumor cells (which may be measured by RNA-seq, proteome mass spectrometry, immunohistochemistry); presence or absence of tumor mutations, including, but not limited to: driver mutations in known cancer driver genes such as EGFR, KRAS, ALK, RET, ROS1, TP53, CDKN2A, CDKN2B, NTRK1, NTRK2, NTRK3, and in genes encoding the proteins involved in the antigen presentation machinery (e.g., B2M, HLA-A, HLA-B, HLA-C, TAP-1, TAP-2, TAPBP, CALR, CNX, ERP57, HLA-DM, HLA-DMA, HLA-DMB, HLA-DO, HLA-DOA, HLA-DOB, HLA-DP, HLA-DPA1, HLA-DPB1, HLA-DQ, HLA-DQA1, HLA-DQA2, HLA-DQB1, HLA-DQB2, HLA-DR, HLA-DRA, HLA-DRB1, HLA-DRB3, HLA-DRB4, HLA-DRB5 or any of the genes coding for components of the proteasome or immunoproteasome). Peptides whose presentation relies on a component of the antigen-presentation machinery that is subject to loss-of-function mutation in the tumor have reduced probability of presentation; presence or absence of functional germline polymorphisms, including, but not limited to: in genes encoding the proteins involved in the antigen presentation machinery (e.g., B2M, HLA-A, HLA-B, HLA-C, TAP-1, TAP-2, TAPBP, CALR, CNX, ERP57, HLA-DM, HLA-DMA, HLA-DMB, HLA-DO, HLA-DOA, HLA-DOB, HLA-DP, HLA-DPA1, HLA-DPB1, HLA-DQ, HLA-DQA1, HLA-DQA2, HLA-DQB1, HLA-DQB2, HLA-DR, HLA-DRA, HLA-DRB1, HLA-DRB3, HLA-DRB4, HLA-DRB5 or any of the genes coding for components of the proteasome or immunoproteasome); tumor type (e.g., NSCLC, melanoma); clinical tumor subtype (e.g., squamous lung cancer vs. non-squamous); smoking history; the typical expression of the source gene of the peptide in the relevant tumor type or clinical subtype, optionally stratified by driver mutation.

[0241] The at least one alteration may be a frameshift or nonframeshift indel, missense or nonsense substitution, splice site alteration, genomic rearrangement or gene fusion, or any genomic or expression alteration giving rise to a neoORF.

[0242] The tumor cell may be selected from the group consisting of: lung cancer, melanoma, breast cancer, ovarian cancer, prostate cancer, kidney cancer, gastric cancer, colon cancer, testicular cancer, head and neck cancer, pancreatic cancer, brain cancer, B-cell lymphoma, acute myelogenous leukemia, chronic myelogenous leukemia, chronic lymphocytic leukemia, and T cell lymphocytic leukemia, non-small cell lung cancer, and small cell lung cancer.

[0243] A method disclosed herein may also include obtaining a tumor vaccine comprising the set of selected neoantigens or a subset thereof, optionally further comprising administering the tumor vaccine to the subject.

[0244] At least one of neoantigens in the set of selected neoantigens, when in polypeptide form, may include at least one of: a binding affinity with MHC with an IC50 value of less than 1000 nM, for MHC Class I polypeptides a length of 8-15, 8, 9, 10, 11, 12, 13, 14, or 15 amino acids, for MHC Class II polypeptides a length of 6-30, 6, 7, 8, 9, 10, 11, 12, 13, 14, 15, 16, 17, 18,19, 20, 21, 22, 23, 24, 25, 26, 27, 28, 29, or 30 amino acids, presence of sequence motifs within or near the polypeptide in the parent protein sequence promoting proteasome cleavage, and presence of sequence motifs promoting TAP transport. For MHC Class II, presence of sequence motifs within or near the peptide promoting cleavage by extracellular or lysosomal proteases (e.g., cathepsins) or HLA-DM catalyzed HLA binding.

[0245] Disclosed herein is are methods for identifying one or more neoantigens that are likely to be presented on a tumor cell surface of a tumor cell, comprising executing the steps of: receiving mass spectrometry data comprising data associated with a plurality of isolated peptides eluted from major histocompatibility complex (MHC) derived from a plurality of fresh or frozen tumor samples; obtaining a training data set by at least identifying a set of training peptide sequences present in the tumor samples and presented on one or more MHC alleles associated with each training peptide sequence; obtaining a set of training protein sequences based on the training peptide sequences; and training a set of numerical parameters of a presentation model using the training protein sequences and the training peptide sequences, the presentation model providing a plurality of numerical likelihoods that peptide sequences from the tumor cell are presented by one or more MHC alleles on the tumor cell surface.

[0246] The presentation model may represent dependence between: presence of a pair of a particular one of the MHC alleles and a particular amino acid at a particular position of a peptide sequence; and likelihood of presentation on the tumor cell surface, by the particular one of the MHC alleles of the pair, of such a peptide sequence comprising the particular amino acid at the particular position.

[0247] A method disclosed herein can also include selecting a subset of neoantigens, wherein the subset of neoantigens is selected because each has an increased likelihood that it is presented on the cell surface of the tumor relative to one or more distinct tumor neoantigens.

[0248] A method disclosed herein can also include selecting a subset of neoantigens, wherein the subset of neoantigens is selected because each has an increased likelihood that it is capable of inducing a tumor-specific immune response in the subject relative to one or more distinct tumor neoantigens.

[0249] A method disclosed herein can also include selecting a subset of neoantigens, wherein the subset of neoantigens is selected because each has an increased likelihood that it is capable of being presented to naïve T cells by professional antigen presenting cells (APCs) relative to one or more distinct tumor neoantigens, optionally wherein the APC is a dendritic cell (DC).

[0250] A method disclosed herein can also include selecting a subset of neoantigens, wherein the subset of neoantigens is selected because each has a decreased likelihood that it is subject to inhibition via central or peripheral tolerance relative to one or more distinct tumor neoantigens.

[0251] A method disclosed herein can also include selecting a subset of neoantigens, wherein the subset of neoantigens is selected because each has a decreased likelihood that it is capable of inducing an autoimmune response to normal tissue in the subject relative to one or more distinct tumor neoantigens.

[0252] A method disclosed herein can also include selecting a subset of neoantigens, wherein the subset of neoantigens is selected because each has a decreased likelihood that it will be differentially post-translationally modified in tumor cells versus APCs, optionally wherein the APC is a dendritic cell (DC).

[0253] The practice of the methods herein will employ, unless otherwise indicated, conventional methods of protein chemistry, biochemistry, recombinant DNA techniques and pharmacology, within the skill of the art. Such techniques are explained fully in the literature. See, e.g., T. E. Creighton, Proteins: Structures and Molecular Properties (W.H. Freeman and Company, 1993); A. L. Lehninger, Biochemistry (Worth Publishers, Inc., current addition); Sambrook, et al., Molecular Cloning: A Laboratory Manual (2nd Edition, 1989); Methods In Enzymology (S. Colowick and N. Kaplan eds., Academic Press, Inc.); Remington's Pharmaceutical Sciences, 18th Edition (Easton, Pa.: Mack Publishing Company, 1990); Carey and Sundberg Advanced Organic Chemistry 3^{rd} Ed. (Plenum Press) Vols A and B (1992).

### III. Identification of Tumor Specific Mutations in Neoantigens

[0254] Also disclosed herein are methods for the identification of certain mutations (e.g., the variants or alleles that are present in cancer cells). In particular, these mutations can be present in the genome, transcriptome, proteome, or exome of cancer cells of a subject having cancer but not in normal tissue from the subject. Specific methods for identifying neoantigens, including shared neoantigens, that are specific to tumors are known to those skilled in the art, for example the methods described in more detail in international patent application publications WO/2017/106638, WO/2018/195357, and WO/2018/208856, each herein incorporated by reference, in their entirety, for all purposes.

[0255] Genetic mutations in tumors can be considered useful for the immunological targeting of tumors if they lead to changes in the amino acid sequence of a protein exclusively in the tumor. Useful mutations include: (1) non-synonymous mutations leading to different amino acids in the protein; (2) read-through mutations in which a stop codon is modified or deleted, leading to translation of a longer protein with a novel tumor-specific sequence at the C-terminus; (3) splice site mutations that lead to the inclusion of an intron in the mature mRNA and thus a unique tumor-specific protein sequence; (4) chromosomal rearrangements that give rise to a chimeric protein with tumor-specific sequences at the junction of 2 proteins (i.e., gene fusion); (5) frameshift mutations or deletions that lead to a new open reading frame with a novel tumor-specific protein sequence. Mutations can also include one or more of nonframeshift indel, missense or nonsense substitution, splice site alteration, genomic rearrangement or gene fusion, or any genomic or expression alteration giving rise to a neoORF.

[0256] Peptides with mutations or mutated polypeptides arising from for example, splice-site, frameshift, readthrough, or gene fusion mutations in tumor cells can be identified by sequencing DNA, RNA or protein in tumor versus normal cells.

[0257] Also mutations can include previously identified tumor specific mutations. Known tumor mutations can be found at the Catalogue of Somatic Mutations in Cancer (COSMIC) database.

[0258] A variety of methods are available for detecting the presence of a particular mutation or allele in an individual's DNA or RNA. Advancements in this field have provided accurate, easy, and inexpensive large-scale SNP genotyping. For example, several techniques have been described including dynamic allele-specific hybridization (DASH), microplate array diagonal gel electrophoresis (MADGE), pyrosequencing, oligonucleotide-specific ligation, the TaqMan system as well as various DNA “chip” technologies such as the Affymetrix SNP chips. These methods utilize amplification of a target genetic region, typically by PCR. Still other methods, based on the generation of small signal molecules by invasive cleavage followed by mass spectrometry or immobilized padlock probes and rolling-circle amplification. Several of the methods known in the art for detecting specific mutations are summarized below.

[0259] PCR based detection means can include multiplex amplification of a plurality of markers simultaneously. For example, it is well known in the art to select PCR primers to generate PCR products that do not overlap in size and can be analyzed simultaneously. Alternatively, it is possible to amplify different markers with primers that are differentially labeled and thus can each be differentially detected. Of course, hybridization based detection means allow the differential detection of multiple PCR products in a sample. Other techniques are known in the art to allow multiplex analyses of a plurality of markers.

[0260] Several methods have been developed to facilitate analysis of single nucleotide polymorphisms in genomic DNA or cellular RNA. For example, a single base polymorphism can be detected by using a specialized exonuclease-resistant nucleotide, as disclosed, e.g., in Mundy, C. R. (U.S. Pat. No. 4,656,127). According to the method, a primer complementary to the allelic sequence immediately 3′ to the polymorphic site is permitted to hybridize to a target molecule obtained from a particular animal or human. If the polymorphic site on the target molecule contains a nucleotide that is complementary to the particular exonuclease-resistant nucleotide derivative present, then that derivative will be incorporated onto the end of the hybridized primer. Such incorporation renders the primer resistant to exonuclease, and thereby permits its detection. Since the identity of the exonuclease-resistant derivative of the sample is known, a finding that the primer has become resistant to exonucleases reveals that the nucleotide(s) present in the polymorphic site of the target molecule is complementary to that of the nucleotide derivative used in the reaction. This method has the advantage that it does not require the determination of large amounts of extraneous sequence data.

[0261] A solution-based method can be used for determining the identity of a nucleotide of a polymorphic site. Cohen, D. et al. (French Patent 2,650,840; PCT Appln. No. WO91/02087). As in the Mundy method of U.S. Pat. No. 4,656,127, a primer is employed that is complementary to allelic sequences immediately 3′ to a polymorphic site. The method determines the identity of the nucleotide of that site using labeled dideoxynucleotide derivatives, which, if complementary to the nucleotide of the polymorphic site will become incorporated onto the terminus of the primer.

[0262] An alternative method, known as Genetic Bit Analysis or GBA is described by Goelet, P. et al. (PCT Appln. No. 92/15712). The method of Goelet, P. et al. uses mixtures of labeled terminators and a primer that is complementary to the sequence 3′ to a polymorphic site. The labeled terminator that is incorporated is thus determined by, and complementary to, the nucleotide present in the polymorphic site of the target molecule being evaluated. In contrast to the method of Cohen et al. (French Patent 2,650,840; PCT Appln. No. WO91/02087) the method of Goelet, P. et al. can be a heterogeneous phase assay, in which the primer or the target molecule is immobilized to a solid phase.

[0263] Several primer-guided nucleotide incorporation procedures for assaying polymorphic sites in DNA have been described (Komher, J. S. et al., Nucl. Acids. Res. 17:7779-7784 (1989); Sokolov, B. P., Nucl. Acids Res. 18:3671 (1990); Syvanen, A.-C., et al., Genomics 8:684-692 (1990); Kuppuswamy, M. N. et al., Proc. Natl. Acad. Sci. (U.S.A.) 88:1143-1147 (1991); Prezant, T. R. et al., Hum. Mutat. 1:159-164 (1992); Ugozzoli, L. et al., GATA 9:107-112 (1992); Nyren, P. et al., Anal. Biochem. 208:171-175 (1993)). These methods differ from GBA in that they utilize incorporation of labeled deoxynucleotides to discriminate between bases at a polymorphic site. In such a format, since the signal is proportional to the number of deoxynucleotides incorporated, polymorphisms that occur in runs of the same nucleotide can result in signals that are proportional to the length of the run (Syvanen, A.-C., et al., Amer. J. Hum. Genet. 52:46-59 (1993)).

[0264] A number of initiatives obtain sequence information directly from millions of individual molecules of DNA or RNA in parallel. Real-time single molecule sequencing-by-synthesis technologies rely on the detection of fluorescent nucleotides as they are incorporated into a nascent strand of DNA that is complementary to the template being sequenced. In one method, oligonucleotides 30-50 bases in length are covalently anchored at the 5′ end to glass cover slips. These anchored strands perform two functions. First, they act as capture sites for the target template strands if the templates are configured with capture tails complementary to the surface-bound oligonucleotides. They also act as primers for the template directed primer extension that forms the basis of the sequence reading. The capture primers function as a fixed position site for sequence determination using multiple cycles of synthesis, detection, and chemical cleavage of the dye-linker to remove the dye. Each cycle consists of adding the polymerase/labeled nucleotide mixture, rinsing, imaging and cleavage of dye. In an alternative method, polymerase is modified with a fluorescent donor molecule and immobilized on a glass slide, while each nucleotide is color-coded with an acceptor fluorescent moiety attached to a gamma-phosphate. The system detects the interaction between a fluorescently-tagged polymerase and a fluorescently modified nucleotide as the nucleotide becomes incorporated into the de novo chain. Other sequencing-by-synthesis technologies also exist.

[0265] Any suitable sequencing-by-synthesis platform can be used to identify mutations. As described above, four major sequencing-by-synthesis platforms are currently available: the Genome Sequencers from Roche/454 Life Sciences, the 1G Analyzer from Illumina/Solexa, the SOLiD system from Applied BioSystems, and the Heliscope system from Helicos Biosciences. Sequencing-by-synthesis platforms have also been described by Pacific BioSciences and VisiGen Biotechnologies. In some embodiments, a plurality of nucleic acid molecules being sequenced is bound to a support (e.g., solid support). To immobilize the nucleic acid on a support, a capture sequence/universal priming site can be added at the 3′ and/or 5′ end of the template. The nucleic acids can be bound to the support by hybridizing the capture sequence to a complementary sequence covalently attached to the support. The capture sequence (also referred to as a universal capture sequence) is a nucleic acid sequence complementary to a sequence attached to a support that may dually serve as a universal primer.

[0266] As an alternative to a capture sequence, a member of a coupling pair (such as, e.g., antibody/antigen, receptor/ligand, or the avidin-biotin pair as described in, e.g., US Patent Application No. 2006/0252077) can be linked to each fragment to be captured on a surface coated with a respective second member of that coupling pair.

[0267] Subsequent to the capture, the sequence can be analyzed, for example, by single molecule detection/sequencing, e.g., as described in the Examples and in U.S. Pat. No. 7,283,337, including template-dependent sequencing-by-synthesis. In sequencing-by-synthesis, the surface-bound molecule is exposed to a plurality of labeled nucleotide triphosphates in the presence of polymerase. The sequence of the template is determined by the order of labeled nucleotides incorporated into the 3′ end of the growing chain. This can be done in real time or can be done in a step-and-repeat mode. For real-time analysis, different optical labels to each nucleotide can be incorporated and multiple lasers can be utilized for stimulation of incorporated nucleotides.

[0268] Sequencing can also include other massively parallel sequencing or next generation sequencing (NGS) techniques and platforms. Additional examples of massively parallel sequencing techniques and platforms are the Illumina HiSeq or MiSeq, Thermo PGM or Proton, the Pac Bio RS II or Sequel, Qiagen's Gene Reader, and the Oxford Nanopore MinION. Additional similar current massively parallel sequencing technologies can be used, as well as future generations of these technologies.

[0269] Any cell type or tissue can be utilized to obtain nucleic acid samples for use in methods described herein. For example, a DNA or RNA sample can be obtained from a tumor or a bodily fluid, e.g., blood, obtained by known techniques (e.g. venipuncture) or saliva. Alternatively, nucleic acid tests can be performed on dry samples (e.g. hair or skin). In addition, a sample can be obtained for sequencing from a tumor and another sample can be obtained from normal tissue for sequencing where the normal tissue is of the same tissue type as the tumor. A sample can be obtained for sequencing from a tumor and another sample can be obtained from normal tissue for sequencing where the normal tissue is of a distinct tissue type relative to the tumor.

[0270] Tumors can include one or more of lung cancer, melanoma, breast cancer, ovarian cancer, prostate cancer, kidney cancer, gastric cancer, colon cancer, testicular cancer, head and neck cancer, pancreatic cancer, brain cancer, B-cell lymphoma, acute myelogenous leukemia, chronic myelogenous leukemia, chronic lymphocytic leukemia, and T cell lymphocytic leukemia, non-small cell lung cancer, and small cell lung cancer.

[0271] Alternatively, protein mass spectrometry can be used to identify or validate the presence of mutated peptides bound to MEW proteins on tumor cells. Peptides can be acid-eluted from tumor cells or from HLA molecules that are immunoprecipitated from tumor, and then identified using mass spectrometry.

### IV. Antigens

[0272] Antigens can include nucleotides or polypeptides. For example, a antigen can be an RNA sequence that encodes for a polypeptide sequence. Antigens useful in vaccines can therefore include nucleotide sequences or polypeptide sequences. Shared neoantigens are shown in Table A (see SEQ ID NO:10,755-21,015) and in the AACR GENIE results (see SEQ ID NO: 21,016-29,357). Shared antigens are shown in Table 1.2 (see SEQ ID NO:57-10,754).

[0273] Disclosed herein are isolated peptides that comprise tumor specific mutations identified by the methods disclosed herein, peptides that comprise known tumor specific mutations, and mutant polypeptides or fragments thereof identified by methods disclosed herein. Neoantigen peptides can be described in the context of their coding sequence where a neoantigen includes the nucleotide sequence (e.g., DNA or RNA) that codes for the related polypeptide sequence.

[0274] Also disclosed herein are peptides derived from any polypeptide known to or have been found to have altered expression in a tumor cell or cancerous tissue in comparison to a normal cell or tissue, for example any polypeptide known to or have been found to be aberrantly expressed in a tumor cell or cancerous tissue in comparison to a normal cell or tissue. Suitable polypeptides from which the antigenic peptides can be derived can be found for example in the COSMIC database. COSMIC curates comprehensive information on somatic mutations in human cancer. The peptide contains the tumor specific mutation.

[0275] One or more polypeptides encoded by a antigen nucleotide sequence can comprise at least one of: a binding affinity with MEW with an IC50 value of less than 1000 nM, for MEW Class I peptides a length of 8-15, 8, 9, 10, 11, 12, 13, 14, or 15 amino acids, presence of sequence motifs within or near the peptide promoting proteasome cleavage, and presence or sequence motifs promoting TAP transport. For MHC Class II peptides a length 6-30, 6, 7, 8, 9, 10, 11, 12, 13, 14, 15, 16, 17, 18,19, 20, 21, 22, 23, 24, 25, 26, 27, 28, 29, or 30 amino acids, presence of sequence motifs within or near the peptide promoting cleavage by extracellular or lysosomal proteases (e.g., cathepsins) or HLA-DM catalyzed HLA binding.

[0276] One or more antigens can be presented on the surface of a tumor.

[0277] One or more antigens can be is immunogenic in a subject having a tumor, e.g., capable of eliciting a T cell response or a B cell response in the subject.

[0278] One or more antigens that induce an autoimmune response in a subject can be excluded from consideration in the context of vaccine generation for a subject having a tumor.

[0279] The size of at least one antigenic peptide molecule can comprise, but is not limited to, about 5, about 6, about 7, about 8, about 9, about 10, about 11, about 12, about 13, about 14, about 15, about 16, about 17, about 18, about 19, about 20, about 21, about 22, about 23, about 24, about 25, about 26, about 27, about 28, about 29, about 30, about 31, about 32, about 33, about 34, about 35, about 36, about 37, about 38, about 39, about 40, about 41, about 42, about 43, about 44, about 45, about 46, about 47, about 48, about 49, about 50, about 60, about 70, about 80, about 90, about 100, about 110, about 120 or greater amino molecule residues, and any range derivable therein. In specific embodiments the antigenic peptide molecules are equal to or less than 50 amino acids.

[0280] Antigenic peptides and polypeptides can be: for MEW Class I 15 residues or less in length and usually consist of between about 8 and about 11 residues, particularly 9 or 10 residues; for MEW Class II, 6-30 residues, inclusive.

[0281] If desirable, a longer peptide can be designed in several ways. In one case, when presentation likelihoods of peptides on HLA alleles are predicted or known, a longer peptide could consist of either: (1) individual presented peptides with an extensions of 2-5 amino acids toward the N- and C-terminus of each corresponding gene product; (2) a concatenation of some or all of the presented peptides with extended sequences for each. In another case, when sequencing reveals a long (>10 residues) neoepitope sequence present in the tumor (e.g. due to a frameshift, read-through or intron inclusion that leads to a novel peptide sequence), a longer peptide would consist of: (3) the entire stretch of novel tumor-specific amino acids—thus bypassing the need for computational or in vitro test-based selection of the strongest HLA-presented shorter peptide. In both cases, use of a longer peptide allows endogenous processing by patient cells and may lead to more effective antigen presentation and induction of T cell responses.

[0282] Antigenic peptides and polypeptides can be presented on an HLA protein. In some aspects antigenic peptides and polypeptides are presented on an HLA protein with greater affinity than a wild-type peptide. In some aspects, a antigenic peptide or polypeptide can have an IC50 of at least less than 5000 nM, at least less than 1000 nM, at least less than 500 nM, at least less than 250 nM, at least less than 200 nM, at least less than 150 nM, at least less than 100 nM, at least less than 50 nM or less.

[0283] In some aspects, antigenic peptides and polypeptides do not induce an autoimmune response and/or invoke immunological tolerance when administered to a subject.

[0284] Also provided are compositions comprising at least two or more antigenic peptides. In some embodiments the composition contains at least two distinct peptides. At least two distinct peptides can be derived from the same polypeptide. By distinct polypeptides is meant that the peptide vary by length, amino acid sequence, or both. The peptides are derived from any polypeptide known to or have been found to contain a tumor specific mutation or peptides derived from any polypeptide known to or have been found to have altered expression in a tumor cell or cancerous tissue in comparison to a normal cell or tissue, for example any polypeptide known to or have been found to be aberrantly expressed in a tumor cell or cancerous tissue in comparison to a normal cell or tissue. Suitable polypeptides from which the antigenic peptides can be derived can be found for example in the COSMIC database or the AACR Genomics Evidence Neoplasia Information Exchange (GENIE) database. COSMIC curates comprehensive information on somatic mutations in human cancer. AACR GENIE aggregates and links clinical-grade cancer genomic data with clinical outcomes from tens of thousands of cancer patients. The peptide contains the tumor specific mutation. In some aspects the tumor specific mutation is a driver mutation for a particular cancer type.

[0285] Antigenic peptides and polypeptides having a desired activity or property can be modified to provide certain desired attributes, e.g., improved pharmacological characteristics, while increasing or at least retaining substantially all of the biological activity of the unmodified peptide to bind the desired MHC molecule and activate the appropriate T cell. For instance, antigenic peptide and polypeptides can be subject to various changes, such as substitutions, either conservative or non-conservative, where such changes might provide for certain advantages in their use, such as improved MHC binding, stability or presentation. By conservative substitutions is meant replacing an amino acid residue with another which is biologically and/or chemically similar, e.g., one hydrophobic residue for another, or one polar residue for another. The substitutions include combinations such as Gly, Ala; Val, Ile, Leu, Met; Asp, Glu; Asn, Gln; Ser, Thr; Lys, Arg; and Phe, Tyr. The effect of single amino acid substitutions may also be probed using D-amino acids. Such modifications can be made using well known peptide synthesis procedures, as described in e.g., Merrifield, Science 232:341-347 (1986), Barany & Merrifield, The Peptides, Gross & Meienhofer, eds. (N.Y., Academic Press), pp. 1-284 (1979); and Stewart & Young, Solid Phase Peptide Synthesis, (Rockford, Ill., Pierce), 2d Ed. (1984).

[0286] Modifications of peptides and polypeptides with various amino acid mimetics or unnatural amino acids can be particularly useful in increasing the stability of the peptide and polypeptide in vivo. Stability can be assayed in a number of ways. For instance, peptidases and various biological media, such as human plasma and serum, have been used to test stability. See, e.g., Verhoef et al., Eur. J. Drug Metab Pharmacokin. 11:291-302 (1986). Half-life of the peptides can be conveniently determined using a 25% human serum (v/v) assay. The protocol is generally as follows. Pooled human serum (Type AB, non-heat inactivated) is delipidated by centrifugation before use. The serum is then diluted to 25% with RPMI tissue culture media and used to test peptide stability. At predetermined time intervals a small amount of reaction solution is removed and added to either 6% aqueous trichloracetic acid or ethanol. The cloudy reaction sample is cooled (4 degrees C.) for 15 minutes and then spun to pellet the precipitated serum proteins. The presence of the peptides is then determined by reversed-phase HPLC using stability-specific chromatography conditions.

[0287] The peptides and polypeptides can be modified to provide desired attributes other than improved serum half-life. For instance, the ability of the peptides to induce CTL activity can be enhanced by linkage to a sequence which contains at least one epitope that is capable of inducing a T helper cell response. Immunogenic peptides/T helper conjugates can be linked by a spacer molecule. The spacer is typically comprised of relatively small, neutral molecules, such as amino acids or amino acid mimetics, which are substantially uncharged under physiological conditions. The spacers are typically selected from, e.g., Ala, Gly, or other neutral spacers of nonpolar amino acids or neutral polar amino acids. It will be understood that the optionally present spacer need not be comprised of the same residues and thus can be a hetero- or homo-oligomer. When present, the spacer will usually be at least one or two residues, more usually three to six residues. Alternatively, the peptide can be linked to the T helper peptide without a spacer.

[0288] A antigenic peptide can be linked to the T helper peptide either directly or via a spacer either at the amino or carboxy terminus of the peptide. The amino terminus of either the antigenic peptide or the T helper peptide can be acylated. Exemplary T helper peptides include tetanus toxoid 830-843, influenza 307-319, malaria circumsporozoite 382-398 and 378-389.

[0289] Proteins or peptides can be made by any technique known to those of skill in the art, including the expression of proteins, polypeptides or peptides through standard molecular biological techniques, the isolation of proteins or peptides from natural sources, or the chemical synthesis of proteins or peptides. The nucleotide and protein, polypeptide and peptide sequences corresponding to various genes have been previously disclosed, and can be found at computerized databases known to those of ordinary skill in the art. One such database is the National Center for Biotechnology Information's Genbank and GenPept databases located at the National Institutes of Health website. The coding regions for known genes can be amplified and/or expressed using the techniques disclosed herein or as would be known to those of ordinary skill in the art. Alternatively, various commercial preparations of proteins, polypeptides and peptides are known to those of skill in the art.

[0290] In a further aspect a antigen includes a nucleic acid (e.g. polynucleotide) that encodes a antigenic peptide or portion thereof. The polynucleotide can be, e.g., DNA, cDNA, PNA, CNA, RNA (e.g., mRNA), either single- and/or double-stranded, or native or stabilized forms of polynucleotides, such as, e.g., polynucleotides with a phosphorothiate backbone, or combinations thereof and it may or may not contain introns. A still further aspect provides an expression vector capable of expressing a polypeptide or portion thereof. Expression vectors for different cell types are well known in the art and can be selected without undue experimentation. Generally, DNA is inserted into an expression vector, such as a plasmid, in proper orientation and correct reading frame for expression. If necessary, DNA can be linked to the appropriate transcriptional and translational regulatory control nucleotide sequences recognized by the desired host, although such controls are generally available in the expression vector. The vector is then introduced into the host through standard techniques. Guidance can be found e.g. in Sambrook et al. (1989) Molecular Cloning, A Laboratory Manual, Cold Spring Harbor Laboratory, Cold Spring Harbor, N.Y.

### V. Vaccine Compositions

[0291] Also disclosed herein is an immunogenic composition, e.g., a vaccine composition, capable of raising a specific immune response, e.g., a tumor-specific immune response. Vaccine compositions typically comprise one or a plurality of antigens, e.g., selected using a method described herein or as set forth in Table A, Table 1.2, or AACR GENIE Results. Vaccine compositions can also be referred to as vaccines.

[0292] A vaccine can contain between 1 and 30 peptides, 2, 3, 4, 5, 6, 7, 8, 9, 10, 11, 12, 13, 14, 15, 16, 17, 18, 19, 20, 21, 22, 23, 24, 25, 26, 27, 28, 29, or 30 different peptides, 6, 7, 8, 9, 10 11, 12, 13, or 14 different peptides, or 12, 13 or 14 different peptides. Peptides can include post-translational modifications. A vaccine can contain between 1 and 100 or more nucleotide sequences, 2, 3, 4, 5, 6, 7, 8, 9, 10, 11, 12, 13, 14, 15, 16, 17, 18, 19, 20, 21, 22, 23, 24, 25, 26, 27, 28, 29, 30, 31, 32, 33, 34, 35, 36, 37, 38, 39, 40, 41, 42, 43, 44, 45, 46, 47, 48, 49, 50, 51, 52, 53, 54, 55, 56, 57, 58, 59, 60, 61, 62, 63, 64, 65, 66, 67, 68, 69, 70, 71, 72, 73, 74, 75, 76, 77, 78, 79, 80, 81, 82, 83, 84, 85, 86, 87, 88, 89, 90, 91, 92, 93, 94,95, 96, 97, 98, 99, 100 or more different nucleotide sequences, 6, 7, 8, 9, 10 11, 12, 13, or 14 different nucleotide sequences, or 12, 13 or 14 different nucleotide sequences. A vaccine can contain between 1 and 30 antigen sequences, 2, 3, 4, 5, 6, 7, 8, 9, 10, 11, 12, 13, 14, 15, 16, 17, 18, 19, 20, 21, 22, 23, 24, 25, 26, 27, 28, 29, 30, 31, 32, 33, 34, 35, 36, 37, 38, 39, 40, 41, 42, 43, 44, 45, 46, 47, 48, 49, 50, 51, 52, 53, 54, 55, 56, 57, 58, 59, 60, 61, 62, 63, 64, 65, 66, 67, 68, 69, 70, 71, 72, 73, 74, 75, 76, 77, 78, 79, 80, 81, 82, 83, 84, 85, 86, 87, 88, 89, 90, 91, 92, 93, 94,95, 96, 97, 98, 99, 100 or more different antigen sequences, 6, 7, 8, 9, 10 11, 12, 13, or 14 different antigen sequences, or 12, 13 or 14 different antigen sequences.

[0293] In one embodiment, different peptides and/or polypeptides or nucleotide sequences encoding them are selected so that the peptides and/or polypeptides capable of associating with different MHC molecules, such as different MHC class I molecules and/or different MHC class II molecules. In some aspects, one vaccine composition comprises coding sequence for peptides and/or polypeptides capable of associating with the most frequently occurring MHC class I molecules and/or different MHC class II molecules. Hence, vaccine compositions can comprise different fragments capable of associating with at least 2 preferred, at least 3 preferred, or at least 4 preferred MHC class I molecules and/or different MHC class II molecules.

[0294] The vaccine composition can be capable of raising a specific cytotoxic T-cells response and/or a specific helper T-cell response.

[0295] A vaccine composition can further comprise an adjuvant and/or a carrier. Examples of useful adjuvants and carriers are given herein below. A composition can be associated with a carrier such as e.g. a protein or an antigen-presenting cell such as e.g. a dendritic cell (DC) capable of presenting the peptide to a T-cell.

[0296] Adjuvants are any substance whose admixture into a vaccine composition increases or otherwise modifies the immune response to a antigen. Carriers can be scaffold structures, for example a polypeptide or a polysaccharide, to which a antigen, is capable of being associated. Optionally, adjuvants are conjugated covalently or non-covalently.

[0297] The ability of an adjuvant to increase an immune response to an antigen is typically manifested by a significant or substantial increase in an immune-mediated reaction, or reduction in disease symptoms. For example, an increase in humoral immunity is typically manifested by a significant increase in the titer of antibodies raised to the antigen, and an increase in T-cell activity is typically manifested in increased cell proliferation, or cellular cytotoxicity, or cytokine secretion. An adjuvant may also alter an immune response, for example, by changing a primarily humoral or Th response into a primarily cellular, or Th response.

[0298] Suitable adjuvants include, but are not limited to 1018 ISS, alum, aluminium salts, Amplivax, AS15, BCG, CP-870,893, CpG7909, CyaA, dSLIM, GM-CSF, IC30, IC31, Imiquimod, ImuFact IMP321, IS Patch, ISS, ISCOMATRIX, JuvImmune, LipoVac, MF59, monophosphoryl lipid A, Montanide IMS 1312, Montanide ISA 206, Montanide ISA 50V, Montanide ISA-51, OK-432, OM-174, OM-197-MP-EC, ONTAK, PepTel vector system, PLG microparticles, resiquimod, SRL172, Virosomes and other Virus-like particles, YF-17D, VEGF trap, R848, beta-glucan, Pam3Cys, Aquila's QS21 stimulon (Aquila Biotech, Worcester, Mass., USA) which is derived from saponin, mycobacterial extracts and synthetic bacterial cell wall mimics, and other proprietary adjuvants such as Ribi's Detox. Quil or Superfos. Adjuvants such as incomplete Freund's or GM-CSF are useful. Several immunological adjuvants (e.g., MF59) specific for dendritic cells and their preparation have been described previously (Dupuis M, et al., Cell Immunol. 1998; 186(1):18-27; Allison A C; Dev Biol Stand. 1998; 92:3-11). Also cytokines can be used. Several cytokines have been directly linked to influencing dendritic cell migration to lymphoid tissues (e.g., TNF-alpha), accelerating the maturation of dendritic cells into efficient antigen-presenting cells for T-lymphocytes (e.g., GM-CSF, IL-1 and IL-4) (U.S. Pat. No. 5,849,589, specifically incorporated herein by reference in its entirety) and acting as immunoadjuvants (e.g., IL-12) (Gabrilovich D I, et al., J Immunother Emphasis Tumor Immunol. 1996 (6):414-418).

[0299] CpG immunostimulatory oligonucleotides have also been reported to enhance the effects of adjuvants in a vaccine setting. Other TLR binding molecules such as RNA binding TLR 7, TLR 8 and/or TLR 9 may also be used.

[0300] Other examples of useful adjuvants include, but are not limited to, chemically modified CpGs (e.g. CpR, Idera), Poly(I:C) (e.g. polyi:CI2U), non-CpG bacterial DNA or RNA as well as immunoactive small molecules and antibodies such as cyclophosphamide, sunitinib, bevacizumab, celebrex, NCX-4016, sildenafil, tadalafil, vardenafil, sorafinib, XL-999, CP-547632, pazopanib, ZD2171, AZD2171, ipilimumab, tremelimumab, and SC58175, which may act therapeutically and/or as an adjuvant. The amounts and concentrations of adjuvants and additives can readily be determined by the skilled artisan without undue experimentation. Additional adjuvants include colony-stimulating factors, such as Granulocyte Macrophage Colony Stimulating Factor (GM-CSF, sargramostim).

[0301] A vaccine composition can comprise more than one different adjuvant. Furthermore, a therapeutic composition can comprise any adjuvant substance including any of the above or combinations thereof. It is also contemplated that a vaccine and an adjuvant can be administered together or separately in any appropriate sequence.

[0302] A carrier (or excipient) can be present independently of an adjuvant. The function of a carrier can for example be to increase the molecular weight of in particular mutant to increase activity or immunogenicity, to confer stability, to increase the biological activity, or to increase serum half-life. Furthermore, a carrier can aid presenting peptides to T-cells. A carrier can be any suitable carrier known to the person skilled in the art, for example a protein or an antigen presenting cell. A carrier protein could be but is not limited to keyhole limpet hemocyanin, serum proteins such as transferrin, bovine serum albumin, human serum albumin, thyroglobulin or ovalbumin, immunoglobulins, or hormones, such as insulin or palmitic acid. For immunization of humans, the carrier is generally a physiologically acceptable carrier acceptable to humans and safe. However, tetanus toxoid and/or diptheria toxoid are suitable carriers. Alternatively, the carrier can be dextrans for example sepharose.

[0303] Cytotoxic T-cells (CTLs) recognize an antigen in the form of a peptide bound to an MHC molecule rather than the intact foreign antigen itself. The MHC molecule itself is located at the cell surface of an antigen presenting cell. Thus, an activation of CTLs is possible if a trimeric complex of peptide antigen, MHC molecule, and APC is present. Correspondingly, it may enhance the immune response if not only the peptide is used for activation of CTLs, but if additionally APCs with the respective MHC molecule are added. Therefore, in some embodiments a vaccine composition additionally contains at least one antigen presenting cell.

[0304] Antigens can also be included in viral vector-based vaccine platforms, such as vaccinia, fowlpox, self-replicating alphavirus, marabavirus, adenovirus (See, e.g., Tatsis et al., Adenoviruses, Molecular Therapy (2004) 10, 616-629), or lentivirus, including but not limited to second, third or hybrid second/third generation lentivirus and recombinant lentivirus of any generation designed to target specific cell types or receptors (See, e.g., Hu et al., Immunization Delivered by Lentiviral Vectors for Cancer and Infectious Diseases, Immunol Rev. (2011) 239(1): 45-61, Sakuma et al., Lentiviral vectors: basic to translational, Biochem J. (2012) 443(3):603-18, Cooper et al., Rescue of splicing-mediated intron loss maximizes expression in lentiviral vectors containing the human ubiquitin C promoter, Nucl. Acids Res. (2015) 43 (1): 682-690, Zufferey et al., Self-Inactivating Lentivirus Vector for Safe and Efficient In Vivo Gene Delivery, J. Virol. (1998) 72 (12): 9873-9880). Dependent on the packaging capacity of the above mentioned viral vector-based vaccine platforms, this approach can deliver one or more nucleotide sequences that encode one or more neoantigen peptides. The sequences may be flanked by non-mutated sequences, may be separated by linkers or may be preceded with one or more sequences targeting a subcellular compartment (See, e.g., Gros et al., Prospective identification of neoantigen-specific lymphocytes in the peripheral blood of melanoma patients, Nat Med. (2016) 22 (4):433-8, Stronen et al., Targeting of cancer neoantigens with donor-derived T cell receptor repertoires, Science. (2016) 352 (6291):1337-41, Lu et al., Efficient identification of mutated cancer antigens recognized by T cells associated with durable tumor regressions, Clin Cancer Res. (2014) 20(13):3401-10). Upon introduction into a host, infected cells express the antigens, and thereby elicit a host immune (e.g., CTL) response against the peptide(s). Vaccinia vectors and methods useful in immunization protocols are described in, e.g., U.S. Pat. No. 4,722,848. Another vector is BCG (Bacille Calmette Guerin). BCG vectors are described in Stover et al. (Nature 351:456-460 (1991)). A wide variety of other vaccine vectors useful for therapeutic administration or immunization of antigens, e.g., Salmonella typhi vectors, and the like will be apparent to those skilled in the art from the description herein.

[0305] V.A. Antigen Cassette

[0306] The methods employed for the selection of one or more antigens, the cloning and construction of a “cassette” and its insertion into a viral vector are within the skill in the art given the teachings provided herein. By “antigen cassette” is meant the combination of a selected antigen or plurality of antigens and the other regulatory elements necessary to transcribe the antigen(s) and express the transcribed product. A antigen or plurality of antigens can be operatively linked to regulatory components in a manner which permits transcription. Such components include conventional regulatory elements that can drive expression of the antigen(s) in a cell transfected with the viral vector. Thus the antigen cassette can also contain a selected promoter which is linked to the antigen(s) and located, with other, optional regulatory elements, within the selected viral sequences of the recombinant vector. Cassettes can include one or more neoantigens shown in Table A and/or AACR GENIE Results, and/or one or more antigens shown in Table 1.2.

[0307] Useful promoters can be constitutive promoters or regulated (inducible) promoters, which will enable control of the amount of antigen(s) to be expressed. For example, a desirable promoter is that of the cytomegalovirus immediate early promoter/enhancer [see, e.g., Boshart et al, Cell, 41:521-530 (1985)]. Another desirable promoter includes the Rous sarcoma virus LTR promoter/enhancer. Still another promoter/enhancer sequence is the chicken cytoplasmic beta-actin promoter [T. A. Kost et al, Nucl. Acids Res., 11(23):8287 (1983)]. Other suitable or desirable promoters can be selected by one of skill in the art.

[0308] The antigen cassette can also include nucleic acid sequences heterologous to the viral vector sequences including sequences providing signals for efficient polyadenylation of the transcript (poly(A), poly-A or pA) and introns with functional splice donor and acceptor sites. A common poly-A sequence which is employed in the exemplary vectors of this invention is that derived from the papovavirus SV-40. The poly-A sequence generally can be inserted in the cassette following the antigen-based sequences and before the viral vector sequences. A common intron sequence can also be derived from SV-40, and is referred to as the SV-40 T intron sequence. A antigen cassette can also contain such an intron, located between the promoter/enhancer sequence and the antigen(s). Selection of these and other common vector elements are conventional [see, e.g., Sambrook et al, “Molecular Cloning. A Laboratory Manual.”, 2d edit., Cold Spring Harbor Laboratory, New York (1989) and references cited therein] and many such sequences are available from commercial and industrial sources as well as from Genbank.

[0309] A antigen cassette can have one or more antigens. For example, a given cassette can include 1-10, 1-20, 1-30, 10-20, 15-25, 15-20, 1, 2, 3, 4, 5, 6, 7, 8, 9, 10, 11, 12, 13, 14, 15, 16, 17, 18, 19, 20, or more antigens. Antigens can be linked directly to one another. Antigens can also be linked to one another with linkers. Antigens can be in any orientation relative to one another including N to C or C to N.

[0310] As above stated, the antigen cassette can be located in the site of any selected deletion in the viral vector, such as the site of the E1 gene region deletion or E3 gene region deletion, among others which may be selected.

[0311] The antigen cassette can be described using the following formula to describe the ordered sequence of each element, from 5′ to 3′:

(Pₐ-(L5_{b}-N_{c}-L3_{d})_{X})_{Z}-(P2ₕ-(G5ₑ-U_{f})_{Y})_{W}-G3_{g}

[0312] wherein P and P2 comprise promoter nucleotide sequences, N comprises an MHC class I epitope encoding nucleic acid sequence, L5 comprises a 5′ linker sequence, L3 comprises a 3′ linker sequence, G5 comprises a nucleic acid sequences encoding an amino acid linker, G3 comprises one of the at least one nucleic acid sequences encoding an amino acid linker, U comprises an MHC class II antigen-encoding nucleic acid sequence, where for each X the corresponding Nc is a epitope encoding nucleic acid sequence, where for each Y the corresponding Uf is an antigen-encoding nucleic acid sequence. The composition and ordered sequence can be further defined by selecting the number of elements present, for example where a=0 or 1, whereb=0 or 1, where c=1, where d=0 or 1, where e=0 or 1, where f=1, where g=0 or 1, where h=0 or 1, X=1 to 400, Y=0, 1, 2, 3, 4 or 5, Z=1 to 400, and W=0, 1, 2, 3, 4 or 5.

[0313] In one example, elements present include where a=0, b=1, d=1, e=1, g=1, h=0, X=10, Y=2, Z=1, and W=1, describing where no additional promoter is present (i.e. only the promoter nucleotide sequence provided by the RNA alphavirus backbone is present), 20 MHC class I epitope are present, a 5′ linker is present for each N, a 3′ linker is present for each N, 2 MHC class II epitopes are present, a linker is present linking the two MHC class II epitopes, a linker is present linking the 5′ end of the two MHC class II epitopes to the 3′ linker of the final MHC class I epitope, and a linker is present linking the 3′ end of the two MHC class II epitopes to the to the RNA alphavirus backbone. Examples of linking the 3′ end of the antigen cassette to the RNA alphavirus backbone include linking directly to the 3′ UTR elements provided by the RNA alphavirus backbone, such as a 3′ 19-nt CSE. Examples of linking the 5′ end of the antigen cassette to the RNA alphavirus backbone include linking directly to a 26S promoter sequence, an alphavirus 5′ UTR, a 51-nt CSE, or a 24-nt CSE.

[0314] Other examples include: where a=1 describing where a promoter other than the promoter nucleotide sequence provided by the RNA alphavirus backbone is present; where a=1 and Z is greater than 1 where multiple promoters other than the promoter nucleotide sequence provided by the RNA alphavirus backbone are present each driving expression of 1 or more distinct MHC class I epitope encoding nucleic acid sequences; where h=1 describing where a separate promoter is present to drive expression of the MHC class II antigen-encoding nucleic acid sequences; and where g=0 describing the MHC class II antigen-encoding nucleic acid sequence, if present, is directly linked to the RNA alphavirus backbone.

[0315] Other examples include where each MHC class I epitope that is present can have a 5′ linker, a 3′ linker, neither, or both. In examples where more than one MHC class I epitope is present in the same antigen cassette, some MHC class I epitopes may have both a 5′ linker and a 3′ linker, while other MHC class I epitopes may have either a 5′ linker, a 3′ linker, or neither. In other examples where more than one MHC class I epitope is present in the same antigen cassette, some MHC class I epitopes may have either a 5′ linker or a 3′ linker, while other MHC class I epitopes may have either a 5′ linker, a 3′ linker, or neither.

[0316] In examples where more than one MHC class II epitope is present in the same antigen cassette, some MHC class II epitopes may have both a 5′ linker and a 3′ linker, while other MHC class II epitopes may have either a 5′ linker, a 3′ linker, or neither. In other examples where more than one MHC class II epitope is present in the same antigen cassette, some MHC class II epitopes may have either a 5′ linker or a 3′ linker, while other MHC class II epitopes may have either a 5′ linker, a 3′ linker, or neither.

[0317] The promoter nucleotide sequences P and/or P2 can be the same as a promoter nucleotide sequence provided by the RNA alphavirus backbone. For example, the promoter sequence provided by the RNA alphavirus backbone, Pn and P2, can each comprise a 26S subgenomic promoter. The promoter nucleotide sequences P and/or P2 can be different from the promoter nucleotide sequence provided by the RNA alphavirus backbone, as well as can be different from each other.

[0318] The 5′ linker L5 can be a native sequence or a non-natural sequence. Non-natural sequence include, but are not limited to, AAY, RR, and DPP. The 3′ linker L3 can also be a native sequence or a non-natural sequence. Additionally, L5 and L3 can both be native sequences, both be non-natural sequences, or one can be native and the other non-natural. For each X, the amino acid linkers can be 2, 3, 4, 5, 6, 7, 8, 9, 10, 11, 12, 13, 14, 15, 16, 17, 18, 19, 20, 21, 22, 23, 24, 25, 26, 27, 28, 29, 30, 31, 32, 33, 34, 35, 36, 37, 38, 39, 40, 41, 42, 43, 44, 45, 46, 47, 48, 49, 50, 51, 52, 53, 54, 55, 56, 57, 58, 59, 60, 61, 62, 63, 64, 65, 66, 67, 68, 69, 70, 71, 72, 73, 74, 75, 76, 77, 78, 79, 80, 81, 82, 83, 84, 85, 86, 87, 88, 89, 90, 91, 92, 93, 94,95, 96, 97, 98, 99, 100 or more amino acids in length. For each X, the amino acid linkers can be also be at least 3, at least 4, at least 5, at least 6, at least 7, at least 8, at least 9, at least 10, at least 11, at least 12, at least 13, at least 14, at least 15, at least 16, at least 17, at least 18, at least 19, at least 20, at least 21, at least 22, at least 23, at least 24, at least 25, at least 26, at least 27, at least 28, at least 29, or at least 30 amino acids in length.

[0319] The amino acid linker G5, for each Y, can be 2, 3, 4, 5, 6, 7, 8, 9, 10, 11, 12, 13, 14, 15, 16, 17, 18, 19, 20, 21, 22, 23, 24, 25, 26, 27, 28, 29, 30, 31, 32, 33, 34, 35, 36, 37, 38, 39, 40, 41, 42, 43, 44, 45, 46, 47, 48, 49, 50, 51, 52, 53, 54, 55, 56, 57, 58, 59, 60, 61, 62, 63, 64, 65, 66, 67, 68, 69, 70, 71, 72, 73, 74, 75, 76, 77, 78, 79, 80, 81, 82, 83, 84, 85, 86, 87, 88, 89, 90, 91, 92, 93, 94,95, 96, 97, 98, 99, 100 or more amino acids in length. For each Y, the amino acid linkers can be also be at least 3, at least 4, at least 5, at least 6, at least 7, at least 8, at least 9, at least 10, at least 11, at least 12, at least 13, at least 14, at least 15, at least 16, at least 17, at least 18, at least 19, at least 20, at least 21, at least 22, at least 23, at least 24, at least 25, at least 26, at least 27, at least 28, at least 29, or at least 30 amino acids in length.

[0320] The amino acid linker G3 can be 2, 3, 4, 5, 6, 7, 8, 9, 10, 11, 12, 13, 14, 15, 16, 17, 18, 19, 20, 21, 22, 23, 24, 25, 26, 27, 28, 29, 30, 31, 32, 33, 34, 35, 36, 37, 38, 39, 40, 41, 42, 43, 44, 45, 46, 47, 48, 49, 50, 51, 52, 53, 54, 55, 56, 57, 58, 59, 60, 61, 62, 63, 64, 65, 66, 67, 68, 69, 70, 71, 72, 73, 74, 75, 76, 77, 78, 79, 80, 81, 82, 83, 84, 85, 86, 87, 88, 89, 90, 91, 92, 93, 94,95, 96, 97, 98, 99, 100 or more amino acids in length. G3 can be also be at least 3, at least 4, at least 5, at least 6, at least 7, at least 8, at least 9, at least 10, at least 11, at least 12, at least 13, at least 14, at least 15, at least 16, at least 17, at least 18, at least 19, at least 20, at least 21, at least 22, at least 23, at least 24, at least 25, at least 26, at least 27, at least 28, at least 29, or at least 30 amino acids in length.

[0321] For each X, each N can encodes a MHC class I epitope 7-15 amino acids in length. For each X, each N can also encodes a MEW class I epitope 5, 6, 7, 8, 9, 10, 11, 12, 13, 14, 15, 16, 17, 18, 19, 20, 21, 22, 23, 24, 25, 26, 27, 28, 29, or 30 amino acids in length. For each X, each N can also encodes a MHC class I epitope at least 5, at least 6, at least 7, at least 8, at least 9, at least 10, at least 11, at least 12, at least 13, at least 14, at least 15, at least 16, at least 17, at least 18, at least 19, at least 20, at least 21, at least 22, at least 23, at least 24, at least 25, at least 26, at least 27, at least 28, at least 29, or at least 30 amino acids in length.

[0322] V.B. Immune Checkpoints

[0323] Vectors described herein, such as C68 vectors described herein or alphavirus vectors described herein, can comprise a nucleic acid which encodes at least one antigen and the same or a separate vector can comprise a nucleic acid which encodes at least one immune modulator (e.g., an antibody such as an scFv) which binds to and blocks the activity of an immune checkpoint molecule. Vectors can comprise a antigen cassette and one or more nucleic acid molecules encoding a checkpoint inhibitor.

[0324] Illustrative immune checkpoint molecules that can be targeted for blocking or inhibition include, but are not limited to, CTLA-4, 4-1BB (CD137), 4-1BBL (CD137L), PDL1, PDL2, PD1, B7-H3, B7-H4, BTLA, HVEM, TIM3, GAL9, LAG3, TIM3, B7H3, B7H4, VISTA, KIR, 2B4 (belongs to the CD2 family of molecules and is expressed on all NK, γδ, and memory CD8+ (c43) T cells), CD160 (also referred to as BY55), and CGEN-15049. Immune checkpoint inhibitors include antibodies, or antigen binding fragments thereof, or other binding proteins, that bind to and block or inhibit the activity of one or more of CTLA-4, PDL1, PDL2, PD1, B7-H3, B7-H4, BTLA, HVEM, TIM3, GAL9, LAG3, TIM3, B7H3, B7H4, VISTA, KIR, 2B4, CD160, and CGEN-15049. Illustrative immune checkpoint inhibitors include Tremelimumab (CTLA-4 blocking antibody), anti-OX40, PD-L1 monoclonal Antibody (Anti-B7-H1; MEDI4736), ipilimumab, MK-3475 (PD-1 blocker), Nivolumamb (anti-PD1 antibody), CT-011 (anti-PD1 antibody), BY55 monoclonal antibody, AMP224 (anti-PDL1 antibody), BMS-936559 (anti-PDL1 antibody), MPLDL3280A (anti-PDL1 antibody), MSB0010718C (anti-PDL1 antibody) and Yervoy/ipilimumab (anti-CTLA-4 checkpoint inhibitor). Antibody-encoding sequences can be engineered into vectors such as C68 using ordinary skill in the art. An exemplary method is described in Fang et al., Stable antibody expression at therapeutic levels using the 2A peptide. Nat Biotechnol. 2005 May; 23(5):584-90. Epub 2005 Apr. 17; herein incorporated by reference for all purposes.

[0325] V.C. Additional Considerations for Vaccine Design and Manufacture

[0326] V.C.1. Determination of a Set of Peptides that Cover all Tumor Subclones

[0327] Truncal peptides, meaning those presented by all or most tumor subclones, can be prioritized for inclusion into the vaccine.⁵³ Optionally, if there are no truncal peptides predicted to be presented and immunogenic with high probability, or if the number of truncal peptides predicted to be presented and immunogenic with high probability is small enough that additional non-truncal peptides can be included in the vaccine, then further peptides can be prioritized by estimating the number and identity of tumor subclones and choosing peptides so as to maximize the number of tumor subclones covered by the vaccine.⁵⁴

[0328] V.C.2. Antigen Prioritization

[0329] After all of the above above antigen filters are applied, more candidate antigens may still be available for vaccine inclusion than the vaccine technology can support. Additionally, uncertainty about various aspects of the antigen analysis may remain and tradeoffs may exist between different properties of candidate vaccine antigens. Thus, in place of predetermined filters at each step of the selection process, an integrated multi-dimensional model can be considered that places candidate antigens in a space with at least the following axes and optimizes selection using an integrative approach.
[0330] 1. Risk of auto-immunity or tolerance (risk of germline) (lower risk of auto-immunity is typically preferred)
[0331] 2. Probability of sequencing artifact (lower probability of artifact is typically preferred)
[0332] 3. Probability of immunogenicity (higher probability of immunogenicity is typically preferred)
[0333] 4. Probability of presentation (higher probability of presentation is typically preferred)
[0334] 5. Gene expression (higher expression is typically preferred)
[0335] 6. Coverage of HLA genes (larger number of HLA molecules involved in the presentation of a set of antigens may lower the probability that a tumor will escape immune attack via downregulation or mutation of HLA molecules)
[0336] 7. Coverage of HLA classes (covering both HLA-I and HLA-II may increase the probability of therapeutic response and decrease the probability of tumor escape)

[0337] Additionally, optionally, antigens can be deprioritized (e.g., excluded) from the vaccination if they are predicted to be presented by HLA alleles lost or inactivated in either all or part of the patient's tumor. HLA allele loss can occur by either somatic mutation, loss of heterozygosity, or homozygous deletion of the locus. Methods for detection of HLA allele somatic mutation are well known in the art, e.g. (Shukla et al., 2015). Methods for detection of somatic LOH and homozygous deletion (including for HLA locus) are likewise well described. (Carter et al., 2012; McGranahan et al., 2017; Van Loo et al., 2010). Antigens can also be deprioritized if mass-spectrometry data indicates a predicted antigen is not presented by a predicted HLA allele.

[0338] V.D. Alphavirus

[0339] V.D.1. Alphavirus Biology

[0340] Alphaviruses are members of the family Togaviridae, and are positive-sense single stranded RNA viruses. Members are typically classified as either Old World, such as Sindbis, Ross River, Mayaro, Chikungunya, and Semliki Forest viruses, or New World, such as eastern equine encephalitis, Aura, Fort Morgan, or Venezuelan equine encephalitis virus and its derivative strain TC-83 (Strauss Microbrial Review 1994). A natural alphavirus genome is typically around 12 kb in length, the first two-thirds of which contain genes encoding non-structural proteins (nsPs) that form RNA replication complexes for self-replication of the viral genome, and the last third of which contains a subgenomic expression cassette encoding structural proteins for virion production (Frolov RNA 2001).

[0341] A model lifecycle of an alphavirus involves several distinct steps (Strauss Microbrial Review 1994, Jose Future Microbiol 2009). Following virus attachment to a host cell, the virion fuses with membranes within endocytic compartments resulting in the eventual release of genomic RNA into the cytosol. The genomic RNA, which is in a plus-strand orientation and comprises a 5′ methylguanylate cap and 3′ polyA tail, is translated to produce non-structural proteins nsP1-4 that form the replication complex. Early in infection, the plus-strand is then replicated by the complex into a minus-stand template. In the current model, the replication complex is further processed as infection progresses, with the resulting processed complex switching to transcription of the minus-strand into both full-length positive-strand genomic RNA, as well as the 26S subgenomic positive-strand RNA containing the structural genes. Several conserved sequence elements (CSEs) of alphavirus have been identified to potentially play a role in the various RNA replication steps including; a complement of the 5′ UTR in the replication of plus-strand RNAs from a minus-strand template, a 51-nt CSE in the replication of minus-strand synthesis from the genomic template, a 24-nt CSE in the junction region between the nsPs and the 26S RNA in the transcription of the subgenomic RNA from the minus-strand, and a 3′ 19-nt CSE in minus-strand synthesis from the plus-strand template.

[0342] Following the replication of the various RNA species, virus particles are then typically assembled in the natural lifecycle of the virus. The 26S RNA is translated and the resulting proteins further processed to produce the structural proteins including capsid protein, glycoproteins E1 and E2, and two small polypeptides E3 and 6K (Strauss 1994). Encapsidation of viral RNA occurs, with capsid proteins normally specific for only genomic RNA being packaged, followed by virion assembly and budding at the membrane surface.

[0343] V.D.2. Alphavirus as a Delivery Vector

[0344] Alphaviruses (including alphavirus sequences, features, and other elements) can be used to generate alphavirus-based delivery vectors (also be referred to as alphavirus vectors, alphavirus viral vectors, alphavirus vaccine vectors, self-replicating RNA (srRNA) vectors, or self-amplifying RNA (samRNA) vectors). Alphaviruses have previously been engineered for use as expression vector systems (Pushko 1997, Rheme 2004). Alphaviruses offer several advantages, particularly in a vaccine setting where heterologous antigen expression can be desired. Due to its ability to self-replicate in the host cytosol, alphavirus vectors are generally able to produce high copy numbers of the expression cassette within a cell resulting in a high level of heterologous antigen production. Additionally, the vectors are generally transient, resulting in improved biosafety as well as reduced induction of immunological tolerance to the vector. The public, in general, also lacks pre-existing immunity to alphavirus vectors as compared to other standard viral vectors, such as human adenovirus. Alphavirus based vectors also generally result in cytotoxic responses to infected cells. Cytotoxicity, to a certain degree, can be important in a vaccine setting to properly illicit an immune response to the heterologous antigen expressed. However, the degree of desired cytotoxicity can be a balancing act, and thus several attenuated alphaviruses have been developed, including the TC-83 strain of VEE. Thus, an example of a antigen expression vector described herein can utilize an alphavirus backbone that allows for a high level of antigen expression, elicits a robust immune response to antigen, does not elicit an immune response to the vector itself, and can be used in a safe manner. Furthermore, the antigen expression cassette can be designed to elicit different levels of an immune response through optimization of which alphavirus sequences the vector uses, including, but not limited to, sequences derived from VEE or its attenuated derivative TC-83.

[0345] Several expression vector design strategies have been engineered using alphavirus sequences (Pushko 1997). In one strategy, a alphavirus vector design includes inserting a second copy of the 26S promoter sequence elements downstream of the structural protein genes, followed by a heterologous gene (Frolov 1993). Thus, in addition to the natural non-structural and structural proteins, an additional subgenomic RNA is produced that expresses the heterologous protein. In this system, all the elements for production of infectious virions are present and, therefore, repeated rounds of infection of the expression vector in non-infected cells can occur.

[0346] Another expression vector design makes use of helper virus systems (Pushko 1997). In this strategy, the structural proteins are replaced by a heterologous gene. Thus, following self-replication of viral RNA mediated by still intact non-structural genes, the 26S subgenomic RNA provides for expression of the heterologous protein. Traditionally, additional vectors that expresses the structural proteins are then supplied in trans, such as by co-transfection of a cell line, to produce infectious virus. A system is described in detail in U.S. Pat. No. 8,093,021, which is herein incorporated by reference in its entirety, for all purposes. The helper vector system provides the benefit of limiting the possibility of forming infectious particles and, therefore, improves biosafety. In addition, the helper vector system reduces the total vector length, potentially improving the replication and expression efficiency. Thus, an example of a antigen expression vector described herein can utilize an alphavirus backbone wherein the structural proteins are replaced by a antigen cassette, the resulting vector both reducing biosafety concerns, while at the same time promoting efficient expression due to the reduction in overall expression vector size.

[0347] V.D.3. Alphavirus Production In Vitro

[0348] Alphavirus delivery vectors are generally positive-sense RNA polynucleotides. A convenient technique well-known in the art for RNA production is in vitro transcription IVT. In this technique, a DNA template of the desired vector is first produced by techniques well-known to those in the art, including standard molecular biology techniques such as cloning, restriction digestion, ligation, gene synthesis, and polymerase chain reaction (PCR). The DNA template contains a RNA polymerase promoter at the 5′ end of the sequence desired to be transcribed into RNA. Promoters include, but are not limited to, bacteriophage polymerase promoters such as T3, T7, or SP6. The DNA template is then incubated with the appropriate RNA polymerase enzyme, buffer agents, and nucleotides (NTPs). The resulting RNA polynucleotide can optionally be further modified including, but limited to, addition of a 5′ cap structure such as 7-methylguanosine or a related structure, and optionally modifying the 3′ end to include a polyadenylate (polyA) tail. The RNA can then be purified using techniques well-known in the field, such as phenol-chloroform extraction.

[0349] V.D.4. Delivery Via Lipid Nanoparticle

[0350] An important aspect to consider in vaccine vector design is immunity against the vector itself (Riley 2017). This may be in the form of preexisting immunity to the vector itself, such as with certain human adenovirus systems, or in the form of developing immunity to the vector following administration of the vaccine. The latter is an important consideration if multiple administrations of the same vaccine are performed, such as separate priming and boosting doses, or if the same vaccine vector system is to be used to deliver different antigen cassettes.

[0351] In the case of alphavirus vectors, the standard delivery method is the previously discussed helper virus system that provides capsid, E1, and E2 proteins in trans to produce infectious viral particles. However, it is important to note that the E1 and E2 proteins are often major targets of neutralizing antibodies (Strauss 1994). Thus, the efficacy of using alphavirus vectors to deliver antigens of interest to target cells may be reduced if infectious particles are targeted by neutralizing antibodies.

[0352] An alternative to viral particle mediated gene delivery is the use of nanomaterials to deliver expression vectors (Riley 2017). Nanomaterial vehicles, importantly, can be made of non-immunogenic materials and generally avoid eliciting immunity to the delivery vector itself. These materials can include, but are not limited to, lipids, inorganic nanomaterials, and other polymeric materials. Lipids can be cationic, anionic, or neutral. The materials can be synthetic or naturally derived, and in some instances biodegradable. Lipids can include fats, cholesterol, phospholipids, lipid conjugates including, but not limited to, polyethyleneglycol (PEG) conjugates (PEGylated lipids), waxes, oils, glycerides, and fat soulable vitamins.

[0353] Lipid nanoparticles (LNPs) are an attractive delivery system due to the amphiphilic nature of lipids enabling formation of membranes and vesicle like structures (Riley 2017). In general, these vesicles deliver the expression vector by absorbing into the membrane of target cells and releasing nucleic acid into the cytosol. In addition, LNPs can be further modified or functionalized to facilitate targeting of specific cell types. Another consideration in LNP design is the balance between targeting efficiency and cytotoxicity. Lipid compositions generally include defined mixtures of cationic, neutral, anionic, and amphipathic lipids. In some instances, specific lipids are included to prevent LNP aggregation, prevent lipid oxidation, or provide functional chemical groups that facilitate attachment of additional moieties. Lipid composition can influence overall LNP size and stability. In an example, the lipid composition comprises dilinoleylmethyl-4-dimethylaminobutyrate (MC3) or MC3-like molecules. MC3 and MC3-like lipid compositions can be formulated to include one or more other lipids, such as a PEG or PEG-conjugated lipid, a sterol, or neutral lipids.

[0354] Nucleic-acid vectors, such as expression vectors, exposed directly to serum can have several undesirable consequences, including degradation of the nucleic acid by serum nucleases or off-target stimulation of the immune system by the free nucleic acids. Therefore, encapsulation of the alphavirus vector can be used to avoid degradation, while also avoiding potential off-target affects. In certain examples, an alphavirus vector is fully encapsulated within the delivery vehicle, such as within the aqueous interior of an LNP. Encapsulation of the alphavirus vector within an LNP can be carried out by techniques well-known to those skilled in the art, such as microfluidic mixing and droplet generation carried out on a microfluidic droplet generating device. Such devices include, but are not limited to, standard T-junction devices or flow-focusing devices. In an example, the desired lipid formulation, such as MC3 or MC3-like containing compositions, is provided to the droplet generating device in parallel with the alphavirus delivery vector and other desired agents, such that the delivery vector and desired agents are fully encapsulated within the interior of the MC3 or MC3-like based LNP. In an example, the droplet generating device can control the size range and size distribution of the LNPs produced. For example, the LNP can have a size ranging from 1 to 1000 nanometers in diameter, e.g., 1, 10, 50, 100, 500, or 1000 nanometers. Following droplet generation, the delivery vehicles encapsulating the expression vectors can be further treated or modified to prepare them for administration.

[0355] V.E. Chimpanzee Adenovirus (ChAd)

[0356] V.E.1. Viral Delivery with Chimpanzee Adenovirus

[0357] Vaccine compositions for delivery of one or more antigens (e.g., via a antigen cassette and including one or more neoantigens shown in Table A and/or AACR GENIE Results, and/or one or more antigens shown in Table 1.2) can be created by providing adenovirus nucleotide sequences of chimpanzee origin, a variety of novel vectors, and cell lines expressing chimpanzee adenovirus genes. A nucleotide sequence of a chimpanzee C68 adenovirus (also referred to herein as ChAdV68) can be used in a vaccine composition for antigen delivery (See SEQ ID NO: 1). Use of C68 adenovirus derived vectors is described in further detail in U.S. Pat. No. 6,083,716, which is herein incorporated by reference in its entirety, for all purposes.

[0358] In a further aspect, provided herein is a recombinant adenovirus comprising the DNA sequence of a chimpanzee adenovirus such as C68 and a antigen cassette operatively linked to regulatory sequences directing its expression. The recombinant virus is capable of infecting a mammalian, preferably a human, cell and capable of expressing the antigen cassette product in the cell. In this vector, the native chimpanzee E1 gene, and/or E3 gene, and/or E4 gene can be deleted. A antigen cassette can be inserted into any of these sites of gene deletion. The antigen cassette can include a antigen against which a primed immune response is desired.

[0359] In another aspect, provided herein is a mammalian cell infected with a chimpanzee adenovirus such as C68.

[0360] In still a further aspect, a novel mammalian cell line is provided which expresses a chimpanzee adenovirus gene (e.g., from C68) or functional fragment thereof.

[0361] In still a further aspect, provided herein is a method for delivering a antigen cassette into a mammalian cell comprising the step of introducing into the cell an effective amount of a chimpanzee adenovirus, such as C68, that has been engineered to express the antigen cassette.

[0362] Still another aspect provides a method for eliciting an immune response in a mammalian host to treat cancer. The method can comprise the step of administering to the host an effective amount of a recombinant chimpanzee adenovirus, such as C68, comprising a antigen cassette that encodes one or more antigens from the tumor against which the immune response is targeted.

[0363] Also disclosed is a non-simian mammalian cell that expresses a chimpanzee adenovirus gene obtained from the sequence of SEQ ID NO: 1. The gene can be selected from the group consisting of the adenovirus E1A, E1B, E2A, E2B, E3, E4, L1, L2, L3, L4 and L5 of SEQ ID NO:

[0364] Also disclosed is a nucleic acid molecule comprising a chimpanzee adenovirus DNA sequence comprising a gene obtained from the sequence of SEQ ID NO: 1. The gene can be selected from the group consisting of said chimpanzee adenovirus E1A, E1B, E2A, E2B, E3, E4, L1, L2, L3, L4 and L5 genes of SEQ ID NO: 1. In some aspects the nucleic acid molecule comprises SEQ ID NO: 1. In some aspects the nucleic acid molecule comprises the sequence of SEQ ID NO: 1, lacking at least one gene selected from the group consisting of E1A, E1B, E2A, E2B, E3, E4, L1, L2, L3, L4 and L5 genes of SEQ ID NO: 1.

[0365] Also disclosed is a vector comprising a chimpanzee adenovirus DNA sequence obtained from SEQ ID NO: 1 and a antigen cassette operatively linked to one or more regulatory sequences which direct expression of the cassette in a heterologous host cell, optionally wherein the chimpanzee adenovirus DNA sequence comprises at least the cis-elements necessary for replication and virion encapsidation, the cis-elements flanking the antigen cassette and regulatory sequences. In some aspects, the chimpanzee adenovirus DNA sequence comprises a gene selected from the group consisting of E1A, E1B, E2A, E2B, E3, E4, L1, L2, L3, L4 and L5 gene sequences of SEQ ID NO: 1. In some aspects the vector can lack the E1A and/or E1B gene.

[0366] Also disclosed herein is a host cell transfected with a vector disclosed herein such as a C68 vector engineered to expression a antigen cassette. Also disclosed herein is a human cell that expresses a selected gene introduced therein through introduction of a vector disclosed herein into the cell.

[0367] Also disclosed herein is a method for delivering a antigen cassette to a mammalian cell comprising introducing into said cell an effective amount of a vector disclosed herein such as a C68 vector engineered to expression the antigen cassette.

[0368] Also disclosed herein is a method for producing a antigen comprising introducing a vector disclosed herein into a mammalian cell, culturing the cell under suitable conditions and producing the antigen.

[0369] V.E.2. E1-Expressing Complementation Cell Lines

[0370] To generate recombinant chimpanzee adenoviruses (Ad) deleted in any of the genes described herein, the function of the deleted gene region, if essential to the replication and infectivity of the virus, can be supplied to the recombinant virus by a helper virus or cell line, i.e., a complementation or packaging cell line. For example, to generate a replication-defective chimpanzee adenovirus vector, a cell line can be used which expresses the E1 gene products of the human or chimpanzee adenovirus; such a cell line can include HEK293 or variants thereof. The protocol for the generation of the cell lines expressing the chimpanzee E1 gene products (Examples 3 and 4 of U.S. Pat. No. 6,083,716) can be followed to generate a cell line which expresses any selected chimpanzee adenovirus gene.

[0371] An AAV augmentation assay can be used to identify a chimpanzee adenovirus E1-expressing cell line. This assay is useful to identify E1 function in cell lines made by using the E1 genes of other uncharacterized adenoviruses, e.g., from other species. That assay is described in Example 4B of U.S. Pat. No. 6,083,716.

[0372] A selected chimpanzee adenovirus gene, e.g., E1, can be under the transcriptional control of a promoter for expression in a selected parent cell line. Inducible or constitutive promoters can be employed for this purpose. Among inducible promoters are included the sheep metallothionine promoter, inducible by zinc, or the mouse mammary tumor virus (MMTV) promoter, inducible by a glucocorticoid, particularly, dexamethasone. Other inducible promoters, such as those identified in International patent application WO95/13392, incorporated by reference herein can also be used in the production of packaging cell lines. Constitutive promoters in control of the expression of the chimpanzee adenovirus gene can be employed also.

[0373] A parent cell can be selected for the generation of a novel cell line expressing any desired C68 gene. Without limitation, such a parent cell line can be HeLa [ATCC Accession No. CCL 2], A549 [ATCC Accession No. CCL 185], KB [CCL 17], Detroit [e.g., Detroit 510, CCL 72] and WI-38 [CCL 75] cells. Other suitable parent cell lines can be obtained from other sources. Parent cell lines can include CHO, HEK293 or variants thereof, 911, HeLa, A549, LP-293, PER.C6, or AE1-2a.

[0374] An E1-expressing cell line can be useful in the generation of recombinant chimpanzee adenovirus E1 deleted vectors. Cell lines constructed using essentially the same procedures that express one or more other chimpanzee adenoviral gene products are useful in the generation of recombinant chimpanzee adenovirus vectors deleted in the genes that encode those products. Further, cell lines which express other human Ad E1 gene products are also useful in generating chimpanzee recombinant Ads.

[0375] V.E.3. Recombinant Viral Particles as Vectors

[0376] The compositions disclosed herein can comprise viral vectors, that deliver at least one antigen to cells. Such vectors comprise a chimpanzee adenovirus DNA sequence such as C68 and a antigen cassette operatively linked to regulatory sequences which direct expression of the cassette. The C68 vector is capable of expressing the cassette in an infected mammalian cell. The C68 vector can be functionally deleted in one or more viral genes. A antigen cassette comprises at least one antigen under the control of one or more regulatory sequences such as a promoter. Optional helper viruses and/or packaging cell lines can supply to the chimpanzee viral vector any necessary products of deleted adenoviral genes.

[0377] The term “functionally deleted” means that a sufficient amount of the gene region is removed or otherwise altered, e.g., by mutation or modification, so that the gene region is no longer capable of producing one or more functional products of gene expression. Mutations or modifications that can result in functional deletions include, but are not limited to, nonsense mutations such as introduction of premature stop codons and removal of canonical and non-canonical start codons, mutations that alter mRNA splicing or other transcriptional processing, or combinations thereof. If desired, the entire gene region can be removed.

[0378] Modifications of the nucleic acid sequences forming the vectors disclosed herein, including sequence deletions, insertions, and other mutations may be generated using standard molecular biological techniques and are within the scope of this invention.

[0379] V.E.4. Construction of The Viral Plasmid Vector

[0380] The chimpanzee adenovirus C68 vectors useful in this invention include recombinant, defective adenoviruses, that is, chimpanzee adenovirus sequences functionally deleted in the E1a or E1b genes, and optionally bearing other mutations, e.g., temperature-sensitive mutations or deletions in other genes. It is anticipated that these chimpanzee sequences are also useful in forming hybrid vectors from other adenovirus and/or adeno-associated virus sequences. Homologous adenovirus vectors prepared from human adenoviruses are described in the published literature [see, for example, Kozarsky I and II, cited above, and references cited therein, U.S. Pat. No. 5,240,846].

[0381] In the construction of useful chimpanzee adenovirus C68 vectors for delivery of a antigen cassette to a human (or other mammalian) cell, a range of adenovirus nucleic acid sequences can be employed in the vectors. A vector comprising minimal chimpanzee C68 adenovirus sequences can be used in conjunction with a helper virus to produce an infectious recombinant virus particle. The helper virus provides essential gene products required for viral infectivity and propagation of the minimal chimpanzee adenoviral vector. When only one or more selected deletions of chimpanzee adenovirus genes are made in an otherwise functional viral vector, the deleted gene products can be supplied in the viral vector production process by propagating the virus in a selected packaging cell line that provides the deleted gene functions in trans.

[0382] V.E.5. Recombinant Minimal Adenovirus

[0383] A minimal chimpanzee Ad C68 virus is a viral particle containing just the adenovirus cis-elements necessary for replication and virion encapsidation. That is, the vector contains the cis-acting 5′ and 3′ inverted terminal repeat (ITR) sequences of the adenoviruses (which function as origins of replication) and the native 5′ packaging/enhancer domains (that contain sequences necessary for packaging linear Ad genomes and enhancer elements for the E1 promoter). See, for example, the techniques described for preparation of a “minimal” human Ad vector in International Patent Application WO96/13597 and incorporated herein by reference.

[0384] V.E.6. Other Defective Adenoviruses

[0385] Recombinant, replication-deficient adenoviruses can also contain more than the minimal chimpanzee adenovirus sequences. These other Ad vectors can be characterized by deletions of various portions of gene regions of the virus, and infectious virus particles formed by the optional use of helper viruses and/or packaging cell lines.

[0386] As one example, suitable vectors may be formed by deleting all or a sufficient portion of the C68 adenoviral immediate early gene E1a and delayed early gene E1b, so as to eliminate their normal biological functions. Replication-defective E1-deleted viruses are capable of replicating and producing infectious virus when grown on a chimpanzee adenovirus-transformed, complementation cell line containing functional adenovirus E1a and E1b genes which provide the corresponding gene products in trans. Based on the homologies to known adenovirus sequences, it is anticipated that, as is true for the human recombinant E1-deleted adenoviruses of the art, the resulting recombinant chimpanzee adenovirus is capable of infecting many cell types and can express antigen(s), but cannot replicate in most cells that do not carry the chimpanzee E1 region DNA unless the cell is infected at a very high multiplicity of infection.

[0387] As another example, all or a portion of the C68 adenovirus delayed early gene E3 can be eliminated from the chimpanzee adenovirus sequence which forms a part of the recombinant virus.

[0388] Chimpanzee adenovirus C68 vectors can also be constructed having a deletion of the E4 gene. Still another vector can contain a deletion in the delayed early gene E2a.

[0389] Deletions can also be made in any of the late genes L1 through L5 of the chimpanzee C68 adenovirus genome. Similarly, deletions in the intermediate genes IX and IVa2 can be useful for some purposes. Other deletions may be made in the other structural or non-structural adenovirus genes.

[0390] The above discussed deletions can be used individually, i.e., an adenovirus sequence can contain deletions of E1 only. Alternatively, deletions of entire genes or portions thereof effective to destroy or reduce their biological activity can be used in any combination. For example, in one exemplary vector, the adenovirus C68 sequence can have deletions of the E1 genes and the E4 gene, or of the E1, E2a and E3 genes, or of the E1 and E3 genes, or of E1, E2a and E4 genes, with or without deletion of E3, and so on. As discussed above, such deletions can be used in combination with other mutations, such as temperature-sensitive mutations, to achieve a desired result.

[0391] The cassette comprising antigen(s) be inserted optionally into any deleted region of the chimpanzee C68 Ad virus. Alternatively, the cassette can be inserted into an existing gene region to disrupt the function of that region, if desired.

[0392] V.E.7. Helper Viruses

[0393] Depending upon the chimpanzee adenovirus gene content of the viral vectors employed to carry the antigen cassette, a helper adenovirus or non-replicating virus fragment can be used to provide sufficient chimpanzee adenovirus gene sequences to produce an infective recombinant viral particle containing the cassette.

[0394] Useful helper viruses contain selected adenovirus gene sequences not present in the adenovirus vector construct and/or not expressed by the packaging cell line in which the vector is transfected. A helper virus can be replication-defective and contain a variety of adenovirus genes in addition to the sequences described above. The helper virus can be used in combination with the E1-expressing cell lines described herein.

[0395] For C68, the “helper” virus can be a fragment formed by clipping the C terminal end of the C68 genome with SspI, which removes about 1300 bp from the left end of the virus. This clipped virus is then co-transfected into an E1-expressing cell line with the plasmid DNA, thereby forming the recombinant virus by homologous recombination with the C68 sequences in the plasmid.

[0396] Helper viruses can also be formed into poly-cation conjugates as described in Wu et al, J. Biol. Chem., 264:16985-16987 (1989); K. J. Fisher and J. M. Wilson, Biochem. J., 299:49 (Apr. 1, 1994). Helper virus can optionally contain a reporter gene. A number of such reporter genes are known to the art. The presence of a reporter gene on the helper virus which is different from the antigen cassette on the adenovirus vector allows both the Ad vector and the helper virus to be independently monitored. This second reporter is used to enable separation between the resulting recombinant virus and the helper virus upon purification.

[0397] V.E.8. Assembly of Viral Particle and Infection of a Cell Line

[0398] Assembly of the selected DNA sequences of the adenovirus, the antigen cassette, and other vector elements into various intermediate plasmids and shuttle vectors, and the use of the plasmids and vectors to produce a recombinant viral particle can all be achieved using conventional techniques. Such techniques include conventional cloning techniques of cDNA, in vitro recombination techniques (e.g., Gibson assembly), use of overlapping oligonucleotide sequences of the adenovirus genomes, polymerase chain reaction, and any suitable method which provides the desired nucleotide sequence. Standard transfection and co-transfection techniques are employed, e.g., CaPO4 precipitation techniques or liposome-mediated transfection methods such as lipofectamine. Other conventional methods employed include homologous recombination of the viral genomes, plaquing of viruses in agar overlay, methods of measuring signal generation, and the like.

[0399] For example, following the construction and assembly of the desired antigen cassette-containing viral vector, the vector can be transfected in vitro in the presence of a helper virus into the packaging cell line. Homologous recombination occurs between the helper and the vector sequences, which permits the adenovirus-antigen sequences in the vector to be replicated and packaged into virion capsids, resulting in the recombinant viral vector particles.

[0400] The resulting recombinant chimpanzee C68 adenoviruses are useful in transferring a antigen cassette to a selected cell. In in vivo experiments with the recombinant virus grown in the packaging cell lines, the E1-deleted recombinant chimpanzee adenovirus demonstrates utility in transferring a cassette to a non-chimpanzee, preferably a human, cell.

[0401] V.E.9. Use of the Recombinant Virus Vectors

[0402] The resulting recombinant chimpanzee C68 adenovirus containing the antigen cassette (produced by cooperation of the adenovirus vector and helper virus or adenoviral vector and packaging cell line, as described above) thus provides an efficient gene transfer vehicle which can deliver antigen(s) to a subject in vivo or ex vivo.

[0403] The above-described recombinant vectors are administered to humans according to published methods for gene therapy. A chimpanzee viral vector bearing a antigen cassette can be administered to a patient, preferably suspended in a biologically compatible solution or pharmaceutically acceptable delivery vehicle. A suitable vehicle includes sterile saline. Other aqueous and non-aqueous isotonic sterile injection solutions and aqueous and non-aqueous sterile suspensions known to be pharmaceutically acceptable carriers and well known to those of skill in the art may be employed for this purpose.

[0404] The chimpanzee adenoviral vectors are administered in sufficient amounts to transduce the human cells and to provide sufficient levels of antigen transfer and expression to provide a therapeutic benefit without undue adverse or with medically acceptable physiological effects, which can be determined by those skilled in the medical arts. Conventional and pharmaceutically acceptable routes of administration include, but are not limited to, direct delivery to the liver, intranasal, intravenous, intramuscular, subcutaneous, intradermal, oral and other parental routes of administration. Routes of administration may be combined, if desired.

[0405] Dosages of the viral vector will depend primarily on factors such as the condition being treated, the age, weight and health of the patient, and may thus vary among patients. The dosage will be adjusted to balance the therapeutic benefit against any side effects and such dosages may vary depending upon the therapeutic application for which the recombinant vector is employed. The levels of expression of antigen(s) can be monitored to determine the frequency of dosage administration.

[0406] Recombinant, replication defective adenoviruses can be administered in a “pharmaceutically effective amount”, that is, an amount of recombinant adenovirus that is effective in a route of administration to transfect the desired cells and provide sufficient levels of expression of the selected gene to provide a vaccinal benefit, i.e., some measurable level of protective immunity. C68 vectors comprising a antigen cassette can be co-administered with adjuvant. Adjuvant can be separate from the vector (e.g., alum) or encoded within the vector, in particular if the adjuvant is a protein. Adjuvants are well known in the art.

[0407] Conventional and pharmaceutically acceptable routes of administration include, but are not limited to, intranasal, intramuscular, intratracheal, subcutaneous, intradermal, rectal, oral and other parental routes of administration. Routes of administration may be combined, if desired, or adjusted depending upon the immunogen or the disease. For example, in prophylaxis of rabies, the subcutaneous, intratracheal and intranasal routes are preferred. The route of administration primarily will depend on the nature of the disease being treated.

[0408] The levels of immunity to antigen(s) can be monitored to determine the need, if any, for boosters. Following an assessment of antibody titers in the serum, for example, optional booster immunizations may be desired

### VI. Therapeutic and Manufacturing Methods

[0409] Also provided is a method of inducing a tumor specific immune response in a subject, vaccinating against a tumor, treating and or alleviating a symptom of cancer in a subject by administering to the subject one or more antigens such as a plurality of antigens identified using methods disclosed herein.

[0410] In some aspects, a subject has been diagnosed with cancer or is at risk of developing cancer. A subject can be a human, dog, cat, horse or any animal in which a tumor specific immune response is desired. A tumor can be any solid tumor such as breast, ovarian, prostate, lung, kidney, gastric, colon, testicular, head and neck, pancreas, brain, melanoma, and other tumors of tissue organs and hematological tumors, such as lymphomas and leukemias, including acute myelogenous leukemia, chronic myelogenous leukemia, chronic lymphocytic leukemia, T cell lymphocytic leukemia, and B cell lymphomas.

[0411] A antigen can be administered in an amount sufficient to induce a CTL response.

[0412] A antigen can be administered alone or in combination with other therapeutic agents. The therapeutic agent is for example, a chemotherapeutic agent, radiation, or immunotherapy. Any suitable therapeutic treatment for a particular cancer can be administered.

[0413] In addition, a subject can be further administered an anti-immunosuppressive/immunostimulatory agent such as a checkpoint inhibitor. For example, the subject can be further administered an anti-CTLA antibody or anti-PD-1 or anti-PD-L1. Blockade of CTLA-4 or PD-L1 by antibodies can enhance the immune response to cancerous cells in the patient. In particular, CTLA-4 blockade has been shown effective when following a vaccination protocol.

[0414] The optimum amount of each antigen to be included in a vaccine composition and the optimum dosing regimen can be determined. For example, a antigen or its variant can be prepared for intravenous (i.v.) injection, sub-cutaneous (s.c.) injection, intradermal (i.d.) injection, intraperitoneal (i.p.) injection, intramuscular (i.m.) injection. Methods of injection include s.c., i.d., i.p., i.m., and i.v. Methods of DNA or RNA injection include i.d., i.m., s.c., i.p. and i.v. Other methods of administration of the vaccine composition are known to those skilled in the art.

[0415] A vaccine can be compiled so that the selection, number and/or amount of antigens present in the composition is/are tissue, cancer, and/or patient-specific. For instance, the exact selection of peptides can be guided by expression patterns of the parent proteins in a given tissue or guided by mutation status of a patient. The selection can be dependent on the specific type of cancer, the status of the disease, earlier treatment regimens, the immune status of the patient, and, of course, the HLA-haplotype of the patient. Furthermore, a vaccine can contain individualized components, according to personal needs of the particular patient. Examples include varying the selection of antigens according to the expression of the antigen in the particular patient or adjustments for secondary treatments following a first round or scheme of treatment.

[0416] A patient can be identified for administration of an antigen vaccine through the use of various diagnostic methods, e.g., patient selection methods described further below. Patient selection can involve identifying mutations in, or expression patterns of, one or more genes. In some cases, patient selection involves identifying the haplotype of the patient. The various patient selection methods can be performed in parallel, e.g., a sequencing diagnostic can identify both the mutations and the haplotype of a patient. The various patient selection methods can be performed sequentially, e.g., one diagnostic test identifies the mutations and separate diagnostic test identifies the haplotype of a patient, and where each test can be the same (e.g., both high-throughput sequencing) or different (e.g., one high-throughput sequencing and the other Sanger sequencing) diagnostic methods.

[0417] For a composition to be used as a vaccine for cancer, antigens with similar normal self-peptides that are expressed in high amounts in normal tissues can be avoided or be present in low amounts in a composition described herein. On the other hand, if it is known that the tumor of a patient expresses high amounts of a certain antigen, the respective pharmaceutical composition for treatment of this cancer can be present in high amounts and/or more than one antigen specific for this particularly antigen or pathway of this antigen can be included.

[0418] Compositions comprising a antigen can be administered to an individual already suffering from cancer. In therapeutic applications, compositions are administered to a patient in an amount sufficient to elicit an effective CTL response to the tumor antigen and to cure or at least partially arrest symptoms and/or complications. An amount adequate to accomplish this is defined as “therapeutically effective dose.” Amounts effective for this use will depend on, e.g., the composition, the manner of administration, the stage and severity of the disease being treated, the weight and general state of health of the patient, and the judgment of the prescribing physician. It should be kept in mind that compositions can generally be employed in serious disease states, that is, life-threatening or potentially life threatening situations, especially when the cancer has metastasized. In such cases, in view of the minimization of extraneous substances and the relative nontoxic nature of a antigen, it is possible and can be felt desirable by the treating physician to administer substantial excesses of these compositions.

[0419] For therapeutic use, administration can begin at the detection or surgical removal of tumors. This is followed by boosting doses until at least symptoms are substantially abated and for a period thereafter.

[0420] The pharmaceutical compositions (e.g., vaccine compositions) for therapeutic treatment are intended for parenteral, topical, nasal, oral or local administration. A pharmaceutical compositions can be administered parenterally, e.g., intravenously, subcutaneously, intradermally, or intramuscularly. The compositions can be administered at the site of surgical exiscion to induce a local immune response to the tumor. Disclosed herein are compositions for parenteral administration which comprise a solution of the antigen and vaccine compositions are dissolved or suspended in an acceptable carrier, e.g., an aqueous carrier. A variety of aqueous carriers can be used, e.g., water, buffered water, 0.9% saline, 0.3% glycine, hyaluronic acid and the like. These compositions can be sterilized by conventional, well known sterilization techniques, or can be sterile filtered. The resulting aqueous solutions can be packaged for use as is, or lyophilized, the lyophilized preparation being combined with a sterile solution prior to administration. The compositions may contain pharmaceutically acceptable auxiliary substances as required to approximate physiological conditions, such as pH adjusting and buffering agents, tonicity adjusting agents, wetting agents and the like, for example, sodium acetate, sodium lactate, sodium chloride, potassium chloride, calcium chloride, sorbitan monolaurate, triethanolamine oleate, etc.

[0421] Antigens can also be administered via liposomes, which target them to a particular cells tissue, such as lymphoid tissue. Liposomes are also useful in increasing half-life. Liposomes include emulsions, foams, micelles, insoluble monolayers, liquid crystals, phospholipid dispersions, lamellar layers and the like. In these preparations the antigen to be delivered is incorporated as part of a liposome, alone or in conjunction with a molecule which binds to, e.g., a receptor prevalent among lymphoid cells, such as monoclonal antibodies which bind to the CD45 antigen, or with other therapeutic or immunogenic compositions. Thus, liposomes filled with a desired antigen can be directed to the site of lymphoid cells, where the liposomes then deliver the selected therapeutic/immunogenic compositions. Liposomes can be formed from standard vesicle-forming lipids, which generally include neutral and negatively charged phospholipids and a sterol, such as cholesterol. The selection of lipids is generally guided by consideration of, e.g., liposome size, acid lability and stability of the liposomes in the blood stream. A variety of methods are available for preparing liposomes, as described in, e.g., Szoka et al., Ann. Rev. Biophys. Bioeng. 9; 467 (1980), U.S. Pat. Nos. 4,235,871, 4,501,728, 4,501,728, 4,837,028, and 5,019,369.

[0422] For targeting to the immune cells, a ligand to be incorporated into the liposome can include, e.g., antibodies or fragments thereof specific for cell surface determinants of the desired immune system cells. A liposome suspension can be administered intravenously, locally, topically, etc. in a dose which varies according to, inter alia, the manner of administration, the peptide being delivered, and the stage of the disease being treated.

[0423] For therapeutic or immunization purposes, nucleic acids encoding a peptide and optionally one or more of the peptides described herein can also be administered to the patient. A number of methods are conveniently used to deliver the nucleic acids to the patient. For instance, the nucleic acid can be delivered directly, as “naked DNA”. This approach is described, for instance, in Wolff et al., Science 247: 1465-1468 (1990) as well as U.S. Pat. Nos. 5,580,859 and 5,589,466. The nucleic acids can also be administered using ballistic delivery as described, for instance, in U.S. Pat. No. 5,204,253. Particles comprised solely of DNA can be administered. Alternatively, DNA can be adhered to particles, such as gold particles. Approaches for delivering nucleic acid sequences can include viral vectors, mRNA vectors, and DNA vectors with or without electroporation.

[0424] The nucleic acids can also be delivered complexed to cationic compounds, such as cationic lipids. Lipid-mediated gene delivery methods are described, for instance, in 9618372WOAWO 96/18372; 9324640WOAWO 93/24640; Mannino & Gould-Fogerite, BioTechniques 6(7): 682-691 (1988); U.S. Pat. No. 5,279,833 Rose U.S. Pat. Nos. 5,279,833; 9,106,309WOAWO 91/06309; and Felgner et al., Proc. Natl. Acad. Sci. USA 84: 7413-7414 (1987).

[0425] Antigens can also be included in viral vector-based vaccine platforms, such as vaccinia, fowlpox, self-replicating alphavirus, marabavirus, adenovirus (See, e.g., Tatsis et al., Adenoviruses, Molecular Therapy (2004) 10, 616-629), or lentivirus, including but not limited to second, third or hybrid second/third generation lentivirus and recombinant lentivirus of any generation designed to target specific cell types or receptors (See, e.g., Hu et al., Immunization Delivered by Lentiviral Vectors for Cancer and Infectious Diseases, Immunol Rev. (2011) 239(1): 45-61, Sakuma et al., Lentiviral vectors: basic to translational, Biochem J. (2012) 443(3):603-18, Cooper et al., Rescue of splicing-mediated intron loss maximizes expression in lentiviral vectors containing the human ubiquitin C promoter, Nucl. Acids Res. (2015) 43 (1): 682-690, Zufferey et al., Self-Inactivating Lentivirus Vector for Safe and Efficient In Vivo Gene Delivery, J. Virol. (1998) 72 (12): 9873-9880). Dependent on the packaging capacity of the above mentioned viral vector-based vaccine platforms, this approach can deliver one or more nucleotide sequences that encode one or more antigen peptides. The sequences may be flanked by non-mutated sequences, may be separated by linkers or may be preceded with one or more sequences targeting a subcellular compartment (See, e.g., Gros et al., Prospective identification of neoantigen-specific lymphocytes in the peripheral blood of melanoma patients, Nat Med. (2016) 22 (4):433-8, Stronen et al., Targeting of cancer neoantigens with donor-derived T cell receptor repertoires, Science. (2016) 352 (6291):1337-41, Lu et al., Efficient identification of mutated cancer antigens recognized by T cells associated with durable tumor regressions, Clin Cancer Res. (2014) 20(13):3401-10). Upon introduction into a host, infected cells express the antigens, and thereby elicit a host immune (e.g., CTL) response against the peptide(s). Vaccinia vectors and methods useful in immunization protocols are described in, e.g., U.S. Pat. No. 4,722,848. Another vector is BCG (Bacille Calmette Guerin). BCG vectors are described in Stover et al. (Nature 351:456-460 (1991)). A wide variety of other vaccine vectors useful for therapeutic administration or immunization of antigens, e.g., Salmonella typhi vectors, and the like will be apparent to those skilled in the art from the description herein.

[0426] A means of administering nucleic acids uses minigene constructs encoding one or multiple epitopes. To create a DNA sequence encoding the selected CTL epitopes (minigene) for expression in human cells, the amino acid sequences of the epitopes are reverse translated. A human codon usage table is used to guide the codon choice for each amino acid. These epitope-encoding DNA sequences are directly adjoined, creating a continuous polypeptide sequence. To optimize expression and/or immunogenicity, additional elements can be incorporated into the minigene design. Examples of amino acid sequence that could be reverse translated and included in the minigene sequence include: helper T lymphocyte, epitopes, a leader (signal) sequence, and an endoplasmic reticulum retention signal. In addition, WIC presentation of CTL epitopes can be improved by including synthetic (e.g. poly-alanine) or naturally-occurring flanking sequences adjacent to the CTL epitopes. The minigene sequence is converted to DNA by assembling oligonucleotides that encode the plus and minus strands of the minigene. Overlapping oligonucleotides (30-100 bases long) are synthesized, phosphorylated, purified and annealed under appropriate conditions using well known techniques. The ends of the oligonucleotides are joined using T4 DNA ligase. This synthetic minigene, encoding the CTL epitope polypeptide, can then cloned into a desired expression vector.

[0427] Purified plasmid DNA can be prepared for injection using a variety of formulations. The simplest of these is reconstitution of lyophilized DNA in sterile phosphate-buffer saline (PBS). A variety of methods have been described, and new techniques can become available. As noted above, nucleic acids are conveniently formulated with cationic lipids. In addition, glycolipids, fusogenic liposomes, peptides and compounds referred to collectively as protective, interactive, non-condensing (PINC) could also be complexed to purified plasmid DNA to influence variables such as stability, intramuscular dispersion, or trafficking to specific organs or cell types.

[0428] Also disclosed is a method of manufacturing a tumor vaccine, comprising performing the steps of a method disclosed herein; and producing a tumor vaccine comprising a plurality of antigens or a subset of the plurality of antigens.

[0429] Antigens disclosed herein can be manufactured using methods known in the art. For example, a method of producing a antigen or a vector (e.g., a vector including at least one sequence encoding one or more antigens) disclosed herein can include culturing a host cell under conditions suitable for expressing the antigen or vector wherein the host cell comprises at least one polynucleotide encoding the antigen or vector, and purifying the antigen or vector. Standard purification methods include chromatographic techniques, electrophoretic, immunological, precipitation, dialysis, filtration, concentration, and chromatofocusing techniques.

[0430] Host cells can include a Chinese Hamster Ovary (CHO) cell, NS0 cell, yeast, or a HEK293 cell. Host cells can be transformed with one or more polynucleotides comprising at least one nucleic acid sequence that encodes a antigen or vector disclosed herein, optionally wherein the isolated polynucleotide further comprises a promoter sequence operably linked to the at least one nucleic acid sequence that encodes the antigen or vector. In certain embodiments the isolated polynucleotide can be cDNA.

### VII. Antigen Use and Administration

[0431] A vaccination protocol can be used to dose a subject with one or more antigens. A priming vaccine and a boosting vaccine can be used to dose the subject. The priming vaccine can be based on C68 (e.g., the sequences shown in SEQ ID NO:1 or 2) or srRNA (e.g., the sequences shown in SEQ ID NO:3 or 4) and the boosting vaccine can be based on C68 (e.g., the sequences shown in SEQ ID NO:1 or 2) or srRNA (e.g., the sequences shown in SEQ ID NO:3 or 4). Each vector typically includes a cassette that includes antigens. Cassettes can include about 20 antigens, separated by spacers such as the natural sequence that normally surrounds each antigen or other non-natural spacer sequences such as AAY. Cassettes can also include MHCII antigens such a tetanus toxoid antigen and PADRE antigen, which can be considered universal class II antigens. Cassettes can also include a targeting sequence such as a ubiquitin targeting sequence. In addition, each vaccine dose can be administered to the subject in conjunction with (e.g., concurrently, before, or after) a checkpoint inhibitor (CPI). CPI's can include those that inhibit CTLA4, PD1, and/or PDL1 such as antibodies or antigen-binding portions thereof. Such antibodies can include tremelimumab or durvalumab.

[0432] A priming vaccine can be injected (e.g., intramuscularly) in a subject. Bilateral injections per dose can be used. For example, one or more injections of ChAdV68 (C68) can be used (e.g., total dose 1×10¹² viral particles); one or more injections of self-replicating RNA (srRNA) at low vaccine dose selected from the range 0.001 to 1 ug RNA, in particular 0.1 or 1 ug can be used; or one or more injections of srRNA at high vaccine dose selected from the range 1 to 100 ug RNA, in particular 10 or 100 ug can be used.

[0433] A vaccine boost (boosting vaccine) can be injected (e.g., intramuscularly) after prime vaccination. A boosting vaccine can be administered about every 1, 2, 3, 4, 5, 6, 7, 8, 9, or 10 weeks, e.g., every 4 weeks and/or 8 weeks after the prime. Bilateral injections per dose can be used. For example, one or more injections of ChAdV68 (C68) can be used (e.g., total dose 1×10¹² viral particles); one or more injections of self-replicating RNA (srRNA) at low vaccine dose selected from the range 0.001 to 1 ug RNA, in particular 0.1 or 1 ug can be used; or one or more injections of srRNA at high vaccine dose selected from the range 1 to 100 ug RNA, in particular 10 or 100 ug can be used.

[0434] Anti-CTLA-4 (e.g., tremelimumab) can also be administered to the subject. For example, anti-CTLA4 can be administered subcutaneously near the site of the intramuscular vaccine injection (ChAdV68 prime or srRNA low doses) to ensure drainage into the same lymph node. Tremelimumab is a selective human IgG2 mAb inhibitor of CTLA-4. Target Anti-CTLA-4 (tremelimumab) subcutaneous dose is typically 70-75 mg (in particular 75 mg) with a dose range of, e.g., 1-100 mg or 5-420 mg.

[0435] In certain instances an anti-PD-L1 antibody can be used such as durvalumab (MEDI 4736). Durvalumab is a selective, high affinity human IgG1 mAb that blocks PD-L1 binding to PD-1 and CD80. Durvalumab is generally administered at 20 mg/kg i.v. every 4 weeks.

[0436] Immune monitoring can be performed before, during, and/or after vaccine administration. Such monitoring can inform safety and efficacy, among other parameters.

[0437] To perform immune monitoring, PBMCs are commonly used. PBMCs can be isolated before prime vaccination, and after prime vaccination (e.g. 4 weeks and 8 weeks). PBMCs can be harvested just prior to boost vaccinations and after each boost vaccination (e.g. 4 weeks and 8 weeks).

[0438] T cell responses can be assessed as part of an immune monitoring protocol. T cell responses can be measured using one or more methods known in the art such as ELISpot, intracellular cytokine staining, cytokine secretion and cell surface capture, T cell proliferation, WIC multimer staining, or by cytotoxicity assay. T cell responses to epitopes encoded in vaccines can be monitored from PBMCs by measuring induction of cytokines, such as IFN-gamma, using an ELISpot assay. Specific CD4 or CD8 T cell responses to epitopes encoded in vaccines can be monitored from PBMCs by measuring induction of cytokines captured intracellularly or extracellularly, such as IFN-gamma, using flow cytometry. Specific CD4 or CD8 T cell responses to epitopes encoded in the vaccines can be monitored from PBMCs by measuring T cell populations expressing T cell receptors specific for epitope/MHC class I complexes using MHC multimer staining. Specific CD4 or CD8 T cell responses to epitopes encoded in the vaccines can be monitored from PBMCs by measuring the ex vivo expansion of T cell populations following 3H-thymidine, bromodeoxyuridine and carboxyfluoresceine-diacetate-succinimidylester (CFSE) incorporation. The antigen recognition capacity and lytic activity of PBMC-derived T cells that are specific for epitopes encoded in vaccines can be assessed functionally by chromium release assay or alternative colorimetric cytotoxicity assays.

### VIII. Antigen Identification

[0439] VIII.A. Antigen Candidate Identification

[0440] Research methods for NGS analysis of tumor and normal exome and transcriptomes have been described and applied in the antigen identification space.^{6,14,15} Certain optimizations for greater sensitivity and specificity for antigen identification in the clinical setting can be considered. These optimizations can be grouped into two areas, those related to laboratory processes and those related to the NGS data analysis. Examples of optimizations are known to those skilled in the art, for example the methods described in more detail in international patent application publications WO/2017/106638, WO/2018/195357, and WO/2018/208856, each herein incorporated by reference, in their entirety, for all purposes.

[0441] VIII.B. Isolation and Detection of HLA Peptides

[0442] Isolation of HLA-peptide molecules was performed using classic immunoprecipitation (IP) methods after lysis and solubilization of the tissue sample (55-58). A clarified lysate was used for HLA specific IP.

[0443] Immunoprecipitation was performed using antibodies coupled to beads where the antibody is specific for HLA molecules. For a pan-Class I HLA immunoprecipitation, a pan-Class I CR antibody is used, for Class II HLA-DR, an HLA-DR antibody is used. Antibody is covalently attached to NHS-sepharose beads during overnight incubation. After covalent attachment, the beads were washed and aliquoted for IP. (59, 60) Immunoprecipitations can also be performed with antibodies that are not covalently attached to beads. Typically this is done using sepharose or magnetic beads coated with Protein A and/or Protein G to hold the antibody to the column. Some antibodies that can be used to selectively enrich MHC/peptide complex are listed below.

| Antibody Name | Specificity |
|---|---|
| W6/32 | Class I HLA-A, B, C |
| L243 | Class II - HLA-DR |
| Tu36 | Class II - HLA-DR |
| LN3 | Class II - HLA-DR |
| Tu39 | Class II - HLA-DR, DP, DQ |

[0444] The clarified tissue lysate is added to the antibody beads for the immunoprecipitation. After immunoprecipitation, the beads are removed from the lysate and the lysate stored for additional experiments, including additional IPs. The IP beads are washed to remove non-specific binding and the HLA/peptide complex is eluted from the beads using standard techniques. The protein components are removed from the peptides using a molecular weight spin column or C18 fractionation. The resultant peptides are taken to dryness by SpeedVac evaporation and in some instances are stored at −20C prior to MS analysis.

[0445] Dried peptides are reconstituted in an HPLC buffer suitable for reverse phase chromatography and loaded onto a C-18 microcapillary HPLC column for gradient elution in a Fusion Lumos mass spectrometer (Thermo). MS1 spectra of peptide mass/charge (m/z) were collected in the Orbitrap detector at high resolution followed by MS2 low resolution scans collected in the ion trap detector after HCD fragmentation of the selected ion. Additionally, MS2 spectra can be obtained using either CID or ETD fragmentation methods or any combination of the three techniques to attain greater amino acid coverage of the peptide. MS2 spectra can also be measured with high resolution mass accuracy in the Orbitrap detector.

[0446] MS2 spectra from each analysis are searched against a protein database using Comet (61, 62) and the peptide identification are scored using Percolator (63-65). Additional sequencing is performed using PEAKS studio (Bioinformatics Solutions Inc.) and other search engines or sequencing methods can be used including spectral matching and de novo sequencing (97).

[0447] VIII.B.1. MS Limit of Detection Studies in Support of Comprehensive HLA Peptide Sequencing.

[0448] Using the peptide YVYVADVAAK (SEQ ID NO: 29364) it was determined what the limits of detection are using different amounts of peptide loaded onto the LC column. The amounts of peptide tested were 1 pmol, 100fmol, 10 fmol, 1 fmol, and 100amol. (Table 1) The results are shown in FIGS. 24A and 24B. These results indicate that the lowest limit of detection (LoD) is in the attomol range (10⁻¹⁸), that the dynamic range spans five orders of magnitude, and that the signal to noise appears sufficient for sequencing at low femtomol ranges (10⁻¹⁵).

TABLE 1

| | | |
|---|---|---|
| Peptide m/z | Loaded on Column | Copies/Cell in 1e9cells |

| | | | |
|---|---|---|---|
| 566.830 | 1 | pmol | 600 |
| 562.823 | 100 | fmol | 60 |
| 559.816 | 10 | fmol | 6 |
| 556.810 | 1 | fmol | 0.6 |
| 553.802 | 100 | amol | 0.06 |

### IX. Presentation Model

[0449] Presentation models can be used to identify likelihoods of peptide presentation in patients. Various presentation models are known to those skilled in the art, for example the presentation models described in more detail in international patent application publications WO/2017/106638, WO/2018/195357, WO/2018/208856, WO2016187508, and US patent application US20110293637, each herein incorporated by reference, in their entirety, for all purposes.

### X. Training Module

[0450] Training modules can be used to construct one or more presentation models based on training data sets that generate likelihoods of whether peptide sequences will be presented by WIC alleles associated with the peptide sequences. Various training modules are known to those skilled in the art, for example the presentation models described in more detail in international patent application publications WO/2017/106638, WO/2018/195357, and WO/2018/208856, each herein incorporated by reference, in their entirety, for all purposes. A training module can construct a presentation model to predict presentation likelihoods of peptides on a per-allele basis. A training module can also construct a presentation model to predict presentation likelihoods of peptides in a multiple-allele setting where two or more MEW alleles are present.

### XI. Prediction Module

[0451] A prediction module can be used to receive sequence data and select candidate antigens in the sequence data using a presentation model. Specifically, the sequence data may be DNA sequences, RNA sequences, and/or protein sequences extracted from tumor tissue cells of patients. A prediction module may identify candidate neoantigens that are mutated peptide sequences by comparing sequence data extracted from normal tissue cells of a patient with the sequence data extracted from tumor tissue cells of the patient to identify portions containing one or more mutations. A prediction module may identify candidate antigens that have altered expression in a tumor cell or cancerous tissue in comparison to a normal cell or tissue by comparing sequence data extracted from normal tissue cells of a patient with the sequence data extracted from tumor tissue cells of the patient to identify improperly expressed candidate antigens.

[0452] A presentation module can apply one or more presentation model to processed peptide sequences to estimate presentation likelihoods of the peptide sequences. Specifically, the prediction module may select one or more candidate antigen peptide sequences that are likely to be presented on tumor HLA molecules by applying presentation models to the candidate antigens. In one implementation, the presentation module selects candidate antigen sequences that have estimated presentation likelihoods above a predetermined threshold. In another implementation, the presentation model selects the N candidate antigen sequences that have the highest estimated presentation likelihoods (where N is generally the maximum number of epitopes that can be delivered in a vaccine). A vaccine including the selected candidate antigens for a given patient can be injected into the patient to induce immune responses.

[0453] XI.B. Cassette Design Module

[0454] XI.B.1 Overview

[0455] A cassette design module can be used to generate a vaccine cassette sequence based on selected candidate peptides for injection into a patient. Various cassette design modules are known to those skilled in the art, for example the cassette design modules described in more detail in international patent application publications WO/2017/106638, WO/2018/195357, and WO/2018/208856, each herein incorporated by reference, in their entirety, for all purposes.

[0456] A set of therapeutic epitopes may be generated based on the selected peptides determined by a prediction module associated with presentation likelihoods above a predetermined threshold, where the presentation likelihoods are determined by the presentation models. However it is appreciated that in other embodiments, the set of therapeutic epitopes may be generated based on any one or more of a number of methods (alone or in combination), for example, based on binding affinity or predicted binding affinity to HLA class I or class II alleles of the patient, binding stability or predicted binding stability to HLA class I or class II alleles of the patient, random sampling, and the like.

[0457] Therapeutic epitopes may correspond to selected peptides themselves Therapeutic epitopes may also include C- and/or N-terminal flanking sequences in addition to the selected peptides. N- and C-terminal flanking sequences can be the native N- and C-terminal flanking sequences of the therapeutic vaccine epitope in the context of its source protein. Therapeutic epitopes can represent a fixed-length epitope Therapeutic epitopes can represent a variable-length epitope, in which the length of the epitope can be varied depending on, for example, the length of the C- or N-flanking sequence. For example, the C-terminal flanking sequence and the N-terminal flanking sequence can each have varying lengths of 2-5 residues, resulting in 16 possible choices for the epitope.

[0458] A cassette design module can also generate cassette sequences by taking into account presentation of junction epitopes that span the junction between a pair of therapeutic epitopes in the cassette. Junction epitopes are novel non-self but irrelevant epitope sequences that arise in the cassette due to the process of concatenating therapeutic epitopes and linker sequences in the cassette. The novel sequences of junction epitopes are different from the therapeutic epitopes of the cassette themselves.

[0459] A cassette design module can generate a cassette sequence that reduces the likelihood that junction epitopes are presented in the patient. Specifically, when the cassette is injected into the patient, junction epitopes have the potential to be presented by HLA class I or HLA class II alleles of the patient, and stimulate a CD8 or CD4 T-cell response, respectively. Such reactions are often times undesirable because T-cells reactive to the junction epitopes have no therapeutic benefit, and may diminish the immune response to the selected therapeutic epitopes in the cassette by antigenic competition.⁷⁶

[0460] A cassette design module can iterate through one or more candidate cassettes, and determine a cassette sequence for which a presentation score of junction epitopes associated with that cassette sequence is below a numerical threshold. The junction epitope presentation score is a quantity associated with presentation likelihoods of the junction epitopes in the cassette, and a higher value of the junction epitope presentation score indicates a higher likelihood that junction epitopes of the cassette will be presented by HLA class I or HLA class II or both.

[0461] In one embodiment, a cassette design module may determine a cassette sequence associated with the lowest junction epitope presentation score among the candidate cassette sequences.

[0462] A cassette design module may iterate through one or more candidate cassette sequences, determine the junction epitope presentation score for the candidate cassettes, and identify an optimal cassette sequence associated with a junction epitope presentation score below the threshold.

[0463] A cassette design module may further check the one or more candidate cassette sequences to identify if any of the junction epitopes in the candidate cassette sequences are self-epitopes for a given patient for whom the vaccine is being designed. To accomplish this, the cassette design module checks the junction epitopes against a known database such as BLAST. In one embodiment, the cassette design module may be configured to design cassettes that avoid junction self-epitopes.

[0464] A cassette design module can perform a brute force approach and iterate through all or most possible candidate cassette sequences to select the sequence with the smallest junction epitope presentation score. However, the number of such candidate cassettes can be prohibitively large as the capacity of the vaccine increases. For example, for a vaccine capacity of 20 epitopes, the cassette design module has to iterate through ˜10¹⁸ possible candidate cassettes to determine the cassette with the lowest junction epitope presentation score. This determination may be computationally burdensome (in terms of computational processing resources required), and sometimes intractable, for the cassette design module to complete within a reasonable amount of time to generate the vaccine for the patient. Moreover, accounting for the possible junction epitopes for each candidate cassette can be even more burdensome. Thus, a cassette design module may select a cassette sequence based on ways of iterating through a number of candidate cassette sequences that are significantly smaller than the number of candidate cassette sequences for the brute force approach.

[0465] A cassette design module can generate a subset of randomly or at least pseudo-randomly generated candidate cassettes, and selects the candidate cassette associated with a junction epitope presentation score below a predetermined threshold as the cassette sequence. Additionally, the cassette design module may select the candidate cassette from the subset with the lowest junction epitope presentation score as the cassette sequence. For example, the cassette design module may generate a subset of ˜1 million candidate cassettes for a set of 20 selected epitopes, and select the candidate cassette with the smallest junction epitope presentation score. Although generating a subset of random cassette sequences and selecting a cassette sequence with a low junction epitope presentation score out of the subset may be sub-optimal relative to the brute force approach, it requires significantly less computational resources thereby making its implementation technically feasible. Further, performing the brute force method as opposed to this more efficient technique may only result in a minor or even negligible improvement in junction epitope presentation score, thus making it not worthwhile from a resource allocation perspective. A cassette design module can determine an improved cassette configuration by formulating the epitope sequence for the cassette as an asymmetric traveling salesman problem (TSP). Given a list of nodes and distances between each pair of nodes, the TSP determines a sequence of nodes associated with the shortest total distance to visit each node exactly once and return to the original node. For example, given cities A, B, and C with known distances between each other, the solution of the TSP generates a closed sequence of cities, for which the total distance traveled to visit each city exactly once is the smallest among possible routes. The asymmetric version of the TSP determines the optimal sequence of nodes when the distance between a pair of nodes are asymmetric. For example, the “distance” for traveling from node A to node B may be different from the “distance” for traveling from node B to node A. By solving for an improved optimal cassette using an asymmetric TSP, the cassette design module can find a cassette sequence that results in a reduced presentation score across the junctions between epitopes of the cassette. The solution of the asymmetric TSP indicates a sequence of therapeutic epitopes that correspond to the order in which the epitopes should be concatenated in a cassette to minimize the junction epitope presentation score across the junctions of the cassette. A cassette sequence determined through this approach can result in a sequence with significantly less presentation of junction epitopes while potentially requiring significantly less computational resources than the random sampling approach, especially when the number of generated candidate cassette sequences is large. Illustrative examples of different computational approaches and comparisons for optimizing cassette design are described in more detail in international patent application publications WO/2017/106638, WO/2018/195357, and WO/2018/208856, each herein incorporated by reference, in their entirety, for all purposes.

[0466] XI.B.2 Shared Antigen Vaccine Sequence Selection

[0467] Shared antigen sequences for inclusion in a shared antigen vaccine and appropriate patients for treatment with such vaccine can be chosen by one of skill in the art using the detailed disclosure provided herein. For example, Tables: A, 1.2, or AACR GENIE Results can be used for sequence selection. In certain instances a particular mutation and HLA allele combination can be preferred (e.g., based on sequencing data available from a given subject indicating that each are present in the subject) and subsequently used in combination together to identify a shared neoantigen sequence using Table A or AACR GENIE Results for inclusion in a vaccine. Exemplary mutations and their matched HLA alleles are shown in Tables 32 and 34.

[0468] For example, for KRAS_G13D, a shared neoantigen or shared neoantigen-encoding sequence for inclusion in a vaccine can be selected by reference to Table A or AACR GENIE Results, where each relevant sequence considered for inclusion is selected by identifying all rows that list KRAS_G13D and C0802.

[0469] For example, for KRAS_Q61K or NRAS_Q61K, a shared neoantigen or shared neoantigen-encoding sequence for inclusion in a vaccine can be selected by reference to Table A or AACR GENIE Results, where each relevant sequence considered for inclusion is selected by identifying all rows that list (1) KRAS_Q61K and A0101; or (2) NRAS_Q61K, and A0101.

[0470] For example, for TP53_R249M, a shared neoantigen or shared neoantigen-encoding sequence for inclusion in a vaccine can be selected by reference to Table A or AACR GENIE Results, where each relevant sequence considered for inclusion is selected by identifying all rows that list TP53_R249M and at least one of B3512, B3503, and B3501.

[0471] For example, for CTNNB1_S45P, a shared neoantigen or shared neoantigen-encoding sequence for inclusion in a vaccine can be selected by reference to Table A or AACR GENIE Results, where each relevant sequence considered for inclusion is selected by identifying all rows that list CTNNB1_S45P and at least one of A0101, A0301, B5701, A6801, A0302, and A1101. For example, see relevant sequences shown in Table 32.

[0472] For example, for CTNNB1_S45F, a shared neoantigen or shared neoantigen-encoding sequence for inclusion in a vaccine can be selected by reference to Table A or AACR GENIE Results, where each relevant sequence considered for inclusion is selected by identifying all rows that list CTNNB1_S45F and at least one of A0301, A1101, and A6801.

[0473] For example, for ERBB2_Y772_A775dup, a shared neoantigen or shared neoantigen-encoding sequence for inclusion in a vaccine can be selected by reference to Table A or AACR GENIE Results, where each relevant sequence considered for inclusion is selected by identifying all rows that list ERBB2_Y772_A775dup and B1801.

[0474] For example, for KRAS_G12D or NRAS_G12D, a shared neoantigen or shared neoantigen-encoding sequence for inclusion in a vaccine can be selected by reference to Table A or AACR GENIE Results, where each relevant sequence considered for inclusion is selected by identifying all rows that list (1) KRAS_G12D and at least one of A1101 and C0802; or (2) NRAS_G12D and at least one of A1101 and C0802. For example, see relevant sequences shown in Table 32.

[0475] For example, for KRAS_Q61R or NRAS_Q61R, a shared neoantigen or shared neoantigen-encoding sequence for inclusion in a vaccine can be selected by reference to Table A or AACR GENIE Results, where each relevant sequence considered for inclusion is selected by identifying all rows that list (1) KRAS_Q61R and A0101; or (2) NRAS_Q61R and A0101.

[0476] For example, for CTNNB1_T41A, a shared neoantigen or shared neoantigen-encoding sequence for inclusion in a vaccine can be selected by reference to Table A or AACR GENIE Results, where each relevant sequence considered for inclusion is selected by identifying all rows that list CTNNB1_T41A and at least one of A0301, A0302, A1101, B1510, C0303, and C0304.

[0477] For example, for TP53_K132N, a shared neoantigen or shared neoantigen-encoding sequence for inclusion in a vaccine can be selected by reference to Table A or AACR GENIE Results, where each relevant sequence considered for inclusion is selected by identifying all rows that list TP53_K132N and at least one of A2402 and A2301. For example, see relevant sequence shown in Table 32.

[0478] For example, for KRAS_G12A, a shared neoantigen or shared neoantigen-encoding sequence for inclusion in a vaccine can be selected by reference to Table A or AACR GENIE Results, where each relevant sequence considered for inclusion is selected by identifying all rows that list KRAS_G12A and A0301. For example, see relevant sequence shown in Table 32.

[0479] For example, for KRAS_Q61L or NRAS_Q61L, a shared neoantigen or shared neoantigen-encoding sequence for inclusion in a vaccine can be selected by reference to Table A or AACR GENIE Results, where each relevant sequence considered for inclusion is selected by identifying all rows that list (1) KRAS_Q61L and A0101; or (2) NRAS_Q61L and A0101.

[0480] For example, for TP53_R213L, a shared neoantigen or shared neoantigen-encoding sequence for inclusion in a vaccine can be selected by reference to Table A or AACR GENIE Results, where each relevant sequence considered for inclusion is selected by identifying all rows that list TP53_R213L and at least one of A0207, C0802, and A0201.

[0481] For example, for BRAF_G466V, a shared neoantigen or shared neoantigen-encoding sequence for inclusion in a vaccine can be selected by reference to Table A or AACR GENIE Results, where each relevant sequence considered for inclusion is selected by identifying all rows that list BRAF_G466V and at least one of B1501 and B1503.

[0482] For example, for KRAS_G12V, a shared neoantigen or shared neoantigen-encoding sequence for inclusion in a vaccine can be selected by reference to Table A or AACR GENIE Results, where each relevant sequence considered for inclusion is selected by identifying all rows that list KRAS_G12V and at least one of A0301, A1101, A3101, C0102, and A0302. For example, see relevant sequences shown in Table 32.

[0483] For example, for KRAS_Q61H or NRAS_Q61H, a shared neoantigen or shared neoantigen-encoding sequence for inclusion in a vaccine can be selected by reference to Table A or AACR GENIE Results, where each relevant sequence considered for inclusion is selected by identifying all rows that list (1) KRAS_Q61H and A0101; or (2) NRAS_Q61H and A0101.

[0484] For example, for CTNNB1_S37F, a shared neoantigen or shared neoantigen-encoding sequence for inclusion in a vaccine can be selected by reference to Table A or AACR GENIE Results, where each relevant sequence considered for inclusion is selected by identifying all rows that list CTNNB1_S37F and at least one of A2301, A2402, B1510, B3906, C0501, C1402, and C1403.

[0485] For example, for TP53_S127Y, a shared neoantigen or shared neoantigen-encoding sequence for inclusion in a vaccine can be selected by reference to Table A or AACR GENIE Results, where each relevant sequence considered for inclusion is selected by identifying all rows that list TP53_S127Y and at least one of A1101 and A0301.

[0486] For example, for TP53_K132E, a shared neoantigen or shared neoantigen-encoding sequence for inclusion in a vaccine can be selected by reference to Table A or AACR GENIE Results, where each relevant sequence considered for inclusion is selected by identifying all rows that list TP53_K132E and at least one of A2402, C1403, and A2301.

[0487] For example, for KRAS_G12C or NRAS_G12C, a shared neoantigen or shared neoantigen-encoding sequence for inclusion in a vaccine can be selected by reference to Table A or AACR GENIE Results, where each relevant sequence considered for inclusion is selected by identifying all rows that list (1) KRAS_G12C and A0201; or (2) NRAS_G12C and A0201. For example, see relevant sequences shown in Table 32.

### XIII. Example Computer

[0488] A computer can be used for any of the computational methods described herein. One skilled in the art will recognize a computer can have different architectures. Examples of computers are known to those skilled in the art, for example the computers described in more detail in international patent application publications WO/2017/106638, WO/2018/195357, and WO/2018/208856, each herein incorporated by reference, in their entirety, for all purposes.

### XIV. Antigen Delivery Vector Example

[0489] Below are examples of specific embodiments for carrying out the present invention. The examples are offered for illustrative purposes only, and are not intended to limit the scope of the present invention in any way. Efforts have been made to ensure accuracy with respect to numbers used (e.g., amounts, temperatures, etc.), but some experimental error and deviation should, of course, be allowed for.

[0490] The practice of the present invention will employ, unless otherwise indicated, conventional methods of protein chemistry, biochemistry, recombinant DNA techniques and pharmacology, within the skill of the art. Such techniques are explained fully in the literature. See, e.g., T. E. Creighton, Proteins: Structures and Molecular Properties (W.H. Freeman and Company, 1993); A. L. Lehninger, Biochemistry (Worth Publishers, Inc., current addition); Sambrook, et al., Molecular Cloning: A Laboratory Manual (2nd Edition, 1989); Methods In Enzymology (S. Colowick and N. Kaplan eds., Academic Press, Inc.); Remington's Pharmaceutical Sciences, 18th Edition (Easton, Pa.: Mack Publishing Company, 1990); Carey and Sundberg Advanced Organic Chemistry 3^{rd} Ed. (Plenum Press) Vols A and B (1992).

[0491] XIV.A. Neoantigen Cassette Design

[0492] Through vaccination, multiple class I MHC restricted tumor-specific neoantigens (TSNAs) that stimulate the corresponding cellular immune response(s) can be delivered. In one example, a vaccine cassette was engineered to encode multiple epitopes as a single gene product where the epitopes were either embedded within their natural, surrounding peptide sequence or spaced by non-natural linker sequences. Several design parameters were identified that could potentially impact antigen processing and presentation and therefore the magnitude and breadth of the TSNA specific CD8 T cell responses. In the present example, several model cassettes were designed and constructed to evaluate: (1) whether robust T cell responses could be generated to multiple epitopes incorporated in a single expression cassette; (2) what makes an optimal linker placed between the TSNAs within the expression cassette—that leads to optimal processing and presentation of all epitopes; (3) if the relative position of the epitopes within the cassette impact T cell responses; (4) whether the number of epitopes within a cassette influences the magnitude or quality of the T cell responses to individual epitopes; (5) if the addition of cellular targeting sequences improves T cell responses.

[0493] Two readouts were developed to evaluate antigen presentation and T cell responses specific for marker epitopes within the model cassettes: (1) an in vitro cell-based screen which allowed assessment of antigen presentation as gauged by the activation of specially engineered reporter T cells (Aarnoudse et al., 2002; Nagai et al., 2012); and (2) an in vivo assay that used HLA-A2 transgenic mice (Vitiello et al., 1991) to assess post-vaccination immunogenicity of cassette-derived epitopes of human origin by their corresponding epitope-specific T cell responses (Cornet et al., 2006; Depla et al., 2008; Ishioka et al., 1999).

[0494] XIV.B. Antigen Cassette Design Evaluation

[0495] XIV.B.1. Methods and Materials

### TCR and Cassette Design and Cloning

[0496] The selected TCRs recognize peptides NLVPMVATV (SEQ ID NO: 29365) (PDB#5D2N), CLGGLLTMV (SEQ ID NO: 29366) (PDB#3REV), GILGFVFTL (SEQ ID NO: 29367) (PDB#1OGA) LLFGYPVYV (SEQ ID NO: 29368) (PDB#1A07) when presented by A*0201. Transfer vectors were constructed that contain 2A peptide-linked TCR subunits (beta followed by alpha), the EMCV IRES, and 2A-linked CD8 subunits (beta followed by alpha and by the puromycin resistance gene). Open reading frame sequences were codon-optimized and synthesized by GeneArt.

### Cell Line Generation for In Vitro Epitope Processing and Presentation Studies

[0497] Peptides were purchased from ProImmune or Genscript diluted to 10 mg/mL with 10 mM tris(2-carboxyethyl)phosphine (TCEP) in water/DMSO (2:8, v/v). Cell culture medium and supplements, unless otherwise noted, were from Gibco. Heat inactivated fetal bovine serum (FBShi) was from Seradigm. QUANTI-Luc Substrate, Zeocin, and Puromycin were from InvivoGen. Jurkat-Lucia NFAT Cells (InvivoGen) were maintained in RPMI 1640 supplemented with 10% FBShi, Sodium Pyruvate, and 100 μg/mL Zeocin. Once transduced, these cells additionally received 0.3 μg/mL Puromycin. T2 cells (ATCC CRL-1992) were cultured in Iscove's Medium (IMDM) plus 20% FBShi. U-87 MG (ATCC HTB-14) cells were maintained in MEM Eagles Medium supplemented with 10% FBShi.

[0498] Jurkat-Lucia NFAT cells contain an NFAT-inducible Lucia reporter construct. The Lucia gene, when activated by the engagement of the T cell receptor (TCR), causes secretion of a coelenterazine-utilizing luciferase into the culture medium. This luciferase can be measured using the QUANTI-Luc luciferase detection reagent. Jurkat-Lucia cells were transduced with lentivirus to express antigen-specific TCRs. The HIV-derived lentivirus transfer vector was obtained from GeneCopoeia, and lentivirus support plasmids expressing VSV-G (pCMV-VsvG), Rev (pRSV-Rev) and Gag-pol (pCgpV) were obtained from Cell Design Labs.

[0499] Lentivirus was prepared by transfection of 50-80% confluent T75 flasks of HEK293 cells with Lipofectamine 2000 (Thermo Fisher), using 40 μl of lipofectamine and 20 μg of the DNA mixture (4:2:1:1 by weight of the transfer plasmid:pCgpV:pRSV-Rev:pCMV-VsvG). 8-10 mL of the virus-containing media were concentrated using the Lenti-X system (Clontech), and the virus resuspended in 100-200 μl of fresh medium. This volume was used to overlay an equal volume of Jurkat-Lucia cells (5×10E4-1×10E6 cells were used in different experiments). Following culture in 0.3 μg/ml puromycin-containing medium, cells were sorted to obtain clonality. These Jurkat-Lucia TCR clones were tested for activity and selectivity using peptide loaded T2 cells.

### In Vitro Epitope Processing and Presentation Assay

[0500] T2 cells are routinely used to examine antigen recognition by TCRs. T2 cells lack a peptide transporter for antigen processing (TAP deficient) and cannot load endogenous peptides in the endoplasmic reticulum for presentation on the MHC. However, the T2 cells can easily be loaded with exogenous peptides. The five marker peptides (NLVPMVATV (SEQ ID NO: 29365), CLGGLLTMV (SEQ ID NO: 29366), GLCTLVAML (SEQ ID NO: 29369), LLFGYPVYV (SEQ ID NO: 29368), GILGFVFTL (SEQ ID NO: 29367)) and two irrelevant peptides (WLSLLVPFV (SEQ ID NO: 29370), FLLTRICT (SEQ ID NO: 29371)) were loaded onto T2 cells. Briefly, T2 cells were counted and diluted to 1×106 cells/mL with IMDM plus 1% FBShi. Peptides were added to result in 10 μg peptide/1×106 cells. Cells were then incubated at 37° C. for 90 minutes. Cells were washed twice with IMDM plus 20% FBShi, diluted to 5×10E5 cells/mL and 100 μL plated into a 96-well Costar tissue culture plate. Jurkat-Lucia TCR clones were counted and diluted to 5×10E5 cells/mL in RPMI 1640 plus 10% FBShi and 100 μL added to the T2 cells. Plates were incubated overnight at 37° C., 5% CO2. Plates were then centrifuged at 400g for 3 minutes and 20 μL supernatant removed to a white flat bottom Greiner plate. QUANTI-Luc substrate was prepared according to instructions and 50 μL/well added. Luciferase expression was read on a Molecular Devices SpectraMax iE3x.

[0501] To test marker epitope presentation by the adenoviral cassettes, U-87 MG cells were used as surrogate antigen presenting cells (APCs) and were transduced with the adenoviral vectors. U-87 MG cells were harvested and plated in culture media as 5×10E5 cells/100 μl in a 96-well Costar tissue culture plate. Plates were incubated for approximately 2 hours at 37° C. Adenoviral cassettes were diluted with MEM plus 10% FBShi to an MOI of 100, 50, 10, 5, 1 and 0 and added to the U-87 MG cells as 5 μl /well. Plates were again incubated for approximately 2 hours at 37° C. Jurkat-Lucia TCR clones were counted and diluted to 5×10E5 cells/mL in RPMI plus 10% FBShi and added to the U-87 MG cells as 100 μL/well. Plates were then incubated for approximately 24 hours at 37° C., 5% CO2. Plates were centrifuged at 400g for 3 minutes and 20 μl, supernatant removed to a white flat bottom Greiner plate. QUANTI-Luc substrate was prepared according to instructions and 50 μL/well added. Luciferase expression was read on a Molecular Devices SpectraMax iE3x.

### Mouse Strains for Immunogenicity Studies

[0502] Transgenic HLA-A2.1 (HLA-A2 Tg) mice were obtained from Taconic Labs, Inc. These mice carry a transgene consisting of a chimeric class I molecule comprised of the human HLA-A2.1 leader, α1, and α2 domains and the murine H2-Kb α3, transmembrane, and cytoplasmic domains (Vitiello et al., 1991). Mice used for these studies were the first generation offspring (F1) of wild type BALB/cAnNTac females and homozygous HLA-A2.1 Tg males on the C57Bl/6 background.

### Adenovirus Vector (Ad5v) Immunizations

[0503] HLA-A2 Tg mice were immunized with 1×10¹⁰ to 1×10⁶ viral particles of adenoviral vectors via bilateral intramuscular injection into the tibialis anterior. Immune responses were measured at 12 days post-immunization.

### Lymphocyte Isolation

[0504] Lymphocytes were isolated from freshly harvested spleens and lymph nodes of immunized mice. Tissues were dissociated in RPMI containing 10% fetal bovine serum with penicillin and streptomycin (complete RPMI) using the GentleMACS tissue dissociator according to the manufacturer's instructions.

### Ex Vivo Enzyme-Linked Immunospot (ELISPOT) Analysis

[0505] ELISPOT analysis was performed according to ELISPOT harmonization guidelines

[0506] (Janetzki et al., 2015) with the mouse IFNg ELISpotPLUS kit (MABTECH). 1×10⁵ splenocytes were incubated with 10 uM of the indicated peptides for 16 hours in 96-well IFNg antibody coated plates. Spots were developed using alkaline phosphatase. The reaction was timed for 10 minutes and was quenched by running the plate under tap water. Spots were counted using an AID vSpot Reader Spectrum. For ELISPOT analysis, wells with saturation >50% were recorded as “too numerous to count”. Samples with deviation of replicate wells >10% were excluded from analysis. Spot counts were then corrected for well confluency using the formula: spot count+2×(spot count x % confluence /[100%−% confluence]). Negative background was corrected by subtraction of spot counts in the negative peptide stimulation wells from the antigen stimulated wells. Finally, wells labeled too numerous to count were set to the highest observed corrected value, rounded up to the nearest hundred.

### Ex Vivo Intracellular Cytokine Staining (ICS) and Flow Cytometry Analysis

[0507] Freshly isolated lymphocytes at a density of 2-5×10⁶ cells/mL were incubated with 10 uM of the indicated peptides for 2 hours. After two hours, brefeldin A was added to a concentration of 5 ug/ml and cells were incubated with stimulant for an additional 4 hours. Following stimulation, viable cells were labeled with fixable viability dye eFluor780 according to manufacturer's protocol and stained with anti-CD8 APC (clone 53-6.7, BioLegend) at 1:400 dilution. Anti-IFNg PE (clone XMG1.2, BioLegend) was used at 1:100 for intracellular staining. Samples were collected on an Attune NxT Flow Cytometer (Thermo Scientific). Flow cytometry data was plotted and analyzed using FlowJo. To assess degree of antigen-specific response, both the percent IFNg+ of CD8+ cells and the total IFNg+ cell number/1×10⁶ live cells were calculated in response to each peptide stimulant.

[0508] XIV.B.2. In Vitro Evaluation of Antigen Cassette Designs

[0509] As an example of antigen cassette design evaluation, an in vitro cell-based assay was developed to assess whether selected human epitopes within model vaccine cassettes were being expressed, processed, and presented by antigen-presenting cells (FIG. 1). Upon recognition, Jurkat-Lucia reporter T cells that were engineered to express one of five TCRs specific for well-characterized peptide-HLA combinations become activated and translocate the nuclear factor of activated T cells (NFAT) into the nucleus which leads to transcriptional activation of a luciferase reporter gene. Antigenic stimulation of the individual reporter CD8 T cell lines was quantified by bioluminescence.

[0510] Individual Jurkat-Lucia reporter lines were modified by lentiviral transduction with an expression construct that includes an antigen-specific TCR beta and TCR alpha chain separated by a P2A ribosomal skip sequence to ensure equimolar amounts of translated product (Banu et al., 2014). The addition of a second CD8 beta-P2A-CD8 alpha element to the lentiviral construct provided expression of the CD8 co-receptor, which the parent reporter cell line lacks, as CD8 on the cell surface is crucial for the binding affinity to target pMHC molecules and enhances signaling through engagement of its cytoplasmic tail (Lyons et al., 2006; Yachi et al., 2006).

[0511] After lentiviral transduction, the Jurkat-Lucia reporters were expanded under puromycin selection, subjected to single cell fluorescence assisted cell sorting (FACS), and the monoclonal populations tested for luciferase expression. This yielded stably transduced reporter cell lines for specific peptide antigens 1, 2, 4, and 5 with functional cell responses. (Table 2).

TABLE 2
Development of an in vitro T cell activation assay.
Peptide-specific T cell recognition as measured by
induction of luciferase indicates effective processing
and presentation of the vaccine cassette antigens.

| | Short Cassette Design |
|---|---|
| Epitope | AAY |
| 1 | 24.5 ± 0.5 |
| 2 | 11.3 ± 0.4 |
| 3* | n/a |
| 4 | 26.1 ± 3.1 |
| 5 | 46.3 ± 1.9 |

*Reporter T cell for epitope 3 not yet generated

[0512] In another example, a series of short cassettes, all marker epitopes were incorporated in the same position (FIG. 2A) and only the linkers separating the HLA-A*0201 restricted epitopes (FIG. 2B) were varied. Reporter T cells were individually mixed with U-87 antigen-presenting cells (APCs) that were infected with adenoviral constructs expressing these short cassettes, and luciferase expression was measured relative to uninfected controls. All four antigens in the model cassettes were recognized by matching reporter T cells, demonstrating efficient processing and presentation of multiple antigens. The magnitude of T cell responses follow largely similar trends for the natural and AAY-linkers. The antigens released from the RR-linker based cassette show lower luciferase inductions (Table 3). The DPP-linker, designed to disrupt antigen processing, produced a vaccine cassette that led to low epitope presentation (Table 3).

TABLE 3
Evaluation of linker sequences in short cassettes. Luciferase induction in
the in vitro T cell activation assay indicated that, apart from the DPP-based
cassette, all linkers facilitated efficient release of the cassette antigens.
T cell epitope only (no linker) = 9AA, natural linker one side =
17AA, natural linker both sides = 25AA, non-natural linkers = AAY, RR, DPP

| | Short Cassette Designs | | | | | |
|---|---|---|---|---|---|---|
| Epitope | 9AA | 17AA | 25AA | AAY | RR | DPP |
| 1 | 33.6 ± 0.9 | 42.8 ± 2.1 | 42.3 ± 2.3 | 24.5 ± 0.5 | 21.7 ± 0.9 | 0.9 ± 0.1 |
| 2 | 12.0 ± 0.9 | 10.3 ± 0.6 | 14.6 ± 04 | 11.3 ± 0.4 | 8.5 ± 0.3 | 1.1 ± 0.2 |
| 3* | n/a | n/a | n/a | n/a | n/a | n/a |
| 4 | 26.6 ± 2.5 | 16.1 ± 0.6 | 16.6 ± 0.8 | 26.1 ± 3.1 | 12.5 ± 0.8 | 1.3 ± 0.2 |
| 5 | 29.7 ± 0.6 | 21.2 ± 0.7 | 24.3 ± 1.4 | 46.3 ± 1.9 | 19.7 ± 0.4 | 1.3 ± 0.1 |

*Reporter T cell for epitope 3 not yet generated

[0513] In another example, an additional series of short cassettes were constructed that, besides human and mouse epitopes, contained targeting sequences such as ubiquitin (Ub), MHC and Ig-kappa signal peptides (SP), and/or MHC transmembrane (TM) motifs positioned on either the N- or C-terminus of the cassette. (FIG. 3). When delivered to U-87 APCs by adenoviral vector, the reporter T cells again demonstrated efficient processing and presentation of multiple cassette-derived antigens. However, the magnitude of T cell responses were not substantially impacted by the various targeting features (Table 4).

TABLE 4
Evaluation of cellular targeting sequences added to model vaccine cassettes. Employing the in vitro T cell activation
assay demonstrated that the four HLA-A*0201 restricted marker epitopes are liberated efficiently from the model
cassettes and targeting sequences did not substantially improve T cell recognition and activation.

| | Short Cassette Designs | | | | | | | | | |
|---|---|---|---|---|---|---|---|---|---|---|
| Epitope | A | B | C | D | E | F | G | H | I | J |
| 1 | 32.5 ± 1.5 | 31.8 ± 0.8 | 29.1 ± 1.2 | 29.1 ± 1.1 | 28.4 ± 0.7 | 20.4 ± 0.5 | 35.0 ± 1.3 | 30.3 ± 2.0 | 22.5 ± 0.9 | 38.1 ± 1.6 |
| 2 | 6.1 ± 0.2 | 6.3 ± 0.2 | 7.6 ± 0.4 | 7.0 ± 0.5 | 5.9 ± 0.2 | 3.7 ± 0.2 | 7.6 ± 0.4 | 5.4 ± 0.3 | 6.2 ± 0.4 | 6.4 ± 0.3 |
| 3* | n/a | n/a | n/a | n/a | n/a | n/a | n/a | n/a | n/a | n/a |
| 4 | 12.3 ± 1.1 | 14.1 ± 0.7 | 12.2 ± 0.8 | 13.7 ± 1.0 | 11.7 ± 0.8 | 10.6 ± 0.4 | 11.0 ± 0.6 | 7.6 ± 0.6 | 16.1 ± 0.5 | 8.7 ± 0.5 |
| 5 | 44.4 ± 2.8 | 53.6 ± 1.6 | 49.9 ± 3.3 | 50.5 ± 2.8 | 41.7 ± 2.8 | 36.1 ± 1.1 | 46.5 ± 2.1 | 31.4 ± 0.6 | 75.4 ± 1.6 | 35.7 ± 2.2 |

*Reporter T cell for epitope 3 not yet generated

[0514] XIV.B.3. In Vivo Evaluation of Antigen Cassette Designs

[0515] As another example of antigen cassette design evaluation, vaccine cassettes were designed to contain 5 well-characterized human class I WIC epitopes known to stimulate CD8 T cells in an HLA-A*02:01 restricted fashion (FIG. 2A, 3, 5A). For the evaluation of their in vivo immunogenicity, vaccine cassettes containing these marker epitopes were incorporated in adenoviral vectors and used to infect HLA-A2 transgenic mice (FIG. 4). This mouse model carries a transgene consisting partly of human HLA-A*0201 and mouse H2-Kb thus encoding a chimeric class I WIC molecule consisting of the human HLA-A2.1 leader, α1 and α2 domains ligated to the murine α3, transmembrane and cytoplasmic H2-Kb domain (Vitiello et al., 1991). The chimeric molecule allows HLA-A*02:01-restricted antigen presentation whilst maintaining the species-matched interaction of the CD8 co-receptor with the α3 domain on the WIC.

[0516] For the short cassettes, all marker epitopes generated a T cell response, as determined by IFN-gamma ELISPOT, that was approximately 10-50× stronger of what has been commonly reported (Cornet et al., 2006; Depla et al., 2008; Ishioka et al., 1999). Of all the linkers evaluated, the concatamer of 25mer sequences, each containing a minimal epitope flanked by their natural amino acids sequences, generated the largest and broadest T cell response (Table 5). Intracellular cytokine staining (ICS) and flow cytometry analysis revealed that the antigen-specific T cell responses are derived from CD8 T cells.

TABLE 5
In vivo evaluation of linker sequences in short cassettes. ELISPOT data indicated that
HLA-A2 transgenic mice, 17 days post-infection with 1e11 adenovirus viral particles,
generated a T cell response to all class I MHC restricted epitopes in the cassette.

| | Short Cassette Designs | | | | | |
|---|---|---|---|---|---|---|
| Epitope | 9AA | 17AA | 25AA | AAY | RR | DPP |
| 1 | 2020 +/− 583 | 2505 +/− 1281 | 6844 +/− 956 | 1489 +/− 762 | 1675 +/− 690 | 1781 +/− 774 |
| 2 | 4472 +/− 755 | 3792 +/− 1319 | 7629 +/− 996 | 3851 +/− 1748 | 4726 +/− 1715 | 5868 +/− 1427 |
| 3 | 5830 +/− 315 | 3629 +/− 862 | 7253 +/− 491 | 4813 +/− 1761 | 6779 +/− 1033 | 7328 +/− 1700 |
| 4 | 5536 +/− 375 | 2446 +/− 955 | 2961 +/− 1487 | 4230 +/− 1759 | 6518 +/− 909 | 7222 +/− 1824 |
| 5 | 8800 +/− 0 | 7943 +/− 821 | 8423 +/− 442 | 8312 +/− 696 | 8800 +/− 0 | 1836 +/− 328 |

[0517] In another example, a series of long vaccine cassettes was constructed and incorporated in adenoviral vectors that, next to the original 5 marker epitopes, contained an additional 16 HLA-A*02:01, A*03:01 and B*44:05 epitopes with known CD8 T cell reactivity (FIG. 5A, B). The size of these long cassettes closely mimicked the final clinical cassette design, and only the position of the epitopes relative to each other was varied. The CD8 T cell responses were comparable in magnitude and breadth for both long and short vaccine cassettes, demonstrating that (a) the addition of more epitopes did not substantially impact the magnitude of immune response to the original set of epitopes, and (b) the position of an epitope in a cassette did not substantially influence the ensuing T cell response to it (Table 6).

TABLE 6
In vivo evaluation of the impact of epitope position in
long cassettes. ELISPOT data indicated that HLA-A2 transgenic
mice, 17 days post-infection with 5e10 adenovirus viral
particles, generated a T cell response comparable in magnitude
for both long and short vaccine cassettes.

| | Long Cassette Designs | | |
|---|---|---|---|
| Epitope | Standard | Scrambled | Short |
| 1 | 863 +/− 1080 | 804 +/− 1113 | 1871 +/− 2859 |
| 2 | 6425 +/− 1594 | 28 +/− 62 | 5390 +/− 1357 |
| 3* | 23 +/− 30 | 36 +/− 18 | 0 +/− 48 |
| 4 | 2224 +/− 1074 | 2727 +/− 644 | 2637 +/− 1673 |
| 5 | 7952 +/− 297 | 8100 +/− 0 | 8100 +/− 0 |

*Suspected technical error caused an absence of a T cell response.

[0518] XIV.B.4. Antigen Cassette Design for Immunogenicity and Toxicology Studies

[0519] In summary, the findings of the model cassette evaluations (FIG. 2-5, Tables 2-6) demonstrated that, for model vaccine cassettes, robustimmunogenicity was achieved when a “string of beads” approach was employed that encodes around 20 epitopes in the context of an adenovirus-based vector. The epitopes were assembled by concatenating 25mer sequences, each embedding a minimal CD8 T cell epitope (e.g. 9 amino acid residues) that were flanked on both sides by its natural, surrounding peptide sequence (e.g. 8 amino acid residues on each side). As used herein, a “natural” or “native” flanking sequence refers to the N- and/or C-terminal flanking sequence of a given epitope in the naturally occurring context of that epitope within its source protein. For example, the HCMV pp65 MHC I epitope NLVPMVATV (SEQ ID NO: 29365) is flanked on its 5′ end by the native 5′ sequence WQAGILAR (SEQ ID NO: 29372) and on its 3′ end by the native 3′ sequence QGQNLKYQ (SEQ ID NO: 29373), thus generating the WQAGILARNLVPMVATVQGQNLKYQ (SEQ ID NO: 29374) 25mer peptide found within the HCMV pp65 source protein. The natural or native sequence can also refer to a nucleotide sequence that encodes an epitope flanked by native flanking sequence(s). Each 25mer sequence is directly connected to the following 25mer sequence. In instances where the minimal CD8 T cell epitope is greater than or less than 9 amino acids, the flanking peptide length can be adjusted such that the total length is still a 25mer peptide sequence. For example, a 10 amino acid CD8 T cell epitope can be flanked by an 8 amino acid sequence and a 7 amino acid. The concatamer was followed by two universal class II MHC epitopes that were included to stimulate CD4 T helper cells and improve overall in vivo immunogenicity of the vaccine cassette antigens. (Alexander et al., 1994; Panina-Bordignon et al., 1989) The class II epitopes were linked to the final class I epitope by a GPGPG amino acid linker (SEQ ID NO:56). The two class II epitopes were also linked to each other by a GPGPG amino acid linker (SEQ ID NO: 56), as a well as flanked on the C-terminus by a GPGPG amino acid linker (SEQ ID NO: 56). Neither the position nor the number of epitopes appeared to substantially impact T cell recognition or response. Targeting sequences also did not appear to substantially impact the immunogenicity of cassette-derived antigens.

[0520] As a further example, based on the in vitro and in vivo data obtained with model cassettes (FIG. 2-5, Tables 2-6), a cassette design was generated that alternates well-characterized T cell epitopes known to be immunogenic in nonhuman primates (NHPs), mice and humans. The 20 epitopes, all embedded in their natural 25mer sequences, are followed by the two universal class II MHC epitopes that were present in all model cassettes evaluated (FIG. 6). This cassette design was used to study immunogenicity as well as pharmacology and toxicology studies in multiple species.

[0521] XIV.B.5. Antigen Cassette Design and Evaluation for 30, 40, and 50 Antigens

[0522] Large antigen cassettes were designed that had either 30 (L), 40 (XL) or 50 (XXL) epitopes, each 25 amino acids in length. The epitopes were a mix of human, NHP and mouse epitopes to model disease antigens including tumor antigens. FIG. 29 illustrates the general organization of the epitopes from the various species. The model antigens used are described in Tables 37, 38 and 39 for human, primate, and mouse model epitopes, respectively. Each of Tables 37, 38 and 39 described the epitope position, name, minimal epitope description, and MHC class.

[0523] These cassettes were cloned into the chAd68 and alphavirus vaccine vectors as described to evaluate the efficacy of longer multiple-epitope cassettes. FIG. 30 shows that each of the large antigen cassettes were expressed from a ChAdV vector as indicated by at least one major band of the expected size by Western blot.

[0524] Mice were immunized as described to evaluate the efficacy of the large cassettes. T cell responses were analyzed by ICS and tetramer staining following immunization with a chAd68 vector (FIG. 31/Table 40 and FIG. 32/Table 41, respectively) and by ICS following immunization with a srRNA vector (FIG. 33/Table 42) for epitopes AH1 (top panels) and SINNFEKL (SEQ ID NO: 29375) (bottom panels). Immunizations using chAd68 and srRNA vaccine vectors expressing either 30 (L), 40 (XL) or 50 (XXL) epitopes induced CD8+ immune responses to model disease epitopes.

TABLE 37
Human epitopes in large cassettes (SEQ ID NOS 29367-29369, 29365-29366,
29402-29414, 29374, and 29415-29425, respectively, in order of columns)

| Epitope position | | | | | | | | | |
|---|---|---|---|---|---|---|---|---|---|
| in each cassette | | | | Minimal | | | | | |
| L | XL | XXL | Name | epitope | 25mer | MHC | Restriction | Strain | Species |
| 3 | 3 | 3 | 5.influenza M | GILGF | PILSPL | Class I | A*02:01 | Human | Human |
| | | | | VFTL | TKGILG | | | | |
| | | | | | FVFTLT | | | | |
| | | | | | VPSERG | | | | |
| | | | | | L | | | | |
| 6 | 6 | 6 | 4.HTLV-1 Tax | LLFGY | HFPGFG | Class I | A*02:01 | Human | Human |
| | | | | PVYV | QSLLFG | | | | |
| | | | | | YPVYVF | | | | |
| | | | | | GDCVQGD | | | | |
| 9 | 9 | 9 | 3.EBV BMLF1 | GLCTL | RMQAIQ | Class I | A*02:01 | Human | Human |
| | | | | VAML | NAGLCT | | | | |
| | | | | | LVAMLE | | | | |
| | | | | | ETIFWL | | | | |
| | | | | | Q | | | | |
| 12 | 12 | 12 | 1.HCMV pp65 | NLVPM | WQAGIL | Class I | A*02:01 | Human | Human |
| | | | | VATV | ARNLVP | | | | |
| | | | | | MVATVQ | | | | |
| | | | | | GQNLKY | | | | |
| | | | | | Q | | | | |
| 15 | 15 | 15 | 2.EBV LMP2A | CLGGL | RTYGPV | Class I | A*02:01 | Human | Human |
| | | | | LTMV | FMCLGG | | | | |
| | | | | | LLTMVA | | | | |
| | | | | | GAVWLT | | | | |
| | | | | | V | | | | |
| 18 | 18 | 18 | CT83 | NTDNN | SSSGLI | Class I | A*01:01 | Human | Human |
| | | | | LAVY | NSNTDN | | | | |
| | | | | | NLAVYD | | | | |
| | | | | | LSRDIL | | | | |
| | | | | | N | | | | |
| | 21 | 21 | MAGEA6 | EVDPI | LVFGIE | Class I | B*35:01 | Human | Human |
| | | | | GHVY | LMEVDP | | | | |
| | | | | | IGHVYI | | | | |
| | | | | | FATCLG | | | | |
| | | | | | L | | | | |
| 21 | 25 | 25 | CT83 | LLASS | MNFYLL | Class I | A*02:01 | Human | Human |
| | | | | ILCA | LASSIL | | | | |
| | | | | | CALIVF | | | | |
| | | | | | WKYRRF | | | | |
| | | | | | Q | | | | |
| 24 | 31 | 28 | FOXE1 | AIFPG | AAAAAA | Class I | A*02:01 | Human | Human |
| | | | | AVPAA | AAIFPG | | | | |
| | | | | | AVPAAR | | | | |
| | | | | | PPYPGA | | | | |
| | | | | | V | | | | |
| 27 | 35 | 32 | CT83 | VYDLS | SNTDNN | Class I | A*24:02 | Human | Human |
| | | | | RDIL | LAVYDL | | | | |
| | | | | | SRDILN | | | | |
| | | | | | NFPHSI | | | | |
| | | | | | A | | | | |
| | 38 | 36 | MAGE3/6 | ASSLP | DPPQSP | Class I | A*01:01 | Human | Human |
| | | | | TTMNY | QGASSL | | | | |
| | | | | | PTTMNY | | | | |
| | | | | | PLWSQS | | | | |
| | | | | | Y | | | | |
| 30 | 40 | 40 | Influenza HA | PKYVK | ITYGAC | Class II | DRB1*0101 | Human | Human |
| | | | | QNTLK | PKYVKQ | | | | |
| | | | | LAT | NTLKLA | | | | |
| | | | | | TGMRNV | | | | |
| | | | | | P | | | | |
| | | 44 | CMV pp65 | LPLKM | SIYVYA | Class II | DRB1*0101 | Human | Human |
| | | | | LNIPS | LPLKML | | | | |
| | | | | INVH | NIPSIN | | | | |
| | | | | | VHHYPS | | | | |
| | | | | | A | | | | |
| | | 47 | EBVEBNA3A | PEQWMF | EGPWVP | Class II | DRB1*0102 | Human | Human |
| | | | | QGAP | EQWMFQ | | | | |
| | | | | PSQGT | GAPPSQ | | | | |
| | | | | | GTDVVQ | | | | |
| | | | | | H | | | | |
| | | 50 | CMV pp65 | EHPTF | RGPQYS | Class II | DRB1*1101 | Human | Human |
| | | | | TSQYR | EHPTFT | | | | |
| | | | | IQGKL | SQYRIQ | | | | |
| | | | | | GKLEYRH | | | | |

TABLE 38
NHP epitopes in large cassettes (SEQ ID NOS 29426-29455, respectively,
in order of columns)

| Epitope position | | | | | | | | |
|---|---|---|---|---|---|---|---|---|
| in each cassette | | | | Minimal | | | Restriction | |
| L | XL | XXL | Name | epitope | 25mer | MHC | Strain | Species |
| 1 | 1 | 1 | Gag CM9 | CTPYD | MFQALSEG | Class I | Mamu-A*01 | NHP |
| | | | | INQM | CTPYDINQ | | Rhesus | |
| | | | | | MLNVLGDH | | | |
| | | | | | Q | | | |
| 4 | 4 | 4 | Tat TL8 | TTPE | SCISEADA | Class I | Mamu-A*01 | NHP |
| | | | | SANL | TTPESANL | | Rhesus | |
| | | | | | GEEILSQL | | | |
| | | | | | Y | | | |
| 7 | 7 | 7 | Env CL9 | CAPP | WDAIRFRY | Class I | Mamu-A*01 | NHP |
| | | | | GYALL | CAPPGYAL | | Rhesus | |
| | | | | | LRCNDTNY | | | |
| | | | | | S | | | |
| 10 | 10 | 10 | Pol SV9 | SGPK | AFLMALTD | Class I | Mamu-A*01 | NHP |
| | | | | TNIIV | SGPKTNII | | Rhesus | |
| | | | | | VDSQYVMG | | | |
| | | | | | I | | | |
| 13 | 13 | 13 | Gag LW9 | LSPRT | GNVWVHTP | Class I | Mamu-A*01 | NHP |
| | | | | LNAW | LSPRTLNA | | Rhesus | |
| | | | | | WVKAVEEK | | | |
| | | | | | K | | | |
| | | 16 | Env_TL9 | TVPWP | AFRQVCHT | Class I | Mamu-A*01 | NHP |
| | | | | NASL | TVPWPNAS | | Rhesus | |
| | | | | | LTPKWNNE | | | |
| | | | | | T | | | |
| 16 | 16 | 19 | Ag85B | PNGTH | VFNFPPNG | Class II | Mamu-DR*W | NHP |
| | | | | SWEYW | THSWEYWG | | Rhesus | |
| | | | | GAQLN | AQLNAMKG | | | |
| | | | | | D | | | |
| 19 | 19 | 23 | HIV-1 | YKYKV | NWRSELYK | Class II | Mamu-DR*W | NHP |
| | | | Env | VKIEP | YKVVKIEP | | Rhesus | |
| | | | | LGV | LGVAPTKA | | | |
| | | | | | K | | | |
| | | 26 | Gag TE15 | TEEAK | EKVKHTEE | Class II | Mamu-DRB* | NHP |
| | | | | QIVQR | AKQIVQRH | | Rhesus | |
| | | | | HLVVE | LVVETGTT | | | |
| | | | | | E | | | |
| | 23 | 30 | CFP-10 | AGSLQ | DQVESTAG | Class II | Mafa-DRB1* | NHP |
| | | | 36-48 | GQWRG | SLQGQWRG | | Cyno | |
| | | | | AAG | AAGTAAQA | | | |
| | | | | | A | | | |
| | 27 | 34 | CFP-10 | EISTN | QELDEIST | Class II | Mafa-DRB1* | NHP |
| | | | 71-86 | IRQAG | NIRQAGVQ | | Cyno | |
| | | | | VQYSRA | YSRADEEQ | | | |
| | | | | | Q | | | |
| 22 | 29 | 38 | Env338- | RPKQA | FHSQPINE | Class I | Mafa-A1*06: | NHP |
| | | | 346 | WCWF | RPKQAWCW | | Cyno | |
| | | | | | FGGSWKEA | | | |
| | | | | | I | | | |
| 25 | 33 | 42 | Nef 103- | RPKVP | DDIDEEDD | Class I | Mafa-A1*06: | NHP |
| | | | 111 | LRTM | DLVGVSVR | | Cyno | |
| | | | | | PKVPLRTM | | | |
| | | | | | S | | | |
| 28 | 37 | 45 | Gag 386- | GPRKP | PFAAAQQR | Class I | Mafa-A1*06: | NHP |
| | | | 394 | IKCW | GPRKPIKC | | Cyno | |
| | | | | | WNCGKEGH | | | |
| | | | | | S | | | |
| | | 48 | Nef LT9 | LNMAD | RRLTARGL | Class I | Mafa-B*104: | NHP |
| | | | | KKET | LNMADKKE | | Cyno | |
| | | | | | TRTPKKAK | | | |
| | | | | | A | | | |

TABLE 39
Mouse epitopes in large cassettes (SEQ ID NOS 29362, 29456-29458,
29363, 29459-29493, respectively, in order of columns)

| Epitope position | | | | | | | | | |
|---|---|---|---|---|---|---|---|---|---|
| in each cassette | | | | Minimal | | | | | |
| L | XL | XXL | Name | epitope | 25mer | MHC | Restriction | Strain | Species |
| 2 | 2 | 2 | OVA257 | SIINFEKL | VSGLEQL | Class I | H2-Kb | B6 | Mouse |
| | | | | | ESIINFE | | | | |
| | | | | | KLTEWTS | | | | |
| | | | | | SNVM | | | | |
| | | 5 | B16-EGP | EGPRNQDWL | ALLAVGA | Class I | H2-Db | B6 | Mouse |
| | | | | | LEGPRNQ | | | | |
| | | | | | DWLGVPR | | | | |
| | | | | | QLVT | | | | |
| | | 8 | B16-TRP1 | TAPDNLGYM | VTNTEMF | Class I | H2-Db | B6 | Mouse |
| | | | 455-463 | | VTAPDNL | | | | |
| | | | | | GYMYEVQ | | | | |
| | | | | | WPGQ | | | | |
| | | 11 | Trp2180-188 | SVYDFFVWL | TQPQIAN | Class I | H2-Kb | B6 | Mouse |
| | | | | | CSVYDFF | | | | |
| | | | | | VWLHYYS | | | | |
| | | | | | VRDT | | | | |
| 5 | 5 | 14 | CT26 AH1-A5 | SPSYAYHQF | LWPRVTY | Class I | H2-Ld | BaIb/C | Mouse |
| | | | | | HSPSYAY | | | | |
| | | | | | HQFERRA | | | | |
| | | | | | KYKR | | | | |
| | 8 | 17 | CT26 AH1-39 | MNKYAYHML | LWPRVTY | Class I | H2-Ld | BaIb/C | Mouse |
| | | | | | HMNKYAY | | | | |
| | | | | | HMLERRA | | | | |
| | | | | | KYKR | | | | |
| | 11 | 20 | MC38 Dpagt1 | SIIVFNLL | GQSLVIS | Class I | H2-Kb | B6 | Mouse |
| | | | | | ASIIVFN | | | | |
| | | | | | LLELEGD | | | | |
| | | | | | YRDD | | | | |
| | 14 | 22 | MC38 Adpgk | ASMTNMELM | GIPVHLE | Class I | H2-Db | B6 | Mouse |
| | | | | | LASMTNM | | | | |
| | | | | | ELMSSIV | | | | |
| | | | | | HQQV | | | | |
| | 17 | 24 | MC38 Reps1 | AQLANDVVL | RVLELFR | Class I | H2-Db | B6 | Mouse |
| | | | | | AAQLAND | | | | |
| | | | | | VVLQIME | | | | |
| | | | | | LCGA | | | | |
| 8 | 20 | 27 | P815 P1A | LPYLGWLVF | HRYSLEE | Class I | H2-Ld | DBA/2 | Mouse |
| | | | 35-44 | | ILPYLGW | | | | |
| | | | | | LVFAVVT | | | | |
| | | | | | TSFL | | | | |
| 11 | 22 | 29 | P815 PIE | GYCGLRGTG | YLSKNPD | Class I | H2-Kd | DBA/2 | Mouse |
| | | | | V | GYCGLRG | | | | |
| | | | | | TGVSCPM | | | | |
| | | | | | AIKK | | | | |
| 14 | 24 | 31 | Panc02 | LSIFKHKL | NEIPFTY | Class I | H2-Kb | B6 | Mouse |
| | | | Mesothelin | | EQLSIFK | | | | |
| | | | | | HKLDKTY | | | | |
| | | | | | PQGY | | | | |
| 17 | 26 | 33 | Panc02 | LIWIPALL | SRASLLG | Class I | H2-Kb | B6 | Mouse |
| | | | Mesothelin | | PGFVLIW | | | | |
| | | | | | IPALLPA | | | | |
| | | | | | LRLS | | | | |
| 20 | 28 | 35 | ID8 FRa | SSGHNECPV | NWHKGWN | Class I | H2-Kb | B6 | Mouse |
| | | | 161-169 | | WSSGHNE | | | | |
| | | | | | CPVGASC | | | | |
| | | | | | HPFT | | | | |
| 23 | 30 | 37 | ID8 | GQKMNAQAI | KTLLKVS | Class I | H2-Db | B6 | Mouse |
| | | | Mesothelin | | KGQKMNA | | | | |
| | | | 40 [symbol] | | QAIALVA | | | | |
| | | | | | CYLR | | | | |
| 26 | 32 | 39 | OVA-II | ISQAVHAA | ESLKISQ | Class II | I-Ab, | B6 | Mouse |
| | | | | HAEINEAG | AVHAAHA | | I-Ad | | |
| | | | | R | EINEAGR | | | | |
| | | | | | EVVG | | | | |
| 29 | 34 | 41 | ESAT-6 | MTEQQWNF | MTEQQWN | Class II | I-Ab | B6 | Mouse |
| | | | | AGIEAAAS | FAGIEAA | | | | |
| | | | | AIQ | ASAIQGN | | | | |
| | | | | | VTSI | | | | |
| | 36 | 43 | TT p30 | FNNFTVSF | DMFNNFT | Class II | I-Ad | BaIb/C | Mouse |
| | | | | WLRVPKVS | VSFWLRV | | | | |
| | | | | ASHL | PKVSASH | | | | |
| | | | | | LEQY | | | | |
| | 39 | 46 | HEL | DGSTDYGI | TNRNTDG | Class II | I-Ak | CBA | Mouse |
| | | | | LQINSRW | STDYGIL | | | | |
| | | | | | QINSRWW | | | | |
| | | | | | CNDG | | | | |
| | | 49 | MOG | MEVGWYRS | TGMEVGW | Class II | I-Ab | B6 | Mouse |
| | | | | PFSRVVHL | YRSPFSR | | | | |
| | | | | YRN | VVHLYRN | | | | |
| | | | | | GKDQ | | | | |

[symbol]

indicates data missing or illegible when filed

TABLE 40
Average IFNg+ cells in response to AH1
and SIINFEKL (SEQ ID NO: 29362) peptides in
ChAd large cassette treated mice. Data is
presented as % of total CD8 cells. Shown is
average and standard deviation per group and
p-value by ANOVA with Tukey’s test.
All p-values compared to MAG 20-antigen
cassette.

| # | | | Standard | p- | |
|---|---|---|---|---|---|
| antigens | Antigen | Average | deviation | value | N |
| 20 | SIINFEKL | 5.308 | 0.660 | n/a | 8 |
| | (SEQ ID | | | | |
| | NO: 29362) | | | | |
| 30 | SIINFEKL | 4.119 | 1.019 | 0.978 | 8 |
| | (SEQ ID | | | | |
| | NO: 29362) | | | | |
| 40 | SIINFEKL | 6.324 | 0.954 | 0.986 | 8 |
| | (SEQ ID | | | | |
| | NO: 29362) | | | | |
| 50 | SIINFEKL | 8.169 | 1.469 | 0.751 | 8 |
| | (SEQ ID | | | | |
| | NO: 29362) | | | | |
| 20 | AH1 | 6.405 | 2.664 | n/a | 8 |
| 30 | AH1 | 4.373 | 1.442 | 0.093 | 8 |
| 40 | AH1 | 4.126 | 1.135 | 0.050 | 8 |
| 50 | AH1 | 4.216 | 0.808 | 0.063 | 8 |

```
TABLE 41
Average tetramer+ cells for AH1
and SIINFEKL (SEQ ID NO: 29362)
antigens in ChAd large cassette
treated mice. Data is presented
  as % of total CD8 cells. Shown
is average and standard deviation
  per group and p-value by ANOVA
with Tukey’s test.
All p-values compared to
MAG 20-antigen cassette.
```

| # | | | Standard | | |
|---|---|---|---|---|---|
| antigens | Antigen | Average | deviation | p-value | N |
| 20 | SIINFEKL | 10.314 | 2.384 | n/a | 8 |
| | (SEQ ID | | | | |
| | NO: 29362) | | | | |
| 30 | SIINFEKL | 4.551 | 2.370 | 0.003 | 8 |
| | (SEQ ID | | | | |
| | NO: 29362) | | | | |
| 40 | SIINFEKL | 5.186 | 3.254 | 0.009 | 8 |
| | (SEQ ID | | | | |
| | NO: 29362) | | | | |
| 50 | SIINFEKL | 14.113 | 3.660 | 0.072 | 8 |
| | (SEQ ID | | | | |
| | NO: 29362) | | | | |
| 20 | AH1 | 6.864 | 2.207 | n/a | 8 |
| 30 | AH1 | 4.713 | 0.922 | 0.036 | 8 |
| 40 | AH1 | 5.393 | 1.452 | 0.223 | 8 |
| 50 | AH1 | 5.860 | 1.041 | 0.543 | 8 |

```
TABLE 42
Average IFNg+ cells in response to
AH1 and SIINFEKL (SEQ ID NO: 29362)
peptides in SAM large cassette
treated mice. Data is presented
as % of total CD8 cells. Shown is
  average and standard deviation
per group and p-value by ANOVA
with Tukey's test. All p-values
  compared to MAG 20-antigen cassette.
```

| # | | | Standard | | |
|---|---|---|---|---|---|
| antigens | Antigen | Average | deviation | p-value | N |
| 20 | SIINFEKL | 1.843 | 0.422 | n/a | 8 |
| | (SEQ ID | | | | |
| | NO: 29362) | | | | |
| 30 | SIINFEKL | 2.112 | 0.522 | 0.879 | 7 |
| | (SEQ ID | | | | |
| | NO: 29362) | | | | |
| 40 | SIINFEKL | 1.754 | 0.978 | 0.995 | 7 |
| | (SEQ ID | | | | |
| | NO: 29362) | | | | |
| 50 | SIINFEKL | 1.409 | 0.766 | 0.606 | 8 |
| | (SEQ ID | | | | |
| | NO: 29362) | | | | |
| 20 | AH1 | 3.050 | 0.909 | n/a | 8 |
| 30 | AH1 | 0.618 | 0.427 | 1.91E−05 | 7 |
| 40 | AH1 | 1.286 | 0.284 | 0.001 | 7 |
| 50 | AH1 | 1.309 | 1.149 | 0.001 | 8 |

[0525] XV. ChAd Antigen Cassette Delivery Vector

[0526] XV.A. ChAd Antigen Cassette Delivery Vector Construction

[0527] In one example, Chimpanzee adenovirus (ChAd) was engineered to be a delivery vector for antigen cassettes. In a further example, a full-length ChAdV68 vector was synthesized based on AC_000011.1 (sequence 2 from U.S. Pat. No. 6,083,716) with E1 (nt 457 to 3014) and E3 (nt 27,816-31,332) sequences deleted. Reporter genes under the control of the CMV promoter/enhancer were inserted in place of the deleted E1 sequences. Transfection of this clone into HEK293 cells did not yield infectious virus. To confirm the sequence of the wild-type C68 virus, isolate VR-594 was obtained from the ATCC, passaged, and then independently sequenced (SEQ ID NO:10). When comparing the AC_000011.1 sequence to the ATCC VR-594 sequence (SEQ ID NO:10) of wild-type ChAdV68 virus, 6 nucleotide differences were identified. In one example, a modified ChAdV68 vector was generated based on AC_000011.1, with the corresponding ATCC VR-594 nucleotides substituted at five positions (ChAdV68.5WTnt SEQ ID NO:1).

[0528] In another example, a modified ChAdV68 vector was generated based on AC_000011.1 with E1 (nt 577 to 3403) and E3 (nt 27,816-31,332) sequences deleted and the corresponding ATCC VR-594 nucleotides substituted at four positions. A GFP reporter (ChAdV68.4WTnt.GFP; SEQ ID NO:11) or model neoantigen cassette (ChAdV68.4WTnt.MAG25mer; SEQ ID NO:12) under the control of the CMV promoter/enhancer was inserted in place of deleted E1 sequences.

[0529] In another example, a modified ChAdV68 vector was generated based on AC_000011.1 with E1 (nt 577 to 3403) and E3 (nt 27,125-31,825) sequences deleted and the corresponding ATCC VR-594 nucleotides substituted at five positions. A GFP reporter (ChAdV68.5WTnt.GFP; SEQ ID NO:13) or model neoantigen cassette (ChAdV68.5WTnt.MAG25mer; SEQ ID NO:2) under the control of the CMV promoter/enhancer was inserted in place of deleted E1 sequences

[0530] Relevant vectors are described below:
[0531] Full-Length ChAdVC68 sequence “ChAdV68.5WTnt” (SEQ ID NO:1); AC_000011.1 sequence with corresponding ATCC VR-594 nucleotides substituted at five positions.
[0532] ATCC VR-594 C68 (SEQ ID NO:10); independently sequenced Full-Length C68 ChAdV68.4WTnt.GFP (SEQ ID NO:11); AC_000011.1 with E1 (nt 577 to 3403) and E3 (nt 27,816-31; 332) sequences deleted; corresponding ATCC VR-594 nucleotides substituted at four positions; GFP reporter under the control of the CMV promoter/enhancer inserted in place of deleted E1
[0533] ChAdV68.4WTnt.MAG25mer (SEQ ID NO:12); AC_000011.1 with E1 (nt 577 to 3403) and E3 (nt 27,816-31,332) sequences deleted; corresponding ATCC VR-594 nucleotides substituted at four positions: model neoantigen cassette under the control of the CMV promoter/enhancer inserted in place of deleted E1
[0534] ChAdV68.5WTnt.GFP (SEQ ID NO:13), AC_000011.1 with E1 (nt 577 to 3403) and E3 (nt 27,125-31,825) sequences deleted; corresponding ATCC VR-594 nucleotides substituted at five positions; GFP reporter under the control of the CMV promoter/enhancer inserted in place of deleted E1

[0535] XV.B. ChAd Antigen Cassette Delivery Vector Testing

[0536] XV.B.1. ChAd Vector Evaluation Methods and Materials Transfection of HEK293A Cells Using Lipofectamine

[0537] DNA for the ChAdV68 constructs (ChAdV68.4WTnt.GFP, ChAdV68.5WTnt.GFP, ChAdV68.4WTnt.MAG25mer and ChAdV68.5WTnt.MAG25mer) was prepared and transfected into HEK293A cells using the following protocol.

[0538] 10 ug of plasmid DNA was digested with PacI to liberate the viral genome. DNA was then purified using GeneJet DNA cleanup Micro columns (Thermo Fisher) according to manufacturer's instructions for long DNA fragments, and eluted in 20 ul of pre-heated water; columns were left at 37 degrees for 0.5-1 hours before the elution step.

[0539] HEK293A cells were introduced into 6-well plates at a cell density of 10⁶ cells/well 14-18 hours prior to transfection. Cells were overlaid with 1 ml of fresh medium (DMEM-10% hiFBS with pen/strep and glutamate) per well. 1-2 ug of purified DNA was used per well in a transfection with twice the ul volume (2-4 ul) of Lipofectamine2000, according to the manufacturer's protocol. 0.5 ml of OPTI-MEM medium containing the transfection mix was added to the 1 ml of normal growth medium in each well, and left on cells overnight.

[0540] Transfected cell cultures were incubated at 37° C. for at least 5-7 days. If viral plaques were not visible by day 7 post-transfection, cells were split 1:4 or 1:6, and incubated at 37° C. to monitor for plaque development. Alternatively, transfected cells were harvested and subjected to 3 cycles of freezing and thawing and the cell lysates were used to infect HEK293A cells and the cells were incubated until virus plaques were observed.

Transfection of ChAdV68 Vectors into HEK293A Cells Using Calcium Phosphate and Generation of the Tertiary Viral Stock

[0541] DNA for the ChAdV68 constructs (ChAdV68.4WTnt.GFP, ChAdV68.5WTnt.GFP, ChAdV68.4WTnt.MAG25mer, ChAdV68.5WTnt.MAG25mer) was prepared and transfected into HEK293A cells using the following protocol.

[0542] HEK293A cells were seeded one day prior to the transfection at 10⁶ cells/well of a 6 well plate in 5% BS/DMEM/1XP/S, 1× Glutamax. Two wells are needed per transfection. Two to four hours prior to transfection the media was changed to fresh media. The ChAdV68.4WTnt.GFP plasmid was linearized with PacI. The linearized DNA was then phenol chloroform extracted and precipitated using one tenth volume of 3M Sodium acetate pH 5.3 and two volumes of 100% ethanol. The precipitated DNA was pelleted by centrifugation at 12,000×g for 5 min before washing 1× with 70% ethanol. The pellet was air dried and re-suspended in 50 μL of sterile water. The DNA concentration was determined using a NanoDrop™ (ThermoFisher) and the volume adjusted to 5 μg of DNA/50 μL.

[0543] 169 μL of sterile water was added to a microfuge tube. 5 μL of 2M CaCl₂) was then added to the water and mixed gently by pipetting. 50 μL of DNA was added dropwise to the CaCl₂) water solution. Twenty six μL of 2M CaCl₂) was then added and mixed gently by pipetting twice with a micro-pipetor. This final solution should consist of 5 μg of DNA in 250 μL of 0.25M CaCl₂). A second tube was then prepared containing 250 μL of 2×HBS (Hepes buffered solution). Using a 2 mL sterile pipette attached to a Pipet-Aid air was slowly bubbled through the 2×HBS solution. At the same time the DNA solution in the 0.25M CaCl₂) solution was added in a dropwise fashion. Bubbling was continued for approximately 5 seconds after addition of the final DNA droplet. The solution was then incubated at room temperature for up to 20 minutes before adding to 293A cells. 250 μL of the DNA/Calcium phosphate solution was added dropwise to a monolayer of 293A cells that had been seeded one day prior at 10⁶ cells per well of a 6 well plate. The cells were returned to the incubator and incubated overnight. The media was changed 24h later. After 72h the cells were split 1:6 into a 6 well plate. The monolayers were monitored daily by light microscopy for evidence of cytopathic effect (CPE). 7-10 days post transfection viral plaques were observed and the monolayer harvested by pipetting the media in the wells to lift the cells. The harvested cells and media were transferred to a 50 mL centrifuge tube followed by three rounds of freeze thawing (at −80° C. and 37° C.). The subsequent lysate, called the primary virus stock was clarified by centrifugation at full speed on a bench top centrifuge (4300×g) and a proportion of the lysate 10-50%) used to infect 293A cells in a T25 flask. The infected cells were incubated for 48h before harvesting cells and media at complete CPE. The cells were once again harvested, freeze thawed and clarified before using this secondary viral stock to infect a T150 flask seeded at 1.5×10⁷ cells per flask. Once complete CPE was achieved at 72h the media and cells were harvested and treated as with earlier viral stocks to generate a tertiary stock.

### Production in 293F Cells

[0544] ChAdV68 virus production was performed in 293F cells grown in 293 FreeStyle™ (ThermoFisher) media in an incubator at 8% CO2. On the day of infection cells were diluted to 10⁶ cells per mL, with 98% viability and 400 mL were used per production run in 1 L Shake flasks (Corning). 4 mL of the tertiary viral stock with a target MOI of >3.3 was used per infection. The cells were incubated for 48-72h until the viability was <70% as measured by Trypan blue. The infected cells were then harvested by centrifugation, full speed bench top centrifuge and washed in 1×PBS, re-centrifuged and then re-suspended in 20 mL of 10 mM Tris pH7.4. The cell pellet was lysed by freeze thawing 3× and clarified by centrifugation at 4,300×g for 5 minutes.

### Purification by CsCl Centrifugation

[0545] Viral DNA was purified by CsCl centrifugation. Two discontinuous gradient runs were performed. The first to purify virus from cellular components and the second to further refine separation from cellular components and separate defective from infectious particles.

[0546] 10 mL of 1.2 (26.8g CsCl dissolved in 92 mL of 10 mM Tris pH 8.0) CsCl was added to polyallomer tubes. Then 8 mL of 1.4 CsCl (53g CsCl dissolved in 87 mL of 10 mM Tris pH 8.0) was carefully added using a pipette delivering to the bottom of the tube. The clarified virus was carefully layered on top of the 1.2 layer. If needed more 10 mM Tris was added to balance the tubes. The tubes were then placed in a SW-32Ti rotor and centrifuged for 2h 30 min at 10° C. The tube was then removed to a laminar flow cabinet and the virus band pulled using an 18 gauge needle and a 10 mL syringe. Care was taken not to remove contaminating host cell DNA and protein. The band was then diluted at least 2× with 10 mM Tris pH 8.0 and layered as before on a discontinuous gradient as described above. The run was performed as described before except that this time the run was performed overnight. The next day the band was pulled with care to avoid pulling any of the defective particle band. The virus was then dialyzed using a Slide-a-Lyzer™ Cassette (Pierce) against ARM buffer (20 mM Tris pH 8.0, 25 mM NaCl, 2.5% Glycerol). This was performed 3×, 1h per buffer exchange. The virus was then aliquoted for storage at −80° C.

### Viral Assays

[0547] VP concentration was performed by using an OD 260 assay based on the extinction coefficient of 1.1×10¹² viral particles (VP) is equivalent to an Absorbance value of 1 at OD260 nm. Two dilutions (1:5 and 1:10) of adenovirus were made in a viral lysis buffer (0.1% SDS, 10 mM Tris pH 7.4, 1 mM EDTA). OD was measured in duplicate at both dilutions and the VP concentration/mL was measured by multiplying the OD260 value×dilution factor×1.1×10¹²VP.

[0548] An infectious unit (IU) titer was calculated by a limiting dilution assay of the viral stock. The virus was initially diluted 100× in DMEM/5% NS/1×PS and then subsequently diluted using 10-fold dilutions down to 1×10⁻⁷. 100 μL of these dilutions were then added to 293A cells that were seeded at least an hour before at 3e5 cells/well of a 24 well plate. This was performed in duplicate. Plates were incubated for 48h in a CO2 (5%) incubator at 37° C. The cells were then washed with 1×PBS and were then fixed with 100% cold methanol (−20° C.). The plates were then incubated at −20° C. for a minimum of 20 minutes. The wells were washed with 1×PBS then blocked in 1×PBS/0.1% BSA for 1 h at room temperature. A rabbit anti-Ad antibody (Abcam, Cambridge, Mass.) was added at 1:8,000 dilution in blocking buffer (0.25 ml per well) and incubated for 1 h at room temperature. The wells were washed 4× with 0.5 mL PBS per well. A HRP conjugated Goat anti-Rabbit antibody (Bethyl Labs, Montgomery Tex.) diluted 1000× was added per well and incubated for 1h prior to a final round of washing. 5 PBS washes were performed and the plates were developed using DAB (Diaminobenzidine tetrahydrochloride) substrate in Tris buffered saline (0.67 mg/mL DAB in 50 mM Tris pH 7.5, 150 mM NaCl) with 0.01% H₂O₂. Wells were developed for 5 min prior to counting. Cells were counted under a 10× objective using a dilution that gave between 4-40 stained cells per field of view. The field of view that was used was a 0.32 mm² grid of which there are equivalent to 625 per field of view on a 24 well plate. The number of infectious viruses/mL can be determined by the number of stained cells per grid multiplied by the number of grids per field of view multiplied by a dilution factor 10. Similarly, when working with GFP expressing cells florescent can be used rather than capsid staining to determine the number of GFP expressing virions per mL.

### Immunizations

[0549] C57BL/6J female mice and Balb/c female mice were injected with 1×10⁸ viral particles (VP) of ChAdV68.5WTnt.MAG25mer in 100 uL volume, bilateral intramuscular injection (50 uL per leg).

### Splenocyte Dissociation

[0550] Spleen and lymph nodes for each mouse were pooled in 3 mL of complete RPMI (RPMI, 10% FBS, penicillin/streptomycin). Mechanical dissociation was performed using the gentleMACS Dissociator (Miltenyi Biotec), following manufacturer's protocol. Dissociated cells were filtered through a 40 micron filter and red blood cells were lysed with ACK lysis buffer (150 mM NH₄Cl, 10 mM KHCO₃, 0.1 mM Na₂EDTA). Cells were filtered again through a 30 micron filter and then resuspended in complete RPMI. Cells were counted on the Attune NxT flow cytometer (Thermo Fisher) using propidium iodide staining to exclude dead and apoptotic cells. Cell were then adjusted to the appropriate concentration of live cells for subsequent analysis.

### Ex Vivo Enzyme-Linked Immunospot (ELISPOT) Analysis

[0551] ELISPOT analysis was performed according to ELISPOT harmonization guidelines {DOI: 10.1038/nprot.2015.068} with the mouse IFNg ELISpotPLUS kit (MABTECH). 5×10⁴ splenocytes were incubated with 10 uM of the indicated peptides for 16 hours in 96-well IFNg antibody coated plates. Spots were developed using alkaline phosphatase. The reaction was timed for 10 minutes and was terminated by running plate under tap water. Spots were counted using an AID vSpot Reader Spectrum. For ELISPOT analysis, wells with saturation >50% were recorded as “too numerous to count”. Samples with deviation of replicate wells >10% were excluded from analysis. Spot counts were then corrected for well confluency using the formula: spot count+2×(spot count x % confluence /[100%−% confluence]). Negative background was corrected by subtraction of spot counts in the negative peptide stimulation wells from the antigen stimulated wells. Finally, wells labeled too numerous to count were set to the highest observed corrected value, rounded up to the nearest hundred.

[0552] XV.B.2. Production of ChAdV68 Viral Delivery Particles after DNA Transfection

[0553] In one example, ChAdV68.4WTnt.GFP (FIG. 7) and ChAdV68.5WTnt.GFP (FIG. 8) DNA was transfected into HEK293A cells and virus replication (viral plaques) was observed 7-10 days after transfection. ChAdV68 viral plaques were visualized using light (FIGS. 7A and 8A) and fluorescent microscopy (FIG. 7B-C and FIG. 8B-C). GFP denotes productive ChAdV68 viral delivery particle production.

[0554] XV.B.3. ChAdV68 Viral Delivery Particles Expansion

[0555] In one example, ChAdV68.4WTnt.GFP, ChAdV68.5WTnt.GFP, and ChAdV68.5WTnt.MAG25mer viruses were expanded in HEK293F cells and a purified virus stock produced 18 days after transfection (FIG. 9). Viral particles were quantified in the purified ChAdV68 virus stocks and compared to adenovirus type 5 (Ad5) and ChAdVY25 (a closely related ChAdV; Dicks, 2012, PloS ONE 7, e40385) viral stocks produced using the same protocol. ChAdV68 viral titers were comparable to Ad5 and ChAdVY25 (Table 7).

TABLE 7
Adenoviral vector production in 293F suspension cells

| Construct | Average VP/cell +/− SD |
|---|---|
| Ad5-Vectors (Multiple vectors) | 2.96e4 +/− 2.26e4 |
| Ad5-GFP | 3.89e4 |
| chAdY25-GFP | 1.75e3 +/− 6.03e1 |
| ChAdV68.4WTnt.GFP | 1.2e4 +/− 6.5e3 |
| ChAdV68.5WTnt.GFP | 1.8e3 |
| ChAdV68.5WTnt.MAG25mer | 1.39e3 +/− 1.1e3 |

*SD is only reported where multiple Production runs have been performed

[0556] XV.B.4. Evaluation of Immunogenicity in Tumor Models

[0557] C68 vector expressing mouse tumor antigens were evaluated in mouse immunogenicity studies to demonstrate the C68 vector elicits T-cell responses. T-cell responses to the MHC class I epitope SIINFEKL (SEQ ID NO: 29362) were measured in C57BL/6J female mice and the MHC class I epitope AH1-A5 (Slansky et al., 2000, Immunity 13:529-538) measured in Balb/c mice. As shown in FIG. 15, strong T-cell responses relative to control were measured after immunization of mice with ChAdV68.5WTnt.MAG25mer. Mean cellular immune responses of 8957 or 4019 spot forming cells (SFCs) per 10⁶ splenocytes were observed in ELISpot assays when C57BL/6J or Balb/c mice were immunized with ChAdV68.5WTnt.MAG25mer, respectively, 10 days after immunization.

[0558] Tumor infiltrating lymphocytes were also evaluated in CT26 tumor model evaluating ChAdV and co-administration of a an anti-CTLA4 antibody. Mice were implanted with CT26 tumors cells and 7 days after implantation, were immunized with ChAdV vaccine and treated with anti-CTLA4 antibody (clone 9D9) or IgG as a control. Tumor infiltrating lymphocytes were analyzed 12 days after immunization. Tumors from each mouse were dissociated using the gentleMACS Dissociator (Miltenyi Biotec) and mouse tumor dissociation kit (Miltenyi Biotec). Dissociated cells were filtered through a 30 micron filter and resuspended in complete RPMI. Cells were counted on the Attune NxT flow cytometer (Thermo Fisher) using propidium iodide staining to exclude dead and apoptotic cells. Cell were then adjusted to the appropriate concentration of live cells for subsequent analysis. Antigen specific cells were identified by MHC-tetramer complexes and co-stained with anti-CD8 and a viability marker. Tumors were harvested 12 days after prime immunization.

[0559] Antigen-specific CD8+ T cells cells within the tumor comprised a median of 3.3%, 2.2%, or 8.1% of the total live cell population in ChAdV, anti-CTLA4, and ChAdV+anti-CTLA4 treated groups, respectively (FIG. 41 and Table 45). Treatment with anti-CTLA in combination with active ChAdV immunization resulted in a statistically significant increase in the antigen-specific CD8+ T cell frequency over both ChAdV alone and anti-CTLA4 alone demonstrating anti-CTLA4, when co-administered with the chAd68 vaccine, increased the number of infiltrating T cells within a tumor.

TABLE 45
Tetramer+ infiltrating CD8 T cell frequencies in CT26 tumors

| Treatment | Median % tetramer+ |
|---|---|
| ChAdV68.5WTnt.MAG25mer | 3.3 |
| (ChAdV) | |
| Anti-CTLA4 | 2.2 |
| ChAdV68.5WTnt.MAG25mer | 8.1 |
| (ChAdV) + anti-CTLA4 | |

[0560] XVI. Alphavirus Antigen Cassette Delivery Vector

[0561] XVI.A. Alphavirus Delivery Vector Evaluation Materials and Methods In Vitro Transcription to Generate RNA

[0562] For in vitro testing: plasmid DNA was linearized by restriction digest with PmeI, column purified following manufacturer's protocol (GeneJet DNA cleanup kit, Thermo) and used as template. In vitro transcription was performed using the RiboMAX Large Scale RNA production System (Promega) with the m⁷G cap analog (Promega) according to manufacturer's protocol. mRNA was purified using the RNeasy kit (Qiagen) according to manufacturer's protocol.

[0563] For in vivo studies: RNA was generated and purified by TriLInk Biotechnologies and capped with Enzymatic Cap1.

### Transfection of RNA

[0564] HEK293A cells were seeded at 6e4 cells/well for 96 wells and 2e5 cells/well for 24 wells, ˜16 hours prior to transfection. Cells were transfected with mRNA using MessengerMAX lipofectamine (Invitrogen) and following manufacturer's protocol. For 96-wells, 0.15 uL of lipofectamine and 10 ng of mRNA was used per well, and for 24-wells, 0.75 uL of lipofectamine and 150 ng of mRNA was used per well. A GFP expressing mRNA (TriLink Biotechnologies) was used as a transfection control.

### Luciferase Assay

[0565] Luciferase reporter assay was performed in white-walled 96-well plates with each condition in triplicate using the ONE-Glo luciferase assay (Promega) following manufacturer's protocol. Luminescence was measured using the SpectraMax.

qRT-PCR

[0566] Transfected cells were rinsed and replaced with fresh media 2 hours post transfection to remove any untransfected mRNA. Cells were then harvested at various timepoints in RLT plus lysis buffer (Qiagen), homogenized using a QiaShredder (Qiagen) and RNA was extracted using the RNeasy kit (Qiagen), all according to manufacturer's protocol. Total RNA was quantified using a Nanodrop (Thermo Scientific). qRT-PCR was performed using the Quantitect Probe One-Step RT-PCR kit (Qiagen) on the qTower³ (Analytik Jena) according to manufacturer's protocol, using 20 ng of total RNA per reaction. Each sample was run in triplicate for each probe. Actin or GusB were used as reference genes. Custom primer/probes were generated by IDT (Table 8).

TABLE 8
qPCR primers/probes

| Target | | |
|---|---|---|
| Luci | Primer1 | GTGGTGTGCAGCGAGAATAG |
| | | (SEQ ID NO: 29376) |
| | Primer2 | CGCTCGTTGTAGATGTCGTT |
| | | AG |
| | | (SEQ ID NO: 29377) |
| | Probe | /56-FAM/TTGCAGTTC/ZE |
| | | NATTCATGCCCGTGTTG/ |
| | | 3IABkFQ/ |
| | | (SEQ ID NO: 29378) |
| GusB | Primer1 | GTTTTTGATCCAGACCCA |
| | | GATG |
| | | (SEQ ID NO: 29379) |
| | Primer2 | GCCCATTATTCAGAGCGA |
| | | GTA |
| | | (SEQ ID NO: 29380) |
| | Probe | /56-FAM/TGCAGGGTT/ |
| | | ZEN7TCACCAGGATCCAC/ |
| | | 3IABkFQ/ |
| | | (SEQ ID NO: 29381) |
| ActB | Primer1 | CCTTGCACATGCCGGAG |
| | | (SEQ ID NO: 29382) |
| | Primer2 | ACAGAGCCTCGCCTTTG |
| | | (SEQ ID NO: 29383) |
| | Probe | /56-FAM/TCATCCATG/ |
| | | ZEN/GTGAGCTGGCGG/ |
| | | 3IABkFQ/ |
| | | (SEQ ID NO: 29384) |
| MAG- | Primer1 | CTGAAAGCTCGGTTTGCT |
| 25mer | | AATG |
| | | (SEQ ID NO: 29385) |
| Set1 | Primer2 | CCATGCTGGAAGAGACAA |
| | | TCT |
| | | (SEQ ID NO: 29386) |
| | Probe | /56-FAM/CGTTTCTGA/ |
| | | ZENATGGCGCTGACCGATA/ |
| | | 3IABkFQ/ |
| | | (SEQ ID NO: 29387) |
| MAG- | Primer1 | TATGCCTATCCTGTCTCCT |
| 25mer | | CTG |
| | | (SEQ ID NO: 29388) |
| Set2 | Primer2 | GCTAATGCAGCTAAGTCCT |
| | | CTC |
| | | (SEQ ID NO: 29389) |
| | Probe | /56-FAM/TGTTTACCC/ZEN/ |
| | | TGACCGTGCCTTCTG/ |
| | | 3IABkFQ/ |
| | | (SEQ ID NO: 29390) |

### B16-OVA Tumor Model

[0567] C57BL/6J mice were injected in the lower left abdominal flank with 10⁵ B16-OVA cells/animal. Tumors were allowed to grow for 3 days prior to immunization.

### CT26 Tumor Model

[0568] Balb/c mice were injected in the lower left abdominal flank with 10⁶ CT26 cells/animal. Tumors were allowed to grow for 7 days prior to immunization.

### Immunizations

[0569] For srRNA vaccine, mice were injected with 10 ug of RNA in 100 uL volume, bilateral intramuscular injection (50 uL per leg). For Ad5 vaccine, mice were injected with 5×10¹⁰ viral particles (VP) in 100 uL volume, bilateral intramuscular injection (50 uL per leg). Animals were injected with anti-CTLA-4 (clone 9D9, BioXcell), anti-PD-1 (clone RMP1-14, BioXcell) or anti-IgG (clone MPC-11, BioXcell), 250 ug dose, 2 times per week, via intraperitoneal injection.

### In Vivo Bioluminescent Imaging

[0570] At each timepoint mice were injected with 150 mg/kg luciferin substrate via intraperitoneal injection and bioluminescence was measured using the IVIS In vivo imaging system (PerkinElmer) 10-15 minutes after injection.

### Splenocyte Dissociation

[0571] Spleen and lymph nodes for each mouse were pooled in 3 mL of complete RPMI (RPMI, 10% FBS, penicillin/streptomycin). Mechanical dissociation was performed using the gentleMACS Dissociator (Miltenyi Biotec), following manufacturer's protocol. Dissociated cells were filtered through a 40 micron filter and red blood cells were lysed with ACK lysis buffer (150 mM NH₄Cl, 10 mM KHCO₃, 0.1 mM Na₂EDTA). Cells were filtered again through a 30 micron filter and then resuspended in complete RPMI. Cells were counted on the Attune NxT flow cytometer (Thermo Fisher) using propidium iodide staining to exclude dead and apoptotic cells. Cell were then adjusted to the appropriate concentration of live cells for subsequent analysis.

### Ex Vivo Enzyme-Linked Immunospot (ELISPOT) Analysis

[0572] ELISPOT analysis was performed according to ELISPOT harmonization guidelines {DOI: 10.1038/nprot.2015.068} with the mouse IFNg ELISpotPLUS kit (MABTECH). 5×10⁴ splenocytes were incubated with 10 uM of the indicated peptides for 16 hours in 96-well IFNg antibody coated plates. Spots were developed using alkaline phosphatase. The reaction was timed for 10 minutes and was terminated by running plate under tap water. Spots were counted using an AID vSpot Reader Spectrum. For ELISPOT analysis, wells with saturation >50% were recorded as “too numerous to count”. Samples with deviation of replicate wells >10% were excluded from analysis. Spot counts were then corrected for well confluency using the formula: spot count+2×(spot count x % confluence /[100%−% confluence]). Negative background was corrected by subtraction of spot counts in the negative peptide stimulation wells from the antigen stimulated wells. Finally, wells labeled too numerous to count were set to the highest observed corrected value, rounded up to the nearest hundred.

[0573] XVI.B. Alphavirus Vector

[0574] Alphavirus Vector In Vitro Evaluation

[0575] In one implementation of the present invention, a RNA alphavirus backbone for the antigen expression system was generated from a Venezuelan Equine Encephalitis (VEE) (Kinney, 1986, Virology 152: 400-413) based self-replicating RNA (srRNA) vector. In one example, the sequences encoding the structural proteins of VEE located 3′ of the 26S sub-genomic promoter were deleted (VEE sequences 7544 to 11,175 deleted; numbering based on Kinney et al 1986; SEQ ID NO:6) and replaced by antigen sequences (SEQ ID NO:14 and SEQ ID NO:4) or a luciferase reporter (e.g., VEE-Luciferase, SEQ ID NO:15) (FIG. 10). RNA was transcribed from the srRNA DNA vector in vitro, transfected into HEK293A cells and luciferase reporter expression was measured. In addition, an (non-replicating) mRNA encoding luciferase was transfected for comparison. An 30,000-fold increase in srRNA reporter signal was observed for VEE-Luciferase srRNA when comparing the 23 hour measurement vs the 2 hour measurement (Table 9). In contrast, the mRNA reporter exhibited a less than 10-fold increase in signal over the same time period (Table 9).

TABLE 9
Expression of luciferase from VEE self-replicating vector increases
over time. HEK293A cells transfected with 10 ng of VEE-Luciferase
srRNA or 10 ng of non-replicating luciferase mRNA (TriLink
L-6307) per well in 96 wells. Luminescence was measured at
various times post transfection. Luciferase expression is
reported as relative luminescence units (RLU). Each data point
is the mean +/− SD of 3 transfected wells.

| | Timepoint | | Standard Dev |
|---|---|---|---|
| Construct | (hr) | Mean RLU | (triplicate wells) |
| mRNA | 2 | 878.6666667 | 120.7904522 |
| mRNA | 5 | 1847.333333 | 978.515372 |
| mRNA | 9 | 4847 | 868.3271273 |
| mRNA | 23 | 8639.333333 | 751.6816702 |
| SRRNA | 2 | 27 | 15 |
| SRRNA | 5 | 4884.333333 | 2955.158935 |
| SRRNA | 9 | 182065.5 | 16030.81784 |
| SRRNA | 23 | 783658.3333 | 68985.05538 |

[0576] In another example, replication of the srRNA was confirmed directly by measuring RNA levels after transfection of either the luciferase encoding srRNA (VEE-Luciferase) or an srRNA encoding a multi-epitope cassette (VEE-MAG25mer) using quantitative reverse transcription polymerase chain reaction (qRT-PCR). An ˜150-fold increase in RNA was observed for the VEE-luciferase srRNA (Table 10), while a 30-50-fold increase in RNA was observed for the VEE-MAG25mer srRNA (Table 11). These data confirm that the VEE srRNA vectors replicate when transfected into cells.

TABLE 10
Direct measurement of RNA replication in VEE-Luciferase srRNA
transfected cells. HEK293A cells transfected with VEE-Luciferase
srRNA (150 ng per well, 24-well) and RNA levels quantified
by qRT-PCR at various times after transfection. Each measurement
was normalized based on the Actin reference gene and fold-change
relative to the 2 hour timepoint is presented.

| Timepoint | Luciferase | Actin | | Ref | | Relative Fold |
|---|---|---|---|---|---|---|
| (hr) | Ct | Ct | dCt | dCt | ddCt | change |
| 2 | 20.51 | 18.14 | 2.38 | 2.38 | 0.00 | 1.00 |
| 4 | 20.09 | 18.39 | 1.70 | 2.38 | −0.67 | 1.59 |
| 6 | 15.50 | 18.19 | −2.69 | 2.38 | −5.07 | 33.51 |
| 8 | 13.51 | 18.36 | −4.85 | 2.38 | −7.22 | 149.43 |

TABLE 11
Direct measurement of RNA replication in VEE-MAG25mer srRNA
transfected cells. HEK293 cells transfected with VEE-MAG25mer
srRNA (150 ng per well, 24-well) and RNA levels quantified
by qRT-PCR at various times after transfection. Each measurement
was normalized based on the GusB reference gene and fold-
change relative to the 2 hour timepoint is presented. Different
lines on the graph represent 2 different qPCR primer/probe
sets, both of which detect the enitone cassette region
of the srRNA.

| Primer/ | Timepoint | | GusB | | Ref | | Relative |
|---|---|---|---|---|---|---|---|
| probe | (hr) | Ct | Ct | dCt | dCt | ddCt | Fold-Change |
| Set1 | 2 | 18.96 | 22.41 | −3.45 | −3.45 | 0.00 | 1.00 |
| Set1 | 4 | 17.46 | 22.27 | −4.81 | −3.45 | −1.37 | 2.58 |
| Set1 | 6 | 14.87 | 22.04 | −7.17 | −3.45 | −3.72 | 13.21 |
| Set1 | 8 | 14.16 | 22.19 | −8.02 | −3.45 | −4.58 | 23.86 |
| Set1 | 24 | 13.16 | 22.01 | −8.86 | −3.45 | −5.41 | 42.52 |
| Set1 | 36 | 13.53 | 22.63 | −9.10 | −3.45 | −5.66 | 50.45 |
| Set2 | 2 | 17.75 | 22.41 | −4.66 | −4.66 | 0.00 | 1.00 |
| Set2 | 4 | 16.66 | 22.27 | −5.61 | −4.66 | −0.94 | 1.92 |
| Set2 | 6 | 14.22 | 22.04 | −7.82 | −4.66 | −3.15 | 8.90 |
| Set2 | 8 | 13.18 | 22.19 | −9.01 | −4.66 | −4.35 | 20.35 |
| Set2 | 24 | 12.22 | 22.01 | −9.80 | −4.66 | −5.13 | 35.10 |
| Set2 | 36 | 13.08 | 22.63 | −9.55 | −4.66 | −4.89 | 29.58 |

[0577] XVI.B.2. Alphavirus Vector In Vivo Evaluation

[0578] In another example, VEE-Luciferase reporter expression was evaluated in vivo. Mice were injected with 10 ug of VEE-Luciferase srRNA encapsulated in lipid nanoparticle (MC3) and imaged at 24 and 48 hours, and 7 and 14 days post injection to determine bioluminescent signal. Luciferase signal was detected at 24 hours post injection and increased over time and appeared to peak at 7 days after srRNA injection (FIG. 11).

[0579] XVI.B.3. Alphavirus Vector Tumor Model Evaluation

[0580] In one implementation, to determine if the VEE srRNA vector directs antigen-specific immune responses in vivo, a VEE srRNA vector was generated (VEE-UbAAY, SEQ ID NO:14) that expresses 2 different MHC class I mouse tumor epitopes, SIINFEKL (SEQ ID NO: 29362) and AH1-A5 (Slansky et al., 2000, Immunity 13:529-538). The SFL (SIINFEKL (SEQ ID NO: 29362)) epitope is expressed by the B16-OVA melanoma cell line, and the AH1-A5 (SPSYAYHQF (SEQ ID NO: 29363); Slansky et al., 2000, Immunity) epitope induces T cells targeting a related epitope (AH1/SPSYVYHQF (SEQ ID NO: 29391); Huang et al., 1996, Proc Natl Acad Sci USA 93:9730-9735) that is expressed by the CT26 colon carcinoma cell line. In one example, for in vivo studies, VEE-UbAAY srRNA was generated by in vitro transcription using T7 polymerase (TriLink Biotechnologies) and encapsulated in a lipid nanoparticle (MC3).

[0581] A strong antigen-specific T-cell response targeting SFL, relative to control, was observed two weeks after immunization of B16-OVA tumor bearing mice with MC3 formulated VEE-UbAAY srRNA. In one example, a median of 3835 spot forming cells (SFC) per 10⁶ splenocytes was measured after stimulation with the SFL peptide in ELISpot assays (FIG. 12A, Table 12) and 1.8% (median) of CD8 T-cells were SFL antigen-specific as measured by pentamer staining (FIG. 12B, Table 12). In another example, co-administration of an anti-CTLA-4 monoclonal antibody (mAb) with the VEE srRNA vaccine resulted in a moderate increase in overall T-cell responses with a median of 4794.5 SFCs per 10⁶ splenocytes measured in the ELISpot assay (FIG. 12A, Table 12).

TABLE 12
Results of ELISPOT and MHCI-pentamer staining assays 14 days post
VEE srRNA immunization in B16-OVA tumor bearing C57BL/6J mice.

| | | | Pentamer | | | | Pentamer |
|---|---|---|---|---|---|---|---|
| | | SFC/1e6 | positive | | | SFC/1e6 | positive |
| Group | Mouse | splenocytes | (% of CD8) | Group | Mouse | splenocytes | (% of CD8) |
| Control | 1 | 47 | 0.22 | Vax | 1 | 6774 | 4.92 |
| | 2 | 80 | 0.32 | | 2 | 2323 | 1.34 |
| | 3 | 0 | 0.27 | | 3 | 2997 | 1.52 |
| | 4 | 0 | 0.29 | | 4 | 4492 | 1.86 |
| | 5 | 0 | 0.27 | | 5 | 4970 | 3.7 |
| | 6 | 0 | 0.25 | | 6 | | 4.13 |
| | 7 | 0 | 0.23 | | 7 | 3835 | 1.66 |
| | 8 | 87 | 0.25 | | 8 | 3119 | 1.64 |
| aCTLA4 | 1 | 0 | 0.24 | Vax + | 1 | 6232 | 2.16 |
| | 2 | 0 | 0.26 | aCTLA4 | 2 | 4242 | 0.82 |
| | 3 | 0 | 0.39 | | 3 | 5347 | 1.57 |
| | 4 | 0 | 0.28 | | 4 | 6568 | 2.33 |
| | 5 | 0 | 0.28 | | 5 | 6269 | 1.55 |
| | 6 | 0 | 0.28 | | 6 | 4056 | 1.74 |
| | 7 | 0 | 0.31 | | 7 | 4163 | 1.14 |
| | 8 | 6 | 0.26 | | 8 | 3667 | 1.01 |

* Note that results from mouse #6 in the Vax group were excluded from analysis due to high variability between triplicate wells.

[0582] In another implementation, to mirror a clinical approach, a heterologous prime/boost in the B16-OVA and CT26 mouse tumor models was performed, where tumor bearing mice were immunized first with adenoviral vector expressing the same antigen cassette (Ad5-UbAAY), followed by a boost immunization with the VEE-UbAAY srRNA vaccine 14 days after the Ad5-UbAAY prime. In one example, an antigen-specific immune response was induced by the Ad5-UbAAY vaccine resulting in 7330 (median) SFCs per 10⁶ splenocytes measured in the ELISpot assay (FIG. 13A, Table 13) and 2.9% (median) of CD8 T-cells targeting the SFL antigen as measured by pentamer staining (FIG. 13C, Table 13). In another example, the T-cell response was maintained 2 weeks after the VEE-UbAAY srRNA boost in the B16-OVA model with 3960 (median) SFL-specific SFCs per 10⁶ splenocytes measured in the ELISpot assay (FIG. 13B, Table 13) and 3.1% (median) of CD8 T-cells targeting the SFL antigen as measured by pentamer staining (FIG. 13D, Table 13).

TABLE 13
Immune monitoring of B16-OVA mice following heterologous
prime/boost with Ad5 vaccine prime and srRNA boost.

| | | | | | | | |
|---|---|---|---|---|---|---|---|
| | | | Pentamer | | | | Pentamer |
| | | SFC/1e6 | positive | | | SFC/1e6 | positive |
| Group | Mouse | splenocytes | (% of CD8) | Group | Mouse | splenocytes | (% of CD8) |

Day 14

| | | | | | | | |
|---|---|---|---|---|---|---|---|
| Control | 1 | 0 | 0.10 | Vax | 1 | 8514 | 1.87 |
| | 2 | 0 | 0.09 | | 2 | 7779 | 1.91 |
| | 3 | 0 | 0.11 | | 3 | 6177 | 3.17 |
| | 4 | 46 | 0.18 | | 4 | 7945 | 3.41 |
| | 5 | 0 | 0.11 | | 5 | 8821 | 4.51 |
| | 6 | 16 | 0.11 | | 6 | 6881 | 2.48 |
| | 7 | 0 | 0.24 | | 7 | 5365 | 2.57 |
| | 8 | 37 | 0.10 | | 8 | 6705 | 3.98 |
| aCTLA4 | 1 | 0 | 0.08 | Vax + | 1 | 9416 | 2.35 |
| | 2 | 29 | 0.10 | aCTLA4 | 2 | 7918 | 3.33 |
| | 3 | 0 | 0.09 | | 3 | 10153 | 4.50 |
| | 4 | 29 | 0.09 | | 4 | 7212 | 2.98 |
| | 5 | 0 | 0.10 | | 5 | 11203 | 4.38 |
| | 6 | 49 | 0.10 | | 6 | 9784 | 2.27 |
| | 7 | 0 | 0.10 | | 8 | 7267 | 2.87 |
| | 8 | 31 | 0.14 | | | | |

Day 28

| | | | | | | | |
|---|---|---|---|---|---|---|---|
| Control | 2 | 0 | 0.17 | Vax | 1 | 5033 | 2.61 |
| | 4 | 0 | 0.15 | | 2 | 3958 | 3.08 |
| | 6 | 20 | 0.17 | | 4 | 3960 | 3.58 |
| aCTLA4 | 1 | 7 | 0.23 | Vax + | 4 | 3460 | 2.44 |
| | 2 | 0 | 0.18 | aCTLA4 | 5 | 5670 | 3.46 |
| | 3 | 0 | 0.14 | | | | |

[0583] In another implementation, similar results were observed after an Ad5-UbAAY prime and VEE-UbAAY srRNA boost in the CT26 mouse model. In one example, an AH1 antigen-specific response was observed after the Ad5-UbAAY prime (day 14) with a mean of 5187 SFCs per 10⁶ splenocytes measured in the ELISpot assay (FIG. 14A, Table 14) and 3799 SFCs per 10⁶ splenocytes measured in the ELISpot assay after the VEE-UbAAY srRNA boost (day 28) (FIG. 14B, Table 14).

TABLE 14
Immune monitoring after heterologous prime/boost
in CT26 tumor mouse model.

| Day 12 | | | Day 21 | | |
|---|---|---|---|---|---|
| | | SFC/1e6 | | | SFC/1e6 |
| Group | Mouse | splenocytes | Group | Mouse | splenocytes |
| Control | 1 | 1799 | Control | 9 | 167 |
| | 2 | 1442 | | 10 | 115 |
| | 3 | 1235 | | 11 | 347 |
| aPD1 | 1 | 737 | aPD1 | 8 | 511 |
| | 2 | 5230 | | 11 | 758 |
| | 3 | 332 | Vax | 9 | 3133 |
| Vax | 1 | 6287 | | 10 | 2036 |
| | 2 | 4086 | | 11 | 6227 |
| Vax + | 1 | 5363 | Vax + | 8 | 3844 |
| aPD1 | 2 | 6500 | aPD1 | 9 | 2071 |
| | | | | 11 | 4888 |

### XVII. ChAdV/srRNA Combination Tumor Model Evaluation

[0584] Various dosing protocols using ChAdV68 and self-replicating RNA (srRNA) were evaluated in murine CT26 tumor models.

[0585] XVII.A ChAdV/srRNA Combination Tumor Model Evaluation Methods and Materials

### Tumor Injection

[0586] Balb/c mice were injected with the CT26 tumor cell line. 7 days after tumor cell injection, mice were randomized to the different study arms (28-40 mice per group) and treatment initiated. Balb/c mice were injected in the lower left abdominal flank with 10⁶ CT26 cells/animal. Tumors were allowed to grow for 7 days prior to immunization. The study arms are described in detail in Table 15.

TABLE 15
ChAdV/srRNA Combination Tumor Model Evaluation Study Arms

| Group | N | Treatment | Dose | | Volume | | Schedule | Route |
|---|---|---|---|---|---|---|---|---|
| 1 | 40 | chAd68 control | 1e11 | vp | 2x 50 | uL | day 0 | IM |
| | | srRNA control | 10 | ug | 50 | uL | day 14, 28, 42 | IM |
| | | Anti-PD1 | 250 | ug | 100 | uL | 2x/week (start day 0) | IP |
| 2 | 40 | chAd68 control | 1e11 | vp | 2x 50 | uL | day 0 | IM |
| | | srRNA control | 10 | ug | 50 | uL | day 14, 28, 42 | IM |
| | | Anti-IgG | 250 | ug | 100 | uL | 2x/week (start day 0) | IP |
| 3 | 28 | chAd68 vaccine | 1e11 | vp | 2x 50 | uL | day 0 | IM |
| | | srRNA vaccine | 10 | ug | 50 | uL | day 14, 28, 42 | IM |
| | | Anti-PD1 | 250 | ug | 100 | uL | 2x/week (start day 0) | IP |
| 4 | 28 | chAd68 vaccine | 1e11 | vp | 2x 50 | uL | day 0 | IM |
| | | srRNA vaccine | 10 | ug | 50 | uL | day 14, 28, 42 | IM |
| | | Anti-IgG | 250 | ug | 100 | uL | 2x/week (start day 0) | IP |
| 5 | 28 | srRNA vaccine | 10 | ug | 50 | uL | day 0, 28, 42 | IM |
| | | chAd68 vaccine | 1e11 | vp | 2x 50 | uL | day 14 | IM |
| | | Anti-PD1 | 250 | ug | 100 | uL | 2x/week (start day 0) | IP |
| 6 | 28 | srRNA vaccine | 10 | ug | 50 | uL | day 0, 28, 42 | IM |
| | | chAd68 vaccine | 1e11 | vp | 2x 50 | uL | day 14 | IM |
| | | Anti-IgG | 250 | ug | 100 | uL | 2x/week (start day 0) | IP |
| 7 | 40 | srRNA vaccine | 10 | ug | 50 | uL | day 0, 14, 28, 42 | IM |
| | | Anti-PD1 | 250 | ug | 100 | uL | 2x/week (start day 0) | IP |
| 8 | 40 | srRNA vaccine | 10 | ug | 50 | uL | day 0, 14, 28, 42 | IM |
| | | Anti-IgG | 250 | ug | 100 | uL | 2x/week (start day 0) | IP |

### Immunizations

[0587] For srRNA vaccine, mice were injected with 10 ug of VEE-MAG25mer srRNA in 100 uL volume, bilateral intramuscular injection (50 uL per leg). For C68 vaccine, mice were injected with 1×10¹¹ viral particles (VP) of ChAdV68.5WTnt.MAG25mer in 100 uL volume, bilateral intramuscular injection (50 uL per leg). Animals were injected with anti-PD-1 (clone RMP1-14, BioXcell) or anti-IgG (clone MPC-11, BioXcell), 250 ug dose, 2 times per week, via intraperitoneal injection.

### Splenocyte Dissociation

[0588] Spleen and lymph nodes for each mouse were pooled in 3 mL of complete RPMI (RPMI, 10% FBS, penicillin/streptomycin). Mechanical dissociation was performed using the gentleMACS Dissociator (Miltenyi Biotec), following manufacturer's protocol. Dissociated cells were filtered through a 40 micron filter and red blood cells were lysed with ACK lysis buffer (150 mM NH₄Cl, 10 mM KHCO₃, 0.1 mM Na₂EDTA). Cells were filtered again through a 30 micron filter and then resuspended in complete RPMI. Cells were counted on the Attune NxT flow cytometer (Thermo Fisher) using propidium iodide staining to exclude dead and apoptotic cells. Cell were then adjusted to the appropriate concentration of live cells for subsequent analysis.

### Ex Vivo Enzyme-Linked Immunospot (ELISPOT) Analysis

[0589] ELISPOT analysis was performed according to ELISPOT harmonization guidelines {DOI: 10.1038/nprot.2015.068} with the mouse IFNg ELISpotPLUS kit (MABTECH). 5×10⁴ splenocytes were incubated with 10 uM of the indicated peptides for 16 hours in 96-well IFNg antibody coated plates. Spots were developed using alkaline phosphatase. The reaction was timed for 10 minutes and was terminated by running plate under tap water. Spots were counted using an AID vSpot Reader Spectrum. For ELISPOT analysis, wells with saturation >50% were recorded as “too numerous to count”. Samples with deviation of replicate wells >10% were excluded from analysis. Spot counts were then corrected for well confluency using the formula: spot count+2×(spot count x % confluence /[100%−% confluence]). Negative background was corrected by subtraction of spot counts in the negative peptide stimulation wells from the antigen stimulated wells. Finally, wells labeled too numerous to count were set to the highest observed corrected value, rounded up to the nearest hundred.

[0590] XVII.B ChAdV/srRNA Combination Evaluation in a CT26 Tumor Model

[0591] The immunogenicity and efficacy of the ChAdV68.5WTnt.MAG25mer/VEE-MAG25mer srRNA heterologous prime/boost or VEE-MAG25mer srRNA homologous prime/boost vaccines were evaluated in the CT26 mouse tumor model. Balb/c mice were injected with the CT26 tumor cell line. 7 days after tumor cell injection, mice were randomized to the different study arms and treatment initiated. The study arms are described in detail in Table 15 and more generally in Table 16.

TABLE 16
Prime/Boost Study Arms

| Group | Prime | Boost |
|---|---|---|
| 1 | Control | Control |
| 2 | Control + anti-PD-1 | Control + anti-PD-1 |
| 3 | ChAdV68.5WTnt.MAG25mer | VEE-MAG25mer srRNA |
| 4 | ChAdV68.5WTnt.MAG25mer + anti-PD-1 | VEE-MAG25mer srRNA + anti-PD-1 |
| 5 | VEE-MAG25mer srRNA | ChAdV68.5WTnt.MAG25mer |
| 6 | VEE-MAG25mer srRNA + anti-PD-1 | ChAdV68.5WTnt.MAG25mer + anti-PD-1 |
| 7 | VEE-MAG25mer srRNA | VEE-MAG25mer srRNA |
| 8 | VEE-MAG25mer srRNA + anti-PD-1 | VEE-MAG25mer srRNA + anti-PD-1 |

[0592] Spleens were harvested 14 days after the prime vaccination for immune monitoring. Tumor and body weight measurements were taken twice a week and survival was monitored. Strong immune responses relative to control were observed in all active vaccine groups.

[0593] Median cellular immune responses of 10,630, 12,976, 3319, or 3745 spot forming cells (SFCs) per 10⁶ splenocytes were observed in ELISpot assays in mice immunized with ChAdV68.5WTnt.MAG25mer (ChAdV/group 3), ChAdV68.5WTnt.MAG25mer+anti-PD-1 (ChAdV+PD-1/group 4), VEE-MAG25mer srRNA (srRNA/median for groups 5 & 7 combined), or VEE-MAG25mer srRNA+anti-PD-1 (srRNA+PD-1/median for groups 6 & 8 combined), respectively, 14 days after the first immunization (FIG. 16 and Table 17). In contrast, the vaccine control (group 1) or vaccine control with anti-PD-1 (group 2) exhibited median cellular immune responses of 296 or 285 SFC per 10⁶ splenocytes, respectively.

TABLE 17
Cellular immune responses in a CT26 tumor model

| Treatment | Median SFC/10⁶ Splenocytes |
|---|---|
| Control | 296 |
| PD1 | 285 |
| ChAdV68.5WTnt.MAG25mer | 10630 |
| (ChAdV) | |
| ChAdV68.5WTnt.MAG25mer + | 12976 |
| PD1 (ChAdV + PD-1) | |
| VEE-MAG25mer srRNA | 3319 |
| (srRNA) | |
| VEE-MAG25mer srRNA + | 3745 |
| PD-1 (srRNA + PD1) | |

[0594] Consistent with the ELISpot data, 5.6, 7.8, 1.8 or 1.9% of CD8 T cells (median) exhibited antigen-specific responses in intracellular cytokine staining (ICS) analyses for mice immunized with ChAdV68.5WTnt.MAG25mer (ChAdV/group 3), ChAdV68.5WTnt.MAG25mer +anti-PD-1 (ChAdV+PD-1/group 4), VEE-MAG25mer srRNA (srRNA/median for groups 5 & 7 combined), or VEE-MAG25mer srRNA+anti-PD-1 (srRNA+PD-1/median for groups 6 & 8 combined), respectively, 14 days after the first immunization (FIG. 17 and Table 18). Mice immunized with the vaccine control or vaccine control combined with anti-PD-1 showed antigen-specific CD8 responses of 0.2 and 0.1%, respectively.

TABLE 18
CD8 T-Cell responses in a CT26 tumor model

| | Median % CD8 IFN- |
|---|---|
| Treatment | gamma Positive |
| Control | 0.21 |
| PD1 | 0.1 |
| ChAdV68.5WTnt.MAG25mer | 5.6 |
| (ChAdV) | |
| ChAdV68.5WTnt.MAG25mer + | 7.8 |
| PD1 (ChAdV + PD-1) | |
| VEE-MAG25mer srRNA | 1.8 |
| (srRNA) | |
| VEE-MAG25mer srRNA + | 1.9 |
| PD-1 (srRNA + PD1) | |

[0595] Tumor growth was measured in the CT26 colon tumor model for all groups, and tumor growth up to 21 days after treatment initiation (28 days after injection of CT-26 tumor cells) is presented. Mice were sacrificed 21 days after treatment initiation based on large tumor sizes (>2500 mm³); therefore, only the first 21 days are presented to avoid analytical bias. Mean tumor volumes at 21 days were 1129, 848, 2142, 1418, 2198 and 1606 mm³ for ChAdV68.5WTnt.MAG25mer prime/VEE-MAG25mer srRNA boost (group 3), ChAdV68.5WTnt.MAG25mer prime/VEE-MAG25mer srRNA boost+anti-PD-1 (group 4), VEE-MAG25mer srRNA prime/ChAdV68.5WTnt.MAG25mer boost (group 5), VEE-MAG25mer srRNA prime/ChAdV68.5WTnt.MAG25mer boost+anti-PD-1 (group 6), VEE-MAG25mer srRNA prime/VEE-MAG25mer srRNA boost (group 7) and VEE-MAG25mer srRNA prime/VEE-MAG25mer srRNA boost+anti-PD-1 (group 8), respectively (FIG. 18 and Table 19). The mean tumor volumes in the vaccine control or vaccine control combined with anti-PD-1 were 2361 or 2067 mm³, respectively. Based on these data, vaccine treatment with ChAdV68.5WTnt.MAG25mer/VEE-MAG25mer srRNA (group 3), ChAdV68.5WTnt.MAG25mer/VEE-MAG25mer srRNA+anti-PD-1 (group 4), VEE-MAG25mer srRNA/ChAdV68.5WTnt.MAG25mer+anti-PD-1 (group 6) and VEE-MAG25mer srRNA/VEE-MAG25mer srRNA+anti-PD-1 (group 8) resulted in a reduction of tumor growth at 21 days that was significantly different from the control (group 1).

TABLE 19
Tumor size at day 21 measured in the CT26 model

| Treatment | Tumor Size (mm³) | SEM |
|---|---|---|
| Control | 2361 | 235 |
| PD1 | 2067 | 137 |
| chAdV/srRNA | 1129 | 181 |
| chAdV/srRNA + PD1 | 848 | 182 |
| srRNA/chAdV | 2142 | 233 |
| srRNA/chAdV + PD1 | 1418 | 220 |
| srRNA | 2198 | 134 |
| srRNA + PD1 | 1606 | 210 |

[0596] Survival was monitored for 35 days after treatment initiation in the CT-26 tumor model (42 days after injection of CT-26 tumor cells). Improved survival was observed after vaccination of mice with 4 of the combinations tested. After vaccination, 64%, 46%, 41% and 36% of mice survived with ChAdV68.5WTnt.MAG25mer prime/VEE-MAG25mer srRNA boost in combination with anti-PD-1 (group 4; P<0.0001 relative to control group 1), VEE-MAG25mer srRNA prime/VEE-MAG25mer srRNA boost in combination with anti-PD-1 (group 8; P=0.0006 relative to control group 1), ChAdV68.5WTnt.MAG25mer prime/VEE-MAG25mer srRNA boost (group 3; P=0.0003 relative to control group 1) and VEE-MAG25mer srRNA prime/ChAdV68.5WTnt.MAG25mer boost in combination with anti-PD-1 (group 6; P=0.0016 relative to control group 1), respectively (FIG. 19 and Table 20). Survival was not significantly different from the control group 1 (<14%) for the remaining treatment groups [VEE-MAG25mer srRNAprime/ChAdV68.5WTnt.MAG25mer boost (group 5), VEE-MAG25mer srRNA prime/VEE-MAG25mer srRNA boost (group 7) and anti-PD-1 alone (group 2)].

TABLE 20
Survival in the CT26 model

| | | | | chAdV/ | | srRNA/ | | |
|---|---|---|---|---|---|---|---|---|
| | | | chAdV/ | srRNA + | srRNA/ | chAdV + | | srRNA + |
| Timepoint | Control | PD1 | srRNA | PD1 | chAdV | PD1 | srRNA | PD1 |
| 0 | 100 | 100 | 100 | 100.00 | 100.00 | 100 | 100 | 100 |
| 21 | 96 | 100 | 100 | 100 | 100 | 95 | 100 | 100 |
| 24 | 54 | 64 | 91 | 100 | 68 | 82 | 68 | 71 |
| 28 | 21 | 32 | 68 | 86 | 45 | 68 | 21 | 64 |
| 31 | 7 | 14 | 41 | 64 | 14 | 36 | 11 | 46 |
| 35 | 7 | 14 | 41 | 64 | 14 | 36 | 11 | 46 |

[0597] In conclusion, ChAdV68.5WTnt.MAG25mer and VEE-MAG25mer srRNA elicited strong T-cell responses to mouse tumor antigens encoded by the vaccines, relative to control. Administration of a ChAdV68.5WTnt.MAG25mer prime and VEE-MAG25mer srRNA boost with or without co-administration of anti-PD-1, VEE-MAG25mer srRNA prime and ChAdV68.5WTnt.MAG25mer boost in combination with anti-PD-1 or administration of VEE-MAG25mer srRNA as a homologous prime boost immunization in combination with anti-PD-1 to tumor bearing mice resulted in improved survival.

### XVIII. Non-Human Primate Studies

[0598] Various dosing protocols using ChAdV68 and self-replicating RNA (srRNA) were evaluated in non-human primates (NHP).

[0599] Materials and Methods

[0600] A priming vaccine was injected intramuscularly (IM) in each NHP to initiate the study (vaccine prime). One or more boosting vaccines (vaccine boost) were also injected intramuscularly in each NHP. Bilateral injections per dose were administered according to groups outlined in tables and summarized below.

### Immunizations

[0601] Mamu-A*01 Indian rhesus macaques were immunized bilaterally with 1×10¹² viral particles (5×10¹¹ viral particles per injection) of ChAdV68.5WTnt.MAG25mer, 30 ug of VEE-MAG25MER srRNA, 100 ug of VEE-MAG25mer srRNA or 300 ug of VEE-MAG25mer srRNA formulated in LNP-1 or LNP-2. Vaccine boosts of 30 ug, 100 ug or 300 ug VEE-MAG25mer srRNA were administered intramuscularly at the indicated time after prime vaccination.

### Immune Monitoring

[0602] PBMCs were isolated at indicated times after prime vaccination using Lymphocyte Separation Medium (LSM, MP Biomedicals) and LeucoSep separation tubes (Greiner Bio-One) and resuspended in RPMI containing 10% FBS and penicillin/streptomycin. Cells were counted on the Attune NxT flow cytometer (Thermo Fisher) using propidium iodide staining to exclude dead and apoptotic cells. Cell were then adjusted to the appropriate concentration of live cells for subsequent analysis. For each monkey in the studies, T cell responses were measured using ELISpot or flow cytometry methods. T cell responses to 6 different rhesus macaque Mamu-A*01 class I epitopes encoded in the vaccines were monitored from PBMCs by measuring induction of cytokines, such as IFN-gamma, using ex vivo enzyme-linked immunospot (ELISpot) analysis. ELISpot analysis was performed according to ELISPOT harmonization guidelines {DOI: 10.1038/nprot.2015.068} with the monkey IFNg ELISpotPLUS kit (MABTECH). 200,000 PBMCs were incubated with 10 uM of the indicated peptides for 16 hours in 96-well IFNg antibody coated plates. Spots were developed using alkaline phosphatase. The reaction was timed for 10 minutes and was terminated by running plate under tap water. Spots were counted using an AID vSpot Reader Spectrum. For ELISPOT analysis, wells with saturation >50% were recorded as “too numerous to count”. Samples with deviation of replicate wells >10% were excluded from analysis. Spot counts were then corrected for well confluency using the formula: spot count+2×(spot count x % confluence /[100%−% confluence]). Negative background was corrected by subtraction of spot counts in the negative peptide stimulation wells from the antigen stimulated wells. Finally, wells labeled too numerous to count were set to the highest observed corrected value, rounded up to the nearest hundred.

[0603] Specific CD4 and CD8 T cell responses to 6 different rhesus macaque Mamu-A*01 class I epitopes encoded in the vaccines were monitored from PBMCs by measuring induction of intracellular cytokines, such as IFN-gamma, using flow cytometry. The results from both methods indicate that cytokines were induced in an antigen-specific manner to epitopes.

[0604] Immunogenicity in Rhesus Macaques

[0605] This study was designed to (a) evaluate the immunogenicity and preliminary safety of VEE-MAG25mer srRNA 30 μg and 100 μg doses as a homologous prime/boost or heterologous prime/boost in combination with ChAdV68.5WTnt.MAG25mer; (b) compare the immune responses of VEE-MAG25mer srRNA in lipid nanoparticles using LNP1 versus LNP2; (c) evaluate the kinetics of T-cell responses to VEE-MAG25mer srRNA and ChAdV68.5WTnt.MAG25mer immunizations.

[0606] The study arm was conducted in Mamu-A*01 Indian rhesus macaques to demonstrate immunogenicity. Select antigens used in this study are only recognized in Rhesus macaques, specifically those with a Mamu-A*01 MEW class I haplotype. Mamu-A*01 Indian rhesus macaques were randomized to the different study arms (6 macaques per group) and administered an IM injection bilaterally with either ChAdV68.5WTnt.MAG25mer or VEE-MAG25mer srRNA vector encoding model antigens that includes multiple Mamu-A*01 restricted epitopes. The study arms were as described below.

TABLE 21
Non-GLP immunogenicity study in Indian Rhesus Macaques

| Group | Prime | Boost 1 | Boost 2 |
|---|---|---|---|
| 1 | VEE-MAG25mer | VEE-MAG25mer | VEE-MAG25mer |
| | srRNA-LNP1 | srRNA-LNP1 | srRNA-LNP1 |
| | (30 μg) | (30 μg) | (30 μg) |
| 2 | VEE-MAG25mer | VEE-MAG25mer | VEE-MAG25mer |
| | srRNA-LNP1 | srRNA-LNP1 | srRNA-LNP1 |
| | (100 μg) | (100 μg) | (100 μg) |
| 3 | VEE-MAG25mer | VEE-MAG25mer | VEE-MAG25mer |
| | srRNA-LNP2 | srRNA-LNP2 | srRNA-LNP2 |
| | (100 μg) | (100 μg) | (100 μg) |
| 4 | ChAdV68.5WTnt.MAG25mer | VEE-MAG25mer | VEE-MAG25mer |
| | | srRNA-LNP1 | srRNA-LNP1 |
| | | (100 μg) | (100 μg) |

[0607] PBMCs were collected prior to immunization and on weeks 1, 2, 3, 4, 5, 6, 8, 9, and 10 after the initial immunization for immune monitoring.

[0608] Results

[0609] Antigen-specific cellular immune responses in peripheral blood mononuclear cells (PBMCs) were measured to six different Mamu-A*01 restricted epitopes prior to immunization and 1, 2, 3, 4, 5, 6, 8, 9, and 10 weeks after the initial immunization. Animals received a boost immunization with VEE-MAG25mer srRNA on weeks 4 and 8 with either 30 μg or 100 μg doses, and either formulated with LNP1 or LNP2, as described in Table 21. Combined immune responses to all six epitopes were plotted for each immune monitoring timepoint (FIG. 20A-D and Tables 22-25).

[0610] Combined antigen-specific immune responses were observed at all measurements with 170, 14, 15, 11, 7, 8, 14, 17, 12 SFCs per 10⁶ PBMCs (six epitopes combined) 1, 2, 3, 4, 5, 6, 8, 9, or 10 weeks after an initial VEE-MAG25mer srRNA-LNP1(30 μg) prime immunization, respectively (FIG. 20A). Combined antigen-specific immune responses were observed at all measurements with 108, -3, 14, 1, 37, 4, 105, 17, 25 SFCs per 10⁶ PBMCs (six epitopes combined) 1, 2, 3, 4, 5, 6, 8, 9, or 10 weeks after an initial VEE-MAG25mer srRNA-LNP1(100 μg) prime immunization, respectively (FIG. 20B). Combined antigen-specific immune responses were observed at all measurements with −17, 38, 14, −2, 87, 21, 104, 129, 89 SFCs per 10⁶ PBMCs (six epitopes combined) 1, 2, 3, 4, 5, 6, 8, 9, or 10 weeks after an initial VEE-MAG25mer srRNA-LNP2(100 μg) prime immunization, respectively (FIG. 20C). Negative values are a result of normalization to pre-bleed values for each epitope/animal.

[0611] Combined antigen-specific immune responses were observed at all measurements with 1218, 1784, 1866, 973, 1813, 747, 797, 1249, and 547 SFCs per 10⁶ PBMCs (six epitopes combined) 1, 2, 3, 4, 5, 6, 8, 9, or 10 weeks after an initial ChAdV68.5WTnt.MAG25mer prime immunization, respectively (FIG. 20D). The immune response showed the expected profile with peak immune responses measured ˜2-3 weeks after the prime immunization followed by a contraction in the immune response after 4 weeks. Combined antigen-specific cellular immune responses of 1813 SFCs per 10⁶ PBMCs (six epitopes combined) were measured 5 weeks after the initial immunization with ChAdV68.5WTnt.MAG25mer (i.e., 1 week after the first boost with VEE-MAG25mer srRNA). The immune response measured 1 week after the first boost with VEE-MAG25mer srRNA (week 5) was comparable to the peak immune response measured for the ChAdV68.5WTnt.MAG25mer prime immunization (week 3) (FIG. 20D). Combined antigen-specific cellular immune responses of 1249 SFCs per 10⁶ PBMCs (six epitopes combined) was measured 9 weeks after the initial immunization with ChAdV68.5WTnt.MAG25mer, respectively (i.e., 1 week after the second boost with VEE-MAG25mer srRNA). The immune responses measured 1 week after the second boost with VEE-MAG25mer srRNA (week 9) was ˜2-fold higher than that measured just before the boost immunization (FIG. 20D).

TABLE 22
Mean spot forming cells (SFC) per 10⁶ PBMCs for each epitope ±
SEM for VEE-MAG25mer srRNA-LNP1(30 μg) (Group 1)

| | Antigen | | | | | |
|---|---|---|---|---|---|---|
| Wk | Env CL9 | Env TL9 | Gag CM9 | Gag LW9 | Pol SV9 | Tat TL8 |
| 1 | 0 ± 0 | 0 ± 0 | 0 ± 0 | 0 ± 0 | 0 ± 0 | 0 ± 0 |
| 2 | 39.7 ± 22.7 | 35.4 ± 25.1 | 3.2 ± 3.6 | 33 ± 28.1 | 30.9 ± 20.3 | 28.3 ± 17.5 |
| 3 | 2 ± 2.4 | 0.2 ± 1.8 | 1.8 ± 2.4 | 3.7 ± 1.9 | 1.7 ± 2.8 | 4.9 ± 2.3 |
| 4 | 1 ± 1.8 | 0.3 ± 1.2 | 5.5 ± 3.6 | 2.3 ± 2.2 | 5.7 ± 2.7 | 0.8 ± 0.8 |
| 5 | 0.5 ± 0.9 | 1.4 ± 3.8 | 3.1 ± 1.6 | 2.3 ± 2.7 | 1.9 ± 2 | 1.4 ± 1.2 |
| 6 | 1.9 ± 1.8 | −0.3 ± 3 | 1.7 ± 1.2 | 1.4 ± 1.4 | 0.8 ± 1.1 | 1.1 ± 1 |
| 8 | −0.4 ± 0.8 | −0.9 ± 2.9 | 0.5 ± 1.3 | 3 ± 1.1 | 2.2 ± 2.1 | 3.7 ± 2 |
| 9 | 1 ± 1.7 | 1.2 ± 4.2 | 7.2 ± 3.9 | 0.5 ± 0.7 | 1.6 ± 3 | 3 ± 1 |
| 10 | 3.8 ± 1.8 | 11 ± 5 | −1.1 ± 1.1 | 1.9 ± 0.9 | 1.3 ± 1.6 | 0.2 ± 0.5 |

TABLE 23
Mean spot forming cells (SFC) per 10⁶ PBMCs for each epitope ±
SEM for VEE-MAG25mer srRNA-LNP1(100 μg) (Group 2)

| | Antigen | | | | | |
|---|---|---|---|---|---|---|
| Wk | Env CL9 | Env TL9 | Gag CM9 | Gag LW9 | Pol SV9 | Tat TL8 |
| 1 | 0 ± 0 | 0 ± 0 | 0 ± 0 | 0 ± 0 | 0 ± 0 | 0 ± 0 |
| 2 | 7.9 ± 17.2 | 23.2 ± 17.4 | 11.4 ± 4.9 | 41.7 ± 16.5 | 15 ± 13.5 | 8.9 ± 6.2 |
| 3 | −3.1 ± 4.6 | −7.2 ± 6.5 | 2.3 ± 2.3 | −0.3 ± 2.7 | 2.7 ± 5.1 | 2.2 ± 1.4 |
| 4 | 1.9 ± 3.8 | −6.2 ± 7.6 | 10.5 ± 4.1 | 1.2 ± 2.9 | 5.6 ± 4.9 | 1.1 ± 0.8 |
| 5 | −2.6 ± 7 | −8 ± 5.9 | 1.5 ± 1.7 | 6.4 ± 2.3 | 0.7 ± 4.3 | 3.3 ± 1.3 |
| 6 | 6.3 ± 6.3 | 4.4 ± 8.3 | 6.6 ± 4.4 | 5.2 ± 5.2 | 3.9 ± 5 | 10.8 ± 6.9 |
| 8 | −3.6 ± 7.2 | −6.8 ± 7.3 | −0.8 ± 1.2 | 3.4 ± 4.2 | 6.4 ± 7.5 | 5.7 ± 2.7 |
| 9 | 8.1 ± 2.4 | 20.6 ± 23.4 | 18.9 ± 5.7 | 8.1 ± 8.9 | 9 ± 11.2 | 40 ± 17.6 |
| 10 | 3.1 ± 8 | −3.9 ± 8.5 | 3.3 ± 1.8 | 0.6 ± 2.9 | 7.4 ± 6.4 | 6.1 ± 2.5 |

TABLE 24
Mean spot forming cells (SFC) per 10⁶ PBMCs for each epitope ±
SEM for VEE-MAG25mer srRNA-LNP2(100 μg) (Group 3)

| | Antigen | | | | | |
|---|---|---|---|---|---|---|
| Wk | Env CL9 | Env TL9 | Gag CM9 | Gag LW9 | Pol SV9 | Tat TL8 |
| 1 | 0 ± 0 | 0 ± 0 | 0 ± 0 | 0 ± 0 | 0 ± 0 | 0 ± 0 |
| 2 | −5.9 ± 3.8 | −0.3 ± 0.5 | −0.5 ± 1.5 | −5.7 ± 6.1 | −1 ± 1.3 | −3.2 ± 5.5 |
| 3 | 0.7 ± 5.2 | 3.4 ± 2.4 | 4.2 ± 4.6 | 18.3 ± 15.5 | 11.9 ± 5.1 | −0.4 ± 8.2 |
| 4 | −3.8 ± 5.5 | 2.3 ± 1.8 | 11.3 ± 6.1 | −3.1 ± 5.6 | 8.5 ± 4 | −1.5 ± 6.1 |
| 5 | −3.7 ± 5.7 | −0.1 ± 0.7 | −0.2 ± 1.6 | 3.4 ± 8.5 | 3 ± 3.1 | −4.6 ± 5 |
| 6 | 12.3 ± 15 | 7.8 ± 4.9 | 24.7 ± 19.8 | 23.2 ± 22.5 | 18.7 ± 15.8 | 0.5 ± 6.2 |
| 8 | 5.9 ± 12.3 | −0.1 ± 0.7 | −0.5 ± 1.3 | 8.8 ± 14.4 | 8.7 ± 8 | −1.3 ± 4 |
| 9 | 16.1 ± 13.4 | 16.5 ± 4 | 22.9 ± 4.2 | 13 ± 13.2 | 16.4 ± 7.8 | 19.6 ± 9.2 |
| 10 | 29.9 ± 21.8 | 22 ± 19.5 | 0.5 ± 2.6 | 22.2 ± 22.6 | 35.3 ± 15.8 | 19.4 ± 17.3 |

TABLE 25
Mean spot forming cells (SFC) per 10⁶ PBMCs for each
epitope ± SEM for ChAdV68.5WTnt.MAG25mer crime

| | Antigen | | | | | |
|---|---|---|---|---|---|---|
| Wk | Env CL9 | Env TL9 | Gag CM9 | Gag LW9 | Pol SV9 | Tat TL8 |
| 1 | 178 ± 68.7 | 206.5 ± 94.8 | 221.2 ± 120 | 15.4 ± 16.7 | 33.3 ± 25.9 | 563.5 ± 174.4 |
| 2 | 311.2 ± 165.5 | 278.8 ± 100.9 | 344.6 ± 110.8 | 46.3 ± 13.5 | 181.6 ± 76.8 | 621.4 ± 220.9 |
| 3 | 277.3 ± 101.1 | 359.6 ± 90.5 | 468.2 ± 106.6 | 41.7 ± 11.1 | 169.8 ± 57.8 | 549.4 ± 115.7 |
| 4 | 140 ± 46.5 | 169.6 ± 46.8 | 239.4 ± 37 | 26.5 ± 11.4 | 75 ± 31.6 | 322.2 ± 50.7 |
| 5 | 155.6 ± 62.1 | 406.7 ± 96.4 | 542.7 ± 143.3 | 35.1 ± 16.6 | 134.2 ± 53.7 | 538.5 ± 91.9 |
| 6 | 78.9 ± 42.5 | 95.5 ± 29.4 | 220.9 ± 75.3 | −1.4 ± 5.3 | 43.4 ± 19.6 | 308.1 ± 42.6 |
| 8 | 88.4 ± 30.4 | 162.1 ± 30.3 | 253.4 ± 78.6 | 21.4 ± 11.2 | 53.7 ± 22.3 | 217.8 ± 45.2 |
| 9 | 158.5 ± 69 | 322.3 ± 87.2 | 338.2 ± 137.1 | 5.6 ± 12.4 | 109.2 ± 17.9 | 314.8 ± 43.4 |
| 10 | 97.3 ± 32.5 | 133.2 ± 27 | 154.9 ± 59.2 | 10 ± 6 | 26 ± 16.7 | 125.5 ± 27.7 |

[0612] Non-GLP RNA Dose Ranging Study (Higher Doses) in Indian Rhesus Macaques

[0613] This study was designed to (a) evaluate the immunogenicity of VEE-MAG25mer srRNAat a dose of 300 μg as a homologous prime/boost or heterologous prime/boost in combination with ChAdV68.5WTnt.MAG25mer; (b) compare the immune responses of VEE-MAG25mer srRNA in lipid nanoparticles using LNP1 versus LNP2 at the 300 μg dose; and (c) evaluate the kinetics of T-cell responses to VEE-MAG25mer srRNA and ChAdV68.5WTnt.MAG25mer immunizations.

[0614] The study arm was conducted in Mamu-A*01 Indian rhesus macaques to demonstrate immunogenicity. Vaccine immunogenicity in nonhuman primate species, such as Rhesus, is the best predictor of vaccine potency in humans. Furthermore, select antigens used in this study are only recognized in Rhesus macaques, specifically those with a Mamu-A*01 MHC class I haplotype. Mamu-A*01 Indian rhesus macaques were randomized to the different study arms (6 macaques per group) and administered an IM injection bilaterally with either ChAdV68.5-WTnt.MAG25mer or VEE-MAG25mer srRNA encoding model antigens that includes multiple Mamu-A*01 restricted antigens. The study arms were as described below.

[0615] PBMCs were collected prior to immunization and 4, 5, 6, 7, 8, 10, 11, 12, 13, 14, 15, 16, 17, 18, 19, 20, 21, 22, 23 or 24 weeks after the initial immunization for immune monitoring for group 1 (heterologous prime/boost). PBMCs were collected prior to immunization and 4, 5, 7, 8, 10, 11, 12, 13, 14, or 15 weeks after the initial immunization for immune monitoring for groups 2 and 3 (homologous prime/boost).

TABLE 26
Non-GLP immunogenicity study in Indian Rhesus Macaques

| Group | Prime | Boost 1 | Boost 2 | Boost 3 |
|---|---|---|---|---|
| 1 | ChAdV68.5WTnt.MAG25mer | VEE-MAG25mer | VEE-MAG25mer | VEE-MAG25mer |
| | | srRNA-LNP2 | srRNA-LNP2 | srRNA-LNP2 |
| | | (300 μg) | (300 μg) | (300 μg) |
| 2 | VEE-MAG25mer | VEE-MAG25mer | VEE-MAG25mer | |
| | srRNA-LNP2 | srRNA-LNP2 | srRNA-LNP2 | |
| | (300 μg) | (300 μg) | (300 μg) | |
| 3 | VEE-MAG25mer | VEE-MAG25mer | VEE-MAG25mer | |
| | srRNA-LNP1 | srRNA-LNP1 | srRNA-LNP1 | |
| | (300 μg) | (300 μg) | (300 μg) | |

[0616] Results

[0617] Mamu-A*01 Indian rhesus macaques were immunized with ChAdV68.5-WTnt.MAG25mer. Antigen-specific cellular immune responses in peripheral blood mononuclear cells (PBMCs) were measured to six different Mamu-A*01 restricted epitopes prior to immunization and 4, 5, 6, 7, 8, 10, 11, 12, 13, 14, 15, 16, 17, 18, 19, 20, 21, 22, 23 or 24 weeks after the initial immunization (FIG. 21 and Table 27). Animals received boost immunizations with VEE-MAG25mer srRNA using the LNP2 formulation on weeks 4, 12, and 20. Combined antigen-specific immune responses of 1750, 4225, 1100, 2529, 3218, 1915, 1708, 1561, 5077, 4543, 4920, 5820, 3395, 2728, 1996, 1465, 4730, 2984, 2828, or 3043 SFCs per 10⁶ PBMCs (six epitopes combined) were measured 4, 5, 6, 7, 8, 10, 11, 12, 13, 14, 15, 16, 17, 18, 19, 20, 21, 22, 23 or 24 weeks after the initial immunization with ChAdV68.5WTnt.MAG25mer (FIG. 21). Immune responses measured 1 week after the second boost immunization (week 13) with VEE-MAG25mer srRNA were ˜3-fold higher than that measured just before the boost immunization (week 12). Immune responses measured 1 week after the third boost immunization (week 21) with VEE-MAG25mer srRNA, were ˜3-fold higher than that measured just before the boost immunization (week 20), similar to the response observed for the second boost.

[0618] Mamu-A*01 Indian rhesus macaques were also immunized with VEE-MAG25mer srRNA using two different LNP formulations (LNP1 and LNP2). Antigen-specific cellular immune responses in peripheral blood mononuclear cells (PBMCs) were measured to six different Mamu-A*01 restricted epitopes prior to immunization and 4, 5, 6, 7, 8, 10, 11, 12, 13, 14, or 15 weeks after the initial immunization (FIGS. 22 and 23, Tables 28 and 29). Animals received boost immunizations with VEE-MAG25mer srRNA using the respective LNP1 or LNP2 formulation on weeks 4 and 12. Combined antigen-specific immune responses of 168, 204, 103, 126, 140, 145, 330, 203, and 162 SFCs per 106 PBMCs (six epitopes combined) were measured 4, 5, 7, 8, 10, 11, 13, 14, 15 weeks after the immunization with VEE-MAG25mer srRNA-LNP2 (FIG. 22). Combined antigen-specific immune responses of 189, 185, 349, 437, 492, 570, 233, 886, 369, and 381 SFCs per 10⁶ PBMCs (six epitopes combined) were measured 4, 5, 7, 8, 10, 11, 12, 13, 14, 15 weeks after the immunization with VEE-MAG25mer srRNA-LNP1 (FIG. 23).

TABLE 27
Mean spot forming cells (SFC) per 10⁶ PBMCs for each epitope ±
SEM for priming vaccination with ChAdV68.5WTnt.MAG25mer (Group 1)

| | Antigen | | | | | |
|---|---|---|---|---|---|---|
| Wk | Env CL9 | Env TL9 | Gag CM9 | Gag LW9 | Pol SV9 | Tat TL8 |
| 4 | 173 ± 41.6 | 373.5 ± 87.3 | 461.4 ± 74.2 | 38.4 ± 26.1 | 94.5 ± 26 | 609.2 ± 121.9 |
| 5 | 412.7 ± 138.4 | 987.8 ± 283.3 | 1064.4 ± 266.9 | 85.6 ± 31.2 | 367.2 ± 135.2 | 1306.8 ± 332.8 |
| 6 | 116.2 ± 41.2 | 231.1 ± 46.3 | 268.3 ± 90.7 | 86.1 ± 42 | 174.3 ± 61 | 223.9 ± 38.1 |
| 7 | 287.4 ± 148.7 | 588.9 ± 173.9 | 693.2 ± 224.8 | 92.1 ± 33.5 | 172.9 ± 55.6 | 694.6 ± 194.8 |
| 8 | 325.4 ± 126.6 | 735.8 ± 212 | 948.9 ± 274.5 | 211.3 ± 62.7 | 179.1 ± 50 | 817.3 ± 185.2 |
| 10 | 312 ± 129.7 | 543.2 ± 188.4 | 618.6 ± 221.7 | −5.7 ± 4.1 | 136.5 ± 51.3 | 309.9 ± 85.6 |
| 11 | 248.5 ± 81.1 | 348.7 ± 129.8 | 581.1 ± 205.5 | −3.1 ± 4.4 | 119 ± 51.2 | 413.7 ± 144.8 |
| 12 | 261.9 ± 68.2 | 329.9 ± 83 | 486.5 ± 118.6 | −1.2 ± 5.1 | 132.8 ± 31.8 | 350.9 ± 69.3 |
| 13 | 389.3 ± 167.7 | 1615.8 ± 418.3 | 1244.3 ± 403.6 | 1.3 ± 8.1 | 522.5 ± 155 | 1303.3 ± 385.6 |
| 14 | 406.3 ± 121.6 | 1616 ± 491.7 | 1142.3 ± 247.2 | 6.6 ± 11.1 | 322.7 ± 94.1 | 1048.6 ± 215.6 |
| 15 | 446.8 ± 138.7 | 1700.8 ± 469.1 | 1306.3 ± 294.4 | 43 ± 24.5 | 421.2 ± 87.9 | 1001.5 ± 236.4 |
| 16 | 686.8 ± 268.8 | 1979.5 ± 541.7 | 1616.8 ± 411.8 | 2.4 ± 7.8 | 381.9 ± 116.4 | 1152.8 ± 352.7 |
| 17 | 375.8 ± 109.3 | 1378.6 ± 561.2 | 773.1 ± 210.3 | −1.4 ± 4.3 | 177.6 ± 93.7 | 691.7 ± 245 |
| 18 | 255.9 ± 99.7 | 1538.4 ± 498.1 | 498.7 ± 152.3 | −5.3 ± 3.3 | 26.2 ± 13.4 | 413.9 ± 164.8 |
| 19 | 133 ± 62.6 | 955.9 ± 456.8 | 491.1 ± 121.8 | −5.7 ± 4.1 | 50.3 ± 25.4 | 371.2 ± 123.7 |
| 20 | 163.7 ± 55.8 | 641.7 ± 313.5 | 357.9 ± 91.1 | 2.6 ± 7.5 | 41.4 ± 24.2 | 257.8 ± 68.9 |
| 21 | 319.9 ± 160.5 | 2017.1 ± 419.9 | 1204.8 ± 335.2 | −3.7 ± 5.1 | 268.1 ± 109.6 | 924.1 ± 301 |
| 22 | 244.7 ± 105.6 | 1370.9 ± 563.5 | 780.3 ± 390 | −3.6 ± 5.1 | 118.2 ± 68.1 | 473.3 ± 249.3 |
| 23 | 176.7 ± 81.8 | 1263.7 ± 527.3 | 838.6 ± 367.9 | −5.7 ± 4.1 | 73.6 ± 49 | 480.9 ± 163.9 |
| 24 | 236.5 ± 92 | 1324.7 ± 589.3 | 879.7 ± 321 | −0.4 ± 5.7 | 104 ± 53.1 | 498 ± 135.8 |

TABLE 28
Mean spot forming cells (SFC) per 10⁶ PBMCs for each epitope ± SEM for
priming vaccination with VEE-MAG25mer srRNA-LNP2 (300 μg) (Group 2)

| | Antigen | | | | | |
|---|---|---|---|---|---|---|
| Wk | Env CL9 | Env TL9 | Gag CM9 | Gag LW9 | Pol SV9 | Tat TL8 |
| 4 | 46 ± 27.1 | 18.4 ± 6.8 | 58.3 ± 45.8 | 29.9 ± 20.8 | 4.9 ± 2.3 | 10.7 ± 4 |
| 5 | 85.4 ± 54 | 5.2 ± 5.8 | 52.4 ± 51.2 | 34.5 ± 35 | 11.8 ± 12.2 | 14.4 ± 7.9 |
| 7 | 18.6 ± 32.5 | 1.9 ± 1.7 | 59.4 ± 55.7 | 9.3 ± 10.7 | 3.3 ± 3 | 10.7 ± 6.1 |
| 8 | 36.6 ± 39.4 | 6.3 ± 3.9 | 48.7 ± 39.9 | 13.5 ± 8.8 | 3.8 ± 3.6 | 17.2 ± 9.7 |
| 10 | 69.1 ± 59.1 | 4.4 ± 1.9 | 39.3 ± 38 | 14.7 ± 10.8 | 4.4 ± 5.3 | 8.5 ± 5.3 |
| 11 | 43 ± 38.8 | 22.6 ± 21.1 | 30.2 ± 26.2 | 3.3 ± 2.2 | 5.8 ± 3.5 | 40.3 ± 25.5 |
| 13 | 120.4 ± 78.3 | 68.2 ± 43.9 | 54.2 ± 36.8 | 21.8 ± 7.4 | 17.7 ± 6.1 | 47.4 ± 27.3 |
| 14 | 76 ± 44.8 | 28 ± 19.5 | 65.9 ± 64.3 | −0.3 ± 1.3 | 2.5 ± 2 | 31.1 ± 26.5 |
| 15 | 58.9 ± 41.4 | 19.5 ± 15.1 | 55.4 ± 51 | 2.5 ± 2 | 5.5 ± 3.6 | 20.1 ± 15.7 |

TABLE 29
Mean spot forming cells (SFC) per 10⁶ PBMCs for each epitope ± SEM for
priming vaccination with VEE-MAG25mer srRNA-LNP1 (300 μg) (Group 3)

| | Antigen | | | | | |
|---|---|---|---|---|---|---|
| Wk | Env CL9 | Env TL9 | Gag CM9 | Gag LW9 | Pol SV9 | Tat TL8 |
| 4 | 19.5 ± 8.7 | 13.3 ± 13.1 | 16.5 ± 15.3 | 10.5 ± 7.3 | 35.9 ± 24.8 | 92.9 ± 91.6 |
| 5 | 87.9 ± 43.9 | 12.7 ± 11.7 | 37.2 ± 31.9 | 21.1 ± 23.8 | 13.2 ± 13.7 | 12.6 ± 13.7 |
| 7 | 21.1 ± 13.3 | 48.8 ± 48.4 | 51.7 ± 39.5 | 9.1 ± 10.5 | 58.6 ± 55.8 | 159.4 ± 159 |
| 8 | 47.7 ± 21.7 | 66.4 ± 52.2 | 59.8 ± 57.4 | 49.4 ± 28 | 79.4 ± 63 | 133.8 ± 132.1 |
| 10 | 49 ± 30.2 | 42.2 ± 41.1 | 139.3 ± 139.3 | 51.6 ± 51.2 | 78.2 ± 75.8 | 131.7 ± 131.6 |
| 11 | 42 ± 26.8 | 20.9 ± 21.4 | 177.1 ± 162 | −6.3 ± 4.3 | 104.3 ± 104.1 | 231.5 ± 230.1 |
| 12 | 40.2 ± 19 | 20.3 ± 11.9 | 42.2 ± 46.7 | 3.7 ± 6.7 | 57 ± 44.7 | 70 ± 69.2 |
| 13 | 81.2 ± 48.9 | 38.2 ± 37.6 | 259.4 ± 222.2 | −4 ± 4.1 | 164.1 ± 159.3 | 347.3 ± 343.5 |
| 14 | 34.5 ± 31.8 | 5.3 ± 11.6 | 138.6 ± 137.3 | −4.7 ± 5.2 | 52.3 ± 52.9 | 142.6 ± 142.6 |
| 15 | 49 ± 24 | 6.7 ± 9.8 | 167.1 ± 163.8 | −6.4 ± 4.2 | 47.8 ± 42.3 | 116.6 ± 114.5 |

[0619] srRNA Dose Ranging Study

[0620] In one implementation of the present invention, an srRNA dose ranging study can be conducted in mamu A01 Indian rhesus macaques to identify which srRNA dose to progress to NHP immunogenicity studies. In one example, Mamu A01 Indian rhesus macaques can be administered with an srRNA vector encoding model antigens that includes multiple mamu A01 restricted epitopes by IM injection. In another example, an anti-CTLA-4 monoclonal antibody can be administered SC proximal to the site of IM vaccine injection to target the vaccine draining lymph node in one group of animals. PBMCs can be collected every 2 weeks after the initial vaccination for immune monitoring. The study arms are described in below (Table 30).

TABLE 30
Non-GLP RNA dose ranging study in Indian Rhesus Macaques

| Group | Prime | Boost 1 | Boost 2 |
|---|---|---|---|
| 1 | srRNA-LNP (Low Dose) | srRNA-LNP (Low Dose) | srRNA-LNP (Low Dose) |
| 2 | srRNA-LNP (Mid Dose) | srRNA-LNP (Mid Dose) | srRNA-LNP (Mid Dose) |
| 3 | srRNA-LNP (High Dose) | srRNA-LNP (High Dose) | srRNA-LNP (High Dose) |
| 4 | srRNA-LNP (High Dose) + | srRNA-LNP (High Dose) + | srRNA-LNP (High Dose) + |
| | anti-CTLA-4 | anti-CTLA-4 | anti-CTLA-4 |

* Dose range of srRNA to be determined with the high dose ≤300 μg.

[0621] Immunogenicity Study in Indian Rhesus Macaques

[0622] Vaccine studies were conducted in mamu A01 Indian rhesus macaques (NHPs) to demonstrate immunogenicity using the antigen vectors. FIG. 34 illustrates the vaccination strategy. Three groups of NHPs were immunized with ChAdV68.5-WTnt.MAG25mer and either with the checkpoint inhibitor anti-CTLA-4 antibody Ipilimumab (Groups 5 & 6) or without the checkpoint inhibitor (Group 4). The antibody was administered either intra-venously (group 5) or subcutaneously (group 6). Triangles indicate chAd68 vaccination (1e12 vp/animal) at weeks 0 & 32. Circles represent alphavirus vaccination at weeks 0, 4, 12, 20, 28 and 32.

[0623] The time course of CD8+ anti-epitope responses in the immunized NHPs are presented for chAd-MAG immunization alone (FIG. 35 and Table 31A), chAd-MAG immunization with the checkpoint inhibitor delivered IV (FIG. 36 and Table 31B), and chAd-MAG immunization with the checkpoint inhibitor delivered SC (FIG. 37 and Table 31C). The results demonstrate chAd68 vectors efficiently primed CD8+ responses in primates, alphavirus vectors efficiently boosted the chAD68 vaccine priming response, checkpoint inhibitor whether delivered IV or SC amplified both priming and boosting responses, and chAd vectors readministered post vaccination to effectively boosted the immune responses.

TABLE 31A
CD8+ anti-epitope responses in Rhesus Macaques dosed with chAd-MAG (Group
4). Mean SFC/1e6 splenocytes +/− the standard error is shown

| | Antigen | | | | | |
|---|---|---|---|---|---|---|
| Wk | Env CL9 | Env TL9 | Gag CM9 | Gag LW9 | Pol SV9 | Tat TL8 |
| 4 | 173 ± 41.6 | 373.5 ± 87.3 | 461.4 ± 74.2 | 38.4 ± 26.1 | 94.5 ± 26 | 609.2 ± 121.9 |
| 5 | 412.7 ± 138.4 | 987.8 ± 283.3 | 1064.4 ± 266.9 | 85.6 ± 31.2 | 367.2 ± 135.2 | 1306.8 ± 332.8 |
| 6 | 116.2 ± 41.2 | 231.1 ± 46.3 | 268.3 ± 90.7 | 86.1 ± 42 | 174.3 ± 61 | 223.9 ± 38.1 |
| 7 | 287.4 ± 148.7 | 588.9 ± 173.9 | 693.2 ± 224.8 | 92.1 ± 33.5 | 172.9 ± 55.6 | 694.6 ± 194.8 |
| 8 | 325.4 ± 126.6 | 735.8 ± 212 | 948.9 ± 274.5 | 211.3 ± 62.7 | 179.1 ± 50 | 817.3 ± 185.2 |
| 10 | 312 ± 129.7 | 543.2 ± 188.4 | 618.6 ± 221.7 | −5.7 ± 4.1 | 136.5 ± 51.3 | 309.9 ± 85.6 |
| 11 | 248.5 ± 81.1 | 348.7 ± 129.8 | 581.1 ± 205.5 | −3.1 ± 4.4 | 119 ± 51.2 | 413.7 ± 144.8 |
| 12 | 261.9 ± 68.2 | 329.9 ± 83 | 486.5 ± 118.6 | −1.2 ± 5.1 | 132.8 ± 31.8 | 350.9 ± 69.3 |
| 13 | 389.3 ± 167.7 | 1615.8 ± 418.3 | 1244.3 ± 403.6 | 1.3 ± 8.1 | 522.5 ± 155 | 1303.3 ± 385.6 |
| 14 | 406.3 ± 121.6 | 1616 ± 491.7 | 1142.3 ± 247.2 | 6.6 ± 11.1 | 322.7 ± 94.1 | 1048.6 ± 215.6 |
| 15 | 446.8 ± 138.7 | 1700.8 ± 469.1 | 1306.3 ± 294.4 | 43 ± 24.5 | 421.2 ± 87.9 | 1001.5 ± 236.4 |
| 16 | 686.8 ± 268.8 | 1979.5 ± 541.7 | 1616.8 ± 411.8 | 2.4 ± 7.8 | 381.9 ± 116.4 | 1152.8 ± 352.7 |
| 17 | 375.8 ± 109.3 | 1378.6 ± 561.2 | 773.1 ± 210.3 | −1.4 ± 4.3 | 177.6 ± 93.7 | 691.7 ± 245 |
| 18 | 255.9 ± 99.7 | 1538.4 ± 498.1 | 498.7 ± 152.3 | −5.3 ± 3.3 | 26.2 ± 13.4 | 413.9 ± 164.8 |
| 19 | 133 ± 62.6 | 955.9 ± 456.8 | 491.1 ± 121.8 | −5.7 ± 4.1 | 50.3 ± 25.4 | 371.2 ± 123.7 |
| 20 | 163.7 ± 55.8 | 641.7 ± 313.5 | 357.9 ± 91.1 | 2.6 ± 7.5 | 41.4 ± 24.2 | 257.8 ± 68.9 |
| 21 | 319.9 ± 160.5 | 2017.1 ± 419.9 | 1204.8 ± 335.2 | −3.7 ± 5.1 | 268.1 ± 109.6 | 924.1 ± 301 |
| 22 | 244.7 ± 105.6 | 1370.9 ± 563.5 | 780.3 ± 390 | −3.6 ± 5.1 | 118.2 ± 68.1 | 473.3 ± 249.3 |
| 23 | 176.7 ± 81.8 | 1263.7 ± 527.3 | 838.6 ± 367.9 | −5.7 ± 4.1 | 73.6 ± 49 | 480.9 ± 163.9 |
| 24 | 236.5 ± 92 | 1324.7 ± 589.3 | 879.7 ± 321 | −0.4 ± 5.7 | 104 ± 53.1 | 498 ± 135.8 |
| 25 | 136.4 ± 52.6 | 1207.1 ± 501.6 | 924 ± 358.5 | 6.2 ± 10.5 | 74.1 ± 34.4 | 484.6 ± 116.7 |
| 26 | 278.2 ± 114.4 | 1645 ± 661.7 | 1170.2 ± 469.9 | −2.9 ± 5.7 | 80.6 ± 55.8 | 784.4 ± 214.1 |
| 27 | 159 ± 56.8 | 961.7 ± 547.1 | 783.6 ± 366.4 | −5 ± 4.3 | 63.6 ± 27.5 | 402.9 ± 123.4 |
| 28 | 189.6 ± 75.7 | 1073.1 ± 508.8 | 668.3 ± 312.5 | −5.7 ± 4.1 | 80.3 ± 38.3 | 386.4 ± 122 |
| 29 | 155.3 ± 69.1 | 1102.9 ± 606.1 | 632.9 ± 235 | 34.5 ± 24.2 | 80 ± 35.5 | 422.5 ± 122.9 |
| 30 | 160.2 ± 59.9 | 859 ± 440.9 | 455 ± 209.1 | −3 ± 5.3 | 60.5 ± 28.4 | 302.7 ± 123.2 |
| 31 | 122.2 ± 49.7 | 771.1 ± 392.7 | 582.2 ± 233.5 | −5.7 ± 4.1 | 55.1 ± 27.3 | 295.2 ± 68.3 |
| 32 | 119.3 ± 28.3 | 619.4 ± 189.7 | 566 ± 222.1 | −3.7 ± 5.1 | 21.9 ± 4.5 | 320.5 ± 76.4 |
| 33 | 380.5 ± 122 | 1636.1 ± 391.4 | 1056.2 ± 205.7 | −5.7 ± 4.1 | 154.5 ± 38.5 | 988.4 ± 287.7 |
| 34 | 1410.8 ± 505.4 | 972.4 ± 301.5 | 319.6 ± 89.6 | −4.8 ± 4.2 | 141.1 ± 49.8 | 1375.5 ± 296.7 |
| 37 | 130.8 ± 29.2 | 500 ± 156.9 | 424.9 ± 148.9 | −3.5 ± 4.7 | 77.7 ± 24.6 | 207.1 ± 42.4 |
| 38 | 167.7 ± 54.8 | 1390.8 ± 504.7 | 830.4 ± 329.1 | −5.5 ± 4.1 | 111.8 ± 43.2 | 516 ± 121.7 |

TABLE 31B
CD8+ anti-epitope responses in Rhesus Macaques dosed with chAd-MAG plus anti-CTLA4 antibody
(Ipilimumab) delivered IV. (Group 5). Mean SFC/1e6 splenocytes +/− the standard error is shown

| | Antigen | | | | | |
|---|---|---|---|---|---|---|
| Wk | Env CL9 | Env TL9 | Gag CM9 | Gag LW9 | Pol SV9 | Tat TL8 |
| 4 | 1848.1 ± 432.2 | 1295.7 ± 479.7 | 1709.8 ± 416.9 | 513.7 ± 219.8 | 838.5 ± 221.1 | 2514.6 ± 246.5 |
| 5 | 1844.1 ± 410.2 | 2367.5 ± 334.4 | 1983.1 ± 370.7 | 732.1 ± 249.4 | 1429.7 ± 275.3 | 2517.7 ± 286.5 |
| 6 | 822.4 ± 216.7 | 1131.2 ± 194.7 | 796.8 ± 185.8 | 226.8 ± 70 | 802.2 ± 101.4 | 913.5 ± 222.7 |
| 7 | 1147.2 ± 332.9 | 1066 ± 311.2 | 1149.8 ± 467.3 | 267.4 ± 162.6 | 621.5 ± 283.2 | 1552.2 ± 395.1 |
| 8 | 1192.7 ± 188.8 | 1461.5 ± 237.7 | 1566.9 ± 310.5 | 522.5 ± 118.6 | 662.3 ± 142.4 | 1706 ± 216.7 |
| 10 | 1249 ± 220.3 | 1170.6 ± 227.7 | 1297.3 ± 264.7 | −0.3 ± 4.4 | 551.8 ± 90.5 | 1425.3 ± 142.6 |
| 11 | 934.2 ± 221.7 | 808 ± 191.3 | 1003.1 ± 293.4 | 1.9 ± 4.3 | 364.2 ± 76.6 | 1270.8 ± 191.6 |
| 12 | 1106.2 ± 216.6 | 896.7 ± 190.7 | 1020.1 ± 243.3 | 1.3 ± 3.9 | 436.6 ± 90 | 1222 ± 155.4 |
| 13 | 2023.8 ± 556.3 | 3696.7 ± 1.7 | 2248.5 ± 436.4 | −4.5 ± 3.5 | 2614 ± 406.1 | 3700 ± 0 |
| 14 | 1278.7 ± 240 | 2639.5 ± 387 | 1654.6 ± 381.1 | −6 ± 2.1 | 988.8 ± 197.9 | 2288.3 ± 298.7 |
| 15 | 1458.9 ± 281.8 | 2932.5 ± 488.7 | 1893.4 ± 499 | 74.6 ± 15.6 | 1657.8 ± 508.9 | 2709.1 ± 428.7 |
| 16 | 1556.8 ± 243 | 2143.8 ± 295.2 | 2082.8 ± 234.2 | −5.8 ± 2.5 | 1014.6 ± 161.4 | 2063.7 ± 86.7 |
| 17 | 1527 ± 495.1 | 2213 ± 677.1 | 1767.7 ± 391.8 | 15.1 ± 5.9 | 633.8 ± 133.9 | 2890.8 ± 433.9 |
| 18 | 1068.2 ± 279.9 | 1940.9 ± 204.1 | 1114.1 ± 216.1 | −5.8 ± 2.5 | 396.6 ± 77.6 | 1659.4 ± 171.7 |
| 19 | 760.7 ± 362.2 | 1099.5 ± 438.4 | 802.7 ± 192.5 | −2.4 ± 3.3 | 262.2 ± 62.2 | 1118.6 ± 224.2 |
| 20 | 696.3 ± 138.2 | 954.9 ± 198 | 765.1 ± 248.4 | −1.4 ± 4.4 | 279.6 ± 89.3 | 1139 ± 204.5 |
| 21 | 1201.4 ± 327.9 | 3096 ± 1.9 | 1901 ± 412.1 | −5.8 ± 2.5 | 1676.3 ± 311.5 | 2809.3 ± 195.8 |
| 22 | 1442.5 ± 508.3 | 2944.7 ± 438.6 | 1528.4 ± 349.6 | 2.8 ± 5.1 | 940.7 ± 160.5 | 2306.3 ± 218.6 |
| 23 | 1400.4 ± 502.2 | 2757.1 ± 452.9 | 1604.2 ± 450.1 | −5.1 ± 2.3 | 708.1 ± 162.6 | 2100.4 ± 362.9 |
| 24 | 1351 ± 585.1 | 2264.5 ± 496 | 1080.6 ± 253.8 | 0.3 ± 6.5 | 444.2 ± 126.4 | 1823.7 ± 306.5 |
| 25 | 1211.5 ± 505.2 | 2160.4 ± 581.8 | 970.8 ± 235.9 | 2.5 ± 3.8 | 450.4 ± 126.9 | 1626.2 ± 261.3 |
| 26 | 1443 ± 492.5 | 2485 ± 588 | 1252.5 ± 326.4 | −0.2 ± 6 | 360.2 ± 92.3 | 2081.9 ± 331.1 |
| 27 | 896.2 ± 413.3 | 1686 ± 559.5 | 751 ± 192.1 | −3.7 ± 2.5 | 247.4 ± 82.8 | 1364.1 ± 232 |
| 28 | 1147.8 ± 456.9 | 1912.1 ± 417.1 | 930.3 ± 211.4 | −5.8 ± 2.5 | 423.9 ± 79.6 | 1649.3 ± 315 |
| 29 | 1038.5 ± 431.9 | 1915.2 ± 626.1 | 786.8 ± 205.9 | 23.5 ± 8.3 | 462.8 ± 64 | 1441.5 ± 249.7 |
| 30 | 730.5 ± 259.3 | 1078.6 ± 211.5 | 699.1 ± 156.2 | −4.4 ± 2.7 | 234.4 ± 43.9 | 1160.6 ± 112.6 |
| 31 | 750.4 ± 328.3 | 1431 ± 549.9 | 650.6 ± 141.1 | −5.2 ± 3 | 243.4 ± 56.4 | 868.9 ± 142.8 |
| 32 | 581.4 ± 227.7 | 1326.6 ± 505.2 | 573.3 ± 138 | −3.2 ± 4.2 | 160.8 ± 49.2 | 936.4 ± 110.4 |
| 33 | 2198.4 ± 403.8 | 3093.4 ± 123.3 | 2391.8 ± 378.4 | 7.1 ± 8.5 | 1598.1 ± 343.1 | 2827.5 ± 289.5 |
| 34 | 2654.3 ± 337 | 2709.9 ± 204.3 | 1297.5 ± 291.4 | 0.4 ± 4.2 | 1091.8 ± 242.9 | 1924 ± 245.7 |
| 37 | 846.8 ± 301.7 | 1706.9 ± 196 | 973.6 ± 149.3 | 50.5 ± 45.2 | 777.3 ± 140.2 | 1478.8 ± 94.3 |

TABLE 31C
CD8+ anti-epitope responses in Rhesus Macaques dosed with chAd-MAG plus anti-CTLA4 antibody
(Ipilimumab) delivered SC (Group 6). Mean SFC/1e6 splenocytes +/− the standard error is shown

| | Antigen | | | | | |
|---|---|---|---|---|---|---|
| Wk | Env CL9 | Env TL9 | Gag CM9 | Gag LW9 | Pol SV9 | Tat TL8 |
| 4 | 598.3 ± 157.4 | 923.7 ± 306.8 | 1075.6 ± 171.8 | 180.5 ± 74.1 | 752.3 ± 245.8 | 1955.3 ± 444.4 |
| 5 | 842.2 ± 188.5 | 1703.7 ± 514.2 | 1595.8 ± 348.4 | 352.7 ± 92.3 | 1598.9 ± 416.8 | 2163.7 ± 522.1 |
| 6 | 396.4 ± 45.3 | 728.3 ± 232.7 | 503.8 ± 151.9 | 282 ± 69 | 463.1 ± 135.7 | 555.2 ± 191.5 |
| 7 | 584.2 ± 177 | 838.3 ± 254.9 | 1013.9 ± 349.4 | 173.6 ± 64.3 | 507.4 ± 165.7 | 1222.8 ± 368 |
| 8 | 642.9 ± 134 | 1128.6 ± 240.6 | 1259.1 ± 163.8 | 366.1 ± 72.8 | 726.7 ± 220.9 | 1695.6 ± 359.4 |
| 10 | 660.4 ± 211.4 | 746.9 ± 222.7 | 944.8 ± 210.2 | −1.2 ± 1.9 | 523.4 ± 230.7 | 787.3 ± 308.3 |
| 11 | 571.2 ± 162 | 609.4 ± 194.3 | 937.9 ± 186.5 | −8.9 ± 2.3 | 511.6 ± 229.6 | 1033.3 ± 315.7 |
| 12 | 485.3 ± 123.7 | 489.4 ± 142.7 | 919.3 ± 214.1 | −8.9 ± 2.3 | 341.6 ± 139.4 | 1394.7 ± 432.1 |
| 13 | 986.9 ± 154.5 | 2811.9 ± 411.3 | 1687.7 ± 344.3 | −4.1 ± 5.1 | 1368.5 ± 294.2 | 2751 ± 501.9 |
| 14 | 945.9 ± 251.4 | 2027.7 ± 492.8 | 1386.7 ± 326.7 | −5.7 ± 2.8 | 708.9 ± 277.1 | 1588.2 ± 440.1 |
| 15 | 1075.2 ± 322.4 | 2386 ± 580.7 | 1606.3 ± 368.1 | −5.4 ± 3.2 | 763.3 ± 248.8 | 1896.5 ± 507.8 |
| 16 | 1171.8 ± 341.6 | 2255.1 ± 439.6 | 1672.2 ± 342.3 | −7.8 ± 2.4 | 1031.6 ± 228.8 | 1896.4 ± 419.9 |
| 17 | 1118.2 ± 415.4 | 2156.3 ± 476 | 1345.3 ± 377.7 | −1.1 ± 6.7 | 573.7 ± 118.8 | 1614.4 ± 382.3 |
| 18 | 861.3 ± 313.8 | 2668.2 ± 366.8 | 1157.2 ± 259.6 | −8.9 ± 2.3 | 481.2 ± 164 | 1725.8 ± 511.4 |
| 19 | 719.2 ± 294.2 | 1447.2 ± 285 | 968 ± 294.5 | −2.2 ± 4.6 | 395.6 ± 106.1 | 1199.6 ± 289.2 |
| 20 | 651.6 ± 184 | 1189.8 ± 242.8 | 947.4 ± 249.8 | −8.9 ± 2.3 | 355 ± 106.3 | 1234.7 ± 361.7 |
| 21 | 810.3 ± 301.9 | 2576.2 ± 283.7 | 1334 ± 363.1 | −8.9 ± 2.3 | 892.2 ± 305 | 1904.4 ± 448.1 |
| 22 | 775 ± 196.4 | 2949 ± 409.7 | 1421.8 ± 309.7 | 38 ± 27.8 | 577 ± 144.2 | 2330.6 ± 572.3 |
| 23 | 584.9 ± 240.2 | 1977.9 ± 361.4 | 1209.8 ± 405.1 | −7.3 ± 3.2 | 273.7 ± 93.3 | 1430.6 ± 363.9 |
| 24 | 485.4 ± 194.4 | 1819.8 ± 325.5 | 837.2 ± 261.4 | −3.4 ± 4.1 | 234.4 ± 71.1 | 943.9 ± 243.3 |
| 25 | 452.3 ± 175 | 2072 ± 405.7 | 957.1 ± 293.1 | −8.9 ± 2.3 | 163 ± 43.2 | 1341.2 ± 394.7 |
| 26 | 517.9 ± 179.1 | 2616 ± 567.5 | 1126.6 ± 289 | −8.3 ± 2.3 | 199.9 ± 89.2 | 1615.7 ± 385.6 |
| 27 | 592.8 ± 171.7 | 1838.3 ± 372.4 | 749.3 ± 170.4 | −7.3 ± 2.5 | 325.5 ± 98.7 | 1110.7 ± 308.8 |
| 28 | 793 ± 228.5 | 1795.4 ± 332.3 | 1068.7 ± 210.3 | 2.5 ± 4.1 | 553.1 ± 144.3 | 1480.8 ± 357.1 |
| 29 | 661.8 ± 199.9 | 2140.6 ± 599.3 | 1202.7 ± 292.2 | −8.7 ± 2.8 | 558.9 ± 279.2 | 1424.2 ± 408.6 |
| 30 | 529.1 ± 163.3 | 1528.2 ± 249.8 | 840.5 ± 218.3 | −8.9 ± 2.3 | 357.7 ± 149.4 | 1029.3 ± 335 |
| 31 | 464.8 ± 152.9 | 1332.2 ± 322.7 | 726.3 ± 194.3 | −8.9 ± 2.3 | 354.3 ± 158.6 | 884.4 ± 282 |
| 32 | 612.9 ± 175.3 | 1584.2 ± 390.2 | 1058.3 ± 219.8 | −8.7 ± 2.8 | 364.6 ± 149.8 | 1388.8 ± 467.3 |
| 33 | 1600.2 ± 416.7 | 2597.4 ± 367.9 | 2086.4 ± 414.8 | −6.3 ± 3.3 | 893.8 ± 266 | 2490.6 ± 416.4 |
| 34 | 2814.6 ± 376.2 | 2713.6 ± 380.8 | 1888.8 ± 499.4 | −7.5 ± 3.1 | 1288.9 ± 438.9 | 2428.1 ± 458.9 |
| 37 | 1245.9 ± 471.7 | 1877.7 ± 291.2 | 1606.6 ± 441.9 | 14.2 ± 13 | 1227.5 ± 348.1 | 1260.7 ± 342 |

[0624] Memory Phenotyping in Indian Rhesus Macaques

[0625] Rhesus macaque were immunized with ChAdV68.5WTnt.MAG25mer/VEE-MAG25mer srRNA heterologous prime/boost regimen with or without anti-CTLA4, and boosted again with ChAdV68.5WTnt.MAG25mer. Groups were assessed 11 months after the final ChAdV68 administration (study month 18). by ELISpot was performed as described. FIG. 38 and Table 43 shows cellular responses to six different Mamu-A*01 restricted epitopes as measured by ELISpot both pre-immunization (left panel) and after 18 months (right panel). The detection of responses to the restricted epitopes demonstrates antigen-specific memory responses were generated by ChAdV68/samRNA vaccine protocol.

[0626] To assess memory, CD8+ T-cells recognizing 4 different rhesus macaque Mamu-A*01 class I epitopes encoded in the vaccines were monitored using dual-color Mamu-A*01 tetramer labeling, with each antigen being represented by a unique double positive combination, and allowed the identification of all 4 antigen-specific populations within a single sample. Memory cell phenotyping was performed by co-staining with the cell surface markers CD45RA and CCR7. FIG. 39 and Table 44 shows the results of the combinatorial tetramer staining and CD45RA/CCR7 co-staining for memory T-cells recognizing four different Mamu-A*01 restricted epitopes. The T cell phenotypes were also assessed by flow cytometry. FIG. 40 shows the distribution of memory cell types within the sum of the four Mamu-A*01 tetramer+CD8+ T-cell populations at study month 18. Memory cells were characterized as follows: CD45RA+CCR7+=naïve, CD45RA+CCR7-=effector (Teff), CD45RA-CCR7+=central memory (Tcm), CD45RA-CCR7-=effector memory (Tem). Collectively, the results demonstrate that memory responses were detected at least one year following the last boost indicating long lasting immunity, including effector, central memory, and effector memory populations.

TABLE 43
Mean spot forming cells (SFC) per 10⁶ PBMCs for each animal at
both pre-prime and memory assessment time points (18 months).

| | Pre-prime baseline | | | | | | 18 months | | | | | |
|---|---|---|---|---|---|---|---|---|---|---|---|---|
| | Tat | Gag | Env | Env | Gag | Pol | Tat | Gag | Env | Env | Gag | Pol |
| Animal | TL8 | CM9 | TL9 | CL9 | LW9 | SV9 | TL8 | CM9 | TL9 | CL9 | LW9 | SV9 |
| 1 | 1.7 | 0.0 | 0.0 | 5.0 | 0.0 | 13.7 | 683.0 | 499.2 | 1100.3 | 217.5 | 47.7 | 205.3 |
| 2 | 0.0 | 0.0 | 0.0 | 0.2 | 0.1 | 0.0 | 773.4 | ND | 1500.0 | 509.3 | 134.5 | 242.5 |
| 3 | 0.0 | 0.0 | 6.7 | 6.8 | 10.2 | 3.3 | 746.3 | 167.5 | 494.1 | 402.8 | 140.6 | 376.0 |
| 4 | 0.0 | 0.0 | 0.0 | 0.0 | 0.0 | 0.0 | 47.6 | 1023.9 | 85.1 | 44.2 | 44.2 | 47.6 |
| 5 | 15.3 | 6.7 | 18.6 | 15.6 | 5.2 | 12.1 | 842.4 | 467.7 | 1500.0 | 805.9 | 527.8 | 201.8 |
| 6 | 3.1 | 0.0 | 0.0 | 15.5 | 6.9 | 5.3 | 224.3 | 720.3 | 849.0 | 296.9 | 32.4 | 121.9 |

ND = not determined due to technical exclusion

TABLE 44
Percent Mamu-A*01 tetramer positive out of live CD8+ cells

| Animal | Tat TL8 | Gag CM9 | Env TL9 | Env CL9 |
|---|---|---|---|---|
| 1 | 0.42 | 0.11 | 0.19 | 0.013 |
| 2 | 0.36 | 0.048 | 0.033 | 0.00834 |
| 3 | 0.97 | 0.051 | 0.35 | 0.048 |
| 4 | 0.46 | 0.083 | 0.17 | 0.028 |
| 5 | 0.77 | 0.45 | 0.14 | 0.2 |
| 6 | 0.71 | 0.16 | 0.17 | 0.04 |

### XIX. Identification of MHC/Peptide Target-Reactive T Cells and TCRs

[0627] Target reactive T cells and TCRs are identified for one or more of the antigen/HLA peptides pairs described in Table A, AACR GENIE Results, and/or Table 1.2 (see SEQ ID NO: 57-29,357 and below)

[0628] T cells can be isolated from blood, lymph nodes, or tumors of patients. T cells can be enriched for antigen-specific T cells, e.g., by sorting antigen-MHC tetramer binding cells or by sorting activated cells stimulated in an in vitro co-culture of T cells and antigen-pulsed antigen presenting cells. Various reagents are known in the art for antigen-specific T cell identification including antigen-loaded tetramers and other MHC-based reagents.

[0629] Antigen-relevant alpha-beta (or gamma-delta) TCR dimers can be identified by single cell sequencing of TCRs of antigen-specific T cells. Alternatively, bulk TCR sequencing of antigen-specific T cells can be performed and alpha-beta pairs with a high probability of matching can be determined using a TCR pairing method known in the art.

[0630] Alternatively or in addition, antigen-specific T cells can be obtained through in vitro priming of naïve T cells from healthy donors. T cells obtained from PBMCs, lymph nodes, or cord blood can be repeatedly stimulated by antigen-pulsed antigen presenting cells to prime differentiation of antigen-experienced T cells. TCRs can then be identified similarly as described above for antigen-specific T cells from patients.

### XX. Identification of Shared Neoantigens

[0631] We identified shared neoantigens using a series of steps. We obtained a list of common driver mutations classified as “confirmed somatic” from the COSMIC database. For each mutation, we generated candidate neoepitopes (8 to 11-mer peptides), used a TPM of 100, and ran our EDGE prediction model (a deep learning model trained on HLA presented peptides sequenced by MS/MS, as described in international patent application publications WO/2017/106638, WO/2018/195357, and WO/2018/208856, each herein incorporated by reference, in their entirety, for all purposes) across all modeled HLA alleles. Note that each peptide contained at least one mutant amino acid and was not a self-peptide. We then recorded any peptide with an HLA allele that has an EDGE score >0.001. The results are shown in Table A. A total of 10261 shared neoantigen sequences were thus identified and are described in SEQ ID NO: 10,755-21,015. The corresponding HLA allele(s) for each sequence are shown.

[0632] The initial list provided in Table A was further analyzed for level of neoantigen/HLA prevalence in the patient population. “Antigen/HLA prevalence” is calculated as the frequency of antigen (A) in a given population multiplied by the frequency of an HLA allele (B) in the given population. Antigen/HLA prevalence can also refer to mutation/HLA prevalence or neoantigen/HLA prevalence. As part of this analysis, for each mutation, its (A) frequency was obtained across common tumor types in TCGA and recorded at its highest frequency amongst tumor types. (B) For each HLA allele in EDGE, the HLA allele frequency TCGA (a predominantly Caucasian population) was recorded. HLA allele frequencies are described in more detail in Shukla, S. A. et al. (Nat. Biotechnol. 33, 1152-1158 2015), herein incorporated by reference for all purposes. The neoantigen/HLA prevalence was calculated as (A) multiplied by (B). Any neoepitope/HLA pair in Table A that is >0.1% prevalence using this methodology is identified with a “Most Common 1” (2387/10261).

[0633] Additionally, we characterized the prevalence of cancer driver mutations across a large cohort of patient samples representative of the advanced cancer patient population relevant for potential clinical studies. EDGE prediction was performed using the publicly-released AACR Genie v4.1 dataset, which has over 40,000 patients sequenced on NGS cancer gene panels ranging from 50 to 500 genes, from major academic cancer centers including Dana-Farber, Johns Hopkins, MD Anderson, MSKCC, and Vanderbilt. We selected base substitution and indel mutations in lung, microsatellite stable colon, and pancreatic cancers, and required coverage across multiple gene panels. We analyzed each neoantigen peptide paired with each of greater than 90 Class I HLA alleles covered in our EDGE antigen presentation prediction model and recorded the epitopes and corresponding HLA alleles with an EDGE probability of HLA presentation score of >0.001. We then determined the neoantigen/HLA prevalence of those peptide with an EDGE score >0.001, calculated as A*B, where A is the highest frequency of the mutation amongst the three tumor types and B is the HLA allele frequency. We used HLA allele frequencies representative of the population in the USA by examining HLA alleles from the TCGA population and tabulating the frequency for each HLA allele (Shukla, S. A. et al.). Peptides and corresponding HLA alleles that demonstrated a neoantigen/HLA prevalence >0.01% from the analysis are described in SEQ ID NO:21,016-29,357 and referred to as AACR GENIE Results.

### XXI. Validation of Shared Neoantigen Presentation

[0634] Mass spectrometry (MS) validation of candidate shared neoantigens was performed using targeted mass spectrometry methods. Nearly 500 frozen resected lung, colorectal and pancreatic tumor samples were homogenized and used for both RNASeq transcriptome sequencing and immunoprecipitation of the HLA/peptide complexes. A peptide target list was generated for each sample by analysis of the transcriptome, whereby recurrent cancer driver mutations, as defined in the AACR Genie v4.1 dataset, were identified and RNA expression levels assessed. The EDGE model of antigen presentation was then applied to the mutation sequence and expression data to prioritize peptides for the targeting list. The peptides from the HLA molecules were eluted and collected using size exclusion to isolate the presented peptides prior to mass spectrometry. Synthetic heavy labeled peptide with the same amino acid sequence was co-loaded with each sample for targeted mass spectrometry. Both coelution of the heavy labeled peptide with the experimental peptide and analysis of the fragmentation pattern we were used to validate a candidate epitope. Mass spectrometry analysis methods are described in more detail in Gillete et al. (Nat Methods. 2013 January; 10(1):28-34), herein incorporated by reference in its entirety for all purposes. Shared neoantigen epitopes from driver mutations validated in this manner with sufficient prevalence for further consideration are summarized in Table 32 below, along with sample tumor type and associated HLA alleles.

TABLE 32
Expression of MS-validated neoantigen
neoepitopes

| | | | | Peptide | |
|---|---|---|---|---|---|
| | | Pres- | | Elution | |
| Patient | Tumor | enting | Gene_ | Time | Targeted |
| ID | Type | HLA* | Mutation | (min.) | Peptide |
| A0000779 | CRC | HLA- | CTNNB1_ | 13 | (SEQ ID |
| | | A*01:01 | S45P | | NO: |
| | | | | | 29392) |
| A0000779 | CRC | HLA- | CTNNB1_ | 13.1 | TTAPPLSGK |
| | | B*57:01 | S45P | | (SEQ ID |
| | | | | | NO: |
| | | | | | 29393) |
| A0002082 | CRC | HLA- | CTNNB1_ | 17.2 | TTAPPLSGK |
| | | A*03:01 | S45P | | (SEQ ID |
| | | | | | NO: |
| | | | | | 29393) |
| A0001816 | Lung | HLA- | KRAS_ | 31.5 | VVVGAA |
| | | A*03:01 | G12A | | GVGKS |
| | | | | | (SEQ ID |
| | | | | | NO: |
| | | | | | 29394) |
| A0001877 | Lung | HLA- | KRAS_ | 46.7 | KLVVV |
| | | A*02:01 | G12C | | GACGV |
| | | | | | (SEQ ID |
| | | | | | NO: |
| | | | | | 29395) |
| A0002129 | Lung | HLA- | KRAS_ | 46.5 | KLVVVGACG |
| | | A*02:01 | G12C | | V (SEQ ID |
| | | | | | NO: 29395) |
| A0001947 | CRC | HLA- | KRAS_ | 12 | VVGADGVGK |
| | | A*11:01 | G12D | (pep. | (SEQ ID |
| | | | | #1) | NO: 29396) |
| A0001947 | CRC | HLA- | KRAS_ | 23.4 | VVVGADGVG |
| | | A*11:01 | G12D | (pep. | K (SEQ ID |
| | | | | #2) | NO: 29397) |
| A0001474 | Gastric | HLA- | KRAS_ | 30.4 | VVVGAVGVG |
| | | A*11:01 | G12V | | K (SEQ ID |
| | | | | | NO: 29398) |
| A0001711 | CRC | HLA- | KRAS_ | 31.7 | VVVGAVGVG |
| | | A*31:01 | G12V | | K (SEQ ID |
| | | | | | NO: 29398) |
| A0001730 | Pancre- | HLA- | KRAS_ | 18.4 | VVGAVGVGK |
| | atic | A*11:01 | G12V | (pep. | (SEQ ID |
| | | | | #1) | NO: 29399) |
| A0001730 | Pancre- | HLA- | KRAS_ | 31.6 | VVVGAVGVG |
| | atic | A*11:01 | G12V | (pep. | K (SEQ ID |
| | | | | #2) | NO: 29398) |
| A0001896 | Lung | HLA- | KRAS_ | 23.6 | AVGVGKSAL |
| | | C*01:02 | Gl2V | | (SEQ ID |
| | | | | | NO: 29400) |
| A0001966 | CRC | HLA- | KRAS_ | 27.8 | VVVGAVGVG |
| | | A*03:01 | G12V | | K (SEQ ID |
| | | | | | NO: 29398) |
| A0001973 | Ovaria | HLA- | TP53_ | 97.7 | TYSPALNNM |
| | | A*24:02 | K132N | | F |
| | | | | | (SEQ ID |
| | | | | | NO: 29401) |

*When the same peptide was predicted to be presented by multiple HLA alleles for a patient and detected by MS/MS, it was inferred to be presented by the highest scoring HLA allele by EDGE or both alleles if the scores were sufficiently close

[0635] We further evaluated the MS data with respect to mutations for which peptides were not detected in order to assess the value of narrowly targeting patients with specific HLAs for treatment, e.g., requiring patients to have at least one validated or predicted HLA allele that presents a neoantigen contained in a vaccine cassette.

[0636] For example, in the case of KRAS, we counted the number of patient samples in which KRAS epitope peptides for particular HLA alleles were detected or not detected. (When the same peptide was predicted to be presented by multiple HLA alleles for a patient and detected by MS/MS, it was inferred to be presented by the highest scoring HLA allele by EDGE or both alleles if the scores were sufficiently close). Results are presented in Table 33. Based on these results, several common HLA alleles are not expected to present a given KRAS neoantigen and these KRAS neoantigen/HLA pair can be excluded for purposes of selection criteria for a vaccine cassette design and patient selection in this instance. For example, Table 34 directed to a specific vaccine cassette (see Section XXII below) does not include predicted neoantigen/HLA pair G12D/A*02:01 on the basis that the peptide was not detected in 17 samples tested, and likewise did not include G12V/A*02:01 on the basis that the peptide was not detected in 9 samples tested. In contrast, neoantigen/HLA pair G12D/A*11:01 was considered validated on the basis that the peptide was detected in 1/5 samples tested, and likewise G12V/A*11:01 was considered validated on the basis that the peptide was detected in 2/6 samples tested.

[0637] These results highlight the importance of identifying the relevant neoantigen/HLA pairs for proper HLA type selection in patient selection for treatment with a shared neoantigen vaccine, such as that described in Table 34. Specifically, several common KRAS neoantigen/HLA pairs were excluded for purposes of selection criteria in this case as the MS data suggested a shared neoantigen vaccine would unlikely provide a benefit to a patient with that predicted KRAS neoantigen/HLA pair (e.g., G12D/A*02:01 or G12V/A*02:01).

TABLE 33

| | | | Number of |
|---|---|---|---|
| | | HLA Peptide | tested patient |
| | | confirmation | samples with |
| Gene_mutation | HLA | by MS/MS | MS/MS result |
| KRAS_G12A | HLA-A*02:01 | N | 2 |
| KRAS_G12A | HLA-A*02:06 | N | 1 |
| KRAS_G12A | HLA-A*03:01 | Y | 1 |
| KRAS_G12A | HLA-A*03:01 | N | 2 |
| KRAS_G12A | HLA-B*27:05 | N | 1 |
| KRAS_G12A | HLA-B*35:01 | N | 1 |
| KRAS_G12A | HLA-B*41:02 | N | 1 |
| KRAS_G12A | HLA-B*48:01 | N | 1 |
| KRAS_G12A | HLA-C*08:03 | N | 1 |
| KRAS_G12C | HLA-A*02:01 | Y | 2 |
| KRAS_G12C | HLA-A*02:01 | N | 2 |
| KRAS_G12C | HLA-A*03:01 | N | 8 |
| KRAS_G12C | HLA-A*03:02 | N | 1 |
| KRAS_G12C | HLA-A*68:01 | N | 1 |
| KRAS_G12C | HLA-B*27:05 | N | 1 |
| KRAS_G12D | HLA-A*02:01 | N | 17 |
| KRAS_G12D | HLA-A*02:05 | N | 2 |
| KRAS_G12D | HLA-A*03:01 | N | 4 |
| KRAS_G12D | HLA-A*11:01 | Y | 1 |
| KRAS_G12D | HLA-A*11:01 | N | 4 |
| KRAS_G12D | HLA-A*26:01 | N | 2 |
| KRAS_G12D | HLA-A*31:01 | N | 4 |
| KRAS_G12D | HLA-A*68:01 | N | 3 |
| KRAS_G12D | HLA-B*07:02 | N | 4 |
| KRAS_G12D | HLA-B*08:01 | N | 1 |
| KRAS_G12D | HLA-B*13:02 | N | 1 |
| KRAS_G12D | HLA-B*15:01 | N | 5 |
| KRAS_G12D | HLA-B*27:05 | N | 2 |
| KRAS_G12D | HLA-B*35:01 | N | 2 |
| KRAS_G12D | HLA-B*37:01 | N | 1 |
| KRAS_G12D | HLA-B*38:01 | N | 2 |
| KRAS_G12D | HLA-B*40:01 | N | 3 |
| KRAS_G12D | HLA-B*40:02 | N | 3 |
| KRAS_G12D | HLA-B*44:02 | N | 1 |
| KRAS_G12D | HLA-B*44:03 | N | 4 |
| KRAS_G12D | HLA-B*48:01 | N | 1 |
| KRAS_G12D | HLA-B*50:01 | N | 1 |
| KRAS_G12D | HLA-B*57:01 | N | 1 |
| KRAS_G12D | HLA-C*01:02 | N | 1 |
| KRAS_G12D | HLA-C*02:02 | N | 1 |
| KRAS_G12D | HLA-C*03:03 | N | 3 |
| KRAS_G12D | HLA-C*03:04 | N | 2 |
| KRAS_G12D | HLA-C*04:01 | N | 8 |
| KRAS_G12D | HLA-C*05:01 | N | 2 |
| KRAS_G12D | HLA-C*07:04 | N | 1 |
| KRAS_G12D | HLA-C*08:02 | N | 2 |
| KRAS_G12D | HLA-C*08:03 | N | 1 |
| KRAS_G12D | HLA-C*16:01 | N | 1 |
| KRAS_G12D | HLA-C*17:01 | N | 1 |
| KRAS_G12R | HLA-B*41:02 | N | 1 |
| KRAS_G12R | HLA-C*07:04 | N | 1 |
| KRAS_G12V | HLA-A*02:01 | N | 9 |
| KRAS_G12V | HLA-A*02:05 | N | 1 |
| KRAS_G12V | HLA-A*02:06 | N | 1 |
| KRAS_G12V | HLA-A*03:01 | Y | 1 |
| KRAS_G12V | HLA-A*03:01 | N | 4 |
| KRAS_G12V | HLA-A*11:01 | Y | 2 |
| KRAS_G12V | HLA-A*11:01 | N | 4 |
| KRAS_G12V | HLA-A*25:01 | N | 3 |
| KRAS_G12V | HLA-A*26:01 | N | 2 |
| KRAS_G12V | HLA-A*30:01 | N | 2 |
| KRAS_G12V | HLA-A*31:01 | Y | 1 |
| KRAS_G12V | HLA-A*31:01 | N | 1 |
| KRAS_G12V | HLA-A*32:01 | N | 1 |
| KRAS_G12V | HLA-A*68:02 | N | 1 |
| KRAS_G12V | HLA-B*07:02 | N | 6 |
| KRAS_G12V | HLA-B*08:01 | N | 1 |
| KRAS_G12V | HLA-B*13:02 | N | 2 |
| KRAS_G12V | HLA-B*14:02 | N | 1 |
| KRAS_G12V | HLA-B*15:01 | N | 2 |
| KRAS_G12V | HLA-B*27:05 | N | 2 |
| KRAS_G12V | HLA-B*39:01 | N | 1 |
| KRAS_G12V | HLA-B*40:01 | N | 1 |
| KRAS_G12V | HLA-B*40:02 | N | 1 |
| KRAS_G12V | HLA-B*41:02 | N | 1 |
| KRAS_G12V | HLA-B*44:05 | N | 1 |
| KRAS_G12V | HLA-B*50:01 | N | 1 |
| KRAS_G12V | HLA-B*51:01 | N | 1 |
| KRAS_G12V | HLA-C*01:02 | Y | 1 |
| KRAS_G12V | HLA-C*01:02 | N | 1 |
| KRAS_G12V | HLA-C*03:03 | N | 1 |
| KRAS_G12V | HLA-C*03:04 | N | 2 |
| KRAS_G12V | HLA-C*08:02 | N | 2 |
| KRAS_G12V | HLA-C*14:02 | N | 1 |
| KRAS_G12V | HLA-C*17:01 | N | 2 |
| KRAS_G13D | HLA-A*02:01 | N | 2 |
| KRAS_G13D | HLA-B*07:02 | N | 1 |
| KRAS_G13D | HLA-B*08:01 | N | 1 |
| KRAS_G13D | HLA-B*35:01 | N | 1 |
| KRAS_G13D | HLA-B*35:03 | N | 1 |
| KRAS_G13D | HLA-B*35:08 | N | 1 |
| KRAS_G13D | HLA-B*38:01 | N | 1 |
| KRAS_G13D | HLA-C*04:01 | N | 3 |
| KRAS_Q61H | HLA-A*01:01 | N | 1 |
| KRAS_Q61H | HLA-A*02:01 | N | 2 |
| KRAS_Q61H | HLA-A*23:01 | N | 2 |
| KRAS_Q61H | HLA-A*29:01 | N | 1 |
| KRAS_Q61H | HLA-A*30:02 | N | 1 |
| KRAS_Q61H | HLA-A*33:01 | N | 1 |
| KRAS_Q61H | HLA-A*68:01 | N | 1 |
| KRAS_Q61H | HLA-B*07:02 | N | 1 |
| KRAS_Q61H | HLA-B*08:01 | N | 1 |
| KRAS_Q61H | HLA-B*18:01 | N | 1 |
| KRAS_Q61H | HLA-B*35:01 | N | 1 |
| KRAS_Q61H | HLA-B*38:01 | N | 1 |
| KRAS_Q61H | HLA-B*40:01 | N | 1 |
| KRAS_Q61H | HLA-B*44:02 | N | 1 |
| KRAS_Q61H | HLA-C*03:04 | N | 1 |
| KRAS_Q61H | HLA-C*05:01 | N | 2 |
| KRAS_Q61H | HLA-C*08:02 | N | 1 |

### XXII. A. Selection of Shared Neoantigens for Vaccine Cassette

[0638] A vaccine cassette (“GO-005”) containing 20 shared neoantigens was constructed. Table 34 describes features of the neoantigens selected for the cassette. Shared neoantigens directly detected on the surface of tumor cells by mass spectrometry, as described above in Table 32, were included in the cassette and the HLA of the epitope was added to the eligible HLA list for the mutations. Neoantigens not independently verified as being presented in our assays were considered validated and added to the cassette if there was compelling literature evidence of tumor presentation (e.g., tumor-infiltrating lymphocytes (TIL) recognizing the neoantigen). KRAS_G12D presented by HLA-C*08:02 was considered validated and added based on literature evidence of adoptive cell therapy targeting this neoantigen causing tumor regression in a patient with CRC (Tran et al. N Engl J Med. 2016 Dec. 8; 375(23): 2255-2262.). Neoantigens with validated HLA alleles occupied 6 out of 20 slots.

[0639] Additional, rarer neoantigens predicted to be presented by tumor cells, but not yet validated by MS, were used to complement the initial set. Mutations with high EDGE scores were prioritized for inclusion as predicted neoantigens given the strong dependence we observed between EDGE score and probability of detection of candidate shared neoantigen peptides by targeted mass spectrometry (MS) validation experiments (see Section XXI above). Results showing the correlation between EDGE score and the probability of detection of candidate shared neoantigen peptides by targeted MS are shown in FIG. 25. Specifically, the remaining slots were filled with predicted neoantigens with an EDGE HLA presentation score of at least 0.3 and the highest cumulative neoantigen/HLA prevalence across NSCLC, CRC and Pancreatic cancer. For each slot in the cassette, combined HLA frequency was required to be at least 5-10% (e.g., there are 11% of the American population harboring HLA alleles B1501 or B1503). Of note, as KRAS and NRAS harbors the same cassette sequence around codons 12, 13, and 61, incorporation of prevalent NRAS mutations did not require additional slots. Validated HLAs, predicted HLAs with an EDGE score of at least 0.3, the mean EDGE score of the predicted HLAs, and neoantigen/HLA prevalence in the three cancer populations are also presented in Table 34.

TABLE 34
Selected Shared Neoantigens in Vaccine Cassette GO-005

| | | | | | Neoantigen/HLA | Neoantigen/HLA | Neoantigen/HLA |
|---|---|---|---|---|---|---|---|
| | | Validated | Predicted | Mean Predicted | Prevalence | Prevalence | Prevalence |
| Slot | Mutation | HLA | HLA | EDGE Score | in Lung | in CRC | in Pancreas |
| 1 | KRAS_G13D | — | C0802 | 0.306 | 0.07% | 0.39% | 0.06% |
| 2 | KRAS_Q61K | — | A0101 | 0.786 | 0.05% | 0.37% | 0.00% |
| | NRAS_Q61K | | | | | | |
| 3 | TP53_R249M | — | B3512, | 0.524 | 0.04% | 0.00% | 0.00% |
| | | | B3503, | | | | |
| | | | B3501 | | | | |
| 4 | CTNNB1_S45P | A0101, | A6801, | 0.871 | 0.13% | 0.00% | 0.00% |
| | | A0301, | A0302, | | | | |
| | | B5701 | A1101 | | | | |
| 5 | CTNNB1_S45F | — | A0301, | 0.478 | 0.08% | 0.27% | 0.00% |
| | | | A1101 | | | | |
| | | | A6801 | | | | |
| 6 | ERBB2_Y772_A775dup | — | B1801 | 0.758 | 0.11% | 0.00% | 0.00% |
| 7 | KRAS_G12D | A1101, | — | N/A - validated only | 0.79% | 2.28% | 5.45% |
| | NRAS_G12D | C0802 | | | | | |
| 8 | KRAS_Q61R | — | A0101 | 0.721 | 0.06% | 0.33% | 0.47% |
| | NRAS_Q61R | | | | | | |
| 9 | CTNNB1_T41A | — | A0301, | 0.597 | 0.00% | 0.27% | 0.00% |
| | | | A0302, | | | | |
| | | | A1101, | | | | |
| | | | B1510, | | | | |
| | | | C0303, | | | | |
| | | | C0304 | | | | |
| 10 | TP53_K132N | A2402 | A2301 | 0.659 | 0.04% | 0.00% | 0.00% |
| 11 | KRAS_G12A | A0301 | — | N/A - validated only | 0.58% | 0.49% | 0.00% |
| 12 | KRAS_Q61L | — | A0101 | 0.792 | 0.22% | 0.08% | 0.00% |
| | NRAS_Q61L | | | | | | |
| 13 | TP53_R213L | — | A0207, | 0.492 | 0.09% | 0.18% | 0.00% |
| | | | C0802, | | | | |
| | | | A0201 | | | | |
| 14 | BRAF_G466V | — | B1501, | 0.604 | 0.03% | 0.05% | 0.00% |
| | | | B1503 | | | | |
| 15 | KRAS_G12V | A0301, | A0302 | 0.759 | 2.56% | 3.43% | 9.89% |
| | | A1101, | | | | | |
| | | A3101, | | | | | |
| | | C0102 | | | | | |
| 16 | KRAS_Q61H | — | A0101 | 0.798 | 0.42% | 0.28% | 0.91% |
| | NRAS_Q61H | | | | | | |
| 17 | CTNNB1_S37F | — | A2301, | 0.554 | 0.29% | 0.00% | 0.00% |
| | | | A2402 | | | | |
| | | | B1510, | | | | |
| | | | B3906 | | | | |
| | | | C0501, | | | | |
| | | | C1402 | | | | |
| | | | C1403 | | | | |
| 18 | TP53_S127Y | — | A1101, | 0.522 | 0.04% | 0.00% | 0.00% |
| | | | A0301 | | | | |
| 19 | TP53_K132E | — | A2402, | 0.445 | 0.00% | 0.05% | 0.00% |
| | | | C1403, | | | | |
| | | | A2301 | | | | |
| 20 | KRAS_G12C | A0201 | — | N/A - validated only | 5.00% | 1.46% | 0.63% |
| | NRAS_G12C | | | | | | |

[0640] Additionally, we determined the total population of patients with at least one HLA allele identified (i.e., either validated or predicted) to present at least one shared neoantigen contained in the shared neoantigen vaccine GO-005 and compared it to the population of patients with the mutations agnostic of whether the patient had the identified allele. Given the GO-005 vaccine cassette from Table 34, to estimate the GO-005 targeted patient population, we collected patient mutation data from AACR Genie. As such patients do not have matching HLA alleles, we sampled HLA alleles from the TCGA population and paired it to the AACR Genie dataset. Then given a tumor type, any patient from AACR Genie with matching both mutation and HLA is labeled positive, and any patient that doesn't meet the criteria is labeled negative. The percent positives give the overall addressable patient population, per tumor type, in Table 35.

[0641] It can be readily appreciated from Table 35 that only a subset of patients who carry a particular mutation also carry the HLA allele likely to present that mutation as a neoantigen. Patients with the mutation, but without the appropriate HLA allele are less likely to benefit from therapy. As an example, whereas an estimated ˜60% of pancreatic cancer patients carry appropriate mutations/neoantigens, more than 2 out of 3 of these patients do not carry the corresponding HLA allele(s). Therefore, a vaccination strategy that considers the relevant mutation and HLA allele pairs as proposed will target just those patients who may benefit. Thus, consideration of epitope presentation by validated or high-scoring predicted HLA is an important step in determining the potential efficacy of a shared neoantigen vaccine.

TABLE 35
Neoantigen/HLA Prevalence in Target Populations

| | MSS CRC | Pancreas | Lung |
|---|---|---|---|
| GO-005 Targeted Patient | 9.0% | 17.4% | 10.6% |
| Population (cumulative | | | |
| neoantigen/HLA prevalence) | | | |
| HLA agnostic patient population | 35.1% | 60.8% | 32.0% |
| (mutation frequency only) | | | |

[0642] XXII. B. Shared Neoantigens Vaccine Cassette Sequence Selection

[0643] Shared neoantigen sequences for inclusion in a shared neoantigen vaccine were chosen.

[0644] For KRAS_G13D, the shared neoantigen-encoding sequence for inclusion in the vaccine was selected by reference to Table A or AACR GENIE Results, where each relevant sequence considered was selected by identifying all rows that list KRAS_G13D and C0802.

[0645] For KRAS_Q61K or NRAS_Q61K, the shared neoantigen-encoding sequence for inclusion in the vaccine was selected by reference to Table A or AACR GENIE Results, where each relevant sequence considered was selected by identifying all rows that list (1) KRAS_Q61K and A0101; or (2) NRAS_Q61K, and A0101.

[0646] For TP53_R249M, the shared neoantigen-encoding sequence for inclusion in the vaccine was selected by reference to Table A or AACR GENIE Results, where each relevant sequence considered was selected by identifying all rows that list TP53_R249M and at least one of B3512, B3503, and B3501.

[0647] For CTNNB1_S45P, the shared neoantigen-encoding sequence for inclusion in the vaccine was selected by reference to Table A 32, or AACR GENIE Results, where each relevant sequence considered was selected by identifying all rows that list CTNNB1_S45P and at least one of A0101, A0301, B5701, A6801, A0302, and A1101. For example, see relevant sequences shown in Table 32.

[0648] For CTNNB1_S45F, the shared neoantigen-encoding sequence for inclusion in the vaccine was selected by reference to Table A or AACR GENIE Results, where each relevant sequence considered was selected by identifying all rows that list CTNNB1_S45F and at least one of A0301, A1101, and A6801.

[0649] For ERBB2_Y772_A775dup, the shared neoantigen-encoding sequence for inclusion in the vaccine was selected by reference to Table A or AACR GENIE Results, where each relevant sequence considered was selected by identifying all rows that list ERBB2_Y772_A775dup and B1801.

[0650] For KRAS_G12D or NRAS_G12D, the shared neoantigen-encoding sequence for inclusion in the vaccine was selected by reference to Table A 32, or AACR GENIE Results, where each relevant sequence considered was selected by identifying all rows that list (1) KRAS_G12D and at least one of A1101 and C0802; or (2) NRAS_G12D and at least one of A1101 and C0802. For example, see relevant sequences shown in Table 32.

[0651] For KRAS_Q61R or NRAS_Q61R, the shared neoantigen-encoding sequence for inclusion in the vaccine was selected by reference to Table A or AACR GENIE Results, where each relevant sequence considered was selected by identifying all rows that list (1) KRAS_Q61R and A0101; or (2) NRAS_Q61R and A0101.

[0652] For CTNNB1_T41A, the shared neoantigen-encoding sequence for inclusion in the vaccine was selected by reference to Table A or AACR GENIE Results, where each relevant sequence considered was selected by identifying all rows that list CTNNB1_T41A and at least one of A0301, A0302, A1101, B1510, C0303, and C0304.

[0653] For TP53_K132N, the shared neoantigen-encoding sequence for inclusion in the vaccine was selected by reference to Table A 32, or AACR GENIE Results, where each relevant sequence considered was selected by identifying all rows that list TP53_K132N and at least one of A2402 and A2301. For example, see relevant sequence shown in Table 32.

[0654] For KRAS_G12A, the shared neoantigen-encoding sequence for inclusion in the vaccine was selected by reference to Table A 32, or AACR GENIE Results, where each relevant sequence considered was selected by identifying all rows that list KRAS_G12A and A0301. For example, see relevant sequence shown in Table 32.

[0655] For KRAS_Q61L or NRAS_Q61L, the shared neoantigen-encoding sequence for inclusion in the vaccine was selected by reference to Table A or AACR GENIE Results, where each relevant sequence considered was selected by identifying all rows that list (1) KRAS_Q61L and A0101; or (2) NRAS_Q61L and A0101.

[0656] For TP53_R213L, the shared neoantigen-encoding sequence for inclusion in the vaccine was selected by reference to Table A or AACR GENIE Results, where each relevant sequence considered was selected by identifying all rows that list TP53_R213L and at least one of A0207, C0802, and A0201.

[0657] For BRAF_G466V, the shared neoantigen-encoding sequence for inclusion in the vaccine was selected by reference to Table A or AACR GENIE Results, where each relevant sequence considered was selected by identifying all rows that list BRAF_G466V and at least one of B1501 and B1503.

[0658] For KRAS_G12V, the shared neoantigen-encoding sequence for inclusion in the vaccine was selected by reference to Table A 32, or AACR GENIE Results, where each relevant sequence considered was selected by identifying all rows that list KRAS_G12V and at least one of A0301, A1101, A3101, C0102, and A0302. For example, see relevant sequences shown in Table 32.

[0659] For KRAS_Q61H or NRAS_Q61H, the shared neoantigen-encoding sequence for inclusion in the vaccine was selected by reference to Table A or AACR GENIE Results, where each relevant sequence considered was selected by identifying all rows that list (1) KRAS_Q61H and A0101; or (2) NRAS_Q61H and A0101.

[0660] For CTNNB1_S37F, the shared neoantigen-encoding sequence for inclusion in the vaccine was selected by reference to Table A or AACR GENIE Results, where each relevant sequence considered was selected by identifying all rows that list CTNNB1_S37F and at least one of A2301, A2402, B1510, B3906, C0501, C1402, and C1403.

[0661] For TP53_S127Y, the shared neoantigen-encoding sequence for inclusion in the vaccine was selected by reference to Table A or AACR GENIE Results, where each relevant sequence considered was selected by identifying all rows that list TP53_S127Y and at least one of A1101 and A0301.

[0662] For TP53_K132E, the shared neoantigen-encoding sequence for inclusion in the vaccine was selected by reference to Table A or AACR GENIE Results, where each relevant sequence considered was selected by identifying all rows that list TP53_K132E and at least one of A2402, C1403, and A2301.

[0663] For KRAS_G12C or NRAS_G12C, the shared neoantigen-encoding sequence for inclusion in the vaccine was selected by reference to Table A 32, or AACR GENIE Results, where each relevant sequence considered was selected by identifying all rows that list (1) KRAS_G12C and A0201; or (2) NRAS_G12C and A0201. For example, see relevant sequences shown in Table 32.

### XXIII. Evaluation of T Cell Recognition of Shared Neoantigens

[0664] We evaluated whether neoantigens induce an immune response in patients. We obtained dissociated tumor cells from a patient with lung adenocarcinoma. Tumor cells were sequenced to determine the patient's HLA and identify mutations. The patient expressed HLA-A*1101 and we identified the KRAS_G12V mutation in the tumor. Simultaneously, we sorted and expanded CD45+ cells from the tumor which represent tumor infiltrating lymphocytes (TIL). Expanded TILs were stained with mutated peptide HLA-A*11:01 tetramers to assess immunogenicity of this mutation in the patient. FIG. 26 shows the flow cytometry gating strategy on CD8+ cells (left panel) and the staining of CD8+ cells by KRAS-G12V/HLA-A*11:01 tetramer (right panel). A large portion (greater than 66%) of CD8+ T cells demonstrate binding to the KRAS_G12V:HLA*1101 tetramer, indicating the ability of CD8+ T cells to recognize the neoantigen and indicating a pre-existing immune response to the neoantigen.

[0665] Additionally, we evaluated the presence of T cell precursors in the naïve T cell repertoire of healthy donors capable of recognizing a shared neoantigen. Peripheral blood mononuclear cells (PBMCs) were enriched for naïve CD8+ T cells and stained with MHC multimers presenting several of the shared neoantigen candidates present in the vaccine cassette GO-005: 2 KRAS_G12V peptides, a KRAS_G12C peptide, and CTNNB1_S45P peptide epitopes. HLA-peptide binding cells were sorted, expanded and their specificity for the neoantigen was confirmed. Precursors for all tested mutations were detected (Table 36). TCR sequencing of neoantigen-specific T cells was also performed. FIG. 27 illustrates the general TCR sequencing strategy and workflow. FIG. 28 shows a representive example of TCR sequencing strategy for KRAS-G12V/HLA-A*11:01 tetramer. TCR sequencing strategy revealed a polyclonal response, with median of 73 (range 25 to 987) clonotypes identified per peptide/MHC and per donor (Table 36). Thus, the the naïve T cell repertoire analysis suggests these neoantigens are expected to induce an immune response in select patients when administered by vaccination.

TABLE 36
Assessment of Neoantigen Reactive Naive T cells Precursors

| | | | Number of healthy donors | Number of |
|---|---|---|---|---|
| Mutation/ | | | with precursors | neoantigen-specific |
| neoantigen | Peptide | HLA-restriction | (% among donors tested) | clonotypes per donor |
| KRAS G12V | 1 | HLA-A*0301 | 1 (100%) | 46 |
| KRAS G12V | 2 | HLA-A*0301 | 2 (100%) | Donor 1: 25, Donor |
| | | | | 2: No sequence data |
| KRAS G12V | 1 | HLA-A*1101 | 2 (100%) | No sequence data |
| KRAS G12V | 2 | HLA-A*1101 | 2 (100%) | Donor 1: 100, Donor |
| | | | | 2: No sequence data |
| KRAS G12C | J | HLA-A*0201 | 1 (100%) | No sequence data |
| CTNNB1_S45P | 4 | HLA-A*0301 | 1 (100%) | 987 |

### XXIV. Selection of Shared Neoantigens and Patient Populations

[0666] One or more of the antigens provided in Table 34, Table A, Table 1.2, or the AACR GENIE Results described herein (SEQ ID NOs: 57-29,357) are used to formulate a vaccine composition as described herein. The vaccine is administered to a patient, e.g., to treat cancer. In certain instances the patient is selected, e.g., using a companion diagnostic or a commonly use cancer gene panel NGS assay such as FoundationOne, FoundationOne CDx, Guardant 360, Guardant OMNI, or MSK IMPACT. Exemplary patient selection criteria are described below. An exemplary shared neoantigen vaccine composition GO-005 targets the mutations described in Table 34.

### Patient Selection

[0667] Patient selection for shared neoantigen vaccination is performed by consideration of tumor gene expression, somatic mutation status, and patient HLA type. Specifically, a patient is considered eligible for the vaccine therapy if:

[0668] (a) the patient carries an HLA allele predicted or known to present an epitope included in a vaccine and the patient tumor expresses a gene with the epitope sequence, or

[0669] (b) the patient carries an HLA allele predicted or known to present an epitope included in a vaccine, and the patient tumor carries the mutation giving rise to the epitope sequence, or

[0670] (c) Same as (b), but also requiring that the patient tumor expresses the gene with the mutation above a certain threshold (e.g., 1 TPM or 10 TPM), or

[0671] (d) Same as (b), but also requiring that the patient tumor expresses the mutation above a certain threshold (e.g., at least 1 mutated read observed at the level of RNA)

[0672] (e) Same as (b), but also requiring both additional criteria in (c) and (d)

[0673] (f) Any of the above, but also optionally requiring that loss of the presenting HLA allele is not detected in the tumor

[0674] Gene expression is measured at the RNA or protein level by any of the established methods including RNASeq, microarray, PCR, Nanostring, ISH, Mass spectrometry, or IHC. Thresholds for positivity of gene expression is established by several methods, including: (1) predicted probability of presentation of the epitope by the HLA allele at various gene expression levels, (2) correlation of gene expression and HLA epitope presentation as measured by mass spectrometry, and/or (3) clinical benefits of vaccination attained for patients expressing the genes at various levels. Patient selection is further extended to require positivity for greater than 1 epitope, for examples, at least 2, 3, 4 or 5 epitopes included in the vaccine.

[0675] Somatic mutational status is assessed by any of the established methods, including exome sequencing (NGS DNASeq), targeted exome sequencing (panel of genes), transcriptome sequencing (RNASeq), Sanger sequencing, PCR-based genotyping assays (e.g., Taqman or droplet digital PCR), Mass-spectrometry based methods (e.g., by Sequenom), or any other method known to those skilled in the art.

[0676] Additional new shared neoantigens are identified using any of the methods described, e.g., by mass spectrometry. These newly identified shared neoantigens are incorporated into the vaccine cassettes described herein.

[0677] Previously validated neoantigens are additionally validated as being presented by additional HLA alleles and informs neoantigen selection for the vaccine cassette and/or expands the potential treatable population.

[0678] Inclusions of a new neoantigen enables the broadening of addressable tumor type (eg, EGFR mutated NSCLC) or inclusion of patients with a new tumor type.

### XXV. Identification of Shared Antigens

[0679] We identified shared antigen gene-based targets using three computational steps: First, we identified genes with low or no expression in most normal tissues using data available through the Genotype-Tissue Expression (GTEx) Project [1]. We obtained aggregated gene expression data from the Genotype-Tissue Expression (GTEx) Project (version V7p2). This dataset comprised greater than 11,000 post-mortem samples from greater than 700 individuals and greater than 50 different tissue types. Expression was measured using RNA-Seq and computationally processed according to the GTEx standard pipeline (https://www.gtexportal.org/home/documentationPage). Gene expression was calculated using the sum of isoform expressions that were calculated using RSEM v1.2.22 [2].

[0680] Next, we identified which of those genes are aberrantly expressed in cancer samples using data from The Cancer Genome Atlas (TCGA) Research Network: http://cancergenome.nih.gov/. We examined greater than 11,000 samples available from TCGA (Data Release 6.0).

[0681] Finally, in these genes, we identified which peptides are likely to be presented as cell surface antigens by MEW Class I proteins using a deep learning model trained on HLA presented peptides sequenced by MS/MS, as described in international patent application no. PCT/US2016/067159, herein incorporated by reference, in its entirety, for all purposes.

[0682] To identify the common tumor antigens (CTAs; shared antigens), we sought to define criteria to exclude genes that were expressed in normal tissue that were strict enough to ensure tumor specificity, but would account for potential artifacts such as read misalignment. Genes were eligible for inclusion as CTAs if they met the following criteria: The median GTEx expression in each organ that was a part of the brain, heart, or lung was less than 0.1 transcripts per million (TPM) with no one sample exceeding 5 TPM. The median GTEx expression in other essential organs was less than 2 TPM with no one sample exceeding 10 TPM. Expression was ignored for organs classified as non-essential (testis, thyroid, and minor salivary gland). Genes were considered expressed in tumor samples if they had expression in TCGA of greater than 10 TPM in at least 30 samples. Based on literature review, we also added the genes MAGEB4 and MAGEB6.

[0683] We also added the gene CTAG1A/CTAG1B (NY-ESO-1). As it's expression is not accurately quantified using the computational methodology in TCGA Data Release 6.0, we relied on the RSEM calculations available in the TCGA legacy archive (https://portal.gdc.cancer.gov/legacy-archive) which accounts for multiply mapped reads.

[0684] We then examined the distribution of the expression of the remaining genes across TCGA samples. When we examined the known CTAs, e.g. the MAGE family of genes, we observed that the expression of these genes in log space was generally characterized by a bimodal distribution. This distribution included a left mode around a lower expression value and a right mode (or thick tail) at a higher expression level. This expression pattern is consistent with a biological model in which some minimal expression can be detected at baseline in many samples and higher expression of the gene is observed in a subset of tumors experiencing epigenetic dysregulation. We reviewed the distribution of expression of each gene across TCGA samples and discarded those where we observed only a unimodal distribution with no significant right-hand tail. A small number of genes were eliminated by hand curation, for example, if they were likely to be expressed in a tissue not available in GTEx. This resulted in a set of 59 genes. See Table 46. In Table 46 an X is used to indicate cancers in which the gene is expressed at greater than 10 TPM in at least 1% of cases.

TABLE 46
Analysis of Expression Levels in Cancer Subtypes

| | | | | | | Cervical | | | | | | | | |
|---|---|---|---|---|---|---|---|---|---|---|---|---|---|---|
| | | | | | | Squa- | | | | | | | | |
| | | | | | | mous | | | | | Head | | | Kid- |
| | | | Blad- | | | Cell | | | | | and | | Kid- | ney |
| | | | der | | | Carci- | | | | | Neck | | ney | Renal |
| | Acute | Adre- | Uro- | | | noma and | | | | Glio- | Squa- | Kid- | Renal | Papil- |
| | Mye- | nocor- | the- | Brain | Breast | Endo- | Chol- | Colon | Esoph- | blas- | mous | ney | Clear | lary |
| | loid | tical | lial | Lower | Invasive | cervical | angio- | Adeno- | ageal | toma | Cell | Chro- | Cell | Cell |
| | Leuke- | Carci- | Carci- | Grade | Carci- | Adenocar- | carci- | carci- | Carci- | Multi- | Carci- | mo- | Carci- | Carci- |
| Gene | mia | noma | noma | Glioma | noma | cinoma | noma | noma | noma | forme | noma | phobe | noma | noma |
| ACTL8 | | X | X | | X | X | | X | X | | X | | | |
| ADAM2 | | | | | X | | | | | | | X | | |
| ADAM7 | | | | | | | | | | | | | | X |
| AMELX | | | | | | | | X | | | | | | |
| BPIFA2 | | X | | | | | | | | | X | X | | |
| CRYGC | | | | | | | | | | | | | | |
| CT83 | | X | X | | X | X | X | X | X | | X | | | X |
| CTAG1A/ | | X | X | | X | X | X | X | X | | X | | | X |
| CTAG1B | | | | | | | | | | | | | | |
| CTCFL | | | | | | X | | | X | | X | | | |
| DCAF12L1 | | | | | | X | | | | | | | X | X |
| DCAF4L2 | | X | X | | | | X | | X | | X | | | |
| DEFB126 | | X | X | | | | | | X | | | | | |
| DMRT1 | | | | | | X | X | | | | | | | |
| DPPA2 | | | X | | | | | | X | | X | | | X |
| FMR1NB | | | | | | | | | X | | | | | |
| FTHL17 | | | X | | X | X | | | X | | X | | | |
| GAGE1 | | | X | | | | | | | | | | | |
| GAGE12J | | | X | | | | | | X | | | | | |
| GAGE2A | | | X | | | X | | | X | | X | X | | X |
| GLYATL3 | | | | | X | X | | | | | | | | |
| GPRC6A | | X | | | | | | | | | | X | X | |
| GSG1L2 | | | | | | | | | | | | | X | |
| IFNK | X | | X | | | | | X | | | X | | | |
| IL22RA2 | X | | | | X | X | | | X | | X | | | |
| INSL4 | | | | | | X | | X | | | | | | |
| INSL6 | X | | X | | X | X | | | | | | | | |
| KCNU1 | | | | | | | | | | | | X | | |
| LIN28A | | | | | X | | X | | | | | | | |
| LUZP4 | | | | | | | | | | | | | | |
| MAGEA1 | | X | X | | X | X | X | X | X | | X | X | | |
| MAGEA10 | | | X | | X | X | | | X | | X | | | |
| MAGEA11 | | | X | | | X | | X | X | | X | | | |
| MAGEA3 | | X | X | | X | X | X | X | X | | X | X | | X |
| MAGEA4 | | | X | | X | X | | X | X | | X | | | |
| MAGEA6 | | X | X | | X | X | X | X | X | | X | X | | X |
| MAGEA9 | | | X | | | | | | X | | X | | | |
| MAGEB1 | | | | | | | | | X | | X | | | |
| MAGEB2 | | X | X | | X | X | | X | X | | X | X | X | |
| MAGEB4 | | | | | X | | | | | | | | | |
| MAGEB6 | | X | | | | | | | | | | | | |
| MAGEC1 | | X | X | | X | | | | X | | X | X | | |
| MAGEC2 | | X | X | | X | X | | | X | X | X | X | X | X |
| MORC1 | | X | | | | | | | | | | | | |
| PAGE1 | | | X | | | X | | | X | | | X | | X |
| PAGE5 | | X | X | | X | | X | | X | | X | X | | X |
| PASD1 | | | X | | | | | | X | | | | | |
| PRDM7 | | | | | | | | | | | | | | |
| PROKR1 | | | | | | | | | | | | | | |
| R3HDML | | | | | | | | X | | | | | | |
| SLC7A13 | | | | | | | | | | | | X | X | X |
| SMC1B | X | | X | | X | X | | | X | | X | X | | |
| SMR3A | | | | | | | | | | | X | | | |
| SSX1 | | | X | | X | | X | | X | | | X | | |
| STRA8 | | | X | | X | X | | | X | | X | | X | X |
| TFDP3 | | | | | X | | | | | | | | | |
| XAGE3 | | | X | | | | | | | | | | | |
| XAGE5 | | | | | | | | | | | | | | |
| ZFP42 | | | X | | X | X | X | | X | | X | | | |
| ZNF560 | X | X | X | X | | | | | | X | | | | |

| | | | | Lymphoid | | | | | | | |
|---|---|---|---|---|---|---|---|---|---|---|---|
| | | | Lung | Neoplasm | | | | Pheochro- | | | |
| | Liver | Lung | Squa- | Diffuse | | Ovarian | | mocytoma | | | |
| | Hepato- | Adeno- | mous | Large | Meso- | Serous | Pancreatic | and | Prostate | Rectum | |
| | cellular | car- | Cell | B-cell | the- | Cystadeno- | Adenocar- | Paragan- | Adenocar- | Adenocar- | Sar- |
| Gene | Carcinoma | cinoma | Carcinoma | Lymphoma | lioma | carcinoma | cinoma | glioma | cinoma | cinoma | coma |
| ACTL8 | X | X | X | X | X | X | X | X | | X | X |
| ADAM2 | | | | | | | | | X | | |
| ADAM7 | | | | | | | | | X | | |
| AMELX | | | | | | | | | | X | X |
| BPIFA2 | X | X | X | | X | | X | | | | |
| CRYGC | | | | | | X | | | | | |
| CT83 | X | X | X | | | X | X | | | X | |
| CTAG1A/ | X | X | X | X | X | X | | X | X | X | X |
| CTAG1B | | | | | | | | | | | |
| CTCFL | | | X | X | | X | | | | | |
| DCAF12L1 | | | | | | X | | | | | X |
| DCAF4L2 | X | X | X | | | | | | | | |
| DEFB126 | | | X | | | X | | | | | |
| DMRT1 | | | X | X | | X | | | | | |
| DPPA2 | | X | X | | | X | | | | | |
| FMR1NB | | X | | | | | | | | | |
| FTHL17 | X | X | X | | | | | | | | |
| GAGE1 | X | | X | | | X | | | | | X |
| GAGE12J | | | X | | | X | | | | | |
| GAGE2A | X | X | X | | X | X | | | | | X |
| GLYATL3 | | | X | | | | X | | X | | |
| GPRC6A | | | | | | | | | | | |
| GSG1L2 | | | | | | | | | | | |
| IFNK | | X | | | | | | | | | |
| IL22RA2 | | X | X | X | | | | | | | |
| INSL4 | | X | X | | | | X | | | | |
| INSL6 | X | X | | | | X | | | | | |
| KCNU1 | X | | | | | | | | | | |
| LIN28A | | | | | | | | | | | |
| LUZP4 | | | | | | | | | | | |
| MAGEA1 | X | X | X | X | X | X | X | X | | X | X |
| MAGEA10 | | X | X | | | X | | | | X | X |
| MAGEA11 | X | X | X | | | X | | | | X | X |
| MAGEA3 | X | X | X | | X | X | X | X | X | X | X |
| MAGEA4 | X | X | X | X | | X | | | | X | X |
| MAGEA6 | X | X | X | | X | X | X | X | | X | X |
| MAGEA9 | | | X | X | | | | | | | |
| MAGEB1 | X | X | X | X | | | | | | | X |
| MAGEB2 | X | X | X | X | X | X | | | | X | X |
| MAGEB4 | | | | | | | | | | | |
| MAGEB6 | | | | | | | | | | | |
| MAGEC1 | X | X | X | X | | X | | | | X | X |
| MAGEC2 | X | X | X | | | X | | X | X | X | X |
| MORC1 | | | | | | | | | | | |
| PAGE1 | X | X | X | | X | X | | | | X | X |
| PAGE5 | X | X | X | X | | X | | X | | | X |
| PASD1 | | X | X | | X | X | | | | | |
| PRDM7 | | | | | | | | | | | |
| PROKR1 | | | | | | | | X | | | |
| R3HDML | | | | | | | | | | X | |
| SLC7A13 | | | | | | | | | | | |
| SMC1B | X | X | X | X | | X | | | | | X |
| SMR3A | X | | | | | | | | | | |
| SSX1 | X | X | X | | | X | | | | | X |
| STRA8 | | X | X | | | X | | | | | |
| TFDP3 | X | | | | | | | | | | |
| XAGE3 | | | X | | | X | | | | | X |
| XAGE5 | X | | X | | | | | | | | X |
| ZFP42 | | X | X | | X | X | | | | | |
| ZNF560 | | X | X | | X | X | | X | X | | X |

| | | | | | | Uterine | | |
|---|---|---|---|---|---|---|---|---|
| | Skin | | | Thy- | | Corpus | | |
| | Cuta- | Stomach | | roid | Uterine | Endo- | Uveal | Total |
| | neous | Adenocar- | Thy- | Carci- | Carcino- | metrial | Mela- | Indi- |
| Gene | Melanoma | cinoma | moma | noma | sarcoma | Carcinoma | noma | cations |
| ACTL8 | X | X | | | X | X | X | 22 |
| ADAM2 | | | | | | | | 3 |
| ADAM7 | | | | | | | | 2 |
| AMELX | | | | | X | | | 4 |
| BPIFA2 | | X | | | X | | | 10 |
| CRYGC | | | | | | X | | 2 |
| CT83 | X | X | | | X | X | | 19 |
| CTAG1A/ | X | X | | | X | X | X | 24 |
| CTAG1B | | | | | | | | |
| CTCFL | X | X | | | X | X | | 10 |
| DCAF12L1 | X | | | | X | X | | 8 |
| DCAF4L2 | | X | | | X | | | 10 |
| DEFB126 | | | | | | X | | 6 |
| DMRT1 | | | | | X | X | | 7 |
| DPPA2 | | | | | | X | | 8 |
| FMR1NB | | | | | X | | | 3 |
| FTHL17 | | | | | | | | 8 |
| GAGE1 | X | X | | | X | | | 8 |
| GAGE12J | X | X | | | | | | 6 |
| GAGE2A | X | X | | | X | X | | 16 |
| GLYATL3 | | | | | X | X | | 7 |
| GPRC6A | | | | | | | | 3 |
| GSG1L2 | | | | | | | | 1 |
| IFNK | | | | | | | | 5 |
| IL22RA2 | | | | | | | | 8 |
| INSL4 | | | | | X | X | | 7 |
| INSL6 | | X | | | X | X | | 10 |
| KCNU1 | X | | | | | | | 3 |
| LIN28A | X | | | | X | X | | 5 |
| LUZP4 | X | | | | X | | | 2 |
| MAGEA1 | X | X | X | | X | X | | 24 |
| MAGEA10 | X | X | | | X | X | | 14 |
| MAGEA11 | X | X | | | X | X | | 15 |
| MAGEA3 | X | X | | | X | X | | 24 |
| MAGEA4 | X | X | X | | X | X | | 18 |
| MAGEA6 | X | X | | | X | X | | 23 |
| MAGEA9 | | | | | X | | | 6 |
| MAGEB1 | X | X | | | X | | | 10 |
| MAGEB2 | X | X | | | X | X | | 21 |
| MAGEB4 | | | | | | | | 1 |
| MAGEB6 | | | | | | | | 1 |
| MAGEC1 | X | X | | | X | X | | 17 |
| MAGEC2 | X | X | | | X | X | | 22 |
| MORC1 | X | | | | | | | 2 |
| PAGE1 | X | X | | | X | X | | 16 |
| PAGE5 | X | X | | | X | X | | 19 |
| PASD1 | X | X | | | X | X | | 10 |
| PRDM7 | X | | | | | | | 1 |
| PROKR1 | | | | | X | | | 2 |
| R3HDML | | | | | | | | 2 |
| SLC7A13 | | | | | | | | 3 |
| SMC1B | X | | | | | X | | 15 |
| SMR3A | | | | X | | X | | 4 |
| SSX1 | X | X | | X | X | | X | 15 |
| STRA8 | | X | | | | X | | 12 |
| TFDP3 | | | X | | | | | 3 |
| XAGE3 | X | | | | X | X | | 7 |
| XAGE5 | X | | | | X | | | 5 |
| ZFP42 | X | X | | | X | X | | 14 |
| ZNF560 | X | | X | X | X | | X | 17 |

[0685] To identify peptides that are likely to be presented as cell surface antigens by MHC Class I proteins, we used a sliding window to parse each of these proteins into its constituent 8-11 amino acid sequences. We processed these peptides and their flanking sequences with the HLA peptide presentation deep learning model to calculate the probability of presentation of each peptide at the 99.9^{th} percentile expression level observed for this gene in TCGA. We considered a peptide likely to be presented (i.e., a candidate target) if its quantile normalized probability of presentation calculated by our model was greater than 0.001.

[0686] To prioritize genes that are likely to be relevant to a given indication, we selected genes where the gene is expressed at a level of at least 10 TPM in at least 0.98% of cancer cases.

[0687] The results are shown in Table 1.2. A total of 10698 shared antigen sequences were identified. The corresponding HLA allele(s) for each sequence are shown.

[0688] Table A

[0689] Refer to Sequence Listing, SEQ ID NOS. 10,755-21,015. For clarity, each peptide that was predicted to associate with a given HLA allele peptide with an HLA allele with an EDGE score >0.001 is assigned a unique SEQ ID. NO. Each of the above sequence identifiers is associated with the amino acid sequence of the peptide, HLA subtype, the gene name corresponding to the peptide, the mutation associated with the peptide, and whether the prevelance of the peptide:HLA pair was greater than 0.1% (noted as “1”) or less than 0.1% (noted as “0”).

[0690] Table A is disclosed in its entirety in U.S. Provisional Application No. 62/675,559, filed Dec. May 23, 2018, which is hereby incorporated by reference in its entirety.

[0691] AACR GENIE Results

[0692] Refer to Sequence Listing, SEQ ID NOS. 21,016-29,357. For clarity, each peptide that was predicted to associate with a given HLA allele peptide with an HLA allele with an EDGE score >0.001 and prevalence >0.1% is assigned a unique SEQ ID. NO. Each of the above sequence identifiers is associated with the the gene name and mutations corresponding to the peptide, HLA subtype, and amino acid sequence of the peptide.

[0693] Table 1.2

[0694] Refer to Sequence Listing, SEQ ID NOS. 57-10,754. Predicted shared antigens associated with gene expressed at a level of at least 10 TPM in at least 0.98% of cancer cases. Each of the above sequence identifiers is associated with the the gene name, amino acid sequence of the peptide, Ensembl ID, and corresponding HLA allele(s).

[0695] Certain Sequences

[0696] Vectors, cassettes, and antibodies referred to herein are described below and referred to by SEQ ID NO.

Tremelimumab VL (SEQ ID NO: 16)
Tremelimumab VH (SEQ ID NO: 17)
Tremelimumab VH CDR1 (SEQ ID NO: 18)
Tremelimumab VH CDR2 (SEQ ID NO: 19)
Tremelimumab VH CDR3 (SEQ ID NO: 20)
Tremelimumab VL CDR1 (SEQ ID NO: 21)
Tremelimumab VL CDR2 (SEQ ID NO: 22)
Tremelimumab VL CDR3 (SEQ ID NO: 23)
Durvalumab (MEDI4736) VL (SEQ ID NO: 24)
MEDI4736 VH (SEQ ID NO: 25)
MEDI4736 VH CDR1 (SEQ ID NO: 26)
MEDI4736 VH CDR2 (SEQ ID NO: 27)
MEDI4736 VH CDR3 (SEQ ID NO: 28)
MEDI4736 VL CDR1 (SEQ ID NO: 29)
MEDI4736 VL CDR2 (SEQ ID NO: 30)
MEDI4736 VL CDR3 (SEQ ID NO: 31)
UbA76-25merPDTT nucleotide (SEQ ID NO: 32)
UbA76-25merPDTT polypeptide (SEQ ID NO: 33)
MAG-25merPDTT nucleotide (SEQ ID NO: 34)
MAG-25merPDTT polypeptide (SEQ ID NO: 35)
Ub7625merPDTT_NoSFL nucleotide (SEQ ID NO: 36)
Ub7625merPDTT_NoSFL polypeptide (SEQ ID NO: 37)
ChAdV68.5WTnt.MAG25mer (SEQ ID NO: 2); AC_000011.1 with E1 (nt 577 to 3403)
and E3 (nt 27,125- 31,825) sequences deleted; corresponding ATCC VR-594
nucleotides substituted at five positions; model neoantigen cassette under
the control of the CMV promoter/enhancer inserted in place of deleted E1;
SV40 polyA 3′ of cassette
Venezuelan equine encephalitis virus [VEE] (SEQ ID NO: 3) GenBank: L01442.2
VEE-MAG25mer (SEQ ID NO: 4); contains MAG-25merPDTT nucleotide
(bases 30-1755)
Venezuelan equine encephalitis virus strain TC-83 [TC-83] (SEQ ID NO: 5)
GenBank: L01443.1
VEE Delivery Vector (SEQ ID NO: 6); VEE genome with nucleotides 7544-11175
deleted [alphavirus structural proteins removed]
TC-83 Delivery Vector(SEQ ID NO: 7); TC-83 genome with nucleotides 7544-
11175 deleted [alphavirus structural proteins removed]
VEE Production Vector (SEQ ID NO: 8); VEE genome with nucleotides 7544-
11175 deleted, plus 5′ T7-promoter, plus 3′ restriction sites
TC-83 Production Vector(SEQ ID NO: 9); TC-83 genome with nucleotides 7544-
11175 deleted, plus 5′ T7-promoter, plus 3′ restriction sites
VEE-UbAAY (SEQ ID NO: 14); VEE delivery vector with MHC class I mouse tumor
epitopes SIINFEKL (SEQ ID NO: 29362) and AH1-A5 inserted
VEE-Luciferase (SEQ ID NO: 15); VEE delivery vector with luciferase gene
inserted at 7545
ubiquitin (SEQ ID NO: 38)>UbG76 0-228
Ubiquitin A76 (SEQ ID NO: 39)>UbA76 0-228
HLA-A2 (MHC class I) signal peptide (SEQ ID NO: 40)>MHC SignalPep 0-78
HLA-A2 (MHC class I) Trans Membrane domain (SEQ ID NO: 41)>HLA A2 TM Domain
0-201
IgK Leader Seq (SEQ ID NO: 42)>IgK Leader Seq 0-60
Human DC-Lamp (SEQ ID NO: 43)>HumanDCLAMP 0-3178
Mouse LAMP1 (SEQ ID NO: 44)>MouseLamp1 0-1858
Human Lamp1 cDNA (SEQ ID NO: 45)>Human Lamp1 0-2339
Tetanus toxoid nulceic acid sequence (SEQ ID NO: 46)
Tetanus toxoid amino acid sequence (SEO ID NO: 47)
PADRE nulceotide sequence (SEQ ID NO: 48)
PADRE amino acid sequence (SEQ ID NO: 49)
WPRE (SEQ ID NO: 50)>WPRE 0-593
IRES (SEQ ID NO: 51)>eGFP_IRES_SEAP_Insert 1746-2335
GFP (SEQ ID NO: 52)
SEAP (SEQ ID NO: 53)
Firefly Luciferase (SEQ ID NO: 54)
FMDV 2A (SEQ ID NO: 55)

### REFERENCES

[0697] 1. Desrichard, A., Snyder, A. & Chan, T. A. Cancer Neoantigens and Applications for Immunotherapy. Clin. Cancer Res. Off. J. Am. Assoc. Cancer Res. (2015). doi: 10.1158/1078-0432. CCR-14-3175
[0698] 2. Schumacher, T. N. & Schreiber, R. D. Neoantigens in cancer immunotherapy. Science 348, 69-74 (2015).
[0699] 3. Gubin, M. M., Artyomov, M. N., Mardis, E. R. & Schreiber, R. D. Tumor neoantigens: building a framework for personalized cancer immunotherapy. J. Clin. Invest. 125, 3413-3421 (2015).
[0700] 4. Rizvi, N. A. et al. Cancer immunology. Mutational landscape determines sensitivity to PD-1 blockade in non-small cell lung cancer. Science 348, 124-128 (2015).
[0701] 5. Snyder, A. et al. Genetic basis for clinical response to CTLA-4 blockade in melanoma. N Engl. J. Med. 371, 2189-2199 (2014).
[0702] 6. Carreno, B. M. et al. Cancer immunotherapy. A dendritic cell vaccine increases the breadth and diversity of melanoma neoantigen-specific T cells. Science 348, 803-808 (2015).
[0703] 7. Tran, E. et al. Cancer immunotherapy based on mutation-specific CD4+ T cells in a patient with epithelial cancer. Science 344, 641-645 (2014).
[0704] 8. Hacohen, N. & Wu, C. J.-Y. United States Patent Application: 20110293637—COMPOSITIONS AND METHODS OF IDENTIFYING TUMOR SPECIFIC NEOANTIGENS. (A1). at <http://appft1.uspto.gov/netacgi/nph-Parser?Sect1=PTO1&Sect2=HITOFF&d=PG01&p=1&u=/netahtml/PTO/srchnum.html&r=1& f=G&1=50&s1=20110293637.PGNR.>
[0705] 9. Lundegaard, C., Hoof, I., Lund, O. & Nielsen, M. State of the art and challenges in sequence based T-cell epitope prediction. Immunome Res. 6 Suppl 2, S3 (2010).
[0706] 10. Yadav, M. et al. Predicting immunogenic tumour mutations by combining mass spectrometry and exome sequencing. Nature 515, 572-576 (2014).
[0707] 11. Bassani-Sternberg, M., Pletscher-Frankild, S., Jensen, L. J. & Mann, M. Mass spectrometry of human leukocyte antigen class I peptidomes reveals strong effects of protein abundance and turnover on antigen presentation. Mol. Cell. Proteomics MCP 14, 658-673 (2015).
[0708] 12. Van Allen, E. M. et al. Genomic correlates of response to CTLA-4 blockade in metastatic melanoma. Science 350, 207-211 (2015).
[0709] 13. Yoshida, K. & Ogawa, S. Splicing factor mutations and cancer. Wiley Interdiscip. Rev. RNA 5, 445-459 (2014).
[0710] 14. Cancer Genome Atlas Research Network. Comprehensive molecular profiling of lung adenocarcinoma. Nature 511, 543-550 (2014).
[0711] 15. Rajasagi, M. et al. Systematic identification of personal tumor-specific neoantigens in chronic lymphocytic leukemia. Blood 124, 453-462 (2014).
[0712] 16. Downing, S. R. et al. U.S. patent application Ser. No. 01/202,08706—OPTIMIZATION OF MULTIGENE ANALYSIS OF TUMOR SAMPLES. (A1). at <http://appft1.uspto.gov/netacgi/nph-Parser?Sect1=PTO1&Sect2=HITOFF&d=PG01&p=1&u=/netahtml/PTO/srchnum.html&r=1& f=G&1=50&s1=20120208706.PGNR.>
[0713] 17. Target Capture for NextGen Sequencing—IDT. at <http://www.idtdna.com/pages/products/nextgen/target-capture>
[0714] 18. Shukla, S. A. et al. Comprehensive analysis of cancer-associated somatic mutations in class I HLA genes. Nat. Biotechnol. 33, 1152-1158 (2015).
[0715] 19. Cieslik, M. et al. The use of exome capture RNA-seq for highly degraded RNA with application to clinical cancer sequencing. Genome Res. 25, 1372-1381 (2015).
[0716] 20. Bodini, M. et al. The hidden genomic landscape of acute myeloid leukemia: subclonal structure revealed by undetected mutations. Blood 125, 600-605 (2015).
[0717] 21. Saunders, C. T. et al. Strelka: accurate somatic small-variant calling from sequenced tumor-normal sample pairs. Bioinforma. Oxf. Engl. 28, 1811-1817 (2012).
[0718] 22. Cibulskis, K. et al. Sensitive detection of somatic point mutations in impure and heterogeneous cancer samples. Nat. Biotechnol. 31, 213-219 (2013).
[0719] 23. Wilkerson, M. D. et al. Integrated RNA and DNA sequencing improves mutation detection in low purity tumors. Nucleic Acids Res. 42, e107 (2014).
[0720] 24. Mose, L. E., Wilkerson, M. D., Hayes, D. N., Perou, C. M. & Parker, J. S. ABRA: improved coding indel detection via assembly-based realignment. Bioinforma. Oxf. Engl. 30, 2813-2815 (2014).
[0721] 25. Ye, K., Schulz, M. H., Long, Q., Apweiler, R. & Ning, Z. Pindel: a pattern growth approach to detect break points of large deletions and medium sized insertions from paired-end short reads. Bioinforma. Oxf. Engl. 25, 2865-2871 (2009).
[0722] 26. Lam, H. Y. K. et al. Nucleotide-resolution analysis of structural variants using BreakSeq and a breakpoint library. Nat. Biotechnol. 28, 47-55 (2010).
[0723] 27. Frampton, G. M. et al. Development and validation of a clinical cancer genomic profiling test based on massively parallel DNA sequencing. Nat. Biotechnol. 31, 1023-1031 (2013).
[0724] 28. Boegel, S. et al. HLA typing from RNA-Seq sequence reads. Genome Med. 4, 102 (2012).
[0725] 29. Liu, C. et al. ATHLATES: accurate typing of human leukocyte antigen through exome sequencing. Nucleic Acids Res. 41, e142 (2013).
[0726] 30. Mayor, N. P. et al. HLA Typing for the Next Generation. PloS One 10, e0127153 (2015).
[0727] 31. Roy, C. K., Olson, S., Graveley, B. R., Zamore, P. D. & Moore, M. J. Assessing long-distance RNA sequence connectivity via RNA-templated DNA-DNA ligation. eLife 4, (2015).
[0728] 32. Song, L. & Florea, L. CLASS: constrained transcript assembly of RNA-seq reads. BMC Bioinformatics 14 Suppl 5, S14 (2013).
[0729] 33. Maretty, L., Sibbesen, J. A. & Krogh, A. Bayesian transcriptome assembly. Genome Biol. 15, 501 (2014).
[0730] 34. Pertea, M. et al. StringTie enables improved reconstruction of a transcriptome from RNA-seq reads. Nat. Biotechnol. 33, 290-295 (2015).
[0731] 35. Roberts, A., Pimentel, H., Trapnell, C. & Pachter, L. Identification of novel transcripts in annotated genomes using RNA-Seq. Bioinforma. Oxf. Engl. (2011). doi:10.1093/bioinformatics/btr355
[0732] 36. Vitting-Seerup, K., Porse, B. T., Sandelin, A. & Waage, J. spliceR: an R package for classification of alternative splicing and prediction of coding potential from RNA-seq data. BMC Bioinformatics 15, 81 (2014).
[0733] 37. Rivas, M. A. et al. Human genomics. Effect of predicted protein-truncating genetic variants on the human transcriptome. Science 348, 666-669 (2015).
[0734] 38. Skelly, D. A., Johansson, M., Madeoy, J., Wakefield, J. & Akey, J. M. A powerful and flexible statistical framework for testing hypotheses of allele-specific gene expression from RNA-seq data. Genome Res. 21, 1728-1737 (2011).
[0735] 39. Anders, S., Pyl, P. T. & Huber, W. HTSeq—a Python framework to work with high-throughput sequencing data. Bioinforma. Oxf. Engl. 31, 166-169 (2015).
[0736] 40. Furney, S. J. et al. SF3B1 mutations are associated with alternative splicing in uveal melanoma. Cancer Discov. (2013). doi:10.1158/2159-8290.CD-13-0330
[0737] 41. Zhou, Q. et al. A chemical genetics approach for the functional assessment of novel cancer genes. Cancer Res. (2015). doi:10.1158/0008-5472.CAN-14-2930
[0738] 42. Maguire, S. L. et al. SF3B1 mutations constitute a novel therapeutic target in breast cancer. J. Pathol. 235, 571-580 (2015).
[0739] 43. Carithers, L. J. et al. A Novel Approach to High-Quality Postmortem Tissue Procurement: The GTEx Project. Biopreservation Biobanking 13, 311-319 (2015).
[0740] 44. Xu, G. et al. RNA CoMPASS: a dual approach for pathogen and host transcriptome analysis of RNA-seq datasets. PloS One 9, e89445 (2014).
[0741] 45. Andreatta, M. & Nielsen, M. Gapped sequence alignment using artificial neural networks: application to the MHC class I system. Bioinforma. Oxf. Engl. (2015). doi:10.1093/bioinformatics/btv639
[0742] 46. Jørgensen, K. W., Rasmussen, M., Buus, S. & Nielsen, M. NetMHCstab-predicting stability of peptide-MHC-I complexes; impacts for cytotoxic T lymphocyte epitope discovery. Immunology 141, 18-26 (2014).
[0743] 47. Larsen, M. V. et al. An integrative approach to CTL epitope prediction: a combined algorithm integrating MHC class I binding, TAP transport efficiency, and proteasomal cleavage predictions. Eur. J. Immunol. 35, 2295-2303 (2005).
[0744] 48. Nielsen, M., Lundegaard, C., Lund, O. & Keşmir, C. The role of the proteasome in generating cytotoxic T-cell epitopes: insights obtained from improved predictions of proteasomal cleavage. Immunogenetics 57, 33-41 (2005).
[0745] 49. Boisvert, F.-M. et al. A Quantitative Spatial Proteomics Analysis of Proteome Turnover in Human Cells. Mol. Cell. Proteomics 11, M111.011429-M111.011429 (2012).
[0746] 50. Duan, F. et al. Genomic and bioinformatic profiling of mutational neoepitopes reveals new rules to predict anticancer immunogenicity. J. Exp. Med. 211, 2231-2248 (2014).
[0747] 51. Janeway's Immunobiology: 9780815345312: Medicine & Health Science Books @ Amazon.com. at <http://www.amazon.com/Janeways-Immunobiology-Kenneth-Murphy/dp/0815345313>
[0748] 52. Calis, J. J. A. et al. Properties of MHC Class I Presented Peptides That Enhance Immunogenicity. PLoS Comput. Biol. 9, e1003266 (2013).
[0749] 53. Zhang, J. et al. Intratumor heterogeneity in localized lung adenocarcinomas delineated by multiregion sequencing. Science 346, 256-259 (2014)
[0750] 54. Walter, M. J. et al. Clonal architecture of secondary acute myeloid leukemia. N. Engl. J. Med. 366, 1090-1098 (2012).
[0751] 55. Hunt D F, Henderson R A, Shabanowitz J, Sakaguchi K, Michel H, Sevilir N, Cox A L, Appella E, Engelhard V H. Characterization of peptides bound to the class I MHC molecule HLA-A2.1 by mass spectrometry. Science 1992. 255: 1261-1263.
[0752] 56. Zarling A L, Polefrone J M, Evans A M, Mikesh L M, Shabanowitz J, Lewis S T, Engelhard V H, Hunt D F. Identification of class I MHC-associated phosphopeptides as targets for cancer immunotherapy. Proc Natl Acad Sci USA. 2006 Oct. 3; 103(40):14889-94.
[0753] 57. Bassani-Sternberg M, Pletscher-Frankild S, Jensen L J, Mann M. Mass spectrometry of human leukocyte antigen class I peptidomes reveals strong effects of protein abundance and turnover on antigen presentation. Mol Cell Proteomics. 2015 March; 14(3):658-73. doi: 10.1074/mcp.M114.042812.
[0754] 58. Abelin J G, Trantham P D, Penny S A, Patterson A M, Ward S T, Hildebrand W H, Cobbold M, Bai D L, Shabanowitz J, Hunt D F. Complementary IMAC enrichment methods for HLA-associated phosphopeptide identification by mass spectrometry. Nat Protoc. 2015 September; 10(9):1308-18. doi: 10.1038/nprot.2015.086. Epub 2015 Aug. 6
[0755] 59. Barnstable C J, Bodmer W F, Brown G, Galfre G, Milstein C, Williams A F, Ziegler A. Production of monoclonal antibodies to group A erythrocytes, HLA and other human cell surface antigens-new tools for genetic analysis. Cell. 1978 May; 14(1):9-20.
[0756] 60. Goldman J M, Hibbin J, Kearney L, Orchard K, Th'ng K H. HLA-DR monoclonal antibodies inhibit the proliferation of normal and chronic granulocytic leukaemia myeloid progenitor cells. Br J Haematol. 1982 November; 52(3):411-20.
[0757] 61. Eng J K, Jahan T A, Hoopmann M R. Comet: an open-source MS/MS sequence database search tool. Proteomics. 2013 January; 13(1):22-4. doi: 10.1002/pmic.201200439. Epub 2012 Dec. 4.
[0758] 62. Eng J K, Hoopmann M R, Jahan T A, Egertson J D, Noble W S, MacCoss M J. A deeper look into Comet—implementation and features. J Am Soc Mass Spectrom. 2015 November; 26(11):1865-74. doi: 10.1007/s13361-015-1179-x. Epub 2015 Jun. 27.
[0759] 63. Lukas Käll, Jesse Canterbury, Jason Weston, William Stafford Noble and Michael J. MacCoss. Semi-supervised learning for peptide identification from shotgun proteomics datasets. Nature Methods 4:923-925, November 2007
[0760] 64. Lukas Käll, John D. Storey, Michael J. MacCoss and William Stafford Noble. Assigning confidence measures to peptides identified by tandem mass spectrometry. Journal of Proteome Research, 7(1):29-34, January 2008
[0761] 65. Lukas Käll, John D. Storey and William Stafford Noble. Nonparametric estimation of posterior error probabilities associated with peptides identified by tandem mass spectrometry. Bioinformatics, 24(16):i42-i48, August 2008
[0762] 66. Kinney R M, B J Johnson, V L Brown, D W Trent. Nucleotide Sequence of the 26 S mRNA of the Virulent Trinidad Donkey Strain of Venezuelan Equine Encephalitis Virus and Deduced Sequence of the Encoded Structural Proteins. Virology 152 (2), 400-413. 1986 Jul. 30.
[0763] 67. Jill E Slansky, Frederique M Rattis, Lisa F Boyd, Tarek Fahmy, Elizabeth M Jaffee, Jonathan P Schneck, David H Margulies, Drew M Pardoll. Enhanced Antigen-Specific Antitumor Immunity with Altered Peptide Ligands that Stabilize the MHC-Peptide-TCR Complex. Immunity, Volume 13, Issue 4, 1 Oct. 2000, Pages 529-538.
[0764] 68. A Y Huang, P H Gulden, A S Woods, M C Thomas, C D Tong, W Wang, V H Engelhard, G Pasternack, R Cotter, D Hunt, D M Pardoll, and E M Jaffee. The immunodominant major histocompatibility complex class I-restricted antigen of a murine colon tumor derives from an endogenous retroviral gene product. Proc Natl Acad Sci USA.; 93(18): 9730-9735, 1996 Sep. 3.
[0765] 69. JOHNSON, BARBARA J. B., RICHARD M. KINNEY, CRYSTLE L. KOST AND DENNIS W. TRENT. Molecular Determinants of Alphavirus Neurovirulence: Nucleotide and Deduced Protein Sequence Changes during Attenuation of Venezuelan Equine Encephalitis Virus. J Gen Virol 67:1951-1960, 1986.
[0766] 70. Aarnoudse, C. A., Kruse, M., Konopitzky, R., Brouwenstijn, N., and Schrier, P. I. (2002). TCR reconstitution in Jurkat reporter cells facilitates the identification of novel tumor antigens by cDNA expression cloning. Int J Cancer 99, 7-13.
[0767] 71. Alexander, J., Sidney, J., Southwood, S., Ruppert, J., Oseroff, C., Maewal, A., Snoke, K., Serra, H. M., Kubo, R. T., and Sette, A. (1994). Development of high potency universal DR-restricted helper epitopes by modification of high affinity DR-blocking peptides. Immunity 1, 751-761.
[0768] 72. Banu, N., Chia, A., Ho, Z. Z., Garcia, A. T., Paravasivam, K., Grotenbreg, G. M., Bertoletti, A., and Gehring, A. J. (2014). Building and optimizing a virus-specific T cell receptor library for targeted immunotherapy in viral infections. Scientific Reports 4, 4166.
[0769] 73. Cornet, S., Miconnet, I., Menez, J., Lemonnier, F., and Kosmatopoulos, K. (2006). Optimal organization of a polypeptide-based candidate cancer vaccine composed of cryptic tumor peptides with enhanced immunogenicity. Vaccine 24, 2102-2109.
[0770] 74. Depla, E., van der Aa, A., Livingston, B. D., Crimi, C., Allosery, K., de Brabandere, V., Krakover, J., Murthy, S., Huang, M., Power, S., et al. (2008). Rational design of a multiepitope vaccine encoding T-lymphocyte epitopes for treatment of chronic hepatitis B virus infections. Journal of Virology 82, 435-450.
[0771] 75. Ishioka, G. Y., Fikes, J., Hermanson, G., Livingston, B., Crimi, C., Qin, M., del Guercio, M. F., Oseroff, C., Dahlberg, C., Alexander, J., et al. (1999). Utilization of MHC class I transgenic mice for development of minigene DNA vaccines encoding multiple HLA-restricted CTL epitopes. J Immunol 162, 3915-3925.
[0772] 76. Janetzki, S., Price, L., Schroeder, H., Britten, C. M., Welters, M. J. P., and Hoos, A. (2015). Guidelines for the automated evaluation of Elispot assays. Nat Protoc 10, 1098-1115.
[0773] 77. Lyons, G. E., Moore, T., Brasic, N., Li, M., Roszkowski, J. J., and Nishimura, M. I. (2006). Influence of human CD8 on antigen recognition by T-cell receptor-transduced cells. Cancer Res 66, 11455-11461.
[0774] 78. Nagai, K., Ochi, T., Fujiwara, H., An, J., Shirakata, T., Mineno, J., Kuzushima, K., Shiku, H., Melenhorst, J. J., Gostick, E., et al. (2012). Aurora kinase A-specific T-cell receptor gene transfer redirects T lymphocytes to display effective antileukemia reactivity. Blood 119, 368-376.
[0775] 79. Panina-Bordignon, P., Tan, A., Termijtelen, A., Demotz, S., Corradin, G., and Lanzavecchia, A. (1989). Universally immunogenic T cell epitopes: promiscuous binding to human MHC class II and promiscuous recognition by T cells. Eur J Immunol 19, 2237-2242.
[0776] 80. Vitiello, A., Marchesini, D., Furze, J., Sherman, L. A., and Chesnut, R. W. (1991). Analysis of the HLA-restricted influenza-specific cytotoxic T lymphocyte response in transgenic mice carrying a chimeric human-mouse class I major histocompatibility complex. J Exp Med 173, 1007-1015.
[0777] 81. Yachi, P. P., Ampudia, J., Zal, T., and Gascoigne, N. R. J. (2006). Altered peptide ligands induce delayed CD8-T cell receptor interaction—a role for CD8 in distinguishing antigen quality. Immunity 25, 203-211.
[0778] 82. Pushko P, Parker M, Ludwig G V, Davis N L, Johnston R E, Smith J F. Replicon-helper systems from attenuated Venezuelan equine encephalitis virus: expression of heterologous genes in vitro and immunization against heterologous pathogens in vivo. Virology. 1997 Dec. 22; 239(2):389-401.
[0779] 83. Strauss, J H and E G Strauss. The alphaviruses: gene expression, replication, and evolution. Microbiol Rev. 1994 September; 58(3): 491-562.
[0780] 84. Rhême C, Ehrengruber M U, Grandgirard D. Alphaviral cytotoxicity and its implication in vector development. Exp Physiol. 2005 January; 90(1):45-52. Epub 2004 Nov. 12.
[0781] 85. Riley, Michael K. II, and Wilfred Vermerris. Recent Advances in Nanomaterials for Gene Delivery-A Review. Nanomaterials 2017, 7(5), 94.
[0782] 86. Frolov I, Hardy R, Rice C M. Cis-acting RNA elements at the 5′ end of Sindbis virus genome RNA regulate minus- and plus-strand RNA synthesis. RNA. 2001 November; 7(11):1638-51.
[0783] 87. Jose J, Snyder J E, Kuhn R J. A structural and functional perspective of alphavirus replication and assembly. Future Microbiol. 2009 September; 4(7):837-56.
[0784] 88. Bo Li and C. olin N. Dewey. RSEM: accurate transcript quantification from RNA-Seq data with or without a reference genome. BMC Bioinformatics, 12:323, August 2011
[0785] 89. Hillary Pearson, Tariq Daouda, Diana Paola Granados, Chantal Durette, Eric Bonneil, Mathieu Courcelles, Anja Rodenbrock, Jean-Philippe Laverdure, Caroline Cote, Sylvie Mader, Sébastien Lemieux, Pierre Thibault, and Claude Perreault. MHC class I-associated peptides derive from selective regions of the human genome. The Journal of Clinical Investigation, 2016,
[0786] 90. Juliane Liepe, Fabio Marino, John Sidney, Anita Jeko, Daniel E. Bunting, Alessandro Sette, Peter M. Kloetzel, Michael P. H. Stumpf, Albert J. R. Heck, Michele Mishto. A large fraction of HLA class I ligands are proteasome-generated spliced peptides. Science, 21, October 2016.
[0787] 91. Mommen G P., Marino, F., Meiring H D., Poelen, M C., van Gaans-van den Brink, J A., Mohammed S., Heck A J., and van Els C A. Sampling From the Proteome to the Human Leukocyte Antigen-DR (HLA-DR) Ligandome Proceeds Via High Specificity. Mol Cell Proteomics 15(4): 1412-1423, April 2016.
[0788] 92. Sebastian Kreiter, Mathias Vormehr, Niels van de Roemer, Mustafa Diken, Martin Lower, Jan Diekmann, Sebastian Boegel, Barbara Schrörs, Fulvia Vascotto, John C. Castle, Arbel D. Tadmor, Stephen P. Schoenberger, Christoph Huber, Özlem Türeci, and Ugur Sahin. Mutant MHC class II epitopes drive therapeutic immune responses to caner. Nature 520, 692-696, April 2015.
[0789] 93. Tran E., Turcotte S., Gros A., Robbins P. F., Lu Y. C., Dudley M. E., Wunderlich J. R., Somerville R. P., Hogan K., Hinrichs C. S., Parkhurst M. R., Yang J. C., Rosenberg S. A. Cancer immunotherapy based on mutation-specific CD4+ T cells in a patient with epithelial cancer. Science 344(6184) 641-645, May 2014.
[0790] 94. Andreatta M., Karosiene E., Rasmussen M., Stryhn A., Buus S., Nielsen M. Accurate pan-specific prediction of peptide-MHC class II binding affinity with improved binding core identification. Immunogenetics 67(11-12) 641-650, November 2015.
[0791] 95. Nielsen, M., Lund, O. NN-align. An artificial neural network-based alignment algorithm for MHC class II peptide binding prediction. BMC Bioinformatics 10:296, September 2009.
[0792] 96. Nielsen, M., Lundegaard, C., Lund, O. Prediction of MHC class II binding affinity using SMM-align, a novel stabilization matrix alignment method. BMC Bioinformatics 8:238, July 2007.
[0793] 97. Zhang, J., et al. PEAKS DB: de novo sequencing assisted database search for sensitive and accurate peptide identification. Molecular & Cellular Proteomics. 11(4):1-8. Jan. 2, 2012.
[0794] 98. Jensen, Kamilla Kjaergaard, et al. “Improved Methods for Prediting Peptide Binding Affinity to MHC Class II Molecules.” Immunology, 2018, doi:10.1111/imm.12889.
[0795] 99. Carter, S. L., Cibulskis, K., Helman, E., McKenna, A., Shen, H., Zack, T., Laird, P. W., Onofrio, R. C., Winckler, W., Weir, B. A., et al. (2012). Absolute quantification of somatic DNA alterations in human cancer. Nat. Biotechnol. 30, 413-421
[0796] 100. McGranahan, N., Rosenthal, R., Hiley, C. T., Rowan, A. J., Watkins, T. B. K., Wilson, G. A., Birkbak, N.J., Veeriah, S., Van Loo, P., Herrero, J., et al. (2017). Allele-Specific HLA Loss and Immune Escape in Lung Cancer Evolution. Cell 171, 1259-1271.e11.
[0797] 101. Shukla, S. A., Rooney, M. S., Rajasagi, M., Tiao, G., Dixon, P. M., Lawrence, M. S., Stevens, J., Lane, W. J., Dellagatta, J. L., Steelman, S., et al. (2015). Comprehensive analysis of cancer-associated somatic mutations in class I HLA genes. Nat. Biotechnol. 33, 1152-1158.
[0798] 102. Van Loo, P., Nordgard, S. H., Lingjærde, O. C., Russnes, H. G., Rye, I. H., Sun, W., Weigman, V. J., Marynen, P., Zetterberg, A., Naume, B., et al. (2010). Allele-specific copy number analysis of tumors. Proc. Natl. Acad. Sci. U.S.A 107, 16910-16915.
[0799] 103. Van Loo, P., Nordgard, S. H., Lingjærde, O. C., Russnes, H. G., Rye, I. H., Sun, W., Weigman, V. J., Marynen, P., Zetterberg, A., Naume, B., et al. (2010). Allele-specific copy number analysis of tumors. Proc. Natl. Acad. Sci. U.S.A 107, 16910-16915.

What is claimed is:

1. A composition for delivery of an antigen expression system, comprising:
the antigen expression system,
wherein the antigen expression system comprises one or more vectors,
the one or more vectors comprising:
(a) a vector backbone, wherein the backbone comprises:
(i) at least one promoter nucleotide sequence, and
(ii) at least one polyadenylation (poly(A)) sequence; and
(b) a antigen cassette, wherein the antigen cassette comprises:
(i) at least one antigen-encoding nucleic acid sequence, comprising:
(I) at least one tumor-specific MHC class I antigen-encoding nucleic acid sequence, comprising:
(A) a MHC class I epitope encoding nucleic acid sequence, wherein the MHC class I epitope encoding nucleic acid sequence encodes a MHC class I epitope selected from the group consisting of SEQ ID NO: 57-29,357,
(B) optionally, a 5′ linker sequence, and
(C) optionally, a 3′ linker sequence;
(ii) optionally, a second promoter nucleotide sequence operably linked to the antigen-encoding nucleic acid sequence; and
(iii) optionally, at least one MHC class II antigen-encoding nucleic acid sequence;
(iv) optionally, at least one nucleic acid sequence encoding a GPGPG amino acid linker sequence (SEQ ID NO:56); and
(v) optionally, at least one second poly(A) sequence, wherein the second poly(A) sequence is a native poly(A) sequence or an exogenous poly(A) sequence to the vector backbone.

2. A composition for delivery of a antigen expression system, comprising:
the antigen expression system,
wherein the antigen expression system comprises one or more vectors,
the one or more vectors comprising:
(a) a vector backbone, wherein the backbone comprises:
(i) at least one promoter nucleotide sequence, and
(ii) at least one polyadenylation (poly(A)) sequence; and
(b) an antigen cassette, wherein the antigen cassette comprises:
(i) at least one antigen-encoding nucleic acid sequence, comprising:
(I) at least 10, 11, 12, 13, 14, 15, 16, 17, 18, 19, or 20 tumor-specific MHC class I antigen-encoding nucleic acid sequences linearly linked to each other, comprising:
(A) a KRAS_G12A MHC class I epitope encoding nucleic acid sequence, wherein the KRAS_G12A MHC class I epitope encoding nucleic acid sequence encodes a MHC class I comprising the sequence of SEQ ID NO: 19,831,
(B) a KRAS_G12C MHC class I epitope encoding nucleic acid sequence, wherein the KRAS_G12C MHC class I epitope encoding nucleic acid sequence encodes a MHC class I epitope comprising the sequence of SEQ ID NO: 14,954,
(C) a KRAS_G12D MHC class I epitope encoding nucleic acid sequence, wherein the KRAS_G12D MHC class I epitope encoding nucleic acid sequence encodes a MHC class I epitope selected from the group consisting of SEQ ID NO: 19,749 and 19,865, and
(D) a KRAS_G12V MHC class I epitope encoding nucleic acid sequence, wherein the KRAS_G12V MHC class I epitope encoding nucleic acid sequence encodes a MHC class I epitope selected from the group consisting of SEQ ID NO: 19,976; 19,979; 19,779; 11,495; and 19,974,
wherein each of the tumor-specific MHC class I antigen-encoding nucleic acid sequences comprises a class I epitope encoding nucleic acid sequence, optionally wherein each MHC I epitope encoding nucleic acid sequence encodes a MHC class I epitope selected from the group consisting of SEQ ID NO: 57-29,357, and
wherein each of the tumor-specific MHC class I antigen-encoding nucleic acid sequences comprises;
(A) optionally, a 5′ linker sequence, and
(B) optionally, a 3′ linker sequence;
(ii) optionally, a second promoter nucleotide sequence operably linked to the antigen-encoding nucleic acid sequence; and
(iii) optionally, at least one MHC class II antigen-encoding nucleic acid sequence;
(iv) optionally, at least one nucleic acid sequence encoding a GPGPG amino acid linker sequence (SEQ ID NO:56); and
(v) optionally, at least one second poly(A) sequence, wherein the second poly(A) sequence is a native poly(A) sequence or an exogenous poly(A) sequence to the vector backbone.

3. A composition for delivery of an antigen expression system, comprising:
the antigen expression system,
wherein the antigen expression system comprises one or more vectors,
the one or more vectors comprising:
(a) a vector backbone, wherein the backbone comprises:
(i) at least one promoter nucleotide sequence, and
(ii) at least one polyadenylation (poly(A)) sequence; and
(b) an antigen cassette, wherein the antigen cassette comprises:
(i) at least one antigen-encoding nucleic acid sequence, comprising:
(I) at least 20 tumor-specific MHC class I antigen-encoding nucleic acid sequences linearly linked to each other, comprising:
(A) a KRAS_G12A MHC class I epitope encoding nucleic acid sequence, wherein the KRAS_G12A MHC class I epitope encoding nucleic acid sequence encodes a MHC class I comprising the sequence of SEQ ID NO: 19,831,
(B) a KRAS_G12C MHC class I epitope encoding nucleic acid sequence, wherein the KRAS_G12C MHC class I epitope encoding nucleic acid sequence encodes a MHC class I epitope comprising the sequence of SEQ ID NO: 14,954,
(C) a KRAS_G12D MHC class I epitope encoding nucleic acid sequence, wherein the KRAS_G12D MHC class I epitope encoding nucleic acid sequence encodes a MHC class I epitope selected from the group consisting of SEQ ID NO: 19,749 and 19,865, and
(D) a KRAS_G12V MHC class I epitope encoding nucleic acid sequence, wherein the KRAS_G12V MHC class I epitope encoding nucleic acid sequence encodes a MHC class I epitope selected from the group consisting of SEQ ID NO: 19,976; 19,979; 19,779; 11,495; and 19,974,
(E) a KRAS_G13D MHC class I epitope encoding nucleic acid sequence,
(F) a KRAS_Q61K MHC class I epitope encoding nucleic acid sequence,
(G) a TP53_R249M MHC class I epitope encoding nucleic acid sequence,
(H) a CTNNB1 _S45P MHC class I epitope encoding nucleic acid sequence,
(I) a CTNNB1 _S45F MHC class I epitope encoding nucleic acid sequence,
(J) a ERBB2 _Y772 _A775dup MHC class I epitope encoding nucleic acid sequence,
(K) a KRAS_Q61R MHC class I epitope encoding nucleic acid sequence,
(L) a CTNNB1 _T41A MHC class I epitope encoding nucleic acid sequence,
(M) a TP53 _K132N MHC class I epitope encoding nucleic acid sequence,
(N) a KRAS_Q61L MHC class I epitope encoding nucleic acid sequence,
(O) a TP53 _R213L MHC class I epitope encoding nucleic acid sequence,
(P) a BRAF_G466V MHC class I epitope encoding nucleic acid sequence,
(Q) a KRAS_Q61H MHC class I epitope encoding nucleic acid sequence,
(R) a CTNNB1 _S37F MHC class I epitope encoding nucleic acid sequence,
(S) a TP53 _S127Y MHC class I epitope encoding nucleic acid sequence,
(T) a TP53 _K132E MHC class I epitope encoding nucleic acid sequence,
(U) a KRAS_G12C MHC class I epitope encoding nucleic acid sequence, and
wherein each of the tumor-specific MHC class I antigen-encoding nucleic acid sequences comprises;
(A) optionally, a 5′ linker sequence, and
(B) optionally, a 3′ linker sequence;
(ii) optionally, a second promoter nucleotide sequence operably linked to the antigen-encoding nucleic acid sequence; and
(iii) optionally, at least one MHC class II antigen-encoding nucleic acid sequence;
(iv) optionally, at least one nucleic acid sequence encoding a GPGPG amino acid linker sequence (SEQ ID NO:56); and
(v) optionally, at least one second poly(A) sequence, wherein the second poly(A) sequence is a native poly(A) sequence or an exogenous poly(A) sequence to the vector backbone.

4. A composition for delivery of an antigen expression system, comprising:
the antigen expression system,
wherein the antigen expression system comprises one or more vectors,
the one or more vectors comprising:
(a) a vector backbone, wherein the vector backbone comprises a chimpanzee adenovirus vector, optionally wherein the chimpanzee adenovirus vector is a ChAdV68 vector, or an alphavirus vector, optionally wherein the alphavirus vector is a Venezuelan equine encephalitis virus vector; and
(b) an antigen cassette integrated between the 26S promoter nucleotide sequence and the poly(A) sequence, wherein the antigen cassette comprises:
(i) at least one antigen-encoding nucleic acid sequence, comprising:
(I) at least 10, 11, 12, 13, 14, 15, 16, 17, 18, 19, or 20 tumor-specific and MHC class I antigen-encoding nucleic acid sequences linearly linked to each other and each comprising:
(A) a MHC class I epitope encoding nucleic acid sequence, wherein the MHC class I epitope encoding nucleic acid sequence encodes a MHC class I epitope 7-15 amino acids in length, and wherein at least one of the MHC class I epitopes is selected from the group consisting of SEQ ID NO: 57-29,357,
(B) a 5′ linker sequence, wherein the 5′ linker sequence encodes a native N-terminal amino acid sequence of the MHC class I epitope, and wherein the 5′ linker sequence encodes a peptide that is at least 3 amino acids in length,
(C) a 3′ linker sequence, wherein the 3′ linker sequence encodes a native C-terminal acid sequence of the MHC class I epitope, and wherein the 3′ linker sequence encodes a peptide that is at least 3 amino acids in length, and
wherein the antigen cassette is operably linked to the 26S promoter nucleotide sequence, wherein each of the MHC class I antigen-encoding nucleic acid sequences encodes a polypeptide that is between 13 and 25 amino acids in length, and wherein each 3′ end of each MHC class I antigen-encoding nucleic acid sequence is linked to the 5′ end of the following MHC class I antigen-encoding nucleic acid sequence with the exception of the final MHC class I antigen-encoding nucleic acid sequence in the antigen cassette; and
(ii) at least two MHC class II antigen-encoding nucleic acid sequences comprising:
(I) a PADRE MHC class II sequence (SEQ ID NO:48),
(II) a Tetanus toxoid MHC class II sequence (SEQ ID NO:46),
(III) a first nucleic acid sequence encoding a GPGPG amino acid linker sequence linking the PADRE MHC class II sequence and the Tetanus toxoid MHC class II sequence,
(IV) a second nucleic acid sequence encoding a GPGPG amino acid linker sequence linking the 5′ end of the at least two MHC class II antigen-encoding nucleic acid sequences to the tumor-specific MHC class I antigen-encoding nucleic acid sequences,
(V) optionally, a third nucleic acid sequence encoding a GPGPG amino acid linker sequence at the 3′ end of the at least two MHC class II antigen-encoding nucleic acid sequences.

5. The composition of any of claims 1-3, wherein an ordered sequence of each element of the antigen cassette is described in the formula, from 5′ to 3′, comprising:
Pₐ-(L5_{b}-N_{c}-L3_{d})_{X}-(G5ₑ-U_{f})_{Y}-G3_{g}
wherein P comprises the second promoter nucleotide sequence, where a=0 or 1,
N comprises one of the MHC class I epitope encoding nucleic acid sequences, where c=1,
L5 comprises the 5′ linker sequence, where b=0 or 1,
L3 comprises the 3′ linker sequence, where d=0 or 1,
G5 comprises one of the at least one nucleic acid sequences encoding a GPGPG amino acid linker, where e=0 or 1,
G3 comprises one of the at least one nucleic acid sequences encoding a GPGPG amino acid linker, where g=0 or 1,
U comprises one of the at least one MHC class II antigen-encoding nucleic acid sequence, where f=1,
X=1 to 400, where for each X the corresponding N_{c} is a epitope encoding nucleic acid sequence, and
Y=0, 1, or 2, where for each Y the corresponding U_{f} is an antigen-encoding nucleic acid sequence.

6. The composition of claim 5, wherein for each X the corresponding N_{c} is a distinct MHC class I epitope encoding nucleic acid sequence.

7. The composition of claim 5 or 6, wherein for each Y the corresponding U_{f} is a distinct MHC class II antigen-encoding nucleic acid sequence.

8. The composition of any one of claims 5-7, wherein
a=0, b=1, d=1, e=1, g=1, h=1, X=20, Y=2,
the at least one promoter nucleotide sequence is a single 26S promoter nucleotide sequence provided by the backbone,
the at least one polyadenylation poly(A) sequence is a poly(A) sequence of at least 100 consecutive A nucleotides provided by the backbone,
each N encodes a MHC class I epitope 7-15 amino acids in length,
L5 is a native 5′ linker sequence that encodes a native N-terminal amino acid sequence of the MHC I epitope, and wherein the 5′ linker sequence encodes a peptide that is at least 3 amino acids in length,
L3 is a native 3′ linker sequence that encodes a native nucleic-terminal acid sequence of the MHC I epitope, and wherein the 3′ linker sequence encodes a peptide that is at least 3 amino acids in length,
U is each of a PADRE class II sequence and a Tetanus toxoid MHC class II sequence,
the vector backbone comprises a chimpanzee adenovirus vector, optionally wherein the chimpanzee adenovirus vector is a ChAdV68 vector, or an alphavirus vector, optionally wherein the alphavirus vector is a Venezuelan equine encephalitis virus vector, and each of the MHC class I antigen-encoding nucleic acid sequences encodes a polypeptide that is between 13 and 25 amino acids in length.

9. The composition of any of the above claims, the composition further comprising a nanoparticulate delivery vehicle.

10. The composition of claim 9, wherein the nanoparticulate delivery vehicle is a lipid nanoparticle (LNP).

11. The composition of claim 10, wherein the LNP comprises ionizable amino lipids.

12. The composition of claim 11, wherein the ionizable amino lipids comprise MC3-like (dilinoleylmethyl-4-dimethylaminobutyrate) molecules.

13. The composition of any of claims claim 9-12, wherein the nanoparticulate delivery vehicle encapsulates the antigen expression system.

14. The composition of any one of claim 1-3, 5-7, or 9-13, wherein the antigen cassette is integrated between the at least one promoter nucleotide sequence and the at least one poly(A) sequence.

15. The composition of any one of claim 1-3, 5-7, or 9-14, wherein the at least one promoter nucleotide sequence is operably linked to the antigen-encoding nucleic acid sequence.

16. The composition of any one of claim 1-3, 5-7, or 9-15, wherein the one or more vectors comprise one or more +-stranded RNA vectors.

17. The composition of claim 16 wherein the one or more +-stranded RNA vectors comprise a 5′ 7-methylguanosine (m7g) cap.

18. The composition of claim 16 or 17, wherein the one or more +-stranded RNA vectors are produced by in vitro transcription.

19. The composition of any one of claim 1-3, 5-7, or 9-18, wherein the one or more vectors are self-replicating within a mammalian cell.

20. The composition of any one of claim 1-3, 5-7, or 9-19, wherein the backbone comprises at least one nucleotide sequence of an Aura virus, a Fort Morgan virus, a Venezuelan equine encephalitis virus, a Ross River virus, a Semliki Forest virus, a Sindbis virus, or a Mayaro virus.

21. The composition of any one of claim 1-3, 5-7, or 9-19, wherein the backbone comprises at least one nucleotide sequence of a Venezuelan equine encephalitis virus.

22. The composition of claim 20 or 21, wherein the backbone comprises at least sequences for nonstructural protein-mediated amplification, a 26S promoter sequence, a poly(A) sequence, a nonstructural protein 1 (nsP1) gene, a nsP2 gene, a nsP3 gene, and a nsP4 gene encoded by the nucleotide sequence of the Aura virus, the Fort Morgan virus, the Venezuelan equine encephalitis virus, the Ross River virus, the Semliki Forest virus, the Sindbis virus, or the Mayaro virus.

23. The composition of claim 20 or 21, wherein the backbone comprises at least sequences for nonstructural protein-mediated amplification, a 26S promoter sequence, and a poly(A) sequence encoded by the nucleotide sequence of the Aura virus, the Fort Morgan virus, the Venezuelan equine encephalitis virus, the Ross River virus, the Semliki Forest virus, the Sindbis virus, or the Mayaro virus.

24. The composition of claim 22 or 23, wherein sequences for nonstructural protein-mediated amplification are selected from the group consisting of: an alphavirus 5′ UTR, a 51-nt CSE, a 24-nt CSE, a 26S subgenomic promoter sequence, a 19-nt CSE, an alphavirus 3′ UTR, or combinations thereof.

25. The composition of any one of claims 22-24, wherein the backbone does not encode structural virion proteins capsid, E2 and E1.

26. The composition of claim 25, wherein the antigen cassette is inserted in place of structural virion proteins within the nucleotide sequence of the Aura virus, the Fort Morgan virus, the Venezuelan equine encephalitis virus, the Ross River virus, the Semliki Forest virus, the Sindbis virus, or the Mayaro virus.

27. The composition of claim 20 or 21, wherein the Venezuelan equine encephalitis virus comprises the sequence of SEQ ID NO:3 or SEQ ID NO:5

28. The composition of claim 20 or 21, wherein the Venezuelan equine encephalitis virus comprises the sequence of SEQ ID NO:3 or SEQ ID NO:5 further comprising a deletion between base pair 7544 and 11175.

29. The composition of claim 28, wherein the backbone comprises the sequence set forth in SEQ ID NO:6 or SEQ ID NO:7

30. The composition of claim 28 or 29, wherein the antigen cassette is inserted at position 7544 to replace the deletion between base pairs 7544 and 11175 as set forth in the sequence of SEQ ID NO:3 or SEQ ID NO:5

31. The composition of claim 26-30, wherein the insertion of the antigen cassette provides for transcription of a polycistronic RNA comprising the nsP1-4 genes and the at least one antigen-encoding nucleic acid sequence, wherein the nsP1-4 genes and the at least one antigen-encoding nucleic acid sequence are in separate open reading frames.

32. The composition of any one of claim 1-3, 5-7, or 9-19, wherein the backbone comprises at least one nucleotide sequence of a chimpanzee adenovirus vector.

33. The composition of claim 32, wherein the chimpanzee adenovirus vector is a ChAdV68 vector.

34. The composition of any one of claim 1-3, 5-7, or 9-33, wherein the at least one promoter nucleotide sequence is the native 26S promoter nucleotide sequence encoded by the backbone.

35. The composition of any one of claim 1-3, 5-7, or 9-33, wherein the at least one promoter nucleotide sequence is an exogenous RNA promoter.

36. The composition of any one of claim 1-3, 5-7, or 9-35, wherein the second promoter nucleotide sequence is a 26S promoter nucleotide sequence.

37. The composition of any one of claim 1-3, 5-7, or 9-35, wherein the second promoter nucleotide sequence comprises multiple 26S promoter nucleotide sequences, wherein each 26S promoter nucleotide sequence provides for transcription of one or more of the separate open reading frames.

38. The composition of any one of the above claims, wherein the one or more vectors are each at least 300 nt in size.

39. The composition of any one of the above claims, wherein the one or more vectors are each at least 1 kb in size.

40. The composition of any one of the above claims, wherein the one or more vectors are each 2 kb in size.

41. The composition of any one of the above claims, wherein the one or more vectors are each less than 5 kb in size.

42. The composition of any one of the above claims, wherein at least one of the at least one antigen-encoding nucleic acid sequences encodes a polypeptide sequence or portion thereof that is presented by MHC class I on the tumor cell.

43. The composition of any one of claim 1-3, 5-7, or 9-42, wherein each antigen-encoding nucleic acid sequence is linked directly to one another.

44. The composition of any one of claim 1-3, 5-7, or 9-43, wherein at least one of the at least one antigen-encoding nucleic acid sequences is linked to a distinct antigen-encoding nucleic acid sequence with a nucleic acid sequence encoding a linker.

45. The composition of claim 44, wherein the linker links two MHC class I sequences or an MHC class I sequence to an MHC class II sequence.

46. The composition of claim 45, wherein the linker is selected from the group consisting of: (1) consecutive glycine residues, at least 2, 3, 4, 5, 6, 7, 8, 9, or 10 residues in length; (2) consecutive alanine residues, at least 2, 3, 4, 5, 6, 7, 8, 9, or 10 residues in length; (3) two arginine residues (RR); (4) alanine, alanine, tyrosine (AAY); (5) a consensus sequence at least 2, 3, 4, 5, 6, 7, 8, 9, or 10 amino acid residues in length that is processed efficiently by a mammalian proteasome; and (6) one or more native sequences flanking the antigen derived from the cognate protein of origin and that is at least 2, 3, 4, 5, 6, 7, 8, 9, 10, 11, 12, 13, 14, 15, 16, 17, 18, 19, 20, or 2-20 amino acid residues in length.

47. The composition of claim 44, wherein the linker links two MHC class II sequences or an MHC class II sequence to an MHC class I sequence.

48. The composition of claim 47, wherein the linker comprises the sequence GPGPG.

49. The composition of any one of claim 1-3, 5-7, or 9-48, wherein at least one sequence of the at least one antigen-encoding nucleic acid sequences is linked, operably or directly, to a separate or contiguous sequence that enhances the expression, stability, cell trafficking, processing and presentation, and/or immunogenicity of the at least one antigen-encoding nucleic acid sequences.

50. The composition of claim 49, wherein the separate or contiguous sequence comprises at least one of: a ubiquitin sequence, a ubiquitin sequence modified to increase proteasome targeting (e.g., the ubiquitin sequence contains a Gly to Ala substitution at position 76), an immunoglobulin signal sequence (e.g., IgK), a major histocompatibility class I sequence, lysosomal-associated membrane protein (LAMP)-1, human dendritic cell lysosomal-associated membrane protein, and a major histocompatibility class II sequence; optionally wherein the ubiquitin sequence modified to increase proteasome targeting is A76.

51. The composition of any of the above claims, wherein at least one of the at least one antigen-encoding nucleic acid sequences encodes a polypeptide sequence or portion thereof that has increased binding affinity to its corresponding MHC allele relative to the translated, corresponding wild-type nucleic acid sequence.

52. The composition of any of the above claims, wherein at least one of the at least one antigen-encoding nucleic acid sequences encodes a polypeptide sequence or portion thereof that has increased binding stability to its corresponding MHC allele relative to the translated, corresponding wild-type nucleic acid sequence.

53. The composition of any of the above claims, wherein at least one of the at least one antigen-encoding nucleic acid sequences encodes a polypeptide sequence or portion thereof that has an increased likelihood of presentation on its corresponding MHC allele relative to the translated, corresponding wild-type nucleic acid sequence.

54. The composition of any of the above claims, wherein the at least one alteration comprises a point mutation, a frameshift mutation, a non-frameshift mutation, a deletion mutation, an insertion mutation, a splice variant, a genomic rearrangement, or a proteasome-generated spliced antigen.

55. The composition of any of the above claims, wherein the tumor is selected from the group consisting of: lung cancer, melanoma, breast cancer, ovarian cancer, prostate cancer, kidney cancer, gastric cancer, colon cancer, testicular cancer, head and neck cancer, pancreatic cancer, bladder cancer, brain cancer, B-cell lymphoma, acute myelogenous leukemia, adult acute lymphoblastic leukemia, chronic myelogenous leukemia, chronic lymphocytic leukemia, T cell lymphocytic leukemia, non-small cell lung cancer, and small cell lung cancer.

56. The composition of any one claim 1-3, 5-7, or 9-55, wherein the at least one antigen-encoding nucleic acid sequence comprises at least 2-10, 2, 3, 4, 5, 6, 7, 8, 9, or 10 nucleic acid sequences.

57. The composition of any one of claim 1-3, 5-7, or 9-55, wherein the at least one antigen-encoding nucleic acid sequence comprises at least 11-20, 15-20, 11-100, 11-200, 11-300, 11-400, 11, 12, 13, 14, 15, 16, 17, 18, 19, 20 or up to 400 nucleic acid sequences.

58. The composition of any one of claim 1-3, 5-7, or 9-55, wherein the at least one antigen-encoding nucleic acid sequence comprises at least 2-400 nucleic acid sequences and wherein at least two of the antigen-encoding nucleic acid sequences encode polypeptide sequences or portions thereof that are presented by MHC class I on the tumor cell surface.

59. The composition of claim 4 or 8, wherein at least two of the antigen-encoding nucleic acid sequences encode polypeptide sequences or portions thereof that are presented by MHC class I on the tumor cell surface.

60. The composition of any of the above claims, wherein when administered to the subject and translated, at least one of the antigens encoded by the at least one antigen-encoding nucleic acid sequence are presented on antigen presenting cells resulting in an immune response targeting at least one of the antigens on the tumor cell surface.

61. The composition of any of the above claims, wherein the at least one antigen-encoding nucleic acid sequences when administered to the subject and translated, at least one of the MHC class I or class II antigens are presented on antigen presenting cells resulting in an immune response targeting at least one of the antigens on the tumor cell surface, and optionally wherein the expression of each of the at least one antigen-encoding nucleic acid sequences is driven by the at least one promoter nucleotide sequence.

62. The composition of any one of claim 1-3, 5-7, or 9-61, wherein each MHC class I antigen-encoding nucleic acid sequence encodes a polypeptide sequence between 8 and 35 amino acids in length, optionally 9-17, 9-25, 8, 9, 10, 11, 12, 13, 14, 15, 16, 17, 18, 19, 20, 21, 22, 23, 24, 25, 26, 27, 28, 29, 30, 31, 32, 33, 34 or 35 amino acids in length.

63. The composition of any one of claim 1-3, 5-7, or 9-62, wherein the at least one MHC class II antigen-encoding nucleic acid sequence is present.

64. The composition of any one of claim 1-3, 5-7, or 9-62, wherein the at least one MHC class II antigen-encoding nucleic acid sequence is present and comprises at least one MHC class II antigen-encoding nucleic acid sequence that comprises at least one alteration that makes the encoded peptide sequence distinct from the corresponding peptide sequence encoded by a wild-type nucleic acid sequence.

65. The composition of any one of claim 1-3, 5-7, or 9-64, wherein the at least one MHC class II antigen-encoding nucleic acid sequence is 12-20, 12, 13, 14, 15, 16, 17, 18, 19, 20, or 20-40 amino acids in length.

66. The composition of any one of claim 1-3, 5-7, or 9-65, wherein the at least one MHC class II antigen-encoding nucleic acid sequence is present and comprises at least one universal MHC class II antigen-encoding nucleic acid sequence, optionally wherein the at least one universal sequence comprises at least one of Tetanus toxoid and PADRE.

67. The composition of any one of claim 1-3, 5-7, or 9-66, wherein the at least one promoter nucleotide sequence or the second promoter nucleotide sequence is inducible.

68. The composition of any one of claim 1-3, 5-7, or 9-66, wherein the at least one promoter nucleotide sequence or the second promoter nucleotide sequence is non-inducible.

69. The composition of any one of claim 1-3, 5-7, or 9-68, wherein the at least one poly(A) sequence comprises a poly(A) sequence native to the backbone.

70. The composition of any one of claim 1-3, 5-7, or 9-68, wherein the at least one poly(A) sequence comprises a poly(A) sequence exogenous to the backbone.

71. The composition of any one claim 1-3, 5-7, or 9-70, wherein the at least one poly(A) sequence is operably linked to at least one of the at least one antigen-encoding nucleic acid sequences.

72. The composition of any one of claim 1-3, 5-7, or 9-71, wherein the at least one poly(A) sequence is at least 20, at least 30, at least 40, at least 50, at least 60, at least 70, at least 80, or at least 90 consecutive A nucleotides.

73. The composition of any one of claim 1-3, 5-7, or 9-71, wherein the at least one poly(A) sequence is at least 100 consecutive A nucleotides.

74. The composition of any of the above claims, wherein the antigen cassette further comprises at least one of: an intron sequence, a woodchuck hepatitis virus posttranscriptional regulatory element (WPRE) sequence, an internal ribosome entry sequence (IRES) sequence, a nucleotide sequence encoding a 2A self cleaving peptide sequence, a nucleotide sequence encoding a Furin cleavage site, or a sequence in the 5′ or 3′ non-coding region known to enhance the nuclear export, stability, or translation efficiency of mRNA that is operably linked to at least one of the at least one antigen-encoding nucleic acid sequences.

75. The composition of any of the above claims, wherein the antigen cassette further comprises a reporter gene, including but not limited to, green fluorescent protein (GFP), a GFP variant, secreted alkaline phosphatase, luciferase, a luciferase variant, or a detectable peptide or epitope.

76. The composition of claim 75, wherein the detectable peptide or epitope is selected from the group consisting of an HA tag, a Flag tag, a His-tag, or a V5 tag.

77. The composition of any of the above claims, wherein the one or more vectors further comprises one or more nucleic acid sequences encoding at least one immune modulator.

78. The composition of claim 77, wherein the immune modulator is an anti-CTLA4 antibody or an antigen-binding fragment thereof, an anti-PD-1 antibody or an antigen-binding fragment thereof, an anti-PD-L1 antibody or an antigen-binding fragment thereof, an anti-4-1BB antibody or an antigen-binding fragment thereof, or an anti-OX-40 antibody or an antigen-binding fragment thereof.

79. The composition of claim 78, wherein the antibody or antigen-binding fragment thereof is a Fab fragment, a Fab′ fragment, a single chain Fv (scFv), a single domain antibody (sdAb) either as single specific or multiple specificities linked together (e.g., camelid antibody domains), or full-length single-chain antibody (e.g., full-length IgG with heavy and light chains linked by a flexible linker).

80. The composition of claim 78 or 79, wherein the heavy and light chain sequences of the antibody are a contiguous sequence separated by either a self-cleaving sequence such as 2A or IRES; or the heavy and light chain sequences of the antibody are linked by a flexible linker such as consecutive glycine residues.

81. The composition of claim 77, wherein the immune modulator is a cytokine.

82. The composition of claim 81, wherein the cytokine is at least one of IL-2, IL-7, IL-12, IL-15, or IL-21 or variants thereof of each.

83. The composition of any one of claim 1-3, 5-7, or 9-82, wherein the at least one MHC class I antigen-encoding nucleic acid sequence is selected by performing the steps of:
(a) obtaining at least one of exome, transcriptome, or whole genome tumor nucleotide sequencing data from the tumor, wherein the tumor nucleotide sequencing data is used to obtain data representing peptide sequences of each of a set of antigens;
(b) inputting the peptide sequence of each antigen into a presentation model to generate a set of numerical likelihoods that each of the antigens is presented by one or more of the MHC alleles on the tumor cell surface of the tumor, the set of numerical likelihoods having been identified at least based on received mass spectrometry data; and
(c) selecting a subset of the set of antigens based on the set of numerical likelihoods to generate a set of selected antigens which are used to generate the at least one MHC class I antigen-encoding nucleic acid sequence.

84. The composition of claim 4 or 8, wherein each of the MHC class I epitope encoding nucleic acid sequences is selected by performing the steps of:
(a) obtaining at least one of exome, transcriptome, or whole genome tumor nucleotide sequencing data from the tumor, wherein the tumor nucleotide sequencing data is used to obtain data representing peptide sequences of each of a set of antigens;
(b) inputting the peptide sequence of each antigen into a presentation model to generate a set of numerical likelihoods that each of the antigens is presented by one or more of the MHC alleles on the tumor cell surface of the tumor, the set of numerical likelihoods having been identified at least based on received mass spectrometry data; and
(c) selecting a subset of the set of antigens based on the set of numerical likelihoods to generate a set of selected antigens which are used to generate the at least 20 MHC class I antigen-encoding nucleic acid sequences.

85. The composition of claim 83, wherein a number of the set of selected antigens is 2-20.

86. The composition of claim 83-85, wherein the presentation model represents dependence between:
(a) presence of a pair of a particular one of the MHC alleles and a particular amino acid at a particular position of a peptide sequence; and
(b) likelihood of presentation on the tumor cell surface, by the particular one of the MHC alleles of the pair, of such a peptide sequence comprising the particular amino acid at the particular position.

87. The composition of claim 83-86, wherein selecting the set of selected antigens comprises selecting antigens that have an increased likelihood of being presented on the tumor cell surface relative to unselected antigens based on the presentation model, optionally wherein the selected antigens have been validated as being presented by one or more specific HLA alleles.

88. The composition of claim 83-87, wherein selecting the set of selected antigens comprises selecting antigens that have an increased likelihood of being capable of inducing a tumor-specific immune response in the subject relative to unselected antigens based on the presentation model.

89. The composition of claim 83-88, wherein selecting the set of selected antigens comprises selecting antigens that have an increased likelihood of being capable of being presented to naïve T cells by professional antigen presenting cells (APCs) relative to unselected antigens based on the presentation model, optionally wherein the APC is a dendritic cell (DC).

90. The composition of claim 83-89, wherein selecting the set of selected antigens comprises selecting antigens that have a decreased likelihood of being subject to inhibition via central or peripheral tolerance relative to unselected antigens based on the presentation model.

91. The composition of claim 83-90, wherein selecting the set of selected antigens comprises selecting antigens that have a decreased likelihood of being capable of inducing an autoimmune response to normal tissue in the subject relative to unselected antigens based on the presentation model.

92. The composition of claim 83-91, wherein exome or transcriptome nucleotide sequencing data is obtained by performing sequencing on the tumor tissue.

93. The composition of claim 92, wherein the sequencing is next generation sequencing (NGS) or any massively parallel sequencing approach.

94. The composition of any of the above claims, wherein the antigen cassette comprises junctional epitope sequences formed by adjacent sequences in the antigen cassette.

95. The composition of claim 94, wherein at least one or each junctional epitope sequence has an affinity of greater than 500 nM for MHC.

96. The composition of claim 94 or 95, wherein each junctional epitope sequence is non-self.

97. The composition of any of the above claims, wherein each of the MHC class I epitopes is predicted or validated to be capable of presentation by at least one HLA allele present in at least 5% of a population.

98. The composition of any of the above claims, wherein each of the MHC class I epitopes is predicted or validated to be capable of presentation by at least one HLA allele, wherein each antigen/HLA pair has an antigen/HLA prevalence of at least 0.01% in a population.

99. The composition of any of the above claims, wherein each of the MHC class I epitopes is predicted or validated to be capable of presentation by at least one HLA allele, wherein each antigen/HLA pair has an antigen/HLA prevalence of at least 0.1% in a population.

100. The composition of any of the above claims, wherein the antigen cassette does not encode a non-therapeutic MHC class I or class II epitope nucleic acid sequence comprising a translated, wild-type nucleic acid sequence, wherein the non-therapeutic epitope is predicted to be displayed on an MHC allele of the subject.

101. The composition of claim 100, wherein the non-therapeutic predicted MHC class I or class II epitope sequence is a junctional epitope sequence formed by adjacent sequences in the antigen cassette.

102. The composition of claims 94-101, wherein the prediction is based on presentation likelihoods generated by inputting sequences of the non-therapeutic epitopes into a presentation model.

103. The composition of any one of claims 94-102, wherein an order of the at least one antigen-encoding nucleic acid sequences in the antigen cassette is determined by a series of steps comprising:
(a) generating a set of candidate antigen cassette sequences corresponding to different orders of the at least one antigen-encoding nucleic acid sequences;
(b) determining, for each candidate antigen cassette sequence, a presentation score based on presentation of non-therapeutic epitopes in the candidate antigen cassette sequence; and
(c) selecting a candidate cassette sequence associated with a presentation score below a predetermined threshold as the antigen cassette sequence for a antigen vaccine.

104. A pharmaceutical composition comprising the composition of any of the above claims and a pharmaceutically acceptable carrier.

105. The composition of claim 104, wherein the composition further comprises an adjuvant.

106. The pharmaceutical composition of claim 104 or 105, wherein the composition further comprises an immune modulator.

107. The pharmaceutical composition of claim 106, wherein the immune modulator is an anti-CTLA4 antibody or an antigen-binding fragment thereof, an anti-PD-1 antibody or an antigen-binding fragment thereof, an anti-PD-L1 antibody or an antigen-binding fragment thereof, an anti-4-1BB antibody or an antigen-binding fragment thereof, or an anti-OX-40 antibody or an antigen-binding fragment thereof.

108. An isolated nucleotide sequence or set of isolated nucleotide sequences comprising the antigen cassette of any of the above composition claims and one or more elements obtained from the sequence of SEQ ID NO:3 or SEQ ID NO:5,optionally wherein the one or more elements are selected from the group consisting of the sequences necessary for nonstructural protein-mediated amplification, the 26S promoter nucleotide sequence, the poly(A) sequence, and the nsP1-4 genes of the sequence set forth in SEQ ID NO:3 or SEQ ID NO:5, and optionally wherein the nucleotide sequence is cDNA.

109. The isolated nucleotide sequence of claim 108, wherein the sequence or set of isolated nucleotide sequences comprises the antigen cassette of any of the above composition claims inserted at position 7544 of the sequence set forth in SEQ ID NO:6 or SEQ ID NO:7.

110. The isolated nucleotide sequence of claim 108 or 109, further comprising:
a T7 or SP6 RNA polymerase promoter nucleotide sequence 5′ of the one or more elements obtained from the sequence of SEQ ID NO:3 or SEQ ID NO:5; and
optionally, one or more restriction sites 3′ of the poly(A) sequence.

111. The isolated nucleotide sequence of claim 108, wherein the antigen cassette of any of the above composition claims is inserted at position 7563 of SEQ ID NO:8 or SEQ ID NO:9.

112. A vector or set of vectors comprising the nucleotide sequence of claims 108-111.

113. An isolated cell comprising the nucleotide sequence or set of isolated nucleotide sequences of claims 108-112, optionally wherein the cell is a BHK-21, CHO, HEK293 or variants thereof, 911, HeLa, A549, LP-293, PER.C6, or AE1-2a cell.

114. A kit comprising the composition of any of the above composition claims and instructions for use.

115. A method for treating a subject with cancer, the method comprising administering to the subject the composition of any of the above composition claims or the pharmaceutical composition of any of claims 104-107.

116. The method of claim 115, wherein the at least one MHC class I antigen-encoding nucleic acid sequence is derived from the tumor of the subject with cancer.

117. The method of claim 115, wherein the at least one MHC class I antigen-encoding nucleic acid sequence are not derived from the tumor of the subject with cancer.

118. A method for inducing an immune response in a subject, the method comprising administering to the subject the composition of any of the above composition claims or the pharmaceutical composition of any of claims 104-107.

119. The method any of claims claims 115-118, wherein the subject expresses at least one HLA allele predicted or known to present the MHC class I epitope.

120. The method any of claims claims 115-118, wherein the subject expresses at least one HLA allele predicted or known to present the MHC class I epitope, and wherein the MHC class I epitope comprises a mutation selected from the group consisting of mutations referred to in Table 34.

121. The method any of claims claims 115-118, wherein the subject express at least one HLA allele predicted or known to present the MHC class I epitope, and wherein the MHC class I epitope comprises a mutation selected from the group consisting of mutations referred to in Table 32.

122. The method of any of claims 115-121, wherein the composition is administered intramuscularly (IM), intradermally (ID), subcutaneously (SC), or intravenously (IV).

123. The method of any of claims 115-121, wherein the composition is administered intramuscularly.

124. The method of any of claims 115-123, the method further comprising administration of one or more immune modulators, optionally wherein the immune modulator is administered before, concurrently with, or after administration of the composition or pharmaceutical composition.

125. The method of claim 124, wherein the one or more immune modulators are selected from the group consisting of: an anti-CTLA4 antibody or an antigen-binding fragment thereof, an anti-PD-1 antibody or an antigen-binding fragment thereof, an anti-PD-L1 antibody or an antigen-binding fragment thereof, an anti-4-1BB antibody or an antigen-binding fragment thereof, or an anti-OX-40 antibody or an antigen-binding fragment thereof.

126. The method of claim 124 or 125, wherein the immune modulator is administered intravenously (IV), intramuscularly (IM), intradermally (ID), or subcutaneously (SC).

127. The method of claim 126, wherein the subcutaneous administration is near the site of the composition or pharmaceutical composition administration or in close proximity to one or more vector or composition draining lymph nodes.

128. The method of any one of claims 115-127, further comprising administering to the subject a second vaccine composition.

129. The method of claim 128, wherein the second vaccine composition is administered prior to the administration of the composition or the pharmaceutical composition of any one of claims 115-127.

130. The method of claim 128, wherein the second vaccine composition is administered subsequent to the administration of the composition or the pharmaceutical composition of any one of claims 115-127.

131. The method of claim 129 or 130, wherein the second vaccine composition is the same as the composition or the pharmaceutical composition of any one of claims 115-127.

132. The method of claim 129 or 130, wherein the second vaccine composition is different from the composition or the pharmaceutical composition of any one of claims 115-127.

133. The method of claim 132, wherein the second vaccine composition comprises a chimpanzee adenovirus vector encoding at least one antigen-encoding nucleic acid sequence.

134. The method of claim 133, wherein the at least one antigen-encoding nucleic acid sequence encoded by the chimpanzee adenovirus vector is the same as the at least one antigen-encoding nucleic acid sequence of any of the above composition claims.

135. A method of manufacturing the one or more vectors of any of the above composition claims, the method comprising:
(a) obtaining a linearized DNA sequence comprising the backbone and the antigen cassette;
(b) in vitro transcribing the linearized DNA sequence by addition of the linearized DNA sequence to a in vitro transcription reaction containing all the necessary components to transcribe the linearized DNA sequence into RNA, optionally further comprising in vitro addition of the m7g cap to the resulting RNA; and
(c) isolating the one or more vectors from the in vitro transcription reaction.

136. The method of manufacturing of claim 135, wherein the linearized DNA sequence is generated by linearizing a DNA plasmid sequence or by amplification using PCR.

137. The method of manufacturing of claim 136, wherein the DNA plasmid sequence is generated using one of bacterial recombination or full genome DNA synthesis or full genome DNA synthesis with amplification of synthesized DNA in bacterial cells.

138. The method of manufacturing of claim 135, wherein isolating the one or more vectors from the in vitro transcription reaction involves one or more of phenol chloroform extraction, silica column based purification, or similar RNA purification methods.

139. A method of manufacturing the composition of any of the above composition claims for delivery of the antigen expression system, the method comprising:
(a) providing components for the nanoparticulate delivery vehicle;
(b) providing the antigen expression system; and
(c) providing conditions sufficient for the nanoparticulate delivery vehicle and the antigen expression system to produce the composition for delivery of the antigen expression system.

140. The method of manufacturing of claim 139, wherein the conditions are provided by microfluidic mixing.

141. A method of assessing a subject having cancer, comprising the steps of:
a) determining or having determined:
1) if the subject has an HLA allele predicted or known to present an antigen included in a antigen-based vaccine, and
one or both of:
1) if a subject's tumor expresses a gene associated with the antigen, optionally, wherein the gene is aberrantly expressed in comparison to a normal cell or tissue,
2) if the subject's tumor has a mutation associated with the antigen,
b) determining or having determined from the results of (a) that the subject is a candidate for therapy with the antigen-based vaccine when the subject expresses the HLA allele, and the subject's tumor expresses the gene and/or the subject's tumor has the mutation,
wherein the antigen comprises at least one MHC class I epitope sequence selected from the group consisting of SEQ ID NO: 57-29,357, and
c) optionally, administering of having administered the antigen-based vaccine to the subject, wherein the the antigen-based vaccine comprises:
1) the at least one MHC class I epitope, or
2) a MHC class I epitope encoding nucleic acid sequence encoding the at least one MHC class I epitope.

142. A method of assessing a subject having cancer, comprising the steps of:
a) determining or having determined if the subject expresses:
1) an A0301 HLA allele and the subject's tumor has a KRAS_G12A mutation,
2) an A0201 HLA allele and the subject's tumor has a KRAS_G12C mutation,
3) an C0802 HLA allele or an A1101 HLA allele and the subject's tumor has a KRAS_G12D mutation, or
4) an A0301 HLA allele or an A1101 HLA allele or an A3101 HLA allele or an C0102 HLA allele or an A0302 HLA allele and the subject's tumor has a KRAS_G12V mutation, and
b) determining or having determined from the results of (a) that the subject is a candidate for therapy with the antigen-based vaccine when the subject:
1) expresses the A0301 allele and the subject's tumor has the KRAS_G12A mutation,
2) expresses the A0201 allele and the subject's tumor has the KRAS_G12C mutation,
3) expresses the C0802 HLA allele or the A1101 HLA allele and the subject's tumor has the KRAS_G12D mutation, or
4) expresses the A0301 HLA allele or the A1101 HLA allele or the A3101 HLA allele or the C0102 HLA allele or the A0302 HLA allele and the subject's tumor has a KRAS_G12V mutation, and
c) optionally, administering of having administered the antigen-based vaccine to the subject, wherein the the antigen-based vaccine comprises:
1) at least one MHC class I epitope comprising the KRAS_G12A mutation, the KRAS_G12C mutation, the KRAS_G12D mutation, or the KRAS_G12V mutation, respectively, or
2) a MHC class I epitope encoding nucleic acid sequence encoding the at least one MHC class I epitope comprising the KRAS_G12A mutation, the KRAS_G12C mutation, the KRAS_G12AD mutation, or the KRAS_G12V mutation, respectively.

143. The method of claim 141 or 142, wherein step (a) and/or (b) comprises obtaining a dataset from a third party that has processed a sample from the subject.

144. The method of claim 141 or 142, wherein step (a) comprises obtaining a sample from the subject and assaying the sample using a method selected from the group consisting of: exome sequencing, targeted exome sequencing, transcriptome sequencing, Sanger sequencing, PCR-based genotyping assays, mass-spectrometry based methods, microarray, Nanostring, ISH, and IHC.

145. The method of claim 143 or 144, wherein the sample comprises a tumor sample, a normal tissue sample, or the tumor sample and the normal tissue sample.

146. The method of claim 145, wherein the sample is selected from tissue, bodily fluid, blood, tumor biopsy, spinal fluid, and needle aspirate.

147. The method of any of claim 141 or 143-146, wherein the gene is selected from the group consisting of: any of the genes found Table 34.

148. The method of any of claim 141 or 143-146, wherein the gene is selected from the group consisting of: any of the genes found Table 32.

149. The method of any of claims 141-148, wherein the cancer is selected from the group consisting of: lung cancer, microsatellite stable colon cancer, and pancreatic cancer.

150. The method of any of claims 141-149, wherein the HLA allele has an HLA frequency of at least 5%.

151. The method of any of claims 141-150, wherein the at least one MHC class I epitope is presented by the HLA allele on a cell associated with the subject's tumor.

152. The method of any of claims 141-151, wherein the antigen-based vaccine comprises an antigen expression system.

153. The method of claim 152, wherein the antigen expression system comprises any one of the antigen expression systems in any one of claims 1-103.

154. The method of any of claims 141-151, wherein the antigen-based vaccine comprises any one of the pharmaceutical compositions in any one of claims 104-107.

155. A method for treating a subject with cancer, the method comprising administering to the subject an antigen-based vaccine to the subject, wherein the the antigen-based vaccine comprises:
1) at least one MHC class I epitope, or
2) a MHC class I epitope encoding nucleic acid sequence encoding the at least one MHC class I epitope,
wherein the at least one MHC class I epitope sequence is selected from the group consisting of SEQ ID NO: 57-29,357.

156. The method of claim 155, wherein the at least one MHC class I antigen-encoding nucleic acid sequence is derived from the tumor of the subject with cancer.

157. The method of claim 155, wherein the at least one MHC class I antigen-encoding nucleic acid sequence are not derived from the tumor of the subject with cancer.

158. A method for inducing an immune response in a subject, the method comprising the method comprising administering to the subject an antigen-based vaccine to the subject, wherein the the antigen-based vaccine comprises:
1) at least one MHC class I epitope, or
2) a MHC class I epitope encoding nucleic acid sequence encoding the at least one MHC class I epitope,
wherein the at least one MHC class I epitope sequence is selected from the group consisting of SEQ ID NO: 57-29,357.

159. The method any of claims 155-158, wherein the subject expresses at least one HLA allele predicted or known to present the at least one MHC class I epitope sequence.

160. The method any of claims 155-158, wherein the subject expresses at least one HLA allele predicted or known to present the at least one MHC class I epitope sequence, and wherein the at least one MHC class I epitope sequence comprises a mutation selected from the group consisting of mutations referred to in Table 34.

161. The method any of claims 155-158, wherein the subject expresses at least one HLA allele predicted or known to present the at least one MHC class I epitope sequence, and wherein the at least one MHC class I epitope sequence comprises a mutation selected from the group consisting of mutations referred to in Table 32.

162. A method for inducing an immune response in a subject, the method comprising administering to the subject an antigen-based vaccine to the subject, wherein the antigen-based vaccine comprises:
1) at least one MHC class I epitope, or
2) a MHC class I epitope encoding nucleic acid sequence encoding the at least one MHC class I epitope,
wherein the at least one MHC class I epitope sequence is selected from the group consisting of SEQ ID NO: 57-29,357, and wherein the subject expresses at least one HLA allele predicted or known to present the at least one MHC class I epitope sequence.

163. A method for inducing an immune response in a subject, the method comprising administering to the subject an antigen-based vaccine to the subject, wherein the the antigen-based vaccine comprises:
1) at least one MHC class I epitope, or
2) a MHC class I epitope encoding nucleic acid sequence encoding the at least one MHC class I epitope,
wherein the at least one MHC class I epitope sequence selected from the group consisting of SEQ ID NO: 57-29,357, and wherein the subject expresses at least one HLA allele predicted or known to present the at least one MHC class I epitope sequence, and wherein the at least one MHC class I epitope sequence comprises a mutation selected from the group consisting of mutations referred to in Table 34, and wherein the subject expresses at least one HLA allele shown in Table 34 that is matched to the corresponding mutation shown in Table 34 (e.g., KRAS_G13D and C0802).

164. A method for inducing an immune response in a subject, the method comprising administering to the subject an antigen-based vaccine to the subject, wherein the the antigen-based vaccine comprises:
1) at least one MHC class I epitope, or
2) a MHC class I epitope encoding nucleic acid sequence encoding the at least one MHC class I epitope,
wherein the at least one MHC class I epitope sequence selected from the group consisting of SEQ ID NO: 57-29,357, and wherein the subject expresses at least one HLA allele predicted or known to present the at least one MHC class I epitope sequence, and wherein the at least one MHC class I epitope sequence comprises a mutation selected from the group consisting of mutations referred to in Table 32.

165. The method of any of claims 155-164, wherein the antigen-based vaccine comprises an antigen expression system.

166. The method of claim 165, wherein the antigen expression system comprises any one of the antigen expression systems in any one of claims 1-103.

167. The method of any of claims 155-164, wherein the antigen-based vaccine comprises any one of the pharmaceutical compositions in any one of claims 104-107.

The application's sequence listing, which the Patent Office published only in electronic form, follows.

SEQUENCE LISTING (29512 sequences)

SEQ ID NO: 1 - DNA, 36519 bp, Artificial Sequence
  Description of Artificial Sequence: Synthetic polynucleotide
ccatcttcaataatatacctcaaactttttgtgcgcgttaatatgcaaatgaggcgtttgaatttggggaggaagggcggtgattggtcgagggatgagcgaccgttaggggcggggcgagtgacgttttgatgacgtggttgcgaggaggagccagtttgcaagttctcgtgggaaaagtgacgtcaaacgaggtgtggtttgaacacggaaatactcaattttcccgcgctctctgacaggaaatgaggtgtttctgggcggatgcaagtgaaaacgggccattttcgcgcgaaaactgaatgaggaagtgaaaatctgagtaatttcgcgtttatggcagggaggagtatttgccgagggccgagtagactttgaccgattacgtgggggtttcgattaccgtgtttttcacctaaatttccgcgtacggtgtcaaagtccggtgtttttacgtaggtgtcagctgatcgccagggtatttaaacctgcgctctccagtcaagaggccactcttgagtgccagcgagaagagttttctcctccgcgccgcgagtcagatctacactttgaaagatgaggcacctgagagacctgcccgatgagaaaatcatcatcgcttccgggaacgagattctggaactggtggtaaatgccatgatgggcgacgaccctccggagccccccaccccatttgagacaccttcgctgcacgatttgtatgatctggaggtggatgtgcccgaggacgatcccaatgaggaggcggtaaatgatttttttagcgatgccgcgctgctagctgccgaggaggcttcgagctctagctcagacagcgactcttcactgcatacccctagacccggcagaggtgagaaaaagatccccgagcttaaaggggaagagatggacttgcgctgctatgaggaatgcttgcccccgagcgatgatgaggacgagcaggcgatccagaacgcagcgagccagggagtgcaagccgccagcgagagctttgcgctggactgcccgcctctgcccggacacggctgtaagtcttgtgaatttcatcgcatgaatactggagataaagctgtgttgtgtgcactttgctatatgagagcttacaaccattgtgtttacagtaagtgtgattaagttgaactttagagggaggcagagagcagggtgactgggcgatgactggtttatttatgtatatatgttctttatataggtcccgtctctgacgcagatgatgagacccccactacaaagtccacttcgtcacccccagaaattggcacatctccacctgagaatattgttagaccagttcctgttagagccactgggaggagagcagctgtggaatgtttggatgacttgctacagggtggggttgaacctttggacttgtgtacccggaaacgccccaggcactaagtgccacacatgtgtgtttacttgaggtgatgtcagtatttatagggtgtggagtgcaataaaaaatgtgttgactttaagtgcgtggtttatgactcaggggtggggactgtgagtatataagcaggtgcagacctgtgtggttagctcagagcggcatggagatttggacggtcttggaagactttcacaagactagacagctgctagagaacgcctcgaacggagtctcttacctgtggagattctgcttcggtggcgacctagctaggctagtctacagggccaaacaggattatagtgaacaatttgaggttattttgagagagtgttctggtctttttgacgctcttaacttgggccatcagtctcactttaaccagaggatttcgagagcccttgattttactactcctggcagaaccactgcagcagtagccttttttgcttttattcttgacaaatggagtcaagaaacccatttcagcagggattaccagctggatttcttagcagtagctttgtggagaacatggaagtgccagcgcctgaatgcaatctccggctacttgccggtacagccgctagacactctgaggatcctgaatctccaggagagtcccagggcacgccaacgtcgccagcagcagcagcaggaggaggatcaagaagagaacccgagagccggcctggaccctccggcggaggaggaggagtagctgacctgtttcctgaactgcgccgggtgctgactaggtcttcgagtggtcgggagagggggattaagcgggagaggcatgatgagactaatcacagaactgaactgactgtgggtctgatgagtcgcaagcgcccagaaacagtgtggtggcatgaggtgcagtcgactggcacagatgaggtgtcggtgatgcatgagaggttttctctagaacaagtcaagacttgttggttagagcctgaggatgattgggaggtagccatcaggaattatgccaagctggctctgaggccagacaagaagtacaagattactaagctgataaatatcagaaatgcctgctacatctcagggaatggggctgaagtggagatctgtctccaggaaagggtggctttcagatgctgcatgatgaatatgtacccgggagtggtgggcatggatggggttacctttatgaacatgaggttcaggggagatgggtataatggcacggtctttatggccaataccaagctgacagtccatggctgctccttctttgggtttaataacacctgcatcgaggcctggggtcaggtcggtgtgaggggctgcagtttttcagccaactggatgggggtcgtgggcaggaccaagagtatgctgtccgtgaagaaatgcttgtttgagaggtgccacctgggggtgatgagcgagggcgaagccagaatccgccactgcgcctctaccgagacgggctgctttgtgctgtgcaagggcaatgctaagatcaagcataatatgatctgtggagcctcggacgagcgcggctaccagatgctgacctgcgccggcgggaacagccatatgctggccaccgtacatgtggcttcccatgctcgcaagccctggcccgagttcgagcacaatgtcatgaccaggtgcaatatgcatctggggtcccgccgaggcatgttcatgccctaccagtgcaacctgaattatgtgaaggtgctgctggagcccgatgccatgtccagagtgagcctgacgggggtgtttgacatgaatgtggaggtgtggaagattctgagatatgatgaatccaagaccaggtgccgagcctgcgagtgcggagggaagcatgccaggttccagcccgtgtgtgtggatgtgacggaggacctgcgacccgatcatttggtgttgccctgcaccgggacggagttcggttccagcggggaagaatctgactagagtgagtagtgttctggggcgggggaggacctgcatgagggccagaataactgaaatctgtgcttttctgtgtgttgcagcagcatgagcggaagcggctcctttgagggaggggtattcagcccttatctgacggggcgtctcccctcctgggcgggagtgcgtcagaatgtgatgggatccacggtggacggccggcccgtgcagcccgcgaactcttcaaccctgacctatgcaaccctgagctcttcgtcgttggacgcagctgccgccgcagctgctgcatctgccgccagcgccgtgcgcggaatggccatgggcgccggctactacggcactctggtggccaactcgagttccaccaataatcccgccagcctgaacgaggagaagctgttgctgctgatggcccagctcgaggccttgacccagcgcctgggcgagctgacccagcaggtggctcagctgcaggagcagacgcgggccgcggttgccacggtgaaatccaaataaaaaatgaatcaataaataaacggagacggttgttgattttaacacagagtctgaatctttatttgatttttcgcgcgcggtaggccctggaccaccggtctcgatcattgagcacccggtggatcttttccaggacccggtagaggtgggcttggatgttgaggtacatgggcatgagcccgtcccgggggtggaggtagctccattgcagggcctcgtgctcgggggtggtgttgtaaatcacccagtcatagcaggggcgcagggcatggtgttgcacaatatctttgaggaggagactgatggccacgggcagccctttggtgtaggtgtttacaaatctgttgagctgggagggatgcatgcggggggagatgaggtgcatcttggcctggatcttgagattggcgatgttaccgcccagatcccgcctggggttcatgttgtgcaggaccaccagcacggtgtatccggtgcacttggggaatttatcatgcaacttggaagggaaggcgtgaaagaatttggcgacgcctttgtgcccgcccaggttttccatgcactcatccatgatgatggcgatgggcccgtgggcggcggcctgggcaaagacgtttcgggggtcggacacatcatagttgtggtcctgggtgaggtcatcataggccattttaatgaatttggggcggagggtgccggactgggggacaaaggtaccctcgatcccgggggcgtagttcccctcacagatctgcatctcccaggctttgagctcggagggggggatcatgtccacctgcggggcgataaagaacacggtttccggggcgggggagatgagctgggccgaaagcaagttccggagcagctgggacttgccgcagccggtggggccgtagatgaccccgatgaccggctgcaggtggtagttgagggagagacagctgccgtcctcccggaggaggggggccacctcgttcatcatctcgcgcacgtgcatgttctcgcgcaccagttccgccaggaggcgctctccccccagggataggagctcctggagcgaggcgaagtttttcagcggcttgagtccgtcggccatgggcattttggagagggtttgttgcaagagttccaggcggtcccagagctcggtgatgtgctctacggcatctcgatccagcagacctcctcgtttcgcgggttgggacggctgcgggagtagggcaccagacgatgggcgtccagcgcagccagggtccggtccttccagggtcgcagcgtccgcgtcagggtggtctccgtcacggtgaaggggtgcgcgccgggctgggcgcttgcgagggtgcgcttcaggctcatccggctggtcgaaaaccgctcccgatcggcgccctgcgcgtcggccaggtagcaattgaccatgagttcgtagttgagcgcctcggccgcgtggcctttggcgcggagcttacctttggaagtctgcccgcaggcgggacagaggagggacttgagggcgtagagcttgggggcgaggaagacggactcgggggcgtaggcgtccgcgccgcagtgggcgcagacggtctcgcactccacgagccaggtgaggtcgggctggtcggggtcaaaaaccagtttcccgccgttctttttgatgcgtttcttacctttggtctccatgagctcgtgtccccgctgggtgacaaagaggctgtccgtgtccccgtagaccgactttatgggccggtcctcgagcggtgtgccgcggtcctcctcgtagaggaaccccgcccactccgagacgaaagcccgggtccaggccagcacgaaggaggccacgtgggacgggtagcggtcgttgtccaccagcgggtccaccttttccagggtatgcaaacacatgtccccctcgtccacatccaggaaggtgattggcttgtaagtgtaggccacgtgaccgggggtcccggccgggggggtataaaagggtgcgggtccctgctcgtcctcactgtcttccggatcgctgtccaggagcgccagctgttggggtaggtattccctctcgaaggcgggcatgacctcggcactcaggttgtcagtttctagaaacgaggaggatttgatattgacggtgccggcggagatgcctttcaagagcccctcgtccatctggtcagaaaagacgatctttttgttgtcgagcttggtggcgaaggagccgtagagggcgttggagaggagcttggcgatggagcgcatggtctggtttttttccttgtcggcgcgctccttggcggcgatgttgagctgcacgtactcgcgcgccacgcacttccattcggggaagacggtggtcagctcgtcgggcacgattctgacctgccagccccgattatgcagggtgatgaggtccacactggtggccacctcgccgcgcaggggctcattagtccagcagaggcgtccgcccttgcgcgagcagaaggggggcagggggtccagcatgacctcgtcgggggggtcggcatcgatggtgaagatgccgggcaggaggtcggggtcaaagtagctgatggaagtggccagatcgtccagggcagcttgccattcgcgcacggccagcgcgcgctcgtagggactgaggggcgtgccccagggcatgggatgggtaagcgcggaggcgtacatgccgcagatgtcgtagacgtagaggggctcctcgaggatgccgatgtaggtggggtagcagcgccccccgcggatgctggcgcgcacgtagtcatacagctcgtgcgagggggcgaggagccccgggcccaggttggtgcgactgggcttttcggcgcggtagacgatctggcggaaaatggcatgcgagttggaggagatggtgggcctttggaagatgttgaagtgggcgtggggcagtccgaccgagtcgcggatgaagtgggcgtaggagtcttgcagcttggcgacgagctcggcggtgactaggacgtccagagcgcagtagtcgagggtctcctggatgatgtcatacttgagctgtcccttttgtttccacagctcgcggttgagaaggaactcttcgcggtccttccagtactcttcgagggggaacccgtcctgatctgcacggtaagagcctagcatgtagaactggttgacggccttgtaggcgcagcagcccttctccacggggagggcgtaggcctgggcggccttgcgcagggaggtgtgcgtgagggcgaaagtgtccctgaccatgaccttgaggaactggtgcttgaagtcgatatcgtcgcagcccccctgctcccagagctggaagtccgtgcgcttcttgtaggcggggttgggcaaagcgaaagtaacatcgttgaagaggatcttgcccgcgcggggcataaagttgcgagtgatgcggaaaggttggggcacctcggcccggttgttgatgacctgggcggcgagcacgatctcgtcgaagccgttgatgttgtggcccacgatgtagagttccacgaatcgcggacggcccttgacgtggggcagtttcttgagctcctcgtaggtgagctcgtcggggtcgctgagcccgtgctgctcgagcgcccagtcggcgagatgggggttggcgcggaggaaggaagtccagagatccacggccagggcggtttgcagacggtcccggtactgacggaactgctgcccgacggccattttttcgggggtgacgcagtagaaggtgcgggggtccccgtgccagcgatcccatttgagctggagggcgagatcgagggcgagctcgacgagccggtcgtccccggagagtttcatgaccagcatgaaggggacgagctgcttgccgaaggaccccatccaggtgtaggtttccacatcgtaggtgaggaagagcctttcggtgcgaggatgcgagccgatggggaagaactggatctcctgccaccaattggaggaatggctgttgatgtgatggaagtagaaatgccgacggcgcgccgaacactcgtgcttgtgtttatacaagcggccacagtgctcgcaacgctgcacgggatgcacgtgctgcacgagctgtacctgagttcctttgacgaggaatttcagtgggaagtggagtcgtggcgcctgcatctcgtgctgtactacgtcgtggtggtcggcctggccctcttctgcctcgatggtggtcatgctgacgagcccgcgcgggaggcaggtccagacctcggcgcgagcgggtcggagagcgaggacgagggcgcgcaggccggagctgtccagggtcctgagacgctgcggagtcaggtcagtgggcagcggcggcgcgcggttgacttgcaggagtttttccagggcgcgcgggaggtccagatggtacttgatctccaccgcgccattggtggcgacgtcgatggcttgcagggtcccgtgcccctggggtgtgaccaccgtcccccgtttcttcttgggcggctggggcgacgggggcggtgcctcttccatggttagaagcggcggcgaggacgcgcgccgggcggcaggggcggctcggggcccggaggcaggggcggcaggggcacgtcggcgccgcgcgcgggtaggttctggtactgcgcccggagaagactggcgtgagcgacgacgcgacggttgacgtcctggatctgacgcctctgggtgaaggccacgggacccgtgagtttgaacctgaaagagagttcgacagaatcaatctcggtatcgttgacggcggcctgccgcaggatctcttgcacgtcgcccgagttgtcctggtaggcgatctcggtcatgaactgctcgatctcctcctcttgaaggtctccgcggccggcgcgctccacggtggccgcgaggtcgttggagatgcggcccatgagctgcgagaaggcgttcatgcccgcctcgttccagacgcggctgtagaccacgacgccctcgggatcgcgggcgcgcatgaccacctgggcgaggttgagctccacgtggcgcgtgaagaccgcgtagttgcagaggcgctggtagaggtagttgagcgtggtggcgatgtgctcggtgacgaagaaatacatgatccagcggcggagcggcatctcgctgacgtcgcccagcgcctccaaacgttccatggcctcgtaaaagtccacggcgaagttgaaaaactgggagttgcgcgccgagacggtcaactcctcctccagaagacggatgagctcggcgatggtggcgcgcacctcgcgctcgaaggcccccgggagttcctccacttcctcttcttcctcctccactaacatctcttctacttcctcctcaggcggcagtggtggcgggggagggggcctgcgtcgccggcggcgcacgggcagacggtcgatgaagcgctcgatggtctcgccgcgccggcgtcgcatggtctcggtgacggcgcgcccgtcctcgcggggccgcagcgtgaagacgccgccgcgcatctccaggtggccgggggggtccccgttgggcagggagagggcgctgacgatgcatcttatcaattgccccgtagggactccgcgcaaggacctgagcgtctcgagatccacgggatctgaaaaccgctgaacgaaggcttcgagccagtcgcagtcgcaaggtaggctgagcacggtttcttctggcgggtcatgttggttgggagcggggcgggcgatgctgctggtgatgaagttgaaataggcggttctgagacggcggatggtggcgaggagcaccaggtctttgggcccggcttgctggatgcgcagacggtcggccatgccccaggcgtggtcctgacacctggccaggtccttgtagtagtcctgcatgagccgctccacgggcacctcctcctcgcccgcgcggccgtgcatgcgcgtgagcccgaagccgcgctggggctggacgagcgccaggtcggcgacgacgcgctcggcgaggatggcttgctggatctgggtgagggtggtctggaagtcatcaaagtcgacgaagcggtggtaggctccggtgttgatggtgtaggagcagttggccatgacggaccagttgacggtctggtggcccggacgcacgagctcgtggtacttgaggcgcgagtaggcgcgcgtgtcgaagatgtagtcgttgcaggtgcgcaccaggtactggtagccgatgaggaagtgcggcggcggctggcggtagagcggccatcgctcggtggcgggggcgccgggcgcgaggtcctcgagcatggtgcggtggtagccgtagatgtacctggacatccaggtgatgccggcggcggtggtggaggcgcgcgggaactcgcggacgcggttccagatgttgcgcagcggcaggaagtagttcatggtgggcacggtctggcccgtgaggcgcgcgcagtcgtggatgctctatacgggcaaaaacgaaagcggtcagcggctcgactccgtggcctggaggctaagcgaacgggttgggctgcgcgtgtaccccggttcgaatctcgaatcaggctggagccgcagctaacgtggtattggcactcccgtctcgacccaagcctgcaccaaccctccaggatacggaggcgggtcgttttgcaacttttttttggaggccggatgagactagtaagcgcggaaagcggccgaccgcgatggctcgctgccgtagtctggagaagaatcgccagggttgcgttgcggtgtgccccggttcgaggccggccggattccgcggctaacgagggcgtggctgccccgtcgtttccaagaccccatagccagccgacttctccagttacggagcgagcccctcttttgttttgtttgtttttgccagatgcatcccgtactgcggcagatgcgcccccaccaccctccaccgcaacaacagccccctccacagccggcgcttctgcccccgccccagcagcaacttccagccacgaccgccgcggccgccgtgagcggggctggacagagttatgatcaccagctggccttggaagagggcgaggggctggcgcgcctgggggcgtcgtcgccggagcggcacccgcgcgtgcagatgaaaagggacgctcgcgaggcctacgtgcccaagcagaacctgttcagagacaggagcggcgaggagcccgaggagatgcgcgcggcccggttccacgcggggcgggagctgcggcgcggcctggaccgaaagagggtgctgagggacgaggatttcgaggcggacgagctgacggggatcagccccgcgcgcgcgcacgtggccgcggccaacctggtcacggcgtacgagcagaccgtgaaggaggagagcaacttccaaaaatccttcaacaaccacgtgcgcaccctgatcgcgcgcgaggaggtgaccctgggcctgatgcacctgtgggacctgctggaggccatcgtgcagaaccccaccagcaagccgctgacggcgcagctgttcctggtggtgcagcatagtcgggacaacgaagcgttcagggaggcgctgctgaatatcaccgagcccgagggccgctggctcctggacctggtgaacattctgcagagcatcgtggtgcaggagcgcgggctgccgctgtccgagaagctggcggccatcaacttctcggtgctgagtttgggcaagtactacgctaggaagatctacaagaccccgtacgtgcccatagacaaggaggtgaagatcgacgggttttacatgcgcatgaccctgaaagtgctgaccctgagcgacgatctgggggtgtaccgcaacgacaggatgcaccgtgcggtgagcgccagcaggcggcgcgagctgagcgaccaggagctgatgcatagtctgcagcgggccctgaccggggccgggaccgagggggagagctactttgacatgggcgcggacctgcactggcagcccagccgccgggccttggaggcggcggcaggaccctacgtagaagaggtggacgatgaggtggacgaggagggcgagtacctggaagactgatggcgcgaccgtatttttgctagatgcaacaacaacagccacctcctgatcccgcgatgcgggcggcgctgcagagccagccgtccggcattaactcctcggacgattggacccaggccatgcaacgcatcatggcgctgacgacccgcaaccccgaagcctttagacagcagccccaggccaaccggctctcggccatcctggaggccgtggtgccctcgcgctccaaccccacgcacgagaaggtcctggccatcgtgaacgcgctggtggagaacaaggccatccgcggcgacgaggccggcctggtgtacaacgcgctgctggagcgcgtggcccgctacaacagcaccaacgtgcagaccaacctggaccgcatggtgaccgacgtgcgcgaggccgtggcccagcgcgagcggttccaccgcgagtccaacctgggatccatggtggcgctgaacgccttcctcagcacccagcccgccaacgtgccccggggccaggaggactacaccaacttcatcagcgccctgcgcctgatggtgaccgaggtgccccagagcgaggtgtaccagtccgggccggactacttcttccagaccagtcgccagggcttgcagaccgtgaacctgagccaggctttcaagaacttgcagggcctgtggggcgtgcaggccccggtcggggaccgcgcgacggtgtcgagcctgctgacgccgaactcgcgcctgctgctgctgctggtggcccccttcacggacagcggcagcatcaaccgcaactcgtacctgggctacctgattaacctgtaccgcgaggccatcggccaggcgcacgtggacgagcagacctaccaggagatcacccacgtgagccgcgccctgggccaggacgacccgggcaacctggaagccaccctgaactttttgctgaccaaccggtcgcagaagatcccgccccagtacgcgctcagcaccgaggaggagcgcatcctgcgttacgtgcagcagagcgtgggcctgttcctgatgcaggagggggccacccccagcgccgcgctcgacatgaccgcgcgcaacatggagcccagcatgtacgccagcaaccgcccgttcatcaataaactgatggactacttgcatcgggcggccgccatgaactctgactatttcaccaacgccatcctgaatccccactggctcccgccgccggggttctacacgggcgagtacgacatgcccgaccccaatgacgggttcctgtgggacgatgtggacagcagcgtgttctccccccgaccgggtgctaacgagcgccccttgtggaagaaggaaggcagcgaccgacgcccgtcctcggcgctgtccggccgcgagggtgctgccgcggcggtgcccgaggccgccagtcctttcccgagcttgcccttctcgctgaacagtatccgcagcagcgagctgggcaggatcacgcgcccgcgcttgctgggcgaagaggagtacttgaatgactcgctgttgagacccgagcgggagaagaacttccccaataacgggatagaaagcctggtggacaagatgagccgctggaagacgtatgcgcaggagcacagggacgatccccgggcgtcgcagggggccacgagccggggcagcgccgcccgtaaacgccggtggcacgacaggcagcggggacagatgtgggacgatgaggactccgccgacgacagcagcgtgttggacttgggtgggagtggtaacccgttcgctcacctgcgcccccgtatcgggcgcatgatgtaagagaaaccgaaaataaatgatactcaccaaggccatggcgaccagcgtgcgttcgtttcttctctgttgttgttgtatctagtatgatgaggcgtgcgtacccggagggtcctcctccctcgtacgagagcgtgatgcagcaggcgatggcggcggcggcgatgcagcccccgctggaggctccttacgtgcccccgcggtacctggcgcctacggaggggcggaacagcattcgttactcggagctggcacccttgtacgataccacccggttgtacctggtggacaacaagtcggcggacatcgcctcgctgaactaccagaacgaccacagcaacttcctgaccaccgtggtgcagaacaatgacttcacccccacggaggccagcacccagaccatcaactttgacgagcgctcgcggtggggcggccagctgaaaaccatcatgcacaccaacatgcccaacgtgaacgagttcatgtacagcaacaagttcaaggcgcgggtgatggtctcccgcaagacccccaatggggtgacagtgacagaggattatgatggtagtcaggatgagctgaagtatgaatgggtggaatttgagctgcccgaaggcaacttctcggtgaccatgaccatcgacctgatgaacaacgccatcatcgacaattacttggcggtggggcggcagaacggggtgctggagagcgacatcggcgtgaagttcgacactaggaacttcaggctgggctgggaccccgtgaccgagctggtcatgcccggggtgtacaccaacgaggctttccatcccgatattgtcttgctgcccggctgcggggtggacttcaccgagagccgcctcagcaacctgctgggcattcgcaagaggcagcccttccaggaaggcttccagatcatgtacgaggatctggaggggggcaacatccccgcgctcctggatgtcgacgcctatgagaaaagcaaggaggatgcagcagctgaagcaactgcagccgtagctaccgcctctaccgaggtcaggggcgataattttgcaagcgccgcagcagtggcagcggccgaggcggctgaaaccgaaagtaagatagtcattcagccggtggagaaggatagcaagaacaggagctacaacgtactaccggacaagataaacaccgcctaccgcagctggtacctagcctacaactatggcgaccccgagaagggcgtgcgctcctggacgctgctcaccacctcggacgtcacctgcggcgtggagcaagtctactggtcgctgcccgacatgatgcaagacccggtcaccttccgctccacgcgtcaagttagcaactacccggtggtgggcgccgagctcctgcccgtctactccaagagcttcttcaacgagcaggccgtctactcgcagcagctgcgcgccttcacctcgcttacgcacgtcttcaaccgcttccccgagaaccagatcctcgtccgcccgcccgcgcccaccattaccaccgtcagtgaaaacgttcctgctctcacagatcacgggaccctgccgctgcgcagcagtatccggggagtccagcgcgtgaccgttactgacgccagacgccgcacctgcccctacgtctacaaggccctgggcatagtcgcgccgcgcgtcctctcgagccgcaccttctaaatgtccattctcatctcgcccagtaataacaccggttggggcctgcgcgcgcccagcaagatgtacggaggcgctcgccaacgctccacgcaacaccccgtgcgcgtgcgcgggcacttccgcgctccctggggcgccctcaagggccgcgtgcggtcgcgcaccaccgtcgacgacgtgatcgaccaggtggtggccgacgcgcgcaactacacccccgccgccgcgcccgtctccaccgtggacgccgtcatcgacagcgtggtggccgacgcgcgccggtacgcccgcgccaagagccggcggcggcgcatcgcccggcggcaccggagcacccccgccatgcgcgcggcgcgagccttgctgcgcagggccaggcgcacgggacgcagggccatgctcagggcggccagacgcgcggcttcaggcgccagcgccggcaggacccggagacgcgcggccacggcggcggcagcggccatcgccagcatgtcccgcccgcggcgagggaacgtgtactgggtgcgcgacgccgccaccggtgtgcgcgtgcccgtgcgcacccgcccccctcgcacttgaagatgttcacttcgcgatgttgatgtgtcccagcggcgaggaggatgtccaagcgcaaattcaaggaagagatgctccaggtcatcgcgcctgagatctacggccctgcggtggtgaaggaggaaagaaagccccgcaaaatcaagcgggtcaaaaaggacaaaaaggaagaagaaagtgatgtggacggattggtggagtttgtgcgcgagttcgccccccggcggcgcgtgcagtggcgcgggcggaaggtgcaaccggtgctgagacccggcaccaccgtggtcttcacgcccggcgagcgctccggcaccgcttccaagcgctcctacgacgaggtgtacggggatgatgatattctggagcaggcggccgagcgcctgggcgagtttgcttacggcaagcgcagccgttccgcaccgaaggaagaggcggtgtccatcccgctggaccacggcaaccccacgccgagcctcaagcccgtgaccttgcagcaggtgctgccgaccgcggcgccgcgccgggggttcaagcgcgagggcgaggatctgtaccccaccatgcagctgatggtgcccaagcgccagaagctggaagacgtgctggagaccatgaaggtggacccggacgtgcagcccgaggtcaaggtgcggcccatcaagcaggtggccccgggcctgggcgtgcagaccgtggacatcaagattcccacggagcccatggaaacgcagaccgagcccatgatcaagcccagcaccagcaccatggaggtgcagacggatccctggatgccatcggctcctagtcgaagaccccggcgcaagtacggcgcggccagcctgctgatgcccaactacgcgctgcatccttccatcatccccacgccgggctaccgcggcacgcgcttctaccgcggtcataccagcagccgccgccgcaagaccaccactcgccgccgccgtcgccgcaccgccgctgcaaccacccctgccgccctggtgcggagagtgtaccgccgcggccgcgcacctctgaccctgccgcgcgcgcgctaccacccgagcatcgccatttaaactttcgcctgctttgcagatcaatggccctcacatgccgccttcgcgttcccattacgggctaccgaggaagaaaaccgcgccgtagaaggctggcggggaacgggatgcgtcgccaccaccaccggcggcggcgcgccatcagcaagcggttggggggaggcttcctgcccgcgctgatccccatcatcgccgcggcgatcggggcgatccccggcattgcttccgtggcggtgcaggcctctcagcgccactgagacacacttggaaacatcttgtaataaaccaatggactctgacgctcctggtcctgtgatgtgttttcgtagacagatggaagacatcaatttttcgtccctggctccgcgacacggcacgcggccgttcatgggcacctggagcgacatcggcaccagccaactgaacgggggcgccttcaattggagcagtctctggagcgggcttaagaatttcgggtccacgcttaaaacctatggcagcaaggcgtggaacagcaccacagggcaggcgctgagggataagctgaaagagcagaacttccagcagaaggtggtcgatgggctcgcctcgggcatcaacggggtggtggacctggccaaccaggccgtgcagcggcagatcaacagccgcctggacccggtgccgcccgccggctccgtggagatgccgcaggtggaggaggagctgcctcccctggacaagcggggcgagaagcgaccccgccccgatgcggaggagacgctgctgacgcacacggacgagccgcccccgtacgaggaggcggtgaaactgggtctgcccaccacgcggcccatcgcgcccctggccaccggggtgctgaaacccgaaaagcccgcgaccctggacttgcctcctccccagccttcccgcccctctacagtggctaagcccctgccgccggtggccgtggcccgcgcgcgacccgggggcaccgcccgccctcatgcgaactggcagagcactctgaacagcatcgtgggtctgggagtgcagagtgtgaagcgccgccgctgctattaaacctaccgtagcgcttaacttgcttgtctgtgtgtgtatgtattatgtcgccgccgccgctgtccaccagaaggaggagtgaagaggcgcgtcgccgagttgcaagatggccaccccatcgatgctgccccagtgggcgtacatgcacatcgccggacaggacgcttcggagtacctgagtccgggtctggtgcagtttgcccgcgccacagacacctacttcagtctggggaacaagtttaggaaccccacggtggcgcccacgcacgatgtgaccaccgaccgcagccagcggctgacgctgcgcttcgtgcccgtggaccgcgaggacaacacctactcgtacaaagtgcgctacacgctggccgtgggcgacaaccgcgtgctggacatggccagcacctactttgacatccgcggcgtgctggatcggggccctagcttcaaaccctactccggcaccgcctacaacagtctggcccccaagggagcacccaacacttgtcagtggacatataaagccgatggtgaaactgccacagaaaaaacctatacatatggaaatgcacccgtgcagggcattaacatcacaaaagatggtattcaacttggaactgacaccgatgatcagccaatctacgcagataaaacctatcagcctgaacctcaagtgggtgatgctgaatggcatgacatcactggtactgatgaaaagtatggaggcagagctcttaagcctgataccaaaatgaagccttgttatggttcttttgccaagcctactaataaagaaggaggtcaggcaaatgtgaaaacaggaacaggcactactaaagaatatgacatagacatggctttctttgacaacagaagtgcggctgctgctggcctagctccagaaattgttttgtatactgaaaatgtggatttggaaactccagatacccatattgtatacaaagcaggcacagatgacagcagctcttctattaatttgggtcagcaagccatgcccaacagacctaactacattggtttcagagacaactttatcgggctcatgtactacaacagcactggcaatatgggggtgctggccggtcaggcttctcagctgaatgctgtggttgacttgcaagacagaaacaccgagctgtcctaccagctcttgcttgactctctgggtgacagaacccggtatttcagtatgtggaatcaggcggtggacagctatgatcctgatgtgcgcattattgaaaatcatggtgtggaggatgaacttcccaactattgtttccctctggatgctgttggcagaacagatacttatcagggaattaaggctaatggaactgatcaaaccacatggaccaaagatgacagtgtcaatgatgctaatgagataggcaagggtaatccattcgccatggaaatcaacatccaagccaacctgtggaggaacttcctctacgccaacgtggccctgtacctgcccgactcttacaagtacacgccggccaatgttaccctgcccaccaacaccaacacctacgattacatgaacggccgggtggtggcgccctcgctggtggactcctacatcaacatcggggcgcgctggtcgctggatcccatggacaacgtgaaccccttcaaccaccaccgcaatgcggggctgcgctaccgctccatgctcctgggcaacgggcgctacgtgcccttccacatccaggtgccccagaaatttttcgccatcaagagcctcctgctcctgcccgggtcctacacctacgagtggaacttccgcaaggacgtcaacatgatcctgcagagctccctcggcaacgacctgcgcacggacggggcctccatctccttcaccagcatcaacctctacgccaccttcttccccatggcgcacaacacggcctccacgctcgaggccatgctgcgcaacgacaccaacgaccagtccttcaacgactacctctcggcggccaacatgctctaccccatcccggccaacgccaccaacgtgcccatctccatcccctcgcgcaactgggccgccttccgcggctggtccttcacgcgtctcaagaccaaggagacgccctcgctgggctccgggttcgacccctacttcgtctactcgggctccatcccctacctcgacggcaccttctacctcaaccacaccttcaagaaggtctccatcaccttcgactcctccgtcagctggcccggcaacgaccggctcctgacgcccaacgagttcgaaatcaagcgcaccgtcgacggcgagggctacaacgtggcccagtgcaacatgaccaaggactggttcctggtccagatgctggcccactacaacatcggctaccagggcttctacgtgcccgagggctacaaggaccgcatgtactccttcttccgcaacttccagcccatgagccgccaggtggtggacgaggtcaactacaaggactaccaggccgtcaccctggcctaccagcacaacaactcgggcttcgtcggctacctcgcgcccaccatgcgccagggccagccctaccccgccaactacccctacccgctcatcggcaagagcgccgtcaccagcgtcacccagaaaaagttcctctgcgacagggtcatgtggcgcatccccttctccagcaacttcatgtccatgggcgcgctcaccgacctcggccagaacatgctctatgccaactccgcccacgcgctagacatgaatttcgaagtcgaccccatggatgagtccacccttctctatgttgtcttcgaagtcttcgacgtcgtccgagtgcaccagccccaccgcggcgtcatcgaggccgtctacctgcgcacccccttctcggccggtaacgccaccacctaagctcttgcttcttgcaagccatggccgcgggctccggcgagcaggagctcagggccatcatccgcgacctgggctgcgggccctacttcctgggcaccttcgataagcgcttcccgggattcatggccccgcacaagctggcctgcgccatcgtcaacacggccggccgcgagaccgggggcgagcactggctggccttcgcctggaacccgcgctcgaacacctgctacctcttcgaccccttcgggttctcggacgagcgcctcaagcagatctaccagttcgagtacgagggcctgctgcgccgcagcgccctggccaccgaggaccgctgcgtcaccctggaaaagtccacccagaccgtgcagggtccgcgctcggccgcctgcgggctcttctgctgcatgttcctgcacgccttcgtgcactggcccgaccgccccatggacaagaaccccaccatgaacttgctgacgggggtgcccaacggcatgctccagtcgccccaggtggaacccaccctgcgccgcaaccaggaggcgctctaccgcttcctcaactcccactccgcctactttcgctcccaccgcgcgcgcatcgagaaggccaccgccttcgaccgcatgaatcaagacatgtaaaccgtgtgtgtatgttaaatgtctttaataaacagcactttcatgttacacatgcatctgagatgatttatttagaaatcgaaagggttctgccgggtctcggcatggcccgcgggcagggacacgttgcggaactggtacttggccagccacttgaactcggggatcagcagtttgggcagcggggtgtcggggaaggagtcggtccacagcttccgcgtcagttgcagggcgcccagcaggtcgggcgcggagatcttgaaatcgcagttgggacccgcgttctgcgcgcgggagttgcggtacacggggttgcagcactggaacaccatcagggccgggtgcttcacgctcgccagcaccgtcgcgtcggtgatgctctccacgtcgaggtcctcggcgttggccatcccgaagggggtcatcttgcaggtctgccttcccatggtgggcacgcacccgggcttgtggttgcaatcgcagtgcagggggatcagcatcatctgggcctggtcggcgttcatccccgggtacatggccttcatgaaagcctccaattgcctgaacgcctgctgggccttggctccctcggtgaagaagaccccgcaggacttgctagagaactggttggtggcgcacccggcgtcgtgcacgcagcagcgcgcgtcgttgttggccagctgcaccacgctgcgcccccagcggttctgggtgatcttggcccggtcggggttctccttcagcgcgcgctgcccgttctcgctcgccacatccatctcgatcatgtgctccttctggatcatggtggtcccgtgcaggcaccgcagcttgccctcggcctcggtgcacccgtgcagccacagcgcgcacccggtgcactcccagttcttgtgggcgatctgggaatgcgcgtgcacgaagccctgcaggaagcggcccatcatggtggtcagggtcttgttgctagtgaaggtcagcggaatgccgcggtgctcctcgttgatgtacaggtggcagatgcggcggtacacctcgccctgctcgggcatcagctggaagttggctttcaggtcggtctccacgcggtagcggtccatcagcatagtcatgatttccatacccttctcccaggccgagacgatgggcaggctcatagggttcttcaccatcatcttagcgctagcagccgcggccagggggtcgctctcgtccagggtctcaaagctccgcttgccgtccttctcggtgatccgcaccggggggtagctgaagcccacggccgccagctcctcctcggcctgtctttcgtcctcgctgtcctggctgacgtcctgcaggaccacatgcttggtcttgcggggtttcttcttgggcggcagcggcggcggagatgttggagatggcgagggggagcgcgagttctcgctcaccactactatctcttcctcttcttggtccgaggccacgcggcggtaggtatgtctcttcgggggcagaggcggaggcgacgggctctcgccgccgcgacttggcggatggctggcagagccccttccgcgttcgggggtgcgctcccggcggcgctctgactgacttcctccgcggccggccattgtgttctcctagggaggaacaacaagcatggagactcagccatcgccaacctcgccatctgcccccaccgccgacgagaagcagcagcagcagaatgaaagcttaaccgccccgccgcccagccccgccacctccgacgcggccgtcccagacatgcaagagatggaggaatccatcgagattgacctgggctatgtgacgcccgcggagcacgaggaggagctggcagtgcgcttttcacaagaagagatacaccaagaacagccagagcaggaagcagagaatgagcagagtcaggctgggctcgagcatgacggcgactacctccacctgagcgggggggaggacgcgctcatcaagcatctggcccggcaggccaccatcgtcaaggatgcgctgctcgaccgcaccgaggtgcccctcagcgtggaggagctcagccgcgcctacgagttgaacctcttctcgccgcgcgtgccccccaagcgccagcccaatggcacctgcgagcccaacccgcgcctcaacttctacccggtcttcgcggtgcccgaggccctggccacctaccacatctttttcaagaaccaaaagatccccgtctcctgccgcgccaaccgcacccgcgccgacgcccttttcaacctgggtcccggcgcccgcctacctgatatcgcctccttggaagaggttcccaagatcttcgagggtctgggcagcgacgagactcgggccgcgaacgctctgcaaggagaaggaggagagcatgagcaccacagcgccctggtcgagttggaaggcgacaacgcgcggctggcggtgctcaaacgcacggtcgagctgacccatttcgcctacccggctctgaacctgccccccaaagtcatgagcgcggtcatggaccaggtgctcatcaagcgcgcgtcgcccatctccgaggacgagggcatgcaagactccgaggagggcaagcccgtggtcagcgacgagcagctggcccggtggctgggtcctaatgctagtccccagagtttggaagagcggcgcaaactcatgatggccgtggtcctggtgaccgtggagctggagtgcctgcgccgcttcttcgccgacgcggagaccctgcgcaaggtcgaggagaacctgcactacctcttcaggcacgggttcgtgcgccaggcctgcaagatctccaacgtggagctgaccaacctggtctcctacatgggcatcttgcacgagaaccgcctggggcagaacgtgctgcacaccaccctgcgcggggaggcccggcgcgactacatccgcgactgcgtctacctctacctctgccacacctggcagacgggcatgggcgtgtggcagcagtgtctggaggagcagaacctgaaagagctctgcaagctcctgcagaagaacctcaagggtctgtggaccgggttcgacgagcgcaccaccgcctcggacctggccgacctcattttccccgagcgcctcaggctgacgctgcgcaacggcctgcccgactttatgagccaaagcatgttgcaaaactttcgctctttcatcctcgaacgctccggaatcctgcccgccacctgctccgcgctgccctcggacttcgtgccgctgaccttccgcgagtgccccccgccgctgtggagccactgctacctgctgcgcctggccaactacctggcctaccactcggacgtgatcgaggacgtcagcggcgagggcctgctcgagtgccactgccgctgcaacctctgcacgccgcaccgctccctggcctgcaacccccagctgctgagcgagacccagatcatcggcaccttcgagttgcaagggcccagcgaaggcgagggttcagccgccaaggggggtctgaaactcaccccggggctgtggacctcggcctacttgcgcaagttcgtgcccgaggactaccatcccttcgagatcaggttctacgaggaccaatcccatccgcccaaggccgagctgtcggcctgcgtcatcacccagggggcgatcctggcccaattgcaagccatccagaaatcccgccaagaattcttgctgaaaaagggccgcggggtctacctcgacccccagaccggtgaggagctcaaccccggcttcccccaggatgccccgaggaaacaagaagctgaaagtggagctgccgcccgtggaggatttggaggaagactgggagaacagcagtcaggcagaggaggaggagatggaggaagactgggacagcactcaggcagaggaggacagcctgcaagacagtctggaggaagacgaggaggaggcagaggaggaggtggaagaagcagccgccgccagaccgtcgtcctcggcgggggagaaagcaagcagcacggataccatctccgctccgggtcggggtcccgctcgaccacacagtagatgggacgagaccggacgattcccgaaccccaccacccagaccggtaagaaggagcggcagggatacaagtcctggcgggggcacaaaaacgccatcgtctcctgcttgcaggcctgcgggggcaacatctccttcacccggcgctacctgctcttccaccgcggggtgaactttccccgcaacatcttgcattactaccgtcacctccacagcccctactacttccaagaagaggcagcagcagcagaaaaagaccagcagaaaaccagcagctagaaaatccacagcggcggcagcaggtggactgaggatcgcggcgaacgagccggcgcaaacccgggagctgaggaaccggatctttcccaccctctatgccatcttccagcagagtcgggggcaggagcaggaactgaaagtcaagaaccgttctctgcgctcgctcacccgcagttgtctgtatcacaagagcgaagaccaacttcagcgcactctcgaggacgccgaggctctcttcaacaagtactgcgcgctcactcttaaagagtagcccgcgcccgcccagtcgcagaaaaaggcgggaattacgtcacctgtgcccttcgccctagccgcctccacccatcatcatgagcaaagagattcccacgccttacatgtggagctaccagccccagatgggcctggccgccggtgccgcccaggactactccacccgcatgaattggctcagcgccgggcccgcgatgatctcacgggtgaatgacatccgcgcccaccgaaaccagatactcctagaacagtcagcgctcaccgccacgccccgcaatcacctcaatccgcgtaattggcccgccgccctggtgtaccaggaaattccccagcccacgaccgtactacttccgcgagacgcccaggccgaagtccagctgactaactcaggtgtccagctggcgggcggcgccaccctgtgtcgtcaccgccccgctcagggtataaagcggctggtgatccggggcagaggcacacagctcaacgacgaggtggtgagctcttcgctgggtctgcgacctgacggagtcttccaactcgccggatcggggagatcttccttcacgcctcgtcaggccgtcctgactttggagagttcgtcctcgcagccccgctcgggtggcatcggcactctccagttcgtggaggagttcactccctcggtctacttcaaccccttctccggctcccccggccactacccggacgagttcatcccgaacttcgacgccatcagcgagtcggtggacggctacgattgaatgtcccatggtggcgcagctgacctagctcggcttcgacacctggaccactgccgccgcttccgctgcttcgctcgggatctcgccgagtttgcctactttgagctgcccgaggagcaccctcagggcccggcccacggagtgcggatcgtcgtcgaagggggcctcgactcccacctgcttcggatcttcagccagcgtccgatcctggtcgagcgcgagcaaggacagacccttctgactctgtactgcatctgcaaccaccccggcctgcatgaaagtctttgttgtctgctgtgtactgagtataataaaagctgagatcagcgactactccggacttccgtgtgttcctgaatccatcaaccagtctttgttcttcaccgggaacgagaccgagctccagctccagtgtaagccccacaagaagtacctcacctggctgttccagggctccccgatcgccgttgtcaaccactgcgacaacgacggagtcctgctgagcggccctgccaaccttactttttccacccgcagaagcaagctccagctcttccaacccttcctccccgggacctatcagtgcgtctcgggaccctgccatcacaccttccacctgatcccgaataccacagcgtcgctccccgctactaacaaccaaactaacctccaccaacgccaccgtcgcgacctttctgaatctaatactaccacccacaccggaggtgagctccgaggtcaaccaacctctgggatttactacggcccctgggaggtggttgggttaatagcgctaggcctagttgcgggtgggcttttggttctctgctacctatacctcccttgctgttcgtacttagtggtgctgtgttgctggtttaagaaatggggaagatcaccctagtgagctgcggtgcgctggtggcggtgttgctttcgattgtgggactgggcggtgcggctgtagtgaaggagaaggccgatccctgcttgcatttcaatcccaacaaatgccagctgagttttcagcccgatggcaatcggtgcgcggtactgatcaagtgcggatgggaatgcgagaacgtgagaatcgagtacaataacaagactcggaacaatactctcgcgtccgtgtggcagcccggggaccccgagtggtacaccgtctctgtccccggtgctgacggctccccgcgcaccgtgaataatactttcatttttgcgcacatgtgcgacacggtcatgtggatgagcaagcagtacgatatgtggccccccacgaaggagaacatcgtggtcttctccatcgcttacagcctgtgcacggcgctaatcaccgctatcgtgtgcctgagcattcacatgctcatcgctattcgccccagaaataatgccgaaaaagaaaaacagccataacgttttttttcacacctttttcagaccatggcctctgttaaatttttgcttttatttgccagtctcattgccgtcattcatggaatgagtaatgagaaaattactatttacactggcactaatcacacattgaaaggtccagaaaaagccacagaagtttcatggtattgttattttaatgaatcagatgtatctactgaactctgtggaaacaataacaaaaaaaatgagagcattactctcatcaagtttcaatgtggatctgacttaaccctaattaacatcactagagactatgtaggtatgtattatggaactacagcaggcatttcggacatggaattttatcaagtttctgtgtctgaacccaccacgcctagaatgaccacaaccacaaaaactacacctgttaccactatgcagctcactaccaataacatttttgccatgcgtcaaatggtcaacaatagcactcaacccaccccacccagtgaggaaattcccaaatccatgattggcattattgttgctgtagtggtgtgcatgttgatcatcgccttgtgcatggtgtactatgccttctgctacagaaagcacagactgaacgacaagctggaacacttactaagtgttgaattttaattttttagaaccatgaagatcctaggccttttaattttttctatcattacctctgctctatgcaattctgacaatgaggacgttactgtcgttgtcggatcaaattatacactgaaaggtccagcgaagggtatgctttcgtggtattgctattttggatctgacactacagaaactgaattatgcaatcttaagaatggcaaaattcaaaattctaaaattaacaattatatatgcaatggtactgatctgatactcctcaatatcacgaaatcatatgctggcagttacacctgccctggagatgatgctgacagtatgattttttacaaagtaactgttgttgatcccactactccacctccacccaccacaactactcacaccacacacacagatcaaaccgcagcagaggaggcagcaaagttagccttgcaggtccaagacagttcatttgttggcattacccctacacctgatcagcggtgtccggggctgctagtcagcggcattgtcggtgtgctttcgggattagcagtcataatcatctgcatgttcatttttgcttgctgctatagaaggctttaccgacaaaaatcagacccactgctgaacctctatgtttaattttttccagagtcatgaaggcagttagcgctctagttttttgttctttgattggcattgttttttgcaatcctattcctaaagttagctttattaaagatgtgaatgttactgaggggggcaatgtgacactggtaggtgtagagggtgctgaaaacaccacctggacaaaataccacctcaatgggtggaaagatatttgcaattggagtgtattagtttatacatgtgagggagttaatcttaccattgtcaatgccacctcagctcaaaatggtagaattcaaggacaaagtgtcagtgtatctaatgggtattttacccaacatacttttatctatgacgttaaagtcataccactgcctacgcctagcccacctagcactaccacacagacaacccacactacacagacaaccacatacagtacattaaatcagcctaccaccactacagcagcagaggttgccagctcgtctggggtccgagtggcatttttgatgtgggccccatctagcagtcccactgctagtaccaatgagcagactactgaatttttgtccactgtcgagagccacaccacagctacctccagtgccttctctagcaccgccaatctctcctcgctttcctctacaccaatcagtcccgctactactcctagccccgctcctcttcccactcccctgaagcaaacagacggcggcatgcaatggcagatcaccctgctcattgtgatcgggttggtcatcctggccgtgttgctctactacatcttctgccgccgcattcccaacgcgcaccgcaagccggtctacaagcccatcattgtcgggcagccggagccgcttcaggtggaagggggtctaaggaatcttctcttctcttttacagtatggtgattgaactatgattcctagacaattcttgatcactattcttatctgcctcctccaagtctgtgccaccctcgctctggtggccaacgccagtccagactgtattgggcccttcgcctcctacgtgctctttgccttcaccacctgcatctgctgctgtagcatagtctgcctgcttatcaccttcttccagttcattgactggatctttgtgcgcatcgcctacctgcgccaccacccccagtaccgcgaccagcgagtggcgcggctgctcaggctcctctgataagcatgcgggctctgctacttctcgcgcttctgctgttagtgctcccccgtcccgtcgacccccggtcccccacccagtcccccgaggaggtccgcaaatgcaaattccaagaaccctggaaattcctcaaatgctaccgccaaaaatcagacatgcatcccagctggatcatgatcattgggatcgtgaacattctggcctgcaccctcatctcctttgtgatttacccctgctttgactttggttggaactcgccagaggcgctctatctcccgcctgaacctgacacaccaccacagcaacctcaggcacacgcactaccaccactacagcctaggccacaatacatgcccatattagactatgaggccgagccacagcgacccatgctccccgctattagttacttcaatctaaccggcggagatgactgacccactggccaacaacaacgtcaacgaccttctcctggacatggacggccgcgcctcggagcagcgactcgcccaacttcgcattcgccagcagcaggagagagccgtcaaggagctgcaggatgcggtggccatccaccagtgcaagagaggcatcttctgcctggtgaaacaggccaagatctcctacgaggtcactccaaacgaccatcgcctctcctacgagctcctgcagcagcgccagaagttcacctgcctggtcggagtcaaccccatcgtcatcacccagcagtctggcgataccaaggggtgcatccactgctcctgcgactcccccgactgcgtccacactctgatcaagaccctctgcggcctccgcgacctcctccccatgaactaatcacccccttatccagtgaaataaagatcatattgatgatgattttacagaaataaaaaataatcatttgatttgaaataaagatacaatcatattgatgatttgagtttaacaaaaaaataaagaatcacttacttgaaatctgataccaggtctctgtccatgttttctgccaacaccacttcactcccctcttcccagctctggtactgcaggccccggcgggctgcaaacttcctccacacgctgaaggggatgtcaaattcctcctgtccctcaatcttcattttatcttctatcagatgtccaaaaagcgcgtccgggtggatgatgacttcgaccccgtctacccctacgatgcagacaacgcaccgaccgtgcccttcatcaacccccccttcgtctcttcagatggattccaagagaagcccctgggggtgttgtccctgcgactggccgaccccgtcaccaccaagaacggggaaatcaccctcaagctgggagagggggtggacctcgattcctcgggaaaactcatctccaacacggccaccaaggccgccgcccctctcagtttttccaacaacaccatttcccttaacatggatcaccccttttacactaaagatggaaaattatccttacaagtttctccaccattaaatatactgagaacaagcattctaaacacactagctttaggttttggatcaggtttaggactccgtggctctgccttggcagtacagttagtctctccacttacatttgatactgatggaaacataaagcttaccttagacagaggtttgcatgttacaacaggagatgcaattgaaagcaacataagctgggctaaaggtttaaaatttgaagatggagccatagcaaccaacattggaaatgggttagagtttggaagcagtagtacagaaacaggtgttgatgatgcttacccaatccaagttaaacttggatctggccttagctttgacagtacaggagccataatggctggtaacaaagaagacgataaactcactttgtggacaacacctgatccatcaccaaactgtcaaatactcgcagaaaatgatgcaaaactaacactttgcttgactaaatgtggtagtcaaatactggccactgtgtcagtcttagttgtaggaagtggaaacctaaaccccattactggcaccgtaagcagtgctcaggtgtttctacgttttgatgcaaacggtgttcttttaacagaacattctacactaaaaaaatactgggggtataggcagggagatagcatagatggcactccatataccaatgctgtaggattcatgcccaatttaaaagcttatccaaagtcacaaagttctactactaaaaataatatagtagggcaagtatacatgaatggagatgtttcaaaacctatgcttctcactataaccctcaatggtactgatgacagcaacagtacatattcaatgtcattttcatacacctggactaatggaagctatgttggagcaacatttggggctaactcttataccttctcatacatcgcccaagaatgaacactgtatcccaccctgcatgccaacccttcccaccccactctgtggaacaaactctgaaacacaaaataaaataaagttcaagtgttttattgattcaacagttttacaggattcgagcagttatttttcctccaccctcccaggacatggaatacaccaccctctccccccgcacagccttgaacatctgaatgccattggtgatggacatgcttttggtctccacgttccacacagtttcagagcgagccagtctcgggtcggtcagggagatgaaaccctccgggcactcccgcatctgcacctcacagctcaacagctgaggattgtcctcggtggtcgggatcacggttatctggaagaagcagaagagcggcggtgggaatcatagtccgcgaacgggatcggccggtggtgtcgcatcaggccccgcagcagtcgctgccgccgccgctccgtcaagctgctgctcagggggtccgggtccagggactccctcagcatgatgcccacggccctcagcatcagtcgtctggtgcggcgggcgcagcagcgcatgcggatctcgctcaggtcgctgcagtacgtgcaacacagaaccaccaggttgttcaacagtccatagttcaacacgctccagccgaaactcatcgcgggaaggatgctacccacgtggccgtcgtaccagatcctcaggtaaatcaagtggtgccccctccagaacacgctgcccacgtacatgatctccttgggcatgtggcggttcaccacctcccggtaccacatcaccctctggttgaacatgcagccccggatgatcctgcggaaccacagggccagcaccgccccgcccgccatgcagcgaagagaccccgggtcccggcaatggcaatggaggacccaccgctcgtacccgtggatcatctgggagctgaacaagtctatgttggcacagcacaggcatatgctcatgcatctcttcagcactctcaactcctcgggggtcaaaaccatatcccagggcacggggaactcttgcaggacagcgaaccccgcagaacagggcaatcctcgcacagaacttacattgtgcatggacagggtatcgcaatcaggcagcaccgggtgatcctccaccagagaagcgcgggtctcggtctcctcacagcgtggtaagggggccggccgatacgggtgatggcgggacgcggctgatcgtgttcgcgaccgtgtcatgatgcagttgctttcggacattttcgtacttgctgtagcagaacctggtccgggcgctgcacaccgatcgccggcggcggtctcggcgcttggaacgctcggtgttgaaattgtaaaacagccactctctcagaccgtgcagcagatctagggcctcaggagtgatgaagatcccatcatgcctgatggctctgatcacatcgaccaccgtggaatgggccagacccagccagatgatgcaattttgttgggtttcggtgacggcgggggagggaagaacaggaagaaccatgattaacttttaatccaaacggtctcggagtacttcaaaatgaagatcgcggagatggcacctctcgcccccgctgtgttggtggaaaataacagccaggtcaaaggtgatacggttctcgagatgttccacggtggcttccagcaaagcctccacgcgcacatccagaaacaagacaatagcgaaagcgggagggttctctaattcctcaatcatcatgttacactcctgcaccatccccagataattttcatttttccagccttgaatgattcgaactagttcctgaggtaaatccaagccagccatgataaagagctcgcgcagagcgccctccaccggcattcttaagcacaccctcataattccaagatattctgctcctggttcacctgcagcagattgacaagcggaatatcaaaatctctgccgcgatccctgagctcctccctcagcaataactgtaagtactctttcatatcctctccgaaatttttagccataggaccaccaggaataagattagggcaagccacagtacagataaaccgaagtcctccccagtgagcattgccaaatgcaagactgctataagcatgctggctagacccggtgatatcttccagataactggacagaaaatcgcccaggcaatttttaagaaaatcaacaaaagaaaaatcctccaggtggacgtttagagcctcgggaacaacgatgaagtaaatgcaagcggtgcgttccagcatggttagttagctgatctgtagaaaaaacaaaaatgaacattaaaccatgctagcctggcgaacaggtgggtaaatcgttctctccagcaccaggcaggccacggggtctccggcgcgaccctcgtaaaaattgtcgctatgattgaaaaccatcacagagagacgttcccggtggccggcgtgaatgattcgacaagatgaatacacccccggaacattggcgtccgcgagtgaaaaaaagcgcccgaggaagcaataaggcactacaatgctcagtctcaagtccagcaaagcgatgccatgcggatgaagcacaaaattctcaggtgcgtacaaaatgtaattactcccctcctgcacaggcagcaaagcccccgatccctccaggtacacatacaaagcctcagcgtccatagcttaccgagcagcagcacacaacaggcgcaagagtcagagaaaggctgagctctaacctgtccacccgctctctgctcaatatatagcccagatctacactgacgtaaaggccaaagtctaaaaatacccgccaaataatcacacacgcccagcacacgcccagaaaccggtgacacactcaaaaaaatacgcgcacttcctcaaacgcccaaaactgccgtcatttccgggttcccacgctacgtcatcaaaacacgactttcaaattccgtcgaccgttaaaaacgtcacccgccccgcccctaacggtcgcccgtctctcagccaatcagcgccccgcatccccaaattcaaacacctcatttgcatattaacgcgcacaaaaagtttgaggtatattattgatgatgg

SEQ ID NO: 2 - DNA, 31588 bp, Artificial Sequence
  Description of Artificial Sequence: Synthetic polynucleotide
ccatcttcaataatatacctcaaactttttgtgcgcgttaatatgcaaatgaggcgtttgaatttggggaggaagggcggtgattggtcgagggatgagcgaccgttaggggcggggcgagtgacgttttgatgacgtggttgcgaggaggagccagtttgcaagttctcgtgggaaaagtgacgtcaaacgaggtgtggtttgaacacggaaatactcaattttcccgcgctctctgacaggaaatgaggtgtttctgggcggatgcaagtgaaaacgggccattttcgcgcgaaaactgaatgaggaagtgaaaatctgagtaatttcgcgtttatggcagggaggagtatttgccgagggccgagtagactttgaccgattacgtgggggtttcgattaccgtgtttttcacctaaatttccgcgtacggtgtcaaagtccggtgtttttacgtaggtgtcagctgatcgccagggtatttaaacctgcgctctccagtcaagaggccactcttgagtgccagcgagaagagttttctcctccgcgccgcgagtcagatctacactttgaaagtagggataacagggtaatgacattgattattgactagttgttaatagtaatcaattacggggtcattagttcatagcccatatatggagttccgcgttacataacttacggtaaatggcccgcctggctgaccgcccaacgacccccgcccattgacgtcaataatgacgtatgttcccatagtaacgccaatagggactttccattgacgtcaatgggtggagtatttacggtaaactgcccacttggcagtacatcaagtgtatcatatgccaagtccgccccctattgacgtcaatgacggtaaatggcccgcctggcattatgcccagtacatgaccttacgggactttcctacttggcagtacatctacgtattagtcatcgctattaccatggtgatgcggttttggcagtacaccaatgggcgtggatagcggtttgactcacggggatttccaagtctccaccccattgacgtcaatgggagtttgttttggcaccaaaatcaacgggactttccaaaatgtcgtaataaccccgccccgttgacgcaaatgggcggtaggcgtgtacggtgggaggtctatataagcagagctcgtttagtgaaccgtcagatcgcctggaacgccatccacgctgttttgacctccatagaagacagcgatcgcgccaccatggccgggatgttccaggcactgtccgaaggctgcacaccctatgatattaaccagatgctgaatgtcctgggagaccaccaggtctctggcctggagcagctggagagcatcatcaacttcgagaagctgaccgagtggacaagctccaatgtgatgcctatcctgtccccactgaccaagggcatcctgggcttcgtgtttaccctgacagtgccttctgagcggggcctgtcttgcatcagcgaggcagacgcaaccacaccagagtccgccaatctgggcgaggagatcctgtctcagctgtacctgtggccccgggtgacatatcactccccttcttacgcctatcaccagttcgagcggagagccaagtacaagagacacttcccaggctttggccagtctctgctgttcggctaccccgtgtacgtgttcggcgattgcgtgcagggcgactgggatgccatccggtttagatactgcgcaccacctggatatgcactgctgaggtgtaacgacaccaattattccgccctgctggcagtgggcgccctggagggccctcgcaatcaggattggctgggcgtgccaaggcagctggtgacacgcatgcaggccatccagaacgcaggcctgtgcaccctggtggcaatgctggaggagacaatcttctggctgcaggcctttctgatggccctgaccgacagcggccccaagacaaacatcatcgtggattcccagtacgtgatgggcatctccaagccttctttccaggagtttgtggactgggagaacgtgagcccagagctgaattccaccgatcagccattctggcaggcaggaatcctggcaaggaacctggtgcctatggtggccacagtgcagggccagaatctgaagtaccagggccagagcctggtcatcagcgcctccatcatcgtgtttaacctgctggagctggagggcgactatcgggacgatggcaacgtgtgggtgcacaccccactgagccccagaacactgaacgcctgggtgaaggccgtggaggagaagaagggcatcccagtgcacctggagctggcctccatgaccaatatggagctgatgtctagcatcgtgcaccagcaggtgaggacatacggacccgtgttcatgtgcctgggaggcctgctgaccatggtggcaggagccgtgtggctgacagtgcgggtgctggagctgttcagagccgcccagctggccaacgatgtggtgctgcagatcatggagctgtgcggagcagcctttcgccaggtgtgccacaccacagtgccatggcccaatgcctccctgacccccaagtggaacaatgagacaacacagcctcagatcgccaactgtagcgtgtacgacttcttcgtgtggctgcactactatagcgtgagggataccctgtggccccgcgtgacataccacatgaataagtacgcctatcacatgctggagaggcgcgccaagtataagagaggccctggcccaggcgcaaagtttgtggcagcatggaccctgaaggccgccgccggccccggccccggccagtatatcaaggctaacagtaagttcattggaatcacagagctgggacccggacctggataatgagtttaaactcccatttaaatgtgagggttaatgcttcgagcagacatgataagatacattgatgagtttggacaaaccacaactagaatgcagtgaaaaaaatgctttatttgtgaaatttgtgatgctattgctttatttgtaaccattataagctgcaataaacaagttaacaacaacaattgcattcattttatgtttcaggttcagggggagatgtgggaggttttttaaagcaagtaaaacctctacaaatgtggtaaaataactataacggtcctaaggtagcgagtgagtagtgttctggggcgggggaggacctgcatgagggccagaataactgaaatctgtgcttttctgtgtgttgcagcagcatgagcggaagcggctcctttgagggaggggtattcagcccttatctgacggggcgtctcccctcctgggcgggagtgcgtcagaatgtgatgggatccacggtggacggccggcccgtgcagcccgcgaactcttcaaccctgacctatgcaaccctgagctcttcgtcgttggacgcagctgccgccgcagctgctgcatctgccgccagcgccgtgcgcggaatggccatgggcgccggctactacggcactctggtggccaactcgagttccaccaataatcccgccagcctgaacgaggagaagctgttgctgctgatggcccagctcgaggccttgacccagcgcctgggcgagctgacccagcaggtggctcagctgcaggagcagacgcgggccgcggttgccacggtgaaatccaaataaaaaatgaatcaataaataaacggagacggttgttgattttaacacagagtctgaatctttatttgatttttcgcgcgcggtaggccctggaccaccggtctcgatcattgagcacccggtggatcttttccaggacccggtagaggtgggcttggatgttgaggtacatgggcatgagcccgtcccgggggtggaggtagctccattgcagggcctcgtgctcgggggtggtgttgtaaatcacccagtcatagcaggggcgcagggcatggtgttgcacaatatctttgaggaggagactgatggccacgggcagccctttggtgtaggtgtttacaaatctgttgagctgggagggatgcatgcggggggagatgaggtgcatcttggcctggatcttgagattggcgatgttaccgcccagatcccgcctggggttcatgttgtgcaggaccaccagcacggtgtatccggtgcacttggggaatttatcatgcaacttggaagggaaggcgtgaaagaatttggcgacgcctttgtgcccgcccaggttttccatgcactcatccatgatgatggcgatgggcccgtgggcggcggcctgggcaaagacgtttcgggggtcggacacatcatagttgtggtcctgggtgaggtcatcataggccattttaatgaatttggggcggagggtgccggactgggggacaaaggtaccctcgatcccgggggcgtagttcccctcacagatctgcatctcccaggctttgagctcggagggggggatcatgtccacctgcggggcgataaagaacacggtttccggggcgggggagatgagctgggccgaaagcaagttccggagcagctgggacttgccgcagccggtggggccgtagatgaccccgatgaccggctgcaggtggtagttgagggagagacagctgccgtcctcccggaggaggggggccacctcgttcatcatctcgcgcacgtgcatgttctcgcgcaccagttccgccaggaggcgctctccccccagggataggagctcctggagcgaggcgaagtttttcagcggcttgagtccgtcggccatgggcattttggagagggtttgttgcaagagttccaggcggtcccagagctcggtgatgtgctctacggcatctcgatccagcagacctcctcgtttcgcgggttgggacggctgcgggagtagggcaccagacgatgggcgtccagcgcagccagggtccggtccttccagggtcgcagcgtccgcgtcagggtggtctccgtcacggtgaaggggtgcgcgccgggctgggcgcttgcgagggtgcgcttcaggctcatccggctggtcgaaaaccgctcccgatcggcgccctgcgcgtcggccaggtagcaattgaccatgagttcgtagttgagcgcctcggccgcgtggcctttggcgcggagcttacctttggaagtctgcccgcaggcgggacagaggagggacttgagggcgtagagcttgggggcgaggaagacggactcgggggcgtaggcgtccgcgccgcagtgggcgcagacggtctcgcactccacgagccaggtgaggtcgggctggtcggggtcaaaaaccagtttcccgccgttctttttgatgcgtttcttacctttggtctccatgagctcgtgtccccgctgggtgacaaagaggctgtccgtgtccccgtagaccgactttatgggccggtcctcgagcggtgtgccgcggtcctcctcgtagaggaaccccgcccactccgagacgaaagcccgggtccaggccagcacgaaggaggccacgtgggacgggtagcggtcgttgtccaccagcgggtccaccttttccagggtatgcaaacacatgtccccctcgtccacatccaggaaggtgattggcttgtaagtgtaggccacgtgaccgggggtcccggccgggggggtataaaagggtgcgggtccctgctcgtcctcactgtcttccggatcgctgtccaggagcgccagctgttggggtaggtattccctctcgaaggcgggcatgacctcggcactcaggttgtcagtttctagaaacgaggaggatttgatattgacggtgccggcggagatgcctttcaagagcccctcgtccatctggtcagaaaagacgatctttttgttgtcgagcttggtggcgaaggagccgtagagggcgttggagaggagcttggcgatggagcgcatggtctggtttttttccttgtcggcgcgctccttggcggcgatgttgagctgcacgtactcgcgcgccacgcacttccattcggggaagacggtggtcagctcgtcgggcacgattctgacctgccagccccgattatgcagggtgatgaggtccacactggtggccacctcgccgcgcaggggctcattagtccagcagaggcgtccgcccttgcgcgagcagaaggggggcagggggtccagcatgacctcgtcgggggggtcggcatcgatggtgaagatgccgggcaggaggtcggggtcaaagtagctgatggaagtggccagatcgtccagggcagcttgccattcgcgcacggccagcgcgcgctcgtagggactgaggggcgtgccccagggcatgggatgggtaagcgcggaggcgtacatgccgcagatgtcgtagacgtagaggggctcctcgaggatgccgatgtaggtggggtagcagcgccccccgcggatgctggcgcgcacgtagtcatacagctcgtgcgagggggcgaggagccccgggcccaggttggtgcgactgggcttttcggcgcggtagacgatctggcggaaaatggcatgcgagttggaggagatggtgggcctttggaagatgttgaagtgggcgtggggcagtccgaccgagtcgcggatgaagtgggcgtaggagtcttgcagcttggcgacgagctcggcggtgactaggacgtccagagcgcagtagtcgagggtctcctggatgatgtcatacttgagctgtcccttttgtttccacagctcgcggttgagaaggaactcttcgcggtccttccagtactcttcgagggggaacccgtcctgatctgcacggtaagagcctagcatgtagaactggttgacggccttgtaggcgcagcagcccttctccacggggagggcgtaggcctgggcggccttgcgcagggaggtgtgcgtgagggcgaaagtgtccctgaccatgaccttgaggaactggtgcttgaagtcgatatcgtcgcagcccccctgctcccagagctggaagtccgtgcgcttcttgtaggcggggttgggcaaagcgaaagtaacatcgttgaagaggatcttgcccgcgcggggcataaagttgcgagtgatgcggaaaggttggggcacctcggcccggttgttgatgacctgggcggcgagcacgatctcgtcgaagccgttgatgttgtggcccacgatgtagagttccacgaatcgcggacggcccttgacgtggggcagtttcttgagctcctcgtaggtgagctcgtcggggtcgctgagcccgtgctgctcgagcgcccagtcggcgagatgggggttggcgcggaggaaggaagtccagagatccacggccagggcggtttgcagacggtcccggtactgacggaactgctgcccgacggccattttttcgggggtgacgcagtagaaggtgcgggggtccccgtgccagcgatcccatttgagctggagggcgagatcgagggcgagctcgacgagccggtcgtccccggagagtttcatgaccagcatgaaggggacgagctgcttgccgaaggaccccatccaggtgtaggtttccacatcgtaggtgaggaagagcctttcggtgcgaggatgcgagccgatggggaagaactggatctcctgccaccaattggaggaatggctgttgatgtgatggaagtagaaatgccgacggcgcgccgaacactcgtgcttgtgtttatacaagcggccacagtgctcgcaacgctgcacgggatgcacgtgctgcacgagctgtacctgagttcctttgacgaggaatttcagtgggaagtggagtcgtggcgcctgcatctcgtgctgtactacgtcgtggtggtcggcctggccctcttctgcctcgatggtggtcatgctgacgagcccgcgcgggaggcaggtccagacctcggcgcgagcgggtcggagagcgaggacgagggcgcgcaggccggagctgtccagggtcctgagacgctgcggagtcaggtcagtgggcagcggcggcgcgcggttgacttgcaggagtttttccagggcgcgcgggaggtccagatggtacttgatctccaccgcgccattggtggcgacgtcgatggcttgcagggtcccgtgcccctggggtgtgaccaccgtcccccgtttcttcttgggcggctggggcgacgggggcggtgcctcttccatggttagaagcggcggcgaggacgcgcgccgggcggcaggggcggctcggggcccggaggcaggggcggcaggggcacgtcggcgccgcgcgcgggtaggttctggtactgcgcccggagaagactggcgtgagcgacgacgcgacggttgacgtcctggatctgacgcctctgggtgaaggccacgggacccgtgagtttgaacctgaaagagagttcgacagaatcaatctcggtatcgttgacggcggcctgccgcaggatctcttgcacgtcgcccgagttgtcctggtaggcgatctcggtcatgaactgctcgatctcctcctcttgaaggtctccgcggccggcgcgctccacggtggccgcgaggtcgttggagatgcggcccatgagctgcgagaaggcgttcatgcccgcctcgttccagacgcggctgtagaccacgacgccctcgggatcgcgggcgcgcatgaccacctgggcgaggttgagctccacgtggcgcgtgaagaccgcgtagttgcagaggcgctggtagaggtagttgagcgtggtggcgatgtgctcggtgacgaagaaatacatgatccagcggcggagcggcatctcgctgacgtcgcccagcgcctccaaacgttccatggcctcgtaaaagtccacggcgaagttgaaaaactgggagttgcgcgccgagacggtcaactcctcctccagaagacggatgagctcggcgatggtggcgcgcacctcgcgctcgaaggcccccgggagttcctccacttcctcttcttcctcctccactaacatctcttctacttcctcctcaggcggcagtggtggcgggggagggggcctgcgtcgccggcggcgcacgggcagacggtcgatgaagcgctcgatggtctcgccgcgccggcgtcgcatggtctcggtgacggcgcgcccgtcctcgcggggccgcagcgtgaagacgccgccgcgcatctccaggtggccgggggggtccccgttgggcagggagagggcgctgacgatgcatcttatcaattgccccgtagggactccgcgcaaggacctgagcgtctcgagatccacgggatctgaaaaccgctgaacgaaggcttcgagccagtcgcagtcgcaaggtaggctgagcacggtttcttctggcgggtcatgttggttgggagcggggcgggcgatgctgctggtgatgaagttgaaataggcggttctgagacggcggatggtggcgaggagcaccaggtctttgggcccggcttgctggatgcgcagacggtcggccatgccccaggcgtggtcctgacacctggccaggtccttgtagtagtcctgcatgagccgctccacgggcacctcctcctcgcccgcgcggccgtgcatgcgcgtgagcccgaagccgcgctggggctggacgagcgccaggtcggcgacgacgcgctcggcgaggatggcttgctggatctgggtgagggtggtctggaagtcatcaaagtcgacgaagcggtggtaggctccggtgttgatggtgtaggagcagttggccatgacggaccagttgacggtctggtggcccggacgcacgagctcgtggtacttgaggcgcgagtaggcgcgcgtgtcgaagatgtagtcgttgcaggtgcgcaccaggtactggtagccgatgaggaagtgcggcggcggctggcggtagagcggccatcgctcggtggcgggggcgccgggcgcgaggtcctcgagcatggtgcggtggtagccgtagatgtacctggacatccaggtgatgccggcggcggtggtggaggcgcgcgggaactcgcggacgcggttccagatgttgcgcagcggcaggaagtagttcatggtgggcacggtctggcccgtgaggcgcgcgcagtcgtggatgctctatacgggcaaaaacgaaagcggtcagcggctcgactccgtggcctggaggctaagcgaacgggttgggctgcgcgtgtaccccggttcgaatctcgaatcaggctggagccgcagctaacgtggtattggcactcccgtctcgacccaagcctgcaccaaccctccaggatacggaggcgggtcgttttgcaacttttttttggaggccggatgagactagtaagcgcggaaagcggccgaccgcgatggctcgctgccgtagtctggagaagaatcgccagggttgcgttgcggtgtgccccggttcgaggccggccggattccgcggctaacgagggcgtggctgccccgtcgtttccaagaccccatagccagccgacttctccagttacggagcgagcccctcttttgttttgtttgtttttgccagatgcatcccgtactgcggcagatgcgcccccaccaccctccaccgcaacaacagccccctccacagccggcgcttctgcccccgccccagcagcaacttccagccacgaccgccgcggccgccgtgagcggggctggacagagttatgatcaccagctggccttggaagagggcgaggggctggcgcgcctgggggcgtcgtcgccggagcggcacccgcgcgtgcagatgaaaagggacgctcgcgaggcctacgtgcccaagcagaacctgttcagagacaggagcggcgaggagcccgaggagatgcgcgcggcccggttccacgcggggcgggagctgcggcgcggcctggaccgaaagagggtgctgagggacgaggatttcgaggcggacgagctgacggggatcagccccgcgcgcgcgcacgtggccgcggccaacctggtcacggcgtacgagcagaccgtgaaggaggagagcaacttccaaaaatccttcaacaaccacgtgcgcaccctgatcgcgcgcgaggaggtgaccctgggcctgatgcacctgtgggacctgctggaggccatcgtgcagaaccccaccagcaagccgctgacggcgcagctgttcctggtggtgcagcatagtcgggacaacgaagcgttcagggaggcgctgctgaatatcaccgagcccgagggccgctggctcctggacctggtgaacattctgcagagcatcgtggtgcaggagcgcgggctgccgctgtccgagaagctggcggccatcaacttctcggtgctgagtttgggcaagtactacgctaggaagatctacaagaccccgtacgtgcccatagacaaggaggtgaagatcgacgggttttacatgcgcatgaccctgaaagtgctgaccctgagcgacgatctgggggtgtaccgcaacgacaggatgcaccgtgcggtgagcgccagcaggcggcgcgagctgagcgaccaggagctgatgcatagtctgcagcgggccctgaccggggccgggaccgagggggagagctactttgacatgggcgcggacctgcactggcagcccagccgccgggccttggaggcggcggcaggaccctacgtagaagaggtggacgatgaggtggacgaggagggcgagtacctggaagactgatggcgcgaccgtatttttgctagatgcaacaacaacagccacctcctgatcccgcgatgcgggcggcgctgcagagccagccgtccggcattaactcctcggacgattggacccaggccatgcaacgcatcatggcgctgacgacccgcaaccccgaagcctttagacagcagccccaggccaaccggctctcggccatcctggaggccgtggtgccctcgcgctccaaccccacgcacgagaaggtcctggccatcgtgaacgcgctggtggagaacaaggccatccgcggcgacgaggccggcctggtgtacaacgcgctgctggagcgcgtggcccgctacaacagcaccaacgtgcagaccaacctggaccgcatggtgaccgacgtgcgcgaggccgtggcccagcgcgagcggttccaccgcgagtccaacctgggatccatggtggcgctgaacgccttcctcagcacccagcccgccaacgtgccccggggccaggaggactacaccaacttcatcagcgccctgcgcctgatggtgaccgaggtgccccagagcgaggtgtaccagtccgggccggactacttcttccagaccagtcgccagggcttgcagaccgtgaacctgagccaggctttcaagaacttgcagggcctgtggggcgtgcaggccccggtcggggaccgcgcgacggtgtcgagcctgctgacgccgaactcgcgcctgctgctgctgctggtggcccccttcacggacagcggcagcatcaaccgcaactcgtacctgggctacctgattaacctgtaccgcgaggccatcggccaggcgcacgtggacgagcagacctaccaggagatcacccacgtgagccgcgccctgggccaggacgacccgggcaacctggaagccaccctgaactttttgctgaccaaccggtcgcagaagatcccgccccagtacgcgctcagcaccgaggaggagcgcatcctgcgttacgtgcagcagagcgtgggcctgttcctgatgcaggagggggccacccccagcgccgcgctcgacatgaccgcgcgcaacatggagcccagcatgtacgccagcaaccgcccgttcatcaataaactgatggactacttgcatcgggcggccgccatgaactctgactatttcaccaacgccatcctgaatccccactggctcccgccgccggggttctacacgggcgagtacgacatgcccgaccccaatgacgggttcctgtgggacgatgtggacagcagcgtgttctccccccgaccgggtgctaacgagcgccccttgtggaagaaggaaggcagcgaccgacgcccgtcctcggcgctgtccggccgcgagggtgctgccgcggcggtgcccgaggccgccagtcctttcccgagcttgcccttctcgctgaacagtatccgcagcagcgagctgggcaggatcacgcgcccgcgcttgctgggcgaagaggagtacttgaatgactcgctgttgagacccgagcgggagaagaacttccccaataacgggatagaaagcctggtggacaagatgagccgctggaagacgtatgcgcaggagcacagggacgatccccgggcgtcgcagggggccacgagccggggcagcgccgcccgtaaacgccggtggcacgacaggcagcggggacagatgtgggacgatgaggactccgccgacgacagcagcgtgttggacttgggtgggagtggtaacccgttcgctcacctgcgcccccgtatcgggcgcatgatgtaagagaaaccgaaaataaatgatactcaccaaggccatggcgaccagcgtgcgttcgtttcttctctgttgttgttgtatctagtatgatgaggcgtgcgtacccggagggtcctcctccctcgtacgagagcgtgatgcagcaggcgatggcggcggcggcgatgcagcccccgctggaggctccttacgtgcccccgcggtacctggcgcctacggaggggcggaacagcattcgttactcggagctggcacccttgtacgataccacccggttgtacctggtggacaacaagtcggcggacatcgcctcgctgaactaccagaacgaccacagcaacttcctgaccaccgtggtgcagaacaatgacttcacccccacggaggccagcacccagaccatcaactttgacgagcgctcgcggtggggcggccagctgaaaaccatcatgcacaccaacatgcccaacgtgaacgagttcatgtacagcaacaagttcaaggcgcgggtgatggtctcccgcaagacccccaatggggtgacagtgacagaggattatgatggtagtcaggatgagctgaagtatgaatgggtggaatttgagctgcccgaaggcaacttctcggtgaccatgaccatcgacctgatgaacaacgccatcatcgacaattacttggcggtggggcggcagaacggggtgctggagagcgacatcggcgtgaagttcgacactaggaacttcaggctgggctgggaccccgtgaccgagctggtcatgcccggggtgtacaccaacgaggctttccatcccgatattgtcttgctgcccggctgcggggtggacttcaccgagagccgcctcagcaacctgctgggcattcgcaagaggcagcccttccaggaaggcttccagatcatgtacgaggatctggaggggggcaacatccccgcgctcctggatgtcgacgcctatgagaaaagcaaggaggatgcagcagctgaagcaactgcagccgtagctaccgcctctaccgaggtcaggggcgataattttgcaagcgccgcagcagtggcagcggccgaggcggctgaaaccgaaagtaagatagtcattcagccggtggagaaggatagcaagaacaggagctacaacgtactaccggacaagataaacaccgcctaccgcagctggtacctagcctacaactatggcgaccccgagaagggcgtgcgctcctggacgctgctcaccacctcggacgtcacctgcggcgtggagcaagtctactggtcgctgcccgacatgatgcaagacccggtcaccttccgctccacgcgtcaagttagcaactacccggtggtgggcgccgagctcctgcccgtctactccaagagcttcttcaacgagcaggccgtctactcgcagcagctgcgcgccttcacctcgcttacgcacgtcttcaaccgcttccccgagaaccagatcctcgtccgcccgcccgcgcccaccattaccaccgtcagtgaaaacgttcctgctctcacagatcacgggaccctgccgctgcgcagcagtatccggggagtccagcgcgtgaccgttactgacgccagacgccgcacctgcccctacgtctacaaggccctgggcatagtcgcgccgcgcgtcctctcgagccgcaccttctaaatgtccattctcatctcgcccagtaataacaccggttggggcctgcgcgcgcccagcaagatgtacggaggcgctcgccaacgctccacgcaacaccccgtgcgcgtgcgcgggcacttccgcgctccctggggcgccctcaagggccgcgtgcggtcgcgcaccaccgtcgacgacgtgatcgaccaggtggtggccgacgcgcgcaactacacccccgccgccgcgcccgtctccaccgtggacgccgtcatcgacagcgtggtggccgacgcgcgccggtacgcccgcgccaagagccggcggcggcgcatcgcccggcggcaccggagcacccccgccatgcgcgcggcgcgagccttgctgcgcagggccaggcgcacgggacgcagggccatgctcagggcggccagacgcgcggcttcaggcgccagcgccggcaggacccggagacgcgcggccacggcggcggcagcggccatcgccagcatgtcccgcccgcggcgagggaacgtgtactgggtgcgcgacgccgccaccggtgtgcgcgtgcccgtgcgcacccgcccccctcgcacttgaagatgttcacttcgcgatgttgatgtgtcccagcggcgaggaggatgtccaagcgcaaattcaaggaagagatgctccaggtcatcgcgcctgagatctacggccctgcggtggtgaaggaggaaagaaagccccgcaaaatcaagcgggtcaaaaaggacaaaaaggaagaagaaagtgatgtggacggattggtggagtttgtgcgcgagttcgccccccggcggcgcgtgcagtggcgcgggcggaaggtgcaaccggtgctgagacccggcaccaccgtggtcttcacgcccggcgagcgctccggcaccgcttccaagcgctcctacgacgaggtgtacggggatgatgatattctggagcaggcggccgagcgcctgggcgagtttgcttacggcaagcgcagccgttccgcaccgaaggaagaggcggtgtccatcccgctggaccacggcaaccccacgccgagcctcaagcccgtgaccttgcagcaggtgctgccgaccgcggcgccgcgccgggggttcaagcgcgagggcgaggatctgtaccccaccatgcagctgatggtgcccaagcgccagaagctggaagacgtgctggagaccatgaaggtggacccggacgtgcagcccgaggtcaaggtgcggcccatcaagcaggtggccccgggcctgggcgtgcagaccgtggacatcaagattcccacggagcccatggaaacgcagaccgagcccatgatcaagcccagcaccagcaccatggaggtgcagacggatccctggatgccatcggctcctagtcgaagaccccggcgcaagtacggcgcggccagcctgctgatgcccaactacgcgctgcatccttccatcatccccacgccgggctaccgcggcacgcgcttctaccgcggtcataccagcagccgccgccgcaagaccaccactcgccgccgccgtcgccgcaccgccgctgcaaccacccctgccgccctggtgcggagagtgtaccgccgcggccgcgcacctctgaccctgccgcgcgcgcgctaccacccgagcatcgccatttaaactttcgcctgctttgcagatcaatggccctcacatgccgccttcgcgttcccattacgggctaccgaggaagaaaaccgcgccgtagaaggctggcggggaacgggatgcgtcgccaccaccaccggcggcggcgcgccatcagcaagcggttggggggaggcttcctgcccgcgctgatccccatcatcgccgcggcgatcggggcgatccccggcattgcttccgtggcggtgcaggcctctcagcgccactgagacacacttggaaacatcttgtaataaaccaatggactctgacgctcctggtcctgtgatgtgttttcgtagacagatggaagacatcaatttttcgtccctggctccgcgacacggcacgcggccgttcatgggcacctggagcgacatcggcaccagccaactgaacgggggcgccttcaattggagcagtctctggagcgggcttaagaatttcgggtccacgcttaaaacctatggcagcaaggcgtggaacagcaccacagggcaggcgctgagggataagctgaaagagcagaacttccagcagaaggtggtcgatgggctcgcctcgggcatcaacggggtggtggacctggccaaccaggccgtgcagcggcagatcaacagccgcctggacccggtgccgcccgccggctccgtggagatgccgcaggtggaggaggagctgcctcccctggacaagcggggcgagaagcgaccccgccccgatgcggaggagacgctgctgacgcacacggacgagccgcccccgtacgaggaggcggtgaaactgggtctgcccaccacgcggcccatcgcgcccctggccaccggggtgctgaaacccgaaaagcccgcgaccctggacttgcctcctccccagccttcccgcccctctacagtggctaagcccctgccgccggtggccgtggcccgcgcgcgacccgggggcaccgcccgccctcatgcgaactggcagagcactctgaacagcatcgtgggtctgggagtgcagagtgtgaagcgccgccgctgctattaaacctaccgtagcgcttaacttgcttgtctgtgtgtgtatgtattatgtcgccgccgccgctgtccaccagaaggaggagtgaagaggcgcgtcgccgagttgcaagatggccaccccatcgatgctgccccagtgggcgtacatgcacatcgccggacaggacgcttcggagtacctgagtccgggtctggtgcagtttgcccgcgccacagacacctacttcagtctggggaacaagtttaggaaccccacggtggcgcccacgcacgatgtgaccaccgaccgcagccagcggctgacgctgcgcttcgtgcccgtggaccgcgaggacaacacctactcgtacaaagtgcgctacacgctggccgtgggcgacaaccgcgtgctggacatggccagcacctactttgacatccgcggcgtgctggatcggggccctagcttcaaaccctactccggcaccgcctacaacagtctggcccccaagggagcacccaacacttgtcagtggacatataaagccgatggtgaaactgccacagaaaaaacctatacatatggaaatgcacccgtgcagggcattaacatcacaaaagatggtattcaacttggaactgacaccgatgatcagccaatctacgcagataaaacctatcagcctgaacctcaagtgggtgatgctgaatggcatgacatcactggtactgatgaaaagtatggaggcagagctcttaagcctgataccaaaatgaagccttgttatggttcttttgccaagcctactaataaagaaggaggtcaggcaaatgtgaaaacaggaacaggcactactaaagaatatgacatagacatggctttctttgacaacagaagtgcggctgctgctggcctagctccagaaattgttttgtatactgaaaatgtggatttggaaactccagatacccatattgtatacaaagcaggcacagatgacagcagctcttctattaatttgggtcagcaagccatgcccaacagacctaactacattggtttcagagacaactttatcgggctcatgtactacaacagcactggcaatatgggggtgctggccggtcaggcttctcagctgaatgctgtggttgacttgcaagacagaaacaccgagctgtcctaccagctcttgcttgactctctgggtgacagaacccggtatttcagtatgtggaatcaggcggtggacagctatgatcctgatgtgcgcattattgaaaatcatggtgtggaggatgaacttcccaactattgtttccctctggatgctgttggcagaacagatacttatcagggaattaaggctaatggaactgatcaaaccacatggaccaaagatgacagtgtcaatgatgctaatgagataggcaagggtaatccattcgccatggaaatcaacatccaagccaacctgtggaggaacttcctctacgccaacgtggccctgtacctgcccgactcttacaagtacacgccggccaatgttaccctgcccaccaacaccaacacctacgattacatgaacggccgggtggtggcgccctcgctggtggactcctacatcaacatcggggcgcgctggtcgctggatcccatggacaacgtgaaccccttcaaccaccaccgcaatgcggggctgcgctaccgctccatgctcctgggcaacgggcgctacgtgcccttccacatccaggtgccccagaaatttttcgccatcaagagcctcctgctcctgcccgggtcctacacctacgagtggaacttccgcaaggacgtcaacatgatcctgcagagctccctcggcaacgacctgcgcacggacggggcctccatctccttcaccagcatcaacctctacgccaccttcttccccatggcgcacaacacggcctccacgctcgaggccatgctgcgcaacgacaccaacgaccagtccttcaacgactacctctcggcggccaacatgctctaccccatcccggccaacgccaccaacgtgcccatctccatcccctcgcgcaactgggccgccttccgcggctggtccttcacgcgtctcaagaccaaggagacgccctcgctgggctccgggttcgacccctacttcgtctactcgggctccatcccctacctcgacggcaccttctacctcaaccacaccttcaagaaggtctccatcaccttcgactcctccgtcagctggcccggcaacgaccggctcctgacgcccaacgagttcgaaatcaagcgcaccgtcgacggcgagggctacaacgtggcccagtgcaacatgaccaaggactggttcctggtccagatgctggcccactacaacatcggctaccagggcttctacgtgcccgagggctacaaggaccgcatgtactccttcttccgcaacttccagcccatgagccgccaggtggtggacgaggtcaactacaaggactaccaggccgtcaccctggcctaccagcacaacaactcgggcttcgtcggctacctcgcgcccaccatgcgccagggccagccctaccccgccaactacccctacccgctcatcggcaagagcgccgtcaccagcgtcacccagaaaaagttcctctgcgacagggtcatgtggcgcatccccttctccagcaacttcatgtccatgggcgcgctcaccgacctcggccagaacatgctctatgccaactccgcccacgcgctagacatgaatttcgaagtcgaccccatggatgagtccacccttctctatgttgtcttcgaagtcttcgacgtcgtccgagtgcaccagccccaccgcggcgtcatcgaggccgtctacctgcgcacccccttctcggccggtaacgccaccacctaagctcttgcttcttgcaagccatggccgcgggctccggcgagcaggagctcagggccatcatccgcgacctgggctgcgggccctacttcctgggcaccttcgataagcgcttcccgggattcatggccccgcacaagctggcctgcgccatcgtcaacacggccggccgcgagaccgggggcgagcactggctggccttcgcctggaacccgcgctcgaacacctgctacctcttcgaccccttcgggttctcggacgagcgcctcaagcagatctaccagttcgagtacgagggcctgctgcgccgcagcgccctggccaccgaggaccgctgcgtcaccctggaaaagtccacccagaccgtgcagggtccgcgctcggccgcctgcgggctcttctgctgcatgttcctgcacgccttcgtgcactggcccgaccgccccatggacaagaaccccaccatgaacttgctgacgggggtgcccaacggcatgctccagtcgccccaggtggaacccaccctgcgccgcaaccaggaggcgctctaccgcttcctcaactcccactccgcctactttcgctcccaccgcgcgcgcatcgagaaggccaccgccttcgaccgcatgaatcaagacatgtaaaccgtgtgtgtatgttaaatgtctttaataaacagcactttcatgttacacatgcatctgagatgatttatttagaaatcgaaagggttctgccgggtctcggcatggcccgcgggcagggacacgttgcggaactggtacttggccagccacttgaactcggggatcagcagtttgggcagcggggtgtcggggaaggagtcggtccacagcttccgcgtcagttgcagggcgcccagcaggtcgggcgcggagatcttgaaatcgcagttgggacccgcgttctgcgcgcgggagttgcggtacacggggttgcagcactggaacaccatcagggccgggtgcttcacgctcgccagcaccgtcgcgtcggtgatgctctccacgtcgaggtcctcggcgttggccatcccgaagggggtcatcttgcaggtctgccttcccatggtgggcacgcacccgggcttgtggttgcaatcgcagtgcagggggatcagcatcatctgggcctggtcggcgttcatccccgggtacatggccttcatgaaagcctccaattgcctgaacgcctgctgggccttggctccctcggtgaagaagaccccgcaggacttgctagagaactggttggtggcgcacccggcgtcgtgcacgcagcagcgcgcgtcgttgttggccagctgcaccacgctgcgcccccagcggttctgggtgatcttggcccggtcggggttctccttcagcgcgcgctgcccgttctcgctcgccacatccatctcgatcatgtgctccttctggatcatggtggtcccgtgcaggcaccgcagcttgccctcggcctcggtgcacccgtgcagccacagcgcgcacccggtgcactcccagttcttgtgggcgatctgggaatgcgcgtgcacgaagccctgcaggaagcggcccatcatggtggtcagggtcttgttgctagtgaaggtcagcggaatgccgcggtgctcctcgttgatgtacaggtggcagatgcggcggtacacctcgccctgctcgggcatcagctggaagttggctttcaggtcggtctccacgcggtagcggtccatcagcatagtcatgatttccatacccttctcccaggccgagacgatgggcaggctcatagggttcttcaccatcatcttagcgctagcagccgcggccagggggtcgctctcgtccagggtctcaaagctccgcttgccgtccttctcggtgatccgcaccggggggtagctgaagcccacggccgccagctcctcctcggcctgtctttcgtcctcgctgtcctggctgacgtcctgcaggaccacatgcttggtcttgcggggtttcttcttgggcggcagcggcggcggagatgttggagatggcgagggggagcgcgagttctcgctcaccactactatctcttcctcttcttggtccgaggccacgcggcggtaggtatgtctcttcgggggcagaggcggaggcgacgggctctcgccgccgcgacttggcggatggctggcagagccccttccgcgttcgggggtgcgctcccggcggcgctctgactgacttcctccgcggccggccattgtgttctcctagggaggaacaacaagcatggagactcagccatcgccaacctcgccatctgcccccaccgccgacgagaagcagcagcagcagaatgaaagcttaaccgccccgccgcccagccccgccacctccgacgcggccgtcccagacatgcaagagatggaggaatccatcgagattgacctgggctatgtgacgcccgcggagcacgaggaggagctggcagtgcgcttttcacaagaagagatacaccaagaacagccagagcaggaagcagagaatgagcagagtcaggctgggctcgagcatgacggcgactacctccacctgagcgggggggaggacgcgctcatcaagcatctggcccggcaggccaccatcgtcaaggatgcgctgctcgaccgcaccgaggtgcccctcagcgtggaggagctcagccgcgcctacgagttgaacctcttctcgccgcgcgtgccccccaagcgccagcccaatggcacctgcgagcccaacccgcgcctcaacttctacccggtcttcgcggtgcccgaggccctggccacctaccacatctttttcaagaaccaaaagatccccgtctcctgccgcgccaaccgcacccgcgccgacgcccttttcaacctgggtcccggcgcccgcctacctgatatcgcctccttggaagaggttcccaagatcttcgagggtctgggcagcgacgagactcgggccgcgaacgctctgcaaggagaaggaggagagcatgagcaccacagcgccctggtcgagttggaaggcgacaacgcgcggctggcggtgctcaaacgcacggtcgagctgacccatttcgcctacccggctctgaacctgccccccaaagtcatgagcgcggtcatggaccaggtgctcatcaagcgcgcgtcgcccatctccgaggacgagggcatgcaagactccgaggagggcaagcccgtggtcagcgacgagcagctggcccggtggctgggtcctaatgctagtccccagagtttggaagagcggcgcaaactcatgatggccgtggtcctggtgaccgtggagctggagtgcctgcgccgcttcttcgccgacgcggagaccctgcgcaaggtcgaggagaacctgcactacctcttcaggcacgggttcgtgcgccaggcctgcaagatctccaacgtggagctgaccaacctggtctcctacatgggcatcttgcacgagaaccgcctggggcagaacgtgctgcacaccaccctgcgcggggaggcccggcgcgactacatccgcgactgcgtctacctctacctctgccacacctggcagacgggcatgggcgtgtggcagcagtgtctggaggagcagaacctgaaagagctctgcaagctcctgcagaagaacctcaagggtctgtggaccgggttcgacgagcgcaccaccgcctcggacctggccgacctcattttccccgagcgcctcaggctgacgctgcgcaacggcctgcccgactttatgagccaaagcatgttgcaaaactttcgctctttcatcctcgaacgctccggaatcctgcccgccacctgctccgcgctgccctcggacttcgtgccgctgaccttccgcgagtgccccccgccgctgtggagccactgctacctgctgcgcctggccaactacctggcctaccactcggacgtgatcgaggacgtcagcggcgagggcctgctcgagtgccactgccgctgcaacctctgcacgccgcaccgctccctggcctgcaacccccagctgctgagcgagacccagatcatcggcaccttcgagttgcaagggcccagcgaaggcgagggttcagccgccaaggggggtctgaaactcaccccggggctgtggacctcggcctacttgcgcaagttcgtgcccgaggactaccatcccttcgagatcaggttctacgaggaccaatcccatccgcccaaggccgagctgtcggcctgcgtcatcacccagggggcgatcctggcccaattgcaagccatccagaaatcccgccaagaattcttgctgaaaaagggccgcggggtctacctcgacccccagaccggtgaggagctcaaccccggcttcccccaggatgccccgaggaaacaagaagctgaaagtggagctgccgcccgtggaggatttggaggaagactgggagaacagcagtcaggcagaggaggaggagatggaggaagactgggacagcactcaggcagaggaggacagcctgcaagacagtctggaggaagacgaggaggaggcagaggaggaggtggaagaagcagccgccgccagaccgtcgtcctcggcgggggagaaagcaagcagcacggataccatctccgctccgggtcggggtcccgctcgaccacacagtagatgggacgagaccggacgattcccgaaccccaccacccagaccggtaagaaggagcggcagggatacaagtcctggcgggggcacaaaaacgccatcgtctcctgcttgcaggcctgcgggggcaacatctccttcacccggcgctacctgctcttccaccgcggggtgaactttccccgcaacatcttgcattactaccgtcacctccacagcccctactacttccaagaagaggcagcagcagcagaaaaagaccagcagaaaaccagcagctagaaaatccacagcggcggcagcaggtggactgaggatcgcggcgaacgagccggcgcaaacccgggagctgaggaaccggatctttcccaccctctatgccatcttccagcagagtcgggggcaggagcaggaactgaaagtcaagaaccgttctctgcgctcgctcacccgcagttgtctgtatcacaagagcgaagaccaacttcagcgcactctcgaggacgccgaggctctcttcaacaagtactgcgcgctcactcttaaagagtagcccgcgcccgcccagtcgcagaaaaaggcgggaattacgtcacctgtgcccttcgccctagccgcctccacccatcatcatgagcaaagagattcccacgccttacatgtggagctaccagccccagatgggcctggccgccggtgccgcccaggactactccacccgcatgaattggctcagcgccgggcccgcgatgatctcacgggtgaatgacatccgcgcccaccgaaaccagatactcctagaacagtcagcgctcaccgccacgccccgcaatcacctcaatccgcgtaattggcccgccgccctggtgtaccaggaaattccccagcccacgaccgtactacttccgcgagacgcccaggccgaagtccagctgactaactcaggtgtccagctggcgggcggcgccaccctgtgtcgtcaccgccccgctcagggtataaagcggctggtgatccggggcagaggcacacagctcaacgacgaggtggtgagctcttcgctgggtctgcgacctgacggagtcttccaactcgccggatcggggagatcttccttcacgcctcgtcaggccgtcctgactttggagagttcgtcctcgcagccccgctcgggtggcatcggcactctccagttcgtggaggagttcactccctcggtctacttcaaccccttctccggctcccccggccactacccggacgagttcatcccgaacttcgacgccatcagcgagtcggtggacggctacgattgaaactaatcacccccttatccagtgaaataaagatcatattgatgatgattttacagaaataaaaaataatcatttgatttgaaataaagatacaatcatattgatgatttgagtttaacaaaaaaataaagaatcacttacttgaaatctgataccaggtctctgtccatgttttctgccaacaccacttcactcccctcttcccagctctggtactgcaggccccggcgggctgcaaacttcctccacacgctgaaggggatgtcaaattcctcctgtccctcaatcttcattttatcttctatcagatgtccaaaaagcgcgtccgggtggatgatgacttcgaccccgtctacccctacgatgcagacaacgcaccgaccgtgcccttcatcaacccccccttcgtctcttcagatggattccaagagaagcccctgggggtgttgtccctgcgactggccgaccccgtcaccaccaagaacggggaaatcaccctcaagctgggagagggggtggacctcgattcctcgggaaaactcatctccaacacggccaccaaggccgccgcccctctcagtttttccaacaacaccatttcccttaacatggatcaccccttttacactaaagatggaaaattatccttacaagtttctccaccattaaatatactgagaacaagcattctaaacacactagctttaggttttggatcaggtttaggactccgtggctctgccttggcagtacagttagtctctccacttacatttgatactgatggaaacataaagcttaccttagacagaggtttgcatgttacaacaggagatgcaattgaaagcaacataagctgggctaaaggtttaaaatttgaagatggagccatagcaaccaacattggaaatgggttagagtttggaagcagtagtacagaaacaggtgttgatgatgcttacccaatccaagttaaacttggatctggccttagctttgacagtacaggagccataatggctggtaacaaagaagacgataaactcactttgtggacaacacctgatccatcaccaaactgtcaaatactcgcagaaaatgatgcaaaactaacactttgcttgactaaatgtggtagtcaaatactggccactgtgtcagtcttagttgtaggaagtggaaacctaaaccccattactggcaccgtaagcagtgctcaggtgtttctacgttttgatgcaaacggtgttcttttaacagaacattctacactaaaaaaatactgggggtataggcagggagatagcatagatggcactccatataccaatgctgtaggattcatgcccaatttaaaagcttatccaaagtcacaaagttctactactaaaaataatatagtagggcaagtatacatgaatggagatgtttcaaaacctatgcttctcactataaccctcaatggtactgatgacagcaacagtacatattcaatgtcattttcatacacctggactaatggaagctatgttggagcaacatttggggctaactcttataccttctcatacatcgcccaagaatgaacactgtatcccaccctgcatgccaacccttcccaccccactctgtggaacaaactctgaaacacaaaataaaataaagttcaagtgttttattgattcaacagttttacaggattcgagcagttatttttcctccaccctcccaggacatggaatacaccaccctctccccccgcacagccttgaacatctgaatgccattggtgatggacatgcttttggtctccacgttccacacagtttcagagcgagccagtctcgggtcggtcagggagatgaaaccctccgggcactcccgcatctgcacctcacagctcaacagctgaggattgtcctcggtggtcgggatcacggttatctggaagaagcagaagagcggcggtgggaatcatagtccgcgaacgggatcggccggtggtgtcgcatcaggccccgcagcagtcgctgccgccgccgctccgtcaagctgctgctcagggggtccgggtccagggactccctcagcatgatgcccacggccctcagcatcagtcgtctggtgcggcgggcgcagcagcgcatgcggatctcgctcaggtcgctgcagtacgtgcaacacagaaccaccaggttgttcaacagtccatagttcaacacgctccagccgaaactcatcgcgggaaggatgctacccacgtggccgtcgtaccagatcctcaggtaaatcaagtggtgccccctccagaacacgctgcccacgtacatgatctccttgggcatgtggcggttcaccacctcccggtaccacatcaccctctggttgaacatgcagccccggatgatcctgcggaaccacagggccagcaccgccccgcccgccatgcagcgaagagaccccgggtcccggcaatggcaatggaggacccaccgctcgtacccgtggatcatctgggagctgaacaagtctatgttggcacagcacaggcatatgctcatgcatctcttcagcactctcaactcctcgggggtcaaaaccatatcccagggcacggggaactcttgcaggacagcgaaccccgcagaacagggcaatcctcgcacagaacttacattgtgcatggacagggtatcgcaatcaggcagcaccgggtgatcctccaccagagaagcgcgggtctcggtctcctcacagcgtggtaagggggccggccgatacgggtgatggcgggacgcggctgatcgtgttcgcgaccgtgtcatgatgcagttgctttcggacattttcgtacttgctgtagcagaacctggtccgggcgctgcacaccgatcgccggcggcggtctcggcgcttggaacgctcggtgttgaaattgtaaaacagccactctctcagaccgtgcagcagatctagggcctcaggagtgatgaagatcccatcatgcctgatggctctgatcacatcgaccaccgtggaatgggccagacccagccagatgatgcaattttgttgggtttcggtgacggcgggggagggaagaacaggaagaaccatgattaacttttaatccaaacggtctcggagtacttcaaaatgaagatcgcggagatggcacctctcgcccccgctgtgttggtggaaaataacagccaggtcaaaggtgatacggttctcgagatgttccacggtggcttccagcaaagcctccacgcgcacatccagaaacaagacaatagcgaaagcgggagggttctctaattcctcaatcatcatgttacactcctgcaccatccccagataattttcatttttccagccttgaatgattcgaactagttcctgaggtaaatccaagccagccatgataaagagctcgcgcagagcgccctccaccggcattcttaagcacaccctcataattccaagatattctgctcctggttcacctgcagcagattgacaagcggaatatcaaaatctctgccgcgatccctgagctcctccctcagcaataactgtaagtactctttcatatcctctccgaaatttttagccataggaccaccaggaataagattagggcaagccacagtacagataaaccgaagtcctccccagtgagcattgccaaatgcaagactgctataagcatgctggctagacccggtgatatcttccagataactggacagaaaatcgcccaggcaatttttaagaaaatcaacaaaagaaaaatcctccaggtggacgtttagagcctcgggaacaacgatgaagtaaatgcaagcggtgcgttccagcatggttagttagctgatctgtagaaaaaacaaaaatgaacattaaaccatgctagcctggcgaacaggtgggtaaatcgttctctccagcaccaggcaggccacggggtctccggcgcgaccctcgtaaaaattgtcgctatgattgaaaaccatcacagagagacgttcccggtggccggcgtgaatgattcgacaagatgaatacacccccggaacattggcgtccgcgagtgaaaaaaagcgcccgaggaagcaataaggcactacaatgctcagtctcaagtccagcaaagcgatgccatgcggatgaagcacaaaattctcaggtgcgtacaaaatgtaattactcccctcctgcacaggcagcaaagcccccgatccctccaggtacacatacaaagcctcagcgtccatagcttaccgagcagcagcacacaacaggcgcaagagtcagagaaaggctgagctctaacctgtccacccgctctctgctcaatatatagcccagatctacactgacgtaaaggccaaagtctaaaaatacccgccaaataatcacacacgcccagcacacgcccagaaaccggtgacacactcaaaaaaatacgcgcacttcctcaaacgcccaaaactgccgtcatttccgggttcccacgctacgtcatcaaaacacgactttcaaattccgtcgaccgttaaaaacgtcacccgccccgcccctaacggtcgcccgtctctcagccaatcagcgccccgcatccccaaattcaaacacctcatttgcatattaacgcgcacaaaaagtttgagg

SEQ ID NO: 3 - DNA, 11447 bp, Venezuelan equine encephalitis virus
atgggcggcgcatgagagaagcccagaccaattacctacccaaaatggagaaagttcacgttgacatcgaggaagacagcccattcctcagagctttgcagcggagcttcccgcagtttgaggtagaagccaagcaggtcactgataatgaccatgctaatgccagagcgttttcgcatctggcttcaaaactgatcgaaacggaggtggacccatccgacacgatccttgacattggaagtgcgcccgcccgcagaatgtattctaagcacaagtatcattgtatctgtccgatgagatgtgcggaagatccggacagattgtataagtatgcaactaagctgaagaaaaactgtaaggaaataactgataaggaattggacaagaaaatgaaggagctcgccgccgtcatgagcgaccctgacctggaaactgagactatgtgcctccacgacgacgagtcgtgtcgctacgaagggcaagtcgctgtttaccaggatgtatacgcggttgacggaccgacaagtctctatcaccaagccaataagggagttagagtcgcctactggataggctttgacaccaccccttttatgtttaagaacttggctggagcatatccatcatactctaccaactgggccgacgaaaccgtgttaacggctcgtaacataggcctatgcagctctgacgttatggagcggtcacgtagagggatgtccattcttagaaagaagtatttgaaaccatccaacaatgttctattctctgttggctcgaccatctaccacgagaagagggacttactgaggagctggcacctgccgtctgtatttcacttacgtggcaagcaaaattacacatgtcggtgtgagactatagttagttgcgacgggtacgtcgttaaaagaatagctatcagtccaggcctgtatgggaagccttcaggctatgctgctacgatgcaccgcgagggattcttgtgctgcaaagtgacagacacattgaacggggagagggtctcttttcccgtgtgcacgtatgtgccagctacattgtgtgaccaaatgactggcatactggcaacagatgtcagtgcggacgacgcgcaaaaactgctggttgggctcaaccagcgtatagtcgtcaacggtcgcacccagagaaacaccaataccatgaaaaattaccttttgcccgtagtggcccaggcatttgctaggtgggcaaaggaatataaggaagatcaagaagatgaaaggccactaggactacgagatagacagttagtcatggggtgttgttgggcttttagaaggcacaagataacatctatttataagcgcccggatacccaaaccatcatcaaagtgaacagcgatttccactcattcgtgctgcccaggataggcagtaacacattggagatcgggctgagaacaagaatcaggaaaatgttagaggagcacaaggagccgtcacctctcattaccgccgaggacgtacaagaagctaagtgcgcagccgatgaggctaaggaggtgcgtgaagccgaggagttgcgcgcagctctaccacctttggcagctgatgttgaggagcccactctggaagccgatgtcgacttgatgttacaagaggctggggccggctcagtggagacacctcgtggcttgataaaggttaccagctacgctggcgaggacaagatcggctcttacgctgtgctttctccgcaggctgtactcaagagtgaaaaattatcttgcatccaccctctcgctgaacaagtcatagtgataacacactctggccgaaaagggcgttatgccgtggaaccataccatggtaaagtagtggtgccagagggacatgcaatacccgtccaggactttcaagctctgagtgaaagtgccaccattgtgtacaacgaacgtgagttcgtaaacaggtacctgcaccatattgccacacatggaggagcgctgaacactgatgaagaatattacaaaactgtcaagcccagcgagcacgacggcgaatacctgtacgacatcgacaggaaacagtgcgtcaagaaagaactagtcactgggctagggctcacaggcgagctggtggatcctcccttccatgaattcgcctacgagagtctgagaacacgaccagccgctccttaccaagtaccaaccataggggtgtatggcgtgccaggatcaggcaagtctggcatcattaaaagcgcagtcaccaaaaaagatctagtggtgagcgccaagaaagaaaactgtgcagaaattataagggacgtcaagaaaatgaaagggctggacgtcaatgccagaactgtggactcagtgctcttgaatggatgcaaacaccccgtagagaccctgtatattgacgaagcttttgcttgtcatgcaggtactctcagagcgctcatagccattataagacctaaaaaggcagtgctctgcggggatcccaaacagtgcggtttttttaacatgatgtgcctgaaagtgcattttaaccacgagatttgcacacaagtcttccacaaaagcatctctcgccgttgcactaaatctgtgacttcggtcgtctcaaccttgttttacgacaaaaaaatgagaacgacgaatccgaaagagactaagattgtgattgacactaccggcagtaccaaacctaagcaggacgatctcattctcacttgtttcagagggtgggtgaagcagttgcaaatagattacaaaggcaacgaaataatgacggcagctgcctctcaagggctgacccgtaaaggtgtgtatgccgttcggtacaaggtgaatgaaaatcctctgtacgcacccacctcagaacatgtgaacgtcctactgacccgcacggaggaccgcatcgtgtggaaaacactagccggcgacccatggataaaaacactgactgccaagtaccctgggaatttcactgccacgatagaggagtggcaagcagagcatgatgccatcatgaggcacatcttggagagaccggaccctaccgacgtcttccagaataaggcaaacgtgtgttgggccaaggctttagtgccggtgctgaagaccgctggcatagacatgaccactgaacaatggaacactgtggattattttgaaacggacaaagctcactcagcagagatagtattgaaccaactatgcgtgaggttctttggactcgatctggactccggtctattttctgcacccactgttccgttatccattaggaataatcactgggataactccccgtcgcctaacatgtacgggctgaataaagaagtggtccgtcagctctctcgcaggtacccacaactgcctcgggcagttgccactggaagagtctatgacatgaacactggtacactgcgcaattatgatccgcgcataaacctagtacctgtaaacagaagactgcctcatgctttagtcctccaccataatgaacacccacagagtgacttttcttcattcgtcagcaaattgaagggcagaactgtcctggtggtcggggaaaagttgtccgtcccaggcaaaatggttgactggttgtcagaccggcctgaggctaccttcagagctcggctggatttaggcatcccaggtgatgtgcccaaatatgacataatatttgttaatgtgaggaccccatataaataccatcactatcagcagtgtgaagaccatgccattaagcttagcatgttgaccaagaaagcttgtctgcatctgaatcccggcggaacctgtgtcagcataggttatggttacgctgacagggccagcgaaagcatcattggtgctatagcgcggcagttcaagttttcccgggtatgcaaaccgaaatcctcacttgaagagacggaagttctgtttgtattcattgggtacgatcgcaaggcccgtacgcacaatccttacaagctttcatcaaccttgaccaacatttatacaggttccagactccacgaagccggatgtgcaccctcatatcatgtggtgcgaggggatattgccacggccaccgaaggagtgattataaatgctgctaacagcaaaggacaacctggcggaggggtgtgcggagcgctgtataagaaattcccggaaagcttcgatttacagccgatcgaagtaggaaaagcgcgactggtcaaaggtgcagctaaacatatcattcatgccgtaggaccaaacttcaacaaagtttcggaggttgaaggtgacaaacagttggcagaggcttatgagtccatcgctaagattgtcaacgataacaattacaagtcagtagcgattccactgttgtccaccggcatcttttccgggaacaaagatcgactaacccaatcattgaaccatttgctgacagctttagacaccactgatgcagatgtagccatatactgcagggacaagaaatgggaaatgactctcaaggaagcagtggctaggagagaagcagtggaggagatatgcatatccgacgactcttcagtgacagaacctgatgcagagctggtgagggtgcatccgaagagttctttggctggaaggaagggctacagcacaagcgatggcaaaactttctcatatttggaagggaccaagtttcaccaggcggccaaggatatagcagaaattaatgccatgtggcccgttgcaacggaggccaatgagcaggtatgcatgtatatcctcggagaaagcatgagcagtattaggtcgaaatgccccgtcgaagagtcggaagcctccacaccacctagcacgctgccttgcttgtgcatccatgccatgactccagaaagagtacagcgcctaaaagcctcacgtccagaacaaattactgtgtgctcatcctttccattgccgaagtatagaatcactggtgtgcagaagatccaatgctcccagcctatattgttctcaccgaaagtgcctgcgtatattcatccaaggaagtatctcgtggaaacaccaccggtagacgagactccggagccatcggcagagaaccaatccacagaggggacacctgaacaaccaccacttataaccgaggatgagaccaggactagaacgcctgagccgatcatcatcgaagaggaagaagaggatagcataagtttgctgtcagatggcccgacccaccaggtgctgcaagtcgaggcagacattcacgggccgccctctgtatctagctcatcctggtccattcctcatgcatccgactttgatgtggacagtttatccatacttgacaccctggagggagctagcgtgaccagcggggcaacgtcagccgagactaactcttacttcgcaaagagtatggagtttctggcgcgaccggtgcctgcgcctcgaacagtattcaggaaccctccacatcccgctccgcgcacaagaacaccgtcacttgcacccagcagggcctgctcgagaaccagcctagtttccaccccgccaggcgtgaatagggtgatcactagagaggagctcgaggcgcttaccccgtcacgcactcctagcaggtcggtctcgagaaccagcctggtctccaacccgccaggcgtaaatagggtgattacaagagaggagtttgaggcgttcgtagcacaacaacaatgacggtttgatgcgggtgcatacatcttttcctccgacaccggtcaagggcatttacaacaaaaatcagtaaggcaaacggtgctatccgaagtggtgttggagaggaccgaattggagatttcgtatgccccgcgcctcgaccaagaaaaagaagaattactacgcaagaaattacagttaaatcccacacctgctaacagaagcagataccagtccaggaaggtggagaacatgaaagccataacagctagacgtattctgcaaggcctagggcattatttgaaggcagaaggaaaagtggagtgctaccgaaccctgcatcctgttcctttgtattcatctagtgtgaaccgtgccttttcaagccccaaggtcgcagtggaagcctgtaacgccatgttgaaagagaactttccgactgtggcttcttactgtattattccagagtacgatgcctatttggacatggttgacggagcttcatgctgcttagacactgccagtttttgccctgcaaagctgcgcagctttccaaagaaacactcctatttggaacccacaatacgatcggcagtgccttcagcgatccagaacacgctccagaacgtcctggcagctgccacaaaaagaaattgcaatgtcacgcaaatgagagaattgcccgtattggattcggcggcctttaatgtggaatgcttcaagaaatatgcgtgtaataatgaatattgggaaacgtttaaagaaaaccccatcaggcttactgaagaaaacgtggtaaattacattaccaaattaaaaggaccaaaagctgctgctctttttgcgaagacacataatttgaatatgttgcaggacataccaatggacaggtttgtaatggacttaaagagagacgtgaaagtgactccaggaacaaaacatactgaagaacggcccaaggtacaggtgatccaggctgccgatccgctagcaacagcgtatctgtgcggaatccaccgagagctggttaggagattaaatgcggtcctgcttccgaacattcatacactgtttgatatgtcggctgaagactttgacgctattatagccgagcacttccagcctggggattgtgttctggaaactgacatcgcgtcgtttgataaaagtgaggacgacgccatggctctgaccgcgttaatgattctggaagacttaggtgtggacgcagagctgttgacgctgattgaggcggctttcggcgaaatttcatcaatacatttgcccactaaaactaaatttaaattcggagccatgatgaaatctggaatgttcctcacactgtttgtgaacacagtcattaacattgtaatcgcaagcagagtgttgagagaacggctaaccggatcaccatgtgcagcattcattggagatgacaatatcgtgaaaggagtcaaatcggacaaattaatggcagacaggtgcgccacctggttgaatatggaagtcaagattatagatgctgtggtgggcgagaaagcgccttatttctgtggagggtttattttgtgtgactccgtgaccggcacagcgtgccgtgtggcagaccccctaaaaaggctgtttaagcttggcaaacctctggcagcagacgatgaacatgatgatgacaggagaagggcattgcatgaagagtcaacacgctggaaccgagtgggtattctttcagagctgtgcaaggcagtagaatcaaggtatgaaaccgtaggaacttccatcatagttatggccatgactactctagctagcagtgttaaatcattcagctacctgagaggggcccctataactctctacggctaacctgaatggactacgacatagtctagtccgccaagatgttcccgttccagccaatgtatccgatgcagccaatgccctatcgcaacccgttcgcggccccgcgcaggccctggttccccagaaccgacccttttctggcgatgcaggtgcaggaattaacccgctcgatggctaacctgacgttcaagcaacgccgggacgcgccacctgaggggccatccgctaagaaaccgaagaaggaggcctcgcaaaaacagaaagggggaggccaagggaagaagaagaagaaccaagggaagaagaaggctaagacagggccgcctaatccgaaggcacagaatggaaacaagaagaagaccaacaagaaaccaggcaagagacagcgcatggtcatgaaattggaatctgacaagacgttcccaatcatgttggaagggaagataaacggctacgcttgtgtggtcggagggaagttattcaggccgatgcatgtggaaggcaagatcgacaacgacgttctggccgcgcttaagacgaagaaagcatccaaatacgatcttgagtatgcagatgtgccacagaacatgcgggccgatacattcaaatacacccatgagaaaccccaaggctattacagctggcatcatggagcagtccaatatgaaaatgggcgtttcacggtgccgaaaggagttggggccaagggagacagcggacgacccattctggataaccagggacgggtggtcgctattgtgctgggaggtgtgaatgaaggatctaggacagccctttcagtcgtcatgtggaacgagaagggagttaccgtgaagtatactccggagaactgcgagcaatggtcactagtgaccaccatgtgtctgctcgccaatgtgacgttcccatgtgctcaaccaccaatttgctacgacagaaaaccagcagagactttggccatgctcagcgttaacgttgacaacccgggctacgatgagctgctggaagcagctgttaagtgccccggaaggaaaaggagatccaccgaggagctgtttaaggagtataagctaacgcgcccttacatggccagatgcatcagatgtgcagttgggagctgccatagtccaatagcaatcgaggcagtaaagagcgacgggcacgacggttatgttagacttcagacttcctcgcagtatggcctggattcctccggcaacttaaagggcaggaccatgcggtatgacatgcacgggaccattaaagagataccactacatcaagtgtcactccatacatctcgcccgtgtcacattgtggatgggcacggttatttcctgcttgccaggtgcccggcaggggactccatcaccatggaatttaagaaagattccgtcacacactcctgctcggtgccgtatgaagtgaaatttaatcctgtaggcagagaactctatactcatcccccagaacacggagtagagcaagcgtgccaagtctacgcacatgatgcacagaacagaggagcttatgtcgagatgcacctcccgggctcagaagtggacagcagtttggtttccttgagcggcagttcagtcaccgtgacacctcctgttgggactagcgccctggtggaatgcgagtgtggcggcacaaagatctccgagaccatcaacaagacaaaacagttcagccagtgcacaaagaaggagcagtgcagagcatatcggctgcagaacgataagtgggtgtataattctgacaaactgcccaaagcagcgggagccaccttaaaaggaaaactgcatgtcccattcttgctggcagacggcaaatgcaccgtgcctctagcaccagaacctatgataacctttggtttcagatcagtgtcactgaaactgcaccctaagaatcccacatatctaaccacccgccaacttgctgatgagcctcactacacgcacgagctcatatctgaaccagctgttaggaattttaccgtcaccgaaaaagggtgggagtttgtatggggaaaccacccgccgaaaaggttttgggcacaggaaacagcacccggaaatccacatgggctaccgcacgaggtgataactcattattaccacagataccctatgtccaccatcctgggtttgtcaatttgtgccgccattgcaaccgtttccgttgcagcgtctacctggctgttttgcagatctagagttgcgtgcctaactccttaccggctaacacctaacgctaggataccattttgtctggctgtgctttgctgcgcccgcactgcccgggccgagaccacctgggagtccttggatcacctatggaacaataaccaacagatgttctggattcaattgctgatccctctggccgccttgatcgtagtgactcgcctgctcaggtgcgtgtgctgtgtcgtgccttttttagtcatggccggcgccgcaggcgccggcgcctacgagcacgcgaccacgatgccgagccaagcgggaatctcgtataacactatagtcaacagagcaggctacgcaccactccctatcagcataacaccaacaaagatcaagctgatacctacagtgaacttggagtacgtcacctgccactacaaaacaggaatggattcaccagccatcaaatgctgcggatctcaggaatgcactccaacttacaggcctgatgaacagtgcaaagtcttcacaggggtttacccgttcatgtggggtggtgcatattgcttttgcgacactgagaacacccaagtcagcaaggcctacgtaatgaaatctgacgactgccttgcggatcatgctgaagcatataaagcgcacacagcctcagtgcaggcgttcctcaacatcacagtgggagaacactctattgtgactaccgtgtatgtgaatggagaaactcctgtgaatttcaatggggtcaaattaactgcaggtccgctttccacagcttggacaccctttgatcgcaaaatcgtgcagtatgccggggagatctataattatgattttcctgagtatggggcaggacaaccaggagcatttggagatatacaatccagaacagtctcaagctcagatctgtatgccaataccaacctagtgctgcagagacccaaagcaggagcgatccacgtgccatacactcaggcaccttcgggttttgagcaatggaagaaagataaagctccatcattgaaatttaccgcccctttcggatgcgaaatatatacaaaccccattcgcgccgaaaactgtgctgtagggtcaattccattagcctttgacattcccgacgccttgttcaccagggtgtcagaaacaccgacactttcagcggccgaatgcactcttaacgagtgcgtgtattcttccgactttggtgggatcgccacggtcaagtactcggccagcaagtcaggcaagtgcgcagtccatgtgccatcagggactgctaccctaaaagaagcagcagtcgagctaaccgagcaagggtcggcgactatccatttctcgaccgcaaatatccacccggagttcaggctccaaatatgcacatcatatgttacgtgcaaaggtgattgtcaccccccgaaagaccatattgtgacacaccctcagtatcacgcccaaacatttacagccgcggtgtcaaaaaccgcgtggacgtggttaacatccctgctgggaggatcagccgtaattattataattggcttggtgctggctactattgtggccatgtacgtgctgaccaaccagaaacataattgaatacagcagcaattggcaagctgcttacatagaactcgcggcgattggcatgccgccttaaaatttttattttattttttcttttcttttccgaatcggattttgtttttaatatttc

SEQ ID NO: 4 - DNA, 9577 bp, Artificial Sequence
  Description of Artificial Sequence: Synthetic polynucleotide
atgggcggcgcatgagagaagcccagaccaattacctacccaaaatggagaaagttcacgttgacatcgaggaagacagcccattcctcagagctttgcagcggagcttcccgcagtttgaggtagaagccaagcaggtcactgataatgaccatgctaatgccagagcgttttcgcatctggcttcaaaactgatcgaaacggaggtggacccatccgacacgatccttgacattggaagtgcgcccgcccgcagaatgtattctaagcacaagtatcattgtatctgtccgatgagatgtgcggaagatccggacagattgtataagtatgcaactaagctgaagaaaaactgtaaggaaataactgataaggaattggacaagaaaatgaaggagctcgccgccgtcatgagcgaccctgacctggaaactgagactatgtgcctccacgacgacgagtcgtgtcgctacgaagggcaagtcgctgtttaccaggatgtatacgcggttgacggaccgacaagtctctatcaccaagccaataagggagttagagtcgcctactggataggctttgacaccaccccttttatgtttaagaacttggctggagcatatccatcatactctaccaactgggccgacgaaaccgtgttaacggctcgtaacataggcctatgcagctctgacgttatggagcggtcacgtagagggatgtccattcttagaaagaagtatttgaaaccatccaacaatgttctattctctgttggctcgaccatctaccacgagaagagggacttactgaggagctggcacctgccgtctgtatttcacttacgtggcaagcaaaattacacatgtcggtgtgagactatagttagttgcgacgggtacgtcgttaaaagaatagctatcagtccaggcctgtatgggaagccttcaggctatgctgctacgatgcaccgcgagggattcttgtgctgcaaagtgacagacacattgaacggggagagggtctcttttcccgtgtgcacgtatgtgccagctacattgtgtgaccaaatgactggcatactggcaacagatgtcagtgcggacgacgcgcaaaaactgctggttgggctcaaccagcgtatagtcgtcaacggtcgcacccagagaaacaccaataccatgaaaaattaccttttgcccgtagtggcccaggcatttgctaggtgggcaaaggaatataaggaagatcaagaagatgaaaggccactaggactacgagatagacagttagtcatggggtgttgttgggcttttagaaggcacaagataacatctatttataagcgcccggatacccaaaccatcatcaaagtgaacagcgatttccactcattcgtgctgcccaggataggcagtaacacattggagatcgggctgagaacaagaatcaggaaaatgttagaggagcacaaggagccgtcacctctcattaccgccgaggacgtacaagaagctaagtgcgcagccgatgaggctaaggaggtgcgtgaagccgaggagttgcgcgcagctctaccacctttggcagctgatgttgaggagcccactctggaagccgatgtcgacttgatgttacaagaggctggggccggctcagtggagacacctcgtggcttgataaaggttaccagctacgctggcgaggacaagatcggctcttacgctgtgctttctccgcaggctgtactcaagagtgaaaaattatcttgcatccaccctctcgctgaacaagtcatagtgataacacactctggccgaaaagggcgttatgccgtggaaccataccatggtaaagtagtggtgccagagggacatgcaatacccgtccaggactttcaagctctgagtgaaagtgccaccattgtgtacaacgaacgtgagttcgtaaacaggtacctgcaccatattgccacacatggaggagcgctgaacactgatgaagaatattacaaaactgtcaagcccagcgagcacgacggcgaatacctgtacgacatcgacaggaaacagtgcgtcaagaaagaactagtcactgggctagggctcacaggcgagctggtggatcctcccttccatgaattcgcctacgagagtctgagaacacgaccagccgctccttaccaagtaccaaccataggggtgtatggcgtgccaggatcaggcaagtctggcatcattaaaagcgcagtcaccaaaaaagatctagtggtgagcgccaagaaagaaaactgtgcagaaattataagggacgtcaagaaaatgaaagggctggacgtcaatgccagaactgtggactcagtgctcttgaatggatgcaaacaccccgtagagaccctgtatattgacgaagcttttgcttgtcatgcaggtactctcagagcgctcatagccattataagacctaaaaaggcagtgctctgcggggatcccaaacagtgcggtttttttaacatgatgtgcctgaaagtgcattttaaccacgagatttgcacacaagtcttccacaaaagcatctctcgccgttgcactaaatctgtgacttcggtcgtctcaaccttgttttacgacaaaaaaatgagaacgacgaatccgaaagagactaagattgtgattgacactaccggcagtaccaaacctaagcaggacgatctcattctcacttgtttcagagggtgggtgaagcagttgcaaatagattacaaaggcaacgaaataatgacggcagctgcctctcaagggctgacccgtaaaggtgtgtatgccgttcggtacaaggtgaatgaaaatcctctgtacgcacccacctcagaacatgtgaacgtcctactgacccgcacggaggaccgcatcgtgtggaaaacactagccggcgacccatggataaaaacactgactgccaagtaccctgggaatttcactgccacgatagaggagtggcaagcagagcatgatgccatcatgaggcacatcttggagagaccggaccctaccgacgtcttccagaataaggcaaacgtgtgttgggccaaggctttagtgccggtgctgaagaccgctggcatagacatgaccactgaacaatggaacactgtggattattttgaaacggacaaagctcactcagcagagatagtattgaaccaactatgcgtgaggttctttggactcgatctggactccggtctattttctgcacccactgttccgttatccattaggaataatcactgggataactccccgtcgcctaacatgtacgggctgaataaagaagtggtccgtcagctctctcgcaggtacccacaactgcctcgggcagttgccactggaagagtctatgacatgaacactggtacactgcgcaattatgatccgcgcataaacctagtacctgtaaacagaagactgcctcatgctttagtcctccaccataatgaacacccacagagtgacttttcttcattcgtcagcaaattgaagggcagaactgtcctggtggtcggggaaaagttgtccgtcccaggcaaaatggttgactggttgtcagaccggcctgaggctaccttcagagctcggctggatttaggcatcccaggtgatgtgcccaaatatgacataatatttgttaatgtgaggaccccatataaataccatcactatcagcagtgtgaagaccatgccattaagcttagcatgttgaccaagaaagcttgtctgcatctgaatcccggcggaacctgtgtcagcataggttatggttacgctgacagggccagcgaaagcatcattggtgctatagcgcggcagttcaagttttcccgggtatgcaaaccgaaatcctcacttgaagagacggaagttctgtttgtattcattgggtacgatcgcaaggcccgtacgcacaatccttacaagctttcatcaaccttgaccaacatttatacaggttccagactccacgaagccggatgtgcaccctcatatcatgtggtgcgaggggatattgccacggccaccgaaggagtgattataaatgctgctaacagcaaaggacaacctggcggaggggtgtgcggagcgctgtataagaaattcccggaaagcttcgatttacagccgatcgaagtaggaaaagcgcgactggtcaaaggtgcagctaaacatatcattcatgccgtaggaccaaacttcaacaaagtttcggaggttgaaggtgacaaacagttggcagaggcttatgagtccatcgctaagattgtcaacgataacaattacaagtcagtagcgattccactgttgtccaccggcatcttttccgggaacaaagatcgactaacccaatcattgaaccatttgctgacagctttagacaccactgatgcagatgtagccatatactgcagggacaagaaatgggaaatgactctcaaggaagcagtggctaggagagaagcagtggaggagatatgcatatccgacgactcttcagtgacagaacctgatgcagagctggtgagggtgcatccgaagagttctttggctggaaggaagggctacagcacaagcgatggcaaaactttctcatatttggaagggaccaagtttcaccaggcggccaaggatatagcagaaattaatgccatgtggcccgttgcaacggaggccaatgagcaggtatgcatgtatatcctcggagaaagcatgagcagtattaggtcgaaatgccccgtcgaagagtcggaagcctccacaccacctagcacgctgccttgcttgtgcatccatgccatgactccagaaagagtacagcgcctaaaagcctcacgtccagaacaaattactgtgtgctcatcctttccattgccgaagtatagaatcactggtgtgcagaagatccaatgctcccagcctatattgttctcaccgaaagtgcctgcgtatattcatccaaggaagtatctcgtggaaacaccaccggtagacgagactccggagccatcggcagagaaccaatccacagaggggacacctgaacaaccaccacttataaccgaggatgagaccaggactagaacgcctgagccgatcatcatcgaagaggaagaagaggatagcataagtttgctgtcagatggcccgacccaccaggtgctgcaagtcgaggcagacattcacgggccgccctctgtatctagctcatcctggtccattcctcatgcatccgactttgatgtggacagtttatccatacttgacaccctggagggagctagcgtgaccagcggggcaacgtcagccgagactaactcttacttcgcaaagagtatggagtttctggcgcgaccggtgcctgcgcctcgaacagtattcaggaaccctccacatcccgctccgcgcacaagaacaccgtcacttgcacccagcagggcctgctcgagaaccagcctagtttccaccccgccaggcgtgaatagggtgatcactagagaggagctcgaggcgcttaccccgtcacgcactcctagcaggtcggtctcgagaaccagcctggtctccaacccgccaggcgtaaatagggtgattacaagagaggagtttgaggcgttcgtagcacaacaacaatgacggtttgatgcgggtgcatacatcttttcctccgacaccggtcaagggcatttacaacaaaaatcagtaaggcaaacggtgctatccgaagtggtgttggagaggaccgaattggagatttcgtatgccccgcgcctcgaccaagaaaaagaagaattactacgcaagaaattacagttaaatcccacacctgctaacagaagcagataccagtccaggaaggtggagaacatgaaagccataacagctagacgtattctgcaaggcctagggcattatttgaaggcagaaggaaaagtggagtgctaccgaaccctgcatcctgttcctttgtattcatctagtgtgaaccgtgccttttcaagccccaaggtcgcagtggaagcctgtaacgccatgttgaaagagaactttccgactgtggcttcttactgtattattccagagtacgatgcctatttggacatggttgacggagcttcatgctgcttagacactgccagtttttgccctgcaaagctgcgcagctttccaaagaaacactcctatttggaacccacaatacgatcggcagtgccttcagcgatccagaacacgctccagaacgtcctggcagctgccacaaaaagaaattgcaatgtcacgcaaatgagagaattgcccgtattggattcggcggcctttaatgtggaatgcttcaagaaatatgcgtgtaataatgaatattgggaaacgtttaaagaaaaccccatcaggcttactgaagaaaacgtggtaaattacattaccaaattaaaaggaccaaaagctgctgctctttttgcgaagacacataatttgaatatgttgcaggacataccaatggacaggtttgtaatggacttaaagagagacgtgaaagtgactccaggaacaaaacatactgaagaacggcccaaggtacaggtgatccaggctgccgatccgctagcaacagcgtatctgtgcggaatccaccgagagctggttaggagattaaatgcggtcctgcttccgaacattcatacactgtttgatatgtcggctgaagactttgacgctattatagccgagcacttccagcctggggattgtgttctggaaactgacatcgcgtcgtttgataaaagtgaggacgacgccatggctctgaccgcgttaatgattctggaagacttaggtgtggacgcagagctgttgacgctgattgaggcggctttcggcgaaatttcatcaatacatttgcccactaaaactaaatttaaattcggagccatgatgaaatctggaatgttcctcacactgtttgtgaacacagtcattaacattgtaatcgcaagcagagtgttgagagaacggctaaccggatcaccatgtgcagcattcattggagatgacaatatcgtgaaaggagtcaaatcggacaaattaatggcagacaggtgcgccacctggttgaatatggaagtcaagattatagatgctgtggtgggcgagaaagcgccttatttctgtggagggtttattttgtgtgactccgtgaccggcacagcgtgccgtgtggcagaccccctaaaaaggctgtttaagcttggcaaacctctggcagcagacgatgaacatgatgatgacaggagaagggcattgcatgaagagtcaacacgctggaaccgagtgggtattctttcagagctgtgcaaggcagtagaatcaaggtatgaaaccgtaggaacttccatcatagttatggccatgactactctagctagcagtgttaaatcattcagctacctgagaggggcccctataactctctacggctaacctgaatggactacgactctagaatagtctttaattaagccaccatggcaggcatgtttcaggcgctgagcgaaggctgcaccccgtatgatattaaccagatgctgaacgtgctgggcgatcatcaggtctcaggccttgagcagcttgagagtataatcaactttgaaaaactgactgaatggaccagttctaatgttatgcctatcctgtctcctctgacaaagggcatcctgggcttcgtgtttaccctgaccgtgccttctgagagaggacttagctgcattagcgaagcggatgcgaccaccccggaaagcgcgaacctgggcgaagaaattctgagccagctgtatctttggccaagggtgacctaccattcccctagttatgcttaccaccaatttgaaagacgagccaaatataaaagacacttccccggctttggccagagcctgctgtttggctaccctgtgtacgtgttcggcgattgcgtgcagggcgattgggatgcgattcgctttcgctattgcgcgccgccgggctatgcgctgctgcgctgcaacgataccaactatagcgctctgctggctgtgggggccctagaaggacccaggaatcaggactggcttggtgtcccaagacaacttgtaactcggatgcaggctattcagaatgccggcctgtgtaccctggtggccatgctggaagagacaatcttctggctgcaagcgtttctgatggcgctgaccgatagcggcccgaaaaccaacattattgtggatagccagtatgtgatgggcattagcaaaccgagctttcaggaatttgtggattgggaaaacgtgagcccggaactgaacagcaccgatcagccgttttggcaagccggaatcctggccagaaatctggtgcctatggtggccacagtgcagggccagaacctgaagtaccagggtcagtcactagtcatctctgcttctatcattgtcttcaacctgctggaactggaaggtgattatcgagatgatggcaacgtgtgggtgcataccccgctgagcccgcgcaccctgaacgcgtgggtgaaagcggtggaagaaaaaaaaggtattccagttcacctagagctggccagtatgaccaacatggagctcatgagcagtattgtgcatcagcaggtcagaacatacggccccgtgttcatgtgtctcggcggactgcttacaatggtggctggtgctgtgtggctgacagtgcgagtgctcgagctgttccgggccgcgcagctggccaacgacgtggtcctccagatcatggagctttgtggtgcagcgtttcgccaggtgtgccataccaccgtgccgtggccgaacgcgagcctgaccccgaaatggaacaacgaaaccacccagccccagatcgccaactgcagcgtgtatgacttttttgtgtggctccattattattctgttcgagacacactttggccaagggtgacctaccatatgaacaaatatgcgtatcatatgctggaaagacgagccaaatataaaagaggaccaggacctggcgctaaatttgtggccgcctggacactgaaagccgctgctggtcctggacctggccagtacatcaaggccaacagcaagttcatcggcatcaccgaactcggacccggaccaggctgatgattcgaacggccgtatcacgcccaaacatttacagccgcggtgtcaaaaaccgcgtggacgtggttaacatccctgctgggaggatcagccgtaattattataattggcttggtgctggctactattgtggccatgtacgtgctgaccaaccagaaacataattgaatacagcagcaattggcaagctgcttacatagaactcgcggcgattggcatgccgccttaaaatttttattttattttttcttttcttttccgaatcggattttgtttttaatatttcaaaaaaaaaaaaaaaaaaaaaaaaaaaaaaaaaaaaaaaaaaaaaaaaaaaaaaaaaaaaaaaaaaaaaaaaaaaaaaaa

SEQ ID NO: 5 - DNA, 11447 bp, Venezuelan equine encephalitis virus; identical to SEQ ID NO: 3

SEQ ID NO: 6 - DNA, 7894 bp, Artificial Sequence
  Description of Artificial Sequence: Synthetic polynucleotide
atgggcggcgcatgagagaagcccagaccaattacctacccaaaatggagaaagttcacgttgacatcgaggaagacagcccattcctcagagctttgcagcggagcttcccgcagtttgaggtagaagccaagcaggtcactgataatgaccatgctaatgccagagcgttttcgcatctggcttcaaaactgatcgaaacggaggtggacccatccgacacgatccttgacattggaagtgcgcccgcccgcagaatgtattctaagcacaagtatcattgtatctgtccgatgagatgtgcggaagatccggacagattgtataagtatgcaactaagctgaagaaaaactgtaaggaaataactgataaggaattggacaagaaaatgaaggagctcgccgccgtcatgagcgaccctgacctggaaactgagactatgtgcctccacgacgacgagtcgtgtcgctacgaagggcaagtcgctgtttaccaggatgtatacgcggttgacggaccgacaagtctctatcaccaagccaataagggagttagagtcgcctactggataggctttgacaccaccccttttatgtttaagaacttggctggagcatatccatcatactctaccaactgggccgacgaaaccgtgttaacggctcgtaacataggcctatgcagctctgacgttatggagcggtcacgtagagggatgtccattcttagaaagaagtatttgaaaccatccaacaatgttctattctctgttggctcgaccatctaccacgagaagagggacttactgaggagctggcacctgccgtctgtatttcacttacgtggcaagcaaaattacacatgtcggtgtgagactatagttagttgcgacgggtacgtcgttaaaagaatagctatcagtccaggcctgtatgggaagccttcaggctatgctgctacgatgcaccgcgagggattcttgtgctgcaaagtgacagacacattgaacggggagagggtctcttttcccgtgtgcacgtatgtgccagctacattgtgtgaccaaatgactggcatactggcaacagatgtcagtgcggacgacgcgcaaaaactgctggttgggctcaaccagcgtatagtcgtcaacggtcgcacccagagaaacaccaataccatgaaaaattaccttttgcccgtagtggcccaggcatttgctaggtgggcaaaggaatataaggaagatcaagaagatgaaaggccactaggactacgagatagacagttagtcatggggtgttgttgggcttttagaaggcacaagataacatctatttataagcgcccggatacccaaaccatcatcaaagtgaacagcgatttccactcattcgtgctgcccaggataggcagtaacacattggagatcgggctgagaacaagaatcaggaaaatgttagaggagcacaaggagccgtcacctctcattaccgccgaggacgtacaagaagctaagtgcgcagccgatgaggctaaggaggtgcgtgaagccgaggagttgcgcgcagctctaccacctttggcagctgatgttgaggagcccactctggaagccgatgtcgacttgatgttacaagaggctggggccggctcagtggagacacctcgtggcttgataaaggttaccagctacgctggcgaggacaagatcggctcttacgctgtgctttctccgcaggctgtactcaagagtgaaaaattatcttgcatccaccctctcgctgaacaagtcatagtgataacacactctggccgaaaagggcgttatgccgtggaaccataccatggtaaagtagtggtgccagagggacatgcaatacccgtccaggactttcaagctctgagtgaaagtgccaccattgtgtacaacgaacgtgagttcgtaaacaggtacctgcaccatattgccacacatggaggagcgctgaacactgatgaagaatattacaaaactgtcaagcccagcgagcacgacggcgaatacctgtacgacatcgacaggaaacagtgcgtcaagaaagaactagtcactgggctagggctcacaggcgagctggtggatcctcccttccatgaattcgcctacgagagtctgagaacacgaccagccgctccttaccaagtaccaaccataggggtgtatggcgtgccaggatcaggcaagtctggcatcattaaaagcgcagtcaccaaaaaagatctagtggtgagcgccaagaaagaaaactgtgcagaaattataagggacgtcaagaaaatgaaagggctggacgtcaatgccagaactgtggactcagtgctcttgaatggatgcaaacaccccgtagagaccctgtatattgacgaagcttttgcttgtcatgcaggtactctcagagcgctcatagccattataagacctaaaaaggcagtgctctgcggggatcccaaacagtgcggtttttttaacatgatgtgcctgaaagtgcattttaaccacgagatttgcacacaagtcttccacaaaagcatctctcgccgttgcactaaatctgtgacttcggtcgtctcaaccttgttttacgacaaaaaaatgagaacgacgaatccgaaagagactaagattgtgattgacactaccggcagtaccaaacctaagcaggacgatctcattctcacttgtttcagagggtgggtgaagcagttgcaaatagattacaaaggcaacgaaataatgacggcagctgcctctcaagggctgacccgtaaaggtgtgtatgccgttcggtacaaggtgaatgaaaatcctctgtacgcacccacctcagaacatgtgaacgtcctactgacccgcacggaggaccgcatcgtgtggaaaacactagccggcgacccatggataaaaacactgactgccaagtaccctgggaatttcactgccacgatagaggagtggcaagcagagcatgatgccatcatgaggcacatcttggagagaccggaccctaccgacgtcttccagaataaggcaaacgtgtgttgggccaaggctttagtgccggtgctgaagaccgctggcatagacatgaccactgaacaatggaacactgtggattattttgaaacggacaaagctcactcagcagagatagtattgaaccaactatgcgtgaggttctttggactcgatctggactccggtctattttctgcacccactgttccgttatccattaggaataatcactgggataactccccgtcgcctaacatgtacgggctgaataaagaagtggtccgtcagctctctcgcaggtacccacaactgcctcgggcagttgccactggaagagtctatgacatgaacactggtacactgcgcaattatgatccgcgcataaacctagtacctgtaaacagaagactgcctcatgctttagtcctccaccataatgaacacccacagagtgacttttcttcattcgtcagcaaattgaagggcagaactgtcctggtggtcggggaaaagttgtccgtcccaggcaaaatggttgactggttgtcagaccggcctgaggctaccttcagagctcggctggatttaggcatcccaggtgatgtgcccaaatatgacataatatttgttaatgtgaggaccccatataaataccatcactatcagcagtgtgaagaccatgccattaagcttagcatgttgaccaagaaagcttgtctgcatctgaatcccggcggaacctgtgtcagcataggttatggttacgctgacagggccagcgaaagcatcattggtgctatagcgcggcagttcaagttttcccgggtatgcaaaccgaaatcctcacttgaagagacggaagttctgtttgtattcattgggtacgatcgcaaggcccgtacgcacaatccttacaagctttcatcaaccttgaccaacatttatacaggttccagactccacgaagccggatgtgcaccctcatatcatgtggtgcgaggggatattgccacggccaccgaaggagtgattataaatgctgctaacagcaaaggacaacctggcggaggggtgtgcggagcgctgtataagaaattcccggaaagcttcgatttacagccgatcgaagtaggaaaagcgcgactggtcaaaggtgcagctaaacatatcattcatgccgtaggaccaaacttcaacaaagtttcggaggttgaaggtgacaaacagttggcagaggcttatgagtccatcgctaagattgtcaacgataacaattacaagtcagtagcgattccactgttgtccaccggcatcttttccgggaacaaagatcgactaacccaatcattgaaccatttgctgacagctttagacaccactgatgcagatgtagccatatactgcagggacaagaaatgggaaatgactctcaaggaagcagtggctaggagagaagcagtggaggagatatgcatatccgacgactcttcagtgacagaacctgatgcagagctggtgagggtgcatccgaagagttctttggctggaaggaagggctacagcacaagcgatggcaaaactttctcatatttggaagggaccaagtttcaccaggcggccaaggatatagcagaaattaatgccatgtggcccgttgcaacggaggccaatgagcaggtatgcatgtatatcctcggagaaagcatgagcagtattaggtcgaaatgccccgtcgaagagtcggaagcctccacaccacctagcacgctgccttgcttgtgcatccatgccatgactccagaaagagtacagcgcctaaaagcctcacgtccagaacaaattactgtgtgctcatcctttccattgccgaagtatagaatcactggtgtgcagaagatccaatgctcccagcctatattgttctcaccgaaagtgcctgcgtatattcatccaaggaagtatctcgtggaaacaccaccggtagacgagactccggagccatcggcagagaaccaatccacagaggggacacctgaacaaccaccacttataaccgaggatgagaccaggactagaacgcctgagccgatcatcatcgaagaggaagaagaggatagcataagtttgctgtcagatggcccgacccaccaggtgctgcaagtcgaggcagacattcacgggccgccctctgtatctagctcatcctggtccattcctcatgcatccgactttgatgtggacagtttatccatacttgacaccctggagggagctagcgtgaccagcggggcaacgtcagccgagactaactcttacttcgcaaagagtatggagtttctggcgcgaccggtgcctgcgcctcgaacagtattcaggaaccctccacatcccgctccgcgcacaagaacaccgtcacttgcacccagcagggcctgctcgagaaccagcctagtttccaccccgccaggcgtgaatagggtgatcactagagaggagctcgaggcgcttaccccgtcacgcactcctagcaggtcggtctcgagaaccagcctggtctccaacccgccaggcgtaaatagggtgattacaagagaggagtttgaggcgttcgtagcacaacaacaatgacggtttgatgcgggtgcatacatcttttcctccgacaccggtcaagggcatttacaacaaaaatcagtaaggcaaacggtgctatccgaagtggtgttggagaggaccgaattggagatttcgtatgccccgcgcctcgaccaagaaaaagaagaattactacgcaagaaattacagttaaatcccacacctgctaacagaagcagataccagtccaggaaggtggagaacatgaaagccataacagctagacgtattctgcaaggcctagggcattatttgaaggcagaaggaaaagtggagtgctaccgaaccctgcatcctgttcctttgtattcatctagtgtgaaccgtgccttttcaagccccaaggtcgcagtggaagcctgtaacgccatgttgaaagagaactttccgactgtggcttcttactgtattattccagagtacgatgcctatttggacatggttgacggagcttcatgctgcttagacactgccagtttttgccctgcaaagctgcgcagctttccaaagaaacactcctatttggaacccacaatacgatcggcagtgccttcagcgatccagaacacgctccagaacgtcctggcagctgccacaaaaagaaattgcaatgtcacgcaaatgagagaattgcccgtattggattcggcggcctttaatgtggaatgcttcaagaaatatgcgtgtaataatgaatattgggaaacgtttaaagaaaaccccatcaggcttactgaagaaaacgtggtaaattacattaccaaattaaaaggaccaaaagctgctgctctttttgcgaagacacataatttgaatatgttgcaggacataccaatggacaggtttgtaatggacttaaagagagacgtgaaagtgactccaggaacaaaacatactgaagaacggcccaaggtacaggtgatccaggctgccgatccgctagcaacagcgtatctgtgcggaatccaccgagagctggttaggagattaaatgcggtcctgcttccgaacattcatacactgtttgatatgtcggctgaagactttgacgctattatagccgagcacttccagcctggggattgtgttctggaaactgacatcgcgtcgtttgataaaagtgaggacgacgccatggctctgaccgcgttaatgattctggaagacttaggtgtggacgcagagctgttgacgctgattgaggcggctttcggcgaaatttcatcaatacatttgcccactaaaactaaatttaaattcggagccatgatgaaatctggaatgttcctcacactgtttgtgaacacagtcattaacattgtaatcgcaagcagagtgttgagagaacggctaaccggatcaccatgtgcagcattcattggagatgacaatatcgtgaaaggagtcaaatcggacaaattaatggcagacaggtgcgccacctggttgaatatggaagtcaagattatagatgctgtggtgggcgagaaagcgccttatttctgtggagggtttattttgtgtgactccgtgaccggcacagcgtgccgtgtggcagaccccctaaaaaggctgtttaagcttggcaaacctctggcagcagacgatgaacatgatgatgacaggagaagggcattgcatgaagagtcaacacgctggaaccgagtgggtattctttcagagctgtgcaaggcagtagaatcaaggtatgaaaccgtaggaacttccatcatagttatggccatgactactctagctagcagtgttaaatcattcagctacctgagaggggcccctataactctctacggctaacctgaatggactacgactatcacgcccaaacatttacagccgcggtgtcaaaaaccgcgtggacgtggttaacatccctgctgggaggatcagccgtaattattataattggcttggtgctggctactattgtggccatgtacgtgctgaccaaccagaaacataattgaatacagcagcaattggcaagctgcttacatagaactcgcggcgattggcatgccgccttaaaatttttattttattttttcttttcttttccgaatcggattttgtttttaatatttcaaaaaaaaaaaaaaaaaaaaaaaaaaaaaaaaaaaaaaaaaaaaaaaaaaaaaaaaaaaaaaaaaaaaaaaaaaaaaaaa

SEQ ID NO: 7 - DNA, 7893 bp, Artificial Sequence
  Description of Artificial Sequence: Synthetic polynucleotide
ataggcggcgcatgagagaagcccagaccaattacctacccaaaatggagaaagttcacgttgacatcgaggaagacagcccattcctcagagctttgcagcggagcttcccgcagtttgaggtagaagccaagcaggtcactgataatgaccatgctaatgccagagcgttttcgcatctggcttcaaaactgatcgaaacggaggtggacccatccgacacgatccttgacattggaagtgcgcccgcccgcagaatgtattctaagcacaagtatcattgtatctgtccgatgagatgtgcggaagatccggacagattgtataagtatgcaactaagctgaagaaaaactgtaaggaaataactgataaggaattggacaagaaaatgaaggagctcgccgccgtcatgagcgaccctgacctggaaactgagactatgtgcctccacgacgacgagtcgtgtcgctacgaagggcaagtcgctgtttaccaggatgtatacgcggttgacggaccgacaagtctctatcaccaagccaataagggagttagagtcgcctactggataggctttgacaccaccccttttatgtttaagaacttggctggagcatatccatcatactctaccaactgggccgacgaaaccgtgttaacggctcgtaacataggcctatgcagctctgacgttatggagcggtcacgtagagggatgtccattcttagaaagaagtatttgaaaccatccaacaatgttctattctctgttggctcgaccatctaccacgagaagagggacttactgaggagctggcacctgccgtctgtatttcacttacgtggcaagcaaaattacacatgtcggtgtgagactatagttagttgcgacgggtacgtcgttaaaagaatagctatcagtccaggcctgtatgggaagccttcaggctatgctgctacgatgcaccgcgagggattcttgtgctgcaaagtgacagacacattgaacggggagagggtctcttttcccgtgtgcacgtatgtgccagctacattgtgtgaccaaatgactggcatactggcaacagatgtcagtgcggacgacgcgcaaaaactgctggttgggctcaaccagcgtatagtcgtcaacggtcgcacccagagaaacaccaataccatgaaaaattaccttttgcccgtagtggcccaggcatttgctaggtgggcaaaggaatataaggaagatcaagaagatgaaaggccactaggactacgagatagacagttagtcatggggtgttgttgggcttttagaaggcacaagataacatctatttataagcgcccggatacccaaaccatcatcaaagtgaacagcgatttccactcattcgtgctgcccaggataggcagtaacacattggagatcgggctgagaacaagaatcaggaaaatgttagaggagcacaaggagccgtcacctctcattaccgccgaggacgtacaagaagctaagtgcgcagccgatgaggctaaggaggtgcgtgaagccgaggagttgcgcgcagctctaccacctttggcagctgatgttgaggagcccactctggaagccgatgtcgacttgatgttacaagaggctggggccggctcagtggagacacctcgtggcttgataaaggttaccagctacgatggcgaggacaagatcggctcttacgctgtgctttctccgcaggctgtactcaagagtgaaaaattatcttgcatccaccctctcgctgaacaagtcatagtgataacacactctggccgaaaagggcgttatgccgtggaaccataccatggtaaagtagtggtgccagagggacatgcaatacccgtccaggactttcaagctctgagtgaaagtgccaccattgtgtacaacgaacgtgagttcgtaaacaggtacctgcaccatattgccacacatggaggagcgctgaacactgatgaagaatattacaaaactgtcaagcccagcgagcacgacggcgaatacctgtacgacatcgacaggaaacagtgcgtcaagaaagaactagtcactgggctagggctcacaggcgagctggtggatcctcccttccatgaattcgcctacgagagtctgagaacacgaccagccgctccttaccaagtaccaaccataggggtgtatggcgtgccaggatcaggcaagtctggcatcattaaaagcgcagtcaccaaaaaagatctagtggtgagcgccaagaaagaaaactgtgcagaaattataagggacgtcaagaaaatgaaagggctggacgtcaatgccagaactgtggactcagtgctcttgaatggatgcaaacaccccgtagagaccctgtatattgacgaagcttttgcttgtcatgcaggtactctcagagcgctcatagccattataagacctaaaaaggcagtgctctgcggggatcccaaacagtgcggtttttttaacatgatgtgcctgaaagtgcattttaaccacgagatttgcacacaagtcttccacaaaagcatctctcgccgttgcactaaatctgtgacttcggtcgtctcaaccttgttttacgacaaaaaaatgagaacgacgaatccgaaagagactaagattgtgattgacactaccggcagtaccaaacctaagcaggacgatctcattctcacttgtttcagagggtgggtgaagcagttgcaaatagattacaaaggcaacgaaataatgacggcagctgcctctcaagggctgacccgtaaaggtgtgtatgccgttcggtacaaggtgaatgaaaatcctctgtacgcacccacctcagaacatgtgaacgtcctactgacccgcacggaggaccgcatcgtgtggaaaacactagccggcgacccatggataaaaacactgactgccaagtaccctgggaatttcactgccacgatagaggagtggcaagcagagcatgatgccatcatgaggcacatcttggagagaccggaccctaccgacgtcttccagaataaggcaaacgtgtgttgggccaaggctttagtgccggtgctgaagaccgctggcatagacatgaccactgaacaatggaacactgtggattattttgaaacggacaaagctcactcagcagagatagtattgaaccaactatgcgtgaggttctttggactcgatctggactccggtctattttctgcacccactgttccgttatccattaggaataatcactgggataactccccgtcgcctaacatgtacgggctgaataaagaagtggtccgtcagctctctcgcaggtacccacaactgcctcgggcagttgccactggaagagtctatgacatgaacactggtacactgcgcaattatgatccgcgcataaacctagtacctgtaaacagaagactgcctcatgctttagtcctccaccataatgaacacccacagagtgacttttcttcattcgtcagcaaattgaagggcagaactgtcctggtggtcggggaaaagttgtccgtcccaggcaaaatggttgactggttgtcagaccggcctgaggctaccttcagagctcggctggatttaggcatcccaggtgatgtgcccaaatatgacataatatttgttaatgtgaggaccccatataaataccatcactatcagcagtgtgaagaccatgccattaagcttagcatgttgaccaagaaagcttgtctgcatctgaatcccggcggaacctgtgtcagcataggttatggttacgctgacagggccagcgaaagcatcattggtgctatagcgcggcagttcaagttttcccgggtatgcaaaccgaaatcctcacttgaagagacggaagttctgtttgtattcattgggtacgatcgcaaggcccgtacgcacaatccttacaagctttcatcaaccttgaccaacatttatacaggttccagactccacgaagccggatgtgcaccctcatatcatgtggtgcgaggggatattgccacggccaccgaaggagtgattataaatgctgctaacagcaaaggacaacctggcggaggggtgtgcggagcgctgtataagaaattcccggaaagcttcgatttacagccgatcgaagtaggaaaagcgcgactggtcaaaggtgcagctaaacatatcattcatgccgtaggaccaaacttcaacaaagtttcggaggttgaaggtgacaaacagttggcagaggcttatgagtccatcgctaagattgtcaacgataacaattacaagtcagtagcgattccactgttgtccaccggcatcttttccgggaacaaagatcgactaacccaatcattgaaccatttgctgacagctttagacaccactgatgcagatgtagccatatactgcagggacaagaaatgggaaatgactctcaaggaagcagtggctaggagagaagcagtggaggagatatgcatatccgacgactcttcagtgacagaacctgatgcagagctggtgagggtgcatccgaagagttctttggctggaaggaagggctacagcacaagcgatggcaaaactttctcatatttggaagggaccaagtttcaccaggcggccaaggatatagcagaaattaatgccatgtggcccgttgcaacggaggccaatgagcaggtatgcatgtatatcctcggagaaagcatgagcagtattaggtcgaaatgccccgtcgaagagtcggaagcctccacaccacctagcacgctgccttgcttgtgcatccatgccatgactccagaaagagtacagcgcctaaaagcctcacgtccagaacaaattactgtgtgctcatcctttccattgccgaagtatagaatcactggtgtgcagaagatccaatgctcccagcctatattgttctcaccgaaagtgcctgcgtatattcatccaaggaagtatctcgtggaaacaccaccggtagacgagactccggagccatcggcagagaaccaatccacagaggggacacctgaacaaccaccacttataaccgaggatgagaccaggactagaacgcctgagccgatcatcatcgaagaggaagaagaggatagcataagtttgctgtcagatggcccgacccaccaggtgctgcaagtcgaggcagacattcacgggccgccctctgtatctagctcatcctggtccattcctcatgcatccgactttgatgtggacagtttatccatacttgacaccctggagggagctagcgtgaccagcggggcaacgtcagccgagactaactcttacttcgcaaagagtatggagtttctggcgcgaccggtgcctgcgcctcgaacagtattcaggaaccctccacatcccgctccgcgcacaagaacaccgtcacttgcacccagcagggcctgctcgagaaccagcctagtttccaccccgccaggcgtgaatagggtgatcactagagaggagctcgaggcgcttaccccgtcacgcactcctagcaggtcggtctcgagaaccagcctggtctccaacccgccaggcgtaaatagggtgattacaagagaggagtttgaggcgttcgtagcacaacaacaatgacggtttgatgcgggtgcatacatcttttcctccgacaccggtcaagggcatttacaacaaaaatcagtaaggcaaacggtgctatccgaagtggtgttggagaggaccgaattggagatttcgtatgccccgcgcctcgaccaagaaaaagaagaattactacgcaagaaattacagttaaatcccacacctgctaacagaagcagataccagtccaggaaggtggagaacatgaaagccataacagctagacgtattctgcaaggcctagggcattatttgaaggcagaaggaaaagtggagtgctaccgaaccctgcatcctgttcctttgtattcatctagtgtgaaccgtgccttttcaagccccaaggtcgcagtggaagcctgtaacgccatgttgaaagagaactttccgactgtggcttcttactgtattattccagagtacgatgcctatttggacatggttgacggagcttcatgctgcttagacactgccagtttttgccctgcaaagctgcgcagctttccaaagaaacactcctatttggaacccacaatacgatcggcagtgccttcagcgatccagaacacgctccagaacgtcctggcagctgccacaaaaagaaattgcaatgtcacgcaaatgagagaattgcccgtattggattcggcggcctttaatgtggaatgcttcaagaaatatgcgtgtaataatgaatattgggaaacgtttaaagaaaaccccatcaggcttactgaagaaaacgtggtaaattacattaccaaattaaaaggaccaaaagctgctgctctttttgcgaagacacataatttgaatatgttgcaggacataccaatggacaggtttgtaatggacttaaagagagacgtgaaagtgactccaggaacaaaacatactgaagaacggcccaaggtacaggtgatccaggctgccgatccgctagcaacagcgtatctgtgcggaatccaccgagagctggttaggagattaaatgcggtcctgcttccgaacattcatacactgtttgatatgtcggctgaagactttgacgctattatagccgagcacttccagcctggggattgtgttctggaaactgacatcgcgtcgtttgataaaagtgaggacgacgccatggctctgaccgcgttaatgattctggaagacttaggtgtggacgcagagctgttgacgctgattgaggcggctttcggcgaaatttcatcaatacatttgcccactaaaactaaatttaaattcggagccatgatgaaatctggaatgttcctcacactgtttgtgaacacagtcattaacattgtaatcgcaagcagagtgttgagagaacggctaaccggatcaccatgtgcagcattcattggagatgacaatatcgtgaaaggagtcaaatcggacaaattaatggcagacaggtgcgccacctggttgaatatggaagtcaagattatagatgctgtggtgggcgagaaagcgccttatttctgtggagggtttattttgtgtgactccgtgaccggcacagcgtgccgtgtggcagaccccctaaaaaggctgtttaagcttggcaaacctctggcagcagacgatgaacatgatgatgacaggagaagggcattgcatgaagagtcaacacgctggaaccgagtgggtattctttcagagctgtgcaaggcagtagaatcaaggtatgaaaccgtaggaacttccatcatagttatggccatgactactctagctagcagtgttaaatcattcagctacctgagaggggcccctataactctctacggctaacctgaatggactacgactatcacgcccaaacatttacagccgcggtgtcaaaaaccgcgtggacgtggttaacatccctgctgggaggatcagccgtaattattataattggcttggtgctggctactattgtggccatgtacgtgctgaccaaccagaaacataattgaatacagcagcaattggcaagctgcttacatagaactcgcggcgattggcatgccgccttaaaatttttattttatttttcttttcttttccgaatcggattttgtttttaatatttcaaaaaaaaaaaaaaaaaaaaaaaaaaaaaaaaaaaaaaaaaaaaaaaaaaaaaaaaaaaaaaaaaaaaaaaaaaaaaaaa

SEQ ID NO: 8 - DNA, 7927 bp, Artificial Sequence
  Description of Artificial Sequence: Synthetic polynucleotide
taatacgactcactataggatgggcggcgcatgagagaagcccagaccaattacctacccaaaatggagaaagttcacgttgacatcgaggaagacagcccattcctcagagctttgcagcggagcttcccgcagtttgaggtagaagccaagcaggtcactgataatgaccatgctaatgccagagcgttttcgcatctggcttcaaaactgatcgaaacggaggtggacccatccgacacgatccttgacattggaagtgcgcccgcccgcagaatgtattctaagcacaagtatcattgtatctgtccgatgagatgtgcggaagatccggacagattgtataagtatgcaactaagctgaagaaaaactgtaaggaaataactgataaggaattggacaagaaaatgaaggagctcgccgccgtcatgagcgaccctgacctggaaactgagactatgtgcctccacgacgacgagtcgtgtcgctacgaagggcaagtcgctgtttaccaggatgtatacgcggttgacggaccgacaagtctctatcaccaagccaataagggagttagagtcgcctactggataggctttgacaccaccccttttatgtttaagaacttggctggagcatatccatcatactctaccaactgggccgacgaaaccgtgttaacggctcgtaacataggcctatgcagctctgacgttatggagcggtcacgtagagggatgtccattcttagaaagaagtatttgaaaccatccaacaatgttctattctctgttggctcgaccatctaccacgagaagagggacttactgaggagctggcacctgccgtctgtatttcacttacgtggcaagcaaaattacacatgtcggtgtgagactatagttagttgcgacgggtacgtcgttaaaagaatagctatcagtccaggcctgtatgggaagccttcaggctatgctgctacgatgcaccgcgagggattcttgtgctgcaaagtgacagacacattgaacggggagagggtctcttttcccgtgtgcacgtatgtgccagctacattgtgtgaccaaatgactggcatactggcaacagatgtcagtgcggacgacgcgcaaaaactgctggttgggctcaaccagcgtatagtcgtcaacggtcgcacccagagaaacaccaataccatgaaaaattaccttttgcccgtagtggcccaggcatttgctaggtgggcaaaggaatataaggaagatcaagaagatgaaaggccactaggactacgagatagacagttagtcatggggtgttgttgggcttttagaaggcacaagataacatctatttataagcgcccggatacccaaaccatcatcaaagtgaacagcgatttccactcattcgtgctgcccaggataggcagtaacacattggagatcgggctgagaacaagaatcaggaaaatgttagaggagcacaaggagccgtcacctctcattaccgccgaggacgtacaagaagctaagtgcgcagccgatgaggctaaggaggtgcgtgaagccgaggagttgcgcgcagctctaccacctttggcagctgatgttgaggagcccactctggaagccgatgtcgacttgatgttacaagaggctggggccggctcagtggagacacctcgtggcttgataaaggttaccagctacgctggcgaggacaagatcggctcttacgctgtgctttctccgcaggctgtactcaagagtgaaaaattatcttgcatccaccctctcgctgaacaagtcatagtgataacacactctggccgaaaagggcgttatgccgtggaaccataccatggtaaagtagtggtgccagagggacatgcaatacccgtccaggactttcaagctctgagtgaaagtgccaccattgtgtacaacgaacgtgagttcgtaaacaggtacctgcaccatattgccacacatggaggagcgctgaacactgatgaagaatattacaaaactgtcaagcccagcgagcacgacggcgaatacctgtacgacatcgacaggaaacagtgcgtcaagaaagaactagtcactgggctagggctcacaggcgagctggtggatcctcccttccatgaattcgcctacgagagtctgagaacacgaccagccgctccttaccaagtaccaaccataggggtgtatggcgtgccaggatcaggcaagtctggcatcattaaaagcgcagtcaccaaaaaagatctagtggtgagcgccaagaaagaaaactgtgcagaaattataagggacgtcaagaaaatgaaagggctggacgtcaatgccagaactgtggactcagtgctcttgaatggatgcaaacaccccgtagagaccctgtatattgacgaagcttttgcttgtcatgcaggtactctcagagcgctcatagccattataagacctaaaaaggcagtgctctgcggggatcccaaacagtgcggtttttttaacatgatgtgcctgaaagtgcattttaaccacgagatttgcacacaagtcttccacaaaagcatctctcgccgttgcactaaatctgtgacttcggtcgtctcaaccttgttttacgacaaaaaaatgagaacgacgaatccgaaagagactaagattgtgattgacactaccggcagtaccaaacctaagcaggacgatctcattctcacttgtttcagagggtgggtgaagcagttgcaaatagattacaaaggcaacgaaataatgacggcagctgcctctcaagggctgacccgtaaaggtgtgtatgccgttcggtacaaggtgaatgaaaatcctctgtacgcacccacctcagaacatgtgaacgtcctactgacccgcacggaggaccgcatcgtgtggaaaacactagccggcgacccatggataaaaacactgactgccaagtaccctgggaatttcactgccacgatagaggagtggcaagcagagcatgatgccatcatgaggcacatcttggagagaccggaccctaccgacgtcttccagaataaggcaaacgtgtgttgggccaaggctttagtgccggtgctgaagaccgctggcatagacatgaccactgaacaatggaacactgtggattattttgaaacggacaaagctcactcagcagagatagtattgaaccaactatgcgtgaggttctttggactcgatctggactccggtctattttctgcacccactgttccgttatccattaggaataatcactgggataactccccgtcgcctaacatgtacgggctgaataaagaagtggtccgtcagctctctcgcaggtacccacaactgcctcgggcagttgccactggaagagtctatgacatgaacactggtacactgcgcaattatgatccgcgcataaacctagtacctgtaaacagaagactgcctcatgctttagtcctccaccataatgaacacccacagagtgacttttcttcattcgtcagcaaattgaagggcagaactgtcctggtggtcggggaaaagttgtccgtcccaggcaaaatggttgactggttgtcagaccggcctgaggctaccttcagagctcggctggatttaggcatcccaggtgatgtgcccaaatatgacataatatttgttaatgtgaggaccccatataaataccatcactatcagcagtgtgaagaccatgccattaagcttagcatgttgaccaagaaagcttgtctgcatctgaatcccggcggaacctgtgtcagcataggttatggttacgctgacagggccagcgaaagcatcattggtgctatagcgcggcagttcaagttttcccgggtatgcaaaccgaaatcctcacttgaagagacggaagttctgtttgtattcattgggtacgatcgcaaggcccgtacgcacaatccttacaagctttcatcaaccttgaccaacatttatacaggttccagactccacgaagccggatgtgcaccctcatatcatgtggtgcgaggggatattgccacggccaccgaaggagtgattataaatgctgctaacagcaaaggacaacctggcggaggggtgtgcggagcgctgtataagaaattcccggaaagcttcgatttacagccgatcgaagtaggaaaagcgcgactggtcaaaggtgcagctaaacatatcattcatgccgtaggaccaaacttcaacaaagtttcggaggttgaaggtgacaaacagttggcagaggcttatgagtccatcgctaagattgtcaacgataacaattacaagtcagtagcgattccactgttgtccaccggcatcttttccgggaacaaagatcgactaacccaatcattgaaccatttgctgacagctttagacaccactgatgcagatgtagccatatactgcagggacaagaaatgggaaatgactctcaaggaagcagtggctaggagagaagcagtggaggagatatgcatatccgacgactcttcagtgacagaacctgatgcagagctggtgagggtgcatccgaagagttctttggctggaaggaagggctacagcacaagcgatggcaaaactttctcatatttggaagggaccaagtttcaccaggcggccaaggatatagcagaaattaatgccatgtggcccgttgcaacggaggccaatgagcaggtatgcatgtatatcctcggagaaagcatgagcagtattaggtcgaaatgccccgtcgaagagtcggaagcctccacaccacctagcacgctgccttgcttgtgcatccatgccatgactccagaaagagtacagcgcctaaaagcctcacgtccagaacaaattactgtgtgctcatcctttccattgccgaagtatagaatcactggtgtgcagaagatccaatgctcccagcctatattgttctcaccgaaagtgcctgcgtatattcatccaaggaagtatctcgtggaaacaccaccggtagacgagactccggagccatcggcagagaaccaatccacagaggggacacctgaacaaccaccacttataaccgaggatgagaccaggactagaacgcctgagccgatcatcatcgaagaggaagaagaggatagcataagtttgctgtcagatggcccgacccaccaggtgctgcaagtcgaggcagacattcacgggccgccctctgtatctagctcatcctggtccattcctcatgcatccgactttgatgtggacagtttatccatacttgacaccctggagggagctagcgtgaccagcggggcaacgtcagccgagactaactcttacttcgcaaagagtatggagtttctggcgcgaccggtgcctgcgcctcgaacagtattcaggaaccctccacatcccgctccgcgcacaagaacaccgtcacttgcacccagcagggcctgctcgagaaccagcctagtttccaccccgccaggcgtgaatagggtgatcactagagaggagctcgaggcgcttaccccgtcacgcactcctagcaggtcggtctcgagaaccagcctggtctccaacccgccaggcgtaaatagggtgattacaagagaggagtttgaggcgttcgtagcacaacaacaatgacggtttgatgcgggtgcatacatcttttcctccgacaccggtcaagggcatttacaacaaaaatcagtaaggcaaacggtgctatccgaagtggtgttggagaggaccgaattggagatttcgtatgccccgcgcctcgaccaagaaaaagaagaattactacgcaagaaattacagttaaatcccacacctgctaacagaagcagataccagtccaggaaggtggagaacatgaaagccataacagctagacgtattctgcaaggcctagggcattatttgaaggcagaaggaaaagtggagtgctaccgaaccctgcatcctgttcctttgtattcatctagtgtgaaccgtgccttttcaagccccaaggtcgcagtggaagcctgtaacgccatgttgaaagagaactttccgactgtggcttcttactgtattattccagagtacgatgcctatttggacatggttgacggagcttcatgctgcttagacactgccagtttttgccctgcaaagctgcgcagctttccaaagaaacactcctatttggaacccacaatacgatcggcagtgccttcagcgatccagaacacgctccagaacgtcctggcagctgccacaaaaagaaattgcaatgtcacgcaaatgagagaattgcccgtattggattcggcggcctttaatgtggaatgcttcaagaaatatgcgtgtaataatgaatattgggaaacgtttaaagaaaaccccatcaggcttactgaagaaaacgtggtaaattacattaccaaattaaaaggaccaaaagctgctgctctttttgcgaagacacataatttgaatatgttgcaggacataccaatggacaggtttgtaatggacttaaagagagacgtgaaagtgactccaggaacaaaacatactgaagaacggcccaaggtacaggtgatccaggctgccgatccgctagcaacagcgtatctgtgcggaatccaccgagagctggttaggagattaaatgcggtcctgcttccgaacattcatacactgtttgatatgtcggctgaagactttgacgctattatagccgagcacttccagcctggggattgtgttctggaaactgacatcgcgtcgtttgataaaagtgaggacgacgccatggctctgaccgcgttaatgattctggaagacttaggtgtggacgcagagctgttgacgctgattgaggcggctttcggcgaaatttcatcaatacatttgcccactaaaactaaatttaaattcggagccatgatgaaatctggaatgttcctcacactgtttgtgaacacagtcattaacattgtaatcgcaagcagagtgttgagagaacggctaaccggatcaccatgtgcagcattcattggagatgacaatatcgtgaaaggagtcaaatcggacaaattaatggcagacaggtgcgccacctggttgaatatggaagtcaagattatagatgctgtggtgggcgagaaagcgccttatttctgtggagggtttattttgtgtgactccgtgaccggcacagcgtgccgtgtggcagaccccctaaaaaggctgtttaagcttggcaaacctctggcagcagacgatgaacatgatgatgacaggagaagggcattgcatgaagagtcaacacgctggaaccgagtgggtattctttcagagctgtgcaaggcagtagaatcaaggtatgaaaccgtaggaacttccatcatagttatggccatgactactctagctagcagtgttaaatcattcagctacctgagaggggcccctataactctctacggctaacctgaatggactacgactatcacgcccaaacatttacagccgcggtgtcaaaaaccgcgtggacgtggttaacatccctgctgggaggatcagccgtaattattataattggcttggtgctggctactattgtggccatgtacgtgctgaccaaccagaaacataattgaatacagcagcaattggcaagctgcttacatagaactcgcggcgattggcatgccgccttaaaatttttattttattttttcttttcttttccgaatcggattttgtttttaatatttcaaaaaaaaaaaaaaaaaaaaaaaaaaaaaaaaaaaaaaaaaaaaaaaaaaaaaaaaaaaaaaaaaaaaaaaaaaaaaaaatacgtagtttaaac

SEQ ID NO: 9 - DNA, 7926 bp, Artificial Sequence
  Description of Artificial Sequence: Synthetic polynucleotide
taatacgactcactataggataggcggcgcatgagagaagcccagaccaattacctacccaaaatggagaaagttcacgttgacatcgaggaagacagcccattcctcagagctttgcagcggagcttcccgcagtttgaggtagaagccaagcaggtcactgataatgaccatgctaatgccagagcgttttcgcatctggcttcaaaactgatcgaaacggaggtggacccatccgacacgatccttgacattggaagtgcgcccgcccgcagaatgtattctaagcacaagtatcattgtatctgtccgatgagatgtgcggaagatccggacagattgtataagtatgcaactaagctgaagaaaaactgtaaggaaataactgataaggaattggacaagaaaatgaaggagctcgccgccgtcatgagcgaccctgacctggaaactgagactatgtgcctccacgacgacgagtcgtgtcgctacgaagggcaagtcgctgtttaccaggatgtatacgcggttgacggaccgacaagtctctatcaccaagccaataagggagttagagtcgcctactggataggctttgacaccaccccttttatgtttaagaacttggctggagcatatccatcatactctaccaactgggccgacgaaaccgtgttaacggctcgtaacataggcctatgcagctctgacgttatggagcggtcacgtagagggatgtccattcttagaaagaagtatttgaaaccatccaacaatgttctattctctgttggctcgaccatctaccacgagaagagggacttactgaggagctggcacctgccgtctgtatttcacttacgtggcaagcaaaattacacatgtcggtgtgagactatagttagttgcgacgggtacgtcgttaaaagaatagctatcagtccaggcctgtatgggaagccttcaggctatgctgctacgatgcaccgcgagggattcttgtgctgcaaagtgacagacacattgaacggggagagggtctcttttcccgtgtgcacgtatgtgccagctacattgtgtgaccaaatgactggcatactggcaacagatgtcagtgcggacgacgcgcaaaaactgctggttgggctcaaccagcgtatagtcgtcaacggtcgcacccagagaaacaccaataccatgaaaaattaccttttgcccgtagtggcccaggcatttgctaggtgggcaaaggaatataaggaagatcaagaagatgaaaggccactaggactacgagatagacagttagtcatggggtgttgttgggcttttagaaggcacaagataacatctatttataagcgcccggatacccaaaccatcatcaaagtgaacagcgatttccactcattcgtgctgcccaggataggcagtaacacattggagatcgggctgagaacaagaatcaggaaaatgttagaggagcacaaggagccgtcacctctcattaccgccgaggacgtacaagaagctaagtgcgcagccgatgaggctaaggaggtgcgtgaagccgaggagttgcgcgcagctctaccacctttggcagctgatgttgaggagcccactctggaagccgatgtcgacttgatgttacaagaggctggggccggctcagtggagacacctcgtggcttgataaaggttaccagctacgatggcgaggacaagatcggctcttacgctgtgctttctccgcaggctgtactcaagagtgaaaaattatcttgcatccaccctctcgctgaacaagtcatagtgataacacactctggccgaaaagggcgttatgccgtggaaccataccatggtaaagtagtggtgccagagggacatgcaatacccgtccaggactttcaagctctgagtgaaagtgccaccattgtgtacaacgaacgtgagttcgtaaacaggtacctgcaccatattgccacacatggaggagcgctgaacactgatgaagaatattacaaaactgtcaagcccagcgagcacgacggcgaatacctgtacgacatcgacaggaaacagtgcgtcaagaaagaactagtcactgggctagggctcacaggcgagctggtggatcctcccttccatgaattcgcctacgagagtctgagaacacgaccagccgctccttaccaagtaccaaccataggggtgtatggcgtgccaggatcaggcaagtctggcatcattaaaagcgcagtcaccaaaaaagatctagtggtgagcgccaagaaagaaaactgtgcagaaattataagggacgtcaagaaaatgaaagggctggacgtcaatgccagaactgtggactcagtgctcttgaatggatgcaaacaccccgtagagaccctgtatattgacgaagcttttgcttgtcatgcaggtactctcagagcgctcatagccattataagacctaaaaaggcagtgctctgcggggatcccaaacagtgcggtttttttaacatgatgtgcctgaaagtgcattttaaccacgagatttgcacacaagtcttccacaaaagcatctctcgccgttgcactaaatctgtgacttcggtcgtctcaaccttgttttacgacaaaaaaatgagaacgacgaatccgaaagagactaagattgtgattgacactaccggcagtaccaaacctaagcaggacgatctcattctcacttgtttcagagggtgggtgaagcagttgcaaatagattacaaaggcaacgaaataatgacggcagctgcctctcaagggctgacccgtaaaggtgtgtatgccgttcggtacaaggtgaatgaaaatcctctgtacgcacccacctcagaacatgtgaacgtcctactgacccgcacggaggaccgcatcgtgtggaaaacactagccggcgacccatggataaaaacactgactgccaagtaccctgggaatttcactgccacgatagaggagtggcaagcagagcatgatgccatcatgaggcacatcttggagagaccggaccctaccgacgtcttccagaataaggcaaacgtgtgttgggccaaggctttagtgccggtgctgaagaccgctggcatagacatgaccactgaacaatggaacactgtggattattttgaaacggacaaagctcactcagcagagatagtattgaaccaactatgcgtgaggttctttggactcgatctggactccggtctattttctgcacccactgttccgttatccattaggaataatcactgggataactccccgtcgcctaacatgtacgggctgaataaagaagtggtccgtcagctctctcgcaggtacccacaactgcctcgggcagttgccactggaagagtctatgacatgaacactggtacactgcgcaattatgatccgcgcataaacctagtacctgtaaacagaagactgcctcatgctttagtcctccaccataatgaacacccacagagtgacttttcttcattcgtcagcaaattgaagggcagaactgtcctggtggtcggggaaaagttgtccgtcccaggcaaaatggttgactggttgtcagaccggcctgaggctaccttcagagctcggctggatttaggcatcccaggtgatgtgcccaaatatgacataatatttgttaatgtgaggaccccatataaataccatcactatcagcagtgtgaagaccatgccattaagcttagcatgttgaccaagaaagcttgtctgcatctgaatcccggcggaacctgtgtcagcataggttatggttacgctgacagggccagcgaaagcatcattggtgctatagcgcggcagttcaagttttcccgggtatgcaaaccgaaatcctcacttgaagagacggaagttctgtttgtattcattgggtacgatcgcaaggcccgtacgcacaatccttacaagctttcatcaaccttgaccaacatttatacaggttccagactccacgaagccggatgtgcaccctcatatcatgtggtgcgaggggatattgccacggccaccgaaggagtgattataaatgctgctaacagcaaaggacaacctggcggaggggtgtgcggagcgctgtataagaaattcccggaaagcttcgatttacagccgatcgaagtaggaaaagcgcgactggtcaaaggtgcagctaaacatatcattcatgccgtaggaccaaacttcaacaaagtttcggaggttgaaggtgacaaacagttggcagaggcttatgagtccatcgctaagattgtcaacgataacaattacaagtcagtagcgattccactgttgtccaccggcatcttttccgggaacaaagatcgactaacccaatcattgaaccatttgctgacagctttagacaccactgatgcagatgtagccatatactgcagggacaagaaatgggaaatgactctcaaggaagcagtggctaggagagaagcagtggaggagatatgcatatccgacgactcttcagtgacagaacctgatgcagagctggtgagggtgcatccgaagagttctttggctggaaggaagggctacagcacaagcgatggcaaaactttctcatatttggaagggaccaagtttcaccaggcggccaaggatatagcagaaattaatgccatgtggcccgttgcaacggaggccaatgagcaggtatgcatgtatatcctcggagaaagcatgagcagtattaggtcgaaatgccccgtcgaagagtcggaagcctccacaccacctagcacgctgccttgcttgtgcatccatgccatgactccagaaagagtacagcgcctaaaagcctcacgtccagaacaaattactgtgtgctcatcctttccattgccgaagtatagaatcactggtgtgcagaagatccaatgctcccagcctatattgttctcaccgaaagtgcctgcgtatattcatccaaggaagtatctcgtggaaacaccaccggtagacgagactccggagccatcggcagagaaccaatccacagaggggacacctgaacaaccaccacttataaccgaggatgagaccaggactagaacgcctgagccgatcatcatcgaagaggaagaagaggatagcataagtttgctgtcagatggcccgacccaccaggtgctgcaagtcgaggcagacattcacgggccgccctctgtatctagctcatcctggtccattcctcatgcatccgactttgatgtggacagtttatccatacttgacaccctggagggagctagcgtgaccagcggggcaacgtcagccgagactaactcttacttcgcaaagagtatggagtttctggcgcgaccggtgcctgcgcctcgaacagtattcaggaaccctccacatcccgctccgcgcacaagaacaccgtcacttgcacccagcagggcctgctcgagaaccagcctagtttccaccccgccaggcgtgaatagggtgatcactagagaggagctcgaggcgcttaccccgtcacgcactcctagcaggtcggtctcgagaaccagcctggtctccaacccgccaggcgtaaatagggtgattacaagagaggagtttgaggcgttcgtagcacaacaacaatgacggtttgatgcgggtgcatacatcttttcctccgacaccggtcaagggcatttacaacaaaaatcagtaaggcaaacggtgctatccgaagtggtgttggagaggaccgaattggagatttcgtatgccccgcgcctcgaccaagaaaaagaagaattactacgcaagaaattacagttaaatcccacacctgctaacagaagcagataccagtccaggaaggtggagaacatgaaagccataacagctagacgtattctgcaaggcctagggcattatttgaaggcagaaggaaaagtggagtgctaccgaaccctgcatcctgttcctttgtattcatctagtgtgaaccgtgccttttcaagccccaaggtcgcagtggaagcctgtaacgccatgttgaaagagaactttccgactgtggcttcttactgtattattccagagtacgatgcctatttggacatggttgacggagcttcatgctgcttagacactgccagtttttgccctgcaaagctgcgcagctttccaaagaaacactcctatttggaacccacaatacgatcggcagtgccttcagcgatccagaacacgctccagaacgtcctggcagctgccacaaaaagaaattgcaatgtcacgcaaatgagagaattgcccgtattggattcggcggcctttaatgtggaatgcttcaagaaatatgcgtgtaataatgaatattgggaaacgtttaaagaaaaccccatcaggcttactgaagaaaacgtggtaaattacattaccaaattaaaaggaccaaaagctgctgctctttttgcgaagacacataatttgaatatgttgcaggacataccaatggacaggtttgtaatggacttaaagagagacgtgaaagtgactccaggaacaaaacatactgaagaacggcccaaggtacaggtgatccaggctgccgatccgctagcaacagcgtatctgtgcggaatccaccgagagctggttaggagattaaatgcggtcctgcttccgaacattcatacactgtttgatatgtcggctgaagactttgacgctattatagccgagcacttccagcctggggattgtgttctggaaactgacatcgcgtcgtttgataaaagtgaggacgacgccatggctctgaccgcgttaatgattctggaagacttaggtgtggacgcagagctgttgacgctgattgaggcggctttcggcgaaatttcatcaatacatttgcccactaaaactaaatttaaattcggagccatgatgaaatctggaatgttcctcacactgtttgtgaacacagtcattaacattgtaatcgcaagcagagtgttgagagaacggctaaccggatcaccatgtgcagcattcattggagatgacaatatcgtgaaaggagtcaaatcggacaaattaatggcagacaggtgcgccacctggttgaatatggaagtcaagattatagatgctgtggtgggcgagaaagcgccttatttctgtggagggtttattttgtgtgactccgtgaccggcacagcgtgccgtgtggcagaccccctaaaaaggctgtttaagcttggcaaacctctggcagcagacgatgaacatgatgatgacaggagaagggcattgcatgaagagtcaacacgctggaaccgagtgggtattctttcagagctgtgcaaggcagtagaatcaaggtatgaaaccgtaggaacttccatcatagttatggccatgactactctagctagcagtgttaaatcattcagctacctgagaggggcccctataactctctacggctaacctgaatggactacgactatcacgcccaaacatttacagccgcggtgtcaaaaaccgcgtggacgtggttaacatccctgctgggaggatcagccgtaattattataattggcttggtgctggctactattgtggccatgtacgtgctgaccaaccagaaacataattgaatacagcagcaattggcaagctgcttacatagaactcgcggcgattggcatgccgccttaaaatttttattttatttttcttttcttttccgaatcggattttgtttttaatatttcaaaaaaaaaaaaaaaaaaaaaaaaaaaaaaaaaaaaaaaaaaaaaaaaaaaaaaaaaaaaaaaaaaaaaaaaaaaaaaaatacgtagtttaaac

SEQ ID NO: 10 - DNA, 36519 bp, Artificial Sequence
  Description of Artificial Sequence: Synthetic polynucleotide
ccatcttcaataatatacctcaaactttttgtgcgcgttaatatgcaaatgaggcgtttgaatttggggaggaagggcggtgattggtcgagggatgagcgaccgttaggggcggggcgagtgacgttttgatgacgtggttgcgaggaggagccagtttgcaagttctcgtgggaaaagtgacgtcaaacgaggtgtggtttgaacacggaaatactcaattttcccgcgctctctgacaggaaatgaggtgtttctgggcggatgcaagtgaaaacgggccattttcgcgcgaaaactgaatgaggaagtgaaaatctgagtaatttcgcgtttatggcagggaggagtatttgccgagggccgagtagactttgaccgattacgtgggggtttcgattaccgtgtttttcacctaaatttccgcgtacggtgtcaaagtccggtgtttttacgtaggtgtcagctgatcgccagggtatttaaacctgcgctctccagtcaagaggccactcttgagtgccagcgagaagagttttctcctccgcgccgcgagtcagatctacactttgaaagatgaggcacctgagagacctgcccgatgagaaaatcatcatcgcttccgggaacgagattctggaactggtggtaaatgccatgatgggcgacgaccctccggagccccccaccccatttgagacaccttcgctgcacgatttgtatgatctggaggtggatgtgcccgaggacgatcccaatgaggaggcggtaaatgatttttttagcgatgccgcgctgctagctgccgaggaggcttcgagctctagctcagacagcgactcttcactgcatacccctagacccggcagaggtgagaaaaagatccccgagcttaaaggggaagagatggacttgcgctgctatgaggaatgcttgcccccgagcgatgatgaggacgagcaggcgatccagaacgcagcgagccagggagtgcaagccgccagcgagagctttgcgctggactgcccgcctctgcccggacacggctgtaagtcttgtgaatttcatcgcatgaatactggagataaagctgtgttgtgtgcactttgctatatgagagcttacaaccattgtgtttacagtaagtgtgattaagttgaactttagagggaggcagagagcagggtgactgggcgatgactggtttatttatgtatatatgttctttatataggtcccgtctctgacgcagatgatgagacccccactacaaagtccacttcgtcacccccagaaattggcacatctccacctgagaatattgttagaccagttcctgttagagccactgggaggagagcagctgtggaatgtttggatgacttgctacagggtggggttgaacctttggacttgtgtacccggaaacgccccaggcactaagtgccacacatgtgtgtttacttgaggtgatgtcagtatttatagggtgtggagtgcaataaaaaatgtgttgactttaagtgcgtggtttatgactcaggggtggggactgtgagtatataagcaggtgcagacctgtgtggttagctcagagcggcatggagatttggacggtcttggaagactttcacaagactagacagctgctagagaacgcctcgaacggagtctcttacctgtggagattctgcttcggtggcgacctagctaggctagtctacagggccaaacaggattatagtgaacaatttgaggttattttgagagagtgttctggtctttttgacgctcttaacttgggccatcagtctcactttaaccagaggatttcgagagcccttgattttactactcctggcagaaccactgcagcagtagccttttttgcttttattcttgacaaatggagtcaagaaacccatttcagcagggattaccagctggatttcttagcagtagctttgtggagaacatggaagtgccagcgcctgaatgcaatctccggctacttgccggtacagccgctagacactctgaggatcctgaatctccaggagagtcccagggcacgccaacgtcgccagcagcagcagcaggaggaggatcaagaagagaacccgagagccggcctggaccctccggcggaggaggaggagtagctgacctgtttcctgaactgcgccgggtgctgactaggtcttcgagtggtcgggagagggggattaagcgggagaggcatgatgagactaatcacagaactgaactgactgtgggtctgatgagtcgcaagcgcccagaaacagtgtggtggcatgaggtgcagtcgactggcacagatgaggtgtcggtgatgcatgagaggttttctctagaacaagtcaagacttgttggttagagcctgaggatgattgggaggtagccatcaggaattatgccaagctggctctgaggccagacaagaagtacaagattactaagctgataaatatcagaaatgcctgctacatctcagggaatggggctgaagtggagatctgtctccaggaaagggtggctttcagatgctgcatgatgaatatgtacccgggagtggtgggcatggatggggttacctttatgaacatgaggttcaggggagatgggtataatggcacggtctttatggccaataccaagctgacagtccatggctgctccttctttgggtttaataacacctgcatcgaggcctggggtcaggtcggtgtgaggggctgcagtttttcagccaactggatgggggtcgtgggcaggaccaagagtatgctgtccgtgaagaaatgcttgtttgagaggtgccacctgggggtgatgagcgagggcgaagccagaatccgccactgcgcctctaccgagacgggctgctttgtgctgtgcaagggcaatgctaagatcaagcataatatgatctgtggagcctcggacgagcgcggctaccagatgctgacctgcgccggcgggaacagccatatgctggccaccgtacatgtggcttcccatgctcgcaagccctggcccgagttcgagcacaatgtcatgaccaggtgcaatatgcatctggggtcccgccgaggcatgttcatgccctaccagtgcaacctgaattatgtgaaggtgctgctggagcccgatgccatgtccagagtgagcctgacgggggtgtttgacatgaatgtggaggtgtggaagattctgagatatgatgaatccaagaccaggtgccgagcctgcgagtgcggagggaagcatgccaggttccagcccgtgtgtgtggatgtgacggaggacctgcgacccgatcatttggtgttgccctgcaccgggacggagttcggttccagcggggaagaatctgactagagtgagtagtgttctggggcgggggaggacctgcatgagggccagaataactgaaatctgtgcttttctgtgtgttgcagcagcatgagcggaagcggctcctttgagggaggggtattcagcccttatctgacggggcgtctcccctcctgggcgggagtgcgtcagaatgtgatgggatccacggtggacggccggcccgtgcagcccgcgaactcttcaaccctgacctatgcaaccctgagctcttcgtcgttggacgcagctgccgccgcagctgctgcatctgccgccagcgccgtgcgcggaatggccatgggcgccggctactacggcactctggtggccaactcgagttccaccaataatcccgccagcctgaacgaggagaagctgttgctgctgatggcccagctcgaggccttgacccagcgcctgggcgagctgacccagcaggtggctcagctgcaggagcagacgcgggccgcggttgccacggtgaaatccaaataaaaaatgaatcaataaataaacggagacggttgttgattttaacacagagtctgaatctttatttgatttttcgcgcgcggtaggccctggaccaccggtctcgatcattgagcacccggtggatcttttccaggacccggtagaggtgggcttggatgttgaggtacatgggcatgagcccgtcccgggggtggaggtagctccattgcagggcctcgtgctcgggggtggtgttgtaaatcacccagtcatagcaggggcgcagggcatggtgttgcacaatatctttgaggaggagactgatggccacgggcagccctttggtgtaggtgtttacaaatctgttgagctgggagggatgcatgcggggggagatgaggtgcatcttggcctggatcttgagattggcgatgttaccgcccagatcccgcctggggttcatgttgtgcaggaccaccagcacggtgtatccggtgcacttggggaatttatcatgcaacttggaagggaaggcgtgaaagaatttggcgacgcctttgtgcccgcccaggttttccatgcactcatccatgatgatggcgatgggcccgtgggcggcggcctgggcaaagacgtttcgggggtcggacacatcatagttgtggtcctgggtgaggtcatcataggccattttaatgaatttggggcggagggtgccggactgggggacaaaggtaccctcgatcccgggggcgtagttcccctcacagatctgcatctcccaggctttgagctcggagggggggatcatgtccacctgcggggcgataaagaacacggtttccggggcgggggagatgagctgggccgaaagcaagttccggagcagctgggacttgccgcagccggtggggccgtagatgaccccgatgaccggctgcaggtggtagttgagggagagacagctgccgtcctcccggaggaggggggccacctcgttcatcatctcgcgcacgtgcatgttctcgcgcaccagttccgccaggaggcgctctccccccagggataggagctcctggagcgaggcgaagtttttcagcggcttgagtccgtcggccatgggcattttggagagggtttgttgcaagagttccaggcggtcccagagctcggtgatgtgctctacggcatctcgatccagcagacctcctcgtttcgcgggttgggacggctgcgggagtagggcaccagacgatgggcgtccagcgcagccagggtccggtccttccagggtcgcagcgtccgcgtcagggtggtctccgtcacggtgaaggggtgcgcgccgggctgggcgcttgcgagggtgcgcttcaggctcatccggctggtcgaaaaccgctcccgatcggcgccctgcgcgtcggccaggtagcaattgaccatgagttcgtagttgagcgcctcggccgcgtggcctttggcgcggagcttacctttggaagtctgcccgcaggcgggacagaggagggacttgagggcgtagagcttgggggcgaggaagacggactcgggggcgtaggcgtccgcgccgcagtgggcgcagacggtctcgcactccacgagccaggtgaggtcgggctggtcggggtcaaaaaccagtttcccgccgttctttttgatgcgtttcttacctttggtctccatgagctcgtgtccccgctgggtgacaaagaggctgtccgtgtccccgtagaccgactttatgggccggtcctcgagcggtgtgccgcggtcctcctcgtagaggaaccccgcccactccgagacgaaagcccgggtccaggccagcacgaaggaggccacgtgggacgggtagcggtcgttgtccaccagcgggtccaccttttccagggtatgcaaacacatgtccccctcgtccacatccaggaaggtgattggcttgtaagtgtaggccacgtgaccgggggtcccggccgggggggtataaaagggtgcgggtccctgctcgtcctcactgtcttccggatcgctgtccaggagcgccagctgttggggtaggtattccctctcgaaggcgggcatgacctcggcactcaggttgtcagtttctagaaacgaggaggatttgatattgacggtgccggcggagatgcctttcaagagcccctcgtccatctggtcagaaaagacgatctttttgttgtcgagcttggtggcgaaggagccgtagagggcgttggagaggagcttggcgatggagcgcatggtctggtttttttccttgtcggcgcgctccttggcggcgatgttgagctgcacgtactcgcgcgccacgcacttccattcggggaagacggtggtcagctcgtcgggcacgattctgacctgccagccccgattatgcagggtgatgaggtccacactggtggccacctcgccgcgcaggggctcattagtccagcagaggcgtccgcccttgcgcgagcagaaggggggcagggggtccagcatgacctcgtcgggggggtcggcatcgatggtgaagatgccgggcaggaggtcggggtcaaagtagctgatggaagtggccagatcgtccagggcagcttgccattcgcgcacggccagcgcgcgctcgtagggactgaggggcgtgccccagggcatgggatgggtaagcgcggaggcgtacatgccgcagatgtcgtagacgtagaggggctcctcgaggatgccgatgtaggtggggtagcagcgccccccgcggatgctggcgcgcacgtagtcatacagctcgtgcgagggggcgaggagccccgggcccaggttggtgcgactgggcttttcggcgcggtagacgatctggcggaaaatggcatgcgagttggaggagatggtgggcctttggaagatgttgaagtgggcgtggggcagtccgaccgagtcgcggatgaagtgggcgtaggagtcttgcagcttggcgacgagctcggcggtgactaggacgtccagagcgcagtagtcgagggtctcctggatgatgtcatacttgagctgtcccttttgtttccacagctcgcggttgagaaggaactcttcgcggtccttccagtactcttcgagggggaacccgtcctgatctgcacggtaagagcctagcatgtagaactggttgacggccttgtaggcgcagcagcccttctccacggggagggcgtaggcctgggcggccttgcgcagggaggtgtgcgtgagggcgaaagtgtccctgaccatgaccttgaggaactggtgcttgaagtcgatatcgtcgcagcccccctgctcccagagctggaagtccgtgcgcttcttgtaggcggggttgggcaaagcgaaagtaacatcgttgaagaggatcttgcccgcgcggggcataaagttgcgagtgatgcggaaaggttggggcacctcggcccggttgttgatgacctgggcggcgagcacgatctcgtcgaagccgttgatgttgtggcccacgatgtagagttccacgaatcgcggacggcccttgacgtggggcagtttcttgagctcctcgtaggtgagctcgtcggggtcgctgagcccgtgctgctcgagcgcccagtcggcgagatgggggttggcgcggaggaaggaagtccagagatccacggccagggcggtttgcagacggtcccggtactgacggaactgctgcccgacggccattttttcgggggtgacgcagtagaaggtgcgggggtccccgtgccagcgatcccatttgagctggagggcgagatcgagggcgagctcgacgagccggtcgtccccggagagtttcatgaccagcatgaaggggacgagctgcttgccgaaggaccccatccaggtgtaggtttccacatcgtaggtgaggaagagcctttcggtgcgaggatgcgagccgatggggaagaactggatctcctgccaccaattggaggaatggctgttgatgtgatggaagtagaaatgccgacggcgcgccgaacactcgtgcttgtgtttatacaagcggccacagtgctcgcaacgctgcacgggatgcacgtgctgcacgagctgtacctgagttcctttgacgaggaatttcagtgggaagtggagtcgtggcgcctgcatctcgtgctgtactacgtcgtggtggtcggcctggccctcttctgcctcgatggtggtcatgctgacgagcccgcgcgggaggcaggtccagacctcggcgcgagcgggtcggagagcgaggacgagggcgcgcaggccggagctgtccagggtcctgagacgctgcggagtcaggtcagtgggcagcggcggcgcgcggttgacttgcaggagtttttccagggcgcgcgggaggtccagatggtacttgatctccaccgcgccattggtggcgacgtcgatggcttgcagggtcccgtgcccctggggtgtgaccaccgtcccccgtttcttcttgggcggctggggcgacgggggcggtgcctcttccatggttagaagcggcggcgaggacgcgcgccgggcggcaggggcggctcggggcccggaggcaggggcggcaggggcacgtcggcgccgcgcgcgggtaggttctggtactgcgcccggagaagactggcgtgagcgacgacgcgacggttgacgtcctggatctgacgcctctgggtgaaggccacgggacccgtgagtttgaacctgaaagagagttcgacagaatcaatctcggtatcgttgacggcggcctgccgcaggatctcttgcacgtcgcccgagttgtcctggtaggcgatctcggtcatgaactgctcgatctcctcctcttgaaggtctccgcggccggcgcgctccacggtggccgcgaggtcgttggagatgcggcccatgagctgcgagaaggcgttcatgcccgcctcgttccagacgcggctgtagaccacgacgccctcgggatcgcgggcgcgcatgaccacctgggcgaggttgagctccacgtggcgcgtgaagaccgcgtagttgcagaggcgctggtagaggtagttgagcgtggtggcgatgtgctcggtgacgaagaaatacatgatccagcggcggagcggcatctcgctgacgtcgcccagcgcctccaaacgttccatggcctcgtaaaagtccacggcgaagttgaaaaactgggagttgcgcgccgagacggtcaactcctcctccagaagacggatgagctcggcgatggtggcgcgcacctcgcgctcgaaggcccccgggagttcctccacttcctcttcttcctcctccactaacatctcttctacttcctcctcaggcggcagtggtggcgggggagggggcctgcgtcgccggcggcgcacgggcagacggtcgatgaagcgctcgatggtctcgccgcgccggcgtcgcatggtctcggtgacggcgcgcccgtcctcgcggggccgcagcgtgaagacgccgccgcgcatctccaggtggccgggggggtccccgttgggcagggagagggcgctgacgatgcatcttatcaattgccccgtagggactccgcgcaaggacctgagcgtctcgagatccacgggatctgaaaaccgctgaacgaaggcttcgagccagtcgcagtcgcaaggtaggctgagcacggtttcttctggcgggtcatgttggttgggagcggggcgggcgatgctgctggtgatgaagttgaaataggcggttctgagacggcggatggtggcgaggagcaccaggtctttgggcccggcttgctggatgcgcagacggtcggccatgccccaggcgtggtcctgacacctggccaggtccttgtagtagtcctgcatgagccgctccacgggcacctcctcctcgcccgcgcggccgtgcatgcgcgtgagcccgaagccgcgctggggctggacgagcgccaggtcggcgacgacgcgctcggcgaggatggcttgctggatctgggtgagggtggtctggaagtcatcaaagtcgacgaagcggtggtaggctccggtgttgatggtgtaggagcagttggccatgacggaccagttgacggtctggtggcccggacgcacgagctcgtggtacttgaggcgcgagtaggcgcgcgtgtcgaagatgtagtcgttgcaggtgcgcaccaggtactggtagccgatgaggaagtgcggcggcggctggcggtagagcggccatcgctcggtggcgggggcgccgggcgcgaggtcctcgagcatggtgcggtggtagccgtagatgtacctggacatccaggtgatgccggcggcggtggtggaggcgcgcgggaactcgcggacgcggttccagatgttgcgcagcggcaggaagtagttcatggtgggcacggtctggcccgtgaggcgcgcgcagtcgtggatgctctatacgggcaaaaacgaaagcggtcagcggctcgactccgtggcctggaggctaagcgaacgggttgggctgcgcgtgtaccccggttcgaatctcgaatcaggctggagccgcagctaacgtggtattggcactcccgtctcgacccaagcctgcaccaaccctccaggatacggaggcgggtcgttttgcaacttttttttggaggccggatgagactagtaagcgcggaaagcggccgaccgcgatggctcgctgccgtagtctggagaagaatcgccagggttgcgttgcggtgtgccccggttcgaggccggccggattccgcggctaacgagggcgtggctgccccgtcgtttccaagaccccatagccagccgacttctccagttacggagcgagcccctcttttgttttgtttgtttttgccagatgcatcccgtactgcggcagatgcgcccccaccaccctccaccgcaacaacagccccctccacagccggcgcttctgcccccgccccagcagcaacttccagccacgaccgccgcggccgccgtgagcggggctggacagagttatgatcaccagctggccttggaagagggcgaggggctggcgcgcctgggggcgtcgtcgccggagcggcacccgcgcgtgcagatgaaaagggacgctcgcgaggcctacgtgcccaagcagaacctgttcagagacaggagcggcgaggagcccgaggagatgcgcgcggcccggttccacgcggggcgggagctgcggcgcggcctggaccgaaagagggtgctgagggacgaggatttcgaggcggacgagctgacggggatcagccccgcgcgcgcgcacgtggccgcggccaacctggtcacggcgtacgagcagaccgtgaaggaggagagcaacttccaaaaatccttcaacaaccacgtgcgcaccctgatcgcgcgcgaggaggtgaccctgggcctgatgcacctgtgggacctgctggaggccatcgtgcagaaccccaccagcaagccgctgacggcgcagctgttcctggtggtgcagcatagtcgggacaacgaagcgttcagggaggcgctgctgaatatcaccgagcccgagggccgctggctcctggacctggtgaacattctgcagagcatcgtggtgcaggagcgcgggctgccgctgtccgagaagctggcggccatcaacttctcggtgctgagtttgggcaagtactacgctaggaagatctacaagaccccgtacgtgcccatagacaaggaggtgaagatcgacgggttttacatgcgcatgaccctgaaagtgctgaccctgagcgacgatctgggggtgtaccgcaacgacaggatgcaccgtgcggtgagcgccagcaggcggcgcgagctgagcgaccaggagctgatgcatagtctgcagcgggccctgaccggggccgggaccgagggggagagctactttgacatgggcgcggacctgcactggcagcccagccgccgggccttggaggcggcggcaggaccctacgtagaagaggtggacgatgaggtggacgaggagggcgagtacctggaagactgatggcgcgaccgtatttttgctagatgcaacaacaacagccacctcctgatcccgcgatgcgggcggcgctgcagagccagccgtccggcattaactcctcggacgattggacccaggccatgcaacgcatcatggcgctgacgacccgcaaccccgaagcctttagacagcagccccaggccaaccggctctcggccatcctggaggccgtggtgccctcgcgctccaaccccacgcacgagaaggtcctggccatcgtgaacgcgctggtggagaacaaggccatccgcggcgacgaggccggcctggtgtacaacgcgctgctggagcgcgtggcccgctacaacagcaccaacgtgcagaccaacctggaccgcatggtgaccgacgtgcgcgaggccgtggcccagcgcgagcggttccaccgcgagtccaacctgggatccatggtggcgctgaacgccttcctcagcacccagcccgccaacgtgccccggggccaggaggactacaccaacttcatcagcgccctgcgcctgatggtgaccgaggtgccccagagcgaggtgtaccagtccgggccggactacttcttccagaccagtcgccagggcttgcagaccgtgaacctgagccaggctttcaagaacttgcagggcctgtggggcgtgcaggccccggtcggggaccgcgcgacggtgtcgagcctgctgacgccgaactcgcgcctgctgctgctgctggtggcccccttcacggacagcggcagcatcaaccgcaactcgtacctgggctacctgattaacctgtaccgcgaggccatcggccaggcgcacgtggacgagcagacctaccaggagatcacccacgtgagccgcgccctgggccaggacgacccgggcaacctggaagccaccctgaactttttgctgaccaaccggtcgcagaagatcccgccccagtacgcgctcagcaccgaggaggagcgcatcctgcgttacgtgcagcagagcgtgggcctgttcctgatgcaggagggggccacccccagcgccgcgctcgacatgaccgcgcgcaacatggagcccagcatgtacgccagcaaccgcccgttcatcaataaactgatggactacttgcatcgggcggccgccatgaactctgactatttcaccaacgccatcctgaatccccactggctcccgccgccggggttctacacgggcgagtacgacatgcccgaccccaatgacgggttcctgtgggacgatgtggacagcagcgtgttctccccccgaccgggtgctaacgagcgccccttgtggaagaaggaaggcagcgaccgacgcccgtcctcggcgctgtccggccgcgagggtgctgccgcggcggtgcccgaggccgccagtcctttcccgagcttgcccttctcgctgaacagtatccgcagcagcgagctgggcaggatcacgcgcccgcgcttgctgggcgaagaggagtacttgaatgactcgctgttgagacccgagcgggagaagaacttccccaataacgggatagaaagcctggtggacaagatgagccgctggaagacgtatgcgcaggagcacagggacgatccccgggcgtcgcagggggccacgagccggggcagcgccgcccgtaaacgccggtggcacgacaggcagcggggacagatgtgggacgatgaggactccgccgacgacagcagcgtgttggacttgggtgggagtggtaacccgttcgctcacctgcgcccccgtatcgggcgcatgatgtaagagaaaccgaaaataaatgatactcaccaaggccatggcgaccagcgtgcgttcgtttcttctctgttgttgttgtatctagtatgatgaggcgtgcgtacccggagggtcctcctccctcgtacgagagcgtgatgcagcaggcgatggcggcggcggcgatgcagcccccgctggaggctccttacgtgcccccgcggtacctggcgcctacggaggggcggaacagcattcgttactcggagctggcacccttgtacgataccacccggttgtacctggtggacaacaagtcggcggacatcgcctcgctgaactaccagaacgaccacagcaacttcctgaccaccgtggtgcagaacaatgacttcacccccacggaggccagcacccagaccatcaactttgacgagcgctcgcggtggggcggccagctgaaaaccatcatgcacaccaacatgcccaacgtgaacgagttcatgtacagcaacaagttcaaggcgcgggtgatggtctcccgcaagacccccaatggggtgacagtgacagaggattatgatggtagtcaggatgagctgaagtatgaatgggtggaatttgagctgcccgaaggcaacttctcggtgaccatgaccatcgacctgatgaacaacgccatcatcgacaattacttggcggtggggcggcagaacggggtgctggagagcgacatcggcgtgaagttcgacactaggaacttcaggctgggctgggaccccgtgaccgagctggtcatgcccggggtgtacaccaacgaggctttccatcccgatattgtcttgctgcccggctgcggggtggacttcaccgagagccgcctcagcaacctgctgggcattcgcaagaggcagcccttccaggaaggcttccagatcatgtacgaggatctggaggggggcaacatccccgcgctcctggatgtcgacgcctatgagaaaagcaaggaggatgcagcagctgaagcaactgcagccgtagctaccgcctctaccgaggtcaggggcgataattttgcaagcgccgcagcagtggcagcggccgaggcggctgaaaccgaaagtaagatagtcattcagccggtggagaaggatagcaagaacaggagctacaacgtactaccggacaagataaacaccgcctaccgcagctggtacctagcctacaactatggcgaccccgagaagggcgtgcgctcctggacgctgctcaccacctcggacgtcacctgcggcgtggagcaagtctactggtcgctgcccgacatgatgcaagacccggtcaccttccgctccacgcgtcaagttagcaactacccggtggtgggcgccgagctcctgcccgtctactccaagagcttcttcaacgagcaggccgtctactcgcagcagctgcgcgccttcacctcgcttacgcacgtcttcaaccgcttccccgagaaccagatcctcgtccgcccgcccgcgcccaccattaccaccgtcagtgaaaacgttcctgctctcacagatcacgggaccctgccgctgcgcagcagtatccggggagtccagcgcgtgaccgttactgacgccagacgccgcacctgcccctacgtctacaaggccctgggcatagtcgcgccgcgcgtcctctcgagccgcaccttctaaatgtccattctcatctcgcccagtaataacaccggttggggcctgcgcgcgcccagcaagatgtacggaggcgctcgccaacgctccacgcaacaccccgtgcgcgtgcgcgggcacttccgcgctccctggggcgccctcaagggccgcgtgcggtcgcgcaccaccgtcgacgacgtgatcgaccaggtggtggccgacgcgcgcaactacacccccgccgccgcgcccgtctccaccgtggacgccgtcatcgacagcgtggtggccgacgcgcgccggtacgcccgcgccaagagccggcggcggcgcatcgcccggcggcaccggagcacccccgccatgcgcgcggcgcgagccttgctgcgcagggccaggcgcacgggacgcagggccatgctcagggcggccagacgcgcggcttcaggcgccagcgccggcaggacccggagacgcgcggccacggcggcggcagcggccatcgccagcatgtcccgcccgcggcgagggaacgtgtactgggtgcgcgacgccgccaccggtgtgcgcgtgcccgtgcgcacccgcccccctcgcacttgaagatgttcacttcgcgatgttgatgtgtcccagcggcgaggaggatgtccaagcgcaaattcaaggaagagatgctccaggtcatcgcgcctgagatctacggccctgcggtggtgaaggaggaaagaaagccccgcaaaatcaagcgggtcaaaaaggacaaaaaggaagaagaaagtgatgtggacggattggtggagtttgtgcgcgagttcgccccccggcggcgcgtgcagtggcgcgggcggaaggtgcaaccggtgctgagacccggcaccaccgtggtcttcacgcccggcgagcgctccggcaccgcttccaagcgctcctacgacgaggtgtacggggatgatgatattctggagcaggcggccgagcgcctgggcgagtttgcttacggcaagcgcagccgttccgcaccgaaggaagaggcggtgtccatcccgctggaccacggcaaccccacgccgagcctcaagcccgtgaccttgcagcaggtgctgccgaccgcggcgccgcgccgggggttcaagcgcgagggcgaggatctgtaccccaccatgcagctgatggtgcccaagcgccagaagctggaagacgtgctggagaccatgaaggtggacccggacgtgcagcccgaggtcaaggtgcggcccatcaagcaggtggccccgggcctgggcgtgcagaccgtggacatcaagattcccacggagcccatggaaacgcagaccgagcccatgatcaagcccagcaccagcaccatggaggtgcagacggatccctggatgccatcggctcctagtcgaagaccccggcgcaagtacggcgcggccagcctgctgatgcccaactacgcgctgcatccttccatcatccccacgccgggctaccgcggcacgcgcttctaccgcggtcataccagcagccgccgccgcaagaccaccactcgccgccgccgtcgccgcaccgccgctgcaaccacccctgccgccctggtgcggagagtgtaccgccgcggccgcgcacctctgaccctgccgcgcgcgcgctaccacccgagcatcgccatttaaactttcgcctgctttgcagatcaatggccctcacatgccgccttcgcgttcccattacgggctaccgaggaagaaaaccgcgccgtagaaggctggcggggaacgggatgcgtcgccaccaccaccggcggcggcgcgccatcagcaagcggttggggggaggcttcctgcccgcgctgatccccatcatcgccgcggcgatcggggcgatccccggcattgcttccgtggcggtgcaggcctctcagcgccactgagacacacttggaaacatcttgtaataaaccaatggactctgacgctcctggtcctgtgatgtgttttcgtagacagatggaagacatcaatttttcgtccctggctccgcgacacggcacgcggccgttcatgggcacctggagcgacatcggcaccagccaactgaacgggggcgccttcaattggagcagtctctggagcgggcttaagaatttcgggtccacgcttaaaacctatggcagcaaggcgtggaacagcaccacagggcaggcgctgagggataagctgaaagagcagaacttccagcagaaggtggtcgatgggctcgcctcgggcatcaacggggtggtggacctggccaaccaggccgtgcagcggcagatcaacagccgcctggacccggtgccgcccgccggctccgtggagatgccgcaggtggaggaggagctgcctcccctggacaagcggggcgagaagcgaccccgccccgatgcggaggagacgctgctgacgcacacggacgagccgcccccgtacgaggaggcggtgaaactgggtctgcccaccacgcggcccatcgcgcccctggccaccggggtgctgaaacccgaaaagcccgcgaccctggacttgcctcctccccagccttcccgcccctctacagtggctaagcccctgccgccggtggccgtggcccgcgcgcgacccgggggcaccgcccgccctcatgcgaactggcagagcactctgaacagcatcgtgggtctgggagtgcagagtgtgaagcgccgccgctgctattaaacctaccgtagcgcttaacttgcttgtctgtgtgtgtatgtattatgtcgccgccgccgctgtccaccagaaggaggagtgaagaggcgcgtcgccgagttgcaagatggccaccccatcgatgctgccccagtgggcgtacatgcacatcgccggacaggacgcttcggagtacctgagtccgggtctggtgcagtttgcccgcgccacagacacctacttcagtctggggaacaagtttaggaaccccacggtggcgcccacgcacgatgtgaccaccgaccgcagccagcggctgacgctgcgcttcgtgcccgtggaccgcgaggacaacacctactcgtacaaagtgcgctacacgctggccgtgggcgacaaccgcgtgctggacatggccagcacctactttgacatccgcggcgtgctggatcggggccctagcttcaaaccctactccggcaccgcctacaacagtctggcccccaagggagcacccaacacttgtcagtggacatataaagccgatggtgaaactgccacagaaaaaacctatacatatggaaatgcacccgtgcagggcattaacatcacaaaagatggtattcaacttggaactgacaccgatgatcagccaatctacgcagataaaacctatcagcctgaacctcaagtgggtgatgctgaatggcatgacatcactggtactgatgaaaagtatggaggcagagctcttaagcctgataccaaaatgaagccttgttatggttcttttgccaagcctactaataaagaaggaggtcaggcaaatgtgaaaacaggaacaggcactactaaagaatatgacatagacatggctttctttgacaacagaagtgcggctgctgctggcctagctccagaaattgttttgtatactgaaaatgtggatttggaaactccagatacccatattgtatacaaagcaggcacagatgacagcagctcttctattaatttgggtcagcaagccatgcccaacagacctaactacattggtttcagagacaactttatcgggctcatgtactacaacagcactggcaatatgggggtgctggccggtcaggcttctcagctgaatgctgtggttgacttgcaagacagaaacaccgagctgtcctaccagctcttgcttgactctctgggtgacagaacccggtatttcagtatgtggaatcaggcggtggacagctatgatcctgatgtgcgcattattgaaaatcatggtgtggaggatgaacttcccaactattgtttccctctggatgctgttggcagaacagatacttatcagggaattaaggctaatggaactgatcaaaccacatggaccaaagatgacagtgtcaatgatgctaatgagataggcaagggtaatccattcgccatggaaatcaacatccaagccaacctgtggaggaacttcctctacgccaacgtggccctgtacctgcccgactcttacaagtacacgccggccaatgttaccctgcccaccaacaccaacacctacgattacatgaacggccgggtggtggcgccctcgctggtggactcctacatcaacatcggggcgcgctggtcgctggatcccatggacaacgtgaaccccttcaaccaccaccgcaatgcggggctgcgctaccgctccatgctcctgggcaacgggcgctacgtgcccttccacatccaggtgccccagaaatttttcgccatcaagagcctcctgctcctgcccgggtcctacacctacgagtggaacttccgcaaggacgtcaacatgatcctgcagagctccctcggcaacgacctgcgcacggacggggcctccatctccttcaccagcatcaacctctacgccaccttcttccccatggcgcacaacacggcctccacgctcgaggccatgctgcgcaacgacaccaacgaccagtccttcaacgactacctctcggcggccaacatgctctaccccatcccggccaacgccaccaacgtgcccatctccatcccctcgcgcaactgggccgccttccgcggctggtccttcacgcgtctcaagaccaaggagacgccctcgctgggctccgggttcgacccctacttcgtctactcgggctccatcccctacctcgacggcaccttctacctcaaccacaccttcaagaaggtctccatcaccttcgactcctccgtcagctggcccggcaacgaccggctcctgacgcccaacgagttcgaaatcaagcgcaccgtcgacggcgagggctacaacgtggcccagtgcaacatgaccaaggactggttcctggtccagatgctggcccactacaacatcggctaccagggcttctacgtgcccgagggctacaaggaccgcatgtactccttcttccgcaacttccagcccatgagccgccaggtggtggacgaggtcaactacaaggactaccaggccgtcaccctggcctaccagcacaacaactcgggcttcgtcggctacctcgcgcccaccatgcgccagggccagccctaccccgccaactacccctacccgctcatcggcaagagcgccgtcaccagcgtcacccagaaaaagttcctctgcgacagggtcatgtggcgcatccccttctccagcaacttcatgtccatgggcgcgctcaccgacctcggccagaacatgctctatgccaactccgcccacgcgctagacatgaatttcgaagtcgaccccatggatgagtccacccttctctatgttgtcttcgaagtcttcgacgtcgtccgagtgcaccagccccaccgcggcgtcatcgaggccgtctacctgcgcacccccttctcggccggtaacgccaccacctaagctcttgcttcttgcaagccatggccgcgggctccggcgagcaggagctcagggccatcatccgcgacctgggctgcgggccctacttcctgggcaccttcgataagcgcttcccgggattcatggccccgcacaagctggcctgcgccatcgtcaacacggccggccgcgagaccgggggcgagcactggctggccttcgcctggaacccgcgctcgaacacctgctacctcttcgaccccttcgggttctcggacgagcgcctcaagcagatctaccagttcgagtacgagggcctgctgcgccgcagcgccctggccaccgaggaccgctgcgtcaccctggaaaagtccacccagaccgtgcagggtccgcgctcggccgcctgcgggctcttctgctgcatgttcctgcacgccttcgtgcactggcccgaccgccccatggacaagaaccccaccatgaacttgctgacgggggtgcccaacggcatgctccagtcgccccaggtggaacccaccctgcgccgcaaccaggaggcgctctaccgcttcctcaactcccactccgcctactttcgctcccaccgcgcgcgcatcgagaaggccaccgccttcgaccgcatgaatcaagacatgtaaaccgtgtgtgtatgttaaatgtctttaataaacagcactttcatgttacacatgcatctgagatgatttatttagaaatcgaaagggttctgccgggtctcggcatggcccgcgggcagggacacgttgcggaactggtacttggccagccacttgaactcggggatcagcagtttgggcagcggggtgtcggggaaggagtcggtccacagcttccgcgtcagttgcagggcgcccagcaggtcgggcgcggagatcttgaaatcgcagttgggacccgcgttctgcgcgcgggagttgcggtacacggggttgcagcactggaacaccatcagggccgggtgcttcacgctcgccagcaccgtcgcgtcggtgatgctctccacgtcgaggtcctcggcgttggccatcccgaagggggtcatcttgcaggtctgccttcccatggtgggcacgcacccgggcttgtggttgcaatcgcagtgcagggggatcagcatcatctgggcctggtcggcgttcatccccgggtacatggccttcatgaaagcctccaattgcctgaacgcctgctgggccttggctccctcggtgaagaagaccccgcaggacttgctagagaactggttggtggcgcacccggcgtcgtgcacgcagcagcgcgcgtcgttgttggccagctgcaccacgctgcgcccccagcggttctgggtgatcttggcccggtcggggttctccttcagcgcgcgctgcccgttctcgctcgccacatccatctcgatcatgtgctccttctggatcatggtggtcccgtgcaggcaccgcagcttgccctcggcctcggtgcacccgtgcagccacagcgcgcacccggtgcactcccagttcttgtgggcgatctgggaatgcgcgtgcacgaagccctgcaggaagcggcccatcatggtggtcagggtcttgttgctagtgaaggtcagcggaatgccgcggtgctcctcgttgatgtacaggtggcagatgcggcggtacacctcgccctgctcgggcatcagctggaagttggctttcaggtcggtctccacgcggtagcggtccatcagcatagtcatgatttccatacccttctcccaggccgagacgatgggcaggctcatagggttcttcaccatcatcttagcgctagcagccgcggccagggggtcgctctcgtccagggtctcaaagctccgcttgccgtccttctcggtgatccgcaccggggggtagctgaagcccacggccgccagctcctcctcggcctgtctttcgtcctcgctgtcctggctgacgtcctgcaggaccacatgcttggtcttgcggggtttcttcttgggcggcagcggcggcggagatgttggagatggcgagggggagcgcgagttctcgctcaccactactatctcttcctcttcttggtccgaggccacgcggcggtaggtatgtctcttcgggggcagaggcggaggcgacgggctctcgccgccgcgacttggcggatggctggcagagccccttccgcgttcgggggtgcgctcccggcggcgctctgactgacttcctccgcggccggccattgtgttctcctagggaggaacaacaagcatggagactcagccatcgccaacctcgccatctgcccccaccgccgacgagaagcagcagcagcagaatgaaagcttaaccgccccgccgcccagccccgccacctccgacgcggccgtcccagacatgcaagagatggaggaatccatcgagattgacctgggctatgtgacgcccgcggagcacgaggaggagctggcagtgcgcttttcacaagaagagatacaccaagaacagccagagcaggaagcagagaatgagcagagtcaggctgggctcgagcatgacggcgactacctccacctgagcgggggggaggacgcgctcatcaagcatctggcccggcaggccaccatcgtcaaggatgcgctgctcgaccgcaccgaggtgcccctcagcgtggaggagctcagccgcgcctacgagttgaacctcttctcgccgcgcgtgccccccaagcgccagcccaatggcacctgcgagcccaacccgcgcctcaacttctacccggtcttcgcggtgcccgaggccctggccacctaccacatctttttcaagaaccaaaagatccccgtctcctgccgcgccaaccgcacccgcgccgacgcccttttcaacctgggtcccggcgcccgcctacctgatatcgcctccttggaagaggttcccaagatcttcgagggtctgggcagcgacgagactcgggccgcgaacgctctgcaaggagaaggaggagagcatgagcaccacagcgccctggtcgagttggaaggcgacaacgcgcggctggcggtgctcaaacgcacggtcgagctgacccatttcgcctacccggctctgaacctgccccccaaagtcatgagcgcggtcatggaccaggtgctcatcaagcgcgcgtcgcccatctccgaggacgagggcatgcaagactccgaggagggcaagcccgtggtcagcgacgagcagctggcccggtggctgggtcctaatgctagtccccagagtttggaagagcggcgcaaactcatgatggccgtggtcctggtgaccgtggagctggagtgcctgcgccgcttcttcgccgacgcggagaccctgcgcaaggtcgaggagaacctgcactacctcttcaggcacgggttcgtgcgccaggcctgcaagatctccaacgtggagctgaccaacctggtctcctacatgggcatcttgcacgagaaccgcctggggcagaacgtgctgcacaccaccctgcgcggggaggcccggcgcgactacatccgcgactgcgtctacctctacctctgccacacctggcagacgggcatgggcgtgtggcagcagtgtctggaggagcagaacctgaaagagctctgcaagctcctgcagaagaacctcaagggtctgtggaccgggttcgacgagcgcaccaccgcctcggacctggccgacctcattttccccgagcgcctcaggctgacgctgcgcaacggcctgcccgactttatgagccaaagcatgttgcaaaactttcgctctttcatcctcgaacgctccggaatcctgcccgccacctgctccgcgctgccctcggacttcgtgccgctgaccttccgcgagtgccccccgccgctgtggagccactgctacctgctgcgcctggccaactacctggcctaccactcggacgtgatcgaggacgtcagcggcgagggcctgctcgagtgccactgccgctgcaacctctgcacgccgcaccgctccctggcctgcaacccccagctgctgagcgagacccagatcatcggcaccttcgagttgcaagggcccagcgaaggcgagggttcagccgccaaggggggtctgaaactcaccccggggctgtggacctcggcctacttgcgcaagttcgtgcccgaggactaccatcccttcgagatcaggttctacgaggaccaatcccatccgcccaaggccgagctgtcggcctgcgtcatcacccagggggcgatcctggcccaattgcaagccatccagaaatcccgccaagaattcttgctgaaaaagggccgcggggtctacctcgacccccagaccggtgaggagctcaaccccggcttcccccaggatgccccgaggaaacaagaagctgaaagtggagctgccgcccgtggaggatttggaggaagactgggagaacagcagtcaggcagaggaggaggagatggaggaagactgggacagcactcaggcagaggaggacagcctgcaagacagtctggaggaagacgaggaggaggcagaggaggaggtggaagaagcagccgccgccagaccgtcgtcctcggcgggggagaaagcaagcagcacggataccatctccgctccgggtcggggtcccgctcgaccacacagtagatgggacgagaccggacgattcccgaaccccaccacccagaccggtaagaaggagcggcagggatacaagtcctggcgggggcacaaaaacgccatcgtctcctgcttgcaggcctgcgggggcaacatctccttcacccggcgctacctgctcttccaccgcggggtgaactttccccgcaacatcttgcattactaccgtcacctccacagcccctactacttccaagaagaggcagcagcagcagaaaaagaccagcagaaaaccagcagctagaaaatccacagcggcggcagcaggtggactgaggatcgcggcgaacgagccggcgcaaacccgggagctgaggaaccggatctttcccaccctctatgccatcttccagcagagtcgggggcaggagcaggaactgaaagtcaagaaccgttctctgcgctcgctcacccgcagttgtctgtatcacaagagcgaagaccaacttcagcgcactctcgaggacgccgaggctctcttcaacaagtactgcgcgctcactcttaaagagtagcccgcgcccgcccagtcgcagaaaaaggcgggaattacgtcacctgtgcccttcgccctagccgcctccacccatcatcatgagcaaagagattcccacgccttacatgtggagctaccagccccagatgggcctggccgccggtgccgcccaggactactccacccgcatgaattggctcagcgccgggcccgcgatgatctcacgggtgaatgacatccgcgcccaccgaaaccagatactcctagaacagtcagcgctcaccgccacgccccgcaatcacctcaatccgcgtaattggcccgccgccctggtgtaccaggaaattccccagcccacgaccgtactacttccgcgagacgcccaggccgaagtccagctgactaactcaggtgtccagctggcgggcggcgccaccctgtgtcgtcaccgccccgctcagggtataaagcggctggtgatccggggcagaggcacacagctcaacgacgaggtggtgagctcttcgctgggtctgcgacctgacggagtcttccaactcgccggatcggggagatcttccttcacgcctcgtcaggccgtcctgactttggagagttcgtcctcgcagccccgctcgggtggcatcggcactctccagttcgtggaggagttcactccctcggtctacttcaaccccttctccggctcccccggccactacccggacgagttcatcccgaacttcgacgccatcagcgagtcggtggacggctacgattgaatgtcccatggtggcgcagctgacctagctcggcttcgacacctggaccactgccgccgcttccgctgcttcgctcgggatctcgccgagtttgcctactttgagctgcccgaggagcaccctcagggcccggcccacggagtgcggatcgtcgtcgaagggggcctcgactcccacctgcttcggatcttcagccagcgtccgatcctggtcgagcgcgagcaaggacagacccttctgactctgtactgcatctgcaaccaccccggcctgcatgaaagtctttgttgtctgctgtgtactgagtataataaaagctgagatcagcgactactccggacttccgtgtgttcctgaatccatcaaccagtctttgttcttcaccgggaacgagaccgagctccagctccagtgtaagccccacaagaagtacctcacctggctgttccagggctccccgatcgccgttgtcaaccactgcgacaacgacggagtcctgctgagcggccctgccaaccttactttttccacccgcagaagcaagctccagctcttccaacccttcctccccgggacctatcagtgcgtctcgggaccctgccatcacaccttccacctgatcccgaataccacagcgtcgctccccgctactaacaaccaaactaacctccaccaacgccaccgtcgcgacctttctgaatctaatactaccacccacaccggaggtgagctccgaggtcaaccaacctctgggatttactacggcccctgggaggtggttgggttaatagcgctaggcctagttgcgggtgggcttttggttctctgctacctatacctcccttgctgttcgtacttagtggtgctgtgttgctggtttaagaaatggggaagatcaccctagtgagctgcggtgcgctggtggcggtgttgctttcgattgtgggactgggcggtgcggctgtagtgaaggagaaggccgatccctgcttgcatttcaatcccaacaaatgccagctgagttttcagcccgatggcaatcggtgcgcggtactgatcaagtgcggatgggaatgcgagaacgtgagaatcgagtacaataacaagactcggaacaatactctcgcgtccgtgtggcagcccggggaccccgagtggtacaccgtctctgtccccggtgctgacggctccccgcgcaccgtgaataatactttcatttttgcgcacatgtgcgacacggtcatgtggatgagcaagcagtacgatatgtggccccccacgaaggagaacatcgtggtcttctccatcgcttacagcctgtgcacggcgctaatcaccgctatcgtgtgcctgagcattcacatgctcatcgctattcgccccagaaataatgccgaaaaagaaaaacagccataacgttttttttcacacctttttcagaccatggcctctgttaaatttttgcttttatttgccagtctcattgccgtcattcatggaatgagtaatgagaaaattactatttacactggcactaatcacacattgaaaggtccagaaaaagccacagaagtttcatggtattgttattttaatgaatcagatgtatctactgaactctgtggaaacaataacaaaaaaaatgagagcattactctcatcaagtttcaatgtggatctgacttaaccctaattaacatcactagagactatgtaggtatgtattatggaactacagcaggcatttcggacatggaattttatcaagtttctgtgtctgaacccaccacgcctagaatgaccacaaccacaaaaactacacctgttaccactatgcagctcactaccaataacatttttgccatgcgtcaaatggtcaacaatagcactcaacccaccccacccagtgaggaaattcccaaatccatgattggcattattgttgctgtagtggtgtgcatgttgatcatcgccttgtgcatggtgtactatgccttctgctacagaaagcacagactgaacgacaagctggaacacttactaagtgttgaattttaattttttagaaccatgaagatcctaggccttttaattttttctatcattacctctgctctatgcaattctgacaatgaggacgttactgtcgttgtcggatcaaattatacactgaaaggtccagcgaagggtatgctttcgtggtattgctattttggatctgacactacagaaactgaattatgcaatcttaagaatggcaaaattcaaaattctaaaattaacaattatatatgcaatggtactgatctgatactcctcaatatcacgaaatcatatgctggcagttacacctgccctggagatgatgctgacagtatgattttttacaaagtaactgttgttgatcccactactccacctccacccaccacaactactcacaccacacacacagatcaaaccgcagcagaggaggcagcaaagttagccttgcaggtccaagacagttcatttgttggcattacccctacacctgatcagcggtgtccggggctgctagtcagcggcattgtcggtgtgctttcgggattagcagtcataatcatctgcatgttcatttttgcttgctgctatagaaggctttaccgacaaaaatcagacccactgctgaacctctatgtttaattttttccagagtcatgaaggcagttagcgctctagttttttgttctttgattggcattgttttttgcaatcctattcctaaagttagctttattaaagatgtgaatgttactgaggggggcaatgtgacactggtaggtgtagagggtgctgaaaacaccacctggacaaaataccacctcaatgggtggaaagatatttgcaattggagtgtattagtttatacatgtgagggagttaatcttaccattgtcaatgccacctcagctcaaaatggtagaattcaaggacaaagtgtcagtgtatctaatgggtattttacccaacatacttttatctatgacgttaaagtcataccactgcctacgcctagcccacctagcactaccacacagacaacccacactacacagacaaccacatacagtacattaaatcagcctaccaccactacagcagcagaggttgccagctcgtctggggtccgagtggcatttttgatgttggccccatctagcagtcccactgctagtaccaatgagcagactactgaatttttgtccactgtcgagagccacaccacagctacctccagtgccttctctagcaccgccaatctctcctcgctttcctctacaccaatcagtcccgctactactcctagccccgctcctcttcccactcccctgaagcaaacagacggcggcatgcaatggcagatcaccctgctcattgtgatcgggttggtcatcctggccgtgttgctctactacatcttctgccgccgcattcccaacgcgcaccgcaagccggtctacaagcccatcattgtcgggcagccggagccgcttcaggtggaagggggtctaaggaatcttctcttctcttttacagtatggtgattgaactatgattcctagacaattcttgatcactattcttatctgcctcctccaagtctgtgccaccctcgctctggtggccaacgccagtccagactgtattgggcccttcgcctcctacgtgctctttgccttcaccacctgcatctgctgctgtagcatagtctgcctgcttatcaccttcttccagttcattgactggatctttgtgcgcatcgcctacctgcgccaccacccccagtaccgcgaccagcgagtggcgcggctgctcaggctcctctgataagcatgcgggctctgctacttctcgcgcttctgctgttagtgctcccccgtcccgtcgacccccggtcccccacccagtcccccgaggaggtccgcaaatgcaaattccaagaaccctggaaattcctcaaatgctaccgccaaaaatcagacatgcatcccagctggatcatgatcattgggatcgtgaacattctggcctgcaccctcatctcctttgtgatttacccctgctttgactttggttggaactcgccagaggcgctctatctcccgcctgaacctgacacaccaccacagcaacctcaggcacacgcactaccaccactacagcctaggccacaatacatgcccatattagactatgaggccgagccacagcgacccatgctccccgctattagttacttcaatctaaccggcggagatgactgacccactggccaacaacaacgtcaacgaccttctcctggacatggacggccgcgcctcggagcagcgactcgcccaacttcgcattcgccagcagcaggagagagccgtcaaggagctgcaggatgcggtggccatccaccagtgcaagagaggcatcttctgcctggtgaaacaggccaagatctcctacgaggtcactccaaacgaccatcgcctctcctacgagctcctgcagcagcgccagaagttcacctgcctggtcggagtcaaccccatcgtcatcacccagcagtctggcgataccaaggggtgcatccactgctcctgcgactcccccgactgcgtccacactctgatcaagaccctctgcggcctccgcgacctcctccccatgaactaatcacccccttatccagtgaaataaagatcatattgatgatgattttacagaaataaaaaataatcatttgatttgaaataaagatacaatcatattgatgatttgagtttaacaaaaaaataaagaatcacttacttgaaatctgataccaggtctctgtccatgttttctgccaacaccacttcactcccctcttcccagctctggtactgcaggccccggcgggctgcaaacttcctccacacgctgaaggggatgtcaaattcctcctgtccctcaatcttcattttatcttctatcagatgtccaaaaagcgcgtccgggtggatgatgacttcgaccccgtctacccctacgatgcagacaacgcaccgaccgtgcccttcatcaacccccccttcgtctcttcagatggattccaagagaagcccctgggggtgttgtccctgcgactggccgaccccgtcaccaccaagaacggggaaatcaccctcaagctgggagagggggtggacctcgattcctcgggaaaactcatctccaacacggccaccaaggccgccgcccctctcagtttttccaacaacaccatttcccttaacatggatcaccccttttacactaaagatggaaaattatccttacaagtttctccaccattaaatatactgagaacaagcattctaaacacactagctttaggttttggatcaggtttaggactccgtggctctgccttggcagtacagttagtctctccacttacatttgatactgatggaaacataaagcttaccttagacagaggtttgcatgttacaacaggagatgcaattgaaagcaacataagctgggctaaaggtttaaaatttgaagatggagccatagcaaccaacattggaaatgggttagagtttggaagcagtagtacagaaacaggtgttgatgatgcttacccaatccaagttaaacttggatctggccttagctttgacagtacaggagccataatggctggtaacaaagaagacgataaactcactttgtggacaacacctgatccatcaccaaactgtcaaatactcgcagaaaatgatgcaaaactaacactttgcttgactaaatgtggtagtcaaatactggccactgtgtcagtcttagttgtaggaagtggaaacctaaaccccattactggcaccgtaagcagtgctcaggtgtttctacgttttgatgcaaacggtgttcttttaacagaacattctacactaaaaaaatactgggggtataggcagggagatagcatagatggcactccatataccaatgctgtaggattcatgcccaatttaaaagcttatccaaagtcacaaagttctactactaaaaataatatagtagggcaagtatacatgaatggagatgtttcaaaacctatgcttctcactataaccctcaatggtactgatgacagcaacagtacatattcaatgtcattttcatacacctggactaatggaagctatgttggagcaacatttggggctaactcttataccttctcatacatcgcccaagaatgaacactgtatcccaccctgcatgccaacccttcccaccccactctgtggaacaaactctgaaacacaaaataaaataaagttcaagtgttttattgattcaacagttttacaggattcgagcagttatttttcctccaccctcccaggacatggaatacaccaccctctccccccgcacagccttgaacatctgaatgccattggtgatggacatgcttttggtctccacgttccacacagtttcagagcgagccagtctcgggtcggtcagggagatgaaaccctccgggcactcccgcatctgcacctcacagctcaacagctgaggattgtcctcggtggtcgggatcacggttatctggaagaagcagaagagcggcggtgggaatcatagtccgcgaacgggatcggccggtggtgtcgcatcaggccccgcagcagtcgctgccgccgccgctccgtcaagctgctgctcagggggtccgggtccagggactccctcagcatgatgcccacggccctcagcatcagtcgtctggtgcggcgggcgcagcagcgcatgcggatctcgctcaggtcgctgcagtacgtgcaacacagaaccaccaggttgttcaacagtccatagttcaacacgctccagccgaaactcatcgcgggaaggatgctacccacgtggccgtcgtaccagatcctcaggtaaatcaagtggtgccccctccagaacacgctgcccacgtacatgatctccttgggcatgtggcggttcaccacctcccggtaccacatcaccctctggttgaacatgcagccccggatgatcctgcggaaccacagggccagcaccgccccgcccgccatgcagcgaagagaccccgggtcccggcaatggcaatggaggacccaccgctcgtacccgtggatcatctgggagctgaacaagtctatgttggcacagcacaggcatatgctcatgcatctcttcagcactctcaactcctcgggggtcaaaaccatatcccagggcacggggaactcttgcaggacagcgaaccccgcagaacagggcaatcctcgcacagaacttacattgtgcatggacagggtatcgcaatcaggcagcaccgggtgatcctccaccagagaagcgcgggtctcggtctcctcacagcgtggtaagggggccggccgatacgggtgatggcgggacgcggctgatcgtgttcgcgaccgtgtcatgatgcagttgctttcggacattttcgtacttgctgtagcagaacctggtccgggcgctgcacaccgatcgccggcggcggtctcggcgcttggaacgctcggtgttgaaattgtaaaacagccactctctcagaccgtgcagcagatctagggcctcaggagtgatgaagatcccatcatgcctgatggctctgatcacatcgaccaccgtggaatgggccagacccagccagatgatgcaattttgttgggtttcggtgacggcgggggagggaagaacaggaagaaccatgattaacttttaatccaaacggtctcggagtacttcaaaatgaagatcgcggagatggcacctctcgcccccgctgtgttggtggaaaataacagccaggtcaaaggtgatacggttctcgagatgttccacggtggcttccagcaaagcctccacgcgcacatccagaaacaagacaatagcgaaagcgggagggttctctaattcctcaatcatcatgttacactcctgcaccatccccagataattttcatttttccagccttgaatgattcgaactagttcctgaggtaaatccaagccagccatgataaagagctcgcgcagagcgccctccaccggcattcttaagcacaccctcataattccaagatattctgctcctggttcacctgcagcagattgacaagcggaatatcaaaatctctgccgcgatccctgagctcctccctcagcaataactgtaagtactctttcatatcctctccgaaatttttagccataggaccaccaggaataagattagggcaagccacagtacagataaaccgaagtcctccccagtgagcattgccaaatgcaagactgctataagcatgctggctagacccggtgatatcttccagataactggacagaaaatcgcccaggcaatttttaagaaaatcaacaaaagaaaaatcctccaggtggacgtttagagcctcgggaacaacgatgaagtaaatgcaagcggtgcgttccagcatggttagttagctgatctgtagaaaaaacaaaaatgaacattaaaccatgctagcctggcgaacaggtgggtaaatcgttctctccagcaccaggcaggccacggggtctccggcgcgaccctcgtaaaaattgtcgctatgattgaaaaccatcacagagagacgttcccggtggccggcgtgaatgattcgacaagatgaatacacccccggaacattggcgtccgcgagtgaaaaaaagcgcccgaggaagcaataaggcactacaatgctcagtctcaagtccagcaaagcgatgccatgcggatgaagcacaaaattctcaggtgcgtacaaaatgtaattactcccctcctgcacaggcagcaaagcccccgatccctccaggtacacatacaaagcctcagcgtccatagcttaccgagcagcagcacacaacaggcgcaagagtcagagaaaggctgagctctaacctgtccacccgctctctgctcaatatatagcccagatctacactgacgtaaaggccaaagtctaaaaatacccgccaaataatcacacacgcccagcacacgcccagaaaccggtgacacactcaaaaaaatacgcgcacttcctcaaacgcccaaaactgccgtcatttccgggttcccacgctacgtcatcaaaacacgactttcaaattccgtcgaccgttaaaaacgtcacccgccccgcccctaacggtcgcccgtctctcagccaatcagcgccccgcatccccaaattcaaacacctcatttgcatattaacgcgcacaaaaagtttgaggtatattattgatgatgg

SEQ ID NO: 11 - DNA, 31867 bp, Artificial Sequence
  Description of Artificial Sequence: Synthetic polynucleotide
ccatcttcaataatatacctcaaactttttgtgcgcgttaatatgcaaatgaggcgtttgaatttggggaggaagggcggtgattggtcgagggatgagcgaccgttaggggcggggcgagtgacgttttgatgacgtggttgcgaggaggagccagtttgcaagttctcgtgggaaaagtgacgtcaaacgaggtgtggtttgaacacggaaatactcaattttcccgcgctctctgacaggaaatgaggtgtttctgggcggatgcaagtgaaaacgggccattttcgcgcgaaaactgaatgaggaagtgaaaatctgagtaatttcgcgtttatggcagggaggagtatttgccgagggccgagtagactttgaccgattacgtgggggtttcgattaccgtgtttttcacctaaatttccgcgtacggtgtcaaagtccggtgtttttacgtaggtgtcagctgatcgccagggtatttaaacctgcgctctccagtcaagaggccactcttgagtgccagcgagaagagttttctcctccgcgccgcgagtcagatctacactttgaaagtagggataacagggtaatgacattgattattgactagttgttaatagtaatcaattacggggtcattagttcatagcccatatatggagttccgcgttacataacttacggtaaatggcccgcctggctgaccgcccaacgacccccgcccattgacgtcaataatgacgtatgttcccatagtaacgccaatagggactttccattgacgtcaatgggtggagtatttacggtaaactgcccacttggcagtacatcaagtgtatcatatgccaagtccgccccctattgacgtcaatgacggtaaatggcccgcctggcattatgcccagtacatgaccttacgggactttcctacttggcagtacatctacgtattagtcatcgctattaccatggtgatgcggttttggcagtacaccaatgggcgtggatagcggtttgactcacggggatttccaagtctccaccccattgacgtcaatgggagtttgttttggcaccaaaatcaacgggactttccaaaatgtcgtaataaccccgccccgttgacgcaaatgggcggtaggcgtgtacggtgggaggtctatataagcagagctcgtttagtgaaccgtcagatcgcctggaacgccatccacgctgttttgacctccatagaagacagcgatcgcgccaccatggtgagcaagggcgaggagctgttcaccggggtggtgcccatcctggtcgagctggacggcgacgtaaacggccacaagttcagcgtgtccggcgagggcgagggcgatgccacctacggcaagctgaccctgaagttcatctgcaccaccggcaagctgcccgtgccctggcccaccctcgtgaccaccctgacctacggcgtgcagtgcttcagccgctaccccgaccacatgaagcagcacgacttcttcaagtccgccatgcccgaaggctacgtccaggagcgcaccatcttcttcaaggacgacggcaactacaagacccgcgccgaggtgaagttcgagggcgacaccctggtgaaccgcatcgagctgaagggcatcgacttcaaggaggacggcaacatcctggggcacaagctggagtacaactacaacagccacaacgtctatatcatggccgacaagcagaagaacggcatcaaggtgaacttcaagatccgccacaacatcgaggacggcagcgtgcagctcgccgaccactaccagcagaacacccccatcggcgacggccccgtgctgctgcccgacaaccactacctgagcacccagtccgccctgagcaaagaccccaacgagaagcgcgatcacatggtcctgctggagttcgtgaccgccgccgggatcactctcggcatggacgagctttacaagtagtgagtttaaactcccatttaaatgtgagggttaatgcttcgagcagacatgataagatacattgatgagtttggacaaaccacaactagaatgcagtgaaaaaaatgctttatttgtgaaatttgtgatgctattgctttatttgtaaccattataagctgcaataaacaagttaacaacaacaattgcattcattttatgtttcaggttcagggggagatgtgggaggttttttaaagcaagtaaaacctctacaaatgtggtaaaataactataacggtcctaaggtagcgagtgagtagtgttctggggcgggggaggacctgcatgagggccagaataactgaaatctgtgcttttctgtgtgttgcagcagcatgagcggaagcggctcctttgagggaggggtattcagcccttatctgacggggcgtctcccctcctgggcgggagtgcgtcagaatgtgatgggatccacggtggacggccggcccgtgcagcccgcgaactcttcaaccctgacctatgcaaccctgagctcttcgtcgttggacgcagctgccgccgcagctgctgcatctgccgccagcgccgtgcgcggaatggccatgggcgccggctactacggcactctggtggccaactcgagttccaccaataatcccgccagcctgaacgaggagaagctgttgctgctgatggcccagctcgaggccttgacccagcgcctgggcgagctgacccagcaggtggctcagctgcaggagcagacgcgggccgcggttgccacggtgaaatccaaataaaaaatgaatcaataaataaacggagacggttgttgattttaacacagagtctgaatctttatttgatttttcgcgcgcggtaggccctggaccaccggtctcgatcattgagcacccggtggatcttttccaggacccggtagaggtgggcttggatgttgaggtacatgggcatgagcccgtcccgggggtggaggtagctccattgcagggcctcgtgctcgggggtggtgttgtaaatcacccagtcatagcaggggcgcagggcatggtgttgcacaatatctttgaggaggagactgatggccacgggcagccctttggtgtaggtgtttacaaatctgttgagctgggagggatgcatgcggggggagatgaggtgcatcttggcctggatcttgagattggcgatgttaccgcccagatcccgcctggggttcatgttgtgcaggaccaccagcacggtgtatccggtgcacttggggaatttatcatgcaacttggaagggaaggcgtgaaagaatttggcgacgcctttgtgcccgcccaggttttccatgcactcatccatgatgatggcgatgggcccgtgggcggcggcctgggcaaagacgtttcgggggtcggacacatcatagttgtggtcctgggtgaggtcatcataggccattttaatgaatttggggcggagggtgccggactgggggacaaaggtaccctcgatcccgggggcgtagttcccctcacagatctgcatctcccaggctttgagctcggagggggggatcatgtccacctgcggggcgataaagaacacggtttccggggcgggggagatgagctgggccgaaagcaagttccggagcagctgggacttgccgcagccggtggggccgtagatgaccccgatgaccggctgcaggtggtagttgagggagagacagctgccgtcctcccggaggaggggggccacctcgttcatcatctcgcgcacgtgcatgttctcgcgcaccagttccgccaggaggcgctctccccccagggataggagctcctggagcgaggcgaagtttttcagcggcttgagtccgtcggccatgggcattttggagagggtttgttgcaagagttccaggcggtcccagagctcggtgatgtgctctacggcatctcgatccagcagacctcctcgtttcgcgggttgggacggctgcgggagtagggcaccagacgatgggcgtccagcgcagccagggtccggtccttccagggtcgcagcgtccgcgtcagggtggtctccgtcacggtgaaggggtgcgcgccgggctgggcgcttgcgagggtgcgcttcaggctcatccggctggtcgaaaaccgctcccgatcggcgccctgcgcgtcggccaggtagcaattgaccatgagttcgtagttgagcgcctcggccgcgtggcctttggcgcggagcttacctttggaagtctgcccgcaggcgggacagaggagggacttgagggcgtagagcttgggggcgaggaagacggactcgggggcgtaggcgtccgcgccgcagtgggcgcagacggtctcgcactccacgagccaggtgaggtcgggctggtcggggtcaaaaaccagtttcccgccgttctttttgatgcgtttcttacctttggtctccatgagctcgtgtccccgctgggtgacaaagaggctgtccgtgtccccgtagaccgactttatgggccggtcctcgagcggtgtgccgcggtcctcctcgtagaggaaccccgcccactccgagacgaaagcccgggtccaggccagcacgaaggaggccacgtgggacgggtagcggtcgttgtccaccagcgggtccaccttttccagggtatgcaaacacatgtccccctcgtccacatccaggaaggtgattggcttgtaagtgtaggccacgtgaccgggggtcccggccgggggggtataaaagggtgcgggtccctgctcgtcctcactgtcttccggatcgctgtccaggagcgccagctgttggggtaggtattccctctcgaaggcgggcatgacctcggcactcaggttgtcagtttctagaaacgaggaggatttgatattgacggtgccggcggagatgcctttcaagagcccctcgtccatctggtcagaaaagacgatctttttgttgtcgagcttggtggcgaaggagccgtagagggcgttggagaggagcttggcgatggagcgcatggtctggtttttttccttgtcggcgcgctccttggcggcgatgttgagctgcacgtactcgcgcgccacgcacttccattcggggaagacggtggtcagctcgtcgggcacgattctgacctgccagccccgattatgcagggtgatgaggtccacactggtggccacctcgccgcgcaggggctcattagtccagcagaggcgtccgcccttgcgcgagcagaaggggggcagggggtccagcatgacctcgtcgggggggtcggcatcgatggtgaagatgccgggcaggaggtcggggtcaaagtagctgatggaagtggccagatcgtccagggcagcttgccattcgcgcacggccagcgcgctctcgtagggactgaggggcgtgccccagggcatgggatgggtaagcgcggaggcgtacatgccgcagatgtcgtagacgtagaggggctcctcgaggatgccgatgtaggtggggtagcagcgccccccgcggatgctggcgcgcacgtagtcatacagctcgtgcgagggggcgaggagccccgggcccaggttggtgcgactgggcttttcggcgcggtagacgatctggcggaaaatggcatgcgagttggaggagatggtgggcctttggaagatgttgaagtgggcgtggggcagtccgaccgagtcgcggatgaagtgggcgtaggagtcttgcagcttggcgacgagctcggcggtgactaggacgtccagagcgcagtagtcgagggtctcctggatgatgtcatacttgagctgtcccttttgtttccacagctcgcggttgagaaggaactcttcgcggtccttccagtactcttcgagggggaacccgtcctgatctgcacggtaagagcctagcatgtagaactggttgacggccttgtaggcgcagcagcccttctccacggggagggcgtaggcctgggcggccttgcgcagggaggtgtgcgtgagggcgaaagtgtccctgaccatgaccttgaggaactggtgcttgaagtcgatatcgtcgcagcccccctgctcccagagctggaagtccgtgcgcttcttgtaggcggggttgggcaaagcgaaagtaacatcgttgaagaggatcttgcccgcgcggggcataaagttgcgagtgatgcggaaaggttggggcacctcggcccggttgttgatgacctgggcggcgagcacgatctcgtcgaagccgttgatgttgtggcccacgatgtagagttccacgaatcgcggacggcccttgacgtggggcagtttcttgagctcctcgtaggtgagctcgtcggggtcgctgagcccgtgctgctcgagcgcccagtcggcgagatgggggttggcgcggaggaaggaagtccagagatccacggccagggcggtttgcagacggtcccggtactgacggaactgctgcccgacggccattttttcgggggtgacgcagtagaaggtgcgggggtccccgtgccagcgatcccatttgagctggagggcgagatcgagggcgagctcgacgagccggtcgtccccggagagtttcatgaccagcatgaaggggacgagctgcttgccgaaggaccccatccaggtgtaggtttccacatcgtaggtgaggaagagcctttcggtgcgaggatgcgagccgatggggaagaactggatctcctgccaccaattggaggaatggctgttgatgtgatggaagtagaaatgccgacggcgcgccgaacactcgtgcttgtgtttatacaagcggccacagtgctcgcaacgctgcacgggatgcacgtgctgcacgagctgtacctgagttcctttgacgaggaatttcagtgggaagtggagtcgtggcgcctgcatctcgtgctgtactacgtcgtggtggtcggcctggccctcttctgcctcgatggtggtcatgctgacgagcccgcgcgggaggcaggtccagacctcggcgcgagcgggtcggagagcgaggacgagggcgcgcaggccggagctgtccagggtcctgagacgctgcggagtcaggtcagtgggcagcggcggcgcgcggttgacttgcaggagtttttccagggcgcgcgggaggtccagatggtacttgatctccaccgcgccattggtggcgacgtcgatggcttgcagggtcccgtgcccctggggtgtgaccaccgtcccccgtttcttcttgggcggctggggcgacgggggcggtgcctcttccatggttagaagcggcggcgaggacgcgcgccgggcggcaggggcggctcggggcccggaggcaggggcggcaggggcacgtcggcgccgcgcgcgggtaggttctggtactgcgcccggagaagactggcgtgagcgacgacgcgacggttgacgtcctggatctgacgcctctgggtgaaggccacgggacccgtgagtttgaacctgaaagagagttcgacagaatcaatctcggtatcgttgacggcggcctgccgcaggatctcttgcacgtcgcccgagttgtcctggtaggcgatctcggtcatgaactgctcgatctcctcctcttgaaggtctccgcggccggcgcgctccacggtggccgcgaggtcgttggagatgcggcccatgagctgcgagaaggcgttcatgcccgcctcgttccagacgcggctgtagaccacgacgccctcgggatcgcgggcgcgcatgaccacctgggcgaggttgagctccacgtggcgcgtgaagaccgcgtagttgcagaggcgctggtagaggtagttgagcgtggtggcgatgtgctcggtgacgaagaaatacatgatccagcggcggagcggcatctcgctgacgtcgcccagcgcctccaaacgttccatggcctcgtaaaagtccacggcgaagttgaaaaactgggagttgcgcgccgagacggtcaactcctcctccagaagacggatgagctcggcgatggtggcgcgcacctcgcgctcgaaggcccccgggagttcctccacttcctcttcttcctcctccactaacatctcttctacttcctcctcaggcggcagtggtggcgggggagggggcctgcgtcgccggcggcgcacgggcagacggtcgatgaagcgctcgatggtctcgccgcgccggcgtcgcatggtctcggtgacggcgcgcccgtcctcgcggggccgcagcgtgaagacgccgccgcgcatctccaggtggccgggggggtccccgttgggcagggagagggcgctgacgatgcatcttatcaattgccccgtagggactccgcgcaaggacctgagcgtctcgagatccacgggatctgaaaaccgctgaacgaaggcttcgagccagtcgcagtcgcaaggtaggctgagcacggtttcttctggcgggtcatgttggttgggagcggggcgggcgatgctgctggtgatgaagttgaaataggcggttctgagacggcggatggtggcgaggagcaccaggtctttgggcccggcttgctggatgcgcagacggtcggccatgccccaggcgtggtcctgacacctggccaggtccttgtagtagtcctgcatgagccgctccacgggcacctcctcctcgcccgcgcggccgtgcatgcgcgtgagcccgaagccgcgctggggctggacgagcgccaggtcggcgacgacgcgctcggcgaggatggcttgctggatctgggtgagggtggtctggaagtcatcaaagtcgacgaagcggtggtaggctccggtgttgatggtgtaggagcagttggccatgacggaccagttgacggtctggtggcccggacgcacgagctcgtggtacttgaggcgcgagtaggcgcgcgtgtcgaagatgtagtcgttgcaggtgcgcaccaggtactggtagccgatgaggaagtgcggcggcggctggcggtagagcggccatcgctcggtggcgggggcgccgggcgcgaggtcctcgagcatggtgcggtggtagccgtagatgtacctggacatccaggtgatgccggcggcggtggtggaggcgcgcgggaactcgcggacgcggttccagatgttgcgcagcggcaggaagtagttcatggtgggcacggtctggcccgtgaggcgcgcgcagtcgtggatgctctatacgggcaaaaacgaaagcggtcagcggctcgactccgtggcctggaggctaagcgaacgggttgggctgcgcgtgtaccccggttcgaatctcgaatcaggctggagccgcagctaacgtggtattggcactcccgtctcgacccaagcctgcaccaaccctccaggatacggaggcgggtcgttttgcaacttttttttggaggccggatgagactagtaagcgcggaaagcggccgaccgcgatggctcgctgccgtagtctggagaagaatcgccagggttgcgttgcggtgtgccccggttcgaggccggccggattccgcggctaacgagggcgtggctgccccgtcgtttccaagaccccatagccagccgacttctccagttacggagcgagcccctcttttgttttgtttgtttttgccagatgcatcccgtactgcggcagatgcgcccccaccaccctccaccgcaacaacagccccctccacagccggcgcttctgcccccgccccagcagcaacttccagccacgaccgccgcggccgccgtgagcggggctggacagagttatgatcaccagctggccttggaagagggcgaggggctggcgcgcctgggggcgtcgtcgccggagcggcacccgcgcgtgcagatgaaaagggacgctcgcgaggcctacgtgcccaagcagaacctgttcagagacaggagcggcgaggagcccgaggagatgcgcgcggcccggttccacgcggggcgggagctgcggcgcggcctggaccgaaagagggtgctgagggacgaggatttcgaggcggacgagctgacggggatcagccccgcgcgcgcgcacgtggccgcggccaacctggtcacggcgtacgagcagaccgtgaaggaggagagcaacttccaaaaatccttcaacaaccacgtgcgcaccctgatcgcgcgcgaggaggtgaccctgggcctgatgcacctgtgggacctgctggaggccatcgtgcagaaccccaccagcaagccgctgacggcgcagctgttcctggtggtgcagcatagtcgggacaacgaagcgttcagggaggcgctgctgaatatcaccgagcccgagggccgctggctcctggacctggtgaacattctgcagagcatcgtggtgcaggagcgcgggctgccgctgtccgagaagctggcggccatcaacttctcggtgctgagtttgggcaagtactacgctaggaagatctacaagaccccgtacgtgcccatagacaaggaggtgaagatcgacgggttttacatgcgcatgaccctgaaagtgctgaccctgagcgacgatctgggggtgtaccgcaacgacaggatgcaccgtgcggtgagcgccagcaggcggcgcgagctgagcgaccaggagctgatgcatagtctgcagcgggccctgaccggggccgggaccgagggggagagctactttgacatgggcgcggacctgcactggcagcccagccgccgggccttggaggcggcggcaggaccctacgtagaagaggtggacgatgaggtggacgaggagggcgagtacctggaagactgatggcgcgaccgtatttttgctagatgcaacaacaacagccacctcctgatcccgcgatgcgggcggcgctgcagagccagccgtccggcattaactcctcggacgattggacccaggccatgcaacgcatcatggcgctgacgacccgcaaccccgaagcctttagacagcagccccaggccaaccggctctcggccatcctggaggccgtggtgccctcgcgctccaaccccacgcacgagaaggtcctggccatcgtgaacgcgctggtggagaacaaggccatccgcggcgacgaggccggcctggtgtacaacgcgctgctggagcgcgtggcccgctacaacagcaccaacgtgcagaccaacctggaccgcatggtgaccgacgtgcgcgaggccgtggcccagcgcgagcggttccaccgcgagtccaacctgggatccatggtggcgctgaacgccttcctcagcacccagcccgccaacgtgccccggggccaggaggactacaccaacttcatcagcgccctgcgcctgatggtgaccgaggtgccccagagcgaggtgtaccagtccgggccggactacttcttccagaccagtcgccagggcttgcagaccgtgaacctgagccaggctttcaagaacttgcagggcctgtggggcgtgcaggccccggtcggggaccgcgcgacggtgtcgagcctgctgacgccgaactcgcgcctgctgctgctgctggtggcccccttcacggacagcggcagcatcaaccgcaactcgtacctgggctacctgattaacctgtaccgcgaggccatcggccaggcgcacgtggacgagcagacctaccaggagatcacccacgtgagccgcgccctgggccaggacgacccgggcaacctggaagccaccctgaactttttgctgaccaaccggtcgcagaagatcccgccccagtacgcgctcagcaccgaggaggagcgcatcctgcgttacgtgcagcagagcgtgggcctgttcctgatgcaggagggggccacccccagcgccgcgctcgacatgaccgcgcgcaacatggagcccagcatgtacgccagcaaccgcccgttcatcaataaactgatggactacttgcatcgggcggccgccatgaactctgactatttcaccaacgccatcctgaatccccactggctcccgccgccggggttctacacgggcgagtacgacatgcccgaccccaatgacgggttcctgtgggacgatgtggacagcagcgtgttctccccccgaccgggtgctaacgagcgccccttgtggaagaaggaaggcagcgaccgacgcccgtcctcggcgctgtccggccgcgagggtgctgccgcggcggtgcccgaggccgccagtcctttcccgagcttgcccttctcgctgaacagtatccgcagcagcgagctgggcaggatcacgcgcccgcgcttgctgggcgaagaggagtacttgaatgactcgctgttgagacccgagcgggagaagaacttccccaataacgggatagaaagcctggtggacaagatgagccgctggaagacgtatgcgcaggagcacagggacgatccccgggcgtcgcagggggccacgagccggggcagcgccgcccgtaaacgccggtggcacgacaggcagcggggacagatgtgggacgatgaggactccgccgacgacagcagcgtgttggacttgggtgggagtggtaacccgttcgctcacctgcgcccccgtatcgggcgcatgatgtaagagaaaccgaaaataaatgatactcaccaaggccatggcgaccagcgtgcgttcgtttcttctctgttgttgttgtatctagtatgatgaggcgtgcgtacccggagggtcctcctccctcgtacgagagcgtgatgcagcaggcgatggcggcggcggcgatgcagcccccgctggaggctccttacgtgcccccgcggtacctggcgcctacggaggggcggaacagcattcgttactcggagctggcacccttgtacgataccacccggttgtacctggtggacaacaagtcggcggacatcgcctcgctgaactaccagaacgaccacagcaacttcctgaccaccgtggtgcagaacaatgacttcacccccacggaggccagcacccagaccatcaactttgacgagcgctcgcggtggggcggccagctgaaaaccatcatgcacaccaacatgcccaacgtgaacgagttcatgtacagcaacaagttcaaggcgcgggtgatggtctcccgcaagacccccaatggggtgacagtgacagaggattatgatggtagtcaggatgagctgaagtatgaatgggtggaatttgagctgcccgaaggcaacttctcggtgaccatgaccatcgacctgatgaacaacgccatcatcgacaattacttggcggtggggcggcagaacggggtgctggagagcgacatcggcgtgaagttcgacactaggaacttcaggctgggctgggaccccgtgaccgagctggtcatgcccggggtgtacaccaacgaggctttccatcccgatattgtcttgctgcccggctgcggggtggacttcaccgagagccgcctcagcaacctgctgggcattcgcaagaggcagcccttccaggaaggcttccagatcatgtacgaggatctggaggggggcaacatccccgcgctcctggatgtcgacgcctatgagaaaagcaaggaggatgcagcagctgaagcaactgcagccgtagctaccgcctctaccgaggtcaggggcgataattttgcaagcgccgcagcagtggcagcggccgaggcggctgaaaccgaaagtaagatagtcattcagccggtggagaaggatagcaagaacaggagctacaacgtactaccggacaagataaacaccgcctaccgcagctggtacctagcctacaactatggcgaccccgagaagggcgtgcgctcctggacgctgctcaccacctcggacgtcacctgcggcgtggagcaagtctactggtcgctgcccgacatgatgcaagacccggtcaccttccgctccacgcgtcaagttagcaactacccggtggtgggcgccgagctcctgcccgtctactccaagagcttcttcaacgagcaggccgtctactcgcagcagctgcgcgccttcacctcgcttacgcacgtcttcaaccgcttccccgagaaccagatcctcgtccgcccgcccgcgcccaccattaccaccgtcagtgaaaacgttcctgctctcacagatcacgggaccctgccgctgcgcagcagtatccggggagtccagcgcgtgaccgttactgacgccagacgccgcacctgcccctacgtctacaaggccctgggcatagtcgcgccgcgcgtcctctcgagccgcaccttctaaatgtccattctcatctcgcccagtaataacaccggttggggcctgcgcgcgcccagcaagatgtacggaggcgctcgccaacgctccacgcaacaccccgtgcgcgtgcgcgggcacttccgcgctccctggggcgccctcaagggccgcgtgcggtcgcgcaccaccgtcgacgacgtgatcgaccaggtggtggccgacgcgcgcaactacacccccgccgccgcgcccgtctccaccgtggacgccgtcatcgacagcgtggtggccgacgcgcgccggtacgcccgcgccaagagccggcggcggcgcatcgcccggcggcaccggagcacccccgccatgcgcgcggcgcgagccttgctgcgcagggccaggcgcacgggacgcagggccatgctcagggcggccagacgcgcggcttcaggcgccagcgccggcaggacccggagacgcgcggccacggcggcggcagcggccatcgccagcatgtcccgcccgcggcgagggaacgtgtactgggtgcgcgacgccgccaccggtgtgcgcgtgcccgtgcgcacccgcccccctcgcacttgaagatgttcacttcgcgatgttgatgtgtcccagcggcgaggaggatgtccaagcgcaaattcaaggaagagatgctccaggtcatcgcgcctgagatctacggccctgcggtggtgaaggaggaaagaaagccccgcaaaatcaagcgggtcaaaaaggacaaaaaggaagaagaaagtgatgtggacggattggtggagtttgtgcgcgagttcgccccccggcggcgcgtgcagtggcgcgggcggaaggtgcaaccggtgctgagacccggcaccaccgtggtcttcacgcccggcgagcgctccggcaccgcttccaagcgctcctacgacgaggtgtacggggatgatgatattctggagcaggcggccgagcgcctgggcgagtttgcttacggcaagcgcagccgttccgcaccgaaggaagaggcggtgtccatcccgctggaccacggcaaccccacgccgagcctcaagcccgtgaccttgcagcaggtgctgccgaccgcggcgccgcgccgggggttcaagcgcgagggcgaggatctgtaccccaccatgcagctgatggtgcccaagcgccagaagctggaagacgtgctggagaccatgaaggtggacccggacgtgcagcccgaggtcaaggtgcggcccatcaagcaggtggccccgggcctgggcgtgcagaccgtggacatcaagattcccacggagcccatggaaacgcagaccgagcccatgatcaagcccagcaccagcaccatggaggtgcagacggatccctggatgccatcggctcctagtcgaagaccccggcgcaagtacggcgcggccagcctgctgatgcccaactacgcgctgcatccttccatcatccccacgccgggctaccgcggcacgcgcttctaccgcggtcataccagcagccgccgccgcaagaccaccactcgccgccgccgtcgccgcaccgccgctgcaaccacccctgccgccctggtgcggagagtgtaccgccgcggccgcgcacctctgaccctgccgcgcgcgcgctaccacccgagcatcgccatttaaactttcgcctgctttgcagatcaatggccctcacatgccgccttcgcgttcccattacgggctaccgaggaagaaaaccgcgccgtagaaggctggcggggaacgggatgcgtcgccaccaccaccggcggcggcgcgccatcagcaagcggttggggggaggcttcctgcccgcgctgatccccatcatcgccgcggcgatcggggcgatccccggcattgcttccgtggcggtgcaggcctctcagcgccactgagacacacttggaaacatcttgtaataaaccaatggactctgacgctcctggtcctgtgatgtgttttcgtagacagatggaagacatcaatttttcgtccctggctccgcgacacggcacgcggccgttcatgggcacctggagcgacatcggcaccagccaactgaacgggggcgccttcaattggagcagtctctggagcgggcttaagaatttcgggtccacgcttaaaacctatggcagcaaggcgtggaacagcaccacagggcaggcgctgagggataagctgaaagagcagaacttccagcagaaggtggtcgatgggctcgcctcgggcatcaacggggtggtggacctggccaaccaggccgtgcagcggcagatcaacagccgcctggacccggtgccgcccgccggctccgtggagatgccgcaggtggaggaggagctgcctcccctggacaagcggggcgagaagcgaccccgccccgatgcggaggagacgctgctgacgcacacggacgagccgcccccgtacgaggaggcggtgaaactgggtctgcccaccacgcggcccatcgcgcccctggccaccggggtgctgaaacccgaaaagcccgcgaccctggacttgcctcctccccagccttcccgcccctctacagtggctaagcccctgccgccggtggccgtggcccgcgcgcgacccgggggcaccgcccgccctcatgcgaactggcagagcactctgaacagcatcgtgggtctgggagtgcagagtgtgaagcgccgccgctgctattaaacctaccgtagcgcttaacttgcttgtctgtgtgtgtatgtattatgtcgccgccgccgctgtccaccagaaggaggagtgaagaggcgcgtcgccgagttgcaagatggccaccccatcgatgctgccccagtgggcgtacatgcacatcgccggacaggacgcttcggagtacctgagtccgggtctggtgcagtttgcccgcgccacagacacctacttcagtctggggaacaagtttaggaaccccacggtggcgcccacgcacgatgtgaccaccgaccgcagccagcggctgacgctgcgcttcgtgcccgtggaccgcgaggacaacacctactcgtacaaagtgcgctacacgctggccgtgggcgacaaccgcgtgctggacatggccagcacctactttgacatccgcggcgtgctggatcggggccctagcttcaaaccctactccggcaccgcctacaacagtctggcccccaagggagcacccaacacttgtcagtggacatataaagccgatggtgaaactgccacagaaaaaacctatacatatggaaatgcacccgtgcagggcattaacatcacaaaagatggtattcaacttggaactgacaccgatgatcagccaatctacgcagataaaacctatcagcctgaacctcaagtgggtgatgctgaatggcatgacatcactggtactgatgaaaagtatggaggcagagctcttaagcctgataccaaaatgaagccttgttatggttcttttgccaagcctactaataaagaaggaggtcaggcaaatgtgaaaacaggaacaggcactactaaagaatatgacatagacatggctttctttgacaacagaagtgcggctgctgctggcctagctccagaaattgttttgtatactgaaaatgtggatttggaaactccagatacccatattgtatacaaagcaggcacagatgacagcagctcttctattaatttgggtcagcaagccatgcccaacagacctaactacattggtttcagagacaactttatcgggctcatgtactacaacagcactggcaatatgggggtgctggccggtcaggcttctcagctgaatgctgtggttgacttgcaagacagaaacaccgagctgtcctaccagctcttgcttgactctctgggtgacagaacccggtatttcagtatgtggaatcaggcggtggacagctatgatcctgatgtgcgcattattgaaaatcatggtgtggaggatgaacttcccaactattgtttccctctggatgctgttggcagaacagatacttatcagggaattaaggctaatggaactgatcaaaccacatggaccaaagatgacagtgtcaatgatgctaatgagataggcaagggtaatccattcgccatggaaatcaacatccaagccaacctgtggaggaacttcctctacgccaacgtggccctgtacctgcccgactcttacaagtacacgccggccaatgttaccctgcccaccaacaccaacacctacgattacatgaacggccgggtggtggcgccctcgctggtggactcctacatcaacatcggggcgcgctggtcgctggatcccatggacaacgtgaaccccttcaaccaccaccgcaatgcggggctgcgctaccgctccatgctcctgggcaacgggcgctacgtgcccttccacatccaggtgccccagaaatttttcgccatcaagagcctcctgctcctgcccgggtcctacacctacgagtggaacttccgcaaggacgtcaacatgatcctgcagagctccctcggcaacgacctgcgcacggacggggcctccatctccttcaccagcatcaacctctacgccaccttcttccccatggcgcacaacacggcctccacgctcgaggccatgctgcgcaacgacaccaacgaccagtccttcaacgactacctctcggcggccaacatgctctaccccatcccggccaacgccaccaacgtgcccatctccatcccctcgcgcaactgggccgccttccgcggctggtccttcacgcgtctcaagaccaaggagacgccctcgctgggctccgggttcgacccctacttcgtctactcgggctccatcccctacctcgacggcaccttctacctcaaccacaccttcaagaaggtctccatcaccttcgactcctccgtcagctggcccggcaacgaccggctcctgacgcccaacgagttcgaaatcaagcgcaccgtcgacggcgagggctacaacgtggcccagtgcaacatgaccaaggactggttcctggtccagatgctggcccactacaacatcggctaccagggcttctacgtgcccgagggctacaaggaccgcatgtactccttcttccgcaacttccagcccatgagccgccaggtggtggacgaggtcaactacaaggactaccaggccgtcaccctggcctaccagcacaacaactcgggcttcgtcggctacctcgcgcccaccatgcgccagggccagccctaccccgccaactacccctacccgctcatcggcaagagcgccgtcaccagcgtcacccagaaaaagttcctctgcgacagggtcatgtggcgcatccccttctccagcaacttcatgtccatgggcgcgctcaccgacctcggccagaacatgctctatgccaactccgcccacgcgctagacatgaatttcgaagtcgaccccatggatgagtccacccttctctatgttgtcttcgaagtcttcgacgtcgtccgagtgcaccagccccaccgcggcgtcatcgaggccgtctacctgcgcacccccttctcggccggtaacgccaccacctaagctcttgcttcttgcaagccatggccgcgggctccggcgagcaggagctcagggccatcatccgcgacctgggctgcgggccctacttcctgggcaccttcgataagcgcttcccgggattcatggccccgcacaagctggcctgcgccatcgtcaacacggccggccgcgagaccgggggcgagcactggctggccttcgcctggaacccgcgctcgaacacctgctacctcttcgaccccttcgggttctcggacgagcgcctcaagcagatctaccagttcgagtacgagggcctgctgcgccgcagcgccctggccaccgaggaccgctgcgtcaccctggaaaagtccacccagaccgtgcagggtccgcgctcggccgcctgcgggctcttctgctgcatgttcctgcacgccttcgtgcactggcccgaccgccccatggacaagaaccccaccatgaacttgctgacgggggtgcccaacggcatgctccagtcgccccaggtggaacccaccctgcgccgcaaccaggaggcgctctaccgcttcctcaactcccactccgcctactttcgctcccaccgcgcgcgcatcgagaaggccaccgccttcgaccgcatgaatcaagacatgtaaaccgtgtgtgtatgttaaatgtctttaataaacagcactttcatgttacacatgcatctgagatgatttatttagaaatcgaaagggttctgccgggtctcggcatggcccgcgggcagggacacgttgcggaactggtacttggccagccacttgaactcggggatcagcagtttgggcagcggggtgtcggggaaggagtcggtccacagcttccgcgtcagttgcagggcgcccagcaggtcgggcgcggagatcttgaaatcgcagttgggacccgcgttctgcgcgcgggagttgcggtacacggggttgcagcactggaacaccatcagggccgggtgcttcacgctcgccagcaccgtcgcgtcggtgatgctctccacgtcgaggtcctcggcgttggccatcccgaagggggtcatcttgcaggtctgccttcccatggtgggcacgcacccgggcttgtggttgcaatcgcagtgcagggggatcagcatcatctgggcctggtcggcgttcatccccgggtacatggccttcatgaaagcctccaattgcctgaacgcctgctgggccttggctccctcggtgaagaagaccccgcaggacttgctagagaactggttggtggcgcacccggcgtcgtgcacgcagcagcgcgcgtcgttgttggccagctgcaccacgctgcgcccccagcggttctgggtgatcttggcccggtcggggttctccttcagcgcgcgctgcccgttctcgctcgccacatccatctcgatcatgtgctccttctggatcatggtggtcccgtgcaggcaccgcagcttgccctcggcctcggtgcacccgtgcagccacagcgcgcacccggtgcactcccagttcttgtgggcgatctgggaatgcgcgtgcacgaagccctgcaggaagcggcccatcatggtggtcagggtcttgttgctagtgaaggtcagcggaatgccgcggtgctcctcgttgatgtacaggtggcagatgcggcggtacacctcgccctgctcgggcatcagctggaagttggctttcaggtcggtctccacgcggtagcggtccatcagcatagtcatgatttccatacccttctcccaggccgagacgatgggcaggctcatagggttcttcaccatcatcttagcgctagcagccgcggccagggggtcgctctcgtccagggtctcaaagctccgcttgccgtccttctcggtgatccgcaccggggggtagctgaagcccacggccgccagctcctcctcggcctgtctttcgtcctcgctgtcctggctgacgtcctgcaggaccacatgcttggtcttgcggggtttcttcttgggcggcagcggcggcggagatgttggagatggcgagggggagcgcgagttctcgctcaccactactatctcttcctcttcttggtccgaggccacgcggcggtaggtatgtctcttcgggggcagaggcggaggcgacgggctctcgccgccgcgacttggcggatggctggcagagccccttccgcgttcgggggtgcgctcccggcggcgctctgactgacttcctccgcggccggccattgtgttctcctagggaggaacaacaagcatggagactcagccatcgccaacctcgccatctgcccccaccgccgacgagaagcagcagcagcagaatgaaagcttaaccgccccgccgcccagccccgccacctccgacgcggccgtcccagacatgcaagagatggaggaatccatcgagattgacctgggctatgtgacgcccgcggagcacgaggaggagctggcagtgcgcttttcacaagaagagatacaccaagaacagccagagcaggaagcagagaatgagcagagtcaggctgggctcgagcatgacggcgactacctccacctgagcgggggggaggacgcgctcatcaagcatctggcccggcaggccaccatcgtcaaggatgcgctgctcgaccgcaccgaggtgcccctcagcgtggaggagctcagccgcgcctacgagttgaacctcttctcgccgcgcgtgccccccaagcgccagcccaatggcacctgcgagcccaacccgcgcctcaacttctacccggtcttcgcggtgcccgaggccctggccacctaccacatctttttcaagaaccaaaagatccccgtctcctgccgcgccaaccgcacccgcgccgacgcccttttcaacctgggtcccggcgcccgcctacctgatatcgcctccttggaagaggttcccaagatcttcgagggtctgggcagcgacgagactcgggccgcgaacgctctgcaaggagaaggaggagagcatgagcaccacagcgccctggtcgagttggaaggcgacaacgcgcggctggcggtgctcaaacgcacggtcgagctgacccatttcgcctacccggctctgaacctgccccccaaagtcatgagcgcggtcatggaccaggtgctcatcaagcgcgcgtcgcccatctccgaggacgagggcatgcaagactccgaggagggcaagcccgtggtcagcgacgagcagctggcccggtggctgggtcctaatgctagtccccagagtttggaagagcggcgcaaactcatgatggccgtggtcctggtgaccgtggagctggagtgcctgcgccgcttcttcgccgacgcggagaccctgcgcaaggtcgaggagaacctgcactacctcttcaggcacgggttcgtgcgccaggcctgcaagatctccaacgtggagctgaccaacctggtctcctacatgggcatcttgcacgagaaccgcctggggcagaacgtgctgcacaccaccctgcgcggggaggcccggcgcgactacatccgcgactgcgtctacctctacctctgccacacctggcagacgggcatgggcgtgtggcagcagtgtctggaggagcagaacctgaaagagctctgcaagctcctgcagaagaacctcaagggtctgtggaccgggttcgacgagcgcaccaccgcctcggacctggccgacctcattttccccgagcgcctcaggctgacgctgcgcaacggcctgcccgactttatgagccaaagcatgttgcaaaactttcgctctttcatcctcgaacgctccggaatcctgcccgccacctgctccgcgctgccctcggacttcgtgccgctgaccttccgcgagtgccccccgccgctgtggagccactgctacctgctgcgcctggccaactacctggcctaccactcggacgtgatcgaggacgtcagcggcgagggcctgctcgagtgccactgccgctgcaacctctgcacgccgcaccgctccctggcctgcaacccccagctgctgagcgagacccagatcatcggcaccttcgagttgcaagggcccagcgaaggcgagggttcagccgccaaggggggtctgaaactcaccccggggctgtggacctcggcctacttgcgcaagttcgtgcccgaggactaccatcccttcgagatcaggttctacgaggaccaatcccatccgcccaaggccgagctgtcggcctgcgtcatcacccagggggcgatcctggcccaattgcaagccatccagaaatcccgccaagaattcttgctgaaaaagggccgcggggtctacctcgacccccagaccggtgaggagctcaaccccggcttcccccaggatgccccgaggaaacaagaagctgaaagtggagctgccgcccgtggaggatttggaggaagactgggagaacagcagtcaggcagaggaggaggagatggaggaagactgggacagcactcaggcagaggaggacagcctgcaagacagtctggaggaagacgaggaggaggcagaggaggaggtggaagaagcagccgccgccagaccgtcgtcctcggcgggggagaaagcaagcagcacggataccatctccgctccgggtcggggtcccgctcgaccacacagtagatgggacgagaccggacgattcccgaaccccaccacccagaccggtaagaaggagcggcagggatacaagtcctggcgggggcacaaaaacgccatcgtctcctgcttgcaggcctgcgggggcaacatctccttcacccggcgctacctgctcttccaccgcggggtgaactttccccgcaacatcttgcattactaccgtcacctccacagcccctactacttccaagaagaggcagcagcagcagaaaaagaccagcagaaaaccagcagctagaaaatccacagcggcggcagcaggtggactgaggatcgcggcgaacgagccggcgcaaacccgggagctgaggaaccggatctttcccaccctctatgccatcttccagcagagtcgggggcaggagcaggaactgaaagtcaagaaccgttctctgcgctcgctcacccgcagttgtctgtatcacaagagcgaagaccaacttcagcgcactctcgaggacgccgaggctctcttcaacaagtactgcgcgctcactcttaaagagtagcccgcgcccgcccagtcgcagaaaaaggcgggaattacgtcacctgtgcccttcgccctagccgcctccacccatcatcatgagcaaagagattcccacgccttacatgtggagctaccagccccagatgggcctggccgccggtgccgcccaggactactccacccgcatgaattggctcagcgccgggcccgcgatgatctcacgggtgaatgacatccgcgcccaccgaaaccagatactcctagaacagtcagcgctcaccgccacgccccgcaatcacctcaatccgcgtaattggcccgccgccctggtgtaccaggaaattccccagcccacgaccgtactacttccgcgagacgcccaggccgaagtccagctgactaactcaggtgtccagctggcgggcggcgccaccctgtgtcgtcaccgccccgctcagggtataaagcggctggtgatccggggcagaggcacacagctcaacgacgaggtggtgagctcttcgctgggtctgcgacctgacggagtcttccaactcgccggatcggggagatcttccttcacgcctcgtcaggccgtcctgactttggagagttcgtcctcgcagccccgctcgggtggcatcggcactctccagttcgtggaggagttcactccctcggtctacttcaaccccttctccggctcccccggccactacccggacgagttcatcccgaacttcgacgccatcagcgagtcggtggacggctacgattgaatgtcccatggtggcgcagctgacctagctcggcttcgacacctggaccactgccgccgcttccgctgcttcgctcgggatctcgccgagtttgcctactttgagctgcccgaggagcaccctcagggcccggcccacggagtgcggatcgtcgtcgaagggggcctcgactcccacctgcttcggatcttcagccagcgtccgatcctggtcgagcgcgagcaaggacagacccttctgactctgtactgcatctgcaaccaccccggcctgcatgaaagtctttgttgtctgctgtgtactgagtataataaaagctgagatcagcgactactccggacttccgtgtgttcctgaatccatcaaccagtctttgttcttcaccgggaacgagaccgagctccagctccagtgtaagccccacaagaagtacctcacctggctgttccagggctccccgatcgccgttgtcaaccactgcgacaacgacggagtcctgctgagcggccctgccaaccttactttttccacccgcagaagcaagctccagctcttccaacccttcctccccgggacctatcagtgcgtctcgggaccctgccatcacaccttccacctgatcccgaataccacagcgtcgctccccgctactaacaaccaaactaacctccaccaacgccaccgtcgcgacggccacaatacatgcccatattagactatgaggccgagccacagcgacccatgctccccgctattagttacttcaatctaaccggcggagatgactgacccactggccaacaacaacgtcaacgaccttctcctggacatggacggccgcgcctcggagcagcgactcgcccaacttcgcattcgccagcagcaggagagagccgtcaaggagctgcaggatgcggtggccatccaccagtgcaagagaggcatcttctgcctggtgaaacaggccaagatctcctacgaggtcactccaaacgaccatcgcctctcctacgagctcctgcagcagcgccagaagttcacctgcctggtcggagtcaaccccatcgtcatcacccagcagtctggcgataccaaggggtgcatccactgctcctgcgactcccccgactgcgtccacactctgatcaagaccctctgcggcctccgcgacctcctccccatgaactaatcacccccttatccagtgaaataaagatcatattgatgatgattttacagaaataaaaaataatcatttgatttgaaataaagatacaatcatattgatgatttgagtttaacaaaaaaataaagaatcacttacttgaaatctgataccaggtctctgtccatgttttctgccaacaccacttcactcccctcttcccagctctggtactgcaggccccggcgggctgcaaacttcctccacacgctgaaggggatgtcaaattcctcctgtccctcaatcttcattttatcttctatcagatgtccaaaaagcgcgtccgggtggatgatgacttcgaccccgtctacccctacgatgcagacaacgcaccgaccgtgcccttcatcaacccccccttcgtctcttcagatggattccaagagaagcccctgggggtgttgtccctgcgactggccgaccccgtcaccaccaagaacggggaaatcaccctcaagctgggagagggggtggacctcgattcctcgggaaaactcatctccaacacggccaccaaggccgccgcccctctcagtttttccaacaacaccatttcccttaacatggatcaccccttttacactaaagatggaaaattatccttacaagtttctccaccattaaatatactgagaacaagcattctaaacacactagctttaggttttggatcaggtttaggactccgtggctctgccttggcagtacagttagtctctccacttacatttgatactgatggaaacataaagcttaccttagacagaggtttgcatgttacaacaggagatgcaattgaaagcaacataagctgggctaaaggtttaaaatttgaagatggagccatagcaaccaacattggaaatgggttagagtttggaagcagtagtacagaaacaggtgttgatgatgcttacccaatccaagttaaacttggatctggccttagctttgacagtacaggagccataatggctggtaacaaagaagacgataaactcactttgtggacaacacctgatccatcaccaaactgtcaaatactcgcagaaaatgatgcaaaactaacactttgcttgactaaatgtggtagtcaaatactggccactgtgtcagtcttagttgtaggaagtggaaacctaaaccccattactggcaccgtaagcagtgctcaggtgtttctacgttttgatgcaaacggtgttcttttaacagaacattctacactaaaaaaatactgggggtataggcagggagatagcatagatggcactccatataccaatgctgtaggattcatgcccaatttaaaagcttatccaaagtcacaaagttctactactaaaaataatatagtagggcaagtatacatgaatggagatgtttcaaaacctatgcttctcactataaccctcaatggtactgatgacagcaacagtacatattcaatgtcattttcatacacctggactaatggaagctatgttggagcaacatttggggctaactcttataccttctcatacatcgcccaagaatgaacactgtatcccaccctgcatgccaacccttcccaccccactctgtggaacaaactctgaaacacaaaataaaataaagttcaagtgttttattgattcaacagttttacaggattcgagcagttatttttcctccaccctcccaggacatggaatacaccaccctctccccccgcacagccttgaacatctgaatgccattggtgatggacatgcttttggtctccacgttccacacagtttcagagcgagccagtctcgggtcggtcagggagatgaaaccctccgggcactcccgcatctgcacctcacagctcaacagctgaggattgtcctcggtggtcgggatcacggttatctggaagaagcagaagagcggcggtgggaatcatagtccgcgaacgggatcggccggtggtgtcgcatcaggccccgcagcagtcgctgccgccgccgctccgtcaagctgctgctcagggggtccgggtccagggactccctcagcatgatgcccacggccctcagcatcagtcgtctggtgcggcgggcgcagcagcgcatgcggatctcgctcaggtcgctgcagtacgtgcaacacagaaccaccaggttgttcaacagtccatagttcaacacgctccagccgaaactcatcgcgggaaggatgctacccacgtggccgtcgtaccagatcctcaggtaaatcaagtggtgccccctccagaacacgctgcccacgtacatgatctccttgggcatgtggcggttcaccacctcccggtaccacatcaccctctggttgaacatgcagccccggatgatcctgcggaaccacagggccagcaccgccccgcccgccatgcagcgaagagaccccgggtcccggcaatggcaatggaggacccaccgctcgtacccgtggatcatctgggagctgaacaagtctatgttggcacagcacaggcatatgctcatgcatctcttcagcactctcaactcctcgggggtcaaaaccatatcccagggcacggggaactcttgcaggacagcgaaccccgcagaacagggcaatcctcgcacagaacttacattgtgcatggacagggtatcgcaatcaggcagcaccgggtgatcctccaccagagaagcgcgggtctcggtctcctcacagcgtggtaagggggccggccgatacgggtgatggcgggacgcggctgatcgtgttcgcgaccgtgtcatgatgcagttgctttcggacattttcgtacttgctgtagcagaacctggtccgggcgctgcacaccgatcgccggcggcggtctcggcgcttggaacgctcggtgttgaaattgtaaaacagccactctctcagaccgtgcagcagatctagggcctcaggagtgatgaagatcccatcatgcctgatggctctgatcacatcgaccaccgtggaatgggccagacccagccagatgatgcaattttgttgggtttcggtgacggcgggggagggaagaacaggaagaaccatgattaacttttaatccaaacggtctcggagtacttcaaaatgaagatcgcggagatggcacctctcgcccccgctgtgttggtggaaaataacagccaggtcaaaggtgatacggttctcgagatgttccacggtggcttccagcaaagcctccacgcgcacatccagaaacaagacaatagcgaaagcgggagggttctctaattcctcaatcatcatgttacactcctgcaccatccccagataattttcatttttccagccttgaatgattcgaactagttcgtgaggtaaatccaagccagccatgataaagagctcgcgcagagcgccctccaccggcattcttaagcacaccctcataattccaagatattctgctcctggttcacctgcagcagattgacaagcggaatatcaaaatctctgccgcgatccctgagctcctccctcagcaataactgtaagtactctttcatatcctctccgaaatttttagccataggaccaccaggaataagattagggcaagccacagtacagataaaccgaagtcctccccagtgagcattgccaaatgcaagactgctataagcatgctggctagacccggtgatatcttccagataactggacagaaaatcgcccaggcaatttttaagaaaatcaacaaaagaaaaatcctccaggtggacgtttagagcctcgggaacaacgatgaagtaaatgcaagcggtgcgttccagcatggttagttagctgatctgtagaaaaaacaaaaatgaacattaaaccatgctagcctggcgaacaggtgggtaaatcgttctctccagcaccaggcaggccacggggtctccggcgcgaccctcgtaaaaattgtcgctatgattgaaaaccatcacagagagacgttcccggtggccggcgtgaatgattcgacaagatgaatacacccccggaacattggcgtccgcgagtgaaaaaaagcgcccgaggaagcaataaggcactacaatgctcagtctcaagtccagcaaagcgatgccatgcggatgaagcacaaaattctcaggtgcgtacaaaatgtaattactcccctcctgcacaggcagcaaagcccccgatccctccaggtacacatacaaagcctcagcgtccatagcttaccgagcagcagcacacaacaggcgcaagagtcagagaaaggctgagctctaacctgtccacccgctctctgctcaatatatagcccagatctacactgacgtaaaggccaaagtctaaaaatacccgccaaataatcacacacgcccagcacacgcccagaaaccggtgacacactcaaaaaaatacgcgcacttcctcaaacgcccaaaactgccgtcatttccgggttcccacgctacgtcatcaaaacacgactttcaaattccgtcgaccgttaaaaacgtcacccgccccgcccctaacggtcgcccgtctctcagccaatcagcgccccgcatccccaaattcaaacacctcatttgcatattaacgcgcacaaaaagtttgaggtatattattgatgatgg

SEQ ID NO: 12 - DNA, 32788 bp, Artificial Sequence
  Description of Artificial Sequence: Synthetic polynucleotide
ccatcttcaataatatacctcaaactttttgtgcgcgttaatatgcaaatgaggcgtttgaatttggggaggaagggcggtgattggtcgagggatgagcgaccgttaggggcggggcgagtgacgttttgatgacgtggttgcgaggaggagccagtttgcaagttctcgtgggaaaagtgacgtcaaacgaggtgtggtttgaacacggaaatactcaattttcccgcgctctctgacaggaaatgaggtgtttctgggcggatgcaagtgaaaacgggccattttcgcgcgaaaactgaatgaggaagtgaaaatctgagtaatttcgcgtttatggcagggaggagtatttgccgagggccgagtagactttgaccgattacgtgggggtttcgattaccgtgtttttcacctaaatttccgcgtacggtgtcaaagtccggtgtttttacgtaggtgtcagctgatcgccagggtatttaaacctgcgctctccagtcaagaggccactcttgagtgccagcgagaagagttttctcctccgcgccgcgagtcagatctacactttgaaagtagggataacagggtaatgacattgattattgactagttgttaatagtaatcaattacggggtcattagttcatagcccatatatggagttccgcgttacataacttacggtaaatggcccgcctggctgaccgcccaacgacccccgcccattgacgtcaataatgacgtatgttcccatagtaacgccaatagggactttccattgacgtcaatgggtggagtatttacggtaaactgcccacttggcagtacatcaagtgtatcatatgccaagtccgccccctattgacgtcaatgacggtaaatggcccgcctggcattatgcccagtacatgaccttacgggactttcctacttggcagtacatctacgtattagtcatcgctattaccatggtgatgcggttttggcagtacaccaatgggcgtggatagcggtttgactcacggggatttccaagtctccaccccattgacgtcaatgggagtttgttttggcaccaaaatcaacgggactttccaaaatgtcgtaataaccccgccccgttgacgcaaatgggcggtaggcgtgtacggtgggaggtctatataagcagagctcgtttagtgaaccgtcagatcgcctggaacgccatccacgctgttttgacctccatagaagacagcgatcgcgccaccatggccgggatgttccaggcactgtccgaaggctgcacaccctatgatattaaccagatgctgaatgtcctgggagaccaccaggtctctggcctggagcagctggagagcatcatcaacttcgagaagctgaccgagtggacaagctccaatgtgatgcctatcctgtccccactgaccaagggcatcctgggcttcgtgtttaccctgacagtgccttctgagcggggcctgtcttgcatcagcgaggcagacgcaaccacaccagagtccgccaatctgggcgaggagatcctgtctcagctgtacctgtggccccgggtgacatatcactccccttcttacgcctatcaccagttcgagcggagagccaagtacaagagacacttcccaggctttggccagtctctgctgttcggctaccccgtgtacgtgttcggcgattgcgtgcagggcgactgggatgccatccggtttagatactgcgcaccacctggatatgcactgctgaggtgtaacgacaccaattattccgccctgctggcagtgggcgccctggagggccctcgcaatcaggattggctgggcgtgccaaggcagctggtgacacgcatgcaggccatccagaacgcaggcctgtgcaccctggtggcaatgctggaggagacaatcttctggctgcaggcctttctgatggccctgaccgacagcggccccaagacaaacatcatcgtggattcccagtacgtgatgggcatctccaagccttctttccaggagtttgtggactgggagaacgtgagcccagagctgaattccaccgatcagccattctggcaggcaggaatcctggcaaggaacctggtgcctatggtggccacagtgcagggccagaatctgaagtaccagggccagagcctggtcatcagcgcctccatcatcgtgtttaacctgctggagctggagggcgactatcgggacgatggcaacgtgtgggtgcacaccccactgagccccagaacactgaacgcctgggtgaaggccgtggaggagaagaagggcatcccagtgcacctggagctggcctccatgaccaatatggagctgatgtctagcatcgtgcaccagcaggtgaggacatacggacccgtgttcatgtgcctgggaggcctgctgaccatggtggcaggagccgtgtggctgacagtgcgggtgctggagctgttcagagccgcccagctggccaacgatgtggtgctgcagatcatggagctgtgcggagcagcctttcgccaggtgtgccacaccacagtgccatggcccaatgcctccctgacccccaagtggaacaatgagacaacacagcctcagatcgccaactgtagcgtgtacgacttcttcgtgtggctgcactactatagcgtgagggataccctgtggccccgcgtgacataccacatgaataagtacgcctatcacatgctggagaggcgcgccaagtataagagaggccctggcccaggcgcaaagtttgtggcagcatggaccctgaaggccgccgccggccccggccccggccagtatatcaaggctaacagtaagttcattggaatcacagagctgggacccggacctggataatgagtttaaactcccatttaaatgtgagggttaatgcttcgagcagacatgataagatacattgatgagtttggacaaaccacaactagaatgcagtgaaaaaaatgctttatttgtgaaatttgtgatgctattgctttatttgtaaccattataagctgcaataaacaagttaacaacaacaattgcattcattttatgtttcaggttcagggggagatgtgggaggttttttaaagcaagtaaaacctctacaaatgtggtaaaataactataacggtcctaaggtagcgagtgagtagtgttctggggcgggggaggacctgcatgagggccagaataactgaaatctgtgcttttctgtgtgttgcagcagcatgagcggaagcggctcctttgagggaggggtattcagcccttatctgacggggcgtctcccctcctgggcgggagtgcgtcagaatgtgatgggatccacggtggacggccggcccgtgcagcccgcgaactcttcaaccctgacctatgcaaccctgagctcttcgtcgttggacgcagctgccgccgcagctgctgcatctgccgccagcgccgtgcgcggaatggccatgggcgccggctactacggcactctggtggccaactcgagttccaccaataatcccgccagcctgaacgaggagaagctgttgctgctgatggcccagctcgaggccttgacccagcgcctgggcgagctgacccagcaggtggctcagctgcaggagcagacgcgggccgcggttgccacggtgaaatccaaataaaaaatgaatcaataaataaacggagacggttgttgattttaacacagagtctgaatctttatttgatttttcgcgcgcggtaggccctggaccaccggtctcgatcattgagcacccggtggatcttttccaggacccggtagaggtgggcttggatgttgaggtacatgggcatgagcccgtcccgggggtggaggtagctccattgcagggcctcgtgctcgggggtggtgttgtaaatcacccagtcatagcaggggcgcagggcatggtgttgcacaatatctttgaggaggagactgatggccacgggcagccctttggtgtaggtgtttacaaatctgttgagctgggagggatgcatgcggggggagatgaggtgcatcttggcctggatcttgagattggcgatgttaccgcccagatcccgcctggggttcatgttgtgcaggaccaccagcacggtgtatccggtgcacttggggaatttatcatgcaacttggaagggaaggcgtgaaagaatttggcgacgcctttgtgcccgcccaggttttccatgcactcatccatgatgatggcgatgggcccgtgggcggcggcctgggcaaagacgtttcgggggtcggacacatcatagttgtggtcctgggtgaggtcatcataggccattttaatgaatttggggcggagggtgccggactgggggacaaaggtaccctcgatcccgggggcgtagttcccctcacagatctgcatctcccaggctttgagctcggagggggggatcatgtccacctgcggggcgataaagaacacggtttccggggcgggggagatgagctgggccgaaagcaagttccggagcagctgggacttgccgcagccggtggggccgtagatgaccccgatgaccggctgcaggtggtagttgagggagagacagctgccgtcctcccggaggaggggggccacctcgttcatcatctcgcgcacgtgcatgttctcgcgcaccagttccgccaggaggcgctctccccccagggataggagctcctggagcgaggcgaagtttttcagcggcttgagtccgtcggccatgggcattttggagagggtttgttgcaagagttccaggcggtcccagagctcggtgatgtgctctacggcatctcgatccagcagacctcctcgtttcgcgggttgggacggctgcgggagtagggcaccagacgatgggcgtccagcgcagccagggtccggtccttccagggtcgcagcgtccgcgtcagggtggtctccgtcacggtgaaggggtgcgcgccgggctgggcgcttgcgagggtgcgcttcaggctcatccggctggtcgaaaaccgctcccgatcggcgccctgcgcgtcggccaggtagcaattgaccatgagttcgtagttgagcgcctcggccgcgtggcctttggcgcggagcttacctttggaagtctgcccgcaggcgggacagaggagggacttgagggcgtagagcttgggggcgaggaagacggactcgggggcgtaggcgtccgcgccgcagtgggcgcagacggtctcgcactccacgagccaggtgaggtcgggctggtcggggtcaaaaaccagtttcccgccgttctttttgatgcgtttcttacctttggtctccatgagctcgtgtccccgctgggtgacaaagaggctgtccgtgtccccgtagaccgactttatgggccggtcctcgagcggtgtgccgcggtcctcctcgtagaggaaccccgcccactccgagacgaaagcccgggtccaggccagcacgaaggaggccacgtgggacgggtagcggtcgttgtccaccagcgggtccaccttttccagggtatgcaaacacatgtccccctcgtccacatccaggaaggtgattggcttgtaagtgtaggccacgtgaccgggggtcccggccgggggggtataaaagggtgcgggtccctgctcgtcctcactgtcttccggatcgctgtccaggagcgccagctgttggggtaggtattccctctcgaaggcgggcatgacctcggcactcaggttgtcagtttctagaaacgaggaggatttgatattgacggtgccggcggagatgcctttcaagagcccctcgtccatctggtcagaaaagacgatctttttgttgtcgagcttggtggcgaaggagccgtagagggcgttggagaggagcttggcgatggagcgcatggtctggtttttttccttgtcggcgcgctccttggcggcgatgttgagctgcacgtactcgcgcgccacgcacttccattcggggaagacggtggtcagctcgtcgggcacgattctgacctgccagccccgattatgcagggtgatgaggtccacactggtggccacctcgccgcgcaggggctcattagtccagcagaggcgtccgcccttgcgcgagcagaaggggggcagggggtccagcatgacctcgtcgggggggtcggcatcgatggtgaagatgccgggcaggaggtcggggtcaaagtagctgatggaagtggccagatcgtccagggcagcttgccattcgcgcacggccagcgcgctctcgtagggactgaggggcgtgccccagggcatgggatgggtaagcgcggaggcgtacatgccgcagatgtcgtagacgtagaggggctcctcgaggatgccgatgtaggtggggtagcagcgccccccgcggatgctggcgcgcacgtagtcatacagctcgtgcgagggggcgaggagccccgggcccaggttggtgcgactgggcttttcggcgcggtagacgatctggcggaaaatggcatgcgagttggaggagatggtgggcctttggaagatgttgaagtgggcgtggggcagtccgaccgagtcgcggatgaagtgggcgtaggagtcttgcagcttggcgacgagctcggcggtgactaggacgtccagagcgcagtagtcgagggtctcctggatgatgtcatacttgagctgtcccttttgtttccacagctcgcggttgagaaggaactcttcgcggtccttccagtactcttcgagggggaacccgtcctgatctgcacggtaagagcctagcatgtagaactggttgacggccttgtaggcgcagcagcccttctccacggggagggcgtaggcctgggcggccttgcgcagggaggtgtgcgtgagggcgaaagtgtccctgaccatgaccttgaggaactggtgcttgaagtcgatatcgtcgcagcccccctgctcccagagctggaagtccgtgcgcttcttgtaggcggggttgggcaaagcgaaagtaacatcgttgaagaggatcttgcccgcgcggggcataaagttgcgagtgatgcggaaaggttggggcacctcggcccggttgttgatgacctgggcggcgagcacgatctcgtcgaagccgttgatgttgtggcccacgatgtagagttccacgaatcgcggacggcccttgacgtggggcagtttcttgagctcctcgtaggtgagctcgtcggggtcgctgagcccgtgctgctcgagcgcccagtcggcgagatgggggttggcgcggaggaaggaagtccagagatccacggccagggcggtttgcagacggtcccggtactgacggaactgctgcccgacggccattttttcgggggtgacgcagtagaaggtgcgggggtccccgtgccagcgatcccatttgagctggagggcgagatcgagggcgagctcgacgagccggtcgtccccggagagtttcatgaccagcatgaaggggacgagctgcttgccgaaggaccccatccaggtgtaggtttccacatcgtaggtgaggaagagcctttcggtgcgaggatgcgagccgatggggaagaactggatctcctgccaccaattggaggaatggctgttgatgtgatggaagtagaaatgccgacggcgcgccgaacactcgtgcttgtgtttatacaagcggccacagtgctcgcaacgctgcacgggatgcacgtgctgcacgagctgtacctgagttcctttgacgaggaatttcagtgggaagtggagtcgtggcgcctgcatctcgtgctgtactacgtcgtggtggtcggcctggccctcttctgcctcgatggtggtcatgctgacgagcccgcgcgggaggcaggtccagacctcggcgcgagcgggtcggagagcgaggacgagggcgcgcaggccggagctgtccagggtcctgagacgctgcggagtcaggtcagtgggcagcggcggcgcgcggttgacttgcaggagtttttccagggcgcgcgggaggtccagatggtacttgatctccaccgcgccattggtggcgacgtcgatggcttgcagggtcccgtgcccctggggtgtgaccaccgtcccccgtttcttcttgggcggctggggcgacgggggcggtgcctcttccatggttagaagcggcggcgaggacgcgcgccgggcggcaggggcggctcggggcccggaggcaggggcggcaggggcacgtcggcgccgcgcgcgggtaggttctggtactgcgcccggagaagactggcgtgagcgacgacgcgacggttgacgtcctggatctgacgcctctgggtgaaggccacgggacccgtgagtttgaacctgaaagagagttcgacagaatcaatctcggtatcgttgacggcggcctgccgcaggatctcttgcacgtcgcccgagttgtcctggtaggcgatctcggtcatgaactgctcgatctcctcctcttgaaggtctccgcggccggcgcgctccacggtggccgcgaggtcgttggagatgcggcccatgagctgcgagaaggcgttcatgcccgcctcgttccagacgcggctgtagaccacgacgccctcgggatcgcgggcgcgcatgaccacctgggcgaggttgagctccacgtggcgcgtgaagaccgcgtagttgcagaggcgctggtagaggtagttgagcgtggtggcgatgtgctcggtgacgaagaaatacatgatccagcggcggagcggcatctcgctgacgtcgcccagcgcctccaaacgttccatggcctcgtaaaagtccacggcgaagttgaaaaactgggagttgcgcgccgagacggtcaactcctcctccagaagacggatgagctcggcgatggtggcgcgcacctcgcgctcgaaggcccccgggagttcctccacttcctcttcttcctcctccactaacatctcttctacttcctcctcaggcggcagtggtggcgggggagggggcctgcgtcgccggcggcgcacgggcagacggtcgatgaagcgctcgatggtctcgccgcgccggcgtcgcatggtctcggtgacggcgcgcccgtcctcgcggggccgcagcgtgaagacgccgccgcgcatctccaggtggccgggggggtccccgttgggcagggagagggcgctgacgatgcatcttatcaattgccccgtagggactccgcgcaaggacctgagcgtctcgagatccacgggatctgaaaaccgctgaacgaaggcttcgagccagtcgcagtcgcaaggtaggctgagcacggtttcttctggcgggtcatgttggttgggagcggggcgggcgatgctgctggtgatgaagttgaaataggcggttctgagacggcggatggtggcgaggagcaccaggtctttgggcccggcttgctggatgcgcagacggtcggccatgccccaggcgtggtcctgacacctggccaggtccttgtagtagtcctgcatgagccgctccacgggcacctcctcctcgcccgcgcggccgtgcatgcgcgtgagcccgaagccgcgctggggctggacgagcgccaggtcggcgacgacgcgctcggcgaggatggcttgctggatctgggtgagggtggtctggaagtcatcaaagtcgacgaagcggtggtaggctccggtgttgatggtgtaggagcagttggccatgacggaccagttgacggtctggtggcccggacgcacgagctcgtggtacttgaggcgcgagtaggcgcgcgtgtcgaagatgtagtcgttgcaggtgcgcaccaggtactggtagccgatgaggaagtgcggcggcggctggcggtagagcggccatcgctcggtggcgggggcgccgggcgcgaggtcctcgagcatggtgcggtggtagccgtagatgtacctggacatccaggtgatgccggcggcggtggtggaggcgcgcgggaactcgcggacgcggttccagatgttgcgcagcggcaggaagtagttcatggtgggcacggtctggcccgtgaggcgcgcgcagtcgtggatgctctatacgggcaaaaacgaaagcggtcagcggctcgactccgtggcctggaggctaagcgaacgggttgggctgcgcgtgtaccccggttcgaatctcgaatcaggctggagccgcagctaacgtggtattggcactcccgtctcgacccaagcctgcaccaaccctccaggatacggaggcgggtcgttttgcaacttttttttggaggccggatgagactagtaagcgcggaaagcggccgaccgcgatggctcgctgccgtagtctggagaagaatcgccagggttgcgttgcggtgtgccccggttcgaggccggccggattccgcggctaacgagggcgtggctgccccgtcgtttccaagaccccatagccagccgacttctccagttacggagcgagcccctcttttgttttgtttgtttttgccagatgcatcccgtactgcggcagatgcgcccccaccaccctccaccgcaacaacagccccctccacagccggcgcttctgcccccgccccagcagcaacttccagccacgaccgccgcggccgccgtgagcggggctggacagagttatgatcaccagctggccttggaagagggcgaggggctggcgcgcctgggggcgtcgtcgccggagcggcacccgcgcgtgcagatgaaaagggacgctcgcgaggcctacgtgcccaagcagaacctgttcagagacaggagcggcgaggagcccgaggagatgcgcgcggcccggttccacgcggggcgggagctgcggcgcggcctggaccgaaagagggtgctgagggacgaggatttcgaggcggacgagctgacggggatcagccccgcgcgcgcgcacgtggccgcggccaacctggtcacggcgtacgagcagaccgtgaaggaggagagcaacttccaaaaatccttcaacaaccacgtgcgcaccctgatcgcgcgcgaggaggtgaccctgggcctgatgcacctgtgggacctgctggaggccatcgtgcagaaccccaccagcaagccgctgacggcgcagctgttcctggtggtgcagcatagtcgggacaacgaagcgttcagggaggcgctgctgaatatcaccgagcccgagggccgctggctcctggacctggtgaacattctgcagagcatcgtggtgcaggagcgcgggctgccgctgtccgagaagctggcggccatcaacttctcggtgctgagtttgggcaagtactacgctaggaagatctacaagaccccgtacgtgcccatagacaaggaggtgaagatcgacgggttttacatgcgcatgaccctgaaagtgctgaccctgagcgacgatctgggggtgtaccgcaacgacaggatgcaccgtgcggtgagcgccagcaggcggcgcgagctgagcgaccaggagctgatgcatagtctgcagcgggccctgaccggggccgggaccgagggggagagctactttgacatgggcgcggacctgcactggcagcccagccgccgggccttggaggcggcggcaggaccctacgtagaagaggtggacgatgaggtggacgaggagggcgagtacctggaagactgatggcgcgaccgtatttttgctagatgcaacaacaacagccacctcctgatcccgcgatgcgggcggcgctgcagagccagccgtccggcattaactcctcggacgattggacccaggccatgcaacgcatcatggcgctgacgacccgcaaccccgaagcctttagacagcagccccaggccaaccggctctcggccatcctggaggccgtggtgccctcgcgctccaaccccacgcacgagaaggtcctggccatcgtgaacgcgctggtggagaacaaggccatccgcggcgacgaggccggcctggtgtacaacgcgctgctggagcgcgtggcccgctacaacagcaccaacgtgcagaccaacctggaccgcatggtgaccgacgtgcgcgaggccgtggcccagcgcgagcggttccaccgcgagtccaacctgggatccatggtggcgctgaacgccttcctcagcacccagcccgccaacgtgccccggggccaggaggactacaccaacttcatcagcgccctgcgcctgatggtgaccgaggtgccccagagcgaggtgtaccagtccgggccggactacttcttccagaccagtcgccagggcttgcagaccgtgaacctgagccaggctttcaagaacttgcagggcctgtggggcgtgcaggccccggtcggggaccgcgcgacggtgtcgagcctgctgacgccgaactcgcgcctgctgctgctgctggtggcccccttcacggacagcggcagcatcaaccgcaactcgtacctgggctacctgattaacctgtaccgcgaggccatcggccaggcgcacgtggacgagcagacctaccaggagatcacccacgtgagccgcgccctgggccaggacgacccgggcaacctggaagccaccctgaactttttgctgaccaaccggtcgcagaagatcccgccccagtacgcgctcagcaccgaggaggagcgcatcctgcgttacgtgcagcagagcgtgggcctgttcctgatgcaggagggggccacccccagcgccgcgctcgacatgaccgcgcgcaacatggagcccagcatgtacgccagcaaccgcccgttcatcaataaactgatggactacttgcatcgggcggccgccatgaactctgactatttcaccaacgccatcctgaatccccactggctcccgccgccggggttctacacgggcgagtacgacatgcccgaccccaatgacgggttcctgtgggacgatgtggacagcagcgtgttctccccccgaccgggtgctaacgagcgccccttgtggaagaaggaaggcagcgaccgacgcccgtcctcggcgctgtccggccgcgagggtgctgccgcggcggtgcccgaggccgccagtcctttcccgagcttgcccttctcgctgaacagtatccgcagcagcgagctgggcaggatcacgcgcccgcgcttgctgggcgaagaggagtacttgaatgactcgctgttgagacccgagcgggagaagaacttccccaataacgggatagaaagcctggtggacaagatgagccgctggaagacgtatgcgcaggagcacagggacgatccccgggcgtcgcagggggccacgagccggggcagcgccgcccgtaaacgccggtggcacgacaggcagcggggacagatgtgggacgatgaggactccgccgacgacagcagcgtgttggacttgggtgggagtggtaacccgttcgctcacctgcgcccccgtatcgggcgcatgatgtaagagaaaccgaaaataaatgatactcaccaaggccatggcgaccagcgtgcgttcgtttcttctctgttgttgttgtatctagtatgatgaggcgtgcgtacccggagggtcctcctccctcgtacgagagcgtgatgcagcaggcgatggcggcggcggcgatgcagcccccgctggaggctccttacgtgcccccgcggtacctggcgcctacggaggggcggaacagcattcgttactcggagctggcacccttgtacgataccacccggttgtacctggtggacaacaagtcggcggacatcgcctcgctgaactaccagaacgaccacagcaacttcctgaccaccgtggtgcagaacaatgacttcacccccacggaggccagcacccagaccatcaactttgacgagcgctcgcggtggggcggccagctgaaaaccatcatgcacaccaacatgcccaacgtgaacgagttcatgtacagcaacaagttcaaggcgcgggtgatggtctcccgcaagacccccaatggggtgacagtgacagaggattatgatggtagtcaggatgagctgaagtatgaatgggtggaatttgagctgcccgaaggcaacttctcggtgaccatgaccatcgacctgatgaacaacgccatcatcgacaattacttggcggtggggcggcagaacggggtgctggagagcgacatcggcgtgaagttcgacactaggaacttcaggctgggctgggaccccgtgaccgagctggtcatgcccggggtgtacaccaacgaggctttccatcccgatattgtcttgctgcccggctgcggggtggacttcaccgagagccgcctcagcaacctgctgggcattcgcaagaggcagcccttccaggaaggcttccagatcatgtacgaggatctggaggggggcaacatccccgcgctcctggatgtcgacgcctatgagaaaagcaaggaggatgcagcagctgaagcaactgcagccgtagctaccgcctctaccgaggtcaggggcgataattttgcaagcgccgcagcagtggcagcggccgaggcggctgaaaccgaaagtaagatagtcattcagccggtggagaaggatagcaagaacaggagctacaacgtactaccggacaagataaacaccgcctaccgcagctggtacctagcctacaactatggcgaccccgagaagggcgtgcgctcctggacgctgctcaccacctcggacgtcacctgcggcgtggagcaagtctactggtcgctgcccgacatgatgcaagacccggtcaccttccgctccacgcgtcaagttagcaactacccggtggtgggcgccgagctcctgcccgtctactccaagagcttcttcaacgagcaggccgtctactcgcagcagctgcgcgccttcacctcgcttacgcacgtcttcaaccgcttccccgagaaccagatcctcgtccgcccgcccgcgcccaccattaccaccgtcagtgaaaacgttcctgctctcacagatcacgggaccctgccgctgcgcagcagtatccggggagtccagcgcgtgaccgttactgacgccagacgccgcacctgcccctacgtctacaaggccctgggcatagtcgcgccgcgcgtcctctcgagccgcaccttctaaatgtccattctcatctcgcccagtaataacaccggttggggcctgcgcgcgcccagcaagatgtacggaggcgctcgccaacgctccacgcaacaccccgtgcgcgtgcgcgggcacttccgcgctccctggggcgccctcaagggccgcgtgcggtcgcgcaccaccgtcgacgacgtgatcgaccaggtggtggccgacgcgcgcaactacacccccgccgccgcgcccgtctccaccgtggacgccgtcatcgacagcgtggtggccgacgcgcgccggtacgcccgcgccaagagccggcggcggcgcatcgcccggcggcaccggagcacccccgccatgcgcgcggcgcgagccttgctgcgcagggccaggcgcacgggacgcagggccatgctcagggcggccagacgcgcggcttcaggcgccagcgccggcaggacccggagacgcgcggccacggcggcggcagcggccatcgccagcatgtcccgcccgcggcgagggaacgtgtactgggtgcgcgacgccgccaccggtgtgcgcgtgcccgtgcgcacccgcccccctcgcacttgaagatgttcacttcgcgatgttgatgtgtcccagcggcgaggaggatgtccaagcgcaaattcaaggaagagatgctccaggtcatcgcgcctgagatctacggccctgcggtggtgaaggaggaaagaaagccccgcaaaatcaagcgggtcaaaaaggacaaaaaggaagaagaaagtgatgtggacggattggtggagtttgtgcgcgagttcgccccccggcggcgcgtgcagtggcgcgggcggaaggtgcaaccggtgctgagacccggcaccaccgtggtcttcacgcccggcgagcgctccggcaccgcttccaagcgctcctacgacgaggtgtacggggatgatgatattctggagcaggcggccgagcgcctgggcgagtttgcttacggcaagcgcagccgttccgcaccgaaggaagaggcggtgtccatcccgctggaccacggcaaccccacgccgagcctcaagcccgtgaccttgcagcaggtgctgccgaccgcggcgccgcgccgggggttcaagcgcgagggcgaggatctgtaccccaccatgcagctgatggtgcccaagcgccagaagctggaagacgtgctggagaccatgaaggtggacccggacgtgcagcccgaggtcaaggtgcggcccatcaagcaggtggccccgggcctgggcgtgcagaccgtggacatcaagattcccacggagcccatggaaacgcagaccgagcccatgatcaagcccagcaccagcaccatggaggtgcagacggatccctggatgccatcggctcctagtcgaagaccccggcgcaagtacggcgcggccagcctgctgatgcccaactacgcgctgcatccttccatcatccccacgccgggctaccgcggcacgcgcttctaccgcggtcataccagcagccgccgccgcaagaccaccactcgccgccgccgtcgccgcaccgccgctgcaaccacccctgccgccctggtgcggagagtgtaccgccgcggccgcgcacctctgaccctgccgcgcgcgcgctaccacccgagcatcgccatttaaactttcgcctgctttgcagatcaatggccctcacatgccgccttcgcgttcccattacgggctaccgaggaagaaaaccgcgccgtagaaggctggcggggaacgggatgcgtcgccaccaccaccggcggcggcgcgccatcagcaagcggttggggggaggcttcctgcccgcgctgatccccatcatcgccgcggcgatcggggcgatccccggcattgcttccgtggcggtgcaggcctctcagcgccactgagacacacttggaaacatcttgtaataaaccaatggactctgacgctcctggtcctgtgatgtgttttcgtagacagatggaagacatcaatttttcgtccctggctccgcgacacggcacgcggccgttcatgggcacctggagcgacatcggcaccagccaactgaacgggggcgccttcaattggagcagtctctggagcgggcttaagaatttcgggtccacgcttaaaacctatggcagcaaggcgtggaacagcaccacagggcaggcgctgagggataagctgaaagagcagaacttccagcagaaggtggtcgatgggctcgcctcgggcatcaacggggtggtggacctggccaaccaggccgtgcagcggcagatcaacagccgcctggacccggtgccgcccgccggctccgtggagatgccgcaggtggaggaggagctgcctcccctggacaagcggggcgagaagcgaccccgccccgatgcggaggagacgctgctgacgcacacggacgagccgcccccgtacgaggaggcggtgaaactgggtctgcccaccacgcggcccatcgcgcccctggccaccggggtgctgaaacccgaaaagcccgcgaccctggacttgcctcctccccagccttcccgcccctctacagtggctaagcccctgccgccggtggccgtggcccgcgcgcgacccgggggcaccgcccgccctcatgcgaactggcagagcactctgaacagcatcgtgggtctgggagtgcagagtgtgaagcgccgccgctgctattaaacctaccgtagcgcttaacttgcttgtctgtgtgtgtatgtattatgtcgccgccgccgctgtccaccagaaggaggagtgaagaggcgcgtcgccgagttgcaagatggccaccccatcgatgctgccccagtgggcgtacatgcacatcgccggacaggacgcttcggagtacctgagtccgggtctggtgcagtttgcccgcgccacagacacctacttcagtctggggaacaagtttaggaaccccacggtggcgcccacgcacgatgtgaccaccgaccgcagccagcggctgacgctgcgcttcgtgcccgtggaccgcgaggacaacacctactcgtacaaagtgcgctacacgctggccgtgggcgacaaccgcgtgctggacatggccagcacctactttgacatccgcggcgtgctggatcggggccctagcttcaaaccctactccggcaccgcctacaacagtctggcccccaagggagcacccaacacttgtcagtggacatataaagccgatggtgaaactgccacagaaaaaacctatacatatggaaatgcacccgtgcagggcattaacatcacaaaagatggtattcaacttggaactgacaccgatgatcagccaatctacgcagataaaacctatcagcctgaacctcaagtgggtgatgctgaatggcatgacatcactggtactgatgaaaagtatggaggcagagctcttaagcctgataccaaaatgaagccttgttatggttcttttgccaagcctactaataaagaaggaggtcaggcaaatgtgaaaacaggaacaggcactactaaagaatatgacatagacatggctttctttgacaacagaagtgcggctgctgctggcctagctccagaaattgttttgtatactgaaaatgtggatttggaaactccagatacccatattgtatacaaagcaggcacagatgacagcagctcttctattaatttgggtcagcaagccatgcccaacagacctaactacattggtttcagagacaactttatcgggctcatgtactacaacagcactggcaatatgggggtgctggccggtcaggcttctcagctgaatgctgtggttgacttgcaagacagaaacaccgagctgtcctaccagctcttgcttgactctctgggtgacagaacccggtatttcagtatgtggaatcaggcggtggacagctatgatcctgatgtgcgcattattgaaaatcatggtgtggaggatgaacttcccaactattgtttccctctggatgctgttggcagaacagatacttatcagggaattaaggctaatggaactgatcaaaccacatggaccaaagatgacagtgtcaatgatgctaatgagataggcaagggtaatccattcgccatggaaatcaacatccaagccaacctgtggaggaacttcctctacgccaacgtggccctgtacctgcccgactcttacaagtacacgccggccaatgttaccctgcccaccaacaccaacacctacgattacatgaacggccgggtggtggcgccctcgctggtggactcctacatcaacatcggggcgcgctggtcgctggatcccatggacaacgtgaaccccttcaaccaccaccgcaatgcggggctgcgctaccgctccatgctcctgggcaacgggcgctacgtgcccttccacatccaggtgccccagaaatttttcgccatcaagagcctcctgctcctgcccgggtcctacacctacgagtggaacttccgcaaggacgtcaacatgatcctgcagagctccctcggcaacgacctgcgcacggacggggcctccatctccttcaccagcatcaacctctacgccaccttcttccccatggcgcacaacacggcctccacgctcgaggccatgctgcgcaacgacaccaacgaccagtccttcaacgactacctctcggcggccaacatgctctaccccatcccggccaacgccaccaacgtgcccatctccatcccctcgcgcaactgggccgccttccgcggctggtccttcacgcgtctcaagaccaaggagacgccctcgctgggctccgggttcgacccctacttcgtctactcgggctccatcccctacctcgacggcaccttctacctcaaccacaccttcaagaaggtctccatcaccttcgactcctccgtcagctggcccggcaacgaccggctcctgacgcccaacgagttcgaaatcaagcgcaccgtcgacggcgagggctacaacgtggcccagtgcaacatgaccaaggactggttcctggtccagatgctggcccactacaacatcggctaccagggcttctacgtgcccgagggctacaaggaccgcatgtactccttcttccgcaacttccagcccatgagccgccaggtggtggacgaggtcaactacaaggactaccaggccgtcaccctggcctaccagcacaacaactcgggcttcgtcggctacctcgcgcccaccatgcgccagggccagccctaccccgccaactacccctacccgctcatcggcaagagcgccgtcaccagcgtcacccagaaaaagttcctctgcgacagggtcatgtggcgcatccccttctccagcaacttcatgtccatgggcgcgctcaccgacctcggccagaacatgctctatgccaactccgcccacgcgctagacatgaatttcgaagtcgaccccatggatgagtccacccttctctatgttgtcttcgaagtcttcgacgtcgtccgagtgcaccagccccaccgcggcgtcatcgaggccgtctacctgcgcacccccttctcggccggtaacgccaccacctaagctcttgcttcttgcaagccatggccgcgggctccggcgagcaggagctcagggccatcatccgcgacctgggctgcgggccctacttcctgggcaccttcgataagcgcttcccgggattcatggccccgcacaagctggcctgcgccatcgtcaacacggccggccgcgagaccgggggcgagcactggctggccttcgcctggaacccgcgctcgaacacctgctacctcttcgaccccttcgggttctcggacgagcgcctcaagcagatctaccagttcgagtacgagggcctgctgcgccgcagcgccctggccaccgaggaccgctgcgtcaccctggaaaagtccacccagaccgtgcagggtccgcgctcggccgcctgcgggctcttctgctgcatgttcctgcacgccttcgtgcactggcccgaccgccccatggacaagaaccccaccatgaacttgctgacgggggtgcccaacggcatgctccagtcgccccaggtggaacccaccctgcgccgcaaccaggaggcgctctaccgcttcctcaactcccactccgcctactttcgctcccaccgcgcgcgcatcgagaaggccaccgccttcgaccgcatgaatcaagacatgtaaaccgtgtgtgtatgttaaatgtctttaataaacagcactttcatgttacacatgcatctgagatgatttatttagaaatcgaaagggttctgccgggtctcggcatggcccgcgggcagggacacgttgcggaactggtacttggccagccacttgaactcggggatcagcagtttgggcagcggggtgtcggggaaggagtcggtccacagcttccgcgtcagttgcagggcgcccagcaggtcgggcgcggagatcttgaaatcgcagttgggacccgcgttctgcgcgcgggagttgcggtacacggggttgcagcactggaacaccatcagggccgggtgcttcacgctcgccagcaccgtcgcgtcggtgatgctctccacgtcgaggtcctcggcgttggccatcccgaagggggtcatcttgcaggtctgccttcccatggtgggcacgcacccgggcttgtggttgcaatcgcagtgcagggggatcagcatcatctgggcctggtcggcgttcatccccgggtacatggccttcatgaaagcctccaattgcctgaacgcctgctgggccttggctccctcggtgaagaagaccccgcaggacttgctagagaactggttggtggcgcacccggcgtcgtgcacgcagcagcgcgcgtcgttgttggccagctgcaccacgctgcgcccccagcggttctgggtgatcttggcccggtcggggttctccttcagcgcgcgctgcccgttctcgctcgccacatccatctcgatcatgtgctccttctggatcatggtggtcccgtgcaggcaccgcagcttgccctcggcctcggtgcacccgtgcagccacagcgcgcacccggtgcactcccagttcttgtgggcgatctgggaatgcgcgtgcacgaagccctgcaggaagcggcccatcatggtggtcagggtcttgttgctagtgaaggtcagcggaatgccgcggtgctcctcgttgatgtacaggtggcagatgcggcggtacacctcgccctgctcgggcatcagctggaagttggctttcaggtcggtctccacgcggtagcggtccatcagcatagtcatgatttccatacccttctcccaggccgagacgatgggcaggctcatagggttcttcaccatcatcttagcgctagcagccgcggccagggggtcgctctcgtccagggtctcaaagctccgcttgccgtccttctcggtgatccgcaccggggggtagctgaagcccacggccgccagctcctcctcggcctgtctttcgtcctcgctgtcctggctgacgtcctgcaggaccacatgcttggtcttgcggggtttcttcttgggcggcagcggcggcggagatgttggagatggcgagggggagcgcgagttctcgctcaccactactatctcttcctcttcttggtccgaggccacgcggcggtaggtatgtctcttcgggggcagaggcggaggcgacgggctctcgccgccgcgacttggcggatggctggcagagccccttccgcgttcgggggtgcgctcccggcggcgctctgactgacttcctccgcggccggccattgtgttctcctagggaggaacaacaagcatggagactcagccatcgccaacctcgccatctgcccccaccgccgacgagaagcagcagcagcagaatgaaagcttaaccgccccgccgcccagccccgccacctccgacgcggccgtcccagacatgcaagagatggaggaatccatcgagattgacctgggctatgtgacgcccgcggagcacgaggaggagctggcagtgcgcttttcacaagaagagatacaccaagaacagccagagcaggaagcagagaatgagcagagtcaggctgggctcgagcatgacggcgactacctccacctgagcgggggggaggacgcgctcatcaagcatctggcccggcaggccaccatcgtcaaggatgcgctgctcgaccgcaccgaggtgcccctcagcgtggaggagctcagccgcgcctacgagttgaacctcttctcgccgcgcgtgccccccaagcgccagcccaatggcacctgcgagcccaacccgcgcctcaacttctacccggtcttcgcggtgcccgaggccctggccacctaccacatctttttcaagaaccaaaagatccccgtctcctgccgcgccaaccgcacccgcgccgacgcccttttcaacctgggtcccggcgcccgcctacctgatatcgcctccttggaagaggttcccaagatcttcgagggtctgggcagcgacgagactcgggccgcgaacgctctgcaaggagaaggaggagagcatgagcaccacagcgccctggtcgagttggaaggcgacaacgcgcggctggcggtgctcaaacgcacggtcgagctgacccatttcgcctacccggctctgaacctgccccccaaagtcatgagcgcggtcatggaccaggtgctcatcaagcgcgcgtcgcccatctccgaggacgagggcatgcaagactccgaggagggcaagcccgtggtcagcgacgagcagctggcccggtggctgggtcctaatgctagtccccagagtttggaagagcggcgcaaactcatgatggccgtggtcctggtgaccgtggagctggagtgcctgcgccgcttcttcgccgacgcggagaccctgcgcaaggtcgaggagaacctgcactacctcttcaggcacgggttcgtgcgccaggcctgcaagatctccaacgtggagctgaccaacctggtctcctacatgggcatcttgcacgagaaccgcctggggcagaacgtgctgcacaccaccctgcgcggggaggcccggcgcgactacatccgcgactgcgtctacctctacctctgccacacctggcagacgggcatgggcgtgtggcagcagtgtctggaggagcagaacctgaaagagctctgcaagctcctgcagaagaacctcaagggtctgtggaccgggttcgacgagcgcaccaccgcctcggacctggccgacctcattttccccgagcgcctcaggctgacgctgcgcaacggcctgcccgactttatgagccaaagcatgttgcaaaactttcgctctttcatcctcgaacgctccggaatcctgcccgccacctgctccgcgctgccctcggacttcgtgccgctgaccttccgcgagtgccccccgccgctgtggagccactgctacctgctgcgcctggccaactacctggcctaccactcggacgtgatcgaggacgtcagcggcgagggcctgctcgagtgccactgccgctgcaacctctgcacgccgcaccgctccctggcctgcaacccccagctgctgagcgagacccagatcatcggcaccttcgagttgcaagggcccagcgaaggcgagggttcagccgccaaggggggtctgaaactcaccccggggctgtggacctcggcctacttgcgcaagttcgtgcccgaggactaccatcccttcgagatcaggttctacgaggaccaatcccatccgcccaaggccgagctgtcggcctgcgtcatcacccagggggcgatcctggcccaattgcaagccatccagaaatcccgccaagaattcttgctgaaaaagggccgcggggtctacctcgacccccagaccggtgaggagctcaaccccggcttcccccaggatgccccgaggaaacaagaagctgaaagtggagctgccgcccgtggaggatttggaggaagactgggagaacagcagtcaggcagaggaggaggagatggaggaagactgggacagcactcaggcagaggaggacagcctgcaagacagtctggaggaagacgaggaggaggcagaggaggaggtggaagaagcagccgccgccagaccgtcgtcctcggcgggggagaaagcaagcagcacggataccatctccgctccgggtcggggtcccgctcgaccacacagtagatgggacgagaccggacgattcccgaaccccaccacccagaccggtaagaaggagcggcagggatacaagtcctggcgggggcacaaaaacgccatcgtctcctgcttgcaggcctgcgggggcaacatctccttcacccggcgctacctgctcttccaccgcggggtgaactttccccgcaacatcttgcattactaccgtcacctccacagcccctactacttccaagaagaggcagcagcagcagaaaaagaccagcagaaaaccagcagctagaaaatccacagcggcggcagcaggtggactgaggatcgcggcgaacgagccggcgcaaacccgggagctgaggaaccggatctttcccaccctctatgccatcttccagcagagtcgggggcaggagcaggaactgaaagtcaagaaccgttctctgcgctcgctcacccgcagttgtctgtatcacaagagcgaagaccaacttcagcgcactctcgaggacgccgaggctctcttcaacaagtactgcgcgctcactcttaaagagtagcccgcgcccgcccagtcgcagaaaaaggcgggaattacgtcacctgtgcccttcgccctagccgcctccacccatcatcatgagcaaagagattcccacgccttacatgtggagctaccagccccagatgggcctggccgccggtgccgcccaggactactccacccgcatgaattggctcagcgccgggcccgcgatgatctcacgggtgaatgacatccgcgcccaccgaaaccagatactcctagaacagtcagcgctcaccgccacgccccgcaatcacctcaatccgcgtaattggcccgccgccctggtgtaccaggaaattccccagcccacgaccgtactacttccgcgagacgcccaggccgaagtccagctgactaactcaggtgtccagctggcgggcggcgccaccctgtgtcgtcaccgccccgctcagggtataaagcggctggtgatccggggcagaggcacacagctcaacgacgaggtggtgagctcttcgctgggtctgcgacctgacggagtcttccaactcgccggatcggggagatcttccttcacgcctcgtcaggccgtcctgactttggagagttcgtcctcgcagccccgctcgggtggcatcggcactctccagttcgtggaggagttcactccctcggtctacttcaaccccttctccggctcccccggccactacccggacgagttcatcccgaacttcgacgccatcagcgagtcggtggacggctacgattgaatgtcccatggtggcgcagctgacctagctcggcttcgacacctggaccactgccgccgcttccgctgcttcgctcgggatctcgccgagtttgcctactttgagctgcccgaggagcaccctcagggcccggcccacggagtgcggatcgtcgtcgaagggggcctcgactcccacctgcttcggatcttcagccagcgtccgatcctggtcgagcgcgagcaaggacagacccttctgactctgtactgcatctgcaaccaccccggcctgcatgaaagtctttgttgtctgctgtgtactgagtataataaaagctgagatcagcgactactccggacttccgtgtgttcctgaatccatcaaccagtctttgttcttcaccgggaacgagaccgagctccagctccagtgtaagccccacaagaagtacctcacctggctgttccagggctccccgatcgccgttgtcaaccactgcgacaacgacggagtcctgctgagcggccctgccaaccttactttttccacccgcagaagcaagctccagctcttccaacccttcctccccgggacctatcagtgcgtctcgggaccctgccatcacaccttccacctgatcccgaataccacagcgtcgctccccgctactaacaaccaaactaacctccaccaacgccaccgtcgcgacggccacaatacatgcccatattagactatgaggccgagccacagcgacccatgctccccgctattagttacttcaatctaaccggcggagatgactgacccactggccaacaacaacgtcaacgaccttctcctggacatggacggccgcgcctcggagcagcgactcgcccaacttcgcattcgccagcagcaggagagagccgtcaaggagctgcaggatgcggtggccatccaccagtgcaagagaggcatcttctgcctggtgaaacaggccaagatctcctacgaggtcactccaaacgaccatcgcctctcctacgagctcctgcagcagcgccagaagttcacctgcctggtcggagtcaaccccatcgtcatcacccagcagtctggcgataccaaggggtgcatccactgctcctgcgactcccccgactgcgtccacactctgatcaagaccctctgcggcctccgcgacctcctccccatgaactaatcacccccttatccagtgaaataaagatcatattgatgatgattttacagaaataaaaaataatcatttgatttgaaataaagatacaatcatattgatgatttgagtttaacaaaaaaataaagaatcacttacttgaaatctgataccaggtctctgtccatgttttctgccaacaccacttcactcccctcttcccagctctggtactgcaggccccggcgggctgcaaacttcctccacacgctgaaggggatgtcaaattcctcctgtccctcaatcttcattttatcttctatcagatgtccaaaaagcgcgtccgggtggatgatgacttcgaccccgtctacccctacgatgcagacaacgcaccgaccgtgcccttcatcaacccccccttcgtctcttcagatggattccaagagaagcccctgggggtgttgtccctgcgactggccgaccccgtcaccaccaagaacggggaaatcaccctcaagctgggagagggggtggacctcgattcctcgggaaaactcatctccaacacggccaccaaggccgccgcccctctcagtttttccaacaacaccatttcccttaacatggatcaccccttttacactaaagatggaaaattatccttacaagtttctccaccattaaatatactgagaacaagcattctaaacacactagctttaggttttggatcaggtttaggactccgtggctctgccttggcagtacagttagtctctccacttacatttgatactgatggaaacataaagcttaccttagacagaggtttgcatgttacaacaggagatgcaattgaaagcaacataagctgggctaaaggtttaaaatttgaagatggagccatagcaaccaacattggaaatgggttagagtttggaagcagtagtacagaaacaggtgttgatgatgcttacccaatccaagttaaacttggatctggccttagctttgacagtacaggagccataatggctggtaacaaagaagacgataaactcactttgtggacaacacctgatccatcaccaaactgtcaaatactcgcagaaaatgatgcaaaactaacactttgcttgactaaatgtggtagtcaaatactggccactgtgtcagtcttagttgtaggaagtggaaacctaaaccccattactggcaccgtaagcagtgctcaggtgtttctacgttttgatgcaaacggtgttcttttaacagaacattctacactaaaaaaatactgggggtataggcagggagatagcatagatggcactccatataccaatgctgtaggattcatgcccaatttaaaagcttatccaaagtcacaaagttctactactaaaaataatatagtagggcaagtatacatgaatggagatgtttcaaaacctatgcttctcactataaccctcaatggtactgatgacagcaacagtacatattcaatgtcattttcatacacctggactaatggaagctatgttggagcaacatttggggctaactcttataccttctcatacatcgcccaagaatgaacactgtatcccaccctgcatgccaacccttcccaccccactctgtggaacaaactctgaaacacaaaataaaataaagttcaagtgttttattgattcaacagttttacaggattcgagcagttatttttcctccaccctcccaggacatggaatacaccaccctctccccccgcacagccttgaacatctgaatgccattggtgatggacatgcttttggtctccacgttccacacagtttcagagcgagccagtctcgggtcggtcagggagatgaaaccctccgggcactcccgcatctgcacctcacagctcaacagctgaggattgtcctcggtggtcgggatcacggttatctggaagaagcagaagagcggcggtgggaatcatagtccgcgaacgggatcggccggtggtgtcgcatcaggccccgcagcagtcgctgccgccgccgctccgtcaagctgctgctcagggggtccgggtccagggactccctcagcatgatgcccacggccctcagcatcagtcgtctggtgcggcgggcgcagcagcgcatgcggatctcgctcaggtcgctgcagtacgtgcaacacagaaccaccaggttgttcaacagtccatagttcaacacgctccagccgaaactcatcgcgggaaggatgctacccacgtggccgtcgtaccagatcctcaggtaaatcaagtggtgccccctccagaacacgctgcccacgtacatgatctccttgggcatgtggcggttcaccacctcccggtaccacatcaccctctggttgaacatgcagccccggatgatcctgcggaaccacagggccagcaccgccccgcccgccatgcagcgaagagaccccgggtcccggcaatggcaatggaggacccaccgctcgtacccgtggatcatctgggagctgaacaagtctatgttggcacagcacaggcatatgctcatgcatctcttcagcactctcaactcctcgggggtcaaaaccatatcccagggcacggggaactcttgcaggacagcgaaccccgcagaacagggcaatcctcgcacagaacttacattgtgcatggacagggtatcgcaatcaggcagcaccgggtgatcctccaccagagaagcgcgggtctcggtctcctcacagcgtggtaagggggccggccgatacgggtgatggcgggacgcggctgatcgtgttcgcgaccgtgtcatgatgcagttgctttcggacattttcgtacttgctgtagcagaacctggtccgggcgctgcacaccgatcgccggcggcggtctcggcgcttggaacgctcggtgttgaaattgtaaaacagccactctctcagaccgtgcagcagatctagggcctcaggagtgatgaagatcccatcatgcctgatggctctgatcacatcgaccaccgtggaatgggccagacccagccagatgatgcaattttgttgggtttcggtgacggcgggggagggaagaacaggaagaaccatgattaacttttaatccaaacggtctcggagtacttcaaaatgaagatcgcggagatggcacctctcgcccccgctgtgttggtggaaaataacagccaggtcaaaggtgatacggttctcgagatgttccacggtggcttccagcaaagcctccacgcgcacatccagaaacaagacaatagcgaaagcgggagggttctctaattcctcaatcatcatgttacactcctgcaccatccccagataattttcatttttccagccttgaatgattcgaactagttcgtgaggtaaatccaagccagccatgataaagagctcgcgcagagcgccctccaccggcattcttaagcacaccctcataattccaagatattctgctcctggttcacctgcagcagattgacaagcggaatatcaaaatctctgccgcgatccctgagctcctccctcagcaataactgtaagtactctttcatatcctctccgaaatttttagccataggaccaccaggaataagattagggcaagccacagtacagataaaccgaagtcctccccagtgagcattgccaaatgcaagactgctataagcatgctggctagacccggtgatatcttccagataactggacagaaaatcgcccaggcaatttttaagaaaatcaacaaaagaaaaatcctccaggtggacgtttagagcctcgggaacaacgatgaagtaaatgcaagcggtgcgttccagcatggttagttagctgatctgtagaaaaaacaaaaatgaacattaaaccatgctagcctggcgaacaggtgggtaaatcgttctctccagcaccaggcaggccacggggtctccggcgcgaccctcgtaaaaattgtcgctatgattgaaaaccatcacagagagacgttcccggtggccggcgtgaatgattcgacaagatgaatacacccccggaacattggcgtccgcgagtgaaaaaaagcgcccgaggaagcaataaggcactacaatgctcagtctcaagtccagcaaagcgatgccatgcggatgaagcacaaaattctcaggtgcgtacaaaatgtaattactcccctcctgcacaggcagcaaagcccccgatccctccaggtacacatacaaagcctcagcgtccatagcttaccgagcagcagcacacaacaggcgcaagagtcagagaaaggctgagctctaacctgtccacccgctctctgctcaatatatagcccagatctacactgacgtaaaggccaaagtctaaaaatacccgccaaataatcacacacgcccagcacacgcccagaaaccggtgacacactcaaaaaaatacgcgcacttcctcaaacgcccaaaactgccgtcatttccgggttcccacgctacgtcatcaaaacacgactttcaaattccgtcgaccgttaaaaacgtcacccgccccgcccctaacggtcgcccgtctctcagccaatcagcgccccgcatccccaaattcaaacacctcatttgcatattaacgcgcacaaaaagtttgaggtatattattgatgatgg

SEQ ID NO: 13 - DNA, 30684 bp, Artificial Sequence
  Description of Artificial Sequence: Synthetic polynucleotide
ccatcttcaataatatacctcaaactttttgtgcgcgttaatatgcaaatgaggcgtttgaatttggggaggaagggcggtgattggtcgagggatgagcgaccgttaggggcggggcgagtgacgttttgatgacgtggttgcgaggaggagccagtttgcaagttctcgtgggaaaagtgacgtcaaacgaggtgtggtttgaacacggaaatactcaattttcccgcgctctctgacaggaaatgaggtgtttctgggcggatgcaagtgaaaacgggccattttcgcgcgaaaactgaatgaggaagtgaaaatctgagtaatttcgcgtttatggcagggaggagtatttgccgagggccgagtagactttgaccgattacgtgggggtttcgattaccgtgtttttcacctaaatttccgcgtacggtgtcaaagtccggtgtttttacgtaggtgtcagctgatcgccagggtatttaaacctgcgctctccagtcaagaggccactcttgagtgccagcgagaagagttttctcctccgcgccgcgagtcagatctacactttgaaagtagggataacagggtaatgacattgattattgactagttgttaatagtaatcaattacggggtcattagttcatagcccatatatggagttccgcgttacataacttacggtaaatggcccgcctggctgaccgcccaacgacccccgcccattgacgtcaataatgacgtatgttcccatagtaacgccaatagggactttccattgacgtcaatgggtggagtatttacggtaaactgcccacttggcagtacatcaagtgtatcatatgccaagtccgccccctattgacgtcaatgacggtaaatggcccgcctggcattatgcccagtacatgaccttacgggactttcctacttggcagtacatctacgtattagtcatcgctattaccatggtgatgcggttttggcagtacaccaatgggcgtggatagcggtttgactcacggggatttccaagtctccaccccattgacgtcaatgggagtttgttttggcaccaaaatcaacgggactttccaaaatgtcgtaataaccccgccccgttgacgcaaatgggcggtaggcgtgtacggtgggaggtctatataagcagagctcgtttagtgaaccgtcagatcgcctggaacgccatccacgctgttttgacctccatagaagacagcgatcgcgccaccatggtgagcaagggcgaggagctgttcaccggggtggtgcccatcctggtcgagctggacggcgacgtaaacggccacaagttcagcgtgtccggcgagggcgagggcgatgccacctacggcaagctgaccctgaagttcatctgcaccaccggcaagctgcccgtgccctggcccaccctcgtgaccaccctgacctacggcgtgcagtgcttcagccgctaccccgaccacatgaagcagcacgacttcttcaagtccgccatgcccgaaggctacgtccaggagcgcaccatcttcttcaaggacgacggcaactacaagacccgcgccgaggtgaagttcgagggcgacaccctggtgaaccgcatcgagctgaagggcatcgacttcaaggaggacggcaacatcctggggcacaagctggagtacaactacaacagccacaacgtctatatcatggccgacaagcagaagaacggcatcaaggtgaacttcaagatccgccacaacatcgaggacggcagcgtgcagctcgccgaccactaccagcagaacacccccatcggcgacggccccgtgctgctgcccgacaaccactacctgagcacccagtccgccctgagcaaagaccccaacgagaagcgcgatcacatggtcctgctggagttcgtgaccgccgccgggatcactctcggcatggacgagctttacaagtagtgagtttaaactcccatttaaatgtgagggttaatgcttcgagcagacatgataagatacattgatgagtttggacaaaccacaactagaatgcagtgaaaaaaatgctttatttgtgaaatttgtgatgctattgctttatttgtaaccattataagctgcaataaacaagttaacaacaacaattgcattcattttatgtttcaggttcagggggagatgtgggaggttttttaaagcaagtaaaacctctacaaatgtggtaaaataactataacggtcctaaggtagcgagtgagtagtgttctggggcgggggaggacctgcatgagggccagaataactgaaatctgtgcttttctgtgtgttgcagcagcatgagcggaagcggctcctttgagggaggggtattcagcccttatctgacggggcgtctcccctcctgggcgggagtgcgtcagaatgtgatgggatccacggtggacggccggcccgtgcagcccgcgaactcttcaaccctgacctatgcaaccctgagctcttcgtcgttggacgcagctgccgccgcagctgctgcatctgccgccagcgccgtgcgcggaatggccatgggcgccggctactacggcactctggtggccaactcgagttccaccaataatcccgccagcctgaacgaggagaagctgttgctgctgatggcccagctcgaggccttgacccagcgcctgggcgagctgacccagcaggtggctcagctgcaggagcagacgcgggccgcggttgccacggtgaaatccaaataaaaaatgaatcaataaataaacggagacggttgttgattttaacacagagtctgaatctttatttgatttttcgcgcgcggtaggccctggaccaccggtctcgatcattgagcacccggtggatcttttccaggacccggtagaggtgggcttggatgttgaggtacatgggcatgagcccgtcccgggggtggaggtagctccattgcagggcctcgtgctcgggggtggtgttgtaaatcacccagtcatagcaggggcgcagggcatggtgttgcacaatatctttgaggaggagactgatggccacgggcagccctttggtgtaggtgtttacaaatctgttgagctgggagggatgcatgcggggggagatgaggtgcatcttggcctggatcttgagattggcgatgttaccgcccagatcccgcctggggttcatgttgtgcaggaccaccagcacggtgtatccggtgcacttggggaatttatcatgcaacttggaagggaaggcgtgaaagaatttggcgacgcctttgtgcccgcccaggttttccatgcactcatccatgatgatggcgatgggcccgtgggcggcggcctgggcaaagacgtttcgggggtcggacacatcatagttgtggtcctgggtgaggtcatcataggccattttaatgaatttggggcggagggtgccggactgggggacaaaggtaccctcgatcccgggggcgtagttcccctcacagatctgcatctcccaggctttgagctcggagggggggatcatgtccacctgcggggcgataaagaacacggtttccggggcgggggagatgagctgggccgaaagcaagttccggagcagctgggacttgccgcagccggtggggccgtagatgaccccgatgaccggctgcaggtggtagttgagggagagacagctgccgtcctcccggaggaggggggccacctcgttcatcatctcgcgcacgtgcatgttctcgcgcaccagttccgccaggaggcgctctccccccagggataggagctcctggagcgaggcgaagtttttcagcggcttgagtccgtcggccatgggcattttggagagggtttgttgcaagagttccaggcggtcccagagctcggtgatgtgctctacggcatctcgatccagcagacctcctcgtttcgcgggttgggacggctgcgggagtagggcaccagacgatgggcgtccagcgcagccagggtccggtccttccagggtcgcagcgtccgcgtcagggtggtctccgtcacggtgaaggggtgcgcgccgggctgggcgcttgcgagggtgcgcttcaggctcatccggctggtcgaaaaccgctcccgatcggcgccctgcgcgtcggccaggtagcaattgaccatgagttcgtagttgagcgcctcggccgcgtggcctttggcgcggagcttacctttggaagtctgcccgcaggcgggacagaggagggacttgagggcgtagagcttgggggcgaggaagacggactcgggggcgtaggcgtccgcgccgcagtgggcgcagacggtctcgcactccacgagccaggtgaggtcgggctggtcggggtcaaaaaccagtttcccgccgttctttttgatgcgtttcttacctttggtctccatgagctcgtgtccccgctgggtgacaaagaggctgtccgtgtccccgtagaccgactttatgggccggtcctcgagcggtgtgccgcggtcctcctcgtagaggaaccccgcccactccgagacgaaagcccgggtccaggccagcacgaaggaggccacgtgggacgggtagcggtcgttgtccaccagcgggtccaccttttccagggtatgcaaacacatgtccccctcgtccacatccaggaaggtgattggcttgtaagtgtaggccacgtgaccgggggtcccggccgggggggtataaaagggtgcgggtccctgctcgtcctcactgtcttccggatcgctgtccaggagcgccagctgttggggtaggtattccctctcgaaggcgggcatgacctcggcactcaggttgtcagtttctagaaacgaggaggatttgatattgacggtgccggcggagatgcctttcaagagcccctcgtccatctggtcagaaaagacgatctttttgttgtcgagcttggtggcgaaggagccgtagagggcgttggagaggagcttggcgatggagcgcatggtctggtttttttccttgtcggcgcgctccttggcggcgatgttgagctgcacgtactcgcgcgccacgcacttccattcggggaagacggtggtcagctcgtcgggcacgattctgacctgccagccccgattatgcagggtgatgaggtccacactggtggccacctcgccgcgcaggggctcattagtccagcagaggcgtccgcccttgcgcgagcagaaggggggcagggggtccagcatgacctcgtcgggggggtcggcatcgatggtgaagatgccgggcaggaggtcggggtcaaagtagctgatggaagtggccagatcgtccagggcagcttgccattcgcgcacggccagcgcgcgctcgtagggactgaggggcgtgccccagggcatgggatgggtaagcgcggaggcgtacatgccgcagatgtcgtagacgtagaggggctcctcgaggatgccgatgtaggtggggtagcagcgccccccgcggatgctggcgcgcacgtagtcatacagctcgtgcgagggggcgaggagccccgggcccaggttggtgcgactgggcttttcggcgcggtagacgatctggcggaaaatggcatgcgagttggaggagatggtgggcctttggaagatgttgaagtgggcgtggggcagtccgaccgagtcgcggatgaagtgggcgtaggagtcttgcagcttggcgacgagctcggcggtgactaggacgtccagagcgcagtagtcgagggtctcctggatgatgtcatacttgagctgtcccttttgtttccacagctcgcggttgagaaggaactcttcgcggtccttccagtactcttcgagggggaacccgtcctgatctgcacggtaagagcctagcatgtagaactggttgacggccttgtaggcgcagcagcccttctccacggggagggcgtaggcctgggcggccttgcgcagggaggtgtgcgtgagggcgaaagtgtccctgaccatgaccttgaggaactggtgcttgaagtcgatatcgtcgcagcccccctgctcccagagctggaagtccgtgcgcttcttgtaggcggggttgggcaaagcgaaagtaacatcgttgaagaggatcttgcccgcgcggggcataaagttgcgagtgatgcggaaaggttggggcacctcggcccggttgttgatgacctgggcggcgagcacgatctcgtcgaagccgttgatgttgtggcccacgatgtagagttccacgaatcgcggacggcccttgacgtggggcagtttcttgagctcctcgtaggtgagctcgtcggggtcgctgagcccgtgctgctcgagcgcccagtcggcgagatgggggttggcgcggaggaaggaagtccagagatccacggccagggcggtttgcagacggtcccggtactgacggaactgctgcccgacggccattttttcgggggtgacgcagtagaaggtgcgggggtccccgtgccagcgatcccatttgagctggagggcgagatcgagggcgagctcgacgagccggtcgtccccggagagtttcatgaccagcatgaaggggacgagctgcttgccgaaggaccccatccaggtgtaggtttccacatcgtaggtgaggaagagcctttcggtgcgaggatgcgagccgatggggaagaactggatctcctgccaccaattggaggaatggctgttgatgtgatggaagtagaaatgccgacggcgcgccgaacactcgtgcttgtgtttatacaagcggccacagtgctcgcaacgctgcacgggatgcacgtgctgcacgagctgtacctgagttcctttgacgaggaatttcagtgggaagtggagtcgtggcgcctgcatctcgtgctgtactacgtcgtggtggtcggcctggccctcttctgcctcgatggtggtcatgctgacgagcccgcgcgggaggcaggtccagacctcggcgcgagcgggtcggagagcgaggacgagggcgcgcaggccggagctgtccagggtcctgagacgctgcggagtcaggtcagtgggcagcggcggcgcgcggttgacttgcaggagtttttccagggcgcgcgggaggtccagatggtacttgatctccaccgcgccattggtggcgacgtcgatggcttgcagggtcccgtgcccctggggtgtgaccaccgtcccccgtttcttcttgggcggctggggcgacgggggcggtgcctcttccatggttagaagcggcggcgaggacgcgcgccgggcggcaggggcggctcggggcccggaggcaggggcggcaggggcacgtcggcgccgcgcgcgggtaggttctggtactgcgcccggagaagactggcgtgagcgacgacgcgacggttgacgtcctggatctgacgcctctgggtgaaggccacgggacccgtgagtttgaacctgaaagagagttcgacagaatcaatctcggtatcgttgacggcggcctgccgcaggatctcttgcacgtcgcccgagttgtcctggtaggcgatctcggtcatgaactgctcgatctcctcctcttgaaggtctccgcggccggcgcgctccacggtggccgcgaggtcgttggagatgcggcccatgagctgcgagaaggcgttcatgcccgcctcgttccagacgcggctgtagaccacgacgccctcgggatcgcgggcgcgcatgaccacctgggcgaggttgagctccacgtggcgcgtgaagaccgcgtagttgcagaggcgctggtagaggtagttgagcgtggtggcgatgtgctcggtgacgaagaaatacatgatccagcggcggagcggcatctcgctgacgtcgcccagcgcctccaaacgttccatggcctcgtaaaagtccacggcgaagttgaaaaactgggagttgcgcgccgagacggtcaactcctcctccagaagacggatgagctcggcgatggtggcgcgcacctcgcgctcgaaggcccccgggagttcctccacttcctcttcttcctcctccactaacatctcttctacttcctcctcaggcggcagtggtggcgggggagggggcctgcgtcgccggcggcgcacgggcagacggtcgatgaagcgctcgatggtctcgccgcgccggcgtcgcatggtctcggtgacggcgcgcccgtcctcgcggggccgcagcgtgaagacgccgccgcgcatctccaggtggccgggggggtccccgttgggcagggagagggcgctgacgatgcatcttatcaattgccccgtagggactccgcgcaaggacctgagcgtctcgagatccacgggatctgaaaaccgctgaacgaaggcttcgagccagtcgcagtcgcaaggtaggctgagcacggtttcttctggcgggtcatgttggttgggagcggggcgggcgatgctgctggtgatgaagttgaaataggcggttctgagacggcggatggtggcgaggagcaccaggtctttgggcccggcttgctggatgcgcagacggtcggccatgccccaggcgtggtcctgacacctggccaggtccttgtagtagtcctgcatgagccgctccacgggcacctcctcctcgcccgcgcggccgtgcatgcgcgtgagcccgaagccgcgctggggctggacgagcgccaggtcggcgacgacgcgctcggcgaggatggcttgctggatctgggtgagggtggtctggaagtcatcaaagtcgacgaagcggtggtaggctccggtgttgatggtgtaggagcagttggccatgacggaccagttgacggtctggtggcccggacgcacgagctcgtggtacttgaggcgcgagtaggcgcgcgtgtcgaagatgtagtcgttgcaggtgcgcaccaggtactggtagccgatgaggaagtgcggcggcggctggcggtagagcggccatcgctcggtggcgggggcgccgggcgcgaggtcctcgagcatggtgcggtggtagccgtagatgtacctggacatccaggtgatgccggcggcggtggtggaggcgcgcgggaactcgcggacgcggttccagatgttgcgcagcggcaggaagtagttcatggtgggcacggtctggcccgtgaggcgcgcgcagtcgtggatgctctatacgggcaaaaacgaaagcggtcagcggctcgactccgtggcctggaggctaagcgaacgggttgggctgcgcgtgtaccccggttcgaatctcgaatcaggctggagccgcagctaacgtggtattggcactcccgtctcgacccaagcctgcaccaaccctccaggatacggaggcgggtcgttttgcaacttttttttggaggccggatgagactagtaagcgcggaaagcggccgaccgcgatggctcgctgccgtagtctggagaagaatcgccagggttgcgttgcggtgtgccccggttcgaggccggccggattccgcggctaacgagggcgtggctgccccgtcgtttccaagaccccatagccagccgacttctccagttacggagcgagcccctcttttgttttgtttgtttttgccagatgcatcccgtactgcggcagatgcgcccccaccaccctccaccgcaacaacagccccctccacagccggcgcttctgcccccgccccagcagcaacttccagccacgaccgccgcggccgccgtgagcggggctggacagagttatgatcaccagctggccttggaagagggcgaggggctggcgcgcctgggggcgtcgtcgccggagcggcacccgcgcgtgcagatgaaaagggacgctcgcgaggcctacgtgcccaagcagaacctgttcagagacaggagcggcgaggagcccgaggagatgcgcgcggcccggttccacgcggggcgggagctgcggcgcggcctggaccgaaagagggtgctgagggacgaggatttcgaggcggacgagctgacggggatcagccccgcgcgcgcgcacgtggccgcggccaacctggtcacggcgtacgagcagaccgtgaaggaggagagcaacttccaaaaatccttcaacaaccacgtgcgcaccctgatcgcgcgcgaggaggtgaccctgggcctgatgcacctgtgggacctgctggaggccatcgtgcagaaccccaccagcaagccgctgacggcgcagctgttcctggtggtgcagcatagtcgggacaacgaagcgttcagggaggcgctgctgaatatcaccgagcccgagggccgctggctcctggacctggtgaacattctgcagagcatcgtggtgcaggagcgcgggctgccgctgtccgagaagctggcggccatcaacttctcggtgctgagtttgggcaagtactacgctaggaagatctacaagaccccgtacgtgcccatagacaaggaggtgaagatcgacgggttttacatgcgcatgaccctgaaagtgctgaccctgagcgacgatctgggggtgtaccgcaacgacaggatgcaccgtgcggtgagcgccagcaggcggcgcgagctgagcgaccaggagctgatgcatagtctgcagcgggccctgaccggggccgggaccgagggggagagctactttgacatgggcgcggacctgcactggcagcccagccgccgggccttggaggcggcggcaggaccctacgtagaagaggtggacgatgaggtggacgaggagggcgagtacctggaagactgatggcgcgaccgtatttttgctagatgcaacaacaacagccacctcctgatcccgcgatgcgggcggcgctgcagagccagccgtccggcattaactcctcggacgattggacccaggccatgcaacgcatcatggcgctgacgacccgcaaccccgaagcctttagacagcagccccaggccaaccggctctcggccatcctggaggccgtggtgccctcgcgctccaaccccacgcacgagaaggtcctggccatcgtgaacgcgctggtggagaacaaggccatccgcggcgacgaggccggcctggtgtacaacgcgctgctggagcgcgtggcccgctacaacagcaccaacgtgcagaccaacctggaccgcatggtgaccgacgtgcgcgaggccgtggcccagcgcgagcggttccaccgcgagtccaacctgggatccatggtggcgctgaacgccttcctcagcacccagcccgccaacgtgccccggggccaggaggactacaccaacttcatcagcgccctgcgcctgatggtgaccgaggtgccccagagcgaggtgtaccagtccgggccggactacttcttccagaccagtcgccagggcttgcagaccgtgaacctgagccaggctttcaagaacttgcagggcctgtggggcgtgcaggccccggtcggggaccgcgcgacggtgtcgagcctgctgacgccgaactcgcgcctgctgctgctgctggtggcccccttcacggacagcggcagcatcaaccgcaactcgtacctgggctacctgattaacctgtaccgcgaggccatcggccaggcgcacgtggacgagcagacctaccaggagatcacccacgtgagccgcgccctgggccaggacgacccgggcaacctggaagccaccctgaactttttgctgaccaaccggtcgcagaagatcccgccccagtacgcgctcagcaccgaggaggagcgcatcctgcgttacgtgcagcagagcgtgggcctgttcctgatgcaggagggggccacccccagcgccgcgctcgacatgaccgcgcgcaacatggagcccagcatgtacgccagcaaccgcccgttcatcaataaactgatggactacttgcatcgggcggccgccatgaactctgactatttcaccaacgccatcctgaatccccactggctcccgccgccggggttctacacgggcgagtacgacatgcccgaccccaatgacgggttcctgtgggacgatgtggacagcagcgtgttctccccccgaccgggtgctaacgagcgccccttgtggaagaaggaaggcagcgaccgacgcccgtcctcggcgctgtccggccgcgagggtgctgccgcggcggtgcccgaggccgccagtcctttcccgagcttgcccttctcgctgaacagtatccgcagcagcgagctgggcaggatcacgcgcccgcgcttgctgggcgaagaggagtacttgaatgactcgctgttgagacccgagcgggagaagaacttccccaataacgggatagaaagcctggtggacaagatgagccgctggaagacgtatgcgcaggagcacagggacgatccccgggcgtcgcagggggccacgagccggggcagcgccgcccgtaaacgccggtggcacgacaggcagcggggacagatgtgggacgatgaggactccgccgacgacagcagcgtgttggacttgggtgggagtggtaacccgttcgctcacctgcgcccccgtatcgggcgcatgatgtaagagaaaccgaaaataaatgatactcaccaaggccatggcgaccagcgtgcgttcgtttcttctctgttgttgttgtatctagtatgatgaggcgtgcgtacccggagggtcctcctccctcgtacgagagcgtgatgcagcaggcgatggcggcggcggcgatgcagcccccgctggaggctccttacgtgcccccgcggtacctggcgcctacggaggggcggaacagcattcgttactcggagctggcacccttgtacgataccacccggttgtacctggtggacaacaagtcggcggacatcgcctcgctgaactaccagaacgaccacagcaacttcctgaccaccgtggtgcagaacaatgacttcacccccacggaggccagcacccagaccatcaactttgacgagcgctcgcggtggggcggccagctgaaaaccatcatgcacaccaacatgcccaacgtgaacgagttcatgtacagcaacaagttcaaggcgcgggtgatggtctcccgcaagacccccaatggggtgacagtgacagaggattatgatggtagtcaggatgagctgaagtatgaatgggtggaatttgagctgcccgaaggcaacttctcggtgaccatgaccatcgacctgatgaacaacgccatcatcgacaattacttggcggtggggcggcagaacggggtgctggagagcgacatcggcgtgaagttcgacactaggaacttcaggctgggctgggaccccgtgaccgagctggtcatgcccggggtgtacaccaacgaggctttccatcccgatattgtcttgctgcccggctgcggggtggacttcaccgagagccgcctcagcaacctgctgggcattcgcaagaggcagcccttccaggaaggcttccagatcatgtacgaggatctggaggggggcaacatccccgcgctcctggatgtcgacgcctatgagaaaagcaaggaggatgcagcagctgaagcaactgcagccgtagctaccgcctctaccgaggtcaggggcgataattttgcaagcgccgcagcagtggcagcggccgaggcggctgaaaccgaaagtaagatagtcattcagccggtggagaaggatagcaagaacaggagctacaacgtactaccggacaagataaacaccgcctaccgcagctggtacctagcctacaactatggcgaccccgagaagggcgtgcgctcctggacgctgctcaccacctcggacgtcacctgcggcgtggagcaagtctactggtcgctgcccgacatgatgcaagacccggtcaccttccgctccacgcgtcaagttagcaactacccggtggtgggcgccgagctcctgcccgtctactccaagagcttcttcaacgagcaggccgtctactcgcagcagctgcgcgccttcacctcgcttacgcacgtcttcaaccgcttccccgagaaccagatcctcgtccgcccgcccgcgcccaccattaccaccgtcagtgaaaacgttcctgctctcacagatcacgggaccctgccgctgcgcagcagtatccggggagtccagcgcgtgaccgttactgacgccagacgccgcacctgcccctacgtctacaaggccctgggcatagtcgcgccgcgcgtcctctcgagccgcaccttctaaatgtccattctcatctcgcccagtaataacaccggttggggcctgcgcgcgcccagcaagatgtacggaggcgctcgccaacgctccacgcaacaccccgtgcgcgtgcgcgggcacttccgcgctccctggggcgccctcaagggccgcgtgcggtcgcgcaccaccgtcgacgacgtgatcgaccaggtggtggccgacgcgcgcaactacacccccgccgccgcgcccgtctccaccgtggacgccgtcatcgacagcgtggtggccgacgcgcgccggtacgcccgcgccaagagccggcggcggcgcatcgcccggcggcaccggagcacccccgccatgcgcgcggcgcgagccttgctgcgcagggccaggcgcacgggacgcagggccatgctcagggcggccagacgcgcggcttcaggcgccagcgccggcaggacccggagacgcgcggccacggcggcggcagcggccatcgccagcatgtcccgcccgcggcgagggaacgtgtactgggtgcgcgacgccgccaccggtgtgcgcgtgcccgtgcgcacccgcccccctcgcacttgaagatgttcacttcgcgatgttgatgtgtcccagcggcgaggaggatgtccaagcgcaaattcaaggaagagatgctccaggtcatcgcgcctgagatctacggccctgcggtggtgaaggaggaaagaaagccccgcaaaatcaagcgggtcaaaaaggacaaaaaggaagaagaaagtgatgtggacggattggtggagtttgtgcgcgagttcgccccccggcggcgcgtgcagtggcgcgggcggaaggtgcaaccggtgctgagacccggcaccaccgtggtcttcacgcccggcgagcgctccggcaccgcttccaagcgctcctacgacgaggtgtacggggatgatgatattctggagcaggcggccgagcgcctgggcgagtttgcttacggcaagcgcagccgttccgcaccgaaggaagaggcggtgtccatcccgctggaccacggcaaccccacgccgagcctcaagcccgtgaccttgcagcaggtgctgccgaccgcggcgccgcgccgggggttcaagcgcgagggcgaggatctgtaccccaccatgcagctgatggtgcccaagcgccagaagctggaagacgtgctggagaccatgaaggtggacccggacgtgcagcccgaggtcaaggtgcggcccatcaagcaggtggccccgggcctgggcgtgcagaccgtggacatcaagattcccacggagcccatggaaacgcagaccgagcccatgatcaagcccagcaccagcaccatggaggtgcagacggatccctggatgccatcggctcctagtcgaagaccccggcgcaagtacggcgcggccagcctgctgatgcccaactacgcgctgcatccttccatcatccccacgccgggctaccgcggcacgcgcttctaccgcggtcataccagcagccgccgccgcaagaccaccactcgccgccgccgtcgccgcaccgccgctgcaaccacccctgccgccctggtgcggagagtgtaccgccgcggccgcgcacctctgaccctgccgcgcgcgcgctaccacccgagcatcgccatttaaactttcgcctgctttgcagatcaatggccctcacatgccgccttcgcgttcccattacgggctaccgaggaagaaaaccgcgccgtagaaggctggcggggaacgggatgcgtcgccaccaccaccggcggcggcgcgccatcagcaagcggttggggggaggcttcctgcccgcgctgatccccatcatcgccgcggcgatcggggcgatccccggcattgcttccgtggcggtgcaggcctctcagcgccactgagacacacttggaaacatcttgtaataaaccaatggactctgacgctcctggtcctgtgatgtgttttcgtagacagatggaagacatcaatttttcgtccctggctccgcgacacggcacgcggccgttcatgggcacctggagcgacatcggcaccagccaactgaacgggggcgccttcaattggagcagtctctggagcgggcttaagaatttcgggtccacgcttaaaacctatggcagcaaggcgtggaacagcaccacagggcaggcgctgagggataagctgaaagagcagaacttccagcagaaggtggtcgatgggctcgcctcgggcatcaacggggtggtggacctggccaaccaggccgtgcagcggcagatcaacagccgcctggacccggtgccgcccgccggctccgtggagatgccgcaggtggaggaggagctgcctcccctggacaagcggggcgagaagcgaccccgccccgatgcggaggagacgctgctgacgcacacggacgagccgcccccgtacgaggaggcggtgaaactgggtctgcccaccacgcggcccatcgcgcccctggccaccggggtgctgaaacccgaaaagcccgcgaccctggacttgcctcctccccagccttcccgcccctctacagtggctaagcccctgccgccggtggccgtggcccgcgcgcgacccgggggcaccgcccgccctcatgcgaactggcagagcactctgaacagcatcgtgggtctgggagtgcagagtgtgaagcgccgccgctgctattaaacctaccgtagcgcttaacttgcttgtctgtgtgtgtatgtattatgtcgccgccgccgctgtccaccagaaggaggagtgaagaggcgcgtcgccgagttgcaagatggccaccccatcgatgctgccccagtgggcgtacatgcacatcgccggacaggacgcttcggagtacctgagtccgggtctggtgcagtttgcccgcgccacagacacctacttcagtctggggaacaagtttaggaaccccacggtggcgcccacgcacgatgtgaccaccgaccgcagccagcggctgacgctgcgcttcgtgcccgtggaccgcgaggacaacacctactcgtacaaagtgcgctacacgctggccgtgggcgacaaccgcgtgctggacatggccagcacctactttgacatccgcggcgtgctggatcggggccctagcttcaaaccctactccggcaccgcctacaacagtctggcccccaagggagcacccaacacttgtcagtggacatataaagccgatggtgaaactgccacagaaaaaacctatacatatggaaatgcacccgtgcagggcattaacatcacaaaagatggtattcaacttggaactgacaccgatgatcagccaatctacgcagataaaacctatcagcctgaacctcaagtgggtgatgctgaatggcatgacatcactggtactgatgaaaagtatggaggcagagctcttaagcctgataccaaaatgaagccttgttatggttcttttgccaagcctactaataaagaaggaggtcaggcaaatgtgaaaacaggaacaggcactactaaagaatatgacatagacatggctttctttgacaacagaagtgcggctgctgctggcctagctccagaaattgttttgtatactgaaaatgtggatttggaaactccagatacccatattgtatacaaagcaggcacagatgacagcagctcttctattaatttgggtcagcaagccatgcccaacagacctaactacattggtttcagagacaactttatcgggctcatgtactacaacagcactggcaatatgggggtgctggccggtcaggcttctcagctgaatgctgtggttgacttgcaagacagaaacaccgagctgtcctaccagctcttgcttgactctctgggtgacagaacccggtatttcagtatgtggaatcaggcggtggacagctatgatcctgatgtgcgcattattgaaaatcatggtgtggaggatgaacttcccaactattgtttccctctggatgctgttggcagaacagatacttatcagggaattaaggctaatggaactgatcaaaccacatggaccaaagatgacagtgtcaatgatgctaatgagataggcaagggtaatccattcgccatggaaatcaacatccaagccaacctgtggaggaacttcctctacgccaacgtggccctgtacctgcccgactcttacaagtacacgccggccaatgttaccctgcccaccaacaccaacacctacgattacatgaacggccgggtggtggcgccctcgctggtggactcctacatcaacatcggggcgcgctggtcgctggatcccatggacaacgtgaaccccttcaaccaccaccgcaatgcggggctgcgctaccgctccatgctcctgggcaacgggcgctacgtgcccttccacatccaggtgccccagaaatttttcgccatcaagagcctcctgctcctgcccgggtcctacacctacgagtggaacttccgcaaggacgtcaacatgatcctgcagagctccctcggcaacgacctgcgcacggacggggcctccatctccttcaccagcatcaacctctacgccaccttcttccccatggcgcacaacacggcctccacgctcgaggccatgctgcgcaacgacaccaacgaccagtccttcaacgactacctctcggcggccaacatgctctaccccatcccggccaacgccaccaacgtgcccatctccatcccctcgcgcaactgggccgccttccgcggctggtccttcacgcgtctcaagaccaaggagacgccctcgctgggctccgggttcgacccctacttcgtctactcgggctccatcccctacctcgacggcaccttctacctcaaccacaccttcaagaaggtctccatcaccttcgactcctccgtcagctggcccggcaacgaccggctcctgacgcccaacgagttcgaaatcaagcgcaccgtcgacggcgagggctacaacgtggcccagtgcaacatgaccaaggactggttcctggtccagatgctggcccactacaacatcggctaccagggcttctacgtgcccgagggctacaaggaccgcatgtactccttcttccgcaacttccagcccatgagccgccaggtggtggacgaggtcaactacaaggactaccaggccgtcaccctggcctaccagcacaacaactcgggcttcgtcggctacctcgcgcccaccatgcgccagggccagccctaccccgccaactacccctacccgctcatcggcaagagcgccgtcaccagcgtcacccagaaaaagttcctctgcgacagggtcatgtggcgcatccccttctccagcaacttcatgtccatgggcgcgctcaccgacctcggccagaacatgctctatgccaactccgcccacgcgctagacatgaatttcgaagtcgaccccatggatgagtccacccttctctatgttgtcttcgaagtcttcgacgtcgtccgagtgcaccagccccaccgcggcgtcatcgaggccgtctacctgcgcacccccttctcggccggtaacgccaccacctaagctcttgcttcttgcaagccatggccgcgggctccggcgagcaggagctcagggccatcatccgcgacctgggctgcgggccctacttcctgggcaccttcgataagcgcttcccgggattcatggccccgcacaagctggcctgcgccatcgtcaacacggccggccgcgagaccgggggcgagcactggctggccttcgcctggaacccgcgctcgaacacctgctacctcttcgaccccttcgggttctcggacgagcgcctcaagcagatctaccagttcgagtacgagggcctgctgcgccgcagcgccctggccaccgaggaccgctgcgtcaccctggaaaagtccacccagaccgtgcagggtccgcgctcggccgcctgcgggctcttctgctgcatgttcctgcacgccttcgtgcactggcccgaccgccccatggacaagaaccccaccatgaacttgctgacgggggtgcccaacggcatgctccagtcgccccaggtggaacccaccctgcgccgcaaccaggaggcgctctaccgcttcctcaactcccactccgcctactttcgctcccaccgcgcgcgcatcgagaaggccaccgccttcgaccgcatgaatcaagacatgtaaaccgtgtgtgtatgttaaatgtctttaataaacagcactttcatgttacacatgcatctgagatgatttatttagaaatcgaaagggttctgccgggtctcggcatggcccgcgggcagggacacgttgcggaactggtacttggccagccacttgaactcggggatcagcagtttgggcagcggggtgtcggggaaggagtcggtccacagcttccgcgtcagttgcagggcgcccagcaggtcgggcgcggagatcttgaaatcgcagttgggacccgcgttctgcgcgcgggagttgcggtacacggggttgcagcactggaacaccatcagggccgggtgcttcacgctcgccagcaccgtcgcgtcggtgatgctctccacgtcgaggtcctcggcgttggccatcccgaagggggtcatcttgcaggtctgccttcccatggtgggcacgcacccgggcttgtggttgcaatcgcagtgcagggggatcagcatcatctgggcctggtcggcgttcatccccgggtacatggccttcatgaaagcctccaattgcctgaacgcctgctgggccttggctccctcggtgaagaagaccccgcaggacttgctagagaactggttggtggcgcacccggcgtcgtgcacgcagcagcgcgcgtcgttgttggccagctgcaccacgctgcgcccccagcggttctgggtgatcttggcccggtcggggttctccttcagcgcgcgctgcccgttctcgctcgccacatccatctcgatcatgtgctccttctggatcatggtggtcccgtgcaggcaccgcagcttgccctcggcctcggtgcacccgtgcagccacagcgcgcacccggtgcactcccagttcttgtgggcgatctgggaatgcgcgtgcacgaagccctgcaggaagcggcccatcatggtggtcagggtcttgttgctagtgaaggtcagcggaatgccgcggtgctcctcgttgatgtacaggtggcagatgcggcggtacacctcgccctgctcgggcatcagctggaagttggctttcaggtcggtctccacgcggtagcggtccatcagcatagtcatgatttccatacccttctcccaggccgagacgatgggcaggctcatagggttcttcaccatcatcttagcgctagcagccgcggccagggggtcgctctcgtccagggtctcaaagctccgcttgccgtccttctcggtgatccgcaccggggggtagctgaagcccacggccgccagctcctcctcggcctgtctttcgtcctcgctgtcctggctgacgtcctgcaggaccacatgcttggtcttgcggggtttcttcttgggcggcagcggcggcggagatgttggagatggcgagggggagcgcgagttctcgctcaccactactatctcttcctcttcttggtccgaggccacgcggcggtaggtatgtctcttcgggggcagaggcggaggcgacgggctctcgccgccgcgacttggcggatggctggcagagccccttccgcgttcgggggtgcgctcccggcggcgctctgactgacttcctccgcggccggccattgtgttctcctagggaggaacaacaagcatggagactcagccatcgccaacctcgccatctgcccccaccgccgacgagaagcagcagcagcagaatgaaagcttaaccgccccgccgcccagccccgccacctccgacgcggccgtcccagacatgcaagagatggaggaatccatcgagattgacctgggctatgtgacgcccgcggagcacgaggaggagctggcagtgcgcttttcacaagaagagatacaccaagaacagccagagcaggaagcagagaatgagcagagtcaggctgggctcgagcatgacggcgactacctccacctgagcgggggggaggacgcgctcatcaagcatctggcccggcaggccaccatcgtcaaggatgcgctgctcgaccgcaccgaggtgcccctcagcgtggaggagctcagccgcgcctacgagttgaacctcttctcgccgcgcgtgccccccaagcgccagcccaatggcacctgcgagcccaacccgcgcctcaacttctacccggtcttcgcggtgcccgaggccctggccacctaccacatctttttcaagaaccaaaagatccccgtctcctgccgcgccaaccgcacccgcgccgacgcccttttcaacctgggtcccggcgcccgcctacctgatatcgcctccttggaagaggttcccaagatcttcgagggtctgggcagcgacgagactcgggccgcgaacgctctgcaaggagaaggaggagagcatgagcaccacagcgccctggtcgagttggaaggcgacaacgcgcggctggcggtgctcaaacgcacggtcgagctgacccatttcgcctacccggctctgaacctgccccccaaagtcatgagcgcggtcatggaccaggtgctcatcaagcgcgcgtcgcccatctccgaggacgagggcatgcaagactccgaggagggcaagcccgtggtcagcgacgagcagctggcccggtggctgggtcctaatgctagtccccagagtttggaagagcggcgcaaactcatgatggccgtggtcctggtgaccgtggagctggagtgcctgcgccgcttcttcgccgacgcggagaccctgcgcaaggtcgaggagaacctgcactacctcttcaggcacgggttcgtgcgccaggcctgcaagatctccaacgtggagctgaccaacctggtctcctacatgggcatcttgcacgagaaccgcctggggcagaacgtgctgcacaccaccctgcgcggggaggcccggcgcgactacatccgcgactgcgtctacctctacctctgccacacctggcagacgggcatgggcgtgtggcagcagtgtctggaggagcagaacctgaaagagctctgcaagctcctgcagaagaacctcaagggtctgtggaccgggttcgacgagcgcaccaccgcctcggacctggccgacctcattttccccgagcgcctcaggctgacgctgcgcaacggcctgcccgactttatgagccaaagcatgttgcaaaactttcgctctttcatcctcgaacgctccggaatcctgcccgccacctgctccgcgctgccctcggacttcgtgccgctgaccttccgcgagtgccccccgccgctgtggagccactgctacctgctgcgcctggccaactacctggcctaccactcggacgtgatcgaggacgtcagcggcgagggcctgctcgagtgccactgccgctgcaacctctgcacgccgcaccgctccctggcctgcaacccccagctgctgagcgagacccagatcatcggcaccttcgagttgcaagggcccagcgaaggcgagggttcagccgccaaggggggtctgaaactcaccccggggctgtggacctcggcctacttgcgcaagttcgtgcccgaggactaccatcccttcgagatcaggttctacgaggaccaatcccatccgcccaaggccgagctgtcggcctgcgtcatcacccagggggcgatcctggcccaattgcaagccatccagaaatcccgccaagaattcttgctgaaaaagggccgcggggtctacctcgacccccagaccggtgaggagctcaaccccggcttcccccaggatgccccgaggaaacaagaagctgaaagtggagctgccgcccgtggaggatttggaggaagactgggagaacagcagtcaggcagaggaggaggagatggaggaagactgggacagcactcaggcagaggaggacagcctgcaagacagtctggaggaagacgaggaggaggcagaggaggaggtggaagaagcagccgccgccagaccgtcgtcctcggcgggggagaaagcaagcagcacggataccatctccgctccgggtcggggtcccgctcgaccacacagtagatgggacgagaccggacgattcccgaaccccaccacccagaccggtaagaaggagcggcagggatacaagtcctggcgggggcacaaaaacgccatcgtctcctgcttgcaggcctgcgggggcaacatctccttcacccggcgctacctgctcttccaccgcggggtgaactttccccgcaacatcttgcattactaccgtcacctccacagcccctactacttccaagaagaggcagcagcagcagaaaaagaccagcagaaaaccagcagctagaaaatccacagcggcggcagcaggtggactgaggatcgcggcgaacgagccggcgcaaacccgggagctgaggaaccggatctttcccaccctctatgccatcttccagcagagtcgggggcaggagcaggaactgaaagtcaagaaccgttctctgcgctcgctcacccgcagttgtctgtatcacaagagcgaagaccaacttcagcgcactctcgaggacgccgaggctctcttcaacaagtactgcgcgctcactcttaaagagtagcccgcgcccgcccagtcgcagaaaaaggcgggaattacgtcacctgtgcccttcgccctagccgcctccacccatcatcatgagcaaagagattcccacgccttacatgtggagctaccagccccagatgggcctggccgccggtgccgcccaggactactccacccgcatgaattggctcagcgccgggcccgcgatgatctcacgggtgaatgacatccgcgcccaccgaaaccagatactcctagaacagtcagcgctcaccgccacgccccgcaatcacctcaatccgcgtaattggcccgccgccctggtgtaccaggaaattccccagcccacgaccgtactacttccgcgagacgcccaggccgaagtccagctgactaactcaggtgtccagctggcgggcggcgccaccctgtgtcgtcaccgccccgctcagggtataaagcggctggtgatccggggcagaggcacacagctcaacgacgaggtggtgagctcttcgctgggtctgcgacctgacggagtcttccaactcgccggatcggggagatcttccttcacgcctcgtcaggccgtcctgactttggagagttcgtcctcgcagccccgctcgggtggcatcggcactctccagttcgtggaggagttcactccctcggtctacttcaaccccttctccggctcccccggccactacccggacgagttcatcccgaacttcgacgccatcagcgagtcggtggacggctacgattgaaactaatcacccccttatccagtgaaataaagatcatattgatgatgattttacagaaataaaaaataatcatttgatttgaaataaagatacaatcatattgatgatttgagtttaacaaaaaaataaagaatcacttacttgaaatctgataccaggtctctgtccatgttttctgccaacaccacttcactcccctcttcccagctctggtactgcaggccccggcgggctgcaaacttcctccacacgctgaaggggatgtcaaattcctcctgtccctcaatcttcattttatcttctatcagatgtccaaaaagcgcgtccgggtggatgatgacttcgaccccgtctacccctacgatgcagacaacgcaccgaccgtgcccttcatcaacccccccttcgtctcttcagatggattccaagagaagcccctgggggtgttgtccctgcgactggccgaccccgtcaccaccaagaacggggaaatcaccctcaagctgggagagggggtggacctcgattcctcgggaaaactcatctccaacacggccaccaaggccgccgcccctctcagtttttccaacaacaccatttcccttaacatggatcaccccttttacactaaagatggaaaattatccttacaagtttctccaccattaaatatactgagaacaagcattctaaacacactagctttaggttttggatcaggtttaggactccgtggctctgccttggcagtacagttagtctctccacttacatttgatactgatggaaacataaagcttaccttagacagaggtttgcatgttacaacaggagatgcaattgaaagcaacataagctgggctaaaggtttaaaatttgaagatggagccatagcaaccaacattggaaatgggttagagtttggaagcagtagtacagaaacaggtgttgatgatgcttacccaatccaagttaaacttggatctggccttagctttgacagtacaggagccataatggctggtaacaaagaagacgataaactcactttgtggacaacacctgatccatcaccaaactgtcaaatactcgcagaaaatgatgcaaaactaacactttgcttgactaaatgtggtagtcaaatactggccactgtgtcagtcttagttgtaggaagtggaaacctaaaccccattactggcaccgtaagcagtgctcaggtgtttctacgttttgatgcaaacggtgttcttttaacagaacattctacactaaaaaaatactgggggtataggcagggagatagcatagatggcactccatataccaatgctgtaggattcatgcccaatttaaaagcttatccaaagtcacaaagttctactactaaaaataatatagtagggcaagtatacatgaatggagatgtttcaaaacctatgcttctcactataaccctcaatggtactgatgacagcaacagtacatattcaatgtcattttcatacacctggactaatggaagctatgttggagcaacatttggggctaactcttataccttctcatacatcgcccaagaatgaacactgtatcccaccctgcatgccaacccttcccaccccactctgtggaacaaactctgaaacacaaaataaaataaagttcaagtgttttattgattcaacagttttacaggattcgagcagttatttttcctccaccctcccaggacatggaatacaccaccctctccccccgcacagccttgaacatctgaatgccattggtgatggacatgcttttggtctccacgttccacacagtttcagagcgagccagtctcgggtcggtcagggagatgaaaccctccgggcactcccgcatctgcacctcacagctcaacagctgaggattgtcctcggtggtcgggatcacggttatctggaagaagcagaagagcggcggtgggaatcatagtccgcgaacgggatcggccggtggtgtcgcatcaggccccgcagcagtcgctgccgccgccgctccgtcaagctgctgctcagggggtccgggtccagggactccctcagcatgatgcccacggccctcagcatcagtcgtctggtgcggcgggcgcagcagcgcatgcggatctcgctcaggtcgctgcagtacgtgcaacacagaaccaccaggttgttcaacagtccatagttcaacacgctccagccgaaactcatcgcgggaaggatgctacccacgtggccgtcgtaccagatcctcaggtaaatcaagtggtgccccctccagaacacgctgcccacgtacatgatctccttgggcatgtggcggttcaccacctcccggtaccacatcaccctctggttgaacatgcagccccggatgatcctgcggaaccacagggccagcaccgccccgcccgccatgcagcgaagagaccccgggtcccggcaatggcaatggaggacccaccgctcgtacccgtggatcatctgggagctgaacaagtctatgttggcacagcacaggcatatgctcatgcatctcttcagcactctcaactcctcgggggtcaaaaccatatcccagggcacggggaactcttgcaggacagcgaaccccgcagaacagggcaatcctcgcacagaacttacattgtgcatggacagggtatcgcaatcaggcagcaccgggtgatcctccaccagagaagcgcgggtctcggtctcctcacagcgtggtaagggggccggccgatacgggtgatggcgggacgcggctgatcgtgttcgcgaccgtgtcatgatgcagttgctttcggacattttcgtacttgctgtagcagaacctggtccgggcgctgcacaccgatcgccggcggcggtctcggcgcttggaacgctcggtgttgaaattgtaaaacagccactctctcagaccgtgcagcagatctagggcctcaggagtgatgaagatcccatcatgcctgatggctctgatcacatcgaccaccgtggaatgggccagacccagccagatgatgcaattttgttgggtttcggtgacggcgggggagggaagaacaggaagaaccatgattaacttttaatccaaacggtctcggagtacttcaaaatgaagatcgcggagatggcacctctcgcccccgctgtgttggtggaaaataacagccaggtcaaaggtgatacggttctcgagatgttccacggtggcttccagcaaagcctccacgcgcacatccagaaacaagacaatagcgaaagcgggagggttctctaattcctcaatcatcatgttacactcctgcaccatccccagataattttcatttttccagccttgaatgattcgaactagttcctgaggtaaatccaagccagccatgataaagagctcgcgcagagcgccctccaccggcattcttaagcacaccctcataattccaagatattctgctcctggttcacctgcagcagattgacaagcggaatatcaaaatctctgccgcgatccctgagctcctccctcagcaataactgtaagtactctttcatatcctctccgaaatttttagccataggaccaccaggaataagattagggcaagccacagtacagataaaccgaagtcctccccagtgagcattgccaaatgcaagactgctataagcatgctggctagacccggtgatatcttccagataactggacagaaaatcgcccaggcaatttttaagaaaatcaacaaaagaaaaatcctccaggtggacgtttagagcctcgggaacaacgatgaagtaaatgcaagcggtgcgttccagcatggttagttagctgatctgtagaaaaaacaaaaatgaacattaaaccatgctagcctggcgaacaggtgggtaaatcgttctctccagcaccaggcaggccacggggtctccggcgcgaccctcgtaaaaattgtcgctatgattgaaaaccatcacagagagacgttcccggtggccggcgtgaatgattcgacaagatgaatacacccccggaacattggcgtccgcgagtgaaaaaaagcgcccgaggaagcaataaggcactacaatgctcagtctcaagtccagcaaagcgatgccatgcggatgaagcacaaaattctcaggtgcgtacaaaatgtaattactcccctcctgcacaggcagcaaagcccccgatccctccaggtacacatacaaagcctcagcgtccatagcttaccgagcagcagcacacaacaggcgcaagagtcagagaaaggctgagctctaacctgtccacccgctctctgctcaatatatagcccagatctacactgacgtaaaggccaaagtctaaaaatacccgccaaataatcacacacgcccagcacacgcccagaaaccggtgacacactcaaaaaaatacgcgcacttcctcaaacgcccaaaactgccgtcatttccgggttcccacgctacgtcatcaaaacacgactttcaaattccgtcgaccgttaaaaacgtcacccgccccgcccctaacggtcgcccgtctctcagccaatcagcgccccgcatccccaaattcaaacacctcatttgcatattaacgcgcacaaaaagtttgaggtatattattgatgatgg

SEQ ID NO: 14 - DNA, 8602 bp, Artificial Sequence
  Description of Artificial Sequence: Synthetic polynucleotide
atgggcggcgcatgagagaagcccagaccaattacctacccaaaatggagaaagttcacgttgacatcgaggaagacagcccattcctcagagctttgcagcggagcttcccgcagtttgaggtagaagccaagcaggtcactgataatgaccatgctaatgccagagcgttttcgcatctggcttcaaaactgatcgaaacggaggtggacccatccgacacgatccttgacattggaagtgcgcccgcccgcagaatgtattctaagcacaagtatcattgtatctgtccgatgagatgtgcggaagatccggacagattgtataagtatgcaactaagctgaagaaaaactgtaaggaaataactgataaggaattggacaagaaaatgaaggagctcgccgccgtcatgagcgaccctgacctggaaactgagactatgtgcctccacgacgacgagtcgtgtcgctacgaagggcaagtcgctgtttaccaggatgtatacgcggttgacggaccgacaagtctctatcaccaagccaataagggagttagagtcgcctactggataggctttgacaccaccccttttatgtttaagaacttggctggagcatatccatcatactctaccaactgggccgacgaaaccgtgttaacggctcgtaacataggcctatgcagctctgacgttatggagcggtcacgtagagggatgtccattcttagaaagaagtatttgaaaccatccaacaatgttctattctctgttggctcgaccatctaccacgagaagagggacttactgaggagctggcacctgccgtctgtatttcacttacgtggcaagcaaaattacacatgtcggtgtgagactatagttagttgcgacgggtacgtcgttaaaagaatagctatcagtccaggcctgtatgggaagccttcaggctatgctgctacgatgcaccgcgagggattcttgtgctgcaaagtgacagacacattgaacggggagagggtctcttttcccgtgtgcacgtatgtgccagctacattgtgtgaccaaatgactggcatactggcaacagatgtcagtgcggacgacgcgcaaaaactgctggttgggctcaaccagcgtatagtcgtcaacggtcgcacccagagaaacaccaataccatgaaaaattaccttttgcccgtagtggcccaggcatttgctaggtgggcaaaggaatataaggaagatcaagaagatgaaaggccactaggactacgagatagacagttagtcatggggtgttgttgggcttttagaaggcacaagataacatctatttataagcgcccggatacccaaaccatcatcaaagtgaacagcgatttccactcattcgtgctgcccaggataggcagtaacacattggagatcgggctgagaacaagaatcaggaaaatgttagaggagcacaaggagccgtcacctctcattaccgccgaggacgtacaagaagctaagtgcgcagccgatgaggctaaggaggtgcgtgaagccgaggagttgcgcgcagctctaccacctttggcagctgatgttgaggagcccactctggaagccgatgtcgacttgatgttacaagaggctggggccggctcagtggagacacctcgtggcttgataaaggttaccagctacgctggcgaggacaagatcggctcttacgctgtgctttctccgcaggctgtactcaagagtgaaaaattatcttgcatccaccctctcgctgaacaagtcatagtgataacacactctggccgaaaagggcgttatgccgtggaaccataccatggtaaagtagtggtgccagagggacatgcaatacccgtccaggactttcaagctctgagtgaaagtgccaccattgtgtacaacgaacgtgagttcgtaaacaggtacctgcaccatattgccacacatggaggagcgctgaacactgatgaagaatattacaaaactgtcaagcccagcgagcacgacggcgaatacctgtacgacatcgacaggaaacagtgcgtcaagaaagaactagtcactgggctagggctcacaggcgagctggtggatcctcccttccatgaattcgcctacgagagtctgagaacacgaccagccgctccttaccaagtaccaaccataggggtgtatggcgtgccaggatcaggcaagtctggcatcattaaaagcgcagtcaccaaaaaagatctagtggtgagcgccaagaaagaaaactgtgcagaaattataagggacgtcaagaaaatgaaagggctggacgtcaatgccagaactgtggactcagtgctcttgaatggatgcaaacaccccgtagagaccctgtatattgacgaagcttttgcttgtcatgcaggtactctcagagcgctcatagccattataagacctaaaaaggcagtgctctgcggggatcccaaacagtgcggtttttttaacatgatgtgcctgaaagtgcattttaaccacgagatttgcacacaagtcttccacaaaagcatctctcgccgttgcactaaatctgtgacttcggtcgtctcaaccttgttttacgacaaaaaaatgagaacgacgaatccgaaagagactaagattgtgattgacactaccggcagtaccaaacctaagcaggacgatctcattctcacttgtttcagagggtgggtgaagcagttgcaaatagattacaaaggcaacgaaataatgacggcagctgcctctcaagggctgacccgtaaaggtgtgtatgccgttcggtacaaggtgaatgaaaatcctctgtacgcacccacctcagaacatgtgaacgtcctactgacccgcacggaggaccgcatcgtgtggaaaacactagccggcgacccatggataaaaacactgactgccaagtaccctgggaatttcactgccacgatagaggagtggcaagcagagcatgatgccatcatgaggcacatcttggagagaccggaccctaccgacgtcttccagaataaggcaaacgtgtgttgggccaaggctttagtgccggtgctgaagaccgctggcatagacatgaccactgaacaatggaacactgtggattattttgaaacggacaaagctcactcagcagagatagtattgaaccaactatgcgtgaggttctttggactcgatctggactccggtctattttctgcacccactgttccgttatccattaggaataatcactgggataactccccgtcgcctaacatgtacgggctgaataaagaagtggtccgtcagctctctcgcaggtacccacaactgcctcgggcagttgccactggaagagtctatgacatgaacactggtacactgcgcaattatgatccgcgcataaacctagtacctgtaaacagaagactgcctcatgctttagtcctccaccataatgaacacccacagagtgacttttcttcattcgtcagcaaattgaagggcagaactgtcctggtggtcggggaaaagttgtccgtcccaggcaaaatggttgactggttgtcagaccggcctgaggctaccttcagagctcggctggatttaggcatcccaggtgatgtgcccaaatatgacataatatttgttaatgtgaggaccccatataaataccatcactatcagcagtgtgaagaccatgccattaagcttagcatgttgaccaagaaagcttgtctgcatctgaatcccggcggaacctgtgtcagcataggttatggttacgctgacagggccagcgaaagcatcattggtgctatagcgcggcagttcaagttttcccgggtatgcaaaccgaaatcctcacttgaagagacggaagttctgtttgtattcattgggtacgatcgcaaggcccgtacgcacaatccttacaagctttcatcaaccttgaccaacatttatacaggttccagactccacgaagccggatgtgcaccctcatatcatgtggtgcgaggggatattgccacggccaccgaaggagtgattataaatgctgctaacagcaaaggacaacctggcggaggggtgtgcggagcgctgtataagaaattcccggaaagcttcgatttacagccgatcgaagtaggaaaagcgcgactggtcaaaggtgcagctaaacatatcattcatgccgtaggaccaaacttcaacaaagtttcggaggttgaaggtgacaaacagttggcagaggcttatgagtccatcgctaagattgtcaacgataacaattacaagtcagtagcgattccactgttgtccaccggcatcttttccgggaacaaagatcgactaacccaatcattgaaccatttgctgacagctttagacaccactgatgcagatgtagccatatactgcagggacaagaaatgggaaatgactctcaaggaagcagtggctaggagagaagcagtggaggagatatgcatatccgacgactcttcagtgacagaacctgatgcagagctggtgagggtgcatccgaagagttctttggctggaaggaagggctacagcacaagcgatggcaaaactttctcatatttggaagggaccaagtttcaccaggcggccaaggatatagcagaaattaatgccatgtggcccgttgcaacggaggccaatgagcaggtatgcatgtatatcctcggagaaagcatgagcagtattaggtcgaaatgccccgtcgaagagtcggaagcctccacaccacctagcacgctgccttgcttgtgcatccatgccatgactccagaaagagtacagcgcctaaaagcctcacgtccagaacaaattactgtgtgctcatcctttccattgccgaagtatagaatcactggtgtgcagaagatccaatgctcccagcctatattgttctcaccgaaagtgcctgcgtatattcatccaaggaagtatctcgtggaaacaccaccggtagacgagactccggagccatcggcagagaaccaatccacagaggggacacctgaacaaccaccacttataaccgaggatgagaccaggactagaacgcctgagccgatcatcatcgaagaggaagaagaggatagcataagtttgctgtcagatggcccgacccaccaggtgctgcaagtcgaggcagacattcacgggccgccctctgtatctagctcatcctggtccattcctcatgcatccgactttgatgtggacagtttatccatacttgacaccctggagggagctagcgtgaccagcggggcaacgtcagccgagactaactcttacttcgcaaagagtatggagtttctggcgcgaccggtgcctgcgcctcgaacagtattcaggaaccctccacatcccgctccgcgcacaagaacaccgtcacttgcacccagcagggcctgctcgagaaccagcctagtttccaccccgccaggcgtgaatagggtgatcactagagaggagctcgaggcgcttaccccgtcacgcactcctagcaggtcggtctcgagaaccagcctggtctccaacccgccaggcgtaaatagggtgattacaagagaggagtttgaggcgttcgtagcacaacaacaatgacggtttgatgcgggtgcatacatcttttcctccgacaccggtcaagggcatttacaacaaaaatcagtaaggcaaacggtgctatccgaagtggtgttggagaggaccgaattggagatttcgtatgccccgcgcctcgaccaagaaaaagaagaattactacgcaagaaattacagttaaatcccacacctgctaacagaagcagataccagtccaggaaggtggagaacatgaaagccataacagctagacgtattctgcaaggcctagggcattatttgaaggcagaaggaaaagtggagtgctaccgaaccctgcatcctgttcctttgtattcatctagtgtgaaccgtgccttttcaagccccaaggtcgcagtggaagcctgtaacgccatgttgaaagagaactttccgactgtggcttcttactgtattattccagagtacgatgcctatttggacatggttgacggagcttcatgctgcttagacactgccagtttttgccctgcaaagctgcgcagctttccaaagaaacactcctatttggaacccacaatacgatcggcagtgccttcagcgatccagaacacgctccagaacgtcctggcagctgccacaaaaagaaattgcaatgtcacgcaaatgagagaattgcccgtattggattcggcggcctttaatgtggaatgcttcaagaaatatgcgtgtaataatgaatattgggaaacgtttaaagaaaaccccatcaggcttactgaagaaaacgtggtaaattacattaccaaattaaaaggaccaaaagctgctgctctttttgcgaagacacataatttgaatatgttgcaggacataccaatggacaggtttgtaatggacttaaagagagacgtgaaagtgactccaggaacaaaacatactgaagaacggcccaaggtacaggtgatccaggctgccgatccgctagcaacagcgtatctgtgcggaatccaccgagagctggttaggagattaaatgcggtcctgcttccgaacattcatacactgtttgatatgtcggctgaagactttgacgctattatagccgagcacttccagcctggggattgtgttctggaaactgacatcgcgtcgtttgataaaagtgaggacgacgccatggctctgaccgcgttaatgattctggaagacttaggtgtggacgcagagctgttgacgctgattgaggcggctttcggcgaaatttcatcaatacatttgcccactaaaactaaatttaaattcggagccatgatgaaatctggaatgttcctcacactgtttgtgaacacagtcattaacattgtaatcgcaagcagagtgttgagagaacggctaaccggatcaccatgtgcagcattcattggagatgacaatatcgtgaaaggagtcaaatcggacaaattaatggcagacaggtgcgccacctggttgaatatggaagtcaagattatagatgctgtggtgggcgagaaagcgccttatttctgtggagggtttattttgtgtgactccgtgaccggcacagcgtgccgtgtggcagaccccctaaaaaggctgtttaagcttggcaaacctctggcagcagacgatgaacatgatgatgacaggagaagggcattgcatgaagagtcaacacgctggaaccgagtgggtattctttcagagctgtgcaaggcagtagaatcaaggtatgaaaccgtaggaacttccatcatagttatggccatgactactctagctagcagtgttaaatcattcagctacctgagaggggcccctataactctctacggctaacctgaatggactacgactctagaatagtctttaattaaagtccgccatatgaggccaccatgcagatcttcgtgaagaccctgaccggcaagaccatcaccctagaggtggagcccagtgacaccatcgagaacgtgaaggccaagatccaggataaagagggcatcccccctgaccagcagaggctgatctttgccggcaagcagctggaagatggccgcaccctctctgattacaacatccagaaggagtcaaccctgcacctggtccttcgcctgagaggtggcgctgcttacagtataatcaactttgaaaaactggctgcttacggcatcctgggctttgtgtttacactggctgcctacctgctgtttggctatcctgtgtacgtggccgcttatggactgtgtaccctggtggccatgctggctgcttacaatctggtgcctatggtggccacagtggccgcctattgtcttggcggactgctgacaatggtggcagcctacagcccgagctatgcgtatcatcagtttgcagcctacggcccaggaccaggcgctaaatttgtggctgcctggacactgaaagccgccgctggaccaggtcctggacagtacatcaaggccaacagcaagttcatcggcatcaccgaactcggcccaggaccaggctatccctacgatgtgcctgattacgcctgatagtgatgattcgaacggccgtatcacgcccaaacatttacagccgcggtgtcaaaaaccgcgtggacgtggttaacatccctgctgggaggatcagccgtaattattataattggcttggtgctggctactattgtggccatgtacgtgctgaccaaccagaaacataattgaatacagcagcaattggcaagctgcttacatagaactcgcggcgattggcatgccgccttaaaatttttattttattttttcttttcttttccgaatcggattttgtttttaatatttcaaaaaaaaaaaaaaaaaaaaaaaaaaaaaaaaaaaaaaaaaaaaaaaaaaaaaaaaaaaaaaaaaaaaaaaaaaaaaaaa

SEQ ID NO: 15 - DNA, 9595 bp, Artificial Sequence
  Description of Artificial Sequence: Synthetic polynucleotide
atgggcggcgcatgagagaagcccagaccaattacctacccaaaatggagaaagttcacgttgacatcgaggaagacagcccattcctcagagctttgcagcggagcttcccgcagtttgaggtagaagccaagcaggtcactgataatgaccatgctaatgccagagcgttttcgcatctggcttcaaaactgatcgaaacggaggtggacccatccgacacgatccttgacattggaagtgcgcccgcccgcagaatgtattctaagcacaagtatcattgtatctgtccgatgagatgtgcggaagatccggacagattgtataagtatgcaactaagctgaagaaaaactgtaaggaaataactgataaggaattggacaagaaaatgaaggagctcgccgccgtcatgagcgaccctgacctggaaactgagactatgtgcctccacgacgacgagtcgtgtcgctacgaagggcaagtcgctgtttaccaggatgtatacgcggttgacggaccgacaagtctctatcaccaagccaataagggagttagagtcgcctactggataggctttgacaccaccccttttatgtttaagaacttggctggagcatatccatcatactctaccaactgggccgacgaaaccgtgttaacggctcgtaacataggcctatgcagctctgacgttatggagcggtcacgtagagggatgtccattcttagaaagaagtatttgaaaccatccaacaatgttctattctctgttggctcgaccatctaccacgagaagagggacttactgaggagctggcacctgccgtctgtatttcacttacgtggcaagcaaaattacacatgtcggtgtgagactatagttagttgcgacgggtacgtcgttaaaagaatagctatcagtccaggcctgtatgggaagccttcaggctatgctgctacgatgcaccgcgagggattcttgtgctgcaaagtgacagacacattgaacggggagagggtctcttttcccgtgtgcacgtatgtgccagctacattgtgtgaccaaatgactggcatactggcaacagatgtcagtgcggacgacgcgcaaaaactgctggttgggctcaaccagcgtatagtcgtcaacggtcgcacccagagaaacaccaataccatgaaaaattaccttttgcccgtagtggcccaggcatttgctaggtgggcaaaggaatataaggaagatcaagaagatgaaaggccactaggactacgagatagacagttagtcatggggtgttgttgggcttttagaaggcacaagataacatctatttataagcgcccggatacccaaaccatcatcaaagtgaacagcgatttccactcattcgtgctgcccaggataggcagtaacacattggagatcgggctgagaacaagaatcaggaaaatgttagaggagcacaaggagccgtcacctctcattaccgccgaggacgtacaagaagctaagtgcgcagccgatgaggctaaggaggtgcgtgaagccgaggagttgcgcgcagctctaccacctttggcagctgatgttgaggagcccactctggaagccgatgtcgacttgatgttacaagaggctggggccggctcagtggagacacctcgtggcttgataaaggttaccagctacgctggcgaggacaagatcggctcttacgctgtgctttctccgcaggctgtactcaagagtgaaaaattatcttgcatccaccctctcgctgaacaagtcatagtgataacacactctggccgaaaagggcgttatgccgtggaaccataccatggtaaagtagtggtgccagagggacatgcaatacccgtccaggactttcaagctctgagtgaaagtgccaccattgtgtacaacgaacgtgagttcgtaaacaggtacctgcaccatattgccacacatggaggagcgctgaacactgatgaagaatattacaaaactgtcaagcccagcgagcacgacggcgaatacctgtacgacatcgacaggaaacagtgcgtcaagaaagaactagtcactgggctagggctcacaggcgagctggtggatcctcccttccatgaattcgcctacgagagtctgagaacacgaccagccgctccttaccaagtaccaaccataggggtgtatggcgtgccaggatcaggcaagtctggcatcattaaaagcgcagtcaccaaaaaagatctagtggtgagcgccaagaaagaaaactgtgcagaaattataagggacgtcaagaaaatgaaagggctggacgtcaatgccagaactgtggactcagtgctcttgaatggatgcaaacaccccgtagagaccctgtatattgacgaagcttttgcttgtcatgcaggtactctcagagcgctcatagccattataagacctaaaaaggcagtgctctgcggggatcccaaacagtgcggtttttttaacatgatgtgcctgaaagtgcattttaaccacgagatttgcacacaagtcttccacaaaagcatctctcgccgttgcactaaatctgtgacttcggtcgtctcaaccttgttttacgacaaaaaaatgagaacgacgaatccgaaagagactaagattgtgattgacactaccggcagtaccaaacctaagcaggacgatctcattctcacttgtttcagagggtgggtgaagcagttgcaaatagattacaaaggcaacgaaataatgacggcagctgcctctcaagggctgacccgtaaaggtgtgtatgccgttcggtacaaggtgaatgaaaatcctctgtacgcacccacctcagaacatgtgaacgtcctactgacccgcacggaggaccgcatcgtgtggaaaacactagccggcgacccatggataaaaacactgactgccaagtaccctgggaatttcactgccacgatagaggagtggcaagcagagcatgatgccatcatgaggcacatcttggagagaccggaccctaccgacgtcttccagaataaggcaaacgtgtgttgggccaaggctttagtgccggtgctgaagaccgctggcatagacatgaccactgaacaatggaacactgtggattattttgaaacggacaaagctcactcagcagagatagtattgaaccaactatgcgtgaggttctttggactcgatctggactccggtctattttctgcacccactgttccgttatccattaggaataatcactgggataactccccgtcgcctaacatgtacgggctgaataaagaagtggtccgtcagctctctcgcaggtacccacaactgcctcgggcagttgccactggaagagtctatgacatgaacactggtacactgcgcaattatgatccgcgcataaacctagtacctgtaaacagaagactgcctcatgctttagtcctccaccataatgaacacccacagagtgacttttcttcattcgtcagcaaattgaagggcagaactgtcctggtggtcggggaaaagttgtccgtcccaggcaaaatggttgactggttgtcagaccggcctgaggctaccttcagagctcggctggatttaggcatcccaggtgatgtgcccaaatatgacataatatttgttaatgtgaggaccccatataaataccatcactatcagcagtgtgaagaccatgccattaagcttagcatgttgaccaagaaagcttgtctgcatctgaatcccggcggaacctgtgtcagcataggttatggttacgctgacagggccagcgaaagcatcattggtgctatagcgcggcagttcaagttttcccgggtatgcaaaccgaaatcctcacttgaagagacggaagttctgtttgtattcattgggtacgatcgcaaggcccgtacgcacaatccttacaagctttcatcaaccttgaccaacatttatacaggttccagactccacgaagccggatgtgcaccctcatatcatgtggtgcgaggggatattgccacggccaccgaaggagtgattataaatgctgctaacagcaaaggacaacctggcggaggggtgtgcggagcgctgtataagaaattcccggaaagcttcgatttacagccgatcgaagtaggaaaagcgcgactggtcaaaggtgcagctaaacatatcattcatgccgtaggaccaaacttcaacaaagtttcggaggttgaaggtgacaaacagttggcagaggcttatgagtccatcgctaagattgtcaacgataacaattacaagtcagtagcgattccactgttgtccaccggcatcttttccgggaacaaagatcgactaacccaatcattgaaccatttgctgacagctttagacaccactgatgcagatgtagccatatactgcagggacaagaaatgggaaatgactctcaaggaagcagtggctaggagagaagcagtggaggagatatgcatatccgacgactcttcagtgacagaacctgatgcagagctggtgagggtgcatccgaagagttctttggctggaaggaagggctacagcacaagcgatggcaaaactttctcatatttggaagggaccaagtttcaccaggcggccaaggatatagcagaaattaatgccatgtggcccgttgcaacggaggccaatgagcaggtatgcatgtatatcctcggagaaagcatgagcagtattaggtcgaaatgccccgtcgaagagtcggaagcctccacaccacctagcacgctgccttgcttgtgcatccatgccatgactccagaaagagtacagcgcctaaaagcctcacgtccagaacaaattactgtgtgctcatcctttccattgccgaagtatagaatcactggtgtgcagaagatccaatgctcccagcctatattgttctcaccgaaagtgcctgcgtatattcatccaaggaagtatctcgtggaaacaccaccggtagacgagactccggagccatcggcagagaaccaatccacagaggggacacctgaacaaccaccacttataaccgaggatgagaccaggactagaacgcctgagccgatcatcatcgaagaggaagaagaggatagcataagtttgctgtcagatggcccgacccaccaggtgctgcaagtcgaggcagacattcacgggccgccctctgtatctagctcatcctggtccattcctcatgcatccgactttgatgtggacagtttatccatacttgacaccctggagggagctagcgtgaccagcggggcaacgtcagccgagactaactcttacttcgcaaagagtatggagtttctggcgcgaccggtgcctgcgcctcgaacagtattcaggaaccctccacatcccgctccgcgcacaagaacaccgtcacttgcacccagcagggcctgctcgagaaccagcctagtttccaccccgccaggcgtgaatagggtgatcactagagaggagctcgaggcgcttaccccgtcacgcactcctagcaggtcggtctcgagaaccagcctggtctccaacccgccaggcgtaaatagggtgattacaagagaggagtttgaggcgttcgtagcacaacaacaatgacggtttgatgcgggtgcatacatcttttcctccgacaccggtcaagggcatttacaacaaaaatcagtaaggcaaacggtgctatccgaagtggtgttggagaggaccgaattggagatttcgtatgccccgcgcctcgaccaagaaaaagaagaattactacgcaagaaattacagttaaatcccacacctgctaacagaagcagataccagtccaggaaggtggagaacatgaaagccataacagctagacgtattctgcaaggcctagggcattatttgaaggcagaaggaaaagtggagtgctaccgaaccctgcatcctgttcctttgtattcatctagtgtgaaccgtgccttttcaagccccaaggtcgcagtggaagcctgtaacgccatgttgaaagagaactttccgactgtggcttcttactgtattattccagagtacgatgcctatttggacatggttgacggagcttcatgctgcttagacactgccagtttttgccctgcaaagctgcgcagctttccaaagaaacactcctatttggaacccacaatacgatcggcagtgccttcagcgatccagaacacgctccagaacgtcctggcagctgccacaaaaagaaattgcaatgtcacgcaaatgagagaattgcccgtattggattcggcggcctttaatgtggaatgcttcaagaaatatgcgtgtaataatgaatattgggaaacgtttaaagaaaaccccatcaggcttactgaagaaaacgtggtaaattacattaccaaattaaaaggaccaaaagctgctgctctttttgcgaagacacataatttgaatatgttgcaggacataccaatggacaggtttgtaatggacttaaagagagacgtgaaagtgactccaggaacaaaacatactgaagaacggcccaaggtacaggtgatccaggctgccgatccgctagcaacagcgtatctgtgcggaatccaccgagagctggttaggagattaaatgcggtcctgcttccgaacattcatacactgtttgatatgtcggctgaagactttgacgctattatagccgagcacttccagcctggggattgtgttctggaaactgacatcgcgtcgtttgataaaagtgaggacgacgccatggctctgaccgcgttaatgattctggaagacttaggtgtggacgcagagctgttgacgctgattgaggcggctttcggcgaaatttcatcaatacatttgcccactaaaactaaatttaaattcggagccatgatgaaatctggaatgttcctcacactgtttgtgaacacagtcattaacattgtaatcgcaagcagagtgttgagagaacggctaaccggatcaccatgtgcagcattcattggagatgacaatatcgtgaaaggagtcaaatcggacaaattaatggcagacaggtgcgccacctggttgaatatggaagtcaagattatagatgctgtggtgggcgagaaagcgccttatttctgtggagggtttattttgtgtgactccgtgaccggcacagcgtgccgtgtggcagaccccctaaaaaggctgtttaagcttggcaaacctctggcagcagacgatgaacatgatgatgacaggagaagggcattgcatgaagagtcaacacgctggaaccgagtgggtattctttcagagctgtgcaaggcagtagaatcaaggtatgaaaccgtaggaacttccatcatagttatggccatgactactctagctagcagtgttaaatcattcagctacctgagaggggcccctataactctctacggctaacctgaatggactacgactctagaatagtctttaattaaagtccgccatatgagatggaagatgccaaaaacattaagaagggcccagcgccattctacccactcgaagacgggaccgccggcgagcagctgcacaaagccatgaagcgctacgccctggtgcccggcaccatcgcctttaccgacgcacatatcgaggtggacattacctacgccgagtacttcgagatgagcgttcggctggcagaagctatgaagcgctatgggctgaatacaaaccatcggatcgtggtgtgcagcgagaatagcttgcagttcttcatgcccgtgttgggtgccctgttcatcggtgtggctgtggccccagctaacgacatctacaacgagcgcgagctgctgaacagcatgggcatcagccagcccaccgtcgtattcgtgagcaagaaagggctgcaaaagatcctcaacgtgcaaaagaagctaccgatcatacaaaagatcatcatcatggatagcaagaccgactaccagggcttccaaagcatgtacaccttcgtgacttcccatttgccacccggcttcaacgagtacgacttcgtgcccgagagcttcgaccgggacaaaaccatcgccctgatcatgaacagtagtggcagtaccggattgcccaagggcgtagccctaccgcaccgcaccgcttgtgtccgattcagtcatgcccgcgaccccatcttcggcaaccagatcatccccgacaccgctatcctcagcgtggtgccatttcaccacggcttcggcatgttcaccacgctgggctacttgatctgcggctttcgggtcgtgctcatgtaccgcttcgaggaggagctattcttgcgcagcttgcaagactataagattcaatctgccctgctggtgcccacactatttagcttcttcgctaagagcactctcatcgacaagtacgacctaagcaacttgcacgagatcgccagcggcggggcgccgctcagcaaggaggtaggtgaggccgtggccaaacgcttccacctaccaggcatccgccagggctacggcctgacagaaacaaccagcgccattctgatcacccccgaaggggacgacaagcctggcgcagtaggcaaggtggtgcccttcttcgaggctaaggtggtggacttggacaccggtaagacactgggtgtgaaccagcgcggcgagctgtgcgtccgtggccccatgatcatgagcggctacgttaacaaccccgaggctacaaacgctctcatcgacaaggacggctggctgcacagcggcgacatcgcctactgggacgaggacgagcacttcttcatcgtggaccggctgaagagcctgatcaaatacaagggctaccaggtagccccagccgaactggagagcatcctgctgcaacaccccaacatcttcgacgccggggtcgccggcctgcccgacgacgatgccggcgagctgcccgccgcagtcgtcgtgctggaacacggtaaaaccatgaccgagaaggagatcgtggactatgtggccagccaggttacaaccgccaagaagctgcgcggtggtgttgtgttcgtggacgaggtgcctaaaggactgaccggcaagttggacgcccgcaagatccgcgagattctcattaaggccaagaagggcggcaagatcgccgtgtaattcgaacggccgtatcacgcccaaacatttacagccgcggtgtcaaaaaccgcgtggacgtggttaacatccctgctgggaggatcagccgtaattattataattggcttggtgctggctactattgtggccatgtacgtgctgaccaaccagaaacataattgaatacagcagcaattggcaagctgcttacatagaactcgcggcgattggcatgccgccttaaaatttttattttattttttcttttcttttccgaatcggattttgtttttaatatttcaaaaaaaaaaaaaaaaaaaaaaaaaaaaaaaaaaaaaaaaaaaaaaaaaaaaaaaaaaaaaaaaaaaaaaaaaaaaaaaa

SEQ ID NO: 16 - protein, 139 aa, Artificial Sequence
  Description of Artificial Sequence: Synthetic polypeptide
PSSLSASVGDRVTITCRASQSINSYLDWYQQKPGKAPKLLIYAASSLQSGVPSRFSGSGSGTDFTLTISSLQPEDFATYYCQQYYSTPFTFGPGTKVEIKRTVAAPSVFIFPPSDEQLKSGTASVVCLLNNFYPREAKV

SEQ ID NO: 17 - protein, 167 aa, Artificial Sequence
  Description of Artificial Sequence: Synthetic polypeptide
GVVQPGRSLRLSCAASGFTFSSYGMHWVRQAPGKGLEWVAVIWYDGSNKYYADSVKGRFTISRDNSKNTLYLQMNSLRAEDTAVYYCARDPRGATLYYYYYGMDVWGQGTTVTVSSASTKGPSVFPLAPCSRSTSESTAALGCLVKDYFPEPVTVSWNSGALTSGVH

SEQ ID NO: 18 - protein, 10 aa, Artificial Sequence
  Description of Artificial Sequence: Synthetic peptide
GFTFSSYGMH

SEQ ID NO: 19 - protein, 15 aa, Artificial Sequence
  Description of Artificial Sequence: Synthetic peptide
VIWYDGSNKYYADSV

SEQ ID NO: 20 - protein, 16 aa, Artificial Sequence
  Description of Artificial Sequence: Synthetic peptide
DPRGATLYYYYYGMDV

SEQ ID NO: 21 - protein, 11 aa, Artificial Sequence
  Description of Artificial Sequence: Synthetic peptide
RASQSINSYLD

SEQ ID NO: 22 - protein, 7 aa, Artificial Sequence
  Description of Artificial Sequence: Synthetic peptide
AASSLQS

SEQ ID NO: 23 - protein, 9 aa, Artificial Sequence
  Description of Artificial Sequence: Synthetic peptide
QQYYSTPFT

SEQ ID NO: 24 - protein, 108 aa, Artificial Sequence
  Description of Artificial Sequence: Synthetic polypeptide
EIVLTQSPGTLSLSPGERATLSCRASQRVSSSYLAWYQQKPGQAPRLLIYDASSRATGIPDRFSGSGSGTDFTLTISRLEPEDFAVYYCQQYGSLPWTFGQGTKVEIK

SEQ ID NO: 25 - protein, 121 aa, Artificial Sequence
  Description of Artificial Sequence: Synthetic polypeptide
EVQLVESGGGLVQPGGSLRLSCAASGFTFSRYWMSWVRQAPGKGLEWVANIKQDGSEKYYVDSVKGRFTISRDNAKNSLYLQMNSLRAEDTAVYYCAREGGWFGELAFDYWGQGTLVTVSS

SEQ ID NO: 26 - protein, 5 aa, Artificial Sequence
  Description of Artificial Sequence: Synthetic peptide
RYWMS

SEQ ID NO: 27 - protein, 17 aa, Artificial Sequence
  Description of Artificial Sequence: Synthetic peptide
NIKQDGSEKYYVDSVKG

SEQ ID NO: 28 - protein, 12 aa, Artificial Sequence
  Description of Artificial Sequence: Synthetic peptide
EGGWFGELAFDY

SEQ ID NO: 29 - protein, 12 aa, Artificial Sequence
  Description of Artificial Sequence: Synthetic peptide
RASQRVSSSYLA

SEQ ID NO: 30 - protein, 7 aa, Artificial Sequence
  Description of Artificial Sequence: Synthetic peptide
DASSRAT

SEQ ID NO: 31 - protein, 9 aa, Artificial Sequence
  Description of Artificial Sequence: Synthetic peptide
QQYGSLPWT

SEQ ID NO: 32 - DNA, 2019 bp, Artificial Sequence
  Description of Artificial Sequence: Synthetic polynucleotide
gcccgggcatttaaatgcgatcgcatcgattacgactctagaatagtctagtccgcaggccaccatgcagatcttcgtgaagaccctgaccggcaagaccatcaccctagaggtggagcccagtgacaccatcgagaacgtgaaggccaagatccaggataaagagggcatcccccctgaccagcagaggctgatctttgccggcaagcagctggaagatggccgcaccctctctgattacaacatccagaaggagtcaaccctgcacctggtccttcgcctgagaggtgccatgtttcaggcgctgagcgaaggctgcaccccgtatgatattaaccagatgctgaacgtgctgggcgatcatcaggtctcaggccttgagcagcttgagagtataatcaactttgaaaaactgactgaatggaccagttctaatgttatgcctatcctgtctcctctgacaaagggcatcctgggcttcgtgtttaccctgaccgtgccttctgagagaggacttagctgcattagcgaagcggatgcgaccaccccggaaagcgcgaacctgggcgaagaaattctgagccagctgtatctttggccaagggtgacctaccattcccctagttatgcttaccaccaatttgaaagacgagccaaatataaaagacacttccccggctttggccagagcctgctgtttggctaccctgtgtacgtgttcggcgattgcgtgcagggcgattgggatgcgattcgctttcgctattgcgcgccgccgggctatgcgctgctgcgctgcaacgataccaactatagcgctctgctggctgtgggggccctagaaggacccaggaatcaggactggcttggtgtcccaagacaacttgtaactcggatgcaggctattcagaatgccggcctgtgtaccctggtggccatgctggaagagacaatcttctggctgcaagcgtttctgatggcgctgaccgatagcggcccgaaaaccaacattattgtggatagccagtatgtgatgggcattagcaaaccgagctttcaggaatttgtggattgggaaaacgtgagcccggaactgaacagcaccgatcagccgttttggcaagccggaatcctggccagaaatctggtgcctatggtggccacagtgcagggccagaacctgaagtaccagggtcagtcactagtcatctctgcttctatcattgtcttcaacctgctggaactggaaggtgattatcgagatgatggcaacgtgtgggtgcataccccgctgagcccgcgcaccctgaacgcgtgggtgaaagcggtggaagaaaaaaaaggtattccagttcacctagagctggccagtatgaccaacatggagctcatgagcagtattgtgcatcagcaggtcagaacatacggccccgtgttcatgtgtctcggcggactgcttacaatggtggctggtgctgtgtggctgacagtgcgagtgctcgagctgttccgggccgcgcagctggccaacgacgtggtcctccagatcatggagctttgtggtgcagcgtttcgccaggtgtgccataccaccgtgccgtggccgaacgcgagcctgaccccgaaatggaacaacgaaaccacccagccccagatcgccaactgcagcgtgtatgacttttttgtgtggctccattattattctgttcgagacacactttggccaagggtgacctaccatatgaacaaatatgcgtatcatatgctggaaagacgagccaaatataaaagaggaccaggacctggcgctaaatttgtggccgcctggacactgaaagccgctgctggtcctggacctggccagtacatcaaggccaacagcaagttcatcggcatcaccgaactcggacccggaccaggctgatgatttcgaaatttaaataagcttgcggccgctagggataacagggtaattatcacgcccaaacatttacagccgcggtgtcaaaaaccgcgtgg

SEQ ID NO: 33 - protein, 619 aa, Artificial Sequence
  Description of Artificial Sequence: Synthetic polypeptide
MQIFVKTLTGKTITLEVEPSDTIENVKAKIQDKEGIPPDQQRLIFAGKQLEDGRTLSDYNIQKESTLHLVLRLRGAMFQALSEGCTPYDINQMLNVLGDHQVSGLEQLESIINFEKLTEWTSSNVMPILSPLTKGILGFVFTLTVPSERGLSCISEADATTPESANLGEEILSQLYLWPRVTYHSPSYAYHQFERRAKYKRHFPGFGQSLLFGYPVYVFGDCVQGDWDAIRFRYCAPPGYALLRCNDTNYSALLAVGALEGPRNQDWLGVPRQLVTRMQAIQNAGLCTLVAMLEETIFWLQAFLMALTDSGPKTNIIVDSQYVMGISKPSFQEFVDWENVSPELNSTDQPFWQAGILARNLVPMVATVQGQNLKYQGQSLVISASIIVFNLLELEGDYRDDGNVWVHTPLSPRTLNAWVKAVEEKKGIPVHLELASMTNMELMSSIVHQQVRTYGPVFMCLGGLLTMVAGAVWLTVRVLELFRAAQLANDVVLQIMELCGAAFRQVCHTTVPWPNASLTPKWNNETTQPQIANCSVYDFFVWLHYYSVRDTLWPRVTYHMNKYAYHMLERRAKYKRGPGPGAKFVAAWTLKAAAGPGPGQYIKANSKFIGITELGPGPG

SEQ ID NO: 34 - DNA, 1638 bp, Artificial Sequence
  Description of Artificial Sequence: Synthetic polynucleotide
atggccgggatgttccaggcactgtccgaaggctgcacaccctatgatattaaccagatgctgaatgtcctgggagaccaccaggtctctggcctggagcagctggagagcatcatcaacttcgagaagctgaccgagtggacaagctccaatgtgatgcctatcctgtccccactgaccaagggcatcctgggcttcgtgtttaccctgacagtgccttctgagcggggcctgtcttgcatcagcgaggcagacgcaaccacaccagagtccgccaatctgggcgaggagatcctgtctcagctgtacctgtggccccgggtgacatatcactccccttcttacgcctatcaccagttcgagcggagagccaagtacaagagacacttcccaggctttggccagtctctgctgttcggctaccccgtgtacgtgttcggcgattgcgtgcagggcgactgggatgccatccggtttagatactgcgcaccacctggatatgcactgctgaggtgtaacgacaccaattattccgccctgctggcagtgggcgccctggagggccctcgcaatcaggattggctgggcgtgccaaggcagctggtgacacgcatgcaggccatccagaacgcaggcctgtgcaccctggtggcaatgctggaggagacaatcttctggctgcaggcctttctgatggccctgaccgacagcggccccaagacaaacatcatcgtggattcccagtacgtgatgggcatctccaagccttctttccaggagtttgtggactgggagaacgtgagcccagagctgaattccaccgatcagccattctggcaggcaggaatcctggcaaggaacctggtgcctatggtggccacagtgcagggccagaatctgaagtaccagggccagagcctggtcatcagcgcctccatcatcgtgtttaacctgctggagctggagggcgactatcgggacgatggcaacgtgtgggtgcacaccccactgagccccagaacactgaacgcctgggtgaaggccgtggaggagaagaagggcatcccagtgcacctggagctggcctccatgaccaatatggagctgatgtctagcatcgtgcaccagcaggtgaggacatacggacccgtgttcatgtgcctgggaggcctgctgaccatggtggcaggagccgtgtggctgacagtgcgggtgctggagctgttcagagccgcccagctggccaacgatgtggtgctgcagatcatggagctgtgcggagcagcctttcgccaggtgtgccacaccacagtgccatggcccaatgcctccctgacccccaagtggaacaatgagacaacacagcctcagatcgccaactgtagcgtgtacgacttcttcgtgtggctgcactactatagcgtgagggataccctgtggccccgcgtgacataccacatgaataagtacgcctatcacatgctggagaggcgcgccaagtataagagaggccctggcccaggcgcaaagtttgtggcagcatggaccctgaaggccgccgccggccccggccccggccagtatatcaaggctaacagtaagttcattggaatcacagagctgggacccggacctgga

SEQ ID NO: 35 - protein, 546 aa, Artificial Sequence
  Description of Artificial Sequence: Synthetic polypeptide
MAGMFQALSEGCTPYDINQMLNVLGDHQVSGLEQLESIINFEKLTEWTSSNVMPILSPLTKGILGFVFTLTVPSERGLSCISEADATTPESANLGEEILSQLYLWPRVTYHSPSYAYHQFERRAKYKRHFPGFGQSLLFGYPVYVFGDCVQGDWDAIRFRYCAPPGYALLRCNDTNYSALLAVGALEGPRNQDWLGVPRQLVTRMQAIQNAGLCTLVAMLEETIFWLQAFLMALTDSGPKTNIIVDSQYVMGISKPSFQEFVDWENVSPELNSTDQPFWQAGILARNLVPMVATVQGQNLKYQGQSLVISASIIVFNLLELEGDYRDDGNVWVHTPLSPRTLNAWVKAVEEKKGIPVHLELASMTNMELMSSIVHQQVRTYGPVFMCLGGLLTMVAGAVWLTVRVLELFRAAQLANDVVLQIMELCGAAFRQVCHTTVPWPNASLTPKWNNETTQPQIANCSVYDFFVWLHYYSVRDTLWPRVTYHMNKYAYHMLERRAKYKRGPGPGAKFVAAWTLKAAAGPGPGQYIKANSKFIGITELGPGPG

SEQ ID NO: 36 - DNA, 2019 bp, Artificial Sequence
  Description of Artificial Sequence: Synthetic polynucleotide
gcccgggcatttaaatgcgatcgcatcgattacgactctagaatagtctagtccgcaggccaccatgcagatcttcgtgaagaccctgaccggcaagaccatcaccctagaggtggagcccagtgacaccatcgagaacgtgaaggccaagatccaggataaagagggcatcccccctgaccagcagaggctgatctttgccggcaagcagctggaagatggccgcaccctctctgattacaacatccagaaggagtcaaccctgcacctggtccttcgcctgagaggtgccatgtttcaggcgctgagcgaaggctgcaccccgtatgatattaaccagatgctgaacgtgctgggcgatcatcagtttaagcacatcaaagcctttgaccggacatttgctaacaacccaggtcccatggttgtgtttgccacacctgggcctatcctgtctcctctgacaaagggcatcctgggcttcgtgtttaccctgaccgtgccttctgagagaggacttagctgcattagcgaagcggatgcgaccaccccggaaagcgcgaacctgggcgaagaaattctgagccagctgtatctttggccaagggtgacctaccattcccctagttatgcttaccaccaatttgaaagacgagccaaatataaaagacacttccccggctttggccagagcctgctgtttggctaccctgtgtacgtgttcggcgattgcgtgcagggcgattgggatgcgattcgctttcgctattgcgcgccgccgggctatgcgctgctgcgctgcaacgataccaactatagcgctctgctggctgtgggggccctagaaggacccaggaatcaggactggcttggtgtcccaagacaacttgtaactcggatgcaggctattcagaatgccggcctgtgtaccctggtggccatgctggaagagacaatcttctggctgcaagcgtttctgatggcgctgaccgatagcggcccgaaaaccaacattattgtggatagccagtatgtgatgggcattagcaaaccgagctttcaggaatttgtggattgggaaaacgtgagcccggaactgaacagcaccgatcagccgttttggcaagccggaatcctggccagaaatctggtgcctatggtggccacagtgcagggccagaacctgaagtaccagggtcagtcactagtcatctctgcttctatcattgtcttcaacctgctggaactggaaggtgattatcgagatgatggcaacgtgtgggtgcataccccgctgagcccgcgcaccctgaacgcgtgggtgaaagcggtggaagaaaaaaaaggtattccagttcacctagagctggccagtatgaccaacatggagctcatgagcagtattgtgcatcagcaggtcagaacatacggccccgtgttcatgtgtctcggcggactgcttacaatggtggctggtgctgtgtggctgacagtgcgagtgctcgagctgttccgggccgcgcagctggccaacgacgtggtcctccagatcatggagctttgtggtgcagcgtttcgccaggtgtgccataccaccgtgccgtggccgaacgcgagcctgaccccgaaatggaacaacgaaaccacccagccccagatcgccaactgcagcgtgtatgacttttttgtgtggctccattattattctgttcgagacacactttggccaagggtgacctaccatatgaacaaatatgcgtatcatatgctggaaagacgagccaaatataaaagaggaccaggacctggcgctaaatttgtggccgcctggacactgaaagccgctgctggtcctggacctggccagtacatcaaggccaacagcaagttcatcggcatcaccgaactcggacccggaccaggctgatgatttcgaaatttaaataagcttgcggccgctagggataacagggtaattatcacgcccaaacatttacagccgcggtgtcaaaaaccgcgtgg

SEQ ID NO: 37 - protein, 619 aa, Artificial Sequence
  Description of Artificial Sequence: Synthetic polypeptide
MQIFVKTLTGKTITLEVEPSDTIENVKAKIQDKEGIPPDQQRLIFAGKQLEDGRTLSDYNIQKESTLHLVLRLRGAMFQALSEGCTPYDINQMLNVLGDHQFKHIKAFDRTFANNPGPMVVFATPGPILSPLTKGILGFVFTLTVPSERGLSCISEADATTPESANLGEEILSQLYLWPRVTYHSPSYAYHQFERRAKYKRHFPGFGQSLLFGYPVYVFGDCVQGDWDAIRFRYCAPPGYALLRCNDTNYSALLAVGALEGPRNQDWLGVPRQLVTRMQAIQNAGLCTLVAMLEETIFWLQAFLMALTDSGPKTNIIVDSQYVMGISKPSFQEFVDWENVSPELNSTDQPFWQAGILARNLVPMVATVQGQNLKYQGQSLVISASIIVFNLLELEGDYRDDGNVWVHTPLSPRTLNAWVKAVEEKKGIPVHLELASMTNMELMSSIVHQQVRTYGPVFMCLGGLLTMVAGAVWLTVRVLELFRAAQLANDVVLQIMELCGAAFRQVCHTTVPWPNASLTPKWNNETTQPQIANCSVYDFFVWLHYYSVRDTLWPRVTYHMNKYAYHMLERRAKYKRGPGPGAKFVAAWTLKAAAGPGPGQYIKANSKFIGITELGPGPG

SEQ ID NO: 38 - DNA, 228 bp, Artificial Sequence
  Description of Artificial Sequence: Synthetic polynucleotide
atgcagatcttcgtgaagaccctgaccggcaagaccatcaccctagaggtggagcccagtgacaccatcgagaacgtgaaggccaagatccaggataaagagggcatcccccctgaccagcagaggctgatctttgccggcaagcagctggaagatggccgcaccctctctgattacaacatccagaaggagtcaaccctgcacctggtccttcgcctgagaggtggc

SEQ ID NO: 39 - DNA, 228 bp, Artificial Sequence
  Description of Artificial Sequence: Synthetic polynucleotide
atgcagatcttcgtgaagaccctgaccggcaagaccatcaccctagaggtggagcccagtgacaccatcgagaacgtgaaggccaagatccaggataaagagggcatcccccctgaccagcagaggctgatctttgccggcaagcagctggaagatggccgcaccctctctgattacaacatccagaaggagtcaaccctgcacctggtccttcgcctgagaggtgcc

SEQ ID NO: 40 - DNA, 78 bp, Homo sapiens
atggccgtcatggcgccccgaaccctcgtcctgctactctcgggggctctggccctgacccagacctgggcgggctct

SEQ ID NO: 41 - DNA, 201 bp, Homo sapiens
ccgtcttcccagcccaccatccccatcgtgggcatcattgctggcctggttctctttggagctgtgatcactggagctgtggtcgctgctgtgatgtggaggaggaagagctcagatagaaaaggagggagctactctcaggctgcaagcagtgacagtgcccagggctctgatgtgtctctcacagcttgtaaagtgtga

SEQ ID NO: 42 - DNA, 60 bp, Artificial Sequence
  Description of Artificial Sequence: Synthetic oligonucleotide
atggagaccgatacactgctgctgtgggtgctgctcctgtgggtgccaggaagcacaggc

SEQ ID NO: 43 - DNA, 3178 bp, Homo sapiens
ggcaccgattcggggcctgcccggacttcgccgcacgctgcagaacctcgcccagcgcccaccatgccccggcagctcagcgcggcggccgcgctcttcgcgtccctggccgtaattttgcacgatggcagtcaaatgagagcaaaagcatttccagaaaccagagattattctcaacctactgcagcagcaacagtacaggacataaaaaaacctgtccagcaaccagctaagcaagcacctcaccaaactttagcagcaagattcatggatggtcatatcacctttcaaacagcggccacagtaaaaattccaacaactaccccagcaactacaaaaaacactgcaaccaccagcccaattacctacaccctggtcacaacccaggccacacccaacaactcacacacagctcctccagttactgaagttacagtcggccctagcttagccccttattcactgccacccaccatcaccccaccagctcatacagctggaaccagttcatcaaccgtcagccacacaactgggaacaccactcaacccagtaaccagaccacccttccagcaactttatcgatagcactgcacaaaagcacaaccggtcagaagcctgatcaacccacccatgccccaggaacaacggcagctgcccacaataccacccgcacagctgcacctgcctccacggttcctgggcccacccttgcacctcagccatcgtcagtcaagactggaatttatcaggttctaaacggaagcagactctgtataaaagcagagatggggatacagctgattgttcaagacaaggagtcggttttttcacctcggagatacttcaacatcgaccccaacgcaacgcaagcctctgggaactgtggcacccgaaaatccaaccttctgttgaattttcagggcggatttgtgaatctcacatttaccaaggatgaagaatcatattatatcagtgaagtgggagcctatttgaccgtctcagatccagagacagtttaccaaggaatcaaacatgcggtggtgatgttccagacagcagtcgggcattccttcaagtgcgtgagtgaacagagcctccagttgtcagcccacctgcaggtgaaaacaaccgatgtccaacttcaagcctttgattttgaagatgaccactttggaaatgtggatgagtgctcgtctgactacacaattgtgcttcctgtgattggggccatcgtggttggtctctgccttatgggtatgggtgtctataaaatccgcctaaggtgtcaatcatctggataccagagaatctaattgttgcccggggggaatgaaaataatggaatttagagaactctttcatcccttccaggatggatgttgggaaattccctcagagtgtgggtccttcaaacaatgtaaaccaccatcttctattcaaatgaagtgagtcatgtgtgatttaagttcaggcagcacatcaatttctaaatactttttgtttattttatgaaagatatagtgagctgtttattttctagtttcctttagaatattttagccactcaaagtcaacatttgagatatgttgaattaacataatatatgtaaagtagaataagccttcaaattataaaccaagggtcaattgtaactaatactactgtgtgtgcattgaagattttattttacccttgatcttaacaaagcctttgctttgttatcaaatggactttcagtgcttttactatctgtgttttatggtttcatgtaacatacatattcctggtgtagcacttaactccttttccactttaaatttgtttttgttttttgagacggagtttcactcttgtcacccaggctggagtacagtggcacgatctcggcttatggcaacctccgcctcccgggttcaagtgattctcctgcttcagcttcccgagtagctgggattacaggcacacactaccacgcctggctaatttttgtatttttattatagacgggtttcaccatgttggccagactggtcttgaactcttgacctcaggtgatccacccacctcagcctcccaaagtgctgggattacaggcatgagccattgcgcccggccttaaatgttttttttaatcatcaaaaagaacaacatatctcaggttgtctaagtgtttttatgtaaaaccaacaaaaagaacaaatcagcttatattttttatcttgatgactcctgctccagaattgctagactaagaattaggtggctacagatggtagaactaaacaataagcaagagacaataataatggcccttaattattaacaaagtgccagagtctaggctaagcactttatctatatctcatttcattctcacaacttataagtgaatgagtaaactgagacttaagggaactgaatcacttaaatgtcacctggctaactgatggcagagccagagcttgaattcatgttggtctgacatcaaggtctttggtcttctccctacaccaagttacctacaagaacaatgacaccacactctgcctgaaggctcacacctcataccagcatacgctcaccttacagggaaatgggtttatccaggatcatgagacattagggtagatgaaaggagagctttgcagataacaaaatagcctatccttaataaatcctccactctctggaaggagactgaggggctttgtaaaacattagtcagttgctcatttttatgggattgcttagctgggctgtaaagatgaaggcatcaaataaactcaaagtatttttaaatttttttgataatagagaaacttcgctaaccaactgttctttcttgagtgtatagccccatcttgtggtaacttgctgcttctgcacttcatatccatatttcctattgttcactttattctgtagagcagcctgccaagaattttatttctgctgttttttttgctgctaaagaaaggaactaagtcaggatgttaacagaaaagtccacataaccctagaattcttagtcaaggaataattcaagtcagcctagagaccatgttgactttcctcatgtgtttccttatgactcagtaagttggcaaggtcctgactttagtcttaataaaacattgaattgtagtaaaggtttttgcaataaaaacttactttgg

SEQ ID NO: 44 - DNA, 1858 bp, Mus sp.
attccggaggtgaaaaacaatggcacaacgtgtataatggccagcttctctgcctcctttctgaccacctacgagactgcgaatggttctcagatcgtgaacatttccctgccagcctctgcagaagtactgaaaaatggcagttcttgtggtaaagaaaatgtttctgaccccagcctcacaattacttttggaagaggatatttactgacactcaacttcacaaaaaatacaacacgttacagtgtccagcatatgtattttacatataacttgtcagatacagaacattttcccaatgccatcagcaaagagatctacaccatggattccacaactgacatcaaggcagacatcaacaaagcataccggtgtgtcagtgatatccgggtctacatgaagaatgtgaccgttgtgctccgggatgccactatccaggcctacctgtcgagtggcaacttcagcaaggaagagacacactgcacacaggatggaccttccccaaccactgggccacccagcccctcaccaccacttgtgcccacaaaccccactgtatccaagtacaatgttactggtaacaacggaacctgcctgctggcctctatggcactgcaactgaatatcacctacctgaaaaaggacaacaagacggtgaccagagcgttcaacatcagcccaaatgacacatctagtgggagttgcggtatcaacttggtgaccctgaaagtggagaacaagaacagagccctggaattgcagtttgggatgaatgccagctctagcctgtttttcttgcaaggagtgcgcttgaatatgactcttcctgatgccctagtgcccacattcagcatctccaaccattcactgaaagctcttcaggccactgtgggaaactcatacaagtgcaacactgaggaacacatctttgtcagcaagatgctctccctcaatgtcttcagtgtgcaggtccaggctttcaaggtggacagtgacaggtttgggtctgtggaagagtgtgttcaggatggtaacaacatgttgatccccattgctgtgggcggtgccctggcagggctgatcctcatcgtcctcattgcctacctcattggcaggaagaggagtcacgccggctatcagaccatctagcctggtgggcaggtgcaccagagatgcacaggggcctgttctcacatccccaagcttagataggtgtggaagggaggcacactttctggcaaactgttttaaaatctgctttatcaaatgtgaagttcatcttgcaacatttactatgcacaaaggaataactattgaaatgacggtgttaattttgctaactgggttaaatattgatgagaaggctccactgatttgacttttaagacttggtgtttggttcttcattcttttactcagatttaagcctatcaaagggatactctggtccagaccttggcctggcaagggtggctgatggttaggctgcacacacttaagaagcaacgggagcagggaaggcttgcacacaggcacgcacagggtcaacctctggacacttggcttgggctacctggccttgggggggctgaactctggcatctggctgggtacacacccccccaatttctgtgctctgccacccgtgagctgccactttcctaaatagaaaatggcattatttttatttacttttttgtaaagtgatttccagtcttgtgttggcgttcagggtggccctgtctctgcactgtgtacaataatagattcacactgctgacgtgtcttgcagcgtaggtgggttgtacactgggcatcagctcacgtaatgcattgcctgtaacgatgctaataaaaa

SEQ ID NO: 45 - DNA, 2339 bp, Homo sapiens
ggcccaaccgccgcccgcgcccccgctctccgcaccgtacccggccgcctcgcgccatggcggcccccggcagcgcccggcgacccctgctgctgctactgctgttgctgctgctcggcctcatgcattgtgcgtcagcagcaatgtttatggtgaaaaatggcaacgggaccgcgtgcataatggccaacttctctgctgccttctcagtgaactacgacaccaagagtggccctaagaacatgacctttgacctgccatcagatgccacagtggtgctcaaccgcagctcctgtggaaaagagaacacttctgaccccagtctcgtgattgcttttggaagaggacatacactcactctcaatttcacgagaaatgcaacacgttacagcgtccagctcatgagttttgtttataacttgtcagacacacaccttttccccaatgcgagctccaaagaaatcaagactgtggaatctataactgacatcagggcagatatagataaaaaatacagatgtgttagtggcacccaggtccacatgaacaacgtgaccgtaacgctccatgatgccaccatccaggcgtacctttccaacagcagcttcagcaggggagagacacgctgtgaacaagacaggccttccccaaccacagcgccccctgcgccacccagcccctcgccctcacccgtgcccaagagcccctctgtggacaagtacaacgtgagcggcaccaacgggacctgcctgctggccagcatggggctgcagctgaacctcacctatgagaggaaggacaacacgacggtgacaaggcttctcaacatcaaccccaacaagacctcggccagcgggagctgcggcgcccacctggtgactctggagctgcacagcgagggcaccaccgtcctgctcttccagttcgggatgaatgcaagttctagccggtttttcctacaaggaatccagttgaatacaattcttcctgacgccagagaccctgcctttaaagctgccaacggctccctgcgagcgctgcaggccacagtcggcaattcctacaagtgcaacgcggaggagcacgtccgtgtcacgaaggcgttttcagtcaatatattcaaagtgtgggtccaggctttcaaggtggaaggtggccagtttggctctgtggaggagtgtctgctggacgagaacagcatgctgatccccatcgctgtgggtggtgccctggcggggctggtcctcatcgtcctcatcgcctacctcgtcggcaggaagaggagtcacgcaggctaccagactatctagcctggtgcacgcaggcacagcagctgcaggggcctctgttcctttctctgggcttagggtcctgtcgaaggggaggcacactttctggcaaacgtttctcaaatctgcttcatccaatgtgaagttcatcttgcagcatttactatgcacaacagagtaactatcgaaatgacggtgttaattttgctaactgggttaaatattttgctaactggttaaacattaatatttaccaaagtaggattttgagggtgggggtgctctctctgagggggtgggggtgccgctgtctctgaggggtgggggtgccgctgtctctgaggggtgggggtgccgctctctctgagggggtgggggtgccgctttctctgagggggtgggggtgccgctctctctgagggggtgggggtgctgctctctccgaggggtggaatgccgctgtctctgaggggtgggggtgccgctctaaattggctccatatcatttgagtttagggttctggtgtttggtttcttcattctttactgcactcagatttaagccttacaaagggaaagcctctggccgtcacacgtaggacgcatgaaggtcactcgtggtgaggctgacatgctcacacattacaacagtagagagggaaaatcctaagacagaggaactccagagatgagtgtctggagcgcttcagttcagctttaaaggccaggacgggccacacgtggctggcggcctcgttccagtggcggcacgtccttgggcgtctctaatgtctgcagctcaagggctggcacttttttaaatataaaaatgggtgttatttttatttttttttgtaaagtgatttttggtcttctgttgacattcggggtgatcctgttctgcgctgtgtacaatgtgagatcggtgcgttctcctgatgttttgccgtggcttggggattgtacacgggaccagctcacgtaatgcattgcctgtaacaatgtaataaaaagcctctttcttttaaaaaaaaaaaaaaaaaaaaaaaa

SEQ ID NO: 46 - DNA, 45 bp, Artificial Sequence
  Description of Artificial Sequence: Synthetic oligonucleotide
cagtacatcaaggccaacagcaagttcatcggcatcaccgaactc

SEQ ID NO: 47 - protein, 15 aa, Artificial Sequence
  Description of Artificial Sequence: Synthetic peptide
QYIKANSKFIGITEL

SEQ ID NO: 48 - DNA, 39 bp, Artificial Sequence
  Description of Artificial Sequence: Synthetic oligonucleotide
gctaaatttgtggctgcctggacactgaaagccgccgct

SEQ ID NO: 49 - protein, 13 aa, Artificial Sequence
  Description of Artificial Sequence: Synthetic peptide
AKFVAAWTLKAAA

SEQ ID NO: 50 - DNA, 593 bp, Woodchuck hepatitis virus
aatcaacctctggattacaaaatttgtgaaagattgactggtattcttaactatgttgctccttttacgctatgtggatacgctgctttaatgcctttgtatcatgctattgcttcccgtatggctttcattttctcctccttgtataaatcctggttgctgtctctttatgaggagttgtggcccgttgtcaggcaacgtggcgtggtgtgcactgtgtttgctgacgcaacccccactggttggggcattgccaccacctgtcagctcctttccgggactttcgctttccccctccctattgccacggcggaactcatcgccgcctgccttgcccgctgctggacaggggctcggctgttgggcactgacaattccgtggtgttgtcggggaagctgacgtcctttccatggctgctcgcctgtgttgccacctggattctgcgcgggacgtccttctgctacgtcccttcggccctcaatccagcggaccttccttcccgcggcctgctgccggctctgcggcctcttccgcgtcttcgccttcgccctcagacgagtcggatctccctttgggccgcctccccgcctgt

SEQ ID NO: 51 - DNA, 589 bp, Artificial Sequence
  Description of Artificial Sequence: Synthetic polynucleotide
tctcccccccccccctctccctcccccccccctaacgttactggccgaagccgcttggaataaggccggtgtgcgtttgtctatatgttattttccaccatattgccgtcttttggcaatgtgagggcccggaaacctggccctgtcttcttgacgagcattcctaggggtctttcccctctcgccaaaggaatgcaaggtctgttgaatgtcgtgaaggaagcagttcctctggaagcttcttgaagacaaacaacgtctgtagcgaccctttgcaggcagcggaaccccccacctggcgacaggtgcctctgcggccaaaagccacgtgtataagatacacctgcaaaggcggcacaaccccagtgccacgttgtgagttggatagttgtggaaagagtcaaatggctctcctcaagcgtattcaacaaggggctgaaggatgcccagaaggtaccccattgtatgggatctgatctggggcctcggtgcacatgctttacatgtgtttagtcgaggttaaaaaaacgtctaggccccccgaaccacggggacgtggttttcctttgaaaaacacgatgataatatg

SEQ ID NO: 52 - DNA, 720 bp, Artificial Sequence
  Description of Artificial Sequence: Synthetic polynucleotide
atggtgagcaagggcgaggagctgttcaccggggtggtgcccatcctggtcgagctggacggcgacgtaaacggccacaagttcagcgtgtccggcgagggcgagggcgatgccacctacggcaagctgaccctgaagttcatctgcaccaccggcaagctgcccgtgccctggcccaccctcgtgaccaccctgacctacggcgtgcagtgcttcagccgctaccccgaccacatgaagcagcacgacttcttcaagtccgccatgcccgaaggctacgtccaggagcgcaccatcttcttcaaggacgacggcaactacaagacccgcgccgaggtgaagttcgagggcgacaccctggtgaaccgcatcgagctgaagggcatcgacttcaaggaggacggcaacatcctggggcacaagctggagtacaactacaacagccacaacgtctatatcatggccgacaagcagaagaacggcatcaaggtgaacttcaagatccgccacaacatcgaggacggcagcgtgcagctcgccgaccactaccagcagaacacccccatcggcgacggccccgtgctgctgcccgacaaccactacctgagcacccagtccgccctgagcaaagaccccaacgagaagcgcgatcacatggtcctgctggagttcgtgaccgccgccgggatcactctcggcatggacgagctgtacaagtag

SEQ ID NO: 53 - DNA, 1563 bp, Artificial Sequence
  Description of Artificial Sequence: Synthetic polynucleotide
atgctgctgctgctgctgctgctgggcctgaggctacagctctccctgggcatcatcccagttgaggaggagaacccggacttctggaaccgcgaggcagccgaggccctgggtgccgccaagaagctgcagcctgcacagacagccgccaagaacctcatcatcttcctgggcgatgggatgggggtgtctacggtgacagctgccaggatcctaaaagggcagaagaaggacaaactggggcctgagatacccctggccatggaccgcttcccatatgtggctctgtccaagacatacaatgtagacaaacatgtgccagacagtggagccacagccacggcctacctgtgcggggtcaagggcaacttccagaccattggcttgagtgcagccgcccgctttaaccagtgcaacacgacacgcggcaacgaggtcatctccgtgatgaatcgggccaagaaagcagggaagtcagtgggagtggtaaccaccacacgagtgcagcacgcctcgccagccggcacctacgcccacacggtgaaccgcaactggtactcggacgccgacgtgcctgcctcggcccgccaggaggggtgccaggacatcgctacgcagctcatctccaacatggacattgacgtgatcctaggtggaggccgaaagtacatgtttcgcatgggaaccccagaccctgagtacccagatgactacagccaaggtgggaccaggctggacgggaagaatctggtgcaggaatggctggcgaagcgccagggtgcccggtatgtgtggaaccgcactgagctcatgcaggcttccctggacccgtctgtgacccatctcatgggtctctttgagcctggagacatgaaatacgagatccaccgagactccacactggacccctccctgatggagatgacagaggctgccctgcgcctgctgagcaggaacccccgcggcttcttcctcttcgtggagggtggtcgcatcgaccatggtcatcatgaaagcagggcttaccgggcactgactgagacgatcatgttcgacgacgccattgagagggcgggccagctcaccagcgaggaggacacgctgagcctcgtcactgccgaccactcccacgtcttctccttcggaggctaccccctgcgagggagctccatcttcgggctggcccctggcaaggcccgggacaggaaggcctacacggtcctcctatacggaaacggtccaggctatgtgctcaaggacggcgcccggccggatgttaccgagagcgagagcgggagccccgagtatcggcagcagtcagcagtgcccctggacgaagagacccacgcaggcgaggacgtggcggtgttcgcgcgcggcccgcaggcgcacctggttcacggcgtgcaggagcagaccttcatagcgcacgtcatggccttcgccgcctgcctggagccctacaccgcctgcgacctggcgccccccgccggcaccaccgacgccgcgcacccgggttactctagagtcggggcggccggccgcttcgagcagacatgataa

SEQ ID NO: 54 - DNA, 1653 bp, Artificial Sequence
  Description of Artificial Sequence: Synthetic polynucleotide
atggaagatgccaaaaacattaagaagggcccagcgccattctacccactcgaagacgggaccgccggcgagcagctgcacaaagccatgaagcgctacgccctggtgcccggcaccatcgcctttaccgacgcacatatcgaggtggacattacctacgccgagtacttcgagatgagcgttcggctggcagaagctatgaagcgctatgggctgaatacaaaccatcggatcgtggtgtgcagcgagaatagcttgcagttcttcatgcccgtgttgggtgccctgttcatcggtgtggctgtggccccagctaacgacatctacaacgagcgcgagctgctgaacagcatgggcatcagccagcccaccgtcgtattcgtgagcaagaaagggctgcaaaagatcctcaacgtgcaaaagaagctaccgatcatacaaaagatcatcatcatggatagcaagaccgactaccagggcttccaaagcatgtacaccttcgtgacttcccatttgccacccggcttcaacgagtacgacttcgtgcccgagagcttcgaccgggacaaaaccatcgccctgatcatgaacagtagtggcagtaccggattgcccaagggcgtagccctaccgcaccgcaccgcttgtgtccgattcagtcatgcccgcgaccccatcttcggcaaccagatcatccccgacaccgctatcctcagcgtggtgccatttcaccacggcttcggcatgttcaccacgctgggctacttgatctgcggctttcgggtcgtgctcatgtaccgcttcgaggaggagctattcttgcgcagcttgcaagactataagattcaatctgccctgctggtgcccacactatttagcttcttcgctaagagcactctcatcgacaagtacgacctaagcaacttgcacgagatcgccagcggcggggcgccgctcagcaaggaggtaggtgaggccgtggccaaacgcttccacctaccaggcatccgccagggctacggcctgacagaaacaaccagcgccattctgatcacccccgaaggggacgacaagcctggcgcagtaggcaaggtggtgcccttcttcgaggctaaggtggtggacttggacaccggtaagacactgggtgtgaaccagcgcggcgagctgtgcgtccgtggccccatgatcatgagcggctacgttaacaaccccgaggctacaaacgctctcatcgacaaggacggctggctgcacagcggcgacatcgcctactgggacgaggacgagcacttcttcatcgtggaccggctgaagagcctgatcaaatacaagggctaccaggtagccccagccgaactggagagcatcctgctgcaacaccccaacatcttcgacgccggggtcgccggcctgcccgacgacgatgccggcgagctgcccgccgcagtcgtcgtgctggaacacggtaaaaccatgaccgagaaggagatcgtggactatgtggccagccaggttacaaccgccaagaagctgcgcggtggtgttgtgttcgtggacgaggtgcctaaaggactgaccggcaagttggacgcccgcaagatccgcgagattctcattaaggccaagaagggcggcaagatcgccgtgtaa

SEQ ID NO: 55 - DNA, 66 bp, Foot-and-mouth disease virus
gtaaagcaaacactgaactttgaccttctcaagttggctggagacgttgagtccaatcctgggccc

SEQ ID NO: 56 - protein, 5 aa, Artificial Sequence
  Description of Artificial Sequence: Synthetic peptide
GPGPG

SEQ ID NO: 57 - protein, 8 aa, Homo sapiens
  Table 1.2; ACTL8; ENSG00000117148; HLA -B*37:01
ADQLQMSL

SEQ ID NO: 58 - protein, 9 aa, Homo sapiens
  Table 1.2; ACTL8; ENSG00000117148; HLA -A*30:02,HLA-B*37:01,HLA-B*44:02,HLA-B*44:03,HLA-C*07:01, HLA-C*16:02,HLA-C*16:04
ADQLQMSLY

SEQ ID NO: 59 - protein, 8 aa, Homo sapiens
  Table 1.2; ACTL8; ENSG00000117148; HLA -A*30:02,HLA-A*32:01,HLA-B*46:01
AGQDLSAY

SEQ ID NO: 60 - protein, 11 aa, Homo sapiens
  Table 1.2; ACTL8; ENSG00000117148; HLA -A*03:01,HLA-A*03:02,HLA-A*11:01,HLA-A*31:01,HLA-B*27:02
AGQDLSAYLLK

SEQ ID NO: 61 - protein, 10 aa, Homo sapiens
  Table 1.2; ACTL8; ENSG00000117148; HLA -B*27:02,HLA-B*44:02
AHLSTYQSEW

SEQ ID NO: 62 - protein, 9 aa, Homo sapiens
  Table 1.2; ACTL8; ENSG00000117148; HLA -A*02:01,HLA-B*55:01
AIVESVESC

SEQ ID NO: 63 - protein, 8 aa, Homo sapiens
  Table 1.2; ACTL8; ENSG00000117148; HLA -A*01:01,HLA-A*32:01,HLA-B*15:01,HLA-B*39:01,HLA-C*05:01
ALDESNTY

SEQ ID NO: 64 - protein, 9 aa, Homo sapiens
  Table 1.2; ACTL8; ENSG00000117148; HLA -A*01:01,HLA-A*02:01
ALDESNTYQ

SEQ ID NO: 65 - protein, 10 aa, Homo sapiens
  Table 1.2; ACTL8; ENSG00000117148; HLA -A*02:01,HLA-A*02:03,HLA-A*02:04,HLA-A*02:07,HLA-B*38:01, HLA-B*39:01,HLA-B*55:01,HLA-C*05:01
ALDESNTYQL

SEQ ID NO: 66 - protein, 11 aa, Homo sapiens
  Table 1.2; ACTL8; ENSG00000117148; HLA -A*01:01
ALDESNTYQLP

SEQ ID NO: 67 - protein, 8 aa, Homo sapiens
  Table 1.2; ACTL8; ENSG00000117148; HLA -B*58:01
ASGKTLEF

SEQ ID NO: 68 - protein, 9 aa, Homo sapiens
  Table 1.2; ACTL8; ENSG00000117148; HLA -A*01:01
ASGLLTGVV

SEQ ID NO: 69 - protein, 10 aa, Homo sapiens
  Table 1.2; ACTL8; ENSG00000117148; HLA -B*40:02
ASGLLTGVVV

SEQ ID NO: 70 - protein, 9 aa, Homo sapiens
  Table 1.2; ACTL8; ENSG00000117148; HLA -B*58:01
ASVVAHLST

SEQ ID NO: 71 - protein, 10 aa, Homo sapiens
  Table 1.2; ACTL8; ENSG00000117148; HLA -A*01:01,HLA-A*25:01,HLA-A*26:01,HLA-A*30:02,HLA-B*15:01, HLA-B*15:03,HLA-B*46:01,HLA-B*58:01,HLA-C*16:04
ASVVAHLSTY

SEQ ID NO: 72 - protein, 9 aa, Homo sapiens
  Table 1.2; ACTL8; ENSG00000117148; HLA -A*11:01,HLA-A*31:01,HLA-A*68:01,HLA-C*07:06
ATVWEGSNR

SEQ ID NO: 73 - protein, 11 aa, Homo sapiens
  Table 1.2; ACTL8; ENSG00000117148; HLA -B*57:01,HLA-B*58:01
ATVWEGSNRNF

SEQ ID NO: 74 - protein, 9 aa, Homo sapiens
  Table 1.2; ACTL8; ENSG00000117148; HLA -A*30:02
AVTQMNKCY

SEQ ID NO: 75 - protein, 8 aa, Homo sapiens
  Table 1.2; ACTL8; ENSG00000117148; HLA -A*23:01,HLA-A*24:02
AYLLKSLF

SEQ ID NO: 76 - protein, 9 aa, Homo sapiens
  Table 1.2; ACTL8; ENSG00000117148; HLA -A*30:01,HLA-B*18:01,HLA-B*40:01,HLA-B*40:02,HLA-B*44:02, HLA-B*44:03,HLA-B*49:01
CEISLRPLL

SEQ ID NO: 77 - protein, 10 aa, Homo sapiens
  Table 1.2; ACTL8; ENSG00000117148; HLA -B*49:01
CEISLRPLLV

SEQ ID NO: 78 - protein, 9 aa, Homo sapiens
  Table 1.2; ACTL8; ENSG00000117148; HLA -B*15:03,HLA-B*39:01
CKENPGPSY

SEQ ID NO: 79 - protein, 8 aa, Homo sapiens
  Table 1.2; ACTL8; ENSG00000117148; HLA -A*02:01,HLA-A*02:03
CLFQLETV

SEQ ID NO: 80 - protein, 10 aa, Homo sapiens
  Table 1.2; ACTL8; ENSG00000117148; HLA -A*02:01,HLA-A*02:03,HLA-A*02:04
CLFQLETVAV

SEQ ID NO: 81 - protein, 8 aa, Homo sapiens
  Table 1.2; ACTL8; ENSG00000117148; HLA -A*30:01,HLA-B*18:01,HLA-B*27:05,HLA-B*37:01,HLA-B*40:01
DESNTYQL

SEQ ID NO: 82 - protein, 8 aa, Homo sapiens
  Table 1.2; ACTL8; ENSG00000117148; HLA -A*33:01,HLA-A*33:03
DHGSGFLK

SEQ ID NO: 83 - protein, 10 aa, Homo sapiens
  Table 1.2; ACTL8; ENSG00000117148; HLA -B*38:01,HLA-B*39:01
DHVSSTKATV

SEQ ID NO: 84 - protein, 11 aa, Homo sapiens
  Table 1.2; ACTL8; ENSG00000117148; HLA -A*25:01,HLA-A*33:01,HLA-B*38:01,HLA-B*39:01,HLA-C*07:01
DHVSSTKATVW

SEQ ID NO: 85 - protein, 10 aa, Homo sapiens
  Table 1.2; ACTL8; ENSG00000117148; HLA -A*01:01,HLA-A*26:01
DICHPDTFSY

SEQ ID NO: 86 - protein, 8 aa, Homo sapiens
  Table 1.2; ACTL8; ENSG00000117148; HLA -B*15:01,HLA-B*15:03,HLA-B*18:01,HLA-C*04:01,HLA-C*07:01
DQLQMSLY

SEQ ID NO: 87 - protein, 8 aa, Homo sapiens
  Table 1.2; ACTL8; ENSG00000117148; HLA -A*33:01,HLA-A*33:03,HLA-A*68:01
DSGYGLTR

SEQ ID NO: 88 - protein, 9 aa, Homo sapiens
  Table 1.2; ACTL8; ENSG00000117148; HLA -A*11:01,HLA-A*26:01,HLA-A*31:01,HLA-A*33:01,HLA-A*33:03, HLA-A*68:01,HLA-A*68:02,HLA-C*07:06
DTFSYPIER

SEQ ID NO: 89 - protein, 10 aa, Homo sapiens
  Table 1.2; ACTL8; ENSG00000117148; HLA -A*68:02
DTFSYPIERG

SEQ ID NO: 90 - protein, 11 aa, Homo sapiens
  Table 1.2; ACTL8; ENSG00000117148; HLA -A*33:01
DTFSYPIERGR

SEQ ID NO: 91 - protein, 8 aa, Homo sapiens
  Table 1.2; ACTL8; ENSG00000117148; HLA -A*33:01,HLA-A*33:03
EALDFRER

SEQ ID NO: 92 - protein, 9 aa, Homo sapiens
  Table 1.2; ACTL8; ENSG00000117148; HLA -A*30:01,HLA-B*18:01,HLA-B*37:01,HLA-B*38:01,HLA-B*40:01, HLA-B*40:02,HLA-B*44:02,HLA-B*44:03,HLA-B*49:01
EEYGEHMRM

SEQ ID NO: 93 - protein, 10 aa, Homo sapiens
  Table 1.2; ACTL8; ENSG00000117148; HLA -A*25:01,HLA-A*26:01,HLA-A*29:02,HLA-A*30:02
EFAGQDLSAY

SEQ ID NO: 94 - protein, 9 aa, Homo sapiens
  Table 1.2; ACTL8; ENSG00000117148; HLA -B*08:01
EGSNRNFSV

SEQ ID NO: 95 - protein, 10 aa, Homo sapiens
  Table 1.2; ACTL8; ENSG00000117148; HLA -A*25:01
EGSNRNFSVW

SEQ ID NO: 96 - protein, 9 aa, Homo sapiens
  Table 1.2; ACTL8; ENSG00000117148; HLA -A*68:02
EILFELLHV

SEQ ID NO: 97 - protein, 8 aa, Homo sapiens
  Table 1.2; ACTL8; ENSG00000117148; HLA -B*08:01
EISLRPLL

SEQ ID NO: 98 - protein, 9 aa, Homo sapiens
  Table 1.2; ACTL8; ENSG00000117148; HLA -A*68:02
EISLRPLLV

SEQ ID NO: 99 - protein, 10 aa, Homo sapiens
  Table 1.2; ACTL8; ENSG00000117148; HLA -A*25:01,HLA-A*26:01
ELMGDHVSST

SEQ ID NO: 100 - protein, 11 aa, Homo sapiens
  Table 1.2; ACTL8; ENSG00000117148; HLA -A*03:02,HLA-A*26:01,HLA-A*33:03,HLA-A*68:01
ELMGDHVSSTK

SEQ ID NO: 101 - protein, 8 aa, Homo sapiens
  Table 1.2; ACTL8; ENSG00000117148; HLA -B*51:01
EMFFSPQV

SEQ ID NO: 102 - protein, 9 aa, Homo sapiens
  Table 1.2; ACTL8; ENSG00000117148; HLA -A*33:01,HLA-A*33:03,HLA-A*68:01
ENPGPSYAR

SEQ ID NO: 103 - protein, 9 aa, Homo sapiens
  Table 1.2; ACTL8; ENSG00000117148; HLA -B*08:01
EPADRKKML

SEQ ID NO: 104 - protein, 9 aa, Homo sapiens
  Table 1.2; ACTL8; ENSG00000117148; HLA -B*51:01
EPQMVFPNI

SEQ ID NO: 105 - protein, 8 aa, Homo sapiens
  Table 1.2; ACTL8; ENSG00000117148; HLA -B*13:02,HLA-B*39:01
EQEVPPVI

SEQ ID NO: 106 - protein, 9 aa, Homo sapiens
  Table 1.2; ACTL8; ENSG00000117148; HLA -B*38:01,HLA-B*39:01
EQEVPPVII

SEQ ID NO: 107 - protein, 9 aa, Homo sapiens
  Table 1.2; ACTL8; ENSG00000117148; HLA -A*33:03,HLA-A*68:01,HLA-C*07:06
EQPGPSIPR

SEQ ID NO: 108 - protein, 8 aa, Homo sapiens
  Table 1.2; ACTL8; ENSG00000117148; HLA -A*33:03
ESCEISLR

SEQ ID NO: 109 - protein, 8 aa, Homo sapiens
  Table 1.2; ACTL8; ENSG00000117148; HLA -A*25:01,HLA-A*26:01,HLA-A*33:03,HLA-B*18:01
ETVAVTQM

SEQ ID NO: 110 - protein, 9 aa, Homo sapiens
  Table 1.2; ACTL8; ENSG00000117148; HLA -A*68:02
ETVAVTQMN

SEQ ID NO: 111 - protein, 10 aa, Homo sapiens
  Table 1.2; ACTL8; ENSG00000117148; HLA -A*01:01,HLA-A*03:02,HLA-A*11:01,HLA-A*33:01,HLA-A*33:03, HLA-A*68:01,HLA-A*68:02,HLA-B*27:02,HLA-C*07:06
ETVAVTQMNK

SEQ ID NO: 112 - protein, 9 aa, Homo sapiens
  Table 1.2; ACTL8; ENSG00000117148; HLA -A*26:01
EVPPVIITE

SEQ ID NO: 113 - protein, 10 aa, Homo sapiens
  Table 1.2; ACTL8; ENSG00000117148; HLA -A*25:01,HLA-A*26:01,HLA-A*68:01,HLA-A*68:02
EVPPVIITET

SEQ ID NO: 114 - protein, 8 aa, Homo sapiens
  Table 1.2; ACTL8; ENSG00000117148; HLA -A*24:02,HLA-C*07:01
EYGEHMRM

SEQ ID NO: 115 - protein, 9 aa, Homo sapiens
  Table 1.2; ACTL8; ENSG00000117148; HLA -A*01:01,HLA-A*25:01,HLA-A*26:01,HLA-A*29:02,HLA-A*30:02, HLA-B*15:01,HLA-B*15:03,HLA-B*35:01,HLA-B*39:01,HLA-B*46:01, HLA-B*55:01,HLA-C*02:02,HLA-C*03:03,HLA-C*07:04
FAGQDLSAY

SEQ ID NO: 116 - protein, 9 aa, Homo sapiens
  Table 1.2; ACTL8; ENSG00000117148; HLA -A*02:01,HLA-A*02:03,HLA-A*02:04,HLA-A*02:07,HLA-A*30:01, HLA-B*13:02,HLA-B*18:01,HLA-B*37:01,HLA-B*40:01,HLA-B*40:02, HLA-B*49:01,HLA-B*51:01,HLA-B*54:01
FELLHVPSV

SEQ ID NO: 117 - protein, 10 aa, Homo sapiens
  Table 1.2; ACTL8; ENSG00000117148; HLA -A*30:01,HLA-B*40:01
FELLHVPSVL

SEQ ID NO: 118 - protein, 8 aa, Homo sapiens
  Table 1.2; ACTL8; ENSG00000117148; HLA -A*30:01,HLA-B*18:01,HLA-B*40:01,HLA-B*40:02,HLA-B*49:01
FEQPGPSI

SEQ ID NO: 119 - protein, 9 aa, Homo sapiens
  Table 1.2; ACTL8; ENSG00000117148; HLA -B*49:01
FEQPGPSIP

SEQ ID NO: 120 - protein, 10 aa, Homo sapiens
  Table 1.2; ACTL8; ENSG00000117148; HLA -A*11:01,HLA-A*31:01,HLA-A*33:01,HLA-A*33:03,HLA-A*68:01, HLA-B*27:02,HLA-C*07:06
FEQPGPSIPR

SEQ ID NO: 121 - protein, 9 aa, Homo sapiens
  Table 1.2; ACTL8; ENSG00000117148; HLA -A*25:01,HLA-A*32:01,HLA-B*46:01
FLKAGTAGW

SEQ ID NO: 122 - protein, 8 aa, Homo sapiens
  Table 1.2; ACTL8; ENSG00000117148; HLA -B*51:01
FPNIVNYL

SEQ ID NO: 123 - protein, 9 aa, Homo sapiens
  Table 1.2; ACTL8; ENSG00000117148; HLA -B*54:01
FPNIVNYLP

SEQ ID NO: 124 - protein, 8 aa, Homo sapiens
  Table 1.2; ACTL8; ENSG00000117148; HLA -A*02:01,HLA-A*30:01,HLA-B*13:02
FQLETVAV

SEQ ID NO: 125 - protein, 9 aa, Homo sapiens
  Table 1.2; ACTL8; ENSG00000117148; HLA -A*02:01,HLA-B*27:05,HLA-C*07:04
FQLETVAVT

SEQ ID NO: 126 - protein, 10 aa, Homo sapiens
  Table 1.2; ACTL8; ENSG00000117148; HLA -B*27:05
FQLETVAVTQ

SEQ ID NO: 127 - protein, 11 aa, Homo sapiens
  Table 1.2; ACTL8; ENSG00000117148; HLA -A*02:01,HLA-A*02:04,HLA-B*13:02,HLA-B*39:01,HLA-C*07:04
FQLETVAVTQM

SEQ ID NO: 128 - protein, 9 aa, Homo sapiens
  Table 1.2; ACTL8; ENSG00000117148; HLA -A*68:02,HLA-B*54:01
FSVWLGASV

SEQ ID NO: 129 - protein, 11 aa, Homo sapiens
  Table 1.2; ACTL8; ENSG00000117148; HLA -B*54:01
FSVWLGASVVA

SEQ ID NO: 130 - protein, 9 aa, Homo sapiens
  Table 1.2; ACTL8; ENSG00000117148; HLA -A*31:01
FSYPIERGR

SEQ ID NO: 131 - protein, 8 aa, Homo sapiens
  Table 1.2; ACTL8; ENSG00000117148; HLA -B*37:01
GASVVAHL

SEQ ID NO: 132 - protein, 11 aa, Homo sapiens
  Table 1.2; ACTL8; ENSG00000117148; HLA -A*30:02,HLA-B*15:01,HLA-B*15:03,HLA-B*46:01,HLA-C*04:01, HLA-C*16:04
GASVVAHLSTY

SEQ ID NO: 133 - protein, 8 aa, Homo sapiens
  Table 1.2; ACTL8; ENSG00000117148; HLA -B*27:05
GDHVSSTK

SEQ ID NO: 134 - protein, 11 aa, Homo sapiens
  Table 1.2; ACTL8; ENSG00000117148; HLA -A*03:02,HLA-A*11:01
GGNTLYPGFTK

SEQ ID NO: 135 - protein, 8 aa, Homo sapiens
  Table 1.2; ACTL8; ENSG00000117148; HLA -A*02:01,HLA-A*02:04,HLA-B*13:02
GLLTGVVV

SEQ ID NO: 136 - protein, 10 aa, Homo sapiens
  Table 1.2; ACTL8; ENSG00000117148; HLA -A*02:01
GLLTGVVVDS

SEQ ID NO: 137 - protein, 8 aa, Homo sapiens
  Table 1.2; ACTL8; ENSG00000117148; HLA -B*37:01
GLTRVQPF

SEQ ID NO: 138 - protein, 10 aa, Homo sapiens
  Table 1.2; ACTL8; ENSG00000117148; HLA -B*27:02,HLA-B*27:05
GNTLYPGFTK

SEQ ID NO: 139 - protein, 9 aa, Homo sapiens
  Table 1.2; ACTL8; ENSG00000117148; HLA -B*07:02
GPSIPRAIV

SEQ ID NO: 140 - protein, 11 aa, Homo sapiens
  Table 1.2; ACTL8; ENSG00000117148; HLA -B*07:02
GPSYARRRVSL

SEQ ID NO: 141 - protein, 8 aa, Homo sapiens
  Table 1.2; ACTL8; ENSG00000117148; HLA -B*38:01
GQDLSAYL

SEQ ID NO: 142 - protein, 9 aa, Homo sapiens
  Table 1.2; ACTL8; ENSG00000117148; HLA -A*02:07,HLA-B*13:02,HLA-B*15:01,HLA-B*27:05,HLA-B*38:01, HLA-B*39:01,HLA-B*40:01,HLA-B*40:02,HLA-C*04:01
GQDLSAYLL

SEQ ID NO: 143 - protein, 10 aa, Homo sapiens
  Table 1.2; ACTL8; ENSG00000117148; HLA -A*11:01,HLA-B*27:02
GQDLSAYLLK

SEQ ID NO: 144 - protein, 9 aa, Homo sapiens
  Table 1.2; ACTL8; ENSG00000117148; HLA -B*27:05
GRPLPASGK

SEQ ID NO: 145 - protein, 9 aa, Homo sapiens
  Table 1.2; ACTL8; ENSG00000117148; HLA -A*25:01,HLA-A*32:01,HLA-B*57:01,HLA-B*58:01
GSNRNFSVW

SEQ ID NO: 146 - protein, 9 aa, Homo sapiens
  Table 1.2; ACTL8; ENSG00000117148; HLA -B*46:01
GSRVELTPM

SEQ ID NO: 147 - protein, 11 aa, Homo sapiens
  Table 1.2; ACTL8; ENSG00000117148; HLA -A*31:01
GSRVELTPMQR

SEQ ID NO: 148 - protein, 8 aa, Homo sapiens
  Table 1.2; ACTL8; ENSG00000117148; HLA -B*15:01
GVVVDSGY

SEQ ID NO: 149 - protein, 9 aa, Homo sapiens
  Table 1.2; ACTL8; ENSG00000117148; HLA -A*24:02
GWNEPQMVF

SEQ ID NO: 150 - protein, 10 aa, Homo sapiens
  Table 1.2; ACTL8; ENSG00000117148; HLA -A*24:02
GYGLTRVQPF

SEQ ID NO: 151 - protein, 9 aa, Homo sapiens
  Table 1.2; ACTL8; ENSG00000117148; HLA -A*25:01,HLA-A*32:01,HLA-B*57:01
HLSTYQSEW

SEQ ID NO: 152 - protein, 11 aa, Homo sapiens
  Table 1.2; ACTL8; ENSG00000117148; HLA -A*29:02
HVMACGGNTLY

SEQ ID NO: 153 - protein, 11 aa, Homo sapiens
  Table 1.2; ACTL8; ENSG00000117148; HLA -A*02:07,HLA-A*68:02
HVPSVLLADQL

SEQ ID NO: 154 - protein, 9 aa, Homo sapiens
  Table 1.2; ACTL8; ENSG00000117148; HLA -A*02:03,HLA-A*32:01,HLA-A*68:02,HLA-B*13:02,HLA-B*51:01
HVSSTKATV

SEQ ID NO: 155 - protein, 10 aa, Homo sapiens
  Table 1.2; ACTL8; ENSG00000117148; HLA -A*25:01,HLA-A*32:01,HLA-A*68:01,HLA-B*44:03,HLA-B*57:01, HLA-B*58:01
HVSSTKATVW

SEQ ID NO: 156 - protein, 9 aa, Homo sapiens
  Table 1.2; ACTL8; ENSG00000117148; HLA -A*29:02,HLA-A*30:02,HLA-A*32:01,HLA-B*46:01
ICHPDTFSY

SEQ ID NO: 157 - protein, 8 aa, Homo sapiens
  Table 1.2; ACTL8; ENSG00000117148; HLA -C*06:02
IDHGSGFL

SEQ ID NO: 158 - protein, 9 aa, Homo sapiens
  Table 1.2; ACTL8; ENSG00000117148; HLA -A*03:01,HLA-A*03:02,HLA-A*11:01,HLA-A*33:01,HLA-B*27:02, HLA-C*07:01
IDHGSGFLK

SEQ ID NO: 159 - protein, 9 aa, Homo sapiens
  Table 1.2; ACTL8; ENSG00000117148; HLA -A*24:02,HLA-B*37:01
IDICHPDTF

SEQ ID NO: 160 - protein, 9 aa, Homo sapiens
  Table 1.2; ACTL8; ENSG00000117148; HLA -B*44:02
IERGRILNW

SEQ ID NO: 161 - protein, 8 aa, Homo sapiens
  Table 1.2; ACTL8; ENSG00000117148; HLA -C*05:01
IIDHGSGF

SEQ ID NO: 162 - protein, 9 aa, Homo sapiens
  Table 1.2; ACTL8; ENSG00000117148; HLA -A*01:01,HLA-A*02:07,HLA-C*05:01
IIDHGSGFL

SEQ ID NO: 163 - protein, 10 aa, Homo sapiens
  Table 1.2; ACTL8; ENSG00000117148; HLA -A*01:01,HLA-A*03:01,HLA-A*03:02,HLA-A*11:01
IIDHGSGFLK

SEQ ID NO: 164 - protein, 11 aa, Homo sapiens
  Table 1.2; ACTL8; ENSG00000117148; HLA -A*02:07
IIDHGSGFLKA

SEQ ID NO: 165 - protein, 8 aa, Homo sapiens
  Table 1.2; ACTL8; ENSG00000117148; HLA -A*02:04
ILFELLHV

SEQ ID NO: 166 - protein, 11 aa, Homo sapiens
  Table 1.2; ACTL8; ENSG00000117148; HLA -A*02:01,HLA-A*02:03,HLA-A*02:04
ILFELLHVPSV

SEQ ID NO: 167 - protein, 9 aa, Homo sapiens
  Table 1.2; ACTL8; ENSG00000117148; HLA -A*01:01,HLA-A*03:01,HLA-A*03:02,HLA-A*29:02,HLA-A*30:02, HLA-A*32:01,HLA-B*15:01,HLA-B*15:03,HLA-B*46:01,HLA-C*07:04
ILNWEGVQY

SEQ ID NO: 168 - protein, 10 aa, Homo sapiens
  Table 1.2; ACTL8; ENSG00000117148; HLA -A*02:01,HLA-A*02:03,HLA-A*02:04
ILNWEGVQYL

SEQ ID NO: 169 - protein, 9 aa, Homo sapiens
  Table 1.2; ACTL8; ENSG00000117148; HLA -B*07:02,HLA-B*08:01,HLA-B*51:01,HLA-B*54:01,HLA-B*55:01, HLA-B*56:01,HLA-C*07:02
IPRAIVESV

SEQ ID NO: 170 - protein, 10 aa, Homo sapiens
  Table 1.2; ACTL8; ENSG00000117148; HLA -C*05:01
IVESVESCEI

SEQ ID NO: 171 - protein, 8 aa, Homo sapiens
  Table 1.2; ACTL8; ENSG00000117148; HLA -A*30:02,HLA-A*32:01,HLA-B*15:03,HLA-B*18:01,HLA-B*27:02, HLA-B*37:01,HLA-B*39:01,HLA-B*44:02,HLA-B*44:03
KENPGPSY

SEQ ID NO: 172 - protein, 9 aa, Homo sapiens
  Table 1.2; ACTL8; ENSG00000117148; HLA -B*37:01,HLA-B*40:02,HLA-B*49:01
KENPGPSYA

SEQ ID NO: 173 - protein, 10 aa, Homo sapiens
  Table 1.2; ACTL8; ENSG00000117148; HLA -A*03:02,HLA-A*31:01,HLA-B*27:05,HLA-B*37:01,HLA-B*40:01, HLA-B*44:02,HLA-B*44:03
KENPGPSYAR

SEQ ID NO: 174 - protein, 11 aa, Homo sapiens
  Table 1.2; ACTL8; ENSG00000117148; HLA -A*31:01
KENPGPSYARR

SEQ ID NO: 175 - protein, 9 aa, Homo sapiens
  Table 1.2; ACTL8; ENSG00000117148; HLA -A*02:01,HLA-A*02:04,HLA-A*02:07
KMLEILFEL

SEQ ID NO: 176 - protein, 10 aa, Homo sapiens
  Table 1.2; ACTL8; ENSG00000117148; HLA -A*02:01,HLA-A*02:04,HLA-A*02:07
KMLEILFELL

SEQ ID NO: 177 - protein, 10 aa, Homo sapiens
  Table 1.2; ACTL8; ENSG00000117148; HLA -A*32:01,HLA-B*40:02,HLA-B*57:01,HLA-B*58:01
KTLEFAGQDL

SEQ ID NO: 178 - protein, 9 aa, Homo sapiens
  Table 1.2; ACTL8; ENSG00000117148; HLA -A*01:01,HLA-A*02:07,HLA-B*35:03,HLA-B*38:01,HLA-B*39:01, HLA-C*03:03,HLA-C*03:04,HLA-C*05:01
LADQLQMSL

SEQ ID NO: 179 - protein, 10 aa, Homo sapiens
  Table 1.2; ACTL8; ENSG00000117148; HLA -A*01:01,HLA-B*27:02
LADQLQMSLY

SEQ ID NO: 180 - protein, 9 aa, Homo sapiens
  Table 1.2; ACTL8; ENSG00000117148; HLA -B*38:01,HLA-B*40:01
LDESNTYQL

SEQ ID NO: 181 - protein, 8 aa, Homo sapiens
  Table 1.2; ACTL8; ENSG00000117148; HLA -A*30:01,HLA-B*18:01,HLA-B*37:01,HLA-B*40:01,HLA-B*40:02, HLA-B*49:01
LEFAGQDL

SEQ ID NO: 182 - protein, 10 aa, Homo sapiens
  Table 1.2; ACTL8; ENSG00000117148; HLA -A*30:01,HLA-B*40:01,HLA-B*40:02,HLA-B*49:01
LEFAGQDLSA

SEQ ID NO: 183 - protein, 11 aa, Homo sapiens
  Table 1.2; ACTL8; ENSG00000117148; HLA -A*30:02,HLA-B*15:01,HLA-B*15:03,HLA-B*18:01,HLA-B*27:02, HLA-B*40:01,HLA-B*44:02,HLA-B*44:03,HLA-B*46:01,HLA-B*49:01, HLA-C*16:04
LEFAGQDLSAY

SEQ ID NO: 184 - protein, 8 aa, Homo sapiens
  Table 1.2; ACTL8; ENSG00000117148; HLA -B*18:01,HLA-B*49:01
LEILFELL

SEQ ID NO: 185 - protein, 8 aa, Homo sapiens
  Table 1.2; ACTL8; ENSG00000117148; HLA -B*18:01,HLA-C*07:04
LETVAVTQ

SEQ ID NO: 186 - protein, 9 aa, Homo sapiens
  Table 1.2; ACTL8; ENSG00000117148; HLA -A*30:01,HLA-B*18:01,HLA-B*37:01,HLA-B*40:01,HLA-B*40:02, HLA-B*44:03,HLA-B*49:01,HLA-C*04:01
LETVAVTQM

SEQ ID NO: 187 - protein, 11 aa, Homo sapiens
  Table 1.2; ACTL8; ENSG00000117148; HLA -B*27:02
LETVAVTQMNK

SEQ ID NO: 188 - protein, 9 aa, Homo sapiens
  Table 1.2; ACTL8; ENSG00000117148; HLA -C*14:02
LFQLETVAV

SEQ ID NO: 189 - protein, 9 aa, Homo sapiens
  Table 1.2; ACTL8; ENSG00000117148; HLA -A*02:01,HLA-A*02:03,HLA-A*02:04,HLA-A*23:01,HLA-A*30:01, HLA-A*32:01,HLA-A*68:02,HLA-B*07:02,HLA-B*27:05,HLA-B*35:03, HLA-B*40:01,HLA-B*58:01,HLA-C*02:02,HLA-C*03:03,HLA-C*03:04,
  HLA-C*06:02,HLA-C*07:04,HLA-C*12:03,HLA-C*14:02,HLA-C*16:02
LGASVVAHL

SEQ ID NO: 190 - protein, 10 aa, Homo sapiens
  Table 1.2; ACTL8; ENSG00000117148; HLA -A*02:01,HLA-A*02:03,HLA-A*02:04
LLADQLQMSL

SEQ ID NO: 191 - protein, 11 aa, Homo sapiens
  Table 1.2; ACTL8; ENSG00000117148; HLA -A*01:01,HLA-A*29:02,HLA-A*30:02,HLA-B*15:01
LLADQLQMSLY

SEQ ID NO: 192 - protein, 8 aa, Homo sapiens
  Table 1.2; ACTL8; ENSG00000117148; HLA -B*08:01
LLHVPSVL

SEQ ID NO: 193 - protein, 9 aa, Homo sapiens
  Table 1.2; ACTL8; ENSG00000117148; HLA -A*02:01,HLA-A*02:04,HLA-A*02:07
LLHVPSVLL

SEQ ID NO: 194 - protein, 11 aa, Homo sapiens
  Table 1.2; ACTL8; ENSG00000117148; HLA -A*01:01,HLA-A*30:02,HLA-C*07:01
LLTGVVVDSGY

SEQ ID NO: 195 - protein, 9 aa, Homo sapiens
  Table 1.2; ACTL8; ENSG00000117148; HLA -A*02:01,HLA-A*02:03
LLVSHVMAC

SEQ ID NO: 196 - protein, 9 aa, Homo sapiens
  Table 1.2; ACTL8; ENSG00000117148; HLA -A*02:01,HLA-A*02:03,HLA-A*32:01
LMGDHVSST

SEQ ID NO: 197 - protein, 10 aa, Homo sapiens
  Table 1.2; ACTL8; ENSG00000117148; HLA -A*03:01,HLA-A*03:02
LMGDHVSSTK

SEQ ID NO: 198 - protein, 8 aa, Homo sapiens
  Table 1.2; ACTL8; ENSG00000117148; HLA -B*07:02,HLA-B*08:01,HLA-B*35:03,HLA-B*51:01,HLA-C*07:02
LPASGKTL

SEQ ID NO: 199 - protein, 10 aa, Homo sapiens
  Table 1.2; ACTL8; ENSG00000117148; HLA -B*07:02,HLA-B*35:01,HLA-B*35:03,HLA-B*56:01,HLA-C*07:02
LPASGKTLEF

SEQ ID NO: 200 - protein, 11 aa, Homo sapiens
  Table 1.2; ACTL8; ENSG00000117148; HLA -B*56:01
LPASGKTLEFA

SEQ ID NO: 201 - protein, 11 aa, Homo sapiens
  Table 1.2; ACTL8; ENSG00000117148; HLA -B*35:01,HLA-B*55:01
LPCKENPGPSY

SEQ ID NO: 202 - protein, 9 aa, Homo sapiens
  Table 1.2; ACTL8; ENSG00000117148; HLA -B*07:02,HLA-B*08:01,HLA-B*35:01,HLA-B*35:03,HLA-B*38:01, HLA-B*39:01,HLA-B*40:01,HLA-B*51:01,HLA-B*55:01,HLA-B*56:01, HLA-C*05:01,HLA-C*07:02
LPDGSRVEL

SEQ ID NO: 203 - protein, 8 aa, Homo sapiens
  Table 1.2; ACTL8; ENSG00000117148; HLA -B*57:01,HLA-B*58:01
LSTYQSEW

SEQ ID NO: 204 - protein, 10 aa, Homo sapiens
  Table 1.2; ACTL8; ENSG00000117148; HLA -A*01:01,HLA-C*07:01
LTGVVVDSGY

SEQ ID NO: 205 - protein, 9 aa, Homo sapiens
  Table 1.2; ACTL8; ENSG00000117148; HLA -A*24:02
LYPGFTKRL

SEQ ID NO: 206 - protein, 10 aa, Homo sapiens
  Table 1.2; ACTL8; ENSG00000117148; HLA -A*24:02
LYPGFTKRLF

SEQ ID NO: 207 - protein, 8 aa, Homo sapiens
  Table 1.2; ACTL8; ENSG00000117148; HLA -C*03:04
MACGGNTL

SEQ ID NO: 208 - protein, 9 aa, Homo sapiens
  Table 1.2; ACTL8; ENSG00000117148; HLA -A*01:01,HLA-A*26:01,HLA-A*29:02,HLA-A*30:02,HLA-B*15:01, HLA-B*15:03,HLA-B*35:01,HLA-B*39:01,HLA-B*46:01,HLA-B*55:01, HLA-C*02:02,HLA-C*07:01,HLA-C*07:04
MACGGNTLY

SEQ ID NO: 209 - protein, 8 aa, Homo sapiens
  Table 1.2; ACTL8; ENSG00000117148; HLA -A*23:01
MFFSPQVF

SEQ ID NO: 210 - protein, 9 aa, Homo sapiens
  Table 1.2; ACTL8; ENSG00000117148; HLA -A*02:07
MLEILFELL

SEQ ID NO: 211 - protein, 8 aa, Homo sapiens
  Table 1.2; ACTL8; ENSG00000117148; HLA -B*08:01,HLA-B*15:01,HLA-B*15:03,HLA-B*18:01,HLA-B*46:01, HLA-C*16:01
MQRVAPEM

SEQ ID NO: 212 - protein, 9 aa, Homo sapiens
  Table 1.2; ACTL8; ENSG00000117148; HLA -B*15:01,HLA-B*15:03
MQRVAPEMF

SEQ ID NO: 213 - protein, 9 aa, Homo sapiens
  Table 1.2; ACTL8; ENSG00000117148; HLA -A*11:01,HLA-A*25:01,HLA-A*26:01,HLA-A*29:02,HLA-A*30:02, HLA-A*32:01,HLA-A*33:03,HLA-A*68:01,HLA-B*15:01,HLA-B*35:01, HLA-B*44:03,HLA-B*46:01,HLA-B*57:01,HLA-B*58:01,HLA-C*02:02,
  HLA-C*07:04,HLA-C*07:06,HLA-C*12:03
MVFPNIVNY

SEQ ID NO: 214 - protein, 10 aa, Homo sapiens
  Table 1.2; ACTL8; ENSG00000117148; HLA -A*25:01,HLA-A*26:01,HLA-A*68:02
MVFPNIVNYL

SEQ ID NO: 215 - protein, 8 aa, Homo sapiens
  Table 1.2; ACTL8; ENSG00000117148; HLA -A*33:03,HLA-B*35:01
NPGPSYAR

SEQ ID NO: 216 - protein, 9 aa, Homo sapiens
  Table 1.2; ACTL8; ENSG00000117148; HLA -A*03:01,HLA-A*03:02,HLA-A*11:01,HLA-A*33:01,HLA-A*33:03, HLA-A*68:01,HLA-C*07:06
NTLYPGFTK

SEQ ID NO: 217 - protein, 10 aa, Homo sapiens
  Table 1.2; ACTL8; ENSG00000117148; HLA -A*33:01,HLA-A*33:03,HLA-A*68:01
NTLYPGFTKR

SEQ ID NO: 218 - protein, 10 aa, Homo sapiens
  Table 1.2; ACTL8; ENSG00000117148; HLA -A*11:01,HLA-A*33:01,HLA-A*33:03,HLA-A*68:01
NTYQLPDGSR

SEQ ID NO: 219 - protein, 11 aa, Homo sapiens
  Table 1.2; ACTL8; ENSG00000117148; HLA -A*68:02
NTYQLPDGSRV

SEQ ID NO: 220 - protein, 10 aa, Homo sapiens
  Table 1.2; ACTL8; ENSG00000117148; HLA -A*30:02
PCKENPGPSY

SEQ ID NO: 221 - protein, 8 aa, Homo sapiens
  Table 1.2; ACTL8; ENSG00000117148; HLA -B*07:02
PDGSRVEL

SEQ ID NO: 222 - protein, 9 aa, Homo sapiens
  Table 1.2; ACTL8; ENSG00000117148; HLA -B*49:01
PEMFFSPQV

SEQ ID NO: 223 - protein, 11 aa, Homo sapiens
  Table 1.2; ACTL8; ENSG00000117148; HLA -A*24:02,HLA-B*07:02
PLPASGKTLEF

SEQ ID NO: 224 - protein, 8 aa, Homo sapiens
  Table 1.2; ACTL8; ENSG00000117148; HLA -A*30:01,HLA-B*37:01,HLA-B*40:02
QDLSAYLL

SEQ ID NO: 225 - protein, 8 aa, Homo sapiens
  Table 1.2; ACTL8; ENSG00000117148; HLA -A*30:01,HLA-B*40:01,HLA-B*49:01
QEVPPVII

SEQ ID NO: 226 - protein, 9 aa, Homo sapiens
  Table 1.2; ACTL8; ENSG00000117148; HLA -B*49:01
QEVPPVIIT

SEQ ID NO: 227 - protein, 10 aa, Homo sapiens
  Table 1.2; ACTL8; ENSG00000117148; HLA -A*31:01
QGRPLPASGK

SEQ ID NO: 228 - protein, 9 aa, Homo sapiens
  Table 1.2; ACTL8; ENSG00000117148; HLA -A*03:02
QLETVAVTQ

SEQ ID NO: 229 - protein, 10 aa, Homo sapiens
  Table 1.2; ACTL8; ENSG00000117148; HLA -B*55:01
QLETVAVTQM

SEQ ID NO: 230 - protein, 10 aa, Homo sapiens
  Table 1.2; ACTL8; ENSG00000117148; HLA -A*02:01,HLA-A*02:03,HLA-A*02:07,HLA-B*07:02,HLA-C*01:02
QLPDGSRVEL

SEQ ID NO: 231 - protein, 9 aa, Homo sapiens
  Table 1.2; ACTL8; ENSG00000117148; HLA -B*07:02
QPFHQGRPL

SEQ ID NO: 232 - protein, 11 aa, Homo sapiens
  Table 1.2; ACTL8; ENSG00000117148; HLA -B*07:02,HLA-B*54:01,HLA-B*56:01
QPFHQGRPLPA

SEQ ID NO: 233 - protein, 9 aa, Homo sapiens
  Table 1.2; ACTL8; ENSG00000117148; HLA -B*54:01,HLA-B*55:01,HLA-B*56:01
QPGPSIPRA

SEQ ID NO: 234 - protein, 10 aa, Homo sapiens
  Table 1.2; ACTL8; ENSG00000117148; HLA -B*07:02,HLA-B*56:01
QPGPSIPRAI

SEQ ID NO: 235 - protein, 11 aa, Homo sapiens
  Table 1.2; ACTL8; ENSG00000117148; HLA -A*30:02,HLA-A*32:01,HLA-B*15:01,HLA-B*15:03,HLA-B*27:05, HLA-B*38:01,HLA-B*39:01,HLA-C*07:04
QQSALDESNTY

SEQ ID NO: 236 - protein, 10 aa, Homo sapiens
  Table 1.2; ACTL8; ENSG00000117148; HLA -A*01:01,HLA-A*30:02,HLA-B*15:01
QSALDESNTY

SEQ ID NO: 237 - protein, 10 aa, Homo sapiens
  Table 1.2; ACTL8; ENSG00000117148; HLA -A*01:01
QSEWMSREEY

SEQ ID NO: 238 - protein, 10 aa, Homo sapiens
  Table 1.2; ACTL8; ENSG00000117148; HLA -A*25:01,HLA-A*26:01,HLA-B*13:02,HLA-B*51:01
QVFEQPGPSI

SEQ ID NO: 239 - protein, 8 aa, Homo sapiens
  Table 1.2; ACTL8; ENSG00000117148; HLA -B*37:01
RELMGDHV

SEQ ID NO: 240 - protein, 8 aa, Homo sapiens
  Table 1.2; ACTL8; ENSG00000117148; HLA -B*18:01,HLA-B*37:01
REQEVPPV

SEQ ID NO: 241 - protein, 9 aa, Homo sapiens
  Table 1.2; ACTL8; ENSG00000117148; HLA -A*30:01,HLA-B*13:02,HLA-B*18:01,HLA-B*37:01,HLA-B*38:01, HLA-B*40:01,HLA-B*40:02,HLA-B*44:02,HLA-B*44:03,HLA-B*49:01, HLA-C*16:04
REQEVPPVI

SEQ ID NO: 242 - protein, 10 aa, Homo sapiens
  Table 1.2; ACTL8; ENSG00000117148; HLA -A*30:01,HLA-B*40:01,HLA-B*44:02,HLA-B*49:01
REQEVPPVII

SEQ ID NO: 243 - protein, 10 aa, Homo sapiens
  Table 1.2; ACTL8; ENSG00000117148; HLA -A*29:02
RILNWEGVQY

SEQ ID NO: 244 - protein, 11 aa, Homo sapiens
  Table 1.2; ACTL8; ENSG00000117148; HLA -A*02:04
RILNWEGVQYL

SEQ ID NO: 245 - protein, 8 aa, Homo sapiens
  Table 1.2; ACTL8; ENSG00000117148; HLA -B*07:02,HLA-B*08:01,HLA-B*51:01
RPLLVSHV

SEQ ID NO: 246 - protein, 9 aa, Homo sapiens
  Table 1.2; ACTL8; ENSG00000117148; HLA -B*07:02,HLA-B*08:01,HLA-B*35:01,HLA-B*35:03,HLA-B*54:01, HLA-B*55:01,HLA-B*56:01,HLA-C*07:02
RPLLVSHVM

SEQ ID NO: 247 - protein, 10 aa, Homo sapiens
  Table 1.2; ACTL8; ENSG00000117148; HLA -B*54:01,HLA-B*56:01
RPLLVSHVMA

SEQ ID NO: 248 - protein, 10 aa, Homo sapiens
  Table 1.2; ACTL8; ENSG00000117148; HLA -B*07:02,HLA-C*07:02
RPLPASGKTL

SEQ ID NO: 249 - protein, 11 aa, Homo sapiens
  Table 1.2; ACTL8; ENSG00000117148; HLA -B*57:01
RTVIIDHGSGF

SEQ ID NO: 250 - protein, 9 aa, Homo sapiens
  Table 1.2; ACTL8; ENSG00000117148; HLA -A*03:01,HLA-A*03:02,HLA-A*11:01,HLA-A*31:01
RVELTPMQR

SEQ ID NO: 251 - protein, 9 aa, Homo sapiens
  Table 1.2; ACTL8; ENSG00000117148; HLA -A*03:02,HLA-A*11:01,HLA-A*31:01
RVQPFHQGR

SEQ ID NO: 252 - protein, 9 aa, Homo sapiens
  Table 1.2; ACTL8; ENSG00000117148; HLA -A*23:01,HLA-A*25:01,HLA-A*26:01,HLA-A*29:02,HLA-A*30:02, HLA-A*32:01,HLA-B*15:01,HLA-B*15:03,HLA-B*18:01,HLA-B*27:02, HLA-B*27:05,HLA-B*35:01,HLA-B*35:03,HLA-B*38:01,HLA-B*39:01,
  HLA-B*46:01,HLA-B*55:01,HLA-B*58:01,HLA-C*01:02,HLA-C*02:02, HLA-C*03:03,HLA-C*03:04,HLA-C*05:01,HLA-C*07:06,HLA-C*12:03, HLA-C*14:02,HLA-C*16:01,HLA-C*16:02,HLA-C*16:04
SALDESNTY

SEQ ID NO: 253 - protein, 11 aa, Homo sapiens
  Table 1.2; ACTL8; ENSG00000117148; HLA -A*02:01,HLA-A*02:04,HLA-B*35:03
SALDESNTYQL

SEQ ID NO: 254 - protein, 8 aa, Homo sapiens
  Table 1.2; ACTL8; ENSG00000117148; HLA -B*08:01,HLA-B*51:01,HLA-C*03:04
SAYLLKSL

SEQ ID NO: 255 - protein, 9 aa, Homo sapiens
  Table 1.2; ACTL8; ENSG00000117148; HLA -B*08:01,HLA-B*51:01,HLA-B*57:01,HLA-C*02:02,HLA-C*12:03
SAYLLKSLF

SEQ ID NO: 256 - protein, 10 aa, Homo sapiens
  Table 1.2; ACTL8; ENSG00000117148; HLA -A*03:01
SAYLLKSLFK

SEQ ID NO: 257 - protein, 9 aa, Homo sapiens
  Table 1.2; ACTL8; ENSG00000117148; HLA -A*30:02,HLA-B*15:01,HLA-B*15:03,HLA-B*18:01,HLA-B*27:02, HLA-B*44:02,HLA-B*44:03,HLA-C*16:04
SEWMSREEY

SEQ ID NO: 258 - protein, 9 aa, Homo sapiens
  Table 1.2; ACTL8; ENSG00000117148; HLA -B*46:01
SGLLTGVVV

SEQ ID NO: 259 - protein, 8 aa, Homo sapiens
  Table 1.2; ACTL8; ENSG00000117148; HLA -B*51:01
SGYGLTRV

SEQ ID NO: 260 - protein, 9 aa, Homo sapiens
  Table 1.2; ACTL8; ENSG00000117148; HLA -C*06:02
SGYGLTRVQ

SEQ ID NO: 261 - protein, 11 aa, Homo sapiens
  Table 1.2; ACTL8; ENSG00000117148; HLA -B*38:01
SHVMACGGNTL

SEQ ID NO: 262 - protein, 9 aa, Homo sapiens
  Table 1.2; ACTL8; ENSG00000117148; HLA -A*31:01
SLRPLLVSH

SEQ ID NO: 263 - protein, 10 aa, Homo sapiens
  Table 1.2; ACTL8; ENSG00000117148; HLA -A*02:03
SLRPLLVSHV

SEQ ID NO: 264 - protein, 9 aa, Homo sapiens
  Table 1.2; ACTL8; ENSG00000117148; HLA -A*02:03,HLA-A*03:01,HLA-B*13:02
SLYASGLLT

SEQ ID NO: 265 - protein, 10 aa, Homo sapiens
  Table 1.2; ACTL8; ENSG00000117148; HLA -A*02:01,HLA-A*02:03
SLYASGLLTG

SEQ ID NO: 266 - protein, 11 aa, Homo sapiens
  Table 1.2; ACTL8; ENSG00000117148; HLA -A*02:01,HLA-A*02:03,HLA-A*02:04,HLA-A*02:07,HLA-B*13:02, HLA-B*55:01
SLYASGLLTGV

SEQ ID NO: 267 - protein, 10 aa, Homo sapiens
  Table 1.2; ACTL8; ENSG00000117148; HLA -B*27:05
SRVELTPMQR

SEQ ID NO: 268 - protein, 8 aa, Homo sapiens
  Table 1.2; ACTL8; ENSG00000117148; HLA -A*32:01,HLA-B*57:01,HLA-B*58:01
SSTKATVW

SEQ ID NO: 269 - protein, 10 aa, Homo sapiens
  Table 1.2; ACTL8; ENSG00000117148; HLA -A*03:01,HLA-A*11:01,HLA-A*31:01,HLA-A*33:01,HLA-A*33:03, HLA-A*68:01,HLA-C*07:06
STYQSEWMSR

SEQ ID NO: 270 - protein, 9 aa, Homo sapiens
  Table 1.2; ACTL8; ENSG00000117148; HLA -A*01:01,HLA-A*02:03,HLA-A*03:01,HLA-A*03:02,HLA-A*11:01, HLA-A*23:01,HLA-A*24:02,HLA-A*25:01,HLA-A*26:01,HLA-A*29:02, HLA-A*30:02,HLA-A*32:01,HLA-A*68:01,HLA-B*15:01,HLA-B*15:03,
  HLA-B*18:01,HLA-B*27:02,HLA-B*35:01,HLA-B*39:01,HLA-B*44:02, HLA-B*44:03,HLA-B*46:01,HLA-B*55:01,HLA-B*57:01,HLA-B*58:01, HLA-C*01:02,HLA-C*02:02,HLA-C*03:03,HLA-C*03:04,HLA-C*07:04, HLA-C*07:06,HLA-C*12:03,HLA-C*14:02,HLA-C*16:01,HLA-C*16:02,
  HLA-C*16:04
SVVAHLSTY

SEQ ID NO: 271 - protein, 8 aa, Homo sapiens
  Table 1.2; ACTL8; ENSG00000117148; HLA -B*56:01
SVWLGASV

SEQ ID NO: 272 - protein, 9 aa, Homo sapiens
  Table 1.2; ACTL8; ENSG00000117148; HLA -A*02:01,HLA-A*02:03,HLA-A*68:02,HLA-B*13:02,HLA-B*51:01, HLA-B*54:01,HLA-B*55:01,HLA-B*56:01
SVWLGASVV

SEQ ID NO: 273 - protein, 10 aa, Homo sapiens
  Table 1.2; ACTL8; ENSG00000117148; HLA -B*54:01,HLA-B*56:01
SVWLGASVVA

SEQ ID NO: 274 - protein, 9 aa, Homo sapiens
  Table 1.2; ACTL8; ENSG00000117148; HLA -B*35:03,HLA-B*55:01
TAGWNEPQM

SEQ ID NO: 275 - protein, 9 aa, Homo sapiens
  Table 1.2; ACTL8; ENSG00000117148; HLA -B*18:01
TETPLREPA

SEQ ID NO: 276 - protein, 9 aa, Homo sapiens
  Table 1.2; ACTL8; ENSG00000117148; HLA -A*01:01,HLA-A*30:02,HLA-B*15:01,HLA-B*15:03,HLA-B*35:01, HLA-B*46:01,HLA-C*04:01
TGVVVDSGY

SEQ ID NO: 277 - protein, 9 aa, Homo sapiens
  Table 1.2; ACTL8; ENSG00000117148; HLA -B*39:01,HLA-C*01:02
TLEFAGQDL

SEQ ID NO: 278 - protein, 8 aa, Homo sapiens
  Table 1.2; ACTL8; ENSG00000117148; HLA -A*03:01,HLA-A*03:02,HLA-A*11:01,HLA-B*27:05
TLYPGFTK

SEQ ID NO: 279 - protein, 9 aa, Homo sapiens
  Table 1.2; ACTL8; ENSG00000117148; HLA -A*03:01,HLA-A*03:02,HLA-A*11:01,HLA-A*31:01,HLA-A*33:01, HLA-A*33:03,HLA-A*68:01
TLYPGFTKR

SEQ ID NO: 280 - protein, 10 aa, Homo sapiens
  Table 1.2; ACTL8; ENSG00000117148; HLA -A*02:01,HLA-A*02:03,HLA-A*02:04,HLA-A*03:01
TLYPGFTKRL

SEQ ID NO: 281 - protein, 8 aa, Homo sapiens
  Table 1.2; ACTL8; ENSG00000117148; HLA -B*08:01,HLA-B*56:01
TPMQRVAP

SEQ ID NO: 282 - protein, 10 aa, Homo sapiens
  Table 1.2; ACTL8; ENSG00000117148; HLA -B*07:02,HLA-B*35:01,HLA-B*35:03,HLA-B*55:01,HLA-C*07:02
TPMQRVAPEM

SEQ ID NO: 283 - protein, 9 aa, Homo sapiens
  Table 1.2; ACTL8; ENSG00000117148; HLA -A*03:01,HLA-A*03:02,HLA-A*11:01,HLA-A*31:01,HLA-A*33:03, HLA-A*68:01,HLA-C*06:02,HLA-C*07:06
TVAVTQMNK

SEQ ID NO: 284 - protein, 10 aa, Homo sapiens
  Table 1.2; ACTL8; ENSG00000117148; HLA -A*25:01,HLA-A*26:01,HLA-A*32:01,HLA-B*15:01
TVIIDHGSGF

SEQ ID NO: 285 - protein, 8 aa, Homo sapiens
  Table 1.2; ACTL8; ENSG00000117148; HLA -A*31:01,HLA-A*33:03
TVWEGSNR

SEQ ID NO: 286 - protein, 10 aa, Homo sapiens
  Table 1.2; ACTL8; ENSG00000117148; HLA -A*25:01,HLA-B*57:01,HLA-B*58:01
TVWEGSNRNF

SEQ ID NO: 287 - protein, 9 aa, Homo sapiens
  Table 1.2; ACTL8; ENSG00000117148; HLA -A*33:01,HLA-A*33:03
TYQLPDGSR

SEQ ID NO: 288 - protein, 9 aa, Homo sapiens
  Table 1.2; ACTL8; ENSG00000117148; HLA -A*31:01,HLA-A*33:01,HLA-A*33:03
TYQSEWMSR

SEQ ID NO: 289 - protein, 11 aa, Homo sapiens
  Table 1.2; ACTL8; ENSG00000117148; HLA -B*57:01
VAHLSTYQSEW

SEQ ID NO: 290 - protein, 8 aa, Homo sapiens
  Table 1.2; ACTL8; ENSG00000117148; HLA -A*11:01,HLA-B*27:02
VAVTQMNK

SEQ ID NO: 291 - protein, 10 aa, Homo sapiens
  Table 1.2; ACTL8; ENSG00000117148; HLA -B*58:01,HLA-C*16:02
VAVTQMNKCY

SEQ ID NO: 292 - protein, 9 aa, Homo sapiens
  Table 1.2; ACTL8; ENSG00000117148; HLA -A*30:01,HLA-B*44:02,HLA-B*44:03,HLA-B*49:01
VELTPMQRV

SEQ ID NO: 293 - protein, 9 aa, Homo sapiens
  Table 1.2; ACTL8; ENSG00000117148; HLA -A*30:01,HLA-B*13:02,HLA-B*40:01,HLA-B*49:01
VESVESCEI

SEQ ID NO: 294 - protein, 11 aa, Homo sapiens
  Table 1.2; ACTL8; ENSG00000117148; HLA -B*40:01
VESVESCEISL

SEQ ID NO: 295 - protein, 9 aa, Homo sapiens
  Table 1.2; ACTL8; ENSG00000117148; HLA -A*23:01,HLA-A*24:02,HLA-B*38:01,HLA-C*14:02
VFEQPGPSI

SEQ ID NO: 296 - protein, 8 aa, Homo sapiens
  Table 1.2; ACTL8; ENSG00000117148; HLA -A*23:01,HLA-A*29:02,HLA-C*14:02
VFPNIVNY

SEQ ID NO: 297 - protein, 9 aa, Homo sapiens
  Table 1.2; ACTL8; ENSG00000117148; HLA -A*23:01,HLA-A*24:02
VFPNIVNYL

SEQ ID NO: 298 - protein, 9 aa, Homo sapiens
  Table 1.2; ACTL8; ENSG00000117148; HLA -A*02:07,HLA-A*23:01,HLA-A*24:02,HLA-A*25:01,HLA-A*26:01, HLA-A*29:02,HLA-A*30:02,HLA-A*32:01,HLA-B*07:02,HLA-B*15:01, HLA-B*15:03,HLA-B*37:01,HLA-B*44:02,HLA-B*44:03,HLA-B*46:01,
  HLA-B*58:01,HLA-C*01:02,HLA-C*02:02,HLA-C*03:03,HLA-C*03:04, HLA-C*05:01,HLA-C*07:04,HLA-C*14:02,HLA-C*16:04
VIIDHGSGF

SEQ ID NO: 299 - protein, 10 aa, Homo sapiens
  Table 1.2; ACTL8; ENSG00000117148; HLA -A*02:03,HLA-A*03:01
VIIDHGSGFL

SEQ ID NO: 300 - protein, 11 aa, Homo sapiens
  Table 1.2; ACTL8; ENSG00000117148; HLA -A*03:01,HLA-A*03:02,HLA-A*11:01,HLA-A*31:01
VIIDHGSGFLK

SEQ ID NO: 301 - protein, 9 aa, Homo sapiens
  Table 1.2; ACTL8; ENSG00000117148; HLA -A*11:01
VIITETPLR

SEQ ID NO: 302 - protein, 9 aa, Homo sapiens
  Table 1.2; ACTL8; ENSG00000117148; HLA -A*02:01,HLA-A*23:01,HLA-B*13:02
VLLADQLQM

SEQ ID NO: 303 - protein, 11 aa, Homo sapiens
  Table 1.2; ACTL8; ENSG00000117148; HLA -A*02:01
VLLADQLQMSL

SEQ ID NO: 304 - protein, 9 aa, Homo sapiens
  Table 1.2; ACTL8; ENSG00000117148; HLA -C*01:02,HLA-C*14:02
VMACGGNTL

SEQ ID NO: 305 - protein, 10 aa, Homo sapiens
  Table 1.2; ACTL8; ENSG00000117148; HLA -A*01:01,HLA-A*29:02,HLA-B*15:01,HLA-B*46:01,HLA-C*07:04
VMACGGNTLY

SEQ ID NO: 306 - protein, 9 aa, Homo sapiens
  Table 1.2; ACTL8; ENSG00000117148; HLA -B*51:01,HLA-B*56:01
VPPVIITET

SEQ ID NO: 307 - protein, 8 aa, Homo sapiens
  Table 1.2; ACTL8; ENSG00000117148; HLA -B*56:01
VPQNLGEA

SEQ ID NO: 308 - protein, 9 aa, Homo sapiens
  Table 1.2; ACTL8; ENSG00000117148; HLA -B*07:02,HLA-B*35:01,HLA-B*35:03,HLA-B*39:01,HLA-B*56:01, HLA-C*01:02,HLA-C*07:02,HLA-C*14:02
VPQNLGEAL

SEQ ID NO: 309 - protein, 11 aa, Homo sapiens
  Table 1.2; ACTL8; ENSG00000117148; HLA -B*27:02,HLA-B*35:01
VPQNLGEALDF

SEQ ID NO: 310 - protein, 9 aa, Homo sapiens
  Table 1.2; ACTL8; ENSG00000117148; HLA -A*25:01,HLA-A*32:01,HLA-B*57:01,HLA-B*58:01,HLA-C*12:03, HLA-C*16:01
VSSTKATVW

SEQ ID NO: 311 - protein, 8 aa, Homo sapiens
  Table 1.2; ACTL8; ENSG00000117148; HLA -A*25:01,HLA-A*30:02,HLA-A*32:01,HLA-B*15:01,HLA-B*15:03, HLA-B*39:01,HLA-B*46:01,HLA-B*58:01,HLA-C*07:01,HLA-C*07:04, HLA-C*12:03
VVAHLSTY

SEQ ID NO: 312 - protein, 8 aa, Homo sapiens
  Table 1.2; ACTL8; ENSG00000117148; HLA -A*02:07,HLA-B*38:01,HLA-B*39:01,HLA-C*04:01,HLA-C*05:01
VVDSGYGL

SEQ ID NO: 313 - protein, 9 aa, Homo sapiens
  Table 1.2; ACTL8; ENSG00000117148; HLA -A*01:01,HLA-C*05:01
VVDSGYGLT

SEQ ID NO: 314 - protein, 10 aa, Homo sapiens
  Table 1.2; ACTL8; ENSG00000117148; HLA -A*01:01,HLA-A*03:01,HLA-A*03:02,HLA-A*11:01,HLA-A*68:01
VVDSGYGLTR

SEQ ID NO: 315 - protein, 11 aa, Homo sapiens
  Table 1.2; ACTL8; ENSG00000117148; HLA -A*01:01,HLA-A*02:01,HLA-A*02:07,HLA-C*05:01
VVDSGYGLTRV

SEQ ID NO: 316 - protein, 8 aa, Homo sapiens
  Table 1.2; ACTL8; ENSG00000117148; HLA -B*39:01
VVVDSGYG

SEQ ID NO: 317 - protein, 9 aa, Homo sapiens
  Table 1.2; ACTL8; ENSG00000117148; HLA -A*02:01,HLA-A*02:03,HLA-A*02:04,HLA-A*02:07,HLA-A*23:01, HLA-A*25:01,HLA-A*26:01,HLA-A*30:01,HLA-A*32:01,HLA-A*68:02, HLA-B*13:02,HLA-B*15:01,HLA-B*15:03,HLA-B*27:05,HLA-B*35:03,
  HLA-B*38:01,HLA-B*39:01,HLA-B*40:01,HLA-B*46:01,HLA-B*55:01, HLA-B*58:01,HLA-C*01:02,HLA-C*03:03,HLA-C*03:04,HLA-C*07:04, HLA-C*14:02
VVVDSGYGL

SEQ ID NO: 318 - protein, 11 aa, Homo sapiens
  Table 1.2; ACTL8; ENSG00000117148; HLA -A*03:01,HLA-A*03:02,HLA-A*11:01,HLA-A*31:01,HLA-A*33:01, HLA-A*33:03,HLA-A*68:01,HLA-B*27:02,HLA-C*07:06
VVVDSGYGLTR

SEQ ID NO: 319 - protein, 11 aa, Homo sapiens
  Table 1.2; ACTL8; ENSG00000117148; HLA -A*23:01
VWLGASVVAHL

SEQ ID NO: 320 - protein, 8 aa, Homo sapiens
  Table 1.2; ACTL8; ENSG00000117148; HLA -B*08:01
YARRRVSL

SEQ ID NO: 321 - protein, 9 aa, Homo sapiens
  Table 1.2; ACTL8; ENSG00000117148; HLA -A*02:01,HLA-A*02:03,HLA-A*02:04,HLA-A*02:07,HLA-A*26:01, HLA-A*32:01,HLA-A*68:02,HLA-B*13:02,HLA-B*27:05,HLA-B*39:01, HLA-B*46:01,HLA-B*49:01,HLA-B*51:01,HLA-B*54:01,HLA-B*55:01,
  HLA-B*56:01,HLA-C*02:02,HLA-C*06:02,HLA-C*12:03,HLA-C*16:02, HLA-C*16:04
YASGLLTGV

SEQ ID NO: 322 - protein, 11 aa, Homo sapiens
  Table 1.2; ACTL8; ENSG00000117148; HLA -A*68:02,HLA-B*35:03,HLA-B*39:01,HLA-B*54:01
YASGLLTGVVV

SEQ ID NO: 323 - protein, 9 aa, Homo sapiens
  Table 1.2; ACTL8; ENSG00000117148; HLA -A*02:04,HLA-A*23:01,HLA-A*24:02,HLA-A*31:01,HLA-A*33:01, HLA-B*08:01,HLA-B*37:01,HLA-B*40:02,HLA-B*46:01,HLA-B*57:01, HLA-C*02:02,HLA-C*03:04,HLA-C*07:01,HLA-C*07:04,HLA-C*12:03,
  HLA-C*16:01
YGLTRVQPF

SEQ ID NO: 324 - protein, 9 aa, Homo sapiens
  Table 1.2; ACTL8; ENSG00000117148; HLA -A*02:07
YLWSFVLEN

SEQ ID NO: 325 - protein, 8 aa, Homo sapiens
  Table 1.2; ACTL8; ENSG00000117148; HLA -B*51:01
YPIERGRI

SEQ ID NO: 326 - protein, 9 aa, Homo sapiens
  Table 1.2; ACTL8; ENSG00000117148; HLA -B*07:02,HLA-B*08:01,HLA-B*35:01,HLA-B*35:03,HLA-B*51:01, HLA-B*54:01,HLA-C*03:04,HLA-C*07:02
YPIERGRIL

SEQ ID NO: 327 - protein, 9 aa, Homo sapiens
  Table 1.2; ACTL8; ENSG00000117148; HLA -A*02:01,HLA-A*02:04,HLA-B*13:02,HLA-B*27:05,HLA-B*37:01, HLA-B*38:01
YQLPDGSRV

SEQ ID NO: 328 - protein, 11 aa, Homo sapiens
  Table 1.2; ACTL8; ENSG00000117148; HLA -A*02:01,HLA-A*02:04,HLA-A*24:02,HLA-A*30:01,HLA-B*38:01, HLA-B*39:01
YQLPDGSRVEL

SEQ ID NO: 329 - protein, 11 aa, Homo sapiens
  Table 1.2; ACTL8; ENSG00000117148; HLA -B*15:01
YQSEWMSREEY

SEQ ID NO: 330 - protein, 9 aa, Homo sapiens
  Table 1.2; ACTL8; ENSG00000117148; HLA -A*02:07,HLA-A*26:01
YVPQNLGEA

SEQ ID NO: 331 - protein, 10 aa, Homo sapiens
  Table 1.2; ACTL8; ENSG00000117148; HLA -A*02:07,HLA-A*25:01,HLA-C*01:02
YVPQNLGEAL

SEQ ID NO: 332 - protein, 9 aa, Homo sapiens
  Table 1.2; ADAM2; ENSG00000104755; HLA -A*11:01,HLA-B*27:02
ADVSLYNEK

SEQ ID NO: 333 - protein, 9 aa, Homo sapiens
  Table 1.2; ADAM2; ENSG00000104755; HLA -A*03:02,HLA-A*11:01,HLA-A*31:01,HLA-A*33:01,HLA-A*33:03, HLA-A*68:01,HLA-C*07:06
AGGVVLHPR

SEQ ID NO: 334 - protein, 8 aa, Homo sapiens
  Table 1.2; ADAM2; ENSG00000104755; HLA -B*13:02
AIFVSFNI

SEQ ID NO: 335 - protein, 8 aa, Homo sapiens
  Table 1.2; ADAM2; ENSG00000104755; HLA -B*08:01,HLA-B*37:01
AIMVKVNF

SEQ ID NO: 336 - protein, 9 aa, Homo sapiens
  Table 1.2; ADAM2; ENSG00000104755; HLA -B*15:03
AKYIEMHVI

SEQ ID NO: 337 - protein, 9 aa, Homo sapiens
  Table 1.2; ADAM2; ENSG00000104755; HLA -A*23:01,HLA-A*30:01,HLA-A*32:01,HLA-B*08:01,HLA-B*13:02, HLA-B*15:01,HLA-B*15:03,HLA-B*27:05,HLA-B*37:01,HLA-B*38:01, HLA-B*39:01,HLA-B*40:01,HLA-B*40:02,HLA-B*46:01,HLA-C*02:02,
  HLA-C*03:03,HLA-C*03:04,HLA-C*07:04,HLA-C*12:03,HLA-C*14:02
ANYAGGVVL

SEQ ID NO: 338 - protein, 10 aa, Homo sapiens
  Table 1.2; ADAM2; ENSG00000104755; HLA -A*03:02
ANYAGGVVLH

SEQ ID NO: 339 - protein, 8 aa, Homo sapiens
  Table 1.2; ADAM2; ENSG00000104755; HLA -B*13:02
AQKVFQLI

SEQ ID NO: 340 - protein, 10 aa, Homo sapiens
  Table 1.2; ADAM2; ENSG00000104755; HLA -B*13:02
AQLLSLSMGI

SEQ ID NO: 341 - protein, 11 aa, Homo sapiens
  Table 1.2; ADAM2; ENSG00000104755; HLA -B*57:01,HLA-B*58:01
ASDHADSQKMW

SEQ ID NO: 342 - protein, 10 aa, Homo sapiens
  Table 1.2; ADAM2; ENSG00000104755; HLA -A*03:01,HLA-A*03:02,HLA-A*11:01
ASYKIVIEGK

SEQ ID NO: 343 - protein, 9 aa, Homo sapiens
  Table 1.2; ADAM2; ENSG00000104755; HLA -C*16:02
ATTGEANEL

SEQ ID NO: 344 - protein, 8 aa, Homo sapiens
  Table 1.2; ADAM2; ENSG00000104755; HLA -A*23:01
AVILAQLL

SEQ ID NO: 345 - protein, 10 aa, Homo sapiens
  Table 1.2; ADAM2; ENSG00000104755; HLA -A*25:01
AVILAQLLSL

SEQ ID NO: 346 - protein, 8 aa, Homo sapiens
  Table 1.2; ADAM2; ENSG00000104755; HLA -B*37:01
CDIATCRF

SEQ ID NO: 347 - protein, 9 aa, Homo sapiens
  Table 1.2; ADAM2; ENSG00000104755; HLA -B*13:02
CQCSGAVCI

SEQ ID NO: 348 - protein, 9 aa, Homo sapiens
  Table 1.2; ADAM2; ENSG00000104755; HLA -B*57:01
CSFEDFAHF

SEQ ID NO: 349 - protein, 9 aa, Homo sapiens
  Table 1.2; ADAM2; ENSG00000104755; HLA -A*03:01,HLA-A*11:01
CVLIAIMVK

SEQ ID NO: 350 - protein, 9 aa, Homo sapiens
  Table 1.2; ADAM2; ENSG00000104755; HLA -A*01:01,HLA-A*03:01,HLA-A*11:01,HLA-A*25:01,HLA-A*26:01, HLA-A*29:02,HLA-A*30:02,HLA-A*32:01,HLA-B*15:01,HLA-C*07:04
CVSSSYLGY

SEQ ID NO: 351 - protein, 8 aa, Homo sapiens
  Table 1.2; ADAM2; ENSG00000104755; HLA -B*51:01
DANYAGGV

SEQ ID NO: 352 - protein, 9 aa, Homo sapiens
  Table 1.2; ADAM2; ENSG00000104755; HLA -A*33:01,HLA-B*35:03,HLA-B*51:01,HLA-C*01:02
DANYAGGVV

SEQ ID NO: 353 - protein, 10 aa, Homo sapiens
  Table 1.2; ADAM2; ENSG00000104755; HLA -A*33:01,HLA-A*68:01,HLA-B*35:01,HLA-B*35:03,HLA-B*38:01, HLA-B*39:01,HLA-B*51:01,HLA-C*03:04,HLA-C*07:06
DANYAGGVVL

SEQ ID NO: 354 - protein, 11 aa, Homo sapiens
  Table 1.2; ADAM2; ENSG00000104755; HLA -A*33:01,HLA-A*68:01
DANYAGGVVLH

SEQ ID NO: 355 - protein, 8 aa, Homo sapiens
  Table 1.2; ADAM2; ENSG00000104755; HLA -B*18:01
DENKIATT

SEQ ID NO: 356 - protein, 9 aa, Homo sapiens
  Table 1.2; ADAM2; ENSG00000104755; HLA -B*18:01
DENKIATTG

SEQ ID NO: 357 - protein, 11 aa, Homo sapiens
  Table 1.2; ADAM2; ENSG00000104755; HLA -B*27:02
DEQPESESEPK

SEQ ID NO: 358 - protein, 8 aa, Homo sapiens
  Table 1.2; ADAM2; ENSG00000104755; HLA -A*33:01,HLA-A*33:03
DFAHFISK

SEQ ID NO: 359 - protein, 10 aa, Homo sapiens
  Table 1.2; ADAM2; ENSG00000104755; HLA -A*33:01
DFAHFISKQK

SEQ ID NO: 360 - protein, 8 aa, Homo sapiens
  Table 1.2; ADAM2; ENSG00000104755; HLA -B*38:01,HLA-B*39:01
DHADSQKM

SEQ ID NO: 361 - protein, 9 aa, Homo sapiens
  Table 1.2; ADAM2; ENSG00000104755; HLA -B*38:01
DHADSQKMW

SEQ ID NO: 362 - protein, 9 aa, Homo sapiens
  Table 1.2; ADAM2; ENSG00000104755; HLA -A*01:01,HLA-A*25:01,HLA-A*26:01,HLA-B*08:01
DIESRDLSF

SEQ ID NO: 363 - protein, 9 aa, Homo sapiens
  Table 1.2; ADAM2; ENSG00000104755; HLA -A*02:03,HLA-A*68:02,HLA-B*08:01
DLSFKLQSV

SEQ ID NO: 364 - protein, 8 aa, Homo sapiens
  Table 1.2; ADAM2; ENSG00000104755; HLA -B*08:01,HLA-B*54:01
DPFFKQQA

SEQ ID NO: 365 - protein, 9 aa, Homo sapiens
  Table 1.2; ADAM2; ENSG00000104755; HLA -A*68:01,HLA-A*68:02,HLA-B*08:01,HLA-B*35:01,HLA-B*35:03, HLA-B*51:01,HLA-B*54:01,HLA-B*55:01,HLA-B*56:01
DPFFKQQAV

SEQ ID NO: 366 - protein, 10 aa, Homo sapiens
  Table 1.2; ADAM2; ENSG00000104755; HLA -A*01:01,HLA-C*07:01
DQDFQNFCHY

SEQ ID NO: 367 - protein, 9 aa, Homo sapiens
  Table 1.2; ADAM2; ENSG00000104755; HLA -A*23:01,HLA-A*33:01,HLA-A*68:02,HLA-B*51:01,HLA-B*54:01
DSLPVQITV

SEQ ID NO: 368 - protein, 9 aa, Homo sapiens
  Table 1.2; ADAM2; ENSG00000104755; HLA -A*25:01,HLA-A*26:01,HLA-A*33:01,HLA-A*33:03,HLA-A*68:01, HLA-A*68:02,HLA-B*18:01,HLA-B*35:01,HLA-C*12:03
DTFGKEVEF

SEQ ID NO: 369 - protein, 8 aa, Homo sapiens
  Table 1.2; ADAM2; ENSG00000104755; HLA -A*03:02,HLA-A*33:01,HLA-A*33:03,HLA-A*68:01
DTTVVAQK

SEQ ID NO: 370 - protein, 9 aa, Homo sapiens
  Table 1.2; ADAM2; ENSG00000104755; HLA -A*25:01,HLA-A*26:01,HLA-A*33:01,HLA-A*33:03,HLA-A*68:01, HLA-A*68:02,HLA-B*13:02,HLA-B*51:01
DTTVVAQKV

SEQ ID NO: 371 - protein, 10 aa, Homo sapiens
  Table 1.2; ADAM2; ENSG00000104755; HLA -A*25:01,HLA-A*26:01
DTTVVAQKVF

SEQ ID NO: 372 - protein, 8 aa, Homo sapiens
  Table 1.2; ADAM2; ENSG00000104755; HLA -A*25:01,HLA-A*26:01,HLA-B*35:01
DVAFLLVY

SEQ ID NO: 373 - protein, 9 aa, Homo sapiens
  Table 1.2; ADAM2; ENSG00000104755; HLA -A*33:01,HLA-A*33:03,HLA-A*68:01,HLA-A*68:02
DVAFLLVYR

SEQ ID NO: 374 - protein, 8 aa, Homo sapiens
  Table 1.2; ADAM2; ENSG00000104755; HLA -B*51:01
EAIHFSGV

SEQ ID NO: 375 - protein, 10 aa, Homo sapiens
  Table 1.2; ADAM2; ENSG00000104755; HLA -A*25:01,HLA-A*68:01,HLA-A*68:02
EAIHFSGVKI

SEQ ID NO: 376 - protein, 9 aa, Homo sapiens
  Table 1.2; ADAM2; ENSG00000104755; HLA -A*23:01,HLA-A*24:02,HLA-A*25:01,HLA-A*26:01,HLA-A*30:02, HLA-A*32:01,HLA-A*33:01,HLA-A*33:03,HLA-A*68:01,HLA-A*68:02, HLA-B*18:01,HLA-B*27:02,HLA-B*35:01,HLA-B*35:03,HLA-B*38:01,
  HLA-B*44:02,HLA-B*44:03,HLA-B*46:01,HLA-B*51:01,HLA-B*57:01, HLA-B*58:01,HLA-C*07:06,HLA-C*16:04
EANELLHTF

SEQ ID NO: 377 - protein, 10 aa, Homo sapiens
  Table 1.2; ADAM2; ENSG00000104755; HLA -A*33:01,HLA-A*33:03,HLA-A*68:01,HLA-A*68:02
EANELLHTFL

SEQ ID NO: 378 - protein, 11 aa, Homo sapiens
  Table 1.2; ADAM2; ENSG00000104755; HLA -A*33:01
EANELLHTFLR

SEQ ID NO: 379 - protein, 9 aa, Homo sapiens
  Table 1.2; ADAM2; ENSG00000104755; HLA -A*33:01
ECYSHLNSK

SEQ ID NO: 380 - protein, 9 aa, Homo sapiens
  Table 1.2; ADAM2; ENSG00000104755; HLA -A*03:01,HLA-A*11:01,HLA-A*33:01,HLA-A*33:03,HLA-A*68:01, HLA-A*68:02,HLA-B*37:01
EDFAHFISK

SEQ ID NO: 381 - protein, 8 aa, Homo sapiens
  Table 1.2; ADAM2; ENSG00000104755; HLA -B*18:01
EECDLPEY

SEQ ID NO: 382 - protein, 9 aa, Homo sapiens
  Table 1.2; ADAM2; ENSG00000104755; HLA -A*25:01,HLA-A*26:01,HLA-A*30:02,HLA-A*32:01,HLA-B*15:01, HLA-B*15:03,HLA-B*18:01,HLA-B*35:01,HLA-B*44:02,HLA-B*44:03, HLA-B*46:01,HLA-C*16:04
EGIESQASY

SEQ ID NO: 383 - protein, 10 aa, Homo sapiens
  Table 1.2; ADAM2; ENSG00000104755; HLA -A*68:01
EGIESQASYK

SEQ ID NO: 384 - protein, 9 aa, Homo sapiens
  Table 1.2; ADAM2; ENSG00000104755; HLA -B*08:01
EGKPYTVNL

SEQ ID NO: 385 - protein, 8 aa, Homo sapiens
  Table 1.2; ADAM2; ENSG00000104755; HLA -B*08:01,HLA-B*51:01
EGYPKSVV

SEQ ID NO: 386 - protein, 9 aa, Homo sapiens
  Table 1.2; ADAM2; ENSG00000104755; HLA -A*25:01,HLA-A*26:01,HLA-A*30:01,HLA-B*08:01,HLA-B*15:03, HLA-B*18:01,HLA-B*35:01,HLA-B*35:03,HLA-B*37:01,HLA-B*39:01, HLA-B*40:02,HLA-B*46:01,HLA-B*51:01,HLA-C*02:02,HLA-C*03:03,
  HLA-C*03:04,HLA-C*07:04,HLA-C*12:03,HLA-C*16:01
EGYPKSVVM

SEQ ID NO: 387 - protein, 10 aa, Homo sapiens
  Table 1.2; ADAM2; ENSG00000104755; HLA -A*68:02
EGYPKSVVMV

SEQ ID NO: 388 - protein, 8 aa, Homo sapiens
  Table 1.2; ADAM2; ENSG00000104755; HLA -C*07:01
EHVIYQVK

SEQ ID NO: 389 - protein, 10 aa, Homo sapiens
  Table 1.2; ADAM2; ENSG00000104755; HLA -B*15:03,HLA-B*38:01
EKSNYVGATF

SEQ ID NO: 390 - protein, 8 aa, Homo sapiens
  Table 1.2; ADAM2; ENSG00000104755; HLA -A*33:01,HLA-A*33:03
EMHVIVEK

SEQ ID NO: 391 - protein, 11 aa, Homo sapiens
  Table 1.2; ADAM2; ENSG00000104755; HLA -A*01:01
EMHVIVEKQLY

SEQ ID NO: 392 - protein, 9 aa, Homo sapiens
  Table 1.2; ADAM2; ENSG00000104755; HLA -A*23:01,HLA-A*25:01,HLA-A*26:01,HLA-A*33:03,HLA-B*35:01, HLA-B*35:03,HLA-B*55:01
EPLESSVGF

SEQ ID NO: 393 - protein, 11 aa, Homo sapiens
  Table 1.2; ADAM2; ENSG00000104755; HLA -A*33:03
EPLESSVGFEH

SEQ ID NO: 394 - protein, 9 aa, Homo sapiens
  Table 1.2; ADAM2; ENSG00000104755; HLA -A*25:01,HLA-A*26:01,HLA-A*33:03,HLA-B*35:01,HLA-B*55:01, HLA-C*03:03
EPQQDFAKY

SEQ ID NO: 395 - protein, 9 aa, Homo sapiens
  Table 1.2; ADAM2; ENSG00000104755; HLA -A*33:03
ESLAVILAQ

SEQ ID NO: 396 - protein, 10 aa, Homo sapiens
  Table 1.2; ADAM2; ENSG00000104755; HLA -A*33:03,HLA-A*68:02
ESLAVILAQL

SEQ ID NO: 397 - protein, 10 aa, Homo sapiens
  Table 1.2; ADAM2; ENSG00000104755; HLA -A*68:01
ETCCDIATCR

SEQ ID NO: 398 - protein, 10 aa, Homo sapiens
  Table 1.2; ADAM2; ENSG00000104755; HLA -A*01:01,HLA-A*25:01,HLA-A*26:01
EVEFGPSECY

SEQ ID NO: 399 - protein, 9 aa, Homo sapiens
  Table 1.2; ADAM2; ENSG00000104755; HLA -A*33:01
FAHFISKQK

SEQ ID NO: 400 - protein, 8 aa, Homo sapiens
  Table 1.2; ADAM2; ENSG00000104755; HLA -B*37:01,HLA-B*38:01,HLA-B*49:01
FDSLPVQI

SEQ ID NO: 401 - protein, 10 aa, Homo sapiens
  Table 1.2; ADAM2; ENSG00000104755; HLA -A*68:02
FDSLPVQITV

SEQ ID NO: 402 - protein, 8 aa, Homo sapiens
  Table 1.2; ADAM2; ENSG00000104755; HLA -B*49:01
FEDFAHFI

SEQ ID NO: 403 - protein, 9 aa, Homo sapiens
  Table 1.2; ADAM2; ENSG00000104755; HLA -A*01:01,HLA-B*18:01
FEECDLPEY

SEQ ID NO: 404 - protein, 8 aa, Homo sapiens
  Table 1.2; ADAM2; ENSG00000104755; HLA -A*30:01,HLA-B*13:02,HLA-B*18:01,HLA-B*37:01,HLA-B*40:02, HLA-B*49:01
FEHVIYQV

SEQ ID NO: 405 - protein, 9 aa, Homo sapiens
  Table 1.2; ADAM2; ENSG00000104755; HLA -B*40:02
FEHVIYQVK

SEQ ID NO: 406 - protein, 8 aa, Homo sapiens
  Table 1.2; ADAM2; ENSG00000104755; HLA -B*18:01,HLA-B*37:01,HLA-B*49:01
FENVSYGI

SEQ ID NO: 407 - protein, 8 aa, Homo sapiens
  Table 1.2; ADAM2; ENSG00000104755; HLA -A*02:04
FLLQIPRA

SEQ ID NO: 408 - protein, 11 aa, Homo sapiens
  Table 1.2; ADAM2; ENSG00000104755; HLA -A*02:04
FLLQIPRATII

SEQ ID NO: 409 - protein, 9 aa, Homo sapiens
  Table 1.2; ADAM2; ENSG00000104755; HLA -A*02:01,HLA-A*02:03,HLA-A*02:04,HLA-A*02:07
FLLSGLGGL

SEQ ID NO: 410 - protein, 11 aa, Homo sapiens
  Table 1.2; ADAM2; ENSG00000104755; HLA -A*02:04,HLA-A*29:02
FLLSGLGGLRM

SEQ ID NO: 411 - protein, 8 aa, Homo sapiens
  Table 1.2; ADAM2; ENSG00000104755; HLA -A*02:07
FLPHNFRV

SEQ ID NO: 412 - protein, 9 aa, Homo sapiens
  Table 1.2; ADAM2; ENSG00000104755; HLA -A*02:07,HLA-A*29:02
FLPHNFRVY

SEQ ID NO: 413 - protein, 11 aa, Homo sapiens
  Table 1.2; ADAM2; ENSG00000104755; HLA -A*29:02
FLPHNFRVYSY

SEQ ID NO: 414 - protein, 9 aa, Homo sapiens
  Table 1.2; ADAM2; ENSG00000104755; HLA -A*02:03,HLA-A*02:04
FLRWKTSYL

SEQ ID NO: 415 - protein, 8 aa, Homo sapiens
  Table 1.2; ADAM2; ENSG00000104755; HLA -B*54:01
FPPVAIPA

SEQ ID NO: 416 - protein, 9 aa, Homo sapiens
  Table 1.2; ADAM2; ENSG00000104755; HLA -A*02:03,HLA-A*68:02
FVSFNITII

SEQ ID NO: 417 - protein, 10 aa, Homo sapiens
  Table 1.2; ADAM2; ENSG00000104755; HLA -A*25:01,HLA-A*30:01,HLA-A*30:02,HLA-B*15:01,HLA-B*18:01, HLA-B*27:02,HLA-B*27:05,HLA-B*37:01,HLA-B*38:01,HLA-B*40:01, HLA-B*40:02,HLA-B*44:02,HLA-B*44:03,HLA-B*49:01,HLA-B*57:01,
  HLA-C*02:02,HLA-C*16:04
GEANELLHTF

SEQ ID NO: 418 - protein, 11 aa, Homo sapiens
  Table 1.2; ADAM2; ENSG00000104755; HLA -A*30:01,HLA-B*40:01,HLA-B*44:02,HLA-B*49:01
GEANELLHTFL

SEQ ID NO: 419 - protein, 9 aa, Homo sapiens
  Table 1.2; ADAM2; ENSG00000104755; HLA -A*03:01,HLA-A*03:02
GIESQASYK

SEQ ID NO: 420 - protein, 9 aa, Homo sapiens
  Table 1.2; ADAM2; ENSG00000104755; HLA -A*03:02,HLA-A*11:01,HLA-B*27:02
GITYDDINK

SEQ ID NO: 421 - protein, 9 aa, Homo sapiens
  Table 1.2; ADAM2; ENSG00000104755; HLA -B*15:03
GKPYTVNLM

SEQ ID NO: 422 - protein, 8 aa, Homo sapiens
  Table 1.2; ADAM2; ENSG00000104755; HLA -B*13:02
GLTNAIFV

SEQ ID NO: 423 - protein, 10 aa, Homo sapiens
  Table 1.2; ADAM2; ENSG00000104755; HLA -A*02:04,HLA-A*23:01,HLA-A*24:02,HLA-A*25:01,HLA-A*29:02, HLA-B*15:03
GLTNAIFVSF

SEQ ID NO: 424 - protein, 8 aa, Homo sapiens
  Table 1.2; ADAM2; ENSG00000104755; HLA -B*13:02
GNFPPVAI

SEQ ID NO: 425 - protein, 9 aa, Homo sapiens
  Table 1.2; ADAM2; ENSG00000104755; HLA -B*07:02
GPSECYSHL

SEQ ID NO: 426 - protein, 10 aa, Homo sapiens
  Table 1.2; ADAM2; ENSG00000104755; HLA -A*01:01,HLA-A*03:01,HLA-A*03:02,HLA-A*11:01,HLA-A*68:01, HLA-B*27:02,HLA-C*07:06
GSDTTVVAQK

SEQ ID NO: 427 - protein, 11 aa, Homo sapiens
  Table 1.2; ADAM2; ENSG00000104755; HLA -A*01:01
GSDTTVVAQKV

SEQ ID NO: 428 - protein, 10 aa, Homo sapiens
  Table 1.2; ADAM2; ENSG00000104755; HLA -A*11:01
GSIDSGNFPP

SEQ ID NO: 429 - protein, 11 aa, Homo sapiens
  Table 1.2; ADAM2; ENSG00000104755; HLA -A*11:01
GSIDSGNFPPV

SEQ ID NO: 430 - protein, 10 aa, Homo sapiens
  Table 1.2; ADAM2; ENSG00000104755; HLA -A*25:01,HLA-A*26:01,HLA-A*29:02,HLA-A*30:02,HLA-A*32:01, HLA-B*15:01,HLA-B*15:03,HLA-B*39:01,HLA-B*46:01,HLA-B*57:01, HLA-C*07:01,HLA-C*07:04
GVLQFENVSY

SEQ ID NO: 431 - protein, 9 aa, Homo sapiens
  Table 1.2; ADAM2; ENSG00000104755; HLA -B*13:02
GVVLHPRTI

SEQ ID NO: 432 - protein, 8 aa, Homo sapiens
  Table 1.2; ADAM2; ENSG00000104755; HLA -A*33:03
GYIEGYPK

SEQ ID NO: 433 - protein, 9 aa, Homo sapiens
  Table 1.2; ADAM2; ENSG00000104755; HLA -A*24:02
GYPKSVVMV

SEQ ID NO: 434 - protein, 9 aa, Homo sapiens
  Table 1.2; ADAM2; ENSG00000104755; HLA -A*29:02
HDVAFLLVY

SEQ ID NO: 435 - protein, 9 aa, Homo sapiens
  Table 1.2; ADAM2; ENSG00000104755; HLA -B*15:03
HKKADVSLY

SEQ ID NO: 436 - protein, 8 aa, Homo sapiens
  Table 1.2; ADAM2; ENSG00000104755; HLA -B*08:01
HLNSKTDV

SEQ ID NO: 437 - protein, 9 aa, Homo sapiens
  Table 1.2; ADAM2; ENSG00000104755; HLA -A*02:01,HLA-A*02:03,HLA-B*55:01
HMGSDTTVV

SEQ ID NO: 438 - protein, 9 aa, Homo sapiens
  Table 1.2; ADAM2; ENSG00000104755; HLA -A*33:01
HNQPRLDPF

SEQ ID NO: 439 - protein, 10 aa, Homo sapiens
  Table 1.2; ADAM2; ENSG00000104755; HLA -B*07:02,HLA-C*07:02
HPRTISLESL

SEQ ID NO: 440 - protein, 8 aa, Homo sapiens
  Table 1.2; ADAM2; ENSG00000104755; HLA -B*08:01
HVIVEKQL

SEQ ID NO: 441 - protein, 9 aa, Homo sapiens
  Table 1.2; ADAM2; ENSG00000104755; HLA -A*01:01,HLA-A*25:01,HLA-A*26:01,HLA-A*29:02,HLA-A*30:02, HLA-A*32:01,HLA-B*15:01,HLA-B*15:03,HLA-B*35:01,HLA-B*44:03, HLA-B*46:01,HLA-B*55:01,HLA-B*57:01,HLA-B*58:01,HLA-C*03:03
HVIVEKQLY

SEQ ID NO: 442 - protein, 9 aa, Homo sapiens
  Table 1.2; ADAM2; ENSG00000104755; HLA -A*03:01,HLA-A*03:02,HLA-A*11:01
HVIYQVKHK

SEQ ID NO: 443 - protein, 9 aa, Homo sapiens
  Table 1.2; ADAM2; ENSG00000104755; HLA -A*29:02,HLA-A*30:02,HLA-C*14:02
HYQGYIEGY

SEQ ID NO: 444 - protein, 9 aa, Homo sapiens
  Table 1.2; ADAM2; ENSG00000104755; HLA -A*23:01,HLA-A*24:02,HLA-A*32:01,HLA-B*15:03,HLA-B*35:01, HLA-B*46:01,HLA-B*57:01,HLA-B*58:01,HLA-C*02:02,HLA-C*12:03, HLA-C*16:01
IAIMVKVNF

SEQ ID NO: 445 - protein, 10 aa, Homo sapiens
  Table 1.2; ADAM2; ENSG00000104755; HLA -B*35:03,HLA-C*03:03,HLA-C*03:04,HLA-C*16:02
IATTGEANEL

SEQ ID NO: 446 - protein, 8 aa, Homo sapiens
  Table 1.2; ADAM2; ENSG00000104755; HLA -A*30:01,HLA-B*13:02,HLA-B*18:01,HLA-B*37:01,HLA-B*40:01, HLA-B*40:02,HLA-B*49:01
IEGKPYTV

SEQ ID NO: 447 - protein, 10 aa, Homo sapiens
  Table 1.2; ADAM2; ENSG00000104755; HLA -A*30:01,HLA-B*40:01
IEGKPYTVNL

SEQ ID NO: 448 - protein, 8 aa, Homo sapiens
  Table 1.2; ADAM2; ENSG00000104755; HLA -B*49:01
IEGYPKSV

SEQ ID NO: 449 - protein, 9 aa, Homo sapiens
  Table 1.2; ADAM2; ENSG00000104755; HLA -A*30:01,HLA-B*40:01,HLA-B*40:02,HLA-B*49:01
IEGYPKSVV

SEQ ID NO: 450 - protein, 10 aa, Homo sapiens
  Table 1.2; ADAM2; ENSG00000104755; HLA -A*30:01,HLA-B*40:01
IEGYPKSVVM

SEQ ID NO: 451 - protein, 9 aa, Homo sapiens
  Table 1.2; ADAM2; ENSG00000104755; HLA -A*03:02,HLA-A*11:01,HLA-B*18:01
IEMHVIVEK

SEQ ID NO: 452 - protein, 11 aa, Homo sapiens
  Table 1.2; ADAM2; ENSG00000104755; HLA -B*44:02,HLA-B*44:03
IEMHVIVEKQL

SEQ ID NO: 453 - protein, 8 aa, Homo sapiens
  Table 1.2; ADAM2; ENSG00000104755; HLA -B*37:01
IENIYHSK

SEQ ID NO: 454 - protein, 8 aa, Homo sapiens
  Table 1.2; ADAM2; ENSG00000104755; HLA -B*49:01
IEPLESSV

SEQ ID NO: 455 - protein, 10 aa, Homo sapiens
  Table 1.2; ADAM2; ENSG00000104755; HLA -A*30:01,HLA-B*18:01,HLA-B*37:01,HLA-B*40:01,HLA-B*44:02, HLA-B*44:03
IEPLESSVGF

SEQ ID NO: 456 - protein, 9 aa, Homo sapiens
  Table 1.2; ADAM2; ENSG00000104755; HLA -A*30:01,HLA-B*13:02,HLA-B*37:01,HLA-B*38:01,HLA-B*40:01, HLA-B*40:02,HLA-B*44:02,HLA-B*44:03,HLA-B*49:01
IESQASYKI

SEQ ID NO: 457 - protein, 10 aa, Homo sapiens
  Table 1.2; ADAM2; ENSG00000104755; HLA -B*49:01
IESQASYKIV

SEQ ID NO: 458 - protein, 11 aa, Homo sapiens
  Table 1.2; ADAM2; ENSG00000104755; HLA -B*49:01
IESQASYKIVI

SEQ ID NO: 459 - protein, 8 aa, Homo sapiens
  Table 1.2; ADAM2; ENSG00000104755; HLA -B*18:01,HLA-B*37:01
IESRDLSF

SEQ ID NO: 460 - protein, 9 aa, Homo sapiens
  Table 1.2; ADAM2; ENSG00000104755; HLA -A*23:01,HLA-A*24:02
IFVSFNITI

SEQ ID NO: 461 - protein, 11 aa, Homo sapiens
  Table 1.2; ADAM2; ENSG00000104755; HLA -A*23:01,HLA-B*57:01
IGLTNAIFVSF

SEQ ID NO: 462 - protein, 8 aa, Homo sapiens
  Table 1.2; ADAM2; ENSG00000104755; HLA -B*38:01
IHFSGVKI

SEQ ID NO: 463 - protein, 9 aa, Homo sapiens
  Table 1.2; ADAM2; ENSG00000104755; HLA -B*46:01
IIKEGIESQ

SEQ ID NO: 464 - protein, 10 aa, Homo sapiens
  Table 1.2; ADAM2; ENSG00000104755; HLA -A*02:03
IIKEGIESQA

SEQ ID NO: 465 - protein, 9 aa, Homo sapiens
  Table 1.2; ADAM2; ENSG00000104755; HLA -B*57:01
IILSSLELW

SEQ ID NO: 466 - protein, 9 aa, Homo sapiens
  Table 1.2; ADAM2; ENSG00000104755; HLA -A*03:01
IIYANISGH

SEQ ID NO: 467 - protein, 11 aa, Homo sapiens
  Table 1.2; ADAM2; ENSG00000104755; HLA -B*15:03
IKEGIESQASY

SEQ ID NO: 468 - protein, 9 aa, Homo sapiens
  Table 1.2; ADAM2; ENSG00000104755; HLA -A*23:01,HLA-A*30:02,HLA-A*32:01,HLA-B*15:01,HLA-B*15:03, HLA-B*46:01,HLA-B*57:01
IMKPLDQDF

SEQ ID NO: 469 - protein, 9 aa, Homo sapiens
  Table 1.2; ADAM2; ENSG00000104755; HLA -A*02:04,HLA-A*02:07,HLA-A*03:01,HLA-A*03:02,HLA-A*23:01, HLA-A*24:02,HLA-A*29:02,HLA-A*30:02,HLA-A*31:01,HLA-A*32:01, HLA-B*15:01,HLA-B*15:03,HLA-B*37:01,HLA-B*38:01,HLA-B*46:01,
  HLA-B*55:01,HLA-B*57:01,HLA-B*58:01,HLA-C*01:02,HLA-C*02:02, HLA-C*04:01,HLA-C*07:04,HLA-C*12:03,HLA-C*14:02,HLA-C*16:01, HLA-C*16:02
IMNPEAIHF

SEQ ID NO: 470 - protein, 9 aa, Homo sapiens
  Table 1.2; ADAM2; ENSG00000104755; HLA -A*31:01
IMVKVNFQR

SEQ ID NO: 471 - protein, 9 aa, Homo sapiens
  Table 1.2; ADAM2; ENSG00000104755; HLA -B*54:01
IPFFIIFCV

SEQ ID NO: 472 - protein, 8 aa, Homo sapiens
  Table 1.2; ADAM2; ENSG00000104755; HLA -B*35:01
IPRATIIY

SEQ ID NO: 473 - protein, 9 aa, Homo sapiens
  Table 1.2; ADAM2; ENSG00000104755; HLA -B*07:02,HLA-B*54:01,HLA-B*55:01,HLA-B*56:01
IPRATIIYA

SEQ ID NO: 474 - protein, 9 aa, Homo sapiens
  Table 1.2; ADAM2; ENSG00000104755; HLA -C*05:01
ISDSGYTQC

SEQ ID NO: 475 - protein, 9 aa, Homo sapiens
  Table 1.2; ADAM2; ENSG00000104755; HLA -B*08:01
ISKQKSQCL

SEQ ID NO: 476 - protein, 8 aa, Homo sapiens
  Table 1.2; ADAM2; ENSG00000104755; HLA -B*08:01,HLA-B*46:01
ITIILSSL

SEQ ID NO: 477 - protein, 11 aa, Homo sapiens
  Table 1.2; ADAM2; ENSG00000104755; HLA -B*57:01
ITIILSSLELW

SEQ ID NO: 478 - protein, 10 aa, Homo sapiens
  Table 1.2; ADAM2; ENSG00000104755; HLA -A*25:01,HLA-B*57:01
ITVPEKIRSI

SEQ ID NO: 479 - protein, 8 aa, Homo sapiens
  Table 1.2; ADAM2; ENSG00000104755; HLA -A*03:01,HLA-A*03:02,HLA-A*11:01
ITYDDINK

SEQ ID NO: 480 - protein, 9 aa, Homo sapiens
  Table 1.2; ADAM2; ENSG00000104755; HLA -A*02:03,HLA-A*68:02
ITYDDINKC

SEQ ID NO: 481 - protein, 9 aa, Homo sapiens
  Table 1.2; ADAM2; ENSG00000104755; HLA -A*03:02
IVEKQLYNH

SEQ ID NO: 482 - protein, 8 aa, Homo sapiens
  Table 1.2; ADAM2; ENSG00000104755; HLA -B*15:01,HLA-B*46:01
IVIEGKPY

SEQ ID NO: 483 - protein, 10 aa, Homo sapiens
  Table 1.2; ADAM2; ENSG00000104755; HLA -A*02:01,HLA-A*02:03,HLA-A*02:04,HLA-A*02:07,HLA-A*23:01, HLA-A*25:01,HLA-A*26:01,HLA-A*32:01,HLA-A*68:02,HLA-B*13:02, HLA-B*49:01,HLA-B*51:01,HLA-B*55:01,HLA-B*56:01,HLA-C*02:02,
  HLA-C*12:03
IVIEGKPYTV

SEQ ID NO: 484 - protein, 9 aa, Homo sapiens
  Table 1.2; ADAM2; ENSG00000104755; HLA -A*23:01,HLA-A*24:02,HLA-A*29:02,HLA-A*32:01,HLA-B*58:01, HLA-C*04:01,HLA-C*14:02,HLA-C*16:02
IYANISGHL

SEQ ID NO: 485 - protein, 10 aa, Homo sapiens
  Table 1.2; ADAM2; ENSG00000104755; HLA -A*23:01,HLA-A*24:02
IYANISGHLC

SEQ ID NO: 486 - protein, 11 aa, Homo sapiens
  Table 1.2; ADAM2; ENSG00000104755; HLA -A*23:01,HLA-A*24:02
IYANISGHLCI

SEQ ID NO: 487 - protein, 9 aa, Homo sapiens
  Table 1.2; ADAM2; ENSG00000104755; HLA -A*24:02
IYHSKPMRW

SEQ ID NO: 488 - protein, 10 aa, Homo sapiens
  Table 1.2; ADAM2; ENSG00000104755; HLA -A*03:02,HLA-A*11:01,HLA-B*27:02
KADVSLYNEK

SEQ ID NO: 489 - protein, 10 aa, Homo sapiens
  Table 1.2; ADAM2; ENSG00000104755; HLA -A*32:01,HLA-B*37:01,HLA-B*40:02,HLA-B*44:02,HLA-B*44:03, HLA-C*16:01,HLA-C*16:02
KDIESRDLSF

SEQ ID NO: 490 - protein, 10 aa, Homo sapiens
  Table 1.2; ADAM2; ENSG00000104755; HLA -A*30:02,HLA-B*27:02,HLA-B*40:01,HLA-B*44:02,HLA-B*44:03, HLA-C*16:04
KEGIESQASY

SEQ ID NO: 491 - protein, 11 aa, Homo sapiens
  Table 1.2; ADAM2; ENSG00000104755; HLA -A*03:02
KEGIESQASYK

SEQ ID NO: 492 - protein, 10 aa, Homo sapiens
  Table 1.2; ADAM2; ENSG00000104755; HLA -A*30:01,HLA-B*40:01,HLA-B*40:02,HLA-B*49:01
KEVEFGPSEC

SEQ ID NO: 493 - protein, 11 aa, Homo sapiens
  Table 1.2; ADAM2; ENSG00000104755; HLA -A*30:01,HLA-A*30:02,HLA-B*15:01,HLA-B*15:03,HLA-B*18:01, HLA-B*27:02,HLA-B*44:02,HLA-B*44:03,HLA-C*16:04
KEVEFGPSECY

SEQ ID NO: 494 - protein, 11 aa, Homo sapiens
  Table 1.2; ADAM2; ENSG00000104755; HLA -B*27:05,HLA-B*40:01,HLA-B*58:01,HLA-C*01:02
KIATTGEANEL

SEQ ID NO: 495 - protein, 8 aa, Homo sapiens
  Table 1.2; ADAM2; ENSG00000104755; HLA -B*15:03
KKADVSLY

SEQ ID NO: 496 - protein, 11 aa, Homo sapiens
  Table 1.2; ADAM2; ENSG00000104755; HLA -A*03:02,HLA-A*32:01,HLA-B*15:01
KLQSVEPQQDF

SEQ ID NO: 497 - protein, 8 aa, Homo sapiens
  Table 1.2; ADAM2; ENSG00000104755; HLA -B*57:01
KNFLPHNF

SEQ ID NO: 498 - protein, 10 aa, Homo sapiens
  Table 1.2; ADAM2; ENSG00000104755; HLA -A*23:01,HLA-A*24:02,HLA-A*30:02,HLA-B*35:01,HLA-B*57:01
KPLDQDFQNF

SEQ ID NO: 499 - protein, 8 aa, Homo sapiens
  Table 1.2; ADAM2; ENSG00000104755; HLA -B*08:01,HLA-B*37:01,HLA-B*51:01,HLA-B*55:01
KPYTVNLM

SEQ ID NO: 500 - protein, 10 aa, Homo sapiens
  Table 1.2; ADAM2; ENSG00000104755; HLA -A*03:01
KPYTVNLMQK

SEQ ID NO: 501 - protein, 10 aa, Homo sapiens
  Table 1.2; ADAM2; ENSG00000104755; HLA -A*03:02
KQQAVCGNAK

SEQ ID NO: 502 - protein, 9 aa, Homo sapiens
  Table 1.2; ADAM2; ENSG00000104755; HLA -A*23:01,HLA-A*24:02,HLA-A*30:02,HLA-A*31:01,HLA-A*32:01, HLA-B*15:01,HLA-B*15:03,HLA-B*27:02,HLA-B*37:01,HLA-B*46:01, HLA-B*57:01,HLA-B*58:01,HLA-C*01:02,HLA-C*03:03,HLA-C*03:04,
  HLA-C*16:01,HLA-C*16:04
KSNYVGATF

SEQ ID NO: 503 - protein, 9 aa, Homo sapiens
  Table 1.2; ADAM2; ENSG00000104755; HLA -B*58:01
KSVVMVSTC

SEQ ID NO: 504 - protein, 8 aa, Homo sapiens
  Table 1.2; ADAM2; ENSG00000104755; HLA -A*31:01
KTSYLVLR

SEQ ID NO: 505 - protein, 8 aa, Homo sapiens
  Table 1.2; ADAM2; ENSG00000104755; HLA -A*23:01,HLA-A*24:02
KYIEMHVI

SEQ ID NO: 506 - protein, 9 aa, Homo sapiens
  Table 1.2; ADAM2; ENSG00000104755; HLA -A*24:02
KYIEMHVIV

SEQ ID NO: 507 - protein, 11 aa, Homo sapiens
  Table 1.2; ADAM2; ENSG00000104755; HLA -A*31:01
KYIEMHVIVEK

SEQ ID NO: 508 - protein, 9 aa, Homo sapiens
  Table 1.2; ADAM2; ENSG00000104755; HLA -C*02:02,HLA-C*12:03
LAVILAQLL

SEQ ID NO: 509 - protein, 8 aa, Homo sapiens
  Table 1.2; ADAM2; ENSG00000104755; HLA -B*37:01
LDQDFQNF

SEQ ID NO: 510 - protein, 8 aa, Homo sapiens
  Table 1.2; ADAM2; ENSG00000104755; HLA -A*30:01,HLA-B*18:01,HLA-B*37:01,HLA-B*40:01,HLA-B*49:01
LESLAVIL

SEQ ID NO: 511 - protein, 9 aa, Homo sapiens
  Table 1.2; ADAM2; ENSG00000104755; HLA -B*49:01
LESLAVILA

SEQ ID NO: 512 - protein, 9 aa, Homo sapiens
  Table 1.2; ADAM2; ENSG00000104755; HLA -B*18:01
LESSVGFEH

SEQ ID NO: 513 - protein, 10 aa, Homo sapiens
  Table 1.2; ADAM2; ENSG00000104755; HLA -B*49:01
LESSVGFEHV

SEQ ID NO: 514 - protein, 9 aa, Homo sapiens
  Table 1.2; ADAM2; ENSG00000104755; HLA -A*24:02,HLA-A*29:02
LFIPFFIIF

SEQ ID NO: 515 - protein, 8 aa, Homo sapiens
  Table 1.2; ADAM2; ENSG00000104755; HLA -B*08:01
LFMSKERM

SEQ ID NO: 516 - protein, 10 aa, Homo sapiens
  Table 1.2; ADAM2; ENSG00000104755; HLA -A*01:01,HLA-B*15:01
LLSLSMGITY

SEQ ID NO: 517 - protein, 8 aa, Homo sapiens
  Table 1.2; ADAM2; ENSG00000104755; HLA -B*35:01,HLA-B*54:01
LPHNFRVY

SEQ ID NO: 518 - protein, 10 aa, Homo sapiens
  Table 1.2; ADAM2; ENSG00000104755; HLA -A*29:02,HLA-B*35:01,HLA-B*54:01
LPHNFRVYSY

SEQ ID NO: 519 - protein, 8 aa, Homo sapiens
  Table 1.2; ADAM2; ENSG00000104755; HLA -B*54:01,HLA-B*56:01
LPVQITVP

SEQ ID NO: 520 - protein, 10 aa, Homo sapiens
  Table 1.2; ADAM2; ENSG00000104755; HLA -B*27:02
LPVQITVPEK

SEQ ID NO: 521 - protein, 11 aa, Homo sapiens
  Table 1.2; ADAM2; ENSG00000104755; HLA -B*51:01
LPVQITVPEKI

SEQ ID NO: 522 - protein, 8 aa, Homo sapiens
  Table 1.2; ADAM2; ENSG00000104755; HLA -A*30:02,HLA-A*32:01,HLA-B*15:01,HLA-B*15:03,HLA-B*18:01, HLA-B*39:01,HLA-B*46:01,HLA-C*14:02
LQFENVSY

SEQ ID NO: 523 - protein, 9 aa, Homo sapiens
  Table 1.2; ADAM2; ENSG00000104755; HLA -A*24:02,HLA-B*13:02
LQIPRATII

SEQ ID NO: 524 - protein, 10 aa, Homo sapiens
  Table 1.2; ADAM2; ENSG00000104755; HLA -B*15:01,HLA-B*15:03
LQIPRATIIY

SEQ ID NO: 525 - protein, 10 aa, Homo sapiens
  Table 1.2; ADAM2; ENSG00000104755; HLA -B*27:02
LRMDSNFDSL

SEQ ID NO: 526 - protein, 9 aa, Homo sapiens
  Table 1.2; ADAM2; ENSG00000104755; HLA -A*01:01
LSGLGGLRM

SEQ ID NO: 527 - protein, 9 aa, Homo sapiens
  Table 1.2; ADAM2; ENSG00000104755; HLA -A*01:01,HLA-A*03:01,HLA-A*29:02,HLA-A*30:02,HLA-A*32:01, HLA-B*15:01,HLA-B*15:03,HLA-B*35:01,HLA-B*46:01,HLA-B*57:01, HLA-B*58:01,HLA-C*02:02,HLA-C*07:01,HLA-C*12:03,HLA-C*16:01
LSLSMGITY

SEQ ID NO: 528 - protein, 9 aa, Homo sapiens
  Table 1.2; ADAM2; ENSG00000104755; HLA -A*23:01,HLA-A*24:02,HLA-A*25:01,HLA-A*26:01,HLA-A*29:02, HLA-A*30:02,HLA-A*31:01,HLA-A*32:01,HLA-A*33:03,HLA-A*68:02, HLA-B*15:01,HLA-B*35:01,HLA-B*46:01,HLA-B*57:01,HLA-B*58:01,
  HLA-C*02:02,HLA-C*12:03,HLA-C*16:04
LTNAIFVSF

SEQ ID NO: 529 - protein, 10 aa, Homo sapiens
  Table 1.2; ADAM2; ENSG00000104755; HLA -B*57:01
LVLRPHDVAF

SEQ ID NO: 530 - protein, 9 aa, Homo sapiens
  Table 1.2; ADAM2; ENSG00000104755; HLA -A*03:01,HLA-A*29:02,HLA-A*30:02,HLA-B*15:01
LVYREKSNY

SEQ ID NO: 531 - protein, 10 aa, Homo sapiens
  Table 1.2; ADAM2; ENSG00000104755; HLA -A*31:01,HLA-A*33:01,HLA-A*33:03
LYNEKDIESR

SEQ ID NO: 532 - protein, 8 aa, Homo sapiens
  Table 1.2; ADAM2; ENSG00000104755; HLA -B*37:01
MDSNFDSL

SEQ ID NO: 533 - protein, 10 aa, Homo sapiens
  Table 1.2; ADAM2; ENSG00000104755; HLA -A*11:01,HLA-B*27:02
MGITYDDINK

SEQ ID NO: 534 - protein, 9 aa, Homo sapiens
  Table 1.2; ADAM2; ENSG00000104755; HLA -B*35:03,HLA-B*54:01
MGSDTTVVA

SEQ ID NO: 535 - protein, 11 aa, Homo sapiens
  Table 1.2; ADAM2; ENSG00000104755; HLA -A*03:01,HLA-A*03:02,HLA-A*11:01,HLA-A*31:01,HLA-A*33:01, HLA-A*33:03,HLA-A*68:01,HLA-B*27:02,HLA-B*27:05,HLA-C*07:06
MGSDTTVVAQK

SEQ ID NO: 536 - protein, 9 aa, Homo sapiens
  Table 1.2; ADAM2; ENSG00000104755; HLA -B*38:01
MHVIVEKQL

SEQ ID NO: 537 - protein, 8 aa, Homo sapiens
  Table 1.2; ADAM2; ENSG00000104755; HLA -A*31:01,HLA-A*33:01,HLA-A*33:03
MVKVNFQR

SEQ ID NO: 538 - protein, 9 aa, Homo sapiens
  Table 1.2; ADAM2; ENSG00000104755; HLA -A*68:02
NAIFVSFNI

SEQ ID NO: 539 - protein, 10 aa, Homo sapiens
  Table 1.2; ADAM2; ENSG00000104755; HLA -A*30:01
NEKDIESRDL

SEQ ID NO: 540 - protein, 8 aa, Homo sapiens
  Table 1.2; ADAM2; ENSG00000104755; HLA -B*37:01
NELLHTFL

SEQ ID NO: 541 - protein, 10 aa, Homo sapiens
  Table 1.2; ADAM2; ENSG00000104755; HLA -B*44:02,HLA-B*44:03
NELLHTFLRW

SEQ ID NO: 542 - protein, 9 aa, Homo sapiens
  Table 1.2; ADAM2; ENSG00000104755; HLA -A*02:07,HLA-A*23:01,HLA-A*24:02,HLA-A*32:01,HLA-B*35:01, HLA-B*35:03,HLA-B*38:01,HLA-B*55:01,HLA-C*04:01,HLA-C*05:01, HLA-C*07:04
NFDSLPVQI

SEQ ID NO: 543 - protein, 10 aa, Homo sapiens
  Table 1.2; ADAM2; ENSG00000104755; HLA -A*29:02
NFLPHNFRVY

SEQ ID NO: 544 - protein, 9 aa, Homo sapiens
  Table 1.2; ADAM2; ENSG00000104755; HLA -C*14:02
NFPPVAIPA

SEQ ID NO: 545 - protein, 8 aa, Homo sapiens
  Table 1.2; ADAM2; ENSG00000104755; HLA -B*39:01
NHMGSDTT

SEQ ID NO: 546 - protein, 9 aa, Homo sapiens
  Table 1.2; ADAM2; ENSG00000104755; HLA -B*38:01,HLA-B*39:01
NHMGSDTTV

SEQ ID NO: 547 - protein, 10 aa, Homo sapiens
  Table 1.2; ADAM2; ENSG00000104755; HLA -B*38:01,HLA-B*39:01
NHMGSDTTVV

SEQ ID NO: 548 - protein, 11 aa, Homo sapiens
  Table 1.2; ADAM2; ENSG00000104755; HLA -B*38:01,HLA-B*39:01
NHMGSDTTVVA

SEQ ID NO: 549 - protein, 9 aa, Homo sapiens
  Table 1.2; ADAM2; ENSG00000104755; HLA -A*68:02,HLA-C*01:02
NITIILSSL

SEQ ID NO: 550 - protein, 8 aa, Homo sapiens
  Table 1.2; ADAM2; ENSG00000104755; HLA -B*08:01
NLMQKNFL

SEQ ID NO: 551 - protein, 9 aa, Homo sapiens
  Table 1.2; ADAM2; ENSG00000104755; HLA -A*24:02
NQPRLDPFF

SEQ ID NO: 552 - protein, 9 aa, Homo sapiens
  Table 1.2; ADAM2; ENSG00000104755; HLA -A*30:02,HLA-A*32:01,HLA-B*15:01,HLA-B*15:03,HLA-B*46:01
NQRCVSSSY

SEQ ID NO: 553 - protein, 9 aa, Homo sapiens
  Table 1.2; ADAM2; ENSG00000104755; HLA -B*35:03
NVSYGIEPL

SEQ ID NO: 554 - protein, 8 aa, Homo sapiens
  Table 1.2; ADAM2; ENSG00000104755; HLA -A*23:01,HLA-B*35:03,HLA-B*39:01,HLA-C*03:04,HLA-C*14:02
NYAGGVVL

SEQ ID NO: 555 - protein, 9 aa, Homo sapiens
  Table 1.2; ADAM2; ENSG00000104755; HLA -A*29:02,HLA-A*33:03
NYAGGVVLH

SEQ ID NO: 556 - protein, 11 aa, Homo sapiens
  Table 1.2; ADAM2; ENSG00000104755; HLA -A*31:01,HLA-A*33:01,HLA-A*33:03
NYAGGVVLHPR

SEQ ID NO: 557 - protein, 10 aa, Homo sapiens
  Table 1.2; ADAM2; ENSG00000104755; HLA -A*33:03
NYVGATFQGK

SEQ ID NO: 558 - protein, 9 aa, Homo sapiens
  Table 1.2; ADAM2; ENSG00000104755; HLA -B*49:01
PEAIHFSGV

SEQ ID NO: 559 - protein, 9 aa, Homo sapiens
  Table 1.2; ADAM2; ENSG00000104755; HLA -A*02:07
PLDQDFQNF

SEQ ID NO: 560 - protein, 8 aa, Homo sapiens
  Table 1.2; ADAM2; ENSG00000104755; HLA -A*30:02
PQQDFAKY

SEQ ID NO: 561 - protein, 9 aa, Homo sapiens
  Table 1.2; ADAM2; ENSG00000104755; HLA -A*03:02,HLA-A*11:01
PVQITVPEK

SEQ ID NO: 562 - protein, 8 aa, Homo sapiens
  Table 1.2; ADAM2; ENSG00000104755; HLA -B*08:01
QASYKIVI

SEQ ID NO: 563 - protein, 9 aa, Homo sapiens
  Table 1.2; ADAM2; ENSG00000104755; HLA -C*07:01
QCSGAVCIM

SEQ ID NO: 564 - protein, 9 aa, Homo sapiens
  Table 1.2; ADAM2; ENSG00000104755; HLA -A*30:01,HLA-B*37:01
QDFAKYIEM

SEQ ID NO: 565 - protein, 9 aa, Homo sapiens
  Table 1.2; ADAM2; ENSG00000104755; HLA -B*37:01,HLA-B*44:02,HLA-B*44:03
QDFQNFCHY

SEQ ID NO: 566 - protein, 9 aa, Homo sapiens
  Table 1.2; ADAM2; ENSG00000104755; HLA -A*03:01,HLA-A*03:02,HLA-A*11:01,HLA-A*31:01,HLA-A*33:01, HLA-B*27:02,HLA-B*27:05
QGYIEGYPK

SEQ ID NO: 567 - protein, 9 aa, Homo sapiens
  Table 1.2; ADAM2; ENSG00000104755; HLA -A*02:01,HLA-A*02:03,HLA-A*02:04,HLA-A*02:07,HLA-A*23:01, HLA-A*25:01,HLA-A*32:01,HLA-B*13:02,HLA-B*15:01,HLA-B*46:01
QLIGLTNAI

SEQ ID NO: 568 - protein, 9 aa, Homo sapiens
  Table 1.2; ADAM2; ENSG00000104755; HLA -B*13:02
QLLSLSMGI

SEQ ID NO: 569 - protein, 11 aa, Homo sapiens
  Table 1.2; ADAM2; ENSG00000104755; HLA -A*29:02,HLA-A*30:02
QLLSLSMGITY

SEQ ID NO: 570 - protein, 9 aa, Homo sapiens
  Table 1.2; ADAM2; ENSG00000104755; HLA -B*15:01,HLA-B*39:01,HLA-B*46:01,HLA-B*57:01,HLA-B*58:01
QSVEPQQDF

SEQ ID NO: 571 - protein, 11 aa, Homo sapiens
  Table 1.2; ADAM2; ENSG00000104755; HLA -A*11:01,HLA-B*27:02
QSVEPQQDFAK

SEQ ID NO: 572 - protein, 9 aa, Homo sapiens
  Table 1.2; ADAM2; ENSG00000104755; HLA -B*57:01,HLA-B*58:01
RATIIYANI

SEQ ID NO: 573 - protein, 9 aa, Homo sapiens
  Table 1.2; ADAM2; ENSG00000104755; HLA -B*40:02
REKSNYVGA

SEQ ID NO: 574 - protein, 11 aa, Homo sapiens
  Table 1.2; ADAM2; ENSG00000104755; HLA -B*40:02,HLA-B*44:02,HLA-B*57:01
REKSNYVGATF

SEQ ID NO: 575 - protein, 11 aa, Homo sapiens
  Table 1.2; ADAM2; ENSG00000104755; HLA -B*15:01
RGVLQFENVSY

SEQ ID NO: 576 - protein, 11 aa, Homo sapiens
  Table 1.2; ADAM2; ENSG00000104755; HLA -A*02:07
RLDPFFKQQAV

SEQ ID NO: 577 - protein, 11 aa, Homo sapiens
  Table 1.2; ADAM2; ENSG00000104755; HLA -A*02:07
RLPERRYIENI

SEQ ID NO: 578 - protein, 9 aa, Homo sapiens
  Table 1.2; ADAM2; ENSG00000104755; HLA -A*02:07
RMDSNFDSL

SEQ ID NO: 579 - protein, 11 aa, Homo sapiens
  Table 1.2; ADAM2; ENSG00000104755; HLA -A*29:02
RPHDVAFLLVY

SEQ ID NO: 580 - protein, 9 aa, Homo sapiens
  Table 1.2; ADAM2; ENSG00000104755; HLA -A*02:04
RVLFLLSGL

SEQ ID NO: 581 - protein, 10 aa, Homo sapiens
  Table 1.2; ADAM2; ENSG00000104755; HLA -A*02:03,HLA-A*03:01
RVYSYSGTGI

SEQ ID NO: 582 - protein, 10 aa, Homo sapiens
  Table 1.2; ADAM2; ENSG00000104755; HLA -A*31:01,HLA-B*57:01
RYIENIYHSK

SEQ ID NO: 583 - protein, 9 aa, Homo sapiens
  Table 1.2; ADAM2; ENSG00000104755; HLA -A*30:02,HLA-C*16:01
SASCPENHY

SEQ ID NO: 584 - protein, 9 aa, Homo sapiens
  Table 1.2; ADAM2; ENSG00000104755; HLA -B*37:01
SDHADSQKM

SEQ ID NO: 585 - protein, 10 aa, Homo sapiens
  Table 1.2; ADAM2; ENSG00000104755; HLA -B*44:02,HLA-B*44:03
SDHADSQKMW

SEQ ID NO: 586 - protein, 9 aa, Homo sapiens
  Table 1.2; ADAM2; ENSG00000104755; HLA -B*37:01
SDLWPGGSI

SEQ ID NO: 587 - protein, 8 aa, Homo sapiens
  Table 1.2; ADAM2; ENSG00000104755; HLA -B*37:01
SDTTVVAQ

SEQ ID NO: 588 - protein, 9 aa, Homo sapiens
  Table 1.2; ADAM2; ENSG00000104755; HLA -A*03:01,HLA-A*03:02,HLA-A*11:01,HLA-A*68:01,HLA-B*27:02, HLA-B*27:05,HLA-C*07:06,HLA-C*16:02
SDTTVVAQK

SEQ ID NO: 589 - protein, 9 aa, Homo sapiens
  Table 1.2; ADAM2; ENSG00000104755; HLA -A*24:02
SFEDFAHFI

SEQ ID NO: 590 - protein, 11 aa, Homo sapiens
  Table 1.2; ADAM2; ENSG00000104755; HLA -A*31:01
SFEDFAHFISK

SEQ ID NO: 591 - protein, 11 aa, Homo sapiens
  Table 1.2; ADAM2; ENSG00000104755; HLA -A*30:02
SGNCGISDSGY

SEQ ID NO: 592 - protein, 9 aa, Homo sapiens
  Table 1.2; ADAM2; ENSG00000104755; HLA -B*27:05,HLA-C*16:02
SGTGIMKPL

SEQ ID NO: 593 - protein, 9 aa, Homo sapiens
  Table 1.2; ADAM2; ENSG00000104755; HLA -B*39:01
SHLNSKTDV

SEQ ID NO: 594 - protein, 10 aa, Homo sapiens
  Table 1.2; ADAM2; ENSG00000104755; HLA -A*01:01,HLA-A*02:01,HLA-A*02:07
SIDSGNFPPV

SEQ ID NO: 595 - protein, 9 aa, Homo sapiens
  Table 1.2; ADAM2; ENSG00000104755; HLA -A*02:01,HLA-A*02:03,HLA-A*02:04,HLA-A*02:07,HLA-A*68:02, HLA-B*55:01
SLAVILAQL

SEQ ID NO: 596 - protein, 9 aa, Homo sapiens
  Table 1.2; ADAM2; ENSG00000104755; HLA -A*02:04,HLA-A*02:07,HLA-B*35:03
SLESLAVIL

SEQ ID NO: 597 - protein, 8 aa, Homo sapiens
  Table 1.2; ADAM2; ENSG00000104755; HLA -A*30:02,HLA-B*15:01,HLA-B*15:03,HLA-B*18:01,HLA-C*16:01
SLSMGITY

SEQ ID NO: 598 - protein, 11 aa, Homo sapiens
  Table 1.2; ADAM2; ENSG00000104755; HLA -A*31:01,HLA-A*68:01
SLYNEKDIESR

SEQ ID NO: 599 - protein, 10 aa, Homo sapiens
  Table 1.2; ADAM2; ENSG00000104755; HLA -A*68:02,HLA-B*13:02
SNFDSLPVQI

SEQ ID NO: 600 - protein, 8 aa, Homo sapiens
  Table 1.2; ADAM2; ENSG00000104755; HLA -A*23:01,HLA-A*25:01,HLA-A*32:01,HLA-B*15:01,HLA-B*15:03, HLA-B*18:01,HLA-B*37:01,HLA-B*46:01,HLA-C*01:02,HLA-C*03:03, HLA-C*03:04,HLA-C*04:01,HLA-C*14:02
SNYVGATF

SEQ ID NO: 601 - protein, 11 aa, Homo sapiens
  Table 1.2; ADAM2; ENSG00000104755; HLA -A*11:01
SNYVGATFQGK

SEQ ID NO: 602 - protein, 9 aa, Homo sapiens
  Table 1.2; ADAM2; ENSG00000104755; HLA -A*30:01,HLA-A*32:01,HLA-B*13:02,HLA-B*38:01,HLA-B*39:01, HLA-C*06:02,HLA-C*16:01
SQASYKIVI

SEQ ID NO: 603 - protein, 10 aa, Homo sapiens
  Table 1.2; ADAM2; ENSG00000104755; HLA -A*01:01,HLA-A*30:02
SSASCPENHY

SEQ ID NO: 604 - protein, 9 aa, Homo sapiens
  Table 1.2; ADAM2; ENSG00000104755; HLA -A*68:02,HLA-B*13:02
SSVGFEHVI

SEQ ID NO: 605 - protein, 10 aa, Homo sapiens
  Table 1.2; ADAM2; ENSG00000104755; HLA -A*03:02,HLA-A*11:01
SVEPQQDFAK

SEQ ID NO: 606 - protein, 11 aa, Homo sapiens
  Table 1.2; ADAM2; ENSG00000104755; HLA -A*01:01,HLA-A*25:01,HLA-A*26:01,HLA-A*29:02,HLA-A*30:02
SVEPQQDFAKY

SEQ ID NO: 607 - protein, 9 aa, Homo sapiens
  Table 1.2; ADAM2; ENSG00000104755; HLA -A*29:02
SVGFEHVIY

SEQ ID NO: 608 - protein, 11 aa, Homo sapiens
  Table 1.2; ADAM2; ENSG00000104755; HLA -A*68:02
SVGFEHVIYQV

SEQ ID NO: 609 - protein, 9 aa, Homo sapiens
  Table 1.2; ADAM2; ENSG00000104755; HLA -A*31:01,HLA-A*33:01,HLA-A*33:03
SYKIVIEGK

SEQ ID NO: 610 - protein, 9 aa, Homo sapiens
  Table 1.2; ADAM2; ENSG00000104755; HLA -A*23:01,HLA-C*04:01,HLA-C*14:02
SYLPPDCSV

SEQ ID NO: 611 - protein, 8 aa, Homo sapiens
  Table 1.2; ADAM2; ENSG00000104755; HLA -C*04:01,HLA-C*14:02
SYSGTGIM

SEQ ID NO: 612 - protein, 9 aa, Homo sapiens
  Table 1.2; ADAM2; ENSG00000104755; HLA -A*03:01,HLA-A*03:02,HLA-A*11:01,HLA-A*31:01,HLA-A*33:03, HLA-A*68:01
SYSGTGIMK

SEQ ID NO: 613 - protein, 10 aa, Homo sapiens
  Table 1.2; ADAM2; ENSG00000104755; HLA -C*06:02
SYSGTGIMKP

SEQ ID NO: 614 - protein, 9 aa, Homo sapiens
  Table 1.2; ADAM2; ENSG00000104755; HLA -C*16:01
TCTGLRGVL

SEQ ID NO: 615 - protein, 8 aa, Homo sapiens
  Table 1.2; ADAM2; ENSG00000104755; HLA -B*37:01,HLA-C*16:02
TDTFGKEV

SEQ ID NO: 616 - protein, 9 aa, Homo sapiens
  Table 1.2; ADAM2; ENSG00000104755; HLA -C*04:01
TDVSGNCGI

SEQ ID NO: 617 - protein, 9 aa, Homo sapiens
  Table 1.2; ADAM2; ENSG00000104755; HLA -A*29:02
TFLRWKTSY

SEQ ID NO: 618 - protein, 9 aa, Homo sapiens
  Table 1.2; ADAM2; ENSG00000104755; HLA -B*13:02
TISLESLAV

SEQ ID NO: 619 - protein, 8 aa, Homo sapiens
  Table 1.2; ADAM2; ENSG00000104755; HLA -B*18:01
TNAIFVSF

SEQ ID NO: 620 - protein, 8 aa, Homo sapiens
  Table 1.2; ADAM2; ENSG00000104755; HLA -C*01:02
TTGEANEL

SEQ ID NO: 621 - protein, 9 aa, Homo sapiens
  Table 1.2; ADAM2; ENSG00000104755; HLA -A*23:01,HLA-A*32:01,HLA-B*15:03,HLA-B*57:01,HLA-B*58:01, HLA-C*16:01
TTVVAQKVF

SEQ ID NO: 622 - protein, 11 aa, Homo sapiens
  Table 1.2; ADAM2; ENSG00000104755; HLA -A*68:02
TTVVAQKVFQL

SEQ ID NO: 623 - protein, 9 aa, Homo sapiens
  Table 1.2; ADAM2; ENSG00000104755; HLA -A*02:03,HLA-A*02:07,HLA-A*25:01,HLA-A*26:01,HLA-B*08:01, HLA-B*51:01
TVPEKIRSI

SEQ ID NO: 624 - protein, 8 aa, Homo sapiens
  Table 1.2; ADAM2; ENSG00000104755; HLA -A*31:01
VAFLLVYR

SEQ ID NO: 625 - protein, 8 aa, Homo sapiens
  Table 1.2; ADAM2; ENSG00000104755; HLA -B*37:01
VAQKVFQL

SEQ ID NO: 626 - protein, 9 aa, Homo sapiens
  Table 1.2; ADAM2; ENSG00000104755; HLA -A*23:01,HLA-A*24:02,HLA-B*13:02,HLA-B*51:01,HLA-B*58:01
VAQKVFQLI

SEQ ID NO: 627 - protein, 11 aa, Homo sapiens
  Table 1.2; ADAM2; ENSG00000104755; HLA -A*24:02
VCIMNPEAIHF

SEQ ID NO: 628 - protein, 8 aa, Homo sapiens
  Table 1.2; ADAM2; ENSG00000104755; HLA -B*49:01,HLA-C*12:03
VEFGPSEC

SEQ ID NO: 629 - protein, 9 aa, Homo sapiens
  Table 1.2; ADAM2; ENSG00000104755; HLA -A*26:01,HLA-A*29:02,HLA-A*30:01,HLA-A*30:02,HLA-A*32:01, HLA-B*15:01,HLA-B*15:03,HLA-B*18:01,HLA-B*27:02,HLA-B*35:01, HLA-B*37:01,HLA-B*39:01,HLA-B*40:01,HLA-B*40:02,HLA-B*44:02,
  HLA-B*44:03,HLA-B*46:01,HLA-B*49:01,HLA-C*02:02,HLA-C*07:04, HLA-C*16:04
VEFGPSECY

SEQ ID NO: 630 - protein, 9 aa, Homo sapiens
  Table 1.2; ADAM2; ENSG00000104755; HLA -A*30:01,HLA-B*40:02,HLA-B*44:02
VEKQLYNHM

SEQ ID NO: 631 - protein, 10 aa, Homo sapiens
  Table 1.2; ADAM2; ENSG00000104755; HLA -A*26:01,HLA-A*30:02,HLA-B*18:01,HLA-B*44:02,HLA-B*44:03
VEPQQDFAKY

SEQ ID NO: 632 - protein, 8 aa, Homo sapiens
  Table 1.2; ADAM2; ENSG00000104755; HLA -B*08:01,HLA-B*15:01,HLA-B*15:03,HLA-B*18:01,HLA-B*35:01, HLA-B*46:01,HLA-C*12:03
VGFEHVIY

SEQ ID NO: 633 - protein, 10 aa, Homo sapiens
  Table 1.2; ADAM2; ENSG00000104755; HLA -A*02:01,HLA-A*02:03,HLA-A*02:04,HLA-A*68:02
VGFEHVIYQV

SEQ ID NO: 634 - protein, 9 aa, Homo sapiens
  Table 1.2; ADAM2; ENSG00000104755; HLA -A*02:01,HLA-A*02:03,HLA-A*02:04,HLA-A*02:07,HLA-B*08:01, HLA-B*13:02,HLA-B*39:01,HLA-B*55:01,HLA-C*05:01,HLA-C*12:03, HLA-C*16:02
VIEGKPYTV

SEQ ID NO: 635 - protein, 9 aa, Homo sapiens
  Table 1.2; ADAM2; ENSG00000104755; HLA -A*02:01,HLA-A*02:04,HLA-A*02:07,HLA-A*03:01,HLA-A*23:01, HLA-A*24:02
VILAQLLSL

SEQ ID NO: 636 - protein, 8 aa, Homo sapiens
  Table 1.2; ADAM2; ENSG00000104755; HLA -A*32:01,HLA-B*08:01,HLA-B*15:01,HLA-B*15:03,HLA-B*39:01
VIVEKQLY

SEQ ID NO: 637 - protein, 8 aa, Homo sapiens
  Table 1.2; ADAM2; ENSG00000104755; HLA -A*03:01
VIYQVKHK

SEQ ID NO: 638 - protein, 9 aa, Homo sapiens
  Table 1.2; ADAM2; ENSG00000104755; HLA -A*03:01
VIYQVKHKK

SEQ ID NO: 639 - protein, 9 aa, Homo sapiens
  Table 1.2; ADAM2; ENSG00000104755; HLA -B*15:03
VKIFSNCSF

SEQ ID NO: 640 - protein, 11 aa, Homo sapiens
  Table 1.2; ADAM2; ENSG00000104755; HLA -A*02:03,HLA-A*02:04
VLFLLSGLGGL

SEQ ID NO: 641 - protein, 9 aa, Homo sapiens
  Table 1.2; ADAM2; ENSG00000104755; HLA -A*02:01,HLA-A*02:03,HLA-A*02:04,HLA-A*02:07,HLA-A*03:01, HLA-A*32:01,HLA-B*07:02,HLA-B*08:01,HLA-B*37:01,HLA-B*40:02, HLA-B*46:01,HLA-C*01:02
VLHPRTISL

SEQ ID NO: 642 - protein, 9 aa, Homo sapiens
  Table 1.2; ADAM2; ENSG00000104755; HLA -A*02:01,HLA-A*02:03,HLA-A*02:04,HLA-A*02:07,HLA-A*68:02, HLA-B*13:02,HLA-B*55:01,HLA-C*02:02
VLIAIMVKV

SEQ ID NO: 643 - protein, 9 aa, Homo sapiens
  Table 1.2; ADAM2; ENSG00000104755; HLA -A*01:01,HLA-A*03:02,HLA-A*29:02,HLA-A*30:02,HLA-A*32:01, HLA-B*15:01,HLA-B*15:03,HLA-B*39:01,HLA-B*46:01,HLA-B*58:01, HLA-C*07:04,HLA-C*14:02
VLQFENVSY

SEQ ID NO: 644 - protein, 9 aa, Homo sapiens
  Table 1.2; ADAM2; ENSG00000104755; HLA -A*23:01,HLA-A*32:01,HLA-B*07:02,HLA-B*08:01,HLA-B*15:01, HLA-B*15:03,HLA-B*37:01,HLA-B*46:01,HLA-B*57:01,HLA-C*07:04
VLRPHDVAF

SEQ ID NO: 645 - protein, 10 aa, Homo sapiens
  Table 1.2; ADAM2; ENSG00000104755; HLA -A*02:03,HLA-A*02:04,HLA-A*03:01
VLRPHDVAFL

SEQ ID NO: 646 - protein, 11 aa, Homo sapiens
  Table 1.2; ADAM2; ENSG00000104755; HLA -A*02:04
VLRPHDVAFLL

SEQ ID NO: 647 - protein, 9 aa, Homo sapiens
  Table 1.2; ADAM2; ENSG00000104755; HLA -A*02:03,HLA-B*13:02,HLA-B*15:03,HLA-B*46:01,HLA-B*55:01
VMVSTCTGL

SEQ ID NO: 648 - protein, 8 aa, Homo sapiens
  Table 1.2; ADAM2; ENSG00000104755; HLA -B*51:01
VPEKIRSI

SEQ ID NO: 649 - protein, 9 aa, Homo sapiens
  Table 1.2; ADAM2; ENSG00000104755; HLA -B*51:01
VPEKIRSII

SEQ ID NO: 650 - protein, 9 aa, Homo sapiens
  Table 1.2; ADAM2; ENSG00000104755; HLA -A*02:03,HLA-A*23:01,HLA-A*24:02,HLA-A*30:01,HLA-A*32:01, HLA-B*13:02,HLA-B*38:01,HLA-B*49:01,HLA-C*06:02
VQITVPEKI

SEQ ID NO: 651 - protein, 9 aa, Homo sapiens
  Table 1.2; ADAM2; ENSG00000104755; HLA -A*02:03,HLA-B*13:02,HLA-B*27:05
VQTGHPCGL

SEQ ID NO: 652 - protein, 9 aa, Homo sapiens
  Table 1.2; ADAM2; ENSG00000104755; HLA -A*23:01,HLA-A*68:02,HLA-C*12:03
VSFNITIIL

SEQ ID NO: 653 - protein, 8 aa, Homo sapiens
  Table 1.2; ADAM2; ENSG00000104755; HLA -A*01:01
VSSSYLGY

SEQ ID NO: 654 - protein, 9 aa, Homo sapiens
  Table 1.2; ADAM2; ENSG00000104755; HLA -A*02:01,HLA-A*02:03,HLA-A*02:04,HLA-A*02:07,HLA-A*68:02, HLA-B*08:01
VVAQKVFQL

SEQ ID NO: 655 - protein, 10 aa, Homo sapiens
  Table 1.2; ADAM2; ENSG00000104755; HLA -B*08:01
VVLHPRTISL

SEQ ID NO: 656 - protein, 9 aa, Homo sapiens
  Table 1.2; ADAM2; ENSG00000104755; HLA -A*24:02
VYREKSNYV

SEQ ID NO: 657 - protein, 9 aa, Homo sapiens
  Table 1.2; ADAM2; ENSG00000104755; HLA -A*23:01,HLA-A*24:02,HLA-C*04:01,HLA-C*14:02
VYSYSGTGI

SEQ ID NO: 658 - protein, 10 aa, Homo sapiens
  Table 1.2; ADAM2; ENSG00000104755; HLA -C*14:02
VYSYSGTGIM

SEQ ID NO: 659 - protein, 8 aa, Homo sapiens
  Table 1.2; ADAM2; ENSG00000104755; HLA -C*07:01,HLA-C*07:04,HLA-C*12:03
YAGGVVLH

SEQ ID NO: 660 - protein, 10 aa, Homo sapiens
  Table 1.2; ADAM2; ENSG00000104755; HLA -A*31:01,HLA-A*33:01,HLA-A*33:03,HLA-A*68:01
YAGGVVLHPR

SEQ ID NO: 661 - protein, 8 aa, Homo sapiens
  Table 1.2; ADAM2; ENSG00000104755; HLA -B*08:01,HLA-B*40:02,HLA-B*46:01,HLA-B*51:01,HLA-C*01:02, HLA-C*03:03,HLA-C*03:04,HLA-C*07:04,HLA-C*16:01,HLA-C*16:02
YANISGHL

SEQ ID NO: 662 - protein, 9 aa, Homo sapiens
  Table 1.2; ADAM2; ENSG00000104755; HLA -C*03:04
YANISGHLC

SEQ ID NO: 663 - protein, 10 aa, Homo sapiens
  Table 1.2; ADAM2; ENSG00000104755; HLA -B*51:01
YANISGHLCI

SEQ ID NO: 664 - protein, 10 aa, Homo sapiens
  Table 1.2; ADAM2; ENSG00000104755; HLA -A*68:02,HLA-B*54:01
YGIEPLESSV

SEQ ID NO: 665 - protein, 9 aa, Homo sapiens
  Table 1.2; ADAM2; ENSG00000104755; HLA -A*01:01,HLA-A*02:01,HLA-A*02:03,HLA-A*02:04,HLA-A*02:07, HLA-B*13:02,HLA-B*40:02,HLA-B*51:01,HLA-B*55:01,HLA-C*03:03, HLA-C*03:04,HLA-C*05:01,HLA-C*12:03,HLA-C*16:02
YIEGYPKSV

SEQ ID NO: 666 - protein, 9 aa, Homo sapiens
  Table 1.2; ADAM2; ENSG00000104755; HLA -A*01:01,HLA-A*02:07,HLA-A*03:02,HLA-A*11:01,HLA-A*68:01, HLA-B*27:02
YIENIYHSK

SEQ ID NO: 667 - protein, 10 aa, Homo sapiens
  Table 1.2; ADAM2; ENSG00000104755; HLA -B*15:03
YKIVIEGKPY

SEQ ID NO: 668 - protein, 9 aa, Homo sapiens
  Table 1.2; ADAM2; ENSG00000104755; HLA -A*02:03,HLA-A*02:04
YLVLRPHDV

SEQ ID NO: 669 - protein, 8 aa, Homo sapiens
  Table 1.2; ADAM2; ENSG00000104755; HLA -B*08:01,HLA-B*51:01,HLA-B*54:01,HLA-B*56:01
YPKSVVMV

SEQ ID NO: 670 - protein, 9 aa, Homo sapiens
  Table 1.2; ADAM2; ENSG00000104755; HLA -B*54:01
YPKSVVMVS

SEQ ID NO: 671 - protein, 10 aa, Homo sapiens
  Table 1.2; ADAM2; ENSG00000104755; HLA -B*54:01,HLA-B*56:01
YPKSVVMVST

SEQ ID NO: 672 - protein, 8 aa, Homo sapiens
  Table 1.2; ADAM2; ENSG00000104755; HLA -A*01:01,HLA-A*30:02,HLA-B*15:01,HLA-B*15:03,HLA-B*18:01, HLA-C*07:01,HLA-C*07:04
YQGYIEGY

SEQ ID NO: 673 - protein, 10 aa, Homo sapiens
  Table 1.2; ADAM2; ENSG00000104755; HLA -B*27:02
YQGYIEGYPK

SEQ ID NO: 674 - protein, 8 aa, Homo sapiens
  Table 1.2; ADAM2; ENSG00000104755; HLA -A*01:01,HLA-A*03:02,HLA-A*11:01
YSGTGIMK

SEQ ID NO: 675 - protein, 8 aa, Homo sapiens
  Table 1.2; ADAM2; ENSG00000104755; HLA -B*13:02,HLA-B*51:01,HLA-C*03:03,HLA-C*03:04
YSYSGTGI

SEQ ID NO: 676 - protein, 9 aa, Homo sapiens
  Table 1.2; ADAM2; ENSG00000104755; HLA -A*01:01,HLA-B*39:01,HLA-B*40:01,HLA-B*40:02,HLA-B*46:01, HLA-C*02:02,HLA-C*03:03,HLA-C*03:04,HLA-C*12:03
YSYSGTGIM

SEQ ID NO: 677 - protein, 10 aa, Homo sapiens
  Table 1.2; ADAM2; ENSG00000104755; HLA -A*01:01,HLA-A*03:01,HLA-A*03:02,HLA-A*11:01,HLA-A*68:01, HLA-B*27:02,HLA-C*07:06
YSYSGTGIMK

SEQ ID NO: 678 - protein, 9 aa, Homo sapiens
  Table 1.2; ADAM2; ENSG00000104755; HLA -A*01:01,HLA-A*03:01,HLA-A*03:02,HLA-A*11:01,HLA-A*68:01
YVGATFQGK

SEQ ID NO: 679 - protein, 10 aa, Homo sapiens
  Table 1.2; ADAM2; ENSG00000104755; HLA -A*26:01
YVGATFQGKM

SEQ ID NO: 680 - protein, 9 aa, Homo sapiens
  Table 1.2; ADAM2; ENSG00000104755; HLA -A*68:02,HLA-B*13:02
YVGKFLLQI

SEQ ID NO: 681 - protein, 10 aa, Homo sapiens
  Table 1.2; ADAM2; ENSG00000104755; HLA -A*02:03
YVQTGHPCGL

SEQ ID NO: 682 - protein, 8 aa, Homo sapiens
  Table 1.2; ADAM7; ENSG00000069206; HLA -A*11:01,HLA-B*37:01
ADDTVYRR

SEQ ID NO: 683 - protein, 8 aa, Homo sapiens
  Table 1.2; ADAM7; ENSG00000069206; HLA -B*38:01
AHQLGHNL

SEQ ID NO: 684 - protein, 9 aa, Homo sapiens
  Table 1.2; ADAM7; ENSG00000069206; HLA -A*01:01,HLA-A*30:02,HLA-B*15:01
AIESHDICY

SEQ ID NO: 685 - protein, 10 aa, Homo sapiens
  Table 1.2; ADAM7; ENSG00000069206; HLA -A*03:01,HLA-A*03:02,HLA-A*11:01
AIESHDICYK

SEQ ID NO: 686 - protein, 9 aa, Homo sapiens
  Table 1.2; ADAM7; ENSG00000069206; HLA -B*07:02,HLA-B*35:01,HLA-B*35:03,HLA-B*55:01
APVACEETL

SEQ ID NO: 687 - protein, 9 aa, Homo sapiens
  Table 1.2; ADAM7; ENSG00000069206; HLA -B*58:01
ASISTCNGL

SEQ ID NO: 688 - protein, 10 aa, Homo sapiens
  Table 1.2; ADAM7; ENSG00000069206; HLA -B*49:01
CEETLHVTNI

SEQ ID NO: 689 - protein, 11 aa, Homo sapiens
  Table 1.2; ADAM7; ENSG00000069206; HLA -A*29:02,HLA-A*30:02
CFYQGSIVHEY

SEQ ID NO: 690 - protein, 9 aa, Homo sapiens
  Table 1.2; ADAM7; ENSG00000069206; HLA -C*01:02
CLPYYSTSI

SEQ ID NO: 691 - protein, 9 aa, Homo sapiens
  Table 1.2; ADAM7; ENSG00000069206; HLA -A*29:02
CMLNIPFPY

SEQ ID NO: 692 - protein, 8 aa, Homo sapiens
  Table 1.2; ADAM7; ENSG00000069206; HLA -B*08:01
CPSGKCVM

SEQ ID NO: 693 - protein, 9 aa, Homo sapiens
  Table 1.2; ADAM7; ENSG00000069206; HLA -B*13:02
CQIKKAGSI

SEQ ID NO: 694 - protein, 9 aa, Homo sapiens
  Table 1.2; ADAM7; ENSG00000069206; HLA -A*01:01,HLA-A*30:02,HLA-A*32:01,HLA-B*15:01,HLA-B*58:01, HLA-C*16:01,HLA-C*16:02
CSQNQYHQY

SEQ ID NO: 695 - protein, 9 aa, Homo sapiens
  Table 1.2; ADAM7; ENSG00000069206; HLA -A*01:01,HLA-A*11:01
CTELNFTRK

SEQ ID NO: 696 - protein, 8 aa, Homo sapiens
  Table 1.2; ADAM7; ENSG00000069206; HLA -A*33:01
DAHTCVLK

SEQ ID NO: 697 - protein, 8 aa, Homo sapiens
  Table 1.2; ADAM7; ENSG00000069206; HLA -B*18:01
DDDILKTY

SEQ ID NO: 698 - protein, 9 aa, Homo sapiens
  Table 1.2; ADAM7; ENSG00000069206; HLA -B*38:01,HLA-B*49:01
DEAIESHDI

SEQ ID NO: 699 - protein, 11 aa, Homo sapiens
  Table 1.2; ADAM7; ENSG00000069206; HLA -B*18:01
DEAIESHDICY

SEQ ID NO: 700 - protein, 8 aa, Homo sapiens
  Table 1.2; ADAM7; ENSG00000069206; HLA -B*18:01
DECDFPEM

SEQ ID NO: 701 - protein, 8 aa, Homo sapiens
  Table 1.2; ADAM7; ENSG00000069206; HLA -B*18:01,HLA-B*37:01
DEGEHLVF

SEQ ID NO: 702 - protein, 10 aa, Homo sapiens
  Table 1.2; ADAM7; ENSG00000069206; HLA -B*18:01,HLA-B*44:02,HLA-B*44:03
DEGEHLVFKY

SEQ ID NO: 703 - protein, 8 aa, Homo sapiens
  Table 1.2; ADAM7; ENSG00000069206; HLA -B*18:01
DEKYVELF

SEQ ID NO: 704 - protein, 8 aa, Homo sapiens
  Table 1.2; ADAM7; ENSG00000069206; HLA -B*35:01,HLA-B*35:03,HLA-C*04:01
DFDHVVLL

SEQ ID NO: 705 - protein, 9 aa, Homo sapiens
  Table 1.2; ADAM7; ENSG00000069206; HLA -A*25:01,HLA-A*33:01,HLA-A*68:01,HLA-B*18:01,HLA-B*44:03, HLA-B*51:01,HLA-C*04:01
DGSIPALKF

SEQ ID NO: 706 - protein, 9 aa, Homo sapiens
  Table 1.2; ADAM7; ENSG00000069206; HLA -B*38:01
DLLPDTNII

SEQ ID NO: 707 - protein, 11 aa, Homo sapiens
  Table 1.2; ADAM7; ENSG00000069206; HLA -A*33:01
DLLPDTNIIAN

SEQ ID NO: 708 - protein, 8 aa, Homo sapiens
  Table 1.2; ADAM7; ENSG00000069206; HLA -B*51:01
DPQKNATV

SEQ ID NO: 709 - protein, 8 aa, Homo sapiens
  Table 1.2; ADAM7; ENSG00000069206; HLA -B*18:01
DQFRVNGF

SEQ ID NO: 710 - protein, 9 aa, Homo sapiens
  Table 1.2; ADAM7; ENSG00000069206; HLA -A*01:01,HLA-B*35:03,HLA-B*38:01,HLA-B*39:01,HLA-C*05:01
DSDGSIPAL

SEQ ID NO: 711 - protein, 10 aa, Homo sapiens
  Table 1.2; ADAM7; ENSG00000069206; HLA -A*01:01,HLA-A*68:01
DSDGSIPALK

SEQ ID NO: 712 - protein, 11 aa, Homo sapiens
  Table 1.2; ADAM7; ENSG00000069206; HLA -A*01:01,HLA-A*33:01
DSDGSIPALKF

SEQ ID NO: 713 - protein, 9 aa, Homo sapiens
  Table 1.2; ADAM7; ENSG00000069206; HLA -A*01:01,HLA-A*26:01,HLA-A*68:01,HLA-A*68:02,HLA-B*39:01, HLA-B*54:01
DSTDIGLVA

SEQ ID NO: 714 - protein, 8 aa, Homo sapiens
  Table 1.2; ADAM7; ENSG00000069206; HLA -A*33:01,HLA-A*33:03,HLA-A*68:01,HLA-C*07:06
DTNIIANR

SEQ ID NO: 715 - protein, 9 aa, Homo sapiens
  Table 1.2; ADAM7; ENSG00000069206; HLA -A*26:01,HLA-A*33:01,HLA-A*33:03,HLA-A*68:01
DTNIIANRM

SEQ ID NO: 716 - protein, 9 aa, Homo sapiens
  Table 1.2; ADAM7; ENSG00000069206; HLA -A*68:02,HLA-B*51:01
EAFTRHPQI

SEQ ID NO: 717 - protein, 8 aa, Homo sapiens
  Table 1.2; ADAM7; ENSG00000069206; HLA -B*51:01
EAIESHDI

SEQ ID NO: 718 - protein, 10 aa, Homo sapiens
  Table 1.2; ADAM7; ENSG00000069206; HLA -A*01:01,HLA-A*25:01,HLA-A*26:01,HLA-A*29:02,HLA-A*33:01, HLA-A*33:03,HLA-A*68:01,HLA-B*15:01,HLA-B*35:01,HLA-B*35:03, HLA-B*44:03,HLA-B*55:01,HLA-B*58:01,HLA-C*07:06
EAIESHDICY

SEQ ID NO: 719 - protein, 11 aa, Homo sapiens
  Table 1.2; ADAM7; ENSG00000069206; HLA -A*33:01,HLA-A*68:01
EAIESHDICYK

SEQ ID NO: 720 - protein, 8 aa, Homo sapiens
  Table 1.2; ADAM7; ENSG00000069206; HLA -B*37:01
EDSKIKGI

SEQ ID NO: 721 - protein, 9 aa, Homo sapiens
  Table 1.2; ADAM7; ENSG00000069206; HLA -B*44:02,HLA-B*44:03,HLA-B*49:01
EEDSKIKGI

SEQ ID NO: 722 - protein, 8 aa, Homo sapiens
  Table 1.2; ADAM7; ENSG00000069206; HLA -B*18:01,HLA-B*49:01
EEELLYEI

SEQ ID NO: 723 - protein, 10 aa, Homo sapiens
  Table 1.2; ADAM7; ENSG00000069206; HLA -B*40:01,HLA-B*44:02,HLA-B*44:03
EEELLYEIKL

SEQ ID NO: 724 - protein, 8 aa, Homo sapiens
  Table 1.2; ADAM7; ENSG00000069206; HLA -B*18:01
EEGQAPVA

SEQ ID NO: 725 - protein, 9 aa, Homo sapiens
  Table 1.2; ADAM7; ENSG00000069206; HLA -A*30:01
EEGQAPVAC

SEQ ID NO: 726 - protein, 9 aa, Homo sapiens
  Table 1.2; ADAM7; ENSG00000069206; HLA -A*30:01,HLA-B*18:01,HLA-B*40:01,HLA-B*40:02,HLA-B*44:02, HLA-B*44:03
EELLYEIKL

SEQ ID NO: 727 - protein, 9 aa, Homo sapiens
  Table 1.2; ADAM7; ENSG00000069206; HLA -A*30:01,HLA-B*18:01,HLA-B*37:01,HLA-B*40:01,HLA-B*40:02, HLA-B*44:02,HLA-B*44:03,HLA-B*49:01
EETLHVTNI

SEQ ID NO: 728 - protein, 11 aa, Homo sapiens
  Table 1.2; ADAM7; ENSG00000069206; HLA -B*44:02
EETLHVTNITI

SEQ ID NO: 729 - protein, 11 aa, Homo sapiens
  Table 1.2; ADAM7; ENSG00000069206; HLA -A*23:01,HLA-A*24:02
EFLGSNYSETF

SEQ ID NO: 730 - protein, 9 aa, Homo sapiens
  Table 1.2; ADAM7; ENSG00000069206; HLA -A*01:01,HLA-A*29:02,HLA-A*33:01
EGEHLVFKY

SEQ ID NO: 731 - protein, 9 aa, Homo sapiens
  Table 1.2; ADAM7; ENSG00000069206; HLA -A*33:01,HLA-A*33:03
EGQQLVRPK

SEQ ID NO: 732 - protein, 11 aa, Homo sapiens
  Table 1.2; ADAM7; ENSG00000069206; HLA -A*26:01
ELFDDEAIESH

SEQ ID NO: 733 - protein, 11 aa, Homo sapiens
  Table 1.2; ADAM7; ENSG00000069206; HLA -A*01:01,HLA-A*26:01
ELFIVADDTVY

SEQ ID NO: 734 - protein, 10 aa, Homo sapiens
  Table 1.2; ADAM7; ENSG00000069206; HLA -A*33:01,HLA-A*33:03
ELLYEIKLNR

SEQ ID NO: 735 - protein, 10 aa, Homo sapiens
  Table 1.2; ADAM7; ENSG00000069206; HLA -A*23:01,HLA-A*25:01,HLA-A*26:01,HLA-A*68:02
ELYSNIETTL

SEQ ID NO: 736 - protein, 9 aa, Homo sapiens
  Table 1.2; ADAM7; ENSG00000069206; HLA -B*35:01,HLA-B*35:03,HLA-B*55:01
EPILPEIHF

SEQ ID NO: 737 - protein, 9 aa, Homo sapiens
  Table 1.2; ADAM7; ENSG00000069206; HLA -A*26:01
ESHDICYKM

SEQ ID NO: 738 - protein, 11 aa, Homo sapiens
  Table 1.2; ADAM7; ENSG00000069206; HLA -A*25:01,HLA-A*26:01
ETFYSMKGEAF

SEQ ID NO: 739 - protein, 10 aa, Homo sapiens
  Table 1.2; ADAM7; ENSG00000069206; HLA -A*25:01,HLA-A*26:01
ETLGVENKGY

SEQ ID NO: 740 - protein, 11 aa, Homo sapiens
  Table 1.2; ADAM7; ENSG00000069206; HLA -A*26:01,HLA-A*33:01
ETLGVENKGYF

SEQ ID NO: 741 - protein, 10 aa, Homo sapiens
  Table 1.2; ADAM7; ENSG00000069206; HLA -A*68:02
ETLHVTNITI

SEQ ID NO: 742 - protein, 9 aa, Homo sapiens
  Table 1.2; ADAM7; ENSG00000069206; HLA -A*25:01
ETTLLRFSF

SEQ ID NO: 743 - protein, 9 aa, Homo sapiens
  Table 1.2; ADAM7; ENSG00000069206; HLA -A*29:02
FFRINDQRY

SEQ ID NO: 744 - protein, 10 aa, Homo sapiens
  Table 1.2; ADAM7; ENSG00000069206; HLA -A*02:01,HLA-A*02:04,HLA-A*02:07,HLA-A*30:01,HLA-B*27:05, HLA-B*38:01,HLA-B*40:01,HLA-B*40:02,HLA-C*01:02,HLA-C*07:04
FILGVEGQQL

SEQ ID NO: 745 - protein, 11 aa, Homo sapiens
  Table 1.2; ADAM7; ENSG00000069206; HLA -A*68:02
FILGVEGQQLV

SEQ ID NO: 746 - protein, 9 aa, Homo sapiens
  Table 1.2; ADAM7; ENSG00000069206; HLA -A*01:01,HLA-A*26:01,HLA-B*15:01,HLA-B*15:03,HLA-B*35:01, HLA-B*35:03,HLA-B*46:01,HLA-B*55:01,HLA-C*02:02,HLA-C*03:03, HLA-C*07:04
FIVADDTVY

SEQ ID NO: 747 - protein, 10 aa, Homo sapiens
  Table 1.2; ADAM7; ENSG00000069206; HLA -A*68:01,HLA-A*68:02,HLA-B*27:02
FIVADDTVYR

SEQ ID NO: 748 - protein, 11 aa, Homo sapiens
  Table 1.2; ADAM7; ENSG00000069206; HLA -A*01:01
FLGSNYSETFY

SEQ ID NO: 749 - protein, 9 aa, Homo sapiens
  Table 1.2; ADAM7; ENSG00000069206; HLA -A*02:01,HLA-A*02:03,HLA-A*02:04,HLA-B*13:02
FLYHDSTDI

SEQ ID NO: 750 - protein, 11 aa, Homo sapiens
  Table 1.2; ADAM7; ENSG00000069206; HLA -A*02:01,HLA-A*02:03,HLA-A*02:04,HLA-A*02:07
FLYHDSTDIGL

SEQ ID NO: 751 - protein, 9 aa, Homo sapiens
  Table 1.2; ADAM7; ENSG00000069206; HLA -B*15:03,HLA-B*35:01,HLA-B*55:01,HLA-C*07:01
FPCKNSEGY

SEQ ID NO: 752 - protein, 10 aa, Homo sapiens
  Table 1.2; ADAM7; ENSG00000069206; HLA -B*54:01
FPYNFHDFQF

SEQ ID NO: 753 - protein, 9 aa, Homo sapiens
  Table 1.2; ADAM7; ENSG00000069206; HLA -A*30:02,HLA-B*46:01
FSKCSQNQY

SEQ ID NO: 754 - protein, 9 aa, Homo sapiens
  Table 1.2; ADAM7; ENSG00000069206; HLA -A*02:07,HLA-A*25:01
FVNMIYKTL

SEQ ID NO: 755 - protein, 10 aa, Homo sapiens
  Table 1.2; ADAM7; ENSG00000069206; HLA -A*23:01,HLA-A*24:02,HLA-A*26:01,HLA-A*29:02,HLA-A*30:02, HLA-A*33:01,HLA-A*33:03,HLA-B*46:01,HLA-C*02:02,HLA-C*14:02
FYQGSIVHEY

SEQ ID NO: 756 - protein, 9 aa, Homo sapiens
  Table 1.2; ADAM7; ENSG00000069206; HLA -A*23:01,HLA-A*24:02,HLA-C*14:02
FYSMKGEAF

SEQ ID NO: 757 - protein, 9 aa, Homo sapiens
  Table 1.2; ADAM7; ENSG00000069206; HLA -A*30:01,HLA-B*40:02,HLA-B*49:01
GECLNMEKV

SEQ ID NO: 758 - protein, 10 aa, Homo sapiens
  Table 1.2; ADAM7; ENSG00000069206; HLA -B*44:02,HLA-B*44:03
GECLNMEKVY

SEQ ID NO: 759 - protein, 8 aa, Homo sapiens
  Table 1.2; ADAM7; ENSG00000069206; HLA -A*30:01,HLA-B*37:01,HLA-B*40:01,HLA-B*40:02,HLA-B*49:01
GEDKTYHL

SEQ ID NO: 760 - protein, 8 aa, Homo sapiens
  Table 1.2; ADAM7; ENSG00000069206; HLA -B*18:01,HLA-B*27:02,HLA-B*37:01,HLA-B*44:02,HLA-B*44:03
GEHLVFKY

SEQ ID NO: 761 - protein, 10 aa, Homo sapiens
  Table 1.2; ADAM7; ENSG00000069206; HLA -A*29:02
GFFRINDQRY

SEQ ID NO: 762 - protein, 10 aa, Homo sapiens
  Table 1.2; ADAM7; ENSG00000069206; HLA -A*03:01,HLA-A*03:02,HLA-A*11:01,HLA-A*26:01,HLA-A*68:01, HLA-B*27:02,HLA-B*27:05,HLA-C*07:06
GIADPNQSAK

SEQ ID NO: 763 - protein, 9 aa, Homo sapiens
  Table 1.2; ADAM7; ENSG00000069206; HLA -B*13:02
GIGVLILLV

SEQ ID NO: 764 - protein, 9 aa, Homo sapiens
  Table 1.2; ADAM7; ENSG00000069206; HLA -A*02:01,HLA-A*02:03,HLA-B*13:02
GMVNFVNMI

SEQ ID NO: 765 - protein, 10 aa, Homo sapiens
  Table 1.2; ADAM7; ENSG00000069206; HLA -A*29:02,HLA-A*30:02
GMVNFVNMIY

SEQ ID NO: 766 - protein, 11 aa, Homo sapiens
  Table 1.2; ADAM7; ENSG00000069206; HLA -A*03:01
GMVNFVNMIYK

SEQ ID NO: 767 - protein, 9 aa, Homo sapiens
  Table 1.2; ADAM7; ENSG00000069206; HLA -B*27:05
GQAPVACEE

SEQ ID NO: 768 - protein, 11 aa, Homo sapiens
  Table 1.2; ADAM7; ENSG00000069206; HLA -B*13:02,HLA-B*27:05,HLA-B*38:01
GQAPVACEETL

SEQ ID NO: 769 - protein, 8 aa, Homo sapiens
  Table 1.2; ADAM7; ENSG00000069206; HLA -A*03:02
GQQLVRPK

SEQ ID NO: 770 - protein, 8 aa, Homo sapiens
  Table 1.2; ADAM7; ENSG00000069206; HLA -B*57:01,HLA-B*58:01
GSIPALKF

SEQ ID NO: 771 - protein, 10 aa, Homo sapiens
  Table 1.2; ADAM7; ENSG00000069206; HLA -A*11:01,HLA-A*31:01
GSIPALKFSK

SEQ ID NO: 772 - protein, 9 aa, Homo sapiens
  Table 1.2; ADAM7; ENSG00000069206; HLA -A*01:01,HLA-A*29:02,HLA-A*30:02,HLA-B*15:01,HLA-B*58:01
GSNYSETFY

SEQ ID NO: 773 - protein, 9 aa, Homo sapiens
  Table 1.2; ADAM7; ENSG00000069206; HLA -A*68:01,HLA-C*07:06
GVEGQQLVR

SEQ ID NO: 774 - protein, 11 aa, Homo sapiens
  Table 1.2; ADAM7; ENSG00000069206; HLA -A*03:01,HLA-A*03:02,HLA-A*11:01
GVEGQQLVRPK

SEQ ID NO: 775 - protein, 9 aa, Homo sapiens
  Table 1.2; ADAM7; ENSG00000069206; HLA -A*29:02,HLA-A*30:02
GVLILLVRY

SEQ ID NO: 776 - protein, 9 aa, Homo sapiens
  Table 1.2; ADAM7; ENSG00000069206; HLA -A*23:01,HLA-A*24:02,HLA-B*13:02
GYFGDEQQI

SEQ ID NO: 777 - protein, 9 aa, Homo sapiens
  Table 1.2; ADAM7; ENSG00000069206; HLA -B*18:01,HLA-B*44:02,HLA-B*44:03
HDDDILKTY

SEQ ID NO: 778 - protein, 8 aa, Homo sapiens
  Table 1.2; ADAM7; ENSG00000069206; HLA -B*37:01
HDSTDIGL

SEQ ID NO: 779 - protein, 8 aa, Homo sapiens
  Table 1.2; ADAM7; ENSG00000069206; HLA -A*01:01,HLA-B*18:01,HLA-B*44:02,HLA-B*44:03
HEDKIELY

SEQ ID NO: 780 - protein, 9 aa, Homo sapiens
  Table 1.2; ADAM7; ENSG00000069206; HLA -A*23:01,HLA-A*30:01,HLA-B*13:02,HLA-B*15:03,HLA-B*18:01, HLA-B*37:01,HLA-B*38:01,HLA-B*39:01,HLA-B*40:01,HLA-B*40:02, HLA-B*44:02,HLA-B*44:03,HLA-B*49:01,HLA-B*51:01,HLA-C*02:02,
  HLA-C*12:03,HLA-C*16:04
HEYDSAASI

SEQ ID NO: 781 - protein, 11 aa, Homo sapiens
  Table 1.2; ADAM7; ENSG00000069206; HLA -A*30:01,HLA-B*18:01,HLA-B*40:02,HLA-B*49:01
HEYDSAASIST

SEQ ID NO: 782 - protein, 9 aa, Homo sapiens
  Table 1.2; ADAM7; ENSG00000069206; HLA -A*33:03
HFLNKPASK

SEQ ID NO: 783 - protein, 9 aa, Homo sapiens
  Table 1.2; ADAM7; ENSG00000069206; HLA -A*02:03
HLKDPQKNA

SEQ ID NO: 784 - protein, 11 aa, Homo sapiens
  Table 1.2; ADAM7; ENSG00000069206; HLA -A*02:03
HLKDPQKNATV

SEQ ID NO: 785 - protein, 9 aa, Homo sapiens
  Table 1.2; ADAM7; ENSG00000069206; HLA -B*35:01,HLA-B*35:03
HPQIMDHCF

SEQ ID NO: 786 - protein, 9 aa, Homo sapiens
  Table 1.2; ADAM7; ENSG00000069206; HLA -B*13:02,HLA-B*15:03,HLA-B*37:01
HQLGHNLGM

SEQ ID NO: 787 - protein, 9 aa, Homo sapiens
  Table 1.2; ADAM7; ENSG00000069206; HLA -A*11:01,HLA-A*68:01
HTHDDDILK

SEQ ID NO: 788 - protein, 11 aa, Homo sapiens
  Table 1.2; ADAM7; ENSG00000069206; HLA -A*01:01,HLA-A*25:01,HLA-A*26:01,HLA-A*30:02,HLA-B*57:01
HTHDDDILKTY

SEQ ID NO: 789 - protein, 9 aa, Homo sapiens
  Table 1.2; ADAM7; ENSG00000069206; HLA -A*68:02,HLA-B*13:02
HVTLVGIEI

SEQ ID NO: 790 - protein, 10 aa, Homo sapiens
  Table 1.2; ADAM7; ENSG00000069206; HLA -B*57:01
HVTLVGIEIW

SEQ ID NO: 791 - protein, 9 aa, Homo sapiens
  Table 1.2; ADAM7; ENSG00000069206; HLA -A*02:03,HLA-A*26:01,HLA-A*68:01,HLA-A*68:02,HLA-B*13:02
HVTNITILV

SEQ ID NO: 792 - protein, 10 aa, Homo sapiens
  Table 1.2; ADAM7; ENSG00000069206; HLA -A*68:02,HLA-B*13:02
HVTNITILVV

SEQ ID NO: 793 - protein, 11 aa, Homo sapiens
  Table 1.2; ADAM7; ENSG00000069206; HLA -A*68:02
HVTNITILVVV

SEQ ID NO: 794 - protein, 9 aa, Homo sapiens
  Table 1.2; ADAM7; ENSG00000069206; HLA -B*57:01
HVVLLSGKW

SEQ ID NO: 795 - protein, 8 aa, Homo sapiens
  Table 1.2; ADAM7; ENSG00000069206; HLA -C*05:01
IADPNQSA

SEQ ID NO: 796 - protein, 9 aa, Homo sapiens
  Table 1.2; ADAM7; ENSG00000069206; HLA -A*01:01,HLA-A*03:01,HLA-A*03:02,HLA-A*11:01,HLA-A*33:01, HLA-A*68:01,HLA-B*27:02,HLA-B*27:05,HLA-B*35:01,HLA-B*39:01, HLA-B*51:01,HLA-B*57:01,HLA-B*58:01,HLA-C*03:03,HLA-C*03:04,
  HLA-C*05:01,HLA-C*07:06,HLA-C*16:02
IADPNQSAK

SEQ ID NO: 797 - protein, 9 aa, Homo sapiens
  Table 1.2; ADAM7; ENSG00000069206; HLA -A*23:01,HLA-A*24:02,HLA-B*58:01,HLA-C*03:04,HLA-C*16:02
IANRMAHQL

SEQ ID NO: 798 - protein, 11 aa, Homo sapiens
  Table 1.2; ADAM7; ENSG00000069206; HLA -A*30:01,HLA-B*40:01,HLA-B*49:01
IELYSNIETTL

SEQ ID NO: 799 - protein, 8 aa, Homo sapiens
  Table 1.2; ADAM7; ENSG00000069206; HLA -B*18:01
IESHDICY

SEQ ID NO: 800 - protein, 8 aa, Homo sapiens
  Table 1.2; ADAM7; ENSG00000069206; HLA -B*18:01,HLA-B*37:01
IETTLLRF

SEQ ID NO: 801 - protein, 10 aa, Homo sapiens
  Table 1.2; ADAM7; ENSG00000069206; HLA -B*44:02
IETTLLRFSF

SEQ ID NO: 802 - protein, 8 aa, Homo sapiens
  Table 1.2; ADAM7; ENSG00000069206; HLA -A*23:01
IFLMILLI

SEQ ID NO: 803 - protein, 8 aa, Homo sapiens
  Table 1.2; ADAM7; ENSG00000069206; HLA -B*51:01
IGVLILLV

SEQ ID NO: 804 - protein, 9 aa, Homo sapiens
  Table 1.2; ADAM7; ENSG00000069206; HLA -A*02:07,HLA-B*38:01,HLA-B*39:01,HLA-C*05:01
IHDEKYVEL

SEQ ID NO: 805 - protein, 10 aa, Homo sapiens
  Table 1.2; ADAM7; ENSG00000069206; HLA -B*38:01
IHDEKYVELF

SEQ ID NO: 806 - protein, 9 aa, Homo sapiens
  Table 1.2; ADAM7; ENSG00000069206; HLA -A*02:03,HLA-A*02:04,HLA-B*46:01
ILKTYEEEL

SEQ ID NO: 807 - protein, 11 aa, Homo sapiens
  Table 1.2; ADAM7; ENSG00000069206; HLA -A*29:02
ILKTYEEELLY

SEQ ID NO: 808 - protein, 8 aa, Homo sapiens
  Table 1.2; ADAM7; ENSG00000069206; HLA -A*02:04,HLA-A*02:07
ILPEIHFL

SEQ ID NO: 809 - protein, 10 aa, Homo sapiens
  Table 1.2; ADAM7; ENSG00000069206; HLA -A*02:07,HLA-A*03:01
ILPEIHFLNK

SEQ ID NO: 810 - protein, 9 aa, Homo sapiens
  Table 1.2; ADAM7; ENSG00000069206; HLA -A*02:07
ILVVVLVLV

SEQ ID NO: 811 - protein, 10 aa, Homo sapiens
  Table 1.2; ADAM7; ENSG00000069206; HLA -B*35:01,HLA-B*54:01
IPFPYNFHDF

SEQ ID NO: 812 - protein, 8 aa, Homo sapiens
  Table 1.2; ADAM7; ENSG00000069206; HLA -B*07:02,HLA-B*08:01
IPQVKEKF

SEQ ID NO: 813 - protein, 9 aa, Homo sapiens
  Table 1.2; ADAM7; ENSG00000069206; HLA -A*23:01,HLA-B*15:03,HLA-B*46:01,HLA-B*51:01,HLA-B*58:01, HLA-C*02:02,HLA-C*03:03,HLA-C*03:04
ISYPGGMCL

SEQ ID NO: 814 - protein, 9 aa, Homo sapiens
  Table 1.2; ADAM7; ENSG00000069206; HLA -A*68:02
ITILVVVLV

SEQ ID NO: 815 - protein, 8 aa, Homo sapiens
  Table 1.2; ADAM7; ENSG00000069206; HLA -B*15:01,HLA-B*15:03,HLA-B*39:01
IVADDTVY

SEQ ID NO: 816 - protein, 9 aa, Homo sapiens
  Table 1.2; ADAM7; ENSG00000069206; HLA -A*03:01,HLA-A*03:02,HLA-A*11:01,HLA-A*26:01,HLA-A*31:01, HLA-A*33:01,HLA-A*33:03,HLA-A*68:01,HLA-A*68:02,HLA-B*27:02, HLA-B*27:05,HLA-B*57:01,HLA-C*07:06
IVADDTVYR

SEQ ID NO: 817 - protein, 10 aa, Homo sapiens
  Table 1.2; ADAM7; ENSG00000069206; HLA -A*03:02,HLA-A*11:01,HLA-A*33:03,HLA-A*68:01,HLA-A*68:02, HLA-C*07:06
IVADDTVYRR

SEQ ID NO: 818 - protein, 9 aa, Homo sapiens
  Table 1.2; ADAM7; ENSG00000069206; HLA -B*54:01
IVHEYDSAA

SEQ ID NO: 819 - protein, 8 aa, Homo sapiens
  Table 1.2; ADAM7; ENSG00000069206; HLA -C*01:02,HLA-C*04:01,HLA-C*14:02
IYCTGGEL

SEQ ID NO: 820 - protein, 11 aa, Homo sapiens
  Table 1.2; ADAM7; ENSG00000069206; HLA -A*24:02
IYCTGGELSSL

SEQ ID NO: 821 - protein, 9 aa, Homo sapiens
  Table 1.2; ADAM7; ENSG00000069206; HLA -A*23:01,HLA-A*24:02
IYKTLNIHV

SEQ ID NO: 822 - protein, 11 aa, Homo sapiens
  Table 1.2; ADAM7; ENSG00000069206; HLA -A*23:01,HLA-A*24:02
IYKTLNIHVTL

SEQ ID NO: 823 - protein, 10 aa, Homo sapiens
  Table 1.2; ADAM7; ENSG00000069206; HLA -A*30:02
KCSQNQYHQY

SEQ ID NO: 824 - protein, 8 aa, Homo sapiens
  Table 1.2; ADAM7; ENSG00000069206; HLA -B*37:01
KDFDHVVL

SEQ ID NO: 825 - protein, 9 aa, Homo sapiens
  Table 1.2; ADAM7; ENSG00000069206; HLA -A*02:01,HLA-A*02:04,HLA-A*02:07,HLA-A*30:01,HLA-A*68:02, HLA-B*37:01,HLA-B*40:01,HLA-B*40:02
KDFDHVVLL

SEQ ID NO: 826 - protein, 9 aa, Homo sapiens
  Table 1.2; ADAM7; ENSG00000069206; HLA -B*37:01
KDLLPDTNI

SEQ ID NO: 827 - protein, 9 aa, Homo sapiens
  Table 1.2; ADAM7; ENSG00000069206; HLA -B*37:01
KDPQKNATV

SEQ ID NO: 828 - protein, 9 aa, Homo sapiens
  Table 1.2; ADAM7; ENSG00000069206; HLA -B*37:01
KDQFRVNGF

SEQ ID NO: 829 - protein, 8 aa, Homo sapiens
  Table 1.2; ADAM7; ENSG00000069206; HLA -B*37:01,HLA-B*40:02
KDYKPTCM

SEQ ID NO: 830 - protein, 11 aa, Homo sapiens
  Table 1.2; ADAM7; ENSG00000069206; HLA -A*23:01
KFILGVEGQQL

SEQ ID NO: 831 - protein, 10 aa, Homo sapiens
  Table 1.2; ADAM7; ENSG00000069206; HLA -B*13:02,HLA-B*40:02,HLA-B*58:01,HLA-C*06:02
KGYFGDEQQI

SEQ ID NO: 832 - protein, 11 aa, Homo sapiens
  Table 1.2; ADAM7; ENSG00000069206; HLA -A*31:01
KGYFGDEQQIR

SEQ ID NO: 833 - protein, 9 aa, Homo sapiens
  Table 1.2; ADAM7; ENSG00000069206; HLA -A*03:01,HLA-B*08:01
KLNRKTLVL

SEQ ID NO: 834 - protein, 11 aa, Homo sapiens
  Table 1.2; ADAM7; ENSG00000069206; HLA -A*30:01,HLA-B*15:01,HLA-B*15:03,HLA-B*27:05,HLA-B*38:01, HLA-B*39:01,HLA-B*40:01,HLA-B*58:01
KQVQSPPTETL

SEQ ID NO: 835 - protein, 9 aa, Homo sapiens
  Table 1.2; ADAM7; ENSG00000069206; HLA -A*02:01,HLA-A*02:04,HLA-A*02:07,HLA-A*23:01,HLA-A*24:02, HLA-A*31:01,HLA-A*32:01,HLA-A*68:02,HLA-B*57:01,HLA-B*58:01, HLA-C*12:03
KTLNIHVTL

SEQ ID NO: 836 - protein, 9 aa, Homo sapiens
  Table 1.2; ADAM7; ENSG00000069206; HLA -A*31:01,HLA-B*57:01
KTLVLHLLR

SEQ ID NO: 837 - protein, 9 aa, Homo sapiens
  Table 1.2; ADAM7; ENSG00000069206; HLA -A*01:01,HLA-A*03:01,HLA-A*11:01,HLA-A*29:02,HLA-A*30:02, HLA-B*57:01,HLA-B*58:01
KTYEEELLY

SEQ ID NO: 838 - protein, 11 aa, Homo sapiens
  Table 1.2; ADAM7; ENSG00000069206; HLA -A*02:01
KTYEEELLYEI

SEQ ID NO: 839 - protein, 10 aa, Homo sapiens
  Table 1.2; ADAM7; ENSG00000069206; HLA -A*03:01,HLA-A*03:02,HLA-A*11:01
KTYHLKDPQK

SEQ ID NO: 840 - protein, 11 aa, Homo sapiens
  Table 1.2; ADAM7; ENSG00000069206; HLA -A*23:01,HLA-A*24:02,HLA-A*29:02
KYSDEGEHLVF

SEQ ID NO: 841 - protein, 10 aa, Homo sapiens
  Table 1.2; ADAM7; ENSG00000069206; HLA -A*29:02
LFIVADDTVY

SEQ ID NO: 842 - protein, 8 aa, Homo sapiens
  Table 1.2; ADAM7; ENSG00000069206; HLA -B*08:01
LGMQHDEF

SEQ ID NO: 843 - protein, 10 aa, Homo sapiens
  Table 1.2; ADAM7; ENSG00000069206; HLA -B*27:02
LGSNYSETFY

SEQ ID NO: 844 - protein, 8 aa, Homo sapiens
  Table 1.2; ADAM7; ENSG00000069206; HLA -C*03:03,HLA-C*03:04
LGVEGQQL

SEQ ID NO: 845 - protein, 9 aa, Homo sapiens
  Table 1.2; ADAM7; ENSG00000069206; HLA -A*24:02
LIPQVKEKF

SEQ ID NO: 846 - protein, 10 aa, Homo sapiens
  Table 1.2; ADAM7; ENSG00000069206; HLA -A*02:03,HLA-A*02:04
LLGEDKTYHL

SEQ ID NO: 847 - protein, 9 aa, Homo sapiens
  Table 1.2; ADAM7; ENSG00000069206; HLA -A*03:01,HLA-A*03:02
LLIPQVKEK

SEQ ID NO: 848 - protein, 9 aa, Homo sapiens
  Table 1.2; ADAM7; ENSG00000069206; HLA -A*02:07
LLPDTNIIA

SEQ ID NO: 849 - protein, 10 aa, Homo sapiens
  Table 1.2; ADAM7; ENSG00000069206; HLA -A*02:07
LLPDTNIIAN

SEQ ID NO: 850 - protein, 11 aa, Homo sapiens
  Table 1.2; ADAM7; ENSG00000069206; HLA -A*02:07,HLA-A*03:01,HLA-A*31:01,HLA-A*33:03,HLA-A*68:01, HLA-A*68:02
LLPDTNIIANR

SEQ ID NO: 851 - protein, 9 aa, Homo sapiens
  Table 1.2; ADAM7; ENSG00000069206; HLA -A*03:01,HLA-A*29:02,HLA-A*31:01
LLYEIKLNR

SEQ ID NO: 852 - protein, 10 aa, Homo sapiens
  Table 1.2; ADAM7; ENSG00000069206; HLA -A*03:01
LLYEIKLNRK

SEQ ID NO: 853 - protein, 9 aa, Homo sapiens
  Table 1.2; ADAM7; ENSG00000069206; HLA -A*02:01,HLA-A*02:03,HLA-A*02:04,HLA-A*02:07
LMILLIPQV

SEQ ID NO: 854 - protein, 9 aa, Homo sapiens
  Table 1.2; ADAM7; ENSG00000069206; HLA -A*23:01,HLA-A*24:02
LNIPFPYNF

SEQ ID NO: 855 - protein, 8 aa, Homo sapiens
  Table 1.2; ADAM7; ENSG00000069206; HLA -B*55:01
LPDTNIIA

SEQ ID NO: 856 - protein, 9 aa, Homo sapiens
  Table 1.2; ADAM7; ENSG00000069206; HLA -B*55:01
LPDTNIIAN

SEQ ID NO: 857 - protein, 10 aa, Homo sapiens
  Table 1.2; ADAM7; ENSG00000069206; HLA -A*33:03,HLA-A*68:01,HLA-B*27:02,HLA-C*07:06
LPDTNIIANR

SEQ ID NO: 858 - protein, 11 aa, Homo sapiens
  Table 1.2; ADAM7; ENSG00000069206; HLA -B*35:01,HLA-B*35:03,HLA-B*55:01
LPDTNIIANRM

SEQ ID NO: 859 - protein, 9 aa, Homo sapiens
  Table 1.2; ADAM7; ENSG00000069206; HLA -B*51:01
LPGCIFLMI

SEQ ID NO: 860 - protein, 8 aa, Homo sapiens
  Table 1.2; ADAM7; ENSG00000069206; HLA -B*35:03,HLA-B*51:01,HLA-B*54:01,HLA-B*56:01
LPYYSTSI

SEQ ID NO: 861 - protein, 9 aa, Homo sapiens
  Table 1.2; ADAM7; ENSG00000069206; HLA -B*35:03,HLA-B*51:01,HLA-B*54:01
LPYYSTSII

SEQ ID NO: 862 - protein, 10 aa, Homo sapiens
  Table 1.2; ADAM7; ENSG00000069206; HLA -B*51:01
LPYYSTSIIK

SEQ ID NO: 863 - protein, 9 aa, Homo sapiens
  Table 1.2; ADAM7; ENSG00000069206; HLA -A*29:02,HLA-A*30:02,HLA-B*27:02,HLA-B*27:05,HLA-C*02:02, HLA-C*16:04
LRVPYGANY

SEQ ID NO: 864 - protein, 11 aa, Homo sapiens
  Table 1.2; ADAM7; ENSG00000069206; HLA -A*01:01
LSSLLGEDKTY

SEQ ID NO: 865 - protein, 9 aa, Homo sapiens
  Table 1.2; ADAM7; ENSG00000069206; HLA -A*25:01
LVIVGIGVL

SEQ ID NO: 866 - protein, 10 aa, Homo sapiens
  Table 1.2; ADAM7; ENSG00000069206; HLA -A*23:01,HLA-A*24:02,HLA-A*29:02,HLA-A*30:02,HLA-B*46:01, HLA-C*07:01,HLA-C*14:02
LYSHVQGISY

SEQ ID NO: 867 - protein, 9 aa, Homo sapiens
  Table 1.2; ADAM7; ENSG00000069206; HLA -A*23:01,HLA-A*24:02,HLA-A*32:01,HLA-B*35:03,HLA-B*38:01, HLA-B*58:01,HLA-C*14:02
LYSNIETTL

SEQ ID NO: 868 - protein, 10 aa, Homo sapiens
  Table 1.2; ADAM7; ENSG00000069206; HLA -A*23:01,HLA-A*24:02
LYSNIETTLL

SEQ ID NO: 869 - protein, 9 aa, Homo sapiens
  Table 1.2; ADAM7; ENSG00000069206; HLA -A*68:02,HLA-B*08:01,HLA-B*35:01,HLA-B*35:03,HLA-B*38:01, HLA-C*02:02,HLA-C*16:02
MAHQLGHNL

SEQ ID NO: 870 - protein, 10 aa, Homo sapiens
  Table 1.2; ADAM7; ENSG00000069206; HLA -A*25:01,HLA-A*30:01,HLA-B*35:03,HLA-B*38:01
MDSDGSIPAL

SEQ ID NO: 871 - protein, 8 aa, Homo sapiens
  Table 1.2; ADAM7; ENSG00000069206; HLA -A*02:04,HLA-B*51:01,HLA-B*54:01
MILLIPQV

SEQ ID NO: 872 - protein, 8 aa, Homo sapiens
  Table 1.2; ADAM7; ENSG00000069206; HLA -B*51:01
MIYKTLNI

SEQ ID NO: 873 - protein, 10 aa, Homo sapiens
  Table 1.2; ADAM7; ENSG00000069206; HLA -A*68:02
MIYKTLNIHV

SEQ ID NO: 874 - protein, 9 aa, Homo sapiens
  Table 1.2; ADAM7; ENSG00000069206; HLA -A*01:01,HLA-A*29:02,HLA-A*30:02
MVNFVNMIY

SEQ ID NO: 875 - protein, 10 aa, Homo sapiens
  Table 1.2; ADAM7; ENSG00000069206; HLA -A*03:01,HLA-A*03:02,HLA-A*11:01
MVNFVNMIYK

SEQ ID NO: 876 - protein, 8 aa, Homo sapiens
  Table 1.2; ADAM7; ENSG00000069206; HLA -B*18:01
NENPVDGH

SEQ ID NO: 877 - protein, 10 aa, Homo sapiens
  Table 1.2; ADAM7; ENSG00000069206; HLA -A*30:01,HLA-B*18:01,HLA-B*27:02,HLA-B*27:05,HLA-B*37:01, HLA-B*38:01,HLA-B*39:01,HLA-B*40:01,HLA-B*40:02,HLA-B*44:02, HLA-B*44:03,HLA-C*16:04
NENPVDGHGL

SEQ ID NO: 878 - protein, 9 aa, Homo sapiens
  Table 1.2; ADAM7; ENSG00000069206; HLA -B*49:01
NESEEDSKI

SEQ ID NO: 879 - protein, 10 aa, Homo sapiens
  Table 1.2; ADAM7; ENSG00000069206; HLA -A*23:01
NFVNMIYKTL

SEQ ID NO: 880 - protein, 8 aa, Homo sapiens
  Table 1.2; ADAM7; ENSG00000069206; HLA -B*08:01
NGHPHNKL

SEQ ID NO: 881 - protein, 9 aa, Homo sapiens
  Table 1.2; ADAM7; ENSG00000069206; HLA -A*01:01
NIETTLLRF

SEQ ID NO: 882 - protein, 10 aa, Homo sapiens
  Table 1.2; ADAM7; ENSG00000069206; HLA -A*29:02,HLA-A*30:02
NLRVPYGANY

SEQ ID NO: 883 - protein, 9 aa, Homo sapiens
  Table 1.2; ADAM7; ENSG00000069206; HLA -A*24:02
NMIYKTLNI

SEQ ID NO: 884 - protein, 8 aa, Homo sapiens
  Table 1.2; ADAM7; ENSG00000069206; HLA -B*07:02,HLA-B*08:01,HLA-B*35:03
NPVDGHGL

SEQ ID NO: 885 - protein, 10 aa, Homo sapiens
  Table 1.2; ADAM7; ENSG00000069206; HLA -B*35:03,HLA-B*54:01,HLA-B*56:01
NPVDGHGLQC

SEQ ID NO: 886 - protein, 9 aa, Homo sapiens
  Table 1.2; ADAM7; ENSG00000069206; HLA -A*26:01,HLA-A*29:02,HLA-A*30:02,HLA-A*32:01
NTKGNKFGY

SEQ ID NO: 887 - protein, 9 aa, Homo sapiens
  Table 1.2; ADAM7; ENSG00000069206; HLA -A*23:01,HLA-A*24:02
NYSCTELNF

SEQ ID NO: 888 - protein, 9 aa, Homo sapiens
  Table 1.2; ADAM7; ENSG00000069206; HLA -A*23:01,HLA-A*24:02,HLA-A*29:02,HLA-B*35:01,HLA-B*35:03, HLA-C*04:01,HLA-C*14:02
NYSETFYSM

SEQ ID NO: 889 - protein, 9 aa, Homo sapiens
  Table 1.2; ADAM7; ENSG00000069206; HLA -A*33:01,HLA-A*33:03,HLA-A*68:01,HLA-B*27:02
PDTNIIANR

SEQ ID NO: 890 - protein, 9 aa, Homo sapiens
  Table 1.2; ADAM7; ENSG00000069206; HLA -A*24:02
PFPYNFHDF

SEQ ID NO: 891 - protein, 9 aa, Homo sapiens
  Table 1.2; ADAM7; ENSG00000069206; HLA -A*02:04
PILPEIHFL

SEQ ID NO: 892 - protein, 11 aa, Homo sapiens
  Table 1.2; ADAM7; ENSG00000069206; HLA -B*27:02
PPTETLGVENK

SEQ ID NO: 893 - protein, 9 aa, Homo sapiens
  Table 1.2; ADAM7; ENSG00000069206; HLA -A*24:02
PYNFHDFQF

SEQ ID NO: 894 - protein, 8 aa, Homo sapiens
  Table 1.2; ADAM7; ENSG00000069206; HLA -A*30:02,HLA-B*15:01,HLA-B*15:03,HLA-B*18:01,HLA-B*35:01, HLA-B*37:01,HLA-C*16:01,HLA-C*16:02
QGSIVHEY

SEQ ID NO: 895 - protein, 8 aa, Homo sapiens
  Table 1.2; ADAM7; ENSG00000069206; HLA -B*08:01
QIKKAGSI

SEQ ID NO: 896 - protein, 9 aa, Homo sapiens
  Table 1.2; ADAM7; ENSG00000069206; HLA -B*38:01
QQIRTEPIL

SEQ ID NO: 897 - protein, 9 aa, Homo sapiens
  Table 1.2; ADAM7; ENSG00000069206; HLA -B*27:02,HLA-B*27:05
QRYLIEPVK

SEQ ID NO: 898 - protein, 10 aa, Homo sapiens
  Table 1.2; ADAM7; ENSG00000069206; HLA -B*27:02,HLA-B*27:05,HLA-B*44:02,HLA-C*16:04
QRYLIEPVKY

SEQ ID NO: 899 - protein, 8 aa, Homo sapiens
  Table 1.2; ADAM7; ENSG00000069206; HLA -B*08:01
QVKEKFIL

SEQ ID NO: 900 - protein, 10 aa, Homo sapiens
  Table 1.2; ADAM7; ENSG00000069206; HLA -A*25:01,HLA-B*07:02,HLA-B*38:01,HLA-B*39:01
QVQSPPTETL

SEQ ID NO: 901 - protein, 8 aa, Homo sapiens
  Table 1.2; ADAM7; ENSG00000069206; HLA -B*15:03,HLA-B*18:01,HLA-B*37:01,HLA-B*44:02,HLA-B*44:03, HLA-B*49:01,HLA-C*16:04
REFLGSNY

SEQ ID NO: 902 - protein, 10 aa, Homo sapiens
  Table 1.2; ADAM7; ENSG00000069206; HLA -A*31:01
RGFFRINDQR

SEQ ID NO: 903 - protein, 11 aa, Homo sapiens
  Table 1.2; ADAM7; ENSG00000069206; HLA -A*03:02,HLA-A*11:01
RGIADPNQSAK

SEQ ID NO: 904 - protein, 9 aa, Homo sapiens
  Table 1.2; ADAM7; ENSG00000069206; HLA -A*02:04
RINDQRYLI

SEQ ID NO: 905 - protein, 9 aa, Homo sapiens
  Table 1.2; ADAM7; ENSG00000069206; HLA -A*02:01,HLA-A*02:03,HLA-A*02:04,HLA-A*02:07
RIWGMVNFV

SEQ ID NO: 906 - protein, 10 aa, Homo sapiens
  Table 1.2; ADAM7; ENSG00000069206; HLA -A*30:02,HLA-B*57:01
RSREFLGSNY

SEQ ID NO: 907 - protein, 9 aa, Homo sapiens
  Table 1.2; ADAM7; ENSG00000069206; HLA -A*02:01,HLA-A*02:07,HLA-B*57:01,HLA-B*58:01
RTEPILPEI

SEQ ID NO: 908 - protein, 9 aa, Homo sapiens
  Table 1.2; ADAM7; ENSG00000069206; HLA -A*23:01,HLA-A*24:02,HLA-A*29:02,HLA-A*30:02,HLA-A*31:01, HLA-B*57:01
RYLIEPVKY

SEQ ID NO: 909 - protein, 8 aa, Homo sapiens
  Table 1.2; ADAM7; ENSG00000069206; HLA -C*12:03
SAASISTC

SEQ ID NO: 910 - protein, 9 aa, Homo sapiens
  Table 1.2; ADAM7; ENSG00000069206; HLA -A*33:03,HLA-A*68:01,HLA-C*07:06
SCTELNFTR

SEQ ID NO: 911 - protein, 10 aa, Homo sapiens
  Table 1.2; ADAM7; ENSG00000069206; HLA -A*11:01
SCTELNFTRK

SEQ ID NO: 912 - protein, 9 aa, Homo sapiens
  Table 1.2; ADAM7; ENSG00000069206; HLA -B*37:01
SDEGEHLVF

SEQ ID NO: 913 - protein, 10 aa, Homo sapiens
  Table 1.2; ADAM7; ENSG00000069206; HLA -A*11:01
SDEGEHLVFK

SEQ ID NO: 914 - protein, 8 aa, Homo sapiens
  Table 1.2; ADAM7; ENSG00000069206; HLA -A*30:01,HLA-B*37:01,HLA-B*40:02
SDGSIPAL

SEQ ID NO: 915 - protein, 9 aa, Homo sapiens
  Table 1.2; ADAM7; ENSG00000069206; HLA -A*03:02,HLA-A*11:01,HLA-B*27:02
SDGSIPALK

SEQ ID NO: 916 - protein, 10 aa, Homo sapiens
  Table 1.2; ADAM7; ENSG00000069206; HLA -A*23:01,HLA-B*37:01,HLA-B*44:02,HLA-B*44:03
SDGSIPALKF

SEQ ID NO: 917 - protein, 10 aa, Homo sapiens
  Table 1.2; ADAM7; ENSG00000069206; HLA -B*44:02,HLA-B*44:03,HLA-B*49:01
SEEDSKIKGI

SEQ ID NO: 918 - protein, 9 aa, Homo sapiens
  Table 1.2; ADAM7; ENSG00000069206; HLA -B*40:01,HLA-B*49:01
SELFDDEAI

SEQ ID NO: 919 - protein, 11 aa, Homo sapiens
  Table 1.2; ADAM7; ENSG00000069206; HLA -A*31:01
SFWQEKILKTR

SEQ ID NO: 920 - protein, 8 aa, Homo sapiens
  Table 1.2; ADAM7; ENSG00000069206; HLA -B*15:03,HLA-B*39:01
SHVQGISY

SEQ ID NO: 921 - protein, 9 aa, Homo sapiens
  Table 1.2; ADAM7; ENSG00000069206; HLA -A*30:02,HLA-B*15:01
SLLGEDKTY

SEQ ID NO: 922 - protein, 11 aa, Homo sapiens
  Table 1.2; ADAM7; ENSG00000069206; HLA -A*02:01,HLA-A*02:04,HLA-A*02:07
SLLGEDKTYHL

SEQ ID NO: 923 - protein, 9 aa, Homo sapiens
  Table 1.2; ADAM7; ENSG00000069206; HLA -A*31:01,HLA-A*33:01,HLA-A*33:03
SMKGEAFTR

SEQ ID NO: 924 - protein, 9 aa, Homo sapiens
  Table 1.2; ADAM7; ENSG00000069206; HLA -A*33:01,HLA-A*33:03,HLA-A*68:01
SNIETTLLR

SEQ ID NO: 925 - protein, 10 aa, Homo sapiens
  Table 1.2; ADAM7; ENSG00000069206; HLA -A*26:01
SNIETTLLRF

SEQ ID NO: 926 - protein, 9 aa, Homo sapiens
  Table 1.2; ADAM7; ENSG00000069206; HLA -B*07:02,HLA-B*35:01,HLA-C*07:02
SPACPKDQF

SEQ ID NO: 927 - protein, 9 aa, Homo sapiens
  Table 1.2; ADAM7; ENSG00000069206; HLA -B*51:01
SPPTETLGV

SEQ ID NO: 928 - protein, 8 aa, Homo sapiens
  Table 1.2; ADAM7; ENSG00000069206; HLA -A*30:02,HLA-A*32:01,HLA-B*15:01,HLA-B*15:03
SQNQYHQY

SEQ ID NO: 929 - protein, 9 aa, Homo sapiens
  Table 1.2; ADAM7; ENSG00000069206; HLA -A*02:04,HLA-A*24:02,HLA-A*31:01,HLA-A*32:01,HLA-B*13:02, HLA-B*15:01,HLA-B*27:05,HLA-B*37:01,HLA-B*38:01,HLA-B*39:01, HLA-C*04:01,HLA-C*07:04
SQNQYHQYL

SEQ ID NO: 930 - protein, 10 aa, Homo sapiens
  Table 1.2; ADAM7; ENSG00000069206; HLA -A*11:01
SQNQYHQYLK

SEQ ID NO: 931 - protein, 9 aa, Homo sapiens
  Table 1.2; ADAM7; ENSG00000069206; HLA -B*27:02
SREFLGSNY

SEQ ID NO: 932 - protein, 10 aa, Homo sapiens
  Table 1.2; ADAM7; ENSG00000069206; HLA -B*58:01
SSLLGEDKTY

SEQ ID NO: 933 - protein, 9 aa, Homo sapiens
  Table 1.2; ADAM7; ENSG00000069206; HLA -A*68:02,HLA-B*27:05
STSIIKDLL

SEQ ID NO: 934 - protein, 10 aa, Homo sapiens
  Table 1.2; ADAM7; ENSG00000069206; HLA -A*29:02
SYPGGMCLPY

SEQ ID NO: 935 - protein, 11 aa, Homo sapiens
  Table 1.2; ADAM7; ENSG00000069206; HLA -B*27:02
TDIGLVASGTK

SEQ ID NO: 936 - protein, 10 aa, Homo sapiens
  Table 1.2; ADAM7; ENSG00000069206; HLA -B*49:01
TELNFTRKTV

SEQ ID NO: 937 - protein, 8 aa, Homo sapiens
  Table 1.2; ADAM7; ENSG00000069206; HLA -B*49:01,HLA-B*51:01
TEPILPEI

SEQ ID NO: 938 - protein, 10 aa, Homo sapiens
  Table 1.2; ADAM7; ENSG00000069206; HLA -B*44:02,HLA-B*44:03
TEPILPEIHF

SEQ ID NO: 939 - protein, 11 aa, Homo sapiens
  Table 1.2; ADAM7; ENSG00000069206; HLA -B*44:02
TEPILPEIHFL

SEQ ID NO: 940 - protein, 11 aa, Homo sapiens
  Table 1.2; ADAM7; ENSG00000069206; HLA -B*44:02,HLA-B*44:03
TETLGVENKGY

SEQ ID NO: 941 - protein, 10 aa, Homo sapiens
  Table 1.2; ADAM7; ENSG00000069206; HLA -A*23:01,HLA-A*24:02
TFYSMKGEAF

SEQ ID NO: 942 - protein, 9 aa, Homo sapiens
  Table 1.2; ADAM7; ENSG00000069206; HLA -A*03:02,HLA-A*11:01
TGHSPACPK

SEQ ID NO: 943 - protein, 9 aa, Homo sapiens
  Table 1.2; ADAM7; ENSG00000069206; HLA -B*38:01
THDDDILKT

SEQ ID NO: 944 - protein, 10 aa, Homo sapiens
  Table 1.2; ADAM7; ENSG00000069206; HLA -A*01:01,HLA-B*38:01,HLA-B*39:01
THDDDILKTY

SEQ ID NO: 945 - protein, 8 aa, Homo sapiens
  Table 1.2; ADAM7; ENSG00000069206; HLA -B*38:01
THEDKIEL

SEQ ID NO: 946 - protein, 9 aa, Homo sapiens
  Table 1.2; ADAM7; ENSG00000069206; HLA -A*01:01,HLA-B*38:01,HLA-B*39:01
THEDKIELY

SEQ ID NO: 947 - protein, 9 aa, Homo sapiens
  Table 1.2; ADAM7; ENSG00000069206; HLA -A*23:01
TILVVVLVL

SEQ ID NO: 948 - protein, 9 aa, Homo sapiens
  Table 1.2; ADAM7; ENSG00000069206; HLA -B*13:02
TLHVTNITI

SEQ ID NO: 949 - protein, 8 aa, Homo sapiens
  Table 1.2; ADAM7; ENSG00000069206; HLA -B*08:01,HLA-B*37:01
TLNIHVTL

SEQ ID NO: 950 - protein, 9 aa, Homo sapiens
  Table 1.2; ADAM7; ENSG00000069206; HLA -A*02:01,HLA-A*02:03,HLA-A*02:04,HLA-A*02:07,HLA-B*13:02, HLA-B*37:01,HLA-B*55:01
TLNIHVTLV

SEQ ID NO: 951 - protein, 9 aa, Homo sapiens
  Table 1.2; ADAM7; ENSG00000069206; HLA -B*57:01
TTLLRFSFW

SEQ ID NO: 952 - protein, 8 aa, Homo sapiens
  Table 1.2; ADAM7; ENSG00000069206; HLA -B*08:01
TVKCKTIF

SEQ ID NO: 953 - protein, 9 aa, Homo sapiens
  Table 1.2; ADAM7; ENSG00000069206; HLA -B*51:01
VACEETLHV

SEQ ID NO: 954 - protein, 8 aa, Homo sapiens
  Table 1.2; ADAM7; ENSG00000069206; HLA -A*11:01,HLA-A*33:01,HLA-A*33:03,HLA-C*05:01
VADDTVYR

SEQ ID NO: 955 - protein, 9 aa, Homo sapiens
  Table 1.2; ADAM7; ENSG00000069206; HLA -A*01:01,HLA-A*02:07,HLA-A*03:02,HLA-A*11:01,HLA-A*31:01, HLA-A*33:01,HLA-A*33:03,HLA-A*68:01,HLA-B*27:02,HLA-B*38:01, HLA-C*05:01
VADDTVYRR

SEQ ID NO: 956 - protein, 10 aa, Homo sapiens
  Table 1.2; ADAM7; ENSG00000069206; HLA -B*27:02
VEGQQLVRPK

SEQ ID NO: 957 - protein, 10 aa, Homo sapiens
  Table 1.2; ADAM7; ENSG00000069206; HLA -B*38:01,HLA-B*39:01
VHEYDSAASI

SEQ ID NO: 958 - protein, 9 aa, Homo sapiens
  Table 1.2; ADAM7; ENSG00000069206; HLA -A*23:01,HLA-A*68:02,HLA-B*13:02
VIVGIGVLI

SEQ ID NO: 959 - protein, 11 aa, Homo sapiens
  Table 1.2; ADAM7; ENSG00000069206; HLA -A*02:04,HLA-A*23:01
VIVGIGVLILL

SEQ ID NO: 960 - protein, 9 aa, Homo sapiens
  Table 1.2; ADAM7; ENSG00000069206; HLA -A*31:01
VLILLVRYR

SEQ ID NO: 961 - protein, 9 aa, Homo sapiens
  Table 1.2; ADAM7; ENSG00000069206; HLA -A*02:03
VLKPGFTCA

SEQ ID NO: 962 - protein, 9 aa, Homo sapiens
  Table 1.2; ADAM7; ENSG00000069206; HLA -A*29:02
VLLSGKWLY

SEQ ID NO: 963 - protein, 9 aa, Homo sapiens
  Table 1.2; ADAM7; ENSG00000069206; HLA -A*02:01,HLA-A*02:03,HLA-A*02:04,HLA-A*02:07,HLA-B*13:02
VLVIVGIGV

SEQ ID NO: 964 - protein, 9 aa, Homo sapiens
  Table 1.2; ADAM7; ENSG00000069206; HLA -A*02:01,HLA-A*02:04,HLA-A*02:07,HLA-A*23:01,HLA-B*13:02
VLVLVIVGI

SEQ ID NO: 965 - protein, 8 aa, Homo sapiens
  Table 1.2; ADAM7; ENSG00000069206; HLA -C*05:01
VMDSDGSI

SEQ ID NO: 966 - protein, 10 aa, Homo sapiens
  Table 1.2; ADAM7; ENSG00000069206; HLA -A*02:01
VMDSDGSIPA

SEQ ID NO: 967 - protein, 11 aa, Homo sapiens
  Table 1.2; ADAM7; ENSG00000069206; HLA -A*02:01,HLA-A*02:07,HLA-B*38:01,HLA-B*39:01
VMDSDGSIPAL

SEQ ID NO: 968 - protein, 9 aa, Homo sapiens
  Table 1.2; ADAM7; ENSG00000069206; HLA -A*11:01
VNFVNMIYK

SEQ ID NO: 969 - protein, 9 aa, Homo sapiens
  Table 1.2; ADAM7; ENSG00000069206; HLA -B*07:02,HLA-B*35:03,HLA-B*51:01,HLA-B*54:01,HLA-B*55:01, HLA-B*56:01
VPYGANYSC

SEQ ID NO: 970 - protein, 9 aa, Homo sapiens
  Table 1.2; ADAM7; ENSG00000069206; HLA -A*02:01,HLA-A*02:03,HLA-A*23:01,HLA-A*24:02,HLA-A*25:01, HLA-A*30:01,HLA-A*32:01,HLA-B*13:02,HLA-B*15:01,HLA-B*15:03, HLA-B*27:05,HLA-B*37:01,HLA-B*38:01,HLA-B*39:01,HLA-B*40:01,
  HLA-B*46:01,HLA-B*58:01,HLA-C*02:02,HLA-C*03:03,HLA-C*03:04, HLA-C*05:01,HLA-C*07:04,HLA-C*16:04
VQSPPTETL

SEQ ID NO: 971 - protein, 11 aa, Homo sapiens
  Table 1.2; ADAM7; ENSG00000069206; HLA -A*02:01,HLA-A*30:01,HLA-B*13:02,HLA-B*39:01
VQSPPTETLGV

SEQ ID NO: 972 - protein, 9 aa, Homo sapiens
  Table 1.2; ADAM7; ENSG00000069206; HLA -A*24:02
VRPKKLPLI

SEQ ID NO: 973 - protein, 9 aa, Homo sapiens
  Table 1.2; ADAM7; ENSG00000069206; HLA -B*57:01
VTLVGIEIW

SEQ ID NO: 974 - protein, 9 aa, Homo sapiens
  Table 1.2; ADAM7; ENSG00000069206; HLA -A*01:01,HLA-B*13:02,HLA-C*16:02
VTNITILVV

SEQ ID NO: 975 - protein, 10 aa, Homo sapiens
  Table 1.2; ADAM7; ENSG00000069206; HLA -A*29:02
VVLLSGKWLY

SEQ ID NO: 976 - protein, 8 aa, Homo sapiens
  Table 1.2; ADAM7; ENSG00000069206; HLA -B*51:01
VVVLVLVI

SEQ ID NO: 977 - protein, 9 aa, Homo sapiens
  Table 1.2; ADAM7; ENSG00000069206; HLA -A*02:01,HLA-A*02:03,HLA-A*02:04,HLA-B*13:02
WLYSHVQGI

SEQ ID NO: 978 - protein, 10 aa, Homo sapiens
  Table 1.2; ADAM7; ENSG00000069206; HLA -A*01:01
WTHEDKIELY

SEQ ID NO: 979 - protein, 10 aa, Homo sapiens
  Table 1.2; ADAM7; ENSG00000069206; HLA -B*40:02,HLA-C*12:03
YDSAASISTC

SEQ ID NO: 980 - protein, 9 aa, Homo sapiens
  Table 1.2; ADAM7; ENSG00000069206; HLA -A*30:01,HLA-B*18:01,HLA-B*40:01,HLA-B*49:01
YEEELLYEI

SEQ ID NO: 981 - protein, 11 aa, Homo sapiens
  Table 1.2; ADAM7; ENSG00000069206; HLA -A*30:01,HLA-B*40:01
YEEELLYEIKL

SEQ ID NO: 982 - protein, 9 aa, Homo sapiens
  Table 1.2; ADAM7; ENSG00000069206; HLA -A*02:07,HLA-B*27:05,HLA-B*35:03,HLA-B*38:01,HLA-B*39:01, HLA-B*40:01,HLA-C*05:01
YHDSTDIGL

SEQ ID NO: 983 - protein, 10 aa, Homo sapiens
  Table 1.2; ADAM7; ENSG00000069206; HLA -B*38:01,HLA-B*39:01
YHDSTDIGLV

SEQ ID NO: 984 - protein, 11 aa, Homo sapiens
  Table 1.2; ADAM7; ENSG00000069206; HLA -B*38:01
YHDSTDIGLVA

SEQ ID NO: 985 - protein, 8 aa, Homo sapiens
  Table 1.2; ADAM7; ENSG00000069206; HLA -A*01:01,HLA-A*26:01,HLA-A*29:02,HLA-A*30:02,HLA-A*32:01, HLA-B*08:01,HLA-B*13:02,HLA-B*15:01,HLA-B*15:03,HLA-B*18:01, HLA-B*46:01,HLA-B*58:01,HLA-C*02:02,HLA-C*04:01,HLA-C*07:01,
  HLA-C*07:04,HLA-C*12:03,HLA-C*16:02
YLIEPVKY

SEQ ID NO: 986 - protein, 9 aa, Homo sapiens
  Table 1.2; ADAM7; ENSG00000069206; HLA -B*08:01
YLKDYKPTC

SEQ ID NO: 987 - protein, 11 aa, Homo sapiens
  Table 1.2; ADAM7; ENSG00000069206; HLA -A*29:02
YNLRVPYGANY

SEQ ID NO: 988 - protein, 9 aa, Homo sapiens
  Table 1.2; ADAM7; ENSG00000069206; HLA -A*01:01,HLA-A*23:01,HLA-A*24:02,HLA-A*25:01,HLA-A*26:01, HLA-A*29:02,HLA-A*30:01,HLA-A*30:02,HLA-A*32:01,HLA-B*13:02, HLA-B*15:01,HLA-B*15:03,HLA-B*18:01,HLA-B*27:02,HLA-B*27:05,
  HLA-B*35:01,HLA-B*37:01,HLA-B*38:01,HLA-B*39:01,HLA-B*44:02, HLA-B*44:03,HLA-B*46:01,HLA-B*58:01,HLA-C*02:02,HLA-C*07:01, HLA-C*07:04,HLA-C*07:06,HLA-C*12:03,HLA-C*14:02,HLA-C*16:01, HLA-C*16:02,HLA-C*16:04
YQGSIVHEY

SEQ ID NO: 989 - protein, 10 aa, Homo sapiens
  Table 1.2; ADAM7; ENSG00000069206; HLA -B*27:02
YSCTELNFTR

SEQ ID NO: 990 - protein, 8 aa, Homo sapiens
  Table 1.2; ADAM7; ENSG00000069206; HLA -A*01:01,HLA-C*03:04,HLA-C*05:01
YSDEGEHL

SEQ ID NO: 991 - protein, 9 aa, Homo sapiens
  Table 1.2; ADAM7; ENSG00000069206; HLA -A*01:01,HLA-A*02:01,HLA-A*02:07,HLA-B*38:01,HLA-C*05:01
YSDEGEHLV

SEQ ID NO: 992 - protein, 10 aa, Homo sapiens
  Table 1.2; ADAM7; ENSG00000069206; HLA -A*01:01,HLA-A*02:07,HLA-B*38:01,HLA-B*58:01,HLA-C*03:04, HLA-C*05:01
YSDEGEHLVF

SEQ ID NO: 993 - protein, 11 aa, Homo sapiens
  Table 1.2; ADAM7; ENSG00000069206; HLA -A*01:01
YSDEGEHLVFK

SEQ ID NO: 994 - protein, 9 aa, Homo sapiens
  Table 1.2; ADAM7; ENSG00000069206; HLA -A*01:01
YSETFYSMK

SEQ ID NO: 995 - protein, 9 aa, Homo sapiens
  Table 1.2; ADAM7; ENSG00000069206; HLA -A*01:01,HLA-A*25:01,HLA-A*26:01,HLA-A*29:02,HLA-A*30:02, HLA-A*32:01,HLA-B*15:01,HLA-B*15:03,HLA-B*18:01,HLA-B*35:01, HLA-B*46:01,HLA-B*58:01,HLA-C*02:02,HLA-C*03:03,HLA-C*03:04,
  HLA-C*07:04,HLA-C*14:02,HLA-C*16:01,HLA-C*16:04
YSHVQGISY

SEQ ID NO: 996 - protein, 8 aa, Homo sapiens
  Table 1.2; ADAM7; ENSG00000069206; HLA -A*32:01,HLA-B*08:01,HLA-B*15:01,HLA-B*15:03,HLA-B*18:01, HLA-B*37:01,HLA-B*46:01,HLA-B*58:01,HLA-C*03:03,HLA-C*03:04, HLA-C*14:02,HLA-C*16:01
YSMKGEAF

SEQ ID NO: 997 - protein, 10 aa, Homo sapiens
  Table 1.2; ADAM7; ENSG00000069206; HLA -A*33:01,HLA-A*33:03,HLA-A*68:01,HLA-B*27:02,HLA-B*57:01
YSMKGEAFTR

SEQ ID NO: 998 - protein, 8 aa, Homo sapiens
  Table 1.2; ADAM7; ENSG00000069206; HLA -B*08:01,HLA-B*58:01,HLA-C*03:03,HLA-C*03:04,HLA-C*05:01
YSNIETTL

SEQ ID NO: 999 - protein, 9 aa, Homo sapiens
  Table 1.2; ADAM7; ENSG00000069206; HLA -A*01:01,HLA-B*46:01,HLA-B*58:01
YSNIETTLL

SEQ ID NO: 1000 - protein, 10 aa, Homo sapiens
  Table 1.2; ADAM7; ENSG00000069206; HLA -B*27:02
YSNIETTLLR

SEQ ID NO: 1001 - protein, 11 aa, Homo sapiens
  Table 1.2; ADAM7; ENSG00000069206; HLA -A*01:01,HLA-B*57:01
YSNIETTLLRF

SEQ ID NO: 1002 - protein, 9 aa, Homo sapiens
  Table 1.2; ADAM7; ENSG00000069206; HLA -A*68:02,HLA-B*58:01,HLA-C*02:02,HLA-C*12:03,HLA-C*16:01, HLA-C*16:02
YSTSIIKDL

SEQ ID NO: 1003 - protein, 10 aa, Homo sapiens
  Table 1.2; ADAM7; ENSG00000069206; HLA -A*68:02
YSTSIIKDLL

SEQ ID NO: 1004 - protein, 10 aa, Homo sapiens
  Table 1.2; ADAM7; ENSG00000069206; HLA -A*24:02
YYSTSIIKDL

SEQ ID NO: 1005 - protein, 11 aa, Homo sapiens
  Table 1.2; ADAM7; ENSG00000069206; HLA -A*24:02
YYSTSIIKDLL

SEQ ID NO: 1006 - protein, 9 aa, Homo sapiens
  Table 1.2; AMELX; ENSG00000125363; HLA -B*54:01,HLA-B*56:01,HLA-C*06:02
AAFAMPLPP

SEQ ID NO: 1007 - protein, 9 aa, Homo sapiens
  Table 1.2; AMELX; ENSG00000125363; HLA -B*39:01
AQQPVIPQQ

SEQ ID NO: 1008 - protein, 10 aa, Homo sapiens
  Table 1.2; AMELX; ENSG00000125363; HLA -B*13:02
AQQPYQPQPV

SEQ ID NO: 1009 - protein, 11 aa, Homo sapiens
  Table 1.2; AMELX; ENSG00000125363; HLA -A*33:01,HLA-A*33:03,HLA-A*68:01
EAWPSTDKTKR

SEQ ID NO: 1010 - protein, 8 aa, Homo sapiens
  Table 1.2; AMELX; ENSG00000125363; HLA -A*25:01,HLA-B*57:01
EVLTPLKW

SEQ ID NO: 1011 - protein, 9 aa, Homo sapiens
  Table 1.2; AMELX; ENSG00000125363; HLA -B*46:01
FACLLGAAF

SEQ ID NO: 1012 - protein, 9 aa, Homo sapiens
  Table 1.2; AMELX; ENSG00000125363; HLA -B*54:01
FAMPLPPHP

SEQ ID NO: 1013 - protein, 10 aa, Homo sapiens
  Table 1.2; AMELX; ENSG00000125363; HLA -B*54:01
FAMPLPPHPG

SEQ ID NO: 1014 - protein, 9 aa, Homo sapiens
  Table 1.2; AMELX; ENSG00000125363; HLA -B*35:01,HLA-B*35:03,HLA-B*54:01,HLA-B*56:01
FPMQPLPPM

SEQ ID NO: 1015 - protein, 10 aa, Homo sapiens
  Table 1.2; AMELX; ENSG00000125363; HLA -B*35:03
FPMQPLPPML

SEQ ID NO: 1016 - protein, 9 aa, Homo sapiens
  Table 1.2; AMELX; ENSG00000125363; HLA -B*46:01
FSYEVLTPL

SEQ ID NO: 1017 - protein, 11 aa, Homo sapiens
  Table 1.2; AMELX; ENSG00000125363; HLA -B*57:01
FSYEVLTPLKW

SEQ ID NO: 1018 - protein, 8 aa, Homo sapiens
  Table 1.2; AMELX; ENSG00000125363; HLA -B*13:02
GQHSMTPI

SEQ ID NO: 1019 - protein, 9 aa, Homo sapiens
  Table 1.2; AMELX; ENSG00000125363; HLA -A*23:01,HLA-A*24:02
GYINFSYEV

SEQ ID NO: 1020 - protein, 8 aa, Homo sapiens
  Table 1.2; AMELX; ENSG00000125363; HLA -B*38:01
HHQIIPVL

SEQ ID NO: 1021 - protein, 9 aa, Homo sapiens
  Table 1.2; AMELX; ENSG00000125363; HLA -A*29:02,HLA-B*35:01
HPGYINFSY

SEQ ID NO: 1022 - protein, 9 aa, Homo sapiens
  Table 1.2; AMELX; ENSG00000125363; HLA -A*33:01
HSMTPIQHH

SEQ ID NO: 1023 - protein, 9 aa, Homo sapiens
  Table 1.2; AMELX; ENSG00000125363; HLA -B*07:02,HLA-B*51:01,HLA-B*54:01,HLA-B*56:01
IPQQPMMPV

SEQ ID NO: 1024 - protein, 10 aa, Homo sapiens
  Table 1.2; AMELX; ENSG00000125363; HLA -B*54:01,HLA-B*56:01
IPVLSQQHPP

SEQ ID NO: 1025 - protein, 9 aa, Homo sapiens
  Table 1.2; AMELX; ENSG00000125363; HLA -B*56:01
IPVVPAQQP

SEQ ID NO: 1026 - protein, 10 aa, Homo sapiens
  Table 1.2; AMELX; ENSG00000125363; HLA -B*56:01
IPVVPAQQPV

SEQ ID NO: 1027 - protein, 11 aa, Homo sapiens
  Table 1.2; AMELX; ENSG00000125363; HLA -B*51:01,HLA-B*54:01
IPVVPAQQPVI

SEQ ID NO: 1028 - protein, 9 aa, Homo sapiens
  Table 1.2; AMELX; ENSG00000125363; HLA -A*02:04,HLA-B*38:01
LHHQIIPVL

SEQ ID NO: 1029 - protein, 8 aa, Homo sapiens
  Table 1.2; AMELX; ENSG00000125363; HLA -B*51:01
LPPMLPDL

SEQ ID NO: 1030 - protein, 10 aa, Homo sapiens
  Table 1.2; AMELX; ENSG00000125363; HLA -B*51:01
LPPMLPDLTL

SEQ ID NO: 1031 - protein, 9 aa, Homo sapiens
  Table 1.2; AMELX; ENSG00000125363; HLA -A*26:01,HLA-A*29:02,HLA-B*35:01,HLA-B*51:01,HLA-B*55:01
LPPPAQQPY

SEQ ID NO: 1032 - protein, 9 aa, Homo sapiens
  Table 1.2; AMELX; ENSG00000125363; HLA -B*54:01
LPPQPPLPP

SEQ ID NO: 1033 - protein, 10 aa, Homo sapiens
  Table 1.2; AMELX; ENSG00000125363; HLA -A*02:07,HLA-A*25:01
MLPDLTLEAW

SEQ ID NO: 1034 - protein, 8 aa, Homo sapiens
  Table 1.2; AMELX; ENSG00000125363; HLA -B*54:01
MPLPPHPG

SEQ ID NO: 1035 - protein, 9 aa, Homo sapiens
  Table 1.2; AMELX; ENSG00000125363; HLA -B*35:01,HLA-B*54:01,HLA-B*55:01
MPLPPHPGH

SEQ ID NO: 1036 - protein, 10 aa, Homo sapiens
  Table 1.2; AMELX; ENSG00000125363; HLA -B*54:01
MPLPPHPGHP

SEQ ID NO: 1037 - protein, 11 aa, Homo sapiens
  Table 1.2; AMELX; ENSG00000125363; HLA -B*54:01
MPLPPHPGHPG

SEQ ID NO: 1038 - protein, 9 aa, Homo sapiens
  Table 1.2; AMELX; ENSG00000125363; HLA -B*07:02,HLA-B*08:01,HLA-B*35:01,HLA-B*35:03,HLA-B*51:01, HLA-B*54:01,HLA-B*55:01,HLA-B*56:01,HLA-C*03:03,HLA-C*07:02
MPVPGQHSM

SEQ ID NO: 1039 - protein, 11 aa, Homo sapiens
  Table 1.2; AMELX; ENSG00000125363; HLA -B*54:01
MPVPGQHSMTP

SEQ ID NO: 1040 - protein, 10 aa, Homo sapiens
  Table 1.2; AMELX; ENSG00000125363; HLA -A*01:01,HLA-A*29:02,HLA-A*30:02
NLPPPAQQPY

SEQ ID NO: 1041 - protein, 9 aa, Homo sapiens
  Table 1.2; AMELX; ENSG00000125363; HLA -A*02:07
PLPPMLPDL

SEQ ID NO: 1042 - protein, 11 aa, Homo sapiens
  Table 1.2; AMELX; ENSG00000125363; HLA -A*24:02
PMMPVPGQHSM

SEQ ID NO: 1043 - protein, 11 aa, Homo sapiens
  Table 1.2; AMELX; ENSG00000125363; HLA -A*29:02
PNLPPPAQQPY

SEQ ID NO: 1044 - protein, 9 aa, Homo sapiens
  Table 1.2; AMELX; ENSG00000125363; HLA -B*35:03
PPMLPDLTL

SEQ ID NO: 1045 - protein, 9 aa, Homo sapiens
  Table 1.2; AMELX; ENSG00000125363; HLA -A*24:02
PQPPLPPMF

SEQ ID NO: 1046 - protein, 8 aa, Homo sapiens
  Table 1.2; AMELX; ENSG00000125363; HLA -B*07:02
PVPGQHSM

SEQ ID NO: 1047 - protein, 9 aa, Homo sapiens
  Table 1.2; AMELX; ENSG00000125363; HLA -B*38:01
QHSMTPIQH

SEQ ID NO: 1048 - protein, 9 aa, Homo sapiens
  Table 1.2; AMELX; ENSG00000125363; HLA -B*51:01,HLA-B*54:01,HLA-B*56:01
QPHHHIPVV

SEQ ID NO: 1049 - protein, 9 aa, Homo sapiens
  Table 1.2; AMELX; ENSG00000125363; HLA -B*07:02,HLA-B*35:01,HLA-B*35:03,HLA-B*51:01,HLA-B*54:01, HLA-B*56:01,HLA-C*07:02
QPLPPQPPL

SEQ ID NO: 1050 - protein, 9 aa, Homo sapiens
  Table 1.2; AMELX; ENSG00000125363; HLA -B*07:02,HLA-B*35:03,HLA-B*51:01,HLA-B*54:01,HLA-B*55:01, HLA-B*56:01,HLA-C*07:02
QPMQPQPPV

SEQ ID NO: 1051 - protein, 8 aa, Homo sapiens
  Table 1.2; AMELX; ENSG00000125363; HLA -B*56:01
QPNLPPPA

SEQ ID NO: 1052 - protein, 9 aa, Homo sapiens
  Table 1.2; AMELX; ENSG00000125363; HLA -B*56:01
QPNLPPPAQ

SEQ ID NO: 1053 - protein, 9 aa, Homo sapiens
  Table 1.2; AMELX; ENSG00000125363; HLA -A*30:02,HLA-B*07:02,HLA-B*35:01,HLA-B*35:03,HLA-B*37:01, HLA-B*55:01,HLA-B*56:01,HLA-C*07:02
QPQPPVHPM

SEQ ID NO: 1054 - protein, 9 aa, Homo sapiens
  Table 1.2; AMELX; ENSG00000125363; HLA -B*56:01
QPQPVQPQP

SEQ ID NO: 1055 - protein, 9 aa, Homo sapiens
  Table 1.2; AMELX; ENSG00000125363; HLA -B*07:02,HLA-B*35:01,HLA-B*35:03,HLA-B*55:01,HLA-B*56:01
QPVIPQQPM

SEQ ID NO: 1056 - protein, 8 aa, Homo sapiens
  Table 1.2; AMELX; ENSG00000125363; HLA -B*51:01
QPYQPQPV

SEQ ID NO: 1057 - protein, 9 aa, Homo sapiens
  Table 1.2; AMELX; ENSG00000125363; HLA -B*51:01,HLA-B*54:01
QPYQPQPVQ

SEQ ID NO: 1058 - protein, 10 aa, Homo sapiens
  Table 1.2; AMELX; ENSG00000125363; HLA -B*56:01
QPYQPQPVQP

SEQ ID NO: 1059 - protein, 9 aa, Homo sapiens
  Table 1.2; AMELX; ENSG00000125363; HLA -A*02:03,HLA-A*02:04,HLA-A*23:01,HLA-A*24:02,HLA-A*25:01, HLA-A*30:01,HLA-A*30:02,HLA-A*31:01,HLA-A*32:01,HLA-B*08:01, HLA-B*13:02,HLA-B*15:01,HLA-B*15:03,HLA-B*27:05,HLA-B*37:01,
  HLA-B*38:01,HLA-B*39:01,HLA-B*40:01,HLA-B*40:02,HLA-B*44:02, HLA-B*46:01,HLA-B*58:01,HLA-C*03:03,HLA-C*03:04,HLA-C*06:02, HLA-C*07:02,HLA-C*07:04,HLA-C*16:04
QQHPPTHTL

SEQ ID NO: 1060 - protein, 9 aa, Homo sapiens
  Table 1.2; AMELX; ENSG00000125363; HLA -B*13:02
QQPYQPQPV

SEQ ID NO: 1061 - protein, 10 aa, Homo sapiens
  Table 1.2; AMELX; ENSG00000125363; HLA -A*01:01,HLA-A*25:01,HLA-A*26:01,HLA-A*30:02,HLA-B*57:01, HLA-B*58:01
QSIRPPYPSY

SEQ ID NO: 1062 - protein, 9 aa, Homo sapiens
  Table 1.2; AMELX; ENSG00000125363; HLA -A*29:02,HLA-B*35:01
RPPYPSYGY

SEQ ID NO: 1063 - protein, 9 aa, Homo sapiens
  Table 1.2; AMELX; ENSG00000125363; HLA -A*03:01,HLA-A*25:01,HLA-A*26:01,HLA-A*29:02,HLA-A*30:02, HLA-A*31:01,HLA-A*32:01,HLA-B*07:02,HLA-B*15:01,HLA-B*15:03, HLA-B*46:01,HLA-B*57:01,HLA-B*58:01,HLA-C*02:02
SIRPPYPSY

SEQ ID NO: 1064 - protein, 11 aa, Homo sapiens
  Table 1.2; AMELX; ENSG00000125363; HLA -A*29:02
SIRPPYPSYGY

SEQ ID NO: 1065 - protein, 10 aa, Homo sapiens
  Table 1.2; AMELX; ENSG00000125363; HLA -A*24:02
SYEVLTPLKW

SEQ ID NO: 1066 - protein, 11 aa, Homo sapiens
  Table 1.2; AMELX; ENSG00000125363; HLA -A*02:04
TLQPHHHIPVV

SEQ ID NO: 1067 - protein, 8 aa, Homo sapiens
  Table 1.2; AMELX; ENSG00000125363; HLA -B*08:01
TPIQHHQP

SEQ ID NO: 1068 - protein, 10 aa, Homo sapiens
  Table 1.2; AMELX; ENSG00000125363; HLA -B*07:02,HLA-B*35:03,HLA-C*07:02
TPIQHHQPNL

SEQ ID NO: 1069 - protein, 9 aa, Homo sapiens
  Table 1.2; AMELX; ENSG00000125363; HLA -B*08:01,HLA-B*51:01
TPLKWYQSI

SEQ ID NO: 1070 - protein, 8 aa, Homo sapiens
  Table 1.2; AMELX; ENSG00000125363; HLA -B*51:01,HLA-B*56:01
VPAQQPVI

SEQ ID NO: 1071 - protein, 9 aa, Homo sapiens
  Table 1.2; AMELX; ENSG00000125363; HLA -B*15:01,HLA-B*15:03,HLA-B*37:01,HLA-B*46:01,HLA-C*01:02
VQPQPHQPM

SEQ ID NO: 1072 - protein, 9 aa, Homo sapiens
  Table 1.2; AMELX; ENSG00000125363; HLA -A*02:07,HLA-B*13:02,HLA-B*51:01
VVPAQQPVI

SEQ ID NO: 1073 - protein, 8 aa, Homo sapiens
  Table 1.2; AMELX; ENSG00000125363; HLA -B*18:01,HLA-B*49:01
YEVLTPLK

SEQ ID NO: 1074 - protein, 9 aa, Homo sapiens
  Table 1.2; AMELX; ENSG00000125363; HLA -B*18:01,HLA-B*44:02,HLA-B*44:03,HLA-B*49:01,HLA-B*57:01, HLA-C*16:04
YEVLTPLKW

SEQ ID NO: 1075 - protein, 10 aa, Homo sapiens
  Table 1.2; AMELX; ENSG00000125363; HLA -B*44:02,HLA-B*44:03
YEVLTPLKWY

SEQ ID NO: 1076 - protein, 8 aa, Homo sapiens
  Table 1.2; AMELX; ENSG00000125363; HLA -B*54:01
YPSYGYEP

SEQ ID NO: 1077 - protein, 9 aa, Homo sapiens
  Table 1.2; AMELX; ENSG00000125363; HLA -B*35:01,HLA-B*35:03
YPSYGYEPM

SEQ ID NO: 1078 - protein, 8 aa, Homo sapiens
  Table 1.2; AMELX; ENSG00000125363; HLA -B*15:03,HLA-C*16:01
YQSIRPPY

SEQ ID NO: 1079 - protein, 8 aa, Homo sapiens
  Table 1.2; BPIFA2; ENSG00000131050; HLA -B*37:01,HLA-B*49:01
AEKLLNNV

SEQ ID NO: 1080 - protein, 9 aa, Homo sapiens
  Table 1.2; BPIFA2; ENSG00000131050; HLA -A*30:01,HLA-B*13:02,HLA-B*18:01,HLA-B*27:02,HLA-B*37:01, HLA-B*40:01,HLA-B*40:02,HLA-B*44:02,HLA-B*44:03,HLA-B*49:01, HLA-C*16:04
AEKLLNNVI

SEQ ID NO: 1081 - protein, 10 aa, Homo sapiens
  Table 1.2; BPIFA2; ENSG00000131050; HLA -A*30:01,HLA-B*40:01,HLA-B*40:02,HLA-B*44:02,HLA-B*44:03
AEPIDDGKGL

SEQ ID NO: 1082 - protein, 9 aa, Homo sapiens
  Table 1.2; BPIFA2; ENSG00000131050; HLA -C*01:02
AGPIIGQII

SEQ ID NO: 1083 - protein, 9 aa, Homo sapiens
  Table 1.2; BPIFA2; ENSG00000131050; HLA -A*01:01,HLA-A*02:01,HLA-A*02:07,HLA-A*03:01,HLA-A*03:02, HLA-A*11:01,HLA-A*25:01,HLA-A*30:01,HLA-A*31:01,HLA-A*32:01, HLA-B*13:02,HLA-B*15:01,HLA-B*15:03,HLA-B*27:05,HLA-B*35:01,
  HLA-B*35:03,HLA-B*38:01,HLA-B*39:01,HLA-B*40:01,HLA-B*40:02, HLA-B*44:03,HLA-B*46:01,HLA-B*55:01,HLA-B*57:01,HLA-B*58:01, HLA-C*01:02,HLA-C*02:02,HLA-C*03:03,HLA-C*03:04,HLA-C*04:01, HLA-C*05:01,HLA-C*07:04,HLA-C*16:01,HLA-C*16:02,HLA-C*16:04
ASDPTSISL

SEQ ID NO: 1084 - protein, 10 aa, Homo sapiens
  Table 1.2; BPIFA2; ENSG00000131050; HLA -A*01:01
ASDPTSISLS

SEQ ID NO: 1085 - protein, 11 aa, Homo sapiens
  Table 1.2; BPIFA2; ENSG00000131050; HLA -A*01:01,HLA-A*02:07,HLA-A*03:01,HLA-A*03:02,HLA-A*11:01, HLA-B*38:01,HLA-C*03:03
ASDPTSISLSL

SEQ ID NO: 1086 - protein, 9 aa, Homo sapiens
  Table 1.2; BPIFA2; ENSG00000131050; HLA -A*02:01,HLA-A*02:03,HLA-A*02:04,HLA-A*02:07,HLA-A*03:01, HLA-A*11:01,HLA-A*23:01,HLA-A*30:01,HLA-A*31:01,HLA-A*32:01, HLA-A*68:02,HLA-B*13:02,HLA-B*40:02,HLA-B*46:01,HLA-B*49:01,
  HLA-B*55:01,HLA-B*56:01
ASLDLLTAV

SEQ ID NO: 1087 - protein, 10 aa, Homo sapiens
  Table 1.2; BPIFA2; ENSG00000131050; HLA -A*11:01,HLA-A*30:01,HLA-A*68:01,HLA-B*07:02,HLA-B*27:05, HLA-B*35:03,HLA-B*38:01,HLA-B*39:01,HLA-B*40:01,HLA-C*01:02, HLA-C*03:03,HLA-C*03:04
CASDPTSISL

SEQ ID NO: 1088 - protein, 8 aa, Homo sapiens
  Table 1.2; BPIFA2; ENSG00000131050; HLA -B*40:02
DDGKGLNL

SEQ ID NO: 1089 - protein, 10 aa, Homo sapiens
  Table 1.2; BPIFA2; ENSG00000131050; HLA -B*18:01
DDGKGLNLSF

SEQ ID NO: 1090 - protein, 9 aa, Homo sapiens
  Table 1.2; BPIFA2; ENSG00000131050; HLA -A*25:01
DGKGLNLSF

SEQ ID NO: 1091 - protein, 9 aa, Homo sapiens
  Table 1.2; BPIFA2; ENSG00000131050; HLA -A*33:01
DKHSQIINK

SEQ ID NO: 1092 - protein, 11 aa, Homo sapiens
  Table 1.2; BPIFA2; ENSG00000131050; HLA -A*25:01
DLGVLQKSSAW

SEQ ID NO: 1093 - protein, 8 aa, Homo sapiens
  Table 1.2; BPIFA2; ENSG00000131050; HLA -A*23:01,HLA-B*08:01,HLA-B*18:01,HLA-B*51:01
DLLTAVTI

SEQ ID NO: 1094 - protein, 9 aa, Homo sapiens
  Table 1.2; BPIFA2; ENSG00000131050; HLA -A*02:04,HLA-A*25:01,HLA-A*68:01,HLA-A*68:02,HLA-B*27:05, HLA-B*35:03,HLA-B*38:01,HLA-B*39:01
DLSNVVDKL

SEQ ID NO: 1095 - protein, 9 aa, Homo sapiens
  Table 1.2; BPIFA2; ENSG00000131050; HLA -B*08:01
DNPQHKTQL

SEQ ID NO: 1096 - protein, 8 aa, Homo sapiens
  Table 1.2; BPIFA2; ENSG00000131050; HLA -B*08:01
DNTLKGIL

SEQ ID NO: 1097 - protein, 8 aa, Homo sapiens
  Table 1.2; BPIFA2; ENSG00000131050; HLA -B*08:01,HLA-B*51:01
DPQTHQPV

SEQ ID NO: 1098 - protein, 9 aa, Homo sapiens
  Table 1.2; BPIFA2; ENSG00000131050; HLA -B*35:03,HLA-B*51:01,HLA-B*54:01,HLA-B*55:01,HLA-B*56:01
DPQTHQPVA

SEQ ID NO: 1099 - protein, 10 aa, Homo sapiens
  Table 1.2; BPIFA2; ENSG00000131050; HLA -B*56:01
DPQTHQPVAV

SEQ ID NO: 1100 - protein, 9 aa, Homo sapiens
  Table 1.2; BPIFA2; ENSG00000131050; HLA -A*23:01,HLA-A*68:01,HLA-B*07:02,HLA-B*08:01,HLA-B*18:01, HLA-B*35:01,HLA-B*35:03,HLA-B*51:01,HLA-B*55:01,HLA-B*56:01, HLA-C*07:02
DPTSISLSL

SEQ ID NO: 1101 - protein, 10 aa, Homo sapiens
  Table 1.2; BPIFA2; ENSG00000131050; HLA -A*25:01
DPTSISLSLL

SEQ ID NO: 1102 - protein, 11 aa, Homo sapiens
  Table 1.2; BPIFA2; ENSG00000131050; HLA -A*33:03,HLA-A*68:01
DVKAEPIDDGK

SEQ ID NO: 1103 - protein, 8 aa, Homo sapiens
  Table 1.2; BPIFA2; ENSG00000131050; HLA -A*26:01,HLA-B*08:01,HLA-B*51:01
DVNVIQQV

SEQ ID NO: 1104 - protein, 9 aa, Homo sapiens
  Table 1.2; BPIFA2; ENSG00000131050; HLA -A*25:01,HLA-A*26:01,HLA-A*33:01,HLA-A*33:03,HLA-A*68:01, HLA-A*68:02,HLA-B*08:01,HLA-B*13:02,HLA-B*18:01,HLA-B*35:01, HLA-B*35:03,HLA-B*38:01,HLA-B*51:01,HLA-C*07:06
DVNVIQQVV

SEQ ID NO: 1105 - protein, 9 aa, Homo sapiens
  Table 1.2; BPIFA2; ENSG00000131050; HLA -A*68:02,HLA-B*51:01
EAEKLLNNV

SEQ ID NO: 1106 - protein, 11 aa, Homo sapiens
  Table 1.2; BPIFA2; ENSG00000131050; HLA -A*68:01
ECASDPTSISL

SEQ ID NO: 1107 - protein, 10 aa, Homo sapiens
  Table 1.2; BPIFA2; ENSG00000131050; HLA -B*35:03,HLA-B*38:01
EGLETVDNTL

SEQ ID NO: 1108 - protein, 11 aa, Homo sapiens
  Table 1.2; BPIFA2; ENSG00000131050; HLA -A*11:01,HLA-A*33:01,HLA-A*33:03,HLA-A*68:01,HLA-B*27:02, HLA-C*07:06
EGLETVDNTLK

SEQ ID NO: 1109 - protein, 10 aa, Homo sapiens
  Table 1.2; BPIFA2; ENSG00000131050; HLA -A*68:02
EICPLIRIFI

SEQ ID NO: 1110 - protein, 9 aa, Homo sapiens
  Table 1.2; BPIFA2; ENSG00000131050; HLA -A*25:01,HLA-A*26:01,HLA-A*33:03,HLA-B*07:02,HLA-B*35:01, HLA-B*35:03,HLA-B*44:03,HLA-B*55:01
EPIDDGKGL

SEQ ID NO: 1111 - protein, 11 aa, Homo sapiens
  Table 1.2; BPIFA2; ENSG00000131050; HLA -A*23:01,HLA-A*25:01,HLA-A*26:01,HLA-A*33:03,HLA-A*68:01, HLA-A*68:02,HLA-B*07:02,HLA-B*35:01,HLA-B*35:03,HLA-B*38:01, HLA-B*44:03,HLA-C*07:02,HLA-C*07:06
EPIDDGKGLNL

SEQ ID NO: 1112 - protein, 8 aa, Homo sapiens
  Table 1.2; BPIFA2; ENSG00000131050; HLA -B*07:02,HLA-B*08:01,HLA-B*35:03
EPVLHEGL

SEQ ID NO: 1113 - protein, 11 aa, Homo sapiens
  Table 1.2; BPIFA2; ENSG00000131050; HLA -A*68:02,HLA-B*56:01
EPVLHEGLETV

SEQ ID NO: 1114 - protein, 9 aa, Homo sapiens
  Table 1.2; BPIFA2; ENSG00000131050; HLA -A*01:01
ETDPQTHQP

SEQ ID NO: 1115 - protein, 10 aa, Homo sapiens
  Table 1.2; BPIFA2; ENSG00000131050; HLA -A*01:01,HLA-A*26:01,HLA-A*33:01,HLA-A*33:03,HLA-A*68:01, HLA-A*68:02,HLA-B*27:05,HLA-C*06:02
ETDPQTHQPV

SEQ ID NO: 1116 - protein, 11 aa, Homo sapiens
  Table 1.2; BPIFA2; ENSG00000131050; HLA -A*01:01
ETDPQTHQPVA

SEQ ID NO: 1117 - protein, 8 aa, Homo sapiens
  Table 1.2; BPIFA2; ENSG00000131050; HLA -A*33:03
ETVDNTLK

SEQ ID NO: 1118 - protein, 9 aa, Homo sapiens
  Table 1.2; BPIFA2; ENSG00000131050; HLA -A*26:01
ETVDNTLKG

SEQ ID NO: 1119 - protein, 10 aa, Homo sapiens
  Table 1.2; BPIFA2; ENSG00000131050; HLA -A*25:01,HLA-A*26:01,HLA-A*33:03,HLA-A*68:01,HLA-A*68:02
ETVDNTLKGI

SEQ ID NO: 1120 - protein, 11 aa, Homo sapiens
  Table 1.2; BPIFA2; ENSG00000131050; HLA -A*25:01,HLA-A*26:01,HLA-A*68:01,HLA-A*68:02
ETVDNTLKGIL

SEQ ID NO: 1121 - protein, 9 aa, Homo sapiens
  Table 1.2; BPIFA2; ENSG00000131050; HLA -A*23:01,HLA-B*08:01,HLA-B*35:03,HLA-B*46:01,HLA-C*03:03, HLA-C*03:04
FGLKISNSL

SEQ ID NO: 1122 - protein, 9 aa, Homo sapiens
  Table 1.2; BPIFA2; ENSG00000131050; HLA -A*02:01,HLA-A*02:04,HLA-A*02:07,HLA-A*68:02,HLA-B*13:02
FIHSLDVNV

SEQ ID NO: 1123 - protein, 8 aa, Homo sapiens
  Table 1.2; BPIFA2; ENSG00000131050; HLA -B*35:01,HLA-B*35:03,HLA-B*51:01,HLA-B*54:01,HLA-B*55:01, HLA-B*56:01
FPVTANVT

SEQ ID NO: 1124 - protein, 9 aa, Homo sapiens
  Table 1.2; BPIFA2; ENSG00000131050; HLA -A*02:01,HLA-A*23:01,HLA-A*30:01,HLA-A*68:02,HLA-B*07:02, HLA-B*08:01,HLA-B*13:02,HLA-B*27:05,HLA-B*35:01,HLA-B*35:03, HLA-B*38:01,HLA-B*39:01,HLA-B*40:02,HLA-B*46:01,HLA-B*49:01,
  HLA-B*51:01,HLA-B*54:01,HLA-B*55:01,HLA-B*56:01,HLA-C*02:02, HLA-C*03:03,HLA-C*03:04,HLA-C*04:01,HLA-C*07:02,HLA-C*07:04, HLA-C*12:03
FPVTANVTV

SEQ ID NO: 1125 - protein, 10 aa, Homo sapiens
  Table 1.2; BPIFA2; ENSG00000131050; HLA -B*35:01,HLA-B*35:03,HLA-B*54:01,HLA-B*55:01,HLA-B*56:01
FPVTANVTVA

SEQ ID NO: 1126 - protein, 11 aa, Homo sapiens
  Table 1.2; BPIFA2; ENSG00000131050; HLA -B*35:03,HLA-B*54:01,HLA-B*55:01,HLA-B*56:01
FPVTANVTVAG

SEQ ID NO: 1127 - protein, 9 aa, Homo sapiens
  Table 1.2; BPIFA2; ENSG00000131050; HLA -A*02:01,HLA-A*02:03,HLA-A*02:04,HLA-A*02:07,HLA-A*03:01, HLA-A*03:02,HLA-A*11:01,HLA-A*23:01,HLA-A*24:02,HLA-A*25:01, HLA-A*26:01,HLA-A*29:02,HLA-A*30:01,HLA-A*30:02,HLA-A*31:01,
  HLA-A*32:01,HLA-A*33:01,HLA-A*33:03,HLA-A*68:01,HLA-A*68:02, HLA-B*07:02,HLA-B*08:01,HLA-B*13:02,HLA-B*15:01,HLA-B*15:03, HLA-B*18:01,HLA-B*27:02,HLA-B*27:05,HLA-B*35:01,HLA-B*35:03, HLA-B*37:01,HLA-B*38:01,HLA-B*39:01,HLA-B*40:01,HLA-B*40:02,
  HLA-B*44:02,HLA-B*44:03,HLA-B*46:01,HLA-B*49:01,HLA-B*51:01, HLA-B*54:01,HLA-B*55:01,HLA-B*56:01,HLA-B*57:01,HLA-B*58:01, HLA-C*01:02,HLA-C*02:02,HLA-C*03:03,HLA-C*03:04,HLA-C*04:01, HLA-C*05:01,HLA-C*06:02,HLA-C*07:02,HLA-C*07:04,HLA-C*07:06,
  HLA-C*12:03,HLA-C*14:02,HLA-C*16:01,HLA-C*16:02,HLA-C*16:04
FVNSVINTL

SEQ ID NO: 1128 - protein, 10 aa, Homo sapiens
  Table 1.2; BPIFA2; ENSG00000131050; HLA -A*01:01,HLA-A*03:01,HLA-A*03:02,HLA-A*11:01,HLA-A*29:02, HLA-A*31:01,HLA-A*33:01,HLA-A*33:03,HLA-A*68:01,HLA-A*68:02, HLA-B*27:02,HLA-B*27:05,HLA-C*07:06
FVNSVINTLK

SEQ ID NO: 1129 - protein, 10 aa, Homo sapiens
  Table 1.2; BPIFA2; ENSG00000131050; HLA -A*30:01,HLA-B*40:01,HLA-B*49:01
GECASDPTSI

SEQ ID NO: 1130 - protein, 9 aa, Homo sapiens
  Table 1.2; BPIFA2; ENSG00000131050; HLA -A*02:01,HLA-A*02:04,HLA-A*02:07,HLA-B*27:05,HLA-B*35:03, HLA-B*38:01,HLA-B*40:01,HLA-B*55:01
GLETVDNTL

SEQ ID NO: 1131 - protein, 10 aa, Homo sapiens
  Table 1.2; BPIFA2; ENSG00000131050; HLA -A*01:01,HLA-A*03:02,HLA-B*27:02
GLETVDNTLK

SEQ ID NO: 1132 - protein, 8 aa, Homo sapiens
  Table 1.2; BPIFA2; ENSG00000131050; HLA -B*08:01
GLKISNSL

SEQ ID NO: 1133 - protein, 10 aa, Homo sapiens
  Table 1.2; BPIFA2; ENSG00000131050; HLA -A*02:03,HLA-B*56:01
GLNLSFPVTA

SEQ ID NO: 1134 - protein, 10 aa, Homo sapiens
  Table 1.2; BPIFA2; ENSG00000131050; HLA -B*27:02
GNDLSNVVDK

SEQ ID NO: 1135 - protein, 8 aa, Homo sapiens
  Table 1.2; BPIFA2; ENSG00000131050; HLA -B*07:02,HLA-B*51:01
GPIIGQII

SEQ ID NO: 1136 - protein, 10 aa, Homo sapiens
  Table 1.2; BPIFA2; ENSG00000131050; HLA -B*07:02,HLA-B*35:03,HLA-B*56:01,HLA-C*07:02
GPIIGQIINL

SEQ ID NO: 1137 - protein, 8 aa, Homo sapiens
  Table 1.2; BPIFA2; ENSG00000131050; HLA -B*13:02
GQIINLKA

SEQ ID NO: 1138 - protein, 10 aa, Homo sapiens
  Table 1.2; BPIFA2; ENSG00000131050; HLA -B*15:01
GQIINLKASL

SEQ ID NO: 1139 - protein, 10 aa, Homo sapiens
  Table 1.2; BPIFA2; ENSG00000131050; HLA -B*27:05
GTSESLLDNL

SEQ ID NO: 1140 - protein, 9 aa, Homo sapiens
  Table 1.2; BPIFA2; ENSG00000131050; HLA -A*25:01,HLA-A*26:01,HLA-A*32:01,HLA-B*15:01,HLA-B*44:02, HLA-B*44:03,HLA-B*57:01,HLA-B*58:01
GVLQKSSAW

SEQ ID NO: 1141 - protein, 11 aa, Homo sapiens
  Table 1.2; BPIFA2; ENSG00000131050; HLA -A*02:04,HLA-A*31:01
GVLQKSSAWQL

SEQ ID NO: 1142 - protein, 10 aa, Homo sapiens
  Table 1.2; BPIFA2; ENSG00000131050; HLA -A*30:01,HLA-B*15:01,HLA-B*40:01
GVLTGTSESL

SEQ ID NO: 1143 - protein, 11 aa, Homo sapiens
  Table 1.2; BPIFA2; ENSG00000131050; HLA -A*02:01,HLA-A*23:01,HLA-B*27:05
GVLTGTSESLL

SEQ ID NO: 1144 - protein, 11 aa, Homo sapiens
  Table 1.2; BPIFA2; ENSG00000131050; HLA -A*30:01,HLA-B*35:03,HLA-B*38:01,HLA-B*39:01,HLA-B*40:01, HLA-B*40:02
HEGLETVDNTL

SEQ ID NO: 1145 - protein, 9 aa, Homo sapiens
  Table 1.2; BPIFA2; ENSG00000131050; HLA -B*13:02
HKTQLQTLI

SEQ ID NO: 1146 - protein, 8 aa, Homo sapiens
  Table 1.2; BPIFA2; ENSG00000131050; HLA -B*51:01
HSLDVNVI

SEQ ID NO: 1147 - protein, 10 aa, Homo sapiens
  Table 1.2; BPIFA2; ENSG00000131050; HLA -A*68:01
HSLDVNVIQQ

SEQ ID NO: 1148 - protein, 11 aa, Homo sapiens
  Table 1.2; BPIFA2; ENSG00000131050; HLA -A*68:02,HLA-B*13:02
HSLDVNVIQQV

SEQ ID NO: 1149 - protein, 8 aa, Homo sapiens
  Table 1.2; BPIFA2; ENSG00000131050; HLA -B*08:01,HLA-B*18:01,HLA-B*58:01
HSQIINKF

SEQ ID NO: 1150 - protein, 9 aa, Homo sapiens
  Table 1.2; BPIFA2; ENSG00000131050; HLA -A*68:02
HSQIINKFV

SEQ ID NO: 1151 - protein, 9 aa, Homo sapiens
  Table 1.2; BPIFA2; ENSG00000131050; HLA -A*02:07,HLA-B*37:01,HLA-B*38:01
IDDGKGLNL

SEQ ID NO: 1152 - protein, 8 aa, Homo sapiens
  Table 1.2; BPIFA2; ENSG00000131050; HLA -B*18:01
IETDPQTH

SEQ ID NO: 1153 - protein, 9 aa, Homo sapiens
  Table 1.2; BPIFA2; ENSG00000131050; HLA -B*49:01
IETDPQTHQ

SEQ ID NO: 1154 - protein, 10 aa, Homo sapiens
  Table 1.2; BPIFA2; ENSG00000131050; HLA -B*49:01
IETDPQTHQP

SEQ ID NO: 1155 - protein, 11 aa, Homo sapiens
  Table 1.2; BPIFA2; ENSG00000131050; HLA -A*30:01,HLA-B*27:05,HLA-B*39:01,HLA-B*40:01,HLA-B*49:01, HLA-C*06:02
IETDPQTHQPV

SEQ ID NO: 1156 - protein, 11 aa, Homo sapiens
  Table 1.2; BPIFA2; ENSG00000131050; HLA -A*24:02
IFIHSLDVNVI

SEQ ID NO: 1157 - protein, 9 aa, Homo sapiens
  Table 1.2; BPIFA2; ENSG00000131050; HLA -C*06:02
IGQIINLKA

SEQ ID NO: 1158 - protein, 9 aa, Homo sapiens
  Table 1.2; BPIFA2; ENSG00000131050; HLA -B*27:05,HLA-B*38:01,HLA-B*39:01
IHSLDVNVI

SEQ ID NO: 1159 - protein, 8 aa, Homo sapiens
  Table 1.2; BPIFA2; ENSG00000131050; HLA -A*02:04
IIGQIINL

SEQ ID NO: 1160 - protein, 9 aa, Homo sapiens
  Table 1.2; BPIFA2; ENSG00000131050; HLA -A*03:01,HLA-A*03:02,HLA-A*11:01,HLA-A*68:01,HLA-B*27:02
IIGQIINLK

SEQ ID NO: 1161 - protein, 9 aa, Homo sapiens
  Table 1.2; BPIFA2; ENSG00000131050; HLA -A*02:01,HLA-A*02:03,HLA-A*02:04,HLA-A*02:07,HLA-A*32:01, HLA-A*68:02,HLA-B*08:01,HLA-B*13:02,HLA-B*46:01,HLA-B*51:01, HLA-B*54:01,HLA-B*55:01,HLA-C*16:02
IINKFVNSV

SEQ ID NO: 1162 - protein, 8 aa, Homo sapiens
  Table 1.2; BPIFA2; ENSG00000131050; HLA -B*07:02,HLA-B*08:01
IINLKASL

SEQ ID NO: 1163 - protein, 9 aa, Homo sapiens
  Table 1.2; BPIFA2; ENSG00000131050; HLA -A*02:01,HLA-A*02:07,HLA-B*08:01,HLA-B*38:01,HLA-B*55:01, HLA-C*04:01,HLA-C*05:01
ILDVKAEPI

SEQ ID NO: 1164 - protein, 8 aa, Homo sapiens
  Table 1.2; BPIFA2; ENSG00000131050; HLA -B*08:01
INTLKSTV

SEQ ID NO: 1165 - protein, 11 aa, Homo sapiens
  Table 1.2; BPIFA2; ENSG00000131050; HLA -A*03:02,HLA-A*11:01
IQQVVDNPQHK

SEQ ID NO: 1166 - protein, 9 aa, Homo sapiens
  Table 1.2; BPIFA2; ENSG00000131050; HLA -A*01:01,HLA-A*02:01,HLA-A*02:03,HLA-A*02:07,HLA-A*68:02, HLA-B*13:02,HLA-B*27:02,HLA-B*54:01,HLA-C*02:02,HLA-C*06:02, HLA-C*12:03,HLA-C*16:02
ISNSLILDV

SEQ ID NO: 1167 - protein, 10 aa, Homo sapiens
  Table 1.2; BPIFA2; ENSG00000131050; HLA -A*03:01,HLA-A*03:02,HLA-A*11:01,HLA-B*27:02
ISNSLILDVK

SEQ ID NO: 1168 - protein, 8 aa, Homo sapiens
  Table 1.2; BPIFA2; ENSG00000131050; HLA -B*58:01,HLA-C*16:02
KAQEAEKL

SEQ ID NO: 1169 - protein, 9 aa, Homo sapiens
  Table 1.2; BPIFA2; ENSG00000131050; HLA -A*32:01,HLA-B*58:01,HLA-C*01:02,HLA-C*03:04,HLA-C*16:01, HLA-C*16:02
KAQEAEKLL

SEQ ID NO: 1170 - protein, 9 aa, Homo sapiens
  Table 1.2; BPIFA2; ENSG00000131050; HLA -B*54:01,HLA-B*56:01
KASLDLLTA

SEQ ID NO: 1171 - protein, 10 aa, Homo sapiens
  Table 1.2; BPIFA2; ENSG00000131050; HLA -B*56:01
KASLDLLTAV

SEQ ID NO: 1172 - protein, 10 aa, Homo sapiens
  Table 1.2; BPIFA2; ENSG00000131050; HLA -A*23:01,HLA-A*24:02,HLA-B*40:01,HLA-B*58:01,HLA-C*14:02
KFVNSVINTL

SEQ ID NO: 1173 - protein, 9 aa, Homo sapiens
  Table 1.2; BPIFA2; ENSG00000131050; HLA -A*24:02,HLA-A*32:01,HLA-B*15:03,HLA-B*38:01,HLA-B*44:02, HLA-B*57:01,HLA-B*58:01,HLA-C*12:03
KHSQIINKF

SEQ ID NO: 1174 - protein, 10 aa, Homo sapiens
  Table 1.2; BPIFA2; ENSG00000131050; HLA -A*02:03
KISNSLILDV

SEQ ID NO: 1175 - protein, 11 aa, Homo sapiens
  Table 1.2; BPIFA2; ENSG00000131050; HLA -A*03:01,HLA-A*03:02
KISNSLILDVK

SEQ ID NO: 1176 - protein, 10 aa, Homo sapiens
  Table 1.2; BPIFA2; ENSG00000131050; HLA -A*02:07
KLEPVLHEGL

SEQ ID NO: 1177 - protein, 9 aa, Homo sapiens
  Table 1.2; BPIFA2; ENSG00000131050; HLA -A*02:03
KLKVDLGVL

SEQ ID NO: 1178 - protein, 11 aa, Homo sapiens
  Table 1.2; BPIFA2; ENSG00000131050; HLA -A*03:01,HLA-A*03:02
KLKVDLGVLQK

SEQ ID NO: 1179 - protein, 9 aa, Homo sapiens
  Table 1.2; BPIFA2; ENSG00000131050; HLA -A*02:01,HLA-A*02:04,HLA-A*03:01,HLA-A*03:02,HLA-A*11:01, HLA-A*31:01,HLA-A*32:01
KLLNNVISK

SEQ ID NO: 1180 - protein, 10 aa, Homo sapiens
  Table 1.2; BPIFA2; ENSG00000131050; HLA -A*02:01,HLA-A*02:03,HLA-A*02:04,HLA-A*02:07,HLA-A*03:01
KLLNNVISKL

SEQ ID NO: 1181 - protein, 9 aa, Homo sapiens
  Table 1.2; BPIFA2; ENSG00000131050; HLA -A*02:01,HLA-A*02:03,HLA-A*02:04,HLA-A*32:01,HLA-B*13:02, HLA-B*58:01
KLLPTNTDI

SEQ ID NO: 1182 - protein, 10 aa, Homo sapiens
  Table 1.2; BPIFA2; ENSG00000131050; HLA -A*23:01,HLA-A*24:02,HLA-B*57:01
KLLPTNTDIF

SEQ ID NO: 1183 - protein, 11 aa, Homo sapiens
  Table 1.2; BPIFA2; ENSG00000131050; HLA -C*04:01
KLLPTNTDIFG

SEQ ID NO: 1184 - protein, 10 aa, Homo sapiens
  Table 1.2; BPIFA2; ENSG00000131050; HLA -B*40:02
KQKAQEAEKL

SEQ ID NO: 1185 - protein, 9 aa, Homo sapiens
  Table 1.2; BPIFA2; ENSG00000131050; HLA -A*03:01,HLA-A*03:02,HLA-A*11:01,HLA-A*31:01
KSSAWQLAK

SEQ ID NO: 1186 - protein, 8 aa, Homo sapiens
  Table 1.2; BPIFA2; ENSG00000131050; HLA -A*32:01,HLA-B*58:01
KSTVSSLL

SEQ ID NO: 1187 - protein, 10 aa, Homo sapiens
  Table 1.2; BPIFA2; ENSG00000131050; HLA -A*03:01,HLA-A*03:02,HLA-A*11:01
KSTVSSLLQK

SEQ ID NO: 1188 - protein, 9 aa, Homo sapiens
  Table 1.2; BPIFA2; ENSG00000131050; HLA -A*01:01,HLA-A*02:07,HLA-A*03:01,HLA-A*03:02,HLA-A*11:01, HLA-A*31:01,HLA-A*33:03,HLA-A*68:01,HLA-B*27:02,HLA-B*27:05, HLA-B*57:01,HLA-C*06:02
KVDLGVLQK

SEQ ID NO: 1189 - protein, 9 aa, Homo sapiens
  Table 1.2; BPIFA2; ENSG00000131050; HLA -B*08:01
LAKQKAQEA

SEQ ID NO: 1190 - protein, 9 aa, Homo sapiens
  Table 1.2; BPIFA2; ENSG00000131050; HLA -A*23:01,HLA-A*30:01,HLA-B*40:02,HLA-B*49:01,HLA-B*51:01
LDLLTAVTI

SEQ ID NO: 1191 - protein, 8 aa, Homo sapiens
  Table 1.2; BPIFA2; ENSG00000131050; HLA -B*37:01,HLA-B*40:02
LDNLGNDL

SEQ ID NO: 1192 - protein, 8 aa, Homo sapiens
  Table 1.2; BPIFA2; ENSG00000131050; HLA -B*37:01,HLA-B*40:02
LDVKAEPI

SEQ ID NO: 1193 - protein, 8 aa, Homo sapiens
  Table 1.2; BPIFA2; ENSG00000131050; HLA -C*07:01
LDVNVIQQ

SEQ ID NO: 1194 - protein, 9 aa, Homo sapiens
  Table 1.2; BPIFA2; ENSG00000131050; HLA -A*02:03,HLA-A*02:04,HLA-A*02:07,HLA-A*30:01,HLA-A*68:02, HLA-B*13:02,HLA-B*37:01,HLA-B*40:02,HLA-B*44:02,HLA-B*49:01, HLA-C*06:02,HLA-C*12:03
LDVNVIQQV

SEQ ID NO: 1195 - protein, 10 aa, Homo sapiens
  Table 1.2; BPIFA2; ENSG00000131050; HLA -A*68:02
LDVNVIQQVV

SEQ ID NO: 1196 - protein, 8 aa, Homo sapiens
  Table 1.2; BPIFA2; ENSG00000131050; HLA -B*08:01
LEKLKVDL

SEQ ID NO: 1197 - protein, 9 aa, Homo sapiens
  Table 1.2; BPIFA2; ENSG00000131050; HLA -A*30:01,HLA-B*37:01,HLA-B*40:01,HLA-B*40:02
LEPVLHEGL

SEQ ID NO: 1198 - protein, 8 aa, Homo sapiens
  Table 1.2; BPIFA2; ENSG00000131050; HLA -A*30:01,HLA-B*18:01,HLA-B*40:01,HLA-B*40:02,HLA-B*49:01
LETVDNTL

SEQ ID NO: 1199 - protein, 9 aa, Homo sapiens
  Table 1.2; BPIFA2; ENSG00000131050; HLA -B*49:01
LETVDNTLK

SEQ ID NO: 1200 - protein, 9 aa, Homo sapiens
  Table 1.2; BPIFA2; ENSG00000131050; HLA -B*27:05,HLA-B*39:01
LGNDLSNVV

SEQ ID NO: 1201 - protein, 11 aa, Homo sapiens
  Table 1.2; BPIFA2; ENSG00000131050; HLA -A*03:02,HLA-A*11:01,HLA-B*27:02
LGNDLSNVVDK

SEQ ID NO: 1202 - protein, 9 aa, Homo sapiens
  Table 1.2; BPIFA2; ENSG00000131050; HLA -B*54:01
LGVLQKSSA

SEQ ID NO: 1203 - protein, 10 aa, Homo sapiens
  Table 1.2; BPIFA2; ENSG00000131050; HLA -A*02:01,HLA-A*02:03,HLA-A*02:04,HLA-A*02:07,HLA-A*68:02, HLA-B*40:02,HLA-C*06:02,HLA-C*07:01
LILDVKAEPI

SEQ ID NO: 1204 - protein, 9 aa, Homo sapiens
  Table 1.2; BPIFA2; ENSG00000131050; HLA -A*02:03,HLA-A*02:04
LIRIFIHSL

SEQ ID NO: 1205 - protein, 10 aa, Homo sapiens
  Table 1.2; BPIFA2; ENSG00000131050; HLA -B*27:02
LKVDLGVLQK

SEQ ID NO: 1206 - protein, 9 aa, Homo sapiens
  Table 1.2; BPIFA2; ENSG00000131050; HLA -A*01:01,HLA-A*02:01,HLA-A*02:07
LLDKHSQII

SEQ ID NO: 1207 - protein, 11 aa, Homo sapiens
  Table 1.2; BPIFA2; ENSG00000131050; HLA -A*03:01,HLA-A*03:02
LLDKHSQIINK

SEQ ID NO: 1208 - protein, 9 aa, Homo sapiens
  Table 1.2; BPIFA2; ENSG00000131050; HLA -A*01:01,HLA-A*02:07,HLA-B*38:01,HLA-B*39:01,HLA-C*05:01
LLDNLGNDL

SEQ ID NO: 1209 - protein, 8 aa, Homo sapiens
  Table 1.2; BPIFA2; ENSG00000131050; HLA -A*03:01,HLA-A*03:02,HLA-B*27:02,HLA-B*27:05
LLNNVISK

SEQ ID NO: 1210 - protein, 9 aa, Homo sapiens
  Table 1.2; BPIFA2; ENSG00000131050; HLA -A*02:01,HLA-A*02:03,HLA-A*02:04,HLA-A*02:07,HLA-A*03:01, HLA-A*03:02,HLA-A*23:01,HLA-A*24:02,HLA-A*31:01,HLA-A*32:01, HLA-A*68:02,HLA-B*13:02,HLA-B*55:01,HLA-C*02:02
LLNNVISKL

SEQ ID NO: 1211 - protein, 9 aa, Homo sapiens
  Table 1.2; BPIFA2; ENSG00000131050; HLA -A*02:07,HLA-A*24:02,HLA-A*29:02,HLA-B*46:01
LLPTNTDIF

SEQ ID NO: 1212 - protein, 11 aa, Homo sapiens
  Table 1.2; BPIFA2; ENSG00000131050; HLA -A*02:01,HLA-A*02:04,HLA-A*02:07
LLPTNTDIFGL

SEQ ID NO: 1213 - protein, 9 aa, Homo sapiens
  Table 1.2; BPIFA2; ENSG00000131050; HLA -A*02:01,HLA-A*02:03,HLA-A*02:04
LLQKEICPL

SEQ ID NO: 1214 - protein, 9 aa, Homo sapiens
  Table 1.2; BPIFA2; ENSG00000131050; HLA -A*02:01,HLA-A*02:03
LLTAVTIET

SEQ ID NO: 1215 - protein, 9 aa, Homo sapiens
  Table 1.2; BPIFA2; ENSG00000131050; HLA -B*54:01
LNLSFPVTA

SEQ ID NO: 1216 - protein, 8 aa, Homo sapiens
  Table 1.2; BPIFA2; ENSG00000131050; HLA -B*35:01,HLA-B*35:03,HLA-B*51:01,HLA-B*55:01
LPTNTDIF

SEQ ID NO: 1217 - protein, 10 aa, Homo sapiens
  Table 1.2; BPIFA2; ENSG00000131050; HLA -A*68:01,HLA-B*27:02,HLA-B*35:01,HLA-B*35:03
LPTNTDIFGL

SEQ ID NO: 1218 - protein, 9 aa, Homo sapiens
  Table 1.2; BPIFA2; ENSG00000131050; HLA -A*24:02,HLA-B*13:02
LQKEICPLI

SEQ ID NO: 1219 - protein, 9 aa, Homo sapiens
  Table 1.2; BPIFA2; ENSG00000131050; HLA -A*02:04
LQKSSAWQL

SEQ ID NO: 1220 - protein, 9 aa, Homo sapiens
  Table 1.2; BPIFA2; ENSG00000131050; HLA -A*02:01,HLA-A*02:04
LQLWKLVLL

SEQ ID NO: 1221 - protein, 9 aa, Homo sapiens
  Table 1.2; BPIFA2; ENSG00000131050; HLA -A*02:01,HLA-A*02:03,HLA-A*02:04,HLA-A*02:07,HLA-A*32:01, HLA-A*68:02,HLA-B*13:02,HLA-B*27:05,HLA-B*40:02,HLA-B*46:01, HLA-B*51:01,HLA-B*54:01,HLA-B*56:01,HLA-B*57:01,HLA-B*58:01,
  HLA-C*02:02,HLA-C*06:02,HLA-C*12:03
LSFPVTANV

SEQ ID NO: 1222 - protein, 10 aa, Homo sapiens
  Table 1.2; BPIFA2; ENSG00000131050; HLA -C*06:02
LSFPVTANVT

SEQ ID NO: 1223 - protein, 11 aa, Homo sapiens
  Table 1.2; BPIFA2; ENSG00000131050; HLA -A*02:07,HLA-A*68:02,HLA-B*54:01,HLA-B*57:01,HLA-B*58:01, HLA-C*02:02
LSFPVTANVTV

SEQ ID NO: 1224 - protein, 9 aa, Homo sapiens
  Table 1.2; BPIFA2; ENSG00000131050; HLA -A*02:04
MLQLWKLVL

SEQ ID NO: 1225 - protein, 10 aa, Homo sapiens
  Table 1.2; BPIFA2; ENSG00000131050; HLA -A*02:04
MLQLWKLVLL

SEQ ID NO: 1226 - protein, 9 aa, Homo sapiens
  Table 1.2; BPIFA2; ENSG00000131050; HLA -A*03:02,HLA-A*11:01,HLA-B*27:02
NDLSNVVDK

SEQ ID NO: 1227 - protein, 9 aa, Homo sapiens
  Table 1.2; BPIFA2; ENSG00000131050; HLA -A*02:01,HLA-A*02:03,HLA-B*55:01
NLGNDLSNV

SEQ ID NO: 1228 - protein, 9 aa, Homo sapiens
  Table 1.2; BPIFA2; ENSG00000131050; HLA -A*02:03,HLA-A*02:04
NLKASLDLL

SEQ ID NO: 1229 - protein, 10 aa, Homo sapiens
  Table 1.2; BPIFA2; ENSG00000131050; HLA -A*68:02
NLSFPVTANV

SEQ ID NO: 1230 - protein, 8 aa, Homo sapiens
  Table 1.2; BPIFA2; ENSG00000131050; HLA -B*07:02,HLA-B*08:01,HLA-C*07:02
NPQHKTQL

SEQ ID NO: 1231 - protein, 11 aa, Homo sapiens
  Table 1.2; BPIFA2; ENSG00000131050; HLA -B*07:02
NPQHKTQLQTL

SEQ ID NO: 1232 - protein, 8 aa, Homo sapiens
  Table 1.2; BPIFA2; ENSG00000131050; HLA -A*01:01
NTDIFGLK

SEQ ID NO: 1233 - protein, 9 aa, Homo sapiens
  Table 1.2; BPIFA2; ENSG00000131050; HLA -A*01:01,HLA-A*02:07,HLA-A*68:02,HLA-B*38:01
NTDIFGLKI

SEQ ID NO: 1234 - protein, 9 aa, Homo sapiens
  Table 1.2; BPIFA2; ENSG00000131050; HLA -A*03:01,HLA-A*03:02,HLA-A*11:01,HLA-A*33:01,HLA-A*33:03, HLA-A*68:01,HLA-C*07:06
NTLKGILEK

SEQ ID NO: 1235 - protein, 10 aa, Homo sapiens
  Table 1.2; BPIFA2; ENSG00000131050; HLA -A*02:04,HLA-A*68:02
NTLKGILEKL

SEQ ID NO: 1236 - protein, 9 aa, Homo sapiens
  Table 1.2; BPIFA2; ENSG00000131050; HLA -A*25:01,HLA-B*13:02,HLA-B*35:03,HLA-B*38:01,HLA-B*39:01, HLA-B*51:01,HLA-C*03:03
NVTVAGPII

SEQ ID NO: 1237 - protein, 9 aa, Homo sapiens
  Table 1.2; BPIFA2; ENSG00000131050; HLA -A*02:01,HLA-A*02:03,HLA-A*02:04,HLA-A*02:07,HLA-A*25:01, HLA-A*26:01,HLA-A*68:02,HLA-B*46:01
NVVDKLEPV

SEQ ID NO: 1238 - protein, 10 aa, Homo sapiens
  Table 1.2; BPIFA2; ENSG00000131050; HLA -A*02:04,HLA-A*25:01,HLA-A*26:01,HLA-A*68:02,HLA-B*35:01, HLA-B*35:03
NVVDKLEPVL

SEQ ID NO: 1239 - protein, 8 aa, Homo sapiens
  Table 1.2; BPIFA2; ENSG00000131050; HLA -C*05:01
PIDDGKGL

SEQ ID NO: 1240 - protein, 10 aa, Homo sapiens
  Table 1.2; BPIFA2; ENSG00000131050; HLA -A*01:01,HLA-A*02:07
PIDDGKGLNL

SEQ ID NO: 1241 - protein, 9 aa, Homo sapiens
  Table 1.2; BPIFA2; ENSG00000131050; HLA -A*02:04,HLA-A*68:02
PIIGQIINL

SEQ ID NO: 1242 - protein, 9 aa, Homo sapiens
  Table 1.2; BPIFA2; ENSG00000131050; HLA -B*13:02
PQTHQPVAV

SEQ ID NO: 1243 - protein, 9 aa, Homo sapiens
  Table 1.2; BPIFA2; ENSG00000131050; HLA -C*07:02
PTSISLSLL

SEQ ID NO: 1244 - protein, 10 aa, Homo sapiens
  Table 1.2; BPIFA2; ENSG00000131050; HLA -C*07:02
PVTANVTVAG

SEQ ID NO: 1245 - protein, 10 aa, Homo sapiens
  Table 1.2; BPIFA2; ENSG00000131050; HLA -A*30:01,HLA-B*49:01
QEAEKLLNNV

SEQ ID NO: 1246 - protein, 11 aa, Homo sapiens
  Table 1.2; BPIFA2; ENSG00000131050; HLA -A*30:01,HLA-B*38:01,HLA-B*40:02,HLA-B*44:02,HLA-B*44:03, HLA-B*49:01
QEAEKLLNNVI

SEQ ID NO: 1247 - protein, 9 aa, Homo sapiens
  Table 1.2; BPIFA2; ENSG00000131050; HLA -B*38:01,HLA-B*39:01
QHKTQLQTL

SEQ ID NO: 1248 - protein, 10 aa, Homo sapiens
  Table 1.2; BPIFA2; ENSG00000131050; HLA -A*02:03,HLA-A*68:02
QIINKFVNSV

SEQ ID NO: 1249 - protein, 9 aa, Homo sapiens
  Table 1.2; BPIFA2; ENSG00000131050; HLA -A*25:01,HLA-A*32:01,HLA-B*07:02,HLA-B*08:01,HLA-C*01:02
QIINLKASL

SEQ ID NO: 1250 - protein, 9 aa, Homo sapiens
  Table 1.2; BPIFA2; ENSG00000131050; HLA -B*38:01
QKAQEAEKL

SEQ ID NO: 1251 - protein, 8 aa, Homo sapiens
  Table 1.2; BPIFA2; ENSG00000131050; HLA -A*02:01,HLA-A*02:04
QLWKLVLL

SEQ ID NO: 1252 - protein, 9 aa, Homo sapiens
  Table 1.2; BPIFA2; ENSG00000131050; HLA -B*35:03,HLA-B*54:01,HLA-B*55:01,HLA-B*56:01
QPVAVLGEC

SEQ ID NO: 1253 - protein, 10 aa, Homo sapiens
  Table 1.2; BPIFA2; ENSG00000131050; HLA -B*35:03,HLA-B*54:01,HLA-B*55:01,HLA-B*56:01
QPVAVLGECA

SEQ ID NO: 1254 - protein, 9 aa, Homo sapiens
  Table 1.2; BPIFA2; ENSG00000131050; HLA -B*15:01,HLA-B*27:05
QQVVDNPQH

SEQ ID NO: 1255 - protein, 9 aa, Homo sapiens
  Table 1.2; BPIFA2; ENSG00000131050; HLA -A*25:01,HLA-A*68:01,HLA-A*68:02,HLA-B*39:01
QTHQPVAVL

SEQ ID NO: 1256 - protein, 9 aa, Homo sapiens
  Table 1.2; BPIFA2; ENSG00000131050; HLA -A*03:01,HLA-A*03:02,HLA-A*11:01,HLA-A*33:03,HLA-A*68:01, HLA-C*07:06
QVVDNPQHK

SEQ ID NO: 1257 - protein, 10 aa, Homo sapiens
  Table 1.2; BPIFA2; ENSG00000131050; HLA -C*06:02
QVVDNPQHKT

SEQ ID NO: 1258 - protein, 9 aa, Homo sapiens
  Table 1.2; BPIFA2; ENSG00000131050; HLA -A*03:02,HLA-A*11:01,HLA-A*31:01,HLA-C*07:06
SAWQLAKQK

SEQ ID NO: 1259 - protein, 10 aa, Homo sapiens
  Table 1.2; BPIFA2; ENSG00000131050; HLA -B*54:01
SAWQLAKQKA

SEQ ID NO: 1260 - protein, 8 aa, Homo sapiens
  Table 1.2; BPIFA2; ENSG00000131050; HLA -A*30:01,HLA-B*07:02,HLA-B*37:01,HLA-B*40:02,HLA-C*01:02
SDPTSISL

SEQ ID NO: 1261 - protein, 8 aa, Homo sapiens
  Table 1.2; BPIFA2; ENSG00000131050; HLA -B*37:01,HLA-B*40:01
SESLLDNL

SEQ ID NO: 1262 - protein, 9 aa, Homo sapiens
  Table 1.2; BPIFA2; ENSG00000131050; HLA -C*14:02
SFPVTANVT

SEQ ID NO: 1263 - protein, 10 aa, Homo sapiens
  Table 1.2; BPIFA2; ENSG00000131050; HLA -C*01:02,HLA-C*04:01
SFPVTANVTV

SEQ ID NO: 1264 - protein, 9 aa, Homo sapiens
  Table 1.2; BPIFA2; ENSG00000131050; HLA -A*03:01,HLA-A*03:02,HLA-A*11:01
SISLSLLDK

SEQ ID NO: 1265 - protein, 8 aa, Homo sapiens
  Table 1.2; BPIFA2; ENSG00000131050; HLA -A*02:01,HLA-A*02:07,HLA-B*55:01,HLA-C*05:01
SLDLLTAV

SEQ ID NO: 1266 - protein, 10 aa, Homo sapiens
  Table 1.2; BPIFA2; ENSG00000131050; HLA -A*02:01,HLA-A*02:07,HLA-B*13:02,HLA-B*38:01,HLA-C*04:01
SLDLLTAVTI

SEQ ID NO: 1267 - protein, 10 aa, Homo sapiens
  Table 1.2; BPIFA2; ENSG00000131050; HLA -A*02:01,HLA-A*02:03,HLA-A*02:07,HLA-B*13:02,HLA-B*55:01
SLDVNVIQQV

SEQ ID NO: 1268 - protein, 11 aa, Homo sapiens
  Table 1.2; BPIFA2; ENSG00000131050; HLA -A*02:07
SLDVNVIQQVV

SEQ ID NO: 1269 - protein, 9 aa, Homo sapiens
  Table 1.2; BPIFA2; ENSG00000131050; HLA -A*02:01,HLA-A*02:03,HLA-A*02:04,HLA-A*02:07,HLA-B*08:01, HLA-B*13:02,HLA-B*55:01
SLLDKHSQI

SEQ ID NO: 1270 - protein, 10 aa, Homo sapiens
  Table 1.2; BPIFA2; ENSG00000131050; HLA -A*02:01,HLA-A*02:04
SLLDNLGNDL

SEQ ID NO: 1271 - protein, 9 aa, Homo sapiens
  Table 1.2; BPIFA2; ENSG00000131050; HLA -B*27:02
SNSLILDVK

SEQ ID NO: 1272 - protein, 8 aa, Homo sapiens
  Table 1.2; BPIFA2; ENSG00000131050; HLA -B*13:02
SQIINKFV

SEQ ID NO: 1273 - protein, 10 aa, Homo sapiens
  Table 1.2; BPIFA2; ENSG00000131050; HLA -A*03:02,HLA-A*11:01
SSAWQLAKQK

SEQ ID NO: 1274 - protein, 9 aa, Homo sapiens
  Table 1.2; BPIFA2; ENSG00000131050; HLA -A*03:01,HLA-A*03:02,HLA-A*11:01,HLA-A*31:01,HLA-A*33:01, HLA-A*33:03,HLA-A*68:01,HLA-C*07:06
STVSSLLQK

SEQ ID NO: 1275 - protein, 10 aa, Homo sapiens
  Table 1.2; BPIFA2; ENSG00000131050; HLA -A*02:03,HLA-A*25:01,HLA-A*26:01,HLA-A*32:01,HLA-A*68:02, HLA-B*13:02
SVINTLKSTV

SEQ ID NO: 1276 - protein, 10 aa, Homo sapiens
  Table 1.2; BPIFA2; ENSG00000131050; HLA -B*27:02
TAVTIETDPQ

SEQ ID NO: 1277 - protein, 8 aa, Homo sapiens
  Table 1.2; BPIFA2; ENSG00000131050; HLA -B*44:02,HLA-B*44:03,HLA-B*49:01
TDIFGLKI

SEQ ID NO: 1278 - protein, 9 aa, Homo sapiens
  Table 1.2; BPIFA2; ENSG00000131050; HLA -B*37:01
TDPQTHQPV

SEQ ID NO: 1279 - protein, 11 aa, Homo sapiens
  Table 1.2; BPIFA2; ENSG00000131050; HLA -B*27:05,HLA-B*39:01
TGTSESLLDNL

SEQ ID NO: 1280 - protein, 8 aa, Homo sapiens
  Table 1.2; BPIFA2; ENSG00000131050; HLA -B*27:05,HLA-B*38:01,HLA-B*39:01
THQPVAVL

SEQ ID NO: 1281 - protein, 8 aa, Homo sapiens
  Table 1.2; BPIFA2; ENSG00000131050; HLA -A*03:01
TLKGILEK

SEQ ID NO: 1282 - protein, 9 aa, Homo sapiens
  Table 1.2; BPIFA2; ENSG00000131050; HLA -A*02:01,HLA-A*02:03,HLA-A*02:04,HLA-A*02:07,HLA-A*03:01, HLA-A*31:01,HLA-A*68:02,HLA-B*08:01,HLA-B*40:02,HLA-C*06:02
TLKGILEKL

SEQ ID NO: 1283 - protein, 9 aa, Homo sapiens
  Table 1.2; BPIFA2; ENSG00000131050; HLA -A*02:03,HLA-A*02:04,HLA-A*25:01,HLA-A*32:01,HLA-B*07:02, HLA-B*08:01,HLA-B*15:01,HLA-B*15:03,HLA-B*46:01,HLA-C*01:02, HLA-C*07:02,HLA-C*14:02
TLKSTVSSL

SEQ ID NO: 1284 - protein, 10 aa, Homo sapiens
  Table 1.2; BPIFA2; ENSG00000131050; HLA -A*02:03,HLA-A*03:01,HLA-A*31:01
TLKSTVSSLL

SEQ ID NO: 1285 - protein, 9 aa, Homo sapiens
  Table 1.2; BPIFA2; ENSG00000131050; HLA -A*33:01,HLA-A*33:03,HLA-B*27:02
TNTDIFGLK

SEQ ID NO: 1286 - protein, 9 aa, Homo sapiens
  Table 1.2; BPIFA2; ENSG00000131050; HLA -B*39:01
TSESLLDNL

SEQ ID NO: 1287 - protein, 10 aa, Homo sapiens
  Table 1.2; BPIFA2; ENSG00000131050; HLA -A*11:01,HLA-B*27:02
TSISLSLLDK

SEQ ID NO: 1288 - protein, 9 aa, Homo sapiens
  Table 1.2; BPIFA2; ENSG00000131050; HLA -A*03:01,HLA-A*03:02,HLA-A*11:01,HLA-A*26:01,HLA-A*31:01, HLA-A*68:01,HLA-A*68:02,HLA-B*27:05
TVAGPIIGQ

SEQ ID NO: 1289 - protein, 10 aa, Homo sapiens
  Table 1.2; BPIFA2; ENSG00000131050; HLA -A*02:03,HLA-A*25:01,HLA-A*26:01,HLA-A*68:01,HLA-A*68:02, HLA-B*13:02
TVAGPIIGQI

SEQ ID NO: 1290 - protein, 11 aa, Homo sapiens
  Table 1.2; BPIFA2; ENSG00000131050; HLA -A*68:01,HLA-A*68:02,HLA-B*13:02,HLA-B*38:01
TVAGPIIGQII

SEQ ID NO: 1291 - protein, 9 aa, Homo sapiens
  Table 1.2; BPIFA2; ENSG00000131050; HLA -A*02:07
TVDNTLKGI

SEQ ID NO: 1292 - protein, 8 aa, Homo sapiens
  Table 1.2; BPIFA2; ENSG00000131050; HLA -A*03:01,HLA-A*03:02,HLA-A*11:01,HLA-B*27:02
TVSSLLQK

SEQ ID NO: 1293 - protein, 10 aa, Homo sapiens
  Table 1.2; BPIFA2; ENSG00000131050; HLA -A*68:02
TVSSLLQKEI

SEQ ID NO: 1294 - protein, 9 aa, Homo sapiens
  Table 1.2; BPIFA2; ENSG00000131050; HLA -A*02:03,HLA-A*23:01,HLA-A*24:02,HLA-A*25:01,HLA-A*30:01, HLA-A*68:02,HLA-B*13:02,HLA-B*38:01,HLA-B*46:01,HLA-B*49:01, HLA-B*51:01,HLA-B*58:01,HLA-C*02:02,HLA-C*05:01,HLA-C*06:02,
  HLA-C*12:03,HLA-C*16:02
VAGPIIGQI

SEQ ID NO: 1295 - protein, 10 aa, Homo sapiens
  Table 1.2; BPIFA2; ENSG00000131050; HLA -A*23:01,HLA-A*24:02,HLA-B*38:01,HLA-B*51:01,HLA-C*12:03
VAGPIIGQII

SEQ ID NO: 1296 - protein, 8 aa, Homo sapiens
  Table 1.2; BPIFA2; ENSG00000131050; HLA -A*30:01,HLA-B*07:02,HLA-B*08:01,HLA-B*15:03,HLA-B*18:01, HLA-B*37:01,HLA-B*40:02,HLA-C*06:02,HLA-C*07:01,HLA-C*07:04, HLA-C*12:03
VDKLEPVL

SEQ ID NO: 1297 - protein, 8 aa, Homo sapiens
  Table 1.2; BPIFA2; ENSG00000131050; HLA -A*03:01,HLA-A*03:02,HLA-A*11:01,HLA-B*27:02,HLA-C*04:01, HLA-C*07:01
VDLGVLQK

SEQ ID NO: 1298 - protein, 9 aa, Homo sapiens
  Table 1.2; BPIFA2; ENSG00000131050; HLA -B*40:02
VDLGVLQKS

SEQ ID NO: 1299 - protein, 8 aa, Homo sapiens
  Table 1.2; BPIFA2; ENSG00000131050; HLA -A*32:01,HLA-C*06:02,HLA-C*16:02
VDNPQHKT

SEQ ID NO: 1300 - protein, 10 aa, Homo sapiens
  Table 1.2; BPIFA2; ENSG00000131050; HLA -A*30:01,HLA-B*07:02,HLA-B*37:01,HLA-B*40:02
VDNPQHKTQL

SEQ ID NO: 1301 - protein, 9 aa, Homo sapiens
  Table 1.2; BPIFA2; ENSG00000131050; HLA -A*02:01,HLA-A*02:03,HLA-A*02:07,HLA-A*31:01,HLA-A*32:01, HLA-B*08:01,HLA-B*13:02,HLA-B*46:01,HLA-B*51:01,HLA-B*55:01, HLA-B*58:01,HLA-C*01:02,HLA-C*06:02,HLA-C*07:04,HLA-C*12:03,
  HLA-C*16:02
VINTLKSTV

SEQ ID NO: 1302 - protein, 9 aa, Homo sapiens
  Table 1.2; BPIFA2; ENSG00000131050; HLA -A*02:01,HLA-A*02:03,HLA-A*02:04,HLA-A*02:07,HLA-B*13:02, HLA-B*15:01,HLA-B*46:01,HLA-B*49:01,HLA-B*51:01,HLA-B*55:01
VLHEGLETV

SEQ ID NO: 1303 - protein, 8 aa, Homo sapiens
  Table 1.2; BPIFA2; ENSG00000131050; HLA -A*32:01,HLA-B*58:01
VLQKSSAW

SEQ ID NO: 1304 - protein, 10 aa, Homo sapiens
  Table 1.2; BPIFA2; ENSG00000131050; HLA -A*02:04
VLQKSSAWQL

SEQ ID NO: 1305 - protein, 9 aa, Homo sapiens
  Table 1.2; BPIFA2; ENSG00000131050; HLA -A*02:01,HLA-A*02:03,HLA-A*02:07,HLA-A*23:01,HLA-A*24:02, HLA-A*30:01,HLA-A*32:01,HLA-B*13:02,HLA-B*15:01,HLA-B*15:03, HLA-B*35:03,HLA-B*39:01,HLA-B*40:01,HLA-B*46:01,HLA-B*55:01,
  HLA-C*01:02,HLA-C*07:02,HLA-C*14:02,HLA-C*16:01
VLTGTSESL

SEQ ID NO: 1306 - protein, 8 aa, Homo sapiens
  Table 1.2; BPIFA2; ENSG00000131050; HLA -A*23:01,HLA-B*08:01,HLA-B*27:05,HLA-B*37:01,HLA-B*39:01, HLA-C*04:01,HLA-C*06:02,HLA-C*12:03,HLA-C*14:02,HLA-C*16:01, HLA-C*16:02
VNSVINTL

SEQ ID NO: 1307 - protein, 9 aa, Homo sapiens
  Table 1.2; BPIFA2; ENSG00000131050; HLA -A*03:01,HLA-A*03:02,HLA-A*11:01,HLA-A*33:01,HLA-A*33:03, HLA-A*68:01,HLA-B*27:02,HLA-B*27:05,HLA-C*04:01,HLA-C*07:06
VNSVINTLK

SEQ ID NO: 1308 - protein, 10 aa, Homo sapiens
  Table 1.2; BPIFA2; ENSG00000131050; HLA -C*07:01
VNVIQQVVDN

SEQ ID NO: 1309 - protein, 9 aa, Homo sapiens
  Table 1.2; BPIFA2; ENSG00000131050; HLA -B*13:02,HLA-B*58:01,HLA-C*06:02,HLA-C*16:02
VSSLLQKEI

SEQ ID NO: 1310 - protein, 9 aa, Homo sapiens
  Table 1.2; BPIFA2; ENSG00000131050; HLA -A*02:01,HLA-B*58:01,HLA-C*04:01,HLA-C*06:02
VTIETDPQT

SEQ ID NO: 1311 - protein, 10 aa, Homo sapiens
  Table 1.2; BPIFA2; ENSG00000131050; HLA -A*11:01,HLA-B*27:05,HLA-B*57:01,HLA-B*58:01,HLA-C*12:03
VTIETDPQTH

SEQ ID NO: 1312 - protein, 8 aa, Homo sapiens
  Table 1.2; BPIFA2; ENSG00000131050; HLA -A*23:01,HLA-B*40:02,HLA-B*51:01,HLA-B*58:01,HLA-C*03:03, HLA-C*03:04
VTVAGPII

SEQ ID NO: 1313 - protein, 10 aa, Homo sapiens
  Table 1.2; BPIFA2; ENSG00000131050; HLA -A*11:01,HLA-A*26:01,HLA-C*06:02
VTVAGPIIGQ

SEQ ID NO: 1314 - protein, 11 aa, Homo sapiens
  Table 1.2; BPIFA2; ENSG00000131050; HLA -A*68:02
VTVAGPIIGQI

SEQ ID NO: 1315 - protein, 9 aa, Homo sapiens
  Table 1.2; BPIFA2; ENSG00000131050; HLA -A*01:01,HLA-A*02:01,HLA-A*02:04,HLA-A*02:07,HLA-A*03:02, HLA-A*23:01,HLA-A*24:02,HLA-A*30:01,HLA-B*27:05,HLA-B*35:01, HLA-B*35:03,HLA-B*38:01,HLA-B*39:01,HLA-B*40:01,HLA-B*55:01,
  HLA-B*58:01,HLA-C*03:03,HLA-C*05:01,HLA-C*07:04
VVDKLEPVL

SEQ ID NO: 1316 - protein, 10 aa, Homo sapiens
  Table 1.2; BPIFA2; ENSG00000131050; HLA -A*01:01
VVDKLEPVLH

SEQ ID NO: 1317 - protein, 8 aa, Homo sapiens
  Table 1.2; BPIFA2; ENSG00000131050; HLA -A*01:01,HLA-A*03:02,HLA-A*11:01,HLA-C*05:01
VVDNPQHK

SEQ ID NO: 1318 - protein, 9 aa, Homo sapiens
  Table 1.2; BPIFA2; ENSG00000131050; HLA -A*01:01,HLA-A*02:07,HLA-B*58:01,HLA-C*05:01
VVDNPQHKT

SEQ ID NO: 1319 - protein, 11 aa, Homo sapiens
  Table 1.2; BPIFA2; ENSG00000131050; HLA -A*01:01,HLA-A*02:07,HLA-A*32:01,HLA-A*68:02,HLA-B*27:05, HLA-B*38:01,HLA-B*55:01,HLA-C*05:01,HLA-C*07:04,HLA-C*12:03, HLA-C*16:02
VVDNPQHKTQL

SEQ ID NO: 1320 - protein, 8 aa, Homo sapiens
  Table 1.2; CRYGC; ENSG00000163254; HLA -B*08:01,HLA-C*16:01
AGSLRRVV

SEQ ID NO: 1321 - protein, 11 aa, Homo sapiens
  Table 1.2; CRYGC; ENSG00000163254; HLA -A*30:02
AGSLRRVVDLY

SEQ ID NO: 1322 - protein, 9 aa, Homo sapiens
  Table 1.2; CRYGC; ENSG00000163254; HLA -A*02:01,HLA-A*02:07,HLA-B*07:02,HLA-B*08:01,HLA-B*55:01, HLA-C*05:01,HLA-C*07:02
AMDAKAGSL

SEQ ID NO: 1323 - protein, 10 aa, Homo sapiens
  Table 1.2; CRYGC; ENSG00000163254; HLA -A*31:01
AMDAKAGSLR

SEQ ID NO: 1324 - protein, 9 aa, Homo sapiens
  Table 1.2; CRYGC; ENSG00000163254; HLA -A*03:02,HLA-A*32:01,HLA-B*15:01,HLA-B*15:03,HLA-B*46:01
CLIPQTVSH

SEQ ID NO: 1325 - protein, 10 aa, Homo sapiens
  Table 1.2; CRYGC; ENSG00000163254; HLA -A*31:01
CLIPQTVSHR

SEQ ID NO: 1326 - protein, 11 aa, Homo sapiens
  Table 1.2; CRYGC; ENSG00000163254; HLA -A*02:04
CLIPQTVSHRL

SEQ ID NO: 1327 - protein, 8 aa, Homo sapiens
  Table 1.2; CRYGC; ENSG00000163254; HLA -A*33:01,HLA-A*33:03,HLA-A*68:01
DAKAGSLR

SEQ ID NO: 1328 - protein, 9 aa, Homo sapiens
  Table 1.2; CRYGC; ENSG00000163254; HLA -A*33:01,HLA-A*33:03,HLA-A*68:01
DAKAGSLRR

SEQ ID NO: 1329 - protein, 9 aa, Homo sapiens
  Table 1.2; CRYGC; ENSG00000163254; HLA -A*26:01
DCPNLQPYF

SEQ ID NO: 1330 - protein, 11 aa, Homo sapiens
  Table 1.2; CRYGC; ENSG00000163254; HLA -A*33:01
DCPNLQPYFSR

SEQ ID NO: 1331 - protein, 8 aa, Homo sapiens
  Table 1.2; CRYGC; ENSG00000163254; HLA -A*33:01,HLA-A*33:03
EDRAFQGR

SEQ ID NO: 1332 - protein, 8 aa, Homo sapiens
  Table 1.2; CRYGC; ENSG00000163254; HLA -B*08:01
EIRSLHVL

SEQ ID NO: 1333 - protein, 10 aa, Homo sapiens
  Table 1.2; CRYGC; ENSG00000163254; HLA -A*26:01
ELPNYRGRQY

SEQ ID NO: 1334 - protein, 10 aa, Homo sapiens
  Table 1.2; CRYGC; ENSG00000163254; HLA -B*27:02,HLA-B*27:05,HLA-C*07:01
ERPNYQGQQY

SEQ ID NO: 1335 - protein, 9 aa, Homo sapiens
  Table 1.2; CRYGC; ENSG00000163254; HLA -A*26:01
ETTTDCPNL

SEQ ID NO: 1336 - protein, 11 aa, Homo sapiens
  Table 1.2; CRYGC; ENSG00000163254; HLA -A*24:02
EYPDYQQWMGL

SEQ ID NO: 1337 - protein, 9 aa, Homo sapiens
  Table 1.2; CRYGC; ENSG00000163254; HLA -A*02:04,HLA-B*38:01
FHLSEIRSL

SEQ ID NO: 1338 - protein, 10 aa, Homo sapiens
  Table 1.2; CRYGC; ENSG00000163254; HLA -A*31:01,HLA-A*33:01,HLA-A*33:03
FYEDRAFQGR

SEQ ID NO: 1339 - protein, 10 aa, Homo sapiens
  Table 1.2; CRYGC; ENSG00000163254; HLA -A*25:01,HLA-A*26:01,HLA-A*30:01,HLA-B*07:02,HLA-B*15:01, HLA-B*15:03,HLA-B*39:01,HLA-B*40:01,HLA-B*40:02,HLA-B*46:01, HLA-B*58:01,HLA-C*01:02,HLA-C*03:03,HLA-C*03:04,HLA-C*05:01,
  HLA-C*07:02,HLA-C*16:02,HLA-C*16:04
GAMDAKAGSL

SEQ ID NO: 1340 - protein, 11 aa, Homo sapiens
  Table 1.2; CRYGC; ENSG00000163254; HLA -A*03:01,HLA-A*03:02,HLA-A*11:01,HLA-A*31:01,HLA-A*33:01, HLA-A*33:03,HLA-A*68:01,HLA-C*07:06
GAMDAKAGSLR

SEQ ID NO: 1341 - protein, 8 aa, Homo sapiens
  Table 1.2; CRYGC; ENSG00000163254; HLA -B*27:05
GEYPDYQQ

SEQ ID NO: 1342 - protein, 9 aa, Homo sapiens
  Table 1.2; CRYGC; ENSG00000163254; HLA -A*23:01,HLA-A*25:01,HLA-A*30:01,HLA-B*15:03,HLA-B*18:01, HLA-B*27:02,HLA-B*27:05,HLA-B*37:01,HLA-B*38:01,HLA-B*40:01, HLA-B*40:02,HLA-B*44:02,HLA-B*44:03,HLA-B*49:01,HLA-B*57:01,
  HLA-B*58:01,HLA-C*16:04
GEYPDYQQW

SEQ ID NO: 1343 - protein, 10 aa, Homo sapiens
  Table 1.2; CRYGC; ENSG00000163254; HLA -A*30:01,HLA-B*40:01,HLA-B*44:02,HLA-B*44:03,HLA-B*49:01
GEYPDYQQWM

SEQ ID NO: 1344 - protein, 9 aa, Homo sapiens
  Table 1.2; CRYGC; ENSG00000163254; HLA -A*02:01,HLA-A*02:03,HLA-A*02:04,HLA-B*55:01
GLSDSIRSC

SEQ ID NO: 1345 - protein, 10 aa, Homo sapiens
  Table 1.2; CRYGC; ENSG00000163254; HLA -A*01:01,HLA-A*29:02,HLA-A*30:02,HLA-B*57:01
GSLRRVVDLY

SEQ ID NO: 1346 - protein, 8 aa, Homo sapiens
  Table 1.2; CRYGC; ENSG00000163254; HLA -A*02:03,HLA-A*02:04,HLA-B*08:01,HLA-B*37:01
HLSEIRSL

SEQ ID NO: 1347 - protein, 10 aa, Homo sapiens
  Table 1.2; CRYGC; ENSG00000163254; HLA -A*02:03
HLSEIRSLHV

SEQ ID NO: 1348 - protein, 11 aa, Homo sapiens
  Table 1.2; CRYGC; ENSG00000163254; HLA -A*02:04
HLSEIRSLHVL

SEQ ID NO: 1349 - protein, 9 aa, Homo sapiens
  Table 1.2; CRYGC; ENSG00000163254; HLA -A*02:04
HVLEGCWVL

SEQ ID NO: 1350 - protein, 10 aa, Homo sapiens
  Table 1.2; CRYGC; ENSG00000163254; HLA -A*29:02
HVLEGCWVLY

SEQ ID NO: 1351 - protein, 8 aa, Homo sapiens
  Table 1.2; CRYGC; ENSG00000163254; HLA -A*33:01,HLA-A*33:03
IPQTVSHR

SEQ ID NO: 1352 - protein, 9 aa, Homo sapiens
  Table 1.2; CRYGC; ENSG00000163254; HLA -A*23:01,HLA-A*24:02,HLA-A*33:03,HLA-B*07:02,HLA-B*08:01, HLA-B*35:01,HLA-B*35:03,HLA-B*51:01,HLA-B*55:01,HLA-C*07:02
IPQTVSHRL

SEQ ID NO: 1353 - protein, 9 aa, Homo sapiens
  Table 1.2; CRYGC; ENSG00000163254; HLA -B*57:01
ITFYEDRAF

SEQ ID NO: 1354 - protein, 10 aa, Homo sapiens
  Table 1.2; CRYGC; ENSG00000163254; HLA -A*02:07
LIPQTVSHRL

SEQ ID NO: 1355 - protein, 9 aa, Homo sapiens
  Table 1.2; CRYGC; ENSG00000163254; HLA -A*01:01
LSEIRSLHV

SEQ ID NO: 1356 - protein, 8 aa, Homo sapiens
  Table 1.2; CRYGC; ENSG00000163254; HLA -A*30:01,HLA-B*07:02,HLA-B*37:01,HLA-B*40:01,HLA-B*40:02, HLA-C*06:02,HLA-C*07:04
MDAKAGSL

SEQ ID NO: 1357 - protein, 9 aa, Homo sapiens
  Table 1.2; CRYGC; ENSG00000163254; HLA -A*33:01,HLA-A*33:03,HLA-A*68:01
MDAKAGSLR

SEQ ID NO: 1358 - protein, 10 aa, Homo sapiens
  Table 1.2; CRYGC; ENSG00000163254; HLA -B*49:01
MELSEDCPSI

SEQ ID NO: 1359 - protein, 10 aa, Homo sapiens
  Table 1.2; CRYGC; ENSG00000163254; HLA -A*25:01,HLA-B*57:01
NSIRVESGCW

SEQ ID NO: 1360 - protein, 9 aa, Homo sapiens
  Table 1.2; CRYGC; ENSG00000163254; HLA -A*23:01,HLA-A*24:02,HLA-A*29:02,HLA-A*33:03,HLA-C*14:02
NYQGQQYLL

SEQ ID NO: 1361 - protein, 10 aa, Homo sapiens
  Table 1.2; CRYGC; ENSG00000163254; HLA -A*31:01,HLA-A*33:01,HLA-A*33:03
NYQGQQYLLR

SEQ ID NO: 1362 - protein, 11 aa, Homo sapiens
  Table 1.2; CRYGC; ENSG00000163254; HLA -A*31:01,HLA-A*33:01
NYQGQQYLLRR

SEQ ID NO: 1363 - protein, 9 aa, Homo sapiens
  Table 1.2; CRYGC; ENSG00000163254; HLA -A*33:01
PNLQPYFSR

SEQ ID NO: 1364 - protein, 8 aa, Homo sapiens
  Table 1.2; CRYGC; ENSG00000163254; HLA -B*15:03,HLA-B*39:01,HLA-C*04:01,HLA-C*07:01
PNYQGQQY

SEQ ID NO: 1365 - protein, 10 aa, Homo sapiens
  Table 1.2; CRYGC; ENSG00000163254; HLA -C*07:02
PNYQGQQYLL

SEQ ID NO: 1366 - protein, 11 aa, Homo sapiens
  Table 1.2; CRYGC; ENSG00000163254; HLA -A*33:01
PNYQGQQYLLR

SEQ ID NO: 1367 - protein, 9 aa, Homo sapiens
  Table 1.2; CRYGC; ENSG00000163254; HLA -A*24:02
PYFSRCNSI

SEQ ID NO: 1368 - protein, 9 aa, Homo sapiens
  Table 1.2; CRYGC; ENSG00000163254; HLA -B*27:02
QDWGAMDAK

SEQ ID NO: 1369 - protein, 9 aa, Homo sapiens
  Table 1.2; CRYGC; ENSG00000163254; HLA -A*31:01
QGQQYLLRR

SEQ ID NO: 1370 - protein, 10 aa, Homo sapiens
  Table 1.2; CRYGC; ENSG00000163254; HLA -B*51:01
QPYFSRCNSI

SEQ ID NO: 1371 - protein, 10 aa, Homo sapiens
  Table 1.2; CRYGC; ENSG00000163254; HLA -B*38:01
QQWMGLSDSI

SEQ ID NO: 1372 - protein, 9 aa, Homo sapiens
  Table 1.2; CRYGC; ENSG00000163254; HLA -A*23:01,HLA-A*24:02,HLA-A*29:02,HLA-A*30:02,HLA-B*15:03, HLA-C*04:01,HLA-C*14:02
QYLLRPQEY

SEQ ID NO: 1373 - protein, 8 aa, Homo sapiens
  Table 1.2; CRYGC; ENSG00000163254; HLA -A*30:02,HLA-A*32:01,HLA-B*15:01,HLA-B*15:03,HLA-B*46:01, HLA-B*57:01,HLA-B*58:01,HLA-C*16:01,HLA-C*16:02
RAFQGRSY

SEQ ID NO: 1374 - protein, 11 aa, Homo sapiens
  Table 1.2; CRYGC; ENSG00000163254; HLA -A*03:02
RCQDWGAMDAK

SEQ ID NO: 1375 - protein, 9 aa, Homo sapiens
  Table 1.2; CRYGC; ENSG00000163254; HLA -A*03:01
RLYEREDHK

SEQ ID NO: 1376 - protein, 9 aa, Homo sapiens
  Table 1.2; CRYGC; ENSG00000163254; HLA -A*30:02,HLA-A*32:01,HLA-B*07:02,HLA-B*15:01,HLA-B*35:01, HLA-B*55:01,HLA-C*07:02,HLA-C*16:02
RPNYQGQQY

SEQ ID NO: 1377 - protein, 10 aa, Homo sapiens
  Table 1.2; CRYGC; ENSG00000163254; HLA -B*07:02,HLA-C*07:02
RPNYQGQQYL

SEQ ID NO: 1378 - protein, 10 aa, Homo sapiens
  Table 1.2; CRYGC; ENSG00000163254; HLA -A*30:02,HLA-B*15:01,HLA-B*15:03,HLA-B*44:02
RQYLLRPQEY

SEQ ID NO: 1379 - protein, 10 aa, Homo sapiens
  Table 1.2; CRYGC; ENSG00000163254; HLA -B*57:01
RSLHVLEGCW

SEQ ID NO: 1380 - protein, 10 aa, Homo sapiens
  Table 1.2; CRYGC; ENSG00000163254; HLA -A*01:01
RVESGCWMLY

SEQ ID NO: 1381 - protein, 9 aa, Homo sapiens
  Table 1.2; CRYGC; ENSG00000163254; HLA -B*37:01
SDSIRSCCL

SEQ ID NO: 1382 - protein, 11 aa, Homo sapiens
  Table 1.2; CRYGC; ENSG00000163254; HLA -B*38:01,HLA-B*44:02,HLA-B*44:03
SEDCPSIQDRF

SEQ ID NO: 1383 - protein, 8 aa, Homo sapiens
  Table 1.2; CRYGC; ENSG00000163254; HLA -B*49:01
SEIRSLHV

SEQ ID NO: 1384 - protein, 9 aa, Homo sapiens
  Table 1.2; CRYGC; ENSG00000163254; HLA -A*30:01,HLA-B*18:01,HLA-B*37:01,HLA-B*40:01,HLA-B*40:02, HLA-B*44:02,HLA-B*44:03,HLA-B*49:01
SEIRSLHVL

SEQ ID NO: 1385 - protein, 9 aa, Homo sapiens
  Table 1.2; CRYGC; ENSG00000163254; HLA -A*01:01,HLA-A*29:02,HLA-A*30:02,HLA-B*15:03,HLA-B*46:01, HLA-B*57:01
SLRRVVDLY

SEQ ID NO: 1386 - protein, 9 aa, Homo sapiens
  Table 1.2; CRYGC; ENSG00000163254; HLA -C*04:01,HLA-C*07:01
TDCPNLQPY

SEQ ID NO: 1387 - protein, 11 aa, Homo sapiens
  Table 1.2; CRYGC; ENSG00000163254; HLA -A*31:01
TFYEDRAFQGR

SEQ ID NO: 1388 - protein, 10 aa, Homo sapiens
  Table 1.2; CRYGC; ENSG00000163254; HLA -A*01:01
TTDCPNLQPY

SEQ ID NO: 1389 - protein, 9 aa, Homo sapiens
  Table 1.2; CRYGC; ENSG00000163254; HLA -A*01:01,HLA-A*29:02
VLEGCWVLY

SEQ ID NO: 1390 - protein, 8 aa, Homo sapiens
  Table 1.2; CRYGC; ENSG00000163254; HLA -A*03:01,HLA-A*30:02,HLA-B*15:01,HLA-B*15:03,HLA-B*46:01
VLYELPNY

SEQ ID NO: 1391 - protein, 9 aa, Homo sapiens
  Table 1.2; CRYGC; ENSG00000163254; HLA -A*02:03,HLA-A*02:04,HLA-A*02:07,HLA-A*03:01,HLA-A*03:02, HLA-A*11:01,HLA-A*31:01,HLA-A*33:01,HLA-A*33:03,HLA-A*68:01
VLYELPNYR

SEQ ID NO: 1392 - protein, 11 aa, Homo sapiens
  Table 1.2; CRYGC; ENSG00000163254; HLA -A*31:01
VLYELPNYRGR

SEQ ID NO: 1393 - protein, 9 aa, Homo sapiens
  Table 1.2; CRYGC; ENSG00000163254; HLA -A*29:02
WMLYERPNY

SEQ ID NO: 1394 - protein, 9 aa, Homo sapiens
  Table 1.2; CRYGC; ENSG00000163254; HLA -A*29:02
WVLYELPNY

SEQ ID NO: 1395 - protein, 9 aa, Homo sapiens
  Table 1.2; CRYGC; ENSG00000163254; HLA -A*31:01,HLA-B*44:02,HLA-B*49:01
YEDRAFQGR

SEQ ID NO: 1396 - protein, 11 aa, Homo sapiens
  Table 1.2; CRYGC; ENSG00000163254; HLA -B*44:02,HLA-B*44:03
YEDRAFQGRSY

SEQ ID NO: 1397 - protein, 11 aa, Homo sapiens
  Table 1.2; CRYGC; ENSG00000163254; HLA -B*44:02
YELPNYRGRQY

SEQ ID NO: 1398 - protein, 9 aa, Homo sapiens
  Table 1.2; CRYGC; ENSG00000163254; HLA -B*37:01,HLA-B*40:02
YEREDHKGL

SEQ ID NO: 1399 - protein, 11 aa, Homo sapiens
  Table 1.2; CRYGC; ENSG00000163254; HLA -A*29:02,HLA-A*32:01,HLA-B*18:01,HLA-B*44:02,HLA-B*44:03, HLA-C*16:04
YERPNYQGQQY

SEQ ID NO: 1400 - protein, 8 aa, Homo sapiens
  Table 1.2; CRYGC; ENSG00000163254; HLA -B*49:01
YETTTDCP

SEQ ID NO: 1401 - protein, 10 aa, Homo sapiens
  Table 1.2; CRYGC; ENSG00000163254; HLA -A*30:01,HLA-B*40:01,HLA-B*40:02
YETTTDCPNL

SEQ ID NO: 1402 - protein, 8 aa, Homo sapiens
  Table 1.2; CRYGC; ENSG00000163254; HLA -A*01:01,HLA-A*29:02,HLA-B*15:03,HLA-B*46:01,HLA-C*07:01
YLLRPQEY

SEQ ID NO: 1403 - protein, 9 aa, Homo sapiens
  Table 1.2; CRYGC; ENSG00000163254; HLA -A*33:01
YLLRPQEYR

SEQ ID NO: 1404 - protein, 8 aa, Homo sapiens
  Table 1.2; CRYGC; ENSG00000163254; HLA -A*02:01,HLA-A*30:01,HLA-B*13:02,HLA-B*27:05,HLA-B*38:01, HLA-B*39:01,HLA-C*07:04
YQGQQYLL

SEQ ID NO: 1405 - protein, 9 aa, Homo sapiens
  Table 1.2; CRYGC; ENSG00000163254; HLA -A*29:02,HLA-A*31:01
YQGQQYLLR

SEQ ID NO: 1406 - protein, 9 aa, Homo sapiens
  Table 1.2; CT83; ENSG00000204019; HLA -A*32:01
ALALVRPSS

SEQ ID NO: 1407 - protein, 10 aa, Homo sapiens
  Table 1.2; CT83; ENSG00000204019; HLA -A*02:03
ALALVRPSSS

SEQ ID NO: 1408 - protein, 8 aa, Homo sapiens
  Table 1.2; CT83; ENSG00000204019; HLA -A*29:02
ALIVFWKY

SEQ ID NO: 1409 - protein, 10 aa, Homo sapiens
  Table 1.2; CT83; ENSG00000204019; HLA -A*02:03
ALVRPSSSGL

SEQ ID NO: 1410 - protein, 9 aa, Homo sapiens
  Table 1.2; CT83; ENSG00000204019; HLA -B*13:02
AVYDLSRDI

SEQ ID NO: 1411 - protein, 10 aa, Homo sapiens
  Table 1.2; CT83; ENSG00000204019; HLA -A*25:01,HLA-B*07:02
AVYDLSRDIL

SEQ ID NO: 1412 - protein, 9 aa, Homo sapiens
  Table 1.2; CT83; ENSG00000204019; HLA -A*29:02,HLA-B*57:01
CALIVFWKY

SEQ ID NO: 1413 - protein, 10 aa, Homo sapiens
  Table 1.2; CT83; ENSG00000204019; HLA -A*25:01
DLSRDILNNF

SEQ ID NO: 1414 - protein, 11 aa, Homo sapiens
  Table 1.2; CT83; ENSG00000204019; HLA -A*33:01,HLA-B*27:02
DNNLAVYDLSR

SEQ ID NO: 1415 - protein, 9 aa, Homo sapiens
  Table 1.2; CT83; ENSG00000204019; HLA -B*38:01,HLA-B*44:02,HLA-C*07:01
EHTLLSKGF

SEQ ID NO: 1416 - protein, 9 aa, Homo sapiens
  Table 1.2; CT83; ENSG00000204019; HLA -A*01:01,HLA-A*33:01,HLA-A*68:01
ELEHTLLSK

SEQ ID NO: 1417 - protein, 9 aa, Homo sapiens
  Table 1.2; CT83; ENSG00000204019; HLA -A*02:03,HLA-A*25:01,HLA-A*26:01,HLA-A*32:01,HLA-A*33:03, HLA-B*07:02,HLA-B*08:01,HLA-B*27:05,HLA-B*35:03,HLA-B*38:01, HLA-B*39:01,HLA-B*55:01,HLA-C*01:02,HLA-C*07:02,HLA-C*07:04,
  HLA-C*14:02
EMSSNSTAL

SEQ ID NO: 1418 - protein, 9 aa, Homo sapiens
  Table 1.2; CT83; ENSG00000204019; HLA -B*54:01
FPHSIARQK

SEQ ID NO: 1419 - protein, 8 aa, Homo sapiens
  Table 1.2; CT83; ENSG00000204019; HLA -B*07:02,HLA-B*15:01,HLA-B*15:03,HLA-B*40:02,HLA-B*46:01, HLA-C*03:03,HLA-C*07:04,HLA-C*12:03,HLA-C*14:02
FQRNTGEM

SEQ ID NO: 1420 - protein, 9 aa, Homo sapiens
  Table 1.2; CT83; ENSG00000204019; HLA -A*23:01,HLA-A*24:02,HLA-C*14:02
FYLLLASSI

SEQ ID NO: 1421 - protein, 10 aa, Homo sapiens
  Table 1.2; CT83; ENSG00000204019; HLA -A*24:02
FYLLLASSIL

SEQ ID NO: 1422 - protein, 9 aa, Homo sapiens
  Table 1.2; CT83; ENSG00000204019; HLA -A*30:01,HLA-B*40:01,HLA-B*40:02,HLA-B*49:01
GEMSSNSTA

SEQ ID NO: 1423 - protein, 10 aa, Homo sapiens
  Table 1.2; CT83; ENSG00000204019; HLA -A*30:01,HLA-B*15:01,HLA-B*15:03,HLA-B*27:02,HLA-B*27:05, HLA-B*38:01,HLA-B*39:01,HLA-B*40:01,HLA-B*40:02,HLA-B*44:02, HLA-B*44:03,HLA-B*49:01,HLA-C*16:04
GEMSSNSTAL

SEQ ID NO: 1424 - protein, 11 aa, Homo sapiens
  Table 1.2; CT83; ENSG00000204019; HLA -A*30:01,HLA-B*49:01
GEMSSNSTALA

SEQ ID NO: 1425 - protein, 11 aa, Homo sapiens
  Table 1.2; CT83; ENSG00000204019; HLA -A*02:01,HLA-A*02:03,HLA-A*02:04,HLA-B*27:05
GLINSNTDNNL

SEQ ID NO: 1426 - protein, 8 aa, Homo sapiens
  Table 1.2; CT83; ENSG00000204019; HLA -B*57:01
HTLLSKGF

SEQ ID NO: 1427 - protein, 9 aa, Homo sapiens
  Table 1.2; CT83; ENSG00000204019; HLA -A*31:01,HLA-A*33:01,HLA-A*33:03
HTLLSKGFR

SEQ ID NO: 1428 - protein, 9 aa, Homo sapiens
  Table 1.2; CT83; ENSG00000204019; HLA -A*02:01,HLA-A*02:03,HLA-A*02:04,HLA-A*02:07,HLA-A*23:01, HLA-A*24:02,HLA-A*30:01,HLA-A*31:01,HLA-A*32:01,HLA-A*68:02, HLA-B*13:02,HLA-B*38:01,HLA-B*51:01,HLA-B*55:01,HLA-C*06:02,
  HLA-C*16:02
ILNNFPHSI

SEQ ID NO: 1429 - protein, 10 aa, Homo sapiens
  Table 1.2; CT83; ENSG00000204019; HLA -A*02:03
ILNNFPHSIA

SEQ ID NO: 1430 - protein, 11 aa, Homo sapiens
  Table 1.2; CT83; ENSG00000204019; HLA -A*03:01,HLA-A*31:01,HLA-A*33:01,HLA-A*33:03
ILNNFPHSIAR

SEQ ID NO: 1431 - protein, 9 aa, Homo sapiens
  Table 1.2; CT83; ENSG00000204019; HLA -B*35:03,HLA-B*39:01
INSNTDNNL

SEQ ID NO: 1432 - protein, 10 aa, Homo sapiens
  Table 1.2; CT83; ENSG00000204019; HLA -A*31:01
KGFRGASPHR

SEQ ID NO: 1433 - protein, 9 aa, Homo sapiens
  Table 1.2; CT83; ENSG00000204019; HLA -A*02:01,HLA-A*02:03,HLA-A*02:04,HLA-A*02:07,HLA-A*23:01, HLA-A*24:02,HLA-A*30:01,HLA-A*32:01,HLA-B*13:02,HLA-B*15:01, HLA-B*15:03,HLA-B*38:01,HLA-B*40:01,HLA-B*40:02,HLA-B*55:01,
  HLA-B*58:01,HLA-C*16:02
KLVELEHTL

SEQ ID NO: 1434 - protein, 10 aa, Homo sapiens
  Table 1.2; CT83; ENSG00000204019; HLA -A*02:01,HLA-A*02:03,HLA-A*02:04,HLA-A*02:07,HLA-A*24:02
KLVELEHTLL

SEQ ID NO: 1435 - protein, 8 aa, Homo sapiens
  Table 1.2; CT83; ENSG00000204019; HLA -B*54:01
LASSILCA

SEQ ID NO: 1436 - protein, 9 aa, Homo sapiens
  Table 1.2; CT83; ENSG00000204019; HLA -A*68:02,HLA-B*27:05,HLA-B*35:03,HLA-B*46:01,HLA-C*02:02, HLA-C*03:03,HLA-C*03:04,HLA-C*12:03
LASSILCAL

SEQ ID NO: 1437 - protein, 10 aa, Homo sapiens
  Table 1.2; CT83; ENSG00000204019; HLA -B*44:02,HLA-B*44:03
LEHTLLSKGF

SEQ ID NO: 1438 - protein, 10 aa, Homo sapiens
  Table 1.2; CT83; ENSG00000204019; HLA -B*27:05
LINSNTDNNL

SEQ ID NO: 1439 - protein, 9 aa, Homo sapiens
  Table 1.2; CT83; ENSG00000204019; HLA -A*02:01,HLA-A*02:03
LLASSILCA

SEQ ID NO: 1440 - protein, 10 aa, Homo sapiens
  Table 1.2; CT83; ENSG00000204019; HLA -A*02:01,HLA-A*02:03,HLA-A*02:04
LLASSILCAL

SEQ ID NO: 1441 - protein, 9 aa, Homo sapiens
  Table 1.2; CT83; ENSG00000204019; HLA -A*02:01
LLLASSILC

SEQ ID NO: 1442 - protein, 11 aa, Homo sapiens
  Table 1.2; CT83; ENSG00000204019; HLA -A*02:01,HLA-A*02:04
LLLASSILCAL

SEQ ID NO: 1443 - protein, 9 aa, Homo sapiens
  Table 1.2; CT83; ENSG00000204019; HLA -A*23:01,HLA-A*24:02,HLA-A*32:01,HLA-A*33:01,HLA-A*33:03, HLA-B*46:01,HLA-B*57:01,HLA-B*58:01,HLA-C*02:02
LSRDILNNF

SEQ ID NO: 1444 - protein, 9 aa, Homo sapiens
  Table 1.2; CT83; ENSG00000204019; HLA -A*01:01,HLA-A*02:07,HLA-B*38:01,HLA-C*05:01
LVELEHTLL

SEQ ID NO: 1445 - protein, 10 aa, Homo sapiens
  Table 1.2; CT83; ENSG00000204019; HLA -A*03:01,HLA-A*03:02,HLA-B*27:02
LVNLSMVENK

SEQ ID NO: 1446 - protein, 9 aa, Homo sapiens
  Table 1.2; CT83; ENSG00000204019; HLA -A*02:03,HLA-A*25:01,HLA-A*32:01,HLA-B*07:02,HLA-B*08:01, HLA-B*15:01,HLA-B*40:02,HLA-B*46:01,HLA-C*01:02,HLA-C*03:04, HLA-C*07:02,HLA-C*07:04
LVRPSSSGL

SEQ ID NO: 1447 - protein, 8 aa, Homo sapiens
  Table 1.2; CT83; ENSG00000204019; HLA -C*03:03,HLA-C*03:04,HLA-C*16:01
MSSNSTAL

SEQ ID NO: 1448 - protein, 9 aa, Homo sapiens
  Table 1.2; CT83; ENSG00000204019; HLA -A*02:07,HLA-A*68:02,HLA-B*08:01,HLA-B*35:03,HLA-B*38:01, HLA-B*55:01,HLA-C*05:01,HLA-C*07:04
MVENKLVEL

SEQ ID NO: 1449 - protein, 9 aa, Homo sapiens
  Table 1.2; CT83; ENSG00000204019; HLA -A*02:04
NLSMVENKL

SEQ ID NO: 1450 - protein, 9 aa, Homo sapiens
  Table 1.2; CT83; ENSG00000204019; HLA -A*29:02,HLA-A*31:01,HLA-A*33:01,HLA-A*33:03,HLA-A*68:01, HLA-A*68:02,HLA-C*07:06
NNFPHSIAR

SEQ ID NO: 1451 - protein, 11 aa, Homo sapiens
  Table 1.2; CT83; ENSG00000204019; HLA -A*01:01,HLA-A*30:02
NSNTDNNLAVY

SEQ ID NO: 1452 - protein, 9 aa, Homo sapiens
  Table 1.2; CT83; ENSG00000204019; HLA -A*29:02,HLA-A*33:01,HLA-A*33:03,HLA-A*68:01,HLA-B*27:02, HLA-C*07:06
NSTALALVR

SEQ ID NO: 1453 - protein, 8 aa, Homo sapiens
  Table 1.2; CT83; ENSG00000204019; HLA -A*01:01,HLA-C*05:01
NTDNNLAV

SEQ ID NO: 1454 - protein, 9 aa, Homo sapiens
  Table 1.2; CT83; ENSG00000204019; HLA -A*01:01,HLA-A*11:01,HLA-A*25:01,HLA-A*26:01,HLA-A*29:02, HLA-A*30:02,HLA-A*32:01,HLA-B*27:05,HLA-B*35:01,HLA-B*39:01, HLA-B*55:01,HLA-C*04:01,HLA-C*05:01,HLA-C*07:04,HLA-C*16:02
NTDNNLAVY

SEQ ID NO: 1455 - protein, 11 aa, Homo sapiens
  Table 1.2; CT83; ENSG00000204019; HLA -B*27:05,HLA-B*39:01
NTDNNLAVYDL

SEQ ID NO: 1456 - protein, 9 aa, Homo sapiens
  Table 1.2; CT83; ENSG00000204019; HLA -A*02:01,HLA-A*02:03,HLA-A*02:04,HLA-A*02:07
RILVNLSMV

SEQ ID NO: 1457 - protein, 11 aa, Homo sapiens
  Table 1.2; CT83; ENSG00000204019; HLA -B*07:02
RPSSSGLINSN

SEQ ID NO: 1458 - protein, 9 aa, Homo sapiens
  Table 1.2; CT83; ENSG00000204019; HLA -A*31:01
RQKRILVNL

SEQ ID NO: 1459 - protein, 10 aa, Homo sapiens
  Table 1.2; CT83; ENSG00000204019; HLA -A*02:01,HLA-A*02:03,HLA-A*02:04,HLA-A*02:07,HLA-B*46:01, HLA-B*55:01
SMVENKLVEL

SEQ ID NO: 1460 - protein, 10 aa, Homo sapiens
  Table 1.2; CT83; ENSG00000204019; HLA -A*68:01,HLA-B*27:02
SNSTALALVR

SEQ ID NO: 1461 - protein, 9 aa, Homo sapiens
  Table 1.2; CT83; ENSG00000204019; HLA -B*13:02
SNTDNNLAV

SEQ ID NO: 1462 - protein, 10 aa, Homo sapiens
  Table 1.2; CT83; ENSG00000204019; HLA -A*25:01,HLA-A*26:01,HLA-A*29:02,HLA-A*30:02
SNTDNNLAVY

SEQ ID NO: 1463 - protein, 9 aa, Homo sapiens
  Table 1.2; CT83; ENSG00000204019; HLA -A*03:01,HLA-A*03:02,HLA-B*07:02,HLA-B*13:02,HLA-B*35:03, HLA-B*46:01,HLA-B*58:01,HLA-C*01:02,HLA-C*03:03,HLA-C*03:04, HLA-C*07:02,HLA-C*14:02,HLA-C*16:01
SSNSTALAL

SEQ ID NO: 1464 - protein, 11 aa, Homo sapiens
  Table 1.2; CT83; ENSG00000204019; HLA -A*03:02,HLA-A*11:01,HLA-A*31:01,HLA-A*33:03,HLA-A*68:01, HLA-C*07:06
SSNSTALALVR

SEQ ID NO: 1465 - protein, 8 aa, Homo sapiens
  Table 1.2; CT83; ENSG00000204019; HLA -A*11:01
STALALVR

SEQ ID NO: 1466 - protein, 10 aa, Homo sapiens
  Table 1.2; CT83; ENSG00000204019; HLA -C*06:02,HLA-C*07:01,HLA-C*07:02
STALALVRPS

SEQ ID NO: 1467 - protein, 9 aa, Homo sapiens
  Table 1.2; CT83; ENSG00000204019; HLA -A*31:01,HLA-A*33:01,HLA-A*33:03,HLA-C*06:02,HLA-C*07:01
TALALVRPS

SEQ ID NO: 1468 - protein, 8 aa, Homo sapiens
  Table 1.2; CT83; ENSG00000204019; HLA -A*30:02,HLA-B*18:01,HLA-C*07:01
TDNNLAVY

SEQ ID NO: 1469 - protein, 11 aa, Homo sapiens
  Table 1.2; CT83; ENSG00000204019; HLA -B*35:03,HLA-B*40:01
TGEMSSNSTAL

SEQ ID NO: 1470 - protein, 10 aa, Homo sapiens
  Table 1.2; CT83; ENSG00000204019; HLA -A*02:03
TLLSKGFRGA

SEQ ID NO: 1471 - protein, 8 aa, Homo sapiens
  Table 1.2; CT83; ENSG00000204019; HLA -A*23:01,HLA-A*30:01,HLA-B*08:01,HLA-B*18:01,HLA-B*37:01, HLA-B*40:01,HLA-B*40:02,HLA-B*49:01
VELEHTLL

SEQ ID NO: 1472 - protein, 9 aa, Homo sapiens
  Table 1.2; CT83; ENSG00000204019; HLA -B*49:01
VELEHTLLS

SEQ ID NO: 1473 - protein, 8 aa, Homo sapiens
  Table 1.2; CT83; ENSG00000204019; HLA -A*30:01,HLA-B*18:01,HLA-B*37:01,HLA-B*40:01,HLA-B*40:02, HLA-B*49:01
VENKLVEL

SEQ ID NO: 1474 - protein, 9 aa, Homo sapiens
  Table 1.2; CT83; ENSG00000204019; HLA -B*27:02
VNLSMVENK

SEQ ID NO: 1475 - protein, 10 aa, Homo sapiens
  Table 1.2; CT83; ENSG00000204019; HLA -A*23:01
VNLSMVENKL

SEQ ID NO: 1476 - protein, 8 aa, Homo sapiens
  Table 1.2; CT83; ENSG00000204019; HLA -C*01:02
VRPSSSGL

SEQ ID NO: 1477 - protein, 8 aa, Homo sapiens
  Table 1.2; CT83; ENSG00000204019; HLA -B*35:03,HLA-B*51:01,HLA-C*04:01
VYDLSRDI

SEQ ID NO: 1478 - protein, 9 aa, Homo sapiens
  Table 1.2; CT83; ENSG00000204019; HLA -A*23:01,HLA-A*24:02,HLA-B*35:01,HLA-B*35:03,HLA-B*55:01, HLA-C*04:01
VYDLSRDIL

SEQ ID NO: 1479 - protein, 8 aa, Homo sapiens
  Table 1.2; CT83; ENSG00000204019; HLA -B*13:02,HLA-B*51:01
YLLLASSI

SEQ ID NO: 1480 - protein, 9 aa, Homo sapiens
  Table 1.2; CT83; ENSG00000204019; HLA -A*02:04
YLLLASSIL

SEQ ID NO: 1481 - protein, 9 aa, Homo sapiens
  Table 1.2; CTAG1A/CTAG1B; ENSG00000184033; HLA -A*01:01,HLA-A*02:07,HLA-A*30:01,HLA-B*07:02,HLA-B*08:01, HLA-B*38:01,HLA-B*40:01,HLA-B*58:01,HLA-C*03:03,HLA-C*03:04, HLA-C*05:01,HLA-C*07:02,HLA-C*16:01,HLA-C*16:02
AADHRQLQL

SEQ ID NO: 1482 - protein, 9 aa, Homo sapiens
  Table 1.2; CTAG1A/CTAG1B; ENSG00000184033; HLA -A*30:01,HLA-B*13:02,HLA-B*37:01,HLA-B*38:01,HLA-B*44:02, HLA-B*44:03,HLA-B*49:01
ADGPGGPGI

SEQ ID NO: 1483 - protein, 8 aa, Homo sapiens
  Table 1.2; CTAG1A/CTAG1B; ENSG00000184033; HLA -A*30:01,HLA-B*37:01,HLA-B*40:02,HLA-C*06:02,HLA-C*07:04
ADHRQLQL

SEQ ID NO: 1484 - protein, 10 aa, Homo sapiens
  Table 1.2; CTAG1A/CTAG1B; ENSG00000184033; HLA -B*40:01
AEGRGTGGST

SEQ ID NO: 1485 - protein, 9 aa, Homo sapiens
  Table 1.2; CTAG1A/CTAG1B; ENSG00000184033; HLA -A*32:01,HLA-C*07:04,HLA-C*16:02
AGAARASGP

SEQ ID NO: 1486 - protein, 11 aa, Homo sapiens
  Table 1.2; CTAG1A/CTAG1B; ENSG00000184033; HLA -C*04:01
AGAARASGPGG

SEQ ID NO: 1487 - protein, 8 aa, Homo sapiens
  Table 1.2; CTAG1A/CTAG1B; ENSG00000184033; HLA -B*46:01,HLA-C*01:02
AMPFATPM

SEQ ID NO: 1488 - protein, 10 aa, Homo sapiens
  Table 1.2; CTAG1A/CTAG1B; ENSG00000184033; HLA -A*02:01,HLA-A*02:03,HLA-A*02:07
AMPFATPMEA

SEQ ID NO: 1489 - protein, 9 aa, Homo sapiens
  Table 1.2; CTAG1A/CTAG1B; ENSG00000184033; HLA -A*02:01,HLA-A*02:03,HLA-A*02:07,HLA-B*07:02,HLA-B*13:02, HLA-B*37:01,HLA-B*51:01,HLA-B*54:01,HLA-B*55:01,HLA-B*56:01, HLA-C*04:01,HLA-C*07:02
APPLPVPGV

SEQ ID NO: 1490 - protein, 10 aa, Homo sapiens
  Table 1.2; CTAG1A/CTAG1B; ENSG00000184033; HLA -B*07:02,HLA-B*56:01,HLA-C*07:02
APPLPVPGVL

SEQ ID NO: 1491 - protein, 11 aa, Homo sapiens
  Table 1.2; CTAG1A/CTAG1B; ENSG00000184033; HLA -B*07:02
APPLPVPGVLL

SEQ ID NO: 1492 - protein, 9 aa, Homo sapiens
  Table 1.2; CTAG1A/CTAG1B; ENSG00000184033; HLA -B*07:02,HLA-B*54:01,HLA-B*55:01,HLA-B*56:01,HLA-C*07:02
APRGPHGGA

SEQ ID NO: 1493 - protein, 10 aa, Homo sapiens
  Table 1.2; CTAG1A/CTAG1B; ENSG00000184033; HLA -B*07:02,HLA-B*54:01,HLA-B*55:01,HLA-B*56:01,HLA-C*07:02
APRGPHGGAA

SEQ ID NO: 1494 - protein, 11 aa, Homo sapiens
  Table 1.2; CTAG1A/CTAG1B; ENSG00000184033; HLA -B*07:02,HLA-C*07:02
APRGPHGGAAS

SEQ ID NO: 1495 - protein, 9 aa, Homo sapiens
  Table 1.2; CTAG1A/CTAG1B; ENSG00000184033; HLA -A*01:01,HLA-A*02:01,HLA-A*02:03,HLA-A*02:07,HLA-A*03:01, HLA-A*03:02,HLA-A*11:01,HLA-A*30:01,HLA-B*13:02,HLA-B*27:05, HLA-B*37:01,HLA-B*38:01,HLA-B*39:01,HLA-B*40:02,HLA-B*49:01,
  HLA-B*55:01,HLA-B*56:01,HLA-C*05:01,HLA-C*06:02
AQDAPPLPV

SEQ ID NO: 1496 - protein, 11 aa, Homo sapiens
  Table 1.2; CTAG1A/CTAG1B; ENSG00000184033; HLA -B*27:05
AQDAPPLPVPG

SEQ ID NO: 1497 - protein, 9 aa, Homo sapiens
  Table 1.2; CTAG1A/CTAG1B; ENSG00000184033; HLA -A*31:01,HLA-A*32:01,HLA-B*13:02,HLA-B*15:01,HLA-B*15:03, HLA-B*27:05,HLA-C*06:02
AQPPSGQRR

SEQ ID NO: 1498 - protein, 10 aa, Homo sapiens
  Table 1.2; CTAG1A/CTAG1B; ENSG00000184033; HLA -B*27:05,HLA-B*39:01
ARASGPGGGA

SEQ ID NO: 1499 - protein, 11 aa, Homo sapiens
  Table 1.2; CTAG1A/CTAG1B; ENSG00000184033; HLA -B*27:05,HLA-B*39:01
ARASGPGGGAP

SEQ ID NO: 1500 - protein, 9 aa, Homo sapiens
  Table 1.2; CTAG1A/CTAG1B; ENSG00000184033; HLA -B*07:02,HLA-B*27:05,HLA-B*40:02,HLA-C*06:02,HLA-C*07:01
ARGPESRLL

SEQ ID NO: 1501 - protein, 10 aa, Homo sapiens
  Table 1.2; CTAG1A/CTAG1B; ENSG00000184033; HLA -A*01:01,HLA-A*03:02,HLA-A*11:01,HLA-A*29:02,HLA-A*30:02, HLA-A*31:01,HLA-A*32:01,HLA-A*33:01,HLA-A*33:03,HLA-A*68:01, HLA-B*27:02,HLA-B*27:05,HLA-B*57:01,HLA-C*01:02,HLA-C*07:04,
  HLA-C*07:06
ASGPGGGAPR

SEQ ID NO: 1502 - protein, 11 aa, Homo sapiens
  Table 1.2; CTAG1A/CTAG1B; ENSG00000184033; HLA -A*01:01
ASGPGGGAPRG

SEQ ID NO: 1503 - protein, 8 aa, Homo sapiens
  Table 1.2; CTAG1A/CTAG1B; ENSG00000184033; HLA -C*01:02
ATPMEAEL

SEQ ID NO: 1504 - protein, 10 aa, Homo sapiens
  Table 1.2; CTAG1A/CTAG1B; ENSG00000184033; HLA -A*11:01,HLA-A*68:01,HLA-B*27:02,HLA-C*07:06
ATPMEAELAR

SEQ ID NO: 1505 - protein, 11 aa, Homo sapiens
  Table 1.2; CTAG1A/CTAG1B; ENSG00000184033; HLA -A*11:01,HLA-A*31:01
ATPMEAELARR

SEQ ID NO: 1506 - protein, 10 aa, Homo sapiens
  Table 1.2; CTAG1A/CTAG1B; ENSG00000184033; HLA -B*38:01,HLA-B*51:01,HLA-C*05:01
DADGPGGPGI

SEQ ID NO: 1507 - protein, 8 aa, Homo sapiens
  Table 1.2; CTAG1A/CTAG1B; ENSG00000184033; HLA -B*51:01,HLA-B*54:01
DAPPLPVP

SEQ ID NO: 1508 - protein, 10 aa, Homo sapiens
  Table 1.2; CTAG1A/CTAG1B; ENSG00000184033; HLA -A*02:07,HLA-A*26:01,HLA-A*68:02,HLA-B*51:01
DAPPLPVPGV

SEQ ID NO: 1509 - protein, 8 aa, Homo sapiens
  Table 1.2; CTAG1A/CTAG1B; ENSG00000184033; HLA -B*51:01
DGPGGPGI

SEQ ID NO: 1510 - protein, 9 aa, Homo sapiens
  Table 1.2; CTAG1A/CTAG1B; ENSG00000184033; HLA -B*51:01
DHRQLQLSI

SEQ ID NO: 1511 - protein, 9 aa, Homo sapiens
  Table 1.2; CTAG1A/CTAG1B; ENSG00000184033; HLA -B*07:02,HLA-B*08:01,HLA-B*51:01,HLA-C*01:02,HLA-C*07:02, HLA-C*16:01
EAELARRSL

SEQ ID NO: 1512 - protein, 11 aa, Homo sapiens
  Table 1.2; CTAG1A/CTAG1B; ENSG00000184033; HLA -A*33:03
EAGATGGRGPR

SEQ ID NO: 1513 - protein, 9 aa, Homo sapiens
  Table 1.2; CTAG1A/CTAG1B; ENSG00000184033; HLA -A*24:02,HLA-C*14:02
EFTVSGNIL

SEQ ID NO: 1514 - protein, 11 aa, Homo sapiens
  Table 1.2; CTAG1A/CTAG1B; ENSG00000184033; HLA -A*23:01
EFTVSGNILTI

SEQ ID NO: 1515 - protein, 8 aa, Homo sapiens
  Table 1.2; CTAG1A/CTAG1B; ENSG00000184033; HLA -C*07:01
EFYLAMPF

SEQ ID NO: 1516 - protein, 9 aa, Homo sapiens
  Table 1.2; CTAG1A/CTAG1B; ENSG00000184033; HLA -A*02:01,HLA-A*02:07,HLA-A*23:01,HLA-A*24:02,HLA-A*30:01, HLA-A*32:01,HLA-A*68:02,HLA-B*13:02,HLA-B*15:03,HLA-B*27:02, HLA-B*27:05,HLA-B*35:01,HLA-B*35:03,HLA-B*38:01,HLA-B*39:01,
  HLA-B*40:01,HLA-B*40:02,HLA-B*46:01,HLA-B*51:01,HLA-B*54:01, HLA-B*55:01,HLA-B*56:01,HLA-B*58:01,HLA-C*01:02,HLA-C*02:02, HLA-C*03:03,HLA-C*03:04,HLA-C*04:01,HLA-C*05:01,HLA-C*07:04, HLA-C*07:06,HLA-C*12:03,HLA-C*14:02,HLA-C*16:01,HLA-C*16:02,
  HLA-C*16:04
FATPMEAEL

SEQ ID NO: 1517 - protein, 11 aa, Homo sapiens
  Table 1.2; CTAG1A/CTAG1B; ENSG00000184033; HLA -B*27:02
FATPMEAELAR

SEQ ID NO: 1518 - protein, 9 aa, Homo sapiens
  Table 1.2; CTAG1A/CTAG1B; ENSG00000184033; HLA -A*02:03,HLA-A*32:01
FLAQPPSGQ

SEQ ID NO: 1519 - protein, 10 aa, Homo sapiens
  Table 1.2; CTAG1A/CTAG1B; ENSG00000184033; HLA -A*33:03,HLA-A*68:01
FLAQPPSGQR

SEQ ID NO: 1520 - protein, 11 aa, Homo sapiens
  Table 1.2; CTAG1A/CTAG1B; ENSG00000184033; HLA -A*01:01,HLA-A*02:03,HLA-A*02:04,HLA-A*02:07,HLA-A*29:02, HLA-A*31:01,HLA-A*33:01,HLA-A*33:03,HLA-A*68:01,HLA-A*68:02, HLA-B*27:05
FLAQPPSGQRR

SEQ ID NO: 1521 - protein, 9 aa, Homo sapiens
  Table 1.2; CTAG1A/CTAG1B; ENSG00000184033; HLA -A*02:07
FLPVFLAQP

SEQ ID NO: 1522 - protein, 8 aa, Homo sapiens
  Table 1.2; CTAG1A/CTAG1B; ENSG00000184033; HLA -B*35:03,HLA-B*39:01,HLA-B*46:01,HLA-C*03:03,HLA-C*03:04, HLA-C*14:02
FTVSGNIL

SEQ ID NO: 1523 - protein, 10 aa, Homo sapiens
  Table 1.2; CTAG1A/CTAG1B; ENSG00000184033; HLA -A*02:01,HLA-A*02:03,HLA-A*23:01,HLA-A*25:01,HLA-A*26:01, HLA-A*68:01,HLA-A*68:02,HLA-B*13:02,HLA-B*40:02,HLA-C*02:02
FTVSGNILTI

SEQ ID NO: 1524 - protein, 11 aa, Homo sapiens
  Table 1.2; CTAG1A/CTAG1B; ENSG00000184033; HLA -A*31:01,HLA-A*33:03,HLA-A*68:01,HLA-A*68:02
FTVSGNILTIR

SEQ ID NO: 1525 - protein, 9 aa, Homo sapiens
  Table 1.2; CTAG1A/CTAG1B; ENSG00000184033; HLA -B*07:02,HLA-C*07:02
GARGPESRL

SEQ ID NO: 1526 - protein, 8 aa, Homo sapiens
  Table 1.2; CTAG1A/CTAG1B; ENSG00000184033; HLA -C*16:02
GATGGRGP

SEQ ID NO: 1527 - protein, 11 aa, Homo sapiens
  Table 1.2; CTAG1A/CTAG1B; ENSG00000184033; HLA -B*44:02,HLA-B*44:03,HLA-C*06:02,HLA-C*16:04
GEAGATGGRGP

SEQ ID NO: 1528 - protein, 10 aa, Homo sapiens
  Table 1.2; CTAG1A/CTAG1B; ENSG00000184033; HLA -B*39:01
GIPDGPGGNA

SEQ ID NO: 1529 - protein, 9 aa, Homo sapiens
  Table 1.2; CTAG1A/CTAG1B; ENSG00000184033; HLA -B*07:02,HLA-B*08:01,HLA-B*35:01,HLA-B*55:01,HLA-B*56:01, HLA-C*07:02
GPESRLLEF

SEQ ID NO: 1530 - protein, 10 aa, Homo sapiens
  Table 1.2; CTAG1A/CTAG1B; ENSG00000184033; HLA -A*01:01
GPESRLLEFY

SEQ ID NO: 1531 - protein, 11 aa, Homo sapiens
  Table 1.2; CTAG1A/CTAG1B; ENSG00000184033; HLA -A*68:01
GPGEAGATGGR

SEQ ID NO: 1532 - protein, 8 aa, Homo sapiens
  Table 1.2; CTAG1A/CTAG1B; ENSG00000184033; HLA -A*68:01
GPGGGAPR

SEQ ID NO: 1533 - protein, 10 aa, Homo sapiens
  Table 1.2; CTAG1A/CTAG1B; ENSG00000184033; HLA -C*07:02
GPGGGAPRGP

SEQ ID NO: 1534 - protein, 10 aa, Homo sapiens
  Table 1.2; CTAG1A/CTAG1B; ENSG00000184033; HLA -B*07:02,HLA-C*07:02
GPHGGAASGL

SEQ ID NO: 1535 - protein, 9 aa, Homo sapiens
  Table 1.2; CTAG1A/CTAG1B; ENSG00000184033; HLA -A*33:01,HLA-A*33:03,HLA-B*07:02
GPRGAGAAR

SEQ ID NO: 1536 - protein, 10 aa, Homo sapiens
  Table 1.2; CTAG1A/CTAG1B; ENSG00000184033; HLA -B*07:02,HLA-B*55:01,HLA-B*56:01,HLA-C*07:02
GPRGAGAARA

SEQ ID NO: 1537 - protein, 11 aa, Homo sapiens
  Table 1.2; CTAG1A/CTAG1B; ENSG00000184033; HLA -B*07:02
GPRGAGAARAS

SEQ ID NO: 1538 - protein, 9 aa, Homo sapiens
  Table 1.2; CTAG1A/CTAG1B; ENSG00000184033; HLA -B*27:05
GRGPRGAGA

SEQ ID NO: 1539 - protein, 11 aa, Homo sapiens
  Table 1.2; CTAG1A/CTAG1B; ENSG00000184033; HLA -B*27:05
GRGPRGAGAAR

SEQ ID NO: 1540 - protein, 9 aa, Homo sapiens
  Table 1.2; CTAG1A/CTAG1B; ENSG00000184033; HLA -A*02:01,HLA-A*02:04,HLA-B*13:02
GVLLKEFTV

SEQ ID NO: 1541 - protein, 8 aa, Homo sapiens
  Table 1.2; CTAG1A/CTAG1B; ENSG00000184033; HLA -C*07:04
HGGAASGL

SEQ ID NO: 1542 - protein, 9 aa, Homo sapiens
  Table 1.2; CTAG1A/CTAG1B; ENSG00000184033; HLA -A*02:01,HLA-A*02:03,HLA-A*02:04,HLA-B*08:01,HLA-B*46:01, HLA-B*55:01
ILTIRLTAA

SEQ ID NO: 1543 - protein, 9 aa, Homo sapiens
  Table 1.2; CTAG1A/CTAG1B; ENSG00000184033; HLA -B*07:02,HLA-B*55:01,HLA-B*56:01,HLA-C*05:01
IPDGPGGNA

SEQ ID NO: 1544 - protein, 9 aa, Homo sapiens
  Table 1.2; CTAG1A/CTAG1B; ENSG00000184033; HLA -B*57:01
ITQCFLPVF

SEQ ID NO: 1545 - protein, 9 aa, Homo sapiens
  Table 1.2; CTAG1A/CTAG1B; ENSG00000184033; HLA -A*30:01,HLA-B*13:02,HLA-B*37:01,HLA-B*40:01,HLA-B*40:02, HLA-B*44:02,HLA-B*44:03,HLA-B*49:01
KEFTVSGNI

SEQ ID NO: 1546 - protein, 10 aa, Homo sapiens
  Table 1.2; CTAG1A/CTAG1B; ENSG00000184033; HLA -A*30:01,HLA-B*15:03,HLA-B*27:05,HLA-B*37:01,HLA-B*40:01, HLA-B*40:02,HLA-B*44:02,HLA-B*44:03,HLA-B*49:01
KEFTVSGNIL

SEQ ID NO: 1547 - protein, 11 aa, Homo sapiens
  Table 1.2; CTAG1A/CTAG1B; ENSG00000184033; HLA -B*49:01
KEFTVSGNILT

SEQ ID NO: 1548 - protein, 9 aa, Homo sapiens
  Table 1.2; CTAG1A/CTAG1B; ENSG00000184033; HLA -A*02:01,HLA-A*02:07,HLA-A*03:01,HLA-A*11:01,HLA-A*23:01, HLA-A*24:02,HLA-A*26:01,HLA-A*29:02,HLA-A*30:01,HLA-A*30:02, HLA-A*31:01,HLA-A*32:01,HLA-B*07:02,HLA-B*08:01,HLA-B*15:01,
  HLA-B*15:03,HLA-B*18:01,HLA-B*35:01,HLA-B*35:03,HLA-B*37:01, HLA-B*39:01,HLA-B*40:02,HLA-B*46:01,HLA-B*51:01,HLA-B*54:01, HLA-B*55:01,HLA-B*56:01,HLA-B*57:01,HLA-B*58:01,HLA-C*01:02, HLA-C*02:02,HLA-C*03:03,HLA-C*03:04,HLA-C*04:01,HLA-C*06:02,
  HLA-C*07:01,HLA-C*07:04,HLA-C*12:03,HLA-C*14:02,HLA-C*16:01, HLA-C*16:02,HLA-C*16:04
LAMPFATPM

SEQ ID NO: 1549 - protein, 11 aa, Homo sapiens
  Table 1.2; CTAG1A/CTAG1B; ENSG00000184033; HLA -B*54:01
LAMPFATPMEA

SEQ ID NO: 1550 - protein, 8 aa, Homo sapiens
  Table 1.2; CTAG1A/CTAG1B; ENSG00000184033; HLA -B*46:01,HLA-C*03:03,HLA-C*03:04
LAQDAPPL

SEQ ID NO: 1551 - protein, 10 aa, Homo sapiens
  Table 1.2; CTAG1A/CTAG1B; ENSG00000184033; HLA -A*01:01,HLA-B*27:02,HLA-B*54:01,HLA-B*56:01,HLA-C*03:03, HLA-C*03:04
LAQDAPPLPV

SEQ ID NO: 1552 - protein, 9 aa, Homo sapiens
  Table 1.2; CTAG1A/CTAG1B; ENSG00000184033; HLA -A*03:02,HLA-A*11:01,HLA-A*31:01,HLA-A*33:01,HLA-A*33:03, HLA-A*68:01,HLA-B*27:05,HLA-B*54:01,HLA-B*57:01,HLA-C*06:02, HLA-C*07:06,HLA-C*16:02
LAQPPSGQR

SEQ ID NO: 1553 - protein, 10 aa, Homo sapiens
  Table 1.2; CTAG1A/CTAG1B; ENSG00000184033; HLA -A*03:02,HLA-A*11:01,HLA-A*31:01,HLA-A*33:01,HLA-A*33:03, HLA-A*68:01,HLA-B*27:05,HLA-B*54:01,HLA-B*57:01,HLA-B*58:01, HLA-C*06:02,HLA-C*07:01,HLA-C*07:02,HLA-C*07:06,HLA-C*16:02
LAQPPSGQRR

SEQ ID NO: 1554 - protein, 9 aa, Homo sapiens
  Table 1.2; CTAG1A/CTAG1B; ENSG00000184033; HLA -A*02:03
LLKEFTVSG

SEQ ID NO: 1555 - protein, 10 aa, Homo sapiens
  Table 1.2; CTAG1A/CTAG1B; ENSG00000184033; HLA -A*02:03
LLKEFTVSGN

SEQ ID NO: 1556 - protein, 9 aa, Homo sapiens
  Table 1.2; CTAG1A/CTAG1B; ENSG00000184033; HLA -B*54:01
LPVFLAQPP

SEQ ID NO: 1557 - protein, 10 aa, Homo sapiens
  Table 1.2; CTAG1A/CTAG1B; ENSG00000184033; HLA -B*54:01
LPVFLAQPPS

SEQ ID NO: 1558 - protein, 11 aa, Homo sapiens
  Table 1.2; CTAG1A/CTAG1B; ENSG00000184033; HLA -B*54:01,HLA-B*56:01
LPVFLAQPPSG

SEQ ID NO: 1559 - protein, 8 aa, Homo sapiens
  Table 1.2; CTAG1A/CTAG1B; ENSG00000184033; HLA -B*07:02,HLA-B*08:01,HLA-B*35:01,HLA-B*35:03,HLA-B*51:01, HLA-B*56:01
LPVPGVLL

SEQ ID NO: 1560 - protein, 9 aa, Homo sapiens
  Table 1.2; CTAG1A/CTAG1B; ENSG00000184033; HLA -B*51:01
LPVPGVLLK

SEQ ID NO: 1561 - protein, 11 aa, Homo sapiens
  Table 1.2; CTAG1A/CTAG1B; ENSG00000184033; HLA -B*35:01
LPVPGVLLKEF

SEQ ID NO: 1562 - protein, 9 aa, Homo sapiens
  Table 1.2; CTAG1A/CTAG1B; ENSG00000184033; HLA -A*30:01,HLA-B*27:05
LQLSISSCL

SEQ ID NO: 1563 - protein, 9 aa, Homo sapiens
  Table 1.2; CTAG1A/CTAG1B; ENSG00000184033; HLA -A*68:02,HLA-C*06:02,HLA-C*16:01,HLA-C*16:02
LTAADHRQL

SEQ ID NO: 1564 - protein, 10 aa, Homo sapiens
  Table 1.2; CTAG1A/CTAG1B; ENSG00000184033; HLA -A*30:01,HLA-B*40:02,HLA-B*44:02,HLA-B*44:03
MEAELARRSL

SEQ ID NO: 1565 - protein, 8 aa, Homo sapiens
  Table 1.2; CTAG1A/CTAG1B; ENSG00000184033; HLA -B*51:01,HLA-B*54:01
MPFATPME

SEQ ID NO: 1566 - protein, 9 aa, Homo sapiens
  Table 1.2; CTAG1A/CTAG1B; ENSG00000184033; HLA -A*02:01,HLA-A*02:03,HLA-A*30:01,HLA-A*68:02,HLA-B*07:02, HLA-B*08:01,HLA-B*13:02,HLA-B*35:01,HLA-B*35:03,HLA-B*51:01, HLA-B*54:01,HLA-B*55:01,HLA-B*56:01,HLA-C*03:03,HLA-C*04:01,
  HLA-C*06:02,HLA-C*07:02,HLA-C*12:03,HLA-C*16:04
MPFATPMEA

SEQ ID NO: 1567 - protein, 10 aa, Homo sapiens
  Table 1.2; CTAG1A/CTAG1B; ENSG00000184033; HLA -B*35:01,HLA-B*54:01,HLA-B*56:01
MPFATPMEAE

SEQ ID NO: 1568 - protein, 11 aa, Homo sapiens
  Table 1.2; CTAG1A/CTAG1B; ENSG00000184033; HLA -A*68:01,HLA-A*68:02,HLA-B*07:02,HLA-B*35:01,HLA-B*35:03, HLA-B*38:01,HLA-B*51:01,HLA-B*54:01,HLA-B*55:01,HLA-B*56:01, HLA-C*03:03,HLA-C*04:01,HLA-C*07:01
MPFATPMEAEL

SEQ ID NO: 1569 - protein, 9 aa, Homo sapiens
  Table 1.2; CTAG1A/CTAG1B; ENSG00000184033; HLA -B*54:01,HLA-C*16:01
NILTIRLTA

SEQ ID NO: 1570 - protein, 10 aa, Homo sapiens
  Table 1.2; CTAG1A/CTAG1B; ENSG00000184033; HLA -A*02:01,HLA-A*02:03,HLA-A*02:04,HLA-B*54:01
NILTIRLTAA

SEQ ID NO: 1571 - protein, 9 aa, Homo sapiens
  Table 1.2; CTAG1A/CTAG1B; ENSG00000184033; HLA -C*07:02
PGGGAPRGP

SEQ ID NO: 1572 - protein, 9 aa, Homo sapiens
  Table 1.2; CTAG1A/CTAG1B; ENSG00000184033; HLA -A*02:07,HLA-A*24:02
PLPVPGVLL

SEQ ID NO: 1573 - protein, 8 aa, Homo sapiens
  Table 1.2; CTAG1A/CTAG1B; ENSG00000184033; HLA -B*51:01
PPLPVPGV

SEQ ID NO: 1574 - protein, 9 aa, Homo sapiens
  Table 1.2; CTAG1A/CTAG1B; ENSG00000184033; HLA -B*07:02
PPLPVPGVL

SEQ ID NO: 1575 - protein, 10 aa, Homo sapiens
  Table 1.2; CTAG1A/CTAG1B; ENSG00000184033; HLA -A*24:02
PPLPVPGVLL

SEQ ID NO: 1576 - protein, 8 aa, Homo sapiens
  Table 1.2; CTAG1A/CTAG1B; ENSG00000184033; HLA -B*37:01
QDAPPLPV

SEQ ID NO: 1577 - protein, 9 aa, Homo sapiens
  Table 1.2; CTAG1A/CTAG1B; ENSG00000184033; HLA -A*30:01,HLA-B*27:05,HLA-B*40:02,HLA-C*04:01,HLA-C*06:02, HLA-C*07:01,HLA-C*07:02,HLA-C*07:04,HLA-C*16:02
QDAPPLPVP

SEQ ID NO: 1578 - protein, 10 aa, Homo sapiens
  Table 1.2; CTAG1A/CTAG1B; ENSG00000184033; HLA -A*68:02,HLA-B*27:02,HLA-C*04:01,HLA-C*06:02,HLA-C*07:01
QDAPPLPVPG

SEQ ID NO: 1579 - protein, 11 aa, Homo sapiens
  Table 1.2; CTAG1A/CTAG1B; ENSG00000184033; HLA -A*03:02,HLA-A*11:01,HLA-A*31:01,HLA-A*33:01,HLA-A*33:03, HLA-A*68:01,HLA-B*27:05,HLA-C*07:06
RASGPGGGAPR

SEQ ID NO: 1580 - protein, 11 aa, Homo sapiens
  Table 1.2; CTAG1A/CTAG1B; ENSG00000184033; HLA -A*32:01
RGAGAARASGP

SEQ ID NO: 1581 - protein, 10 aa, Homo sapiens
  Table 1.2; CTAG1A/CTAG1B; ENSG00000184033; HLA -A*02:07,HLA-A*24:02
RGPESRLLEF

SEQ ID NO: 1582 - protein, 11 aa, Homo sapiens
  Table 1.2; CTAG1A/CTAG1B; ENSG00000184033; HLA -C*01:02
RGPHGGAASGL

SEQ ID NO: 1583 - protein, 10 aa, Homo sapiens
  Table 1.2; CTAG1A/CTAG1B; ENSG00000184033; HLA -A*31:01
RGPRGAGAAR

SEQ ID NO: 1584 - protein, 9 aa, Homo sapiens
  Table 1.2; CTAG1A/CTAG1B; ENSG00000184033; HLA -A*02:04,HLA-A*02:07,HLA-A*03:01
RLLEFYLAM

SEQ ID NO: 1585 - protein, 9 aa, Homo sapiens
  Table 1.2; CTAG1A/CTAG1B; ENSG00000184033; HLA -A*02:04,HLA-A*31:01
SGNILTIRL

SEQ ID NO: 1586 - protein, 8 aa, Homo sapiens
  Table 1.2; CTAG1A/CTAG1B; ENSG00000184033; HLA -C*01:02
SGPGGGAP

SEQ ID NO: 1587 - protein, 9 aa, Homo sapiens
  Table 1.2; CTAG1A/CTAG1B; ENSG00000184033; HLA -A*11:01,HLA-A*31:01,HLA-A*68:01,HLA-C*01:02,HLA-C*07:06
SGPGGGAPR

SEQ ID NO: 1588 - protein, 11 aa, Homo sapiens
  Table 1.2; CTAG1A/CTAG1B; ENSG00000184033; HLA -B*07:02,HLA-C*04:01,HLA-C*06:02,HLA-C*07:01,HLA-C*07:02, HLA-C*16:02
SGPGGGAPRGP

SEQ ID NO: 1589 - protein, 9 aa, Homo sapiens
  Table 1.2; CTAG1A/CTAG1B; ENSG00000184033; HLA -A*02:01,HLA-A*02:03,HLA-A*02:04,HLA-A*24:02,HLA-A*68:02, HLA-B*13:02,HLA-B*55:01
SISSCLQQL

SEQ ID NO: 1590 - protein, 9 aa, Homo sapiens
  Table 1.2; CTAG1A/CTAG1B; ENSG00000184033; HLA -A*02:01,HLA-A*02:03,HLA-A*02:04,HLA-A*02:07,HLA-B*35:03, HLA-B*39:01,HLA-B*40:01,HLA-B*55:01
SLAQDAPPL

SEQ ID NO: 1591 - protein, 11 aa, Homo sapiens
  Table 1.2; CTAG1A/CTAG1B; ENSG00000184033; HLA -A*02:01,HLA-A*02:03
SLAQDAPPLPV

SEQ ID NO: 1592 - protein, 9 aa, Homo sapiens
  Table 1.2; CTAG1A/CTAG1B; ENSG00000184033; HLA -A*02:01,HLA-A*02:03,HLA-A*02:04
SLLMWITQC

SEQ ID NO: 1593 - protein, 8 aa, Homo sapiens
  Table 1.2; CTAG1A/CTAG1B; ENSG00000184033; HLA -B*07:02,HLA-B*08:01,HLA-B*35:03,HLA-B*51:01,HLA-C*03:03, HLA-C*03:04,HLA-C*06:02,HLA-C*12:03,HLA-C*16:01,HLA-C*16:02
TAADHRQL

SEQ ID NO: 1594 - protein, 10 aa, Homo sapiens
  Table 1.2; CTAG1A/CTAG1B; ENSG00000184033; HLA -A*02:03,HLA-A*25:01,HLA-A*30:01,HLA-A*68:02,HLA-B*07:02, HLA-B*08:01,HLA-C*07:02,HLA-C*16:01,HLA-C*16:02
TAADHRQLQL

SEQ ID NO: 1595 - protein, 8 aa, Homo sapiens
  Table 1.2; CTAG1A/CTAG1B; ENSG00000184033; HLA -B*54:01,HLA-B*55:01,HLA-B*56:01
TPMEAELA

SEQ ID NO: 1596 - protein, 9 aa, Homo sapiens
  Table 1.2; CTAG1A/CTAG1B; ENSG00000184033; HLA -A*33:03,HLA-A*68:01,HLA-B*27:02,HLA-B*35:01,HLA-B*35:03, HLA-B*54:01,HLA-B*55:01,HLA-B*56:01,HLA-C*07:06
TPMEAELAR

SEQ ID NO: 1597 - protein, 10 aa, Homo sapiens
  Table 1.2; CTAG1A/CTAG1B; ENSG00000184033; HLA -A*33:03,HLA-A*68:01,HLA-B*56:01,HLA-C*07:06
TPMEAELARR

SEQ ID NO: 1598 - protein, 9 aa, Homo sapiens
  Table 1.2; CTAG1A/CTAG1B; ENSG00000184033; HLA -A*02:01,HLA-A*02:03,HLA-A*02:04,HLA-A*02:07,HLA-A*03:01, HLA-A*11:01,HLA-A*23:01,HLA-A*25:01,HLA-A*26:01,HLA-A*30:01, HLA-A*32:01,HLA-A*33:03,HLA-A*68:01,HLA-A*68:02,HLA-B*13:02,
  HLA-B*27:05,HLA-B*35:01,HLA-B*35:03,HLA-B*38:01,HLA-B*39:01, HLA-B*40:02,HLA-B*44:03,HLA-B*49:01,HLA-B*51:01,HLA-B*54:01, HLA-B*55:01,HLA-B*56:01,HLA-B*58:01,HLA-C*02:02,HLA-C*04:01, HLA-C*06:02,HLA-C*07:04,HLA-C*07:06,HLA-C*12:03,HLA-C*16:02
TVSGNILTI

SEQ ID NO: 1599 - protein, 10 aa, Homo sapiens
  Table 1.2; CTAG1A/CTAG1B; ENSG00000184033; HLA -A*31:01,HLA-A*33:03,HLA-A*68:01,HLA-A*68:02,HLA-C*07:06
TVSGNILTIR

SEQ ID NO: 1600 - protein, 11 aa, Homo sapiens
  Table 1.2; CTAG1A/CTAG1B; ENSG00000184033; HLA -A*68:02
TVSGNILTIRL

SEQ ID NO: 1601 - protein, 8 aa, Homo sapiens
  Table 1.2; CTAG1A/CTAG1B; ENSG00000184033; HLA -A*02:01,HLA-A*02:04
VLLKEFTV

SEQ ID NO: 1602 - protein, 8 aa, Homo sapiens
  Table 1.2; CTAG1A/CTAG1B; ENSG00000184033; HLA -A*23:01,HLA-B*13:02,HLA-B*51:01,HLA-B*58:01
VSGNILTI

SEQ ID NO: 1603 - protein, 9 aa, Homo sapiens
  Table 1.2; CTAG1A/CTAG1B; ENSG00000184033; HLA -A*31:01,HLA-A*33:03,HLA-A*68:01
VSGNILTIR

SEQ ID NO: 1604 - protein, 9 aa, Homo sapiens
  Table 1.2; CTAG1A/CTAG1B; ENSG00000184033; HLA -A*02:03
YLAMPFATP

SEQ ID NO: 1605 - protein, 10 aa, Homo sapiens
  Table 1.2; CTAG1A/CTAG1B; ENSG00000184033; HLA -A*02:03,HLA-C*07:01
YLAMPFATPM

SEQ ID NO: 1606 - protein, 10 aa, Homo sapiens
  Table 1.2; CTCFL; ENSG00000124092; HLA -A*03:02,HLA-A*11:01,HLA-C*07:06
AAAEEASTTK

SEQ ID NO: 1607 - protein, 9 aa, Homo sapiens
  Table 1.2; CTCFL; ENSG00000124092; HLA -A*03:02,HLA-A*11:01,HLA-C*05:01
AAEEASTTK

SEQ ID NO: 1608 - protein, 8 aa, Homo sapiens
  Table 1.2; CTCFL; ENSG00000124092; HLA -B*08:01
AAELKCRY

SEQ ID NO: 1609 - protein, 8 aa, Homo sapiens
  Table 1.2; CTCFL; ENSG00000124092; HLA -C*03:03,HLA-C*03:04,HLA-C*12:03,HLA-C*16:01,HLA-C*16:02
AATEISVL

SEQ ID NO: 1610 - protein, 9 aa, Homo sapiens
  Table 1.2; CTCFL; ENSG00000124092; HLA -B*49:01
AEEASTTKG

SEQ ID NO: 1611 - protein, 9 aa, Homo sapiens
  Table 1.2; CTCFL; ENSG00000124092; HLA -B*37:01,HLA-B*40:02,HLA-B*44:02,HLA-B*44:03
AERTKEQLF

SEQ ID NO: 1612 - protein, 8 aa, Homo sapiens
  Table 1.2; CTCFL; ENSG00000124092; HLA -B*37:01
AERTSGAF

SEQ ID NO: 1613 - protein, 9 aa, Homo sapiens
  Table 1.2; CTCFL; ENSG00000124092; HLA -A*30:01,HLA-B*27:02,HLA-B*37:01,HLA-B*40:01,HLA-B*40:02, HLA-B*44:02,HLA-B*44:03,HLA-B*49:01,HLA-C*16:04
AETTGLIKL

SEQ ID NO: 1614 - protein, 8 aa, Homo sapiens
  Table 1.2; CTCFL; ENSG00000124092; HLA -C*14:02,HLA-C*16:01
AFVTSGEL

SEQ ID NO: 1615 - protein, 8 aa, Homo sapiens
  Table 1.2; CTCFL; ENSG00000124092; HLA -B*37:01
AISIQQEL

SEQ ID NO: 1616 - protein, 9 aa, Homo sapiens
  Table 1.2; CTCFL; ENSG00000124092; HLA -A*01:01,HLA-A*29:02,HLA-A*30:02,HLA-A*32:01,HLA-B*15:01, HLA-B*15:03,HLA-B*58:01
AISIQQELY

SEQ ID NO: 1617 - protein, 8 aa, Homo sapiens
  Table 1.2; CTCFL; ENSG00000124092; HLA -A*02:01
ALEENVMV

SEQ ID NO: 1618 - protein, 9 aa, Homo sapiens
  Table 1.2; CTCFL; ENSG00000124092; HLA -A*02:01,HLA-A*02:03
ALEENVMVA

SEQ ID NO: 1619 - protein, 8 aa, Homo sapiens
  Table 1.2; CTCFL; ENSG00000124092; HLA -A*29:02,HLA-A*30:02,HLA-B*15:01,HLA-B*15:03,HLA-B*18:01, HLA-B*39:01,HLA-B*46:01,HLA-C*12:03
ANFIPTVY

SEQ ID NO: 1620 - protein, 9 aa, Homo sapiens
  Table 1.2; CTCFL; ENSG00000124092; HLA -A*03:01,HLA-A*03:02,HLA-A*11:01,HLA-B*27:05,HLA-C*04:01
ANFIPTVYK

SEQ ID NO: 1621 - protein, 9 aa, Homo sapiens
  Table 1.2; CTCFL; ENSG00000124092; HLA -A*30:02,HLA-B*15:01,HLA-B*35:01,HLA-B*55:01
APSEESEKY

SEQ ID NO: 1622 - protein, 11 aa, Homo sapiens
  Table 1.2; CTCFL; ENSG00000124092; HLA -B*07:02,HLA-B*35:03,HLA-B*55:01
APSEESEKYIL

SEQ ID NO: 1623 - protein, 9 aa, Homo sapiens
  Table 1.2; CTCFL; ENSG00000124092; HLA -A*01:01,HLA-C*16:02
ASEDSKLAV

SEQ ID NO: 1624 - protein, 8 aa, Homo sapiens
  Table 1.2; CTCFL; ENSG00000124092; HLA -A*23:01
ASRDTYKL

SEQ ID NO: 1625 - protein, 9 aa, Homo sapiens
  Table 1.2; CTCFL; ENSG00000124092; HLA -B*58:01,HLA-C*16:01
ASTTKGEQF

SEQ ID NO: 1626 - protein, 8 aa, Homo sapiens
  Table 1.2; CTCFL; ENSG00000124092; HLA -B*40:02,HLA-B*58:01,HLA-C*03:03,HLA-C*03:04,HLA-C*05:01, HLA-C*16:01,HLA-C*16:02
ASVEASKL

SEQ ID NO: 1627 - protein, 9 aa, Homo sapiens
  Table 1.2; CTCFL; ENSG00000124092; HLA -A*03:01,HLA-A*03:02,HLA-A*11:01,HLA-C*06:02
ASVEASKLK

SEQ ID NO: 1628 - protein, 11 aa, Homo sapiens
  Table 1.2; CTCFL; ENSG00000124092; HLA -A*01:01
ATEISVLSEQF

SEQ ID NO: 1629 - protein, 10 aa, Homo sapiens
  Table 1.2; CTCFL; ENSG00000124092; HLA -A*33:03
ATKGQKEAAK

SEQ ID NO: 1630 - protein, 9 aa, Homo sapiens
  Table 1.2; CTCFL; ENSG00000124092; HLA -A*02:04
AVFHERYAL

SEQ ID NO: 1631 - protein, 11 aa, Homo sapiens
  Table 1.2; CTCFL; ENSG00000124092; HLA -A*29:02
AYSAAELKCRY

SEQ ID NO: 1632 - protein, 8 aa, Homo sapiens
  Table 1.2; CTCFL; ENSG00000124092; HLA -A*30:01,HLA-B*18:01,HLA-B*37:01,HLA-B*49:01
CEMLLNTM

SEQ ID NO: 1633 - protein, 9 aa, Homo sapiens
  Table 1.2; CTCFL; ENSG00000124092; HLA -A*01:01,HLA-A*29:02,HLA-A*30:02
CSAVFHERY

SEQ ID NO: 1634 - protein, 9 aa, Homo sapiens
  Table 1.2; CTCFL; ENSG00000124092; HLA -A*01:01,HLA-A*30:02,HLA-A*32:01,HLA-B*15:01,HLA-B*15:03, HLA-B*46:01,HLA-B*58:01,HLA-C*12:03,HLA-C*16:01,HLA-C*16:04
CSYASRDTY

SEQ ID NO: 1635 - protein, 10 aa, Homo sapiens
  Table 1.2; CTCFL; ENSG00000124092; HLA -A*03:01
CSYASRDTYK

SEQ ID NO: 1636 - protein, 11 aa, Homo sapiens
  Table 1.2; CTCFL; ENSG00000124092; HLA -A*30:02
CVAISIQQELY

SEQ ID NO: 1637 - protein, 8 aa, Homo sapiens
  Table 1.2; CTCFL; ENSG00000124092; HLA -B*18:01,HLA-B*51:01,HLA-B*54:01
DANFIPTV

SEQ ID NO: 1638 - protein, 9 aa, Homo sapiens
  Table 1.2; CTCFL; ENSG00000124092; HLA -A*01:01,HLA-A*25:01,HLA-A*26:01,HLA-A*29:02,HLA-A*33:01, HLA-A*33:03,HLA-A*68:01,HLA-B*15:01,HLA-B*15:03,HLA-B*18:01, HLA-B*35:01,HLA-B*35:03,HLA-B*39:01,HLA-B*46:01,HLA-B*51:01,
  HLA-B*54:01,HLA-B*55:01,HLA-C*02:02,HLA-C*03:03,HLA-C*07:01, HLA-C*07:06,HLA-C*12:03,HLA-C*16:04
DANFIPTVY

SEQ ID NO: 1639 - protein, 10 aa, Homo sapiens
  Table 1.2; CTCFL; ENSG00000124092; HLA -A*11:01,HLA-A*33:01,HLA-A*33:03,HLA-A*68:01,HLA-A*68:02, HLA-B*27:02
DANFIPTVYK

SEQ ID NO: 1640 - protein, 8 aa, Homo sapiens
  Table 1.2; CTCFL; ENSG00000124092; HLA -B*18:01
DEAAAEEA

SEQ ID NO: 1641 - protein, 8 aa, Homo sapiens
  Table 1.2; CTCFL; ENSG00000124092; HLA -B*18:01
DEGVTCEM

SEQ ID NO: 1642 - protein, 8 aa, Homo sapiens
  Table 1.2; CTCFL; ENSG00000124092; HLA -B*18:01
DEIVLTVS

SEQ ID NO: 1643 - protein, 9 aa, Homo sapiens
  Table 1.2; CTCFL; ENSG00000124092; HLA -B*18:01
DEIVLTVSN

SEQ ID NO: 1644 - protein, 9 aa, Homo sapiens
  Table 1.2; CTCFL; ENSG00000124092; HLA -B*18:01,HLA-B*40:01,HLA-B*40:02
DERSDEIVL

SEQ ID NO: 1645 - protein, 8 aa, Homo sapiens
  Table 1.2; CTCFL; ENSG00000124092; HLA -A*33:01,HLA-B*08:01,HLA-B*18:01,HLA-B*40:02,HLA-B*51:01
DSKLAVSL

SEQ ID NO: 1646 - protein, 10 aa, Homo sapiens
  Table 1.2; CTCFL; ENSG00000124092; HLA -A*33:01
DTYKLKRHMR

SEQ ID NO: 1647 - protein, 9 aa, Homo sapiens
  Table 1.2; CTCFL; ENSG00000124092; HLA -A*33:01,HLA-A*33:03,HLA-A*68:01
DVCMFTSSR

SEQ ID NO: 1648 - protein, 11 aa, Homo sapiens
  Table 1.2; CTCFL; ENSG00000124092; HLA -A*26:01,HLA-A*33:03,HLA-A*68:01,HLA-B*27:02,HLA-C*07:06
EAAAEEASTTK

SEQ ID NO: 1649 - protein, 9 aa, Homo sapiens
  Table 1.2; CTCFL; ENSG00000124092; HLA -A*33:03
EAKSAASGK

SEQ ID NO: 1650 - protein, 11 aa, Homo sapiens
  Table 1.2; CTCFL; ENSG00000124092; HLA -A*33:01,HLA-A*33:03,HLA-A*68:01
EAKSAASGKGR

SEQ ID NO: 1651 - protein, 10 aa, Homo sapiens
  Table 1.2; CTCFL; ENSG00000124092; HLA -A*25:01
EASTTKGEQF

SEQ ID NO: 1652 - protein, 10 aa, Homo sapiens
  Table 1.2; CTCFL; ENSG00000124092; HLA -A*25:01,HLA-A*68:01,HLA-A*68:02,HLA-B*35:01,HLA-B*35:03
EAVELQDMSL

SEQ ID NO: 1653 - protein, 11 aa, Homo sapiens
  Table 1.2; CTCFL; ENSG00000124092; HLA -A*25:01,HLA-A*26:01,HLA-A*68:02
EAVELQDMSLL

SEQ ID NO: 1654 - protein, 9 aa, Homo sapiens
  Table 1.2; CTCFL; ENSG00000124092; HLA -A*30:01,HLA-A*68:02,HLA-B*18:01,HLA-B*27:05,HLA-B*37:01, HLA-B*38:01,HLA-B*39:01,HLA-B*40:01,HLA-B*40:02,HLA-B*44:02, HLA-B*44:03
EDSKLAVSL

SEQ ID NO: 1655 - protein, 11 aa, Homo sapiens
  Table 1.2; CTCFL; ENSG00000124092; HLA -A*25:01,HLA-A*26:01,HLA-B*27:02,HLA-B*38:01,HLA-B*40:01, HLA-B*44:02,HLA-B*44:03,HLA-C*16:04
EEASTTKGEQF

SEQ ID NO: 1656 - protein, 9 aa, Homo sapiens
  Table 1.2; CTCFL; ENSG00000124092; HLA -B*40:01,HLA-B*44:02,HLA-B*44:03
EEEQEKNQL

SEQ ID NO: 1657 - protein, 10 aa, Homo sapiens
  Table 1.2; CTCFL; ENSG00000124092; HLA -B*40:01,HLA-B*44:02,HLA-B*44:03
EEEQEKNQLL

SEQ ID NO: 1658 - protein, 8 aa, Homo sapiens
  Table 1.2; CTCFL; ENSG00000124092; HLA -B*37:01,HLA-B*40:01,HLA-B*44:02,HLA-B*44:03
EEGPRQSL

SEQ ID NO: 1659 - protein, 9 aa, Homo sapiens
  Table 1.2; CTCFL; ENSG00000124092; HLA -A*30:01,HLA-B*40:01,HLA-B*40:02,HLA-B*44:02,HLA-B*44:03, HLA-B*49:01
EEQEKNQLL

SEQ ID NO: 1660 - protein, 8 aa, Homo sapiens
  Table 1.2; CTCFL; ENSG00000124092; HLA -B*18:01,HLA-B*37:01
EESEKYIL

SEQ ID NO: 1661 - protein, 10 aa, Homo sapiens
  Table 1.2; CTCFL; ENSG00000124092; HLA -A*30:01,HLA-B*40:01,HLA-B*44:02,HLA-B*44:03
EESEKYILTL

SEQ ID NO: 1662 - protein, 9 aa, Homo sapiens
  Table 1.2; CTCFL; ENSG00000124092; HLA -A*30:01,HLA-B*39:01,HLA-B*40:01,HLA-B*49:01
EEVDEGVTC

SEQ ID NO: 1663 - protein, 11 aa, Homo sapiens
  Table 1.2; CTCFL; ENSG00000124092; HLA -A*26:01,HLA-A*30:01,HLA-B*40:01,HLA-B*44:03
EEVDEGVTCEM

SEQ ID NO: 1664 - protein, 8 aa, Homo sapiens
  Table 1.2; CTCFL; ENSG00000124092; HLA -B*18:01
EEVELVLA

SEQ ID NO: 1665 - protein, 9 aa, Homo sapiens
  Table 1.2; CTCFL; ENSG00000124092; HLA -B*18:01
EEVELVLAP

SEQ ID NO: 1666 - protein, 9 aa, Homo sapiens
  Table 1.2; CTCFL; ENSG00000124092; HLA -A*25:01,HLA-A*26:01,HLA-B*44:02
EISVLSEQF

SEQ ID NO: 1667 - protein, 11 aa, Homo sapiens
  Table 1.2; CTCFL; ENSG00000124092; HLA -A*68:01,HLA-B*27:02
EISVLSEQFTK

SEQ ID NO: 1668 - protein, 9 aa, Homo sapiens
  Table 1.2; CTCFL; ENSG00000124092; HLA -A*33:01,HLA-A*33:03
EKNQLLAER

SEQ ID NO: 1669 - protein, 8 aa, Homo sapiens
  Table 1.2; CTCFL; ENSG00000124092; HLA -B*08:01
ELMPEKGL

SEQ ID NO: 1670 - protein, 9 aa, Homo sapiens
  Table 1.2; CTCFL; ENSG00000124092; HLA -A*33:03
ELMPEKGLK

SEQ ID NO: 1671 - protein, 10 aa, Homo sapiens
  Table 1.2; CTCFL; ENSG00000124092; HLA -A*25:01
ELQDMSLLSI

SEQ ID NO: 1672 - protein, 8 aa, Homo sapiens
  Table 1.2; CTCFL; ENSG00000124092; HLA -B*08:01
ELYSPQEM

SEQ ID NO: 1673 - protein, 10 aa, Homo sapiens
  Table 1.2; CTCFL; ENSG00000124092; HLA -A*02:01,HLA-A*02:03,HLA-B*13:02
ELYSPQEMEV

SEQ ID NO: 1674 - protein, 8 aa, Homo sapiens
  Table 1.2; CTCFL; ENSG00000124092; HLA -A*33:03
EMFPVACR

SEQ ID NO: 1675 - protein, 9 aa, Homo sapiens
  Table 1.2; CTCFL; ENSG00000124092; HLA -A*01:01
EMLLNTMDK

SEQ ID NO: 1676 - protein, 10 aa, Homo sapiens
  Table 1.2; CTCFL; ENSG00000124092; HLA -A*02:03,HLA-A*26:01,HLA-A*68:02
EQFPGEMFPV

SEQ ID NO: 1677 - protein, 11 aa, Homo sapiens
  Table 1.2; CTCFL; ENSG00000124092; HLA -A*68:02
EQFPGEMFPVA

SEQ ID NO: 1678 - protein, 9 aa, Homo sapiens
  Table 1.2; CTCFL; ENSG00000124092; HLA -A*25:01,HLA-A*26:01,HLA-A*68:02,HLA-B*08:01
EQFTKIKEL

SEQ ID NO: 1679 - protein, 9 aa, Homo sapiens
  Table 1.2; CTCFL; ENSG00000124092; HLA -A*68:02,HLA-B*13:02,HLA-B*18:01,HLA-B*38:01,HLA-B*39:01
EQLFFVETM

SEQ ID NO: 1680 - protein, 10 aa, Homo sapiens
  Table 1.2; CTCFL; ENSG00000124092; HLA -A*68:02
ERSDEIVLTV

SEQ ID NO: 1681 - protein, 9 aa, Homo sapiens
  Table 1.2; CTCFL; ENSG00000124092; HLA -A*01:01
ESEKYILTL

SEQ ID NO: 1682 - protein, 8 aa, Homo sapiens
  Table 1.2; CTCFL; ENSG00000124092; HLA -A*33:03
ETMSGDER

SEQ ID NO: 1683 - protein, 8 aa, Homo sapiens
  Table 1.2; CTCFL; ENSG00000124092; HLA -A*68:02
ETTGLIKL

SEQ ID NO: 1684 - protein, 8 aa, Homo sapiens
  Table 1.2; CTCFL; ENSG00000124092; HLA -C*05:01
EVDEGVTC

SEQ ID NO: 1685 - protein, 10 aa, Homo sapiens
  Table 1.2; CTCFL; ENSG00000124092; HLA -A*25:01,HLA-A*26:01,HLA-B*35:01,HLA-B*35:03
EVDEGVTCEM

SEQ ID NO: 1686 - protein, 8 aa, Homo sapiens
  Table 1.2; CTCFL; ENSG00000124092; HLA -B*08:01
EVLQFHAL

SEQ ID NO: 1687 - protein, 9 aa, Homo sapiens
  Table 1.2; CTCFL; ENSG00000124092; HLA -B*35:03,HLA-B*38:01,HLA-B*39:01
FHALEENVM

SEQ ID NO: 1688 - protein, 10 aa, Homo sapiens
  Table 1.2; CTCFL; ENSG00000124092; HLA -B*38:01
FHALEENVMV

SEQ ID NO: 1689 - protein, 8 aa, Homo sapiens
  Table 1.2; CTCFL; ENSG00000124092; HLA -B*54:01
FPGEMFPV

SEQ ID NO: 1690 - protein, 9 aa, Homo sapiens
  Table 1.2; CTCFL; ENSG00000124092; HLA -B*35:01,HLA-B*35:03,HLA-B*51:01,HLA-B*54:01,HLA-B*55:01, HLA-B*56:01
FPGEMFPVA

SEQ ID NO: 1691 - protein, 10 aa, Homo sapiens
  Table 1.2; CTCFL; ENSG00000124092; HLA -B*35:03,HLA-B*54:01,HLA-B*56:01
FPGEMFPVAC

SEQ ID NO: 1692 - protein, 10 aa, Homo sapiens
  Table 1.2; CTCFL; ENSG00000124092; HLA -B*54:01
FPVACRETTA

SEQ ID NO: 1693 - protein, 9 aa, Homo sapiens
  Table 1.2; CTCFL; ENSG00000124092; HLA -B*08:01
FTKIKELEL

SEQ ID NO: 1694 - protein, 9 aa, Homo sapiens
  Table 1.2; CTCFL; ENSG00000124092; HLA -A*01:01,HLA-A*25:01,HLA-A*32:01,HLA-A*68:02,HLA-B*13:02, HLA-C*16:02
FTQSGTMKI

SEQ ID NO: 1695 - protein, 8 aa, Homo sapiens
  Table 1.2; CTCFL; ENSG00000124092; HLA -B*27:05,HLA-B*35:03,HLA-B*39:01,HLA-B*40:01,HLA-B*46:01, HLA-C*01:02,HLA-C*03:03,HLA-C*03:04,HLA-C*04:01,HLA-C*05:01, HLA-C*07:04,HLA-C*12:03,HLA-C*14:02
FTSEAVEL

SEQ ID NO: 1696 - protein, 9 aa, Homo sapiens
  Table 1.2; CTCFL; ENSG00000124092; HLA -A*01:01,HLA-A*25:01,HLA-A*26:01,HLA-A*32:01,HLA-B*08:01, HLA-B*37:01,HLA-B*46:01,HLA-B*57:01,HLA-C*02:02,HLA-C*03:04, HLA-C*07:04,HLA-C*12:03,HLA-C*16:01
FTSSRMSSF

SEQ ID NO: 1697 - protein, 10 aa, Homo sapiens
  Table 1.2; CTCFL; ENSG00000124092; HLA -B*27:05
FVETMSGDER

SEQ ID NO: 1698 - protein, 8 aa, Homo sapiens
  Table 1.2; CTCFL; ENSG00000124092; HLA -B*39:01
FVTSGELV

SEQ ID NO: 1699 - protein, 9 aa, Homo sapiens
  Table 1.2; CTCFL; ENSG00000124092; HLA -A*33:03,HLA-A*68:01,HLA-C*07:06
FVTSGELVR

SEQ ID NO: 1700 - protein, 10 aa, Homo sapiens
  Table 1.2; CTCFL; ENSG00000124092; HLA -B*40:01
GDERSDEIVL

SEQ ID NO: 1701 - protein, 8 aa, Homo sapiens
  Table 1.2; CTCFL; ENSG00000124092; HLA -A*30:01,HLA-B*40:01,HLA-B*40:02,HLA-B*49:01
GEKPFTCL

SEQ ID NO: 1702 - protein, 9 aa, Homo sapiens
  Table 1.2; CTCFL; ENSG00000124092; HLA -B*40:02,HLA-B*49:01
GEKPYECHI

SEQ ID NO: 1703 - protein, 9 aa, Homo sapiens
  Table 1.2; CTCFL; ENSG00000124092; HLA -B*37:01
GENVPKYQC

SEQ ID NO: 1704 - protein, 9 aa, Homo sapiens
  Table 1.2; CTCFL; ENSG00000124092; HLA -B*44:02,HLA-B*44:03
GEQFPGEMF

SEQ ID NO: 1705 - protein, 9 aa, Homo sapiens
  Table 1.2; CTCFL; ENSG00000124092; HLA -B*07:02,HLA-B*56:01
GPRQSLQQC

SEQ ID NO: 1706 - protein, 10 aa, Homo sapiens
  Table 1.2; CTCFL; ENSG00000124092; HLA -B*07:02
GPRQSLQQCV

SEQ ID NO: 1707 - protein, 11 aa, Homo sapiens
  Table 1.2; CTCFL; ENSG00000124092; HLA -B*56:01
GPRQSLQQCVA

SEQ ID NO: 1708 - protein, 9 aa, Homo sapiens
  Table 1.2; CTCFL; ENSG00000124092; HLA -A*32:01
GQKEAAKGW

SEQ ID NO: 1709 - protein, 10 aa, Homo sapiens
  Table 1.2; CTCFL; ENSG00000124092; HLA -A*03:01,HLA-A*03:02,HLA-A*11:01
GTMKIHILQK

SEQ ID NO: 1710 - protein, 8 aa, Homo sapiens
  Table 1.2; CTCFL; ENSG00000124092; HLA -B*08:01,HLA-B*35:01,HLA-B*35:03,HLA-B*51:01
HALEENVM

SEQ ID NO: 1711 - protein, 9 aa, Homo sapiens
  Table 1.2; CTCFL; ENSG00000124092; HLA -A*02:01,HLA-A*68:02,HLA-B*13:02,HLA-B*35:03,HLA-B*38:01, HLA-B*39:01,HLA-B*51:01,HLA-B*54:01,HLA-B*55:01,HLA-C*03:03, HLA-C*05:01,HLA-C*12:03
HALEENVMV

SEQ ID NO: 1712 - protein, 10 aa, Homo sapiens
  Table 1.2; CTCFL; ENSG00000124092; HLA -B*54:01,HLA-B*56:01
HALEENVMVA

SEQ ID NO: 1713 - protein, 8 aa, Homo sapiens
  Table 1.2; CTCFL; ENSG00000124092; HLA -A*23:01,HLA-A*30:01,HLA-A*32:01,HLA-B*07:02,HLA-B*08:01, HLA-B*13:02,HLA-B*15:03,HLA-B*18:01,HLA-B*35:01,HLA-B*35:03, HLA-B*37:01,HLA-B*38:01,HLA-B*39:01,HLA-B*40:01,HLA-B*40:02,
  HLA-B*46:01,HLA-B*51:01,HLA-B*54:01,HLA-B*58:01,HLA-C*01:02, HLA-C*02:02,HLA-C*03:03,HLA-C*03:04,HLA-C*05:01,HLA-C*07:02, HLA-C*07:04,HLA-C*12:03,HLA-C*14:02,HLA-C*16:01,HLA-C*16:02, HLA-C*16:04
HAYSAAEL

SEQ ID NO: 1714 - protein, 9 aa, Homo sapiens
  Table 1.2; CTCFL; ENSG00000124092; HLA -A*03:01,HLA-A*03:02,HLA-A*11:01,HLA-A*33:01,HLA-A*33:03, HLA-A*68:01,HLA-B*27:02,HLA-B*27:05,HLA-B*57:01,HLA-C*07:06
HAYSAAELK

SEQ ID NO: 1715 - protein, 10 aa, Homo sapiens
  Table 1.2; CTCFL; ENSG00000124092; HLA -B*51:01,HLA-B*54:01
HAYSAAELKC

SEQ ID NO: 1716 - protein, 11 aa, Homo sapiens
  Table 1.2; CTCFL; ENSG00000124092; HLA -A*33:01,HLA-A*33:03
HAYSAAELKCR

SEQ ID NO: 1717 - protein, 8 aa, Homo sapiens
  Table 1.2; CTCFL; ENSG00000124092; HLA -A*68:01
HCATIIAR

SEQ ID NO: 1718 - protein, 9 aa, Homo sapiens
  Table 1.2; CTCFL; ENSG00000124092; HLA -A*03:02
HCATIIARK

SEQ ID NO: 1719 - protein, 9 aa, Homo sapiens
  Table 1.2; CTCFL; ENSG00000124092; HLA -A*02:01,HLA-A*02:03,HLA-A*02:04,HLA-A*30:01,HLA-A*68:02, HLA-B*13:02,HLA-B*49:01,HLA-B*51:01
HDANFIPTV

SEQ ID NO: 1720 - protein, 10 aa, Homo sapiens
  Table 1.2; CTCFL; ENSG00000124092; HLA -A*25:01,HLA-A*26:01,HLA-A*29:02,HLA-A*30:02,HLA-B*15:03, HLA-B*18:01,HLA-B*27:02,HLA-B*35:01,HLA-B*44:03,HLA-C*07:01
HDANFIPTVY

SEQ ID NO: 1721 - protein, 9 aa, Homo sapiens
  Table 1.2; CTCFL; ENSG00000124092; HLA -A*23:01,HLA-A*24:02,HLA-B*35:03,HLA-C*14:02
HFTSEAVEL

SEQ ID NO: 1722 - protein, 8 aa, Homo sapiens
  Table 1.2; CTCFL; ENSG00000124092; HLA -B*18:01,HLA-B*39:01
HGENVPKY

SEQ ID NO: 1723 - protein, 9 aa, Homo sapiens
  Table 1.2; CTCFL; ENSG00000124092; HLA -A*03:01
HMKTHTSEK

SEQ ID NO: 1724 - protein, 9 aa, Homo sapiens
  Table 1.2; CTCFL; ENSG00000124092; HLA -A*31:01,HLA-A*33:01,HLA-A*33:03,HLA-A*68:01,HLA-C*07:06
HVNTHTGTR

SEQ ID NO: 1725 - protein, 11 aa, Homo sapiens
  Table 1.2; CTCFL; ENSG00000124092; HLA -A*03:02
ILQKHGENVPK

SEQ ID NO: 1726 - protein, 9 aa, Homo sapiens
  Table 1.2; CTCFL; ENSG00000124092; HLA -A*23:01,HLA-A*24:02
ILTLQTVHF

SEQ ID NO: 1727 - protein, 9 aa, Homo sapiens
  Table 1.2; CTCFL; ENSG00000124092; HLA -B*13:02,HLA-B*27:05,HLA-B*38:01,HLA-B*39:01
IQQQEGVQV

SEQ ID NO: 1728 - protein, 10 aa, Homo sapiens
  Table 1.2; CTCFL; ENSG00000124092; HLA -B*13:02
IQQQEGVQVV

SEQ ID NO: 1729 - protein, 11 aa, Homo sapiens
  Table 1.2; CTCFL; ENSG00000124092; HLA -A*30:01,HLA-B*13:02
IQQQEGVQVVV

SEQ ID NO: 1730 - protein, 8 aa, Homo sapiens
  Table 1.2; CTCFL; ENSG00000124092; HLA -B*15:01,HLA-B*58:01
ISIQQELY

SEQ ID NO: 1731 - protein, 8 aa, Homo sapiens
  Table 1.2; CTCFL; ENSG00000124092; HLA -B*58:01
ISVLSEQF

SEQ ID NO: 1732 - protein, 10 aa, Homo sapiens
  Table 1.2; CTCFL; ENSG00000124092; HLA -A*11:01
ISVLSEQFTK

SEQ ID NO: 1733 - protein, 10 aa, Homo sapiens
  Table 1.2; CTCFL; ENSG00000124092; HLA -B*40:01
KEAANGDEAA

SEQ ID NO: 1734 - protein, 11 aa, Homo sapiens
  Table 1.2; CTCFL; ENSG00000124092; HLA -B*40:01
KEAANGDEAAA

SEQ ID NO: 1735 - protein, 10 aa, Homo sapiens
  Table 1.2; CTCFL; ENSG00000124092; HLA -B*40:01
KEEVDEGVTC

SEQ ID NO: 1736 - protein, 10 aa, Homo sapiens
  Table 1.2; CTCFL; ENSG00000124092; HLA -A*30:01,HLA-B*37:01,HLA-B*40:02,HLA-B*49:01
KEQLFFVETM

SEQ ID NO: 1737 - protein, 9 aa, Homo sapiens
  Table 1.2; CTCFL; ENSG00000124092; HLA -A*31:01
KGFSRWINL

SEQ ID NO: 1738 - protein, 9 aa, Homo sapiens
  Table 1.2; CTCFL; ENSG00000124092; HLA -A*03:01,HLA-A*30:02,HLA-B*39:01,HLA-B*58:01
KHGENVPKY

SEQ ID NO: 1739 - protein, 9 aa, Homo sapiens
  Table 1.2; CTCFL; ENSG00000124092; HLA -A*31:01
KQLLNAHFR

SEQ ID NO: 1740 - protein, 8 aa, Homo sapiens
  Table 1.2; CTCFL; ENSG00000124092; HLA -B*40:02,HLA-B*57:01,HLA-B*58:01
KTFRTVTL

SEQ ID NO: 1741 - protein, 9 aa, Homo sapiens
  Table 1.2; CTCFL; ENSG00000124092; HLA -A*02:04,HLA-A*03:01,HLA-A*31:01,HLA-A*68:02,HLA-B*57:01, HLA-B*58:01
KTFRTVTLL

SEQ ID NO: 1742 - protein, 10 aa, Homo sapiens
  Table 1.2; CTCFL; ENSG00000124092; HLA -A*03:01,HLA-A*31:01,HLA-B*57:01
KTFRTVTLLR

SEQ ID NO: 1743 - protein, 9 aa, Homo sapiens
  Table 1.2; CTCFL; ENSG00000124092; HLA -A*32:01
KTKGAKGTF

SEQ ID NO: 1744 - protein, 10 aa, Homo sapiens
  Table 1.2; CTCFL; ENSG00000124092; HLA -A*23:01,HLA-A*24:02,HLA-B*15:03,HLA-B*27:05,HLA-B*40:01, HLA-C*06:02
KYASVEASKL

SEQ ID NO: 1745 - protein, 11 aa, Homo sapiens
  Table 1.2; CTCFL; ENSG00000124092; HLA -A*31:01,HLA-C*06:02
KYASVEASKLK

SEQ ID NO: 1746 - protein, 9 aa, Homo sapiens
  Table 1.2; CTCFL; ENSG00000124092; HLA -A*23:01,HLA-A*24:02
KYILTLQTV

SEQ ID NO: 1747 - protein, 11 aa, Homo sapiens
  Table 1.2; CTCFL; ENSG00000124092; HLA -A*23:01,HLA-A*24:02
KYILTLQTVHF

SEQ ID NO: 1748 - protein, 8 aa, Homo sapiens
  Table 1.2; CTCFL; ENSG00000124092; HLA -C*05:01
LAETTGLI

SEQ ID NO: 1749 - protein, 9 aa, Homo sapiens
  Table 1.2; CTCFL; ENSG00000124092; HLA -A*01:01
LAETTGLIK

SEQ ID NO: 1750 - protein, 10 aa, Homo sapiens
  Table 1.2; CTCFL; ENSG00000124092; HLA -A*30:01,HLA-B*18:01
LEAERTSGAF

SEQ ID NO: 1751 - protein, 10 aa, Homo sapiens
  Table 1.2; CTCFL; ENSG00000124092; HLA -A*30:01,HLA-B*40:01
LEEEQEKNQL

SEQ ID NO: 1752 - protein, 11 aa, Homo sapiens
  Table 1.2; CTCFL; ENSG00000124092; HLA -B*40:01
LEEEQEKNQLL

SEQ ID NO: 1753 - protein, 8 aa, Homo sapiens
  Table 1.2; CTCFL; ENSG00000124092; HLA -B*49:01
LEEEVELV

SEQ ID NO: 1754 - protein, 9 aa, Homo sapiens
  Table 1.2; CTCFL; ENSG00000124092; HLA -A*30:01,HLA-B*18:01,HLA-B*40:01,HLA-B*49:01
LEEEVELVL

SEQ ID NO: 1755 - protein, 9 aa, Homo sapiens
  Table 1.2; CTCFL; ENSG00000124092; HLA -A*30:01,HLA-B*37:01,HLA-B*40:01,HLA-B*40:02,HLA-B*44:02, HLA-B*44:03,HLA-B*49:01
LEEGPRQSL

SEQ ID NO: 1756 - protein, 8 aa, Homo sapiens
  Table 1.2; CTCFL; ENSG00000124092; HLA -B*18:01,HLA-B*49:01
LEENVMVA

SEQ ID NO: 1757 - protein, 9 aa, Homo sapiens
  Table 1.2; CTCFL; ENSG00000124092; HLA -B*44:02,HLA-B*44:03
LELMPEKGL

SEQ ID NO: 1758 - protein, 9 aa, Homo sapiens
  Table 1.2; CTCFL; ENSG00000124092; HLA -B*38:01,HLA-B*39:01
LHAYSAAEL

SEQ ID NO: 1759 - protein, 9 aa, Homo sapiens
  Table 1.2; CTCFL; ENSG00000124092; HLA -A*29:02
LLNAHFRKY

SEQ ID NO: 1760 - protein, 9 aa, Homo sapiens
  Table 1.2; CTCFL; ENSG00000124092; HLA -B*13:02,HLA-B*38:01
LQDMSLLSI

SEQ ID NO: 1761 - protein, 9 aa, Homo sapiens
  Table 1.2; CTCFL; ENSG00000124092; HLA -B*13:02
LQQCVAISI

SEQ ID NO: 1762 - protein, 8 aa, Homo sapiens
  Table 1.2; CTCFL; ENSG00000124092; HLA -A*23:01
LTLQTVHF

SEQ ID NO: 1763 - protein, 11 aa, Homo sapiens
  Table 1.2; CTCFL; ENSG00000124092; HLA -A*03:02
LVLAPSEESEK

SEQ ID NO: 1764 - protein, 9 aa, Homo sapiens
  Table 1.2; CTCFL; ENSG00000124092; HLA -A*24:02
LYSPQEMEV

SEQ ID NO: 1765 - protein, 9 aa, Homo sapiens
  Table 1.2; CTCFL; ENSG00000124092; HLA -B*35:01,HLA-B*35:03,HLA-C*03:03,HLA-C*03:04
MAATEISVL

SEQ ID NO: 1766 - protein, 9 aa, Homo sapiens
  Table 1.2; CTCFL; ENSG00000124092; HLA -B*07:02,HLA-B*15:03,HLA-B*35:01,HLA-B*35:03,HLA-B*39:01, HLA-B*40:01,HLA-B*46:01,HLA-B*51:01,HLA-B*54:01,HLA-C*02:02, HLA-C*03:03,HLA-C*03:04,HLA-C*16:04
MAFVTSGEL

SEQ ID NO: 1767 - protein, 11 aa, Homo sapiens
  Table 1.2; CTCFL; ENSG00000124092; HLA -A*33:01,HLA-A*33:03,HLA-A*68:01,HLA-B*54:01,HLA-C*07:06
MAFVTSGELVR

SEQ ID NO: 1768 - protein, 9 aa, Homo sapiens
  Table 1.2; CTCFL; ENSG00000124092; HLA -B*54:01
MCKYASVEA

SEQ ID NO: 1769 - protein, 9 aa, Homo sapiens
  Table 1.2; CTCFL; ENSG00000124092; HLA -A*30:01,HLA-B*18:01,HLA-B*37:01,HLA-B*40:01,HLA-B*40:02, HLA-B*44:02,HLA-B*44:03,HLA-B*49:01
MEVLQFHAL

SEQ ID NO: 1770 - protein, 10 aa, Homo sapiens
  Table 1.2; CTCFL; ENSG00000124092; HLA -A*24:02
MFTSSRMSSF

SEQ ID NO: 1771 - protein, 8 aa, Homo sapiens
  Table 1.2; CTCFL; ENSG00000124092; HLA -C*07:01
MLLNTMDK

SEQ ID NO: 1772 - protein, 9 aa, Homo sapiens
  Table 1.2; CTCFL; ENSG00000124092; HLA -B*27:05,HLA-B*35:03,HLA-B*38:01,HLA-B*55:01
MVASEDSKL

SEQ ID NO: 1773 - protein, 11 aa, Homo sapiens
  Table 1.2; CTCFL; ENSG00000124092; HLA -A*26:01,HLA-A*68:02
MVASEDSKLAV

SEQ ID NO: 1774 - protein, 11 aa, Homo sapiens
  Table 1.2; CTCFL; ENSG00000124092; HLA -A*03:02
NLHAYSAAELK

SEQ ID NO: 1775 - protein, 9 aa, Homo sapiens
  Table 1.2; CTCFL; ENSG00000124092; HLA -A*30:02,HLA-C*16:01
NTHTGTRPY

SEQ ID NO: 1776 - protein, 11 aa, Homo sapiens
  Table 1.2; CTCFL; ENSG00000124092; HLA -B*27:05
NVMVASEDSKL

SEQ ID NO: 1777 - protein, 10 aa, Homo sapiens
  Table 1.2; CTCFL; ENSG00000124092; HLA -A*68:01,HLA-B*27:02
PTAGQADAEK

SEQ ID NO: 1778 - protein, 10 aa, Homo sapiens
  Table 1.2; CTCFL; ENSG00000124092; HLA -A*01:01,HLA-A*30:02
QCSYASRDTY

SEQ ID NO: 1779 - protein, 8 aa, Homo sapiens
  Table 1.2; CTCFL; ENSG00000124092; HLA -A*30:01,HLA-B*40:01,HLA-B*49:01
QEGVQVVV

SEQ ID NO: 1780 - protein, 10 aa, Homo sapiens
  Table 1.2; CTCFL; ENSG00000124092; HLA -A*33:03
QEKNQLLAER

SEQ ID NO: 1781 - protein, 9 aa, Homo sapiens
  Table 1.2; CTCFL; ENSG00000124092; HLA -A*30:01,HLA-B*18:01,HLA-B*37:01,HLA-B*40:01,HLA-B*44:02, HLA-B*44:03,HLA-B*49:01
QELYSPQEM

SEQ ID NO: 1782 - protein, 8 aa, Homo sapiens
  Table 1.2; CTCFL; ENSG00000124092; HLA -A*30:01,HLA-B*18:01,HLA-B*37:01,HLA-B*44:02,HLA-B*44:03
QEMEVLQF

SEQ ID NO: 1783 - protein, 9 aa, Homo sapiens
  Table 1.2; CTCFL; ENSG00000124092; HLA -B*44:02
QEMEVLQFH

SEQ ID NO: 1784 - protein, 11 aa, Homo sapiens
  Table 1.2; CTCFL; ENSG00000124092; HLA -A*30:01,HLA-B*40:01,HLA-B*44:02,HLA-B*44:03,HLA-B*49:01
QEMEVLQFHAL

SEQ ID NO: 1785 - protein, 9 aa, Homo sapiens
  Table 1.2; CTCFL; ENSG00000124092; HLA -B*56:01
QPTAGQADA

SEQ ID NO: 1786 - protein, 8 aa, Homo sapiens
  Table 1.2; CTCFL; ENSG00000124092; HLA -B*13:02
QQCVAISI

SEQ ID NO: 1787 - protein, 9 aa, Homo sapiens
  Table 1.2; CTCFL; ENSG00000124092; HLA -A*30:01,HLA-B*13:02,HLA-B*27:05,HLA-B*38:01,HLA-B*39:01, HLA-C*05:01
QQEGVQVVV

SEQ ID NO: 1788 - protein, 10 aa, Homo sapiens
  Table 1.2; CTCFL; ENSG00000124092; HLA -B*39:01
QQELYSPQEM

SEQ ID NO: 1789 - protein, 8 aa, Homo sapiens
  Table 1.2; CTCFL; ENSG00000124092; HLA -B*13:02
QQQEGVQV

SEQ ID NO: 1790 - protein, 9 aa, Homo sapiens
  Table 1.2; CTCFL; ENSG00000124092; HLA -A*02:01,HLA-A*02:03,HLA-B*13:02,HLA-B*15:01,HLA-B*27:05, HLA-B*38:01,HLA-B*39:01
QQQEGVQVV

SEQ ID NO: 1791 - protein, 10 aa, Homo sapiens
  Table 1.2; CTCFL; ENSG00000124092; HLA -A*30:01,HLA-B*13:02,HLA-B*38:01,HLA-B*39:01
QQQEGVQVVV

SEQ ID NO: 1792 - protein, 9 aa, Homo sapiens
  Table 1.2; CTCFL; ENSG00000124092; HLA -A*03:02,HLA-A*11:01,HLA-A*33:03,HLA-A*68:01
QTILKEATK

SEQ ID NO: 1793 - protein, 10 aa, Homo sapiens
  Table 1.2; CTCFL; ENSG00000124092; HLA -A*68:02
QTVHFTSEAV

SEQ ID NO: 1794 - protein, 11 aa, Homo sapiens
  Table 1.2; CTCFL; ENSG00000124092; HLA -A*31:01
RQKQLLNAHFR

SEQ ID NO: 1795 - protein, 9 aa, Homo sapiens
  Table 1.2; CTCFL; ENSG00000124092; HLA -A*01:01,HLA-A*02:07,HLA-B*13:02,HLA-C*05:01
RSDEIVLTV

SEQ ID NO: 1796 - protein, 9 aa, Homo sapiens
  Table 1.2; CTCFL; ENSG00000124092; HLA -B*57:01
RSHTGERPF

SEQ ID NO: 1797 - protein, 10 aa, Homo sapiens
  Table 1.2; CTCFL; ENSG00000124092; HLA -B*58:01
RVKEEVDEGV

SEQ ID NO: 1798 - protein, 9 aa, Homo sapiens
  Table 1.2; CTCFL; ENSG00000124092; HLA -A*24:02,HLA-A*31:01
RYALIQHQK

SEQ ID NO: 1799 - protein, 10 aa, Homo sapiens
  Table 1.2; CTCFL; ENSG00000124092; HLA -A*31:01
RYCSAVFHER

SEQ ID NO: 1800 - protein, 9 aa, Homo sapiens
  Table 1.2; CTCFL; ENSG00000124092; HLA -A*26:01,HLA-A*29:02,HLA-A*30:02,HLA-A*32:01,HLA-C*02:02, HLA-C*16:01,HLA-C*16:02
SAAELKCRY

SEQ ID NO: 1801 - protein, 8 aa, Homo sapiens
  Table 1.2; CTCFL; ENSG00000124092; HLA -B*08:01,HLA-C*07:01,HLA-C*12:03,HLA-C*16:01
SAVFHERY

SEQ ID NO: 1802 - protein, 8 aa, Homo sapiens
  Table 1.2; CTCFL; ENSG00000124092; HLA -B*37:01
SDEIVLTV

SEQ ID NO: 1803 - protein, 9 aa, Homo sapiens
  Table 1.2; CTCFL; ENSG00000124092; HLA -A*30:01,HLA-B*40:01,HLA-B*44:02,HLA-B*44:03,HLA-B*49:01
SEAVELQDM

SEQ ID NO: 1804 - protein, 11 aa, Homo sapiens
  Table 1.2; CTCFL; ENSG00000124092; HLA -A*30:01,HLA-B*40:01
SEAVELQDMSL

SEQ ID NO: 1805 - protein, 8 aa, Homo sapiens
  Table 1.2; CTCFL; ENSG00000124092; HLA -B*37:01,HLA-B*49:01
SEDSKLAV

SEQ ID NO: 1806 - protein, 10 aa, Homo sapiens
  Table 1.2; CTCFL; ENSG00000124092; HLA -A*30:01,HLA-B*37:01,HLA-B*38:01,HLA-B*40:01,HLA-B*40:02, HLA-B*44:02,HLA-B*44:03,HLA-B*49:01
SEDSKLAVSL

SEQ ID NO: 1807 - protein, 9 aa, Homo sapiens
  Table 1.2; CTCFL; ENSG00000124092; HLA -A*30:01,HLA-B*40:01,HLA-B*40:02,HLA-B*44:02,HLA-B*44:03
SEESEKYIL

SEQ ID NO: 1808 - protein, 11 aa, Homo sapiens
  Table 1.2; CTCFL; ENSG00000124092; HLA -A*30:01,HLA-B*40:01
SEESEKYILTL

SEQ ID NO: 1809 - protein, 9 aa, Homo sapiens
  Table 1.2; CTCFL; ENSG00000124092; HLA -B*37:01,HLA-B*40:02
SEKPHLCHL

SEQ ID NO: 1810 - protein, 8 aa, Homo sapiens
  Table 1.2; CTCFL; ENSG00000124092; HLA -A*30:01,HLA-B*18:01,HLA-B*40:02
SEKYILTL

SEQ ID NO: 1811 - protein, 10 aa, Homo sapiens
  Table 1.2; CTCFL; ENSG00000124092; HLA -B*44:02,HLA-B*44:03
SEQFTKIKEL

SEQ ID NO: 1812 - protein, 9 aa, Homo sapiens
  Table 1.2; CTCFL; ENSG00000124092; HLA -B*35:03
SGAFQDSVL

SEQ ID NO: 1813 - protein, 9 aa, Homo sapiens
  Table 1.2; CTCFL; ENSG00000124092; HLA -C*16:02
SGTMKIHIL

SEQ ID NO: 1814 - protein, 8 aa, Homo sapiens
  Table 1.2; CTCFL; ENSG00000124092; HLA -A*02:03
SLAETTGL

SEQ ID NO: 1815 - protein, 9 aa, Homo sapiens
  Table 1.2; CTCFL; ENSG00000124092; HLA -A*02:01,HLA-A*02:03,HLA-B*13:02
SLAETTGLI

SEQ ID NO: 1816 - protein, 10 aa, Homo sapiens
  Table 1.2; CTCFL; ENSG00000124092; HLA -A*03:01,HLA-A*03:02,HLA-A*11:01,HLA-A*68:01
SLAETTGLIK

SEQ ID NO: 1817 - protein, 11 aa, Homo sapiens
  Table 1.2; CTCFL; ENSG00000124092; HLA -A*02:01,HLA-A*02:03,HLA-A*02:04,HLA-A*02:07,HLA-A*03:01, HLA-A*03:02,HLA-B*55:01
SLAETTGLIKL

SEQ ID NO: 1818 - protein, 11 aa, Homo sapiens
  Table 1.2; CTCFL; ENSG00000124092; HLA -A*02:01,HLA-A*02:04,HLA-A*02:07
SLLSIQQQEGV

SEQ ID NO: 1819 - protein, 8 aa, Homo sapiens
  Table 1.2; CTCFL; ENSG00000124092; HLA -B*07:02,HLA-B*35:03
SPQEMEVL

SEQ ID NO: 1820 - protein, 10 aa, Homo sapiens
  Table 1.2; CTCFL; ENSG00000124092; HLA -B*35:01
SPQEMEVLQF

SEQ ID NO: 1821 - protein, 9 aa, Homo sapiens
  Table 1.2; CTCFL; ENSG00000124092; HLA -A*68:01,HLA-C*07:06
SPSELEAER

SEQ ID NO: 1822 - protein, 8 aa, Homo sapiens
  Table 1.2; CTCFL; ENSG00000124092; HLA -B*27:05
SRMSSFNR

SEQ ID NO: 1823 - protein, 9 aa, Homo sapiens
  Table 1.2; CTCFL; ENSG00000124092; HLA -A*31:01,HLA-A*33:01,HLA-A*33:03
SSRMSSFNR

SEQ ID NO: 1824 - protein, 8 aa, Homo sapiens
  Table 1.2; CTCFL; ENSG00000124092; HLA -A*03:02
SVEASKLK

SEQ ID NO: 1825 - protein, 9 aa, Homo sapiens
  Table 1.2; CTCFL; ENSG00000124092; HLA -A*02:01,HLA-A*02:07,HLA-B*15:01,HLA-B*35:03,HLA-B*39:01, HLA-B*40:01,HLA-B*55:01
SVLEEEVEL

SEQ ID NO: 1826 - protein, 9 aa, Homo sapiens
  Table 1.2; CTCFL; ENSG00000124092; HLA -A*03:01,HLA-A*03:02,HLA-A*11:01,HLA-C*07:06
SVLSEQFTK

SEQ ID NO: 1827 - protein, 10 aa, Homo sapiens
  Table 1.2; CTCFL; ENSG00000124092; HLA -A*02:04,HLA-A*25:01,HLA-A*26:01,HLA-A*68:02
SVLSEQFTKI

SEQ ID NO: 1828 - protein, 11 aa, Homo sapiens
  Table 1.2; CTCFL; ENSG00000124092; HLA -A*11:01
SVLSEQFTKIK

SEQ ID NO: 1829 - protein, 8 aa, Homo sapiens
  Table 1.2; CTCFL; ENSG00000124092; HLA -A*30:02,HLA-A*32:01,HLA-C*14:02,HLA-C*16:01
SYASRDTY

SEQ ID NO: 1830 - protein, 10 aa, Homo sapiens
  Table 1.2; CTCFL; ENSG00000124092; HLA -A*24:02
SYASRDTYKL

SEQ ID NO: 1831 - protein, 8 aa, Homo sapiens
  Table 1.2; CTCFL; ENSG00000124092; HLA -B*08:01
TARVKEEV

SEQ ID NO: 1832 - protein, 10 aa, Homo sapiens
  Table 1.2; CTCFL; ENSG00000124092; HLA -A*30:01,HLA-B*18:01,HLA-B*27:02,HLA-B*38:01,HLA-B*40:01, HLA-B*44:02,HLA-B*44:03,HLA-C*16:04
TEISVLSEQF

SEQ ID NO: 1833 - protein, 8 aa, Homo sapiens
  Table 1.2; CTCFL; ENSG00000124092; HLA -A*23:01
TFRTVTLL

SEQ ID NO: 1834 - protein, 9 aa, Homo sapiens
  Table 1.2; CTCFL; ENSG00000124092; HLA -A*31:01,HLA-A*33:03
TFRTVTLLR

SEQ ID NO: 1835 - protein, 9 aa, Homo sapiens
  Table 1.2; CTCFL; ENSG00000124092; HLA -B*38:01,HLA-B*39:01
THTSEKPHL

SEQ ID NO: 1836 - protein, 9 aa, Homo sapiens
  Table 1.2; CTCFL; ENSG00000124092; HLA -B*08:01
TIIARKSDL

SEQ ID NO: 1837 - protein, 9 aa, Homo sapiens
  Table 1.2; CTCFL; ENSG00000124092; HLA -A*03:01
TMKIHILQK

SEQ ID NO: 1838 - protein, 8 aa, Homo sapiens
  Table 1.2; CTCFL; ENSG00000124092; HLA -A*30:01,HLA-B*13:02,HLA-B*38:01,HLA-C*06:02
TQSGTMKI

SEQ ID NO: 1839 - protein, 10 aa, Homo sapiens
  Table 1.2; CTCFL; ENSG00000124092; HLA -B*13:02,HLA-B*38:01
TQSGTMKIHI

SEQ ID NO: 1840 - protein, 9 aa, Homo sapiens
  Table 1.2; CTCFL; ENSG00000124092; HLA -B*27:05,HLA-B*39:01,HLA-C*06:02
TRFTQSGTM

SEQ ID NO: 1841 - protein, 10 aa, Homo sapiens
  Table 1.2; CTCFL; ENSG00000124092; HLA -B*27:05
TRFTQSGTMK

SEQ ID NO: 1842 - protein, 9 aa, Homo sapiens
  Table 1.2; CTCFL; ENSG00000124092; HLA -A*31:01,HLA-A*33:01,HLA-A*33:03,HLA-A*68:01
TSGELVRHR

SEQ ID NO: 1843 - protein, 9 aa, Homo sapiens
  Table 1.2; CTCFL; ENSG00000124092; HLA -A*68:02
TTARVKEEV

SEQ ID NO: 1844 - protein, 9 aa, Homo sapiens
  Table 1.2; CTCFL; ENSG00000124092; HLA -A*02:07,HLA-A*23:01,HLA-A*24:02,HLA-A*30:01,HLA-A*32:01, HLA-A*68:02,HLA-B*07:02,HLA-B*13:02,HLA-B*15:01,HLA-B*15:03, HLA-B*27:02,HLA-B*27:05,HLA-B*35:01,HLA-B*35:03,HLA-B*38:01,
  HLA-B*39:01,HLA-B*40:01,HLA-B*46:01,HLA-B*51:01,HLA-B*58:01, HLA-C*01:02,HLA-C*02:02,HLA-C*03:03,HLA-C*03:04,HLA-C*05:01, HLA-C*07:02,HLA-C*07:06,HLA-C*12:03,HLA-C*14:02,HLA-C*16:01, HLA-C*16:02,HLA-C*16:04
VAISIQQEL

SEQ ID NO: 1845 - protein, 10 aa, Homo sapiens
  Table 1.2; CTCFL; ENSG00000124092; HLA -A*01:01,HLA-A*23:01,HLA-A*25:01,HLA-A*26:01,HLA-A*29:02, HLA-A*30:02,HLA-B*15:01,HLA-B*15:03,HLA-B*35:01,HLA-B*46:01, HLA-B*57:01,HLA-B*58:01,HLA-C*02:02,HLA-C*16:04
VAISIQQELY

SEQ ID NO: 1846 - protein, 8 aa, Homo sapiens
  Table 1.2; CTCFL; ENSG00000124092; HLA -C*03:04,HLA-C*05:01
VASEDSKL

SEQ ID NO: 1847 - protein, 9 aa, Homo sapiens
  Table 1.2; CTCFL; ENSG00000124092; HLA -A*30:01,HLA-B*37:01
VDEGVTCEM

SEQ ID NO: 1848 - protein, 9 aa, Homo sapiens
  Table 1.2; CTCFL; ENSG00000124092; HLA -A*30:01,HLA-B*37:01,HLA-B*40:01,HLA-B*40:02,HLA-B*49:01
VELQDMSLL

SEQ ID NO: 1849 - protein, 9 aa, Homo sapiens
  Table 1.2; CTCFL; ENSG00000124092; HLA -A*24:02
VFHERYALI

SEQ ID NO: 1850 - protein, 8 aa, Homo sapiens
  Table 1.2; CTCFL; ENSG00000124092; HLA -B*39:01
VHFTSEAV

SEQ ID NO: 1851 - protein, 10 aa, Homo sapiens
  Table 1.2; CTCFL; ENSG00000124092; HLA -B*27:05,HLA-B*38:01,HLA-B*39:01
VHFTSEAVEL

SEQ ID NO: 1852 - protein, 9 aa, Homo sapiens
  Table 1.2; CTCFL; ENSG00000124092; HLA -A*29:02,HLA-A*30:02
VHMRNLHAY

SEQ ID NO: 1853 - protein, 10 aa, Homo sapiens
  Table 1.2; CTCFL; ENSG00000124092; HLA -A*03:02,HLA-B*27:02
VLAPSEESEK

SEQ ID NO: 1854 - protein, 11 aa, Homo sapiens
  Table 1.2; CTCFL; ENSG00000124092; HLA -A*01:01,HLA-A*25:01,HLA-A*26:01,HLA-A*29:02,HLA-A*30:02, HLA-A*32:01,HLA-B*15:01,HLA-B*15:03,HLA-B*46:01,HLA-B*55:01, HLA-B*58:01,HLA-C*16:04
VLAPSEESEKY

SEQ ID NO: 1855 - protein, 8 aa, Homo sapiens
  Table 1.2; CTCFL; ENSG00000124092; HLA -C*05:01
VLEEEVEL

SEQ ID NO: 1856 - protein, 9 aa, Homo sapiens
  Table 1.2; CTCFL; ENSG00000124092; HLA -A*02:01,HLA-A*02:07
VLEEEVELV

SEQ ID NO: 1857 - protein, 8 aa, Homo sapiens
  Table 1.2; CTCFL; ENSG00000124092; HLA -A*03:02,HLA-A*11:01
VLSEQFTK

SEQ ID NO: 1858 - protein, 9 aa, Homo sapiens
  Table 1.2; CTCFL; ENSG00000124092; HLA -A*02:01,HLA-A*02:03,HLA-A*02:04,HLA-A*02:07,HLA-A*23:01, HLA-A*24:02,HLA-A*30:01,HLA-A*68:02,HLA-B*13:02,HLA-B*49:01, HLA-B*55:01
VLSEQFTKI

SEQ ID NO: 1859 - protein, 9 aa, Homo sapiens
  Table 1.2; CTCFL; ENSG00000124092; HLA -A*02:01,HLA-A*02:03
VLTVSNSNV

SEQ ID NO: 1860 - protein, 9 aa, Homo sapiens
  Table 1.2; CTCFL; ENSG00000124092; HLA -B*15:01
VQQPGPGLL

SEQ ID NO: 1861 - protein, 10 aa, Homo sapiens
  Table 1.2; CTCFL; ENSG00000124092; HLA -A*23:01,HLA-A*25:01,HLA-A*32:01,HLA-B*58:01
VQQPGPGLLW

SEQ ID NO: 1862 - protein, 11 aa, Homo sapiens
  Table 1.2; CTCFL; ENSG00000124092; HLA -A*11:01
VSLAETTGLIK

SEQ ID NO: 1863 - protein, 9 aa, Homo sapiens
  Table 1.2; CTCFL; ENSG00000124092; HLA -A*11:01
VTSGELVRH

SEQ ID NO: 1864 - protein, 10 aa, Homo sapiens
  Table 1.2; CTCFL; ENSG00000124092; HLA -A*11:01,HLA-A*31:01,HLA-A*68:01,HLA-C*07:06
VTSGELVRHR

SEQ ID NO: 1865 - protein, 11 aa, Homo sapiens
  Table 1.2; CTCFL; ENSG00000124092; HLA -B*57:01
VVQQPGPGLLW

SEQ ID NO: 1866 - protein, 9 aa, Homo sapiens
  Table 1.2; CTCFL; ENSG00000124092; HLA -A*02:04,HLA-A*24:02,HLA-A*68:02,HLA-B*27:05,HLA-B*35:03, HLA-B*38:01,HLA-B*40:01,HLA-C*02:02
YASRDTYKL

SEQ ID NO: 1867 - protein, 9 aa, Homo sapiens
  Table 1.2; CTCFL; ENSG00000124092; HLA -A*23:01,HLA-A*25:01,HLA-A*30:01,HLA-B*07:02,HLA-B*13:02, HLA-B*15:03,HLA-B*27:05,HLA-B*35:01,HLA-B*35:03,HLA-B*38:01, HLA-B*39:01,HLA-B*40:01,HLA-B*40:02,HLA-B*46:01,HLA-B*51:01,
  HLA-B*55:01,HLA-B*58:01,HLA-C*02:02,HLA-C*03:03,HLA-C*03:04, HLA-C*05:01,HLA-C*06:02,HLA-C*07:04,HLA-C*12:03,HLA-C*16:01, HLA-C*16:02,HLA-C*16:04
YASVEASKL

SEQ ID NO: 1868 - protein, 10 aa, Homo sapiens
  Table 1.2; CTCFL; ENSG00000124092; HLA -B*27:02
YASVEASKLK

SEQ ID NO: 1869 - protein, 9 aa, Homo sapiens
  Table 1.2; CTCFL; ENSG00000124092; HLA -A*31:01,HLA-A*33:01,HLA-A*33:03,HLA-A*68:01
YCSAVFHER

SEQ ID NO: 1870 - protein, 10 aa, Homo sapiens
  Table 1.2; CTCFL; ENSG00000124092; HLA -A*01:01,HLA-A*29:02
YCSAVFHERY

SEQ ID NO: 1871 - protein, 10 aa, Homo sapiens
  Table 1.2; CTCFL; ENSG00000124092; HLA -B*38:01
YHDANFIPTV

SEQ ID NO: 1872 - protein, 8 aa, Homo sapiens
  Table 1.2; CTCFL; ENSG00000124092; HLA -A*02:01,HLA-B*13:02,HLA-B*51:01
YILTLQTV

SEQ ID NO: 1873 - protein, 10 aa, Homo sapiens
  Table 1.2; CTCFL; ENSG00000124092; HLA -A*23:01,HLA-A*24:02
YILTLQTVHF

SEQ ID NO: 1874 - protein, 9 aa, Homo sapiens
  Table 1.2; CTCFL; ENSG00000124092; HLA -A*33:01
YSAAELKCR

SEQ ID NO: 1875 - protein, 10 aa, Homo sapiens
  Table 1.2; CTCFL; ENSG00000124092; HLA -A*01:01,HLA-A*29:02
YSAAELKCRY

SEQ ID NO: 1876 - protein, 8 aa, Homo sapiens
  Table 1.2; CTCFL; ENSG00000124092; HLA -B*51:01
YSPQEMEV

SEQ ID NO: 1877 - protein, 9 aa, Homo sapiens
  Table 1.2; DCAF12L1; ENSG00000198889; HLA -C*03:04
AAADGEGPL

SEQ ID NO: 1878 - protein, 10 aa, Homo sapiens
  Table 1.2; DCAF12L1; ENSG00000198889; HLA -B*40:01,HLA-C*03:04
AAADGEGPLL

SEQ ID NO: 1879 - protein, 11 aa, Homo sapiens
  Table 1.2; DCAF12L1; ENSG00000198889; HLA -A*01:01
AAADGEGPLLL

SEQ ID NO: 1880 - protein, 9 aa, Homo sapiens
  Table 1.2; DCAF12L1; ENSG00000198889; HLA -A*02:07,HLA-A*32:01,HLA-B*38:01,HLA-B*39:01,HLA-B*40:01, HLA-C*03:04,HLA-C*05:01
AADGEGPLL

SEQ ID NO: 1881 - protein, 10 aa, Homo sapiens
  Table 1.2; DCAF12L1; ENSG00000198889; HLA -A*01:01,HLA-B*35:03,HLA-B*38:01,HLA-B*39:01,HLA-B*40:01, HLA-C*04:01,HLA-C*05:01
AADGEGPLLL

SEQ ID NO: 1882 - protein, 11 aa, Homo sapiens
  Table 1.2; DCAF12L1; ENSG00000198889; HLA -A*01:01,HLA-A*03:01,HLA-A*03:02,HLA-A*11:01,HLA-B*27:02
AADGEGPLLLK

SEQ ID NO: 1883 - protein, 11 aa, Homo sapiens
  Table 1.2; DCAF12L1; ENSG00000198889; HLA -A*30:01
ADAESSPSQGL

SEQ ID NO: 1884 - protein, 8 aa, Homo sapiens
  Table 1.2; DCAF12L1; ENSG00000198889; HLA -B*37:01,HLA-B*40:01
ADGEGPLL

SEQ ID NO: 1885 - protein, 9 aa, Homo sapiens
  Table 1.2; DCAF12L1; ENSG00000198889; HLA -A*30:01,HLA-B*37:01,HLA-B*44:02
ADGEGPLLL

SEQ ID NO: 1886 - protein, 10 aa, Homo sapiens
  Table 1.2; DCAF12L1; ENSG00000198889; HLA -A*03:01,HLA-A*11:01,HLA-B*27:02
ADGEGPLLLK

SEQ ID NO: 1887 - protein, 9 aa, Homo sapiens
  Table 1.2; DCAF12L1; ENSG00000198889; HLA -A*30:01,HLA-B*13:02,HLA-B*27:02,HLA-B*27:05,HLA-B*37:01, HLA-B*38:01,HLA-B*39:01,HLA-B*40:01,HLA-B*40:02,HLA-B*44:02, HLA-B*44:03,HLA-B*49:01,HLA-C*16:04
AESSPSQGL

SEQ ID NO: 1888 - protein, 11 aa, Homo sapiens
  Table 1.2; DCAF12L1; ENSG00000198889; HLA -A*30:01,HLA-B*40:01,HLA-B*44:03,HLA-B*49:01,HLA-C*16:04
AESSPSQGLAA

SEQ ID NO: 1889 - protein, 9 aa, Homo sapiens
  Table 1.2; DCAF12L1; ENSG00000198889; HLA -A*32:01
AGGPLPAGL

SEQ ID NO: 1890 - protein, 9 aa, Homo sapiens
  Table 1.2; DCAF12L1; ENSG00000198889; HLA -C*06:02,HLA-C*16:01,HLA-C*16:02
AGSALSRLL

SEQ ID NO: 1891 - protein, 8 aa, Homo sapiens
  Table 1.2; DCAF12L1; ENSG00000198889; HLA -A*31:01
AIINPSNR

SEQ ID NO: 1892 - protein, 9 aa, Homo sapiens
  Table 1.2; DCAF12L1; ENSG00000198889; HLA -A*03:01,HLA-A*03:02,HLA-A*11:01
AIINPSNRK

SEQ ID NO: 1893 - protein, 11 aa, Homo sapiens
  Table 1.2; DCAF12L1; ENSG00000198889; HLA -A*31:01
AIINPSNRKVR

SEQ ID NO: 1894 - protein, 8 aa, Homo sapiens
  Table 1.2; DCAF12L1; ENSG00000198889; HLA -A*02:04
AIYQLPSL

SEQ ID NO: 1895 - protein, 9 aa, Homo sapiens
  Table 1.2; DCAF12L1; ENSG00000198889; HLA -B*13:02,HLA-B*38:01
AQDQQGCGI

SEQ ID NO: 1896 - protein, 11 aa, Homo sapiens
  Table 1.2; DCAF12L1; ENSG00000198889; HLA -A*03:01,HLA-A*03:02,HLA-A*11:01,HLA-A*31:01,HLA-A*33:03, HLA-A*68:01,HLA-B*57:01,HLA-C*07:06
ATLESSSGPAR

SEQ ID NO: 1897 - protein, 9 aa, Homo sapiens
  Table 1.2; DCAF12L1; ENSG00000198889; HLA -A*01:01,HLA-A*03:01,HLA-A*25:01,HLA-A*29:02,HLA-A*30:02
ATYRSMAHY

SEQ ID NO: 1898 - protein, 10 aa, Homo sapiens
  Table 1.2; DCAF12L1; ENSG00000198889; HLA -A*03:01
ATYRSMAHYL

SEQ ID NO: 1899 - protein, 10 aa, Homo sapiens
  Table 1.2; DCAF12L1; ENSG00000198889; HLA -A*32:01
AVGSHSHVSF

SEQ ID NO: 1900 - protein, 11 aa, Homo sapiens
  Table 1.2; DCAF12L1; ENSG00000198889; HLA -B*44:02,HLA-B*57:01
AVSLDGYFHLW

SEQ ID NO: 1901 - protein, 11 aa, Homo sapiens
  Table 1.2; DCAF12L1; ENSG00000198889; HLA -A*30:02
AWHSEVGLPVY

SEQ ID NO: 1902 - protein, 9 aa, Homo sapiens
  Table 1.2; DCAF12L1; ENSG00000198889; HLA -C*04:01
AWLSDTVAV

SEQ ID NO: 1903 - protein, 8 aa, Homo sapiens
  Table 1.2; DCAF12L1; ENSG00000198889; HLA -B*18:01,HLA-B*37:01,HLA-B*40:02
DDMSVYAV

SEQ ID NO: 1904 - protein, 9 aa, Homo sapiens
  Table 1.2; DCAF12L1; ENSG00000198889; HLA -A*11:01,HLA-A*33:01,HLA-A*68:01,HLA-B*27:02
DGEGPLLLK

SEQ ID NO: 1905 - protein, 10 aa, Homo sapiens
  Table 1.2; DCAF12L1; ENSG00000198889; HLA -A*33:01,HLA-A*68:01
DGEGPLLLKR

SEQ ID NO: 1906 - protein, 9 aa, Homo sapiens
  Table 1.2; DCAF12L1; ENSG00000198889; HLA -B*08:01,HLA-B*51:01
DGELRGYAV

SEQ ID NO: 1907 - protein, 11 aa, Homo sapiens
  Table 1.2; DCAF12L1; ENSG00000198889; HLA -A*33:01
DGELRGYAVQR

SEQ ID NO: 1908 - protein, 10 aa, Homo sapiens
  Table 1.2; DCAF12L1; ENSG00000198889; HLA -A*33:01
DLRQDQQNIR

SEQ ID NO: 1909 - protein, 11 aa, Homo sapiens
  Table 1.2; DCAF12L1; ENSG00000198889; HLA -A*33:01
DQQNIRPLCSR

SEQ ID NO: 1910 - protein, 9 aa, Homo sapiens
  Table 1.2; DCAF12L1; ENSG00000198889; HLA -A*26:01,HLA-A*33:01,HLA-A*33:03,HLA-A*68:01,HLA-C*07:06
DTVAVSGSR

SEQ ID NO: 1911 - protein, 9 aa, Homo sapiens
  Table 1.2; DCAF12L1; ENSG00000198889; HLA -A*26:01,HLA-A*68:02
DTVAWHSEV

SEQ ID NO: 1912 - protein, 9 aa, Homo sapiens
  Table 1.2; DCAF12L1; ENSG00000198889; HLA -B*51:01
DVEAIPRAI

SEQ ID NO: 1913 - protein, 9 aa, Homo sapiens
  Table 1.2; DCAF12L1; ENSG00000198889; HLA -A*33:01,HLA-A*33:03,HLA-A*68:01
DVESGHIAR

SEQ ID NO: 1914 - protein, 10 aa, Homo sapiens
  Table 1.2; DCAF12L1; ENSG00000198889; HLA -A*25:01,HLA-A*26:01
DVESGHIARI

SEQ ID NO: 1915 - protein, 11 aa, Homo sapiens
  Table 1.2; DCAF12L1; ENSG00000198889; HLA -A*33:01
DVRAQKFLEER

SEQ ID NO: 1916 - protein, 8 aa, Homo sapiens
  Table 1.2; DCAF12L1; ENSG00000198889; HLA -B*08:01,HLA-B*51:01
EAIPRAII

SEQ ID NO: 1917 - protein, 8 aa, Homo sapiens
  Table 1.2; DCAF12L1; ENSG00000198889; HLA -B*18:01
EERASATL

SEQ ID NO: 1918 - protein, 10 aa, Homo sapiens
  Table 1.2; DCAF12L1; ENSG00000198889; HLA -A*01:01
ELGAVSLDGY

SEQ ID NO: 1919 - protein, 9 aa, Homo sapiens
  Table 1.2; DCAF12L1; ENSG00000198889; HLA -A*23:01,HLA-A*25:01,HLA-B*44:02,HLA-B*44:03
ELGTVNKVF

SEQ ID NO: 1920 - protein, 9 aa, Homo sapiens
  Table 1.2; DCAF12L1; ENSG00000198889; HLA -A*02:03,HLA-A*02:04,HLA-A*23:01,HLA-A*24:02,HLA-A*25:01, HLA-A*26:01,HLA-A*32:01,HLA-B*07:02,HLA-B*08:01,HLA-B*15:01, HLA-B*37:01,HLA-C*07:04
ELNPSKTLL

SEQ ID NO: 1921 - protein, 9 aa, Homo sapiens
  Table 1.2; DCAF12L1; ENSG00000198889; HLA -A*33:01,HLA-A*33:03,HLA-A*68:01
ELRGYAVQR

SEQ ID NO: 1922 - protein, 9 aa, Homo sapiens
  Table 1.2; DCAF12L1; ENSG00000198889; HLA -A*26:01
ENPNSLAIY

SEQ ID NO: 1923 - protein, 8 aa, Homo sapiens
  Table 1.2; DCAF12L1; ENSG00000198889; HLA -A*33:03
ESSSGPAR

SEQ ID NO: 1924 - protein, 9 aa, Homo sapiens
  Table 1.2; DCAF12L1; ENSG00000198889; HLA -A*33:03,HLA-A*68:01
ESSSGPARR

SEQ ID NO: 1925 - protein, 8 aa, Homo sapiens
  Table 1.2; DCAF12L1; ENSG00000198889; HLA -A*26:01
EVFPNALY

SEQ ID NO: 1926 - protein, 9 aa, Homo sapiens
  Table 1.2; DCAF12L1; ENSG00000198889; HLA -A*26:01
EVFPNALYT

SEQ ID NO: 1927 - protein, 10 aa, Homo sapiens
  Table 1.2; DCAF12L1; ENSG00000198889; HLA -A*25:01,HLA-A*26:01,HLA-A*68:02
EVFPNALYTH

SEQ ID NO: 1928 - protein, 9 aa, Homo sapiens
  Table 1.2; DCAF12L1; ENSG00000198889; HLA -A*25:01,HLA-A*26:01,HLA-A*33:01,HLA-A*33:03,HLA-A*68:01
EVGGWGPAR

SEQ ID NO: 1929 - protein, 9 aa, Homo sapiens
  Table 1.2; DCAF12L1; ENSG00000198889; HLA -A*33:03
EVGLPVYAH

SEQ ID NO: 1930 - protein, 10 aa, Homo sapiens
  Table 1.2; DCAF12L1; ENSG00000198889; HLA -A*68:02
EVGLPVYAHI

SEQ ID NO: 1931 - protein, 8 aa, Homo sapiens
  Table 1.2; DCAF12L1; ENSG00000198889; HLA -C*07:01
FDGELRGY

SEQ ID NO: 1932 - protein, 10 aa, Homo sapiens
  Table 1.2; DCAF12L1; ENSG00000198889; HLA -A*02:01,HLA-A*02:03,HLA-A*02:07
FLEERASATL

SEQ ID NO: 1933 - protein, 9 aa, Homo sapiens
  Table 1.2; DCAF12L1; ENSG00000198889; HLA -B*54:01,HLA-B*56:01
FPNALYTHC

SEQ ID NO: 1934 - protein, 10 aa, Homo sapiens
  Table 1.2; DCAF12L1; ENSG00000198889; HLA -B*35:01
FPNALYTHCY

SEQ ID NO: 1935 - protein, 9 aa, Homo sapiens
  Table 1.2; DCAF12L1; ENSG00000198889; HLA -A*01:01
FRDNVCLTY

SEQ ID NO: 1936 - protein, 9 aa, Homo sapiens
  Table 1.2; DCAF12L1; ENSG00000198889; HLA -A*02:01,HLA-A*02:03,HLA-B*13:02,HLA-B*54:01,HLA-B*56:01
FVAGGPLPA

SEQ ID NO: 1937 - protein, 10 aa, Homo sapiens
  Table 1.2; DCAF12L1; ENSG00000198889; HLA -A*25:01,HLA-A*26:01,HLA-A*68:02,HLA-B*46:01,HLA-B*54:01
FVAGGPLPAG

SEQ ID NO: 1938 - protein, 11 aa, Homo sapiens
  Table 1.2; DCAF12L1; ENSG00000198889; HLA -A*26:01,HLA-A*68:02
FVAGGPLPAGL

SEQ ID NO: 1939 - protein, 9 aa, Homo sapiens
  Table 1.2; DCAF12L1; ENSG00000198889; HLA -A*26:01
FVVDVESGH

SEQ ID NO: 1940 - protein, 10 aa, Homo sapiens
  Table 1.2; DCAF12L1; ENSG00000198889; HLA -A*02:03,HLA-A*02:07,HLA-A*25:01,HLA-A*26:01,HLA-A*68:01, HLA-A*68:02
FVVDVESGHI

SEQ ID NO: 1941 - protein, 11 aa, Homo sapiens
  Table 1.2; DCAF12L1; ENSG00000198889; HLA -A*26:01,HLA-A*68:02,HLA-B*54:01
FVVDVESGHIA

SEQ ID NO: 1942 - protein, 9 aa, Homo sapiens
  Table 1.2; DCAF12L1; ENSG00000198889; HLA -A*23:01,HLA-A*24:02,HLA-A*29:02,HLA-A*32:01,HLA-B*35:01, HLA-B*35:03,HLA-C*04:01
FYDVRAQKF

SEQ ID NO: 1943 - protein, 9 aa, Homo sapiens
  Table 1.2; DCAF12L1; ENSG00000198889; HLA -B*44:02,HLA-B*44:03
GEGPLLLKR

SEQ ID NO: 1944 - protein, 8 aa, Homo sapiens
  Table 1.2; DCAF12L1; ENSG00000198889; HLA -A*30:01,HLA-B*18:01,HLA-B*37:01,HLA-B*40:02,HLA-B*49:01
GELRGYAV

SEQ ID NO: 1945 - protein, 9 aa, Homo sapiens
  Table 1.2; DCAF12L1; ENSG00000198889; HLA -A*30:01,HLA-B*13:02,HLA-B*27:02,HLA-B*27:05,HLA-B*37:01, HLA-B*40:01,HLA-B*40:02,HLA-B*44:02,HLA-B*44:03,HLA-B*49:01, HLA-C*16:04
GENPNSLAI

SEQ ID NO: 1946 - protein, 10 aa, Homo sapiens
  Table 1.2; DCAF12L1; ENSG00000198889; HLA -A*29:02,HLA-A*30:02,HLA-B*15:01,HLA-B*15:03,HLA-B*18:01, HLA-B*27:02,HLA-B*40:01,HLA-B*44:02,HLA-B*44:03,HLA-C*16:04
GENPNSLAIY

SEQ ID NO: 1947 - protein, 9 aa, Homo sapiens
  Table 1.2; DCAF12L1; ENSG00000198889; HLA -A*29:02,HLA-A*30:02
GFDGELRGY

SEQ ID NO: 1948 - protein, 11 aa, Homo sapiens
  Table 1.2; DCAF12L1; ENSG00000198889; HLA -A*01:01,HLA-A*30:02
GGENPNSLAIY

SEQ ID NO: 1949 - protein, 11 aa, Homo sapiens
  Table 1.2; DCAF12L1; ENSG00000198889; HLA -A*30:02
GGTGVRSLSFY

SEQ ID NO: 1950 - protein, 9 aa, Homo sapiens
  Table 1.2; DCAF12L1; ENSG00000198889; HLA -A*02:04,HLA-A*24:02,HLA-B*38:01
GHIARIPLL

SEQ ID NO: 1951 - protein, 9 aa, Homo sapiens
  Table 1.2; DCAF12L1; ENSG00000198889; HLA -A*02:04
GHKDWIFAV

SEQ ID NO: 1952 - protein, 10 aa, Homo sapiens
  Table 1.2; DCAF12L1; ENSG00000198889; HLA -A*01:01,HLA-A*29:02,HLA-A*30:02
GMEVFPNALY

SEQ ID NO: 1953 - protein, 11 aa, Homo sapiens
  Table 1.2; DCAF12L1; ENSG00000198889; HLA -A*29:02,HLA-A*30:02,HLA-B*35:01
GPLPAGLHGNY

SEQ ID NO: 1954 - protein, 8 aa, Homo sapiens
  Table 1.2; DCAF12L1; ENSG00000198889; HLA -A*30:02,HLA-B*15:01
GQGSLLFY

SEQ ID NO: 1955 - protein, 8 aa, Homo sapiens
  Table 1.2; DCAF12L1; ENSG00000198889; HLA -A*32:01,HLA-B*58:01
GSHSHVSF

SEQ ID NO: 1956 - protein, 9 aa, Homo sapiens
  Table 1.2; DCAF12L1; ENSG00000198889; HLA -B*07:02,HLA-B*15:03,HLA-B*46:01,HLA-C*03:03
GSRDGTVAL

SEQ ID NO: 1957 - protein, 10 aa, Homo sapiens
  Table 1.2; DCAF12L1; ENSG00000198889; HLA -A*25:01,HLA-B*57:01,HLA-B*58:01
GSRDGTVALW

SEQ ID NO: 1958 - protein, 11 aa, Homo sapiens
  Table 1.2; DCAF12L1; ENSG00000198889; HLA -A*31:01
GSRDGTVALWR

SEQ ID NO: 1959 - protein, 10 aa, Homo sapiens
  Table 1.2; DCAF12L1; ENSG00000198889; HLA -A*01:01,HLA-A*29:02,HLA-A*30:02
GTGQGSLLFY

SEQ ID NO: 1960 - protein, 9 aa, Homo sapiens
  Table 1.2; DCAF12L1; ENSG00000198889; HLA -A*25:01,HLA-A*32:01,HLA-B*37:01,HLA-C*16:01
GTGVRSLSF

SEQ ID NO: 1961 - protein, 11 aa, Homo sapiens
  Table 1.2; DCAF12L1; ENSG00000198889; HLA -A*31:01
GTGVRSLSFYR

SEQ ID NO: 1962 - protein, 11 aa, Homo sapiens
  Table 1.2; DCAF12L1; ENSG00000198889; HLA -A*25:01,HLA-B*57:01
GTVNKVFASQW

SEQ ID NO: 1963 - protein, 9 aa, Homo sapiens
  Table 1.2; DCAF12L1; ENSG00000198889; HLA -A*31:01
GVRSLSFYR

SEQ ID NO: 1964 - protein, 9 aa, Homo sapiens
  Table 1.2; DCAF12L1; ENSG00000198889; HLA -A*11:01,HLA-A*26:01,HLA-A*68:01,HLA-B*35:01
HAIELNPSK

SEQ ID NO: 1965 - protein, 11 aa, Homo sapiens
  Table 1.2; DCAF12L1; ENSG00000198889; HLA -C*03:04
HAIELNPSKTL

SEQ ID NO: 1966 - protein, 9 aa, Homo sapiens
  Table 1.2; DCAF12L1; ENSG00000198889; HLA -A*29:02,HLA-A*33:03
HIARIPLLR

SEQ ID NO: 1967 - protein, 9 aa, Homo sapiens
  Table 1.2; DCAF12L1; ENSG00000198889; HLA -A*26:01
HIITVGTGQ

SEQ ID NO: 1968 - protein, 9 aa, Homo sapiens
  Table 1.2; DCAF12L1; ENSG00000198889; HLA -A*01:01,HLA-A*30:02,HLA-B*35:01,HLA-B*39:01,HLA-B*46:01, HLA-B*55:01,HLA-B*58:01,HLA-C*03:03
HSEVGLPVY

SEQ ID NO: 1969 - protein, 9 aa, Homo sapiens
  Table 1.2; DCAF12L1; ENSG00000198889; HLA -A*30:01,HLA-B*37:01,HLA-B*40:01,HLA-B*40:02,HLA-B*44:02, HLA-B*44:03,HLA-B*49:01
IELNPSKTL

SEQ ID NO: 1970 - protein, 10 aa, Homo sapiens
  Table 1.2; DCAF12L1; ENSG00000198889; HLA -A*23:01,HLA-A*30:01,HLA-B*37:01,HLA-B*40:01,HLA-B*40:02, HLA-B*44:02,HLA-B*44:03,HLA-B*49:01
IELNPSKTLL

SEQ ID NO: 1971 - protein, 9 aa, Homo sapiens
  Table 1.2; DCAF12L1; ENSG00000198889; HLA -B*54:01,HLA-B*55:01,HLA-B*56:01
IPLLRDSEA

SEQ ID NO: 1972 - protein, 10 aa, Homo sapiens
  Table 1.2; DCAF12L1; ENSG00000198889; HLA -B*58:01
ITVGTGQGSL

SEQ ID NO: 1973 - protein, 11 aa, Homo sapiens
  Table 1.2; DCAF12L1; ENSG00000198889; HLA -B*58:01
ITVGTGQGSLL

SEQ ID NO: 1974 - protein, 11 aa, Homo sapiens
  Table 1.2; DCAF12L1; ENSG00000198889; HLA -A*23:01,HLA-A*24:02
KFLEERASATL

SEQ ID NO: 1975 - protein, 11 aa, Homo sapiens
  Table 1.2; DCAF12L1; ENSG00000198889; HLA -A*02:01,HLA-A*02:03
KLFVAGGPLPA

SEQ ID NO: 1976 - protein, 11 aa, Homo sapiens
  Table 1.2; DCAF12L1; ENSG00000198889; HLA -A*31:01
KVFASQWLNSR

SEQ ID NO: 1977 - protein, 8 aa, Homo sapiens
  Table 1.2; DCAF12L1; ENSG00000198889; HLA -B*57:01
KVREVGGW

SEQ ID NO: 1978 - protein, 9 aa, Homo sapiens
  Table 1.2; DCAF12L1; ENSG00000198889; HLA -B*46:01,HLA-C*03:03,HLA-C*03:04
LAIYQLPSL

SEQ ID NO: 1979 - protein, 11 aa, Homo sapiens
  Table 1.2; DCAF12L1; ENSG00000198889; HLA -B*39:01
LATGGENPNSL

SEQ ID NO: 1980 - protein, 9 aa, Homo sapiens
  Table 1.2; DCAF12L1; ENSG00000198889; HLA -A*30:01,HLA-B*40:01,HLA-B*40:02,HLA-B*49:01
LEERASATL

SEQ ID NO: 1981 - protein, 9 aa, Homo sapiens
  Table 1.2; DCAF12L1; ENSG00000198889; HLA -A*30:01,HLA-B*49:01
LELGTVNKV

SEQ ID NO: 1982 - protein, 10 aa, Homo sapiens
  Table 1.2; DCAF12L1; ENSG00000198889; HLA -B*44:02,HLA-B*44:03
LELGTVNKVF

SEQ ID NO: 1983 - protein, 9 aa, Homo sapiens
  Table 1.2; DCAF12L1; ENSG00000198889; HLA -B*39:01
LESSSGPAR

SEQ ID NO: 1984 - protein, 10 aa, Homo sapiens
  Table 1.2; DCAF12L1; ENSG00000198889; HLA -A*24:02
LFYDVRAQKF

SEQ ID NO: 1985 - protein, 9 aa, Homo sapiens
  Table 1.2; DCAF12L1; ENSG00000198889; HLA -A*01:01,HLA-A*30:02,HLA-B*46:01
LGAVSLDGY

SEQ ID NO: 1986 - protein, 9 aa, Homo sapiens
  Table 1.2; DCAF12L1; ENSG00000198889; HLA -A*02:04,HLA-A*24:02
LLSIRLPYF

SEQ ID NO: 1987 - protein, 9 aa, Homo sapiens
  Table 1.2; DCAF12L1; ENSG00000198889; HLA -A*02:01,HLA-A*02:03,HLA-A*02:04,HLA-A*02:07,HLA-B*08:01, HLA-C*16:01
LLTERQLEL

SEQ ID NO: 1988 - protein, 9 aa, Homo sapiens
  Table 1.2; DCAF12L1; ENSG00000198889; HLA -A*26:01,HLA-A*29:02,HLA-A*30:02,HLA-B*35:01,HLA-B*55:01
LPAGLHGNY

SEQ ID NO: 1989 - protein, 10 aa, Homo sapiens
  Table 1.2; DCAF12L1; ENSG00000198889; HLA -B*54:01,HLA-B*56:01
LPAGLHGNYA

SEQ ID NO: 1990 - protein, 10 aa, Homo sapiens
  Table 1.2; DCAF12L1; ENSG00000198889; HLA -B*35:03
LPELLTERQL

SEQ ID NO: 1991 - protein, 9 aa, Homo sapiens
  Table 1.2; DCAF12L1; ENSG00000198889; HLA -B*07:02,HLA-B*35:01,HLA-B*35:03,HLA-B*51:01
LPSLDPLCL

SEQ ID NO: 1992 - protein, 8 aa, Homo sapiens
  Table 1.2; DCAF12L1; ENSG00000198889; HLA -B*51:01
LPYFRDNV

SEQ ID NO: 1993 - protein, 9 aa, Homo sapiens
  Table 1.2; DCAF12L1; ENSG00000198889; HLA -B*51:01,HLA-B*54:01
LPYFRDNVC

SEQ ID NO: 1994 - protein, 9 aa, Homo sapiens
  Table 1.2; DCAF12L1; ENSG00000198889; HLA -B*27:05
LRQDQQNIR

SEQ ID NO: 1995 - protein, 9 aa, Homo sapiens
  Table 1.2; DCAF12L1; ENSG00000198889; HLA -A*01:01
LSDTVAVSG

SEQ ID NO: 1996 - protein, 10 aa, Homo sapiens
  Table 1.2; DCAF12L1; ENSG00000198889; HLA -A*68:02
LSFYRHIITV

SEQ ID NO: 1997 - protein, 8 aa, Homo sapiens
  Table 1.2; DCAF12L1; ENSG00000198889; HLA -B*57:01
LSIRLPYF

SEQ ID NO: 1998 - protein, 10 aa, Homo sapiens
  Table 1.2; DCAF12L1; ENSG00000198889; HLA -A*01:01
LTYCDDMSVY

SEQ ID NO: 1999 - protein, 9 aa, Homo sapiens
  Table 1.2; DCAF12L1; ENSG00000198889; HLA -A*33:03
MAQQQTGSR

SEQ ID NO: 2000 - protein, 8 aa, Homo sapiens
  Table 1.2; DCAF12L1; ENSG00000198889; HLA -A*30:01,HLA-B*18:01,HLA-B*40:01,HLA-B*49:01
MEVFPNAL

SEQ ID NO: 2001 - protein, 9 aa, Homo sapiens
  Table 1.2; DCAF12L1; ENSG00000198889; HLA -A*29:02,HLA-B*18:01,HLA-B*44:02,HLA-B*44:03
MEVFPNALY

SEQ ID NO: 2002 - protein, 8 aa, Homo sapiens
  Table 1.2; DCAF12L1; ENSG00000198889; HLA -B*37:01
NDFWVNYF

SEQ ID NO: 2003 - protein, 9 aa, Homo sapiens
  Table 1.2; DCAF12L1; ENSG00000198889; HLA -A*29:02
NHNDFWVNY

SEQ ID NO: 2004 - protein, 8 aa, Homo sapiens
  Table 1.2; DCAF12L1; ENSG00000198889; HLA -B*35:01
NPNSLAIY

SEQ ID NO: 2005 - protein, 10 aa, Homo sapiens
  Table 1.2; DCAF12L1; ENSG00000198889; HLA -B*35:03
NPNSLAIYQL

SEQ ID NO: 2006 - protein, 9 aa, Homo sapiens
  Table 1.2; DCAF12L1; ENSG00000198889; HLA -B*07:02
NPSKTLLAT

SEQ ID NO: 2007 - protein, 10 aa, Homo sapiens
  Table 1.2; DCAF12L1; ENSG00000198889; HLA -B*07:02
NPSNRKVRAL

SEQ ID NO: 2008 - protein, 9 aa, Homo sapiens
  Table 1.2; DCAF12L1; ENSG00000198889; HLA -B*27:05,HLA-B*38:01,HLA-B*39:01
NQELGAVSL

SEQ ID NO: 2009 - protein, 8 aa, Homo sapiens
  Table 1.2; DCAF12L1; ENSG00000198889; HLA -C*14:02
NYFGGMEV

SEQ ID NO: 2010 - protein, 9 aa, Homo sapiens
  Table 1.2; DCAF12L1; ENSG00000198889; HLA -A*23:01,HLA-A*24:02,HLA-C*14:02
NYFGGMEVF

SEQ ID NO: 2011 - protein, 10 aa, Homo sapiens
  Table 1.2; DCAF12L1; ENSG00000198889; HLA -A*29:02
PLPAGLHGNY

SEQ ID NO: 2012 - protein, 9 aa, Homo sapiens
  Table 1.2; DCAF12L1; ENSG00000198889; HLA -A*31:01
PVYAHIRPR

SEQ ID NO: 2013 - protein, 9 aa, Homo sapiens
  Table 1.2; DCAF12L1; ENSG00000198889; HLA -B*37:01
QDQQNIRPL

SEQ ID NO: 2014 - protein, 8 aa, Homo sapiens
  Table 1.2; DCAF12L1; ENSG00000198889; HLA -A*30:01,HLA-B*18:01,HLA-B*37:01,HLA-B*40:01
QELGAVSL

SEQ ID NO: 2015 - protein, 11 aa, Homo sapiens
  Table 1.2; DCAF12L1; ENSG00000198889; HLA -A*30:02,HLA-B*44:02,HLA-B*44:03,HLA-C*16:04
QELGAVSLDGY

SEQ ID NO: 2016 - protein, 10 aa, Homo sapiens
  Table 1.2; DCAF12L1; ENSG00000198889; HLA -A*25:01,HLA-A*26:01,HLA-A*30:02,HLA-B*35:01,HLA-B*44:02, HLA-B*44:03
QGFDGELRGY

SEQ ID NO: 2017 - protein, 9 aa, Homo sapiens
  Table 1.2; DCAF12L1; ENSG00000198889; HLA -A*03:02
QLELGTVNK

SEQ ID NO: 2018 - protein, 9 aa, Homo sapiens
  Table 1.2; DCAF12L1; ENSG00000198889; HLA -A*31:01,HLA-A*33:01,HLA-A*33:03
QNIRPLCSR

SEQ ID NO: 2019 - protein, 9 aa, Homo sapiens
  Table 1.2; DCAF12L1; ENSG00000198889; HLA -B*13:02
QQGCGIHAI

SEQ ID NO: 2020 - protein, 10 aa, Homo sapiens
  Table 1.2; DCAF12L1; ENSG00000198889; HLA -A*31:01
QQNIRPLCSR

SEQ ID NO: 2021 - protein, 10 aa, Homo sapiens
  Table 1.2; DCAF12L1; ENSG00000198889; HLA -B*27:02
QRLPELLTER

SEQ ID NO: 2022 - protein, 9 aa, Homo sapiens
  Table 1.2; DCAF12L1; ENSG00000198889; HLA -A*31:01
RAIINPSNR

SEQ ID NO: 2023 - protein, 9 aa, Homo sapiens
  Table 1.2; DCAF12L1; ENSG00000198889; HLA -A*31:01
RAQKFLEER

SEQ ID NO: 2024 - protein, 8 aa, Homo sapiens
  Table 1.2; DCAF12L1; ENSG00000198889; HLA -B*37:01
RDGTVALW

SEQ ID NO: 2025 - protein, 10 aa, Homo sapiens
  Table 1.2; DCAF12L1; ENSG00000198889; HLA -B*40:01
REGGTGVRSL

SEQ ID NO: 2026 - protein, 10 aa, Homo sapiens
  Table 1.2; DCAF12L1; ENSG00000198889; HLA -B*57:01
RGWLNHNDFW

SEQ ID NO: 2027 - protein, 9 aa, Homo sapiens
  Table 1.2; DCAF12L1; ENSG00000198889; HLA -A*03:01,HLA-A*29:02,HLA-B*57:01
RLLSIRLPY

SEQ ID NO: 2028 - protein, 10 aa, Homo sapiens
  Table 1.2; DCAF12L1; ENSG00000198889; HLA -A*02:04,HLA-A*24:02
RLLSIRLPYF

SEQ ID NO: 2029 - protein, 9 aa, Homo sapiens
  Table 1.2; DCAF12L1; ENSG00000198889; HLA -A*02:07,HLA-A*03:01,HLA-A*31:01
RLPELLTER

SEQ ID NO: 2030 - protein, 11 aa, Homo sapiens
  Table 1.2; DCAF12L1; ENSG00000198889; HLA -A*02:07
RLPELLTERQL

SEQ ID NO: 2031 - protein, 9 aa, Homo sapiens
  Table 1.2; DCAF12L1; ENSG00000198889; HLA -A*02:07
RLPYFRDNV

SEQ ID NO: 2032 - protein, 8 aa, Homo sapiens
  Table 1.2; DCAF12L1; ENSG00000198889; HLA -B*07:02
RPATYRSM

SEQ ID NO: 2033 - protein, 10 aa, Homo sapiens
  Table 1.2; DCAF12L1; ENSG00000198889; HLA -A*31:01
RPRDVEAIPR

SEQ ID NO: 2034 - protein, 10 aa, Homo sapiens
  Table 1.2; DCAF12L1; ENSG00000198889; HLA -A*03:01,HLA-A*03:02,HLA-A*11:01,HLA-A*31:01,HLA-B*27:05
RQLELGTVNK

SEQ ID NO: 2035 - protein, 11 aa, Homo sapiens
  Table 1.2; DCAF12L1; ENSG00000198889; HLA -A*02:01,HLA-A*02:04,HLA-B*13:02
RQLELGTVNKV

SEQ ID NO: 2036 - protein, 9 aa, Homo sapiens
  Table 1.2; DCAF12L1; ENSG00000198889; HLA -A*03:01,HLA-A*31:01
RQRRPATYR

SEQ ID NO: 2037 - protein, 9 aa, Homo sapiens
  Table 1.2; DCAF12L1; ENSG00000198889; HLA -A*02:01,HLA-A*02:03,HLA-A*02:04,HLA-A*23:01,HLA-B*08:01, HLA-B*13:02,HLA-B*51:01,HLA-B*54:01,HLA-C*16:01
SALSRLLSI

SEQ ID NO: 2038 - protein, 8 aa, Homo sapiens
  Table 1.2; DCAF12L1; ENSG00000198889; HLA -A*30:01,HLA-B*15:01,HLA-B*15:03,HLA-B*18:01,HLA-B*37:01, HLA-B*39:01,HLA-B*40:02,HLA-B*44:02,HLA-B*44:03,HLA-B*49:01, HLA-C*16:04
SEVGLPVY

SEQ ID NO: 2039 - protein, 9 aa, Homo sapiens
  Table 1.2; DCAF12L1; ENSG00000198889; HLA -A*30:01,HLA-B*18:01,HLA-B*40:01,HLA-B*40:02,HLA-B*44:02, HLA-B*44:03,HLA-B*49:01
SEVGLPVYA

SEQ ID NO: 2040 - protein, 11 aa, Homo sapiens
  Table 1.2; DCAF12L1; ENSG00000198889; HLA -B*44:02
SEVGLPVYAHI

SEQ ID NO: 2041 - protein, 9 aa, Homo sapiens
  Table 1.2; DCAF12L1; ENSG00000198889; HLA -A*02:01,HLA-A*02:03,HLA-A*02:04
SFYRHIITV

SEQ ID NO: 2042 - protein, 11 aa, Homo sapiens
  Table 1.2; DCAF12L1; ENSG00000198889; HLA -B*57:01
SGSRDGTVALW

SEQ ID NO: 2043 - protein, 8 aa, Homo sapiens
  Table 1.2; DCAF12L1; ENSG00000198889; HLA -A*02:07
SLDGYFHL

SEQ ID NO: 2044 - protein, 9 aa, Homo sapiens
  Table 1.2; DCAF12L1; ENSG00000198889; HLA -A*01:01,HLA-A*02:07,HLA-A*24:02,HLA-A*29:02,HLA-B*44:02, HLA-B*57:01
SLDGYFHLW

SEQ ID NO: 2045 - protein, 9 aa, Homo sapiens
  Table 1.2; DCAF12L1; ENSG00000198889; HLA -A*02:04
SLLFYDVRA

SEQ ID NO: 2046 - protein, 9 aa, Homo sapiens
  Table 1.2; DCAF12L1; ENSG00000198889; HLA -A*31:01,HLA-A*33:01
SMAHYLKVR

SEQ ID NO: 2047 - protein, 8 aa, Homo sapiens
  Table 1.2; DCAF12L1; ENSG00000198889; HLA -B*56:01
SPSQGLAA

SEQ ID NO: 2048 - protein, 9 aa, Homo sapiens
  Table 1.2; DCAF12L1; ENSG00000198889; HLA -B*07:02,HLA-B*54:01,HLA-B*55:01,HLA-B*56:01
SPSQGLAAA

SEQ ID NO: 2049 - protein, 9 aa, Homo sapiens
  Table 1.2; DCAF12L1; ENSG00000198889; HLA -B*13:02
SQWLNSRQV

SEQ ID NO: 2050 - protein, 9 aa, Homo sapiens
  Table 1.2; DCAF12L1; ENSG00000198889; HLA -B*38:01
SRDGTVALW

SEQ ID NO: 2051 - protein, 9 aa, Homo sapiens
  Table 1.2; DCAF12L1; ENSG00000198889; HLA -B*27:05
SREGGTGVR

SEQ ID NO: 2052 - protein, 9 aa, Homo sapiens
  Table 1.2; DCAF12L1; ENSG00000198889; HLA -C*01:02
SSPSQGLAA

SEQ ID NO: 2053 - protein, 10 aa, Homo sapiens
  Table 1.2; DCAF12L1; ENSG00000198889; HLA -A*03:01,HLA-A*03:02,HLA-A*11:01,HLA-A*30:02
SVYAVGSHSH

SEQ ID NO: 2054 - protein, 11 aa, Homo sapiens
  Table 1.2; DCAF12L1; ENSG00000198889; HLA -A*68:02
SVYAVGSHSHV

SEQ ID NO: 2055 - protein, 10 aa, Homo sapiens
  Table 1.2; DCAF12L1; ENSG00000198889; HLA -B*40:02,HLA-B*49:01
TERQLELGTV

SEQ ID NO: 2056 - protein, 9 aa, Homo sapiens
  Table 1.2; DCAF12L1; ENSG00000198889; HLA -B*35:03,HLA-B*39:01
TGGENPNSL

SEQ ID NO: 2057 - protein, 9 aa, Homo sapiens
  Table 1.2; DCAF12L1; ENSG00000198889; HLA -A*30:02
TGQGSLLFY

SEQ ID NO: 2058 - protein, 10 aa, Homo sapiens
  Table 1.2; DCAF12L1; ENSG00000198889; HLA -A*68:01
TLESSSGPAR

SEQ ID NO: 2059 - protein, 10 aa, Homo sapiens
  Table 1.2; DCAF12L1; ENSG00000198889; HLA -A*25:01,HLA-A*32:01,HLA-B*57:01,HLA-B*58:01
TVNKVFASQW

SEQ ID NO: 2060 - protein, 9 aa, Homo sapiens
  Table 1.2; DCAF12L1; ENSG00000198889; HLA -A*29:02,HLA-C*07:01,HLA-C*14:02
TYCDDMSVY

SEQ ID NO: 2061 - protein, 9 aa, Homo sapiens
  Table 1.2; DCAF12L1; ENSG00000198889; HLA -A*24:02
TYRSMAHYL

SEQ ID NO: 2062 - protein, 9 aa, Homo sapiens
  Table 1.2; DCAF12L1; ENSG00000198889; HLA -B*46:01,HLA-B*56:01
VAGGPLPAG

SEQ ID NO: 2063 - protein, 8 aa, Homo sapiens
  Table 1.2; DCAF12L1; ENSG00000198889; HLA -B*51:01
VAWLSDTV

SEQ ID NO: 2064 - protein, 9 aa, Homo sapiens
  Table 1.2; DCAF12L1; ENSG00000198889; HLA -B*54:01
VAWLSDTVA

SEQ ID NO: 2065 - protein, 8 aa, Homo sapiens
  Table 1.2; DCAF12L1; ENSG00000198889; HLA -B*49:01
VEAIPRAI

SEQ ID NO: 2066 - protein, 9 aa, Homo sapiens
  Table 1.2; DCAF12L1; ENSG00000198889; HLA -B*40:01,HLA-B*44:02,HLA-B*44:03,HLA-B*49:01
VEAIPRAII

SEQ ID NO: 2067 - protein, 9 aa, Homo sapiens
  Table 1.2; DCAF12L1; ENSG00000198889; HLA -A*30:01,HLA-B*37:01,HLA-B*40:01,HLA-B*44:02,HLA-B*44:03, HLA-B*49:01
VESGHIARI

SEQ ID NO: 2068 - protein, 9 aa, Homo sapiens
  Table 1.2; DCAF12L1; ENSG00000198889; HLA -A*24:02
VFPNALYTH

SEQ ID NO: 2069 - protein, 11 aa, Homo sapiens
  Table 1.2; DCAF12L1; ENSG00000198889; HLA -A*29:02
VFPNALYTHCY

SEQ ID NO: 2070 - protein, 9 aa, Homo sapiens
  Table 1.2; DCAF12L1; ENSG00000198889; HLA -A*23:01,HLA-A*24:02,HLA-B*51:01
VGLPVYAHI

SEQ ID NO: 2071 - protein, 10 aa, Homo sapiens
  Table 1.2; DCAF12L1; ENSG00000198889; HLA -A*31:01
VGLPVYAHIR

SEQ ID NO: 2072 - protein, 9 aa, Homo sapiens
  Table 1.2; DCAF12L1; ENSG00000198889; HLA -B*15:03,HLA-B*46:01,HLA-C*07:04,HLA-C*12:03,HLA-C*16:01
VGSHSHVSF

SEQ ID NO: 2073 - protein, 9 aa, Homo sapiens
  Table 1.2; DCAF12L1; ENSG00000198889; HLA -C*03:04
VGTGQGSLL

SEQ ID NO: 2074 - protein, 11 aa, Homo sapiens
  Table 1.2; DCAF12L1; ENSG00000198889; HLA -A*30:02
VGTGQGSLLFY

SEQ ID NO: 2075 - protein, 11 aa, Homo sapiens
  Table 1.2; DCAF12L1; ENSG00000198889; HLA -A*31:01,HLA-A*33:01
VQRLPELLTER

SEQ ID NO: 2076 - protein, 9 aa, Homo sapiens
  Table 1.2; DCAF12L1; ENSG00000198889; HLA -A*02:04,HLA-A*23:01,HLA-A*24:02
VSLDGYFHL

SEQ ID NO: 2077 - protein, 10 aa, Homo sapiens
  Table 1.2; DCAF12L1; ENSG00000198889; HLA -A*24:02,HLA-B*44:02,HLA-B*57:01
VSLDGYFHLW

SEQ ID NO: 2078 - protein, 9 aa, Homo sapiens
  Table 1.2; DCAF12L1; ENSG00000198889; HLA -A*02:07,HLA-C*05:01
VVDVESGHI

SEQ ID NO: 2079 - protein, 11 aa, Homo sapiens
  Table 1.2; DCAF12L1; ENSG00000198889; HLA -A*31:01,HLA-A*33:01
VVDVESGHIAR

SEQ ID NO: 2080 - protein, 8 aa, Homo sapiens
  Table 1.2; DCAF12L1; ENSG00000198889; HLA -C*14:02
VYAVGSHS

SEQ ID NO: 2081 - protein, 9 aa, Homo sapiens
  Table 1.2; DCAF12L1; ENSG00000198889; HLA -A*24:02,HLA-C*14:02
VYAVGSHSH

SEQ ID NO: 2082 - protein, 9 aa, Homo sapiens
  Table 1.2; DCAF12L1; ENSG00000198889; HLA -A*26:01,HLA-A*68:02,HLA-B*51:01,HLA-C*02:02,HLA-C*12:03, HLA-C*16:02
YAVGSHSHV

SEQ ID NO: 2083 - protein, 11 aa, Homo sapiens
  Table 1.2; DCAF12L1; ENSG00000198889; HLA -B*35:01,HLA-B*46:01,HLA-C*02:02,HLA-C*12:03
YAVGSHSHVSF

SEQ ID NO: 2084 - protein, 9 aa, Homo sapiens
  Table 1.2; DCAF12L1; ENSG00000198889; HLA -A*02:04,HLA-A*02:07,HLA-A*23:01,HLA-A*24:02,HLA-A*30:01, HLA-A*68:02,HLA-B*08:01,HLA-B*35:03,HLA-B*46:01,HLA-B*51:01, HLA-B*54:01,HLA-B*58:01,HLA-C*02:02,HLA-C*03:03,HLA-C*03:04,
  HLA-C*12:03,HLA-C*16:01,HLA-C*16:02
YAVQRLPEL

SEQ ID NO: 2085 - protein, 8 aa, Homo sapiens
  Table 1.2; DCAF12L1; ENSG00000198889; HLA -A*01:01
YCDDMSVY

SEQ ID NO: 2086 - protein, 10 aa, Homo sapiens
  Table 1.2; DCAF12L1; ENSG00000198889; HLA -A*02:01,HLA-A*02:07
YCDDMSVYAV

SEQ ID NO: 2087 - protein, 8 aa, Homo sapiens
  Table 1.2; DCAF12L1; ENSG00000198889; HLA -B*18:01,HLA-B*37:01,HLA-B*40:02
YDVRAQKF

SEQ ID NO: 2088 - protein, 10 aa, Homo sapiens
  Table 1.2; DCAF12L1; ENSG00000198889; HLA -A*29:02
YFRDNVCLTY

SEQ ID NO: 2089 - protein, 9 aa, Homo sapiens
  Table 1.2; DCAF12L1; ENSG00000198889; HLA -A*02:01,HLA-A*02:03,HLA-A*02:04,HLA-A*02:07,HLA-B*13:02, HLA-B*39:01,HLA-B*40:01
YQLPSLDPL

SEQ ID NO: 2090 - protein, 11 aa, Homo sapiens
  Table 1.2; DCAF12L1; ENSG00000198889; HLA -A*02:01,HLA-A*23:01,HLA-B*38:01
YQLPSLDPLCL

SEQ ID NO: 2091 - protein, 8 aa, Homo sapiens
  Table 1.2; DCAF4L2; ENSG00000176566; HLA -B*39:01
AAVGQDCY

SEQ ID NO: 2092 - protein, 9 aa, Homo sapiens
  Table 1.2; DCAF4L2; ENSG00000176566; HLA -C*04:01
AAVGQDCYT

SEQ ID NO: 2093 - protein, 8 aa, Homo sapiens
  Table 1.2; DCAF4L2; ENSG00000176566; HLA -B*37:01
ADTPSCAV

SEQ ID NO: 2094 - protein, 9 aa, Homo sapiens
  Table 1.2; DCAF4L2; ENSG00000176566; HLA -A*30:01,HLA-B*37:01
ADTPSCAVL

SEQ ID NO: 2095 - protein, 10 aa, Homo sapiens
  Table 1.2; DCAF4L2; ENSG00000176566; HLA -C*16:02
ADTPSCAVLL

SEQ ID NO: 2096 - protein, 8 aa, Homo sapiens
  Table 1.2; DCAF4L2; ENSG00000176566; HLA -A*23:01
AIMTPLLF

SEQ ID NO: 2097 - protein, 8 aa, Homo sapiens
  Table 1.2; DCAF4L2; ENSG00000176566; HLA -B*56:01
APGLLMAV

SEQ ID NO: 2098 - protein, 10 aa, Homo sapiens
  Table 1.2; DCAF4L2; ENSG00000176566; HLA -B*07:02,HLA-B*08:01,HLA-C*07:02
APSMLRKNQL

SEQ ID NO: 2099 - protein, 8 aa, Homo sapiens
  Table 1.2; DCAF4L2; ENSG00000176566; HLA -A*30:02,HLA-A*32:01,HLA-B*15:01,HLA-B*46:01
ATKCVTQY

SEQ ID NO: 2100 - protein, 9 aa, Homo sapiens
  Table 1.2; DCAF4L2; ENSG00000176566; HLA -A*23:01
AVLLPASLF

SEQ ID NO: 2101 - protein, 9 aa, Homo sapiens
  Table 1.2; DCAF4L2; ENSG00000176566; HLA -B*57:01
AVREDLYCF

SEQ ID NO: 2102 - protein, 9 aa, Homo sapiens
  Table 1.2; DCAF4L2; ENSG00000176566; HLA -A*29:02,HLA-A*30:02,HLA-B*15:01,HLA-B*44:02
AWSLSIHAY

SEQ ID NO: 2103 - protein, 9 aa, Homo sapiens
  Table 1.2; DCAF4L2; ENSG00000176566; HLA -A*23:01,HLA-A*24:02,HLA-A*30:02,HLA-A*31:01,HLA-A*32:01, HLA-B*15:03,HLA-B*46:01,HLA-C*01:02,HLA-C*14:02
AYHSFSTGL

SEQ ID NO: 2104 - protein, 9 aa, Homo sapiens
  Table 1.2; DCAF4L2; ENSG00000176566; HLA -A*23:01,HLA-A*24:02,HLA-A*31:01
AYLPVHVNE

SEQ ID NO: 2105 - protein, 10 aa, Homo sapiens
  Table 1.2; DCAF4L2; ENSG00000176566; HLA -A*24:02
AYLPVHVNEE

SEQ ID NO: 2106 - protein, 9 aa, Homo sapiens
  Table 1.2; DCAF4L2; ENSG00000176566; HLA -B*35:03,HLA-C*03:03
CAVLLPASL

SEQ ID NO: 2107 - protein, 9 aa, Homo sapiens
  Table 1.2; DCAF4L2; ENSG00000176566; HLA -B*54:01
CAWSLSIHA

SEQ ID NO: 2108 - protein, 10 aa, Homo sapiens
  Table 1.2; DCAF4L2; ENSG00000176566; HLA -A*30:02
CAWSLSIHAY

SEQ ID NO: 2109 - protein, 9 aa, Homo sapiens
  Table 1.2; DCAF4L2; ENSG00000176566; HLA -B*57:01,HLA-B*58:01
CSFQIPDAW

SEQ ID NO: 2110 - protein, 8 aa, Homo sapiens
  Table 1.2; DCAF4L2; ENSG00000176566; HLA -A*24:02
CYTRIWSL

SEQ ID NO: 2111 - protein, 9 aa, Homo sapiens
  Table 1.2; DCAF4L2; ENSG00000176566; HLA -B*08:01
DCYTRIWSL

SEQ ID NO: 2112 - protein, 10 aa, Homo sapiens
  Table 1.2; DCAF4L2; ENSG00000176566; HLA -A*25:01,HLA-A*26:01,HLA-A*33:01,HLA-A*33:03,HLA-A*68:01
DIPSVAFSSR

SEQ ID NO: 2113 - protein, 11 aa, Homo sapiens
  Table 1.2; DCAF4L2; ENSG00000176566; HLA -A*68:02
DIPSVAFSSRL

SEQ ID NO: 2114 - protein, 8 aa, Homo sapiens
  Table 1.2; DCAF4L2; ENSG00000176566; HLA -B*08:01
DMTGTIKL

SEQ ID NO: 2115 - protein, 9 aa, Homo sapiens
  Table 1.2; DCAF4L2; ENSG00000176566; HLA -A*25:01,HLA-B*44:02
DMTGTIKLW

SEQ ID NO: 2116 - protein, 9 aa, Homo sapiens
  Table 1.2; DCAF4L2; ENSG00000176566; HLA -A*68:01
DPSSLASDR

SEQ ID NO: 2117 - protein, 10 aa, Homo sapiens
  Table 1.2; DCAF4L2; ENSG00000176566; HLA -B*35:01
DPSSLASDRF

SEQ ID NO: 2118 - protein, 9 aa, Homo sapiens
  Table 1.2; DCAF4L2; ENSG00000176566; HLA -A*02:03,HLA-B*13:02,HLA-B*39:01,HLA-B*51:01
DQLFTVNQV

SEQ ID NO: 2119 - protein, 9 aa, Homo sapiens
  Table 1.2; DCAF4L2; ENSG00000176566; HLA -B*51:01
DSAVTSLQI

SEQ ID NO: 2120 - protein, 9 aa, Homo sapiens
  Table 1.2; DCAF4L2; ENSG00000176566; HLA -A*68:02,HLA-B*51:01
DVLAQQFAI

SEQ ID NO: 2121 - protein, 10 aa, Homo sapiens
  Table 1.2; DCAF4L2; ENSG00000176566; HLA -A*25:01,HLA-A*26:01,HLA-A*33:01
DVLAQQFAIM

SEQ ID NO: 2122 - protein, 9 aa, Homo sapiens
  Table 1.2; DCAF4L2; ENSG00000176566; HLA -B*51:01
EADKQKKTV

SEQ ID NO: 2123 - protein, 10 aa, Homo sapiens
  Table 1.2; DCAF4L2; ENSG00000176566; HLA -A*33:03
EADKQKKTVR

SEQ ID NO: 2124 - protein, 10 aa, Homo sapiens
  Table 1.2; DCAF4L2; ENSG00000176566; HLA -B*44:03
EEADKQKKTV

SEQ ID NO: 2125 - protein, 9 aa, Homo sapiens
  Table 1.2; DCAF4L2; ENSG00000176566; HLA -A*30:01,HLA-B*18:01,HLA-B*39:01,HLA-B*40:01,HLA-B*49:01
EEEGVVAAV

SEQ ID NO: 2126 - protein, 8 aa, Homo sapiens
  Table 1.2; DCAF4L2; ENSG00000176566; HLA -B*18:01,HLA-B*49:01
EEGVVAAV

SEQ ID NO: 2127 - protein, 9 aa, Homo sapiens
  Table 1.2; DCAF4L2; ENSG00000176566; HLA -A*25:01,HLA-A*26:01,HLA-A*30:02,HLA-B*15:01,HLA-B*46:01
EGHVNNSAY

SEQ ID NO: 2128 - protein, 8 aa, Homo sapiens
  Table 1.2; DCAF4L2; ENSG00000176566; HLA -A*33:03
EIFGIDLR

SEQ ID NO: 2129 - protein, 9 aa, Homo sapiens
  Table 1.2; DCAF4L2; ENSG00000176566; HLA -A*68:02
EIFGIDLRC

SEQ ID NO: 2130 - protein, 9 aa, Homo sapiens
  Table 1.2; DCAF4L2; ENSG00000176566; HLA -A*33:01,HLA-A*33:03
ELRVSCMQR

SEQ ID NO: 2131 - protein, 9 aa, Homo sapiens
  Table 1.2; DCAF4L2; ENSG00000176566; HLA -A*33:01,HLA-A*33:03,HLA-B*35:01,HLA-B*38:01,HLA-C*04:01, HLA-C*05:01
ENDIPSVAF

SEQ ID NO: 2132 - protein, 8 aa, Homo sapiens
  Table 1.2; DCAF4L2; ENSG00000176566; HLA -A*23:01,HLA-B*51:01,HLA-C*03:03,HLA-C*03:04
FAIMTPLL

SEQ ID NO: 2133 - protein, 9 aa, Homo sapiens
  Table 1.2; DCAF4L2; ENSG00000176566; HLA -A*23:01,HLA-A*24:02,HLA-A*26:01,HLA-A*29:02,HLA-B*27:02, HLA-B*35:01,HLA-B*54:01,HLA-C*02:02,HLA-C*12:03
FAIMTPLLF

SEQ ID NO: 2134 - protein, 8 aa, Homo sapiens
  Table 1.2; DCAF4L2; ENSG00000176566; HLA -B*35:03,HLA-B*39:01,HLA-C*03:03,HLA-C*03:04
FGTSSDVL

SEQ ID NO: 2135 - protein, 9 aa, Homo sapiens
  Table 1.2; DCAF4L2; ENSG00000176566; HLA -A*02:01
FQIPDAWSC

SEQ ID NO: 2136 - protein, 9 aa, Homo sapiens
  Table 1.2; DCAF4L2; ENSG00000176566; HLA -A*68:02,HLA-B*13:02,HLA-C*16:02
FSTGLSQQV

SEQ ID NO: 2137 - protein, 9 aa, Homo sapiens
  Table 1.2; DCAF4L2; ENSG00000176566; HLA -A*02:07,HLA-B*13:02
GAPGLLMAV

SEQ ID NO: 2138 - protein, 8 aa, Homo sapiens
  Table 1.2; DCAF4L2; ENSG00000176566; HLA -A*30:01,HLA-B*40:01,HLA-B*49:01
GEIFGIDL

SEQ ID NO: 2139 - protein, 8 aa, Homo sapiens
  Table 1.2; DCAF4L2; ENSG00000176566; HLA -A*29:02
GFLRFANY

SEQ ID NO: 2140 - protein, 11 aa, Homo sapiens
  Table 1.2; DCAF4L2; ENSG00000176566; HLA -A*31:01
GGSKYGIITMR

SEQ ID NO: 2141 - protein, 9 aa, Homo sapiens
  Table 1.2; DCAF4L2; ENSG00000176566; HLA -B*27:05,HLA-B*38:01,HLA-B*39:01
GHVNNSAYL

SEQ ID NO: 2142 - protein, 9 aa, Homo sapiens
  Table 1.2; DCAF4L2; ENSG00000176566; HLA -A*02:01,HLA-A*02:03,HLA-B*55:01
GLADTPSCA

SEQ ID NO: 2143 - protein, 10 aa, Homo sapiens
  Table 1.2; DCAF4L2; ENSG00000176566; HLA -A*02:01,HLA-A*02:03,HLA-B*13:02,HLA-B*55:01
GLADTPSCAV

SEQ ID NO: 2144 - protein, 9 aa, Homo sapiens
  Table 1.2; DCAF4L2; ENSG00000176566; HLA -A*03:01,HLA-A*03:02,HLA-A*11:01,HLA-A*31:01,HLA-A*33:01, HLA-A*33:03
GLNAPSMLR

SEQ ID NO: 2145 - protein, 10 aa, Homo sapiens
  Table 1.2; DCAF4L2; ENSG00000176566; HLA -A*03:01,HLA-A*03:02,HLA-A*11:01
GLNAPSMLRK

SEQ ID NO: 2146 - protein, 11 aa, Homo sapiens
  Table 1.2; DCAF4L2; ENSG00000176566; HLA -A*02:01,HLA-A*02:03,HLA-A*02:04,HLA-B*55:01
GLSQQVLLTNV

SEQ ID NO: 2147 - protein, 9 aa, Homo sapiens
  Table 1.2; DCAF4L2; ENSG00000176566; HLA -A*02:01,HLA-A*02:03,HLA-B*13:02
GLTTPELRV

SEQ ID NO: 2148 - protein, 10 aa, Homo sapiens
  Table 1.2; DCAF4L2; ENSG00000176566; HLA -A*01:01,HLA-A*29:02,HLA-A*30:02,HLA-A*32:01,HLA-B*15:01, HLA-B*15:03,HLA-C*16:01
GLTTPELRVY

SEQ ID NO: 2149 - protein, 9 aa, Homo sapiens
  Table 1.2; DCAF4L2; ENSG00000176566; HLA -A*30:01,HLA-B*13:02,HLA-B*15:01,HLA-B*15:03,HLA-B*27:05, HLA-B*39:01
GQFLVSSDM

SEQ ID NO: 2150 - protein, 11 aa, Homo sapiens
  Table 1.2; DCAF4L2; ENSG00000176566; HLA -B*13:02,HLA-B*27:05
GQFLVSSDMTG

SEQ ID NO: 2151 - protein, 9 aa, Homo sapiens
  Table 1.2; DCAF4L2; ENSG00000176566; HLA -A*31:01,HLA-B*40:02,HLA-B*46:01,HLA-B*57:01,HLA-B*58:01, HLA-C*07:04,HLA-C*12:03
GSKYGIITM

SEQ ID NO: 2152 - protein, 10 aa, Homo sapiens
  Table 1.2; DCAF4L2; ENSG00000176566; HLA -A*31:01,HLA-A*33:01,HLA-A*33:03
GSKYGIITMR

SEQ ID NO: 2153 - protein, 9 aa, Homo sapiens
  Table 1.2; DCAF4L2; ENSG00000176566; HLA -A*11:01
GTSSDVLAQ

SEQ ID NO: 2154 - protein, 10 aa, Homo sapiens
  Table 1.2; DCAF4L2; ENSG00000176566; HLA -A*11:01
GTSSDVLAQQ

SEQ ID NO: 2155 - protein, 11 aa, Homo sapiens
  Table 1.2; DCAF4L2; ENSG00000176566; HLA -A*03:02,HLA-A*11:01,HLA-A*29:02,HLA-A*30:02,HLA-A*32:01, HLA-B*27:02,HLA-B*27:05,HLA-B*39:01,HLA-B*57:01,HLA-B*58:01
GTSSDVLAQQF

SEQ ID NO: 2156 - protein, 11 aa, Homo sapiens
  Table 1.2; DCAF4L2; ENSG00000176566; HLA -A*30:02,HLA-B*15:01,HLA-B*15:03
GVVAAVGQDCY

SEQ ID NO: 2157 - protein, 8 aa, Homo sapiens
  Table 1.2; DCAF4L2; ENSG00000176566; HLA -A*30:01,HLA-B*18:01,HLA-B*37:01,HLA-B*38:01,HLA-B*40:01, HLA-B*40:02
HDSAVTSL

SEQ ID NO: 2158 - protein, 10 aa, Homo sapiens
  Table 1.2; DCAF4L2; ENSG00000176566; HLA -B*38:01
HDSAVTSLQI

SEQ ID NO: 2159 - protein, 11 aa, Homo sapiens
  Table 1.2; DCAF4L2; ENSG00000176566; HLA -A*30:01
HDSAVTSLQIL

SEQ ID NO: 2160 - protein, 8 aa, Homo sapiens
  Table 1.2; DCAF4L2; ENSG00000176566; HLA -B*51:01
HGHLLTTI

SEQ ID NO: 2161 - protein, 8 aa, Homo sapiens
  Table 1.2; DCAF4L2; ENSG00000176566; HLA -A*02:07
HLDSHLLL

SEQ ID NO: 2162 - protein, 9 aa, Homo sapiens
  Table 1.2; DCAF4L2; ENSG00000176566; HLA -A*02:01,HLA-A*02:07
HLDSHLLLC

SEQ ID NO: 2163 - protein, 10 aa, Homo sapiens
  Table 1.2; DCAF4L2; ENSG00000176566; HLA -A*02:07
HLDSHLLLCF

SEQ ID NO: 2164 - protein, 10 aa, Homo sapiens
  Table 1.2; DCAF4L2; ENSG00000176566; HLA -A*01:01,HLA-A*29:02,HLA-A*30:02
HLLTTIPSPY

SEQ ID NO: 2165 - protein, 11 aa, Homo sapiens
  Table 1.2; DCAF4L2; ENSG00000176566; HLA -A*68:02,HLA-B*13:02
HSFSTGLSQQV

SEQ ID NO: 2166 - protein, 9 aa, Homo sapiens
  Table 1.2; DCAF4L2; ENSG00000176566; HLA -B*54:01
HSWDPSSLA

SEQ ID NO: 2167 - protein, 10 aa, Homo sapiens
  Table 1.2; DCAF4L2; ENSG00000176566; HLA -B*35:03,HLA-B*54:01
HVNEEEGVVA

SEQ ID NO: 2168 - protein, 9 aa, Homo sapiens
  Table 1.2; DCAF4L2; ENSG00000176566; HLA -B*38:01,HLA-B*39:01
IHSWDPSSL

SEQ ID NO: 2169 - protein, 11 aa, Homo sapiens
  Table 1.2; DCAF4L2; ENSG00000176566; HLA -A*23:01
ILANTNTDQLF

SEQ ID NO: 2170 - protein, 9 aa, Homo sapiens
  Table 1.2; DCAF4L2; ENSG00000176566; HLA -A*02:01,HLA-A*02:03,HLA-A*02:04,HLA-A*02:07,HLA-A*30:01, HLA-B*13:02,HLA-B*55:01
ILQDGQFLV

SEQ ID NO: 2171 - protein, 9 aa, Homo sapiens
  Table 1.2; DCAF4L2; ENSG00000176566; HLA -A*68:01
IPSVAFSSR

SEQ ID NO: 2172 - protein, 10 aa, Homo sapiens
  Table 1.2; DCAF4L2; ENSG00000176566; HLA -B*07:02
IPSVAFSSRL

SEQ ID NO: 2173 - protein, 9 aa, Homo sapiens
  Table 1.2; DCAF4L2; ENSG00000176566; HLA -A*03:01
KLWDLRATK

SEQ ID NO: 2174 - protein, 8 aa, Homo sapiens
  Table 1.2; DCAF4L2; ENSG00000176566; HLA -A*31:01
KTLYVPNR

SEQ ID NO: 2175 - protein, 9 aa, Homo sapiens
  Table 1.2; DCAF4L2; ENSG00000176566; HLA -A*03:01,HLA-A*03:02,HLA-A*11:01
KTLYVPNRK

SEQ ID NO: 2176 - protein, 9 aa, Homo sapiens
  Table 1.2; DCAF4L2; ENSG00000176566; HLA -B*58:01
KTVRVGLNA

SEQ ID NO: 2177 - protein, 8 aa, Homo sapiens
  Table 1.2; DCAF4L2; ENSG00000176566; HLA -A*31:01
KYGIITMR

SEQ ID NO: 2178 - protein, 9 aa, Homo sapiens
  Table 1.2; DCAF4L2; ENSG00000176566; HLA -B*51:01,HLA-C*03:03,HLA-C*03:04,HLA-C*05:01
LADTPSCAV

SEQ ID NO: 2179 - protein, 10 aa, Homo sapiens
  Table 1.2; DCAF4L2; ENSG00000176566; HLA -C*05:01
LADTPSCAVL

SEQ ID NO: 2180 - protein, 9 aa, Homo sapiens
  Table 1.2; DCAF4L2; ENSG00000176566; HLA -C*03:03,HLA-C*03:04
LANTNTDQL

SEQ ID NO: 2181 - protein, 10 aa, Homo sapiens
  Table 1.2; DCAF4L2; ENSG00000176566; HLA -B*57:01,HLA-B*58:01
LANTNTDQLF

SEQ ID NO: 2182 - protein, 9 aa, Homo sapiens
  Table 1.2; DCAF4L2; ENSG00000176566; HLA -A*23:01,HLA-A*24:02,HLA-C*14:02
LFIGSFPGM

SEQ ID NO: 2183 - protein, 9 aa, Homo sapiens
  Table 1.2; DCAF4L2; ENSG00000176566; HLA -A*30:02,HLA-B*57:01
LGFLRFANY

SEQ ID NO: 2184 - protein, 10 aa, Homo sapiens
  Table 1.2; DCAF4L2; ENSG00000176566; HLA -A*01:01
LLMAVREDLY

SEQ ID NO: 2185 - protein, 9 aa, Homo sapiens
  Table 1.2; DCAF4L2; ENSG00000176566; HLA -A*02:01,HLA-A*02:03
LLTNVVTGH

SEQ ID NO: 2186 - protein, 9 aa, Homo sapiens
  Table 1.2; DCAF4L2; ENSG00000176566; HLA -A*01:01,HLA-A*29:02,HLA-A*30:02,HLA-B*46:01
LLTTIPSPY

SEQ ID NO: 2187 - protein, 9 aa, Homo sapiens
  Table 1.2; DCAF4L2; ENSG00000176566; HLA -A*01:01,HLA-A*29:02,HLA-A*30:02
LMAVREDLY

SEQ ID NO: 2188 - protein, 9 aa, Homo sapiens
  Table 1.2; DCAF4L2; ENSG00000176566; HLA -B*54:01
LPASLFIGS

SEQ ID NO: 2189 - protein, 10 aa, Homo sapiens
  Table 1.2; DCAF4L2; ENSG00000176566; HLA -B*35:01,HLA-B*54:01
LPASLFIGSF

SEQ ID NO: 2190 - protein, 11 aa, Homo sapiens
  Table 1.2; DCAF4L2; ENSG00000176566; HLA -B*55:01
LPVHVNEEEGV

SEQ ID NO: 2191 - protein, 9 aa, Homo sapiens
  Table 1.2; DCAF4L2; ENSG00000176566; HLA -B*15:01,HLA-B*15:03
LQILQDGQF

SEQ ID NO: 2192 - protein, 10 aa, Homo sapiens
  Table 1.2; DCAF4L2; ENSG00000176566; HLA -B*38:01
LQILQDGQFL

SEQ ID NO: 2193 - protein, 9 aa, Homo sapiens
  Table 1.2; DCAF4L2; ENSG00000176566; HLA -A*24:02,HLA-A*25:01,HLA-B*46:01,HLA-B*57:01,HLA-B*58:01
LSIHAYHSF

SEQ ID NO: 2194 - protein, 8 aa, Homo sapiens
  Table 1.2; DCAF4L2; ENSG00000176566; HLA -A*01:01
LTTIPSPY

SEQ ID NO: 2195 - protein, 9 aa, Homo sapiens
  Table 1.2; DCAF4L2; ENSG00000176566; HLA -A*01:01,HLA-A*29:02,HLA-A*30:02,HLA-A*32:01,HLA-B*46:01, HLA-B*57:01,HLA-B*58:01,HLA-C*02:02,HLA-C*16:01,HLA-C*16:02
LTTPELRVY

SEQ ID NO: 2196 - protein, 10 aa, Homo sapiens
  Table 1.2; DCAF4L2; ENSG00000176566; HLA -B*35:01
MAVREDLYCF

SEQ ID NO: 2197 - protein, 8 aa, Homo sapiens
  Table 1.2; DCAF4L2; ENSG00000176566; HLA -B*08:01
MQRKKVQI

SEQ ID NO: 2198 - protein, 9 aa, Homo sapiens
  Table 1.2; DCAF4L2; ENSG00000176566; HLA -B*27:02,HLA-B*27:05
MRGLTTPEL

SEQ ID NO: 2199 - protein, 8 aa, Homo sapiens
  Table 1.2; DCAF4L2; ENSG00000176566; HLA -B*57:01
MTGTIKLW

SEQ ID NO: 2200 - protein, 8 aa, Homo sapiens
  Table 1.2; DCAF4L2; ENSG00000176566; HLA -B*51:01
NAPSMLRK

SEQ ID NO: 2201 - protein, 8 aa, Homo sapiens
  Table 1.2; DCAF4L2; ENSG00000176566; HLA -A*30:01,HLA-B*18:01,HLA-B*37:01,HLA-B*40:02,HLA-B*44:02, HLA-B*44:03
NDIPSVAF

SEQ ID NO: 2202 - protein, 11 aa, Homo sapiens
  Table 1.2; DCAF4L2; ENSG00000176566; HLA -A*33:01
NDIPSVAFSSR

SEQ ID NO: 2203 - protein, 8 aa, Homo sapiens
  Table 1.2; DCAF4L2; ENSG00000176566; HLA -B*18:01
NEEEGVVA

SEQ ID NO: 2204 - protein, 9 aa, Homo sapiens
  Table 1.2; DCAF4L2; ENSG00000176566; HLA -A*30:01,HLA-B*18:01,HLA-B*40:01
NEEEGVVAA

SEQ ID NO: 2205 - protein, 10 aa, Homo sapiens
  Table 1.2; DCAF4L2; ENSG00000176566; HLA -B*40:01
NEEEGVVAAV

SEQ ID NO: 2206 - protein, 8 aa, Homo sapiens
  Table 1.2; DCAF4L2; ENSG00000176566; HLA -B*38:01
NHLDSHLL

SEQ ID NO: 2207 - protein, 9 aa, Homo sapiens
  Table 1.2; DCAF4L2; ENSG00000176566; HLA -B*38:01,HLA-B*39:01
NHLDSHLLL

SEQ ID NO: 2208 - protein, 11 aa, Homo sapiens
  Table 1.2; DCAF4L2; ENSG00000176566; HLA -A*29:02
NQLGFLRFANY

SEQ ID NO: 2209 - protein, 10 aa, Homo sapiens
  Table 1.2; DCAF4L2; ENSG00000176566; HLA -A*25:01,HLA-A*26:01,HLA-A*30:02,HLA-A*32:01,HLA-B*15:01, HLA-B*15:03,HLA-B*18:01,HLA-B*38:01,HLA-B*39:01,HLA-B*44:03, HLA-C*07:04,HLA-C*16:04
NQVEAGGSKY

SEQ ID NO: 2210 - protein, 9 aa, Homo sapiens
  Table 1.2; DCAF4L2; ENSG00000176566; HLA -A*68:02
NSAYLPVHV

SEQ ID NO: 2211 - protein, 8 aa, Homo sapiens
  Table 1.2; DCAF4L2; ENSG00000176566; HLA -C*05:01
NTDQLFTV

SEQ ID NO: 2212 - protein, 9 aa, Homo sapiens
  Table 1.2; DCAF4L2; ENSG00000176566; HLA -A*01:01
NTDQLFTVN

SEQ ID NO: 2213 - protein, 10 aa, Homo sapiens
  Table 1.2; DCAF4L2; ENSG00000176566; HLA -A*23:01,HLA-A*25:01,HLA-A*26:01,HLA-A*32:01,HLA-B*35:01, HLA-B*46:01,HLA-B*58:01
NVVTGHQQSF

SEQ ID NO: 2214 - protein, 9 aa, Homo sapiens
  Table 1.2; DCAF4L2; ENSG00000176566; HLA -A*23:01,HLA-A*24:02
QFAIMTPLL

SEQ ID NO: 2215 - protein, 10 aa, Homo sapiens
  Table 1.2; DCAF4L2; ENSG00000176566; HLA -A*23:01,HLA-A*24:02
QFAIMTPLLF

SEQ ID NO: 2216 - protein, 8 aa, Homo sapiens
  Table 1.2; DCAF4L2; ENSG00000176566; HLA -B*35:03,HLA-C*14:02
QFLVSSDM

SEQ ID NO: 2217 - protein, 9 aa, Homo sapiens
  Table 1.2; DCAF4L2; ENSG00000176566; HLA -B*38:01
QILQDGQFL

SEQ ID NO: 2218 - protein, 10 aa, Homo sapiens
  Table 1.2; DCAF4L2; ENSG00000176566; HLA -A*25:01
QIPDAWSCAW

SEQ ID NO: 2219 - protein, 8 aa, Homo sapiens
  Table 1.2; DCAF4L2; ENSG00000176566; HLA -A*02:01,HLA-A*02:03,HLA-A*02:04,HLA-B*13:02,HLA-B*55:01
QLFTVNQV

SEQ ID NO: 2220 - protein, 10 aa, Homo sapiens
  Table 1.2; DCAF4L2; ENSG00000176566; HLA -A*02:01,HLA-A*02:03,HLA-B*56:01
QLFTVNQVEA

SEQ ID NO: 2221 - protein, 9 aa, Homo sapiens
  Table 1.2; DCAF4L2; ENSG00000176566; HLA -B*13:02,HLA-B*15:01,HLA-B*15:03,HLA-B*27:05
QQFAIMTPL

SEQ ID NO: 2222 - protein, 11 aa, Homo sapiens
  Table 1.2; DCAF4L2; ENSG00000176566; HLA -B*27:05,HLA-B*38:01,HLA-B*39:01
QQSFGTSSDVL

SEQ ID NO: 2223 - protein, 8 aa, Homo sapiens
  Table 1.2; DCAF4L2; ENSG00000176566; HLA -B*13:02
QQVLLTNV

SEQ ID NO: 2224 - protein, 9 aa, Homo sapiens
  Table 1.2; DCAF4L2; ENSG00000176566; HLA -B*13:02,HLA-B*39:01
QQVLLTNVV

SEQ ID NO: 2225 - protein, 10 aa, Homo sapiens
  Table 1.2; DCAF4L2; ENSG00000176566; HLA -B*39:01,HLA-B*40:01
QSFGTSSDVL

SEQ ID NO: 2226 - protein, 9 aa, Homo sapiens
  Table 1.2; DCAF4L2; ENSG00000176566; HLA -A*01:01,HLA-A*25:01,HLA-A*26:01,HLA-A*29:02,HLA-A*30:02, HLA-A*32:01,HLA-B*15:01,HLA-B*15:03,HLA-B*35:01,HLA-B*58:01, HLA-C*07:04
QVEAGGSKY

SEQ ID NO: 2227 - protein, 11 aa, Homo sapiens
  Table 1.2; DCAF4L2; ENSG00000176566; HLA -A*30:02
QYEGHVNNSAY

SEQ ID NO: 2228 - protein, 9 aa, Homo sapiens
  Table 1.2; DCAF4L2; ENSG00000176566; HLA -A*30:02,HLA-B*15:01,HLA-B*58:01,HLA-C*16:02
RATKCVTQY

SEQ ID NO: 2229 - protein, 9 aa, Homo sapiens
  Table 1.2; DCAF4L2; ENSG00000176566; HLA -B*44:03
REDLYCFSY

SEQ ID NO: 2230 - protein, 8 aa, Homo sapiens
  Table 1.2; DCAF4L2; ENSG00000176566; HLA -B*37:01
RELRVSCM

SEQ ID NO: 2231 - protein, 11 aa, Homo sapiens
  Table 1.2; DCAF4L2; ENSG00000176566; HLA -A*31:01
RGAPGLLMAVR

SEQ ID NO: 2232 - protein, 9 aa, Homo sapiens
  Table 1.2; DCAF4L2; ENSG00000176566; HLA -A*31:01
RGLTTPELR

SEQ ID NO: 2233 - protein, 11 aa, Homo sapiens
  Table 1.2; DCAF4L2; ENSG00000176566; HLA -A*30:02,HLA-B*57:01
RGLTTPELRVY

SEQ ID NO: 2234 - protein, 10 aa, Homo sapiens
  Table 1.2; DCAF4L2; ENSG00000176566; HLA -A*03:02
RLLEEADKQK

SEQ ID NO: 2235 - protein, 11 aa, Homo sapiens
  Table 1.2; DCAF4L2; ENSG00000176566; HLA -A*03:01,HLA-A*31:01
RVGLNAPSMLR

SEQ ID NO: 2236 - protein, 9 aa, Homo sapiens
  Table 1.2; DCAF4L2; ENSG00000176566; HLA -A*03:01,HLA-A*29:02,HLA-A*30:02,HLA-A*32:01,HLA-B*15:01, HLA-B*57:01,HLA-C*02:02
RVYPHKTLY

SEQ ID NO: 2237 - protein, 10 aa, Homo sapiens
  Table 1.2; DCAF4L2; ENSG00000176566; HLA -A*02:03,HLA-A*03:01
RVYPHKTLYV

SEQ ID NO: 2238 - protein, 8 aa, Homo sapiens
  Table 1.2; DCAF4L2; ENSG00000176566; HLA -B*51:01
SAVTSLQI

SEQ ID NO: 2239 - protein, 9 aa, Homo sapiens
  Table 1.2; DCAF4L2; ENSG00000176566; HLA -A*30:01,HLA-B*35:03,HLA-B*40:01,HLA-B*46:01,HLA-B*58:01, HLA-C*02:02,HLA-C*03:03,HLA-C*03:04,HLA-C*12:03,HLA-C*16:02
SAVTSLQIL

SEQ ID NO: 2240 - protein, 8 aa, Homo sapiens
  Table 1.2; DCAF4L2; ENSG00000176566; HLA -A*68:02,HLA-B*08:01,HLA-B*13:02,HLA-B*51:01,HLA-B*54:01, HLA-B*56:01,HLA-C*02:02,HLA-C*12:03
SAYLPVHV

SEQ ID NO: 2241 - protein, 9 aa, Homo sapiens
  Table 1.2; DCAF4L2; ENSG00000176566; HLA -B*54:01,HLA-C*12:03
SAYLPVHVN

SEQ ID NO: 2242 - protein, 9 aa, Homo sapiens
  Table 1.2; DCAF4L2; ENSG00000176566; HLA -A*30:01,HLA-B*37:01,HLA-B*40:01
SDMTGTIKL

SEQ ID NO: 2243 - protein, 10 aa, Homo sapiens
  Table 1.2; DCAF4L2; ENSG00000176566; HLA -B*44:02,HLA-B*44:03
SDMTGTIKLW

SEQ ID NO: 2244 - protein, 8 aa, Homo sapiens
  Table 1.2; DCAF4L2; ENSG00000176566; HLA -A*30:01,HLA-B*18:01,HLA-B*27:02,HLA-B*37:01,HLA-B*40:02, HLA-B*44:02,HLA-B*44:03,HLA-C*04:01
SDVLAQQF

SEQ ID NO: 2245 - protein, 8 aa, Homo sapiens
  Table 1.2; DCAF4L2; ENSG00000176566; HLA -A*30:01,HLA-B*18:01,HLA-B*37:01,HLA-B*49:01
SENDIPSV

SEQ ID NO: 2246 - protein, 9 aa, Homo sapiens
  Table 1.2; DCAF4L2; ENSG00000176566; HLA -A*30:01,HLA-B*18:01,HLA-B*49:01
SENDIPSVA

SEQ ID NO: 2247 - protein, 10 aa, Homo sapiens
  Table 1.2; DCAF4L2; ENSG00000176566; HLA -A*23:01,HLA-A*25:01,HLA-A*30:01,HLA-B*15:03,HLA-B*18:01, HLA-B*27:02,HLA-B*37:01,HLA-B*38:01,HLA-B*40:01,HLA-B*40:02, HLA-B*44:02,HLA-B*44:03,HLA-B*49:01,HLA-C*16:04
SENDIPSVAF

SEQ ID NO: 2248 - protein, 9 aa, Homo sapiens
  Table 1.2; DCAF4L2; ENSG00000176566; HLA -A*02:07,HLA-B*27:05,HLA-B*35:03,HLA-B*38:01,HLA-B*39:01, HLA-B*40:01,HLA-C*05:01
SHDSAVTSL

SEQ ID NO: 2249 - protein, 11 aa, Homo sapiens
  Table 1.2; DCAF4L2; ENSG00000176566; HLA -B*38:01
SHDSAVTSLQI

SEQ ID NO: 2250 - protein, 8 aa, Homo sapiens
  Table 1.2; DCAF4L2; ENSG00000176566; HLA -B*15:03
SKYGIITM

SEQ ID NO: 2251 - protein, 9 aa, Homo sapiens
  Table 1.2; DCAF4L2; ENSG00000176566; HLA -A*31:01
SKYGIITMR

SEQ ID NO: 2252 - protein, 10 aa, Homo sapiens
  Table 1.2; DCAF4L2; ENSG00000176566; HLA -A*02:03
SLASDRFNRI

SEQ ID NO: 2253 - protein, 10 aa, Homo sapiens
  Table 1.2; DCAF4L2; ENSG00000176566; HLA -A*02:01,HLA-A*02:03,HLA-A*02:04,HLA-A*26:01
SLFIGSFPGM

SEQ ID NO: 2254 - protein, 11 aa, Homo sapiens
  Table 1.2; DCAF4L2; ENSG00000176566; HLA -A*31:01
SLFIGSFPGMR

SEQ ID NO: 2255 - protein, 9 aa, Homo sapiens
  Table 1.2; DCAF4L2; ENSG00000176566; HLA -A*02:04
SLNHLDSHL

SEQ ID NO: 2256 - protein, 11 aa, Homo sapiens
  Table 1.2; DCAF4L2; ENSG00000176566; HLA -A*02:04
SLNHLDSHLLL

SEQ ID NO: 2257 - protein, 8 aa, Homo sapiens
  Table 1.2; DCAF4L2; ENSG00000176566; HLA -B*08:01
SMLRKNQL

SEQ ID NO: 2258 - protein, 9 aa, Homo sapiens
  Table 1.2; DCAF4L2; ENSG00000176566; HLA -A*02:01,HLA-A*02:03,HLA-A*02:04,HLA-B*13:02
SQQVLLTNV

SEQ ID NO: 2259 - protein, 8 aa, Homo sapiens
  Table 1.2; DCAF4L2; ENSG00000176566; HLA -C*05:01
SSDMTGTI

SEQ ID NO: 2260 - protein, 11 aa, Homo sapiens
  Table 1.2; DCAF4L2; ENSG00000176566; HLA -B*44:02
SSDMTGTIKLW

SEQ ID NO: 2261 - protein, 9 aa, Homo sapiens
  Table 1.2; DCAF4L2; ENSG00000176566; HLA -A*01:01,HLA-A*02:07,HLA-A*32:01,HLA-B*38:01,HLA-B*58:01, HLA-C*04:01,HLA-C*05:01
SSDVLAQQF

SEQ ID NO: 2262 - protein, 9 aa, Homo sapiens
  Table 1.2; DCAF4L2; ENSG00000176566; HLA -A*23:01
TGLSQQVLL

SEQ ID NO: 2263 - protein, 8 aa, Homo sapiens
  Table 1.2; DCAF4L2; ENSG00000176566; HLA -A*03:01
TLYVPNRK

SEQ ID NO: 2264 - protein, 9 aa, Homo sapiens
  Table 1.2; DCAF4L2; ENSG00000176566; HLA -A*02:03
TLYVPNRKV

SEQ ID NO: 2265 - protein, 11 aa, Homo sapiens
  Table 1.2; DCAF4L2; ENSG00000176566; HLA -A*31:01
TMRGLTTPELR

SEQ ID NO: 2266 - protein, 9 aa, Homo sapiens
  Table 1.2; DCAF4L2; ENSG00000176566; HLA -A*68:02
TNTDQLFTV

SEQ ID NO: 2267 - protein, 10 aa, Homo sapiens
  Table 1.2; DCAF4L2; ENSG00000176566; HLA -B*54:01
TPSCAVLLPA

SEQ ID NO: 2268 - protein, 9 aa, Homo sapiens
  Table 1.2; DCAF4L2; ENSG00000176566; HLA -B*27:05
TQYEGHVNN

SEQ ID NO: 2269 - protein, 10 aa, Homo sapiens
  Table 1.2; DCAF4L2; ENSG00000176566; HLA -A*02:03
TQYEGHVNNS

SEQ ID NO: 2270 - protein, 9 aa, Homo sapiens
  Table 1.2; DCAF4L2; ENSG00000176566; HLA -A*68:01
TSSDVLAQQ

SEQ ID NO: 2271 - protein, 10 aa, Homo sapiens
  Table 1.2; DCAF4L2; ENSG00000176566; HLA -A*23:01,HLA-A*24:02,HLA-A*25:01,HLA-A*26:01,HLA-A*29:02, HLA-A*30:02,HLA-A*32:01,HLA-A*33:03,HLA-A*68:01,HLA-A*68:02, HLA-B*18:01,HLA-B*27:02,HLA-B*27:05,HLA-B*35:01,HLA-B*38:01,
  HLA-B*39:01,HLA-B*44:02,HLA-B*44:03,HLA-B*57:01,HLA-B*58:01, HLA-C*07:06
TSSDVLAQQF

SEQ ID NO: 2272 - protein, 9 aa, Homo sapiens
  Table 1.2; DCAF4L2; ENSG00000176566; HLA -A*02:01,HLA-A*31:01,HLA-A*68:01,HLA-A*68:02,HLA-B*54:01, HLA-B*56:01,HLA-B*57:01
TTIPSPYPA

SEQ ID NO: 2273 - protein, 11 aa, Homo sapiens
  Table 1.2; DCAF4L2; ENSG00000176566; HLA -A*03:01,HLA-A*03:02,HLA-A*11:01,HLA-A*68:01
TVNQVEAGGSK

SEQ ID NO: 2274 - protein, 9 aa, Homo sapiens
  Table 1.2; DCAF4L2; ENSG00000176566; HLA -A*01:01,HLA-A*30:02,HLA-B*15:01,HLA-B*15:03,HLA-B*35:01, HLA-B*39:01,HLA-B*46:01,HLA-B*58:01,HLA-C*02:02,HLA-C*16:01
VAAVGQDCY

SEQ ID NO: 2275 - protein, 10 aa, Homo sapiens
  Table 1.2; DCAF4L2; ENSG00000176566; HLA -C*02:02
VAFSSRLGGF

SEQ ID NO: 2276 - protein, 8 aa, Homo sapiens
  Table 1.2; DCAF4L2; ENSG00000176566; HLA -A*32:01,HLA-B*15:03,HLA-B*18:01,HLA-B*37:01,HLA-B*39:01, HLA-B*44:02,HLA-B*44:03
VEAGGSKY

SEQ ID NO: 2277 - protein, 10 aa, Homo sapiens
  Table 1.2; DCAF4L2; ENSG00000176566; HLA -B*44:02,HLA-B*44:03,HLA-B*49:01
VEAGGSKYGI

SEQ ID NO: 2278 - protein, 9 aa, Homo sapiens
  Table 1.2; DCAF4L2; ENSG00000176566; HLA -A*02:01
VGLADTPSC

SEQ ID NO: 2279 - protein, 8 aa, Homo sapiens
  Table 1.2; DCAF4L2; ENSG00000176566; HLA -B*39:01,HLA-B*46:01,HLA-B*51:01,HLA-C*14:02,HLA-C*16:01
VGLNAPSM

SEQ ID NO: 2280 - protein, 9 aa, Homo sapiens
  Table 1.2; DCAF4L2; ENSG00000176566; HLA -A*23:01,HLA-C*03:03
VGLNAPSML

SEQ ID NO: 2281 - protein, 9 aa, Homo sapiens
  Table 1.2; DCAF4L2; ENSG00000176566; HLA -B*38:01,HLA-B*39:01
VHVNEEEGV

SEQ ID NO: 2282 - protein, 10 aa, Homo sapiens
  Table 1.2; DCAF4L2; ENSG00000176566; HLA -B*39:01
VHVNEEEGVV

SEQ ID NO: 2283 - protein, 11 aa, Homo sapiens
  Table 1.2; DCAF4L2; ENSG00000176566; HLA -B*38:01,HLA-B*39:01
VHVNEEEGVVA

SEQ ID NO: 2284 - protein, 8 aa, Homo sapiens
  Table 1.2; DCAF4L2; ENSG00000176566; HLA -B*13:02
VLAQQFAI

SEQ ID NO: 2285 - protein, 9 aa, Homo sapiens
  Table 1.2; DCAF4L2; ENSG00000176566; HLA -A*24:02
VLAQQFAIM

SEQ ID NO: 2286 - protein, 8 aa, Homo sapiens
  Table 1.2; DCAF4L2; ENSG00000176566; HLA -A*23:01
VLLPASLF

SEQ ID NO: 2287 - protein, 9 aa, Homo sapiens
  Table 1.2; DCAF4L2; ENSG00000176566; HLA -A*02:01,HLA-A*02:03,HLA-A*02:04,HLA-A*02:07,HLA-A*23:01, HLA-A*24:02,HLA-B*13:02
VLLPASLFI

SEQ ID NO: 2288 - protein, 9 aa, Homo sapiens
  Table 1.2; DCAF4L2; ENSG00000176566; HLA -A*02:01,HLA-A*02:04
VLLTNVVTG

SEQ ID NO: 2289 - protein, 10 aa, Homo sapiens
  Table 1.2; DCAF4L2; ENSG00000176566; HLA -A*03:01
VLLTNVVTGH

SEQ ID NO: 2290 - protein, 11 aa, Homo sapiens
  Table 1.2; DCAF4L2; ENSG00000176566; HLA -A*30:02
VNQVEAGGSKY

SEQ ID NO: 2291 - protein, 9 aa, Homo sapiens
  Table 1.2; DCAF4L2; ENSG00000176566; HLA -B*07:02,HLA-B*08:01,HLA-B*35:01,HLA-B*35:03,HLA-B*51:01, HLA-B*55:01,HLA-B*56:01,HLA-C*07:02,HLA-C*14:02
VPNRKVNSM

SEQ ID NO: 2292 - protein, 10 aa, Homo sapiens
  Table 1.2; DCAF4L2; ENSG00000176566; HLA -B*27:02
VRVGLNAPSM

SEQ ID NO: 2293 - protein, 9 aa, Homo sapiens
  Table 1.2; DCAF4L2; ENSG00000176566; HLA -B*13:02,HLA-B*58:01
VSSDMTGTI

SEQ ID NO: 2294 - protein, 10 aa, Homo sapiens
  Table 1.2; DCAF4L2; ENSG00000176566; HLA -A*03:01,HLA-A*03:02,HLA-A*11:01
VSSDMTGTIK

SEQ ID NO: 2295 - protein, 8 aa, Homo sapiens
  Table 1.2; DCAF4L2; ENSG00000176566; HLA -A*32:01,HLA-B*57:01,HLA-B*58:01
VTGHQQSF

SEQ ID NO: 2296 - protein, 10 aa, Homo sapiens
  Table 1.2; DCAF4L2; ENSG00000176566; HLA -A*01:01,HLA-A*26:01,HLA-A*29:02,HLA-A*30:02,HLA-A*32:01, HLA-B*15:01,HLA-B*15:03,HLA-B*27:05,HLA-B*58:01
VVAAVGQDCY

SEQ ID NO: 2297 - protein, 9 aa, Homo sapiens
  Table 1.2; DCAF4L2; ENSG00000176566; HLA -A*23:01,HLA-A*24:02,HLA-A*25:01,HLA-A*26:01,HLA-A*29:02, HLA-A*30:02,HLA-A*32:01,HLA-A*33:03,HLA-B*07:02,HLA-B*08:01, HLA-B*13:02,HLA-B*15:01,HLA-B*15:03,HLA-B*27:02,HLA-B*27:05,
  HLA-B*35:01,HLA-B*37:01,HLA-B*44:02,HLA-B*44:03,HLA-B*46:01, HLA-B*57:01,HLA-B*58:01,HLA-C*02:02,HLA-C*03:03,HLA-C*03:04, HLA-C*04:01,HLA-C*07:02,HLA-C*07:04,HLA-C*12:03,HLA-C*14:02, HLA-C*16:01,HLA-C*16:02,HLA-C*16:04
VVTGHQQSF

SEQ ID NO: 2298 - protein, 9 aa, Homo sapiens
  Table 1.2; DCAF4L2; ENSG00000176566; HLA -A*24:02
VYPHKTLYV

SEQ ID NO: 2299 - protein, 8 aa, Homo sapiens
  Table 1.2; DCAF4L2; ENSG00000176566; HLA -A*30:02
WSLSIHAY

SEQ ID NO: 2300 - protein, 9 aa, Homo sapiens
  Table 1.2; DCAF4L2; ENSG00000176566; HLA -A*30:01,HLA-B*18:01,HLA-B*40:01,HLA-B*40:02,HLA-B*49:01, HLA-B*54:01
YEGHVNNSA

SEQ ID NO: 2301 - protein, 10 aa, Homo sapiens
  Table 1.2; DCAF4L2; ENSG00000176566; HLA -A*30:02,HLA-B*18:01,HLA-B*44:02,HLA-B*44:03,HLA-C*16:04
YEGHVNNSAY

SEQ ID NO: 2302 - protein, 8 aa, Homo sapiens
  Table 1.2; DCAF4L2; ENSG00000176566; HLA -B*38:01,HLA-B*39:01,HLA-C*07:04
YHSFSTGL

SEQ ID NO: 2303 - protein, 11 aa, Homo sapiens
  Table 1.2; DCAF4L2; ENSG00000176566; HLA -B*35:01,HLA-B*35:03,HLA-B*54:01,HLA-B*55:01,HLA-B*56:01
YPASENDIPSV

SEQ ID NO: 2304 - protein, 8 aa, Homo sapiens
  Table 1.2; DCAF4L2; ENSG00000176566; HLA -B*51:01,HLA-B*54:01
YPHKTLYV

SEQ ID NO: 2305 - protein, 9 aa, Homo sapiens
  Table 1.2; DCAF4L2; ENSG00000176566; HLA -B*54:01
YPHKTLYVP

SEQ ID NO: 2306 - protein, 10 aa, Homo sapiens
  Table 1.2; DCAF4L2; ENSG00000176566; HLA -A*25:01,HLA-A*26:01,HLA-B*08:01
YVPNRKVNSM

SEQ ID NO: 2307 - protein, 9 aa, Homo sapiens
  Table 1.2; DEFB126; ENSG00000125788; HLA -A*23:01,HLA-A*24:02,HLA-A*30:01,HLA-A*32:01,HLA-B*07:02, HLA-B*13:02,HLA-B*27:05,HLA-B*35:01,HLA-B*35:03,HLA-B*40:02, HLA-B*51:01,HLA-B*54:01,HLA-B*55:01,HLA-B*56:01,HLA-B*57:01,
  HLA-B*58:01,HLA-C*04:01,HLA-C*06:02,HLA-C*07:02,HLA-C*16:01, HLA-C*16:02
APTPVSPTG

SEQ ID NO: 2308 - protein, 9 aa, Homo sapiens
  Table 1.2; DEFB126; ENSG00000125788; HLA -A*30:02,HLA-B*15:01,HLA-B*15:03
AQLVSGNWY

SEQ ID NO: 2309 - protein, 9 aa, Homo sapiens
  Table 1.2; DEFB126; ENSG00000125788; HLA -A*01:01,HLA-A*26:01,HLA-A*29:02,HLA-A*32:01,HLA-B*58:01
ATTATTTLM

SEQ ID NO: 2310 - protein, 9 aa, Homo sapiens
  Table 1.2; DEFB126; ENSG00000125788; HLA -A*02:04
AVFMLLAQL

SEQ ID NO: 2311 - protein, 9 aa, Homo sapiens
  Table 1.2; DEFB126; ENSG00000125788; HLA -A*03:01,HLA-A*03:02,HLA-A*11:01
CLNDVGICK

SEQ ID NO: 2312 - protein, 10 aa, Homo sapiens
  Table 1.2; DEFB126; ENSG00000125788; HLA -A*03:01,HLA-A*03:02,HLA-A*11:01
CLNDVGICKK

SEQ ID NO: 2313 - protein, 9 aa, Homo sapiens
  Table 1.2; DEFB126; ENSG00000125788; HLA -B*27:02,HLA-B*44:02,HLA-B*44:03,HLA-C*16:04
EEMHVKNGW

SEQ ID NO: 2314 - protein, 9 aa, Homo sapiens
  Table 1.2; DEFB126; ENSG00000125788; HLA -A*02:01,HLA-A*02:07,HLA-A*29:02,HLA-A*68:02
FTLAVFMLL

SEQ ID NO: 2315 - protein, 10 aa, Homo sapiens
  Table 1.2; DEFB126; ENSG00000125788; HLA -A*03:01,HLA-A*03:02,HLA-A*11:01
KCLNDVGICK

SEQ ID NO: 2316 - protein, 10 aa, Homo sapiens
  Table 1.2; DEFB126; ENSG00000125788; HLA -B*57:01
KSLLFTLAVF

SEQ ID NO: 2317 - protein, 9 aa, Homo sapiens
  Table 1.2; DEFB126; ENSG00000125788; HLA -A*32:01
KTTRISTVT

SEQ ID NO: 2318 - protein, 9 aa, Homo sapiens
  Table 1.2; DEFB126; ENSG00000125788; HLA -B*57:01
LAQLVSGNW

SEQ ID NO: 2319 - protein, 10 aa, Homo sapiens
  Table 1.2; DEFB126; ENSG00000125788; HLA -A*02:04
LLFTLAVFML

SEQ ID NO: 2320 - protein, 8 aa, Homo sapiens
  Table 1.2; DEFB126; ENSG00000125788; HLA -B*46:01,HLA-C*14:02
LMMTTASM

SEQ ID NO: 2321 - protein, 9 aa, Homo sapiens
  Table 1.2; DEFB126; ENSG00000125788; HLA -A*25:01,HLA-A*26:01,HLA-B*46:01,HLA-C*03:04
MTTASMSSM

SEQ ID NO: 2322 - protein, 8 aa, Homo sapiens
  Table 1.2; DEFB126; ENSG00000125788; HLA -B*07:02
PTPVSPTG

SEQ ID NO: 2323 - protein, 9 aa, Homo sapiens
  Table 1.2; DEFB126; ENSG00000125788; HLA -A*02:01,HLA-A*02:04,HLA-B*13:02
QLVSGNWYV

SEQ ID NO: 2324 - protein, 9 aa, Homo sapiens
  Table 1.2; DEFB126; ENSG00000125788; HLA -A*32:01
QTKTTRIST

SEQ ID NO: 2325 - protein, 9 aa, Homo sapiens
  Table 1.2; DEFB126; ENSG00000125788; HLA -A*02:01,HLA-A*02:03,HLA-A*03:01,HLA-A*32:01
SMAPTPVSP

SEQ ID NO: 2326 - protein, 11 aa, Homo sapiens
  Table 1.2; DEFB126; ENSG00000125788; HLA -A*02:01,HLA-C*04:01
SMAPTPVSPTG

SEQ ID NO: 2327 - protein, 10 aa, Homo sapiens
  Table 1.2; DEFB126; ENSG00000125788; HLA -A*02:01,HLA-A*02:03
SMSSMAPTPV

SEQ ID NO: 2328 - protein, 9 aa, Homo sapiens
  Table 1.2; DEFB126; ENSG00000125788; HLA -A*23:01,HLA-A*25:01,HLA-A*30:01,HLA-A*32:01,HLA-B*07:02, HLA-B*15:01,HLA-B*15:03,HLA-B*35:01,HLA-B*35:03,HLA-B*38:01, HLA-B*39:01,HLA-B*40:01,HLA-B*46:01,HLA-B*51:01,HLA-B*58:01,
  HLA-C*01:02,HLA-C*02:02,HLA-C*03:03,HLA-C*03:04,HLA-C*05:01, HLA-C*07:06,HLA-C*12:03,HLA-C*14:02,HLA-C*16:01,HLA-C*16:02
TATTATTTL

SEQ ID NO: 2329 - protein, 8 aa, Homo sapiens
  Table 1.2; DEFB126; ENSG00000125788; HLA -B*35:01,HLA-B*35:03,HLA-B*51:01
TATTTLMM

SEQ ID NO: 2330 - protein, 9 aa, Homo sapiens
  Table 1.2; DEFB126; ENSG00000125788; HLA -A*32:01,HLA-B*07:02,HLA-B*08:01,HLA-B*15:01,HLA-B*15:03, HLA-B*35:03,HLA-B*46:01,HLA-C*07:04,HLA-C*14:02
TLMMTTASM

SEQ ID NO: 2331 - protein, 9 aa, Homo sapiens
  Table 1.2; DEFB126; ENSG00000125788; HLA -B*27:05
TRISTVTAT

SEQ ID NO: 2332 - protein, 9 aa, Homo sapiens
  Table 1.2; DEFB126; ENSG00000125788; HLA -A*01:01,HLA-A*26:01,HLA-A*68:01
TTATTTLMM

SEQ ID NO: 2333 - protein, 9 aa, Homo sapiens
  Table 1.2; DEFB126; ENSG00000125788; HLA -B*40:02
TTRISTVTA

SEQ ID NO: 2334 - protein, 9 aa, Homo sapiens
  Table 1.2; DEFB126; ENSG00000125788; HLA -B*54:01,HLA-B*56:01
TTTLMMTTA

SEQ ID NO: 2335 - protein, 11 aa, Homo sapiens
  Table 1.2; DEFB126; ENSG00000125788; HLA -B*39:01
TVTATTATTTL

SEQ ID NO: 2336 - protein, 8 aa, Homo sapiens
  Table 1.2; DEFB126; ENSG00000125788; HLA -A*23:01
VFMLLAQL

SEQ ID NO: 2337 - protein, 9 aa, Homo sapiens
  Table 1.2; DEFB126; ENSG00000125788; HLA -B*07:02,HLA-C*16:01
VPADRRANY

SEQ ID NO: 2338 - protein, 8 aa, Homo sapiens
  Table 1.2; DEFB126; ENSG00000125788; HLA -B*13:02
VQTKTTRI

SEQ ID NO: 2339 - protein, 9 aa, Homo sapiens
  Table 1.2; DEFB126; ENSG00000125788; HLA -A*03:02,HLA-A*11:01
VSGNWYVKK

SEQ ID NO: 2340 - protein, 10 aa, Homo sapiens
  Table 1.2; DEFB126; ENSG00000125788; HLA -B*58:01,HLA-C*01:02
VTATTATTTL

SEQ ID NO: 2341 - protein, 9 aa, Homo sapiens
  Table 1.2; DMRT1; ENSG00000137090; HLA -C*05:01
AADSASGEV

SEQ ID NO: 2342 - protein, 8 aa, Homo sapiens
  Table 1.2; DMRT1; ENSG00000137090; HLA -C*16:01,HLA-C*16:02
AASEGRMV

SEQ ID NO: 2343 - protein, 9 aa, Homo sapiens
  Table 1.2; DMRT1; ENSG00000137090; HLA -A*32:01,HLA-B*07:02,HLA-B*13:02,HLA-B*38:01,HLA-B*46:01, HLA-B*51:01,HLA-B*58:01,HLA-C*02:02,HLA-C*03:03,HLA-C*03:04, HLA-C*07:02,HLA-C*12:03,HLA-C*16:01,HLA-C*16:02
AASEGRMVI

SEQ ID NO: 2344 - protein, 8 aa, Homo sapiens
  Table 1.2; DMRT1; ENSG00000137090; HLA -B*37:01
ADSASGEV

SEQ ID NO: 2345 - protein, 9 aa, Homo sapiens
  Table 1.2; DMRT1; ENSG00000137090; HLA -B*37:01,HLA-B*40:02
AERQRVMAA

SEQ ID NO: 2346 - protein, 11 aa, Homo sapiens
  Table 1.2; DMRT1; ENSG00000137090; HLA -A*02:01,HLA-A*02:03
ALAADSASGEV

SEQ ID NO: 2347 - protein, 11 aa, Homo sapiens
  Table 1.2; DMRT1; ENSG00000137090; HLA -A*02:03
ALVGAASGSSA

SEQ ID NO: 2348 - protein, 8 aa, Homo sapiens
  Table 1.2; DMRT1; ENSG00000137090; HLA -B*37:01
AMSSQYRM

SEQ ID NO: 2349 - protein, 9 aa, Homo sapiens
  Table 1.2; DMRT1; ENSG00000137090; HLA -A*68:01
APGVPPQGR

SEQ ID NO: 2350 - protein, 9 aa, Homo sapiens
  Table 1.2; DMRT1; ENSG00000137090; HLA -B*07:02,HLA-B*54:01,HLA-B*56:01
APHAPGVPP

SEQ ID NO: 2351 - protein, 9 aa, Homo sapiens
  Table 1.2; DMRT1; ENSG00000137090; HLA -B*54:01,HLA-B*55:01,HLA-B*56:01
APSYPEARA

SEQ ID NO: 2352 - protein, 11 aa, Homo sapiens
  Table 1.2; DMRT1; ENSG00000137090; HLA -B*07:02,HLA-B*56:01,HLA-C*07:02
APSYPEARASV

SEQ ID NO: 2353 - protein, 9 aa, Homo sapiens
  Table 1.2; DMRT1; ENSG00000137090; HLA -A*01:01,HLA-A*11:01
ASDLGAGSK

SEQ ID NO: 2354 - protein, 10 aa, Homo sapiens
  Table 1.2; DMRT1; ENSG00000137090; HLA -A*01:01,HLA-A*03:01,HLA-A*03:02,HLA-A*11:01
ASDLGAGSKK

SEQ ID NO: 2355 - protein, 9 aa, Homo sapiens
  Table 1.2; DMRT1; ENSG00000137090; HLA -B*07:02,HLA-B*39:01,HLA-B*46:01,HLA-B*58:01,HLA-C*01:02, HLA-C*03:03,HLA-C*03:04
ASGEVGNPL

SEQ ID NO: 2356 - protein, 10 aa, Homo sapiens
  Table 1.2; DMRT1; ENSG00000137090; HLA -A*30:01,HLA-B*37:01,HLA-B*39:01,HLA-B*40:01,HLA-B*44:03
CEPASEPSSF

SEQ ID NO: 2357 - protein, 8 aa, Homo sapiens
  Table 1.2; DMRT1; ENSG00000137090; HLA -B*07:02
CPQYSMAL

SEQ ID NO: 2358 - protein, 9 aa, Homo sapiens
  Table 1.2; DMRT1; ENSG00000137090; HLA -B*56:01
CPQYSMALA

SEQ ID NO: 2359 - protein, 10 aa, Homo sapiens
  Table 1.2; DMRT1; ENSG00000137090; HLA -B*56:01
CPQYSMALAA

SEQ ID NO: 2360 - protein, 8 aa, Homo sapiens
  Table 1.2; DMRT1; ENSG00000137090; HLA -B*51:01
DAPSYPEA

SEQ ID NO: 2361 - protein, 9 aa, Homo sapiens
  Table 1.2; DMRT1; ENSG00000137090; HLA -A*33:01,HLA-A*33:03,HLA-A*68:01,HLA-A*68:02,HLA-B*51:01, HLA-C*07:06
DAPSYPEAR

SEQ ID NO: 2362 - protein, 10 aa, Homo sapiens
  Table 1.2; DMRT1; ENSG00000137090; HLA -B*51:01
DAPSYPEARA

SEQ ID NO: 2363 - protein, 9 aa, Homo sapiens
  Table 1.2; DMRT1; ENSG00000137090; HLA -B*18:01
DEAFSKPST

SEQ ID NO: 2364 - protein, 11 aa, Homo sapiens
  Table 1.2; DMRT1; ENSG00000137090; HLA -A*33:01
DLGAGSKKSPR

SEQ ID NO: 2365 - protein, 9 aa, Homo sapiens
  Table 1.2; DMRT1; ENSG00000137090; HLA -A*01:01,HLA-A*25:01,HLA-A*26:01,HLA-B*15:03
DLVSDSTYY

SEQ ID NO: 2366 - protein, 11 aa, Homo sapiens
  Table 1.2; DMRT1; ENSG00000137090; HLA -A*26:01,HLA-A*33:01,HLA-A*68:01,HLA-A*68:02,HLA-B*38:01, HLA-B*39:01
DSASGEVGNPL

SEQ ID NO: 2367 - protein, 8 aa, Homo sapiens
  Table 1.2; DMRT1; ENSG00000137090; HLA -A*25:01
DSTYYSSF

SEQ ID NO: 2368 - protein, 9 aa, Homo sapiens
  Table 1.2; DMRT1; ENSG00000137090; HLA -A*01:01,HLA-A*26:01
DSTYYSSFY

SEQ ID NO: 2369 - protein, 9 aa, Homo sapiens
  Table 1.2; DMRT1; ENSG00000137090; HLA -A*26:01,HLA-A*33:03
EAFSKPSTP

SEQ ID NO: 2370 - protein, 8 aa, Homo sapiens
  Table 1.2; DMRT1; ENSG00000137090; HLA -B*51:01
EAPHAPGV

SEQ ID NO: 2371 - protein, 10 aa, Homo sapiens
  Table 1.2; DMRT1; ENSG00000137090; HLA -A*33:01,HLA-A*33:03,HLA-A*68:01,HLA-B*27:02
EDAPSYPEAR

SEQ ID NO: 2372 - protein, 8 aa, Homo sapiens
  Table 1.2; DMRT1; ENSG00000137090; HLA -B*18:01
EEELGISH

SEQ ID NO: 2373 - protein, 10 aa, Homo sapiens
  Table 1.2; DMRT1; ENSG00000137090; HLA -B*27:02,HLA-B*40:01,HLA-B*44:02
EEELGISHPI

SEQ ID NO: 2374 - protein, 9 aa, Homo sapiens
  Table 1.2; DMRT1; ENSG00000137090; HLA -B*18:01,HLA-B*44:02,HLA-B*44:03,HLA-B*49:01
EELGISHPI

SEQ ID NO: 2375 - protein, 11 aa, Homo sapiens
  Table 1.2; DMRT1; ENSG00000137090; HLA -A*33:01
ENRHAMSSQYR

SEQ ID NO: 2376 - protein, 9 aa, Homo sapiens
  Table 1.2; DMRT1; ENSG00000137090; HLA -A*25:01,HLA-A*26:01,HLA-B*07:02,HLA-B*35:01,HLA-B*35:03, HLA-B*39:01,HLA-B*55:01
EPASEPSSF

SEQ ID NO: 2377 - protein, 11 aa, Homo sapiens
  Table 1.2; DMRT1; ENSG00000137090; HLA -A*26:01
EVGNPLGGSPV

SEQ ID NO: 2378 - protein, 10 aa, Homo sapiens
  Table 1.2; DMRT1; ENSG00000137090; HLA -A*29:02
FFTFEDAPSY

SEQ ID NO: 2379 - protein, 8 aa, Homo sapiens
  Table 1.2; DMRT1; ENSG00000137090; HLA -B*08:01,HLA-B*40:02,HLA-B*46:01,HLA-C*03:04
FGKASGAL

SEQ ID NO: 2380 - protein, 9 aa, Homo sapiens
  Table 1.2; DMRT1; ENSG00000137090; HLA -A*02:03,HLA-B*40:02,HLA-B*46:01,HLA-C*02:02,HLA-C*12:03
FGKASGALV

SEQ ID NO: 2381 - protein, 11 aa, Homo sapiens
  Table 1.2; DMRT1; ENSG00000137090; HLA -B*54:01
FGKASGALVGA

SEQ ID NO: 2382 - protein, 8 aa, Homo sapiens
  Table 1.2; DMRT1; ENSG00000137090; HLA -B*35:01
FPYYNNLY

SEQ ID NO: 2383 - protein, 9 aa, Homo sapiens
  Table 1.2; DMRT1; ENSG00000137090; HLA -B*46:01
FSKPSTPSE

SEQ ID NO: 2384 - protein, 9 aa, Homo sapiens
  Table 1.2; DMRT1; ENSG00000137090; HLA -A*01:01,HLA-A*11:01,HLA-A*25:01,HLA-A*26:01,HLA-A*29:02, HLA-A*30:02,HLA-A*32:01,HLA-A*68:01,HLA-B*15:01,HLA-B*15:03, HLA-B*18:01,HLA-B*27:05,HLA-B*35:01,HLA-B*39:01,HLA-B*46:01,
  HLA-B*57:01,HLA-B*58:01,HLA-C*02:02,HLA-C*03:03,HLA-C*03:04, HLA-C*07:04,HLA-C*07:06,HLA-C*12:03,HLA-C*16:01,HLA-C*16:04
FTFEDAPSY

SEQ ID NO: 2385 - protein, 9 aa, Homo sapiens
  Table 1.2; DMRT1; ENSG00000137090; HLA -A*24:02,HLA-A*29:02
FYQPSLFPY

SEQ ID NO: 2386 - protein, 10 aa, Homo sapiens
  Table 1.2; DMRT1; ENSG00000137090; HLA -A*24:02,HLA-A*29:02,HLA-A*30:02
FYQPSLFPYY

SEQ ID NO: 2387 - protein, 10 aa, Homo sapiens
  Table 1.2; DMRT1; ENSG00000137090; HLA -A*11:01,HLA-B*27:02
GASDLGAGSK

SEQ ID NO: 2388 - protein, 11 aa, Homo sapiens
  Table 1.2; DMRT1; ENSG00000137090; HLA -A*03:01,HLA-A*03:02,HLA-A*11:01,HLA-B*27:02,HLA-B*27:05
GASDLGAGSKK

SEQ ID NO: 2389 - protein, 9 aa, Homo sapiens
  Table 1.2; DMRT1; ENSG00000137090; HLA -B*49:01
GEVGNPLGG

SEQ ID NO: 2390 - protein, 10 aa, Homo sapiens
  Table 1.2; DMRT1; ENSG00000137090; HLA -B*27:05
GEVGNPLGGS

SEQ ID NO: 2391 - protein, 11 aa, Homo sapiens
  Table 1.2; DMRT1; ENSG00000137090; HLA -B*39:01,HLA-B*40:02,HLA-C*16:04
GEVGNPLGGSP

SEQ ID NO: 2392 - protein, 9 aa, Homo sapiens
  Table 1.2; DMRT1; ENSG00000137090; HLA -A*32:01,HLA-B*07:02,HLA-B*08:01,HLA-B*13:02,HLA-B*15:03, HLA-B*27:05,HLA-B*37:01,HLA-B*38:01,HLA-B*39:01,HLA-B*40:01, HLA-B*58:01,HLA-C*06:02,HLA-C*16:01,HLA-C*16:02
GGSPVKNSL

SEQ ID NO: 2393 - protein, 9 aa, Homo sapiens
  Table 1.2; DMRT1; ENSG00000137090; HLA -B*27:05,HLA-B*38:01,HLA-B*39:01
GHVENTPDL

SEQ ID NO: 2394 - protein, 10 aa, Homo sapiens
  Table 1.2; DMRT1; ENSG00000137090; HLA -B*39:01
GHVENTPDLV

SEQ ID NO: 2395 - protein, 9 aa, Homo sapiens
  Table 1.2; DMRT1; ENSG00000137090; HLA -B*07:02,HLA-B*56:01
GPYVPGQTG

SEQ ID NO: 2396 - protein, 8 aa, Homo sapiens
  Table 1.2; DMRT1; ENSG00000137090; HLA -B*13:02
GQSVPQFF

SEQ ID NO: 2397 - protein, 9 aa, Homo sapiens
  Table 1.2; DMRT1; ENSG00000137090; HLA -B*13:02
GQSVPQFFT

SEQ ID NO: 2398 - protein, 9 aa, Homo sapiens
  Table 1.2; DMRT1; ENSG00000137090; HLA -B*13:02,HLA-B*27:05
GQTGNQWQM

SEQ ID NO: 2399 - protein, 8 aa, Homo sapiens
  Table 1.2; DMRT1; ENSG00000137090; HLA -B*27:05
GRAGGFGK

SEQ ID NO: 2400 - protein, 8 aa, Homo sapiens
  Table 1.2; DMRT1; ENSG00000137090; HLA -B*08:01,HLA-C*01:02
GSPVKNSL

SEQ ID NO: 2401 - protein, 8 aa, Homo sapiens
  Table 1.2; DMRT1; ENSG00000137090; HLA -A*31:01,HLA-A*33:01,HLA-A*33:03,HLA-A*68:01
HAMSSQYR

SEQ ID NO: 2402 - protein, 9 aa, Homo sapiens
  Table 1.2; DMRT1; ENSG00000137090; HLA -B*35:01,HLA-B*35:03,HLA-B*54:01,HLA-B*58:01
HAMSSQYRM

SEQ ID NO: 2403 - protein, 10 aa, Homo sapiens
  Table 1.2; DMRT1; ENSG00000137090; HLA -A*68:01,HLA-C*07:06
HAPGVPPQGR

SEQ ID NO: 2404 - protein, 8 aa, Homo sapiens
  Table 1.2; DMRT1; ENSG00000137090; HLA -A*11:01,HLA-B*51:01,HLA-C*06:02
HGYASPLK

SEQ ID NO: 2405 - protein, 9 aa, Homo sapiens
  Table 1.2; DMRT1; ENSG00000137090; HLA -B*13:02,HLA-C*06:02
HGYASPLKG

SEQ ID NO: 2406 - protein, 8 aa, Homo sapiens
  Table 1.2; DMRT1; ENSG00000137090; HLA -B*51:01,HLA-B*54:01,HLA-B*55:01,HLA-B*56:01
HPIPLPSA

SEQ ID NO: 2407 - protein, 9 aa, Homo sapiens
  Table 1.2; DMRT1; ENSG00000137090; HLA -B*35:03,HLA-B*54:01,HLA-B*55:01,HLA-B*56:01
HPIPLPSAA

SEQ ID NO: 2408 - protein, 11 aa, Homo sapiens
  Table 1.2; DMRT1; ENSG00000137090; HLA -B*35:01,HLA-B*35:03
HPIPLPSAAEL

SEQ ID NO: 2409 - protein, 9 aa, Homo sapiens
  Table 1.2; DMRT1; ENSG00000137090; HLA -A*01:01,HLA-A*03:01,HLA-A*11:01,HLA-A*25:01,HLA-A*26:01, HLA-A*29:02,HLA-A*30:02,HLA-A*31:01,HLA-A*32:01,HLA-A*33:01, HLA-A*68:01,HLA-B*13:02,HLA-B*15:01,HLA-B*15:03,HLA-B*35:01,
  HLA-B*46:01,HLA-B*51:01,HLA-B*54:01,HLA-B*57:01,HLA-B*58:01, HLA-C*02:02,HLA-C*03:03,HLA-C*03:04,HLA-C*12:03,HLA-C*16:01
HSYYPPPSY

SEQ ID NO: 2410 - protein, 10 aa, Homo sapiens
  Table 1.2; DMRT1; ENSG00000137090; HLA -A*03:01,HLA-A*68:02
HSYYPPPSYL

SEQ ID NO: 2411 - protein, 8 aa, Homo sapiens
  Table 1.2; DMRT1; ENSG00000137090; HLA -B*08:01,HLA-C*16:01
IAERQRVM

SEQ ID NO: 2412 - protein, 9 aa, Homo sapiens
  Table 1.2; DMRT1; ENSG00000137090; HLA -A*23:01,HLA-B*07:02,HLA-B*35:01,HLA-B*35:03,HLA-B*51:01, HLA-B*56:01,HLA-C*03:03,HLA-C*03:04,HLA-C*07:02,HLA-C*14:02
IPLPSAAEL

SEQ ID NO: 2413 - protein, 10 aa, Homo sapiens
  Table 1.2; DMRT1; ENSG00000137090; HLA -B*35:03
IPLPSAAELL

SEQ ID NO: 2414 - protein, 11 aa, Homo sapiens
  Table 1.2; DMRT1; ENSG00000137090; HLA -A*23:01,HLA-B*51:01,HLA-B*54:01
IPLPSAAELLV

SEQ ID NO: 2415 - protein, 10 aa, Homo sapiens
  Table 1.2; DMRT1; ENSG00000137090; HLA -B*54:01
ISHPIPLPSA

SEQ ID NO: 2416 - protein, 9 aa, Homo sapiens
  Table 1.2; DMRT1; ENSG00000137090; HLA -A*32:01,HLA-B*55:01,HLA-B*56:01
KASGALVGA

SEQ ID NO: 2417 - protein, 9 aa, Homo sapiens
  Table 1.2; DMRT1; ENSG00000137090; HLA -B*07:02
KPSTPSEAP

SEQ ID NO: 2418 - protein, 10 aa, Homo sapiens
  Table 1.2; DMRT1; ENSG00000137090; HLA -B*39:01
LAADSASGEV

SEQ ID NO: 2419 - protein, 9 aa, Homo sapiens
  Table 1.2; DMRT1; ENSG00000137090; HLA -A*29:02
LFPYYNNLY

SEQ ID NO: 2420 - protein, 9 aa, Homo sapiens
  Table 1.2; DMRT1; ENSG00000137090; HLA -A*32:01
LGAGSKKSP

SEQ ID NO: 2421 - protein, 9 aa, Homo sapiens
  Table 1.2; DMRT1; ENSG00000137090; HLA -B*08:01,HLA-C*16:01
LIAERQRVM

SEQ ID NO: 2422 - protein, 8 aa, Homo sapiens
  Table 1.2; DMRT1; ENSG00000137090; HLA -B*35:03
LPSAAELL

SEQ ID NO: 2423 - protein, 9 aa, Homo sapiens
  Table 1.2; DMRT1; ENSG00000137090; HLA -B*35:03,HLA-B*51:01,HLA-B*54:01,HLA-B*56:01
LPSAAELLV

SEQ ID NO: 2424 - protein, 10 aa, Homo sapiens
  Table 1.2; DMRT1; ENSG00000137090; HLA -A*03:01,HLA-A*03:02,HLA-A*11:01
LSSSSPISNK

SEQ ID NO: 2425 - protein, 8 aa, Homo sapiens
  Table 1.2; DMRT1; ENSG00000137090; HLA -A*30:02,HLA-B*39:01
LVSDSTYY

SEQ ID NO: 2426 - protein, 11 aa, Homo sapiens
  Table 1.2; DMRT1; ENSG00000137090; HLA -A*25:01
LVSDSTYYSSF

SEQ ID NO: 2427 - protein, 9 aa, Homo sapiens
  Table 1.2; DMRT1; ENSG00000137090; HLA -A*24:02
LYNCPQYSM

SEQ ID NO: 2428 - protein, 8 aa, Homo sapiens
  Table 1.2; DMRT1; ENSG00000137090; HLA -A*33:01,HLA-A*33:03,HLA-A*68:01,HLA-B*27:02,HLA-C*07:06
MAAQVALR

SEQ ID NO: 2429 - protein, 9 aa, Homo sapiens
  Table 1.2; DMRT1; ENSG00000137090; HLA -A*33:01,HLA-A*33:03,HLA-A*68:01,HLA-A*68:02,HLA-C*07:06
MAAQVALRR

SEQ ID NO: 2430 - protein, 8 aa, Homo sapiens
  Table 1.2; DMRT1; ENSG00000137090; HLA -B*54:01
MALAADSA

SEQ ID NO: 2431 - protein, 10 aa, Homo sapiens
  Table 1.2; DMRT1; ENSG00000137090; HLA -A*30:02
MSSQYRMHSY

SEQ ID NO: 2432 - protein, 9 aa, Homo sapiens
  Table 1.2; DMRT1; ENSG00000137090; HLA -A*02:01,HLA-A*02:03,HLA-A*02:04,HLA-A*02:07,HLA-A*25:01, HLA-A*26:01,HLA-A*30:01,HLA-A*68:02,HLA-B*13:02,HLA-B*35:01, HLA-B*35:03,HLA-B*40:02,HLA-B*46:01,HLA-B*54:01,HLA-B*55:01,
  HLA-B*56:01,HLA-B*58:01,HLA-C*03:03,HLA-C*03:04
MVIQDIPAV

SEQ ID NO: 2433 - protein, 9 aa, Homo sapiens
  Table 1.2; DMRT1; ENSG00000137090; HLA -C*01:02
NCPQYSMAL

SEQ ID NO: 2434 - protein, 8 aa, Homo sapiens
  Table 1.2; DMRT1; ENSG00000137090; HLA -B*08:01
NMENRHAM

SEQ ID NO: 2435 - protein, 9 aa, Homo sapiens
  Table 1.2; DMRT1; ENSG00000137090; HLA -A*29:02,HLA-C*07:01
NNLYNCPQY

SEQ ID NO: 2436 - protein, 9 aa, Homo sapiens
  Table 1.2; DMRT1; ENSG00000137090; HLA -B*35:01,HLA-B*35:03
NPLGGSPVK

SEQ ID NO: 2437 - protein, 9 aa, Homo sapiens
  Table 1.2; DMRT1; ENSG00000137090; HLA -A*30:02,HLA-B*27:02,HLA-B*27:05,HLA-C*07:01,HLA-C*16:04
NRHAMSSQY

SEQ ID NO: 2438 - protein, 10 aa, Homo sapiens
  Table 1.2; DMRT1; ENSG00000137090; HLA -A*01:01,HLA-A*30:02
NSLRGLPGPY

SEQ ID NO: 2439 - protein, 11 aa, Homo sapiens
  Table 1.2; DMRT1; ENSG00000137090; HLA -A*01:01,HLA-A*25:01,HLA-A*26:01
NTPDLVSDSTY

SEQ ID NO: 2440 - protein, 10 aa, Homo sapiens
  Table 1.2; DMRT1; ENSG00000137090; HLA -C*07:01
PDLVSDSTYY

SEQ ID NO: 2441 - protein, 8 aa, Homo sapiens
  Table 1.2; DMRT1; ENSG00000137090; HLA -B*18:01
PEARASVF

SEQ ID NO: 2442 - protein, 8 aa, Homo sapiens
  Table 1.2; DMRT1; ENSG00000137090; HLA -A*03:02
PLGGSPVK

SEQ ID NO: 2443 - protein, 9 aa, Homo sapiens
  Table 1.2; DMRT1; ENSG00000137090; HLA -B*56:01
PPASVPTTA

SEQ ID NO: 2444 - protein, 10 aa, Homo sapiens
  Table 1.2; DMRT1; ENSG00000137090; HLA -B*56:01
PPASVPTTAA

SEQ ID NO: 2445 - protein, 11 aa, Homo sapiens
  Table 1.2; DMRT1; ENSG00000137090; HLA -B*57:01
PSYPEARASVF

SEQ ID NO: 2446 - protein, 11 aa, Homo sapiens
  Table 1.2; DMRT1; ENSG00000137090; HLA -A*23:01,HLA-A*24:02
PYVPGQTGNQW

SEQ ID NO: 2447 - protein, 9 aa, Homo sapiens
  Table 1.2; DMRT1; ENSG00000137090; HLA -A*11:01,HLA-A*31:01,HLA-A*33:01,HLA-A*33:03,HLA-A*68:01, HLA-B*27:02,HLA-C*07:06
QDIPAVTSR

SEQ ID NO: 2448 - protein, 8 aa, Homo sapiens
  Table 1.2; DMRT1; ENSG00000137090; HLA -B*37:01
QDSGLVSL

SEQ ID NO: 2449 - protein, 9 aa, Homo sapiens
  Table 1.2; DMRT1; ENSG00000137090; HLA -B*18:01
QEEELGISH

SEQ ID NO: 2450 - protein, 11 aa, Homo sapiens
  Table 1.2; DMRT1; ENSG00000137090; HLA -A*29:02
QFFTFEDAPSY

SEQ ID NO: 2451 - protein, 11 aa, Homo sapiens
  Table 1.2; DMRT1; ENSG00000137090; HLA -B*07:02,HLA-B*51:01,HLA-B*54:01,HLA-B*55:01,HLA-B*56:01
QPPPASVPTTA

SEQ ID NO: 2452 - protein, 10 aa, Homo sapiens
  Table 1.2; DMRT1; ENSG00000137090; HLA -B*13:02,HLA-B*38:01
QQAQEEELGI

SEQ ID NO: 2453 - protein, 10 aa, Homo sapiens
  Table 1.2; DMRT1; ENSG00000137090; HLA -B*27:02,HLA-B*27:05
QRVMAAQVAL

SEQ ID NO: 2454 - protein, 9 aa, Homo sapiens
  Table 1.2; DMRT1; ENSG00000137090; HLA -A*23:01,HLA-A*24:02,HLA-A*25:01,HLA-B*57:01,HLA-B*58:01
QSVPQFFTF

SEQ ID NO: 2455 - protein, 10 aa, Homo sapiens
  Table 1.2; DMRT1; ENSG00000137090; HLA -A*30:01,HLA-B*40:01,HLA-B*40:02,HLA-B*44:02,HLA-B*44:03
RENNGSNPCL

SEQ ID NO: 2456 - protein, 11 aa, Homo sapiens
  Table 1.2; DMRT1; ENSG00000137090; HLA -B*40:01
RENNGSNPCLM

SEQ ID NO: 2457 - protein, 10 aa, Homo sapiens
  Table 1.2; DMRT1; ENSG00000137090; HLA -A*02:01
RMVIQDIPAV

SEQ ID NO: 2458 - protein, 9 aa, Homo sapiens
  Table 1.2; DMRT1; ENSG00000137090; HLA -B*13:02
RQRVMAAQV

SEQ ID NO: 2459 - protein, 9 aa, Homo sapiens
  Table 1.2; DMRT1; ENSG00000137090; HLA -A*02:04,HLA-A*03:01,HLA-A*03:02,HLA-A*11:01,HLA-A*23:01, HLA-A*31:01,HLA-A*32:01,HLA-B*07:02,HLA-B*08:01,HLA-B*13:02, HLA-B*15:01,HLA-B*15:03,HLA-B*46:01,HLA-B*56:01,HLA-B*58:01,
  HLA-C*01:02,HLA-C*03:04,HLA-C*07:02
RVMAAQVAL

SEQ ID NO: 2460 - protein, 10 aa, Homo sapiens
  Table 1.2; DMRT1; ENSG00000137090; HLA -A*03:01,HLA-A*03:02,HLA-A*11:01,HLA-A*31:01,HLA-A*33:03, HLA-A*68:01,HLA-B*27:02,HLA-B*57:01
RVMAAQVALR

SEQ ID NO: 2461 - protein, 11 aa, Homo sapiens
  Table 1.2; DMRT1; ENSG00000137090; HLA -A*03:01,HLA-A*31:01
RVMAAQVALRR

SEQ ID NO: 2462 - protein, 9 aa, Homo sapiens
  Table 1.2; DMRT1; ENSG00000137090; HLA -A*11:01,HLA-A*26:01,HLA-A*31:01,HLA-A*33:01,HLA-A*33:03, HLA-A*68:01,HLA-A*68:02,HLA-C*07:06
SAAELLVKR

SEQ ID NO: 2463 - protein, 10 aa, Homo sapiens
  Table 1.2; DMRT1; ENSG00000137090; HLA -A*68:01,HLA-B*07:02,HLA-B*27:05,HLA-B*35:03,HLA-B*39:01, HLA-B*40:01,HLA-C*03:03,HLA-C*03:04,HLA-C*07:06
SASGEVGNPL

SEQ ID NO: 2464 - protein, 9 aa, Homo sapiens
  Table 1.2; DMRT1; ENSG00000137090; HLA -B*37:01
SDSTYYSSF

SEQ ID NO: 2465 - protein, 9 aa, Homo sapiens
  Table 1.2; DMRT1; ENSG00000137090; HLA -A*30:01,HLA-B*13:02,HLA-B*37:01,HLA-B*40:01,HLA-B*44:02, HLA-B*44:03,HLA-B*49:01,HLA-C*02:02
SEAPHAPGV

SEQ ID NO: 2466 - protein, 8 aa, Homo sapiens
  Table 1.2; DMRT1; ENSG00000137090; HLA -B*49:01
SEPSSFTV

SEQ ID NO: 2467 - protein, 8 aa, Homo sapiens
  Table 1.2; DMRT1; ENSG00000137090; HLA -A*23:01
SFTVTPVI

SEQ ID NO: 2468 - protein, 8 aa, Homo sapiens
  Table 1.2; DMRT1; ENSG00000137090; HLA -A*23:01
SFYQPSLF

SEQ ID NO: 2469 - protein, 10 aa, Homo sapiens
  Table 1.2; DMRT1; ENSG00000137090; HLA -A*29:02
SFYQPSLFPY

SEQ ID NO: 2470 - protein, 11 aa, Homo sapiens
  Table 1.2; DMRT1; ENSG00000137090; HLA -A*29:02,HLA-A*30:02
SFYQPSLFPYY

SEQ ID NO: 2471 - protein, 11 aa, Homo sapiens
  Table 1.2; DMRT1; ENSG00000137090; HLA -C*07:04
SGALVGAASGS

SEQ ID NO: 2472 - protein, 9 aa, Homo sapiens
  Table 1.2; DMRT1; ENSG00000137090; HLA -B*54:01
SGTSQPPPA

SEQ ID NO: 2473 - protein, 9 aa, Homo sapiens
  Table 1.2; DMRT1; ENSG00000137090; HLA -A*02:01,HLA-A*02:03,HLA-A*02:04,HLA-A*02:07,HLA-A*68:02
SLFPYYNNL

SEQ ID NO: 2474 - protein, 10 aa, Homo sapiens
  Table 1.2; DMRT1; ENSG00000137090; HLA -A*29:02,HLA-A*30:02
SLFPYYNNLY

SEQ ID NO: 2475 - protein, 9 aa, Homo sapiens
  Table 1.2; DMRT1; ENSG00000137090; HLA -A*30:02,HLA-B*46:01
SLRGLPGPY

SEQ ID NO: 2476 - protein, 10 aa, Homo sapiens
  Table 1.2; DMRT1; ENSG00000137090; HLA -A*02:03
SLRGLPGPYV

SEQ ID NO: 2477 - protein, 11 aa, Homo sapiens
  Table 1.2; DMRT1; ENSG00000137090; HLA -A*03:01,HLA-A*03:02,HLA-A*11:01
SLSSSSPISNK

SEQ ID NO: 2478 - protein, 9 aa, Homo sapiens
  Table 1.2; DMRT1; ENSG00000137090; HLA -B*07:02,HLA-B*56:01,HLA-C*07:02
SPISNKSTK

SEQ ID NO: 2479 - protein, 10 aa, Homo sapiens
  Table 1.2; DMRT1; ENSG00000137090; HLA -B*07:02,HLA-B*54:01,HLA-B*55:01,HLA-B*56:01
SPISNKSTKA

SEQ ID NO: 2480 - protein, 11 aa, Homo sapiens
  Table 1.2; DMRT1; ENSG00000137090; HLA -B*07:02,HLA-B*56:01,HLA-C*07:02
SPISNKSTKAV

SEQ ID NO: 2481 - protein, 10 aa, Homo sapiens
  Table 1.2; DMRT1; ENSG00000137090; HLA -B*07:02
SPPSSQDSGL

SEQ ID NO: 2482 - protein, 10 aa, Homo sapiens
  Table 1.2; DMRT1; ENSG00000137090; HLA -B*07:02
SPVKNSLRGL

SEQ ID NO: 2483 - protein, 9 aa, Homo sapiens
  Table 1.2; DMRT1; ENSG00000137090; HLA -A*02:01,HLA-A*02:04,HLA-A*02:07,HLA-B*13:02,HLA-B*27:05, HLA-B*35:03,HLA-B*38:01,HLA-B*39:01,HLA-B*40:01,HLA-C*05:01
SQDSGLVSL

SEQ ID NO: 2484 - protein, 8 aa, Homo sapiens
  Table 1.2; DMRT1; ENSG00000137090; HLA -A*30:02,HLA-A*32:01,HLA-B*15:01,HLA-B*15:03
SQYRMHSY

SEQ ID NO: 2485 - protein, 9 aa, Homo sapiens
  Table 1.2; DMRT1; ENSG00000137090; HLA -A*30:02
SQYRMHSYY

SEQ ID NO: 2486 - protein, 9 aa, Homo sapiens
  Table 1.2; DMRT1; ENSG00000137090; HLA -B*13:02,HLA-B*58:01
SSFTVTPVI

SEQ ID NO: 2487 - protein, 9 aa, Homo sapiens
  Table 1.2; DMRT1; ENSG00000137090; HLA -B*57:01,HLA-C*02:02
SSFYQPSLF

SEQ ID NO: 2488 - protein, 9 aa, Homo sapiens
  Table 1.2; DMRT1; ENSG00000137090; HLA -A*01:01,HLA-A*30:02,HLA-A*32:01
SSQYRMHSY

SEQ ID NO: 2489 - protein, 8 aa, Homo sapiens
  Table 1.2; DMRT1; ENSG00000137090; HLA -A*03:02,HLA-A*11:01
SSSPISNK

SEQ ID NO: 2490 - protein, 11 aa, Homo sapiens
  Table 1.2; DMRT1; ENSG00000137090; HLA -A*03:01,HLA-A*03:02,HLA-A*11:01,HLA-A*31:01,HLA-A*68:01
SSSPISNKSTK

SEQ ID NO: 2491 - protein, 9 aa, Homo sapiens
  Table 1.2; DMRT1; ENSG00000137090; HLA -A*03:01,HLA-A*03:02,HLA-A*11:01,HLA-A*31:01,HLA-A*33:01, HLA-A*33:03,HLA-A*68:01,HLA-B*27:02,HLA-B*27:05,HLA-C*07:06
SSSSPISNK

SEQ ID NO: 2492 - protein, 9 aa, Homo sapiens
  Table 1.2; DMRT1; ENSG00000137090; HLA -A*26:01,HLA-A*31:01
SVFSPPSSQ

SEQ ID NO: 2493 - protein, 10 aa, Homo sapiens
  Table 1.2; DMRT1; ENSG00000137090; HLA -A*23:01,HLA-A*24:02
SYLGQSVPQF

SEQ ID NO: 2494 - protein, 11 aa, Homo sapiens
  Table 1.2; DMRT1; ENSG00000137090; HLA -A*23:01,HLA-A*24:02
SYLGQSVPQFF

SEQ ID NO: 2495 - protein, 9 aa, Homo sapiens
  Table 1.2; DMRT1; ENSG00000137090; HLA -C*01:02
SYPEARASV

SEQ ID NO: 2496 - protein, 10 aa, Homo sapiens
  Table 1.2; DMRT1; ENSG00000137090; HLA -A*23:01,HLA-A*24:02,HLA-C*14:02
SYPEARASVF

SEQ ID NO: 2497 - protein, 8 aa, Homo sapiens
  Table 1.2; DMRT1; ENSG00000137090; HLA -A*23:01,HLA-A*29:02,HLA-A*30:02,HLA-A*32:01,HLA-B*15:03, HLA-B*39:01,HLA-C*14:02
SYYPPPSY

SEQ ID NO: 2498 - protein, 9 aa, Homo sapiens
  Table 1.2; DMRT1; ENSG00000137090; HLA -A*02:04,HLA-A*23:01,HLA-A*24:02,HLA-A*29:02,HLA-A*30:02, HLA-A*31:01,HLA-B*07:02,HLA-C*04:01,HLA-C*14:02
SYYPPPSYL

SEQ ID NO: 2499 - protein, 9 aa, Homo sapiens
  Table 1.2; DMRT1; ENSG00000137090; HLA -C*16:02
TAASEGRMV

SEQ ID NO: 2500 - protein, 11 aa, Homo sapiens
  Table 1.2; DMRT1; ENSG00000137090; HLA -C*06:02
TECSGTSQPPP

SEQ ID NO: 2501 - protein, 8 aa, Homo sapiens
  Table 1.2; DMRT1; ENSG00000137090; HLA -C*14:02
TFEDAPSY

SEQ ID NO: 2502 - protein, 10 aa, Homo sapiens
  Table 1.2; DMRT1; ENSG00000137090; HLA -A*01:01,HLA-B*35:01,HLA-B*55:01,HLA-C*03:03
TPDLVSDSTY

SEQ ID NO: 2503 - protein, 11 aa, Homo sapiens
  Table 1.2; DMRT1; ENSG00000137090; HLA -A*01:01,HLA-B*35:01,HLA-B*55:01,HLA-C*03:03
TPDLVSDSTYY

SEQ ID NO: 2504 - protein, 9 aa, Homo sapiens
  Table 1.2; DMRT1; ENSG00000137090; HLA -A*02:03,HLA-A*32:01,HLA-B*46:01,HLA-B*56:01,HLA-C*06:02
TSQPPPASV

SEQ ID NO: 2505 - protein, 10 aa, Homo sapiens
  Table 1.2; DMRT1; ENSG00000137090; HLA -B*27:05
TVTPVIEEDE

SEQ ID NO: 2506 - protein, 8 aa, Homo sapiens
  Table 1.2; DMRT1; ENSG00000137090; HLA -B*49:01
VENTPDLV

SEQ ID NO: 2507 - protein, 9 aa, Homo sapiens
  Table 1.2; DMRT1; ENSG00000137090; HLA -B*46:01,HLA-C*03:04,HLA-C*14:02
VGAASGSSA

SEQ ID NO: 2508 - protein, 11 aa, Homo sapiens
  Table 1.2; DMRT1; ENSG00000137090; HLA -C*07:02
VGAASGSSAGG

SEQ ID NO: 2509 - protein, 10 aa, Homo sapiens
  Table 1.2; DMRT1; ENSG00000137090; HLA -A*02:03,HLA-B*39:01,HLA-B*46:01,HLA-C*01:02,HLA-C*04:01, HLA-C*14:02
VGNPLGGSPV

SEQ ID NO: 2510 - protein, 11 aa, Homo sapiens
  Table 1.2; DMRT1; ENSG00000137090; HLA -A*03:02,HLA-A*11:01,HLA-B*27:02,HLA-B*27:05
VGNPLGGSPVK

SEQ ID NO: 2511 - protein, 8 aa, Homo sapiens
  Table 1.2; DMRT1; ENSG00000137090; HLA -A*02:01,HLA-A*02:03,HLA-A*02:04,HLA-B*13:02
VIQDIPAV

SEQ ID NO: 2512 - protein, 9 aa, Homo sapiens
  Table 1.2; DMRT1; ENSG00000137090; HLA -A*02:03,HLA-A*03:02,HLA-A*32:01,HLA-B*39:01,HLA-C*12:03
VIQDIPAVT

SEQ ID NO: 2513 - protein, 10 aa, Homo sapiens
  Table 1.2; DMRT1; ENSG00000137090; HLA -A*03:02
VIQDIPAVTS

SEQ ID NO: 2514 - protein, 11 aa, Homo sapiens
  Table 1.2; DMRT1; ENSG00000137090; HLA -A*03:02,HLA-A*11:01,HLA-A*31:01,HLA-A*33:01,HLA-A*33:03, HLA-A*68:01,HLA-C*07:06
VIQDIPAVTSR

SEQ ID NO: 2515 - protein, 9 aa, Homo sapiens
  Table 1.2; DMRT1; ENSG00000137090; HLA -A*02:03,HLA-A*03:01,HLA-A*03:02,HLA-A*31:01,HLA-A*33:01, HLA-A*33:03,HLA-A*68:01,HLA-B*27:05,HLA-C*07:06
VMAAQVALR

SEQ ID NO: 2516 - protein, 10 aa, Homo sapiens
  Table 1.2; DMRT1; ENSG00000137090; HLA -A*03:01
VMAAQVALRR

SEQ ID NO: 2517 - protein, 10 aa, Homo sapiens
  Table 1.2; DMRT1; ENSG00000137090; HLA -B*07:02
VPPQGRAGGF

SEQ ID NO: 2518 - protein, 10 aa, Homo sapiens
  Table 1.2; DMRT1; ENSG00000137090; HLA -A*01:01,HLA-C*05:01
VSDSTYYSSF

SEQ ID NO: 2519 - protein, 11 aa, Homo sapiens
  Table 1.2; DMRT1; ENSG00000137090; HLA -A*01:01
VSDSTYYSSFY

SEQ ID NO: 2520 - protein, 9 aa, Homo sapiens
  Table 1.2; DMRT1; ENSG00000137090; HLA -A*23:01,HLA-A*25:01,HLA-A*26:01
YLGQSVPQF

SEQ ID NO: 2521 - protein, 10 aa, Homo sapiens
  Table 1.2; DMRT1; ENSG00000137090; HLA -C*07:01,HLA-C*07:02
YNCPQYSMAL

SEQ ID NO: 2522 - protein, 9 aa, Homo sapiens
  Table 1.2; DMRT1; ENSG00000137090; HLA -B*07:02,HLA-B*08:01,HLA-B*35:01,HLA-B*35:03,HLA-B*51:01, HLA-B*55:01,HLA-C*03:03,HLA-C*07:02
YPEARASVF

SEQ ID NO: 2523 - protein, 11 aa, Homo sapiens
  Table 1.2; DMRT1; ENSG00000137090; HLA -B*51:01,HLA-B*54:01,HLA-B*56:01
YPPPSYLGQSV

SEQ ID NO: 2524 - protein, 9 aa, Homo sapiens
  Table 1.2; DMRT1; ENSG00000137090; HLA -A*01:01,HLA-A*02:07,HLA-A*24:02,HLA-A*26:01,HLA-A*29:02
YQPSLFPYY

SEQ ID NO: 2525 - protein, 9 aa, Homo sapiens
  Table 1.2; DMRT1; ENSG00000137090; HLA -A*02:04,HLA-A*68:02,HLA-B*27:05,HLA-B*35:03,HLA-B*58:01, HLA-C*02:02,HLA-C*03:03,HLA-C*03:04,HLA-C*07:04,HLA-C*16:02
YSSFYQPSL

SEQ ID NO: 2526 - protein, 10 aa, Homo sapiens
  Table 1.2; DMRT1; ENSG00000137090; HLA -A*25:01,HLA-A*26:01,HLA-A*32:01,HLA-B*58:01,HLA-C*07:04
YVPGQTGNQW

SEQ ID NO: 2527 - protein, 8 aa, Homo sapiens
  Table 1.2; DMRT1; ENSG00000137090; HLA -A*23:01,HLA-A*24:02,HLA-C*04:01
YYPPPSYL

SEQ ID NO: 2528 - protein, 9 aa, Homo sapiens
  Table 1.2; DMRT1; ENSG00000137090; HLA -A*24:02,HLA-A*29:02
YYPPPSYLG

SEQ ID NO: 2529 - protein, 10 aa, Homo sapiens
  Table 1.2; DMRT1; ENSG00000137090; HLA -A*23:01,HLA-A*24:02
YYSSFYQPSL

SEQ ID NO: 2530 - protein, 11 aa, Homo sapiens
  Table 1.2; DMRT1; ENSG00000137090; HLA -A*24:02
YYSSFYQPSLF

SEQ ID NO: 2531 - protein, 9 aa, Homo sapiens
  Table 1.2; DPPA2; ENSG00000163530; HLA -B*54:01,HLA-B*56:01
AARAVQPKA

SEQ ID NO: 2532 - protein, 10 aa, Homo sapiens
  Table 1.2; DPPA2; ENSG00000163530; HLA -B*07:02,HLA-B*40:02,HLA-C*07:02
AARAVQPKAL

SEQ ID NO: 2533 - protein, 9 aa, Homo sapiens
  Table 1.2; DPPA2; ENSG00000163530; HLA -A*30:01,HLA-B*37:01,HLA-B*40:01,HLA-B*40:02,HLA-B*49:01
AEETNTVEV

SEQ ID NO: 2534 - protein, 10 aa, Homo sapiens
  Table 1.2; DPPA2; ENSG00000163530; HLA -A*30:01,HLA-B*40:01,HLA-B*40:02,HLA-B*49:01
AEETNTVEVI

SEQ ID NO: 2535 - protein, 11 aa, Homo sapiens
  Table 1.2; DPPA2; ENSG00000163530; HLA -A*31:01
AGQAWVPTTHR

SEQ ID NO: 2536 - protein, 9 aa, Homo sapiens
  Table 1.2; DPPA2; ENSG00000163530; HLA -A*02:01,HLA-B*55:01
ALNSCSIPV

SEQ ID NO: 2537 - protein, 11 aa, Homo sapiens
  Table 1.2; DPPA2; ENSG00000163530; HLA -A*02:07
ALPLPTILPPI

SEQ ID NO: 2538 - protein, 9 aa, Homo sapiens
  Table 1.2; DPPA2; ENSG00000163530; HLA -A*02:04
AMLASWARI

SEQ ID NO: 2539 - protein, 9 aa, Homo sapiens
  Table 1.2; DPPA2; ENSG00000163530; HLA -A*25:01,HLA-B*07:02,HLA-B*35:01,HLA-B*44:02,HLA-B*44:03, HLA-B*56:01
APGAMLASW

SEQ ID NO: 2540 - protein, 9 aa, Homo sapiens
  Table 1.2; DPPA2; ENSG00000163530; HLA -B*07:02,HLA-C*07:02
APQKARCKI

SEQ ID NO: 2541 - protein, 9 aa, Homo sapiens
  Table 1.2; DPPA2; ENSG00000163530; HLA -A*32:01,HLA-B*07:02,HLA-B*27:02,HLA-B*27:05,HLA-B*39:01, HLA-C*06:02,HLA-C*07:02,HLA-C*12:03,HLA-C*16:01,HLA-C*16:04
ARAVQPKAL

SEQ ID NO: 2542 - protein, 8 aa, Homo sapiens
  Table 1.2; DPPA2; ENSG00000163530; HLA -C*06:02
ARIAARAV

SEQ ID NO: 2543 - protein, 10 aa, Homo sapiens
  Table 1.2; DPPA2; ENSG00000163530; HLA -B*27:05
ARIAARAVQP

SEQ ID NO: 2544 - protein, 11 aa, Homo sapiens
  Table 1.2; DPPA2; ENSG00000163530; HLA -B*27:05,HLA-C*06:02
ARIAARAVQPK

SEQ ID NO: 2545 - protein, 9 aa, Homo sapiens
  Table 1.2; DPPA2; ENSG00000163530; HLA -B*08:01,HLA-B*27:05,HLA-B*37:01,HLA-C*16:01,HLA-C*16:04
ARLQRSYEM

SEQ ID NO: 2546 - protein, 9 aa, Homo sapiens
  Table 1.2; DPPA2; ENSG00000163530; HLA -A*03:01,HLA-A*31:01,HLA-A*33:01,HLA-A*33:03,HLA-B*57:01
ASWARIAAR

SEQ ID NO: 2547 - protein, 9 aa, Homo sapiens
  Table 1.2; DPPA2; ENSG00000163530; HLA -C*01:02,HLA-C*14:02
AYPEQRQDM

SEQ ID NO: 2548 - protein, 9 aa, Homo sapiens
  Table 1.2; DPPA2; ENSG00000163530; HLA -B*46:01,HLA-B*54:01,HLA-B*56:01
CSIPVSVEA

SEQ ID NO: 2549 - protein, 10 aa, Homo sapiens
  Table 1.2; DPPA2; ENSG00000163530; HLA -B*15:03,HLA-B*57:01,HLA-B*58:01
CSIPVSVEAF

SEQ ID NO: 2550 - protein, 10 aa, Homo sapiens
  Table 1.2; DPPA2; ENSG00000163530; HLA -B*54:01
CVVHGRLLSA

SEQ ID NO: 2551 - protein, 9 aa, Homo sapiens
  Table 1.2; DPPA2; ENSG00000163530; HLA -A*33:01,HLA-B*51:01
DANLDSSKK

SEQ ID NO: 2552 - protein, 11 aa, Homo sapiens
  Table 1.2; DPPA2; ENSG00000163530; HLA -A*33:01
DANLDSSKKNF

SEQ ID NO: 2553 - protein, 9 aa, Homo sapiens
  Table 1.2; DPPA2; ENSG00000163530; HLA -A*30:01,HLA-B*18:01,HLA-B*38:01,HLA-B*40:01,HLA-B*44:02, HLA-B*44:03
DEESVILTL

SEQ ID NO: 2554 - protein, 11 aa, Homo sapiens
  Table 1.2; DPPA2; ENSG00000163530; HLA -A*02:07
DMPEMSQETRL

SEQ ID NO: 2555 - protein, 8 aa, Homo sapiens
  Table 1.2; DPPA2; ENSG00000163530; HLA -B*08:01
DSSKKNFL

SEQ ID NO: 2556 - protein, 8 aa, Homo sapiens
  Table 1.2; DPPA2; ENSG00000163530; HLA -B*08:01
DTKGWVRL

SEQ ID NO: 2557 - protein, 9 aa, Homo sapiens
  Table 1.2; DPPA2; ENSG00000163530; HLA -A*33:01
DVKLEKPKK

SEQ ID NO: 2558 - protein, 9 aa, Homo sapiens
  Table 1.2; DPPA2; ENSG00000163530; HLA -A*26:01,HLA-B*54:01
EAFLMQASG

SEQ ID NO: 2559 - protein, 10 aa, Homo sapiens
  Table 1.2; DPPA2; ENSG00000163530; HLA -B*51:01
EAFLMQASGV

SEQ ID NO: 2560 - protein, 11 aa, Homo sapiens
  Table 1.2; DPPA2; ENSG00000163530; HLA -A*68:01
EAFLMQASGVR

SEQ ID NO: 2561 - protein, 8 aa, Homo sapiens
  Table 1.2; DPPA2; ENSG00000163530; HLA -A*30:01,HLA-B*18:01,HLA-B*37:01,HLA-B*40:01,HLA-B*44:02, HLA-B*44:03,HLA-B*49:01
EESVILTL

SEQ ID NO: 2562 - protein, 9 aa, Homo sapiens
  Table 1.2; DPPA2; ENSG00000163530; HLA -A*68:02,HLA-B*18:01,HLA-B*44:02,HLA-B*44:03,HLA-B*49:01
EESVILTLV

SEQ ID NO: 2563 - protein, 8 aa, Homo sapiens
  Table 1.2; DPPA2; ENSG00000163530; HLA -B*18:01,HLA-B*49:01
EETNTVEV

SEQ ID NO: 2564 - protein, 9 aa, Homo sapiens
  Table 1.2; DPPA2; ENSG00000163530; HLA -A*30:01,HLA-A*68:02,HLA-B*18:01,HLA-B*38:01,HLA-B*39:01, HLA-B*40:01,HLA-B*40:02,HLA-B*44:02,HLA-B*44:03,HLA-B*49:01
EETNTVEVI

SEQ ID NO: 2565 - protein, 11 aa, Homo sapiens
  Table 1.2; DPPA2; ENSG00000163530; HLA -B*27:05,HLA-B*39:01
EETNTVEVITS

SEQ ID NO: 2566 - protein, 10 aa, Homo sapiens
  Table 1.2; DPPA2; ENSG00000163530; HLA -A*33:03
EMSQETRLQR

SEQ ID NO: 2567 - protein, 11 aa, Homo sapiens
  Table 1.2; DPPA2; ENSG00000163530; HLA -A*68:01
EPSVSSTSDVK

SEQ ID NO: 2568 - protein, 8 aa, Homo sapiens
  Table 1.2; DPPA2; ENSG00000163530; HLA -A*03:02,HLA-A*11:01,HLA-A*33:03,HLA-A*68:01,HLA-B*13:02, HLA-B*27:02,HLA-B*27:05,HLA-C*07:01
EQFTAPQK

SEQ ID NO: 2569 - protein, 9 aa, Homo sapiens
  Table 1.2; DPPA2; ENSG00000163530; HLA -A*26:01,HLA-B*13:02,HLA-B*39:01
EQFTAPQKA

SEQ ID NO: 2570 - protein, 10 aa, Homo sapiens
  Table 1.2; DPPA2; ENSG00000163530; HLA -A*33:03,HLA-A*68:01
EQFTAPQKAR

SEQ ID NO: 2571 - protein, 9 aa, Homo sapiens
  Table 1.2; DPPA2; ENSG00000163530; HLA -B*39:01
EQMEPSVSS

SEQ ID NO: 2572 - protein, 9 aa, Homo sapiens
  Table 1.2; DPPA2; ENSG00000163530; HLA -A*26:01,HLA-B*15:01
EQRQDMPEM

SEQ ID NO: 2573 - protein, 9 aa, Homo sapiens
  Table 1.2; DPPA2; ENSG00000163530; HLA -B*38:01,HLA-B*39:01
ERAEETNTV

SEQ ID NO: 2574 - protein, 10 aa, Homo sapiens
  Table 1.2; DPPA2; ENSG00000163530; HLA -A*68:02
ESVILTLVPV

SEQ ID NO: 2575 - protein, 11 aa, Homo sapiens
  Table 1.2; DPPA2; ENSG00000163530; HLA -A*68:01
ESVILTLVPVK

SEQ ID NO: 2576 - protein, 8 aa, Homo sapiens
  Table 1.2; DPPA2; ENSG00000163530; HLA -A*33:03
ETNTVEVI

SEQ ID NO: 2577 - protein, 9 aa, Homo sapiens
  Table 1.2; DPPA2; ENSG00000163530; HLA -A*33:03
ETNTVEVIT

SEQ ID NO: 2578 - protein, 10 aa, Homo sapiens
  Table 1.2; DPPA2; ENSG00000163530; HLA -A*33:03,HLA-A*68:01
ETNTVEVITS

SEQ ID NO: 2579 - protein, 11 aa, Homo sapiens
  Table 1.2; DPPA2; ENSG00000163530; HLA -A*26:01,HLA-A*68:01
ETNTVEVITSA

SEQ ID NO: 2580 - protein, 9 aa, Homo sapiens
  Table 1.2; DPPA2; ENSG00000163530; HLA -A*33:01,HLA-A*33:03
ETRLQRCSR

SEQ ID NO: 2581 - protein, 9 aa, Homo sapiens
  Table 1.2; DPPA2; ENSG00000163530; HLA -C*05:01
EVDDEESVI

SEQ ID NO: 2582 - protein, 10 aa, Homo sapiens
  Table 1.2; DPPA2; ENSG00000163530; HLA -B*39:01
EVDDEESVIL

SEQ ID NO: 2583 - protein, 9 aa, Homo sapiens
  Table 1.2; DPPA2; ENSG00000163530; HLA -A*25:01,HLA-A*26:01
EVITSAPGA

SEQ ID NO: 2584 - protein, 10 aa, Homo sapiens
  Table 1.2; DPPA2; ENSG00000163530; HLA -A*25:01,HLA-A*26:01,HLA-A*68:01,HLA-B*39:01
EVITSAPGAM

SEQ ID NO: 2585 - protein, 11 aa, Homo sapiens
  Table 1.2; DPPA2; ENSG00000163530; HLA -A*25:01,HLA-A*26:01,HLA-A*68:01,HLA-A*68:02,HLA-B*35:03
EVITSAPGAML

SEQ ID NO: 2586 - protein, 8 aa, Homo sapiens
  Table 1.2; DPPA2; ENSG00000163530; HLA -A*02:03,HLA-B*08:01,HLA-B*13:02
FLMQASGV

SEQ ID NO: 2587 - protein, 10 aa, Homo sapiens
  Table 1.2; DPPA2; ENSG00000163530; HLA -A*24:02,HLA-A*25:01,HLA-A*29:02,HLA-B*44:02,HLA-B*57:01
FLMQASGVRW

SEQ ID NO: 2588 - protein, 10 aa, Homo sapiens
  Table 1.2; DPPA2; ENSG00000163530; HLA -B*35:01,HLA-B*35:03,HLA-B*38:01,HLA-B*55:01,HLA-C*03:03
FPSPGIEDNM

SEQ ID NO: 2589 - protein, 11 aa, Homo sapiens
  Table 1.2; DPPA2; ENSG00000163530; HLA -B*27:05,HLA-B*35:01,HLA-B*35:03,HLA-B*38:01,HLA-B*55:01
FPSPGIEDNML

SEQ ID NO: 2590 - protein, 9 aa, Homo sapiens
  Table 1.2; DPPA2; ENSG00000163530; HLA -A*30:01,HLA-B*40:01,HLA-B*49:01
GEVDDEESV

SEQ ID NO: 2591 - protein, 10 aa, Homo sapiens
  Table 1.2; DPPA2; ENSG00000163530; HLA -A*30:01,HLA-B*40:01,HLA-B*49:01
GEVDDEESVI

SEQ ID NO: 2592 - protein, 11 aa, Homo sapiens
  Table 1.2; DPPA2; ENSG00000163530; HLA -A*30:01,HLA-B*40:01
GEVDDEESVIL

SEQ ID NO: 2593 - protein, 10 aa, Homo sapiens
  Table 1.2; DPPA2; ENSG00000163530; HLA -B*38:01,HLA-B*39:01
GHLLQTNEQF

SEQ ID NO: 2594 - protein, 9 aa, Homo sapiens
  Table 1.2; DPPA2; ENSG00000163530; HLA -A*02:03
GLSTNGKKI

SEQ ID NO: 2595 - protein, 11 aa, Homo sapiens
  Table 1.2; DPPA2; ENSG00000163530; HLA -A*02:01
GLSTNGKKIEV

SEQ ID NO: 2596 - protein, 9 aa, Homo sapiens
  Table 1.2; DPPA2; ENSG00000163530; HLA -A*30:02,HLA-A*32:01,HLA-B*13:02,HLA-B*15:01,HLA-B*15:03, HLA-B*27:05
GQAWVPTTH

SEQ ID NO: 2597 - protein, 10 aa, Homo sapiens
  Table 1.2; DPPA2; ENSG00000163530; HLA -A*31:01
GQAWVPTTHR

SEQ ID NO: 2598 - protein, 9 aa, Homo sapiens
  Table 1.2; DPPA2; ENSG00000163530; HLA -B*27:02,HLA-B*27:05
GRLLSADTK

SEQ ID NO: 2599 - protein, 11 aa, Homo sapiens
  Table 1.2; DPPA2; ENSG00000163530; HLA -B*27:02
GRLLSADTKGW

SEQ ID NO: 2600 - protein, 10 aa, Homo sapiens
  Table 1.2; DPPA2; ENSG00000163530; HLA -B*35:01,HLA-B*35:03,HLA-B*55:01
HAYPEQRQDM

SEQ ID NO: 2601 - protein, 9 aa, Homo sapiens
  Table 1.2; DPPA2; ENSG00000163530; HLA -A*23:01,HLA-A*24:02,HLA-A*32:01,HLA-B*15:01,HLA-B*37:01, HLA-B*38:01
HLLQTNEQF

SEQ ID NO: 2602 - protein, 11 aa, Homo sapiens
  Table 1.2; DPPA2; ENSG00000163530; HLA -A*02:04
HLLQTNEQFTA

SEQ ID NO: 2603 - protein, 9 aa, Homo sapiens
  Table 1.2; DPPA2; ENSG00000163530; HLA -A*03:01,HLA-A*03:02,HLA-A*11:01,HLA-A*31:01,HLA-A*68:01, HLA-B*27:02,HLA-B*27:05,HLA-C*04:01,HLA-C*06:02,HLA-C*07:01, HLA-C*07:06,HLA-C*16:01
IAARAVQPK

SEQ ID NO: 2604 - protein, 11 aa, Homo sapiens
  Table 1.2; DPPA2; ENSG00000163530; HLA -A*29:02
IFPSPGIEDNM

SEQ ID NO: 2605 - protein, 8 aa, Homo sapiens
  Table 1.2; DPPA2; ENSG00000163530; HLA -A*02:01,HLA-A*02:03,HLA-A*02:07
ILPPINKV

SEQ ID NO: 2606 - protein, 8 aa, Homo sapiens
  Table 1.2; DPPA2; ENSG00000163530; HLA -B*27:02
ILTLVPVK

SEQ ID NO: 2607 - protein, 9 aa, Homo sapiens
  Table 1.2; DPPA2; ENSG00000163530; HLA -A*23:01,HLA-A*24:02,HLA-A*30:01,HLA-B*07:02,HLA-B*13:02, HLA-B*35:01,HLA-B*35:03,HLA-B*38:01,HLA-B*49:01,HLA-B*51:01, HLA-B*54:01,HLA-B*55:01,HLA-B*56:01,HLA-B*58:01,HLA-C*07:02,
  HLA-C*16:02
IPALPLPTI

SEQ ID NO: 2608 - protein, 10 aa, Homo sapiens
  Table 1.2; DPPA2; ENSG00000163530; HLA -B*07:02,HLA-B*35:03,HLA-B*56:01
IPALPLPTIL

SEQ ID NO: 2609 - protein, 11 aa, Homo sapiens
  Table 1.2; DPPA2; ENSG00000163530; HLA -B*54:01
IPALPLPTILP

SEQ ID NO: 2610 - protein, 8 aa, Homo sapiens
  Table 1.2; DPPA2; ENSG00000163530; HLA -A*23:01,HLA-B*07:02,HLA-B*15:01,HLA-B*15:03,HLA-B*18:01, HLA-B*35:01,HLA-B*35:03,HLA-B*37:01,HLA-B*39:01,HLA-B*51:01, HLA-B*54:01,HLA-B*55:01,HLA-B*56:01
IPVSVEAF

SEQ ID NO: 2611 - protein, 9 aa, Homo sapiens
  Table 1.2; DPPA2; ENSG00000163530; HLA -A*23:01,HLA-A*68:02,HLA-B*07:02,HLA-B*35:01,HLA-B*35:03, HLA-B*51:01,HLA-B*54:01,HLA-B*55:01,HLA-B*56:01
IPVSVEAFL

SEQ ID NO: 2612 - protein, 10 aa, Homo sapiens
  Table 1.2; DPPA2; ENSG00000163530; HLA -B*27:02,HLA-B*35:01,HLA-B*35:03
IPVSVEAFLM

SEQ ID NO: 2613 - protein, 9 aa, Homo sapiens
  Table 1.2; DPPA2; ENSG00000163530; HLA -A*03:01,HLA-A*23:01,HLA-A*32:01,HLA-A*68:02,HLA-B*07:02, HLA-B*13:02,HLA-B*15:01,HLA-B*15:03,HLA-B*35:03,HLA-B*38:01, HLA-B*39:01,HLA-B*40:02,HLA-B*46:01,HLA-B*58:01,HLA-C*01:02,
  HLA-C*03:03,HLA-C*03:04,HLA-C*05:01,HLA-C*06:02,HLA-C*07:04, HLA-C*12:03,HLA-C*14:02,HLA-C*16:01,HLA-C*16:02
ITSAPGAML

SEQ ID NO: 2614 - protein, 10 aa, Homo sapiens
  Table 1.2; DPPA2; ENSG00000163530; HLA -A*02:01,HLA-A*02:07,HLA-A*24:02
KIPALPLPTI

SEQ ID NO: 2615 - protein, 9 aa, Homo sapiens
  Table 1.2; DPPA2; ENSG00000163530; HLA -B*15:03
KKYNPGHLL

SEQ ID NO: 2616 - protein, 9 aa, Homo sapiens
  Table 1.2; DPPA2; ENSG00000163530; HLA -A*02:01,HLA-A*02:03,HLA-B*08:01
KMMKRLMTV

SEQ ID NO: 2617 - protein, 8 aa, Homo sapiens
  Table 1.2; DPPA2; ENSG00000163530; HLA -B*27:02,HLA-B*27:05,HLA-C*06:02,HLA-C*07:01
KRLMTVEK

SEQ ID NO: 2618 - protein, 8 aa, Homo sapiens
  Table 1.2; DPPA2; ENSG00000163530; HLA -A*23:01,HLA-A*24:02,HLA-B*58:01
KYNPGHLL

SEQ ID NO: 2619 - protein, 9 aa, Homo sapiens
  Table 1.2; DPPA2; ENSG00000163530; HLA -A*24:02
KYNPGHLLQ

SEQ ID NO: 2620 - protein, 9 aa, Homo sapiens
  Table 1.2; DPPA2; ENSG00000163530; HLA -B*54:01,HLA-B*56:01
LASWARIAA

SEQ ID NO: 2621 - protein, 8 aa, Homo sapiens
  Table 1.2; DPPA2; ENSG00000163530; HLA -B*37:01
LDSSKKNF

SEQ ID NO: 2622 - protein, 9 aa, Homo sapiens
  Table 1.2; DPPA2; ENSG00000163530; HLA -A*24:02,HLA-A*32:01,HLA-B*57:01,HLA-B*58:01
LMQASGVRW

SEQ ID NO: 2623 - protein, 9 aa, Homo sapiens
  Table 1.2; DPPA2; ENSG00000163530; HLA -B*51:01,HLA-B*54:01,HLA-B*56:01
LPACIFPSP

SEQ ID NO: 2624 - protein, 11 aa, Homo sapiens
  Table 1.2; DPPA2; ENSG00000163530; HLA -B*51:01
LPACIFPSPGI

SEQ ID NO: 2625 - protein, 9 aa, Homo sapiens
  Table 1.2; DPPA2; ENSG00000163530; HLA -B*54:01,HLA-B*56:01
LPLPTILPP

SEQ ID NO: 2626 - protein, 10 aa, Homo sapiens
  Table 1.2; DPPA2; ENSG00000163530; HLA -A*23:01,HLA-B*51:01,HLA-B*54:01,HLA-B*56:01
LPLPTILPPI

SEQ ID NO: 2627 - protein, 8 aa, Homo sapiens
  Table 1.2; DPPA2; ENSG00000163530; HLA -B*51:01,HLA-B*54:01
LPTILPPI

SEQ ID NO: 2628 - protein, 11 aa, Homo sapiens
  Table 1.2; DPPA2; ENSG00000163530; HLA -B*51:01,HLA-B*54:01,HLA-B*56:01
LPTILPPINKV

SEQ ID NO: 2629 - protein, 9 aa, Homo sapiens
  Table 1.2; DPPA2; ENSG00000163530; HLA -A*25:01,HLA-A*32:01
LQFHAGQAW

SEQ ID NO: 2630 - protein, 8 aa, Homo sapiens
  Table 1.2; DPPA2; ENSG00000163530; HLA -B*57:01,HLA-B*58:01
LSADTKGW

SEQ ID NO: 2631 - protein, 11 aa, Homo sapiens
  Table 1.2; DPPA2; ENSG00000163530; HLA -B*49:01
MEPSVSSTSDV

SEQ ID NO: 2632 - protein, 8 aa, Homo sapiens
  Table 1.2; DPPA2; ENSG00000163530; HLA -B*18:01,HLA-B*40:02,HLA-B*49:01
MEQMEPSV

SEQ ID NO: 2633 - protein, 9 aa, Homo sapiens
  Table 1.2; DPPA2; ENSG00000163530; HLA -B*54:01
MISLFLLPA

SEQ ID NO: 2634 - protein, 9 aa, Homo sapiens
  Table 1.2; DPPA2; ENSG00000163530; HLA -A*02:03,HLA-A*02:04
MLASWARIA

SEQ ID NO: 2635 - protein, 10 aa, Homo sapiens
  Table 1.2; DPPA2; ENSG00000163530; HLA -B*54:01
MLASWARIAA

SEQ ID NO: 2636 - protein, 11 aa, Homo sapiens
  Table 1.2; DPPA2; ENSG00000163530; HLA -A*31:01
MLASWARIAAR

SEQ ID NO: 2637 - protein, 8 aa, Homo sapiens
  Table 1.2; DPPA2; ENSG00000163530; HLA -B*08:01
MMKRLMTV

SEQ ID NO: 2638 - protein, 9 aa, Homo sapiens
  Table 1.2; DPPA2; ENSG00000163530; HLA -B*35:03,HLA-B*55:01
MPEMSQETR

SEQ ID NO: 2639 - protein, 10 aa, Homo sapiens
  Table 1.2; DPPA2; ENSG00000163530; HLA -B*07:02,HLA-B*35:01,HLA-B*35:03,HLA-B*55:01,HLA-C*03:03
MPEMSQETRL

SEQ ID NO: 2640 - protein, 8 aa, Homo sapiens
  Table 1.2; DPPA2; ENSG00000163530; HLA -A*25:01,HLA-A*32:01,HLA-B*44:02,HLA-B*44:03
MQASGVRW

SEQ ID NO: 2641 - protein, 10 aa, Homo sapiens
  Table 1.2; DPPA2; ENSG00000163530; HLA -A*01:01,HLA-B*27:02
MSDANLDSSK

SEQ ID NO: 2642 - protein, 9 aa, Homo sapiens
  Table 1.2; DPPA2; ENSG00000163530; HLA -A*31:01,HLA-A*33:03
MSQETRLQR

SEQ ID NO: 2643 - protein, 9 aa, Homo sapiens
  Table 1.2; DPPA2; ENSG00000163530; HLA -A*03:02,HLA-A*11:01
NEQFTAPQK

SEQ ID NO: 2644 - protein, 10 aa, Homo sapiens
  Table 1.2; DPPA2; ENSG00000163530; HLA -B*49:01
NERAEETNTV

SEQ ID NO: 2645 - protein, 8 aa, Homo sapiens
  Table 1.2; DPPA2; ENSG00000163530; HLA -B*15:01,HLA-B*15:03,HLA-B*18:01,HLA-B*46:01
NGKKIEVY

SEQ ID NO: 2646 - protein, 9 aa, Homo sapiens
  Table 1.2; DPPA2; ENSG00000163530; HLA -A*32:01,HLA-C*04:01
NLDSSKKNF

SEQ ID NO: 2647 - protein, 10 aa, Homo sapiens
  Table 1.2; DPPA2; ENSG00000163530; HLA -A*02:07
NLDSSKKNFL

SEQ ID NO: 2648 - protein, 9 aa, Homo sapiens
  Table 1.2; DPPA2; ENSG00000163530; HLA -A*02:01,HLA-B*55:01
NMEQMEPSV

SEQ ID NO: 2649 - protein, 9 aa, Homo sapiens
  Table 1.2; DPPA2; ENSG00000163530; HLA -A*68:02,HLA-C*12:03
NSCSIPVSV

SEQ ID NO: 2650 - protein, 9 aa, Homo sapiens
  Table 1.2; DPPA2; ENSG00000163530; HLA -A*02:01,HLA-A*02:03,HLA-A*02:07,HLA-A*25:01,HLA-A*26:01, HLA-A*68:02,HLA-B*46:01,HLA-B*54:01,HLA-B*55:01,HLA-B*56:01
NTVEVITSA

SEQ ID NO: 2651 - protein, 8 aa, Homo sapiens
  Table 1.2; DPPA2; ENSG00000163530; HLA -A*23:01,HLA-B*51:01
PALPLPTI

SEQ ID NO: 2652 - protein, 9 aa, Homo sapiens
  Table 1.2; DPPA2; ENSG00000163530; HLA -A*30:01,HLA-B*27:02,HLA-B*40:01,HLA-B*40:02,HLA-B*44:02, HLA-B*44:03,HLA-B*49:01
PEMSQETRL

SEQ ID NO: 2653 - protein, 9 aa, Homo sapiens
  Table 1.2; DPPA2; ENSG00000163530; HLA -A*02:04,HLA-A*02:07,HLA-A*24:02
PLPTILPPI

SEQ ID NO: 2654 - protein, 9 aa, Homo sapiens
  Table 1.2; DPPA2; ENSG00000163530; HLA -A*03:01,HLA-A*03:02,HLA-A*11:01
PTILPPINK

SEQ ID NO: 2655 - protein, 9 aa, Homo sapiens
  Table 1.2; DPPA2; ENSG00000163530; HLA -A*31:01,HLA-A*33:01,HLA-A*33:03,HLA-A*68:01,HLA-B*51:01, HLA-B*57:01,HLA-C*07:06
QAWVPTTHR

SEQ ID NO: 2656 - protein, 9 aa, Homo sapiens
  Table 1.2; DPPA2; ENSG00000163530; HLA -A*33:01,HLA-A*33:03
QFTAPQKAR

SEQ ID NO: 2657 - protein, 9 aa, Homo sapiens
  Table 1.2; DPPA2; ENSG00000163530; HLA -A*03:01,HLA-A*03:02
QLGLSTNGK

SEQ ID NO: 2658 - protein, 8 aa, Homo sapiens
  Table 1.2; DPPA2; ENSG00000163530; HLA -B*56:01
QPKALNSC

SEQ ID NO: 2659 - protein, 10 aa, Homo sapiens
  Table 1.2; DPPA2; ENSG00000163530; HLA -A*03:02,HLA-A*11:01,HLA-B*27:02
QQLGLSTNGK

SEQ ID NO: 2660 - protein, 9 aa, Homo sapiens
  Table 1.2; DPPA2; ENSG00000163530; HLA -B*27:05
QRSYEMNER

SEQ ID NO: 2661 - protein, 11 aa, Homo sapiens
  Table 1.2; DPPA2; ENSG00000163530; HLA -A*03:01,HLA-A*03:02,HLA-A*11:01,HLA-A*68:01
QTNEQFTAPQK

SEQ ID NO: 2662 - protein, 8 aa, Homo sapiens
  Table 1.2; DPPA2; ENSG00000163530; HLA -C*05:01
RAEETNTV

SEQ ID NO: 2663 - protein, 10 aa, Homo sapiens
  Table 1.2; DPPA2; ENSG00000163530; HLA -C*05:01
RAEETNTVEV

SEQ ID NO: 2664 - protein, 8 aa, Homo sapiens
  Table 1.2; DPPA2; ENSG00000163530; HLA -B*08:01,HLA-B*58:01
RAVQPKAL

SEQ ID NO: 2665 - protein, 10 aa, Homo sapiens
  Table 1.2; DPPA2; ENSG00000163530; HLA -A*03:01,HLA-A*03:02
RIAARAVQPK

SEQ ID NO: 2666 - protein, 10 aa, Homo sapiens
  Table 1.2; DPPA2; ENSG00000163530; HLA -A*25:01,HLA-B*57:01
RLLSADTKGW

SEQ ID NO: 2667 - protein, 8 aa, Homo sapiens
  Table 1.2; DPPA2; ENSG00000163530; HLA -A*02:04
RMISLFLL

SEQ ID NO: 2668 - protein, 8 aa, Homo sapiens
  Table 1.2; DPPA2; ENSG00000163530; HLA -A*31:01
RSYEMNER

SEQ ID NO: 2669 - protein, 10 aa, Homo sapiens
  Table 1.2; DPPA2; ENSG00000163530; HLA -A*25:01,HLA-A*26:01,HLA-B*44:02,HLA-B*57:01,HLA-B*58:01
SAPGAMLASW

SEQ ID NO: 2670 - protein, 9 aa, Homo sapiens
  Table 1.2; DPPA2; ENSG00000163530; HLA -B*27:02
SDANLDSSK

SEQ ID NO: 2671 - protein, 10 aa, Homo sapiens
  Table 1.2; DPPA2; ENSG00000163530; HLA -A*11:01,HLA-B*27:02
SDANLDSSKK

SEQ ID NO: 2672 - protein, 9 aa, Homo sapiens
  Table 1.2; DPPA2; ENSG00000163530; HLA -A*02:07,HLA-A*24:02,HLA-A*25:01,HLA-A*26:01,HLA-A*32:01, HLA-B*15:01,HLA-B*46:01,HLA-C*01:02,HLA-C*07:04,HLA-C*14:02
SIPVSVEAF

SEQ ID NO: 2673 - protein, 9 aa, Homo sapiens
  Table 1.2; DPPA2; ENSG00000163530; HLA -A*02:01,HLA-A*02:03,HLA-A*02:04,HLA-A*30:01,HLA-B*13:02
SLFLLPACI

SEQ ID NO: 2674 - protein, 9 aa, Homo sapiens
  Table 1.2; DPPA2; ENSG00000163530; HLA -B*35:03
SPGIEDNML

SEQ ID NO: 2675 - protein, 10 aa, Homo sapiens
  Table 1.2; DPPA2; ENSG00000163530; HLA -A*11:01,HLA-C*07:06
SSTSDVKLEK

SEQ ID NO: 2676 - protein, 10 aa, Homo sapiens
  Table 1.2; DPPA2; ENSG00000163530; HLA -A*25:01,HLA-A*26:01,HLA-A*30:02,HLA-A*32:01,HLA-B*15:01
STNGKKIEVY

SEQ ID NO: 2677 - protein, 9 aa, Homo sapiens
  Table 1.2; DPPA2; ENSG00000163530; HLA -A*01:01,HLA-A*03:01,HLA-A*03:02,HLA-A*11:01,HLA-A*29:02, HLA-A*30:02,HLA-A*31:01,HLA-A*33:01,HLA-A*33:03,HLA-A*68:01, HLA-B*13:02,HLA-B*27:05,HLA-B*57:01,HLA-C*07:06
STSDVKLEK

SEQ ID NO: 2678 - protein, 11 aa, Homo sapiens
  Table 1.2; DPPA2; ENSG00000163530; HLA -A*03:02,HLA-A*11:01
STSDVKLEKPK

SEQ ID NO: 2679 - protein, 9 aa, Homo sapiens
  Table 1.2; DPPA2; ENSG00000163530; HLA -A*02:01,HLA-A*02:03,HLA-A*02:04,HLA-A*02:07,HLA-A*68:02, HLA-B*56:01
SVILTLVPV

SEQ ID NO: 2680 - protein, 10 aa, Homo sapiens
  Table 1.2; DPPA2; ENSG00000163530; HLA -A*03:01,HLA-A*03:02,HLA-A*11:01,HLA-B*27:02
SVILTLVPVK

SEQ ID NO: 2681 - protein, 9 aa, Homo sapiens
  Table 1.2; DPPA2; ENSG00000163530; HLA -A*03:02,HLA-A*11:01
SVSSTSDVK

SEQ ID NO: 2682 - protein, 10 aa, Homo sapiens
  Table 1.2; DPPA2; ENSG00000163530; HLA -B*35:03
SVSSTSDVKL

SEQ ID NO: 2683 - protein, 8 aa, Homo sapiens
  Table 1.2; DPPA2; ENSG00000163530; HLA -A*03:01,HLA-A*03:02,HLA-A*11:01
TILPPINK

SEQ ID NO: 2684 - protein, 9 aa, Homo sapiens
  Table 1.2; DPPA2; ENSG00000163530; HLA -A*02:01,HLA-A*02:03,HLA-A*02:04,HLA-A*02:07,HLA-A*68:02, HLA-B*13:02,HLA-B*51:01,HLA-B*55:01
TILPPINKV

SEQ ID NO: 2685 - protein, 11 aa, Homo sapiens
  Table 1.2; DPPA2; ENSG00000163530; HLA -A*31:01
TILPPINKVCR

SEQ ID NO: 2686 - protein, 9 aa, Homo sapiens
  Table 1.2; DPPA2; ENSG00000163530; HLA -A*02:03,HLA-A*02:04
TLRDWCQQL

SEQ ID NO: 2687 - protein, 10 aa, Homo sapiens
  Table 1.2; DPPA2; ENSG00000163530; HLA -B*27:02
TNEQFTAPQK

SEQ ID NO: 2688 - protein, 9 aa, Homo sapiens
  Table 1.2; DPPA2; ENSG00000163530; HLA -B*39:01
TNTVEVITS

SEQ ID NO: 2689 - protein, 8 aa, Homo sapiens
  Table 1.2; DPPA2; ENSG00000163530; HLA -C*01:02,HLA-C*03:03,HLA-C*03:04
TSAPGAML

SEQ ID NO: 2690 - protein, 9 aa, Homo sapiens
  Table 1.2; DPPA2; ENSG00000163530; HLA -B*54:01,HLA-C*06:02
TSAPGAMLA

SEQ ID NO: 2691 - protein, 11 aa, Homo sapiens
  Table 1.2; DPPA2; ENSG00000163530; HLA -A*25:01,HLA-A*26:01,HLA-A*31:01,HLA-A*32:01,HLA-A*33:03, HLA-B*44:03,HLA-B*57:01,HLA-B*58:01,HLA-C*16:04
TSAPGAMLASW

SEQ ID NO: 2692 - protein, 9 aa, Homo sapiens
  Table 1.2; DPPA2; ENSG00000163530; HLA -B*08:01
TTHRRMISL

SEQ ID NO: 2693 - protein, 8 aa, Homo sapiens
  Table 1.2; DPPA2; ENSG00000163530; HLA -C*05:01
VDDEESVI

SEQ ID NO: 2694 - protein, 9 aa, Homo sapiens
  Table 1.2; DPPA2; ENSG00000163530; HLA -B*38:01,HLA-B*40:01
VDDEESVIL

SEQ ID NO: 2695 - protein, 11 aa, Homo sapiens
  Table 1.2; DPPA2; ENSG00000163530; HLA -A*02:07
VDDEESVILTL

SEQ ID NO: 2696 - protein, 8 aa, Homo sapiens
  Table 1.2; DPPA2; ENSG00000163530; HLA -B*18:01,HLA-B*49:01
VEAFLMQA

SEQ ID NO: 2697 - protein, 8 aa, Homo sapiens
  Table 1.2; DPPA2; ENSG00000163530; HLA -B*18:01,HLA-B*40:02,HLA-B*49:01
VEVITSAP

SEQ ID NO: 2698 - protein, 9 aa, Homo sapiens
  Table 1.2; DPPA2; ENSG00000163530; HLA -B*40:02,HLA-B*49:01
VEVITSAPG

SEQ ID NO: 2699 - protein, 11 aa, Homo sapiens
  Table 1.2; DPPA2; ENSG00000163530; HLA -A*30:01,HLA-B*18:01,HLA-B*40:01,HLA-B*40:02
VEVITSAPGAM

SEQ ID NO: 2700 - protein, 9 aa, Homo sapiens
  Table 1.2; DPPA2; ENSG00000163530; HLA -A*03:01,HLA-A*03:02,HLA-A*11:01,HLA-B*27:02
VILTLVPVK

SEQ ID NO: 2701 - protein, 9 aa, Homo sapiens
  Table 1.2; DPPA2; ENSG00000163530; HLA -B*39:01
VITSAPGAM

SEQ ID NO: 2702 - protein, 10 aa, Homo sapiens
  Table 1.2; DPPA2; ENSG00000163530; HLA -A*23:01,HLA-B*39:01
VITSAPGAML

SEQ ID NO: 2703 - protein, 11 aa, Homo sapiens
  Table 1.2; DPPA2; ENSG00000163530; HLA -B*07:02
VPTTHRRMISL

SEQ ID NO: 2704 - protein, 9 aa, Homo sapiens
  Table 1.2; DPPA2; ENSG00000163530; HLA -B*07:02,HLA-B*35:01,HLA-B*35:03,HLA-B*55:01,HLA-B*56:01, HLA-C*03:03
VPVKDDANM

SEQ ID NO: 2705 - protein, 9 aa, Homo sapiens
  Table 1.2; DPPA2; ENSG00000163530; HLA -B*38:01,HLA-B*40:01,HLA-B*58:01
VSSTSDVKL

SEQ ID NO: 2706 - protein, 11 aa, Homo sapiens
  Table 1.2; DPPA2; ENSG00000163530; HLA -A*01:01,HLA-A*03:01,HLA-A*03:02,HLA-A*11:01
VSSTSDVKLEK

SEQ ID NO: 2707 - protein, 9 aa, Homo sapiens
  Table 1.2; DPPA2; ENSG00000163530; HLA -A*02:03,HLA-A*32:01,HLA-B*08:01,HLA-B*40:02,HLA-B*46:01, HLA-B*54:01,HLA-B*55:01,HLA-B*56:01
VVHGRLLSA

SEQ ID NO: 2708 - protein, 8 aa, Homo sapiens
  Table 1.2; DPPA2; ENSG00000163530; HLA -B*08:01
YPEQRQDM

SEQ ID NO: 2709 - protein, 9 aa, Homo sapiens
  Table 1.2; DPPA2; ENSG00000163530; HLA -B*55:01
YPEQRQDMP

SEQ ID NO: 2710 - protein, 11 aa, Homo sapiens
  Table 1.2; DPPA2; ENSG00000163530; HLA -B*35:01,HLA-B*35:03,HLA-B*55:01
YPEQRQDMPEM

SEQ ID NO: 2711 - protein, 11 aa, Homo sapiens
  Table 1.2; FMR1NB; ENSG00000176988; HLA -B*58:01
AAMADRPQPGW

SEQ ID NO: 2712 - protein, 8 aa, Homo sapiens
  Table 1.2; FMR1NB; ENSG00000176988; HLA -A*32:01,HLA-B*37:01,HLA-B*44:02,HLA-B*57:01
ADRPQPGW

SEQ ID NO: 2713 - protein, 10 aa, Homo sapiens
  Table 1.2; FMR1NB; ENSG00000176988; HLA -B*38:01,HLA-B*39:01
AHLELATYEL

SEQ ID NO: 2714 - protein, 10 aa, Homo sapiens
  Table 1.2; FMR1NB; ENSG00000176988; HLA -A*25:01,HLA-A*32:01,HLA-B*57:01,HLA-B*58:01
AMADRPQPGW

SEQ ID NO: 2715 - protein, 9 aa, Homo sapiens
  Table 1.2; FMR1NB; ENSG00000176988; HLA -B*07:02
AMRVAHLEL

SEQ ID NO: 2716 - protein, 10 aa, Homo sapiens
  Table 1.2; FMR1NB; ENSG00000176988; HLA -B*07:02,HLA-C*07:02
APFRDVPKQM

SEQ ID NO: 2717 - protein, 10 aa, Homo sapiens
  Table 1.2; FMR1NB; ENSG00000176988; HLA -A*23:01,HLA-A*24:02,HLA-C*14:02
CFSSSGTTSF

SEQ ID NO: 2718 - protein, 9 aa, Homo sapiens
  Table 1.2; FMR1NB; ENSG00000176988; HLA -A*33:01,HLA-A*33:03
DLSESECLR

SEQ ID NO: 2719 - protein, 8 aa, Homo sapiens
  Table 1.2; FMR1NB; ENSG00000176988; HLA -A*33:01,HLA-B*08:01,HLA-B*18:01
DNRVVTGL

SEQ ID NO: 2720 - protein, 9 aa, Homo sapiens
  Table 1.2; FMR1NB; ENSG00000176988; HLA -A*33:01
DNRVVTGLK

SEQ ID NO: 2721 - protein, 10 aa, Homo sapiens
  Table 1.2; FMR1NB; ENSG00000176988; HLA -A*33:01
DNRVVTGLKK

SEQ ID NO: 2722 - protein, 10 aa, Homo sapiens
  Table 1.2; FMR1NB; ENSG00000176988; HLA -A*25:01
DSALEALLNF

SEQ ID NO: 2723 - protein, 9 aa, Homo sapiens
  Table 1.2; FMR1NB; ENSG00000176988; HLA -A*25:01,HLA-A*26:01
DVPKQMMQM

SEQ ID NO: 2724 - protein, 10 aa, Homo sapiens
  Table 1.2; FMR1NB; ENSG00000176988; HLA -A*25:01,HLA-A*26:01
DVPKQMMQMF

SEQ ID NO: 2725 - protein, 9 aa, Homo sapiens
  Table 1.2; FMR1NB; ENSG00000176988; HLA -A*30:01,HLA-B*40:01
EEDSALEAL

SEQ ID NO: 2726 - protein, 10 aa, Homo sapiens
  Table 1.2; FMR1NB; ENSG00000176988; HLA -B*40:01
EEDSALEALL

SEQ ID NO: 2727 - protein, 8 aa, Homo sapiens
  Table 1.2; FMR1NB; ENSG00000176988; HLA -A*33:03
EMLQKAAR

SEQ ID NO: 2728 - protein, 11 aa, Homo sapiens
  Table 1.2; FMR1NB; ENSG00000176988; HLA -A*01:01,HLA-A*25:01,HLA-A*26:01,HLA-A*29:02,HLA-A*30:02, HLA-A*32:01,HLA-A*33:01,HLA-A*33:03,HLA-B*58:01
ESNPESSHPGY

SEQ ID NO: 2729 - protein, 9 aa, Homo sapiens
  Table 1.2; FMR1NB; ENSG00000176988; HLA -A*23:01,HLA-A*24:02,HLA-A*29:02,HLA-C*14:02
FFFPTTCNL

SEQ ID NO: 2730 - protein, 9 aa, Homo sapiens
  Table 1.2; FMR1NB; ENSG00000176988; HLA -A*01:01,HLA-A*23:01,HLA-A*25:01,HLA-A*26:01,HLA-A*32:01, HLA-B*15:01,HLA-B*15:03,HLA-B*27:05,HLA-B*35:01,HLA-B*38:01, HLA-B*39:01,HLA-B*46:01,HLA-B*58:01,HLA-C*01:02,HLA-C*02:02,
  HLA-C*03:03,HLA-C*03:04,HLA-C*05:01,HLA-C*07:04,HLA-C*14:02, HLA-C*16:01
FSSSGTTSF

SEQ ID NO: 2731 - protein, 10 aa, Homo sapiens
  Table 1.2; FMR1NB; ENSG00000176988; HLA -A*01:01
FSSSGTTSFK

SEQ ID NO: 2732 - protein, 9 aa, Homo sapiens
  Table 1.2; FMR1NB; ENSG00000176988; HLA -A*02:04,HLA-B*35:03,HLA-C*03:04
FVLANGHIL

SEQ ID NO: 2733 - protein, 9 aa, Homo sapiens
  Table 1.2; FMR1NB; ENSG00000176988; HLA -C*12:03
GAISLILVC

SEQ ID NO: 2734 - protein, 10 aa, Homo sapiens
  Table 1.2; FMR1NB; ENSG00000176988; HLA -A*02:01,HLA-A*02:03,HLA-A*02:04
GLGAISLILV

SEQ ID NO: 2735 - protein, 10 aa, Homo sapiens
  Table 1.2; FMR1NB; ENSG00000176988; HLA -B*27:05
GQSLEEDSAL

SEQ ID NO: 2736 - protein, 9 aa, Homo sapiens
  Table 1.2; FMR1NB; ENSG00000176988; HLA -A*02:04,HLA-A*02:07,HLA-B*35:03,HLA-B*38:01
HLELATYEL

SEQ ID NO: 2737 - protein, 8 aa, Homo sapiens
  Table 1.2; FMR1NB; ENSG00000176988; HLA -B*35:01,HLA-B*35:03,HLA-B*55:01
HPGYEAAM

SEQ ID NO: 2738 - protein, 9 aa, Homo sapiens
  Table 1.2; FMR1NB; ENSG00000176988; HLA -B*35:03,HLA-B*54:01,HLA-B*55:01,HLA-B*56:01
HPGYEAAMA

SEQ ID NO: 2739 - protein, 8 aa, Homo sapiens
  Table 1.2; FMR1NB; ENSG00000176988; HLA -B*18:01
LEALLNFF

SEQ ID NO: 2740 - protein, 10 aa, Homo sapiens
  Table 1.2; FMR1NB; ENSG00000176988; HLA -A*30:01,HLA-B*40:01
LEEDSALEAL

SEQ ID NO: 2741 - protein, 11 aa, Homo sapiens
  Table 1.2; FMR1NB; ENSG00000176988; HLA -B*40:01
LEEDSALEALL

SEQ ID NO: 2742 - protein, 8 aa, Homo sapiens
  Table 1.2; FMR1NB; ENSG00000176988; HLA -A*30:01,HLA-B*18:01,HLA-B*37:01,HLA-B*40:01,HLA-B*40:02, HLA-B*49:01
LELATYEL

SEQ ID NO: 2743 - protein, 9 aa, Homo sapiens
  Table 1.2; FMR1NB; ENSG00000176988; HLA -A*29:02
LFVCYYLSY

SEQ ID NO: 2744 - protein, 10 aa, Homo sapiens
  Table 1.2; FMR1NB; ENSG00000176988; HLA -B*27:05,HLA-B*38:01
LQDLSESECL

SEQ ID NO: 2745 - protein, 9 aa, Homo sapiens
  Table 1.2; FMR1NB; ENSG00000176988; HLA -A*01:01,HLA-A*25:01,HLA-B*51:01,HLA-B*57:01,HLA-B*58:01
MADRPQPGW

SEQ ID NO: 2746 - protein, 9 aa, Homo sapiens
  Table 1.2; FMR1NB; ENSG00000176988; HLA -C*14:02
MFGLGAISL

SEQ ID NO: 2747 - protein, 9 aa, Homo sapiens
  Table 1.2; FMR1NB; ENSG00000176988; HLA -A*02:04
MLSIWILLF

SEQ ID NO: 2748 - protein, 9 aa, Homo sapiens
  Table 1.2; FMR1NB; ENSG00000176988; HLA -B*13:02
MQMFGLGAI

SEQ ID NO: 2749 - protein, 9 aa, Homo sapiens
  Table 1.2; FMR1NB; ENSG00000176988; HLA -A*03:01
NLRENQVAK

SEQ ID NO: 2750 - protein, 9 aa, Homo sapiens
  Table 1.2; FMR1NB; ENSG00000176988; HLA -A*29:02,HLA-A*30:02,HLA-B*35:01,HLA-B*55:01,HLA-C*03:03
NPESSHPGY

SEQ ID NO: 2751 - protein, 11 aa, Homo sapiens
  Table 1.2; FMR1NB; ENSG00000176988; HLA -B*54:01
NPESSHPGYEA

SEQ ID NO: 2752 - protein, 10 aa, Homo sapiens
  Table 1.2; FMR1NB; ENSG00000176988; HLA -B*27:02
QDLSESECLR

SEQ ID NO: 2753 - protein, 9 aa, Homo sapiens
  Table 1.2; FMR1NB; ENSG00000176988; HLA -A*30:01,HLA-B*37:01,HLA-B*40:02,HLA-B*44:03
QDNRVVTGL

SEQ ID NO: 2754 - protein, 10 aa, Homo sapiens
  Table 1.2; FMR1NB; ENSG00000176988; HLA -A*02:01,HLA-A*02:03
QMFGLGAISL

SEQ ID NO: 2755 - protein, 8 aa, Homo sapiens
  Table 1.2; FMR1NB; ENSG00000176988; HLA -B*08:01
RAMRVAHL

SEQ ID NO: 2756 - protein, 8 aa, Homo sapiens
  Table 1.2; FMR1NB; ENSG00000176988; HLA -B*37:01
RDVPKQMM

SEQ ID NO: 2757 - protein, 10 aa, Homo sapiens
  Table 1.2; FMR1NB; ENSG00000176988; HLA -B*07:02,HLA-C*07:02
RPQPGWRESL

SEQ ID NO: 2758 - protein, 10 aa, Homo sapiens
  Table 1.2; FMR1NB; ENSG00000176988; HLA -B*38:01
RQDNRVVTGL

SEQ ID NO: 2759 - protein, 10 aa, Homo sapiens
  Table 1.2; FMR1NB; ENSG00000176988; HLA -A*25:01,HLA-A*26:01,HLA-A*29:02,HLA-A*30:02,HLA-A*32:01, HLA-B*15:01,HLA-B*27:02,HLA-B*57:01,HLA-B*58:01
RVAHLELATY

SEQ ID NO: 2760 - protein, 9 aa, Homo sapiens
  Table 1.2; FMR1NB; ENSG00000176988; HLA -A*03:01
RVSKPFGML

SEQ ID NO: 2761 - protein, 10 aa, Homo sapiens
  Table 1.2; FMR1NB; ENSG00000176988; HLA -A*31:01
RVVTGLKKQR

SEQ ID NO: 2762 - protein, 9 aa, Homo sapiens
  Table 1.2; FMR1NB; ENSG00000176988; HLA -A*23:01,HLA-A*25:01,HLA-A*29:02
SALEALLNF

SEQ ID NO: 2763 - protein, 9 aa, Homo sapiens
  Table 1.2; FMR1NB; ENSG00000176988; HLA -B*44:02,HLA-B*44:03
SEMLQKAAR

SEQ ID NO: 2764 - protein, 9 aa, Homo sapiens
  Table 1.2; FMR1NB; ENSG00000176988; HLA -A*30:01,HLA-B*18:01,HLA-B*27:02,HLA-B*37:01,HLA-B*40:01, HLA-B*40:02,HLA-B*44:02,HLA-B*44:03,HLA-B*49:01,HLA-C*16:04
SENAHGQSL

SEQ ID NO: 2765 - protein, 9 aa, Homo sapiens
  Table 1.2; FMR1NB; ENSG00000176988; HLA -B*39:01
SHPGYEAAM

SEQ ID NO: 2766 - protein, 8 aa, Homo sapiens
  Table 1.2; FMR1NB; ENSG00000176988; HLA -B*08:01
SLKMRVSK

SEQ ID NO: 2767 - protein, 10 aa, Homo sapiens
  Table 1.2; FMR1NB; ENSG00000176988; HLA -A*26:01,HLA-A*29:02,HLA-A*30:02
SNPESSHPGY

SEQ ID NO: 2768 - protein, 8 aa, Homo sapiens
  Table 1.2; FMR1NB; ENSG00000176988; HLA -A*03:02,HLA-A*11:01
SSGTTSFK

SEQ ID NO: 2769 - protein, 8 aa, Homo sapiens
  Table 1.2; FMR1NB; ENSG00000176988; HLA -A*32:01,HLA-C*05:01
SSSGTTSF

SEQ ID NO: 2770 - protein, 9 aa, Homo sapiens
  Table 1.2; FMR1NB; ENSG00000176988; HLA -A*03:01,HLA-A*03:02,HLA-A*11:01
SSSGTTSFK

SEQ ID NO: 2771 - protein, 10 aa, Homo sapiens
  Table 1.2; FMR1NB; ENSG00000176988; HLA -A*30:02,HLA-C*14:02
SYYLCSGSSY

SEQ ID NO: 2772 - protein, 9 aa, Homo sapiens
  Table 1.2; FMR1NB; ENSG00000176988; HLA -A*01:01,HLA-A*23:01,HLA-A*25:01,HLA-A*26:01,HLA-A*29:02, HLA-A*30:02,HLA-A*32:01,HLA-B*15:01,HLA-B*15:03,HLA-B*18:01, HLA-B*27:05,HLA-B*35:01,HLA-B*39:01,HLA-B*46:01,HLA-B*51:01,
  HLA-B*54:01,HLA-B*55:01,HLA-B*56:01,HLA-B*57:01,HLA-B*58:01, HLA-C*01:02,HLA-C*02:02,HLA-C*03:03,HLA-C*03:04,HLA-C*07:04, HLA-C*12:03,HLA-C*14:02,HLA-C*16:01,HLA-C*16:02,HLA-C*16:04
VAHLELATY

SEQ ID NO: 2773 - protein, 8 aa, Homo sapiens
  Table 1.2; FMR1NB; ENSG00000176988; HLA -B*08:01
VAKPCNEL

SEQ ID NO: 2774 - protein, 8 aa, Homo sapiens
  Table 1.2; FMR1NB; ENSG00000176988; HLA -B*08:01
VPKQMMQM

SEQ ID NO: 2775 - protein, 9 aa, Homo sapiens
  Table 1.2; FMR1NB; ENSG00000176988; HLA -A*31:01,HLA-A*32:01,HLA-B*40:02,HLA-B*46:01,HLA-B*57:01, HLA-B*58:01,HLA-C*02:02,HLA-C*12:03
VSKPFGMLM

SEQ ID NO: 2776 - protein, 9 aa, Homo sapiens
  Table 1.2; FMR1NB; ENSG00000176988; HLA -A*31:01,HLA-A*33:01
VVTGLKKQR

SEQ ID NO: 2777 - protein, 8 aa, Homo sapiens
  Table 1.2; FMR1NB; ENSG00000176988; HLA -B*18:01
YELAATES

SEQ ID NO: 2778 - protein, 9 aa, Homo sapiens
  Table 1.2; FMR1NB; ENSG00000176988; HLA -B*18:01,HLA-B*40:02,HLA-B*49:01
YELAATESN

SEQ ID NO: 2779 - protein, 8 aa, Homo sapiens
  Table 1.2; FMR1NB; ENSG00000176988; HLA -B*46:01
YLCSGSSY

SEQ ID NO: 2780 - protein, 9 aa, Homo sapiens
  Table 1.2; FMR1NB; ENSG00000176988; HLA -A*29:02,HLA-A*30:02,HLA-B*15:03,HLA-C*14:02
YYLCSGSSY

SEQ ID NO: 2781 - protein, 10 aa, Homo sapiens
  Table 1.2; FMR1NB; ENSG00000176988; HLA -A*23:01,HLA-A*24:02
YYLCSGSSYF

SEQ ID NO: 2782 - protein, 9 aa, Homo sapiens
  Table 1.2; FTHL17; ENSG00000132446; HLA -A*02:01,HLA-A*02:04,HLA-A*02:07,HLA-A*11:01,HLA-A*23:01, HLA-A*24:02,HLA-A*25:01,HLA-A*30:01,HLA-A*31:01,HLA-A*32:01, HLA-A*68:02,HLA-B*07:02,HLA-B*08:01,HLA-B*15:01,HLA-B*15:03,
  HLA-B*27:05,HLA-B*35:01,HLA-B*35:03,HLA-B*38:01,HLA-B*39:01, HLA-B*40:01,HLA-B*40:02,HLA-B*44:02,HLA-B*44:03,HLA-B*46:01, HLA-B*55:01,HLA-B*57:01,HLA-B*58:01,HLA-C*01:02,HLA-C*02:02, HLA-C*03:03,HLA-C*03:04,HLA-C*05:01,HLA-C*07:02,HLA-C*07:04,
  HLA-C*07:06,HLA-C*12:03,HLA-C*14:02,HLA-C*16:01,HLA-C*16:02, HLA-C*16:04
AAINSHITL

SEQ ID NO: 2783 - protein, 11 aa, Homo sapiens
  Table 1.2; FTHL17; ENSG00000132446; HLA -B*46:01,HLA-B*58:01,HLA-C*02:02,HLA-C*03:03,HLA-C*03:04, HLA-C*16:04
AAINSHITLEL

SEQ ID NO: 2784 - protein, 8 aa, Homo sapiens
  Table 1.2; FTHL17; ENSG00000132446; HLA -A*30:01,HLA-B*18:01,HLA-B*37:01,HLA-B*40:01,HLA-B*40:02, HLA-B*44:02,HLA-B*44:03,HLA-B*49:01
AEYLFDKL

SEQ ID NO: 2785 - protein, 9 aa, Homo sapiens
  Table 1.2; FTHL17; ENSG00000132446; HLA -B*49:01
AEYLFDKLT

SEQ ID NO: 2786 - protein, 10 aa, Homo sapiens
  Table 1.2; FTHL17; ENSG00000132446; HLA -A*30:01,HLA-B*18:01,HLA-B*37:01,HLA-B*40:01,HLA-B*40:02, HLA-B*44:02,HLA-B*44:03,HLA-B*49:01,HLA-C*16:04
AEYLFDKLTL

SEQ ID NO: 2787 - protein, 8 aa, Homo sapiens
  Table 1.2; FTHL17; ENSG00000132446; HLA -A*32:01,HLA-B*08:01,HLA-B*37:01,HLA-B*58:01,HLA-C*01:02, HLA-C*16:01
AINSHITL

SEQ ID NO: 2788 - protein, 9 aa, Homo sapiens
  Table 1.2; FTHL17; ENSG00000132446; HLA -A*03:01
AINSHITLE

SEQ ID NO: 2789 - protein, 10 aa, Homo sapiens
  Table 1.2; FTHL17; ENSG00000132446; HLA -A*02:03,HLA-A*02:04,HLA-A*03:01,HLA-B*07:02,HLA-B*46:01
AINSHITLEL

SEQ ID NO: 2790 - protein, 11 aa, Homo sapiens
  Table 1.2; FTHL17; ENSG00000132446; HLA -A*01:01,HLA-A*29:02,HLA-A*30:02,HLA-B*15:01,HLA-B*46:01
AINSHITLELY

SEQ ID NO: 2791 - protein, 8 aa, Homo sapiens
  Table 1.2; FTHL17; ENSG00000132446; HLA -A*01:01
ALENFFRY

SEQ ID NO: 2792 - protein, 9 aa, Homo sapiens
  Table 1.2; FTHL17; ENSG00000132446; HLA -A*02:07
ALENFFRYF

SEQ ID NO: 2793 - protein, 10 aa, Homo sapiens
  Table 1.2; FTHL17; ENSG00000132446; HLA -A*02:01,HLA-A*02:04
ALENFFRYFL

SEQ ID NO: 2794 - protein, 9 aa, Homo sapiens
  Table 1.2; FTHL17; ENSG00000132446; HLA -A*03:01,HLA-A*03:02,HLA-A*11:01
AQPSQVRQK

SEQ ID NO: 2795 - protein, 10 aa, Homo sapiens
  Table 1.2; FTHL17; ENSG00000132446; HLA -A*29:02,HLA-A*30:02,HLA-A*32:01,HLA-B*15:01,HLA-B*15:03, HLA-B*44:03,HLA-C*16:04
AQPSQVRQKY

SEQ ID NO: 2796 - protein, 9 aa, Homo sapiens
  Table 1.2; FTHL17; ENSG00000132446; HLA -A*03:01,HLA-A*03:02,HLA-A*11:01,HLA-A*31:01,HLA-A*32:01, HLA-A*33:01,HLA-A*33:03,HLA-A*68:01,HLA-B*27:05,HLA-B*57:01, HLA-C*07:06
ATAQPSQVR

SEQ ID NO: 2797 - protein, 10 aa, Homo sapiens
  Table 1.2; FTHL17; ENSG00000132446; HLA -A*11:01
ATAQPSQVRQ

SEQ ID NO: 2798 - protein, 11 aa, Homo sapiens
  Table 1.2; FTHL17; ENSG00000132446; HLA -A*03:01,HLA-A*03:02,HLA-A*11:01,HLA-A*31:01,HLA-A*68:01, HLA-C*07:06
ATAQPSQVRQK

SEQ ID NO: 2799 - protein, 9 aa, Homo sapiens
  Table 1.2; FTHL17; ENSG00000132446; HLA -B*35:03,HLA-B*38:01,HLA-B*40:01,HLA-B*55:01,HLA-C*05:01
AVEKGDPQL

SEQ ID NO: 2800 - protein, 9 aa, Homo sapiens
  Table 1.2; FTHL17; ENSG00000132446; HLA -B*13:02,HLA-B*38:01,HLA-B*40:02,HLA-B*49:01
CDAAINSHI

SEQ ID NO: 2801 - protein, 9 aa, Homo sapiens
  Table 1.2; FTHL17; ENSG00000132446; HLA -B*38:01
CHFLESHYL

SEQ ID NO: 2802 - protein, 10 aa, Homo sapiens
  Table 1.2; FTHL17; ENSG00000132446; HLA -A*01:01,HLA-A*30:02,HLA-B*46:01,HLA-C*01:02
CSPEAGLAEY

SEQ ID NO: 2803 - protein, 8 aa, Homo sapiens
  Table 1.2; FTHL17; ENSG00000132446; HLA -A*33:01,HLA-B*51:01
DAAINSHI

SEQ ID NO: 2804 - protein, 10 aa, Homo sapiens
  Table 1.2; FTHL17; ENSG00000132446; HLA -A*33:01,HLA-A*68:01,HLA-B*35:03,HLA-B*51:01,HLA-C*07:06
DAAINSHITL

SEQ ID NO: 2805 - protein, 9 aa, Homo sapiens
  Table 1.2; FTHL17; ENSG00000132446; HLA -A*33:01
DDKMEHAQK

SEQ ID NO: 2806 - protein, 8 aa, Homo sapiens
  Table 1.2; FTHL17; ENSG00000132446; HLA -B*18:01
DDVALENF

SEQ ID NO: 2807 - protein, 9 aa, Homo sapiens
  Table 1.2; FTHL17; ENSG00000132446; HLA -B*18:01
DDVALENFF

SEQ ID NO: 2808 - protein, 9 aa, Homo sapiens
  Table 1.2; FTHL17; ENSG00000132446; HLA -A*03:01,HLA-A*03:02,HLA-A*11:01,HLA-A*26:01,HLA-A*33:01, HLA-A*33:03,HLA-A*68:01,HLA-B*18:01,HLA-B*27:02,HLA-B*27:05, HLA-C*07:06
DLYQLAVEK

SEQ ID NO: 2809 - protein, 9 aa, Homo sapiens
  Table 1.2; FTHL17; ENSG00000132446; HLA -A*33:01,HLA-A*33:03,HLA-A*68:01
DVALENFFR

SEQ ID NO: 2810 - protein, 10 aa, Homo sapiens
  Table 1.2; FTHL17; ENSG00000132446; HLA -A*01:01,HLA-A*25:01,HLA-A*26:01
DVALENFFRY

SEQ ID NO: 2811 - protein, 9 aa, Homo sapiens
  Table 1.2; FTHL17; ENSG00000132446; HLA -B*38:01
EHAQKLMRL

SEQ ID NO: 2812 - protein, 9 aa, Homo sapiens
  Table 1.2; FTHL17; ENSG00000132446; HLA -A*02:03,HLA-A*25:01,HLA-A*26:01,HLA-A*33:03,HLA-A*68:02
ELGGYVSNL

SEQ ID NO: 2813 - protein, 10 aa, Homo sapiens
  Table 1.2; FTHL17; ENSG00000132446; HLA -A*33:03,HLA-A*68:01
ELGGYVSNLR

SEQ ID NO: 2814 - protein, 8 aa, Homo sapiens
  Table 1.2; FTHL17; ENSG00000132446; HLA -A*29:02
ELYTSYLY

SEQ ID NO: 2815 - protein, 9 aa, Homo sapiens
  Table 1.2; FTHL17; ENSG00000132446; HLA -A*01:01,HLA-A*02:01,HLA-A*02:03,HLA-A*02:04,HLA-A*02:07, HLA-A*03:01,HLA-A*25:01,HLA-A*26:01,HLA-A*68:02
ELYTSYLYL

SEQ ID NO: 2816 - protein, 9 aa, Homo sapiens
  Table 1.2; FTHL17; ENSG00000132446; HLA -A*25:01,HLA-A*26:01,HLA-B*38:01,HLA-B*39:01,HLA-B*40:02, HLA-B*44:02,HLA-B*44:03
EQVKTIKEL

SEQ ID NO: 2817 - protein, 10 aa, Homo sapiens
  Table 1.2; FTHL17; ENSG00000132446; HLA -A*68:02
ESAFHLEKNV

SEQ ID NO: 2818 - protein, 11 aa, Homo sapiens
  Table 1.2; FTHL17; ENSG00000132446; HLA -C*07:01
ESGLVAMESAF

SEQ ID NO: 2819 - protein, 9 aa, Homo sapiens
  Table 1.2; FTHL17; ENSG00000132446; HLA -A*01:01,HLA-A*68:02
ESHYLHEQV

SEQ ID NO: 2820 - protein, 9 aa, Homo sapiens
  Table 1.2; FTHL17; ENSG00000132446; HLA -A*23:01,HLA-A*24:02,HLA-A*33:03
EYLFDKLTL

SEQ ID NO: 2821 - protein, 8 aa, Homo sapiens
  Table 1.2; FTHL17; ENSG00000132446; HLA -C*07:04
FDKLTLGG

SEQ ID NO: 2822 - protein, 11 aa, Homo sapiens
  Table 1.2; FTHL17; ENSG00000132446; HLA -B*38:01
FHLEKNVNQSL

SEQ ID NO: 2823 - protein, 10 aa, Homo sapiens
  Table 1.2; FTHL17; ENSG00000132446; HLA -A*23:01,HLA-A*24:02
FYFNRDDVAL

SEQ ID NO: 2824 - protein, 9 aa, Homo sapiens
  Table 1.2; FTHL17; ENSG00000132446; HLA -A*03:01,HLA-A*11:01
GGYVSNLRK

SEQ ID NO: 2825 - protein, 9 aa, Homo sapiens
  Table 1.2; FTHL17; ENSG00000132446; HLA -A*03:01,HLA-A*03:02,HLA-A*11:01,HLA-B*27:02
GLAEYLFDK

SEQ ID NO: 2826 - protein, 10 aa, Homo sapiens
  Table 1.2; FTHL17; ENSG00000132446; HLA -A*02:01,HLA-A*02:03,HLA-A*02:04,HLA-A*02:07,HLA-A*68:02
GLAEYLFDKL

SEQ ID NO: 2827 - protein, 9 aa, Homo sapiens
  Table 1.2; FTHL17; ENSG00000132446; HLA -A*26:01,HLA-B*15:01,HLA-B*15:03,HLA-B*46:01,HLA-B*55:01, HLA-C*07:04
GLVAMESAF

SEQ ID NO: 2828 - protein, 9 aa, Homo sapiens
  Table 1.2; FTHL17; ENSG00000132446; HLA -C*04:01
GWESGLVAM

SEQ ID NO: 2829 - protein, 9 aa, Homo sapiens
  Table 1.2; FTHL17; ENSG00000132446; HLA -A*23:01,HLA-A*24:02
GYVSNLRKI

SEQ ID NO: 2830 - protein, 10 aa, Homo sapiens
  Table 1.2; FTHL17; ENSG00000132446; HLA -A*25:01,HLA-A*30:02,HLA-B*35:01
HITLELYTSY

SEQ ID NO: 2831 - protein, 10 aa, Homo sapiens
  Table 1.2; FTHL17; ENSG00000132446; HLA -A*23:01,HLA-A*24:02
HYLHEQVKTI

SEQ ID NO: 2832 - protein, 11 aa, Homo sapiens
  Table 1.2; FTHL17; ENSG00000132446; HLA -A*29:02,HLA-A*30:02,HLA-B*15:01
ICSPEAGLAEY

SEQ ID NO: 2833 - protein, 9 aa, Homo sapiens
  Table 1.2; FTHL17; ENSG00000132446; HLA -A*23:01,HLA-A*29:02,HLA-A*68:02,HLA-B*27:05,HLA-C*06:02
INSHITLEL

SEQ ID NO: 2834 - protein, 10 aa, Homo sapiens
  Table 1.2; FTHL17; ENSG00000132446; HLA -A*29:02
INSHITLELY

SEQ ID NO: 2835 - protein, 9 aa, Homo sapiens
  Table 1.2; FTHL17; ENSG00000132446; HLA -A*01:01,HLA-A*03:01,HLA-A*11:01,HLA-A*23:01,HLA-A*25:01, HLA-A*26:01,HLA-A*29:02,HLA-A*30:02,HLA-A*32:01,HLA-A*33:01, HLA-A*33:03,HLA-B*15:01,HLA-B*15:03,HLA-B*18:01,HLA-B*27:02,
  HLA-B*35:01,HLA-B*46:01,HLA-B*57:01,HLA-B*58:01,HLA-C*02:02, HLA-C*14:02,HLA-C*16:04
ITLELYTSY

SEQ ID NO: 2836 - protein, 11 aa, Homo sapiens
  Table 1.2; FTHL17; ENSG00000132446; HLA -A*29:02
ITLELYTSYLY

SEQ ID NO: 2837 - protein, 10 aa, Homo sapiens
  Table 1.2; FTHL17; ENSG00000132446; HLA -A*30:01,HLA-B*40:01,HLA-B*40:02,HLA-B*49:01
KELGGYVSNL

SEQ ID NO: 2838 - protein, 8 aa, Homo sapiens
  Table 1.2; FTHL17; ENSG00000132446; HLA -A*02:04
KLMRLQNL

SEQ ID NO: 2839 - protein, 9 aa, Homo sapiens
  Table 1.2; FTHL17; ENSG00000132446; HLA -A*31:01
KLMRLQNLR

SEQ ID NO: 2840 - protein, 11 aa, Homo sapiens
  Table 1.2; FTHL17; ENSG00000132446; HLA -A*29:02,HLA-A*30:02
KNVNQSLLDLY

SEQ ID NO: 2841 - protein, 9 aa, Homo sapiens
  Table 1.2; FTHL17; ENSG00000132446; HLA -A*01:01,HLA-A*25:01,HLA-A*26:01,HLA-A*29:02,HLA-A*30:02, HLA-A*32:01,HLA-B*15:01,HLA-B*57:01,HLA-B*58:01
KTIKELGGY

SEQ ID NO: 2842 - protein, 10 aa, Homo sapiens
  Table 1.2; FTHL17; ENSG00000132446; HLA -B*40:02
KTIKELGGYV

SEQ ID NO: 2843 - protein, 10 aa, Homo sapiens
  Table 1.2; FTHL17; ENSG00000132446; HLA -B*35:03,HLA-C*03:03,HLA-C*03:04
LAVEKGDPQL

SEQ ID NO: 2844 - protein, 10 aa, Homo sapiens
  Table 1.2; FTHL17; ENSG00000132446; HLA -B*27:02
LDLYQLAVEK

SEQ ID NO: 2845 - protein, 9 aa, Homo sapiens
  Table 1.2; FTHL17; ENSG00000132446; HLA -A*23:01,HLA-A*30:01,HLA-B*07:02,HLA-B*08:01,HLA-B*18:01, HLA-B*37:01,HLA-B*40:01,HLA-B*40:02,HLA-B*44:02,HLA-B*44:03, HLA-B*49:01,HLA-C*03:04
LEKNVNQSL

SEQ ID NO: 2846 - protein, 10 aa, Homo sapiens
  Table 1.2; FTHL17; ENSG00000132446; HLA -A*30:01,HLA-B*40:01
LEKNVNQSLL

SEQ ID NO: 2847 - protein, 8 aa, Homo sapiens
  Table 1.2; FTHL17; ENSG00000132446; HLA -B*49:01
LELYTSYL

SEQ ID NO: 2848 - protein, 9 aa, Homo sapiens
  Table 1.2; FTHL17; ENSG00000132446; HLA -A*29:02
LELYTSYLY

SEQ ID NO: 2849 - protein, 10 aa, Homo sapiens
  Table 1.2; FTHL17; ENSG00000132446; HLA -A*68:02
LESHYLHEQV

SEQ ID NO: 2850 - protein, 8 aa, Homo sapiens
  Table 1.2; FTHL17; ENSG00000132446; HLA -C*07:04
LGGYVSNL

SEQ ID NO: 2851 - protein, 9 aa, Homo sapiens
  Table 1.2; FTHL17; ENSG00000132446; HLA -A*68:01
LGGYVSNLR

SEQ ID NO: 2852 - protein, 8 aa, Homo sapiens
  Table 1.2; FTHL17; ENSG00000132446; HLA -B*38:01
LHEQVKTI

SEQ ID NO: 2853 - protein, 9 aa, Homo sapiens
  Table 1.2; FTHL17; ENSG00000132446; HLA -A*01:01,HLA-A*02:01,HLA-A*02:04,HLA-A*02:07
LLDLYQLAV

SEQ ID NO: 2854 - protein, 11 aa, Homo sapiens
  Table 1.2; FTHL17; ENSG00000132446; HLA -B*27:02
LLDLYQLAVEK

SEQ ID NO: 2855 - protein, 9 aa, Homo sapiens
  Table 1.2; FTHL17; ENSG00000132446; HLA -A*31:01
LSMAFYFNR

SEQ ID NO: 2856 - protein, 8 aa, Homo sapiens
  Table 1.2; FTHL17; ENSG00000132446; HLA -B*39:01
LVAMESAF

SEQ ID NO: 2857 - protein, 8 aa, Homo sapiens
  Table 1.2; FTHL17; ENSG00000132446; HLA -A*29:02
LYLSMAFY

SEQ ID NO: 2858 - protein, 9 aa, Homo sapiens
  Table 1.2; FTHL17; ENSG00000132446; HLA -A*23:01,HLA-A*24:02,HLA-A*29:02
LYLSMAFYF

SEQ ID NO: 2859 - protein, 8 aa, Homo sapiens
  Table 1.2; FTHL17; ENSG00000132446; HLA -C*14:02
LYQLAVEK

SEQ ID NO: 2860 - protein, 8 aa, Homo sapiens
  Table 1.2; FTHL17; ENSG00000132446; HLA -A*24:02
LYTSYLYL

SEQ ID NO: 2861 - protein, 9 aa, Homo sapiens
  Table 1.2; FTHL17; ENSG00000132446; HLA -B*51:01,HLA-B*54:01,HLA-C*16:02
MATAQPSQV

SEQ ID NO: 2862 - protein, 10 aa, Homo sapiens
  Table 1.2; FTHL17; ENSG00000132446; HLA -A*33:03,HLA-A*68:01,HLA-C*07:06
MATAQPSQVR

SEQ ID NO: 2863 - protein, 8 aa, Homo sapiens
  Table 1.2; FTHL17; ENSG00000132446; HLA -B*18:01,HLA-B*37:01,HLA-B*40:02,HLA-B*44:03,HLA-B*49:01
MEHAQKLM

SEQ ID NO: 2864 - protein, 9 aa, Homo sapiens
  Table 1.2; FTHL17; ENSG00000132446; HLA -B*49:01
MESAFHLEK

SEQ ID NO: 2865 - protein, 8 aa, Homo sapiens
  Table 1.2; FTHL17; ENSG00000132446; HLA -A*30:02,HLA-B*15:01,HLA-B*15:03,HLA-B*18:01
NQSLLDLY

SEQ ID NO: 2866 - protein, 10 aa, Homo sapiens
  Table 1.2; FTHL17; ENSG00000132446; HLA -B*38:01,HLA-B*39:01
NQSLLDLYQL

SEQ ID NO: 2867 - protein, 10 aa, Homo sapiens
  Table 1.2; FTHL17; ENSG00000132446; HLA -B*38:01
NRDDVALENF

SEQ ID NO: 2868 - protein, 8 aa, Homo sapiens
  Table 1.2; FTHL17; ENSG00000132446; HLA -C*03:04
NSHITLEL

SEQ ID NO: 2869 - protein, 9 aa, Homo sapiens
  Table 1.2; FTHL17; ENSG00000132446; HLA -A*01:01,HLA-A*29:02,HLA-A*30:02,HLA-B*46:01
NSHITLELY

SEQ ID NO: 2870 - protein, 10 aa, Homo sapiens
  Table 1.2; FTHL17; ENSG00000132446; HLA -A*01:01,HLA-A*25:01,HLA-A*26:01,HLA-A*29:02,HLA-A*30:02, HLA-B*35:01
NVNQSLLDLY

SEQ ID NO: 2871 - protein, 8 aa, Homo sapiens
  Table 1.2; FTHL17; ENSG00000132446; HLA -B*18:01
PEAGLAEY

SEQ ID NO: 2872 - protein, 9 aa, Homo sapiens
  Table 1.2; FTHL17; ENSG00000132446; HLA -B*40:01
PEAGLAEYL

SEQ ID NO: 2873 - protein, 10 aa, Homo sapiens
  Table 1.2; FTHL17; ENSG00000132446; HLA -B*35:01,HLA-B*35:03
QGWESGLVAM

SEQ ID NO: 2874 - protein, 9 aa, Homo sapiens
  Table 1.2; FTHL17; ENSG00000132446; HLA -A*29:02,HLA-A*30:02,HLA-A*32:01,HLA-B*15:01,HLA-B*35:01, HLA-B*44:02,HLA-B*44:03,HLA-B*55:01,HLA-C*07:02,HLA-C*16:01
QPSQVRQKY

SEQ ID NO: 2875 - protein, 9 aa, Homo sapiens
  Table 1.2; FTHL17; ENSG00000132446; HLA -A*02:04
QSLLDLYQL

SEQ ID NO: 2876 - protein, 8 aa, Homo sapiens
  Table 1.2; FTHL17; ENSG00000132446; HLA -B*08:01
QVKTIKEL

SEQ ID NO: 2877 - protein, 11 aa, Homo sapiens
  Table 1.2; FTHL17; ENSG00000132446; HLA -A*25:01,HLA-A*26:01,HLA-A*30:02
QVKTIKELGGY

SEQ ID NO: 2878 - protein, 9 aa, Homo sapiens
  Table 1.2; FTHL17; ENSG00000132446; HLA -A*68:02,HLA-B*51:01,HLA-C*12:03,HLA-C*16:02
SAFHLEKNV

SEQ ID NO: 2879 - protein, 8 aa, Homo sapiens
  Table 1.2; FTHL17; ENSG00000132446; HLA -A*02:01,HLA-A*02:04,HLA-A*23:01
SLLDLYQL

SEQ ID NO: 2880 - protein, 9 aa, Homo sapiens
  Table 1.2; FTHL17; ENSG00000132446; HLA -A*02:01,HLA-A*02:04
SLLDLYQLA

SEQ ID NO: 2881 - protein, 10 aa, Homo sapiens
  Table 1.2; FTHL17; ENSG00000132446; HLA -A*02:01,HLA-A*02:03,HLA-A*02:04,HLA-A*02:07,HLA-B*13:02
SLLDLYQLAV

SEQ ID NO: 2882 - protein, 8 aa, Homo sapiens
  Table 1.2; FTHL17; ENSG00000132446; HLA -A*31:01
SMAFYFNR

SEQ ID NO: 2883 - protein, 9 aa, Homo sapiens
  Table 1.2; FTHL17; ENSG00000132446; HLA -A*01:01,HLA-B*35:01,HLA-B*35:03,HLA-B*39:01,HLA-B*55:01, HLA-C*03:03
SPEAGLAEY

SEQ ID NO: 2884 - protein, 10 aa, Homo sapiens
  Table 1.2; FTHL17; ENSG00000132446; HLA -B*35:03
SPEAGLAEYL

SEQ ID NO: 2885 - protein, 11 aa, Homo sapiens
  Table 1.2; FTHL17; ENSG00000132446; HLA -B*35:01
SPEAGLAEYLF

SEQ ID NO: 2886 - protein, 9 aa, Homo sapiens
  Table 1.2; FTHL17; ENSG00000132446; HLA -A*23:01,HLA-A*24:02,HLA-A*29:02
SYLYLSMAF

SEQ ID NO: 2887 - protein, 10 aa, Homo sapiens
  Table 1.2; FTHL17; ENSG00000132446; HLA -A*29:02
SYLYLSMAFY

SEQ ID NO: 2888 - protein, 10 aa, Homo sapiens
  Table 1.2; FTHL17; ENSG00000132446; HLA -A*03:01,HLA-A*03:02,HLA-A*11:01,HLA-A*68:01,HLA-C*07:06
TAQPSQVRQK

SEQ ID NO: 2889 - protein, 11 aa, Homo sapiens
  Table 1.2; FTHL17; ENSG00000132446; HLA -A*29:02,HLA-A*30:02,HLA-A*32:01,HLA-B*15:01,HLA-B*35:01, HLA-B*57:01,HLA-B*58:01
TAQPSQVRQKY

SEQ ID NO: 2890 - protein, 8 aa, Homo sapiens
  Table 1.2; FTHL17; ENSG00000132446; HLA -A*30:02,HLA-B*15:01,HLA-B*46:01
TIKELGGY

SEQ ID NO: 2891 - protein, 9 aa, Homo sapiens
  Table 1.2; FTHL17; ENSG00000132446; HLA -A*02:03,HLA-A*26:01,HLA-A*68:02
TIKELGGYV

SEQ ID NO: 2892 - protein, 9 aa, Homo sapiens
  Table 1.2; FTHL17; ENSG00000132446; HLA -A*02:07
TLELYTSYL

SEQ ID NO: 2893 - protein, 10 aa, Homo sapiens
  Table 1.2; FTHL17; ENSG00000132446; HLA -A*01:01
TLELYTSYLY

SEQ ID NO: 2894 - protein, 9 aa, Homo sapiens
  Table 1.2; FTHL17; ENSG00000132446; HLA -A*02:03
TLGGRVKET

SEQ ID NO: 2895 - protein, 9 aa, Homo sapiens
  Table 1.2; FTHL17; ENSG00000132446; HLA -A*01:01,HLA-A*02:04,HLA-A*03:01,HLA-A*24:02,HLA-A*29:02, HLA-A*30:02,HLA-B*57:01,HLA-C*02:02
VALENFFRY

SEQ ID NO: 2896 - protein, 10 aa, Homo sapiens
  Table 1.2; FTHL17; ENSG00000132446; HLA -B*57:01
VALENFFRYF

SEQ ID NO: 2897 - protein, 9 aa, Homo sapiens
  Table 1.2; FTHL17; ENSG00000132446; HLA -A*02:01,HLA-A*02:04,HLA-A*02:07,HLA-A*03:02,HLA-A*11:01, HLA-A*23:01,HLA-A*24:02,HLA-A*30:01,HLA-A*31:01,HLA-A*68:02, HLA-B*13:02,HLA-B*27:02,HLA-B*35:03,HLA-B*37:01,HLA-B*38:01,
  HLA-B*40:01,HLA-B*46:01,HLA-B*58:01,HLA-C*01:02,HLA-C*02:02, HLA-C*03:03,HLA-C*03:04,HLA-C*12:03,HLA-C*14:02,HLA-C*16:01, HLA-C*16:02,HLA-C*16:04
VAMESAFHL

SEQ ID NO: 2898 - protein, 11 aa, Homo sapiens
  Table 1.2; FTHL17; ENSG00000132446; HLA -A*11:01
VAMESAFHLEK

SEQ ID NO: 2899 - protein, 8 aa, Homo sapiens
  Table 1.2; FTHL17; ENSG00000132446; HLA -A*30:01,HLA-B*18:01,HLA-B*37:01,HLA-B*40:01,HLA-B*40:02
VEKGDPQL

SEQ ID NO: 2900 - protein, 9 aa, Homo sapiens
  Table 1.2; FTHL17; ENSG00000132446; HLA -A*30:01,HLA-B*40:02,HLA-B*49:01,HLA-C*12:03
VEKGDPQLC

SEQ ID NO: 2901 - protein, 9 aa, Homo sapiens
  Table 1.2; FTHL17; ENSG00000132446; HLA -A*01:01,HLA-A*29:02,HLA-A*30:02
VNQSLLDLY

SEQ ID NO: 2902 - protein, 8 aa, Homo sapiens
  Table 1.2; FTHL17; ENSG00000132446; HLA -A*30:01,HLA-B*18:01,HLA-B*37:01
WESGLVAM

SEQ ID NO: 2903 - protein, 9 aa, Homo sapiens
  Table 1.2; FTHL17; ENSG00000132446; HLA -A*23:01,HLA-A*24:02,HLA-B*35:03,HLA-B*55:01,HLA-C*14:02
YFNRDDVAL

SEQ ID NO: 2904 - protein, 8 aa, Homo sapiens
  Table 1.2; FTHL17; ENSG00000132446; HLA -A*02:01,HLA-A*02:03,HLA-A*02:04,HLA-A*02:07,HLA-A*23:01, HLA-B*08:01,HLA-B*13:02,HLA-C*03:03
YLFDKLTL

SEQ ID NO: 2905 - protein, 9 aa, Homo sapiens
  Table 1.2; FTHL17; ENSG00000132446; HLA -A*02:01,HLA-A*02:03,HLA-A*02:04,HLA-A*02:07
YLFDKLTLG

SEQ ID NO: 2906 - protein, 10 aa, Homo sapiens
  Table 1.2; FTHL17; ENSG00000132446; HLA -A*02:01,HLA-A*02:03,HLA-A*02:04,HLA-A*02:07
YLFDKLTLGG

SEQ ID NO: 2907 - protein, 11 aa, Homo sapiens
  Table 1.2; FTHL17; ENSG00000132446; HLA -A*02:03
YLFDKLTLGGR

SEQ ID NO: 2908 - protein, 9 aa, Homo sapiens
  Table 1.2; FTHL17; ENSG00000132446; HLA -A*02:01,HLA-A*02:03,HLA-A*02:04,HLA-A*02:07,HLA-A*23:01, HLA-A*24:02,HLA-A*25:01,HLA-A*30:01,HLA-A*32:01,HLA-A*68:02, HLA-B*08:01,HLA-B*13:02,HLA-B*40:02,HLA-B*46:01,HLA-B*49:01,
  HLA-B*51:01,HLA-B*55:01,HLA-C*02:02,HLA-C*03:04,HLA-C*06:02, HLA-C*12:03,HLA-C*16:02
YLHEQVKTI

SEQ ID NO: 2909 - protein, 10 aa, Homo sapiens
  Table 1.2; FTHL17; ENSG00000132446; HLA -A*03:01
YLHEQVKTIK

SEQ ID NO: 2910 - protein, 9 aa, Homo sapiens
  Table 1.2; FTHL17; ENSG00000132446; HLA -A*01:01,HLA-A*29:02
YLYLSMAFY

SEQ ID NO: 2911 - protein, 9 aa, Homo sapiens
  Table 1.2; FTHL17; ENSG00000132446; HLA -A*01:01,HLA-A*29:02
YTSYLYLSM

SEQ ID NO: 2912 - protein, 9 aa, Homo sapiens
  Table 1.2; GAGE1; ENSG00000205777; HLA -A*02:01,HLA-A*02:03,HLA-A*02:04,HLA-B*13:02
AQTGILWLL

SEQ ID NO: 2913 - protein, 10 aa, Homo sapiens
  Table 1.2; GAGE1; ENSG00000205777; HLA -B*40:01
CEDGPDGQEM

SEQ ID NO: 2914 - protein, 8 aa, Homo sapiens
  Table 1.2; GAGE1; ENSG00000205777; HLA -B*18:01
DEVEPATP

SEQ ID NO: 2915 - protein, 8 aa, Homo sapiens
  Table 1.2; GAGE1; ENSG00000205777; HLA -B*51:01
DPPNPEEV

SEQ ID NO: 2916 - protein, 9 aa, Homo sapiens
  Table 1.2; GAGE1; ENSG00000205777; HLA -A*33:01
DSQEQGHPQ

SEQ ID NO: 2917 - protein, 9 aa, Homo sapiens
  Table 1.2; GAGE1; ENSG00000205777; HLA -A*33:03,HLA-C*07:06
EEGEPATQR

SEQ ID NO: 2918 - protein, 10 aa, Homo sapiens
  Table 1.2; GAGE1; ENSG00000205777; HLA -A*68:01
EGASAGQGPK

SEQ ID NO: 2919 - protein, 10 aa, Homo sapiens
  Table 1.2; GAGE1; ENSG00000205777; HLA -A*01:01
EMDPPNPEEV

SEQ ID NO: 2920 - protein, 11 aa, Homo sapiens
  Table 1.2; GAGE1; ENSG00000205777; HLA -A*01:01
EMDPPNPEEVK

SEQ ID NO: 2921 - protein, 9 aa, Homo sapiens
  Table 1.2; GAGE1; ENSG00000205777; HLA -A*26:01
EVKTPEEEM

SEQ ID NO: 2922 - protein, 10 aa, Homo sapiens
  Table 1.2; GAGE1; ENSG00000205777; HLA -A*33:03,HLA-A*68:01
EVKTPEEEMR

SEQ ID NO: 2923 - protein, 9 aa, Homo sapiens
  Table 1.2; GAGE1; ENSG00000205777; HLA -A*23:01,HLA-A*24:02,HLA-C*14:02
HYVAQTGIL

SEQ ID NO: 2924 - protein, 10 aa, Homo sapiens
  Table 1.2; GAGE1; ENSG00000205777; HLA -A*23:01,HLA-A*24:02
HYVAQTGILW

SEQ ID NO: 2925 - protein, 9 aa, Homo sapiens
  Table 1.2; GAGE1; ENSG00000205777; HLA -A*23:01,HLA-A*24:02
RYVQPPEMI

SEQ ID NO: 2926 - protein, 9 aa, Homo sapiens
  Table 1.2; GAGE1; ENSG00000205777; HLA -B*38:01
SHYVAQTGI

SEQ ID NO: 2927 - protein, 9 aa, Homo sapiens
  Table 1.2; GAGE1; ENSG00000205777; HLA -A*31:01
STYYWPRPR

SEQ ID NO: 2928 - protein, 9 aa, Homo sapiens
  Table 1.2; GAGE1; ENSG00000205777; HLA -B*35:03
TPEEGEPAT

SEQ ID NO: 2929 - protein, 11 aa, Homo sapiens
  Table 1.2; GAGE1; ENSG00000205777; HLA -A*68:01,HLA-C*07:06
TPEEGEPATQR

SEQ ID NO: 2930 - protein, 8 aa, Homo sapiens
  Table 1.2; GAGE1; ENSG00000205777; HLA -B*57:01,HLA-B*58:01
VAQTGILW

SEQ ID NO: 2931 - protein, 9 aa, Homo sapiens
  Table 1.2; GAGE1; ENSG00000205777; HLA -A*01:01,HLA-A*25:01,HLA-A*26:01,HLA-A*29:02,HLA-B*57:01, HLA-B*58:01
YVAQTGILW

SEQ ID NO: 2932 - protein, 11 aa, Homo sapiens
  Table 1.2; GAGE1; ENSG00000205777; HLA -A*02:04,HLA-A*68:02
YVAQTGILWLL

SEQ ID NO: 2933 - protein, 11 aa, Homo sapiens
  Table 1.2; GAGE1; ENSG00000205777; HLA -A*26:01
YVQPPEMIGPM

SEQ ID NO: 2934 - protein, 9 aa, Homo sapiens
  Table 1.2; GAGE1; ENSG00000205777; HLA -A*29:02
YYWPRPRRY

SEQ ID NO: 2935 - protein, 10 aa, Homo sapiens
  Table 1.2; GAGE12J; ENSG00000224659; HLA -B*40:01
CEDGPDGQEM

SEQ ID NO: 2936 - protein, 8 aa, Homo sapiens
  Table 1.2; GAGE12J; ENSG00000224659; HLA -B*18:01
DEVEPATP

SEQ ID NO: 2937 - protein, 8 aa, Homo sapiens
  Table 1.2; GAGE12J; ENSG00000224659; HLA -B*51:01
DPPNPEEV

SEQ ID NO: 2938 - protein, 9 aa, Homo sapiens
  Table 1.2; GAGE12J; ENSG00000224659; HLA -A*33:01
DSQEQGHPQ

SEQ ID NO: 2939 - protein, 9 aa, Homo sapiens
  Table 1.2; GAGE12J; ENSG00000224659; HLA -A*33:03,HLA-C*07:06
EEGEPATQR

SEQ ID NO: 2940 - protein, 10 aa, Homo sapiens
  Table 1.2; GAGE12J; ENSG00000224659; HLA -A*68:01
EGASAGQGPK

SEQ ID NO: 2941 - protein, 10 aa, Homo sapiens
  Table 1.2; GAGE12J; ENSG00000224659; HLA -A*01:01
EMDPPNPEEV

SEQ ID NO: 2942 - protein, 11 aa, Homo sapiens
  Table 1.2; GAGE12J; ENSG00000224659; HLA -A*01:01
EMDPPNPEEVK

SEQ ID NO: 2943 - protein, 9 aa, Homo sapiens
  Table 1.2; GAGE12J; ENSG00000224659; HLA -A*33:03
EVKTPEEGK

SEQ ID NO: 2944 - protein, 10 aa, Homo sapiens
  Table 1.2; GAGE12J; ENSG00000224659; HLA -A*68:01
EVKTPEEGKK

SEQ ID NO: 2945 - protein, 9 aa, Homo sapiens
  Table 1.2; GAGE12J; ENSG00000224659; HLA -A*24:02
PYVQPPEMI

SEQ ID NO: 2946 - protein, 9 aa, Homo sapiens
  Table 1.2; GAGE12J; ENSG00000224659; HLA -B*07:02,HLA-B*35:01,HLA-B*35:03,HLA-B*51:01,HLA-B*55:01, HLA-B*56:01,HLA-C*07:02
RPYVQPPEM

SEQ ID NO: 2947 - protein, 9 aa, Homo sapiens
  Table 1.2; GAGE12J; ENSG00000224659; HLA -A*31:01
STYYWPRPR

SEQ ID NO: 2948 - protein, 9 aa, Homo sapiens
  Table 1.2; GAGE12J; ENSG00000224659; HLA -B*35:03
TPEEGEPAT

SEQ ID NO: 2949 - protein, 11 aa, Homo sapiens
  Table 1.2; GAGE12J; ENSG00000224659; HLA -A*68:01,HLA-C*07:06
TPEEGEPATQR

SEQ ID NO: 2950 - protein, 9 aa, Homo sapiens
  Table 1.2; GAGE12J; ENSG00000224659; HLA -A*29:02
YYWPRPRPY

SEQ ID NO: 2951 - protein, 10 aa, Homo sapiens
  Table 1.2; GAGE2A; ENSG00000189064; HLA -A*30:01,HLA-B*40:01
CEDGPDGQEM

SEQ ID NO: 2952 - protein, 8 aa, Homo sapiens
  Table 1.2; GAGE2A; ENSG00000189064; HLA -B*18:01
DEVEPATP

SEQ ID NO: 2953 - protein, 9 aa, Homo sapiens
  Table 1.2; GAGE2A; ENSG00000189064; HLA -B*18:01
DEVEPATPE

SEQ ID NO: 2954 - protein, 8 aa, Homo sapiens
  Table 1.2; GAGE2A; ENSG00000189064; HLA -B*51:01
DGPDGQEM

SEQ ID NO: 2955 - protein, 8 aa, Homo sapiens
  Table 1.2; GAGE2A; ENSG00000189064; HLA -B*51:01
DPPNPEEV

SEQ ID NO: 2956 - protein, 9 aa, Homo sapiens
  Table 1.2; GAGE2A; ENSG00000189064; HLA -A*33:03,HLA-A*68:01,HLA-C*07:06
EEGEPATQR

SEQ ID NO: 2957 - protein, 10 aa, Homo sapiens
  Table 1.2; GAGE2A; ENSG00000189064; HLA -A*68:01
EGASAGQGPK

SEQ ID NO: 2958 - protein, 10 aa, Homo sapiens
  Table 1.2; GAGE2A; ENSG00000189064; HLA -A*01:01
EMDPPNPEEV

SEQ ID NO: 2959 - protein, 11 aa, Homo sapiens
  Table 1.2; GAGE2A; ENSG00000189064; HLA -A*01:01
EMDPPNPEEVK

SEQ ID NO: 2960 - protein, 9 aa, Homo sapiens
  Table 1.2; GAGE2A; ENSG00000189064; HLA -A*26:01
EPPEMIGPM

SEQ ID NO: 2961 - protein, 10 aa, Homo sapiens
  Table 1.2; GAGE2A; ENSG00000189064; HLA -A*68:01
EPPEMIGPMR

SEQ ID NO: 2962 - protein, 10 aa, Homo sapiens
  Table 1.2; GAGE2A; ENSG00000189064; HLA -A*33:03,HLA-A*68:01
EVKTPEEGEK

SEQ ID NO: 2963 - protein, 9 aa, Homo sapiens
  Table 1.2; GAGE2A; ENSG00000189064; HLA -A*02:07
MDPPNPEEV

SEQ ID NO: 2964 - protein, 11 aa, Homo sapiens
  Table 1.2; GAGE2A; ENSG00000189064; HLA -B*49:01
QEMDPPNPEEV

SEQ ID NO: 2965 - protein, 9 aa, Homo sapiens
  Table 1.2; GAGE2A; ENSG00000189064; HLA -C*16:04
RRYVEPPEM

SEQ ID NO: 2966 - protein, 9 aa, Homo sapiens
  Table 1.2; GAGE2A; ENSG00000189064; HLA -A*23:01,HLA-A*24:02
RYVEPPEMI

SEQ ID NO: 2967 - protein, 10 aa, Homo sapiens
  Table 1.2; GAGE2A; ENSG00000189064; HLA -B*54:01
SAGQGPKPEA

SEQ ID NO: 2968 - protein, 8 aa, Homo sapiens
  Table 1.2; GAGE2A; ENSG00000189064; HLA -A*31:01
STYRPRPR

SEQ ID NO: 2969 - protein, 9 aa, Homo sapiens
  Table 1.2; GAGE2A; ENSG00000189064; HLA -B*35:03
TPEEGEPAT

SEQ ID NO: 2970 - protein, 11 aa, Homo sapiens
  Table 1.2; GAGE2A; ENSG00000189064; HLA -A*68:01,HLA-C*07:06
TPEEGEPATQR

SEQ ID NO: 2971 - protein, 10 aa, Homo sapiens
  Table 1.2; GAGE2A; ENSG00000189064; HLA -B*40:01,HLA-B*40:02
VEPPEMIGPM

SEQ ID NO: 2972 - protein, 8 aa, Homo sapiens
  Table 1.2; GLYATL3; ENSG00000203972; HLA -B*37:01,HLA-B*44:02,HLA-B*44:03
AEFLPCRF

SEQ ID NO: 2973 - protein, 9 aa, Homo sapiens
  Table 1.2; GLYATL3; ENSG00000203972; HLA -A*30:02,HLA-B*18:01,HLA-B*27:02,HLA-B*40:01,HLA-B*44:02, HLA-B*44:03,HLA-B*49:01,HLA-C*16:02,HLA-C*16:04
AETDNLDHY

SEQ ID NO: 2974 - protein, 10 aa, Homo sapiens
  Table 1.2; GLYATL3; ENSG00000203972; HLA -A*25:01,HLA-A*32:01,HLA-B*44:02,HLA-B*44:03,HLA-B*57:01, HLA-B*58:01,HLA-C*16:04
ANADLLNRTW

SEQ ID NO: 2975 - protein, 9 aa, Homo sapiens
  Table 1.2; GLYATL3; ENSG00000203972; HLA -B*58:01
ASISLLKSL

SEQ ID NO: 2976 - protein, 9 aa, Homo sapiens
  Table 1.2; GLYATL3; ENSG00000203972; HLA -A*02:01,HLA-A*02:03,HLA-A*02:04,HLA-A*02:07,HLA-A*03:01, HLA-A*03:02,HLA-A*11:01,HLA-A*23:01,HLA-A*24:02,HLA-A*25:01, HLA-A*26:01,HLA-A*31:01,HLA-A*32:01,HLA-A*68:02,HLA-B*13:02,
  HLA-B*40:02,HLA-B*46:01,HLA-B*57:01,HLA-B*58:01,HLA-C*02:02, HLA-C*03:04
ATFSGLPHL

SEQ ID NO: 2977 - protein, 11 aa, Homo sapiens
  Table 1.2; GLYATL3; ENSG00000203972; HLA -A*03:01,HLA-A*03:02,HLA-A*11:01
AVANSKQLNIK

SEQ ID NO: 2978 - protein, 10 aa, Homo sapiens
  Table 1.2; GLYATL3; ENSG00000203972; HLA -A*03:01,HLA-A*25:01,HLA-A*30:02
AVFYKDVRAY

SEQ ID NO: 2979 - protein, 11 aa, Homo sapiens
  Table 1.2; GLYATL3; ENSG00000203972; HLA -A*31:01
AVFYKDVRAYR

SEQ ID NO: 2980 - protein, 9 aa, Homo sapiens
  Table 1.2; GLYATL3; ENSG00000203972; HLA -A*29:02
CFPESLKVY

SEQ ID NO: 2981 - protein, 9 aa, Homo sapiens
  Table 1.2; GLYATL3; ENSG00000203972; HLA -B*18:01
DDNTASISL

SEQ ID NO: 2982 - protein, 11 aa, Homo sapiens
  Table 1.2; GLYATL3; ENSG00000203972; HLA -B*27:02
DDNTASISLLK

SEQ ID NO: 2983 - protein, 9 aa, Homo sapiens
  Table 1.2; GLYATL3; ENSG00000203972; HLA -A*25:01,HLA-B*18:01,HLA-B*27:02,HLA-B*40:02,HLA-B*44:02, HLA-B*44:03,HLA-C*16:04
DEKGNPVSW

SEQ ID NO: 2984 - protein, 8 aa, Homo sapiens
  Table 1.2; GLYATL3; ENSG00000203972; HLA -A*33:01,HLA-A*33:03
DFKAVITR

SEQ ID NO: 2985 - protein, 9 aa, Homo sapiens
  Table 1.2; GLYATL3; ENSG00000203972; HLA -A*33:01,HLA-A*33:03
DFKAVITRR

SEQ ID NO: 2986 - protein, 9 aa, Homo sapiens
  Table 1.2; GLYATL3; ENSG00000203972; HLA -B*38:01,HLA-B*39:01
DHYTNAYAV

SEQ ID NO: 2987 - protein, 10 aa, Homo sapiens
  Table 1.2; GLYATL3; ENSG00000203972; HLA -B*38:01
DHYTNAYAVF

SEQ ID NO: 2988 - protein, 9 aa, Homo sapiens
  Table 1.2; GLYATL3; ENSG00000203972; HLA -A*33:01,HLA-A*33:03
DLLNRTWSR

SEQ ID NO: 2989 - protein, 10 aa, Homo sapiens
  Table 1.2; GLYATL3; ENSG00000203972; HLA -A*25:01,HLA-B*18:01
DNLDHYTNAY

SEQ ID NO: 2990 - protein, 10 aa, Homo sapiens
  Table 1.2; GLYATL3; ENSG00000203972; HLA -B*27:02
DNTASISLLK

SEQ ID NO: 2991 - protein, 10 aa, Homo sapiens
  Table 1.2; GLYATL3; ENSG00000203972; HLA -A*26:01
DQFATMCHGY

SEQ ID NO: 2992 - protein, 9 aa, Homo sapiens
  Table 1.2; GLYATL3; ENSG00000203972; HLA -B*39:01
DQVFQIQGL

SEQ ID NO: 2993 - protein, 9 aa, Homo sapiens
  Table 1.2; GLYATL3; ENSG00000203972; HLA -A*25:01,HLA-A*26:01
DVFNWDQVF

SEQ ID NO: 2994 - protein, 11 aa, Homo sapiens
  Table 1.2; GLYATL3; ENSG00000203972; HLA -A*68:02
DVFNWDQVFQI

SEQ ID NO: 2995 - protein, 10 aa, Homo sapiens
  Table 1.2; GLYATL3; ENSG00000203972; HLA -A*68:01
DVSKAVANSK

SEQ ID NO: 2996 - protein, 10 aa, Homo sapiens
  Table 1.2; GLYATL3; ENSG00000203972; HLA -A*01:01
EAETDNLDHY

SEQ ID NO: 2997 - protein, 9 aa, Homo sapiens
  Table 1.2; GLYATL3; ENSG00000203972; HLA -A*02:01,HLA-A*02:03,HLA-A*02:07,HLA-A*25:01,HLA-A*26:01, HLA-A*68:02,HLA-B*13:02,HLA-B*51:01,HLA-B*55:01
ELYDVSKAV

SEQ ID NO: 2998 - protein, 10 aa, Homo sapiens
  Table 1.2; GLYATL3; ENSG00000203972; HLA -A*26:01
ELYDVSKAVA

SEQ ID NO: 2999 - protein, 11 aa, Homo sapiens
  Table 1.2; GLYATL3; ENSG00000203972; HLA -A*33:01
ELYDVSKAVAN

SEQ ID NO: 3000 - protein, 8 aa, Homo sapiens
  Table 1.2; GLYATL3; ENSG00000203972; HLA -A*01:01
ETDNLDHY

SEQ ID NO: 3001 - protein, 9 aa, Homo sapiens
  Table 1.2; GLYATL3; ENSG00000203972; HLA -A*02:03
FLKGPSPRL

SEQ ID NO: 3002 - protein, 10 aa, Homo sapiens
  Table 1.2; GLYATL3; ENSG00000203972; HLA -A*02:03
FLKGPSPRLT

SEQ ID NO: 3003 - protein, 11 aa, Homo sapiens
  Table 1.2; GLYATL3; ENSG00000203972; HLA -A*29:02
FLKGPSPRLTY

SEQ ID NO: 3004 - protein, 8 aa, Homo sapiens
  Table 1.2; GLYATL3; ENSG00000203972; HLA -B*35:01,HLA-B*55:01
FPESLKVY

SEQ ID NO: 3005 - protein, 10 aa, Homo sapiens
  Table 1.2; GLYATL3; ENSG00000203972; HLA -B*54:01
FPESLKVYGA

SEQ ID NO: 3006 - protein, 8 aa, Homo sapiens
  Table 1.2; GLYATL3; ENSG00000203972; HLA -B*07:02,HLA-B*08:01,HLA-B*35:01,HLA-B*35:03,HLA-B*55:01, HLA-B*56:01,HLA-C*03:04
FPSQGNVL

SEQ ID NO: 3007 - protein, 10 aa, Homo sapiens
  Table 1.2; GLYATL3; ENSG00000203972; HLA -B*39:01,HLA-C*02:02
FQIQGLQSEL

SEQ ID NO: 3008 - protein, 11 aa, Homo sapiens
  Table 1.2; GLYATL3; ENSG00000203972; HLA -A*30:02,HLA-B*15:01,HLA-B*15:03
FQIQGLQSELY

SEQ ID NO: 3009 - protein, 9 aa, Homo sapiens
  Table 1.2; GLYATL3; ENSG00000203972; HLA -A*31:01
FYKDVRAYR

SEQ ID NO: 3010 - protein, 9 aa, Homo sapiens
  Table 1.2; GLYATL3; ENSG00000203972; HLA -C*14:02
GFPSQGNVL

SEQ ID NO: 3011 - protein, 9 aa, Homo sapiens
  Table 1.2; GLYATL3; ENSG00000203972; HLA -A*30:02
GGNEQCLRY

SEQ ID NO: 3012 - protein, 9 aa, Homo sapiens
  Table 1.2; GLYATL3; ENSG00000203972; HLA -A*02:01,HLA-A*02:04,HLA-B*13:02,HLA-B*55:01
GLQSELYDV

SEQ ID NO: 3013 - protein, 11 aa, Homo sapiens
  Table 1.2; GLYATL3; ENSG00000203972; HLA -A*03:02
GLQSELYDVSK

SEQ ID NO: 3014 - protein, 9 aa, Homo sapiens
  Table 1.2; GLYATL3; ENSG00000203972; HLA -B*07:02,HLA-B*37:01,HLA-C*07:02
GPSPRLTYL

SEQ ID NO: 3015 - protein, 10 aa, Homo sapiens
  Table 1.2; GLYATL3; ENSG00000203972; HLA -A*23:01,HLA-A*24:02
GYSRLVALTL

SEQ ID NO: 3016 - protein, 9 aa, Homo sapiens
  Table 1.2; GLYATL3; ENSG00000203972; HLA -A*31:01,HLA-A*33:01,HLA-A*33:03,HLA-A*68:01
HGYTLPEHR

SEQ ID NO: 3017 - protein, 10 aa, Homo sapiens
  Table 1.2; GLYATL3; ENSG00000203972; HLA -A*31:01
HGYTLPEHRR

SEQ ID NO: 3018 - protein, 9 aa, Homo sapiens
  Table 1.2; GLYATL3; ENSG00000203972; HLA -A*23:01,HLA-A*24:02,HLA-C*14:02
HYTNAYAVF

SEQ ID NO: 3019 - protein, 10 aa, Homo sapiens
  Table 1.2; GLYATL3; ENSG00000203972; HLA -A*29:02
HYTNAYAVFY

SEQ ID NO: 3020 - protein, 8 aa, Homo sapiens
  Table 1.2; GLYATL3; ENSG00000203972; HLA -B*15:01
IQGLQSEL

SEQ ID NO: 3021 - protein, 9 aa, Homo sapiens
  Table 1.2; GLYATL3; ENSG00000203972; HLA -A*30:02,HLA-B*15:01,HLA-B*15:03
IQGLQSELY

SEQ ID NO: 3022 - protein, 8 aa, Homo sapiens
  Table 1.2; GLYATL3; ENSG00000203972; HLA -C*05:01
ITDQFATM

SEQ ID NO: 3023 - protein, 9 aa, Homo sapiens
  Table 1.2; GLYATL3; ENSG00000203972; HLA -B*58:01,HLA-C*03:03,HLA-C*03:04,HLA-C*16:01,HLA-C*16:02
KAVANSKQL

SEQ ID NO: 3024 - protein, 9 aa, Homo sapiens
  Table 1.2; GLYATL3; ENSG00000203972; HLA -A*32:01
KGNPVSWSI

SEQ ID NO: 3025 - protein, 9 aa, Homo sapiens
  Table 1.2; GLYATL3; ENSG00000203972; HLA -A*30:02,HLA-A*32:01,HLA-C*16:01
KGPSPRLTY

SEQ ID NO: 3026 - protein, 10 aa, Homo sapiens
  Table 1.2; GLYATL3; ENSG00000203972; HLA -A*02:07
KGPSPRLTYL

SEQ ID NO: 3027 - protein, 9 aa, Homo sapiens
  Table 1.2; GLYATL3; ENSG00000203972; HLA -B*08:01,HLA-B*37:01
KGYSRLVAL

SEQ ID NO: 3028 - protein, 10 aa, Homo sapiens
  Table 1.2; GLYATL3; ENSG00000203972; HLA -A*23:01,HLA-A*24:02,HLA-A*30:02,HLA-A*31:01,HLA-A*32:01, HLA-B*15:01,HLA-B*15:03
KQLNIKLTSF

SEQ ID NO: 3029 - protein, 9 aa, Homo sapiens
  Table 1.2; GLYATL3; ENSG00000203972; HLA -A*02:01,HLA-A*02:03,HLA-A*02:07,HLA-A*03:01,HLA-A*32:01, HLA-B*13:02,HLA-B*40:02,HLA-B*58:01
KVYGAVMNI

SEQ ID NO: 3030 - protein, 11 aa, Homo sapiens
  Table 1.2; GLYATL3; ENSG00000203972; HLA -A*03:01,HLA-A*31:01
KVYGAVMNINR

SEQ ID NO: 3031 - protein, 8 aa, Homo sapiens
  Table 1.2; GLYATL3; ENSG00000203972; HLA -B*18:01,HLA-B*37:01
LDHYTNAY

SEQ ID NO: 3032 - protein, 8 aa, Homo sapiens
  Table 1.2; GLYATL3; ENSG00000203972; HLA -A*23:01,HLA-B*39:01
LILTPATF

SEQ ID NO: 3033 - protein, 8 aa, Homo sapiens
  Table 1.2; GLYATL3; ENSG00000203972; HLA -B*27:02
LPDTSFLK

SEQ ID NO: 3034 - protein, 8 aa, Homo sapiens
  Table 1.2; GLYATL3; ENSG00000203972; HLA -B*13:02
LQSELYDV

SEQ ID NO: 3035 - protein, 10 aa, Homo sapiens
  Table 1.2; GLYATL3; ENSG00000203972; HLA -A*11:01,HLA-B*27:02
LQSELYDVSK

SEQ ID NO: 3036 - protein, 9 aa, Homo sapiens
  Table 1.2; GLYATL3; ENSG00000203972; HLA -A*02:07,HLA-C*01:02
LTPATFSGL

SEQ ID NO: 3037 - protein, 8 aa, Homo sapiens
  Table 1.2; GLYATL3; ENSG00000203972; HLA -C*04:01
LYDVSKAV

SEQ ID NO: 3038 - protein, 9 aa, Homo sapiens
  Table 1.2; GLYATL3; ENSG00000203972; HLA -B*08:01,HLA-C*16:01
MNINRGNPF

SEQ ID NO: 3039 - protein, 9 aa, Homo sapiens
  Table 1.2; GLYATL3; ENSG00000203972; HLA -A*25:01,HLA-B*44:02,HLA-B*44:03,HLA-B*51:01,HLA-B*57:01, HLA-B*58:01
NADLLNRTW

SEQ ID NO: 3040 - protein, 9 aa, Homo sapiens
  Table 1.2; GLYATL3; ENSG00000203972; HLA -A*01:01,HLA-A*02:07,HLA-A*29:02,HLA-A*30:02
NLDHYTNAY

SEQ ID NO: 3041 - protein, 9 aa, Homo sapiens
  Table 1.2; GLYATL3; ENSG00000203972; HLA -A*02:01,HLA-A*02:07,HLA-B*55:01
NLISCFPSV

SEQ ID NO: 3042 - protein, 8 aa, Homo sapiens
  Table 1.2; GLYATL3; ENSG00000203972; HLA -B*08:01,HLA-B*51:01
NPFQKEVV

SEQ ID NO: 3043 - protein, 9 aa, Homo sapiens
  Table 1.2; GLYATL3; ENSG00000203972; HLA -B*07:02,HLA-B*08:01,HLA-B*35:01,HLA-B*35:03,HLA-B*51:01, HLA-B*54:01,HLA-B*55:01,HLA-B*56:01,HLA-C*03:03,HLA-C*07:02
NPFQKEVVL

SEQ ID NO: 3044 - protein, 11 aa, Homo sapiens
  Table 1.2; GLYATL3; ENSG00000203972; HLA -B*35:01
NPVSWSITDQF

SEQ ID NO: 3045 - protein, 9 aa, Homo sapiens
  Table 1.2; GLYATL3; ENSG00000203972; HLA -A*01:01,HLA-A*03:01,HLA-A*03:02,HLA-A*11:01,HLA-A*26:01, HLA-A*29:02,HLA-A*33:03,HLA-A*68:01,HLA-A*68:02,HLA-B*27:05, HLA-C*07:06
NTASISLLK

SEQ ID NO: 3046 - protein, 11 aa, Homo sapiens
  Table 1.2; GLYATL3; ENSG00000203972; HLA -A*68:02
NTASISLLKSL

SEQ ID NO: 3047 - protein, 10 aa, Homo sapiens
  Table 1.2; GLYATL3; ENSG00000203972; HLA -A*25:01
NVLDDNTASI

SEQ ID NO: 3048 - protein, 9 aa, Homo sapiens
  Table 1.2; GLYATL3; ENSG00000203972; HLA -A*29:02
QFATMCHGY

SEQ ID NO: 3049 - protein, 9 aa, Homo sapiens
  Table 1.2; GLYATL3; ENSG00000203972; HLA -C*01:02
QIQGLQSEL

SEQ ID NO: 3050 - protein, 10 aa, Homo sapiens
  Table 1.2; GLYATL3; ENSG00000203972; HLA -A*30:02,HLA-B*15:01
QIQGLQSELY

SEQ ID NO: 3051 - protein, 9 aa, Homo sapiens
  Table 1.2; GLYATL3; ENSG00000203972; HLA -A*02:03,HLA-A*23:01,HLA-A*24:02,HLA-A*25:01,HLA-A*31:01, HLA-A*32:01,HLA-B*08:01,HLA-B*15:01,HLA-B*15:03,HLA-B*37:01, HLA-B*46:01
QLNIKLTSF

SEQ ID NO: 3052 - protein, 9 aa, Homo sapiens
  Table 1.2; GLYATL3; ENSG00000203972; HLA -B*27:02
QSELYDVSK

SEQ ID NO: 3053 - protein, 10 aa, Homo sapiens
  Table 1.2; GLYATL3; ENSG00000203972; HLA -B*44:03,HLA-B*58:01
RDEKGNPVSW

SEQ ID NO: 3054 - protein, 11 aa, Homo sapiens
  Table 1.2; GLYATL3; ENSG00000203972; HLA -A*30:02,HLA-B*44:02,HLA-B*44:03
REAETDNLDHY

SEQ ID NO: 3055 - protein, 9 aa, Homo sapiens
  Table 1.2; GLYATL3; ENSG00000203972; HLA -A*23:01,HLA-A*24:02,HLA-A*32:01,HLA-B*15:01,HLA-B*15:03, HLA-B*46:01,HLA-B*57:01,HLA-B*58:01
RLILTPATF

SEQ ID NO: 3056 - protein, 9 aa, Homo sapiens
  Table 1.2; GLYATL3; ENSG00000203972; HLA -A*03:01
RLVALTLAR

SEQ ID NO: 3057 - protein, 10 aa, Homo sapiens
  Table 1.2; GLYATL3; ENSG00000203972; HLA -A*23:01,HLA-A*24:02
RYIANLISCF

SEQ ID NO: 3058 - protein, 9 aa, Homo sapiens
  Table 1.2; GLYATL3; ENSG00000203972; HLA -B*13:02
SCFPESLKV

SEQ ID NO: 3059 - protein, 10 aa, Homo sapiens
  Table 1.2; GLYATL3; ENSG00000203972; HLA -A*30:02,HLA-B*15:01,HLA-C*12:03
SCFPESLKVY

SEQ ID NO: 3060 - protein, 9 aa, Homo sapiens
  Table 1.2; GLYATL3; ENSG00000203972; HLA -A*31:01
SCFPSVCVR

SEQ ID NO: 3061 - protein, 9 aa, Homo sapiens
  Table 1.2; GLYATL3; ENSG00000203972; HLA -A*30:01,HLA-B*40:01,HLA-B*40:02,HLA-B*49:01
SELYDVSKA

SEQ ID NO: 3062 - protein, 10 aa, Homo sapiens
  Table 1.2; GLYATL3; ENSG00000203972; HLA -B*49:01
SELYDVSKAV

SEQ ID NO: 3063 - protein, 8 aa, Homo sapiens
  Table 1.2; GLYATL3; ENSG00000203972; HLA -B*37:01
SISLLKSL

SEQ ID NO: 3064 - protein, 9 aa, Homo sapiens
  Table 1.2; GLYATL3; ENSG00000203972; HLA -A*25:01,HLA-A*26:01,HLA-A*30:01,HLA-A*32:01,HLA-A*68:01, HLA-A*68:02,HLA-B*18:01,HLA-B*27:05,HLA-B*35:01,HLA-B*35:03, HLA-B*46:01,HLA-C*01:02,HLA-C*02:02,HLA-C*03:03,HLA-C*03:04
SITDQFATM

SEQ ID NO: 3065 - protein, 9 aa, Homo sapiens
  Table 1.2; GLYATL3; ENSG00000203972; HLA -B*08:01,HLA-B*46:01
SLKVYGAVM

SEQ ID NO: 3066 - protein, 9 aa, Homo sapiens
  Table 1.2; GLYATL3; ENSG00000203972; HLA -A*03:01,HLA-A*03:02,HLA-A*11:01
SLPDTSFLK

SEQ ID NO: 3067 - protein, 9 aa, Homo sapiens
  Table 1.2; GLYATL3; ENSG00000203972; HLA -B*07:02,HLA-B*54:01,HLA-B*56:01,HLA-C*07:02
SPRLTYLSV

SEQ ID NO: 3068 - protein, 9 aa, Homo sapiens
  Table 1.2; GLYATL3; ENSG00000203972; HLA -B*56:01
SPVSSLPDT

SEQ ID NO: 3069 - protein, 11 aa, Homo sapiens
  Table 1.2; GLYATL3; ENSG00000203972; HLA -B*07:02,HLA-B*35:01,HLA-B*35:03,HLA-B*55:01,HLA-B*56:01, HLA-C*03:03
SPVSSLPDTSF

SEQ ID NO: 3070 - protein, 10 aa, Homo sapiens
  Table 1.2; GLYATL3; ENSG00000203972; HLA -A*11:01
SSLPDTSFLK

SEQ ID NO: 3071 - protein, 9 aa, Homo sapiens
  Table 1.2; GLYATL3; ENSG00000203972; HLA -A*03:01,HLA-A*11:01,HLA-A*31:01,HLA-A*33:01,HLA-A*33:03, HLA-B*13:02
STKLLILEK

SEQ ID NO: 3072 - protein, 10 aa, Homo sapiens
  Table 1.2; GLYATL3; ENSG00000203972; HLA -A*03:01,HLA-A*11:01,HLA-A*31:01,HLA-A*33:01,HLA-A*33:03, HLA-A*68:01,HLA-B*27:02,HLA-C*07:06
SVANADLLNR

SEQ ID NO: 3073 - protein, 8 aa, Homo sapiens
  Table 1.2; GLYATL3; ENSG00000203972; HLA -B*27:02
TASISLLK

SEQ ID NO: 3074 - protein, 8 aa, Homo sapiens
  Table 1.2; GLYATL3; ENSG00000203972; HLA -A*23:01
TFSGLPHL

SEQ ID NO: 3075 - protein, 8 aa, Homo sapiens
  Table 1.2; GLYATL3; ENSG00000203972; HLA -B*07:02
TPATFSGL

SEQ ID NO: 3076 - protein, 11 aa, Homo sapiens
  Table 1.2; GLYATL3; ENSG00000203972; HLA -B*07:02,HLA-B*35:03,HLA-C*04:01,HLA-C*06:02
TPATFSGLPHL

SEQ ID NO: 3077 - protein, 8 aa, Homo sapiens
  Table 1.2; GLYATL3; ENSG00000203972; HLA -B*57:01
TSFKAVHF

SEQ ID NO: 3078 - protein, 11 aa, Homo sapiens
  Table 1.2; GLYATL3; ENSG00000203972; HLA -A*23:01,HLA-A*24:02
TYLSVANADLL

SEQ ID NO: 3079 - protein, 9 aa, Homo sapiens
  Table 1.2; GLYATL3; ENSG00000203972; HLA -C*16:01,HLA-C*16:02
VALTLARKL

SEQ ID NO: 3080 - protein, 9 aa, Homo sapiens
  Table 1.2; GLYATL3; ENSG00000203972; HLA -A*03:02,HLA-A*11:01,HLA-A*31:01,HLA-A*33:01,HLA-A*33:03, HLA-A*68:01,HLA-C*07:06
VANADLLNR

SEQ ID NO: 3081 - protein, 11 aa, Homo sapiens
  Table 1.2; GLYATL3; ENSG00000203972; HLA -A*32:01,HLA-B*44:02,HLA-B*57:01,HLA-B*58:01
VANADLLNRTW

SEQ ID NO: 3082 - protein, 9 aa, Homo sapiens
  Table 1.2; GLYATL3; ENSG00000203972; HLA -A*23:01,HLA-A*24:02,HLA-A*30:01,HLA-A*32:01,HLA-B*13:02, HLA-B*51:01,HLA-B*58:01,HLA-C*16:02
VANSKQLNI

SEQ ID NO: 3083 - protein, 9 aa, Homo sapiens
  Table 1.2; GLYATL3; ENSG00000203972; HLA -A*29:02,HLA-A*30:02
VFYKDVRAY

SEQ ID NO: 3084 - protein, 10 aa, Homo sapiens
  Table 1.2; GLYATL3; ENSG00000203972; HLA -A*31:01
VFYKDVRAYR

SEQ ID NO: 3085 - protein, 9 aa, Homo sapiens
  Table 1.2; GLYATL3; ENSG00000203972; HLA -B*15:03,HLA-B*38:01,HLA-B*39:01
VHFSPVSSL

SEQ ID NO: 3086 - protein, 9 aa, Homo sapiens
  Table 1.2; GLYATL3; ENSG00000203972; HLA -A*01:01,HLA-A*02:01,HLA-A*02:03,HLA-A*02:07,HLA-A*30:01, HLA-A*32:01,HLA-B*13:02,HLA-B*38:01,HLA-B*55:01,HLA-C*04:01, HLA-C*05:01
VLDDNTASI

SEQ ID NO: 3087 - protein, 11 aa, Homo sapiens
  Table 1.2; GLYATL3; ENSG00000203972; HLA -A*02:01,HLA-A*02:07,HLA-B*38:01,HLA-B*55:01,HLA-C*05:01
VLDDNTASISL

SEQ ID NO: 3088 - protein, 11 aa, Homo sapiens
  Table 1.2; GLYATL3; ENSG00000203972; HLA -A*02:01,HLA-A*02:07
VLDSWPDFKAV

SEQ ID NO: 3089 - protein, 10 aa, Homo sapiens
  Table 1.2; GLYATL3; ENSG00000203972; HLA -A*32:01,HLA-C*16:01
VMNINRGNPF

SEQ ID NO: 3090 - protein, 9 aa, Homo sapiens
  Table 1.2; GLYATL3; ENSG00000203972; HLA -A*03:02,HLA-A*31:01,HLA-B*58:01
VSKAVANSK

SEQ ID NO: 3091 - protein, 9 aa, Homo sapiens
  Table 1.2; GLYATL3; ENSG00000203972; HLA -A*32:01,HLA-B*15:01,HLA-B*46:01,HLA-B*58:01,HLA-C*05:01
VSSLPDTSF

SEQ ID NO: 3092 - protein, 11 aa, Homo sapiens
  Table 1.2; GLYATL3; ENSG00000203972; HLA -A*11:01
VSSLPDTSFLK

SEQ ID NO: 3093 - protein, 8 aa, Homo sapiens
  Table 1.2; GLYATL3; ENSG00000203972; HLA -A*23:01,HLA-A*24:02
VYGAVMNI

SEQ ID NO: 3094 - protein, 10 aa, Homo sapiens
  Table 1.2; GLYATL3; ENSG00000203972; HLA -A*31:01,HLA-A*33:01,HLA-A*33:03,HLA-B*27:02
VYGAVMNINR

SEQ ID NO: 3095 - protein, 8 aa, Homo sapiens
  Table 1.2; GLYATL3; ENSG00000203972; HLA -B*08:01
WPDFKAVI

SEQ ID NO: 3096 - protein, 9 aa, Homo sapiens
  Table 1.2; GLYATL3; ENSG00000203972; HLA -A*33:03,HLA-A*68:01,HLA-B*27:02,HLA-C*07:06
YGAVMNINR

SEQ ID NO: 3097 - protein, 9 aa, Homo sapiens
  Table 1.2; GLYATL3; ENSG00000203972; HLA -A*25:01,HLA-A*26:01,HLA-B*46:01,HLA-C*02:02
YIANLISCF

SEQ ID NO: 3098 - protein, 9 aa, Homo sapiens
  Table 1.2; GLYATL3; ENSG00000203972; HLA -A*01:01,HLA-A*03:01,HLA-A*11:01,HLA-A*26:01,HLA-A*29:02, HLA-A*30:02,HLA-A*32:01,HLA-A*33:01,HLA-B*57:01,HLA-C*02:02
YTNAYAVFY

SEQ ID NO: 3099 - protein, 9 aa, Homo sapiens
  Table 1.2; GPRC6A; ENSG00000173612; HLA -A*02:07,HLA-B*51:01,HLA-C*01:02
AAPTVEVNV

SEQ ID NO: 3100 - protein, 9 aa, Homo sapiens
  Table 1.2; GPRC6A; ENSG00000173612; HLA -C*16:02
AATSPGHII

SEQ ID NO: 3101 - protein, 8 aa, Homo sapiens
  Table 1.2; GPRC6A; ENSG00000173612; HLA -B*49:01
AEANNVCI

SEQ ID NO: 3102 - protein, 10 aa, Homo sapiens
  Table 1.2; GPRC6A; ENSG00000173612; HLA -A*30:01,HLA-B*27:02,HLA-B*40:01,HLA-B*44:02,HLA-B*44:03, HLA-C*16:04
AEANNVCIAF

SEQ ID NO: 3103 - protein, 8 aa, Homo sapiens
  Table 1.2; GPRC6A; ENSG00000173612; HLA -A*30:01,HLA-B*37:01,HLA-B*44:02,HLA-B*44:03,HLA-B*49:01
AEILSDKI

SEQ ID NO: 3104 - protein, 10 aa, Homo sapiens
  Table 1.2; GPRC6A; ENSG00000173612; HLA -B*44:02,HLA-B*44:03
AEILSDKIRF

SEQ ID NO: 3105 - protein, 9 aa, Homo sapiens
  Table 1.2; GPRC6A; ENSG00000173612; HLA -A*02:07,HLA-A*30:01,HLA-B*13:02,HLA-B*27:02,HLA-B*37:01, HLA-B*40:01,HLA-B*40:02,HLA-B*44:02,HLA-B*44:03,HLA-B*49:01, HLA-C*16:04
AEPGLIHSI

SEQ ID NO: 3106 - protein, 11 aa, Homo sapiens
  Table 1.2; GPRC6A; ENSG00000173612; HLA -A*30:01,HLA-B*40:01,HLA-B*44:02,HLA-B*44:03
AEPGLIHSIQL

SEQ ID NO: 3107 - protein, 9 aa, Homo sapiens
  Table 1.2; GPRC6A; ENSG00000173612; HLA -A*30:01,HLA-B*49:01,HLA-C*16:04
AEYDLQNDV

SEQ ID NO: 3108 - protein, 10 aa, Homo sapiens
  Table 1.2; GPRC6A; ENSG00000173612; HLA -A*30:01,HLA-B*18:01,HLA-B*27:02,HLA-B*37:01,HLA-B*40:01, HLA-B*40:02,HLA-B*44:02,HLA-B*44:03,HLA-B*49:01,HLA-C*16:04
AEYDLQNDVF

SEQ ID NO: 3109 - protein, 11 aa, Homo sapiens
  Table 1.2; GPRC6A; ENSG00000173612; HLA -B*49:01
AEYDLQNDVFI

SEQ ID NO: 3110 - protein, 9 aa, Homo sapiens
  Table 1.2; GPRC6A; ENSG00000173612; HLA -A*23:01,HLA-A*24:02,HLA-A*30:02,HLA-B*46:01
AFKEVLPAF

SEQ ID NO: 3111 - protein, 9 aa, Homo sapiens
  Table 1.2; GPRC6A; ENSG00000173612; HLA -A*29:02,HLA-A*30:02
AFKGKYENY

SEQ ID NO: 3112 - protein, 9 aa, Homo sapiens
  Table 1.2; GPRC6A; ENSG00000173612; HLA -A*29:02,HLA-A*30:02
AFLKMIYSY

SEQ ID NO: 3113 - protein, 9 aa, Homo sapiens
  Table 1.2; GPRC6A; ENSG00000173612; HLA -A*02:04
AILLLILSL

SEQ ID NO: 3114 - protein, 9 aa, Homo sapiens
  Table 1.2; GPRC6A; ENSG00000173612; HLA -A*31:01
AIRDLCQAR

SEQ ID NO: 3115 - protein, 9 aa, Homo sapiens
  Table 1.2; GPRC6A; ENSG00000173612; HLA -A*02:04
ALGYAIRDL

SEQ ID NO: 3116 - protein, 9 aa, Homo sapiens
  Table 1.2; GPRC6A; ENSG00000173612; HLA -A*02:01,HLA-A*02:03,HLA-A*02:04,HLA-A*02:07,HLA-A*03:01, HLA-B*55:01,HLA-B*56:01
ALNTFIIQA

SEQ ID NO: 3117 - protein, 9 aa, Homo sapiens
  Table 1.2; GPRC6A; ENSG00000173612; HLA -A*02:03,HLA-A*02:04
AMAATLRFL

SEQ ID NO: 3118 - protein, 8 aa, Homo sapiens
  Table 1.2; GPRC6A; ENSG00000173612; HLA -A*03:01
AMAHLIQK

SEQ ID NO: 3119 - protein, 9 aa, Homo sapiens
  Table 1.2; GPRC6A; ENSG00000173612; HLA -A*30:02,HLA-B*15:01,HLA-B*15:03,HLA-B*46:01
AMHLSACAY

SEQ ID NO: 3120 - protein, 8 aa, Homo sapiens
  Table 1.2; GPRC6A; ENSG00000173612; HLA -B*46:01
AMIHSIEM

SEQ ID NO: 3121 - protein, 9 aa, Homo sapiens
  Table 1.2; GPRC6A; ENSG00000173612; HLA -A*02:01,HLA-A*02:03,HLA-A*02:04,HLA-A*02:07,HLA-B*13:02, HLA-B*55:01
AMIHSIEMI

SEQ ID NO: 3122 - protein, 10 aa, Homo sapiens
  Table 1.2; GPRC6A; ENSG00000173612; HLA -B*07:02,HLA-B*35:03,HLA-B*56:01,HLA-C*07:02
APTVEVNVSL

SEQ ID NO: 3123 - protein, 8 aa, Homo sapiens
  Table 1.2; GPRC6A; ENSG00000173612; HLA -B*56:01
APVRSTMC

SEQ ID NO: 3124 - protein, 9 aa, Homo sapiens
  Table 1.2; GPRC6A; ENSG00000173612; HLA -B*07:02
APVRSTMCF

SEQ ID NO: 3125 - protein, 8 aa, Homo sapiens
  Table 1.2; GPRC6A; ENSG00000173612; HLA -B*13:02
AQVNVIVV

SEQ ID NO: 3126 - protein, 9 aa, Homo sapiens
  Table 1.2; GPRC6A; ENSG00000173612; HLA -A*23:01,HLA-A*25:01,HLA-A*26:01,HLA-A*30:01,HLA-A*32:01, HLA-B*13:02,HLA-B*15:01,HLA-B*15:03,HLA-B*27:02,HLA-B*38:01, HLA-B*39:01,HLA-B*44:02,HLA-B*44:03,HLA-B*58:01,HLA-C*02:02,
  HLA-C*12:03,HLA-C*16:04
AQVNVIVVF

SEQ ID NO: 3127 - protein, 11 aa, Homo sapiens
  Table 1.2; GPRC6A; ENSG00000173612; HLA -A*03:01,HLA-A*03:02,HLA-A*11:01,HLA-A*31:01
ATKITTIPNVK

SEQ ID NO: 3128 - protein, 9 aa, Homo sapiens
  Table 1.2; GPRC6A; ENSG00000173612; HLA -B*57:01
ATLRFLSKF

SEQ ID NO: 3129 - protein, 10 aa, Homo sapiens
  Table 1.2; GPRC6A; ENSG00000173612; HLA -A*11:01,HLA-A*68:01
ATSVSKTLPR

SEQ ID NO: 3130 - protein, 11 aa, Homo sapiens
  Table 1.2; GPRC6A; ENSG00000173612; HLA -A*11:01
ATSVSKTLPRK

SEQ ID NO: 3131 - protein, 9 aa, Homo sapiens
  Table 1.2; GPRC6A; ENSG00000173612; HLA -A*02:04,HLA-B*13:02
AVFALGYAI

SEQ ID NO: 3132 - protein, 10 aa, Homo sapiens
  Table 1.2; GPRC6A; ENSG00000173612; HLA -A*25:01,HLA-A*26:01,HLA-B*46:01
AVIGSGYSEI

SEQ ID NO: 3133 - protein, 10 aa, Homo sapiens
  Table 1.2; GPRC6A; ENSG00000173612; HLA -A*33:03
AYKANKAIER

SEQ ID NO: 3134 - protein, 9 aa, Homo sapiens
  Table 1.2; GPRC6A; ENSG00000173612; HLA -B*08:01
CAYVKDTDL

SEQ ID NO: 3135 - protein, 9 aa, Homo sapiens
  Table 1.2; GPRC6A; ENSG00000173612; HLA -A*30:01,HLA-B*18:01,HLA-B*27:02,HLA-B*40:01,HLA-B*44:02, HLA-B*44:03,HLA-B*49:01
CEEGSILAF

SEQ ID NO: 3136 - protein, 9 aa, Homo sapiens
  Table 1.2; GPRC6A; ENSG00000173612; HLA -A*30:02
CQNCPENHY

SEQ ID NO: 3137 - protein, 10 aa, Homo sapiens
  Table 1.2; GPRC6A; ENSG00000173612; HLA -B*27:02,HLA-B*27:05
CRENATSVSK

SEQ ID NO: 3138 - protein, 10 aa, Homo sapiens
  Table 1.2; GPRC6A; ENSG00000173612; HLA -A*25:01,HLA-A*26:01
DAHGDLNTGY

SEQ ID NO: 3139 - protein, 9 aa, Homo sapiens
  Table 1.2; GPRC6A; ENSG00000173612; HLA -A*26:01,HLA-A*33:01,HLA-B*08:01,HLA-B*18:01
DLFNKAIEM

SEQ ID NO: 3140 - protein, 10 aa, Homo sapiens
  Table 1.2; GPRC6A; ENSG00000173612; HLA -A*33:01,HLA-A*33:03
DNTIEVRINR

SEQ ID NO: 3141 - protein, 9 aa, Homo sapiens
  Table 1.2; GPRC6A; ENSG00000173612; HLA -B*51:01
DNWSTATKI

SEQ ID NO: 3142 - protein, 8 aa, Homo sapiens
  Table 1.2; GPRC6A; ENSG00000173612; HLA -B*08:01
DPKLQKFL

SEQ ID NO: 3143 - protein, 9 aa, Homo sapiens
  Table 1.2; GPRC6A; ENSG00000173612; HLA -A*33:01
DPKLQKFLK

SEQ ID NO: 3144 - protein, 9 aa, Homo sapiens
  Table 1.2; GPRC6A; ENSG00000173612; HLA -A*01:01,HLA-A*26:01,HLA-A*30:02,HLA-A*33:01,HLA-B*18:01
DSHKLLHEY

SEQ ID NO: 3145 - protein, 9 aa, Homo sapiens
  Table 1.2; GPRC6A; ENSG00000173612; HLA -B*51:01
DSLAILLLI

SEQ ID NO: 3146 - protein, 9 aa, Homo sapiens
  Table 1.2; GPRC6A; ENSG00000173612; HLA -A*25:01,HLA-A*26:01,HLA-A*33:01,HLA-B*35:01,HLA-B*35:03, HLA-B*39:01,HLA-B*51:01
DSMSGNVTM

SEQ ID NO: 3147 - protein, 8 aa, Homo sapiens
  Table 1.2; GPRC6A; ENSG00000173612; HLA -B*51:01
DSPRRPQI

SEQ ID NO: 3148 - protein, 10 aa, Homo sapiens
  Table 1.2; GPRC6A; ENSG00000173612; HLA -A*26:01
DTCTEVTVAM

SEQ ID NO: 3149 - protein, 9 aa, Homo sapiens
  Table 1.2; GPRC6A; ENSG00000173612; HLA -A*01:01
DTDLSQCIF

SEQ ID NO: 3150 - protein, 11 aa, Homo sapiens
  Table 1.2; GPRC6A; ENSG00000173612; HLA -A*68:01,HLA-A*68:02
DVFIIPDQETK

SEQ ID NO: 3151 - protein, 10 aa, Homo sapiens
  Table 1.2; GPRC6A; ENSG00000173612; HLA -A*33:01
DYAEPGLIHS

SEQ ID NO: 3152 - protein, 11 aa, Homo sapiens
  Table 1.2; GPRC6A; ENSG00000173612; HLA -A*23:01,HLA-A*24:02,HLA-A*33:01,HLA-A*33:03,HLA-B*38:01
DYAEPGLIHSI

SEQ ID NO: 3153 - protein, 10 aa, Homo sapiens
  Table 1.2; GPRC6A; ENSG00000173612; HLA -A*24:02
DYGRLALNTF

SEQ ID NO: 3154 - protein, 8 aa, Homo sapiens
  Table 1.2; GPRC6A; ENSG00000173612; HLA -A*33:01
DYSSYMPR

SEQ ID NO: 3155 - protein, 9 aa, Homo sapiens
  Table 1.2; GPRC6A; ENSG00000173612; HLA -A*23:01,HLA-A*25:01,HLA-A*26:01,HLA-A*32:01,HLA-A*33:01, HLA-A*33:03,HLA-A*68:01,HLA-A*68:02,HLA-B*18:01,HLA-B*27:02, HLA-B*35:01,HLA-B*35:03,HLA-B*44:03,HLA-B*55:01,HLA-B*57:01,
  HLA-B*58:01,HLA-C*03:03,HLA-C*07:06,HLA-C*16:04
EANNVCIAF

SEQ ID NO: 3156 - protein, 10 aa, Homo sapiens
  Table 1.2; GPRC6A; ENSG00000173612; HLA -A*68:01
EANNVCIAFK

SEQ ID NO: 3157 - protein, 10 aa, Homo sapiens
  Table 1.2; GPRC6A; ENSG00000173612; HLA -A*25:01
EAQVNVIVVF

SEQ ID NO: 3158 - protein, 10 aa, Homo sapiens
  Table 1.2; GPRC6A; ENSG00000173612; HLA -A*25:01,HLA-A*26:01
ECVGFEISVF

SEQ ID NO: 3159 - protein, 9 aa, Homo sapiens
  Table 1.2; GPRC6A; ENSG00000173612; HLA -B*37:01
EDSPRRPQI

SEQ ID NO: 3160 - protein, 8 aa, Homo sapiens
  Table 1.2; GPRC6A; ENSG00000173612; HLA -B*18:01,HLA-B*44:02,HLA-B*44:03
EEGSILAF

SEQ ID NO: 3161 - protein, 10 aa, Homo sapiens
  Table 1.2; GPRC6A; ENSG00000173612; HLA -A*25:01,HLA-A*26:01
EIIVILISNY

SEQ ID NO: 3162 - protein, 8 aa, Homo sapiens
  Table 1.2; GPRC6A; ENSG00000173612; HLA -B*08:01
EINGHMTV

SEQ ID NO: 3163 - protein, 9 aa, Homo sapiens
  Table 1.2; GPRC6A; ENSG00000173612; HLA -A*25:01,HLA-A*26:01
EINGHMTVT

SEQ ID NO: 3164 - protein, 10 aa, Homo sapiens
  Table 1.2; GPRC6A; ENSG00000173612; HLA -A*03:02,HLA-A*25:01,HLA-A*33:01,HLA-A*33:03,HLA-A*68:01, HLA-C*07:06
EINGHMTVTK

SEQ ID NO: 3165 - protein, 11 aa, Homo sapiens
  Table 1.2; GPRC6A; ENSG00000173612; HLA -A*25:01,HLA-A*26:01
EINGHMTVTKM

SEQ ID NO: 3166 - protein, 8 aa, Homo sapiens
  Table 1.2; GPRC6A; ENSG00000173612; HLA -B*08:01
EINTKSAF

SEQ ID NO: 3167 - protein, 9 aa, Homo sapiens
  Table 1.2; GPRC6A; ENSG00000173612; HLA -A*25:01,HLA-A*26:01,HLA-B*08:01
EINTKSAFL

SEQ ID NO: 3168 - protein, 10 aa, Homo sapiens
  Table 1.2; GPRC6A; ENSG00000173612; HLA -A*03:02,HLA-A*33:01,HLA-A*33:03,HLA-A*68:01
EINTKSAFLK

SEQ ID NO: 3169 - protein, 9 aa, Homo sapiens
  Table 1.2; GPRC6A; ENSG00000173612; HLA -A*24:02,HLA-A*25:01,HLA-A*26:01,HLA-A*68:02,HLA-B*44:02
EISVFLQTL

SEQ ID NO: 3170 - protein, 8 aa, Homo sapiens
  Table 1.2; GPRC6A; ENSG00000173612; HLA -A*33:03,HLA-A*68:01
EITMAVSR

SEQ ID NO: 3171 - protein, 9 aa, Homo sapiens
  Table 1.2; GPRC6A; ENSG00000173612; HLA -A*25:01,HLA-A*26:01
EITMAVSRM

SEQ ID NO: 3172 - protein, 9 aa, Homo sapiens
  Table 1.2; GPRC6A; ENSG00000173612; HLA -A*02:03,HLA-A*25:01,HLA-A*26:01,HLA-A*68:02,HLA-B*13:02
EIYDTCTEV

SEQ ID NO: 3173 - protein, 11 aa, Homo sapiens
  Table 1.2; GPRC6A; ENSG00000173612; HLA -A*23:01
ELLGVLKNVTF

SEQ ID NO: 3174 - protein, 9 aa, Homo sapiens
  Table 1.2; GPRC6A; ENSG00000173612; HLA -A*23:01,HLA-A*26:01
EMINNSTLL

SEQ ID NO: 3175 - protein, 11 aa, Homo sapiens
  Table 1.2; GPRC6A; ENSG00000173612; HLA -A*25:01,HLA-A*26:01,HLA-A*33:01,HLA-A*33:03
ENYNEAKFITF

SEQ ID NO: 3176 - protein, 8 aa, Homo sapiens
  Table 1.2; GPRC6A; ENSG00000173612; HLA -B*08:01,HLA-B*51:01
EPGLIHSI

SEQ ID NO: 3177 - protein, 10 aa, Homo sapiens
  Table 1.2; GPRC6A; ENSG00000173612; HLA -A*33:01,HLA-A*33:03
EPQDFTCKTR

SEQ ID NO: 3178 - protein, 9 aa, Homo sapiens
  Table 1.2; GPRC6A; ENSG00000173612; HLA -A*25:01,HLA-A*33:03
ETKNEFRNL

SEQ ID NO: 3179 - protein, 9 aa, Homo sapiens
  Table 1.2; GPRC6A; ENSG00000173612; HLA -A*25:01,HLA-A*26:01
ETVEFKCDY

SEQ ID NO: 3180 - protein, 9 aa, Homo sapiens
  Table 1.2; GPRC6A; ENSG00000173612; HLA -A*26:01
EVNVSLPRV

SEQ ID NO: 3181 - protein, 10 aa, Homo sapiens
  Table 1.2; GPRC6A; ENSG00000173612; HLA -A*25:01
EVNVSLPRVI

SEQ ID NO: 3182 - protein, 8 aa, Homo sapiens
  Table 1.2; GPRC6A; ENSG00000173612; HLA -B*08:01
EVRINRTL

SEQ ID NO: 3183 - protein, 9 aa, Homo sapiens
  Table 1.2; GPRC6A; ENSG00000173612; HLA -A*25:01,HLA-A*26:01
EVTVAMAAT

SEQ ID NO: 3184 - protein, 10 aa, Homo sapiens
  Table 1.2; GPRC6A; ENSG00000173612; HLA -A*25:01,HLA-A*26:01,HLA-A*68:01
EVTVAMAATL

SEQ ID NO: 3185 - protein, 11 aa, Homo sapiens
  Table 1.2; GPRC6A; ENSG00000173612; HLA -A*33:03,HLA-A*68:01
EVTVAMAATLR

SEQ ID NO: 3186 - protein, 9 aa, Homo sapiens
  Table 1.2; GPRC6A; ENSG00000173612; HLA -A*24:02,HLA-B*35:03,HLA-B*55:01,HLA-C*04:01
EYDLQNDVF

SEQ ID NO: 3187 - protein, 9 aa, Homo sapiens
  Table 1.2; GPRC6A; ENSG00000173612; HLA -A*23:01,HLA-A*24:02
EYLNWNDSL

SEQ ID NO: 3188 - protein, 8 aa, Homo sapiens
  Table 1.2; GPRC6A; ENSG00000173612; HLA -B*35:03,HLA-B*39:01,HLA-B*46:01,HLA-B*51:01,HLA-B*54:01, HLA-B*56:01,HLA-C*02:02,HLA-C*03:03,HLA-C*03:04,HLA-C*05:01, HLA-C*12:03,HLA-C*16:02
FAAPTVEV

SEQ ID NO: 3189 - protein, 10 aa, Homo sapiens
  Table 1.2; GPRC6A; ENSG00000173612; HLA -A*68:02,HLA-C*02:02
FAAPTVEVNV

SEQ ID NO: 3190 - protein, 10 aa, Homo sapiens
  Table 1.2; GPRC6A; ENSG00000173612; HLA -A*29:02,HLA-B*35:01,HLA-C*02:02
FAFKGKYENY

SEQ ID NO: 3191 - protein, 9 aa, Homo sapiens
  Table 1.2; GPRC6A; ENSG00000173612; HLA -B*49:01
FEISVFLQT

SEQ ID NO: 3192 - protein, 10 aa, Homo sapiens
  Table 1.2; GPRC6A; ENSG00000173612; HLA -A*30:01,HLA-B*40:01,HLA-B*40:02,HLA-B*44:02,HLA-B*49:01
FEISVFLQTL

SEQ ID NO: 3193 - protein, 8 aa, Homo sapiens
  Table 1.2; GPRC6A; ENSG00000173612; HLA -A*30:01,HLA-B*18:01,HLA-B*37:01
FEKEVEYL

SEQ ID NO: 3194 - protein, 10 aa, Homo sapiens
  Table 1.2; GPRC6A; ENSG00000173612; HLA -B*44:02
FEKEVEYLNW

SEQ ID NO: 3195 - protein, 9 aa, Homo sapiens
  Table 1.2; GPRC6A; ENSG00000173612; HLA -A*23:01,HLA-A*24:02,HLA-A*29:02,HLA-C*14:02
FFIGEPQDF

SEQ ID NO: 3196 - protein, 9 aa, Homo sapiens
  Table 1.2; GPRC6A; ENSG00000173612; HLA -A*29:02,HLA-A*30:02
FIFAFKGKY

SEQ ID NO: 3197 - protein, 9 aa, Homo sapiens
  Table 1.2; GPRC6A; ENSG00000173612; HLA -B*58:01
FIIPDQETK

SEQ ID NO: 3198 - protein, 10 aa, Homo sapiens
  Table 1.2; GPRC6A; ENSG00000173612; HLA -A*02:03,HLA-A*68:02
FIIQAEANNV

SEQ ID NO: 3199 - protein, 9 aa, Homo sapiens
  Table 1.2; GPRC6A; ENSG00000173612; HLA -A*02:07,HLA-A*24:02,HLA-B*46:01,HLA-C*01:02
FIPIYATTF

SEQ ID NO: 3200 - protein, 9 aa, Homo sapiens
  Table 1.2; GPRC6A; ENSG00000173612; HLA -A*29:02
FITFGMLIY

SEQ ID NO: 3201 - protein, 9 aa, Homo sapiens
  Table 1.2; GPRC6A; ENSG00000173612; HLA -A*32:01,HLA-B*15:01,HLA-B*15:03,HLA-B*46:01,HLA-C*01:02, HLA-C*02:02,HLA-C*07:04,HLA-C*14:02
FLNFASTSF

SEQ ID NO: 3202 - protein, 8 aa, Homo sapiens
  Table 1.2; GPRC6A; ENSG00000173612; HLA -A*02:04
FLQNLHLL

SEQ ID NO: 3203 - protein, 9 aa, Homo sapiens
  Table 1.2; GPRC6A; ENSG00000173612; HLA -B*46:01
FLRTVPSDF

SEQ ID NO: 3204 - protein, 9 aa, Homo sapiens
  Table 1.2; GPRC6A; ENSG00000173612; HLA -A*02:01,HLA-A*02:03,HLA-A*02:04,HLA-A*02:07,HLA-A*68:02, HLA-B*13:02,HLA-B*46:01,HLA-B*55:01,HLA-C*02:02
FLSDNTIEV

SEQ ID NO: 3205 - protein, 11 aa, Homo sapiens
  Table 1.2; GPRC6A; ENSG00000173612; HLA -A*02:01,HLA-A*02:04
FLSDNTIEVRI

SEQ ID NO: 3206 - protein, 10 aa, Homo sapiens
  Table 1.2; GPRC6A; ENSG00000173612; HLA -A*02:01,HLA-A*02:04,HLA-A*02:07
FLWDYAEPGL

SEQ ID NO: 3207 - protein, 11 aa, Homo sapiens
  Table 1.2; GPRC6A; ENSG00000173612; HLA -A*02:01,HLA-A*02:04
FLWDYAEPGLI

SEQ ID NO: 3208 - protein, 10 aa, Homo sapiens
  Table 1.2; GPRC6A; ENSG00000173612; HLA -A*29:02
FNHSQRTLAY

SEQ ID NO: 3209 - protein, 8 aa, Homo sapiens
  Table 1.2; GPRC6A; ENSG00000173612; HLA -B*51:01,HLA-B*54:01
FPSFLRTV

SEQ ID NO: 3210 - protein, 9 aa, Homo sapiens
  Table 1.2; GPRC6A; ENSG00000173612; HLA -A*02:07
FQPWELLGV

SEQ ID NO: 3211 - protein, 9 aa, Homo sapiens
  Table 1.2; GPRC6A; ENSG00000173612; HLA -A*03:01,HLA-A*11:01
FSFDPKLQK

SEQ ID NO: 3212 - protein, 10 aa, Homo sapiens
  Table 1.2; GPRC6A; ENSG00000173612; HLA -A*25:01,HLA-A*26:01,HLA-A*29:02,HLA-A*68:02,HLA-B*57:01, HLA-C*02:02
FSFDPKLQKF

SEQ ID NO: 3213 - protein, 9 aa, Homo sapiens
  Table 1.2; GPRC6A; ENSG00000173612; HLA -A*11:01
GGLFAIHEK

SEQ ID NO: 3214 - protein, 8 aa, Homo sapiens
  Table 1.2; GPRC6A; ENSG00000173612; HLA -B*37:01
GHMTVTKM

SEQ ID NO: 3215 - protein, 9 aa, Homo sapiens
  Table 1.2; GPRC6A; ENSG00000173612; HLA -B*15:01
GIITTDDDY

SEQ ID NO: 3216 - protein, 8 aa, Homo sapiens
  Table 1.2; GPRC6A; ENSG00000173612; HLA -B*15:03
GKVVGFAF

SEQ ID NO: 3217 - protein, 9 aa, Homo sapiens
  Table 1.2; GPRC6A; ENSG00000173612; HLA -B*15:03
GKYVPAVEI

SEQ ID NO: 3218 - protein, 9 aa, Homo sapiens
  Table 1.2; GPRC6A; ENSG00000173612; HLA -A*25:01
GNISSFHSF

SEQ ID NO: 3219 - protein, 9 aa, Homo sapiens
  Table 1.2; GPRC6A; ENSG00000173612; HLA -A*24:02
GYIAILAFI

SEQ ID NO: 3220 - protein, 9 aa, Homo sapiens
  Table 1.2; GPRC6A; ENSG00000173612; HLA -A*02:01,HLA-A*23:01,HLA-A*24:02,HLA-A*29:02,HLA-A*68:02, HLA-B*13:02,HLA-B*27:05,HLA-B*49:01,HLA-C*14:02
GYSEITMAV

SEQ ID NO: 3221 - protein, 11 aa, Homo sapiens
  Table 1.2; GPRC6A; ENSG00000173612; HLA -A*31:01,HLA-A*33:03
GYSEITMAVSR

SEQ ID NO: 3222 - protein, 9 aa, Homo sapiens
  Table 1.2; GPRC6A; ENSG00000173612; HLA -A*30:01,HLA-B*18:01,HLA-B*40:02,HLA-B*49:01,HLA-B*54:01
HEYAMHLSA

SEQ ID NO: 3223 - protein, 8 aa, Homo sapiens
  Table 1.2; GPRC6A; ENSG00000173612; HLA -C*04:01
HFDAHGDL

SEQ ID NO: 3224 - protein, 10 aa, Homo sapiens
  Table 1.2; GPRC6A; ENSG00000173612; HLA -A*23:01,HLA-A*24:02,HLA-A*29:02,HLA-C*14:02
HFLNFASTSF

SEQ ID NO: 3225 - protein, 10 aa, Homo sapiens
  Table 1.2; GPRC6A; ENSG00000173612; HLA -A*02:04
HLLPSDSHKL

SEQ ID NO: 3226 - protein, 11 aa, Homo sapiens
  Table 1.2; GPRC6A; ENSG00000173612; HLA -A*02:04
HLLPSDSHKLL

SEQ ID NO: 3227 - protein, 9 aa, Homo sapiens
  Table 1.2; GPRC6A; ENSG00000173612; HLA -A*03:02
HLSACAYVK

SEQ ID NO: 3228 - protein, 8 aa, Homo sapiens
  Table 1.2; GPRC6A; ENSG00000173612; HLA -A*01:01,HLA-A*30:02,HLA-B*58:01
HSQRTLAY

SEQ ID NO: 3229 - protein, 9 aa, Homo sapiens
  Table 1.2; GPRC6A; ENSG00000173612; HLA -A*03:02,HLA-A*33:01
HSQRTLAYK

SEQ ID NO: 3230 - protein, 8 aa, Homo sapiens
  Table 1.2; GPRC6A; ENSG00000173612; HLA -C*03:03,HLA-C*03:04
HSVSSIAL

SEQ ID NO: 3231 - protein, 9 aa, Homo sapiens
  Table 1.2; GPRC6A; ENSG00000173612; HLA -A*68:02,HLA-B*54:01
HVFDLFNKA

SEQ ID NO: 3232 - protein, 10 aa, Homo sapiens
  Table 1.2; GPRC6A; ENSG00000173612; HLA -A*68:02
HVFDLFNKAI

SEQ ID NO: 3233 - protein, 9 aa, Homo sapiens
  Table 1.2; GPRC6A; ENSG00000173612; HLA -A*24:02
HWAPVRSTM

SEQ ID NO: 3234 - protein, 9 aa, Homo sapiens
  Table 1.2; GPRC6A; ENSG00000173612; HLA -B*54:01
IAFKEVLPA

SEQ ID NO: 3235 - protein, 10 aa, Homo sapiens
  Table 1.2; GPRC6A; ENSG00000173612; HLA -B*57:01
IAFKEVLPAF

SEQ ID NO: 3236 - protein, 8 aa, Homo sapiens
  Table 1.2; GPRC6A; ENSG00000173612; HLA -A*23:01,HLA-C*03:03,HLA-C*03:04
IALSPASL

SEQ ID NO: 3237 - protein, 9 aa, Homo sapiens
  Table 1.2; GPRC6A; ENSG00000173612; HLA -A*30:01,HLA-B*18:01,HLA-B*37:01,HLA-B*40:01,HLA-B*40:02, HLA-B*44:02,HLA-B*44:03,HLA-B*49:01
IEMINNSTL

SEQ ID NO: 3238 - protein, 10 aa, Homo sapiens
  Table 1.2; GPRC6A; ENSG00000173612; HLA -A*30:01,HLA-B*40:01,HLA-B*49:01
IEMINNSTLL

SEQ ID NO: 3239 - protein, 8 aa, Homo sapiens
  Table 1.2; GPRC6A; ENSG00000173612; HLA -A*30:01,HLA-B*18:01,HLA-B*37:01,HLA-B*44:02,HLA-B*49:01
IEMNINKM

SEQ ID NO: 3240 - protein, 9 aa, Homo sapiens
  Table 1.2; GPRC6A; ENSG00000173612; HLA -B*44:02,HLA-B*44:03
IEMNINKMW

SEQ ID NO: 3241 - protein, 9 aa, Homo sapiens
  Table 1.2; GPRC6A; ENSG00000173612; HLA -A*30:01
IEVRINRTL

SEQ ID NO: 3242 - protein, 9 aa, Homo sapiens
  Table 1.2; GPRC6A; ENSG00000173612; HLA -A*23:01,HLA-A*24:02,HLA-B*46:01,HLA-C*14:02
IFAAPTVEV

SEQ ID NO: 3243 - protein, 11 aa, Homo sapiens
  Table 1.2; GPRC6A; ENSG00000173612; HLA -A*23:01
IFAAPTVEVNV

SEQ ID NO: 3244 - protein, 9 aa, Homo sapiens
  Table 1.2; GPRC6A; ENSG00000173612; HLA -C*14:02
IFNHSQRTL

SEQ ID NO: 3245 - protein, 11 aa, Homo sapiens
  Table 1.2; GPRC6A; ENSG00000173612; HLA -A*29:02
IFNHSQRTLAY

SEQ ID NO: 3246 - protein, 10 aa, Homo sapiens
  Table 1.2; GPRC6A; ENSG00000173612; HLA -A*23:01
IFVLVVGIIF

SEQ ID NO: 3247 - protein, 9 aa, Homo sapiens
  Table 1.2; GPRC6A; ENSG00000173612; HLA -A*23:01,HLA-B*46:01
IGKVVGFAF

SEQ ID NO: 3248 - protein, 10 aa, Homo sapiens
  Table 1.2; GPRC6A; ENSG00000173612; HLA -B*39:01
IGSGYSEITM

SEQ ID NO: 3249 - protein, 9 aa, Homo sapiens
  Table 1.2; GPRC6A; ENSG00000173612; HLA -B*38:01
IHSIQLAVF

SEQ ID NO: 3250 - protein, 10 aa, Homo sapiens
  Table 1.2; GPRC6A; ENSG00000173612; HLA -A*03:01,HLA-A*03:02
IICKQEINTK

SEQ ID NO: 3251 - protein, 9 aa, Homo sapiens
  Table 1.2; GPRC6A; ENSG00000173612; HLA -A*02:04,HLA-A*23:01
IIIGGLFAI

SEQ ID NO: 3252 - protein, 9 aa, Homo sapiens
  Table 1.2; GPRC6A; ENSG00000173612; HLA -A*02:01,HLA-A*02:04,HLA-A*02:07
IILEAQVNV

SEQ ID NO: 3253 - protein, 11 aa, Homo sapiens
  Table 1.2; GPRC6A; ENSG00000173612; HLA -A*02:07
IILEAQVNVIV

SEQ ID NO: 3254 - protein, 11 aa, Homo sapiens
  Table 1.2; GPRC6A; ENSG00000173612; HLA -A*24:02,HLA-A*32:01,HLA-B*15:01
IIPDQETKNEF

SEQ ID NO: 3255 - protein, 9 aa, Homo sapiens
  Table 1.2; GPRC6A; ENSG00000173612; HLA -A*26:01,HLA-A*29:02,HLA-A*30:02,HLA-B*15:01
IIVILISNY

SEQ ID NO: 3256 - protein, 10 aa, Homo sapiens
  Table 1.2; GPRC6A; ENSG00000173612; HLA -A*29:02
ILAFGTMLGY

SEQ ID NO: 3257 - protein, 9 aa, Homo sapiens
  Table 1.2; GPRC6A; ENSG00000173612; HLA -A*02:01
ILEAQVNVI

SEQ ID NO: 3258 - protein, 10 aa, Homo sapiens
  Table 1.2; GPRC6A; ENSG00000173612; HLA -A*29:02
ILISNYGILY

SEQ ID NO: 3259 - protein, 9 aa, Homo sapiens
  Table 1.2; GPRC6A; ENSG00000173612; HLA -A*02:04
ILLLILSLL

SEQ ID NO: 3260 - protein, 9 aa, Homo sapiens
  Table 1.2; GPRC6A; ENSG00000173612; HLA -A*03:01
ILYCTFIPK

SEQ ID NO: 3261 - protein, 10 aa, Homo sapiens
  Table 1.2; GPRC6A; ENSG00000173612; HLA -B*07:02,HLA-B*35:01,HLA-B*35:03,HLA-B*38:01,HLA-B*55:01, HLA-C*03:03,HLA-C*05:01
IPDQETKNEF

SEQ ID NO: 3262 - protein, 8 aa, Homo sapiens
  Table 1.2; GPRC6A; ENSG00000173612; HLA -A*23:01,HLA-B*08:01,HLA-B*18:01,HLA-B*35:01,HLA-B*35:03, HLA-B*51:01
IPIYATTF

SEQ ID NO: 3263 - protein, 8 aa, Homo sapiens
  Table 1.2; GPRC6A; ENSG00000173612; HLA -B*13:02
IQAEANNV

SEQ ID NO: 3264 - protein, 10 aa, Homo sapiens
  Table 1.2; GPRC6A; ENSG00000173612; HLA -A*30:01,HLA-B*13:02,HLA-B*27:05,HLA-B*38:01
IQAEANNVCI

SEQ ID NO: 3265 - protein, 10 aa, Homo sapiens
  Table 1.2; GPRC6A; ENSG00000173612; HLA -A*29:02
IQLAVFALGY

SEQ ID NO: 3266 - protein, 8 aa, Homo sapiens
  Table 1.2; GPRC6A; ENSG00000173612; HLA -B*15:01
IQVVICTL

SEQ ID NO: 3267 - protein, 8 aa, Homo sapiens
  Table 1.2; GPRC6A; ENSG00000173612; HLA -A*01:01,HLA-A*30:02
ISNYGILY

SEQ ID NO: 3268 - protein, 9 aa, Homo sapiens
  Table 1.2; GPRC6A; ENSG00000173612; HLA -B*57:01
ITFGMLIYF

SEQ ID NO: 3269 - protein, 11 aa, Homo sapiens
  Table 1.2; GPRC6A; ENSG00000173612; HLA -B*57:01
ITFIPIYATTF

SEQ ID NO: 3270 - protein, 9 aa, Homo sapiens
  Table 1.2; GPRC6A; ENSG00000173612; HLA -A*23:01,HLA-C*03:03,HLA-C*03:04,HLA-C*16:01
ITMAVSRML

SEQ ID NO: 3271 - protein, 8 aa, Homo sapiens
  Table 1.2; GPRC6A; ENSG00000173612; HLA -A*03:02
ITTIPNVK

SEQ ID NO: 3272 - protein, 9 aa, Homo sapiens
  Table 1.2; GPRC6A; ENSG00000173612; HLA -A*03:01,HLA-A*03:02,HLA-A*11:01,HLA-A*68:01
ITTIPNVKK

SEQ ID NO: 3273 - protein, 10 aa, Homo sapiens
  Table 1.2; GPRC6A; ENSG00000173612; HLA -C*16:02
ITTIPNVKKI

SEQ ID NO: 3274 - protein, 8 aa, Homo sapiens
  Table 1.2; GPRC6A; ENSG00000173612; HLA -B*15:01,HLA-B*18:01
IVILISNY

SEQ ID NO: 3275 - protein, 9 aa, Homo sapiens
  Table 1.2; GPRC6A; ENSG00000173612; HLA -A*23:01,HLA-A*24:02,HLA-A*29:02,HLA-A*30:02
IYATTFGKY

SEQ ID NO: 3276 - protein, 8 aa, Homo sapiens
  Table 1.2; GPRC6A; ENSG00000173612; HLA -C*04:01
IYDTCTEV

SEQ ID NO: 3277 - protein, 10 aa, Homo sapiens
  Table 1.2; GPRC6A; ENSG00000173612; HLA -B*35:03,HLA-C*04:01
IYDTCTEVTV

SEQ ID NO: 3278 - protein, 9 aa, Homo sapiens
  Table 1.2; GPRC6A; ENSG00000173612; HLA -A*24:02
IYFIAWITF

SEQ ID NO: 3279 - protein, 9 aa, Homo sapiens
  Table 1.2; GPRC6A; ENSG00000173612; HLA -A*24:02,HLA-C*14:02,HLA-C*16:02
IYSYSSHSV

SEQ ID NO: 3280 - protein, 9 aa, Homo sapiens
  Table 1.2; GPRC6A; ENSG00000173612; HLA -A*03:01,HLA-A*03:02,HLA-A*11:01,HLA-A*31:01,HLA-B*27:05, HLA-B*58:01
KAIEMNINK

SEQ ID NO: 3281 - protein, 10 aa, Homo sapiens
  Table 1.2; GPRC6A; ENSG00000173612; HLA -B*58:01
KAIEMNINKM

SEQ ID NO: 3282 - protein, 9 aa, Homo sapiens
  Table 1.2; GPRC6A; ENSG00000173612; HLA -A*23:01,HLA-A*24:02,HLA-A*32:01,HLA-B*08:01,HLA-B*37:01, HLA-B*46:01,HLA-B*57:01,HLA-B*58:01,HLA-C*02:02,HLA-C*03:04, HLA-C*12:03,HLA-C*16:01,HLA-C*16:02
KAIERNFVM

SEQ ID NO: 3283 - protein, 10 aa, Homo sapiens
  Table 1.2; GPRC6A; ENSG00000173612; HLA -A*31:01
KAIERNFVMR

SEQ ID NO: 3284 - protein, 9 aa, Homo sapiens
  Table 1.2; GPRC6A; ENSG00000173612; HLA -A*03:01,HLA-A*03:02,HLA-A*11:01,HLA-A*31:01
KAMAHLIQK

SEQ ID NO: 3285 - protein, 10 aa, Homo sapiens
  Table 1.2; GPRC6A; ENSG00000173612; HLA -B*57:01
KANKAIERNF

SEQ ID NO: 3286 - protein, 8 aa, Homo sapiens
  Table 1.2; GPRC6A; ENSG00000173612; HLA -A*30:02,HLA-B*15:01,HLA-B*15:03,HLA-B*39:01,HLA-B*46:01, HLA-B*58:01
KAVIGSGY

SEQ ID NO: 3287 - protein, 8 aa, Homo sapiens
  Table 1.2; GPRC6A; ENSG00000173612; HLA -B*37:01
KDLQAQAF

SEQ ID NO: 3288 - protein, 9 aa, Homo sapiens
  Table 1.2; GPRC6A; ENSG00000173612; HLA -A*30:01,HLA-B*37:01,HLA-B*40:01,HLA-B*40:02,HLA-B*44:03, HLA-B*49:01
KEINGHMTV

SEQ ID NO: 3289 - protein, 10 aa, Homo sapiens
  Table 1.2; GPRC6A; ENSG00000173612; HLA -B*40:01,HLA-B*40:02,HLA-B*49:01
KEINGHMTVT

SEQ ID NO: 3290 - protein, 8 aa, Homo sapiens
  Table 1.2; GPRC6A; ENSG00000173612; HLA -B*44:02
KEVEYLNW

SEQ ID NO: 3291 - protein, 8 aa, Homo sapiens
  Table 1.2; GPRC6A; ENSG00000173612; HLA -B*37:01
KEVLPAFL

SEQ ID NO: 3292 - protein, 10 aa, Homo sapiens
  Table 1.2; GPRC6A; ENSG00000173612; HLA -A*29:02
KFITFGMLIY

SEQ ID NO: 3293 - protein, 8 aa, Homo sapiens
  Table 1.2; GPRC6A; ENSG00000173612; HLA -A*32:01,HLA-B*37:01
KIGKVVGF

SEQ ID NO: 3294 - protein, 9 aa, Homo sapiens
  Table 1.2; GPRC6A; ENSG00000173612; HLA -A*03:01,HLA-A*03:02,HLA-A*11:01
KITTIPNVK

SEQ ID NO: 3295 - protein, 10 aa, Homo sapiens
  Table 1.2; GPRC6A; ENSG00000173612; HLA -A*03:01,HLA-A*03:02,HLA-A*11:01
KITTIPNVKK

SEQ ID NO: 3296 - protein, 9 aa, Homo sapiens
  Table 1.2; GPRC6A; ENSG00000173612; HLA -B*15:03
KKIGKVVGF

SEQ ID NO: 3297 - protein, 9 aa, Homo sapiens
  Table 1.2; GPRC6A; ENSG00000173612; HLA -B*57:01,HLA-B*58:01
KNVTFTDGW

SEQ ID NO: 3298 - protein, 10 aa, Homo sapiens
  Table 1.2; GPRC6A; ENSG00000173612; HLA -A*30:02,HLA-A*32:01,HLA-B*15:01,HLA-B*15:03,HLA-B*46:01, HLA-B*57:01,HLA-B*58:01
KSKDLQAQAF

SEQ ID NO: 3299 - protein, 9 aa, Homo sapiens
  Table 1.2; GPRC6A; ENSG00000173612; HLA -B*57:01
KSLKILLAF

SEQ ID NO: 3300 - protein, 8 aa, Homo sapiens
  Table 1.2; GPRC6A; ENSG00000173612; HLA -A*31:01
KVVGFAFR

SEQ ID NO: 3301 - protein, 9 aa, Homo sapiens
  Table 1.2; GPRC6A; ENSG00000173612; HLA -A*31:01
KVVGFAFRR

SEQ ID NO: 3302 - protein, 10 aa, Homo sapiens
  Table 1.2; GPRC6A; ENSG00000173612; HLA -A*23:01,HLA-A*24:02
KYENYNEAKF

SEQ ID NO: 3303 - protein, 8 aa, Homo sapiens
  Table 1.2; GPRC6A; ENSG00000173612; HLA -A*23:01,HLA-A*24:02
KYVPAVEI

SEQ ID NO: 3304 - protein, 9 aa, Homo sapiens
  Table 1.2; GPRC6A; ENSG00000173612; HLA -A*23:01,HLA-A*24:02
KYVPAVEII

SEQ ID NO: 3305 - protein, 11 aa, Homo sapiens
  Table 1.2; GPRC6A; ENSG00000173612; HLA -A*24:02
KYVPAVEIIVI

SEQ ID NO: 3306 - protein, 9 aa, Homo sapiens
  Table 1.2; GPRC6A; ENSG00000173612; HLA -A*29:02,HLA-B*15:03,HLA-B*46:01,HLA-C*02:02
LAFGTMLGY

SEQ ID NO: 3307 - protein, 9 aa, Homo sapiens
  Table 1.2; GPRC6A; ENSG00000173612; HLA -A*02:04,HLA-A*68:02,HLA-B*35:03,HLA-C*02:02
LAFSFDPKL

SEQ ID NO: 3308 - protein, 9 aa, Homo sapiens
  Table 1.2; GPRC6A; ENSG00000173612; HLA -B*08:01,HLA-B*35:01,HLA-B*35:03,HLA-B*46:01,HLA-C*02:02, HLA-C*03:03,HLA-C*03:04,HLA-C*16:01
LAMIHSIEM

SEQ ID NO: 3309 - protein, 9 aa, Homo sapiens
  Table 1.2; GPRC6A; ENSG00000173612; HLA -B*51:01
LAYKANKAI

SEQ ID NO: 3310 - protein, 8 aa, Homo sapiens
  Table 1.2; GPRC6A; ENSG00000173612; HLA -A*30:01,HLA-B*18:01,HLA-B*49:01
LEAQVNVI

SEQ ID NO: 3311 - protein, 9 aa, Homo sapiens
  Table 1.2; GPRC6A; ENSG00000173612; HLA -B*49:01
LEAQVNVIV

SEQ ID NO: 3312 - protein, 10 aa, Homo sapiens
  Table 1.2; GPRC6A; ENSG00000173612; HLA -B*49:01
LEAQVNVIVV

SEQ ID NO: 3313 - protein, 11 aa, Homo sapiens
  Table 1.2; GPRC6A; ENSG00000173612; HLA -A*30:01,HLA-B*44:02,HLA-B*44:03
LEAQVNVIVVF

SEQ ID NO: 3314 - protein, 9 aa, Homo sapiens
  Table 1.2; GPRC6A; ENSG00000173612; HLA -B*40:01
LECEEGSIL

SEQ ID NO: 3315 - protein, 11 aa, Homo sapiens
  Table 1.2; GPRC6A; ENSG00000173612; HLA -B*18:01
LECEEGSILAF

SEQ ID NO: 3316 - protein, 8 aa, Homo sapiens
  Table 1.2; GPRC6A; ENSG00000173612; HLA -C*14:02
LFNKAIEM

SEQ ID NO: 3317 - protein, 8 aa, Homo sapiens
  Table 1.2; GPRC6A; ENSG00000173612; HLA -B*51:01
LIFAAPTV

SEQ ID NO: 3318 - protein, 10 aa, Homo sapiens
  Table 1.2; GPRC6A; ENSG00000173612; HLA -A*02:03,HLA-A*68:02
LIFAAPTVEV

SEQ ID NO: 3319 - protein, 9 aa, Homo sapiens
  Table 1.2; GPRC6A; ENSG00000173612; HLA -A*01:01,HLA-A*29:02
LISNYGILY

SEQ ID NO: 3320 - protein, 8 aa, Homo sapiens
  Table 1.2; GPRC6A; ENSG00000173612; HLA -A*02:04
LLGIIFVL

SEQ ID NO: 3321 - protein, 9 aa, Homo sapiens
  Table 1.2; GPRC6A; ENSG00000173612; HLA -A*02:01,HLA-A*02:04,HLA-A*02:07,HLA-A*68:02
LLGIIFVLV

SEQ ID NO: 3322 - protein, 9 aa, Homo sapiens
  Table 1.2; GPRC6A; ENSG00000173612; HLA -A*02:01,HLA-A*02:03,HLA-A*02:04,HLA-A*02:07
LLHEYAMHL

SEQ ID NO: 3323 - protein, 9 aa, Homo sapiens
  Table 1.2; GPRC6A; ENSG00000173612; HLA -A*01:01,HLA-A*29:02,HLA-A*32:01
LLPGVKLGY

SEQ ID NO: 3324 - protein, 11 aa, Homo sapiens
  Table 1.2; GPRC6A; ENSG00000173612; HLA -A*02:07
LLPGVKLGYEI

SEQ ID NO: 3325 - protein, 9 aa, Homo sapiens
  Table 1.2; GPRC6A; ENSG00000173612; HLA -A*02:07,HLA-A*24:02
LLPSDSHKL

SEQ ID NO: 3326 - protein, 8 aa, Homo sapiens
  Table 1.2; GPRC6A; ENSG00000173612; HLA -B*46:01
LNFASTSF

SEQ ID NO: 3327 - protein, 10 aa, Homo sapiens
  Table 1.2; GPRC6A; ENSG00000173612; HLA -B*35:03,HLA-B*51:01
LPAFLSDNTI

SEQ ID NO: 3328 - protein, 8 aa, Homo sapiens
  Table 1.2; GPRC6A; ENSG00000173612; HLA -B*35:01
LPGVKLGY

SEQ ID NO: 3329 - protein, 9 aa, Homo sapiens
  Table 1.2; GPRC6A; ENSG00000173612; HLA -B*07:02,HLA-B*08:01,HLA-B*51:01
LPRKRMSSI

SEQ ID NO: 3330 - protein, 9 aa, Homo sapiens
  Table 1.2; GPRC6A; ENSG00000173612; HLA -B*07:02,HLA-B*51:01,HLA-B*54:01,HLA-B*56:01
LPRVIILEC

SEQ ID NO: 3331 - protein, 8 aa, Homo sapiens
  Table 1.2; GPRC6A; ENSG00000173612; HLA -B*35:03
LPSDSHKL

SEQ ID NO: 3332 - protein, 9 aa, Homo sapiens
  Table 1.2; GPRC6A; ENSG00000173612; HLA -B*07:02,HLA-B*35:03,HLA-B*51:01
LPSDSHKLL

SEQ ID NO: 3333 - protein, 9 aa, Homo sapiens
  Table 1.2; GPRC6A; ENSG00000173612; HLA -A*24:02,HLA-B*13:02,HLA-B*38:01
LQAQAFAHI

SEQ ID NO: 3334 - protein, 9 aa, Homo sapiens
  Table 1.2; GPRC6A; ENSG00000173612; HLA -A*30:02,HLA-A*32:01,HLA-B*15:01,HLA-B*15:03
LQLMPQVGY

SEQ ID NO: 3335 - protein, 8 aa, Homo sapiens
  Table 1.2; GPRC6A; ENSG00000173612; HLA -A*01:01,HLA-C*05:01
LSDNTIEV

SEQ ID NO: 3336 - protein, 9 aa, Homo sapiens
  Table 1.2; GPRC6A; ENSG00000173612; HLA -B*46:01,HLA-C*01:02
LSPASLDSM

SEQ ID NO: 3337 - protein, 9 aa, Homo sapiens
  Table 1.2; GPRC6A; ENSG00000173612; HLA -A*31:01,HLA-A*33:03,HLA-A*68:01,HLA-A*68:02
LVVGIIFTR

SEQ ID NO: 3338 - protein, 9 aa, Homo sapiens
  Table 1.2; GPRC6A; ENSG00000173612; HLA -A*24:02,HLA-B*57:01
LYRPILIIF

SEQ ID NO: 3339 - protein, 8 aa, Homo sapiens
  Table 1.2; GPRC6A; ENSG00000173612; HLA -B*51:01
MAFLIILI

SEQ ID NO: 3340 - protein, 9 aa, Homo sapiens
  Table 1.2; GPRC6A; ENSG00000173612; HLA -B*08:01,HLA-C*03:04
MAVSRMLNL

SEQ ID NO: 3341 - protein, 9 aa, Homo sapiens
  Table 1.2; GPRC6A; ENSG00000173612; HLA -B*15:01,HLA-B*35:01,HLA-B*46:01
MCFEKEVEY

SEQ ID NO: 3342 - protein, 8 aa, Homo sapiens
  Table 1.2; GPRC6A; ENSG00000173612; HLA -A*23:01,HLA-B*35:01,HLA-B*35:03
MFGVSFTL

SEQ ID NO: 3343 - protein, 8 aa, Homo sapiens
  Table 1.2; GPRC6A; ENSG00000173612; HLA -A*23:01
MINNSTLL

SEQ ID NO: 3344 - protein, 9 aa, Homo sapiens
  Table 1.2; GPRC6A; ENSG00000173612; HLA -B*35:01,HLA-B*35:03,HLA-B*54:01,HLA-B*55:01,HLA-B*56:01
MPQVGYEST

SEQ ID NO: 3345 - protein, 10 aa, Homo sapiens
  Table 1.2; GPRC6A; ENSG00000173612; HLA -B*35:01,HLA-B*35:03,HLA-B*54:01,HLA-B*55:01,HLA-B*56:01
MPQVGYESTA

SEQ ID NO: 3346 - protein, 8 aa, Homo sapiens
  Table 1.2; GPRC6A; ENSG00000173612; HLA -B*07:02,HLA-B*08:01,HLA-B*51:01
MPRVKAVI

SEQ ID NO: 3347 - protein, 9 aa, Homo sapiens
  Table 1.2; GPRC6A; ENSG00000173612; HLA -A*03:01,HLA-A*03:02,HLA-A*11:01
MTNPSSSGK

SEQ ID NO: 3348 - protein, 9 aa, Homo sapiens
  Table 1.2; GPRC6A; ENSG00000173612; HLA -A*01:01,HLA-A*25:01,HLA-A*26:01,HLA-A*29:02,HLA-A*30:02, HLA-A*32:01,HLA-B*46:01,HLA-B*58:01
MTVTKMAEY

SEQ ID NO: 3349 - protein, 9 aa, Homo sapiens
  Table 1.2; GPRC6A; ENSG00000173612; HLA -A*23:01,HLA-A*30:01,HLA-A*68:01,HLA-B*07:02,HLA-B*35:01, HLA-B*35:03,HLA-B*39:01,HLA-B*40:01,HLA-B*58:01,HLA-C*02:02, HLA-C*03:03,HLA-C*03:04,HLA-C*05:01,HLA-C*12:03,HLA-C*16:01,
  HLA-C*16:02,HLA-C*16:04
NATSVSKTL

SEQ ID NO: 3350 - protein, 11 aa, Homo sapiens
  Table 1.2; GPRC6A; ENSG00000173612; HLA -A*33:01,HLA-A*33:03,HLA-A*68:01
NATSVSKTLPR

SEQ ID NO: 3351 - protein, 8 aa, Homo sapiens
  Table 1.2; GPRC6A; ENSG00000173612; HLA -B*37:01
NDSLAILL

SEQ ID NO: 3352 - protein, 8 aa, Homo sapiens
  Table 1.2; GPRC6A; ENSG00000173612; HLA -A*30:01,HLA-B*18:01,HLA-B*37:01,HLA-B*44:02,HLA-B*44:03, HLA-B*49:01
NEAKFITF

SEQ ID NO: 3353 - protein, 9 aa, Homo sapiens
  Table 1.2; GPRC6A; ENSG00000173612; HLA -B*44:03,HLA-B*49:01
NEFRNLKQI

SEQ ID NO: 3354 - protein, 9 aa, Homo sapiens
  Table 1.2; GPRC6A; ENSG00000173612; HLA -C*16:01
NHSQRTLAY

SEQ ID NO: 3355 - protein, 9 aa, Homo sapiens
  Table 1.2; GPRC6A; ENSG00000173612; HLA -B*39:01
NHYTNQTDM

SEQ ID NO: 3356 - protein, 9 aa, Homo sapiens
  Table 1.2; GPRC6A; ENSG00000173612; HLA -A*68:02
NISSFHSFL

SEQ ID NO: 3357 - protein, 8 aa, Homo sapiens
  Table 1.2; GPRC6A; ENSG00000173612; HLA -A*03:02
NLNTPVVK

SEQ ID NO: 3358 - protein, 9 aa, Homo sapiens
  Table 1.2; GPRC6A; ENSG00000173612; HLA -A*33:01
NLNTPVVKS

SEQ ID NO: 3359 - protein, 10 aa, Homo sapiens
  Table 1.2; GPRC6A; ENSG00000173612; HLA -A*30:02
NLQLMPQVGY

SEQ ID NO: 3360 - protein, 10 aa, Homo sapiens
  Table 1.2; GPRC6A; ENSG00000173612; HLA -B*35:03
NPNAFQPWEL

SEQ ID NO: 3361 - protein, 9 aa, Homo sapiens
  Table 1.2; GPRC6A; ENSG00000173612; HLA -B*07:02,HLA-B*55:01,HLA-B*56:01
NPSSSGKSA

SEQ ID NO: 3362 - protein, 11 aa, Homo sapiens
  Table 1.2; GPRC6A; ENSG00000173612; HLA -A*25:01,HLA-B*07:02,HLA-B*35:01
NPSSSGKSATW

SEQ ID NO: 3363 - protein, 9 aa, Homo sapiens
  Table 1.2; GPRC6A; ENSG00000173612; HLA -B*27:05,HLA-B*38:01,HLA-B*39:01
NQTDMPHCL

SEQ ID NO: 3364 - protein, 9 aa, Homo sapiens
  Table 1.2; GPRC6A; ENSG00000173612; HLA -A*68:02,HLA-B*54:01
NTFIIQAEA

SEQ ID NO: 3365 - protein, 9 aa, Homo sapiens
  Table 1.2; GPRC6A; ENSG00000173612; HLA -A*11:01,HLA-A*31:01,HLA-A*33:01,HLA-A*33:03,HLA-A*68:01, HLA-A*68:02,HLA-B*57:01,HLA-C*07:06
NTIEVRINR

SEQ ID NO: 3366 - protein, 9 aa, Homo sapiens
  Table 1.2; GPRC6A; ENSG00000173612; HLA -A*24:02
NYGILYCTF

SEQ ID NO: 3367 - protein, 10 aa, Homo sapiens
  Table 1.2; GPRC6A; ENSG00000173612; HLA -A*23:01,HLA-A*24:02,HLA-A*33:01,HLA-A*33:03
NYNEAKFITF

SEQ ID NO: 3368 - protein, 9 aa, Homo sapiens
  Table 1.2; GPRC6A; ENSG00000173612; HLA -A*03:02
PIYATTFGK

SEQ ID NO: 3369 - protein, 10 aa, Homo sapiens
  Table 1.2; GPRC6A; ENSG00000173612; HLA -B*58:01
PSSSGKSATW

SEQ ID NO: 3370 - protein, 11 aa, Homo sapiens
  Table 1.2; GPRC6A; ENSG00000173612; HLA -A*68:01
PTVEVNVSLPR

SEQ ID NO: 3371 - protein, 8 aa, Homo sapiens
  Table 1.2; GPRC6A; ENSG00000173612; HLA -B*51:01
QAQAFAHI

SEQ ID NO: 3372 - protein, 9 aa, Homo sapiens
  Table 1.2; GPRC6A; ENSG00000173612; HLA -C*12:03
QAQAFAHIC

SEQ ID NO: 3373 - protein, 10 aa, Homo sapiens
  Table 1.2; GPRC6A; ENSG00000173612; HLA -A*33:03
QAQAFAHICR

SEQ ID NO: 3374 - protein, 9 aa, Homo sapiens
  Table 1.2; GPRC6A; ENSG00000173612; HLA -A*25:01,HLA-A*30:01,HLA-A*32:01,HLA-B*15:01,HLA-B*15:03, HLA-B*18:01,HLA-B*27:02,HLA-B*37:01,HLA-B*40:01,HLA-B*40:02, HLA-B*44:02,HLA-B*44:03,HLA-B*49:01,HLA-C*16:04
QEINTKSAF

SEQ ID NO: 3375 - protein, 10 aa, Homo sapiens
  Table 1.2; GPRC6A; ENSG00000173612; HLA -A*30:01,HLA-B*40:01,HLA-B*44:02,HLA-B*44:03,HLA-B*49:01
QEINTKSAFL

SEQ ID NO: 3376 - protein, 9 aa, Homo sapiens
  Table 1.2; GPRC6A; ENSG00000173612; HLA -A*01:01,HLA-A*03:01,HLA-A*26:01,HLA-A*29:02,HLA-A*30:02, HLA-B*15:01,HLA-B*15:03
QLAVFALGY

SEQ ID NO: 3377 - protein, 8 aa, Homo sapiens
  Table 1.2; GPRC6A; ENSG00000173612; HLA -A*30:02,HLA-B*15:01,HLA-B*15:03
QLMPQVGY

SEQ ID NO: 3378 - protein, 9 aa, Homo sapiens
  Table 1.2; GPRC6A; ENSG00000173612; HLA -A*01:01
QTDMPHCLL

SEQ ID NO: 3379 - protein, 9 aa, Homo sapiens
  Table 1.2; GPRC6A; ENSG00000173612; HLA -B*13:02
QTLAMIHSI

SEQ ID NO: 3380 - protein, 8 aa, Homo sapiens
  Table 1.2; GPRC6A; ENSG00000173612; HLA -A*32:01,HLA-B*15:01,HLA-B*37:01
QVNVIVVF

SEQ ID NO: 3381 - protein, 9 aa, Homo sapiens
  Table 1.2; GPRC6A; ENSG00000173612; HLA -A*02:04,HLA-A*02:07,HLA-A*68:02
QVNVIVVFL

SEQ ID NO: 3382 - protein, 9 aa, Homo sapiens
  Table 1.2; GPRC6A; ENSG00000173612; HLA -B*37:01
RDCQNPNAF

SEQ ID NO: 3383 - protein, 9 aa, Homo sapiens
  Table 1.2; GPRC6A; ENSG00000173612; HLA -A*03:02
RENATSVSK

SEQ ID NO: 3384 - protein, 11 aa, Homo sapiens
  Table 1.2; GPRC6A; ENSG00000173612; HLA -A*30:01,HLA-B*40:01,HLA-B*44:02,HLA-B*44:03
RENATSVSKTL

SEQ ID NO: 3385 - protein, 9 aa, Homo sapiens
  Table 1.2; GPRC6A; ENSG00000173612; HLA -A*03:02,HLA-A*11:01
RNLNTPVVK

SEQ ID NO: 3386 - protein, 9 aa, Homo sapiens
  Table 1.2; GPRC6A; ENSG00000173612; HLA -B*54:01,HLA-B*56:01
RPILIIFTC

SEQ ID NO: 3387 - protein, 9 aa, Homo sapiens
  Table 1.2; GPRC6A; ENSG00000173612; HLA -A*24:02,HLA-B*57:01
RQFHVFDLF

SEQ ID NO: 3388 - protein, 9 aa, Homo sapiens
  Table 1.2; GPRC6A; ENSG00000173612; HLA -A*32:01,HLA-B*15:01,HLA-B*15:03,HLA-B*37:01
RQTMFGVSF

SEQ ID NO: 3389 - protein, 9 aa, Homo sapiens
  Table 1.2; GPRC6A; ENSG00000173612; HLA -A*03:01,HLA-A*03:02,HLA-A*11:01
RTLAYKANK

SEQ ID NO: 3390 - protein, 10 aa, Homo sapiens
  Table 1.2; GPRC6A; ENSG00000173612; HLA -B*57:01,HLA-B*58:01
RTVPSDFHQI

SEQ ID NO: 3391 - protein, 11 aa, Homo sapiens
  Table 1.2; GPRC6A; ENSG00000173612; HLA -A*03:01,HLA-A*11:01,HLA-A*31:01,HLA-B*57:01
RTVPSDFHQIK

SEQ ID NO: 3392 - protein, 10 aa, Homo sapiens
  Table 1.2; GPRC6A; ENSG00000173612; HLA -A*25:01,HLA-A*26:01,HLA-A*30:02,HLA-A*32:01,HLA-B*15:01, HLA-B*15:03,HLA-B*46:01
RVKAVIGSGY

SEQ ID NO: 3393 - protein, 8 aa, Homo sapiens
  Table 1.2; GPRC6A; ENSG00000173612; HLA -B*08:01
SAFLKMIY

SEQ ID NO: 3394 - protein, 10 aa, Homo sapiens
  Table 1.2; GPRC6A; ENSG00000173612; HLA -A*29:02,HLA-A*30:02
SAFLKMIYSY

SEQ ID NO: 3395 - protein, 9 aa, Homo sapiens
  Table 1.2; GPRC6A; ENSG00000173612; HLA -B*37:01
SDFHQIKAM

SEQ ID NO: 3396 - protein, 9 aa, Homo sapiens
  Table 1.2; GPRC6A; ENSG00000173612; HLA -B*37:01
SDKIRFPSF

SEQ ID NO: 3397 - protein, 9 aa, Homo sapiens
  Table 1.2; GPRC6A; ENSG00000173612; HLA -B*38:01,HLA-B*44:02,HLA-B*44:03
SDNTIEVRI

SEQ ID NO: 3398 - protein, 11 aa, Homo sapiens
  Table 1.2; GPRC6A; ENSG00000173612; HLA -A*31:01
SDNTIEVRINR

SEQ ID NO: 3399 - protein, 10 aa, Homo sapiens
  Table 1.2; GPRC6A; ENSG00000173612; HLA -B*44:02,HLA-B*49:01
SEDSPRRPQI

SEQ ID NO: 3400 - protein, 9 aa, Homo sapiens
  Table 1.2; GPRC6A; ENSG00000173612; HLA -B*44:03,HLA-B*49:01
SEITMAVSR

SEQ ID NO: 3401 - protein, 10 aa, Homo sapiens
  Table 1.2; GPRC6A; ENSG00000173612; HLA -A*30:01,HLA-B*40:01,HLA-B*44:03,HLA-B*49:01
SEITMAVSRM

SEQ ID NO: 3402 - protein, 9 aa, Homo sapiens
  Table 1.2; GPRC6A; ENSG00000173612; HLA -A*23:01,HLA-A*24:02,HLA-A*29:02,HLA-A*32:01,HLA-B*35:01, HLA-C*04:01
SFDPKLQKF

SEQ ID NO: 3403 - protein, 10 aa, Homo sapiens
  Table 1.2; GPRC6A; ENSG00000173612; HLA -A*23:01,HLA-A*29:02
SFFIGEPQDF

SEQ ID NO: 3404 - protein, 9 aa, Homo sapiens
  Table 1.2; GPRC6A; ENSG00000173612; HLA -A*02:04,HLA-A*23:01,HLA-A*24:02
SFLQNLHLL

SEQ ID NO: 3405 - protein, 8 aa, Homo sapiens
  Table 1.2; GPRC6A; ENSG00000173612; HLA -C*16:01
SGGLRVCY

SEQ ID NO: 3406 - protein, 9 aa, Homo sapiens
  Table 1.2; GPRC6A; ENSG00000173612; HLA -B*27:05,HLA-B*38:01,HLA-B*39:01
SHSVSSIAL

SEQ ID NO: 3407 - protein, 9 aa, Homo sapiens
  Table 1.2; GPRC6A; ENSG00000173612; HLA -B*07:02,HLA-B*08:01,HLA-C*01:02
SIALSPASL

SEQ ID NO: 3408 - protein, 11 aa, Homo sapiens
  Table 1.2; GPRC6A; ENSG00000173612; HLA -A*29:02
SILAFGTMLGY

SEQ ID NO: 3409 - protein, 9 aa, Homo sapiens
  Table 1.2; GPRC6A; ENSG00000173612; HLA -A*02:04
SIQLAVFAL

SEQ ID NO: 3410 - protein, 9 aa, Homo sapiens
  Table 1.2; GPRC6A; ENSG00000173612; HLA -B*15:03
SKDLQAQAF

SEQ ID NO: 3411 - protein, 9 aa, Homo sapiens
  Table 1.2; GPRC6A; ENSG00000173612; HLA -A*02:04
SLAILLLIL

SEQ ID NO: 3412 - protein, 11 aa, Homo sapiens
  Table 1.2; GPRC6A; ENSG00000173612; HLA -A*02:01,HLA-A*02:07,HLA-B*38:01,HLA-B*55:01,HLA-C*05:01
SLDSMSGNVTM

SEQ ID NO: 3413 - protein, 8 aa, Homo sapiens
  Table 1.2; GPRC6A; ENSG00000173612; HLA -A*02:04
SLLGIIFV

SEQ ID NO: 3414 - protein, 9 aa, Homo sapiens
  Table 1.2; GPRC6A; ENSG00000173612; HLA -A*02:01,HLA-A*02:03,HLA-A*02:04,HLA-A*02:07,HLA-A*29:02
SLLGIIFVL

SEQ ID NO: 3415 - protein, 10 aa, Homo sapiens
  Table 1.2; GPRC6A; ENSG00000173612; HLA -A*02:01,HLA-A*02:04
SLLGIIFVLV

SEQ ID NO: 3416 - protein, 8 aa, Homo sapiens
  Table 1.2; GPRC6A; ENSG00000173612; HLA -B*07:02,HLA-B*35:01,HLA-B*35:03,HLA-B*55:01,HLA-B*56:01
SPASLDSM

SEQ ID NO: 3417 - protein, 10 aa, Homo sapiens
  Table 1.2; GPRC6A; ENSG00000173612; HLA -B*56:01
SPASLDSMSG

SEQ ID NO: 3418 - protein, 9 aa, Homo sapiens
  Table 1.2; GPRC6A; ENSG00000173612; HLA -A*30:02
SSGGLRVCY

SEQ ID NO: 3419 - protein, 8 aa, Homo sapiens
  Table 1.2; GPRC6A; ENSG00000173612; HLA -A*32:01,HLA-B*57:01,HLA-B*58:01
SSGKSATW

SEQ ID NO: 3420 - protein, 9 aa, Homo sapiens
  Table 1.2; GPRC6A; ENSG00000173612; HLA -A*25:01,HLA-A*32:01,HLA-B*57:01,HLA-B*58:01
SSSGKSATW

SEQ ID NO: 3421 - protein, 9 aa, Homo sapiens
  Table 1.2; GPRC6A; ENSG00000173612; HLA -B*54:01
SSYMPRVKA

SEQ ID NO: 3422 - protein, 9 aa, Homo sapiens
  Table 1.2; GPRC6A; ENSG00000173612; HLA -A*03:01,HLA-A*03:02,HLA-A*11:01,HLA-A*68:01
STAEILSDK

SEQ ID NO: 3423 - protein, 10 aa, Homo sapiens
  Table 1.2; GPRC6A; ENSG00000173612; HLA -A*68:02
STAEILSDKI

SEQ ID NO: 3424 - protein, 9 aa, Homo sapiens
  Table 1.2; GPRC6A; ENSG00000173612; HLA -A*02:03,HLA-A*25:01,HLA-A*68:02,HLA-B*13:02
STATKITTI

SEQ ID NO: 3425 - protein, 11 aa, Homo sapiens
  Table 1.2; GPRC6A; ENSG00000173612; HLA -A*01:01,HLA-A*29:02,HLA-A*30:02
STLLPGVKLGY

SEQ ID NO: 3426 - protein, 9 aa, Homo sapiens
  Table 1.2; GPRC6A; ENSG00000173612; HLA -A*03:01,HLA-A*03:02,HLA-A*11:01
SVSKTLPRK

SEQ ID NO: 3427 - protein, 9 aa, Homo sapiens
  Table 1.2; GPRC6A; ENSG00000173612; HLA -A*03:01,HLA-B*13:02
SVSSIALSP

SEQ ID NO: 3428 - protein, 10 aa, Homo sapiens
  Table 1.2; GPRC6A; ENSG00000173612; HLA -B*56:01
SVSSIALSPA

SEQ ID NO: 3429 - protein, 9 aa, Homo sapiens
  Table 1.2; GPRC6A; ENSG00000173612; HLA -A*24:02,HLA-B*37:01
SYMPRVKAV

SEQ ID NO: 3430 - protein, 10 aa, Homo sapiens
  Table 1.2; GPRC6A; ENSG00000173612; HLA -A*23:01,HLA-A*24:02
SYMPRVKAVI

SEQ ID NO: 3431 - protein, 10 aa, Homo sapiens
  Table 1.2; GPRC6A; ENSG00000173612; HLA -A*24:02
SYSSHSVSSI

SEQ ID NO: 3432 - protein, 8 aa, Homo sapiens
  Table 1.2; GPRC6A; ENSG00000173612; HLA -B*51:01,HLA-B*58:01
TATKITTI

SEQ ID NO: 3433 - protein, 8 aa, Homo sapiens
  Table 1.2; GPRC6A; ENSG00000173612; HLA -B*08:01
TCKTRQTM

SEQ ID NO: 3434 - protein, 9 aa, Homo sapiens
  Table 1.2; GPRC6A; ENSG00000173612; HLA -B*08:01
TCKTRQTMF

SEQ ID NO: 3435 - protein, 9 aa, Homo sapiens
  Table 1.2; GPRC6A; ENSG00000173612; HLA -A*30:01,HLA-A*32:01,HLA-B*18:01,HLA-B*35:01,HLA-B*35:03, HLA-B*39:01,HLA-B*40:01,HLA-B*46:01,HLA-B*55:01,HLA-C*03:03, HLA-C*03:04,HLA-C*04:01,HLA-C*07:06,HLA-C*16:01
TCTEVTVAM

SEQ ID NO: 3436 - protein, 9 aa, Homo sapiens
  Table 1.2; GPRC6A; ENSG00000173612; HLA -B*38:01,HLA-B*39:01
TCTGIQVVI

SEQ ID NO: 3437 - protein, 8 aa, Homo sapiens
  Table 1.2; GPRC6A; ENSG00000173612; HLA -B*37:01
TDMPHCLL

SEQ ID NO: 3438 - protein, 8 aa, Homo sapiens
  Table 1.2; GPRC6A; ENSG00000173612; HLA -A*30:01,HLA-B*18:01,HLA-B*49:01
TEVTVAMA

SEQ ID NO: 3439 - protein, 9 aa, Homo sapiens
  Table 1.2; GPRC6A; ENSG00000173612; HLA -A*30:01,HLA-B*18:01,HLA-B*40:02,HLA-B*49:01
TEVTVAMAA

SEQ ID NO: 3440 - protein, 11 aa, Homo sapiens
  Table 1.2; GPRC6A; ENSG00000173612; HLA -A*30:01,HLA-B*40:01
TEVTVAMAATL

SEQ ID NO: 3441 - protein, 9 aa, Homo sapiens
  Table 1.2; GPRC6A; ENSG00000173612; HLA -A*23:01
TFIPIYATT

SEQ ID NO: 3442 - protein, 10 aa, Homo sapiens
  Table 1.2; GPRC6A; ENSG00000173612; HLA -A*23:01,HLA-A*24:02,HLA-A*29:02
TFIPIYATTF

SEQ ID NO: 3443 - protein, 9 aa, Homo sapiens
  Table 1.2; GPRC6A; ENSG00000173612; HLA -A*23:01,HLA-A*24:02
TFIPKCYVI

SEQ ID NO: 3444 - protein, 9 aa, Homo sapiens
  Table 1.2; GPRC6A; ENSG00000173612; HLA -A*23:01,HLA-A*24:02,HLA-C*14:02
TFTDGWNSF

SEQ ID NO: 3445 - protein, 9 aa, Homo sapiens
  Table 1.2; GPRC6A; ENSG00000173612; HLA -A*02:03,HLA-B*08:01
TLKKIILEA

SEQ ID NO: 3446 - protein, 10 aa, Homo sapiens
  Table 1.2; GPRC6A; ENSG00000173612; HLA -A*03:01,HLA-A*29:02,HLA-A*30:02,HLA-A*32:01,HLA-B*15:01
TLLPGVKLGY

SEQ ID NO: 3447 - protein, 9 aa, Homo sapiens
  Table 1.2; GPRC6A; ENSG00000173612; HLA -A*02:01,HLA-A*02:03,HLA-A*02:04,HLA-A*02:07,HLA-A*23:01, HLA-B*13:02,HLA-B*35:03,HLA-C*02:02
TMFGVSFTL

SEQ ID NO: 3448 - protein, 9 aa, Homo sapiens
  Table 1.2; GPRC6A; ENSG00000173612; HLA -A*02:01,HLA-A*02:03,HLA-A*02:04
TMLGYIAIL

SEQ ID NO: 3449 - protein, 8 aa, Homo sapiens
  Table 1.2; GPRC6A; ENSG00000173612; HLA -B*56:01
TPDDFVAA

SEQ ID NO: 3450 - protein, 10 aa, Homo sapiens
  Table 1.2; GPRC6A; ENSG00000173612; HLA -B*07:02
TPVVKSSGGL

SEQ ID NO: 3451 - protein, 11 aa, Homo sapiens
  Table 1.2; GPRC6A; ENSG00000173612; HLA -A*68:01
TPVVKSSGGLR

SEQ ID NO: 3452 - protein, 10 aa, Homo sapiens
  Table 1.2; GPRC6A; ENSG00000173612; HLA -B*27:05
TRNLNTPVVK

SEQ ID NO: 3453 - protein, 9 aa, Homo sapiens
  Table 1.2; GPRC6A; ENSG00000173612; HLA -A*11:01,HLA-A*31:01,HLA-A*33:01,HLA-A*33:03,HLA-A*68:01, HLA-C*07:06
TSVSKTLPR

SEQ ID NO: 3454 - protein, 9 aa, Homo sapiens
  Table 1.2; GPRC6A; ENSG00000173612; HLA -C*05:01
TTDDDYGRL

SEQ ID NO: 3455 - protein, 11 aa, Homo sapiens
  Table 1.2; GPRC6A; ENSG00000173612; HLA -B*38:01
TTDDDYGRLAL

SEQ ID NO: 3456 - protein, 9 aa, Homo sapiens
  Table 1.2; GPRC6A; ENSG00000173612; HLA -B*54:01
TTFGKYVPA

SEQ ID NO: 3457 - protein, 10 aa, Homo sapiens
  Table 1.2; GPRC6A; ENSG00000173612; HLA -A*02:03,HLA-A*68:02
TTFGKYVPAV

SEQ ID NO: 3458 - protein, 8 aa, Homo sapiens
  Table 1.2; GPRC6A; ENSG00000173612; HLA -A*11:01
TTIPNVKK

SEQ ID NO: 3459 - protein, 9 aa, Homo sapiens
  Table 1.2; GPRC6A; ENSG00000173612; HLA -A*02:03,HLA-A*25:01,HLA-A*68:02,HLA-C*16:02
TTIPNVKKI

SEQ ID NO: 3460 - protein, 11 aa, Homo sapiens
  Table 1.2; GPRC6A; ENSG00000173612; HLA -A*11:01,HLA-A*31:01
TTIPNVKKIGK

SEQ ID NO: 3461 - protein, 8 aa, Homo sapiens
  Table 1.2; GPRC6A; ENSG00000173612; HLA -B*35:03
TVAMAATL

SEQ ID NO: 3462 - protein, 9 aa, Homo sapiens
  Table 1.2; GPRC6A; ENSG00000173612; HLA -A*33:03,HLA-A*68:01,HLA-C*07:06
TVAMAATLR

SEQ ID NO: 3463 - protein, 10 aa, Homo sapiens
  Table 1.2; GPRC6A; ENSG00000173612; HLA -A*25:01,HLA-A*26:01
TVAMAATLRF

SEQ ID NO: 3464 - protein, 9 aa, Homo sapiens
  Table 1.2; GPRC6A; ENSG00000173612; HLA -A*02:07,HLA-A*24:02,HLA-A*25:01,HLA-A*26:01,HLA-A*68:02
TVPSDFHQI

SEQ ID NO: 3465 - protein, 8 aa, Homo sapiens
  Table 1.2; GPRC6A; ENSG00000173612; HLA -A*26:01,HLA-A*30:02,HLA-A*32:01,HLA-B*15:01,HLA-B*15:03, HLA-B*18:01,HLA-B*46:01
TVTKMAEY

SEQ ID NO: 3466 - protein, 9 aa, Homo sapiens
  Table 1.2; GPRC6A; ENSG00000173612; HLA -A*23:01,HLA-A*24:02,HLA-B*46:01,HLA-B*58:01,HLA-C*02:02
VAMAATLRF

SEQ ID NO: 3467 - protein, 10 aa, Homo sapiens
  Table 1.2; GPRC6A; ENSG00000173612; HLA -B*18:01
VEFKCDYSSY

SEQ ID NO: 3468 - protein, 8 aa, Homo sapiens
  Table 1.2; GPRC6A; ENSG00000173612; HLA -B*18:01,HLA-B*49:01
VEIIVILI

SEQ ID NO: 3469 - protein, 10 aa, Homo sapiens
  Table 1.2; GPRC6A; ENSG00000173612; HLA -B*49:01
VEVNVSLPRV

SEQ ID NO: 3470 - protein, 10 aa, Homo sapiens
  Table 1.2; GPRC6A; ENSG00000173612; HLA -B*40:01,HLA-B*49:01
VEYLNWNDSL

SEQ ID NO: 3471 - protein, 8 aa, Homo sapiens
  Table 1.2; GPRC6A; ENSG00000173612; HLA -A*23:01
VFALGYAI

SEQ ID NO: 3472 - protein, 10 aa, Homo sapiens
  Table 1.2; GPRC6A; ENSG00000173612; HLA -B*27:02
VFIIPDQETK

SEQ ID NO: 3473 - protein, 9 aa, Homo sapiens
  Table 1.2; GPRC6A; ENSG00000173612; HLA -A*23:01
VFLQTLAMI

SEQ ID NO: 3474 - protein, 9 aa, Homo sapiens
  Table 1.2; GPRC6A; ENSG00000173612; HLA -A*23:01,HLA-A*24:02
VFLRQFHVF

SEQ ID NO: 3475 - protein, 8 aa, Homo sapiens
  Table 1.2; GPRC6A; ENSG00000173612; HLA -B*18:01,HLA-B*46:01
VGFEISVF

SEQ ID NO: 3476 - protein, 9 aa, Homo sapiens
  Table 1.2; GPRC6A; ENSG00000173612; HLA -B*46:01,HLA-B*49:01,HLA-B*51:01
VGYESTAEI

SEQ ID NO: 3477 - protein, 9 aa, Homo sapiens
  Table 1.2; GPRC6A; ENSG00000173612; HLA -B*15:01,HLA-B*15:03
VKAVIGSGY

SEQ ID NO: 3478 - protein, 9 aa, Homo sapiens
  Table 1.2; GPRC6A; ENSG00000173612; HLA -B*35:01,HLA-B*35:03,HLA-B*51:01,HLA-B*56:01
VPAVEIIVI

SEQ ID NO: 3479 - protein, 8 aa, Homo sapiens
  Table 1.2; GPRC6A; ENSG00000173612; HLA -B*51:01
VPSDFHQI

SEQ ID NO: 3480 - protein, 10 aa, Homo sapiens
  Table 1.2; GPRC6A; ENSG00000173612; HLA -B*54:01,HLA-B*55:01,HLA-B*56:01
VPSDFHQIKA

SEQ ID NO: 3481 - protein, 9 aa, Homo sapiens
  Table 1.2; GPRC6A; ENSG00000173612; HLA -A*02:04,HLA-C*16:01
VSLPRVIIL

SEQ ID NO: 3482 - protein, 10 aa, Homo sapiens
  Table 1.2; GPRC6A; ENSG00000173612; HLA -B*57:01
VTFTDGWNSF

SEQ ID NO: 3483 - protein, 11 aa, Homo sapiens
  Table 1.2; GPRC6A; ENSG00000173612; HLA -A*03:01,HLA-A*03:02,HLA-A*11:01,HLA-B*27:02
VTMTNPSSSGK

SEQ ID NO: 3484 - protein, 9 aa, Homo sapiens
  Table 1.2; GPRC6A; ENSG00000173612; HLA -A*23:01,HLA-A*24:02,HLA-B*40:01,HLA-B*46:01,HLA-B*58:01, HLA-C*03:03,HLA-C*03:04
VTVAMAATL

SEQ ID NO: 3485 - protein, 8 aa, Homo sapiens
  Table 1.2; GPRC6A; ENSG00000173612; HLA -A*11:01,HLA-A*31:01
VVGIIFTR

SEQ ID NO: 3486 - protein, 9 aa, Homo sapiens
  Table 1.2; GPRC6A; ENSG00000173612; HLA -A*31:01,HLA-A*33:01,HLA-A*33:03
VVKSSGGLR

SEQ ID NO: 3487 - protein, 8 aa, Homo sapiens
  Table 1.2; GPRC6A; ENSG00000173612; HLA -B*08:01
WAPVRSTM

SEQ ID NO: 3488 - protein, 10 aa, Homo sapiens
  Table 1.2; GPRC6A; ENSG00000173612; HLA -A*01:01,HLA-A*23:01,HLA-A*25:01,HLA-B*35:03,HLA-B*38:01, HLA-B*49:01,HLA-B*51:01,HLA-B*54:01,HLA-B*58:01
YAEPGLIHSI

SEQ ID NO: 3489 - protein, 9 aa, Homo sapiens
  Table 1.2; GPRC6A; ENSG00000173612; HLA -B*54:01
YAIRDLCQA

SEQ ID NO: 3490 - protein, 9 aa, Homo sapiens
  Table 1.2; GPRC6A; ENSG00000173612; HLA -B*54:01
YAMHLSACA

SEQ ID NO: 3491 - protein, 9 aa, Homo sapiens
  Table 1.2; GPRC6A; ENSG00000173612; HLA -C*16:02
YATTFGKYV

SEQ ID NO: 3492 - protein, 9 aa, Homo sapiens
  Table 1.2; GPRC6A; ENSG00000173612; HLA -B*13:02
YDTCTEVTV

SEQ ID NO: 3493 - protein, 10 aa, Homo sapiens
  Table 1.2; GPRC6A; ENSG00000173612; HLA -B*49:01
YEIYDTCTEV

SEQ ID NO: 3494 - protein, 9 aa, Homo sapiens
  Table 1.2; GPRC6A; ENSG00000173612; HLA -A*30:01,HLA-B*18:01,HLA-B*37:01,HLA-B*40:01,HLA-B*44:02, HLA-B*44:03,HLA-B*49:01
YENYNEAKF

SEQ ID NO: 3495 - protein, 8 aa, Homo sapiens
  Table 1.2; GPRC6A; ENSG00000173612; HLA -A*30:01,HLA-B*18:01,HLA-B*37:01,HLA-B*40:01,HLA-B*49:01
YESTAEIL

SEQ ID NO: 3496 - protein, 11 aa, Homo sapiens
  Table 1.2; GPRC6A; ENSG00000173612; HLA -B*27:02
YESTAEILSDK

SEQ ID NO: 3497 - protein, 9 aa, Homo sapiens
  Table 1.2; GPRC6A; ENSG00000173612; HLA -A*24:02
YFIAWITFI

SEQ ID NO: 3498 - protein, 9 aa, Homo sapiens
  Table 1.2; GPRC6A; ENSG00000173612; HLA -B*46:01
YGRLALNTF

SEQ ID NO: 3499 - protein, 9 aa, Homo sapiens
  Table 1.2; GPRC6A; ENSG00000173612; HLA -A*02:07,HLA-A*24:02
YMPRVKAVI

SEQ ID NO: 3500 - protein, 9 aa, Homo sapiens
  Table 1.2; GPRC6A; ENSG00000173612; HLA -A*25:01,HLA-B*58:01,HLA-C*03:04,HLA-C*16:02
YSSHSVSSI

SEQ ID NO: 3501 - protein, 8 aa, Homo sapiens
  Table 1.2; GPRC6A; ENSG00000173612; HLA -B*13:02
YSSYMPRV

SEQ ID NO: 3502 - protein, 8 aa, Homo sapiens
  Table 1.2; GPRC6A; ENSG00000173612; HLA -B*08:01,HLA-B*13:02,HLA-B*51:01,HLA-B*54:01
YSYSSHSV

SEQ ID NO: 3503 - protein, 9 aa, Homo sapiens
  Table 1.2; GPRC6A; ENSG00000173612; HLA -B*13:02
YVIICKQEI

SEQ ID NO: 3504 - protein, 9 aa, Homo sapiens
  Table 1.2; GPRC6A; ENSG00000173612; HLA -A*26:01
YVKDTDLSQ

SEQ ID NO: 3505 - protein, 9 aa, Homo sapiens
  Table 1.2; GPRC6A; ENSG00000173612; HLA -A*02:07
YVPAVEIIV

SEQ ID NO: 3506 - protein, 10 aa, Homo sapiens
  Table 1.2; GPRC6A; ENSG00000173612; HLA -A*02:07
YVPAVEIIVI

SEQ ID NO: 3507 - protein, 10 aa, Homo sapiens
  Table 1.2; GSG1L2; ENSG00000214978; HLA -C*01:02
AAPCPAEQAF

SEQ ID NO: 3508 - protein, 9 aa, Homo sapiens
  Table 1.2; GSG1L2; ENSG00000214978; HLA -A*03:01,HLA-A*03:02,HLA-A*11:01,HLA-A*31:01,HLA-A*33:01, HLA-B*46:01,HLA-B*56:01,HLA-B*57:01
AARLEFTEK

SEQ ID NO: 3509 - protein, 8 aa, Homo sapiens
  Table 1.2; GSG1L2; ENSG00000214978; HLA -B*44:02,HLA-B*44:03
AEEQGVLW

SEQ ID NO: 3510 - protein, 9 aa, Homo sapiens
  Table 1.2; GSG1L2; ENSG00000214978; HLA -B*40:01,HLA-B*44:02,HLA-B*44:03,HLA-B*49:01
AEEQGVLWL

SEQ ID NO: 3511 - protein, 8 aa, Homo sapiens
  Table 1.2; GSG1L2; ENSG00000214978; HLA -B*37:01,HLA-B*49:01
AEQAFRNV

SEQ ID NO: 3512 - protein, 10 aa, Homo sapiens
  Table 1.2; GSG1L2; ENSG00000214978; HLA -B*40:02
AEQAFRNVSG

SEQ ID NO: 3513 - protein, 9 aa, Homo sapiens
  Table 1.2; GSG1L2; ENSG00000214978; HLA -A*02:04,HLA-A*02:07
AIFMVLAGL

SEQ ID NO: 3514 - protein, 11 aa, Homo sapiens
  Table 1.2; GSG1L2; ENSG00000214978; HLA -A*31:01
AILLGSRVSCR

SEQ ID NO: 3515 - protein, 9 aa, Homo sapiens
  Table 1.2; GSG1L2; ENSG00000214978; HLA -A*02:01,HLA-A*02:04
ALLLLPVCL

SEQ ID NO: 3516 - protein, 9 aa, Homo sapiens
  Table 1.2; GSG1L2; ENSG00000214978; HLA -A*02:01,HLA-A*02:03,HLA-A*02:04,HLA-A*02:07,HLA-B*13:02, HLA-B*55:01
ALTFSLTAV

SEQ ID NO: 3517 - protein, 8 aa, Homo sapiens
  Table 1.2; GSG1L2; ENSG00000214978; HLA -A*02:01,HLA-A*02:04,HLA-B*13:02
ALVAIFMV

SEQ ID NO: 3518 - protein, 9 aa, Homo sapiens
  Table 1.2; GSG1L2; ENSG00000214978; HLA -A*02:01,HLA-A*02:03,HLA-A*02:04,HLA-A*02:07,HLA-A*03:01, HLA-A*23:01,HLA-A*24:02
ALVAIFMVL

SEQ ID NO: 3519 - protein, 9 aa, Homo sapiens
  Table 1.2; GSG1L2; ENSG00000214978; HLA -A*31:01
AMSRFTAAR

SEQ ID NO: 3520 - protein, 8 aa, Homo sapiens
  Table 1.2; GSG1L2; ENSG00000214978; HLA -B*56:01
APCPAEQA

SEQ ID NO: 3521 - protein, 9 aa, Homo sapiens
  Table 1.2; GSG1L2; ENSG00000214978; HLA -A*30:02,HLA-A*32:01,HLA-B*07:02,HLA-B*15:01,HLA-B*35:01, HLA-B*35:03,HLA-B*37:01,HLA-B*38:01,HLA-B*55:01,HLA-B*56:01, HLA-C*03:03,HLA-C*04:01,HLA-C*07:01,HLA-C*07:02,HLA-C*16:01
APCPAEQAF

SEQ ID NO: 3522 - protein, 9 aa, Homo sapiens
  Table 1.2; GSG1L2; ENSG00000214978; HLA -A*32:01
AQNGSRHSQ

SEQ ID NO: 3523 - protein, 8 aa, Homo sapiens
  Table 1.2; GSG1L2; ENSG00000214978; HLA -B*27:05
ARLEFTEK

SEQ ID NO: 3524 - protein, 8 aa, Homo sapiens
  Table 1.2; GSG1L2; ENSG00000214978; HLA -A*02:04
AVLYIWEL

SEQ ID NO: 3525 - protein, 9 aa, Homo sapiens
  Table 1.2; GSG1L2; ENSG00000214978; HLA -A*03:01,HLA-A*03:02,HLA-A*11:01,HLA-A*31:01,HLA-A*33:03, HLA-A*68:01,HLA-C*07:06
AVSVSAMSR

SEQ ID NO: 3526 - protein, 10 aa, Homo sapiens
  Table 1.2; GSG1L2; ENSG00000214978; HLA -A*25:01,HLA-A*26:01
AVSVSAMSRF

SEQ ID NO: 3527 - protein, 9 aa, Homo sapiens
  Table 1.2; GSG1L2; ENSG00000214978; HLA -A*02:03,HLA-B*15:01,HLA-B*27:05,HLA-B*46:01,HLA-C*01:02, HLA-C*14:02
CLAVSVSAM

SEQ ID NO: 3528 - protein, 9 aa, Homo sapiens
  Table 1.2; GSG1L2; ENSG00000214978; HLA -A*02:01,HLA-A*02:04
CLAWGSFAL

SEQ ID NO: 3529 - protein, 10 aa, Homo sapiens
  Table 1.2; GSG1L2; ENSG00000214978; HLA -B*56:01
CPAEQAFRNV

SEQ ID NO: 3530 - protein, 8 aa, Homo sapiens
  Table 1.2; GSG1L2; ENSG00000214978; HLA -A*33:01,HLA-B*18:01,HLA-B*35:01,HLA-B*35:03,HLA-B*51:01
DALVAIFM

SEQ ID NO: 3531 - protein, 9 aa, Homo sapiens
  Table 1.2; GSG1L2; ENSG00000214978; HLA -B*51:01
DALVAIFMV

SEQ ID NO: 3532 - protein, 9 aa, Homo sapiens
  Table 1.2; GSG1L2; ENSG00000214978; HLA -B*54:01,HLA-B*56:01
DIVLILTSA

SEQ ID NO: 3533 - protein, 8 aa, Homo sapiens
  Table 1.2; GSG1L2; ENSG00000214978; HLA -B*35:03
DNNSQAVL

SEQ ID NO: 3534 - protein, 9 aa, Homo sapiens
  Table 1.2; GSG1L2; ENSG00000214978; HLA -A*26:01,HLA-A*33:01,HLA-A*33:03,HLA-B*18:01
DNNSQAVLY

SEQ ID NO: 3535 - protein, 9 aa, Homo sapiens
  Table 1.2; GSG1L2; ENSG00000214978; HLA -B*07:02,HLA-B*08:01,HLA-B*27:05,HLA-B*38:01,HLA-B*39:01, HLA-C*06:02
DRAKQQQAL

SEQ ID NO: 3536 - protein, 10 aa, Homo sapiens
  Table 1.2; GSG1L2; ENSG00000214978; HLA -A*33:01,HLA-A*33:03,HLA-A*68:01
ELGDDKFIQR

SEQ ID NO: 3537 - protein, 11 aa, Homo sapiens
  Table 1.2; GSG1L2; ENSG00000214978; HLA -A*33:01,HLA-A*33:03
ESLNGEDEKCR

SEQ ID NO: 3538 - protein, 9 aa, Homo sapiens
  Table 1.2; GSG1L2; ENSG00000214978; HLA -A*02:04,HLA-A*23:01,HLA-A*25:01,HLA-A*26:01,HLA-A*29:02, HLA-A*33:03,HLA-A*68:02,HLA-B*35:03
EVLDIVLIL

SEQ ID NO: 3539 - protein, 10 aa, Homo sapiens
  Table 1.2; GSG1L2; ENSG00000214978; HLA -A*68:02
EVLDIVLILT

SEQ ID NO: 3540 - protein, 9 aa, Homo sapiens
  Table 1.2; GSG1L2; ENSG00000214978; HLA -A*02:01,HLA-B*51:01,HLA-B*54:01
FALCLAVSV

SEQ ID NO: 3541 - protein, 11 aa, Homo sapiens
  Table 1.2; GSG1L2; ENSG00000214978; HLA -B*57:01
FSLTAVVSSHW

SEQ ID NO: 3542 - protein, 8 aa, Homo sapiens
  Table 1.2; GSG1L2; ENSG00000214978; HLA -A*23:01,HLA-A*32:01,HLA-B*08:01,HLA-B*46:01,HLA-C*16:01
FTAARLEF

SEQ ID NO: 3543 - protein, 9 aa, Homo sapiens
  Table 1.2; GSG1L2; ENSG00000214978; HLA -A*01:01
FTEKQQAQN

SEQ ID NO: 3544 - protein, 11 aa, Homo sapiens
  Table 1.2; GSG1L2; ENSG00000214978; HLA -B*15:01
GAAPCPAEQAF

SEQ ID NO: 3545 - protein, 8 aa, Homo sapiens
  Table 1.2; GSG1L2; ENSG00000214978; HLA -A*11:01,HLA-A*31:01
GDDKFIQR

SEQ ID NO: 3546 - protein, 10 aa, Homo sapiens
  Table 1.2; GSG1L2; ENSG00000214978; HLA -B*44:02
GDDKFIQRGF

SEQ ID NO: 3547 - protein, 9 aa, Homo sapiens
  Table 1.2; GSG1L2; ENSG00000214978; HLA -B*18:01,HLA-B*37:01,HLA-B*44:02,HLA-B*44:03
GEDEKCRSF

SEQ ID NO: 3548 - protein, 8 aa, Homo sapiens
  Table 1.2; GSG1L2; ENSG00000214978; HLA -A*30:01,HLA-B*40:01
GEVLDIVL

SEQ ID NO: 3549 - protein, 9 aa, Homo sapiens
  Table 1.2; GSG1L2; ENSG00000214978; HLA -A*30:01,HLA-B*40:01,HLA-B*44:02,HLA-B*44:03,HLA-B*49:01
GEVLDIVLI

SEQ ID NO: 3550 - protein, 10 aa, Homo sapiens
  Table 1.2; GSG1L2; ENSG00000214978; HLA -B*40:01
GEVLDIVLIL

SEQ ID NO: 3551 - protein, 9 aa, Homo sapiens
  Table 1.2; GSG1L2; ENSG00000214978; HLA -A*02:01,HLA-A*02:03,HLA-A*02:04,HLA-A*29:02,HLA-B*55:01
GLLGMVAHM

SEQ ID NO: 3552 - protein, 9 aa, Homo sapiens
  Table 1.2; GSG1L2; ENSG00000214978; HLA -B*27:05
GRMDNNSQA

SEQ ID NO: 3553 - protein, 10 aa, Homo sapiens
  Table 1.2; GSG1L2; ENSG00000214978; HLA -B*27:02,HLA-B*27:05
GRMDNNSQAV

SEQ ID NO: 3554 - protein, 11 aa, Homo sapiens
  Table 1.2; GSG1L2; ENSG00000214978; HLA -B*27:02,HLA-B*27:05,HLA-C*16:04
GRMDNNSQAVL

SEQ ID NO: 3555 - protein, 9 aa, Homo sapiens
  Table 1.2; GSG1L2; ENSG00000214978; HLA -B*13:02
GSFALCLAV

SEQ ID NO: 3556 - protein, 9 aa, Homo sapiens
  Table 1.2; GSG1L2; ENSG00000214978; HLA -B*57:01
GSRHSQHSF

SEQ ID NO: 3557 - protein, 9 aa, Homo sapiens
  Table 1.2; GSG1L2; ENSG00000214978; HLA -A*03:02
HLPPGAPGK

SEQ ID NO: 3558 - protein, 10 aa, Homo sapiens
  Table 1.2; GSG1L2; ENSG00000214978; HLA -A*02:03,HLA-A*02:07,HLA-A*68:02
HLPPGAPGKV

SEQ ID NO: 3559 - protein, 8 aa, Homo sapiens
  Table 1.2; GSG1L2; ENSG00000214978; HLA -B*54:01
HSFLEPEA

SEQ ID NO: 3560 - protein, 9 aa, Homo sapiens
  Table 1.2; GSG1L2; ENSG00000214978; HLA -A*23:01,HLA-A*24:02
IFMVLAGLL

SEQ ID NO: 3561 - protein, 8 aa, Homo sapiens
  Table 1.2; GSG1L2; ENSG00000214978; HLA -A*23:01,HLA-C*14:02
IFQITVNL

SEQ ID NO: 3562 - protein, 8 aa, Homo sapiens
  Table 1.2; GSG1L2; ENSG00000214978; HLA -B*51:01
IGGEVLDI

SEQ ID NO: 3563 - protein, 8 aa, Homo sapiens
  Table 1.2; GSG1L2; ENSG00000214978; HLA -A*02:01,HLA-A*23:01
ILTSAILL

SEQ ID NO: 3564 - protein, 10 aa, Homo sapiens
  Table 1.2; GSG1L2; ENSG00000214978; HLA -B*57:01,HLA-B*58:01
ITVNLGPEDW

SEQ ID NO: 3565 - protein, 8 aa, Homo sapiens
  Table 1.2; GSG1L2; ENSG00000214978; HLA -B*54:01
IVLILTSA

SEQ ID NO: 3566 - protein, 9 aa, Homo sapiens
  Table 1.2; GSG1L2; ENSG00000214978; HLA -A*23:01,HLA-C*01:02
IVLILTSAI

SEQ ID NO: 3567 - protein, 9 aa, Homo sapiens
  Table 1.2; GSG1L2; ENSG00000214978; HLA -A*02:04,HLA-B*13:02
KQQQALLLL

SEQ ID NO: 3568 - protein, 9 aa, Homo sapiens
  Table 1.2; GSG1L2; ENSG00000214978; HLA -B*54:01
LAGLLGMVA

SEQ ID NO: 3569 - protein, 9 aa, Homo sapiens
  Table 1.2; GSG1L2; ENSG00000214978; HLA -B*54:01
LALTFSLTA

SEQ ID NO: 3570 - protein, 8 aa, Homo sapiens
  Table 1.2; GSG1L2; ENSG00000214978; HLA -A*30:01,HLA-B*08:01,HLA-B*15:01,HLA-B*15:03,HLA-B*18:01, HLA-B*35:01,HLA-B*35:03,HLA-B*39:01,HLA-B*40:02,HLA-B*46:01, HLA-B*51:01,HLA-B*54:01,HLA-B*58:01,HLA-C*02:02,HLA-C*03:03,
  HLA-C*03:04,HLA-C*05:01,HLA-C*12:03,HLA-C*14:02
LAVSVSAM

SEQ ID NO: 3571 - protein, 10 aa, Homo sapiens
  Table 1.2; GSG1L2; ENSG00000214978; HLA -A*68:01,HLA-B*27:02,HLA-C*07:06
LAVSVSAMSR

SEQ ID NO: 3572 - protein, 9 aa, Homo sapiens
  Table 1.2; GSG1L2; ENSG00000214978; HLA -B*54:01
LCLAVSVSA

SEQ ID NO: 3573 - protein, 10 aa, Homo sapiens
  Table 1.2; GSG1L2; ENSG00000214978; HLA -C*04:01
LCLAVSVSAM

SEQ ID NO: 3574 - protein, 9 aa, Homo sapiens
  Table 1.2; GSG1L2; ENSG00000214978; HLA -A*30:01,HLA-B*18:01,HLA-B*40:01,HLA-B*40:02,HLA-B*44:03, HLA-B*49:01
LEFTEKQQA

SEQ ID NO: 3575 - protein, 9 aa, Homo sapiens
  Table 1.2; GSG1L2; ENSG00000214978; HLA -B*49:01
LEPEASESI

SEQ ID NO: 3576 - protein, 10 aa, Homo sapiens
  Table 1.2; GSG1L2; ENSG00000214978; HLA -B*44:02,HLA-B*44:03,HLA-B*57:01
LEPEASESIW

SEQ ID NO: 3577 - protein, 9 aa, Homo sapiens
  Table 1.2; GSG1L2; ENSG00000214978; HLA -A*11:01,HLA-A*31:01
LGDDKFIQR

SEQ ID NO: 3578 - protein, 8 aa, Homo sapiens
  Table 1.2; GSG1L2; ENSG00000214978; HLA -B*08:01
LGMVAHMM

SEQ ID NO: 3579 - protein, 9 aa, Homo sapiens
  Table 1.2; GSG1L2; ENSG00000214978; HLA -A*02:01,HLA-A*02:04,HLA-A*02:07
LLLPVCLAL

SEQ ID NO: 3580 - protein, 9 aa, Homo sapiens
  Table 1.2; GSG1L2; ENSG00000214978; HLA -B*51:01
LPPGAPGKV

SEQ ID NO: 3581 - protein, 11 aa, Homo sapiens
  Table 1.2; GSG1L2; ENSG00000214978; HLA -B*07:02,HLA-B*51:01,HLA-B*54:01,HLA-B*56:01
LPPGAPGKVSI

SEQ ID NO: 3582 - protein, 9 aa, Homo sapiens
  Table 1.2; GSG1L2; ENSG00000214978; HLA -B*35:01,HLA-B*35:03,HLA-B*51:01
LPVCLALTF

SEQ ID NO: 3583 - protein, 8 aa, Homo sapiens
  Table 1.2; GSG1L2; ENSG00000214978; HLA -C*03:03,HLA-C*03:04
LSIGGEVL

SEQ ID NO: 3584 - protein, 9 aa, Homo sapiens
  Table 1.2; GSG1L2; ENSG00000214978; HLA -A*24:02,HLA-A*25:01,HLA-A*26:01,HLA-A*32:01,HLA-B*44:02, HLA-B*57:01,HLA-B*58:01,HLA-C*16:04
LTAVVSSHW

SEQ ID NO: 3585 - protein, 8 aa, Homo sapiens
  Table 1.2; GSG1L2; ENSG00000214978; HLA -A*68:02
LTFSLTAV

SEQ ID NO: 3586 - protein, 9 aa, Homo sapiens
  Table 1.2; GSG1L2; ENSG00000214978; HLA -A*68:02
LTFSLTAVV

SEQ ID NO: 3587 - protein, 11 aa, Homo sapiens
  Table 1.2; GSG1L2; ENSG00000214978; HLA -A*68:02
LTSAILLGSRV

SEQ ID NO: 3588 - protein, 8 aa, Homo sapiens
  Table 1.2; GSG1L2; ENSG00000214978; HLA -B*37:01
MDNNSQAV

SEQ ID NO: 3589 - protein, 9 aa, Homo sapiens
  Table 1.2; GSG1L2; ENSG00000214978; HLA -A*30:01,HLA-B*37:01
MDNNSQAVL

SEQ ID NO: 3590 - protein, 10 aa, Homo sapiens
  Table 1.2; GSG1L2; ENSG00000214978; HLA -A*29:02,HLA-A*33:01,HLA-B*35:01,HLA-B*44:03
MDNNSQAVLY

SEQ ID NO: 3591 - protein, 9 aa, Homo sapiens
  Table 1.2; GSG1L2; ENSG00000214978; HLA -A*02:01,HLA-A*02:03,HLA-A*02:04,HLA-A*02:07,HLA-B*13:02, HLA-B*51:01
MMYTTIFQI

SEQ ID NO: 3592 - protein, 9 aa, Homo sapiens
  Table 1.2; GSG1L2; ENSG00000214978; HLA -A*26:01,HLA-A*29:02
MVLAGLLGM

SEQ ID NO: 3593 - protein, 11 aa, Homo sapiens
  Table 1.2; GSG1L2; ENSG00000214978; HLA -B*54:01
MVLAGLLGMVA

SEQ ID NO: 3594 - protein, 8 aa, Homo sapiens
  Table 1.2; GSG1L2; ENSG00000214978; HLA -A*23:01,HLA-A*24:02
MYTTIFQI

SEQ ID NO: 3595 - protein, 9 aa, Homo sapiens
  Table 1.2; GSG1L2; ENSG00000214978; HLA -A*24:02
MYTTIFQIT

SEQ ID NO: 3596 - protein, 8 aa, Homo sapiens
  Table 1.2; GSG1L2; ENSG00000214978; HLA -B*18:01
NNSQAVLY

SEQ ID NO: 3597 - protein, 9 aa, Homo sapiens
  Table 1.2; GSG1L2; ENSG00000214978; HLA -B*57:01
NSQAVLYIW

SEQ ID NO: 3598 - protein, 9 aa, Homo sapiens
  Table 1.2; GSG1L2; ENSG00000214978; HLA -B*44:02
PEDWKPQTW

SEQ ID NO: 3599 - protein, 9 aa, Homo sapiens
  Table 1.2; GSG1L2; ENSG00000214978; HLA -B*54:01
QALLLLPVC

SEQ ID NO: 3600 - protein, 9 aa, Homo sapiens
  Table 1.2; GSG1L2; ENSG00000214978; HLA -A*02:04,HLA-B*35:03
QAVLYIWEL

SEQ ID NO: 3601 - protein, 9 aa, Homo sapiens
  Table 1.2; GSG1L2; ENSG00000214978; HLA -B*39:01
QHSFLEPEA

SEQ ID NO: 3602 - protein, 9 aa, Homo sapiens
  Table 1.2; GSG1L2; ENSG00000214978; HLA -B*13:02
QQALLLLPV

SEQ ID NO: 3603 - protein, 9 aa, Homo sapiens
  Table 1.2; GSG1L2; ENSG00000214978; HLA -A*01:01,HLA-A*29:02
QTWDYGWSY

SEQ ID NO: 3604 - protein, 8 aa, Homo sapiens
  Table 1.2; GSG1L2; ENSG00000214978; HLA -B*08:01
RAKQQQAL

SEQ ID NO: 3605 - protein, 9 aa, Homo sapiens
  Table 1.2; GSG1L2; ENSG00000214978; HLA -A*23:01,HLA-A*24:02
RFTAARLEF

SEQ ID NO: 3606 - protein, 8 aa, Homo sapiens
  Table 1.2; GSG1L2; ENSG00000214978; HLA -B*57:01
RGFHVGLW

SEQ ID NO: 3607 - protein, 9 aa, Homo sapiens
  Table 1.2; GSG1L2; ENSG00000214978; HLA -A*02:01
RMDNNSQAV

SEQ ID NO: 3608 - protein, 11 aa, Homo sapiens
  Table 1.2; GSG1L2; ENSG00000214978; HLA -A*01:01,HLA-A*29:02,HLA-A*30:02
RMDNNSQAVLY

SEQ ID NO: 3609 - protein, 9 aa, Homo sapiens
  Table 1.2; GSG1L2; ENSG00000214978; HLA -A*02:07,HLA-B*57:01
RVDALVAIF

SEQ ID NO: 3610 - protein, 10 aa, Homo sapiens
  Table 1.2; GSG1L2; ENSG00000214978; HLA -A*02:07
RVDALVAIFM

SEQ ID NO: 3611 - protein, 11 aa, Homo sapiens
  Table 1.2; GSG1L2; ENSG00000214978; HLA -A*02:07
RVDALVAIFMV

SEQ ID NO: 3612 - protein, 9 aa, Homo sapiens
  Table 1.2; GSG1L2; ENSG00000214978; HLA -A*68:02,HLA-B*51:01,HLA-C*02:02,HLA-C*12:03
SAILLGSRV

SEQ ID NO: 3613 - protein, 8 aa, Homo sapiens
  Table 1.2; GSG1L2; ENSG00000214978; HLA -A*32:01,HLA-B*08:01,HLA-B*54:01,HLA-B*56:01,HLA-C*16:01
SAMSRFTA

SEQ ID NO: 3614 - protein, 9 aa, Homo sapiens
  Table 1.2; GSG1L2; ENSG00000214978; HLA -A*02:01,HLA-A*02:03,HLA-A*25:01,HLA-A*30:01,HLA-A*32:01, HLA-B*07:02,HLA-B*08:01,HLA-B*37:01,HLA-B*40:02,HLA-B*46:01, HLA-B*54:01,HLA-B*55:01,HLA-B*56:01,HLA-C*01:02,HLA-C*02:02,
  HLA-C*03:03,HLA-C*03:04,HLA-C*07:02,HLA-C*12:03,HLA-C*14:02, HLA-C*16:01,HLA-C*16:02
SAMSRFTAA

SEQ ID NO: 3615 - protein, 10 aa, Homo sapiens
  Table 1.2; GSG1L2; ENSG00000214978; HLA -A*31:01,HLA-A*33:01,HLA-A*33:03
SAMSRFTAAR

SEQ ID NO: 3616 - protein, 9 aa, Homo sapiens
  Table 1.2; GSG1L2; ENSG00000214978; HLA -B*37:01
SESIWKTGA

SEQ ID NO: 3617 - protein, 9 aa, Homo sapiens
  Table 1.2; GSG1L2; ENSG00000214978; HLA -A*03:01,HLA-A*03:02,HLA-A*30:02,HLA-A*32:01,HLA-B*46:01
SLTAVVSSH

SEQ ID NO: 3618 - protein, 10 aa, Homo sapiens
  Table 1.2; GSG1L2; ENSG00000214978; HLA -A*23:01,HLA-A*24:02,HLA-A*25:01,HLA-A*32:01,HLA-B*27:02, HLA-B*44:02,HLA-B*44:03,HLA-B*57:01,HLA-B*58:01
SLTAVVSSHW

SEQ ID NO: 3619 - protein, 10 aa, Homo sapiens
  Table 1.2; GSG1L2; ENSG00000214978; HLA -A*02:04
SQAVLYIWEL

SEQ ID NO: 3620 - protein, 8 aa, Homo sapiens
  Table 1.2; GSG1L2; ENSG00000214978; HLA -A*32:01,HLA-B*37:01
SVSAMSRF

SEQ ID NO: 3621 - protein, 10 aa, Homo sapiens
  Table 1.2; GSG1L2; ENSG00000214978; HLA -A*03:01,HLA-A*03:02,HLA-A*11:01,HLA-A*68:01
TAARLEFTEK

SEQ ID NO: 3622 - protein, 8 aa, Homo sapiens
  Table 1.2; GSG1L2; ENSG00000214978; HLA -A*25:01,HLA-A*32:01,HLA-B*51:01,HLA-B*57:01,HLA-B*58:01
TAVVSSHW

SEQ ID NO: 3623 - protein, 11 aa, Homo sapiens
  Table 1.2; GSG1L2; ENSG00000214978; HLA -A*33:03
TEKQQAQNGSR

SEQ ID NO: 3624 - protein, 9 aa, Homo sapiens
  Table 1.2; GSG1L2; ENSG00000214978; HLA -A*02:01,HLA-A*02:03,HLA-A*02:04,HLA-A*02:07,HLA-A*23:01, HLA-A*68:01,HLA-A*68:02,HLA-B*13:02,HLA-B*27:05
TIFQITVNL

SEQ ID NO: 3625 - protein, 9 aa, Homo sapiens
  Table 1.2; GSG1L2; ENSG00000214978; HLA -A*31:01,HLA-A*33:03,HLA-A*68:01
TSAILLGSR

SEQ ID NO: 3626 - protein, 10 aa, Homo sapiens
  Table 1.2; GSG1L2; ENSG00000214978; HLA -A*68:02
TSAILLGSRV

SEQ ID NO: 3627 - protein, 8 aa, Homo sapiens
  Table 1.2; GSG1L2; ENSG00000214978; HLA -A*68:02
TTIFQITV

SEQ ID NO: 3628 - protein, 10 aa, Homo sapiens
  Table 1.2; GSG1L2; ENSG00000214978; HLA -A*68:02
TTIFQITVNL

SEQ ID NO: 3629 - protein, 9 aa, Homo sapiens
  Table 1.2; GSG1L2; ENSG00000214978; HLA -B*57:01
TVNLGPEDW

SEQ ID NO: 3630 - protein, 9 aa, Homo sapiens
  Table 1.2; GSG1L2; ENSG00000214978; HLA -A*23:01,HLA-A*24:02,HLA-B*51:01
VAHMMYTTI

SEQ ID NO: 3631 - protein, 8 aa, Homo sapiens
  Table 1.2; GSG1L2; ENSG00000214978; HLA -B*18:01,HLA-B*37:01
VDALVAIF

SEQ ID NO: 3632 - protein, 9 aa, Homo sapiens
  Table 1.2; GSG1L2; ENSG00000214978; HLA -B*37:01
VDALVAIFM

SEQ ID NO: 3633 - protein, 9 aa, Homo sapiens
  Table 1.2; GSG1L2; ENSG00000214978; HLA -A*02:01,HLA-A*02:03,HLA-A*02:04,HLA-A*02:07,HLA-B*13:02, HLA-B*55:01
VLAGLLGMV

SEQ ID NO: 3634 - protein, 10 aa, Homo sapiens
  Table 1.2; GSG1L2; ENSG00000214978; HLA -A*02:03
VLAGLLGMVA

SEQ ID NO: 3635 - protein, 9 aa, Homo sapiens
  Table 1.2; GSG1L2; ENSG00000214978; HLA -A*02:07
VLDIVLILT

SEQ ID NO: 3636 - protein, 8 aa, Homo sapiens
  Table 1.2; GSG1L2; ENSG00000214978; HLA -B*51:01
VPAEEQGV

SEQ ID NO: 3637 - protein, 9 aa, Homo sapiens
  Table 1.2; GSG1L2; ENSG00000214978; HLA -B*07:02,HLA-B*35:01,HLA-B*35:03,HLA-B*51:01,HLA-B*55:01, HLA-C*07:02
VPAEEQGVL

SEQ ID NO: 3638 - protein, 10 aa, Homo sapiens
  Table 1.2; GSG1L2; ENSG00000214978; HLA -A*25:01,HLA-B*35:01,HLA-B*57:01
VPAEEQGVLW

SEQ ID NO: 3639 - protein, 10 aa, Homo sapiens
  Table 1.2; GSG1L2; ENSG00000214978; HLA -B*40:02
VSAMSRFTAA

SEQ ID NO: 3640 - protein, 9 aa, Homo sapiens
  Table 1.2; GSG1L2; ENSG00000214978; HLA -A*23:01,HLA-A*24:02,HLA-A*25:01,HLA-A*26:01,HLA-B*46:01, HLA-B*57:01,HLA-B*58:01,HLA-C*02:02
VSVSAMSRF

SEQ ID NO: 3641 - protein, 9 aa, Homo sapiens
  Table 1.2; GSG1L2; ENSG00000214978; HLA -A*02:07
VVPAEEQGV

SEQ ID NO: 3642 - protein, 11 aa, Homo sapiens
  Table 1.2; GSG1L2; ENSG00000214978; HLA -A*25:01,HLA-B*57:01,HLA-B*58:01
VVPAEEQGVLW

SEQ ID NO: 3643 - protein, 10 aa, Homo sapiens
  Table 1.2; GSG1L2; ENSG00000214978; HLA -A*02:07
YIWELGDDKF

SEQ ID NO: 3644 - protein, 11 aa, Homo sapiens
  Table 1.2; GSG1L2; ENSG00000214978; HLA -A*02:01
YIWELGDDKFI

SEQ ID NO: 3645 - protein, 9 aa, Homo sapiens
  Table 1.2; GSG1L2; ENSG00000214978; HLA -A*30:01,HLA-A*68:02,HLA-B*13:02,HLA-B*40:02,HLA-B*51:01, HLA-B*54:01,HLA-C*16:02
YTTIFQITV

SEQ ID NO: 3646 - protein, 11 aa, Homo sapiens
  Table 1.2; GSG1L2; ENSG00000214978; HLA -A*68:02
YTTIFQITVNL

SEQ ID NO: 3647 - protein, 11 aa, Homo sapiens
  Table 1.2; IFNK; ENSG00000147896; HLA -A*29:02
AFELPQEFLQY

SEQ ID NO: 3648 - protein, 10 aa, Homo sapiens
  Table 1.2; IFNK; ENSG00000147896; HLA -A*23:01,HLA-A*24:02,HLA-A*30:02
AFNIFSQHTF

SEQ ID NO: 3649 - protein, 10 aa, Homo sapiens
  Table 1.2; IFNK; ENSG00000147896; HLA -A*23:01
AFYEMSLQAF

SEQ ID NO: 3650 - protein, 9 aa, Homo sapiens
  Table 1.2; IFNK; ENSG00000147896; HLA -B*27:05
ARVPQLSSL

SEQ ID NO: 3651 - protein, 8 aa, Homo sapiens
  Table 1.2; IFNK; ENSG00000147896; HLA -B*51:01
CAWEIVRV

SEQ ID NO: 3652 - protein, 9 aa, Homo sapiens
  Table 1.2; IFNK; ENSG00000147896; HLA -A*33:01
DCNLLNVHL

SEQ ID NO: 3653 - protein, 10 aa, Homo sapiens
  Table 1.2; IFNK; ENSG00000147896; HLA -A*33:01
DCNLLNVHLR

SEQ ID NO: 3654 - protein, 9 aa, Homo sapiens
  Table 1.2; IFNK; ENSG00000147896; HLA -A*33:01,HLA-B*08:01
DIKKAFYEM

SEQ ID NO: 3655 - protein, 9 aa, Homo sapiens
  Table 1.2; IFNK; ENSG00000147896; HLA -A*01:01,HLA-A*25:01,HLA-A*26:01,HLA-A*29:02
ELPQEFLQY

SEQ ID NO: 3656 - protein, 10 aa, Homo sapiens
  Table 1.2; IFNK; ENSG00000147896; HLA -A*29:02,HLA-B*44:02,HLA-B*44:03
FELPQEFLQY

SEQ ID NO: 3657 - protein, 9 aa, Homo sapiens
  Table 1.2; IFNK; ENSG00000147896; HLA -A*23:01,HLA-A*24:02,HLA-C*04:01,HLA-C*14:02
FYEMSLQAF

SEQ ID NO: 3658 - protein, 9 aa, Homo sapiens
  Table 1.2; IFNK; ENSG00000147896; HLA -A*02:01,HLA-A*02:07
GLDQQAEYL

SEQ ID NO: 3659 - protein, 9 aa, Homo sapiens
  Table 1.2; IFNK; ENSG00000147896; HLA -A*02:03,HLA-A*02:04,HLA-B*08:01
HLKQIQIGL

SEQ ID NO: 3660 - protein, 9 aa, Homo sapiens
  Table 1.2; IFNK; ENSG00000147896; HLA -A*32:01,HLA-B*15:01,HLA-B*15:03,HLA-B*37:01,HLA-B*38:01
HLSSMSNSF

SEQ ID NO: 3661 - protein, 9 aa, Homo sapiens
  Table 1.2; IFNK; ENSG00000147896; HLA -A*23:01,HLA-A*24:02,HLA-A*29:02,HLA-B*15:03,HLA-B*18:01, HLA-B*27:02,HLA-B*35:01,HLA-B*46:01,HLA-B*51:01,HLA-B*57:01, HLA-B*58:01,HLA-C*02:02,HLA-C*05:01,HLA-C*12:03,HLA-C*16:02,
  HLA-C*16:04
IAFELPQEF

SEQ ID NO: 3662 - protein, 9 aa, Homo sapiens
  Table 1.2; IFNK; ENSG00000147896; HLA -A*23:01,HLA-A*24:02,HLA-B*46:01,HLA-C*01:02,HLA-C*14:02
IFIAGTLSL

SEQ ID NO: 3663 - protein, 9 aa, Homo sapiens
  Table 1.2; IFNK; ENSG00000147896; HLA -A*24:02,HLA-A*29:02
IFSQHTFKY

SEQ ID NO: 3664 - protein, 9 aa, Homo sapiens
  Table 1.2; IFNK; ENSG00000147896; HLA -A*29:02,HLA-A*30:02,HLA-B*15:03,HLA-B*46:01
IGLDQQAEY

SEQ ID NO: 3665 - protein, 11 aa, Homo sapiens
  Table 1.2; IFNK; ENSG00000147896; HLA -A*26:01,HLA-A*29:02,HLA-A*30:02,HLA-A*32:01,HLA-B*15:01, HLA-B*15:03,HLA-B*46:01,HLA-B*58:01,HLA-C*07:04,HLA-C*16:04
IQIGLDQQAEY

SEQ ID NO: 3666 - protein, 10 aa, Homo sapiens
  Table 1.2; IFNK; ENSG00000147896; HLA -B*07:02,HLA-C*07:02
KPSEARVPQL

SEQ ID NO: 3667 - protein, 9 aa, Homo sapiens
  Table 1.2; IFNK; ENSG00000147896; HLA -A*24:02
KYSDCAWEI

SEQ ID NO: 3668 - protein, 9 aa, Homo sapiens
  Table 1.2; IFNK; ENSG00000147896; HLA -B*49:01
LEILMGIFI

SEQ ID NO: 3669 - protein, 8 aa, Homo sapiens
  Table 1.2; IFNK; ENSG00000147896; HLA -B*35:01
LPQEFLQY

SEQ ID NO: 3670 - protein, 9 aa, Homo sapiens
  Table 1.2; IFNK; ENSG00000147896; HLA -A*03:01,HLA-A*31:01
LQYTQPMKR

SEQ ID NO: 3671 - protein, 9 aa, Homo sapiens
  Table 1.2; IFNK; ENSG00000147896; HLA -B*54:01
MSNSFPVEC

SEQ ID NO: 3672 - protein, 9 aa, Homo sapiens
  Table 1.2; IFNK; ENSG00000147896; HLA -B*18:01,HLA-B*44:03
NENEDMKEM

SEQ ID NO: 3673 - protein, 9 aa, Homo sapiens
  Table 1.2; IFNK; ENSG00000147896; HLA -A*03:01
NIFSQHTFK

SEQ ID NO: 3674 - protein, 10 aa, Homo sapiens
  Table 1.2; IFNK; ENSG00000147896; HLA -A*29:02
NIFSQHTFKY

SEQ ID NO: 3675 - protein, 10 aa, Homo sapiens
  Table 1.2; IFNK; ENSG00000147896; HLA -A*01:01
QIGLDQQAEY

SEQ ID NO: 3676 - protein, 10 aa, Homo sapiens
  Table 1.2; IFNK; ENSG00000147896; HLA -B*13:02
QQAEYLNQCL

SEQ ID NO: 3677 - protein, 8 aa, Homo sapiens
  Table 1.2; IFNK; ENSG00000147896; HLA -B*37:01
RENIAFEL

SEQ ID NO: 3678 - protein, 9 aa, Homo sapiens
  Table 1.2; IFNK; ENSG00000147896; HLA -A*03:01,HLA-A*03:02
RIDNFLKEK

SEQ ID NO: 3679 - protein, 11 aa, Homo sapiens
  Table 1.2; IFNK; ENSG00000147896; HLA -A*31:01
RVPQLSSLELR

SEQ ID NO: 3680 - protein, 9 aa, Homo sapiens
  Table 1.2; IFNK; ENSG00000147896; HLA -A*24:02
RYFHRIDNF

SEQ ID NO: 3681 - protein, 8 aa, Homo sapiens
  Table 1.2; IFNK; ENSG00000147896; HLA -A*30:01,HLA-B*18:01,HLA-B*37:01,HLA-B*40:01
SEARVPQL

SEQ ID NO: 3682 - protein, 11 aa, Homo sapiens
  Table 1.2; IFNK; ENSG00000147896; HLA -A*30:01,HLA-B*40:01
SEARVPQLSSL

SEQ ID NO: 3683 - protein, 9 aa, Homo sapiens
  Table 1.2; IFNK; ENSG00000147896; HLA -A*02:01,HLA-A*02:07
SLDCNLLNV

SEQ ID NO: 3684 - protein, 9 aa, Homo sapiens
  Table 1.2; IFNK; ENSG00000147896; HLA -B*57:01
SSLELRRYF

SEQ ID NO: 3685 - protein, 9 aa, Homo sapiens
  Table 1.2; IFNK; ENSG00000147896; HLA -A*03:01,HLA-A*03:02,HLA-A*11:01,HLA-A*31:01,HLA-A*33:01, HLA-A*33:03,HLA-A*68:01,HLA-B*13:02
STKPDMIQK

SEQ ID NO: 3686 - protein, 9 aa, Homo sapiens
  Table 1.2; IFNK; ENSG00000147896; HLA -B*07:02,HLA-B*35:03,HLA-C*07:02
VPQLSSLEL

SEQ ID NO: 3687 - protein, 8 aa, Homo sapiens
  Table 1.2; IFNK; ENSG00000147896; HLA -A*30:01,HLA-B*18:01,HLA-B*37:01,HLA-B*44:02,HLA-B*44:03, HLA-B*49:01
YEMSLQAF

SEQ ID NO: 3688 - protein, 9 aa, Homo sapiens
  Table 1.2; IFNK; ENSG00000147896; HLA -A*24:02,HLA-A*29:02
YFYKFTALF

SEQ ID NO: 3689 - protein, 9 aa, Homo sapiens
  Table 1.2; IFNK; ENSG00000147896; HLA -A*24:02
YYFYKFTAL

SEQ ID NO: 3690 - protein, 10 aa, Homo sapiens
  Table 1.2; IL22RA2; ENSG00000164485; HLA -A*25:01,HLA-A*26:01,HLA-A*32:01,HLA-B*27:02,HLA-B*44:03, HLA-B*57:01,HLA-B*58:01,HLA-C*16:04
AASAGSYSEW

SEQ ID NO: 3691 - protein, 8 aa, Homo sapiens
  Table 1.2; IL22RA2; ENSG00000164485; HLA -A*30:01,HLA-B*37:01,HLA-B*40:01,HLA-B*40:02,HLA-B*44:02, HLA-B*44:03,HLA-B*49:01
AEIYQPML

SEQ ID NO: 3692 - protein, 10 aa, Homo sapiens
  Table 1.2; IL22RA2; ENSG00000164485; HLA -B*38:01
AHRAVEIEAL

SEQ ID NO: 3693 - protein, 9 aa, Homo sapiens
  Table 1.2; IL22RA2; ENSG00000164485; HLA -A*25:01,HLA-A*26:01,HLA-A*29:02,HLA-A*30:02,HLA-A*32:01, HLA-B*15:01,HLA-B*15:03,HLA-B*46:01,HLA-C*07:04,HLA-C*14:02
ALTGNSSVY

SEQ ID NO: 3694 - protein, 8 aa, Homo sapiens
  Table 1.2; IL22RA2; ENSG00000164485; HLA -A*30:02,HLA-A*32:01,HLA-B*15:01
ALTPHSSY

SEQ ID NO: 3695 - protein, 9 aa, Homo sapiens
  Table 1.2; IL22RA2; ENSG00000164485; HLA -A*01:01,HLA-A*25:01,HLA-A*26:01,HLA-A*30:02,HLA-A*32:01, HLA-B*15:01,HLA-B*44:02,HLA-B*44:03,HLA-B*46:01,HLA-B*57:01, HLA-B*58:01,HLA-C*02:02,HLA-C*12:03,HLA-C*16:04
ASAGSYSEW

SEQ ID NO: 3696 - protein, 9 aa, Homo sapiens
  Table 1.2; IL22RA2; ENSG00000164485; HLA -C*06:02
CNFPGCRTL

SEQ ID NO: 3697 - protein, 9 aa, Homo sapiens
  Table 1.2; IL22RA2; ENSG00000164485; HLA -A*03:02,HLA-A*11:01
CSMKSSHQK

SEQ ID NO: 3698 - protein, 9 aa, Homo sapiens
  Table 1.2; IL22RA2; ENSG00000164485; HLA -A*03:02,HLA-A*11:01,HLA-A*26:01,HLA-A*31:01,HLA-A*33:01, HLA-A*33:03,HLA-A*68:01,HLA-C*07:06
DIQEPYYGR

SEQ ID NO: 3699 - protein, 10 aa, Homo sapiens
  Table 1.2; IL22RA2; ENSG00000164485; HLA -A*68:01,HLA-A*68:02
DIQEPYYGRV

SEQ ID NO: 3700 - protein, 11 aa, Homo sapiens
  Table 1.2; IL22RA2; ENSG00000164485; HLA -A*33:01,HLA-A*68:01
DIQEPYYGRVR

SEQ ID NO: 3701 - protein, 10 aa, Homo sapiens
  Table 1.2; IL22RA2; ENSG00000164485; HLA -B*51:01
DPPVMNITQV

SEQ ID NO: 3702 - protein, 8 aa, Homo sapiens
  Table 1.2; IL22RA2; ENSG00000164485; HLA -A*33:01,HLA-A*33:03
DYYELLYR

SEQ ID NO: 3703 - protein, 9 aa, Homo sapiens
  Table 1.2; IL22RA2; ENSG00000164485; HLA -A*23:01,HLA-A*25:01,HLA-A*26:01,HLA-A*29:02,HLA-A*30:02, HLA-A*32:01,HLA-A*33:01,HLA-A*33:03,HLA-A*68:01,HLA-B*08:01, HLA-B*15:01,HLA-B*15:03,HLA-B*18:01,HLA-B*35:01,HLA-B*35:03,
  HLA-B*39:01,HLA-B*44:02,HLA-B*44:03,HLA-B*46:01,HLA-B*51:01, HLA-B*54:01,HLA-B*55:01,HLA-B*58:01,HLA-C*01:02,HLA-C*02:02, HLA-C*03:03,HLA-C*07:06,HLA-C*12:03,HLA-C*14:02,HLA-C*16:01, HLA-C*16:04
EALTPHSSY

SEQ ID NO: 3704 - protein, 11 aa, Homo sapiens
  Table 1.2; IL22RA2; ENSG00000164485; HLA -A*01:01,HLA-A*25:01,HLA-A*26:01,HLA-A*30:02
EIEALTPHSSY

SEQ ID NO: 3705 - protein, 9 aa, Homo sapiens
  Table 1.2; IL22RA2; ENSG00000164485; HLA -A*26:01,HLA-A*33:01,HLA-A*33:03,HLA-A*68:01,HLA-A*68:02, HLA-C*07:06
EIYQPMLDR

SEQ ID NO: 3706 - protein, 10 aa, Homo sapiens
  Table 1.2; IL22RA2; ENSG00000164485; HLA -A*68:02
EIYQPMLDRR

SEQ ID NO: 3707 - protein, 9 aa, Homo sapiens
  Table 1.2; IL22RA2; ENSG00000164485; HLA -B*15:03
EKNVSIEDY

SEQ ID NO: 3708 - protein, 9 aa, Homo sapiens
  Table 1.2; IL22RA2; ENSG00000164485; HLA -A*24:02
ELLYRVFII

SEQ ID NO: 3709 - protein, 9 aa, Homo sapiens
  Table 1.2; IL22RA2; ENSG00000164485; HLA -B*51:01,HLA-B*54:01,HLA-B*55:01,HLA-B*56:01
EPYYGRVRA

SEQ ID NO: 3710 - protein, 10 aa, Homo sapiens
  Table 1.2; IL22RA2; ENSG00000164485; HLA -B*54:01,HLA-B*55:01,HLA-B*56:01
EPYYGRVRAA

SEQ ID NO: 3711 - protein, 10 aa, Homo sapiens
  Table 1.2; IL22RA2; ENSG00000164485; HLA -A*33:03
EQKVYEGAHR

SEQ ID NO: 3712 - protein, 10 aa, Homo sapiens
  Table 1.2; IL22RA2; ENSG00000164485; HLA -A*24:02,HLA-A*33:03,HLA-B*57:01
ESLKPQRVQF

SEQ ID NO: 3713 - protein, 9 aa, Homo sapiens
  Table 1.2; IL22RA2; ENSG00000164485; HLA -A*01:01,HLA-A*25:01,HLA-A*26:01,HLA-A*33:03,HLA-B*39:01
ETKIDPPVM

SEQ ID NO: 3714 - protein, 9 aa, Homo sapiens
  Table 1.2; IL22RA2; ENSG00000164485; HLA -A*01:01,HLA-A*11:01,HLA-A*25:01,HLA-A*26:01,HLA-A*29:02, HLA-A*30:02,HLA-A*33:01,HLA-A*33:03,HLA-A*68:01,HLA-B*35:01, HLA-C*07:06
ETSDIQEPY

SEQ ID NO: 3715 - protein, 10 aa, Homo sapiens
  Table 1.2; IL22RA2; ENSG00000164485; HLA -A*01:01,HLA-A*25:01,HLA-A*26:01,HLA-A*29:02,HLA-A*30:02, HLA-A*68:01,HLA-A*68:02
ETSDIQEPYY

SEQ ID NO: 3716 - protein, 10 aa, Homo sapiens
  Table 1.2; IL22RA2; ENSG00000164485; HLA -A*29:02
FFLTGVAGTQ

SEQ ID NO: 3717 - protein, 9 aa, Homo sapiens
  Table 1.2; IL22RA2; ENSG00000164485; HLA -A*03:01,HLA-A*11:01
FIINNSLEK

SEQ ID NO: 3718 - protein, 10 aa, Homo sapiens
  Table 1.2; IL22RA2; ENSG00000164485; HLA -A*02:01,HLA-A*02:03,HLA-A*02:04,HLA-A*02:07
FLISFFLTGV

SEQ ID NO: 3719 - protein, 9 aa, Homo sapiens
  Table 1.2; IL22RA2; ENSG00000164485; HLA -A*26:01,HLA-C*12:03
FLTGVAGTQ

SEQ ID NO: 3720 - protein, 9 aa, Homo sapiens
  Table 1.2; IL22RA2; ENSG00000164485; HLA -A*02:07
FTPWWETKI

SEQ ID NO: 3721 - protein, 10 aa, Homo sapiens
  Table 1.2; IL22RA2; ENSG00000164485; HLA -A*29:02,HLA-A*30:02
GNSSVYFVQY

SEQ ID NO: 3722 - protein, 11 aa, Homo sapiens
  Table 1.2; IL22RA2; ENSG00000164485; HLA -C*16:04
GRALTGNSSVY

SEQ ID NO: 3723 - protein, 11 aa, Homo sapiens
  Table 1.2; IL22RA2; ENSG00000164485; HLA -A*30:02,HLA-B*27:02,HLA-C*16:04
GRVRAASAGSY

SEQ ID NO: 3724 - protein, 9 aa, Homo sapiens
  Table 1.2; IL22RA2; ENSG00000164485; HLA -A*32:01,HLA-B*58:01,HLA-C*01:02
GTQSTHESL

SEQ ID NO: 3725 - protein, 10 aa, Homo sapiens
  Table 1.2; IL22RA2; ENSG00000164485; HLA -A*03:01,HLA-A*03:02,HLA-A*11:01
GTQSTHESLK

SEQ ID NO: 3726 - protein, 9 aa, Homo sapiens
  Table 1.2; IL22RA2; ENSG00000164485; HLA -B*15:01
GVAGTQSTH

SEQ ID NO: 3727 - protein, 9 aa, Homo sapiens
  Table 1.2; IL22RA2; ENSG00000164485; HLA -A*29:02,HLA-A*30:02,HLA-B*35:01
HAPNLPYRY

SEQ ID NO: 3728 - protein, 9 aa, Homo sapiens
  Table 1.2; IL22RA2; ENSG00000164485; HLA -B*37:01
HESLKPQRV

SEQ ID NO: 3729 - protein, 9 aa, Homo sapiens
  Table 1.2; IL22RA2; ENSG00000164485; HLA -B*27:02,HLA-B*27:05,HLA-B*38:01,HLA-B*39:01
HRAVEIEAL

SEQ ID NO: 3730 - protein, 8 aa, Homo sapiens
  Table 1.2; IL22RA2; ENSG00000164485; HLA -B*37:01,HLA-B*51:01
IDPPVMNI

SEQ ID NO: 3731 - protein, 10 aa, Homo sapiens
  Table 1.2; IL22RA2; ENSG00000164485; HLA -A*01:01,HLA-A*25:01,HLA-A*26:01,HLA-A*30:01,HLA-A*30:02, HLA-B*15:01,HLA-B*15:03,HLA-B*18:01,HLA-B*27:02,HLA-B*37:01, HLA-B*40:01,HLA-B*44:02,HLA-B*44:03,HLA-B*49:01,HLA-C*16:04
IEALTPHSSY

SEQ ID NO: 3732 - protein, 9 aa, Homo sapiens
  Table 1.2; IL22RA2; ENSG00000164485; HLA -A*01:01,HLA-B*18:01,HLA-B*44:02,HLA-B*44:03
IEDYYELLY

SEQ ID NO: 3733 - protein, 11 aa, Homo sapiens
  Table 1.2; IL22RA2; ENSG00000164485; HLA -A*03:02
IINNSLEKEQK

SEQ ID NO: 3734 - protein, 9 aa, Homo sapiens
  Table 1.2; IL22RA2; ENSG00000164485; HLA -A*01:01,HLA-A*03:01,HLA-A*29:02,HLA-A*30:02,HLA-B*15:01, HLA-B*46:01
ILHAPNLPY

SEQ ID NO: 3735 - protein, 11 aa, Homo sapiens
  Table 1.2; IL22RA2; ENSG00000164485; HLA -A*29:02,HLA-A*30:02
ILHAPNLPYRY

SEQ ID NO: 3736 - protein, 9 aa, Homo sapiens
  Table 1.2; IL22RA2; ENSG00000164485; HLA -C*03:03,HLA-C*03:04
ITQVNGSLL

SEQ ID NO: 3737 - protein, 9 aa, Homo sapiens
  Table 1.2; IL22RA2; ENSG00000164485; HLA -A*24:02,HLA-A*31:01
IYQPMLDRR

SEQ ID NO: 3738 - protein, 10 aa, Homo sapiens
  Table 1.2; IL22RA2; ENSG00000164485; HLA -B*40:01
KEDCWGTQEL

SEQ ID NO: 3739 - protein, 10 aa, Homo sapiens
  Table 1.2; IL22RA2; ENSG00000164485; HLA -A*30:02,HLA-B*44:02,HLA-B*44:03
KEKNVSIEDY

SEQ ID NO: 3740 - protein, 11 aa, Homo sapiens
  Table 1.2; IL22RA2; ENSG00000164485; HLA -A*30:02,HLA-B*44:02,HLA-B*44:03
KEKNVSIEDYY

SEQ ID NO: 3741 - protein, 9 aa, Homo sapiens
  Table 1.2; IL22RA2; ENSG00000164485; HLA -B*40:02
KEQKVYEGA

SEQ ID NO: 3742 - protein, 9 aa, Homo sapiens
  Table 1.2; IL22RA2; ENSG00000164485; HLA -A*01:01,HLA-A*02:01,HLA-A*02:03,HLA-A*02:04,HLA-A*02:07, HLA-A*03:01,HLA-A*03:02,HLA-A*30:01,HLA-A*31:01,HLA-A*32:01, HLA-B*13:02,HLA-B*38:01,HLA-B*49:01,HLA-B*58:01,HLA-C*05:01
KIDPPVMNI

SEQ ID NO: 3743 - protein, 9 aa, Homo sapiens
  Table 1.2; IL22RA2; ENSG00000164485; HLA -A*29:02,HLA-A*30:02
KNVSIEDYY

SEQ ID NO: 3744 - protein, 8 aa, Homo sapiens
  Table 1.2; IL22RA2; ENSG00000164485; HLA -A*31:01
KVYEGAHR

SEQ ID NO: 3745 - protein, 9 aa, Homo sapiens
  Table 1.2; IL22RA2; ENSG00000164485; HLA -B*55:01
KVYEGAHRA

SEQ ID NO: 3746 - protein, 10 aa, Homo sapiens
  Table 1.2; IL22RA2; ENSG00000164485; HLA -A*02:03,HLA-A*03:01
KVYEGAHRAV

SEQ ID NO: 3747 - protein, 9 aa, Homo sapiens
  Table 1.2; IL22RA2; ENSG00000164485; HLA -B*57:01
LAKYGQRQW

SEQ ID NO: 3748 - protein, 8 aa, Homo sapiens
  Table 1.2; IL22RA2; ENSG00000164485; HLA -B*18:01
LEKEQKVY

SEQ ID NO: 3749 - protein, 10 aa, Homo sapiens
  Table 1.2; IL22RA2; ENSG00000164485; HLA -A*29:02,HLA-B*57:01
LHAPNLPYRY

SEQ ID NO: 3750 - protein, 9 aa, Homo sapiens
  Table 1.2; IL22RA2; ENSG00000164485; HLA -A*02:01,HLA-A*02:03,HLA-A*02:04,HLA-A*02:07,HLA-A*68:02
LISFFLTGV

SEQ ID NO: 3751 - protein, 9 aa, Homo sapiens
  Table 1.2; IL22RA2; ENSG00000164485; HLA -B*15:03
LQWQPGRAL

SEQ ID NO: 3752 - protein, 8 aa, Homo sapiens
  Table 1.2; IL22RA2; ENSG00000164485; HLA -A*01:01,HLA-B*39:01,HLA-C*12:03
LTGNSSVY

SEQ ID NO: 3753 - protein, 9 aa, Homo sapiens
  Table 1.2; IL22RA2; ENSG00000164485; HLA -A*02:04
LVILHAPNL

SEQ ID NO: 3754 - protein, 9 aa, Homo sapiens
  Table 1.2; IL22RA2; ENSG00000164485; HLA -A*01:01,HLA-A*29:02,HLA-A*30:02,HLA-B*35:01,HLA-C*16:01
NSSVYFVQY

SEQ ID NO: 3755 - protein, 9 aa, Homo sapiens
  Table 1.2; IL22RA2; ENSG00000164485; HLA -A*31:01
PQRVQFQSR

SEQ ID NO: 3756 - protein, 11 aa, Homo sapiens
  Table 1.2; IL22RA2; ENSG00000164485; HLA -B*57:01
QSRNFHNILQW

SEQ ID NO: 3757 - protein, 9 aa, Homo sapiens
  Table 1.2; IL22RA2; ENSG00000164485; HLA -A*25:01,HLA-B*13:02
QVNGSLLVI

SEQ ID NO: 3758 - protein, 8 aa, Homo sapiens
  Table 1.2; IL22RA2; ENSG00000164485; HLA -A*30:02,HLA-B*46:01,HLA-B*58:01
RAASAGSY

SEQ ID NO: 3759 - protein, 11 aa, Homo sapiens
  Table 1.2; IL22RA2; ENSG00000164485; HLA -A*25:01,HLA-A*30:02,HLA-A*32:01,HLA-B*44:02,HLA-B*44:03, HLA-B*57:01,HLA-B*58:01,HLA-C*16:04
RAASAGSYSEW

SEQ ID NO: 3760 - protein, 10 aa, Homo sapiens
  Table 1.2; IL22RA2; ENSG00000164485; HLA -A*23:01,HLA-A*30:02,HLA-B*15:01,HLA-B*15:03,HLA-B*46:01, HLA-B*58:01
RALTGNSSVY

SEQ ID NO: 3761 - protein, 11 aa, Homo sapiens
  Table 1.2; IL22RA2; ENSG00000164485; HLA -B*57:01,HLA-B*58:01
RALTGNSSVYF

SEQ ID NO: 3762 - protein, 9 aa, Homo sapiens
  Table 1.2; IL22RA2; ENSG00000164485; HLA -B*57:01
RNFHNILQW

SEQ ID NO: 3763 - protein, 9 aa, Homo sapiens
  Table 1.2; IL22RA2; ENSG00000164485; HLA -A*03:01,HLA-A*31:01
RTLAKYGQR

SEQ ID NO: 3764 - protein, 11 aa, Homo sapiens
  Table 1.2; IL22RA2; ENSG00000164485; HLA -B*57:01
RTLAKYGQRQW

SEQ ID NO: 3765 - protein, 9 aa, Homo sapiens
  Table 1.2; IL22RA2; ENSG00000164485; HLA -A*02:04,HLA-A*32:01,HLA-A*68:02,HLA-B*07:02,HLA-B*27:05, HLA-B*58:01
RVFIINNSL

SEQ ID NO: 3766 - protein, 11 aa, Homo sapiens
  Table 1.2; IL22RA2; ENSG00000164485; HLA -A*03:01
RVFIINNSLEK

SEQ ID NO: 3767 - protein, 9 aa, Homo sapiens
  Table 1.2; IL22RA2; ENSG00000164485; HLA -A*32:01
RVQFQSRNF

SEQ ID NO: 3768 - protein, 10 aa, Homo sapiens
  Table 1.2; IL22RA2; ENSG00000164485; HLA -A*30:02,HLA-A*32:01,HLA-B*15:01,HLA-B*15:03,HLA-B*46:01
RVRAASAGSY

SEQ ID NO: 3769 - protein, 8 aa, Homo sapiens
  Table 1.2; IL22RA2; ENSG00000164485; HLA -A*25:01,HLA-A*32:01,HLA-B*58:01
SAGSYSEW

SEQ ID NO: 3770 - protein, 8 aa, Homo sapiens
  Table 1.2; IL22RA2; ENSG00000164485; HLA -B*18:01
SDIQEPYY

SEQ ID NO: 3771 - protein, 10 aa, Homo sapiens
  Table 1.2; IL22RA2; ENSG00000164485; HLA -A*33:01
SDIQEPYYGR

SEQ ID NO: 3772 - protein, 10 aa, Homo sapiens
  Table 1.2; IL22RA2; ENSG00000164485; HLA -A*30:02,HLA-B*18:01,HLA-B*27:02,HLA-B*44:02,HLA-B*44:03
SETSDIQEPY

SEQ ID NO: 3773 - protein, 11 aa, Homo sapiens
  Table 1.2; IL22RA2; ENSG00000164485; HLA -A*30:02,HLA-B*44:02,HLA-B*44:03
SETSDIQEPYY

SEQ ID NO: 3774 - protein, 9 aa, Homo sapiens
  Table 1.2; IL22RA2; ENSG00000164485; HLA -B*18:01,HLA-B*44:02,HLA-B*44:03
SEWSMTPRF

SEQ ID NO: 3775 - protein, 9 aa, Homo sapiens
  Table 1.2; IL22RA2; ENSG00000164485; HLA -A*02:07
SIEDYYELL

SEQ ID NO: 3776 - protein, 10 aa, Homo sapiens
  Table 1.2; IL22RA2; ENSG00000164485; HLA -A*01:01,HLA-A*29:02
SIEDYYELLY

SEQ ID NO: 3777 - protein, 9 aa, Homo sapiens
  Table 1.2; IL22RA2; ENSG00000164485; HLA -A*01:01,HLA-A*30:02,HLA-B*15:01,HLA-B*15:03,HLA-C*07:04
SLEKEQKVY

SEQ ID NO: 3778 - protein, 9 aa, Homo sapiens
  Table 1.2; IL22RA2; ENSG00000164485; HLA -A*32:01,HLA-B*08:01,HLA-B*15:01,HLA-B*37:01,HLA-B*46:01
SLKPQRVQF

SEQ ID NO: 3779 - protein, 11 aa, Homo sapiens
  Table 1.2; IL22RA2; ENSG00000164485; HLA -A*02:04
SLLVILHAPNL

SEQ ID NO: 3780 - protein, 9 aa, Homo sapiens
  Table 1.2; IL22RA2; ENSG00000164485; HLA -A*24:02
SMTPRFTPW

SEQ ID NO: 3781 - protein, 8 aa, Homo sapiens
  Table 1.2; IL22RA2; ENSG00000164485; HLA -B*15:01
SSVYFVQY

SEQ ID NO: 3782 - protein, 9 aa, Homo sapiens
  Table 1.2; IL22RA2; ENSG00000164485; HLA -A*03:02,HLA-A*11:01
SSVYFVQYK

SEQ ID NO: 3783 - protein, 9 aa, Homo sapiens
  Table 1.2; IL22RA2; ENSG00000164485; HLA -B*13:02
SSYCVVAEI

SEQ ID NO: 3784 - protein, 9 aa, Homo sapiens
  Table 1.2; IL22RA2; ENSG00000164485; HLA -A*02:07,HLA-A*68:02,HLA-B*13:02
SVYFVQYKI

SEQ ID NO: 3785 - protein, 9 aa, Homo sapiens
  Table 1.2; IL22RA2; ENSG00000164485; HLA -A*29:02
SYCVVAEIY

SEQ ID NO: 3786 - protein, 10 aa, Homo sapiens
  Table 1.2; IL22RA2; ENSG00000164485; HLA -A*31:01,HLA-A*33:03
SYSEWSMTPR

SEQ ID NO: 3787 - protein, 11 aa, Homo sapiens
  Table 1.2; IL22RA2; ENSG00000164485; HLA -A*24:02
SYSEWSMTPRF

SEQ ID NO: 3788 - protein, 9 aa, Homo sapiens
  Table 1.2; IL22RA2; ENSG00000164485; HLA -B*13:02
TGNSSVYFV

SEQ ID NO: 3789 - protein, 11 aa, Homo sapiens
  Table 1.2; IL22RA2; ENSG00000164485; HLA -A*30:02
TGNSSVYFVQY

SEQ ID NO: 3790 - protein, 10 aa, Homo sapiens
  Table 1.2; IL22RA2; ENSG00000164485; HLA -B*38:01
THESLKPQRV

SEQ ID NO: 3791 - protein, 8 aa, Homo sapiens
  Table 1.2; IL22RA2; ENSG00000164485; HLA -B*15:03
TKIDPPVM

SEQ ID NO: 3792 - protein, 9 aa, Homo sapiens
  Table 1.2; IL22RA2; ENSG00000164485; HLA -B*51:01,HLA-B*54:01,HLA-B*56:01
TPHSSYCVV

SEQ ID NO: 3793 - protein, 10 aa, Homo sapiens
  Table 1.2; IL22RA2; ENSG00000164485; HLA -B*54:01,HLA-B*56:01
TPHSSYCVVA

SEQ ID NO: 3794 - protein, 8 aa, Homo sapiens
  Table 1.2; IL22RA2; ENSG00000164485; HLA -B*37:01,HLA-B*38:01,HLA-B*39:01
TQSTHESL

SEQ ID NO: 3795 - protein, 8 aa, Homo sapiens
  Table 1.2; IL22RA2; ENSG00000164485; HLA -B*39:01
TQVNGSLL

SEQ ID NO: 3796 - protein, 9 aa, Homo sapiens
  Table 1.2; IL22RA2; ENSG00000164485; HLA -B*13:02,HLA-B*38:01,HLA-B*39:01,HLA-B*49:01
TQVNGSLLV

SEQ ID NO: 3797 - protein, 10 aa, Homo sapiens
  Table 1.2; IL22RA2; ENSG00000164485; HLA -B*13:02,HLA-B*39:01
TQVNGSLLVI

SEQ ID NO: 3798 - protein, 8 aa, Homo sapiens
  Table 1.2; IL22RA2; ENSG00000164485; HLA -A*01:01
TSDIQEPY

SEQ ID NO: 3799 - protein, 9 aa, Homo sapiens
  Table 1.2; IL22RA2; ENSG00000164485; HLA -A*01:01,HLA-A*30:02
TSDIQEPYY

SEQ ID NO: 3800 - protein, 11 aa, Homo sapiens
  Table 1.2; IL22RA2; ENSG00000164485; HLA -A*31:01,HLA-A*33:01,HLA-A*68:01
TSDIQEPYYGR

SEQ ID NO: 3801 - protein, 11 aa, Homo sapiens
  Table 1.2; IL22RA2; ENSG00000164485; HLA -A*01:01
TSETSDIQEPY

SEQ ID NO: 3802 - protein, 9 aa, Homo sapiens
  Table 1.2; IL22RA2; ENSG00000164485; HLA -B*35:03
VAEIYQPML

SEQ ID NO: 3803 - protein, 8 aa, Homo sapiens
  Table 1.2; IL22RA2; ENSG00000164485; HLA -B*18:01,HLA-B*49:01
VEIEALTP

SEQ ID NO: 3804 - protein, 9 aa, Homo sapiens
  Table 1.2; IL22RA2; ENSG00000164485; HLA -B*18:01,HLA-B*40:02,HLA-B*46:01,HLA-B*49:01
VEIEALTPH

SEQ ID NO: 3805 - protein, 8 aa, Homo sapiens
  Table 1.2; IL22RA2; ENSG00000164485; HLA -A*23:01,HLA-B*08:01,HLA-C*01:02,HLA-C*14:02
VFIINNSL

SEQ ID NO: 3806 - protein, 10 aa, Homo sapiens
  Table 1.2; IL22RA2; ENSG00000164485; HLA -A*03:01,HLA-A*29:02
VILHAPNLPY

SEQ ID NO: 3807 - protein, 8 aa, Homo sapiens
  Table 1.2; IL22RA2; ENSG00000164485; HLA -B*15:01,HLA-B*15:03
VQFQSRNF

SEQ ID NO: 3808 - protein, 9 aa, Homo sapiens
  Table 1.2; IL22RA2; ENSG00000164485; HLA -A*30:02,HLA-A*32:01,HLA-B*15:03,HLA-B*27:02,HLA-B*27:05, HLA-B*39:01,HLA-C*16:04
VRAASAGSY

SEQ ID NO: 3809 - protein, 9 aa, Homo sapiens
  Table 1.2; IL22RA2; ENSG00000164485; HLA -A*02:07,HLA-A*23:01,HLA-B*27:05,HLA-B*35:03,HLA-B*46:01, HLA-B*58:01,HLA-C*03:03,HLA-C*03:04
VSIEDYYEL

SEQ ID NO: 3810 - protein, 11 aa, Homo sapiens
  Table 1.2; IL22RA2; ENSG00000164485; HLA -A*01:01
VSIEDYYELLY

SEQ ID NO: 3811 - protein, 9 aa, Homo sapiens
  Table 1.2; IL22RA2; ENSG00000164485; HLA -A*01:01,HLA-A*02:01,HLA-A*02:07,HLA-A*03:01,HLA-A*03:02, HLA-A*11:01,HLA-A*25:01,HLA-A*26:01,HLA-A*29:02,HLA-A*31:01, HLA-A*32:01,HLA-A*33:03,HLA-A*68:01,HLA-A*68:02,HLA-B*27:05,
  HLA-B*35:01,HLA-B*35:03,HLA-B*46:01,HLA-C*01:02,HLA-C*02:02, HLA-C*03:04,HLA-C*07:04,HLA-C*07:06,HLA-C*12:03,HLA-C*16:04
VVAEIYQPM

SEQ ID NO: 3812 - protein, 10 aa, Homo sapiens
  Table 1.2; IL22RA2; ENSG00000164485; HLA -A*02:01,HLA-A*02:04,HLA-A*02:07,HLA-A*23:01,HLA-A*68:02
VVAEIYQPML

SEQ ID NO: 3813 - protein, 9 aa, Homo sapiens
  Table 1.2; IL22RA2; ENSG00000164485; HLA -A*32:01,HLA-C*06:02
VYEGAHRAV

SEQ ID NO: 3814 - protein, 11 aa, Homo sapiens
  Table 1.2; IL22RA2; ENSG00000164485; HLA -A*24:02
VYEGAHRAVEI

SEQ ID NO: 3815 - protein, 8 aa, Homo sapiens
  Table 1.2; IL22RA2; ENSG00000164485; HLA -A*23:01,HLA-A*24:02
VYFVQYKI

SEQ ID NO: 3816 - protein, 10 aa, Homo sapiens
  Table 1.2; IL22RA2; ENSG00000164485; HLA -A*24:02
VYFVQYKIMF

SEQ ID NO: 3817 - protein, 9 aa, Homo sapiens
  Table 1.2; IL22RA2; ENSG00000164485; HLA -B*49:01
WETKIDPPV

SEQ ID NO: 3818 - protein, 8 aa, Homo sapiens
  Table 1.2; IL22RA2; ENSG00000164485; HLA -B*46:01
YCVVAEIY

SEQ ID NO: 3819 - protein, 8 aa, Homo sapiens
  Table 1.2; IL22RA2; ENSG00000164485; HLA -B*37:01,HLA-B*49:01
YEGAHRAV

SEQ ID NO: 3820 - protein, 9 aa, Homo sapiens
  Table 1.2; IL22RA2; ENSG00000164485; HLA -A*24:02
YFVQYKIMF

SEQ ID NO: 3821 - protein, 9 aa, Homo sapiens
  Table 1.2; IL22RA2; ENSG00000164485; HLA -B*08:01,HLA-B*54:01
YGRVRAASA

SEQ ID NO: 3822 - protein, 9 aa, Homo sapiens
  Table 1.2; IL22RA2; ENSG00000164485; HLA -A*02:03,HLA-A*30:01,HLA-A*32:01,HLA-B*08:01,HLA-B*13:02, HLA-B*38:01,HLA-B*40:02
YQKEKNVSI

SEQ ID NO: 3823 - protein, 9 aa, Homo sapiens
  Table 1.2; IL22RA2; ENSG00000164485; HLA -A*24:02,HLA-A*29:02
YYELLYRVF

SEQ ID NO: 3824 - protein, 9 aa, Homo sapiens
  Table 1.2; INSL4; ENSG00000120211; HLA -A*02:04
AIWLLLSQL

SEQ ID NO: 3825 - protein, 8 aa, Homo sapiens
  Table 1.2; INSL4; ENSG00000120211; HLA -A*32:01,HLA-B*46:01
ALGTTSEF

SEQ ID NO: 3826 - protein, 9 aa, Homo sapiens
  Table 1.2; INSL4; ENSG00000120211; HLA -B*13:02
ALGTTSEFI

SEQ ID NO: 3827 - protein, 9 aa, Homo sapiens
  Table 1.2; INSL4; ENSG00000120211; HLA -B*38:01,HLA-B*40:01
CDDGTSVKL

SEQ ID NO: 3828 - protein, 11 aa, Homo sapiens
  Table 1.2; INSL4; ENSG00000120211; HLA -B*56:01
CPMPEKTFTTT

SEQ ID NO: 3829 - protein, 8 aa, Homo sapiens
  Table 1.2; INSL4; ENSG00000120211; HLA -B*18:01
DDGTSVKL

SEQ ID NO: 3830 - protein, 8 aa, Homo sapiens
  Table 1.2; INSL4; ENSG00000120211; HLA -B*51:01
DPFCCEVI

SEQ ID NO: 3831 - protein, 10 aa, Homo sapiens
  Table 1.2; INSL4; ENSG00000120211; HLA -A*23:01,HLA-A*24:02
EFIPNLSPEL

SEQ ID NO: 3832 - protein, 9 aa, Homo sapiens
  Table 1.2; INSL4; ENSG00000120211; HLA -A*33:03
EMVSTSNNK

SEQ ID NO: 3833 - protein, 8 aa, Homo sapiens
  Table 1.2; INSL4; ENSG00000120211; HLA -A*33:03
ESLAAELR

SEQ ID NO: 3834 - protein, 10 aa, Homo sapiens
  Table 1.2; INSL4; ENSG00000120211; HLA -A*25:01,HLA-A*26:01,HLA-A*68:02
EVICDDGTSV

SEQ ID NO: 3835 - protein, 11 aa, Homo sapiens
  Table 1.2; INSL4; ENSG00000120211; HLA -A*26:01,HLA-A*68:01
EVICDDGTSVK

SEQ ID NO: 3836 - protein, 9 aa, Homo sapiens
  Table 1.2; INSL4; ENSG00000120211; HLA -A*02:01,HLA-A*02:04,HLA-A*02:07,HLA-A*23:01,HLA-A*24:02, HLA-A*26:01,HLA-A*68:02,HLA-B*35:03,HLA-B*58:01,HLA-C*01:02
FIPNLSPEL

SEQ ID NO: 3837 - protein, 8 aa, Homo sapiens
  Table 1.2; INSL4; ENSG00000120211; HLA -A*32:01
FTTTPGGW

SEQ ID NO: 3838 - protein, 10 aa, Homo sapiens
  Table 1.2; INSL4; ENSG00000120211; HLA -A*01:01,HLA-A*68:02
FTTTPGGWLL

SEQ ID NO: 3839 - protein, 10 aa, Homo sapiens
  Table 1.2; INSL4; ENSG00000120211; HLA -A*30:02,HLA-B*15:01,HLA-B*15:03
GQALGTTSEF

SEQ ID NO: 3840 - protein, 11 aa, Homo sapiens
  Table 1.2; INSL4; ENSG00000120211; HLA -B*13:02
GQALGTTSEFI

SEQ ID NO: 3841 - protein, 10 aa, Homo sapiens
  Table 1.2; INSL4; ENSG00000120211; HLA -A*02:04,HLA-A*11:01,HLA-A*68:02
GTTSEFIPNL

SEQ ID NO: 3842 - protein, 8 aa, Homo sapiens
  Table 1.2; INSL4; ENSG00000120211; HLA -C*05:01
ICDDGTSV

SEQ ID NO: 3843 - protein, 10 aa, Homo sapiens
  Table 1.2; INSL4; ENSG00000120211; HLA -A*02:01,HLA-A*02:07,HLA-B*35:01,HLA-B*35:03,HLA-B*38:01, HLA-B*40:01,HLA-C*05:01
ICDDGTSVKL

SEQ ID NO: 3844 - protein, 8 aa, Homo sapiens
  Table 1.2; INSL4; ENSG00000120211; HLA -B*07:02,HLA-B*08:01,HLA-B*35:01,HLA-B*35:03,HLA-B*51:01, HLA-B*54:01,HLA-B*55:01,HLA-B*56:01,HLA-C*03:03,HLA-C*03:04, HLA-C*07:02,HLA-C*16:01
IPNLSPEL

SEQ ID NO: 3845 - protein, 9 aa, Homo sapiens
  Table 1.2; INSL4; ENSG00000120211; HLA -A*24:02
IWLLLSQLL

SEQ ID NO: 3846 - protein, 11 aa, Homo sapiens
  Table 1.2; INSL4; ENSG00000120211; HLA -B*15:03
KKPLSEGQPSL

SEQ ID NO: 3847 - protein, 10 aa, Homo sapiens
  Table 1.2; INSL4; ENSG00000120211; HLA -B*07:02,HLA-B*35:01,HLA-B*35:03,HLA-B*40:01,HLA-B*55:01, HLA-B*56:01,HLA-C*07:02
KPLSEGQPSL

SEQ ID NO: 3848 - protein, 11 aa, Homo sapiens
  Table 1.2; INSL4; ENSG00000120211; HLA -A*03:02,HLA-B*27:02
KPLSEGQPSLK

SEQ ID NO: 3849 - protein, 10 aa, Homo sapiens
  Table 1.2; INSL4; ENSG00000120211; HLA -A*25:01,HLA-A*32:01,HLA-B*57:01,HLA-B*58:01
KTFTTTPGGW

SEQ ID NO: 3850 - protein, 9 aa, Homo sapiens
  Table 1.2; INSL4; ENSG00000120211; HLA -B*37:01
LESGRPKEM

SEQ ID NO: 3851 - protein, 10 aa, Homo sapiens
  Table 1.2; INSL4; ENSG00000120211; HLA -A*02:03,HLA-A*02:04
LLRESLAAEL

SEQ ID NO: 3852 - protein, 10 aa, Homo sapiens
  Table 1.2; INSL4; ENSG00000120211; HLA -A*02:04
LLSQLLRESL

SEQ ID NO: 3853 - protein, 9 aa, Homo sapiens
  Table 1.2; INSL4; ENSG00000120211; HLA -B*27:05,HLA-B*38:01,HLA-B*39:01,HLA-C*06:02
LRESLAAEL

SEQ ID NO: 3854 - protein, 9 aa, Homo sapiens
  Table 1.2; INSL4; ENSG00000120211; HLA -A*01:01,HLA-A*03:02
LSEGQPSLK

SEQ ID NO: 3855 - protein, 9 aa, Homo sapiens
  Table 1.2; INSL4; ENSG00000120211; HLA -A*03:01,HLA-A*11:01
LSYCPMPEK

SEQ ID NO: 3856 - protein, 9 aa, Homo sapiens
  Table 1.2; INSL4; ENSG00000120211; HLA -B*35:01,HLA-B*35:03,HLA-B*54:01,HLA-B*55:01,HLA-B*56:01
MPEKTFTTT

SEQ ID NO: 3857 - protein, 8 aa, Homo sapiens
  Table 1.2; INSL4; ENSG00000120211; HLA -B*08:01
NNKDGQAL

SEQ ID NO: 3858 - protein, 9 aa, Homo sapiens
  Table 1.2; INSL4; ENSG00000120211; HLA -A*02:01,HLA-A*02:04
PLSEGQPSL

SEQ ID NO: 3859 - protein, 9 aa, Homo sapiens
  Table 1.2; INSL4; ENSG00000120211; HLA -A*23:01,HLA-A*24:02,HLA-A*25:01,HLA-A*26:01,HLA-A*32:01, HLA-B*15:01,HLA-B*15:03,HLA-B*35:01,HLA-B*35:03,HLA-B*39:01, HLA-B*46:01,HLA-B*55:01,HLA-B*58:01,HLA-C*02:02,HLA-C*03:03,
  HLA-C*03:04,HLA-C*05:01,HLA-C*14:02,HLA-C*16:04
QALGTTSEF

SEQ ID NO: 3860 - protein, 11 aa, Homo sapiens
  Table 1.2; INSL4; ENSG00000120211; HLA -A*02:01,HLA-A*02:04
QLLRESLAAEL

SEQ ID NO: 3861 - protein, 9 aa, Homo sapiens
  Table 1.2; INSL4; ENSG00000120211; HLA -B*07:02,HLA-B*08:01,HLA-C*07:02
QPSLKKIIL

SEQ ID NO: 3862 - protein, 8 aa, Homo sapiens
  Table 1.2; INSL4; ENSG00000120211; HLA -A*30:01,HLA-B*18:01,HLA-B*37:01,HLA-B*40:01
RESLAAEL

SEQ ID NO: 3863 - protein, 9 aa, Homo sapiens
  Table 1.2; INSL4; ENSG00000120211; HLA -A*29:02
RFGKHLLSY

SEQ ID NO: 3864 - protein, 8 aa, Homo sapiens
  Table 1.2; INSL4; ENSG00000120211; HLA -B*57:01
RSYLPAIW

SEQ ID NO: 3865 - protein, 9 aa, Homo sapiens
  Table 1.2; INSL4; ENSG00000120211; HLA -B*40:02
SEFIPNLSP

SEQ ID NO: 3866 - protein, 11 aa, Homo sapiens
  Table 1.2; INSL4; ENSG00000120211; HLA -A*30:01,HLA-B*40:01
SEFIPNLSPEL

SEQ ID NO: 3867 - protein, 9 aa, Homo sapiens
  Table 1.2; INSL4; ENSG00000120211; HLA -B*44:03
SEGQPSLKK

SEQ ID NO: 3868 - protein, 10 aa, Homo sapiens
  Table 1.2; INSL4; ENSG00000120211; HLA -B*44:02,HLA-B*44:03,HLA-B*49:01
SEGQPSLKKI

SEQ ID NO: 3869 - protein, 9 aa, Homo sapiens
  Table 1.2; INSL4; ENSG00000120211; HLA -A*02:03
SLAAELRGC

SEQ ID NO: 3870 - protein, 10 aa, Homo sapiens
  Table 1.2; INSL4; ENSG00000120211; HLA -A*02:01,HLA-A*02:03,HLA-A*02:04
SLFRSYLPAI

SEQ ID NO: 3871 - protein, 9 aa, Homo sapiens
  Table 1.2; INSL4; ENSG00000120211; HLA -A*02:03,HLA-A*03:01,HLA-A*31:01,HLA-A*33:01,HLA-A*33:03
SLKKIILSR

SEQ ID NO: 3872 - protein, 8 aa, Homo sapiens
  Table 1.2; INSL4; ENSG00000120211; HLA -B*07:02,HLA-B*08:01
SPELKKPL

SEQ ID NO: 3873 - protein, 8 aa, Homo sapiens
  Table 1.2; INSL4; ENSG00000120211; HLA -B*08:01
SQLLRESL

SEQ ID NO: 3874 - protein, 10 aa, Homo sapiens
  Table 1.2; INSL4; ENSG00000120211; HLA -A*23:01,HLA-A*24:02
SYCPMPEKTF

SEQ ID NO: 3875 - protein, 9 aa, Homo sapiens
  Table 1.2; INSL4; ENSG00000120211; HLA -A*02:04,HLA-A*23:01,HLA-A*24:02,HLA-A*29:02
SYLPAIWLL

SEQ ID NO: 3876 - protein, 10 aa, Homo sapiens
  Table 1.2; INSL4; ENSG00000120211; HLA -A*23:01,HLA-A*24:02
SYLPAIWLLL

SEQ ID NO: 3877 - protein, 9 aa, Homo sapiens
  Table 1.2; INSL4; ENSG00000120211; HLA -A*02:01,HLA-A*02:03,HLA-A*02:04,HLA-A*02:07,HLA-A*03:02, HLA-A*11:01,HLA-A*23:01,HLA-A*25:01,HLA-A*26:01,HLA-A*31:01, HLA-A*68:01,HLA-A*68:02,HLA-B*13:02,HLA-B*35:03,HLA-B*38:01,
  HLA-B*39:01,HLA-C*16:02
TTSEFIPNL

SEQ ID NO: 3878 - protein, 9 aa, Homo sapiens
  Table 1.2; INSL4; ENSG00000120211; HLA -A*68:02
TTTPGGWLL

SEQ ID NO: 3879 - protein, 9 aa, Homo sapiens
  Table 1.2; INSL4; ENSG00000120211; HLA -A*02:01,HLA-A*02:03,HLA-C*05:01
VICDDGTSV

SEQ ID NO: 3880 - protein, 10 aa, Homo sapiens
  Table 1.2; INSL4; ENSG00000120211; HLA -A*03:02
VICDDGTSVK

SEQ ID NO: 3881 - protein, 8 aa, Homo sapiens
  Table 1.2; INSL4; ENSG00000120211; HLA -A*02:04,HLA-A*02:07
YLPAIWLL

SEQ ID NO: 3882 - protein, 9 aa, Homo sapiens
  Table 1.2; INSL4; ENSG00000120211; HLA -A*02:01,HLA-A*02:03,HLA-A*02:04,HLA-A*02:07,HLA-A*24:02, HLA-A*29:02
YLPAIWLLL

SEQ ID NO: 3883 - protein, 9 aa, Homo sapiens
  Table 1.2; INSL6; ENSG00000120210; HLA -A*11:01
ACLPYIDFK

SEQ ID NO: 3884 - protein, 10 aa, Homo sapiens
  Table 1.2; INSL6; ENSG00000120210; HLA -A*25:01,HLA-A*26:01,HLA-A*30:02,HLA-A*32:01,HLA-B*15:01, HLA-B*15:03,HLA-B*44:02,HLA-B*44:03,HLA-C*07:04
AQASEKVEAY

SEQ ID NO: 3885 - protein, 8 aa, Homo sapiens
  Table 1.2; INSL6; ENSG00000120210; HLA -A*01:01,HLA-A*30:02,HLA-B*58:01
ASEKVEAY

SEQ ID NO: 3886 - protein, 11 aa, Homo sapiens
  Table 1.2; INSL6; ENSG00000120210; HLA -A*01:01
ASEKVEAYSPY

SEQ ID NO: 3887 - protein, 8 aa, Homo sapiens
  Table 1.2; INSL6; ENSG00000120210; HLA -B*08:01
DISSARKL

SEQ ID NO: 3888 - protein, 8 aa, Homo sapiens
  Table 1.2; INSL6; ENSG00000120210; HLA -B*35:01,HLA-B*35:03
EAVNSWEM

SEQ ID NO: 3889 - protein, 8 aa, Homo sapiens
  Table 1.2; INSL6; ENSG00000120210; HLA -A*23:01,HLA-B*08:01
EAYSPYQF

SEQ ID NO: 3890 - protein, 9 aa, Homo sapiens
  Table 1.2; INSL6; ENSG00000120210; HLA -B*40:01,HLA-B*44:03
EEETPFSRL

SEQ ID NO: 3891 - protein, 10 aa, Homo sapiens
  Table 1.2; INSL6; ENSG00000120210; HLA -B*44:02,HLA-B*44:03,HLA-B*49:01
EEETPFSRLI

SEQ ID NO: 3892 - protein, 8 aa, Homo sapiens
  Table 1.2; INSL6; ENSG00000120210; HLA -B*18:01
EELSIACL

SEQ ID NO: 3893 - protein, 8 aa, Homo sapiens
  Table 1.2; INSL6; ENSG00000120210; HLA -B*18:01,HLA-B*44:03
EETPFSRL

SEQ ID NO: 3894 - protein, 9 aa, Homo sapiens
  Table 1.2; INSL6; ENSG00000120210; HLA -A*30:01,HLA-A*68:02,HLA-B*18:01,HLA-B*44:02,HLA-B*44:03, HLA-B*49:01
EETPFSRLI

SEQ ID NO: 3895 - protein, 9 aa, Homo sapiens
  Table 1.2; INSL6; ENSG00000120210; HLA -A*26:01,HLA-B*15:03
EKVEAYSPY

SEQ ID NO: 3896 - protein, 9 aa, Homo sapiens
  Table 1.2; INSL6; ENSG00000120210; HLA -A*26:01,HLA-A*33:01,HLA-A*33:03,HLA-A*68:01,HLA-C*07:06
ELSDISSAR

SEQ ID NO: 3897 - protein, 10 aa, Homo sapiens
  Table 1.2; INSL6; ENSG00000120210; HLA -A*33:03,HLA-A*68:01
ELSDISSARK

SEQ ID NO: 3898 - protein, 11 aa, Homo sapiens
  Table 1.2; INSL6; ENSG00000120210; HLA -A*68:02
ELSDISSARKL

SEQ ID NO: 3899 - protein, 8 aa, Homo sapiens
  Table 1.2; INSL6; ENSG00000120210; HLA -A*30:02
EMQSLPEY

SEQ ID NO: 3900 - protein, 9 aa, Homo sapiens
  Table 1.2; INSL6; ENSG00000120210; HLA -A*03:02,HLA-A*33:03
EMQSLPEYK

SEQ ID NO: 3901 - protein, 9 aa, Homo sapiens
  Table 1.2; INSL6; ENSG00000120210; HLA -A*33:03
ENAKFQKKR

SEQ ID NO: 3902 - protein, 10 aa, Homo sapiens
  Table 1.2; INSL6; ENSG00000120210; HLA -A*68:01
ESPQTASPAR

SEQ ID NO: 3903 - protein, 10 aa, Homo sapiens
  Table 1.2; INSL6; ENSG00000120210; HLA -B*40:01,HLA-B*49:01
FEEETPFSRL

SEQ ID NO: 3904 - protein, 11 aa, Homo sapiens
  Table 1.2; INSL6; ENSG00000120210; HLA -B*49:01
FEEETPFSRLI

SEQ ID NO: 3905 - protein, 9 aa, Homo sapiens
  Table 1.2; INSL6; ENSG00000120210; HLA -B*49:01
FESPQTASP

SEQ ID NO: 3906 - protein, 11 aa, Homo sapiens
  Table 1.2; INSL6; ENSG00000120210; HLA -B*27:02,HLA-B*27:05
FESPQTASPAR

SEQ ID NO: 3907 - protein, 9 aa, Homo sapiens
  Table 1.2; INSL6; ENSG00000120210; HLA -A*68:02,HLA-C*02:02
FSSSHNINV

SEQ ID NO: 3908 - protein, 10 aa, Homo sapiens
  Table 1.2; INSL6; ENSG00000120210; HLA -A*01:01,HLA-A*26:01,HLA-A*30:02
FSSSHNINVY

SEQ ID NO: 3909 - protein, 11 aa, Homo sapiens
  Table 1.2; INSL6; ENSG00000120210; HLA -B*27:02,HLA-C*16:04
GRGTNPVSTSW

SEQ ID NO: 3910 - protein, 10 aa, Homo sapiens
  Table 1.2; INSL6; ENSG00000120210; HLA -B*27:05
GRYLVKEIEK

SEQ ID NO: 3911 - protein, 9 aa, Homo sapiens
  Table 1.2; INSL6; ENSG00000120210; HLA -A*03:02,HLA-A*11:01,HLA-A*23:01,HLA-A*25:01,HLA-A*26:01, HLA-A*29:02,HLA-A*30:02,HLA-A*31:01,HLA-A*32:01,HLA-A*33:03, HLA-B*15:01,HLA-B*15:03,HLA-B*27:02,HLA-B*44:02,HLA-B*44:03,
  HLA-B*46:01,HLA-B*57:01,HLA-B*58:01,HLA-C*16:04
GTNPVSTSW

SEQ ID NO: 3912 - protein, 9 aa, Homo sapiens
  Table 1.2; INSL6; ENSG00000120210; HLA -A*33:03
GYSPLGKTR

SEQ ID NO: 3913 - protein, 11 aa, Homo sapiens
  Table 1.2; INSL6; ENSG00000120210; HLA -A*24:02
GYSPLGKTREF

SEQ ID NO: 3914 - protein, 10 aa, Homo sapiens
  Table 1.2; INSL6; ENSG00000120210; HLA -B*54:01
IAQASEKVEA

SEQ ID NO: 3915 - protein, 11 aa, Homo sapiens
  Table 1.2; INSL6; ENSG00000120210; HLA -A*26:01,HLA-A*30:02,HLA-B*15:01,HLA-B*35:01,HLA-B*46:01
IAQASEKVEAY

SEQ ID NO: 3916 - protein, 9 aa, Homo sapiens
  Table 1.2; INSL6; ENSG00000120210; HLA -B*40:01
KEELSIACL

SEQ ID NO: 3917 - protein, 8 aa, Homo sapiens
  Table 1.2; INSL6; ENSG00000120210; HLA -A*03:01,HLA-A*03:02
KGYSPLGK

SEQ ID NO: 3918 - protein, 10 aa, Homo sapiens
  Table 1.2; INSL6; ENSG00000120210; HLA -A*31:01,HLA-B*57:01
KGYSPLGKTR

SEQ ID NO: 3919 - protein, 10 aa, Homo sapiens
  Table 1.2; INSL6; ENSG00000120210; HLA -B*57:01
KIKTLSNLFW

SEQ ID NO: 3920 - protein, 8 aa, Homo sapiens
  Table 1.2; INSL6; ENSG00000120210; HLA -B*57:01
KTLSNLFW

SEQ ID NO: 3921 - protein, 9 aa, Homo sapiens
  Table 1.2; INSL6; ENSG00000120210; HLA -A*02:01,HLA-A*02:04,HLA-A*02:07
LLWLGLLLV

SEQ ID NO: 3922 - protein, 9 aa, Homo sapiens
  Table 1.2; INSL6; ENSG00000120210; HLA -B*51:01
LPYIDFKRL

SEQ ID NO: 3923 - protein, 9 aa, Homo sapiens
  Table 1.2; INSL6; ENSG00000120210; HLA -A*01:01
LSDISSARK

SEQ ID NO: 3924 - protein, 8 aa, Homo sapiens
  Table 1.2; INSL6; ENSG00000120210; HLA -B*08:01
LVKEIEKL

SEQ ID NO: 3925 - protein, 9 aa, Homo sapiens
  Table 1.2; INSL6; ENSG00000120210; HLA -B*07:02
MPRLLRLSL

SEQ ID NO: 3926 - protein, 9 aa, Homo sapiens
  Table 1.2; INSL6; ENSG00000120210; HLA -A*03:01,HLA-A*03:02,HLA-A*11:01
NVYIHENAK

SEQ ID NO: 3927 - protein, 10 aa, Homo sapiens
  Table 1.2; INSL6; ENSG00000120210; HLA -A*25:01
NVYIHENAKF

SEQ ID NO: 3928 - protein, 9 aa, Homo sapiens
  Table 1.2; INSL6; ENSG00000120210; HLA -A*01:01,HLA-A*25:01,HLA-A*26:01,HLA-A*29:02,HLA-A*30:02, HLA-A*32:01,HLA-A*68:01,HLA-B*15:01,HLA-B*15:03,HLA-B*18:01, HLA-B*35:01,HLA-B*39:01,HLA-B*44:02,HLA-B*44:03,HLA-B*46:01,
  HLA-B*55:01,HLA-B*58:01,HLA-C*02:02,HLA-C*03:03,HLA-C*07:04, HLA-C*07:06,HLA-C*12:03,HLA-C*14:02,HLA-C*16:01,HLA-C*16:02, HLA-C*16:04
QASEKVEAY

SEQ ID NO: 3929 - protein, 9 aa, Homo sapiens
  Table 1.2; INSL6; ENSG00000120210; HLA -A*31:01,HLA-A*33:03,HLA-A*68:01,HLA-C*07:06
QTASPARGR

SEQ ID NO: 3930 - protein, 9 aa, Homo sapiens
  Table 1.2; INSL6; ENSG00000120210; HLA -B*37:01,HLA-B*40:01,HLA-B*44:02,HLA-B*44:03,HLA-B*49:01
REFSSSHNI

SEQ ID NO: 3931 - protein, 9 aa, Homo sapiens
  Table 1.2; INSL6; ENSG00000120210; HLA -A*30:01,HLA-B*40:01,HLA-B*40:02,HLA-B*49:01
RELSDISSA

SEQ ID NO: 3932 - protein, 10 aa, Homo sapiens
  Table 1.2; INSL6; ENSG00000120210; HLA -B*40:01
RELSDISSAR

SEQ ID NO: 3933 - protein, 10 aa, Homo sapiens
  Table 1.2; INSL6; ENSG00000120210; HLA -A*23:01,HLA-A*25:01,HLA-A*32:01,HLA-B*57:01,HLA-B*58:01, HLA-C*16:04
RGTNPVSTSW

SEQ ID NO: 3934 - protein, 9 aa, Homo sapiens
  Table 1.2; INSL6; ENSG00000120210; HLA -A*03:01,HLA-A*03:02
RLIAQASEK

SEQ ID NO: 3935 - protein, 10 aa, Homo sapiens
  Table 1.2; INSL6; ENSG00000120210; HLA -A*02:03
RLIAQASEKV

SEQ ID NO: 3936 - protein, 9 aa, Homo sapiens
  Table 1.2; INSL6; ENSG00000120210; HLA -B*08:01
RLKEKRSSL

SEQ ID NO: 3937 - protein, 9 aa, Homo sapiens
  Table 1.2; INSL6; ENSG00000120210; HLA -B*57:01
RLLRLSLLW

SEQ ID NO: 3938 - protein, 9 aa, Homo sapiens
  Table 1.2; INSL6; ENSG00000120210; HLA -A*01:01,HLA-A*03:01,HLA-A*29:02,HLA-A*30:02,HLA-A*32:01, HLA-B*07:02,HLA-B*15:01,HLA-B*15:03,HLA-B*44:02,HLA-B*44:03, HLA-B*57:01,HLA-B*58:01,HLA-C*06:02,HLA-C*07:01,HLA-C*12:03,
  HLA-C*16:01,HLA-C*16:02,HLA-C*16:04
RSSLVTKIY

SEQ ID NO: 3939 - protein, 10 aa, Homo sapiens
  Table 1.2; INSL6; ENSG00000120210; HLA -A*24:02
RYLVKEIEKL

SEQ ID NO: 3940 - protein, 9 aa, Homo sapiens
  Table 1.2; INSL6; ENSG00000120210; HLA -A*30:01,HLA-B*37:01,HLA-B*44:02,HLA-B*44:03
SDISSARKL

SEQ ID NO: 3941 - protein, 9 aa, Homo sapiens
  Table 1.2; INSL6; ENSG00000120210; HLA -B*40:02
SEKVEAYSP

SEQ ID NO: 3942 - protein, 10 aa, Homo sapiens
  Table 1.2; INSL6; ENSG00000120210; HLA -A*30:02,HLA-B*44:02,HLA-B*44:03
SEKVEAYSPY

SEQ ID NO: 3943 - protein, 8 aa, Homo sapiens
  Table 1.2; INSL6; ENSG00000120210; HLA -B*38:01
SHNINVYI

SEQ ID NO: 3944 - protein, 9 aa, Homo sapiens
  Table 1.2; INSL6; ENSG00000120210; HLA -A*02:01,HLA-A*02:04
SLLWLGLLL

SEQ ID NO: 3945 - protein, 10 aa, Homo sapiens
  Table 1.2; INSL6; ENSG00000120210; HLA -A*02:01,HLA-A*02:04
SLLWLGLLLV

SEQ ID NO: 3946 - protein, 11 aa, Homo sapiens
  Table 1.2; INSL6; ENSG00000120210; HLA -B*07:02
SPARGRGTNPV

SEQ ID NO: 3947 - protein, 9 aa, Homo sapiens
  Table 1.2; INSL6; ENSG00000120210; HLA -B*07:02,HLA-B*08:01,HLA-B*35:01,HLA-C*07:02,HLA-C*16:01
SPLGKTREF

SEQ ID NO: 3948 - protein, 9 aa, Homo sapiens
  Table 1.2; INSL6; ENSG00000120210; HLA -C*07:06
SPQTASPAR

SEQ ID NO: 3949 - protein, 8 aa, Homo sapiens
  Table 1.2; INSL6; ENSG00000120210; HLA -B*56:01
SPYQFESP

SEQ ID NO: 3950 - protein, 10 aa, Homo sapiens
  Table 1.2; INSL6; ENSG00000120210; HLA -B*51:01,HLA-B*56:01
SPYQFESPQT

SEQ ID NO: 3951 - protein, 11 aa, Homo sapiens
  Table 1.2; INSL6; ENSG00000120210; HLA -B*54:01,HLA-B*55:01,HLA-B*56:01
SPYQFESPQTA

SEQ ID NO: 3952 - protein, 8 aa, Homo sapiens
  Table 1.2; INSL6; ENSG00000120210; HLA -A*30:02,HLA-B*46:01
SSHNINVY

SEQ ID NO: 3953 - protein, 9 aa, Homo sapiens
  Table 1.2; INSL6; ENSG00000120210; HLA -A*68:02,HLA-B*13:02
SSHNINVYI

SEQ ID NO: 3954 - protein, 8 aa, Homo sapiens
  Table 1.2; INSL6; ENSG00000120210; HLA -B*15:01,HLA-B*15:03,HLA-B*46:01,HLA-C*12:03,HLA-C*16:01
SSLVTKIY

SEQ ID NO: 3955 - protein, 9 aa, Homo sapiens
  Table 1.2; INSL6; ENSG00000120210; HLA -A*01:01,HLA-A*26:01,HLA-A*30:02,HLA-A*32:01,HLA-B*15:01, HLA-B*46:01,HLA-B*58:01,HLA-C*12:03,HLA-C*16:01,HLA-C*16:02
SSSHNINVY

SEQ ID NO: 3956 - protein, 10 aa, Homo sapiens
  Table 1.2; INSL6; ENSG00000120210; HLA -A*68:02
SSSHNINVYI

SEQ ID NO: 3957 - protein, 11 aa, Homo sapiens
  Table 1.2; INSL6; ENSG00000120210; HLA -A*25:01
STSWEEAVNSW

SEQ ID NO: 3958 - protein, 8 aa, Homo sapiens
  Table 1.2; INSL6; ENSG00000120210; HLA -B*54:01,HLA-B*56:01
TPFSRLIA

SEQ ID NO: 3959 - protein, 9 aa, Homo sapiens
  Table 1.2; INSL6; ENSG00000120210; HLA -B*54:01,HLA-B*56:01
TPFSRLIAQ

SEQ ID NO: 3960 - protein, 10 aa, Homo sapiens
  Table 1.2; INSL6; ENSG00000120210; HLA -B*54:01,HLA-B*56:01
TPFSRLIAQA

SEQ ID NO: 3961 - protein, 10 aa, Homo sapiens
  Table 1.2; INSL6; ENSG00000120210; HLA -A*25:01,HLA-B*57:01,HLA-B*58:01
TSWEEAVNSW

SEQ ID NO: 3962 - protein, 9 aa, Homo sapiens
  Table 1.2; INSL6; ENSG00000120210; HLA -A*23:01,HLA-A*24:02,HLA-A*30:01,HLA-B*18:01,HLA-B*27:02, HLA-B*37:01,HLA-B*44:02,HLA-B*44:03
VEAYSPYQF

SEQ ID NO: 3963 - protein, 9 aa, Homo sapiens
  Table 1.2; INSL6; ENSG00000120210; HLA -A*23:01,HLA-A*24:02,HLA-A*29:02,HLA-C*14:02
VYIHENAKF

SEQ ID NO: 3964 - protein, 9 aa, Homo sapiens
  Table 1.2; INSL6; ENSG00000120210; HLA -B*15:03,HLA-B*18:01,HLA-B*44:02,HLA-B*44:03
WEMQSLPEY

SEQ ID NO: 3965 - protein, 9 aa, Homo sapiens
  Table 1.2; INSL6; ENSG00000120210; HLA -A*02:01,HLA-A*02:03,HLA-A*02:04,HLA-A*02:07,HLA-A*68:02
YLVKEIEKL

SEQ ID NO: 3966 - protein, 8 aa, Homo sapiens
  Table 1.2; INSL6; ENSG00000120210; HLA -B*13:02
YQFESPQT

SEQ ID NO: 3967 - protein, 9 aa, Homo sapiens
  Table 1.2; INSL6; ENSG00000120210; HLA -A*02:01,HLA-A*02:03,HLA-A*30:01,HLA-A*32:01,HLA-B*13:02, HLA-B*15:01,HLA-B*15:03,HLA-B*27:05,HLA-B*39:01,HLA-C*02:02, HLA-C*12:03
YQFESPQTA

SEQ ID NO: 3968 - protein, 8 aa, Homo sapiens
  Table 1.2; KCNU1; ENSG00000215262; HLA -C*05:01
AADDKIKF

SEQ ID NO: 3969 - protein, 9 aa, Homo sapiens
  Table 1.2; KCNU1; ENSG00000215262; HLA -B*57:01
AADDKIKFW

SEQ ID NO: 3970 - protein, 8 aa, Homo sapiens
  Table 1.2; KCNU1; ENSG00000215262; HLA -B*46:01
AAFILSSF

SEQ ID NO: 3971 - protein, 9 aa, Homo sapiens
  Table 1.2; KCNU1; ENSG00000215262; HLA -B*46:01,HLA-B*58:01,HLA-C*03:04
AANIEQCSM

SEQ ID NO: 3972 - protein, 10 aa, Homo sapiens
  Table 1.2; KCNU1; ENSG00000215262; HLA -C*04:01
ADPVGSCSSY

SEQ ID NO: 3973 - protein, 8 aa, Homo sapiens
  Table 1.2; KCNU1; ENSG00000215262; HLA -B*37:01
ADSCTSLL

SEQ ID NO: 3974 - protein, 8 aa, Homo sapiens
  Table 1.2; KCNU1; ENSG00000215262; HLA -B*37:01,HLA-B*40:01,HLA-B*49:01
AEDISNIM

SEQ ID NO: 3975 - protein, 10 aa, Homo sapiens
  Table 1.2; KCNU1; ENSG00000215262; HLA -B*49:01
AEDISNIMRV

SEQ ID NO: 3976 - protein, 11 aa, Homo sapiens
  Table 1.2; KCNU1; ENSG00000215262; HLA -A*30:01,HLA-B*40:01,HLA-B*44:02,HLA-B*44:03,HLA-B*49:01
AEDISNIMRVL

SEQ ID NO: 3977 - protein, 10 aa, Homo sapiens
  Table 1.2; KCNU1; ENSG00000215262; HLA -B*44:02
AELKLGFIAQ

SEQ ID NO: 3978 - protein, 10 aa, Homo sapiens
  Table 1.2; KCNU1; ENSG00000215262; HLA -A*23:01,HLA-A*24:02
AFILSSFVTF

SEQ ID NO: 3979 - protein, 8 aa, Homo sapiens
  Table 1.2; KCNU1; ENSG00000215262; HLA -A*23:01,HLA-B*15:03,HLA-C*14:02
AFSTGTVF

SEQ ID NO: 3980 - protein, 10 aa, Homo sapiens
  Table 1.2; KCNU1; ENSG00000215262; HLA -A*11:01
AGMSFPEVAR

SEQ ID NO: 3981 - protein, 11 aa, Homo sapiens
  Table 1.2; KCNU1; ENSG00000215262; HLA -A*02:04
AGMSFPEVARL

SEQ ID NO: 3982 - protein, 8 aa, Homo sapiens
  Table 1.2; KCNU1; ENSG00000215262; HLA -B*38:01
AHSAPMGL

SEQ ID NO: 3983 - protein, 8 aa, Homo sapiens
  Table 1.2; KCNU1; ENSG00000215262; HLA -A*32:01,HLA-B*08:01
AIKTSNSV

SEQ ID NO: 3984 - protein, 9 aa, Homo sapiens
  Table 1.2; KCNU1; ENSG00000215262; HLA -A*03:01
AIKTSNSVK

SEQ ID NO: 3985 - protein, 10 aa, Homo sapiens
  Table 1.2; KCNU1; ENSG00000215262; HLA -B*46:01
AIKTSNSVKF

SEQ ID NO: 3986 - protein, 9 aa, Homo sapiens
  Table 1.2; KCNU1; ENSG00000215262; HLA -A*26:01,HLA-A*29:02,HLA-A*30:02,HLA-B*15:01,HLA-B*15:03, HLA-B*46:01,HLA-C*01:02,HLA-C*07:04
AIPFSTACY

SEQ ID NO: 3987 - protein, 10 aa, Homo sapiens
  Table 1.2; KCNU1; ENSG00000215262; HLA -A*03:01,HLA-A*03:02,HLA-A*11:01
AIPFSTACYK

SEQ ID NO: 3988 - protein, 9 aa, Homo sapiens
  Table 1.2; KCNU1; ENSG00000215262; HLA -B*15:03
AKTSLGRTF

SEQ ID NO: 3989 - protein, 10 aa, Homo sapiens
  Table 1.2; KCNU1; ENSG00000215262; HLA -A*02:04
ALRLLELPQI

SEQ ID NO: 3990 - protein, 9 aa, Homo sapiens
  Table 1.2; KCNU1; ENSG00000215262; HLA -A*02:01,HLA-A*02:03,HLA-B*13:02,HLA-B*55:01
ALYSGDLHA

SEQ ID NO: 3991 - protein, 10 aa, Homo sapiens
  Table 1.2; KCNU1; ENSG00000215262; HLA -A*02:01,HLA-A*02:03,HLA-A*02:04,HLA-A*02:07,HLA-A*03:01, HLA-B*13:02,HLA-B*46:01,HLA-B*55:01,HLA-B*56:01
ALYSGDLHAA

SEQ ID NO: 3992 - protein, 9 aa, Homo sapiens
  Table 1.2; KCNU1; ENSG00000215262; HLA -B*56:01
APMGLRNFV

SEQ ID NO: 3993 - protein, 10 aa, Homo sapiens
  Table 1.2; KCNU1; ENSG00000215262; HLA -B*07:02,HLA-B*08:01,HLA-C*07:02
APMGLRNFVM

SEQ ID NO: 3994 - protein, 8 aa, Homo sapiens
  Table 1.2; KCNU1; ENSG00000215262; HLA -B*13:02
AQTFVGQV

SEQ ID NO: 3995 - protein, 9 aa, Homo sapiens
  Table 1.2; KCNU1; ENSG00000215262; HLA -A*30:01,HLA-A*32:01,HLA-B*13:02,HLA-B*15:01,HLA-B*15:03, HLA-B*27:02,HLA-B*27:05,HLA-B*38:01,HLA-B*39:01,HLA-B*40:01, HLA-B*40:02,HLA-C*02:02,HLA-C*06:02,HLA-C*16:04
AQTFVGQVL

SEQ ID NO: 3996 - protein, 9 aa, Homo sapiens
  Table 1.2; KCNU1; ENSG00000215262; HLA -A*30:02,HLA-A*32:01,HLA-B*58:01
ASTSSISNF

SEQ ID NO: 3997 - protein, 9 aa, Homo sapiens
  Table 1.2; KCNU1; ENSG00000215262; HLA -A*68:02
ATAFYNYHV

SEQ ID NO: 3998 - protein, 8 aa, Homo sapiens
  Table 1.2; KCNU1; ENSG00000215262; HLA -A*32:01
ATTSTVGF

SEQ ID NO: 3999 - protein, 11 aa, Homo sapiens
  Table 1.2; KCNU1; ENSG00000215262; HLA -C*14:02
AYTTFISGSAM

SEQ ID NO: 4000 - protein, 10 aa, Homo sapiens
  Table 1.2; KCNU1; ENSG00000215262; HLA -A*26:01,HLA-A*30:02,HLA-B*15:01,HLA-B*15:03,HLA-B*46:01
CAIPFSTACY

SEQ ID NO: 4001 - protein, 8 aa, Homo sapiens
  Table 1.2; KCNU1; ENSG00000215262; HLA -B*51:01
CPPTIDSV

SEQ ID NO: 4002 - protein, 10 aa, Homo sapiens
  Table 1.2; KCNU1; ENSG00000215262; HLA -A*31:01
CTSLLSGRNR

SEQ ID NO: 4003 - protein, 9 aa, Homo sapiens
  Table 1.2; KCNU1; ENSG00000215262; HLA -A*23:01,HLA-A*26:01,HLA-A*30:02,HLA-A*32:01,HLA-B*15:03, HLA-B*57:01,HLA-B*58:01,HLA-C*02:02
CTTEIQAAF

SEQ ID NO: 4004 - protein, 9 aa, Homo sapiens
  Table 1.2; KCNU1; ENSG00000215262; HLA -B*56:01
CVFGDAHSA

SEQ ID NO: 4005 - protein, 8 aa, Homo sapiens
  Table 1.2; KCNU1; ENSG00000215262; HLA -A*23:01,HLA-A*24:02
CYLAYTTF

SEQ ID NO: 4006 - protein, 9 aa, Homo sapiens
  Table 1.2; KCNU1; ENSG00000215262; HLA -A*24:02
CYLAYTTFI

SEQ ID NO: 4007 - protein, 9 aa, Homo sapiens
  Table 1.2; KCNU1; ENSG00000215262; HLA -A*25:01,HLA-A*26:01,HLA-A*33:01,HLA-A*33:03,HLA-A*68:01, HLA-B*08:01,HLA-B*35:03,HLA-B*51:01
DAHSAPMGL

SEQ ID NO: 4008 - protein, 10 aa, Homo sapiens
  Table 1.2; KCNU1; ENSG00000215262; HLA -A*33:01,HLA-A*33:03,HLA-A*68:01
DAHSAPMGLR

SEQ ID NO: 4009 - protein, 8 aa, Homo sapiens
  Table 1.2; KCNU1; ENSG00000215262; HLA -B*18:01,HLA-B*37:01,HLA-B*40:02
DDFAGMSF

SEQ ID NO: 4010 - protein, 8 aa, Homo sapiens
  Table 1.2; KCNU1; ENSG00000215262; HLA -B*18:01
DDVFIPEL

SEQ ID NO: 4011 - protein, 9 aa, Homo sapiens
  Table 1.2; KCNU1; ENSG00000215262; HLA -A*68:02
DDVFIPELI

SEQ ID NO: 4012 - protein, 9 aa, Homo sapiens
  Table 1.2; KCNU1; ENSG00000215262; HLA -B*18:01
DEDPFAYSE

SEQ ID NO: 4013 - protein, 11 aa, Homo sapiens
  Table 1.2; KCNU1; ENSG00000215262; HLA -B*18:01
DEDPFAYSEPL

SEQ ID NO: 4014 - protein, 9 aa, Homo sapiens
  Table 1.2; KCNU1; ENSG00000215262; HLA -B*18:01
DEVYDEDPF

SEQ ID NO: 4015 - protein, 11 aa, Homo sapiens
  Table 1.2; KCNU1; ENSG00000215262; HLA -B*18:01
DEVYDEDPFAY

SEQ ID NO: 4016 - protein, 9 aa, Homo sapiens
  Table 1.2; KCNU1; ENSG00000215262; HLA -A*23:01,HLA-A*25:01,HLA-A*26:01,HLA-A*68:01,HLA-B*18:01
DIFTIPPTF

SEQ ID NO: 4017 - protein, 10 aa, Homo sapiens
  Table 1.2; KCNU1; ENSG00000215262; HLA -A*68:02
DIFTIPPTFI

SEQ ID NO: 4018 - protein, 9 aa, Homo sapiens
  Table 1.2; KCNU1; ENSG00000215262; HLA -A*25:01,HLA-A*68:02
DISNIMRVL

SEQ ID NO: 4019 - protein, 10 aa, Homo sapiens
  Table 1.2; KCNU1; ENSG00000215262; HLA -A*26:01
DIVFIGSLDY

SEQ ID NO: 4020 - protein, 11 aa, Homo sapiens
  Table 1.2; KCNU1; ENSG00000215262; HLA -A*68:02
DIVFIGSLDYL

SEQ ID NO: 4021 - protein, 8 aa, Homo sapiens
  Table 1.2; KCNU1; ENSG00000215262; HLA -B*51:01
DLFGILCV

SEQ ID NO: 4022 - protein, 9 aa, Homo sapiens
  Table 1.2; KCNU1; ENSG00000215262; HLA -A*25:01,HLA-A*33:01,HLA-A*68:01,HLA-B*18:01,HLA-B*35:01, HLA-B*35:03,HLA-B*51:01,HLA-C*07:01
DPFAYSEPL

SEQ ID NO: 4023 - protein, 9 aa, Homo sapiens
  Table 1.2; KCNU1; ENSG00000215262; HLA -A*25:01,HLA-A*26:01,HLA-B*35:01
DPVGSCSSY

SEQ ID NO: 4024 - protein, 10 aa, Homo sapiens
  Table 1.2; KCNU1; ENSG00000215262; HLA -A*33:01,HLA-A*68:01
DSCTSLLSGR

SEQ ID NO: 4025 - protein, 8 aa, Homo sapiens
  Table 1.2; KCNU1; ENSG00000215262; HLA -B*08:01,HLA-B*18:01,HLA-B*35:01
DSLLATAF

SEQ ID NO: 4026 - protein, 9 aa, Homo sapiens
  Table 1.2; KCNU1; ENSG00000215262; HLA -A*01:01,HLA-A*26:01,HLA-A*33:01
DSLLATAFY

SEQ ID NO: 4027 - protein, 8 aa, Homo sapiens
  Table 1.2; KCNU1; ENSG00000215262; HLA -A*68:01
DSVTAFLR

SEQ ID NO: 4028 - protein, 10 aa, Homo sapiens
  Table 1.2; KCNU1; ENSG00000215262; HLA -A*25:01
DSVTAFLRNF

SEQ ID NO: 4029 - protein, 9 aa, Homo sapiens
  Table 1.2; KCNU1; ENSG00000215262; HLA -A*25:01,HLA-A*68:01,HLA-A*68:02,HLA-B*35:03
DTEAIMATL

SEQ ID NO: 4030 - protein, 9 aa, Homo sapiens
  Table 1.2; KCNU1; ENSG00000215262; HLA -A*25:01,HLA-A*26:01,HLA-A*33:01,HLA-A*33:03,HLA-A*68:01
DTGDNIICF

SEQ ID NO: 4031 - protein, 8 aa, Homo sapiens
  Table 1.2; KCNU1; ENSG00000215262; HLA -B*51:01
DVFIPELI

SEQ ID NO: 4032 - protein, 10 aa, Homo sapiens
  Table 1.2; KCNU1; ENSG00000215262; HLA -A*68:02
DVFIPELITN

SEQ ID NO: 4033 - protein, 8 aa, Homo sapiens
  Table 1.2; KCNU1; ENSG00000215262; HLA -A*25:01,HLA-B*08:01
DVNPRNTF

SEQ ID NO: 4034 - protein, 11 aa, Homo sapiens
  Table 1.2; KCNU1; ENSG00000215262; HLA -A*25:01,HLA-A*33:01
DVNPRNTFGQL

SEQ ID NO: 4035 - protein, 8 aa, Homo sapiens
  Table 1.2; KCNU1; ENSG00000215262; HLA -B*08:01
DVVAKTSL

SEQ ID NO: 4036 - protein, 9 aa, Homo sapiens
  Table 1.2; KCNU1; ENSG00000215262; HLA -A*26:01
DVVAKTSLG

SEQ ID NO: 4037 - protein, 10 aa, Homo sapiens
  Table 1.2; KCNU1; ENSG00000215262; HLA -A*33:01,HLA-A*33:03,HLA-A*68:01
DVVAKTSLGR

SEQ ID NO: 4038 - protein, 9 aa, Homo sapiens
  Table 1.2; KCNU1; ENSG00000215262; HLA -A*24:02
DYLQREWRF

SEQ ID NO: 4039 - protein, 9 aa, Homo sapiens
  Table 1.2; KCNU1; ENSG00000215262; HLA -A*23:01,HLA-A*25:01,HLA-A*26:01,HLA-A*68:02,HLA-B*35:03, HLA-B*51:01
EAIMATLTI

SEQ ID NO: 4040 - protein, 9 aa, Homo sapiens
  Table 1.2; KCNU1; ENSG00000215262; HLA -A*26:01
EDISNIMRV

SEQ ID NO: 4041 - protein, 11 aa, Homo sapiens
  Table 1.2; KCNU1; ENSG00000215262; HLA -B*44:02,HLA-B*44:03
EEELNPENKRF

SEQ ID NO: 4042 - protein, 9 aa, Homo sapiens
  Table 1.2; KCNU1; ENSG00000215262; HLA -A*25:01,HLA-A*26:01,HLA-A*30:01,HLA-B*18:01,HLA-B*27:02, HLA-B*44:02,HLA-B*44:03,HLA-B*49:01,HLA-C*16:04
EEFSLQKSY

SEQ ID NO: 4043 - protein, 10 aa, Homo sapiens
  Table 1.2; KCNU1; ENSG00000215262; HLA -B*44:02,HLA-B*44:03
EELNPENKRF

SEQ ID NO: 4044 - protein, 9 aa, Homo sapiens
  Table 1.2; KCNU1; ENSG00000215262; HLA -A*68:02
EINTEIVFL

SEQ ID NO: 4045 - protein, 11 aa, Homo sapiens
  Table 1.2; KCNU1; ENSG00000215262; HLA -A*25:01,HLA-A*26:01
EIQAAFILSSF

SEQ ID NO: 4046 - protein, 9 aa, Homo sapiens
  Table 1.2; KCNU1; ENSG00000215262; HLA -A*01:01
ELETIFKCY

SEQ ID NO: 4047 - protein, 9 aa, Homo sapiens
  Table 1.2; KCNU1; ENSG00000215262; HLA -A*26:01
ELFTSGTIA

SEQ ID NO: 4048 - protein, 10 aa, Homo sapiens
  Table 1.2; KCNU1; ENSG00000215262; HLA -A*25:01,HLA-A*26:01,HLA-A*33:01,HLA-A*33:03,HLA-A*68:01, HLA-C*07:06
ELFTSGTIAR

SEQ ID NO: 4049 - protein, 10 aa, Homo sapiens
  Table 1.2; KCNU1; ENSG00000215262; HLA -A*33:03
ELKNPSNIHF

SEQ ID NO: 4050 - protein, 9 aa, Homo sapiens
  Table 1.2; KCNU1; ENSG00000215262; HLA -A*02:07,HLA-A*24:02,HLA-A*68:02
ELPQILQIL

SEQ ID NO: 4051 - protein, 10 aa, Homo sapiens
  Table 1.2; KCNU1; ENSG00000215262; HLA -A*68:02
ELPQILQILR

SEQ ID NO: 4052 - protein, 9 aa, Homo sapiens
  Table 1.2; KCNU1; ENSG00000215262; HLA -A*23:01,HLA-A*24:02,HLA-C*14:02
EMLLSAQTF

SEQ ID NO: 4053 - protein, 9 aa, Homo sapiens
  Table 1.2; KCNU1; ENSG00000215262; HLA -A*26:01,HLA-A*33:03
EMNSIVDIF

SEQ ID NO: 4054 - protein, 9 aa, Homo sapiens
  Table 1.2; KCNU1; ENSG00000215262; HLA -A*11:01,HLA-A*25:01,HLA-A*26:01,HLA-A*33:01,HLA-A*33:03, HLA-A*68:01,HLA-A*68:02
EMVELFANK

SEQ ID NO: 4055 - protein, 10 aa, Homo sapiens
  Table 1.2; KCNU1; ENSG00000215262; HLA -A*33:03,HLA-A*68:01
EMVELFANKR

SEQ ID NO: 4056 - protein, 9 aa, Homo sapiens
  Table 1.2; KCNU1; ENSG00000215262; HLA -A*33:01,HLA-A*33:03
ENKRFVITR

SEQ ID NO: 4057 - protein, 10 aa, Homo sapiens
  Table 1.2; KCNU1; ENSG00000215262; HLA -B*39:01
EQLGGLEGSL

SEQ ID NO: 4058 - protein, 9 aa, Homo sapiens
  Table 1.2; KCNU1; ENSG00000215262; HLA -A*33:03
EQNKKVMPK

SEQ ID NO: 4059 - protein, 10 aa, Homo sapiens
  Table 1.2; KCNU1; ENSG00000215262; HLA -A*26:01,HLA-A*33:01,HLA-A*33:03,HLA-A*68:01,HLA-B*27:02, HLA-C*07:06
ETILSDVNPR

SEQ ID NO: 4060 - protein, 8 aa, Homo sapiens
  Table 1.2; KCNU1; ENSG00000215262; HLA -A*26:01,HLA-B*18:01
ETLYSPVY

SEQ ID NO: 4061 - protein, 10 aa, Homo sapiens
  Table 1.2; KCNU1; ENSG00000215262; HLA -A*01:01,HLA-A*25:01,HLA-A*26:01,HLA-A*29:02
ETLYSPVYSY

SEQ ID NO: 4062 - protein, 10 aa, Homo sapiens
  Table 1.2; KCNU1; ENSG00000215262; HLA -A*25:01,HLA-A*26:01,HLA-A*33:01,HLA-A*33:03,HLA-B*44:02
ETNLHLSTAF

SEQ ID NO: 4063 - protein, 9 aa, Homo sapiens
  Table 1.2; KCNU1; ENSG00000215262; HLA -A*26:01
ETPGYTNGH

SEQ ID NO: 4064 - protein, 11 aa, Homo sapiens
  Table 1.2; KCNU1; ENSG00000215262; HLA -A*25:01,HLA-A*68:02
ETPPSLELETI

SEQ ID NO: 4065 - protein, 9 aa, Homo sapiens
  Table 1.2; KCNU1; ENSG00000215262; HLA -A*25:01,HLA-A*26:01,HLA-A*68:02
ETWEDLPKM

SEQ ID NO: 4066 - protein, 10 aa, Homo sapiens
  Table 1.2; KCNU1; ENSG00000215262; HLA -A*01:01,HLA-A*25:01,HLA-A*26:01,HLA-A*29:02,HLA-A*30:02, HLA-A*33:01,HLA-A*33:03,HLA-A*68:01,HLA-B*35:01
EVYDEDPFAY

SEQ ID NO: 4067 - protein, 10 aa, Homo sapiens
  Table 1.2; KCNU1; ENSG00000215262; HLA -A*24:02
EYKSLFTDGF

SEQ ID NO: 4068 - protein, 9 aa, Homo sapiens
  Table 1.2; KCNU1; ENSG00000215262; HLA -B*46:01,HLA-B*51:01,HLA-B*54:01
FAGMSFPEV

SEQ ID NO: 4069 - protein, 8 aa, Homo sapiens
  Table 1.2; KCNU1; ENSG00000215262; HLA -B*35:01,HLA-B*46:01,HLA-B*51:01,HLA-B*54:01,HLA-C*03:04
FANYIPEM

SEQ ID NO: 4070 - protein, 9 aa, Homo sapiens
  Table 1.2; KCNU1; ENSG00000215262; HLA -A*68:02,HLA-B*54:01
FANYIPEMV

SEQ ID NO: 4071 - protein, 9 aa, Homo sapiens
  Table 1.2; KCNU1; ENSG00000215262; HLA -B*54:01
FCAIPFSTA

SEQ ID NO: 4072 - protein, 8 aa, Homo sapiens
  Table 1.2; KCNU1; ENSG00000215262; HLA -B*18:01
FESIYLVM

SEQ ID NO: 4073 - protein, 9 aa, Homo sapiens
  Table 1.2; KCNU1; ENSG00000215262; HLA -A*32:01,HLA-B*35:01,HLA-B*35:03,HLA-B*46:01,HLA-B*55:01, HLA-C*02:02,HLA-C*03:03,HLA-C*03:04,HLA-C*04:01,HLA-C*05:01, HLA-C*07:04
FGDAHSAPM

SEQ ID NO: 4074 - protein, 10 aa, Homo sapiens
  Table 1.2; KCNU1; ENSG00000215262; HLA -B*40:01,HLA-C*05:01
FGDVVAKTSL

SEQ ID NO: 4075 - protein, 9 aa, Homo sapiens
  Table 1.2; KCNU1; ENSG00000215262; HLA -A*02:03
FIAETPKDV

SEQ ID NO: 4076 - protein, 10 aa, Homo sapiens
  Table 1.2; KCNU1; ENSG00000215262; HLA -A*33:03,HLA-A*68:01,HLA-A*68:02
FIAETPKDVR

SEQ ID NO: 4077 - protein, 9 aa, Homo sapiens
  Table 1.2; KCNU1; ENSG00000215262; HLA -A*02:04,HLA-A*02:07,HLA-A*23:01,HLA-A*24:02,HLA-A*25:01, HLA-A*29:02,HLA-C*02:02
FILSSFVTF

SEQ ID NO: 4078 - protein, 9 aa, Homo sapiens
  Table 1.2; KCNU1; ENSG00000215262; HLA -A*02:01,HLA-A*02:07
FIPELITNC

SEQ ID NO: 4079 - protein, 9 aa, Homo sapiens
  Table 1.2; KCNU1; ENSG00000215262; HLA -A*25:01
FISGSAMKW

SEQ ID NO: 4080 - protein, 9 aa, Homo sapiens
  Table 1.2; KCNU1; ENSG00000215262; HLA -A*02:01,HLA-A*02:07
FLDSLLATA

SEQ ID NO: 4081 - protein, 10 aa, Homo sapiens
  Table 1.2; KCNU1; ENSG00000215262; HLA -A*01:01,HLA-A*02:07,HLA-A*29:02
FLDSLLATAF

SEQ ID NO: 4082 - protein, 11 aa, Homo sapiens
  Table 1.2; KCNU1; ENSG00000215262; HLA -A*01:01
FLDSLLATAFY

SEQ ID NO: 4083 - protein, 9 aa, Homo sapiens
  Table 1.2; KCNU1; ENSG00000215262; HLA -A*02:01,HLA-A*02:03,HLA-A*02:04,HLA-A*02:07,HLA-A*23:01, HLA-A*30:01,HLA-B*13:02,HLA-B*35:03,HLA-B*39:01,HLA-B*55:01, HLA-C*01:02,HLA-C*07:04
FLGETPPSL

SEQ ID NO: 4084 - protein, 11 aa, Homo sapiens
  Table 1.2; KCNU1; ENSG00000215262; HLA -A*02:01
FLGETPPSLEL

SEQ ID NO: 4085 - protein, 9 aa, Homo sapiens
  Table 1.2; KCNU1; ENSG00000215262; HLA -A*02:03
FLKMHLLLI

SEQ ID NO: 4086 - protein, 10 aa, Homo sapiens
  Table 1.2; KCNU1; ENSG00000215262; HLA -A*02:03
FLRALRLLEL

SEQ ID NO: 4087 - protein, 9 aa, Homo sapiens
  Table 1.2; KCNU1; ENSG00000215262; HLA -A*02:03
FLRDKSGEI

SEQ ID NO: 4088 - protein, 8 aa, Homo sapiens
  Table 1.2; KCNU1; ENSG00000215262; HLA -A*02:07
FLWNFPQI

SEQ ID NO: 4089 - protein, 9 aa, Homo sapiens
  Table 1.2; KCNU1; ENSG00000215262; HLA -A*29:02
FLWNFPQIY

SEQ ID NO: 4090 - protein, 10 aa, Homo sapiens
  Table 1.2; KCNU1; ENSG00000215262; HLA -A*02:01,HLA-A*02:04
FLWNFPQIYI

SEQ ID NO: 4091 - protein, 11 aa, Homo sapiens
  Table 1.2; KCNU1; ENSG00000215262; HLA -A*02:04
FLWNFPQIYIL

SEQ ID NO: 4092 - protein, 9 aa, Homo sapiens
  Table 1.2; KCNU1; ENSG00000215262; HLA -A*29:02
FSFYFGLRF

SEQ ID NO: 4093 - protein, 9 aa, Homo sapiens
  Table 1.2; KCNU1; ENSG00000215262; HLA -A*68:02
FSGLIILLI

SEQ ID NO: 4094 - protein, 9 aa, Homo sapiens
  Table 1.2; KCNU1; ENSG00000215262; HLA -A*02:04,HLA-A*68:02,HLA-C*02:02,HLA-C*03:04
FTAAGFIHL

SEQ ID NO: 4095 - protein, 10 aa, Homo sapiens
  Table 1.2; KCNU1; ENSG00000215262; HLA -A*68:02
FTAAGFIHLV

SEQ ID NO: 4096 - protein, 10 aa, Homo sapiens
  Table 1.2; KCNU1; ENSG00000215262; HLA -A*01:01,HLA-A*25:01,HLA-A*26:01,HLA-A*29:02,HLA-A*30:02, HLA-B*46:01,HLA-B*57:01,HLA-C*02:02
FTIPPTFISY

SEQ ID NO: 4097 - protein, 11 aa, Homo sapiens
  Table 1.2; KCNU1; ENSG00000215262; HLA -A*01:01,HLA-A*29:02
FTIPPTFISYY

SEQ ID NO: 4098 - protein, 9 aa, Homo sapiens
  Table 1.2; KCNU1; ENSG00000215262; HLA -A*23:01,HLA-A*29:02,HLA-B*57:01
FTLGSLILF

SEQ ID NO: 4099 - protein, 8 aa, Homo sapiens
  Table 1.2; KCNU1; ENSG00000215262; HLA -A*33:03,HLA-A*68:01
FTSGTIAR

SEQ ID NO: 4100 - protein, 9 aa, Homo sapiens
  Table 1.2; KCNU1; ENSG00000215262; HLA -B*08:01,HLA-C*03:03
FVEQNKKVM

SEQ ID NO: 4101 - protein, 10 aa, Homo sapiens
  Table 1.2; KCNU1; ENSG00000215262; HLA -A*25:01,HLA-A*26:01,HLA-B*46:01,HLA-C*02:02
FVITRPANEF

SEQ ID NO: 4102 - protein, 11 aa, Homo sapiens
  Table 1.2; KCNU1; ENSG00000215262; HLA -A*29:02
FVLSIGSLIIY

SEQ ID NO: 4103 - protein, 10 aa, Homo sapiens
  Table 1.2; KCNU1; ENSG00000215262; HLA -A*03:01,HLA-A*25:01,HLA-A*26:01,HLA-A*29:02,HLA-A*30:02, HLA-A*32:01,HLA-B*46:01,HLA-C*02:02
FVMPLRASNY

SEQ ID NO: 4104 - protein, 9 aa, Homo sapiens
  Table 1.2; KCNU1; ENSG00000215262; HLA -A*23:01,HLA-A*24:02,HLA-A*29:02
FYNYHVLEL

SEQ ID NO: 4105 - protein, 8 aa, Homo sapiens
  Table 1.2; KCNU1; ENSG00000215262; HLA -B*37:01
GDAHSAPM

SEQ ID NO: 4106 - protein, 8 aa, Homo sapiens
  Table 1.2; KCNU1; ENSG00000215262; HLA -B*37:01
GDLHAANI

SEQ ID NO: 4107 - protein, 9 aa, Homo sapiens
  Table 1.2; KCNU1; ENSG00000215262; HLA -A*30:01,HLA-B*15:03,HLA-B*37:01,HLA-B*40:01,HLA-B*40:02, HLA-B*44:03,HLA-B*49:01
GDVVAKTSL

SEQ ID NO: 4108 - protein, 8 aa, Homo sapiens
  Table 1.2; KCNU1; ENSG00000215262; HLA -B*49:01
GEINTEIV

SEQ ID NO: 4109 - protein, 9 aa, Homo sapiens
  Table 1.2; KCNU1; ENSG00000215262; HLA -A*30:01,HLA-B*15:01,HLA-B*15:03,HLA-B*18:01,HLA-B*27:02, HLA-B*37:01,HLA-B*40:01,HLA-B*40:02,HLA-B*44:02,HLA-B*44:03, HLA-B*49:01,HLA-C*16:04
GEINTEIVF

SEQ ID NO: 4110 - protein, 10 aa, Homo sapiens
  Table 1.2; KCNU1; ENSG00000215262; HLA -A*30:01,HLA-B*40:01,HLA-B*44:02,HLA-B*44:03,HLA-B*49:01
GEINTEIVFL

SEQ ID NO: 4111 - protein, 9 aa, Homo sapiens
  Table 1.2; KCNU1; ENSG00000215262; HLA -A*30:01,HLA-B*13:02,HLA-B*18:01,HLA-B*27:02,HLA-B*27:05, HLA-B*37:01,HLA-B*40:01,HLA-B*40:02,HLA-B*44:02,HLA-B*44:03, HLA-B*49:01
GETPPSLEL

SEQ ID NO: 4112 - protein, 8 aa, Homo sapiens
  Table 1.2; KCNU1; ENSG00000215262; HLA -A*03:02
GFGDVVAK

SEQ ID NO: 4113 - protein, 9 aa, Homo sapiens
  Table 1.2; KCNU1; ENSG00000215262; HLA -A*02:04
GLCTFLTSL

SEQ ID NO: 4114 - protein, 10 aa, Homo sapiens
  Table 1.2; KCNU1; ENSG00000215262; HLA -A*02:04
GLIILLIFRL

SEQ ID NO: 4115 - protein, 10 aa, Homo sapiens
  Table 1.2; KCNU1; ENSG00000215262; HLA -A*02:01,HLA-A*02:03
GLILNPPPQV

SEQ ID NO: 4116 - protein, 9 aa, Homo sapiens
  Table 1.2; KCNU1; ENSG00000215262; HLA -A*02:04,HLA-B*13:02
GLLSLHETI

SEQ ID NO: 4117 - protein, 10 aa, Homo sapiens
  Table 1.2; KCNU1; ENSG00000215262; HLA -A*02:01,HLA-A*02:04
GLLSLHETIL

SEQ ID NO: 4118 - protein, 11 aa, Homo sapiens
  Table 1.2; KCNU1; ENSG00000215262; HLA -A*02:04
GLYRIIDEEEL

SEQ ID NO: 4119 - protein, 8 aa, Homo sapiens
  Table 1.2; KCNU1; ENSG00000215262; HLA -A*02:01,HLA-B*13:02
GQDSPPRV

SEQ ID NO: 4120 - protein, 9 aa, Homo sapiens
  Table 1.2; KCNU1; ENSG00000215262; HLA -B*15:01
GQFRDHIEM

SEQ ID NO: 4121 - protein, 8 aa, Homo sapiens
  Table 1.2; KCNU1; ENSG00000215262; HLA -B*13:02
GQVLVILV

SEQ ID NO: 4122 - protein, 9 aa, Homo sapiens
  Table 1.2; KCNU1; ENSG00000215262; HLA -B*13:02,HLA-B*15:01,HLA-B*15:03
GQVLVILVF

SEQ ID NO: 4123 - protein, 9 aa, Homo sapiens
  Table 1.2; KCNU1; ENSG00000215262; HLA -A*30:02,HLA-A*32:01,HLA-B*27:02,HLA-B*27:05,HLA-C*16:04
GRNSQNISY

SEQ ID NO: 4124 - protein, 10 aa, Homo sapiens
  Table 1.2; KCNU1; ENSG00000215262; HLA -B*27:02,HLA-B*27:05
GRNSQNISYF

SEQ ID NO: 4125 - protein, 10 aa, Homo sapiens
  Table 1.2; KCNU1; ENSG00000215262; HLA -B*57:01
GSLDYLQREW

SEQ ID NO: 4126 - protein, 9 aa, Homo sapiens
  Table 1.2; KCNU1; ENSG00000215262; HLA -A*29:02,HLA-A*30:02
GSLILFANY

SEQ ID NO: 4127 - protein, 9 aa, Homo sapiens
  Table 1.2; KCNU1; ENSG00000215262; HLA -B*57:01
GTGIILELF

SEQ ID NO: 4128 - protein, 9 aa, Homo sapiens
  Table 1.2; KCNU1; ENSG00000215262; HLA -A*11:01,HLA-A*31:01,HLA-A*33:03
GTIARSHVR

SEQ ID NO: 4129 - protein, 9 aa, Homo sapiens
  Table 1.2; KCNU1; ENSG00000215262; HLA -A*25:01,HLA-A*26:01,HLA-B*15:01,HLA-B*27:05
GVADSCTSL

SEQ ID NO: 4130 - protein, 10 aa, Homo sapiens
  Table 1.2; KCNU1; ENSG00000215262; HLA -A*26:01
GVADSCTSLL

SEQ ID NO: 4131 - protein, 10 aa, Homo sapiens
  Table 1.2; KCNU1; ENSG00000215262; HLA -B*27:05
GVSSQLEQHL

SEQ ID NO: 4132 - protein, 10 aa, Homo sapiens
  Table 1.2; KCNU1; ENSG00000215262; HLA -B*35:01,HLA-B*35:03
HAANIEQCSM

SEQ ID NO: 4133 - protein, 8 aa, Homo sapiens
  Table 1.2; KCNU1; ENSG00000215262; HLA -C*05:01
HAEDISNI

SEQ ID NO: 4134 - protein, 9 aa, Homo sapiens
  Table 1.2; KCNU1; ENSG00000215262; HLA -B*35:01,HLA-B*35:03,HLA-B*38:01,HLA-B*39:01,HLA-B*55:01, HLA-C*03:03,HLA-C*03:04,HLA-C*05:01,HLA-C*07:06,HLA-C*12:03
HAEDISNIM

SEQ ID NO: 4135 - protein, 10 aa, Homo sapiens
  Table 1.2; KCNU1; ENSG00000215262; HLA -A*33:01,HLA-A*33:03,HLA-A*68:01,HLA-A*68:02,HLA-C*07:06
HAEDISNIMR

SEQ ID NO: 4136 - protein, 11 aa, Homo sapiens
  Table 1.2; KCNU1; ENSG00000215262; HLA -A*68:02
HAEDISNIMRV

SEQ ID NO: 4137 - protein, 8 aa, Homo sapiens
  Table 1.2; KCNU1; ENSG00000215262; HLA -A*30:01,HLA-B*18:01,HLA-B*49:01
HETILSDV

SEQ ID NO: 4138 - protein, 11 aa, Homo sapiens
  Table 1.2; KCNU1; ENSG00000215262; HLA -B*27:02
HETILSDVNPR

SEQ ID NO: 4139 - protein, 8 aa, Homo sapiens
  Table 1.2; KCNU1; ENSG00000215262; HLA -A*03:01,HLA-A*03:02
HITVPSVK

SEQ ID NO: 4140 - protein, 9 aa, Homo sapiens
  Table 1.2; KCNU1; ENSG00000215262; HLA -A*33:01,HLA-A*33:03,HLA-A*68:01,HLA-C*07:06
HITVPSVKR

SEQ ID NO: 4141 - protein, 10 aa, Homo sapiens
  Table 1.2; KCNU1; ENSG00000215262; HLA -A*02:01,HLA-A*02:07
HLDKDKVYGV

SEQ ID NO: 4142 - protein, 9 aa, Homo sapiens
  Table 1.2; KCNU1; ENSG00000215262; HLA -A*01:01,HLA-A*29:02,HLA-B*35:01
HLLLIAIEY

SEQ ID NO: 4143 - protein, 10 aa, Homo sapiens
  Table 1.2; KCNU1; ENSG00000215262; HLA -A*25:01
HLVENSGDPW

SEQ ID NO: 4144 - protein, 10 aa, Homo sapiens
  Table 1.2; KCNU1; ENSG00000215262; HLA -B*57:01
HSAPMGLRNF

SEQ ID NO: 4145 - protein, 9 aa, Homo sapiens
  Table 1.2; KCNU1; ENSG00000215262; HLA -A*02:04,HLA-A*02:07
HVLELLQML

SEQ ID NO: 4146 - protein, 9 aa, Homo sapiens
  Table 1.2; KCNU1; ENSG00000215262; HLA -C*07:06
IAETPKDVR

SEQ ID NO: 4147 - protein, 8 aa, Homo sapiens
  Table 1.2; KCNU1; ENSG00000215262; HLA -C*03:04
IAIEYKSL

SEQ ID NO: 4148 - protein, 9 aa, Homo sapiens
  Table 1.2; KCNU1; ENSG00000215262; HLA -A*23:01,HLA-A*24:02,HLA-B*46:01,HLA-B*51:01,HLA-B*57:01, HLA-B*58:01,HLA-C*02:02
IAIEYKSLF

SEQ ID NO: 4149 - protein, 8 aa, Homo sapiens
  Table 1.2; KCNU1; ENSG00000215262; HLA -B*37:01
IDLVFNAF

SEQ ID NO: 4150 - protein, 8 aa, Homo sapiens
  Table 1.2; KCNU1; ENSG00000215262; HLA -B*37:01
IDSVTETL

SEQ ID NO: 4151 - protein, 10 aa, Homo sapiens
  Table 1.2; KCNU1; ENSG00000215262; HLA -A*30:01,HLA-B*18:01,HLA-B*27:02,HLA-B*37:01,HLA-B*44:02, HLA-B*44:03,HLA-B*49:01,HLA-C*16:04
IEMLLSAQTF

SEQ ID NO: 4152 - protein, 9 aa, Homo sapiens
  Table 1.2; KCNU1; ENSG00000215262; HLA -B*49:01
IEQCSMCAV

SEQ ID NO: 4153 - protein, 11 aa, Homo sapiens
  Table 1.2; KCNU1; ENSG00000215262; HLA -A*30:01,HLA-B*40:01,HLA-B*40:02
IEQLGGLEGSL

SEQ ID NO: 4154 - protein, 8 aa, Homo sapiens
  Table 1.2; KCNU1; ENSG00000215262; HLA -A*23:01,HLA-A*24:02
IFTIPPTF

SEQ ID NO: 4155 - protein, 9 aa, Homo sapiens
  Table 1.2; KCNU1; ENSG00000215262; HLA -A*23:01,HLA-A*24:02
IFTIPPTFI

SEQ ID NO: 4156 - protein, 9 aa, Homo sapiens
  Table 1.2; KCNU1; ENSG00000215262; HLA -A*68:02
IGSLIIYFI

SEQ ID NO: 4157 - protein, 9 aa, Homo sapiens
  Table 1.2; KCNU1; ENSG00000215262; HLA -B*46:01
IIIQILQSH

SEQ ID NO: 4158 - protein, 8 aa, Homo sapiens
  Table 1.2; KCNU1; ENSG00000215262; HLA -A*02:04
IILLIFRL

SEQ ID NO: 4159 - protein, 10 aa, Homo sapiens
  Table 1.2; KCNU1; ENSG00000215262; HLA -A*03:02
IIQILQSHNK

SEQ ID NO: 4160 - protein, 9 aa, Homo sapiens
  Table 1.2; KCNU1; ENSG00000215262; HLA -A*23:01,HLA-A*24:02,HLA-B*15:03
IKTSNSVKF

SEQ ID NO: 4161 - protein, 8 aa, Homo sapiens
  Table 1.2; KCNU1; ENSG00000215262; HLA -A*02:01,HLA-A*02:03,HLA-B*13:02,HLA-B*55:01,HLA-C*16:02
ILNPPPQV

SEQ ID NO: 4162 - protein, 9 aa, Homo sapiens
  Table 1.2; KCNU1; ENSG00000215262; HLA -A*03:01,HLA-A*03:02,HLA-A*11:01,HLA-A*23:01,HLA-A*24:02, HLA-A*29:02,HLA-A*31:01,HLA-A*32:01,HLA-A*33:01,HLA-A*33:03, HLA-A*68:01,HLA-B*57:01
ILNPPPQVR

SEQ ID NO: 4163 - protein, 10 aa, Homo sapiens
  Table 1.2; KCNU1; ENSG00000215262; HLA -A*02:01,HLA-A*02:03,HLA-A*02:04,HLA-A*02:07,HLA-A*03:01, HLA-A*23:01,HLA-A*24:02,HLA-A*32:01,HLA-B*13:02
ILNPPPQVRI

SEQ ID NO: 4164 - protein, 11 aa, Homo sapiens
  Table 1.2; KCNU1; ENSG00000215262; HLA -A*31:01
ILNPPPQVRIR

SEQ ID NO: 4165 - protein, 9 aa, Homo sapiens
  Table 1.2; KCNU1; ENSG00000215262; HLA -A*30:02,HLA-A*32:01,HLA-B*15:01
ILQSHNKVY

SEQ ID NO: 4166 - protein, 10 aa, Homo sapiens
  Table 1.2; KCNU1; ENSG00000215262; HLA -A*02:03
ILSDVNPRNT

SEQ ID NO: 4167 - protein, 11 aa, Homo sapiens
  Table 1.2; KCNU1; ENSG00000215262; HLA -A*23:01,HLA-A*24:02,HLA-A*32:01,HLA-B*15:01,HLA-B*46:01
ILSDVNPRNTF

SEQ ID NO: 4168 - protein, 8 aa, Homo sapiens
  Table 1.2; KCNU1; ENSG00000215262; HLA -A*23:01,HLA-B*37:01
ILSSFVTF

SEQ ID NO: 4169 - protein, 9 aa, Homo sapiens
  Table 1.2; KCNU1; ENSG00000215262; HLA -A*02:01,HLA-A*02:03,HLA-A*02:04,HLA-A*02:07,HLA-A*23:01, HLA-A*24:02,HLA-A*29:02
ILSSFVTFF

SEQ ID NO: 4170 - protein, 9 aa, Homo sapiens
  Table 1.2; KCNU1; ENSG00000215262; HLA -A*02:03,HLA-A*02:04
ILSTWFTAA

SEQ ID NO: 4171 - protein, 10 aa, Homo sapiens
  Table 1.2; KCNU1; ENSG00000215262; HLA -A*02:03
IMATLTIGSL

SEQ ID NO: 4172 - protein, 11 aa, Homo sapiens
  Table 1.2; KCNU1; ENSG00000215262; HLA -B*27:02
IPEMVELFANK

SEQ ID NO: 4173 - protein, 8 aa, Homo sapiens
  Table 1.2; KCNU1; ENSG00000215262; HLA -B*15:03,HLA-B*18:01,HLA-B*35:01,HLA-B*56:01
IPFSTACY

SEQ ID NO: 4174 - protein, 9 aa, Homo sapiens
  Table 1.2; KCNU1; ENSG00000215262; HLA -B*54:01,HLA-B*56:01
IPIDLVFNA

SEQ ID NO: 4175 - protein, 10 aa, Homo sapiens
  Table 1.2; KCNU1; ENSG00000215262; HLA -A*23:01,HLA-B*35:01
IPIDLVFNAF

SEQ ID NO: 4176 - protein, 8 aa, Homo sapiens
  Table 1.2; KCNU1; ENSG00000215262; HLA -B*35:01,HLA-B*51:01
IPPTFISY

SEQ ID NO: 4177 - protein, 9 aa, Homo sapiens
  Table 1.2; KCNU1; ENSG00000215262; HLA -B*35:01
IPPTFISYY

SEQ ID NO: 4178 - protein, 10 aa, Homo sapiens
  Table 1.2; KCNU1; ENSG00000215262; HLA -A*23:01,HLA-A*25:01,HLA-A*26:01,HLA-A*32:01,HLA-B*15:01, HLA-B*15:03,HLA-B*46:01,HLA-C*02:02
IQAAFILSSF

SEQ ID NO: 4179 - protein, 9 aa, Homo sapiens
  Table 1.2; KCNU1; ENSG00000215262; HLA -A*68:01,HLA-C*07:06
ISGQDSPPR

SEQ ID NO: 4180 - protein, 8 aa, Homo sapiens
  Table 1.2; KCNU1; ENSG00000215262; HLA -A*32:01,HLA-B*57:01,HLA-B*58:01
ISGSAMKW

SEQ ID NO: 4181 - protein, 9 aa, Homo sapiens
  Table 1.2; KCNU1; ENSG00000215262; HLA -A*32:01,HLA-B*46:01,HLA-B*57:01,HLA-B*58:01,HLA-C*01:02, HLA-C*03:04,HLA-C*16:01,HLA-C*16:02
ISNFTTRTL

SEQ ID NO: 4182 - protein, 8 aa, Homo sapiens
  Table 1.2; KCNU1; ENSG00000215262; HLA -B*08:01,HLA-C*16:01
ISNIMRVL

SEQ ID NO: 4183 - protein, 9 aa, Homo sapiens
  Table 1.2; KCNU1; ENSG00000215262; HLA -B*57:01
ISYYLKSNW

SEQ ID NO: 4184 - protein, 8 aa, Homo sapiens
  Table 1.2; KCNU1; ENSG00000215262; HLA -A*32:01,HLA-B*15:01,HLA-B*46:01,HLA-B*57:01,HLA-B*58:01
ITRPANEF

SEQ ID NO: 4185 - protein, 10 aa, Homo sapiens
  Table 1.2; KCNU1; ENSG00000215262; HLA -B*57:01
ITRPANEFKL

SEQ ID NO: 4186 - protein, 9 aa, Homo sapiens
  Table 1.2; KCNU1; ENSG00000215262; HLA -A*23:01,HLA-A*24:02,HLA-A*25:01,HLA-A*26:01,HLA-A*29:02, HLA-A*30:02,HLA-A*32:01,HLA-B*15:01,HLA-B*15:03,HLA-B*35:01, HLA-B*39:01,HLA-B*46:01,HLA-B*57:01,HLA-B*58:01,HLA-C*01:02,
  HLA-C*02:02,HLA-C*03:03,HLA-C*03:04,HLA-C*07:04,HLA-C*12:03, HLA-C*14:02,HLA-C*16:01,HLA-C*16:04
ITVDSVTAF

SEQ ID NO: 4187 - protein, 10 aa, Homo sapiens
  Table 1.2; KCNU1; ENSG00000215262; HLA -A*68:02
ITVDSVTAFL

SEQ ID NO: 4188 - protein, 11 aa, Homo sapiens
  Table 1.2; KCNU1; ENSG00000215262; HLA -A*11:01,HLA-A*31:01,HLA-A*33:03,HLA-A*68:01,HLA-B*27:02, HLA-C*07:06
ITVDSVTAFLR

SEQ ID NO: 4189 - protein, 9 aa, Homo sapiens
  Table 1.2; KCNU1; ENSG00000215262; HLA -B*57:01,HLA-B*58:01,HLA-C*16:02
ITVPSVKRM

SEQ ID NO: 4190 - protein, 9 aa, Homo sapiens
  Table 1.2; KCNU1; ENSG00000215262; HLA -A*01:01,HLA-A*26:01,HLA-A*29:02,HLA-A*30:02,HLA-B*15:01, HLA-B*15:03,HLA-B*35:01,HLA-B*46:01
IVFIGSLDY

SEQ ID NO: 4191 - protein, 10 aa, Homo sapiens
  Table 1.2; KCNU1; ENSG00000215262; HLA -A*68:02
IVFIGSLDYL

SEQ ID NO: 4192 - protein, 9 aa, Homo sapiens
  Table 1.2; KCNU1; ENSG00000215262; HLA -A*23:01,HLA-A*24:02,HLA-C*14:02
IYILPGCAL

SEQ ID NO: 4193 - protein, 10 aa, Homo sapiens
  Table 1.2; KCNU1; ENSG00000215262; HLA -A*24:02,HLA-A*29:02
IYILPGCALY

SEQ ID NO: 4194 - protein, 9 aa, Homo sapiens
  Table 1.2; KCNU1; ENSG00000215262; HLA -C*14:02
IYLVMATTS

SEQ ID NO: 4195 - protein, 9 aa, Homo sapiens
  Table 1.2; KCNU1; ENSG00000215262; HLA -A*32:01,HLA-B*58:01
KASQTTETH

SEQ ID NO: 4196 - protein, 8 aa, Homo sapiens
  Table 1.2; KCNU1; ENSG00000215262; HLA -B*37:01
KELKDIVF

SEQ ID NO: 4197 - protein, 9 aa, Homo sapiens
  Table 1.2; KCNU1; ENSG00000215262; HLA -B*40:01,HLA-B*44:02,HLA-B*49:01
KELKDIVFI

SEQ ID NO: 4198 - protein, 10 aa, Homo sapiens
  Table 1.2; KCNU1; ENSG00000215262; HLA -A*30:02
KGRNSQNISY

SEQ ID NO: 4199 - protein, 9 aa, Homo sapiens
  Table 1.2; KCNU1; ENSG00000215262; HLA -A*02:04,HLA-A*23:01,HLA-A*29:02,HLA-B*57:01
KLLPSDLVF

SEQ ID NO: 4200 - protein, 10 aa, Homo sapiens
  Table 1.2; KCNU1; ENSG00000215262; HLA -A*02:01,HLA-A*02:04
KLLPSDLVFC

SEQ ID NO: 4201 - protein, 9 aa, Homo sapiens
  Table 1.2; KCNU1; ENSG00000215262; HLA -A*02:04
KLLSIILST

SEQ ID NO: 4202 - protein, 10 aa, Homo sapiens
  Table 1.2; KCNU1; ENSG00000215262; HLA -A*02:04,HLA-B*57:01
KLLSIILSTW

SEQ ID NO: 4203 - protein, 9 aa, Homo sapiens
  Table 1.2; KCNU1; ENSG00000215262; HLA -A*02:07,HLA-A*24:02
KNPSNIHFI

SEQ ID NO: 4204 - protein, 9 aa, Homo sapiens
  Table 1.2; KCNU1; ENSG00000215262; HLA -A*23:01
KNYDSTTRI

SEQ ID NO: 4205 - protein, 8 aa, Homo sapiens
  Table 1.2; KCNU1; ENSG00000215262; HLA -B*56:01
KPTSLDKV

SEQ ID NO: 4206 - protein, 10 aa, Homo sapiens
  Table 1.2; KCNU1; ENSG00000215262; HLA -B*07:02,HLA-B*35:01,HLA-B*35:03,HLA-B*40:01,HLA-B*55:01, HLA-B*56:01,HLA-C*07:02
KPTSLDKVTL

SEQ ID NO: 4207 - protein, 9 aa, Homo sapiens
  Table 1.2; KCNU1; ENSG00000215262; HLA -A*31:01
KQIAWNQSR

SEQ ID NO: 4208 - protein, 9 aa, Homo sapiens
  Table 1.2; KCNU1; ENSG00000215262; HLA -B*58:01
KSGEINTEI

SEQ ID NO: 4209 - protein, 9 aa, Homo sapiens
  Table 1.2; KCNU1; ENSG00000215262; HLA -B*57:01
KSNWLGLRF

SEQ ID NO: 4210 - protein, 8 aa, Homo sapiens
  Table 1.2; KCNU1; ENSG00000215262; HLA -A*03:01,HLA-A*03:02,HLA-A*11:01
KSYEIVNK

SEQ ID NO: 4211 - protein, 9 aa, Homo sapiens
  Table 1.2; KCNU1; ENSG00000215262; HLA -B*40:02,HLA-B*56:01,HLA-B*58:01,HLA-C*12:03
KSYEIVNKA

SEQ ID NO: 4212 - protein, 9 aa, Homo sapiens
  Table 1.2; KCNU1; ENSG00000215262; HLA -A*23:01,HLA-A*24:02,HLA-A*29:02,HLA-A*32:01,HLA-B*15:01, HLA-B*57:01,HLA-B*58:01
KTIPIDLVF

SEQ ID NO: 4213 - protein, 8 aa, Homo sapiens
  Table 1.2; KCNU1; ENSG00000215262; HLA -C*16:01
KTSLGRTF

SEQ ID NO: 4214 - protein, 8 aa, Homo sapiens
  Table 1.2; KCNU1; ENSG00000215262; HLA -A*32:01,HLA-B*37:01,HLA-B*58:01
KTSNSVKF

SEQ ID NO: 4215 - protein, 10 aa, Homo sapiens
  Table 1.2; KCNU1; ENSG00000215262; HLA -A*03:01,HLA-A*03:02,HLA-A*11:01
KTSNSVKFSK

SEQ ID NO: 4216 - protein, 8 aa, Homo sapiens
  Table 1.2; KCNU1; ENSG00000215262; HLA -A*32:01,HLA-B*57:01,HLA-B*58:01
KVMPKQTW

SEQ ID NO: 4217 - protein, 9 aa, Homo sapiens
  Table 1.2; KCNU1; ENSG00000215262; HLA -A*03:01,HLA-A*03:02
KVMPKQTWK

SEQ ID NO: 4218 - protein, 8 aa, Homo sapiens
  Table 1.2; KCNU1; ENSG00000215262; HLA -A*02:07,HLA-C*01:02
KVPILTEL

SEQ ID NO: 4219 - protein, 9 aa, Homo sapiens
  Table 1.2; KCNU1; ENSG00000215262; HLA -A*03:01,HLA-A*03:02
KVPILTELK

SEQ ID NO: 4220 - protein, 10 aa, Homo sapiens
  Table 1.2; KCNU1; ENSG00000215262; HLA -A*25:01,HLA-B*57:01
KVYLPKIPSW

SEQ ID NO: 4221 - protein, 9 aa, Homo sapiens
  Table 1.2; KCNU1; ENSG00000215262; HLA -A*23:01,HLA-A*24:02,HLA-C*01:02,HLA-C*14:02
KYTSSYEAL

SEQ ID NO: 4222 - protein, 9 aa, Homo sapiens
  Table 1.2; KCNU1; ENSG00000215262; HLA -A*02:03,HLA-B*37:01
LDKDKVYGV

SEQ ID NO: 4223 - protein, 9 aa, Homo sapiens
  Table 1.2; KCNU1; ENSG00000215262; HLA -B*18:01,HLA-B*37:01,HLA-B*44:02
LDSLLATAF

SEQ ID NO: 4224 - protein, 10 aa, Homo sapiens
  Table 1.2; KCNU1; ENSG00000215262; HLA -A*30:01,HLA-B*40:01
LEGSLQETNL

SEQ ID NO: 4225 - protein, 10 aa, Homo sapiens
  Table 1.2; KCNU1; ENSG00000215262; HLA -B*44:02,HLA-B*44:03
LELETIFKCY

SEQ ID NO: 4226 - protein, 9 aa, Homo sapiens
  Table 1.2; KCNU1; ENSG00000215262; HLA -B*49:01
LELFTSGTI

SEQ ID NO: 4227 - protein, 8 aa, Homo sapiens
  Table 1.2; KCNU1; ENSG00000215262; HLA -B*49:01
LELLQMLV

SEQ ID NO: 4228 - protein, 9 aa, Homo sapiens
  Table 1.2; KCNU1; ENSG00000215262; HLA -A*23:01,HLA-A*30:01,HLA-B*13:02,HLA-B*18:01,HLA-B*44:02, HLA-B*44:03,HLA-B*49:01,HLA-B*51:01
LELPQILQI

SEQ ID NO: 4229 - protein, 10 aa, Homo sapiens
  Table 1.2; KCNU1; ENSG00000215262; HLA -B*44:02
LELPQILQIL

SEQ ID NO: 4230 - protein, 9 aa, Homo sapiens
  Table 1.2; KCNU1; ENSG00000215262; HLA -A*30:01,HLA-B*40:01,HLA-B*49:01
LEMNSIVDI

SEQ ID NO: 4231 - protein, 8 aa, Homo sapiens
  Table 1.2; KCNU1; ENSG00000215262; HLA -B*18:01
LETIFKCY

SEQ ID NO: 4232 - protein, 9 aa, Homo sapiens
  Table 1.2; KCNU1; ENSG00000215262; HLA -A*23:01,HLA-A*24:02
LFANYIPEM

SEQ ID NO: 4233 - protein, 9 aa, Homo sapiens
  Table 1.2; KCNU1; ENSG00000215262; HLA -A*33:01,HLA-A*33:03
LFTSGTIAR

SEQ ID NO: 4234 - protein, 9 aa, Homo sapiens
  Table 1.2; KCNU1; ENSG00000215262; HLA -A*02:04
LIILLIFRL

SEQ ID NO: 4235 - protein, 9 aa, Homo sapiens
  Table 1.2; KCNU1; ENSG00000215262; HLA -A*02:01,HLA-A*02:03,HLA-A*02:04,HLA-A*02:07
LILNPPPQV

SEQ ID NO: 4236 - protein, 9 aa, Homo sapiens
  Table 1.2; KCNU1; ENSG00000215262; HLA -B*15:03
LKNPSNIHF

SEQ ID NO: 4237 - protein, 9 aa, Homo sapiens
  Table 1.2; KCNU1; ENSG00000215262; HLA -A*01:01,HLA-A*03:01,HLA-A*29:02
LLATAFYNY

SEQ ID NO: 4238 - protein, 8 aa, Homo sapiens
  Table 1.2; KCNU1; ENSG00000215262; HLA -A*29:02
LLLIAIEY

SEQ ID NO: 4239 - protein, 9 aa, Homo sapiens
  Table 1.2; KCNU1; ENSG00000215262; HLA -A*02:01,HLA-A*02:07
LLPSDLVFC

SEQ ID NO: 4240 - protein, 11 aa, Homo sapiens
  Table 1.2; KCNU1; ENSG00000215262; HLA -A*02:07
LLPSDLVFCAI

SEQ ID NO: 4241 - protein, 9 aa, Homo sapiens
  Table 1.2; KCNU1; ENSG00000215262; HLA -B*44:02,HLA-B*57:01
LLSIILSTW

SEQ ID NO: 4242 - protein, 9 aa, Homo sapiens
  Table 1.2; KCNU1; ENSG00000215262; HLA -A*02:04
LLSLHETIL

SEQ ID NO: 4243 - protein, 10 aa, Homo sapiens
  Table 1.2; KCNU1; ENSG00000215262; HLA -B*54:01,HLA-B*56:01
LPQILQILRA

SEQ ID NO: 4244 - protein, 9 aa, Homo sapiens
  Table 1.2; KCNU1; ENSG00000215262; HLA -B*54:01,HLA-B*55:01,HLA-B*56:01
LPSDLVFCA

SEQ ID NO: 4245 - protein, 8 aa, Homo sapiens
  Table 1.2; KCNU1; ENSG00000215262; HLA -C*05:01
LSDDFAGM

SEQ ID NO: 4246 - protein, 10 aa, Homo sapiens
  Table 1.2; KCNU1; ENSG00000215262; HLA -A*01:01,HLA-B*46:01,HLA-B*58:01,HLA-C*03:04,HLA-C*05:01
LSDDFAGMSF

SEQ ID NO: 4247 - protein, 10 aa, Homo sapiens
  Table 1.2; KCNU1; ENSG00000215262; HLA -A*01:01,HLA-B*58:01,HLA-C*05:01
LSDVNPRNTF

SEQ ID NO: 4248 - protein, 9 aa, Homo sapiens
  Table 1.2; KCNU1; ENSG00000215262; HLA -A*25:01,HLA-A*32:01,HLA-B*57:01,HLA-B*58:01,HLA-C*02:02
LSFPKQIAW

SEQ ID NO: 4249 - protein, 10 aa, Homo sapiens
  Table 1.2; KCNU1; ENSG00000215262; HLA -B*57:01
LSIGSLIIYF

SEQ ID NO: 4250 - protein, 8 aa, Homo sapiens
  Table 1.2; KCNU1; ENSG00000215262; HLA -B*57:01,HLA-B*58:01
LSIILSTW

SEQ ID NO: 4251 - protein, 9 aa, Homo sapiens
  Table 1.2; KCNU1; ENSG00000215262; HLA -B*57:01
LSIILSTWF

SEQ ID NO: 4252 - protein, 10 aa, Homo sapiens
  Table 1.2; KCNU1; ENSG00000215262; HLA -B*27:02
LTSLFVEQNK

SEQ ID NO: 4253 - protein, 8 aa, Homo sapiens
  Table 1.2; KCNU1; ENSG00000215262; HLA -C*05:01
LVDTEAIM

SEQ ID NO: 4254 - protein, 11 aa, Homo sapiens
  Table 1.2; KCNU1; ENSG00000215262; HLA -A*02:07
LVDTEAIMATL

SEQ ID NO: 4255 - protein, 9 aa, Homo sapiens
  Table 1.2; KCNU1; ENSG00000215262; HLA -A*02:01,HLA-A*02:03,HLA-A*25:01,HLA-B*13:02,HLA-B*46:01, HLA-B*51:01,HLA-B*55:01,HLA-B*56:01
LVMATTSTV

SEQ ID NO: 4256 - protein, 8 aa, Homo sapiens
  Table 1.2; KCNU1; ENSG00000215262; HLA -A*23:01,HLA-A*29:02,HLA-A*30:02,HLA-C*14:02
LYSPVYSY

SEQ ID NO: 4257 - protein, 9 aa, Homo sapiens
  Table 1.2; KCNU1; ENSG00000215262; HLA -B*35:01,HLA-B*35:03,HLA-B*38:01,HLA-B*55:01,HLA-B*58:01, HLA-C*02:02,HLA-C*03:03,HLA-C*16:01
MAADDKIKF

SEQ ID NO: 4258 - protein, 10 aa, Homo sapiens
  Table 1.2; KCNU1; ENSG00000215262; HLA -A*25:01,HLA-B*57:01
MAADDKIKFW

SEQ ID NO: 4259 - protein, 9 aa, Homo sapiens
  Table 1.2; KCNU1; ENSG00000215262; HLA -B*35:01,HLA-B*35:03,HLA-B*54:01,HLA-C*03:03,HLA-C*03:04, HLA-C*16:02
MATLTIGSL

SEQ ID NO: 4260 - protein, 9 aa, Homo sapiens
  Table 1.2; KCNU1; ENSG00000215262; HLA -A*23:01,HLA-A*25:01,HLA-A*26:01,HLA-A*32:01,HLA-B*15:03, HLA-B*27:05,HLA-B*35:01,HLA-B*35:03,HLA-B*46:01,HLA-B*55:01, HLA-B*58:01,HLA-C*02:02,HLA-C*03:03,HLA-C*03:04,HLA-C*16:01,
  HLA-C*16:02
MATTSTVGF

SEQ ID NO: 4261 - protein, 8 aa, Homo sapiens
  Table 1.2; KCNU1; ENSG00000215262; HLA -A*23:01
MLLSAQTF

SEQ ID NO: 4262 - protein, 9 aa, Homo sapiens
  Table 1.2; KCNU1; ENSG00000215262; HLA -A*02:01,HLA-A*02:04
MLLSAQTFV

SEQ ID NO: 4263 - protein, 8 aa, Homo sapiens
  Table 1.2; KCNU1; ENSG00000215262; HLA -B*18:01,HLA-B*35:01,HLA-B*55:01
MPLRASNY

SEQ ID NO: 4264 - protein, 9 aa, Homo sapiens
  Table 1.2; KCNU1; ENSG00000215262; HLA -B*27:02,HLA-B*27:05
MRVLSIKNY

SEQ ID NO: 4265 - protein, 9 aa, Homo sapiens
  Table 1.2; KCNU1; ENSG00000215262; HLA -A*02:03,HLA-A*02:04,HLA-A*02:07,HLA-A*68:02,HLA-B*57:01, HLA-B*58:01
MSFPEVARL

SEQ ID NO: 4266 - protein, 11 aa, Homo sapiens
  Table 1.2; KCNU1; ENSG00000215262; HLA -B*57:01
MSFPEVARLCF

SEQ ID NO: 4267 - protein, 10 aa, Homo sapiens
  Table 1.2; KCNU1; ENSG00000215262; HLA -B*18:01,HLA-B*44:02,HLA-B*44:03,HLA-C*16:04
NEEFSLQKSY

SEQ ID NO: 4268 - protein, 8 aa, Homo sapiens
  Table 1.2; KCNU1; ENSG00000215262; HLA -B*18:01
NHIVACVF

SEQ ID NO: 4269 - protein, 8 aa, Homo sapiens
  Table 1.2; KCNU1; ENSG00000215262; HLA -B*51:01
NIMRVLSI

SEQ ID NO: 4270 - protein, 10 aa, Homo sapiens
  Table 1.2; KCNU1; ENSG00000215262; HLA -A*25:01,HLA-B*39:01
NITVDSVTAF

SEQ ID NO: 4271 - protein, 8 aa, Homo sapiens
  Table 1.2; KCNU1; ENSG00000215262; HLA -B*37:01
NLHLSTAF

SEQ ID NO: 4272 - protein, 8 aa, Homo sapiens
  Table 1.2; KCNU1; ENSG00000215262; HLA -B*51:01
NPPPQVRI

SEQ ID NO: 4273 - protein, 9 aa, Homo sapiens
  Table 1.2; KCNU1; ENSG00000215262; HLA -B*07:02,HLA-C*07:02
NPRNTFGQL

SEQ ID NO: 4274 - protein, 10 aa, Homo sapiens
  Table 1.2; KCNU1; ENSG00000215262; HLA -B*07:02
NPRNTFGQLF

SEQ ID NO: 4275 - protein, 8 aa, Homo sapiens
  Table 1.2; KCNU1; ENSG00000215262; HLA -B*51:01
NPSNIHFI

SEQ ID NO: 4276 - protein, 11 aa, Homo sapiens
  Table 1.2; KCNU1; ENSG00000215262; HLA -A*68:02
NPSNIHFIEQL

SEQ ID NO: 4277 - protein, 9 aa, Homo sapiens
  Table 1.2; KCNU1; ENSG00000215262; HLA -C*12:03
NSADPVGSC

SEQ ID NO: 4278 - protein, 8 aa, Homo sapiens
  Table 1.2; KCNU1; ENSG00000215262; HLA -B*51:01
NSIISSQI

SEQ ID NO: 4279 - protein, 11 aa, Homo sapiens
  Table 1.2; KCNU1; ENSG00000215262; HLA -B*57:01
NSLSFPKQIAW

SEQ ID NO: 4280 - protein, 8 aa, Homo sapiens
  Table 1.2; KCNU1; ENSG00000215262; HLA -C*05:01,HLA-C*07:04
NYDSTTRI

SEQ ID NO: 4281 - protein, 9 aa, Homo sapiens
  Table 1.2; KCNU1; ENSG00000215262; HLA -A*23:01,HLA-A*24:02,HLA-B*35:01,HLA-B*35:03
NYDSTTRII

SEQ ID NO: 4282 - protein, 10 aa, Homo sapiens
  Table 1.2; KCNU1; ENSG00000215262; HLA -A*24:02
NYDSTTRIII

SEQ ID NO: 4283 - protein, 9 aa, Homo sapiens
  Table 1.2; KCNU1; ENSG00000215262; HLA -A*23:01,HLA-A*24:02,HLA-B*35:03,HLA-B*38:01,HLA-C*14:02
NYIPEMVEL

SEQ ID NO: 4284 - protein, 10 aa, Homo sapiens
  Table 1.2; KCNU1; ENSG00000215262; HLA -A*23:01,HLA-A*24:02,HLA-A*29:02
NYIPEMVELF

SEQ ID NO: 4285 - protein, 10 aa, Homo sapiens
  Table 1.2; KCNU1; ENSG00000215262; HLA -B*27:02
PEMVELFANK

SEQ ID NO: 4286 - protein, 11 aa, Homo sapiens
  Table 1.2; KCNU1; ENSG00000215262; HLA -B*07:02
PPPQPSSNQTL

SEQ ID NO: 4287 - protein, 10 aa, Homo sapiens
  Table 1.2; KCNU1; ENSG00000215262; HLA -B*27:02
PSLELETIFK

SEQ ID NO: 4288 - protein, 11 aa, Homo sapiens
  Table 1.2; KCNU1; ENSG00000215262; HLA -A*01:01,HLA-A*30:02
PTIDSVTETLY

SEQ ID NO: 4289 - protein, 8 aa, Homo sapiens
  Table 1.2; KCNU1; ENSG00000215262; HLA -C*07:01
PVGSCSSY

SEQ ID NO: 4290 - protein, 9 aa, Homo sapiens
  Table 1.2; KCNU1; ENSG00000215262; HLA -A*23:01,HLA-A*25:01,HLA-A*26:01,HLA-B*15:01,HLA-B*15:03, HLA-B*35:01,HLA-B*46:01,HLA-B*57:01,HLA-B*58:01,HLA-C*02:02, HLA-C*03:04,HLA-C*12:03,HLA-C*16:04
QAAFILSSF

SEQ ID NO: 4291 - protein, 9 aa, Homo sapiens
  Table 1.2; KCNU1; ENSG00000215262; HLA -B*37:01,HLA-B*56:01
QDSPPRVSA

SEQ ID NO: 4292 - protein, 10 aa, Homo sapiens
  Table 1.2; KCNU1; ENSG00000215262; HLA -A*30:01
QETNLHLSTA

SEQ ID NO: 4293 - protein, 11 aa, Homo sapiens
  Table 1.2; KCNU1; ENSG00000215262; HLA -A*30:01,HLA-B*18:01,HLA-B*40:02,HLA-B*44:02,HLA-B*44:03
QETNLHLSTAF

SEQ ID NO: 4294 - protein, 11 aa, Homo sapiens
  Table 1.2; KCNU1; ENSG00000215262; HLA -B*38:01,HLA-B*39:01
QHDVEQDSDQL

SEQ ID NO: 4295 - protein, 8 aa, Homo sapiens
  Table 1.2; KCNU1; ENSG00000215262; HLA -B*13:02,HLA-B*39:01,HLA-B*51:01
QHITVPSV

SEQ ID NO: 4296 - protein, 10 aa, Homo sapiens
  Table 1.2; KCNU1; ENSG00000215262; HLA -A*33:03
QHITVPSVKR

SEQ ID NO: 4297 - protein, 8 aa, Homo sapiens
  Table 1.2; KCNU1; ENSG00000215262; HLA -C*05:01
QLDSSGMF

SEQ ID NO: 4298 - protein, 9 aa, Homo sapiens
  Table 1.2; KCNU1; ENSG00000215262; HLA -A*01:01
QLDSSGMFH

SEQ ID NO: 4299 - protein, 10 aa, Homo sapiens
  Table 1.2; KCNU1; ENSG00000215262; HLA -A*01:01
QLDSSGMFHW

SEQ ID NO: 4300 - protein, 9 aa, Homo sapiens
  Table 1.2; KCNU1; ENSG00000215262; HLA -B*07:02,HLA-B*35:01,HLA-C*07:02
QPRTNSLSF

SEQ ID NO: 4301 - protein, 9 aa, Homo sapiens
  Table 1.2; KCNU1; ENSG00000215262; HLA -B*56:01
QPSSNQTLV

SEQ ID NO: 4302 - protein, 8 aa, Homo sapiens
  Table 1.2; KCNU1; ENSG00000215262; HLA -B*08:01
QSHNKVYL

SEQ ID NO: 4303 - protein, 8 aa, Homo sapiens
  Table 1.2; KCNU1; ENSG00000215262; HLA -C*01:02,HLA-C*03:03,HLA-C*03:04
QTFVGQVL

SEQ ID NO: 4304 - protein, 9 aa, Homo sapiens
  Table 1.2; KCNU1; ENSG00000215262; HLA -A*68:02
QTFVGQVLV

SEQ ID NO: 4305 - protein, 9 aa, Homo sapiens
  Table 1.2; KCNU1; ENSG00000215262; HLA -A*32:01,HLA-B*57:01
QTKLRNETW

SEQ ID NO: 4306 - protein, 9 aa, Homo sapiens
  Table 1.2; KCNU1; ENSG00000215262; HLA -B*08:01
QVRIRKNTL

SEQ ID NO: 4307 - protein, 9 aa, Homo sapiens
  Table 1.2; KCNU1; ENSG00000215262; HLA -A*32:01,HLA-B*46:01,HLA-B*58:01,HLA-C*03:04
RAIKTSNSV

SEQ ID NO: 4308 - protein, 11 aa, Homo sapiens
  Table 1.2; KCNU1; ENSG00000215262; HLA -B*57:01,HLA-B*58:01
RAIKTSNSVKF

SEQ ID NO: 4309 - protein, 9 aa, Homo sapiens
  Table 1.2; KCNU1; ENSG00000215262; HLA -A*24:02
RFLWNFPQI

SEQ ID NO: 4310 - protein, 11 aa, Homo sapiens
  Table 1.2; KCNU1; ENSG00000215262; HLA -A*24:02
RFMAADDKIKF

SEQ ID NO: 4311 - protein, 11 aa, Homo sapiens
  Table 1.2; KCNU1; ENSG00000215262; HLA -A*24:02
RFVITRPANEF

SEQ ID NO: 4312 - protein, 9 aa, Homo sapiens
  Table 1.2; KCNU1; ENSG00000215262; HLA -B*15:03
RKVPILTEL

SEQ ID NO: 4313 - protein, 8 aa, Homo sapiens
  Table 1.2; KCNU1; ENSG00000215262; HLA -A*02:04
RLLELPQI

SEQ ID NO: 4314 - protein, 9 aa, Homo sapiens
  Table 1.2; KCNU1; ENSG00000215262; HLA -A*02:01,HLA-A*02:03,HLA-A*02:04,HLA-A*02:07
RLLELPQIL

SEQ ID NO: 4315 - protein, 11 aa, Homo sapiens
  Table 1.2; KCNU1; ENSG00000215262; HLA -A*02:01,HLA-A*02:03,HLA-A*02:04
RLLELPQILQI

SEQ ID NO: 4316 - protein, 9 aa, Homo sapiens
  Table 1.2; KCNU1; ENSG00000215262; HLA -A*02:01,HLA-A*02:03,HLA-A*02:04,HLA-B*13:02
RQHITVPSV

SEQ ID NO: 4317 - protein, 10 aa, Homo sapiens
  Table 1.2; KCNU1; ENSG00000215262; HLA -A*03:01,HLA-A*03:02
RQHITVPSVK

SEQ ID NO: 4318 - protein, 9 aa, Homo sapiens
  Table 1.2; KCNU1; ENSG00000215262; HLA -B*57:01
RSLHFQGQF

SEQ ID NO: 4319 - protein, 10 aa, Homo sapiens
  Table 1.2; KCNU1; ENSG00000215262; HLA -A*31:01
RSLHFQGQFR

SEQ ID NO: 4320 - protein, 9 aa, Homo sapiens
  Table 1.2; KCNU1; ENSG00000215262; HLA -B*57:01
RTFIMFFTL

SEQ ID NO: 4321 - protein, 9 aa, Homo sapiens
  Table 1.2; KCNU1; ENSG00000215262; HLA -A*03:01,HLA-A*03:02,HLA-A*11:01,HLA-A*31:01
RTNSLSFPK

SEQ ID NO: 4322 - protein, 8 aa, Homo sapiens
  Table 1.2; KCNU1; ENSG00000215262; HLA -C*05:01
SADPVGSC

SEQ ID NO: 4323 - protein, 11 aa, Homo sapiens
  Table 1.2; KCNU1; ENSG00000215262; HLA -A*01:01,HLA-A*30:02,HLA-B*35:01
SADPVGSCSSY

SEQ ID NO: 4324 - protein, 9 aa, Homo sapiens
  Table 1.2; KCNU1; ENSG00000215262; HLA -A*31:01
SAMKWEDLR

SEQ ID NO: 4325 - protein, 9 aa, Homo sapiens
  Table 1.2; KCNU1; ENSG00000215262; HLA -C*01:02
SAPMGLRNF

SEQ ID NO: 4326 - protein, 9 aa, Homo sapiens
  Table 1.2; KCNU1; ENSG00000215262; HLA -C*16:02
SAQTFVGQV

SEQ ID NO: 4327 - protein, 10 aa, Homo sapiens
  Table 1.2; KCNU1; ENSG00000215262; HLA -C*03:04
SAQTFVGQVL

SEQ ID NO: 4328 - protein, 9 aa, Homo sapiens
  Table 1.2; KCNU1; ENSG00000215262; HLA -B*37:01
SDQLDSSGM

SEQ ID NO: 4329 - protein, 9 aa, Homo sapiens
  Table 1.2; KCNU1; ENSG00000215262; HLA -A*23:01,HLA-A*30:01,HLA-A*32:01,HLA-B*37:01,HLA-B*44:02, HLA-B*44:03
SDVNPRNTF

SEQ ID NO: 4330 - protein, 11 aa, Homo sapiens
  Table 1.2; KCNU1; ENSG00000215262; HLA -A*23:01,HLA-A*24:02,HLA-A*29:02
SFLDSLLATAF

SEQ ID NO: 4331 - protein, 10 aa, Homo sapiens
  Table 1.2; KCNU1; ENSG00000215262; HLA -A*24:02
SFPEVARLCF

SEQ ID NO: 4332 - protein, 9 aa, Homo sapiens
  Table 1.2; KCNU1; ENSG00000215262; HLA -A*31:01
SGDPWLKGR

SEQ ID NO: 4333 - protein, 9 aa, Homo sapiens
  Table 1.2; KCNU1; ENSG00000215262; HLA -B*27:05,HLA-B*38:01,HLA-B*39:01
SHAEDISNI

SEQ ID NO: 4334 - protein, 10 aa, Homo sapiens
  Table 1.2; KCNU1; ENSG00000215262; HLA -B*38:01,HLA-B*39:01
SHAEDISNIM

SEQ ID NO: 4335 - protein, 10 aa, Homo sapiens
  Table 1.2; KCNU1; ENSG00000215262; HLA -A*31:01,HLA-A*33:03,HLA-A*68:01
SIKNYDSTTR

SEQ ID NO: 4336 - protein, 8 aa, Homo sapiens
  Table 1.2; KCNU1; ENSG00000215262; HLA -A*31:01,HLA-A*33:03,HLA-A*68:01
SISNFTTR

SEQ ID NO: 4337 - protein, 8 aa, Homo sapiens
  Table 1.2; KCNU1; ENSG00000215262; HLA -A*02:04,HLA-B*13:02
SIVDIFTI

SEQ ID NO: 4338 - protein, 8 aa, Homo sapiens
  Table 1.2; KCNU1; ENSG00000215262; HLA -A*03:02
SLDKVTLK

SEQ ID NO: 4339 - protein, 9 aa, Homo sapiens
  Table 1.2; KCNU1; ENSG00000215262; HLA -A*02:07,HLA-A*03:01
SLDKVTLKR

SEQ ID NO: 4340 - protein, 10 aa, Homo sapiens
  Table 1.2; KCNU1; ENSG00000215262; HLA -A*02:01
SLDLFGILCV

SEQ ID NO: 4341 - protein, 9 aa, Homo sapiens
  Table 1.2; KCNU1; ENSG00000215262; HLA -B*44:02
SLDYLQREW

SEQ ID NO: 4342 - protein, 10 aa, Homo sapiens
  Table 1.2; KCNU1; ENSG00000215262; HLA -A*02:01,HLA-A*02:03,HLA-A*02:04,HLA-A*02:07
SLFTDGFCGL

SEQ ID NO: 4343 - protein, 9 aa, Homo sapiens
  Table 1.2; KCNU1; ENSG00000215262; HLA -A*03:01,HLA-A*03:02,HLA-A*11:01
SLFVEQNKK

SEQ ID NO: 4344 - protein, 10 aa, Homo sapiens
  Table 1.2; KCNU1; ENSG00000215262; HLA -A*02:03
SLFVEQNKKV

SEQ ID NO: 4345 - protein, 10 aa, Homo sapiens
  Table 1.2; KCNU1; ENSG00000215262; HLA -A*02:03
SLHETILSDV

SEQ ID NO: 4346 - protein, 10 aa, Homo sapiens
  Table 1.2; KCNU1; ENSG00000215262; HLA -A*29:02
SLLATAFYNY

SEQ ID NO: 4347 - protein, 9 aa, Homo sapiens
  Table 1.2; KCNU1; ENSG00000215262; HLA -A*02:01,HLA-A*02:03,HLA-A*02:04,HLA-A*02:07,HLA-B*13:02, HLA-B*55:01
SLQETNLHL

SEQ ID NO: 4348 - protein, 8 aa, Homo sapiens
  Table 1.2; KCNU1; ENSG00000215262; HLA -B*13:02
SLQKSYEI

SEQ ID NO: 4349 - protein, 11 aa, Homo sapiens
  Table 1.2; KCNU1; ENSG00000215262; HLA -A*03:02,HLA-A*11:01
SLQKSYEIVNK

SEQ ID NO: 4350 - protein, 10 aa, Homo sapiens
  Table 1.2; KCNU1; ENSG00000215262; HLA -A*31:01
SMKNKILTQR

SEQ ID NO: 4351 - protein, 9 aa, Homo sapiens
  Table 1.2; KCNU1; ENSG00000215262; HLA -B*08:01
SNIMRVLSI

SEQ ID NO: 4352 - protein, 8 aa, Homo sapiens
  Table 1.2; KCNU1; ENSG00000215262; HLA -B*08:01,HLA-C*16:01
SNYTRKEL

SEQ ID NO: 4353 - protein, 9 aa, Homo sapiens
  Table 1.2; KCNU1; ENSG00000215262; HLA -A*68:01
SPVYSYQPR

SEQ ID NO: 4354 - protein, 9 aa, Homo sapiens
  Table 1.2; KCNU1; ENSG00000215262; HLA -B*39:01
SQIPLGDNA

SEQ ID NO: 4355 - protein, 8 aa, Homo sapiens
  Table 1.2; KCNU1; ENSG00000215262; HLA -C*05:01
SSDPSPSV

SEQ ID NO: 4356 - protein, 9 aa, Homo sapiens
  Table 1.2; KCNU1; ENSG00000215262; HLA -A*03:01,HLA-A*11:01,HLA-A*25:01,HLA-A*31:01,HLA-A*33:01, HLA-A*33:03,HLA-A*68:01,HLA-B*57:01,HLA-B*58:01,HLA-C*07:06
SSISNFTTR

SEQ ID NO: 4357 - protein, 11 aa, Homo sapiens
  Table 1.2; KCNU1; ENSG00000215262; HLA -A*11:01
SSQIPLGDNAK

SEQ ID NO: 4358 - protein, 9 aa, Homo sapiens
  Table 1.2; KCNU1; ENSG00000215262; HLA -A*02:01,HLA-B*13:02,HLA-B*39:01,HLA-B*51:01,HLA-C*03:03, HLA-C*03:04,HLA-C*05:01
SSSDPSPSV

SEQ ID NO: 4359 - protein, 9 aa, Homo sapiens
  Table 1.2; KCNU1; ENSG00000215262; HLA -A*03:01,HLA-A*03:02,HLA-A*11:01
SSYEALKGK

SEQ ID NO: 4360 - protein, 9 aa, Homo sapiens
  Table 1.2; KCNU1; ENSG00000215262; HLA -A*02:03
STAFSTGTV

SEQ ID NO: 4361 - protein, 10 aa, Homo sapiens
  Table 1.2; KCNU1; ENSG00000215262; HLA -A*25:01,HLA-A*26:01,HLA-B*15:01,HLA-B*15:03,HLA-C*07:04
STAFSTGTVF

SEQ ID NO: 4362 - protein, 8 aa, Homo sapiens
  Table 1.2; KCNU1; ENSG00000215262; HLA -B*37:01
STSSISNF

SEQ ID NO: 4363 - protein, 11 aa, Homo sapiens
  Table 1.2; KCNU1; ENSG00000215262; HLA -A*03:02,HLA-A*11:01,HLA-A*31:01,HLA-A*33:01,HLA-A*33:03, HLA-A*68:01,HLA-C*07:06
STSSISNFTTR

SEQ ID NO: 4364 - protein, 9 aa, Homo sapiens
  Table 1.2; KCNU1; ENSG00000215262; HLA -A*02:04,HLA-A*68:01,HLA-A*68:02,HLA-B*13:02,HLA-B*57:01
STTRIIIQI

SEQ ID NO: 4365 - protein, 10 aa, Homo sapiens
  Table 1.2; KCNU1; ENSG00000215262; HLA -A*68:02
STTRIIIQIL

SEQ ID NO: 4366 - protein, 9 aa, Homo sapiens
  Table 1.2; KCNU1; ENSG00000215262; HLA -A*68:02,HLA-B*39:01
STVGFGDVV

SEQ ID NO: 4367 - protein, 11 aa, Homo sapiens
  Table 1.2; KCNU1; ENSG00000215262; HLA -A*03:02,HLA-A*11:01,HLA-A*31:01,HLA-A*68:01,HLA-B*27:02, HLA-C*07:06
STVGFGDVVAK

SEQ ID NO: 4368 - protein, 9 aa, Homo sapiens
  Table 1.2; KCNU1; ENSG00000215262; HLA -A*01:01,HLA-A*25:01,HLA-A*26:01,HLA-A*29:02,HLA-A*30:02, HLA-A*32:01,HLA-B*15:01,HLA-B*35:01
SVSEETPGY

SEQ ID NO: 4369 - protein, 9 aa, Homo sapiens
  Table 1.2; KCNU1; ENSG00000215262; HLA -A*32:01
SVTAFLRNF

SEQ ID NO: 4370 - protein, 9 aa, Homo sapiens
  Table 1.2; KCNU1; ENSG00000215262; HLA -A*02:04,HLA-A*24:02,HLA-A*29:02,HLA-A*68:02
SYFESIYLV

SEQ ID NO: 4371 - protein, 10 aa, Homo sapiens
  Table 1.2; KCNU1; ENSG00000215262; HLA -A*29:02
SYFESIYLVM

SEQ ID NO: 4372 - protein, 9 aa, Homo sapiens
  Table 1.2; KCNU1; ENSG00000215262; HLA -A*23:01,HLA-A*24:02,HLA-B*07:02,HLA-B*08:01,HLA-C*01:02, HLA-C*14:02
SYQPRTNSL

SEQ ID NO: 4373 - protein, 11 aa, Homo sapiens
  Table 1.2; KCNU1; ENSG00000215262; HLA -A*23:01,HLA-A*24:02
SYQPRTNSLSF

SEQ ID NO: 4374 - protein, 9 aa, Homo sapiens
  Table 1.2; KCNU1; ENSG00000215262; HLA -A*02:01,HLA-A*02:03,HLA-A*02:04,HLA-A*02:07,HLA-A*26:01, HLA-A*68:01,HLA-A*68:02,HLA-B*13:02,HLA-B*51:01,HLA-B*54:01, HLA-C*02:02,HLA-C*12:03,HLA-C*16:02
TAAGFIHLV

SEQ ID NO: 4375 - protein, 8 aa, Homo sapiens
  Table 1.2; KCNU1; ENSG00000215262; HLA -B*08:01
TAFLRNFL

SEQ ID NO: 4376 - protein, 9 aa, Homo sapiens
  Table 1.2; KCNU1; ENSG00000215262; HLA -A*31:01,HLA-B*57:01
TAFLRNFLR

SEQ ID NO: 4377 - protein, 8 aa, Homo sapiens
  Table 1.2; KCNU1; ENSG00000215262; HLA -B*51:01
TAFSTGTV

SEQ ID NO: 4378 - protein, 9 aa, Homo sapiens
  Table 1.2; KCNU1; ENSG00000215262; HLA -A*23:01,HLA-A*25:01,HLA-A*26:01,HLA-A*29:02,HLA-A*30:02, HLA-A*32:01,HLA-B*07:02,HLA-B*15:01,HLA-B*15:03,HLA-B*18:01, HLA-B*27:02,HLA-B*27:05,HLA-B*35:01,HLA-B*35:03,HLA-B*38:01,
  HLA-B*39:01,HLA-B*46:01,HLA-B*51:01,HLA-B*54:01,HLA-B*55:01, HLA-B*56:01,HLA-B*57:01,HLA-B*58:01,HLA-C*01:02,HLA-C*02:02, HLA-C*03:03,HLA-C*03:04,HLA-C*05:01,HLA-C*07:02,HLA-C*07:04, HLA-C*07:06,HLA-C*12:03,HLA-C*14:02,HLA-C*16:01,HLA-C*16:02,
  HLA-C*16:04
TAFSTGTVF

SEQ ID NO: 4379 - protein, 9 aa, Homo sapiens
  Table 1.2; KCNU1; ENSG00000215262; HLA -A*68:02,HLA-B*35:01,HLA-B*35:03,HLA-B*51:01,HLA-B*54:01, HLA-C*02:02,HLA-C*03:04
TAFYNYHVL

SEQ ID NO: 4380 - protein, 8 aa, Homo sapiens
  Table 1.2; KCNU1; ENSG00000215262; HLA -A*30:01,HLA-B*18:01,HLA-B*37:01,HLA-B*40:01,HLA-B*40:02, HLA-B*49:01
TEAIMATL

SEQ ID NO: 4381 - protein, 9 aa, Homo sapiens
  Table 1.2; KCNU1; ENSG00000215262; HLA -B*49:01
TEAIMATLT

SEQ ID NO: 4382 - protein, 10 aa, Homo sapiens
  Table 1.2; KCNU1; ENSG00000215262; HLA -B*49:01
TEAIMATLTI

SEQ ID NO: 4383 - protein, 8 aa, Homo sapiens
  Table 1.2; KCNU1; ENSG00000215262; HLA -B*49:01
TEIQAAFI

SEQ ID NO: 4384 - protein, 9 aa, Homo sapiens
  Table 1.2; KCNU1; ENSG00000215262; HLA -A*30:01,HLA-B*40:01,HLA-B*44:02,HLA-B*44:03
TEIQAAFIL

SEQ ID NO: 4385 - protein, 9 aa, Homo sapiens
  Table 1.2; KCNU1; ENSG00000215262; HLA -B*49:01
TELKNPSNI

SEQ ID NO: 4386 - protein, 11 aa, Homo sapiens
  Table 1.2; KCNU1; ENSG00000215262; HLA -B*44:03
TELKNPSNIHF

SEQ ID NO: 4387 - protein, 8 aa, Homo sapiens
  Table 1.2; KCNU1; ENSG00000215262; HLA -B*49:01
TETLYSPV

SEQ ID NO: 4388 - protein, 9 aa, Homo sapiens
  Table 1.2; KCNU1; ENSG00000215262; HLA -A*30:01,HLA-B*15:03,HLA-B*18:01,HLA-B*27:02,HLA-B*37:01, HLA-B*40:01,HLA-B*44:02,HLA-B*44:03,HLA-B*49:01,HLA-C*16:04
TETLYSPVY

SEQ ID NO: 4389 - protein, 11 aa, Homo sapiens
  Table 1.2; KCNU1; ENSG00000215262; HLA -B*18:01
TETLYSPVYSY

SEQ ID NO: 4390 - protein, 8 aa, Homo sapiens
  Table 1.2; KCNU1; ENSG00000215262; HLA -A*23:01
TFIMFFTL

SEQ ID NO: 4391 - protein, 8 aa, Homo sapiens
  Table 1.2; KCNU1; ENSG00000215262; HLA -C*01:02,HLA-C*14:02
TFISGSAM

SEQ ID NO: 4392 - protein, 10 aa, Homo sapiens
  Table 1.2; KCNU1; ENSG00000215262; HLA -A*23:01,HLA-A*24:02,HLA-A*25:01
TFISGSAMKW

SEQ ID NO: 4393 - protein, 9 aa, Homo sapiens
  Table 1.2; KCNU1; ENSG00000215262; HLA -A*23:01,HLA-A*24:02
TFVGQVLVI

SEQ ID NO: 4394 - protein, 8 aa, Homo sapiens
  Table 1.2; KCNU1; ENSG00000215262; HLA -B*08:01
TGKSKYKF

SEQ ID NO: 4395 - protein, 9 aa, Homo sapiens
  Table 1.2; KCNU1; ENSG00000215262; HLA -B*15:03,HLA-B*39:01
TGTVFSGSF

SEQ ID NO: 4396 - protein, 11 aa, Homo sapiens
  Table 1.2; KCNU1; ENSG00000215262; HLA -B*38:01
THSDTNCPPTI

SEQ ID NO: 4397 - protein, 9 aa, Homo sapiens
  Table 1.2; KCNU1; ENSG00000215262; HLA -A*02:07,HLA-B*35:03,HLA-B*38:01,HLA-C*05:01
TIDSVTETL

SEQ ID NO: 4398 - protein, 10 aa, Homo sapiens
  Table 1.2; KCNU1; ENSG00000215262; HLA -A*01:01
TIDSVTETLY

SEQ ID NO: 4399 - protein, 9 aa, Homo sapiens
  Table 1.2; KCNU1; ENSG00000215262; HLA -A*29:02
TIFKCYLAY

SEQ ID NO: 4400 - protein, 9 aa, Homo sapiens
  Table 1.2; KCNU1; ENSG00000215262; HLA -A*03:02,HLA-A*11:01,HLA-A*31:01,HLA-A*33:01,HLA-A*33:03, HLA-A*68:01,HLA-B*27:02,HLA-B*27:05,HLA-C*07:06
TILSDVNPR

SEQ ID NO: 4401 - protein, 9 aa, Homo sapiens
  Table 1.2; KCNU1; ENSG00000215262; HLA -A*25:01,HLA-A*26:01,HLA-A*29:02,HLA-A*32:01,HLA-B*15:01, HLA-B*46:01
TIPPTFISY

SEQ ID NO: 4402 - protein, 11 aa, Homo sapiens
  Table 1.2; KCNU1; ENSG00000215262; HLA -A*02:07
TIPPTFISYYL

SEQ ID NO: 4403 - protein, 9 aa, Homo sapiens
  Table 1.2; KCNU1; ENSG00000215262; HLA -A*02:01,HLA-A*02:03
TLGSLILFA

SEQ ID NO: 4404 - protein, 9 aa, Homo sapiens
  Table 1.2; KCNU1; ENSG00000215262; HLA -B*13:02
TLTIGSLQI

SEQ ID NO: 4405 - protein, 9 aa, Homo sapiens
  Table 1.2; KCNU1; ENSG00000215262; HLA -B*35:01,HLA-B*35:03
TLVDTEAIM

SEQ ID NO: 4406 - protein, 9 aa, Homo sapiens
  Table 1.2; KCNU1; ENSG00000215262; HLA -A*01:01,HLA-A*03:01,HLA-A*25:01,HLA-A*26:01,HLA-A*29:02, HLA-A*30:02,HLA-A*32:01,HLA-B*15:01,HLA-B*15:03,HLA-B*35:01, HLA-B*46:01,HLA-C*14:02
TLYSPVYSY

SEQ ID NO: 4407 - protein, 9 aa, Homo sapiens
  Table 1.2; KCNU1; ENSG00000215262; HLA -A*23:01
TNLHLSTAF

SEQ ID NO: 4408 - protein, 9 aa, Homo sapiens
  Table 1.2; KCNU1; ENSG00000215262; HLA -B*07:02,HLA-C*07:02
TPKDVRRAL

SEQ ID NO: 4409 - protein, 8 aa, Homo sapiens
  Table 1.2; KCNU1; ENSG00000215262; HLA -B*08:01
TSLDKVTL

SEQ ID NO: 4410 - protein, 9 aa, Homo sapiens
  Table 1.2; KCNU1; ENSG00000215262; HLA -A*03:01,HLA-A*03:02,HLA-A*11:01,HLA-A*33:01,HLA-A*33:03, HLA-A*68:01
TSLDKVTLK

SEQ ID NO: 4411 - protein, 10 aa, Homo sapiens
  Table 1.2; KCNU1; ENSG00000215262; HLA -A*33:01
TSLDKVTLKR

SEQ ID NO: 4412 - protein, 9 aa, Homo sapiens
  Table 1.2; KCNU1; ENSG00000215262; HLA -A*03:02,HLA-A*11:01,HLA-B*27:02,HLA-C*07:06
TSLFVEQNK

SEQ ID NO: 4413 - protein, 10 aa, Homo sapiens
  Table 1.2; KCNU1; ENSG00000215262; HLA -A*11:01,HLA-B*27:02
TSLFVEQNKK

SEQ ID NO: 4414 - protein, 9 aa, Homo sapiens
  Table 1.2; KCNU1; ENSG00000215262; HLA -A*31:01,HLA-A*33:03
TSLLSGRNR

SEQ ID NO: 4415 - protein, 9 aa, Homo sapiens
  Table 1.2; KCNU1; ENSG00000215262; HLA -A*03:02,HLA-A*11:01,HLA-A*31:01,HLA-A*33:03
TSNSVKFSK

SEQ ID NO: 4416 - protein, 10 aa, Homo sapiens
  Table 1.2; KCNU1; ENSG00000215262; HLA -A*68:01,HLA-C*07:06
TSSISNFTTR

SEQ ID NO: 4417 - protein, 9 aa, Homo sapiens
  Table 1.2; KCNU1; ENSG00000215262; HLA -A*26:01,HLA-A*32:01,HLA-B*07:02,HLA-B*15:01,HLA-B*15:03, HLA-B*39:01,HLA-B*46:01,HLA-C*01:02,HLA-C*03:03,HLA-C*03:04, HLA-C*14:02
TTFISGSAM

SEQ ID NO: 4418 - protein, 10 aa, Homo sapiens
  Table 1.2; KCNU1; ENSG00000215262; HLA -A*03:01,HLA-A*03:02,HLA-A*11:01,HLA-A*68:01
TTFISGSAMK

SEQ ID NO: 4419 - protein, 11 aa, Homo sapiens
  Table 1.2; KCNU1; ENSG00000215262; HLA -A*25:01,HLA-B*57:01,HLA-B*58:01
TTFISGSAMKW

SEQ ID NO: 4420 - protein, 11 aa, Homo sapiens
  Table 1.2; KCNU1; ENSG00000215262; HLA -A*01:01,HLA-A*68:02
TTSTVGFGDVV

SEQ ID NO: 4421 - protein, 8 aa, Homo sapiens
  Table 1.2; KCNU1; ENSG00000215262; HLA -B*37:01,HLA-C*05:01
TVDSVTAF

SEQ ID NO: 4422 - protein, 9 aa, Homo sapiens
  Table 1.2; KCNU1; ENSG00000215262; HLA -A*01:01,HLA-A*02:01,HLA-A*02:07,HLA-A*68:02,HLA-B*13:02, HLA-B*35:03,HLA-B*38:01,HLA-C*05:01
TVDSVTAFL

SEQ ID NO: 4423 - protein, 10 aa, Homo sapiens
  Table 1.2; KCNU1; ENSG00000215262; HLA -A*68:01,HLA-B*27:02
TVDSVTAFLR

SEQ ID NO: 4424 - protein, 11 aa, Homo sapiens
  Table 1.2; KCNU1; ENSG00000215262; HLA -A*68:02
TVFSGSFLDSL

SEQ ID NO: 4425 - protein, 8 aa, Homo sapiens
  Table 1.2; KCNU1; ENSG00000215262; HLA -B*39:01
TVGFGDVV

SEQ ID NO: 4426 - protein, 10 aa, Homo sapiens
  Table 1.2; KCNU1; ENSG00000215262; HLA -A*03:01,HLA-A*03:02,HLA-A*11:01,HLA-A*68:01,HLA-B*27:02
TVGFGDVVAK

SEQ ID NO: 4427 - protein, 8 aa, Homo sapiens
  Table 1.2; KCNU1; ENSG00000215262; HLA -C*05:01
VADSCTSL

SEQ ID NO: 4428 - protein, 9 aa, Homo sapiens
  Table 1.2; KCNU1; ENSG00000215262; HLA -A*01:01,HLA-A*02:07,HLA-B*35:03,HLA-B*38:01,HLA-C*04:01, HLA-C*05:01,HLA-C*07:04
VADSCTSLL

SEQ ID NO: 4429 - protein, 8 aa, Homo sapiens
  Table 1.2; KCNU1; ENSG00000215262; HLA -B*46:01
VAVESAEA

SEQ ID NO: 4430 - protein, 9 aa, Homo sapiens
  Table 1.2; KCNU1; ENSG00000215262; HLA -B*46:01,HLA-C*03:03,HLA-C*03:04
VAVESAEAC

SEQ ID NO: 4431 - protein, 10 aa, Homo sapiens
  Table 1.2; KCNU1; ENSG00000215262; HLA -B*35:03
VAVESAEACL

SEQ ID NO: 4432 - protein, 8 aa, Homo sapiens
  Table 1.2; KCNU1; ENSG00000215262; HLA -B*37:01
VDSVTAFL

SEQ ID NO: 4433 - protein, 10 aa, Homo sapiens
  Table 1.2; KCNU1; ENSG00000215262; HLA -A*30:01
VDTEAIMATL

SEQ ID NO: 4434 - protein, 9 aa, Homo sapiens
  Table 1.2; KCNU1; ENSG00000215262; HLA -B*40:01
VENSGDPWL

SEQ ID NO: 4435 - protein, 10 aa, Homo sapiens
  Table 1.2; KCNU1; ENSG00000215262; HLA -A*03:02,HLA-A*11:01,HLA-B*27:02
VENSGDPWLK

SEQ ID NO: 4436 - protein, 8 aa, Homo sapiens
  Table 1.2; KCNU1; ENSG00000215262; HLA -B*37:01
VEQNKKVM

SEQ ID NO: 4437 - protein, 8 aa, Homo sapiens
  Table 1.2; KCNU1; ENSG00000215262; HLA -B*40:01
VESAEACL

SEQ ID NO: 4438 - protein, 9 aa, Homo sapiens
  Table 1.2; KCNU1; ENSG00000215262; HLA -B*40:01,HLA-B*49:01
VESAEACLI

SEQ ID NO: 4439 - protein, 10 aa, Homo sapiens
  Table 1.2; KCNU1; ENSG00000215262; HLA -B*49:01
VESAEACLII

SEQ ID NO: 4440 - protein, 9 aa, Homo sapiens
  Table 1.2; KCNU1; ENSG00000215262; HLA -A*23:01,HLA-A*24:02
VFIGSLDYL

SEQ ID NO: 4441 - protein, 10 aa, Homo sapiens
  Table 1.2; KCNU1; ENSG00000215262; HLA -A*23:01,HLA-A*24:02,HLA-C*14:02
VFLGETPPSL

SEQ ID NO: 4442 - protein, 9 aa, Homo sapiens
  Table 1.2; KCNU1; ENSG00000215262; HLA -A*29:02
VFNAFFSFY

SEQ ID NO: 4443 - protein, 9 aa, Homo sapiens
  Table 1.2; KCNU1; ENSG00000215262; HLA -A*23:01,HLA-C*14:02
VFVLSIGSL

SEQ ID NO: 4444 - protein, 10 aa, Homo sapiens
  Table 1.2; KCNU1; ENSG00000215262; HLA -A*23:01
VFVLSIGSLI

SEQ ID NO: 4445 - protein, 9 aa, Homo sapiens
  Table 1.2; KCNU1; ENSG00000215262; HLA -A*03:01,HLA-A*03:02,HLA-A*11:01,HLA-A*31:01,HLA-A*68:01, HLA-B*27:02,HLA-B*27:05,HLA-C*07:04,HLA-C*07:06
VGFGDVVAK

SEQ ID NO: 4446 - protein, 9 aa, Homo sapiens
  Table 1.2; KCNU1; ENSG00000215262; HLA -A*23:01,HLA-A*24:02,HLA-A*32:01,HLA-B*15:01,HLA-B*15:03, HLA-B*46:01,HLA-B*58:01,HLA-C*03:03,HLA-C*03:04,HLA-C*16:01, HLA-C*16:02
VITRPANEF

SEQ ID NO: 4447 - protein, 9 aa, Homo sapiens
  Table 1.2; KCNU1; ENSG00000215262; HLA -A*01:01
VLELLQMLV

SEQ ID NO: 4448 - protein, 9 aa, Homo sapiens
  Table 1.2; KCNU1; ENSG00000215262; HLA -A*03:02,HLA-B*27:05,HLA-B*39:01
VLSPPPQPS

SEQ ID NO: 4449 - protein, 10 aa, Homo sapiens
  Table 1.2; KCNU1; ENSG00000215262; HLA -B*27:05
VLSPPPQPSS

SEQ ID NO: 4450 - protein, 9 aa, Homo sapiens
  Table 1.2; KCNU1; ENSG00000215262; HLA -A*02:04
VLVILVFVL

SEQ ID NO: 4451 - protein, 8 aa, Homo sapiens
  Table 1.2; KCNU1; ENSG00000215262; HLA -A*02:03
VMATTSTV

SEQ ID NO: 4452 - protein, 9 aa, Homo sapiens
  Table 1.2; KCNU1; ENSG00000215262; HLA -A*32:01
VMATTSTVG

SEQ ID NO: 4453 - protein, 10 aa, Homo sapiens
  Table 1.2; KCNU1; ENSG00000215262; HLA -A*23:01,HLA-A*32:01,HLA-B*15:01,HLA-B*46:01,HLA-C*14:02
VMATTSTVGF

SEQ ID NO: 4454 - protein, 9 aa, Homo sapiens
  Table 1.2; KCNU1; ENSG00000215262; HLA -B*15:01,HLA-B*15:03,HLA-B*46:01,HLA-C*01:02
VMPLRASNY

SEQ ID NO: 4455 - protein, 11 aa, Homo sapiens
  Table 1.2; KCNU1; ENSG00000215262; HLA -A*24:02
VNPRNTFGQLF

SEQ ID NO: 4456 - protein, 11 aa, Homo sapiens
  Table 1.2; KCNU1; ENSG00000215262; HLA -B*56:01
VPILTELKNPS

SEQ ID NO: 4457 - protein, 8 aa, Homo sapiens
  Table 1.2; KCNU1; ENSG00000215262; HLA -A*01:01
VSEETPGY

SEQ ID NO: 4458 - protein, 9 aa, Homo sapiens
  Table 1.2; KCNU1; ENSG00000215262; HLA -B*58:01
VSSQLEQHL

SEQ ID NO: 4459 - protein, 9 aa, Homo sapiens
  Table 1.2; KCNU1; ENSG00000215262; HLA -A*68:02
VTAFLRNFL

SEQ ID NO: 4460 - protein, 9 aa, Homo sapiens
  Table 1.2; KCNU1; ENSG00000215262; HLA -A*01:01
VTETLYSPV

SEQ ID NO: 4461 - protein, 10 aa, Homo sapiens
  Table 1.2; KCNU1; ENSG00000215262; HLA -A*01:01,HLA-A*30:02
VTETLYSPVY

SEQ ID NO: 4462 - protein, 9 aa, Homo sapiens
  Table 1.2; KCNU1; ENSG00000215262; HLA -A*03:01,HLA-A*03:02,HLA-A*32:01,HLA-A*68:01,HLA-C*01:02
VTGGVSSQL

SEQ ID NO: 4463 - protein, 9 aa, Homo sapiens
  Table 1.2; KCNU1; ENSG00000215262; HLA -A*03:01
VVAKTSLGR

SEQ ID NO: 4464 - protein, 9 aa, Homo sapiens
  Table 1.2; KCNU1; ENSG00000215262; HLA -A*01:01,HLA-A*23:01,HLA-A*24:02,HLA-A*29:02,HLA-A*30:02, HLA-B*35:01,HLA-B*35:03,HLA-B*55:01,HLA-C*04:01
VYDEDPFAY

SEQ ID NO: 4465 - protein, 9 aa, Homo sapiens
  Table 1.2; KCNU1; ENSG00000215262; HLA -A*23:01,HLA-A*24:02,HLA-A*25:01,HLA-A*32:01,HLA-B*57:01, HLA-B*58:01
VYLPKIPSW

SEQ ID NO: 4466 - protein, 11 aa, Homo sapiens
  Table 1.2; KCNU1; ENSG00000215262; HLA -A*24:02
VYLPKIPSWNW

SEQ ID NO: 4467 - protein, 11 aa, Homo sapiens
  Table 1.2; KCNU1; ENSG00000215262; HLA -A*24:02
VYSYQPRTNSL

SEQ ID NO: 4468 - protein, 8 aa, Homo sapiens
  Table 1.2; KCNU1; ENSG00000215262; HLA -B*18:01
YDEDPFAY

SEQ ID NO: 4469 - protein, 8 aa, Homo sapiens
  Table 1.2; KCNU1; ENSG00000215262; HLA -B*37:01
YDSTTRII

SEQ ID NO: 4470 - protein, 9 aa, Homo sapiens
  Table 1.2; KCNU1; ENSG00000215262; HLA -B*44:02,HLA-B*44:03
YEALKGKKF

SEQ ID NO: 4471 - protein, 8 aa, Homo sapiens
  Table 1.2; KCNU1; ENSG00000215262; HLA -B*49:01
YEDKTIPI

SEQ ID NO: 4472 - protein, 10 aa, Homo sapiens
  Table 1.2; KCNU1; ENSG00000215262; HLA -A*30:01,HLA-B*40:01
YEDKTIPIDL

SEQ ID NO: 4473 - protein, 9 aa, Homo sapiens
  Table 1.2; KCNU1; ENSG00000215262; HLA -A*30:01,HLA-B*40:01,HLA-B*40:02,HLA-B*49:01
YEIVNKASQ

SEQ ID NO: 4474 - protein, 10 aa, Homo sapiens
  Table 1.2; KCNU1; ENSG00000215262; HLA -B*40:02,HLA-B*49:01
YEIVNKASQT

SEQ ID NO: 4475 - protein, 11 aa, Homo sapiens
  Table 1.2; KCNU1; ENSG00000215262; HLA -A*30:01
YEIVNKASQTT

SEQ ID NO: 4476 - protein, 9 aa, Homo sapiens
  Table 1.2; KCNU1; ENSG00000215262; HLA -A*23:01,HLA-A*29:02
YFESIYLVM

SEQ ID NO: 4477 - protein, 8 aa, Homo sapiens
  Table 1.2; KCNU1; ENSG00000215262; HLA -B*08:01
YILPGCAL

SEQ ID NO: 4478 - protein, 9 aa, Homo sapiens
  Table 1.2; KCNU1; ENSG00000215262; HLA -A*01:01,HLA-A*29:02
YILPGCALY

SEQ ID NO: 4479 - protein, 8 aa, Homo sapiens
  Table 1.2; KCNU1; ENSG00000215262; HLA -A*02:07
YIPEMVEL

SEQ ID NO: 4480 - protein, 9 aa, Homo sapiens
  Table 1.2; KCNU1; ENSG00000215262; HLA -A*02:07,HLA-A*24:02,HLA-A*26:01,HLA-A*29:02
YIPEMVELF

SEQ ID NO: 4481 - protein, 10 aa, Homo sapiens
  Table 1.2; KCNU1; ENSG00000215262; HLA -A*02:07
YIPEMVELFA

SEQ ID NO: 4482 - protein, 8 aa, Homo sapiens
  Table 1.2; KCNU1; ENSG00000215262; HLA -B*13:02
YLAYTTFI

SEQ ID NO: 4483 - protein, 9 aa, Homo sapiens
  Table 1.2; KCNU1; ENSG00000215262; HLA -A*02:03,HLA-A*02:04
YLKSNWLGL

SEQ ID NO: 4484 - protein, 8 aa, Homo sapiens
  Table 1.2; KCNU1; ENSG00000215262; HLA -A*24:02
YLPKIPSW

SEQ ID NO: 4485 - protein, 10 aa, Homo sapiens
  Table 1.2; KCNU1; ENSG00000215262; HLA -A*02:07,HLA-A*24:02
YLPKIPSWNW

SEQ ID NO: 4486 - protein, 10 aa, Homo sapiens
  Table 1.2; KCNU1; ENSG00000215262; HLA -A*02:03
YLVMATTSTV

SEQ ID NO: 4487 - protein, 9 aa, Homo sapiens
  Table 1.2; KCNU1; ENSG00000215262; HLA -A*02:04,HLA-A*68:02
YNYHVLELL

SEQ ID NO: 4488 - protein, 8 aa, Homo sapiens
  Table 1.2; KCNU1; ENSG00000215262; HLA -B*13:02,HLA-C*01:02
YQPRTNSL

SEQ ID NO: 4489 - protein, 10 aa, Homo sapiens
  Table 1.2; KCNU1; ENSG00000215262; HLA -A*24:02
YQPRTNSLSF

SEQ ID NO: 4490 - protein, 9 aa, Homo sapiens
  Table 1.2; KCNU1; ENSG00000215262; HLA -B*27:05,HLA-B*38:01,HLA-B*39:01
YRIIDEEEL

SEQ ID NO: 4491 - protein, 8 aa, Homo sapiens
  Table 1.2; KCNU1; ENSG00000215262; HLA -B*54:01
YSGDLHAA

SEQ ID NO: 4492 - protein, 10 aa, Homo sapiens
  Table 1.2; KCNU1; ENSG00000215262; HLA -A*25:01,HLA-A*30:01,HLA-B*08:01,HLA-B*46:01,HLA-B*58:01, HLA-C*01:02,HLA-C*03:03,HLA-C*03:04,HLA-C*12:03
YSYQPRTNSL

SEQ ID NO: 4493 - protein, 9 aa, Homo sapiens
  Table 1.2; KCNU1; ENSG00000215262; HLA -A*01:01,HLA-A*03:02,HLA-A*11:01,HLA-A*68:01,HLA-B*27:02
YTSSYEALK

SEQ ID NO: 4494 - protein, 11 aa, Homo sapiens
  Table 1.2; KCNU1; ENSG00000215262; HLA -A*03:01,HLA-A*03:02,HLA-A*11:01,HLA-A*68:01
YTSSYEALKGK

SEQ ID NO: 4495 - protein, 9 aa, Homo sapiens
  Table 1.2; KCNU1; ENSG00000215262; HLA -B*54:01,HLA-B*56:01
YTTFISGSA

SEQ ID NO: 4496 - protein, 8 aa, Homo sapiens
  Table 1.2; LIN28A; ENSG00000131914; HLA -A*01:01,HLA-A*32:01,HLA-B*35:03,HLA-B*38:01,HLA-B*39:01, HLA-B*55:01,HLA-C*03:04,HLA-C*04:01,HLA-C*05:01,HLA-C*07:04
AADEPQLL

SEQ ID NO: 4497 - protein, 9 aa, Homo sapiens
  Table 1.2; LIN28A; ENSG00000131914; HLA -A*01:01,HLA-A*02:07,HLA-A*03:01,HLA-A*03:02,HLA-A*11:01, HLA-A*29:02,HLA-B*27:05,HLA-B*58:01,HLA-C*05:01,HLA-C*07:06
AADEPQLLH

SEQ ID NO: 4498 - protein, 11 aa, Homo sapiens
  Table 1.2; LIN28A; ENSG00000131914; HLA -A*02:07
AADEPQLLHGA

SEQ ID NO: 4499 - protein, 10 aa, Homo sapiens
  Table 1.2; LIN28A; ENSG00000131914; HLA -B*07:02
AARAADEPQL

SEQ ID NO: 4500 - protein, 11 aa, Homo sapiens
  Table 1.2; LIN28A; ENSG00000131914; HLA -B*40:02,HLA-B*57:01
AARAADEPQLL

SEQ ID NO: 4501 - protein, 9 aa, Homo sapiens
  Table 1.2; LIN28A; ENSG00000131914; HLA -B*40:02,HLA-B*55:01,HLA-B*56:01,HLA-C*04:01,HLA-C*06:02
AGVALDPPV

SEQ ID NO: 4502 - protein, 8 aa, Homo sapiens
  Table 1.2; LIN28A; ENSG00000131914; HLA -A*02:01,HLA-A*02:07,HLA-B*55:01,HLA-C*04:01,HLA-C*05:01
ALDPPVDV

SEQ ID NO: 4503 - protein, 9 aa, Homo sapiens
  Table 1.2; LIN28A; ENSG00000131914; HLA -A*01:01,HLA-A*02:01,HLA-A*02:04,HLA-A*02:07,HLA-A*03:02, HLA-A*23:01,HLA-A*24:02,HLA-A*25:01,HLA-A*26:01,HLA-A*29:02, HLA-A*32:01,HLA-B*13:02,HLA-B*15:01,HLA-B*15:03,HLA-B*27:05,
  HLA-B*35:01,HLA-B*37:01,HLA-B*38:01,HLA-B*39:01,HLA-B*44:02, HLA-B*44:03,HLA-B*55:01,HLA-B*57:01,HLA-B*58:01,HLA-C*02:02, HLA-C*03:03,HLA-C*04:01,HLA-C*05:01,HLA-C*07:04,HLA-C*12:03
ALDPPVDVF

SEQ ID NO: 4504 - protein, 10 aa, Homo sapiens
  Table 1.2; LIN28A; ENSG00000131914; HLA -A*01:01,HLA-A*02:01,HLA-A*02:03,HLA-A*02:04,HLA-A*02:07, HLA-A*68:02,HLA-B*13:02,HLA-B*38:01,HLA-B*55:01,HLA-C*05:01
ALDPPVDVFV

SEQ ID NO: 4505 - protein, 9 aa, Homo sapiens
  Table 1.2; LIN28A; ENSG00000131914; HLA -B*07:02,HLA-B*54:01,HLA-B*55:01,HLA-B*56:01
APEDAARAA

SEQ ID NO: 4506 - protein, 8 aa, Homo sapiens
  Table 1.2; LIN28A; ENSG00000131914; HLA -A*32:01,HLA-B*15:01,HLA-B*15:03,HLA-B*37:01,HLA-B*38:01, HLA-B*39:01
AQGKPTYF

SEQ ID NO: 4507 - protein, 9 aa, Homo sapiens
  Table 1.2; LIN28A; ENSG00000131914; HLA -A*31:01
AQGKPTYFR

SEQ ID NO: 4508 - protein, 10 aa, Homo sapiens
  Table 1.2; LIN28A; ENSG00000131914; HLA -A*03:02,HLA-A*11:01,HLA-B*27:05
AQQGPSAQGK

SEQ ID NO: 4509 - protein, 9 aa, Homo sapiens
  Table 1.2; LIN28A; ENSG00000131914; HLA -B*27:02,HLA-B*27:05,HLA-B*38:01,HLA-B*39:01,HLA-B*40:01, HLA-C*16:04
ARAADEPQL

SEQ ID NO: 4510 - protein, 10 aa, Homo sapiens
  Table 1.2; LIN28A; ENSG00000131914; HLA -B*27:05,HLA-B*38:01,HLA-B*39:01
ARAADEPQLL

SEQ ID NO: 4511 - protein, 9 aa, Homo sapiens
  Table 1.2; LIN28A; ENSG00000131914; HLA -B*27:05
ARAGVALDP

SEQ ID NO: 4512 - protein, 8 aa, Homo sapiens
  Table 1.2; LIN28A; ENSG00000131914; HLA -A*03:02,HLA-A*11:01
AVEFTFKK

SEQ ID NO: 4513 - protein, 11 aa, Homo sapiens
  Table 1.2; LIN28A; ENSG00000131914; HLA -A*03:02
AVEFTFKKSAK

SEQ ID NO: 4514 - protein, 11 aa, Homo sapiens
  Table 1.2; LIN28A; ENSG00000131914; HLA -B*54:01,HLA-B*55:01,HLA-B*56:01
CPLKAQQGPSA

SEQ ID NO: 4515 - protein, 8 aa, Homo sapiens
  Table 1.2; LIN28A; ENSG00000131914; HLA -B*13:02,HLA-B*37:01
CQSISHMV

SEQ ID NO: 4516 - protein, 9 aa, Homo sapiens
  Table 1.2; LIN28A; ENSG00000131914; HLA -B*18:01
DEPQLLHGA

SEQ ID NO: 4517 - protein, 8 aa, Homo sapiens
  Table 1.2; LIN28A; ENSG00000131914; HLA -B*51:01
DPPVDVFV

SEQ ID NO: 4518 - protein, 9 aa, Homo sapiens
  Table 1.2; LIN28A; ENSG00000131914; HLA -A*25:01,HLA-A*26:01,HLA-A*33:01,HLA-A*68:01,HLA-A*68:02, HLA-B*51:01
DVFVHQSKL

SEQ ID NO: 4519 - protein, 9 aa, Homo sapiens
  Table 1.2; LIN28A; ENSG00000131914; HLA -A*26:01
EAPEDAARA

SEQ ID NO: 4520 - protein, 8 aa, Homo sapiens
  Table 1.2; LIN28A; ENSG00000131914; HLA -A*11:01,HLA-A*33:01,HLA-A*33:03,HLA-A*68:01,HLA-B*27:02, HLA-B*51:01,HLA-C*07:01
EAVEFTFK

SEQ ID NO: 4521 - protein, 9 aa, Homo sapiens
  Table 1.2; LIN28A; ENSG00000131914; HLA -A*11:01,HLA-A*25:01,HLA-A*26:01,HLA-A*33:01,HLA-A*33:03, HLA-A*68:01,HLA-A*68:02,HLA-B*27:02,HLA-B*57:01,HLA-C*07:06
EAVEFTFKK

SEQ ID NO: 4522 - protein, 11 aa, Homo sapiens
  Table 1.2; LIN28A; ENSG00000131914; HLA -B*54:01
EAVEFTFKKSA

SEQ ID NO: 4523 - protein, 9 aa, Homo sapiens
  Table 1.2; LIN28A; ENSG00000131914; HLA -A*33:01,HLA-A*33:03
ECKLPPQPK

SEQ ID NO: 4524 - protein, 11 aa, Homo sapiens
  Table 1.2; LIN28A; ENSG00000131914; HLA -B*39:01
EEAPEEAPEDA

SEQ ID NO: 4525 - protein, 11 aa, Homo sapiens
  Table 1.2; LIN28A; ENSG00000131914; HLA -A*30:01,HLA-B*40:01,HLA-B*44:02,HLA-B*44:03
EEEEEIHSPTL

SEQ ID NO: 4526 - protein, 10 aa, Homo sapiens
  Table 1.2; LIN28A; ENSG00000131914; HLA -A*30:01,HLA-B*18:01,HLA-B*38:01,HLA-B*40:01,HLA-B*40:02, HLA-B*44:02,HLA-B*44:03,HLA-B*49:01
EEEEIHSPTL

SEQ ID NO: 4527 - protein, 11 aa, Homo sapiens
  Table 1.2; LIN28A; ENSG00000131914; HLA -B*40:01
EEEEIHSPTLL

SEQ ID NO: 4528 - protein, 9 aa, Homo sapiens
  Table 1.2; LIN28A; ENSG00000131914; HLA -A*30:01,HLA-B*18:01,HLA-B*27:02,HLA-B*37:01,HLA-B*38:01, HLA-B*39:01,HLA-B*40:01,HLA-B*40:02,HLA-B*44:02,HLA-B*44:03, HLA-B*49:01
EEEIHSPTL

SEQ ID NO: 4529 - protein, 10 aa, Homo sapiens
  Table 1.2; LIN28A; ENSG00000131914; HLA -B*40:01
EEEIHSPTLL

SEQ ID NO: 4530 - protein, 8 aa, Homo sapiens
  Table 1.2; LIN28A; ENSG00000131914; HLA -A*30:01,HLA-B*18:01,HLA-B*40:01,HLA-B*40:02,HLA-B*44:02, HLA-B*44:03,HLA-B*49:01
EEIHSPTL

SEQ ID NO: 4531 - protein, 9 aa, Homo sapiens
  Table 1.2; LIN28A; ENSG00000131914; HLA -A*25:01,HLA-A*26:01,HLA-A*30:01,HLA-A*68:02,HLA-B*18:01, HLA-B*40:01,HLA-B*40:02,HLA-B*44:02,HLA-B*44:03,HLA-B*49:01
EEIHSPTLL

SEQ ID NO: 4532 - protein, 9 aa, Homo sapiens
  Table 1.2; LIN28A; ENSG00000131914; HLA -A*33:01,HLA-A*33:03
EFTFKKSAK

SEQ ID NO: 4533 - protein, 9 aa, Homo sapiens
  Table 1.2; LIN28A; ENSG00000131914; HLA -A*23:01,HLA-B*27:02,HLA-B*35:01,HLA-B*35:03,HLA-B*38:01
EGEAVEFTF

SEQ ID NO: 4534 - protein, 10 aa, Homo sapiens
  Table 1.2; LIN28A; ENSG00000131914; HLA -B*27:02
EGEAVEFTFK

SEQ ID NO: 4535 - protein, 8 aa, Homo sapiens
  Table 1.2; LIN28A; ENSG00000131914; HLA -B*54:01,HLA-B*55:01,HLA-B*56:01
EPQLLHGA

SEQ ID NO: 4536 - protein, 9 aa, Homo sapiens
  Table 1.2; LIN28A; ENSG00000131914; HLA -B*54:01
FAGGCAKAA

SEQ ID NO: 4537 - protein, 9 aa, Homo sapiens
  Table 1.2; LIN28A; ENSG00000131914; HLA -A*02:01,HLA-C*04:01,HLA-C*12:03
FCQSISHMV

SEQ ID NO: 4538 - protein, 8 aa, Homo sapiens
  Table 1.2; LIN28A; ENSG00000131914; HLA -B*40:02,HLA-B*54:01,HLA-B*56:01,HLA-C*06:02,HLA-C*12:03
FGFLSMTA

SEQ ID NO: 4539 - protein, 9 aa, Homo sapiens
  Table 1.2; LIN28A; ENSG00000131914; HLA -A*31:01,HLA-A*33:01,HLA-A*33:03,HLA-A*68:01,HLA-B*27:02, HLA-B*27:05,HLA-B*35:01,HLA-B*46:01,HLA-B*54:01
FGFLSMTAR

SEQ ID NO: 4540 - protein, 10 aa, Homo sapiens
  Table 1.2; LIN28A; ENSG00000131914; HLA -B*54:01
FGFLSMTARA

SEQ ID NO: 4541 - protein, 10 aa, Homo sapiens
  Table 1.2; LIN28A; ENSG00000131914; HLA -A*02:03
FLSMTARAGV

SEQ ID NO: 4542 - protein, 8 aa, Homo sapiens
  Table 1.2; LIN28A; ENSG00000131914; HLA -A*23:01,HLA-A*30:01,HLA-B*13:02,HLA-B*15:01,HLA-B*18:01, HLA-B*27:02,HLA-B*27:05,HLA-B*37:01,HLA-B*39:01,HLA-B*40:01, HLA-B*40:02,HLA-B*44:02,HLA-B*44:03,HLA-B*49:01,HLA-C*16:04
GEAVEFTF

SEQ ID NO: 4543 - protein, 9 aa, Homo sapiens
  Table 1.2; LIN28A; ENSG00000131914; HLA -B*27:02,HLA-B*27:05,HLA-B*49:01
GEAVEFTFK

SEQ ID NO: 4544 - protein, 10 aa, Homo sapiens
  Table 1.2; LIN28A; ENSG00000131914; HLA -B*27:02
GEAVEFTFKK

SEQ ID NO: 4545 - protein, 8 aa, Homo sapiens
  Table 1.2; LIN28A; ENSG00000131914; HLA -A*31:01
GFLSMTAR

SEQ ID NO: 4546 - protein, 8 aa, Homo sapiens
  Table 1.2; LIN28A; ENSG00000131914; HLA -A*11:01,HLA-B*27:05
GGLDHHAK

SEQ ID NO: 4547 - protein, 10 aa, Homo sapiens
  Table 1.2; LIN28A; ENSG00000131914; HLA -A*30:02,HLA-B*07:02,HLA-B*15:01,HLA-B*35:01,HLA-B*44:03, HLA-B*55:01,HLA-C*07:02
GPSAQGKPTY

SEQ ID NO: 4548 - protein, 11 aa, Homo sapiens
  Table 1.2; LIN28A; ENSG00000131914; HLA -B*07:02,HLA-C*04:01,HLA-C*07:02
GPSAQGKPTYF

SEQ ID NO: 4549 - protein, 8 aa, Homo sapiens
  Table 1.2; LIN28A; ENSG00000131914; HLA -B*58:01
GSVSNQQF

SEQ ID NO: 4550 - protein, 10 aa, Homo sapiens
  Table 1.2; LIN28A; ENSG00000131914; HLA -B*39:01
GVALDPPVDV

SEQ ID NO: 4551 - protein, 11 aa, Homo sapiens
  Table 1.2; LIN28A; ENSG00000131914; HLA -A*25:01,HLA-B*39:01
GVALDPPVDVF

SEQ ID NO: 4552 - protein, 9 aa, Homo sapiens
  Table 1.2; LIN28A; ENSG00000131914; HLA -A*31:01,HLA-A*68:01,HLA-C*07:06
GVFCIGSER

SEQ ID NO: 4553 - protein, 8 aa, Homo sapiens
  Table 1.2; LIN28A; ENSG00000131914; HLA -B*08:01
HMEGFRSL

SEQ ID NO: 4554 - protein, 9 aa, Homo sapiens
  Table 1.2; LIN28A; ENSG00000131914; HLA -A*03:01
HMEGFRSLK

SEQ ID NO: 4555 - protein, 9 aa, Homo sapiens
  Table 1.2; LIN28A; ENSG00000131914; HLA -A*03:01,HLA-A*03:02,HLA-A*11:01,HLA-C*06:02,HLA-C*07:01
HMVASCPLK

SEQ ID NO: 4556 - protein, 9 aa, Homo sapiens
  Table 1.2; LIN28A; ENSG00000131914; HLA -A*02:07,HLA-B*54:01
HSPTLLPEA

SEQ ID NO: 4557 - protein, 8 aa, Homo sapiens
  Table 1.2; LIN28A; ENSG00000131914; HLA -C*16:01
IGSERRPK

SEQ ID NO: 4558 - protein, 10 aa, Homo sapiens
  Table 1.2; LIN28A; ENSG00000131914; HLA -B*07:02,HLA-B*15:03,HLA-B*27:02,HLA-B*27:05,HLA-B*38:01, HLA-B*39:01,HLA-C*06:02,HLA-C*07:01,HLA-C*12:03,HLA-C*16:04
IRVTGPGGVF

SEQ ID NO: 4559 - protein, 10 aa, Homo sapiens
  Table 1.2; LIN28A; ENSG00000131914; HLA -C*06:02,HLA-C*07:01
ISHMVASCPL

SEQ ID NO: 4560 - protein, 11 aa, Homo sapiens
  Table 1.2; LIN28A; ENSG00000131914; HLA -A*03:02
KAQQGPSAQGK

SEQ ID NO: 4561 - protein, 8 aa, Homo sapiens
  Table 1.2; LIN28A; ENSG00000131914; HLA -A*30:01,HLA-A*32:01,HLA-B*15:01,HLA-B*15:03,HLA-B*18:01, HLA-B*27:02,HLA-B*37:01,HLA-B*40:01,HLA-B*40:02,HLA-B*44:02, HLA-B*44:03,HLA-B*57:01,HLA-B*58:01,HLA-C*12:03,HLA-C*16:01,
  HLA-C*16:02,HLA-C*16:04
KEGEAVEF

SEQ ID NO: 4562 - protein, 10 aa, Homo sapiens
  Table 1.2; LIN28A; ENSG00000131914; HLA -A*23:01,HLA-A*24:02,HLA-A*30:01,HLA-A*32:01,HLA-B*18:01, HLA-B*27:02,HLA-B*37:01,HLA-B*38:01,HLA-B*40:01,HLA-B*40:02, HLA-B*44:02,HLA-B*44:03,HLA-B*49:01,HLA-B*57:01,HLA-B*58:01,
  HLA-C*16:04
KEGEAVEFTF

SEQ ID NO: 4563 - protein, 11 aa, Homo sapiens
  Table 1.2; LIN28A; ENSG00000131914; HLA -A*03:02,HLA-A*11:01
KEGEAVEFTFK

SEQ ID NO: 4564 - protein, 11 aa, Homo sapiens
  Table 1.2; LIN28A; ENSG00000131914; HLA -A*32:01
KGLESIRVTGP

SEQ ID NO: 4565 - protein, 10 aa, Homo sapiens
  Table 1.2; LIN28A; ENSG00000131914; HLA -A*02:03
KLHMEGFRSL

SEQ ID NO: 4566 - protein, 9 aa, Homo sapiens
  Table 1.2; LIN28A; ENSG00000131914; HLA -A*02:07
KLPPQPKKC

SEQ ID NO: 4567 - protein, 9 aa, Homo sapiens
  Table 1.2; LIN28A; ENSG00000131914; HLA -B*40:02,HLA-B*58:01
KSAKGLESI

SEQ ID NO: 4568 - protein, 9 aa, Homo sapiens
  Table 1.2; LIN28A; ENSG00000131914; HLA -A*24:02
KWFNVRMGF

SEQ ID NO: 4569 - protein, 8 aa, Homo sapiens
  Table 1.2; LIN28A; ENSG00000131914; HLA -B*37:01
LDPPVDVF

SEQ ID NO: 4570 - protein, 9 aa, Homo sapiens
  Table 1.2; LIN28A; ENSG00000131914; HLA -A*02:07,HLA-A*68:02
LDPPVDVFV

SEQ ID NO: 4571 - protein, 9 aa, Homo sapiens
  Table 1.2; LIN28A; ENSG00000131914; HLA -B*37:01,HLA-B*40:02,HLA-B*49:01,HLA-C*07:04
LESIRVTGP

SEQ ID NO: 4572 - protein, 9 aa, Homo sapiens
  Table 1.2; LIN28A; ENSG00000131914; HLA -B*38:01,HLA-B*57:01,HLA-C*03:04
LHMEGFRSL

SEQ ID NO: 4573 - protein, 9 aa, Homo sapiens
  Table 1.2; LIN28A; ENSG00000131914; HLA -B*15:03,HLA-B*38:01
LKEGEAVEF

SEQ ID NO: 4574 - protein, 9 aa, Homo sapiens
  Table 1.2; LIN28A; ENSG00000131914; HLA -A*03:01
LLHGAGICK

SEQ ID NO: 4575 - protein, 11 aa, Homo sapiens
  Table 1.2; LIN28A; ENSG00000131914; HLA -B*07:02,HLA-C*03:03,HLA-C*03:04
LSMTARAGVAL

SEQ ID NO: 4576 - protein, 8 aa, Homo sapiens
  Table 1.2; LIN28A; ENSG00000131914; HLA -B*51:01,HLA-B*54:01
MGFGFLSM

SEQ ID NO: 4577 - protein, 9 aa, Homo sapiens
  Table 1.2; LIN28A; ENSG00000131914; HLA -B*54:01
MGFGFLSMT

SEQ ID NO: 4578 - protein, 10 aa, Homo sapiens
  Table 1.2; LIN28A; ENSG00000131914; HLA -B*54:01
MGFGFLSMTA

SEQ ID NO: 4579 - protein, 11 aa, Homo sapiens
  Table 1.2; LIN28A; ENSG00000131914; HLA -A*31:01
MGFGFLSMTAR

SEQ ID NO: 4580 - protein, 9 aa, Homo sapiens
  Table 1.2; LIN28A; ENSG00000131914; HLA -B*15:01,HLA-B*27:05,HLA-B*38:01,HLA-C*04:01,HLA-C*07:04
MGSVSNQQF

SEQ ID NO: 4581 - protein, 9 aa, Homo sapiens
  Table 1.2; LIN28A; ENSG00000131914; HLA -A*25:01,HLA-A*32:01,HLA-B*07:02,HLA-B*35:03,HLA-B*40:02, HLA-B*46:01,HLA-B*58:01,HLA-C*01:02,HLA-C*02:02,HLA-C*03:03, HLA-C*03:04,HLA-C*07:04,HLA-C*16:01
MTARAGVAL

SEQ ID NO: 4582 - protein, 8 aa, Homo sapiens
  Table 1.2; LIN28A; ENSG00000131914; HLA -A*03:02
MVASCPLK

SEQ ID NO: 4583 - protein, 9 aa, Homo sapiens
  Table 1.2; LIN28A; ENSG00000131914; HLA -A*03:01,HLA-B*13:02,HLA-B*54:01,HLA-C*06:02
MVASCPLKA

SEQ ID NO: 4584 - protein, 10 aa, Homo sapiens
  Table 1.2; LIN28A; ENSG00000131914; HLA -B*27:05
NQQFAGGCAK

SEQ ID NO: 4585 - protein, 10 aa, Homo sapiens
  Table 1.2; LIN28A; ENSG00000131914; HLA -B*27:02
PEEAPEDAAR

SEQ ID NO: 4586 - protein, 9 aa, Homo sapiens
  Table 1.2; LIN28A; ENSG00000131914; HLA -A*01:01,HLA-A*30:02,HLA-A*32:01,HLA-B*15:01,HLA-B*58:01, HLA-C*16:01,HLA-C*16:02
PSAQGKPTY

SEQ ID NO: 4587 - protein, 10 aa, Homo sapiens
  Table 1.2; LIN28A; ENSG00000131914; HLA -A*24:02,HLA-B*07:02,HLA-C*07:02
PSAQGKPTYF

SEQ ID NO: 4588 - protein, 9 aa, Homo sapiens
  Table 1.2; LIN28A; ENSG00000131914; HLA -C*07:01
PTLLPEAQN

SEQ ID NO: 4589 - protein, 8 aa, Homo sapiens
  Table 1.2; LIN28A; ENSG00000131914; HLA -A*31:01
QGKPTYFR

SEQ ID NO: 4590 - protein, 11 aa, Homo sapiens
  Table 1.2; LIN28A; ENSG00000131914; HLA -A*30:02,HLA-B*39:01,HLA-C*04:01,HLA-C*07:01
QGPSAQGKPTY

SEQ ID NO: 4591 - protein, 9 aa, Homo sapiens
  Table 1.2; LIN28A; ENSG00000131914; HLA -A*03:01,HLA-A*03:02,HLA-A*11:01,HLA-A*30:02,HLA-A*31:01, HLA-A*32:01,HLA-B*13:02,HLA-B*15:01,HLA-B*15:03,HLA-B*27:05, HLA-B*39:01,HLA-B*40:02,HLA-C*06:02,HLA-C*07:04
QQFAGGCAK

SEQ ID NO: 4592 - protein, 10 aa, Homo sapiens
  Table 1.2; LIN28A; ENSG00000131914; HLA -A*02:03,HLA-B*13:02
QQFAGGCAKA

SEQ ID NO: 4593 - protein, 9 aa, Homo sapiens
  Table 1.2; LIN28A; ENSG00000131914; HLA -A*03:02
QQGPSAQGK

SEQ ID NO: 4594 - protein, 8 aa, Homo sapiens
  Table 1.2; LIN28A; ENSG00000131914; HLA -B*40:02,HLA-C*12:03
QSISHMVA

SEQ ID NO: 4595 - protein, 9 aa, Homo sapiens
  Table 1.2; LIN28A; ENSG00000131914; HLA -A*33:01,HLA-B*08:01,HLA-B*57:01,HLA-C*07:01
QSKLHMEGF

SEQ ID NO: 4596 - protein, 9 aa, Homo sapiens
  Table 1.2; LIN28A; ENSG00000131914; HLA -B*38:01,HLA-B*40:01,HLA-B*57:01,HLA-B*58:01,HLA-C*05:01
RAADEPQLL

SEQ ID NO: 4597 - protein, 10 aa, Homo sapiens
  Table 1.2; LIN28A; ENSG00000131914; HLA -A*03:01,HLA-A*03:02,HLA-A*11:01,HLA-B*57:01
RAADEPQLLH

SEQ ID NO: 4598 - protein, 9 aa, Homo sapiens
  Table 1.2; LIN28A; ENSG00000131914; HLA -B*07:02
RPKGKSMQK

SEQ ID NO: 4599 - protein, 11 aa, Homo sapiens
  Table 1.2; LIN28A; ENSG00000131914; HLA -B*57:01,HLA-B*58:01
RSLKEGEAVEF

SEQ ID NO: 4600 - protein, 9 aa, Homo sapiens
  Table 1.2; LIN28A; ENSG00000131914; HLA -A*03:01,HLA-A*25:01,HLA-A*26:01,HLA-A*30:02,HLA-A*32:01, HLA-B*07:02,HLA-B*15:01,HLA-B*15:03,HLA-B*27:05,HLA-B*39:01, HLA-B*40:02,HLA-B*46:01,HLA-B*57:01,HLA-B*58:01,HLA-C*02:02,
  HLA-C*03:03,HLA-C*03:04,HLA-C*04:01,HLA-C*05:01,HLA-C*07:02, HLA-C*07:04,HLA-C*12:03,HLA-C*16:01
RVTGPGGVF

SEQ ID NO: 4601 - protein, 9 aa, Homo sapiens
  Table 1.2; LIN28A; ENSG00000131914; HLA -A*31:01,HLA-A*33:01,HLA-A*33:03,HLA-A*68:01,HLA-C*07:06
SAKGLESIR

SEQ ID NO: 4602 - protein, 8 aa, Homo sapiens
  Table 1.2; LIN28A; ENSG00000131914; HLA -A*30:02,HLA-A*32:01,HLA-B*39:01,HLA-B*58:01,HLA-C*16:01
SAQGKPTY

SEQ ID NO: 4603 - protein, 9 aa, Homo sapiens
  Table 1.2; LIN28A; ENSG00000131914; HLA -A*03:02,HLA-A*11:01,HLA-A*23:01,HLA-A*26:01,HLA-A*30:02, HLA-A*31:01,HLA-A*32:01,HLA-A*33:01,HLA-A*33:03,HLA-B*35:01, HLA-B*46:01,HLA-B*57:01,HLA-B*58:01,HLA-C*02:02,HLA-C*04:01,
  HLA-C*05:01,HLA-C*07:04,HLA-C*12:03,HLA-C*16:01,HLA-C*16:02, HLA-C*16:04
SAQGKPTYF

SEQ ID NO: 4604 - protein, 10 aa, Homo sapiens
  Table 1.2; LIN28A; ENSG00000131914; HLA -A*31:01,HLA-A*33:01,HLA-A*33:03
SAQGKPTYFR

SEQ ID NO: 4605 - protein, 9 aa, Homo sapiens
  Table 1.2; LIN28A; ENSG00000131914; HLA -B*39:01
SHMVASCPL

SEQ ID NO: 4606 - protein, 10 aa, Homo sapiens
  Table 1.2; LIN28A; ENSG00000131914; HLA -A*02:03
SIRVTGPGGV

SEQ ID NO: 4607 - protein, 11 aa, Homo sapiens
  Table 1.2; LIN28A; ENSG00000131914; HLA -B*07:02,HLA-B*15:01,HLA-B*46:01,HLA-C*07:02
SIRVTGPGGVF

SEQ ID NO: 4608 - protein, 8 aa, Homo sapiens
  Table 1.2; LIN28A; ENSG00000131914; HLA -B*08:01
SLKEGEAV

SEQ ID NO: 4609 - protein, 10 aa, Homo sapiens
  Table 1.2; LIN28A; ENSG00000131914; HLA -A*02:03,HLA-A*03:02,HLA-A*23:01,HLA-A*25:01,HLA-A*26:01, HLA-A*29:02,HLA-A*30:02,HLA-A*32:01,HLA-A*33:01,HLA-B*15:01, HLA-B*15:03,HLA-B*46:01,HLA-B*57:01,HLA-C*07:04,HLA-C*14:02
SLKEGEAVEF

SEQ ID NO: 4610 - protein, 9 aa, Homo sapiens
  Table 1.2; LIN28A; ENSG00000131914; HLA -B*55:01
SMTARAGVA

SEQ ID NO: 4611 - protein, 10 aa, Homo sapiens
  Table 1.2; LIN28A; ENSG00000131914; HLA -B*07:02
SMTARAGVAL

SEQ ID NO: 4612 - protein, 8 aa, Homo sapiens
  Table 1.2; LIN28A; ENSG00000131914; HLA -B*51:01,HLA-B*54:01,HLA-B*55:01,HLA-B*56:01
SPTLLPEA

SEQ ID NO: 4613 - protein, 8 aa, Homo sapiens
  Table 1.2; LIN28A; ENSG00000131914; HLA -B*07:02,HLA-B*08:01,HLA-B*40:02,HLA-B*46:01,HLA-C*01:02, HLA-C*03:03,HLA-C*03:04,HLA-C*07:02,HLA-C*07:04,HLA-C*16:01
TARAGVAL

SEQ ID NO: 4614 - protein, 11 aa, Homo sapiens
  Table 1.2; LIN28A; ENSG00000131914; HLA -C*06:02
TARAGVALDPP

SEQ ID NO: 4615 - protein, 9 aa, Homo sapiens
  Table 1.2; LIN28A; ENSG00000131914; HLA -B*13:02,HLA-C*06:02
TGPGGVFCI

SEQ ID NO: 4616 - protein, 10 aa, Homo sapiens
  Table 1.2; LIN28A; ENSG00000131914; HLA -C*04:01,HLA-C*06:02,HLA-C*07:01,HLA-C*07:02
TGPGGVFCIG

SEQ ID NO: 4617 - protein, 9 aa, Homo sapiens
  Table 1.2; LIN28A; ENSG00000131914; HLA -A*02:01,HLA-A*23:01,HLA-B*39:01,HLA-B*46:01,HLA-B*51:01, HLA-B*54:01,HLA-C*02:02,HLA-C*03:03,HLA-C*05:01,HLA-C*12:03, HLA-C*16:04
VALDPPVDV

SEQ ID NO: 4618 - protein, 10 aa, Homo sapiens
  Table 1.2; LIN28A; ENSG00000131914; HLA -A*23:01,HLA-A*24:02,HLA-A*25:01,HLA-A*29:02,HLA-A*30:02, HLA-A*32:01,HLA-A*33:01,HLA-B*27:02,HLA-B*27:05,HLA-B*35:01, HLA-B*38:01,HLA-B*39:01,HLA-B*46:01,HLA-B*57:01,HLA-C*02:02,
  HLA-C*05:01,HLA-C*12:03,HLA-C*16:04
VALDPPVDVF

SEQ ID NO: 4619 - protein, 11 aa, Homo sapiens
  Table 1.2; LIN28A; ENSG00000131914; HLA -A*02:01,HLA-A*02:04,HLA-A*02:07,HLA-A*68:02
VALDPPVDVFV

SEQ ID NO: 4620 - protein, 9 aa, Homo sapiens
  Table 1.2; LIN28A; ENSG00000131914; HLA -A*30:01,HLA-B*18:01,HLA-B*40:02,HLA-B*44:03,HLA-B*49:01
VEFTFKKSA

SEQ ID NO: 4621 - protein, 8 aa, Homo sapiens
  Table 1.2; LIN28A; ENSG00000131914; HLA -A*23:01
VFVHQSKL

SEQ ID NO: 4622 - protein, 8 aa, Homo sapiens
  Table 1.2; LIN28A; ENSG00000131914; HLA -A*23:01,HLA-A*25:01,HLA-A*26:01,HLA-A*30:02,HLA-A*32:01, HLA-B*15:01,HLA-B*15:03,HLA-B*27:05,HLA-B*39:01,HLA-B*40:02, HLA-B*46:01,HLA-B*57:01,HLA-B*58:01,HLA-C*01:02,HLA-C*02:02,
  HLA-C*03:03,HLA-C*03:04,HLA-C*04:01,HLA-C*05:01,HLA-C*06:02, HLA-C*07:01,HLA-C*07:04,HLA-C*12:03,HLA-C*14:02,HLA-C*16:01
VTGPGGVF

SEQ ID NO: 4623 - protein, 10 aa, Homo sapiens
  Table 1.2; LIN28A; ENSG00000131914; HLA -A*02:01,HLA-C*06:02
VTGPGGVFCI

SEQ ID NO: 4624 - protein, 8 aa, Homo sapiens
  Table 1.2; LUZP4; ENSG00000102021; HLA -B*08:01,HLA-B*40:02,HLA-C*16:01
ASFRKLTL

SEQ ID NO: 4625 - protein, 11 aa, Homo sapiens
  Table 1.2; LUZP4; ENSG00000102021; HLA -A*03:02,HLA-A*11:01,HLA-A*31:01,HLA-A*33:01,HLA-A*33:03, HLA-A*68:01,HLA-C*07:06
ATQKDLIATQR

SEQ ID NO: 4626 - protein, 11 aa, Homo sapiens
  Table 1.2; LUZP4; ENSG00000102021; HLA -A*03:01,HLA-A*03:02,HLA-A*11:01,HLA-A*31:01,HLA-B*27:02
ATQRDLIATQK

SEQ ID NO: 4627 - protein, 11 aa, Homo sapiens
  Table 1.2; LUZP4; ENSG00000102021; HLA -A*03:02,HLA-A*11:01,HLA-A*31:01,HLA-A*33:03,HLA-A*68:01
ATQRDLIATQR

SEQ ID NO: 4628 - protein, 10 aa, Homo sapiens
  Table 1.2; LUZP4; ENSG00000102021; HLA -A*11:01
ATQRDLIVTQ

SEQ ID NO: 4629 - protein, 11 aa, Homo sapiens
  Table 1.2; LUZP4; ENSG00000102021; HLA -A*03:02,HLA-A*11:01,HLA-A*31:01,HLA-A*33:01,HLA-A*33:03, HLA-A*68:01,HLA-C*07:06
ATQRDLIVTQR

SEQ ID NO: 4630 - protein, 8 aa, Homo sapiens
  Table 1.2; LUZP4; ENSG00000102021; HLA -B*18:01
DDIIIYKE

SEQ ID NO: 4631 - protein, 9 aa, Homo sapiens
  Table 1.2; LUZP4; ENSG00000102021; HLA -B*18:01,HLA-B*40:02,HLA-B*44:02,HLA-B*44:03
DDIIIYKEL

SEQ ID NO: 4632 - protein, 8 aa, Homo sapiens
  Table 1.2; LUZP4; ENSG00000102021; HLA -B*08:01
DIIIYKEL

SEQ ID NO: 4633 - protein, 9 aa, Homo sapiens
  Table 1.2; LUZP4; ENSG00000102021; HLA -B*08:01
DLIATQKDL

SEQ ID NO: 4634 - protein, 9 aa, Homo sapiens
  Table 1.2; LUZP4; ENSG00000102021; HLA -B*08:01
DLIATQRDL

SEQ ID NO: 4635 - protein, 8 aa, Homo sapiens
  Table 1.2; LUZP4; ENSG00000102021; HLA -A*33:01,HLA-A*33:03
DLINQSGR

SEQ ID NO: 4636 - protein, 10 aa, Homo sapiens
  Table 1.2; LUZP4; ENSG00000102021; HLA -A*25:01
DLINQSGRSH

SEQ ID NO: 4637 - protein, 9 aa, Homo sapiens
  Table 1.2; LUZP4; ENSG00000102021; HLA -B*08:01
DLIVTQRDL

SEQ ID NO: 4638 - protein, 9 aa, Homo sapiens
  Table 1.2; LUZP4; ENSG00000102021; HLA -A*26:01
DLVDTQSDL

SEQ ID NO: 4639 - protein, 10 aa, Homo sapiens
  Table 1.2; LUZP4; ENSG00000102021; HLA -A*25:01
DLVDTQSDLI

SEQ ID NO: 4640 - protein, 11 aa, Homo sapiens
  Table 1.2; LUZP4; ENSG00000102021; HLA -A*33:01,HLA-B*27:02
DMSLDDIIIYK

SEQ ID NO: 4641 - protein, 9 aa, Homo sapiens
  Table 1.2; LUZP4; ENSG00000102021; HLA -A*26:01,HLA-A*33:01,HLA-A*33:03,HLA-A*68:01,HLA-B*27:02, HLA-C*07:06
DNYEAQAEK

SEQ ID NO: 4642 - protein, 10 aa, Homo sapiens
  Table 1.2; LUZP4; ENSG00000102021; HLA -A*25:01,HLA-A*26:01,HLA-A*33:01
DTQSDLIATQ

SEQ ID NO: 4643 - protein, 11 aa, Homo sapiens
  Table 1.2; LUZP4; ENSG00000102021; HLA -A*03:02,HLA-A*11:01,HLA-A*31:01,HLA-A*33:01,HLA-A*33:03, HLA-A*68:01,HLA-B*27:02,HLA-C*07:06
DTQSDLIATQR

SEQ ID NO: 4644 - protein, 8 aa, Homo sapiens
  Table 1.2; LUZP4; ENSG00000102021; HLA -A*33:01
EENHHSER

SEQ ID NO: 4645 - protein, 11 aa, Homo sapiens
  Table 1.2; LUZP4; ENSG00000102021; HLA -B*27:02
ELEGTNAEEEK

SEQ ID NO: 4646 - protein, 9 aa, Homo sapiens
  Table 1.2; LUZP4; ENSG00000102021; HLA -B*27:05
ERDLINQSG

SEQ ID NO: 4647 - protein, 9 aa, Homo sapiens
  Table 1.2; LUZP4; ENSG00000102021; HLA -A*02:07
FLDMSLDDI

SEQ ID NO: 4648 - protein, 10 aa, Homo sapiens
  Table 1.2; LUZP4; ENSG00000102021; HLA -B*15:01,HLA-B*27:05,HLA-B*39:01
GQHPLNGQPL

SEQ ID NO: 4649 - protein, 11 aa, Homo sapiens
  Table 1.2; LUZP4; ENSG00000102021; HLA -A*30:01,HLA-B*13:02
GQHPLNGQPLI

SEQ ID NO: 4650 - protein, 9 aa, Homo sapiens
  Table 1.2; LUZP4; ENSG00000102021; HLA -A*11:01,HLA-B*13:02
GQPLIEQEK

SEQ ID NO: 4651 - protein, 10 aa, Homo sapiens
  Table 1.2; LUZP4; ENSG00000102021; HLA -B*13:02,HLA-B*27:05
GQSEGNQHQS

SEQ ID NO: 4652 - protein, 9 aa, Homo sapiens
  Table 1.2; LUZP4; ENSG00000102021; HLA -A*29:02,HLA-A*30:02,HLA-A*32:01,HLA-B*15:01,HLA-B*15:03, HLA-C*16:01
GQSERHQRY

SEQ ID NO: 4653 - protein, 9 aa, Homo sapiens
  Table 1.2; LUZP4; ENSG00000102021; HLA -B*27:05
GRSHGQSER

SEQ ID NO: 4654 - protein, 10 aa, Homo sapiens
  Table 1.2; LUZP4; ENSG00000102021; HLA -A*03:02,HLA-A*11:01
GTNAEEEKNK

SEQ ID NO: 4655 - protein, 11 aa, Homo sapiens
  Table 1.2; LUZP4; ENSG00000102021; HLA -A*31:01,HLA-A*33:03
GTNAEEEKNKR

SEQ ID NO: 4656 - protein, 8 aa, Homo sapiens
  Table 1.2; LUZP4; ENSG00000102021; HLA -B*07:02,HLA-C*04:01
HDKKPSQK

SEQ ID NO: 4657 - protein, 9 aa, Homo sapiens
  Table 1.2; LUZP4; ENSG00000102021; HLA -A*33:01
HGQSERHQR

SEQ ID NO: 4658 - protein, 8 aa, Homo sapiens
  Table 1.2; LUZP4; ENSG00000102021; HLA -B*35:03
HPLNGQPL

SEQ ID NO: 4659 - protein, 9 aa, Homo sapiens
  Table 1.2; LUZP4; ENSG00000102021; HLA -A*23:01,HLA-B*13:02,HLA-B*35:01,HLA-B*35:03,HLA-B*38:01, HLA-B*51:01,HLA-B*54:01,HLA-B*55:01,HLA-B*56:01
HPLNGQPLI

SEQ ID NO: 4660 - protein, 11 aa, Homo sapiens
  Table 1.2; LUZP4; ENSG00000102021; HLA -B*35:01
HPQYERSHGQY

SEQ ID NO: 4661 - protein, 9 aa, Homo sapiens
  Table 1.2; LUZP4; ENSG00000102021; HLA -B*39:01
HQSEGNPDK

SEQ ID NO: 4662 - protein, 9 aa, Homo sapiens
  Table 1.2; LUZP4; ENSG00000102021; HLA -A*31:01,HLA-A*33:01,HLA-A*33:03
HSKKESPSR

SEQ ID NO: 4663 - protein, 8 aa, Homo sapiens
  Table 1.2; LUZP4; ENSG00000102021; HLA -B*51:01,HLA-C*16:02
IATQKDLI

SEQ ID NO: 4664 - protein, 9 aa, Homo sapiens
  Table 1.2; LUZP4; ENSG00000102021; HLA -B*54:01
IATQKDLIA

SEQ ID NO: 4665 - protein, 8 aa, Homo sapiens
  Table 1.2; LUZP4; ENSG00000102021; HLA -B*51:01,HLA-C*16:01
IATQRDLI

SEQ ID NO: 4666 - protein, 9 aa, Homo sapiens
  Table 1.2; LUZP4; ENSG00000102021; HLA -B*54:01,HLA-C*16:01,HLA-C*16:02
IATQRDLIA

SEQ ID NO: 4667 - protein, 9 aa, Homo sapiens
  Table 1.2; LUZP4; ENSG00000102021; HLA -B*51:01,HLA-C*12:03,HLA-C*16:01,HLA-C*16:02
IATQRDLIV

SEQ ID NO: 4668 - protein, 10 aa, Homo sapiens
  Table 1.2; LUZP4; ENSG00000102021; HLA -A*30:02
IEQEKCSDNY

SEQ ID NO: 4669 - protein, 9 aa, Homo sapiens
  Table 1.2; LUZP4; ENSG00000102021; HLA -B*54:01
IVTQRDLVA

SEQ ID NO: 4670 - protein, 10 aa, Homo sapiens
  Table 1.2; LUZP4; ENSG00000102021; HLA -C*14:02
IYKELEGTNA

SEQ ID NO: 4671 - protein, 8 aa, Homo sapiens
  Table 1.2; LUZP4; ENSG00000102021; HLA -A*31:01,HLA-B*37:01
KDLIATQR

SEQ ID NO: 4672 - protein, 10 aa, Homo sapiens
  Table 1.2; LUZP4; ENSG00000102021; HLA -B*37:01
KESPSRQQSK

SEQ ID NO: 4673 - protein, 10 aa, Homo sapiens
  Table 1.2; LUZP4; ENSG00000102021; HLA -B*15:03
KKPSQKPSGF

SEQ ID NO: 4674 - protein, 9 aa, Homo sapiens
  Table 1.2; LUZP4; ENSG00000102021; HLA -B*07:02,HLA-B*08:01,HLA-B*37:01,HLA-C*07:02
KPSQKPSGF

SEQ ID NO: 4675 - protein, 9 aa, Homo sapiens
  Table 1.2; LUZP4; ENSG00000102021; HLA -B*07:02
KVNFLDMSL

SEQ ID NO: 4676 - protein, 9 aa, Homo sapiens
  Table 1.2; LUZP4; ENSG00000102021; HLA -A*02:07,HLA-A*03:01,HLA-A*03:02,HLA-A*11:01,HLA-A*31:01, HLA-A*32:01
KVPPNHPSR

SEQ ID NO: 4677 - protein, 10 aa, Homo sapiens
  Table 1.2; LUZP4; ENSG00000102021; HLA -A*03:01,HLA-A*03:02,HLA-A*11:01
KVPPNHPSRK

SEQ ID NO: 4678 - protein, 8 aa, Homo sapiens
  Table 1.2; LUZP4; ENSG00000102021; HLA -B*27:02
LDDIIIYK

SEQ ID NO: 4679 - protein, 8 aa, Homo sapiens
  Table 1.2; LUZP4; ENSG00000102021; HLA -C*05:01
LVDTQSDL

SEQ ID NO: 4680 - protein, 9 aa, Homo sapiens
  Table 1.2; LUZP4; ENSG00000102021; HLA -A*01:01,HLA-A*02:07,HLA-B*27:05,HLA-B*38:01,HLA-C*05:01
LVDTQSDLI

SEQ ID NO: 4681 - protein, 9 aa, Homo sapiens
  Table 1.2; LUZP4; ENSG00000102021; HLA -B*08:01,HLA-C*16:01
MASFRKLTL

SEQ ID NO: 4682 - protein, 9 aa, Homo sapiens
  Table 1.2; LUZP4; ENSG00000102021; HLA -A*01:01,HLA-A*29:02,HLA-B*35:01,HLA-B*55:01,HLA-B*57:01, HLA-C*07:01,HLA-C*12:03
MSLDDIIIY

SEQ ID NO: 4683 - protein, 10 aa, Homo sapiens
  Table 1.2; LUZP4; ENSG00000102021; HLA -A*03:01,HLA-A*03:02,HLA-A*11:01,HLA-A*68:02,HLA-B*27:02, HLA-B*57:01
MSLDDIIIYK

SEQ ID NO: 4684 - protein, 10 aa, Homo sapiens
  Table 1.2; LUZP4; ENSG00000102021; HLA -B*27:02
NGQPLIEQEK

SEQ ID NO: 4685 - protein, 9 aa, Homo sapiens
  Table 1.2; LUZP4; ENSG00000102021; HLA -A*01:01
NSEEGNHDK

SEQ ID NO: 4686 - protein, 10 aa, Homo sapiens
  Table 1.2; LUZP4; ENSG00000102021; HLA -A*30:02
PQYERSHGQY

SEQ ID NO: 4687 - protein, 9 aa, Homo sapiens
  Table 1.2; LUZP4; ENSG00000102021; HLA -B*38:01,HLA-B*39:01
QHPLNGQPL

SEQ ID NO: 4688 - protein, 10 aa, Homo sapiens
  Table 1.2; LUZP4; ENSG00000102021; HLA -B*38:01
QHPLNGQPLI

SEQ ID NO: 4689 - protein, 10 aa, Homo sapiens
  Table 1.2; LUZP4; ENSG00000102021; HLA -B*39:01
QHQSEGNPDK

SEQ ID NO: 4690 - protein, 9 aa, Homo sapiens
  Table 1.2; LUZP4; ENSG00000102021; HLA -B*55:01
QPLIEQEKC

SEQ ID NO: 4691 - protein, 9 aa, Homo sapiens
  Table 1.2; LUZP4; ENSG00000102021; HLA -B*27:02,HLA-B*27:05
QRDLIATQK

SEQ ID NO: 4692 - protein, 9 aa, Homo sapiens
  Table 1.2; LUZP4; ENSG00000102021; HLA -B*27:05
QRDLIATQR

SEQ ID NO: 4693 - protein, 9 aa, Homo sapiens
  Table 1.2; LUZP4; ENSG00000102021; HLA -B*27:02,HLA-B*27:05
QRDLIVTQR

SEQ ID NO: 4694 - protein, 9 aa, Homo sapiens
  Table 1.2; LUZP4; ENSG00000102021; HLA -B*27:05
QRDLVATER

SEQ ID NO: 4695 - protein, 10 aa, Homo sapiens
  Table 1.2; LUZP4; ENSG00000102021; HLA -B*38:01
QRYSTGKNTI

SEQ ID NO: 4696 - protein, 9 aa, Homo sapiens
  Table 1.2; LUZP4; ENSG00000102021; HLA -A*01:01,HLA-A*11:01,HLA-A*31:01,HLA-A*33:01,HLA-A*33:03, HLA-A*68:01,HLA-C*07:06
QSDLIATQR

SEQ ID NO: 4697 - protein, 9 aa, Homo sapiens
  Table 1.2; LUZP4; ENSG00000102021; HLA -A*01:01,HLA-C*05:01
QSDRSQGQL

SEQ ID NO: 4698 - protein, 10 aa, Homo sapiens
  Table 1.2; LUZP4; ENSG00000102021; HLA -A*01:01,HLA-A*03:02
QSDRSQGQLK

SEQ ID NO: 4699 - protein, 9 aa, Homo sapiens
  Table 1.2; LUZP4; ENSG00000102021; HLA -A*29:02,HLA-A*30:02
QYERSHGQY

SEQ ID NO: 4700 - protein, 8 aa, Homo sapiens
  Table 1.2; LUZP4; ENSG00000102021; HLA -A*03:02,HLA-A*11:01,HLA-B*27:02,HLA-B*37:01
RDLIATQK

SEQ ID NO: 4701 - protein, 8 aa, Homo sapiens
  Table 1.2; LUZP4; ENSG00000102021; HLA -A*31:01,HLA-B*37:01
RDLIATQR

SEQ ID NO: 4702 - protein, 9 aa, Homo sapiens
  Table 1.2; LUZP4; ENSG00000102021; HLA -A*31:01
RDLINQSGR

SEQ ID NO: 4703 - protein, 8 aa, Homo sapiens
  Table 1.2; LUZP4; ENSG00000102021; HLA -A*31:01,HLA-B*37:01
RDLIVTQR

SEQ ID NO: 4704 - protein, 8 aa, Homo sapiens
  Table 1.2; LUZP4; ENSG00000102021; HLA -A*03:01,HLA-A*11:01,HLA-A*31:01,HLA-B*37:01
RDLVATER

SEQ ID NO: 4705 - protein, 9 aa, Homo sapiens
  Table 1.2; LUZP4; ENSG00000102021; HLA -A*23:01,HLA-A*24:02
RYSTGKNTI

SEQ ID NO: 4706 - protein, 8 aa, Homo sapiens
  Table 1.2; LUZP4; ENSG00000102021; HLA -B*37:01
SDLIATQR

SEQ ID NO: 4707 - protein, 10 aa, Homo sapiens
  Table 1.2; LUZP4; ENSG00000102021; HLA -A*03:02,HLA-A*11:01,HLA-B*27:02
SDNYEAQAEK

SEQ ID NO: 4708 - protein, 9 aa, Homo sapiens
  Table 1.2; LUZP4; ENSG00000102021; HLA -C*06:02
SDRSQGQLK

SEQ ID NO: 4709 - protein, 9 aa, Homo sapiens
  Table 1.2; LUZP4; ENSG00000102021; HLA -B*40:02
SEKVPPNHP

SEQ ID NO: 4710 - protein, 10 aa, Homo sapiens
  Table 1.2; LUZP4; ENSG00000102021; HLA -B*40:02,HLA-C*04:01,HLA-C*06:02
SEKVPPNHPS

SEQ ID NO: 4711 - protein, 11 aa, Homo sapiens
  Table 1.2; LUZP4; ENSG00000102021; HLA -A*31:01
SEKVPPNHPSR

SEQ ID NO: 4712 - protein, 8 aa, Homo sapiens
  Table 1.2; LUZP4; ENSG00000102021; HLA -A*01:01
SLDDIIIY

SEQ ID NO: 4713 - protein, 9 aa, Homo sapiens
  Table 1.2; LUZP4; ENSG00000102021; HLA -A*01:01,HLA-A*02:01,HLA-A*02:04,HLA-A*02:07,HLA-A*03:01, HLA-A*03:02,HLA-A*11:01,HLA-A*31:01,HLA-A*68:01,HLA-A*68:02
SLDDIIIYK

SEQ ID NO: 4714 - protein, 10 aa, Homo sapiens
  Table 1.2; LUZP4; ENSG00000102021; HLA -A*02:07
SLDDIIIYKE

SEQ ID NO: 4715 - protein, 11 aa, Homo sapiens
  Table 1.2; LUZP4; ENSG00000102021; HLA -A*02:07
SLDDIIIYKEL

SEQ ID NO: 4716 - protein, 9 aa, Homo sapiens
  Table 1.2; LUZP4; ENSG00000102021; HLA -B*56:01
SPSRQQSKA

SEQ ID NO: 4717 - protein, 10 aa, Homo sapiens
  Table 1.2; LUZP4; ENSG00000102021; HLA -B*27:05,HLA-B*39:01
SQSDRSQGQL

SEQ ID NO: 4718 - protein, 11 aa, Homo sapiens
  Table 1.2; LUZP4; ENSG00000102021; HLA -A*03:02,HLA-A*11:01,HLA-A*31:01
SQSDRSQGQLK

SEQ ID NO: 4719 - protein, 9 aa, Homo sapiens
  Table 1.2; LUZP4; ENSG00000102021; HLA -C*06:02
SRNHLERSL

SEQ ID NO: 4720 - protein, 10 aa, Homo sapiens
  Table 1.2; LUZP4; ENSG00000102021; HLA -A*30:01,HLA-B*40:02,HLA-C*06:02
TERDLINQSG

SEQ ID NO: 4721 - protein, 11 aa, Homo sapiens
  Table 1.2; LUZP4; ENSG00000102021; HLA -A*31:01
TERDLINQSGR

SEQ ID NO: 4722 - protein, 8 aa, Homo sapiens
  Table 1.2; LUZP4; ENSG00000102021; HLA -C*07:04
TGKNTITT

SEQ ID NO: 4723 - protein, 9 aa, Homo sapiens
  Table 1.2; LUZP4; ENSG00000102021; HLA -A*31:01,HLA-B*27:05
TQKDLIATQ

SEQ ID NO: 4724 - protein, 10 aa, Homo sapiens
  Table 1.2; LUZP4; ENSG00000102021; HLA -A*31:01,HLA-A*33:01,HLA-A*33:03,HLA-A*68:01,HLA-C*07:06
TQKDLIATQR

SEQ ID NO: 4725 - protein, 10 aa, Homo sapiens
  Table 1.2; LUZP4; ENSG00000102021; HLA -A*03:01,HLA-A*03:02,HLA-A*31:01
TQRDLIATQK

SEQ ID NO: 4726 - protein, 10 aa, Homo sapiens
  Table 1.2; LUZP4; ENSG00000102021; HLA -A*31:01,HLA-A*33:03,HLA-A*68:01
TQRDLIATQR

SEQ ID NO: 4727 - protein, 9 aa, Homo sapiens
  Table 1.2; LUZP4; ENSG00000102021; HLA -A*31:01
TQRDLIVTQ

SEQ ID NO: 4728 - protein, 10 aa, Homo sapiens
  Table 1.2; LUZP4; ENSG00000102021; HLA -A*31:01,HLA-A*33:03,HLA-A*68:01
TQRDLIVTQR

SEQ ID NO: 4729 - protein, 10 aa, Homo sapiens
  Table 1.2; LUZP4; ENSG00000102021; HLA -A*31:01,HLA-A*33:01,HLA-A*33:03,HLA-C*07:06
TQRDLVATER

SEQ ID NO: 4730 - protein, 9 aa, Homo sapiens
  Table 1.2; LUZP4; ENSG00000102021; HLA -B*27:05,HLA-B*38:01,HLA-B*39:01
TQSDLIATQ

SEQ ID NO: 4731 - protein, 10 aa, Homo sapiens
  Table 1.2; LUZP4; ENSG00000102021; HLA -A*11:01,HLA-A*31:01,HLA-A*33:03,HLA-A*68:01,HLA-A*68:02, HLA-B*27:02,HLA-B*27:05,HLA-C*07:06
TQSDLIATQR

SEQ ID NO: 4732 - protein, 8 aa, Homo sapiens
  Table 1.2; LUZP4; ENSG00000102021; HLA -B*51:01,HLA-C*16:01
VATERDLI

SEQ ID NO: 4733 - protein, 8 aa, Homo sapiens
  Table 1.2; LUZP4; ENSG00000102021; HLA -B*51:01
VPPNHPSR

SEQ ID NO: 4734 - protein, 11 aa, Homo sapiens
  Table 1.2; LUZP4; ENSG00000102021; HLA -A*31:01,HLA-A*33:01,HLA-A*68:01
VTQRDLVATER

SEQ ID NO: 4735 - protein, 9 aa, Homo sapiens
  Table 1.2; LUZP4; ENSG00000102021; HLA -B*07:02,HLA-B*44:02,HLA-B*44:03,HLA-C*06:02
YEAQAEKNQ

SEQ ID NO: 4736 - protein, 10 aa, Homo sapiens
  Table 1.2; LUZP4; ENSG00000102021; HLA -B*40:02,HLA-B*49:01
YEAQAEKNQG

SEQ ID NO: 4737 - protein, 8 aa, Homo sapiens
  Table 1.2; LUZP4; ENSG00000102021; HLA -B*18:01
YERSHGQY

SEQ ID NO: 4738 - protein, 8 aa, Homo sapiens
  Table 1.2; LUZP4; ENSG00000102021; HLA -A*32:01,HLA-B*08:01,HLA-C*16:02
YSTGKNTI

SEQ ID NO: 4739 - protein, 9 aa, Homo sapiens
  Table 1.2; MAGEA1; ENSG00000198681; HLA -B*07:02,HLA-B*35:03,HLA-B*46:01,HLA-C*01:02,HLA-C*03:03, HLA-C*03:04,HLA-C*07:02,HLA-C*14:02,HLA-C*16:01
AATSSSSPL

SEQ ID NO: 4740 - protein, 11 aa, Homo sapiens
  Table 1.2; MAGEA1; ENSG00000198681; HLA -C*03:03,HLA-C*03:04
AATSSSSPLVL

SEQ ID NO: 4741 - protein, 8 aa, Homo sapiens
  Table 1.2; MAGEA1; ENSG00000198681; HLA -B*37:01,HLA-B*40:02
ADLVGFLL

SEQ ID NO: 4742 - protein, 9 aa, Homo sapiens
  Table 1.2; MAGEA1; ENSG00000198681; HLA -B*44:02
ADLVGFLLL

SEQ ID NO: 4743 - protein, 8 aa, Homo sapiens
  Table 1.2; MAGEA1; ENSG00000198681; HLA -A*30:02,HLA-B*15:03,HLA-B*37:01,HLA-B*44:02,HLA-B*44:03, HLA-C*01:02,HLA-C*14:02
ADPTGHSY

SEQ ID NO: 4744 - protein, 9 aa, Homo sapiens
  Table 1.2; MAGEA1; ENSG00000198681; HLA -B*37:01
ADPTGHSYV

SEQ ID NO: 4745 - protein, 10 aa, Homo sapiens
  Table 1.2; MAGEA1; ENSG00000198681; HLA -B*37:01
ADPTGHSYVL

SEQ ID NO: 4746 - protein, 8 aa, Homo sapiens
  Table 1.2; MAGEA1; ENSG00000198681; HLA -A*30:01,HLA-B*13:02,HLA-B*18:01,HLA-B*37:01,HLA-B*40:01, HLA-B*40:02,HLA-B*44:02,HLA-B*44:03,HLA-B*49:01
AEMLESVI

SEQ ID NO: 4747 - protein, 10 aa, Homo sapiens
  Table 1.2; MAGEA1; ENSG00000198681; HLA -B*44:02,HLA-B*49:01
AEMLESVIKN

SEQ ID NO: 4748 - protein, 11 aa, Homo sapiens
  Table 1.2; MAGEA1; ENSG00000198681; HLA -A*30:01,HLA-A*30:02,HLA-B*18:01,HLA-B*27:02,HLA-B*40:01, HLA-B*44:02,HLA-B*44:03,HLA-B*49:01,HLA-C*16:04
AEMLESVIKNY

SEQ ID NO: 4749 - protein, 8 aa, Homo sapiens
  Table 1.2; MAGEA1; ENSG00000198681; HLA -A*30:01,HLA-B*37:01,HLA-B*49:01
AETSYVKV

SEQ ID NO: 4750 - protein, 9 aa, Homo sapiens
  Table 1.2; MAGEA1; ENSG00000198681; HLA -A*30:01,HLA-B*18:01,HLA-B*27:02,HLA-B*27:05,HLA-B*37:01, HLA-B*40:01,HLA-B*40:02,HLA-B*44:02,HLA-B*44:03,HLA-B*49:01, HLA-C*02:02,HLA-C*12:03,HLA-C*16:01,HLA-C*16:02,HLA-C*16:04
AETSYVKVL

SEQ ID NO: 4751 - protein, 11 aa, Homo sapiens
  Table 1.2; MAGEA1; ENSG00000198681; HLA -A*29:02,HLA-A*30:01,HLA-A*30:02,HLA-B*18:01,HLA-B*27:02, HLA-B*44:02,HLA-B*44:03,HLA-C*16:04
AETSYVKVLEY

SEQ ID NO: 4752 - protein, 8 aa, Homo sapiens
  Table 1.2; MAGEA1; ENSG00000198681; HLA -A*23:01,HLA-A*24:02,HLA-C*14:02
AFPTTINF

SEQ ID NO: 4753 - protein, 8 aa, Homo sapiens
  Table 1.2; MAGEA1; ENSG00000198681; HLA -A*02:01,HLA-A*02:03,HLA-B*55:01
ALAETSYV

SEQ ID NO: 4754 - protein, 9 aa, Homo sapiens
  Table 1.2; MAGEA1; ENSG00000198681; HLA -A*01:01,HLA-A*03:01,HLA-A*03:02,HLA-A*11:01,HLA-A*29:02, HLA-A*68:01,HLA-B*13:02,HLA-B*27:05
ALAETSYVK

SEQ ID NO: 4755 - protein, 10 aa, Homo sapiens
  Table 1.2; MAGEA1; ENSG00000198681; HLA -A*02:01,HLA-A*02:03,HLA-A*02:04,HLA-A*02:07,HLA-B*55:01
ALAETSYVKV

SEQ ID NO: 4756 - protein, 11 aa, Homo sapiens
  Table 1.2; MAGEA1; ENSG00000198681; HLA -A*02:03,HLA-A*02:04
ALAETSYVKVL

SEQ ID NO: 4757 - protein, 9 aa, Homo sapiens
  Table 1.2; MAGEA1; ENSG00000198681; HLA -A*02:01,HLA-B*55:01
ALGLVCVQA

SEQ ID NO: 4758 - protein, 9 aa, Homo sapiens
  Table 1.2; MAGEA1; ENSG00000198681; HLA -A*02:01,HLA-A*02:03,HLA-A*02:04,HLA-A*02:07,HLA-B*13:02, HLA-B*15:01,HLA-B*40:02,HLA-B*55:01,HLA-C*06:02,HLA-C*07:04
ALREEEEGV

SEQ ID NO: 4759 - protein, 9 aa, Homo sapiens
  Table 1.2; MAGEA1; ENSG00000198681; HLA -A*02:01,HLA-A*02:03,HLA-B*13:02
AQQEALGLV

SEQ ID NO: 4760 - protein, 11 aa, Homo sapiens
  Table 1.2; MAGEA1; ENSG00000198681; HLA -A*02:01,HLA-A*02:04,HLA-A*30:01,HLA-B*13:02,HLA-B*15:01
AQQEALGLVCV

SEQ ID NO: 4761 - protein, 10 aa, Homo sapiens
  Table 1.2; MAGEA1; ENSG00000198681; HLA -B*27:05,HLA-B*38:01
AREPVTKAEM

SEQ ID NO: 4762 - protein, 10 aa, Homo sapiens
  Table 1.2; MAGEA1; ENSG00000198681; HLA -B*57:01,HLA-B*58:01
ASAFPTTINF

SEQ ID NO: 4763 - protein, 9 aa, Homo sapiens
  Table 1.2; MAGEA1; ENSG00000198681; HLA -A*01:01,HLA-A*11:01,HLA-A*29:02,HLA-B*57:01,HLA-B*58:01
ASESLQLVF

SEQ ID NO: 4764 - protein, 9 aa, Homo sapiens
  Table 1.2; MAGEA1; ENSG00000198681; HLA -A*01:01,HLA-A*02:01,HLA-A*03:02,HLA-A*11:01,HLA-B*13:02, HLA-B*27:05,HLA-B*39:01
ATSSSSPLV

SEQ ID NO: 4765 - protein, 10 aa, Homo sapiens
  Table 1.2; MAGEA1; ENSG00000198681; HLA -A*03:01,HLA-A*11:01
ATSSSSPLVL

SEQ ID NO: 4766 - protein, 11 aa, Homo sapiens
  Table 1.2; MAGEA1; ENSG00000198681; HLA -A*11:01,HLA-A*31:01
ATSSSSPLVLG

SEQ ID NO: 4767 - protein, 8 aa, Homo sapiens
  Table 1.2; MAGEA1; ENSG00000198681; HLA -B*08:01
AVITKKVA

SEQ ID NO: 4768 - protein, 8 aa, Homo sapiens
  Table 1.2; MAGEA1; ENSG00000198681; HLA -A*24:02
AYGEPRKL

SEQ ID NO: 4769 - protein, 9 aa, Homo sapiens
  Table 1.2; MAGEA1; ENSG00000198681; HLA -A*24:02
AYGEPRKLL

SEQ ID NO: 4770 - protein, 9 aa, Homo sapiens
  Table 1.2; MAGEA1; ENSG00000198681; HLA -A*02:01,HLA-A*02:04
CILESLFRA

SEQ ID NO: 4771 - protein, 9 aa, Homo sapiens
  Table 1.2; MAGEA1; ENSG00000198681; HLA -B*38:01,HLA-B*51:01
DGLLGDNQI

SEQ ID NO: 4772 - protein, 8 aa, Homo sapiens
  Table 1.2; MAGEA1; ENSG00000198681; HLA -B*08:01,HLA-B*18:01
DGREHSAY

SEQ ID NO: 4773 - protein, 10 aa, Homo sapiens
  Table 1.2; MAGEA1; ENSG00000198681; HLA -A*25:01,HLA-A*26:01,HLA-A*29:02
DLVGFLLLKY

SEQ ID NO: 4774 - protein, 10 aa, Homo sapiens
  Table 1.2; MAGEA1; ENSG00000198681; HLA -A*01:01,HLA-A*25:01,HLA-A*26:01,HLA-A*29:02,HLA-A*33:01, HLA-B*35:01
DLVQEKYLEY

SEQ ID NO: 4775 - protein, 11 aa, Homo sapiens
  Table 1.2; MAGEA1; ENSG00000198681; HLA -A*33:01
DLVQEKYLEYR

SEQ ID NO: 4776 - protein, 8 aa, Homo sapiens
  Table 1.2; MAGEA1; ENSG00000198681; HLA -B*51:01
DPPQSPQG

SEQ ID NO: 4777 - protein, 8 aa, Homo sapiens
  Table 1.2; MAGEA1; ENSG00000198681; HLA -B*51:01
DPTGHSYV

SEQ ID NO: 4778 - protein, 9 aa, Homo sapiens
  Table 1.2; MAGEA1; ENSG00000198681; HLA -B*07:02,HLA-B*08:01,HLA-B*35:01,HLA-B*35:03,HLA-B*39:01, HLA-B*51:01,HLA-B*55:01,HLA-C*07:02
DPTGHSYVL

SEQ ID NO: 4779 - protein, 9 aa, Homo sapiens
  Table 1.2; MAGEA1; ENSG00000198681; HLA -A*01:01,HLA-A*25:01,HLA-A*32:01,HLA-A*33:01,HLA-B*18:01, HLA-B*35:01,HLA-B*38:01,HLA-B*39:01,HLA-B*57:01,HLA-B*58:01, HLA-C*05:01
DSDPARYEF

SEQ ID NO: 4780 - protein, 10 aa, Homo sapiens
  Table 1.2; MAGEA1; ENSG00000198681; HLA -A*01:01
DSDPARYEFL

SEQ ID NO: 4781 - protein, 10 aa, Homo sapiens
  Table 1.2; MAGEA1; ENSG00000198681; HLA -A*25:01,HLA-A*26:01,HLA-A*33:01
DVKEADPTGH

SEQ ID NO: 4782 - protein, 9 aa, Homo sapiens
  Table 1.2; MAGEA1; ENSG00000198681; HLA -A*01:01,HLA-A*25:01,HLA-A*26:01,HLA-A*29:02,HLA-A*30:02, HLA-A*32:01,HLA-A*33:01,HLA-A*33:03,HLA-A*68:01,HLA-B*15:01, HLA-B*15:03,HLA-B*18:01,HLA-B*35:01,HLA-B*35:03,HLA-B*38:01,
  HLA-B*39:01,HLA-B*44:02,HLA-B*44:03,HLA-B*46:01,HLA-B*55:01, HLA-B*58:01,HLA-C*02:02,HLA-C*03:03,HLA-C*03:04,HLA-C*04:01, HLA-C*05:01,HLA-C*07:04,HLA-C*07:06,HLA-C*14:02,HLA-C*16:01, HLA-C*16:02,HLA-C*16:04
EADPTGHSY

SEQ ID NO: 4783 - protein, 10 aa, Homo sapiens
  Table 1.2; MAGEA1; ENSG00000198681; HLA -A*01:01,HLA-A*68:02,HLA-B*38:01,HLA-B*51:01,HLA-C*05:01
EADPTGHSYV

SEQ ID NO: 4784 - protein, 11 aa, Homo sapiens
  Table 1.2; MAGEA1; ENSG00000198681; HLA -A*01:01,HLA-A*68:01,HLA-B*27:05,HLA-B*35:01,HLA-B*35:03, HLA-B*38:01,HLA-B*39:01,HLA-B*40:01,HLA-B*55:01,HLA-C*03:04, HLA-C*05:01,HLA-C*16:02
EADPTGHSYVL

SEQ ID NO: 4785 - protein, 9 aa, Homo sapiens
  Table 1.2; MAGEA1; ENSG00000198681; HLA -B*54:01
EALEAQQEA

SEQ ID NO: 4786 - protein, 10 aa, Homo sapiens
  Table 1.2; MAGEA1; ENSG00000198681; HLA -A*68:01,HLA-B*35:03
EALEAQQEAL

SEQ ID NO: 4787 - protein, 8 aa, Homo sapiens
  Table 1.2; MAGEA1; ENSG00000198681; HLA -B*51:01
EALGLVCV

SEQ ID NO: 4788 - protein, 9 aa, Homo sapiens
  Table 1.2; MAGEA1; ENSG00000198681; HLA -A*33:03,HLA-C*07:01
EALGLVCVQ

SEQ ID NO: 4789 - protein, 10 aa, Homo sapiens
  Table 1.2; MAGEA1; ENSG00000198681; HLA -A*33:03,HLA-A*68:02,HLA-B*54:01
EALGLVCVQA

SEQ ID NO: 4790 - protein, 11 aa, Homo sapiens
  Table 1.2; MAGEA1; ENSG00000198681; HLA -A*30:01,HLA-B*40:01
EEALEAQQEAL

SEQ ID NO: 4791 - protein, 9 aa, Homo sapiens
  Table 1.2; MAGEA1; ENSG00000198681; HLA -B*39:01
EEEGPSTSC

SEQ ID NO: 4792 - protein, 10 aa, Homo sapiens
  Table 1.2; MAGEA1; ENSG00000198681; HLA -B*40:01,HLA-B*49:01
EEEGPSTSCI

SEQ ID NO: 4793 - protein, 11 aa, Homo sapiens
  Table 1.2; MAGEA1; ENSG00000198681; HLA -B*40:01
EEEGPSTSCIL

SEQ ID NO: 4794 - protein, 9 aa, Homo sapiens
  Table 1.2; MAGEA1; ENSG00000198681; HLA -B*40:01,HLA-B*44:02,HLA-B*44:03,HLA-B*49:01
EEGPSTSCI

SEQ ID NO: 4795 - protein, 10 aa, Homo sapiens
  Table 1.2; MAGEA1; ENSG00000198681; HLA -B*40:01,HLA-B*44:03
EEGPSTSCIL

SEQ ID NO: 4796 - protein, 9 aa, Homo sapiens
  Table 1.2; MAGEA1; ENSG00000198681; HLA -B*49:01
EEIWEELSV

SEQ ID NO: 4797 - protein, 8 aa, Homo sapiens
  Table 1.2; MAGEA1; ENSG00000198681; HLA -B*18:01,HLA-B*40:02,HLA-B*49:01
EELSVMEV

SEQ ID NO: 4798 - protein, 9 aa, Homo sapiens
  Table 1.2; MAGEA1; ENSG00000198681; HLA -A*25:01,HLA-A*26:01,HLA-A*30:01,HLA-B*15:03,HLA-B*18:01, HLA-B*27:02,HLA-B*35:01,HLA-B*40:01,HLA-B*44:02,HLA-B*44:03, HLA-C*16:04
EELSVMEVY

SEQ ID NO: 4799 - protein, 9 aa, Homo sapiens
  Table 1.2; MAGEA1; ENSG00000198681; HLA -B*40:02
EEVPTAGST

SEQ ID NO: 4800 - protein, 8 aa, Homo sapiens
  Table 1.2; MAGEA1; ENSG00000198681; HLA -B*51:01
EGPSTSCI

SEQ ID NO: 4801 - protein, 9 aa, Homo sapiens
  Table 1.2; MAGEA1; ENSG00000198681; HLA -A*33:03
EHSAYGEPR

SEQ ID NO: 4802 - protein, 10 aa, Homo sapiens
  Table 1.2; MAGEA1; ENSG00000198681; HLA -A*25:01,HLA-A*26:01
EIFGKASESL

SEQ ID NO: 4803 - protein, 8 aa, Homo sapiens
  Table 1.2; MAGEA1; ENSG00000198681; HLA -B*18:01
ELSVMEVY

SEQ ID NO: 4804 - protein, 10 aa, Homo sapiens
  Table 1.2; MAGEA1; ENSG00000198681; HLA -A*25:01,HLA-A*26:01,HLA-A*29:02,HLA-A*30:02,HLA-A*33:01, HLA-A*33:03,HLA-B*44:02,HLA-B*44:03
EMLESVIKNY

SEQ ID NO: 4805 - protein, 11 aa, Homo sapiens
  Table 1.2; MAGEA1; ENSG00000198681; HLA -A*33:03
EMLESVIKNYK

SEQ ID NO: 4806 - protein, 8 aa, Homo sapiens
  Table 1.2; MAGEA1; ENSG00000198681; HLA -B*08:01,HLA-B*35:01,HLA-B*35:03,HLA-B*55:01
EPVTKAEM

SEQ ID NO: 4807 - protein, 9 aa, Homo sapiens
  Table 1.2; MAGEA1; ENSG00000198681; HLA -B*07:02,HLA-B*08:01,HLA-B*35:01,HLA-B*35:03,HLA-C*07:02
EPVTKAEML

SEQ ID NO: 4808 - protein, 8 aa, Homo sapiens
  Table 1.2; MAGEA1; ENSG00000198681; HLA -B*08:01
ESLFRAVI

SEQ ID NO: 4809 - protein, 10 aa, Homo sapiens
  Table 1.2; MAGEA1; ENSG00000198681; HLA -A*33:03
ESLFRAVITK

SEQ ID NO: 4810 - protein, 9 aa, Homo sapiens
  Table 1.2; MAGEA1; ENSG00000198681; HLA -A*33:01,HLA-A*68:02,HLA-C*07:01
ESLQLVFGI

SEQ ID NO: 4811 - protein, 11 aa, Homo sapiens
  Table 1.2; MAGEA1; ENSG00000198681; HLA -A*68:02
ESLQLVFGIDV

SEQ ID NO: 4812 - protein, 9 aa, Homo sapiens
  Table 1.2; MAGEA1; ENSG00000198681; HLA -A*68:02
ETSYVKVLE

SEQ ID NO: 4813 - protein, 10 aa, Homo sapiens
  Table 1.2; MAGEA1; ENSG00000198681; HLA -A*01:01,HLA-A*25:01,HLA-A*26:01,HLA-A*29:02,HLA-A*33:03, HLA-A*68:01,HLA-A*68:02,HLA-B*44:03
ETSYVKVLEY

SEQ ID NO: 4814 - protein, 11 aa, Homo sapiens
  Table 1.2; MAGEA1; ENSG00000198681; HLA -A*68:02
ETSYVKVLEYV

SEQ ID NO: 4815 - protein, 10 aa, Homo sapiens
  Table 1.2; MAGEA1; ENSG00000198681; HLA -A*25:01,HLA-A*26:01,HLA-A*32:01,HLA-A*33:01,HLA-A*33:03, HLA-A*68:01,HLA-A*68:02,HLA-B*08:01,HLA-B*54:01,HLA-B*55:01, HLA-B*56:01
EVYDGREHSA

SEQ ID NO: 4816 - protein, 11 aa, Homo sapiens
  Table 1.2; MAGEA1; ENSG00000198681; HLA -A*01:01,HLA-A*25:01,HLA-A*26:01,HLA-A*29:02,HLA-A*30:02, HLA-A*32:01,HLA-A*33:01,HLA-A*33:03,HLA-A*68:01,HLA-B*15:01, HLA-B*35:01
EVYDGREHSAY

SEQ ID NO: 4817 - protein, 8 aa, Homo sapiens
  Table 1.2; MAGEA1; ENSG00000198681; HLA -B*08:01
EYVIKVSA

SEQ ID NO: 4818 - protein, 9 aa, Homo sapiens
  Table 1.2; MAGEA1; ENSG00000198681; HLA -A*26:01,HLA-A*31:01,HLA-A*33:01,HLA-A*33:03,HLA-A*68:01, HLA-C*07:06
EYVIKVSAR

SEQ ID NO: 4819 - protein, 9 aa, Homo sapiens
  Table 1.2; MAGEA1; ENSG00000198681; HLA -A*02:03,HLA-B*54:01
FFFPSLREA

SEQ ID NO: 4820 - protein, 11 aa, Homo sapiens
  Table 1.2; MAGEA1; ENSG00000198681; HLA -A*29:02
FFFPSLREAAL

SEQ ID NO: 4821 - protein, 8 aa, Homo sapiens
  Table 1.2; MAGEA1; ENSG00000198681; HLA -B*08:01,HLA-B*46:01
FGKASESL

SEQ ID NO: 4822 - protein, 9 aa, Homo sapiens
  Table 1.2; MAGEA1; ENSG00000198681; HLA -A*02:01,HLA-A*02:03,HLA-A*02:04,HLA-A*02:07
FLIIVLVMI

SEQ ID NO: 4823 - protein, 8 aa, Homo sapiens
  Table 1.2; MAGEA1; ENSG00000198681; HLA -A*02:04
FLWGPRAL

SEQ ID NO: 4824 - protein, 9 aa, Homo sapiens
  Table 1.2; MAGEA1; ENSG00000198681; HLA -A*02:01,HLA-A*02:03,HLA-A*02:07
FLWGPRALA

SEQ ID NO: 4825 - protein, 11 aa, Homo sapiens
  Table 1.2; MAGEA1; ENSG00000198681; HLA -A*02:01,HLA-A*02:03,HLA-A*02:04,HLA-A*02:07
FLWGPRALAET

SEQ ID NO: 4826 - protein, 8 aa, Homo sapiens
  Table 1.2; MAGEA1; ENSG00000198681; HLA -B*54:01,HLA-B*56:01
FPEIFGKA

SEQ ID NO: 4827 - protein, 8 aa, Homo sapiens
  Table 1.2; MAGEA1; ENSG00000198681; HLA -B*54:01,HLA-B*56:01
FPSLREAA

SEQ ID NO: 4828 - protein, 9 aa, Homo sapiens
  Table 1.2; MAGEA1; ENSG00000198681; HLA -B*07:02,HLA-B*08:01,HLA-B*35:01,HLA-B*35:03,HLA-B*37:01, HLA-B*39:01,HLA-B*40:01,HLA-B*51:01,HLA-B*54:01,HLA-B*55:01, HLA-B*56:01,HLA-C*03:03,HLA-C*03:04,HLA-C*07:02,HLA-C*16:01
FPSLREAAL

SEQ ID NO: 4829 - protein, 8 aa, Homo sapiens
  Table 1.2; MAGEA1; ENSG00000198681; HLA -B*54:01,HLA-B*56:01
FPTTINFT

SEQ ID NO: 4830 - protein, 9 aa, Homo sapiens
  Table 1.2; MAGEA1; ENSG00000198681; HLA -A*33:03,HLA-A*68:01,HLA-A*68:02,HLA-B*27:02,HLA-B*35:01, HLA-B*35:03,HLA-B*54:01,HLA-B*55:01,HLA-B*56:01,HLA-C*07:06
FPTTINFTR

SEQ ID NO: 4831 - protein, 10 aa, Homo sapiens
  Table 1.2; MAGEA1; ENSG00000198681; HLA -B*54:01
FPTTINFTRQ

SEQ ID NO: 4832 - protein, 8 aa, Homo sapiens
  Table 1.2; MAGEA1; ENSG00000198681; HLA -B*27:05
FRAVITKK

SEQ ID NO: 4833 - protein, 9 aa, Homo sapiens
  Table 1.2; MAGEA1; ENSG00000198681; HLA -A*68:02,HLA-C*06:02
FRAVITKKV

SEQ ID NO: 4834 - protein, 9 aa, Homo sapiens
  Table 1.2; MAGEA1; ENSG00000198681; HLA -A*02:03,HLA-B*13:02,HLA-B*49:01,HLA-B*51:01,HLA-C*02:02, HLA-C*12:03,HLA-C*16:02
GASAFPTTI

SEQ ID NO: 4835 - protein, 8 aa, Homo sapiens
  Table 1.2; MAGEA1; ENSG00000198681; HLA -A*11:01,HLA-B*27:02
GDNQIMPK

SEQ ID NO: 4836 - protein, 9 aa, Homo sapiens
  Table 1.2; MAGEA1; ENSG00000198681; HLA -A*23:01,HLA-A*29:02
GFLIIVLVM

SEQ ID NO: 4837 - protein, 8 aa, Homo sapiens
  Table 1.2; MAGEA1; ENSG00000198681; HLA -B*38:01
GHAPEEEI

SEQ ID NO: 4838 - protein, 9 aa, Homo sapiens
  Table 1.2; MAGEA1; ENSG00000198681; HLA -B*38:01
GHAPEEEIW

SEQ ID NO: 4839 - protein, 10 aa, Homo sapiens
  Table 1.2; MAGEA1; ENSG00000198681; HLA -B*38:01
GHSYVLVTCL

SEQ ID NO: 4840 - protein, 9 aa, Homo sapiens
  Table 1.2; MAGEA1; ENSG00000198681; HLA -B*15:03
GKASESLQL

SEQ ID NO: 4841 - protein, 11 aa, Homo sapiens
  Table 1.2; MAGEA1; ENSG00000198681; HLA -B*15:03
GKASESLQLVF

SEQ ID NO: 4842 - protein, 11 aa, Homo sapiens
  Table 1.2; MAGEA1; ENSG00000198681; HLA -A*02:01,HLA-A*02:04,HLA-A*03:01,HLA-A*03:02,HLA-A*11:01, HLA-A*31:01,HLA-B*27:02,HLA-B*27:05
GLLGDNQIMPK

SEQ ID NO: 4843 - protein, 10 aa, Homo sapiens
  Table 1.2; MAGEA1; ENSG00000198681; HLA -A*30:02,HLA-B*07:02,HLA-B*15:01,HLA-B*15:03,HLA-B*35:01, HLA-B*55:01
GPRALAETSY

SEQ ID NO: 4844 - protein, 9 aa, Homo sapiens
  Table 1.2; MAGEA1; ENSG00000198681; HLA -A*02:01,HLA-A*02:03,HLA-B*55:01
GTLEEVPTA

SEQ ID NO: 4845 - protein, 9 aa, Homo sapiens
  Table 1.2; MAGEA1; ENSG00000198681; HLA -A*03:01,HLA-A*03:02,HLA-A*11:01
HCFPEIFGK

SEQ ID NO: 4846 - protein, 8 aa, Homo sapiens
  Table 1.2; MAGEA1; ENSG00000198681; HLA -A*68:01
HSAYGEPR

SEQ ID NO: 4847 - protein, 9 aa, Homo sapiens
  Table 1.2; MAGEA1; ENSG00000198681; HLA -C*03:04
IAMEGGHAP

SEQ ID NO: 4848 - protein, 9 aa, Homo sapiens
  Table 1.2; MAGEA1; ENSG00000198681; HLA -C*14:02
IFGKASESL

SEQ ID NO: 4849 - protein, 9 aa, Homo sapiens
  Table 1.2; MAGEA1; ENSG00000198681; HLA -A*02:01,HLA-A*02:03,HLA-A*02:04,HLA-A*02:07
ILESLFRAV

SEQ ID NO: 4850 - protein, 9 aa, Homo sapiens
  Table 1.2; MAGEA1; ENSG00000198681; HLA -A*02:07,HLA-A*24:02
IMPKTGFLI

SEQ ID NO: 4851 - protein, 10 aa, Homo sapiens
  Table 1.2; MAGEA1; ENSG00000198681; HLA -A*24:02
IMPKTGFLII

SEQ ID NO: 4852 - protein, 11 aa, Homo sapiens
  Table 1.2; MAGEA1; ENSG00000198681; HLA -B*57:01
ITKKVADLVGF

SEQ ID NO: 4853 - protein, 10 aa, Homo sapiens
  Table 1.2; MAGEA1; ENSG00000198681; HLA -B*27:02
KAEMLESVIK

SEQ ID NO: 4854 - protein, 8 aa, Homo sapiens
  Table 1.2; MAGEA1; ENSG00000198681; HLA -C*03:04
KASESLQL

SEQ ID NO: 4855 - protein, 9 aa, Homo sapiens
  Table 1.2; MAGEA1; ENSG00000198681; HLA -B*58:01,HLA-C*16:02
KASESLQLV

SEQ ID NO: 4856 - protein, 10 aa, Homo sapiens
  Table 1.2; MAGEA1; ENSG00000198681; HLA -A*23:01,HLA-A*24:02,HLA-A*29:02,HLA-B*27:02,HLA-B*57:01, HLA-B*58:01,HLA-C*02:02,HLA-C*16:04
KASESLQLVF

SEQ ID NO: 4857 - protein, 10 aa, Homo sapiens
  Table 1.2; MAGEA1; ENSG00000198681; HLA -A*01:01,HLA-A*03:02,HLA-A*25:01,HLA-A*26:01,HLA-A*29:02, HLA-A*30:01,HLA-A*30:02,HLA-A*32:01,HLA-B*15:01,HLA-B*15:03, HLA-B*18:01,HLA-B*27:02,HLA-B*27:05,HLA-B*37:01,HLA-B*40:01,
  HLA-B*44:02,HLA-B*44:03,HLA-B*49:01,HLA-B*57:01,HLA-B*58:01, HLA-C*02:02,HLA-C*16:01,HLA-C*16:02,HLA-C*16:04
KEADPTGHSY

SEQ ID NO: 4858 - protein, 11 aa, Homo sapiens
  Table 1.2; MAGEA1; ENSG00000198681; HLA -B*40:01,HLA-B*49:01
KEADPTGHSYV

SEQ ID NO: 4859 - protein, 9 aa, Homo sapiens
  Table 1.2; MAGEA1; ENSG00000198681; HLA -B*15:03
KKVADLVGF

SEQ ID NO: 4860 - protein, 11 aa, Homo sapiens
  Table 1.2; MAGEA1; ENSG00000198681; HLA -A*03:01,HLA-A*03:02,HLA-A*11:01,HLA-A*31:01
KLLTQDLVQEK

SEQ ID NO: 4861 - protein, 9 aa, Homo sapiens
  Table 1.2; MAGEA1; ENSG00000198681; HLA -A*02:03,HLA-A*02:04,HLA-A*02:07,HLA-A*03:01,HLA-A*25:01, HLA-A*26:01,HLA-A*32:01,HLA-A*68:02,HLA-B*27:05,HLA-B*58:01
KVADLVGFL

SEQ ID NO: 4862 - protein, 10 aa, Homo sapiens
  Table 1.2; MAGEA1; ENSG00000198681; HLA -A*02:01,HLA-A*02:04,HLA-A*02:07,HLA-A*03:01,HLA-A*31:01, HLA-A*68:02,HLA-B*57:01
KVADLVGFLL

SEQ ID NO: 4863 - protein, 11 aa, Homo sapiens
  Table 1.2; MAGEA1; ENSG00000198681; HLA -A*02:01,HLA-A*02:04,HLA-A*02:07,HLA-A*03:01
KVADLVGFLLL

SEQ ID NO: 4864 - protein, 9 aa, Homo sapiens
  Table 1.2; MAGEA1; ENSG00000198681; HLA -A*02:01,HLA-A*02:03,HLA-A*02:04,HLA-A*02:07,HLA-A*03:01, HLA-A*03:02,HLA-A*11:01,HLA-A*31:01,HLA-A*32:01,HLA-A*68:02, HLA-B*13:02,HLA-B*40:02,HLA-B*55:01,HLA-B*57:01,HLA-B*58:01,
  HLA-C*02:02,HLA-C*06:02
KVLEYVIKV

SEQ ID NO: 4865 - protein, 11 aa, Homo sapiens
  Table 1.2; MAGEA1; ENSG00000198681; HLA -A*02:01,HLA-B*54:01,HLA-B*56:01
KVLEYVIKVSA

SEQ ID NO: 4866 - protein, 8 aa, Homo sapiens
  Table 1.2; MAGEA1; ENSG00000198681; HLA -B*27:02
LAETSYVK

SEQ ID NO: 4867 - protein, 9 aa, Homo sapiens
  Table 1.2; MAGEA1; ENSG00000198681; HLA -C*05:01
LAETSYVKV

SEQ ID NO: 4868 - protein, 8 aa, Homo sapiens
  Table 1.2; MAGEA1; ENSG00000198681; HLA -A*30:01,HLA-B*18:01,HLA-B*40:01,HLA-B*49:01
LEAQQEAL

SEQ ID NO: 4869 - protein, 10 aa, Homo sapiens
  Table 1.2; MAGEA1; ENSG00000198681; HLA -A*30:01,HLA-B*40:01
LEAQQEALGL

SEQ ID NO: 4870 - protein, 11 aa, Homo sapiens
  Table 1.2; MAGEA1; ENSG00000198681; HLA -B*49:01
LEAQQEALGLV

SEQ ID NO: 4871 - protein, 8 aa, Homo sapiens
  Table 1.2; MAGEA1; ENSG00000198681; HLA -B*18:01,HLA-B*37:01,HLA-B*49:01
LESLFRAV

SEQ ID NO: 4872 - protein, 9 aa, Homo sapiens
  Table 1.2; MAGEA1; ENSG00000198681; HLA -B*44:02,HLA-B*49:01
LESLFRAVI

SEQ ID NO: 4873 - protein, 8 aa, Homo sapiens
  Table 1.2; MAGEA1; ENSG00000198681; HLA -B*18:01,HLA-B*37:01,HLA-B*44:02,HLA-B*44:03,HLA-C*12:03, HLA-C*16:04
LESVIKNY

SEQ ID NO: 4874 - protein, 9 aa, Homo sapiens
  Table 1.2; MAGEA1; ENSG00000198681; HLA -A*30:01,HLA-B*18:01,HLA-B*37:01,HLA-B*40:01,HLA-B*40:02, HLA-B*49:01,HLA-B*54:01,HLA-B*56:01
LEYVIKVSA

SEQ ID NO: 4875 - protein, 9 aa, Homo sapiens
  Table 1.2; MAGEA1; ENSG00000198681; HLA -A*03:01,HLA-A*03:02,HLA-A*11:01,HLA-B*27:02
LGDNQIMPK

SEQ ID NO: 4876 - protein, 9 aa, Homo sapiens
  Table 1.2; MAGEA1; ENSG00000198681; HLA -B*38:01
LHCKPEEAL

SEQ ID NO: 4877 - protein, 10 aa, Homo sapiens
  Table 1.2; MAGEA1; ENSG00000198681; HLA -A*03:01,HLA-A*03:02,HLA-A*11:01,HLA-B*27:02
LLGDNQIMPK

SEQ ID NO: 4878 - protein, 10 aa, Homo sapiens
  Table 1.2; MAGEA1; ENSG00000198681; HLA -B*27:02
LLTQDLVQEK

SEQ ID NO: 4879 - protein, 9 aa, Homo sapiens
  Table 1.2; MAGEA1; ENSG00000198681; HLA -B*13:02
LQLVFGIDV

SEQ ID NO: 4880 - protein, 10 aa, Homo sapiens
  Table 1.2; MAGEA1; ENSG00000198681; HLA -B*27:02
LSVMEVYDGR

SEQ ID NO: 4881 - protein, 9 aa, Homo sapiens
  Table 1.2; MAGEA1; ENSG00000198681; HLA -A*01:01,HLA-A*03:02,HLA-A*11:01,HLA-A*31:01,HLA-A*33:01, HLA-A*33:03,HLA-A*68:01,HLA-B*27:02,HLA-B*27:05,HLA-C*07:06
LTQDLVQEK

SEQ ID NO: 4882 - protein, 10 aa, Homo sapiens
  Table 1.2; MAGEA1; ENSG00000198681; HLA -A*01:01,HLA-A*25:01,HLA-A*26:01,HLA-A*29:02,HLA-A*30:02, HLA-A*32:01,HLA-B*57:01,HLA-B*58:01,HLA-C*16:04
LTQDLVQEKY

SEQ ID NO: 4883 - protein, 8 aa, Homo sapiens
  Table 1.2; MAGEA1; ENSG00000198681; HLA -B*27:02
LVFGIDVK

SEQ ID NO: 4884 - protein, 9 aa, Homo sapiens
  Table 1.2; MAGEA1; ENSG00000198681; HLA -B*27:05
LVFGIDVKE

SEQ ID NO: 4885 - protein, 9 aa, Homo sapiens
  Table 1.2; MAGEA1; ENSG00000198681; HLA -A*01:01,HLA-A*29:02
LVGFLLLKY

SEQ ID NO: 4886 - protein, 9 aa, Homo sapiens
  Table 1.2; MAGEA1; ENSG00000198681; HLA -A*02:01,HLA-A*02:03,HLA-A*02:04,HLA-A*02:07,HLA-B*55:01
LVLGTLEEV

SEQ ID NO: 4887 - protein, 9 aa, Homo sapiens
  Table 1.2; MAGEA1; ENSG00000198681; HLA -A*01:01,HLA-A*02:07,HLA-A*03:01,HLA-A*03:02,HLA-A*11:01, HLA-A*25:01,HLA-A*26:01,HLA-A*29:02,HLA-A*30:02,HLA-A*32:01, HLA-A*33:01,HLA-B*15:01,HLA-B*15:03,HLA-B*35:01,HLA-B*46:01,
  HLA-B*57:01,HLA-B*58:01,HLA-C*01:02,HLA-C*02:02,HLA-C*03:03, HLA-C*07:04,HLA-C*12:03,HLA-C*14:02,HLA-C*16:01,HLA-C*16:02
LVQEKYLEY

SEQ ID NO: 4888 - protein, 10 aa, Homo sapiens
  Table 1.2; MAGEA1; ENSG00000198681; HLA -A*31:01,HLA-A*33:01
LVQEKYLEYR

SEQ ID NO: 4889 - protein, 9 aa, Homo sapiens
  Table 1.2; MAGEA1; ENSG00000198681; HLA -A*01:01,HLA-A*26:01,HLA-A*29:02,HLA-A*30:02
LVTCLGLSY

SEQ ID NO: 4890 - protein, 11 aa, Homo sapiens
  Table 1.2; MAGEA1; ENSG00000198681; HLA -A*30:01,HLA-B*40:02,HLA-B*54:01
MEVYDGREHSA

SEQ ID NO: 4891 - protein, 9 aa, Homo sapiens
  Table 1.2; MAGEA1; ENSG00000198681; HLA -A*01:01,HLA-A*02:07,HLA-A*03:01,HLA-A*03:02,HLA-A*26:01, HLA-A*29:02,HLA-A*30:02,HLA-A*32:01,HLA-B*15:01,HLA-B*15:03, HLA-B*18:01,HLA-B*27:02,HLA-B*27:05,HLA-B*35:01,HLA-B*44:02,
  HLA-B*44:03,HLA-C*06:02,HLA-C*07:01,HLA-C*07:04,HLA-C*16:02
MLESVIKNY

SEQ ID NO: 4892 - protein, 10 aa, Homo sapiens
  Table 1.2; MAGEA1; ENSG00000198681; HLA -A*01:01,HLA-A*03:01,HLA-A*03:02
MLESVIKNYK

SEQ ID NO: 4893 - protein, 8 aa, Homo sapiens
  Table 1.2; MAGEA1; ENSG00000198681; HLA -B*08:01,HLA-B*51:01
MPKTGFLI

SEQ ID NO: 4894 - protein, 9 aa, Homo sapiens
  Table 1.2; MAGEA1; ENSG00000198681; HLA -B*51:01,HLA-B*54:01
MPKTGFLII

SEQ ID NO: 4895 - protein, 10 aa, Homo sapiens
  Table 1.2; MAGEA1; ENSG00000198681; HLA -B*54:01
MPKTGFLIIV

SEQ ID NO: 4896 - protein, 9 aa, Homo sapiens
  Table 1.2; MAGEA1; ENSG00000198681; HLA -A*25:01,HLA-A*26:01,HLA-A*32:01,HLA-B*15:01,HLA-B*15:03, HLA-B*18:01,HLA-B*37:01,HLA-B*38:01,HLA-B*44:02,HLA-B*44:03, HLA-B*46:01,HLA-C*07:04,HLA-C*16:04
NQIMPKTGF

SEQ ID NO: 4897 - protein, 9 aa, Homo sapiens
  Table 1.2; MAGEA1; ENSG00000198681; HLA -A*24:02
NYKHCFPEI

SEQ ID NO: 4898 - protein, 9 aa, Homo sapiens
  Table 1.2; MAGEA1; ENSG00000198681; HLA -B*15:03,HLA-B*27:02,HLA-C*07:01
PRALAETSY

SEQ ID NO: 4899 - protein, 8 aa, Homo sapiens
  Table 1.2; MAGEA1; ENSG00000198681; HLA -B*07:02,HLA-C*07:01,HLA-C*07:02
PTGHSYVL

SEQ ID NO: 4900 - protein, 8 aa, Homo sapiens
  Table 1.2; MAGEA1; ENSG00000198681; HLA -B*27:02
PTTINFTR

SEQ ID NO: 4901 - protein, 10 aa, Homo sapiens
  Table 1.2; MAGEA1; ENSG00000198681; HLA -B*35:03,HLA-C*03:03,HLA-C*03:04
QAATSSSSPL

SEQ ID NO: 4902 - protein, 8 aa, Homo sapiens
  Table 1.2; MAGEA1; ENSG00000198681; HLA -B*15:03,HLA-B*18:01,HLA-B*37:01,HLA-C*07:01
QDLVQEKY

SEQ ID NO: 4903 - protein, 9 aa, Homo sapiens
  Table 1.2; MAGEA1; ENSG00000198681; HLA -A*30:01,HLA-B*13:02,HLA-B*40:01,HLA-B*40:02,HLA-B*49:01
QEALGLVCV

SEQ ID NO: 4904 - protein, 8 aa, Homo sapiens
  Table 1.2; MAGEA1; ENSG00000198681; HLA -B*08:01,HLA-B*37:01
QIMPKTGF

SEQ ID NO: 4905 - protein, 9 aa, Homo sapiens
  Table 1.2; MAGEA1; ENSG00000198681; HLA -A*03:02
QLVFGIDVK

SEQ ID NO: 4906 - protein, 9 aa, Homo sapiens
  Table 1.2; MAGEA1; ENSG00000198681; HLA -A*68:01
QPSEGSSSR

SEQ ID NO: 4907 - protein, 10 aa, Homo sapiens
  Table 1.2; MAGEA1; ENSG00000198681; HLA -A*02:01,HLA-B*13:02,HLA-C*04:01
QQEALGLVCV

SEQ ID NO: 4908 - protein, 11 aa, Homo sapiens
  Table 1.2; MAGEA1; ENSG00000198681; HLA -B*27:05
QRQPSEGSSSR

SEQ ID NO: 4909 - protein, 9 aa, Homo sapiens
  Table 1.2; MAGEA1; ENSG00000198681; HLA -B*46:01,HLA-C*01:02
QSPQGASAF

SEQ ID NO: 4910 - protein, 9 aa, Homo sapiens
  Table 1.2; MAGEA1; ENSG00000198681; HLA -A*68:01
QVPDSDPAR

SEQ ID NO: 4911 - protein, 10 aa, Homo sapiens
  Table 1.2; MAGEA1; ENSG00000198681; HLA -A*01:01,HLA-A*25:01,HLA-A*26:01,HLA-A*29:02,HLA-A*30:02
QVPDSDPARY

SEQ ID NO: 4912 - protein, 10 aa, Homo sapiens
  Table 1.2; MAGEA1; ENSG00000198681; HLA -A*03:02,HLA-B*27:02
RALAETSYVK

SEQ ID NO: 4913 - protein, 8 aa, Homo sapiens
  Table 1.2; MAGEA1; ENSG00000198681; HLA -A*03:01,HLA-B*57:01
RAREPVTK

SEQ ID NO: 4914 - protein, 9 aa, Homo sapiens
  Table 1.2; MAGEA1; ENSG00000198681; HLA -A*32:01,HLA-B*07:02,HLA-B*54:01,HLA-B*56:01
RAREPVTKA

SEQ ID NO: 4915 - protein, 10 aa, Homo sapiens
  Table 1.2; MAGEA1; ENSG00000198681; HLA -A*30:01,HLA-B*40:01,HLA-B*49:01
REEEGPSTSC

SEQ ID NO: 4916 - protein, 11 aa, Homo sapiens
  Table 1.2; MAGEA1; ENSG00000198681; HLA -B*40:01,HLA-B*49:01
REEEGPSTSCI

SEQ ID NO: 4917 - protein, 9 aa, Homo sapiens
  Table 1.2; MAGEA1; ENSG00000198681; HLA -A*30:01,HLA-B*37:01,HLA-B*40:01,HLA-B*40:02,HLA-B*44:02, HLA-B*44:03
REPVTKAEM

SEQ ID NO: 4918 - protein, 10 aa, Homo sapiens
  Table 1.2; MAGEA1; ENSG00000198681; HLA -A*30:01,HLA-B*40:01,HLA-B*40:02
REPVTKAEML

SEQ ID NO: 4919 - protein, 8 aa, Homo sapiens
  Table 1.2; MAGEA1; ENSG00000198681; HLA -A*31:01
RFFFPSLR

SEQ ID NO: 4920 - protein, 11 aa, Homo sapiens
  Table 1.2; MAGEA1; ENSG00000198681; HLA -A*29:02,HLA-A*30:02,HLA-A*32:01,HLA-B*15:01,HLA-B*15:03, HLA-B*57:01,HLA-B*58:01
RQVPDSDPARY

SEQ ID NO: 4921 - protein, 9 aa, Homo sapiens
  Table 1.2; MAGEA1; ENSG00000198681; HLA -A*02:04
RVRFFFPSL

SEQ ID NO: 4922 - protein, 10 aa, Homo sapiens
  Table 1.2; MAGEA1; ENSG00000198681; HLA -A*31:01
RVRFFFPSLR

SEQ ID NO: 4923 - protein, 9 aa, Homo sapiens
  Table 1.2; MAGEA1; ENSG00000198681; HLA -A*02:04,HLA-A*02:07,HLA-A*03:01,HLA-A*03:02,HLA-A*11:01, HLA-A*23:01,HLA-A*24:02,HLA-A*25:01,HLA-A*26:01,HLA-A*29:02, HLA-A*30:01,HLA-A*30:02,HLA-A*31:01,HLA-A*32:01,HLA-A*33:01,
  HLA-A*33:03,HLA-A*68:01,HLA-A*68:02,HLA-B*07:02,HLA-B*13:02, HLA-B*15:01,HLA-B*15:03,HLA-B*18:01,HLA-B*27:02,HLA-B*27:05, HLA-B*35:01,HLA-B*35:03,HLA-B*37:01,HLA-B*38:01,HLA-B*39:01, HLA-B*40:02,HLA-B*44:02,HLA-B*44:03,HLA-B*46:01,HLA-B*51:01,
  HLA-B*54:01,HLA-B*55:01,HLA-B*56:01,HLA-B*57:01,HLA-B*58:01, HLA-C*01:02,HLA-C*02:02,HLA-C*03:03,HLA-C*03:04,HLA-C*04:01, HLA-C*05:01,HLA-C*07:04,HLA-C*07:06,HLA-C*12:03,HLA-C*14:02, HLA-C*16:01,HLA-C*16:02,HLA-C*16:04
SAFPTTINF

SEQ ID NO: 4924 - protein, 11 aa, Homo sapiens
  Table 1.2; MAGEA1; ENSG00000198681; HLA -A*03:02,HLA-A*11:01,HLA-A*29:02,HLA-A*31:01,HLA-A*33:01, HLA-A*33:03,HLA-A*68:01,HLA-A*68:02,HLA-B*57:01,HLA-C*02:02, HLA-C*07:06
SAFPTTINFTR

SEQ ID NO: 4925 - protein, 9 aa, Homo sapiens
  Table 1.2; MAGEA1; ENSG00000198681; HLA -A*03:01,HLA-B*15:03,HLA-B*51:01,HLA-B*58:01,HLA-C*02:02, HLA-C*03:03,HLA-C*03:04,HLA-C*06:02,HLA-C*12:03,HLA-C*16:01, HLA-C*16:02,HLA-C*16:04
SAYGEPRKL

SEQ ID NO: 4926 - protein, 8 aa, Homo sapiens
  Table 1.2; MAGEA1; ENSG00000198681; HLA -B*37:01
SDPARYEF

SEQ ID NO: 4927 - protein, 8 aa, Homo sapiens
  Table 1.2; MAGEA1; ENSG00000198681; HLA -A*30:01,HLA-B*18:01,HLA-B*37:01,HLA-B*44:02,HLA-B*44:03, HLA-B*49:01
SESLQLVF

SEQ ID NO: 4928 - protein, 9 aa, Homo sapiens
  Table 1.2; MAGEA1; ENSG00000198681; HLA -A*02:03,HLA-A*02:04,HLA-A*03:01,HLA-A*03:02,HLA-A*11:01, HLA-A*31:01
SLFRAVITK

SEQ ID NO: 4929 - protein, 10 aa, Homo sapiens
  Table 1.2; MAGEA1; ENSG00000198681; HLA -A*03:01,HLA-A*03:02
SLFRAVITKK

SEQ ID NO: 4930 - protein, 8 aa, Homo sapiens
  Table 1.2; MAGEA1; ENSG00000198681; HLA -A*02:04,HLA-B*37:01
SLQLVFGI

SEQ ID NO: 4931 - protein, 8 aa, Homo sapiens
  Table 1.2; MAGEA1; ENSG00000198681; HLA -B*07:02,HLA-B*08:01
SPLVLGTL

SEQ ID NO: 4932 - protein, 11 aa, Homo sapiens
  Table 1.2; MAGEA1; ENSG00000198681; HLA -B*56:01
SPLVLGTLEEV

SEQ ID NO: 4933 - protein, 8 aa, Homo sapiens
  Table 1.2; MAGEA1; ENSG00000198681; HLA -B*07:02
SPQGASAF

SEQ ID NO: 4934 - protein, 9 aa, Homo sapiens
  Table 1.2; MAGEA1; ENSG00000198681; HLA -A*02:07,HLA-B*46:01,HLA-C*01:02
SSPLVLGTL

SEQ ID NO: 4935 - protein, 10 aa, Homo sapiens
  Table 1.2; MAGEA1; ENSG00000198681; HLA -A*25:01
SSSPLVLGTL

SEQ ID NO: 4936 - protein, 8 aa, Homo sapiens
  Table 1.2; MAGEA1; ENSG00000198681; HLA -C*03:03,HLA-C*03:04,HLA-C*16:01
SSSSPLVL

SEQ ID NO: 4937 - protein, 9 aa, Homo sapiens
  Table 1.2; MAGEA1; ENSG00000198681; HLA -A*01:01,HLA-A*11:01
STDPPQSPQ

SEQ ID NO: 4938 - protein, 10 aa, Homo sapiens
  Table 1.2; MAGEA1; ENSG00000198681; HLA -A*01:01
STDPPQSPQG

SEQ ID NO: 4939 - protein, 9 aa, Homo sapiens
  Table 1.2; MAGEA1; ENSG00000198681; HLA -A*68:02
STSCILESL

SEQ ID NO: 4940 - protein, 9 aa, Homo sapiens
  Table 1.2; MAGEA1; ENSG00000198681; HLA -A*03:02,HLA-A*11:01,HLA-A*25:01,HLA-A*26:01,HLA-A*31:01, HLA-A*33:01,HLA-A*33:03,HLA-A*68:01,HLA-A*68:02,HLA-C*07:06
SVMEVYDGR

SEQ ID NO: 4941 - protein, 11 aa, Homo sapiens
  Table 1.2; MAGEA1; ENSG00000198681; HLA -B*35:03,HLA-B*38:01,HLA-C*04:01
SYDGLLGDNQI

SEQ ID NO: 4942 - protein, 8 aa, Homo sapiens
  Table 1.2; MAGEA1; ENSG00000198681; HLA -A*23:01,HLA-A*24:02,HLA-A*29:02,HLA-A*30:02,HLA-B*15:01, HLA-B*15:03,HLA-B*18:01,HLA-B*46:01,HLA-C*07:01,HLA-C*14:02
SYVKVLEY

SEQ ID NO: 4943 - protein, 9 aa, Homo sapiens
  Table 1.2; MAGEA1; ENSG00000198681; HLA -A*24:02
SYVKVLEYV

SEQ ID NO: 4944 - protein, 10 aa, Homo sapiens
  Table 1.2; MAGEA1; ENSG00000198681; HLA -A*23:01,HLA-A*24:02
SYVKVLEYVI

SEQ ID NO: 4945 - protein, 8 aa, Homo sapiens
  Table 1.2; MAGEA1; ENSG00000198681; HLA -A*23:01,HLA-A*24:02,HLA-C*14:02
SYVLVTCL

SEQ ID NO: 4946 - protein, 9 aa, Homo sapiens
  Table 1.2; MAGEA1; ENSG00000198681; HLA -A*68:02,HLA-B*51:01
TGFLIIVLV

SEQ ID NO: 4947 - protein, 9 aa, Homo sapiens
  Table 1.2; MAGEA1; ENSG00000198681; HLA -A*01:01,HLA-A*29:02,HLA-A*30:02,HLA-A*32:01,HLA-B*15:01, HLA-B*15:03,HLA-B*18:01,HLA-B*35:01,HLA-B*38:01,HLA-B*39:01, HLA-B*44:02,HLA-B*44:03,HLA-B*58:01,HLA-C*04:01,HLA-C*05:01,
  HLA-C*16:04
TQDLVQEKY

SEQ ID NO: 4948 - protein, 10 aa, Homo sapiens
  Table 1.2; MAGEA1; ENSG00000198681; HLA -B*38:01
TQDLVQEKYL

SEQ ID NO: 4949 - protein, 9 aa, Homo sapiens
  Table 1.2; MAGEA1; ENSG00000198681; HLA -A*01:01,HLA-A*03:01,HLA-A*23:01,HLA-A*25:01,HLA-A*30:01, HLA-A*68:01,HLA-A*68:02,HLA-B*07:02,HLA-B*13:02,HLA-B*27:05, HLA-B*35:01,HLA-B*35:03,HLA-B*38:01,HLA-B*39:01,HLA-B*40:01,
  HLA-B*58:01,HLA-C*01:02,HLA-C*02:02,HLA-C*03:03,HLA-C*03:04, HLA-C*05:01,HLA-C*06:02,HLA-C*07:04,HLA-C*12:03,HLA-C*16:01, HLA-C*16:02
TSSSSPLVL

SEQ ID NO: 4950 - protein, 9 aa, Homo sapiens
  Table 1.2; MAGEA1; ENSG00000198681; HLA -A*01:01,HLA-A*03:01,HLA-A*11:01,HLA-A*23:01,HLA-A*25:01, HLA-A*26:01,HLA-A*29:02,HLA-A*30:02,HLA-A*32:01,HLA-A*33:01, HLA-B*08:01,HLA-B*13:02,HLA-B*15:01,HLA-B*15:03,HLA-B*18:01,
  HLA-B*27:02,HLA-B*35:01,HLA-B*39:01,HLA-B*44:02,HLA-B*44:03, HLA-B*46:01,HLA-B*51:01,HLA-B*57:01,HLA-B*58:01,HLA-C*01:02, HLA-C*02:02,HLA-C*03:03,HLA-C*07:01,HLA-C*07:04,HLA-C*07:06, HLA-C*12:03,HLA-C*14:02,HLA-C*16:01,HLA-C*16:02,HLA-C*16:04
TSYVKVLEY

SEQ ID NO: 4951 - protein, 10 aa, Homo sapiens
  Table 1.2; MAGEA1; ENSG00000198681; HLA -A*68:02
TSYVKVLEYV

SEQ ID NO: 4952 - protein, 9 aa, Homo sapiens
  Table 1.2; MAGEA1; ENSG00000198681; HLA -A*11:01,HLA-A*31:01,HLA-A*33:01,HLA-A*33:03,HLA-A*68:01
TTINFTRQR

SEQ ID NO: 4953 - protein, 8 aa, Homo sapiens
  Table 1.2; MAGEA1; ENSG00000198681; HLA -C*04:01,HLA-C*05:01
VADLVGFL

SEQ ID NO: 4954 - protein, 9 aa, Homo sapiens
  Table 1.2; MAGEA1; ENSG00000198681; HLA -A*01:01,HLA-A*02:07,HLA-A*23:01,HLA-B*38:01,HLA-C*03:04, HLA-C*05:01
VADLVGFLL

SEQ ID NO: 4955 - protein, 10 aa, Homo sapiens
  Table 1.2; MAGEA1; ENSG00000198681; HLA -A*01:01,HLA-A*02:07
VADLVGFLLL

SEQ ID NO: 4956 - protein, 8 aa, Homo sapiens
  Table 1.2; MAGEA1; ENSG00000198681; HLA -C*07:01
VGFLLLKY

SEQ ID NO: 4957 - protein, 8 aa, Homo sapiens
  Table 1.2; MAGEA1; ENSG00000198681; HLA -B*08:01
VIKVSARV

SEQ ID NO: 4958 - protein, 9 aa, Homo sapiens
  Table 1.2; MAGEA1; ENSG00000198681; HLA -B*08:01
VITKKVADL

SEQ ID NO: 4959 - protein, 11 aa, Homo sapiens
  Table 1.2; MAGEA1; ENSG00000198681; HLA -B*15:03
VKEADPTGHSY

SEQ ID NO: 4960 - protein, 10 aa, Homo sapiens
  Table 1.2; MAGEA1; ENSG00000198681; HLA -A*02:07
VLEYVIKVSA

SEQ ID NO: 4961 - protein, 8 aa, Homo sapiens
  Table 1.2; MAGEA1; ENSG00000198681; HLA -A*02:01,HLA-A*02:03
VLGTLEEV

SEQ ID NO: 4962 - protein, 10 aa, Homo sapiens
  Table 1.2; MAGEA1; ENSG00000198681; HLA -A*29:02
VLVTCLGLSY

SEQ ID NO: 4963 - protein, 9 aa, Homo sapiens
  Table 1.2; MAGEA1; ENSG00000198681; HLA -A*01:01,HLA-A*29:02,HLA-A*30:02,HLA-B*35:01,HLA-B*35:03, HLA-B*55:01,HLA-C*03:03,HLA-C*05:01
VPDSDPARY

SEQ ID NO: 4964 - protein, 11 aa, Homo sapiens
  Table 1.2; MAGEA1; ENSG00000198681; HLA -A*24:02,HLA-B*07:02,HLA-B*35:01,HLA-B*35:03,HLA-B*55:01, HLA-C*03:03,HLA-C*05:01,HLA-C*07:02
VPDSDPARYEF

SEQ ID NO: 4965 - protein, 11 aa, Homo sapiens
  Table 1.2; MAGEA1; ENSG00000198681; HLA -B*27:05,HLA-C*07:04
VQAATSSSSPL

SEQ ID NO: 4966 - protein, 8 aa, Homo sapiens
  Table 1.2; MAGEA1; ENSG00000198681; HLA -A*01:01,HLA-A*30:02,HLA-B*15:01,HLA-B*15:03,HLA-C*07:01
VQEKYLEY

SEQ ID NO: 4967 - protein, 9 aa, Homo sapiens
  Table 1.2; MAGEA1; ENSG00000198681; HLA -B*57:01
VSARVRFFF

SEQ ID NO: 4968 - protein, 8 aa, Homo sapiens
  Table 1.2; MAGEA1; ENSG00000198681; HLA -A*01:01
VTCLGLSY

SEQ ID NO: 4969 - protein, 10 aa, Homo sapiens
  Table 1.2; MAGEA1; ENSG00000198681; HLA -A*01:01,HLA-A*29:02,HLA-A*30:02,HLA-C*04:01
VYDGREHSAY

SEQ ID NO: 4970 - protein, 9 aa, Homo sapiens
  Table 1.2; MAGEA1; ENSG00000198681; HLA -B*49:01
WEELSVMEV

SEQ ID NO: 4971 - protein, 9 aa, Homo sapiens
  Table 1.2; MAGEA1; ENSG00000198681; HLA -A*01:01,HLA-A*29:02,HLA-C*07:01
YDGREHSAY

SEQ ID NO: 4972 - protein, 9 aa, Homo sapiens
  Table 1.2; MAGEA1; ENSG00000198681; HLA -A*02:04
YEFLWGPRA

SEQ ID NO: 4973 - protein, 9 aa, Homo sapiens
  Table 1.2; MAGEA1; ENSG00000198681; HLA -B*27:02,HLA-B*27:05,HLA-B*39:01
YRAREPVTK

SEQ ID NO: 4974 - protein, 8 aa, Homo sapiens
  Table 1.2; MAGEA1; ENSG00000198681; HLA -A*26:01,HLA-A*31:01,HLA-A*33:01,HLA-A*33:03,HLA-A*68:01, HLA-B*08:01,HLA-B*18:01,HLA-B*40:02
YVIKVSAR

SEQ ID NO: 4975 - protein, 9 aa, Homo sapiens
  Table 1.2; MAGEA1; ENSG00000198681; HLA -A*02:01,HLA-A*02:03,HLA-A*02:04,HLA-A*02:07,HLA-A*26:01, HLA-A*68:02,HLA-B*13:02,HLA-B*27:05
YVIKVSARV

SEQ ID NO: 4976 - protein, 8 aa, Homo sapiens
  Table 1.2; MAGEA1; ENSG00000198681; HLA -A*02:03
YVKVLEYV

SEQ ID NO: 4977 - protein, 9 aa, Homo sapiens
  Table 1.2; MAGEA1; ENSG00000198681; HLA -A*02:04,HLA-A*24:02,HLA-A*68:02,HLA-B*08:01,HLA-B*13:02, HLA-B*40:02,HLA-B*51:01,HLA-B*57:01
YVKVLEYVI

SEQ ID NO: 4978 - protein, 11 aa, Homo sapiens
  Table 1.2; MAGEA10; ENSG00000124260; HLA -A*30:01
ACSSPSVVASL

SEQ ID NO: 4979 - protein, 8 aa, Homo sapiens
  Table 1.2; MAGEA10; ENSG00000124260; HLA -A*30:01,HLA-B*40:01,HLA-B*44:02,HLA-B*44:03,HLA-B*49:01
AEILESVI

SEQ ID NO: 4980 - protein, 11 aa, Homo sapiens
  Table 1.2; MAGEA10; ENSG00000124260; HLA -A*30:01,HLA-A*30:02,HLA-B*27:02,HLA-B*44:02,HLA-B*44:03, HLA-B*57:01,HLA-C*16:04
AEILESVIRNY

SEQ ID NO: 4981 - protein, 8 aa, Homo sapiens
  Table 1.2; MAGEA10; ENSG00000124260; HLA -B*37:01,HLA-B*40:02
AEIRKMSL

SEQ ID NO: 4982 - protein, 9 aa, Homo sapiens
  Table 1.2; MAGEA10; ENSG00000124260; HLA -B*37:01,HLA-B*40:01,HLA-B*40:02,HLA-B*44:02,HLA-B*44:03, HLA-B*49:01
AEIRKMSLL

SEQ ID NO: 4983 - protein, 11 aa, Homo sapiens
  Table 1.2; MAGEA10; ENSG00000124260; HLA -B*15:03
AKVNGSDPRSF

SEQ ID NO: 4984 - protein, 8 aa, Homo sapiens
  Table 1.2; MAGEA10; ENSG00000124260; HLA -A*30:02
ALNMMGLY

SEQ ID NO: 4985 - protein, 9 aa, Homo sapiens
  Table 1.2; MAGEA10; ENSG00000124260; HLA -A*02:03,HLA-A*32:01,HLA-B*55:01
AMASASSSA

SEQ ID NO: 4986 - protein, 9 aa, Homo sapiens
  Table 1.2; MAGEA10; ENSG00000124260; HLA -B*56:01
APLAVEEDA

SEQ ID NO: 4987 - protein, 9 aa, Homo sapiens
  Table 1.2; MAGEA10; ENSG00000124260; HLA -B*27:05
AQAPLAVEE

SEQ ID NO: 4988 - protein, 10 aa, Homo sapiens
  Table 1.2; MAGEA10; ENSG00000124260; HLA -B*13:02
AQIACSSPSV

SEQ ID NO: 4989 - protein, 11 aa, Homo sapiens
  Table 1.2; MAGEA10; ENSG00000124260; HLA -A*25:01,HLA-A*26:01,HLA-A*30:02,HLA-A*32:01,HLA-B*15:01, HLA-B*46:01,HLA-B*58:01
ASASSSATGSF

SEQ ID NO: 4990 - protein, 9 aa, Homo sapiens
  Table 1.2; MAGEA10; ENSG00000124260; HLA -A*25:01,HLA-A*26:01,HLA-A*30:02,HLA-A*32:01,HLA-B*15:01, HLA-B*15:03,HLA-B*37:01,HLA-B*46:01,HLA-B*58:01,HLA-C*01:02, HLA-C*03:04,HLA-C*05:01
ASSSATGSF

SEQ ID NO: 4991 - protein, 11 aa, Homo sapiens
  Table 1.2; MAGEA10; ENSG00000124260; HLA -A*01:01,HLA-A*03:02,HLA-A*11:01,HLA-A*26:01,HLA-A*29:02, HLA-A*30:02,HLA-A*32:01,HLA-B*58:01,HLA-C*16:04
ASSSATGSFSY

SEQ ID NO: 4992 - protein, 11 aa, Homo sapiens
  Table 1.2; MAGEA10; ENSG00000124260; HLA -A*30:02,HLA-A*32:01
ASSSTSTSSSF

SEQ ID NO: 4993 - protein, 9 aa, Homo sapiens
  Table 1.2; MAGEA10; ENSG00000124260; HLA -A*25:01,HLA-A*26:01,HLA-A*32:01,HLA-B*15:01,HLA-B*39:01, HLA-B*46:01,HLA-B*58:01,HLA-C*01:02,HLA-C*03:03,HLA-C*03:04, HLA-C*12:03,HLA-C*16:02
ATTDDTTAM

SEQ ID NO: 4994 - protein, 11 aa, Homo sapiens
  Table 1.2; MAGEA10; ENSG00000124260; HLA -B*39:01
DDETPNPPQSA

SEQ ID NO: 4995 - protein, 8 aa, Homo sapiens
  Table 1.2; MAGEA10; ENSG00000124260; HLA -B*18:01,HLA-B*49:01
DEKVTDLV

SEQ ID NO: 4996 - protein, 10 aa, Homo sapiens
  Table 1.2; MAGEA10; ENSG00000124260; HLA -B*18:01,HLA-B*44:02
DEKVTDLVQF

SEQ ID NO: 4997 - protein, 8 aa, Homo sapiens
  Table 1.2; MAGEA10; ENSG00000124260; HLA -B*18:01
DETPNPPQ

SEQ ID NO: 4998 - protein, 10 aa, Homo sapiens
  Table 1.2; MAGEA10; ENSG00000124260; HLA -B*18:01
DETPNPPQSA

SEQ ID NO: 4999 - protein, 8 aa, Homo sapiens
  Table 1.2; MAGEA10; ENSG00000124260; HLA -B*08:01,HLA-B*18:01,HLA-B*35:01
DGMEHLIY

SEQ ID NO: 5000 - protein, 10 aa, Homo sapiens
  Table 1.2; MAGEA10; ENSG00000124260; HLA -B*51:01
DGMLSDVQSM

SEQ ID NO: 5001 - protein, 8 aa, Homo sapiens
  Table 1.2; MAGEA10; ENSG00000124260; HLA -B*51:01
DPTGHSFV

SEQ ID NO: 5002 - protein, 9 aa, Homo sapiens
  Table 1.2; MAGEA10; ENSG00000124260; HLA -B*08:01,HLA-B*35:01,HLA-B*35:03
DPTGHSFVL

SEQ ID NO: 5003 - protein, 10 aa, Homo sapiens
  Table 1.2; MAGEA10; ENSG00000124260; HLA -A*26:01,HLA-A*33:01,HLA-A*68:01
DVKEVDPTGH

SEQ ID NO: 5004 - protein, 9 aa, Homo sapiens
  Table 1.2; MAGEA10; ENSG00000124260; HLA -A*33:03
EALKDEEER

SEQ ID NO: 5005 - protein, 8 aa, Homo sapiens
  Table 1.2; MAGEA10; ENSG00000124260; HLA -B*51:01
EALNMMGL

SEQ ID NO: 5006 - protein, 9 aa, Homo sapiens
  Table 1.2; MAGEA10; ENSG00000124260; HLA -A*01:01,HLA-A*25:01,HLA-A*26:01,HLA-A*29:02,HLA-B*35:01
EALNMMGLY

SEQ ID NO: 5007 - protein, 9 aa, Homo sapiens
  Table 1.2; MAGEA10; ENSG00000124260; HLA -A*68:02,HLA-B*51:01
EASECMLLV

SEQ ID NO: 5008 - protein, 8 aa, Homo sapiens
  Table 1.2; MAGEA10; ENSG00000124260; HLA -C*07:01
EDHFPLLF

SEQ ID NO: 5009 - protein, 9 aa, Homo sapiens
  Table 1.2; MAGEA10; ENSG00000124260; HLA -A*30:01,HLA-B*13:02,HLA-B*18:01,HLA-B*37:01,HLA-B*40:01, HLA-B*44:02,HLA-B*44:03,HLA-B*49:01
EESPSTLQV

SEQ ID NO: 5010 - protein, 10 aa, Homo sapiens
  Table 1.2; MAGEA10; ENSG00000124260; HLA -A*25:01,HLA-A*30:01,HLA-B*27:02,HLA-B*38:01,HLA-B*39:01, HLA-B*40:01,HLA-B*40:02,HLA-B*44:02,HLA-B*44:03
EESPSTLQVL

SEQ ID NO: 5011 - protein, 8 aa, Homo sapiens
  Table 1.2; MAGEA10; ENSG00000124260; HLA -B*18:01
EEVIWEAL

SEQ ID NO: 5012 - protein, 9 aa, Homo sapiens
  Table 1.2; MAGEA10; ENSG00000124260; HLA -B*13:02,HLA-B*51:01
EGAQAPLAV

SEQ ID NO: 5013 - protein, 9 aa, Homo sapiens
  Table 1.2; MAGEA10; ENSG00000124260; HLA -A*33:01,HLA-A*33:03
EHLIYGEPR

SEQ ID NO: 5014 - protein, 9 aa, Homo sapiens
  Table 1.2; MAGEA10; ENSG00000124260; HLA -A*02:07,HLA-C*05:01
EIDEKVTDL

SEQ ID NO: 5015 - protein, 8 aa, Homo sapiens
  Table 1.2; MAGEA10; ENSG00000124260; HLA -A*33:03
EILESVIR

SEQ ID NO: 5016 - protein, 10 aa, Homo sapiens
  Table 1.2; MAGEA10; ENSG00000124260; HLA -A*25:01,HLA-A*26:01,HLA-A*29:02,HLA-A*30:02,HLA-A*33:01, HLA-A*33:03,HLA-B*44:02,HLA-B*44:03
EILESVIRNY

SEQ ID NO: 5017 - protein, 9 aa, Homo sapiens
  Table 1.2; MAGEA10; ENSG00000124260; HLA -A*23:01
EKVTDLVQF

SEQ ID NO: 5018 - protein, 8 aa, Homo sapiens
  Table 1.2; MAGEA10; ENSG00000124260; HLA -B*08:01,HLA-B*51:01
EPITKAEI

SEQ ID NO: 5019 - protein, 9 aa, Homo sapiens
  Table 1.2; MAGEA10; ENSG00000124260; HLA -B*07:02,HLA-B*08:01,HLA-B*35:01,HLA-B*35:03,HLA-C*07:02
EPITKAEIL

SEQ ID NO: 5020 - protein, 11 aa, Homo sapiens
  Table 1.2; MAGEA10; ENSG00000124260; HLA -A*33:01
ESLPRSEIDEK

SEQ ID NO: 5021 - protein, 9 aa, Homo sapiens
  Table 1.2; MAGEA10; ENSG00000124260; HLA -A*25:01
ESPSTLQVL

SEQ ID NO: 5022 - protein, 9 aa, Homo sapiens
  Table 1.2; MAGEA10; ENSG00000124260; HLA -A*33:03
ETPNPPQSA

SEQ ID NO: 5023 - protein, 11 aa, Homo sapiens
  Table 1.2; MAGEA10; ENSG00000124260; HLA -A*26:01,HLA-A*68:02
ETPNPPQSAQI

SEQ ID NO: 5024 - protein, 9 aa, Homo sapiens
  Table 1.2; MAGEA10; ENSG00000124260; HLA -A*01:01,HLA-A*02:07,HLA-A*23:01,HLA-A*24:02,HLA-A*25:01, HLA-A*26:01,HLA-A*29:02,HLA-A*30:02,HLA-A*32:01,HLA-A*33:01, HLA-A*33:03,HLA-A*68:01,HLA-B*15:01,HLA-B*15:03,HLA-B*18:01,
  HLA-B*27:05,HLA-B*35:01,HLA-B*35:03,HLA-B*38:01,HLA-B*39:01, HLA-B*44:02,HLA-B*44:03,HLA-B*46:01,HLA-B*55:01,HLA-B*57:01, HLA-B*58:01,HLA-C*03:03,HLA-C*03:04,HLA-C*04:01,HLA-C*05:01, HLA-C*07:04,HLA-C*07:06,HLA-C*16:04
EVDPTGHSF

SEQ ID NO: 5025 - protein, 10 aa, Homo sapiens
  Table 1.2; MAGEA10; ENSG00000124260; HLA -A*01:01,HLA-A*26:01,HLA-A*68:02
EVDPTGHSFV

SEQ ID NO: 5026 - protein, 11 aa, Homo sapiens
  Table 1.2; MAGEA10; ENSG00000124260; HLA -A*01:01,HLA-A*02:07,HLA-A*68:02,HLA-B*35:03,HLA-B*38:01
EVDPTGHSFVL

SEQ ID NO: 5027 - protein, 9 aa, Homo sapiens
  Table 1.2; MAGEA10; ENSG00000124260; HLA -A*25:01,HLA-A*26:01
EVIWEALNM

SEQ ID NO: 5028 - protein, 10 aa, Homo sapiens
  Table 1.2; MAGEA10; ENSG00000124260; HLA -A*25:01,HLA-A*26:01
EVIWEALNMM

SEQ ID NO: 5029 - protein, 8 aa, Homo sapiens
  Table 1.2; MAGEA10; ENSG00000124260; HLA -B*51:01
FGIDVKEV

SEQ ID NO: 5030 - protein, 11 aa, Homo sapiens
  Table 1.2; MAGEA10; ENSG00000124260; HLA -A*02:01,HLA-A*02:07
FLWGPRAHAEI

SEQ ID NO: 5031 - protein, 8 aa, Homo sapiens
  Table 1.2; MAGEA10; ENSG00000124260; HLA -B*51:01,HLA-B*54:01,HLA-B*55:01,HLA-B*56:01
FPLLFSEA

SEQ ID NO: 5032 - protein, 9 aa, Homo sapiens
  Table 1.2; MAGEA10; ENSG00000124260; HLA -B*54:01
FPLLFSEAS

SEQ ID NO: 5033 - protein, 11 aa, Homo sapiens
  Table 1.2; MAGEA10; ENSG00000124260; HLA -B*54:01
FPLLFSEASEC

SEQ ID NO: 5034 - protein, 8 aa, Homo sapiens
  Table 1.2; MAGEA10; ENSG00000124260; HLA -B*54:01
FPLWYEEA

SEQ ID NO: 5035 - protein, 9 aa, Homo sapiens
  Table 1.2; MAGEA10; ENSG00000124260; HLA -B*35:01,HLA-B*35:03,HLA-B*54:01
FPLWYEEAL

SEQ ID NO: 5036 - protein, 8 aa, Homo sapiens
  Table 1.2; MAGEA10; ENSG00000124260; HLA -B*54:01
FPSSFPSS

SEQ ID NO: 5037 - protein, 9 aa, Homo sapiens
  Table 1.2; MAGEA10; ENSG00000124260; HLA -B*54:01,HLA-B*56:01
FPSSFPSSS

SEQ ID NO: 5038 - protein, 10 aa, Homo sapiens
  Table 1.2; MAGEA10; ENSG00000124260; HLA -B*54:01,HLA-B*56:01
FPSSFPSSSS

SEQ ID NO: 5039 - protein, 9 aa, Homo sapiens
  Table 1.2; MAGEA10; ENSG00000124260; HLA -B*39:01
FPSSSSSSS

SEQ ID NO: 5040 - protein, 9 aa, Homo sapiens
  Table 1.2; MAGEA10; ENSG00000124260; HLA -C*05:01
FSEASECML

SEQ ID NO: 5041 - protein, 11 aa, Homo sapiens
  Table 1.2; MAGEA10; ENSG00000124260; HLA -A*29:02
FVLVTSLGLTY

SEQ ID NO: 5042 - protein, 10 aa, Homo sapiens
  Table 1.2; MAGEA10; ENSG00000124260; HLA -B*38:01
GHSFVLVTSL

SEQ ID NO: 5043 - protein, 9 aa, Homo sapiens
  Table 1.2; MAGEA10; ENSG00000124260; HLA -A*02:01,HLA-A*02:03,HLA-A*02:04,HLA-A*02:07,HLA-A*03:01, HLA-A*30:01,HLA-A*68:02,HLA-B*13:02,HLA-B*15:01,HLA-B*15:03, HLA-B*40:01,HLA-B*46:01,HLA-B*55:01,HLA-C*02:02
GLYDGMEHL

SEQ ID NO: 5044 - protein, 10 aa, Homo sapiens
  Table 1.2; MAGEA10; ENSG00000124260; HLA -A*02:01,HLA-A*02:03,HLA-A*02:04,HLA-A*02:07,HLA-A*03:01, HLA-A*30:01,HLA-B*13:02,HLA-B*55:01
GLYDGMEHLI

SEQ ID NO: 5045 - protein, 11 aa, Homo sapiens
  Table 1.2; MAGEA10; ENSG00000124260; HLA -A*01:01,HLA-A*03:01,HLA-A*29:02
GLYDGMEHLIY

SEQ ID NO: 5046 - protein, 9 aa, Homo sapiens
  Table 1.2; MAGEA10; ENSG00000124260; HLA -A*02:01,HLA-A*02:04,HLA-A*23:01,HLA-A*32:01,HLA-B*13:02, HLA-B*15:01,HLA-B*15:03,HLA-B*27:05,HLA-B*37:01,HLA-B*46:01, HLA-B*55:01,HLA-B*58:01,HLA-C*01:02,HLA-C*14:02
GMLSDVQSM

SEQ ID NO: 5047 - protein, 11 aa, Homo sapiens
  Table 1.2; MAGEA10; ENSG00000124260; HLA -A*03:01,HLA-A*03:02,HLA-A*11:01,HLA-B*27:05
GMLSDVQSMPK

SEQ ID NO: 5048 - protein, 8 aa, Homo sapiens
  Table 1.2; MAGEA10; ENSG00000124260; HLA -B*07:02
GPRAHAEI

SEQ ID NO: 5049 - protein, 9 aa, Homo sapiens
  Table 1.2; MAGEA10; ENSG00000124260; HLA -A*01:01,HLA-A*30:02,HLA-A*32:01,HLA-B*15:01,HLA-B*38:01, HLA-B*57:01,HLA-B*58:01,HLA-C*05:01,HLA-C*16:01
GSDPARYEF

SEQ ID NO: 5050 - protein, 11 aa, Homo sapiens
  Table 1.2; MAGEA10; ENSG00000124260; HLA -B*57:01
GSDPARYEFLW

SEQ ID NO: 5051 - protein, 9 aa, Homo sapiens
  Table 1.2; MAGEA10; ENSG00000124260; HLA -A*01:01
GSDPRSFPL

SEQ ID NO: 5052 - protein, 10 aa, Homo sapiens
  Table 1.2; MAGEA10; ENSG00000124260; HLA -B*57:01
GSDPRSFPLW

SEQ ID NO: 5053 - protein, 11 aa, Homo sapiens
  Table 1.2; MAGEA10; ENSG00000124260; HLA -A*01:01
GSDPRSFPLWY

SEQ ID NO: 5054 - protein, 9 aa, Homo sapiens
  Table 1.2; MAGEA10; ENSG00000124260; HLA -B*08:01
HAEIRKMSL

SEQ ID NO: 5055 - protein, 9 aa, Homo sapiens
  Table 1.2; MAGEA10; ENSG00000124260; HLA -A*30:01,HLA-A*68:02,HLA-B*08:01,HLA-B*15:03,HLA-B*18:01, HLA-B*35:01,HLA-B*40:02,HLA-B*46:01,HLA-B*58:01
HSFVLVTSL

SEQ ID NO: 5056 - protein, 8 aa, Homo sapiens
  Table 1.2; MAGEA10; ENSG00000124260; HLA -B*51:01
IACSSPSV

SEQ ID NO: 5057 - protein, 9 aa, Homo sapiens
  Table 1.2; MAGEA10; ENSG00000124260; HLA -B*51:01,HLA-C*12:03
IACSSPSVV

SEQ ID NO: 5058 - protein, 9 aa, Homo sapiens
  Table 1.2; MAGEA10; ENSG00000124260; HLA -B*35:03
IATTDDTTA

SEQ ID NO: 5059 - protein, 10 aa, Homo sapiens
  Table 1.2; MAGEA10; ENSG00000124260; HLA -B*35:01,HLA-B*35:03,HLA-B*39:01,HLA-B*55:01,HLA-C*03:03, HLA-C*03:04,HLA-C*05:01
IATTDDTTAM

SEQ ID NO: 5060 - protein, 8 aa, Homo sapiens
  Table 1.2; MAGEA10; ENSG00000124260; HLA -B*37:01
IDEKVTDL

SEQ ID NO: 5061 - protein, 9 aa, Homo sapiens
  Table 1.2; MAGEA10; ENSG00000124260; HLA -A*01:01,HLA-A*02:07,HLA-A*03:01,HLA-A*03:02,HLA-A*29:02, HLA-A*30:02,HLA-A*32:01,HLA-B*15:01,HLA-B*15:03,HLA-B*44:02, HLA-B*44:03,HLA-B*46:01,HLA-B*57:01,HLA-B*58:01,HLA-C*02:02,
  HLA-C*07:04,HLA-C*16:01,HLA-C*16:02
ILESVIRNY

SEQ ID NO: 5062 - protein, 9 aa, Homo sapiens
  Table 1.2; MAGEA10; ENSG00000124260; HLA -A*02:01,HLA-A*02:04
ILILSIVFI

SEQ ID NO: 5063 - protein, 10 aa, Homo sapiens
  Table 1.2; MAGEA10; ENSG00000124260; HLA -A*01:01
ILSIVFIEGY

SEQ ID NO: 5064 - protein, 10 aa, Homo sapiens
  Table 1.2; MAGEA10; ENSG00000124260; HLA -B*35:03,HLA-B*54:01,HLA-B*55:01,HLA-B*56:01
IPSTPEEVSA

SEQ ID NO: 5065 - protein, 8 aa, Homo sapiens
  Table 1.2; MAGEA10; ENSG00000124260; HLA -A*23:01,HLA-A*24:02,HLA-C*06:02
IYGEPRKL

SEQ ID NO: 5066 - protein, 9 aa, Homo sapiens
  Table 1.2; MAGEA10; ENSG00000124260; HLA -A*24:02
IYGEPRKLL

SEQ ID NO: 5067 - protein, 8 aa, Homo sapiens
  Table 1.2; MAGEA10; ENSG00000124260; HLA -B*40:01
KEESPSTL

SEQ ID NO: 5068 - protein, 10 aa, Homo sapiens
  Table 1.2; MAGEA10; ENSG00000124260; HLA -B*40:01,HLA-B*49:01
KEESPSTLQV

SEQ ID NO: 5069 - protein, 11 aa, Homo sapiens
  Table 1.2; MAGEA10; ENSG00000124260; HLA -A*30:01,HLA-B*40:01,HLA-B*40:02,HLA-B*49:01
KEESPSTLQVL

SEQ ID NO: 5070 - protein, 9 aa, Homo sapiens
  Table 1.2; MAGEA10; ENSG00000124260; HLA -B*49:01
KEPITKAEI

SEQ ID NO: 5071 - protein, 10 aa, Homo sapiens
  Table 1.2; MAGEA10; ENSG00000124260; HLA -B*40:01
KEPITKAEIL

SEQ ID NO: 5072 - protein, 10 aa, Homo sapiens
  Table 1.2; MAGEA10; ENSG00000124260; HLA -A*23:01,HLA-A*24:02,HLA-A*25:01,HLA-A*30:01,HLA-A*30:02, HLA-A*32:01,HLA-B*15:01,HLA-B*15:03,HLA-B*18:01,HLA-B*27:02, HLA-B*27:05,HLA-B*37:01,HLA-B*38:01,HLA-B*40:01,HLA-B*40:02,
  HLA-B*44:02,HLA-B*44:03,HLA-B*49:01,HLA-B*57:01,HLA-B*58:01, HLA-C*02:02,HLA-C*16:04
KEVDPTGHSF

SEQ ID NO: 5073 - protein, 11 aa, Homo sapiens
  Table 1.2; MAGEA10; ENSG00000124260; HLA -B*49:01
KEVDPTGHSFV

SEQ ID NO: 5074 - protein, 10 aa, Homo sapiens
  Table 1.2; MAGEA10; ENSG00000124260; HLA -A*03:02,HLA-A*25:01,HLA-A*30:02,HLA-A*32:01,HLA-B*57:01, HLA-B*58:01
KVNGSDPRSF

SEQ ID NO: 5075 - protein, 8 aa, Homo sapiens
  Table 1.2; MAGEA10; ENSG00000124260; HLA -A*32:01
KVTDLVQF

SEQ ID NO: 5076 - protein, 9 aa, Homo sapiens
  Table 1.2; MAGEA10; ENSG00000124260; HLA -A*02:01,HLA-A*02:03,HLA-A*02:04,HLA-A*02:07,HLA-A*24:02, HLA-A*31:01,HLA-A*32:01,HLA-A*68:02,HLA-B*13:02,HLA-B*27:05, HLA-B*58:01
KVTDLVQFL

SEQ ID NO: 5077 - protein, 10 aa, Homo sapiens
  Table 1.2; MAGEA10; ENSG00000124260; HLA -A*02:04
KVTDLVQFLL

SEQ ID NO: 5078 - protein, 9 aa, Homo sapiens
  Table 1.2; MAGEA10; ENSG00000124260; HLA -B*49:01
LEGAQAPLA

SEQ ID NO: 5079 - protein, 10 aa, Homo sapiens
  Table 1.2; MAGEA10; ENSG00000124260; HLA -A*30:01,HLA-B*49:01
LEGAQAPLAV

SEQ ID NO: 5080 - protein, 8 aa, Homo sapiens
  Table 1.2; MAGEA10; ENSG00000124260; HLA -A*30:02,HLA-B*18:01,HLA-B*37:01,HLA-B*44:02,HLA-B*44:03
LESVIRNY

SEQ ID NO: 5081 - protein, 9 aa, Homo sapiens
  Table 1.2; MAGEA10; ENSG00000124260; HLA -A*02:01,HLA-A*02:07
LIPSTPEEV

SEQ ID NO: 5082 - protein, 9 aa, Homo sapiens
  Table 1.2; MAGEA10; ENSG00000124260; HLA -A*03:01
LIYGEPRKL

SEQ ID NO: 5083 - protein, 9 aa, Homo sapiens
  Table 1.2; MAGEA10; ENSG00000124260; HLA -A*02:01
LLFSEASEC

SEQ ID NO: 5084 - protein, 11 aa, Homo sapiens
  Table 1.2; MAGEA10; ENSG00000124260; HLA -A*02:01
LLFSEASECML

SEQ ID NO: 5085 - protein, 10 aa, Homo sapiens
  Table 1.2; MAGEA10; ENSG00000124260; HLA -B*27:05,HLA-B*38:01,HLA-B*39:01
LQSQSETQGL

SEQ ID NO: 5086 - protein, 10 aa, Homo sapiens
  Table 1.2; MAGEA10; ENSG00000124260; HLA -B*39:01
LQVLPDSESL

SEQ ID NO: 5087 - protein, 9 aa, Homo sapiens
  Table 1.2; MAGEA10; ENSG00000124260; HLA -A*01:01,HLA-A*03:01,HLA-A*03:02,HLA-A*11:01,HLA-B*27:02
LSDVQSMPK

SEQ ID NO: 5088 - protein, 9 aa, Homo sapiens
  Table 1.2; MAGEA10; ENSG00000124260; HLA -A*01:01,HLA-A*30:02,HLA-B*46:01,HLA-B*57:01
LSIVFIEGY

SEQ ID NO: 5089 - protein, 10 aa, Homo sapiens
  Table 1.2; MAGEA10; ENSG00000124260; HLA -A*01:01,HLA-A*29:02,HLA-A*30:02,HLA-A*32:01,HLA-B*57:01, HLA-B*58:01
LTQDWVQENY

SEQ ID NO: 5090 - protein, 11 aa, Homo sapiens
  Table 1.2; MAGEA10; ENSG00000124260; HLA -C*04:01
LTQDWVQENYL

SEQ ID NO: 5091 - protein, 10 aa, Homo sapiens
  Table 1.2; MAGEA10; ENSG00000124260; HLA -A*02:03,HLA-A*68:02
LTYDGMLSDV

SEQ ID NO: 5092 - protein, 10 aa, Homo sapiens
  Table 1.2; MAGEA10; ENSG00000124260; HLA -A*02:03,HLA-A*02:04,HLA-A*02:07,HLA-A*68:02
LVFGIDVKEV

SEQ ID NO: 5093 - protein, 9 aa, Homo sapiens
  Table 1.2; MAGEA10; ENSG00000124260; HLA -A*29:02
LVQFLLFKY

SEQ ID NO: 5094 - protein, 9 aa, Homo sapiens
  Table 1.2; MAGEA10; ENSG00000124260; HLA -A*01:01,HLA-A*03:01,HLA-A*25:01,HLA-A*26:01,HLA-A*29:02, HLA-A*30:02,HLA-A*32:01,HLA-B*15:01,HLA-B*15:03,HLA-B*18:01, HLA-B*35:01,HLA-B*46:01,HLA-B*58:01,HLA-C*02:02,HLA-C*07:04,
  HLA-C*16:01
LVTSLGLTY

SEQ ID NO: 5095 - protein, 8 aa, Homo sapiens
  Table 1.2; MAGEA10; ENSG00000124260; HLA -C*04:01
LYDGMEHL

SEQ ID NO: 5096 - protein, 9 aa, Homo sapiens
  Table 1.2; MAGEA10; ENSG00000124260; HLA -A*02:07,HLA-A*23:01,HLA-A*24:02,HLA-B*35:01,HLA-B*35:03, HLA-B*38:01,HLA-C*04:01
LYDGMEHLI

SEQ ID NO: 5097 - protein, 10 aa, Homo sapiens
  Table 1.2; MAGEA10; ENSG00000124260; HLA -A*29:02
LYDGMEHLIY

SEQ ID NO: 5098 - protein, 8 aa, Homo sapiens
  Table 1.2; MAGEA10; ENSG00000124260; HLA -B*54:01
MASASSSA

SEQ ID NO: 5099 - protein, 9 aa, Homo sapiens
  Table 1.2; MAGEA10; ENSG00000124260; HLA -B*40:02
MEHLIYGEP

SEQ ID NO: 5100 - protein, 9 aa, Homo sapiens
  Table 1.2; MAGEA10; ENSG00000124260; HLA -A*02:01,HLA-A*02:04
MLLVFGIDV

SEQ ID NO: 5101 - protein, 8 aa, Homo sapiens
  Table 1.2; MAGEA10; ENSG00000124260; HLA -B*37:01
MLSDVQSM

SEQ ID NO: 5102 - protein, 10 aa, Homo sapiens
  Table 1.2; MAGEA10; ENSG00000124260; HLA -A*01:01,HLA-A*03:01,HLA-A*03:02,HLA-A*11:01,HLA-A*68:01, HLA-B*27:02,HLA-B*27:05,HLA-C*06:02,HLA-C*07:01
MLSDVQSMPK

SEQ ID NO: 5103 - protein, 9 aa, Homo sapiens
  Table 1.2; MAGEA10; ENSG00000124260; HLA -B*35:01,HLA-B*35:03,HLA-B*55:01,HLA-C*03:03
MPEEDLQSQ

SEQ ID NO: 5104 - protein, 8 aa, Homo sapiens
  Table 1.2; MAGEA10; ENSG00000124260; HLA -B*08:01,HLA-B*51:01,HLA-B*54:01
MPKTGILI

SEQ ID NO: 5105 - protein, 9 aa, Homo sapiens
  Table 1.2; MAGEA10; ENSG00000124260; HLA -B*07:02,HLA-B*08:01,HLA-B*35:01,HLA-B*35:03,HLA-B*51:01, HLA-B*54:01,HLA-C*07:02
MPKTGILIL

SEQ ID NO: 5106 - protein, 9 aa, Homo sapiens
  Table 1.2; MAGEA10; ENSG00000124260; HLA -A*03:01
MSLLKFLAK

SEQ ID NO: 5107 - protein, 8 aa, Homo sapiens
  Table 1.2; MAGEA10; ENSG00000124260; HLA -C*16:01
NGSDPRSF

SEQ ID NO: 5108 - protein, 8 aa, Homo sapiens
  Table 1.2; MAGEA10; ENSG00000124260; HLA -B*51:01
NPPQSAQI

SEQ ID NO: 5109 - protein, 9 aa, Homo sapiens
  Table 1.2; MAGEA10; ENSG00000124260; HLA -A*23:01,HLA-A*24:02
NYEDHFPLL

SEQ ID NO: 5110 - protein, 10 aa, Homo sapiens
  Table 1.2; MAGEA10; ENSG00000124260; HLA -A*24:02,HLA-A*29:02
NYEDHFPLLF

SEQ ID NO: 5111 - protein, 8 aa, Homo sapiens
  Table 1.2; MAGEA10; ENSG00000124260; HLA -B*27:02
PDSESLPR

SEQ ID NO: 5112 - protein, 10 aa, Homo sapiens
  Table 1.2; MAGEA10; ENSG00000124260; HLA -A*02:03
PLIPSTPEEV

SEQ ID NO: 5113 - protein, 9 aa, Homo sapiens
  Table 1.2; MAGEA10; ENSG00000124260; HLA -A*30:01
QDWVQENYL

SEQ ID NO: 5114 - protein, 9 aa, Homo sapiens
  Table 1.2; MAGEA10; ENSG00000124260; HLA -A*02:01
QIACSSPSV

SEQ ID NO: 5115 - protein, 9 aa, Homo sapiens
  Table 1.2; MAGEA10; ENSG00000124260; HLA -B*39:01
QKEESPSTL

SEQ ID NO: 5116 - protein, 9 aa, Homo sapiens
  Table 1.2; MAGEA10; ENSG00000124260; HLA -A*02:03,HLA-B*55:01
QMKEPITKA

SEQ ID NO: 5117 - protein, 10 aa, Homo sapiens
  Table 1.2; MAGEA10; ENSG00000124260; HLA -A*01:01
QSDEGSSSQK

SEQ ID NO: 5118 - protein, 8 aa, Homo sapiens
  Table 1.2; MAGEA10; ENSG00000124260; HLA -B*08:01
QSMPKTGI

SEQ ID NO: 5119 - protein, 9 aa, Homo sapiens
  Table 1.2; MAGEA10; ENSG00000124260; HLA -B*08:01
QSMPKTGIL

SEQ ID NO: 5120 - protein, 9 aa, Homo sapiens
  Table 1.2; MAGEA10; ENSG00000124260; HLA -B*15:01,HLA-B*35:03,HLA-B*38:01,HLA-B*39:01
QVLPDSESL

SEQ ID NO: 5121 - protein, 11 aa, Homo sapiens
  Table 1.2; MAGEA10; ENSG00000124260; HLA -A*03:01,HLA-A*11:01,HLA-A*31:01,HLA-A*33:01,HLA-A*33:03, HLA-A*68:01,HLA-B*27:02,HLA-C*07:06
QVLPDSESLPR

SEQ ID NO: 5122 - protein, 10 aa, Homo sapiens
  Table 1.2; MAGEA10; ENSG00000124260; HLA -A*01:01,HLA-A*25:01,HLA-A*26:01,HLA-A*29:02,HLA-A*30:02
QVPGSDPARY

SEQ ID NO: 5123 - protein, 11 aa, Homo sapiens
  Table 1.2; MAGEA10; ENSG00000124260; HLA -B*15:01
RIATTDDTTAM

SEQ ID NO: 5124 - protein, 11 aa, Homo sapiens
  Table 1.2; MAGEA10; ENSG00000124260; HLA -B*57:01
RNYEDHFPLLF

SEQ ID NO: 5125 - protein, 11 aa, Homo sapiens
  Table 1.2; MAGEA10; ENSG00000124260; HLA -A*29:02,HLA-A*30:02,HLA-A*32:01,HLA-B*15:01,HLA-B*15:03, HLA-B*58:01
RQVPGSDPARY

SEQ ID NO: 5126 - protein, 10 aa, Homo sapiens
  Table 1.2; MAGEA10; ENSG00000124260; HLA -A*25:01,HLA-A*26:01,HLA-A*30:02,HLA-B*07:02
SASSSATGSF

SEQ ID NO: 5127 - protein, 8 aa, Homo sapiens
  Table 1.2; MAGEA10; ENSG00000124260; HLA -A*30:02,HLA-B*15:01,HLA-B*35:01,HLA-B*39:01,HLA-B*58:01, HLA-C*16:01
SATGSFSY

SEQ ID NO: 5128 - protein, 8 aa, Homo sapiens
  Table 1.2; MAGEA10; ENSG00000124260; HLA -B*37:01
SDPARYEF

SEQ ID NO: 5129 - protein, 9 aa, Homo sapiens
  Table 1.2; MAGEA10; ENSG00000124260; HLA -A*24:02
SDPRSFPLW

SEQ ID NO: 5130 - protein, 9 aa, Homo sapiens
  Table 1.2; MAGEA10; ENSG00000124260; HLA -A*30:01,HLA-B*40:01,HLA-B*44:03,HLA-B*49:01
SEASECMLL

SEQ ID NO: 5131 - protein, 10 aa, Homo sapiens
  Table 1.2; MAGEA10; ENSG00000124260; HLA -B*49:01
SEASECMLLV

SEQ ID NO: 5132 - protein, 8 aa, Homo sapiens
  Table 1.2; MAGEA10; ENSG00000124260; HLA -B*18:01
SECMLLVF

SEQ ID NO: 5133 - protein, 10 aa, Homo sapiens
  Table 1.2; MAGEA10; ENSG00000124260; HLA -A*30:01,HLA-B*40:01,HLA-B*40:02,HLA-B*44:02,HLA-B*44:03, HLA-B*49:01
SEIDEKVTDL

SEQ ID NO: 5134 - protein, 11 aa, Homo sapiens
  Table 1.2; MAGEA10; ENSG00000124260; HLA -B*49:01
SEIDEKVTDLV

SEQ ID NO: 5135 - protein, 9 aa, Homo sapiens
  Table 1.2; MAGEA10; ENSG00000124260; HLA -B*37:01,HLA-B*40:01,HLA-B*44:02,HLA-B*44:03,HLA-B*49:01
SESLPRSEI

SEQ ID NO: 5136 - protein, 8 aa, Homo sapiens
  Table 1.2; MAGEA10; ENSG00000124260; HLA -A*23:01,HLA-C*14:02
SFVLVTSL

SEQ ID NO: 5137 - protein, 8 aa, Homo sapiens
  Table 1.2; MAGEA10; ENSG00000124260; HLA -B*15:01
SIVFIEGY

SEQ ID NO: 5138 - protein, 8 aa, Homo sapiens
  Table 1.2; MAGEA10; ENSG00000124260; HLA -A*03:01
SLLKFLAK

SEQ ID NO: 5139 - protein, 9 aa, Homo sapiens
  Table 1.2; MAGEA10; ENSG00000124260; HLA -A*02:01,HLA-A*02:03,HLA-A*02:04,HLA-A*02:07
SLLKFLAKV

SEQ ID NO: 5140 - protein, 8 aa, Homo sapiens
  Table 1.2; MAGEA10; ENSG00000124260; HLA -B*07:02
SPSTLQVL

SEQ ID NO: 5141 - protein, 8 aa, Homo sapiens
  Table 1.2; MAGEA10; ENSG00000124260; HLA -B*07:02,HLA-B*08:01,HLA-B*37:01,HLA-B*56:01,HLA-C*07:02
SPSVVASL

SEQ ID NO: 5142 - protein, 10 aa, Homo sapiens
  Table 1.2; MAGEA10; ENSG00000124260; HLA -B*07:02
SPSVVASLPL

SEQ ID NO: 5143 - protein, 10 aa, Homo sapiens
  Table 1.2; MAGEA10; ENSG00000124260; HLA -B*15:01
SQKEESPSTL

SEQ ID NO: 5144 - protein, 9 aa, Homo sapiens
  Table 1.2; MAGEA10; ENSG00000124260; HLA -A*01:01,HLA-A*11:01,HLA-A*25:01,HLA-A*26:01,HLA-A*29:02, HLA-A*30:02,HLA-A*32:01,HLA-B*15:01,HLA-B*15:03,HLA-B*27:05, HLA-B*35:01,HLA-B*46:01,HLA-B*58:01,HLA-C*02:02,HLA-C*16:01,
  HLA-C*16:02
SSATGSFSY

SEQ ID NO: 5145 - protein, 9 aa, Homo sapiens
  Table 1.2; MAGEA10; ENSG00000124260; HLA -A*02:07,HLA-A*24:02,HLA-A*25:01,HLA-A*26:01,HLA-A*68:02, HLA-B*46:01,HLA-B*58:01,HLA-C*01:02,HLA-C*14:02
SSPSVVASL

SEQ ID NO: 5146 - protein, 10 aa, Homo sapiens
  Table 1.2; MAGEA10; ENSG00000124260; HLA -A*01:01,HLA-A*29:02,HLA-A*30:02
SSSATGSFSY

SEQ ID NO: 5147 - protein, 8 aa, Homo sapiens
  Table 1.2; MAGEA10; ENSG00000124260; HLA -A*30:02
SSSSSSCY

SEQ ID NO: 5148 - protein, 9 aa, Homo sapiens
  Table 1.2; MAGEA10; ENSG00000124260; HLA -A*01:01,HLA-A*26:01,HLA-A*30:02,HLA-B*15:01,HLA-B*15:03
SSSSSSSCY

SEQ ID NO: 5149 - protein, 10 aa, Homo sapiens
  Table 1.2; MAGEA10; ENSG00000124260; HLA -A*30:02
SSSSSSSSCY

SEQ ID NO: 5150 - protein, 11 aa, Homo sapiens
  Table 1.2; MAGEA10; ENSG00000124260; HLA -A*30:02
SSSSSSSSSCY

SEQ ID NO: 5151 - protein, 9 aa, Homo sapiens
  Table 1.2; MAGEA10; ENSG00000124260; HLA -A*25:01,HLA-A*26:01,HLA-A*30:02,HLA-A*32:01,HLA-B*15:01, HLA-B*15:03,HLA-B*46:01,HLA-B*58:01,HLA-C*16:01
SSTSTSSSF

SEQ ID NO: 5152 - protein, 10 aa, Homo sapiens
  Table 1.2; MAGEA10; ENSG00000124260; HLA -A*25:01,HLA-A*26:01,HLA-A*30:02
STSSSFPSSF

SEQ ID NO: 5153 - protein, 8 aa, Homo sapiens
  Table 1.2; MAGEA10; ENSG00000124260; HLA -A*32:01
STSTSSSF

SEQ ID NO: 5154 - protein, 10 aa, Homo sapiens
  Table 1.2; MAGEA10; ENSG00000124260; HLA -B*54:01,HLA-B*56:01
TAMASASSSA

SEQ ID NO: 5155 - protein, 8 aa, Homo sapiens
  Table 1.2; MAGEA10; ENSG00000124260; HLA -B*37:01
TDLVQFLL

SEQ ID NO: 5156 - protein, 9 aa, Homo sapiens
  Table 1.2; MAGEA10; ENSG00000124260; HLA -A*68:02
TKAEILESV

SEQ ID NO: 5157 - protein, 9 aa, Homo sapiens
  Table 1.2; MAGEA10; ENSG00000124260; HLA -B*54:01,HLA-B*56:01
TPEEVIWEA

SEQ ID NO: 5158 - protein, 10 aa, Homo sapiens
  Table 1.2; MAGEA10; ENSG00000124260; HLA -B*35:03
TPEEVIWEAL

SEQ ID NO: 5159 - protein, 8 aa, Homo sapiens
  Table 1.2; MAGEA10; ENSG00000124260; HLA -B*56:01
TPNPPQSA

SEQ ID NO: 5160 - protein, 10 aa, Homo sapiens
  Table 1.2; MAGEA10; ENSG00000124260; HLA -B*07:02,HLA-B*51:01,HLA-B*56:01,HLA-C*07:02
TPNPPQSAQI

SEQ ID NO: 5161 - protein, 11 aa, Homo sapiens
  Table 1.2; MAGEA10; ENSG00000124260; HLA -B*54:01,HLA-B*56:01
TPNPPQSAQIA

SEQ ID NO: 5162 - protein, 9 aa, Homo sapiens
  Table 1.2; MAGEA10; ENSG00000124260; HLA -A*01:01,HLA-A*30:02,HLA-B*15:01,HLA-B*38:01
TQDWVQENY

SEQ ID NO: 5163 - protein, 10 aa, Homo sapiens
  Table 1.2; MAGEA10; ENSG00000124260; HLA -B*38:01
TQDWVQENYL

SEQ ID NO: 5164 - protein, 11 aa, Homo sapiens
  Table 1.2; MAGEA10; ENSG00000124260; HLA -B*27:05,HLA-B*38:01,HLA-B*39:01
TQGLEGAQAPL

SEQ ID NO: 5165 - protein, 9 aa, Homo sapiens
  Table 1.2; MAGEA10; ENSG00000124260; HLA -A*25:01,HLA-A*26:01,HLA-A*30:02,HLA-A*32:01,HLA-B*37:01, HLA-C*02:02,HLA-C*16:01
TSSSFPSSF

SEQ ID NO: 5166 - protein, 8 aa, Homo sapiens
  Table 1.2; MAGEA10; ENSG00000124260; HLA -A*32:01,HLA-B*35:03,HLA-C*04:01,HLA-C*05:01
TTDDTTAM

SEQ ID NO: 5167 - protein, 9 aa, Homo sapiens
  Table 1.2; MAGEA10; ENSG00000124260; HLA -A*01:01
TTDDTTAMA

SEQ ID NO: 5168 - protein, 9 aa, Homo sapiens
  Table 1.2; MAGEA10; ENSG00000124260; HLA -B*35:01,HLA-B*35:03,HLA-C*04:01,HLA-C*05:01
TYDGMLSDV

SEQ ID NO: 5169 - protein, 8 aa, Homo sapiens
  Table 1.2; MAGEA10; ENSG00000124260; HLA -A*32:01,HLA-B*37:01,HLA-C*01:02
VDPTGHSF

SEQ ID NO: 5170 - protein, 11 aa, Homo sapiens
  Table 1.2; MAGEA10; ENSG00000124260; HLA -A*30:01
VEEDASSSTST

SEQ ID NO: 5171 - protein, 11 aa, Homo sapiens
  Table 1.2; MAGEA10; ENSG00000124260; HLA -B*15:03
VKEVDPTGHSF

SEQ ID NO: 5172 - protein, 8 aa, Homo sapiens
  Table 1.2; MAGEA10; ENSG00000124260; HLA -C*01:02
VLPDSESL

SEQ ID NO: 5173 - protein, 11 aa, Homo sapiens
  Table 1.2; MAGEA10; ENSG00000124260; HLA -A*02:07
VLPDSESLPRS

SEQ ID NO: 5174 - protein, 10 aa, Homo sapiens
  Table 1.2; MAGEA10; ENSG00000124260; HLA -A*01:01,HLA-A*23:01,HLA-A*25:01,HLA-A*26:01,HLA-A*29:02, HLA-A*30:02,HLA-A*32:01,HLA-B*15:01,HLA-B*15:03,HLA-B*46:01, HLA-B*58:01
VLVTSLGLTY

SEQ ID NO: 5175 - protein, 9 aa, Homo sapiens
  Table 1.2; MAGEA10; ENSG00000124260; HLA -C*16:01
VNGSDPRSF

SEQ ID NO: 5176 - protein, 9 aa, Homo sapiens
  Table 1.2; MAGEA10; ENSG00000124260; HLA -A*30:02,HLA-B*35:01,HLA-B*55:01
VPGSDPARY

SEQ ID NO: 5177 - protein, 11 aa, Homo sapiens
  Table 1.2; MAGEA10; ENSG00000124260; HLA -B*35:01
VPGSDPARYEF

SEQ ID NO: 5178 - protein, 8 aa, Homo sapiens
  Table 1.2; MAGEA10; ENSG00000124260; HLA -A*01:01,HLA-B*39:01
VQENYLEY

SEQ ID NO: 5179 - protein, 9 aa, Homo sapiens
  Table 1.2; MAGEA10; ENSG00000124260; HLA -A*32:01,HLA-B*13:02,HLA-B*38:01
VQSMPKTGI

SEQ ID NO: 5180 - protein, 8 aa, Homo sapiens
  Table 1.2; MAGEA10; ENSG00000124260; HLA -A*01:01,HLA-C*04:01,HLA-C*05:01
VTDLVQFL

SEQ ID NO: 5181 - protein, 9 aa, Homo sapiens
  Table 1.2; MAGEA10; ENSG00000124260; HLA -A*01:01,HLA-A*02:07
VTDLVQFLL

SEQ ID NO: 5182 - protein, 10 aa, Homo sapiens
  Table 1.2; MAGEA10; ENSG00000124260; HLA -A*01:01
VTDLVQFLLF

SEQ ID NO: 5183 - protein, 8 aa, Homo sapiens
  Table 1.2; MAGEA10; ENSG00000124260; HLA -A*01:01,HLA-A*29:02,HLA-A*32:01,HLA-B*15:01,HLA-B*46:01, HLA-C*14:02,HLA-C*16:01
VTSLGLTY

SEQ ID NO: 5184 - protein, 9 aa, Homo sapiens
  Table 1.2; MAGEA10; ENSG00000124260; HLA -A*01:01,HLA-A*25:01,HLA-A*26:01,HLA-A*29:02,HLA-A*30:02, HLA-B*15:01,HLA-B*35:01
WVQENYLEY

SEQ ID NO: 5185 - protein, 8 aa, Homo sapiens
  Table 1.2; MAGEA10; ENSG00000124260; HLA -B*38:01,HLA-C*07:01,HLA-C*07:04
YDGMEHLI

SEQ ID NO: 5186 - protein, 8 aa, Homo sapiens
  Table 1.2; MAGEA10; ENSG00000124260; HLA -A*02:07,HLA-B*49:01
YEDHFPLL

SEQ ID NO: 5187 - protein, 9 aa, Homo sapiens
  Table 1.2; MAGEA10; ENSG00000124260; HLA -A*01:01,HLA-A*02:07,HLA-A*24:02,HLA-A*29:02,HLA-B*18:01, HLA-B*44:02,HLA-B*44:03,HLA-B*49:01
YEDHFPLLF

SEQ ID NO: 5188 - protein, 9 aa, Homo sapiens
  Table 1.2; MAGEA10; ENSG00000124260; HLA -A*02:04
YEFLWGPRA

SEQ ID NO: 5189 - protein, 11 aa, Homo sapiens
  Table 1.2; MAGEA10; ENSG00000124260; HLA -A*68:02,HLA-B*51:01,HLA-B*54:01,HLA-B*56:01
YPLIPSTPEEV

SEQ ID NO: 5190 - protein, 9 aa, Homo sapiens
  Table 1.2; MAGEA10; ENSG00000124260; HLA -A*01:01,HLA-A*02:01,HLA-A*03:01,HLA-A*03:02,HLA-A*11:01, HLA-B*13:02,HLA-B*27:05,HLA-B*38:01
YQMKEPITK

SEQ ID NO: 5191 - protein, 10 aa, Homo sapiens
  Table 1.2; MAGEA10; ENSG00000124260; HLA -A*02:03
YQMKEPITKA

SEQ ID NO: 5192 - protein, 11 aa, Homo sapiens
  Table 1.2; MAGEA10; ENSG00000124260; HLA -B*27:05
YRQVPGSDPAR

SEQ ID NO: 5193 - protein, 8 aa, Homo sapiens
  Table 1.2; MAGEA11; ENSG00000185247; HLA -B*08:01,HLA-B*46:01,HLA-B*58:01,HLA-C*03:03,HLA-C*03:04, HLA-C*12:03
AAFFSSTL

SEQ ID NO: 5194 - protein, 8 aa, Homo sapiens
  Table 1.2; MAGEA11; ENSG00000185247; HLA -B*37:01
ADLTRVIM

SEQ ID NO: 5195 - protein, 9 aa, Homo sapiens
  Table 1.2; MAGEA11; ENSG00000185247; HLA -B*37:01
ADLTRVIMP

SEQ ID NO: 5196 - protein, 9 aa, Homo sapiens
  Table 1.2; MAGEA11; ENSG00000185247; HLA -A*30:01,HLA-B*27:02,HLA-B*37:01,HLA-B*38:01,HLA-B*40:01, HLA-B*44:02,HLA-B*44:03,HLA-B*49:01,HLA-C*16:04
AEEQEAAFF

SEQ ID NO: 5197 - protein, 8 aa, Homo sapiens
  Table 1.2; MAGEA11; ENSG00000185247; HLA -A*30:01,HLA-B*13:02,HLA-B*18:01,HLA-B*27:02,HLA-B*37:01, HLA-B*40:01,HLA-B*40:02,HLA-B*44:02,HLA-B*44:03,HLA-B*49:01
AEMLGSVI

SEQ ID NO: 5198 - protein, 10 aa, Homo sapiens
  Table 1.2; MAGEA11; ENSG00000185247; HLA -B*44:02
AEMLGSVIKN

SEQ ID NO: 5199 - protein, 11 aa, Homo sapiens
  Table 1.2; MAGEA11; ENSG00000185247; HLA -A*30:01,HLA-A*30:02,HLA-B*27:02,HLA-B*44:02,HLA-B*44:03, HLA-C*16:04
AEMLGSVIKNY

SEQ ID NO: 5200 - protein, 10 aa, Homo sapiens
  Table 1.2; MAGEA11; ENSG00000185247; HLA -A*30:01
AESPSPPQSP

SEQ ID NO: 5201 - protein, 8 aa, Homo sapiens
  Table 1.2; MAGEA11; ENSG00000185247; HLA -B*49:01
AETSKMKV

SEQ ID NO: 5202 - protein, 9 aa, Homo sapiens
  Table 1.2; MAGEA11; ENSG00000185247; HLA -A*30:01,HLA-B*37:01,HLA-B*40:01,HLA-B*40:02,HLA-B*44:02, HLA-B*44:03,HLA-B*49:01
AETSKMKVL

SEQ ID NO: 5203 - protein, 11 aa, Homo sapiens
  Table 1.2; MAGEA11; ENSG00000185247; HLA -B*44:02
AETSKMKVLEY

SEQ ID NO: 5204 - protein, 9 aa, Homo sapiens
  Table 1.2; MAGEA11; ENSG00000185247; HLA -B*13:02
AFFSSTLNV

SEQ ID NO: 5205 - protein, 11 aa, Homo sapiens
  Table 1.2; MAGEA11; ENSG00000185247; HLA -B*15:01
ALQAEEQEAAF

SEQ ID NO: 5206 - protein, 9 aa, Homo sapiens
  Table 1.2; MAGEA11; ENSG00000185247; HLA -A*02:01,HLA-A*02:03,HLA-A*02:04,HLA-A*02:07,HLA-B*07:02, HLA-B*13:02,HLA-B*15:01,HLA-B*40:02,HLA-B*46:01,HLA-B*55:01, HLA-C*06:02
ALREEGEGV

SEQ ID NO: 5207 - protein, 9 aa, Homo sapiens
  Table 1.2; MAGEA11; ENSG00000185247; HLA -A*01:01,HLA-A*02:07,HLA-A*32:01,HLA-C*02:02,HLA-C*05:01
AMDAIFGSL

SEQ ID NO: 5208 - protein, 11 aa, Homo sapiens
  Table 1.2; MAGEA11; ENSG00000185247; HLA -A*30:02,HLA-C*12:03
ANANGRDPTSY

SEQ ID NO: 5209 - protein, 9 aa, Homo sapiens
  Table 1.2; MAGEA11; ENSG00000185247; HLA -A*30:02
ANGRDPTSY

SEQ ID NO: 5210 - protein, 9 aa, Homo sapiens
  Table 1.2; MAGEA11; ENSG00000185247; HLA -A*33:01,HLA-A*33:03
ANLEDRSPR

SEQ ID NO: 5211 - protein, 9 aa, Homo sapiens
  Table 1.2; MAGEA11; ENSG00000185247; HLA -A*25:01,HLA-B*07:02,HLA-B*35:01,HLA-B*44:02,HLA-B*44:03, HLA-B*51:01,HLA-B*54:01,HLA-B*56:01,HLA-B*57:01,HLA-B*58:01, HLA-C*07:02
APYGPQLQW

SEQ ID NO: 5212 - protein, 10 aa, Homo sapiens
  Table 1.2; MAGEA11; ENSG00000185247; HLA -A*02:07
CIPEEVMWEV

SEQ ID NO: 5213 - protein, 8 aa, Homo sapiens
  Table 1.2; MAGEA11; ENSG00000185247; HLA -A*33:01,HLA-A*68:01
DDFQSTER

SEQ ID NO: 5214 - protein, 11 aa, Homo sapiens
  Table 1.2; MAGEA11; ENSG00000185247; HLA -B*18:01
DDFQSTERAPY

SEQ ID NO: 5215 - protein, 10 aa, Homo sapiens
  Table 1.2; MAGEA11; ENSG00000185247; HLA -A*23:01
DFGLQVSTMF

SEQ ID NO: 5216 - protein, 10 aa, Homo sapiens
  Table 1.2; MAGEA11; ENSG00000185247; HLA -A*30:02
DFQSTERAPY

SEQ ID NO: 5217 - protein, 8 aa, Homo sapiens
  Table 1.2; MAGEA11; ENSG00000185247; HLA -A*25:01
DLIDPESF

SEQ ID NO: 5218 - protein, 8 aa, Homo sapiens
  Table 1.2; MAGEA11; ENSG00000185247; HLA -B*08:01,HLA-B*51:01
DLPRVQVF

SEQ ID NO: 5219 - protein, 9 aa, Homo sapiens
  Table 1.2; MAGEA11; ENSG00000185247; HLA -A*33:01,HLA-A*33:03
DLPRVQVFR

SEQ ID NO: 5220 - protein, 10 aa, Homo sapiens
  Table 1.2; MAGEA11; ENSG00000185247; HLA -B*35:03
DPESFSQDIL

SEQ ID NO: 5221 - protein, 8 aa, Homo sapiens
  Table 1.2; MAGEA11; ENSG00000185247; HLA -B*51:01
DPTSHSYV

SEQ ID NO: 5222 - protein, 9 aa, Homo sapiens
  Table 1.2; MAGEA11; ENSG00000185247; HLA -B*07:02,HLA-B*08:01,HLA-B*35:01,HLA-B*35:03,HLA-B*39:01, HLA-B*51:01,HLA-C*07:02
DPTSHSYVL

SEQ ID NO: 5223 - protein, 8 aa, Homo sapiens
  Table 1.2; MAGEA11; ENSG00000185247; HLA -B*35:01,HLA-B*35:03,HLA-B*51:01
DPTSYPSL

SEQ ID NO: 5224 - protein, 9 aa, Homo sapiens
  Table 1.2; MAGEA11; ENSG00000185247; HLA -A*01:01,HLA-A*26:01,HLA-B*18:01,HLA-B*35:01
DPTSYPSLY

SEQ ID NO: 5225 - protein, 9 aa, Homo sapiens
  Table 1.2; MAGEA11; ENSG00000185247; HLA -A*26:01,HLA-A*68:01,HLA-A*68:02,HLA-B*51:01
DSGDFGLQV

SEQ ID NO: 5226 - protein, 10 aa, Homo sapiens
  Table 1.2; MAGEA11; ENSG00000185247; HLA -A*25:01,HLA-A*26:01,HLA-A*33:01,HLA-A*68:01
DVKEVDPTSH

SEQ ID NO: 5227 - protein, 10 aa, Homo sapiens
  Table 1.2; MAGEA11; ENSG00000185247; HLA -B*54:01
DYFPEIFREA

SEQ ID NO: 5228 - protein, 9 aa, Homo sapiens
  Table 1.2; MAGEA11; ENSG00000185247; HLA -A*25:01,HLA-A*26:01,HLA-A*33:03,HLA-A*68:01,HLA-A*68:02, HLA-B*07:02,HLA-B*08:01,HLA-B*27:05,HLA-B*35:01,HLA-B*35:03, HLA-B*38:01,HLA-B*39:01,HLA-B*51:01,HLA-C*03:03,HLA-C*03:04,
  HLA-C*07:06,HLA-C*12:03,HLA-C*16:04
EAAFFSSTL

SEQ ID NO: 5229 - protein, 9 aa, Homo sapiens
  Table 1.2; MAGEA11; ENSG00000185247; HLA -A*33:03,HLA-A*68:01
EDDFQSTER

SEQ ID NO: 5230 - protein, 11 aa, Homo sapiens
  Table 1.2; MAGEA11; ENSG00000185247; HLA -A*30:01,HLA-B*44:02,HLA-C*07:01
EDLGLVGAQAL

SEQ ID NO: 5231 - protein, 9 aa, Homo sapiens
  Table 1.2; MAGEA11; ENSG00000185247; HLA -A*33:01,HLA-A*68:02
EDYFPEIFR

SEQ ID NO: 5232 - protein, 9 aa, Homo sapiens
  Table 1.2; MAGEA11; ENSG00000185247; HLA -B*49:01
EEDLGLVGA

SEQ ID NO: 5233 - protein, 9 aa, Homo sapiens
  Table 1.2; MAGEA11; ENSG00000185247; HLA -B*40:02
EELPAAESP

SEQ ID NO: 5234 - protein, 8 aa, Homo sapiens
  Table 1.2; MAGEA11; ENSG00000185247; HLA -B*18:01,HLA-B*37:01,HLA-B*44:02
EEQEAAFF

SEQ ID NO: 5235 - protein, 8 aa, Homo sapiens
  Table 1.2; MAGEA11; ENSG00000185247; HLA -B*18:01
EESFSPTA

SEQ ID NO: 5236 - protein, 9 aa, Homo sapiens
  Table 1.2; MAGEA11; ENSG00000185247; HLA -A*30:01,HLA-B*18:01,HLA-B*37:01,HLA-B*39:01,HLA-B*40:01, HLA-B*44:03
EESFSPTAM

SEQ ID NO: 5237 - protein, 10 aa, Homo sapiens
  Table 1.2; MAGEA11; ENSG00000185247; HLA -A*26:01
EIFREASVCM

SEQ ID NO: 5238 - protein, 10 aa, Homo sapiens
  Table 1.2; MAGEA11; ENSG00000185247; HLA -A*25:01,HLA-A*26:01,HLA-A*29:02,HLA-A*30:02,HLA-A*33:01, HLA-A*33:03,HLA-B*44:02,HLA-B*44:03
EMLGSVIKNY

SEQ ID NO: 5239 - protein, 11 aa, Homo sapiens
  Table 1.2; MAGEA11; ENSG00000185247; HLA -B*38:01
EQEAAFFSSTL

SEQ ID NO: 5240 - protein, 9 aa, Homo sapiens
  Table 1.2; MAGEA11; ENSG00000185247; HLA -B*38:01,HLA-B*39:01
EQSMPKSGL

SEQ ID NO: 5241 - protein, 9 aa, Homo sapiens
  Table 1.2; MAGEA11; ENSG00000185247; HLA -B*27:02,HLA-B*27:05,HLA-B*38:01,HLA-B*39:01,HLA-C*06:02
ERAPYGPQL

SEQ ID NO: 5242 - protein, 8 aa, Homo sapiens
  Table 1.2; MAGEA11; ENSG00000185247; HLA -A*26:01
ESFSPTAM

SEQ ID NO: 5243 - protein, 11 aa, Homo sapiens
  Table 1.2; MAGEA11; ENSG00000185247; HLA -A*68:01
ESFSQDILHDK

SEQ ID NO: 5244 - protein, 10 aa, Homo sapiens
  Table 1.2; MAGEA11; ENSG00000185247; HLA -A*01:01,HLA-A*25:01,HLA-A*26:01
ETSKMKVLEY

SEQ ID NO: 5245 - protein, 9 aa, Homo sapiens
  Table 1.2; MAGEA11; ENSG00000185247; HLA -A*01:01,HLA-A*11:01,HLA-A*25:01,HLA-A*26:01,HLA-A*29:02, HLA-A*30:02,HLA-A*32:01,HLA-A*33:03,HLA-A*68:01,HLA-B*15:01, HLA-B*15:03,HLA-B*18:01,HLA-B*35:01,HLA-B*38:01,HLA-B*39:01,
  HLA-B*44:02,HLA-B*44:03,HLA-B*46:01,HLA-B*55:01,HLA-B*58:01, HLA-C*03:03,HLA-C*05:01,HLA-C*07:04,HLA-C*07:06,HLA-C*16:02, HLA-C*16:04
EVDPTSHSY

SEQ ID NO: 5246 - protein, 10 aa, Homo sapiens
  Table 1.2; MAGEA11; ENSG00000185247; HLA -A*01:01,HLA-A*26:01,HLA-A*68:02,HLA-C*05:01
EVDPTSHSYV

SEQ ID NO: 5247 - protein, 11 aa, Homo sapiens
  Table 1.2; MAGEA11; ENSG00000185247; HLA -A*01:01,HLA-A*02:07,HLA-A*68:02,HLA-B*35:03,HLA-B*38:01, HLA-B*39:01
EVDPTSHSYVL

SEQ ID NO: 5248 - protein, 8 aa, Homo sapiens
  Table 1.2; MAGEA11; ENSG00000185247; HLA -A*26:01
EVLSIMGV

SEQ ID NO: 5249 - protein, 9 aa, Homo sapiens
  Table 1.2; MAGEA11; ENSG00000185247; HLA -A*25:01,HLA-A*26:01,HLA-A*29:02,HLA-A*30:02,HLA-A*33:01, HLA-A*33:03,HLA-B*35:01,HLA-B*44:03,HLA-C*07:06
EVLSIMGVY

SEQ ID NO: 5250 - protein, 10 aa, Homo sapiens
  Table 1.2; MAGEA11; ENSG00000185247; HLA -A*26:01,HLA-A*68:02,HLA-B*54:01
EVLSIMGVYA

SEQ ID NO: 5251 - protein, 9 aa, Homo sapiens
  Table 1.2; MAGEA11; ENSG00000185247; HLA -A*25:01,HLA-A*26:01,HLA-A*68:02
EVMWEVLSI

SEQ ID NO: 5252 - protein, 10 aa, Homo sapiens
  Table 1.2; MAGEA11; ENSG00000185247; HLA -A*26:01
EVMWEVLSIM

SEQ ID NO: 5253 - protein, 9 aa, Homo sapiens
  Table 1.2; MAGEA11; ENSG00000185247; HLA -A*33:01,HLA-A*33:03,HLA-A*68:01
EYIANANGR

SEQ ID NO: 5254 - protein, 8 aa, Homo sapiens
  Table 1.2; MAGEA11; ENSG00000185247; HLA -B*46:01,HLA-B*49:01,HLA-B*51:01,HLA-C*16:02
FGIDVKEV

SEQ ID NO: 5255 - protein, 8 aa, Homo sapiens
  Table 1.2; MAGEA11; ENSG00000185247; HLA -B*08:01,HLA-B*46:01,HLA-B*51:01,HLA-C*14:02
FGLQVSTM

SEQ ID NO: 5256 - protein, 9 aa, Homo sapiens
  Table 1.2; MAGEA11; ENSG00000185247; HLA -A*23:01
FGLQVSTMF

SEQ ID NO: 5257 - protein, 9 aa, Homo sapiens
  Table 1.2; MAGEA11; ENSG00000185247; HLA -A*02:01,HLA-A*02:03,HLA-A*02:04,HLA-A*02:07
FLFGEPKRL

SEQ ID NO: 5258 - protein, 10 aa, Homo sapiens
  Table 1.2; MAGEA11; ENSG00000185247; HLA -A*02:01,HLA-A*02:03,HLA-A*02:04
FLFGEPKRLL

SEQ ID NO: 5259 - protein, 11 aa, Homo sapiens
  Table 1.2; MAGEA11; ENSG00000185247; HLA -A*02:01
FLFGEPKRLLT

SEQ ID NO: 5260 - protein, 8 aa, Homo sapiens
  Table 1.2; MAGEA11; ENSG00000185247; HLA -B*54:01,HLA-B*55:01,HLA-B*56:01
FPEIFREA

SEQ ID NO: 5261 - protein, 10 aa, Homo sapiens
  Table 1.2; MAGEA11; ENSG00000185247; HLA -B*54:01,HLA-B*56:01
FPEIFREASV

SEQ ID NO: 5262 - protein, 9 aa, Homo sapiens
  Table 1.2; MAGEA11; ENSG00000185247; HLA -B*07:02,HLA-B*08:01,HLA-B*35:01,HLA-B*35:03,HLA-C*07:02
FPTVRPADL

SEQ ID NO: 5263 - protein, 9 aa, Homo sapiens
  Table 1.2; MAGEA11; ENSG00000185247; HLA -A*01:01,HLA-A*29:02,HLA-A*30:02,HLA-A*32:01,HLA-B*15:01, HLA-B*15:03,HLA-B*46:01,HLA-C*02:02,HLA-C*07:04,HLA-C*16:01
FQSTERAPY

SEQ ID NO: 5264 - protein, 9 aa, Homo sapiens
  Table 1.2; MAGEA11; ENSG00000185247; HLA -C*01:02
FSPTAMDAI

SEQ ID NO: 5265 - protein, 9 aa, Homo sapiens
  Table 1.2; MAGEA11; ENSG00000185247; HLA -A*11:01,HLA-A*33:01
FSQDILHDK

SEQ ID NO: 5266 - protein, 9 aa, Homo sapiens
  Table 1.2; MAGEA11; ENSG00000185247; HLA -A*03:01,HLA-A*03:02,HLA-A*11:01,HLA-A*31:01,HLA-A*68:01, HLA-B*27:05,HLA-C*07:06
GCSPASIKR

SEQ ID NO: 5267 - protein, 10 aa, Homo sapiens
  Table 1.2; MAGEA11; ENSG00000185247; HLA -A*03:01,HLA-A*03:02,HLA-A*11:01
GCSPASIKRK

SEQ ID NO: 5268 - protein, 10 aa, Homo sapiens
  Table 1.2; MAGEA11; ENSG00000185247; HLA -A*30:01,HLA-B*40:02
GDFGLQVSTM

SEQ ID NO: 5269 - protein, 11 aa, Homo sapiens
  Table 1.2; MAGEA11; ENSG00000185247; HLA -B*44:02
GEPKRLLTQNW

SEQ ID NO: 5270 - protein, 11 aa, Homo sapiens
  Table 1.2; MAGEA11; ENSG00000185247; HLA -A*03:01,HLA-A*03:02,HLA-A*11:01
GIQCNEQSMPK

SEQ ID NO: 5271 - protein, 9 aa, Homo sapiens
  Table 1.2; MAGEA11; ENSG00000185247; HLA -A*02:01,HLA-A*02:03
GLGCSPASI

SEQ ID NO: 5272 - protein, 10 aa, Homo sapiens
  Table 1.2; MAGEA11; ENSG00000185247; HLA -A*03:01,HLA-A*03:02
GLGCSPASIK

SEQ ID NO: 5273 - protein, 8 aa, Homo sapiens
  Table 1.2; MAGEA11; ENSG00000185247; HLA -B*08:01
GLITKAEM

SEQ ID NO: 5274 - protein, 9 aa, Homo sapiens
  Table 1.2; MAGEA11; ENSG00000185247; HLA -A*02:01,HLA-A*02:03,HLA-A*02:04,HLA-A*02:07,HLA-B*08:01
GLITKAEML

SEQ ID NO: 5275 - protein, 9 aa, Homo sapiens
  Table 1.2; MAGEA11; ENSG00000185247; HLA -A*02:01,HLA-A*02:03,HLA-A*02:04,HLA-A*02:07,HLA-B*13:02
GLLIIVLGV

SEQ ID NO: 5276 - protein, 8 aa, Homo sapiens
  Table 1.2; MAGEA11; ENSG00000185247; HLA -B*15:01
GLQVSTMF

SEQ ID NO: 5277 - protein, 10 aa, Homo sapiens
  Table 1.2; MAGEA11; ENSG00000185247; HLA -B*55:01,HLA-B*56:01
GPITQIFPTV

SEQ ID NO: 5278 - protein, 10 aa, Homo sapiens
  Table 1.2; MAGEA11; ENSG00000185247; HLA -B*07:02
GPRAHAETSK

SEQ ID NO: 5279 - protein, 11 aa, Homo sapiens
  Table 1.2; MAGEA11; ENSG00000185247; HLA -B*07:02
GPRAHAETSKM

SEQ ID NO: 5280 - protein, 9 aa, Homo sapiens
  Table 1.2; MAGEA11; ENSG00000185247; HLA -B*27:05
GRDPTSYPS

SEQ ID NO: 5281 - protein, 10 aa, Homo sapiens
  Table 1.2; MAGEA11; ENSG00000185247; HLA -B*27:02,HLA-B*27:05,HLA-B*38:01,HLA-B*39:01
GRDPTSYPSL

SEQ ID NO: 5282 - protein, 11 aa, Homo sapiens
  Table 1.2; MAGEA11; ENSG00000185247; HLA -A*01:01
GRDPTSYPSLY

SEQ ID NO: 5283 - protein, 9 aa, Homo sapiens
  Table 1.2; MAGEA11; ENSG00000185247; HLA -A*01:01,HLA-A*32:01,HLA-B*57:01,HLA-B*58:01,HLA-C*05:01
GTDPACYEF

SEQ ID NO: 5284 - protein, 9 aa, Homo sapiens
  Table 1.2; MAGEA11; ENSG00000185247; HLA -A*02:01
GTLEELPAA

SEQ ID NO: 5285 - protein, 9 aa, Homo sapiens
  Table 1.2; MAGEA11; ENSG00000185247; HLA -A*32:01,HLA-B*15:01
GVYAGREHF

SEQ ID NO: 5286 - protein, 10 aa, Homo sapiens
  Table 1.2; MAGEA11; ENSG00000185247; HLA -A*02:01,HLA-A*02:03,HLA-A*02:04,HLA-A*03:01
GVYAGREHFL

SEQ ID NO: 5287 - protein, 11 aa, Homo sapiens
  Table 1.2; MAGEA11; ENSG00000185247; HLA -A*29:02
GVYAGREHFLF

SEQ ID NO: 5288 - protein, 8 aa, Homo sapiens
  Table 1.2; MAGEA11; ENSG00000185247; HLA -B*37:01,HLA-B*40:02
HDKIIDLV

SEQ ID NO: 5289 - protein, 9 aa, Homo sapiens
  Table 1.2; MAGEA11; ENSG00000185247; HLA -A*25:01,HLA-A*30:01,HLA-A*32:01,HLA-A*68:02,HLA-B*08:01, HLA-B*13:02,HLA-B*15:03,HLA-B*18:01,HLA-B*35:01,HLA-B*39:01, HLA-B*40:01,HLA-B*40:02,HLA-B*46:01,HLA-B*51:01,HLA-B*58:01,
  HLA-C*01:02,HLA-C*02:02,HLA-C*03:03,HLA-C*03:04,HLA-C*12:03
HSYVLVTSL

SEQ ID NO: 5290 - protein, 8 aa, Homo sapiens
  Table 1.2; MAGEA11; ENSG00000185247; HLA -B*37:01
IDLVHLLL

SEQ ID NO: 5291 - protein, 8 aa, Homo sapiens
  Table 1.2; MAGEA11; ENSG00000185247; HLA -A*02:07,HLA-C*05:01
IIDLVHLL

SEQ ID NO: 5292 - protein, 9 aa, Homo sapiens
  Table 1.2; MAGEA11; ENSG00000185247; HLA -A*01:01,HLA-A*02:07
IIDLVHLLL

SEQ ID NO: 5293 - protein, 9 aa, Homo sapiens
  Table 1.2; MAGEA11; ENSG00000185247; HLA -A*02:01,HLA-A*02:03,HLA-A*02:04,HLA-A*02:07,HLA-B*08:01
ILHDKIIDL

SEQ ID NO: 5294 - protein, 10 aa, Homo sapiens
  Table 1.2; MAGEA11; ENSG00000185247; HLA -A*02:01,HLA-A*02:03,HLA-A*02:04,HLA-A*02:07
ILHDKIIDLV

SEQ ID NO: 5295 - protein, 9 aa, Homo sapiens
  Table 1.2; MAGEA11; ENSG00000185247; HLA -B*35:03,HLA-B*54:01
IPEEVMWEV

SEQ ID NO: 5296 - protein, 10 aa, Homo sapiens
  Table 1.2; MAGEA11; ENSG00000185247; HLA -B*35:03
IPEEVMWEVL

SEQ ID NO: 5297 - protein, 10 aa, Homo sapiens
  Table 1.2; MAGEA11; ENSG00000185247; HLA -A*03:02,HLA-A*11:01,HLA-B*27:02
IQCNEQSMPK

SEQ ID NO: 5298 - protein, 9 aa, Homo sapiens
  Table 1.2; MAGEA11; ENSG00000185247; HLA -B*57:01,HLA-B*58:01
ITGGEQVLW

SEQ ID NO: 5299 - protein, 9 aa, Homo sapiens
  Table 1.2; MAGEA11; ENSG00000185247; HLA -A*11:01,HLA-A*31:01,HLA-A*33:01,HLA-A*33:03,HLA-A*68:01
ITQIFPTVR

SEQ ID NO: 5300 - protein, 10 aa, Homo sapiens
  Table 1.2; MAGEA11; ENSG00000185247; HLA -A*30:01,HLA-B*40:01
KEGPSTSPDL

SEQ ID NO: 5301 - protein, 11 aa, Homo sapiens
  Table 1.2; MAGEA11; ENSG00000185247; HLA -B*40:01,HLA-B*49:01
KEGPSTSPDLI

SEQ ID NO: 5302 - protein, 10 aa, Homo sapiens
  Table 1.2; MAGEA11; ENSG00000185247; HLA -A*25:01,HLA-A*26:01,HLA-A*29:02,HLA-A*30:01,HLA-A*30:02, HLA-A*32:01,HLA-B*15:01,HLA-B*15:03,HLA-B*18:01,HLA-B*27:02, HLA-B*27:05,HLA-B*37:01,HLA-B*40:01,HLA-B*44:02,HLA-B*44:03,
  HLA-B*49:01,HLA-B*58:01,HLA-C*02:02,HLA-C*16:01,HLA-C*16:02, HLA-C*16:04
KEVDPTSHSY

SEQ ID NO: 5303 - protein, 11 aa, Homo sapiens
  Table 1.2; MAGEA11; ENSG00000185247; HLA -B*40:01,HLA-B*49:01
KEVDPTSHSYV

SEQ ID NO: 5304 - protein, 8 aa, Homo sapiens
  Table 1.2; MAGEA11; ENSG00000185247; HLA -A*02:04,HLA-A*02:07
KIIDLVHL

SEQ ID NO: 5305 - protein, 9 aa, Homo sapiens
  Table 1.2; MAGEA11; ENSG00000185247; HLA -A*02:01,HLA-A*02:03,HLA-A*02:04,HLA-A*02:07,HLA-A*23:01, HLA-A*24:02,HLA-A*31:01,HLA-A*32:01,HLA-A*68:02,HLA-B*57:01, HLA-B*58:01
KIIDLVHLL

SEQ ID NO: 5306 - protein, 10 aa, Homo sapiens
  Table 1.2; MAGEA11; ENSG00000185247; HLA -A*02:01,HLA-A*02:04,HLA-A*02:07
KIIDLVHLLL

SEQ ID NO: 5307 - protein, 11 aa, Homo sapiens
  Table 1.2; MAGEA11; ENSG00000185247; HLA -A*31:01
KIIDLVHLLLR

SEQ ID NO: 5308 - protein, 9 aa, Homo sapiens
  Table 1.2; MAGEA11; ENSG00000185247; HLA -A*02:01,HLA-A*02:03,HLA-A*02:04,HLA-A*02:07,HLA-A*31:01, HLA-B*40:02,HLA-B*55:01,HLA-B*56:01
KVLEYIANA

SEQ ID NO: 5309 - protein, 10 aa, Homo sapiens
  Table 1.2; MAGEA11; ENSG00000185247; HLA -B*27:02
LEYIANANGR

SEQ ID NO: 5310 - protein, 9 aa, Homo sapiens
  Table 1.2; MAGEA11; ENSG00000185247; HLA -B*08:01,HLA-B*46:01,HLA-C*01:02,HLA-C*03:03,HLA-C*03:04, HLA-C*14:02
LGLVGAQAL

SEQ ID NO: 5311 - protein, 8 aa, Homo sapiens
  Table 1.2; MAGEA11; ENSG00000185247; HLA -C*12:03,HLA-C*16:01,HLA-C*16:02
LGSVIKNY

SEQ ID NO: 5312 - protein, 10 aa, Homo sapiens
  Table 1.2; MAGEA11; ENSG00000185247; HLA -A*02:01,HLA-A*02:03,HLA-A*02:04,HLA-A*02:07
LLFGIDVKEV

SEQ ID NO: 5313 - protein, 9 aa, Homo sapiens
  Table 1.2; MAGEA11; ENSG00000185247; HLA -B*55:01
LPAAESPSP

SEQ ID NO: 5314 - protein, 10 aa, Homo sapiens
  Table 1.2; MAGEA11; ENSG00000185247; HLA -B*15:01,HLA-C*07:04
LQAEEQEAAF

SEQ ID NO: 5315 - protein, 11 aa, Homo sapiens
  Table 1.2; MAGEA11; ENSG00000185247; HLA -B*27:05,HLA-B*38:01
LQAEEQEAAFF

SEQ ID NO: 5316 - protein, 10 aa, Homo sapiens
  Table 1.2; MAGEA11; ENSG00000185247; HLA -B*27:05
LQAQEEDLGL

SEQ ID NO: 5317 - protein, 10 aa, Homo sapiens
  Table 1.2; MAGEA11; ENSG00000185247; HLA -A*01:01
LSDEGSGSQE

SEQ ID NO: 5318 - protein, 11 aa, Homo sapiens
  Table 1.2; MAGEA11; ENSG00000185247; HLA -A*01:01
LSDEGSGSQEK

SEQ ID NO: 5319 - protein, 9 aa, Homo sapiens
  Table 1.2; MAGEA11; ENSG00000185247; HLA -A*03:02,HLA-A*11:01
LTQNWVQEK

SEQ ID NO: 5320 - protein, 10 aa, Homo sapiens
  Table 1.2; MAGEA11; ENSG00000185247; HLA -A*01:01,HLA-A*29:02,HLA-A*30:02,HLA-B*57:01,HLA-B*58:01
LTQNWVQEKY

SEQ ID NO: 5321 - protein, 9 aa, Homo sapiens
  Table 1.2; MAGEA11; ENSG00000185247; HLA -A*01:01,HLA-A*25:01,HLA-A*26:01,HLA-A*29:02,HLA-A*30:02, HLA-A*32:01,HLA-B*15:01,HLA-B*35:01,HLA-B*58:01,HLA-C*02:02, HLA-C*07:04
LVTSLNLSY

SEQ ID NO: 5322 - protein, 9 aa, Homo sapiens
  Table 1.2; MAGEA11; ENSG00000185247; HLA -A*23:01,HLA-A*24:02
LWGPITQIF

SEQ ID NO: 5323 - protein, 8 aa, Homo sapiens
  Table 1.2; MAGEA11; ENSG00000185247; HLA -A*30:01,HLA-B*18:01,HLA-B*37:01,HLA-B*40:02
MDAIFGSL

SEQ ID NO: 5324 - protein, 9 aa, Homo sapiens
  Table 1.2; MAGEA11; ENSG00000185247; HLA -A*03:01,HLA-A*03:02,HLA-A*29:02,HLA-A*30:02,HLA-A*32:01, HLA-B*44:02,HLA-B*44:03,HLA-C*07:04
MLGSVIKNY

SEQ ID NO: 5325 - protein, 8 aa, Homo sapiens
  Table 1.2; MAGEA11; ENSG00000185247; HLA -B*51:01
MPKSGLLI

SEQ ID NO: 5326 - protein, 9 aa, Homo sapiens
  Table 1.2; MAGEA11; ENSG00000185247; HLA -B*07:02,HLA-B*51:01,HLA-B*54:01,HLA-B*56:01
MPKSGLLII

SEQ ID NO: 5327 - protein, 10 aa, Homo sapiens
  Table 1.2; MAGEA11; ENSG00000185247; HLA -B*51:01,HLA-B*54:01,HLA-B*56:01
MPKSGLLIIV

SEQ ID NO: 5328 - protein, 11 aa, Homo sapiens
  Table 1.2; MAGEA11; ENSG00000185247; HLA -B*54:01
MPKSGLLIIVL

SEQ ID NO: 5329 - protein, 10 aa, Homo sapiens
  Table 1.2; MAGEA11; ENSG00000185247; HLA -B*54:01
MPLEQRSQHC

SEQ ID NO: 5330 - protein, 9 aa, Homo sapiens
  Table 1.2; MAGEA11; ENSG00000185247; HLA -B*13:02
MQLLFGIDV

SEQ ID NO: 5331 - protein, 10 aa, Homo sapiens
  Table 1.2; MAGEA11; ENSG00000185247; HLA -A*25:01,HLA-A*30:02,HLA-B*35:01
NANGRDPTSY

SEQ ID NO: 5332 - protein, 10 aa, Homo sapiens
  Table 1.2; MAGEA11; ENSG00000185247; HLA -B*40:01
NEQSMPKSGL

SEQ ID NO: 5333 - protein, 10 aa, Homo sapiens
  Table 1.2; MAGEA11; ENSG00000185247; HLA -A*33:01
NGRDPTSYPS

SEQ ID NO: 5334 - protein, 10 aa, Homo sapiens
  Table 1.2; MAGEA11; ENSG00000185247; HLA -A*29:02
NWVQEKYLVY

SEQ ID NO: 5335 - protein, 9 aa, Homo sapiens
  Table 1.2; MAGEA11; ENSG00000185247; HLA -A*23:01,HLA-A*24:02
NYEDYFPEI

SEQ ID NO: 5336 - protein, 10 aa, Homo sapiens
  Table 1.2; MAGEA11; ENSG00000185247; HLA -A*24:02
NYEDYFPEIF

SEQ ID NO: 5337 - protein, 8 aa, Homo sapiens
  Table 1.2; MAGEA11; ENSG00000185247; HLA -B*51:01
PADLTRVI

SEQ ID NO: 5338 - protein, 9 aa, Homo sapiens
  Table 1.2; MAGEA11; ENSG00000185247; HLA -B*37:01
PDLIDPESF

SEQ ID NO: 5339 - protein, 9 aa, Homo sapiens
  Table 1.2; MAGEA11; ENSG00000185247; HLA -B*37:01,HLA-B*40:02,HLA-B*49:01
PEIFREASV

SEQ ID NO: 5340 - protein, 9 aa, Homo sapiens
  Table 1.2; MAGEA11; ENSG00000185247; HLA -B*15:01
PQSPQEESF

SEQ ID NO: 5341 - protein, 8 aa, Homo sapiens
  Table 1.2; MAGEA11; ENSG00000185247; HLA -A*01:01
PTSYPSLY

SEQ ID NO: 5342 - protein, 8 aa, Homo sapiens
  Table 1.2; MAGEA11; ENSG00000185247; HLA -A*24:02
PYGPQLQW

SEQ ID NO: 5343 - protein, 9 aa, Homo sapiens
  Table 1.2; MAGEA11; ENSG00000185247; HLA -B*35:01,HLA-B*35:03,HLA-B*38:01,HLA-B*39:01,HLA-B*55:01, HLA-C*03:03,HLA-C*05:01
QAEEQEAAF

SEQ ID NO: 5344 - protein, 10 aa, Homo sapiens
  Table 1.2; MAGEA11; ENSG00000185247; HLA -B*27:02,HLA-B*38:01,HLA-C*05:01
QAEEQEAAFF

SEQ ID NO: 5345 - protein, 9 aa, Homo sapiens
  Table 1.2; MAGEA11; ENSG00000185247; HLA -B*35:03
QAQEEDLGL

SEQ ID NO: 5346 - protein, 9 aa, Homo sapiens
  Table 1.2; MAGEA11; ENSG00000185247; HLA -A*03:01,HLA-A*03:02,HLA-A*11:01
QCNEQSMPK

SEQ ID NO: 5347 - protein, 8 aa, Homo sapiens
  Table 1.2; MAGEA11; ENSG00000185247; HLA -B*37:01
QDLPRVQV

SEQ ID NO: 5348 - protein, 9 aa, Homo sapiens
  Table 1.2; MAGEA11; ENSG00000185247; HLA -A*23:01,HLA-A*24:02,HLA-A*30:01,HLA-A*32:01,HLA-B*08:01, HLA-B*15:03,HLA-B*18:01,HLA-B*37:01,HLA-B*40:02,HLA-B*44:02, HLA-B*44:03,HLA-B*57:01,HLA-C*07:01,HLA-C*12:03,HLA-C*16:04
QDLPRVQVF

SEQ ID NO: 5349 - protein, 10 aa, Homo sapiens
  Table 1.2; MAGEA11; ENSG00000185247; HLA -A*31:01
QDLPRVQVFR

SEQ ID NO: 5350 - protein, 9 aa, Homo sapiens
  Table 1.2; MAGEA11; ENSG00000185247; HLA -A*30:01,HLA-B*18:01,HLA-B*49:01
QEAAFFSST

SEQ ID NO: 5351 - protein, 10 aa, Homo sapiens
  Table 1.2; MAGEA11; ENSG00000185247; HLA -A*30:01,HLA-B*18:01,HLA-B*40:01,HLA-B*40:02,HLA-B*44:02, HLA-B*44:03,HLA-B*49:01
QEAAFFSSTL

SEQ ID NO: 5352 - protein, 10 aa, Homo sapiens
  Table 1.2; MAGEA11; ENSG00000185247; HLA -A*30:01,HLA-B*49:01
QEEDLGLVGA

SEQ ID NO: 5353 - protein, 9 aa, Homo sapiens
  Table 1.2; MAGEA11; ENSG00000185247; HLA -B*49:01
QEESFSPTA

SEQ ID NO: 5354 - protein, 10 aa, Homo sapiens
  Table 1.2; MAGEA11; ENSG00000185247; HLA -A*30:01,HLA-B*18:01,HLA-B*40:01
QEESFSPTAM

SEQ ID NO: 5355 - protein, 9 aa, Homo sapiens
  Table 1.2; MAGEA11; ENSG00000185247; HLA -B*38:01
QHCKPEEGL

SEQ ID NO: 5356 - protein, 9 aa, Homo sapiens
  Table 1.2; MAGEA11; ENSG00000185247; HLA -A*02:03
QIFPTVRPA

SEQ ID NO: 5357 - protein, 9 aa, Homo sapiens
  Table 1.2; MAGEA11; ENSG00000185247; HLA -B*38:01,HLA-B*39:01
QRITGGEQV

SEQ ID NO: 5358 - protein, 10 aa, Homo sapiens
  Table 1.2; MAGEA11; ENSG00000185247; HLA -B*38:01,HLA-B*39:01
QRITGGEQVL

SEQ ID NO: 5359 - protein, 8 aa, Homo sapiens
  Table 1.2; MAGEA11; ENSG00000185247; HLA -B*08:01
QSMPKSGL

SEQ ID NO: 5360 - protein, 10 aa, Homo sapiens
  Table 1.2; MAGEA11; ENSG00000185247; HLA -A*25:01,HLA-A*26:01,HLA-A*29:02,HLA-A*30:02,HLA-C*07:04
QVPGTDPACY

SEQ ID NO: 5361 - protein, 8 aa, Homo sapiens
  Table 1.2; MAGEA11; ENSG00000185247; HLA -C*01:02
RAPYGPQL

SEQ ID NO: 5362 - protein, 10 aa, Homo sapiens
  Table 1.2; MAGEA11; ENSG00000185247; HLA -A*24:02,HLA-B*57:01,HLA-B*58:01
RAPYGPQLQW

SEQ ID NO: 5363 - protein, 9 aa, Homo sapiens
  Table 1.2; MAGEA11; ENSG00000185247; HLA -B*37:01
RDPTSYPSL

SEQ ID NO: 5364 - protein, 9 aa, Homo sapiens
  Table 1.2; MAGEA11; ENSG00000185247; HLA -A*30:01,HLA-B*40:01
REASVCMQL

SEQ ID NO: 5365 - protein, 9 aa, Homo sapiens
  Table 1.2; MAGEA11; ENSG00000185247; HLA -B*37:01,HLA-B*38:01,HLA-B*40:01
REDSGDFGL

SEQ ID NO: 5366 - protein, 11 aa, Homo sapiens
  Table 1.2; MAGEA11; ENSG00000185247; HLA -B*49:01
REDSGDFGLQV

SEQ ID NO: 5367 - protein, 10 aa, Homo sapiens
  Table 1.2; MAGEA11; ENSG00000185247; HLA -B*57:01,HLA-B*58:01
RITGGEQVLW

SEQ ID NO: 5368 - protein, 9 aa, Homo sapiens
  Table 1.2; MAGEA11; ENSG00000185247; HLA -B*07:02,HLA-B*51:01,HLA-B*56:01,HLA-C*07:02
RPADLTRVI

SEQ ID NO: 5369 - protein, 10 aa, Homo sapiens
  Table 1.2; MAGEA11; ENSG00000185247; HLA -B*07:02
RPADLTRVIM

SEQ ID NO: 5370 - protein, 11 aa, Homo sapiens
  Table 1.2; MAGEA11; ENSG00000185247; HLA -A*30:02,HLA-A*32:01,HLA-B*15:01,HLA-B*15:03
RQVPGTDPACY

SEQ ID NO: 5371 - protein, 9 aa, Homo sapiens
  Table 1.2; MAGEA11; ENSG00000185247; HLA -A*03:01,HLA-A*03:02,HLA-A*11:01,HLA-A*31:01,HLA-A*33:01, HLA-A*33:03,HLA-A*68:01,HLA-B*57:01
RVIMPLEQR

SEQ ID NO: 5372 - protein, 8 aa, Homo sapiens
  Table 1.2; MAGEA11; ENSG00000185247; HLA -A*03:01
RVKGLITK

SEQ ID NO: 5373 - protein, 9 aa, Homo sapiens
  Table 1.2; MAGEA11; ENSG00000185247; HLA -A*02:03
RVKGLITKA

SEQ ID NO: 5374 - protein, 8 aa, Homo sapiens
  Table 1.2; MAGEA11; ENSG00000185247; HLA -C*05:01
SGDFGLQV

SEQ ID NO: 5375 - protein, 10 aa, Homo sapiens
  Table 1.2; MAGEA11; ENSG00000185247; HLA -B*38:01
SHSYVLVTSL

SEQ ID NO: 5376 - protein, 9 aa, Homo sapiens
  Table 1.2; MAGEA11; ENSG00000185247; HLA -A*03:02,HLA-A*11:01,HLA-A*31:01,HLA-A*33:01,HLA-A*33:03, HLA-A*68:01,HLA-C*07:06
SIMGVYAGR

SEQ ID NO: 5377 - protein, 8 aa, Homo sapiens
  Table 1.2; MAGEA11; ENSG00000185247; HLA -B*15:03
SKMKVLEY

SEQ ID NO: 5378 - protein, 11 aa, Homo sapiens
  Table 1.2; MAGEA11; ENSG00000185247; HLA -A*02:07
SMPKSGLLIIV

SEQ ID NO: 5379 - protein, 10 aa, Homo sapiens
  Table 1.2; MAGEA11; ENSG00000185247; HLA -B*35:01,HLA-B*35:03,HLA-B*55:01
SPDLIDPESF

SEQ ID NO: 5380 - protein, 11 aa, Homo sapiens
  Table 1.2; MAGEA11; ENSG00000185247; HLA -B*56:01
SPQEESFSPTA

SEQ ID NO: 5381 - protein, 8 aa, Homo sapiens
  Table 1.2; MAGEA11; ENSG00000185247; HLA -B*56:01
SPTAMDAI

SEQ ID NO: 5382 - protein, 9 aa, Homo sapiens
  Table 1.2; MAGEA11; ENSG00000185247; HLA -B*07:02,HLA-B*35:01,HLA-B*35:03,HLA-B*55:01
SPTAMDAIF

SEQ ID NO: 5383 - protein, 9 aa, Homo sapiens
  Table 1.2; MAGEA11; ENSG00000185247; HLA -B*13:02,HLA-B*38:01
SQDILHDKI

SEQ ID NO: 5384 - protein, 9 aa, Homo sapiens
  Table 1.2; MAGEA11; ENSG00000185247; HLA -A*02:01,HLA-A*02:07,HLA-B*13:02,HLA-B*38:01,HLA-B*39:01, HLA-C*04:01,HLA-C*05:01
SQDLPRVQV

SEQ ID NO: 5385 - protein, 10 aa, Homo sapiens
  Table 1.2; MAGEA11; ENSG00000185247; HLA -B*15:01,HLA-B*15:03,HLA-B*37:01,HLA-B*38:01,HLA-B*44:02
SQDLPRVQVF

SEQ ID NO: 5386 - protein, 11 aa, Homo sapiens
  Table 1.2; MAGEA11; ENSG00000185247; HLA -A*68:02
STLNVGTLEEL

SEQ ID NO: 5387 - protein, 9 aa, Homo sapiens
  Table 1.2; MAGEA11; ENSG00000185247; HLA -A*25:01,HLA-A*26:01,HLA-A*29:02,HLA-A*30:02,HLA-A*32:01, HLA-B*15:01,HLA-B*35:01,HLA-B*46:01,HLA-B*58:01
SVIKNYEDY

SEQ ID NO: 5388 - protein, 8 aa, Homo sapiens
  Table 1.2; MAGEA11; ENSG00000185247; HLA -A*23:01,HLA-A*24:02,HLA-B*15:03,HLA-C*14:02
SYVLVTSL

SEQ ID NO: 5389 - protein, 10 aa, Homo sapiens
  Table 1.2; MAGEA11; ENSG00000185247; HLA -A*23:01,HLA-A*24:02
SYVLVTSLNL

SEQ ID NO: 5390 - protein, 10 aa, Homo sapiens
  Table 1.2; MAGEA11; ENSG00000185247; HLA -A*23:01,HLA-A*25:01,HLA-A*26:01,HLA-A*30:01,HLA-A*68:01, HLA-A*68:02,HLA-B*27:02,HLA-B*35:01,HLA-B*35:03,HLA-B*38:01, HLA-B*39:01,HLA-B*40:01,HLA-B*46:01,HLA-B*58:01,HLA-C*02:02,
  HLA-C*03:03,HLA-C*03:04,HLA-C*16:04
TAMDAIFGSL

SEQ ID NO: 5391 - protein, 10 aa, Homo sapiens
  Table 1.2; MAGEA11; ENSG00000185247; HLA -A*30:01,HLA-B*40:01,HLA-B*40:02
TERAPYGPQL

SEQ ID NO: 5392 - protein, 9 aa, Homo sapiens
  Table 1.2; MAGEA11; ENSG00000185247; HLA -A*29:02,HLA-A*30:02,HLA-A*32:01,HLA-B*15:01,HLA-B*15:03, HLA-C*16:04
TQNWVQEKY

SEQ ID NO: 5393 - protein, 9 aa, Homo sapiens
  Table 1.2; MAGEA11; ENSG00000185247; HLA -C*06:02
TRVIMPLEQ

SEQ ID NO: 5394 - protein, 9 aa, Homo sapiens
  Table 1.2; MAGEA11; ENSG00000185247; HLA -A*32:01,HLA-B*08:01,HLA-B*46:01,HLA-C*07:01,HLA-C*12:03, HLA-C*16:01,HLA-C*16:02
TSKMKVLEY

SEQ ID NO: 5395 - protein, 9 aa, Homo sapiens
  Table 1.2; MAGEA11; ENSG00000185247; HLA -A*31:01,HLA-A*33:03
TVRPADLTR

SEQ ID NO: 5396 - protein, 8 aa, Homo sapiens
  Table 1.2; MAGEA11; ENSG00000185247; HLA -A*30:02,HLA-B*37:01,HLA-C*01:02,HLA-C*07:01
VDPTSHSY

SEQ ID NO: 5397 - protein, 9 aa, Homo sapiens
  Table 1.2; MAGEA11; ENSG00000185247; HLA -A*23:01,HLA-A*24:02
VIKNYEDYF

SEQ ID NO: 5398 - protein, 8 aa, Homo sapiens
  Table 1.2; MAGEA11; ENSG00000185247; HLA -A*31:01
VIMPLEQR

SEQ ID NO: 5399 - protein, 11 aa, Homo sapiens
  Table 1.2; MAGEA11; ENSG00000185247; HLA -B*15:03
VKEVDPTSHSY

SEQ ID NO: 5400 - protein, 8 aa, Homo sapiens
  Table 1.2; MAGEA11; ENSG00000185247; HLA -A*30:02,HLA-B*15:01,HLA-B*15:03,HLA-B*39:01
VLSIMGVY

SEQ ID NO: 5401 - protein, 8 aa, Homo sapiens
  Table 1.2; MAGEA11; ENSG00000185247; HLA -A*23:01
VLVTSLNL

SEQ ID NO: 5402 - protein, 10 aa, Homo sapiens
  Table 1.2; MAGEA11; ENSG00000185247; HLA -A*01:01,HLA-A*29:02,HLA-A*30:02,HLA-B*15:01,HLA-B*15:03, HLA-B*46:01
VLVTSLNLSY

SEQ ID NO: 5403 - protein, 9 aa, Homo sapiens
  Table 1.2; MAGEA11; ENSG00000185247; HLA -A*02:01,HLA-A*02:03,HLA-A*02:04,HLA-A*02:07,HLA-A*23:01, HLA-B*13:02,HLA-B*55:01
VLWGPITQI

SEQ ID NO: 5404 - protein, 8 aa, Homo sapiens
  Table 1.2; MAGEA11; ENSG00000185247; HLA -B*51:01
VMWEVLSI

SEQ ID NO: 5405 - protein, 11 aa, Homo sapiens
  Table 1.2; MAGEA11; ENSG00000185247; HLA -A*02:01,HLA-A*02:07
VMWEVLSIMGV

SEQ ID NO: 5406 - protein, 8 aa, Homo sapiens
  Table 1.2; MAGEA11; ENSG00000185247; HLA -B*55:01
VPGTDPAC

SEQ ID NO: 5407 - protein, 9 aa, Homo sapiens
  Table 1.2; MAGEA11; ENSG00000185247; HLA -B*35:01,HLA-B*55:01
VPGTDPACY

SEQ ID NO: 5408 - protein, 8 aa, Homo sapiens
  Table 1.2; MAGEA11; ENSG00000185247; HLA -B*15:01,HLA-B*15:03
VQEKYLVY

SEQ ID NO: 5409 - protein, 9 aa, Homo sapiens
  Table 1.2; MAGEA11; ENSG00000185247; HLA -A*31:01
VQEKYLVYR

SEQ ID NO: 5410 - protein, 8 aa, Homo sapiens
  Table 1.2; MAGEA11; ENSG00000185247; HLA -A*01:01
VTSLNLSY

SEQ ID NO: 5411 - protein, 9 aa, Homo sapiens
  Table 1.2; MAGEA11; ENSG00000185247; HLA -A*23:01,HLA-A*24:02
VYAGREHFL

SEQ ID NO: 5412 - protein, 10 aa, Homo sapiens
  Table 1.2; MAGEA11; ENSG00000185247; HLA -A*24:02
VYAGREHFLF

SEQ ID NO: 5413 - protein, 9 aa, Homo sapiens
  Table 1.2; MAGEA11; ENSG00000185247; HLA -B*49:01
WEVLSIMGV

SEQ ID NO: 5414 - protein, 9 aa, Homo sapiens
  Table 1.2; MAGEA11; ENSG00000185247; HLA -A*03:01,HLA-A*25:01,HLA-A*26:01,HLA-A*29:02,HLA-A*30:02, HLA-B*15:01,HLA-B*35:01
WVQEKYLVY

SEQ ID NO: 5415 - protein, 10 aa, Homo sapiens
  Table 1.2; MAGEA11; ENSG00000185247; HLA -A*31:01,HLA-A*33:01
WVQEKYLVYR

SEQ ID NO: 5416 - protein, 8 aa, Homo sapiens
  Table 1.2; MAGEA11; ENSG00000185247; HLA -B*49:01
YEDYFPEI

SEQ ID NO: 5417 - protein, 9 aa, Homo sapiens
  Table 1.2; MAGEA11; ENSG00000185247; HLA -B*18:01
YEDYFPEIF

SEQ ID NO: 5418 - protein, 9 aa, Homo sapiens
  Table 1.2; MAGEA11; ENSG00000185247; HLA -A*02:04
YEFLWGPRA

SEQ ID NO: 5419 - protein, 9 aa, Homo sapiens
  Table 1.2; MAGEA11; ENSG00000185247; HLA -A*02:07,HLA-A*29:02,HLA-B*54:01
YFPEIFREA

SEQ ID NO: 5420 - protein, 9 aa, Homo sapiens
  Table 1.2; MAGEA11; ENSG00000185247; HLA -B*27:05,HLA-B*35:01,HLA-B*35:03,HLA-B*38:01,HLA-B*39:01, HLA-B*55:01,HLA-C*03:03
YPSLYEDAL

SEQ ID NO: 5421 - protein, 9 aa, Homo sapiens
  Table 1.2; MAGEA11; ENSG00000185247; HLA -B*27:05
YRVKGLITK

SEQ ID NO: 5422 - protein, 9 aa, Homo sapiens
  Table 1.2; MAGEA11; ENSG00000185247; HLA -A*02:01,HLA-A*02:04,HLA-A*02:07,HLA-A*23:01,HLA-A*24:02, HLA-B*13:02,HLA-C*03:04
YVLVTSLNL

SEQ ID NO: 5423 - protein, 11 aa, Homo sapiens
  Table 1.2; MAGEA11; ENSG00000185247; HLA -A*01:01,HLA-A*29:02,HLA-A*30:02
YVLVTSLNLSY

SEQ ID NO: 5424 - protein, 9 aa, Homo sapiens
  Table 1.2; MAGEA3; ENSG00000221867; HLA -C*16:01
AALSRKVAE

SEQ ID NO: 5425 - protein, 8 aa, Homo sapiens
  Table 1.2; MAGEA3; ENSG00000221867; HLA -C*03:03,HLA-C*03:04,HLA-C*05:01
AASSSSTL

SEQ ID NO: 5426 - protein, 9 aa, Homo sapiens
  Table 1.2; MAGEA3; ENSG00000221867; HLA -B*13:02
AASSSSTLV

SEQ ID NO: 5427 - protein, 8 aa, Homo sapiens
  Table 1.2; MAGEA3; ENSG00000221867; HLA -B*37:01,HLA-B*44:02,HLA-B*44:03
AELVHFLL

SEQ ID NO: 5428 - protein, 9 aa, Homo sapiens
  Table 1.2; MAGEA3; ENSG00000221867; HLA -A*30:01,HLA-B*37:01,HLA-B*44:02,HLA-B*44:03,HLA-B*49:01
AELVHFLLL

SEQ ID NO: 5429 - protein, 11 aa, Homo sapiens
  Table 1.2; MAGEA3; ENSG00000221867; HLA -B*44:02,HLA-B*44:03
AELVHFLLLKY

SEQ ID NO: 5430 - protein, 8 aa, Homo sapiens
  Table 1.2; MAGEA3; ENSG00000221867; HLA -A*30:01,HLA-B*13:02,HLA-B*18:01,HLA-B*37:01,HLA-B*40:01, HLA-B*40:02,HLA-B*44:02,HLA-B*44:03,HLA-B*49:01
AEMLGSVV

SEQ ID NO: 5431 - protein, 9 aa, Homo sapiens
  Table 1.2; MAGEA3; ENSG00000221867; HLA -B*40:01,HLA-B*40:02,HLA-B*49:01
AEMLGSVVG

SEQ ID NO: 5432 - protein, 10 aa, Homo sapiens
  Table 1.2; MAGEA3; ENSG00000221867; HLA -B*44:02,HLA-B*49:01
AEMLGSVVGN

SEQ ID NO: 5433 - protein, 11 aa, Homo sapiens
  Table 1.2; MAGEA3; ENSG00000221867; HLA -A*30:01,HLA-A*32:01,HLA-B*27:02,HLA-B*37:01,HLA-B*40:01, HLA-B*44:02,HLA-B*44:03,HLA-B*49:01,HLA-B*57:01,HLA-C*16:04
AEMLGSVVGNW

SEQ ID NO: 5434 - protein, 10 aa, Homo sapiens
  Table 1.2; MAGEA3; ENSG00000221867; HLA -A*30:01,HLA-B*40:02,HLA-B*49:01
AESPDPPQSP

SEQ ID NO: 5435 - protein, 9 aa, Homo sapiens
  Table 1.2; MAGEA3; ENSG00000221867; HLA -A*02:01,HLA-A*02:03,HLA-B*55:01,HLA-B*56:01
ALGLVGAQA

SEQ ID NO: 5436 - protein, 11 aa, Homo sapiens
  Table 1.2; MAGEA3; ENSG00000221867; HLA -B*56:01
ALGLVGAQAPA

SEQ ID NO: 5437 - protein, 9 aa, Homo sapiens
  Table 1.2; MAGEA3; ENSG00000221867; HLA -A*02:01,HLA-A*02:03,HLA-A*02:04,HLA-A*02:07,HLA-B*08:01
ALSRKVAEL

SEQ ID NO: 5438 - protein, 8 aa, Homo sapiens
  Table 1.2; MAGEA3; ENSG00000221867; HLA -A*02:01,HLA-A*02:03,HLA-B*13:02,HLA-B*49:01,HLA-B*55:01
ALVETSYV

SEQ ID NO: 5439 - protein, 9 aa, Homo sapiens
  Table 1.2; MAGEA3; ENSG00000221867; HLA -A*03:01,HLA-A*03:02,HLA-A*11:01,HLA-B*27:02
ALVETSYVK

SEQ ID NO: 5440 - protein, 10 aa, Homo sapiens
  Table 1.2; MAGEA3; ENSG00000221867; HLA -A*02:01,HLA-A*02:03,HLA-A*02:04,HLA-A*02:07
ALVETSYVKV

SEQ ID NO: 5441 - protein, 11 aa, Homo sapiens
  Table 1.2; MAGEA3; ENSG00000221867; HLA -A*02:01,HLA-A*02:03,HLA-A*02:04,HLA-A*02:07
ALVETSYVKVL

SEQ ID NO: 5442 - protein, 9 aa, Homo sapiens
  Table 1.2; MAGEA3; ENSG00000221867; HLA -B*55:01,HLA-B*56:01
APATEEQEA

SEQ ID NO: 5443 - protein, 10 aa, Homo sapiens
  Table 1.2; MAGEA3; ENSG00000221867; HLA -B*55:01,HLA-B*56:01
APATEEQEAA

SEQ ID NO: 5444 - protein, 9 aa, Homo sapiens
  Table 1.2; MAGEA3; ENSG00000221867; HLA -B*15:01
AQAPATEEQ

SEQ ID NO: 5445 - protein, 11 aa, Homo sapiens
  Table 1.2; MAGEA3; ENSG00000221867; HLA -B*13:02,HLA-B*27:05,HLA-B*39:01
AQAPATEEQEA

SEQ ID NO: 5446 - protein, 10 aa, Homo sapiens
  Table 1.2; MAGEA3; ENSG00000221867; HLA -B*27:02,HLA-B*27:05,HLA-B*38:01
AREPVTKAEM

SEQ ID NO: 5447 - protein, 8 aa, Homo sapiens
  Table 1.2; MAGEA3; ENSG00000221867; HLA -B*37:01
ASSLPTTM

SEQ ID NO: 5448 - protein, 10 aa, Homo sapiens
  Table 1.2; MAGEA3; ENSG00000221867; HLA -A*01:01,HLA-A*03:01,HLA-A*11:01,HLA-A*29:02,HLA-A*30:02, HLA-A*32:01,HLA-B*15:01,HLA-B*46:01,HLA-B*58:01,HLA-C*16:02
ASSLPTTMNY

SEQ ID NO: 5449 - protein, 9 aa, Homo sapiens
  Table 1.2; MAGEA3; ENSG00000221867; HLA -A*01:01,HLA-A*03:01,HLA-A*11:01,HLA-A*23:01,HLA-A*24:02, HLA-A*29:02,HLA-A*30:02,HLA-A*32:01,HLA-B*15:01,HLA-B*15:03, HLA-B*27:02,HLA-B*44:02,HLA-B*44:03,HLA-B*57:01,HLA-B*58:01,
  HLA-C*02:02,HLA-C*12:03,HLA-C*16:01,HLA-C*16:04
ASSSLQLVF

SEQ ID NO: 5450 - protein, 8 aa, Homo sapiens
  Table 1.2; MAGEA3; ENSG00000221867; HLA -A*01:01
ATCLGLSY

SEQ ID NO: 5451 - protein, 9 aa, Homo sapiens
  Table 1.2; MAGEA3; ENSG00000221867; HLA -B*38:01,HLA-B*51:01
DGLLGDNQI

SEQ ID NO: 5452 - protein, 10 aa, Homo sapiens
  Table 1.2; MAGEA3; ENSG00000221867; HLA -B*35:03
DGLLGDNQIM

SEQ ID NO: 5453 - protein, 8 aa, Homo sapiens
  Table 1.2; MAGEA3; ENSG00000221867; HLA -B*08:01,HLA-B*51:01
DPIGHLYI

SEQ ID NO: 5454 - protein, 9 aa, Homo sapiens
  Table 1.2; MAGEA3; ENSG00000221867; HLA -B*35:01,HLA-B*35:03,HLA-B*51:01
DPIGHLYIF

SEQ ID NO: 5455 - protein, 10 aa, Homo sapiens
  Table 1.2; MAGEA3; ENSG00000221867; HLA -B*54:01
DPIGHLYIFA

SEQ ID NO: 5456 - protein, 8 aa, Homo sapiens
  Table 1.2; MAGEA3; ENSG00000221867; HLA -B*51:01
DPPQSPQG

SEQ ID NO: 5457 - protein, 8 aa, Homo sapiens
  Table 1.2; MAGEA3; ENSG00000221867; HLA -B*27:02
DSILGDPK

SEQ ID NO: 5458 - protein, 9 aa, Homo sapiens
  Table 1.2; MAGEA3; ENSG00000221867; HLA -A*25:01,HLA-A*26:01,HLA-A*33:03,HLA-A*68:01,HLA-B*07:02, HLA-B*35:01,HLA-B*35:03,HLA-B*39:01,HLA-B*51:01,HLA-C*01:02, HLA-C*03:03,HLA-C*03:04,HLA-C*05:01
EAASSSSTL

SEQ ID NO: 5459 - protein, 8 aa, Homo sapiens
  Table 1.2; MAGEA3; ENSG00000221867; HLA -B*54:01
EALGLVGA

SEQ ID NO: 5460 - protein, 9 aa, Homo sapiens
  Table 1.2; MAGEA3; ENSG00000221867; HLA -A*26:01,HLA-A*33:01,HLA-A*33:03,HLA-B*27:05,HLA-C*07:01, HLA-C*12:03
EALGLVGAQ

SEQ ID NO: 5461 - protein, 10 aa, Homo sapiens
  Table 1.2; MAGEA3; ENSG00000221867; HLA -A*26:01,HLA-A*33:03,HLA-A*68:01,HLA-B*54:01
EALGLVGAQA

SEQ ID NO: 5462 - protein, 9 aa, Homo sapiens
  Table 1.2; MAGEA3; ENSG00000221867; HLA -A*25:01,HLA-A*26:01,HLA-A*33:03,HLA-A*68:01
EARGEALGL

SEQ ID NO: 5463 - protein, 9 aa, Homo sapiens
  Table 1.2; MAGEA3; ENSG00000221867; HLA -B*27:02
EDSILGDPK

SEQ ID NO: 5464 - protein, 8 aa, Homo sapiens
  Table 1.2; MAGEA3; ENSG00000221867; HLA -B*18:01
EEEGPSTF

SEQ ID NO: 5465 - protein, 11 aa, Homo sapiens
  Table 1.2; MAGEA3; ENSG00000221867; HLA -B*39:01,HLA-B*40:01
EEEGPSTFPDL

SEQ ID NO: 5466 - protein, 11 aa, Homo sapiens
  Table 1.2; MAGEA3; ENSG00000221867; HLA -B*40:01
EEGLEARGEAL

SEQ ID NO: 5467 - protein, 10 aa, Homo sapiens
  Table 1.2; MAGEA3; ENSG00000221867; HLA -A*30:01,HLA-B*40:01,HLA-B*40:02,HLA-B*44:02,HLA-B*44:03
EEGPSTFPDL

SEQ ID NO: 5468 - protein, 8 aa, Homo sapiens
  Table 1.2; MAGEA3; ENSG00000221867; HLA -B*18:01,HLA-B*49:01,HLA-B*51:01
EELSVLEV

SEQ ID NO: 5469 - protein, 9 aa, Homo sapiens
  Table 1.2; MAGEA3; ENSG00000221867; HLA -A*23:01,HLA-A*30:01,HLA-B*18:01,HLA-B*40:01,HLA-B*44:02, HLA-B*44:03,HLA-C*16:04
EELSVLEVF

SEQ ID NO: 5470 - protein, 8 aa, Homo sapiens
  Table 1.2; MAGEA3; ENSG00000221867; HLA -A*33:01,HLA-A*33:03
EFQAALSR

SEQ ID NO: 5471 - protein, 9 aa, Homo sapiens
  Table 1.2; MAGEA3; ENSG00000221867; HLA -A*33:03
EFQAALSRK

SEQ ID NO: 5472 - protein, 10 aa, Homo sapiens
  Table 1.2; MAGEA3; ENSG00000221867; HLA -A*25:01,HLA-A*26:01,HLA-A*68:01
ELMEVDPIGH

SEQ ID NO: 5473 - protein, 11 aa, Homo sapiens
  Table 1.2; MAGEA3; ENSG00000221867; HLA -A*02:07,HLA-A*25:01,HLA-A*26:01,HLA-A*68:02
ELMEVDPIGHL

SEQ ID NO: 5474 - protein, 10 aa, Homo sapiens
  Table 1.2; MAGEA3; ENSG00000221867; HLA -A*26:01,HLA-A*29:02
ELVHFLLLKY

SEQ ID NO: 5475 - protein, 10 aa, Homo sapiens
  Table 1.2; MAGEA3; ENSG00000221867; HLA -A*25:01,HLA-A*26:01,HLA-A*33:01,HLA-A*33:03,HLA-B*44:02, HLA-B*44:03,HLA-B*57:01
EMLGSVVGNW

SEQ ID NO: 5476 - protein, 8 aa, Homo sapiens
  Table 1.2; MAGEA3; ENSG00000221867; HLA -B*07:02,HLA-B*08:01,HLA-B*35:01,HLA-B*35:03,HLA-B*55:01, HLA-C*07:02
EPVTKAEM

SEQ ID NO: 5477 - protein, 9 aa, Homo sapiens
  Table 1.2; MAGEA3; ENSG00000221867; HLA -A*68:01,HLA-B*07:02,HLA-B*08:01,HLA-B*35:01,HLA-B*35:03, HLA-C*07:02
EPVTKAEML

SEQ ID NO: 5478 - protein, 11 aa, Homo sapiens
  Table 1.2; MAGEA3; ENSG00000221867; HLA -B*38:01,HLA-B*39:01
EQEAASSSSTL

SEQ ID NO: 5479 - protein, 10 aa, Homo sapiens
  Table 1.2; MAGEA3; ENSG00000221867; HLA -A*68:01
ESEFQAALSR

SEQ ID NO: 5480 - protein, 11 aa, Homo sapiens
  Table 1.2; MAGEA3; ENSG00000221867; HLA -A*01:01,HLA-A*68:01
ESEFQAALSRK

SEQ ID NO: 5481 - protein, 9 aa, Homo sapiens
  Table 1.2; MAGEA3; ENSG00000221867; HLA -A*33:01,HLA-A*33:03,HLA-A*68:01,HLA-A*68:02
ETSYVKVLH

SEQ ID NO: 5482 - protein, 8 aa, Homo sapiens
  Table 1.2; MAGEA3; ENSG00000221867; HLA -A*25:01,HLA-A*26:01,HLA-C*04:01,HLA-C*05:01
EVDPIGHL

SEQ ID NO: 5483 - protein, 9 aa, Homo sapiens
  Table 1.2; MAGEA3; ENSG00000221867; HLA -A*01:01,HLA-A*02:07,HLA-A*03:02,HLA-A*11:01,HLA-A*25:01, HLA-A*26:01,HLA-A*29:02,HLA-A*30:02,HLA-A*32:01,HLA-A*33:01, HLA-A*33:03,HLA-A*68:01,HLA-A*68:02,HLA-B*15:01,HLA-B*15:03,
  HLA-B*18:01,HLA-B*27:05,HLA-B*35:01,HLA-B*38:01,HLA-B*39:01, HLA-B*44:02,HLA-B*44:03,HLA-B*55:01,HLA-B*57:01,HLA-B*58:01, HLA-C*02:02,HLA-C*03:03,HLA-C*05:01,HLA-C*07:06,HLA-C*16:02, HLA-C*16:04
EVDPIGHLY

SEQ ID NO: 5484 - protein, 10 aa, Homo sapiens
  Table 1.2; MAGEA3; ENSG00000221867; HLA -A*01:01,HLA-A*02:07,HLA-A*29:02,HLA-A*68:02,HLA-B*38:01
EVDPIGHLYI

SEQ ID NO: 5485 - protein, 11 aa, Homo sapiens
  Table 1.2; MAGEA3; ENSG00000221867; HLA -A*02:07,HLA-A*68:02
EVDPIGHLYIF

SEQ ID NO: 5486 - protein, 10 aa, Homo sapiens
  Table 1.2; MAGEA3; ENSG00000221867; HLA -A*25:01,HLA-A*26:01,HLA-A*32:01,HLA-A*33:01,HLA-A*33:03, HLA-A*68:01,HLA-A*68:02,HLA-B*08:01,HLA-B*35:03,HLA-B*38:01, HLA-B*39:01,HLA-B*51:01
EVFEGREDSI

SEQ ID NO: 5487 - protein, 11 aa, Homo sapiens
  Table 1.2; MAGEA3; ENSG00000221867; HLA -A*25:01,HLA-A*26:01,HLA-A*68:02,HLA-B*27:05,HLA-B*35:03
EVFEGREDSIL

SEQ ID NO: 5488 - protein, 10 aa, Homo sapiens
  Table 1.2; MAGEA3; ENSG00000221867; HLA -A*25:01,HLA-A*26:01
EVTLGEVPAA

SEQ ID NO: 5489 - protein, 9 aa, Homo sapiens
  Table 1.2; MAGEA3; ENSG00000221867; HLA -A*01:01,HLA-A*26:01,HLA-A*29:02,HLA-A*30:02,HLA-B*15:03, HLA-B*35:01,HLA-B*46:01,HLA-C*02:02
FATCLGLSY

SEQ ID NO: 5490 - protein, 9 aa, Homo sapiens
  Table 1.2; MAGEA3; ENSG00000221867; HLA -B*40:01
FEGREDSIL

SEQ ID NO: 5491 - protein, 9 aa, Homo sapiens
  Table 1.2; MAGEA3; ENSG00000221867; HLA -A*02:07,HLA-A*29:02
FFPVIFSKA

SEQ ID NO: 5492 - protein, 8 aa, Homo sapiens
  Table 1.2; MAGEA3; ENSG00000221867; HLA -B*54:01
FGIELMEV

SEQ ID NO: 5493 - protein, 8 aa, Homo sapiens
  Table 1.2; MAGEA3; ENSG00000221867; HLA -A*02:04
FLWGPRAL

SEQ ID NO: 5494 - protein, 9 aa, Homo sapiens
  Table 1.2; MAGEA3; ENSG00000221867; HLA -A*02:01,HLA-A*02:03,HLA-A*02:04,HLA-A*02:07
FLWGPRALV

SEQ ID NO: 5495 - protein, 11 aa, Homo sapiens
  Table 1.2; MAGEA3; ENSG00000221867; HLA -A*02:01,HLA-A*02:04,HLA-A*02:07
FLWGPRALVET

SEQ ID NO: 5496 - protein, 8 aa, Homo sapiens
  Table 1.2; MAGEA3; ENSG00000221867; HLA -B*35:01,HLA-B*35:03,HLA-B*55:01,HLA-C*04:01,HLA-C*05:01
FPDLESEF

SEQ ID NO: 5497 - protein, 10 aa, Homo sapiens
  Table 1.2; MAGEA3; ENSG00000221867; HLA -B*35:03,HLA-B*54:01,HLA-B*55:01
FPDLESEFQA

SEQ ID NO: 5498 - protein, 11 aa, Homo sapiens
  Table 1.2; MAGEA3; ENSG00000221867; HLA -B*35:03,HLA-B*54:01,HLA-B*55:01
FPDLESEFQAA

SEQ ID NO: 5499 - protein, 8 aa, Homo sapiens
  Table 1.2; MAGEA3; ENSG00000221867; HLA -B*51:01,HLA-B*54:01,HLA-B*55:01,HLA-B*56:01
FPVIFSKA

SEQ ID NO: 5500 - protein, 9 aa, Homo sapiens
  Table 1.2; MAGEA3; ENSG00000221867; HLA -B*54:01
FPVIFSKAS

SEQ ID NO: 5501 - protein, 10 aa, Homo sapiens
  Table 1.2; MAGEA3; ENSG00000221867; HLA -B*54:01,HLA-B*56:01
FPVIFSKASS

SEQ ID NO: 5502 - protein, 9 aa, Homo sapiens
  Table 1.2; MAGEA3; ENSG00000221867; HLA -A*02:03,HLA-B*13:02,HLA-C*02:02,HLA-C*06:02
FQAALSRKV

SEQ ID NO: 5503 - protein, 8 aa, Homo sapiens
  Table 1.2; MAGEA3; ENSG00000221867; HLA -B*08:01,HLA-B*46:01,HLA-C*03:03,HLA-C*03:04,HLA-C*12:03, HLA-C*16:01
FSKASSSL

SEQ ID NO: 5504 - protein, 9 aa, Homo sapiens
  Table 1.2; MAGEA3; ENSG00000221867; HLA -A*01:01,HLA-A*02:07,HLA-A*03:01,HLA-A*03:02,HLA-A*11:01, HLA-A*25:01,HLA-A*26:01,HLA-A*29:02,HLA-A*30:02,HLA-A*32:01, HLA-A*33:01,HLA-A*33:03,HLA-A*68:01,HLA-B*15:01,HLA-B*15:03,
  HLA-B*27:02,HLA-B*35:01,HLA-B*39:01,HLA-B*46:01,HLA-B*55:01, HLA-B*58:01,HLA-C*01:02,HLA-C*02:02,HLA-C*03:03,HLA-C*07:01, HLA-C*07:04,HLA-C*07:06,HLA-C*12:03,HLA-C*14:02,HLA-C*16:01, HLA-C*16:02,HLA-C*16:04
FVQENYLEY

SEQ ID NO: 5505 - protein, 10 aa, Homo sapiens
  Table 1.2; MAGEA3; ENSG00000221867; HLA -A*31:01,HLA-A*33:01,HLA-A*33:03,HLA-A*68:01,HLA-A*68:02, HLA-B*27:02
FVQENYLEYR

SEQ ID NO: 5506 - protein, 9 aa, Homo sapiens
  Table 1.2; MAGEA3; ENSG00000221867; HLA -A*30:02,HLA-A*32:01,HLA-B*13:02,HLA-B*15:01,HLA-B*15:03, HLA-B*35:01,HLA-B*35:03,HLA-B*39:01,HLA-C*02:02,HLA-C*12:03, HLA-C*16:02,HLA-C*16:04
GASSLPTTM

SEQ ID NO: 5507 - protein, 11 aa, Homo sapiens
  Table 1.2; MAGEA3; ENSG00000221867; HLA -A*26:01,HLA-A*29:02,HLA-A*30:02
GASSLPTTMNY

SEQ ID NO: 5508 - protein, 8 aa, Homo sapiens
  Table 1.2; MAGEA3; ENSG00000221867; HLA -A*03:02,HLA-A*11:01,HLA-B*27:02
GDNQIMPK

SEQ ID NO: 5509 - protein, 9 aa, Homo sapiens
  Table 1.2; MAGEA3; ENSG00000221867; HLA -B*40:02
GDNQIMPKA

SEQ ID NO: 5510 - protein, 9 aa, Homo sapiens
  Table 1.2; MAGEA3; ENSG00000221867; HLA -A*30:01,HLA-B*13:02,HLA-B*37:01,HLA-B*40:01,HLA-B*40:02, HLA-B*49:01,HLA-B*56:01
GEALGLVGA

SEQ ID NO: 5511 - protein, 11 aa, Homo sapiens
  Table 1.2; MAGEA3; ENSG00000221867; HLA -A*30:01,HLA-B*27:05,HLA-B*40:01,HLA-B*40:02,HLA-B*49:01
GEALGLVGAQA

SEQ ID NO: 5512 - protein, 9 aa, Homo sapiens
  Table 1.2; MAGEA3; ENSG00000221867; HLA -A*30:01,HLA-B*40:01,HLA-B*40:02
GEVPAAESP

SEQ ID NO: 5513 - protein, 9 aa, Homo sapiens
  Table 1.2; MAGEA3; ENSG00000221867; HLA -B*15:01
GLLGDNQIM

SEQ ID NO: 5514 - protein, 11 aa, Homo sapiens
  Table 1.2; MAGEA3; ENSG00000221867; HLA -A*02:01,HLA-A*02:04,HLA-A*03:01,HLA-A*03:02,HLA-A*11:01, HLA-A*31:01,HLA-B*27:02,HLA-B*27:05
GLLGDNQIMPK

SEQ ID NO: 5515 - protein, 9 aa, Homo sapiens
  Table 1.2; MAGEA3; ENSG00000221867; HLA -A*02:01,HLA-A*02:03,HLA-A*02:04,HLA-B*13:02
GLLIIVLAI

SEQ ID NO: 5516 - protein, 9 aa, Homo sapiens
  Table 1.2; MAGEA3; ENSG00000221867; HLA -B*07:02
GPHISYPPL

SEQ ID NO: 5517 - protein, 10 aa, Homo sapiens
  Table 1.2; MAGEA3; ENSG00000221867; HLA -A*30:02,HLA-B*07:02,HLA-B*15:01,HLA-B*15:03,HLA-B*35:01, HLA-B*55:01
GPRALVETSY

SEQ ID NO: 5518 - protein, 8 aa, Homo sapiens
  Table 1.2; MAGEA3; ENSG00000221867; HLA -B*07:02
GPSTFPDL

SEQ ID NO: 5519 - protein, 11 aa, Homo sapiens
  Table 1.2; MAGEA3; ENSG00000221867; HLA -B*27:02,HLA-B*27:05
GREDSILGDPK

SEQ ID NO: 5520 - protein, 9 aa, Homo sapiens
  Table 1.2; MAGEA3; ENSG00000221867; HLA -A*01:01,HLA-B*27:05,HLA-B*57:01,HLA-B*58:01,HLA-C*05:01
GSDPACYEF

SEQ ID NO: 5521 - protein, 9 aa, Homo sapiens
  Table 1.2; MAGEA3; ENSG00000221867; HLA -A*01:01,HLA-A*29:02,HLA-A*30:02,HLA-B*15:01,HLA-B*15:03, HLA-B*57:01,HLA-B*58:01
GSVVGNWQY

SEQ ID NO: 5522 - protein, 11 aa, Homo sapiens
  Table 1.2; MAGEA3; ENSG00000221867; HLA -A*31:01,HLA-A*33:01,HLA-A*33:03
HCKPEEGLEAR

SEQ ID NO: 5523 - protein, 10 aa, Homo sapiens
  Table 1.2; MAGEA3; ENSG00000221867; HLA -A*29:02,HLA-B*35:01
HFVQENYLEY

SEQ ID NO: 5524 - protein, 10 aa, Homo sapiens
  Table 1.2; MAGEA3; ENSG00000221867; HLA -B*57:01
HISYPPLHEW

SEQ ID NO: 5525 - protein, 9 aa, Homo sapiens
  Table 1.2; MAGEA3; ENSG00000221867; HLA -B*40:01,HLA-B*40:02,HLA-B*49:01
IELMEVDPI

SEQ ID NO: 5526 - protein, 10 aa, Homo sapiens
  Table 1.2; MAGEA3; ENSG00000221867; HLA -A*29:02
IFATCLGLSY

SEQ ID NO: 5527 - protein, 9 aa, Homo sapiens
  Table 1.2; MAGEA3; ENSG00000221867; HLA -A*23:01,HLA-C*01:02,HLA-C*14:02
IFSKASSSL

SEQ ID NO: 5528 - protein, 9 aa, Homo sapiens
  Table 1.2; MAGEA3; ENSG00000221867; HLA -A*31:01,HLA-A*33:03,HLA-A*68:01
IIVLAIIAR

SEQ ID NO: 5529 - protein, 8 aa, Homo sapiens
  Table 1.2; MAGEA3; ENSG00000221867; HLA -A*02:03
ILGDPKKL

SEQ ID NO: 5530 - protein, 9 aa, Homo sapiens
  Table 1.2; MAGEA3; ENSG00000221867; HLA -A*02:01,HLA-A*02:03,HLA-A*02:04,HLA-A*02:07,HLA-A*03:01
ILGDPKKLL

SEQ ID NO: 5531 - protein, 9 aa, Homo sapiens
  Table 1.2; MAGEA3; ENSG00000221867; HLA -A*24:02
IMPKAGLLI

SEQ ID NO: 5532 - protein, 10 aa, Homo sapiens
  Table 1.2; MAGEA3; ENSG00000221867; HLA -A*02:07,HLA-A*24:02
IMPKAGLLII

SEQ ID NO: 5533 - protein, 11 aa, Homo sapiens
  Table 1.2; MAGEA3; ENSG00000221867; HLA -A*02:07
IMPKAGLLIIV

SEQ ID NO: 5534 - protein, 9 aa, Homo sapiens
  Table 1.2; MAGEA3; ENSG00000221867; HLA -A*01:01,HLA-A*29:02,HLA-A*30:02,HLA-A*32:01,HLA-B*15:01, HLA-B*15:03,HLA-B*35:01,HLA-B*46:01,HLA-B*57:01,HLA-B*58:01, HLA-C*02:02,HLA-C*07:04,HLA-C*12:03,HLA-C*16:01,HLA-C*16:02
ISGGPHISY

SEQ ID NO: 5535 - protein, 9 aa, Homo sapiens
  Table 1.2; MAGEA3; ENSG00000221867; HLA -A*24:02,HLA-A*25:01,HLA-A*30:02,HLA-A*31:01,HLA-A*32:01, HLA-A*33:01,HLA-B*57:01,HLA-B*58:01,HLA-C*02:02
ISYPPLHEW

SEQ ID NO: 5536 - protein, 8 aa, Homo sapiens
  Table 1.2; MAGEA3; ENSG00000221867; HLA -A*11:01,HLA-A*31:01,HLA-A*33:03
IVLAIIAR

SEQ ID NO: 5537 - protein, 8 aa, Homo sapiens
  Table 1.2; MAGEA3; ENSG00000221867; HLA -B*37:01
KASSSLQL

SEQ ID NO: 5538 - protein, 9 aa, Homo sapiens
  Table 1.2; MAGEA3; ENSG00000221867; HLA -B*13:02,HLA-C*12:03,HLA-C*16:02
KASSSLQLV

SEQ ID NO: 5539 - protein, 10 aa, Homo sapiens
  Table 1.2; MAGEA3; ENSG00000221867; HLA -A*23:01,HLA-A*24:02,HLA-A*29:02,HLA-A*30:02,HLA-A*32:01, HLA-B*27:02,HLA-B*57:01,HLA-B*58:01,HLA-C*02:02,HLA-C*16:04
KASSSLQLVF

SEQ ID NO: 5540 - protein, 10 aa, Homo sapiens
  Table 1.2; MAGEA3; ENSG00000221867; HLA -A*03:01,HLA-A*29:02,HLA-A*30:02,HLA-A*32:01,HLA-B*15:01, HLA-B*46:01
KISGGPHISY

SEQ ID NO: 5541 - protein, 9 aa, Homo sapiens
  Table 1.2; MAGEA3; ENSG00000221867; HLA -A*02:04,HLA-A*02:07
KIWEELSVL

SEQ ID NO: 5542 - protein, 11 aa, Homo sapiens
  Table 1.2; MAGEA3; ENSG00000221867; HLA -A*02:01,HLA-A*02:03,HLA-A*02:04,HLA-A*02:07
KIWEELSVLEV

SEQ ID NO: 5543 - protein, 8 aa, Homo sapiens
  Table 1.2; MAGEA3; ENSG00000221867; HLA -A*32:01,HLA-B*37:01,HLA-B*57:01,HLA-B*58:01
KVAELVHF

SEQ ID NO: 5544 - protein, 9 aa, Homo sapiens
  Table 1.2; MAGEA3; ENSG00000221867; HLA -A*02:01,HLA-A*02:03,HLA-A*02:04,HLA-A*02:07,HLA-A*03:01, HLA-A*03:02,HLA-A*24:02,HLA-A*25:01,HLA-A*26:01,HLA-A*31:01, HLA-A*32:01,HLA-A*68:02,HLA-B*13:02,HLA-B*27:05,HLA-B*57:01,
  HLA-B*58:01
KVAELVHFL

SEQ ID NO: 5545 - protein, 10 aa, Homo sapiens
  Table 1.2; MAGEA3; ENSG00000221867; HLA -A*02:01,HLA-A*02:04,HLA-A*02:07,HLA-A*31:01,HLA-A*68:02
KVAELVHFLL

SEQ ID NO: 5546 - protein, 11 aa, Homo sapiens
  Table 1.2; MAGEA3; ENSG00000221867; HLA -A*02:04,HLA-A*02:07,HLA-A*03:01
KVAELVHFLLL

SEQ ID NO: 5547 - protein, 8 aa, Homo sapiens
  Table 1.2; MAGEA3; ENSG00000221867; HLA -A*30:01,HLA-B*18:01,HLA-B*37:01,HLA-B*40:01,HLA-B*40:02
LEARGEAL

SEQ ID NO: 5548 - protein, 10 aa, Homo sapiens
  Table 1.2; MAGEA3; ENSG00000221867; HLA -A*30:01,HLA-B*40:01,HLA-B*40:02
LEARGEALGL

SEQ ID NO: 5549 - protein, 8 aa, Homo sapiens
  Table 1.2; MAGEA3; ENSG00000221867; HLA -B*18:01,HLA-B*49:01
LESEFQAA

SEQ ID NO: 5550 - protein, 9 aa, Homo sapiens
  Table 1.2; MAGEA3; ENSG00000221867; HLA -A*30:01,HLA-A*68:02,HLA-B*15:03,HLA-B*18:01,HLA-B*27:02, HLA-B*27:05,HLA-B*37:01,HLA-B*38:01,HLA-B*39:01,HLA-B*40:01, HLA-B*40:02,HLA-B*44:02,HLA-B*44:03,HLA-B*49:01
LESEFQAAL

SEQ ID NO: 5551 - protein, 9 aa, Homo sapiens
  Table 1.2; MAGEA3; ENSG00000221867; HLA -A*01:01,HLA-A*03:01,HLA-A*03:02,HLA-A*11:01,HLA-B*27:02
LGDNQIMPK

SEQ ID NO: 5552 - protein, 9 aa, Homo sapiens
  Table 1.2; MAGEA3; ENSG00000221867; HLA -A*32:01
LGLVGAQAP

SEQ ID NO: 5553 - protein, 10 aa, Homo sapiens
  Table 1.2; MAGEA3; ENSG00000221867; HLA -A*01:01
LGSVVGNWQY

SEQ ID NO: 5554 - protein, 10 aa, Homo sapiens
  Table 1.2; MAGEA3; ENSG00000221867; HLA -B*27:02
LIIVLAIIAR

SEQ ID NO: 5555 - protein, 10 aa, Homo sapiens
  Table 1.2; MAGEA3; ENSG00000221867; HLA -A*03:01,HLA-A*03:02,HLA-A*11:01,HLA-B*27:02
LLGDNQIMPK

SEQ ID NO: 5556 - protein, 11 aa, Homo sapiens
  Table 1.2; MAGEA3; ENSG00000221867; HLA -A*02:01
LLGDNQIMPKA

SEQ ID NO: 5557 - protein, 9 aa, Homo sapiens
  Table 1.2; MAGEA3; ENSG00000221867; HLA -A*02:04
LLIIVLAII

SEQ ID NO: 5558 - protein, 11 aa, Homo sapiens
  Table 1.2; MAGEA3; ENSG00000221867; HLA -A*01:01,HLA-A*29:02,HLA-A*30:02
LMEVDPIGHLY

SEQ ID NO: 5559 - protein, 9 aa, Homo sapiens
  Table 1.2; MAGEA3; ENSG00000221867; HLA -B*35:01,HLA-B*35:03
LPTTMNYPL

SEQ ID NO: 5560 - protein, 10 aa, Homo sapiens
  Table 1.2; MAGEA3; ENSG00000221867; HLA -A*24:02,HLA-B*27:02
LPTTMNYPLW

SEQ ID NO: 5561 - protein, 9 aa, Homo sapiens
  Table 1.2; MAGEA3; ENSG00000221867; HLA -A*02:01,HLA-A*02:04,HLA-B*13:02,HLA-B*39:01
LQLVFGIEL

SEQ ID NO: 5562 - protein, 8 aa, Homo sapiens
  Table 1.2; MAGEA3; ENSG00000221867; HLA -B*08:01
LSRKVAEL

SEQ ID NO: 5563 - protein, 10 aa, Homo sapiens
  Table 1.2; MAGEA3; ENSG00000221867; HLA -B*27:02,HLA-B*57:01
LSVLEVFEGR

SEQ ID NO: 5564 - protein, 10 aa, Homo sapiens
  Table 1.2; MAGEA3; ENSG00000221867; HLA -A*01:01,HLA-A*29:02,HLA-A*30:02,HLA-A*32:01,HLA-B*57:01
LTQHFVQENY

SEQ ID NO: 5565 - protein, 8 aa, Homo sapiens
  Table 1.2; MAGEA3; ENSG00000221867; HLA -A*03:02,HLA-B*27:02
LVETSYVK

SEQ ID NO: 5566 - protein, 9 aa, Homo sapiens
  Table 1.2; MAGEA3; ENSG00000221867; HLA -A*02:07,HLA-C*05:01
LVETSYVKV

SEQ ID NO: 5567 - protein, 9 aa, Homo sapiens
  Table 1.2; MAGEA3; ENSG00000221867; HLA -A*01:01
LVEVTLGEV

SEQ ID NO: 5568 - protein, 10 aa, Homo sapiens
  Table 1.2; MAGEA3; ENSG00000221867; HLA -A*02:01,HLA-A*02:03,HLA-A*02:04,HLA-A*02:07,HLA-A*68:02
LVFGIELMEV

SEQ ID NO: 5569 - protein, 9 aa, Homo sapiens
  Table 1.2; MAGEA3; ENSG00000221867; HLA -A*01:01,HLA-A*29:02,HLA-B*57:01
LVHFLLLKY

SEQ ID NO: 5570 - protein, 8 aa, Homo sapiens
  Table 1.2; MAGEA3; ENSG00000221867; HLA -A*23:01,HLA-C*14:02
LYIFATCL

SEQ ID NO: 5571 - protein, 8 aa, Homo sapiens
  Table 1.2; MAGEA3; ENSG00000221867; HLA -B*18:01
MEVDPIGH

SEQ ID NO: 5572 - protein, 9 aa, Homo sapiens
  Table 1.2; MAGEA3; ENSG00000221867; HLA -A*23:01,HLA-A*25:01,HLA-A*30:01,HLA-A*68:02,HLA-B*18:01, HLA-B*27:02,HLA-B*27:05,HLA-B*37:01,HLA-B*38:01,HLA-B*39:01, HLA-B*40:01,HLA-B*40:02,HLA-B*44:02,HLA-B*44:03,HLA-B*49:01,
  HLA-C*16:04
MEVDPIGHL

SEQ ID NO: 5573 - protein, 10 aa, Homo sapiens
  Table 1.2; MAGEA3; ENSG00000221867; HLA -A*01:01,HLA-A*23:01,HLA-A*25:01,HLA-A*26:01,HLA-A*29:02, HLA-A*30:01,HLA-A*30:02,HLA-A*32:01,HLA-A*33:03,HLA-A*68:02, HLA-B*15:01,HLA-B*15:03,HLA-B*18:01,HLA-B*27:02,HLA-B*27:05,
  HLA-B*35:01,HLA-B*37:01,HLA-B*40:01,HLA-B*44:02,HLA-B*44:03, HLA-B*49:01,HLA-B*57:01,HLA-C*02:02,HLA-C*07:04,HLA-C*16:04
MEVDPIGHLY

SEQ ID NO: 5574 - protein, 11 aa, Homo sapiens
  Table 1.2; MAGEA3; ENSG00000221867; HLA -A*30:01,HLA-A*68:02,HLA-B*44:02,HLA-B*44:03,HLA-B*49:01
MEVDPIGHLYI

SEQ ID NO: 5575 - protein, 9 aa, Homo sapiens
  Table 1.2; MAGEA3; ENSG00000221867; HLA -A*23:01,HLA-A*24:02,HLA-A*25:01,HLA-A*32:01,HLA-A*33:03, HLA-B*44:02,HLA-B*44:03,HLA-B*57:01,HLA-B*58:01,HLA-C*07:04
MLGSVVGNW

SEQ ID NO: 5576 - protein, 11 aa, Homo sapiens
  Table 1.2; MAGEA3; ENSG00000221867; HLA -A*01:01,HLA-A*29:02
MLGSVVGNWQY

SEQ ID NO: 5577 - protein, 10 aa, Homo sapiens
  Table 1.2; MAGEA3; ENSG00000221867; HLA -A*29:02
MNYPLWSQSY

SEQ ID NO: 5578 - protein, 8 aa, Homo sapiens
  Table 1.2; MAGEA3; ENSG00000221867; HLA -B*51:01
MPKAGLLI

SEQ ID NO: 5579 - protein, 9 aa, Homo sapiens
  Table 1.2; MAGEA3; ENSG00000221867; HLA -B*51:01,HLA-B*54:01,HLA-B*56:01
MPKAGLLII

SEQ ID NO: 5580 - protein, 10 aa, Homo sapiens
  Table 1.2; MAGEA3; ENSG00000221867; HLA -B*54:01,HLA-B*56:01
MPKAGLLIIV

SEQ ID NO: 5581 - protein, 11 aa, Homo sapiens
  Table 1.2; MAGEA3; ENSG00000221867; HLA -B*54:01
MPKAGLLIIVL

SEQ ID NO: 5582 - protein, 9 aa, Homo sapiens
  Table 1.2; MAGEA3; ENSG00000221867; HLA -C*04:01
MVKISGGPH

SEQ ID NO: 5583 - protein, 10 aa, Homo sapiens
  Table 1.2; MAGEA3; ENSG00000221867; HLA -B*38:01,HLA-B*39:01
NQEEEGPSTF

SEQ ID NO: 5584 - protein, 9 aa, Homo sapiens
  Table 1.2; MAGEA3; ENSG00000221867; HLA -B*08:01,HLA-B*15:01,HLA-B*39:01
NQIMPKAGL

SEQ ID NO: 5585 - protein, 9 aa, Homo sapiens
  Table 1.2; MAGEA3; ENSG00000221867; HLA -A*23:01,HLA-A*24:02,HLA-A*29:02,HLA-A*30:02,HLA-B*15:03, HLA-C*01:02,HLA-C*14:02
NYPLWSQSY

SEQ ID NO: 5586 - protein, 9 aa, Homo sapiens
  Table 1.2; MAGEA3; ENSG00000221867; HLA -B*27:02,HLA-C*07:01,HLA-C*16:04
PRALVETSY

SEQ ID NO: 5587 - protein, 8 aa, Homo sapiens
  Table 1.2; MAGEA3; ENSG00000221867; HLA -B*51:01,HLA-C*06:02,HLA-C*16:01,HLA-C*16:02
QAALSRKV

SEQ ID NO: 5588 - protein, 9 aa, Homo sapiens
  Table 1.2; MAGEA3; ENSG00000221867; HLA -B*54:01
QAALSRKVA

SEQ ID NO: 5589 - protein, 10 aa, Homo sapiens
  Table 1.2; MAGEA3; ENSG00000221867; HLA -A*30:01,HLA-B*38:01,HLA-B*40:01,HLA-B*40:02,HLA-B*44:03, HLA-B*49:01
QEAASSSSTL

SEQ ID NO: 5590 - protein, 11 aa, Homo sapiens
  Table 1.2; MAGEA3; ENSG00000221867; HLA -B*49:01
QEAASSSSTLV

SEQ ID NO: 5591 - protein, 9 aa, Homo sapiens
  Table 1.2; MAGEA3; ENSG00000221867; HLA -A*30:01,HLA-B*18:01,HLA-B*37:01,HLA-B*38:01,HLA-B*40:01, HLA-B*44:02,HLA-B*44:03,HLA-B*49:01,HLA-C*16:04
QEEEGPSTF

SEQ ID NO: 5592 - protein, 9 aa, Homo sapiens
  Table 1.2; MAGEA3; ENSG00000221867; HLA -B*38:01
QHCKPEEGL

SEQ ID NO: 5593 - protein, 9 aa, Homo sapiens
  Table 1.2; MAGEA3; ENSG00000221867; HLA -B*38:01,HLA-B*39:01
QHFVQENYL

SEQ ID NO: 5594 - protein, 8 aa, Homo sapiens
  Table 1.2; MAGEA3; ENSG00000221867; HLA -B*08:01
QIMPKAGL

SEQ ID NO: 5595 - protein, 9 aa, Homo sapiens
  Table 1.2; MAGEA3; ENSG00000221867; HLA -A*23:01,HLA-B*08:01
QIMPKAGLL

SEQ ID NO: 5596 - protein, 11 aa, Homo sapiens
  Table 1.2; MAGEA3; ENSG00000221867; HLA -A*02:01
QLVFGIELMEV

SEQ ID NO: 5597 - protein, 9 aa, Homo sapiens
  Table 1.2; MAGEA3; ENSG00000221867; HLA -C*01:02
QSPQGASSL

SEQ ID NO: 5598 - protein, 10 aa, Homo sapiens
  Table 1.2; MAGEA3; ENSG00000221867; HLA -A*25:01,HLA-A*26:01,HLA-A*29:02,HLA-A*30:02,HLA-C*07:04
QVPGSDPACY

SEQ ID NO: 5599 - protein, 8 aa, Homo sapiens
  Table 1.2; MAGEA3; ENSG00000221867; HLA -A*24:02
QYFFPVIF

SEQ ID NO: 5600 - protein, 8 aa, Homo sapiens
  Table 1.2; MAGEA3; ENSG00000221867; HLA -B*15:01,HLA-B*15:03,HLA-B*46:01
RALVETSY

SEQ ID NO: 5601 - protein, 10 aa, Homo sapiens
  Table 1.2; MAGEA3; ENSG00000221867; HLA -B*27:02
RALVETSYVK

SEQ ID NO: 5602 - protein, 8 aa, Homo sapiens
  Table 1.2; MAGEA3; ENSG00000221867; HLA -A*03:01,HLA-B*57:01
RAREPVTK

SEQ ID NO: 5603 - protein, 9 aa, Homo sapiens
  Table 1.2; MAGEA3; ENSG00000221867; HLA -A*32:01,HLA-B*07:02,HLA-B*54:01,HLA-B*56:01
RAREPVTKA

SEQ ID NO: 5604 - protein, 9 aa, Homo sapiens
  Table 1.2; MAGEA3; ENSG00000221867; HLA -A*30:01,HLA-B*07:02,HLA-B*37:01,HLA-B*40:01,HLA-B*40:02, HLA-B*44:02,HLA-B*44:03,HLA-C*01:02
REPVTKAEM

SEQ ID NO: 5605 - protein, 10 aa, Homo sapiens
  Table 1.2; MAGEA3; ENSG00000221867; HLA -A*30:01,HLA-B*40:01,HLA-B*40:02
REPVTKAEML

SEQ ID NO: 5606 - protein, 11 aa, Homo sapiens
  Table 1.2; MAGEA3; ENSG00000221867; HLA -A*30:02,HLA-A*32:01,HLA-B*15:01,HLA-B*15:03,HLA-B*39:01, HLA-B*58:01,HLA-C*07:04
RQVPGSDPACY

SEQ ID NO: 5607 - protein, 8 aa, Homo sapiens
  Table 1.2; MAGEA3; ENSG00000221867; HLA -B*37:01
SDPACYEF

SEQ ID NO: 5608 - protein, 9 aa, Homo sapiens
  Table 1.2; MAGEA3; ENSG00000221867; HLA -B*18:01,HLA-B*27:02,HLA-B*27:05,HLA-B*44:02,HLA-B*44:03, HLA-B*49:01
SEFQAALSR

SEQ ID NO: 5609 - protein, 8 aa, Homo sapiens
  Table 1.2; MAGEA3; ENSG00000221867; HLA -A*30:02,HLA-A*32:01,HLA-B*15:01,HLA-B*15:03,HLA-B*46:01, HLA-C*07:01,HLA-C*07:04,HLA-C*12:03,HLA-C*16:01
SGGPHISY

SEQ ID NO: 5610 - protein, 9 aa, Homo sapiens
  Table 1.2; MAGEA3; ENSG00000221867; HLA -B*15:03
SKASSSLQL

SEQ ID NO: 5611 - protein, 11 aa, Homo sapiens
  Table 1.2; MAGEA3; ENSG00000221867; HLA -B*15:03
SKASSSLQLVF

SEQ ID NO: 5612 - protein, 8 aa, Homo sapiens
  Table 1.2; MAGEA3; ENSG00000221867; HLA -A*29:02,HLA-A*30:02,HLA-B*15:01,HLA-B*46:01,HLA-C*01:02
SLPTTMNY

SEQ ID NO: 5613 - protein, 10 aa, Homo sapiens
  Table 1.2; MAGEA3; ENSG00000221867; HLA -A*02:07
SLPTTMNYPL

SEQ ID NO: 5614 - protein, 11 aa, Homo sapiens
  Table 1.2; MAGEA3; ENSG00000221867; HLA -A*24:02
SLPTTMNYPLW

SEQ ID NO: 5615 - protein, 8 aa, Homo sapiens
  Table 1.2; MAGEA3; ENSG00000221867; HLA -A*02:04,HLA-B*37:01
SLQLVFGI

SEQ ID NO: 5616 - protein, 10 aa, Homo sapiens
  Table 1.2; MAGEA3; ENSG00000221867; HLA -A*02:04,HLA-A*02:07
SLQLVFGIEL

SEQ ID NO: 5617 - protein, 11 aa, Homo sapiens
  Table 1.2; MAGEA3; ENSG00000221867; HLA -B*56:01
SPDPPQSPQGA

SEQ ID NO: 5618 - protein, 8 aa, Homo sapiens
  Table 1.2; MAGEA3; ENSG00000221867; HLA -B*07:02
SPQGASSL

SEQ ID NO: 5619 - protein, 9 aa, Homo sapiens
  Table 1.2; MAGEA3; ENSG00000221867; HLA -A*01:01,HLA-A*03:01,HLA-A*03:02,HLA-A*11:01,HLA-A*23:01, HLA-A*25:01,HLA-A*26:01,HLA-A*29:02,HLA-A*30:02,HLA-A*31:01, HLA-A*32:01,HLA-B*15:01,HLA-B*15:03,HLA-B*35:01,HLA-B*44:03,
  HLA-B*46:01,HLA-B*57:01,HLA-B*58:01,HLA-C*01:02,HLA-C*02:02, HLA-C*07:01,HLA-C*07:06,HLA-C*12:03,HLA-C*16:01,HLA-C*16:02, HLA-C*16:04
SSLPTTMNY

SEQ ID NO: 5620 - protein, 9 aa, Homo sapiens
  Table 1.2; MAGEA3; ENSG00000221867; HLA -A*02:01,HLA-A*02:04,HLA-B*13:02
SSLQLVFGI

SEQ ID NO: 5621 - protein, 8 aa, Homo sapiens
  Table 1.2; MAGEA3; ENSG00000221867; HLA -B*58:01
SSSLQLVF

SEQ ID NO: 5622 - protein, 9 aa, Homo sapiens
  Table 1.2; MAGEA3; ENSG00000221867; HLA -A*02:01,HLA-A*02:03,HLA-A*68:02,HLA-B*13:02,HLA-B*56:01, HLA-C*16:02
SSSSTLVEV

SEQ ID NO: 5623 - protein, 11 aa, Homo sapiens
  Table 1.2; MAGEA3; ENSG00000221867; HLA -B*38:01
SSSSTLVEVTL

SEQ ID NO: 5624 - protein, 10 aa, Homo sapiens
  Table 1.2; MAGEA3; ENSG00000221867; HLA -A*68:02
SSSTLVEVTL

SEQ ID NO: 5625 - protein, 9 aa, Homo sapiens
  Table 1.2; MAGEA3; ENSG00000221867; HLA -A*23:01,HLA-A*30:01,HLA-A*68:02,HLA-B*13:02,HLA-B*35:03, HLA-B*38:01,HLA-B*39:01,HLA-B*40:01,HLA-B*57:01,HLA-B*58:01, HLA-C*03:03,HLA-C*03:04,HLA-C*07:04,HLA-C*07:06,HLA-C*16:01,
  HLA-C*16:02
SSTLVEVTL

SEQ ID NO: 5626 - protein, 10 aa, Homo sapiens
  Table 1.2; MAGEA3; ENSG00000221867; HLA -A*25:01,HLA-A*26:01,HLA-A*30:02,HLA-B*57:01
STFPDLESEF

SEQ ID NO: 5627 - protein, 9 aa, Homo sapiens
  Table 1.2; MAGEA3; ENSG00000221867; HLA -A*02:04,HLA-A*02:07,HLA-A*03:01,HLA-A*03:02,HLA-A*11:01, HLA-A*25:01,HLA-A*31:01,HLA-A*33:01,HLA-A*33:03,HLA-A*68:01, HLA-A*68:02,HLA-B*57:01,HLA-C*07:06
SVLEVFEGR

SEQ ID NO: 5628 - protein, 9 aa, Homo sapiens
  Table 1.2; MAGEA3; ENSG00000221867; HLA -A*26:01
SVVGNWQYF

SEQ ID NO: 5629 - protein, 11 aa, Homo sapiens
  Table 1.2; MAGEA3; ENSG00000221867; HLA -B*35:03,HLA-B*38:01,HLA-C*04:01
SYDGLLGDNQI

SEQ ID NO: 5630 - protein, 8 aa, Homo sapiens
  Table 1.2; MAGEA3; ENSG00000221867; HLA -A*24:02
SYPPLHEW

SEQ ID NO: 5631 - protein, 10 aa, Homo sapiens
  Table 1.2; MAGEA3; ENSG00000221867; HLA -A*24:02
SYPPLHEWVL

SEQ ID NO: 5632 - protein, 9 aa, Homo sapiens
  Table 1.2; MAGEA3; ENSG00000221867; HLA -A*23:01,HLA-A*24:02,HLA-A*31:01
SYVKVLHHM

SEQ ID NO: 5633 - protein, 9 aa, Homo sapiens
  Table 1.2; MAGEA3; ENSG00000221867; HLA -A*23:01,HLA-A*24:02,HLA-A*29:02,HLA-C*14:02
TFPDLESEF

SEQ ID NO: 5634 - protein, 8 aa, Homo sapiens
  Table 1.2; MAGEA3; ENSG00000221867; HLA -A*02:01,HLA-A*02:03,HLA-B*55:01
TLGEVPAA

SEQ ID NO: 5635 - protein, 10 aa, Homo sapiens
  Table 1.2; MAGEA3; ENSG00000221867; HLA -A*02:01,HLA-A*02:03,HLA-A*02:07,HLA-A*68:02
TLVEVTLGEV

SEQ ID NO: 5636 - protein, 9 aa, Homo sapiens
  Table 1.2; MAGEA3; ENSG00000221867; HLA -A*29:02,HLA-A*30:02,HLA-A*32:01,HLA-B*13:02,HLA-B*15:01, HLA-B*15:03,HLA-B*18:01,HLA-B*27:02,HLA-B*27:05,HLA-B*35:01, HLA-B*39:01,HLA-B*44:02,HLA-B*44:03,HLA-B*46:01,HLA-C*07:04,
  HLA-C*16:04
TQHFVQENY

SEQ ID NO: 5637 - protein, 10 aa, Homo sapiens
  Table 1.2; MAGEA3; ENSG00000221867; HLA -B*38:01,HLA-B*39:01
TQHFVQENYL

SEQ ID NO: 5638 - protein, 9 aa, Homo sapiens
  Table 1.2; MAGEA3; ENSG00000221867; HLA -A*03:01
TSYVKVLHH

SEQ ID NO: 5639 - protein, 8 aa, Homo sapiens
  Table 1.2; MAGEA3; ENSG00000221867; HLA -C*05:01
VAELVHFL

SEQ ID NO: 5640 - protein, 9 aa, Homo sapiens
  Table 1.2; MAGEA3; ENSG00000221867; HLA -A*02:07
VAELVHFLL

SEQ ID NO: 5641 - protein, 8 aa, Homo sapiens
  Table 1.2; MAGEA3; ENSG00000221867; HLA -B*15:03,HLA-B*18:01,HLA-B*37:01,HLA-C*04:01,HLA-C*06:02, HLA-C*07:01
VDPIGHLY

SEQ ID NO: 5642 - protein, 10 aa, Homo sapiens
  Table 1.2; MAGEA3; ENSG00000221867; HLA -A*24:02
VDPIGHLYIF

SEQ ID NO: 5643 - protein, 8 aa, Homo sapiens
  Table 1.2; MAGEA3; ENSG00000221867; HLA -A*30:01,HLA-B*18:01,HLA-B*37:01,HLA-B*40:02,HLA-B*49:01
VETSYVKV

SEQ ID NO: 5644 - protein, 9 aa, Homo sapiens
  Table 1.2; MAGEA3; ENSG00000221867; HLA -A*30:01,HLA-B*18:01,HLA-B*27:05,HLA-B*37:01,HLA-B*40:01, HLA-B*40:02,HLA-B*44:02,HLA-B*44:03,HLA-B*49:01,HLA-C*02:02, HLA-C*06:02,HLA-C*07:01,HLA-C*07:04,HLA-C*12:03,HLA-C*16:01,
  HLA-C*16:02,HLA-C*16:04
VETSYVKVL

SEQ ID NO: 5645 - protein, 8 aa, Homo sapiens
  Table 1.2; MAGEA3; ENSG00000221867; HLA -A*30:01,HLA-B*18:01,HLA-B*40:02,HLA-B*49:01
VEVTLGEV

SEQ ID NO: 5646 - protein, 9 aa, Homo sapiens
  Table 1.2; MAGEA3; ENSG00000221867; HLA -B*18:01,HLA-B*40:02,HLA-B*49:01
VEVTLGEVP

SEQ ID NO: 5647 - protein, 10 aa, Homo sapiens
  Table 1.2; MAGEA3; ENSG00000221867; HLA -A*30:01,HLA-B*18:01,HLA-B*40:02
VEVTLGEVPA

SEQ ID NO: 5648 - protein, 11 aa, Homo sapiens
  Table 1.2; MAGEA3; ENSG00000221867; HLA -A*30:01,HLA-B*40:02
VEVTLGEVPAA

SEQ ID NO: 5649 - protein, 8 aa, Homo sapiens
  Table 1.2; MAGEA3; ENSG00000221867; HLA -A*29:02,HLA-C*07:01
VHFLLLKY

SEQ ID NO: 5650 - protein, 10 aa, Homo sapiens
  Table 1.2; MAGEA3; ENSG00000221867; HLA -A*02:03,HLA-B*07:02,HLA-B*46:01,HLA-C*01:02
VIFSKASSSL

SEQ ID NO: 5651 - protein, 9 aa, Homo sapiens
  Table 1.2; MAGEA3; ENSG00000221867; HLA -B*15:03,HLA-B*38:01
VKISGGPHI

SEQ ID NO: 5652 - protein, 11 aa, Homo sapiens
  Table 1.2; MAGEA3; ENSG00000221867; HLA -B*15:03,HLA-C*12:03
VKISGGPHISY

SEQ ID NO: 5653 - protein, 11 aa, Homo sapiens
  Table 1.2; MAGEA3; ENSG00000221867; HLA -C*03:03
VPAAESPDPPQ

SEQ ID NO: 5654 - protein, 8 aa, Homo sapiens
  Table 1.2; MAGEA3; ENSG00000221867; HLA -B*55:01
VPGSDPAC

SEQ ID NO: 5655 - protein, 9 aa, Homo sapiens
  Table 1.2; MAGEA3; ENSG00000221867; HLA -A*30:02,HLA-B*35:01,HLA-B*55:01
VPGSDPACY

SEQ ID NO: 5656 - protein, 11 aa, Homo sapiens
  Table 1.2; MAGEA3; ENSG00000221867; HLA -B*35:01
VPGSDPACYEF

SEQ ID NO: 5657 - protein, 8 aa, Homo sapiens
  Table 1.2; MAGEA3; ENSG00000221867; HLA -A*01:01,HLA-B*15:01,HLA-B*15:03,HLA-B*27:05,HLA-B*39:01, HLA-B*46:01,HLA-C*07:01
VQENYLEY

SEQ ID NO: 5658 - protein, 9 aa, Homo sapiens
  Table 1.2; MAGEA3; ENSG00000221867; HLA -A*31:01
VQENYLEYR

SEQ ID NO: 5659 - protein, 10 aa, Homo sapiens
  Table 1.2; MAGEA3; ENSG00000221867; HLA -A*02:03,HLA-B*40:02
VTKAEMLGSV

SEQ ID NO: 5660 - protein, 9 aa, Homo sapiens
  Table 1.2; MAGEA3; ENSG00000221867; HLA -A*02:01,HLA-A*02:03,HLA-A*02:04,HLA-B*54:01,HLA-B*55:01, HLA-B*56:01
VTLGEVPAA

SEQ ID NO: 5661 - protein, 9 aa, Homo sapiens
  Table 1.2; MAGEA3; ENSG00000221867; HLA -A*24:02
VVGNWQYFF

SEQ ID NO: 5662 - protein, 9 aa, Homo sapiens
  Table 1.2; MAGEA3; ENSG00000221867; HLA -B*49:01
WEELSVLEV

SEQ ID NO: 5663 - protein, 9 aa, Homo sapiens
  Table 1.2; MAGEA3; ENSG00000221867; HLA -A*02:04
YEFLWGPRA

SEQ ID NO: 5664 - protein, 9 aa, Homo sapiens
  Table 1.2; MAGEA3; ENSG00000221867; HLA -A*29:02
YFFPVIFSK

SEQ ID NO: 5665 - protein, 10 aa, Homo sapiens
  Table 1.2; MAGEA3; ENSG00000221867; HLA -A*68:02
YFFPVIFSKA

SEQ ID NO: 5666 - protein, 9 aa, Homo sapiens
  Table 1.2; MAGEA3; ENSG00000221867; HLA -A*02:03,HLA-A*02:07,HLA-A*68:02,HLA-B*13:02
YIFATCLGL

SEQ ID NO: 5667 - protein, 8 aa, Homo sapiens
  Table 1.2; MAGEA3; ENSG00000221867; HLA -B*35:01,HLA-B*51:01
YPLWSQSY

SEQ ID NO: 5668 - protein, 8 aa, Homo sapiens
  Table 1.2; MAGEA3; ENSG00000221867; HLA -B*51:01
YPPLHEWV

SEQ ID NO: 5669 - protein, 9 aa, Homo sapiens
  Table 1.2; MAGEA3; ENSG00000221867; HLA -A*02:07,HLA-A*24:02,HLA-B*35:01,HLA-B*35:03,HLA-B*51:01, HLA-B*54:01
YPPLHEWVL

SEQ ID NO: 5670 - protein, 9 aa, Homo sapiens
  Table 1.2; MAGEA3; ENSG00000221867; HLA -B*27:02,HLA-B*27:05,HLA-B*39:01
YRAREPVTK

SEQ ID NO: 5671 - protein, 8 aa, Homo sapiens
  Table 1.2; MAGEA3; ENSG00000221867; HLA -B*08:01
YVKVLHHM

SEQ ID NO: 5672 - protein, 9 aa, Homo sapiens
  Table 1.2; MAGEA3; ENSG00000221867; HLA -A*68:02
YVKVLHHMV

SEQ ID NO: 5673 - protein, 9 aa, Homo sapiens
  Table 1.2; MAGEA4; ENSG00000147381; HLA -B*07:02,HLA-B*15:01,HLA-B*15:03,HLA-B*35:03,HLA-B*39:01, HLA-B*40:01,HLA-B*46:01,HLA-B*58:01,HLA-C*01:02,HLA-C*02:02, HLA-C*03:03,HLA-C*03:04,HLA-C*07:02,HLA-C*14:02,HLA-C*16:01
AAVSSSSPL

SEQ ID NO: 5674 - protein, 8 aa, Homo sapiens
  Table 1.2; MAGEA4; ENSG00000147381; HLA -A*30:01,HLA-B*13:02,HLA-B*37:01,HLA-B*40:02,HLA-B*44:02, HLA-B*44:03,HLA-B*49:01
AEMLERVI

SEQ ID NO: 5675 - protein, 9 aa, Homo sapiens
  Table 1.2; MAGEA4; ENSG00000147381; HLA -B*44:02
AEMLERVIK

SEQ ID NO: 5676 - protein, 10 aa, Homo sapiens
  Table 1.2; MAGEA4; ENSG00000147381; HLA -B*44:02
AEMLERVIKN

SEQ ID NO: 5677 - protein, 11 aa, Homo sapiens
  Table 1.2; MAGEA4; ENSG00000147381; HLA -A*30:01,HLA-A*30:02,HLA-B*27:02,HLA-B*44:02,HLA-B*44:03, HLA-B*57:01,HLA-C*16:04
AEMLERVIKNY

SEQ ID NO: 5678 - protein, 10 aa, Homo sapiens
  Table 1.2; MAGEA4; ENSG00000147381; HLA -B*27:05
AESAGPPQSP

SEQ ID NO: 5679 - protein, 8 aa, Homo sapiens
  Table 1.2; MAGEA4; ENSG00000147381; HLA -B*37:01
AESLFREA

SEQ ID NO: 5680 - protein, 9 aa, Homo sapiens
  Table 1.2; MAGEA4; ENSG00000147381; HLA -A*30:01,HLA-B*07:02,HLA-B*18:01,HLA-B*27:02,HLA-B*37:01, HLA-B*40:01,HLA-B*40:02,HLA-B*44:02,HLA-B*44:03,HLA-B*49:01, HLA-C*16:04
AESLFREAL

SEQ ID NO: 5681 - protein, 8 aa, Homo sapiens
  Table 1.2; MAGEA4; ENSG00000147381; HLA -A*30:01,HLA-B*37:01,HLA-B*40:02,HLA-B*44:03,HLA-B*49:01
AETSYVKV

SEQ ID NO: 5682 - protein, 9 aa, Homo sapiens
  Table 1.2; MAGEA4; ENSG00000147381; HLA -A*30:01,HLA-B*18:01,HLA-B*27:02,HLA-B*27:05,HLA-B*37:01, HLA-B*40:01,HLA-B*40:02,HLA-B*44:02,HLA-B*44:03,HLA-B*49:01, HLA-C*02:02,HLA-C*07:04,HLA-C*12:03,HLA-C*16:01,HLA-C*16:02,
  HLA-C*16:04
AETSYVKVL

SEQ ID NO: 5683 - protein, 10 aa, Homo sapiens
  Table 1.2; MAGEA4; ENSG00000147381; HLA -B*15:03,HLA-C*04:01
AKELVTKAEM

SEQ ID NO: 5684 - protein, 8 aa, Homo sapiens
  Table 1.2; MAGEA4; ENSG00000147381; HLA -A*02:01,HLA-A*02:03,HLA-B*13:02,HLA-B*55:01
ALAETSYV

SEQ ID NO: 5685 - protein, 9 aa, Homo sapiens
  Table 1.2; MAGEA4; ENSG00000147381; HLA -A*01:01,HLA-A*02:01,HLA-A*03:01,HLA-A*03:02,HLA-A*11:01, HLA-A*29:02,HLA-A*30:02,HLA-A*32:01,HLA-A*68:01,HLA-B*13:02, HLA-B*27:02,HLA-B*27:05,HLA-B*46:01,HLA-C*07:06
ALAETSYVK

SEQ ID NO: 5686 - protein, 10 aa, Homo sapiens
  Table 1.2; MAGEA4; ENSG00000147381; HLA -A*02:01,HLA-A*02:03,HLA-A*02:04,HLA-A*02:07,HLA-B*13:02, HLA-B*55:01
ALAETSYVKV

SEQ ID NO: 5687 - protein, 11 aa, Homo sapiens
  Table 1.2; MAGEA4; ENSG00000147381; HLA -A*02:01,HLA-A*02:03,HLA-A*02:04
ALAETSYVKVL

SEQ ID NO: 5688 - protein, 9 aa, Homo sapiens
  Table 1.2; MAGEA4; ENSG00000147381; HLA -A*02:01,HLA-A*02:03,HLA-B*55:01,HLA-B*56:01
ALGLVGAQA

SEQ ID NO: 5689 - protein, 9 aa, Homo sapiens
  Table 1.2; MAGEA4; ENSG00000147381; HLA -A*02:01,HLA-A*02:03,HLA-A*02:04,HLA-A*02:07,HLA-B*13:02, HLA-B*55:01
ALLEEEEGV

SEQ ID NO: 5690 - protein, 8 aa, Homo sapiens
  Table 1.2; MAGEA4; ENSG00000147381; HLA -A*02:07,HLA-A*23:01,HLA-A*24:02,HLA-B*08:01,HLA-B*15:01, HLA-B*37:01,HLA-B*46:01,HLA-C*01:02,HLA-C*14:02
ALPTTISF

SEQ ID NO: 5691 - protein, 9 aa, Homo sapiens
  Table 1.2; MAGEA4; ENSG00000147381; HLA -A*02:03,HLA-A*02:07
ALPTTISFT

SEQ ID NO: 5692 - protein, 11 aa, Homo sapiens
  Table 1.2; MAGEA4; ENSG00000147381; HLA -A*02:07,HLA-A*24:02
ALPTTISFTCW

SEQ ID NO: 5693 - protein, 9 aa, Homo sapiens
  Table 1.2; MAGEA4; ENSG00000147381; HLA -A*02:01,HLA-A*02:03,HLA-A*02:04,HLA-A*02:07,HLA-B*27:05, HLA-B*55:01
ALSNKVDEL

SEQ ID NO: 5694 - protein, 9 aa, Homo sapiens
  Table 1.2; MAGEA4; ENSG00000147381; HLA -B*35:03,HLA-B*55:01,HLA-B*56:01
APTTEEQEA

SEQ ID NO: 5695 - protein, 10 aa, Homo sapiens
  Table 1.2; MAGEA4; ENSG00000147381; HLA -B*56:01
APTTEEQEAA

SEQ ID NO: 5696 - protein, 11 aa, Homo sapiens
  Table 1.2; MAGEA4; ENSG00000147381; HLA -B*56:01
APTTEEQEAAV

SEQ ID NO: 5697 - protein, 9 aa, Homo sapiens
  Table 1.2; MAGEA4; ENSG00000147381; HLA -B*13:02,HLA-B*15:01,HLA-B*27:05,HLA-B*39:01
AQAPTTEEQ

SEQ ID NO: 5698 - protein, 11 aa, Homo sapiens
  Table 1.2; MAGEA4; ENSG00000147381; HLA -B*27:05,HLA-B*39:01
AQAPTTEEQEA

SEQ ID NO: 5699 - protein, 10 aa, Homo sapiens
  Table 1.2; MAGEA4; ENSG00000147381; HLA -A*01:01,HLA-A*25:01,HLA-B*15:01,HLA-B*15:03,HLA-B*46:01, HLA-B*57:01,HLA-B*58:01,HLA-C*01:02
ASALPTTISF

SEQ ID NO: 5700 - protein, 9 aa, Homo sapiens
  Table 1.2; MAGEA4; ENSG00000147381; HLA -A*01:01,HLA-B*57:01,HLA-B*58:01
ASESLKMIF

SEQ ID NO: 5701 - protein, 9 aa, Homo sapiens
  Table 1.2; MAGEA4; ENSG00000147381; HLA -A*11:01
ASNTYTLVT

SEQ ID NO: 5702 - protein, 8 aa, Homo sapiens
  Table 1.2; MAGEA4; ENSG00000147381; HLA -B*37:01
AVSSSSPL

SEQ ID NO: 5703 - protein, 9 aa, Homo sapiens
  Table 1.2; MAGEA4; ENSG00000147381; HLA -A*02:01,HLA-A*02:03,HLA-A*02:04,HLA-A*02:07,HLA-A*03:02, HLA-A*26:01,HLA-A*32:01,HLA-A*68:02,HLA-B*13:02,HLA-B*27:05, HLA-B*38:01,HLA-B*39:01,HLA-B*55:01,HLA-C*06:02,HLA-C*16:02
AVSSSSPLV

SEQ ID NO: 5704 - protein, 11 aa, Homo sapiens
  Table 1.2; MAGEA4; ENSG00000147381; HLA -A*31:01
AVSSSSPLVPG

SEQ ID NO: 5705 - protein, 10 aa, Homo sapiens
  Table 1.2; MAGEA4; ENSG00000147381; HLA -A*24:02
AYPSLREAAL

SEQ ID NO: 5706 - protein, 11 aa, Homo sapiens
  Table 1.2; MAGEA4; ENSG00000147381; HLA -A*24:02
AYPSLREAALL

SEQ ID NO: 5707 - protein, 9 aa, Homo sapiens
  Table 1.2; MAGEA4; ENSG00000147381; HLA -A*33:01,HLA-B*51:01,HLA-B*54:01
DAESLFREA

SEQ ID NO: 5708 - protein, 8 aa, Homo sapiens
  Table 1.2; MAGEA4; ENSG00000147381; HLA -B*18:01,HLA-B*37:01,HLA-B*40:02,HLA-B*44:02
DELAHFLL

SEQ ID NO: 5709 - protein, 9 aa, Homo sapiens
  Table 1.2; MAGEA4; ENSG00000147381; HLA -A*33:01
DELAHFLLR

SEQ ID NO: 5710 - protein, 11 aa, Homo sapiens
  Table 1.2; MAGEA4; ENSG00000147381; HLA -B*44:02
DELAHFLLRKY

SEQ ID NO: 5711 - protein, 9 aa, Homo sapiens
  Table 1.2; MAGEA4; ENSG00000147381; HLA -B*51:01
DGLLGNNQI

SEQ ID NO: 5712 - protein, 8 aa, Homo sapiens
  Table 1.2; MAGEA4; ENSG00000147381; HLA -B*08:01,HLA-B*15:03,HLA-B*18:01
DGREHTVY

SEQ ID NO: 5713 - protein, 9 aa, Homo sapiens
  Table 1.2; MAGEA4; ENSG00000147381; HLA -A*23:01,HLA-A*25:01,HLA-A*33:01,HLA-A*68:01,HLA-A*68:02, HLA-B*07:02,HLA-B*08:01,HLA-B*35:01,HLA-B*35:03,HLA-B*38:01, HLA-B*39:01,HLA-B*51:01,HLA-B*54:01,HLA-B*55:01,HLA-B*56:01,
  HLA-C*07:02
DPASNTYTL

SEQ ID NO: 5714 - protein, 10 aa, Homo sapiens
  Table 1.2; MAGEA4; ENSG00000147381; HLA -A*68:01,HLA-B*51:01
DPASNTYTLV

SEQ ID NO: 5715 - protein, 11 aa, Homo sapiens
  Table 1.2; MAGEA4; ENSG00000147381; HLA -B*27:02
DPASNTYTLVT

SEQ ID NO: 5716 - protein, 10 aa, Homo sapiens
  Table 1.2; MAGEA4; ENSG00000147381; HLA -A*25:01,HLA-A*26:01,HLA-A*33:01,HLA-A*33:03,HLA-A*68:01
DVKEVDPASN

SEQ ID NO: 5717 - protein, 11 aa, Homo sapiens
  Table 1.2; MAGEA4; ENSG00000147381; HLA -A*68:02,HLA-B*27:02
EAALLEEEEGV

SEQ ID NO: 5718 - protein, 8 aa, Homo sapiens
  Table 1.2; MAGEA4; ENSG00000147381; HLA -B*54:01
EALGLVGA

SEQ ID NO: 5719 - protein, 9 aa, Homo sapiens
  Table 1.2; MAGEA4; ENSG00000147381; HLA -A*26:01,HLA-A*33:01,HLA-A*33:03,HLA-B*27:05,HLA-C*04:01, HLA-C*07:01,HLA-C*12:03
EALGLVGAQ

SEQ ID NO: 5720 - protein, 10 aa, Homo sapiens
  Table 1.2; MAGEA4; ENSG00000147381; HLA -A*33:03,HLA-B*54:01
EALGLVGAQA

SEQ ID NO: 5721 - protein, 10 aa, Homo sapiens
  Table 1.2; MAGEA4; ENSG00000147381; HLA -A*25:01,HLA-A*33:03,HLA-A*68:01
EALSNKVDEL

SEQ ID NO: 5722 - protein, 9 aa, Homo sapiens
  Table 1.2; MAGEA4; ENSG00000147381; HLA -A*33:01,HLA-A*33:03,HLA-B*35:03
EAQEEALGL

SEQ ID NO: 5723 - protein, 9 aa, Homo sapiens
  Table 1.2; MAGEA4; ENSG00000147381; HLA -A*30:01,HLA-B*18:01,HLA-B*40:02,HLA-B*49:01
EEALGLVGA

SEQ ID NO: 5724 - protein, 11 aa, Homo sapiens
  Table 1.2; MAGEA4; ENSG00000147381; HLA -A*30:01,HLA-B*44:03
EEALGLVGAQA

SEQ ID NO: 5725 - protein, 9 aa, Homo sapiens
  Table 1.2; MAGEA4; ENSG00000147381; HLA -B*39:01
EEEGPSTSP

SEQ ID NO: 5726 - protein, 11 aa, Homo sapiens
  Table 1.2; MAGEA4; ENSG00000147381; HLA -B*39:01
EEEGPSTSPDA

SEQ ID NO: 5727 - protein, 9 aa, Homo sapiens
  Table 1.2; MAGEA4; ENSG00000147381; HLA -B*49:01
EEIWEELGV

SEQ ID NO: 5728 - protein, 8 aa, Homo sapiens
  Table 1.2; MAGEA4; ENSG00000147381; HLA -B*18:01,HLA-B*37:01,HLA-B*40:02,HLA-B*49:01
EELGVMGV

SEQ ID NO: 5729 - protein, 9 aa, Homo sapiens
  Table 1.2; MAGEA4; ENSG00000147381; HLA -A*25:01,HLA-A*26:01,HLA-A*29:02,HLA-A*30:01,HLA-A*30:02, HLA-A*33:03,HLA-B*15:03,HLA-B*18:01,HLA-B*27:02,HLA-B*27:05, HLA-B*35:01,HLA-B*39:01,HLA-B*40:01,HLA-B*40:02,HLA-B*44:02,
  HLA-B*44:03,HLA-C*16:04
EELGVMGVY

SEQ ID NO: 5730 - protein, 8 aa, Homo sapiens
  Table 1.2; MAGEA4; ENSG00000147381; HLA -B*18:01
EEVPAAES

SEQ ID NO: 5731 - protein, 9 aa, Homo sapiens
  Table 1.2; MAGEA4; ENSG00000147381; HLA -A*30:01,HLA-B*18:01,HLA-B*40:01,HLA-B*40:02,HLA-B*49:01
EEVPAAESA

SEQ ID NO: 5732 - protein, 9 aa, Homo sapiens
  Table 1.2; MAGEA4; ENSG00000147381; HLA -A*33:01,HLA-A*33:03,HLA-A*68:01
EHTVYGEPR

SEQ ID NO: 5733 - protein, 9 aa, Homo sapiens
  Table 1.2; MAGEA4; ENSG00000147381; HLA -A*33:01,HLA-A*33:03
EHVVRVNAR

SEQ ID NO: 5734 - protein, 9 aa, Homo sapiens
  Table 1.2; MAGEA4; ENSG00000147381; HLA -A*26:01
EIWEELGVM

SEQ ID NO: 5735 - protein, 11 aa, Homo sapiens
  Table 1.2; MAGEA4; ENSG00000147381; HLA -A*02:01,HLA-A*02:07,HLA-A*68:02
EIWEELGVMGV

SEQ ID NO: 5736 - protein, 9 aa, Homo sapiens
  Table 1.2; MAGEA4; ENSG00000147381; HLA -A*03:01
ELAHFLLRK

SEQ ID NO: 5737 - protein, 10 aa, Homo sapiens
  Table 1.2; MAGEA4; ENSG00000147381; HLA -A*26:01,HLA-A*29:02
ELAHFLLRKY

SEQ ID NO: 5738 - protein, 8 aa, Homo sapiens
  Table 1.2; MAGEA4; ENSG00000147381; HLA -A*25:01,HLA-A*26:01,HLA-B*15:01,HLA-C*07:01,HLA-C*07:04
ELGVMGVY

SEQ ID NO: 5739 - protein, 8 aa, Homo sapiens
  Table 1.2; MAGEA4; ENSG00000147381; HLA -B*08:01
ELVTKAEM

SEQ ID NO: 5740 - protein, 9 aa, Homo sapiens
  Table 1.2; MAGEA4; ENSG00000147381; HLA -A*24:02,HLA-A*25:01,HLA-A*26:01,HLA-B*08:01
ELVTKAEML

SEQ ID NO: 5741 - protein, 11 aa, Homo sapiens
  Table 1.2; MAGEA4; ENSG00000147381; HLA -A*33:01,HLA-A*33:03,HLA-A*68:01
ELVTKAEMLER

SEQ ID NO: 5742 - protein, 10 aa, Homo sapiens
  Table 1.2; MAGEA4; ENSG00000147381; HLA -A*25:01,HLA-A*26:01,HLA-B*44:02
EMLERVIKNY

SEQ ID NO: 5743 - protein, 9 aa, Homo sapiens
  Table 1.2; MAGEA4; ENSG00000147381; HLA -A*33:01,HLA-A*33:03,HLA-B*51:01
ENYLEYRQV

SEQ ID NO: 5744 - protein, 9 aa, Homo sapiens
  Table 1.2; MAGEA4; ENSG00000147381; HLA -B*39:01
ESAGPPQSP

SEQ ID NO: 5745 - protein, 8 aa, Homo sapiens
  Table 1.2; MAGEA4; ENSG00000147381; HLA -B*08:01
ESLFREAL

SEQ ID NO: 5746 - protein, 11 aa, Homo sapiens
  Table 1.2; MAGEA4; ENSG00000147381; HLA -A*33:01
ESLFREALSNK

SEQ ID NO: 5747 - protein, 8 aa, Homo sapiens
  Table 1.2; MAGEA4; ENSG00000147381; HLA -B*08:01
ETSYVKVL

SEQ ID NO: 5748 - protein, 9 aa, Homo sapiens
  Table 1.2; MAGEA4; ENSG00000147381; HLA -A*68:02
ETSYVKVLE

SEQ ID NO: 5749 - protein, 10 aa, Homo sapiens
  Table 1.2; MAGEA4; ENSG00000147381; HLA -A*26:01,HLA-A*68:01
ETSYVKVLEH

SEQ ID NO: 5750 - protein, 11 aa, Homo sapiens
  Table 1.2; MAGEA4; ENSG00000147381; HLA -A*68:02
ETSYVKVLEHV

SEQ ID NO: 5751 - protein, 9 aa, Homo sapiens
  Table 1.2; MAGEA4; ENSG00000147381; HLA -A*01:01,HLA-A*25:01,HLA-A*26:01,HLA-A*29:02,HLA-A*30:02, HLA-A*32:01,HLA-A*33:03,HLA-A*68:01,HLA-B*15:01,HLA-B*15:03, HLA-B*18:01,HLA-B*35:01,HLA-B*38:01,HLA-B*39:01,HLA-B*44:03,
  HLA-B*46:01,HLA-B*55:01,HLA-B*58:01,HLA-C*03:03,HLA-C*05:01, HLA-C*07:04,HLA-C*07:06,HLA-C*16:02,HLA-C*16:04
EVDPASNTY

SEQ ID NO: 5752 - protein, 10 aa, Homo sapiens
  Table 1.2; MAGEA4; ENSG00000147381; HLA -A*01:01
EVDPASNTYT

SEQ ID NO: 5753 - protein, 11 aa, Homo sapiens
  Table 1.2; MAGEA4; ENSG00000147381; HLA -A*01:01,HLA-A*02:07,HLA-A*03:02,HLA-A*23:01,HLA-A*25:01, HLA-A*26:01,HLA-A*33:01,HLA-A*33:03,HLA-A*68:01,HLA-A*68:02, HLA-B*27:05,HLA-B*35:03,HLA-B*38:01,HLA-B*39:01,HLA-B*40:01,
  HLA-B*55:01,HLA-B*58:01,HLA-C*05:01
EVDPASNTYTL

SEQ ID NO: 5754 - protein, 10 aa, Homo sapiens
  Table 1.2; MAGEA4; ENSG00000147381; HLA -A*26:01
EVPAAESAGP

SEQ ID NO: 5755 - protein, 10 aa, Homo sapiens
  Table 1.2; MAGEA4; ENSG00000147381; HLA -A*33:03
EYRQVPGSNP

SEQ ID NO: 5756 - protein, 8 aa, Homo sapiens
  Table 1.2; MAGEA4; ENSG00000147381; HLA -B*46:01,HLA-B*49:01,HLA-B*51:01,HLA-C*12:03,HLA-C*16:02
FGIDVKEV

SEQ ID NO: 5757 - protein, 8 aa, Homo sapiens
  Table 1.2; MAGEA4; ENSG00000147381; HLA -B*08:01,HLA-B*46:01
FGKASESL

SEQ ID NO: 5758 - protein, 9 aa, Homo sapiens
  Table 1.2; MAGEA4; ENSG00000147381; HLA -C*07:02
FGKASESLK

SEQ ID NO: 5759 - protein, 8 aa, Homo sapiens
  Table 1.2; MAGEA4; ENSG00000147381; HLA -A*02:01,HLA-A*02:04,HLA-A*02:07
FLWGPRAL

SEQ ID NO: 5760 - protein, 9 aa, Homo sapiens
  Table 1.2; MAGEA4; ENSG00000147381; HLA -A*02:01,HLA-A*02:03,HLA-A*02:07
FLWGPRALA

SEQ ID NO: 5761 - protein, 11 aa, Homo sapiens
  Table 1.2; MAGEA4; ENSG00000147381; HLA -A*02:01,HLA-A*02:03,HLA-A*02:04,HLA-A*02:07
FLWGPRALAET

SEQ ID NO: 5762 - protein, 8 aa, Homo sapiens
  Table 1.2; MAGEA4; ENSG00000147381; HLA -B*51:01
FPKTGLLI

SEQ ID NO: 5763 - protein, 9 aa, Homo sapiens
  Table 1.2; MAGEA4; ENSG00000147381; HLA -B*51:01,HLA-B*54:01
FPKTGLLII

SEQ ID NO: 5764 - protein, 10 aa, Homo sapiens
  Table 1.2; MAGEA4; ENSG00000147381; HLA -B*54:01
FPKTGLLIIV

SEQ ID NO: 5765 - protein, 8 aa, Homo sapiens
  Table 1.2; MAGEA4; ENSG00000147381; HLA -B*54:01,HLA-B*55:01,HLA-B*56:01
FPVIFGKA

SEQ ID NO: 5766 - protein, 9 aa, Homo sapiens
  Table 1.2; MAGEA4; ENSG00000147381; HLA -B*54:01,HLA-B*56:01
FPVIFGKAS

SEQ ID NO: 5767 - protein, 11 aa, Homo sapiens
  Table 1.2; MAGEA4; ENSG00000147381; HLA -B*54:01
FPVIFGKASES

SEQ ID NO: 5768 - protein, 9 aa, Homo sapiens
  Table 1.2; MAGEA4; ENSG00000147381; HLA -C*06:02
FREALSNKV

SEQ ID NO: 5769 - protein, 9 aa, Homo sapiens
  Table 1.2; MAGEA4; ENSG00000147381; HLA -A*02:03,HLA-A*30:01,HLA-B*13:02,HLA-B*15:03,HLA-B*49:01, HLA-B*51:01,HLA-B*58:01,HLA-C*02:02,HLA-C*12:03,HLA-C*16:02, HLA-C*16:04
GASALPTTI

SEQ ID NO: 5770 - protein, 11 aa, Homo sapiens
  Table 1.2; MAGEA4; ENSG00000147381; HLA -B*44:02
GEPRKLLTQDW

SEQ ID NO: 5771 - protein, 9 aa, Homo sapiens
  Table 1.2; MAGEA4; ENSG00000147381; HLA -B*15:03
GKASESLKM

SEQ ID NO: 5772 - protein, 9 aa, Homo sapiens
  Table 1.2; MAGEA4; ENSG00000147381; HLA -A*23:01,HLA-A*29:02,HLA-B*15:01,HLA-B*15:03
GLLGNNQIF

SEQ ID NO: 5773 - protein, 11 aa, Homo sapiens
  Table 1.2; MAGEA4; ENSG00000147381; HLA -A*02:04,HLA-A*03:01,HLA-A*03:02,HLA-A*11:01,HLA-A*29:02, HLA-A*31:01,HLA-B*27:02
GLLGNNQIFPK

SEQ ID NO: 5774 - protein, 10 aa, Homo sapiens
  Table 1.2; MAGEA4; ENSG00000147381; HLA -A*02:04
GLLIIVLGTI

SEQ ID NO: 5775 - protein, 8 aa, Homo sapiens
  Table 1.2; MAGEA4; ENSG00000147381; HLA -A*11:01
GNNQIFPK

SEQ ID NO: 5776 - protein, 9 aa, Homo sapiens
  Table 1.2; MAGEA4; ENSG00000147381; HLA -B*56:01
GPPQSPQGA

SEQ ID NO: 5777 - protein, 11 aa, Homo sapiens
  Table 1.2; MAGEA4; ENSG00000147381; HLA -B*56:01
GPPQSPQGASA

SEQ ID NO: 5778 - protein, 10 aa, Homo sapiens
  Table 1.2; MAGEA4; ENSG00000147381; HLA -A*30:02,HLA-B*07:02,HLA-B*15:01,HLA-B*15:03,HLA-B*35:01, HLA-B*55:01
GPRALAETSY

SEQ ID NO: 5779 - protein, 11 aa, Homo sapiens
  Table 1.2; MAGEA4; ENSG00000147381; HLA -B*07:02
GPRALAETSYV

SEQ ID NO: 5780 - protein, 9 aa, Homo sapiens
  Table 1.2; MAGEA4; ENSG00000147381; HLA -A*23:01,HLA-A*24:02,HLA-A*29:02,HLA-A*30:02,HLA-A*31:01, HLA-A*32:01,HLA-B*07:02,HLA-B*15:01,HLA-B*15:03,HLA-B*27:05, HLA-B*37:01,HLA-B*46:01,HLA-B*57:01,HLA-B*58:01,HLA-C*02:02,
  HLA-C*16:01,HLA-C*16:04
GSNPARYEF

SEQ ID NO: 5781 - protein, 11 aa, Homo sapiens
  Table 1.2; MAGEA4; ENSG00000147381; HLA -B*57:01
GSNPARYEFLW

SEQ ID NO: 5782 - protein, 9 aa, Homo sapiens
  Table 1.2; MAGEA4; ENSG00000147381; HLA -A*02:01
GTLEEVPAA

SEQ ID NO: 5783 - protein, 9 aa, Homo sapiens
  Table 1.2; MAGEA4; ENSG00000147381; HLA -A*03:02,HLA-A*11:01,HLA-A*31:01,HLA-A*33:01,HLA-A*33:03, HLA-A*68:01,HLA-C*07:06
GVMGVYDGR

SEQ ID NO: 5784 - protein, 10 aa, Homo sapiens
  Table 1.2; MAGEA4; ENSG00000147381; HLA -A*02:01,HLA-A*02:03,HLA-A*02:04,HLA-A*02:07,HLA-A*03:01, HLA-A*03:02,HLA-A*11:01,HLA-A*23:01,HLA-A*25:01,HLA-A*26:01, HLA-A*30:01,HLA-A*32:01,HLA-A*68:02,HLA-B*08:01,HLA-B*13:02,
  HLA-B*15:01,HLA-B*15:03,HLA-B*27:05,HLA-B*37:01,HLA-B*40:02, HLA-B*46:01,HLA-B*49:01,HLA-B*51:01,HLA-B*55:01,HLA-B*56:01, HLA-B*58:01,HLA-C*02:02,HLA-C*03:04,HLA-C*06:02,HLA-C*12:03, HLA-C*16:02,HLA-C*16:04
GVYDGREHTV

SEQ ID NO: 5785 - protein, 11 aa, Homo sapiens
  Table 1.2; MAGEA4; ENSG00000147381; HLA -A*01:01,HLA-A*03:01,HLA-A*03:02,HLA-A*11:01,HLA-A*25:01, HLA-A*26:01,HLA-A*29:02,HLA-A*30:02,HLA-A*32:01,HLA-B*15:01, HLA-B*15:03,HLA-B*27:05,HLA-B*35:01,HLA-B*46:01,HLA-B*55:01,
  HLA-B*58:01,HLA-C*02:02,HLA-C*07:04,HLA-C*12:03,HLA-C*16:01, HLA-C*16:04
GVYDGREHTVY

SEQ ID NO: 5786 - protein, 8 aa, Homo sapiens
  Table 1.2; MAGEA4; ENSG00000147381; HLA -A*68:01
HTVYGEPR

SEQ ID NO: 5787 - protein, 8 aa, Homo sapiens
  Table 1.2; MAGEA4; ENSG00000147381; HLA -A*68:01
HVVRVNAR

SEQ ID NO: 5788 - protein, 9 aa, Homo sapiens
  Table 1.2; MAGEA4; ENSG00000147381; HLA -A*68:02
HVVRVNARV

SEQ ID NO: 5789 - protein, 8 aa, Homo sapiens
  Table 1.2; MAGEA4; ENSG00000147381; HLA -B*46:01,HLA-B*54:01,HLA-B*56:01,HLA-C*03:03,HLA-C*03:04, HLA-C*14:02
IAMEGDSA

SEQ ID NO: 5790 - protein, 9 aa, Homo sapiens
  Table 1.2; MAGEA4; ENSG00000147381; HLA -A*02:01,HLA-A*02:03,HLA-A*02:04,HLA-A*02:07,HLA-A*32:01, HLA-B*08:01,HLA-B*13:02,HLA-B*40:02,HLA-B*46:01,HLA-B*51:01, HLA-B*54:01,HLA-B*55:01,HLA-B*56:01,HLA-B*57:01,HLA-B*58:01,
  HLA-C*02:02,HLA-C*03:03,HLA-C*03:04,HLA-C*06:02,HLA-C*12:03, HLA-C*16:01,HLA-C*16:02
IAYPSLREA

SEQ ID NO: 5791 - protein, 10 aa, Homo sapiens
  Table 1.2; MAGEA4; ENSG00000147381; HLA -B*54:01,HLA-B*56:01
IAYPSLREAA

SEQ ID NO: 5792 - protein, 11 aa, Homo sapiens
  Table 1.2; MAGEA4; ENSG00000147381; HLA -A*24:02,HLA-B*07:02,HLA-B*35:03,HLA-B*46:01,HLA-B*51:01, HLA-B*54:01,HLA-B*58:01,HLA-C*03:03,HLA-C*03:04
IAYPSLREAAL

SEQ ID NO: 5793 - protein, 9 aa, Homo sapiens
  Table 1.2; MAGEA4; ENSG00000147381; HLA -A*24:02,HLA-C*14:02
IFGKASESL

SEQ ID NO: 5794 - protein, 9 aa, Homo sapiens
  Table 1.2; MAGEA4; ENSG00000147381; HLA -A*23:01,HLA-A*24:02
IFPKTGLLI

SEQ ID NO: 5795 - protein, 10 aa, Homo sapiens
  Table 1.2; MAGEA4; ENSG00000147381; HLA -A*23:01,HLA-A*24:02
IFPKTGLLII

SEQ ID NO: 5796 - protein, 9 aa, Homo sapiens
  Table 1.2; MAGEA4; ENSG00000147381; HLA -B*07:02,HLA-B*08:01,HLA-B*15:01,HLA-B*15:03,HLA-B*35:01, HLA-B*35:03,HLA-B*39:01,HLA-B*46:01,HLA-C*01:02,HLA-C*03:03, HLA-C*03:04,HLA-C*07:04,HLA-C*14:02
IIVLGTIAM

SEQ ID NO: 5797 - protein, 8 aa, Homo sapiens
  Table 1.2; MAGEA4; ENSG00000147381; HLA -A*23:01,HLA-B*08:01,HLA-B*35:01,HLA-B*35:03,HLA-B*39:01, HLA-B*46:01,HLA-C*14:02
IVLGTIAM

SEQ ID NO: 5798 - protein, 10 aa, Homo sapiens
  Table 1.2; MAGEA4; ENSG00000147381; HLA -C*04:01
IVLGTIAMEG

SEQ ID NO: 5799 - protein, 8 aa, Homo sapiens
  Table 1.2; MAGEA4; ENSG00000147381; HLA -B*37:01,HLA-B*58:01,HLA-C*16:01
KASESLKM

SEQ ID NO: 5800 - protein, 9 aa, Homo sapiens
  Table 1.2; MAGEA4; ENSG00000147381; HLA -C*06:02,HLA-C*16:02
KASESLKMI

SEQ ID NO: 5801 - protein, 10 aa, Homo sapiens
  Table 1.2; MAGEA4; ENSG00000147381; HLA -B*57:01
KASESLKMIF

SEQ ID NO: 5802 - protein, 9 aa, Homo sapiens
  Table 1.2; MAGEA4; ENSG00000147381; HLA -A*30:01,HLA-B*18:01,HLA-B*37:01,HLA-B*40:01,HLA-B*40:02, HLA-B*44:02,HLA-B*44:03,HLA-B*49:01
KELVTKAEM

SEQ ID NO: 5803 - protein, 10 aa, Homo sapiens
  Table 1.2; MAGEA4; ENSG00000147381; HLA -A*30:01,HLA-B*40:01,HLA-B*40:02
KELVTKAEML

SEQ ID NO: 5804 - protein, 9 aa, Homo sapiens
  Table 1.2; MAGEA4; ENSG00000147381; HLA -A*30:01,HLA-B*40:01,HLA-B*40:02,HLA-B*49:01
KEVDPASNT

SEQ ID NO: 5805 - protein, 10 aa, Homo sapiens
  Table 1.2; MAGEA4; ENSG00000147381; HLA -A*23:01,HLA-A*25:01,HLA-A*26:01,HLA-A*29:02,HLA-A*30:01, HLA-A*30:02,HLA-A*32:01,HLA-B*15:01,HLA-B*15:03,HLA-B*18:01, HLA-B*27:02,HLA-B*27:05,HLA-B*37:01,HLA-B*39:01,HLA-B*40:01,
  HLA-B*40:02,HLA-B*44:02,HLA-B*44:03,HLA-B*46:01,HLA-B*49:01, HLA-B*57:01,HLA-B*58:01,HLA-C*02:02,HLA-C*14:02,HLA-C*16:01, HLA-C*16:02,HLA-C*16:04
KEVDPASNTY

SEQ ID NO: 5806 - protein, 11 aa, Homo sapiens
  Table 1.2; MAGEA4; ENSG00000147381; HLA -B*40:01,HLA-B*40:02,HLA-B*49:01
KEVDPASNTYT

SEQ ID NO: 5807 - protein, 9 aa, Homo sapiens
  Table 1.2; MAGEA4; ENSG00000147381; HLA -A*03:01,HLA-A*03:02
KMIFGIDVK

SEQ ID NO: 5808 - protein, 11 aa, Homo sapiens
  Table 1.2; MAGEA4; ENSG00000147381; HLA -A*02:01,HLA-A*02:03
KMIFGIDVKEV

SEQ ID NO: 5809 - protein, 8 aa, Homo sapiens
  Table 1.2; MAGEA4; ENSG00000147381; HLA -A*02:07,HLA-C*05:01
KVDELAHF

SEQ ID NO: 5810 - protein, 9 aa, Homo sapiens
  Table 1.2; MAGEA4; ENSG00000147381; HLA -A*01:01,HLA-A*02:01,HLA-A*02:04,HLA-A*02:07,HLA-A*03:01, HLA-A*03:02,HLA-A*31:01,HLA-A*68:02,HLA-B*13:02,HLA-B*38:01, HLA-B*40:01,HLA-B*55:01,HLA-B*58:01,HLA-C*05:01
KVDELAHFL

SEQ ID NO: 5811 - protein, 10 aa, Homo sapiens
  Table 1.2; MAGEA4; ENSG00000147381; HLA -A*02:01,HLA-A*02:04,HLA-A*02:07,HLA-A*03:01,HLA-A*31:01, HLA-A*68:02
KVDELAHFLL

SEQ ID NO: 5812 - protein, 11 aa, Homo sapiens
  Table 1.2; MAGEA4; ENSG00000147381; HLA -A*02:07,HLA-A*03:01,HLA-A*31:01
KVDELAHFLLR

SEQ ID NO: 5813 - protein, 8 aa, Homo sapiens
  Table 1.2; MAGEA4; ENSG00000147381; HLA -A*31:01,HLA-B*57:01
KVLEHVVR

SEQ ID NO: 5814 - protein, 9 aa, Homo sapiens
  Table 1.2; MAGEA4; ENSG00000147381; HLA -A*02:01,HLA-A*02:03,HLA-A*02:04,HLA-A*02:07,HLA-A*03:01, HLA-A*03:02,HLA-A*31:01,HLA-A*32:01,HLA-A*68:02,HLA-B*13:02, HLA-B*37:01,HLA-B*40:02,HLA-B*55:01,HLA-C*02:02
KVLEHVVRV

SEQ ID NO: 5815 - protein, 10 aa, Homo sapiens
  Table 1.2; MAGEA4; ENSG00000147381; HLA -A*03:01
KVLEHVVRVN

SEQ ID NO: 5816 - protein, 11 aa, Homo sapiens
  Table 1.2; MAGEA4; ENSG00000147381; HLA -A*31:01
KVLEHVVRVNA

SEQ ID NO: 5817 - protein, 10 aa, Homo sapiens
  Table 1.2; MAGEA4; ENSG00000147381; HLA -A*31:01
KYRAKELVTK

SEQ ID NO: 5818 - protein, 8 aa, Homo sapiens
  Table 1.2; MAGEA4; ENSG00000147381; HLA -B*27:02
LAETSYVK

SEQ ID NO: 5819 - protein, 9 aa, Homo sapiens
  Table 1.2; MAGEA4; ENSG00000147381; HLA -A*01:01,HLA-C*05:01
LAETSYVKV

SEQ ID NO: 5820 - protein, 9 aa, Homo sapiens
  Table 1.2; MAGEA4; ENSG00000147381; HLA -A*29:02,HLA-B*57:01
LAHFLLRKY

SEQ ID NO: 5821 - protein, 9 aa, Homo sapiens
  Table 1.2; MAGEA4; ENSG00000147381; HLA -B*40:02
LEHVVRVNA

SEQ ID NO: 5822 - protein, 8 aa, Homo sapiens
  Table 1.2; MAGEA4; ENSG00000147381; HLA -B*18:01,HLA-B*37:01
LERVIKNY

SEQ ID NO: 5823 - protein, 9 aa, Homo sapiens
  Table 1.2; MAGEA4; ENSG00000147381; HLA -A*03:02,HLA-A*11:01,HLA-A*68:01,HLA-B*27:02
LGNNQIFPK

SEQ ID NO: 5824 - protein, 10 aa, Homo sapiens
  Table 1.2; MAGEA4; ENSG00000147381; HLA -B*27:02
LGVMGVYDGR

SEQ ID NO: 5825 - protein, 10 aa, Homo sapiens
  Table 1.2; MAGEA4; ENSG00000147381; HLA -B*46:01
LIIVLGTIAM

SEQ ID NO: 5826 - protein, 10 aa, Homo sapiens
  Table 1.2; MAGEA4; ENSG00000147381; HLA -A*03:01,HLA-A*03:02,HLA-A*11:01,HLA-B*27:02
LLGNNQIFPK

SEQ ID NO: 5827 - protein, 9 aa, Homo sapiens
  Table 1.2; MAGEA4; ENSG00000147381; HLA -A*02:03,HLA-A*02:04,HLA-A*02:07
LLIIVLGTI

SEQ ID NO: 5828 - protein, 9 aa, Homo sapiens
  Table 1.2; MAGEA4; ENSG00000147381; HLA -B*35:03,HLA-B*54:01,HLA-B*56:01
LPTTISFTC

SEQ ID NO: 5829 - protein, 10 aa, Homo sapiens
  Table 1.2; MAGEA4; ENSG00000147381; HLA -B*35:01,HLA-B*51:01,HLA-B*54:01
LPTTISFTCW

SEQ ID NO: 5830 - protein, 8 aa, Homo sapiens
  Table 1.2; MAGEA4; ENSG00000147381; HLA -B*58:01
LSNKVDEL

SEQ ID NO: 5831 - protein, 11 aa, Homo sapiens
  Table 1.2; MAGEA4; ENSG00000147381; HLA -B*57:01
LSNKVDELAHF

SEQ ID NO: 5832 - protein, 10 aa, Homo sapiens
  Table 1.2; MAGEA4; ENSG00000147381; HLA -C*06:02
LSYDGLLGNN

SEQ ID NO: 5833 - protein, 10 aa, Homo sapiens
  Table 1.2; MAGEA4; ENSG00000147381; HLA -A*01:01,HLA-A*29:02,HLA-A*30:02,HLA-A*32:01,HLA-B*57:01, HLA-B*58:01,HLA-C*07:01
LTQDWVQENY

SEQ ID NO: 5834 - protein, 11 aa, Homo sapiens
  Table 1.2; MAGEA4; ENSG00000147381; HLA -C*04:01
LTQDWVQENYL

SEQ ID NO: 5835 - protein, 9 aa, Homo sapiens
  Table 1.2; MAGEA4; ENSG00000147381; HLA -A*02:01,HLA-A*02:03,HLA-A*02:07
LVPGTLEEV

SEQ ID NO: 5836 - protein, 9 aa, Homo sapiens
  Table 1.2; MAGEA4; ENSG00000147381; HLA -A*01:01,HLA-A*26:01,HLA-A*29:02,HLA-A*30:02
LVTCLGLSY

SEQ ID NO: 5837 - protein, 8 aa, Homo sapiens
  Table 1.2; MAGEA4; ENSG00000147381; HLA -B*27:02
MIFGIDVK

SEQ ID NO: 5838 - protein, 9 aa, Homo sapiens
  Table 1.2; MAGEA4; ENSG00000147381; HLA -A*68:02
MIFGIDVKE

SEQ ID NO: 5839 - protein, 10 aa, Homo sapiens
  Table 1.2; MAGEA4; ENSG00000147381; HLA -A*02:01,HLA-A*02:03,HLA-A*02:04,HLA-A*02:07,HLA-A*26:01, HLA-A*68:02
MIFGIDVKEV

SEQ ID NO: 5840 - protein, 9 aa, Homo sapiens
  Table 1.2; MAGEA4; ENSG00000147381; HLA -A*01:01,HLA-A*02:07,HLA-A*29:02,HLA-A*30:02,HLA-A*32:01, HLA-B*44:02,HLA-B*44:03,HLA-B*57:01
MLERVIKNY

SEQ ID NO: 5841 - protein, 8 aa, Homo sapiens
  Table 1.2; MAGEA4; ENSG00000147381; HLA -B*46:01,HLA-C*16:01
NARVRIAY

SEQ ID NO: 5842 - protein, 9 aa, Homo sapiens
  Table 1.2; MAGEA4; ENSG00000147381; HLA -A*23:01,HLA-B*15:03
NKVDELAHF

SEQ ID NO: 5843 - protein, 9 aa, Homo sapiens
  Table 1.2; MAGEA4; ENSG00000147381; HLA -B*07:02,HLA-B*13:02,HLA-B*15:01,HLA-B*15:03,HLA-B*27:05, HLA-B*38:01,HLA-B*39:01
NQIFPKTGL

SEQ ID NO: 5844 - protein, 9 aa, Homo sapiens
  Table 1.2; MAGEA4; ENSG00000147381; HLA -A*23:01,HLA-A*25:01,HLA-A*26:01,HLA-A*68:01,HLA-A*68:02, HLA-B*13:02,HLA-B*18:01,HLA-B*35:03,HLA-B*39:01,HLA-B*40:02, HLA-C*06:02,HLA-C*12:03
NTYTLVTCL

SEQ ID NO: 5845 - protein, 9 aa, Homo sapiens
  Table 1.2; MAGEA4; ENSG00000147381; HLA -A*24:02
NYKRCFPVI

SEQ ID NO: 5846 - protein, 8 aa, Homo sapiens
  Table 1.2; MAGEA4; ENSG00000147381; HLA -A*23:01,HLA-B*07:02
PASNTYTL

SEQ ID NO: 5847 - protein, 8 aa, Homo sapiens
  Table 1.2; MAGEA4; ENSG00000147381; HLA -B*27:02
PDAESLFR

SEQ ID NO: 5848 - protein, 8 aa, Homo sapiens
  Table 1.2; MAGEA4; ENSG00000147381; HLA -A*30:02
PGSNPARY

SEQ ID NO: 5849 - protein, 10 aa, Homo sapiens
  Table 1.2; MAGEA4; ENSG00000147381; HLA -A*02:01,HLA-A*02:03
PLVPGTLEEV

SEQ ID NO: 5850 - protein, 9 aa, Homo sapiens
  Table 1.2; MAGEA4; ENSG00000147381; HLA -B*07:02,HLA-B*15:03,HLA-B*27:02,HLA-C*07:01
PRALAETSY

SEQ ID NO: 5851 - protein, 9 aa, Homo sapiens
  Table 1.2; MAGEA4; ENSG00000147381; HLA -B*57:01
PTTISFTCW

SEQ ID NO: 5852 - protein, 8 aa, Homo sapiens
  Table 1.2; MAGEA4; ENSG00000147381; HLA -B*18:01
QDWVQENY

SEQ ID NO: 5853 - protein, 9 aa, Homo sapiens
  Table 1.2; MAGEA4; ENSG00000147381; HLA -A*30:01,HLA-B*37:01
QDWVQENYL

SEQ ID NO: 5854 - protein, 11 aa, Homo sapiens
  Table 1.2; MAGEA4; ENSG00000147381; HLA -A*30:01,HLA-B*40:01
QEAAVSSSSPL

SEQ ID NO: 5855 - protein, 8 aa, Homo sapiens
  Table 1.2; MAGEA4; ENSG00000147381; HLA -B*49:01
QEEALGLV

SEQ ID NO: 5856 - protein, 10 aa, Homo sapiens
  Table 1.2; MAGEA4; ENSG00000147381; HLA -A*30:01,HLA-B*40:02,HLA-B*49:01
QEEALGLVGA

SEQ ID NO: 5857 - protein, 10 aa, Homo sapiens
  Table 1.2; MAGEA4; ENSG00000147381; HLA -B*49:01
QENYLEYRQV

SEQ ID NO: 5858 - protein, 8 aa, Homo sapiens
  Table 1.2; MAGEA4; ENSG00000147381; HLA -B*08:01
QIFPKTGL

SEQ ID NO: 5859 - protein, 9 aa, Homo sapiens
  Table 1.2; MAGEA4; ENSG00000147381; HLA -A*02:03,HLA-A*03:01,HLA-B*08:01,HLA-B*15:03
QIFPKTGLL

SEQ ID NO: 5860 - protein, 10 aa, Homo sapiens
  Table 1.2; MAGEA4; ENSG00000147381; HLA -A*02:03
QIFPKTGLLI

SEQ ID NO: 5861 - protein, 11 aa, Homo sapiens
  Table 1.2; MAGEA4; ENSG00000147381; HLA -A*02:01,HLA-A*02:03,HLA-A*02:04
QIFPKTGLLII

SEQ ID NO: 5862 - protein, 9 aa, Homo sapiens
  Table 1.2; MAGEA4; ENSG00000147381; HLA -C*01:02
QSPQGASAL

SEQ ID NO: 5863 - protein, 9 aa, Homo sapiens
  Table 1.2; MAGEA4; ENSG00000147381; HLA -A*68:01
QVPGSNPAR

SEQ ID NO: 5864 - protein, 10 aa, Homo sapiens
  Table 1.2; MAGEA4; ENSG00000147381; HLA -A*01:01,HLA-A*25:01,HLA-A*26:01,HLA-A*29:02,HLA-A*30:02, HLA-A*32:01,HLA-A*68:01,HLA-B*15:01,HLA-C*07:04
QVPGSNPARY

SEQ ID NO: 5865 - protein, 8 aa, Homo sapiens
  Table 1.2; MAGEA4; ENSG00000147381; HLA -B*57:01
RAKELVTK

SEQ ID NO: 5866 - protein, 9 aa, Homo sapiens
  Table 1.2; MAGEA4; ENSG00000147381; HLA -A*02:03,HLA-A*32:01,HLA-B*54:01,HLA-B*55:01
RAKELVTKA

SEQ ID NO: 5867 - protein, 10 aa, Homo sapiens
  Table 1.2; MAGEA4; ENSG00000147381; HLA -A*03:02,HLA-A*11:01,HLA-B*27:02
RALAETSYVK

SEQ ID NO: 5868 - protein, 9 aa, Homo sapiens
  Table 1.2; MAGEA4; ENSG00000147381; HLA -A*03:01,HLA-A*03:02,HLA-A*11:01,HLA-A*31:01,HLA-B*57:01
RCFPVIFGK

SEQ ID NO: 5869 - protein, 8 aa, Homo sapiens
  Table 1.2; MAGEA4; ENSG00000147381; HLA -B*37:01,HLA-B*49:01
REALSNKV

SEQ ID NO: 5870 - protein, 11 aa, Homo sapiens
  Table 1.2; MAGEA4; ENSG00000147381; HLA -A*30:01,HLA-B*40:01,HLA-B*40:02
REALSNKVDEL

SEQ ID NO: 5871 - protein, 9 aa, Homo sapiens
  Table 1.2; MAGEA4; ENSG00000147381; HLA -A*03:01
RIAYPSLRE

SEQ ID NO: 5872 - protein, 10 aa, Homo sapiens
  Table 1.2; MAGEA4; ENSG00000147381; HLA -A*02:03
RIAYPSLREA

SEQ ID NO: 5873 - protein, 9 aa, Homo sapiens
  Table 1.2; MAGEA4; ENSG00000147381; HLA -B*15:01
RQVPGSNPA

SEQ ID NO: 5874 - protein, 10 aa, Homo sapiens
  Table 1.2; MAGEA4; ENSG00000147381; HLA -A*31:01,HLA-B*27:05
RQVPGSNPAR

SEQ ID NO: 5875 - protein, 11 aa, Homo sapiens
  Table 1.2; MAGEA4; ENSG00000147381; HLA -A*29:02,HLA-A*30:02,HLA-A*32:01,HLA-B*15:01,HLA-B*15:03, HLA-B*44:03,HLA-B*57:01,HLA-B*58:01,HLA-C*16:04
RQVPGSNPARY

SEQ ID NO: 5876 - protein, 8 aa, Homo sapiens
  Table 1.2; MAGEA4; ENSG00000147381; HLA -A*31:01
RVIKNYKR

SEQ ID NO: 5877 - protein, 10 aa, Homo sapiens
  Table 1.2; MAGEA4; ENSG00000147381; HLA -A*03:01,HLA-A*30:02,HLA-A*32:01
RVNARVRIAY

SEQ ID NO: 5878 - protein, 9 aa, Homo sapiens
  Table 1.2; MAGEA4; ENSG00000147381; HLA -A*31:01,HLA-B*07:02,HLA-B*57:01
RVRIAYPSL

SEQ ID NO: 5879 - protein, 10 aa, Homo sapiens
  Table 1.2; MAGEA4; ENSG00000147381; HLA -A*03:01,HLA-A*31:01
RVRIAYPSLR

SEQ ID NO: 5880 - protein, 9 aa, Homo sapiens
  Table 1.2; MAGEA4; ENSG00000147381; HLA -A*02:01,HLA-A*02:04,HLA-A*02:07,HLA-A*11:01,HLA-A*23:01, HLA-A*24:02,HLA-A*25:01,HLA-A*26:01,HLA-A*29:02,HLA-A*30:01, HLA-A*30:02,HLA-A*31:01,HLA-A*32:01,HLA-A*33:01,HLA-A*33:03,
  HLA-A*68:01,HLA-A*68:02,HLA-B*07:02,HLA-B*08:01,HLA-B*15:01, HLA-B*15:03,HLA-B*18:01,HLA-B*27:02,HLA-B*35:01,HLA-B*35:03, HLA-B*37:01,HLA-B*38:01,HLA-B*39:01,HLA-B*40:02,HLA-B*44:02, HLA-B*44:03,HLA-B*46:01,HLA-B*51:01,HLA-B*54:01,HLA-B*55:01,
  HLA-B*56:01,HLA-B*57:01,HLA-B*58:01,HLA-C*01:02,HLA-C*02:02, HLA-C*03:03,HLA-C*03:04,HLA-C*04:01,HLA-C*05:01,HLA-C*07:02, HLA-C*07:04,HLA-C*07:06,HLA-C*12:03,HLA-C*14:02,HLA-C*16:01, HLA-C*16:02,HLA-C*16:04
SALPTTISF

SEQ ID NO: 5881 - protein, 9 aa, Homo sapiens
  Table 1.2; MAGEA4; ENSG00000147381; HLA -A*30:01,HLA-B*40:01
SEEEIWEEL

SEQ ID NO: 5882 - protein, 8 aa, Homo sapiens
  Table 1.2; MAGEA4; ENSG00000147381; HLA -B*18:01,HLA-B*37:01,HLA-B*44:02,HLA-B*44:03
SESLKMIF

SEQ ID NO: 5883 - protein, 10 aa, Homo sapiens
  Table 1.2; MAGEA4; ENSG00000147381; HLA -A*03:01,HLA-A*03:02
SLFREALSNK

SEQ ID NO: 5884 - protein, 10 aa, Homo sapiens
  Table 1.2; MAGEA4; ENSG00000147381; HLA -A*02:03
SLKMIFGIDV

SEQ ID NO: 5885 - protein, 8 aa, Homo sapiens
  Table 1.2; MAGEA4; ENSG00000147381; HLA -B*55:01,HLA-C*05:01
SPDAESLF

SEQ ID NO: 5886 - protein, 11 aa, Homo sapiens
  Table 1.2; MAGEA4; ENSG00000147381; HLA -B*54:01,HLA-B*55:01,HLA-B*56:01
SPDAESLFREA

SEQ ID NO: 5887 - protein, 8 aa, Homo sapiens
  Table 1.2; MAGEA4; ENSG00000147381; HLA -B*07:02,HLA-B*08:01,HLA-C*07:02
SPLVPGTL

SEQ ID NO: 5888 - protein, 11 aa, Homo sapiens
  Table 1.2; MAGEA4; ENSG00000147381; HLA -B*54:01,HLA-B*56:01
SPLVPGTLEEV

SEQ ID NO: 5889 - protein, 8 aa, Homo sapiens
  Table 1.2; MAGEA4; ENSG00000147381; HLA -B*07:02,HLA-C*07:02
SPQGASAL

SEQ ID NO: 5890 - protein, 9 aa, Homo sapiens
  Table 1.2; MAGEA4; ENSG00000147381; HLA -B*39:01
SQEEEGPST

SEQ ID NO: 5891 - protein, 9 aa, Homo sapiens
  Table 1.2; MAGEA4; ENSG00000147381; HLA -A*02:07,HLA-A*31:01,HLA-B*07:02,HLA-B*46:01,HLA-B*58:01, HLA-C*01:02,HLA-C*07:02
SSPLVPGTL

SEQ ID NO: 5892 - protein, 10 aa, Homo sapiens
  Table 1.2; MAGEA4; ENSG00000147381; HLA -A*30:02
SSSPLVPGTL

SEQ ID NO: 5893 - protein, 10 aa, Homo sapiens
  Table 1.2; MAGEA4; ENSG00000147381; HLA -B*57:01
STSPDAESLF

SEQ ID NO: 5894 - protein, 11 aa, Homo sapiens
  Table 1.2; MAGEA4; ENSG00000147381; HLA -A*11:01,HLA-A*68:01,HLA-C*07:06
STSPDAESLFR

SEQ ID NO: 5895 - protein, 9 aa, Homo sapiens
  Table 1.2; MAGEA4; ENSG00000147381; HLA -C*04:01
SYDGLLGNN

SEQ ID NO: 5896 - protein, 11 aa, Homo sapiens
  Table 1.2; MAGEA4; ENSG00000147381; HLA -A*23:01,HLA-A*24:02,HLA-B*35:03,HLA-B*38:01,HLA-C*04:01
SYDGLLGNNQI

SEQ ID NO: 5897 - protein, 9 aa, Homo sapiens
  Table 1.2; MAGEA4; ENSG00000147381; HLA -A*23:01,HLA-A*24:02,HLA-A*68:02
SYVKVLEHV

SEQ ID NO: 5898 - protein, 10 aa, Homo sapiens
  Table 1.2; MAGEA4; ENSG00000147381; HLA -A*24:02
SYVKVLEHVV

SEQ ID NO: 5899 - protein, 11 aa, Homo sapiens
  Table 1.2; MAGEA4; ENSG00000147381; HLA -A*31:01
SYVKVLEHVVR

SEQ ID NO: 5900 - protein, 9 aa, Homo sapiens
  Table 1.2; MAGEA4; ENSG00000147381; HLA -B*39:01
TIAMEGDSA

SEQ ID NO: 5901 - protein, 10 aa, Homo sapiens
  Table 1.2; MAGEA4; ENSG00000147381; HLA -A*29:02
TLVTCLGLSY

SEQ ID NO: 5902 - protein, 9 aa, Homo sapiens
  Table 1.2; MAGEA4; ENSG00000147381; HLA -A*01:01,HLA-A*30:02,HLA-A*32:01,HLA-B*15:01,HLA-B*15:03, HLA-B*38:01,HLA-B*39:01
TQDWVQENY

SEQ ID NO: 5903 - protein, 10 aa, Homo sapiens
  Table 1.2; MAGEA4; ENSG00000147381; HLA -B*38:01
TQDWVQENYL

SEQ ID NO: 5904 - protein, 8 aa, Homo sapiens
  Table 1.2; MAGEA4; ENSG00000147381; HLA -C*01:02
TSPDAESL

SEQ ID NO: 5905 - protein, 9 aa, Homo sapiens
  Table 1.2; MAGEA4; ENSG00000147381; HLA -C*01:02,HLA-C*05:01
TSPDAESLF

SEQ ID NO: 5906 - protein, 10 aa, Homo sapiens
  Table 1.2; MAGEA4; ENSG00000147381; HLA -A*68:01,HLA-B*27:02
TSPDAESLFR

SEQ ID NO: 5907 - protein, 9 aa, Homo sapiens
  Table 1.2; MAGEA4; ENSG00000147381; HLA -A*03:01,HLA-A*11:01,HLA-C*07:06,HLA-C*12:03
TSYVKVLEH

SEQ ID NO: 5908 - protein, 10 aa, Homo sapiens
  Table 1.2; MAGEA4; ENSG00000147381; HLA -A*02:03,HLA-A*68:02
TSYVKVLEHV

SEQ ID NO: 5909 - protein, 9 aa, Homo sapiens
  Table 1.2; MAGEA4; ENSG00000147381; HLA -C*05:01
TTEEQEAAV

SEQ ID NO: 5910 - protein, 8 aa, Homo sapiens
  Table 1.2; MAGEA4; ENSG00000147381; HLA -A*25:01,HLA-B*57:01
TTISFTCW

SEQ ID NO: 5911 - protein, 9 aa, Homo sapiens
  Table 1.2; MAGEA4; ENSG00000147381; HLA -A*31:01
TTISFTCWR

SEQ ID NO: 5912 - protein, 9 aa, Homo sapiens
  Table 1.2; MAGEA4; ENSG00000147381; HLA -A*02:03,HLA-A*03:01,HLA-A*03:02,HLA-A*11:01,HLA-A*25:01, HLA-A*31:01,HLA-A*68:01,HLA-A*68:02,HLA-C*06:02,HLA-C*12:03
TVYGEPRKL

SEQ ID NO: 5913 - protein, 8 aa, Homo sapiens
  Table 1.2; MAGEA4; ENSG00000147381; HLA -A*23:01,HLA-A*24:02,HLA-C*14:02
TYTLVTCL

SEQ ID NO: 5914 - protein, 8 aa, Homo sapiens
  Table 1.2; MAGEA4; ENSG00000147381; HLA -B*37:01,HLA-B*40:02,HLA-C*07:04
VDELAHFL

SEQ ID NO: 5915 - protein, 8 aa, Homo sapiens
  Table 1.2; MAGEA4; ENSG00000147381; HLA -B*15:03,HLA-B*37:01,HLA-B*39:01,HLA-C*01:02,HLA-C*04:01, HLA-C*07:01
VDPASNTY

SEQ ID NO: 5916 - protein, 10 aa, Homo sapiens
  Table 1.2; MAGEA4; ENSG00000147381; HLA -B*07:02
VDPASNTYTL

SEQ ID NO: 5917 - protein, 8 aa, Homo sapiens
  Table 1.2; MAGEA4; ENSG00000147381; HLA -A*30:01,HLA-B*40:01
VEAQEEAL

SEQ ID NO: 5918 - protein, 10 aa, Homo sapiens
  Table 1.2; MAGEA4; ENSG00000147381; HLA -A*30:01,HLA-B*40:01,HLA-B*40:02,HLA-B*44:03,HLA-B*49:01
VEAQEEALGL

SEQ ID NO: 5919 - protein, 11 aa, Homo sapiens
  Table 1.2; MAGEA4; ENSG00000147381; HLA -B*49:01
VEAQEEALGLV

SEQ ID NO: 5920 - protein, 11 aa, Homo sapiens
  Table 1.2; MAGEA4; ENSG00000147381; HLA -A*03:01,HLA-A*03:02,HLA-A*11:01
VIFGKASESLK

SEQ ID NO: 5921 - protein, 11 aa, Homo sapiens
  Table 1.2; MAGEA4; ENSG00000147381; HLA -B*15:03
VKEVDPASNTY

SEQ ID NO: 5922 - protein, 10 aa, Homo sapiens
  Table 1.2; MAGEA4; ENSG00000147381; HLA -A*02:07
VLEHVVRVNA

SEQ ID NO: 5923 - protein, 9 aa, Homo sapiens
  Table 1.2; MAGEA4; ENSG00000147381; HLA -A*30:02,HLA-A*32:01,HLA-B*46:01,HLA-C*16:01
VNARVRIAY

SEQ ID NO: 5924 - protein, 9 aa, Homo sapiens
  Table 1.2; MAGEA4; ENSG00000147381; HLA -A*01:01,HLA-A*29:02,HLA-A*30:02,HLA-B*35:01,HLA-B*55:01
VPGSNPARY

SEQ ID NO: 5925 - protein, 11 aa, Homo sapiens
  Table 1.2; MAGEA4; ENSG00000147381; HLA -B*35:01
VPGSNPARYEF

SEQ ID NO: 5926 - protein, 8 aa, Homo sapiens
  Table 1.2; MAGEA4; ENSG00000147381; HLA -B*51:01,HLA-B*56:01
VPGTLEEV

SEQ ID NO: 5927 - protein, 11 aa, Homo sapiens
  Table 1.2; MAGEA4; ENSG00000147381; HLA -B*56:01
VPGTLEEVPAA

SEQ ID NO: 5928 - protein, 8 aa, Homo sapiens
  Table 1.2; MAGEA4; ENSG00000147381; HLA -A*01:01,HLA-B*15:01,HLA-B*15:03,HLA-B*27:05,HLA-B*39:01, HLA-C*07:01
VQENYLEY

SEQ ID NO: 5929 - protein, 9 aa, Homo sapiens
  Table 1.2; MAGEA4; ENSG00000147381; HLA -A*31:01
VQENYLEYR

SEQ ID NO: 5930 - protein, 9 aa, Homo sapiens
  Table 1.2; MAGEA4; ENSG00000147381; HLA -A*31:01,HLA-B*27:05
VRIAYPSLR

SEQ ID NO: 5931 - protein, 8 aa, Homo sapiens
  Table 1.2; MAGEA4; ENSG00000147381; HLA -A*01:01,HLA-C*07:01
VTCLGLSY

SEQ ID NO: 5932 - protein, 9 aa, Homo sapiens
  Table 1.2; MAGEA4; ENSG00000147381; HLA -A*03:01,HLA-A*11:01,HLA-A*31:01,HLA-A*33:01,HLA-A*33:03, HLA-A*68:01,HLA-B*57:01,HLA-C*07:06
VTKAEMLER

SEQ ID NO: 5933 - protein, 10 aa, Homo sapiens
  Table 1.2; MAGEA4; ENSG00000147381; HLA -A*02:03
VTKAEMLERV

SEQ ID NO: 5934 - protein, 9 aa, Homo sapiens
  Table 1.2; MAGEA4; ENSG00000147381; HLA -A*31:01
VVRVNARVR

SEQ ID NO: 5935 - protein, 9 aa, Homo sapiens
  Table 1.2; MAGEA4; ENSG00000147381; HLA -A*02:01,HLA-A*02:07,HLA-A*23:01,HLA-A*24:02,HLA-A*32:01, HLA-B*08:01,HLA-B*35:01,HLA-B*35:03,HLA-B*38:01,HLA-B*39:01, HLA-B*51:01,HLA-B*55:01,HLA-C*01:02,HLA-C*04:01,HLA-C*05:01,
  HLA-C*14:02,HLA-C*16:01,HLA-C*16:02
VYDGREHTV

SEQ ID NO: 5936 - protein, 10 aa, Homo sapiens
  Table 1.2; MAGEA4; ENSG00000147381; HLA -A*01:01,HLA-A*23:01,HLA-A*24:02,HLA-A*29:02,HLA-B*35:01, HLA-B*55:01,HLA-C*04:01,HLA-C*07:01
VYDGREHTVY

SEQ ID NO: 5937 - protein, 8 aa, Homo sapiens
  Table 1.2; MAGEA4; ENSG00000147381; HLA -A*23:01,HLA-A*24:02
VYGEPRKL

SEQ ID NO: 5938 - protein, 9 aa, Homo sapiens
  Table 1.2; MAGEA4; ENSG00000147381; HLA -A*23:01,HLA-A*24:02
VYGEPRKLL

SEQ ID NO: 5939 - protein, 9 aa, Homo sapiens
  Table 1.2; MAGEA4; ENSG00000147381; HLA -B*40:02,HLA-B*49:01
WEELGVMGV

SEQ ID NO: 5940 - protein, 9 aa, Homo sapiens
  Table 1.2; MAGEA4; ENSG00000147381; HLA -A*01:01,HLA-A*03:01,HLA-A*25:01,HLA-A*26:01,HLA-A*29:02, HLA-A*30:02,HLA-B*15:01,HLA-B*35:01,HLA-B*46:01,HLA-C*07:04
WVQENYLEY

SEQ ID NO: 5941 - protein, 10 aa, Homo sapiens
  Table 1.2; MAGEA4; ENSG00000147381; HLA -A*31:01
WVQENYLEYR

SEQ ID NO: 5942 - protein, 11 aa, Homo sapiens
  Table 1.2; MAGEA4; ENSG00000147381; HLA -C*07:01
YDGLLGNNQIF

SEQ ID NO: 5943 - protein, 8 aa, Homo sapiens
  Table 1.2; MAGEA4; ENSG00000147381; HLA -B*40:02,HLA-C*06:02,HLA-C*07:01,HLA-C*07:04
YDGREHTV

SEQ ID NO: 5944 - protein, 9 aa, Homo sapiens
  Table 1.2; MAGEA4; ENSG00000147381; HLA -A*01:01,HLA-A*29:02,HLA-B*15:01,HLA-B*15:03,HLA-C*07:01
YDGREHTVY

SEQ ID NO: 5945 - protein, 9 aa, Homo sapiens
  Table 1.2; MAGEA4; ENSG00000147381; HLA -A*02:04
YEFLWGPRA

SEQ ID NO: 5946 - protein, 10 aa, Homo sapiens
  Table 1.2; MAGEA4; ENSG00000147381; HLA -A*30:01,HLA-B*40:02
YEFLWGPRAL

SEQ ID NO: 5947 - protein, 8 aa, Homo sapiens
  Table 1.2; MAGEA4; ENSG00000147381; HLA -B*54:01,HLA-B*55:01,HLA-B*56:01
YPSLREAA

SEQ ID NO: 5948 - protein, 9 aa, Homo sapiens
  Table 1.2; MAGEA4; ENSG00000147381; HLA -B*07:02,HLA-B*08:01,HLA-B*35:01,HLA-B*35:03,HLA-B*37:01, HLA-B*39:01,HLA-B*40:01,HLA-B*51:01,HLA-B*54:01,HLA-B*55:01, HLA-B*56:01,HLA-C*03:03,HLA-C*03:04,HLA-C*07:02,HLA-C*16:01
YPSLREAAL

SEQ ID NO: 5949 - protein, 10 aa, Homo sapiens
  Table 1.2; MAGEA4; ENSG00000147381; HLA -B*07:02
YPSLREAALL

SEQ ID NO: 5950 - protein, 9 aa, Homo sapiens
  Table 1.2; MAGEA4; ENSG00000147381; HLA -B*27:02,HLA-B*27:05,HLA-C*06:02
YRAKELVTK

SEQ ID NO: 5951 - protein, 9 aa, Homo sapiens
  Table 1.2; MAGEA4; ENSG00000147381; HLA -B*27:05
YRQVPGSNP

SEQ ID NO: 5952 - protein, 11 aa, Homo sapiens
  Table 1.2; MAGEA4; ENSG00000147381; HLA -B*27:05
YRQVPGSNPAR

SEQ ID NO: 5953 - protein, 8 aa, Homo sapiens
  Table 1.2; MAGEA4; ENSG00000147381; HLA -A*02:03,HLA-A*68:02,HLA-B*08:01,HLA-B*13:02,HLA-B*40:02, HLA-B*54:01
YVKVLEHV

SEQ ID NO: 5954 - protein, 9 aa, Homo sapiens
  Table 1.2; MAGEA4; ENSG00000147381; HLA -A*02:01,HLA-A*02:03,HLA-A*02:04,HLA-A*02:07,HLA-A*24:02, HLA-A*30:01,HLA-A*31:01,HLA-A*32:01,HLA-A*68:02,HLA-B*08:01, HLA-B*13:02,HLA-B*40:02,HLA-B*51:01,HLA-B*54:01,HLA-B*55:01,
  HLA-B*57:01,HLA-B*58:01,HLA-C*02:02,HLA-C*04:01,HLA-C*07:01, HLA-C*07:04,HLA-C*12:03
YVKVLEHVV

SEQ ID NO: 5955 - protein, 10 aa, Homo sapiens
  Table 1.2; MAGEA4; ENSG00000147381; HLA -A*31:01,HLA-A*33:01,HLA-A*33:03
YVKVLEHVVR

SEQ ID NO: 5956 - protein, 9 aa, Homo sapiens
  Table 1.2; MAGEA6; ENSG00000197172; HLA -B*08:01,HLA-C*16:01
AALSRKVAK

SEQ ID NO: 5957 - protein, 8 aa, Homo sapiens
  Table 1.2; MAGEA6; ENSG00000197172; HLA -C*03:03,HLA-C*03:04,HLA-C*05:01
AASSSSTL

SEQ ID NO: 5958 - protein, 9 aa, Homo sapiens
  Table 1.2; MAGEA6; ENSG00000197172; HLA -B*13:02
AASSSSTLV

SEQ ID NO: 5959 - protein, 8 aa, Homo sapiens
  Table 1.2; MAGEA6; ENSG00000197172; HLA -A*30:01,HLA-B*13:02,HLA-B*18:01,HLA-B*37:01,HLA-B*40:01, HLA-B*40:02,HLA-B*44:02,HLA-B*44:03,HLA-B*49:01
AEMLGSVV

SEQ ID NO: 5960 - protein, 9 aa, Homo sapiens
  Table 1.2; MAGEA6; ENSG00000197172; HLA -B*40:01,HLA-B*40:02,HLA-B*49:01
AEMLGSVVG

SEQ ID NO: 5961 - protein, 10 aa, Homo sapiens
  Table 1.2; MAGEA6; ENSG00000197172; HLA -B*44:02,HLA-B*49:01
AEMLGSVVGN

SEQ ID NO: 5962 - protein, 11 aa, Homo sapiens
  Table 1.2; MAGEA6; ENSG00000197172; HLA -A*30:01,HLA-A*32:01,HLA-B*27:02,HLA-B*37:01,HLA-B*40:01, HLA-B*44:02,HLA-B*44:03,HLA-B*49:01,HLA-B*57:01,HLA-C*16:04
AEMLGSVVGNW

SEQ ID NO: 5963 - protein, 10 aa, Homo sapiens
  Table 1.2; MAGEA6; ENSG00000197172; HLA -A*30:01,HLA-B*40:02,HLA-B*49:01
AESPDPPQSP

SEQ ID NO: 5964 - protein, 9 aa, Homo sapiens
  Table 1.2; MAGEA6; ENSG00000197172; HLA -A*02:01,HLA-A*02:03,HLA-B*55:01,HLA-B*56:01
ALGLVGAQA

SEQ ID NO: 5965 - protein, 11 aa, Homo sapiens
  Table 1.2; MAGEA6; ENSG00000197172; HLA -B*56:01
ALGLVGAQAPA

SEQ ID NO: 5966 - protein, 8 aa, Homo sapiens
  Table 1.2; MAGEA6; ENSG00000197172; HLA -A*02:01,HLA-A*02:03,HLA-A*02:07,HLA-B*13:02,HLA-B*49:01, HLA-B*55:01
ALIETSYV

SEQ ID NO: 5967 - protein, 9 aa, Homo sapiens
  Table 1.2; MAGEA6; ENSG00000197172; HLA -A*01:01,HLA-A*03:01,HLA-A*03:02,HLA-A*11:01,HLA-A*29:02, HLA-B*46:01
ALIETSYVK

SEQ ID NO: 5968 - protein, 10 aa, Homo sapiens
  Table 1.2; MAGEA6; ENSG00000197172; HLA -A*02:01,HLA-A*02:03,HLA-A*02:04,HLA-A*02:07,HLA-B*13:02, HLA-B*55:01
ALIETSYVKV

SEQ ID NO: 5969 - protein, 11 aa, Homo sapiens
  Table 1.2; MAGEA6; ENSG00000197172; HLA -A*02:01,HLA-A*02:03,HLA-A*02:04,HLA-A*02:07
ALIETSYVKVL

SEQ ID NO: 5970 - protein, 9 aa, Homo sapiens
  Table 1.2; MAGEA6; ENSG00000197172; HLA -A*02:03,HLA-A*02:04
ALSRKVAKL

SEQ ID NO: 5971 - protein, 9 aa, Homo sapiens
  Table 1.2; MAGEA6; ENSG00000197172; HLA -B*55:01,HLA-B*56:01
APATEEQEA

SEQ ID NO: 5972 - protein, 10 aa, Homo sapiens
  Table 1.2; MAGEA6; ENSG00000197172; HLA -B*55:01,HLA-B*56:01
APATEEQEAA

SEQ ID NO: 5973 - protein, 9 aa, Homo sapiens
  Table 1.2; MAGEA6; ENSG00000197172; HLA -B*15:01
AQAPATEEQ

SEQ ID NO: 5974 - protein, 11 aa, Homo sapiens
  Table 1.2; MAGEA6; ENSG00000197172; HLA -B*27:05,HLA-B*39:01
AQAPATEEQEA

SEQ ID NO: 5975 - protein, 10 aa, Homo sapiens
  Table 1.2; MAGEA6; ENSG00000197172; HLA -B*27:02,HLA-B*27:05,HLA-B*38:01
AREPVTKAEM

SEQ ID NO: 5976 - protein, 8 aa, Homo sapiens
  Table 1.2; MAGEA6; ENSG00000197172; HLA -C*05:01
ASDSLQLV

SEQ ID NO: 5977 - protein, 9 aa, Homo sapiens
  Table 1.2; MAGEA6; ENSG00000197172; HLA -A*01:01,HLA-A*02:07,HLA-A*11:01,HLA-A*29:02,HLA-A*32:01, HLA-B*35:01,HLA-B*38:01,HLA-B*44:03,HLA-B*57:01,HLA-B*58:01, HLA-C*02:02,HLA-C*05:01,HLA-C*12:03
ASDSLQLVF

SEQ ID NO: 5978 - protein, 8 aa, Homo sapiens
  Table 1.2; MAGEA6; ENSG00000197172; HLA -B*37:01
ASSLPTTM

SEQ ID NO: 5979 - protein, 10 aa, Homo sapiens
  Table 1.2; MAGEA6; ENSG00000197172; HLA -A*01:01,HLA-A*03:01,HLA-A*11:01,HLA-A*29:02,HLA-A*30:02, HLA-A*32:01,HLA-B*15:01,HLA-B*46:01,HLA-B*58:01,HLA-C*16:02
ASSLPTTMNY

SEQ ID NO: 5980 - protein, 8 aa, Homo sapiens
  Table 1.2; MAGEA6; ENSG00000197172; HLA -A*01:01
ATCLGLSY

SEQ ID NO: 5981 - protein, 9 aa, Homo sapiens
  Table 1.2; MAGEA6; ENSG00000197172; HLA -B*38:01,HLA-B*51:01
DGLLGDNQI

SEQ ID NO: 5982 - protein, 8 aa, Homo sapiens
  Table 1.2; MAGEA6; ENSG00000197172; HLA -B*08:01,HLA-B*51:01
DPIGHVYI

SEQ ID NO: 5983 - protein, 9 aa, Homo sapiens
  Table 1.2; MAGEA6; ENSG00000197172; HLA -A*25:01,HLA-A*26:01,HLA-A*33:01,HLA-B*35:01,HLA-B*35:03, HLA-B*51:01
DPIGHVYIF

SEQ ID NO: 5984 - protein, 10 aa, Homo sapiens
  Table 1.2; MAGEA6; ENSG00000197172; HLA -B*54:01
DPIGHVYIFA

SEQ ID NO: 5985 - protein, 9 aa, Homo sapiens
  Table 1.2; MAGEA6; ENSG00000197172; HLA -A*26:01,HLA-A*33:01,HLA-B*35:01
DPKKLLTQY

SEQ ID NO: 5986 - protein, 8 aa, Homo sapiens
  Table 1.2; MAGEA6; ENSG00000197172; HLA -B*51:01
DPPQSPQG

SEQ ID NO: 5987 - protein, 8 aa, Homo sapiens
  Table 1.2; MAGEA6; ENSG00000197172; HLA -A*33:01,HLA-A*68:01
DSIFGDPK

SEQ ID NO: 5988 - protein, 9 aa, Homo sapiens
  Table 1.2; MAGEA6; ENSG00000197172; HLA -A*33:01,HLA-A*68:01
DSIFGDPKK

SEQ ID NO: 5989 - protein, 10 aa, Homo sapiens
  Table 1.2; MAGEA6; ENSG00000197172; HLA -A*68:01
DSIFGDPKKL

SEQ ID NO: 5990 - protein, 9 aa, Homo sapiens
  Table 1.2; MAGEA6; ENSG00000197172; HLA -A*25:01,HLA-A*26:01,HLA-A*33:03,HLA-A*68:01,HLA-B*07:02, HLA-B*35:01,HLA-B*35:03,HLA-B*39:01,HLA-B*51:01,HLA-C*01:02, HLA-C*03:03,HLA-C*03:04,HLA-C*05:01
EAASSSSTL

SEQ ID NO: 5991 - protein, 8 aa, Homo sapiens
  Table 1.2; MAGEA6; ENSG00000197172; HLA -B*54:01
EALGLVGA

SEQ ID NO: 5992 - protein, 9 aa, Homo sapiens
  Table 1.2; MAGEA6; ENSG00000197172; HLA -A*26:01,HLA-A*33:01,HLA-A*33:03,HLA-B*27:05,HLA-C*07:01, HLA-C*12:03
EALGLVGAQ

SEQ ID NO: 5993 - protein, 10 aa, Homo sapiens
  Table 1.2; MAGEA6; ENSG00000197172; HLA -A*26:01,HLA-A*33:03,HLA-A*68:01,HLA-B*54:01
EALGLVGAQA

SEQ ID NO: 5994 - protein, 9 aa, Homo sapiens
  Table 1.2; MAGEA6; ENSG00000197172; HLA -A*25:01,HLA-A*26:01,HLA-A*33:03,HLA-A*68:01
EARGEALGL

SEQ ID NO: 5995 - protein, 9 aa, Homo sapiens
  Table 1.2; MAGEA6; ENSG00000197172; HLA -B*27:02
EDSIFGDPK

SEQ ID NO: 5996 - protein, 8 aa, Homo sapiens
  Table 1.2; MAGEA6; ENSG00000197172; HLA -B*18:01
EEEGPSTF

SEQ ID NO: 5997 - protein, 11 aa, Homo sapiens
  Table 1.2; MAGEA6; ENSG00000197172; HLA -B*39:01,HLA-B*40:01
EEEGPSTFPDL

SEQ ID NO: 5998 - protein, 11 aa, Homo sapiens
  Table 1.2; MAGEA6; ENSG00000197172; HLA -B*40:01
EEGLEARGEAL

SEQ ID NO: 5999 - protein, 10 aa, Homo sapiens
  Table 1.2; MAGEA6; ENSG00000197172; HLA -A*30:01,HLA-B*40:01,HLA-B*40:02,HLA-B*44:02,HLA-B*44:03
EEGPSTFPDL

SEQ ID NO: 6000 - protein, 8 aa, Homo sapiens
  Table 1.2; MAGEA6; ENSG00000197172; HLA -B*18:01,HLA-B*49:01,HLA-B*51:01
EELSVLEV

SEQ ID NO: 6001 - protein, 9 aa, Homo sapiens
  Table 1.2; MAGEA6; ENSG00000197172; HLA -A*23:01,HLA-A*30:01,HLA-B*18:01,HLA-B*40:01,HLA-B*44:02, HLA-B*44:03
EELSVLEVF

SEQ ID NO: 6002 - protein, 8 aa, Homo sapiens
  Table 1.2; MAGEA6; ENSG00000197172; HLA -A*33:01,HLA-A*33:03
EFQAALSR

SEQ ID NO: 6003 - protein, 9 aa, Homo sapiens
  Table 1.2; MAGEA6; ENSG00000197172; HLA -A*33:01,HLA-A*33:03
EFQAALSRK

SEQ ID NO: 6004 - protein, 10 aa, Homo sapiens
  Table 1.2; MAGEA6; ENSG00000197172; HLA -A*25:01,HLA-A*26:01,HLA-A*68:01
ELMEVDPIGH

SEQ ID NO: 6005 - protein, 11 aa, Homo sapiens
  Table 1.2; MAGEA6; ENSG00000197172; HLA -A*68:02
ELMEVDPIGHV

SEQ ID NO: 6006 - protein, 10 aa, Homo sapiens
  Table 1.2; MAGEA6; ENSG00000197172; HLA -A*25:01,HLA-A*26:01,HLA-A*33:01,HLA-A*33:03,HLA-B*44:02, HLA-B*44:03,HLA-B*57:01
EMLGSVVGNW

SEQ ID NO: 6007 - protein, 9 aa, Homo sapiens
  Table 1.2; MAGEA6; ENSG00000197172; HLA -A*33:01
ENYLEYRQV

SEQ ID NO: 6008 - protein, 8 aa, Homo sapiens
  Table 1.2; MAGEA6; ENSG00000197172; HLA -B*07:02,HLA-B*08:01,HLA-B*35:01,HLA-B*35:03,HLA-B*55:01, HLA-C*07:02
EPVTKAEM

SEQ ID NO: 6009 - protein, 9 aa, Homo sapiens
  Table 1.2; MAGEA6; ENSG00000197172; HLA -A*68:01,HLA-B*07:02,HLA-B*08:01,HLA-B*35:01,HLA-B*35:03, HLA-C*07:02
EPVTKAEML

SEQ ID NO: 6010 - protein, 11 aa, Homo sapiens
  Table 1.2; MAGEA6; ENSG00000197172; HLA -B*38:01,HLA-B*39:01
EQEAASSSSTL

SEQ ID NO: 6011 - protein, 10 aa, Homo sapiens
  Table 1.2; MAGEA6; ENSG00000197172; HLA -A*68:01
ESEFQAALSR

SEQ ID NO: 6012 - protein, 11 aa, Homo sapiens
  Table 1.2; MAGEA6; ENSG00000197172; HLA -A*01:01,HLA-A*68:01
ESEFQAALSRK

SEQ ID NO: 6013 - protein, 9 aa, Homo sapiens
  Table 1.2; MAGEA6; ENSG00000197172; HLA -A*33:01,HLA-A*33:03,HLA-A*68:01,HLA-A*68:02
ETSYVKVLH

SEQ ID NO: 6014 - protein, 8 aa, Homo sapiens
  Table 1.2; MAGEA6; ENSG00000197172; HLA -A*68:02,HLA-C*05:01
EVDPIGHV

SEQ ID NO: 6015 - protein, 9 aa, Homo sapiens
  Table 1.2; MAGEA6; ENSG00000197172; HLA -A*01:01,HLA-A*02:07,HLA-A*03:02,HLA-A*11:01,HLA-A*23:01, HLA-A*25:01,HLA-A*26:01,HLA-A*29:02,HLA-A*30:02,HLA-A*32:01, HLA-A*33:01,HLA-A*33:03,HLA-A*68:01,HLA-A*68:02,HLA-B*15:01,
  HLA-B*15:03,HLA-B*18:01,HLA-B*27:02,HLA-B*27:05,HLA-B*35:01, HLA-B*35:03,HLA-B*38:01,HLA-B*39:01,HLA-B*44:02,HLA-B*44:03, HLA-B*46:01,HLA-B*55:01,HLA-B*57:01,HLA-B*58:01,HLA-C*02:02, HLA-C*03:03,HLA-C*04:01,HLA-C*05:01,HLA-C*07:04,HLA-C*07:06,
  HLA-C*12:03,HLA-C*16:01,HLA-C*16:02,HLA-C*16:04
EVDPIGHVY

SEQ ID NO: 6016 - protein, 10 aa, Homo sapiens
  Table 1.2; MAGEA6; ENSG00000197172; HLA -A*01:01,HLA-A*02:07,HLA-A*68:01,HLA-A*68:02,HLA-B*38:01, HLA-C*05:01
EVDPIGHVYI

SEQ ID NO: 6017 - protein, 11 aa, Homo sapiens
  Table 1.2; MAGEA6; ENSG00000197172; HLA -A*01:01,HLA-A*02:07,HLA-A*68:02
EVDPIGHVYIF

SEQ ID NO: 6018 - protein, 10 aa, Homo sapiens
  Table 1.2; MAGEA6; ENSG00000197172; HLA -A*25:01,HLA-A*26:01,HLA-A*32:01,HLA-A*33:01,HLA-A*33:03, HLA-A*68:01,HLA-A*68:02,HLA-B*08:01,HLA-B*35:01,HLA-B*35:03, HLA-B*38:01,HLA-B*39:01,HLA-B*51:01
EVFEGREDSI

SEQ ID NO: 6019 - protein, 11 aa, Homo sapiens
  Table 1.2; MAGEA6; ENSG00000197172; HLA -A*25:01,HLA-A*26:01,HLA-B*35:01
EVFEGREDSIF

SEQ ID NO: 6020 - protein, 10 aa, Homo sapiens
  Table 1.2; MAGEA6; ENSG00000197172; HLA -A*25:01,HLA-A*26:01
EVTLGEVPAA

SEQ ID NO: 6021 - protein, 9 aa, Homo sapiens
  Table 1.2; MAGEA6; ENSG00000197172; HLA -A*01:01,HLA-A*26:01,HLA-A*29:02,HLA-A*30:02,HLA-B*15:03, HLA-B*35:01,HLA-B*46:01,HLA-C*02:02
FATCLGLSY

SEQ ID NO: 6022 - protein, 9 aa, Homo sapiens
  Table 1.2; MAGEA6; ENSG00000197172; HLA -A*02:07,HLA-A*29:02
FFPVIFSKA

SEQ ID NO: 6023 - protein, 11 aa, Homo sapiens
  Table 1.2; MAGEA6; ENSG00000197172; HLA -A*01:01
FGDPKKLLTQY

SEQ ID NO: 6024 - protein, 8 aa, Homo sapiens
  Table 1.2; MAGEA6; ENSG00000197172; HLA -B*54:01
FGIELMEV

SEQ ID NO: 6025 - protein, 8 aa, Homo sapiens
  Table 1.2; MAGEA6; ENSG00000197172; HLA -A*02:04
FLIIILAI

SEQ ID NO: 6026 - protein, 9 aa, Homo sapiens
  Table 1.2; MAGEA6; ENSG00000197172; HLA -A*02:03,HLA-A*02:04,HLA-A*02:07
FLIIILAII

SEQ ID NO: 6027 - protein, 9 aa, Homo sapiens
  Table 1.2; MAGEA6; ENSG00000197172; HLA -A*02:01,HLA-A*02:03,HLA-A*02:04,HLA-A*02:07
FLWGPRALI

SEQ ID NO: 6028 - protein, 11 aa, Homo sapiens
  Table 1.2; MAGEA6; ENSG00000197172; HLA -A*02:01,HLA-A*02:04,HLA-A*02:07
FLWGPRALIET

SEQ ID NO: 6029 - protein, 8 aa, Homo sapiens
  Table 1.2; MAGEA6; ENSG00000197172; HLA -B*35:01,HLA-B*35:03,HLA-B*55:01,HLA-C*04:01,HLA-C*05:01
FPDLESEF

SEQ ID NO: 6030 - protein, 10 aa, Homo sapiens
  Table 1.2; MAGEA6; ENSG00000197172; HLA -B*35:03,HLA-B*54:01,HLA-B*55:01
FPDLESEFQA

SEQ ID NO: 6031 - protein, 11 aa, Homo sapiens
  Table 1.2; MAGEA6; ENSG00000197172; HLA -B*35:03,HLA-B*54:01,HLA-B*55:01
FPDLESEFQAA

SEQ ID NO: 6032 - protein, 8 aa, Homo sapiens
  Table 1.2; MAGEA6; ENSG00000197172; HLA -B*51:01,HLA-B*54:01,HLA-B*55:01,HLA-B*56:01
FPVIFSKA

SEQ ID NO: 6033 - protein, 9 aa, Homo sapiens
  Table 1.2; MAGEA6; ENSG00000197172; HLA -B*54:01
FPVIFSKAS

SEQ ID NO: 6034 - protein, 9 aa, Homo sapiens
  Table 1.2; MAGEA6; ENSG00000197172; HLA -A*02:03,HLA-A*68:02,HLA-B*13:02,HLA-B*27:05,HLA-C*02:02, HLA-C*06:02
FQAALSRKV

SEQ ID NO: 6035 - protein, 8 aa, Homo sapiens
  Table 1.2; MAGEA6; ENSG00000197172; HLA -C*03:04
FSKASDSL

SEQ ID NO: 6036 - protein, 9 aa, Homo sapiens
  Table 1.2; MAGEA6; ENSG00000197172; HLA -A*01:01,HLA-A*02:07,HLA-A*03:01,HLA-A*03:02,HLA-A*11:01, HLA-A*25:01,HLA-A*26:01,HLA-A*29:02,HLA-A*30:02,HLA-A*32:01, HLA-A*33:01,HLA-A*33:03,HLA-A*68:01,HLA-B*13:02,HLA-B*15:01,
  HLA-B*15:03,HLA-B*27:02,HLA-B*35:01,HLA-B*39:01,HLA-B*46:01, HLA-B*55:01,HLA-B*57:01,HLA-B*58:01,HLA-C*01:02,HLA-C*02:02, HLA-C*03:03,HLA-C*03:04,HLA-C*07:01,HLA-C*07:04,HLA-C*07:06, HLA-C*12:03,HLA-C*14:02,HLA-C*16:01,HLA-C*16:02,HLA-C*16:04
FVQENYLEY

SEQ ID NO: 6037 - protein, 10 aa, Homo sapiens
  Table 1.2; MAGEA6; ENSG00000197172; HLA -A*31:01,HLA-A*33:01,HLA-A*33:03,HLA-A*68:01,HLA-A*68:02, HLA-B*27:02
FVQENYLEYR

SEQ ID NO: 6038 - protein, 9 aa, Homo sapiens
  Table 1.2; MAGEA6; ENSG00000197172; HLA -A*30:02,HLA-A*32:01,HLA-B*13:02,HLA-B*15:01,HLA-B*15:03, HLA-B*35:01,HLA-B*35:03,HLA-B*39:01,HLA-C*02:02,HLA-C*12:03, HLA-C*16:02,HLA-C*16:04
GASSLPTTM

SEQ ID NO: 6039 - protein, 11 aa, Homo sapiens
  Table 1.2; MAGEA6; ENSG00000197172; HLA -A*26:01,HLA-A*29:02,HLA-A*30:02
GASSLPTTMNY

SEQ ID NO: 6040 - protein, 8 aa, Homo sapiens
  Table 1.2; MAGEA6; ENSG00000197172; HLA -A*11:01,HLA-B*27:02
GDNQIMPK

SEQ ID NO: 6041 - protein, 9 aa, Homo sapiens
  Table 1.2; MAGEA6; ENSG00000197172; HLA -A*30:01,HLA-B*37:01,HLA-B*40:01,HLA-B*40:02,HLA-B*49:01, HLA-B*56:01
GEALGLVGA

SEQ ID NO: 6042 - protein, 11 aa, Homo sapiens
  Table 1.2; MAGEA6; ENSG00000197172; HLA -A*30:01,HLA-B*40:01,HLA-B*40:02,HLA-B*49:01
GEALGLVGAQA

SEQ ID NO: 6043 - protein, 9 aa, Homo sapiens
  Table 1.2; MAGEA6; ENSG00000197172; HLA -A*30:01,HLA-B*40:01,HLA-B*40:02
GEVPAAESP

SEQ ID NO: 6044 - protein, 9 aa, Homo sapiens
  Table 1.2; MAGEA6; ENSG00000197172; HLA -B*15:01
GLLGDNQIM

SEQ ID NO: 6045 - protein, 11 aa, Homo sapiens
  Table 1.2; MAGEA6; ENSG00000197172; HLA -A*02:01,HLA-A*02:04,HLA-A*03:01,HLA-A*03:02,HLA-A*11:01, HLA-A*31:01,HLA-B*27:02,HLA-B*27:05
GLLGDNQIMPK

SEQ ID NO: 6046 - protein, 10 aa, Homo sapiens
  Table 1.2; MAGEA6; ENSG00000197172; HLA -A*30:02,HLA-B*07:02,HLA-B*15:01,HLA-B*15:03,HLA-B*35:01, HLA-B*55:01
GPRALIETSY

SEQ ID NO: 6047 - protein, 9 aa, Homo sapiens
  Table 1.2; MAGEA6; ENSG00000197172; HLA -B*07:02,HLA-C*07:02
GPRISYPLL

SEQ ID NO: 6048 - protein, 8 aa, Homo sapiens
  Table 1.2; MAGEA6; ENSG00000197172; HLA -B*07:02
GPSTFPDL

SEQ ID NO: 6049 - protein, 11 aa, Homo sapiens
  Table 1.2; MAGEA6; ENSG00000197172; HLA -B*27:05
GREDSIFGDPK

SEQ ID NO: 6050 - protein, 9 aa, Homo sapiens
  Table 1.2; MAGEA6; ENSG00000197172; HLA -A*01:01,HLA-B*27:05,HLA-B*57:01,HLA-B*58:01,HLA-C*05:01
GSDPACYEF

SEQ ID NO: 6051 - protein, 9 aa, Homo sapiens
  Table 1.2; MAGEA6; ENSG00000197172; HLA -A*01:01,HLA-A*29:02,HLA-A*30:02,HLA-B*15:01,HLA-B*15:03, HLA-B*57:01,HLA-B*58:01
GSVVGNWQY

SEQ ID NO: 6052 - protein, 11 aa, Homo sapiens
  Table 1.2; MAGEA6; ENSG00000197172; HLA -A*31:01,HLA-A*33:01,HLA-A*33:03
HCKPEEGLEAR

SEQ ID NO: 6053 - protein, 10 aa, Homo sapiens
  Table 1.2; MAGEA6; ENSG00000197172; HLA -A*33:01
HMVKISGGPR

SEQ ID NO: 6054 - protein, 9 aa, Homo sapiens
  Table 1.2; MAGEA6; ENSG00000197172; HLA -A*68:02
HVYIFATCL

SEQ ID NO: 6055 - protein, 9 aa, Homo sapiens
  Table 1.2; MAGEA6; ENSG00000197172; HLA -B*40:01,HLA-B*40:02,HLA-B*49:01
IELMEVDPI

SEQ ID NO: 6056 - protein, 8 aa, Homo sapiens
  Table 1.2; MAGEA6; ENSG00000197172; HLA -A*30:01,HLA-B*18:01,HLA-B*37:01,HLA-B*40:02,HLA-B*49:01
IETSYVKV

SEQ ID NO: 6057 - protein, 9 aa, Homo sapiens
  Table 1.2; MAGEA6; ENSG00000197172; HLA -A*30:01,HLA-B*18:01,HLA-B*27:05,HLA-B*37:01,HLA-B*40:01, HLA-B*40:02,HLA-B*44:02,HLA-B*44:03,HLA-B*49:01,HLA-C*02:02, HLA-C*06:02,HLA-C*07:01,HLA-C*07:04,HLA-C*12:03,HLA-C*16:01,
  HLA-C*16:02,HLA-C*16:04
IETSYVKVL

SEQ ID NO: 6058 - protein, 10 aa, Homo sapiens
  Table 1.2; MAGEA6; ENSG00000197172; HLA -A*29:02
IFATCLGLSY

SEQ ID NO: 6059 - protein, 9 aa, Homo sapiens
  Table 1.2; MAGEA6; ENSG00000197172; HLA -A*24:02
IFGDPKKLL

SEQ ID NO: 6060 - protein, 9 aa, Homo sapiens
  Table 1.2; MAGEA6; ENSG00000197172; HLA -C*14:02
IFSKASDSL

SEQ ID NO: 6061 - protein, 9 aa, Homo sapiens
  Table 1.2; MAGEA6; ENSG00000197172; HLA -A*03:01,HLA-A*03:02,HLA-A*11:01
IIILAIIAK

SEQ ID NO: 6062 - protein, 8 aa, Homo sapiens
  Table 1.2; MAGEA6; ENSG00000197172; HLA -A*03:01,HLA-A*03:02,HLA-A*11:01,HLA-B*27:02
IILAIIAK

SEQ ID NO: 6063 - protein, 9 aa, Homo sapiens
  Table 1.2; MAGEA6; ENSG00000197172; HLA -A*02:07,HLA-A*24:02
IMPKTGFLI

SEQ ID NO: 6064 - protein, 10 aa, Homo sapiens
  Table 1.2; MAGEA6; ENSG00000197172; HLA -A*24:02
IMPKTGFLII

SEQ ID NO: 6065 - protein, 9 aa, Homo sapiens
  Table 1.2; MAGEA6; ENSG00000197172; HLA -A*01:01,HLA-A*25:01,HLA-A*29:02,HLA-A*30:02,HLA-A*32:01, HLA-B*15:01,HLA-B*15:03,HLA-B*35:01,HLA-B*46:01,HLA-B*57:01, HLA-B*58:01,HLA-C*02:02,HLA-C*07:04,HLA-C*12:03,HLA-C*16:01
ISGGPRISY

SEQ ID NO: 6066 - protein, 9 aa, Homo sapiens
  Table 1.2; MAGEA6; ENSG00000197172; HLA -A*24:02,HLA-A*25:01,HLA-A*31:01,HLA-A*33:01,HLA-B*44:02, HLA-B*57:01,HLA-B*58:01,HLA-C*02:02
ISYPLLHEW

SEQ ID NO: 6067 - protein, 8 aa, Homo sapiens
  Table 1.2; MAGEA6; ENSG00000197172; HLA -C*03:04
KASDSLQL

SEQ ID NO: 6068 - protein, 9 aa, Homo sapiens
  Table 1.2; MAGEA6; ENSG00000197172; HLA -A*02:01,HLA-A*02:03,HLA-A*03:02,HLA-B*13:02,HLA-B*58:01, HLA-C*12:03,HLA-C*16:02
KASDSLQLV

SEQ ID NO: 6069 - protein, 10 aa, Homo sapiens
  Table 1.2; MAGEA6; ENSG00000197172; HLA -A*03:01,HLA-A*23:01,HLA-A*24:02,HLA-A*29:02,HLA-A*30:02, HLA-A*32:01,HLA-B*15:03,HLA-B*27:02,HLA-B*44:03,HLA-B*57:01, HLA-B*58:01,HLA-C*02:02,HLA-C*16:04
KASDSLQLVF

SEQ ID NO: 6070 - protein, 10 aa, Homo sapiens
  Table 1.2; MAGEA6; ENSG00000197172; HLA -A*03:01,HLA-A*30:02,HLA-A*32:01,HLA-B*15:01,HLA-C*16:01
KISGGPRISY

SEQ ID NO: 6071 - protein, 9 aa, Homo sapiens
  Table 1.2; MAGEA6; ENSG00000197172; HLA -A*02:04,HLA-A*02:07
KIWEELSVL

SEQ ID NO: 6072 - protein, 11 aa, Homo sapiens
  Table 1.2; MAGEA6; ENSG00000197172; HLA -A*02:01,HLA-A*02:03,HLA-A*02:04,HLA-A*02:07
KIWEELSVLEV

SEQ ID NO: 6073 - protein, 9 aa, Homo sapiens
  Table 1.2; MAGEA6; ENSG00000197172; HLA -A*03:01
KLVHFLLLK

SEQ ID NO: 6074 - protein, 10 aa, Homo sapiens
  Table 1.2; MAGEA6; ENSG00000197172; HLA -A*03:01,HLA-A*29:02,HLA-B*57:01
KLVHFLLLKY

SEQ ID NO: 6075 - protein, 8 aa, Homo sapiens
  Table 1.2; MAGEA6; ENSG00000197172; HLA -B*57:01
KVAKLVHF

SEQ ID NO: 6076 - protein, 9 aa, Homo sapiens
  Table 1.2; MAGEA6; ENSG00000197172; HLA -A*02:03,HLA-A*02:04,HLA-A*68:02
KVAKLVHFL

SEQ ID NO: 6077 - protein, 8 aa, Homo sapiens
  Table 1.2; MAGEA6; ENSG00000197172; HLA -A*30:01,HLA-B*18:01,HLA-B*37:01,HLA-B*40:01,HLA-B*40:02
LEARGEAL

SEQ ID NO: 6078 - protein, 10 aa, Homo sapiens
  Table 1.2; MAGEA6; ENSG00000197172; HLA -A*30:01,HLA-B*40:01,HLA-B*40:02
LEARGEALGL

SEQ ID NO: 6079 - protein, 8 aa, Homo sapiens
  Table 1.2; MAGEA6; ENSG00000197172; HLA -B*18:01,HLA-B*49:01
LESEFQAA

SEQ ID NO: 6080 - protein, 9 aa, Homo sapiens
  Table 1.2; MAGEA6; ENSG00000197172; HLA -A*30:01,HLA-A*68:02,HLA-B*15:03,HLA-B*18:01,HLA-B*27:02, HLA-B*27:05,HLA-B*37:01,HLA-B*38:01,HLA-B*39:01,HLA-B*40:01, HLA-B*40:02,HLA-B*44:02,HLA-B*44:03,HLA-B*49:01
LESEFQAAL

SEQ ID NO: 6081 - protein, 9 aa, Homo sapiens
  Table 1.2; MAGEA6; ENSG00000197172; HLA -A*01:01,HLA-A*03:01,HLA-A*03:02,HLA-A*11:01,HLA-B*27:02
LGDNQIMPK

SEQ ID NO: 6082 - protein, 9 aa, Homo sapiens
  Table 1.2; MAGEA6; ENSG00000197172; HLA -A*32:01
LGLVGAQAP

SEQ ID NO: 6083 - protein, 10 aa, Homo sapiens
  Table 1.2; MAGEA6; ENSG00000197172; HLA -A*01:01
LGSVVGNWQY

SEQ ID NO: 6084 - protein, 8 aa, Homo sapiens
  Table 1.2; MAGEA6; ENSG00000197172; HLA -B*27:02
LIETSYVK

SEQ ID NO: 6085 - protein, 9 aa, Homo sapiens
  Table 1.2; MAGEA6; ENSG00000197172; HLA -A*02:07,HLA-C*05:01
LIETSYVKV

SEQ ID NO: 6086 - protein, 10 aa, Homo sapiens
  Table 1.2; MAGEA6; ENSG00000197172; HLA -B*27:02
LIIILAIIAK

SEQ ID NO: 6087 - protein, 10 aa, Homo sapiens
  Table 1.2; MAGEA6; ENSG00000197172; HLA -A*03:01,HLA-A*03:02,HLA-A*11:01,HLA-B*27:02
LLGDNQIMPK

SEQ ID NO: 6088 - protein, 11 aa, Homo sapiens
  Table 1.2; MAGEA6; ENSG00000197172; HLA -A*01:01,HLA-A*29:02,HLA-A*30:02
LMEVDPIGHVY

SEQ ID NO: 6089 - protein, 9 aa, Homo sapiens
  Table 1.2; MAGEA6; ENSG00000197172; HLA -B*35:01,HLA-B*35:03
LPTTMNYPL

SEQ ID NO: 6090 - protein, 10 aa, Homo sapiens
  Table 1.2; MAGEA6; ENSG00000197172; HLA -A*24:02,HLA-B*27:02
LPTTMNYPLW

SEQ ID NO: 6091 - protein, 9 aa, Homo sapiens
  Table 1.2; MAGEA6; ENSG00000197172; HLA -A*02:01,HLA-A*02:04,HLA-B*13:02
LQLVFGIEL

SEQ ID NO: 6092 - protein, 10 aa, Homo sapiens
  Table 1.2; MAGEA6; ENSG00000197172; HLA -B*27:02,HLA-B*57:01
LSVLEVFEGR

SEQ ID NO: 6093 - protein, 11 aa, Homo sapiens
  Table 1.2; MAGEA6; ENSG00000197172; HLA -A*01:01
LSYDGLLGDNQ

SEQ ID NO: 6094 - protein, 10 aa, Homo sapiens
  Table 1.2; MAGEA6; ENSG00000197172; HLA -A*01:01,HLA-A*30:02,HLA-B*57:01
LTQYFVQENY

SEQ ID NO: 6095 - protein, 10 aa, Homo sapiens
  Table 1.2; MAGEA6; ENSG00000197172; HLA -A*02:01,HLA-A*02:03,HLA-A*02:04,HLA-A*02:07,HLA-A*68:02
LVFGIELMEV

SEQ ID NO: 6096 - protein, 9 aa, Homo sapiens
  Table 1.2; MAGEA6; ENSG00000197172; HLA -A*01:01,HLA-A*29:02,HLA-B*57:01
LVHFLLLKY

SEQ ID NO: 6097 - protein, 8 aa, Homo sapiens
  Table 1.2; MAGEA6; ENSG00000197172; HLA -B*18:01
MEVDPIGH

SEQ ID NO: 6098 - protein, 9 aa, Homo sapiens
  Table 1.2; MAGEA6; ENSG00000197172; HLA -A*30:01,HLA-A*68:02,HLA-B*13:02,HLA-B*18:01,HLA-B*40:01, HLA-B*40:02,HLA-B*44:02,HLA-B*44:03,HLA-B*49:01
MEVDPIGHV

SEQ ID NO: 6099 - protein, 10 aa, Homo sapiens
  Table 1.2; MAGEA6; ENSG00000197172; HLA -A*01:01,HLA-A*23:01,HLA-A*25:01,HLA-A*26:01,HLA-A*29:02, HLA-A*30:01,HLA-A*30:02,HLA-A*32:01,HLA-A*33:03,HLA-A*68:02, HLA-B*15:01,HLA-B*15:03,HLA-B*18:01,HLA-B*27:02,HLA-B*27:05,
  HLA-B*35:01,HLA-B*37:01,HLA-B*38:01,HLA-B*39:01,HLA-B*40:01, HLA-B*40:02,HLA-B*44:02,HLA-B*44:03,HLA-B*49:01,HLA-B*57:01, HLA-C*02:02,HLA-C*12:03,HLA-C*16:01,HLA-C*16:04
MEVDPIGHVY

SEQ ID NO: 6100 - protein, 11 aa, Homo sapiens
  Table 1.2; MAGEA6; ENSG00000197172; HLA -A*30:01,HLA-A*68:02,HLA-B*38:01,HLA-B*40:01,HLA-B*44:02, HLA-B*44:03,HLA-B*49:01
MEVDPIGHVYI

SEQ ID NO: 6101 - protein, 9 aa, Homo sapiens
  Table 1.2; MAGEA6; ENSG00000197172; HLA -A*23:01,HLA-A*24:02,HLA-A*25:01,HLA-A*32:01,HLA-A*33:03, HLA-B*44:02,HLA-B*44:03,HLA-B*57:01,HLA-B*58:01,HLA-C*07:04
MLGSVVGNW

SEQ ID NO: 6102 - protein, 11 aa, Homo sapiens
  Table 1.2; MAGEA6; ENSG00000197172; HLA -A*01:01,HLA-A*29:02
MLGSVVGNWQY

SEQ ID NO: 6103 - protein, 10 aa, Homo sapiens
  Table 1.2; MAGEA6; ENSG00000197172; HLA -A*29:02
MNYPLWSQSY

SEQ ID NO: 6104 - protein, 8 aa, Homo sapiens
  Table 1.2; MAGEA6; ENSG00000197172; HLA -B*08:01,HLA-B*51:01,HLA-B*54:01
MPKTGFLI

SEQ ID NO: 6105 - protein, 9 aa, Homo sapiens
  Table 1.2; MAGEA6; ENSG00000197172; HLA -B*07:02,HLA-B*51:01,HLA-B*54:01
MPKTGFLII

SEQ ID NO: 6106 - protein, 9 aa, Homo sapiens
  Table 1.2; MAGEA6; ENSG00000197172; HLA -A*31:01,HLA-A*33:01,HLA-A*33:03,HLA-A*68:01
MVKISGGPR

SEQ ID NO: 6107 - protein, 10 aa, Homo sapiens
  Table 1.2; MAGEA6; ENSG00000197172; HLA -B*38:01,HLA-B*39:01
NQEEEGPSTF

SEQ ID NO: 6108 - protein, 9 aa, Homo sapiens
  Table 1.2; MAGEA6; ENSG00000197172; HLA -A*25:01,HLA-A*26:01,HLA-A*32:01,HLA-B*15:01,HLA-B*15:03, HLA-B*18:01,HLA-B*37:01,HLA-B*38:01,HLA-B*44:02,HLA-B*44:03, HLA-B*46:01,HLA-C*07:04,HLA-C*14:02,HLA-C*16:04
NQIMPKTGF

SEQ ID NO: 6109 - protein, 9 aa, Homo sapiens
  Table 1.2; MAGEA6; ENSG00000197172; HLA -A*23:01,HLA-A*24:02,HLA-A*29:02,HLA-A*30:02,HLA-B*15:03, HLA-C*01:02,HLA-C*14:02
NYPLWSQSY

SEQ ID NO: 6110 - protein, 9 aa, Homo sapiens
  Table 1.2; MAGEA6; ENSG00000197172; HLA -B*07:02,HLA-B*27:02,HLA-B*27:05,HLA-C*07:01,HLA-C*16:04
PRALIETSY

SEQ ID NO: 6111 - protein, 8 aa, Homo sapiens
  Table 1.2; MAGEA6; ENSG00000197172; HLA -B*51:01,HLA-C*06:02,HLA-C*16:01,HLA-C*16:02
QAALSRKV

SEQ ID NO: 6112 - protein, 9 aa, Homo sapiens
  Table 1.2; MAGEA6; ENSG00000197172; HLA -B*54:01
QAALSRKVA

SEQ ID NO: 6113 - protein, 10 aa, Homo sapiens
  Table 1.2; MAGEA6; ENSG00000197172; HLA -A*30:01,HLA-B*38:01,HLA-B*40:01,HLA-B*40:02,HLA-B*44:03, HLA-B*49:01
QEAASSSSTL

SEQ ID NO: 6114 - protein, 11 aa, Homo sapiens
  Table 1.2; MAGEA6; ENSG00000197172; HLA -B*49:01
QEAASSSSTLV

SEQ ID NO: 6115 - protein, 9 aa, Homo sapiens
  Table 1.2; MAGEA6; ENSG00000197172; HLA -A*30:01,HLA-B*18:01,HLA-B*37:01,HLA-B*38:01,HLA-B*40:01, HLA-B*44:02,HLA-B*44:03,HLA-B*49:01,HLA-C*16:04
QEEEGPSTF

SEQ ID NO: 6116 - protein, 10 aa, Homo sapiens
  Table 1.2; MAGEA6; ENSG00000197172; HLA -B*49:01
QENYLEYRQV

SEQ ID NO: 6117 - protein, 9 aa, Homo sapiens
  Table 1.2; MAGEA6; ENSG00000197172; HLA -B*38:01
QHCKPEEGL

SEQ ID NO: 6118 - protein, 8 aa, Homo sapiens
  Table 1.2; MAGEA6; ENSG00000197172; HLA -B*08:01,HLA-B*15:01,HLA-B*37:01
QIMPKTGF

SEQ ID NO: 6119 - protein, 11 aa, Homo sapiens
  Table 1.2; MAGEA6; ENSG00000197172; HLA -A*02:01
QLVFGIELMEV

SEQ ID NO: 6120 - protein, 9 aa, Homo sapiens
  Table 1.2; MAGEA6; ENSG00000197172; HLA -C*01:02
QSPQGASSL

SEQ ID NO: 6121 - protein, 10 aa, Homo sapiens
  Table 1.2; MAGEA6; ENSG00000197172; HLA -A*25:01,HLA-A*26:01,HLA-A*29:02,HLA-A*30:02,HLA-C*07:04
QVPGSDPACY

SEQ ID NO: 6122 - protein, 8 aa, Homo sapiens
  Table 1.2; MAGEA6; ENSG00000197172; HLA -A*24:02
QYFFPVIF

SEQ ID NO: 6123 - protein, 10 aa, Homo sapiens
  Table 1.2; MAGEA6; ENSG00000197172; HLA -B*27:02
QYFFPVIFSK

SEQ ID NO: 6124 - protein, 8 aa, Homo sapiens
  Table 1.2; MAGEA6; ENSG00000197172; HLA -A*30:02,HLA-B*15:03,HLA-C*14:02
QYFVQENY

SEQ ID NO: 6125 - protein, 9 aa, Homo sapiens
  Table 1.2; MAGEA6; ENSG00000197172; HLA -A*23:01,HLA-A*24:02,HLA-C*04:01
QYFVQENYL

SEQ ID NO: 6126 - protein, 11 aa, Homo sapiens
  Table 1.2; MAGEA6; ENSG00000197172; HLA -A*29:02
QYFVQENYLEY

SEQ ID NO: 6127 - protein, 8 aa, Homo sapiens
  Table 1.2; MAGEA6; ENSG00000197172; HLA -A*03:01,HLA-B*57:01
RAREPVTK

SEQ ID NO: 6128 - protein, 9 aa, Homo sapiens
  Table 1.2; MAGEA6; ENSG00000197172; HLA -A*32:01,HLA-B*07:02,HLA-B*54:01,HLA-B*56:01
RAREPVTKA

SEQ ID NO: 6129 - protein, 9 aa, Homo sapiens
  Table 1.2; MAGEA6; ENSG00000197172; HLA -A*30:01,HLA-B*37:01,HLA-B*40:01,HLA-B*40:02,HLA-B*44:02, HLA-B*44:03,HLA-C*01:02
REPVTKAEM

SEQ ID NO: 6130 - protein, 10 aa, Homo sapiens
  Table 1.2; MAGEA6; ENSG00000197172; HLA -A*30:01,HLA-B*40:01,HLA-B*40:02
REPVTKAEML

SEQ ID NO: 6131 - protein, 10 aa, Homo sapiens
  Table 1.2; MAGEA6; ENSG00000197172; HLA -B*57:01
RISYPLLHEW

SEQ ID NO: 6132 - protein, 11 aa, Homo sapiens
  Table 1.2; MAGEA6; ENSG00000197172; HLA -A*30:02,HLA-A*32:01,HLA-B*15:01,HLA-B*15:03,HLA-B*39:01, HLA-B*58:01,HLA-C*07:04
RQVPGSDPACY

SEQ ID NO: 6133 - protein, 8 aa, Homo sapiens
  Table 1.2; MAGEA6; ENSG00000197172; HLA -B*37:01
SDPACYEF

SEQ ID NO: 6134 - protein, 8 aa, Homo sapiens
  Table 1.2; MAGEA6; ENSG00000197172; HLA -A*30:01,HLA-B*18:01,HLA-B*37:01
SDSLQLVF

SEQ ID NO: 6135 - protein, 9 aa, Homo sapiens
  Table 1.2; MAGEA6; ENSG00000197172; HLA -B*18:01,HLA-B*27:02,HLA-B*27:05,HLA-B*44:02,HLA-B*44:03, HLA-B*49:01
SEFQAALSR

SEQ ID NO: 6136 - protein, 8 aa, Homo sapiens
  Table 1.2; MAGEA6; ENSG00000197172; HLA -A*30:02,HLA-A*32:01,HLA-B*08:01,HLA-B*15:01,HLA-B*15:03, HLA-C*07:01,HLA-C*07:04,HLA-C*12:03,HLA-C*16:01
SGGPRISY

SEQ ID NO: 6137 - protein, 9 aa, Homo sapiens
  Table 1.2; MAGEA6; ENSG00000197172; HLA -A*02:03,HLA-A*02:04,HLA-A*03:02,HLA-A*68:02,HLA-B*44:03, HLA-C*12:03
SIFGDPKKL

SEQ ID NO: 6138 - protein, 9 aa, Homo sapiens
  Table 1.2; MAGEA6; ENSG00000197172; HLA -B*38:01
SKASDSLQL

SEQ ID NO: 6139 - protein, 8 aa, Homo sapiens
  Table 1.2; MAGEA6; ENSG00000197172; HLA -A*29:02,HLA-A*30:02,HLA-B*15:01,HLA-B*46:01,HLA-C*01:02
SLPTTMNY

SEQ ID NO: 6140 - protein, 10 aa, Homo sapiens
  Table 1.2; MAGEA6; ENSG00000197172; HLA -A*02:07
SLPTTMNYPL

SEQ ID NO: 6141 - protein, 11 aa, Homo sapiens
  Table 1.2; MAGEA6; ENSG00000197172; HLA -A*24:02
SLPTTMNYPLW

SEQ ID NO: 6142 - protein, 8 aa, Homo sapiens
  Table 1.2; MAGEA6; ENSG00000197172; HLA -A*02:04,HLA-B*37:01
SLQLVFGI

SEQ ID NO: 6143 - protein, 10 aa, Homo sapiens
  Table 1.2; MAGEA6; ENSG00000197172; HLA -A*02:04,HLA-A*02:07
SLQLVFGIEL

SEQ ID NO: 6144 - protein, 11 aa, Homo sapiens
  Table 1.2; MAGEA6; ENSG00000197172; HLA -B*56:01
SPDPPQSPQGA

SEQ ID NO: 6145 - protein, 8 aa, Homo sapiens
  Table 1.2; MAGEA6; ENSG00000197172; HLA -B*07:02
SPQGASSL

SEQ ID NO: 6146 - protein, 9 aa, Homo sapiens
  Table 1.2; MAGEA6; ENSG00000197172; HLA -A*01:01,HLA-A*03:01,HLA-A*03:02,HLA-A*11:01,HLA-A*23:01, HLA-A*25:01,HLA-A*26:01,HLA-A*29:02,HLA-A*30:02,HLA-A*31:01, HLA-A*32:01,HLA-B*15:01,HLA-B*15:03,HLA-B*35:01,HLA-B*44:03,
  HLA-B*46:01,HLA-B*57:01,HLA-B*58:01,HLA-C*01:02,HLA-C*02:02, HLA-C*07:01,HLA-C*07:06,HLA-C*12:03,HLA-C*16:01,HLA-C*16:02, HLA-C*16:04
SSLPTTMNY

SEQ ID NO: 6147 - protein, 9 aa, Homo sapiens
  Table 1.2; MAGEA6; ENSG00000197172; HLA -A*02:01,HLA-A*02:03,HLA-A*68:02,HLA-B*13:02,HLA-B*56:01
SSSSTLVEV

SEQ ID NO: 6148 - protein, 11 aa, Homo sapiens
  Table 1.2; MAGEA6; ENSG00000197172; HLA -B*38:01
SSSSTLVEVTL

SEQ ID NO: 6149 - protein, 10 aa, Homo sapiens
  Table 1.2; MAGEA6; ENSG00000197172; HLA -A*68:02
SSSTLVEVTL

SEQ ID NO: 6150 - protein, 9 aa, Homo sapiens
  Table 1.2; MAGEA6; ENSG00000197172; HLA -A*23:01,HLA-A*30:01,HLA-A*68:02,HLA-B*13:02,HLA-B*35:03, HLA-B*38:01,HLA-B*39:01,HLA-B*40:01,HLA-B*57:01,HLA-B*58:01, HLA-C*03:03,HLA-C*03:04,HLA-C*07:04,HLA-C*07:06,HLA-C*16:01,
  HLA-C*16:02
SSTLVEVTL

SEQ ID NO: 6151 - protein, 10 aa, Homo sapiens
  Table 1.2; MAGEA6; ENSG00000197172; HLA -A*25:01,HLA-A*26:01,HLA-A*30:02,HLA-B*57:01
STFPDLESEF

SEQ ID NO: 6152 - protein, 9 aa, Homo sapiens
  Table 1.2; MAGEA6; ENSG00000197172; HLA -A*02:04,HLA-A*02:07,HLA-A*03:01,HLA-A*03:02,HLA-A*11:01, HLA-A*25:01,HLA-A*31:01,HLA-A*33:01,HLA-A*33:03,HLA-A*68:01, HLA-A*68:02,HLA-B*57:01,HLA-C*07:06
SVLEVFEGR

SEQ ID NO: 6153 - protein, 9 aa, Homo sapiens
  Table 1.2; MAGEA6; ENSG00000197172; HLA -A*26:01
SVVGNWQYF

SEQ ID NO: 6154 - protein, 11 aa, Homo sapiens
  Table 1.2; MAGEA6; ENSG00000197172; HLA -B*35:03,HLA-B*38:01,HLA-C*04:01
SYDGLLGDNQI

SEQ ID NO: 6155 - protein, 8 aa, Homo sapiens
  Table 1.2; MAGEA6; ENSG00000197172; HLA -A*24:02
SYPLLHEW

SEQ ID NO: 6156 - protein, 10 aa, Homo sapiens
  Table 1.2; MAGEA6; ENSG00000197172; HLA -A*24:02
SYPLLHEWAL

SEQ ID NO: 6157 - protein, 9 aa, Homo sapiens
  Table 1.2; MAGEA6; ENSG00000197172; HLA -A*23:01,HLA-A*24:02
SYVKVLHHM

SEQ ID NO: 6158 - protein, 9 aa, Homo sapiens
  Table 1.2; MAGEA6; ENSG00000197172; HLA -A*23:01,HLA-A*24:02,HLA-A*29:02,HLA-C*14:02
TFPDLESEF

SEQ ID NO: 6159 - protein, 9 aa, Homo sapiens
  Table 1.2; MAGEA6; ENSG00000197172; HLA -B*54:01
TGFLIIILA

SEQ ID NO: 6160 - protein, 8 aa, Homo sapiens
  Table 1.2; MAGEA6; ENSG00000197172; HLA -A*02:01,HLA-A*02:03,HLA-B*55:01
TLGEVPAA

SEQ ID NO: 6161 - protein, 10 aa, Homo sapiens
  Table 1.2; MAGEA6; ENSG00000197172; HLA -A*02:01,HLA-A*02:03,HLA-A*02:07,HLA-A*68:02
TLVEVTLGEV

SEQ ID NO: 6162 - protein, 9 aa, Homo sapiens
  Table 1.2; MAGEA6; ENSG00000197172; HLA -A*26:01,HLA-A*29:02,HLA-A*30:02,HLA-A*32:01,HLA-B*13:02, HLA-B*15:01,HLA-B*15:03,HLA-B*18:01,HLA-B*27:02,HLA-B*27:05, HLA-B*35:01,HLA-B*39:01,HLA-B*44:02,HLA-B*44:03,HLA-B*46:01,
  HLA-C*02:02,HLA-C*07:04,HLA-C*16:04
TQYFVQENY

SEQ ID NO: 6163 - protein, 10 aa, Homo sapiens
  Table 1.2; MAGEA6; ENSG00000197172; HLA -A*68:02,HLA-B*13:02,HLA-B*27:05,HLA-B*38:01
TQYFVQENYL

SEQ ID NO: 6164 - protein, 9 aa, Homo sapiens
  Table 1.2; MAGEA6; ENSG00000197172; HLA -A*03:01
TSYVKVLHH

SEQ ID NO: 6165 - protein, 8 aa, Homo sapiens
  Table 1.2; MAGEA6; ENSG00000197172; HLA -B*08:01
VAKLVHFL

SEQ ID NO: 6166 - protein, 8 aa, Homo sapiens
  Table 1.2; MAGEA6; ENSG00000197172; HLA -B*15:03,HLA-B*18:01,HLA-B*37:01,HLA-C*04:01,HLA-C*07:01, HLA-C*07:04
VDPIGHVY

SEQ ID NO: 6167 - protein, 9 aa, Homo sapiens
  Table 1.2; MAGEA6; ENSG00000197172; HLA -A*24:02
VDPIGHVYI

SEQ ID NO: 6168 - protein, 8 aa, Homo sapiens
  Table 1.2; MAGEA6; ENSG00000197172; HLA -A*30:01,HLA-B*18:01,HLA-B*40:02,HLA-B*49:01
VEVTLGEV

SEQ ID NO: 6169 - protein, 9 aa, Homo sapiens
  Table 1.2; MAGEA6; ENSG00000197172; HLA -B*18:01,HLA-B*40:02,HLA-B*49:01
VEVTLGEVP

SEQ ID NO: 6170 - protein, 10 aa, Homo sapiens
  Table 1.2; MAGEA6; ENSG00000197172; HLA -A*30:01,HLA-B*18:01,HLA-B*40:02
VEVTLGEVPA

SEQ ID NO: 6171 - protein, 11 aa, Homo sapiens
  Table 1.2; MAGEA6; ENSG00000197172; HLA -A*30:01,HLA-B*40:02
VEVTLGEVPAA

SEQ ID NO: 6172 - protein, 8 aa, Homo sapiens
  Table 1.2; MAGEA6; ENSG00000197172; HLA -A*29:02
VHFLLLKY

SEQ ID NO: 6173 - protein, 11 aa, Homo sapiens
  Table 1.2; MAGEA6; ENSG00000197172; HLA -B*15:03
VKISGGPRISY

SEQ ID NO: 6174 - protein, 11 aa, Homo sapiens
  Table 1.2; MAGEA6; ENSG00000197172; HLA -C*03:03
VPAAESPDPPQ

SEQ ID NO: 6175 - protein, 8 aa, Homo sapiens
  Table 1.2; MAGEA6; ENSG00000197172; HLA -B*55:01
VPGSDPAC

SEQ ID NO: 6176 - protein, 9 aa, Homo sapiens
  Table 1.2; MAGEA6; ENSG00000197172; HLA -B*35:01,HLA-B*55:01
VPGSDPACY

SEQ ID NO: 6177 - protein, 11 aa, Homo sapiens
  Table 1.2; MAGEA6; ENSG00000197172; HLA -B*35:01
VPGSDPACYEF

SEQ ID NO: 6178 - protein, 8 aa, Homo sapiens
  Table 1.2; MAGEA6; ENSG00000197172; HLA -A*01:01,HLA-A*30:02,HLA-B*15:01,HLA-B*15:03,HLA-B*27:05, HLA-B*39:01,HLA-B*46:01,HLA-C*04:01,HLA-C*07:01,HLA-C*07:04
VQENYLEY

SEQ ID NO: 6179 - protein, 9 aa, Homo sapiens
  Table 1.2; MAGEA6; ENSG00000197172; HLA -A*31:01
VQENYLEYR

SEQ ID NO: 6180 - protein, 10 aa, Homo sapiens
  Table 1.2; MAGEA6; ENSG00000197172; HLA -A*02:03,HLA-B*40:02
VTKAEMLGSV

SEQ ID NO: 6181 - protein, 9 aa, Homo sapiens
  Table 1.2; MAGEA6; ENSG00000197172; HLA -A*02:01,HLA-A*02:03,HLA-A*02:04,HLA-B*54:01,HLA-B*55:01, HLA-B*56:01
VTLGEVPAA

SEQ ID NO: 6182 - protein, 9 aa, Homo sapiens
  Table 1.2; MAGEA6; ENSG00000197172; HLA -A*24:02
VVGNWQYFF

SEQ ID NO: 6183 - protein, 8 aa, Homo sapiens
  Table 1.2; MAGEA6; ENSG00000197172; HLA -A*23:01,HLA-A*24:02,HLA-C*14:02
VYIFATCL

SEQ ID NO: 6184 - protein, 9 aa, Homo sapiens
  Table 1.2; MAGEA6; ENSG00000197172; HLA -B*49:01
WEELSVLEV

SEQ ID NO: 6185 - protein, 9 aa, Homo sapiens
  Table 1.2; MAGEA6; ENSG00000197172; HLA -A*02:04
YEFLWGPRA

SEQ ID NO: 6186 - protein, 9 aa, Homo sapiens
  Table 1.2; MAGEA6; ENSG00000197172; HLA -A*29:02
YFFPVIFSK

SEQ ID NO: 6187 - protein, 10 aa, Homo sapiens
  Table 1.2; MAGEA6; ENSG00000197172; HLA -A*68:02
YFFPVIFSKA

SEQ ID NO: 6188 - protein, 10 aa, Homo sapiens
  Table 1.2; MAGEA6; ENSG00000197172; HLA -A*23:01,HLA-A*29:02
YFVQENYLEY

SEQ ID NO: 6189 - protein, 9 aa, Homo sapiens
  Table 1.2; MAGEA6; ENSG00000197172; HLA -A*02:07,HLA-A*68:02
YIFATCLGL

SEQ ID NO: 6190 - protein, 8 aa, Homo sapiens
  Table 1.2; MAGEA6; ENSG00000197172; HLA -B*54:01
YPLLHEWA

SEQ ID NO: 6191 - protein, 9 aa, Homo sapiens
  Table 1.2; MAGEA6; ENSG00000197172; HLA -B*08:01,HLA-B*35:01,HLA-B*35:03,HLA-B*54:01,HLA-B*55:01, HLA-B*56:01
YPLLHEWAL

SEQ ID NO: 6192 - protein, 8 aa, Homo sapiens
  Table 1.2; MAGEA6; ENSG00000197172; HLA -B*35:01,HLA-B*51:01
YPLWSQSY

SEQ ID NO: 6193 - protein, 9 aa, Homo sapiens
  Table 1.2; MAGEA6; ENSG00000197172; HLA -B*27:02,HLA-B*27:05,HLA-B*39:01
YRAREPVTK

SEQ ID NO: 6194 - protein, 8 aa, Homo sapiens
  Table 1.2; MAGEA6; ENSG00000197172; HLA -B*08:01
YVKVLHHM

SEQ ID NO: 6195 - protein, 9 aa, Homo sapiens
  Table 1.2; MAGEA6; ENSG00000197172; HLA -A*68:02
YVKVLHHMV

SEQ ID NO: 6196 - protein, 8 aa, Homo sapiens
  Table 1.2; MAGEA9; ENSG00000123584; HLA -B*37:01,HLA-B*44:02
AELVHFLL

SEQ ID NO: 6197 - protein, 11 aa, Homo sapiens
  Table 1.2; MAGEA9; ENSG00000123584; HLA -B*44:02
AELVHFLLHKY

SEQ ID NO: 6198 - protein, 8 aa, Homo sapiens
  Table 1.2; MAGEA9; ENSG00000123584; HLA -B*40:01,HLA-B*44:02,HLA-B*49:01
AEMLESVI

SEQ ID NO: 6199 - protein, 10 aa, Homo sapiens
  Table 1.2; MAGEA9; ENSG00000123584; HLA -B*44:02
AEMLESVIKN

SEQ ID NO: 6200 - protein, 11 aa, Homo sapiens
  Table 1.2; MAGEA9; ENSG00000123584; HLA -A*30:01,HLA-A*30:02,HLA-B*27:02,HLA-B*40:01,HLA-B*44:02, HLA-B*44:03,HLA-C*16:04
AEMLESVIKNY

SEQ ID NO: 6201 - protein, 8 aa, Homo sapiens
  Table 1.2; MAGEA9; ENSG00000123584; HLA -B*49:01
AETSYEKV

SEQ ID NO: 6202 - protein, 9 aa, Homo sapiens
  Table 1.2; MAGEA9; ENSG00000123584; HLA -A*30:01,HLA-B*13:02,HLA-B*27:02,HLA-B*40:01,HLA-B*40:02, HLA-B*44:02,HLA-B*44:03,HLA-B*49:01,HLA-C*16:02,HLA-C*16:04
AETSYEKVI

SEQ ID NO: 6203 - protein, 11 aa, Homo sapiens
  Table 1.2; MAGEA9; ENSG00000123584; HLA -B*44:02,HLA-B*44:03
AETSYEKVINY

SEQ ID NO: 6204 - protein, 9 aa, Homo sapiens
  Table 1.2; MAGEA9; ENSG00000123584; HLA -A*03:02,HLA-A*11:01,HLA-B*27:05
AHAETSYEK

SEQ ID NO: 6205 - protein, 10 aa, Homo sapiens
  Table 1.2; MAGEA9; ENSG00000123584; HLA -B*38:01
AHAETSYEKV

SEQ ID NO: 6206 - protein, 11 aa, Homo sapiens
  Table 1.2; MAGEA9; ENSG00000123584; HLA -B*38:01
AHAETSYEKVI

SEQ ID NO: 6207 - protein, 9 aa, Homo sapiens
  Table 1.2; MAGEA9; ENSG00000123584; HLA -A*02:03,HLA-A*02:04,HLA-B*08:01
ALKLKVAEL

SEQ ID NO: 6208 - protein, 9 aa, Homo sapiens
  Table 1.2; MAGEA9; ENSG00000123584; HLA -A*02:01,HLA-A*02:03,HLA-A*02:04,HLA-A*02:07
ALLIIVLGV

SEQ ID NO: 6209 - protein, 8 aa, Homo sapiens
  Table 1.2; MAGEA9; ENSG00000123584; HLA -A*30:02,HLA-B*15:01,HLA-B*15:03
ALSVMGVY

SEQ ID NO: 6210 - protein, 9 aa, Homo sapiens
  Table 1.2; MAGEA9; ENSG00000123584; HLA -A*02:01,HLA-A*02:03,HLA-A*02:04,HLA-A*02:07,HLA-B*13:02, HLA-B*55:01
ALSVMGVYV

SEQ ID NO: 6211 - protein, 11 aa, Homo sapiens
  Table 1.2; MAGEA9; ENSG00000123584; HLA -A*03:01,HLA-A*03:02
ALSVMGVYVGK

SEQ ID NO: 6212 - protein, 9 aa, Homo sapiens
  Table 1.2; MAGEA9; ENSG00000123584; HLA -B*54:01,HLA-B*56:01
APEEVIWEA

SEQ ID NO: 6213 - protein, 10 aa, Homo sapiens
  Table 1.2; MAGEA9; ENSG00000123584; HLA -B*35:03
APEEVIWEAL

SEQ ID NO: 6214 - protein, 8 aa, Homo sapiens
  Table 1.2; MAGEA9; ENSG00000123584; HLA -A*30:02,HLA-B*15:01
ASSSISVY

SEQ ID NO: 6215 - protein, 9 aa, Homo sapiens
  Table 1.2; MAGEA9; ENSG00000123584; HLA -A*01:01,HLA-A*03:01,HLA-A*03:02,HLA-A*11:01,HLA-A*26:01, HLA-A*29:02,HLA-A*30:02,HLA-A*31:01,HLA-A*32:01,HLA-A*68:01, HLA-B*15:01,HLA-B*15:03,HLA-B*27:02,HLA-B*27:05,HLA-B*44:03,
  HLA-B*46:01,HLA-B*57:01,HLA-B*58:01,HLA-C*02:02,HLA-C*12:03, HLA-C*16:01,HLA-C*16:02,HLA-C*16:04
ASSSISVYY

SEQ ID NO: 6216 - protein, 8 aa, Homo sapiens
  Table 1.2; MAGEA9; ENSG00000123584; HLA -B*51:01
DPAGHSYI

SEQ ID NO: 6217 - protein, 9 aa, Homo sapiens
  Table 1.2; MAGEA9; ENSG00000123584; HLA -B*08:01,HLA-B*35:01,HLA-B*35:03
DPAGHSYIL

SEQ ID NO: 6218 - protein, 9 aa, Homo sapiens
  Table 1.2; MAGEA9; ENSG00000123584; HLA -B*35:01
DPAQLEFMF

SEQ ID NO: 6219 - protein, 10 aa, Homo sapiens
  Table 1.2; MAGEA9; ENSG00000123584; HLA -A*25:01,HLA-A*26:01,HLA-A*33:01
DSMLGDGHSM

SEQ ID NO: 6220 - protein, 10 aa, Homo sapiens
  Table 1.2; MAGEA9; ENSG00000123584; HLA -A*26:01,HLA-A*68:01
DVKEVDPAGH

SEQ ID NO: 6221 - protein, 8 aa, Homo sapiens
  Table 1.2; MAGEA9; ENSG00000123584; HLA -B*51:01
EALSVMGV

SEQ ID NO: 6222 - protein, 9 aa, Homo sapiens
  Table 1.2; MAGEA9; ENSG00000123584; HLA -A*25:01,HLA-A*26:01,HLA-A*29:02,HLA-A*30:02,HLA-A*33:01, HLA-A*33:03,HLA-B*18:01,HLA-B*35:01,HLA-C*07:06
EALSVMGVY

SEQ ID NO: 6223 - protein, 10 aa, Homo sapiens
  Table 1.2; MAGEA9; ENSG00000123584; HLA -A*26:01,HLA-A*68:01,HLA-A*68:02
EALSVMGVYV

SEQ ID NO: 6224 - protein, 9 aa, Homo sapiens
  Table 1.2; MAGEA9; ENSG00000123584; HLA -B*35:03
EAQGEDLGL

SEQ ID NO: 6225 - protein, 10 aa, Homo sapiens
  Table 1.2; MAGEA9; ENSG00000123584; HLA -A*26:01
EAQGEDLGLM

SEQ ID NO: 6226 - protein, 9 aa, Homo sapiens
  Table 1.2; MAGEA9; ENSG00000123584; HLA -B*49:01
EEEEPSSSV

SEQ ID NO: 6227 - protein, 8 aa, Homo sapiens
  Table 1.2; MAGEA9; ENSG00000123584; HLA -B*18:01
EEVIWEAL

SEQ ID NO: 6228 - protein, 10 aa, Homo sapiens
  Table 1.2; MAGEA9; ENSG00000123584; HLA -A*29:02
ELVHFLLHKY

SEQ ID NO: 6229 - protein, 10 aa, Homo sapiens
  Table 1.2; MAGEA9; ENSG00000123584; HLA -A*25:01,HLA-A*26:01,HLA-A*29:02,HLA-A*30:02,HLA-A*33:01, HLA-A*33:03,HLA-B*44:02,HLA-B*44:03
EMLESVIKNY

SEQ ID NO: 6230 - protein, 9 aa, Homo sapiens
  Table 1.2; MAGEA9; ENSG00000123584; HLA -A*26:01,HLA-B*35:01
EPICYPSLY

SEQ ID NO: 6231 - protein, 8 aa, Homo sapiens
  Table 1.2; MAGEA9; ENSG00000123584; HLA -B*08:01,HLA-B*35:03
EPVTKAEM

SEQ ID NO: 6232 - protein, 9 aa, Homo sapiens
  Table 1.2; MAGEA9; ENSG00000123584; HLA -B*08:01,HLA-B*35:03
EPVTKAEML

SEQ ID NO: 6233 - protein, 9 aa, Homo sapiens
  Table 1.2; MAGEA9; ENSG00000123584; HLA -A*33:03,HLA-A*68:01
ESVIKNYKR

SEQ ID NO: 6234 - protein, 10 aa, Homo sapiens
  Table 1.2; MAGEA9; ENSG00000123584; HLA -A*01:01,HLA-A*25:01,HLA-A*26:01,HLA-A*33:03,HLA-A*68:01
ETSYEKVINY

SEQ ID NO: 6235 - protein, 11 aa, Homo sapiens
  Table 1.2; MAGEA9; ENSG00000123584; HLA -A*68:01,HLA-A*68:02
ETSYEKVINYL

SEQ ID NO: 6236 - protein, 9 aa, Homo sapiens
  Table 1.2; MAGEA9; ENSG00000123584; HLA -A*01:01,HLA-A*25:01,HLA-A*26:01,HLA-A*29:02,HLA-A*30:02, HLA-A*32:01,HLA-A*33:03,HLA-A*68:01,HLA-B*15:01,HLA-B*15:03, HLA-B*18:01,HLA-B*35:01,HLA-B*39:01,HLA-B*44:02,HLA-B*44:03,
  HLA-B*58:01,HLA-C*03:03,HLA-C*05:01,HLA-C*07:04,HLA-C*07:06, HLA-C*16:02
EVDPAGHSY

SEQ ID NO: 6237 - protein, 10 aa, Homo sapiens
  Table 1.2; MAGEA9; ENSG00000123584; HLA -A*01:01,HLA-A*25:01,HLA-A*68:02,HLA-B*38:01
EVDPAGHSYI

SEQ ID NO: 6238 - protein, 11 aa, Homo sapiens
  Table 1.2; MAGEA9; ENSG00000123584; HLA -A*01:01,HLA-A*02:07,HLA-B*38:01
EVDPAGHSYIL

SEQ ID NO: 6239 - protein, 9 aa, Homo sapiens
  Table 1.2; MAGEA9; ENSG00000123584; HLA -A*25:01,HLA-A*26:01,HLA-A*68:02
EVIWEALSV

SEQ ID NO: 6240 - protein, 10 aa, Homo sapiens
  Table 1.2; MAGEA9; ENSG00000123584; HLA -A*25:01,HLA-A*26:01
EVIWEALSVM

SEQ ID NO: 6241 - protein, 10 aa, Homo sapiens
  Table 1.2; MAGEA9; ENSG00000123584; HLA -A*26:01
EVLGEEQEGV

SEQ ID NO: 6242 - protein, 8 aa, Homo sapiens
  Table 1.2; MAGEA9; ENSG00000123584; HLA -C*16:02
FGTDVKEV

SEQ ID NO: 6243 - protein, 9 aa, Homo sapiens
  Table 1.2; MAGEA9; ENSG00000123584; HLA -A*02:01,HLA-A*02:03,HLA-A*02:04,HLA-A*02:07,HLA-A*29:02, HLA-B*13:02
FMFQEALKL

SEQ ID NO: 6244 - protein, 8 aa, Homo sapiens
  Table 1.2; MAGEA9; ENSG00000123584; HLA -B*54:01,HLA-B*56:01
FPVIFGKA

SEQ ID NO: 6245 - protein, 9 aa, Homo sapiens
  Table 1.2; MAGEA9; ENSG00000123584; HLA -B*54:01
FPVIFGKAS

SEQ ID NO: 6246 - protein, 11 aa, Homo sapiens
  Table 1.2; MAGEA9; ENSG00000123584; HLA -B*35:01
FPVIFGKASEF

SEQ ID NO: 6247 - protein, 9 aa, Homo sapiens
  Table 1.2; MAGEA9; ENSG00000123584; HLA -B*13:02
FQEALKLKV

SEQ ID NO: 6248 - protein, 9 aa, Homo sapiens
  Table 1.2; MAGEA9; ENSG00000123584; HLA -A*24:02
FYGEPRKLL

SEQ ID NO: 6249 - protein, 9 aa, Homo sapiens
  Table 1.2; MAGEA9; ENSG00000123584; HLA -A*25:01,HLA-A*26:01,HLA-A*29:02,HLA-A*30:02,HLA-A*32:01, HLA-B*15:01,HLA-B*15:03,HLA-B*27:05,HLA-B*35:01,HLA-B*39:01, HLA-B*46:01,HLA-B*58:01,HLA-C*02:02,HLA-C*07:04,HLA-C*12:03,
  HLA-C*16:02,HLA-C*16:04
GASSSISVY

SEQ ID NO: 6250 - protein, 10 aa, Homo sapiens
  Table 1.2; MAGEA9; ENSG00000123584; HLA -A*01:01,HLA-A*26:01,HLA-A*29:02,HLA-A*30:02,HLA-B*15:01, HLA-B*15:03,HLA-B*27:05,HLA-B*58:01,HLA-C*02:02,HLA-C*16:04
GASSSISVYY

SEQ ID NO: 6251 - protein, 8 aa, Homo sapiens
  Table 1.2; MAGEA9; ENSG00000123584; HLA -A*03:02,HLA-A*11:01
GDGHSMPK

SEQ ID NO: 6252 - protein, 9 aa, Homo sapiens
  Table 1.2; MAGEA9; ENSG00000123584; HLA -B*49:01
GEDLGLMGA

SEQ ID NO: 6253 - protein, 10 aa, Homo sapiens
  Table 1.2; MAGEA9; ENSG00000123584; HLA -A*30:02,HLA-B*15:01
GGASSSISVY

SEQ ID NO: 6254 - protein, 11 aa, Homo sapiens
  Table 1.2; MAGEA9; ENSG00000123584; HLA -A*30:02,HLA-B*27:05
GGASSSISVYY

SEQ ID NO: 6255 - protein, 9 aa, Homo sapiens
  Table 1.2; MAGEA9; ENSG00000123584; HLA -B*38:01,HLA-B*39:01
GHSMPKAAL

SEQ ID NO: 6256 - protein, 9 aa, Homo sapiens
  Table 1.2; MAGEA9; ENSG00000123584; HLA -A*01:01,HLA-A*29:02,HLA-A*30:02,HLA-A*32:01,HLA-B*57:01, HLA-B*58:01,HLA-C*05:01
GSDPAHYEF

SEQ ID NO: 6257 - protein, 10 aa, Homo sapiens
  Table 1.2; MAGEA9; ENSG00000123584; HLA -A*01:01
GSDPAHYEFL

SEQ ID NO: 6258 - protein, 11 aa, Homo sapiens
  Table 1.2; MAGEA9; ENSG00000123584; HLA -B*57:01
GSDPAHYEFLW

SEQ ID NO: 6259 - protein, 10 aa, Homo sapiens
  Table 1.2; MAGEA9; ENSG00000123584; HLA -A*30:02,HLA-A*32:01,HLA-B*15:01,HLA-B*15:03,HLA-B*46:01, HLA-B*58:01
GSKAHAETSY

SEQ ID NO: 6260 - protein, 11 aa, Homo sapiens
  Table 1.2; MAGEA9; ENSG00000123584; HLA -A*29:02
GVYVGKEHMFY

SEQ ID NO: 6261 - protein, 9 aa, Homo sapiens
  Table 1.2; MAGEA9; ENSG00000123584; HLA -A*01:01
HAETSYEKV

SEQ ID NO: 6262 - protein, 8 aa, Homo sapiens
  Table 1.2; MAGEA9; ENSG00000123584; HLA -B*08:01
HSMPKAAL

SEQ ID NO: 6263 - protein, 9 aa, Homo sapiens
  Table 1.2; MAGEA9; ENSG00000123584; HLA -B*08:01
HSMPKAALL

SEQ ID NO: 6264 - protein, 8 aa, Homo sapiens
  Table 1.2; MAGEA9; ENSG00000123584; HLA -B*54:01
HSYILVTA

SEQ ID NO: 6265 - protein, 9 aa, Homo sapiens
  Table 1.2; MAGEA9; ENSG00000123584; HLA -B*15:03,HLA-B*18:01,HLA-B*40:02,HLA-B*51:01
HSYILVTAL

SEQ ID NO: 6266 - protein, 8 aa, Homo sapiens
  Table 1.2; MAGEA9; ENSG00000123584; HLA -A*23:01,HLA-C*14:02
IFGKASEF

SEQ ID NO: 6267 - protein, 8 aa, Homo sapiens
  Table 1.2; MAGEA9; ENSG00000123584; HLA -B*57:01
ISVYYTLW

SEQ ID NO: 6268 - protein, 9 aa, Homo sapiens
  Table 1.2; MAGEA9; ENSG00000123584; HLA -A*03:01,HLA-A*03:02,HLA-A*11:01
IVLGVILTK

SEQ ID NO: 6269 - protein, 8 aa, Homo sapiens
  Table 1.2; MAGEA9; ENSG00000123584; HLA -A*30:02,HLA-A*32:01,HLA-B*15:01,HLA-B*46:01,HLA-B*58:01
KAHAETSY

SEQ ID NO: 6270 - protein, 9 aa, Homo sapiens
  Table 1.2; MAGEA9; ENSG00000123584; HLA -B*13:02,HLA-B*49:01,HLA-B*58:01,HLA-C*02:02,HLA-C*12:03, HLA-C*16:02,HLA-C*16:04
KASEFMQVI

SEQ ID NO: 6271 - protein, 10 aa, Homo sapiens
  Table 1.2; MAGEA9; ENSG00000123584; HLA -B*57:01
KASEFMQVIF

SEQ ID NO: 6272 - protein, 9 aa, Homo sapiens
  Table 1.2; MAGEA9; ENSG00000123584; HLA -B*37:01,HLA-B*40:01
KEPVTKAEM

SEQ ID NO: 6273 - protein, 10 aa, Homo sapiens
  Table 1.2; MAGEA9; ENSG00000123584; HLA -B*40:01
KEPVTKAEML

SEQ ID NO: 6274 - protein, 10 aa, Homo sapiens
  Table 1.2; MAGEA9; ENSG00000123584; HLA -A*25:01,HLA-A*29:02,HLA-A*30:01,HLA-A*30:02,HLA-A*32:01, HLA-B*15:01,HLA-B*15:03,HLA-B*18:01,HLA-B*27:02,HLA-B*27:05, HLA-B*37:01,HLA-B*40:01,HLA-B*44:02,HLA-B*44:03,HLA-C*02:02,
  HLA-C*16:01,HLA-C*16:04
KEVDPAGHSY

SEQ ID NO: 6275 - protein, 11 aa, Homo sapiens
  Table 1.2; MAGEA9; ENSG00000123584; HLA -B*40:01,HLA-B*49:01
KEVDPAGHSYI

SEQ ID NO: 6276 - protein, 9 aa, Homo sapiens
  Table 1.2; MAGEA9; ENSG00000123584; HLA -A*02:01,HLA-A*02:03,HLA-A*02:04,HLA-A*02:07,HLA-A*31:01, HLA-A*32:01,HLA-A*68:02,HLA-B*27:05,HLA-B*58:01
KVAELVHFL

SEQ ID NO: 6277 - protein, 10 aa, Homo sapiens
  Table 1.2; MAGEA9; ENSG00000123584; HLA -A*02:04,HLA-A*02:07,HLA-A*31:01,HLA-A*68:02
KVAELVHFLL

SEQ ID NO: 6278 - protein, 9 aa, Homo sapiens
  Table 1.2; MAGEA9; ENSG00000123584; HLA -A*02:01,HLA-A*02:04,HLA-A*02:07
KVINYLVML

SEQ ID NO: 6279 - protein, 8 aa, Homo sapiens
  Table 1.2; MAGEA9; ENSG00000123584; HLA -B*40:01
LEAQGEDL

SEQ ID NO: 6280 - protein, 10 aa, Homo sapiens
  Table 1.2; MAGEA9; ENSG00000123584; HLA -B*40:01
LEAQGEDLGL

SEQ ID NO: 6281 - protein, 8 aa, Homo sapiens
  Table 1.2; MAGEA9; ENSG00000123584; HLA -B*18:01,HLA-B*49:01
LEFMFQEA

SEQ ID NO: 6282 - protein, 9 aa, Homo sapiens
  Table 1.2; MAGEA9; ENSG00000123584; HLA -A*30:01,HLA-B*18:01,HLA-B*40:01,HLA-B*40:02,HLA-B*49:01
LEFMFQEAL

SEQ ID NO: 6283 - protein, 8 aa, Homo sapiens
  Table 1.2; MAGEA9; ENSG00000123584; HLA -B*18:01,HLA-B*37:01,HLA-B*44:02,HLA-B*44:03
LESVIKNY

SEQ ID NO: 6284 - protein, 9 aa, Homo sapiens
  Table 1.2; MAGEA9; ENSG00000123584; HLA -A*03:01,HLA-A*03:02,HLA-A*11:01
LGDGHSMPK

SEQ ID NO: 6285 - protein, 10 aa, Homo sapiens
  Table 1.2; MAGEA9; ENSG00000123584; HLA -B*27:02
LSVMGVYVGK

SEQ ID NO: 6286 - protein, 10 aa, Homo sapiens
  Table 1.2; MAGEA9; ENSG00000123584; HLA -A*01:01,HLA-A*29:02,HLA-A*30:02,HLA-B*57:01,HLA-B*58:01
LTQDWVQENY

SEQ ID NO: 6287 - protein, 9 aa, Homo sapiens
  Table 1.2; MAGEA9; ENSG00000123584; HLA -A*29:02
LVHFLLHKY

SEQ ID NO: 6288 - protein, 8 aa, Homo sapiens
  Table 1.2; MAGEA9; ENSG00000123584; HLA -C*14:02
MFQEALKL

SEQ ID NO: 6289 - protein, 9 aa, Homo sapiens
  Table 1.2; MAGEA9; ENSG00000123584; HLA -A*01:01,HLA-A*03:02,HLA-A*29:02,HLA-A*30:02,HLA-A*32:01, HLA-B*15:01,HLA-B*15:03,HLA-B*27:05,HLA-B*44:02,HLA-B*44:03, HLA-C*16:02
MLESVIKNY

SEQ ID NO: 6290 - protein, 10 aa, Homo sapiens
  Table 1.2; MAGEA9; ENSG00000123584; HLA -A*03:01,HLA-A*03:02
MLESVIKNYK

SEQ ID NO: 6291 - protein, 8 aa, Homo sapiens
  Table 1.2; MAGEA9; ENSG00000123584; HLA -A*32:01,HLA-C*01:02
MLGDGHSM

SEQ ID NO: 6292 - protein, 10 aa, Homo sapiens
  Table 1.2; MAGEA9; ENSG00000123584; HLA -A*03:01,HLA-A*03:02,HLA-A*11:01,HLA-A*33:01
MLGDGHSMPK

SEQ ID NO: 6293 - protein, 8 aa, Homo sapiens
  Table 1.2; MAGEA9; ENSG00000123584; HLA -B*51:01
MPKAALLI

SEQ ID NO: 6294 - protein, 9 aa, Homo sapiens
  Table 1.2; MAGEA9; ENSG00000123584; HLA -B*51:01,HLA-B*54:01
MPKAALLII

SEQ ID NO: 6295 - protein, 10 aa, Homo sapiens
  Table 1.2; MAGEA9; ENSG00000123584; HLA -B*54:01
MPKAALLIIV

SEQ ID NO: 6296 - protein, 9 aa, Homo sapiens
  Table 1.2; MAGEA9; ENSG00000123584; HLA -A*30:01,HLA-B*13:02,HLA-B*15:03,HLA-B*39:01
MQVIFGTDV

SEQ ID NO: 6297 - protein, 9 aa, Homo sapiens
  Table 1.2; MAGEA9; ENSG00000123584; HLA -A*24:02
NYKRYFPVI

SEQ ID NO: 6298 - protein, 9 aa, Homo sapiens
  Table 1.2; MAGEA9; ENSG00000123584; HLA -A*33:01,HLA-A*33:03
NYLVMLNAR

SEQ ID NO: 6299 - protein, 9 aa, Homo sapiens
  Table 1.2; MAGEA9; ENSG00000123584; HLA -A*30:01
QDWVQENYL

SEQ ID NO: 6300 - protein, 11 aa, Homo sapiens
  Table 1.2; MAGEA9; ENSG00000123584; HLA -A*30:02
QGGASSSISVY

SEQ ID NO: 6301 - protein, 9 aa, Homo sapiens
  Table 1.2; MAGEA9; ENSG00000123584; HLA -A*03:02,HLA-A*11:01
QVIFGTDVK

SEQ ID NO: 6302 - protein, 10 aa, Homo sapiens
  Table 1.2; MAGEA9; ENSG00000123584; HLA -A*01:01,HLA-A*25:01,HLA-A*26:01,HLA-A*29:02,HLA-A*30:02
QVPGSDPAHY

SEQ ID NO: 6303 - protein, 11 aa, Homo sapiens
  Table 1.2; MAGEA9; ENSG00000123584; HLA -A*30:02,HLA-A*32:01,HLA-B*15:01,HLA-B*15:03,HLA-B*58:01
RQVPGSDPAHY

SEQ ID NO: 6304 - protein, 8 aa, Homo sapiens
  Table 1.2; MAGEA9; ENSG00000123584; HLA -A*03:01,HLA-A*03:02,HLA-A*11:01,HLA-A*31:01,HLA-B*57:01
RVKEPVTK

SEQ ID NO: 6305 - protein, 9 aa, Homo sapiens
  Table 1.2; MAGEA9; ENSG00000123584; HLA -A*02:03,HLA-A*32:01,HLA-B*55:01,HLA-B*56:01
RVKEPVTKA

SEQ ID NO: 6306 - protein, 9 aa, Homo sapiens
  Table 1.2; MAGEA9; ENSG00000123584; HLA -A*03:01,HLA-A*31:01,HLA-B*57:01
RYFPVIFGK

SEQ ID NO: 6307 - protein, 8 aa, Homo sapiens
  Table 1.2; MAGEA9; ENSG00000123584; HLA -B*37:01
SDPAHYEF

SEQ ID NO: 6308 - protein, 8 aa, Homo sapiens
  Table 1.2; MAGEA9; ENSG00000123584; HLA -B*18:01,HLA-B*37:01,HLA-B*44:02,HLA-B*44:03
SEFMQVIF

SEQ ID NO: 6309 - protein, 9 aa, Homo sapiens
  Table 1.2; MAGEA9; ENSG00000123584; HLA -B*15:03
SKAHAETSY

SEQ ID NO: 6310 - protein, 9 aa, Homo sapiens
  Table 1.2; MAGEA9; ENSG00000123584; HLA -A*32:01,HLA-B*15:01,HLA-B*35:03,HLA-B*46:01,HLA-B*55:01, HLA-C*01:02,HLA-C*14:02
SMLGDGHSM

SEQ ID NO: 6311 - protein, 11 aa, Homo sapiens
  Table 1.2; MAGEA9; ENSG00000123584; HLA -A*03:01,HLA-A*03:02,HLA-A*11:01
SMLGDGHSMPK

SEQ ID NO: 6312 - protein, 10 aa, Homo sapiens
  Table 1.2; MAGEA9; ENSG00000123584; HLA -B*07:02,HLA-C*07:02
SPQGGASSSI

SEQ ID NO: 6313 - protein, 10 aa, Homo sapiens
  Table 1.2; MAGEA9; ENSG00000123584; HLA -B*39:01
SQFDEGSSSQ

SEQ ID NO: 6314 - protein, 9 aa, Homo sapiens
  Table 1.2; MAGEA9; ENSG00000123584; HLA -C*05:01
SSDSKEEEV

SEQ ID NO: 6315 - protein, 9 aa, Homo sapiens
  Table 1.2; MAGEA9; ENSG00000123584; HLA -A*23:01,HLA-B*58:01
SSISVYYTL

SEQ ID NO: 6316 - protein, 10 aa, Homo sapiens
  Table 1.2; MAGEA9; ENSG00000123584; HLA -A*25:01,HLA-B*57:01
SSISVYYTLW

SEQ ID NO: 6317 - protein, 8 aa, Homo sapiens
  Table 1.2; MAGEA9; ENSG00000123584; HLA -A*30:02
SSSISVYY

SEQ ID NO: 6318 - protein, 9 aa, Homo sapiens
  Table 1.2; MAGEA9; ENSG00000123584; HLA -A*01:01,HLA-A*02:07,HLA-A*11:01,HLA-A*25:01,HLA-A*26:01, HLA-A*29:02,HLA-A*32:01,HLA-B*15:01,HLA-B*15:03,HLA-B*35:01, HLA-B*38:01,HLA-B*46:01,HLA-B*58:01,HLA-C*02:02,HLA-C*03:03,
  HLA-C*03:04,HLA-C*04:01,HLA-C*05:01
SVDPAQLEF

SEQ ID NO: 6319 - protein, 10 aa, Homo sapiens
  Table 1.2; MAGEA9; ENSG00000123584; HLA -A*01:01,HLA-A*02:07
SVDPAQLEFM

SEQ ID NO: 6320 - protein, 11 aa, Homo sapiens
  Table 1.2; MAGEA9; ENSG00000123584; HLA -A*02:07
SVDPAQLEFMF

SEQ ID NO: 6321 - protein, 9 aa, Homo sapiens
  Table 1.2; MAGEA9; ENSG00000123584; HLA -A*03:01,HLA-A*03:02,HLA-A*11:01,HLA-A*31:01,HLA-A*33:01, HLA-A*33:03,HLA-A*68:01,HLA-C*07:06
SVMGVYVGK

SEQ ID NO: 6322 - protein, 9 aa, Homo sapiens
  Table 1.2; MAGEA9; ENSG00000123584; HLA -A*23:01,HLA-A*24:02
SYEKVINYL

SEQ ID NO: 6323 - protein, 8 aa, Homo sapiens
  Table 1.2; MAGEA9; ENSG00000123584; HLA -A*23:01,HLA-A*24:02,HLA-C*14:02
SYILVTAL

SEQ ID NO: 6324 - protein, 10 aa, Homo sapiens
  Table 1.2; MAGEA9; ENSG00000123584; HLA -A*23:01,HLA-A*24:02
SYILVTALGL

SEQ ID NO: 6325 - protein, 9 aa, Homo sapiens
  Table 1.2; MAGEA9; ENSG00000123584; HLA -A*01:01,HLA-A*30:02
TQDWVQENY

SEQ ID NO: 6326 - protein, 10 aa, Homo sapiens
  Table 1.2; MAGEA9; ENSG00000123584; HLA -B*38:01
TQDWVQENYL

SEQ ID NO: 6327 - protein, 9 aa, Homo sapiens
  Table 1.2; MAGEA9; ENSG00000123584; HLA -A*01:01,HLA-A*03:01,HLA-A*11:01,HLA-A*25:01,HLA-A*26:01, HLA-A*29:02,HLA-A*30:02,HLA-A*32:01,HLA-A*33:01,HLA-A*33:03, HLA-A*68:01,HLA-B*08:01,HLA-B*15:01,HLA-B*15:03,HLA-B*18:01,
  HLA-B*35:01,HLA-B*44:03,HLA-B*46:01,HLA-B*57:01,HLA-B*58:01, HLA-C*02:02,HLA-C*07:04,HLA-C*07:06,HLA-C*12:03,HLA-C*14:02, HLA-C*16:01,HLA-C*16:02,HLA-C*16:04
TSYEKVINY

SEQ ID NO: 6328 - protein, 10 aa, Homo sapiens
  Table 1.2; MAGEA9; ENSG00000123584; HLA -A*68:02
TSYEKVINYL

SEQ ID NO: 6329 - protein, 11 aa, Homo sapiens
  Table 1.2; MAGEA9; ENSG00000123584; HLA -A*68:02
TSYEKVINYLV

SEQ ID NO: 6330 - protein, 9 aa, Homo sapiens
  Table 1.2; MAGEA9; ENSG00000123584; HLA -A*02:07
VAELVHFLL

SEQ ID NO: 6331 - protein, 8 aa, Homo sapiens
  Table 1.2; MAGEA9; ENSG00000123584; HLA -A*30:02,HLA-B*37:01,HLA-C*01:02
VDPAGHSY

SEQ ID NO: 6332 - protein, 9 aa, Homo sapiens
  Table 1.2; MAGEA9; ENSG00000123584; HLA -A*26:01,HLA-A*29:02,HLA-A*30:02,HLA-A*32:01,HLA-B*15:01, HLA-B*15:03,HLA-B*46:01,HLA-C*02:02
VIFGKASEF

SEQ ID NO: 6333 - protein, 10 aa, Homo sapiens
  Table 1.2; MAGEA9; ENSG00000123584; HLA -A*02:01,HLA-A*02:03
VIFGTDVKEV

SEQ ID NO: 6334 - protein, 11 aa, Homo sapiens
  Table 1.2; MAGEA9; ENSG00000123584; HLA -A*02:01,HLA-A*02:07
VIWEALSVMGV

SEQ ID NO: 6335 - protein, 10 aa, Homo sapiens
  Table 1.2; MAGEA9; ENSG00000123584; HLA -B*15:03
VKEPVTKAEM

SEQ ID NO: 6336 - protein, 11 aa, Homo sapiens
  Table 1.2; MAGEA9; ENSG00000123584; HLA -B*15:03
VKEVDPAGHSY

SEQ ID NO: 6337 - protein, 9 aa, Homo sapiens
  Table 1.2; MAGEA9; ENSG00000123584; HLA -A*02:01,HLA-A*02:03,HLA-A*02:07,HLA-B*13:02,HLA-B*55:01
VLGEEQEGV

SEQ ID NO: 6338 - protein, 8 aa, Homo sapiens
  Table 1.2; MAGEA9; ENSG00000123584; HLA -A*03:01,HLA-A*03:02
VLGVILTK

SEQ ID NO: 6339 - protein, 8 aa, Homo sapiens
  Table 1.2; MAGEA9; ENSG00000123584; HLA -A*03:02
VMGVYVGK

SEQ ID NO: 6340 - protein, 9 aa, Homo sapiens
  Table 1.2; MAGEA9; ENSG00000123584; HLA -A*23:01
VMLNAREPI

SEQ ID NO: 6341 - protein, 11 aa, Homo sapiens
  Table 1.2; MAGEA9; ENSG00000123584; HLA -A*29:02
VMLNAREPICY

SEQ ID NO: 6342 - protein, 9 aa, Homo sapiens
  Table 1.2; MAGEA9; ENSG00000123584; HLA -A*01:01,HLA-A*30:02,HLA-B*35:01,HLA-B*55:01
VPGSDPAHY

SEQ ID NO: 6343 - protein, 11 aa, Homo sapiens
  Table 1.2; MAGEA9; ENSG00000123584; HLA -B*35:01,HLA-B*55:01
VPGSDPAHYEF

SEQ ID NO: 6344 - protein, 8 aa, Homo sapiens
  Table 1.2; MAGEA9; ENSG00000123584; HLA -A*01:01,HLA-B*39:01
VQENYLEY

SEQ ID NO: 6345 - protein, 9 aa, Homo sapiens
  Table 1.2; MAGEA9; ENSG00000123584; HLA -A*23:01,HLA-A*24:02
VYVGKEHMF

SEQ ID NO: 6346 - protein, 10 aa, Homo sapiens
  Table 1.2; MAGEA9; ENSG00000123584; HLA -A*29:02
VYVGKEHMFY

SEQ ID NO: 6347 - protein, 9 aa, Homo sapiens
  Table 1.2; MAGEA9; ENSG00000123584; HLA -A*23:01,HLA-A*24:02
VYYTLWSQF

SEQ ID NO: 6348 - protein, 9 aa, Homo sapiens
  Table 1.2; MAGEA9; ENSG00000123584; HLA -B*49:01
WEALSVMGV

SEQ ID NO: 6349 - protein, 9 aa, Homo sapiens
  Table 1.2; MAGEA9; ENSG00000123584; HLA -A*01:01,HLA-A*25:01,HLA-A*26:01,HLA-A*29:02,HLA-A*30:02, HLA-B*15:01,HLA-B*35:01
WVQENYLEY

SEQ ID NO: 6350 - protein, 9 aa, Homo sapiens
  Table 1.2; MAGEA9; ENSG00000123584; HLA -B*49:01
YEFLWGSKA

SEQ ID NO: 6351 - protein, 8 aa, Homo sapiens
  Table 1.2; MAGEA9; ENSG00000123584; HLA -A*30:01,HLA-B*08:01,HLA-B*18:01,HLA-B*37:01,HLA-B*40:02, HLA-B*49:01
YEKVINYL

SEQ ID NO: 6352 - protein, 9 aa, Homo sapiens
  Table 1.2; MAGEA9; ENSG00000123584; HLA -B*49:01
YEKVINYLV

SEQ ID NO: 6353 - protein, 8 aa, Homo sapiens
  Table 1.2; MAGEA9; ENSG00000123584; HLA -B*54:01,HLA-B*56:01
YPSLYEEV

SEQ ID NO: 6354 - protein, 9 aa, Homo sapiens
  Table 1.2; MAGEA9; ENSG00000123584; HLA -B*35:01,HLA-B*35:03,HLA-B*38:01,HLA-B*55:01
YPSLYEEVL

SEQ ID NO: 6355 - protein, 9 aa, Homo sapiens
  Table 1.2; MAGEA9; ENSG00000123584; HLA -B*27:02,HLA-B*27:05
YRVKEPVTK

SEQ ID NO: 6356 - protein, 9 aa, Homo sapiens
  Table 1.2; MAGEA9; ENSG00000123584; HLA -A*01:01,HLA-A*29:02
YVGKEHMFY

SEQ ID NO: 6357 - protein, 8 aa, Homo sapiens
  Table 1.2; MAGEA9; ENSG00000123584; HLA -A*24:02
YYTLWSQF

SEQ ID NO: 6358 - protein, 8 aa, Homo sapiens
  Table 1.2; MAGEB1; ENSG00000214107; HLA -B*37:01,HLA-B*49:01
AETTKMKV

SEQ ID NO: 6359 - protein, 9 aa, Homo sapiens
  Table 1.2; MAGEB1; ENSG00000214107; HLA -A*30:01,HLA-B*37:01,HLA-B*40:01,HLA-B*40:02,HLA-B*44:02, HLA-B*44:03,HLA-B*49:01
AETTKMKVL

SEQ ID NO: 6360 - protein, 11 aa, Homo sapiens
  Table 1.2; MAGEB1; ENSG00000214107; HLA -A*02:01,HLA-A*02:03,HLA-B*55:01
ALRDEEERAQV

SEQ ID NO: 6361 - protein, 8 aa, Homo sapiens
  Table 1.2; MAGEB1; ENSG00000214107; HLA -B*07:02
APFSRSSH

SEQ ID NO: 6362 - protein, 9 aa, Homo sapiens
  Table 1.2; MAGEB1; ENSG00000214107; HLA -B*07:02,HLA-B*56:01,HLA-C*07:02
APFSRSSHP

SEQ ID NO: 6363 - protein, 10 aa, Homo sapiens
  Table 1.2; MAGEB1; ENSG00000214107; HLA -B*07:02,HLA-B*08:01,HLA-B*35:01,HLA-B*35:03,HLA-B*54:01, HLA-B*55:01,HLA-B*56:01,HLA-C*04:01,HLA-C*07:01,HLA-C*07:02
APFSRSSHPM

SEQ ID NO: 6364 - protein, 8 aa, Homo sapiens
  Table 1.2; MAGEB1; ENSG00000214107; HLA -B*56:01
APPTTTAA

SEQ ID NO: 6365 - protein, 9 aa, Homo sapiens
  Table 1.2; MAGEB1; ENSG00000214107; HLA -B*07:02,HLA-B*54:01,HLA-B*55:01,HLA-B*56:01
APPTTTAAA

SEQ ID NO: 6366 - protein, 10 aa, Homo sapiens
  Table 1.2; MAGEB1; ENSG00000214107; HLA -B*56:01
APPTTTAAAA

SEQ ID NO: 6367 - protein, 11 aa, Homo sapiens
  Table 1.2; MAGEB1; ENSG00000214107; HLA -B*07:02,HLA-B*56:01
APPTTTAAAAV

SEQ ID NO: 6368 - protein, 9 aa, Homo sapiens
  Table 1.2; MAGEB1; ENSG00000214107; HLA -B*27:05
ARSRAPFSR

SEQ ID NO: 6369 - protein, 9 aa, Homo sapiens
  Table 1.2; MAGEB1; ENSG00000214107; HLA -B*57:01
ASRRLELVF

SEQ ID NO: 6370 - protein, 10 aa, Homo sapiens
  Table 1.2; MAGEB1; ENSG00000214107; HLA -A*01:01,HLA-A*30:02
ATPRDFPSHY

SEQ ID NO: 6371 - protein, 10 aa, Homo sapiens
  Table 1.2; MAGEB1; ENSG00000214107; HLA -A*03:02,HLA-A*11:01
ATTSTESSVK

SEQ ID NO: 6372 - protein, 10 aa, Homo sapiens
  Table 1.2; MAGEB1; ENSG00000214107; HLA -A*24:02
AWEAGMLMHF

SEQ ID NO: 6373 - protein, 8 aa, Homo sapiens
  Table 1.2; MAGEB1; ENSG00000214107; HLA -A*23:01,HLA-A*24:02,HLA-A*32:01,HLA-B*46:01,HLA-C*01:02, HLA-C*04:01,HLA-C*14:02
AYAETTKM

SEQ ID NO: 6374 - protein, 9 aa, Homo sapiens
  Table 1.2; MAGEB1; ENSG00000214107; HLA -A*03:02,HLA-A*33:03
AYAETTKMK

SEQ ID NO: 6375 - protein, 11 aa, Homo sapiens
  Table 1.2; MAGEB1; ENSG00000214107; HLA -A*24:02
AYAETTKMKVL

SEQ ID NO: 6376 - protein, 8 aa, Homo sapiens
  Table 1.2; MAGEB1; ENSG00000214107; HLA -C*04:01
AYDGEEHL

SEQ ID NO: 6377 - protein, 9 aa, Homo sapiens
  Table 1.2; MAGEB1; ENSG00000214107; HLA -A*23:01,HLA-A*24:02,HLA-B*35:03,HLA-B*38:01,HLA-B*55:01, HLA-C*04:01,HLA-C*05:01
AYDGEEHLI

SEQ ID NO: 6378 - protein, 10 aa, Homo sapiens
  Table 1.2; MAGEB1; ENSG00000214107; HLA -A*01:01,HLA-A*29:02,HLA-A*30:02
AYDGEEHLIY

SEQ ID NO: 6379 - protein, 8 aa, Homo sapiens
  Table 1.2; MAGEB1; ENSG00000214107; HLA -B*07:02,HLA-B*35:01,HLA-B*35:03,HLA-C*07:02
CPSSSPVL

SEQ ID NO: 6380 - protein, 9 aa, Homo sapiens
  Table 1.2; MAGEB1; ENSG00000214107; HLA -A*32:01,HLA-B*15:01,HLA-B*15:03,HLA-B*27:05,HLA-B*38:01
CQGEENASF

SEQ ID NO: 6381 - protein, 8 aa, Homo sapiens
  Table 1.2; MAGEB1; ENSG00000214107; HLA -B*18:01
DEEERAQV

SEQ ID NO: 6382 - protein, 9 aa, Homo sapiens
  Table 1.2; MAGEB1; ENSG00000214107; HLA -B*18:01
DEEERAQVR

SEQ ID NO: 6383 - protein, 9 aa, Homo sapiens
  Table 1.2; MAGEB1; ENSG00000214107; HLA -A*33:01
DLVQEKYLK

SEQ ID NO: 6384 - protein, 10 aa, Homo sapiens
  Table 1.2; MAGEB1; ENSG00000214107; HLA -A*25:01,HLA-A*26:01
DLVQEKYLKY

SEQ ID NO: 6385 - protein, 9 aa, Homo sapiens
  Table 1.2; MAGEB1; ENSG00000214107; HLA -A*33:01
DMLKVVDEK

SEQ ID NO: 6386 - protein, 10 aa, Homo sapiens
  Table 1.2; MAGEB1; ENSG00000214107; HLA -A*01:01,HLA-B*18:01
DMLKVVDEKY

SEQ ID NO: 6387 - protein, 9 aa, Homo sapiens
  Table 1.2; MAGEB1; ENSG00000214107; HLA -B*35:01,HLA-B*35:03
DPVAWEAGM

SEQ ID NO: 6388 - protein, 9 aa, Homo sapiens
  Table 1.2; MAGEB1; ENSG00000214107; HLA -A*26:01
DTPTSSPAA

SEQ ID NO: 6389 - protein, 9 aa, Homo sapiens
  Table 1.2; MAGEB1; ENSG00000214107; HLA -A*33:01,HLA-A*33:03
EALRDEEER

SEQ ID NO: 6390 - protein, 9 aa, Homo sapiens
  Table 1.2; MAGEB1; ENSG00000214107; HLA -A*25:01,HLA-A*26:01,HLA-A*29:02,HLA-A*30:02,HLA-A*32:01, HLA-A*33:01,HLA-A*33:03,HLA-B*15:01,HLA-B*15:03,HLA-B*18:01, HLA-B*27:02,HLA-B*35:01,HLA-B*37:01,HLA-B*44:02,HLA-B*44:03,
  HLA-C*07:01,HLA-C*07:04,HLA-C*07:06,HLA-C*16:01,HLA-C*16:04
EDNPSGHTY

SEQ ID NO: 6391 - protein, 11 aa, Homo sapiens
  Table 1.2; MAGEB1; ENSG00000214107; HLA -A*23:01,HLA-A*30:01,HLA-A*33:03,HLA-B*37:01,HLA-B*38:01
EDNPSGHTYTL

SEQ ID NO: 6392 - protein, 10 aa, Homo sapiens
  Table 1.2; MAGEB1; ENSG00000214107; HLA -A*30:01,HLA-B*38:01,HLA-B*40:01,HLA-B*40:02,HLA-B*44:03
EECPSSSPVL

SEQ ID NO: 6393 - protein, 9 aa, Homo sapiens
  Table 1.2; MAGEB1; ENSG00000214107; HLA -A*68:02,HLA-B*49:01
EEIWKFMNV

SEQ ID NO: 6394 - protein, 9 aa, Homo sapiens
  Table 1.2; MAGEB1; ENSG00000214107; HLA -A*30:01,HLA-B*18:01,HLA-B*40:02,HLA-B*44:02,HLA-B*49:01
EENASFSQA

SEQ ID NO: 6395 - protein, 8 aa, Homo sapiens
  Table 1.2; MAGEB1; ENSG00000214107; HLA -B*18:01,HLA-B*44:03,HLA-B*49:01
EETQGLKV

SEQ ID NO: 6396 - protein, 9 aa, Homo sapiens
  Table 1.2; MAGEB1; ENSG00000214107; HLA -A*30:01,HLA-B*18:01,HLA-B*44:02,HLA-B*44:03,HLA-B*49:01
EETQGLKVA

SEQ ID NO: 6397 - protein, 10 aa, Homo sapiens
  Table 1.2; MAGEB1; ENSG00000214107; HLA -B*18:01,HLA-B*44:02,HLA-B*44:03
EETQGLKVAH

SEQ ID NO: 6398 - protein, 9 aa, Homo sapiens
  Table 1.2; MAGEB1; ENSG00000214107; HLA -A*33:01,HLA-A*33:03
EHLIYGEPR

SEQ ID NO: 6399 - protein, 8 aa, Homo sapiens
  Table 1.2; MAGEB1; ENSG00000214107; HLA -A*33:01,HLA-A*33:03
EILNGASR

SEQ ID NO: 6400 - protein, 9 aa, Homo sapiens
  Table 1.2; MAGEB1; ENSG00000214107; HLA -A*33:01,HLA-A*33:03
EILNGASRR

SEQ ID NO: 6401 - protein, 9 aa, Homo sapiens
  Table 1.2; MAGEB1; ENSG00000214107; HLA -A*68:02
EIWKFMNVL

SEQ ID NO: 6402 - protein, 8 aa, Homo sapiens
  Table 1.2; MAGEB1; ENSG00000214107; HLA -B*08:01
EPIMKADM

SEQ ID NO: 6403 - protein, 9 aa, Homo sapiens
  Table 1.2; MAGEB1; ENSG00000214107; HLA -B*07:02,HLA-B*08:01,HLA-B*35:01,HLA-B*35:03,HLA-C*07:02
EPIMKADML

SEQ ID NO: 6404 - protein, 10 aa, Homo sapiens
  Table 1.2; MAGEB1; ENSG00000214107; HLA -A*33:03,HLA-A*68:01,HLA-B*27:02,HLA-B*39:01
EQVPNSDPPR

SEQ ID NO: 6405 - protein, 11 aa, Homo sapiens
  Table 1.2; MAGEB1; ENSG00000214107; HLA -A*25:01,HLA-A*26:01,HLA-A*29:02,HLA-A*30:02,HLA-B*15:01, HLA-B*38:01,HLA-B*39:01,HLA-B*44:02,HLA-B*44:03
EQVPNSDPPRY

SEQ ID NO: 6406 - protein, 10 aa, Homo sapiens
  Table 1.2; MAGEB1; ENSG00000214107; HLA -A*25:01,HLA-B*57:01
ESSVKDPVAW

SEQ ID NO: 6407 - protein, 9 aa, Homo sapiens
  Table 1.2; MAGEB1; ENSG00000214107; HLA -A*33:01,HLA-A*33:03
ETQGLKVAH

SEQ ID NO: 6408 - protein, 10 aa, Homo sapiens
  Table 1.2; MAGEB1; ENSG00000214107; HLA -A*25:01,HLA-A*26:01
ETTKMKVLEF

SEQ ID NO: 6409 - protein, 10 aa, Homo sapiens
  Table 1.2; MAGEB1; ENSG00000214107; HLA -B*27:02
FITQDLVQEK

SEQ ID NO: 6410 - protein, 8 aa, Homo sapiens
  Table 1.2; MAGEB1; ENSG00000214107; HLA -A*29:02
FLWGPRAY

SEQ ID NO: 6411 - protein, 8 aa, Homo sapiens
  Table 1.2; MAGEB1; ENSG00000214107; HLA -A*30:02,HLA-B*46:01,HLA-C*14:02
FMNVLGAY

SEQ ID NO: 6412 - protein, 9 aa, Homo sapiens
  Table 1.2; MAGEB1; ENSG00000214107; HLA -B*54:01,HLA-B*56:01
FPRNGLLMP

SEQ ID NO: 6413 - protein, 8 aa, Homo sapiens
  Table 1.2; MAGEB1; ENSG00000214107; HLA -B*54:01
FPSHYEEA

SEQ ID NO: 6414 - protein, 9 aa, Homo sapiens
  Table 1.2; MAGEB1; ENSG00000214107; HLA -B*07:02,HLA-B*35:01,HLA-B*35:03,HLA-B*38:01,HLA-B*39:01, HLA-B*54:01,HLA-B*55:01,HLA-B*56:01,HLA-C*03:03
FPSHYEEAL

SEQ ID NO: 6415 - protein, 10 aa, Homo sapiens
  Table 1.2; MAGEB1; ENSG00000214107; HLA -A*01:01,HLA-A*33:01,HLA-A*33:03,HLA-A*68:01,HLA-B*27:02
FTEILNGASR

SEQ ID NO: 6416 - protein, 11 aa, Homo sapiens
  Table 1.2; MAGEB1; ENSG00000214107; HLA -A*01:01
FTEILNGASRR

SEQ ID NO: 6417 - protein, 9 aa, Homo sapiens
  Table 1.2; MAGEB1; ENSG00000214107; HLA -B*46:01,HLA-C*01:02
GAPPTTTAA

SEQ ID NO: 6418 - protein, 8 aa, Homo sapiens
  Table 1.2; MAGEB1; ENSG00000214107; HLA -B*07:02,HLA-C*16:01
GASRRLEL

SEQ ID NO: 6419 - protein, 9 aa, Homo sapiens
  Table 1.2; MAGEB1; ENSG00000214107; HLA -A*02:01,HLA-A*32:01,HLA-B*13:02,HLA-B*15:01,HLA-B*15:03, HLA-B*27:05,HLA-B*35:03,HLA-B*38:01,HLA-B*39:01,HLA-B*40:01, HLA-B*46:01,HLA-B*55:01,HLA-B*58:01,HLA-C*02:02,HLA-C*03:03,
  HLA-C*03:04,HLA-C*05:01,HLA-C*16:02,HLA-C*16:04
GAYDGEEHL

SEQ ID NO: 6420 - protein, 10 aa, Homo sapiens
  Table 1.2; MAGEB1; ENSG00000214107; HLA -A*02:01,HLA-A*23:01,HLA-A*25:01,HLA-A*30:01,HLA-B*13:02, HLA-B*27:05,HLA-B*38:01,HLA-B*49:01,HLA-B*51:01,HLA-B*58:01, HLA-C*06:02,HLA-C*12:03,HLA-C*16:02,HLA-C*16:04
GAYDGEEHLI

SEQ ID NO: 6421 - protein, 11 aa, Homo sapiens
  Table 1.2; MAGEB1; ENSG00000214107; HLA -A*01:01,HLA-A*11:01,HLA-A*25:01,HLA-A*26:01,HLA-A*29:02, HLA-A*30:02,HLA-B*15:01,HLA-B*15:03,HLA-B*35:01,HLA-B*55:01, HLA-B*57:01,HLA-C*02:02,HLA-C*07:01,HLA-C*12:03,HLA-C*16:04
GAYDGEEHLIY

SEQ ID NO: 6422 - protein, 10 aa, Homo sapiens
  Table 1.2; MAGEB1; ENSG00000214107; HLA -A*30:01,HLA-B*40:01,HLA-B*49:01
GEENASFSQA

SEQ ID NO: 6423 - protein, 9 aa, Homo sapiens
  Table 1.2; MAGEB1; ENSG00000214107; HLA -A*03:02,HLA-B*27:05
GHTYTLVSK

SEQ ID NO: 6424 - protein, 9 aa, Homo sapiens
  Table 1.2; MAGEB1; ENSG00000214107; HLA -A*02:03,HLA-B*08:01
GLKVAHATA

SEQ ID NO: 6425 - protein, 10 aa, Homo sapiens
  Table 1.2; MAGEB1; ENSG00000214107; HLA -A*02:03
GLKVAHATAA

SEQ ID NO: 6426 - protein, 9 aa, Homo sapiens
  Table 1.2; MAGEB1; ENSG00000214107; HLA -A*02:01,HLA-A*02:04
GLLMPLLGV

SEQ ID NO: 6427 - protein, 9 aa, Homo sapiens
  Table 1.2; MAGEB1; ENSG00000214107; HLA -A*31:01
GMLMHFILR

SEQ ID NO: 6428 - protein, 10 aa, Homo sapiens
  Table 1.2; MAGEB1; ENSG00000214107; HLA -B*07:02
GPRAYAETTK

SEQ ID NO: 6429 - protein, 11 aa, Homo sapiens
  Table 1.2; MAGEB1; ENSG00000214107; HLA -B*07:02,HLA-C*07:02
GPRAYAETTKM

SEQ ID NO: 6430 - protein, 10 aa, Homo sapiens
  Table 1.2; MAGEB1; ENSG00000214107; HLA -B*56:01
GVIFLKGNSA

SEQ ID NO: 6431 - protein, 9 aa, Homo sapiens
  Table 1.2; MAGEB1; ENSG00000214107; HLA -B*54:01,HLA-B*55:01
HFTEILNGA

SEQ ID NO: 6432 - protein, 8 aa, Homo sapiens
  Table 1.2; MAGEB1; ENSG00000214107; HLA -A*03:01,HLA-A*03:02,HLA-A*11:01
HTYTLVSK

SEQ ID NO: 6433 - protein, 9 aa, Homo sapiens
  Table 1.2; MAGEB1; ENSG00000214107; HLA -A*02:03,HLA-A*03:01,HLA-A*25:01,HLA-A*26:01,HLA-A*31:01, HLA-A*33:01,HLA-A*33:03,HLA-A*68:01,HLA-A*68:02,HLA-B*27:05, HLA-B*40:02,HLA-B*57:01,HLA-B*58:01,HLA-C*02:02,HLA-C*12:03
HTYTLVSKL

SEQ ID NO: 6434 - protein, 8 aa, Homo sapiens
  Table 1.2; MAGEB1; ENSG00000214107; HLA -C*14:02
IFLKGNSA

SEQ ID NO: 6435 - protein, 9 aa, Homo sapiens
  Table 1.2; MAGEB1; ENSG00000214107; HLA -A*02:03
IMKADMLKV

SEQ ID NO: 6436 - protein, 9 aa, Homo sapiens
  Table 1.2; MAGEB1; ENSG00000214107; HLA -B*56:01
IPQKPQGAP

SEQ ID NO: 6437 - protein, 10 aa, Homo sapiens
  Table 1.2; MAGEB1; ENSG00000214107; HLA -B*56:01
IPQKPQGAPP

SEQ ID NO: 6438 - protein, 9 aa, Homo sapiens
  Table 1.2; MAGEB1; ENSG00000214107; HLA -A*01:01,HLA-A*03:01,HLA-A*03:02,HLA-A*11:01,HLA-A*31:01, HLA-A*33:01,HLA-A*33:03,HLA-A*68:01,HLA-B*27:02,HLA-C*07:06
ITQDLVQEK

SEQ ID NO: 6439 - protein, 10 aa, Homo sapiens
  Table 1.2; MAGEB1; ENSG00000214107; HLA -A*01:01,HLA-A*03:02,HLA-A*25:01,HLA-A*26:01,HLA-A*29:02, HLA-A*30:02,HLA-A*32:01,HLA-B*15:01,HLA-B*57:01,HLA-B*58:01, HLA-C*16:02
ITQDLVQEKY

SEQ ID NO: 6440 - protein, 8 aa, Homo sapiens
  Table 1.2; MAGEB1; ENSG00000214107; HLA -A*24:02
IYGEPRKF

SEQ ID NO: 6441 - protein, 9 aa, Homo sapiens
  Table 1.2; MAGEB1; ENSG00000214107; HLA -A*24:02
IYGEPRKFI

SEQ ID NO: 6442 - protein, 9 aa, Homo sapiens
  Table 1.2; MAGEB1; ENSG00000214107; HLA -B*07:02,HLA-B*40:02,HLA-B*58:01
KAREETQGL

SEQ ID NO: 6443 - protein, 10 aa, Homo sapiens
  Table 1.2; MAGEB1; ENSG00000214107; HLA -A*03:01
KAREETQGLK

SEQ ID NO: 6444 - protein, 10 aa, Homo sapiens
  Table 1.2; MAGEB1; ENSG00000214107; HLA -A*30:02,HLA-A*32:01,HLA-B*15:01,HLA-B*58:01
KCQGEENASF

SEQ ID NO: 6445 - protein, 10 aa, Homo sapiens
  Table 1.2; MAGEB1; ENSG00000214107; HLA -A*01:01,HLA-A*25:01,HLA-A*29:02,HLA-A*30:01,HLA-A*30:02, HLA-A*32:01,HLA-B*15:01,HLA-B*15:03,HLA-B*18:01,HLA-B*27:02, HLA-B*27:05,HLA-B*37:01,HLA-B*40:01,HLA-B*40:02,HLA-B*44:02,
  HLA-B*44:03,HLA-B*49:01,HLA-B*57:01,HLA-B*58:01,HLA-C*02:02, HLA-C*16:02,HLA-C*16:04
KEDNPSGHTY

SEQ ID NO: 6446 - protein, 11 aa, Homo sapiens
  Table 1.2; MAGEB1; ENSG00000214107; HLA -A*30:01,HLA-B*40:01,HLA-B*40:02
KEECPSSSPVL

SEQ ID NO: 6447 - protein, 9 aa, Homo sapiens
  Table 1.2; MAGEB1; ENSG00000214107; HLA -A*23:01,HLA-A*29:02,HLA-A*30:02,HLA-B*15:03,HLA-B*46:01
KFMNVLGAY

SEQ ID NO: 6448 - protein, 11 aa, Homo sapiens
  Table 1.2; MAGEB1; ENSG00000214107; HLA -B*57:01,HLA-B*58:01
KGNSATEEEIW

SEQ ID NO: 6449 - protein, 10 aa, Homo sapiens
  Table 1.2; MAGEB1; ENSG00000214107; HLA -A*03:01
KMKVLEFLAK

SEQ ID NO: 6450 - protein, 8 aa, Homo sapiens
  Table 1.2; MAGEB1; ENSG00000214107; HLA -A*31:01
KMNGATPR

SEQ ID NO: 6451 - protein, 10 aa, Homo sapiens
  Table 1.2; MAGEB1; ENSG00000214107; HLA -A*30:02
KMNGATPRDF

SEQ ID NO: 6452 - protein, 8 aa, Homo sapiens
  Table 1.2; MAGEB1; ENSG00000214107; HLA -A*03:01
KMREPIMK

SEQ ID NO: 6453 - protein, 9 aa, Homo sapiens
  Table 1.2; MAGEB1; ENSG00000214107; HLA -A*02:03
KMREPIMKA

SEQ ID NO: 6454 - protein, 9 aa, Homo sapiens
  Table 1.2; MAGEB1; ENSG00000214107; HLA -B*56:01
KPQGAPPTT

SEQ ID NO: 6455 - protein, 10 aa, Homo sapiens
  Table 1.2; MAGEB1; ENSG00000214107; HLA -B*07:02,HLA-B*56:01
KPQGAPPTTT

SEQ ID NO: 6456 - protein, 11 aa, Homo sapiens
  Table 1.2; MAGEB1; ENSG00000214107; HLA -B*07:02,HLA-B*54:01,HLA-B*55:01,HLA-B*56:01
KPQGAPPTTTA

SEQ ID NO: 6457 - protein, 10 aa, Homo sapiens
  Table 1.2; MAGEB1; ENSG00000214107; HLA -A*03:01,HLA-A*03:02,HLA-A*11:01
KVAHATAAEK

SEQ ID NO: 6458 - protein, 8 aa, Homo sapiens
  Table 1.2; MAGEB1; ENSG00000214107; HLA -A*03:01,HLA-A*11:01
KVLEFLAK

SEQ ID NO: 6459 - protein, 9 aa, Homo sapiens
  Table 1.2; MAGEB1; ENSG00000214107; HLA -A*02:01,HLA-A*02:04,HLA-A*02:07,HLA-A*03:01,HLA-A*29:02, HLA-A*31:01,HLA-B*57:01
KVLEFLAKM

SEQ ID NO: 6460 - protein, 9 aa, Homo sapiens
  Table 1.2; MAGEB1; ENSG00000214107; HLA -A*23:01,HLA-A*24:02,HLA-A*31:01
KYKDHFTEI

SEQ ID NO: 6461 - protein, 10 aa, Homo sapiens
  Table 1.2; MAGEB1; ENSG00000214107; HLA -A*24:02
KYKDHFTEIL

SEQ ID NO: 6462 - protein, 9 aa, Homo sapiens
  Table 1.2; MAGEB1; ENSG00000214107; HLA -A*30:01,HLA-B*40:01,HLA-B*40:02,HLA-B*49:01
LELVFGLDL

SEQ ID NO: 6463 - protein, 9 aa, Homo sapiens
  Table 1.2; MAGEB1; ENSG00000214107; HLA -C*05:01
LGDTPTSSP

SEQ ID NO: 6464 - protein, 9 aa, Homo sapiens
  Table 1.2; MAGEB1; ENSG00000214107; HLA -A*03:01,HLA-B*57:01
LIYGEPRKF

SEQ ID NO: 6465 - protein, 11 aa, Homo sapiens
  Table 1.2; MAGEB1; ENSG00000214107; HLA -A*30:02,HLA-B*15:03
LKEDNPSGHTY

SEQ ID NO: 6466 - protein, 9 aa, Homo sapiens
  Table 1.2; MAGEB1; ENSG00000214107; HLA -B*15:03
LKVAHATAA

SEQ ID NO: 6467 - protein, 8 aa, Homo sapiens
  Table 1.2; MAGEB1; ENSG00000214107; HLA -B*15:03
LKVVDEKY

SEQ ID NO: 6468 - protein, 9 aa, Homo sapiens
  Table 1.2; MAGEB1; ENSG00000214107; HLA -A*02:01,HLA-A*02:03,HLA-A*02:04
LLMPLLGVI

SEQ ID NO: 6469 - protein, 11 aa, Homo sapiens
  Table 1.2; MAGEB1; ENSG00000214107; HLA -A*02:01,HLA-A*02:04,HLA-A*02:07
LLMPLLGVIFL

SEQ ID NO: 6470 - protein, 9 aa, Homo sapiens
  Table 1.2; MAGEB1; ENSG00000214107; HLA -A*29:02
LMHFILRKY

SEQ ID NO: 6471 - protein, 9 aa, Homo sapiens
  Table 1.2; MAGEB1; ENSG00000214107; HLA -A*24:02
LMPLLGVIF

SEQ ID NO: 6472 - protein, 10 aa, Homo sapiens
  Table 1.2; MAGEB1; ENSG00000214107; HLA -A*02:07
LMPLLGVIFL

SEQ ID NO: 6473 - protein, 9 aa, Homo sapiens
  Table 1.2; MAGEB1; ENSG00000214107; HLA -A*31:01,HLA-A*33:01
LSNDWDFPR

SEQ ID NO: 6474 - protein, 11 aa, Homo sapiens
  Table 1.2; MAGEB1; ENSG00000214107; HLA -B*58:01
LTNDGNLSNDW

SEQ ID NO: 6475 - protein, 9 aa, Homo sapiens
  Table 1.2; MAGEB1; ENSG00000214107; HLA -A*01:01,HLA-A*03:01,HLA-A*25:01,HLA-A*26:01,HLA-A*29:02, HLA-A*30:02,HLA-A*32:01,HLA-B*15:01
LVQEKYLKY

SEQ ID NO: 6476 - protein, 8 aa, Homo sapiens
  Table 1.2; MAGEB1; ENSG00000214107; HLA -B*08:01,HLA-C*07:01
MLKVVDEK

SEQ ID NO: 6477 - protein, 9 aa, Homo sapiens
  Table 1.2; MAGEB1; ENSG00000214107; HLA -A*01:01,HLA-A*29:02,HLA-A*30:02,HLA-A*32:01,HLA-B*15:01, HLA-B*15:03,HLA-B*18:01,HLA-B*35:01,HLA-B*46:01,HLA-C*07:04
MLKVVDEKY

SEQ ID NO: 6478 - protein, 9 aa, Homo sapiens
  Table 1.2; MAGEB1; ENSG00000214107; HLA -A*03:01
MLMHFILRK

SEQ ID NO: 6479 - protein, 10 aa, Homo sapiens
  Table 1.2; MAGEB1; ENSG00000214107; HLA -A*29:02
MLMHFILRKY

SEQ ID NO: 6480 - protein, 8 aa, Homo sapiens
  Table 1.2; MAGEB1; ENSG00000214107; HLA -B*35:01,HLA-B*35:03
MPLLGVIF

SEQ ID NO: 6481 - protein, 9 aa, Homo sapiens
  Table 1.2; MAGEB1; ENSG00000214107; HLA -B*35:01,HLA-B*35:03,HLA-B*51:01,HLA-B*54:01
MPLLGVIFL

SEQ ID NO: 6482 - protein, 11 aa, Homo sapiens
  Table 1.2; MAGEB1; ENSG00000214107; HLA -B*54:01
MPLLGVIFLKG

SEQ ID NO: 6483 - protein, 9 aa, Homo sapiens
  Table 1.2; MAGEB1; ENSG00000214107; HLA -B*07:02,HLA-C*07:02
MPRGQKSKL

SEQ ID NO: 6484 - protein, 9 aa, Homo sapiens
  Table 1.2; MAGEB1; ENSG00000214107; HLA -B*07:02,HLA-B*08:01,HLA-C*16:01
NGASRRLEL

SEQ ID NO: 6485 - protein, 9 aa, Homo sapiens
  Table 1.2; MAGEB1; ENSG00000214107; HLA -A*68:01,HLA-A*68:02,HLA-B*07:02,HLA-B*08:01,HLA-B*35:01, HLA-B*35:03,HLA-B*38:01,HLA-B*39:01,HLA-B*55:01,HLA-B*56:01, HLA-C*07:02
NPSGHTYTL

SEQ ID NO: 6486 - protein, 9 aa, Homo sapiens
  Table 1.2; MAGEB1; ENSG00000214107; HLA -B*58:01
NSATEEEIW

SEQ ID NO: 6487 - protein, 9 aa, Homo sapiens
  Table 1.2; MAGEB1; ENSG00000214107; HLA -A*01:01,HLA-A*02:07,HLA-A*29:02,HLA-A*32:01,HLA-B*35:01, HLA-B*38:01,HLA-B*57:01,HLA-B*58:01,HLA-C*05:01,HLA-C*16:01
NSDPPRYQF

SEQ ID NO: 6488 - protein, 8 aa, Homo sapiens
  Table 1.2; MAGEB1; ENSG00000214107; HLA -A*03:02,HLA-A*11:01,HLA-B*27:02
PAAGIPQK

SEQ ID NO: 6489 - protein, 8 aa, Homo sapiens
  Table 1.2; MAGEB1; ENSG00000214107; HLA -B*56:01
PPTTTAAA

SEQ ID NO: 6490 - protein, 8 aa, Homo sapiens
  Table 1.2; MAGEB1; ENSG00000214107; HLA -B*07:02,HLA-C*07:01,HLA-C*07:02
PSGHTYTL

SEQ ID NO: 6491 - protein, 8 aa, Homo sapiens
  Table 1.2; MAGEB1; ENSG00000214107; HLA -B*18:01,HLA-B*37:01,HLA-C*07:01
QDLVQEKY

SEQ ID NO: 6492 - protein, 9 aa, Homo sapiens
  Table 1.2; MAGEB1; ENSG00000214107; HLA -A*29:02
QFLWGPRAY

SEQ ID NO: 6493 - protein, 9 aa, Homo sapiens
  Table 1.2; MAGEB1; ENSG00000214107; HLA -A*02:03,HLA-B*46:01,HLA-B*54:01,HLA-B*56:01
QGAPPTTTA

SEQ ID NO: 6494 - protein, 9 aa, Homo sapiens
  Table 1.2; MAGEB1; ENSG00000214107; HLA -A*11:01,HLA-A*68:01
QVPNSDPPR

SEQ ID NO: 6495 - protein, 10 aa, Homo sapiens
  Table 1.2; MAGEB1; ENSG00000214107; HLA -A*01:01,HLA-A*25:01,HLA-A*26:01,HLA-A*29:02,HLA-A*30:02, HLA-B*58:01
QVPNSDPPRY

SEQ ID NO: 6496 - protein, 9 aa, Homo sapiens
  Table 1.2; MAGEB1; ENSG00000214107; HLA -A*03:01,HLA-A*31:01,HLA-A*33:01,HLA-A*33:03
QVRSSVRAR

SEQ ID NO: 6497 - protein, 8 aa, Homo sapiens
  Table 1.2; MAGEB1; ENSG00000214107; HLA -B*07:02,HLA-B*08:01,HLA-C*16:01
RAQVRSSV

SEQ ID NO: 6498 - protein, 9 aa, Homo sapiens
  Table 1.2; MAGEB1; ENSG00000214107; HLA -A*31:01
RAQVRSSVR

SEQ ID NO: 6499 - protein, 11 aa, Homo sapiens
  Table 1.2; MAGEB1; ENSG00000214107; HLA -A*31:01
RAQVRSSVRAR

SEQ ID NO: 6500 - protein, 10 aa, Homo sapiens
  Table 1.2; MAGEB1; ENSG00000214107; HLA -A*31:01
RARSRAPFSR

SEQ ID NO: 6501 - protein, 9 aa, Homo sapiens
  Table 1.2; MAGEB1; ENSG00000214107; HLA -A*32:01,HLA-B*07:02,HLA-B*15:01,HLA-B*15:03,HLA-B*46:01, HLA-B*58:01,HLA-C*02:02,HLA-C*03:03,HLA-C*03:04,HLA-C*05:01, HLA-C*12:03,HLA-C*16:04
RAYAETTKM

SEQ ID NO: 6502 - protein, 10 aa, Homo sapiens
  Table 1.2; MAGEB1; ENSG00000214107; HLA -A*03:01
RAYAETTKMK

SEQ ID NO: 6503 - protein, 9 aa, Homo sapiens
  Table 1.2; MAGEB1; ENSG00000214107; HLA -A*30:01,HLA-B*37:01,HLA-B*40:01,HLA-B*40:02,HLA-B*44:02, HLA-B*44:03,HLA-B*49:01
REETQGLKV

SEQ ID NO: 6504 - protein, 9 aa, Homo sapiens
  Table 1.2; MAGEB1; ENSG00000214107; HLA -B*37:01
REPIMKADM

SEQ ID NO: 6505 - protein, 8 aa, Homo sapiens
  Table 1.2; MAGEB1; ENSG00000214107; HLA -B*37:01
RRTTATTF

SEQ ID NO: 6506 - protein, 9 aa, Homo sapiens
  Table 1.2; MAGEB1; ENSG00000214107; HLA -B*27:05
RRTTATTFR

SEQ ID NO: 6507 - protein, 8 aa, Homo sapiens
  Table 1.2; MAGEB1; ENSG00000214107; HLA -A*31:01
RSRAPFSR

SEQ ID NO: 6508 - protein, 8 aa, Homo sapiens
  Table 1.2; MAGEB1; ENSG00000214107; HLA -A*31:01
RTTATTFR

SEQ ID NO: 6509 - protein, 9 aa, Homo sapiens
  Table 1.2; MAGEB1; ENSG00000214107; HLA -A*32:01
RTTATTFRA

SEQ ID NO: 6510 - protein, 10 aa, Homo sapiens
  Table 1.2; MAGEB1; ENSG00000214107; HLA -A*03:01,HLA-A*31:01,HLA-B*57:01
RTTATTFRAR

SEQ ID NO: 6511 - protein, 8 aa, Homo sapiens
  Table 1.2; MAGEB1; ENSG00000214107; HLA -B*37:01
SDPPRYQF

SEQ ID NO: 6512 - protein, 9 aa, Homo sapiens
  Table 1.2; MAGEB1; ENSG00000214107; HLA -B*37:01
SDPPRYQFL

SEQ ID NO: 6513 - protein, 9 aa, Homo sapiens
  Table 1.2; MAGEB1; ENSG00000214107; HLA -C*14:02
SFSQATTST

SEQ ID NO: 6514 - protein, 10 aa, Homo sapiens
  Table 1.2; MAGEB1; ENSG00000214107; HLA -A*11:01
SGHTYTLVSK

SEQ ID NO: 6515 - protein, 9 aa, Homo sapiens
  Table 1.2; MAGEB1; ENSG00000214107; HLA -A*03:02,HLA-A*11:01,HLA-B*56:01
SPAAGIPQK

SEQ ID NO: 6516 - protein, 10 aa, Homo sapiens
  Table 1.2; MAGEB1; ENSG00000214107; HLA -B*56:01
SPAAGIPQKP

SEQ ID NO: 6517 - protein, 9 aa, Homo sapiens
  Table 1.2; MAGEB1; ENSG00000214107; HLA -B*35:03
SPVLGDTPT

SEQ ID NO: 6518 - protein, 10 aa, Homo sapiens
  Table 1.2; MAGEB1; ENSG00000214107; HLA -B*56:01
SPVLGDTPTS

SEQ ID NO: 6519 - protein, 11 aa, Homo sapiens
  Table 1.2; MAGEB1; ENSG00000214107; HLA -B*13:02,HLA-B*27:05
SQATTSTESSV

SEQ ID NO: 6520 - protein, 10 aa, Homo sapiens
  Table 1.2; MAGEB1; ENSG00000214107; HLA -A*11:01
SSPAAGIPQK

SEQ ID NO: 6521 - protein, 9 aa, Homo sapiens
  Table 1.2; MAGEB1; ENSG00000214107; HLA -A*25:01,HLA-A*32:01,HLA-B*44:03,HLA-B*57:01,HLA-B*58:01, HLA-C*16:04
SSVKDPVAW

SEQ ID NO: 6522 - protein, 8 aa, Homo sapiens
  Table 1.2; MAGEB1; ENSG00000214107; HLA -A*25:01,HLA-A*32:01,HLA-B*57:01,HLA-B*58:01
SVKDPVAW

SEQ ID NO: 6523 - protein, 10 aa, Homo sapiens
  Table 1.2; MAGEB1; ENSG00000214107; HLA -A*31:01,HLA-B*54:01,HLA-B*56:01
SVKDPVAWEA

SEQ ID NO: 6524 - protein, 8 aa, Homo sapiens
  Table 1.2; MAGEB1; ENSG00000214107; HLA -A*31:01,HLA-A*33:03,HLA-C*16:01
TATTFRAR

SEQ ID NO: 6525 - protein, 8 aa, Homo sapiens
  Table 1.2; MAGEB1; ENSG00000214107; HLA -B*18:01,HLA-B*44:02
TEEEIWKF

SEQ ID NO: 6526 - protein, 9 aa, Homo sapiens
  Table 1.2; MAGEB1; ENSG00000214107; HLA -A*30:01,HLA-A*33:03,HLA-B*44:03
TEILNGASR

SEQ ID NO: 6527 - protein, 11 aa, Homo sapiens
  Table 1.2; MAGEB1; ENSG00000214107; HLA -B*44:02,HLA-B*44:03
TEILNGASRRL

SEQ ID NO: 6528 - protein, 9 aa, Homo sapiens
  Table 1.2; MAGEB1; ENSG00000214107; HLA -B*49:01
TESDEGAKC

SEQ ID NO: 6529 - protein, 9 aa, Homo sapiens
  Table 1.2; MAGEB1; ENSG00000214107; HLA -A*30:01,HLA-A*68:02,HLA-B*18:01,HLA-B*37:01,HLA-B*39:01, HLA-B*40:01,HLA-B*40:02,HLA-B*44:03,HLA-B*49:01,HLA-C*06:02
TESSVKDPV

SEQ ID NO: 6530 - protein, 11 aa, Homo sapiens
  Table 1.2; MAGEB1; ENSG00000214107; HLA -B*18:01,HLA-B*27:02,HLA-B*38:01,HLA-B*40:01,HLA-B*44:02, HLA-B*44:03,HLA-B*57:01,HLA-C*16:04
TESSVKDPVAW

SEQ ID NO: 6531 - protein, 8 aa, Homo sapiens
  Table 1.2; MAGEB1; ENSG00000214107; HLA -B*08:01
TLVSKLNL

SEQ ID NO: 6532 - protein, 9 aa, Homo sapiens
  Table 1.2; MAGEB1; ENSG00000214107; HLA -A*02:03
TLVSKLNLT

SEQ ID NO: 6533 - protein, 9 aa, Homo sapiens
  Table 1.2; MAGEB1; ENSG00000214107; HLA -B*07:02,HLA-B*35:01
TPRDFPSHY

SEQ ID NO: 6534 - protein, 8 aa, Homo sapiens
  Table 1.2; MAGEB1; ENSG00000214107; HLA -B*54:01,HLA-B*55:01,HLA-B*56:01
TPTSSPAA

SEQ ID NO: 6535 - protein, 9 aa, Homo sapiens
  Table 1.2; MAGEB1; ENSG00000214107; HLA -A*01:01,HLA-A*29:02,HLA-A*30:02,HLA-A*32:01,HLA-B*15:01, HLA-B*15:03,HLA-B*18:01,HLA-B*35:01,HLA-B*38:01,HLA-B*39:01, HLA-B*44:02,HLA-B*44:03,HLA-B*58:01,HLA-C*16:04
TQDLVQEKY

SEQ ID NO: 6536 - protein, 10 aa, Homo sapiens
  Table 1.2; MAGEB1; ENSG00000214107; HLA -B*38:01
TQDLVQEKYL

SEQ ID NO: 6537 - protein, 11 aa, Homo sapiens
  Table 1.2; MAGEB1; ENSG00000214107; HLA -A*03:02,HLA-A*11:01,HLA-A*68:01
TSSPAAGIPQK

SEQ ID NO: 6538 - protein, 9 aa, Homo sapiens
  Table 1.2; MAGEB1; ENSG00000214107; HLA -A*03:01,HLA-A*11:01,HLA-A*31:01,HLA-A*33:01,HLA-A*33:03, HLA-A*68:01,HLA-B*57:01,HLA-C*07:06
TTATTFRAR

SEQ ID NO: 6539 - protein, 9 aa, Homo sapiens
  Table 1.2; MAGEB1; ENSG00000214107; HLA -A*25:01,HLA-A*33:01,HLA-A*33:03,HLA-B*08:01,HLA-B*37:01, HLA-B*57:01
TTKMKVLEF

SEQ ID NO: 6540 - protein, 9 aa, Homo sapiens
  Table 1.2; MAGEB1; ENSG00000214107; HLA -A*03:02,HLA-A*11:01,HLA-A*68:01
TTSTESSVK

SEQ ID NO: 6541 - protein, 8 aa, Homo sapiens
  Table 1.2; MAGEB1; ENSG00000214107; HLA -A*23:01,HLA-A*24:02,HLA-B*37:01,HLA-C*04:01,HLA-C*06:02, HLA-C*14:02,HLA-C*16:02
TYTLVSKL

SEQ ID NO: 6542 - protein, 10 aa, Homo sapiens
  Table 1.2; MAGEB1; ENSG00000214107; HLA -A*23:01,HLA-A*24:02
TYTLVSKLNL

SEQ ID NO: 6543 - protein, 9 aa, Homo sapiens
  Table 1.2; MAGEB1; ENSG00000214107; HLA -A*03:01,HLA-A*03:02,HLA-A*11:01,HLA-A*33:01,HLA-B*46:01, HLA-C*07:06
VAHATAAEK

SEQ ID NO: 6544 - protein, 9 aa, Homo sapiens
  Table 1.2; MAGEB1; ENSG00000214107; HLA -B*35:01,HLA-B*46:01,HLA-B*51:01
VAWEAGMLM

SEQ ID NO: 6545 - protein, 9 aa, Homo sapiens
  Table 1.2; MAGEB1; ENSG00000214107; HLA -A*32:01,HLA-B*08:01,HLA-B*54:01,HLA-B*56:01
VIFLKGNSA

SEQ ID NO: 6546 - protein, 9 aa, Homo sapiens
  Table 1.2; MAGEB1; ENSG00000214107; HLA -A*01:01,HLA-A*29:02,HLA-A*30:02,HLA-B*15:01,HLA-B*35:01, HLA-B*35:03,HLA-B*55:01,HLA-C*16:02
VPNSDPPRY

SEQ ID NO: 6547 - protein, 11 aa, Homo sapiens
  Table 1.2; MAGEB1; ENSG00000214107; HLA -A*23:01,HLA-B*07:02,HLA-B*35:01,HLA-B*55:01
VPNSDPPRYQF

SEQ ID NO: 6548 - protein, 8 aa, Homo sapiens
  Table 1.2; MAGEB1; ENSG00000214107; HLA -A*01:01
VQEKYLKY

SEQ ID NO: 6549 - protein, 9 aa, Homo sapiens
  Table 1.2; MAGEB1; ENSG00000214107; HLA -A*01:01,HLA-B*51:01,HLA-C*16:02
YAETTKMKV

SEQ ID NO: 6550 - protein, 8 aa, Homo sapiens
  Table 1.2; MAGEB1; ENSG00000214107; HLA -B*38:01,HLA-C*07:01,HLA-C*07:04
YDGEEHLI

SEQ ID NO: 6551 - protein, 9 aa, Homo sapiens
  Table 1.2; MAGEB1; ENSG00000214107; HLA -A*01:01,HLA-A*29:02
YDGEEHLIY

SEQ ID NO: 6552 - protein, 9 aa, Homo sapiens
  Table 1.2; MAGEB1; ENSG00000214107; HLA -A*02:04
YQFLWGPRA

SEQ ID NO: 6553 - protein, 9 aa, Homo sapiens
  Table 1.2; MAGEB1; ENSG00000214107; HLA -A*02:04,HLA-A*23:01,HLA-A*24:02
YTLVSKLNL

SEQ ID NO: 6554 - protein, 9 aa, Homo sapiens
  Table 1.2; MAGEB2; ENSG00000099399; HLA -B*46:01
AAAAAGVSS

SEQ ID NO: 6555 - protein, 11 aa, Homo sapiens
  Table 1.2; MAGEB2; ENSG00000099399; HLA -A*03:01,HLA-A*03:02,HLA-A*11:01,HLA-A*31:01,HLA-A*68:01, HLA-B*27:02,HLA-B*27:05,HLA-B*57:01,HLA-B*58:01,HLA-C*02:02, HLA-C*06:02,HLA-C*07:06,HLA-C*16:04
AAAAAGVSSTK

SEQ ID NO: 6556 - protein, 9 aa, Homo sapiens
  Table 1.2; MAGEB2; ENSG00000099399; HLA -A*02:03,HLA-A*32:01,HLA-C*16:02
AAAAGVSST

SEQ ID NO: 6557 - protein, 10 aa, Homo sapiens
  Table 1.2; MAGEB2; ENSG00000099399; HLA -A*03:01,HLA-A*03:02,HLA-A*11:01,HLA-A*68:01,HLA-B*27:02, HLA-B*27:05,HLA-C*02:02,HLA-C*07:06
AAAAGVSSTK

SEQ ID NO: 6558 - protein, 9 aa, Homo sapiens
  Table 1.2; MAGEB2; ENSG00000099399; HLA -A*03:01,HLA-A*03:02,HLA-A*11:01,HLA-A*25:01,HLA-A*31:01, HLA-A*32:01,HLA-A*33:03,HLA-A*68:01,HLA-B*13:02,HLA-B*15:01, HLA-B*27:02,HLA-B*27:05,HLA-B*39:01,HLA-B*46:01,HLA-B*51:01,
  HLA-B*56:01,HLA-B*57:01,HLA-B*58:01,HLA-C*02:02,HLA-C*03:03, HLA-C*03:04,HLA-C*05:01,HLA-C*06:02,HLA-C*07:06,HLA-C*12:03, HLA-C*16:02,HLA-C*16:04
AAAGVSSTK

SEQ ID NO: 6559 - protein, 11 aa, Homo sapiens
  Table 1.2; MAGEB2; ENSG00000099399; HLA -A*03:01,HLA-A*03:02,HLA-A*11:01,HLA-A*31:01,HLA-A*68:01, HLA-B*27:05,HLA-C*04:01,HLA-C*06:02
AAAGVSSTKSK

SEQ ID NO: 6560 - protein, 8 aa, Homo sapiens
  Table 1.2; MAGEB2; ENSG00000099399; HLA -A*03:01,HLA-A*03:02,HLA-A*11:01,HLA-B*27:02,HLA-C*07:01, HLA-C*07:06
AAGVSSTK

SEQ ID NO: 6561 - protein, 10 aa, Homo sapiens
  Table 1.2; MAGEB2; ENSG00000099399; HLA -C*07:01
AAGVSSTKSK

SEQ ID NO: 6562 - protein, 8 aa, Homo sapiens
  Table 1.2; MAGEB2; ENSG00000099399; HLA -B*56:01
AASSSPAA

SEQ ID NO: 6563 - protein, 9 aa, Homo sapiens
  Table 1.2; MAGEB2; ENSG00000099399; HLA -A*30:01,HLA-B*49:01
AEEEEAPCC

SEQ ID NO: 6564 - protein, 8 aa, Homo sapiens
  Table 1.2; MAGEB2; ENSG00000099399; HLA -B*37:01,HLA-B*44:03,HLA-B*49:01
AETSKMKV

SEQ ID NO: 6565 - protein, 9 aa, Homo sapiens
  Table 1.2; MAGEB2; ENSG00000099399; HLA -A*30:01,HLA-B*37:01,HLA-B*40:01,HLA-B*40:02,HLA-B*44:02, HLA-B*44:03,HLA-B*49:01,HLA-C*16:04
AETSKMKVL

SEQ ID NO: 6566 - protein, 10 aa, Homo sapiens
  Table 1.2; MAGEB2; ENSG00000099399; HLA -C*01:02
AFPTHYEEAL

SEQ ID NO: 6567 - protein, 9 aa, Homo sapiens
  Table 1.2; MAGEB2; ENSG00000099399; HLA -A*31:01
AGIPQEPQR

SEQ ID NO: 6568 - protein, 9 aa, Homo sapiens
  Table 1.2; MAGEB2; ENSG00000099399; HLA -A*11:01
AGVSSTKSK

SEQ ID NO: 6569 - protein, 9 aa, Homo sapiens
  Table 1.2; MAGEB2; ENSG00000099399; HLA -B*15:03
AKVNGTTPC

SEQ ID NO: 6570 - protein, 11 aa, Homo sapiens
  Table 1.2; MAGEB2; ENSG00000099399; HLA -B*15:03
AKVNGTTPCAF

SEQ ID NO: 6571 - protein, 10 aa, Homo sapiens
  Table 1.2; MAGEB2; ENSG00000099399; HLA -A*02:01,HLA-A*02:03,HLA-B*55:01
ALKDEEKAGV

SEQ ID NO: 6572 - protein, 8 aa, Homo sapiens
  Table 1.2; MAGEB2; ENSG00000099399; HLA -B*55:01,HLA-B*56:01
APTTAAAA

SEQ ID NO: 6573 - protein, 9 aa, Homo sapiens
  Table 1.2; MAGEB2; ENSG00000099399; HLA -B*07:02,HLA-B*35:03,HLA-B*54:01,HLA-B*55:01,HLA-B*56:01, HLA-C*07:02
APTTAAAAA

SEQ ID NO: 6574 - protein, 10 aa, Homo sapiens
  Table 1.2; MAGEB2; ENSG00000099399; HLA -B*54:01,HLA-B*56:01
APTTAAAAAA

SEQ ID NO: 6575 - protein, 11 aa, Homo sapiens
  Table 1.2; MAGEB2; ENSG00000099399; HLA -B*56:01
APTTAAAAAAG

SEQ ID NO: 6576 - protein, 9 aa, Homo sapiens
  Table 1.2; MAGEB2; ENSG00000099399; HLA -A*01:01,HLA-B*15:01,HLA-B*15:03,HLA-B*38:01,HLA-B*57:01, HLA-B*58:01,HLA-C*05:01,HLA-C*07:04
ASEGLSVVF

SEQ ID NO: 6577 - protein, 9 aa, Homo sapiens
  Table 1.2; MAGEB2; ENSG00000099399; HLA -B*13:02
ASSSPAAGI

SEQ ID NO: 6578 - protein, 11 aa, Homo sapiens
  Table 1.2; MAGEB2; ENSG00000099399; HLA -A*03:01,HLA-A*03:02,HLA-A*11:01
ASSSQASTSTK

SEQ ID NO: 6579 - protein, 9 aa, Homo sapiens
  Table 1.2; MAGEB2; ENSG00000099399; HLA -C*05:01
ATEEEIWEF

SEQ ID NO: 6580 - protein, 8 aa, Homo sapiens
  Table 1.2; MAGEB2; ENSG00000099399; HLA -A*23:01,HLA-A*24:02,HLA-B*46:01,HLA-C*01:02,HLA-C*04:01, HLA-C*14:02
AYAETSKM

SEQ ID NO: 6581 - protein, 9 aa, Homo sapiens
  Table 1.2; MAGEB2; ENSG00000099399; HLA -A*33:03
AYAETSKMK

SEQ ID NO: 6582 - protein, 11 aa, Homo sapiens
  Table 1.2; MAGEB2; ENSG00000099399; HLA -A*24:02
AYAETSKMKVL

SEQ ID NO: 6583 - protein, 9 aa, Homo sapiens
  Table 1.2; MAGEB2; ENSG00000099399; HLA -A*25:01,HLA-B*18:01,HLA-B*44:02,HLA-B*44:03
DEESLLSSW

SEQ ID NO: 6584 - protein, 8 aa, Homo sapiens
  Table 1.2; MAGEB2; ENSG00000099399; HLA -B*18:01,HLA-B*49:01,HLA-B*51:01
DETRGLNV

SEQ ID NO: 6585 - protein, 11 aa, Homo sapiens
  Table 1.2; MAGEB2; ENSG00000099399; HLA -B*38:01
DKVDLTDEESL

SEQ ID NO: 6586 - protein, 10 aa, Homo sapiens
  Table 1.2; MAGEB2; ENSG00000099399; HLA -A*01:01,HLA-A*25:01,HLA-A*26:01,HLA-A*29:02,HLA-A*33:01, HLA-B*18:01,HLA-B*35:01
DLVQEKYLEY

SEQ ID NO: 6587 - protein, 10 aa, Homo sapiens
  Table 1.2; MAGEB2; ENSG00000099399; HLA -B*08:01
DPLTRKSGSL

SEQ ID NO: 6588 - protein, 8 aa, Homo sapiens
  Table 1.2; MAGEB2; ENSG00000099399; HLA -B*51:01
DPPRFQFL

SEQ ID NO: 6589 - protein, 9 aa, Homo sapiens
  Table 1.2; MAGEB2; ENSG00000099399; HLA -B*51:01
EAPCCSSSV

SEQ ID NO: 6590 - protein, 10 aa, Homo sapiens
  Table 1.2; MAGEB2; ENSG00000099399; HLA -B*18:01,HLA-B*44:02,HLA-B*44:03
EEHSVFGEPW

SEQ ID NO: 6591 - protein, 9 aa, Homo sapiens
  Table 1.2; MAGEB2; ENSG00000099399; HLA -B*44:02,HLA-B*44:03
EEIWEFLNM

SEQ ID NO: 6592 - protein, 8 aa, Homo sapiens
  Table 1.2; MAGEB2; ENSG00000099399; HLA -B*18:01,HLA-B*44:02,HLA-B*44:03
EESLLSSW

SEQ ID NO: 6593 - protein, 9 aa, Homo sapiens
  Table 1.2; MAGEB2; ENSG00000099399; HLA -A*29:02
EFLNMLGVY

SEQ ID NO: 6594 - protein, 9 aa, Homo sapiens
  Table 1.2; MAGEB2; ENSG00000099399; HLA -A*33:03
EGLSVVFGL

SEQ ID NO: 6595 - protein, 9 aa, Homo sapiens
  Table 1.2; MAGEB2; ENSG00000099399; HLA -A*33:03,HLA-A*68:02,HLA-B*38:01
EHFPEILKK

SEQ ID NO: 6596 - protein, 10 aa, Homo sapiens
  Table 1.2; MAGEB2; ENSG00000099399; HLA -A*68:02
EHFPEILKKA

SEQ ID NO: 6597 - protein, 9 aa, Homo sapiens
  Table 1.2; MAGEB2; ENSG00000099399; HLA -B*38:01
EHSVFGEPW

SEQ ID NO: 6598 - protein, 9 aa, Homo sapiens
  Table 1.2; MAGEB2; ENSG00000099399; HLA -A*02:04,HLA-A*02:07,HLA-A*68:02
EIWEFLNML

SEQ ID NO: 6599 - protein, 8 aa, Homo sapiens
  Table 1.2; MAGEB2; ENSG00000099399; HLA -A*33:01,HLA-A*33:03
EMLKIVGK

SEQ ID NO: 6600 - protein, 9 aa, Homo sapiens
  Table 1.2; MAGEB2; ENSG00000099399; HLA -A*33:01,HLA-A*33:03
EMLKIVGKR

SEQ ID NO: 6601 - protein, 9 aa, Homo sapiens
  Table 1.2; MAGEB2; ENSG00000099399; HLA -B*54:01,HLA-B*56:01
EPQRAPTTA

SEQ ID NO: 6602 - protein, 10 aa, Homo sapiens
  Table 1.2; MAGEB2; ENSG00000099399; HLA -B*07:02,HLA-B*54:01,HLA-B*55:01,HLA-B*56:01
EPQRAPTTAA

SEQ ID NO: 6603 - protein, 11 aa, Homo sapiens
  Table 1.2; MAGEB2; ENSG00000099399; HLA -A*33:01
ESLLSSWDFPR

SEQ ID NO: 6604 - protein, 10 aa, Homo sapiens
  Table 1.2; MAGEB2; ENSG00000099399; HLA -A*26:01
ETRGLNVPQV

SEQ ID NO: 6605 - protein, 8 aa, Homo sapiens
  Table 1.2; MAGEB2; ENSG00000099399; HLA -B*08:01
ETSKMKVL

SEQ ID NO: 6606 - protein, 10 aa, Homo sapiens
  Table 1.2; MAGEB2; ENSG00000099399; HLA -A*25:01,HLA-A*26:01
ETSKMKVLEF

SEQ ID NO: 6607 - protein, 11 aa, Homo sapiens
  Table 1.2; MAGEB2; ENSG00000099399; HLA -A*68:02
ETSKMKVLEFL

SEQ ID NO: 6608 - protein, 8 aa, Homo sapiens
  Table 1.2; MAGEB2; ENSG00000099399; HLA -B*51:01
FGLELNKV

SEQ ID NO: 6609 - protein, 9 aa, Homo sapiens
  Table 1.2; MAGEB2; ENSG00000099399; HLA -A*02:03
FLAKVNGTT

SEQ ID NO: 6610 - protein, 8 aa, Homo sapiens
  Table 1.2; MAGEB2; ENSG00000099399; HLA -A*29:02
FLWGPRAY

SEQ ID NO: 6611 - protein, 8 aa, Homo sapiens
  Table 1.2; MAGEB2; ENSG00000099399; HLA -B*54:01
FPEILKKA

SEQ ID NO: 6612 - protein, 8 aa, Homo sapiens
  Table 1.2; MAGEB2; ENSG00000099399; HLA -B*54:01,HLA-B*56:01
FPTHYEEA

SEQ ID NO: 6613 - protein, 9 aa, Homo sapiens
  Table 1.2; MAGEB2; ENSG00000099399; HLA -B*07:02,HLA-B*35:01,HLA-B*35:03,HLA-B*38:01,HLA-B*39:01, HLA-B*51:01,HLA-B*54:01,HLA-B*55:01,HLA-B*56:01,HLA-C*03:03, HLA-C*03:04
FPTHYEEAL

SEQ ID NO: 6614 - protein, 9 aa, Homo sapiens
  Table 1.2; MAGEB2; ENSG00000099399; HLA -A*02:04
FQFLWGPRA

SEQ ID NO: 6615 - protein, 9 aa, Homo sapiens
  Table 1.2; MAGEB2; ENSG00000099399; HLA -B*27:05,HLA-B*39:01,HLA-B*46:01,HLA-B*54:01,HLA-B*55:01, HLA-B*56:01,HLA-C*03:03
GAASSSPAA

SEQ ID NO: 6616 - protein, 11 aa, Homo sapiens
  Table 1.2; MAGEB2; ENSG00000099399; HLA -B*44:02,HLA-B*44:03
GEEHSVFGEPW

SEQ ID NO: 6617 - protein, 10 aa, Homo sapiens
  Table 1.2; MAGEB2; ENSG00000099399; HLA -A*30:01,HLA-B*40:02,HLA-B*49:01
GEKNASSSQA

SEQ ID NO: 6618 - protein, 9 aa, Homo sapiens
  Table 1.2; MAGEB2; ENSG00000099399; HLA -B*37:01
GEMLKIVGK

SEQ ID NO: 6619 - protein, 11 aa, Homo sapiens
  Table 1.2; MAGEB2; ENSG00000099399; HLA -B*44:02,HLA-B*44:03
GEMLKIVGKRF

SEQ ID NO: 6620 - protein, 10 aa, Homo sapiens
  Table 1.2; MAGEB2; ENSG00000099399; HLA -A*02:01,HLA-A*02:03
GLNVPQVTEA

SEQ ID NO: 6621 - protein, 8 aa, Homo sapiens
  Table 1.2; MAGEB2; ENSG00000099399; HLA -A*02:04,HLA-B*37:01
GLSVVFGL

SEQ ID NO: 6622 - protein, 10 aa, Homo sapiens
  Table 1.2; MAGEB2; ENSG00000099399; HLA -A*02:01,HLA-A*02:03,HLA-A*02:04
GLSVVFGLEL

SEQ ID NO: 6623 - protein, 10 aa, Homo sapiens
  Table 1.2; MAGEB2; ENSG00000099399; HLA -B*07:02
GPRAYAETSK

SEQ ID NO: 6624 - protein, 11 aa, Homo sapiens
  Table 1.2; MAGEB2; ENSG00000099399; HLA -B*07:02,HLA-C*07:02
GPRAYAETSKM

SEQ ID NO: 6625 - protein, 9 aa, Homo sapiens
  Table 1.2; MAGEB2; ENSG00000099399; HLA -A*01:01,HLA-A*03:01,HLA-A*11:01,HLA-A*29:02,HLA-A*30:02, HLA-B*57:01,HLA-B*58:01
GSLVQFLLY

SEQ ID NO: 6626 - protein, 10 aa, Homo sapiens
  Table 1.2; MAGEB2; ENSG00000099399; HLA -A*03:01,HLA-A*11:01
GSLVQFLLYK

SEQ ID NO: 6627 - protein, 11 aa, Homo sapiens
  Table 1.2; MAGEB2; ENSG00000099399; HLA -A*29:02
GSLVQFLLYKY

SEQ ID NO: 6628 - protein, 10 aa, Homo sapiens
  Table 1.2; MAGEB2; ENSG00000099399; HLA -B*56:01
GVIFLNGNSA

SEQ ID NO: 6629 - protein, 8 aa, Homo sapiens
  Table 1.2; MAGEB2; ENSG00000099399; HLA -A*03:02
GVSSTKSK

SEQ ID NO: 6630 - protein, 9 aa, Homo sapiens
  Table 1.2; MAGEB2; ENSG00000099399; HLA -A*03:01,HLA-A*03:02,HLA-A*11:01
GVSSTKSKK

SEQ ID NO: 6631 - protein, 10 aa, Homo sapiens
  Table 1.2; MAGEB2; ENSG00000099399; HLA -A*02:01,HLA-A*02:03,HLA-A*02:04,HLA-A*02:07,HLA-A*03:01, HLA-A*03:02,HLA-A*11:01,HLA-A*23:01,HLA-A*25:01,HLA-A*26:01, HLA-A*29:02,HLA-A*30:01,HLA-A*32:01,HLA-A*68:02,HLA-B*13:02,
  HLA-B*15:01,HLA-B*15:03,HLA-B*27:05,HLA-B*38:01,HLA-B*39:01, HLA-B*40:01,HLA-B*40:02,HLA-B*46:01,HLA-B*49:01,HLA-B*55:01, HLA-B*56:01,HLA-B*58:01,HLA-C*02:02,HLA-C*06:02,HLA-C*07:04, HLA-C*12:03,HLA-C*16:02,HLA-C*16:04
GVYDGEEHSV

SEQ ID NO: 6632 - protein, 11 aa, Homo sapiens
  Table 1.2; MAGEB2; ENSG00000099399; HLA -A*02:07,HLA-A*03:01,HLA-A*03:02,HLA-A*11:01,HLA-A*25:01, HLA-A*26:01,HLA-A*29:02,HLA-A*30:02,HLA-A*31:01,HLA-A*32:01, HLA-A*68:02,HLA-B*15:01,HLA-B*15:03,HLA-B*27:02,HLA-B*27:05,
  HLA-B*35:01,HLA-B*38:01,HLA-B*46:01,HLA-B*55:01,HLA-B*57:01, HLA-B*58:01,HLA-C*02:02,HLA-C*05:01,HLA-C*07:04,HLA-C*12:03, HLA-C*16:04
GVYDGEEHSVF

SEQ ID NO: 6633 - protein, 8 aa, Homo sapiens
  Table 1.2; MAGEB2; ENSG00000099399; HLA -A*03:01
HTYTFIDK

SEQ ID NO: 6634 - protein, 9 aa, Homo sapiens
  Table 1.2; MAGEB2; ENSG00000099399; HLA -A*02:03,HLA-A*02:04,HLA-A*68:02
HTYTFIDKV

SEQ ID NO: 6635 - protein, 8 aa, Homo sapiens
  Table 1.2; MAGEB2; ENSG00000099399; HLA -C*14:02
IFLNGNSA

SEQ ID NO: 6636 - protein, 9 aa, Homo sapiens
  Table 1.2; MAGEB2; ENSG00000099399; HLA -C*14:02
IFLNGNSAT

SEQ ID NO: 6637 - protein, 9 aa, Homo sapiens
  Table 1.2; MAGEB2; ENSG00000099399; HLA -A*02:03,HLA-B*08:01
ILKKASEGL

SEQ ID NO: 6638 - protein, 8 aa, Homo sapiens
  Table 1.2; MAGEB2; ENSG00000099399; HLA -B*56:01
IPQEPQRA

SEQ ID NO: 6639 - protein, 9 aa, Homo sapiens
  Table 1.2; MAGEB2; ENSG00000099399; HLA -B*07:02,HLA-B*54:01,HLA-B*55:01,HLA-B*56:01,HLA-C*07:02
IPQEPQRAP

SEQ ID NO: 6640 - protein, 10 aa, Homo sapiens
  Table 1.2; MAGEB2; ENSG00000099399; HLA -B*54:01,HLA-B*56:01,HLA-C*16:02
IPQEPQRAPT

SEQ ID NO: 6641 - protein, 9 aa, Homo sapiens
  Table 1.2; MAGEB2; ENSG00000099399; HLA -A*03:01,HLA-A*03:02,HLA-A*11:01,HLA-A*26:01,HLA-A*29:02, HLA-A*30:02,HLA-A*31:01,HLA-A*32:01,HLA-A*33:01,HLA-A*33:03, HLA-A*68:01,HLA-B*40:02,HLA-B*46:01,HLA-B*57:01,HLA-C*06:02,
  HLA-C*07:06,HLA-C*16:02
ITKDLVQEK

SEQ ID NO: 6642 - protein, 10 aa, Homo sapiens
  Table 1.2; MAGEB2; ENSG00000099399; HLA -A*01:01,HLA-A*25:01,HLA-A*26:01,HLA-A*29:02,HLA-A*30:02, HLA-A*32:01,HLA-B*15:01,HLA-B*46:01,HLA-B*57:01,HLA-B*58:01
ITKDLVQEKY

SEQ ID NO: 6643 - protein, 9 aa, Homo sapiens
  Table 1.2; MAGEB2; ENSG00000099399; HLA -B*07:02
KARDETRGL

SEQ ID NO: 6644 - protein, 8 aa, Homo sapiens
  Table 1.2; MAGEB2; ENSG00000099399; HLA -C*03:04
KASEGLSV

SEQ ID NO: 6645 - protein, 9 aa, Homo sapiens
  Table 1.2; MAGEB2; ENSG00000099399; HLA -A*02:01,HLA-A*02:03,HLA-A*32:01,HLA-B*46:01,HLA-B*55:01, HLA-C*02:02,HLA-C*12:03,HLA-C*16:02
KASEGLSVV

SEQ ID NO: 6646 - protein, 10 aa, Homo sapiens
  Table 1.2; MAGEB2; ENSG00000099399; HLA -A*23:01,HLA-A*30:02,HLA-A*32:01,HLA-B*15:01,HLA-B*15:03, HLA-B*27:02,HLA-B*27:05,HLA-B*35:01,HLA-B*55:01,HLA-B*57:01, HLA-B*58:01,HLA-C*02:02,HLA-C*12:03,HLA-C*16:04
KASEGLSVVF

SEQ ID NO: 6647 - protein, 8 aa, Homo sapiens
  Table 1.2; MAGEB2; ENSG00000099399; HLA -B*37:01
KDEEKAGV

SEQ ID NO: 6648 - protein, 8 aa, Homo sapiens
  Table 1.2; MAGEB2; ENSG00000099399; HLA -B*37:01
KDLVQEKY

SEQ ID NO: 6649 - protein, 9 aa, Homo sapiens
  Table 1.2; MAGEB2; ENSG00000099399; HLA -B*15:03
KKASEGLSV

SEQ ID NO: 6650 - protein, 11 aa, Homo sapiens
  Table 1.2; MAGEB2; ENSG00000099399; HLA -B*15:03
KKASEGLSVVF

SEQ ID NO: 6651 - protein, 11 aa, Homo sapiens
  Table 1.2; MAGEB2; ENSG00000099399; HLA -A*03:01,HLA-A*03:02,HLA-A*11:01,HLA-A*31:01
KLITKDLVQEK

SEQ ID NO: 6652 - protein, 9 aa, Homo sapiens
  Table 1.2; MAGEB2; ENSG00000099399; HLA -A*02:01,HLA-A*02:03,HLA-A*02:04,HLA-A*02:07
KLLMPLLGV

SEQ ID NO: 6653 - protein, 10 aa, Homo sapiens
  Table 1.2; MAGEB2; ENSG00000099399; HLA -A*03:01
KMKVLEFLAK

SEQ ID NO: 6654 - protein, 11 aa, Homo sapiens
  Table 1.2; MAGEB2; ENSG00000099399; HLA -A*23:01,HLA-A*24:02,HLA-A*32:01,HLA-B*15:01,HLA-B*38:01, HLA-B*57:01,HLA-B*58:01
KQVPSSDPPRF

SEQ ID NO: 6655 - protein, 8 aa, Homo sapiens
  Table 1.2; MAGEB2; ENSG00000099399; HLA -A*32:01,HLA-B*58:01
KSGSLVQF

SEQ ID NO: 6656 - protein, 11 aa, Homo sapiens
  Table 1.2; MAGEB2; ENSG00000099399; HLA -A*29:02,HLA-B*57:01
KSGSLVQFLLY

SEQ ID NO: 6657 - protein, 10 aa, Homo sapiens
  Table 1.2; MAGEB2; ENSG00000099399; HLA -A*68:01,HLA-B*27:05,HLA-B*57:01
KSPSEDPLTR

SEQ ID NO: 6658 - protein, 11 aa, Homo sapiens
  Table 1.2; MAGEB2; ENSG00000099399; HLA -A*03:01,HLA-A*03:02,HLA-A*11:01
KSPSEDPLTRK

SEQ ID NO: 6659 - protein, 8 aa, Homo sapiens
  Table 1.2; MAGEB2; ENSG00000099399; HLA -C*16:01
KSVTKGEM

SEQ ID NO: 6660 - protein, 9 aa, Homo sapiens
  Table 1.2; MAGEB2; ENSG00000099399; HLA -B*40:02,HLA-B*58:01
KSVTKGEML

SEQ ID NO: 6661 - protein, 8 aa, Homo sapiens
  Table 1.2; MAGEB2; ENSG00000099399; HLA -A*03:01,HLA-A*11:01
KVLEFLAK

SEQ ID NO: 6662 - protein, 9 aa, Homo sapiens
  Table 1.2; MAGEB2; ENSG00000099399; HLA -A*02:01,HLA-A*02:03,HLA-A*02:04,HLA-A*02:07,HLA-A*31:01, HLA-A*68:02,HLA-B*13:02,HLA-B*40:02,HLA-B*55:01,HLA-C*02:02
KVLEFLAKV

SEQ ID NO: 6663 - protein, 10 aa, Homo sapiens
  Table 1.2; MAGEB2; ENSG00000099399; HLA -A*03:02,HLA-A*25:01,HLA-A*30:02,HLA-A*32:01,HLA-B*15:01
KVNGTTPCAF

SEQ ID NO: 6664 - protein, 9 aa, Homo sapiens
  Table 1.2; MAGEB2; ENSG00000099399; HLA -A*03:01,HLA-A*03:02,HLA-A*23:01,HLA-A*25:01,HLA-A*26:01, HLA-A*29:02,HLA-A*30:02,HLA-A*31:01,HLA-A*32:01,HLA-B*15:01, HLA-B*15:03,HLA-B*35:01,HLA-B*44:03,HLA-B*46:01,HLA-B*57:01,
  HLA-B*58:01,HLA-C*01:02,HLA-C*02:02,HLA-C*07:04,HLA-C*16:01, HLA-C*16:02,HLA-C*16:04
KVNPNGHTY

SEQ ID NO: 6665 - protein, 10 aa, Homo sapiens
  Table 1.2; MAGEB2; ENSG00000099399; HLA -A*32:01
KVNPNGHTYT

SEQ ID NO: 6666 - protein, 11 aa, Homo sapiens
  Table 1.2; MAGEB2; ENSG00000099399; HLA -A*03:02,HLA-A*23:01,HLA-A*24:02,HLA-A*25:01,HLA-A*29:02, HLA-A*30:02,HLA-A*31:01,HLA-A*32:01,HLA-B*15:01,HLA-B*46:01, HLA-B*57:01,HLA-B*58:01
KVNPNGHTYTF

SEQ ID NO: 6667 - protein, 9 aa, Homo sapiens
  Table 1.2; MAGEB2; ENSG00000099399; HLA -A*32:01,HLA-B*46:01
LAKVNGTTP

SEQ ID NO: 6668 - protein, 9 aa, Homo sapiens
  Table 1.2; MAGEB2; ENSG00000099399; HLA -B*49:01
LEYKQVPSS

SEQ ID NO: 6669 - protein, 9 aa, Homo sapiens
  Table 1.2; MAGEB2; ENSG00000099399; HLA -A*02:01,HLA-A*02:03,HLA-A*02:04,HLA-A*02:07
LLMPLLGVI

SEQ ID NO: 6670 - protein, 11 aa, Homo sapiens
  Table 1.2; MAGEB2; ENSG00000099399; HLA -A*02:01,HLA-A*02:04,HLA-A*02:07
LLMPLLGVIFL

SEQ ID NO: 6671 - protein, 9 aa, Homo sapiens
  Table 1.2; MAGEB2; ENSG00000099399; HLA -A*03:01
LLYKYKIKK

SEQ ID NO: 6672 - protein, 9 aa, Homo sapiens
  Table 1.2; MAGEB2; ENSG00000099399; HLA -A*24:02
LMPLLGVIF

SEQ ID NO: 6673 - protein, 10 aa, Homo sapiens
  Table 1.2; MAGEB2; ENSG00000099399; HLA -A*02:07
LMPLLGVIFL

SEQ ID NO: 6674 - protein, 9 aa, Homo sapiens
  Table 1.2; MAGEB2; ENSG00000099399; HLA -B*54:01
LNVPQVTEA

SEQ ID NO: 6675 - protein, 9 aa, Homo sapiens
  Table 1.2; MAGEB2; ENSG00000099399; HLA -B*46:01,HLA-B*58:01,HLA-C*02:02,HLA-C*03:03,HLA-C*03:04
LSVVFGLEL

SEQ ID NO: 6676 - protein, 8 aa, Homo sapiens
  Table 1.2; MAGEB2; ENSG00000099399; HLA -C*04:01,HLA-C*05:01
LTDEESLL

SEQ ID NO: 6677 - protein, 9 aa, Homo sapiens
  Table 1.2; MAGEB2; ENSG00000099399; HLA -A*01:01
LTDEESLLS

SEQ ID NO: 6678 - protein, 11 aa, Homo sapiens
  Table 1.2; MAGEB2; ENSG00000099399; HLA -A*01:01
LTDEESLLSSW

SEQ ID NO: 6679 - protein, 11 aa, Homo sapiens
  Table 1.2; MAGEB2; ENSG00000099399; HLA -B*57:01
LTRKSGSLVQF

SEQ ID NO: 6680 - protein, 9 aa, Homo sapiens
  Table 1.2; MAGEB2; ENSG00000099399; HLA -A*01:01,HLA-A*02:07,HLA-A*03:01,HLA-A*03:02,HLA-A*11:01, HLA-A*25:01,HLA-A*26:01,HLA-A*29:02,HLA-A*30:02,HLA-A*32:01, HLA-A*33:01,HLA-B*15:01,HLA-B*18:01,HLA-B*35:01,HLA-B*46:01,
  HLA-B*57:01,HLA-B*58:01,HLA-C*01:02,HLA-C*02:02,HLA-C*03:03, HLA-C*07:04,HLA-C*12:03,HLA-C*14:02,HLA-C*16:01,HLA-C*16:02
LVQEKYLEY

SEQ ID NO: 6681 - protein, 10 aa, Homo sapiens
  Table 1.2; MAGEB2; ENSG00000099399; HLA -A*03:01,HLA-A*03:02,HLA-A*11:01
LVQEKYLEYK

SEQ ID NO: 6682 - protein, 9 aa, Homo sapiens
  Table 1.2; MAGEB2; ENSG00000099399; HLA -A*29:02,HLA-A*30:02
LVQFLLYKY

SEQ ID NO: 6683 - protein, 8 aa, Homo sapiens
  Table 1.2; MAGEB2; ENSG00000099399; HLA -B*35:01,HLA-B*35:03
MPLLGVIF

SEQ ID NO: 6684 - protein, 9 aa, Homo sapiens
  Table 1.2; MAGEB2; ENSG00000099399; HLA -B*35:01,HLA-B*35:03,HLA-B*51:01,HLA-B*54:01
MPLLGVIFL

SEQ ID NO: 6685 - protein, 11 aa, Homo sapiens
  Table 1.2; MAGEB2; ENSG00000099399; HLA -B*54:01
MPLLGVIFLNG

SEQ ID NO: 6686 - protein, 9 aa, Homo sapiens
  Table 1.2; MAGEB2; ENSG00000099399; HLA -B*07:02,HLA-C*07:02
MPRGQKSKL

SEQ ID NO: 6687 - protein, 10 aa, Homo sapiens
  Table 1.2; MAGEB2; ENSG00000099399; HLA -B*15:03
NKVNPNGHTY

SEQ ID NO: 6688 - protein, 9 aa, Homo sapiens
  Table 1.2; MAGEB2; ENSG00000099399; HLA -A*23:01,HLA-A*24:02,HLA-A*25:01,HLA-A*32:01,HLA-A*33:01, HLA-A*33:03,HLA-B*07:02,HLA-B*08:01,HLA-B*18:01,HLA-B*35:01, HLA-B*35:03,HLA-B*38:01,HLA-B*54:01,HLA-B*55:01,HLA-B*56:01,
  HLA-C*07:02
NPNGHTYTF

SEQ ID NO: 6689 - protein, 9 aa, Homo sapiens
  Table 1.2; MAGEB2; ENSG00000099399; HLA -B*58:01
NSATEEEIW

SEQ ID NO: 6690 - protein, 11 aa, Homo sapiens
  Table 1.2; MAGEB2; ENSG00000099399; HLA -A*68:01,HLA-B*27:02
PAAGIPQEPQR

SEQ ID NO: 6691 - protein, 9 aa, Homo sapiens
  Table 1.2; MAGEB2; ENSG00000099399; HLA -A*01:01,HLA-A*03:02,HLA-A*11:01
PSEDPLTRK

SEQ ID NO: 6692 - protein, 10 aa, Homo sapiens
  Table 1.2; MAGEB2; ENSG00000099399; HLA -A*24:02
PSSDPPRFQF

SEQ ID NO: 6693 - protein, 9 aa, Homo sapiens
  Table 1.2; MAGEB2; ENSG00000099399; HLA -C*16:02
QASTSTKSP

SEQ ID NO: 6694 - protein, 9 aa, Homo sapiens
  Table 1.2; MAGEB2; ENSG00000099399; HLA -A*29:02
QFLWGPRAY

SEQ ID NO: 6695 - protein, 9 aa, Homo sapiens
  Table 1.2; MAGEB2; ENSG00000099399; HLA -B*39:01
QRAPTTAAA

SEQ ID NO: 6696 - protein, 9 aa, Homo sapiens
  Table 1.2; MAGEB2; ENSG00000099399; HLA -A*11:01,HLA-A*68:01
QVPSSDPPR

SEQ ID NO: 6697 - protein, 10 aa, Homo sapiens
  Table 1.2; MAGEB2; ENSG00000099399; HLA -A*25:01,HLA-A*26:01
QVPSSDPPRF

SEQ ID NO: 6698 - protein, 9 aa, Homo sapiens
  Table 1.2; MAGEB2; ENSG00000099399; HLA -C*01:02
RAPTTAAAA

SEQ ID NO: 6699 - protein, 9 aa, Homo sapiens
  Table 1.2; MAGEB2; ENSG00000099399; HLA -A*03:01,HLA-A*32:01,HLA-B*07:02,HLA-B*15:01,HLA-B*15:03, HLA-B*46:01,HLA-B*58:01,HLA-C*02:02,HLA-C*03:03,HLA-C*03:04, HLA-C*05:01,HLA-C*12:03
RAYAETSKM

SEQ ID NO: 6700 - protein, 10 aa, Homo sapiens
  Table 1.2; MAGEB2; ENSG00000099399; HLA -A*03:01
RAYAETSKMK

SEQ ID NO: 6701 - protein, 9 aa, Homo sapiens
  Table 1.2; MAGEB2; ENSG00000099399; HLA -B*37:01
RDETRGLNV

SEQ ID NO: 6702 - protein, 9 aa, Homo sapiens
  Table 1.2; MAGEB2; ENSG00000099399; HLA -B*15:03
RKSGSLVQF

SEQ ID NO: 6703 - protein, 8 aa, Homo sapiens
  Table 1.2; MAGEB2; ENSG00000099399; HLA -B*37:01
SDPPRFQF

SEQ ID NO: 6704 - protein, 9 aa, Homo sapiens
  Table 1.2; MAGEB2; ENSG00000099399; HLA -B*37:01
SDPPRFQFL

SEQ ID NO: 6705 - protein, 8 aa, Homo sapiens
  Table 1.2; MAGEB2; ENSG00000099399; HLA -A*30:01,HLA-B*18:01,HLA-B*37:01,HLA-B*40:01,HLA-B*40:02, HLA-B*44:02,HLA-B*44:03,HLA-B*49:01,HLA-C*07:04
SEGLSVVF

SEQ ID NO: 6706 - protein, 10 aa, Homo sapiens
  Table 1.2; MAGEB2; ENSG00000099399; HLA -A*30:01,HLA-B*40:01,HLA-B*40:02,HLA-B*44:02,HLA-B*44:03
SEGLSVVFGL

SEQ ID NO: 6707 - protein, 8 aa, Homo sapiens
  Table 1.2; MAGEB2; ENSG00000099399; HLA -B*15:03
SKMKVLEF

SEQ ID NO: 6708 - protein, 10 aa, Homo sapiens
  Table 1.2; MAGEB2; ENSG00000099399; HLA -A*02:04
SLLSSWDFPR

SEQ ID NO: 6709 - protein, 8 aa, Homo sapiens
  Table 1.2; MAGEB2; ENSG00000099399; HLA -A*29:02
SLVQFLLY

SEQ ID NO: 6710 - protein, 9 aa, Homo sapiens
  Table 1.2; MAGEB2; ENSG00000099399; HLA -A*03:01
SLVQFLLYK

SEQ ID NO: 6711 - protein, 10 aa, Homo sapiens
  Table 1.2; MAGEB2; ENSG00000099399; HLA -A*29:02
SLVQFLLYKY

SEQ ID NO: 6712 - protein, 10 aa, Homo sapiens
  Table 1.2; MAGEB2; ENSG00000099399; HLA -B*56:01
SPAAGIPQEP

SEQ ID NO: 6713 - protein, 9 aa, Homo sapiens
  Table 1.2; MAGEB2; ENSG00000099399; HLA -A*33:03,HLA-A*68:01,HLA-B*07:02,HLA-B*35:01,HLA-B*35:03, HLA-B*56:01,HLA-C*07:06
SPSEDPLTR

SEQ ID NO: 6714 - protein, 10 aa, Homo sapiens
  Table 1.2; MAGEB2; ENSG00000099399; HLA -A*03:02,HLA-A*11:01,HLA-A*68:01,HLA-B*56:01,HLA-C*07:06
SPSEDPLTRK

SEQ ID NO: 6715 - protein, 9 aa, Homo sapiens
  Table 1.2; MAGEB2; ENSG00000099399; HLA -A*01:01,HLA-A*02:07,HLA-A*32:01,HLA-B*57:01,HLA-B*58:01, HLA-C*05:01,HLA-C*16:01
SSDPPRFQF

SEQ ID NO: 6716 - protein, 11 aa, Homo sapiens
  Table 1.2; MAGEB2; ENSG00000099399; HLA -B*57:01
SSDPPRFQFLW

SEQ ID NO: 6717 - protein, 9 aa, Homo sapiens
  Table 1.2; MAGEB2; ENSG00000099399; HLA -A*03:02,HLA-A*11:01
SSQASTSTK

SEQ ID NO: 6718 - protein, 10 aa, Homo sapiens
  Table 1.2; MAGEB2; ENSG00000099399; HLA -A*03:01,HLA-A*03:02,HLA-A*11:01
SSSQASTSTK

SEQ ID NO: 6719 - protein, 8 aa, Homo sapiens
  Table 1.2; MAGEB2; ENSG00000099399; HLA -A*31:01
SSWDFPRR

SEQ ID NO: 6720 - protein, 9 aa, Homo sapiens
  Table 1.2; MAGEB2; ENSG00000099399; HLA -A*02:01,HLA-A*02:03,HLA-A*02:04,HLA-A*02:07,HLA-A*68:02, HLA-B*13:02
SVFGEPWKL

SEQ ID NO: 6721 - protein, 9 aa, Homo sapiens
  Table 1.2; MAGEB2; ENSG00000099399; HLA -A*03:01,HLA-A*03:02,HLA-A*11:01
SVTKGEMLK

SEQ ID NO: 6722 - protein, 8 aa, Homo sapiens
  Table 1.2; MAGEB2; ENSG00000099399; HLA -C*03:04
SVVFGLEL

SEQ ID NO: 6723 - protein, 10 aa, Homo sapiens
  Table 1.2; MAGEB2; ENSG00000099399; HLA -A*03:02,HLA-A*11:01,HLA-B*27:02
SVVFGLELNK

SEQ ID NO: 6724 - protein, 11 aa, Homo sapiens
  Table 1.2; MAGEB2; ENSG00000099399; HLA -A*68:02
SVVFGLELNKV

SEQ ID NO: 6725 - protein, 9 aa, Homo sapiens
  Table 1.2; MAGEB2; ENSG00000099399; HLA -A*02:03,HLA-B*13:02,HLA-B*51:01
TAAAAAAGV

SEQ ID NO: 6726 - protein, 10 aa, Homo sapiens
  Table 1.2; MAGEB2; ENSG00000099399; HLA -B*44:02
TDEESLLSSW

SEQ ID NO: 6727 - protein, 8 aa, Homo sapiens
  Table 1.2; MAGEB2; ENSG00000099399; HLA -B*18:01
TEEEIWEF

SEQ ID NO: 6728 - protein, 9 aa, Homo sapiens
  Table 1.2; MAGEB2; ENSG00000099399; HLA -A*68:02
TEEEIWEFL

SEQ ID NO: 6729 - protein, 8 aa, Homo sapiens
  Table 1.2; MAGEB2; ENSG00000099399; HLA -B*08:01,HLA-C*14:02
TFIDKVDL

SEQ ID NO: 6730 - protein, 9 aa, Homo sapiens
  Table 1.2; MAGEB2; ENSG00000099399; HLA -B*15:03
TKDLVQEKY

SEQ ID NO: 6731 - protein, 9 aa, Homo sapiens
  Table 1.2; MAGEB2; ENSG00000099399; HLA -B*27:05,HLA-B*38:01,HLA-B*39:01
TKSPSEDPL

SEQ ID NO: 6732 - protein, 9 aa, Homo sapiens
  Table 1.2; MAGEB2; ENSG00000099399; HLA -B*35:01
TPCAFPTHY

SEQ ID NO: 6733 - protein, 9 aa, Homo sapiens
  Table 1.2; MAGEB2; ENSG00000099399; HLA -C*06:02
TRGLNVPQV

SEQ ID NO: 6734 - protein, 9 aa, Homo sapiens
  Table 1.2; MAGEB2; ENSG00000099399; HLA -B*08:01,HLA-B*57:01
TSKMKVLEF

SEQ ID NO: 6735 - protein, 10 aa, Homo sapiens
  Table 1.2; MAGEB2; ENSG00000099399; HLA -A*26:01
TTPCAFPTHY

SEQ ID NO: 6736 - protein, 8 aa, Homo sapiens
  Table 1.2; MAGEB2; ENSG00000099399; HLA -A*23:01,HLA-A*24:02
VFGEPWKL

SEQ ID NO: 6737 - protein, 9 aa, Homo sapiens
  Table 1.2; MAGEB2; ENSG00000099399; HLA -A*24:02
VFGEPWKLI

SEQ ID NO: 6738 - protein, 9 aa, Homo sapiens
  Table 1.2; MAGEB2; ENSG00000099399; HLA -B*46:01,HLA-B*54:01,HLA-B*56:01
VIFLNGNSA

SEQ ID NO: 6739 - protein, 8 aa, Homo sapiens
  Table 1.2; MAGEB2; ENSG00000099399; HLA -B*39:01,HLA-B*46:01,HLA-C*01:02,HLA-C*07:01,HLA-C*14:02, HLA-C*16:01,HLA-C*16:02
VNPNGHTY

SEQ ID NO: 6740 - protein, 10 aa, Homo sapiens
  Table 1.2; MAGEB2; ENSG00000099399; HLA -A*23:01,HLA-A*24:02,HLA-A*29:02,HLA-A*33:01
VNPNGHTYTF

SEQ ID NO: 6741 - protein, 9 aa, Homo sapiens
  Table 1.2; MAGEB2; ENSG00000099399; HLA -A*23:01,HLA-A*24:02,HLA-B*07:02,HLA-B*35:01,HLA-B*35:03, HLA-B*38:01,HLA-B*51:01,HLA-B*55:01,HLA-C*07:02
VPSSDPPRF

SEQ ID NO: 6742 - protein, 11 aa, Homo sapiens
  Table 1.2; MAGEB2; ENSG00000099399; HLA -B*35:01
VPSSDPPRFQF

SEQ ID NO: 6743 - protein, 8 aa, Homo sapiens
  Table 1.2; MAGEB2; ENSG00000099399; HLA -A*01:01,HLA-A*30:02,HLA-B*15:01,HLA-B*15:03,HLA-C*07:01
VQEKYLEY

SEQ ID NO: 6744 - protein, 8 aa, Homo sapiens
  Table 1.2; MAGEB2; ENSG00000099399; HLA -B*15:01,HLA-B*15:03,HLA-B*18:01
VQFLLYKY

SEQ ID NO: 6745 - protein, 9 aa, Homo sapiens
  Table 1.2; MAGEB2; ENSG00000099399; HLA -A*02:03,HLA-B*13:02,HLA-B*40:02,HLA-C*06:02
VTKGEMLKI

SEQ ID NO: 6746 - protein, 9 aa, Homo sapiens
  Table 1.2; MAGEB2; ENSG00000099399; HLA -A*03:01,HLA-A*03:02,HLA-A*11:01,HLA-A*29:02,HLA-A*31:01, HLA-B*27:02,HLA-B*27:05
VVFGLELNK

SEQ ID NO: 6747 - protein, 10 aa, Homo sapiens
  Table 1.2; MAGEB2; ENSG00000099399; HLA -A*02:01,HLA-A*02:03,HLA-A*02:04,HLA-A*02:07,HLA-A*68:02
VVFGLELNKV

SEQ ID NO: 6748 - protein, 9 aa, Homo sapiens
  Table 1.2; MAGEB2; ENSG00000099399; HLA -A*02:01,HLA-A*02:07,HLA-A*23:01,HLA-A*24:02,HLA-A*32:01, HLA-B*35:01,HLA-B*35:03,HLA-B*38:01,HLA-B*39:01,HLA-B*55:01, HLA-C*04:01,HLA-C*05:01,HLA-C*07:04,HLA-C*14:02
VYDGEEHSV

SEQ ID NO: 6749 - protein, 10 aa, Homo sapiens
  Table 1.2; MAGEB2; ENSG00000099399; HLA -A*23:01,HLA-A*24:02,HLA-B*35:01,HLA-B*35:03,HLA-B*38:01, HLA-B*55:01,HLA-C*04:01,HLA-C*05:01
VYDGEEHSVF

SEQ ID NO: 6750 - protein, 9 aa, Homo sapiens
  Table 1.2; MAGEB2; ENSG00000099399; HLA -B*49:01
WEFLNMLGV

SEQ ID NO: 6751 - protein, 9 aa, Homo sapiens
  Table 1.2; MAGEB2; ENSG00000099399; HLA -A*01:01,HLA-B*51:01,HLA-C*05:01,HLA-C*16:02
YAETSKMKV

SEQ ID NO: 6752 - protein, 8 aa, Homo sapiens
  Table 1.2; MAGEB2; ENSG00000099399; HLA -B*40:02,HLA-C*07:04,HLA-C*12:03
YDGEEHSV

SEQ ID NO: 6753 - protein, 9 aa, Homo sapiens
  Table 1.2; MAGEB2; ENSG00000099399; HLA -B*18:01,HLA-B*37:01,HLA-B*38:01
YDGEEHSVF

SEQ ID NO: 6754 - protein, 9 aa, Homo sapiens
  Table 1.2; MAGEB2; ENSG00000099399; HLA -A*68:02
YTFIDKVDL

SEQ ID NO: 6755 - protein, 9 aa, Homo sapiens
  Table 1.2; MAGEB4; ENSG00000120289; HLA -B*07:02,HLA-B*46:01,HLA-C*07:02
AARRGTTAM

SEQ ID NO: 6756 - protein, 9 aa, Homo sapiens
  Table 1.2; MAGEB4; ENSG00000120289; HLA -B*37:01,HLA-B*40:02,HLA-B*44:02,HLA-B*44:03
AEMLKIISK

SEQ ID NO: 6757 - protein, 11 aa, Homo sapiens
  Table 1.2; MAGEB4; ENSG00000120289; HLA -B*44:02,HLA-B*44:03
AEMLKIISKKY

SEQ ID NO: 6758 - protein, 8 aa, Homo sapiens
  Table 1.2; MAGEB4; ENSG00000120289; HLA -B*49:01
AETSKMKV

SEQ ID NO: 6759 - protein, 9 aa, Homo sapiens
  Table 1.2; MAGEB4; ENSG00000120289; HLA -A*30:01,HLA-B*37:01,HLA-B*40:01,HLA-B*40:02,HLA-B*44:02, HLA-B*44:03,HLA-B*49:01
AETSKMKVL

SEQ ID NO: 6760 - protein, 9 aa, Homo sapiens
  Table 1.2; MAGEB4; ENSG00000120289; HLA -B*54:01,HLA-B*56:01,HLA-C*16:01
AGARPRVAA

SEQ ID NO: 6761 - protein, 11 aa, Homo sapiens
  Table 1.2; MAGEB4; ENSG00000120289; HLA -B*15:03
AKVNDTTPNNF

SEQ ID NO: 6762 - protein, 9 aa, Homo sapiens
  Table 1.2; MAGEB4; ENSG00000120289; HLA -A*02:03,HLA-A*32:01,HLA-B*55:01
ALKEVNPTT

SEQ ID NO: 6763 - protein, 10 aa, Homo sapiens
  Table 1.2; MAGEB4; ENSG00000120289; HLA -A*02:03,HLA-A*03:01,HLA-B*46:01
ALKEVNPTTH

SEQ ID NO: 6764 - protein, 10 aa, Homo sapiens
  Table 1.2; MAGEB4; ENSG00000120289; HLA -C*06:02
ARRGTTAMTS

SEQ ID NO: 6765 - protein, 9 aa, Homo sapiens
  Table 1.2; MAGEB4; ENSG00000120289; HLA -B*13:02
ASSSLAFGI

SEQ ID NO: 6766 - protein, 9 aa, Homo sapiens
  Table 1.2; MAGEB4; ENSG00000120289; HLA -A*32:01,HLA-B*58:01,HLA-C*03:04,HLA-C*16:01,HLA-C*16:02
ASTSTERSL

SEQ ID NO: 6767 - protein, 10 aa, Homo sapiens
  Table 1.2; MAGEB4; ENSG00000120289; HLA -A*03:01,HLA-A*03:02,HLA-A*11:01,HLA-A*30:02,HLA-A*31:01, HLA-A*68:01,HLA-B*07:02,HLA-B*27:05,HLA-B*39:01,HLA-B*40:02, HLA-C*01:02,HLA-C*03:03,HLA-C*04:01,HLA-C*06:02,HLA-C*07:01,
  HLA-C*07:04,HLA-C*14:02
ATSSSSSQPM

SEQ ID NO: 6768 - protein, 11 aa, Homo sapiens
  Table 1.2; MAGEB4; ENSG00000120289; HLA -A*33:01
DEEERAGARPR

SEQ ID NO: 6769 - protein, 10 aa, Homo sapiens
  Table 1.2; MAGEB4; ENSG00000120289; HLA -A*01:01,HLA-A*25:01,HLA-A*26:01,HLA-A*29:02
DLVQEKYLEY

SEQ ID NO: 6770 - protein, 9 aa, Homo sapiens
  Table 1.2; MAGEB4; ENSG00000120289; HLA -B*08:01
DSLTRKTKM

SEQ ID NO: 6771 - protein, 9 aa, Homo sapiens
  Table 1.2; MAGEB4; ENSG00000120289; HLA -A*01:01,HLA-A*25:01,HLA-A*26:01,HLA-A*33:01,HLA-A*33:03, HLA-B*18:01
DTASSSLAF

SEQ ID NO: 6772 - protein, 11 aa, Homo sapiens
  Table 1.2; MAGEB4; ENSG00000120289; HLA -A*68:01
DTASSSLAFGI

SEQ ID NO: 6773 - protein, 10 aa, Homo sapiens
  Table 1.2; MAGEB4; ENSG00000120289; HLA -A*25:01
DTTPNNFPLL

SEQ ID NO: 6774 - protein, 11 aa, Homo sapiens
  Table 1.2; MAGEB4; ENSG00000120289; HLA -A*01:01,HLA-A*26:01,HLA-A*29:02
DTTPNNFPLLY

SEQ ID NO: 6775 - protein, 9 aa, Homo sapiens
  Table 1.2; MAGEB4; ENSG00000120289; HLA -A*33:01,HLA-A*33:03
EALRDEEER

SEQ ID NO: 6776 - protein, 10 aa, Homo sapiens
  Table 1.2; MAGEB4; ENSG00000120289; HLA -B*49:01
EESPSSSSSV

SEQ ID NO: 6777 - protein, 11 aa, Homo sapiens
  Table 1.2; MAGEB4; ENSG00000120289; HLA -A*30:01,HLA-B*38:01,HLA-B*39:01,HLA-B*40:01,HLA-B*40:02, HLA-B*44:03
EESPSSSSSVL

SEQ ID NO: 6778 - protein, 9 aa, Homo sapiens
  Table 1.2; MAGEB4; ENSG00000120289; HLA -A*29:02
EFLNMLGIY

SEQ ID NO: 6779 - protein, 10 aa, Homo sapiens
  Table 1.2; MAGEB4; ENSG00000120289; HLA -A*68:02
EHFPEIFRKV

SEQ ID NO: 6780 - protein, 9 aa, Homo sapiens
  Table 1.2; MAGEB4; ENSG00000120289; HLA -A*33:01,HLA-A*33:03,HLA-A*68:01
EIFRKVSQR

SEQ ID NO: 6781 - protein, 9 aa, Homo sapiens
  Table 1.2; MAGEB4; ENSG00000120289; HLA -A*02:07,HLA-A*68:02
EIWEFLNML

SEQ ID NO: 6782 - protein, 8 aa, Homo sapiens
  Table 1.2; MAGEB4; ENSG00000120289; HLA -A*33:01,HLA-A*33:03
EMLKIISK

SEQ ID NO: 6783 - protein, 9 aa, Homo sapiens
  Table 1.2; MAGEB4; ENSG00000120289; HLA -A*33:01,HLA-A*33:03
EMLKIISKK

SEQ ID NO: 6784 - protein, 11 aa, Homo sapiens
  Table 1.2; MAGEB4; ENSG00000120289; HLA -B*35:01,HLA-B*35:03
EPPTTSAAAAM

SEQ ID NO: 6785 - protein, 8 aa, Homo sapiens
  Table 1.2; MAGEB4; ENSG00000120289; HLA -B*07:02,HLA-B*08:01,HLA-B*35:03
EPTTKAEM

SEQ ID NO: 6786 - protein, 9 aa, Homo sapiens
  Table 1.2; MAGEB4; ENSG00000120289; HLA -B*08:01,HLA-B*35:03
EPTTKAEML

SEQ ID NO: 6787 - protein, 11 aa, Homo sapiens
  Table 1.2; MAGEB4; ENSG00000120289; HLA -A*33:01,HLA-A*33:03,HLA-A*68:01,HLA-C*07:06
ESPSSSSSVLR

SEQ ID NO: 6788 - protein, 10 aa, Homo sapiens
  Table 1.2; MAGEB4; ENSG00000120289; HLA -A*25:01,HLA-A*26:01
ETSKMKVLEF

SEQ ID NO: 6789 - protein, 9 aa, Homo sapiens
  Table 1.2; MAGEB4; ENSG00000120289; HLA -A*01:01,HLA-A*25:01,HLA-A*26:01,HLA-A*29:02,HLA-A*30:02, HLA-A*32:01,HLA-A*33:01,HLA-A*33:03,HLA-A*68:01,HLA-B*15:01, HLA-B*15:03,HLA-B*18:01,HLA-B*35:01,HLA-B*44:02,HLA-B*44:03,
  HLA-B*46:01,HLA-B*58:01,HLA-C*02:02,HLA-C*07:04,HLA-C*07:06, HLA-C*16:04
EVNPTTHSY

SEQ ID NO: 6790 - protein, 10 aa, Homo sapiens
  Table 1.2; MAGEB4; ENSG00000120289; HLA -A*25:01,HLA-A*26:01,HLA-A*33:03,HLA-A*68:02
EVNPTTHSYI

SEQ ID NO: 6791 - protein, 11 aa, Homo sapiens
  Table 1.2; MAGEB4; ENSG00000120289; HLA -A*33:01
EVNPTTHSYIL

SEQ ID NO: 6792 - protein, 8 aa, Homo sapiens
  Table 1.2; MAGEB4; ENSG00000120289; HLA -B*51:01
FGLALKEV

SEQ ID NO: 6793 - protein, 8 aa, Homo sapiens
  Table 1.2; MAGEB4; ENSG00000120289; HLA -B*51:01,HLA-B*54:01
FPEIFRKV

SEQ ID NO: 6794 - protein, 8 aa, Homo sapiens
  Table 1.2; MAGEB4; ENSG00000120289; HLA -B*54:01,HLA-B*56:01
FPLLYEEA

SEQ ID NO: 6795 - protein, 9 aa, Homo sapiens
  Table 1.2; MAGEB4; ENSG00000120289; HLA -B*35:01,HLA-B*35:03,HLA-B*54:01,HLA-B*55:01
FPLLYEEAL

SEQ ID NO: 6796 - protein, 9 aa, Homo sapiens
  Table 1.2; MAGEB4; ENSG00000120289; HLA -A*03:01,HLA-A*31:01,HLA-A*33:01,HLA-A*33:03
GARPRVAAR

SEQ ID NO: 6797 - protein, 9 aa, Homo sapiens
  Table 1.2; MAGEB4; ENSG00000120289; HLA -A*02:01,HLA-A*02:04,HLA-B*13:02
GLLMPLLSV

SEQ ID NO: 6798 - protein, 10 aa, Homo sapiens
  Table 1.2; MAGEB4; ENSG00000120289; HLA -B*56:01
GPNDGNQSSA

SEQ ID NO: 6799 - protein, 11 aa, Homo sapiens
  Table 1.2; MAGEB4; ENSG00000120289; HLA -A*25:01,HLA-B*07:02,HLA-B*27:02
GPNDGNQSSAW

SEQ ID NO: 6800 - protein, 11 aa, Homo sapiens
  Table 1.2; MAGEB4; ENSG00000120289; HLA -B*07:02
GPRAHAETSKM

SEQ ID NO: 6801 - protein, 8 aa, Homo sapiens
  Table 1.2; MAGEB4; ENSG00000120289; HLA -B*13:02
GQTQDLKV

SEQ ID NO: 6802 - protein, 9 aa, Homo sapiens
  Table 1.2; MAGEB4; ENSG00000120289; HLA -A*01:01,HLA-A*03:01,HLA-A*03:02,HLA-A*11:01,HLA-A*25:01, HLA-A*26:01,HLA-A*29:02,HLA-A*30:02,HLA-A*32:01,HLA-B*15:01, HLA-B*15:03,HLA-B*18:01,HLA-B*27:02,HLA-B*27:05,HLA-B*39:01,
  HLA-B*44:03,HLA-B*46:01,HLA-B*58:01,HLA-C*02:02,HLA-C*07:01, HLA-C*07:04,HLA-C*12:03,HLA-C*14:02,HLA-C*16:01,HLA-C*16:02, HLA-C*16:04
GTTAMTSAY

SEQ ID NO: 6803 - protein, 11 aa, Homo sapiens
  Table 1.2; MAGEB4; ENSG00000120289; HLA -A*03:02,HLA-A*11:01,HLA-A*31:01,HLA-A*68:01,HLA-B*27:02, HLA-C*07:06
GTTAMTSAYSR

SEQ ID NO: 6804 - protein, 9 aa, Homo sapiens
  Table 1.2; MAGEB4; ENSG00000120289; HLA -A*02:07
HFPEIFRKV

SEQ ID NO: 6805 - protein, 8 aa, Homo sapiens
  Table 1.2; MAGEB4; ENSG00000120289; HLA -B*08:01,HLA-B*51:01
HSYILVSM

SEQ ID NO: 6806 - protein, 9 aa, Homo sapiens
  Table 1.2; MAGEB4; ENSG00000120289; HLA -B*56:01
IPQEPQREP

SEQ ID NO: 6807 - protein, 10 aa, Homo sapiens
  Table 1.2; MAGEB4; ENSG00000120289; HLA -B*54:01,HLA-B*56:01
IPQEPQREPP

SEQ ID NO: 6808 - protein, 9 aa, Homo sapiens
  Table 1.2; MAGEB4; ENSG00000120289; HLA -A*01:01,HLA-A*03:01,HLA-A*03:02,HLA-A*11:01,HLA-A*31:01, HLA-A*33:01,HLA-A*33:03,HLA-A*68:01,HLA-B*27:02,HLA-C*07:06
ITQDLVQEK

SEQ ID NO: 6809 - protein, 10 aa, Homo sapiens
  Table 1.2; MAGEB4; ENSG00000120289; HLA -A*01:01,HLA-A*25:01,HLA-A*26:01,HLA-A*29:02,HLA-A*30:02, HLA-A*32:01,HLA-B*15:01,HLA-B*57:01,HLA-B*58:01,HLA-C*16:02
ITQDLVQEKY

SEQ ID NO: 6810 - protein, 9 aa, Homo sapiens
  Table 1.2; MAGEB4; ENSG00000120289; HLA -A*24:02
IYDGKRHLI

SEQ ID NO: 6811 - protein, 10 aa, Homo sapiens
  Table 1.2; MAGEB4; ENSG00000120289; HLA -A*24:02
IYDGKRHLIF

SEQ ID NO: 6812 - protein, 11 aa, Homo sapiens
  Table 1.2; MAGEB4; ENSG00000120289; HLA -B*40:01,HLA-B*49:01
KEESPSSSSSV

SEQ ID NO: 6813 - protein, 9 aa, Homo sapiens
  Table 1.2; MAGEB4; ENSG00000120289; HLA -B*37:01,HLA-B*40:01
KEPTTKAEM

SEQ ID NO: 6814 - protein, 10 aa, Homo sapiens
  Table 1.2; MAGEB4; ENSG00000120289; HLA -A*30:01,HLA-B*40:01,HLA-B*40:02
KEPTTKAEML

SEQ ID NO: 6815 - protein, 10 aa, Homo sapiens
  Table 1.2; MAGEB4; ENSG00000120289; HLA -A*25:01,HLA-A*29:02,HLA-A*30:01,HLA-A*30:02,HLA-A*32:01, HLA-B*15:01,HLA-B*15:03,HLA-B*27:02,HLA-B*40:01,HLA-B*44:02, HLA-B*44:03,HLA-C*16:01,HLA-C*16:04
KEVNPTTHSY

SEQ ID NO: 6816 - protein, 11 aa, Homo sapiens
  Table 1.2; MAGEB4; ENSG00000120289; HLA -B*49:01
KEVNPTTHSYI

SEQ ID NO: 6817 - protein, 11 aa, Homo sapiens
  Table 1.2; MAGEB4; ENSG00000120289; HLA -A*03:01,HLA-A*03:02,HLA-A*11:01
KLITQDLVQEK

SEQ ID NO: 6818 - protein, 8 aa, Homo sapiens
  Table 1.2; MAGEB4; ENSG00000120289; HLA -A*03:01
KMKEPTTK

SEQ ID NO: 6819 - protein, 9 aa, Homo sapiens
  Table 1.2; MAGEB4; ENSG00000120289; HLA -A*02:03,HLA-A*32:01,HLA-B*55:01
KMKEPTTKA

SEQ ID NO: 6820 - protein, 9 aa, Homo sapiens
  Table 1.2; MAGEB4; ENSG00000120289; HLA -A*03:01,HLA-A*24:02,HLA-A*29:02,HLA-B*57:01
KMLVQFLLY

SEQ ID NO: 6821 - protein, 10 aa, Homo sapiens
  Table 1.2; MAGEB4; ENSG00000120289; HLA -A*03:01
KMLVQFLLYK

SEQ ID NO: 6822 - protein, 10 aa, Homo sapiens
  Table 1.2; MAGEB4; ENSG00000120289; HLA -A*03:01,HLA-A*03:02,HLA-A*11:01
KVGQPTAAEK

SEQ ID NO: 6823 - protein, 8 aa, Homo sapiens
  Table 1.2; MAGEB4; ENSG00000120289; HLA -A*03:01
KVLEFLAK

SEQ ID NO: 6824 - protein, 9 aa, Homo sapiens
  Table 1.2; MAGEB4; ENSG00000120289; HLA -A*02:01,HLA-A*02:03,HLA-A*02:04,HLA-A*02:07,HLA-A*68:02
KVLEFLAKV

SEQ ID NO: 6825 - protein, 10 aa, Homo sapiens
  Table 1.2; MAGEB4; ENSG00000120289; HLA -A*03:02,HLA-A*30:02,HLA-A*32:01,HLA-B*58:01
KVNDTTPNNF

SEQ ID NO: 6826 - protein, 8 aa, Homo sapiens
  Table 1.2; MAGEB4; ENSG00000120289; HLA -C*16:01
KVSQRTEL

SEQ ID NO: 6827 - protein, 9 aa, Homo sapiens
  Table 1.2; MAGEB4; ENSG00000120289; HLA -A*24:02
KYKEHFPEI

SEQ ID NO: 6828 - protein, 9 aa, Homo sapiens
  Table 1.2; MAGEB4; ENSG00000120289; HLA -A*32:01,HLA-B*54:01
LAFGIPQEP

SEQ ID NO: 6829 - protein, 11 aa, Homo sapiens
  Table 1.2; MAGEB4; ENSG00000120289; HLA -A*68:01
LAFGIPQEPQR

SEQ ID NO: 6830 - protein, 9 aa, Homo sapiens
  Table 1.2; MAGEB4; ENSG00000120289; HLA -A*02:01,HLA-A*02:03,HLA-A*02:04,HLA-A*02:07
LLMPLLSVI

SEQ ID NO: 6831 - protein, 11 aa, Homo sapiens
  Table 1.2; MAGEB4; ENSG00000120289; HLA -A*02:04
LLMPLLSVIFL

SEQ ID NO: 6832 - protein, 9 aa, Homo sapiens
  Table 1.2; MAGEB4; ENSG00000120289; HLA -A*24:02
LMPLLSVIF

SEQ ID NO: 6833 - protein, 10 aa, Homo sapiens
  Table 1.2; MAGEB4; ENSG00000120289; HLA -B*27:02
LNMLGIYDGK

SEQ ID NO: 6834 - protein, 9 aa, Homo sapiens
  Table 1.2; MAGEB4; ENSG00000120289; HLA -B*54:01,HLA-B*56:01
LPRNGLLMP

SEQ ID NO: 6835 - protein, 9 aa, Homo sapiens
  Table 1.2; MAGEB4; ENSG00000120289; HLA -B*39:01
LRDTASSSL

SEQ ID NO: 6836 - protein, 10 aa, Homo sapiens
  Table 1.2; MAGEB4; ENSG00000120289; HLA -A*02:03
LVFGLALKEV

SEQ ID NO: 6837 - protein, 9 aa, Homo sapiens
  Table 1.2; MAGEB4; ENSG00000120289; HLA -A*01:01,HLA-A*03:01,HLA-A*11:01,HLA-A*25:01,HLA-A*26:01, HLA-A*29:02,HLA-A*30:02,HLA-A*32:01,HLA-B*15:01,HLA-B*35:01, HLA-B*46:01,HLA-B*58:01,HLA-C*02:02,HLA-C*07:04,HLA-C*14:02,
  HLA-C*16:01,HLA-C*16:02
LVQEKYLEY

SEQ ID NO: 6838 - protein, 9 aa, Homo sapiens
  Table 1.2; MAGEB4; ENSG00000120289; HLA -A*29:02,HLA-A*30:02
LVQFLLYKY

SEQ ID NO: 6839 - protein, 9 aa, Homo sapiens
  Table 1.2; MAGEB4; ENSG00000120289; HLA -A*29:02
MLKIISKKY

SEQ ID NO: 6840 - protein, 8 aa, Homo sapiens
  Table 1.2; MAGEB4; ENSG00000120289; HLA -A*29:02
MLVQFLLY

SEQ ID NO: 6841 - protein, 9 aa, Homo sapiens
  Table 1.2; MAGEB4; ENSG00000120289; HLA -A*03:01
MLVQFLLYK

SEQ ID NO: 6842 - protein, 10 aa, Homo sapiens
  Table 1.2; MAGEB4; ENSG00000120289; HLA -A*29:02
MLVQFLLYKY

SEQ ID NO: 6843 - protein, 8 aa, Homo sapiens
  Table 1.2; MAGEB4; ENSG00000120289; HLA -B*35:01,HLA-B*35:03
MPLLSVIF

SEQ ID NO: 6844 - protein, 9 aa, Homo sapiens
  Table 1.2; MAGEB4; ENSG00000120289; HLA -B*35:01,HLA-B*35:03,HLA-B*51:01,HLA-B*54:01
MPLLSVIFL

SEQ ID NO: 6845 - protein, 9 aa, Homo sapiens
  Table 1.2; MAGEB4; ENSG00000120289; HLA -B*07:02,HLA-C*07:02
MPRGQKSKL

SEQ ID NO: 6846 - protein, 9 aa, Homo sapiens
  Table 1.2; MAGEB4; ENSG00000120289; HLA -C*16:01
MTSAYSRAT

SEQ ID NO: 6847 - protein, 9 aa, Homo sapiens
  Table 1.2; MAGEB4; ENSG00000120289; HLA -B*44:02
NDGNQSSAW

SEQ ID NO: 6848 - protein, 8 aa, Homo sapiens
  Table 1.2; MAGEB4; ENSG00000120289; HLA -B*37:01
NDTTPNNF

SEQ ID NO: 6849 - protein, 10 aa, Homo sapiens
  Table 1.2; MAGEB4; ENSG00000120289; HLA -A*33:01
NMLGIYDGKR

SEQ ID NO: 6850 - protein, 9 aa, Homo sapiens
  Table 1.2; MAGEB4; ENSG00000120289; HLA -B*35:01,HLA-B*35:03
NPTTHSYIL

SEQ ID NO: 6851 - protein, 9 aa, Homo sapiens
  Table 1.2; MAGEB4; ENSG00000120289; HLA -A*01:01,HLA-A*32:01,HLA-B*35:01,HLA-B*57:01,HLA-B*58:01, HLA-C*05:01,HLA-C*16:01
NSDPPRYQF

SEQ ID NO: 6852 - protein, 9 aa, Homo sapiens
  Table 1.2; MAGEB4; ENSG00000120289; HLA -A*68:01
PSSSSSVLR

SEQ ID NO: 6853 - protein, 10 aa, Homo sapiens
  Table 1.2; MAGEB4; ENSG00000120289; HLA -B*07:02,HLA-C*03:04,HLA-C*16:02
QASTSTERSL

SEQ ID NO: 6854 - protein, 8 aa, Homo sapiens
  Table 1.2; MAGEB4; ENSG00000120289; HLA -B*18:01,HLA-C*07:01
QDLVQEKY

SEQ ID NO: 6855 - protein, 11 aa, Homo sapiens
  Table 1.2; MAGEB4; ENSG00000120289; HLA -A*30:02,HLA-A*32:01,HLA-B*15:01,HLA-B*15:03,HLA-B*39:01
QQVPNSDPPRY

SEQ ID NO: 6856 - protein, 9 aa, Homo sapiens
  Table 1.2; MAGEB4; ENSG00000120289; HLA -B*27:05
QRTELVFGL

SEQ ID NO: 6857 - protein, 9 aa, Homo sapiens
  Table 1.2; MAGEB4; ENSG00000120289; HLA -A*31:01
QSSAWTLPR

SEQ ID NO: 6858 - protein, 9 aa, Homo sapiens
  Table 1.2; MAGEB4; ENSG00000120289; HLA -A*68:01
QVPNSDPPR

SEQ ID NO: 6859 - protein, 10 aa, Homo sapiens
  Table 1.2; MAGEB4; ENSG00000120289; HLA -A*01:01,HLA-A*25:01,HLA-A*26:01,HLA-A*29:02,HLA-A*30:02
QVPNSDPPRY

SEQ ID NO: 6860 - protein, 8 aa, Homo sapiens
  Table 1.2; MAGEB4; ENSG00000120289; HLA -B*37:01
RDTASSSL

SEQ ID NO: 6861 - protein, 9 aa, Homo sapiens
  Table 1.2; MAGEB4; ENSG00000120289; HLA -A*30:01,HLA-B*40:01,HLA-B*49:01
REPPTTSAA

SEQ ID NO: 6862 - protein, 10 aa, Homo sapiens
  Table 1.2; MAGEB4; ENSG00000120289; HLA -A*30:01,HLA-B*40:01
REPPTTSAAA

SEQ ID NO: 6863 - protein, 10 aa, Homo sapiens
  Table 1.2; MAGEB4; ENSG00000120289; HLA -A*30:02,HLA-B*15:01,HLA-B*15:03,HLA-B*58:01
RGTTAMTSAY

SEQ ID NO: 6864 - protein, 9 aa, Homo sapiens
  Table 1.2; MAGEB4; ENSG00000120289; HLA -A*31:01
RHLIFGEPR

SEQ ID NO: 6865 - protein, 9 aa, Homo sapiens
  Table 1.2; MAGEB4; ENSG00000120289; HLA -B*57:01
RSLKDSLTR

SEQ ID NO: 6866 - protein, 10 aa, Homo sapiens
  Table 1.2; MAGEB4; ENSG00000120289; HLA -A*03:01
RSLKDSLTRK

SEQ ID NO: 6867 - protein, 10 aa, Homo sapiens
  Table 1.2; MAGEB4; ENSG00000120289; HLA -A*03:01,HLA-A*03:02
RTRGQTQDLK

SEQ ID NO: 6868 - protein, 9 aa, Homo sapiens
  Table 1.2; MAGEB4; ENSG00000120289; HLA -B*08:01,HLA-B*46:01,HLA-C*16:01
SAYSRATSS

SEQ ID NO: 6869 - protein, 8 aa, Homo sapiens
  Table 1.2; MAGEB4; ENSG00000120289; HLA -B*37:01
SDPPRYQF

SEQ ID NO: 6870 - protein, 9 aa, Homo sapiens
  Table 1.2; MAGEB4; ENSG00000120289; HLA -B*37:01
SDPPRYQFL

SEQ ID NO: 6871 - protein, 9 aa, Homo sapiens
  Table 1.2; MAGEB4; ENSG00000120289; HLA -A*03:01
SLKDSLTRK

SEQ ID NO: 6872 - protein, 8 aa, Homo sapiens
  Table 1.2; MAGEB4; ENSG00000120289; HLA -B*07:02
SPSSSSSV

SEQ ID NO: 6873 - protein, 9 aa, Homo sapiens
  Table 1.2; MAGEB4; ENSG00000120289; HLA -B*07:02,HLA-B*35:01,HLA-B*35:03,HLA-B*39:01,HLA-B*55:01, HLA-B*56:01,HLA-C*07:02
SPSSSSSVL

SEQ ID NO: 6874 - protein, 10 aa, Homo sapiens
  Table 1.2; MAGEB4; ENSG00000120289; HLA -A*68:01,HLA-C*07:06
SPSSSSSVLR

SEQ ID NO: 6875 - protein, 9 aa, Homo sapiens
  Table 1.2; MAGEB4; ENSG00000120289; HLA -B*27:05,HLA-C*07:06
SQASTSTER

SEQ ID NO: 6876 - protein, 11 aa, Homo sapiens
  Table 1.2; MAGEB4; ENSG00000120289; HLA -B*38:01
SQASTSTERSL

SEQ ID NO: 6877 - protein, 8 aa, Homo sapiens
  Table 1.2; MAGEB4; ENSG00000120289; HLA -B*15:01,HLA-B*15:03
SQRTELVF

SEQ ID NO: 6878 - protein, 10 aa, Homo sapiens
  Table 1.2; MAGEB4; ENSG00000120289; HLA -A*68:01,HLA-C*07:06
SSQASTSTER

SEQ ID NO: 6879 - protein, 8 aa, Homo sapiens
  Table 1.2; MAGEB4; ENSG00000120289; HLA -B*13:02
SSSLAFGI

SEQ ID NO: 6880 - protein, 11 aa, Homo sapiens
  Table 1.2; MAGEB4; ENSG00000120289; HLA -A*68:01,HLA-C*07:06
SSSQASTSTER

SEQ ID NO: 6881 - protein, 8 aa, Homo sapiens
  Table 1.2; MAGEB4; ENSG00000120289; HLA -C*16:01
STSTERSL

SEQ ID NO: 6882 - protein, 9 aa, Homo sapiens
  Table 1.2; MAGEB4; ENSG00000120289; HLA -A*11:01
STSTERSLK

SEQ ID NO: 6883 - protein, 11 aa, Homo sapiens
  Table 1.2; MAGEB4; ENSG00000120289; HLA -A*31:01
SVIFLNGNCAR

SEQ ID NO: 6884 - protein, 11 aa, Homo sapiens
  Table 1.2; MAGEB4; ENSG00000120289; HLA -A*25:01,HLA-B*07:02,HLA-C*01:02
SVLRDTASSSL

SEQ ID NO: 6885 - protein, 8 aa, Homo sapiens
  Table 1.2; MAGEB4; ENSG00000120289; HLA -A*23:01,HLA-A*24:02,HLA-C*14:02
SYILVSML

SEQ ID NO: 6886 - protein, 9 aa, Homo sapiens
  Table 1.2; MAGEB4; ENSG00000120289; HLA -A*03:02,HLA-A*11:01,HLA-A*31:01,HLA-A*33:01,HLA-A*33:03, HLA-A*68:01,HLA-B*35:01,HLA-B*57:01,HLA-C*07:06
TAMTSAYSR

SEQ ID NO: 6887 - protein, 10 aa, Homo sapiens
  Table 1.2; MAGEB4; ENSG00000120289; HLA -B*54:01
TAMTSAYSRA

SEQ ID NO: 6888 - protein, 8 aa, Homo sapiens
  Table 1.2; MAGEB4; ENSG00000120289; HLA -B*35:01,HLA-B*35:03,HLA-B*37:01
TASSSLAF

SEQ ID NO: 6889 - protein, 8 aa, Homo sapiens
  Table 1.2; MAGEB4; ENSG00000120289; HLA -B*18:01,HLA-B*49:01
TELVFGLA

SEQ ID NO: 6890 - protein, 9 aa, Homo sapiens
  Table 1.2; MAGEB4; ENSG00000120289; HLA -A*30:01,HLA-B*18:01,HLA-B*37:01,HLA-B*40:01,HLA-B*40:02, HLA-B*44:02,HLA-B*44:03,HLA-B*49:01
TELVFGLAL

SEQ ID NO: 6891 - protein, 9 aa, Homo sapiens
  Table 1.2; MAGEB4; ENSG00000120289; HLA -A*30:01,HLA-B*18:01,HLA-B*40:01,HLA-B*40:02
TERSLKDSL

SEQ ID NO: 6892 - protein, 9 aa, Homo sapiens
  Table 1.2; MAGEB4; ENSG00000120289; HLA -B*38:01,HLA-B*39:01
THSYILVSM

SEQ ID NO: 6893 - protein, 8 aa, Homo sapiens
  Table 1.2; MAGEB4; ENSG00000120289; HLA -B*51:01
TPNNFPLL

SEQ ID NO: 6894 - protein, 9 aa, Homo sapiens
  Table 1.2; MAGEB4; ENSG00000120289; HLA -A*01:01,HLA-A*26:01,HLA-A*29:02,HLA-A*30:02,HLA-B*18:01, HLA-B*35:01,HLA-B*55:01,HLA-C*02:02
TPNNFPLLY

SEQ ID NO: 6895 - protein, 9 aa, Homo sapiens
  Table 1.2; MAGEB4; ENSG00000120289; HLA -A*01:01,HLA-A*30:02,HLA-A*32:01,HLA-B*15:01,HLA-B*15:03, HLA-B*18:01,HLA-B*38:01,HLA-B*39:01
TQDLVQEKY

SEQ ID NO: 6896 - protein, 10 aa, Homo sapiens
  Table 1.2; MAGEB4; ENSG00000120289; HLA -B*38:01
TQDLVQEKYL

SEQ ID NO: 6897 - protein, 9 aa, Homo sapiens
  Table 1.2; MAGEB4; ENSG00000120289; HLA -B*27:05
TRGQTQDLK

SEQ ID NO: 6898 - protein, 9 aa, Homo sapiens
  Table 1.2; MAGEB4; ENSG00000120289; HLA -B*08:01
TSKMKVLEF

SEQ ID NO: 6899 - protein, 9 aa, Homo sapiens
  Table 1.2; MAGEB4; ENSG00000120289; HLA -A*33:03,HLA-A*68:01,HLA-B*27:05,HLA-B*35:01,HLA-B*35:03, HLA-B*39:01,HLA-B*55:01,HLA-C*01:02,HLA-C*03:03,HLA-C*03:04, HLA-C*04:01,HLA-C*06:02,HLA-C*07:01,HLA-C*07:04,HLA-C*07:06,
  HLA-C*14:02,HLA-C*16:01,HLA-C*16:02
TSSSSSQPM

SEQ ID NO: 6900 - protein, 8 aa, Homo sapiens
  Table 1.2; MAGEB4; ENSG00000120289; HLA -A*01:01,HLA-A*25:01,HLA-A*26:01,HLA-A*30:02,HLA-A*32:01, HLA-B*15:01,HLA-B*46:01,HLA-C*12:03
TTAMTSAY

SEQ ID NO: 6901 - protein, 10 aa, Homo sapiens
  Table 1.2; MAGEB4; ENSG00000120289; HLA -A*03:02,HLA-A*11:01,HLA-A*31:01,HLA-A*33:03,HLA-A*68:01, HLA-B*27:02,HLA-C*07:06
TTAMTSAYSR

SEQ ID NO: 6902 - protein, 9 aa, Homo sapiens
  Table 1.2; MAGEB4; ENSG00000120289; HLA -A*02:07,HLA-A*24:02,HLA-A*25:01,HLA-A*26:01,HLA-A*68:02
TTPNNFPLL

SEQ ID NO: 6903 - protein, 10 aa, Homo sapiens
  Table 1.2; MAGEB4; ENSG00000120289; HLA -A*01:01,HLA-A*25:01,HLA-A*26:01,HLA-A*29:02
TTPNNFPLLY

SEQ ID NO: 6904 - protein, 9 aa, Homo sapiens
  Table 1.2; MAGEB4; ENSG00000120289; HLA -A*03:02,HLA-A*11:01
VGQPTAAEK

SEQ ID NO: 6905 - protein, 10 aa, Homo sapiens
  Table 1.2; MAGEB4; ENSG00000120289; HLA -A*02:03,HLA-A*03:01,HLA-B*07:02,HLA-B*46:01,HLA-C*01:02, HLA-C*07:02,HLA-C*14:02
VLRDTASSSL

SEQ ID NO: 6906 - protein, 9 aa, Homo sapiens
  Table 1.2; MAGEB4; ENSG00000120289; HLA -C*05:01
VNDTTPNNF

SEQ ID NO: 6907 - protein, 9 aa, Homo sapiens
  Table 1.2; MAGEB4; ENSG00000120289; HLA -A*29:02,HLA-A*30:02,HLA-B*35:01,HLA-B*35:03,HLA-B*55:01
VPNSDPPRY

SEQ ID NO: 6908 - protein, 11 aa, Homo sapiens
  Table 1.2; MAGEB4; ENSG00000120289; HLA -A*23:01,HLA-B*07:02,HLA-B*35:01,HLA-B*55:01
VPNSDPPRYQF

SEQ ID NO: 6909 - protein, 8 aa, Homo sapiens
  Table 1.2; MAGEB4; ENSG00000120289; HLA -A*01:01,HLA-B*15:01,HLA-B*15:03
VQEKYLEY

SEQ ID NO: 6910 - protein, 8 aa, Homo sapiens
  Table 1.2; MAGEB4; ENSG00000120289; HLA -B*15:01,HLA-B*15:03
VQFLLYKY

SEQ ID NO: 6911 - protein, 9 aa, Homo sapiens
  Table 1.2; MAGEB4; ENSG00000120289; HLA -A*23:01,HLA-A*32:01,HLA-B*15:01,HLA-B*46:01,HLA-B*57:01, HLA-B*58:01
VSQRTELVF

SEQ ID NO: 6912 - protein, 9 aa, Homo sapiens
  Table 1.2; MAGEB4; ENSG00000120289; HLA -B*49:01
WEFLNMLGI

SEQ ID NO: 6913 - protein, 9 aa, Homo sapiens
  Table 1.2; MAGEB4; ENSG00000120289; HLA -A*02:04
YQFLWGPRA

SEQ ID NO: 6914 - protein, 11 aa, Homo sapiens
  Table 1.2; MAGEB6; ENSG00000176746; HLA -A*30:02
ADSSNTSPGLY

SEQ ID NO: 6915 - protein, 9 aa, Homo sapiens
  Table 1.2; MAGEB6; ENSG00000176746; HLA -A*30:01,HLA-B*37:01,HLA-B*40:01,HLA-B*40:02,HLA-B*44:02, HLA-B*44:03,HLA-C*16:01,HLA-C*16:02
AETTKMRVL

SEQ ID NO: 6916 - protein, 8 aa, Homo sapiens
  Table 1.2; MAGEB6; ENSG00000176746; HLA -B*15:03
AGVSGSKY

SEQ ID NO: 6917 - protein, 9 aa, Homo sapiens
  Table 1.2; MAGEB6; ENSG00000176746; HLA -A*02:01,HLA-A*02:03,HLA-A*02:04,HLA-A*02:07,HLA-B*55:01
ALIDEVERA

SEQ ID NO: 6918 - protein, 10 aa, Homo sapiens
  Table 1.2; MAGEB6; ENSG00000176746; HLA -A*02:01,HLA-A*02:03,HLA-A*02:04,HLA-A*25:01,HLA-A*30:01, HLA-B*15:01,HLA-B*40:01,HLA-B*46:01,HLA-B*55:01,HLA-C*01:02
ALIDEVERAL

SEQ ID NO: 6919 - protein, 11 aa, Homo sapiens
  Table 1.2; MAGEB6; ENSG00000176746; HLA -A*31:01
ALIDEVERALR

SEQ ID NO: 6920 - protein, 9 aa, Homo sapiens
  Table 1.2; MAGEB6; ENSG00000176746; HLA -A*01:01,HLA-A*03:01
ALPKSGLLM

SEQ ID NO: 6921 - protein, 11 aa, Homo sapiens
  Table 1.2; MAGEB6; ENSG00000176746; HLA -A*02:04,HLA-A*02:07
ALPKSGLLMSL

SEQ ID NO: 6922 - protein, 10 aa, Homo sapiens
  Table 1.2; MAGEB6; ENSG00000176746; HLA -A*11:01
AQFLQKKFEK

SEQ ID NO: 6923 - protein, 8 aa, Homo sapiens
  Table 1.2; MAGEB6; ENSG00000176746; HLA -B*58:01
ASQKAIIF

SEQ ID NO: 6924 - protein, 9 aa, Homo sapiens
  Table 1.2; MAGEB6; ENSG00000176746; HLA -A*03:01,HLA-A*03:02,HLA-A*11:01,HLA-A*31:01
ASQKAIIFK

SEQ ID NO: 6925 - protein, 9 aa, Homo sapiens
  Table 1.2; MAGEB6; ENSG00000176746; HLA -B*08:01
AVKKKACTL

SEQ ID NO: 6926 - protein, 8 aa, Homo sapiens
  Table 1.2; MAGEB6; ENSG00000176746; HLA -A*23:01,HLA-A*24:02,HLA-C*01:02,HLA-C*04:01,HLA-C*14:02
AYAETTKM

SEQ ID NO: 6927 - protein, 9 aa, Homo sapiens
  Table 1.2; MAGEB6; ENSG00000176746; HLA -A*33:03
AYAETTKMR

SEQ ID NO: 6928 - protein, 11 aa, Homo sapiens
  Table 1.2; MAGEB6; ENSG00000176746; HLA -A*24:02
AYAETTKMRVL

SEQ ID NO: 6929 - protein, 9 aa, Homo sapiens
  Table 1.2; MAGEB6; ENSG00000176746; HLA -A*03:01,HLA-A*03:02,HLA-A*11:01
CTLAQFLQK

SEQ ID NO: 6930 - protein, 10 aa, Homo sapiens
  Table 1.2; MAGEB6; ENSG00000176746; HLA -A*11:01
CTLAQFLQKK

SEQ ID NO: 6931 - protein, 9 aa, Homo sapiens
  Table 1.2; MAGEB6; ENSG00000176746; HLA -A*26:01
DAGVSGSKY

SEQ ID NO: 6932 - protein, 9 aa, Homo sapiens
  Table 1.2; MAGEB6; ENSG00000176746; HLA -A*33:01,HLA-A*33:03,HLA-A*68:01
DALIDEVER

SEQ ID NO: 6933 - protein, 8 aa, Homo sapiens
  Table 1.2; MAGEB6; ENSG00000176746; HLA -B*08:01
DAVKKKAC

SEQ ID NO: 6934 - protein, 10 aa, Homo sapiens
  Table 1.2; MAGEB6; ENSG00000176746; HLA -B*08:01
DAVKKKACTL

SEQ ID NO: 6935 - protein, 8 aa, Homo sapiens
  Table 1.2; MAGEB6; ENSG00000176746; HLA -B*51:01
DAVVSYSK

SEQ ID NO: 6936 - protein, 9 aa, Homo sapiens
  Table 1.2; MAGEB6; ENSG00000176746; HLA -B*18:01
DEKSPSTSH

SEQ ID NO: 6937 - protein, 9 aa, Homo sapiens
  Table 1.2; MAGEB6; ENSG00000176746; HLA -A*33:01,HLA-A*33:03,HLA-B*18:01
DEKSPSTSR

SEQ ID NO: 6938 - protein, 9 aa, Homo sapiens
  Table 1.2; MAGEB6; ENSG00000176746; HLA -B*18:01,HLA-B*37:01,HLA-B*44:02,HLA-B*44:03
DEVERALRL

SEQ ID NO: 6939 - protein, 8 aa, Homo sapiens
  Table 1.2; MAGEB6; ENSG00000176746; HLA -B*08:01,HLA-B*18:01
DGILHSIY

SEQ ID NO: 6940 - protein, 9 aa, Homo sapiens
  Table 1.2; MAGEB6; ENSG00000176746; HLA -B*08:01
DLVQDKYVV

SEQ ID NO: 6941 - protein, 10 aa, Homo sapiens
  Table 1.2; MAGEB6; ENSG00000176746; HLA -A*25:01,HLA-A*26:01
DLVQDKYVVY

SEQ ID NO: 6942 - protein, 11 aa, Homo sapiens
  Table 1.2; MAGEB6; ENSG00000176746; HLA -A*33:01
DLVQDKYVVYR

SEQ ID NO: 6943 - protein, 9 aa, Homo sapiens
  Table 1.2; MAGEB6; ENSG00000176746; HLA -A*33:01,HLA-B*08:01
DNALPKSGL

SEQ ID NO: 6944 - protein, 9 aa, Homo sapiens
  Table 1.2; MAGEB6; ENSG00000176746; HLA -B*27:05,HLA-B*35:03,HLA-B*38:01,HLA-B*39:01
DSSGESYTL

SEQ ID NO: 6945 - protein, 10 aa, Homo sapiens
  Table 1.2; MAGEB6; ENSG00000176746; HLA -A*01:01,HLA-A*26:01
DSSNTSPGLY

SEQ ID NO: 6946 - protein, 10 aa, Homo sapiens
  Table 1.2; MAGEB6; ENSG00000176746; HLA -A*68:01
DVAANGQDEK

SEQ ID NO: 6947 - protein, 10 aa, Homo sapiens
  Table 1.2; MAGEB6; ENSG00000176746; HLA -B*27:02
EDALIDEVER

SEQ ID NO: 6948 - protein, 11 aa, Homo sapiens
  Table 1.2; MAGEB6; ENSG00000176746; HLA -B*27:02
EDEESVSASQK

SEQ ID NO: 6949 - protein, 11 aa, Homo sapiens
  Table 1.2; MAGEB6; ENSG00000176746; HLA -B*44:02,HLA-B*44:03
EESVSASQKAI

SEQ ID NO: 6950 - protein, 9 aa, Homo sapiens
  Table 1.2; MAGEB6; ENSG00000176746; HLA -A*29:02
EFLGLLGIY

SEQ ID NO: 6951 - protein, 10 aa, Homo sapiens
  Table 1.2; MAGEB6; ENSG00000176746; HLA -B*35:03
EGILSGDNAL

SEQ ID NO: 6952 - protein, 9 aa, Homo sapiens
  Table 1.2; MAGEB6; ENSG00000176746; HLA -A*01:01,HLA-A*26:01,HLA-A*30:02,HLA-B*15:01,HLA-B*39:01, HLA-C*07:04
EMDSSGESY

SEQ ID NO: 6953 - protein, 11 aa, Homo sapiens
  Table 1.2; MAGEB6; ENSG00000176746; HLA -B*38:01,HLA-B*39:01
EMDSSGESYTL

SEQ ID NO: 6954 - protein, 10 aa, Homo sapiens
  Table 1.2; MAGEB6; ENSG00000176746; HLA -A*33:03
ESHSSSSSSR

SEQ ID NO: 6955 - protein, 8 aa, Homo sapiens
  Table 1.2; MAGEB6; ENSG00000176746; HLA -A*11:01,HLA-A*33:01,HLA-A*33:03
ESYTLVSK

SEQ ID NO: 6956 - protein, 9 aa, Homo sapiens
  Table 1.2; MAGEB6; ENSG00000176746; HLA -A*25:01,HLA-A*26:01,HLA-A*33:01,HLA-A*33:03,HLA-A*68:01, HLA-A*68:02,HLA-B*51:01
ESYTLVSKL

SEQ ID NO: 6957 - protein, 9 aa, Homo sapiens
  Table 1.2; MAGEB6; ENSG00000176746; HLA -A*25:01,HLA-A*26:01,HLA-A*33:03,HLA-A*68:01
ETNGQPQGL

SEQ ID NO: 6958 - protein, 8 aa, Homo sapiens
  Table 1.2; MAGEB6; ENSG00000176746; HLA -B*08:01
ETTKMRVL

SEQ ID NO: 6959 - protein, 9 aa, Homo sapiens
  Table 1.2; MAGEB6; ENSG00000176746; HLA -A*33:01,HLA-A*33:03
ETTKMRVLR

SEQ ID NO: 6960 - protein, 9 aa, Homo sapiens
  Table 1.2; MAGEB6; ENSG00000176746; HLA -A*33:01
EVERALRLR

SEQ ID NO: 6961 - protein, 9 aa, Homo sapiens
  Table 1.2; MAGEB6; ENSG00000176746; HLA -A*68:02
EVWEFLGLL

SEQ ID NO: 6962 - protein, 9 aa, Homo sapiens
  Table 1.2; MAGEB6; ENSG00000176746; HLA -A*23:01,HLA-A*24:02,HLA-A*31:01,HLA-A*33:01,HLA-A*33:03
EYKPYFPQI

SEQ ID NO: 6963 - protein, 10 aa, Homo sapiens
  Table 1.2; MAGEB6; ENSG00000176746; HLA -A*24:02
EYKPYFPQIL

SEQ ID NO: 6964 - protein, 8 aa, Homo sapiens
  Table 1.2; MAGEB6; ENSG00000176746; HLA -B*46:01,HLA-C*03:04
FGVELKEM

SEQ ID NO: 6965 - protein, 9 aa, Homo sapiens
  Table 1.2; MAGEB6; ENSG00000176746; HLA -B*40:01,HLA-B*49:01
GEDEESVSA

SEQ ID NO: 6966 - protein, 9 aa, Homo sapiens
  Table 1.2; MAGEB6; ENSG00000176746; HLA -A*03:02,HLA-A*11:01,HLA-B*27:05
GESYTLVSK

SEQ ID NO: 6967 - protein, 10 aa, Homo sapiens
  Table 1.2; MAGEB6; ENSG00000176746; HLA -A*30:01,HLA-B*40:01,HLA-B*49:01
GESYTLVSKL

SEQ ID NO: 6968 - protein, 11 aa, Homo sapiens
  Table 1.2; MAGEB6; ENSG00000176746; HLA -A*03:01,HLA-A*03:02,HLA-A*11:01,HLA-B*27:02
GILSGDNALPK

SEQ ID NO: 6969 - protein, 10 aa, Homo sapiens
  Table 1.2; MAGEB6; ENSG00000176746; HLA -A*02:01,HLA-A*02:03,HLA-A*02:04,HLA-A*02:07,HLA-A*03:01, HLA-A*23:01,HLA-A*25:01,HLA-A*30:01,HLA-A*32:01,HLA-A*68:02, HLA-B*13:02,HLA-B*46:01,HLA-B*55:01
GIYDGILHSI

SEQ ID NO: 6970 - protein, 11 aa, Homo sapiens
  Table 1.2; MAGEB6; ENSG00000176746; HLA -A*01:01,HLA-A*29:02,HLA-A*30:02,HLA-B*15:01
GIYDGILHSIY

SEQ ID NO: 6971 - protein, 9 aa, Homo sapiens
  Table 1.2; MAGEB6; ENSG00000176746; HLA -A*02:04
GLLGIYDGI

SEQ ID NO: 6972 - protein, 10 aa, Homo sapiens
  Table 1.2; MAGEB6; ENSG00000176746; HLA -A*02:04
GLLGIYDGIL

SEQ ID NO: 6973 - protein, 9 aa, Homo sapiens
  Table 1.2; MAGEB6; ENSG00000176746; HLA -A*02:04
GLLMSLLVV

SEQ ID NO: 6974 - protein, 11 aa, Homo sapiens
  Table 1.2; MAGEB6; ENSG00000176746; HLA -A*03:02
GLTGPQATAEK

SEQ ID NO: 6975 - protein, 11 aa, Homo sapiens
  Table 1.2; MAGEB6; ENSG00000176746; HLA -A*02:04
GLYPHLYEDAL

SEQ ID NO: 6976 - protein, 11 aa, Homo sapiens
  Table 1.2; MAGEB6; ENSG00000176746; HLA -B*07:02
GPRAYAETTKM

SEQ ID NO: 6977 - protein, 11 aa, Homo sapiens
  Table 1.2; MAGEB6; ENSG00000176746; HLA -A*31:01,HLA-B*27:05
GQDEKSPSTSR

SEQ ID NO: 6978 - protein, 9 aa, Homo sapiens
  Table 1.2; MAGEB6; ENSG00000176746; HLA -A*11:01,HLA-A*25:01,HLA-A*26:01,HLA-A*29:02,HLA-A*30:02, HLA-A*32:01,HLA-B*15:01,HLA-B*15:03,HLA-B*46:01,HLA-B*58:01, HLA-C*01:02
GSPDAVVSY

SEQ ID NO: 6979 - protein, 11 aa, Homo sapiens
  Table 1.2; MAGEB6; ENSG00000176746; HLA -A*03:02,HLA-A*11:01,HLA-B*27:02
GSPDAVVSYSK

SEQ ID NO: 6980 - protein, 9 aa, Homo sapiens
  Table 1.2; MAGEB6; ENSG00000176746; HLA -B*13:02
GVSGSKYDV

SEQ ID NO: 6981 - protein, 11 aa, Homo sapiens
  Table 1.2; MAGEB6; ENSG00000176746; HLA -A*02:01
HLYEDALIDEV

SEQ ID NO: 6982 - protein, 11 aa, Homo sapiens
  Table 1.2; MAGEB6; ENSG00000176746; HLA -A*29:02
IITEDLVQDKY

SEQ ID NO: 6983 - protein, 10 aa, Homo sapiens
  Table 1.2; MAGEB6; ENSG00000176746; HLA -A*03:01,HLA-A*03:02
ILSGDNALPK

SEQ ID NO: 6984 - protein, 8 aa, Homo sapiens
  Table 1.2; MAGEB6; ENSG00000176746; HLA -B*51:01,HLA-B*56:01
IPQESQGV

SEQ ID NO: 6985 - protein, 10 aa, Homo sapiens
  Table 1.2; MAGEB6; ENSG00000176746; HLA -B*56:01
IPQESQGVSP

SEQ ID NO: 6986 - protein, 9 aa, Homo sapiens
  Table 1.2; MAGEB6; ENSG00000176746; HLA -A*01:01,HLA-A*03:02,HLA-A*11:01
ITEDLVQDK

SEQ ID NO: 6987 - protein, 10 aa, Homo sapiens
  Table 1.2; MAGEB6; ENSG00000176746; HLA -A*01:01,HLA-A*26:01,HLA-A*29:02,HLA-A*30:02,HLA-B*58:01
ITEDLVQDKY

SEQ ID NO: 6988 - protein, 9 aa, Homo sapiens
  Table 1.2; MAGEB6; ENSG00000176746; HLA -A*02:01,HLA-A*02:07,HLA-A*23:01,HLA-A*24:02,HLA-A*29:02, HLA-A*30:01,HLA-A*32:01,HLA-B*35:01,HLA-B*35:03,HLA-B*38:01, HLA-B*49:01,HLA-B*51:01,HLA-B*55:01,HLA-C*04:01,HLA-C*07:04
IYDGILHSI

SEQ ID NO: 6989 - protein, 10 aa, Homo sapiens
  Table 1.2; MAGEB6; ENSG00000176746; HLA -A*29:02
IYDGILHSIY

SEQ ID NO: 6990 - protein, 8 aa, Homo sapiens
  Table 1.2; MAGEB6; ENSG00000176746; HLA -A*24:02
IYGDARKI

SEQ ID NO: 6991 - protein, 9 aa, Homo sapiens
  Table 1.2; MAGEB6; ENSG00000176746; HLA -A*24:02
IYGDARKII

SEQ ID NO: 6992 - protein, 10 aa, Homo sapiens
  Table 1.2; MAGEB6; ENSG00000176746; HLA -A*25:01,HLA-A*26:01,HLA-A*30:01,HLA-A*30:02,HLA-A*32:01, HLA-B*15:01,HLA-B*15:03,HLA-B*18:01,HLA-B*27:02,HLA-B*37:01, HLA-B*39:01,HLA-B*40:01,HLA-B*40:02,HLA-B*44:02,HLA-B*44:03,
  HLA-B*46:01,HLA-B*49:01,HLA-B*58:01,HLA-C*02:02,HLA-C*16:04
KEMDSSGESY

SEQ ID NO: 6993 - protein, 9 aa, Homo sapiens
  Table 1.2; MAGEB6; ENSG00000176746; HLA -B*37:01,HLA-B*40:01
KESILKADM

SEQ ID NO: 6994 - protein, 10 aa, Homo sapiens
  Table 1.2; MAGEB6; ENSG00000176746; HLA -B*40:01
KESILKADML

SEQ ID NO: 6995 - protein, 11 aa, Homo sapiens
  Table 1.2; MAGEB6; ENSG00000176746; HLA -A*03:01,HLA-A*03:02,HLA-A*11:01
KIITEDLVQDK

SEQ ID NO: 6996 - protein, 8 aa, Homo sapiens
  Table 1.2; MAGEB6; ENSG00000176746; HLA -B*07:02,HLA-B*08:01
KPYFPQIL

SEQ ID NO: 6997 - protein, 9 aa, Homo sapiens
  Table 1.2; MAGEB6; ENSG00000176746; HLA -A*02:07,HLA-B*07:02,HLA-B*35:03,HLA-B*38:01,HLA-C*03:03, HLA-C*03:04,HLA-C*05:01,HLA-C*16:01
LIDEVERAL

SEQ ID NO: 6998 - protein, 11 aa, Homo sapiens
  Table 1.2; MAGEB6; ENSG00000176746; HLA -A*02:07
LIDEVERALRL

SEQ ID NO: 6999 - protein, 9 aa, Homo sapiens
  Table 1.2; MAGEB6; ENSG00000176746; HLA -A*02:01,HLA-A*02:04
LLMSLLVVI

SEQ ID NO: 7000 - protein, 8 aa, Homo sapiens
  Table 1.2; MAGEB6; ENSG00000176746; HLA -B*08:01,HLA-B*51:01
LPKSGLLM

SEQ ID NO: 7001 - protein, 10 aa, Homo sapiens
  Table 1.2; MAGEB6; ENSG00000176746; HLA -B*07:02
LPKSGLLMSL

SEQ ID NO: 7002 - protein, 9 aa, Homo sapiens
  Table 1.2; MAGEB6; ENSG00000176746; HLA -B*54:01,HLA-B*56:01
LPSEGILSG

SEQ ID NO: 7003 - protein, 8 aa, Homo sapiens
  Table 1.2; MAGEB6; ENSG00000176746; HLA -B*08:01
LVQDKYVV

SEQ ID NO: 7004 - protein, 9 aa, Homo sapiens
  Table 1.2; MAGEB6; ENSG00000176746; HLA -A*01:01,HLA-A*11:01,HLA-A*25:01,HLA-A*26:01,HLA-A*29:02, HLA-A*30:02,HLA-A*32:01,HLA-B*15:01,HLA-B*35:01,HLA-B*46:01, HLA-C*02:02,HLA-C*07:04,HLA-C*12:03,HLA-C*16:01
LVQDKYVVY

SEQ ID NO: 7005 - protein, 10 aa, Homo sapiens
  Table 1.2; MAGEB6; ENSG00000176746; HLA -A*03:02,HLA-A*11:01,HLA-A*31:01,HLA-A*33:01,HLA-A*33:03, HLA-A*68:01
LVQDKYVVYR

SEQ ID NO: 7006 - protein, 9 aa, Homo sapiens
  Table 1.2; MAGEB6; ENSG00000176746; HLA -A*02:07,HLA-A*30:01,HLA-A*68:02,HLA-B*35:01,HLA-B*35:03, HLA-B*40:01,HLA-B*46:01,HLA-B*54:01,HLA-C*02:02,HLA-C*03:03, HLA-C*03:04
LVVAFGVEL

SEQ ID NO: 7007 - protein, 8 aa, Homo sapiens
  Table 1.2; MAGEB6; ENSG00000176746; HLA -A*30:02
MDSSGESY

SEQ ID NO: 7008 - protein, 10 aa, Homo sapiens
  Table 1.2; MAGEB6; ENSG00000176746; HLA -B*38:01,HLA-B*39:01
MDSSGESYTL

SEQ ID NO: 7009 - protein, 8 aa, Homo sapiens
  Table 1.2; MAGEB6; ENSG00000176746; HLA -B*08:01
NALPKSGL

SEQ ID NO: 7010 - protein, 9 aa, Homo sapiens
  Table 1.2; MAGEB6; ENSG00000176746; HLA -B*08:01
NALPKSGLL

SEQ ID NO: 7011 - protein, 9 aa, Homo sapiens
  Table 1.2; MAGEB6; ENSG00000176746; HLA -A*01:01,HLA-B*35:01,HLA-B*38:01,HLA-B*58:01,HLA-C*05:01
NSDPPCYEF

SEQ ID NO: 7012 - protein, 10 aa, Homo sapiens
  Table 1.2; MAGEB6; ENSG00000176746; HLA -A*01:01
NSDPPCYEFL

SEQ ID NO: 7013 - protein, 10 aa, Homo sapiens
  Table 1.2; MAGEB6; ENSG00000176746; HLA -A*68:01,HLA-A*68:02
NTSPGLYPHL

SEQ ID NO: 7014 - protein, 11 aa, Homo sapiens
  Table 1.2; MAGEB6; ENSG00000176746; HLA -A*01:01,HLA-A*29:02,HLA-A*30:02
NTSPGLYPHLY

SEQ ID NO: 7015 - protein, 9 aa, Homo sapiens
  Table 1.2; MAGEB6; ENSG00000176746; HLA -B*27:02
PDAVVSYSK

SEQ ID NO: 7016 - protein, 11 aa, Homo sapiens
  Table 1.2; MAGEB6; ENSG00000176746; HLA -A*01:01,HLA-A*30:02
PTGSPDAVVSY

SEQ ID NO: 7017 - protein, 9 aa, Homo sapiens
  Table 1.2; MAGEB6; ENSG00000176746; HLA -A*31:01,HLA-A*33:01,HLA-A*33:03
PYFPQILNR

SEQ ID NO: 7018 - protein, 10 aa, Homo sapiens
  Table 1.2; MAGEB6; ENSG00000176746; HLA -A*30:01,HLA-B*40:01,HLA-B*44:02,HLA-B*44:03
QETNGQPQGL

SEQ ID NO: 7019 - protein, 10 aa, Homo sapiens
  Table 1.2; MAGEB6; ENSG00000176746; HLA -B*54:01,HLA-B*56:01
QPQGLTGPQA

SEQ ID NO: 7020 - protein, 9 aa, Homo sapiens
  Table 1.2; MAGEB6; ENSG00000176746; HLA -A*32:01,HLA-B*15:03,HLA-B*46:01,HLA-B*58:01,HLA-C*02:02, HLA-C*03:04,HLA-C*12:03,HLA-C*16:04
RAYAETTKM

SEQ ID NO: 7021 - protein, 9 aa, Homo sapiens
  Table 1.2; MAGEB6; ENSG00000176746; HLA -A*03:01,HLA-A*03:02
RLSKDAVKK

SEQ ID NO: 7022 - protein, 10 aa, Homo sapiens
  Table 1.2; MAGEB6; ENSG00000176746; HLA -A*03:01,HLA-A*03:02
RLSKDAVKKK

SEQ ID NO: 7023 - protein, 11 aa, Homo sapiens
  Table 1.2; MAGEB6; ENSG00000176746; HLA -B*39:01
RQETNGQPQGL

SEQ ID NO: 7024 - protein, 11 aa, Homo sapiens
  Table 1.2; MAGEB6; ENSG00000176746; HLA -A*30:02
RQVCNSDPPCY

SEQ ID NO: 7025 - protein, 10 aa, Homo sapiens
  Table 1.2; MAGEB6; ENSG00000176746; HLA -B*57:01
RTSQHLVVAF

SEQ ID NO: 7026 - protein, 9 aa, Homo sapiens
  Table 1.2; MAGEB6; ENSG00000176746; HLA -B*35:01,HLA-B*37:01,HLA-B*58:01,HLA-C*02:02,HLA-C*12:03, HLA-C*16:01
SASQKAIIF

SEQ ID NO: 7027 - protein, 10 aa, Homo sapiens
  Table 1.2; MAGEB6; ENSG00000176746; HLA -A*03:01,HLA-A*03:02,HLA-A*11:01,HLA-A*68:01
SASQKAIIFK

SEQ ID NO: 7028 - protein, 8 aa, Homo sapiens
  Table 1.2; MAGEB6; ENSG00000176746; HLA -B*37:01
SDPPCYEF

SEQ ID NO: 7029 - protein, 11 aa, Homo sapiens
  Table 1.2; MAGEB6; ENSG00000176746; HLA -A*30:01,HLA-B*40:01
SEGILSGDNAL

SEQ ID NO: 7030 - protein, 10 aa, Homo sapiens
  Table 1.2; MAGEB6; ENSG00000176746; HLA -A*03:02,HLA-A*11:01,HLA-A*68:01,HLA-B*27:02
SGESYTLVSK

SEQ ID NO: 7031 - protein, 9 aa, Homo sapiens
  Table 1.2; MAGEB6; ENSG00000176746; HLA -A*03:01,HLA-A*03:02,HLA-A*11:01
SILKADMLK

SEQ ID NO: 7032 - protein, 8 aa, Homo sapiens
  Table 1.2; MAGEB6; ENSG00000176746; HLA -A*30:02
SNTSPGLY

SEQ ID NO: 7033 - protein, 11 aa, Homo sapiens
  Table 1.2; MAGEB6; ENSG00000176746; HLA -A*01:01,HLA-A*30:02,HLA-B*35:01,HLA-B*55:01
SPDAGVSGSKY

SEQ ID NO: 7034 - protein, 8 aa, Homo sapiens
  Table 1.2; MAGEB6; ENSG00000176746; HLA -A*01:01,HLA-B*18:01,HLA-B*35:01,HLA-B*55:01
SPDAVVSY

SEQ ID NO: 7035 - protein, 8 aa, Homo sapiens
  Table 1.2; MAGEB6; ENSG00000176746; HLA -B*07:02
SPGLYPHL

SEQ ID NO: 7036 - protein, 9 aa, Homo sapiens
  Table 1.2; MAGEB6; ENSG00000176746; HLA -B*35:01
SPGLYPHLY

SEQ ID NO: 7037 - protein, 10 aa, Homo sapiens
  Table 1.2; MAGEB6; ENSG00000176746; HLA -B*07:02,HLA-B*56:01
SPSTSHDVSV

SEQ ID NO: 7038 - protein, 10 aa, Homo sapiens
  Table 1.2; MAGEB6; ENSG00000176746; HLA -B*07:02,HLA-C*07:02
SPSTSRDASV

SEQ ID NO: 7039 - protein, 10 aa, Homo sapiens
  Table 1.2; MAGEB6; ENSG00000176746; HLA -B*56:01
SPTGSPDAGV

SEQ ID NO: 7040 - protein, 9 aa, Homo sapiens
  Table 1.2; MAGEB6; ENSG00000176746; HLA -B*56:01
SPTGSPDAV

SEQ ID NO: 7041 - protein, 10 aa, Homo sapiens
  Table 1.2; MAGEB6; ENSG00000176746; HLA -B*35:03,HLA-B*56:01
SPTGSPDAVV

SEQ ID NO: 7042 - protein, 8 aa, Homo sapiens
  Table 1.2; MAGEB6; ENSG00000176746; HLA -A*32:01,HLA-B*13:02,HLA-B*15:01,HLA-B*15:03,HLA-B*18:01, HLA-B*37:01,HLA-C*07:04
SQHLVVAF

SEQ ID NO: 7043 - protein, 9 aa, Homo sapiens
  Table 1.2; MAGEB6; ENSG00000176746; HLA -A*31:01,HLA-A*33:01,HLA-A*33:03
SQKAIIFKR

SEQ ID NO: 7044 - protein, 11 aa, Homo sapiens
  Table 1.2; MAGEB6; ENSG00000176746; HLA -A*03:02,HLA-A*11:01,HLA-A*68:01
SSGESYTLVSK

SEQ ID NO: 7045 - protein, 9 aa, Homo sapiens
  Table 1.2; MAGEB6; ENSG00000176746; HLA -A*01:01,HLA-A*30:02,HLA-B*15:03
SSNTSPGLY

SEQ ID NO: 7046 - protein, 8 aa, Homo sapiens
  Table 1.2; MAGEB6; ENSG00000176746; HLA -C*16:01
SSSSRACL

SEQ ID NO: 7047 - protein, 9 aa, Homo sapiens
  Table 1.2; MAGEB6; ENSG00000176746; HLA -B*07:02,HLA-C*16:01
SSSSSRACL

SEQ ID NO: 7048 - protein, 9 aa, Homo sapiens
  Table 1.2; MAGEB6; ENSG00000176746; HLA -B*13:02
SVSASQKAI

SEQ ID NO: 7049 - protein, 8 aa, Homo sapiens
  Table 1.2; MAGEB6; ENSG00000176746; HLA -A*23:01,HLA-A*24:02,HLA-C*14:02
SYTLVSKL

SEQ ID NO: 7050 - protein, 9 aa, Homo sapiens
  Table 1.2; MAGEB6; ENSG00000176746; HLA -A*01:01,HLA-B*18:01,HLA-B*44:02,HLA-B*44:03
TEDLVQDKY

SEQ ID NO: 7051 - protein, 10 aa, Homo sapiens
  Table 1.2; MAGEB6; ENSG00000176746; HLA -B*49:01
TEDLVQDKYV

SEQ ID NO: 7052 - protein, 8 aa, Homo sapiens
  Table 1.2; MAGEB6; ENSG00000176746; HLA -B*18:01
TEEEVWEF

SEQ ID NO: 7053 - protein, 10 aa, Homo sapiens
  Table 1.2; MAGEB6; ENSG00000176746; HLA -A*30:02,HLA-B*35:01,HLA-B*39:01,HLA-C*07:04,HLA-C*07:06
TGSPDAVVSY

SEQ ID NO: 7054 - protein, 9 aa, Homo sapiens
  Table 1.2; MAGEB6; ENSG00000176746; HLA -A*03:01,HLA-A*03:02
TLAQFLQKK

SEQ ID NO: 7055 - protein, 8 aa, Homo sapiens
  Table 1.2; MAGEB6; ENSG00000176746; HLA -B*08:01
TLVSKLGL

SEQ ID NO: 7056 - protein, 9 aa, Homo sapiens
  Table 1.2; MAGEB6; ENSG00000176746; HLA -A*02:07
TSPGLYPHL

SEQ ID NO: 7057 - protein, 10 aa, Homo sapiens
  Table 1.2; MAGEB6; ENSG00000176746; HLA -A*01:01,HLA-A*29:02,HLA-A*30:02
TSPGLYPHLY

SEQ ID NO: 7058 - protein, 9 aa, Homo sapiens
  Table 1.2; MAGEB6; ENSG00000176746; HLA -A*30:02,HLA-A*32:01,HLA-A*33:01,HLA-B*35:01,HLA-B*57:01, HLA-B*58:01,HLA-C*12:03,HLA-C*16:01
TSQHLVVAF

SEQ ID NO: 7059 - protein, 9 aa, Homo sapiens
  Table 1.2; MAGEB6; ENSG00000176746; HLA -A*30:02
VCNSDPPCY

SEQ ID NO: 7060 - protein, 8 aa, Homo sapiens
  Table 1.2; MAGEB6; ENSG00000176746; HLA -B*56:01
VPQESQGA

SEQ ID NO: 7061 - protein, 10 aa, Homo sapiens
  Table 1.2; MAGEB6; ENSG00000176746; HLA -B*56:01
VPQESQGASP

SEQ ID NO: 7062 - protein, 8 aa, Homo sapiens
  Table 1.2; MAGEB6; ENSG00000176746; HLA -B*15:01,HLA-B*15:03
VQDKYVVY

SEQ ID NO: 7063 - protein, 9 aa, Homo sapiens
  Table 1.2; MAGEB6; ENSG00000176746; HLA -A*31:01
VQDKYVVYR

SEQ ID NO: 7064 - protein, 11 aa, Homo sapiens
  Table 1.2; MAGEB6; ENSG00000176746; HLA -A*03:01,HLA-A*03:02,HLA-A*11:01
VSASQKAIIFK

SEQ ID NO: 7065 - protein, 8 aa, Homo sapiens
  Table 1.2; MAGEB6; ENSG00000176746; HLA -C*03:03,HLA-C*03:04
VVAFGVEL

SEQ ID NO: 7066 - protein, 9 aa, Homo sapiens
  Table 1.2; MAGEB6; ENSG00000176746; HLA -A*03:02,HLA-A*11:01
VVAFGVELK

SEQ ID NO: 7067 - protein, 9 aa, Homo sapiens
  Table 1.2; MAGEB6; ENSG00000176746; HLA -B*49:01
WEFLGLLGI

SEQ ID NO: 7068 - protein, 9 aa, Homo sapiens
  Table 1.2; MAGEB6; ENSG00000176746; HLA -A*01:01
YAETTKMRV

SEQ ID NO: 7069 - protein, 8 aa, Homo sapiens
  Table 1.2; MAGEB6; ENSG00000176746; HLA -A*30:01,HLA-B*13:02,HLA-B*37:01
YDGILHSI

SEQ ID NO: 7070 - protein, 11 aa, Homo sapiens
  Table 1.2; MAGEB6; ENSG00000176746; HLA -B*27:02
YDVAANGQDEK

SEQ ID NO: 7071 - protein, 9 aa, Homo sapiens
  Table 1.2; MAGEB6; ENSG00000176746; HLA -A*30:01,HLA-B*40:01,HLA-B*49:01
YEDALIDEV

SEQ ID NO: 7072 - protein, 10 aa, Homo sapiens
  Table 1.2; MAGEB6; ENSG00000176746; HLA -B*44:02
YEFLWGPRAY

SEQ ID NO: 7073 - protein, 8 aa, Homo sapiens
  Table 1.2; MAGEB6; ENSG00000176746; HLA -B*54:01
YPHLYEDA

SEQ ID NO: 7074 - protein, 9 aa, Homo sapiens
  Table 1.2; MAGEB6; ENSG00000176746; HLA -B*35:01,HLA-B*35:03
YPHLYEDAL

SEQ ID NO: 7075 - protein, 8 aa, Homo sapiens
  Table 1.2; MAGEC1; ENSG00000155495; HLA -A*30:01,HLA-B*18:01,HLA-B*37:01,HLA-B*40:01,HLA-B*40:02, HLA-B*44:02,HLA-B*44:03,HLA-B*49:01
AEMLTNVI

SEQ ID NO: 7076 - protein, 11 aa, Homo sapiens
  Table 1.2; MAGEC1; ENSG00000155495; HLA -A*30:02,HLA-B*27:02,HLA-B*40:01,HLA-B*44:02,HLA-B*44:03, HLA-C*16:04
AEMLTNVISRY

SEQ ID NO: 7077 - protein, 9 aa, Homo sapiens
  Table 1.2; MAGEC1; ENSG00000155495; HLA -A*02:01
AMLKNTVPI

SEQ ID NO: 7078 - protein, 11 aa, Homo sapiens
  Table 1.2; MAGEC1; ENSG00000155495; HLA -A*23:01
AMLKNTVPITF

SEQ ID NO: 7079 - protein, 8 aa, Homo sapiens
  Table 1.2; MAGEC1; ENSG00000155495; HLA -B*37:01
AQSAFEGF

SEQ ID NO: 7080 - protein, 9 aa, Homo sapiens
  Table 1.2; MAGEC1; ENSG00000155495; HLA -A*02:01,HLA-A*30:01,HLA-A*68:02,HLA-B*13:02,HLA-B*27:05, HLA-B*37:01,HLA-B*39:01,HLA-B*56:01,HLA-C*07:04
AQSPLQIPV

SEQ ID NO: 7081 - protein, 9 aa, Homo sapiens
  Table 1.2; MAGEC1; ENSG00000155495; HLA -B*13:02,HLA-B*37:01,HLA-C*06:02
AQSPLQRPV

SEQ ID NO: 7082 - protein, 9 aa, Homo sapiens
  Table 1.2; MAGEC1; ENSG00000155495; HLA -B*13:02,HLA-B*39:01
AQSPLQSPV

SEQ ID NO: 7083 - protein, 9 aa, Homo sapiens
  Table 1.2; MAGEC1; ENSG00000155495; HLA -A*02:01,HLA-B*13:02,HLA-B*27:05,HLA-B*39:01,HLA-B*56:01
AQSSLQIPV

SEQ ID NO: 7084 - protein, 8 aa, Homo sapiens
  Table 1.2; MAGEC1; ENSG00000155495; HLA -B*37:01
AQSTFEGF

SEQ ID NO: 7085 - protein, 9 aa, Homo sapiens
  Table 1.2; MAGEC1; ENSG00000155495; HLA -A*30:01,HLA-B*13:02,HLA-B*58:01
ASSSTLVSI

SEQ ID NO: 7086 - protein, 10 aa, Homo sapiens
  Table 1.2; MAGEC1; ENSG00000155495; HLA -A*30:02,HLA-B*27:05,HLA-B*58:01
ASSSVMSPSF

SEQ ID NO: 7087 - protein, 9 aa, Homo sapiens
  Table 1.2; MAGEC1; ENSG00000155495; HLA -A*33:01,HLA-A*33:03,HLA-A*68:01,HLA-B*51:01,HLA-C*07:06
DALKDVEER

SEQ ID NO: 7088 - protein, 10 aa, Homo sapiens
  Table 1.2; MAGEC1; ENSG00000155495; HLA -B*18:01,HLA-B*44:02,HLA-B*44:03
DEKVDELARF

SEQ ID NO: 7089 - protein, 8 aa, Homo sapiens
  Table 1.2; MAGEC1; ENSG00000155495; HLA -B*18:01
DELARFLL

SEQ ID NO: 7090 - protein, 10 aa, Homo sapiens
  Table 1.2; MAGEC1; ENSG00000155495; HLA -A*30:01,HLA-B*18:01,HLA-B*40:01
DEYTSSSDTL

SEQ ID NO: 7091 - protein, 10 aa, Homo sapiens
  Table 1.2; MAGEC1; ENSG00000155495; HLA -A*25:01,HLA-A*26:01
DMPTAGMPSL

SEQ ID NO: 7092 - protein, 8 aa, Homo sapiens
  Table 1.2; MAGEC1; ENSG00000155495; HLA -B*35:01,HLA-B*35:03,HLA-B*55:01
DPDDSYVF

SEQ ID NO: 7093 - protein, 9 aa, Homo sapiens
  Table 1.2; MAGEC1; ENSG00000155495; HLA -B*51:01
DPDDSYVFV

SEQ ID NO: 7094 - protein, 8 aa, Homo sapiens
  Table 1.2; MAGEC1; ENSG00000155495; HLA -B*51:01
DSLSPLEI

SEQ ID NO: 7095 - protein, 8 aa, Homo sapiens
  Table 1.2; MAGEC1; ENSG00000155495; HLA -B*51:01
DSLSPLQI

SEQ ID NO: 7096 - protein, 9 aa, Homo sapiens
  Table 1.2; MAGEC1; ENSG00000155495; HLA -A*33:01
DSLSSLHFP

SEQ ID NO: 7097 - protein, 9 aa, Homo sapiens
  Table 1.2; MAGEC1; ENSG00000155495; HLA -B*35:03
DSLTDSESL

SEQ ID NO: 7098 - protein, 8 aa, Homo sapiens
  Table 1.2; MAGEC1; ENSG00000155495; HLA -A*68:01
DSSDPLQR

SEQ ID NO: 7099 - protein, 9 aa, Homo sapiens
  Table 1.2; MAGEC1; ENSG00000155495; HLA -A*25:01,HLA-A*33:01,HLA-A*68:02,HLA-B*18:01,HLA-B*51:01
DSYVFVNTL

SEQ ID NO: 7100 - protein, 9 aa, Homo sapiens
  Table 1.2; MAGEC1; ENSG00000155495; HLA -B*35:03
DTLLESDSL

SEQ ID NO: 7101 - protein, 10 aa, Homo sapiens
  Table 1.2; MAGEC1; ENSG00000155495; HLA -A*33:01
DTLYPLQSPQ

SEQ ID NO: 7102 - protein, 9 aa, Homo sapiens
  Table 1.2; MAGEC1; ENSG00000155495; HLA -B*08:01
DVEERAQAI

SEQ ID NO: 7103 - protein, 9 aa, Homo sapiens
  Table 1.2; MAGEC1; ENSG00000155495; HLA -A*25:01,HLA-A*26:01,HLA-A*33:01,HLA-A*33:03,HLA-A*68:01, HLA-C*07:06
DVLSGIGVR

SEQ ID NO: 7104 - protein, 10 aa, Homo sapiens
  Table 1.2; MAGEC1; ENSG00000155495; HLA -A*26:01,HLA-A*68:02,HLA-B*54:01
DVLSGIGVRA

SEQ ID NO: 7105 - protein, 8 aa, Homo sapiens
  Table 1.2; MAGEC1; ENSG00000155495; HLA -B*18:01
EDSLSPHY

SEQ ID NO: 7106 - protein, 9 aa, Homo sapiens
  Table 1.2; MAGEC1; ENSG00000155495; HLA -B*37:01,HLA-B*44:02
EDSLSPHYF

SEQ ID NO: 7107 - protein, 9 aa, Homo sapiens
  Table 1.2; MAGEC1; ENSG00000155495; HLA -B*37:01
EDSLSPLHF

SEQ ID NO: 7108 - protein, 9 aa, Homo sapiens
  Table 1.2; MAGEC1; ENSG00000155495; HLA -B*37:01
EDSLSSLHF

SEQ ID NO: 7109 - protein, 8 aa, Homo sapiens
  Table 1.2; MAGEC1; ENSG00000155495; HLA -B*18:01
EDSMSPLY

SEQ ID NO: 7110 - protein, 9 aa, Homo sapiens
  Table 1.2; MAGEC1; ENSG00000155495; HLA -A*33:03,HLA-A*68:01
EDSSDPLQR

SEQ ID NO: 7111 - protein, 11 aa, Homo sapiens
  Table 1.2; MAGEC1; ENSG00000155495; HLA -B*49:01
EEFQSSLQSPV

SEQ ID NO: 7112 - protein, 10 aa, Homo sapiens
  Table 1.2; MAGEC1; ENSG00000155495; HLA -B*39:01,HLA-B*44:02,HLA-B*44:03
EESSSPVDEY

SEQ ID NO: 7113 - protein, 8 aa, Homo sapiens
  Table 1.2; MAGEC1; ENSG00000155495; HLA -B*18:01
EEVIWDVL

SEQ ID NO: 7114 - protein, 9 aa, Homo sapiens
  Table 1.2; MAGEC1; ENSG00000155495; HLA -C*05:01
EGDDTQSPL

SEQ ID NO: 7115 - protein, 11 aa, Homo sapiens
  Table 1.2; MAGEC1; ENSG00000155495; HLA -A*33:01,HLA-A*33:03,HLA-A*68:01
EGEDSSDPLQR

SEQ ID NO: 7116 - protein, 8 aa, Homo sapiens
  Table 1.2; MAGEC1; ENSG00000155495; HLA -B*51:01
EGFAQSSL

SEQ ID NO: 7117 - protein, 10 aa, Homo sapiens
  Table 1.2; MAGEC1; ENSG00000155495; HLA -A*68:01
EGPAQSPLQR

SEQ ID NO: 7118 - protein, 9 aa, Homo sapiens
  Table 1.2; MAGEC1; ENSG00000155495; HLA -A*33:01,HLA-A*33:03
EHFAFGEPR

SEQ ID NO: 7119 - protein, 10 aa, Homo sapiens
  Table 1.2; MAGEC1; ENSG00000155495; HLA -A*29:02
ELARFLLLKY

SEQ ID NO: 7120 - protein, 9 aa, Homo sapiens
  Table 1.2; MAGEC1; ENSG00000155495; HLA -A*31:01,HLA-A*33:01,HLA-A*33:03,HLA-A*68:01,HLA-C*07:06
EMLTNVISR

SEQ ID NO: 7121 - protein, 10 aa, Homo sapiens
  Table 1.2; MAGEC1; ENSG00000155495; HLA -A*01:01,HLA-A*25:01,HLA-A*26:01,HLA-A*29:02,HLA-A*30:02, HLA-B*44:02,HLA-B*44:03
EMLTNVISRY

SEQ ID NO: 7122 - protein, 8 aa, Homo sapiens
  Table 1.2; MAGEC1; ENSG00000155495; HLA -B*35:01
EPLFTYTL

SEQ ID NO: 7123 - protein, 10 aa, Homo sapiens
  Table 1.2; MAGEC1; ENSG00000155495; HLA -A*25:01,HLA-A*26:01
ESAQSAFEGF

SEQ ID NO: 7124 - protein, 10 aa, Homo sapiens
  Table 1.2; MAGEC1; ENSG00000155495; HLA -A*25:01,HLA-A*26:01
ESAQSTFEGF

SEQ ID NO: 7125 - protein, 8 aa, Homo sapiens
  Table 1.2; MAGEC1; ENSG00000155495; HLA -A*01:01
ESEPLFTY

SEQ ID NO: 7126 - protein, 11 aa, Homo sapiens
  Table 1.2; MAGEC1; ENSG00000155495; HLA -A*25:01
ESPLQSPVISF

SEQ ID NO: 7127 - protein, 9 aa, Homo sapiens
  Table 1.2; MAGEC1; ENSG00000155495; HLA -A*01:01,HLA-A*25:01,HLA-A*26:01,HLA-A*30:02,HLA-B*35:01
ESSSPVDEY

SEQ ID NO: 7128 - protein, 10 aa, Homo sapiens
  Table 1.2; MAGEC1; ENSG00000155495; HLA -A*25:01
ESTQSPFEGF

SEQ ID NO: 7129 - protein, 8 aa, Homo sapiens
  Table 1.2; MAGEC1; ENSG00000155495; HLA -A*01:01
EVDPDDSY

SEQ ID NO: 7130 - protein, 9 aa, Homo sapiens
  Table 1.2; MAGEC1; ENSG00000155495; HLA -C*05:01
EVDPDDSYV

SEQ ID NO: 7131 - protein, 10 aa, Homo sapiens
  Table 1.2; MAGEC1; ENSG00000155495; HLA -A*25:01,HLA-A*26:01,HLA-B*35:01,HLA-B*38:01,HLA-C*03:03
EVDPDDSYVF

SEQ ID NO: 7132 - protein, 11 aa, Homo sapiens
  Table 1.2; MAGEC1; ENSG00000155495; HLA -A*01:01,HLA-A*02:07,HLA-A*68:02
EVDPDDSYVFV

SEQ ID NO: 7133 - protein, 10 aa, Homo sapiens
  Table 1.2; MAGEC1; ENSG00000155495; HLA -A*25:01,HLA-A*26:01
EVIKRKVVEF

SEQ ID NO: 7134 - protein, 10 aa, Homo sapiens
  Table 1.2; MAGEC1; ENSG00000155495; HLA -A*25:01,HLA-A*26:01,HLA-A*68:02
EVIWDVLSGI

SEQ ID NO: 7135 - protein, 9 aa, Homo sapiens
  Table 1.2; MAGEC1; ENSG00000155495; HLA -A*26:01,HLA-A*33:01,HLA-A*33:03,HLA-A*68:01,HLA-C*07:06
EVPNSSPPR

SEQ ID NO: 7136 - protein, 10 aa, Homo sapiens
  Table 1.2; MAGEC1; ENSG00000155495; HLA -A*25:01,HLA-A*26:01,HLA-A*29:02
EVPNSSPPRY

SEQ ID NO: 7137 - protein, 9 aa, Homo sapiens
  Table 1.2; MAGEC1; ENSG00000155495; HLA -A*24:02
EYTSSSDTL

SEQ ID NO: 7138 - protein, 9 aa, Homo sapiens
  Table 1.2; MAGEC1; ENSG00000155495; HLA -A*02:03,HLA-A*30:01,HLA-A*68:02,HLA-B*15:03,HLA-B*35:01, HLA-B*35:03,HLA-B*40:01,HLA-B*46:01,HLA-B*51:01,HLA-B*54:01, HLA-C*02:02,HLA-C*03:03,HLA-C*03:04,HLA-C*12:03,HLA-C*16:01,
  HLA-C*16:02,HLA-C*16:04
FAFGEPREL

SEQ ID NO: 7139 - protein, 8 aa, Homo sapiens
  Table 1.2; MAGEC1; ENSG00000155495; HLA -B*51:01
FAQSPLQI

SEQ ID NO: 7140 - protein, 10 aa, Homo sapiens
  Table 1.2; MAGEC1; ENSG00000155495; HLA -A*68:02,HLA-B*54:01
FAQSPLQIPV

SEQ ID NO: 7141 - protein, 8 aa, Homo sapiens
  Table 1.2; MAGEC1; ENSG00000155495; HLA -B*51:01
FAQSSLQI

SEQ ID NO: 7142 - protein, 11 aa, Homo sapiens
  Table 1.2; MAGEC1; ENSG00000155495; HLA -B*49:01
FEGFAQSPLQI

SEQ ID NO: 7143 - protein, 9 aa, Homo sapiens
  Table 1.2; MAGEC1; ENSG00000155495; HLA -A*30:01,HLA-B*40:01,HLA-B*40:02,HLA-B*49:01
FEGFAQSSL

SEQ ID NO: 7144 - protein, 11 aa, Homo sapiens
  Table 1.2; MAGEC1; ENSG00000155495; HLA -B*49:01
FEGFAQSSLQI

SEQ ID NO: 7145 - protein, 8 aa, Homo sapiens
  Table 1.2; MAGEC1; ENSG00000155495; HLA -A*30:01,HLA-B*18:01,HLA-B*40:01
FEGFPQSL

SEQ ID NO: 7146 - protein, 9 aa, Homo sapiens
  Table 1.2; MAGEC1; ENSG00000155495; HLA -A*30:01,HLA-B*40:01,HLA-B*49:01
FEGFPQSLL

SEQ ID NO: 7147 - protein, 8 aa, Homo sapiens
  Table 1.2; MAGEC1; ENSG00000155495; HLA -B*49:01
FEGFPQSV

SEQ ID NO: 7148 - protein, 9 aa, Homo sapiens
  Table 1.2; MAGEC1; ENSG00000155495; HLA -A*30:01,HLA-B*40:01,HLA-B*40:02,HLA-B*49:01
FEGFPQSVL

SEQ ID NO: 7149 - protein, 9 aa, Homo sapiens
  Table 1.2; MAGEC1; ENSG00000155495; HLA -A*23:01
FFSSALLSI

SEQ ID NO: 7150 - protein, 10 aa, Homo sapiens
  Table 1.2; MAGEC1; ENSG00000155495; HLA -A*29:02
FFSSALLSIF

SEQ ID NO: 7151 - protein, 9 aa, Homo sapiens
  Table 1.2; MAGEC1; ENSG00000155495; HLA -A*02:03
FLAMLKNTV

SEQ ID NO: 7152 - protein, 8 aa, Homo sapiens
  Table 1.2; MAGEC1; ENSG00000155495; HLA -B*51:01
FPQSLLQI

SEQ ID NO: 7153 - protein, 11 aa, Homo sapiens
  Table 1.2; MAGEC1; ENSG00000155495; HLA -B*35:01,HLA-B*35:03,HLA-B*54:01,HLA-B*55:01,HLA-B*56:01
FPQSPLQGEEF

SEQ ID NO: 7154 - protein, 8 aa, Homo sapiens
  Table 1.2; MAGEC1; ENSG00000155495; HLA -B*51:01
FPQSPLQI

SEQ ID NO: 7155 - protein, 10 aa, Homo sapiens
  Table 1.2; MAGEC1; ENSG00000155495; HLA -B*54:01,HLA-B*56:01
FPQSPLQIPG

SEQ ID NO: 7156 - protein, 10 aa, Homo sapiens
  Table 1.2; MAGEC1; ENSG00000155495; HLA -B*35:01,HLA-B*35:03,HLA-B*54:01,HLA-B*56:01
FPQSPLQIPM

SEQ ID NO: 7157 - protein, 10 aa, Homo sapiens
  Table 1.2; MAGEC1; ENSG00000155495; HLA -B*54:01,HLA-B*56:01
FPQSPLQIPV

SEQ ID NO: 7158 - protein, 11 aa, Homo sapiens
  Table 1.2; MAGEC1; ENSG00000155495; HLA -B*54:01
FPQSPLQIPVS

SEQ ID NO: 7159 - protein, 11 aa, Homo sapiens
  Table 1.2; MAGEC1; ENSG00000155495; HLA -B*35:01,HLA-B*35:03,HLA-B*38:01,HLA-B*39:01,HLA-B*55:01
FPQSPQGEDSL

SEQ ID NO: 7160 - protein, 8 aa, Homo sapiens
  Table 1.2; MAGEC1; ENSG00000155495; HLA -B*51:01
FPQSVLQI

SEQ ID NO: 7161 - protein, 10 aa, Homo sapiens
  Table 1.2; MAGEC1; ENSG00000155495; HLA -B*54:01,HLA-B*56:01
FPQSVLQIPV

SEQ ID NO: 7162 - protein, 9 aa, Homo sapiens
  Table 1.2; MAGEC1; ENSG00000155495; HLA -A*25:01,HLA-A*30:01,HLA-B*07:02,HLA-B*08:01,HLA-B*15:03, HLA-B*27:05,HLA-B*35:01,HLA-B*35:03,HLA-B*38:01,HLA-B*39:01, HLA-B*40:01,HLA-B*46:01,HLA-B*51:01,HLA-B*54:01,HLA-B*55:01,
  HLA-B*56:01,HLA-C*01:02,HLA-C*02:02,HLA-C*03:03,HLA-C*03:04, HLA-C*04:01,HLA-C*05:01,HLA-C*07:02,HLA-C*07:04,HLA-C*12:03, HLA-C*14:02
FPSSTSSSL

SEQ ID NO: 7163 - protein, 9 aa, Homo sapiens
  Table 1.2; MAGEC1; ENSG00000155495; HLA -B*07:02,HLA-B*08:01,HLA-B*35:01,HLA-B*35:03,HLA-B*55:01
FPSSYKDAL

SEQ ID NO: 7164 - protein, 8 aa, Homo sapiens
  Table 1.2; MAGEC1; ENSG00000155495; HLA -B*54:01
FPVIFRKA

SEQ ID NO: 7165 - protein, 9 aa, Homo sapiens
  Table 1.2; MAGEC1; ENSG00000155495; HLA -A*68:02,HLA-B*13:02
FQSSLQSPV

SEQ ID NO: 7166 - protein, 11 aa, Homo sapiens
  Table 1.2; MAGEC1; ENSG00000155495; HLA -B*38:01,HLA-B*39:01
FQSSLQSPVSI

SEQ ID NO: 7167 - protein, 9 aa, Homo sapiens
  Table 1.2; MAGEC1; ENSG00000155495; HLA -A*01:01,HLA-A*32:01,HLA-B*46:01,HLA-B*58:01,HLA-C*05:01
FSERTQSTF

SEQ ID NO: 7168 - protein, 9 aa, Homo sapiens
  Table 1.2; MAGEC1; ENSG00000155495; HLA -B*57:01,HLA-C*02:02
FSSALLSIF

SEQ ID NO: 7169 - protein, 9 aa, Homo sapiens
  Table 1.2; MAGEC1; ENSG00000155495; HLA -A*01:01
FSSTLLSLF

SEQ ID NO: 7170 - protein, 9 aa, Homo sapiens
  Table 1.2; MAGEC1; ENSG00000155495; HLA -A*01:01,HLA-B*57:01,HLA-C*02:02
FSSTLVSLF

SEQ ID NO: 7171 - protein, 8 aa, Homo sapiens
  Table 1.2; MAGEC1; ENSG00000155495; HLA -B*46:01,HLA-C*03:03
FSYTLASL

SEQ ID NO: 7172 - protein, 9 aa, Homo sapiens
  Table 1.2; MAGEC1; ENSG00000155495; HLA -A*01:01,HLA-C*02:02,HLA-C*12:03
FSYTLASLL

SEQ ID NO: 7173 - protein, 9 aa, Homo sapiens
  Table 1.2; MAGEC1; ENSG00000155495; HLA -B*57:01
FSYTLLSLF

SEQ ID NO: 7174 - protein, 9 aa, Homo sapiens
  Table 1.2; MAGEC1; ENSG00000155495; HLA -A*68:02
FTYTLDEKV

SEQ ID NO: 7175 - protein, 9 aa, Homo sapiens
  Table 1.2; MAGEC1; ENSG00000155495; HLA -B*18:01,HLA-B*44:02,HLA-B*44:03
GEDSLSPHY

SEQ ID NO: 7176 - protein, 10 aa, Homo sapiens
  Table 1.2; MAGEC1; ENSG00000155495; HLA -B*40:01,HLA-B*44:02,HLA-B*44:03
GEDSLSPHYF

SEQ ID NO: 7177 - protein, 10 aa, Homo sapiens
  Table 1.2; MAGEC1; ENSG00000155495; HLA -A*30:01,HLA-B*40:01,HLA-B*49:01
GEDSLSPLQI

SEQ ID NO: 7178 - protein, 10 aa, Homo sapiens
  Table 1.2; MAGEC1; ENSG00000155495; HLA -A*30:01,HLA-B*27:02,HLA-B*40:01,HLA-B*44:02,HLA-B*44:03, HLA-B*49:01
GEDSLSSLHF

SEQ ID NO: 7179 - protein, 9 aa, Homo sapiens
  Table 1.2; MAGEC1; ENSG00000155495; HLA -B*44:03
GEDSMSPLY

SEQ ID NO: 7180 - protein, 10 aa, Homo sapiens
  Table 1.2; MAGEC1; ENSG00000155495; HLA -B*40:01,HLA-B*44:03,HLA-B*49:01
GEDSMSPLYF

SEQ ID NO: 7181 - protein, 10 aa, Homo sapiens
  Table 1.2; MAGEC1; ENSG00000155495; HLA -A*30:01,HLA-B*40:01,HLA-B*49:01
GEDSQSPLQI

SEQ ID NO: 7182 - protein, 10 aa, Homo sapiens
  Table 1.2; MAGEC1; ENSG00000155495; HLA -A*30:01,HLA-B*40:01,HLA-B*49:01
GENTHSPLQI

SEQ ID NO: 7183 - protein, 11 aa, Homo sapiens
  Table 1.2; MAGEC1; ENSG00000155495; HLA -B*44:02,HLA-B*44:03
GEPRELLTKVW

SEQ ID NO: 7184 - protein, 9 aa, Homo sapiens
  Table 1.2; MAGEC1; ENSG00000155495; HLA -A*23:01,HLA-A*30:01,HLA-B*13:02
GFAQSPLQI

SEQ ID NO: 7185 - protein, 9 aa, Homo sapiens
  Table 1.2; MAGEC1; ENSG00000155495; HLA -B*13:02
GMSQNRLLI

SEQ ID NO: 7186 - protein, 10 aa, Homo sapiens
  Table 1.2; MAGEC1; ENSG00000155495; HLA -B*56:01
GPAQSPLQSP

SEQ ID NO: 7187 - protein, 8 aa, Homo sapiens
  Table 1.2; MAGEC1; ENSG00000155495; HLA -B*07:02
GPRAHSEV

SEQ ID NO: 7188 - protein, 9 aa, Homo sapiens
  Table 1.2; MAGEC1; ENSG00000155495; HLA -B*07:02,HLA-C*07:02
GPRAHSEVI

SEQ ID NO: 7189 - protein, 10 aa, Homo sapiens
  Table 1.2; MAGEC1; ENSG00000155495; HLA -B*56:01
GPVQSPLHSP

SEQ ID NO: 7190 - protein, 10 aa, Homo sapiens
  Table 1.2; MAGEC1; ENSG00000155495; HLA -B*57:01
GTYASEEVIW

SEQ ID NO: 7191 - protein, 8 aa, Homo sapiens
  Table 1.2; MAGEC1; ENSG00000155495; HLA -A*31:01
GYFPVIFR

SEQ ID NO: 7192 - protein, 9 aa, Homo sapiens
  Table 1.2; MAGEC1; ENSG00000155495; HLA -A*29:02,HLA-A*31:01,HLA-B*57:01
GYFPVIFRK

SEQ ID NO: 7193 - protein, 9 aa, Homo sapiens
  Table 1.2; MAGEC1; ENSG00000155495; HLA -A*30:01,HLA-B*18:01,HLA-B*37:01,HLA-B*40:01,HLA-B*40:02, HLA-B*44:02,HLA-B*44:03,HLA-B*49:01
IEILFGISL

SEQ ID NO: 7194 - protein, 9 aa, Homo sapiens
  Table 1.2; MAGEC1; ENSG00000155495; HLA -A*23:01,HLA-A*25:01,HLA-A*29:02,HLA-A*30:01,HLA-A*30:02, HLA-B*15:03,HLA-B*18:01,HLA-B*27:02,HLA-B*27:05,HLA-B*35:01, HLA-B*37:01,HLA-B*40:01,HLA-B*40:02,HLA-B*44:02,HLA-B*44:03,
  HLA-B*49:01,HLA-C*02:02,HLA-C*16:04
IESEPLFTY

SEQ ID NO: 7195 - protein, 10 aa, Homo sapiens
  Table 1.2; MAGEC1; ENSG00000155495; HLA -B*49:01
IESEPLFTYT

SEQ ID NO: 7196 - protein, 11 aa, Homo sapiens
  Table 1.2; MAGEC1; ENSG00000155495; HLA -A*30:01,HLA-B*40:01,HLA-B*49:01
IESEPLFTYTL

SEQ ID NO: 7197 - protein, 9 aa, Homo sapiens
  Table 1.2; MAGEC1; ENSG00000155495; HLA -C*14:02
IFQSSPESA

SEQ ID NO: 7198 - protein, 9 aa, Homo sapiens
  Table 1.2; MAGEC1; ENSG00000155495; HLA -C*14:02
IFQSSPEST

SEQ ID NO: 7199 - protein, 8 aa, Homo sapiens
  Table 1.2; MAGEC1; ENSG00000155495; HLA -B*15:01,HLA-B*15:03
IIFIKGTY

SEQ ID NO: 7200 - protein, 9 aa, Homo sapiens
  Table 1.2; MAGEC1; ENSG00000155495; HLA -A*02:03
IIFIKGTYA

SEQ ID NO: 7201 - protein, 10 aa, Homo sapiens
  Table 1.2; MAGEC1; ENSG00000155495; HLA -A*02:01,HLA-A*02:03,HLA-A*02:04
ILFGISLREV

SEQ ID NO: 7202 - protein, 9 aa, Homo sapiens
  Table 1.2; MAGEC1; ENSG00000155495; HLA -A*02:01,HLA-A*02:04
ILILSIIFI

SEQ ID NO: 7203 - protein, 9 aa, Homo sapiens
  Table 1.2; MAGEC1; ENSG00000155495; HLA -A*02:01,HLA-A*02:03
ILQSSPESA

SEQ ID NO: 7204 - protein, 11 aa, Homo sapiens
  Table 1.2; MAGEC1; ENSG00000155495; HLA -B*07:02
IPGSPSFSSTL

SEQ ID NO: 7205 - protein, 10 aa, Homo sapiens
  Table 1.2; MAGEC1; ENSG00000155495; HLA -B*56:01
IPMTSSFSST

SEQ ID NO: 7206 - protein, 11 aa, Homo sapiens
  Table 1.2; MAGEC1; ENSG00000155495; HLA -A*23:01,HLA-B*07:02,HLA-B*35:01,HLA-B*35:03,HLA-B*51:01, HLA-C*07:02
IPMTSSFSSTL

SEQ ID NO: 7207 - protein, 11 aa, Homo sapiens
  Table 1.2; MAGEC1; ENSG00000155495; HLA -B*07:02,HLA-B*35:01,HLA-B*35:03,HLA-C*07:02
IPVSAASSSTL

SEQ ID NO: 7208 - protein, 9 aa, Homo sapiens
  Table 1.2; MAGEC1; ENSG00000155495; HLA -B*56:01
IPVSPSFSS

SEQ ID NO: 7209 - protein, 10 aa, Homo sapiens
  Table 1.2; MAGEC1; ENSG00000155495; HLA -B*56:01
IPVSPSFSST

SEQ ID NO: 7210 - protein, 11 aa, Homo sapiens
  Table 1.2; MAGEC1; ENSG00000155495; HLA -B*07:02,HLA-B*35:01,HLA-B*35:03,HLA-B*51:01,HLA-B*56:01, HLA-C*07:02
IPVSPSFSSTL

SEQ ID NO: 7211 - protein, 9 aa, Homo sapiens
  Table 1.2; MAGEC1; ENSG00000155495; HLA -B*56:01
IPVSPSSSS

SEQ ID NO: 7212 - protein, 11 aa, Homo sapiens
  Table 1.2; MAGEC1; ENSG00000155495; HLA -B*07:02,HLA-B*35:01,HLA-B*35:03,HLA-B*51:01,HLA-C*03:04, HLA-C*07:02
IPVSPSSSSTL

SEQ ID NO: 7213 - protein, 11 aa, Homo sapiens
  Table 1.2; MAGEC1; ENSG00000155495; HLA -B*07:02,HLA-C*07:02
IPVSRSFSSTL

SEQ ID NO: 7214 - protein, 9 aa, Homo sapiens
  Table 1.2; MAGEC1; ENSG00000155495; HLA -A*29:02,HLA-B*35:01,HLA-B*55:01
IPVSSSFSY

SEQ ID NO: 7215 - protein, 11 aa, Homo sapiens
  Table 1.2; MAGEC1; ENSG00000155495; HLA -A*23:01,HLA-B*35:03
IPVSSSFSYTL

SEQ ID NO: 7216 - protein, 11 aa, Homo sapiens
  Table 1.2; MAGEC1; ENSG00000155495; HLA -B*07:02,HLA-B*35:01,HLA-B*35:03,HLA-C*07:02
IPVSSSSSSTL

SEQ ID NO: 7217 - protein, 9 aa, Homo sapiens
  Table 1.2; MAGEC1; ENSG00000155495; HLA -A*23:01,HLA-A*30:01,HLA-A*32:01,HLA-B*15:01,HLA-B*15:03, HLA-B*35:03,HLA-B*39:01,HLA-B*40:01,HLA-B*46:01,HLA-B*58:01, HLA-C*01:02,HLA-C*02:02,HLA-C*03:03,HLA-C*03:04,HLA-C*07:02,
  HLA-C*14:02,HLA-C*16:04
ISFSSSTSL

SEQ ID NO: 7218 - protein, 10 aa, Homo sapiens
  Table 1.2; MAGEC1; ENSG00000155495; HLA -C*04:01
IWDVLSGIGV

SEQ ID NO: 7219 - protein, 9 aa, Homo sapiens
  Table 1.2; MAGEC1; ENSG00000155495; HLA -B*57:01
KAREFIEIL

SEQ ID NO: 7220 - protein, 10 aa, Homo sapiens
  Table 1.2; MAGEC1; ENSG00000155495; HLA -B*57:01
KAREFIEILF

SEQ ID NO: 7221 - protein, 8 aa, Homo sapiens
  Table 1.2; MAGEC1; ENSG00000155495; HLA -B*37:01
KDMPTAGM

SEQ ID NO: 7222 - protein, 9 aa, Homo sapiens
  Table 1.2; MAGEC1; ENSG00000155495; HLA -B*37:01
KDSLSPLEI

SEQ ID NO: 7223 - protein, 9 aa, Homo sapiens
  Table 1.2; MAGEC1; ENSG00000155495; HLA -B*37:01
KDSQSPLQI

SEQ ID NO: 7224 - protein, 9 aa, Homo sapiens
  Table 1.2; MAGEC1; ENSG00000155495; HLA -A*02:07,HLA-A*03:01
KVDELARFL

SEQ ID NO: 7225 - protein, 10 aa, Homo sapiens
  Table 1.2; MAGEC1; ENSG00000155495; HLA -A*02:07
KVDELARFLL

SEQ ID NO: 7226 - protein, 11 aa, Homo sapiens
  Table 1.2; MAGEC1; ENSG00000155495; HLA -A*02:07,HLA-A*03:01
KVDELARFLLL

SEQ ID NO: 7227 - protein, 9 aa, Homo sapiens
  Table 1.2; MAGEC1; ENSG00000155495; HLA -A*02:01,HLA-A*02:03,HLA-A*02:04,HLA-A*02:07,HLA-A*68:02
KVVEFLAML

SEQ ID NO: 7228 - protein, 10 aa, Homo sapiens
  Table 1.2; MAGEC1; ENSG00000155495; HLA -A*03:01,HLA-A*03:02,HLA-A*11:01
KVVEFLAMLK

SEQ ID NO: 7229 - protein, 9 aa, Homo sapiens
  Table 1.2; MAGEC1; ENSG00000155495; HLA -A*02:04,HLA-A*02:07
KVWVQEHYL

SEQ ID NO: 7230 - protein, 10 aa, Homo sapiens
  Table 1.2; MAGEC1; ENSG00000155495; HLA -A*03:02,HLA-A*31:01,HLA-C*06:02
KYQVKQPITK

SEQ ID NO: 7231 - protein, 8 aa, Homo sapiens
  Table 1.2; MAGEC1; ENSG00000155495; HLA -B*08:01
LAMLKNTV

SEQ ID NO: 7232 - protein, 9 aa, Homo sapiens
  Table 1.2; MAGEC1; ENSG00000155495; HLA -A*29:02
LARFLLLKY

SEQ ID NO: 7233 - protein, 10 aa, Homo sapiens
  Table 1.2; MAGEC1; ENSG00000155495; HLA -A*30:01,HLA-B*40:01
LEGEDSLSSL

SEQ ID NO: 7234 - protein, 10 aa, Homo sapiens
  Table 1.2; MAGEC1; ENSG00000155495; HLA -A*24:02,HLA-B*57:01
LHFPQSPPEW

SEQ ID NO: 7235 - protein, 10 aa, Homo sapiens
  Table 1.2; MAGEC1; ENSG00000155495; HLA -A*01:01,HLA-A*29:02
LIESEPLFTY

SEQ ID NO: 7236 - protein, 8 aa, Homo sapiens
  Table 1.2; MAGEC1; ENSG00000155495; HLA -A*02:04
LILSIIFI

SEQ ID NO: 7237 - protein, 9 aa, Homo sapiens
  Table 1.2; MAGEC1; ENSG00000155495; HLA -B*15:03
LKNTVPITF

SEQ ID NO: 7238 - protein, 10 aa, Homo sapiens
  Table 1.2; MAGEC1; ENSG00000155495; HLA -B*46:01
LLQIPMTSSF

SEQ ID NO: 7239 - protein, 9 aa, Homo sapiens
  Table 1.2; MAGEC1; ENSG00000155495; HLA -B*54:01,HLA-B*56:01
LPQSFPESP

SEQ ID NO: 7240 - protein, 9 aa, Homo sapiens
  Table 1.2; MAGEC1; ENSG00000155495; HLA -A*23:01,HLA-A*24:02,HLA-A*25:01,HLA-A*26:01,HLA-A*32:01, HLA-B*15:01,HLA-B*15:03,HLA-B*38:01,HLA-B*39:01,HLA-B*46:01, HLA-B*58:01,HLA-C*03:03,HLA-C*03:04,HLA-C*07:04
LQIPGSPSF

SEQ ID NO: 7241 - protein, 9 aa, Homo sapiens
  Table 1.2; MAGEC1; ENSG00000155495; HLA -A*23:01,HLA-A*24:02,HLA-A*25:01,HLA-A*26:01,HLA-A*30:02, HLA-A*32:01,HLA-B*15:01,HLA-B*15:03,HLA-B*18:01,HLA-B*27:02, HLA-B*37:01,HLA-B*38:01,HLA-B*46:01,HLA-B*58:01,HLA-C*02:02,
  HLA-C*07:04,HLA-C*14:02,HLA-C*16:04
LQIPMTSSF

SEQ ID NO: 7242 - protein, 9 aa, Homo sapiens
  Table 1.2; MAGEC1; ENSG00000155495; HLA -A*02:01,HLA-A*02:07,HLA-A*23:01,HLA-A*24:02,HLA-A*25:01, HLA-A*26:01,HLA-A*30:01,HLA-A*30:02,HLA-A*32:01,HLA-B*13:02, HLA-B*15:01,HLA-B*15:03,HLA-B*18:01,HLA-B*27:02,HLA-B*27:05,
  HLA-B*35:01,HLA-B*35:03,HLA-B*37:01,HLA-B*38:01,HLA-B*39:01, HLA-B*40:01,HLA-B*44:02,HLA-B*44:03,HLA-B*46:01,HLA-B*57:01, HLA-B*58:01,HLA-C*02:02,HLA-C*03:03,HLA-C*03:04,HLA-C*07:04, HLA-C*14:02,HLA-C*16:01,HLA-C*16:04
LQIPVSPSF

SEQ ID NO: 7243 - protein, 9 aa, Homo sapiens
  Table 1.2; MAGEC1; ENSG00000155495; HLA -A*23:01,HLA-A*24:02,HLA-A*32:01,HLA-B*15:01,HLA-B*15:03, HLA-B*46:01,HLA-B*57:01,HLA-B*58:01
LQIPVSRSF

SEQ ID NO: 7244 - protein, 9 aa, Homo sapiens
  Table 1.2; MAGEC1; ENSG00000155495; HLA -A*23:01,HLA-A*24:02,HLA-A*25:01,HLA-A*26:01,HLA-A*30:02, HLA-A*32:01,HLA-B*15:01,HLA-B*15:03,HLA-B*18:01,HLA-B*38:01, HLA-B*46:01,HLA-B*58:01,HLA-C*02:02,HLA-C*03:03,HLA-C*07:04,
  HLA-C*14:02,HLA-C*16:04
LQIPVSSSF

SEQ ID NO: 7245 - protein, 11 aa, Homo sapiens
  Table 1.2; MAGEC1; ENSG00000155495; HLA -A*29:02,HLA-A*30:02,HLA-A*32:01,HLA-B*15:01
LQIPVSSSFSY

SEQ ID NO: 7246 - protein, 8 aa, Homo sapiens
  Table 1.2; MAGEC1; ENSG00000155495; HLA -A*32:01,HLA-B*15:01,HLA-B*15:03,HLA-B*39:01,HLA-B*46:01
LQNPASSF

SEQ ID NO: 7247 - protein, 9 aa, Homo sapiens
  Table 1.2; MAGEC1; ENSG00000155495; HLA -A*30:02,HLA-A*32:01,HLA-B*15:01,HLA-B*15:03,HLA-C*07:04
LQNPASSFF

SEQ ID NO: 7248 - protein, 8 aa, Homo sapiens
  Table 1.2; MAGEC1; ENSG00000155495; HLA -A*32:01,HLA-B*15:01,HLA-B*15:03,HLA-B*46:01
LQRPVSSF

SEQ ID NO: 7249 - protein, 9 aa, Homo sapiens
  Table 1.2; MAGEC1; ENSG00000155495; HLA -A*32:01,HLA-B*15:01,HLA-B*15:03
LQRPVSSFF

SEQ ID NO: 7250 - protein, 11 aa, Homo sapiens
  Table 1.2; MAGEC1; ENSG00000155495; HLA -A*30:02
LQRPVSSFFSY

SEQ ID NO: 7251 - protein, 8 aa, Homo sapiens
  Table 1.2; MAGEC1; ENSG00000155495; HLA -A*32:01,HLA-B*15:01,HLA-B*37:01
LQSPVISF

SEQ ID NO: 7252 - protein, 9 aa, Homo sapiens
  Table 1.2; MAGEC1; ENSG00000155495; HLA -B*27:05
LQSPVSICS

SEQ ID NO: 7253 - protein, 8 aa, Homo sapiens
  Table 1.2; MAGEC1; ENSG00000155495; HLA -A*32:01,HLA-B*15:01,HLA-B*15:03,HLA-B*37:01,HLA-B*39:01
LQSPVSSF

SEQ ID NO: 7254 - protein, 9 aa, Homo sapiens
  Table 1.2; MAGEC1; ENSG00000155495; HLA -A*02:07,HLA-A*24:02
LSPLHFPQF

SEQ ID NO: 7255 - protein, 10 aa, Homo sapiens
  Table 1.2; MAGEC1; ENSG00000155495; HLA -A*25:01,HLA-A*30:02,HLA-B*58:01
LSQSSPVSSF

SEQ ID NO: 7256 - protein, 8 aa, Homo sapiens
  Table 1.2; MAGEC1; ENSG00000155495; HLA -C*05:01
LTDSESLI

SEQ ID NO: 7257 - protein, 8 aa, Homo sapiens
  Table 1.2; MAGEC1; ENSG00000155495; HLA -A*01:01,HLA-A*30:02,HLA-A*32:01,HLA-B*15:01,HLA-B*46:01
LTNVISRY

SEQ ID NO: 7258 - protein, 10 aa, Homo sapiens
  Table 1.2; MAGEC1; ENSG00000155495; HLA -A*23:01,HLA-A*24:02,HLA-B*46:01
MLKNTVPITF

SEQ ID NO: 7259 - protein, 8 aa, Homo sapiens
  Table 1.2; MAGEC1; ENSG00000155495; HLA -A*33:03
MLTNVISR

SEQ ID NO: 7260 - protein, 9 aa, Homo sapiens
  Table 1.2; MAGEC1; ENSG00000155495; HLA -A*01:01,HLA-A*03:01,HLA-A*24:02,HLA-A*25:01,HLA-A*26:01, HLA-A*29:02,HLA-A*30:02,HLA-A*32:01,HLA-B*15:01,HLA-B*15:03, HLA-B*35:01,HLA-B*44:02,HLA-B*44:03,HLA-B*46:01,HLA-B*58:01,
  HLA-C*02:02,HLA-C*07:04,HLA-C*16:01,HLA-C*16:02
MLTNVISRY

SEQ ID NO: 7261 - protein, 9 aa, Homo sapiens
  Table 1.2; MAGEC1; ENSG00000155495; HLA -B*54:01,HLA-B*56:01
MPSLLQSSS

SEQ ID NO: 7262 - protein, 9 aa, Homo sapiens
  Table 1.2; MAGEC1; ENSG00000155495; HLA -B*07:02,HLA-B*08:01,HLA-B*35:01,HLA-B*35:03,HLA-B*39:01, HLA-B*51:01,HLA-B*54:01,HLA-B*55:01,HLA-B*56:01,HLA-C*03:03, HLA-C*03:04,HLA-C*07:02
MPTAGMPSL

SEQ ID NO: 7263 - protein, 10 aa, Homo sapiens
  Table 1.2; MAGEC1; ENSG00000155495; HLA -B*35:03
MPTAGMPSLL

SEQ ID NO: 7264 - protein, 9 aa, Homo sapiens
  Table 1.2; MAGEC1; ENSG00000155495; HLA -A*68:02,HLA-B*35:03,HLA-C*03:04
MTSSFSSTL

SEQ ID NO: 7265 - protein, 10 aa, Homo sapiens
  Table 1.2; MAGEC1; ENSG00000155495; HLA -B*54:01,HLA-B*55:01,HLA-B*56:01
NPASSFFSSA

SEQ ID NO: 7266 - protein, 11 aa, Homo sapiens
  Table 1.2; MAGEC1; ENSG00000155495; HLA -B*07:02
NPASSFFSSAL

SEQ ID NO: 7267 - protein, 9 aa, Homo sapiens
  Table 1.2; MAGEC1; ENSG00000155495; HLA -A*32:01,HLA-B*57:01,HLA-B*58:01,HLA-C*16:01
NSSPPRYEF

SEQ ID NO: 7268 - protein, 11 aa, Homo sapiens
  Table 1.2; MAGEC1; ENSG00000155495; HLA -A*01:01,HLA-A*25:01,HLA-A*26:01,HLA-A*29:02,HLA-A*30:02
NTVPITFPSSY

SEQ ID NO: 7269 - protein, 9 aa, Homo sapiens
  Table 1.2; MAGEC1; ENSG00000155495; HLA -A*25:01,HLA-A*26:01,HLA-A*29:02,HLA-A*30:02,HLA-A*32:01, HLA-B*46:01
NVISRYTGY

SEQ ID NO: 7270 - protein, 9 aa, Homo sapiens
  Table 1.2; MAGEC1; ENSG00000155495; HLA -B*40:01
PEGPVQSPL

SEQ ID NO: 7271 - protein, 8 aa, Homo sapiens
  Table 1.2; MAGEC1; ENSG00000155495; HLA -B*37:01
PESAQSAF

SEQ ID NO: 7272 - protein, 8 aa, Homo sapiens
  Table 1.2; MAGEC1; ENSG00000155495; HLA -B*37:01
PESAQSTF

SEQ ID NO: 7273 - protein, 9 aa, Homo sapiens
  Table 1.2; MAGEC1; ENSG00000155495; HLA -B*15:01,HLA-C*14:02
PLQNPASSF

SEQ ID NO: 7274 - protein, 9 aa, Homo sapiens
  Table 1.2; MAGEC1; ENSG00000155495; HLA -A*24:02
PLQRPVSSF

SEQ ID NO: 7275 - protein, 9 aa, Homo sapiens
  Table 1.2; MAGEC1; ENSG00000155495; HLA -A*24:02,HLA-B*15:01
PLQSPVSSF

SEQ ID NO: 7276 - protein, 11 aa, Homo sapiens
  Table 1.2; MAGEC1; ENSG00000155495; HLA -B*38:01,HLA-B*39:01
PQSPPQGEDSL

SEQ ID NO: 7277 - protein, 11 aa, Homo sapiens
  Table 1.2; MAGEC1; ENSG00000155495; HLA -B*39:01
PQSPPQGEDSM

SEQ ID NO: 7278 - protein, 8 aa, Homo sapiens
  Table 1.2; MAGEC1; ENSG00000155495; HLA -A*30:02
PVSSSFSY

SEQ ID NO: 7279 - protein, 10 aa, Homo sapiens
  Table 1.2; MAGEC1; ENSG00000155495; HLA -A*30:02
QGEDSLSPHY

SEQ ID NO: 7280 - protein, 10 aa, Homo sapiens
  Table 1.2; MAGEC1; ENSG00000155495; HLA -A*01:01
QGEDSMSPLY

SEQ ID NO: 7281 - protein, 10 aa, Homo sapiens
  Table 1.2; MAGEC1; ENSG00000155495; HLA -A*30:02
QIPVSSSFSY

SEQ ID NO: 7282 - protein, 9 aa, Homo sapiens
  Table 1.2; MAGEC1; ENSG00000155495; HLA -A*25:01,HLA-B*57:01,HLA-B*58:01
QIVPSLPEW

SEQ ID NO: 7283 - protein, 8 aa, Homo sapiens
  Table 1.2; MAGEC1; ENSG00000155495; HLA -B*07:02,HLA-B*08:01,HLA-B*35:03
QPITKAEM

SEQ ID NO: 7284 - protein, 9 aa, Homo sapiens
  Table 1.2; MAGEC1; ENSG00000155495; HLA -B*07:02,HLA-B*08:01,HLA-B*35:01,HLA-B*35:03,HLA-C*07:02
QPITKAEML

SEQ ID NO: 7285 - protein, 11 aa, Homo sapiens
  Table 1.2; MAGEC1; ENSG00000155495; HLA -A*25:01,HLA-A*26:01,HLA-A*30:02,HLA-A*32:01,HLA-B*15:01, HLA-B*15:03,HLA-B*46:01,HLA-B*57:01,HLA-B*58:01,HLA-C*12:03
QSFSERTQSTF

SEQ ID NO: 7286 - protein, 9 aa, Homo sapiens
  Table 1.2; MAGEC1; ENSG00000155495; HLA -C*01:02
QSPLQGEEF

SEQ ID NO: 7287 - protein, 10 aa, Homo sapiens
  Table 1.2; MAGEC1; ENSG00000155495; HLA -A*68:01
QSPLQIPVSR

SEQ ID NO: 7288 - protein, 9 aa, Homo sapiens
  Table 1.2; MAGEC1; ENSG00000155495; HLA -C*01:02
QSPQGEDSL

SEQ ID NO: 7289 - protein, 11 aa, Homo sapiens
  Table 1.2; MAGEC1; ENSG00000155495; HLA -A*32:01,HLA-B*57:01,HLA-B*58:01
QSSPERTHSTF

SEQ ID NO: 7290 - protein, 11 aa, Homo sapiens
  Table 1.2; MAGEC1; ENSG00000155495; HLA -A*25:01,HLA-A*30:02,HLA-A*32:01,HLA-B*15:01,HLA-B*57:01, HLA-B*58:01
QSSPERTQSTF

SEQ ID NO: 7291 - protein, 11 aa, Homo sapiens
  Table 1.2; MAGEC1; ENSG00000155495; HLA -A*25:01,HLA-A*30:02,HLA-A*32:01,HLA-B*15:01,HLA-B*39:01, HLA-B*46:01,HLA-B*57:01,HLA-B*58:01
QSSPESAQSAF

SEQ ID NO: 7292 - protein, 11 aa, Homo sapiens
  Table 1.2; MAGEC1; ENSG00000155495; HLA -A*25:01,HLA-A*30:02,HLA-A*32:01,HLA-B*15:01,HLA-B*57:01, HLA-B*58:01
QSSPESAQSTF

SEQ ID NO: 7293 - protein, 11 aa, Homo sapiens
  Table 1.2; MAGEC1; ENSG00000155495; HLA -A*01:01
QSSPESDDTLY

SEQ ID NO: 7294 - protein, 11 aa, Homo sapiens
  Table 1.2; MAGEC1; ENSG00000155495; HLA -A*01:01,HLA-A*30:02,HLA-B*58:01
QSSPESTQSPF

SEQ ID NO: 7295 - protein, 8 aa, Homo sapiens
  Table 1.2; MAGEC1; ENSG00000155495; HLA -A*32:01,HLA-B*37:01
QSSPVSSF

SEQ ID NO: 7296 - protein, 8 aa, Homo sapiens
  Table 1.2; MAGEC1; ENSG00000155495; HLA -A*03:01,HLA-A*03:02,HLA-A*31:01,HLA-A*33:03
QVKQPITK

SEQ ID NO: 7297 - protein, 9 aa, Homo sapiens
  Table 1.2; MAGEC1; ENSG00000155495; HLA -A*02:03,HLA-B*54:01,HLA-B*55:01,HLA-B*56:01
QVKQPITKA

SEQ ID NO: 7298 - protein, 9 aa, Homo sapiens
  Table 1.2; MAGEC1; ENSG00000155495; HLA -A*31:01,HLA-A*33:01
RAHSEVIKR

SEQ ID NO: 7299 - protein, 9 aa, Homo sapiens
  Table 1.2; MAGEC1; ENSG00000155495; HLA -A*30:02,HLA-B*15:03,HLA-B*18:01,HLA-B*40:01,HLA-B*44:02, HLA-B*44:03,HLA-C*16:04
REVDPDDSY

SEQ ID NO: 7300 - protein, 10 aa, Homo sapiens
  Table 1.2; MAGEC1; ENSG00000155495; HLA -B*40:01,HLA-B*49:01
REVDPDDSYV

SEQ ID NO: 7301 - protein, 11 aa, Homo sapiens
  Table 1.2; MAGEC1; ENSG00000155495; HLA -A*23:01,HLA-A*24:02,HLA-A*30:01,HLA-B*40:01,HLA-B*44:02, HLA-B*44:03,HLA-B*57:01,HLA-C*16:04
REVDPDDSYVF

SEQ ID NO: 7302 - protein, 11 aa, Homo sapiens
  Table 1.2; MAGEC1; ENSG00000155495; HLA -A*30:02,HLA-B*44:02,HLA-B*44:03
REVPNSSPPRY

SEQ ID NO: 7303 - protein, 9 aa, Homo sapiens
  Table 1.2; MAGEC1; ENSG00000155495; HLA -A*02:04
RLLILILSI

SEQ ID NO: 7304 - protein, 9 aa, Homo sapiens
  Table 1.2; MAGEC1; ENSG00000155495; HLA -A*30:02,HLA-B*35:01
RPVSSFFSY

SEQ ID NO: 7305 - protein, 11 aa, Homo sapiens
  Table 1.2; MAGEC1; ENSG00000155495; HLA -B*57:01
RSFSSTLLSIF

SEQ ID NO: 7306 - protein, 9 aa, Homo sapiens
  Table 1.2; MAGEC1; ENSG00000155495; HLA -B*57:01
RTHSTFEGF

SEQ ID NO: 7307 - protein, 9 aa, Homo sapiens
  Table 1.2; MAGEC1; ENSG00000155495; HLA -A*32:01,HLA-B*57:01,HLA-B*58:01
RTQSTFEGF

SEQ ID NO: 7308 - protein, 9 aa, Homo sapiens
  Table 1.2; MAGEC1; ENSG00000155495; HLA -A*23:01,HLA-A*24:02
RYTGYFPVI

SEQ ID NO: 7309 - protein, 10 aa, Homo sapiens
  Table 1.2; MAGEC1; ENSG00000155495; HLA -A*24:02
RYTGYFPVIF

SEQ ID NO: 7310 - protein, 8 aa, Homo sapiens
  Table 1.2; MAGEC1; ENSG00000155495; HLA -C*03:03,HLA-C*03:04
SAASSSTL

SEQ ID NO: 7311 - protein, 9 aa, Homo sapiens
  Table 1.2; MAGEC1; ENSG00000155495; HLA -C*01:02
SAPEGEDSL

SEQ ID NO: 7312 - protein, 9 aa, Homo sapiens
  Table 1.2; MAGEC1; ENSG00000155495; HLA -A*30:02
SAQSTFEGF

SEQ ID NO: 7313 - protein, 11 aa, Homo sapiens
  Table 1.2; MAGEC1; ENSG00000155495; HLA -A*30:02
SEESSSPVDEY

SEQ ID NO: 7314 - protein, 9 aa, Homo sapiens
  Table 1.2; MAGEC1; ENSG00000155495; HLA -B*40:01
SEEVIWDVL

SEQ ID NO: 7315 - protein, 10 aa, Homo sapiens
  Table 1.2; MAGEC1; ENSG00000155495; HLA -B*40:01
SEGEDSSDPL

SEQ ID NO: 7316 - protein, 9 aa, Homo sapiens
  Table 1.2; MAGEC1; ENSG00000155495; HLA -A*30:01,HLA-B*37:01,HLA-B*40:01,HLA-B*40:02,HLA-B*44:02, HLA-B*44:03,HLA-B*49:01
SEPLFTYTL

SEQ ID NO: 7317 - protein, 8 aa, Homo sapiens
  Table 1.2; MAGEC1; ENSG00000155495; HLA -B*15:03,HLA-B*18:01,HLA-B*37:01
SERTQSTF

SEQ ID NO: 7318 - protein, 11 aa, Homo sapiens
  Table 1.2; MAGEC1; ENSG00000155495; HLA -B*44:02,HLA-B*44:03
SERTQSTFEGF

SEQ ID NO: 7319 - protein, 10 aa, Homo sapiens
  Table 1.2; MAGEC1; ENSG00000155495; HLA -B*40:01
SESLIESEPL

SEQ ID NO: 7320 - protein, 10 aa, Homo sapiens
  Table 1.2; MAGEC1; ENSG00000155495; HLA -C*01:02,HLA-C*14:02
SFPSSTSSSL

SEQ ID NO: 7321 - protein, 10 aa, Homo sapiens
  Table 1.2; MAGEC1; ENSG00000155495; HLA -A*23:01,HLA-A*24:02,HLA-C*14:02
SFSERTQSTF

SEQ ID NO: 7322 - protein, 8 aa, Homo sapiens
  Table 1.2; MAGEC1; ENSG00000155495; HLA -C*14:02
SFSSSTSL

SEQ ID NO: 7323 - protein, 9 aa, Homo sapiens
  Table 1.2; MAGEC1; ENSG00000155495; HLA -A*23:01,HLA-B*13:02
SFSSTLLSI

SEQ ID NO: 7324 - protein, 9 aa, Homo sapiens
  Table 1.2; MAGEC1; ENSG00000155495; HLA -C*14:02
SFSSTLLSL

SEQ ID NO: 7325 - protein, 9 aa, Homo sapiens
  Table 1.2; MAGEC1; ENSG00000155495; HLA -A*23:01,HLA-C*14:02
SFSSTLVSL

SEQ ID NO: 7326 - protein, 9 aa, Homo sapiens
  Table 1.2; MAGEC1; ENSG00000155495; HLA -A*31:01
SGIGVRAGR

SEQ ID NO: 7327 - protein, 9 aa, Homo sapiens
  Table 1.2; MAGEC1; ENSG00000155495; HLA -B*07:02,HLA-C*01:02
SICSSSTSL

SEQ ID NO: 7328 - protein, 9 aa, Homo sapiens
  Table 1.2; MAGEC1; ENSG00000155495; HLA -A*03:02,HLA-A*11:01,HLA-A*31:01,HLA-A*68:01,HLA-C*07:06
SIFQSSPER

SEQ ID NO: 7329 - protein, 10 aa, Homo sapiens
  Table 1.2; MAGEC1; ENSG00000155495; HLA -A*02:03
SIFQSSPESA

SEQ ID NO: 7330 - protein, 9 aa, Homo sapiens
  Table 1.2; MAGEC1; ENSG00000155495; HLA -A*26:01,HLA-A*29:02,HLA-A*30:02,HLA-A*32:01,HLA-B*15:01, HLA-B*46:01
SIIFIKGTY

SEQ ID NO: 7331 - protein, 10 aa, Homo sapiens
  Table 1.2; MAGEC1; ENSG00000155495; HLA -A*02:03
SIIFIKGTYA

SEQ ID NO: 7332 - protein, 9 aa, Homo sapiens
  Table 1.2; MAGEC1; ENSG00000155495; HLA -A*02:03,HLA-A*03:01,HLA-A*31:01,HLA-A*33:01,HLA-A*33:03, HLA-A*68:01
SLFQSFSER

SEQ ID NO: 7333 - protein, 9 aa, Homo sapiens
  Table 1.2; MAGEC1; ENSG00000155495; HLA -A*02:01
SLFQSSPEC

SEQ ID NO: 7334 - protein, 9 aa, Homo sapiens
  Table 1.2; MAGEC1; ENSG00000155495; HLA -A*31:01
SLFQSSPER

SEQ ID NO: 7335 - protein, 10 aa, Homo sapiens
  Table 1.2; MAGEC1; ENSG00000155495; HLA -A*02:03
SLFQSSPERT

SEQ ID NO: 7336 - protein, 9 aa, Homo sapiens
  Table 1.2; MAGEC1; ENSG00000155495; HLA -A*02:01,HLA-A*02:04,HLA-A*02:07,HLA-A*23:01,HLA-A*24:02, HLA-A*26:01,HLA-A*32:01,HLA-B*15:01,HLA-B*15:03,HLA-B*38:01
SLIESEPLF

SEQ ID NO: 7337 - protein, 11 aa, Homo sapiens
  Table 1.2; MAGEC1; ENSG00000155495; HLA -A*25:01,HLA-A*26:01,HLA-A*29:02,HLA-A*30:02
SLIESEPLFTY

SEQ ID NO: 7338 - protein, 9 aa, Homo sapiens
  Table 1.2; MAGEC1; ENSG00000155495; HLA -A*02:07
SLPEWEDSL

SEQ ID NO: 7339 - protein, 9 aa, Homo sapiens
  Table 1.2; MAGEC1; ENSG00000155495; HLA -A*02:07
SLPQSFPES

SEQ ID NO: 7340 - protein, 10 aa, Homo sapiens
  Table 1.2; MAGEC1; ENSG00000155495; HLA -A*30:02
SLQIPVSPSF

SEQ ID NO: 7341 - protein, 11 aa, Homo sapiens
  Table 1.2; MAGEC1; ENSG00000155495; HLA -A*30:02,HLA-B*15:01
SLREVDPDDSY

SEQ ID NO: 7342 - protein, 8 aa, Homo sapiens
  Table 1.2; MAGEC1; ENSG00000155495; HLA -B*37:01
SLSLPQSF

SEQ ID NO: 7343 - protein, 11 aa, Homo sapiens
  Table 1.2; MAGEC1; ENSG00000155495; HLA -A*25:01,HLA-B*15:01
SLSQSSPVSSF

SEQ ID NO: 7344 - protein, 9 aa, Homo sapiens
  Table 1.2; MAGEC1; ENSG00000155495; HLA -A*02:01,HLA-B*13:02
SLTDSESLI

SEQ ID NO: 7345 - protein, 11 aa, Homo sapiens
  Table 1.2; MAGEC1; ENSG00000155495; HLA -B*35:03
SPEGDDTQSPL

SEQ ID NO: 7346 - protein, 8 aa, Homo sapiens
  Table 1.2; MAGEC1; ENSG00000155495; HLA -B*07:02,HLA-C*07:02
SPEGKDSL

SEQ ID NO: 7347 - protein, 9 aa, Homo sapiens
  Table 1.2; MAGEC1; ENSG00000155495; HLA -B*07:02,HLA-B*35:01,HLA-B*38:01,HLA-B*55:01,HLA-C*07:02
SPERTHSTF

SEQ ID NO: 7348 - protein, 9 aa, Homo sapiens
  Table 1.2; MAGEC1; ENSG00000155495; HLA -B*07:02,HLA-B*35:01,HLA-B*38:01,HLA-B*55:01,HLA-C*07:02
SPERTQSTF

SEQ ID NO: 7349 - protein, 9 aa, Homo sapiens
  Table 1.2; MAGEC1; ENSG00000155495; HLA -B*07:02,HLA-B*35:01,HLA-B*35:03,HLA-B*55:01,HLA-C*03:03, HLA-C*05:01,HLA-C*07:02
SPESAQSAF

SEQ ID NO: 7350 - protein, 9 aa, Homo sapiens
  Table 1.2; MAGEC1; ENSG00000155495; HLA -B*07:02,HLA-B*35:01,HLA-B*35:03,HLA-B*55:01,HLA-C*05:01, HLA-C*07:02
SPESAQSTF

SEQ ID NO: 7351 - protein, 9 aa, Homo sapiens
  Table 1.2; MAGEC1; ENSG00000155495; HLA -B*35:01,HLA-B*55:01
SPESDDTLY

SEQ ID NO: 7352 - protein, 11 aa, Homo sapiens
  Table 1.2; MAGEC1; ENSG00000155495; HLA -B*35:03
SPESDDTLYPL

SEQ ID NO: 7353 - protein, 9 aa, Homo sapiens
  Table 1.2; MAGEC1; ENSG00000155495; HLA -B*56:01
SPESPLQSP

SEQ ID NO: 7354 - protein, 11 aa, Homo sapiens
  Table 1.2; MAGEC1; ENSG00000155495; HLA -B*35:03
SPESPLQSPVI

SEQ ID NO: 7355 - protein, 9 aa, Homo sapiens
  Table 1.2; MAGEC1; ENSG00000155495; HLA -B*07:02,HLA-B*35:01,HLA-B*35:03,HLA-B*55:01
SPESTQSPF

SEQ ID NO: 7356 - protein, 9 aa, Homo sapiens
  Table 1.2; MAGEC1; ENSG00000155495; HLA -B*54:01,HLA-B*56:01
SPFEGFPQS

SEQ ID NO: 7357 - protein, 10 aa, Homo sapiens
  Table 1.2; MAGEC1; ENSG00000155495; HLA -B*56:01
SPFEGFPQSP

SEQ ID NO: 7358 - protein, 11 aa, Homo sapiens
  Table 1.2; MAGEC1; ENSG00000155495; HLA -B*07:02
SPFEGFPQSPL

SEQ ID NO: 7359 - protein, 10 aa, Homo sapiens
  Table 1.2; MAGEC1; ENSG00000155495; HLA -A*02:03,HLA-B*07:02,HLA-B*35:03,HLA-B*51:01,HLA-B*54:01, HLA-B*55:01,HLA-B*56:01,HLA-C*07:02
SPFEGFPQSV

SEQ ID NO: 7360 - protein, 11 aa, Homo sapiens
  Table 1.2; MAGEC1; ENSG00000155495; HLA -B*07:02,HLA-B*35:01,HLA-B*35:03,HLA-B*56:01
SPFEGFPQSVL

SEQ ID NO: 7361 - protein, 9 aa, Homo sapiens
  Table 1.2; MAGEC1; ENSG00000155495; HLA -B*56:01
SPHYFPQSP

SEQ ID NO: 7362 - protein, 9 aa, Homo sapiens
  Table 1.2; MAGEC1; ENSG00000155495; HLA -B*07:02,HLA-B*35:01,HLA-B*35:03,HLA-B*39:01,HLA-B*55:01
SPLEGEDSL

SEQ ID NO: 7363 - protein, 9 aa, Homo sapiens
  Table 1.2; MAGEC1; ENSG00000155495; HLA -B*56:01
SPLEISQSP

SEQ ID NO: 7364 - protein, 8 aa, Homo sapiens
  Table 1.2; MAGEC1; ENSG00000155495; HLA -B*35:01
SPLQGEEF

SEQ ID NO: 7365 - protein, 11 aa, Homo sapiens
  Table 1.2; MAGEC1; ENSG00000155495; HLA -B*35:01
SPLQIPGSPSF

SEQ ID NO: 7366 - protein, 10 aa, Homo sapiens
  Table 1.2; MAGEC1; ENSG00000155495; HLA -B*07:02,HLA-B*56:01,HLA-C*07:02
SPLQIPQSPL

SEQ ID NO: 7367 - protein, 9 aa, Homo sapiens
  Table 1.2; MAGEC1; ENSG00000155495; HLA -B*54:01,HLA-B*55:01,HLA-B*56:01
SPLQIPVSP

SEQ ID NO: 7368 - protein, 9 aa, Homo sapiens
  Table 1.2; MAGEC1; ENSG00000155495; HLA -A*33:03,HLA-A*68:01,HLA-B*56:01
SPLQIPVSR

SEQ ID NO: 7369 - protein, 9 aa, Homo sapiens
  Table 1.2; MAGEC1; ENSG00000155495; HLA -B*56:01
SPLQIPVSS

SEQ ID NO: 7370 - protein, 11 aa, Homo sapiens
  Table 1.2; MAGEC1; ENSG00000155495; HLA -A*23:01,HLA-B*35:01
SPLQIPVSSSF

SEQ ID NO: 7371 - protein, 9 aa, Homo sapiens
  Table 1.2; MAGEC1; ENSG00000155495; HLA -A*23:01,HLA-B*07:02,HLA-B*35:01,HLA-B*35:03,HLA-B*55:01, HLA-B*56:01,HLA-C*07:02
SPLQIVPSL

SEQ ID NO: 7372 - protein, 10 aa, Homo sapiens
  Table 1.2; MAGEC1; ENSG00000155495; HLA -B*07:02,HLA-B*35:01,HLA-C*07:02
SPLQNPASSF

SEQ ID NO: 7373 - protein, 9 aa, Homo sapiens
  Table 1.2; MAGEC1; ENSG00000155495; HLA -B*08:01,HLA-B*56:01
SPLQRPVSS

SEQ ID NO: 7374 - protein, 10 aa, Homo sapiens
  Table 1.2; MAGEC1; ENSG00000155495; HLA -B*07:02,HLA-C*07:02
SPLQRPVSSF

SEQ ID NO: 7375 - protein, 9 aa, Homo sapiens
  Table 1.2; MAGEC1; ENSG00000155495; HLA -B*54:01,HLA-B*56:01
SPLQSPESA

SEQ ID NO: 7376 - protein, 8 aa, Homo sapiens
  Table 1.2; MAGEC1; ENSG00000155495; HLA -B*51:01
SPLQSPVI

SEQ ID NO: 7377 - protein, 10 aa, Homo sapiens
  Table 1.2; MAGEC1; ENSG00000155495; HLA -B*07:02,HLA-B*35:01,HLA-B*55:01,HLA-B*56:01
SPLQSPVISF

SEQ ID NO: 7378 - protein, 10 aa, Homo sapiens
  Table 1.2; MAGEC1; ENSG00000155495; HLA -B*07:02,HLA-B*35:01,HLA-C*07:02
SPLQSPVSSF

SEQ ID NO: 7379 - protein, 9 aa, Homo sapiens
  Table 1.2; MAGEC1; ENSG00000155495; HLA -B*56:01
SPLYFPQSP

SEQ ID NO: 7380 - protein, 10 aa, Homo sapiens
  Table 1.2; MAGEC1; ENSG00000155495; HLA -B*07:02
SPLYFPQSPL

SEQ ID NO: 7381 - protein, 11 aa, Homo sapiens
  Table 1.2; MAGEC1; ENSG00000155495; HLA -B*07:02
SPPEGPVQSPL

SEQ ID NO: 7382 - protein, 9 aa, Homo sapiens
  Table 1.2; MAGEC1; ENSG00000155495; HLA -B*07:02,HLA-B*35:01,HLA-C*07:02
SPQSPPEGM

SEQ ID NO: 7383 - protein, 8 aa, Homo sapiens
  Table 1.2; MAGEC1; ENSG00000155495; HLA -B*07:02
SPSFSSTL

SEQ ID NO: 7384 - protein, 9 aa, Homo sapiens
  Table 1.2; MAGEC1; ENSG00000155495; HLA -B*07:02,HLA-B*35:03,HLA-C*07:02
SPSFSSTLL

SEQ ID NO: 7385 - protein, 11 aa, Homo sapiens
  Table 1.2; MAGEC1; ENSG00000155495; HLA -B*07:02
SPSFSSTLLSL

SEQ ID NO: 7386 - protein, 9 aa, Homo sapiens
  Table 1.2; MAGEC1; ENSG00000155495; HLA -B*07:02,HLA-B*56:01
SPSFSSTLV

SEQ ID NO: 7387 - protein, 11 aa, Homo sapiens
  Table 1.2; MAGEC1; ENSG00000155495; HLA -B*07:02
SPSFSSTLVSL

SEQ ID NO: 7388 - protein, 8 aa, Homo sapiens
  Table 1.2; MAGEC1; ENSG00000155495; HLA -B*07:02,HLA-C*07:02
SPSSSSTL

SEQ ID NO: 7389 - protein, 9 aa, Homo sapiens
  Table 1.2; MAGEC1; ENSG00000155495; HLA -B*07:02,HLA-B*35:03,HLA-C*07:02
SPSSSSTLL

SEQ ID NO: 7390 - protein, 11 aa, Homo sapiens
  Table 1.2; MAGEC1; ENSG00000155495; HLA -B*07:02,HLA-C*07:02
SPSSSSTLLSL

SEQ ID NO: 7391 - protein, 9 aa, Homo sapiens
  Table 1.2; MAGEC1; ENSG00000155495; HLA -B*56:01
SPVISFSSS

SEQ ID NO: 7392 - protein, 9 aa, Homo sapiens
  Table 1.2; MAGEC1; ENSG00000155495; HLA -B*56:01
SPVSSFPSS

SEQ ID NO: 7393 - protein, 10 aa, Homo sapiens
  Table 1.2; MAGEC1; ENSG00000155495; HLA -B*56:01
SPVSSFPSST

SEQ ID NO: 7394 - protein, 9 aa, Homo sapiens
  Table 1.2; MAGEC1; ENSG00000155495; HLA -A*02:04,HLA-B*13:02
SQNRLLILI

SEQ ID NO: 7395 - protein, 11 aa, Homo sapiens
  Table 1.2; MAGEC1; ENSG00000155495; HLA -B*27:05,HLA-B*38:01,HLA-B*39:01
SQSSPEGKDSL

SEQ ID NO: 7396 - protein, 9 aa, Homo sapiens
  Table 1.2; MAGEC1; ENSG00000155495; HLA -A*25:01,HLA-A*26:01,HLA-A*30:02,HLA-A*32:01,HLA-B*13:02, HLA-B*15:01,HLA-B*15:03,HLA-B*27:05,HLA-B*37:01,HLA-B*38:01, HLA-B*39:01,HLA-B*44:02,HLA-B*46:01,HLA-C*02:02,HLA-C*05:01,
  HLA-C*07:04,HLA-C*14:02,HLA-C*16:04
SQSSPVSSF

SEQ ID NO: 7397 - protein, 11 aa, Homo sapiens
  Table 1.2; MAGEC1; ENSG00000155495; HLA -A*32:01,HLA-A*68:01,HLA-B*07:02,HLA-B*46:01,HLA-B*58:01, HLA-C*03:03,HLA-C*03:04
SSFPSSTSSSL

SEQ ID NO: 7398 - protein, 9 aa, Homo sapiens
  Table 1.2; MAGEC1; ENSG00000155495; HLA -A*23:01,HLA-B*13:02
SSLQSPVSI

SEQ ID NO: 7399 - protein, 9 aa, Homo sapiens
  Table 1.2; MAGEC1; ENSG00000155495; HLA -C*01:02
SSPEGKDSL

SEQ ID NO: 7400 - protein, 10 aa, Homo sapiens
  Table 1.2; MAGEC1; ENSG00000155495; HLA -A*25:01
SSPERTQSTF

SEQ ID NO: 7401 - protein, 10 aa, Homo sapiens
  Table 1.2; MAGEC1; ENSG00000155495; HLA -C*01:02
SSPESAQSAF

SEQ ID NO: 7402 - protein, 10 aa, Homo sapiens
  Table 1.2; MAGEC1; ENSG00000155495; HLA -B*57:01
SSPPRYEFLW

SEQ ID NO: 7403 - protein, 8 aa, Homo sapiens
  Table 1.2; MAGEC1; ENSG00000155495; HLA -A*30:02
SSSPVDEY

SEQ ID NO: 7404 - protein, 11 aa, Homo sapiens
  Table 1.2; MAGEC1; ENSG00000155495; HLA -A*30:02
SSSSSTLLSLF

SEQ ID NO: 7405 - protein, 9 aa, Homo sapiens
  Table 1.2; MAGEC1; ENSG00000155495; HLA -B*57:01
SSSTLLSLF

SEQ ID NO: 7406 - protein, 9 aa, Homo sapiens
  Table 1.2; MAGEC1; ENSG00000155495; HLA -A*25:01,HLA-A*26:01,HLA-B*57:01,HLA-B*58:01,HLA-C*02:02, HLA-C*12:03
SSSTLVSIF

SEQ ID NO: 7407 - protein, 9 aa, Homo sapiens
  Table 1.2; MAGEC1; ENSG00000155495; HLA -A*32:01,HLA-B*15:03,HLA-B*58:01
SSSVMSPSF

SEQ ID NO: 7408 - protein, 8 aa, Homo sapiens
  Table 1.2; MAGEC1; ENSG00000155495; HLA -B*37:01
SSTLVSIF

SEQ ID NO: 7409 - protein, 8 aa, Homo sapiens
  Table 1.2; MAGEC1; ENSG00000155495; HLA -B*37:01
SSTLVSLF

SEQ ID NO: 7410 - protein, 11 aa, Homo sapiens
  Table 1.2; MAGEC1; ENSG00000155495; HLA -B*57:01,HLA-B*58:01
SSTPSSLPQSF

SEQ ID NO: 7411 - protein, 9 aa, Homo sapiens
  Table 1.2; MAGEC1; ENSG00000155495; HLA -A*11:01
SSTSSSLSK

SEQ ID NO: 7412 - protein, 8 aa, Homo sapiens
  Table 1.2; MAGEC1; ENSG00000155495; HLA -B*58:01
SSVMSPSF

SEQ ID NO: 7413 - protein, 11 aa, Homo sapiens
  Table 1.2; MAGEC1; ENSG00000155495; HLA -A*68:02
STFEGFAQSPL

SEQ ID NO: 7414 - protein, 11 aa, Homo sapiens
  Table 1.2; MAGEC1; ENSG00000155495; HLA -A*25:01,HLA-A*26:01,HLA-A*68:02,HLA-B*27:05
STFEGFAQSSL

SEQ ID NO: 7415 - protein, 10 aa, Homo sapiens
  Table 1.2; MAGEC1; ENSG00000155495; HLA -A*02:03,HLA-A*25:01,HLA-A*26:01,HLA-A*68:01,HLA-A*68:02, HLA-C*02:02,HLA-C*12:03
STFEGFPQSL

SEQ ID NO: 7416 - protein, 11 aa, Homo sapiens
  Table 1.2; MAGEC1; ENSG00000155495; HLA -A*68:02
STFEGFPQSLL

SEQ ID NO: 7417 - protein, 11 aa, Homo sapiens
  Table 1.2; MAGEC1; ENSG00000155495; HLA -A*68:02
STFEGFPQSPL

SEQ ID NO: 7418 - protein, 10 aa, Homo sapiens
  Table 1.2; MAGEC1; ENSG00000155495; HLA -B*57:01
STLLSLFQSF

SEQ ID NO: 7419 - protein, 10 aa, Homo sapiens
  Table 1.2; MAGEC1; ENSG00000155495; HLA -A*25:01,HLA-A*26:01
STPSSLPQSF

SEQ ID NO: 7420 - protein, 9 aa, Homo sapiens
  Table 1.2; MAGEC1; ENSG00000155495; HLA -A*02:01,HLA-B*54:01,HLA-B*55:01,HLA-B*56:01
SVLQIPVSA

SEQ ID NO: 7421 - protein, 10 aa, Homo sapiens
  Table 1.2; MAGEC1; ENSG00000155495; HLA -B*56:01
SVLQIPVSAA

SEQ ID NO: 7422 - protein, 10 aa, Homo sapiens
  Table 1.2; MAGEC1; ENSG00000155495; HLA -A*26:01,HLA-C*01:02
SVMSPSFSSE

SEQ ID NO: 7423 - protein, 8 aa, Homo sapiens
  Table 1.2; MAGEC1; ENSG00000155495; HLA -A*23:01,HLA-A*24:02,HLA-C*14:02
SYTLASLL

SEQ ID NO: 7424 - protein, 8 aa, Homo sapiens
  Table 1.2; MAGEC1; ENSG00000155495; HLA -A*24:02
SYTLLSLF

SEQ ID NO: 7425 - protein, 8 aa, Homo sapiens
  Table 1.2; MAGEC1; ENSG00000155495; HLA -A*23:01,HLA-A*24:02,HLA-C*14:02
SYVFVNTL

SEQ ID NO: 7426 - protein, 11 aa, Homo sapiens
  Table 1.2; MAGEC1; ENSG00000155495; HLA -B*35:01,HLA-B*35:03,HLA-B*39:01,HLA-C*03:03,HLA-C*03:04
TATESASSSVM

SEQ ID NO: 7427 - protein, 8 aa, Homo sapiens
  Table 1.2; MAGEC1; ENSG00000155495; HLA -B*49:01
TESASSSV

SEQ ID NO: 7428 - protein, 9 aa, Homo sapiens
  Table 1.2; MAGEC1; ENSG00000155495; HLA -A*30:01,HLA-B*18:01,HLA-B*37:01,HLA-B*39:01,HLA-B*40:01, HLA-B*40:02,HLA-B*49:01
TESASSSVM

SEQ ID NO: 7429 - protein, 9 aa, Homo sapiens
  Table 1.2; MAGEC1; ENSG00000155495; HLA -A*23:01,HLA-A*32:01,HLA-B*35:03,HLA-C*04:01,HLA-C*14:02
TFEGFPQSL

SEQ ID NO: 7430 - protein, 8 aa, Homo sapiens
  Table 1.2; MAGEC1; ENSG00000155495; HLA -C*12:03
TGYFPVIF

SEQ ID NO: 7431 - protein, 9 aa, Homo sapiens
  Table 1.2; MAGEC1; ENSG00000155495; HLA -A*03:01,HLA-A*11:01,HLA-A*31:01,HLA-A*33:01,HLA-A*33:03, HLA-A*68:01,HLA-A*68:02
TGYFPVIFR

SEQ ID NO: 7432 - protein, 11 aa, Homo sapiens
  Table 1.2; MAGEC1; ENSG00000155495; HLA -B*38:01
THSPLQIVPSL

SEQ ID NO: 7433 - protein, 8 aa, Homo sapiens
  Table 1.2; MAGEC1; ENSG00000155495; HLA -B*38:01
THSTFEGF

SEQ ID NO: 7434 - protein, 9 aa, Homo sapiens
  Table 1.2; MAGEC1; ENSG00000155495; HLA -B*15:03
TKVWVQEHY

SEQ ID NO: 7435 - protein, 9 aa, Homo sapiens
  Table 1.2; MAGEC1; ENSG00000155495; HLA -A*02:01,HLA-A*02:04,HLA-A*02:07,HLA-B*35:03,HLA-B*38:01, HLA-B*39:01,HLA-B*55:01,HLA-C*05:01
TLDEKVDEL

SEQ ID NO: 7436 - protein, 9 aa, Homo sapiens
  Table 1.2; MAGEC1; ENSG00000155495; HLA -A*02:07,HLA-A*23:01,HLA-A*24:02,HLA-A*29:02
TLLSLFQSF

SEQ ID NO: 7437 - protein, 11 aa, Homo sapiens
  Table 1.2; MAGEC1; ENSG00000155495; HLA -A*03:01,HLA-A*03:02,HLA-A*11:01,HLA-A*31:01,HLA-A*33:01, HLA-A*33:03,HLA-A*68:01
TLYPLQSPQSR

SEQ ID NO: 7438 - protein, 9 aa, Homo sapiens
  Table 1.2; MAGEC1; ENSG00000155495; HLA -B*07:02,HLA-B*15:03,HLA-B*18:01,HLA-B*35:01,HLA-B*35:03, HLA-B*38:01,HLA-B*55:01
TPSSLPQSF

SEQ ID NO: 7439 - protein, 8 aa, Homo sapiens
  Table 1.2; MAGEC1; ENSG00000155495; HLA -B*37:01
TQSPFEGF

SEQ ID NO: 7440 - protein, 8 aa, Homo sapiens
  Table 1.2; MAGEC1; ENSG00000155495; HLA -B*37:01
TQSTFEGF

SEQ ID NO: 7441 - protein, 9 aa, Homo sapiens
  Table 1.2; MAGEC1; ENSG00000155495; HLA -A*23:01,HLA-A*29:02,HLA-A*30:02,HLA-A*32:01,HLA-A*33:03, HLA-B*18:01,HLA-B*35:01,HLA-B*46:01,HLA-B*57:01,HLA-B*58:01
TSLSLPQSF

SEQ ID NO: 7442 - protein, 10 aa, Homo sapiens
  Table 1.2; MAGEC1; ENSG00000155495; HLA -A*25:01,HLA-A*26:01,HLA-A*30:02,HLA-C*07:04
TVPITFPSSY

SEQ ID NO: 7443 - protein, 9 aa, Homo sapiens
  Table 1.2; MAGEC1; ENSG00000155495; HLA -A*23:01,HLA-A*24:02
VDPDDSYVF

SEQ ID NO: 7444 - protein, 9 aa, Homo sapiens
  Table 1.2; MAGEC1; ENSG00000155495; HLA -B*40:01,HLA-B*49:01
VEERAQAII

SEQ ID NO: 7445 - protein, 8 aa, Homo sapiens
  Table 1.2; MAGEC1; ENSG00000155495; HLA -A*23:01,HLA-C*14:02
VFVNTLDL

SEQ ID NO: 7446 - protein, 9 aa, Homo sapiens
  Table 1.2; MAGEC1; ENSG00000155495; HLA -B*08:01
VIKRKVVEF

SEQ ID NO: 7447 - protein, 9 aa, Homo sapiens
  Table 1.2; MAGEC1; ENSG00000155495; HLA -A*02:01,HLA-A*02:03,HLA-A*02:04,HLA-A*02:07
VIWDVLSGI

SEQ ID NO: 7448 - protein, 11 aa, Homo sapiens
  Table 1.2; MAGEC1; ENSG00000155495; HLA -A*02:01,HLA-A*02:04,HLA-A*02:07
VIWDVLSGIGV

SEQ ID NO: 7449 - protein, 10 aa, Homo sapiens
  Table 1.2; MAGEC1; ENSG00000155495; HLA -B*15:03
VKQPITKAEM

SEQ ID NO: 7450 - protein, 9 aa, Homo sapiens
  Table 1.2; MAGEC1; ENSG00000155495; HLA -A*02:01,HLA-A*02:03
VLQIPVSAA

SEQ ID NO: 7451 - protein, 9 aa, Homo sapiens
  Table 1.2; MAGEC1; ENSG00000155495; HLA -A*02:01,HLA-A*02:03,HLA-A*02:04
VLSGIGVRA

SEQ ID NO: 7452 - protein, 11 aa, Homo sapiens
  Table 1.2; MAGEC1; ENSG00000155495; HLA -A*31:01
VLSGIGVRAGR

SEQ ID NO: 7453 - protein, 8 aa, Homo sapiens
  Table 1.2; MAGEC1; ENSG00000155495; HLA -B*51:01
VPITFPSS

SEQ ID NO: 7454 - protein, 9 aa, Homo sapiens
  Table 1.2; MAGEC1; ENSG00000155495; HLA -A*01:01,HLA-A*23:01,HLA-A*25:01,HLA-A*26:01,HLA-A*29:02, HLA-A*30:02,HLA-B*07:02,HLA-B*15:01,HLA-B*15:03,HLA-B*18:01, HLA-B*35:01,HLA-B*35:03,HLA-B*46:01,HLA-B*51:01,HLA-B*54:01,
  HLA-B*55:01,HLA-B*56:01,HLA-C*02:02,HLA-C*07:02,HLA-C*14:02
VPITFPSSY

SEQ ID NO: 7455 - protein, 9 aa, Homo sapiens
  Table 1.2; MAGEC1; ENSG00000155495; HLA -A*30:02,HLA-B*35:01,HLA-B*55:01
VPNSSPPRY

SEQ ID NO: 7456 - protein, 11 aa, Homo sapiens
  Table 1.2; MAGEC1; ENSG00000155495; HLA -A*23:01,HLA-B*07:02,HLA-B*35:01,HLA-B*55:01
VPNSSPPRYEF

SEQ ID NO: 7457 - protein, 8 aa, Homo sapiens
  Table 1.2; MAGEC1; ENSG00000155495; HLA -A*01:01
VQEHYLEY

SEQ ID NO: 7458 - protein, 9 aa, Homo sapiens
  Table 1.2; MAGEC1; ENSG00000155495; HLA -B*39:01
VQSPLQNPA

SEQ ID NO: 7459 - protein, 9 aa, Homo sapiens
  Table 1.2; MAGEC1; ENSG00000155495; HLA -B*58:01,HLA-C*03:03,HLA-C*03:04
VSAASSSTL

SEQ ID NO: 7460 - protein, 9 aa, Homo sapiens
  Table 1.2; MAGEC1; ENSG00000155495; HLA -C*01:02
VSPSFSSTL

SEQ ID NO: 7461 - protein, 9 aa, Homo sapiens
  Table 1.2; MAGEC1; ENSG00000155495; HLA -C*01:02
VSPSSSSTL

SEQ ID NO: 7462 - protein, 9 aa, Homo sapiens
  Table 1.2; MAGEC1; ENSG00000155495; HLA -B*46:01
VSRSFSSTL

SEQ ID NO: 7463 - protein, 9 aa, Homo sapiens
  Table 1.2; MAGEC1; ENSG00000155495; HLA -C*03:04
VSSSSSSTL

SEQ ID NO: 7464 - protein, 9 aa, Homo sapiens
  Table 1.2; MAGEC1; ENSG00000155495; HLA -A*03:02,HLA-A*11:01
VVEFLAMLK

SEQ ID NO: 7465 - protein, 10 aa, Homo sapiens
  Table 1.2; MAGEC1; ENSG00000155495; HLA -A*29:02
VWVQEHYLEY

SEQ ID NO: 7466 - protein, 9 aa, Homo sapiens
  Table 1.2; MAGEC1; ENSG00000155495; HLA -A*01:01,HLA-A*25:01,HLA-A*26:01,HLA-A*29:02
WVQEHYLEY

SEQ ID NO: 7467 - protein, 9 aa, Homo sapiens
  Table 1.2; MAGEC1; ENSG00000155495; HLA -A*33:01,HLA-A*33:03,HLA-A*68:01,HLA-B*35:01,HLA-B*35:03, HLA-B*51:01,HLA-B*54:01,HLA-B*56:01
YPLQSPQSR

SEQ ID NO: 7468 - protein, 9 aa, Homo sapiens
  Table 1.2; MAGEC1; ENSG00000155495; HLA -A*03:01,HLA-A*03:02,HLA-A*11:01,HLA-B*13:02,HLA-B*27:05, HLA-C*02:02
YQVKQPITK

SEQ ID NO: 7469 - protein, 8 aa, Homo sapiens
  Table 1.2; MAGEC1; ENSG00000155495; HLA -B*51:01
YTGYFPVI

SEQ ID NO: 7470 - protein, 9 aa, Homo sapiens
  Table 1.2; MAGEC1; ENSG00000155495; HLA -A*24:02
YTGYFPVIF

SEQ ID NO: 7471 - protein, 10 aa, Homo sapiens
  Table 1.2; MAGEC1; ENSG00000155495; HLA -A*68:02
YTGYFPVIFR

SEQ ID NO: 7472 - protein, 10 aa, Homo sapiens
  Table 1.2; MAGEC1; ENSG00000155495; HLA -A*02:01,HLA-A*02:04,HLA-A*25:01,HLA-A*26:01,HLA-A*68:02
YTLDEKVDEL

SEQ ID NO: 7473 - protein, 8 aa, Homo sapiens
  Table 1.2; MAGEC1; ENSG00000155495; HLA -B*39:01
YTSSSDTL

SEQ ID NO: 7474 - protein, 9 aa, Homo sapiens
  Table 1.2; MAGEC1; ENSG00000155495; HLA -A*68:02,HLA-B*35:03
YTSSSDTLL

SEQ ID NO: 7475 - protein, 9 aa, Homo sapiens
  Table 1.2; MAGEC1; ENSG00000155495; HLA -B*13:02,HLA-B*46:01,HLA-C*03:03,HLA-C*03:04
YVFVNTLDL

SEQ ID NO: 7476 - protein, 10 aa, Homo sapiens
  Table 1.2; MAGEC2; ENSG00000046774; HLA -A*30:01,HLA-B*39:01,HLA-B*40:01,HLA-B*40:02,HLA-B*44:03, HLA-B*49:01
AEEPVTEAEM

SEQ ID NO: 7477 - protein, 11 aa, Homo sapiens
  Table 1.2; MAGEC2; ENSG00000046774; HLA -A*30:01,HLA-B*38:01,HLA-B*40:01
AEEPVTEAEML

SEQ ID NO: 7478 - protein, 9 aa, Homo sapiens
  Table 1.2; MAGEC2; ENSG00000046774; HLA -B*44:02,HLA-B*44:03,HLA-B*49:01
AELVEFLLL

SEQ ID NO: 7479 - protein, 11 aa, Homo sapiens
  Table 1.2; MAGEC2; ENSG00000046774; HLA -B*44:02,HLA-B*44:03
AELVEFLLLKY

SEQ ID NO: 7480 - protein, 8 aa, Homo sapiens
  Table 1.2; MAGEC2; ENSG00000046774; HLA -B*44:02,HLA-B*49:01
AEMLMIVI

SEQ ID NO: 7481 - protein, 10 aa, Homo sapiens
  Table 1.2; MAGEC2; ENSG00000046774; HLA -A*30:01,HLA-B*18:01,HLA-B*27:02,HLA-B*44:02,HLA-B*44:03, HLA-C*16:04
AEMLMIVIKY

SEQ ID NO: 7482 - protein, 11 aa, Homo sapiens
  Table 1.2; MAGEC2; ENSG00000046774; HLA -A*23:01,HLA-B*15:03
AKLNNTVPSSF

SEQ ID NO: 7483 - protein, 10 aa, Homo sapiens
  Table 1.2; MAGEC2; ENSG00000046774; HLA -A*02:07,HLA-A*23:01,HLA-B*15:01
ALIEVGPDHF

SEQ ID NO: 7484 - protein, 9 aa, Homo sapiens
  Table 1.2; MAGEC2; ENSG00000046774; HLA -A*02:01,HLA-A*02:03,HLA-A*02:04,HLA-A*02:07,HLA-B*13:02, HLA-B*55:01
ALKDVEERV

SEQ ID NO: 7485 - protein, 11 aa, Homo sapiens
  Table 1.2; MAGEC2; ENSG00000046774; HLA -A*02:01,HLA-A*02:03,HLA-B*55:01
ALKDVEERVQA

SEQ ID NO: 7486 - protein, 9 aa, Homo sapiens
  Table 1.2; MAGEC2; ENSG00000046774; HLA -A*02:07
ASEEVIWEV

SEQ ID NO: 7487 - protein, 8 aa, Homo sapiens
  Table 1.2; MAGEC2; ENSG00000046774; HLA -C*05:01
ASESLSVM

SEQ ID NO: 7488 - protein, 9 aa, Homo sapiens
  Table 1.2; MAGEC2; ENSG00000046774; HLA -A*01:01,HLA-A*26:01,HLA-A*29:02,HLA-A*30:02,HLA-A*32:01, HLA-B*15:01,HLA-B*15:03,HLA-B*46:01,HLA-B*58:01,HLA-C*02:02
ASSASSTLY

SEQ ID NO: 7489 - protein, 9 aa, Homo sapiens
  Table 1.2; MAGEC2; ENSG00000046774; HLA -A*01:01,HLA-A*03:01,HLA-A*11:01,HLA-A*23:01,HLA-A*29:02, HLA-A*30:02,HLA-A*32:01,HLA-B*27:02,HLA-B*57:01,HLA-B*58:01, HLA-C*02:02,HLA-C*16:04
ASSTLYLVF

SEQ ID NO: 7490 - protein, 11 aa, Homo sapiens
  Table 1.2; MAGEC2; ENSG00000046774; HLA -A*68:02
ATIDTADDATV

SEQ ID NO: 7491 - protein, 9 aa, Homo sapiens
  Table 1.2; MAGEC2; ENSG00000046774; HLA -B*15:01,HLA-B*40:01,HLA-B*46:01,HLA-B*58:01,HLA-C*01:02, HLA-C*03:03,HLA-C*03:04
ATVMASESL

SEQ ID NO: 7492 - protein, 9 aa, Homo sapiens
  Table 1.2; MAGEC2; ENSG00000046774; HLA -A*02:03,HLA-A*03:02,HLA-B*13:02,HLA-B*15:03,HLA-B*27:05, HLA-B*58:01
CVFANTVGL

SEQ ID NO: 7493 - protein, 9 aa, Homo sapiens
  Table 1.2; MAGEC2; ENSG00000046774; HLA -A*33:01,HLA-A*33:03,HLA-A*68:01,HLA-B*51:01,HLA-C*07:06
DALKDVEER

SEQ ID NO: 7494 - protein, 9 aa, Homo sapiens
  Table 1.2; MAGEC2; ENSG00000046774; HLA -A*30:01,HLA-B*18:01
DEGMPENSL

SEQ ID NO: 7495 - protein, 10 aa, Homo sapiens
  Table 1.2; MAGEC2; ENSG00000046774; HLA -B*40:01
DEGMPENSLL

SEQ ID NO: 7496 - protein, 8 aa, Homo sapiens
  Table 1.2; MAGEC2; ENSG00000046774; HLA -B*18:01
DEKVAELV

SEQ ID NO: 7497 - protein, 10 aa, Homo sapiens
  Table 1.2; MAGEC2; ENSG00000046774; HLA -B*18:01
DEKVAELVEF

SEQ ID NO: 7498 - protein, 10 aa, Homo sapiens
  Table 1.2; MAGEC2; ENSG00000046774; HLA -B*38:01,HLA-B*39:01,HLA-C*05:01
DNDSPTSVEL

SEQ ID NO: 7499 - protein, 8 aa, Homo sapiens
  Table 1.2; MAGEC2; ENSG00000046774; HLA -A*01:01
DSESSFTY

SEQ ID NO: 7500 - protein, 8 aa, Homo sapiens
  Table 1.2; MAGEC2; ENSG00000046774; HLA -B*08:01,HLA-B*51:01,HLA-C*01:02
DSPTSVEL

SEQ ID NO: 7501 - protein, 11 aa, Homo sapiens
  Table 1.2; MAGEC2; ENSG00000046774; HLA -A*33:01
DSPTSVELEDW

SEQ ID NO: 7502 - protein, 9 aa, Homo sapiens
  Table 1.2; MAGEC2; ENSG00000046774; HLA -A*25:01,HLA-A*26:01,HLA-A*68:01,HLA-B*35:01,HLA-B*35:03, HLA-B*39:01
DTADDATVM

SEQ ID NO: 7503 - protein, 10 aa, Homo sapiens
  Table 1.2; MAGEC2; ENSG00000046774; HLA -A*68:01
DTADDATVMA

SEQ ID NO: 7504 - protein, 10 aa, Homo sapiens
  Table 1.2; MAGEC2; ENSG00000046774; HLA -A*25:01
DVEERVQATI

SEQ ID NO: 7505 - protein, 8 aa, Homo sapiens
  Table 1.2; MAGEC2; ENSG00000046774; HLA -A*33:01,HLA-A*33:03
DYFPVILK

SEQ ID NO: 7506 - protein, 9 aa, Homo sapiens
  Table 1.2; MAGEC2; ENSG00000046774; HLA -A*24:02,HLA-A*29:02,HLA-A*31:01,HLA-A*33:01,HLA-A*33:03, HLA-A*68:01,HLA-A*68:02
DYFPVILKR

SEQ ID NO: 7507 - protein, 9 aa, Homo sapiens
  Table 1.2; MAGEC2; ENSG00000046774; HLA -C*05:01
EAEEPVTEA

SEQ ID NO: 7508 - protein, 9 aa, Homo sapiens
  Table 1.2; MAGEC2; ENSG00000046774; HLA -A*25:01,HLA-A*26:01,HLA-B*35:01,HLA-B*35:03,HLA-B*39:01, HLA-B*51:01,HLA-C*03:03,HLA-C*03:04
EASSASSTL

SEQ ID NO: 7509 - protein, 10 aa, Homo sapiens
  Table 1.2; MAGEC2; ENSG00000046774; HLA -A*01:01,HLA-A*25:01,HLA-A*26:01,HLA-A*30:02,HLA-A*68:01, HLA-B*35:01
EASSASSTLY

SEQ ID NO: 7510 - protein, 10 aa, Homo sapiens
  Table 1.2; MAGEC2; ENSG00000046774; HLA -A*30:01,HLA-B*40:01,HLA-B*44:03
EEASSASSTL

SEQ ID NO: 7511 - protein, 11 aa, Homo sapiens
  Table 1.2; MAGEC2; ENSG00000046774; HLA -A*26:01,HLA-B*18:01,HLA-B*44:02,HLA-B*44:03,HLA-C*16:04
EEASSASSTLY

SEQ ID NO: 7512 - protein, 11 aa, Homo sapiens
  Table 1.2; MAGEC2; ENSG00000046774; HLA -B*40:01
EEEASSASSTL

SEQ ID NO: 7513 - protein, 9 aa, Homo sapiens
  Table 1.2; MAGEC2; ENSG00000046774; HLA -B*49:01
EEEVPSGVI

SEQ ID NO: 7514 - protein, 9 aa, Homo sapiens
  Table 1.2; MAGEC2; ENSG00000046774; HLA -B*44:02,HLA-B*44:03
EEPVTEAEM

SEQ ID NO: 7515 - protein, 10 aa, Homo sapiens
  Table 1.2; MAGEC2; ENSG00000046774; HLA -B*40:01
EEPVTEAEML

SEQ ID NO: 7516 - protein, 8 aa, Homo sapiens
  Table 1.2; MAGEC2; ENSG00000046774; HLA -B*18:01
EEVIWEVL

SEQ ID NO: 7517 - protein, 8 aa, Homo sapiens
  Table 1.2; MAGEC2; ENSG00000046774; HLA -B*49:01
EEVPSGVI

SEQ ID NO: 7518 - protein, 11 aa, Homo sapiens
  Table 1.2; MAGEC2; ENSG00000046774; HLA -A*25:01,HLA-A*30:01,HLA-B*40:01,HLA-B*44:02,HLA-B*44:03
EEVPSGVIPNL

SEQ ID NO: 7519 - protein, 9 aa, Homo sapiens
  Table 1.2; MAGEC2; ENSG00000046774; HLA -A*33:01,HLA-A*33:03
EHFVYGEPR

SEQ ID NO: 7520 - protein, 10 aa, Homo sapiens
  Table 1.2; MAGEC2; ENSG00000046774; HLA -A*25:01,HLA-A*26:01,HLA-A*29:02
ELVEFLLLKY

SEQ ID NO: 7521 - protein, 9 aa, Homo sapiens
  Table 1.2; MAGEC2; ENSG00000046774; HLA -A*01:01,HLA-A*23:01,HLA-A*26:01,HLA-A*29:02,HLA-A*33:03, HLA-B*18:01,HLA-B*35:01,HLA-B*44:02,HLA-B*44:03,HLA-C*07:01
EMLMIVIKY

SEQ ID NO: 7522 - protein, 8 aa, Homo sapiens
  Table 1.2; MAGEC2; ENSG00000046774; HLA -B*35:01,HLA-B*35:03
EPVTEAEM

SEQ ID NO: 7523 - protein, 9 aa, Homo sapiens
  Table 1.2; MAGEC2; ENSG00000046774; HLA -B*35:03
EPVTEAEML

SEQ ID NO: 7524 - protein, 10 aa, Homo sapiens
  Table 1.2; MAGEC2; ENSG00000046774; HLA -B*35:03
EPVTEAEMLM

SEQ ID NO: 7525 - protein, 8 aa, Homo sapiens
  Table 1.2; MAGEC2; ENSG00000046774; HLA -B*08:01
ESIKKKVL

SEQ ID NO: 7526 - protein, 9 aa, Homo sapiens
  Table 1.2; MAGEC2; ENSG00000046774; HLA -A*68:02
EVGPDHFCV

SEQ ID NO: 7527 - protein, 10 aa, Homo sapiens
  Table 1.2; MAGEC2; ENSG00000046774; HLA -A*25:01,HLA-A*26:01
EVGPDHFCVF

SEQ ID NO: 7528 - protein, 9 aa, Homo sapiens
  Table 1.2; MAGEC2; ENSG00000046774; HLA -A*26:01,HLA-A*68:02
EVIWEVLNA

SEQ ID NO: 7529 - protein, 10 aa, Homo sapiens
  Table 1.2; MAGEC2; ENSG00000046774; HLA -A*25:01,HLA-A*26:01,HLA-A*68:02
EVIWEVLNAV

SEQ ID NO: 7530 - protein, 9 aa, Homo sapiens
  Table 1.2; MAGEC2; ENSG00000046774; HLA -A*25:01,HLA-A*26:01,HLA-A*29:02,HLA-A*30:02,HLA-A*33:01, HLA-A*33:03,HLA-A*68:01,HLA-B*15:01,HLA-B*15:03,HLA-B*35:01, HLA-B*39:01,HLA-B*44:03,HLA-C*07:04,HLA-C*07:06,HLA-C*12:03
EVLNAVGVY

SEQ ID NO: 7531 - protein, 10 aa, Homo sapiens
  Table 1.2; MAGEC2; ENSG00000046774; HLA -A*26:01,HLA-A*33:03,HLA-A*68:01,HLA-A*68:02
EVLNAVGVYA

SEQ ID NO: 7532 - protein, 9 aa, Homo sapiens
  Table 1.2; MAGEC2; ENSG00000046774; HLA -A*25:01,HLA-A*26:01,HLA-A*29:02
EVPHSSPPY

SEQ ID NO: 7533 - protein, 10 aa, Homo sapiens
  Table 1.2; MAGEC2; ENSG00000046774; HLA -A*25:01,HLA-A*26:01
EVPHSSPPYY

SEQ ID NO: 7534 - protein, 10 aa, Homo sapiens
  Table 1.2; MAGEC2; ENSG00000046774; HLA -A*23:01,HLA-A*24:02,HLA-A*25:01,HLA-A*26:01,HLA-A*33:03, HLA-A*68:01,HLA-A*68:02
EVPSGVIPNL

SEQ ID NO: 7535 - protein, 9 aa, Homo sapiens
  Table 1.2; MAGEC2; ENSG00000046774; HLA -A*02:01,HLA-A*02:03,HLA-A*02:04,HLA-A*68:02,HLA-B*13:02, HLA-B*55:01
FLAKLNNTV

SEQ ID NO: 7536 - protein, 8 aa, Homo sapiens
  Table 1.2; MAGEC2; ENSG00000046774; HLA -B*54:01
FPVILKRA

SEQ ID NO: 7537 - protein, 9 aa, Homo sapiens
  Table 1.2; MAGEC2; ENSG00000046774; HLA -A*01:01
FSEESSSQK

SEQ ID NO: 7538 - protein, 9 aa, Homo sapiens
  Table 1.2; MAGEC2; ENSG00000046774; HLA -C*03:03,HLA-C*03:04
FSTSSSLIL

SEQ ID NO: 7539 - protein, 9 aa, Homo sapiens
  Table 1.2; MAGEC2; ENSG00000046774; HLA -A*01:01,HLA-A*68:02,HLA-B*13:02
FTYTLDEKV

SEQ ID NO: 7540 - protein, 9 aa, Homo sapiens
  Table 1.2; MAGEC2; ENSG00000046774; HLA -A*02:01,HLA-A*02:03,HLA-A*02:04,HLA-A*02:07,HLA-A*03:01, HLA-A*25:01,HLA-A*26:01,HLA-A*32:01,HLA-A*68:02,HLA-B*15:03, HLA-B*35:03,HLA-B*40:01,HLA-B*46:01,HLA-B*51:01,HLA-B*55:01,
  HLA-B*58:01,HLA-C*02:02,HLA-C*03:03,HLA-C*03:04,HLA-C*07:04, HLA-C*12:03,HLA-C*16:01,HLA-C*16:02,HLA-C*16:04
FVYGEPREL

SEQ ID NO: 7541 - protein, 10 aa, Homo sapiens
  Table 1.2; MAGEC2; ENSG00000046774; HLA -A*02:01
FVYGEPRELL

SEQ ID NO: 7542 - protein, 10 aa, Homo sapiens
  Table 1.2; MAGEC2; ENSG00000046774; HLA -A*30:01,HLA-B*40:01,HLA-B*44:03,HLA-B*49:01
GEDTGTCQGL

SEQ ID NO: 7543 - protein, 11 aa, Homo sapiens
  Table 1.2; MAGEC2; ENSG00000046774; HLA -B*44:02,HLA-B*44:03
GEPRELLTKVW

SEQ ID NO: 7544 - protein, 9 aa, Homo sapiens
  Table 1.2; MAGEC2; ENSG00000046774; HLA -A*26:01,HLA-A*32:01,HLA-B*15:01,HLA-B*15:03,HLA-B*46:01, HLA-C*01:02
GLPDSESSF

SEQ ID NO: 7545 - protein, 11 aa, Homo sapiens
  Table 1.2; MAGEC2; ENSG00000046774; HLA -A*26:01,HLA-A*29:02,HLA-A*30:02,HLA-A*32:01,HLA-B*15:01, HLA-B*15:03,HLA-B*46:01
GLPDSESSFTY

SEQ ID NO: 7546 - protein, 9 aa, Homo sapiens
  Table 1.2; MAGEC2; ENSG00000046774; HLA -B*07:02,HLA-C*07:02
GPRAHSESI

SEQ ID NO: 7547 - protein, 10 aa, Homo sapiens
  Table 1.2; MAGEC2; ENSG00000046774; HLA -B*07:02,HLA-B*56:01
GPSQSPLSSC

SEQ ID NO: 7548 - protein, 10 aa, Homo sapiens
  Table 1.2; MAGEC2; ENSG00000046774; HLA -A*25:01
GVIPNLTESI

SEQ ID NO: 7549 - protein, 9 aa, Homo sapiens
  Table 1.2; MAGEC2; ENSG00000046774; HLA -A*32:01,HLA-B*15:01
GVYAGREHF

SEQ ID NO: 7550 - protein, 10 aa, Homo sapiens
  Table 1.2; MAGEC2; ENSG00000046774; HLA -A*02:01,HLA-A*02:03
GVYAGREHFV

SEQ ID NO: 7551 - protein, 11 aa, Homo sapiens
  Table 1.2; MAGEC2; ENSG00000046774; HLA -A*03:01,HLA-A*29:02,HLA-A*30:02
GVYAGREHFVY

SEQ ID NO: 7552 - protein, 10 aa, Homo sapiens
  Table 1.2; MAGEC2; ENSG00000046774; HLA -B*35:03
HPTDEEEEEA

SEQ ID NO: 7553 - protein, 9 aa, Homo sapiens
  Table 1.2; MAGEC2; ENSG00000046774; HLA -B*57:01
HSSPPYYEF

SEQ ID NO: 7554 - protein, 8 aa, Homo sapiens
  Table 1.2; MAGEC2; ENSG00000046774; HLA -B*18:01
IEVGPDHF

SEQ ID NO: 7555 - protein, 9 aa, Homo sapiens
  Table 1.2; MAGEC2; ENSG00000046774; HLA -A*03:01
IILSVIFIK

SEQ ID NO: 7556 - protein, 8 aa, Homo sapiens
  Table 1.2; MAGEC2; ENSG00000046774; HLA -B*51:01,HLA-B*56:01
IPNLTESI

SEQ ID NO: 7557 - protein, 9 aa, Homo sapiens
  Table 1.2; MAGEC2; ENSG00000046774; HLA -B*56:01
IPSSPPQGP

SEQ ID NO: 7558 - protein, 9 aa, Homo sapiens
  Table 1.2; MAGEC2; ENSG00000046774; HLA -B*57:01
IVIKYKDYF

SEQ ID NO: 7559 - protein, 9 aa, Homo sapiens
  Table 1.2; MAGEC2; ENSG00000046774; HLA -A*30:01,HLA-B*40:02
KDVEERVQA

SEQ ID NO: 7560 - protein, 11 aa, Homo sapiens
  Table 1.2; MAGEC2; ENSG00000046774; HLA -A*30:01
KDVEERVQATI

SEQ ID NO: 7561 - protein, 8 aa, Homo sapiens
  Table 1.2; MAGEC2; ENSG00000046774; HLA -B*37:01
KDYFPVIL

SEQ ID NO: 7562 - protein, 9 aa, Homo sapiens
  Table 1.2; MAGEC2; ENSG00000046774; HLA -A*03:01,HLA-A*03:02
KDYFPVILK

SEQ ID NO: 7563 - protein, 10 aa, Homo sapiens
  Table 1.2; MAGEC2; ENSG00000046774; HLA -A*03:01,HLA-A*03:02,HLA-A*23:01,HLA-A*24:02,HLA-A*30:02, HLA-A*32:01,HLA-B*15:01,HLA-B*15:03,HLA-B*46:01,HLA-C*01:02
KLNNTVPSSF

SEQ ID NO: 7564 - protein, 9 aa, Homo sapiens
  Table 1.2; MAGEC2; ENSG00000046774; HLA -A*02:01,HLA-A*02:03,HLA-A*02:04,HLA-A*02:07,HLA-A*68:02, HLA-B*27:05,HLA-B*58:01
KVAELVEFL

SEQ ID NO: 7565 - protein, 10 aa, Homo sapiens
  Table 1.2; MAGEC2; ENSG00000046774; HLA -A*02:04
KVAELVEFLL

SEQ ID NO: 7566 - protein, 8 aa, Homo sapiens
  Table 1.2; MAGEC2; ENSG00000046774; HLA -A*03:01
KVLEFLAK

SEQ ID NO: 7567 - protein, 9 aa, Homo sapiens
  Table 1.2; MAGEC2; ENSG00000046774; HLA -A*02:01,HLA-A*02:03,HLA-A*02:04,HLA-A*02:07,HLA-A*03:01, HLA-A*24:02,HLA-A*31:01,HLA-B*57:01
KVLEFLAKL

SEQ ID NO: 7568 - protein, 9 aa, Homo sapiens
  Table 1.2; MAGEC2; ENSG00000046774; HLA -A*02:04
KVWVQGHYL

SEQ ID NO: 7569 - protein, 11 aa, Homo sapiens
  Table 1.2; MAGEC2; ENSG00000046774; HLA -A*03:01,HLA-A*29:02
KVWVQGHYLEY

SEQ ID NO: 7570 - protein, 9 aa, Homo sapiens
  Table 1.2; MAGEC2; ENSG00000046774; HLA -A*24:02
KYKDYFPVI

SEQ ID NO: 7571 - protein, 10 aa, Homo sapiens
  Table 1.2; MAGEC2; ENSG00000046774; HLA -A*24:02
KYKDYFPVIL

SEQ ID NO: 7572 - protein, 8 aa, Homo sapiens
  Table 1.2; MAGEC2; ENSG00000046774; HLA -B*08:01,HLA-B*51:01
LAKLNNTV

SEQ ID NO: 7573 - protein, 8 aa, Homo sapiens
  Table 1.2; MAGEC2; ENSG00000046774; HLA -B*37:01
LDEKVAEL

SEQ ID NO: 7574 - protein, 8 aa, Homo sapiens
  Table 1.2; MAGEC2; ENSG00000046774; HLA -A*02:04
LLFGLALI

SEQ ID NO: 7575 - protein, 10 aa, Homo sapiens
  Table 1.2; MAGEC2; ENSG00000046774; HLA -A*02:01,HLA-A*02:03,HLA-A*02:04,HLA-A*02:07
LLFGLALIEV

SEQ ID NO: 7576 - protein, 8 aa, Homo sapiens
  Table 1.2; MAGEC2; ENSG00000046774; HLA -B*55:01,HLA-C*05:01
LPDSESSF

SEQ ID NO: 7577 - protein, 10 aa, Homo sapiens
  Table 1.2; MAGEC2; ENSG00000046774; HLA -A*01:01,HLA-B*35:01,HLA-B*55:01,HLA-C*03:03
LPDSESSFTY

SEQ ID NO: 7578 - protein, 10 aa, Homo sapiens
  Table 1.2; MAGEC2; ENSG00000046774; HLA -B*57:01,HLA-B*58:01
LSVMSSNVSF

SEQ ID NO: 7579 - protein, 11 aa, Homo sapiens
  Table 1.2; MAGEC2; ENSG00000046774; HLA -C*05:01
LTDEGSDDEGM

SEQ ID NO: 7580 - protein, 9 aa, Homo sapiens
  Table 1.2; MAGEC2; ENSG00000046774; HLA -A*01:01,HLA-A*29:02
LVEFLLLKY

SEQ ID NO: 7581 - protein, 8 aa, Homo sapiens
  Table 1.2; MAGEC2; ENSG00000046774; HLA -A*25:01,HLA-A*26:01,HLA-A*32:01,HLA-B*39:01,HLA-B*46:01, HLA-C*05:01,HLA-C*12:03
LVFSPSSF

SEQ ID NO: 7582 - protein, 10 aa, Homo sapiens
  Table 1.2; MAGEC2; ENSG00000046774; HLA -A*23:01,HLA-A*24:02,HLA-A*29:02,HLA-C*14:02
LYLVFSPSSF

SEQ ID NO: 7583 - protein, 8 aa, Homo sapiens
  Table 1.2; MAGEC2; ENSG00000046774; HLA -B*51:01
MASESLSV

SEQ ID NO: 7584 - protein, 9 aa, Homo sapiens
  Table 1.2; MAGEC2; ENSG00000046774; HLA -A*25:01,HLA-A*26:01,HLA-A*68:01,HLA-B*07:02,HLA-B*15:01, HLA-B*15:03,HLA-B*27:05,HLA-B*35:01,HLA-B*35:03,HLA-B*38:01, HLA-B*39:01,HLA-B*46:01,HLA-B*51:01,HLA-B*54:01,HLA-B*55:01,
  HLA-B*58:01,HLA-C*02:02,HLA-C*03:03,HLA-C*03:04,HLA-C*05:01, HLA-C*07:04,HLA-C*07:06,HLA-C*12:03,HLA-C*14:02,HLA-C*16:01, HLA-C*16:02,HLA-C*16:04
MASESLSVM

SEQ ID NO: 7585 - protein, 9 aa, Homo sapiens
  Table 1.2; MAGEC2; ENSG00000046774; HLA -B*18:01
MELLFGLAL

SEQ ID NO: 7586 - protein, 8 aa, Homo sapiens
  Table 1.2; MAGEC2; ENSG00000046774; HLA -B*18:01,HLA-C*07:01
MLMIVIKY

SEQ ID NO: 7587 - protein, 9 aa, Homo sapiens
  Table 1.2; MAGEC2; ENSG00000046774; HLA -B*35:03,HLA-B*51:01
MPENSLLII

SEQ ID NO: 7588 - protein, 11 aa, Homo sapiens
  Table 1.2; MAGEC2; ENSG00000046774; HLA -B*35:01,HLA-B*35:03
MPENSLLIIIL

SEQ ID NO: 7589 - protein, 9 aa, Homo sapiens
  Table 1.2; MAGEC2; ENSG00000046774; HLA -B*07:02,HLA-B*35:01,HLA-B*35:03,HLA-B*54:01,HLA-B*55:01
MPPVPGVPF

SEQ ID NO: 7590 - protein, 9 aa, Homo sapiens
  Table 1.2; MAGEC2; ENSG00000046774; HLA -A*26:01,HLA-A*33:01,HLA-A*33:03,HLA-A*68:01,HLA-A*68:02, HLA-B*27:02,HLA-C*07:06
NAVGVYAGR

SEQ ID NO: 7591 - protein, 9 aa, Homo sapiens
  Table 1.2; MAGEC2; ENSG00000046774; HLA -A*30:01,HLA-B*27:05,HLA-B*35:03,HLA-B*37:01,HLA-B*38:01, HLA-B*39:01,HLA-B*40:01
NDSPTSVEL

SEQ ID NO: 7592 - protein, 10 aa, Homo sapiens
  Table 1.2; MAGEC2; ENSG00000046774; HLA -A*25:01,HLA-A*26:01,HLA-B*57:01,HLA-B*58:01
NTVPSSFPSW

SEQ ID NO: 7593 - protein, 10 aa, Homo sapiens
  Table 1.2; MAGEC2; ENSG00000046774; HLA -C*05:01
NVDNDSPTSV

SEQ ID NO: 7594 - protein, 9 aa, Homo sapiens
  Table 1.2; MAGEC2; ENSG00000046774; HLA -A*03:01,HLA-A*03:02,HLA-A*11:01
RAHSESIKK

SEQ ID NO: 7595 - protein, 10 aa, Homo sapiens
  Table 1.2; MAGEC2; ENSG00000046774; HLA -B*57:01
RAREFMELLF

SEQ ID NO: 7596 - protein, 10 aa, Homo sapiens
  Table 1.2; MAGEC2; ENSG00000046774; HLA -A*30:02,HLA-B*44:03
REVPHSSPPY

SEQ ID NO: 7597 - protein, 11 aa, Homo sapiens
  Table 1.2; MAGEC2; ENSG00000046774; HLA -A*30:02,HLA-B*44:03
REVPHSSPPYY

SEQ ID NO: 7598 - protein, 8 aa, Homo sapiens
  Table 1.2; MAGEC2; ENSG00000046774; HLA -B*37:01
SASSTLYL

SEQ ID NO: 7599 - protein, 9 aa, Homo sapiens
  Table 1.2; MAGEC2; ENSG00000046774; HLA -A*02:01,HLA-A*02:04,HLA-A*68:02,HLA-B*13:02,HLA-C*02:02
SASSTLYLV

SEQ ID NO: 7600 - protein, 10 aa, Homo sapiens
  Table 1.2; MAGEC2; ENSG00000046774; HLA -B*35:01
SASSTLYLVF

SEQ ID NO: 7601 - protein, 9 aa, Homo sapiens
  Table 1.2; MAGEC2; ENSG00000046774; HLA -A*30:01,HLA-B*40:01
SEEVIWEVL

SEQ ID NO: 7602 - protein, 9 aa, Homo sapiens
  Table 1.2; MAGEC2; ENSG00000046774; HLA -B*37:01,HLA-B*44:03
SESIKKKVL

SEQ ID NO: 7603 - protein, 9 aa, Homo sapiens
  Table 1.2; MAGEC2; ENSG00000046774; HLA -A*23:01,HLA-A*30:01,HLA-B*18:01,HLA-B*27:02,HLA-B*37:01, HLA-B*38:01,HLA-B*39:01,HLA-B*40:01,HLA-B*40:02,HLA-B*44:02, HLA-B*44:03,HLA-B*49:01,HLA-C*16:04
SESSFTYTL

SEQ ID NO: 7604 - protein, 8 aa, Homo sapiens
  Table 1.2; MAGEC2; ENSG00000046774; HLA -C*14:02
SFSTSSSL

SEQ ID NO: 7605 - protein, 9 aa, Homo sapiens
  Table 1.2; MAGEC2; ENSG00000046774; HLA -A*23:01
SFSTSSSLI

SEQ ID NO: 7606 - protein, 9 aa, Homo sapiens
  Table 1.2; MAGEC2; ENSG00000046774; HLA -B*08:01
SIKKKVLEF

SEQ ID NO: 7607 - protein, 9 aa, Homo sapiens
  Table 1.2; MAGEC2; ENSG00000046774; HLA -A*02:01,HLA-A*02:03,HLA-A*02:04,HLA-A*02:07
SLLIIILSV

SEQ ID NO: 7608 - protein, 9 aa, Homo sapiens
  Table 1.2; MAGEC2; ENSG00000046774; HLA -A*02:01,HLA-A*02:03,HLA-B*13:02
SLSVMSSNV

SEQ ID NO: 7609 - protein, 9 aa, Homo sapiens
  Table 1.2; MAGEC2; ENSG00000046774; HLA -B*56:01
SPSSFSTSS

SEQ ID NO: 7610 - protein, 11 aa, Homo sapiens
  Table 1.2; MAGEC2; ENSG00000046774; HLA -B*07:02,HLA-B*35:01,HLA-B*35:03,HLA-B*56:01,HLA-C*07:02
SPSSFSTSSSL

SEQ ID NO: 7611 - protein, 8 aa, Homo sapiens
  Table 1.2; MAGEC2; ENSG00000046774; HLA -A*30:02
SSASSTLY

SEQ ID NO: 7612 - protein, 9 aa, Homo sapiens
  Table 1.2; MAGEC2; ENSG00000046774; HLA -A*01:01,HLA-A*03:01,HLA-A*11:01
SSASSTLYL

SEQ ID NO: 7613 - protein, 11 aa, Homo sapiens
  Table 1.2; MAGEC2; ENSG00000046774; HLA -B*57:01
SSASSTLYLVF

SEQ ID NO: 7614 - protein, 11 aa, Homo sapiens
  Table 1.2; MAGEC2; ENSG00000046774; HLA -A*03:01,HLA-A*03:02,HLA-A*11:01,HLA-A*68:01,HLA-B*27:02, HLA-B*27:05,HLA-C*07:06
SSFSEESSSQK

SEQ ID NO: 7615 - protein, 9 aa, Homo sapiens
  Table 1.2; MAGEC2; ENSG00000046774; HLA -A*32:01,HLA-B*07:02,HLA-B*15:01,HLA-B*15:03,HLA-B*40:01, HLA-B*46:01,HLA-B*58:01,HLA-C*01:02,HLA-C*03:03,HLA-C*03:04, HLA-C*07:02
SSFSTSSSL

SEQ ID NO: 7616 - protein, 10 aa, Homo sapiens
  Table 1.2; MAGEC2; ENSG00000046774; HLA -A*11:01
SSFTYTLDEK

SEQ ID NO: 7617 - protein, 10 aa, Homo sapiens
  Table 1.2; MAGEC2; ENSG00000046774; HLA -B*57:01
SSPPYYEFLW

SEQ ID NO: 7618 - protein, 9 aa, Homo sapiens
  Table 1.2; MAGEC2; ENSG00000046774; HLA -A*03:02,HLA-A*11:01,HLA-A*23:01,HLA-A*24:02,HLA-A*25:01, HLA-A*26:01,HLA-A*29:02,HLA-A*30:02,HLA-A*31:01,HLA-A*32:01, HLA-B*07:02,HLA-B*08:01,HLA-B*13:02,HLA-B*15:01,HLA-B*15:03,
  HLA-B*35:01,HLA-B*35:03,HLA-B*37:01,HLA-B*38:01,HLA-B*39:01, HLA-B*44:03,HLA-B*46:01,HLA-B*55:01,HLA-B*57:01,HLA-B*58:01, HLA-C*01:02,HLA-C*02:02,HLA-C*03:03,HLA-C*07:02,HLA-C*07:04, HLA-C*07:06,HLA-C*14:02,HLA-C*16:04
SVMSSNVSF

SEQ ID NO: 7619 - protein, 8 aa, Homo sapiens
  Table 1.2; MAGEC2; ENSG00000046774; HLA -A*32:01,HLA-B*35:01,HLA-B*35:03,HLA-B*39:01,HLA-B*55:01, HLA-C*03:03,HLA-C*03:04,HLA-C*04:01,HLA-C*05:01,HLA-C*07:04
TADDATVM

SEQ ID NO: 7620 - protein, 9 aa, Homo sapiens
  Table 1.2; MAGEC2; ENSG00000046774; HLA -B*35:03,HLA-B*39:01,HLA-B*54:01,HLA-C*05:01
TADDATVMA

SEQ ID NO: 7621 - protein, 8 aa, Homo sapiens
  Table 1.2; MAGEC2; ENSG00000046774; HLA -B*49:01
TEAEMLMI

SEQ ID NO: 7622 - protein, 9 aa, Homo sapiens
  Table 1.2; MAGEC2; ENSG00000046774; HLA -B*18:01,HLA-B*49:01
TEAEMLMIV

SEQ ID NO: 7623 - protein, 10 aa, Homo sapiens
  Table 1.2; MAGEC2; ENSG00000046774; HLA -A*30:01,HLA-B*49:01
TEAEMLMIVI

SEQ ID NO: 7624 - protein, 10 aa, Homo sapiens
  Table 1.2; MAGEC2; ENSG00000046774; HLA -C*05:01
TIDTADDATV

SEQ ID NO: 7625 - protein, 11 aa, Homo sapiens
  Table 1.2; MAGEC2; ENSG00000046774; HLA -B*35:03,HLA-B*55:01,HLA-C*05:01
TIDTADDATVM

SEQ ID NO: 7626 - protein, 9 aa, Homo sapiens
  Table 1.2; MAGEC2; ENSG00000046774; HLA -A*02:01,HLA-A*02:03,HLA-A*02:04,HLA-A*02:07,HLA-A*32:01, HLA-B*08:01,HLA-B*35:03,HLA-B*38:01,HLA-B*39:01,HLA-B*55:01, HLA-C*04:01,HLA-C*05:01
TLDEKVAEL

SEQ ID NO: 7627 - protein, 8 aa, Homo sapiens
  Table 1.2; MAGEC2; ENSG00000046774; HLA -B*35:03
TVMASESL

SEQ ID NO: 7628 - protein, 10 aa, Homo sapiens
  Table 1.2; MAGEC2; ENSG00000046774; HLA -A*02:03,HLA-A*25:01,HLA-B*13:02
TVMASESLSV

SEQ ID NO: 7629 - protein, 11 aa, Homo sapiens
  Table 1.2; MAGEC2; ENSG00000046774; HLA -A*25:01,HLA-A*26:01,HLA-B*15:01,HLA-B*35:01,HLA-B*35:03, HLA-C*01:02,HLA-C*04:01,HLA-C*07:02,HLA-C*07:04,HLA-C*14:02
TVMASESLSVM

SEQ ID NO: 7630 - protein, 9 aa, Homo sapiens
  Table 1.2; MAGEC2; ENSG00000046774; HLA -A*02:07,HLA-A*24:02,HLA-A*25:01,HLA-A*26:01,HLA-A*32:01, HLA-B*57:01,HLA-B*58:01
TVPSSFPSW

SEQ ID NO: 7631 - protein, 8 aa, Homo sapiens
  Table 1.2; MAGEC2; ENSG00000046774; HLA -C*05:01
VAELVEFL

SEQ ID NO: 7632 - protein, 9 aa, Homo sapiens
  Table 1.2; MAGEC2; ENSG00000046774; HLA -A*02:01,HLA-A*02:03,HLA-A*30:01,HLA-A*32:01,HLA-B*13:02, HLA-B*37:01,HLA-B*49:01,HLA-B*56:01,HLA-C*12:03,HLA-C*16:04
VDNDSPTSV

SEQ ID NO: 7633 - protein, 9 aa, Homo sapiens
  Table 1.2; MAGEC2; ENSG00000046774; HLA -A*30:01,HLA-B*40:01,HLA-B*40:02,HLA-B*44:02,HLA-B*44:03, HLA-B*49:01
VEERVQATI

SEQ ID NO: 7634 - protein, 8 aa, Homo sapiens
  Table 1.2; MAGEC2; ENSG00000046774; HLA -B*18:01,HLA-B*44:02,HLA-B*44:03
VEFLLLKY

SEQ ID NO: 7635 - protein, 8 aa, Homo sapiens
  Table 1.2; MAGEC2; ENSG00000046774; HLA -A*23:01,HLA-C*14:02
VFANTVGL

SEQ ID NO: 7636 - protein, 9 aa, Homo sapiens
  Table 1.2; MAGEC2; ENSG00000046774; HLA -A*24:02
VGPDHFCVF

SEQ ID NO: 7637 - protein, 9 aa, Homo sapiens
  Table 1.2; MAGEC2; ENSG00000046774; HLA -A*02:07,HLA-A*24:02,HLA-C*01:02
VIPNLTESI

SEQ ID NO: 7638 - protein, 9 aa, Homo sapiens
  Table 1.2; MAGEC2; ENSG00000046774; HLA -A*02:01,HLA-A*02:03,HLA-A*02:04,HLA-A*02:07,HLA-B*13:02, HLA-B*51:01,HLA-B*55:01
VIWEVLNAV

SEQ ID NO: 7639 - protein, 11 aa, Homo sapiens
  Table 1.2; MAGEC2; ENSG00000046774; HLA -A*02:01,HLA-A*02:07
VIWEVLNAVGV

SEQ ID NO: 7640 - protein, 8 aa, Homo sapiens
  Table 1.2; MAGEC2; ENSG00000046774; HLA -A*03:01,HLA-A*30:02,HLA-A*32:01,HLA-B*15:01,HLA-B*15:03, HLA-B*39:01,HLA-B*46:01,HLA-C*07:04
VLNAVGVY

SEQ ID NO: 7641 - protein, 9 aa, Homo sapiens
  Table 1.2; MAGEC2; ENSG00000046774; HLA -A*02:01,HLA-A*02:03,HLA-A*02:04,HLA-A*02:07,HLA-A*03:01, HLA-A*03:02,HLA-B*13:02,HLA-B*46:01,HLA-B*56:01
VLNAVGVYA

SEQ ID NO: 7642 - protein, 11 aa, Homo sapiens
  Table 1.2; MAGEC2; ENSG00000046774; HLA -A*31:01
VLNAVGVYAGR

SEQ ID NO: 7643 - protein, 9 aa, Homo sapiens
  Table 1.2; MAGEC2; ENSG00000046774; HLA -A*02:01,HLA-A*02:03,HLA-B*13:02,HLA-B*55:01
VMASESLSV

SEQ ID NO: 7644 - protein, 10 aa, Homo sapiens
  Table 1.2; MAGEC2; ENSG00000046774; HLA -B*15:01,HLA-B*46:01,HLA-C*14:02
VMASESLSVM

SEQ ID NO: 7645 - protein, 8 aa, Homo sapiens
  Table 1.2; MAGEC2; ENSG00000046774; HLA -A*23:01,HLA-A*32:01,HLA-B*37:01,HLA-B*46:01,HLA-C*04:01
VMSSNVSF

SEQ ID NO: 7646 - protein, 9 aa, Homo sapiens
  Table 1.2; MAGEC2; ENSG00000046774; HLA -B*51:01,HLA-B*56:01
VPGVPFRNV

SEQ ID NO: 7647 - protein, 8 aa, Homo sapiens
  Table 1.2; MAGEC2; ENSG00000046774; HLA -A*30:02,HLA-B*35:01
VPHSSPPY

SEQ ID NO: 7648 - protein, 9 aa, Homo sapiens
  Table 1.2; MAGEC2; ENSG00000046774; HLA -A*30:02,HLA-B*35:01
VPHSSPPYY

SEQ ID NO: 7649 - protein, 11 aa, Homo sapiens
  Table 1.2; MAGEC2; ENSG00000046774; HLA -B*35:01
VPHSSPPYYEF

SEQ ID NO: 7650 - protein, 9 aa, Homo sapiens
  Table 1.2; MAGEC2; ENSG00000046774; HLA -A*02:01,HLA-A*02:04,HLA-A*02:07,HLA-A*23:01,HLA-A*24:02, HLA-A*30:01,HLA-A*68:01,HLA-A*68:02,HLA-B*07:02,HLA-B*35:01, HLA-B*35:03,HLA-B*38:01,HLA-B*39:01,HLA-B*51:01,HLA-B*54:01,
  HLA-B*55:01,HLA-B*56:01,HLA-B*58:01,HLA-C*07:02,HLA-C*07:04, HLA-C*16:01,HLA-C*16:02
VPSGVIPNL

SEQ ID NO: 7651 - protein, 10 aa, Homo sapiens
  Table 1.2; MAGEC2; ENSG00000046774; HLA -B*56:01
VPSGVIPNLT

SEQ ID NO: 7652 - protein, 8 aa, Homo sapiens
  Table 1.2; MAGEC2; ENSG00000046774; HLA -B*51:01
VPSSFPSW

SEQ ID NO: 7653 - protein, 8 aa, Homo sapiens
  Table 1.2; MAGEC2; ENSG00000046774; HLA -A*29:02,HLA-A*30:02,HLA-A*32:01,HLA-B*15:01,HLA-B*15:03, HLA-C*07:01
VQGHYLEY

SEQ ID NO: 7654 - protein, 10 aa, Homo sapiens
  Table 1.2; MAGEC2; ENSG00000046774; HLA -A*29:02
VWVQGHYLEY

SEQ ID NO: 7655 - protein, 9 aa, Homo sapiens
  Table 1.2; MAGEC2; ENSG00000046774; HLA -A*24:02
VYAGREHFV

SEQ ID NO: 7656 - protein, 10 aa, Homo sapiens
  Table 1.2; MAGEC2; ENSG00000046774; HLA -A*29:02
VYAGREHFVY

SEQ ID NO: 7657 - protein, 8 aa, Homo sapiens
  Table 1.2; MAGEC2; ENSG00000046774; HLA -A*23:01,HLA-A*24:02,HLA-C*14:02,HLA-C*16:01
VYGEPREL

SEQ ID NO: 7658 - protein, 9 aa, Homo sapiens
  Table 1.2; MAGEC2; ENSG00000046774; HLA -A*23:01,HLA-A*24:02
VYGEPRELL

SEQ ID NO: 7659 - protein, 11 aa, Homo sapiens
  Table 1.2; MAGEC2; ENSG00000046774; HLA -A*33:01
VYGEPRELLTK

SEQ ID NO: 7660 - protein, 9 aa, Homo sapiens
  Table 1.2; MAGEC2; ENSG00000046774; HLA -A*30:01,HLA-B*49:01
WEVLNAVGV

SEQ ID NO: 7661 - protein, 9 aa, Homo sapiens
  Table 1.2; MAGEC2; ENSG00000046774; HLA -A*01:01,HLA-A*26:01,HLA-A*29:02,HLA-A*30:02
WVQGHYLEY

SEQ ID NO: 7662 - protein, 9 aa, Homo sapiens
  Table 1.2; MAGEC2; ENSG00000046774; HLA -A*29:02
YAGREHFVY

SEQ ID NO: 7663 - protein, 9 aa, Homo sapiens
  Table 1.2; MAGEC2; ENSG00000046774; HLA -B*49:01
YEAEEPVTE

SEQ ID NO: 7664 - protein, 10 aa, Homo sapiens
  Table 1.2; MAGEC2; ENSG00000046774; HLA -A*30:01,HLA-B*40:01,HLA-B*49:01
YEAEEPVTEA

SEQ ID NO: 7665 - protein, 8 aa, Homo sapiens
  Table 1.2; MAGEC2; ENSG00000046774; HLA -A*33:03
YFPVILKR

SEQ ID NO: 7666 - protein, 9 aa, Homo sapiens
  Table 1.2; MAGEC2; ENSG00000046774; HLA -A*01:01,HLA-A*02:03,HLA-A*02:07,HLA-A*23:01,HLA-A*24:02, HLA-A*25:01,HLA-A*26:01,HLA-A*29:02,HLA-B*15:01,HLA-B*15:03, HLA-B*46:01,HLA-C*02:02,HLA-C*07:04,HLA-C*14:02
YLVFSPSSF

SEQ ID NO: 7667 - protein, 10 aa, Homo sapiens
  Table 1.2; MAGEC2; ENSG00000046774; HLA -A*01:01,HLA-A*02:01,HLA-A*02:03,HLA-A*02:04,HLA-A*25:01, HLA-A*26:01,HLA-A*68:02
YTLDEKVAEL

SEQ ID NO: 7668 - protein, 11 aa, Homo sapiens
  Table 1.2; MAGEC2; ENSG00000046774; HLA -A*68:02
YTLDEKVAELV

SEQ ID NO: 7669 - protein, 10 aa, Homo sapiens
  Table 1.2; MORC1; ENSG00000114487; HLA -B*40:01,HLA-B*49:01
AELMQQFDVI

SEQ ID NO: 7670 - protein, 9 aa, Homo sapiens
  Table 1.2; MORC1; ENSG00000114487; HLA -A*30:01,HLA-B*18:01,HLA-B*27:02,HLA-B*37:01,HLA-B*40:01, HLA-B*44:02,HLA-B*44:03,HLA-B*49:01,HLA-C*16:04
AEQQPQPQF

SEQ ID NO: 7671 - protein, 10 aa, Homo sapiens
  Table 1.2; MORC1; ENSG00000114487; HLA -B*44:02,HLA-B*44:03,HLA-B*49:01
AEQQPQPQFI

SEQ ID NO: 7672 - protein, 9 aa, Homo sapiens
  Table 1.2; MORC1; ENSG00000114487; HLA -A*30:01,HLA-B*37:01,HLA-B*40:02,HLA-B*49:01
AERLDVFSV

SEQ ID NO: 7673 - protein, 9 aa, Homo sapiens
  Table 1.2; MORC1; ENSG00000114487; HLA -B*49:01
AERSQRSQI

SEQ ID NO: 7674 - protein, 10 aa, Homo sapiens
  Table 1.2; MORC1; ENSG00000114487; HLA -B*40:01,HLA-B*44:02,HLA-B*44:03,HLA-B*49:01
AESILKEAQI

SEQ ID NO: 7675 - protein, 9 aa, Homo sapiens
  Table 1.2; MORC1; ENSG00000114487; HLA -A*32:01,HLA-B*15:01,HLA-B*15:03,HLA-B*37:01,HLA-B*46:01, HLA-B*55:01,HLA-C*02:02,HLA-C*16:01
AGAERLDVF

SEQ ID NO: 7676 - protein, 11 aa, Homo sapiens
  Table 1.2; MORC1; ENSG00000114487; HLA -B*57:01
AGALEDFPARW

SEQ ID NO: 7677 - protein, 9 aa, Homo sapiens
  Table 1.2; MORC1; ENSG00000114487; HLA -A*02:01,HLA-A*02:03,HLA-A*02:04,HLA-A*02:07,HLA-B*55:01
ALAELLDNA

SEQ ID NO: 7678 - protein, 10 aa, Homo sapiens
  Table 1.2; MORC1; ENSG00000114487; HLA -B*27:02
ALAELLDNAR

SEQ ID NO: 7679 - protein, 9 aa, Homo sapiens
  Table 1.2; MORC1; ENSG00000114487; HLA -A*01:01,HLA-A*02:07,HLA-B*44:02,HLA-B*44:03
ALEDFPARW

SEQ ID NO: 7680 - protein, 11 aa, Homo sapiens
  Table 1.2; MORC1; ENSG00000114487; HLA -A*02:04
ALEDFPARWSF

SEQ ID NO: 7681 - protein, 10 aa, Homo sapiens
  Table 1.2; MORC1; ENSG00000114487; HLA -A*03:02
ALEDVEAKQK

SEQ ID NO: 7682 - protein, 9 aa, Homo sapiens
  Table 1.2; MORC1; ENSG00000114487; HLA -A*02:01
ALLKEDNLL

SEQ ID NO: 7683 - protein, 9 aa, Homo sapiens
  Table 1.2; MORC1; ENSG00000114487; HLA -A*02:04
ALLLQKLQL

SEQ ID NO: 7684 - protein, 9 aa, Homo sapiens
  Table 1.2; MORC1; ENSG00000114487; HLA -A*02:03,HLA-A*02:07
ALPENVKLA

SEQ ID NO: 7685 - protein, 9 aa, Homo sapiens
  Table 1.2; MORC1; ENSG00000114487; HLA -A*03:01,HLA-A*03:02,HLA-A*11:01
AMELSIIYK

SEQ ID NO: 7686 - protein, 10 aa, Homo sapiens
  Table 1.2; MORC1; ENSG00000114487; HLA -A*01:01,HLA-A*29:02,HLA-A*30:02
AMELSIIYKY

SEQ ID NO: 7687 - protein, 8 aa, Homo sapiens
  Table 1.2; MORC1; ENSG00000114487; HLA -B*08:01
AMKRSSSL

SEQ ID NO: 7688 - protein, 8 aa, Homo sapiens
  Table 1.2; MORC1; ENSG00000114487; HLA -B*37:01
ANSTTHSF

SEQ ID NO: 7689 - protein, 8 aa, Homo sapiens
  Table 1.2; MORC1; ENSG00000114487; HLA -B*13:02,HLA-B*27:05
AQAASWEM

SEQ ID NO: 7690 - protein, 9 aa, Homo sapiens
  Table 1.2; MORC1; ENSG00000114487; HLA -A*11:01
AQPTEGCLK

SEQ ID NO: 7691 - protein, 9 aa, Homo sapiens
  Table 1.2; MORC1; ENSG00000114487; HLA -B*38:01
ARDAGAERL

SEQ ID NO: 7692 - protein, 10 aa, Homo sapiens
  Table 1.2; MORC1; ENSG00000114487; HLA -B*27:05
ARVSVSGSCK

SEQ ID NO: 7693 - protein, 9 aa, Homo sapiens
  Table 1.2; MORC1; ENSG00000114487; HLA -A*11:01,HLA-A*31:01
ASDIIYFGR

SEQ ID NO: 7694 - protein, 9 aa, Homo sapiens
  Table 1.2; MORC1; ENSG00000114487; HLA -A*03:01,HLA-A*03:02,HLA-A*11:01
ASSQSTPVK

SEQ ID NO: 7695 - protein, 9 aa, Homo sapiens
  Table 1.2; MORC1; ENSG00000114487; HLA -B*07:02,HLA-B*15:01
AVKIAESIL

SEQ ID NO: 7696 - protein, 10 aa, Homo sapiens
  Table 1.2; MORC1; ENSG00000114487; HLA -A*03:01,HLA-A*03:02,HLA-A*11:01
AVKIAESILK

SEQ ID NO: 7697 - protein, 8 aa, Homo sapiens
  Table 1.2; MORC1; ENSG00000114487; HLA -A*23:01,HLA-A*24:02
AYTSVLYF

SEQ ID NO: 7698 - protein, 9 aa, Homo sapiens
  Table 1.2; MORC1; ENSG00000114487; HLA -B*49:01
CEEESLSEV

SEQ ID NO: 7699 - protein, 9 aa, Homo sapiens
  Table 1.2; MORC1; ENSG00000114487; HLA -A*23:01,HLA-A*24:02,HLA-A*29:02,HLA-A*30:02,HLA-B*15:01, HLA-B*15:03,HLA-C*14:02
CFNQIQNTY

SEQ ID NO: 7700 - protein, 10 aa, Homo sapiens
  Table 1.2; MORC1; ENSG00000114487; HLA -A*25:01
CLKNAQAASW

SEQ ID NO: 7701 - protein, 9 aa, Homo sapiens
  Table 1.2; MORC1; ENSG00000114487; HLA -B*51:01
DAGAERLDV

SEQ ID NO: 7702 - protein, 10 aa, Homo sapiens
  Table 1.2; MORC1; ENSG00000114487; HLA -A*25:01
DAGAERLDVF

SEQ ID NO: 7703 - protein, 8 aa, Homo sapiens
  Table 1.2; MORC1; ENSG00000114487; HLA -B*08:01,HLA-B*18:01,HLA-B*37:01,HLA-B*40:02
DDLKHESL

SEQ ID NO: 7704 - protein, 9 aa, Homo sapiens
  Table 1.2; MORC1; ENSG00000114487; HLA -A*33:01,HLA-A*33:03,HLA-A*68:01
DDRYPALQR

SEQ ID NO: 7705 - protein, 8 aa, Homo sapiens
  Table 1.2; MORC1; ENSG00000114487; HLA -B*18:01
DEITVTST

SEQ ID NO: 7706 - protein, 9 aa, Homo sapiens
  Table 1.2; MORC1; ENSG00000114487; HLA -A*30:01,HLA-B*18:01,HLA-B*49:01
DEITVTSTC

SEQ ID NO: 7707 - protein, 10 aa, Homo sapiens
  Table 1.2; MORC1; ENSG00000114487; HLA -A*30:01,HLA-B*18:01,HLA-B*40:01
DEITVTSTCL

SEQ ID NO: 7708 - protein, 9 aa, Homo sapiens
  Table 1.2; MORC1; ENSG00000114487; HLA -B*18:01
DEVKKAEEA

SEQ ID NO: 7709 - protein, 9 aa, Homo sapiens
  Table 1.2; MORC1; ENSG00000114487; HLA -B*38:01,HLA-B*39:01
DKSNTDVSL

SEQ ID NO: 7710 - protein, 10 aa, Homo sapiens
  Table 1.2; MORC1; ENSG00000114487; HLA -A*25:01,HLA-A*26:01
DLKHESLSSF

SEQ ID NO: 7711 - protein, 10 aa, Homo sapiens
  Table 1.2; MORC1; ENSG00000114487; HLA -A*33:01,HLA-A*68:01
DNARDAGAER

SEQ ID NO: 7712 - protein, 9 aa, Homo sapiens
  Table 1.2; MORC1; ENSG00000114487; HLA -B*07:02,HLA-B*08:01,HLA-B*35:03
DPQKFAMEL

SEQ ID NO: 7713 - protein, 10 aa, Homo sapiens
  Table 1.2; MORC1; ENSG00000114487; HLA -A*01:01
DSDIILVSDK

SEQ ID NO: 7714 - protein, 11 aa, Homo sapiens
  Table 1.2; MORC1; ENSG00000114487; HLA -A*01:01
DSDVEYISETK

SEQ ID NO: 7715 - protein, 9 aa, Homo sapiens
  Table 1.2; MORC1; ENSG00000114487; HLA -A*01:01,HLA-A*11:01
DTYLEALLK

SEQ ID NO: 7716 - protein, 9 aa, Homo sapiens
  Table 1.2; MORC1; ENSG00000114487; HLA -A*25:01,HLA-A*26:01,HLA-A*33:01
DVEKPLNSF

SEQ ID NO: 7717 - protein, 11 aa, Homo sapiens
  Table 1.2; MORC1; ENSG00000114487; HLA -A*01:01,HLA-A*26:01
DVEKPLNSFQY

SEQ ID NO: 7718 - protein, 9 aa, Homo sapiens
  Table 1.2; MORC1; ENSG00000114487; HLA -A*68:01
DVEYISETK

SEQ ID NO: 7719 - protein, 10 aa, Homo sapiens
  Table 1.2; MORC1; ENSG00000114487; HLA -A*68:02
DVEYISETKI

SEQ ID NO: 7720 - protein, 9 aa, Homo sapiens
  Table 1.2; MORC1; ENSG00000114487; HLA -A*33:01,HLA-A*68:01
DVFSVDNEK

SEQ ID NO: 7721 - protein, 10 aa, Homo sapiens
  Table 1.2; MORC1; ENSG00000114487; HLA -A*25:01,HLA-A*26:01,HLA-A*68:01,HLA-A*68:02,HLA-B*35:03
DVFSVDNEKL

SEQ ID NO: 7722 - protein, 10 aa, Homo sapiens
  Table 1.2; MORC1; ENSG00000114487; HLA -A*25:01,HLA-A*26:01,HLA-A*33:01
DVIYGKCGTL

SEQ ID NO: 7723 - protein, 11 aa, Homo sapiens
  Table 1.2; MORC1; ENSG00000114487; HLA -A*33:01,HLA-A*33:03,HLA-A*68:01
DVNLSSGHIAR

SEQ ID NO: 7724 - protein, 9 aa, Homo sapiens
  Table 1.2; MORC1; ENSG00000114487; HLA -A*68:02
EASDIIYFG

SEQ ID NO: 7725 - protein, 10 aa, Homo sapiens
  Table 1.2; MORC1; ENSG00000114487; HLA -A*26:01,HLA-A*33:01,HLA-A*33:03,HLA-A*68:01,HLA-A*68:02, HLA-B*27:02,HLA-C*07:06
EASDIIYFGR

SEQ ID NO: 7726 - protein, 9 aa, Homo sapiens
  Table 1.2; MORC1; ENSG00000114487; HLA -A*23:01,HLA-A*25:01,HLA-A*26:01,HLA-A*68:01,HLA-A*68:02, HLA-B*35:01,HLA-B*35:03,HLA-B*51:01,HLA-B*58:01
EAVKIAESI

SEQ ID NO: 7727 - protein, 10 aa, Homo sapiens
  Table 1.2; MORC1; ENSG00000114487; HLA -B*35:03
EAVKIAESIL

SEQ ID NO: 7728 - protein, 11 aa, Homo sapiens
  Table 1.2; MORC1; ENSG00000114487; HLA -A*68:01
EAVKIAESILK

SEQ ID NO: 7729 - protein, 9 aa, Homo sapiens
  Table 1.2; MORC1; ENSG00000114487; HLA -B*18:01,HLA-B*44:02,HLA-B*44:03
EDFPARWSF

SEQ ID NO: 7730 - protein, 9 aa, Homo sapiens
  Table 1.2; MORC1; ENSG00000114487; HLA -B*40:02
EDILMAGAL

SEQ ID NO: 7731 - protein, 9 aa, Homo sapiens
  Table 1.2; MORC1; ENSG00000114487; HLA -B*18:01,HLA-B*44:02,HLA-B*44:03
EEASDIIYF

SEQ ID NO: 7732 - protein, 10 aa, Homo sapiens
  Table 1.2; MORC1; ENSG00000114487; HLA -B*44:02
EEAVKIAESI

SEQ ID NO: 7733 - protein, 9 aa, Homo sapiens
  Table 1.2; MORC1; ENSG00000114487; HLA -B*49:01
EESLSEVVV

SEQ ID NO: 7734 - protein, 9 aa, Homo sapiens
  Table 1.2; MORC1; ENSG00000114487; HLA -B*18:01,HLA-B*44:02,HLA-B*44:03
EETDSDVEY

SEQ ID NO: 7735 - protein, 8 aa, Homo sapiens
  Table 1.2; MORC1; ENSG00000114487; HLA -B*18:01
EETMTCVF

SEQ ID NO: 7736 - protein, 9 aa, Homo sapiens
  Table 1.2; MORC1; ENSG00000114487; HLA -B*18:01,HLA-B*44:02,HLA-B*44:03
EETMTCVFF

SEQ ID NO: 7737 - protein, 8 aa, Homo sapiens
  Table 1.2; MORC1; ENSG00000114487; HLA -C*14:02
EFLNVQEY

SEQ ID NO: 7738 - protein, 10 aa, Homo sapiens
  Table 1.2; MORC1; ENSG00000114487; HLA -A*01:01
EGDLEQTDTY

SEQ ID NO: 7739 - protein, 9 aa, Homo sapiens
  Table 1.2; MORC1; ENSG00000114487; HLA -A*26:01
ELCNDVLAM

SEQ ID NO: 7740 - protein, 11 aa, Homo sapiens
  Table 1.2; MORC1; ENSG00000114487; HLA -A*68:01
ELCNDVLAMKR

SEQ ID NO: 7741 - protein, 8 aa, Homo sapiens
  Table 1.2; MORC1; ENSG00000114487; HLA -B*08:01
ELKTARTL

SEQ ID NO: 7742 - protein, 10 aa, Homo sapiens
  Table 1.2; MORC1; ENSG00000114487; HLA -B*08:01
ELKTARTLSL

SEQ ID NO: 7743 - protein, 9 aa, Homo sapiens
  Table 1.2; MORC1; ENSG00000114487; HLA -A*24:02,HLA-A*25:01
ELMQQFDVI

SEQ ID NO: 7744 - protein, 8 aa, Homo sapiens
  Table 1.2; MORC1; ENSG00000114487; HLA -B*18:01
ELSIIYKY

SEQ ID NO: 7745 - protein, 8 aa, Homo sapiens
  Table 1.2; MORC1; ENSG00000114487; HLA -B*08:01
EMKRKQSL

SEQ ID NO: 7746 - protein, 8 aa, Homo sapiens
  Table 1.2; MORC1; ENSG00000114487; HLA -A*33:01,HLA-A*33:03
ENVKLAER

SEQ ID NO: 7747 - protein, 9 aa, Homo sapiens
  Table 1.2; MORC1; ENSG00000114487; HLA -B*08:01
EQMNKKLKM

SEQ ID NO: 7748 - protein, 9 aa, Homo sapiens
  Table 1.2; MORC1; ENSG00000114487; HLA -B*13:02,HLA-B*38:01
EQQPQPQFI

SEQ ID NO: 7749 - protein, 10 aa, Homo sapiens
  Table 1.2; MORC1; ENSG00000114487; HLA -B*39:01
EQTDTYLEAL

SEQ ID NO: 7750 - protein, 10 aa, Homo sapiens
  Table 1.2; MORC1; ENSG00000114487; HLA -A*33:03
ESLSEVVVPM

SEQ ID NO: 7751 - protein, 9 aa, Homo sapiens
  Table 1.2; MORC1; ENSG00000114487; HLA -A*33:01,HLA-A*33:03,HLA-A*68:01
ESVIKYQNR

SEQ ID NO: 7752 - protein, 9 aa, Homo sapiens
  Table 1.2; MORC1; ENSG00000114487; HLA -A*68:01
ESVTDDPQK

SEQ ID NO: 7753 - protein, 10 aa, Homo sapiens
  Table 1.2; MORC1; ENSG00000114487; HLA -A*25:01,HLA-A*26:01,HLA-A*68:01
ESVTDDPQKF

SEQ ID NO: 7754 - protein, 8 aa, Homo sapiens
  Table 1.2; MORC1; ENSG00000114487; HLA -A*01:01
ETDSDVEY

SEQ ID NO: 7755 - protein, 9 aa, Homo sapiens
  Table 1.2; MORC1; ENSG00000114487; HLA -A*26:01
EVKKAEEAV

SEQ ID NO: 7756 - protein, 10 aa, Homo sapiens
  Table 1.2; MORC1; ENSG00000114487; HLA -A*33:03
EVKKAEEAVK

SEQ ID NO: 7757 - protein, 9 aa, Homo sapiens
  Table 1.2; MORC1; ENSG00000114487; HLA -A*03:01,HLA-A*03:02,HLA-A*11:01,HLA-A*25:01,HLA-A*33:01, HLA-A*33:03,HLA-A*68:01,HLA-C*07:06
EVMEPSHNK

SEQ ID NO: 7758 - protein, 9 aa, Homo sapiens
  Table 1.2; MORC1; ENSG00000114487; HLA -A*25:01,HLA-A*26:01,HLA-B*44:02,HLA-B*44:03,HLA-B*57:01, HLA-B*58:01
EVVVPMPSW

SEQ ID NO: 7759 - protein, 8 aa, Homo sapiens
  Table 1.2; MORC1; ENSG00000114487; HLA -A*23:01
EYISETKI

SEQ ID NO: 7760 - protein, 9 aa, Homo sapiens
  Table 1.2; MORC1; ENSG00000114487; HLA -A*23:01,HLA-A*24:02
EYISETKIM

SEQ ID NO: 7761 - protein, 10 aa, Homo sapiens
  Table 1.2; MORC1; ENSG00000114487; HLA -A*33:01,HLA-A*33:03
EYISETKIMK

SEQ ID NO: 7762 - protein, 11 aa, Homo sapiens
  Table 1.2; MORC1; ENSG00000114487; HLA -A*24:02,HLA-A*33:01,HLA-A*33:03,HLA-A*68:01
EYISETKIMKK

SEQ ID NO: 7763 - protein, 9 aa, Homo sapiens
  Table 1.2; MORC1; ENSG00000114487; HLA -A*29:02,HLA-B*35:01,HLA-B*46:01,HLA-C*02:02
FAMELSIIY

SEQ ID NO: 7764 - protein, 10 aa, Homo sapiens
  Table 1.2; MORC1; ENSG00000114487; HLA -A*11:01,HLA-B*27:02
FAMELSIIYK

SEQ ID NO: 7765 - protein, 11 aa, Homo sapiens
  Table 1.2; MORC1; ENSG00000114487; HLA -B*27:02
FGYQNDIDVEK

SEQ ID NO: 7766 - protein, 9 aa, Homo sapiens
  Table 1.2; MORC1; ENSG00000114487; HLA -C*01:02
FIGQYGNGL

SEQ ID NO: 7767 - protein, 9 aa, Homo sapiens
  Table 1.2; MORC1; ENSG00000114487; HLA -A*32:01,HLA-B*46:01
FIHANSTTH

SEQ ID NO: 7768 - protein, 9 aa, Homo sapiens
  Table 1.2; MORC1; ENSG00000114487; HLA -A*02:07
FIPVDEITV

SEQ ID NO: 7769 - protein, 9 aa, Homo sapiens
  Table 1.2; MORC1; ENSG00000114487; HLA -A*02:03
FIYSNNRLI

SEQ ID NO: 7770 - protein, 8 aa, Homo sapiens
  Table 1.2; MORC1; ENSG00000114487; HLA -C*05:01
FLDDGCGM

SEQ ID NO: 7771 - protein, 10 aa, Homo sapiens
  Table 1.2; MORC1; ENSG00000114487; HLA -A*01:01
FLDDGCGMSP

SEQ ID NO: 7772 - protein, 9 aa, Homo sapiens
  Table 1.2; MORC1; ENSG00000114487; HLA -A*02:01,HLA-A*02:03,HLA-A*02:04,HLA-A*02:07,HLA-B*46:01
FLFGALAEL

SEQ ID NO: 7773 - protein, 10 aa, Homo sapiens
  Table 1.2; MORC1; ENSG00000114487; HLA -A*02:03,HLA-A*02:04
FLFGALAELL

SEQ ID NO: 7774 - protein, 9 aa, Homo sapiens
  Table 1.2; MORC1; ENSG00000114487; HLA -C*04:01
FNQIQNTYM

SEQ ID NO: 7775 - protein, 10 aa, Homo sapiens
  Table 1.2; MORC1; ENSG00000114487; HLA -B*35:01,HLA-B*35:03
FPEHQLPSEL

SEQ ID NO: 7776 - protein, 10 aa, Homo sapiens
  Table 1.2; MORC1; ENSG00000114487; HLA -A*32:01,HLA-B*13:02,HLA-B*38:01
FQNNLNKVTI

SEQ ID NO: 7777 - protein, 9 aa, Homo sapiens
  Table 1.2; MORC1; ENSG00000114487; HLA -B*08:01
FQYQRRQAM

SEQ ID NO: 7778 - protein, 9 aa, Homo sapiens
  Table 1.2; MORC1; ENSG00000114487; HLA -A*31:01,HLA-A*33:01,HLA-A*33:03
FYGVNVENR

SEQ ID NO: 7779 - protein, 9 aa, Homo sapiens
  Table 1.2; MORC1; ENSG00000114487; HLA -A*03:01,HLA-A*03:02,HLA-A*11:01
GAFKDEVKK

SEQ ID NO: 7780 - protein, 9 aa, Homo sapiens
  Table 1.2; MORC1; ENSG00000114487; HLA -A*11:01,HLA-A*31:01
GALEDFPAR

SEQ ID NO: 7781 - protein, 10 aa, Homo sapiens
  Table 1.2; MORC1; ENSG00000114487; HLA -B*57:01
GALEDFPARW

SEQ ID NO: 7782 - protein, 9 aa, Homo sapiens
  Table 1.2; MORC1; ENSG00000114487; HLA -A*30:01,HLA-B*37:01,HLA-B*40:01,HLA-B*40:02
GDDLKHESL

SEQ ID NO: 7783 - protein, 9 aa, Homo sapiens
  Table 1.2; MORC1; ENSG00000114487; HLA -A*32:01,HLA-B*07:02,HLA-B*08:01,HLA-B*37:01,HLA-C*07:02
GINNRNLTL

SEQ ID NO: 7784 - protein, 9 aa, Homo sapiens
  Table 1.2; MORC1; ENSG00000114487; HLA -A*02:01,HLA-A*02:03,HLA-A*02:04,HLA-A*30:01,HLA-B*13:02
GIVNIPLEV

SEQ ID NO: 7785 - protein, 9 aa, Homo sapiens
  Table 1.2; MORC1; ENSG00000114487; HLA -A*02:03
GLKSGSMRI

SEQ ID NO: 7786 - protein, 9 aa, Homo sapiens
  Table 1.2; MORC1; ENSG00000114487; HLA -A*31:01
GMFIYSNNR

SEQ ID NO: 7787 - protein, 9 aa, Homo sapiens
  Table 1.2; MORC1; ENSG00000114487; HLA -B*13:02,HLA-B*27:05
GQYGNGLKS

SEQ ID NO: 7788 - protein, 11 aa, Homo sapiens
  Table 1.2; MORC1; ENSG00000114487; HLA -B*27:05
GQYGNGLKSGS

SEQ ID NO: 7789 - protein, 8 aa, Homo sapiens
  Table 1.2; MORC1; ENSG00000114487; HLA -B*13:02
GQYLVQYC

SEQ ID NO: 7790 - protein, 9 aa, Homo sapiens
  Table 1.2; MORC1; ENSG00000114487; HLA -A*02:04
GTLLVIYNL

SEQ ID NO: 7791 - protein, 10 aa, Homo sapiens
  Table 1.2; MORC1; ENSG00000114487; HLA -A*03:01,HLA-A*11:01
GTLLVIYNLK

SEQ ID NO: 7792 - protein, 10 aa, Homo sapiens
  Table 1.2; MORC1; ENSG00000114487; HLA -A*03:01,HLA-A*03:02,HLA-A*11:01,HLA-B*27:02
GTMSTISPSK

SEQ ID NO: 7793 - protein, 10 aa, Homo sapiens
  Table 1.2; MORC1; ENSG00000114487; HLA -B*27:02
GYQNDIDVEK

SEQ ID NO: 7794 - protein, 9 aa, Homo sapiens
  Table 1.2; MORC1; ENSG00000114487; HLA -A*23:01,HLA-A*25:01,HLA-A*26:01,HLA-A*30:02,HLA-A*32:01, HLA-A*33:01,HLA-B*08:01,HLA-B*15:01,HLA-B*15:03,HLA-B*35:01, HLA-B*35:03,HLA-B*38:01,HLA-B*39:01,HLA-B*46:01,HLA-B*55:01,
  HLA-B*58:01,HLA-C*02:02,HLA-C*03:03,HLA-C*03:04,HLA-C*07:06, HLA-C*16:01,HLA-C*16:02,HLA-C*16:04
HANSTTHSF

SEQ ID NO: 7795 - protein, 8 aa, Homo sapiens
  Table 1.2; MORC1; ENSG00000114487; HLA -A*30:01,HLA-B*08:01,HLA-B*18:01,HLA-B*37:01,HLA-B*40:01, HLA-B*40:02
HEKVGSQL

SEQ ID NO: 7796 - protein, 10 aa, Homo sapiens
  Table 1.2; MORC1; ENSG00000114487; HLA -A*30:01
HEKVGSQLKL

SEQ ID NO: 7797 - protein, 9 aa, Homo sapiens
  Table 1.2; MORC1; ENSG00000114487; HLA -A*30:01,HLA-B*37:01,HLA-B*40:01,HLA-B*40:02
HESLSSFEL

SEQ ID NO: 7798 - protein, 9 aa, Homo sapiens
  Table 1.2; MORC1; ENSG00000114487; HLA -A*29:02,HLA-A*30:02
HLLKVMGQY

SEQ ID NO: 7799 - protein, 9 aa, Homo sapiens
  Table 1.2; MORC1; ENSG00000114487; HLA -A*02:01,HLA-B*13:02,HLA-B*38:01,HLA-B*51:01
HQVECLPSI

SEQ ID NO: 7800 - protein, 9 aa, Homo sapiens
  Table 1.2; MORC1; ENSG00000114487; HLA -B*54:01
HSFLFGALA

SEQ ID NO: 7801 - protein, 9 aa, Homo sapiens
  Table 1.2; MORC1; ENSG00000114487; HLA -B*54:01
IAESILKEA

SEQ ID NO: 7802 - protein, 8 aa, Homo sapiens
  Table 1.2; MORC1; ENSG00000114487; HLA -A*23:01,HLA-A*25:01,HLA-A*32:01,HLA-B*08:01,HLA-B*46:01, HLA-B*57:01,HLA-B*58:01,HLA-C*16:01
IANITTVW

SEQ ID NO: 7803 - protein, 9 aa, Homo sapiens
  Table 1.2; MORC1; ENSG00000114487; HLA -A*31:01,HLA-A*33:01
IANITTVWR

SEQ ID NO: 7804 - protein, 10 aa, Homo sapiens
  Table 1.2; MORC1; ENSG00000114487; HLA -A*23:01,HLA-A*30:01,HLA-B*37:01
IDVEKPLNSF

SEQ ID NO: 7805 - protein, 8 aa, Homo sapiens
  Table 1.2; MORC1; ENSG00000114487; HLA -C*01:02
IGQYGNGL

SEQ ID NO: 7806 - protein, 9 aa, Homo sapiens
  Table 1.2; MORC1; ENSG00000114487; HLA -A*03:02,HLA-A*11:01
IGQYGNGLK

SEQ ID NO: 7807 - protein, 11 aa, Homo sapiens
  Table 1.2; MORC1; ENSG00000114487; HLA -C*04:01
IGQYGNGLKSG

SEQ ID NO: 7808 - protein, 10 aa, Homo sapiens
  Table 1.2; MORC1; ENSG00000114487; HLA -B*38:01
IHANSTTHSF

SEQ ID NO: 7809 - protein, 11 aa, Homo sapiens
  Table 1.2; MORC1; ENSG00000114487; HLA -B*38:01
IHANSTTHSFL

SEQ ID NO: 7810 - protein, 10 aa, Homo sapiens
  Table 1.2; MORC1; ENSG00000114487; HLA -A*02:03,HLA-A*25:01
IIYDSNTRGI

SEQ ID NO: 7811 - protein, 8 aa, Homo sapiens
  Table 1.2; MORC1; ENSG00000114487; HLA -A*03:01
IIYFGRSK

SEQ ID NO: 7812 - protein, 9 aa, Homo sapiens
  Table 1.2; MORC1; ENSG00000114487; HLA -A*03:01
IIYFGRSKK

SEQ ID NO: 7813 - protein, 9 aa, Homo sapiens
  Table 1.2; MORC1; ENSG00000114487; HLA -A*03:01
IIYKYSPFK

SEQ ID NO: 7814 - protein, 9 aa, Homo sapiens
  Table 1.2; MORC1; ENSG00000114487; HLA -A*02:01,HLA-A*02:03,HLA-A*02:07,HLA-B*55:01
ILKEAQIKV

SEQ ID NO: 7815 - protein, 10 aa, Homo sapiens
  Table 1.2; MORC1; ENSG00000114487; HLA -B*15:01
ILMAGALEDF

SEQ ID NO: 7816 - protein, 9 aa, Homo sapiens
  Table 1.2; MORC1; ENSG00000114487; HLA -A*23:01,HLA-A*24:02
INNRNLTLF

SEQ ID NO: 7817 - protein, 9 aa, Homo sapiens
  Table 1.2; MORC1; ENSG00000114487; HLA -B*35:01,HLA-B*35:03
IPFIIQCDL

SEQ ID NO: 7818 - protein, 8 aa, Homo sapiens
  Table 1.2; MORC1; ENSG00000114487; HLA -B*54:01
IPLEVMEP

SEQ ID NO: 7819 - protein, 9 aa, Homo sapiens
  Table 1.2; MORC1; ENSG00000114487; HLA -A*23:01,HLA-B*07:02,HLA-B*35:03,HLA-B*49:01,HLA-B*51:01, HLA-B*54:01,HLA-B*56:01
IPLGTMSTI

SEQ ID NO: 7820 - protein, 11 aa, Homo sapiens
  Table 1.2; MORC1; ENSG00000114487; HLA -B*07:02,HLA-B*35:03,HLA-B*55:01
IPLLNQEKQEL

SEQ ID NO: 7821 - protein, 9 aa, Homo sapiens
  Table 1.2; MORC1; ENSG00000114487; HLA -B*35:01,HLA-B*35:03,HLA-B*51:01,HLA-B*54:01,HLA-B*56:01
IPVALPENV

SEQ ID NO: 7822 - protein, 11 aa, Homo sapiens
  Table 1.2; MORC1; ENSG00000114487; HLA -A*23:01,HLA-B*35:01,HLA-B*35:03,HLA-B*55:01
IPVALPENVKL

SEQ ID NO: 7823 - protein, 8 aa, Homo sapiens
  Table 1.2; MORC1; ENSG00000114487; HLA -B*51:01,HLA-B*56:01
IPVDEITV

SEQ ID NO: 7824 - protein, 9 aa, Homo sapiens
  Table 1.2; MORC1; ENSG00000114487; HLA -B*35:03,HLA-B*55:01,HLA-B*56:01
IPVDEITVT

SEQ ID NO: 7825 - protein, 11 aa, Homo sapiens
  Table 1.2; MORC1; ENSG00000114487; HLA -B*35:01,HLA-B*54:01,HLA-B*56:01
IPVDEITVTST

SEQ ID NO: 7826 - protein, 9 aa, Homo sapiens
  Table 1.2; MORC1; ENSG00000114487; HLA -A*03:01,HLA-A*03:02,HLA-A*23:01,HLA-A*26:01,HLA-A*29:02, HLA-A*30:02,HLA-A*32:01,HLA-B*15:01,HLA-B*15:03,HLA-B*18:01, HLA-B*27:02,HLA-B*46:01,HLA-C*02:02,HLA-C*07:04,HLA-C*14:02,
  HLA-C*16:04
IQNTYMVQY

SEQ ID NO: 7827 - protein, 9 aa, Homo sapiens
  Table 1.2; MORC1; ENSG00000114487; HLA -A*01:01,HLA-A*11:01
ISETKIMKK

SEQ ID NO: 7828 - protein, 8 aa, Homo sapiens
  Table 1.2; MORC1; ENSG00000114487; HLA -B*13:02
IVNIPLEV

SEQ ID NO: 7829 - protein, 9 aa, Homo sapiens
  Table 1.2; MORC1; ENSG00000114487; HLA -B*15:01,HLA-B*35:01,HLA-B*46:01
IVNIPLEVM

SEQ ID NO: 7830 - protein, 9 aa, Homo sapiens
  Table 1.2; MORC1; ENSG00000114487; HLA -A*23:01,HLA-A*24:02,HLA-B*35:03,HLA-C*04:01,HLA-C*14:02, HLA-C*16:02
IYDSNTRGI

SEQ ID NO: 7831 - protein, 9 aa, Homo sapiens
  Table 1.2; MORC1; ENSG00000114487; HLA -A*23:01,HLA-A*24:02
IYGKCGTLL

SEQ ID NO: 7832 - protein, 8 aa, Homo sapiens
  Table 1.2; MORC1; ENSG00000114487; HLA -A*23:01
IYNLKLLL

SEQ ID NO: 7833 - protein, 10 aa, Homo sapiens
  Table 1.2; MORC1; ENSG00000114487; HLA -A*24:02
IYSNNRLIKM

SEQ ID NO: 7834 - protein, 8 aa, Homo sapiens
  Table 1.2; MORC1; ENSG00000114487; HLA -C*05:01
KAEEAVKI

SEQ ID NO: 7835 - protein, 10 aa, Homo sapiens
  Table 1.2; MORC1; ENSG00000114487; HLA -B*40:01
KEDILMAGAL

SEQ ID NO: 7836 - protein, 11 aa, Homo sapiens
  Table 1.2; MORC1; ENSG00000114487; HLA -A*30:01,HLA-B*40:01
KEDNLLFQNNL

SEQ ID NO: 7837 - protein, 8 aa, Homo sapiens
  Table 1.2; MORC1; ENSG00000114487; HLA -B*49:01
KEETMTCV

SEQ ID NO: 7838 - protein, 9 aa, Homo sapiens
  Table 1.2; MORC1; ENSG00000114487; HLA -B*18:01,HLA-B*37:01,HLA-B*40:01
KEETMTCVF

SEQ ID NO: 7839 - protein, 10 aa, Homo sapiens
  Table 1.2; MORC1; ENSG00000114487; HLA -B*44:02,HLA-B*44:03
KEIPLLNQEK

SEQ ID NO: 7840 - protein, 9 aa, Homo sapiens
  Table 1.2; MORC1; ENSG00000114487; HLA -B*44:02,HLA-B*44:03,HLA-B*49:01
KENTKTQKI

SEQ ID NO: 7841 - protein, 10 aa, Homo sapiens
  Table 1.2; MORC1; ENSG00000114487; HLA -B*38:01
KHESLSSFEL

SEQ ID NO: 7842 - protein, 8 aa, Homo sapiens
  Table 1.2; MORC1; ENSG00000114487; HLA -A*03:01,HLA-A*03:02
KIAESILK

SEQ ID NO: 7843 - protein, 10 aa, Homo sapiens
  Table 1.2; MORC1; ENSG00000114487; HLA -A*02:01,HLA-A*02:03
KIAESILKEA

SEQ ID NO: 7844 - protein, 9 aa, Homo sapiens
  Table 1.2; MORC1; ENSG00000114487; HLA -A*02:03,HLA-A*02:04
KLALLLQKL

SEQ ID NO: 7845 - protein, 10 aa, Homo sapiens
  Table 1.2; MORC1; ENSG00000114487; HLA -A*02:03
KLKSLLGAGV

SEQ ID NO: 7846 - protein, 10 aa, Homo sapiens
  Table 1.2; MORC1; ENSG00000114487; HLA -A*02:01,HLA-A*02:04
KLLLNGEPEL

SEQ ID NO: 7847 - protein, 9 aa, Homo sapiens
  Table 1.2; MORC1; ENSG00000114487; HLA -B*57:01
KLREILLYF

SEQ ID NO: 7848 - protein, 9 aa, Homo sapiens
  Table 1.2; MORC1; ENSG00000114487; HLA -B*13:02
KMNSQQQRI

SEQ ID NO: 7849 - protein, 8 aa, Homo sapiens
  Table 1.2; MORC1; ENSG00000114487; HLA -B*35:01
KPLNSFQY

SEQ ID NO: 7850 - protein, 10 aa, Homo sapiens
  Table 1.2; MORC1; ENSG00000114487; HLA -A*01:01,HLA-A*30:02,HLA-B*15:01,HLA-C*07:01
KQEFLNVQEY

SEQ ID NO: 7851 - protein, 10 aa, Homo sapiens
  Table 1.2; MORC1; ENSG00000114487; HLA -A*30:02,HLA-B*15:01
KQLRESVIKY

SEQ ID NO: 7852 - protein, 9 aa, Homo sapiens
  Table 1.2; MORC1; ENSG00000114487; HLA -A*31:01
KQRELKTAR

SEQ ID NO: 7853 - protein, 9 aa, Homo sapiens
  Table 1.2; MORC1; ENSG00000114487; HLA -A*03:01,HLA-A*03:02,HLA-A*11:01
KSNTDVSLK

SEQ ID NO: 7854 - protein, 9 aa, Homo sapiens
  Table 1.2; MORC1; ENSG00000114487; HLA -B*57:01
KTARTLSLF

SEQ ID NO: 7855 - protein, 10 aa, Homo sapiens
  Table 1.2; MORC1; ENSG00000114487; HLA -A*01:01,HLA-A*29:02
KTARTLSLFY

SEQ ID NO: 7856 - protein, 9 aa, Homo sapiens
  Table 1.2; MORC1; ENSG00000114487; HLA -A*01:01
KTDKEDILM

SEQ ID NO: 7857 - protein, 10 aa, Homo sapiens
  Table 1.2; MORC1; ENSG00000114487; HLA -B*58:01
KTEAELMQQF

SEQ ID NO: 7858 - protein, 9 aa, Homo sapiens
  Table 1.2; MORC1; ENSG00000114487; HLA -A*03:01,HLA-A*03:02,HLA-A*11:01
KVGSQLKLK

SEQ ID NO: 7859 - protein, 10 aa, Homo sapiens
  Table 1.2; MORC1; ENSG00000114487; HLA -A*03:01,HLA-A*03:02,HLA-A*11:01,HLA-A*25:01,HLA-A*26:01, HLA-A*29:02,HLA-A*30:02,HLA-A*31:01,HLA-A*32:01,HLA-B*15:01, HLA-B*46:01,HLA-B*57:01,HLA-B*58:01,HLA-C*02:02
KVMGQYLVQY

SEQ ID NO: 7860 - protein, 9 aa, Homo sapiens
  Table 1.2; MORC1; ENSG00000114487; HLA -A*23:01,HLA-A*24:02,HLA-A*32:01,HLA-C*14:02
KYLYVTSSF

SEQ ID NO: 7861 - protein, 9 aa, Homo sapiens
  Table 1.2; MORC1; ENSG00000114487; HLA -B*08:01,HLA-C*03:03,HLA-C*03:04
LAMKRSSSL

SEQ ID NO: 7862 - protein, 10 aa, Homo sapiens
  Table 1.2; MORC1; ENSG00000114487; HLA -A*33:01
LCNDVLAMKR

SEQ ID NO: 7863 - protein, 10 aa, Homo sapiens
  Table 1.2; MORC1; ENSG00000114487; HLA -B*27:02
LDVFSVDNEK

SEQ ID NO: 7864 - protein, 8 aa, Homo sapiens
  Table 1.2; MORC1; ENSG00000114487; HLA -B*44:02,HLA-B*44:03
LEDFPARW

SEQ ID NO: 7865 - protein, 10 aa, Homo sapiens
  Table 1.2; MORC1; ENSG00000114487; HLA -B*40:01
LEEPALSCEL

SEQ ID NO: 7866 - protein, 9 aa, Homo sapiens
  Table 1.2; MORC1; ENSG00000114487; HLA -B*15:03
LKHESLSSF

SEQ ID NO: 7867 - protein, 9 aa, Homo sapiens
  Table 1.2; MORC1; ENSG00000114487; HLA -A*03:01
LLFQNNLNK

SEQ ID NO: 7868 - protein, 10 aa, Homo sapiens
  Table 1.2; MORC1; ENSG00000114487; HLA -A*02:03,HLA-A*02:04
LLFQNNLNKV

SEQ ID NO: 7869 - protein, 9 aa, Homo sapiens
  Table 1.2; MORC1; ENSG00000114487; HLA -A*02:01,HLA-A*02:03,HLA-A*02:04
LLGAGVVGI

SEQ ID NO: 7870 - protein, 9 aa, Homo sapiens
  Table 1.2; MORC1; ENSG00000114487; HLA -A*01:01,HLA-A*23:01,HLA-A*24:02,HLA-A*29:02
LLKEDNLLF

SEQ ID NO: 7871 - protein, 9 aa, Homo sapiens
  Table 1.2; MORC1; ENSG00000114487; HLA -A*02:03
LLKVMGQYL

SEQ ID NO: 7872 - protein, 9 aa, Homo sapiens
  Table 1.2; MORC1; ENSG00000114487; HLA -A*02:01,HLA-A*02:04,HLA-B*55:01
LLLNGEPEL

SEQ ID NO: 7873 - protein, 9 aa, Homo sapiens
  Table 1.2; MORC1; ENSG00000114487; HLA -B*08:01
LLNQEKQEL

SEQ ID NO: 7874 - protein, 10 aa, Homo sapiens
  Table 1.2; MORC1; ENSG00000114487; HLA -A*02:01,HLA-A*02:03,HLA-A*02:04
LLYFFPEHQL

SEQ ID NO: 7875 - protein, 9 aa, Homo sapiens
  Table 1.2; MORC1; ENSG00000114487; HLA -B*46:01
LMAGALEDF

SEQ ID NO: 7876 - protein, 9 aa, Homo sapiens
  Table 1.2; MORC1; ENSG00000114487; HLA -A*33:01,HLA-A*33:03
LNKVTIDAR

SEQ ID NO: 7877 - protein, 8 aa, Homo sapiens
  Table 1.2; MORC1; ENSG00000114487; HLA -B*08:01
LNQEKQEL

SEQ ID NO: 7878 - protein, 10 aa, Homo sapiens
  Table 1.2; MORC1; ENSG00000114487; HLA -B*35:01,HLA-B*35:03,HLA-B*55:01,HLA-B*56:01,HLA-C*03:03
LPSELEEPAL

SEQ ID NO: 7879 - protein, 9 aa, Homo sapiens
  Table 1.2; MORC1; ENSG00000114487; HLA -B*07:02,HLA-B*35:01,HLA-B*35:03,HLA-B*51:01,HLA-B*54:01, HLA-B*55:01,HLA-B*56:01,HLA-C*07:02
LPSIPLGTM

SEQ ID NO: 7880 - protein, 10 aa, Homo sapiens
  Table 1.2; MORC1; ENSG00000114487; HLA -B*27:02
LSSFELSASR

SEQ ID NO: 7881 - protein, 9 aa, Homo sapiens
  Table 1.2; MORC1; ENSG00000114487; HLA -A*02:03
LSSGHIARV

SEQ ID NO: 7882 - protein, 9 aa, Homo sapiens
  Table 1.2; MORC1; ENSG00000114487; HLA -A*24:02
LYFFPEHQL

SEQ ID NO: 7883 - protein, 11 aa, Homo sapiens
  Table 1.2; MORC1; ENSG00000114487; HLA -A*24:02
LYVTSSFKGAF

SEQ ID NO: 7884 - protein, 10 aa, Homo sapiens
  Table 1.2; MORC1; ENSG00000114487; HLA -A*26:01,HLA-A*29:02,HLA-A*30:02,HLA-B*15:03,HLA-B*35:01
MCFNQIQNTY

SEQ ID NO: 7885 - protein, 9 aa, Homo sapiens
  Table 1.2; MORC1; ENSG00000114487; HLA -A*29:02,HLA-A*30:02,HLA-B*18:01,HLA-B*44:02,HLA-B*44:03
MELSIIYKY

SEQ ID NO: 7886 - protein, 10 aa, Homo sapiens
  Table 1.2; MORC1; ENSG00000114487; HLA -B*44:03
MEPSHNKQEF

SEQ ID NO: 7887 - protein, 9 aa, Homo sapiens
  Table 1.2; MORC1; ENSG00000114487; HLA -B*38:01,HLA-B*39:01
MHEKVGSQL

SEQ ID NO: 7888 - protein, 10 aa, Homo sapiens
  Table 1.2; MORC1; ENSG00000114487; HLA -A*03:02,HLA-A*11:01,HLA-B*27:02
MQQFDVIYGK

SEQ ID NO: 7889 - protein, 9 aa, Homo sapiens
  Table 1.2; MORC1; ENSG00000114487; HLA -B*35:01,HLA-B*35:03,HLA-B*55:01
NAQAASWEM

SEQ ID NO: 7890 - protein, 11 aa, Homo sapiens
  Table 1.2; MORC1; ENSG00000114487; HLA -A*33:01
NAQAASWEMKR

SEQ ID NO: 7891 - protein, 9 aa, Homo sapiens
  Table 1.2; MORC1; ENSG00000114487; HLA -A*33:01,HLA-A*33:03,HLA-C*07:06
NARDAGAER

SEQ ID NO: 7892 - protein, 9 aa, Homo sapiens
  Table 1.2; MORC1; ENSG00000114487; HLA -A*30:01,HLA-B*18:01,HLA-B*40:01,HLA-B*44:03,HLA-B*49:01
NEFGYQNDI

SEQ ID NO: 7893 - protein, 8 aa, Homo sapiens
  Table 1.2; MORC1; ENSG00000114487; HLA -B*18:01
NEKLQGGF

SEQ ID NO: 7894 - protein, 11 aa, Homo sapiens
  Table 1.2; MORC1; ENSG00000114487; HLA -A*01:01,HLA-B*55:01
NIEETDSDVEY

SEQ ID NO: 7895 - protein, 9 aa, Homo sapiens
  Table 1.2; MORC1; ENSG00000114487; HLA -A*02:03,HLA-B*08:01
NLKEKQREL

SEQ ID NO: 7896 - protein, 8 aa, Homo sapiens
  Table 1.2; MORC1; ENSG00000114487; HLA -B*08:01
NLRIKLAL

SEQ ID NO: 7897 - protein, 9 aa, Homo sapiens
  Table 1.2; MORC1; ENSG00000114487; HLA -A*33:01,HLA-A*68:01
NLSSGHIAR

SEQ ID NO: 7898 - protein, 10 aa, Homo sapiens
  Table 1.2; MORC1; ENSG00000114487; HLA -A*02:03
NLSSGHIARV

SEQ ID NO: 7899 - protein, 8 aa, Homo sapiens
  Table 1.2; MORC1; ENSG00000114487; HLA -B*08:01
NNLNKVTI

SEQ ID NO: 7900 - protein, 11 aa, Homo sapiens
  Table 1.2; MORC1; ENSG00000114487; HLA -A*33:01
NNLNKVTIDAR

SEQ ID NO: 7901 - protein, 10 aa, Homo sapiens
  Table 1.2; MORC1; ENSG00000114487; HLA -B*54:01
NPWMRIFIQA

SEQ ID NO: 7902 - protein, 9 aa, Homo sapiens
  Table 1.2; MORC1; ENSG00000114487; HLA -A*02:01,HLA-A*02:03,HLA-A*02:04,HLA-A*30:01,HLA-B*13:02, HLA-B*27:05,HLA-B*39:01
NQIQNTYMV

SEQ ID NO: 7903 - protein, 11 aa, Homo sapiens
  Table 1.2; MORC1; ENSG00000114487; HLA -A*30:02,HLA-B*15:01
NQIQNTYMVQY

SEQ ID NO: 7904 - protein, 9 aa, Homo sapiens
  Table 1.2; MORC1; ENSG00000114487; HLA -C*16:01
NSQQQRIPV

SEQ ID NO: 7905 - protein, 9 aa, Homo sapiens
  Table 1.2; MORC1; ENSG00000114487; HLA -A*29:02,HLA-C*16:01
NSTTHSFLF

SEQ ID NO: 7906 - protein, 10 aa, Homo sapiens
  Table 1.2; MORC1; ENSG00000114487; HLA -A*01:01
NTDVSLKQEK

SEQ ID NO: 7907 - protein, 9 aa, Homo sapiens
  Table 1.2; MORC1; ENSG00000114487; HLA -B*35:03
NTSDSDIIL

SEQ ID NO: 7908 - protein, 10 aa, Homo sapiens
  Table 1.2; MORC1; ENSG00000114487; HLA -A*68:02
NTSDSDIILV

SEQ ID NO: 7909 - protein, 9 aa, Homo sapiens
  Table 1.2; MORC1; ENSG00000114487; HLA -A*03:02,HLA-A*11:01,HLA-A*68:01
NTYMVQYEK

SEQ ID NO: 7910 - protein, 10 aa, Homo sapiens
  Table 1.2; MORC1; ENSG00000114487; HLA -A*68:01
NTYMVQYEKK

SEQ ID NO: 7911 - protein, 9 aa, Homo sapiens
  Table 1.2; MORC1; ENSG00000114487; HLA -C*01:02
NVPMEDVNL

SEQ ID NO: 7912 - protein, 9 aa, Homo sapiens
  Table 1.2; MORC1; ENSG00000114487; HLA -A*02:01,HLA-A*02:04,HLA-A*02:07,HLA-A*68:02,HLA-B*35:03, HLA-B*38:01,HLA-B*55:01,HLA-C*16:02
NVQEYNHLL

SEQ ID NO: 7913 - protein, 10 aa, Homo sapiens
  Table 1.2; MORC1; ENSG00000114487; HLA -A*03:02,HLA-A*11:01,HLA-A*33:01
NVQEYNHLLK

SEQ ID NO: 7914 - protein, 9 aa, Homo sapiens
  Table 1.2; MORC1; ENSG00000114487; HLA -A*31:01
PLNSFQYQR

SEQ ID NO: 7915 - protein, 9 aa, Homo sapiens
  Table 1.2; MORC1; ENSG00000114487; HLA -A*31:01,HLA-A*33:03,HLA-A*68:01
QAASWEMKR

SEQ ID NO: 7916 - protein, 8 aa, Homo sapiens
  Table 1.2; MORC1; ENSG00000114487; HLA -B*51:01
QAMGIPFI

SEQ ID NO: 7917 - protein, 9 aa, Homo sapiens
  Table 1.2; MORC1; ENSG00000114487; HLA -B*51:01
QAMGIPFII

SEQ ID NO: 7918 - protein, 9 aa, Homo sapiens
  Table 1.2; MORC1; ENSG00000114487; HLA -A*25:01,HLA-A*26:01,HLA-A*30:01,HLA-A*30:02,HLA-B*15:01, HLA-B*15:03,HLA-B*18:01,HLA-B*27:02,HLA-B*27:05,HLA-B*35:01, HLA-B*37:01,HLA-B*40:01,HLA-B*44:02,HLA-B*44:03,HLA-B*49:01,
  HLA-C*02:02,HLA-C*12:03,HLA-C*16:04
QEFLNVQEY

SEQ ID NO: 7919 - protein, 9 aa, Homo sapiens
  Table 1.2; MORC1; ENSG00000114487; HLA -B*44:02
QEKEFFDIW

SEQ ID NO: 7920 - protein, 9 aa, Homo sapiens
  Table 1.2; MORC1; ENSG00000114487; HLA -A*30:01,HLA-B*40:01,HLA-B*40:02
QEKKEIPLL

SEQ ID NO: 7921 - protein, 9 aa, Homo sapiens
  Table 1.2; MORC1; ENSG00000114487; HLA -A*30:01,HLA-B*44:03,HLA-B*49:01
QEYNHLLKV

SEQ ID NO: 7922 - protein, 10 aa, Homo sapiens
  Table 1.2; MORC1; ENSG00000114487; HLA -B*44:02,HLA-B*44:03
QEYNHLLKVM

SEQ ID NO: 7923 - protein, 8 aa, Homo sapiens
  Table 1.2; MORC1; ENSG00000114487; HLA -A*02:03
QIANITTV

SEQ ID NO: 7924 - protein, 9 aa, Homo sapiens
  Table 1.2; MORC1; ENSG00000114487; HLA -A*23:01,HLA-A*24:02,HLA-A*25:01,HLA-A*26:01,HLA-A*32:01, HLA-A*33:03,HLA-A*68:01,HLA-A*68:02,HLA-B*15:01,HLA-B*15:03, HLA-B*35:01,HLA-B*38:01,HLA-B*44:02,HLA-B*44:03,HLA-B*57:01,
  HLA-B*58:01,HLA-C*07:04,HLA-C*12:03,HLA-C*16:04
QIANITTVW

SEQ ID NO: 7925 - protein, 10 aa, Homo sapiens
  Table 1.2; MORC1; ENSG00000114487; HLA -A*68:01
QIANITTVWR

SEQ ID NO: 7926 - protein, 10 aa, Homo sapiens
  Table 1.2; MORC1; ENSG00000114487; HLA -A*03:02,HLA-A*29:02,HLA-A*30:02,HLA-C*07:04
QIQNTYMVQY

SEQ ID NO: 7927 - protein, 8 aa, Homo sapiens
  Table 1.2; MORC1; ENSG00000114487; HLA -B*08:01
QLKLKSLL

SEQ ID NO: 7928 - protein, 9 aa, Homo sapiens
  Table 1.2; MORC1; ENSG00000114487; HLA -A*01:01,HLA-A*03:01,HLA-A*26:01,HLA-A*29:02,HLA-A*30:02, HLA-B*15:01,HLA-B*15:03,HLA-B*46:01
QLRESVIKY

SEQ ID NO: 7929 - protein, 9 aa, Homo sapiens
  Table 1.2; MORC1; ENSG00000114487; HLA -B*54:01,HLA-B*56:01
QPQPQFIPV

SEQ ID NO: 7930 - protein, 9 aa, Homo sapiens
  Table 1.2; MORC1; ENSG00000114487; HLA -A*03:01,HLA-A*03:02,HLA-A*11:01,HLA-A*31:01,HLA-B*27:05
QQFDVIYGK

SEQ ID NO: 7931 - protein, 9 aa, Homo sapiens
  Table 1.2; MORC1; ENSG00000114487; HLA -A*02:04,HLA-A*32:01,HLA-B*13:02,HLA-B*15:01,HLA-B*15:03, HLA-B*27:05,HLA-B*38:01,HLA-B*39:01
QQQRIPVAL

SEQ ID NO: 7932 - protein, 8 aa, Homo sapiens
  Table 1.2; MORC1; ENSG00000114487; HLA -B*08:01,HLA-B*15:01,HLA-B*15:03
QQRIPVAL

SEQ ID NO: 7933 - protein, 10 aa, Homo sapiens
  Table 1.2; MORC1; ENSG00000114487; HLA -A*68:01
QSIIYDSNTR

SEQ ID NO: 7934 - protein, 9 aa, Homo sapiens
  Table 1.2; MORC1; ENSG00000114487; HLA -A*32:01,HLA-A*68:02,HLA-B*13:02,HLA-B*58:01,HLA-C*16:01, HLA-C*16:02
QSTPVKETV

SEQ ID NO: 7935 - protein, 9 aa, Homo sapiens
  Table 1.2; MORC1; ENSG00000114487; HLA -A*01:01
QTDTYLEAL

SEQ ID NO: 7936 - protein, 10 aa, Homo sapiens
  Table 1.2; MORC1; ENSG00000114487; HLA -A*01:01
QTDTYLEALL

SEQ ID NO: 7937 - protein, 9 aa, Homo sapiens
  Table 1.2; MORC1; ENSG00000114487; HLA -A*03:02,HLA-A*11:01,HLA-B*27:02
RALEDVEAK

SEQ ID NO: 7938 - protein, 11 aa, Homo sapiens
  Table 1.2; MORC1; ENSG00000114487; HLA -A*03:02,HLA-A*11:01
RALEDVEAKQK

SEQ ID NO: 7939 - protein, 9 aa, Homo sapiens
  Table 1.2; MORC1; ENSG00000114487; HLA -B*07:02
RAQPTEGCL

SEQ ID NO: 7940 - protein, 10 aa, Homo sapiens
  Table 1.2; MORC1; ENSG00000114487; HLA -A*03:02,HLA-A*11:01
RAQPTEGCLK

SEQ ID NO: 7941 - protein, 9 aa, Homo sapiens
  Table 1.2; MORC1; ENSG00000114487; HLA -A*03:01,HLA-B*57:01
RAYTSVLYF

SEQ ID NO: 7942 - protein, 8 aa, Homo sapiens
  Table 1.2; MORC1; ENSG00000114487; HLA -B*37:01
RDAGAERL

SEQ ID NO: 7943 - protein, 11 aa, Homo sapiens
  Table 1.2; MORC1; ENSG00000114487; HLA -B*44:02,HLA-B*44:03
RESVTDDPQKF

SEQ ID NO: 7944 - protein, 10 aa, Homo sapiens
  Table 1.2; MORC1; ENSG00000114487; HLA -A*03:01
RIFIQAKRVK

SEQ ID NO: 7945 - protein, 9 aa, Homo sapiens
  Table 1.2; MORC1; ENSG00000114487; HLA -B*57:01
RIGKDFILF

SEQ ID NO: 7946 - protein, 10 aa, Homo sapiens
  Table 1.2; MORC1; ENSG00000114487; HLA -A*02:07
RIPVALPENV

SEQ ID NO: 7947 - protein, 11 aa, Homo sapiens
  Table 1.2; MORC1; ENSG00000114487; HLA -A*03:02
RLDVFSVDNEK

SEQ ID NO: 7948 - protein, 9 aa, Homo sapiens
  Table 1.2; MORC1; ENSG00000114487; HLA -A*03:02
RLPLEKNEK

SEQ ID NO: 7949 - protein, 9 aa, Homo sapiens
  Table 1.2; MORC1; ENSG00000114487; HLA -B*13:02
RQAMGIPFI

SEQ ID NO: 7950 - protein, 9 aa, Homo sapiens
  Table 1.2; MORC1; ENSG00000114487; HLA -A*30:02,HLA-B*57:01,HLA-B*58:01
RSQAGMFIY

SEQ ID NO: 7951 - protein, 11 aa, Homo sapiens
  Table 1.2; MORC1; ENSG00000114487; HLA -B*57:01,HLA-B*58:01
RSQIANITTVW

SEQ ID NO: 7952 - protein, 8 aa, Homo sapiens
  Table 1.2; MORC1; ENSG00000114487; HLA -B*57:01,HLA-B*58:01
RSSSLPSW

SEQ ID NO: 7953 - protein, 9 aa, Homo sapiens
  Table 1.2; MORC1; ENSG00000114487; HLA -A*02:04
RTLSLFYGV

SEQ ID NO: 7954 - protein, 9 aa, Homo sapiens
  Table 1.2; MORC1; ENSG00000114487; HLA -A*03:01,HLA-A*03:02,HLA-A*25:01,HLA-A*26:01,HLA-A*29:02, HLA-A*30:02,HLA-A*31:01,HLA-A*32:01,HLA-B*15:01,HLA-B*15:03, HLA-B*46:01,HLA-B*57:01,HLA-B*58:01,HLA-C*07:04
RVLPSSTNY

SEQ ID NO: 7955 - protein, 9 aa, Homo sapiens
  Table 1.2; MORC1; ENSG00000114487; HLA -A*03:01,HLA-A*03:02
RVSVSGSCK

SEQ ID NO: 7956 - protein, 10 aa, Homo sapiens
  Table 1.2; MORC1; ENSG00000114487; HLA -A*24:02
RYPALQRAQL

SEQ ID NO: 7957 - protein, 8 aa, Homo sapiens
  Table 1.2; MORC1; ENSG00000114487; HLA -A*31:01,HLA-A*33:01,HLA-A*33:03,HLA-A*68:01
SAKDVLQR

SEQ ID NO: 7958 - protein, 9 aa, Homo sapiens
  Table 1.2; MORC1; ENSG00000114487; HLA -B*54:01
SAKDVLQRA

SEQ ID NO: 7959 - protein, 9 aa, Homo sapiens
  Table 1.2; MORC1; ENSG00000114487; HLA -A*11:01
SDIILVSDK

SEQ ID NO: 7960 - protein, 10 aa, Homo sapiens
  Table 1.2; MORC1; ENSG00000114487; HLA -A*30:01
SDKSNTDVSL

SEQ ID NO: 7961 - protein, 11 aa, Homo sapiens
  Table 1.2; MORC1; ENSG00000114487; HLA -A*11:01
SDKSNTDVSLK

SEQ ID NO: 7962 - protein, 8 aa, Homo sapiens
  Table 1.2; MORC1; ENSG00000114487; HLA -B*37:01
SDSDIILV

SEQ ID NO: 7963 - protein, 8 aa, Homo sapiens
  Table 1.2; MORC1; ENSG00000114487; HLA -A*30:01,HLA-B*18:01,HLA-B*40:01
SELEEPAL

SEQ ID NO: 7964 - protein, 10 aa, Homo sapiens
  Table 1.2; MORC1; ENSG00000114487; HLA -A*25:01,HLA-A*30:01,HLA-B*27:02,HLA-B*44:02,HLA-B*44:03, HLA-B*49:01,HLA-C*16:04
SEVVVPMPSW

SEQ ID NO: 7965 - protein, 10 aa, Homo sapiens
  Table 1.2; MORC1; ENSG00000114487; HLA -A*29:02
SFRAYTSVLY

SEQ ID NO: 7966 - protein, 9 aa, Homo sapiens
  Table 1.2; MORC1; ENSG00000114487; HLA -B*07:02,HLA-B*08:01
SGHIARVSV

SEQ ID NO: 7967 - protein, 9 aa, Homo sapiens
  Table 1.2; MORC1; ENSG00000114487; HLA -A*68:01,HLA-C*07:06
SIIYDSNTR

SEQ ID NO: 7968 - protein, 9 aa, Homo sapiens
  Table 1.2; MORC1; ENSG00000114487; HLA -A*03:02
SILKEAQIK

SEQ ID NO: 7969 - protein, 8 aa, Homo sapiens
  Table 1.2; MORC1; ENSG00000114487; HLA -A*02:01,HLA-A*02:04,HLA-B*13:02
SLFYGVNV

SEQ ID NO: 7970 - protein, 11 aa, Homo sapiens
  Table 1.2; MORC1; ENSG00000114487; HLA -A*31:01,HLA-A*68:01
SLFYGVNVENR

SEQ ID NO: 7971 - protein, 10 aa, Homo sapiens
  Table 1.2; MORC1; ENSG00000114487; HLA -A*02:01,HLA-A*02:03,HLA-A*02:04,HLA-B*55:01
SLLGAGVVGI

SEQ ID NO: 7972 - protein, 9 aa, Homo sapiens
  Table 1.2; MORC1; ENSG00000114487; HLA -A*03:02
SLNFVEECK

SEQ ID NO: 7973 - protein, 9 aa, Homo sapiens
  Table 1.2; MORC1; ENSG00000114487; HLA -A*02:04,HLA-A*02:07,HLA-A*24:02
SLPSWKSLL

SEQ ID NO: 7974 - protein, 11 aa, Homo sapiens
  Table 1.2; MORC1; ENSG00000114487; HLA -A*02:07
SLPSWKSLLNV

SEQ ID NO: 7975 - protein, 9 aa, Homo sapiens
  Table 1.2; MORC1; ENSG00000114487; HLA -A*02:01,HLA-A*02:04,HLA-A*02:07,HLA-B*37:01
SLSEVVVPM

SEQ ID NO: 7976 - protein, 9 aa, Homo sapiens
  Table 1.2; MORC1; ENSG00000114487; HLA -B*39:01
SLSSAKDVL

SEQ ID NO: 7977 - protein, 9 aa, Homo sapiens
  Table 1.2; MORC1; ENSG00000114487; HLA -A*02:01,HLA-B*13:02
SLSSFELSA

SEQ ID NO: 7978 - protein, 10 aa, Homo sapiens
  Table 1.2; MORC1; ENSG00000114487; HLA -B*07:02,HLA-B*56:01,HLA-C*07:02
SPASSQSTPV

SEQ ID NO: 7979 - protein, 11 aa, Homo sapiens
  Table 1.2; MORC1; ENSG00000114487; HLA -A*11:01
SPASSQSTPVK

SEQ ID NO: 7980 - protein, 9 aa, Homo sapiens
  Table 1.2; MORC1; ENSG00000114487; HLA -B*35:03
SPEEASDII

SEQ ID NO: 7981 - protein, 10 aa, Homo sapiens
  Table 1.2; MORC1; ENSG00000114487; HLA -B*35:01,HLA-B*35:03,HLA-B*55:01,HLA-C*03:03
SPEEASDIIY

SEQ ID NO: 7982 - protein, 11 aa, Homo sapiens
  Table 1.2; MORC1; ENSG00000114487; HLA -B*35:01,HLA-B*35:03,HLA-B*55:01
SPEEASDIIYF

SEQ ID NO: 7983 - protein, 9 aa, Homo sapiens
  Table 1.2; MORC1; ENSG00000114487; HLA -B*07:02,HLA-B*08:01,HLA-B*35:01,HLA-B*35:03,HLA-B*39:01, HLA-B*40:01,HLA-B*55:01,HLA-B*56:01,HLA-C*07:02
SPFKTEAEL

SEQ ID NO: 7984 - protein, 10 aa, Homo sapiens
  Table 1.2; MORC1; ENSG00000114487; HLA -B*07:02,HLA-B*35:01
SPFKTEAELM

SEQ ID NO: 7985 - protein, 11 aa, Homo sapiens
  Table 1.2; MORC1; ENSG00000114487; HLA -B*07:02,HLA-C*07:02
SPSKNEKEKQL

SEQ ID NO: 7986 - protein, 8 aa, Homo sapiens
  Table 1.2; MORC1; ENSG00000114487; HLA -A*30:02,HLA-B*15:01,HLA-B*15:03
SQAGMFIY

SEQ ID NO: 7987 - protein, 9 aa, Homo sapiens
  Table 1.2; MORC1; ENSG00000114487; HLA -A*02:01,HLA-A*02:03,HLA-A*02:04,HLA-A*26:01,HLA-A*30:01, HLA-A*32:01,HLA-B*13:02,HLA-B*15:01,HLA-B*15:03,HLA-B*39:01, HLA-B*40:02,HLA-B*46:01,HLA-B*49:01,HLA-B*55:01,HLA-C*02:02,
  HLA-C*06:02
SQIANITTV

SEQ ID NO: 7988 - protein, 10 aa, Homo sapiens
  Table 1.2; MORC1; ENSG00000114487; HLA -A*25:01,HLA-A*26:01,HLA-A*32:01,HLA-B*15:01,HLA-B*27:02, HLA-B*44:02,HLA-B*44:03,HLA-B*57:01,HLA-B*58:01,HLA-C*16:04
SQIANITTVW

SEQ ID NO: 7989 - protein, 9 aa, Homo sapiens
  Table 1.2; MORC1; ENSG00000114487; HLA -B*13:02
SQQQRIPVA

SEQ ID NO: 7990 - protein, 9 aa, Homo sapiens
  Table 1.2; MORC1; ENSG00000114487; HLA -A*02:03,HLA-B*13:02
SQRSQIANI

SEQ ID NO: 7991 - protein, 10 aa, Homo sapiens
  Table 1.2; MORC1; ENSG00000114487; HLA -B*13:02
SQSTPVKETV

SEQ ID NO: 7992 - protein, 11 aa, Homo sapiens
  Table 1.2; MORC1; ENSG00000114487; HLA -C*07:06
SQSTPVKETVR

SEQ ID NO: 7993 - protein, 9 aa, Homo sapiens
  Table 1.2; MORC1; ENSG00000114487; HLA -A*33:03,HLA-A*68:01,HLA-C*07:06
SSAKDVLQR

SEQ ID NO: 7994 - protein, 9 aa, Homo sapiens
  Table 1.2; MORC1; ENSG00000114487; HLA -A*11:01,HLA-A*31:01,HLA-A*33:01,HLA-A*33:03,HLA-A*68:01, HLA-B*27:05,HLA-C*07:06
SSFELSASR

SEQ ID NO: 7995 - protein, 10 aa, Homo sapiens
  Table 1.2; MORC1; ENSG00000114487; HLA -A*31:01,HLA-A*68:01,HLA-C*07:06
SSFELSASRR

SEQ ID NO: 7996 - protein, 9 aa, Homo sapiens
  Table 1.2; MORC1; ENSG00000114487; HLA -A*11:01
STCLTSAHK

SEQ ID NO: 7997 - protein, 10 aa, Homo sapiens
  Table 1.2; MORC1; ENSG00000114487; HLA -A*03:01,HLA-A*03:02,HLA-A*11:01,HLA-A*68:01,HLA-C*07:06
STISPSKNEK

SEQ ID NO: 7998 - protein, 9 aa, Homo sapiens
  Table 1.2; MORC1; ENSG00000114487; HLA -A*01:01,HLA-A*03:01,HLA-A*11:01,HLA-A*25:01,HLA-A*26:01, HLA-A*29:02,HLA-A*30:02,HLA-A*32:01,HLA-B*44:03,HLA-B*57:01
STLKFIGQY

SEQ ID NO: 7999 - protein, 10 aa, Homo sapiens
  Table 1.2; MORC1; ENSG00000114487; HLA -A*11:01
STPVKETVRK

SEQ ID NO: 8000 - protein, 8 aa, Homo sapiens
  Table 1.2; MORC1; ENSG00000114487; HLA -B*57:01
STTHSFLF

SEQ ID NO: 8001 - protein, 8 aa, Homo sapiens
  Table 1.2; MORC1; ENSG00000114487; HLA -A*31:01
SVIKYQNR

SEQ ID NO: 8002 - protein, 9 aa, Homo sapiens
  Table 1.2; MORC1; ENSG00000114487; HLA -A*24:02,HLA-A*25:01,HLA-A*26:01,HLA-A*29:02,HLA-A*32:01, HLA-A*68:01,HLA-B*38:01,HLA-B*58:01
SVTDDPQKF

SEQ ID NO: 8003 - protein, 9 aa, Homo sapiens
  Table 1.2; MORC1; ENSG00000114487; HLA -A*29:02
TARTLSLFY

SEQ ID NO: 8004 - protein, 9 aa, Homo sapiens
  Table 1.2; MORC1; ENSG00000114487; HLA -B*37:01
TDDPQKFAM

SEQ ID NO: 8005 - protein, 8 aa, Homo sapiens
  Table 1.2; MORC1; ENSG00000114487; HLA -B*37:01
TDKEDILM

SEQ ID NO: 8006 - protein, 10 aa, Homo sapiens
  Table 1.2; MORC1; ENSG00000114487; HLA -B*27:02
TDTYLEALLK

SEQ ID NO: 8007 - protein, 9 aa, Homo sapiens
  Table 1.2; MORC1; ENSG00000114487; HLA -A*25:01,HLA-A*30:01,HLA-B*18:01,HLA-B*27:02,HLA-B*37:01, HLA-B*38:01,HLA-B*40:01,HLA-B*44:02,HLA-B*44:03,HLA-B*49:01, HLA-C*02:02,HLA-C*16:04
TEAELMQQF

SEQ ID NO: 8008 - protein, 10 aa, Homo sapiens
  Table 1.2; MORC1; ENSG00000114487; HLA -B*08:01
TGINNRNLTL

SEQ ID NO: 8009 - protein, 11 aa, Homo sapiens
  Table 1.2; MORC1; ENSG00000114487; HLA -A*24:02
TGINNRNLTLF

SEQ ID NO: 8010 - protein, 9 aa, Homo sapiens
  Table 1.2; MORC1; ENSG00000114487; HLA -A*03:02
TISPSKNEK

SEQ ID NO: 8011 - protein, 9 aa, Homo sapiens
  Table 1.2; MORC1; ENSG00000114487; HLA -A*29:02,HLA-A*30:02
TLFCNEFGY

SEQ ID NO: 8012 - protein, 8 aa, Homo sapiens
  Table 1.2; MORC1; ENSG00000114487; HLA -A*30:02,HLA-B*15:01,HLA-B*46:01
TLKFIGQY

SEQ ID NO: 8013 - protein, 8 aa, Homo sapiens
  Table 1.2; MORC1; ENSG00000114487; HLA -A*02:04
TLLVIYNL

SEQ ID NO: 8014 - protein, 10 aa, Homo sapiens
  Table 1.2; MORC1; ENSG00000114487; HLA -A*02:04
TLLVIYNLKL

SEQ ID NO: 8015 - protein, 9 aa, Homo sapiens
  Table 1.2; MORC1; ENSG00000114487; HLA -A*03:01,HLA-A*03:02,HLA-A*11:01
TMSTISPSK

SEQ ID NO: 8016 - protein, 10 aa, Homo sapiens
  Table 1.2; MORC1; ENSG00000114487; HLA -B*07:02
TPVKETVRKL

SEQ ID NO: 8017 - protein, 9 aa, Homo sapiens
  Table 1.2; MORC1; ENSG00000114487; HLA -A*01:01
TSDSDIILV

SEQ ID NO: 8018 - protein, 8 aa, Homo sapiens
  Table 1.2; MORC1; ENSG00000114487; HLA -C*16:01
TSSFKGAF

SEQ ID NO: 8019 - protein, 9 aa, Homo sapiens
  Table 1.2; MORC1; ENSG00000114487; HLA -B*57:01
TSVLYFNPW

SEQ ID NO: 8020 - protein, 9 aa, Homo sapiens
  Table 1.2; MORC1; ENSG00000114487; HLA -A*02:01,HLA-A*23:01,HLA-B*35:03,HLA-B*40:01,HLA-B*58:01, HLA-C*03:03,HLA-C*03:04,HLA-C*05:01,HLA-C*07:04
VALPENVKL

SEQ ID NO: 8021 - protein, 8 aa, Homo sapiens
  Table 1.2; MORC1; ENSG00000114487; HLA -B*37:01
VEAKQKNL

SEQ ID NO: 8022 - protein, 8 aa, Homo sapiens
  Table 1.2; MORC1; ENSG00000114487; HLA -B*18:01,HLA-B*37:01
VEKPLNSF

SEQ ID NO: 8023 - protein, 10 aa, Homo sapiens
  Table 1.2; MORC1; ENSG00000114487; HLA -A*29:02,HLA-A*30:02,HLA-B*18:01,HLA-B*27:02,HLA-B*44:02, HLA-B*44:03
VEKPLNSFQY

SEQ ID NO: 8024 - protein, 9 aa, Homo sapiens
  Table 1.2; MORC1; ENSG00000114487; HLA -A*30:01,HLA-B*37:01,HLA-B*40:01,HLA-B*44:03
VENRSQAGM

SEQ ID NO: 8025 - protein, 8 aa, Homo sapiens
  Table 1.2; MORC1; ENSG00000114487; HLA -B*18:01
VEYISETK

SEQ ID NO: 8026 - protein, 9 aa, Homo sapiens
  Table 1.2; MORC1; ENSG00000114487; HLA -A*23:01,HLA-A*30:01,HLA-B*13:02,HLA-B*18:01,HLA-B*40:01, HLA-B*40:02,HLA-B*44:02,HLA-B*44:03,HLA-B*49:01
VEYISETKI

SEQ ID NO: 8027 - protein, 10 aa, Homo sapiens
  Table 1.2; MORC1; ENSG00000114487; HLA -A*30:01,HLA-B*49:01
VEYISETKIM

SEQ ID NO: 8028 - protein, 9 aa, Homo sapiens
  Table 1.2; MORC1; ENSG00000114487; HLA -A*24:02
VFSVDNEKL

SEQ ID NO: 8029 - protein, 8 aa, Homo sapiens
  Table 1.2; MORC1; ENSG00000114487; HLA -B*08:01
VIKYQNRL

SEQ ID NO: 8030 - protein, 9 aa, Homo sapiens
  Table 1.2; MORC1; ENSG00000114487; HLA -A*02:04
VIYNLKLLL

SEQ ID NO: 8031 - protein, 8 aa, Homo sapiens
  Table 1.2; MORC1; ENSG00000114487; HLA -A*32:01,HLA-B*15:01,HLA-B*15:03,HLA-B*46:01
VLPSSTNY

SEQ ID NO: 8032 - protein, 9 aa, Homo sapiens
  Table 1.2; MORC1; ENSG00000114487; HLA -A*29:02,HLA-A*30:02,HLA-B*15:01,HLA-B*46:01,HLA-C*07:04
VMGQYLVQY

SEQ ID NO: 8033 - protein, 10 aa, Homo sapiens
  Table 1.2; MORC1; ENSG00000114487; HLA -A*33:01,HLA-A*33:03
VNLSSGHIAR

SEQ ID NO: 8034 - protein, 8 aa, Homo sapiens
  Table 1.2; MORC1; ENSG00000114487; HLA -B*35:03,HLA-B*55:01
VPMEDVNL

SEQ ID NO: 8035 - protein, 11 aa, Homo sapiens
  Table 1.2; MORC1; ENSG00000114487; HLA -B*56:01
VPMEDVNLSSG

SEQ ID NO: 8036 - protein, 8 aa, Homo sapiens
  Table 1.2; MORC1; ENSG00000114487; HLA -B*51:01
VPMPSWLI

SEQ ID NO: 8037 - protein, 9 aa, Homo sapiens
  Table 1.2; MORC1; ENSG00000114487; HLA -A*01:01
VQEYNHLLK

SEQ ID NO: 8038 - protein, 9 aa, Homo sapiens
  Table 1.2; MORC1; ENSG00000114487; HLA -B*13:02
VQYCKDTGI

SEQ ID NO: 8039 - protein, 9 aa, Homo sapiens
  Table 1.2; MORC1; ENSG00000114487; HLA -A*31:01
VQYEKKIKR

SEQ ID NO: 8040 - protein, 9 aa, Homo sapiens
  Table 1.2; MORC1; ENSG00000114487; HLA -A*01:01,HLA-C*05:01
VSDKSNTDV

SEQ ID NO: 8041 - protein, 11 aa, Homo sapiens
  Table 1.2; MORC1; ENSG00000114487; HLA -C*05:01
VSDKSNTDVSL

SEQ ID NO: 8042 - protein, 8 aa, Homo sapiens
  Table 1.2; MORC1; ENSG00000114487; HLA -A*01:01,HLA-A*32:01,HLA-B*39:01,HLA-B*58:01,HLA-C*04:01, HLA-C*05:01
VTDDPQKF

SEQ ID NO: 8043 - protein, 10 aa, Homo sapiens
  Table 1.2; MORC1; ENSG00000114487; HLA -A*01:01,HLA-A*02:07,HLA-C*05:01
VTDDPQKFAM

SEQ ID NO: 8044 - protein, 11 aa, Homo sapiens
  Table 1.2; MORC1; ENSG00000114487; HLA -A*01:01
VTDDPQKFAME

SEQ ID NO: 8045 - protein, 9 aa, Homo sapiens
  Table 1.2; MORC1; ENSG00000114487; HLA -A*32:01
VTIDARHRL

SEQ ID NO: 8046 - protein, 9 aa, Homo sapiens
  Table 1.2; MORC1; ENSG00000114487; HLA -A*25:01,HLA-A*26:01,HLA-A*30:02,HLA-A*32:01,HLA-C*16:01
VTSSFKGAF

SEQ ID NO: 8047 - protein, 10 aa, Homo sapiens
  Table 1.2; MORC1; ENSG00000114487; HLA -A*03:01,HLA-A*03:02,HLA-A*11:01
VTSSFKGAFK

SEQ ID NO: 8048 - protein, 9 aa, Homo sapiens
  Table 1.2; MORC1; ENSG00000114487; HLA -A*02:07
VVPMPSWLI

SEQ ID NO: 8049 - protein, 8 aa, Homo sapiens
  Table 1.2; MORC1; ENSG00000114487; HLA -A*25:01,HLA-B*57:01,HLA-B*58:01
VVVPMPSW

SEQ ID NO: 8050 - protein, 10 aa, Homo sapiens
  Table 1.2; MORC1; ENSG00000114487; HLA -A*31:01,HLA-A*33:01,HLA-A*33:03,HLA-A*68:01,HLA-C*07:06
YCKDTGINNR

SEQ ID NO: 8051 - protein, 8 aa, Homo sapiens
  Table 1.2; MORC1; ENSG00000114487; HLA -B*37:01
YDSNTRGI

SEQ ID NO: 8052 - protein, 8 aa, Homo sapiens
  Table 1.2; MORC1; ENSG00000114487; HLA -A*23:01
YFFPEHQL

SEQ ID NO: 8053 - protein, 9 aa, Homo sapiens
  Table 1.2; MORC1; ENSG00000114487; HLA -A*24:02
YFNPWMRIF

SEQ ID NO: 8054 - protein, 8 aa, Homo sapiens
  Table 1.2; MORC1; ENSG00000114487; HLA -B*27:02
YGVNVENR

SEQ ID NO: 8055 - protein, 9 aa, Homo sapiens
  Table 1.2; MORC1; ENSG00000114487; HLA -A*03:01,HLA-A*03:02,HLA-A*11:01,HLA-A*68:01
YISETKIMK

SEQ ID NO: 8056 - protein, 10 aa, Homo sapiens
  Table 1.2; MORC1; ENSG00000114487; HLA -A*03:01,HLA-A*11:01,HLA-A*68:01
YISETKIMKK

SEQ ID NO: 8057 - protein, 8 aa, Homo sapiens
  Table 1.2; MORC1; ENSG00000114487; HLA -B*15:01,HLA-B*15:03,HLA-B*37:01,HLA-B*46:01,HLA-C*14:02
YLYVTSSF

SEQ ID NO: 8058 - protein, 9 aa, Homo sapiens
  Table 1.2; MORC1; ENSG00000114487; HLA -A*03:01
YLYVTSSFK

SEQ ID NO: 8059 - protein, 9 aa, Homo sapiens
  Table 1.2; MORC1; ENSG00000114487; HLA -B*07:02,HLA-B*08:01,HLA-B*35:03,HLA-B*51:01,HLA-B*56:01, HLA-C*07:02
YPALQRAQL

SEQ ID NO: 8060 - protein, 11 aa, Homo sapiens
  Table 1.2; MORC1; ENSG00000114487; HLA -B*07:02
YPALQRAQLRL

SEQ ID NO: 8061 - protein, 9 aa, Homo sapiens
  Table 1.2; MORC1; ENSG00000114487; HLA -A*03:02,HLA-A*11:01,HLA-B*27:02,HLA-B*27:05
YQNDIDVEK

SEQ ID NO: 8062 - protein, 9 aa, Homo sapiens
  Table 1.2; MORC1; ENSG00000114487; HLA -B*08:01,HLA-B*46:01,HLA-C*16:01
YSNNRLIKM

SEQ ID NO: 8063 - protein, 9 aa, Homo sapiens
  Table 1.2; MORC1; ENSG00000114487; HLA -B*54:01
YVTSSFKGA

SEQ ID NO: 8064 - protein, 10 aa, Homo sapiens
  Table 1.2; MORC1; ENSG00000114487; HLA -A*25:01,HLA-A*26:01
YVTSSFKGAF

SEQ ID NO: 8065 - protein, 10 aa, Homo sapiens
  Table 1.2; PAGE1; ENSG00000068985; HLA -A*11:01,HLA-B*27:02
ADSQELVQPK

SEQ ID NO: 8066 - protein, 10 aa, Homo sapiens
  Table 1.2; PAGE1; ENSG00000068985; HLA -A*03:02,HLA-A*11:01,HLA-B*27:02
ADSQEQVHPK

SEQ ID NO: 8067 - protein, 8 aa, Homo sapiens
  Table 1.2; PAGE1; ENSG00000068985; HLA -B*18:01
DEVESPTQ

SEQ ID NO: 8068 - protein, 8 aa, Homo sapiens
  Table 1.2; PAGE1; ENSG00000068985; HLA -B*51:01
DGPDTKRV

SEQ ID NO: 8069 - protein, 8 aa, Homo sapiens
  Table 1.2; PAGE1; ENSG00000068985; HLA -B*39:01,HLA-B*51:01,HLA-C*01:02
DGPDVQEL

SEQ ID NO: 8070 - protein, 9 aa, Homo sapiens
  Table 1.2; PAGE1; ENSG00000068985; HLA -A*03:02,HLA-A*11:01,HLA-A*33:01,HLA-A*33:03,HLA-A*68:01, HLA-B*27:02,HLA-C*07:06
DSQELVQPK

SEQ ID NO: 8071 - protein, 9 aa, Homo sapiens
  Table 1.2; PAGE1; ENSG00000068985; HLA -A*03:02,HLA-A*11:01,HLA-A*33:01,HLA-A*33:03,HLA-A*68:01, HLA-B*27:02,HLA-C*07:06
DSQEQVHPK

SEQ ID NO: 8072 - protein, 8 aa, Homo sapiens
  Table 1.2; PAGE1; ENSG00000068985; HLA -A*33:01
DTKRVCLR

SEQ ID NO: 8073 - protein, 11 aa, Homo sapiens
  Table 1.2; PAGE1; ENSG00000068985; HLA -A*11:01,HLA-A*33:01,HLA-A*33:03,HLA-A*68:01,HLA-B*27:02, HLA-C*07:06
EADSQELVQPK

SEQ ID NO: 8074 - protein, 11 aa, Homo sapiens
  Table 1.2; PAGE1; ENSG00000068985; HLA -A*33:01,HLA-A*33:03,HLA-A*68:01,HLA-B*27:02
EADSQEQVHPK

SEQ ID NO: 8075 - protein, 10 aa, Homo sapiens
  Table 1.2; PAGE1; ENSG00000068985; HLA -A*33:01,HLA-A*33:03,HLA-A*68:01
ELGDGPDTKR

SEQ ID NO: 8076 - protein, 9 aa, Homo sapiens
  Table 1.2; PAGE1; ENSG00000068985; HLA -B*35:03
EPEADSQEL

SEQ ID NO: 8077 - protein, 11 aa, Homo sapiens
  Table 1.2; PAGE1; ENSG00000068985; HLA -B*38:01
ERGDGPDVQEL

SEQ ID NO: 8078 - protein, 9 aa, Homo sapiens
  Table 1.2; PAGE1; ENSG00000068985; HLA -B*37:01
GDGPDTKRV

SEQ ID NO: 8079 - protein, 11 aa, Homo sapiens
  Table 1.2; PAGE1; ENSG00000068985; HLA -A*30:01
GDGPDTKRVCL

SEQ ID NO: 8080 - protein, 9 aa, Homo sapiens
  Table 1.2; PAGE1; ENSG00000068985; HLA -A*30:01,HLA-B*37:01,HLA-B*38:01,HLA-B*40:01,HLA-B*40:02
GDGPDVQEL

SEQ ID NO: 8081 - protein, 9 aa, Homo sapiens
  Table 1.2; PAGE1; ENSG00000068985; HLA -B*07:02,HLA-B*08:01,HLA-C*07:02
GPDTKRVCL

SEQ ID NO: 8082 - protein, 9 aa, Homo sapiens
  Table 1.2; PAGE1; ENSG00000068985; HLA -B*35:03
GPDVQELGL

SEQ ID NO: 8083 - protein, 11 aa, Homo sapiens
  Table 1.2; PAGE1; ENSG00000068985; HLA -B*27:05,HLA-B*38:01,HLA-B*39:01
GQEPEADSQEL

SEQ ID NO: 8084 - protein, 11 aa, Homo sapiens
  Table 1.2; PAGE1; ENSG00000068985; HLA -A*02:01,HLA-A*02:07
KLPAEGPEPEA

SEQ ID NO: 8085 - protein, 9 aa, Homo sapiens
  Table 1.2; PAGE1; ENSG00000068985; HLA -A*02:01
LGLPNPEEV

SEQ ID NO: 8086 - protein, 8 aa, Homo sapiens
  Table 1.2; PAGE1; ENSG00000068985; HLA -B*51:01,HLA-B*54:01
LPAEGPEP

SEQ ID NO: 8087 - protein, 10 aa, Homo sapiens
  Table 1.2; PAGE1; ENSG00000068985; HLA -B*35:01,HLA-B*35:03,HLA-B*51:01,HLA-B*54:01,HLA-B*55:01, HLA-B*56:01
LPAEGPEPEA

SEQ ID NO: 8088 - protein, 9 aa, Homo sapiens
  Table 1.2; PAGE1; ENSG00000068985; HLA -B*35:03,HLA-B*55:01,HLA-B*56:01
LPNPEEVKT

SEQ ID NO: 8089 - protein, 9 aa, Homo sapiens
  Table 1.2; PAGE1; ENSG00000068985; HLA -B*27:05,HLA-B*38:01
LRNEEQMKL

SEQ ID NO: 8090 - protein, 9 aa, Homo sapiens
  Table 1.2; PAGE1; ENSG00000068985; HLA -B*18:01
NEEQMKLPA

SEQ ID NO: 8091 - protein, 9 aa, Homo sapiens
  Table 1.2; PAGE1; ENSG00000068985; HLA -A*68:01,HLA-B*27:02
QDSTPAEER

SEQ ID NO: 8092 - protein, 8 aa, Homo sapiens
  Table 1.2; PAGE1; ENSG00000068985; HLA -B*40:02
QELVQPKT

SEQ ID NO: 8093 - protein, 10 aa, Homo sapiens
  Table 1.2; PAGE1; ENSG00000068985; HLA -A*30:01,HLA-B*40:01,HLA-B*40:02,HLA-B*44:02,HLA-B*44:03, HLA-B*49:01
QEPEADSQEL

SEQ ID NO: 8094 - protein, 11 aa, Homo sapiens
  Table 1.2; PAGE1; ENSG00000068985; HLA -B*49:01
QEPEADSQELV

SEQ ID NO: 8095 - protein, 8 aa, Homo sapiens
  Table 1.2; PAGE1; ENSG00000068985; HLA -B*07:02,HLA-B*08:01,HLA-C*07:02
QPKTGCEL

SEQ ID NO: 8096 - protein, 11 aa, Homo sapiens
  Table 1.2; PAGE1; ENSG00000068985; HLA -A*33:01,HLA-A*33:03,HLA-A*68:01,HLA-C*07:06
QSQDSTPAEER

SEQ ID NO: 8097 - protein, 10 aa, Homo sapiens
  Table 1.2; PAGE1; ENSG00000068985; HLA -A*31:01
QVHPKTGCER

SEQ ID NO: 8098 - protein, 10 aa, Homo sapiens
  Table 1.2; PAGE1; ENSG00000068985; HLA -C*05:01
RGDGPDVQEL

SEQ ID NO: 8099 - protein, 9 aa, Homo sapiens
  Table 1.2; PAGE1; ENSG00000068985; HLA -B*56:01
RPMIYVESS

SEQ ID NO: 8100 - protein, 9 aa, Homo sapiens
  Table 1.2; PAGE1; ENSG00000068985; HLA -B*13:02
SQELVQPKT

SEQ ID NO: 8101 - protein, 8 aa, Homo sapiens
  Table 1.2; PAGE1; ENSG00000068985; HLA -A*03:02,HLA-A*11:01
SQEQVHPK

SEQ ID NO: 8102 - protein, 9 aa, Homo sapiens
  Table 1.2; PAGE1; ENSG00000068985; HLA -C*05:01
SSDEQPDEV

SEQ ID NO: 8103 - protein, 8 aa, Homo sapiens
  Table 1.2; PAGE1; ENSG00000068985; HLA -B*37:01
VESPTQSQ

SEQ ID NO: 8104 - protein, 9 aa, Homo sapiens
  Table 1.2; PAGE1; ENSG00000068985; HLA -B*15:03,HLA-B*46:01,HLA-C*01:02
VQPKTGCEL

SEQ ID NO: 8105 - protein, 10 aa, Homo sapiens
  Table 1.2; PAGE5; ENSG00000158639; HLA -B*27:02
AFQQELALLK

SEQ ID NO: 8106 - protein, 10 aa, Homo sapiens
  Table 1.2; PAGE5; ENSG00000158639; HLA -A*31:01
AGNRGWAGTR

SEQ ID NO: 8107 - protein, 9 aa, Homo sapiens
  Table 1.2; PAGE5; ENSG00000158639; HLA -B*07:02,HLA-B*55:01,HLA-B*56:01,HLA-C*07:02
APAVQGTDV

SEQ ID NO: 8108 - protein, 11 aa, Homo sapiens
  Table 1.2; PAGE5; ENSG00000158639; HLA -B*54:01,HLA-B*55:01,HLA-B*56:01
APAVQGTDVEA

SEQ ID NO: 8109 - protein, 10 aa, Homo sapiens
  Table 1.2; PAGE5; ENSG00000158639; HLA -B*56:01
APSGEIKNEG

SEQ ID NO: 8110 - protein, 10 aa, Homo sapiens
  Table 1.2; PAGE5; ENSG00000158639; HLA -A*25:01,HLA-A*30:02,HLA-B*15:01
AVQGTDVEAF

SEQ ID NO: 8111 - protein, 9 aa, Homo sapiens
  Table 1.2; PAGE5; ENSG00000158639; HLA -B*51:01
DAPGDGPDV

SEQ ID NO: 8112 - protein, 10 aa, Homo sapiens
  Table 1.2; PAGE5; ENSG00000158639; HLA -A*68:01
DAPGDGPDVR

SEQ ID NO: 8113 - protein, 8 aa, Homo sapiens
  Table 1.2; PAGE5; ENSG00000158639; HLA -A*33:01,HLA-A*33:03,HLA-A*68:01
DMSEHVTR

SEQ ID NO: 8114 - protein, 8 aa, Homo sapiens
  Table 1.2; PAGE5; ENSG00000158639; HLA -B*51:01,HLA-B*54:01,HLA-B*55:01,HLA-B*56:01
DPTKVLEA

SEQ ID NO: 8115 - protein, 9 aa, Homo sapiens
  Table 1.2; PAGE5; ENSG00000158639; HLA -A*68:01,HLA-A*68:02,HLA-B*35:03,HLA-B*38:01
DVEAFQQEL

SEQ ID NO: 8116 - protein, 10 aa, Homo sapiens
  Table 1.2; PAGE5; ENSG00000158639; HLA -A*25:01,HLA-A*26:01,HLA-A*33:01,HLA-A*33:03
DVREGTLPTF

SEQ ID NO: 8117 - protein, 9 aa, Homo sapiens
  Table 1.2; PAGE5; ENSG00000158639; HLA -A*25:01,HLA-A*68:01,HLA-B*35:01,HLA-B*35:03,HLA-B*39:01, HLA-B*51:01,HLA-C*03:03
EAFQQELAL

SEQ ID NO: 8118 - protein, 10 aa, Homo sapiens
  Table 1.2; PAGE5; ENSG00000158639; HLA -A*25:01,HLA-A*26:01,HLA-A*33:03,HLA-A*68:01,HLA-A*68:02
EAFQQELALL

SEQ ID NO: 8119 - protein, 11 aa, Homo sapiens
  Table 1.2; PAGE5; ENSG00000158639; HLA -A*68:01,HLA-B*27:02
EAFQQELALLK

SEQ ID NO: 8120 - protein, 11 aa, Homo sapiens
  Table 1.2; PAGE5; ENSG00000158639; HLA -A*33:01,HLA-A*68:01,HLA-A*68:02
EDAPGDGPDVR

SEQ ID NO: 8121 - protein, 11 aa, Homo sapiens
  Table 1.2; PAGE5; ENSG00000158639; HLA -B*38:01,HLA-B*44:02
EEEPPTDNQGI

SEQ ID NO: 8122 - protein, 10 aa, Homo sapiens
  Table 1.2; PAGE5; ENSG00000158639; HLA -B*44:02,HLA-B*44:03
EEPPTDNQGI

SEQ ID NO: 8123 - protein, 11 aa, Homo sapiens
  Table 1.2; PAGE5; ENSG00000158639; HLA -A*33:01,HLA-A*33:03
EHVTRSQSSER

SEQ ID NO: 8124 - protein, 10 aa, Homo sapiens
  Table 1.2; PAGE5; ENSG00000158639; HLA -A*25:01,HLA-A*26:01
EIKNEGAPAV

SEQ ID NO: 8125 - protein, 10 aa, Homo sapiens
  Table 1.2; PAGE5; ENSG00000158639; HLA -A*68:01,HLA-A*68:02
ESSQPVGPVI

SEQ ID NO: 8126 - protein, 9 aa, Homo sapiens
  Table 1.2; PAGE5; ENSG00000158639; HLA -A*26:01,HLA-A*68:02
EVRDMSEHV

SEQ ID NO: 8127 - protein, 11 aa, Homo sapiens
  Table 1.2; PAGE5; ENSG00000158639; HLA -A*31:01,HLA-A*33:01,HLA-A*33:03,HLA-A*68:01,HLA-B*57:01, HLA-C*07:06
EVRDMSEHVTR

SEQ ID NO: 8128 - protein, 10 aa, Homo sapiens
  Table 1.2; PAGE5; ENSG00000158639; HLA -A*02:01,HLA-A*02:03,HLA-A*02:04,HLA-B*13:02
FQQELALLKI

SEQ ID NO: 8129 - protein, 9 aa, Homo sapiens
  Table 1.2; PAGE5; ENSG00000158639; HLA -B*40:02
GEIKNEGAP

SEQ ID NO: 8130 - protein, 10 aa, Homo sapiens
  Table 1.2; PAGE5; ENSG00000158639; HLA -A*30:01,HLA-B*40:01,HLA-B*40:02,HLA-B*49:01
GEIKNEGAPA

SEQ ID NO: 8131 - protein, 11 aa, Homo sapiens
  Table 1.2; PAGE5; ENSG00000158639; HLA -A*30:01,HLA-B*13:02,HLA-B*40:01,HLA-B*40:02,HLA-B*44:03, HLA-B*49:01,HLA-C*16:04
GEIKNEGAPAV

SEQ ID NO: 8132 - protein, 9 aa, Homo sapiens
  Table 1.2; PAGE5; ENSG00000158639; HLA -A*03:02
GIAPSGEIK

SEQ ID NO: 8133 - protein, 9 aa, Homo sapiens
  Table 1.2; PAGE5; ENSG00000158639; HLA -B*07:02,HLA-B*35:03,HLA-C*05:01,HLA-C*07:02
GPDVREGTL

SEQ ID NO: 8134 - protein, 11 aa, Homo sapiens
  Table 1.2; PAGE5; ENSG00000158639; HLA -B*39:01
GTDVEAFQQEL

SEQ ID NO: 8135 - protein, 10 aa, Homo sapiens
  Table 1.2; PAGE5; ENSG00000158639; HLA -A*03:01,HLA-A*03:02,HLA-A*11:01,HLA-B*27:02,HLA-B*57:01
GTLPTFDPTK

SEQ ID NO: 8136 - protein, 9 aa, Homo sapiens
  Table 1.2; PAGE5; ENSG00000158639; HLA -C*16:01
GTREEVRDM

SEQ ID NO: 8137 - protein, 10 aa, Homo sapiens
  Table 1.2; PAGE5; ENSG00000158639; HLA -A*68:01,HLA-C*07:06
HVTRSQSSER

SEQ ID NO: 8138 - protein, 9 aa, Homo sapiens
  Table 1.2; PAGE5; ENSG00000158639; HLA -B*15:03
IKNEGAPAV

SEQ ID NO: 8139 - protein, 9 aa, Homo sapiens
  Table 1.2; PAGE5; ENSG00000158639; HLA -A*03:01,HLA-A*03:02,HLA-A*11:01
IVQQPTEEK

SEQ ID NO: 8140 - protein, 10 aa, Homo sapiens
  Table 1.2; PAGE5; ENSG00000158639; HLA -A*68:01
IVQQPTEEKR

SEQ ID NO: 8141 - protein, 10 aa, Homo sapiens
  Table 1.2; PAGE5; ENSG00000158639; HLA -B*27:05,HLA-B*40:01,HLA-B*40:02,HLA-B*58:01
KVLEAGEGQL

SEQ ID NO: 8142 - protein, 8 aa, Homo sapiens
  Table 1.2; PAGE5; ENSG00000158639; HLA -B*39:01,HLA-B*40:01
LEAGEGQL

SEQ ID NO: 8143 - protein, 8 aa, Homo sapiens
  Table 1.2; PAGE5; ENSG00000158639; HLA -B*27:02
LPTFDPTK

SEQ ID NO: 8144 - protein, 9 aa, Homo sapiens
  Table 1.2; PAGE5; ENSG00000158639; HLA -B*35:03,HLA-B*51:01,HLA-B*54:01,HLA-B*56:01
LPTFDPTKV

SEQ ID NO: 8145 - protein, 10 aa, Homo sapiens
  Table 1.2; PAGE5; ENSG00000158639; HLA -B*35:03
LPTFDPTKVL

SEQ ID NO: 8146 - protein, 9 aa, Homo sapiens
  Table 1.2; PAGE5; ENSG00000158639; HLA -A*31:01
MQAPWAGNR

SEQ ID NO: 8147 - protein, 11 aa, Homo sapiens
  Table 1.2; PAGE5; ENSG00000158639; HLA -B*57:01
MQAPWAGNRGW

SEQ ID NO: 8148 - protein, 11 aa, Homo sapiens
  Table 1.2; PAGE5; ENSG00000158639; HLA -B*27:02
PAVQGTDVEAF

SEQ ID NO: 8149 - protein, 8 aa, Homo sapiens
  Table 1.2; PAGE5; ENSG00000158639; HLA -B*44:03,HLA-B*49:01
QELALLKI

SEQ ID NO: 8150 - protein, 11 aa, Homo sapiens
  Table 1.2; PAGE5; ENSG00000158639; HLA -A*30:01,HLA-B*38:01,HLA-B*40:01,HLA-B*44:02,HLA-B*44:03, HLA-B*49:01
QESSQPVGPVI

SEQ ID NO: 8151 - protein, 9 aa, Homo sapiens
  Table 1.2; PAGE5; ENSG00000158639; HLA -B*07:02
QGIAPSGEI

SEQ ID NO: 8152 - protein, 10 aa, Homo sapiens
  Table 1.2; PAGE5; ENSG00000158639; HLA -B*27:02
QGIAPSGEIK

SEQ ID NO: 8153 - protein, 8 aa, Homo sapiens
  Table 1.2; PAGE5; ENSG00000158639; HLA -B*56:01
QPVGPVIV

SEQ ID NO: 8154 - protein, 9 aa, Homo sapiens
  Table 1.2; PAGE5; ENSG00000158639; HLA -B*35:01,HLA-B*56:01
QPVGPVIVQ

SEQ ID NO: 8155 - protein, 11 aa, Homo sapiens
  Table 1.2; PAGE5; ENSG00000158639; HLA -B*56:01
QPVGPVIVQQP

SEQ ID NO: 8156 - protein, 9 aa, Homo sapiens
  Table 1.2; PAGE5; ENSG00000158639; HLA -B*13:02,HLA-B*38:01
QQELALLKI

SEQ ID NO: 8157 - protein, 9 aa, Homo sapiens
  Table 1.2; PAGE5; ENSG00000158639; HLA -A*31:01
RDMSEHVTR

SEQ ID NO: 8158 - protein, 8 aa, Homo sapiens
  Table 1.2; PAGE5; ENSG00000158639; HLA -B*37:01
REGTLPTF

SEQ ID NO: 8159 - protein, 8 aa, Homo sapiens
  Table 1.2; PAGE5; ENSG00000158639; HLA -B*13:02,HLA-B*15:03,HLA-B*39:01,HLA-B*51:01
SQPVGPVI

SEQ ID NO: 8160 - protein, 9 aa, Homo sapiens
  Table 1.2; PAGE5; ENSG00000158639; HLA -A*02:03,HLA-A*02:07,HLA-B*13:02
SQPVGPVIV

SEQ ID NO: 8161 - protein, 9 aa, Homo sapiens
  Table 1.2; PAGE5; ENSG00000158639; HLA -A*23:01,HLA-A*32:01,HLA-B*13:02,HLA-B*38:01,HLA-B*39:01, HLA-B*46:01,HLA-B*51:01,HLA-B*58:01,HLA-C*03:03,HLA-C*03:04, HLA-C*16:02
SSQPVGPVI

SEQ ID NO: 8162 - protein, 10 aa, Homo sapiens
  Table 1.2; PAGE5; ENSG00000158639; HLA -A*30:01,HLA-A*68:02,HLA-B*38:01,HLA-B*39:01,HLA-B*40:01, HLA-B*40:02
TDVEAFQQEL

SEQ ID NO: 8163 - protein, 8 aa, Homo sapiens
  Table 1.2; PAGE5; ENSG00000158639; HLA -C*04:01
TFDPTKVL

SEQ ID NO: 8164 - protein, 9 aa, Homo sapiens
  Table 1.2; PAGE5; ENSG00000158639; HLA -C*04:01
TFDPTKVLE

SEQ ID NO: 8165 - protein, 9 aa, Homo sapiens
  Table 1.2; PAGE5; ENSG00000158639; HLA -A*02:07
TLPTFDPTK

SEQ ID NO: 8166 - protein, 10 aa, Homo sapiens
  Table 1.2; PAGE5; ENSG00000158639; HLA -A*02:01,HLA-A*02:03,HLA-A*02:04,HLA-A*02:07,HLA-A*68:02
TLPTFDPTKV

SEQ ID NO: 8167 - protein, 11 aa, Homo sapiens
  Table 1.2; PAGE5; ENSG00000158639; HLA -A*02:01,HLA-A*02:03,HLA-A*02:07,HLA-A*24:02
TLPTFDPTKVL

SEQ ID NO: 8168 - protein, 8 aa, Homo sapiens
  Table 1.2; PAGE5; ENSG00000158639; HLA -A*30:01,HLA-B*18:01,HLA-B*37:01,HLA-B*39:01,HLA-B*40:01, HLA-B*40:02,HLA-B*49:01,HLA-C*16:04
VEAFQQEL

SEQ ID NO: 8169 - protein, 9 aa, Homo sapiens
  Table 1.2; PAGE5; ENSG00000158639; HLA -B*49:01
VEAFQQELA

SEQ ID NO: 8170 - protein, 10 aa, Homo sapiens
  Table 1.2; PAGE5; ENSG00000158639; HLA -A*30:01,HLA-B*40:01
VEAFQQELAL

SEQ ID NO: 8171 - protein, 11 aa, Homo sapiens
  Table 1.2; PAGE5; ENSG00000158639; HLA -B*40:01
VEAFQQELALL

SEQ ID NO: 8172 - protein, 10 aa, Homo sapiens
  Table 1.2; PAGE5; ENSG00000158639; HLA -A*03:01,HLA-A*03:02,HLA-A*11:01
VIVQQPTEEK

SEQ ID NO: 8173 - protein, 9 aa, Homo sapiens
  Table 1.2; PAGE5; ENSG00000158639; HLA -A*02:01,HLA-B*39:01,HLA-C*05:01
VLEAGEGQL

SEQ ID NO: 8174 - protein, 9 aa, Homo sapiens
  Table 1.2; PAGE5; ENSG00000158639; HLA -A*32:01,HLA-B*15:01,HLA-B*15:03,HLA-B*38:01,HLA-B*39:01
VQGTDVEAF

SEQ ID NO: 8175 - protein, 10 aa, Homo sapiens
  Table 1.2; PAGE5; ENSG00000158639; HLA -B*27:05
VRDMSEHVTR

SEQ ID NO: 8176 - protein, 9 aa, Homo sapiens
  Table 1.2; PAGE5; ENSG00000158639; HLA -B*27:02,HLA-B*27:05
VREGTLPTF

SEQ ID NO: 8177 - protein, 9 aa, Homo sapiens
  Table 1.2; PAGE5; ENSG00000158639; HLA -A*31:01,HLA-A*33:01,HLA-A*33:03
VTRSQSSER

SEQ ID NO: 8178 - protein, 9 aa, Homo sapiens
  Table 1.2; PASD1; ENSG00000166049; HLA -A*32:01,HLA-B*07:02,HLA-B*13:02,HLA-B*15:03,HLA-B*39:01, HLA-B*46:01,HLA-B*51:01,HLA-B*58:01,HLA-C*01:02,HLA-C*03:03, HLA-C*03:04,HLA-C*16:02
AAAAAAAAI

SEQ ID NO: 8179 - protein, 9 aa, Homo sapiens
  Table 1.2; PASD1; ENSG00000166049; HLA -C*05:01
AAEQQPSGF

SEQ ID NO: 8180 - protein, 10 aa, Homo sapiens
  Table 1.2; PASD1; ENSG00000166049; HLA -A*01:01,HLA-A*30:02
AAEQQPSGFY

SEQ ID NO: 8181 - protein, 9 aa, Homo sapiens
  Table 1.2; PASD1; ENSG00000166049; HLA -C*01:02
AAGASAQPL

SEQ ID NO: 8182 - protein, 8 aa, Homo sapiens
  Table 1.2; PASD1; ENSG00000166049; HLA -C*05:01
AAYQPDQM

SEQ ID NO: 8183 - protein, 9 aa, Homo sapiens
  Table 1.2; PASD1; ENSG00000166049; HLA -A*33:01,HLA-A*33:03,HLA-A*68:01,HLA-C*07:06
AAYQPDQMR

SEQ ID NO: 8184 - protein, 11 aa, Homo sapiens
  Table 1.2; PASD1; ENSG00000166049; HLA -B*54:01,HLA-B*56:01
AAYQPDQMRSA

SEQ ID NO: 8185 - protein, 10 aa, Homo sapiens
  Table 1.2; PASD1; ENSG00000166049; HLA -A*30:02,HLA-B*15:03
ACVPQEDRLY

SEQ ID NO: 8186 - protein, 8 aa, Homo sapiens
  Table 1.2; PASD1; ENSG00000166049; HLA -B*37:01
ADPVDLEF

SEQ ID NO: 8187 - protein, 8 aa, Homo sapiens
  Table 1.2; PASD1; ENSG00000166049; HLA -A*30:01,HLA-B*37:01,HLA-B*40:01,HLA-B*44:02,HLA-B*44:03
AEIVGKKL

SEQ ID NO: 8188 - protein, 9 aa, Homo sapiens
  Table 1.2; PASD1; ENSG00000166049; HLA -A*30:01,HLA-B*37:01,HLA-B*40:01,HLA-B*40:02,HLA-B*44:02, HLA-B*44:03,HLA-B*49:01
AEIVGKKLL

SEQ ID NO: 8189 - protein, 8 aa, Homo sapiens
  Table 1.2; PASD1; ENSG00000166049; HLA -A*30:01,HLA-B*37:01,HLA-B*40:01,HLA-B*49:01
AENISSLL

SEQ ID NO: 8190 - protein, 9 aa, Homo sapiens
  Table 1.2; PASD1; ENSG00000166049; HLA -B*49:01
AENISSLLG

SEQ ID NO: 8191 - protein, 11 aa, Homo sapiens
  Table 1.2; PASD1; ENSG00000166049; HLA -A*30:01,HLA-B*40:01,HLA-B*44:02,HLA-B*44:03,HLA-B*49:01
AENISSLLGHL

SEQ ID NO: 8192 - protein, 8 aa, Homo sapiens
  Table 1.2; PASD1; ENSG00000166049; HLA -B*37:01,HLA-B*44:02,HLA-B*44:03
AEQQPSGF

SEQ ID NO: 8193 - protein, 9 aa, Homo sapiens
  Table 1.2; PASD1; ENSG00000166049; HLA -A*30:02,HLA-B*15:01,HLA-B*15:03,HLA-B*27:02,HLA-B*37:01, HLA-B*44:02,HLA-B*44:03,HLA-C*16:04
AEQQPSGFY

SEQ ID NO: 8194 - protein, 10 aa, Homo sapiens
  Table 1.2; PASD1; ENSG00000166049; HLA -B*44:02
AEQQPSGFYQ

SEQ ID NO: 8195 - protein, 9 aa, Homo sapiens
  Table 1.2; PASD1; ENSG00000166049; HLA -B*37:01
AEQTRLMPA

SEQ ID NO: 8196 - protein, 8 aa, Homo sapiens
  Table 1.2; PASD1; ENSG00000166049; HLA -A*30:02,HLA-C*14:02
AFQGPAAY

SEQ ID NO: 8197 - protein, 8 aa, Homo sapiens
  Table 1.2; PASD1; ENSG00000166049; HLA -B*08:01
AGQVKRPL

SEQ ID NO: 8198 - protein, 9 aa, Homo sapiens
  Table 1.2; PASD1; ENSG00000166049; HLA -C*01:02,HLA-C*14:02
AIQNQQNAL

SEQ ID NO: 8199 - protein, 10 aa, Homo sapiens
  Table 1.2; PASD1; ENSG00000166049; HLA -A*25:01,HLA-A*26:01
AISSSSIPQF

SEQ ID NO: 8200 - protein, 9 aa, Homo sapiens
  Table 1.2; PASD1; ENSG00000166049; HLA -A*03:02,HLA-A*11:01,HLA-A*31:01,HLA-A*33:03,HLA-A*68:01, HLA-B*13:02,HLA-B*27:05,HLA-C*07:06
AQPIVPVQR

SEQ ID NO: 8201 - protein, 8 aa, Homo sapiens
  Table 1.2; PASD1; ENSG00000166049; HLA -B*56:01
AVYVEPAA

SEQ ID NO: 8202 - protein, 9 aa, Homo sapiens
  Table 1.2; PASD1; ENSG00000166049; HLA -A*02:01,HLA-A*02:03,HLA-A*03:01,HLA-A*03:02,HLA-A*11:01, HLA-A*25:01,HLA-A*32:01,HLA-B*13:02,HLA-B*27:05,HLA-B*37:01, HLA-B*40:02,HLA-B*46:01,HLA-B*54:01,HLA-B*55:01,HLA-B*56:01,
  HLA-C*03:03
AVYVEPAAA

SEQ ID NO: 8203 - protein, 10 aa, Homo sapiens
  Table 1.2; PASD1; ENSG00000166049; HLA -A*02:03,HLA-A*03:01,HLA-B*54:01,HLA-B*56:01
AVYVEPAAAA

SEQ ID NO: 8204 - protein, 11 aa, Homo sapiens
  Table 1.2; PASD1; ENSG00000166049; HLA -A*03:01,HLA-B*56:01
AVYVEPAAAAA

SEQ ID NO: 8205 - protein, 9 aa, Homo sapiens
  Table 1.2; PASD1; ENSG00000166049; HLA -A*23:01,HLA-A*24:02,HLA-A*32:01,HLA-B*35:01,HLA-B*35:03, HLA-B*38:01,HLA-C*04:01,HLA-C*07:04,HLA-C*14:02
AYDIISQEL

SEQ ID NO: 8206 - protein, 11 aa, Homo sapiens
  Table 1.2; PASD1; ENSG00000166049; HLA -A*24:02
AYDIISQELEL

SEQ ID NO: 8207 - protein, 10 aa, Homo sapiens
  Table 1.2; PASD1; ENSG00000166049; HLA -A*23:01,HLA-A*24:02,HLA-C*14:02
AYQGPPVNQL

SEQ ID NO: 8208 - protein, 10 aa, Homo sapiens
  Table 1.2; PASD1; ENSG00000166049; HLA -C*14:02
AYQPDQMRSA

SEQ ID NO: 8209 - protein, 9 aa, Homo sapiens
  Table 1.2; PASD1; ENSG00000166049; HLA -A*02:01,HLA-A*02:03,HLA-A*25:01,HLA-A*26:01,HLA-A*32:01, HLA-B*27:05,HLA-B*46:01,HLA-C*01:02
CVAENISSL

SEQ ID NO: 8210 - protein, 9 aa, Homo sapiens
  Table 1.2; PASD1; ENSG00000166049; HLA -B*51:01
DAIQNQQNA

SEQ ID NO: 8211 - protein, 10 aa, Homo sapiens
  Table 1.2; PASD1; ENSG00000166049; HLA -A*25:01,HLA-A*68:01,HLA-B*35:03,HLA-B*51:01
DAIQNQQNAL

SEQ ID NO: 8212 - protein, 8 aa, Homo sapiens
  Table 1.2; PASD1; ENSG00000166049; HLA -B*18:01
DEEKDEVY

SEQ ID NO: 8213 - protein, 9 aa, Homo sapiens
  Table 1.2; PASD1; ENSG00000166049; HLA -A*30:01,HLA-B*18:01,HLA-B*39:01,HLA-B*40:01,HLA-B*40:02
DEEPFVGEL

SEQ ID NO: 8214 - protein, 11 aa, Homo sapiens
  Table 1.2; PASD1; ENSG00000166049; HLA -B*18:01
DESQSFYPEAY

SEQ ID NO: 8215 - protein, 9 aa, Homo sapiens
  Table 1.2; PASD1; ENSG00000166049; HLA -B*18:01
DEVYQKIIL

SEQ ID NO: 8216 - protein, 10 aa, Homo sapiens
  Table 1.2; PASD1; ENSG00000166049; HLA -B*38:01,HLA-B*39:01
DHLQKQPNTL

SEQ ID NO: 8217 - protein, 8 aa, Homo sapiens
  Table 1.2; PASD1; ENSG00000166049; HLA -A*26:01,HLA-B*18:01
DIAEVEQY

SEQ ID NO: 8218 - protein, 10 aa, Homo sapiens
  Table 1.2; PASD1; ENSG00000166049; HLA -A*25:01
DICNEFPVVF

SEQ ID NO: 8219 - protein, 9 aa, Homo sapiens
  Table 1.2; PASD1; ENSG00000166049; HLA -A*25:01,HLA-A*26:01,HLA-B*35:03
DIISQELEL

SEQ ID NO: 8220 - protein, 10 aa, Homo sapiens
  Table 1.2; PASD1; ENSG00000166049; HLA -A*25:01,HLA-A*26:01
DIISQELELM

SEQ ID NO: 8221 - protein, 10 aa, Homo sapiens
  Table 1.2; PASD1; ENSG00000166049; HLA -A*03:02,HLA-A*11:01,HLA-A*33:01,HLA-A*68:01,HLA-B*27:02
DLQSSEAVPK

SEQ ID NO: 8222 - protein, 11 aa, Homo sapiens
  Table 1.2; PASD1; ENSG00000166049; HLA -A*03:02,HLA-A*11:01,HLA-A*33:01,HLA-A*68:01
DLQSSEAVPKK

SEQ ID NO: 8223 - protein, 9 aa, Homo sapiens
  Table 1.2; PASD1; ENSG00000166049; HLA -B*35:03
DPENPVAPL

SEQ ID NO: 8224 - protein, 9 aa, Homo sapiens
  Table 1.2; PASD1; ENSG00000166049; HLA -B*35:01,HLA-B*35:03,HLA-B*51:01,HLA-B*54:01,HLA-B*56:01
DPVDLEFSV

SEQ ID NO: 8225 - protein, 9 aa, Homo sapiens
  Table 1.2; PASD1; ENSG00000166049; HLA -B*35:03,HLA-B*51:01
DPVDPEDSV

SEQ ID NO: 8226 - protein, 11 aa, Homo sapiens
  Table 1.2; PASD1; ENSG00000166049; HLA -B*35:03
DPVDPEDSVDL

SEQ ID NO: 8227 - protein, 11 aa, Homo sapiens
  Table 1.2; PASD1; ENSG00000166049; HLA -A*25:01,HLA-A*26:01,HLA-A*30:02,HLA-B*15:01,HLA-B*18:01, HLA-B*27:05,HLA-B*35:01
DQIDIAEVEQY

SEQ ID NO: 8228 - protein, 9 aa, Homo sapiens
  Table 1.2; PASD1; ENSG00000166049; HLA -B*39:01
DQQDPENPV

SEQ ID NO: 8229 - protein, 9 aa, Homo sapiens
  Table 1.2; PASD1; ENSG00000166049; HLA -A*26:01,HLA-A*33:01,HLA-A*33:03,HLA-A*68:02,HLA-B*51:01
DSLGPVVQV

SEQ ID NO: 8230 - protein, 9 aa, Homo sapiens
  Table 1.2; PASD1; ENSG00000166049; HLA -A*68:01
DSSAYENVK

SEQ ID NO: 8231 - protein, 10 aa, Homo sapiens
  Table 1.2; PASD1; ENSG00000166049; HLA -A*33:01
DSSAYENVKF

SEQ ID NO: 8232 - protein, 9 aa, Homo sapiens
  Table 1.2; PASD1; ENSG00000166049; HLA -A*02:01,HLA-A*23:01,HLA-A*25:01,HLA-A*26:01,HLA-A*33:01, HLA-A*33:03,HLA-A*68:01,HLA-A*68:02,HLA-B*08:01,HLA-B*18:01, HLA-B*27:02,HLA-B*27:05,HLA-B*35:01,HLA-B*35:03,HLA-B*38:01,
  HLA-B*39:01,HLA-B*40:01,HLA-B*40:02,HLA-B*51:01,HLA-B*58:01, HLA-C*03:03,HLA-C*03:04
DTMPESPAL

SEQ ID NO: 8233 - protein, 11 aa, Homo sapiens
  Table 1.2; PASD1; ENSG00000166049; HLA -A*25:01,HLA-A*26:01,HLA-A*33:01,HLA-A*33:03,HLA-A*68:01, HLA-C*07:06
DTMPESPALSL

SEQ ID NO: 8234 - protein, 9 aa, Homo sapiens
  Table 1.2; PASD1; ENSG00000166049; HLA -A*33:01
DVSVPLCNH

SEQ ID NO: 8235 - protein, 8 aa, Homo sapiens
  Table 1.2; PASD1; ENSG00000166049; HLA -A*23:01
DYFNQVTL

SEQ ID NO: 8236 - protein, 10 aa, Homo sapiens
  Table 1.2; PASD1; ENSG00000166049; HLA -A*23:01
DYFNQVTLQL

SEQ ID NO: 8237 - protein, 9 aa, Homo sapiens
  Table 1.2; PASD1; ENSG00000166049; HLA -A*24:02
DYIRLWQEL

SEQ ID NO: 8238 - protein, 8 aa, Homo sapiens
  Table 1.2; PASD1; ENSG00000166049; HLA -A*25:01,HLA-B*51:01
EAISSSSI

SEQ ID NO: 8239 - protein, 11 aa, Homo sapiens
  Table 1.2; PASD1; ENSG00000166049; HLA -A*23:01,HLA-A*25:01,HLA-A*26:01,HLA-A*68:01,HLA-B*35:01, HLA-B*58:01
EAISSSSIPQF

SEQ ID NO: 8240 - protein, 9 aa, Homo sapiens
  Table 1.2; PASD1; ENSG00000166049; HLA -A*33:03,HLA-A*68:01
EAVPKKQQK

SEQ ID NO: 8241 - protein, 8 aa, Homo sapiens
  Table 1.2; PASD1; ENSG00000166049; HLA -B*51:01
EAYQGPPV

SEQ ID NO: 8242 - protein, 11 aa, Homo sapiens
  Table 1.2; PASD1; ENSG00000166049; HLA -A*25:01,HLA-A*26:01,HLA-A*68:01,HLA-A*68:02
EAYQGPPVNQL

SEQ ID NO: 8243 - protein, 9 aa, Homo sapiens
  Table 1.2; PASD1; ENSG00000166049; HLA -B*40:01,HLA-B*44:02,HLA-B*44:03
EEEQQKQQL

SEQ ID NO: 8244 - protein, 10 aa, Homo sapiens
  Table 1.2; PASD1; ENSG00000166049; HLA -B*44:02,HLA-B*44:03
EEKDEVYQKI

SEQ ID NO: 8245 - protein, 9 aa, Homo sapiens
  Table 1.2; PASD1; ENSG00000166049; HLA -A*23:01,HLA-A*24:02,HLA-A*26:01
EFPVVFSGL

SEQ ID NO: 8246 - protein, 10 aa, Homo sapiens
  Table 1.2; PASD1; ENSG00000166049; HLA -A*24:02
EFPVVFSGLF

SEQ ID NO: 8247 - protein, 9 aa, Homo sapiens
  Table 1.2; PASD1; ENSG00000166049; HLA -A*25:01
EGPPDPQAF

SEQ ID NO: 8248 - protein, 8 aa, Homo sapiens
  Table 1.2; PASD1; ENSG00000166049; HLA -B*08:01
EIVGKKLL

SEQ ID NO: 8249 - protein, 10 aa, Homo sapiens
  Table 1.2; PASD1; ENSG00000166049; HLA -A*25:01
EIVGKKLLSL

SEQ ID NO: 8250 - protein, 9 aa, Homo sapiens
  Table 1.2; PASD1; ENSG00000166049; HLA -A*25:01,HLA-A*26:01,HLA-A*33:03
ELQEPCVAF

SEQ ID NO: 8251 - protein, 10 aa, Homo sapiens
  Table 1.2; PASD1; ENSG00000166049; HLA -A*26:01
ELSDSLGPVV

SEQ ID NO: 8252 - protein, 9 aa, Homo sapiens
  Table 1.2; PASD1; ENSG00000166049; HLA -A*33:03
ELSSSQGQR

SEQ ID NO: 8253 - protein, 9 aa, Homo sapiens
  Table 1.2; PASD1; ENSG00000166049; HLA -A*26:01
ENISSLLGH

SEQ ID NO: 8254 - protein, 9 aa, Homo sapiens
  Table 1.2; PASD1; ENSG00000166049; HLA -A*68:02
ENVKFIVNV

SEQ ID NO: 8255 - protein, 10 aa, Homo sapiens
  Table 1.2; PASD1; ENSG00000166049; HLA -A*33:03
ENVKFIVNVR

SEQ ID NO: 8256 - protein, 9 aa, Homo sapiens
  Table 1.2; PASD1; ENSG00000166049; HLA -B*35:03,HLA-B*54:01,HLA-B*56:01
EPAAAAAAA

SEQ ID NO: 8257 - protein, 8 aa, Homo sapiens
  Table 1.2; PASD1; ENSG00000166049; HLA -A*01:01,HLA-B*35:01,HLA-B*55:01,HLA-C*03:03
EPEVNPLY

SEQ ID NO: 8258 - protein, 9 aa, Homo sapiens
  Table 1.2; PASD1; ENSG00000166049; HLA -A*33:03,HLA-A*68:01
EPEVNPLYR

SEQ ID NO: 8259 - protein, 11 aa, Homo sapiens
  Table 1.2; PASD1; ENSG00000166049; HLA -A*26:01
EQGTLHGQPTY

SEQ ID NO: 8260 - protein, 9 aa, Homo sapiens
  Table 1.2; PASD1; ENSG00000166049; HLA -A*33:03
EQHLKEQQR

SEQ ID NO: 8261 - protein, 9 aa, Homo sapiens
  Table 1.2; PASD1; ENSG00000166049; HLA -B*08:01
EQPLKHNVI

SEQ ID NO: 8262 - protein, 8 aa, Homo sapiens
  Table 1.2; PASD1; ENSG00000166049; HLA -A*30:02,HLA-B*39:01
EQQPSGFY

SEQ ID NO: 8263 - protein, 9 aa, Homo sapiens
  Table 1.2; PASD1; ENSG00000166049; HLA -A*30:01,HLA-A*68:02,HLA-B*13:02,HLA-B*39:01
EQYGPQENV

SEQ ID NO: 8264 - protein, 11 aa, Homo sapiens
  Table 1.2; PASD1; ENSG00000166049; HLA -A*26:01,HLA-B*27:05,HLA-B*38:01,HLA-B*39:01
EQYGPQENVHM

SEQ ID NO: 8265 - protein, 10 aa, Homo sapiens
  Table 1.2; PASD1; ENSG00000166049; HLA -A*26:01
ESPALSLQDF

SEQ ID NO: 8266 - protein, 10 aa, Homo sapiens
  Table 1.2; PASD1; ENSG00000166049; HLA -A*01:01,HLA-A*25:01,HLA-A*26:01,HLA-A*30:02
ESQSFYPEAY

SEQ ID NO: 8267 - protein, 9 aa, Homo sapiens
  Table 1.2; PASD1; ENSG00000166049; HLA -A*68:02
ETPQDYIRL

SEQ ID NO: 8268 - protein, 10 aa, Homo sapiens
  Table 1.2; PASD1; ENSG00000166049; HLA -A*25:01,HLA-B*44:02,HLA-B*57:01
ETPQDYIRLW

SEQ ID NO: 8269 - protein, 11 aa, Homo sapiens
  Table 1.2; PASD1; ENSG00000166049; HLA -A*68:02
EVEQYGPQENV

SEQ ID NO: 8270 - protein, 8 aa, Homo sapiens
  Table 1.2; PASD1; ENSG00000166049; HLA -B*08:01
EVYQKIIL

SEQ ID NO: 8271 - protein, 9 aa, Homo sapiens
  Table 1.2; PASD1; ENSG00000166049; HLA -A*03:01,HLA-A*11:01,HLA-A*26:01,HLA-A*33:01,HLA-A*33:03, HLA-A*68:01
EVYQKIILK

SEQ ID NO: 8272 - protein, 10 aa, Homo sapiens
  Table 1.2; PASD1; ENSG00000166049; HLA -A*25:01,HLA-A*26:01,HLA-A*33:01,HLA-A*33:03,HLA-A*68:02
EVYQKIILKF

SEQ ID NO: 8273 - protein, 10 aa, Homo sapiens
  Table 1.2; PASD1; ENSG00000166049; HLA -A*02:01
FLDTMPESPA

SEQ ID NO: 8274 - protein, 11 aa, Homo sapiens
  Table 1.2; PASD1; ENSG00000166049; HLA -A*02:01,HLA-A*02:07,HLA-B*38:01
FLDTMPESPAL

SEQ ID NO: 8275 - protein, 10 aa, Homo sapiens
  Table 1.2; PASD1; ENSG00000166049; HLA -A*02:01,HLA-A*02:03
FLQAQPIVPV

SEQ ID NO: 8276 - protein, 10 aa, Homo sapiens
  Table 1.2; PASD1; ENSG00000166049; HLA -A*02:01,HLA-A*02:03
FMITLSTDGV

SEQ ID NO: 8277 - protein, 9 aa, Homo sapiens
  Table 1.2; PASD1; ENSG00000166049; HLA -B*35:01,HLA-B*35:03,HLA-B*51:01,HLA-B*54:01,HLA-B*56:01
FPITSDSTI

SEQ ID NO: 8278 - protein, 8 aa, Homo sapiens
  Table 1.2; PASD1; ENSG00000166049; HLA -B*54:01
FPLLNSET

SEQ ID NO: 8279 - protein, 9 aa, Homo sapiens
  Table 1.2; PASD1; ENSG00000166049; HLA -B*35:01
FPLLNSETH

SEQ ID NO: 8280 - protein, 10 aa, Homo sapiens
  Table 1.2; PASD1; ENSG00000166049; HLA -B*51:01
FPLLNSETHI

SEQ ID NO: 8281 - protein, 10 aa, Homo sapiens
  Table 1.2; PASD1; ENSG00000166049; HLA -B*54:01
FPTYDYFNQV

SEQ ID NO: 8282 - protein, 8 aa, Homo sapiens
  Table 1.2; PASD1; ENSG00000166049; HLA -B*08:01,HLA-B*35:01,HLA-B*35:03,HLA-B*51:01,HLA-B*54:01
FPVVFSGL

SEQ ID NO: 8283 - protein, 9 aa, Homo sapiens
  Table 1.2; PASD1; ENSG00000166049; HLA -B*35:01
FPVVFSGLF

SEQ ID NO: 8284 - protein, 9 aa, Homo sapiens
  Table 1.2; PASD1; ENSG00000166049; HLA -B*27:05
FQGPAAYQP

SEQ ID NO: 8285 - protein, 10 aa, Homo sapiens
  Table 1.2; PASD1; ENSG00000166049; HLA -B*27:05
FRGEPEVNPL

SEQ ID NO: 8286 - protein, 9 aa, Homo sapiens
  Table 1.2; PASD1; ENSG00000166049; HLA -A*02:01,HLA-A*02:03,HLA-A*02:07,HLA-A*68:02
FSVDQVDSV

SEQ ID NO: 8287 - protein, 8 aa, Homo sapiens
  Table 1.2; PASD1; ENSG00000166049; HLA -A*01:01,HLA-B*39:01,HLA-B*55:01,HLA-C*05:01
FVDSDSTY

SEQ ID NO: 8288 - protein, 9 aa, Homo sapiens
  Table 1.2; PASD1; ENSG00000166049; HLA -A*02:01,HLA-A*02:07,HLA-B*35:03,HLA-C*05:01
FVDSDSTYC

SEQ ID NO: 8289 - protein, 10 aa, Homo sapiens
  Table 1.2; PASD1; ENSG00000166049; HLA -B*40:01
GAAGASAQPL

SEQ ID NO: 8290 - protein, 10 aa, Homo sapiens
  Table 1.2; PASD1; ENSG00000166049; HLA -B*27:02
GDSSAYENVK

SEQ ID NO: 8291 - protein, 9 aa, Homo sapiens
  Table 1.2; PASD1; ENSG00000166049; HLA -A*30:01
GELQEPCVA

SEQ ID NO: 8292 - protein, 10 aa, Homo sapiens
  Table 1.2; PASD1; ENSG00000166049; HLA -A*30:01,HLA-B*18:01,HLA-B*40:01,HLA-B*40:02,HLA-B*44:02, HLA-B*44:03
GELQEPCVAF

SEQ ID NO: 8293 - protein, 8 aa, Homo sapiens
  Table 1.2; PASD1; ENSG00000166049; HLA -B*37:01
GEPEVNPL

SEQ ID NO: 8294 - protein, 9 aa, Homo sapiens
  Table 1.2; PASD1; ENSG00000166049; HLA -A*26:01,HLA-A*29:02,HLA-A*30:01,HLA-A*30:02,HLA-B*15:01, HLA-B*15:03,HLA-B*18:01,HLA-B*27:02,HLA-B*27:05,HLA-B*37:01, HLA-B*40:01,HLA-B*44:02,HLA-B*44:03,HLA-B*49:01,HLA-B*58:01,
  HLA-C*16:04
GEPEVNPLY

SEQ ID NO: 8295 - protein, 10 aa, Homo sapiens
  Table 1.2; PASD1; ENSG00000166049; HLA -B*27:02,HLA-B*40:01,HLA-B*44:03,HLA-B*49:01
GEPEVNPLYR

SEQ ID NO: 8296 - protein, 10 aa, Homo sapiens
  Table 1.2; PASD1; ENSG00000166049; HLA -B*27:02,HLA-B*27:05
GHLPAEIVGK

SEQ ID NO: 8297 - protein, 9 aa, Homo sapiens
  Table 1.2; PASD1; ENSG00000166049; HLA -B*15:03
GHTSMKAVY

SEQ ID NO: 8298 - protein, 9 aa, Homo sapiens
  Table 1.2; PASD1; ENSG00000166049; HLA -A*03:01,HLA-A*03:02
GLSLSNSLK

SEQ ID NO: 8299 - protein, 11 aa, Homo sapiens
  Table 1.2; PASD1; ENSG00000166049; HLA -A*29:02,HLA-A*30:02
GNVEHGDSSAY

SEQ ID NO: 8300 - protein, 9 aa, Homo sapiens
  Table 1.2; PASD1; ENSG00000166049; HLA -B*07:02,HLA-B*35:01,HLA-B*55:01
GPQENVHMF

SEQ ID NO: 8301 - protein, 10 aa, Homo sapiens
  Table 1.2; PASD1; ENSG00000166049; HLA -B*56:01
GPQENVHMFV

SEQ ID NO: 8302 - protein, 9 aa, Homo sapiens
  Table 1.2; PASD1; ENSG00000166049; HLA -A*25:01,HLA-B*35:01,HLA-B*44:02,HLA-B*44:03,HLA-B*57:01, HLA-B*58:01,HLA-C*16:04
GPVVQVNTW

SEQ ID NO: 8303 - protein, 8 aa, Homo sapiens
  Table 1.2; PASD1; ENSG00000166049; HLA -B*13:02
GQPTYHQV

SEQ ID NO: 8304 - protein, 10 aa, Homo sapiens
  Table 1.2; PASD1; ENSG00000166049; HLA -A*30:01,HLA-B*13:02
GQPTYHQVQV

SEQ ID NO: 8305 - protein, 10 aa, Homo sapiens
  Table 1.2; PASD1; ENSG00000166049; HLA -B*15:01
GQQEDESQSF

SEQ ID NO: 8306 - protein, 11 aa, Homo sapiens
  Table 1.2; PASD1; ENSG00000166049; HLA -A*30:02,HLA-B*15:01,HLA-B*27:05
GQQEDESQSFY

SEQ ID NO: 8307 - protein, 8 aa, Homo sapiens
  Table 1.2; PASD1; ENSG00000166049; HLA -B*15:01,HLA-B*15:03
GQRGHTSM

SEQ ID NO: 8308 - protein, 9 aa, Homo sapiens
  Table 1.2; PASD1; ENSG00000166049; HLA -A*03:01
GQVKRPLPH

SEQ ID NO: 8309 - protein, 9 aa, Homo sapiens
  Table 1.2; PASD1; ENSG00000166049; HLA -A*01:01,HLA-A*11:01,HLA-A*26:01,HLA-A*29:02,HLA-A*30:02, HLA-A*32:01,HLA-B*15:01,HLA-B*15:03,HLA-B*39:01,HLA-B*57:01, HLA-B*58:01
GTLHGQPTY

SEQ ID NO: 8310 - protein, 11 aa, Homo sapiens
  Table 1.2; PASD1; ENSG00000166049; HLA -B*39:01
GVEGPPDPQAF

SEQ ID NO: 8311 - protein, 11 aa, Homo sapiens
  Table 1.2; PASD1; ENSG00000166049; HLA -A*30:01
HDAIQNQQNAL

SEQ ID NO: 8312 - protein, 9 aa, Homo sapiens
  Table 1.2; PASD1; ENSG00000166049; HLA -A*32:01,HLA-B*13:02,HLA-C*16:02
HGQPTYHQV

SEQ ID NO: 8313 - protein, 9 aa, Homo sapiens
  Table 1.2; PASD1; ENSG00000166049; HLA -A*02:03,HLA-B*08:01
HLKEQQRQL

SEQ ID NO: 8314 - protein, 9 aa, Homo sapiens
  Table 1.2; PASD1; ENSG00000166049; HLA -A*02:07,HLA-A*03:01,HLA-A*03:02,HLA-A*11:01,HLA-A*68:01
HLPAEIVGK

SEQ ID NO: 8315 - protein, 10 aa, Homo sapiens
  Table 1.2; PASD1; ENSG00000166049; HLA -A*03:01
HLPAEIVGKK

SEQ ID NO: 8316 - protein, 11 aa, Homo sapiens
  Table 1.2; PASD1; ENSG00000166049; HLA -A*02:07
HLPAEIVGKKL

SEQ ID NO: 8317 - protein, 9 aa, Homo sapiens
  Table 1.2; PASD1; ENSG00000166049; HLA -A*02:03,HLA-A*02:04,HLA-A*03:02,HLA-B*08:01
HLQKQPNTL

SEQ ID NO: 8318 - protein, 10 aa, Homo sapiens
  Table 1.2; PASD1; ENSG00000166049; HLA -A*01:01,HLA-A*25:01,HLA-A*26:01,HLA-A*29:02,HLA-A*30:02, HLA-A*32:01,HLA-B*15:01,HLA-B*15:03,HLA-B*35:01,HLA-B*46:01, HLA-B*55:01,HLA-B*58:01,HLA-C*07:04
HMFVDSDSTY

SEQ ID NO: 8319 - protein, 9 aa, Homo sapiens
  Table 1.2; PASD1; ENSG00000166049; HLA -A*33:01,HLA-A*33:03,HLA-A*68:01,HLA-C*07:06
HNVIVGNER

SEQ ID NO: 8320 - protein, 8 aa, Homo sapiens
  Table 1.2; PASD1; ENSG00000166049; HLA -B*54:01,HLA-B*56:01
HPVRFLQA

SEQ ID NO: 8321 - protein, 8 aa, Homo sapiens
  Table 1.2; PASD1; ENSG00000166049; HLA -A*30:01,HLA-B*13:02,HLA-B*39:01,HLA-B*40:02
HQVQVSEV

SEQ ID NO: 8322 - protein, 10 aa, Homo sapiens
  Table 1.2; PASD1; ENSG00000166049; HLA -B*13:02,HLA-B*39:01
HQVQVSEVGV

SEQ ID NO: 8323 - protein, 9 aa, Homo sapiens
  Table 1.2; PASD1; ENSG00000166049; HLA -A*68:02
HTSMKAVYV

SEQ ID NO: 8324 - protein, 9 aa, Homo sapiens
  Table 1.2; PASD1; ENSG00000166049; HLA -A*30:02,HLA-B*15:01,HLA-B*15:03,HLA-B*18:01,HLA-B*27:02, HLA-B*35:01,HLA-B*44:02,HLA-B*44:03
IDIAEVEQY

SEQ ID NO: 8325 - protein, 10 aa, Homo sapiens
  Table 1.2; PASD1; ENSG00000166049; HLA -B*27:02
IISQELELMK

SEQ ID NO: 8326 - protein, 10 aa, Homo sapiens
  Table 1.2; PASD1; ENSG00000166049; HLA -A*02:03
ILRTQLLQQL

SEQ ID NO: 8327 - protein, 9 aa, Homo sapiens
  Table 1.2; PASD1; ENSG00000166049; HLA -B*56:01
IPDLQSSEA

SEQ ID NO: 8328 - protein, 9 aa, Homo sapiens
  Table 1.2; PASD1; ENSG00000166049; HLA -A*29:02,HLA-B*35:01,HLA-B*55:01
IPSFPTYDY

SEQ ID NO: 8329 - protein, 8 aa, Homo sapiens
  Table 1.2; PASD1; ENSG00000166049; HLA -B*15:01,HLA-B*15:03,HLA-B*39:01
IQNQQNAL

SEQ ID NO: 8330 - protein, 11 aa, Homo sapiens
  Table 1.2; PASD1; ENSG00000166049; HLA -B*15:01
IQNQQNALELM

SEQ ID NO: 8331 - protein, 8 aa, Homo sapiens
  Table 1.2; PASD1; ENSG00000166049; HLA -C*05:01
ISDDQIDI

SEQ ID NO: 8332 - protein, 9 aa, Homo sapiens
  Table 1.2; PASD1; ENSG00000166049; HLA -A*11:01,HLA-B*27:02
ISQELELMK

SEQ ID NO: 8333 - protein, 10 aa, Homo sapiens
  Table 1.2; PASD1; ENSG00000166049; HLA -A*11:01
ISQELELMKK

SEQ ID NO: 8334 - protein, 9 aa, Homo sapiens
  Table 1.2; PASD1; ENSG00000166049; HLA -A*23:01,HLA-A*24:02,HLA-A*25:01,HLA-A*26:01,HLA-A*30:02, HLA-A*32:01,HLA-B*57:01,HLA-B*58:01,HLA-C*16:01
ISSSSIPQF

SEQ ID NO: 8335 - protein, 10 aa, Homo sapiens
  Table 1.2; PASD1; ENSG00000166049; HLA -A*01:01
ISTLETPQDY

SEQ ID NO: 8336 - protein, 10 aa, Homo sapiens
  Table 1.2; PASD1; ENSG00000166049; HLA -A*25:01,HLA-A*68:01
ITSDSTISTL

SEQ ID NO: 8337 - protein, 9 aa, Homo sapiens
  Table 1.2; PASD1; ENSG00000166049; HLA -B*08:01
IVGKKLLSL

SEQ ID NO: 8338 - protein, 9 aa, Homo sapiens
  Table 1.2; PASD1; ENSG00000166049; HLA -A*30:01,HLA-B*35:03,HLA-B*40:01,HLA-B*58:01,HLA-C*03:03, HLA-C*03:04,HLA-C*16:02
KAVSDEAVL

SEQ ID NO: 8339 - protein, 9 aa, Homo sapiens
  Table 1.2; PASD1; ENSG00000166049; HLA -B*07:02,HLA-B*40:02,HLA-B*54:01,HLA-B*56:01,HLA-B*58:01
KAVYVEPAA

SEQ ID NO: 8340 - protein, 10 aa, Homo sapiens
  Table 1.2; PASD1; ENSG00000166049; HLA -B*56:01
KAVYVEPAAA

SEQ ID NO: 8341 - protein, 11 aa, Homo sapiens
  Table 1.2; PASD1; ENSG00000166049; HLA -B*56:01
KAVYVEPAAAA

SEQ ID NO: 8342 - protein, 9 aa, Homo sapiens
  Table 1.2; PASD1; ENSG00000166049; HLA -B*44:02,HLA-B*44:03
KEQLEERTW

SEQ ID NO: 8343 - protein, 10 aa, Homo sapiens
  Table 1.2; PASD1; ENSG00000166049; HLA -A*31:01
KHNVIVGNER

SEQ ID NO: 8344 - protein, 9 aa, Homo sapiens
  Table 1.2; PASD1; ENSG00000166049; HLA -A*02:04,HLA-A*02:07,HLA-A*24:02
KIILKFPLL

SEQ ID NO: 8345 - protein, 9 aa, Homo sapiens
  Table 1.2; PASD1; ENSG00000166049; HLA -A*31:01,HLA-B*46:01
KLKEQLEER

SEQ ID NO: 8346 - protein, 11 aa, Homo sapiens
  Table 1.2; PASD1; ENSG00000166049; HLA -B*57:01
KLKEQLEERTW

SEQ ID NO: 8347 - protein, 10 aa, Homo sapiens
  Table 1.2; PASD1; ENSG00000166049; HLA -A*03:01,HLA-A*03:02,HLA-A*11:01
KLQEQKMQEK

SEQ ID NO: 8348 - protein, 10 aa, Homo sapiens
  Table 1.2; PASD1; ENSG00000166049; HLA -A*03:02,HLA-A*11:01
KQQLQEQPLK

SEQ ID NO: 8349 - protein, 9 aa, Homo sapiens
  Table 1.2; PASD1; ENSG00000166049; HLA -A*03:01,HLA-A*03:02,HLA-A*31:01,HLA-A*32:01,HLA-A*33:01, HLA-A*33:03
KVNPKSSQR

SEQ ID NO: 8350 - protein, 10 aa, Homo sapiens
  Table 1.2; PASD1; ENSG00000166049; HLA -A*03:01,HLA-A*03:02
KVNPKSSQRK

SEQ ID NO: 8351 - protein, 8 aa, Homo sapiens
  Table 1.2; PASD1; ENSG00000166049; HLA -B*18:01,HLA-B*49:01
LEFSVDQV

SEQ ID NO: 8352 - protein, 11 aa, Homo sapiens
  Table 1.2; PASD1; ENSG00000166049; HLA -B*49:01
LEFSVDQVDSV

SEQ ID NO: 8353 - protein, 8 aa, Homo sapiens
  Table 1.2; PASD1; ENSG00000166049; HLA -B*49:01
LETPQDYI

SEQ ID NO: 8354 - protein, 11 aa, Homo sapiens
  Table 1.2; PASD1; ENSG00000166049; HLA -B*44:02,HLA-B*44:03,HLA-B*57:01
LETPQDYIRLW

SEQ ID NO: 8355 - protein, 10 aa, Homo sapiens
  Table 1.2; PASD1; ENSG00000166049; HLA -A*25:01,HLA-B*58:01
LGPVVQVNTW

SEQ ID NO: 8356 - protein, 9 aa, Homo sapiens
  Table 1.2; PASD1; ENSG00000166049; HLA -A*02:01,HLA-A*02:04,HLA-A*02:07,HLA-B*38:01
LLDGFMITL

SEQ ID NO: 8357 - protein, 9 aa, Homo sapiens
  Table 1.2; PASD1; ENSG00000166049; HLA -A*02:01,HLA-A*02:03,HLA-A*02:04
LLGHLPAEI

SEQ ID NO: 8358 - protein, 10 aa, Homo sapiens
  Table 1.2; PASD1; ENSG00000166049; HLA -A*32:01,HLA-B*15:01
LLNSETHIEF

SEQ ID NO: 8359 - protein, 11 aa, Homo sapiens
  Table 1.2; PASD1; ENSG00000166049; HLA -B*15:01
LLPDEEKDEVY

SEQ ID NO: 8360 - protein, 9 aa, Homo sapiens
  Table 1.2; PASD1; ENSG00000166049; HLA -A*03:02,HLA-A*11:01
LLQQLYTSK

SEQ ID NO: 8361 - protein, 11 aa, Homo sapiens
  Table 1.2; PASD1; ENSG00000166049; HLA -A*02:07
LMDPVDPEDSV

SEQ ID NO: 8362 - protein, 9 aa, Homo sapiens
  Table 1.2; PASD1; ENSG00000166049; HLA -A*29:02,HLA-C*16:01
LNSETHIEF

SEQ ID NO: 8363 - protein, 9 aa, Homo sapiens
  Table 1.2; PASD1; ENSG00000166049; HLA -B*51:01
LPAEIVGKK

SEQ ID NO: 8364 - protein, 10 aa, Homo sapiens
  Table 1.2; PASD1; ENSG00000166049; HLA -B*07:02,HLA-B*35:01,HLA-B*35:03,HLA-B*51:01,HLA-B*56:01
LPAEIVGKKL

SEQ ID NO: 8365 - protein, 9 aa, Homo sapiens
  Table 1.2; PASD1; ENSG00000166049; HLA -B*35:03,HLA-B*51:01,HLA-B*55:01
LPDEEKDEV

SEQ ID NO: 8366 - protein, 10 aa, Homo sapiens
  Table 1.2; PASD1; ENSG00000166049; HLA -A*01:01,HLA-B*35:01,HLA-B*35:03,HLA-B*55:01,HLA-C*03:03
LPDEEKDEVY

SEQ ID NO: 8367 - protein, 11 aa, Homo sapiens
  Table 1.2; PASD1; ENSG00000166049; HLA -B*54:01,HLA-B*56:01
LPLIDTSNSEA

SEQ ID NO: 8368 - protein, 9 aa, Homo sapiens
  Table 1.2; PASD1; ENSG00000166049; HLA -A*02:01,HLA-A*02:03,HLA-B*13:02
LQAQPIVPV

SEQ ID NO: 8369 - protein, 11 aa, Homo sapiens
  Table 1.2; PASD1; ENSG00000166049; HLA -A*31:01,HLA-A*68:01,HLA-C*07:06
LQAQPIVPVQR

SEQ ID NO: 8370 - protein, 8 aa, Homo sapiens
  Table 1.2; PASD1; ENSG00000166049; HLA -B*08:01
LQKQPNTL

SEQ ID NO: 8371 - protein, 9 aa, Homo sapiens
  Table 1.2; PASD1; ENSG00000166049; HLA -A*31:01
LQKQPNTLR

SEQ ID NO: 8372 - protein, 9 aa, Homo sapiens
  Table 1.2; PASD1; ENSG00000166049; HLA -A*02:01,HLA-A*02:03,HLA-A*32:01,HLA-B*08:01,HLA-B*13:02, HLA-B*37:01
LQNPRDVSV

SEQ ID NO: 8373 - protein, 9 aa, Homo sapiens
  Table 1.2; PASD1; ENSG00000166049; HLA -A*01:01,HLA-A*29:02,HLA-A*30:02,HLA-A*32:01,HLA-B*15:01, HLA-B*15:03,HLA-B*46:01,HLA-C*02:02,HLA-C*07:04,HLA-C*14:02
LQPSSPVAY

SEQ ID NO: 8374 - protein, 9 aa, Homo sapiens
  Table 1.2; PASD1; ENSG00000166049; HLA -A*03:02
LQSSEAVPK

SEQ ID NO: 8375 - protein, 9 aa, Homo sapiens
  Table 1.2; PASD1; ENSG00000166049; HLA -A*01:01
LSDSLGPVV

SEQ ID NO: 8376 - protein, 9 aa, Homo sapiens
  Table 1.2; PASD1; ENSG00000166049; HLA -A*03:02,HLA-A*11:01
LVQQEQHLK

SEQ ID NO: 8377 - protein, 9 aa, Homo sapiens
  Table 1.2; PASD1; ENSG00000166049; HLA -A*23:01,HLA-A*24:02
LYLVGNVCI

SEQ ID NO: 8378 - protein, 11 aa, Homo sapiens
  Table 1.2; PASD1; ENSG00000166049; HLA -A*23:01,HLA-A*24:02
LYRADPVDLEF

SEQ ID NO: 8379 - protein, 9 aa, Homo sapiens
  Table 1.2; PASD1; ENSG00000166049; HLA -A*23:01,HLA-A*29:02,HLA-A*30:02,HLA-B*15:01,HLA-B*15:03, HLA-B*35:01,HLA-B*35:03,HLA-B*39:01,HLA-B*46:01,HLA-B*55:01, HLA-C*04:01,HLA-C*07:04,HLA-C*14:02
MFVDSDSTY

SEQ ID NO: 8380 - protein, 11 aa, Homo sapiens
  Table 1.2; PASD1; ENSG00000166049; HLA -B*55:01
MPAEQRDSNKP

SEQ ID NO: 8381 - protein, 9 aa, Homo sapiens
  Table 1.2; PASD1; ENSG00000166049; HLA -B*07:02,HLA-B*08:01,HLA-B*35:01,HLA-B*35:03,HLA-B*51:01, HLA-B*54:01,HLA-B*55:01,HLA-B*56:01,HLA-C*03:03,HLA-C*03:04, HLA-C*05:01,HLA-C*07:02
MPESPALSL

SEQ ID NO: 8382 - protein, 9 aa, Homo sapiens
  Table 1.2; PASD1; ENSG00000166049; HLA -B*27:05
MRSAEQTRL

SEQ ID NO: 8383 - protein, 8 aa, Homo sapiens
  Table 1.2; PASD1; ENSG00000166049; HLA -B*18:01
NEFPVVFS

SEQ ID NO: 8384 - protein, 10 aa, Homo sapiens
  Table 1.2; PASD1; ENSG00000166049; HLA -A*30:01,HLA-B*18:01,HLA-B*40:01,HLA-B*44:02,HLA-B*44:03, HLA-B*49:01
NEFPVVFSGL

SEQ ID NO: 8385 - protein, 11 aa, Homo sapiens
  Table 1.2; PASD1; ENSG00000166049; HLA -B*44:02,HLA-B*44:03
NEFPVVFSGLF

SEQ ID NO: 8386 - protein, 9 aa, Homo sapiens
  Table 1.2; PASD1; ENSG00000166049; HLA -B*07:02
NPKSSQRKL

SEQ ID NO: 8387 - protein, 9 aa, Homo sapiens
  Table 1.2; PASD1; ENSG00000166049; HLA -B*07:02,HLA-B*35:01,HLA-B*35:03,HLA-C*07:02
NPRDVSVPL

SEQ ID NO: 8388 - protein, 9 aa, Homo sapiens
  Table 1.2; PASD1; ENSG00000166049; HLA -B*54:01,HLA-B*55:01,HLA-B*56:01
NPVAPLDQA

SEQ ID NO: 8389 - protein, 11 aa, Homo sapiens
  Table 1.2; PASD1; ENSG00000166049; HLA -B*35:03
NPVAPLDQAGL

SEQ ID NO: 8390 - protein, 8 aa, Homo sapiens
  Table 1.2; PASD1; ENSG00000166049; HLA -C*05:01,HLA-C*16:01
NSETHIEF

SEQ ID NO: 8391 - protein, 10 aa, Homo sapiens
  Table 1.2; PASD1; ENSG00000166049; HLA -A*01:01
NVEHGDSSAY

SEQ ID NO: 8392 - protein, 8 aa, Homo sapiens
  Table 1.2; PASD1; ENSG00000166049; HLA -A*68:01
NVIVGNER

SEQ ID NO: 8393 - protein, 9 aa, Homo sapiens
  Table 1.2; PASD1; ENSG00000166049; HLA -A*68:02
NVIVGNERV

SEQ ID NO: 8394 - protein, 9 aa, Homo sapiens
  Table 1.2; PASD1; ENSG00000166049; HLA -A*31:01,HLA-A*33:01,HLA-A*33:03,HLA-A*68:01
NVKFIVNVR

SEQ ID NO: 8395 - protein, 9 aa, Homo sapiens
  Table 1.2; PASD1; ENSG00000166049; HLA -A*23:01,HLA-A*24:02,HLA-A*29:02
NWIPSFPTY

SEQ ID NO: 8396 - protein, 10 aa, Homo sapiens
  Table 1.2; PASD1; ENSG00000166049; HLA -B*07:02
PAAAAAAAAI

SEQ ID NO: 8397 - protein, 10 aa, Homo sapiens
  Table 1.2; PASD1; ENSG00000166049; HLA -A*68:01
PAAYQPDQMR

SEQ ID NO: 8398 - protein, 10 aa, Homo sapiens
  Table 1.2; PASD1; ENSG00000166049; HLA -B*07:02
PAEIVGKKLL

SEQ ID NO: 8399 - protein, 11 aa, Homo sapiens
  Table 1.2; PASD1; ENSG00000166049; HLA -A*03:02,HLA-A*11:01,HLA-B*27:02
PDLQSSEAVPK

SEQ ID NO: 8400 - protein, 10 aa, Homo sapiens
  Table 1.2; PASD1; ENSG00000166049; HLA -B*40:01
PEEEQQKQQL

SEQ ID NO: 8401 - protein, 8 aa, Homo sapiens
  Table 1.2; PASD1; ENSG00000166049; HLA -B*37:01
PESPALSL

SEQ ID NO: 8402 - protein, 10 aa, Homo sapiens
  Table 1.2; PASD1; ENSG00000166049; HLA -A*30:02,HLA-B*15:01
PLQPSSPVAY

SEQ ID NO: 8403 - protein, 10 aa, Homo sapiens
  Table 1.2; PASD1; ENSG00000166049; HLA -A*30:02
PQAFQGPAAY

SEQ ID NO: 8404 - protein, 9 aa, Homo sapiens
  Table 1.2; PASD1; ENSG00000166049; HLA -A*68:02
PTYDYFNQV

SEQ ID NO: 8405 - protein, 8 aa, Homo sapiens
  Table 1.2; PASD1; ENSG00000166049; HLA -B*54:01
QAFQGPAA

SEQ ID NO: 8406 - protein, 9 aa, Homo sapiens
  Table 1.2; PASD1; ENSG00000166049; HLA -A*01:01,HLA-A*25:01,HLA-A*26:01,HLA-A*29:02,HLA-A*30:02, HLA-A*32:01,HLA-B*15:01,HLA-B*15:03,HLA-B*18:01,HLA-B*35:01, HLA-B*39:01,HLA-B*46:01,HLA-B*58:01,HLA-C*02:02,HLA-C*16:04
QAFQGPAAY

SEQ ID NO: 8407 - protein, 9 aa, Homo sapiens
  Table 1.2; PASD1; ENSG00000166049; HLA -A*32:01
QAQPIVPVQ

SEQ ID NO: 8408 - protein, 10 aa, Homo sapiens
  Table 1.2; PASD1; ENSG00000166049; HLA -A*03:02,HLA-A*11:01,HLA-A*31:01,HLA-A*33:01,HLA-A*33:03, HLA-A*68:01,HLA-A*68:02,HLA-B*57:01,HLA-C*07:06
QAQPIVPVQR

SEQ ID NO: 8409 - protein, 9 aa, Homo sapiens
  Table 1.2; PASD1; ENSG00000166049; HLA -A*30:01,HLA-B*37:01
QDFRGEPEV

SEQ ID NO: 8410 - protein, 8 aa, Homo sapiens
  Table 1.2; PASD1; ENSG00000166049; HLA -B*18:01,HLA-B*37:01,HLA-B*44:02
QEDESQSF

SEQ ID NO: 8411 - protein, 9 aa, Homo sapiens
  Table 1.2; PASD1; ENSG00000166049; HLA -A*01:01,HLA-B*44:02,HLA-B*44:03
QEDESQSFY

SEQ ID NO: 8412 - protein, 9 aa, Homo sapiens
  Table 1.2; PASD1; ENSG00000166049; HLA -A*30:01,HLA-B*18:01,HLA-B*37:01,HLA-B*44:02,HLA-B*44:03, HLA-B*49:01
QELELMKKL

SEQ ID NO: 8413 - protein, 10 aa, Homo sapiens
  Table 1.2; PASD1; ENSG00000166049; HLA -B*49:01
QELSDSLGPV

SEQ ID NO: 8414 - protein, 11 aa, Homo sapiens
  Table 1.2; PASD1; ENSG00000166049; HLA -B*49:01
QELSDSLGPVV

SEQ ID NO: 8415 - protein, 8 aa, Homo sapiens
  Table 1.2; PASD1; ENSG00000166049; HLA -B*49:01
QENVHMFV

SEQ ID NO: 8416 - protein, 9 aa, Homo sapiens
  Table 1.2; PASD1; ENSG00000166049; HLA -B*37:01,HLA-B*44:02,HLA-B*44:03,HLA-B*49:01
QEQPLKHNV

SEQ ID NO: 8417 - protein, 10 aa, Homo sapiens
  Table 1.2; PASD1; ENSG00000166049; HLA -B*44:02,HLA-B*44:03,HLA-B*49:01
QEQPLKHNVI

SEQ ID NO: 8418 - protein, 10 aa, Homo sapiens
  Table 1.2; PASD1; ENSG00000166049; HLA -A*01:01
QIDIAEVEQY

SEQ ID NO: 8419 - protein, 9 aa, Homo sapiens
  Table 1.2; PASD1; ENSG00000166049; HLA -A*01:01,HLA-A*02:01,HLA-A*02:04,HLA-A*02:07
QLEERTWLL

SEQ ID NO: 8420 - protein, 10 aa, Homo sapiens
  Table 1.2; PASD1; ENSG00000166049; HLA -A*02:01,HLA-A*02:03,HLA-A*02:04,HLA-A*02:07,HLA-A*03:01
QLLDGFMITL

SEQ ID NO: 8421 - protein, 10 aa, Homo sapiens
  Table 1.2; PASD1; ENSG00000166049; HLA -A*03:01,HLA-A*03:02,HLA-A*11:01,HLA-B*27:02
QLLQQLYTSK

SEQ ID NO: 8422 - protein, 8 aa, Homo sapiens
  Table 1.2; PASD1; ENSG00000166049; HLA -A*03:02
QLQEQPLK

SEQ ID NO: 8423 - protein, 9 aa, Homo sapiens
  Table 1.2; PASD1; ENSG00000166049; HLA -A*01:01,HLA-A*03:01,HLA-A*03:02
QLQEQPLKH

SEQ ID NO: 8424 - protein, 9 aa, Homo sapiens
  Table 1.2; PASD1; ENSG00000166049; HLA -A*02:03,HLA-A*02:04,HLA-B*07:02,HLA-B*08:01
QLREQLQQL

SEQ ID NO: 8425 - protein, 9 aa, Homo sapiens
  Table 1.2; PASD1; ENSG00000166049; HLA -B*38:01
QLVQQEQHL

SEQ ID NO: 8426 - protein, 10 aa, Homo sapiens
  Table 1.2; PASD1; ENSG00000166049; HLA -A*03:02
QLVQQEQHLK

SEQ ID NO: 8427 - protein, 8 aa, Homo sapiens
  Table 1.2; PASD1; ENSG00000166049; HLA -B*08:01
QLYTSKAV

SEQ ID NO: 8428 - protein, 8 aa, Homo sapiens
  Table 1.2; PASD1; ENSG00000166049; HLA -B*55:01,HLA-B*56:01
QPDQMRSA

SEQ ID NO: 8429 - protein, 8 aa, Homo sapiens
  Table 1.2; PASD1; ENSG00000166049; HLA -A*31:01,HLA-A*33:01,HLA-A*33:03,HLA-A*68:01
QPIVPVQR

SEQ ID NO: 8430 - protein, 9 aa, Homo sapiens
  Table 1.2; PASD1; ENSG00000166049; HLA -B*07:02,HLA-B*51:01,HLA-B*54:01,HLA-B*55:01,HLA-B*56:01
QPIVPVQRA

SEQ ID NO: 8431 - protein, 10 aa, Homo sapiens
  Table 1.2; PASD1; ENSG00000166049; HLA -B*54:01,HLA-B*56:01
QPIVPVQRAA

SEQ ID NO: 8432 - protein, 8 aa, Homo sapiens
  Table 1.2; PASD1; ENSG00000166049; HLA -B*08:01,HLA-B*51:01
QPLKHNVI

SEQ ID NO: 8433 - protein, 9 aa, Homo sapiens
  Table 1.2; PASD1; ENSG00000166049; HLA -B*07:02,HLA-B*51:01,HLA-B*54:01,HLA-B*56:01,HLA-C*07:02
QPLQPSSPV

SEQ ID NO: 8434 - protein, 10 aa, Homo sapiens
  Table 1.2; PASD1; ENSG00000166049; HLA -B*54:01,HLA-B*55:01,HLA-B*56:01
QPLQPSSPVA

SEQ ID NO: 8435 - protein, 11 aa, Homo sapiens
  Table 1.2; PASD1; ENSG00000166049; HLA -A*29:02,HLA-A*30:02,HLA-B*15:03,HLA-B*35:01,HLA-B*55:01
QPLQPSSPVAY

SEQ ID NO: 8436 - protein, 9 aa, Homo sapiens
  Table 1.2; PASD1; ENSG00000166049; HLA -B*07:02,HLA-B*08:01,HLA-B*56:01
QPNTLRHVV

SEQ ID NO: 8437 - protein, 8 aa, Homo sapiens
  Table 1.2; PASD1; ENSG00000166049; HLA -B*35:01
QPSSPVAY

SEQ ID NO: 8438 - protein, 9 aa, Homo sapiens
  Table 1.2; PASD1; ENSG00000166049; HLA -B*07:02,HLA-B*35:03,HLA-B*51:01,HLA-B*54:01,HLA-B*55:01, HLA-B*56:01,HLA-C*16:02
QPTYHQVQV

SEQ ID NO: 8439 - protein, 9 aa, Homo sapiens
  Table 1.2; PASD1; ENSG00000166049; HLA -B*38:01,HLA-B*39:01
QQDPENPVA

SEQ ID NO: 8440 - protein, 10 aa, Homo sapiens
  Table 1.2; PASD1; ENSG00000166049; HLA -B*39:01
QQDPENPVAP

SEQ ID NO: 8441 - protein, 11 aa, Homo sapiens
  Table 1.2; PASD1; ENSG00000166049; HLA -B*27:05,HLA-B*38:01,HLA-B*39:01
QQDPENPVAPL

SEQ ID NO: 8442 - protein, 9 aa, Homo sapiens
  Table 1.2; PASD1; ENSG00000166049; HLA -B*15:01,HLA-B*15:03,HLA-B*38:01,HLA-B*39:01
QQEDESQSF

SEQ ID NO: 8443 - protein, 10 aa, Homo sapiens
  Table 1.2; PASD1; ENSG00000166049; HLA -A*01:01,HLA-A*30:02
QQEDESQSFY

SEQ ID NO: 8444 - protein, 9 aa, Homo sapiens
  Table 1.2; PASD1; ENSG00000166049; HLA -A*03:02,HLA-A*11:01
QQLQEQPLK

SEQ ID NO: 8445 - protein, 9 aa, Homo sapiens
  Table 1.2; PASD1; ENSG00000166049; HLA -B*13:02
QQLYTSKAV

SEQ ID NO: 8446 - protein, 9 aa, Homo sapiens
  Table 1.2; PASD1; ENSG00000166049; HLA -B*13:02,HLA-B*38:01
QQNALELMM

SEQ ID NO: 8447 - protein, 11 aa, Homo sapiens
  Table 1.2; PASD1; ENSG00000166049; HLA -B*27:05,HLA-B*38:01
QQQLVQQEQHL

SEQ ID NO: 8448 - protein, 11 aa, Homo sapiens
  Table 1.2; PASD1; ENSG00000166049; HLA -B*39:01
QRAAEQQPSGF

SEQ ID NO: 8449 - protein, 8 aa, Homo sapiens
  Table 1.2; PASD1; ENSG00000166049; HLA -A*01:01,HLA-A*30:02
QSFYPEAY

SEQ ID NO: 8450 - protein, 9 aa, Homo sapiens
  Table 1.2; PASD1; ENSG00000166049; HLA -A*03:01,HLA-A*03:02,HLA-A*11:01,HLA-A*68:01,HLA-C*07:06
QSSEAVPKK

SEQ ID NO: 8451 - protein, 10 aa, Homo sapiens
  Table 1.2; PASD1; ENSG00000166049; HLA -A*31:01,HLA-A*33:03
QTRLMPAEQR

SEQ ID NO: 8452 - protein, 11 aa, Homo sapiens
  Table 1.2; PASD1; ENSG00000166049; HLA -A*23:01,HLA-A*24:02
QYGPQENVHMF

SEQ ID NO: 8453 - protein, 11 aa, Homo sapiens
  Table 1.2; PASD1; ENSG00000166049; HLA -A*30:02,HLA-B*15:01
RAAEQQPSGFY

SEQ ID NO: 8454 - protein, 9 aa, Homo sapiens
  Table 1.2; PASD1; ENSG00000166049; HLA -A*01:01,HLA-A*02:07,HLA-A*23:01,HLA-A*32:01,HLA-B*35:01, HLA-B*35:03,HLA-B*38:01,HLA-B*55:01,HLA-B*57:01,HLA-B*58:01, HLA-C*03:03,HLA-C*03:04,HLA-C*05:01
RADPVDLEF

SEQ ID NO: 8455 - protein, 10 aa, Homo sapiens
  Table 1.2; PASD1; ENSG00000166049; HLA -A*01:01,HLA-A*30:02,HLA-B*57:01,HLA-B*58:01
RGEPEVNPLY

SEQ ID NO: 8456 - protein, 11 aa, Homo sapiens
  Table 1.2; PASD1; ENSG00000166049; HLA -A*31:01
RGEPEVNPLYR

SEQ ID NO: 8457 - protein, 10 aa, Homo sapiens
  Table 1.2; PASD1; ENSG00000166049; HLA -A*30:02
RGHTSMKAVY

SEQ ID NO: 8458 - protein, 9 aa, Homo sapiens
  Table 1.2; PASD1; ENSG00000166049; HLA -B*57:01,HLA-B*58:01,HLA-C*16:01,HLA-C*16:02
RSAEQTRLM

SEQ ID NO: 8459 - protein, 9 aa, Homo sapiens
  Table 1.2; PASD1; ENSG00000166049; HLA -A*01:01,HLA-A*29:02,HLA-A*30:02,HLA-A*32:01,HLA-B*57:01, HLA-B*58:01
RTQLLQQLY

SEQ ID NO: 8460 - protein, 8 aa, Homo sapiens
  Table 1.2; PASD1; ENSG00000166049; HLA -B*08:01,HLA-B*37:01,HLA-B*46:01,HLA-B*58:01,HLA-C*02:02, HLA-C*05:01
SAYENVKF

SEQ ID NO: 8461 - protein, 9 aa, Homo sapiens
  Table 1.2; PASD1; ENSG00000166049; HLA -A*02:01,HLA-A*02:03,HLA-A*02:04,HLA-A*68:02,HLA-B*13:02, HLA-B*49:01,HLA-B*51:01,HLA-C*02:02,HLA-C*12:03,HLA-C*16:02
SAYENVKFI

SEQ ID NO: 8462 - protein, 8 aa, Homo sapiens
  Table 1.2; PASD1; ENSG00000166049; HLA -C*05:01
SCDEQGTL

SEQ ID NO: 8463 - protein, 8 aa, Homo sapiens
  Table 1.2; PASD1; ENSG00000166049; HLA -B*37:01,HLA-B*40:02
SDSLGPVV

SEQ ID NO: 8464 - protein, 10 aa, Homo sapiens
  Table 1.2; PASD1; ENSG00000166049; HLA -B*37:01
SDSLGPVVQV

SEQ ID NO: 8465 - protein, 8 aa, Homo sapiens
  Table 1.2; PASD1; ENSG00000166049; HLA -B*37:01
SDSTISTL

SEQ ID NO: 8466 - protein, 9 aa, Homo sapiens
  Table 1.2; PASD1; ENSG00000166049; HLA -A*30:01,HLA-B*13:02,HLA-B*37:01,HLA-B*40:01,HLA-B*40:02, HLA-B*44:02,HLA-B*44:03,HLA-B*49:01
SEAISSSSI

SEQ ID NO: 8467 - protein, 9 aa, Homo sapiens
  Table 1.2; PASD1; ENSG00000166049; HLA -B*44:03
SEAVPKKQQ

SEQ ID NO: 8468 - protein, 8 aa, Homo sapiens
  Table 1.2; PASD1; ENSG00000166049; HLA -A*02:01,HLA-A*02:03,HLA-A*02:04,HLA-A*02:07,HLA-B*13:02, HLA-B*37:01,HLA-B*55:01
SLGPVVQV

SEQ ID NO: 8469 - protein, 9 aa, Homo sapiens
  Table 1.2; PASD1; ENSG00000166049; HLA -A*32:01
SLGPVVQVN

SEQ ID NO: 8470 - protein, 11 aa, Homo sapiens
  Table 1.2; PASD1; ENSG00000166049; HLA -A*25:01,HLA-A*32:01,HLA-B*44:02,HLA-B*44:03,HLA-B*57:01, HLA-B*58:01
SLGPVVQVNTW

SEQ ID NO: 8471 - protein, 8 aa, Homo sapiens
  Table 1.2; PASD1; ENSG00000166049; HLA -B*08:01
SLKNTGEL

SEQ ID NO: 8472 - protein, 10 aa, Homo sapiens
  Table 1.2; PASD1; ENSG00000166049; HLA -A*02:01,HLA-A*02:03,HLA-A*02:04
SLLGHLPAEI

SEQ ID NO: 8473 - protein, 11 aa, Homo sapiens
  Table 1.2; PASD1; ENSG00000166049; HLA -A*02:01
SLQDFRGEPEV

SEQ ID NO: 8474 - protein, 9 aa, Homo sapiens
  Table 1.2; PASD1; ENSG00000166049; HLA -B*07:02,HLA-B*35:01
SPALSLQDF

SEQ ID NO: 8475 - protein, 9 aa, Homo sapiens
  Table 1.2; PASD1; ENSG00000166049; HLA -A*30:02,HLA-B*15:01,HLA-B*15:03,HLA-B*18:01,HLA-B*27:02, HLA-B*27:05,HLA-C*07:04
SQSFYPEAY

SEQ ID NO: 8476 - protein, 9 aa, Homo sapiens
  Table 1.2; PASD1; ENSG00000166049; HLA -B*58:01
SSAYENVKF

SEQ ID NO: 8477 - protein, 8 aa, Homo sapiens
  Table 1.2; PASD1; ENSG00000166049; HLA -A*11:01
SSEAVPKK

SEQ ID NO: 8478 - protein, 9 aa, Homo sapiens
  Table 1.2; PASD1; ENSG00000166049; HLA -A*01:01,HLA-A*02:01,HLA-A*02:04,HLA-A*02:07,HLA-A*03:01, HLA-A*11:01,HLA-A*30:01,HLA-A*68:01,HLA-A*68:02,HLA-B*13:02, HLA-B*35:01,HLA-B*35:03,HLA-B*38:01,HLA-B*55:01,HLA-C*04:01,
  HLA-C*05:01,HLA-C*07:04
STDGVIICV

SEQ ID NO: 8479 - protein, 9 aa, Homo sapiens
  Table 1.2; PASD1; ENSG00000166049; HLA -A*01:01,HLA-A*29:02,HLA-A*30:02
STLETPQDY

SEQ ID NO: 8480 - protein, 9 aa, Homo sapiens
  Table 1.2; PASD1; ENSG00000166049; HLA -A*25:01,HLA-A*26:01,HLA-B*15:01,HLA-B*15:03,HLA-B*46:01
STYCSSTVF

SEQ ID NO: 8481 - protein, 8 aa, Homo sapiens
  Table 1.2; PASD1; ENSG00000166049; HLA -C*05:01
SVDQEGPM

SEQ ID NO: 8482 - protein, 8 aa, Homo sapiens
  Table 1.2; PASD1; ENSG00000166049; HLA -C*05:01
SVDQVDSV

SEQ ID NO: 8483 - protein, 8 aa, Homo sapiens
  Table 1.2; PASD1; ENSG00000166049; HLA -A*30:01
TDGVIICV

SEQ ID NO: 8484 - protein, 8 aa, Homo sapiens
  Table 1.2; PASD1; ENSG00000166049; HLA -A*30:02,HLA-B*15:03,HLA-B*39:01
TLHGQPTY

SEQ ID NO: 8485 - protein, 9 aa, Homo sapiens
  Table 1.2; PASD1; ENSG00000166049; HLA -B*38:01
TLSTDGVII

SEQ ID NO: 8486 - protein, 11 aa, Homo sapiens
  Table 1.2; PASD1; ENSG00000166049; HLA -A*02:01,HLA-A*02:04
TLSTDGVIICV

SEQ ID NO: 8487 - protein, 8 aa, Homo sapiens
  Table 1.2; PASD1; ENSG00000166049; HLA -A*02:07,HLA-B*08:01,HLA-C*01:02
TMPESPAL

SEQ ID NO: 8488 - protein, 10 aa, Homo sapiens
  Table 1.2; PASD1; ENSG00000166049; HLA -A*02:07,HLA-C*01:02
TMPESPALSL

SEQ ID NO: 8489 - protein, 9 aa, Homo sapiens
  Table 1.2; PASD1; ENSG00000166049; HLA -B*44:02,HLA-B*57:01
TPQDYIRLW

SEQ ID NO: 8490 - protein, 9 aa, Homo sapiens
  Table 1.2; PASD1; ENSG00000166049; HLA -B*38:01
TQDSDEEPF

SEQ ID NO: 8491 - protein, 8 aa, Homo sapiens
  Table 1.2; PASD1; ENSG00000166049; HLA -B*15:01,HLA-B*15:03,HLA-B*39:01
TQLLQQLY

SEQ ID NO: 8492 - protein, 9 aa, Homo sapiens
  Table 1.2; PASD1; ENSG00000166049; HLA -B*13:02
TQLLQQLYT

SEQ ID NO: 8493 - protein, 11 aa, Homo sapiens
  Table 1.2; PASD1; ENSG00000166049; HLA -A*11:01,HLA-B*27:02
TQLLQQLYTSK

SEQ ID NO: 8494 - protein, 9 aa, Homo sapiens
  Table 1.2; PASD1; ENSG00000166049; HLA -B*27:05
TRLMPAEQR

SEQ ID NO: 8495 - protein, 9 aa, Homo sapiens
  Table 1.2; PASD1; ENSG00000166049; HLA -C*05:01
TSDSTISTL

SEQ ID NO: 8496 - protein, 9 aa, Homo sapiens
  Table 1.2; PASD1; ENSG00000166049; HLA -A*23:01,HLA-A*24:02
TYCSSTVFL

SEQ ID NO: 8497 - protein, 10 aa, Homo sapiens
  Table 1.2; PASD1; ENSG00000166049; HLA -A*23:01,HLA-A*24:02,HLA-B*35:03
TYDYFNQVTL

SEQ ID NO: 8498 - protein, 8 aa, Homo sapiens
  Table 1.2; PASD1; ENSG00000166049; HLA -C*05:01
VAENISSL

SEQ ID NO: 8499 - protein, 9 aa, Homo sapiens
  Table 1.2; PASD1; ENSG00000166049; HLA -A*23:01,HLA-C*05:01
VAENISSLL

SEQ ID NO: 8500 - protein, 8 aa, Homo sapiens
  Table 1.2; PASD1; ENSG00000166049; HLA -C*03:04
VAFNQQQL

SEQ ID NO: 8501 - protein, 9 aa, Homo sapiens
  Table 1.2; PASD1; ENSG00000166049; HLA -B*13:02,HLA-B*51:01,HLA-C*02:02,HLA-C*12:03,HLA-C*16:02
VAFNQQQLV

SEQ ID NO: 8502 - protein, 9 aa, Homo sapiens
  Table 1.2; PASD1; ENSG00000166049; HLA -C*01:02
VAPLDQAGL

SEQ ID NO: 8503 - protein, 10 aa, Homo sapiens
  Table 1.2; PASD1; ENSG00000166049; HLA -A*23:01,HLA-A*25:01,HLA-A*30:01,HLA-B*35:03,HLA-C*02:02, HLA-C*03:04,HLA-C*16:04
VAYDIISQEL

SEQ ID NO: 8504 - protein, 9 aa, Homo sapiens
  Table 1.2; PASD1; ENSG00000166049; HLA -A*24:02,HLA-B*08:01
VCILRTQLL

SEQ ID NO: 8505 - protein, 9 aa, Homo sapiens
  Table 1.2; PASD1; ENSG00000166049; HLA -A*30:01,HLA-B*18:01,HLA-B*40:02,HLA-B*49:01
VEGPPDPQA

SEQ ID NO: 8506 - protein, 10 aa, Homo sapiens
  Table 1.2; PASD1; ENSG00000166049; HLA -A*23:01,HLA-A*24:02,HLA-A*25:01,HLA-A*30:01,HLA-A*32:01, HLA-B*18:01,HLA-B*27:02,HLA-B*27:05,HLA-B*37:01,HLA-B*38:01, HLA-B*39:01,HLA-B*40:01,HLA-B*40:02,HLA-B*44:02,HLA-B*44:03,
  HLA-C*16:04
VEGPPDPQAF

SEQ ID NO: 8507 - protein, 9 aa, Homo sapiens
  Table 1.2; PASD1; ENSG00000166049; HLA -A*30:01,HLA-A*30:02,HLA-A*32:01,HLA-B*15:01,HLA-B*15:03, HLA-B*18:01,HLA-B*37:01,HLA-B*40:01,HLA-B*44:02,HLA-B*44:03, HLA-B*46:01,HLA-C*16:04
VEHGDSSAY

SEQ ID NO: 8508 - protein, 10 aa, Homo sapiens
  Table 1.2; PASD1; ENSG00000166049; HLA -B*49:01
VEQYGPQENV

SEQ ID NO: 8509 - protein, 8 aa, Homo sapiens
  Table 1.2; PASD1; ENSG00000166049; HLA -B*08:01
VGNERVQI

SEQ ID NO: 8510 - protein, 9 aa, Homo sapiens
  Table 1.2; PASD1; ENSG00000166049; HLA -B*13:02
VIICVAENI

SEQ ID NO: 8511 - protein, 11 aa, Homo sapiens
  Table 1.2; PASD1; ENSG00000166049; HLA -A*02:07
VIPDLQSSEAV

SEQ ID NO: 8512 - protein, 9 aa, Homo sapiens
  Table 1.2; PASD1; ENSG00000166049; HLA -A*23:01,HLA-A*24:02,HLA-B*07:02,HLA-B*08:01,HLA-B*35:01, HLA-B*35:03,HLA-B*51:01,HLA-B*55:01,HLA-C*07:02
VPQEDRLYL

SEQ ID NO: 8513 - protein, 10 aa, Homo sapiens
  Table 1.2; PASD1; ENSG00000166049; HLA -B*55:01,HLA-B*56:01
VPQEDRLYLV

SEQ ID NO: 8514 - protein, 8 aa, Homo sapiens
  Table 1.2; PASD1; ENSG00000166049; HLA -B*13:02
VQVSEVGV

SEQ ID NO: 8515 - protein, 9 aa, Homo sapiens
  Table 1.2; PASD1; ENSG00000166049; HLA -B*57:01
VTLQLLDGF

SEQ ID NO: 8516 - protein, 9 aa, Homo sapiens
  Table 1.2; PASD1; ENSG00000166049; HLA -A*23:01,HLA-A*24:02,HLA-A*29:02
VYQKIILKF

SEQ ID NO: 8517 - protein, 8 aa, Homo sapiens
  Table 1.2; PASD1; ENSG00000166049; HLA -B*39:01,HLA-C*14:02
VYVEPAAA

SEQ ID NO: 8518 - protein, 9 aa, Homo sapiens
  Table 1.2; PASD1; ENSG00000166049; HLA -A*23:01,HLA-A*24:02,HLA-B*39:01,HLA-B*46:01,HLA-B*54:01, HLA-B*56:01,HLA-C*01:02,HLA-C*03:03,HLA-C*14:02
VYVEPAAAA

SEQ ID NO: 8519 - protein, 10 aa, Homo sapiens
  Table 1.2; PASD1; ENSG00000166049; HLA -C*14:02
VYVEPAAAAA

SEQ ID NO: 8520 - protein, 10 aa, Homo sapiens
  Table 1.2; PASD1; ENSG00000166049; HLA -A*29:02
WIPSFPTYDY

SEQ ID NO: 8521 - protein, 8 aa, Homo sapiens
  Table 1.2; PASD1; ENSG00000166049; HLA -A*30:01,HLA-B*13:02,HLA-B*18:01,HLA-B*37:01,HLA-B*38:01, HLA-B*40:01,HLA-B*40:02,HLA-B*49:01,HLA-C*03:04
YDIISQEL

SEQ ID NO: 8522 - protein, 9 aa, Homo sapiens
  Table 1.2; PASD1; ENSG00000166049; HLA -A*30:01,HLA-B*40:02
YDYFNQVTL

SEQ ID NO: 8523 - protein, 8 aa, Homo sapiens
  Table 1.2; PASD1; ENSG00000166049; HLA -B*37:01,HLA-B*49:01
YENVKFIV

SEQ ID NO: 8524 - protein, 10 aa, Homo sapiens
  Table 1.2; PASD1; ENSG00000166049; HLA -B*49:01
YENVKFIVNV

SEQ ID NO: 8525 - protein, 9 aa, Homo sapiens
  Table 1.2; PASD1; ENSG00000166049; HLA -A*23:01,HLA-A*24:02,HLA-A*29:02,HLA-C*14:02
YFNQVTLQL

SEQ ID NO: 8526 - protein, 9 aa, Homo sapiens
  Table 1.2; PASD1; ENSG00000166049; HLA -B*38:01,HLA-B*39:01
YHQVQVSEV

SEQ ID NO: 8527 - protein, 9 aa, Homo sapiens
  Table 1.2; PASD1; ENSG00000166049; HLA -A*02:01,HLA-A*02:03,HLA-A*02:04
YLVGNVCIL

SEQ ID NO: 8528 - protein, 10 aa, Homo sapiens
  Table 1.2; PASD1; ENSG00000166049; HLA -B*51:01,HLA-B*54:01
YPEAYQGPPV

SEQ ID NO: 8529 - protein, 9 aa, Homo sapiens
  Table 1.2; PASD1; ENSG00000166049; HLA -A*02:01,HLA-A*02:03,HLA-A*02:04,HLA-A*23:01,HLA-A*24:02, HLA-A*30:01,HLA-A*32:01,HLA-B*13:02,HLA-B*15:01,HLA-B*15:03, HLA-B*27:05,HLA-B*37:01,HLA-B*38:01,HLA-B*39:01,HLA-B*40:01,
  HLA-B*40:02,HLA-B*58:01,HLA-C*02:02,HLA-C*07:04
YQGPPVNQL

SEQ ID NO: 8530 - protein, 8 aa, Homo sapiens
  Table 1.2; PASD1; ENSG00000166049; HLA -B*08:01
YQKIILKF

SEQ ID NO: 8531 - protein, 10 aa, Homo sapiens
  Table 1.2; PASD1; ENSG00000166049; HLA -B*27:02,HLA-B*27:05,HLA-B*38:01
YRADPVDLEF

SEQ ID NO: 8532 - protein, 8 aa, Homo sapiens
  Table 1.2; PASD1; ENSG00000166049; HLA -B*39:01
YVEPAAAA

SEQ ID NO: 8533 - protein, 9 aa, Homo sapiens
  Table 1.2; PASD1; ENSG00000166049; HLA -B*35:03,HLA-B*39:01,HLA-B*54:01,HLA-B*56:01,HLA-C*03:03
YVEPAAAAA

SEQ ID NO: 8534 - protein, 8 aa, Homo sapiens
  Table 1.2; PRDM7; ENSG00000126856; HLA -A*32:01,HLA-B*39:01,HLA-B*46:01,HLA-B*58:01,HLA-C*05:01, HLA-C*16:01
AAHGPPTF

SEQ ID NO: 8535 - protein, 9 aa, Homo sapiens
  Table 1.2; PRDM7; ENSG00000126856; HLA -A*02:03,HLA-A*32:01,HLA-B*13:02,HLA-B*51:01
AAHGPPTFV

SEQ ID NO: 8536 - protein, 10 aa, Homo sapiens
  Table 1.2; PRDM7; ENSG00000126856; HLA -A*03:01,HLA-A*03:02,HLA-A*11:01
AAHGPPTFVK

SEQ ID NO: 8537 - protein, 8 aa, Homo sapiens
  Table 1.2; PRDM7; ENSG00000126856; HLA -A*32:01,HLA-B*58:01
AANSGYSW

SEQ ID NO: 8538 - protein, 9 aa, Homo sapiens
  Table 1.2; PRDM7; ENSG00000126856; HLA -A*25:01,HLA-A*32:01,HLA-B*58:01,HLA-C*16:01
AASGRKSSW

SEQ ID NO: 8539 - protein, 10 aa, Homo sapiens
  Table 1.2; PRDM7; ENSG00000126856; HLA -B*44:02
AEMGDWEKTR

SEQ ID NO: 8540 - protein, 11 aa, Homo sapiens
  Table 1.2; PRDM7; ENSG00000126856; HLA -B*44:02,HLA-B*44:03
AEMGDWEKTRY

SEQ ID NO: 8541 - protein, 8 aa, Homo sapiens
  Table 1.2; PRDM7; ENSG00000126856; HLA -B*37:01,HLA-B*49:01
AESLGQAV

SEQ ID NO: 8542 - protein, 11 aa, Homo sapiens
  Table 1.2; PRDM7; ENSG00000126856; HLA -B*27:02,HLA-B*44:02,HLA-B*44:03,HLA-B*49:01,HLA-C*16:04
AESLGQAVNCW

SEQ ID NO: 8543 - protein, 8 aa, Homo sapiens
  Table 1.2; PRDM7; ENSG00000126856; HLA -A*30:02
AFKDISIY

SEQ ID NO: 8544 - protein, 9 aa, Homo sapiens
  Table 1.2; PRDM7; ENSG00000126856; HLA -A*23:01,HLA-A*24:02,HLA-A*29:02,HLA-A*31:01,HLA-B*57:01
AFKDISIYF

SEQ ID NO: 8545 - protein, 11 aa, Homo sapiens
  Table 1.2; PRDM7; ENSG00000126856; HLA -A*31:01
AFKDISIYFTK

SEQ ID NO: 8546 - protein, 8 aa, Homo sapiens
  Table 1.2; PRDM7; ENSG00000126856; HLA -B*39:01
AHGPPTFV

SEQ ID NO: 8547 - protein, 9 aa, Homo sapiens
  Table 1.2; PRDM7; ENSG00000126856; HLA -A*03:01,HLA-A*03:02,HLA-A*11:01,HLA-A*31:01,HLA-B*27:05
AHGPPTFVK

SEQ ID NO: 8548 - protein, 9 aa, Homo sapiens
  Table 1.2; PRDM7; ENSG00000126856; HLA -A*02:01,HLA-A*02:03,HLA-A*02:04,HLA-A*02:07,HLA-A*29:02, HLA-B*13:02
ALITVGLRA

SEQ ID NO: 8549 - protein, 10 aa, Homo sapiens
  Table 1.2; PRDM7; ENSG00000126856; HLA -A*02:03
ALITVGLRAT

SEQ ID NO: 8550 - protein, 11 aa, Homo sapiens
  Table 1.2; PRDM7; ENSG00000126856; HLA -A*31:01
ALITVGLRATR

SEQ ID NO: 8551 - protein, 8 aa, Homo sapiens
  Table 1.2; PRDM7; ENSG00000126856; HLA -B*37:01
ALSLPPGL

SEQ ID NO: 8552 - protein, 9 aa, Homo sapiens
  Table 1.2; PRDM7; ENSG00000126856; HLA -A*30:02,HLA-A*31:01,HLA-A*32:01,HLA-B*40:02
AQKPVSPPG

SEQ ID NO: 8553 - protein, 9 aa, Homo sapiens
  Table 1.2; PRDM7; ENSG00000126856; HLA -B*38:01,HLA-B*39:01
ARDDEEQNL

SEQ ID NO: 8554 - protein, 8 aa, Homo sapiens
  Table 1.2; PRDM7; ENSG00000126856; HLA -A*01:01,HLA-C*05:01
ASDLPLGL

SEQ ID NO: 8555 - protein, 9 aa, Homo sapiens
  Table 1.2; PRDM7; ENSG00000126856; HLA -A*01:01
ASDLPLGLH

SEQ ID NO: 8556 - protein, 10 aa, Homo sapiens
  Table 1.2; PRDM7; ENSG00000126856; HLA -A*01:01
ASDLPLGLHF

SEQ ID NO: 8557 - protein, 9 aa, Homo sapiens
  Table 1.2; PRDM7; ENSG00000126856; HLA -B*15:01,HLA-B*46:01,HLA-B*58:01,HLA-C*01:02,HLA-C*03:03, HLA-C*03:04
ASFNNESSL

SEQ ID NO: 8558 - protein, 10 aa, Homo sapiens
  Table 1.2; PRDM7; ENSG00000126856; HLA -A*68:01,HLA-C*07:06
ASFNNESSLR

SEQ ID NO: 8559 - protein, 8 aa, Homo sapiens
  Table 1.2; PRDM7; ENSG00000126856; HLA -A*32:01,HLA-B*58:01
ASGRKSSW

SEQ ID NO: 8560 - protein, 9 aa, Homo sapiens
  Table 1.2; PRDM7; ENSG00000126856; HLA -A*31:01,HLA-A*68:01,HLA-C*07:06
ASSGAASGR

SEQ ID NO: 8561 - protein, 9 aa, Homo sapiens
  Table 1.2; PRDM7; ENSG00000126856; HLA -A*03:01,HLA-A*31:01
ATRPAFMCH

SEQ ID NO: 8562 - protein, 10 aa, Homo sapiens
  Table 1.2; PRDM7; ENSG00000126856; HLA -A*31:01
ATRPAFMCHR

SEQ ID NO: 8563 - protein, 9 aa, Homo sapiens
  Table 1.2; PRDM7; ENSG00000126856; HLA -A*03:01,HLA-A*03:02,HLA-A*11:01,HLA-A*31:01
AVDKGHPNR

SEQ ID NO: 8564 - protein, 8 aa, Homo sapiens
  Table 1.2; PRDM7; ENSG00000126856; HLA -B*08:01
AVMTKPKV

SEQ ID NO: 8565 - protein, 9 aa, Homo sapiens
  Table 1.2; PRDM7; ENSG00000126856; HLA -A*03:01,HLA-A*03:02,HLA-A*11:01,HLA-A*31:01,HLA-A*32:01
AVMTKPKVK

SEQ ID NO: 8566 - protein, 10 aa, Homo sapiens
  Table 1.2; PRDM7; ENSG00000126856; HLA -A*03:01,HLA-A*11:01,HLA-A*31:01,HLA-A*33:01,HLA-A*33:03
AVMTKPKVKR

SEQ ID NO: 8567 - protein, 9 aa, Homo sapiens
  Table 1.2; PRDM7; ENSG00000126856; HLA -B*58:01
CAAHGPPTF

SEQ ID NO: 8568 - protein, 8 aa, Homo sapiens
  Table 1.2; PRDM7; ENSG00000126856; HLA -B*35:03,HLA-B*51:01
DAFKDISI

SEQ ID NO: 8569 - protein, 9 aa, Homo sapiens
  Table 1.2; PRDM7; ENSG00000126856; HLA -A*25:01,HLA-A*26:01,HLA-A*33:01,HLA-B*18:01,HLA-B*35:01, HLA-B*35:03,HLA-B*51:01
DAFKDISIY

SEQ ID NO: 8570 - protein, 10 aa, Homo sapiens
  Table 1.2; PRDM7; ENSG00000126856; HLA -A*25:01,HLA-A*26:01,HLA-A*33:01
DAFKDISIYF

SEQ ID NO: 8571 - protein, 10 aa, Homo sapiens
  Table 1.2; PRDM7; ENSG00000126856; HLA -A*33:01,HLA-B*18:01
DDEEQNLVAF

SEQ ID NO: 8572 - protein, 8 aa, Homo sapiens
  Table 1.2; PRDM7; ENSG00000126856; HLA -B*18:01
DDYLYCEM

SEQ ID NO: 8573 - protein, 9 aa, Homo sapiens
  Table 1.2; PRDM7; ENSG00000126856; HLA -B*18:01
DEEAANSGY

SEQ ID NO: 8574 - protein, 11 aa, Homo sapiens
  Table 1.2; PRDM7; ENSG00000126856; HLA -B*18:01,HLA-B*27:02,HLA-B*44:02,HLA-B*44:03
DEEAANSGYSW

SEQ ID NO: 8575 - protein, 9 aa, Homo sapiens
  Table 1.2; PRDM7; ENSG00000126856; HLA -A*30:01,HLA-B*18:01,HLA-B*40:01,HLA-B*44:02,HLA-B*44:03
DEEQNLVAF

SEQ ID NO: 8576 - protein, 11 aa, Homo sapiens
  Table 1.2; PRDM7; ENSG00000126856; HLA -B*18:01,HLA-B*44:02,HLA-B*44:03
DEEQNLVAFQY

SEQ ID NO: 8577 - protein, 9 aa, Homo sapiens
  Table 1.2; PRDM7; ENSG00000126856; HLA -A*30:01,HLA-B*18:01,HLA-B*38:01,HLA-B*39:01,HLA-B*44:02, HLA-B*44:03,HLA-B*49:01,HLA-B*51:01
DEYGQELGI

SEQ ID NO: 8578 - protein, 10 aa, Homo sapiens
  Table 1.2; PRDM7; ENSG00000126856; HLA -A*25:01
DGKDKSSANW

SEQ ID NO: 8579 - protein, 9 aa, Homo sapiens
  Table 1.2; PRDM7; ENSG00000126856; HLA -A*25:01,HLA-A*26:01,HLA-A*33:03,HLA-A*68:01,HLA-B*35:01, HLA-B*39:01,HLA-B*57:01,HLA-B*58:01
EAANSGYSW

SEQ ID NO: 8580 - protein, 9 aa, Homo sapiens
  Table 1.2; PRDM7; ENSG00000126856; HLA -A*25:01,HLA-A*26:01,HLA-A*33:03,HLA-A*68:01,HLA-A*68:02, HLA-B*27:05,HLA-B*35:01,HLA-B*35:03,HLA-B*38:01,HLA-B*39:01, HLA-C*07:06
EASDLPLGL

SEQ ID NO: 8581 - protein, 11 aa, Homo sapiens
  Table 1.2; PRDM7; ENSG00000126856; HLA -A*25:01,HLA-A*26:01,HLA-A*68:01,HLA-A*68:02
EASDLPLGLHF

SEQ ID NO: 8582 - protein, 10 aa, Homo sapiens
  Table 1.2; PRDM7; ENSG00000126856; HLA -A*33:03,HLA-A*68:01
EASTSGQHSR

SEQ ID NO: 8583 - protein, 11 aa, Homo sapiens
  Table 1.2; PRDM7; ENSG00000126856; HLA -A*68:01
EASTSGQHSRL

SEQ ID NO: 8584 - protein, 8 aa, Homo sapiens
  Table 1.2; PRDM7; ENSG00000126856; HLA -B*18:01,HLA-B*44:03
EEAANSGY

SEQ ID NO: 8585 - protein, 10 aa, Homo sapiens
  Table 1.2; PRDM7; ENSG00000126856; HLA -A*25:01,HLA-B*27:02,HLA-B*44:02,HLA-B*44:03,HLA-C*16:04
EEAANSGYSW

SEQ ID NO: 8586 - protein, 8 aa, Homo sapiens
  Table 1.2; PRDM7; ENSG00000126856; HLA -B*18:01,HLA-B*44:02
EEQNLVAF

SEQ ID NO: 8587 - protein, 10 aa, Homo sapiens
  Table 1.2; PRDM7; ENSG00000126856; HLA -A*30:02,HLA-B*18:01,HLA-B*27:02,HLA-B*27:05,HLA-B*44:02, HLA-B*44:03
EEQNLVAFQY

SEQ ID NO: 8588 - protein, 9 aa, Homo sapiens
  Table 1.2; PRDM7; ENSG00000126856; HLA -B*44:02,HLA-B*44:03
EEWAEMGDW

SEQ ID NO: 8589 - protein, 9 aa, Homo sapiens
  Table 1.2; PRDM7; ENSG00000126856; HLA -B*44:02,HLA-B*44:03,HLA-B*49:01
EEWTPRQQV

SEQ ID NO: 8590 - protein, 8 aa, Homo sapiens
  Table 1.2; PRDM7; ENSG00000126856; HLA -B*08:01
ELGIRSSI

SEQ ID NO: 8591 - protein, 9 aa, Homo sapiens
  Table 1.2; PRDM7; ENSG00000126856; HLA -A*68:02,HLA-B*38:01
ELSGTPNLL

SEQ ID NO: 8592 - protein, 9 aa, Homo sapiens
  Table 1.2; PRDM7; ENSG00000126856; HLA -A*33:01,HLA-A*33:03
EMGDWEKTR

SEQ ID NO: 8593 - protein, 10 aa, Homo sapiens
  Table 1.2; PRDM7; ENSG00000126856; HLA -B*54:01
ENFSNQRIPA

SEQ ID NO: 8594 - protein, 10 aa, Homo sapiens
  Table 1.2; PRDM7; ENSG00000126856; HLA -B*56:01
EPAESLGQAV

SEQ ID NO: 8595 - protein, 9 aa, Homo sapiens
  Table 1.2; PRDM7; ENSG00000126856; HLA -B*35:01,HLA-B*55:01,HLA-C*03:03
EPQDDDYLY

SEQ ID NO: 8596 - protein, 9 aa, Homo sapiens
  Table 1.2; PRDM7; ENSG00000126856; HLA -B*39:01
EQAQKPVSP

SEQ ID NO: 8597 - protein, 9 aa, Homo sapiens
  Table 1.2; PRDM7; ENSG00000126856; HLA -A*26:01,HLA-A*29:02,HLA-A*30:02,HLA-A*32:01,HLA-B*15:01, HLA-B*15:03,HLA-B*18:01,HLA-B*27:02,HLA-B*35:01,HLA-B*44:02, HLA-B*44:03,HLA-C*16:04
EQNLVAFQY

SEQ ID NO: 8598 - protein, 10 aa, Homo sapiens
  Table 1.2; PRDM7; ENSG00000126856; HLA -A*25:01,HLA-A*26:01,HLA-A*33:01,HLA-A*33:03,HLA-A*68:01, HLA-B*57:01,HLA-B*58:01
ESLGQAVNCW

SEQ ID NO: 8599 - protein, 9 aa, Homo sapiens
  Table 1.2; PRDM7; ENSG00000126856; HLA -A*25:01,HLA-A*26:01,HLA-A*33:03,HLA-A*68:01,HLA-A*68:02, HLA-B*08:01
ETEGKMYSL

SEQ ID NO: 8600 - protein, 10 aa, Homo sapiens
  Table 1.2; PRDM7; ENSG00000126856; HLA -A*33:01,HLA-A*33:03,HLA-A*68:01
ETEGKMYSLR

SEQ ID NO: 8601 - protein, 9 aa, Homo sapiens
  Table 1.2; PRDM7; ENSG00000126856; HLA -A*33:03
EYGQELGIR

SEQ ID NO: 8602 - protein, 10 aa, Homo sapiens
  Table 1.2; PRDM7; ENSG00000126856; HLA -C*07:02
FGPYEGRITE

SEQ ID NO: 8603 - protein, 8 aa, Homo sapiens
  Table 1.2; PRDM7; ENSG00000126856; HLA -A*33:03
FNNESSLR

SEQ ID NO: 8604 - protein, 8 aa, Homo sapiens
  Table 1.2; PRDM7; ENSG00000126856; HLA -B*13:02
FQVKNFSV

SEQ ID NO: 8605 - protein, 9 aa, Homo sapiens
  Table 1.2; PRDM7; ENSG00000126856; HLA -A*03:01,HLA-A*29:02,HLA-C*02:02
FQYHRQIFY

SEQ ID NO: 8606 - protein, 9 aa, Homo sapiens
  Table 1.2; PRDM7; ENSG00000126856; HLA -C*16:01
FSNQRIPAQ

SEQ ID NO: 8607 - protein, 9 aa, Homo sapiens
  Table 1.2; PRDM7; ENSG00000126856; HLA -A*26:01,HLA-B*46:01
FTKEEWAEM

SEQ ID NO: 8608 - protein, 10 aa, Homo sapiens
  Table 1.2; PRDM7; ENSG00000126856; HLA -A*25:01,HLA-A*32:01,HLA-B*58:01,HLA-C*16:01,HLA-C*16:02
GAASGRKSSW

SEQ ID NO: 8609 - protein, 9 aa, Homo sapiens
  Table 1.2; PRDM7; ENSG00000126856; HLA -A*30:01,HLA-B*13:02,HLA-B*27:02,HLA-B*40:01,HLA-B*44:02, HLA-B*44:03,HLA-B*49:01,HLA-C*16:04
GENQSQRSI

SEQ ID NO: 8610 - protein, 11 aa, Homo sapiens
  Table 1.2; PRDM7; ENSG00000126856; HLA -B*49:01
GENQSQRSIHV

SEQ ID NO: 8611 - protein, 10 aa, Homo sapiens
  Table 1.2; PRDM7; ENSG00000126856; HLA -A*25:01
GIPQAGLGVW

SEQ ID NO: 8612 - protein, 10 aa, Homo sapiens
  Table 1.2; PRDM7; ENSG00000126856; HLA -A*02:03
GLRATRPAFM

SEQ ID NO: 8613 - protein, 9 aa, Homo sapiens
  Table 1.2; PRDM7; ENSG00000126856; HLA -A*02:03
GLRIGPSGI

SEQ ID NO: 8614 - protein, 10 aa, Homo sapiens
  Table 1.2; PRDM7; ENSG00000126856; HLA -B*56:01
GPPTFVKDSA

SEQ ID NO: 8615 - protein, 8 aa, Homo sapiens
  Table 1.2; PRDM7; ENSG00000126856; HLA -B*56:01
GPSGIPQA

SEQ ID NO: 8616 - protein, 10 aa, Homo sapiens
  Table 1.2; PRDM7; ENSG00000126856; HLA -B*07:02,HLA-C*07:02
GPSGIPQAGL

SEQ ID NO: 8617 - protein, 9 aa, Homo sapiens
  Table 1.2; PRDM7; ENSG00000126856; HLA -B*07:02,HLA-B*56:01,HLA-C*07:02
GPYEGRITE

SEQ ID NO: 8618 - protein, 10 aa, Homo sapiens
  Table 1.2; PRDM7; ENSG00000126856; HLA -B*13:02
GQELGIRSSI

SEQ ID NO: 8619 - protein, 9 aa, Homo sapiens
  Table 1.2; PRDM7; ENSG00000126856; HLA -A*03:01,HLA-A*68:01
HAAVMTKPK

SEQ ID NO: 8620 - protein, 10 aa, Homo sapiens
  Table 1.2; PRDM7; ENSG00000126856; HLA -A*33:03,HLA-A*68:01
HLQENFSNQR

SEQ ID NO: 8621 - protein, 9 aa, Homo sapiens
  Table 1.2; PRDM7; ENSG00000126856; HLA -B*07:02,HLA-B*08:01,HLA-B*35:03,HLA-C*07:02
HPNRSALSL

SEQ ID NO: 8622 - protein, 10 aa, Homo sapiens
  Table 1.2; PRDM7; ENSG00000126856; HLA -B*15:01
HQKGMPKASF

SEQ ID NO: 8623 - protein, 8 aa, Homo sapiens
  Table 1.2; PRDM7; ENSG00000126856; HLA -B*08:01
HSRLKLEL

SEQ ID NO: 8624 - protein, 9 aa, Homo sapiens
  Table 1.2; PRDM7; ENSG00000126856; HLA -A*33:01
HSRLKLELR

SEQ ID NO: 8625 - protein, 11 aa, Homo sapiens
  Table 1.2; PRDM7; ENSG00000126856; HLA -A*30:01,HLA-B*13:02,HLA-B*40:01,HLA-B*40:02,HLA-B*49:01
IEPAESLGQAV

SEQ ID NO: 8626 - protein, 8 aa, Homo sapiens
  Table 1.2; PRDM7; ENSG00000126856; HLA -B*08:01
ILIHAAVM

SEQ ID NO: 8627 - protein, 8 aa, Homo sapiens
  Table 1.2; PRDM7; ENSG00000126856; HLA -B*07:02,HLA-B*08:01,HLA-B*51:01,HLA-B*56:01
IPAQGIRI

SEQ ID NO: 8628 - protein, 8 aa, Homo sapiens
  Table 1.2; PRDM7; ENSG00000126856; HLA -B*51:01
IPQAGLGV

SEQ ID NO: 8629 - protein, 9 aa, Homo sapiens
  Table 1.2; PRDM7; ENSG00000126856; HLA -A*01:01
ISEPQDDDY

SEQ ID NO: 8630 - protein, 11 aa, Homo sapiens
  Table 1.2; PRDM7; ENSG00000126856; HLA -A*01:01,HLA-B*57:01,HLA-B*58:01
ISEPQDDDYLY

SEQ ID NO: 8631 - protein, 10 aa, Homo sapiens
  Table 1.2; PRDM7; ENSG00000126856; HLA -B*57:01
ISIYFTKEEW

SEQ ID NO: 8632 - protein, 9 aa, Homo sapiens
  Table 1.2; PRDM7; ENSG00000126856; HLA -A*31:01,HLA-A*33:03,HLA-A*68:01,HLA-B*57:01
ITVGLRATR

SEQ ID NO: 8633 - protein, 8 aa, Homo sapiens
  Table 1.2; PRDM7; ENSG00000126856; HLA -A*24:02
IYFTKEEW

SEQ ID NO: 8634 - protein, 11 aa, Homo sapiens
  Table 1.2; PRDM7; ENSG00000126856; HLA -A*30:02
KEISEPQDDDY

SEQ ID NO: 8635 - protein, 8 aa, Homo sapiens
  Table 1.2; PRDM7; ENSG00000126856; HLA -B*18:01,HLA-B*37:01,HLA-B*44:02,HLA-B*44:03,HLA-C*16:02
KETEGKMY

SEQ ID NO: 8636 - protein, 10 aa, Homo sapiens
  Table 1.2; PRDM7; ENSG00000126856; HLA -A*30:01,HLA-B*40:01,HLA-B*40:02,HLA-B*44:02,HLA-B*49:01
KETEGKMYSL

SEQ ID NO: 8637 - protein, 9 aa, Homo sapiens
  Table 1.2; PRDM7; ENSG00000126856; HLA -A*32:01,HLA-B*07:02
KGHPNRSAL

SEQ ID NO: 8638 - protein, 8 aa, Homo sapiens
  Table 1.2; PRDM7; ENSG00000126856; HLA -A*32:01,HLA-B*08:01,HLA-B*37:01,HLA-C*16:01
KGMPKASF

SEQ ID NO: 8639 - protein, 10 aa, Homo sapiens
  Table 1.2; PRDM7; ENSG00000126856; HLA -A*02:01,HLA-A*02:03,HLA-A*02:04,HLA-A*02:07
KMNYNALITV

SEQ ID NO: 8640 - protein, 8 aa, Homo sapiens
  Table 1.2; PRDM7; ENSG00000126856; HLA -B*07:02,HLA-B*08:01
KPMVKDAF

SEQ ID NO: 8641 - protein, 9 aa, Homo sapiens
  Table 1.2; PRDM7; ENSG00000126856; HLA -B*07:02,HLA-B*54:01,HLA-B*55:01,HLA-B*56:01
KPVSPPGEA

SEQ ID NO: 8642 - protein, 11 aa, Homo sapiens
  Table 1.2; PRDM7; ENSG00000126856; HLA -B*56:01
KPVSPPGEAST

SEQ ID NO: 8643 - protein, 9 aa, Homo sapiens
  Table 1.2; PRDM7; ENSG00000126856; HLA -A*01:01
KSSANWMRY

SEQ ID NO: 8644 - protein, 9 aa, Homo sapiens
  Table 1.2; PRDM7; ENSG00000126856; HLA -A*03:01,HLA-A*03:02
LIHAAVMTK

SEQ ID NO: 8645 - protein, 9 aa, Homo sapiens
  Table 1.2; PRDM7; ENSG00000126856; HLA -A*01:01,HLA-A*29:02,HLA-B*15:01,HLA-B*15:03,HLA-B*46:01
LLVWSGDEY

SEQ ID NO: 8646 - protein, 9 aa, Homo sapiens
  Table 1.2; PRDM7; ENSG00000126856; HLA -B*51:01,HLA-B*57:01
LSLPPGLRI

SEQ ID NO: 8647 - protein, 9 aa, Homo sapiens
  Table 1.2; PRDM7; ENSG00000126856; HLA -B*57:01
MGMSMARNW

SEQ ID NO: 8648 - protein, 9 aa, Homo sapiens
  Table 1.2; PRDM7; ENSG00000126856; HLA -A*68:02,HLA-B*51:01,HLA-B*54:01,HLA-B*56:01
MNYNALITV

SEQ ID NO: 8649 - protein, 10 aa, Homo sapiens
  Table 1.2; PRDM7; ENSG00000126856; HLA -B*54:01
MPKASFNNES

SEQ ID NO: 8650 - protein, 8 aa, Homo sapiens
  Table 1.2; PRDM7; ENSG00000126856; HLA -A*33:03
MTKPKVKR

SEQ ID NO: 8651 - protein, 8 aa, Homo sapiens
  Table 1.2; PRDM7; ENSG00000126856; HLA -B*08:01,HLA-B*51:01
NALITVGL

SEQ ID NO: 8652 - protein, 9 aa, Homo sapiens
  Table 1.2; PRDM7; ENSG00000126856; HLA -A*33:01,HLA-A*33:03,HLA-A*68:01
NALITVGLR

SEQ ID NO: 8653 - protein, 10 aa, Homo sapiens
  Table 1.2; PRDM7; ENSG00000126856; HLA -A*30:01,HLA-B*40:01,HLA-B*44:02,HLA-B*44:03
NEASDLPLGL

SEQ ID NO: 8654 - protein, 8 aa, Homo sapiens
  Table 1.2; PRDM7; ENSG00000126856; HLA -B*18:01,HLA-B*37:01,HLA-B*44:02
NESSLREL

SEQ ID NO: 8655 - protein, 8 aa, Homo sapiens
  Table 1.2; PRDM7; ENSG00000126856; HLA -B*08:01
NILIHAAV

SEQ ID NO: 8656 - protein, 9 aa, Homo sapiens
  Table 1.2; PRDM7; ENSG00000126856; HLA -A*02:01,HLA-A*02:04,HLA-A*02:07
NMWNAITPL

SEQ ID NO: 8657 - protein, 9 aa, Homo sapiens
  Table 1.2; PRDM7; ENSG00000126856; HLA -B*13:02,HLA-B*15:03
NQRIPAQGI

SEQ ID NO: 8658 - protein, 9 aa, Homo sapiens
  Table 1.2; PRDM7; ENSG00000126856; HLA -B*37:01
NQSQRSIHV

SEQ ID NO: 8659 - protein, 10 aa, Homo sapiens
  Table 1.2; PRDM7; ENSG00000126856; HLA -A*68:01,HLA-C*07:06
NTSDSEQAQK

SEQ ID NO: 8660 - protein, 9 aa, Homo sapiens
  Table 1.2; PRDM7; ENSG00000126856; HLA -A*25:01,HLA-B*07:02,HLA-B*08:01,HLA-C*01:02
NVKMNYNAL

SEQ ID NO: 8661 - protein, 9 aa, Homo sapiens
  Table 1.2; PRDM7; ENSG00000126856; HLA -A*33:03
NYNALITVG

SEQ ID NO: 8662 - protein, 10 aa, Homo sapiens
  Table 1.2; PRDM7; ENSG00000126856; HLA -A*23:01,HLA-A*24:02
NYNALITVGL

SEQ ID NO: 8663 - protein, 9 aa, Homo sapiens
  Table 1.2; PRDM7; ENSG00000126856; HLA -B*56:01
PPTFVKDSA

SEQ ID NO: 8664 - protein, 8 aa, Homo sapiens
  Table 1.2; PRDM7; ENSG00000126856; HLA -B*37:01
QDHLQENF

SEQ ID NO: 8665 - protein, 9 aa, Homo sapiens
  Table 1.2; PRDM7; ENSG00000126856; HLA -A*30:01,HLA-B*40:01,HLA-B*44:02,HLA-B*44:03,HLA-B*49:01
QELGIRSSI

SEQ ID NO: 8666 - protein, 9 aa, Homo sapiens
  Table 1.2; PRDM7; ENSG00000126856; HLA -B*13:02,HLA-B*40:01,HLA-B*44:02,HLA-B*44:03,HLA-B*49:01
QENFSNQRI

SEQ ID NO: 8667 - protein, 9 aa, Homo sapiens
  Table 1.2; PRDM7; ENSG00000126856; HLA -B*15:03
QKGMPKASF

SEQ ID NO: 8668 - protein, 8 aa, Homo sapiens
  Table 1.2; PRDM7; ENSG00000126856; HLA -A*29:02
QNLVAFQY

SEQ ID NO: 8669 - protein, 9 aa, Homo sapiens
  Table 1.2; PRDM7; ENSG00000126856; HLA -B*27:05
QRIPAQGIR

SEQ ID NO: 8670 - protein, 9 aa, Homo sapiens
  Table 1.2; PRDM7; ENSG00000126856; HLA -A*33:03
QVKNFSVNM

SEQ ID NO: 8671 - protein, 10 aa, Homo sapiens
  Table 1.2; PRDM7; ENSG00000126856; HLA -A*25:01,HLA-B*57:01
QVKNFSVNMW

SEQ ID NO: 8672 - protein, 9 aa, Homo sapiens
  Table 1.2; PRDM7; ENSG00000126856; HLA -A*25:01,HLA-A*31:01,HLA-B*57:01
QVKPPWMAF

SEQ ID NO: 8673 - protein, 10 aa, Homo sapiens
  Table 1.2; PRDM7; ENSG00000126856; HLA -A*31:01
QVKPPWMAFR

SEQ ID NO: 8674 - protein, 9 aa, Homo sapiens
  Table 1.2; PRDM7; ENSG00000126856; HLA -A*31:01,HLA-A*33:01
QYHRQIFYR

SEQ ID NO: 8675 - protein, 9 aa, Homo sapiens
  Table 1.2; PRDM7; ENSG00000126856; HLA -A*30:01,HLA-B*37:01,HLA-B*40:01,HLA-B*40:02,HLA-B*44:02, HLA-B*44:03,HLA-B*49:01
RELSGTPNL

SEQ ID NO: 8676 - protein, 10 aa, Homo sapiens
  Table 1.2; PRDM7; ENSG00000126856; HLA -A*30:01,HLA-B*40:01
RELSGTPNLL

SEQ ID NO: 8677 - protein, 10 aa, Homo sapiens
  Table 1.2; PRDM7; ENSG00000126856; HLA -A*02:01
RIGPSGIPQA

SEQ ID NO: 8678 - protein, 9 aa, Homo sapiens
  Table 1.2; PRDM7; ENSG00000126856; HLA -A*02:07
RIPAQGIRI

SEQ ID NO: 8679 - protein, 10 aa, Homo sapiens
  Table 1.2; PRDM7; ENSG00000126856; HLA -A*03:01
RIRSGNILIH

SEQ ID NO: 8680 - protein, 10 aa, Homo sapiens
  Table 1.2; PRDM7; ENSG00000126856; HLA -B*57:01
RSIHVPHAVW

SEQ ID NO: 8681 - protein, 9 aa, Homo sapiens
  Table 1.2; PRDM7; ENSG00000126856; HLA -A*03:01
RTERKPMVK

SEQ ID NO: 8682 - protein, 11 aa, Homo sapiens
  Table 1.2; PRDM7; ENSG00000126856; HLA -B*57:01
RTSQDHLQENF

SEQ ID NO: 8683 - protein, 9 aa, Homo sapiens
  Table 1.2; PRDM7; ENSG00000126856; HLA -C*03:04
RVIRPGCEL

SEQ ID NO: 8684 - protein, 9 aa, Homo sapiens
  Table 1.2; PRDM7; ENSG00000126856; HLA -A*02:01,HLA-A*02:04
SALSLPPGL

SEQ ID NO: 8685 - protein, 10 aa, Homo sapiens
  Table 1.2; PRDM7; ENSG00000126856; HLA -A*33:01,HLA-A*68:01
SAVDKGHPNR

SEQ ID NO: 8686 - protein, 9 aa, Homo sapiens
  Table 1.2; PRDM7; ENSG00000126856; HLA -B*37:01,HLA-B*44:02,HLA-B*44:03
SDLPLGLHF

SEQ ID NO: 8687 - protein, 9 aa, Homo sapiens
  Table 1.2; PRDM7; ENSG00000126856; HLA -B*40:01
SEPQDDDYL

SEQ ID NO: 8688 - protein, 8 aa, Homo sapiens
  Table 1.2; PRDM7; ENSG00000126856; HLA -C*14:02
SFNNESSL

SEQ ID NO: 8689 - protein, 9 aa, Homo sapiens
  Table 1.2; PRDM7; ENSG00000126856; HLA -A*31:01,HLA-A*33:01,HLA-A*33:03
SFNNESSLR

SEQ ID NO: 8690 - protein, 11 aa, Homo sapiens
  Table 1.2; PRDM7; ENSG00000126856; HLA -A*32:01
SGAASGRKSSW

SEQ ID NO: 8691 - protein, 9 aa, Homo sapiens
  Table 1.2; PRDM7; ENSG00000126856; HLA -B*35:03,HLA-B*39:01,HLA-C*05:01
SGDEYGQEL

SEQ ID NO: 8692 - protein, 9 aa, Homo sapiens
  Table 1.2; PRDM7; ENSG00000126856; HLA -A*11:01,HLA-A*31:01,HLA-A*33:03,HLA-A*68:01,HLA-C*07:06
SGMGMSMAR

SEQ ID NO: 8693 - protein, 9 aa, Homo sapiens
  Table 1.2; PRDM7; ENSG00000126856; HLA -B*54:01
SGNILIHAA

SEQ ID NO: 8694 - protein, 9 aa, Homo sapiens
  Table 1.2; PRDM7; ENSG00000126856; HLA -A*03:01,HLA-A*11:01,HLA-A*31:01
SGYSWLITK

SEQ ID NO: 8695 - protein, 11 aa, Homo sapiens
  Table 1.2; PRDM7; ENSG00000126856; HLA -A*31:01
SGYSWLITKGR

SEQ ID NO: 8696 - protein, 9 aa, Homo sapiens
  Table 1.2; PRDM7; ENSG00000126856; HLA -B*57:01
SIHVPHAVW

SEQ ID NO: 8697 - protein, 9 aa, Homo sapiens
  Table 1.2; PRDM7; ENSG00000126856; HLA -B*57:01
SIYFTKEEW

SEQ ID NO: 8698 - protein, 9 aa, Homo sapiens
  Table 1.2; PRDM7; ENSG00000126856; HLA -A*25:01
SLGQAVNCW

SEQ ID NO: 8699 - protein, 11 aa, Homo sapiens
  Table 1.2; PRDM7; ENSG00000126856; HLA -A*02:04
SLRELSGTPNL

SEQ ID NO: 8700 - protein, 9 aa, Homo sapiens
  Table 1.2; PRDM7; ENSG00000126856; HLA -B*38:01,HLA-C*05:01
SQDHLQENF

SEQ ID NO: 8701 - protein, 9 aa, Homo sapiens
  Table 1.2; PRDM7; ENSG00000126856; HLA -A*02:03
SSANWMRYV

SEQ ID NO: 8702 - protein, 9 aa, Homo sapiens
  Table 1.2; PRDM7; ENSG00000126856; HLA -A*25:01,HLA-A*30:01,HLA-B*07:02,HLA-B*15:01,HLA-B*35:03, HLA-B*39:01,HLA-B*40:01,HLA-B*46:01,HLA-B*58:01,HLA-C*01:02, HLA-C*03:03,HLA-C*03:04,HLA-C*05:01,HLA-C*07:02,HLA-C*14:02
SSIEPAESL

SEQ ID NO: 8703 - protein, 11 aa, Homo sapiens
  Table 1.2; PRDM7; ENSG00000126856; HLA -A*31:01,HLA-A*68:01,HLA-C*07:06
SSWQGENQSQR

SEQ ID NO: 8704 - protein, 10 aa, Homo sapiens
  Table 1.2; PRDM7; ENSG00000126856; HLA -A*11:01
STSGQHSRLK

SEQ ID NO: 8705 - protein, 11 aa, Homo sapiens
  Table 1.2; PRDM7; ENSG00000126856; HLA -A*01:01,HLA-B*44:02,HLA-B*44:03
TEDEEAANSGY

SEQ ID NO: 8706 - protein, 8 aa, Homo sapiens
  Table 1.2; PRDM7; ENSG00000126856; HLA -A*30:01,HLA-B*08:01,HLA-B*18:01,HLA-B*37:01,HLA-B*40:01, HLA-B*40:02,HLA-B*44:02,HLA-B*44:03,HLA-B*49:01
TEGKMYSL

SEQ ID NO: 8707 - protein, 9 aa, Homo sapiens
  Table 1.2; PRDM7; ENSG00000126856; HLA -A*01:01
TSDSEQAQK

SEQ ID NO: 8708 - protein, 10 aa, Homo sapiens
  Table 1.2; PRDM7; ENSG00000126856; HLA -B*57:01,HLA-B*58:01
TSQDHLQENF

SEQ ID NO: 8709 - protein, 9 aa, Homo sapiens
  Table 1.2; PRDM7; ENSG00000126856; HLA -B*51:01
VAFQYHRQI

SEQ ID NO: 8710 - protein, 8 aa, Homo sapiens
  Table 1.2; PRDM7; ENSG00000126856; HLA -A*33:01
VDKGHPNR

SEQ ID NO: 8711 - protein, 8 aa, Homo sapiens
  Table 1.2; PRDM7; ENSG00000126856; HLA -B*07:02
VIRPGCEL

SEQ ID NO: 8712 - protein, 8 aa, Homo sapiens
  Table 1.2; PRDM7; ENSG00000126856; HLA -A*03:01,HLA-A*03:02
VMTKPKVK

SEQ ID NO: 8713 - protein, 9 aa, Homo sapiens
  Table 1.2; PRDM7; ENSG00000126856; HLA -A*31:01,HLA-A*33:01
VMTKPKVKR

SEQ ID NO: 8714 - protein, 9 aa, Homo sapiens
  Table 1.2; PRDM7; ENSG00000126856; HLA -A*24:02
VWPFQVKNF

SEQ ID NO: 8715 - protein, 10 aa, Homo sapiens
  Table 1.2; PRDM7; ENSG00000126856; HLA -B*54:01
WPFQVKNFSV

SEQ ID NO: 8716 - protein, 9 aa, Homo sapiens
  Table 1.2; PRDM7; ENSG00000126856; HLA -B*40:02,HLA-B*49:01
YEYVDGKDK

SEQ ID NO: 8717 - protein, 9 aa, Homo sapiens
  Table 1.2; PRDM7; ENSG00000126856; HLA -A*23:01,HLA-A*68:02
YNALITVGL

SEQ ID NO: 8718 - protein, 10 aa, Homo sapiens
  Table 1.2; PRDM7; ENSG00000126856; HLA -A*33:03
YNALITVGLR

SEQ ID NO: 8719 - protein, 9 aa, Homo sapiens
  Table 1.2; PRDM7; ENSG00000126856; HLA -A*31:01
YSWLITKGR

SEQ ID NO: 8720 - protein, 8 aa, Homo sapiens
  Table 1.2; PROKR1; ENSG00000169618; HLA -B*08:01,HLA-B*37:01
AAKIVIGM

SEQ ID NO: 8721 - protein, 10 aa, Homo sapiens
  Table 1.2; PROKR1; ENSG00000169618; HLA -A*30:01,HLA-B*37:01
ADLDLKTIGM

SEQ ID NO: 8722 - protein, 9 aa, Homo sapiens
  Table 1.2; PROKR1; ENSG00000169618; HLA -A*02:07
AIDRYLAIV

SEQ ID NO: 8723 - protein, 9 aa, Homo sapiens
  Table 1.2; PROKR1; ENSG00000169618; HLA -A*02:01,HLA-A*02:03,HLA-A*02:04,HLA-A*02:07,HLA-A*68:02, HLA-B*13:02
AISDFLVAI

SEQ ID NO: 8724 - protein, 10 aa, Homo sapiens
  Table 1.2; PROKR1; ENSG00000169618; HLA -A*02:03
AISDFLVAIV

SEQ ID NO: 8725 - protein, 9 aa, Homo sapiens
  Table 1.2; PROKR1; ENSG00000169618; HLA -A*31:01
AIVHPLRPR

SEQ ID NO: 8726 - protein, 9 aa, Homo sapiens
  Table 1.2; PROKR1; ENSG00000169618; HLA -B*15:03
AKIVIGMAL

SEQ ID NO: 8727 - protein, 9 aa, Homo sapiens
  Table 1.2; PROKR1; ENSG00000169618; HLA -A*03:01,HLA-A*03:02
ALLAIAIDR

SEQ ID NO: 8728 - protein, 10 aa, Homo sapiens
  Table 1.2; PROKR1; ENSG00000169618; HLA -A*29:02,HLA-A*30:02
ALLAIAIDRY

SEQ ID NO: 8729 - protein, 11 aa, Homo sapiens
  Table 1.2; PROKR1; ENSG00000169618; HLA -A*02:01,HLA-A*02:04
ALLAIAIDRYL

SEQ ID NO: 8730 - protein, 10 aa, Homo sapiens
  Table 1.2; PROKR1; ENSG00000169618; HLA -A*02:03,HLA-A*02:04
AMSNSMINTL

SEQ ID NO: 8731 - protein, 8 aa, Homo sapiens
  Table 1.2; PROKR1; ENSG00000169618; HLA -B*51:01,HLA-B*54:01,HLA-B*56:01
APFYGFTI

SEQ ID NO: 8732 - protein, 9 aa, Homo sapiens
  Table 1.2; PROKR1; ENSG00000169618; HLA -B*07:02,HLA-B*51:01,HLA-B*54:01,HLA-B*56:01
APFYGFTIV

SEQ ID NO: 8733 - protein, 10 aa, Homo sapiens
  Table 1.2; PROKR1; ENSG00000169618; HLA -A*32:01,HLA-B*56:01
ASYNGGKSSA

SEQ ID NO: 8734 - protein, 11 aa, Homo sapiens
  Table 1.2; PROKR1; ENSG00000169618; HLA -A*03:01,HLA-A*03:02,HLA-A*11:01
ATEEVDCIRLK

SEQ ID NO: 8735 - protein, 9 aa, Homo sapiens
  Table 1.2; PROKR1; ENSG00000169618; HLA -B*44:02,HLA-B*44:03,HLA-B*57:01
ATGLIALVW

SEQ ID NO: 8736 - protein, 8 aa, Homo sapiens
  Table 1.2; PROKR1; ENSG00000169618; HLA -A*32:01,HLA-B*46:01
ATNTSTSF

SEQ ID NO: 8737 - protein, 9 aa, Homo sapiens
  Table 1.2; PROKR1; ENSG00000169618; HLA -A*31:01,HLA-A*32:01,HLA-C*01:02
ATNTSTSFL

SEQ ID NO: 8738 - protein, 10 aa, Homo sapiens
  Table 1.2; PROKR1; ENSG00000169618; HLA -A*01:01,HLA-A*11:01,HLA-A*29:02,HLA-A*30:02
ATSFPFNFSY

SEQ ID NO: 8739 - protein, 9 aa, Homo sapiens
  Table 1.2; PROKR1; ENSG00000169618; HLA -A*23:01,HLA-A*24:02,HLA-C*14:02
AYFTTETVL

SEQ ID NO: 8740 - protein, 10 aa, Homo sapiens
  Table 1.2; PROKR1; ENSG00000169618; HLA -A*25:01,HLA-B*18:01,HLA-B*38:01,HLA-B*44:02,HLA-B*44:03
DEDVTNSRTF

SEQ ID NO: 8741 - protein, 11 aa, Homo sapiens
  Table 1.2; PROKR1; ENSG00000169618; HLA -B*44:02
DEDVTNSRTFF

SEQ ID NO: 8742 - protein, 9 aa, Homo sapiens
  Table 1.2; PROKR1; ENSG00000169618; HLA -A*33:01,HLA-A*33:03
DFFPTVFVK

SEQ ID NO: 8743 - protein, 9 aa, Homo sapiens
  Table 1.2; PROKR1; ENSG00000169618; HLA -B*08:01
DLDLKTIGM

SEQ ID NO: 8744 - protein, 10 aa, Homo sapiens
  Table 1.2; PROKR1; ENSG00000169618; HLA -A*25:01,HLA-A*26:01
DNATNTSTSF

SEQ ID NO: 8745 - protein, 9 aa, Homo sapiens
  Table 1.2; PROKR1; ENSG00000169618; HLA -A*25:01
DQQLYYKSY

SEQ ID NO: 8746 - protein, 9 aa, Homo sapiens
  Table 1.2; PROKR1; ENSG00000169618; HLA -A*68:02
DTVKYFKKI

SEQ ID NO: 8747 - protein, 8 aa, Homo sapiens
  Table 1.2; PROKR1; ENSG00000169618; HLA -A*25:01
DVTNSRTF

SEQ ID NO: 8748 - protein, 9 aa, Homo sapiens
  Table 1.2; PROKR1; ENSG00000169618; HLA -A*25:01,HLA-A*26:01
DVTNSRTFF

SEQ ID NO: 8749 - protein, 8 aa, Homo sapiens
  Table 1.2; PROKR1; ENSG00000169618; HLA -B*08:01,HLA-B*18:01,HLA-B*51:01
DYYVVRQL

SEQ ID NO: 8750 - protein, 10 aa, Homo sapiens
  Table 1.2; PROKR1; ENSG00000169618; HLA -A*24:02
DYYVVRQLSW

SEQ ID NO: 8751 - protein, 9 aa, Homo sapiens
  Table 1.2; PROKR1; ENSG00000169618; HLA -A*26:01
ECIAMSNSM

SEQ ID NO: 8752 - protein, 9 aa, Homo sapiens
  Table 1.2; PROKR1; ENSG00000169618; HLA -A*33:03,HLA-A*68:01,HLA-C*07:06
EDEDVTNSR

SEQ ID NO: 8753 - protein, 11 aa, Homo sapiens
  Table 1.2; PROKR1; ENSG00000169618; HLA -B*38:01,HLA-B*44:02,HLA-B*44:03
EDEDVTNSRTF

SEQ ID NO: 8754 - protein, 9 aa, Homo sapiens
  Table 1.2; PROKR1; ENSG00000169618; HLA -A*25:01,HLA-A*26:01,HLA-B*18:01,HLA-B*44:02,HLA-B*44:03, HLA-C*16:04
EDVTNSRTF

SEQ ID NO: 8755 - protein, 9 aa, Homo sapiens
  Table 1.2; PROKR1; ENSG00000169618; HLA -A*23:01,HLA-A*26:01,HLA-A*33:03,HLA-B*35:01
EFVGPVVTM

SEQ ID NO: 8756 - protein, 11 aa, Homo sapiens
  Table 1.2; PROKR1; ENSG00000169618; HLA -A*23:01
EFVGPVVTMTL

SEQ ID NO: 8757 - protein, 8 aa, Homo sapiens
  Table 1.2; PROKR1; ENSG00000169618; HLA -A*33:03
ETVLVIVK

SEQ ID NO: 8758 - protein, 9 aa, Homo sapiens
  Table 1.2; PROKR1; ENSG00000169618; HLA -A*26:01,HLA-A*68:01,HLA-A*68:02,HLA-B*27:05,HLA-B*35:01, HLA-B*35:03,HLA-B*46:01,HLA-B*51:01,HLA-B*54:01,HLA-C*02:02, HLA-C*07:06,HLA-C*12:03
FAAKIVIGM

SEQ ID NO: 8759 - protein, 8 aa, Homo sapiens
  Table 1.2; PROKR1; ENSG00000169618; HLA -B*49:01
FEMDYYVV

SEQ ID NO: 8760 - protein, 9 aa, Homo sapiens
  Table 1.2; PROKR1; ENSG00000169618; HLA -A*03:01
FIAALVRYK

SEQ ID NO: 8761 - protein, 10 aa, Homo sapiens
  Table 1.2; PROKR1; ENSG00000169618; HLA -A*29:02
FIFIAALVRY

SEQ ID NO: 8762 - protein, 10 aa, Homo sapiens
  Table 1.2; PROKR1; ENSG00000169618; HLA -A*02:01,HLA-A*02:03,HLA-A*02:04
FLFIFGIEFV

SEQ ID NO: 8763 - protein, 10 aa, Homo sapiens
  Table 1.2; PROKR1; ENSG00000169618; HLA -B*35:01
FPFNFSYSDY

SEQ ID NO: 8764 - protein, 9 aa, Homo sapiens
  Table 1.2; PROKR1; ENSG00000169618; HLA -A*68:02,HLA-B*13:02
FTTETVLVI

SEQ ID NO: 8765 - protein, 10 aa, Homo sapiens
  Table 1.2; PROKR1; ENSG00000169618; HLA -A*68:02
FTTETVLVIV

SEQ ID NO: 8766 - protein, 11 aa, Homo sapiens
  Table 1.2; PROKR1; ENSG00000169618; HLA -B*27:02
FTTETVLVIVK

SEQ ID NO: 8767 - protein, 8 aa, Homo sapiens
  Table 1.2; PROKR1; ENSG00000169618; HLA -A*32:01,HLA-B*35:01,HLA-B*35:03,HLA-B*37:01,HLA-B*46:01, HLA-C*07:04
FVGPVVTM

SEQ ID NO: 8768 - protein, 10 aa, Homo sapiens
  Table 1.2; PROKR1; ENSG00000169618; HLA -A*02:07,HLA-A*25:01,HLA-A*26:01,HLA-A*30:01,HLA-A*68:02, HLA-B*35:01,HLA-B*35:03,HLA-B*38:01,HLA-C*02:02,HLA-C*03:04
FVGPVVTMTL

SEQ ID NO: 8769 - protein, 8 aa, Homo sapiens
  Table 1.2; PROKR1; ENSG00000169618; HLA -B*08:01
FVKEKHYL

SEQ ID NO: 8770 - protein, 9 aa, Homo sapiens
  Table 1.2; PROKR1; ENSG00000169618; HLA -A*02:01
FVTVKNDTV

SEQ ID NO: 8771 - protein, 11 aa, Homo sapiens
  Table 1.2; PROKR1; ENSG00000169618; HLA -A*01:01
FVTVKNDTVKY

SEQ ID NO: 8772 - protein, 9 aa, Homo sapiens
  Table 1.2; PROKR1; ENSG00000169618; HLA -A*02:01,HLA-A*02:03,HLA-A*02:04,HLA-A*02:07,HLA-B*13:02, HLA-B*55:01
GLIALVWTV

SEQ ID NO: 8773 - protein, 9 aa, Homo sapiens
  Table 1.2; PROKR1; ENSG00000169618; HLA -A*02:01
GMALVGIML

SEQ ID NO: 8774 - protein, 8 aa, Homo sapiens
  Table 1.2; PROKR1; ENSG00000169618; HLA -B*07:02,HLA-B*56:01
GPVVTMTL

SEQ ID NO: 8775 - protein, 10 aa, Homo sapiens
  Table 1.2; PROKR1; ENSG00000169618; HLA -B*13:02
GQIWPVDQQL

SEQ ID NO: 8776 - protein, 11 aa, Homo sapiens
  Table 1.2; PROKR1; ENSG00000169618; HLA -A*30:02,HLA-B*15:01
GQIWPVDQQLY

SEQ ID NO: 8777 - protein, 9 aa, Homo sapiens
  Table 1.2; PROKR1; ENSG00000169618; HLA -A*26:01,HLA-A*29:02,HLA-A*30:02,HLA-B*15:03,HLA-B*35:01, HLA-C*07:04
HVLCTSVNY

SEQ ID NO: 8778 - protein, 9 aa, Homo sapiens
  Table 1.2; PROKR1; ENSG00000169618; HLA -A*23:01,HLA-A*24:02,HLA-A*25:01,HLA-B*08:01,HLA-B*13:02, HLA-B*46:01,HLA-B*51:01,HLA-C*02:02,HLA-C*03:03,HLA-C*03:04, HLA-C*16:02
IAIDRYLAI

SEQ ID NO: 8779 - protein, 8 aa, Homo sapiens
  Table 1.2; PROKR1; ENSG00000169618; HLA -A*23:01,HLA-B*57:01,HLA-B*58:01
IAIPSAYF

SEQ ID NO: 8780 - protein, 9 aa, Homo sapiens
  Table 1.2; PROKR1; ENSG00000169618; HLA -B*51:01
IALVWTVSI

SEQ ID NO: 8781 - protein, 8 aa, Homo sapiens
  Table 1.2; PROKR1; ENSG00000169618; HLA -B*51:01
IAMSNSMI

SEQ ID NO: 8782 - protein, 11 aa, Homo sapiens
  Table 1.2; PROKR1; ENSG00000169618; HLA -A*23:01,HLA-B*35:03,HLA-C*03:03
IAMSNSMINTL

SEQ ID NO: 8783 - protein, 9 aa, Homo sapiens
  Table 1.2; PROKR1; ENSG00000169618; HLA -B*46:01
IANLAISDF

SEQ ID NO: 8784 - protein, 8 aa, Homo sapiens
  Table 1.2; PROKR1; ENSG00000169618; HLA -A*30:01,HLA-B*13:02,HLA-B*18:01,HLA-B*37:01,HLA-B*40:01, HLA-B*40:02,HLA-B*49:01,HLA-B*51:01
IEFVGPVV

SEQ ID NO: 8785 - protein, 9 aa, Homo sapiens
  Table 1.2; PROKR1; ENSG00000169618; HLA -A*30:01,HLA-B*18:01,HLA-B*40:01,HLA-B*40:02,HLA-B*49:01
IEFVGPVVT

SEQ ID NO: 8786 - protein, 10 aa, Homo sapiens
  Table 1.2; PROKR1; ENSG00000169618; HLA -A*30:01,HLA-B*18:01,HLA-B*37:01,HLA-B*40:01,HLA-B*40:02, HLA-B*49:01
IEFVGPVVTM

SEQ ID NO: 8787 - protein, 9 aa, Homo sapiens
  Table 1.2; PROKR1; ENSG00000169618; HLA -A*23:01,HLA-A*24:02,HLA-A*29:02
IFIAALVRY

SEQ ID NO: 8788 - protein, 9 aa, Homo sapiens
  Table 1.2; PROKR1; ENSG00000169618; HLA -B*46:01
IGMPATEEV

SEQ ID NO: 8789 - protein, 9 aa, Homo sapiens
  Table 1.2; PROKR1; ENSG00000169618; HLA -B*54:01,HLA-B*56:01
IGNFIFIAA

SEQ ID NO: 8790 - protein, 9 aa, Homo sapiens
  Table 1.2; PROKR1; ENSG00000169618; HLA -A*01:01,HLA-A*03:01,HLA-A*23:01,HLA-A*25:01,HLA-A*26:01, HLA-A*29:02,HLA-A*30:02,HLA-A*32:01,HLA-B*15:01,HLA-B*15:03, HLA-B*18:01,HLA-B*46:01,HLA-C*02:02,HLA-C*07:04,HLA-C*14:02
ILIAIPSAY

SEQ ID NO: 8791 - protein, 10 aa, Homo sapiens
  Table 1.2; PROKR1; ENSG00000169618; HLA -A*23:01,HLA-A*24:02
ILIAIPSAYF

SEQ ID NO: 8792 - protein, 9 aa, Homo sapiens
  Table 1.2; PROKR1; ENSG00000169618; HLA -A*01:01
ISDFLVAIV

SEQ ID NO: 8793 - protein, 9 aa, Homo sapiens
  Table 1.2; PROKR1; ENSG00000169618; HLA -A*02:03,HLA-A*02:07,HLA-B*51:01,HLA-B*54:01
IVRDFFPTV

SEQ ID NO: 8794 - protein, 10 aa, Homo sapiens
  Table 1.2; PROKR1; ENSG00000169618; HLA -B*57:01
IVRDFFPTVF

SEQ ID NO: 8795 - protein, 9 aa, Homo sapiens
  Table 1.2; PROKR1; ENSG00000169618; HLA -A*24:02
KYFKKIMLL

SEQ ID NO: 8796 - protein, 9 aa, Homo sapiens
  Table 1.2; PROKR1; ENSG00000169618; HLA -B*57:01
LAIAIDRYL

SEQ ID NO: 8797 - protein, 9 aa, Homo sapiens
  Table 1.2; PROKR1; ENSG00000169618; HLA -B*54:01
LAISDFLVA

SEQ ID NO: 8798 - protein, 8 aa, Homo sapiens
  Table 1.2; PROKR1; ENSG00000169618; HLA -B*37:01
LDLKTIGM

SEQ ID NO: 8799 - protein, 8 aa, Homo sapiens
  Table 1.2; PROKR1; ENSG00000169618; HLA -A*01:01
LIAIPSAY

SEQ ID NO: 8800 - protein, 9 aa, Homo sapiens
  Table 1.2; PROKR1; ENSG00000169618; HLA -A*01:01,HLA-A*29:02
LLAIAIDRY

SEQ ID NO: 8801 - protein, 9 aa, Homo sapiens
  Table 1.2; PROKR1; ENSG00000169618; HLA -A*02:04,HLA-A*02:07,HLA-C*03:04
LSWEHGHVL

SEQ ID NO: 8802 - protein, 9 aa, Homo sapiens
  Table 1.2; PROKR1; ENSG00000169618; HLA -A*02:04
LTNLLIANL

SEQ ID NO: 8803 - protein, 9 aa, Homo sapiens
  Table 1.2; PROKR1; ENSG00000169618; HLA -A*24:02
LWFKAVPGF

SEQ ID NO: 8804 - protein, 8 aa, Homo sapiens
  Table 1.2; PROKR1; ENSG00000169618; HLA -A*23:01,HLA-C*14:02
LYVSTNAL

SEQ ID NO: 8805 - protein, 9 aa, Homo sapiens
  Table 1.2; PROKR1; ENSG00000169618; HLA -A*23:01,HLA-A*24:02,HLA-C*14:02
LYVSTNALL

SEQ ID NO: 8806 - protein, 11 aa, Homo sapiens
  Table 1.2; PROKR1; ENSG00000169618; HLA -A*23:01
LYVSTNALLAI

SEQ ID NO: 8807 - protein, 9 aa, Homo sapiens
  Table 1.2; PROKR1; ENSG00000169618; HLA -A*24:02
LYYKSYFLF

SEQ ID NO: 8808 - protein, 8 aa, Homo sapiens
  Table 1.2; PROKR1; ENSG00000169618; HLA -C*03:04
MALVGIML

SEQ ID NO: 8809 - protein, 9 aa, Homo sapiens
  Table 1.2; PROKR1; ENSG00000169618; HLA -B*51:01,HLA-B*54:01
MALVGIMLV

SEQ ID NO: 8810 - protein, 9 aa, Homo sapiens
  Table 1.2; PROKR1; ENSG00000169618; HLA -A*29:02
MLLHWKASY

SEQ ID NO: 8811 - protein, 9 aa, Homo sapiens
  Table 1.2; PROKR1; ENSG00000169618; HLA -B*35:03,HLA-B*55:01
MPATEEVDC

SEQ ID NO: 8812 - protein, 10 aa, Homo sapiens
  Table 1.2; PROKR1; ENSG00000169618; HLA -B*35:03,HLA-B*55:01
MPATEEVDCI

SEQ ID NO: 8813 - protein, 9 aa, Homo sapiens
  Table 1.2; PROKR1; ENSG00000169618; HLA -B*35:03
MPLDEDEDV

SEQ ID NO: 8814 - protein, 10 aa, Homo sapiens
  Table 1.2; PROKR1; ENSG00000169618; HLA -B*35:03
MPLDEDEDVT

SEQ ID NO: 8815 - protein, 9 aa, Homo sapiens
  Table 1.2; PROKR1; ENSG00000169618; HLA -B*35:01,HLA-B*35:03,HLA-B*58:01,HLA-C*03:04,HLA-C*07:04
MSNSMINTL

SEQ ID NO: 8816 - protein, 8 aa, Homo sapiens
  Table 1.2; PROKR1; ENSG00000169618; HLA -B*51:01
NALLAIAI

SEQ ID NO: 8817 - protein, 9 aa, Homo sapiens
  Table 1.2; PROKR1; ENSG00000169618; HLA -A*23:01,HLA-A*25:01,HLA-A*32:01,HLA-B*15:03,HLA-B*35:01, HLA-B*35:03,HLA-B*39:01,HLA-B*46:01,HLA-B*55:01,HLA-B*58:01, HLA-C*02:02,HLA-C*03:03,HLA-C*03:04,HLA-C*14:02,HLA-C*16:01,
  HLA-C*16:02
NATNTSTSF

SEQ ID NO: 8818 - protein, 11 aa, Homo sapiens
  Table 1.2; PROKR1; ENSG00000169618; HLA -A*29:02
NFIFIAALVRY

SEQ ID NO: 8819 - protein, 10 aa, Homo sapiens
  Table 1.2; PROKR1; ENSG00000169618; HLA -A*02:04
NLTNLLIANL

SEQ ID NO: 8820 - protein, 10 aa, Homo sapiens
  Table 1.2; PROKR1; ENSG00000169618; HLA -B*07:02,HLA-B*35:01,HLA-C*07:02
NPHGAHATSF

SEQ ID NO: 8821 - protein, 9 aa, Homo sapiens
  Table 1.2; PROKR1; ENSG00000169618; HLA -A*11:01
NTLCFVTVK

SEQ ID NO: 8822 - protein, 9 aa, Homo sapiens
  Table 1.2; PROKR1; ENSG00000169618; HLA -A*68:02
NTSTSFLSV

SEQ ID NO: 8823 - protein, 8 aa, Homo sapiens
  Table 1.2; PROKR1; ENSG00000169618; HLA -A*23:01,HLA-A*24:02,HLA-C*14:02
NYLRTVSL

SEQ ID NO: 8824 - protein, 9 aa, Homo sapiens
  Table 1.2; PROKR1; ENSG00000169618; HLA -A*23:01,HLA-A*24:02,HLA-A*29:02
NYLRTVSLY

SEQ ID NO: 8825 - protein, 8 aa, Homo sapiens
  Table 1.2; PROKR1; ENSG00000169618; HLA -A*01:01
PVDQQLYY

SEQ ID NO: 8826 - protein, 9 aa, Homo sapiens
  Table 1.2; PROKR1; ENSG00000169618; HLA -A*03:02
PVDQQLYYK

SEQ ID NO: 8827 - protein, 9 aa, Homo sapiens
  Table 1.2; PROKR1; ENSG00000169618; HLA -A*29:02
PVVTMTLCY

SEQ ID NO: 8828 - protein, 9 aa, Homo sapiens
  Table 1.2; PROKR1; ENSG00000169618; HLA -A*02:04,HLA-A*02:07,HLA-B*35:03
QIWPVDQQL

SEQ ID NO: 8829 - protein, 10 aa, Homo sapiens
  Table 1.2; PROKR1; ENSG00000169618; HLA -A*29:02
QIWPVDQQLY

SEQ ID NO: 8830 - protein, 11 aa, Homo sapiens
  Table 1.2; PROKR1; ENSG00000169618; HLA -A*29:02
QIWPVDQQLYY

SEQ ID NO: 8831 - protein, 11 aa, Homo sapiens
  Table 1.2; PROKR1; ENSG00000169618; HLA -B*57:01
QTATGLIALVW

SEQ ID NO: 8832 - protein, 8 aa, Homo sapiens
  Table 1.2; PROKR1; ENSG00000169618; HLA -B*37:01
RDFFPTVF

SEQ ID NO: 8833 - protein, 9 aa, Homo sapiens
  Table 1.2; PROKR1; ENSG00000169618; HLA -A*23:01,HLA-A*24:02,HLA-A*31:01
RYLAIVHPL

SEQ ID NO: 8834 - protein, 9 aa, Homo sapiens
  Table 1.2; PROKR1; ENSG00000169618; HLA -B*38:01,HLA-B*51:01,HLA-C*05:01
SADLDLKTI

SEQ ID NO: 8835 - protein, 9 aa, Homo sapiens
  Table 1.2; PROKR1; ENSG00000169618; HLA -A*02:01,HLA-B*13:02,HLA-B*46:01,HLA-B*51:01,HLA-C*02:02, HLA-C*03:04,HLA-C*16:04
SAYFTTETV

SEQ ID NO: 8836 - protein, 10 aa, Homo sapiens
  Table 1.2; PROKR1; ENSG00000169618; HLA -B*35:03
SAYFTTETVL

SEQ ID NO: 8837 - protein, 8 aa, Homo sapiens
  Table 1.2; PROKR1; ENSG00000169618; HLA -B*37:01
SDFLVAIV

SEQ ID NO: 8838 - protein, 8 aa, Homo sapiens
  Table 1.2; PROKR1; ENSG00000169618; HLA -A*29:02
SFPFNFSY

SEQ ID NO: 8839 - protein, 9 aa, Homo sapiens
  Table 1.2; PROKR1; ENSG00000169618; HLA -A*02:01,HLA-A*02:04
SILIAIPSA

SEQ ID NO: 8840 - protein, 10 aa, Homo sapiens
  Table 1.2; PROKR1; ENSG00000169618; HLA -A*30:02
SILIAIPSAY

SEQ ID NO: 8841 - protein, 9 aa, Homo sapiens
  Table 1.2; PROKR1; ENSG00000169618; HLA -A*02:01,HLA-A*02:03,HLA-A*02:04,HLA-A*30:01,HLA-B*07:02, HLA-B*08:01,HLA-B*13:02,HLA-B*15:01,HLA-B*15:03,HLA-B*37:01, HLA-B*46:01,HLA-C*01:02,HLA-C*03:03,HLA-C*14:02
SLYVSTNAL

SEQ ID NO: 8842 - protein, 9 aa, Homo sapiens
  Table 1.2; PROKR1; ENSG00000169618; HLA -A*02:01,HLA-A*02:03
SMINTLCFV

SEQ ID NO: 8843 - protein, 11 aa, Homo sapiens
  Table 1.2; PROKR1; ENSG00000169618; HLA -A*30:02
SVNYLRTVSLY

SEQ ID NO: 8844 - protein, 9 aa, Homo sapiens
  Table 1.2; PROKR1; ENSG00000169618; HLA -C*14:02
SYNGGKSSA

SEQ ID NO: 8845 - protein, 8 aa, Homo sapiens
  Table 1.2; PROKR1; ENSG00000169618; HLA -B*54:01,HLA-B*56:01
TAFYIVEC

SEQ ID NO: 8846 - protein, 9 aa, Homo sapiens
  Table 1.2; PROKR1; ENSG00000169618; HLA -A*68:02,HLA-B*13:02,HLA-B*51:01,HLA-B*54:01
TAFYIVECI

SEQ ID NO: 8847 - protein, 9 aa, Homo sapiens
  Table 1.2; PROKR1; ENSG00000169618; HLA -A*68:02,HLA-B*13:02,HLA-C*02:02,HLA-C*16:02
TATGLIALV

SEQ ID NO: 8848 - protein, 10 aa, Homo sapiens
  Table 1.2; PROKR1; ENSG00000169618; HLA -B*44:02
TATGLIALVW

SEQ ID NO: 8849 - protein, 9 aa, Homo sapiens
  Table 1.2; PROKR1; ENSG00000169618; HLA -B*40:01
TEEVDCIRL

SEQ ID NO: 8850 - protein, 8 aa, Homo sapiens
  Table 1.2; PROKR1; ENSG00000169618; HLA -A*30:01,HLA-B*18:01,HLA-B*49:01
TETVLVIV

SEQ ID NO: 8851 - protein, 9 aa, Homo sapiens
  Table 1.2; PROKR1; ENSG00000169618; HLA -B*18:01,HLA-B*49:01
TETVLVIVK

SEQ ID NO: 8852 - protein, 9 aa, Homo sapiens
  Table 1.2; PROKR1; ENSG00000169618; HLA -A*23:01
TFFAAKIVI

SEQ ID NO: 8853 - protein, 9 aa, Homo sapiens
  Table 1.2; PROKR1; ENSG00000169618; HLA -A*01:01,HLA-A*29:02,HLA-A*30:02,HLA-A*32:01,HLA-B*35:01, HLA-B*57:01,HLA-B*58:01,HLA-C*02:02
TSFPFNFSY

SEQ ID NO: 8854 - protein, 9 aa, Homo sapiens
  Table 1.2; PROKR1; ENSG00000169618; HLA -C*16:02
TSTSFLSVL

SEQ ID NO: 8855 - protein, 9 aa, Homo sapiens
  Table 1.2; PROKR1; ENSG00000169618; HLA -A*02:03,HLA-C*16:02
TSVNYLRTV

SEQ ID NO: 8856 - protein, 9 aa, Homo sapiens
  Table 1.2; PROKR1; ENSG00000169618; HLA -A*01:01,HLA-A*68:02
TTETVLVIV

SEQ ID NO: 8857 - protein, 10 aa, Homo sapiens
  Table 1.2; PROKR1; ENSG00000169618; HLA -A*01:01,HLA-A*11:01,HLA-A*68:01,HLA-B*27:02
TTETVLVIVK

SEQ ID NO: 8858 - protein, 9 aa, Homo sapiens
  Table 1.2; PROKR1; ENSG00000169618; HLA -A*25:01,HLA-A*26:01,HLA-A*29:02,HLA-A*30:02,HLA-A*32:01, HLA-A*33:01,HLA-A*33:03,HLA-B*15:01,HLA-B*15:03,HLA-B*35:01, HLA-B*46:01,HLA-B*58:01,HLA-C*02:02,HLA-C*07:04
TVKNDTVKY

SEQ ID NO: 8859 - protein, 10 aa, Homo sapiens
  Table 1.2; PROKR1; ENSG00000169618; HLA -A*25:01
TVKNDTVKYF

SEQ ID NO: 8860 - protein, 9 aa, Homo sapiens
  Table 1.2; PROKR1; ENSG00000169618; HLA -A*02:07,HLA-A*23:01,HLA-A*24:02,HLA-B*08:01,HLA-B*46:01, HLA-B*51:01,HLA-C*01:02,HLA-C*14:02
VGPVVTMTL

SEQ ID NO: 8861 - protein, 8 aa, Homo sapiens
  Table 1.2; PROKR1; ENSG00000169618; HLA -B*15:03
VKNDTVKY

SEQ ID NO: 8862 - protein, 9 aa, Homo sapiens
  Table 1.2; PROKR1; ENSG00000169618; HLA -A*03:01,HLA-A*29:02,HLA-B*15:01,HLA-B*15:03,HLA-B*46:01
VLMCILTAY

SEQ ID NO: 8863 - protein, 9 aa, Homo sapiens
  Table 1.2; PROKR1; ENSG00000169618; HLA -A*02:03,HLA-A*32:01
VLNPHGAHA

SEQ ID NO: 8864 - protein, 9 aa, Homo sapiens
  Table 1.2; PROKR1; ENSG00000169618; HLA -B*08:01,HLA-B*37:01,HLA-B*51:01,HLA-C*01:02,HLA-C*14:02, HLA-C*16:01
VNYLRTVSL

SEQ ID NO: 8865 - protein, 9 aa, Homo sapiens
  Table 1.2; PROKR1; ENSG00000169618; HLA -B*51:01
VPGFQTEQI

SEQ ID NO: 8866 - protein, 9 aa, Homo sapiens
  Table 1.2; PROKR1; ENSG00000169618; HLA -B*13:02
VSTNALLAI

SEQ ID NO: 8867 - protein, 8 aa, Homo sapiens
  Table 1.2; PROKR1; ENSG00000169618; HLA -A*32:01
VTNSRTFF

SEQ ID NO: 8868 - protein, 9 aa, Homo sapiens
  Table 1.2; PROKR1; ENSG00000169618; HLA -A*11:01
VTVKNDTVK

SEQ ID NO: 8869 - protein, 10 aa, Homo sapiens
  Table 1.2; PROKR1; ENSG00000169618; HLA -A*01:01,HLA-A*26:01,HLA-A*30:02,HLA-B*57:01,HLA-B*58:01
VTVKNDTVKY

SEQ ID NO: 8870 - protein, 11 aa, Homo sapiens
  Table 1.2; PROKR1; ENSG00000169618; HLA -B*57:01
VTVKNDTVKYF

SEQ ID NO: 8871 - protein, 9 aa, Homo sapiens
  Table 1.2; PROKR1; ENSG00000169618; HLA -A*29:02,HLA-B*35:01
WPVDQQLYY

SEQ ID NO: 8872 - protein, 9 aa, Homo sapiens
  Table 1.2; PROKR1; ENSG00000169618; HLA -A*68:02
WTVSILIAI

SEQ ID NO: 8873 - protein, 8 aa, Homo sapiens
  Table 1.2; PROKR1; ENSG00000169618; HLA -B*08:01
YARISREL

SEQ ID NO: 8874 - protein, 9 aa, Homo sapiens
  Table 1.2; PROKR1; ENSG00000169618; HLA -B*57:01
YARISRELW

SEQ ID NO: 8875 - protein, 10 aa, Homo sapiens
  Table 1.2; PROKR1; ENSG00000169618; HLA -A*29:02
YFLFIFGIEF

SEQ ID NO: 8876 - protein, 8 aa, Homo sapiens
  Table 1.2; PROKR1; ENSG00000169618; HLA -C*14:02
YFTTETVL

SEQ ID NO: 8877 - protein, 8 aa, Homo sapiens
  Table 1.2; PROKR1; ENSG00000169618; HLA -A*02:03,HLA-A*02:04
YLAIVHPL

SEQ ID NO: 8878 - protein, 8 aa, Homo sapiens
  Table 1.2; PROKR1; ENSG00000169618; HLA -B*46:01
YLRTVSLY

SEQ ID NO: 8879 - protein, 9 aa, Homo sapiens
  Table 1.2; PROKR1; ENSG00000169618; HLA -A*02:01,HLA-A*02:03,HLA-A*02:07
YLRTVSLYV

SEQ ID NO: 8880 - protein, 9 aa, Homo sapiens
  Table 1.2; PROKR1; ENSG00000169618; HLA -A*29:02
YVLCWAPFY

SEQ ID NO: 8881 - protein, 10 aa, Homo sapiens
  Table 1.2; PROKR1; ENSG00000169618; HLA -A*25:01
YVSTNALLAI

SEQ ID NO: 8882 - protein, 9 aa, Homo sapiens
  Table 1.2; PROKR1; ENSG00000169618; HLA -A*24:02
YYKSYFLFI

SEQ ID NO: 8883 - protein, 9 aa, Homo sapiens
  Table 1.2; PROKR1; ENSG00000169618; HLA -A*23:01,HLA-A*24:02
YYVVRQLSW

SEQ ID NO: 8884 - protein, 8 aa, Homo sapiens
  Table 1.2; R3HDML; ENSG00000101074; HLA -B*15:01,HLA-B*15:03,HLA-B*37:01,HLA-B*46:01,HLA-C*02:02, HLA-C*12:03,HLA-C*16:02,HLA-C*16:04
AAYLVCNY

SEQ ID NO: 8885 - protein, 9 aa, Homo sapiens
  Table 1.2; R3HDML; ENSG00000101074; HLA -B*54:01
AAYLVCNYA

SEQ ID NO: 8886 - protein, 9 aa, Homo sapiens
  Table 1.2; R3HDML; ENSG00000101074; HLA -A*30:01,HLA-B*13:02,HLA-B*27:02,HLA-B*37:01,HLA-B*40:01, HLA-B*40:02,HLA-B*44:02,HLA-B*44:03,HLA-B*49:01
AEAWATQCI

SEQ ID NO: 8887 - protein, 10 aa, Homo sapiens
  Table 1.2; R3HDML; ENSG00000101074; HLA -B*44:02,HLA-B*44:03
AEAWATQCIW

SEQ ID NO: 8888 - protein, 8 aa, Homo sapiens
  Table 1.2; R3HDML; ENSG00000101074; HLA -B*27:05,HLA-B*38:01,HLA-B*39:01
AHGPSQLM

SEQ ID NO: 8889 - protein, 10 aa, Homo sapiens
  Table 1.2; R3HDML; ENSG00000101074; HLA -A*30:02
AHGPSQLMRY

SEQ ID NO: 8890 - protein, 9 aa, Homo sapiens
  Table 1.2; R3HDML; ENSG00000101074; HLA -A*02:01,HLA-A*02:04,HLA-A*02:07,HLA-B*13:02
ALLDYHNHI

SEQ ID NO: 8891 - protein, 9 aa, Homo sapiens
  Table 1.2; R3HDML; ENSG00000101074; HLA -B*54:01,HLA-B*55:01,HLA-B*56:01
APAQPESTA

SEQ ID NO: 8892 - protein, 10 aa, Homo sapiens
  Table 1.2; R3HDML; ENSG00000101074; HLA -B*07:02,HLA-B*35:01,HLA-B*35:03,HLA-B*55:01,HLA-B*56:01, HLA-C*03:03,HLA-C*07:02
APAQPESTAM

SEQ ID NO: 8893 - protein, 11 aa, Homo sapiens
  Table 1.2; R3HDML; ENSG00000101074; HLA -A*68:01
APAQPESTAMR

SEQ ID NO: 8894 - protein, 9 aa, Homo sapiens
  Table 1.2; R3HDML; ENSG00000101074; HLA -A*23:01,HLA-A*24:02
AYLVCNYAI

SEQ ID NO: 8895 - protein, 9 aa, Homo sapiens
  Table 1.2; R3HDML; ENSG00000101074; HLA -B*57:01
CSHYTQMVW

SEQ ID NO: 8896 - protein, 8 aa, Homo sapiens
  Table 1.2; R3HDML; ENSG00000101074; HLA -B*51:01
EAWATQCI

SEQ ID NO: 8897 - protein, 9 aa, Homo sapiens
  Table 1.2; R3HDML; ENSG00000101074; HLA -B*57:01
EAWATQCIW

SEQ ID NO: 8898 - protein, 9 aa, Homo sapiens
  Table 1.2; R3HDML; ENSG00000101074; HLA -A*24:02
EYMVWDKRL

SEQ ID NO: 8899 - protein, 9 aa, Homo sapiens
  Table 1.2; R3HDML; ENSG00000101074; HLA -B*55:01
FPAPRDCNP

SEQ ID NO: 8900 - protein, 9 aa, Homo sapiens
  Table 1.2; R3HDML; ENSG00000101074; HLA -A*02:04
GLLFWAGQA

SEQ ID NO: 8901 - protein, 10 aa, Homo sapiens
  Table 1.2; R3HDML; ENSG00000101074; HLA -A*02:04
GLLFWAGQAV

SEQ ID NO: 8902 - protein, 9 aa, Homo sapiens
  Table 1.2; R3HDML; ENSG00000101074; HLA -A*29:02
GNWIGESPY

SEQ ID NO: 8903 - protein, 8 aa, Homo sapiens
  Table 1.2; R3HDML; ENSG00000101074; HLA -B*13:02
GQAVNALI

SEQ ID NO: 8904 - protein, 9 aa, Homo sapiens
  Table 1.2; R3HDML; ENSG00000101074; HLA -B*13:02,HLA-B*15:01,HLA-B*15:03,HLA-B*27:05,HLA-C*07:04, HLA-C*12:03
GQAVNALIM

SEQ ID NO: 8905 - protein, 9 aa, Homo sapiens
  Table 1.2; R3HDML; ENSG00000101074; HLA -A*32:01,HLA-B*13:02,HLA-B*15:01
GQNLSIHSG

SEQ ID NO: 8906 - protein, 11 aa, Homo sapiens
  Table 1.2; R3HDML; ENSG00000101074; HLA -A*29:02,HLA-A*30:02,HLA-A*32:01,HLA-B*15:01,HLA-B*15:03, HLA-B*27:02,HLA-B*27:05,HLA-C*04:01,HLA-C*07:04,HLA-C*16:04
GQNLSIHSGQY

SEQ ID NO: 8907 - protein, 9 aa, Homo sapiens
  Table 1.2; R3HDML; ENSG00000101074; HLA -A*30:01,HLA-B*13:02,HLA-B*15:01,HLA-B*15:03,HLA-B*27:05, HLA-B*39:01,HLA-B*40:01,HLA-B*40:02,HLA-C*07:04
GQYRSVVDL

SEQ ID NO: 8908 - protein, 10 aa, Homo sapiens
  Table 1.2; R3HDML; ENSG00000101074; HLA -B*15:03
GQYRSVVDLM

SEQ ID NO: 8909 - protein, 10 aa, Homo sapiens
  Table 1.2; R3HDML; ENSG00000101074; HLA -B*54:01
HIRASVYPPA

SEQ ID NO: 8910 - protein, 9 aa, Homo sapiens
  Table 1.2; R3HDML; ENSG00000101074; HLA -A*25:01,HLA-A*26:01,HLA-B*57:01
HTCSSISVW

SEQ ID NO: 8911 - protein, 10 aa, Homo sapiens
  Table 1.2; R3HDML; ENSG00000101074; HLA -A*02:01,HLA-A*02:03
IMPNATPAPA

SEQ ID NO: 8912 - protein, 9 aa, Homo sapiens
  Table 1.2; R3HDML; ENSG00000101074; HLA -B*58:01,HLA-C*03:03,HLA-C*03:04
ISVRDMNAL

SEQ ID NO: 8913 - protein, 8 aa, Homo sapiens
  Table 1.2; R3HDML; ENSG00000101074; HLA -B*57:01,HLA-B*58:01
ISVWGNTW

SEQ ID NO: 8914 - protein, 10 aa, Homo sapiens
  Table 1.2; R3HDML; ENSG00000101074; HLA -A*30:02
KGNWIGESPY

SEQ ID NO: 8915 - protein, 8 aa, Homo sapiens
  Table 1.2; R3HDML; ENSG00000101074; HLA -B*57:01
LARAAEAW

SEQ ID NO: 8916 - protein, 9 aa, Homo sapiens
  Table 1.2; R3HDML; ENSG00000101074; HLA -A*02:01,HLA-A*02:03,HLA-B*46:01,HLA-B*54:01
LIMPNATPA

SEQ ID NO: 8917 - protein, 11 aa, Homo sapiens
  Table 1.2; R3HDML; ENSG00000101074; HLA -A*02:01
LIMPNATPAPA

SEQ ID NO: 8918 - protein, 9 aa, Homo sapiens
  Table 1.2; R3HDML; ENSG00000101074; HLA -A*02:01,HLA-A*02:03,HLA-A*02:04,HLA-A*02:07,HLA-B*13:02
LLFWAGQAV

SEQ ID NO: 8919 - protein, 8 aa, Homo sapiens
  Table 1.2; R3HDML; ENSG00000101074; HLA -A*02:07
LLPSTVGL

SEQ ID NO: 8920 - protein, 9 aa, Homo sapiens
  Table 1.2; R3HDML; ENSG00000101074; HLA -A*02:03,HLA-A*02:07
LLPSTVGLA

SEQ ID NO: 8921 - protein, 11 aa, Homo sapiens
  Table 1.2; R3HDML; ENSG00000101074; HLA -A*02:04,HLA-A*02:07
LLPSTVGLAGL

SEQ ID NO: 8922 - protein, 10 aa, Homo sapiens
  Table 1.2; R3HDML; ENSG00000101074; HLA -A*01:01,HLA-A*29:02,HLA-A*30:02
LLSGLEVPRY

SEQ ID NO: 8923 - protein, 9 aa, Homo sapiens
  Table 1.2; R3HDML; ENSG00000101074; HLA -B*56:01
LPSTVGLAG

SEQ ID NO: 8924 - protein, 10 aa, Homo sapiens
  Table 1.2; R3HDML; ENSG00000101074; HLA -B*35:03
LPSTVGLAGL

SEQ ID NO: 8925 - protein, 9 aa, Homo sapiens
  Table 1.2; R3HDML; ENSG00000101074; HLA -A*01:01,HLA-A*30:02,HLA-B*57:01,HLA-B*58:01
LSGLEVPRY

SEQ ID NO: 8926 - protein, 8 aa, Homo sapiens
  Table 1.2; R3HDML; ENSG00000101074; HLA -A*30:02,HLA-B*15:01,HLA-B*39:01,HLA-B*46:01,HLA-B*58:01
LSIHSGQY

SEQ ID NO: 8927 - protein, 9 aa, Homo sapiens
  Table 1.2; R3HDML; ENSG00000101074; HLA -A*31:01,HLA-A*33:01,HLA-A*33:03,HLA-B*57:01
LSIHSGQYR

SEQ ID NO: 8928 - protein, 8 aa, Homo sapiens
  Table 1.2; R3HDML; ENSG00000101074; HLA -B*08:01,HLA-B*51:01,HLA-B*54:01,HLA-B*56:01
MPLLPSTV

SEQ ID NO: 8929 - protein, 9 aa, Homo sapiens
  Table 1.2; R3HDML; ENSG00000101074; HLA -B*54:01,HLA-B*56:01
MPLLPSTVG

SEQ ID NO: 8930 - protein, 10 aa, Homo sapiens
  Table 1.2; R3HDML; ENSG00000101074; HLA -B*07:02,HLA-B*35:01,HLA-B*35:03,HLA-B*54:01,HLA-B*55:01, HLA-B*56:01,HLA-C*07:02
MPLLPSTVGL

SEQ ID NO: 8931 - protein, 11 aa, Homo sapiens
  Table 1.2; R3HDML; ENSG00000101074; HLA -B*54:01,HLA-B*56:01
MPLLPSTVGLA

SEQ ID NO: 8932 - protein, 8 aa, Homo sapiens
  Table 1.2; R3HDML; ENSG00000101074; HLA -B*54:01,HLA-B*55:01,HLA-B*56:01
MPNATPAP

SEQ ID NO: 8933 - protein, 9 aa, Homo sapiens
  Table 1.2; R3HDML; ENSG00000101074; HLA -B*35:01,HLA-B*35:03,HLA-B*54:01,HLA-B*55:01,HLA-B*56:01
MPNATPAPA

SEQ ID NO: 8934 - protein, 10 aa, Homo sapiens
  Table 1.2; R3HDML; ENSG00000101074; HLA -B*35:01,HLA-B*55:01
MPNATPAPAQ

SEQ ID NO: 8935 - protein, 11 aa, Homo sapiens
  Table 1.2; R3HDML; ENSG00000101074; HLA -B*56:01
MPNATPAPAQP

SEQ ID NO: 8936 - protein, 8 aa, Homo sapiens
  Table 1.2; R3HDML; ENSG00000101074; HLA -B*08:01,HLA-B*27:05,HLA-C*06:02
MRYVGQNL

SEQ ID NO: 8937 - protein, 9 aa, Homo sapiens
  Table 1.2; R3HDML; ENSG00000101074; HLA -A*03:01,HLA-A*31:01
MVWDKRLAR

SEQ ID NO: 8938 - protein, 8 aa, Homo sapiens
  Table 1.2; R3HDML; ENSG00000101074; HLA -B*51:01,HLA-B*54:01
NALIMPNA

SEQ ID NO: 8939 - protein, 8 aa, Homo sapiens
  Table 1.2; R3HDML; ENSG00000101074; HLA -B*15:03
NHIRASVY

SEQ ID NO: 8940 - protein, 9 aa, Homo sapiens
  Table 1.2; R3HDML; ENSG00000101074; HLA -A*01:01,HLA-A*26:01,HLA-A*29:02,HLA-A*30:02,HLA-A*32:01, HLA-B*15:01,HLA-C*07:04
NLSIHSGQY

SEQ ID NO: 8941 - protein, 10 aa, Homo sapiens
  Table 1.2; R3HDML; ENSG00000101074; HLA -B*27:02
PAQPESTAMR

SEQ ID NO: 8942 - protein, 9 aa, Homo sapiens
  Table 1.2; R3HDML; ENSG00000101074; HLA -A*02:01,HLA-A*02:03,HLA-A*02:04,HLA-A*23:01,HLA-A*24:02
PLLPSTVGL

SEQ ID NO: 8943 - protein, 8 aa, Homo sapiens
  Table 1.2; R3HDML; ENSG00000101074; HLA -B*35:01,HLA-B*35:03
QAVNALIM

SEQ ID NO: 8944 - protein, 10 aa, Homo sapiens
  Table 1.2; R3HDML; ENSG00000101074; HLA -A*26:01,HLA-A*29:02,HLA-A*30:02
QNLSIHSGQY

SEQ ID NO: 8945 - protein, 11 aa, Homo sapiens
  Table 1.2; R3HDML; ENSG00000101074; HLA -A*33:01,HLA-A*33:03
QNLSIHSGQYR

SEQ ID NO: 8946 - protein, 9 aa, Homo sapiens
  Table 1.2; R3HDML; ENSG00000101074; HLA -B*07:02,HLA-B*35:01,HLA-B*35:03
QPESTAMRL

SEQ ID NO: 8947 - protein, 10 aa, Homo sapiens
  Table 1.2; R3HDML; ENSG00000101074; HLA -B*07:02
QPESTAMRLL

SEQ ID NO: 8948 - protein, 9 aa, Homo sapiens
  Table 1.2; R3HDML; ENSG00000101074; HLA -A*23:01,HLA-A*24:02
QYRSVVDLM

SEQ ID NO: 8949 - protein, 9 aa, Homo sapiens
  Table 1.2; R3HDML; ENSG00000101074; HLA -A*30:02
RAAYLVCNY

SEQ ID NO: 8950 - protein, 9 aa, Homo sapiens
  Table 1.2; R3HDML; ENSG00000101074; HLA -B*57:01
RLARAAEAW

SEQ ID NO: 8951 - protein, 10 aa, Homo sapiens
  Table 1.2; R3HDML; ENSG00000101074; HLA -A*31:01
RLLSGLEVPR

SEQ ID NO: 8952 - protein, 11 aa, Homo sapiens
  Table 1.2; R3HDML; ENSG00000101074; HLA -A*02:04,HLA-A*03:01,HLA-A*29:02,HLA-A*30:02
RLLSGLEVPRY

SEQ ID NO: 8953 - protein, 10 aa, Homo sapiens
  Table 1.2; R3HDML; ENSG00000101074; HLA -B*57:01
RSVVDLMKSW

SEQ ID NO: 8954 - protein, 9 aa, Homo sapiens
  Table 1.2; R3HDML; ENSG00000101074; HLA -A*23:01,HLA-A*24:02,HLA-C*14:02
RYVGQNLSI

SEQ ID NO: 8955 - protein, 9 aa, Homo sapiens
  Table 1.2; R3HDML; ENSG00000101074; HLA -B*44:02
SEEKWHYLF

SEQ ID NO: 8956 - protein, 8 aa, Homo sapiens
  Table 1.2; R3HDML; ENSG00000101074; HLA -A*30:02,HLA-A*32:01,HLA-B*15:03,HLA-B*18:01,HLA-C*16:01
SGLEVPRY

SEQ ID NO: 8957 - protein, 9 aa, Homo sapiens
  Table 1.2; R3HDML; ENSG00000101074; HLA -A*31:01
SGLEVPRYR

SEQ ID NO: 8958 - protein, 8 aa, Homo sapiens
  Table 1.2; R3HDML; ENSG00000101074; HLA -B*08:01
SGQYRSVV

SEQ ID NO: 8959 - protein, 10 aa, Homo sapiens
  Table 1.2; R3HDML; ENSG00000101074; HLA -A*02:03
SIHSGQYRSV

SEQ ID NO: 8960 - protein, 9 aa, Homo sapiens
  Table 1.2; R3HDML; ENSG00000101074; HLA -A*25:01,HLA-A*32:01
SISVWGNTW

SEQ ID NO: 8961 - protein, 9 aa, Homo sapiens
  Table 1.2; R3HDML; ENSG00000101074; HLA -B*56:01
SPYKMGKPC

SEQ ID NO: 8962 - protein, 10 aa, Homo sapiens
  Table 1.2; R3HDML; ENSG00000101074; HLA -A*25:01,HLA-B*44:02,HLA-B*44:03,HLA-B*57:01,HLA-B*58:01, HLA-C*16:04
SSISVWGNTW

SEQ ID NO: 8963 - protein, 11 aa, Homo sapiens
  Table 1.2; R3HDML; ENSG00000101074; HLA -B*57:01
STVGLAGLLFW

SEQ ID NO: 8964 - protein, 8 aa, Homo sapiens
  Table 1.2; R3HDML; ENSG00000101074; HLA -B*07:02
SVRDMNAL

SEQ ID NO: 8965 - protein, 9 aa, Homo sapiens
  Table 1.2; R3HDML; ENSG00000101074; HLA -B*07:02
SVRDMNALL

SEQ ID NO: 8966 - protein, 11 aa, Homo sapiens
  Table 1.2; R3HDML; ENSG00000101074; HLA -A*29:02,HLA-A*30:02
SVRDMNALLDY

SEQ ID NO: 8967 - protein, 9 aa, Homo sapiens
  Table 1.2; R3HDML; ENSG00000101074; HLA -A*25:01,HLA-A*26:01,HLA-A*32:01,HLA-B*44:02,HLA-B*44:03, HLA-B*57:01,HLA-B*58:01
SVVDLMKSW

SEQ ID NO: 8968 - protein, 9 aa, Homo sapiens
  Table 1.2; R3HDML; ENSG00000101074; HLA -A*31:01
SVWGNTWHR

SEQ ID NO: 8969 - protein, 9 aa, Homo sapiens
  Table 1.2; R3HDML; ENSG00000101074; HLA -A*03:01,HLA-A*03:02,HLA-A*11:01,HLA-A*25:01,HLA-A*26:01, HLA-A*30:02,HLA-A*32:01,HLA-A*33:01,HLA-A*33:03,HLA-B*07:02, HLA-B*15:01,HLA-B*27:05,HLA-B*35:01,HLA-B*37:01,HLA-B*46:01,
  HLA-B*56:01,HLA-C*01:02,HLA-C*02:02,HLA-C*03:03,HLA-C*03:04, HLA-C*07:06
SVYPPAANM

SEQ ID NO: 8970 - protein, 11 aa, Homo sapiens
  Table 1.2; R3HDML; ENSG00000101074; HLA -A*01:01,HLA-A*03:01,HLA-A*03:02,HLA-A*11:01,HLA-A*25:01, HLA-A*26:01,HLA-A*29:02,HLA-A*30:02,HLA-A*31:01,HLA-A*32:01, HLA-B*15:01,HLA-B*15:03,HLA-B*35:01,HLA-B*46:01,HLA-B*57:01,
  HLA-B*58:01,HLA-C*02:02,HLA-C*07:06,HLA-C*12:03,HLA-C*16:04
SVYPPAANMEY

SEQ ID NO: 8971 - protein, 9 aa, Homo sapiens
  Table 1.2; R3HDML; ENSG00000101074; HLA -B*08:01
TAMRLLSGL

SEQ ID NO: 8972 - protein, 9 aa, Homo sapiens
  Table 1.2; R3HDML; ENSG00000101074; HLA -B*55:01,HLA-B*56:01
TPAPAQPES

SEQ ID NO: 8973 - protein, 11 aa, Homo sapiens
  Table 1.2; R3HDML; ENSG00000101074; HLA -B*54:01,HLA-B*55:01,HLA-B*56:01
TPAPAQPESTA

SEQ ID NO: 8974 - protein, 10 aa, Homo sapiens
  Table 1.2; R3HDML; ENSG00000101074; HLA -A*31:01
TQMVWASSNR

SEQ ID NO: 8975 - protein, 11 aa, Homo sapiens
  Table 1.2; R3HDML; ENSG00000101074; HLA -B*38:01
TQMVWASSNRL

SEQ ID NO: 8976 - protein, 9 aa, Homo sapiens
  Table 1.2; R3HDML; ENSG00000101074; HLA -A*24:02,HLA-B*57:01
VGLAGLLFW

SEQ ID NO: 8977 - protein, 8 aa, Homo sapiens
  Table 1.2; R3HDML; ENSG00000101074; HLA -A*23:01,HLA-A*24:02,HLA-C*01:02,HLA-C*04:01,HLA-C*14:02
VYPPAANM

SEQ ID NO: 8978 - protein, 10 aa, Homo sapiens
  Table 1.2; R3HDML; ENSG00000101074; HLA -A*23:01,HLA-A*24:02,HLA-A*29:02,HLA-A*30:02,HLA-B*15:01, HLA-B*15:03,HLA-B*46:01,HLA-C*01:02,HLA-C*14:02
VYPPAANMEY

SEQ ID NO: 8979 - protein, 11 aa, Homo sapiens
  Table 1.2; R3HDML; ENSG00000101074; HLA -A*23:01,HLA-A*24:02
VYPPAANMEYM

SEQ ID NO: 8980 - protein, 9 aa, Homo sapiens
  Table 1.2; R3HDML; ENSG00000101074; HLA -A*02:01,HLA-A*02:03
YLFPAPRDC

SEQ ID NO: 8981 - protein, 9 aa, Homo sapiens
  Table 1.2; R3HDML; ENSG00000101074; HLA -A*01:01,HLA-A*26:01,HLA-A*29:02,HLA-B*35:01,HLA-B*35:03, HLA-B*46:01,HLA-B*51:01,HLA-B*55:01
YPPAANMEY

SEQ ID NO: 8982 - protein, 10 aa, Homo sapiens
  Table 1.2; R3HDML; ENSG00000101074; HLA -B*35:03
YPPAANMEYM

SEQ ID NO: 8983 - protein, 9 aa, Homo sapiens
  Table 1.2; R3HDML; ENSG00000101074; HLA -B*27:05
YRSVVDLMK

SEQ ID NO: 8984 - protein, 8 aa, Homo sapiens
  Table 1.2; R3HDML; ENSG00000101074; HLA -B*13:02,HLA-B*51:01
YVGQNLSI

SEQ ID NO: 8985 - protein, 8 aa, Homo sapiens
  Table 1.2; SLC7A13; ENSG00000164893; HLA -B*37:01
ADRAFPSL

SEQ ID NO: 8986 - protein, 8 aa, Homo sapiens
  Table 1.2; SLC7A13; ENSG00000164893; HLA -B*49:01
AEISISFP

SEQ ID NO: 8987 - protein, 9 aa, Homo sapiens
  Table 1.2; SLC7A13; ENSG00000164893; HLA -B*49:01
AEISISFPC

SEQ ID NO: 8988 - protein, 9 aa, Homo sapiens
  Table 1.2; SLC7A13; ENSG00000164893; HLA -A*30:01,HLA-B*27:02,HLA-B*37:01,HLA-B*40:01,HLA-B*40:02, HLA-B*44:02,HLA-B*44:03,HLA-B*49:01,HLA-C*16:04
AELPDISHL

SEQ ID NO: 8989 - protein, 10 aa, Homo sapiens
  Table 1.2; SLC7A13; ENSG00000164893; HLA -A*30:01,HLA-B*40:01,HLA-B*44:02,HLA-B*44:03,HLA-B*49:01
AELPDISHLI

SEQ ID NO: 8990 - protein, 8 aa, Homo sapiens
  Table 1.2; SLC7A13; ENSG00000164893; HLA -B*18:01,HLA-B*37:01,HLA-B*44:02
AEYSIQPF

SEQ ID NO: 8991 - protein, 9 aa, Homo sapiens
  Table 1.2; SLC7A13; ENSG00000164893; HLA -A*30:01,HLA-B*27:02,HLA-B*37:01,HLA-B*40:01,HLA-B*44:02, HLA-B*44:03,HLA-B*49:01,HLA-C*16:04
AEYSIQPFF

SEQ ID NO: 8992 - protein, 9 aa, Homo sapiens
  Table 1.2; SLC7A13; ENSG00000164893; HLA -C*04:01
AFDAELPDI

SEQ ID NO: 8993 - protein, 9 aa, Homo sapiens
  Table 1.2; SLC7A13; ENSG00000164893; HLA -A*23:01
AFLNLWTSL

SEQ ID NO: 8994 - protein, 10 aa, Homo sapiens
  Table 1.2; SLC7A13; ENSG00000164893; HLA -A*30:02
AGQALLLAEY

SEQ ID NO: 8995 - protein, 9 aa, Homo sapiens
  Table 1.2; SLC7A13; ENSG00000164893; HLA -A*01:01,HLA-A*03:01,HLA-A*29:02,HLA-A*30:02,HLA-A*32:01, HLA-B*15:01,HLA-B*46:01
AIFQGYFAY

SEQ ID NO: 8996 - protein, 9 aa, Homo sapiens
  Table 1.2; SLC7A13; ENSG00000164893; HLA -A*02:01,HLA-A*02:03,HLA-A*02:04,HLA-A*02:07,HLA-A*23:01, HLA-A*24:02,HLA-A*25:01,HLA-A*30:01,HLA-A*32:01,HLA-B*07:02, HLA-B*15:01,HLA-B*15:03,HLA-B*37:01,HLA-B*40:01,HLA-B*46:01,
  HLA-B*55:01,HLA-B*58:01,HLA-C*01:02,HLA-C*03:03,HLA-C*03:04, HLA-C*14:02
AILAMTSTL

SEQ ID NO: 8997 - protein, 10 aa, Homo sapiens
  Table 1.2; SLC7A13; ENSG00000164893; HLA -A*02:04
ALAMLWIVGI

SEQ ID NO: 8998 - protein, 9 aa, Homo sapiens
  Table 1.2; SLC7A13; ENSG00000164893; HLA -A*02:01,HLA-A*02:04
ALLLAEYSI

SEQ ID NO: 8999 - protein, 9 aa, Homo sapiens
  Table 1.2; SLC7A13; ENSG00000164893; HLA -A*01:01,HLA-A*03:01,HLA-A*23:01,HLA-A*26:01,HLA-A*29:02, HLA-A*30:02,HLA-A*32:01,HLA-B*15:01,HLA-B*15:03,HLA-B*46:01, HLA-C*02:02,HLA-C*07:04,HLA-C*16:04
ALPLVTVVY

SEQ ID NO: 9000 - protein, 10 aa, Homo sapiens
  Table 1.2; SLC7A13; ENSG00000164893; HLA -A*02:07
ALPLVTVVYL

SEQ ID NO: 9001 - protein, 9 aa, Homo sapiens
  Table 1.2; SLC7A13; ENSG00000164893; HLA -A*02:01,HLA-A*02:03,HLA-B*55:01
AMTSTLCSA

SEQ ID NO: 9002 - protein, 9 aa, Homo sapiens
  Table 1.2; SLC7A13; ENSG00000164893; HLA -A*32:01,HLA-B*13:02,HLA-B*58:01
ASSVLKVSI

SEQ ID NO: 9003 - protein, 9 aa, Homo sapiens
  Table 1.2; SLC7A13; ENSG00000164893; HLA -A*29:02
AWFEKMTCY

SEQ ID NO: 9004 - protein, 8 aa, Homo sapiens
  Table 1.2; SLC7A13; ENSG00000164893; HLA -C*14:02
AYSGGACF

SEQ ID NO: 9005 - protein, 11 aa, Homo sapiens
  Table 1.2; SLC7A13; ENSG00000164893; HLA -A*24:02
AYSGGACFTLI

SEQ ID NO: 9006 - protein, 8 aa, Homo sapiens
  Table 1.2; SLC7A13; ENSG00000164893; HLA -B*46:01,HLA-C*01:02,HLA-C*14:02
CMNVGVSL

SEQ ID NO: 9007 - protein, 9 aa, Homo sapiens
  Table 1.2; SLC7A13; ENSG00000164893; HLA -A*23:01,HLA-A*25:01,HLA-A*30:02,HLA-A*32:01,HLA-B*15:01, HLA-B*15:03,HLA-B*35:01,HLA-B*46:01,HLA-B*57:01,HLA-B*58:01, HLA-C*02:02,HLA-C*12:03,HLA-C*16:01,HLA-C*16:04
CSAEISISF

SEQ ID NO: 9008 - protein, 9 aa, Homo sapiens
  Table 1.2; SLC7A13; ENSG00000164893; HLA -A*24:02
CYLQLLFNI

SEQ ID NO: 9009 - protein, 11 aa, Homo sapiens
  Table 1.2; SLC7A13; ENSG00000164893; HLA -A*33:01
DAELPDISHLI

SEQ ID NO: 9010 - protein, 10 aa, Homo sapiens
  Table 1.2; SLC7A13; ENSG00000164893; HLA -A*68:01
DAVAITWADR

SEQ ID NO: 9011 - protein, 9 aa, Homo sapiens
  Table 1.2; SLC7A13; ENSG00000164893; HLA -A*25:01,HLA-A*68:02
DISHLIQAI

SEQ ID NO: 9012 - protein, 8 aa, Homo sapiens
  Table 1.2; SLC7A13; ENSG00000164893; HLA -B*08:01
DRGEKIQL

SEQ ID NO: 9013 - protein, 9 aa, Homo sapiens
  Table 1.2; SLC7A13; ENSG00000164893; HLA -B*08:01
ELKKPRTTI

SEQ ID NO: 9014 - protein, 9 aa, Homo sapiens
  Table 1.2; SLC7A13; ENSG00000164893; HLA -A*02:07,HLA-A*23:01,HLA-A*24:02,HLA-A*26:01,HLA-A*68:02, HLA-B*13:02
ELPDISHLI

SEQ ID NO: 9015 - protein, 11 aa, Homo sapiens
  Table 1.2; SLC7A13; ENSG00000164893; HLA -A*02:07,HLA-A*68:02
ELPDISHLIQA

SEQ ID NO: 9016 - protein, 8 aa, Homo sapiens
  Table 1.2; SLC7A13; ENSG00000164893; HLA -B*35:01
EPNLSIPY

SEQ ID NO: 9017 - protein, 8 aa, Homo sapiens
  Table 1.2; SLC7A13; ENSG00000164893; HLA -A*23:01
FAISTSLF

SEQ ID NO: 9018 - protein, 8 aa, Homo sapiens
  Table 1.2; SLC7A13; ENSG00000164893; HLA -C*03:03,HLA-C*03:04
FAYSGGAC

SEQ ID NO: 9019 - protein, 9 aa, Homo sapiens
  Table 1.2; SLC7A13; ENSG00000164893; HLA -A*23:01,HLA-A*25:01,HLA-A*26:01,HLA-B*15:01,HLA-B*15:03, HLA-B*35:01,HLA-B*35:03,HLA-B*39:01,HLA-B*46:01,HLA-B*51:01, HLA-B*54:01,HLA-B*58:01,HLA-C*02:02,HLA-C*03:03,HLA-C*03:04,
  HLA-C*05:01,HLA-C*07:02,HLA-C*14:02,HLA-C*16:01,HLA-C*16:04
FAYSGGACF

SEQ ID NO: 9020 - protein, 9 aa, Homo sapiens
  Table 1.2; SLC7A13; ENSG00000164893; HLA -B*15:01,HLA-B*46:01,HLA-C*07:04
FISLTGVVF

SEQ ID NO: 9021 - protein, 8 aa, Homo sapiens
  Table 1.2; SLC7A13; ENSG00000164893; HLA -A*02:01
FLGSGVVA

SEQ ID NO: 9022 - protein, 9 aa, Homo sapiens
  Table 1.2; SLC7A13; ENSG00000164893; HLA -A*02:01
FLGSGVVAG

SEQ ID NO: 9023 - protein, 9 aa, Homo sapiens
  Table 1.2; SLC7A13; ENSG00000164893; HLA -A*02:01,HLA-A*02:03,HLA-A*02:04
FLLINIIGA

SEQ ID NO: 9024 - protein, 9 aa, Homo sapiens
  Table 1.2; SLC7A13; ENSG00000164893; HLA -A*02:04
FLNLWTSLF

SEQ ID NO: 9025 - protein, 9 aa, Homo sapiens
  Table 1.2; SLC7A13; ENSG00000164893; HLA -A*02:01,HLA-A*02:03,HLA-A*02:04,HLA-A*02:07,HLA-A*68:02
FLSFPLATI

SEQ ID NO: 9026 - protein, 8 aa, Homo sapiens
  Table 1.2; SLC7A13; ENSG00000164893; HLA -B*35:01
FPCSGAQY

SEQ ID NO: 9027 - protein, 9 aa, Homo sapiens
  Table 1.2; SLC7A13; ENSG00000164893; HLA -A*01:01,HLA-A*29:02,HLA-B*35:01
FPCSGAQYY

SEQ ID NO: 9028 - protein, 8 aa, Homo sapiens
  Table 1.2; SLC7A13; ENSG00000164893; HLA -B*35:03,HLA-B*51:01,HLA-B*54:01,HLA-B*56:01
FPLATIVI

SEQ ID NO: 9029 - protein, 10 aa, Homo sapiens
  Table 1.2; SLC7A13; ENSG00000164893; HLA -B*54:01,HLA-B*56:01
FPLATIVIDV

SEQ ID NO: 9030 - protein, 11 aa, Homo sapiens
  Table 1.2; SLC7A13; ENSG00000164893; HLA -B*35:01,HLA-B*54:01
FPLATIVIDVG

SEQ ID NO: 9031 - protein, 9 aa, Homo sapiens
  Table 1.2; SLC7A13; ENSG00000164893; HLA -B*35:03
FPSCSVPKL

SEQ ID NO: 9032 - protein, 8 aa, Homo sapiens
  Table 1.2; SLC7A13; ENSG00000164893; HLA -B*35:03
FPSLAWIM

SEQ ID NO: 9033 - protein, 9 aa, Homo sapiens
  Table 1.2; SLC7A13; ENSG00000164893; HLA -A*02:01,HLA-A*30:01,HLA-B*13:02,HLA-B*27:05,HLA-B*35:03, HLA-B*38:01,HLA-B*39:01
FQNAFDAEL

SEQ ID NO: 9034 - protein, 9 aa, Homo sapiens
  Table 1.2; SLC7A13; ENSG00000164893; HLA -B*57:01
FSNLLISIF

SEQ ID NO: 9035 - protein, 10 aa, Homo sapiens
  Table 1.2; SLC7A13; ENSG00000164893; HLA -B*27:02
FSNLLISIFK

SEQ ID NO: 9036 - protein, 9 aa, Homo sapiens
  Table 1.2; SLC7A13; ENSG00000164893; HLA -A*02:01,HLA-A*02:03,HLA-A*68:02,HLA-B*46:01,HLA-B*51:01, HLA-B*54:01,HLA-B*56:01,HLA-C*02:02,HLA-C*03:03,HLA-C*03:04
FTALPLVTV

SEQ ID NO: 9037 - protein, 10 aa, Homo sapiens
  Table 1.2; SLC7A13; ENSG00000164893; HLA -A*68:02
FTALPLVTVV

SEQ ID NO: 9038 - protein, 11 aa, Homo sapiens
  Table 1.2; SLC7A13; ENSG00000164893; HLA -A*01:01,HLA-A*29:02
FTALPLVTVVY

SEQ ID NO: 9039 - protein, 8 aa, Homo sapiens
  Table 1.2; SLC7A13; ENSG00000164893; HLA -B*40:02,HLA-B*46:01,HLA-C*03:03,HLA-C*03:04,HLA-C*14:02
FTLIAGEL

SEQ ID NO: 9040 - protein, 9 aa, Homo sapiens
  Table 1.2; SLC7A13; ENSG00000164893; HLA -A*01:01,HLA-A*11:01
FTLIAGELK

SEQ ID NO: 9041 - protein, 8 aa, Homo sapiens
  Table 1.2; SLC7A13; ENSG00000164893; HLA -B*08:01
FVSPKGVL

SEQ ID NO: 9042 - protein, 10 aa, Homo sapiens
  Table 1.2; SLC7A13; ENSG00000164893; HLA -A*01:01,HLA-A*03:01,HLA-A*25:01,HLA-A*26:01,HLA-A*29:02, HLA-A*30:02,HLA-A*32:01,HLA-B*15:01,HLA-B*35:01,HLA-B*46:01, HLA-C*02:02
FVSPKGVLAY

SEQ ID NO: 9043 - protein, 8 aa, Homo sapiens
  Table 1.2; SLC7A13; ENSG00000164893; HLA -A*23:01,HLA-A*24:02
FYIPLIHF

SEQ ID NO: 9044 - protein, 9 aa, Homo sapiens
  Table 1.2; SLC7A13; ENSG00000164893; HLA -A*29:02
FYIPLIHFK

SEQ ID NO: 9045 - protein, 10 aa, Homo sapiens
  Table 1.2; SLC7A13; ENSG00000164893; HLA -A*24:02
FYIPLIHFKI

SEQ ID NO: 9046 - protein, 9 aa, Homo sapiens
  Table 1.2; SLC7A13; ENSG00000164893; HLA -A*03:01,HLA-A*03:02,HLA-A*11:01,HLA-B*27:02
GAGIFVSPK

SEQ ID NO: 9047 - protein, 9 aa, Homo sapiens
  Table 1.2; SLC7A13; ENSG00000164893; HLA -A*31:01
GAQYYFLKR

SEQ ID NO: 9048 - protein, 9 aa, Homo sapiens
  Table 1.2; SLC7A13; ENSG00000164893; HLA -A*02:01,HLA-A*02:03,HLA-B*13:02
GIFVSPKGV

SEQ ID NO: 9049 - protein, 9 aa, Homo sapiens
  Table 1.2; SLC7A13; ENSG00000164893; HLA -A*02:01,HLA-A*02:03,HLA-A*02:04,HLA-A*02:07
GLLFYIPLI

SEQ ID NO: 9050 - protein, 8 aa, Homo sapiens
  Table 1.2; SLC7A13; ENSG00000164893; HLA -B*13:02
GLVVIPLV

SEQ ID NO: 9051 - protein, 9 aa, Homo sapiens
  Table 1.2; SLC7A13; ENSG00000164893; HLA -A*03:01,HLA-A*03:02,HLA-A*11:01
GLVVIPLVK

SEQ ID NO: 9052 - protein, 9 aa, Homo sapiens
  Table 1.2; SLC7A13; ENSG00000164893; HLA -A*26:01,HLA-A*29:02,HLA-A*30:02,HLA-A*32:01,HLA-B*13:02, HLA-B*15:01,HLA-B*15:03,HLA-B*18:01,HLA-B*27:02,HLA-B*27:05, HLA-B*39:01,HLA-B*44:02,HLA-B*44:03,HLA-B*46:01,HLA-C*02:02,
  HLA-C*07:04,HLA-C*16:04
GQALLLAEY

SEQ ID NO: 9053 - protein, 11 aa, Homo sapiens
  Table 1.2; SLC7A13; ENSG00000164893; HLA -B*13:02
GQALLLAEYSI

SEQ ID NO: 9054 - protein, 10 aa, Homo sapiens
  Table 1.2; SLC7A13; ENSG00000164893; HLA -A*02:04,HLA-A*30:01,HLA-B*13:02,HLA-B*15:01
GQLPLLFNTL

SEQ ID NO: 9055 - protein, 10 aa, Homo sapiens
  Table 1.2; SLC7A13; ENSG00000164893; HLA -B*57:01
GSTVAFLNLW

SEQ ID NO: 9056 - protein, 9 aa, Homo sapiens
  Table 1.2; SLC7A13; ENSG00000164893; HLA -A*68:02
GTSFLLINI

SEQ ID NO: 9057 - protein, 9 aa, Homo sapiens
  Table 1.2; SLC7A13; ENSG00000164893; HLA -B*40:01
GVVAGQALL

SEQ ID NO: 9058 - protein, 9 aa, Homo sapiens
  Table 1.2; SLC7A13; ENSG00000164893; HLA -A*03:01,HLA-A*11:01
GVVFLIRGK

SEQ ID NO: 9059 - protein, 11 aa, Homo sapiens
  Table 1.2; SLC7A13; ENSG00000164893; HLA -A*24:02
GYFAYSGGACF

SEQ ID NO: 9060 - protein, 10 aa, Homo sapiens
  Table 1.2; SLC7A13; ENSG00000164893; HLA -A*26:01,HLA-A*29:02
HLIQAIFQGY

SEQ ID NO: 9061 - protein, 9 aa, Homo sapiens
  Table 1.2; SLC7A13; ENSG00000164893; HLA -A*26:01,HLA-A*32:01,HLA-A*68:02,HLA-B*35:01,HLA-B*35:03, HLA-B*38:01,HLA-B*39:01,HLA-B*40:01,HLA-B*46:01,HLA-B*57:01, HLA-B*58:01,HLA-C*02:02,HLA-C*03:03,HLA-C*03:04,HLA-C*12:03,
  HLA-C*16:02
HSSPFTAVL

SEQ ID NO: 9062 - protein, 10 aa, Homo sapiens
  Table 1.2; SLC7A13; ENSG00000164893; HLA -A*68:02
HSSPFTAVLL

SEQ ID NO: 9063 - protein, 9 aa, Homo sapiens
  Table 1.2; SLC7A13; ENSG00000164893; HLA -A*31:01,HLA-A*33:01,HLA-A*33:03
IAGELKKPR

SEQ ID NO: 9064 - protein, 8 aa, Homo sapiens
  Table 1.2; SLC7A13; ENSG00000164893; HLA -B*13:02,HLA-B*49:01,HLA-B*51:01,HLA-C*12:03,HLA-C*16:02
IASSVLKV

SEQ ID NO: 9065 - protein, 8 aa, Homo sapiens
  Table 1.2; SLC7A13; ENSG00000164893; HLA -A*29:02
IFQGYFAY

SEQ ID NO: 9066 - protein, 9 aa, Homo sapiens
  Table 1.2; SLC7A13; ENSG00000164893; HLA -A*23:01,HLA-C*14:02
IFVSPKGVL

SEQ ID NO: 9067 - protein, 11 aa, Homo sapiens
  Table 1.2; SLC7A13; ENSG00000164893; HLA -A*23:01,HLA-A*24:02,HLA-A*29:02,HLA-A*30:02
IFVSPKGVLAY

SEQ ID NO: 9068 - protein, 9 aa, Homo sapiens
  Table 1.2; SLC7A13; ENSG00000164893; HLA -B*27:05
IGAGIFVSP

SEQ ID NO: 9069 - protein, 10 aa, Homo sapiens
  Table 1.2; SLC7A13; ENSG00000164893; HLA -B*27:02
IGAGIFVSPK

SEQ ID NO: 9070 - protein, 8 aa, Homo sapiens
  Table 1.2; SLC7A13; ENSG00000164893; HLA -B*15:01,HLA-B*46:01
ILAMTSTL

SEQ ID NO: 9071 - protein, 10 aa, Homo sapiens
  Table 1.2; SLC7A13; ENSG00000164893; HLA -A*02:01,HLA-A*02:03,HLA-A*02:04
ILSFISLTGV

SEQ ID NO: 9072 - protein, 9 aa, Homo sapiens
  Table 1.2; SLC7A13; ENSG00000164893; HLA -A*02:01,HLA-A*02:04,HLA-B*13:02,HLA-B*35:03,HLA-B*38:01, HLA-B*55:01
ILSSDAVAI

SEQ ID NO: 9073 - protein, 11 aa, Homo sapiens
  Table 1.2; SLC7A13; ENSG00000164893; HLA -A*32:01,HLA-B*44:02,HLA-B*44:03,HLA-B*57:01,HLA-B*58:01
ILSSDAVAITW

SEQ ID NO: 9074 - protein, 9 aa, Homo sapiens
  Table 1.2; SLC7A13; ENSG00000164893; HLA -A*02:01,HLA-A*02:04,HLA-B*13:02
ILTSLIDLI

SEQ ID NO: 9075 - protein, 10 aa, Homo sapiens
  Table 1.2; SLC7A13; ENSG00000164893; HLA -A*02:03
ILTSRGVKEV

SEQ ID NO: 9076 - protein, 10 aa, Homo sapiens
  Table 1.2; SLC7A13; ENSG00000164893; HLA -A*02:07,HLA-C*01:02
IMPFAISTSL

SEQ ID NO: 9077 - protein, 11 aa, Homo sapiens
  Table 1.2; SLC7A13; ENSG00000164893; HLA -A*24:02
IMPFAISTSLF

SEQ ID NO: 9078 - protein, 9 aa, Homo sapiens
  Table 1.2; SLC7A13; ENSG00000164893; HLA -B*07:02,HLA-B*08:01,HLA-C*07:02
IPKCIFTAL

SEQ ID NO: 9079 - protein, 8 aa, Homo sapiens
  Table 1.2; SLC7A13; ENSG00000164893; HLA -B*51:01
IPLIHFKI

SEQ ID NO: 9080 - protein, 9 aa, Homo sapiens
  Table 1.2; SLC7A13; ENSG00000164893; HLA -B*51:01,HLA-B*56:01
IPLVKSPNV

SEQ ID NO: 9081 - protein, 9 aa, Homo sapiens
  Table 1.2; SLC7A13; ENSG00000164893; HLA -B*35:01,HLA-B*51:01,HLA-B*54:01
IPYKVFLSF

SEQ ID NO: 9082 - protein, 8 aa, Homo sapiens
  Table 1.2; SLC7A13; ENSG00000164893; HLA -A*30:02,HLA-A*32:01,HLA-B*15:01,HLA-B*15:03,HLA-B*18:01
IQAIFQGY

SEQ ID NO: 9083 - protein, 9 aa, Homo sapiens
  Table 1.2; SLC7A13; ENSG00000164893; HLA -B*15:03
IQAIFQGYF

SEQ ID NO: 9084 - protein, 10 aa, Homo sapiens
  Table 1.2; SLC7A13; ENSG00000164893; HLA -A*01:01,HLA-A*29:02,HLA-A*30:02,HLA-B*15:01,HLA-B*15:03, HLA-B*46:01,HLA-B*58:01
ISFPCSGAQY

SEQ ID NO: 9085 - protein, 11 aa, Homo sapiens
  Table 1.2; SLC7A13; ENSG00000164893; HLA -A*01:01,HLA-A*29:02,HLA-A*30:02
ISFPCSGAQYY

SEQ ID NO: 9086 - protein, 9 aa, Homo sapiens
  Table 1.2; SLC7A13; ENSG00000164893; HLA -A*23:01,HLA-A*24:02,HLA-B*57:01,HLA-B*58:01
ISHLIQAIF

SEQ ID NO: 9087 - protein, 8 aa, Homo sapiens
  Table 1.2; SLC7A13; ENSG00000164893; HLA -A*23:01,HLA-B*15:03,HLA-B*46:01,HLA-B*57:01,HLA-B*58:01
ISLTGVVF

SEQ ID NO: 9088 - protein, 9 aa, Homo sapiens
  Table 1.2; SLC7A13; ENSG00000164893; HLA -A*23:01,HLA-B*58:01
ISLTGVVFL

SEQ ID NO: 9089 - protein, 9 aa, Homo sapiens
  Table 1.2; SLC7A13; ENSG00000164893; HLA -A*23:01,HLA-A*24:02,HLA-B*58:01
ISTSLFSNL

SEQ ID NO: 9090 - protein, 8 aa, Homo sapiens
  Table 1.2; SLC7A13; ENSG00000164893; HLA -A*31:01,HLA-A*33:01,HLA-A*33:03
IVGILTSR

SEQ ID NO: 9091 - protein, 9 aa, Homo sapiens
  Table 1.2; SLC7A13; ENSG00000164893; HLA -A*02:01,HLA-A*02:03,HLA-A*02:07,HLA-A*23:01,HLA-A*26:01, HLA-A*30:01,HLA-A*32:01,HLA-A*68:02,HLA-B*13:02,HLA-B*46:01, HLA-B*49:01,HLA-C*02:02,HLA-C*03:03,HLA-C*03:04
IVIDVGLVV

SEQ ID NO: 9092 - protein, 10 aa, Homo sapiens
  Table 1.2; SLC7A13; ENSG00000164893; HLA -A*02:01,HLA-A*23:01,HLA-A*25:01,HLA-A*68:02
IVIDVGLVVI

SEQ ID NO: 9093 - protein, 10 aa, Homo sapiens
  Table 1.2; SLC7A13; ENSG00000164893; HLA -A*23:01
IYLASQEGQL

SEQ ID NO: 9094 - protein, 9 aa, Homo sapiens
  Table 1.2; SLC7A13; ENSG00000164893; HLA -A*29:02,HLA-A*30:02,HLA-A*32:01,HLA-B*57:01,HLA-B*58:01
KSPNVHYVY

SEQ ID NO: 9095 - protein, 10 aa, Homo sapiens
  Table 1.2; SLC7A13; ENSG00000164893; HLA -A*02:07
KSPNVHYVYV

SEQ ID NO: 9096 - protein, 8 aa, Homo sapiens
  Table 1.2; SLC7A13; ENSG00000164893; HLA -B*08:01,HLA-B*46:01,HLA-B*51:01
LAIILTSL

SEQ ID NO: 9097 - protein, 9 aa, Homo sapiens
  Table 1.2; SLC7A13; ENSG00000164893; HLA -B*51:01
LAIILTSLI

SEQ ID NO: 9098 - protein, 10 aa, Homo sapiens
  Table 1.2; SLC7A13; ENSG00000164893; HLA -B*54:01
LAMTSTLCSA

SEQ ID NO: 9099 - protein, 8 aa, Homo sapiens
  Table 1.2; SLC7A13; ENSG00000164893; HLA -B*51:01
LAYSCMNV

SEQ ID NO: 9100 - protein, 9 aa, Homo sapiens
  Table 1.2; SLC7A13; ENSG00000164893; HLA -C*14:02
LFLGSGVVA

SEQ ID NO: 9101 - protein, 9 aa, Homo sapiens
  Table 1.2; SLC7A13; ENSG00000164893; HLA -A*23:01
LFSNLLISI

SEQ ID NO: 9102 - protein, 9 aa, Homo sapiens
  Table 1.2; SLC7A13; ENSG00000164893; HLA -A*24:02,HLA-A*29:02
LFYIPLIHF

SEQ ID NO: 9103 - protein, 9 aa, Homo sapiens
  Table 1.2; SLC7A13; ENSG00000164893; HLA -B*27:05
LGSGVVAGQ

SEQ ID NO: 9104 - protein, 9 aa, Homo sapiens
  Table 1.2; SLC7A13; ENSG00000164893; HLA -A*02:07
LIDLINYIF

SEQ ID NO: 9105 - protein, 10 aa, Homo sapiens
  Table 1.2; SLC7A13; ENSG00000164893; HLA -A*02:07
LIDLINYIFF

SEQ ID NO: 9106 - protein, 9 aa, Homo sapiens
  Table 1.2; SLC7A13; ENSG00000164893; HLA -A*01:01,HLA-A*26:01,HLA-A*29:02,HLA-A*30:02,HLA-A*32:01, HLA-B*15:01,HLA-B*46:01
LIQAIFQGY

SEQ ID NO: 9107 - protein, 8 aa, Homo sapiens
  Table 1.2; SLC7A13; ENSG00000164893; HLA -A*02:04
LLFYIPLI

SEQ ID NO: 9108 - protein, 10 aa, Homo sapiens
  Table 1.2; SLC7A13; ENSG00000164893; HLA -A*02:04,HLA-A*02:07
LLFYIPLIHF

SEQ ID NO: 9109 - protein, 10 aa, Homo sapiens
  Table 1.2; SLC7A13; ENSG00000164893; HLA -A*02:01,HLA-A*02:03,HLA-A*02:04
LLINIIGAGI

SEQ ID NO: 9110 - protein, 8 aa, Homo sapiens
  Table 1.2; SLC7A13; ENSG00000164893; HLA -A*02:04
LLVNISYL

SEQ ID NO: 9111 - protein, 11 aa, Homo sapiens
  Table 1.2; SLC7A13; ENSG00000164893; HLA -A*02:04
LLVNISYLTVL

SEQ ID NO: 9112 - protein, 9 aa, Homo sapiens
  Table 1.2; SLC7A13; ENSG00000164893; HLA -A*31:01
LMIGILRRR

SEQ ID NO: 9113 - protein, 8 aa, Homo sapiens
  Table 1.2; SLC7A13; ENSG00000164893; HLA -B*51:01
LPDISHLI

SEQ ID NO: 9114 - protein, 10 aa, Homo sapiens
  Table 1.2; SLC7A13; ENSG00000164893; HLA -B*54:01,HLA-B*56:01
LPDISHLIQA

SEQ ID NO: 9115 - protein, 8 aa, Homo sapiens
  Table 1.2; SLC7A13; ENSG00000164893; HLA -B*08:01
LPKKCLAL

SEQ ID NO: 9116 - protein, 8 aa, Homo sapiens
  Table 1.2; SLC7A13; ENSG00000164893; HLA -B*07:02,HLA-B*08:01,HLA-B*35:01,HLA-B*35:03,HLA-B*51:01, HLA-B*54:01
LPLLFNTL

SEQ ID NO: 9117 - protein, 8 aa, Homo sapiens
  Table 1.2; SLC7A13; ENSG00000164893; HLA -B*15:03,HLA-B*18:01,HLA-B*35:01,HLA-B*51:01,HLA-B*55:01
LPLVTVVY

SEQ ID NO: 9118 - protein, 9 aa, Homo sapiens
  Table 1.2; SLC7A13; ENSG00000164893; HLA -B*35:01,HLA-B*35:03,HLA-B*51:01
LPLVTVVYL

SEQ ID NO: 9119 - protein, 8 aa, Homo sapiens
  Table 1.2; SLC7A13; ENSG00000164893; HLA -B*15:01,HLA-B*15:03
LQIASSVL

SEQ ID NO: 9120 - protein, 9 aa, Homo sapiens
  Table 1.2; SLC7A13; ENSG00000164893; HLA -A*11:01
LQIASSVLK

SEQ ID NO: 9121 - protein, 10 aa, Homo sapiens
  Table 1.2; SLC7A13; ENSG00000164893; HLA -A*02:03,HLA-B*13:02
LQIASSVLKV

SEQ ID NO: 9122 - protein, 9 aa, Homo sapiens
  Table 1.2; SLC7A13; ENSG00000164893; HLA -A*02:03,HLA-A*68:02
LSFISLTGV

SEQ ID NO: 9123 - protein, 11 aa, Homo sapiens
  Table 1.2; SLC7A13; ENSG00000164893; HLA -B*57:01
LSFISLTGVVF

SEQ ID NO: 9124 - protein, 9 aa, Homo sapiens
  Table 1.2; SLC7A13; ENSG00000164893; HLA -C*12:03
LSFPLATIV

SEQ ID NO: 9125 - protein, 10 aa, Homo sapiens
  Table 1.2; SLC7A13; ENSG00000164893; HLA -A*23:01,HLA-A*25:01,HLA-B*27:02,HLA-B*44:02,HLA-B*57:01, HLA-B*58:01
LSSDAVAITW

SEQ ID NO: 9126 - protein, 10 aa, Homo sapiens
  Table 1.2; SLC7A13; ENSG00000164893; HLA -A*01:01
LTSLIDLINY

SEQ ID NO: 9127 - protein, 11 aa, Homo sapiens
  Table 1.2; SLC7A13; ENSG00000164893; HLA -B*57:01
LTSRGVKEVTW

SEQ ID NO: 9128 - protein, 9 aa, Homo sapiens
  Table 1.2; SLC7A13; ENSG00000164893; HLA -A*30:02,HLA-A*32:01,HLA-B*15:01,HLA-B*46:01
LVKSPNVHY

SEQ ID NO: 9129 - protein, 11 aa, Homo sapiens
  Table 1.2; SLC7A13; ENSG00000164893; HLA -A*29:02
LVKSPNVHYVY

SEQ ID NO: 9130 - protein, 9 aa, Homo sapiens
  Table 1.2; SLC7A13; ENSG00000164893; HLA -A*01:01,HLA-A*29:02
LVLSGLLFY

SEQ ID NO: 9131 - protein, 10 aa, Homo sapiens
  Table 1.2; SLC7A13; ENSG00000164893; HLA -A*02:04
LVLSGLLFYI

SEQ ID NO: 9132 - protein, 9 aa, Homo sapiens
  Table 1.2; SLC7A13; ENSG00000164893; HLA -B*51:01
LVNISYLTV

SEQ ID NO: 9133 - protein, 9 aa, Homo sapiens
  Table 1.2; SLC7A13; ENSG00000164893; HLA -A*02:01
MLWIVGILT

SEQ ID NO: 9134 - protein, 8 aa, Homo sapiens
  Table 1.2; SLC7A13; ENSG00000164893; HLA -B*54:01
MPFAISTS

SEQ ID NO: 9135 - protein, 9 aa, Homo sapiens
  Table 1.2; SLC7A13; ENSG00000164893; HLA -A*23:01,HLA-A*25:01,HLA-A*30:01,HLA-B*07:02,HLA-B*08:01, HLA-B*15:03,HLA-B*35:01,HLA-B*35:03,HLA-B*39:01,HLA-B*46:01, HLA-B*51:01,HLA-B*54:01,HLA-B*55:01,HLA-B*56:01,HLA-C*03:03,
  HLA-C*03:04,HLA-C*07:02,HLA-C*14:02
MPFAISTSL

SEQ ID NO: 9136 - protein, 10 aa, Homo sapiens
  Table 1.2; SLC7A13; ENSG00000164893; HLA -B*35:01,HLA-B*35:03,HLA-B*51:01,HLA-B*54:01
MPFAISTSLF

SEQ ID NO: 9137 - protein, 11 aa, Homo sapiens
  Table 1.2; SLC7A13; ENSG00000164893; HLA -B*54:01
MPFAISTSLFS

SEQ ID NO: 9138 - protein, 9 aa, Homo sapiens
  Table 1.2; SLC7A13; ENSG00000164893; HLA -A*02:03,HLA-A*68:02
NIIGAGIFV

SEQ ID NO: 9139 - protein, 9 aa, Homo sapiens
  Table 1.2; SLC7A13; ENSG00000164893; HLA -B*54:01
NSHSSPFTA

SEQ ID NO: 9140 - protein, 9 aa, Homo sapiens
  Table 1.2; SLC7A13; ENSG00000164893; HLA -A*25:01
NVGVSLCVW

SEQ ID NO: 9141 - protein, 10 aa, Homo sapiens
  Table 1.2; SLC7A13; ENSG00000164893; HLA -A*24:02,HLA-A*29:02
NYIFFTGSLW

SEQ ID NO: 9142 - protein, 9 aa, Homo sapiens
  Table 1.2; SLC7A13; ENSG00000164893; HLA -A*23:01,HLA-A*24:02
PFAISTSLF

SEQ ID NO: 9143 - protein, 9 aa, Homo sapiens
  Table 1.2; SLC7A13; ENSG00000164893; HLA -A*02:03
PLATIVIDV

SEQ ID NO: 9144 - protein, 9 aa, Homo sapiens
  Table 1.2; SLC7A13; ENSG00000164893; HLA -B*54:01
QAIFQGYFA

SEQ ID NO: 9145 - protein, 10 aa, Homo sapiens
  Table 1.2; SLC7A13; ENSG00000164893; HLA -A*29:02,HLA-A*30:02,HLA-B*35:01
QAIFQGYFAY

SEQ ID NO: 9146 - protein, 8 aa, Homo sapiens
  Table 1.2; SLC7A13; ENSG00000164893; HLA -A*30:02,HLA-B*15:01,HLA-B*15:03,HLA-B*18:01,HLA-B*35:01, HLA-B*46:01,HLA-C*07:01
QALLLAEY

SEQ ID NO: 9147 - protein, 8 aa, Homo sapiens
  Table 1.2; SLC7A13; ENSG00000164893; HLA -A*30:01,HLA-B*18:01,HLA-B*40:01,HLA-B*44:02,HLA-B*44:03, HLA-B*49:01
QEGQLPLL

SEQ ID NO: 9148 - protein, 9 aa, Homo sapiens
  Table 1.2; SLC7A13; ENSG00000164893; HLA -A*24:02,HLA-A*30:01,HLA-B*18:01,HLA-B*27:02,HLA-B*37:01, HLA-B*40:01,HLA-B*44:02,HLA-B*44:03,HLA-B*49:01,HLA-C*16:04
QEGQLPLLF

SEQ ID NO: 9149 - protein, 9 aa, Homo sapiens
  Table 1.2; SLC7A13; ENSG00000164893; HLA -A*29:02,HLA-B*18:01,HLA-B*44:02,HLA-B*44:03
QEPNLSIPY

SEQ ID NO: 9150 - protein, 8 aa, Homo sapiens
  Table 1.2; SLC7A13; ENSG00000164893; HLA -A*03:02,HLA-A*11:01
QIASSVLK

SEQ ID NO: 9151 - protein, 9 aa, Homo sapiens
  Table 1.2; SLC7A13; ENSG00000164893; HLA -A*02:01,HLA-A*02:03,HLA-A*02:04,HLA-A*02:07,HLA-A*03:01, HLA-A*26:01,HLA-A*68:01,HLA-A*68:02,HLA-B*13:02,HLA-B*51:01, HLA-B*55:01,HLA-C*02:02,HLA-C*12:03,HLA-C*16:02
QIASSVLKV

SEQ ID NO: 9152 - protein, 9 aa, Homo sapiens
  Table 1.2; SLC7A13; ENSG00000164893; HLA -A*02:07,HLA-A*24:02,HLA-C*01:02
QLPLLFNTL

SEQ ID NO: 9153 - protein, 9 aa, Homo sapiens
  Table 1.2; SLC7A13; ENSG00000164893; HLA -B*07:02,HLA-B*51:01,HLA-B*54:01,HLA-B*56:01
QPFFPSCSV

SEQ ID NO: 9154 - protein, 8 aa, Homo sapiens
  Table 1.2; SLC7A13; ENSG00000164893; HLA -B*57:01
RAFPSLAW

SEQ ID NO: 9155 - protein, 10 aa, Homo sapiens
  Table 1.2; SLC7A13; ENSG00000164893; HLA -B*57:01
RAFPSLAWIM

SEQ ID NO: 9156 - protein, 9 aa, Homo sapiens
  Table 1.2; SLC7A13; ENSG00000164893; HLA -A*30:01,HLA-B*40:01,HLA-B*40:02,HLA-B*49:01
REILSSDAV

SEQ ID NO: 9157 - protein, 11 aa, Homo sapiens
  Table 1.2; SLC7A13; ENSG00000164893; HLA -A*30:01,HLA-B*40:01,HLA-B*49:01
REILSSDAVAI

SEQ ID NO: 9158 - protein, 9 aa, Homo sapiens
  Table 1.2; SLC7A13; ENSG00000164893; HLA -A*23:01,HLA-A*24:02,HLA-A*30:02,HLA-A*31:01,HLA-A*32:01, HLA-B*15:03,HLA-B*46:01,HLA-B*57:01,HLA-C*14:02
RYFGSTVAF

SEQ ID NO: 9159 - protein, 10 aa, Homo sapiens
  Table 1.2; SLC7A13; ENSG00000164893; HLA -A*24:02
RYFGSTVAFL

SEQ ID NO: 9160 - protein, 9 aa, Homo sapiens
  Table 1.2; SLC7A13; ENSG00000164893; HLA -A*23:01,HLA-A*24:02,HLA-C*14:02
RYQEPNLSI

SEQ ID NO: 9161 - protein, 11 aa, Homo sapiens
  Table 1.2; SLC7A13; ENSG00000164893; HLA -A*29:02,HLA-A*30:02,HLA-A*31:01
RYQEPNLSIPY

SEQ ID NO: 9162 - protein, 8 aa, Homo sapiens
  Table 1.2; SLC7A13; ENSG00000164893; HLA -C*05:01
SAEISISF

SEQ ID NO: 9163 - protein, 9 aa, Homo sapiens
  Table 1.2; SLC7A13; ENSG00000164893; HLA -A*23:01,HLA-A*30:01,HLA-B*07:02,HLA-B*15:01,HLA-B*15:03, HLA-B*35:01,HLA-B*35:03,HLA-B*39:01,HLA-B*40:01,HLA-B*46:01, HLA-C*01:02,HLA-C*03:03,HLA-C*03:04,HLA-C*07:02,HLA-C*14:02,
  HLA-C*16:04
SCMNVGVSL

SEQ ID NO: 9164 - protein, 8 aa, Homo sapiens
  Table 1.2; SLC7A13; ENSG00000164893; HLA -B*18:01,HLA-B*37:01,HLA-B*44:02,HLA-B*44:03
SDAVAITW

SEQ ID NO: 9165 - protein, 10 aa, Homo sapiens
  Table 1.2; SLC7A13; ENSG00000164893; HLA -A*23:01,HLA-A*24:02,HLA-A*29:02,HLA-C*14:02
SFISLTGVVF

SEQ ID NO: 9166 - protein, 9 aa, Homo sapiens
  Table 1.2; SLC7A13; ENSG00000164893; HLA -A*29:02,HLA-C*14:02
SFPCSGAQY

SEQ ID NO: 9167 - protein, 10 aa, Homo sapiens
  Table 1.2; SLC7A13; ENSG00000164893; HLA -A*29:02
SFPCSGAQYY

SEQ ID NO: 9168 - protein, 9 aa, Homo sapiens
  Table 1.2; SLC7A13; ENSG00000164893; HLA -A*11:01
SGAQYYFLK

SEQ ID NO: 9169 - protein, 9 aa, Homo sapiens
  Table 1.2; SLC7A13; ENSG00000164893; HLA -B*15:03,HLA-B*35:03,HLA-B*39:01,HLA-B*40:01,HLA-B*46:01, HLA-C*01:02,HLA-C*03:03,HLA-C*03:04,HLA-C*14:02
SGVVAGQAL

SEQ ID NO: 9170 - protein, 9 aa, Homo sapiens
  Table 1.2; SLC7A13; ENSG00000164893; HLA -B*38:01,HLA-B*39:01
SHSSPFTAV

SEQ ID NO: 9171 - protein, 10 aa, Homo sapiens
  Table 1.2; SLC7A13; ENSG00000164893; HLA -B*38:01,HLA-B*39:01
SHSSPFTAVL

SEQ ID NO: 9172 - protein, 11 aa, Homo sapiens
  Table 1.2; SLC7A13; ENSG00000164893; HLA -B*38:01
SHSSPFTAVLL

SEQ ID NO: 9173 - protein, 11 aa, Homo sapiens
  Table 1.2; SLC7A13; ENSG00000164893; HLA -A*02:03,HLA-A*02:04,HLA-A*03:01
SIFKSSRPIYL

SEQ ID NO: 9174 - protein, 11 aa, Homo sapiens
  Table 1.2; SLC7A13; ENSG00000164893; HLA -A*02:01,HLA-A*02:03,HLA-A*02:04
SILSFISLTGV

SEQ ID NO: 9175 - protein, 9 aa, Homo sapiens
  Table 1.2; SLC7A13; ENSG00000164893; HLA -A*02:01,HLA-A*02:03,HLA-A*02:04,HLA-A*02:07,HLA-A*68:02, HLA-B*08:01,HLA-B*46:01,HLA-B*55:01
SLAIILTSL

SEQ ID NO: 9176 - protein, 9 aa, Homo sapiens
  Table 1.2; SLC7A13; ENSG00000164893; HLA -A*02:03,HLA-B*13:02
SLFLGSGVV

SEQ ID NO: 9177 - protein, 10 aa, Homo sapiens
  Table 1.2; SLC7A13; ENSG00000164893; HLA -A*02:03,HLA-B*54:01,HLA-B*56:01
SLFLGSGVVA

SEQ ID NO: 9178 - protein, 11 aa, Homo sapiens
  Table 1.2; SLC7A13; ENSG00000164893; HLA -A*02:01,HLA-A*02:03,HLA-A*02:04
SLFLGSGVVAG

SEQ ID NO: 9179 - protein, 10 aa, Homo sapiens
  Table 1.2; SLC7A13; ENSG00000164893; HLA -A*02:01,HLA-A*02:03,HLA-A*02:04
SLFSNLLISI

SEQ ID NO: 9180 - protein, 9 aa, Homo sapiens
  Table 1.2; SLC7A13; ENSG00000164893; HLA -A*02:01,HLA-A*02:03,HLA-A*02:04,HLA-A*02:07,HLA-A*23:01, HLA-A*68:02,HLA-B*13:02
SLIDLINYI

SEQ ID NO: 9181 - protein, 8 aa, Homo sapiens
  Table 1.2; SLC7A13; ENSG00000164893; HLA -A*02:01,HLA-A*02:04
SLTGVVFL

SEQ ID NO: 9182 - protein, 9 aa, Homo sapiens
  Table 1.2; SLC7A13; ENSG00000164893; HLA -A*02:01,HLA-A*02:03,HLA-A*02:04,HLA-A*02:07,HLA-A*23:01, HLA-A*24:02,HLA-A*30:01,HLA-A*68:02,HLA-B*13:02,HLA-B*55:01
SLTGVVFLI

SEQ ID NO: 9183 - protein, 9 aa, Homo sapiens
  Table 1.2; SLC7A13; ENSG00000164893; HLA -A*02:01,HLA-A*02:03,HLA-A*02:04,HLA-A*02:07
SLWSILLMI

SEQ ID NO: 9184 - protein, 8 aa, Homo sapiens
  Table 1.2; SLC7A13; ENSG00000164893; HLA -B*51:01,HLA-B*56:01
SPFTAVLL

SEQ ID NO: 9185 - protein, 9 aa, Homo sapiens
  Table 1.2; SLC7A13; ENSG00000164893; HLA -B*07:02,HLA-B*35:01,HLA-B*51:01,HLA-B*56:01
SPFTAVLLL

SEQ ID NO: 9186 - protein, 10 aa, Homo sapiens
  Table 1.2; SLC7A13; ENSG00000164893; HLA -B*56:01
SPKGVLAYSC

SEQ ID NO: 9187 - protein, 8 aa, Homo sapiens
  Table 1.2; SLC7A13; ENSG00000164893; HLA -A*32:01,HLA-B*08:01,HLA-B*35:01,HLA-B*55:01
SPNVHYVY

SEQ ID NO: 9188 - protein, 9 aa, Homo sapiens
  Table 1.2; SLC7A13; ENSG00000164893; HLA -B*07:02,HLA-B*51:01,HLA-B*54:01,HLA-B*56:01
SPNVHYVYV

SEQ ID NO: 9189 - protein, 9 aa, Homo sapiens
  Table 1.2; SLC7A13; ENSG00000164893; HLA -A*02:04,HLA-B*38:01,HLA-B*39:01
SQEGQLPLL

SEQ ID NO: 9190 - protein, 10 aa, Homo sapiens
  Table 1.2; SLC7A13; ENSG00000164893; HLA -A*29:02,HLA-B*27:02,HLA-B*38:01
SQEGQLPLLF

SEQ ID NO: 9191 - protein, 9 aa, Homo sapiens
  Table 1.2; SLC7A13; ENSG00000164893; HLA -A*01:01,HLA-A*02:07,HLA-A*25:01,HLA-A*32:01,HLA-B*44:02, HLA-B*44:03,HLA-B*57:01,HLA-B*58:01,HLA-C*05:01
SSDAVAITW

SEQ ID NO: 9192 - protein, 9 aa, Homo sapiens
  Table 1.2; SLC7A13; ENSG00000164893; HLA -C*01:02
SSPFTAVLL

SEQ ID NO: 9193 - protein, 8 aa, Homo sapiens
  Table 1.2; SLC7A13; ENSG00000164893; HLA -B*08:01
SSVLKVSI

SEQ ID NO: 9194 - protein, 9 aa, Homo sapiens
  Table 1.2; SLC7A13; ENSG00000164893; HLA -A*25:01,HLA-B*57:01
STVAFLNLW

SEQ ID NO: 9195 - protein, 10 aa, Homo sapiens
  Table 1.2; SLC7A13; ENSG00000164893; HLA -A*25:01
SVLKVSILSF

SEQ ID NO: 9196 - protein, 9 aa, Homo sapiens
  Table 1.2; SLC7A13; ENSG00000164893; HLA -A*29:02,HLA-A*31:01,HLA-A*33:01,HLA-A*33:03
SYLTVLTPR

SEQ ID NO: 9197 - protein, 8 aa, Homo sapiens
  Table 1.2; SLC7A13; ENSG00000164893; HLA -B*51:01
TALPLVTV

SEQ ID NO: 9198 - protein, 9 aa, Homo sapiens
  Table 1.2; SLC7A13; ENSG00000164893; HLA -A*02:01,HLA-A*02:03,HLA-A*68:02,HLA-B*13:02,HLA-B*35:01, HLA-B*39:01,HLA-B*51:01,HLA-B*54:01,HLA-B*56:01,HLA-C*02:02, HLA-C*12:03,HLA-C*16:02
TALPLVTVV

SEQ ID NO: 9199 - protein, 10 aa, Homo sapiens
  Table 1.2; SLC7A13; ENSG00000164893; HLA -A*23:01,HLA-A*25:01,HLA-A*29:02,HLA-A*30:02,HLA-B*35:01
TALPLVTVVY

SEQ ID NO: 9200 - protein, 9 aa, Homo sapiens
  Table 1.2; SLC7A13; ENSG00000164893; HLA -B*35:01,HLA-B*35:03,HLA-B*51:01,HLA-B*54:01
TAVLLLVTL

SEQ ID NO: 9201 - protein, 11 aa, Homo sapiens
  Table 1.2; SLC7A13; ENSG00000164893; HLA -A*31:01
TLIAGELKKPR

SEQ ID NO: 9202 - protein, 9 aa, Homo sapiens
  Table 1.2; SLC7A13; ENSG00000164893; HLA -A*03:01,HLA-A*30:02,HLA-A*32:01,HLA-B*15:01,HLA-B*37:01, HLA-B*46:01,HLA-C*07:04,HLA-C*14:02
TLNSHSSPF

SEQ ID NO: 9203 - protein, 11 aa, Homo sapiens
  Table 1.2; SLC7A13; ENSG00000164893; HLA -B*07:02,HLA-B*54:01,HLA-B*55:01,HLA-B*56:01
TPREILSSDAV

SEQ ID NO: 9204 - protein, 9 aa, Homo sapiens
  Table 1.2; SLC7A13; ENSG00000164893; HLA -B*51:01
TSFLLINII

SEQ ID NO: 9205 - protein, 11 aa, Homo sapiens
  Table 1.2; SLC7A13; ENSG00000164893; HLA -B*54:01
TSLFLGSGVVA

SEQ ID NO: 9206 - protein, 9 aa, Homo sapiens
  Table 1.2; SLC7A13; ENSG00000164893; HLA -A*30:02,HLA-B*57:01,HLA-B*58:01
TSLIDLINY

SEQ ID NO: 9207 - protein, 10 aa, Homo sapiens
  Table 1.2; SLC7A13; ENSG00000164893; HLA -B*57:01
TSRGVKEVTW

SEQ ID NO: 9208 - protein, 9 aa, Homo sapiens
  Table 1.2; SLC7A13; ENSG00000164893; HLA -B*07:02
TVLTPREIL

SEQ ID NO: 9209 - protein, 9 aa, Homo sapiens
  Table 1.2; SLC7A13; ENSG00000164893; HLA -A*68:02
TVVYLLVNI

SEQ ID NO: 9210 - protein, 10 aa, Homo sapiens
  Table 1.2; SLC7A13; ENSG00000164893; HLA -A*24:02
TWADRAFPSL

SEQ ID NO: 9211 - protein, 8 aa, Homo sapiens
  Table 1.2; SLC7A13; ENSG00000164893; HLA -A*23:01,HLA-B*51:01
VAGQALLL

SEQ ID NO: 9212 - protein, 11 aa, Homo sapiens
  Table 1.2; SLC7A13; ENSG00000164893; HLA -A*30:02
VAGQALLLAEY

SEQ ID NO: 9213 - protein, 8 aa, Homo sapiens
  Table 1.2; SLC7A13; ENSG00000164893; HLA -B*18:01,HLA-B*37:01
VERFQNAF

SEQ ID NO: 9214 - protein, 10 aa, Homo sapiens
  Table 1.2; SLC7A13; ENSG00000164893; HLA -A*23:01
VFLSFPLATI

SEQ ID NO: 9215 - protein, 8 aa, Homo sapiens
  Table 1.2; SLC7A13; ENSG00000164893; HLA -C*05:01
VIDVGLVV

SEQ ID NO: 9216 - protein, 9 aa, Homo sapiens
  Table 1.2; SLC7A13; ENSG00000164893; HLA -A*02:07,HLA-B*38:01,HLA-C*05:01
VIDVGLVVI

SEQ ID NO: 9217 - protein, 10 aa, Homo sapiens
  Table 1.2; SLC7A13; ENSG00000164893; HLA -A*02:07
VIPLVKSPNV

SEQ ID NO: 9218 - protein, 8 aa, Homo sapiens
  Table 1.2; SLC7A13; ENSG00000164893; HLA -B*15:03
VKSPNVHY

SEQ ID NO: 9219 - protein, 10 aa, Homo sapiens
  Table 1.2; SLC7A13; ENSG00000164893; HLA -A*29:02,HLA-B*15:03
VKSPNVHYVY

SEQ ID NO: 9220 - protein, 9 aa, Homo sapiens
  Table 1.2; SLC7A13; ENSG00000164893; HLA -A*02:03,HLA-A*23:01,HLA-A*24:02,HLA-B*08:01,HLA-B*46:01
VLKVSILSF

SEQ ID NO: 9221 - protein, 10 aa, Homo sapiens
  Table 1.2; SLC7A13; ENSG00000164893; HLA -A*02:03
VLKVSILSFI

SEQ ID NO: 9222 - protein, 9 aa, Homo sapiens
  Table 1.2; SLC7A13; ENSG00000164893; HLA -A*02:04
VLLLVLSGL

SEQ ID NO: 9223 - protein, 9 aa, Homo sapiens
  Table 1.2; SLC7A13; ENSG00000164893; HLA -A*02:01,HLA-A*02:03,HLA-A*02:04,HLA-A*02:07
VLSGLLFYI

SEQ ID NO: 9224 - protein, 9 aa, Homo sapiens
  Table 1.2; SLC7A13; ENSG00000164893; HLA -B*07:02
VPKLPKKCL

SEQ ID NO: 9225 - protein, 9 aa, Homo sapiens
  Table 1.2; SLC7A13; ENSG00000164893; HLA -C*03:03,HLA-C*03:04
VSILSFISL

SEQ ID NO: 9226 - protein, 9 aa, Homo sapiens
  Table 1.2; SLC7A13; ENSG00000164893; HLA -A*01:01,HLA-A*25:01,HLA-A*26:01,HLA-A*29:02,HLA-A*30:02, HLA-A*32:01,HLA-B*15:01,HLA-B*15:03,HLA-B*46:01,HLA-B*57:01, HLA-B*58:01,HLA-C*01:02,HLA-C*02:02,HLA-C*16:01
VSPKGVLAY

SEQ ID NO: 9227 - protein, 9 aa, Homo sapiens
  Table 1.2; SLC7A13; ENSG00000164893; HLA -A*23:01
VTLGSLAII

SEQ ID NO: 9228 - protein, 9 aa, Homo sapiens
  Table 1.2; SLC7A13; ENSG00000164893; HLA -A*03:01,HLA-A*11:01,HLA-A*23:01,HLA-A*24:02,HLA-A*29:02, HLA-B*13:02
VVAGQALLL

SEQ ID NO: 9229 - protein, 9 aa, Homo sapiens
  Table 1.2; SLC7A13; ENSG00000164893; HLA -A*32:01
VVIPLVKSP

SEQ ID NO: 9230 - protein, 10 aa, Homo sapiens
  Table 1.2; SLC7A13; ENSG00000164893; HLA -A*31:01
VVIPLVKSPN

SEQ ID NO: 9231 - protein, 10 aa, Homo sapiens
  Table 1.2; SLC7A13; ENSG00000164893; HLA -A*30:02
VVYLLVNISY

SEQ ID NO: 9232 - protein, 9 aa, Homo sapiens
  Table 1.2; SLC7A13; ENSG00000164893; HLA -A*23:01,HLA-A*24:02,HLA-A*29:02,HLA-A*30:02,HLA-C*14:02
VYLLVNISY

SEQ ID NO: 9233 - protein, 10 aa, Homo sapiens
  Table 1.2; SLC7A13; ENSG00000164893; HLA -A*23:01,HLA-A*24:02
VYLLVNISYL

SEQ ID NO: 9234 - protein, 8 aa, Homo sapiens
  Table 1.2; SLC7A13; ENSG00000164893; HLA -A*23:01
VYVLLLVL

SEQ ID NO: 9235 - protein, 9 aa, Homo sapiens
  Table 1.2; SLC7A13; ENSG00000164893; HLA -A*31:01
WIVGILTSR

SEQ ID NO: 9236 - protein, 8 aa, Homo sapiens
  Table 1.2; SLC7A13; ENSG00000164893; HLA -A*23:01,HLA-A*24:02,HLA-C*14:02
YFGSTVAF

SEQ ID NO: 9237 - protein, 9 aa, Homo sapiens
  Table 1.2; SLC7A13; ENSG00000164893; HLA -A*23:01,HLA-A*24:02,HLA-A*29:02
YFGSTVAFL

SEQ ID NO: 9238 - protein, 9 aa, Homo sapiens
  Table 1.2; SLC7A13; ENSG00000164893; HLA -A*29:02
YIFFTGSLW

SEQ ID NO: 9239 - protein, 9 aa, Homo sapiens
  Table 1.2; SLC7A13; ENSG00000164893; HLA -A*02:07,HLA-A*24:02
YIPLIHFKI

SEQ ID NO: 9240 - protein, 9 aa, Homo sapiens
  Table 1.2; SLC7A13; ENSG00000164893; HLA -A*02:01,HLA-A*02:03,HLA-B*39:01
YLASQEGQL

SEQ ID NO: 9241 - protein, 9 aa, Homo sapiens
  Table 1.2; SLC7A13; ENSG00000164893; HLA -A*02:01,HLA-A*02:03,HLA-A*02:04,HLA-A*02:07
YLLVNISYL

SEQ ID NO: 9242 - protein, 8 aa, Homo sapiens
  Table 1.2; SLC7A13; ENSG00000164893; HLA -A*02:04
YLQLLFNI

SEQ ID NO: 9243 - protein, 8 aa, Homo sapiens
  Table 1.2; SLC7A13; ENSG00000164893; HLA -B*13:02
YQEPNLSI

SEQ ID NO: 9244 - protein, 10 aa, Homo sapiens
  Table 1.2; SLC7A13; ENSG00000164893; HLA -A*01:01,HLA-A*29:02,HLA-A*30:02,HLA-B*15:01,HLA-B*15:03, HLA-B*27:02,HLA-B*39:01,HLA-C*07:01,HLA-C*07:04
YQEPNLSIPY

SEQ ID NO: 9245 - protein, 9 aa, Homo sapiens
  Table 1.2; SLC7A13; ENSG00000164893; HLA -A*02:04
YVYVLLLVL

SEQ ID NO: 9246 - protein, 9 aa, Homo sapiens
  Table 1.2; SMC1B; ENSG00000077935; HLA -A*02:04
AALALLFAV

SEQ ID NO: 9247 - protein, 10 aa, Homo sapiens
  Table 1.2; SMC1B; ENSG00000077935; HLA -A*03:01,HLA-A*03:02,HLA-A*11:01
AALDNTNIGK

SEQ ID NO: 9248 - protein, 8 aa, Homo sapiens
  Table 1.2; SMC1B; ENSG00000077935; HLA -C*01:02
AAPNLRAL

SEQ ID NO: 9249 - protein, 9 aa, Homo sapiens
  Table 1.2; SMC1B; ENSG00000077935; HLA -A*30:01,HLA-B*18:01,HLA-B*27:02,HLA-B*37:01,HLA-B*39:01, HLA-B*40:01,HLA-B*44:02,HLA-B*44:03,HLA-B*49:01,HLA-C*16:04
AEEDAQFNF

SEQ ID NO: 9250 - protein, 9 aa, Homo sapiens
  Table 1.2; SMC1B; ENSG00000077935; HLA -B*49:01
AEENCLQTV

SEQ ID NO: 9251 - protein, 8 aa, Homo sapiens
  Table 1.2; SMC1B; ENSG00000077935; HLA -B*49:01
AEKVQTQI

SEQ ID NO: 9252 - protein, 8 aa, Homo sapiens
  Table 1.2; SMC1B; ENSG00000077935; HLA -B*37:01,HLA-B*44:02,HLA-B*44:03
AELEKIGI

SEQ ID NO: 9253 - protein, 9 aa, Homo sapiens
  Table 1.2; SMC1B; ENSG00000077935; HLA -B*37:01,HLA-B*40:01,HLA-B*44:02,HLA-B*44:03,HLA-B*49:01
AELEKIGII

SEQ ID NO: 9254 - protein, 10 aa, Homo sapiens
  Table 1.2; SMC1B; ENSG00000077935; HLA -B*49:01
AELEKIGIIV

SEQ ID NO: 9255 - protein, 9 aa, Homo sapiens
  Table 1.2; SMC1B; ENSG00000077935; HLA -A*30:01,HLA-B*40:01,HLA-B*44:02,HLA-B*44:03,HLA-B*49:01
AEPETFLAL

SEQ ID NO: 9256 - protein, 8 aa, Homo sapiens
  Table 1.2; SMC1B; ENSG00000077935; HLA -B*49:01
AESTQATI

SEQ ID NO: 9257 - protein, 10 aa, Homo sapiens
  Table 1.2; SMC1B; ENSG00000077935; HLA -B*49:01
AESTQATIDI

SEQ ID NO: 9258 - protein, 11 aa, Homo sapiens
  Table 1.2; SMC1B; ENSG00000077935; HLA -A*30:02,HLA-B*27:02,HLA-B*44:02,HLA-B*44:03
AESTQATIDIY

SEQ ID NO: 9259 - protein, 11 aa, Homo sapiens
  Table 1.2; SMC1B; ENSG00000077935; HLA -B*44:02
AEVLEHLKRLY

SEQ ID NO: 9260 - protein, 9 aa, Homo sapiens
  Table 1.2; SMC1B; ENSG00000077935; HLA -C*14:02
AFYQEQSQL

SEQ ID NO: 9261 - protein, 9 aa, Homo sapiens
  Table 1.2; SMC1B; ENSG00000077935; HLA -A*11:01
AGIDTHEGK

SEQ ID NO: 9262 - protein, 8 aa, Homo sapiens
  Table 1.2; SMC1B; ENSG00000077935; HLA -A*02:04
ALALLFAV

SEQ ID NO: 9263 - protein, 9 aa, Homo sapiens
  Table 1.2; SMC1B; ENSG00000077935; HLA -A*01:01,HLA-A*03:01,HLA-A*03:02,HLA-A*11:01
ALDGTLFLK

SEQ ID NO: 9264 - protein, 9 aa, Homo sapiens
  Table 1.2; SMC1B; ENSG00000077935; HLA -A*01:01,HLA-A*03:01,HLA-A*03:02,HLA-A*11:01
ALDNTNIGK

SEQ ID NO: 9265 - protein, 10 aa, Homo sapiens
  Table 1.2; SMC1B; ENSG00000077935; HLA -A*02:01,HLA-A*02:07,HLA-B*55:01
ALDNTNIGKV

SEQ ID NO: 9266 - protein, 9 aa, Homo sapiens
  Table 1.2; SMC1B; ENSG00000077935; HLA -A*03:01,HLA-A*23:01,HLA-A*25:01,HLA-A*26:01,HLA-A*29:02, HLA-A*30:02,HLA-A*32:01,HLA-B*15:01,HLA-B*15:03,HLA-B*35:01, HLA-B*44:03,HLA-B*46:01,HLA-B*58:01,HLA-C*02:02
ALIGIYPEY

SEQ ID NO: 9267 - protein, 9 aa, Homo sapiens
  Table 1.2; SMC1B; ENSG00000077935; HLA -A*02:04,HLA-A*24:02,HLA-A*32:01,HLA-B*44:02
ALLFAVHSF

SEQ ID NO: 9268 - protein, 9 aa, Homo sapiens
  Table 1.2; SMC1B; ENSG00000077935; HLA -A*03:01,HLA-A*03:02,HLA-A*11:01
ALSFVMGEK

SEQ ID NO: 9269 - protein, 9 aa, Homo sapiens
  Table 1.2; SMC1B; ENSG00000077935; HLA -A*03:01,HLA-A*03:02
ALSGPERQK

SEQ ID NO: 9270 - protein, 9 aa, Homo sapiens
  Table 1.2; SMC1B; ENSG00000077935; HLA -B*56:01
APFFVLDEV

SEQ ID NO: 9271 - protein, 9 aa, Homo sapiens
  Table 1.2; SMC1B; ENSG00000077935; HLA -B*07:02,HLA-C*07:02
APNLRALEN

SEQ ID NO: 9272 - protein, 10 aa, Homo sapiens
  Table 1.2; SMC1B; ENSG00000077935; HLA -B*07:02,HLA-C*07:02
APNLRALENL

SEQ ID NO: 9273 - protein, 9 aa, Homo sapiens
  Table 1.2; SMC1B; ENSG00000077935; HLA -A*03:01,HLA-A*03:02,HLA-A*11:01,HLA-C*07:06
ASQEDILLK

SEQ ID NO: 9274 - protein, 8 aa, Homo sapiens
  Table 1.2; SMC1B; ENSG00000077935; HLA -A*11:01
ATIDIYEK

SEQ ID NO: 9275 - protein, 9 aa, Homo sapiens
  Table 1.2; SMC1B; ENSG00000077935; HLA -A*03:01,HLA-A*03:02,HLA-A*11:01
ATMTQQLEK

SEQ ID NO: 9276 - protein, 9 aa, Homo sapiens
  Table 1.2; SMC1B; ENSG00000077935; HLA -A*02:07,HLA-C*05:01
AVDREVGKL

SEQ ID NO: 9277 - protein, 11 aa, Homo sapiens
  Table 1.2; SMC1B; ENSG00000077935; HLA -A*11:01
AVDREVGKLQK

SEQ ID NO: 9278 - protein, 8 aa, Homo sapiens
  Table 1.2; SMC1B; ENSG00000077935; HLA -A*31:01
AVTKVFGR

SEQ ID NO: 9279 - protein, 9 aa, Homo sapiens
  Table 1.2; SMC1B; ENSG00000077935; HLA -B*49:01
CEEIGVENI

SEQ ID NO: 9280 - protein, 10 aa, Homo sapiens
  Table 1.2; SMC1B; ENSG00000077935; HLA -A*03:01,HLA-A*03:02,HLA-A*11:01
CIIGPNGSGK

SEQ ID NO: 9281 - protein, 11 aa, Homo sapiens
  Table 1.2; SMC1B; ENSG00000077935; HLA -A*03:02
CLQTVNELMAK

SEQ ID NO: 9282 - protein, 9 aa, Homo sapiens
  Table 1.2; SMC1B; ENSG00000077935; HLA -A*02:01,HLA-A*02:03,HLA-A*02:04,HLA-B*08:01
CMFSRVLTL

SEQ ID NO: 9283 - protein, 9 aa, Homo sapiens
  Table 1.2; SMC1B; ENSG00000077935; HLA -C*16:04
CRNNSAQAF

SEQ ID NO: 9284 - protein, 9 aa, Homo sapiens
  Table 1.2; SMC1B; ENSG00000077935; HLA -A*29:02
CVAALALLF

SEQ ID NO: 9285 - protein, 9 aa, Homo sapiens
  Table 1.2; SMC1B; ENSG00000077935; HLA -B*51:01
DAALDNTNI

SEQ ID NO: 9286 - protein, 11 aa, Homo sapiens
  Table 1.2; SMC1B; ENSG00000077935; HLA -A*68:01
DAALDNTNIGK

SEQ ID NO: 9287 - protein, 8 aa, Homo sapiens
  Table 1.2; SMC1B; ENSG00000077935; HLA -B*51:01
DAFEASRK

SEQ ID NO: 9288 - protein, 10 aa, Homo sapiens
  Table 1.2; SMC1B; ENSG00000077935; HLA -B*54:01
DAFEASRKEA

SEQ ID NO: 9289 - protein, 11 aa, Homo sapiens
  Table 1.2; SMC1B; ENSG00000077935; HLA -A*33:01
DAFEASRKEAR

SEQ ID NO: 9290 - protein, 10 aa, Homo sapiens
  Table 1.2; SMC1B; ENSG00000077935; HLA -A*25:01,HLA-A*26:01,HLA-A*33:01
DALIGIYPEY

SEQ ID NO: 9291 - protein, 8 aa, Homo sapiens
  Table 1.2; SMC1B; ENSG00000077935; HLA -A*33:01,HLA-B*27:02
DAQFNFNK

SEQ ID NO: 9292 - protein, 9 aa, Homo sapiens
  Table 1.2; SMC1B; ENSG00000077935; HLA -A*33:01,HLA-A*68:01
DAQFNFNKK

SEQ ID NO: 9293 - protein, 10 aa, Homo sapiens
  Table 1.2; SMC1B; ENSG00000077935; HLA -A*33:01
DCIRFLKEER

SEQ ID NO: 9294 - protein, 8 aa, Homo sapiens
  Table 1.2; SMC1B; ENSG00000077935; HLA -B*18:01
DDIIEVEM

SEQ ID NO: 9295 - protein, 8 aa, Homo sapiens
  Table 1.2; SMC1B; ENSG00000077935; HLA -B*18:01
DEKELKNL

SEQ ID NO: 9296 - protein, 9 aa, Homo sapiens
  Table 1.2; SMC1B; ENSG00000077935; HLA -B*08:01
DIKALETEL

SEQ ID NO: 9297 - protein, 8 aa, Homo sapiens
  Table 1.2; SMC1B; ENSG00000077935; HLA -A*33:01,HLA-A*33:03
DIKPINER

SEQ ID NO: 9298 - protein, 9 aa, Homo sapiens
  Table 1.2; SMC1B; ENSG00000077935; HLA -B*08:01
DIKPINERL

SEQ ID NO: 9299 - protein, 10 aa, Homo sapiens
  Table 1.2; SMC1B; ENSG00000077935; HLA -A*33:01
DIKPINERLR

SEQ ID NO: 9300 - protein, 8 aa, Homo sapiens
  Table 1.2; SMC1B; ENSG00000077935; HLA -B*08:01
DILLKTAA

SEQ ID NO: 9301 - protein, 9 aa, Homo sapiens
  Table 1.2; SMC1B; ENSG00000077935; HLA -A*25:01,HLA-A*26:01,HLA-B*08:01,HLA-B*18:01,HLA-B*35:01
DIYEKEEAF

SEQ ID NO: 9302 - protein, 9 aa, Homo sapiens
  Table 1.2; SMC1B; ENSG00000077935; HLA -A*33:01
DLCHPIHKK

SEQ ID NO: 9303 - protein, 8 aa, Homo sapiens
  Table 1.2; SMC1B; ENSG00000077935; HLA -B*08:01
DLKQIQTL

SEQ ID NO: 9304 - protein, 9 aa, Homo sapiens
  Table 1.2; SMC1B; ENSG00000077935; HLA -B*08:01
DLSVKRESL

SEQ ID NO: 9305 - protein, 9 aa, Homo sapiens
  Table 1.2; SMC1B; ENSG00000077935; HLA -B*18:01
DNLVSRSVY

SEQ ID NO: 9306 - protein, 11 aa, Homo sapiens
  Table 1.2; SMC1B; ENSG00000077935; HLA -A*25:01,HLA-A*26:01
DNTNIGKVSSY

SEQ ID NO: 9307 - protein, 9 aa, Homo sapiens
  Table 1.2; SMC1B; ENSG00000077935; HLA -A*33:01
DQEIEAHLR

SEQ ID NO: 9308 - protein, 8 aa, Homo sapiens
  Table 1.2; SMC1B; ENSG00000077935; HLA -B*51:01
DQFQMIVI

SEQ ID NO: 9309 - protein, 10 aa, Homo sapiens
  Table 1.2; SMC1B; ENSG00000077935; HLA -A*68:01
DTEGQESSKR

SEQ ID NO: 9310 - protein, 10 aa, Homo sapiens
  Table 1.2; SMC1B; ENSG00000077935; HLA -A*25:01,HLA-A*26:01,HLA-A*68:01
DVIKTQFPQL

SEQ ID NO: 9311 - protein, 11 aa, Homo sapiens
  Table 1.2; SMC1B; ENSG00000077935; HLA -A*33:01,HLA-A*33:03
DYLDIKPINER

SEQ ID NO: 9312 - protein, 9 aa, Homo sapiens
  Table 1.2; SMC1B; ENSG00000077935; HLA -B*51:01
EAESTQATI

SEQ ID NO: 9313 - protein, 10 aa, Homo sapiens
  Table 1.2; SMC1B; ENSG00000077935; HLA -A*25:01,HLA-A*26:01,HLA-A*68:01,HLA-A*68:02,HLA-B*35:01, HLA-B*35:03
EAFEIDYSSL

SEQ ID NO: 9314 - protein, 8 aa, Homo sapiens
  Table 1.2; SMC1B; ENSG00000077935; HLA -B*08:01
EAHLRLLL

SEQ ID NO: 9315 - protein, 9 aa, Homo sapiens
  Table 1.2; SMC1B; ENSG00000077935; HLA -B*27:02
EDAQFNFNK

SEQ ID NO: 9316 - protein, 10 aa, Homo sapiens
  Table 1.2; SMC1B; ENSG00000077935; HLA -A*68:01
EDAQFNFNKK

SEQ ID NO: 9317 - protein, 9 aa, Homo sapiens
  Table 1.2; SMC1B; ENSG00000077935; HLA -A*25:01,HLA-A*30:01,HLA-B*08:01,HLA-B*18:01,HLA-B*37:01, HLA-B*40:01,HLA-B*44:02,HLA-B*44:03,HLA-C*16:04
EEAERYQSL

SEQ ID NO: 9318 - protein, 8 aa, Homo sapiens
  Table 1.2; SMC1B; ENSG00000077935; HLA -B*18:01
EEAFEIDY

SEQ ID NO: 9319 - protein, 8 aa, Homo sapiens
  Table 1.2; SMC1B; ENSG00000077935; HLA -B*18:01,HLA-B*37:01
EEARHIAL

SEQ ID NO: 9320 - protein, 8 aa, Homo sapiens
  Table 1.2; SMC1B; ENSG00000077935; HLA -B*18:01,HLA-B*44:02,HLA-B*44:03
EEDAQFNF

SEQ ID NO: 9321 - protein, 10 aa, Homo sapiens
  Table 1.2; SMC1B; ENSG00000077935; HLA -A*30:01,HLA-B*40:01
EEFYSRADAL

SEQ ID NO: 9322 - protein, 8 aa, Homo sapiens
  Table 1.2; SMC1B; ENSG00000077935; HLA -B*18:01,HLA-B*49:01
EEIGVENI

SEQ ID NO: 9323 - protein, 11 aa, Homo sapiens
  Table 1.2; SMC1B; ENSG00000077935; HLA -A*25:01,HLA-A*26:01,HLA-A*30:01,HLA-B*18:01,HLA-B*27:02, HLA-B*44:02,HLA-B*44:03,HLA-C*16:04
EEIGVENIREF

SEQ ID NO: 9324 - protein, 9 aa, Homo sapiens
  Table 1.2; SMC1B; ENSG00000077935; HLA -A*30:01,HLA-B*40:01,HLA-B*44:02,HLA-B*44:03
EEISTSGEL

SEQ ID NO: 9325 - protein, 10 aa, Homo sapiens
  Table 1.2; SMC1B; ENSG00000077935; HLA -B*40:01,HLA-B*44:02,HLA-B*44:03,HLA-B*49:01
EEISTSGELI

SEQ ID NO: 9326 - protein, 10 aa, Homo sapiens
  Table 1.2; SMC1B; ENSG00000077935; HLA -B*40:01
EELKMNKIQL

SEQ ID NO: 9327 - protein, 10 aa, Homo sapiens
  Table 1.2; SMC1B; ENSG00000077935; HLA -A*30:01,HLA-B*18:01,HLA-B*40:01,HLA-B*44:02,HLA-B*44:03
EELNLIRSEL

SEQ ID NO: 9328 - protein, 10 aa, Homo sapiens
  Table 1.2; SMC1B; ENSG00000077935; HLA -B*18:01,HLA-B*44:02,HLA-B*44:03
EEPYLEGISY

SEQ ID NO: 9329 - protein, 9 aa, Homo sapiens
  Table 1.2; SMC1B; ENSG00000077935; HLA -B*18:01,HLA-B*44:02,HLA-B*44:03
EERAEPETF

SEQ ID NO: 9330 - protein, 9 aa, Homo sapiens
  Table 1.2; SMC1B; ENSG00000077935; HLA -B*44:02,HLA-B*44:03
EESGEEKTF

SEQ ID NO: 9331 - protein, 8 aa, Homo sapiens
  Table 1.2; SMC1B; ENSG00000077935; HLA -B*18:01,HLA-B*49:01
EETLVDEI

SEQ ID NO: 9332 - protein, 8 aa, Homo sapiens
  Table 1.2; SMC1B; ENSG00000077935; HLA -B*08:01,HLA-B*18:01
EEYTKTCM

SEQ ID NO: 9333 - protein, 9 aa, Homo sapiens
  Table 1.2; SMC1B; ENSG00000077935; HLA -A*33:01,HLA-A*33:03
EFENKHVKR

SEQ ID NO: 9334 - protein, 10 aa, Homo sapiens
  Table 1.2; SMC1B; ENSG00000077935; HLA -A*33:03
EFNEELNLIR

SEQ ID NO: 9335 - protein, 11 aa, Homo sapiens
  Table 1.2; SMC1B; ENSG00000077935; HLA -A*33:01
EFRFNDNLVSR

SEQ ID NO: 9336 - protein, 9 aa, Homo sapiens
  Table 1.2; SMC1B; ENSG00000077935; HLA -B*08:01
EFYSRADAL

SEQ ID NO: 9337 - protein, 9 aa, Homo sapiens
  Table 1.2; SMC1B; ENSG00000077935; HLA -B*38:01
EHGMLTRQL

SEQ ID NO: 9338 - protein, 9 aa, Homo sapiens
  Table 1.2; SMC1B; ENSG00000077935; HLA -B*38:01,HLA-B*39:01
EHVNRDLSV

SEQ ID NO: 9339 - protein, 10 aa, Homo sapiens
  Table 1.2; SMC1B; ENSG00000077935; HLA -B*38:01
EHVSISIDQI

SEQ ID NO: 9340 - protein, 9 aa, Homo sapiens
  Table 1.2; SMC1B; ENSG00000077935; HLA -A*01:01
EIDQKRYFY

SEQ ID NO: 9341 - protein, 10 aa, Homo sapiens
  Table 1.2; SMC1B; ENSG00000077935; HLA -A*25:01
EIGVENIREF

SEQ ID NO: 9342 - protein, 9 aa, Homo sapiens
  Table 1.2; SMC1B; ENSG00000077935; HLA -A*25:01
EIILLSGSL

SEQ ID NO: 9343 - protein, 9 aa, Homo sapiens
  Table 1.2; SMC1B; ENSG00000077935; HLA -A*68:02
EKIGIIVKA

SEQ ID NO: 9344 - protein, 9 aa, Homo sapiens
  Table 1.2; SMC1B; ENSG00000077935; HLA -A*25:01
ELADLDAAW

SEQ ID NO: 9345 - protein, 10 aa, Homo sapiens
  Table 1.2; SMC1B; ENSG00000077935; HLA -A*01:01
ELEASQLDRY

SEQ ID NO: 9346 - protein, 9 aa, Homo sapiens
  Table 1.2; SMC1B; ENSG00000077935; HLA -A*33:01,HLA-A*33:03,HLA-A*68:01
ELIGEYEEK

SEQ ID NO: 9347 - protein, 9 aa, Homo sapiens
  Table 1.2; SMC1B; ENSG00000077935; HLA -B*08:01
ELKMNKIQL

SEQ ID NO: 9348 - protein, 9 aa, Homo sapiens
  Table 1.2; SMC1B; ENSG00000077935; HLA -A*25:01,HLA-A*26:01,HLA-B*08:01
ELMAKQQQL

SEQ ID NO: 9349 - protein, 9 aa, Homo sapiens
  Table 1.2; SMC1B; ENSG00000077935; HLA -B*08:01
ELNLIRSEL

SEQ ID NO: 9350 - protein, 9 aa, Homo sapiens
  Table 1.2; SMC1B; ENSG00000077935; HLA -A*25:01,HLA-A*26:01,HLA-B*15:03,HLA-B*18:01,HLA-B*35:01, HLA-B*35:03,HLA-B*55:01,HLA-C*03:03
EPYLEGISY

SEQ ID NO: 9351 - protein, 9 aa, Homo sapiens
  Table 1.2; SMC1B; ENSG00000077935; HLA -B*39:01
EQSQLQSEL

SEQ ID NO: 9352 - protein, 10 aa, Homo sapiens
  Table 1.2; SMC1B; ENSG00000077935; HLA -B*38:01
EQSQLQSELL

SEQ ID NO: 9353 - protein, 9 aa, Homo sapiens
  Table 1.2; SMC1B; ENSG00000077935; HLA -B*38:01,HLA-B*39:01
ERAEPETFL

SEQ ID NO: 9354 - protein, 9 aa, Homo sapiens
  Table 1.2; SMC1B; ENSG00000077935; HLA -A*33:01,HLA-A*33:03
ESISVKKPK

SEQ ID NO: 9355 - protein, 10 aa, Homo sapiens
  Table 1.2; SMC1B; ENSG00000077935; HLA -A*33:01,HLA-A*33:03,HLA-A*68:01,HLA-C*07:06
ESTDAFEASR

SEQ ID NO: 9356 - protein, 11 aa, Homo sapiens
  Table 1.2; SMC1B; ENSG00000077935; HLA -A*33:03
ETLVDEIEKTK

SEQ ID NO: 9357 - protein, 9 aa, Homo sapiens
  Table 1.2; SMC1B; ENSG00000077935; HLA -A*25:01,HLA-A*26:01
ETMEEARHI

SEQ ID NO: 9358 - protein, 11 aa, Homo sapiens
  Table 1.2; SMC1B; ENSG00000077935; HLA -A*25:01,HLA-A*33:03,HLA-A*68:01,HLA-A*68:02
ETMEEARHIAL

SEQ ID NO: 9359 - protein, 9 aa, Homo sapiens
  Table 1.2; SMC1B; ENSG00000077935; HLA -A*25:01
EVQGNLKQI

SEQ ID NO: 9360 - protein, 9 aa, Homo sapiens
  Table 1.2; SMC1B; ENSG00000077935; HLA -A*23:01,HLA-A*25:01,HLA-A*26:01,HLA-A*33:03,HLA-A*68:01, HLA-A*68:02,HLA-B*35:01,HLA-B*35:03,HLA-C*07:06
EVVSIQTSL

SEQ ID NO: 9361 - protein, 10 aa, Homo sapiens
  Table 1.2; SMC1B; ENSG00000077935; HLA -A*26:01
EVVSIQTSLE

SEQ ID NO: 9362 - protein, 9 aa, Homo sapiens
  Table 1.2; SMC1B; ENSG00000077935; HLA -A*33:03
EYDDCMFSR

SEQ ID NO: 9363 - protein, 10 aa, Homo sapiens
  Table 1.2; SMC1B; ENSG00000077935; HLA -B*40:01
FEEISTSGEL

SEQ ID NO: 9364 - protein, 11 aa, Homo sapiens
  Table 1.2; SMC1B; ENSG00000077935; HLA -B*38:01,HLA-B*40:01,HLA-B*49:01
FEEISTSGELI

SEQ ID NO: 9365 - protein, 8 aa, Homo sapiens
  Table 1.2; SMC1B; ENSG00000077935; HLA -A*30:01,HLA-B*18:01,HLA-B*40:01,HLA-B*49:01
FEHVSISI

SEQ ID NO: 9366 - protein, 8 aa, Homo sapiens
  Table 1.2; SMC1B; ENSG00000077935; HLA -A*30:01,HLA-B*49:01
FEIDYSSL

SEQ ID NO: 9367 - protein, 9 aa, Homo sapiens
  Table 1.2; SMC1B; ENSG00000077935; HLA -B*49:01
FEIDYSSLK

SEQ ID NO: 9368 - protein, 9 aa, Homo sapiens
  Table 1.2; SMC1B; ENSG00000077935; HLA -A*30:01,HLA-B*40:01,HLA-B*49:01
FEKQIEEEI

SEQ ID NO: 9369 - protein, 10 aa, Homo sapiens
  Table 1.2; SMC1B; ENSG00000077935; HLA -B*40:01
FEKQIEEEIL

SEQ ID NO: 9370 - protein, 10 aa, Homo sapiens
  Table 1.2; SMC1B; ENSG00000077935; HLA -A*02:03
FLKSGVISGG

SEQ ID NO: 9371 - protein, 11 aa, Homo sapiens
  Table 1.2; SMC1B; ENSG00000077935; HLA -A*01:01
FLSPENPEEPY

SEQ ID NO: 9372 - protein, 8 aa, Homo sapiens
  Table 1.2; SMC1B; ENSG00000077935; HLA -A*33:03
FNDNLVSR

SEQ ID NO: 9373 - protein, 11 aa, Homo sapiens
  Table 1.2; SMC1B; ENSG00000077935; HLA -A*01:01
FNDNLVSRSVY

SEQ ID NO: 9374 - protein, 8 aa, Homo sapiens
  Table 1.2; SMC1B; ENSG00000077935; HLA -B*08:01
FPQLKKVI

SEQ ID NO: 9375 - protein, 8 aa, Homo sapiens
  Table 1.2; SMC1B; ENSG00000077935; HLA -B*39:01
FQESTDAF

SEQ ID NO: 9376 - protein, 8 aa, Homo sapiens
  Table 1.2; SMC1B; ENSG00000077935; HLA -B*13:02
FQGTVESI

SEQ ID NO: 9377 - protein, 8 aa, Homo sapiens
  Table 1.2; SMC1B; ENSG00000077935; HLA -B*13:02,HLA-B*15:01
FQMIVISL

SEQ ID NO: 9378 - protein, 10 aa, Homo sapiens
  Table 1.2; SMC1B; ENSG00000077935; HLA -A*02:01,HLA-B*35:03
FVLDEVDAAL

SEQ ID NO: 9379 - protein, 10 aa, Homo sapiens
  Table 1.2; SMC1B; ENSG00000077935; HLA -A*02:01,HLA-A*02:03,HLA-A*02:04,HLA-A*02:07,HLA-A*25:01, HLA-A*26:01,HLA-A*33:03,HLA-A*68:02
FVMGEKIANL

SEQ ID NO: 9380 - protein, 8 aa, Homo sapiens
  Table 1.2; SMC1B; ENSG00000077935; HLA -C*14:02
FYQEQSQL

SEQ ID NO: 9381 - protein, 9 aa, Homo sapiens
  Table 1.2; SMC1B; ENSG00000077935; HLA -B*40:01,HLA-B*44:03,HLA-B*49:01
GEEKTFARI

SEQ ID NO: 9382 - protein, 10 aa, Homo sapiens
  Table 1.2; SMC1B; ENSG00000077935; HLA -B*49:01
GEEKTFARII

SEQ ID NO: 9383 - protein, 9 aa, Homo sapiens
  Table 1.2; SMC1B; ENSG00000077935; HLA -B*49:01
GEKIANLRV

SEQ ID NO: 9384 - protein, 10 aa, Homo sapiens
  Table 1.2; SMC1B; ENSG00000077935; HLA -B*27:02
GELIGEYEEK

SEQ ID NO: 9385 - protein, 10 aa, Homo sapiens
  Table 1.2; SMC1B; ENSG00000077935; HLA -A*30:01,HLA-B*44:02,HLA-B*44:03,HLA-B*49:01
GEVQGNLKQI

SEQ ID NO: 9386 - protein, 9 aa, Homo sapiens
  Table 1.2; SMC1B; ENSG00000077935; HLA -B*15:03
GKSNVMDAL

SEQ ID NO: 9387 - protein, 10 aa, Homo sapiens
  Table 1.2; SMC1B; ENSG00000077935; HLA -B*07:02,HLA-C*07:02
GPERQKTVAL

SEQ ID NO: 9388 - protein, 11 aa, Homo sapiens
  Table 1.2; SMC1B; ENSG00000077935; HLA -B*07:02
GPNGSGKSNVM

SEQ ID NO: 9389 - protein, 9 aa, Homo sapiens
  Table 1.2; SMC1B; ENSG00000077935; HLA -B*27:05
GRFITAIVV

SEQ ID NO: 9390 - protein, 9 aa, Homo sapiens
  Table 1.2; SMC1B; ENSG00000077935; HLA -B*27:05
GRQVIGPFR

SEQ ID NO: 9391 - protein, 9 aa, Homo sapiens
  Table 1.2; SMC1B; ENSG00000077935; HLA -A*03:02,HLA-A*11:01
GSEDIDHLK

SEQ ID NO: 9392 - protein, 10 aa, Homo sapiens
  Table 1.2; SMC1B; ENSG00000077935; HLA -A*01:01,HLA-A*11:01
GSEDIDHLKK

SEQ ID NO: 9393 - protein, 9 aa, Homo sapiens
  Table 1.2; SMC1B; ENSG00000077935; HLA -A*02:01,HLA-A*02:04
GSLDDIIEV

SEQ ID NO: 9394 - protein, 8 aa, Homo sapiens
  Table 1.2; SMC1B; ENSG00000077935; HLA -A*32:01
GTQTRLKY

SEQ ID NO: 9395 - protein, 9 aa, Homo sapiens
  Table 1.2; SMC1B; ENSG00000077935; HLA -A*03:01,HLA-A*03:02,HLA-A*11:01,HLA-A*68:01,HLA-C*07:06
GTVESISVK

SEQ ID NO: 9396 - protein, 10 aa, Homo sapiens
  Table 1.2; SMC1B; ENSG00000077935; HLA -A*03:01,HLA-A*03:02,HLA-A*11:01,HLA-A*68:01,HLA-B*27:02, HLA-C*07:06
GTVESISVKK

SEQ ID NO: 9397 - protein, 10 aa, Homo sapiens
  Table 1.2; SMC1B; ENSG00000077935; HLA -B*40:01
GVISGGSSDL

SEQ ID NO: 9398 - protein, 11 aa, Homo sapiens
  Table 1.2; SMC1B; ENSG00000077935; HLA -A*03:01,HLA-A*03:02,HLA-A*11:01,HLA-B*27:02
GVISGGSSDLK

SEQ ID NO: 9399 - protein, 8 aa, Homo sapiens
  Table 1.2; SMC1B; ENSG00000077935; HLA -B*18:01,HLA-B*37:01
HENIVKAR

SEQ ID NO: 9400 - protein, 8 aa, Homo sapiens
  Table 1.2; SMC1B; ENSG00000077935; HLA -B*08:01
HGMLTRQL

SEQ ID NO: 9401 - protein, 9 aa, Homo sapiens
  Table 1.2; SMC1B; ENSG00000077935; HLA -A*68:01
HIALSGPER

SEQ ID NO: 9402 - protein, 10 aa, Homo sapiens
  Table 1.2; SMC1B; ENSG00000077935; HLA -A*02:04
HLLNTKLEHV

SEQ ID NO: 9403 - protein, 9 aa, Homo sapiens
  Table 1.2; SMC1B; ENSG00000077935; HLA -A*02:03
HLRLLLQQV

SEQ ID NO: 9404 - protein, 9 aa, Homo sapiens
  Table 1.2; SMC1B; ENSG00000077935; HLA -B*08:01
HPIHKKYQL

SEQ ID NO: 9405 - protein, 9 aa, Homo sapiens
  Table 1.2; SMC1B; ENSG00000077935; HLA -B*57:01
HSFRPAPFF

SEQ ID NO: 9406 - protein, 9 aa, Homo sapiens
  Table 1.2; SMC1B; ENSG00000077935; HLA -A*03:01,HLA-A*03:02
HVNRDLSVK

SEQ ID NO: 9407 - protein, 9 aa, Homo sapiens
  Table 1.2; SMC1B; ENSG00000077935; HLA -B*38:01
HVSISIDQI

SEQ ID NO: 9408 - protein, 10 aa, Homo sapiens
  Table 1.2; SMC1B; ENSG00000077935; HLA -B*35:01
HVSISIDQIY

SEQ ID NO: 9409 - protein, 11 aa, Homo sapiens
  Table 1.2; SMC1B; ENSG00000077935; HLA -A*03:02,HLA-A*11:01
HVSISIDQIYK

SEQ ID NO: 9410 - protein, 9 aa, Homo sapiens
  Table 1.2; SMC1B; ENSG00000077935; HLA -B*51:01
IANLRVKNI

SEQ ID NO: 9411 - protein, 8 aa, Homo sapiens
  Table 1.2; SMC1B; ENSG00000077935; HLA -B*37:01
IDQIYKKL

SEQ ID NO: 9412 - protein, 8 aa, Homo sapiens
  Table 1.2; SMC1B; ENSG00000077935; HLA -B*18:01,HLA-B*37:01
IDVIKTQF

SEQ ID NO: 9413 - protein, 10 aa, Homo sapiens
  Table 1.2; SMC1B; ENSG00000077935; HLA -A*30:01,HLA-B*40:01
IEIILLSGSL

SEQ ID NO: 9414 - protein, 8 aa, Homo sapiens
  Table 1.2; SMC1B; ENSG00000077935; HLA -A*30:01,HLA-B*18:01,HLA-B*37:01,HLA-B*40:01,HLA-B*49:01
IELEASQL

SEQ ID NO: 9415 - protein, 11 aa, Homo sapiens
  Table 1.2; SMC1B; ENSG00000077935; HLA -A*30:02,HLA-B*18:01,HLA-B*44:02,HLA-B*44:03
IELEASQLDRY

SEQ ID NO: 9416 - protein, 9 aa, Homo sapiens
  Table 1.2; SMC1B; ENSG00000077935; HLA -A*30:01,HLA-B*18:01,HLA-B*40:01,HLA-B*40:02,HLA-B*49:01
IEVEMGTEA

SEQ ID NO: 9417 - protein, 9 aa, Homo sapiens
  Table 1.2; SMC1B; ENSG00000077935; HLA -A*32:01,HLA-B*46:01
IGKPISSSA

SEQ ID NO: 9418 - protein, 9 aa, Homo sapiens
  Table 1.2; SMC1B; ENSG00000077935; HLA -B*46:01,HLA-B*58:01,HLA-C*16:01
IGVENIREF

SEQ ID NO: 9419 - protein, 9 aa, Homo sapiens
  Table 1.2; SMC1B; ENSG00000077935; HLA -A*03:01,HLA-A*03:02
IIGPNGSGK

SEQ ID NO: 9420 - protein, 9 aa, Homo sapiens
  Table 1.2; SMC1B; ENSG00000077935; HLA -B*46:01
IIRGGCSEF

SEQ ID NO: 9421 - protein, 11 aa, Homo sapiens
  Table 1.2; SMC1B; ENSG00000077935; HLA -A*03:01,HLA-A*03:02,HLA-B*27:02
IIYVEESGEEK

SEQ ID NO: 9422 - protein, 9 aa, Homo sapiens
  Table 1.2; SMC1B; ENSG00000077935; HLA -B*15:03
IKEQTQDQF

SEQ ID NO: 9423 - protein, 10 aa, Homo sapiens
  Table 1.2; SMC1B; ENSG00000077935; HLA -B*38:01
IQELIHGAHI

SEQ ID NO: 9424 - protein, 9 aa, Homo sapiens
  Table 1.2; SMC1B; ENSG00000077935; HLA -A*03:01,HLA-A*03:02
IQGTQTRLK

SEQ ID NO: 9425 - protein, 10 aa, Homo sapiens
  Table 1.2; SMC1B; ENSG00000077935; HLA -A*30:02,HLA-A*32:01
IQGTQTRLKY

SEQ ID NO: 9426 - protein, 9 aa, Homo sapiens
  Table 1.2; SMC1B; ENSG00000077935; HLA -A*29:02,HLA-A*30:02
IQLQLFQLY

SEQ ID NO: 9427 - protein, 10 aa, Homo sapiens
  Table 1.2; SMC1B; ENSG00000077935; HLA -A*01:01,HLA-A*30:02
ISGGSSDLKY

SEQ ID NO: 9428 - protein, 11 aa, Homo sapiens
  Table 1.2; SMC1B; ENSG00000077935; HLA -A*03:02
ISGGSSDLKYK

SEQ ID NO: 9429 - protein, 8 aa, Homo sapiens
  Table 1.2; SMC1B; ENSG00000077935; HLA -A*11:01
ISIDQIYK

SEQ ID NO: 9430 - protein, 9 aa, Homo sapiens
  Table 1.2; SMC1B; ENSG00000077935; HLA -A*03:02,HLA-A*11:01
ISIDQIYKK

SEQ ID NO: 9431 - protein, 10 aa, Homo sapiens
  Table 1.2; SMC1B; ENSG00000077935; HLA -B*57:01
ISIDQIYKKL

SEQ ID NO: 9432 - protein, 10 aa, Homo sapiens
  Table 1.2; SMC1B; ENSG00000077935; HLA -B*57:01
ISLKEEFYSR

SEQ ID NO: 9433 - protein, 11 aa, Homo sapiens
  Table 1.2; SMC1B; ENSG00000077935; HLA -A*30:02
ISSSASVKIIY

SEQ ID NO: 9434 - protein, 11 aa, Homo sapiens
  Table 1.2; SMC1B; ENSG00000077935; HLA -A*01:01,HLA-A*30:02,HLA-B*58:01
ISTSGELIGEY

SEQ ID NO: 9435 - protein, 10 aa, Homo sapiens
  Table 1.2; SMC1B; ENSG00000077935; HLA -A*03:01,HLA-A*03:02,HLA-B*27:02
ITAIVVASEK

SEQ ID NO: 9436 - protein, 11 aa, Homo sapiens
  Table 1.2; SMC1B; ENSG00000077935; HLA -A*68:02
ITAIVVASEKV

SEQ ID NO: 9437 - protein, 9 aa, Homo sapiens
  Table 1.2; SMC1B; ENSG00000077935; HLA -A*23:01,HLA-A*24:02,HLA-A*25:01,HLA-A*26:01,HLA-A*29:02, HLA-A*30:02,HLA-A*32:01,HLA-B*15:01,HLA-B*35:01,HLA-B*46:01, HLA-B*57:01,HLA-B*58:01
IVISLKEEF

SEQ ID NO: 9438 - protein, 10 aa, Homo sapiens
  Table 1.2; SMC1B; ENSG00000077935; HLA -A*29:02,HLA-A*30:02
IVISLKEEFY

SEQ ID NO: 9439 - protein, 10 aa, Homo sapiens
  Table 1.2; SMC1B; ENSG00000077935; HLA -A*03:02,HLA-A*11:01
IVVASEKVAK

SEQ ID NO: 9440 - protein, 10 aa, Homo sapiens
  Table 1.2; SMC1B; ENSG00000077935; HLA -B*27:02
IYVEESGEEK

SEQ ID NO: 9441 - protein, 10 aa, Homo sapiens
  Table 1.2; SMC1B; ENSG00000077935; HLA -B*58:01
KAEEDAQFNF

SEQ ID NO: 9442 - protein, 10 aa, Homo sapiens
  Table 1.2; SMC1B; ENSG00000077935; HLA -B*37:01,HLA-B*40:01
KEEAERYQSL

SEQ ID NO: 9443 - protein, 10 aa, Homo sapiens
  Table 1.2; SMC1B; ENSG00000077935; HLA -B*40:01
KEERAEPETF

SEQ ID NO: 9444 - protein, 11 aa, Homo sapiens
  Table 1.2; SMC1B; ENSG00000077935; HLA -B*40:01
KEERAEPETFL

SEQ ID NO: 9445 - protein, 10 aa, Homo sapiens
  Table 1.2; SMC1B; ENSG00000077935; HLA -A*30:01,HLA-B*40:01,HLA-B*40:02
KEKKQQEETL

SEQ ID NO: 9446 - protein, 9 aa, Homo sapiens
  Table 1.2; SMC1B; ENSG00000077935; HLA -A*30:01,HLA-B*37:01,HLA-B*40:01,HLA-B*40:02,HLA-B*49:01
KELKSVETL

SEQ ID NO: 9447 - protein, 10 aa, Homo sapiens
  Table 1.2; SMC1B; ENSG00000077935; HLA -B*40:01
KELKSVETLL

SEQ ID NO: 9448 - protein, 8 aa, Homo sapiens
  Table 1.2; SMC1B; ENSG00000077935; HLA -B*37:01
KENTSHHL

SEQ ID NO: 9449 - protein, 10 aa, Homo sapiens
  Table 1.2; SMC1B; ENSG00000077935; HLA -A*30:01,HLA-B*40:01
KEQTQDQFQM

SEQ ID NO: 9450 - protein, 11 aa, Homo sapiens
  Table 1.2; SMC1B; ENSG00000077935; HLA -A*30:01,HLA-B*40:01,HLA-B*44:02,HLA-B*44:03
KETDLKQIQTL

SEQ ID NO: 9451 - protein, 10 aa, Homo sapiens
  Table 1.2; SMC1B; ENSG00000077935; HLA -A*30:01,HLA-B*40:01,HLA-B*40:02
KEVVSIQTSL

SEQ ID NO: 9452 - protein, 9 aa, Homo sapiens
  Table 1.2; SMC1B; ENSG00000077935; HLA -A*23:01,HLA-A*24:02,HLA-A*32:01,HLA-C*14:02
KFQESTDAF

SEQ ID NO: 9453 - protein, 10 aa, Homo sapiens
  Table 1.2; SMC1B; ENSG00000077935; HLA -A*03:02,HLA-A*11:01
KGSEDIDHLK

SEQ ID NO: 9454 - protein, 9 aa, Homo sapiens
  Table 1.2; SMC1B; ENSG00000077935; HLA -A*32:01,HLA-B*58:01
KINTLKETI

SEQ ID NO: 9455 - protein, 11 aa, Homo sapiens
  Table 1.2; SMC1B; ENSG00000077935; HLA -A*03:01,HLA-A*03:02
KINTLKETIQK

SEQ ID NO: 9456 - protein, 10 aa, Homo sapiens
  Table 1.2; SMC1B; ENSG00000077935; HLA -A*03:01,HLA-A*03:02
KIQELKGLMK

SEQ ID NO: 9457 - protein, 9 aa, Homo sapiens
  Table 1.2; SMC1B; ENSG00000077935; HLA -A*02:04
KIQLQLFQL

SEQ ID NO: 9458 - protein, 9 aa, Homo sapiens
  Table 1.2; SMC1B; ENSG00000077935; HLA -A*03:01,HLA-A*03:02
KLNKINTLK

SEQ ID NO: 9459 - protein, 9 aa, Homo sapiens
  Table 1.2; SMC1B; ENSG00000077935; HLA -A*02:01,HLA-A*02:03,HLA-A*02:04
KLQKEVVSI

SEQ ID NO: 9460 - protein, 9 aa, Homo sapiens
  Table 1.2; SMC1B; ENSG00000077935; HLA -A*03:01
KMNKIQLQL

SEQ ID NO: 9461 - protein, 9 aa, Homo sapiens
  Table 1.2; SMC1B; ENSG00000077935; HLA -B*07:02,HLA-B*55:01,HLA-B*56:01,HLA-C*07:02
KPISSSASV

SEQ ID NO: 9462 - protein, 10 aa, Homo sapiens
  Table 1.2; SMC1B; ENSG00000077935; HLA -A*11:01
KQIEEEILHK

SEQ ID NO: 9463 - protein, 11 aa, Homo sapiens
  Table 1.2; SMC1B; ENSG00000077935; HLA -A*11:01
KQIEEEILHKK

SEQ ID NO: 9464 - protein, 10 aa, Homo sapiens
  Table 1.2; SMC1B; ENSG00000077935; HLA -A*03:01,HLA-A*03:02,HLA-A*11:01,HLA-B*58:01
KSVETLLNQK

SEQ ID NO: 9465 - protein, 9 aa, Homo sapiens
  Table 1.2; SMC1B; ENSG00000077935; HLA -A*01:01,HLA-A*32:01,HLA-B*57:01,HLA-B*58:01,HLA-C*05:01
KTDEERLAF

SEQ ID NO: 9466 - protein, 9 aa, Homo sapiens
  Table 1.2; SMC1B; ENSG00000077935; HLA -A*03:01,HLA-A*03:02,HLA-A*11:01
KTQFPQLKK

SEQ ID NO: 9467 - protein, 9 aa, Homo sapiens
  Table 1.2; SMC1B; ENSG00000077935; HLA -B*58:01
KTVALDGTL

SEQ ID NO: 9468 - protein, 10 aa, Homo sapiens
  Table 1.2; SMC1B; ENSG00000077935; HLA -B*57:01,HLA-B*58:01
KTVALDGTLF

SEQ ID NO: 9469 - protein, 9 aa, Homo sapiens
  Table 1.2; SMC1B; ENSG00000077935; HLA -A*32:01,HLA-B*58:01
KVATMTQQL

SEQ ID NO: 9470 - protein, 11 aa, Homo sapiens
  Table 1.2; SMC1B; ENSG00000077935; HLA -A*03:01
KVATMTQQLEK

SEQ ID NO: 9471 - protein, 9 aa, Homo sapiens
  Table 1.2; SMC1B; ENSG00000077935; HLA -A*03:02
KVEDDIFQH

SEQ ID NO: 9472 - protein, 10 aa, Homo sapiens
  Table 1.2; SMC1B; ENSG00000077935; HLA -A*02:07,HLA-B*57:01,HLA-B*58:01
KVEDDIFQHF

SEQ ID NO: 9473 - protein, 10 aa, Homo sapiens
  Table 1.2; SMC1B; ENSG00000077935; HLA -A*02:03
KVFGRFITAI

SEQ ID NO: 9474 - protein, 10 aa, Homo sapiens
  Table 1.2; SMC1B; ENSG00000077935; HLA -A*02:04,HLA-A*02:07,HLA-A*03:02
KVQDIEIILL

SEQ ID NO: 9475 - protein, 10 aa, Homo sapiens
  Table 1.2; SMC1B; ENSG00000077935; HLA -A*31:01
KVQTQIEEER

SEQ ID NO: 9476 - protein, 11 aa, Homo sapiens
  Table 1.2; SMC1B; ENSG00000077935; HLA -A*03:02
KVQTQIEEERK

SEQ ID NO: 9477 - protein, 9 aa, Homo sapiens
  Table 1.2; SMC1B; ENSG00000077935; HLA -A*24:02
KYQLAVTKV

SEQ ID NO: 9478 - protein, 10 aa, Homo sapiens
  Table 1.2; SMC1B; ENSG00000077935; HLA -A*24:02
KYQLAVTKVF

SEQ ID NO: 9479 - protein, 9 aa, Homo sapiens
  Table 1.2; SMC1B; ENSG00000077935; HLA -B*18:01,HLA-B*44:02,HLA-B*44:03
LEASQLDRY

SEQ ID NO: 9480 - protein, 9 aa, Homo sapiens
  Table 1.2; SMC1B; ENSG00000077935; HLA -B*49:01
LEELKMNKI

SEQ ID NO: 9481 - protein, 9 aa, Homo sapiens
  Table 1.2; SMC1B; ENSG00000077935; HLA -B*49:01
LEGISYNCV

SEQ ID NO: 9482 - protein, 9 aa, Homo sapiens
  Table 1.2; SMC1B; ENSG00000077935; HLA -B*18:01,HLA-B*44:02,HLA-B*44:03
LEKEEAERY

SEQ ID NO: 9483 - protein, 9 aa, Homo sapiens
  Table 1.2; SMC1B; ENSG00000077935; HLA -B*18:01,HLA-B*37:01,HLA-B*44:02,HLA-B*44:03
LELLLVENF

SEQ ID NO: 9484 - protein, 8 aa, Homo sapiens
  Table 1.2; SMC1B; ENSG00000077935; HLA -B*18:01
LETELADL

SEQ ID NO: 9485 - protein, 10 aa, Homo sapiens
  Table 1.2; SMC1B; ENSG00000077935; HLA -A*03:02
LIQGTQTRLK

SEQ ID NO: 9486 - protein, 11 aa, Homo sapiens
  Table 1.2; SMC1B; ENSG00000077935; HLA -A*29:02
LIQGTQTRLKY

SEQ ID NO: 9487 - protein, 8 aa, Homo sapiens
  Table 1.2; SMC1B; ENSG00000077935; HLA -B*37:01
LLFAVHSF

SEQ ID NO: 9488 - protein, 9 aa, Homo sapiens
  Table 1.2; SMC1B; ENSG00000077935; HLA -A*02:03
LLKTAAPNL

SEQ ID NO: 9489 - protein, 9 aa, Homo sapiens
  Table 1.2; SMC1B; ENSG00000077935; HLA -A*32:01
LLNQKRPQY

SEQ ID NO: 9490 - protein, 9 aa, Homo sapiens
  Table 1.2; SMC1B; ENSG00000077935; HLA -A*02:01,HLA-A*02:03,HLA-A*02:04
LLNTKLEHV

SEQ ID NO: 9491 - protein, 9 aa, Homo sapiens
  Table 1.2; SMC1B; ENSG00000077935; HLA -A*25:01
LLVENFKSW

SEQ ID NO: 9492 - protein, 8 aa, Homo sapiens
  Table 1.2; SMC1B; ENSG00000077935; HLA -B*08:01
LNLIRSEL

SEQ ID NO: 9493 - protein, 10 aa, Homo sapiens
  Table 1.2; SMC1B; ENSG00000077935; HLA -B*15:01
LQKAEEDAQF

SEQ ID NO: 9494 - protein, 8 aa, Homo sapiens
  Table 1.2; SMC1B; ENSG00000077935; HLA -B*15:01
LQKEVVSI

SEQ ID NO: 9495 - protein, 11 aa, Homo sapiens
  Table 1.2; SMC1B; ENSG00000077935; HLA -B*27:05
LQSDQEIEAHL

SEQ ID NO: 9496 - protein, 10 aa, Homo sapiens
  Table 1.2; SMC1B; ENSG00000077935; HLA -A*01:01
LTRLNVQLEY

SEQ ID NO: 9497 - protein, 10 aa, Homo sapiens
  Table 1.2; SMC1B; ENSG00000077935; HLA -A*02:01,HLA-A*02:03,HLA-A*25:01,HLA-A*68:02,HLA-B*51:01
LVFQGTVESI

SEQ ID NO: 9498 - protein, 9 aa, Homo sapiens
  Table 1.2; SMC1B; ENSG00000077935; HLA -A*33:03
LYPDSVFGR

SEQ ID NO: 9499 - protein, 10 aa, Homo sapiens
  Table 1.2; SMC1B; ENSG00000077935; HLA -A*23:01,HLA-A*24:02
LYPDSVFGRL

SEQ ID NO: 9500 - protein, 11 aa, Homo sapiens
  Table 1.2; SMC1B; ENSG00000077935; HLA -A*24:02,HLA-A*29:02
LYPDSVFGRLF

SEQ ID NO: 9501 - protein, 8 aa, Homo sapiens
  Table 1.2; SMC1B; ENSG00000077935; HLA -A*30:01,HLA-B*18:01,HLA-B*37:01
MDALSFVM

SEQ ID NO: 9502 - protein, 9 aa, Homo sapiens
  Table 1.2; SMC1B; ENSG00000077935; HLA -A*30:01,HLA-B*08:01,HLA-B*18:01,HLA-B*37:01,HLA-B*40:01, HLA-B*40:02
MEEARHIAL

SEQ ID NO: 9503 - protein, 9 aa, Homo sapiens
  Table 1.2; SMC1B; ENSG00000077935; HLA -A*33:01,HLA-A*33:03
MLSEGIKER

SEQ ID NO: 9504 - protein, 9 aa, Homo sapiens
  Table 1.2; SMC1B; ENSG00000077935; HLA -A*02:01,HLA-A*02:04
MLTRLNVQL

SEQ ID NO: 9505 - protein, 9 aa, Homo sapiens
  Table 1.2; SMC1B; ENSG00000077935; HLA -B*56:01
MPMDNLSGG

SEQ ID NO: 9506 - protein, 11 aa, Homo sapiens
  Table 1.2; SMC1B; ENSG00000077935; HLA -B*35:01
MPMDNLSGGEK

SEQ ID NO: 9507 - protein, 10 aa, Homo sapiens
  Table 1.2; SMC1B; ENSG00000077935; HLA -B*57:01
MTQQLEKLQW

SEQ ID NO: 9508 - protein, 9 aa, Homo sapiens
  Table 1.2; SMC1B; ENSG00000077935; HLA -A*25:01,HLA-A*26:01
MVIDVIKTQ

SEQ ID NO: 9509 - protein, 10 aa, Homo sapiens
  Table 1.2; SMC1B; ENSG00000077935; HLA -A*23:01,HLA-A*25:01,HLA-A*26:01,HLA-A*32:01,HLA-A*68:01, HLA-B*15:01,HLA-B*35:01
MVIDVIKTQF

SEQ ID NO: 9510 - protein, 9 aa, Homo sapiens
  Table 1.2; SMC1B; ENSG00000077935; HLA -B*37:01
NDNLVSRSV

SEQ ID NO: 9511 - protein, 10 aa, Homo sapiens
  Table 1.2; SMC1B; ENSG00000077935; HLA -B*18:01
NDNLVSRSVY

SEQ ID NO: 9512 - protein, 8 aa, Homo sapiens
  Table 1.2; SMC1B; ENSG00000077935; HLA -B*18:01
NELEMIKK

SEQ ID NO: 9513 - protein, 10 aa, Homo sapiens
  Table 1.2; SMC1B; ENSG00000077935; HLA -A*30:01,HLA-B*40:01
NELMAKQQQL

SEQ ID NO: 9514 - protein, 9 aa, Homo sapiens
  Table 1.2; SMC1B; ENSG00000077935; HLA -A*02:04
NIQELIHGA

SEQ ID NO: 9515 - protein, 9 aa, Homo sapiens
  Table 1.2; SMC1B; ENSG00000077935; HLA -A*02:03
NLVSRSVYI

SEQ ID NO: 9516 - protein, 9 aa, Homo sapiens
  Table 1.2; SMC1B; ENSG00000077935; HLA -A*31:01,HLA-A*33:01,HLA-A*33:03,HLA-A*68:01
NTKLEHVNR

SEQ ID NO: 9517 - protein, 9 aa, Homo sapiens
  Table 1.2; SMC1B; ENSG00000077935; HLA -A*03:01,HLA-A*03:02,HLA-A*11:01,HLA-A*33:01
NTLKETIQK

SEQ ID NO: 9518 - protein, 10 aa, Homo sapiens
  Table 1.2; SMC1B; ENSG00000077935; HLA -A*25:01,HLA-A*26:01,HLA-A*30:02
NTNIGKVSSY

SEQ ID NO: 9519 - protein, 9 aa, Homo sapiens
  Table 1.2; SMC1B; ENSG00000077935; HLA -A*02:01,HLA-A*02:03,HLA-A*02:07,HLA-A*26:01,HLA-A*68:02
NVMDALSFV

SEQ ID NO: 9520 - protein, 8 aa, Homo sapiens
  Table 1.2; SMC1B; ENSG00000077935; HLA -C*14:02
PYLEGISY

SEQ ID NO: 9521 - protein, 9 aa, Homo sapiens
  Table 1.2; SMC1B; ENSG00000077935; HLA -B*27:02
QATIDIYEK

SEQ ID NO: 9522 - protein, 8 aa, Homo sapiens
  Table 1.2; SMC1B; ENSG00000077935; HLA -B*44:02
QEDDIKAL

SEQ ID NO: 9523 - protein, 9 aa, Homo sapiens
  Table 1.2; SMC1B; ENSG00000077935; HLA -B*49:01
QEDILLKTA

SEQ ID NO: 9524 - protein, 10 aa, Homo sapiens
  Table 1.2; SMC1B; ENSG00000077935; HLA -B*49:01
QEDILLKTAA

SEQ ID NO: 9525 - protein, 9 aa, Homo sapiens
  Table 1.2; SMC1B; ENSG00000077935; HLA -B*40:01,HLA-B*49:01
QEETLVDEI

SEQ ID NO: 9526 - protein, 11 aa, Homo sapiens
  Table 1.2; SMC1B; ENSG00000077935; HLA -B*27:02
QEETLVDEIEK

SEQ ID NO: 9527 - protein, 9 aa, Homo sapiens
  Table 1.2; SMC1B; ENSG00000077935; HLA -B*44:02,HLA-B*44:03
QEFEQVKKR

SEQ ID NO: 9528 - protein, 8 aa, Homo sapiens
  Table 1.2; SMC1B; ENSG00000077935; HLA -B*44:03
QEIDQKRY

SEQ ID NO: 9529 - protein, 9 aa, Homo sapiens
  Table 1.2; SMC1B; ENSG00000077935; HLA -B*44:02,HLA-B*44:03
QEIDQKRYF

SEQ ID NO: 9530 - protein, 10 aa, Homo sapiens
  Table 1.2; SMC1B; ENSG00000077935; HLA -B*44:02,HLA-B*44:03
QEIDQKRYFY

SEQ ID NO: 9531 - protein, 9 aa, Homo sapiens
  Table 1.2; SMC1B; ENSG00000077935; HLA -A*30:01,HLA-B*37:01,HLA-B*40:01,HLA-B*44:02,HLA-B*44:03, HLA-B*49:01
QEIEAHLRL

SEQ ID NO: 9532 - protein, 10 aa, Homo sapiens
  Table 1.2; SMC1B; ENSG00000077935; HLA -B*44:02,HLA-B*44:03
QEIEAHLRLL

SEQ ID NO: 9533 - protein, 11 aa, Homo sapiens
  Table 1.2; SMC1B; ENSG00000077935; HLA -B*44:02
QEIEAHLRLLL

SEQ ID NO: 9534 - protein, 9 aa, Homo sapiens
  Table 1.2; SMC1B; ENSG00000077935; HLA -B*37:01,HLA-B*49:01
QELIHGAHI

SEQ ID NO: 9535 - protein, 10 aa, Homo sapiens
  Table 1.2; SMC1B; ENSG00000077935; HLA -B*44:02,HLA-B*44:03
QELKGLMKTL

SEQ ID NO: 9536 - protein, 10 aa, Homo sapiens
  Table 1.2; SMC1B; ENSG00000077935; HLA -A*30:01,HLA-B*40:01
QEQSQLQSEL

SEQ ID NO: 9537 - protein, 11 aa, Homo sapiens
  Table 1.2; SMC1B; ENSG00000077935; HLA -A*30:01,HLA-B*40:01
QEQSQLQSELL

SEQ ID NO: 9538 - protein, 9 aa, Homo sapiens
  Table 1.2; SMC1B; ENSG00000077935; HLA -A*23:01
QFQMIVISL

SEQ ID NO: 9539 - protein, 9 aa, Homo sapiens
  Table 1.2; SMC1B; ENSG00000077935; HLA -C*16:01
QGTQTRLKY

SEQ ID NO: 9540 - protein, 9 aa, Homo sapiens
  Table 1.2; SMC1B; ENSG00000077935; HLA -A*01:01,HLA-A*03:02,HLA-A*11:01
QIEEEILHK

SEQ ID NO: 9541 - protein, 10 aa, Homo sapiens
  Table 1.2; SMC1B; ENSG00000077935; HLA -A*03:02
QIEEEILHKK

SEQ ID NO: 9542 - protein, 9 aa, Homo sapiens
  Table 1.2; SMC1B; ENSG00000077935; HLA -A*02:03
QLKKVIQFV

SEQ ID NO: 9543 - protein, 10 aa, Homo sapiens
  Table 1.2; SMC1B; ENSG00000077935; HLA -A*03:02
QLQQTEKELK

SEQ ID NO: 9544 - protein, 9 aa, Homo sapiens
  Table 1.2; SMC1B; ENSG00000077935; HLA -A*02:04
QLQSELLNI

SEQ ID NO: 9545 - protein, 9 aa, Homo sapiens
  Table 1.2; SMC1B; ENSG00000077935; HLA -B*13:02
QQVASQEDI

SEQ ID NO: 9546 - protein, 11 aa, Homo sapiens
  Table 1.2; SMC1B; ENSG00000077935; HLA -B*38:01
QQVASQEDILL

SEQ ID NO: 9547 - protein, 10 aa, Homo sapiens
  Table 1.2; SMC1B; ENSG00000077935; HLA -A*01:01
QSDQEIEAHL

SEQ ID NO: 9548 - protein, 11 aa, Homo sapiens
  Table 1.2; SMC1B; ENSG00000077935; HLA -A*01:01
QSDQEIEAHLR

SEQ ID NO: 9549 - protein, 10 aa, Homo sapiens
  Table 1.2; SMC1B; ENSG00000077935; HLA -A*33:03
QTLIQGTQTR

SEQ ID NO: 9550 - protein, 9 aa, Homo sapiens
  Table 1.2; SMC1B; ENSG00000077935; HLA -A*03:01,HLA-A*03:02,HLA-A*11:01,HLA-A*68:01
QTVNELMAK

SEQ ID NO: 9551 - protein, 11 aa, Homo sapiens
  Table 1.2; SMC1B; ENSG00000077935; HLA -A*03:01,HLA-A*03:02,HLA-A*11:01,HLA-A*68:01,HLA-B*27:02
QVASQEDILLK

SEQ ID NO: 9552 - protein, 9 aa, Homo sapiens
  Table 1.2; SMC1B; ENSG00000077935; HLA -B*08:01
QVRKKVATM

SEQ ID NO: 9553 - protein, 9 aa, Homo sapiens
  Table 1.2; SMC1B; ENSG00000077935; HLA -A*01:01
RADALIGIY

SEQ ID NO: 9554 - protein, 9 aa, Homo sapiens
  Table 1.2; SMC1B; ENSG00000077935; HLA -B*51:01,HLA-B*58:01,HLA-C*16:02
RALENLKTV

SEQ ID NO: 9555 - protein, 10 aa, Homo sapiens
  Table 1.2; SMC1B; ENSG00000077935; HLA -A*30:01,HLA-B*40:01
RDIELEASQL

SEQ ID NO: 9556 - protein, 9 aa, Homo sapiens
  Table 1.2; SMC1B; ENSG00000077935; HLA -A*31:01,HLA-A*33:01,HLA-A*33:03
RFNDNLVSR

SEQ ID NO: 9557 - protein, 9 aa, Homo sapiens
  Table 1.2; SMC1B; ENSG00000077935; HLA -B*38:01
RHGEVQGNL

SEQ ID NO: 9558 - protein, 8 aa, Homo sapiens
  Table 1.2; SMC1B; ENSG00000077935; HLA -A*03:01,HLA-A*30:02
RLNVQLEY

SEQ ID NO: 9559 - protein, 10 aa, Homo sapiens
  Table 1.2; SMC1B; ENSG00000077935; HLA -A*03:01,HLA-A*31:01
RLYPDSVFGR

SEQ ID NO: 9560 - protein, 11 aa, Homo sapiens
  Table 1.2; SMC1B; ENSG00000077935; HLA -A*02:03,HLA-A*02:04,HLA-A*02:07,HLA-A*03:01,HLA-A*31:01
RLYPDSVFGRL

SEQ ID NO: 9561 - protein, 9 aa, Homo sapiens
  Table 1.2; SMC1B; ENSG00000077935; HLA -A*02:01
RMSEFNEEL

SEQ ID NO: 9562 - protein, 9 aa, Homo sapiens
  Table 1.2; SMC1B; ENSG00000077935; HLA -A*03:02
RQEFEQVKK

SEQ ID NO: 9563 - protein, 10 aa, Homo sapiens
  Table 1.2; SMC1B; ENSG00000077935; HLA -A*30:02,HLA-B*15:01
RQQEIDQKRY

SEQ ID NO: 9564 - protein, 9 aa, Homo sapiens
  Table 1.2; SMC1B; ENSG00000077935; HLA -A*03:02
RSQKIQELK

SEQ ID NO: 9565 - protein, 10 aa, Homo sapiens
  Table 1.2; SMC1B; ENSG00000077935; HLA -A*29:02,HLA-A*30:02,HLA-B*57:01
RVLTLDLSQY

SEQ ID NO: 9566 - protein, 10 aa, Homo sapiens
  Table 1.2; SMC1B; ENSG00000077935; HLA -A*03:02
RVTQNSSAEK

SEQ ID NO: 9567 - protein, 9 aa, Homo sapiens
  Table 1.2; SMC1B; ENSG00000077935; HLA -A*24:02
RYDLFTQCF

SEQ ID NO: 9568 - protein, 9 aa, Homo sapiens
  Table 1.2; SMC1B; ENSG00000077935; HLA -A*23:01,HLA-A*24:02
RYQSLLEEL

SEQ ID NO: 9569 - protein, 9 aa, Homo sapiens
  Table 1.2; SMC1B; ENSG00000077935; HLA -B*51:01,HLA-B*58:01,HLA-C*05:01
SAEKVQTQI

SEQ ID NO: 9570 - protein, 8 aa, Homo sapiens
  Table 1.2; SMC1B; ENSG00000077935; HLA -C*16:01
SASVKIIY

SEQ ID NO: 9571 - protein, 9 aa, Homo sapiens
  Table 1.2; SMC1B; ENSG00000077935; HLA -A*02:03,HLA-A*02:04,HLA-A*68:02,HLA-C*02:02,HLA-C*12:03
SASVKIIYV

SEQ ID NO: 9572 - protein, 9 aa, Homo sapiens
  Table 1.2; SMC1B; ENSG00000077935; HLA -A*30:01,HLA-B*40:01,HLA-B*44:02,HLA-B*44:03,HLA-B*49:01
SEFNEELNL

SEQ ID NO: 9573 - protein, 10 aa, Homo sapiens
  Table 1.2; SMC1B; ENSG00000077935; HLA -A*30:01,HLA-B*40:01,HLA-B*44:03,HLA-B*49:01
SEFNEELNLI

SEQ ID NO: 9574 - protein, 9 aa, Homo sapiens
  Table 1.2; SMC1B; ENSG00000077935; HLA -A*30:01,HLA-B*40:01,HLA-B*44:03,HLA-B*49:01
SEFRFNDNL

SEQ ID NO: 9575 - protein, 10 aa, Homo sapiens
  Table 1.2; SMC1B; ENSG00000077935; HLA -B*49:01
SEFRFNDNLV

SEQ ID NO: 9576 - protein, 8 aa, Homo sapiens
  Table 1.2; SMC1B; ENSG00000077935; HLA -A*03:02,HLA-A*11:01
SIDQIYKK

SEQ ID NO: 9577 - protein, 9 aa, Homo sapiens
  Table 1.2; SMC1B; ENSG00000077935; HLA -A*02:07
SIDQIYKKL

SEQ ID NO: 9578 - protein, 9 aa, Homo sapiens
  Table 1.2; SMC1B; ENSG00000077935; HLA -A*03:02,HLA-A*11:01
SIQTSLEQK

SEQ ID NO: 9579 - protein, 9 aa, Homo sapiens
  Table 1.2; SMC1B; ENSG00000077935; HLA -A*03:01,HLA-A*03:02,HLA-A*11:01
SISIDQIYK

SEQ ID NO: 9580 - protein, 8 aa, Homo sapiens
  Table 1.2; SMC1B; ENSG00000077935; HLA -A*02:01,HLA-A*02:07,HLA-C*05:01
SLDDIIEV

SEQ ID NO: 9581 - protein, 10 aa, Homo sapiens
  Table 1.2; SMC1B; ENSG00000077935; HLA -A*02:01,HLA-A*02:07,HLA-B*38:01,HLA-B*55:01
SLDDIIEVEM

SEQ ID NO: 9582 - protein, 9 aa, Homo sapiens
  Table 1.2; SMC1B; ENSG00000077935; HLA -A*02:03,HLA-A*02:04,HLA-B*08:01,HLA-B*46:01
SLKEDLKAL

SEQ ID NO: 9583 - protein, 9 aa, Homo sapiens
  Table 1.2; SMC1B; ENSG00000077935; HLA -A*31:01,HLA-A*33:01,HLA-A*33:03
SLKEEFYSR

SEQ ID NO: 9584 - protein, 10 aa, Homo sapiens
  Table 1.2; SMC1B; ENSG00000077935; HLA -B*13:02
SQLQSELLNI

SEQ ID NO: 9585 - protein, 10 aa, Homo sapiens
  Table 1.2; SMC1B; ENSG00000077935; HLA -A*11:01
SQNELEMIKK

SEQ ID NO: 9586 - protein, 11 aa, Homo sapiens
  Table 1.2; SMC1B; ENSG00000077935; HLA -B*27:05
SQYPDTEGQES

SEQ ID NO: 9587 - protein, 9 aa, Homo sapiens
  Table 1.2; SMC1B; ENSG00000077935; HLA -B*27:05
SRADALIGI

SEQ ID NO: 9588 - protein, 10 aa, Homo sapiens
  Table 1.2; SMC1B; ENSG00000077935; HLA -B*27:02
SRADALIGIY

SEQ ID NO: 9589 - protein, 9 aa, Homo sapiens
  Table 1.2; SMC1B; ENSG00000077935; HLA -A*01:01,HLA-A*30:02,HLA-A*32:01,HLA-B*58:01,HLA-C*02:02, HLA-C*16:01
SSASVKIIY

SEQ ID NO: 9590 - protein, 10 aa, Homo sapiens
  Table 1.2; SMC1B; ENSG00000077935; HLA -A*30:02
SSSASVKIIY

SEQ ID NO: 9591 - protein, 10 aa, Homo sapiens
  Table 1.2; SMC1B; ENSG00000077935; HLA -A*03:02
STDAFEASRK

SEQ ID NO: 9592 - protein, 9 aa, Homo sapiens
  Table 1.2; SMC1B; ENSG00000077935; HLA -A*01:01,HLA-A*30:02
STQATIDIY

SEQ ID NO: 9593 - protein, 11 aa, Homo sapiens
  Table 1.2; SMC1B; ENSG00000077935; HLA -A*03:02,HLA-A*11:01
STQATIDIYEK

SEQ ID NO: 9594 - protein, 10 aa, Homo sapiens
  Table 1.2; SMC1B; ENSG00000077935; HLA -A*01:01,HLA-A*25:01,HLA-A*26:01,HLA-A*29:02,HLA-A*30:02
STSGELIGEY

SEQ ID NO: 9595 - protein, 9 aa, Homo sapiens
  Table 1.2; SMC1B; ENSG00000077935; HLA -A*03:01,HLA-A*03:02,HLA-A*11:01
SVETLLNQK

SEQ ID NO: 9596 - protein, 10 aa, Homo sapiens
  Table 1.2; SMC1B; ENSG00000077935; HLA -A*68:01
SVETLLNQKR

SEQ ID NO: 9597 - protein, 9 aa, Homo sapiens
  Table 1.2; SMC1B; ENSG00000077935; HLA -A*02:04
SVFGRLFDL

SEQ ID NO: 9598 - protein, 9 aa, Homo sapiens
  Table 1.2; SMC1B; ENSG00000077935; HLA -A*03:01,HLA-A*11:01
SVYIAELEK

SEQ ID NO: 9599 - protein, 11 aa, Homo sapiens
  Table 1.2; SMC1B; ENSG00000077935; HLA -A*23:01,HLA-A*24:02
SYIKEQTQDQF

SEQ ID NO: 9600 - protein, 9 aa, Homo sapiens
  Table 1.2; SMC1B; ENSG00000077935; HLA -A*32:01,HLA-B*07:02,HLA-B*08:01,HLA-B*35:03,HLA-B*46:01, HLA-B*58:01,HLA-C*01:02,HLA-C*02:02,HLA-C*03:03,HLA-C*03:04, HLA-C*16:01,HLA-C*16:02
TAAPNLRAL

SEQ ID NO: 9601 - protein, 9 aa, Homo sapiens
  Table 1.2; SMC1B; ENSG00000077935; HLA -A*68:01,HLA-C*07:06
TAIVVASEK

SEQ ID NO: 9602 - protein, 8 aa, Homo sapiens
  Table 1.2; SMC1B; ENSG00000077935; HLA -B*37:01
TDEERLAF

SEQ ID NO: 9603 - protein, 9 aa, Homo sapiens
  Table 1.2; SMC1B; ENSG00000077935; HLA -A*30:01,HLA-B*37:01
TDLKQIQTL

SEQ ID NO: 9604 - protein, 10 aa, Homo sapiens
  Table 1.2; SMC1B; ENSG00000077935; HLA -A*30:01,HLA-B*40:01,HLA-B*49:01
TEAESTQATI

SEQ ID NO: 9605 - protein, 11 aa, Homo sapiens
  Table 1.2; SMC1B; ENSG00000077935; HLA -A*30:01,HLA-B*40:01
TEKELKSVETL

SEQ ID NO: 9606 - protein, 10 aa, Homo sapiens
  Table 1.2; SMC1B; ENSG00000077935; HLA -B*44:02,HLA-B*44:03
TELADLDAAW

SEQ ID NO: 9607 - protein, 11 aa, Homo sapiens
  Table 1.2; SMC1B; ENSG00000077935; HLA -A*03:02
TLIQGTQTRLK

SEQ ID NO: 9608 - protein, 9 aa, Homo sapiens
  Table 1.2; SMC1B; ENSG00000077935; HLA -A*02:04
TMTQQLEKL

SEQ ID NO: 9609 - protein, 9 aa, Homo sapiens
  Table 1.2; SMC1B; ENSG00000077935; HLA -A*25:01,HLA-A*26:01,HLA-A*29:02,HLA-A*30:02,HLA-A*32:01, HLA-B*15:01,HLA-B*15:03,HLA-B*18:01,HLA-B*35:01,HLA-B*46:01
TNIGKVSSY

SEQ ID NO: 9610 - protein, 8 aa, Homo sapiens
  Table 1.2; SMC1B; ENSG00000077935; HLA -B*15:01,HLA-B*15:03
TQATIDIY

SEQ ID NO: 9611 - protein, 10 aa, Homo sapiens
  Table 1.2; SMC1B; ENSG00000077935; HLA -B*27:02
TQATIDIYEK

SEQ ID NO: 9612 - protein, 9 aa, Homo sapiens
  Table 1.2; SMC1B; ENSG00000077935; HLA -B*13:02,HLA-B*38:01
TQCFEHVSI

SEQ ID NO: 9613 - protein, 8 aa, Homo sapiens
  Table 1.2; SMC1B; ENSG00000077935; HLA -B*13:02,HLA-B*38:01
TQDQFQMI

SEQ ID NO: 9614 - protein, 10 aa, Homo sapiens
  Table 1.2; SMC1B; ENSG00000077935; HLA -B*38:01
TQDQFQMIVI

SEQ ID NO: 9615 - protein, 9 aa, Homo sapiens
  Table 1.2; SMC1B; ENSG00000077935; HLA -A*02:03,HLA-B*13:02
TQFPQLKKV

SEQ ID NO: 9616 - protein, 9 aa, Homo sapiens
  Table 1.2; SMC1B; ENSG00000077935; HLA -B*13:02
TQNSSAEKV

SEQ ID NO: 9617 - protein, 9 aa, Homo sapiens
  Table 1.2; SMC1B; ENSG00000077935; HLA -A*29:02,HLA-B*27:02,HLA-B*27:05,HLA-C*16:04
TRLNVQLEY

SEQ ID NO: 9618 - protein, 9 aa, Homo sapiens
  Table 1.2; SMC1B; ENSG00000077935; HLA -B*27:05
TRQLQQTEK

SEQ ID NO: 9619 - protein, 9 aa, Homo sapiens
  Table 1.2; SMC1B; ENSG00000077935; HLA -A*01:01,HLA-A*26:01,HLA-A*30:02,HLA-B*35:01
TSGELIGEY

SEQ ID NO: 9620 - protein, 11 aa, Homo sapiens
  Table 1.2; SMC1B; ENSG00000077935; HLA -A*03:02,HLA-A*11:01
TVALDGTLFLK

SEQ ID NO: 9621 - protein, 8 aa, Homo sapiens
  Table 1.2; SMC1B; ENSG00000077935; HLA -A*03:02
TVESISVK

SEQ ID NO: 9622 - protein, 9 aa, Homo sapiens
  Table 1.2; SMC1B; ENSG00000077935; HLA -A*03:01,HLA-A*03:02,HLA-A*11:01,HLA-A*68:01
TVESISVKK

SEQ ID NO: 9623 - protein, 11 aa, Homo sapiens
  Table 1.2; SMC1B; ENSG00000077935; HLA -A*03:02
TVESISVKKPK

SEQ ID NO: 9624 - protein, 8 aa, Homo sapiens
  Table 1.2; SMC1B; ENSG00000077935; HLA -A*03:02,HLA-A*11:01
TVNELMAK

SEQ ID NO: 9625 - protein, 8 aa, Homo sapiens
  Table 1.2; SMC1B; ENSG00000077935; HLA -A*23:01
VAALALLF

SEQ ID NO: 9626 - protein, 8 aa, Homo sapiens
  Table 1.2; SMC1B; ENSG00000077935; HLA -A*23:01
VALDGTLF

SEQ ID NO: 9627 - protein, 9 aa, Homo sapiens
  Table 1.2; SMC1B; ENSG00000077935; HLA -A*02:01,HLA-A*23:01,HLA-C*03:03,HLA-C*03:04
VALDGTLFL

SEQ ID NO: 9628 - protein, 10 aa, Homo sapiens
  Table 1.2; SMC1B; ENSG00000077935; HLA -A*03:01,HLA-A*03:02,HLA-A*11:01,HLA-B*27:02
VALDGTLFLK

SEQ ID NO: 9629 - protein, 9 aa, Homo sapiens
  Table 1.2; SMC1B; ENSG00000077935; HLA -B*35:03,HLA-B*38:01
VASQEDILL

SEQ ID NO: 9630 - protein, 10 aa, Homo sapiens
  Table 1.2; SMC1B; ENSG00000077935; HLA -A*03:02,HLA-A*11:01,HLA-B*27:02
VASQEDILLK

SEQ ID NO: 9631 - protein, 9 aa, Homo sapiens
  Table 1.2; SMC1B; ENSG00000077935; HLA -A*02:07,HLA-A*23:01,HLA-A*24:02,HLA-A*30:01,HLA-B*18:01, HLA-B*37:01,HLA-B*38:01,HLA-B*40:01,HLA-B*44:02,HLA-B*44:03, HLA-B*49:01,HLA-C*16:04
VEDDIFQHF

SEQ ID NO: 9632 - protein, 10 aa, Homo sapiens
  Table 1.2; SMC1B; ENSG00000077935; HLA -B*40:01,HLA-B*44:02,HLA-B*44:03
VEESGEEKTF

SEQ ID NO: 9633 - protein, 9 aa, Homo sapiens
  Table 1.2; SMC1B; ENSG00000077935; HLA -A*23:01,HLA-A*24:02,HLA-C*04:01,HLA-C*14:02
VFQGTVESI

SEQ ID NO: 9634 - protein, 9 aa, Homo sapiens
  Table 1.2; SMC1B; ENSG00000077935; HLA -A*01:01,HLA-A*02:07,HLA-A*23:01,HLA-A*32:01,HLA-C*05:01
VIDVIKTQF

SEQ ID NO: 9635 - protein, 9 aa, Homo sapiens
  Table 1.2; SMC1B; ENSG00000077935; HLA -A*02:04,HLA-A*23:01,HLA-A*24:02
VIKTQFPQL

SEQ ID NO: 9636 - protein, 9 aa, Homo sapiens
  Table 1.2; SMC1B; ENSG00000077935; HLA -C*01:02
VISGGSSDL

SEQ ID NO: 9637 - protein, 10 aa, Homo sapiens
  Table 1.2; SMC1B; ENSG00000077935; HLA -A*03:02,HLA-A*11:01
VISGGSSDLK

SEQ ID NO: 9638 - protein, 11 aa, Homo sapiens
  Table 1.2; SMC1B; ENSG00000077935; HLA -A*01:01,HLA-A*29:02,HLA-A*30:02,HLA-A*32:01,HLA-B*15:01, HLA-B*58:01
VISGGSSDLKY

SEQ ID NO: 9639 - protein, 8 aa, Homo sapiens
  Table 1.2; SMC1B; ENSG00000077935; HLA -B*37:01
VISLKEEF

SEQ ID NO: 9640 - protein, 9 aa, Homo sapiens
  Table 1.2; SMC1B; ENSG00000077935; HLA -A*01:01
VISLKEEFY

SEQ ID NO: 9641 - protein, 9 aa, Homo sapiens
  Table 1.2; SMC1B; ENSG00000077935; HLA -A*02:01,HLA-A*02:07,HLA-B*35:03,HLA-B*55:01,HLA-C*05:01
VLDEVDAAL

SEQ ID NO: 9642 - protein, 9 aa, Homo sapiens
  Table 1.2; SMC1B; ENSG00000077935; HLA -A*01:01,HLA-B*15:01
VLTLDLSQY

SEQ ID NO: 9643 - protein, 9 aa, Homo sapiens
  Table 1.2; SMC1B; ENSG00000077935; HLA -A*02:07
VMDALSFVM

SEQ ID NO: 9644 - protein, 9 aa, Homo sapiens
  Table 1.2; SMC1B; ENSG00000077935; HLA -A*02:01,HLA-A*02:03,HLA-A*02:04,HLA-A*02:07,HLA-B*08:01, HLA-B*55:01
VMGEKIANL

SEQ ID NO: 9645 - protein, 9 aa, Homo sapiens
  Table 1.2; SMC1B; ENSG00000077935; HLA -A*33:01,HLA-A*33:03
VNRDLSVKR

SEQ ID NO: 9646 - protein, 9 aa, Homo sapiens
  Table 1.2; SMC1B; ENSG00000077935; HLA -A*02:07,HLA-B*27:05,HLA-B*38:01
VQDIEIILL

SEQ ID NO: 9647 - protein, 10 aa, Homo sapiens
  Table 1.2; SMC1B; ENSG00000077935; HLA -A*03:02,HLA-A*11:01,HLA-B*27:02
VSIQTSLEQK

SEQ ID NO: 9648 - protein, 9 aa, Homo sapiens
  Table 1.2; SMC1B; ENSG00000077935; HLA -A*01:01,HLA-A*29:02,HLA-A*30:02,HLA-B*15:01,HLA-B*46:01, HLA-B*58:01
VSISIDQIY

SEQ ID NO: 9649 - protein, 10 aa, Homo sapiens
  Table 1.2; SMC1B; ENSG00000077935; HLA -A*03:02,HLA-A*11:01,HLA-B*27:02
VSISIDQIYK

SEQ ID NO: 9650 - protein, 11 aa, Homo sapiens
  Table 1.2; SMC1B; ENSG00000077935; HLA -A*11:01
VSISIDQIYKK

SEQ ID NO: 9651 - protein, 9 aa, Homo sapiens
  Table 1.2; SMC1B; ENSG00000077935; HLA -A*03:02,HLA-A*11:01
VTQNSSAEK

SEQ ID NO: 9652 - protein, 9 aa, Homo sapiens
  Table 1.2; SMC1B; ENSG00000077935; HLA -A*03:01,HLA-A*03:02,HLA-A*11:01
VVASEKVAK

SEQ ID NO: 9653 - protein, 11 aa, Homo sapiens
  Table 1.2; SMC1B; ENSG00000077935; HLA -A*03:01,HLA-A*03:02,HLA-A*11:01,HLA-B*27:02
VVSIQTSLEQK

SEQ ID NO: 9654 - protein, 9 aa, Homo sapiens
  Table 1.2; SMC1B; ENSG00000077935; HLA -A*23:01,HLA-A*24:02
VYIAELEKI

SEQ ID NO: 9655 - protein, 8 aa, Homo sapiens
  Table 1.2; SMC1B; ENSG00000077935; HLA -B*37:01
YDLFTQCF

SEQ ID NO: 9656 - protein, 9 aa, Homo sapiens
  Table 1.2; SMC1B; ENSG00000077935; HLA -B*49:01
YEKEEAFEI

SEQ ID NO: 9657 - protein, 10 aa, Homo sapiens
  Table 1.2; SMC1B; ENSG00000077935; HLA -B*15:01,HLA-B*46:01
YIKEQTQDQF

SEQ ID NO: 9658 - protein, 9 aa, Homo sapiens
  Table 1.2; SMC1B; ENSG00000077935; HLA -A*01:01
YLDIKPINE

SEQ ID NO: 9659 - protein, 10 aa, Homo sapiens
  Table 1.2; SMC1B; ENSG00000077935; HLA -A*01:01
YLDIKPINER

SEQ ID NO: 9660 - protein, 11 aa, Homo sapiens
  Table 1.2; SMC1B; ENSG00000077935; HLA -A*02:07
YLDIKPINERL

SEQ ID NO: 9661 - protein, 9 aa, Homo sapiens
  Table 1.2; SMC1B; ENSG00000077935; HLA -A*02:07,HLA-B*35:03
YPDSVFGRL

SEQ ID NO: 9662 - protein, 10 aa, Homo sapiens
  Table 1.2; SMC1B; ENSG00000077935; HLA -B*35:01
YPDSVFGRLF

SEQ ID NO: 9663 - protein, 11 aa, Homo sapiens
  Table 1.2; SMC1B; ENSG00000077935; HLA -A*01:01,HLA-B*27:02
YPDTEGQESSK

SEQ ID NO: 9664 - protein, 9 aa, Homo sapiens
  Table 1.2; SMC1B; ENSG00000077935; HLA -B*35:01,HLA-B*35:03,HLA-B*55:01
YPEYDDCMF

SEQ ID NO: 9665 - protein, 11 aa, Homo sapiens
  Table 1.2; SMC1B; ENSG00000077935; HLA -B*27:05,HLA-B*38:01,HLA-B*39:01
YQEQSQLQSEL

SEQ ID NO: 9666 - protein, 8 aa, Homo sapiens
  Table 1.2; SMC1B; ENSG00000077935; HLA -A*02:01,HLA-B*13:02,HLA-B*49:01
YQLAVTKV

SEQ ID NO: 9667 - protein, 9 aa, Homo sapiens
  Table 1.2; SMC1B; ENSG00000077935; HLA -A*23:01,HLA-B*15:03
YQLAVTKVF

SEQ ID NO: 9668 - protein, 8 aa, Homo sapiens
  Table 1.2; SMC1B; ENSG00000077935; HLA -B*39:01
YQSLLEEL

SEQ ID NO: 9669 - protein, 10 aa, Homo sapiens
  Table 1.2; SMC1B; ENSG00000077935; HLA -B*27:02
YSQNELEMIK

SEQ ID NO: 9670 - protein, 11 aa, Homo sapiens
  Table 1.2; SMC1B; ENSG00000077935; HLA -A*11:01
YSQNELEMIKK

SEQ ID NO: 9671 - protein, 9 aa, Homo sapiens
  Table 1.2; SMC1B; ENSG00000077935; HLA -A*01:01
YSSLKEDLK

SEQ ID NO: 9672 - protein, 9 aa, Homo sapiens
  Table 1.2; SMC1B; ENSG00000077935; HLA -A*01:01
YVEESGEEK

SEQ ID NO: 9673 - protein, 11 aa, Homo sapiens
  Table 1.2; SMC1B; ENSG00000077935; HLA -B*38:01,HLA-C*05:01
YVEESGEEKTF

SEQ ID NO: 9674 - protein, 10 aa, Homo sapiens
  Table 1.2; SMR3A; ENSG00000109208; HLA -A*11:01,HLA-A*31:01,HLA-A*33:03,HLA-A*68:01,HLA-C*07:06
ACFTPGESQR

SEQ ID NO: 9675 - protein, 9 aa, Homo sapiens
  Table 1.2; SMR3A; ENSG00000109208; HLA -B*51:01,HLA-B*55:01,HLA-B*56:01
DPALPTPAP

SEQ ID NO: 9676 - protein, 9 aa, Homo sapiens
  Table 1.2; SMR3A; ENSG00000109208; HLA -B*54:01
FPFGTGFVP

SEQ ID NO: 9677 - protein, 9 aa, Homo sapiens
  Table 1.2; SMR3A; ENSG00000109208; HLA -A*29:02,HLA-B*35:01
FPPPLSPPY

SEQ ID NO: 9678 - protein, 11 aa, Homo sapiens
  Table 1.2; SMR3A; ENSG00000109208; HLA -B*35:01,HLA-B*35:03,HLA-B*56:01
FPVNSPTDPAL

SEQ ID NO: 9679 - protein, 9 aa, Homo sapiens
  Table 1.2; SMR3A; ENSG00000109208; HLA -A*02:07,HLA-B*54:01
FVPPPHPPP

SEQ ID NO: 9680 - protein, 10 aa, Homo sapiens
  Table 1.2; SMR3A; ENSG00000109208; HLA -A*01:01,HLA-A*02:07,HLA-A*26:01,HLA-A*29:02
FVPPPHPPPY

SEQ ID NO: 9681 - protein, 11 aa, Homo sapiens
  Table 1.2; SMR3A; ENSG00000109208; HLA -A*29:02
GFVPPPHPPPY

SEQ ID NO: 9682 - protein, 11 aa, Homo sapiens
  Table 1.2; SMR3A; ENSG00000109208; HLA -B*07:02,HLA-C*07:02
GPRGPYPPGPL

SEQ ID NO: 9683 - protein, 9 aa, Homo sapiens
  Table 1.2; SMR3A; ENSG00000109208; HLA -B*07:02,HLA-B*54:01,HLA-B*55:01,HLA-B*56:01
GPYPPGPLA

SEQ ID NO: 9684 - protein, 10 aa, Homo sapiens
  Table 1.2; SMR3A; ENSG00000109208; HLA -B*56:01
GPYPPGPLAP

SEQ ID NO: 9685 - protein, 9 aa, Homo sapiens
  Table 1.2; SMR3A; ENSG00000109208; HLA -B*27:05
GRFPPPLSP

SEQ ID NO: 9686 - protein, 9 aa, Homo sapiens
  Table 1.2; SMR3A; ENSG00000109208; HLA -B*27:05
GRIPPSPPP

SEQ ID NO: 9687 - protein, 11 aa, Homo sapiens
  Table 1.2; SMR3A; ENSG00000109208; HLA -A*29:02,HLA-A*30:02
HSLPPPYGPGY

SEQ ID NO: 9688 - protein, 9 aa, Homo sapiens
  Table 1.2; SMR3A; ENSG00000109208; HLA -A*29:02,HLA-B*35:01,HLA-B*54:01,HLA-B*55:01,HLA-B*56:01
IPPSPPPPY

SEQ ID NO: 9689 - protein, 10 aa, Homo sapiens
  Table 1.2; SMR3A; ENSG00000109208; HLA -A*30:02
IQSHSLPPPY

SEQ ID NO: 9690 - protein, 9 aa, Homo sapiens
  Table 1.2; SMR3A; ENSG00000109208; HLA -A*02:04
KSLTWILGL

SEQ ID NO: 9691 - protein, 10 aa, Homo sapiens
  Table 1.2; SMR3A; ENSG00000109208; HLA -B*57:01
KSLTWILGLW

SEQ ID NO: 9692 - protein, 9 aa, Homo sapiens
  Table 1.2; SMR3A; ENSG00000109208; HLA -B*51:01
LAPPPPPCF

SEQ ID NO: 9693 - protein, 9 aa, Homo sapiens
  Table 1.2; SMR3A; ENSG00000109208; HLA -A*26:01,HLA-A*29:02,HLA-B*35:01,HLA-B*35:03,HLA-B*55:01
LPPPYGPGY

SEQ ID NO: 9694 - protein, 11 aa, Homo sapiens
  Table 1.2; SMR3A; ENSG00000109208; HLA -A*31:01,HLA-A*33:01
PGYPQPPSQPR

SEQ ID NO: 9695 - protein, 10 aa, Homo sapiens
  Table 1.2; SMR3A; ENSG00000109208; HLA -A*30:02
PQPPSQPRPY

SEQ ID NO: 9696 - protein, 9 aa, Homo sapiens
  Table 1.2; SMR3A; ENSG00000109208; HLA -A*24:02
PYPPGPPFF

SEQ ID NO: 9697 - protein, 9 aa, Homo sapiens
  Table 1.2; SMR3A; ENSG00000109208; HLA -A*01:01,HLA-A*30:02
QSHSLPPPY

SEQ ID NO: 9698 - protein, 10 aa, Homo sapiens
  Table 1.2; SMR3A; ENSG00000109208; HLA -A*29:02,HLA-A*30:02
RFPPPLSPPY

SEQ ID NO: 9699 - protein, 10 aa, Homo sapiens
  Table 1.2; SMR3A; ENSG00000109208; HLA -A*03:01,HLA-A*30:02
RIPPSPPPPY

SEQ ID NO: 9700 - protein, 11 aa, Homo sapiens
  Table 1.2; SMR3A; ENSG00000109208; HLA -A*30:02
RIQSHSLPPPY

SEQ ID NO: 9701 - protein, 9 aa, Homo sapiens
  Table 1.2; SMR3A; ENSG00000109208; HLA -B*07:02,HLA-B*56:01
RPYPPGPPF

SEQ ID NO: 9702 - protein, 10 aa, Homo sapiens
  Table 1.2; SMR3A; ENSG00000109208; HLA -A*01:01,HLA-A*02:07,HLA-A*26:01,HLA-A*29:02,HLA-A*30:02, HLA-B*15:01
SLPPPYGPGY

SEQ ID NO: 9703 - protein, 10 aa, Homo sapiens
  Table 1.2; SMR3A; ENSG00000109208; HLA -B*56:01
SPTDPALPTP

SEQ ID NO: 9704 - protein, 11 aa, Homo sapiens
  Table 1.2; SMR3A; ENSG00000109208; HLA -B*56:01
SPTDPALPTPA

SEQ ID NO: 9705 - protein, 9 aa, Homo sapiens
  Table 1.2; SMR3A; ENSG00000109208; HLA -A*30:02
SQRGPRGPY

SEQ ID NO: 9706 - protein, 9 aa, Homo sapiens
  Table 1.2; SMR3A; ENSG00000109208; HLA -B*35:03
VNSPTDPAL

SEQ ID NO: 9707 - protein, 9 aa, Homo sapiens
  Table 1.2; SMR3A; ENSG00000109208; HLA -A*01:01,HLA-A*23:01,HLA-A*24:02,HLA-A*29:02,HLA-A*30:02, HLA-B*07:02,HLA-B*35:01,HLA-B*55:01,HLA-B*56:01,HLA-C*04:01
VPPPHPPPY

SEQ ID NO: 9708 - protein, 9 aa, Homo sapiens
  Table 1.2; SMR3A; ENSG00000109208; HLA -A*33:01,HLA-A*33:03,HLA-A*68:01
YPQPPSQPR

SEQ ID NO: 9709 - protein, 11 aa, Homo sapiens
  Table 1.2; SMR3A; ENSG00000109208; HLA -A*30:02
YPQPPSQPRPY

SEQ ID NO: 9710 - protein, 10 aa, Homo sapiens
  Table 1.2; SSX1; ENSG00000126752; HLA -B*49:01
AEDENDSKGV

SEQ ID NO: 9711 - protein, 8 aa, Homo sapiens
  Table 1.2; SSX1; ENSG00000126752; HLA -A*29:02,HLA-A*30:02,HLA-A*32:01,HLA-B*35:01,HLA-B*55:01, HLA-C*04:01,HLA-C*14:02
AFDDIATY

SEQ ID NO: 9712 - protein, 9 aa, Homo sapiens
  Table 1.2; SSX1; ENSG00000126752; HLA -A*02:01,HLA-A*02:07,HLA-A*23:01,HLA-A*24:02,HLA-A*29:02, HLA-A*32:01,HLA-A*33:03,HLA-B*18:01,HLA-B*35:01,HLA-B*35:03, HLA-B*38:01,HLA-B*44:02,HLA-B*44:03,HLA-B*46:01,HLA-B*55:01,
  HLA-C*02:02,HLA-C*04:01,HLA-C*05:01,HLA-C*07:04,HLA-C*12:03, HLA-C*14:02
AFDDIATYF

SEQ ID NO: 9713 - protein, 9 aa, Homo sapiens
  Table 1.2; SSX1; ENSG00000126752; HLA -A*02:01,HLA-A*02:04,HLA-B*13:02,HLA-B*55:01
AMTKLGFKV

SEQ ID NO: 9714 - protein, 9 aa, Homo sapiens
  Table 1.2; SSX1; ENSG00000126752; HLA -A*03:02,HLA-A*11:01
ANISEKINK

SEQ ID NO: 9715 - protein, 10 aa, Homo sapiens
  Table 1.2; SSX1; ENSG00000126752; HLA -A*33:03
ANISEKINKR

SEQ ID NO: 9716 - protein, 9 aa, Homo sapiens
  Table 1.2; SSX1; ENSG00000126752; HLA -A*01:01,HLA-B*39:01,HLA-C*04:01,HLA-C*05:01
ATDFQGNDF

SEQ ID NO: 9717 - protein, 9 aa, Homo sapiens
  Table 1.2; SSX1; ENSG00000126752; HLA -A*32:01,HLA-B*57:01
ATYFSKKEW

SEQ ID NO: 9718 - protein, 8 aa, Homo sapiens
  Table 1.2; SSX1; ENSG00000126752; HLA -A*33:01,HLA-A*33:03
DAKASEKR

SEQ ID NO: 9719 - protein, 9 aa, Homo sapiens
  Table 1.2; SSX1; ENSG00000126752; HLA -A*33:01
DDAKASEKR

SEQ ID NO: 9720 - protein, 9 aa, Homo sapiens
  Table 1.2; SSX1; ENSG00000126752; HLA -A*33:01
DDIATYFSK

SEQ ID NO: 9721 - protein, 9 aa, Homo sapiens
  Table 1.2; SSX1; ENSG00000126752; HLA -A*33:01
DDTFAKRPR

SEQ ID NO: 9722 - protein, 8 aa, Homo sapiens
  Table 1.2; SSX1; ENSG00000126752; HLA -A*33:01,HLA-A*33:03
DFDNDHNR

SEQ ID NO: 9723 - protein, 9 aa, Homo sapiens
  Table 1.2; SSX1; ENSG00000126752; HLA -A*26:01,HLA-A*33:01,HLA-A*68:01
DIATYFSKK

SEQ ID NO: 9724 - protein, 11 aa, Homo sapiens
  Table 1.2; SSX1; ENSG00000126752; HLA -A*33:01
DSKGVSEASGP

SEQ ID NO: 9725 - protein, 10 aa, Homo sapiens
  Table 1.2; SSX1; ENSG00000126752; HLA -A*68:01,HLA-B*27:02
EASGPQNDGK

SEQ ID NO: 9726 - protein, 8 aa, Homo sapiens
  Table 1.2; SSX1; ENSG00000126752; HLA -B*18:01,HLA-B*37:01,HLA-C*04:01
FDDIATYF

SEQ ID NO: 9727 - protein, 10 aa, Homo sapiens
  Table 1.2; SSX1; ENSG00000126752; HLA -B*27:02
FDDIATYFSK

SEQ ID NO: 9728 - protein, 10 aa, Homo sapiens
  Table 1.2; SSX1; ENSG00000126752; HLA -A*33:01
GDDTFAKRPR

SEQ ID NO: 9729 - protein, 9 aa, Homo sapiens
  Table 1.2; SSX1; ENSG00000126752; HLA -B*13:02,HLA-B*38:01
GKANISEKI

SEQ ID NO: 9730 - protein, 9 aa, Homo sapiens
  Table 1.2; SSX1; ENSG00000126752; HLA -B*07:02,HLA-C*07:02
GPQNDGKQL

SEQ ID NO: 9731 - protein, 8 aa, Homo sapiens
  Table 1.2; SSX1; ENSG00000126752; HLA -B*08:01,HLA-B*51:01
HPPGKANI

SEQ ID NO: 9732 - protein, 9 aa, Homo sapiens
  Table 1.2; SSX1; ENSG00000126752; HLA -B*07:02
HPQMTFGRL

SEQ ID NO: 9733 - protein, 10 aa, Homo sapiens
  Table 1.2; SSX1; ENSG00000126752; HLA -B*57:01
IATYFSKKEW

SEQ ID NO: 9734 - protein, 8 aa, Homo sapiens
  Table 1.2; SSX1; ENSG00000126752; HLA -A*03:01
IIPKIMPK

SEQ ID NO: 9735 - protein, 9 aa, Homo sapiens
  Table 1.2; SSX1; ENSG00000126752; HLA -A*03:01
IIPKIMPKK

SEQ ID NO: 9736 - protein, 8 aa, Homo sapiens
  Table 1.2; SSX1; ENSG00000126752; HLA -A*30:01,HLA-A*32:01,HLA-B*08:01,HLA-B*13:02,HLA-B*15:01, HLA-B*15:03,HLA-B*18:01,HLA-B*37:01,HLA-B*39:01,HLA-B*40:02, HLA-B*46:01,HLA-B*58:01,HLA-C*03:04,HLA-C*07:04,HLA-C*16:01,
  HLA-C*16:02
IQVEHPQM

SEQ ID NO: 9737 - protein, 9 aa, Homo sapiens
  Table 1.2; SSX1; ENSG00000126752; HLA -B*13:02
IQVEHPQMT

SEQ ID NO: 9738 - protein, 10 aa, Homo sapiens
  Table 1.2; SSX1; ENSG00000126752; HLA -A*23:01,HLA-A*24:02,HLA-A*25:01,HLA-A*26:01,HLA-A*30:01, HLA-A*32:01,HLA-B*13:02,HLA-B*15:01,HLA-B*15:03,HLA-B*38:01, HLA-B*46:01,HLA-B*57:01,HLA-B*58:01,HLA-C*16:04
IQVEHPQMTF

SEQ ID NO: 9739 - protein, 9 aa, Homo sapiens
  Table 1.2; SSX1; ENSG00000126752; HLA -A*01:01,HLA-A*02:01,HLA-A*02:03,HLA-A*02:04,HLA-A*02:07, HLA-A*03:01,HLA-A*03:02,HLA-A*11:01,HLA-A*23:01,HLA-A*25:01, HLA-A*26:01,HLA-A*29:02,HLA-A*30:02,HLA-A*31:01,HLA-A*32:01,
  HLA-A*33:01,HLA-A*33:03,HLA-A*68:01,HLA-B*15:01,HLA-B*15:03, HLA-B*18:01,HLA-B*27:02,HLA-B*27:05,HLA-B*35:01,HLA-B*35:03, HLA-B*38:01,HLA-B*39:01,HLA-B*44:02,HLA-B*44:03,HLA-B*46:01, HLA-B*54:01,HLA-B*55:01,HLA-B*56:01,HLA-B*57:01,HLA-B*58:01,
  HLA-C*01:02,HLA-C*02:02,HLA-C*03:03,HLA-C*03:04,HLA-C*07:04, HLA-C*07:06,HLA-C*12:03,HLA-C*16:01,HLA-C*16:02,HLA-C*16:04
KAFDDIATY

SEQ ID NO: 9740 - protein, 10 aa, Homo sapiens
  Table 1.2; SSX1; ENSG00000126752; HLA -A*01:01,HLA-A*02:01,HLA-A*02:03,HLA-A*02:04,HLA-A*02:07, HLA-A*03:01,HLA-A*03:02,HLA-A*23:01,HLA-A*24:02,HLA-A*25:01, HLA-A*26:01,HLA-A*29:02,HLA-A*30:02,HLA-A*31:01,HLA-A*32:01,
  HLA-A*68:02,HLA-B*13:02,HLA-B*15:01,HLA-B*15:03,HLA-B*27:02, HLA-B*35:01,HLA-B*44:02,HLA-B*44:03,HLA-B*46:01,HLA-B*57:01, HLA-B*58:01,HLA-C*02:02,HLA-C*12:03,HLA-C*16:04
KAFDDIATYF

SEQ ID NO: 9741 - protein, 8 aa, Homo sapiens
  Table 1.2; SSX1; ENSG00000126752; HLA -B*08:01,HLA-C*16:01
KAMTKLGF

SEQ ID NO: 9742 - protein, 9 aa, Homo sapiens
  Table 1.2; SSX1; ENSG00000126752; HLA -A*03:01
KAMTKLGFK

SEQ ID NO: 9743 - protein, 10 aa, Homo sapiens
  Table 1.2; SSX1; ENSG00000126752; HLA -A*03:01,HLA-A*03:02,HLA-A*11:01,HLA-A*31:01
KANISEKINK

SEQ ID NO: 9744 - protein, 11 aa, Homo sapiens
  Table 1.2; SSX1; ENSG00000126752; HLA -A*31:01
KANISEKINKR

SEQ ID NO: 9745 - protein, 9 aa, Homo sapiens
  Table 1.2; SSX1; ENSG00000126752; HLA -A*03:01
KINKRSGPK

SEQ ID NO: 9746 - protein, 9 aa, Homo sapiens
  Table 1.2; SSX1; ENSG00000126752; HLA -A*31:01
KISYVYMKR

SEQ ID NO: 9747 - protein, 11 aa, Homo sapiens
  Table 1.2; SSX1; ENSG00000126752; HLA -B*15:01
KQATDFQGNDF

SEQ ID NO: 9748 - protein, 9 aa, Homo sapiens
  Table 1.2; SSX1; ENSG00000126752; HLA -A*02:01,HLA-A*02:04,HLA-A*02:07,HLA-A*24:02,HLA-A*30:01, HLA-B*13:02
KQLVIYEEI

SEQ ID NO: 9749 - protein, 8 aa, Homo sapiens
  Table 1.2; SSX1; ENSG00000126752; HLA -C*16:01
KYSEKISY

SEQ ID NO: 9750 - protein, 9 aa, Homo sapiens
  Table 1.2; SSX1; ENSG00000126752; HLA -A*24:02
KYSEKISYV

SEQ ID NO: 9751 - protein, 10 aa, Homo sapiens
  Table 1.2; SSX1; ENSG00000126752; HLA -A*23:01,HLA-A*24:02,HLA-A*29:02,HLA-A*30:02
KYSEKISYVY

SEQ ID NO: 9752 - protein, 11 aa, Homo sapiens
  Table 1.2; SSX1; ENSG00000126752; HLA -A*24:02
KYSEKISYVYM

SEQ ID NO: 9753 - protein, 9 aa, Homo sapiens
  Table 1.2; SSX1; ENSG00000126752; HLA -B*15:03
MKYSEKISY

SEQ ID NO: 9754 - protein, 8 aa, Homo sapiens
  Table 1.2; SSX1; ENSG00000126752; HLA -B*08:01,HLA-B*40:02
MTKLGFKV

SEQ ID NO: 9755 - protein, 9 aa, Homo sapiens
  Table 1.2; SSX1; ENSG00000126752; HLA -A*33:01,HLA-A*33:03,HLA-A*68:01,HLA-A*68:02,HLA-B*27:02
NDFDNDHNR

SEQ ID NO: 9756 - protein, 9 aa, Homo sapiens
  Table 1.2; SSX1; ENSG00000126752; HLA -A*33:01,HLA-A*33:03,HLA-A*68:01
NGDDTFAKR

SEQ ID NO: 9757 - protein, 11 aa, Homo sapiens
  Table 1.2; SSX1; ENSG00000126752; HLA -A*33:01
NGDDTFAKRPR

SEQ ID NO: 9758 - protein, 9 aa, Homo sapiens
  Table 1.2; SSX1; ENSG00000126752; HLA -A*33:01,HLA-A*33:03,HLA-A*68:01,HLA-C*07:06
NISEKINKR

SEQ ID NO: 9759 - protein, 10 aa, Homo sapiens
  Table 1.2; SSX1; ENSG00000126752; HLA -B*15:03,HLA-B*27:02,HLA-B*35:01,HLA-B*38:01,HLA-B*39:01
QATDFQGNDF

SEQ ID NO: 9760 - protein, 11 aa, Homo sapiens
  Table 1.2; SSX1; ENSG00000126752; HLA -A*31:01,HLA-A*33:01,HLA-A*33:03,HLA-A*68:01,HLA-C*07:06
QGNDFDNDHNR

SEQ ID NO: 9761 - protein, 9 aa, Homo sapiens
  Table 1.2; SSX1; ENSG00000126752; HLA -A*25:01,HLA-A*32:01,HLA-B*15:01,HLA-B*57:01,HLA-B*58:01, HLA-C*05:01
QVEHPQMTF

SEQ ID NO: 9762 - protein, 9 aa, Homo sapiens
  Table 1.2; SSX1; ENSG00000126752; HLA -A*03:01,HLA-A*03:02,HLA-A*11:01,HLA-A*31:01
RIIPKIMPK

SEQ ID NO: 9763 - protein, 10 aa, Homo sapiens
  Table 1.2; SSX1; ENSG00000126752; HLA -A*03:01
RIIPKIMPKK

SEQ ID NO: 9764 - protein, 9 aa, Homo sapiens
  Table 1.2; SSX1; ENSG00000126752; HLA -A*32:01
RIQVEHPQM

SEQ ID NO: 9765 - protein, 11 aa, Homo sapiens
  Table 1.2; SSX1; ENSG00000126752; HLA -A*32:01,HLA-B*57:01,HLA-B*58:01
RIQVEHPQMTF

SEQ ID NO: 9766 - protein, 9 aa, Homo sapiens
  Table 1.2; SSX1; ENSG00000126752; HLA -A*02:04
RLHRIIPKI

SEQ ID NO: 9767 - protein, 9 aa, Homo sapiens
  Table 1.2; SSX1; ENSG00000126752; HLA -A*03:01
RNYKAMTKL

SEQ ID NO: 9768 - protein, 11 aa, Homo sapiens
  Table 1.2; SSX1; ENSG00000126752; HLA -B*07:02
RPRDDAKASEK

SEQ ID NO: 9769 - protein, 11 aa, Homo sapiens
  Table 1.2; SSX1; ENSG00000126752; HLA -A*30:02,HLA-A*31:01,HLA-B*15:01,HLA-B*46:01,HLA-B*57:01, HLA-B*58:01
RSKAFDDIATY

SEQ ID NO: 9770 - protein, 8 aa, Homo sapiens
  Table 1.2; SSX1; ENSG00000126752; HLA -A*30:01,HLA-B*08:01,HLA-B*15:01,HLA-B*15:03,HLA-B*18:01, HLA-B*37:01,HLA-B*40:02,HLA-B*44:02,HLA-B*44:03,HLA-C*07:01
SEKISYVY

SEQ ID NO: 9771 - protein, 9 aa, Homo sapiens
  Table 1.2; SSX1; ENSG00000126752; HLA -A*30:01,HLA-B*37:01,HLA-B*40:01,HLA-B*40:02,HLA-B*44:02, HLA-B*44:03,HLA-B*49:01
SEKISYVYM

SEQ ID NO: 9772 - protein, 10 aa, Homo sapiens
  Table 1.2; SSX1; ENSG00000126752; HLA -B*15:03
SKAFDDIATY

SEQ ID NO: 9773 - protein, 9 aa, Homo sapiens
  Table 1.2; SSX1; ENSG00000126752; HLA -A*29:02
SYVYMKRNY

SEQ ID NO: 9774 - protein, 8 aa, Homo sapiens
  Table 1.2; SSX1; ENSG00000126752; HLA -B*18:01,HLA-B*37:01
TDFQGNDF

SEQ ID NO: 9775 - protein, 9 aa, Homo sapiens
  Table 1.2; SSX1; ENSG00000126752; HLA -A*03:01,HLA-A*03:02
TLPPFMCNK

SEQ ID NO: 9776 - protein, 8 aa, Homo sapiens
  Table 1.2; SSX1; ENSG00000126752; HLA -A*23:01,HLA-A*30:01,HLA-A*32:01,HLA-B*15:03,HLA-B*18:01, HLA-B*37:01,HLA-B*40:02,HLA-B*44:02,HLA-B*44:03,HLA-B*49:01, HLA-C*04:01,HLA-C*16:04
VEHPQMTF

SEQ ID NO: 9777 - protein, 9 aa, Homo sapiens
  Table 1.2; SSX1; ENSG00000126752; HLA -B*49:01
VEHPQMTFG

SEQ ID NO: 9778 - protein, 10 aa, Homo sapiens
  Table 1.2; SSX1; ENSG00000126752; HLA -A*03:01,HLA-A*03:02,HLA-A*11:01,HLA-A*31:01
VTLPPFMCNK

SEQ ID NO: 9779 - protein, 9 aa, Homo sapiens
  Table 1.2; SSX1; ENSG00000126752; HLA -A*24:02
VYMKRNYKA

SEQ ID NO: 9780 - protein, 9 aa, Homo sapiens
  Table 1.2; SSX1; ENSG00000126752; HLA -B*15:03
YKAMTKLGF

SEQ ID NO: 9781 - protein, 8 aa, Homo sapiens
  Table 1.2; SSX1; ENSG00000126752; HLA -A*01:01
YSEKISYV

SEQ ID NO: 9782 - protein, 9 aa, Homo sapiens
  Table 1.2; SSX1; ENSG00000126752; HLA -A*01:01,HLA-A*26:01,HLA-A*29:02,HLA-A*30:02,HLA-B*18:01, HLA-B*35:01,HLA-B*57:01,HLA-B*58:01
YSEKISYVY

SEQ ID NO: 9783 - protein, 10 aa, Homo sapiens
  Table 1.2; SSX1; ENSG00000126752; HLA -A*01:01
YSEKISYVYM

SEQ ID NO: 9784 - protein, 8 aa, Homo sapiens
  Table 1.2; SSX1; ENSG00000126752; HLA -B*08:01
YVYMKRNY

SEQ ID NO: 9785 - protein, 9 aa, Homo sapiens
  Table 1.2; STRA8; ENSG00000146857; HLA -A*11:01
AALFNNLRK

SEQ ID NO: 9786 - protein, 8 aa, Homo sapiens
  Table 1.2; STRA8; ENSG00000146857; HLA -B*54:01,HLA-B*56:01
AALPIVSA

SEQ ID NO: 9787 - protein, 9 aa, Homo sapiens
  Table 1.2; STRA8; ENSG00000146857; HLA -A*02:01,HLA-A*32:01,HLA-B*46:01,HLA-B*54:01,HLA-B*55:01, HLA-B*56:01,HLA-C*02:02
AALPIVSAA

SEQ ID NO: 9788 - protein, 10 aa, Homo sapiens
  Table 1.2; STRA8; ENSG00000146857; HLA -A*23:01,HLA-A*25:01
AALPIVSAAI

SEQ ID NO: 9789 - protein, 10 aa, Homo sapiens
  Table 1.2; STRA8; ENSG00000146857; HLA -B*49:01
AEGSVKDSGV

SEQ ID NO: 9790 - protein, 8 aa, Homo sapiens
  Table 1.2; STRA8; ENSG00000146857; HLA -B*35:01,HLA-B*35:03,HLA-C*04:01,HLA-C*05:01,HLA-C*07:04
AFDVASFL

SEQ ID NO: 9791 - protein, 9 aa, Homo sapiens
  Table 1.2; STRA8; ENSG00000146857; HLA -A*02:04,HLA-A*68:02
AISHLWQNL

SEQ ID NO: 9792 - protein, 8 aa, Homo sapiens
  Table 1.2; STRA8; ENSG00000146857; HLA -A*03:01
ALFNNLRK

SEQ ID NO: 9793 - protein, 9 aa, Homo sapiens
  Table 1.2; STRA8; ENSG00000146857; HLA -A*02:03,HLA-A*02:04
ALFNNLRKT

SEQ ID NO: 9794 - protein, 10 aa, Homo sapiens
  Table 1.2; STRA8; ENSG00000146857; HLA -A*02:01,HLA-A*02:03
ALFNNLRKTV

SEQ ID NO: 9795 - protein, 11 aa, Homo sapiens
  Table 1.2; STRA8; ENSG00000146857; HLA -A*29:02,HLA-A*30:02,HLA-A*32:01,HLA-B*15:01
ALFNNLRKTVY

SEQ ID NO: 9796 - protein, 9 aa, Homo sapiens
  Table 1.2; STRA8; ENSG00000146857; HLA -A*02:01,HLA-A*02:03,HLA-A*02:07,HLA-A*23:01,HLA-A*24:02, HLA-A*30:01,HLA-A*32:01,HLA-B*13:02,HLA-B*15:01,HLA-B*15:03, HLA-B*46:01,HLA-C*01:02
ALPIVSAAI

SEQ ID NO: 9797 - protein, 11 aa, Homo sapiens
  Table 1.2; STRA8; ENSG00000146857; HLA -A*03:02
ALPIVSAAISH

SEQ ID NO: 9798 - protein, 9 aa, Homo sapiens
  Table 1.2; STRA8; ENSG00000146857; HLA -A*31:01
AQLQELEHR

SEQ ID NO: 9799 - protein, 9 aa, Homo sapiens
  Table 1.2; STRA8; ENSG00000146857; HLA -A*30:02,HLA-A*32:01,HLA-B*15:01,HLA-B*15:03,HLA-B*27:05, HLA-B*35:01,HLA-B*35:03,HLA-B*40:01,HLA-B*46:01,HLA-B*57:01, HLA-B*58:01,HLA-C*02:02,HLA-C*03:04,HLA-C*16:02,HLA-C*16:04
ASFPVDEEM

SEQ ID NO: 9800 - protein, 9 aa, Homo sapiens
  Table 1.2; STRA8; ENSG00000146857; HLA -A*03:01,HLA-A*31:01
ASKWQVLNK

SEQ ID NO: 9801 - protein, 10 aa, Homo sapiens
  Table 1.2; STRA8; ENSG00000146857; HLA -A*03:01,HLA-A*11:01
ASLRQAWAQK

SEQ ID NO: 9802 - protein, 10 aa, Homo sapiens
  Table 1.2; STRA8; ENSG00000146857; HLA -B*58:01
ASMYSGNDSF

SEQ ID NO: 9803 - protein, 9 aa, Homo sapiens
  Table 1.2; STRA8; ENSG00000146857; HLA -A*11:01
ASSLEEVKK

SEQ ID NO: 9804 - protein, 11 aa, Homo sapiens
  Table 1.2; STRA8; ENSG00000146857; HLA -A*01:01,HLA-A*30:02,HLA-A*32:01,HLA-B*57:01
ASSLEEVKKEY

SEQ ID NO: 9805 - protein, 9 aa, Homo sapiens
  Table 1.2; STRA8; ENSG00000146857; HLA -A*31:01
ATLAALFNN

SEQ ID NO: 9806 - protein, 10 aa, Homo sapiens
  Table 1.2; STRA8; ENSG00000146857; HLA -A*03:01,HLA-A*11:01,HLA-A*31:01
ATLAALFNNL

SEQ ID NO: 9807 - protein, 11 aa, Homo sapiens
  Table 1.2; STRA8; ENSG00000146857; HLA -A*11:01,HLA-A*31:01
ATLAALFNNLR

SEQ ID NO: 9808 - protein, 10 aa, Homo sapiens
  Table 1.2; STRA8; ENSG00000146857; HLA -A*11:01
ATPEENSNPH

SEQ ID NO: 9809 - protein, 9 aa, Homo sapiens
  Table 1.2; STRA8; ENSG00000146857; HLA -A*02:07,HLA-A*24:02,HLA-A*31:01,HLA-A*32:01,HLA-A*68:02, HLA-C*01:02
ATPQLPAQL

SEQ ID NO: 9810 - protein, 8 aa, Homo sapiens
  Table 1.2; STRA8; ENSG00000146857; HLA -A*25:01,HLA-A*26:01,HLA-A*33:01,HLA-A*33:03,HLA-A*68:01, HLA-B*18:01,HLA-B*35:01,HLA-B*35:03,HLA-B*46:01,HLA-B*51:01
DAFDVASF

SEQ ID NO: 9811 - protein, 9 aa, Homo sapiens
  Table 1.2; STRA8; ENSG00000146857; HLA -A*23:01,HLA-A*25:01,HLA-A*26:01,HLA-A*33:01,HLA-A*33:03, HLA-A*68:01,HLA-A*68:02,HLA-B*18:01,HLA-B*35:01,HLA-B*35:03, HLA-B*38:01,HLA-B*39:01,HLA-B*51:01,HLA-C*02:02,HLA-C*07:06,
  HLA-C*12:03
DAFDVASFL

SEQ ID NO: 9812 - protein, 11 aa, Homo sapiens
  Table 1.2; STRA8; ENSG00000146857; HLA -A*11:01,HLA-A*33:01,HLA-A*68:01,HLA-A*68:02,HLA-B*27:02
DAFDVASFLDK

SEQ ID NO: 9813 - protein, 9 aa, Homo sapiens
  Table 1.2; STRA8; ENSG00000146857; HLA -B*18:01
DEEMIMLQC

SEQ ID NO: 9814 - protein, 9 aa, Homo sapiens
  Table 1.2; STRA8; ENSG00000146857; HLA -A*68:02
DLIASKWQV

SEQ ID NO: 9815 - protein, 11 aa, Homo sapiens
  Table 1.2; STRA8; ENSG00000146857; HLA -A*33:01
DLLTGSGIITP

SEQ ID NO: 9816 - protein, 10 aa, Homo sapiens
  Table 1.2; STRA8; ENSG00000146857; HLA -A*33:01
DNLLKLKASF

SEQ ID NO: 9817 - protein, 11 aa, Homo sapiens
  Table 1.2; STRA8; ENSG00000146857; HLA -B*39:01
DRATPQLPAQL

SEQ ID NO: 9818 - protein, 11 aa, Homo sapiens
  Table 1.2; STRA8; ENSG00000146857; HLA -A*01:01,HLA-A*25:01,HLA-A*26:01,HLA-A*33:01,HLA-A*33:03, HLA-A*68:01,HLA-B*57:01,HLA-B*58:01,HLA-C*04:01
DSFPQNGSSPW

SEQ ID NO: 9819 - protein, 8 aa, Homo sapiens
  Table 1.2; STRA8; ENSG00000146857; HLA -A*68:01,HLA-B*27:02
DVASFLDK

SEQ ID NO: 9820 - protein, 9 aa, Homo sapiens
  Table 1.2; STRA8; ENSG00000146857; HLA -A*33:01
DVASFLDKS

SEQ ID NO: 9821 - protein, 11 aa, Homo sapiens
  Table 1.2; STRA8; ENSG00000146857; HLA -A*26:01,HLA-A*68:02
DVASFLDKSEV

SEQ ID NO: 9822 - protein, 8 aa, Homo sapiens
  Table 1.2; STRA8; ENSG00000146857; HLA -A*01:01
DVDKILFF

SEQ ID NO: 9823 - protein, 9 aa, Homo sapiens
  Table 1.2; STRA8; ENSG00000146857; HLA -A*25:01,HLA-A*26:01,HLA-A*33:01,HLA-A*33:03,HLA-A*68:01, HLA-A*68:02,HLA-B*27:05,HLA-B*35:01,HLA-B*35:03,HLA-B*39:01, HLA-B*51:01,HLA-B*54:01,HLA-B*55:01,HLA-B*56:01,HLA-C*07:06,
  HLA-C*12:03
EAALPIVSA

SEQ ID NO: 9824 - protein, 11 aa, Homo sapiens
  Table 1.2; STRA8; ENSG00000146857; HLA -A*25:01
EAALPIVSAAI

SEQ ID NO: 9825 - protein, 10 aa, Homo sapiens
  Table 1.2; STRA8; ENSG00000146857; HLA -B*35:01,HLA-B*35:03
EASFPVDEEM

SEQ ID NO: 9826 - protein, 9 aa, Homo sapiens
  Table 1.2; STRA8; ENSG00000146857; HLA -A*25:01,HLA-A*26:01,HLA-B*18:01,HLA-B*44:02
EDAFDVASF

SEQ ID NO: 9827 - protein, 10 aa, Homo sapiens
  Table 1.2; STRA8; ENSG00000146857; HLA -A*68:02
EDAFDVASFL

SEQ ID NO: 9828 - protein, 8 aa, Homo sapiens
  Table 1.2; STRA8; ENSG00000146857; HLA -B*18:01
EEILFEDA

SEQ ID NO: 9829 - protein, 9 aa, Homo sapiens
  Table 1.2; STRA8; ENSG00000146857; HLA -B*18:01,HLA-B*27:02,HLA-B*44:02,HLA-B*44:03
EEILFEDAF

SEQ ID NO: 9830 - protein, 8 aa, Homo sapiens
  Table 1.2; STRA8; ENSG00000146857; HLA -B*18:01,HLA-B*49:01
EEMIMLQC

SEQ ID NO: 9831 - protein, 9 aa, Homo sapiens
  Table 1.2; STRA8; ENSG00000146857; HLA -A*33:01,HLA-A*33:03
EENSNPHDR

SEQ ID NO: 9832 - protein, 10 aa, Homo sapiens
  Table 1.2; STRA8; ENSG00000146857; HLA -A*30:01,HLA-B*40:02,HLA-B*44:02,HLA-B*44:03
EEVKKEYASM

SEQ ID NO: 9833 - protein, 11 aa, Homo sapiens
  Table 1.2; STRA8; ENSG00000146857; HLA -B*44:02,HLA-B*44:03
EEVKKEYASMY

SEQ ID NO: 9834 - protein, 10 aa, Homo sapiens
  Table 1.2; STRA8; ENSG00000146857; HLA -A*26:01
ENPEEKFQLY

SEQ ID NO: 9835 - protein, 10 aa, Homo sapiens
  Table 1.2; STRA8; ENSG00000146857; HLA -A*68:01
EPACAEGSVK

SEQ ID NO: 9836 - protein, 8 aa, Homo sapiens
  Table 1.2; STRA8; ENSG00000146857; HLA -B*38:01,HLA-B*39:01
EQTLDNLL

SEQ ID NO: 9837 - protein, 9 aa, Homo sapiens
  Table 1.2; STRA8; ENSG00000146857; HLA -A*25:01,HLA-A*26:01,HLA-A*33:01,HLA-A*33:03,HLA-B*08:01
EVKKEYASM

SEQ ID NO: 9838 - protein, 10 aa, Homo sapiens
  Table 1.2; STRA8; ENSG00000146857; HLA -A*25:01,HLA-A*26:01,HLA-A*30:02
EVKKEYASMY

SEQ ID NO: 9839 - protein, 9 aa, Homo sapiens
  Table 1.2; STRA8; ENSG00000146857; HLA -A*26:01
EVPSTSSSS

SEQ ID NO: 9840 - protein, 10 aa, Homo sapiens
  Table 1.2; STRA8; ENSG00000146857; HLA -A*26:01
EVPSTSSSSS

SEQ ID NO: 9841 - protein, 11 aa, Homo sapiens
  Table 1.2; STRA8; ENSG00000146857; HLA -A*25:01,HLA-A*26:01
EVPSTSSSSSV

SEQ ID NO: 9842 - protein, 9 aa, Homo sapiens
  Table 1.2; STRA8; ENSG00000146857; HLA -B*27:02
FDVASFLDK

SEQ ID NO: 9843 - protein, 8 aa, Homo sapiens
  Table 1.2; STRA8; ENSG00000146857; HLA -B*49:01
FEDAFDVA

SEQ ID NO: 9844 - protein, 10 aa, Homo sapiens
  Table 1.2; STRA8; ENSG00000146857; HLA -B*18:01,HLA-B*37:01,HLA-B*40:01,HLA-B*49:01
FEDAFDVASF

SEQ ID NO: 9845 - protein, 9 aa, Homo sapiens
  Table 1.2; STRA8; ENSG00000146857; HLA -B*57:01
FFNQEIRLW

SEQ ID NO: 9846 - protein, 10 aa, Homo sapiens
  Table 1.2; STRA8; ENSG00000146857; HLA -A*02:01
FLDKSEVPST

SEQ ID NO: 9847 - protein, 9 aa, Homo sapiens
  Table 1.2; STRA8; ENSG00000146857; HLA -B*08:01,HLA-B*46:01,HLA-C*16:01
FNNLRKTVY

SEQ ID NO: 9848 - protein, 10 aa, Homo sapiens
  Table 1.2; STRA8; ENSG00000146857; HLA -A*02:04
FNQEIRLWQL

SEQ ID NO: 9849 - protein, 9 aa, Homo sapiens
  Table 1.2; STRA8; ENSG00000146857; HLA -A*25:01,HLA-B*35:01
FPQNGSSPW

SEQ ID NO: 9850 - protein, 10 aa, Homo sapiens
  Table 1.2; STRA8; ENSG00000146857; HLA -A*30:02
FPQNGSSPWY

SEQ ID NO: 9851 - protein, 8 aa, Homo sapiens
  Table 1.2; STRA8; ENSG00000146857; HLA -B*35:03,HLA-B*51:01
FPVDEEMI

SEQ ID NO: 9852 - protein, 9 aa, Homo sapiens
  Table 1.2; STRA8; ENSG00000146857; HLA -B*35:01,HLA-B*35:03,HLA-B*54:01,HLA-B*55:01,HLA-C*03:03
FPVDEEMIM

SEQ ID NO: 9853 - protein, 10 aa, Homo sapiens
  Table 1.2; STRA8; ENSG00000146857; HLA -B*35:01,HLA-B*35:03,HLA-B*54:01,HLA-B*55:01
FPVDEEMIML

SEQ ID NO: 9854 - protein, 9 aa, Homo sapiens
  Table 1.2; STRA8; ENSG00000146857; HLA -A*23:01,HLA-A*24:02
FYKQTMDLL

SEQ ID NO: 9855 - protein, 9 aa, Homo sapiens
  Table 1.2; STRA8; ENSG00000146857; HLA -B*38:01,HLA-B*39:01
GHASSLEEV

SEQ ID NO: 9856 - protein, 10 aa, Homo sapiens
  Table 1.2; STRA8; ENSG00000146857; HLA -B*27:02,HLA-B*27:05
GHASSLEEVK

SEQ ID NO: 9857 - protein, 11 aa, Homo sapiens
  Table 1.2; STRA8; ENSG00000146857; HLA -B*27:05
GHASSLEEVKK

SEQ ID NO: 9858 - protein, 10 aa, Homo sapiens
  Table 1.2; STRA8; ENSG00000146857; HLA -B*40:01
GIITPQEAAL

SEQ ID NO: 9859 - protein, 10 aa, Homo sapiens
  Table 1.2; STRA8; ENSG00000146857; HLA -B*15:03
GKIDVDKILF

SEQ ID NO: 9860 - protein, 9 aa, Homo sapiens
  Table 1.2; STRA8; ENSG00000146857; HLA -A*02:01,HLA-A*02:03,HLA-B*13:02,HLA-B*55:01
GLSCANTQV

SEQ ID NO: 9861 - protein, 10 aa, Homo sapiens
  Table 1.2; STRA8; ENSG00000146857; HLA -A*03:01,HLA-A*03:02
GLSCANTQVK

SEQ ID NO: 9862 - protein, 8 aa, Homo sapiens
  Table 1.2; STRA8; ENSG00000146857; HLA -B*55:01,HLA-B*56:01
GPATLAEA

SEQ ID NO: 9863 - protein, 9 aa, Homo sapiens
  Table 1.2; STRA8; ENSG00000146857; HLA -B*56:01
GPATLAEAC

SEQ ID NO: 9864 - protein, 9 aa, Homo sapiens
  Table 1.2; STRA8; ENSG00000146857; HLA -B*57:01
GSSPWYLNF

SEQ ID NO: 9865 - protein, 10 aa, Homo sapiens
  Table 1.2; STRA8; ENSG00000146857; HLA -A*29:02,HLA-A*30:02
GSSPWYLNFY

SEQ ID NO: 9866 - protein, 11 aa, Homo sapiens
  Table 1.2; STRA8; ENSG00000146857; HLA -B*27:05,HLA-B*35:03
GVDSQGASCSL

SEQ ID NO: 9867 - protein, 8 aa, Homo sapiens
  Table 1.2; STRA8; ENSG00000146857; HLA -B*51:01,HLA-B*54:01
HASSLEEV

SEQ ID NO: 9868 - protein, 9 aa, Homo sapiens
  Table 1.2; STRA8; ENSG00000146857; HLA -A*68:01,HLA-B*27:02,HLA-B*35:01,HLA-C*07:06
HASSLEEVK

SEQ ID NO: 9869 - protein, 10 aa, Homo sapiens
  Table 1.2; STRA8; ENSG00000146857; HLA -A*03:02,HLA-A*11:01,HLA-A*68:01,HLA-B*27:02
HASSLEEVKK

SEQ ID NO: 9870 - protein, 8 aa, Homo sapiens
  Table 1.2; STRA8; ENSG00000146857; HLA -B*37:01
HDRATPQL

SEQ ID NO: 9871 - protein, 9 aa, Homo sapiens
  Table 1.2; STRA8; ENSG00000146857; HLA -A*02:07,HLA-A*68:02,HLA-B*27:05,HLA-B*35:03,HLA-B*38:01, HLA-B*39:01,HLA-B*51:01,HLA-C*01:02
HIPELEQTL

SEQ ID NO: 9872 - protein, 8 aa, Homo sapiens
  Table 1.2; STRA8; ENSG00000146857; HLA -B*37:01
IDVDKILF

SEQ ID NO: 9873 - protein, 9 aa, Homo sapiens
  Table 1.2; STRA8; ENSG00000146857; HLA -A*23:01,HLA-A*24:02,HLA-B*44:02,HLA-B*44:03,HLA-B*57:01
IDVDKILFF

SEQ ID NO: 9874 - protein, 9 aa, Homo sapiens
  Table 1.2; STRA8; ENSG00000146857; HLA -A*30:01,HLA-A*32:01,HLA-B*35:03,HLA-B*39:01,HLA-B*40:01, HLA-B*46:01,HLA-B*58:01,HLA-C*01:02,HLA-C*03:03,HLA-C*03:04, HLA-C*07:04
IITPQEAAL

SEQ ID NO: 9875 - protein, 9 aa, Homo sapiens
  Table 1.2; STRA8; ENSG00000146857; HLA -A*02:01,HLA-A*02:04,HLA-A*02:07,HLA-B*13:02
ILFEDAFDV

SEQ ID NO: 9876 - protein, 10 aa, Homo sapiens
  Table 1.2; STRA8; ENSG00000146857; HLA -A*02:01
ILFEDAFDVA

SEQ ID NO: 9877 - protein, 8 aa, Homo sapiens
  Table 1.2; STRA8; ENSG00000146857; HLA -B*13:02
ILFFNQEI

SEQ ID NO: 9878 - protein, 10 aa, Homo sapiens
  Table 1.2; STRA8; ENSG00000146857; HLA -A*02:01,HLA-A*02:04
ILFFNQEIRL

SEQ ID NO: 9879 - protein, 11 aa, Homo sapiens
  Table 1.2; STRA8; ENSG00000146857; HLA -B*57:01
ILFFNQEIRLW

SEQ ID NO: 9880 - protein, 9 aa, Homo sapiens
  Table 1.2; STRA8; ENSG00000146857; HLA -A*23:01,HLA-A*24:02,HLA-B*58:01
IMLQCTETF

SEQ ID NO: 9881 - protein, 8 aa, Homo sapiens
  Table 1.2; STRA8; ENSG00000146857; HLA -B*35:03
IPELEQTL

SEQ ID NO: 9882 - protein, 11 aa, Homo sapiens
  Table 1.2; STRA8; ENSG00000146857; HLA -A*02:07
ITPQEAALPIV

SEQ ID NO: 9883 - protein, 9 aa, Homo sapiens
  Table 1.2; STRA8; ENSG00000146857; HLA -A*02:03,HLA-A*02:04,HLA-A*03:01,HLA-A*23:01,HLA-A*25:01, HLA-A*26:01,HLA-A*32:01,HLA-A*68:01,HLA-A*68:02,HLA-B*27:05, HLA-B*58:01,HLA-C*01:02,HLA-C*03:04,HLA-C*05:01,HLA-C*07:04
IVSAAISHL

SEQ ID NO: 9884 - protein, 10 aa, Homo sapiens
  Table 1.2; STRA8; ENSG00000146857; HLA -A*24:02,HLA-A*25:01,HLA-B*44:02,HLA-B*57:01,HLA-B*58:01
IVSAAISHLW

SEQ ID NO: 9885 - protein, 9 aa, Homo sapiens
  Table 1.2; STRA8; ENSG00000146857; HLA -B*46:01,HLA-B*58:01,HLA-C*12:03
KAKSHIPEL

SEQ ID NO: 9886 - protein, 8 aa, Homo sapiens
  Table 1.2; STRA8; ENSG00000146857; HLA -A*32:01,HLA-C*16:01
KASLRQAW

SEQ ID NO: 9887 - protein, 9 aa, Homo sapiens
  Table 1.2; STRA8; ENSG00000146857; HLA -B*40:02,HLA-B*49:01
KEYASMYSG

SEQ ID NO: 9888 - protein, 9 aa, Homo sapiens
  Table 1.2; STRA8; ENSG00000146857; HLA -A*02:07
KIDVDKILF

SEQ ID NO: 9889 - protein, 10 aa, Homo sapiens
  Table 1.2; STRA8; ENSG00000146857; HLA -A*02:07
KIDVDKILFF

SEQ ID NO: 9890 - protein, 9 aa, Homo sapiens
  Table 1.2; STRA8; ENSG00000146857; HLA -A*02:01,HLA-A*02:04,HLA-A*02:07
KILFFNQEI

SEQ ID NO: 9891 - protein, 9 aa, Homo sapiens
  Table 1.2; STRA8; ENSG00000146857; HLA -B*58:01
KTVYSQSDL

SEQ ID NO: 9892 - protein, 10 aa, Homo sapiens
  Table 1.2; STRA8; ENSG00000146857; HLA -B*07:02
KTVYSQSDLI

SEQ ID NO: 9893 - protein, 8 aa, Homo sapiens
  Table 1.2; STRA8; ENSG00000146857; HLA -B*51:01,HLA-C*03:03,HLA-C*03:04
LAALFNNL

SEQ ID NO: 9894 - protein, 9 aa, Homo sapiens
  Table 1.2; STRA8; ENSG00000146857; HLA -A*68:01
LAALFNNLR

SEQ ID NO: 9895 - protein, 9 aa, Homo sapiens
  Table 1.2; STRA8; ENSG00000146857; HLA -A*30:01,HLA-B*07:02,HLA-B*18:01,HLA-B*35:03,HLA-B*37:01, HLA-B*38:01,HLA-B*39:01,HLA-B*40:01,HLA-B*40:02,HLA-B*44:02, HLA-B*44:03,HLA-B*49:01,HLA-C*03:03,HLA-C*03:04,HLA-C*05:01
LEDGHASSL

SEQ ID NO: 9896 - protein, 8 aa, Homo sapiens
  Table 1.2; STRA8; ENSG00000146857; HLA -B*18:01,HLA-B*44:02,HLA-B*44:03
LEEVKKEY

SEQ ID NO: 9897 - protein, 9 aa, Homo sapiens
  Table 1.2; STRA8; ENSG00000146857; HLA -B*40:01
LEQTLDNLL

SEQ ID NO: 9898 - protein, 10 aa, Homo sapiens
  Table 1.2; STRA8; ENSG00000146857; HLA -B*57:01
LFFNQEIRLW

SEQ ID NO: 9899 - protein, 10 aa, Homo sapiens
  Table 1.2; STRA8; ENSG00000146857; HLA -A*29:02
LFNNLRKTVY

SEQ ID NO: 9900 - protein, 8 aa, Homo sapiens
  Table 1.2; STRA8; ENSG00000146857; HLA -B*08:01
LLKLKASF

SEQ ID NO: 9901 - protein, 8 aa, Homo sapiens
  Table 1.2; STRA8; ENSG00000146857; HLA -B*08:01
LNFYKQTM

SEQ ID NO: 9902 - protein, 8 aa, Homo sapiens
  Table 1.2; STRA8; ENSG00000146857; HLA -B*07:02,HLA-B*08:01,HLA-B*35:01,HLA-B*35:03,HLA-B*51:01, HLA-B*56:01
LPAQLQEL

SEQ ID NO: 9903 - protein, 10 aa, Homo sapiens
  Table 1.2; STRA8; ENSG00000146857; HLA -B*35:01
LPAQLQELEH

SEQ ID NO: 9904 - protein, 8 aa, Homo sapiens
  Table 1.2; STRA8; ENSG00000146857; HLA -B*07:02,HLA-B*08:01,HLA-B*35:01,HLA-B*35:03,HLA-B*51:01, HLA-B*54:01,HLA-B*56:01
LPIVSAAI

SEQ ID NO: 9905 - protein, 11 aa, Homo sapiens
  Table 1.2; STRA8; ENSG00000146857; HLA -B*35:03
LPIVSAAISHL

SEQ ID NO: 9906 - protein, 9 aa, Homo sapiens
  Table 1.2; STRA8; ENSG00000146857; HLA -B*08:01,HLA-C*01:02,HLA-C*03:03,HLA-C*03:04
LSEERKASL

SEQ ID NO: 9907 - protein, 9 aa, Homo sapiens
  Table 1.2; STRA8; ENSG00000146857; HLA -B*35:03
LVSTPEEIL

SEQ ID NO: 9908 - protein, 10 aa, Homo sapiens
  Table 1.2; STRA8; ENSG00000146857; HLA -B*27:02,HLA-B*57:01
LVSTPEEILF

SEQ ID NO: 9909 - protein, 8 aa, Homo sapiens
  Table 1.2; STRA8; ENSG00000146857; HLA -A*23:01,HLA-A*24:02
LYMQIINF

SEQ ID NO: 9910 - protein, 9 aa, Homo sapiens
  Table 1.2; STRA8; ENSG00000146857; HLA -A*23:01,HLA-A*24:02,HLA-A*29:02
LYMQIINFF

SEQ ID NO: 9911 - protein, 11 aa, Homo sapiens
  Table 1.2; STRA8; ENSG00000146857; HLA -C*04:01
MATPEENSNPH

SEQ ID NO: 9912 - protein, 8 aa, Homo sapiens
  Table 1.2; STRA8; ENSG00000146857; HLA -B*39:01,HLA-C*04:01,HLA-C*14:02
MYSGNDSF

SEQ ID NO: 9913 - protein, 10 aa, Homo sapiens
  Table 1.2; STRA8; ENSG00000146857; HLA -A*02:03,HLA-C*01:02
NLEDGHASSL

SEQ ID NO: 9914 - protein, 10 aa, Homo sapiens
  Table 1.2; STRA8; ENSG00000146857; HLA -B*07:02,HLA-B*08:01
NLSEERKASL

SEQ ID NO: 9915 - protein, 8 aa, Homo sapiens
  Table 1.2; STRA8; ENSG00000146857; HLA -B*08:01
NPEEKFQL

SEQ ID NO: 9916 - protein, 9 aa, Homo sapiens
  Table 1.2; STRA8; ENSG00000146857; HLA -A*01:01,HLA-A*29:02,HLA-B*35:01,HLA-B*55:01,HLA-C*03:03
NPEEKFQLY

SEQ ID NO: 9917 - protein, 9 aa, Homo sapiens
  Table 1.2; STRA8; ENSG00000146857; HLA -B*35:01,HLA-B*35:03,HLA-B*38:01,HLA-B*55:01,HLA-C*03:03, HLA-C*05:01
NPENPEEKF

SEQ ID NO: 9918 - protein, 10 aa, Homo sapiens
  Table 1.2; STRA8; ENSG00000146857; HLA -B*07:02,HLA-B*35:03,HLA-C*07:02
NPHDRATPQL

SEQ ID NO: 9919 - protein, 9 aa, Homo sapiens
  Table 1.2; STRA8; ENSG00000146857; HLA -A*02:04
NQEIRLWQL

SEQ ID NO: 9920 - protein, 8 aa, Homo sapiens
  Table 1.2; STRA8; ENSG00000146857; HLA -B*18:01
PEEKFQLY

SEQ ID NO: 9921 - protein, 11 aa, Homo sapiens
  Table 1.2; STRA8; ENSG00000146857; HLA -A*01:01,HLA-A*29:02,HLA-A*30:02,HLA-B*44:02
PENPEEKFQLY

SEQ ID NO: 9922 - protein, 9 aa, Homo sapiens
  Table 1.2; STRA8; ENSG00000146857; HLA -B*38:01
PHDRATPQL

SEQ ID NO: 9923 - protein, 9 aa, Homo sapiens
  Table 1.2; STRA8; ENSG00000146857; HLA -A*30:02
PQNGSSPWY

SEQ ID NO: 9924 - protein, 9 aa, Homo sapiens
  Table 1.2; STRA8; ENSG00000146857; HLA -A*02:07
PVDEEMIML

SEQ ID NO: 9925 - protein, 8 aa, Homo sapiens
  Table 1.2; STRA8; ENSG00000146857; HLA -B*08:01
QARHRATL

SEQ ID NO: 9926 - protein, 8 aa, Homo sapiens
  Table 1.2; STRA8; ENSG00000146857; HLA -B*49:01
QEAALPIV

SEQ ID NO: 9927 - protein, 10 aa, Homo sapiens
  Table 1.2; STRA8; ENSG00000146857; HLA -A*30:01,HLA-B*40:02,HLA-B*49:01,HLA-B*56:01
QEAALPIVSA

SEQ ID NO: 9928 - protein, 11 aa, Homo sapiens
  Table 1.2; STRA8; ENSG00000146857; HLA -B*40:01
QEASFPVDEEM

SEQ ID NO: 9929 - protein, 9 aa, Homo sapiens
  Table 1.2; STRA8; ENSG00000146857; HLA -B*44:02,HLA-B*44:03,HLA-B*49:01
QEIRLWQLI

SEQ ID NO: 9930 - protein, 9 aa, Homo sapiens
  Table 1.2; STRA8; ENSG00000146857; HLA -B*44:02
QELEHRVAR

SEQ ID NO: 9931 - protein, 9 aa, Homo sapiens
  Table 1.2; STRA8; ENSG00000146857; HLA -A*02:07,HLA-A*68:02
QIINFFKGL

SEQ ID NO: 9932 - protein, 9 aa, Homo sapiens
  Table 1.2; STRA8; ENSG00000146857; HLA -B*15:03
QKHRGPATL

SEQ ID NO: 9933 - protein, 9 aa, Homo sapiens
  Table 1.2; STRA8; ENSG00000146857; HLA -A*02:07,HLA-C*01:02
QLPAQLQEL

SEQ ID NO: 9934 - protein, 9 aa, Homo sapiens
  Table 1.2; STRA8; ENSG00000146857; HLA -A*02:01,HLA-A*02:03,HLA-A*02:04,HLA-A*02:07,HLA-B*13:02, HLA-B*55:01,HLA-C*16:02
QLQELEHRV

SEQ ID NO: 9935 - protein, 11 aa, Homo sapiens
  Table 1.2; STRA8; ENSG00000146857; HLA -A*31:01
QLQELEHRVAR

SEQ ID NO: 9936 - protein, 9 aa, Homo sapiens
  Table 1.2; STRA8; ENSG00000146857; HLA -A*02:04,HLA-B*44:02,HLA-B*44:03
QLYMQIINF

SEQ ID NO: 9937 - protein, 9 aa, Homo sapiens
  Table 1.2; STRA8; ENSG00000146857; HLA -A*01:01,HLA-A*25:01,HLA-A*32:01,HLA-B*07:02,HLA-B*38:01, HLA-B*44:02,HLA-B*44:03,HLA-B*57:01,HLA-B*58:01,HLA-C*05:01, HLA-C*16:04
QSDLIASKW

SEQ ID NO: 9938 - protein, 8 aa, Homo sapiens
  Table 1.2; STRA8; ENSG00000146857; HLA -A*11:01
QTLDNLLK

SEQ ID NO: 9939 - protein, 9 aa, Homo sapiens
  Table 1.2; STRA8; ENSG00000146857; HLA -A*01:01,HLA-A*02:01,HLA-A*02:04,HLA-A*02:07,HLA-A*03:01, HLA-A*11:01,HLA-A*23:01,HLA-A*24:02,HLA-A*25:01,HLA-A*29:02, HLA-A*31:01,HLA-A*33:03,HLA-A*68:02,HLA-B*40:02,HLA-C*06:02
QTLDNLLKL

SEQ ID NO: 9940 - protein, 10 aa, Homo sapiens
  Table 1.2; STRA8; ENSG00000146857; HLA -A*03:01,HLA-A*03:02,HLA-A*11:01,HLA-B*27:02
QTLDNLLKLK

SEQ ID NO: 9941 - protein, 8 aa, Homo sapiens
  Table 1.2; STRA8; ENSG00000146857; HLA -B*37:01,HLA-B*58:01
RATLAALF

SEQ ID NO: 9942 - protein, 10 aa, Homo sapiens
  Table 1.2; STRA8; ENSG00000146857; HLA -B*58:01
RATPQLPAQL

SEQ ID NO: 9943 - protein, 9 aa, Homo sapiens
  Table 1.2; STRA8; ENSG00000146857; HLA -B*46:01
RGPATLAEA

SEQ ID NO: 9944 - protein, 8 aa, Homo sapiens
  Table 1.2; STRA8; ENSG00000146857; HLA -B*57:01,HLA-B*58:01
SAAISHLW

SEQ ID NO: 9945 - protein, 8 aa, Homo sapiens
  Table 1.2; STRA8; ENSG00000146857; HLA -B*18:01,HLA-B*27:02,HLA-B*37:01,HLA-B*44:02,HLA-B*44:03
SDLIASKW

SEQ ID NO: 9946 - protein, 8 aa, Homo sapiens
  Table 1.2; STRA8; ENSG00000146857; HLA -B*37:01
SEERKASL

SEQ ID NO: 9947 - protein, 9 aa, Homo sapiens
  Table 1.2; STRA8; ENSG00000146857; HLA -B*49:01
SEVPSTSSS

SEQ ID NO: 9948 - protein, 10 aa, Homo sapiens
  Table 1.2; STRA8; ENSG00000146857; HLA -B*27:05,HLA-B*38:01,HLA-B*39:01
SHIPELEQTL

SEQ ID NO: 9949 - protein, 9 aa, Homo sapiens
  Table 1.2; STRA8; ENSG00000146857; HLA -A*01:01,HLA-A*29:02,HLA-A*30:02,HLA-A*32:01,HLA-B*15:01, HLA-B*15:03,HLA-B*18:01,HLA-B*44:02,HLA-B*44:03,HLA-B*46:01, HLA-B*58:01,HLA-C*07:04,HLA-C*16:01,HLA-C*16:02,HLA-C*16:04
SLEEVKKEY

SEQ ID NO: 9950 - protein, 9 aa, Homo sapiens
  Table 1.2; STRA8; ENSG00000146857; HLA -A*03:01
SLRQAWAQK

SEQ ID NO: 9951 - protein, 9 aa, Homo sapiens
  Table 1.2; STRA8; ENSG00000146857; HLA -A*02:01,HLA-A*02:03,HLA-B*13:02
SLVSTPEEI

SEQ ID NO: 9952 - protein, 9 aa, Homo sapiens
  Table 1.2; STRA8; ENSG00000146857; HLA -A*02:01,HLA-A*23:01,HLA-A*24:02,HLA-A*25:01,HLA-A*26:01, HLA-A*29:02,HLA-A*30:02,HLA-A*32:01,HLA-B*07:02,HLA-B*13:02, HLA-B*15:01,HLA-B*15:03,HLA-B*27:05,HLA-B*35:01,HLA-B*37:01,
  HLA-B*38:01,HLA-B*39:01,HLA-B*46:01,HLA-B*55:01,HLA-B*58:01, HLA-C*01:02,HLA-C*02:02,HLA-C*05:01,HLA-C*07:04,HLA-C*14:02, HLA-C*16:01,HLA-C*16:04
SMYSGNDSF

SEQ ID NO: 9953 - protein, 9 aa, Homo sapiens
  Table 1.2; STRA8; ENSG00000146857; HLA -B*15:03
SQARHRATL

SEQ ID NO: 9954 - protein, 9 aa, Homo sapiens
  Table 1.2; STRA8; ENSG00000146857; HLA -B*13:02
SQGASCSLV

SEQ ID NO: 9955 - protein, 9 aa, Homo sapiens
  Table 1.2; STRA8; ENSG00000146857; HLA -A*03:02,HLA-A*11:01,HLA-B*27:05,HLA-C*07:06
SQSDLIASK

SEQ ID NO: 9956 - protein, 10 aa, Homo sapiens
  Table 1.2; STRA8; ENSG00000146857; HLA -A*11:01,HLA-A*23:01,HLA-A*24:02,HLA-A*25:01,HLA-A*26:01, HLA-A*30:01,HLA-A*30:02,HLA-A*32:01,HLA-A*68:02,HLA-B*13:02, HLA-B*15:01,HLA-B*27:02,HLA-B*27:05,HLA-B*38:01,HLA-B*44:02,
  HLA-B*44:03,HLA-B*57:01,HLA-B*58:01,HLA-C*02:02,HLA-C*07:04, HLA-C*07:06,HLA-C*12:03,HLA-C*16:04
SQSDLIASKW

SEQ ID NO: 9957 - protein, 10 aa, Homo sapiens
  Table 1.2; STRA8; ENSG00000146857; HLA -A*29:02,HLA-A*30:02,HLA-B*44:02,HLA-B*44:03,HLA-B*57:01, HLA-B*58:01
SSLEEVKKEY

SEQ ID NO: 9958 - protein, 9 aa, Homo sapiens
  Table 1.2; STRA8; ENSG00000146857; HLA -B*56:01
SSSSVLASC

SEQ ID NO: 9959 - protein, 10 aa, Homo sapiens
  Table 1.2; STRA8; ENSG00000146857; HLA -C*06:02
SSSSVLASCN

SEQ ID NO: 9960 - protein, 9 aa, Homo sapiens
  Table 1.2; STRA8; ENSG00000146857; HLA -B*35:03,HLA-B*39:01,HLA-C*03:03
STSSSSSVL

SEQ ID NO: 9961 - protein, 9 aa, Homo sapiens
  Table 1.2; STRA8; ENSG00000146857; HLA -A*30:01,HLA-B*40:01,HLA-B*40:02
TETFDDEDL

SEQ ID NO: 9962 - protein, 9 aa, Homo sapiens
  Table 1.2; STRA8; ENSG00000146857; HLA -B*07:02,HLA-B*27:05,HLA-C*04:01,HLA-C*06:02,HLA-C*12:03
TGSGIITPQ

SEQ ID NO: 9963 - protein, 9 aa, Homo sapiens
  Table 1.2; STRA8; ENSG00000146857; HLA -A*02:01,HLA-A*02:03,HLA-A*02:04,HLA-A*02:07,HLA-A*03:01, HLA-A*03:02,HLA-A*23:01,HLA-A*24:02,HLA-A*25:01,HLA-A*30:01, HLA-A*31:01,HLA-A*32:01,HLA-A*33:03,HLA-A*68:01,HLA-A*68:02,
  HLA-B*13:02,HLA-B*27:05,HLA-B*35:03,HLA-B*38:01,HLA-B*39:01, HLA-B*40:02,HLA-B*55:01,HLA-C*01:02,HLA-C*02:02,HLA-C*06:02, HLA-C*07:04
TLAALFNNL

SEQ ID NO: 9964 - protein, 8 aa, Homo sapiens
  Table 1.2; STRA8; ENSG00000146857; HLA -A*01:01,HLA-A*02:01,HLA-A*02:04,HLA-A*02:07
TLDNLLKL

SEQ ID NO: 9965 - protein, 9 aa, Homo sapiens
  Table 1.2; STRA8; ENSG00000146857; HLA -A*03:01,HLA-A*03:02
TLDNLLKLK

SEQ ID NO: 9966 - protein, 10 aa, Homo sapiens
  Table 1.2; STRA8; ENSG00000146857; HLA -A*02:07
TLDNLLKLKA

SEQ ID NO: 9967 - protein, 10 aa, Homo sapiens
  Table 1.2; STRA8; ENSG00000146857; HLA -C*04:01
TMDLLTGSGI

SEQ ID NO: 9968 - protein, 11 aa, Homo sapiens
  Table 1.2; STRA8; ENSG00000146857; HLA -B*35:01,HLA-B*55:01
TPEEILFEDAF

SEQ ID NO: 9969 - protein, 9 aa, Homo sapiens
  Table 1.2; STRA8; ENSG00000146857; HLA -B*35:01,HLA-B*55:01
TPEENSNPH

SEQ ID NO: 9970 - protein, 11 aa, Homo sapiens
  Table 1.2; STRA8; ENSG00000146857; HLA -A*68:01
TPEENSNPHDR

SEQ ID NO: 9971 - protein, 9 aa, Homo sapiens
  Table 1.2; STRA8; ENSG00000146857; HLA -B*35:03,HLA-B*51:01
TPQEAALPI

SEQ ID NO: 9972 - protein, 10 aa, Homo sapiens
  Table 1.2; STRA8; ENSG00000146857; HLA -B*54:01,HLA-B*56:01
TPQEAALPIV

SEQ ID NO: 9973 - protein, 8 aa, Homo sapiens
  Table 1.2; STRA8; ENSG00000146857; HLA -B*07:02,HLA-B*08:01,HLA-C*07:02
TPQLPAQL

SEQ ID NO: 9974 - protein, 11 aa, Homo sapiens
  Table 1.2; STRA8; ENSG00000146857; HLA -B*07:02,HLA-C*07:02
TPQLPAQLQEL

SEQ ID NO: 9975 - protein, 9 aa, Homo sapiens
  Table 1.2; STRA8; ENSG00000146857; HLA -A*23:01,HLA-A*32:01,HLA-B*13:02,HLA-B*15:01,HLA-B*15:03, HLA-B*18:01,HLA-B*27:02,HLA-B*27:05,HLA-B*38:01,HLA-B*39:01, HLA-B*44:03,HLA-B*46:01,HLA-B*58:01,HLA-C*07:04,HLA-C*16:04
TQVKQEASF

SEQ ID NO: 9976 - protein, 8 aa, Homo sapiens
  Table 1.2; STRA8; ENSG00000146857; HLA -C*05:01
TSSSSSVL

SEQ ID NO: 9977 - protein, 9 aa, Homo sapiens
  Table 1.2; STRA8; ENSG00000146857; HLA -A*68:02,HLA-B*13:02,HLA-B*27:05,HLA-B*38:01,HLA-B*49:01, HLA-B*51:01
TVYSQSDLI

SEQ ID NO: 9978 - protein, 10 aa, Homo sapiens
  Table 1.2; STRA8; ENSG00000146857; HLA -B*54:01,HLA-B*56:01
TVYSQSDLIA

SEQ ID NO: 9979 - protein, 11 aa, Homo sapiens
  Table 1.2; STRA8; ENSG00000146857; HLA -A*03:01,HLA-A*11:01,HLA-A*31:01,HLA-A*33:01
TVYSQSDLIAS

SEQ ID NO: 9980 - protein, 10 aa, Homo sapiens
  Table 1.2; STRA8; ENSG00000146857; HLA -B*37:01
VDSQGASCSL

SEQ ID NO: 9981 - protein, 9 aa, Homo sapiens
  Table 1.2; STRA8; ENSG00000146857; HLA -B*15:03
VKKEYASMY

SEQ ID NO: 9982 - protein, 10 aa, Homo sapiens
  Table 1.2; STRA8; ENSG00000146857; HLA -B*07:02,HLA-B*56:01
VPSTSSSSSV

SEQ ID NO: 9983 - protein, 11 aa, Homo sapiens
  Table 1.2; STRA8; ENSG00000146857; HLA -B*07:02,HLA-B*35:01,HLA-B*35:03,HLA-B*55:01,HLA-C*03:03, HLA-C*07:02
VPSTSSSSSVL

SEQ ID NO: 9984 - protein, 9 aa, Homo sapiens
  Table 1.2; STRA8; ENSG00000146857; HLA -A*01:01,HLA-A*23:01,HLA-A*24:02,HLA-A*25:01,HLA-A*32:01, HLA-B*44:02,HLA-B*44:03,HLA-B*57:01,HLA-B*58:01
VSAAISHLW

SEQ ID NO: 9985 - protein, 9 aa, Homo sapiens
  Table 1.2; STRA8; ENSG00000146857; HLA -A*23:01,HLA-B*57:01,HLA-B*58:01
VSTPEEILF

SEQ ID NO: 9986 - protein, 8 aa, Homo sapiens
  Table 1.2; STRA8; ENSG00000146857; HLA -A*24:02
VYSQSDLI

SEQ ID NO: 9987 - protein, 11 aa, Homo sapiens
  Table 1.2; STRA8; ENSG00000146857; HLA -A*33:01
VYSQSDLIASK

SEQ ID NO: 9988 - protein, 11 aa, Homo sapiens
  Table 1.2; STRA8; ENSG00000146857; HLA -B*38:01
YASMYSGNDSF

SEQ ID NO: 9989 - protein, 9 aa, Homo sapiens
  Table 1.2; STRA8; ENSG00000146857; HLA -A*02:04,HLA-B*08:01
YLNFYKQTM

SEQ ID NO: 9990 - protein, 10 aa, Homo sapiens
  Table 1.2; STRA8; ENSG00000146857; HLA -A*01:01,HLA-A*03:02,HLA-A*11:01,HLA-B*27:02
YSQSDLIASK

SEQ ID NO: 9991 - protein, 11 aa, Homo sapiens
  Table 1.2; STRA8; ENSG00000146857; HLA -A*01:01,HLA-A*25:01,HLA-A*32:01,HLA-A*33:01,HLA-B*44:02, HLA-B*57:01,HLA-B*58:01,HLA-C*12:03
YSQSDLIASKW

SEQ ID NO: 9992 - protein, 8 aa, Homo sapiens
  Table 1.2; TFDP3; ENSG00000183434; HLA -B*13:02,HLA-C*12:03
AASNIPVV

SEQ ID NO: 9993 - protein, 10 aa, Homo sapiens
  Table 1.2; TFDP3; ENSG00000183434; HLA -A*30:01,HLA-B*40:01,HLA-B*44:02,HLA-B*44:03
AEDLKMARNL

SEQ ID NO: 9994 - protein, 8 aa, Homo sapiens
  Table 1.2; TFDP3; ENSG00000183434; HLA -A*31:01
AFKNLVLR

SEQ ID NO: 9995 - protein, 9 aa, Homo sapiens
  Table 1.2; TFDP3; ENSG00000183434; HLA -B*58:01
AGSRSNGTW

SEQ ID NO: 9996 - protein, 9 aa, Homo sapiens
  Table 1.2; TFDP3; ENSG00000183434; HLA -B*15:03
AKYVSLTEA

SEQ ID NO: 9997 - protein, 9 aa, Homo sapiens
  Table 1.2; TFDP3; ENSG00000183434; HLA -A*01:01,HLA-A*02:01,HLA-A*02:03,HLA-A*02:04,HLA-A*02:07, HLA-A*29:02,HLA-A*32:01,HLA-B*13:02,HLA-B*15:01,HLA-B*39:01, HLA-B*46:01,HLA-B*55:01,HLA-C*01:02,HLA-C*05:01,HLA-C*07:04,
  HLA-C*16:02
ALEPYVTEM

SEQ ID NO: 9998 - protein, 9 aa, Homo sapiens
  Table 1.2; TFDP3; ENSG00000183434; HLA -A*03:01,HLA-A*03:02,HLA-A*11:01,HLA-A*31:01
AMNIISREK

SEQ ID NO: 9999 - protein, 8 aa, Homo sapiens
  Table 1.2; TFDP3; ENSG00000183434; HLA -B*13:02
AQGTFGGV

SEQ ID NO: 10000 - protein, 9 aa, Homo sapiens
  Table 1.2; TFDP3; ENSG00000183434; HLA -A*26:01,HLA-A*30:02,HLA-A*32:01,HLA-B*13:02,HLA-B*15:01, HLA-B*15:03,HLA-B*27:02,HLA-B*27:05,HLA-B*37:01,HLA-B*38:01, HLA-B*39:01,HLA-B*44:02,HLA-B*44:03,HLA-B*46:01,HLA-C*02:02,
  HLA-C*04:01,HLA-C*07:04,HLA-C*16:04
AQGTFGGVF

SEQ ID NO: 10001 - protein, 9 aa, Homo sapiens
  Table 1.2; TFDP3; ENSG00000183434; HLA -B*13:02
AQNCQNLRV

SEQ ID NO: 10002 - protein, 9 aa, Homo sapiens
  Table 1.2; TFDP3; ENSG00000183434; HLA -B*27:05,HLA-C*16:04
ARNLVPKAL

SEQ ID NO: 10003 - protein, 9 aa, Homo sapiens
  Table 1.2; TFDP3; ENSG00000183434; HLA -A*01:01,HLA-B*38:01,HLA-B*58:01,HLA-C*05:01
ASDLTNIAI

SEQ ID NO: 10004 - protein, 11 aa, Homo sapiens
  Table 1.2; TFDP3; ENSG00000183434; HLA -A*01:01
ASDLTNIAIGM

SEQ ID NO: 10005 - protein, 9 aa, Homo sapiens
  Table 1.2; TFDP3; ENSG00000183434; HLA -A*31:01
ASNIPVVGS

SEQ ID NO: 10006 - protein, 11 aa, Homo sapiens
  Table 1.2; TFDP3; ENSG00000183434; HLA -A*03:02,HLA-A*11:01
ASPNESAYDVK

SEQ ID NO: 10007 - protein, 8 aa, Homo sapiens
  Table 1.2; TFDP3; ENSG00000183434; HLA -A*30:02,HLA-A*32:01,HLA-B*39:01,HLA-B*58:01,HLA-C*16:01, HLA-C*16:02
ASQNQHSY

SEQ ID NO: 10008 - protein, 9 aa, Homo sapiens
  Table 1.2; TFDP3; ENSG00000183434; HLA -A*01:01,HLA-A*11:01,HLA-A*25:01,HLA-A*26:01,HLA-A*29:02, HLA-A*30:02,HLA-A*32:01,HLA-B*15:01,HLA-B*15:03,HLA-B*39:01, HLA-B*46:01,HLA-B*58:01,HLA-C*01:02,HLA-C*02:02,HLA-C*07:04,
  HLA-C*14:02,HLA-C*16:01,HLA-C*16:02
ATSSGGSQY

SEQ ID NO: 10009 - protein, 9 aa, Homo sapiens
  Table 1.2; TFDP3; ENSG00000183434; HLA -A*31:01,HLA-A*33:03
AYDVKNIKR

SEQ ID NO: 10010 - protein, 9 aa, Homo sapiens
  Table 1.2; TFDP3; ENSG00000183434; HLA -B*13:02
CQEVVGELV

SEQ ID NO: 10011 - protein, 11 aa, Homo sapiens
  Table 1.2; TFDP3; ENSG00000183434; HLA -B*27:02
CQEVVGELVAK

SEQ ID NO: 10012 - protein, 10 aa, Homo sapiens
  Table 1.2; TFDP3; ENSG00000183434; HLA -A*01:01,HLA-A*30:02,HLA-B*15:01
CSISDDKSEY

SEQ ID NO: 10013 - protein, 8 aa, Homo sapiens
  Table 1.2; TFDP3; ENSG00000183434; HLA -B*51:01,HLA-B*54:01
DALNVLMA

SEQ ID NO: 10014 - protein, 9 aa, Homo sapiens
  Table 1.2; TFDP3; ENSG00000183434; HLA -A*23:01,HLA-A*25:01,HLA-A*26:01,HLA-A*33:01,HLA-A*33:03, HLA-B*18:01,HLA-B*35:01,HLA-B*35:03,HLA-B*46:01,HLA-B*51:01, HLA-B*54:01
DALNVLMAM

SEQ ID NO: 10015 - protein, 9 aa, Homo sapiens
  Table 1.2; TFDP3; ENSG00000183434; HLA -A*33:01
DDKSEYLFK

SEQ ID NO: 10016 - protein, 8 aa, Homo sapiens
  Table 1.2; TFDP3; ENSG00000183434; HLA -B*18:01
DDTEVLMW

SEQ ID NO: 10017 - protein, 9 aa, Homo sapiens
  Table 1.2; TFDP3; ENSG00000183434; HLA -B*18:01
DENQTSRPV

SEQ ID NO: 10018 - protein, 10 aa, Homo sapiens
  Table 1.2; TFDP3; ENSG00000183434; HLA -B*18:01
DENQTSRPVA

SEQ ID NO: 10019 - protein, 11 aa, Homo sapiens
  Table 1.2; TFDP3; ENSG00000183434; HLA -A*30:01,HLA-A*33:01,HLA-B*18:01
DENQTSRPVAV

SEQ ID NO: 10020 - protein, 8 aa, Homo sapiens
  Table 1.2; TFDP3; ENSG00000183434; HLA -B*08:01
DLKMARNL

SEQ ID NO: 10021 - protein, 11 aa, Homo sapiens
  Table 1.2; TFDP3; ENSG00000183434; HLA -A*33:01
DLKMARNLVPK

SEQ ID NO: 10022 - protein, 9 aa, Homo sapiens
  Table 1.2; TFDP3; ENSG00000183434; HLA -A*26:01,HLA-A*33:01,HLA-A*33:03,HLA-A*68:01,HLA-A*68:02, HLA-B*39:01,HLA-C*07:04
DLTNIAIGM

SEQ ID NO: 10023 - protein, 8 aa, Homo sapiens
  Table 1.2; TFDP3; ENSG00000183434; HLA -B*08:01,HLA-B*18:01
DQQVVIGM

SEQ ID NO: 10024 - protein, 8 aa, Homo sapiens
  Table 1.2; TFDP3; ENSG00000183434; HLA -A*33:01
DVKNIKRR

SEQ ID NO: 10025 - protein, 8 aa, Homo sapiens
  Table 1.2; TFDP3; ENSG00000183434; HLA -B*51:01
EANEELKV

SEQ ID NO: 10026 - protein, 9 aa, Homo sapiens
  Table 1.2; TFDP3; ENSG00000183434; HLA -A*25:01,HLA-A*33:01,HLA-A*33:03,HLA-B*35:03
EANEELKVL

SEQ ID NO: 10027 - protein, 10 aa, Homo sapiens
  Table 1.2; TFDP3; ENSG00000183434; HLA -A*26:01,HLA-A*33:03,HLA-B*35:01,HLA-C*07:06
EANEELKVLM

SEQ ID NO: 10028 - protein, 9 aa, Homo sapiens
  Table 1.2; TFDP3; ENSG00000183434; HLA -B*40:01,HLA-B*44:02,HLA-B*44:03
EEQVSQRPL

SEQ ID NO: 10029 - protein, 9 aa, Homo sapiens
  Table 1.2; TFDP3; ENSG00000183434; HLA -A*25:01,HLA-B*35:03
EIHDDTEVL

SEQ ID NO: 10030 - protein, 11 aa, Homo sapiens
  Table 1.2; TFDP3; ENSG00000183434; HLA -A*25:01
EIHDDTEVLMW

SEQ ID NO: 10031 - protein, 10 aa, Homo sapiens
  Table 1.2; TFDP3; ENSG00000183434; HLA -A*68:02
ELQQLILQQI

SEQ ID NO: 10032 - protein, 9 aa, Homo sapiens
  Table 1.2; TFDP3; ENSG00000183434; HLA -B*08:01
ELVAKFRAA

SEQ ID NO: 10033 - protein, 10 aa, Homo sapiens
  Table 1.2; TFDP3; ENSG00000183434; HLA -A*26:01
EMAQGTFGGV

SEQ ID NO: 10034 - protein, 11 aa, Homo sapiens
  Table 1.2; TFDP3; ENSG00000183434; HLA -A*25:01,HLA-A*26:01,HLA-A*33:01
EMAQGTFGGVF

SEQ ID NO: 10035 - protein, 8 aa, Homo sapiens
  Table 1.2; TFDP3; ENSG00000183434; HLA -B*51:01,HLA-B*54:01,HLA-B*55:01,HLA-B*56:01
EPYVTEMA

SEQ ID NO: 10036 - protein, 9 aa, Homo sapiens
  Table 1.2; TFDP3; ENSG00000183434; HLA -A*33:03,HLA-A*68:01,HLA-A*68:02
ESAYDVKNI

SEQ ID NO: 10037 - protein, 10 aa, Homo sapiens
  Table 1.2; TFDP3; ENSG00000183434; HLA -A*33:03,HLA-A*68:01
ESAYDVKNIK

SEQ ID NO: 10038 - protein, 11 aa, Homo sapiens
  Table 1.2; TFDP3; ENSG00000183434; HLA -A*33:03,HLA-A*68:01
ESAYDVKNIKR

SEQ ID NO: 10039 - protein, 9 aa, Homo sapiens
  Table 1.2; TFDP3; ENSG00000183434; HLA -A*03:02,HLA-A*11:01,HLA-A*25:01,HLA-A*26:01,HLA-A*33:01, HLA-A*33:03,HLA-A*68:01,HLA-A*68:02,HLA-C*07:06
EVVGELVAK

SEQ ID NO: 10040 - protein, 10 aa, Homo sapiens
  Table 1.2; TFDP3; ENSG00000183434; HLA -A*23:01,HLA-A*25:01,HLA-A*26:01,HLA-A*29:02,HLA-A*33:01, HLA-A*33:03,HLA-A*68:01,HLA-A*68:02,HLA-B*35:01,HLA-B*44:02, HLA-B*44:03,HLA-B*57:01,HLA-C*07:06
EVVGELVAKF

SEQ ID NO: 10041 - protein, 11 aa, Homo sapiens
  Table 1.2; TFDP3; ENSG00000183434; HLA -A*33:01,HLA-A*33:03,HLA-A*68:01
EVVGELVAKFR

SEQ ID NO: 10042 - protein, 10 aa, Homo sapiens
  Table 1.2; TFDP3; ENSG00000183434; HLA -A*24:02
EYLFKFNSSF

SEQ ID NO: 10043 - protein, 9 aa, Homo sapiens
  Table 1.2; TFDP3; ENSG00000183434; HLA -A*01:01,HLA-A*25:01,HLA-A*26:01,HLA-A*29:02,HLA-A*30:02, HLA-A*32:01,HLA-A*68:01,HLA-B*15:01,HLA-B*15:03,HLA-B*27:02, HLA-B*27:05,HLA-B*35:01,HLA-B*39:01,HLA-B*44:03,HLA-B*46:01,
  HLA-B*54:01,HLA-B*55:01,HLA-B*57:01,HLA-B*58:01,HLA-C*01:02, HLA-C*02:02,HLA-C*03:03,HLA-C*03:04,HLA-C*07:04,HLA-C*07:06, HLA-C*12:03,HLA-C*14:02,HLA-C*16:01,HLA-C*16:02,HLA-C*16:04
FASQNQHSY

SEQ ID NO: 10044 - protein, 9 aa, Homo sapiens
  Table 1.2; TFDP3; ENSG00000183434; HLA -A*30:01,HLA-B*40:01,HLA-B*40:02,HLA-B*49:01
FEIHDDTEV

SEQ ID NO: 10045 - protein, 10 aa, Homo sapiens
  Table 1.2; TFDP3; ENSG00000183434; HLA -A*30:01,HLA-B*40:01,HLA-B*40:02,HLA-B*49:01
FEIHDDTEVL

SEQ ID NO: 10046 - protein, 11 aa, Homo sapiens
  Table 1.2; TFDP3; ENSG00000183434; HLA -B*40:01
FEIHDDTEVLM

SEQ ID NO: 10047 - protein, 8 aa, Homo sapiens
  Table 1.2; TFDP3; ENSG00000183434; HLA -B*39:01,HLA-B*46:01,HLA-B*54:01
FGGVFTTA

SEQ ID NO: 10048 - protein, 9 aa, Homo sapiens
  Table 1.2; TFDP3; ENSG00000183434; HLA -B*46:01
FGGVFTTAG

SEQ ID NO: 10049 - protein, 8 aa, Homo sapiens
  Table 1.2; TFDP3; ENSG00000183434; HLA -B*40:01,HLA-B*40:02
GEKNGMGL

SEQ ID NO: 10050 - protein, 9 aa, Homo sapiens
  Table 1.2; TFDP3; ENSG00000183434; HLA -B*49:01
GEKNGMGLC

SEQ ID NO: 10051 - protein, 9 aa, Homo sapiens
  Table 1.2; TFDP3; ENSG00000183434; HLA -B*15:03
GKQLLPKTF

SEQ ID NO: 10052 - protein, 11 aa, Homo sapiens
  Table 1.2; TFDP3; ENSG00000183434; HLA -A*30:01,HLA-B*13:02,HLA-B*27:05,HLA-B*38:01,HLA-C*06:02
GQSSVNIDQQV

SEQ ID NO: 10053 - protein, 9 aa, Homo sapiens
  Table 1.2; TFDP3; ENSG00000183434; HLA -A*02:01,HLA-A*02:03,HLA-A*02:04,HLA-A*03:02,HLA-A*11:01, HLA-A*29:02,HLA-A*31:01,HLA-A*32:01,HLA-B*13:02,HLA-B*27:05, HLA-C*16:02
GTFGGVFTT

SEQ ID NO: 10054 - protein, 10 aa, Homo sapiens
  Table 1.2; TFDP3; ENSG00000183434; HLA -A*02:01,HLA-A*02:03,HLA-A*02:04,HLA-A*02:07,HLA-A*03:01, HLA-A*11:01,HLA-A*25:01,HLA-A*26:01,HLA-A*30:01,HLA-A*31:01, HLA-A*32:01,HLA-A*68:02,HLA-B*13:02,HLA-B*15:01,HLA-B*27:05,
  HLA-B*40:02,HLA-B*46:01,HLA-B*49:01,HLA-B*54:01,HLA-B*55:01, HLA-B*56:01,HLA-B*57:01,HLA-B*58:01,HLA-C*02:02,HLA-C*12:03, HLA-C*16:04
GTFGGVFTTA

SEQ ID NO: 10055 - protein, 11 aa, Homo sapiens
  Table 1.2; TFDP3; ENSG00000183434; HLA -A*31:01
GTFGGVFTTAG

SEQ ID NO: 10056 - protein, 9 aa, Homo sapiens
  Table 1.2; TFDP3; ENSG00000183434; HLA -A*03:01,HLA-A*03:02,HLA-A*11:01,HLA-A*31:01,HLA-A*33:03, HLA-A*68:01,HLA-B*27:05,HLA-C*07:06
GVFTTAGSR

SEQ ID NO: 10057 - protein, 9 aa, Homo sapiens
  Table 1.2; TFDP3; ENSG00000183434; HLA -A*01:01,HLA-A*25:01,HLA-A*26:01,HLA-A*29:02,HLA-A*30:02, HLA-A*32:01,HLA-A*68:01,HLA-B*15:01,HLA-B*15:03,HLA-B*27:05, HLA-B*35:01,HLA-B*35:03,HLA-B*38:01,HLA-B*39:01,HLA-B*46:01,
  HLA-B*55:01,HLA-B*58:01,HLA-C*01:02,HLA-C*02:02,HLA-C*03:03, HLA-C*03:04,HLA-C*07:04,HLA-C*07:06,HLA-C*16:01,HLA-C*16:02, HLA-C*16:04
HASPNESAY

SEQ ID NO: 10058 - protein, 10 aa, Homo sapiens
  Table 1.2; TFDP3; ENSG00000183434; HLA -A*29:02,HLA-A*30:02
HFASQNQHSY

SEQ ID NO: 10059 - protein, 10 aa, Homo sapiens
  Table 1.2; TFDP3; ENSG00000183434; HLA -A*01:01,HLA-A*03:01,HLA-A*03:02,HLA-A*11:01,HLA-A*33:03, HLA-A*68:01,HLA-A*68:02,HLA-B*27:02,HLA-B*27:05,HLA-C*07:06
HTSTVNPLGK

SEQ ID NO: 10060 - protein, 9 aa, Homo sapiens
  Table 1.2; TFDP3; ENSG00000183434; HLA -A*68:02
HVPFIIISS

SEQ ID NO: 10061 - protein, 8 aa, Homo sapiens
  Table 1.2; TFDP3; ENSG00000183434; HLA -B*08:01,HLA-B*51:01,HLA-C*03:03,HLA-C*03:04
IAFKNLVL

SEQ ID NO: 10062 - protein, 9 aa, Homo sapiens
  Table 1.2; TFDP3; ENSG00000183434; HLA -A*31:01,HLA-A*33:01,HLA-A*33:03,HLA-B*57:01
IAFKNLVLR

SEQ ID NO: 10063 - protein, 9 aa, Homo sapiens
  Table 1.2; TFDP3; ENSG00000183434; HLA -B*27:05
IAIGMLATS

SEQ ID NO: 10064 - protein, 9 aa, Homo sapiens
  Table 1.2; TFDP3; ENSG00000183434; HLA -B*37:01
IDQQVVIGM

SEQ ID NO: 10065 - protein, 9 aa, Homo sapiens
  Table 1.2; TFDP3; ENSG00000183434; HLA -B*54:01,HLA-B*56:01,HLA-C*16:01
IGMPQRPAA

SEQ ID NO: 10066 - protein, 8 aa, Homo sapiens
  Table 1.2; TFDP3; ENSG00000183434; HLA -B*38:01,HLA-B*39:01,HLA-C*05:01
IHDDTEVL

SEQ ID NO: 10067 - protein, 9 aa, Homo sapiens
  Table 1.2; TFDP3; ENSG00000183434; HLA -B*35:03,HLA-B*38:01,HLA-B*39:01,HLA-C*04:01,HLA-C*05:01
IHDDTEVLM

SEQ ID NO: 10068 - protein, 10 aa, Homo sapiens
  Table 1.2; TFDP3; ENSG00000183434; HLA -B*38:01
IHDDTEVLMW

SEQ ID NO: 10069 - protein, 8 aa, Homo sapiens
  Table 1.2; TFDP3; ENSG00000183434; HLA -A*03:02
ILQQIAFK

SEQ ID NO: 10070 - protein, 11 aa, Homo sapiens
  Table 1.2; TFDP3; ENSG00000183434; HLA -A*02:04
ILQQIAFKNLV

SEQ ID NO: 10071 - protein, 10 aa, Homo sapiens
  Table 1.2; TFDP3; ENSG00000183434; HLA -B*56:01
IPVVGSPNPP

SEQ ID NO: 10072 - protein, 8 aa, Homo sapiens
  Table 1.2; TFDP3; ENSG00000183434; HLA -A*01:01,HLA-C*05:01,HLA-C*16:02
ISDDKSEY

SEQ ID NO: 10073 - protein, 9 aa, Homo sapiens
  Table 1.2; TFDP3; ENSG00000183434; HLA -A*01:01,HLA-A*02:01,HLA-A*02:07,HLA-A*32:01,HLA-B*38:01, HLA-B*39:01,HLA-C*03:04,HLA-C*04:01,HLA-C*05:01
ISDDKSEYL

SEQ ID NO: 10074 - protein, 10 aa, Homo sapiens
  Table 1.2; TFDP3; ENSG00000183434; HLA -A*01:01,HLA-A*02:07,HLA-B*57:01,HLA-C*04:01,HLA-C*05:01
ISDDKSEYLF

SEQ ID NO: 10075 - protein, 11 aa, Homo sapiens
  Table 1.2; TFDP3; ENSG00000183434; HLA -A*03:01
ISDDKSEYLFK

SEQ ID NO: 10076 - protein, 10 aa, Homo sapiens
  Table 1.2; TFDP3; ENSG00000183434; HLA -A*23:01,HLA-A*32:01,HLA-B*27:02,HLA-B*40:01,HLA-B*40:02, HLA-B*46:01,HLA-B*57:01,HLA-B*58:01,HLA-C*01:02,HLA-C*02:02, HLA-C*03:04,HLA-C*12:03,HLA-C*16:02,HLA-C*16:04
KALEPYVTEM

SEQ ID NO: 10077 - protein, 9 aa, Homo sapiens
  Table 1.2; TFDP3; ENSG00000183434; HLA -A*03:01,HLA-A*03:02
KMARNLVPK

SEQ ID NO: 10078 - protein, 9 aa, Homo sapiens
  Table 1.2; TFDP3; ENSG00000183434; HLA -A*30:02
KNLVLRNQY

SEQ ID NO: 10079 - protein, 10 aa, Homo sapiens
  Table 1.2; TFDP3; ENSG00000183434; HLA -B*40:02
KQKQSELQQL

SEQ ID NO: 10080 - protein, 11 aa, Homo sapiens
  Table 1.2; TFDP3; ENSG00000183434; HLA -B*13:02
KQKQSELQQLI

SEQ ID NO: 10081 - protein, 9 aa, Homo sapiens
  Table 1.2; TFDP3; ENSG00000183434; HLA -A*30:01,HLA-B*13:02,HLA-B*38:01,HLA-C*06:02
KQSELQQLI

SEQ ID NO: 10082 - protein, 10 aa, Homo sapiens
  Table 1.2; TFDP3; ENSG00000183434; HLA -B*13:02
KQSELQQLIL

SEQ ID NO: 10083 - protein, 10 aa, Homo sapiens
  Table 1.2; TFDP3; ENSG00000183434; HLA -B*58:01
KTFGQSSVNI

SEQ ID NO: 10084 - protein, 11 aa, Homo sapiens
  Table 1.2; TFDP3; ENSG00000183434; HLA -A*31:01
KVLMDENQTSR

SEQ ID NO: 10085 - protein, 8 aa, Homo sapiens
  Table 1.2; TFDP3; ENSG00000183434; HLA -A*31:01
KVWETVQR

SEQ ID NO: 10086 - protein, 9 aa, Homo sapiens
  Table 1.2; TFDP3; ENSG00000183434; HLA -A*03:01,HLA-A*03:02,HLA-A*11:01,HLA-A*31:01
KVWETVQRK

SEQ ID NO: 10087 - protein, 9 aa, Homo sapiens
  Table 1.2; TFDP3; ENSG00000183434; HLA -B*39:01
LATSSGGSQ

SEQ ID NO: 10088 - protein, 10 aa, Homo sapiens
  Table 1.2; TFDP3; ENSG00000183434; HLA -A*01:01,HLA-A*26:01,HLA-A*30:02,HLA-B*15:01,HLA-B*15:03, HLA-B*39:01,HLA-B*46:01,HLA-C*02:02,HLA-C*07:04,HLA-C*16:02
LATSSGGSQY

SEQ ID NO: 10089 - protein, 8 aa, Homo sapiens
  Table 1.2; TFDP3; ENSG00000183434; HLA -A*30:01,HLA-B*18:01,HLA-B*37:01,HLA-B*40:01,HLA-B*40:02, HLA-B*49:01,HLA-B*51:01
LEPYVTEM

SEQ ID NO: 10090 - protein, 9 aa, Homo sapiens
  Table 1.2; TFDP3; ENSG00000183434; HLA -A*03:01
LILQQIAFK

SEQ ID NO: 10091 - protein, 11 aa, Homo sapiens
  Table 1.2; TFDP3; ENSG00000183434; HLA -A*02:07
LLPKTFGQSSV

SEQ ID NO: 10092 - protein, 9 aa, Homo sapiens
  Table 1.2; TFDP3; ENSG00000183434; HLA -A*33:03
LMAMNIISR

SEQ ID NO: 10093 - protein, 9 aa, Homo sapiens
  Table 1.2; TFDP3; ENSG00000183434; HLA -A*01:01
LMDENQTSR

SEQ ID NO: 10094 - protein, 11 aa, Homo sapiens
  Table 1.2; TFDP3; ENSG00000183434; HLA -A*02:01
LMDENQTSRPV

SEQ ID NO: 10095 - protein, 10 aa, Homo sapiens
  Table 1.2; TFDP3; ENSG00000183434; HLA -B*07:02,HLA-B*08:01,HLA-B*51:01,HLA-B*54:01,HLA-B*55:01, HLA-B*56:01,HLA-C*07:02
LPKTFGQSSV

SEQ ID NO: 10096 - protein, 8 aa, Homo sapiens
  Table 1.2; TFDP3; ENSG00000183434; HLA -B*51:01,HLA-B*56:01
LPNSVIHV

SEQ ID NO: 10097 - protein, 9 aa, Homo sapiens
  Table 1.2; TFDP3; ENSG00000183434; HLA -B*54:01,HLA-B*56:01
LPNSVIHVP

SEQ ID NO: 10098 - protein, 10 aa, Homo sapiens
  Table 1.2; TFDP3; ENSG00000183434; HLA -B*35:01
LPNSVIHVPF

SEQ ID NO: 10099 - protein, 9 aa, Homo sapiens
  Table 1.2; TFDP3; ENSG00000183434; HLA -A*02:03,HLA-A*02:04,HLA-A*30:01,HLA-B*13:02,HLA-B*38:01, HLA-C*06:02,HLA-C*07:04
LQQLILQQI

SEQ ID NO: 10100 - protein, 9 aa, Homo sapiens
  Table 1.2; TFDP3; ENSG00000183434; HLA -A*68:02
LSMKVWETV

SEQ ID NO: 10101 - protein, 9 aa, Homo sapiens
  Table 1.2; TFDP3; ENSG00000183434; HLA -A*01:01
LTEANEELK

SEQ ID NO: 10102 - protein, 10 aa, Homo sapiens
  Table 1.2; TFDP3; ENSG00000183434; HLA -A*01:01
LTEANEELKV

SEQ ID NO: 10103 - protein, 10 aa, Homo sapiens
  Table 1.2; TFDP3; ENSG00000183434; HLA -A*01:01
LTNIAIGMLA

SEQ ID NO: 10104 - protein, 9 aa, Homo sapiens
  Table 1.2; TFDP3; ENSG00000183434; HLA -A*01:01,HLA-A*29:02,HLA-B*46:01
LVPKALEPY

SEQ ID NO: 10105 - protein, 10 aa, Homo sapiens
  Table 1.2; TFDP3; ENSG00000183434; HLA -A*02:07
LVPKALEPYV

SEQ ID NO: 10106 - protein, 10 aa, Homo sapiens
  Table 1.2; TFDP3; ENSG00000183434; HLA -B*54:01
MAKYVSLTEA

SEQ ID NO: 10107 - protein, 8 aa, Homo sapiens
  Table 1.2; TFDP3; ENSG00000183434; HLA -A*11:01,HLA-A*31:01,HLA-A*33:01,HLA-A*33:03,HLA-A*68:01, HLA-B*27:05,HLA-B*54:01,HLA-C*07:06
MAMNIISR

SEQ ID NO: 10108 - protein, 10 aa, Homo sapiens
  Table 1.2; TFDP3; ENSG00000183434; HLA -A*03:01,HLA-A*11:01,HLA-A*68:01,HLA-B*27:02
MAMNIISREK

SEQ ID NO: 10109 - protein, 10 aa, Homo sapiens
  Table 1.2; TFDP3; ENSG00000183434; HLA -A*30:02
MAQGTFGGVF

SEQ ID NO: 10110 - protein, 9 aa, Homo sapiens
  Table 1.2; TFDP3; ENSG00000183434; HLA -B*54:01
MARNLVPKA

SEQ ID NO: 10111 - protein, 10 aa, Homo sapiens
  Table 1.2; TFDP3; ENSG00000183434; HLA -C*04:01,HLA-C*06:02,HLA-C*07:01
MDENQTSRPV

SEQ ID NO: 10112 - protein, 11 aa, Homo sapiens
  Table 1.2; TFDP3; ENSG00000183434; HLA -A*01:01,HLA-A*25:01,HLA-A*26:01,HLA-A*29:02,HLA-A*30:02, HLA-A*32:01,HLA-B*15:01,HLA-B*15:03,HLA-B*35:01,HLA-B*46:01, HLA-C*07:04,HLA-C*14:02
MLATSSGGSQY

SEQ ID NO: 10113 - protein, 10 aa, Homo sapiens
  Table 1.2; TFDP3; ENSG00000183434; HLA -B*07:02,HLA-B*51:01
MPQRPAASNI

SEQ ID NO: 10114 - protein, 10 aa, Homo sapiens
  Table 1.2; TFDP3; ENSG00000183434; HLA -C*07:01
MTFGLESGSC

SEQ ID NO: 10115 - protein, 9 aa, Homo sapiens
  Table 1.2; TFDP3; ENSG00000183434; HLA -A*33:01,HLA-A*33:03
NCQNLRVER

SEQ ID NO: 10116 - protein, 8 aa, Homo sapiens
  Table 1.2; TFDP3; ENSG00000183434; HLA -B*18:01,HLA-B*37:01
NEELKVLM

SEQ ID NO: 10117 - protein, 10 aa, Homo sapiens
  Table 1.2; TFDP3; ENSG00000183434; HLA -B*44:02,HLA-B*44:03,HLA-B*49:01
NESAYDVKNI

SEQ ID NO: 10118 - protein, 9 aa, Homo sapiens
  Table 1.2; TFDP3; ENSG00000183434; HLA -B*38:01,HLA-B*39:01
NHASPNESA

SEQ ID NO: 10119 - protein, 10 aa, Homo sapiens
  Table 1.2; TFDP3; ENSG00000183434; HLA -A*30:02,HLA-B*38:01,HLA-B*39:01
NHASPNESAY

SEQ ID NO: 10120 - protein, 8 aa, Homo sapiens
  Table 1.2; TFDP3; ENSG00000183434; HLA -B*38:01,HLA-C*04:01,HLA-C*05:01
NIDQQVVI

SEQ ID NO: 10121 - protein, 10 aa, Homo sapiens
  Table 1.2; TFDP3; ENSG00000183434; HLA -A*02:07
NIDQQVVIGM

SEQ ID NO: 10122 - protein, 8 aa, Homo sapiens
  Table 1.2; TFDP3; ENSG00000183434; HLA -B*08:01
NPLGKQLL

SEQ ID NO: 10123 - protein, 9 aa, Homo sapiens
  Table 1.2; TFDP3; ENSG00000183434; HLA -A*02:01,HLA-A*02:03,HLA-B*08:01,HLA-B*13:02,HLA-B*37:01, HLA-B*39:01,HLA-B*55:01,HLA-C*16:01,HLA-C*16:02
NQTSRPVAV

SEQ ID NO: 10124 - protein, 8 aa, Homo sapiens
  Table 1.2; TFDP3; ENSG00000183434; HLA -B*13:02
NQYVEEQV

SEQ ID NO: 10125 - protein, 9 aa, Homo sapiens
  Table 1.2; TFDP3; ENSG00000183434; HLA -B*27:05
NQYVEEQVS

SEQ ID NO: 10126 - protein, 10 aa, Homo sapiens
  Table 1.2; TFDP3; ENSG00000183434; HLA -B*27:05
NQYVEEQVSQ

SEQ ID NO: 10127 - protein, 11 aa, Homo sapiens
  Table 1.2; TFDP3; ENSG00000183434; HLA -A*31:01,HLA-A*68:01,HLA-B*27:05,HLA-C*07:06
NQYVEEQVSQR

SEQ ID NO: 10128 - protein, 10 aa, Homo sapiens
  Table 1.2; TFDP3; ENSG00000183434; HLA -A*68:01
NSAQNCQNLR

SEQ ID NO: 10129 - protein, 9 aa, Homo sapiens
  Table 1.2; TFDP3; ENSG00000183434; HLA -C*12:03
PAASNIPVV

SEQ ID NO: 10130 - protein, 9 aa, Homo sapiens
  Table 1.2; TFDP3; ENSG00000183434; HLA -A*02:07
PLPNSVIHV

SEQ ID NO: 10131 - protein, 9 aa, Homo sapiens
  Table 1.2; TFDP3; ENSG00000183434; HLA -A*02:03
PVAVHTSTV

SEQ ID NO: 10132 - protein, 10 aa, Homo sapiens
  Table 1.2; TFDP3; ENSG00000183434; HLA -B*07:02
PVVGSPNPPS

SEQ ID NO: 10133 - protein, 11 aa, Homo sapiens
  Table 1.2; TFDP3; ENSG00000183434; HLA -A*24:02
PYVTEMAQGTF

SEQ ID NO: 10134 - protein, 8 aa, Homo sapiens
  Table 1.2; TFDP3; ENSG00000183434; HLA -A*30:01,HLA-B*18:01,HLA-B*37:01,HLA-B*40:01,HLA-B*49:01
QEVVGELV

SEQ ID NO: 10135 - protein, 9 aa, Homo sapiens
  Table 1.2; TFDP3; ENSG00000183434; HLA -A*30:01,HLA-B*18:01,HLA-B*40:01,HLA-B*40:02,HLA-B*49:01
QEVVGELVA

SEQ ID NO: 10136 - protein, 10 aa, Homo sapiens
  Table 1.2; TFDP3; ENSG00000183434; HLA -B*27:02
QEVVGELVAK

SEQ ID NO: 10137 - protein, 11 aa, Homo sapiens
  Table 1.2; TFDP3; ENSG00000183434; HLA -A*25:01,HLA-A*30:01,HLA-B*18:01,HLA-B*27:02,HLA-B*40:01, HLA-B*44:02,HLA-B*44:03
QEVVGELVAKF

SEQ ID NO: 10138 - protein, 8 aa, Homo sapiens
  Table 1.2; TFDP3; ENSG00000183434; HLA -C*07:04
QGTFGGVF

SEQ ID NO: 10139 - protein, 9 aa, Homo sapiens
  Table 1.2; TFDP3; ENSG00000183434; HLA -B*38:01
QHSYSSPPW

SEQ ID NO: 10140 - protein, 9 aa, Homo sapiens
  Table 1.2; TFDP3; ENSG00000183434; HLA -B*08:01
QIAFKNLVL

SEQ ID NO: 10141 - protein, 9 aa, Homo sapiens
  Table 1.2; TFDP3; ENSG00000183434; HLA -A*23:01,HLA-A*24:02,HLA-A*32:01,HLA-B*15:01,HLA-B*15:03, HLA-B*44:02,HLA-B*44:03,HLA-B*46:01
QLILQQIAF

SEQ ID NO: 10142 - protein, 9 aa, Homo sapiens
  Table 1.2; TFDP3; ENSG00000183434; HLA -B*13:02
QQIAFKNLV

SEQ ID NO: 10143 - protein, 11 aa, Homo sapiens
  Table 1.2; TFDP3; ENSG00000183434; HLA -A*31:01
QQIAFKNLVLR

SEQ ID NO: 10144 - protein, 8 aa, Homo sapiens
  Table 1.2; TFDP3; ENSG00000183434; HLA -B*13:02
QQLILQQI

SEQ ID NO: 10145 - protein, 9 aa, Homo sapiens
  Table 1.2; TFDP3; ENSG00000183434; HLA -B*13:02
QQLILQQIA

SEQ ID NO: 10146 - protein, 10 aa, Homo sapiens
  Table 1.2; TFDP3; ENSG00000183434; HLA -B*15:01,HLA-B*15:03
QQLILQQIAF

SEQ ID NO: 10147 - protein, 9 aa, Homo sapiens
  Table 1.2; TFDP3; ENSG00000183434; HLA -A*01:01
QSELQQLIL

SEQ ID NO: 10148 - protein, 9 aa, Homo sapiens
  Table 1.2; TFDP3; ENSG00000183434; HLA -A*03:01,HLA-A*03:02,HLA-A*11:01,HLA-A*32:01
QTSRPVAVH

SEQ ID NO: 10149 - protein, 9 aa, Homo sapiens
  Table 1.2; TFDP3; ENSG00000183434; HLA -A*31:01,HLA-A*68:01,HLA-C*07:06
QVVIGMPQR

SEQ ID NO: 10150 - protein, 10 aa, Homo sapiens
  Table 1.2; TFDP3; ENSG00000183434; HLA -A*31:01,HLA-A*33:01,HLA-A*33:03,HLA-A*68:01,HLA-B*27:02, HLA-C*07:06
QYVEEQVSQR

SEQ ID NO: 10151 - protein, 9 aa, Homo sapiens
  Table 1.2; TFDP3; ENSG00000183434; HLA -B*08:01
RIKQKQSEL

SEQ ID NO: 10152 - protein, 9 aa, Homo sapiens
  Table 1.2; TFDP3; ENSG00000183434; HLA -B*07:02,HLA-B*56:01
RPAASNIPV

SEQ ID NO: 10153 - protein, 10 aa, Homo sapiens
  Table 1.2; TFDP3; ENSG00000183434; HLA -B*07:02,HLA-B*55:01,HLA-B*56:01
RPAASNIPVV

SEQ ID NO: 10154 - protein, 10 aa, Homo sapiens
  Table 1.2; TFDP3; ENSG00000183434; HLA -B*56:01
RPLPNSVIHV

SEQ ID NO: 10155 - protein, 9 aa, Homo sapiens
  Table 1.2; TFDP3; ENSG00000183434; HLA -B*07:02,HLA-B*56:01
RPVAVHTST

SEQ ID NO: 10156 - protein, 10 aa, Homo sapiens
  Table 1.2; TFDP3; ENSG00000183434; HLA -B*07:02,HLA-B*51:01,HLA-B*54:01,HLA-B*55:01,HLA-B*56:01, HLA-C*07:02
RPVAVHTSTV

SEQ ID NO: 10157 - protein, 9 aa, Homo sapiens
  Table 1.2; TFDP3; ENSG00000183434; HLA -A*03:01,HLA-B*46:01,HLA-B*58:01
RTYDALNVL

SEQ ID NO: 10158 - protein, 10 aa, Homo sapiens
  Table 1.2; TFDP3; ENSG00000183434; HLA -A*03:01,HLA-A*23:01,HLA-A*31:01,HLA-B*57:01,HLA-B*58:01
RTYDALNVLM

SEQ ID NO: 10159 - protein, 9 aa, Homo sapiens
  Table 1.2; TFDP3; ENSG00000183434; HLA -A*11:01,HLA-A*31:01,HLA-A*33:01,HLA-A*33:03,HLA-A*68:01, HLA-C*07:06
SAEDLKMAR

SEQ ID NO: 10160 - protein, 9 aa, Homo sapiens
  Table 1.2; TFDP3; ENSG00000183434; HLA -A*33:03,HLA-C*07:06
SAQNCQNLR

SEQ ID NO: 10161 - protein, 9 aa, Homo sapiens
  Table 1.2; TFDP3; ENSG00000183434; HLA -C*12:03
SASDLTNIA

SEQ ID NO: 10162 - protein, 10 aa, Homo sapiens
  Table 1.2; TFDP3; ENSG00000183434; HLA -A*68:01,HLA-A*68:02,HLA-B*13:02,HLA-B*39:01,HLA-C*07:06
SASDLTNIAI

SEQ ID NO: 10163 - protein, 8 aa, Homo sapiens
  Table 1.2; TFDP3; ENSG00000183434; HLA -B*13:02,HLA-B*51:01,HLA-C*12:03,HLA-C*16:02
SAYDVKNI

SEQ ID NO: 10164 - protein, 9 aa, Homo sapiens
  Table 1.2; TFDP3; ENSG00000183434; HLA -A*03:01,HLA-A*03:02,HLA-A*11:01,HLA-A*68:01,HLA-C*02:02, HLA-C*07:06,HLA-C*16:01
SAYDVKNIK

SEQ ID NO: 10165 - protein, 10 aa, Homo sapiens
  Table 1.2; TFDP3; ENSG00000183434; HLA -A*11:01,HLA-A*31:01,HLA-A*33:01,HLA-A*33:03,HLA-A*68:01, HLA-C*07:06
SAYDVKNIKR

SEQ ID NO: 10166 - protein, 11 aa, Homo sapiens
  Table 1.2; TFDP3; ENSG00000183434; HLA -A*33:01
SAYDVKNIKRR

SEQ ID NO: 10167 - protein, 9 aa, Homo sapiens
  Table 1.2; TFDP3; ENSG00000183434; HLA -B*38:01
SDDKSEYLF

SEQ ID NO: 10168 - protein, 8 aa, Homo sapiens
  Table 1.2; TFDP3; ENSG00000183434; HLA -B*37:01
SDLTNIAI

SEQ ID NO: 10169 - protein, 11 aa, Homo sapiens
  Table 1.2; TFDP3; ENSG00000183434; HLA -A*30:01,HLA-B*44:02,HLA-B*44:03,HLA-B*49:01
SELQQLILQQI

SEQ ID NO: 10170 - protein, 9 aa, Homo sapiens
  Table 1.2; TFDP3; ENSG00000183434; HLA -A*26:01,HLA-A*29:02,HLA-A*30:02,HLA-A*32:01,HLA-B*15:01, HLA-B*46:01
SISDDKSEY

SEQ ID NO: 10171 - protein, 9 aa, Homo sapiens
  Table 1.2; TFDP3; ENSG00000183434; HLA -A*02:01,HLA-A*02:03,HLA-B*35:03,HLA-B*39:01,HLA-B*55:01, HLA-C*01:02,HLA-C*14:02
SLTEANEEL

SEQ ID NO: 10172 - protein, 10 aa, Homo sapiens
  Table 1.2; TFDP3; ENSG00000183434; HLA -A*03:02
SLTEANEELK

SEQ ID NO: 10173 - protein, 11 aa, Homo sapiens
  Table 1.2; TFDP3; ENSG00000183434; HLA -A*02:01
SLTEANEELKV

SEQ ID NO: 10174 - protein, 10 aa, Homo sapiens
  Table 1.2; TFDP3; ENSG00000183434; HLA -A*31:01,HLA-A*33:03
SMKVWETVQR

SEQ ID NO: 10175 - protein, 11 aa, Homo sapiens
  Table 1.2; TFDP3; ENSG00000183434; HLA -A*30:02
SNHASPNESAY

SEQ ID NO: 10176 - protein, 9 aa, Homo sapiens
  Table 1.2; TFDP3; ENSG00000183434; HLA -B*07:02,HLA-B*35:01,HLA-B*35:03,HLA-B*55:01,HLA-B*56:01
SPNESAYDV

SEQ ID NO: 10177 - protein, 10 aa, Homo sapiens
  Table 1.2; TFDP3; ENSG00000183434; HLA -B*27:02,HLA-B*35:01
SPNESAYDVK

SEQ ID NO: 10178 - protein, 9 aa, Homo sapiens
  Table 1.2; TFDP3; ENSG00000183434; HLA -A*23:01,HLA-A*24:02,HLA-A*25:01,HLA-A*30:02,HLA-A*32:01, HLA-A*33:01,HLA-A*33:03,HLA-B*07:02,HLA-B*08:01,HLA-B*15:01, HLA-B*15:03,HLA-B*35:01,HLA-B*35:03,HLA-B*37:01,HLA-B*38:01,
  HLA-B*44:03,HLA-B*46:01,HLA-B*51:01,HLA-B*55:01,HLA-B*56:01, HLA-B*57:01,HLA-B*58:01,HLA-C*03:03,HLA-C*07:02,HLA-C*07:06, HLA-C*16:01
SPNPPSTHF

SEQ ID NO: 10179 - protein, 10 aa, Homo sapiens
  Table 1.2; TFDP3; ENSG00000183434; HLA -B*54:01,HLA-B*56:01
SPNPPSTHFA

SEQ ID NO: 10180 - protein, 9 aa, Homo sapiens
  Table 1.2; TFDP3; ENSG00000183434; HLA -A*02:03,HLA-A*32:01,HLA-B*13:02,HLA-B*15:03,HLA-B*40:02
SQRPLPNSV

SEQ ID NO: 10181 - protein, 8 aa, Homo sapiens
  Table 1.2; TFDP3; ENSG00000183434; HLA -B*13:02
SQYSGSRV

SEQ ID NO: 10182 - protein, 11 aa, Homo sapiens
  Table 1.2; TFDP3; ENSG00000183434; HLA -A*32:01,HLA-B*15:01
SQYSGSRVETP

SEQ ID NO: 10183 - protein, 11 aa, Homo sapiens
  Table 1.2; TFDP3; ENSG00000183434; HLA -A*68:02
SSFEIHDDTEV

SEQ ID NO: 10184 - protein, 11 aa, Homo sapiens
  Table 1.2; TFDP3; ENSG00000183434; HLA -A*31:01
SSPPWAGQHNR

SEQ ID NO: 10185 - protein, 9 aa, Homo sapiens
  Table 1.2; TFDP3; ENSG00000183434; HLA -A*68:02,HLA-B*13:02
SSVNIDQQV

SEQ ID NO: 10186 - protein, 8 aa, Homo sapiens
  Table 1.2; TFDP3; ENSG00000183434; HLA -A*03:01,HLA-A*11:01,HLA-A*68:01
STVNPLGK

SEQ ID NO: 10187 - protein, 10 aa, Homo sapiens
  Table 1.2; TFDP3; ENSG00000183434; HLA -A*68:02
SVIHVPFIII

SEQ ID NO: 10188 - protein, 9 aa, Homo sapiens
  Table 1.2; TFDP3; ENSG00000183434; HLA -B*13:02
SVNIDQQVV

SEQ ID NO: 10189 - protein, 10 aa, Homo sapiens
  Table 1.2; TFDP3; ENSG00000183434; HLA -A*25:01
TAGSRSNGTW

SEQ ID NO: 10190 - protein, 9 aa, Homo sapiens
  Table 1.2; TFDP3; ENSG00000183434; HLA -A*30:01,HLA-B*13:02,HLA-B*40:01,HLA-B*44:03,HLA-B*49:01
TEANEELKV

SEQ ID NO: 10191 - protein, 10 aa, Homo sapiens
  Table 1.2; TFDP3; ENSG00000183434; HLA -A*30:01,HLA-B*27:05,HLA-B*40:01,HLA-B*40:02,HLA-B*44:02, HLA-B*44:03,HLA-B*49:01
TEANEELKVL

SEQ ID NO: 10192 - protein, 11 aa, Homo sapiens
  Table 1.2; TFDP3; ENSG00000183434; HLA -A*30:01,HLA-B*40:01,HLA-B*44:02,HLA-B*44:03
TEANEELKVLM

SEQ ID NO: 10193 - protein, 8 aa, Homo sapiens
  Table 1.2; TFDP3; ENSG00000183434; HLA -B*18:01,HLA-B*37:01,HLA-B*44:03
TEMAQGTF

SEQ ID NO: 10194 - protein, 9 aa, Homo sapiens
  Table 1.2; TFDP3; ENSG00000183434; HLA -B*49:01
TEMAQGTFG

SEQ ID NO: 10195 - protein, 11 aa, Homo sapiens
  Table 1.2; TFDP3; ENSG00000183434; HLA -B*49:01
TEMAQGTFGGV

SEQ ID NO: 10196 - protein, 9 aa, Homo sapiens
  Table 1.2; TFDP3; ENSG00000183434; HLA -A*23:01,HLA-A*24:02,HLA-B*54:01,HLA-B*55:01,HLA-C*14:02
TFGGVFTTA

SEQ ID NO: 10197 - protein, 10 aa, Homo sapiens
  Table 1.2; TFDP3; ENSG00000183434; HLA -C*04:01
TFGGVFTTAG

SEQ ID NO: 10198 - protein, 9 aa, Homo sapiens
  Table 1.2; TFDP3; ENSG00000183434; HLA -A*23:01
TFGQSSVNI

SEQ ID NO: 10199 - protein, 11 aa, Homo sapiens
  Table 1.2; TFDP3; ENSG00000183434; HLA -A*30:02,HLA-A*32:01,HLA-B*38:01
THFASQNQHSY

SEQ ID NO: 10200 - protein, 9 aa, Homo sapiens
  Table 1.2; TFDP3; ENSG00000183434; HLA -B*54:01
TNIAIGMLA

SEQ ID NO: 10201 - protein, 9 aa, Homo sapiens
  Table 1.2; TFDP3; ENSG00000183434; HLA -C*06:02
TSRPVAVHT

SEQ ID NO: 10202 - protein, 8 aa, Homo sapiens
  Table 1.2; TFDP3; ENSG00000183434; HLA -A*01:01,HLA-A*30:02,HLA-B*39:01,HLA-C*05:01
TSSGGSQY

SEQ ID NO: 10203 - protein, 9 aa, Homo sapiens
  Table 1.2; TFDP3; ENSG00000183434; HLA -A*03:02,HLA-A*11:01,HLA-A*68:01
TSTVNPLGK

SEQ ID NO: 10204 - protein, 11 aa, Homo sapiens
  Table 1.2; TFDP3; ENSG00000183434; HLA -A*25:01,HLA-A*32:01,HLA-B*58:01
TTAGSRSNGTW

SEQ ID NO: 10205 - protein, 9 aa, Homo sapiens
  Table 1.2; TFDP3; ENSG00000183434; HLA -A*25:01,HLA-A*31:01,HLA-A*32:01,HLA-B*07:02,HLA-B*27:05, HLA-C*01:02
TVNPLGKQL

SEQ ID NO: 10206 - protein, 10 aa, Homo sapiens
  Table 1.2; TFDP3; ENSG00000183434; HLA -A*23:01,HLA-A*31:01,HLA-A*32:01
TVNPLGKQLL

SEQ ID NO: 10207 - protein, 11 aa, Homo sapiens
  Table 1.2; TFDP3; ENSG00000183434; HLA -A*24:02
TWLSASDLTNI

SEQ ID NO: 10208 - protein, 8 aa, Homo sapiens
  Table 1.2; TFDP3; ENSG00000183434; HLA -A*23:01,HLA-B*35:01,HLA-B*35:03,HLA-C*04:01
TYDALNVL

SEQ ID NO: 10209 - protein, 9 aa, Homo sapiens
  Table 1.2; TFDP3; ENSG00000183434; HLA -A*02:07,HLA-A*23:01,HLA-A*24:02,HLA-A*29:02,HLA-A*32:01, HLA-A*33:03,HLA-B*35:01,HLA-B*35:03,HLA-B*38:01,HLA-B*55:01, HLA-C*04:01,HLA-C*05:01,HLA-C*07:04,HLA-C*14:02
TYDALNVLM

SEQ ID NO: 10210 - protein, 9 aa, Homo sapiens
  Table 1.2; TFDP3; ENSG00000183434; HLA -B*08:01
VAKFRAASN

SEQ ID NO: 10211 - protein, 8 aa, Homo sapiens
  Table 1.2; TFDP3; ENSG00000183434; HLA -B*46:01,HLA-B*51:01
VAVHTSTV

SEQ ID NO: 10212 - protein, 10 aa, Homo sapiens
  Table 1.2; TFDP3; ENSG00000183434; HLA -A*30:01,HLA-B*40:01,HLA-B*40:02,HLA-B*49:01
VEEQVSQRPL

SEQ ID NO: 10213 - protein, 8 aa, Homo sapiens
  Table 1.2; TFDP3; ENSG00000183434; HLA -B*18:01,HLA-B*37:01,HLA-B*39:01
VGELVAKF

SEQ ID NO: 10214 - protein, 11 aa, Homo sapiens
  Table 1.2; TFDP3; ENSG00000183434; HLA -A*23:01,HLA-A*24:02,HLA-A*30:02
VGSPNPPSTHF

SEQ ID NO: 10215 - protein, 9 aa, Homo sapiens
  Table 1.2; TFDP3; ENSG00000183434; HLA -B*38:01,HLA-B*39:01,HLA-C*07:04
VHTSTVNPL

SEQ ID NO: 10216 - protein, 10 aa, Homo sapiens
  Table 1.2; TFDP3; ENSG00000183434; HLA -A*03:01,HLA-A*03:02,HLA-A*11:01,HLA-A*31:01,HLA-A*33:01, HLA-A*33:03,HLA-A*68:01,HLA-B*57:01
VLMDENQTSR

SEQ ID NO: 10217 - protein, 9 aa, Homo sapiens
  Table 1.2; TFDP3; ENSG00000183434; HLA -A*23:01,HLA-B*13:02
VNIDQQVVI

SEQ ID NO: 10218 - protein, 8 aa, Homo sapiens
  Table 1.2; TFDP3; ENSG00000183434; HLA -C*01:02
VNPLGKQL

SEQ ID NO: 10219 - protein, 8 aa, Homo sapiens
  Table 1.2; TFDP3; ENSG00000183434; HLA -B*54:01,HLA-B*56:01
VPFIIISS

SEQ ID NO: 10220 - protein, 9 aa, Homo sapiens
  Table 1.2; TFDP3; ENSG00000183434; HLA -B*54:01,HLA-B*56:01
VPFIIISSS

SEQ ID NO: 10221 - protein, 9 aa, Homo sapiens
  Table 1.2; TFDP3; ENSG00000183434; HLA -B*51:01,HLA-B*54:01,HLA-B*55:01,HLA-B*56:01
VPKALEPYV

SEQ ID NO: 10222 - protein, 11 aa, Homo sapiens
  Table 1.2; TFDP3; ENSG00000183434; HLA -A*03:02,HLA-A*11:01,HLA-B*27:02
VSLTEANEELK

SEQ ID NO: 10223 - protein, 9 aa, Homo sapiens
  Table 1.2; TFDP3; ENSG00000183434; HLA -A*01:01,HLA-C*05:01
VTEMAQGTF

SEQ ID NO: 10224 - protein, 8 aa, Homo sapiens
  Table 1.2; TFDP3; ENSG00000183434; HLA -A*03:01,HLA-A*03:02,HLA-A*11:01,HLA-B*27:02
VVGELVAK

SEQ ID NO: 10225 - protein, 9 aa, Homo sapiens
  Table 1.2; TFDP3; ENSG00000183434; HLA -A*01:01,HLA-A*02:07,HLA-A*03:01,HLA-A*03:02,HLA-A*11:01, HLA-A*23:01,HLA-A*24:02,HLA-A*25:01,HLA-A*26:01,HLA-A*29:02, HLA-A*30:02,HLA-A*31:01,HLA-A*32:01,HLA-A*33:01,HLA-A*33:03,
  HLA-A*68:01,HLA-A*68:02,HLA-B*15:01,HLA-B*15:03,HLA-B*18:01, HLA-B*27:02,HLA-B*27:05,HLA-B*35:01,HLA-B*37:01,HLA-B*38:01, HLA-B*44:02,HLA-B*44:03,HLA-B*46:01,HLA-B*57:01,HLA-B*58:01, HLA-C*02:02,HLA-C*07:04,HLA-C*12:03
VVGELVAKF

SEQ ID NO: 10226 - protein, 8 aa, Homo sapiens
  Table 1.2; TFDP3; ENSG00000183434; HLA -A*31:01
VVIGMPQR

SEQ ID NO: 10227 - protein, 9 aa, Homo sapiens
  Table 1.2; TFDP3; ENSG00000183434; HLA -A*32:01
VVIGMPQRP

SEQ ID NO: 10228 - protein, 11 aa, Homo sapiens
  Table 1.2; TFDP3; ENSG00000183434; HLA -B*54:01
VVIGMPQRPAA

SEQ ID NO: 10229 - protein, 8 aa, Homo sapiens
  Table 1.2; TFDP3; ENSG00000183434; HLA -A*30:01,HLA-B*37:01,HLA-B*40:02
YDALNVLM

SEQ ID NO: 10230 - protein, 10 aa, Homo sapiens
  Table 1.2; TFDP3; ENSG00000183434; HLA -A*01:01
YSSPPWAGQH

SEQ ID NO: 10231 - protein, 9 aa, Homo sapiens
  Table 1.2; TFDP3; ENSG00000183434; HLA -A*01:01,HLA-A*03:02,HLA-A*11:01,HLA-A*26:01,HLA-A*31:01, HLA-A*33:01,HLA-A*33:03,HLA-A*68:01,HLA-C*05:01,HLA-C*07:06
YVEEQVSQR

SEQ ID NO: 10232 - protein, 11 aa, Homo sapiens
  Table 1.2; TFDP3; ENSG00000183434; HLA -B*27:05,HLA-C*03:03,HLA-C*03:04
YVEEQVSQRPL

SEQ ID NO: 10233 - protein, 10 aa, Homo sapiens
  Table 1.2; TFDP3; ENSG00000183434; HLA -A*25:01,HLA-A*26:01
YVTEMAQGTF

SEQ ID NO: 10234 - protein, 9 aa, Homo sapiens
  Table 1.2; XAGE3; ENSG00000171402; HLA -C*05:01
AAETQVPDL

SEQ ID NO: 10235 - protein, 10 aa, Homo sapiens
  Table 1.2; XAGE3; ENSG00000171402; HLA -B*27:02
ADLQELSQSK

SEQ ID NO: 10236 - protein, 8 aa, Homo sapiens
  Table 1.2; XAGE3; ENSG00000171402; HLA -A*30:01,HLA-B*18:01,HLA-B*37:01,HLA-B*40:01,HLA-B*40:02, HLA-B*44:02,HLA-B*44:03,HLA-B*49:01
AETQVPDL

SEQ ID NO: 10237 - protein, 10 aa, Homo sapiens
  Table 1.2; XAGE3; ENSG00000171402; HLA -A*30:01,HLA-B*49:01
AETQVPDLEA

SEQ ID NO: 10238 - protein, 9 aa, Homo sapiens
  Table 1.2; XAGE3; ENSG00000171402; HLA -A*33:01,HLA-B*27:02
DDQGKILPK

SEQ ID NO: 10239 - protein, 9 aa, Homo sapiens
  Table 1.2; XAGE3; ENSG00000171402; HLA -A*03:02,HLA-A*33:01,HLA-A*33:03
DLQELSQSK

SEQ ID NO: 10240 - protein, 11 aa, Homo sapiens
  Table 1.2; XAGE3; ENSG00000171402; HLA -A*33:01,HLA-A*33:03
ESRDPAPGQER

SEQ ID NO: 10241 - protein, 10 aa, Homo sapiens
  Table 1.2; XAGE3; ENSG00000171402; HLA -B*15:03
GKILPKSEQF

SEQ ID NO: 10242 - protein, 9 aa, Homo sapiens
  Table 1.2; XAGE3; ENSG00000171402; HLA -B*07:02,HLA-B*35:03,HLA-C*07:02
GPDDQGKIL

SEQ ID NO: 10243 - protein, 11 aa, Homo sapiens
  Table 1.2; XAGE3; ENSG00000171402; HLA -A*03:01,HLA-A*03:02,HLA-A*11:01,HLA-B*27:02
GPDDQGKILPK

SEQ ID NO: 10244 - protein, 9 aa, Homo sapiens
  Table 1.2; XAGE3; ENSG00000171402; HLA -A*23:01,HLA-A*24:02,HLA-A*30:02,HLA-A*31:01,HLA-A*32:01, HLA-B*15:01,HLA-B*37:01,HLA-B*57:01,HLA-B*58:01
KILPKSEQF

SEQ ID NO: 10245 - protein, 10 aa, Homo sapiens
  Table 1.2; XAGE3; ENSG00000171402; HLA -A*03:01
KILPKSEQFK

SEQ ID NO: 10246 - protein, 8 aa, Homo sapiens
  Table 1.2; XAGE3; ENSG00000171402; HLA -A*30:01,HLA-B*18:01,HLA-B*40:01,HLA-B*49:01
LEADLQEL

SEQ ID NO: 10247 - protein, 11 aa, Homo sapiens
  Table 1.2; XAGE3; ENSG00000171402; HLA -B*07:02,HLA-B*35:01,HLA-B*35:03,HLA-B*51:01,HLA-B*54:01, HLA-B*55:01,HLA-B*56:01,HLA-C*03:03,HLA-C*07:02,HLA-C*16:02
MPEGGDRQPQV

SEQ ID NO: 10248 - protein, 8 aa, Homo sapiens
  Table 1.2; XAGE3; ENSG00000171402; HLA -B*58:01
RSVPPPEL

SEQ ID NO: 10249 - protein, 9 aa, Homo sapiens
  Table 1.2; XAGE3; ENSG00000171402; HLA -B*57:01,HLA-B*58:01
RSVPPPELI

SEQ ID NO: 10250 - protein, 10 aa, Homo sapiens
  Table 1.2; XAGE3; ENSG00000171402; HLA -B*27:05
SRDPAPGQER

SEQ ID NO: 10251 - protein, 8 aa, Homo sapiens
  Table 1.2; XAGE3; ENSG00000171402; HLA -A*31:01
STYRPRPR

SEQ ID NO: 10252 - protein, 11 aa, Homo sapiens
  Table 1.2; XAGE3; ENSG00000171402; HLA -A*26:01
SVPPPELIGPM

SEQ ID NO: 10253 - protein, 10 aa, Homo sapiens
  Table 1.2; XAGE3; ENSG00000171402; HLA -B*39:01
TQVPDLEADL

SEQ ID NO: 10254 - protein, 8 aa, Homo sapiens
  Table 1.2; XAGE3; ENSG00000171402; HLA -B*35:03
VPDLEADL

SEQ ID NO: 10255 - protein, 11 aa, Homo sapiens
  Table 1.2; XAGE3; ENSG00000171402; HLA -B*35:01,HLA-B*35:03,HLA-B*55:01
VPDLEADLQEL

SEQ ID NO: 10256 - protein, 11 aa, Homo sapiens
  Table 1.2; XAGE3; ENSG00000171402; HLA -B*35:03
VPPPELIGPML

SEQ ID NO: 10257 - protein, 10 aa, Homo sapiens
  Table 1.2; XAGE5; ENSG00000171405; HLA -B*27:02
ADLQELSQSK

SEQ ID NO: 10258 - protein, 8 aa, Homo sapiens
  Table 1.2; XAGE5; ENSG00000171405; HLA -A*30:01,HLA-B*18:01,HLA-B*37:01,HLA-B*40:01,HLA-B*40:02, HLA-B*44:02,HLA-B*44:03,HLA-B*49:01
AEIQVPNL

SEQ ID NO: 10259 - protein, 10 aa, Homo sapiens
  Table 1.2; XAGE5; ENSG00000171405; HLA -A*30:01,HLA-B*44:03,HLA-B*49:01
AEIQVPNLEA

SEQ ID NO: 10260 - protein, 8 aa, Homo sapiens
  Table 1.2; XAGE5; ENSG00000171405; HLA -B*13:02,HLA-B*15:01,HLA-B*15:03
AQLVGPML

SEQ ID NO: 10261 - protein, 9 aa, Homo sapiens
  Table 1.2; XAGE5; ENSG00000171405; HLA -A*33:01
DLQELSQSK

SEQ ID NO: 10262 - protein, 9 aa, Homo sapiens
  Table 1.2; XAGE5; ENSG00000171405; HLA -A*03:02,HLA-A*11:01,HLA-A*33:01,HLA-A*33:03,HLA-A*68:01
DVQGKILPK

SEQ ID NO: 10263 - protein, 11 aa, Homo sapiens
  Table 1.2; XAGE5; ENSG00000171405; HLA -A*33:01,HLA-A*33:03,HLA-A*68:01
ESQDHTPGQKR

SEQ ID NO: 10264 - protein, 10 aa, Homo sapiens
  Table 1.2; XAGE5; ENSG00000171405; HLA -B*15:03
GKILPKSEQF

SEQ ID NO: 10265 - protein, 8 aa, Homo sapiens
  Table 1.2; XAGE5; ENSG00000171405; HLA -A*24:02
ILPKSEQF

SEQ ID NO: 10266 - protein, 9 aa, Homo sapiens
  Table 1.2; XAGE5; ENSG00000171405; HLA -A*23:01,HLA-A*24:02,HLA-A*30:02,HLA-A*32:01,HLA-B*15:01, HLA-B*37:01,HLA-B*57:01,HLA-B*58:01
KILPKSEQF

SEQ ID NO: 10267 - protein, 10 aa, Homo sapiens
  Table 1.2; XAGE5; ENSG00000171405; HLA -A*03:01
KILPKSEQFK

SEQ ID NO: 10268 - protein, 9 aa, Homo sapiens
  Table 1.2; XAGE5; ENSG00000171405; HLA -B*35:03,HLA-C*03:03,HLA-C*03:04
LAQLVGPML

SEQ ID NO: 10269 - protein, 8 aa, Homo sapiens
  Table 1.2; XAGE5; ENSG00000171405; HLA -A*30:01,HLA-B*18:01,HLA-B*40:01,HLA-B*49:01
LEADLQEL

SEQ ID NO: 10270 - protein, 11 aa, Homo sapiens
  Table 1.2; XAGE5; ENSG00000171405; HLA -B*07:02,HLA-B*35:01,HLA-B*35:03,HLA-B*38:01,HLA-B*55:01, HLA-C*03:03,HLA-C*07:02
MPEGGEGKPQL

SEQ ID NO: 10271 - protein, 10 aa, Homo sapiens
  Table 1.2; XAGE5; ENSG00000171405; HLA -B*40:02
PEGGEGKPQL

SEQ ID NO: 10272 - protein, 10 aa, Homo sapiens
  Table 1.2; XAGE5; ENSG00000171405; HLA -B*40:01,HLA-B*49:01
REDDQGAAEI

SEQ ID NO: 10273 - protein, 10 aa, Homo sapiens
  Table 1.2; XAGE5; ENSG00000171405; HLA -A*02:01,HLA-A*02:04
RLAQLVGPML

SEQ ID NO: 10274 - protein, 9 aa, Homo sapiens
  Table 1.2; XAGE5; ENSG00000171405; HLA -B*07:02,HLA-B*35:03,HLA-C*07:02
SPDVQGKIL

SEQ ID NO: 10275 - protein, 11 aa, Homo sapiens
  Table 1.2; XAGE5; ENSG00000171405; HLA -B*35:03
VPNLEADLQEL

SEQ ID NO: 10276 - protein, 8 aa, Homo sapiens
  Table 1.2; ZFP42; ENSG00000179059; HLA -B*08:01
AALRKHLL

SEQ ID NO: 10277 - protein, 9 aa, Homo sapiens
  Table 1.2; ZFP42; ENSG00000179059; HLA -B*40:02
AEFARKKPP

SEQ ID NO: 10278 - protein, 10 aa, Homo sapiens
  Table 1.2; ZFP42; ENSG00000179059; HLA -B*40:02
AEFARKKPPI

SEQ ID NO: 10279 - protein, 8 aa, Homo sapiens
  Table 1.2; ZFP42; ENSG00000179059; HLA -A*30:01,HLA-B*18:01,HLA-B*37:01,HLA-B*40:01,HLA-B*40:02, HLA-B*49:01,HLA-B*56:01
AEIEPVSA

SEQ ID NO: 10280 - protein, 9 aa, Homo sapiens
  Table 1.2; ZFP42; ENSG00000179059; HLA -A*02:01,HLA-A*02:03,HLA-A*30:01,HLA-B*13:02,HLA-B*15:01, HLA-B*18:01,HLA-B*27:02,HLA-B*27:05,HLA-B*37:01,HLA-B*40:01, HLA-B*40:02,HLA-B*44:02,HLA-B*44:03,HLA-B*46:01,HLA-B*49:01,
  HLA-B*56:01,HLA-C*02:02,HLA-C*16:04
AEIEPVSAV

SEQ ID NO: 10281 - protein, 10 aa, Homo sapiens
  Table 1.2; ZFP42; ENSG00000179059; HLA -A*25:01,HLA-A*30:01,HLA-A*30:02,HLA-B*18:01,HLA-B*27:02, HLA-B*27:05,HLA-B*37:01,HLA-B*40:01,HLA-B*40:02,HLA-B*44:02, HLA-B*44:03,HLA-B*49:01,HLA-B*57:01,HLA-B*58:01,HLA-C*16:04
AEIEPVSAVW

SEQ ID NO: 10282 - protein, 8 aa, Homo sapiens
  Table 1.2; ZFP42; ENSG00000179059; HLA -A*23:01,HLA-C*01:02,HLA-C*04:01,HLA-C*14:02
AFVESSKL

SEQ ID NO: 10283 - protein, 11 aa, Homo sapiens
  Table 1.2; ZFP42; ENSG00000179059; HLA -A*68:01
AIACPQSGCTR

SEQ ID NO: 10284 - protein, 9 aa, Homo sapiens
  Table 1.2; ZFP42; ENSG00000179059; HLA -A*03:01,HLA-A*03:02,HLA-A*25:01,HLA-A*26:01,HLA-A*29:02, HLA-A*30:02,HLA-B*15:01,HLA-C*07:04
ALCDGYVCY

SEQ ID NO: 10285 - protein, 10 aa, Homo sapiens
  Table 1.2; ZFP42; ENSG00000179059; HLA -B*07:02
APSGAKPRQG

SEQ ID NO: 10286 - protein, 11 aa, Homo sapiens
  Table 1.2; ZFP42; ENSG00000179059; HLA -B*07:02
APSGAKPRQGK

SEQ ID NO: 10287 - protein, 10 aa, Homo sapiens
  Table 1.2; ZFP42; ENSG00000179059; HLA -A*01:01,HLA-A*30:02,HLA-C*07:01
ASSLECSLEY

SEQ ID NO: 10288 - protein, 9 aa, Homo sapiens
  Table 1.2; ZFP42; ENSG00000179059; HLA -A*29:02,HLA-A*30:02
AVWALCDGY

SEQ ID NO: 10289 - protein, 9 aa, Homo sapiens
  Table 1.2; ZFP42; ENSG00000179059; HLA -A*23:01,HLA-A*24:02,HLA-A*32:01,HLA-B*27:05,HLA-B*35:03, HLA-B*38:01,HLA-B*39:01,HLA-C*01:02,HLA-C*04:01,HLA-C*14:02, HLA-C*16:02
CYEPGPQAL

SEQ ID NO: 10290 - protein, 8 aa, Homo sapiens
  Table 1.2; ZFP42; ENSG00000179059; HLA -B*51:01
DCYIECVI

SEQ ID NO: 10291 - protein, 9 aa, Homo sapiens
  Table 1.2; ZFP42; ENSG00000179059; HLA -A*33:01
DCYIECVIR

SEQ ID NO: 10292 - protein, 8 aa, Homo sapiens
  Table 1.2; ZFP42; ENSG00000179059; HLA -B*08:01
DFNLRTHV

SEQ ID NO: 10293 - protein, 9 aa, Homo sapiens
  Table 1.2; ZFP42; ENSG00000179059; HLA -A*33:01,HLA-A*33:03
DFNLRTHVR

SEQ ID NO: 10294 - protein, 11 aa, Homo sapiens
  Table 1.2; ZFP42; ENSG00000179059; HLA -A*25:01,HLA-A*26:01
DLSDPKQLAEF

SEQ ID NO: 10295 - protein, 8 aa, Homo sapiens
  Table 1.2; ZFP42; ENSG00000179059; HLA -A*25:01,HLA-A*33:01,HLA-A*33:03,HLA-B*08:01,HLA-B*35:01
DPKQLAEF

SEQ ID NO: 10296 - protein, 9 aa, Homo sapiens
  Table 1.2; ZFP42; ENSG00000179059; HLA -B*54:01
DPKQLAEFA

SEQ ID NO: 10297 - protein, 10 aa, Homo sapiens
  Table 1.2; ZFP42; ENSG00000179059; HLA -A*33:01,HLA-A*33:03,HLA-A*68:01
DPKQLAEFAR

SEQ ID NO: 10298 - protein, 11 aa, Homo sapiens
  Table 1.2; ZFP42; ENSG00000179059; HLA -A*33:01
DPKQLAEFARK

SEQ ID NO: 10299 - protein, 9 aa, Homo sapiens
  Table 1.2; ZFP42; ENSG00000179059; HLA -A*01:01,HLA-A*25:01,HLA-A*26:01,HLA-A*29:02,HLA-A*33:01, HLA-B*18:01,HLA-B*35:01,HLA-C*07:01
DSLFESLEY

SEQ ID NO: 10300 - protein, 10 aa, Homo sapiens
  Table 1.2; ZFP42; ENSG00000179059; HLA -A*33:01
DSLFESLEYL

SEQ ID NO: 10301 - protein, 11 aa, Homo sapiens
  Table 1.2; ZFP42; ENSG00000179059; HLA -A*11:01,HLA-A*33:01,HLA-B*27:02
DSLFESLEYLK

SEQ ID NO: 10302 - protein, 9 aa, Homo sapiens
  Table 1.2; ZFP42; ENSG00000179059; HLA -A*33:03,HLA-A*68:01,HLA-B*27:05,HLA-B*35:01,HLA-B*35:03, HLA-B*38:01,HLA-B*39:01
EASSLECSL

SEQ ID NO: 10303 - protein, 11 aa, Homo sapiens
  Table 1.2; ZFP42; ENSG00000179059; HLA -A*26:01,HLA-C*07:01
EASSLECSLEY

SEQ ID NO: 10304 - protein, 8 aa, Homo sapiens
  Table 1.2; ZFP42; ENSG00000179059; HLA -B*37:01
EDSLFESL

SEQ ID NO: 10305 - protein, 10 aa, Homo sapiens
  Table 1.2; ZFP42; ENSG00000179059; HLA -B*27:02
EDSLFESLEY

SEQ ID NO: 10306 - protein, 9 aa, Homo sapiens
  Table 1.2; ZFP42; ENSG00000179059; HLA -A*30:01,HLA-B*18:01,HLA-B*38:01,HLA-B*39:01,HLA-B*40:01, HLA-B*40:02,HLA-B*44:02,HLA-B*44:03,HLA-B*49:01
EEDSLFESL

SEQ ID NO: 10307 - protein, 11 aa, Homo sapiens
  Table 1.2; ZFP42; ENSG00000179059; HLA -B*18:01,HLA-B*44:02,HLA-B*44:03
EEDSLFESLEY

SEQ ID NO: 10308 - protein, 9 aa, Homo sapiens
  Table 1.2; ZFP42; ENSG00000179059; HLA -B*08:01
EGCGKRFSL

SEQ ID NO: 10309 - protein, 9 aa, Homo sapiens
  Table 1.2; ZFP42; ENSG00000179059; HLA -A*24:02,HLA-A*25:01,HLA-A*26:01,HLA-A*32:01,HLA-A*33:03, HLA-A*68:01,HLA-A*68:02,HLA-B*18:01,HLA-B*35:01,HLA-B*38:01, HLA-B*39:01,HLA-B*44:02,HLA-B*44:03,HLA-B*57:01,HLA-B*58:01,
  HLA-C*07:04
EIEPVSAVW

SEQ ID NO: 10310 - protein, 11 aa, Homo sapiens
  Table 1.2; ZFP42; ENSG00000179059; HLA -A*02:07,HLA-A*68:02
EIEPVSAVWAL

SEQ ID NO: 10311 - protein, 9 aa, Homo sapiens
  Table 1.2; ZFP42; ENSG00000179059; HLA -A*01:01,HLA-A*25:01,HLA-A*26:01
ENSLEYSEY

SEQ ID NO: 10312 - protein, 9 aa, Homo sapiens
  Table 1.2; ZFP42; ENSG00000179059; HLA -A*26:01,HLA-A*33:03,HLA-A*68:01,HLA-A*68:02,HLA-B*07:02, HLA-B*35:01,HLA-B*35:03,HLA-B*39:01,HLA-B*54:01,HLA-B*55:01, HLA-B*56:01
EPVSAVWAL

SEQ ID NO: 10313 - protein, 8 aa, Homo sapiens
  Table 1.2; ZFP42; ENSG00000179059; HLA -B*13:02
EQQLSQKV

SEQ ID NO: 10314 - protein, 9 aa, Homo sapiens
  Table 1.2; ZFP42; ENSG00000179059; HLA -B*15:01,HLA-B*15:03,HLA-B*27:02,HLA-B*44:02,HLA-B*44:03, HLA-C*07:04
EQQLSQKVF

SEQ ID NO: 10315 - protein, 8 aa, Homo sapiens
  Table 1.2; ZFP42; ENSG00000179059; HLA -A*33:03
ESLEYLKK

SEQ ID NO: 10316 - protein, 8 aa, Homo sapiens
  Table 1.2; ZFP42; ENSG00000179059; HLA -C*04:01
EYDSLSAI

SEQ ID NO: 10317 - protein, 11 aa, Homo sapiens
  Table 1.2; ZFP42; ENSG00000179059; HLA -A*23:01,HLA-A*24:02,HLA-A*33:01,HLA-A*33:03
EYLKKGSEQQL

SEQ ID NO: 10318 - protein, 8 aa, Homo sapiens
  Table 1.2; ZFP42; ENSG00000179059; HLA -A*33:03,HLA-C*04:01
EYMKKGVK

SEQ ID NO: 10319 - protein, 9 aa, Homo sapiens
  Table 1.2; ZFP42; ENSG00000179059; HLA -A*24:02,HLA-A*33:01,HLA-A*33:03
EYMKKGVKK

SEQ ID NO: 10320 - protein, 8 aa, Homo sapiens
  Table 1.2; ZFP42; ENSG00000179059; HLA -A*23:01,HLA-A*24:02,HLA-A*33:03,HLA-B*08:01,HLA-C*07:01, HLA-C*14:02
EYMTGKKL

SEQ ID NO: 10321 - protein, 9 aa, Homo sapiens
  Table 1.2; ZFP42; ENSG00000179059; HLA -A*03:02,HLA-A*11:01,HLA-A*26:01,HLA-A*31:01,HLA-A*33:01, HLA-A*33:03,HLA-A*68:01,HLA-B*27:02,HLA-B*27:05,HLA-C*07:01, HLA-C*07:06
EYSEYMTGK

SEQ ID NO: 10322 - protein, 11 aa, Homo sapiens
  Table 1.2; ZFP42; ENSG00000179059; HLA -A*24:02
EYSEYMTGKKL

SEQ ID NO: 10323 - protein, 8 aa, Homo sapiens
  Table 1.2; ZFP42; ENSG00000179059; HLA -A*30:01,HLA-B*49:01
FEASSLEC

SEQ ID NO: 10324 - protein, 10 aa, Homo sapiens
  Table 1.2; ZFP42; ENSG00000179059; HLA -A*30:01,HLA-B*18:01,HLA-B*40:01,HLA-B*40:02,HLA-B*49:01
FEASSLECSL

SEQ ID NO: 10325 - protein, 8 aa, Homo sapiens
  Table 1.2; ZFP42; ENSG00000179059; HLA -B*27:02
FESLEYLK

SEQ ID NO: 10326 - protein, 8 aa, Homo sapiens
  Table 1.2; ZFP42; ENSG00000179059; HLA -A*03:02
FIQSNNLK

SEQ ID NO: 10327 - protein, 9 aa, Homo sapiens
  Table 1.2; ZFP42; ENSG00000179059; HLA -B*54:01
FIQSNNLKA

SEQ ID NO: 10328 - protein, 9 aa, Homo sapiens
  Table 1.2; ZFP42; ENSG00000179059; HLA -A*01:01
FSDCYIECV

SEQ ID NO: 10329 - protein, 8 aa, Homo sapiens
  Table 1.2; ZFP42; ENSG00000179059; HLA -A*33:03
FSLDFNLR

SEQ ID NO: 10330 - protein, 10 aa, Homo sapiens
  Table 1.2; ZFP42; ENSG00000179059; HLA -A*31:01
FVCPFQGCNR

SEQ ID NO: 10331 - protein, 9 aa, Homo sapiens
  Table 1.2; ZFP42; ENSG00000179059; HLA -A*33:01,HLA-A*33:03,HLA-A*68:01
FVESSKLKR

SEQ ID NO: 10332 - protein, 8 aa, Homo sapiens
  Table 1.2; ZFP42; ENSG00000179059; HLA -A*30:01,HLA-B*18:01,HLA-B*27:05,HLA-B*37:01,HLA-B*40:01, HLA-B*40:02,HLA-B*44:03,HLA-B*49:01
GEFSQPIL

SEQ ID NO: 10333 - protein, 9 aa, Homo sapiens
  Table 1.2; ZFP42; ENSG00000179059; HLA -B*37:01,HLA-B*40:02,HLA-B*44:02,HLA-B*44:03
GEKPFRCTF

SEQ ID NO: 10334 - protein, 10 aa, Homo sapiens
  Table 1.2; ZFP42; ENSG00000179059; HLA -A*26:01,HLA-A*29:02,HLA-A*30:01,HLA-A*30:02,HLA-B*15:01, HLA-B*15:03,HLA-B*18:01,HLA-B*27:02,HLA-B*27:05,HLA-B*39:01, HLA-B*40:01,HLA-B*44:02,HLA-B*44:03,HLA-B*49:01,HLA-C*07:01,
  HLA-C*16:04
GENSLEYSEY

SEQ ID NO: 10335 - protein, 9 aa, Homo sapiens
  Table 1.2; ZFP42; ENSG00000179059; HLA -A*01:01
GGDDFSDCY

SEQ ID NO: 10336 - protein, 10 aa, Homo sapiens
  Table 1.2; ZFP42; ENSG00000179059; HLA -C*06:02
GGRAPSGAKP

SEQ ID NO: 10337 - protein, 11 aa, Homo sapiens
  Table 1.2; ZFP42; ENSG00000179059; HLA -A*31:01,HLA-A*33:01
GGRAPSGAKPR

SEQ ID NO: 10338 - protein, 10 aa, Homo sapiens
  Table 1.2; ZFP42; ENSG00000179059; HLA -B*15:03
GKAFVESSKL

SEQ ID NO: 10339 - protein, 10 aa, Homo sapiens
  Table 1.2; ZFP42; ENSG00000179059; HLA -A*02:03
GLGGRAPSGA

SEQ ID NO: 10340 - protein, 11 aa, Homo sapiens
  Table 1.2; ZFP42; ENSG00000179059; HLA -A*03:02
GLGGRAPSGAK

SEQ ID NO: 10341 - protein, 10 aa, Homo sapiens
  Table 1.2; ZFP42; ENSG00000179059; HLA -B*39:01
GPQALGGDDF

SEQ ID NO: 10342 - protein, 9 aa, Homo sapiens
  Table 1.2; ZFP42; ENSG00000179059; HLA -B*27:05,HLA-C*06:02
GRAPSGAKP

SEQ ID NO: 10343 - protein, 10 aa, Homo sapiens
  Table 1.2; ZFP42; ENSG00000179059; HLA -B*27:05,HLA-C*06:02,HLA-C*07:02
GRAPSGAKPR

SEQ ID NO: 10344 - protein, 9 aa, Homo sapiens
  Table 1.2; ZFP42; ENSG00000179059; HLA -A*03:02,HLA-A*11:01
GSEQQLSQK

SEQ ID NO: 10345 - protein, 11 aa, Homo sapiens
  Table 1.2; ZFP42; ENSG00000179059; HLA -B*58:01
GSEQQLSQKVF

SEQ ID NO: 10346 - protein, 9 aa, Homo sapiens
  Table 1.2; ZFP42; ENSG00000179059; HLA -A*03:01,HLA-A*03:02,HLA-A*11:01
GVKKELPQK

SEQ ID NO: 10347 - protein, 10 aa, Homo sapiens
  Table 1.2; ZFP42; ENSG00000179059; HLA -A*03:01,HLA-A*03:02,HLA-A*11:01,HLA-A*68:01
HILTHANTNK

SEQ ID NO: 10348 - protein, 8 aa, Homo sapiens
  Table 1.2; ZFP42; ENSG00000179059; HLA -A*33:03
HTGEKPFR

SEQ ID NO: 10349 - protein, 9 aa, Homo sapiens
  Table 1.2; ZFP42; ENSG00000179059; HLA -C*04:01
IACPQSGCT

SEQ ID NO: 10350 - protein, 10 aa, Homo sapiens
  Table 1.2; ZFP42; ENSG00000179059; HLA -A*31:01,HLA-A*33:01,HLA-A*33:03,HLA-A*68:01,HLA-B*27:05, HLA-C*04:01,HLA-C*07:01,HLA-C*07:06
IACPQSGCTR

SEQ ID NO: 10351 - protein, 9 aa, Homo sapiens
  Table 1.2; ZFP42; ENSG00000179059; HLA -A*30:01,HLA-B*07:02,HLA-B*37:01,HLA-B*40:01,HLA-B*40:02, HLA-B*44:03,HLA-C*06:02,HLA-C*07:01,HLA-C*16:02
IDLSDPKQL

SEQ ID NO: 10352 - protein, 9 aa, Homo sapiens
  Table 1.2; ZFP42; ENSG00000179059; HLA -B*18:01,HLA-B*37:01,HLA-B*44:02,HLA-B*44:03
IECVIRGEF

SEQ ID NO: 10353 - protein, 8 aa, Homo sapiens
  Table 1.2; ZFP42; ENSG00000179059; HLA -B*18:01,HLA-B*37:01,HLA-B*44:02,HLA-B*44:03,HLA-B*49:01, HLA-B*57:01
IEPVSAVW

SEQ ID NO: 10354 - protein, 10 aa, Homo sapiens
  Table 1.2; ZFP42; ENSG00000179059; HLA -B*40:01
IEPVSAVWAL

SEQ ID NO: 10355 - protein, 11 aa, Homo sapiens
  Table 1.2; ZFP42; ENSG00000179059; HLA -A*02:07
ILEEDSLFESL

SEQ ID NO: 10356 - protein, 9 aa, Homo sapiens
  Table 1.2; ZFP42; ENSG00000179059; HLA -A*03:01,HLA-A*03:02
ILTHANTNK

SEQ ID NO: 10357 - protein, 10 aa, Homo sapiens
  Table 1.2; ZFP42; ENSG00000179059; HLA -B*27:02
IPGIDLSDPK

SEQ ID NO: 10358 - protein, 10 aa, Homo sapiens
  Table 1.2; ZFP42; ENSG00000179059; HLA -B*13:02
IQSNNLKAHI

SEQ ID NO: 10359 - protein, 9 aa, Homo sapiens
  Table 1.2; ZFP42; ENSG00000179059; HLA -A*01:01,HLA-A*03:01,HLA-A*03:02,HLA-A*11:01,HLA-A*25:01, HLA-A*26:01,HLA-A*29:02,HLA-A*30:02,HLA-A*32:01,HLA-B*15:01, HLA-B*15:03,HLA-B*18:01,HLA-B*27:05,HLA-B*35:01,HLA-B*39:01,
  HLA-B*46:01,HLA-B*55:01,HLA-B*58:01,HLA-C*02:02,HLA-C*07:01, HLA-C*07:04,HLA-C*07:06,HLA-C*14:02,HLA-C*16:02
IVGENSLEY

SEQ ID NO: 10360 - protein, 8 aa, Homo sapiens
  Table 1.2; ZFP42; ENSG00000179059; HLA -B*58:01
KAFVESSK

SEQ ID NO: 10361 - protein, 9 aa, Homo sapiens
  Table 1.2; ZFP42; ENSG00000179059; HLA -A*02:01,HLA-A*02:03,HLA-A*02:07,HLA-A*03:01,HLA-A*03:02, HLA-A*23:01,HLA-A*24:02,HLA-A*30:01,HLA-A*31:01,HLA-A*32:01, HLA-A*68:02,HLA-B*07:02,HLA-B*13:02,HLA-B*15:01,HLA-B*15:03,
  HLA-B*27:05,HLA-B*35:03,HLA-B*37:01,HLA-B*38:01,HLA-B*40:01, HLA-B*40:02,HLA-B*46:01,HLA-B*49:01,HLA-B*51:01,HLA-B*55:01, HLA-B*57:01,HLA-B*58:01,HLA-C*01:02,HLA-C*02:02,HLA-C*03:03, HLA-C*03:04,HLA-C*04:01,HLA-C*05:01,HLA-C*06:02,HLA-C*07:01,
  HLA-C*07:02,HLA-C*12:03,HLA-C*16:02,HLA-C*16:04
KAFVESSKL

SEQ ID NO: 10362 - protein, 10 aa, Homo sapiens
  Table 1.2; ZFP42; ENSG00000179059; HLA -A*03:01,HLA-A*03:02,HLA-A*11:01,HLA-A*31:01,HLA-B*27:02, HLA-B*57:01,HLA-C*06:02
KAFVESSKLK

SEQ ID NO: 10363 - protein, 11 aa, Homo sapiens
  Table 1.2; ZFP42; ENSG00000179059; HLA -A*03:01,HLA-A*31:01,HLA-B*57:01
KAFVESSKLKR

SEQ ID NO: 10364 - protein, 8 aa, Homo sapiens
  Table 1.2; ZFP42; ENSG00000179059; HLA -B*37:01
KELPQKIV

SEQ ID NO: 10365 - protein, 9 aa, Homo sapiens
  Table 1.2; ZFP42; ENSG00000179059; HLA -B*40:02
KELPQKIVG

SEQ ID NO: 10366 - protein, 8 aa, Homo sapiens
  Table 1.2; ZFP42; ENSG00000179059; HLA -B*37:01,HLA-B*49:01
KEYDSLSA

SEQ ID NO: 10367 - protein, 9 aa, Homo sapiens
  Table 1.2; ZFP42; ENSG00000179059; HLA -A*30:01,HLA-B*18:01,HLA-B*37:01,HLA-B*40:01,HLA-B*40:02, HLA-B*44:02,HLA-B*44:03,HLA-B*49:01
KEYDSLSAI

SEQ ID NO: 10368 - protein, 10 aa, Homo sapiens
  Table 1.2; ZFP42; ENSG00000179059; HLA -A*30:01,HLA-B*40:02,HLA-B*49:01
KEYDSLSAIA

SEQ ID NO: 10369 - protein, 11 aa, Homo sapiens
  Table 1.2; ZFP42; ENSG00000179059; HLA -A*30:01,HLA-B*40:01,HLA-B*40:02,HLA-B*49:01
KEYDSLSAIAC

SEQ ID NO: 10370 - protein, 10 aa, Homo sapiens
  Table 1.2; ZFP42; ENSG00000179059; HLA -A*03:01,HLA-A*03:02,HLA-A*11:01
KGSEQQLSQK

SEQ ID NO: 10371 - protein, 11 aa, Homo sapiens
  Table 1.2; ZFP42; ENSG00000179059; HLA -C*06:02
KGSEQQLSQKV

SEQ ID NO: 10372 - protein, 9 aa, Homo sapiens
  Table 1.2; ZFP42; ENSG00000179059; HLA -A*31:01
KHLLIHGPR

SEQ ID NO: 10373 - protein, 10 aa, Homo sapiens
  Table 1.2; ZFP42; ENSG00000179059; HLA -A*03:01,HLA-A*25:01,HLA-A*26:01,HLA-A*29:02,HLA-A*30:02, HLA-A*32:01,HLA-B*15:01,HLA-B*15:03,HLA-B*46:01,HLA-B*57:01, HLA-B*58:01,HLA-C*16:04
KIVGENSLEY

SEQ ID NO: 10374 - protein, 9 aa, Homo sapiens
  Table 1.2; ZFP42; ENSG00000179059; HLA -B*15:03,HLA-C*04:01
KKPPINKEY

SEQ ID NO: 10375 - protein, 10 aa, Homo sapiens
  Table 1.2; ZFP42; ENSG00000179059; HLA -A*02:01,HLA-A*02:03,HLA-A*02:04,HLA-A*02:07,HLA-A*03:01, HLA-A*03:02,HLA-A*23:01,HLA-A*24:02,HLA-A*32:01,HLA-B*13:02, HLA-B*55:01,HLA-B*58:01,HLA-C*06:02
KLPPGGIPGI

SEQ ID NO: 10376 - protein, 11 aa, Homo sapiens
  Table 1.2; ZFP42; ENSG00000179059; HLA -B*07:02
KPPINKEYDSL

SEQ ID NO: 10377 - protein, 11 aa, Homo sapiens
  Table 1.2; ZFP42; ENSG00000179059; HLA -B*07:02,HLA-C*07:02
KPRQGKSSQDL

SEQ ID NO: 10378 - protein, 9 aa, Homo sapiens
  Table 1.2; ZFP42; ENSG00000179059; HLA -B*27:05
KRFSLDFNL

SEQ ID NO: 10379 - protein, 10 aa, Homo sapiens
  Table 1.2; ZFP42; ENSG00000179059; HLA -B*58:01
KSSQDLQAEI

SEQ ID NO: 10380 - protein, 11 aa, Homo sapiens
  Table 1.2; ZFP42; ENSG00000179059; HLA -A*31:01
KTRHQKGLGGR

SEQ ID NO: 10381 - protein, 8 aa, Homo sapiens
  Table 1.2; ZFP42; ENSG00000179059; HLA -A*25:01,HLA-A*32:01,HLA-B*07:02,HLA-B*08:01,HLA-B*15:01, HLA-B*15:03,HLA-B*27:05,HLA-B*37:01,HLA-B*40:02,HLA-B*46:01, HLA-B*58:01,HLA-C*01:02,HLA-C*03:03,HLA-C*03:04,HLA-C*05:01,
  HLA-C*12:03,HLA-C*14:02
KVFEASSL

SEQ ID NO: 10382 - protein, 10 aa, Homo sapiens
  Table 1.2; ZFP42; ENSG00000179059; HLA -A*02:01,HLA-A*02:03,HLA-A*02:07,HLA-B*27:05,HLA-B*40:02, HLA-B*55:01,HLA-B*56:01
KVFEASSLEC

SEQ ID NO: 10383 - protein, 10 aa, Homo sapiens
  Table 1.2; ZFP42; ENSG00000179059; HLA -A*30:01,HLA-B*18:01,HLA-B*40:01,HLA-B*40:02,HLA-B*49:01
LEEDSLFESL

SEQ ID NO: 10384 - protein, 8 aa, Homo sapiens
  Table 1.2; ZFP42; ENSG00000179059; HLA -B*49:01
LEYMKKGV

SEQ ID NO: 10385 - protein, 9 aa, Homo sapiens
  Table 1.2; ZFP42; ENSG00000179059; HLA -B*40:02,HLA-B*49:01
LEYSEYMTG

SEQ ID NO: 10386 - protein, 10 aa, Homo sapiens
  Table 1.2; ZFP42; ENSG00000179059; HLA -A*03:01,HLA-A*11:01,HLA-B*27:02,HLA-B*49:01
LEYSEYMTGK

SEQ ID NO: 10387 - protein, 8 aa, Homo sapiens
  Table 1.2; ZFP42; ENSG00000179059; HLA -C*04:01
LFESLEYL

SEQ ID NO: 10388 - protein, 9 aa, Homo sapiens
  Table 1.2; ZFP42; ENSG00000179059; HLA -B*27:02
LFESLEYLK

SEQ ID NO: 10389 - protein, 10 aa, Homo sapiens
  Table 1.2; ZFP42; ENSG00000179059; HLA -A*30:02
LGGDDFSDCY

SEQ ID NO: 10390 - protein, 9 aa, Homo sapiens
  Table 1.2; ZFP42; ENSG00000179059; HLA -A*02:07,HLA-B*35:03,HLA-B*51:01,HLA-B*54:01,HLA-B*55:01, HLA-B*56:01
LPPGGIPGI

SEQ ID NO: 10391 - protein, 11 aa, Homo sapiens
  Table 1.2; ZFP42; ENSG00000179059; HLA -B*35:03,HLA-C*07:02
LPPGGIPGIDL

SEQ ID NO: 10392 - protein, 11 aa, Homo sapiens
  Table 1.2; ZFP42; ENSG00000179059; HLA -B*07:02,HLA-B*35:01,HLA-B*35:03,HLA-B*55:01
LPQKIVGENSL

SEQ ID NO: 10393 - protein, 10 aa, Homo sapiens
  Table 1.2; ZFP42; ENSG00000179059; HLA -A*02:01,HLA-A*02:03,HLA-B*27:05
LQAEIEPVSA

SEQ ID NO: 10394 - protein, 9 aa, Homo sapiens
  Table 1.2; ZFP42; ENSG00000179059; HLA -A*01:01
LSDPKQLAE

SEQ ID NO: 10395 - protein, 10 aa, Homo sapiens
  Table 1.2; ZFP42; ENSG00000179059; HLA -A*01:01,HLA-A*02:07,HLA-B*46:01,HLA-B*57:01,HLA-B*58:01, HLA-C*04:01,HLA-C*05:01,HLA-C*07:01
LSDPKQLAEF

SEQ ID NO: 10396 - protein, 11 aa, Homo sapiens
  Table 1.2; ZFP42; ENSG00000179059; HLA -A*01:01
LSDPKQLAEFA

SEQ ID NO: 10397 - protein, 9 aa, Homo sapiens
  Table 1.2; ZFP42; ENSG00000179059; HLA -A*32:01,HLA-B*57:01
LVHTGEKPF

SEQ ID NO: 10398 - protein, 9 aa, Homo sapiens
  Table 1.2; ZFP42; ENSG00000179059; HLA -A*02:03,HLA-A*03:01,HLA-A*33:01,HLA-B*08:01,HLA-C*07:01
NLKAHILTH

SEQ ID NO: 10399 - protein, 10 aa, Homo sapiens
  Table 1.2; ZFP42; ENSG00000179059; HLA -A*02:03
NLKAHILTHA

SEQ ID NO: 10400 - protein, 8 aa, Homo sapiens
  Table 1.2; ZFP42; ENSG00000179059; HLA -B*08:01
NNLKAHIL

SEQ ID NO: 10401 - protein, 8 aa, Homo sapiens
  Table 1.2; ZFP42; ENSG00000179059; HLA -A*30:02,HLA-B*18:01,HLA-B*35:01,HLA-B*39:01,HLA-B*46:01, HLA-C*01:02,HLA-C*07:01,HLA-C*14:02,HLA-C*16:01
NSLEYSEY

SEQ ID NO: 10402 - protein, 9 aa, Homo sapiens
  Table 1.2; ZFP42; ENSG00000179059; HLA -A*01:01,HLA-B*35:01,HLA-B*35:03,HLA-B*55:01,HLA-C*04:01
NSLEYSEYM

SEQ ID NO: 10403 - protein, 10 aa, Homo sapiens
  Table 1.2; ZFP42; ENSG00000179059; HLA -A*03:02,HLA-A*11:01,HLA-A*33:03,HLA-A*68:01,HLA-B*27:02, HLA-C*07:01,HLA-C*07:06
NTNKNEQEGK

SEQ ID NO: 10404 - protein, 9 aa, Homo sapiens
  Table 1.2; ZFP42; ENSG00000179059; HLA -A*11:01,HLA-B*27:02
PGIDLSDPK

SEQ ID NO: 10405 - protein, 10 aa, Homo sapiens
  Table 1.2; ZFP42; ENSG00000179059; HLA -B*07:02
PPINKEYDSL

SEQ ID NO: 10406 - protein, 8 aa, Homo sapiens
  Table 1.2; ZFP42; ENSG00000179059; HLA -C*07:04
PQKIVGEN

SEQ ID NO: 10407 - protein, 9 aa, Homo sapiens
  Table 1.2; ZFP42; ENSG00000179059; HLA -C*06:02
PQSGCTRKL

SEQ ID NO: 10408 - protein, 8 aa, Homo sapiens
  Table 1.2; ZFP42; ENSG00000179059; HLA -B*07:02
PVSAVWAL

SEQ ID NO: 10409 - protein, 9 aa, Homo sapiens
  Table 1.2; ZFP42; ENSG00000179059; HLA -B*54:01,HLA-C*05:01
QAEIEPVSA

SEQ ID NO: 10410 - protein, 11 aa, Homo sapiens
  Table 1.2; ZFP42; ENSG00000179059; HLA -B*57:01,HLA-B*58:01
QAEIEPVSAVW

SEQ ID NO: 10411 - protein, 11 aa, Homo sapiens
  Table 1.2; ZFP42; ENSG00000179059; HLA -B*27:02
QDLQAEIEPVS

SEQ ID NO: 10412 - protein, 9 aa, Homo sapiens
  Table 1.2; ZFP42; ENSG00000179059; HLA -B*15:03,HLA-B*38:01,HLA-B*39:01
QKIVGENSL

SEQ ID NO: 10413 - protein, 9 aa, Homo sapiens
  Table 1.2; ZFP42; ENSG00000179059; HLA -B*15:03,HLA-B*38:01,HLA-B*39:01
QKVFEASSL

SEQ ID NO: 10414 - protein, 9 aa, Homo sapiens
  Table 1.2; ZFP42; ENSG00000179059; HLA -A*03:01,HLA-A*03:02,HLA-A*11:01
QLAEFARKK

SEQ ID NO: 10415 - protein, 9 aa, Homo sapiens
  Table 1.2; ZFP42; ENSG00000179059; HLA -A*02:01,HLA-A*02:03,HLA-A*02:04,HLA-A*03:02,HLA-B*08:01, HLA-B*13:02,HLA-B*54:01,HLA-B*55:01
QLSQKVFEA

SEQ ID NO: 10416 - protein, 9 aa, Homo sapiens
  Table 1.2; ZFP42; ENSG00000179059; HLA -B*07:02,HLA-B*35:01,HLA-B*35:03,HLA-B*38:01,HLA-B*39:01, HLA-B*55:01,HLA-C*03:03
QPILEEDSL

SEQ ID NO: 10417 - protein, 10 aa, Homo sapiens
  Table 1.2; ZFP42; ENSG00000179059; HLA -B*35:01,HLA-B*35:03,HLA-B*55:01
QPILEEDSLF

SEQ ID NO: 10418 - protein, 8 aa, Homo sapiens
  Table 1.2; ZFP42; ENSG00000179059; HLA -B*15:03
QQLSQKVF

SEQ ID NO: 10419 - protein, 9 aa, Homo sapiens
  Table 1.2; ZFP42; ENSG00000179059; HLA -A*31:01
RAPSGAKPR

SEQ ID NO: 10420 - protein, 8 aa, Homo sapiens
  Table 1.2; ZFP42; ENSG00000179059; HLA -A*23:01
RFIQSNNL

SEQ ID NO: 10421 - protein, 9 aa, Homo sapiens
  Table 1.2; ZFP42; ENSG00000179059; HLA -A*31:01
RFSLDFNLR

SEQ ID NO: 10422 - protein, 10 aa, Homo sapiens
  Table 1.2; ZFP42; ENSG00000179059; HLA -A*30:02
RKKPPINKEY

SEQ ID NO: 10423 - protein, 9 aa, Homo sapiens
  Table 1.2; ZFP42; ENSG00000179059; HLA -B*27:05,HLA-C*06:02
RRFIQSNNL

SEQ ID NO: 10424 - protein, 10 aa, Homo sapiens
  Table 1.2; ZFP42; ENSG00000179059; HLA -B*27:05,HLA-C*06:02
RRFIQSNNLK

SEQ ID NO: 10425 - protein, 9 aa, Homo sapiens
  Table 1.2; ZFP42; ENSG00000179059; HLA -A*24:02,HLA-B*37:01,HLA-B*44:02,HLA-B*44:03
SDPKQLAEF

SEQ ID NO: 10426 - protein, 9 aa, Homo sapiens
  Table 1.2; ZFP42; ENSG00000179059; HLA -A*30:01,HLA-B*13:02,HLA-B*18:01,HLA-B*27:02,HLA-B*37:01, HLA-B*40:01,HLA-B*40:02,HLA-B*44:02,HLA-B*44:03,HLA-B*49:01
SEQQLSQKV

SEQ ID NO: 10427 - protein, 10 aa, Homo sapiens
  Table 1.2; ZFP42; ENSG00000179059; HLA -A*30:01,HLA-B*18:01,HLA-B*27:02,HLA-B*37:01,HLA-B*40:01, HLA-B*40:02,HLA-B*44:02,HLA-B*44:03,HLA-C*16:04
SEQQLSQKVF

SEQ ID NO: 10428 - protein, 9 aa, Homo sapiens
  Table 1.2; ZFP42; ENSG00000179059; HLA -A*30:01,HLA-B*18:01,HLA-B*27:02,HLA-B*27:05,HLA-B*37:01, HLA-B*40:01,HLA-B*40:02,HLA-B*44:02,HLA-B*44:03,HLA-B*49:01, HLA-C*16:04
SEYMTGKKL

SEQ ID NO: 10429 - protein, 10 aa, Homo sapiens
  Table 1.2; ZFP42; ENSG00000179059; HLA -B*40:02
SEYMTGKKLP

SEQ ID NO: 10430 - protein, 9 aa, Homo sapiens
  Table 1.2; ZFP42; ENSG00000179059; HLA -A*03:01,HLA-A*03:02
SLDFNLRTH

SEQ ID NO: 10431 - protein, 10 aa, Homo sapiens
  Table 1.2; ZFP42; ENSG00000179059; HLA -A*01:01,HLA-A*02:01,HLA-A*02:03,HLA-A*02:04,HLA-A*02:07
SLDFNLRTHV

SEQ ID NO: 10432 - protein, 8 aa, Homo sapiens
  Table 1.2; ZFP42; ENSG00000179059; HLA -A*01:01
SLECSLEY

SEQ ID NO: 10433 - protein, 9 aa, Homo sapiens
  Table 1.2; ZFP42; ENSG00000179059; HLA -C*06:02
SLEYMKKGV

SEQ ID NO: 10434 - protein, 11 aa, Homo sapiens
  Table 1.2; ZFP42; ENSG00000179059; HLA -A*03:01,HLA-A*03:02
SLEYSEYMTGK

SEQ ID NO: 10435 - protein, 8 aa, Homo sapiens
  Table 1.2; ZFP42; ENSG00000179059; HLA -A*01:01,HLA-A*03:01,HLA-A*26:01,HLA-A*29:02,HLA-A*30:02, HLA-A*32:01,HLA-B*13:02,HLA-B*15:01,HLA-B*15:03,HLA-B*18:01, HLA-B*35:01,HLA-B*39:01,HLA-B*46:01,HLA-C*02:02,HLA-C*07:01,
  HLA-C*14:02
SLFESLEY

SEQ ID NO: 10436 - protein, 9 aa, Homo sapiens
  Table 1.2; ZFP42; ENSG00000179059; HLA -A*02:01,HLA-A*02:03,HLA-A*02:04,HLA-A*02:07,HLA-A*03:01, HLA-A*68:02,HLA-B*13:02,HLA-B*40:01,HLA-B*40:02,HLA-B*55:01
SLFESLEYL

SEQ ID NO: 10437 - protein, 10 aa, Homo sapiens
  Table 1.2; ZFP42; ENSG00000179059; HLA -A*03:01,HLA-A*03:02,HLA-A*11:01,HLA-B*27:02
SLFESLEYLK

SEQ ID NO: 10438 - protein, 11 aa, Homo sapiens
  Table 1.2; ZFP42; ENSG00000179059; HLA -A*03:01,HLA-A*11:01
SLFESLEYLKK

SEQ ID NO: 10439 - protein, 9 aa, Homo sapiens
  Table 1.2; ZFP42; ENSG00000179059; HLA -A*03:02,HLA-C*06:02
SLSAIACPQ

SEQ ID NO: 10440 - protein, 9 aa, Homo sapiens
  Table 1.2; ZFP42; ENSG00000179059; HLA -B*08:01
SNNLKAHIL

SEQ ID NO: 10441 - protein, 8 aa, Homo sapiens
  Table 1.2; ZFP42; ENSG00000179059; HLA -B*13:02,HLA-B*38:01,HLA-C*05:01
SQDLQAEI

SEQ ID NO: 10442 - protein, 10 aa, Homo sapiens
  Table 1.2; ZFP42; ENSG00000179059; HLA -B*15:01,HLA-B*40:02
SQKVFEASSL

SEQ ID NO: 10443 - protein, 9 aa, Homo sapiens
  Table 1.2; ZFP42; ENSG00000179059; HLA -A*01:01,HLA-A*03:01,HLA-A*11:01,HLA-A*26:01,HLA-A*29:02, HLA-A*30:02,HLA-B*15:01,HLA-B*15:03,HLA-B*35:01,HLA-B*46:01, HLA-B*57:01,HLA-B*58:01,HLA-C*07:01,HLA-C*16:01
SSLECSLEY

SEQ ID NO: 10444 - protein, 9 aa, Homo sapiens
  Table 1.2; ZFP42; ENSG00000179059; HLA -B*13:02
SSQDLQAEI

SEQ ID NO: 10445 - protein, 9 aa, Homo sapiens
  Table 1.2; ZFP42; ENSG00000179059; HLA -A*33:01,HLA-A*33:03
TNKNEQEGK

SEQ ID NO: 10446 - protein, 9 aa, Homo sapiens
  Table 1.2; ZFP42; ENSG00000179059; HLA -B*54:01,HLA-B*55:01,HLA-B*56:01,HLA-C*03:03,HLA-C*03:04, HLA-C*12:03
VCYEPGPQA

SEQ ID NO: 10447 - protein, 10 aa, Homo sapiens
  Table 1.2; ZFP42; ENSG00000179059; HLA -A*02:01,HLA-A*02:03,HLA-A*02:07,HLA-A*03:01,HLA-A*03:02, HLA-A*23:01,HLA-A*24:02,HLA-A*30:01,HLA-A*31:01,HLA-A*32:01, HLA-A*68:02,HLA-B*07:02,HLA-B*13:02,HLA-B*15:01,HLA-B*15:03,
  HLA-B*27:05,HLA-B*35:03,HLA-B*38:01,HLA-B*39:01,HLA-B*40:01, HLA-B*40:02,HLA-B*46:01,HLA-B*51:01,HLA-B*55:01,HLA-B*56:01, HLA-B*58:01,HLA-C*01:02,HLA-C*02:02,HLA-C*03:03,HLA-C*03:04, HLA-C*04:01,HLA-C*05:01,HLA-C*06:02,HLA-C*07:01,HLA-C*07:04,
  HLA-C*12:03,HLA-C*14:02,HLA-C*16:01,HLA-C*16:02,HLA-C*16:04
VCYEPGPQAL

SEQ ID NO: 10448 - protein, 9 aa, Homo sapiens
  Table 1.2; ZFP42; ENSG00000179059; HLA -C*07:01
VFEASSLEC

SEQ ID NO: 10449 - protein, 8 aa, Homo sapiens
  Table 1.2; ZFP42; ENSG00000179059; HLA -A*01:01,HLA-B*39:01,HLA-B*46:01
VGENSLEY

SEQ ID NO: 10450 - protein, 11 aa, Homo sapiens
  Table 1.2; ZFP42; ENSG00000179059; HLA -A*01:01
VGENSLEYSEY

SEQ ID NO: 10451 - protein, 8 aa, Homo sapiens
  Table 1.2; ZFP42; ENSG00000179059; HLA -B*27:05
VRIHTGEK

SEQ ID NO: 10452 - protein, 9 aa, Homo sapiens
  Table 1.2; ZFP42; ENSG00000179059; HLA -B*27:05
VRIHTGEKR

SEQ ID NO: 10453 - protein, 9 aa, Homo sapiens
  Table 1.2; ZFP42; ENSG00000179059; HLA -B*37:01,HLA-B*40:02
YDSLSAIAC

SEQ ID NO: 10454 - protein, 8 aa, Homo sapiens
  Table 1.2; ZFP42; ENSG00000179059; HLA -A*02:07,HLA-A*30:01,HLA-B*07:02,HLA-B*08:01,HLA-B*13:02, HLA-B*18:01,HLA-B*37:01,HLA-B*39:01,HLA-B*40:01,HLA-B*40:02, HLA-B*44:02,HLA-B*44:03,HLA-B*49:01,HLA-B*58:01,HLA-C*01:02,
  HLA-C*03:04,HLA-C*04:01,HLA-C*06:02,HLA-C*07:01,HLA-C*07:02, HLA-C*07:04,HLA-C*12:03,HLA-C*16:04
YEPGPQAL

SEQ ID NO: 10455 - protein, 9 aa, Homo sapiens
  Table 1.2; ZFP42; ENSG00000179059; HLA -B*49:01
YEPGPQALG

SEQ ID NO: 10456 - protein, 10 aa, Homo sapiens
  Table 1.2; ZFP42; ENSG00000179059; HLA -A*02:03,HLA-B*08:01,HLA-B*40:02
YLKKGSEQQL

SEQ ID NO: 10457 - protein, 8 aa, Homo sapiens
  Table 1.2; ZFP42; ENSG00000179059; HLA -B*27:02
YSEYMTGK

SEQ ID NO: 10458 - protein, 9 aa, Homo sapiens
  Table 1.2; ZFP42; ENSG00000179059; HLA -A*01:01
YSEYMTGKK

SEQ ID NO: 10459 - protein, 10 aa, Homo sapiens
  Table 1.2; ZFP42; ENSG00000179059; HLA -B*54:01
YVCYEPGPQA

SEQ ID NO: 10460 - protein, 9 aa, Homo sapiens
  Table 1.2; ZNF560; ENSG00000198028; HLA -A*24:02
AFASFSARI

SEQ ID NO: 10461 - protein, 8 aa, Homo sapiens
  Table 1.2; ZNF560; ENSG00000198028; HLA -A*23:01
AFISYPSL

SEQ ID NO: 10462 - protein, 9 aa, Homo sapiens
  Table 1.2; ZNF560; ENSG00000198028; HLA -A*23:01,HLA-A*24:02,HLA-A*29:02
AFISYPSLF

SEQ ID NO: 10463 - protein, 8 aa, Homo sapiens
  Table 1.2; ZNF560; ENSG00000198028; HLA -C*01:02,HLA-C*14:02
AFVVSSSL

SEQ ID NO: 10464 - protein, 8 aa, Homo sapiens
  Table 1.2; ZNF560; ENSG00000198028; HLA -B*08:01
AIKHQTSV

SEQ ID NO: 10465 - protein, 8 aa, Homo sapiens
  Table 1.2; ZNF560; ENSG00000198028; HLA -B*15:03
AKDLLSLY

SEQ ID NO: 10466 - protein, 9 aa, Homo sapiens
  Table 1.2; ZNF560; ENSG00000198028; HLA -A*02:04,HLA-A*02:07
ALQQEFWKI

SEQ ID NO: 10467 - protein, 9 aa, Homo sapiens
  Table 1.2; ZNF560; ENSG00000198028; HLA -A*02:01,HLA-A*02:04
ALWQDNFCL

SEQ ID NO: 10468 - protein, 9 aa, Homo sapiens
  Table 1.2; ZNF560; ENSG00000198028; HLA -B*27:02,HLA-B*38:01,HLA-B*39:01
ARNQNGEEL

SEQ ID NO: 10469 - protein, 10 aa, Homo sapiens
  Table 1.2; ZNF560; ENSG00000198028; HLA -B*27:02,HLA-C*16:04
ARNQNGEELY

SEQ ID NO: 10470 - protein, 9 aa, Homo sapiens
  Table 1.2; ZNF560; ENSG00000198028; HLA -A*32:01,HLA-C*16:01
ASFSARIAH

SEQ ID NO: 10471 - protein, 11 aa, Homo sapiens
  Table 1.2; ZNF560; ENSG00000198028; HLA -A*03:01
ASFSARIAHLK

SEQ ID NO: 10472 - protein, 9 aa, Homo sapiens
  Table 1.2; ZNF560; ENSG00000198028; HLA -B*58:01
AVDFTQEEW

SEQ ID NO: 10473 - protein, 9 aa, Homo sapiens
  Table 1.2; ZNF560; ENSG00000198028; HLA -B*58:01
AVEFTQEEW

SEQ ID NO: 10474 - protein, 9 aa, Homo sapiens
  Table 1.2; ZNF560; ENSG00000198028; HLA -A*24:02,HLA-A*32:01,HLA-B*13:02,HLA-B*58:01
AVNVETHII

SEQ ID NO: 10475 - protein, 10 aa, Homo sapiens
  Table 1.2; ZNF560; ENSG00000198028; HLA -A*03:01,HLA-A*03:02,HLA-A*11:01
AVNVETHIIK

SEQ ID NO: 10476 - protein, 8 aa, Homo sapiens
  Table 1.2; ZNF560; ENSG00000198028; HLA -A*31:01
CGKAFTER

SEQ ID NO: 10477 - protein, 9 aa, Homo sapiens
  Table 1.2; ZNF560; ENSG00000198028; HLA -B*38:01,HLA-B*39:01
CHSDLTNHV

SEQ ID NO: 10478 - protein, 9 aa, Homo sapiens
  Table 1.2; ZNF560; ENSG00000198028; HLA -B*08:01
CLKTKGPAL

SEQ ID NO: 10479 - protein, 9 aa, Homo sapiens
  Table 1.2; ZNF560; ENSG00000198028; HLA -A*31:01
CSYLTKHLR

SEQ ID NO: 10480 - protein, 8 aa, Homo sapiens
  Table 1.2; ZNF560; ENSG00000198028; HLA -A*23:01,HLA-A*24:02,HLA-C*14:02
CYQYSVTF

SEQ ID NO: 10481 - protein, 8 aa, Homo sapiens
  Table 1.2; ZNF560; ENSG00000198028; HLA -B*51:01
DCGKAFVV

SEQ ID NO: 10482 - protein, 8 aa, Homo sapiens
  Table 1.2; ZNF560; ENSG00000198028; HLA -B*08:01
DFRYPTHL

SEQ ID NO: 10483 - protein, 9 aa, Homo sapiens
  Table 1.2; ZNF560; ENSG00000198028; HLA -B*15:03
DKSFEGTDY

SEQ ID NO: 10484 - protein, 8 aa, Homo sapiens
  Table 1.2; ZNF560; ENSG00000198028; HLA -A*33:01
DLLSLYNK

SEQ ID NO: 10485 - protein, 8 aa, Homo sapiens
  Table 1.2; ZNF560; ENSG00000198028; HLA -B*08:01
DLTNHVRI

SEQ ID NO: 10486 - protein, 8 aa, Homo sapiens
  Table 1.2; ZNF560; ENSG00000198028; HLA -B*51:01
DLVTFDSV

SEQ ID NO: 10487 - protein, 8 aa, Homo sapiens
  Table 1.2; ZNF560; ENSG00000198028; HLA -B*08:01,HLA-B*35:01
DPAQRNLY

SEQ ID NO: 10488 - protein, 8 aa, Homo sapiens
  Table 1.2; ZNF560; ENSG00000198028; HLA -B*08:01,HLA-B*35:01
DPVQRNLY

SEQ ID NO: 10489 - protein, 10 aa, Homo sapiens
  Table 1.2; ZNF560; ENSG00000198028; HLA -A*25:01,HLA-A*26:01
DQCGKAFASF

SEQ ID NO: 10490 - protein, 10 aa, Homo sapiens
  Table 1.2; ZNF560; ENSG00000198028; HLA -A*25:01
DQCGKVFVSF

SEQ ID NO: 10491 - protein, 11 aa, Homo sapiens
  Table 1.2; ZNF560; ENSG00000198028; HLA -A*25:01
DTAVDFTQEEW

SEQ ID NO: 10492 - protein, 10 aa, Homo sapiens
  Table 1.2; ZNF560; ENSG00000198028; HLA -A*25:01
DVMLENYENV

SEQ ID NO: 10493 - protein, 10 aa, Homo sapiens
  Table 1.2; ZNF560; ENSG00000198028; HLA -A*25:01
DVMLENYKNL

SEQ ID NO: 10494 - protein, 9 aa, Homo sapiens
  Table 1.2; ZNF560; ENSG00000198028; HLA -A*25:01,HLA-A*26:01,HLA-A*33:01,HLA-A*33:03,HLA-B*35:01, HLA-B*46:01,HLA-B*51:01,HLA-C*12:03
EAFTHSTSH

SEQ ID NO: 10495 - protein, 9 aa, Homo sapiens
  Table 1.2; ZNF560; ENSG00000198028; HLA -B*40:01
EEEEELSTL

SEQ ID NO: 10496 - protein, 8 aa, Homo sapiens
  Table 1.2; ZNF560; ENSG00000198028; HLA -B*18:01
EEEELRTL

SEQ ID NO: 10497 - protein, 11 aa, Homo sapiens
  Table 1.2; ZNF560; ENSG00000198028; HLA -A*30:01,HLA-B*18:01,HLA-B*40:01,HLA-B*40:02,HLA-B*44:02, HLA-B*44:03
EEELSTLPRVL

SEQ ID NO: 10498 - protein, 9 aa, Homo sapiens
  Table 1.2; ZNF560; ENSG00000198028; HLA -B*44:03,HLA-B*49:01
EELSTLPRV

SEQ ID NO: 10499 - protein, 10 aa, Homo sapiens
  Table 1.2; ZNF560; ENSG00000198028; HLA -B*18:01,HLA-B*40:01,HLA-B*40:02,HLA-B*44:02,HLA-B*44:03
EELSTLPRVL

SEQ ID NO: 10500 - protein, 9 aa, Homo sapiens
  Table 1.2; ZNF560; ENSG00000198028; HLA -A*25:01
EGTDYGKAF

SEQ ID NO: 10501 - protein, 8 aa, Homo sapiens
  Table 1.2; ZNF560; ENSG00000198028; HLA -A*33:01,HLA-A*33:03
ENYENVAK

SEQ ID NO: 10502 - protein, 9 aa, Homo sapiens
  Table 1.2; ZNF560; ENSG00000198028; HLA -A*26:01,HLA-A*33:03,HLA-A*68:02,HLA-B*51:01
ENYENVAKV

SEQ ID NO: 10503 - protein, 11 aa, Homo sapiens
  Table 1.2; ZNF560; ENSG00000198028; HLA -A*26:01
ENYENVAKVGF

SEQ ID NO: 10504 - protein, 9 aa, Homo sapiens
  Table 1.2; ZNF560; ENSG00000198028; HLA -A*33:01,HLA-B*51:01
ENYKNLSSV

SEQ ID NO: 10505 - protein, 11 aa, Homo sapiens
  Table 1.2; ZNF560; ENSG00000198028; HLA -A*25:01,HLA-A*26:01
ENYKNLSSVGY

SEQ ID NO: 10506 - protein, 9 aa, Homo sapiens
  Table 1.2; ZNF560; ENSG00000198028; HLA -B*27:05
ERSDLTKHL

SEQ ID NO: 10507 - protein, 9 aa, Homo sapiens
  Table 1.2; ZNF560; ENSG00000198028; HLA -A*01:01,HLA-A*26:01
ETHIIKNPY

SEQ ID NO: 10508 - protein, 9 aa, Homo sapiens
  Table 1.2; ZNF560; ENSG00000198028; HLA -B*54:01
FASFSARIA

SEQ ID NO: 10509 - protein, 8 aa, Homo sapiens
  Table 1.2; ZNF560; ENSG00000198028; HLA -A*30:01,HLA-B*18:01,HLA-B*37:01,HLA-C*07:04
FDSVAVEF

SEQ ID NO: 10510 - protein, 8 aa, Homo sapiens
  Table 1.2; ZNF560; ENSG00000198028; HLA -B*18:01,HLA-B*37:01,HLA-B*40:01,HLA-C*04:01,HLA-C*05:01
FEDTAVDF

SEQ ID NO: 10511 - protein, 8 aa, Homo sapiens
  Table 1.2; ZNF560; ENSG00000198028; HLA -B*27:02
FEGTDYGK

SEQ ID NO: 10512 - protein, 10 aa, Homo sapiens
  Table 1.2; ZNF560; ENSG00000198028; HLA -B*07:02,HLA-B*44:02,HLA-B*44:03,HLA-C*16:04
FEGTDYGKAF

SEQ ID NO: 10513 - protein, 11 aa, Homo sapiens
  Table 1.2; ZNF560; ENSG00000198028; HLA -A*68:01,HLA-B*27:02
FGTSSGVIEDR

SEQ ID NO: 10514 - protein, 9 aa, Homo sapiens
  Table 1.2; ZNF560; ENSG00000198028; HLA -B*54:01
FIYQSYLEA

SEQ ID NO: 10515 - protein, 9 aa, Homo sapiens
  Table 1.2; ZNF560; ENSG00000198028; HLA -A*01:01
FTERSDLTK

SEQ ID NO: 10516 - protein, 9 aa, Homo sapiens
  Table 1.2; ZNF560; ENSG00000198028; HLA -A*01:01
FTERSYLTK

SEQ ID NO: 10517 - protein, 9 aa, Homo sapiens
  Table 1.2; ZNF560; ENSG00000198028; HLA -A*32:01,HLA-A*68:02,HLA-B*46:01
FTHSTSHAV

SEQ ID NO: 10518 - protein, 11 aa, Homo sapiens
  Table 1.2; ZNF560; ENSG00000198028; HLA -A*68:02
FTVPSGFLEHV

SEQ ID NO: 10519 - protein, 11 aa, Homo sapiens
  Table 1.2; ZNF560; ENSG00000198028; HLA -A*02:07,HLA-A*23:01,HLA-A*68:02
FVVSSSLVDHL

SEQ ID NO: 10520 - protein, 9 aa, Homo sapiens
  Table 1.2; ZNF560; ENSG00000198028; HLA -B*49:01
GEAFTHSTS

SEQ ID NO: 10521 - protein, 10 aa, Homo sapiens
  Table 1.2; ZNF560; ENSG00000198028; HLA -B*44:02,HLA-B*44:03
GEKPYEHKEY

SEQ ID NO: 10522 - protein, 9 aa, Homo sapiens
  Table 1.2; ZNF560; ENSG00000198028; HLA -B*15:01
GIQMDLVTF

SEQ ID NO: 10523 - protein, 9 aa, Homo sapiens
  Table 1.2; ZNF560; ENSG00000198028; HLA -B*15:03
GKAFASFSA

SEQ ID NO: 10524 - protein, 8 aa, Homo sapiens
  Table 1.2; ZNF560; ENSG00000198028; HLA -B*15:03
GKAFGTSA

SEQ ID NO: 10525 - protein, 9 aa, Homo sapiens
  Table 1.2; ZNF560; ENSG00000198028; HLA -A*29:02,HLA-B*15:03
GKAFIYQSY

SEQ ID NO: 10526 - protein, 9 aa, Homo sapiens
  Table 1.2; ZNF560; ENSG00000198028; HLA -B*15:03
GKAFTERSY

SEQ ID NO: 10527 - protein, 9 aa, Homo sapiens
  Table 1.2; ZNF560; ENSG00000198028; HLA -B*15:03
GKAFTKCSY

SEQ ID NO: 10528 - protein, 10 aa, Homo sapiens
  Table 1.2; ZNF560; ENSG00000198028; HLA -B*15:03
GKAFVVSSSL

SEQ ID NO: 10529 - protein, 9 aa, Homo sapiens
  Table 1.2; ZNF560; ENSG00000198028; HLA -B*15:03
GKTFTVPSG

SEQ ID NO: 10530 - protein, 10 aa, Homo sapiens
  Table 1.2; ZNF560; ENSG00000198028; HLA -B*15:03
GKTFTVPSGF

SEQ ID NO: 10531 - protein, 9 aa, Homo sapiens
  Table 1.2; ZNF560; ENSG00000198028; HLA -A*29:02,HLA-A*30:02,HLA-B*39:01
GNTSECIQY

SEQ ID NO: 10532 - protein, 9 aa, Homo sapiens
  Table 1.2; ZNF560; ENSG00000198028; HLA -A*01:01
GTDYGKAFI

SEQ ID NO: 10533 - protein, 10 aa, Homo sapiens
  Table 1.2; ZNF560; ENSG00000198028; HLA -A*01:01,HLA-A*29:02
GTDYGKAFIY

SEQ ID NO: 10534 - protein, 9 aa, Homo sapiens
  Table 1.2; ZNF560; ENSG00000198028; HLA -A*03:01,HLA-A*03:02,HLA-A*11:01
GTSAGLIEH

SEQ ID NO: 10535 - protein, 10 aa, Homo sapiens
  Table 1.2; ZNF560; ENSG00000198028; HLA -A*68:02
GTSAGLIEHI

SEQ ID NO: 10536 - protein, 10 aa, Homo sapiens
  Table 1.2; ZNF560; ENSG00000198028; HLA -A*03:02,HLA-A*11:01,HLA-A*31:01,HLA-A*68:01,HLA-B*27:02, HLA-C*07:06
GTSSGVIEDR

SEQ ID NO: 10537 - protein, 9 aa, Homo sapiens
  Table 1.2; ZNF560; ENSG00000198028; HLA -B*54:01,HLA-C*12:03,HLA-C*16:02
HAAEKTSEC

SEQ ID NO: 10538 - protein, 9 aa, Homo sapiens
  Table 1.2; ZNF560; ENSG00000198028; HLA -A*23:01,HLA-A*68:02,HLA-B*13:02,HLA-B*35:03,HLA-B*38:01, HLA-B*39:01,HLA-B*51:01,HLA-B*58:01
HAVNVETHI

SEQ ID NO: 10539 - protein, 10 aa, Homo sapiens
  Table 1.2; ZNF560; ENSG00000198028; HLA -B*38:01
HAVNVETHII

SEQ ID NO: 10540 - protein, 11 aa, Homo sapiens
  Table 1.2; ZNF560; ENSG00000198028; HLA -A*68:01
HAVNVETHIIK

SEQ ID NO: 10541 - protein, 9 aa, Homo sapiens
  Table 1.2; ZNF560; ENSG00000198028; HLA -A*03:01,HLA-A*33:01
HLKTHAAEK

SEQ ID NO: 10542 - protein, 8 aa, Homo sapiens
  Table 1.2; ZNF560; ENSG00000198028; HLA -B*08:01
HMQTHIGI

SEQ ID NO: 10543 - protein, 8 aa, Homo sapiens
  Table 1.2; ZNF560; ENSG00000198028; HLA -B*08:01
HPCLKTNM

SEQ ID NO: 10544 - protein, 8 aa, Homo sapiens
  Table 1.2; ZNF560; ENSG00000198028; HLA -A*30:01,HLA-B*13:02,HLA-B*15:01,HLA-B*15:03,HLA-B*37:01, HLA-B*39:01
HQTSVSAL

SEQ ID NO: 10545 - protein, 8 aa, Homo sapiens
  Table 1.2; ZNF560; ENSG00000198028; HLA -A*01:01
HSDLTNHV

SEQ ID NO: 10546 - protein, 9 aa, Homo sapiens
  Table 1.2; ZNF560; ENSG00000198028; HLA -A*01:01,HLA-A*33:03,HLA-A*68:01
HSDLTNHVR

SEQ ID NO: 10547 - protein, 9 aa, Homo sapiens
  Table 1.2; ZNF560; ENSG00000198028; HLA -A*68:02,HLA-B*13:02,HLA-C*16:02
HSTSHAVNV

SEQ ID NO: 10548 - protein, 9 aa, Homo sapiens
  Table 1.2; ZNF560; ENSG00000198028; HLA -A*01:01,HLA-A*11:01,HLA-A*25:01,HLA-A*26:01,HLA-A*29:02, HLA-A*30:02,HLA-A*32:01,HLA-A*33:01,HLA-A*33:03,HLA-A*68:01, HLA-B*35:01,HLA-B*57:01,HLA-C*02:02,HLA-C*12:03,HLA-C*16:01,
  HLA-C*16:02,HLA-C*16:04
HTGDKPYEY

SEQ ID NO: 10549 - protein, 10 aa, Homo sapiens
  Table 1.2; ZNF560; ENSG00000198028; HLA -A*03:01,HLA-A*11:01,HLA-A*33:01
HTGDKPYEYK

SEQ ID NO: 10550 - protein, 9 aa, Homo sapiens
  Table 1.2; ZNF560; ENSG00000198028; HLA -A*03:01
IIKNPYECK

SEQ ID NO: 10551 - protein, 8 aa, Homo sapiens
  Table 1.2; ZNF560; ENSG00000198028; HLA -A*31:01,HLA-A*33:03
ILLDPVQR

SEQ ID NO: 10552 - protein, 10 aa, Homo sapiens
  Table 1.2; ZNF560; ENSG00000198028; HLA -A*02:01,HLA-A*02:03,HLA-A*02:04,HLA-A*03:01
ILLDPVQRNL

SEQ ID NO: 10553 - protein, 11 aa, Homo sapiens
  Table 1.2; ZNF560; ENSG00000198028; HLA -A*01:01,HLA-A*03:01,HLA-A*23:01,HLA-A*29:02,HLA-A*30:02, HLA-A*32:01,HLA-C*16:01
ILLDPVQRNLY

SEQ ID NO: 10554 - protein, 8 aa, Homo sapiens
  Table 1.2; ZNF560; ENSG00000198028; HLA -A*31:01,HLA-A*33:03
ILNVQVQR

SEQ ID NO: 10555 - protein, 9 aa, Homo sapiens
  Table 1.2; ZNF560; ENSG00000198028; HLA -A*03:01,HLA-A*03:02,HLA-A*11:01
ILNVQVQRK

SEQ ID NO: 10556 - protein, 8 aa, Homo sapiens
  Table 1.2; ZNF560; ENSG00000198028; HLA -A*23:01,HLA-B*15:01,HLA-B*15:03
IQMDLVTF

SEQ ID NO: 10557 - protein, 11 aa, Homo sapiens
  Table 1.2; ZNF560; ENSG00000198028; HLA -A*02:01,HLA-B*13:02
IQMDLVTFDSV

SEQ ID NO: 10558 - protein, 9 aa, Homo sapiens
  Table 1.2; ZNF560; ENSG00000198028; HLA -B*13:02,HLA-B*15:01,HLA-B*15:03,HLA-B*27:05,HLA-B*39:01
IQTSNGIQM

SEQ ID NO: 10559 - protein, 8 aa, Homo sapiens
  Table 1.2; ZNF560; ENSG00000198028; HLA -B*08:01,HLA-B*13:02,HLA-B*15:03
IQYAKDLL

SEQ ID NO: 10560 - protein, 11 aa, Homo sapiens
  Table 1.2; ZNF560; ENSG00000198028; HLA -A*30:02
IQYAKDLLSLY

SEQ ID NO: 10561 - protein, 10 aa, Homo sapiens
  Table 1.2; ZNF560; ENSG00000198028; HLA -B*57:01
ISYPSLFGHL

SEQ ID NO: 10562 - protein, 11 aa, Homo sapiens
  Table 1.2; ZNF560; ENSG00000198028; HLA -A*31:01,HLA-B*57:01
ISYPSLFGHLR

SEQ ID NO: 10563 - protein, 8 aa, Homo sapiens
  Table 1.2; ZNF560; ENSG00000198028; HLA -C*14:02
IYQSYLEA

SEQ ID NO: 10564 - protein, 9 aa, Homo sapiens
  Table 1.2; ZNF560; ENSG00000198028; HLA -C*14:02
IYQSYLEAH

SEQ ID NO: 10565 - protein, 10 aa, Homo sapiens
  Table 1.2; ZNF560; ENSG00000198028; HLA -A*31:01,HLA-A*33:03
IYQSYLEAHR

SEQ ID NO: 10566 - protein, 8 aa, Homo sapiens
  Table 1.2; ZNF560; ENSG00000198028; HLA -A*32:01,HLA-B*54:01,HLA-B*56:01
KAFASFSA

SEQ ID NO: 10567 - protein, 9 aa, Homo sapiens
  Table 1.2; ZNF560; ENSG00000198028; HLA -A*03:01,HLA-A*30:02,HLA-A*31:01,HLA-A*33:01,HLA-A*33:03, HLA-B*46:01,HLA-B*57:01
KAFASFSAR

SEQ ID NO: 10568 - protein, 9 aa, Homo sapiens
  Table 1.2; ZNF560; ENSG00000198028; HLA -B*58:01,HLA-C*03:03,HLA-C*03:04
KAFGTSAGL

SEQ ID NO: 10569 - protein, 9 aa, Homo sapiens
  Table 1.2; ZNF560; ENSG00000198028; HLA -A*02:03,HLA-A*32:01
KAFGTSSGV

SEQ ID NO: 10570 - protein, 9 aa, Homo sapiens
  Table 1.2; ZNF560; ENSG00000198028; HLA -A*23:01,HLA-A*32:01,HLA-B*07:02,HLA-B*15:03,HLA-B*40:02, HLA-B*46:01,HLA-B*57:01,HLA-B*58:01,HLA-C*01:02,HLA-C*02:02, HLA-C*03:03,HLA-C*03:04,HLA-C*16:04
KAFISYPSL

SEQ ID NO: 10571 - protein, 10 aa, Homo sapiens
  Table 1.2; ZNF560; ENSG00000198028; HLA -B*57:01
KAFISYPSLF

SEQ ID NO: 10572 - protein, 8 aa, Homo sapiens
  Table 1.2; ZNF560; ENSG00000198028; HLA -A*30:02,HLA-B*57:01
KAFIYQSY

SEQ ID NO: 10573 - protein, 11 aa, Homo sapiens
  Table 1.2; ZNF560; ENSG00000198028; HLA -A*03:01,HLA-A*03:02,HLA-B*57:01
KAFTERSDLTK

SEQ ID NO: 10574 - protein, 8 aa, Homo sapiens
  Table 1.2; ZNF560; ENSG00000198028; HLA -A*30:02,HLA-A*32:01,HLA-C*16:01
KAFTERSY

SEQ ID NO: 10575 - protein, 9 aa, Homo sapiens
  Table 1.2; ZNF560; ENSG00000198028; HLA -A*31:01,HLA-B*57:01
KAFTERSYL

SEQ ID NO: 10576 - protein, 11 aa, Homo sapiens
  Table 1.2; ZNF560; ENSG00000198028; HLA -A*03:01,HLA-B*57:01
KAFTERSYLTK

SEQ ID NO: 10577 - protein, 9 aa, Homo sapiens
  Table 1.2; ZNF560; ENSG00000198028; HLA -A*30:01,HLA-A*32:01,HLA-B*07:02,HLA-B*08:01,HLA-B*15:01, HLA-B*15:03,HLA-B*40:01,HLA-B*40:02,HLA-B*46:01,HLA-B*51:01, HLA-B*58:01,HLA-C*01:02,HLA-C*02:02,HLA-C*03:03,HLA-C*03:04,
  HLA-C*07:02,HLA-C*16:04
KAFVVSSSL

SEQ ID NO: 10578 - protein, 9 aa, Homo sapiens
  Table 1.2; ZNF560; ENSG00000198028; HLA -B*08:01,HLA-C*03:04,HLA-C*12:03
KAYSRSCVL

SEQ ID NO: 10579 - protein, 9 aa, Homo sapiens
  Table 1.2; ZNF560; ENSG00000198028; HLA -A*31:01
KCGKAFTER

SEQ ID NO: 10580 - protein, 9 aa, Homo sapiens
  Table 1.2; ZNF560; ENSG00000198028; HLA -B*38:01,HLA-B*39:01
KHQTSVSAL

SEQ ID NO: 10581 - protein, 8 aa, Homo sapiens
  Table 1.2; ZNF560; ENSG00000198028; HLA -A*30:02
KNLSSVGY

SEQ ID NO: 10582 - protein, 10 aa, Homo sapiens
  Table 1.2; ZNF560; ENSG00000198028; HLA -A*23:01
KNLSSVGYQL

SEQ ID NO: 10583 - protein, 9 aa, Homo sapiens
  Table 1.2; ZNF560; ENSG00000198028; HLA -B*07:02,HLA-B*35:03,HLA-C*07:02
KPFTSSACL

SEQ ID NO: 10584 - protein, 8 aa, Homo sapiens
  Table 1.2; ZNF560; ENSG00000198028; HLA -B*08:01
KPYEHKEY

SEQ ID NO: 10585 - protein, 9 aa, Homo sapiens
  Table 1.2; ZNF560; ENSG00000198028; HLA -A*03:02
KQCEDVFCK

SEQ ID NO: 10586 - protein, 8 aa, Homo sapiens
  Table 1.2; ZNF560; ENSG00000198028; HLA -A*30:02,HLA-A*32:01,HLA-B*15:01,HLA-B*15:03,HLA-B*39:01, HLA-B*46:01,HLA-B*58:01
KSFEGTDY

SEQ ID NO: 10587 - protein, 10 aa, Homo sapiens
  Table 1.2; ZNF560; ENSG00000198028; HLA -A*03:01,HLA-A*03:02,HLA-A*11:01,HLA-B*27:02,HLA-B*57:01, HLA-B*58:01
KSFEGTDYGK

SEQ ID NO: 10588 - protein, 11 aa, Homo sapiens
  Table 1.2; ZNF560; ENSG00000198028; HLA -B*58:01
KSFEGTDYGKA

SEQ ID NO: 10589 - protein, 9 aa, Homo sapiens
  Table 1.2; ZNF560; ENSG00000198028; HLA -A*02:04
KSFRLILNV

SEQ ID NO: 10590 - protein, 9 aa, Homo sapiens
  Table 1.2; ZNF560; ENSG00000198028; HLA -A*03:02,HLA-A*23:01,HLA-A*25:01,HLA-A*26:01,HLA-A*30:02, HLA-A*31:01,HLA-A*32:01,HLA-B*46:01,HLA-B*57:01,HLA-B*58:01
KTFTVPSGF

SEQ ID NO: 10591 - protein, 10 aa, Homo sapiens
  Table 1.2; ZNF560; ENSG00000198028; HLA -A*03:01
KTFTVPSGFL

SEQ ID NO: 10592 - protein, 8 aa, Homo sapiens
  Table 1.2; ZNF560; ENSG00000198028; HLA -B*57:01
KTKGPALW

SEQ ID NO: 10593 - protein, 8 aa, Homo sapiens
  Table 1.2; ZNF560; ENSG00000198028; HLA -A*23:01
KTLNGIQL

SEQ ID NO: 10594 - protein, 10 aa, Homo sapiens
  Table 1.2; ZNF560; ENSG00000198028; HLA -A*03:01,HLA-A*03:02,HLA-A*11:01,HLA-A*31:01,HLA-A*33:03, HLA-B*57:01
KTLNGIQLAR

SEQ ID NO: 10595 - protein, 9 aa, Homo sapiens
  Table 1.2; ZNF560; ENSG00000198028; HLA -A*03:01,HLA-A*30:02,HLA-B*57:01
KTLTKIKPY

SEQ ID NO: 10596 - protein, 9 aa, Homo sapiens
  Table 1.2; ZNF560; ENSG00000198028; HLA -A*03:01,HLA-A*03:02,HLA-A*11:01,HLA-A*31:01,HLA-A*32:01, HLA-A*33:01,HLA-A*33:03,HLA-A*68:01
KTNMSTQNR

SEQ ID NO: 10597 - protein, 11 aa, Homo sapiens
  Table 1.2; ZNF560; ENSG00000198028; HLA -A*25:01,HLA-A*31:01,HLA-A*32:01,HLA-B*57:01,HLA-B*58:01
KTQSGEKLNEW

SEQ ID NO: 10598 - protein, 8 aa, Homo sapiens
  Table 1.2; ZNF560; ENSG00000198028; HLA -C*06:02
KTSTIRKV

SEQ ID NO: 10599 - protein, 9 aa, Homo sapiens
  Table 1.2; ZNF560; ENSG00000198028; HLA -A*02:07,HLA-A*25:01,HLA-A*32:01,HLA-B*46:01,HLA-C*01:02, HLA-C*03:03,HLA-C*03:04
KVFVSFSSL

SEQ ID NO: 10600 - protein, 10 aa, Homo sapiens
  Table 1.2; ZNF560; ENSG00000198028; HLA -A*03:01
KVSVFSKHGK

SEQ ID NO: 10601 - protein, 11 aa, Homo sapiens
  Table 1.2; ZNF560; ENSG00000198028; HLA -A*30:02
LARNQNGEELY

SEQ ID NO: 10602 - protein, 10 aa, Homo sapiens
  Table 1.2; ZNF560; ENSG00000198028; HLA -B*40:01
LEEEEELSTL

SEQ ID NO: 10603 - protein, 9 aa, Homo sapiens
  Table 1.2; ZNF560; ENSG00000198028; HLA -A*30:01,HLA-B*18:01,HLA-B*40:01,HLA-B*40:02,HLA-B*49:01
LEEEELRTL

SEQ ID NO: 10604 - protein, 10 aa, Homo sapiens
  Table 1.2; ZNF560; ENSG00000198028; HLA -B*49:01
LENYENVAKV

SEQ ID NO: 10605 - protein, 9 aa, Homo sapiens
  Table 1.2; ZNF560; ENSG00000198028; HLA -A*24:02,HLA-B*57:01
LFKPSLISW

SEQ ID NO: 10606 - protein, 9 aa, Homo sapiens
  Table 1.2; ZNF560; ENSG00000198028; HLA -A*23:01,HLA-A*24:02,HLA-B*57:01
LFKPSVISW

SEQ ID NO: 10607 - protein, 9 aa, Homo sapiens
  Table 1.2; ZNF560; ENSG00000198028; HLA -A*11:01,HLA-A*31:01,HLA-A*33:01,HLA-A*33:03,HLA-A*68:01, HLA-C*07:06
LILNVQVQR

SEQ ID NO: 10608 - protein, 9 aa, Homo sapiens
  Table 1.2; ZNF560; ENSG00000198028; HLA -A*02:01,HLA-A*02:04,HLA-A*02:07,HLA-A*03:01,HLA-C*03:04
LLDPAQRNL

SEQ ID NO: 10609 - protein, 10 aa, Homo sapiens
  Table 1.2; ZNF560; ENSG00000198028; HLA -A*01:01,HLA-A*02:07,HLA-A*29:02,HLA-A*30:02,HLA-A*32:01, HLA-B*15:01
LLDPAQRNLY

SEQ ID NO: 10610 - protein, 9 aa, Homo sapiens
  Table 1.2; ZNF560; ENSG00000198028; HLA -A*02:01,HLA-A*02:04,HLA-A*02:07,HLA-A*03:01,HLA-A*68:02, HLA-C*03:03,HLA-C*03:04,HLA-C*16:02
LLDPVQRNL

SEQ ID NO: 10611 - protein, 10 aa, Homo sapiens
  Table 1.2; ZNF560; ENSG00000198028; HLA -A*01:01,HLA-A*02:07,HLA-A*29:02,HLA-A*30:02,HLA-A*32:01, HLA-B*15:01
LLDPVQRNLY

SEQ ID NO: 10612 - protein, 9 aa, Homo sapiens
  Table 1.2; ZNF560; ENSG00000198028; HLA -A*32:01,HLA-B*44:02
LQQGVLQDW

SEQ ID NO: 10613 - protein, 8 aa, Homo sapiens
  Table 1.2; ZNF560; ENSG00000198028; HLA -C*03:04
LSSVGYQL

SEQ ID NO: 10614 - protein, 9 aa, Homo sapiens
  Table 1.2; ZNF560; ENSG00000198028; HLA -B*57:01
LSSVGYQLF

SEQ ID NO: 10615 - protein, 8 aa, Homo sapiens
  Table 1.2; ZNF560; ENSG00000198028; HLA -C*16:01
LSTLPRVL

SEQ ID NO: 10616 - protein, 11 aa, Homo sapiens
  Table 1.2; ZNF560; ENSG00000198028; HLA -B*57:01
LSTLPRVLQEW

SEQ ID NO: 10617 - protein, 11 aa, Homo sapiens
  Table 1.2; ZNF560; ENSG00000198028; HLA -A*01:01
LVDHLRTHTGY

SEQ ID NO: 10618 - protein, 8 aa, Homo sapiens
  Table 1.2; ZNF560; ENSG00000198028; HLA -A*23:01,HLA-A*24:02,HLA-B*51:01,HLA-C*14:02
LYNKTSTI

SEQ ID NO: 10619 - protein, 9 aa, Homo sapiens
  Table 1.2; ZNF560; ENSG00000198028; HLA -A*33:03
LYNKTSTIR

SEQ ID NO: 10620 - protein, 10 aa, Homo sapiens
  Table 1.2; ZNF560; ENSG00000198028; HLA -A*29:02
LYRDVMLENY

SEQ ID NO: 10621 - protein, 10 aa, Homo sapiens
  Table 1.2; ZNF560; ENSG00000198028; HLA -A*23:01,HLA-A*24:02,HLA-A*29:02,HLA-A*30:02
LYSDVMLENY

SEQ ID NO: 10622 - protein, 10 aa, Homo sapiens
  Table 1.2; ZNF560; ENSG00000198028; HLA -A*03:02,HLA-B*27:02
MLENYENVAK

SEQ ID NO: 10623 - protein, 10 aa, Homo sapiens
  Table 1.2; ZNF560; ENSG00000198028; HLA -C*07:01
MQTHIGIKPY

SEQ ID NO: 10624 - protein, 9 aa, Homo sapiens
  Table 1.2; ZNF560; ENSG00000198028; HLA -A*33:01,HLA-A*33:03,HLA-A*68:01,HLA-C*07:06
NACEKAYSR

SEQ ID NO: 10625 - protein, 9 aa, Homo sapiens
  Table 1.2; ZNF560; ENSG00000198028; HLA -B*38:01
NHMQTHIGI

SEQ ID NO: 10626 - protein, 9 aa, Homo sapiens
  Table 1.2; ZNF560; ENSG00000198028; HLA -A*02:01,HLA-A*02:04,HLA-A*02:07,HLA-A*23:01,HLA-A*68:02, HLA-B*13:02,HLA-B*27:05,HLA-B*35:03,HLA-B*38:01,HLA-B*39:01, HLA-B*55:01
NLSSVGYQL

SEQ ID NO: 10627 - protein, 11 aa, Homo sapiens
  Table 1.2; ZNF560; ENSG00000198028; HLA -A*29:02,HLA-A*30:02
NLYSDVMLENY

SEQ ID NO: 10628 - protein, 8 aa, Homo sapiens
  Table 1.2; ZNF560; ENSG00000198028; HLA -A*01:01
NTSECIQY

SEQ ID NO: 10629 - protein, 9 aa, Homo sapiens
  Table 1.2; ZNF560; ENSG00000198028; HLA -A*02:04,HLA-A*68:01,HLA-A*68:02,HLA-B*35:03
NVAKVGFQL

SEQ ID NO: 10630 - protein, 10 aa, Homo sapiens
  Table 1.2; ZNF560; ENSG00000198028; HLA -A*25:01
NVAKVGFQLF

SEQ ID NO: 10631 - protein, 10 aa, Homo sapiens
  Table 1.2; ZNF560; ENSG00000198028; HLA -A*23:01,HLA-A*24:02,HLA-C*04:01,HLA-C*14:02
NYENVAKVGF

SEQ ID NO: 10632 - protein, 10 aa, Homo sapiens
  Table 1.2; ZNF560; ENSG00000198028; HLA -A*29:02,HLA-A*30:02,HLA-A*33:03,HLA-C*14:02
NYKNLSSVGY

SEQ ID NO: 10633 - protein, 9 aa, Homo sapiens
  Table 1.2; ZNF560; ENSG00000198028; HLA -A*23:01
QCGKVFVSF

SEQ ID NO: 10634 - protein, 10 aa, Homo sapiens
  Table 1.2; ZNF560; ENSG00000198028; HLA -A*30:02,HLA-B*15:03,HLA-C*07:01
QDKSFEGTDY

SEQ ID NO: 10635 - protein, 10 aa, Homo sapiens
  Table 1.2; ZNF560; ENSG00000198028; HLA -B*57:01
QLFKPSLISW

SEQ ID NO: 10636 - protein, 10 aa, Homo sapiens
  Table 1.2; ZNF560; ENSG00000198028; HLA -A*25:01,HLA-B*44:02,HLA-B*57:01
QLFKPSVISW

SEQ ID NO: 10637 - protein, 9 aa, Homo sapiens
  Table 1.2; ZNF560; ENSG00000198028; HLA -A*25:01,HLA-B*58:01
QSGEKLNEW

SEQ ID NO: 10638 - protein, 9 aa, Homo sapiens
  Table 1.2; ZNF560; ENSG00000198028; HLA -A*03:01,HLA-A*03:02,HLA-A*11:01
QSYLEAHRK

SEQ ID NO: 10639 - protein, 9 aa, Homo sapiens
  Table 1.2; ZNF560; ENSG00000198028; HLA -A*01:01
QTHIGIKPY

SEQ ID NO: 10640 - protein, 9 aa, Homo sapiens
  Table 1.2; ZNF560; ENSG00000198028; HLA -A*23:01,HLA-A*24:02
QYAKDLLSL

SEQ ID NO: 10641 - protein, 10 aa, Homo sapiens
  Table 1.2; ZNF560; ENSG00000198028; HLA -A*29:02,HLA-A*30:02
QYAKDLLSLY

SEQ ID NO: 10642 - protein, 10 aa, Homo sapiens
  Table 1.2; ZNF560; ENSG00000198028; HLA -A*30:02
RGNTSECIQY

SEQ ID NO: 10643 - protein, 10 aa, Homo sapiens
  Table 1.2; ZNF560; ENSG00000198028; HLA -A*03:01,HLA-A*03:02
RIHTGEKPYK

SEQ ID NO: 10644 - protein, 10 aa, Homo sapiens
  Table 1.2; ZNF560; ENSG00000198028; HLA -A*31:01
RLILNVQVQR

SEQ ID NO: 10645 - protein, 11 aa, Homo sapiens
  Table 1.2; ZNF560; ENSG00000198028; HLA -A*03:01,HLA-A*03:02
RLILNVQVQRK

SEQ ID NO: 10646 - protein, 9 aa, Homo sapiens
  Table 1.2; ZNF560; ENSG00000198028; HLA -A*30:02
RNQNGEELY

SEQ ID NO: 10647 - protein, 9 aa, Homo sapiens
  Table 1.2; ZNF560; ENSG00000198028; HLA -B*58:01
RSCVLTQHL

SEQ ID NO: 10648 - protein, 9 aa, Homo sapiens
  Table 1.2; ZNF560; ENSG00000198028; HLA -A*32:01,HLA-B*57:01,HLA-B*58:01
RSNTGQKRF

SEQ ID NO: 10649 - protein, 9 aa, Homo sapiens
  Table 1.2; ZNF560; ENSG00000198028; HLA -A*31:01
RSYLTKHLR

SEQ ID NO: 10650 - protein, 9 aa, Homo sapiens
  Table 1.2; ZNF560; ENSG00000198028; HLA -A*30:02,HLA-B*57:01
RTHTEERLY

SEQ ID NO: 10651 - protein, 10 aa, Homo sapiens
  Table 1.2; ZNF560; ENSG00000198028; HLA -A*03:01
RTHTGYKPYK

SEQ ID NO: 10652 - protein, 11 aa, Homo sapiens
  Table 1.2; ZNF560; ENSG00000198028; HLA -B*57:01,HLA-B*58:01
RTLQQGVLQDW

SEQ ID NO: 10653 - protein, 9 aa, Homo sapiens
  Table 1.2; ZNF560; ENSG00000198028; HLA -A*30:02
RVHNGEKPY

SEQ ID NO: 10654 - protein, 10 aa, Homo sapiens
  Table 1.2; ZNF560; ENSG00000198028; HLA -A*24:02
RYPTHLNNHM

SEQ ID NO: 10655 - protein, 9 aa, Homo sapiens
  Table 1.2; ZNF560; ENSG00000198028; HLA -A*33:03,HLA-A*68:01,HLA-B*57:01,HLA-C*07:06
SAGLIEHIR

SEQ ID NO: 10656 - protein, 8 aa, Homo sapiens
  Table 1.2; ZNF560; ENSG00000198028; HLA -B*57:01,HLA-B*58:01
SALQQEFW

SEQ ID NO: 10657 - protein, 9 aa, Homo sapiens
  Table 1.2; ZNF560; ENSG00000198028; HLA -A*11:01
SCVLTQHLK

SEQ ID NO: 10658 - protein, 9 aa, Homo sapiens
  Table 1.2; ZNF560; ENSG00000198028; HLA -B*37:01
SDLTNHVRI

SEQ ID NO: 10659 - protein, 8 aa, Homo sapiens
  Table 1.2; ZNF560; ENSG00000198028; HLA -B*18:01
SDVMLENY

SEQ ID NO: 10660 - protein, 10 aa, Homo sapiens
  Table 1.2; ZNF560; ENSG00000198028; HLA -B*44:03
SECNACGNSF

SEQ ID NO: 10661 - protein, 9 aa, Homo sapiens
  Table 1.2; ZNF560; ENSG00000198028; HLA -B*37:01
SFSARIAHL

SEQ ID NO: 10662 - protein, 9 aa, Homo sapiens
  Table 1.2; ZNF560; ENSG00000198028; HLA -A*23:01,HLA-A*24:02,HLA-A*29:02
SFSSLFAHL

SEQ ID NO: 10663 - protein, 9 aa, Homo sapiens
  Table 1.2; ZNF560; ENSG00000198028; HLA -B*38:01
SHAVNVETH

SEQ ID NO: 10664 - protein, 10 aa, Homo sapiens
  Table 1.2; ZNF560; ENSG00000198028; HLA -B*38:01
SHAVNVETHI

SEQ ID NO: 10665 - protein, 11 aa, Homo sapiens
  Table 1.2; ZNF560; ENSG00000198028; HLA -B*38:01
SHAVNVETHII

SEQ ID NO: 10666 - protein, 9 aa, Homo sapiens
  Table 1.2; ZNF560; ENSG00000198028; HLA -A*02:03,HLA-A*03:01
SLFAHLRTH

SEQ ID NO: 10667 - protein, 8 aa, Homo sapiens
  Table 1.2; ZNF560; ENSG00000198028; HLA -B*08:01
SLYNKTST

SEQ ID NO: 10668 - protein, 9 aa, Homo sapiens
  Table 1.2; ZNF560; ENSG00000198028; HLA -A*02:01,HLA-A*02:03,HLA-A*02:04,HLA-A*02:07,HLA-A*23:01, HLA-A*25:01,HLA-A*30:01,HLA-A*32:01,HLA-B*08:01,HLA-B*13:02, HLA-B*15:03,HLA-B*46:01,HLA-B*51:01,HLA-B*55:01,HLA-C*02:02
SLYNKTSTI

SEQ ID NO: 10669 - protein, 10 aa, Homo sapiens
  Table 1.2; ZNF560; ENSG00000198028; HLA -A*03:01
SLYNKTSTIR

SEQ ID NO: 10670 - protein, 11 aa, Homo sapiens
  Table 1.2; ZNF560; ENSG00000198028; HLA -A*03:01,HLA-A*03:02,HLA-A*11:01
SLYNKTSTIRK

SEQ ID NO: 10671 - protein, 9 aa, Homo sapiens
  Table 1.2; ZNF560; ENSG00000198028; HLA -A*68:01
SSSLVDHLR

SEQ ID NO: 10672 - protein, 9 aa, Homo sapiens
  Table 1.2; ZNF560; ENSG00000198028; HLA -A*03:01,HLA-A*03:02,HLA-A*11:01
SSVGYQLFK

SEQ ID NO: 10673 - protein, 8 aa, Homo sapiens
  Table 1.2; ZNF560; ENSG00000198028; HLA -B*08:01
STIRKVSV

SEQ ID NO: 10674 - protein, 9 aa, Homo sapiens
  Table 1.2; ZNF560; ENSG00000198028; HLA -A*25:01,HLA-A*26:01,HLA-A*32:01,HLA-B*46:01,HLA-B*57:01, HLA-B*58:01,HLA-C*02:02,HLA-C*12:03
STIRKVSVF

SEQ ID NO: 10675 - protein, 11 aa, Homo sapiens
  Table 1.2; ZNF560; ENSG00000198028; HLA -A*11:01
STIRKVSVFSK

SEQ ID NO: 10676 - protein, 10 aa, Homo sapiens
  Table 1.2; ZNF560; ENSG00000198028; HLA -A*24:02,HLA-A*25:01,HLA-A*31:01,HLA-A*32:01,HLA-B*44:02, HLA-B*57:01,HLA-B*58:01
STLPRVLQEW

SEQ ID NO: 10677 - protein, 11 aa, Homo sapiens
  Table 1.2; ZNF560; ENSG00000198028; HLA -A*25:01,HLA-B*57:01
SVAVEFTQEEW

SEQ ID NO: 10678 - protein, 8 aa, Homo sapiens
  Table 1.2; ZNF560; ENSG00000198028; HLA -A*03:01,HLA-A*11:01
SVGYQLFK

SEQ ID NO: 10679 - protein, 9 aa, Homo sapiens
  Table 1.2; ZNF560; ENSG00000198028; HLA -A*26:01,HLA-A*29:02,HLA-A*30:02,HLA-A*32:01,HLA-B*15:01, HLA-B*35:01,HLA-B*58:01,HLA-C*02:02
SVSALQQEF

SEQ ID NO: 10680 - protein, 10 aa, Homo sapiens
  Table 1.2; ZNF560; ENSG00000198028; HLA -A*25:01,HLA-B*57:01,HLA-B*58:01
SVSALQQEFW

SEQ ID NO: 10681 - protein, 9 aa, Homo sapiens
  Table 1.2; ZNF560; ENSG00000198028; HLA -B*35:03
SVTFEDTAV

SEQ ID NO: 10682 - protein, 9 aa, Homo sapiens
  Table 1.2; ZNF560; ENSG00000198028; HLA -A*31:01
SYLTKHLRR

SEQ ID NO: 10683 - protein, 9 aa, Homo sapiens
  Table 1.2; ZNF560; ENSG00000198028; HLA -A*23:01,HLA-A*24:02,HLA-A*29:02
SYPSLFGHL

SEQ ID NO: 10684 - protein, 10 aa, Homo sapiens
  Table 1.2; ZNF560; ENSG00000198028; HLA -A*29:02,HLA-A*31:01
SYPSLFGHLR

SEQ ID NO: 10685 - protein, 10 aa, Homo sapiens
  Table 1.2; ZNF560; ENSG00000198028; HLA -A*25:01,HLA-A*26:01,HLA-A*68:01,HLA-B*35:01,HLA-B*57:01, HLA-B*58:01,HLA-C*07:06
TAVDFTQEEW

SEQ ID NO: 10686 - protein, 9 aa, Homo sapiens
  Table 1.2; ZNF560; ENSG00000198028; HLA -A*29:02,HLA-B*18:01,HLA-B*37:01
TDYGKAFIY

SEQ ID NO: 10687 - protein, 9 aa, Homo sapiens
  Table 1.2; ZNF560; ENSG00000198028; HLA -A*02:07,HLA-A*23:01,HLA-A*24:02,HLA-A*29:02,HLA-A*32:01, HLA-A*33:03,HLA-B*18:01,HLA-B*35:01,HLA-B*35:03,HLA-B*38:01, HLA-B*55:01,HLA-C*04:01,HLA-C*05:01,HLA-C*07:04,HLA-C*14:02
TFDSVAVEF

SEQ ID NO: 10688 - protein, 9 aa, Homo sapiens
  Table 1.2; ZNF560; ENSG00000198028; HLA -A*23:01,HLA-B*35:01,HLA-B*35:03,HLA-C*04:01,HLA-C*14:02
TFEDTAVDF

SEQ ID NO: 10689 - protein, 8 aa, Homo sapiens
  Table 1.2; ZNF560; ENSG00000198028; HLA -A*01:01,HLA-B*35:01,HLA-C*05:01
TGDKPYEY

SEQ ID NO: 10690 - protein, 9 aa, Homo sapiens
  Table 1.2; ZNF560; ENSG00000198028; HLA -A*03:02,HLA-A*11:01
TGDKPYEYK

SEQ ID NO: 10691 - protein, 10 aa, Homo sapiens
  Table 1.2; ZNF560; ENSG00000198028; HLA -B*38:01
THSTSHAVNV

SEQ ID NO: 10692 - protein, 8 aa, Homo sapiens
  Table 1.2; ZNF560; ENSG00000198028; HLA -B*08:01
TIRKVSVF

SEQ ID NO: 10693 - protein, 10 aa, Homo sapiens
  Table 1.2; ZNF560; ENSG00000198028; HLA -A*02:01,HLA-A*02:03,HLA-A*02:04,HLA-A*03:01
TLLDPAQRNL

SEQ ID NO: 10694 - protein, 11 aa, Homo sapiens
  Table 1.2; ZNF560; ENSG00000198028; HLA -A*01:01,HLA-A*03:01,HLA-A*23:01,HLA-A*29:02,HLA-A*30:02, HLA-A*32:01,HLA-B*15:01,HLA-B*15:03,HLA-C*07:04
TLLDPAQRNLY

SEQ ID NO: 10695 - protein, 9 aa, Homo sapiens
  Table 1.2; ZNF560; ENSG00000198028; HLA -A*03:01,HLA-A*03:02,HLA-A*29:02,HLA-A*31:01,HLA-A*33:01, HLA-A*33:03,HLA-A*68:01,HLA-C*07:06
TLNGIQLAR

SEQ ID NO: 10696 - protein, 9 aa, Homo sapiens
  Table 1.2; ZNF560; ENSG00000198028; HLA -A*02:07,HLA-A*24:02,HLA-A*25:01,HLA-B*57:01
TLPRVLQEW

SEQ ID NO: 10697 - protein, 10 aa, Homo sapiens
  Table 1.2; ZNF560; ENSG00000198028; HLA -A*25:01
TLQQGVLQDW

SEQ ID NO: 10698 - protein, 8 aa, Homo sapiens
  Table 1.2; ZNF560; ENSG00000198028; HLA -A*33:01,HLA-A*33:03
TNMSTQNR

SEQ ID NO: 10699 - protein, 9 aa, Homo sapiens
  Table 1.2; ZNF560; ENSG00000198028; HLA -B*08:01
TQHLKTHAA

SEQ ID NO: 10700 - protein, 10 aa, Homo sapiens
  Table 1.2; ZNF560; ENSG00000198028; HLA -A*25:01,HLA-B*38:01
TQSGEKLNEW

SEQ ID NO: 10701 - protein, 9 aa, Homo sapiens
  Table 1.2; ZNF560; ENSG00000198028; HLA -A*68:01,HLA-A*68:02,HLA-B*13:02,HLA-B*38:01
TSAGLIEHI

SEQ ID NO: 10702 - protein, 10 aa, Homo sapiens
  Table 1.2; ZNF560; ENSG00000198028; HLA -A*33:03,HLA-A*68:01
TSAGLIEHIR

SEQ ID NO: 10703 - protein, 9 aa, Homo sapiens
  Table 1.2; ZNF560; ENSG00000198028; HLA -A*03:02,HLA-A*11:01
TSECIQYAK

SEQ ID NO: 10704 - protein, 9 aa, Homo sapiens
  Table 1.2; ZNF560; ENSG00000198028; HLA -B*58:01
TSHAVNVET

SEQ ID NO: 10705 - protein, 9 aa, Homo sapiens
  Table 1.2; ZNF560; ENSG00000198028; HLA -C*16:02
TSSGRIQHL

SEQ ID NO: 10706 - protein, 9 aa, Homo sapiens
  Table 1.2; ZNF560; ENSG00000198028; HLA -A*33:03,HLA-A*68:01,HLA-C*07:06
TSSGVIEDR

SEQ ID NO: 10707 - protein, 10 aa, Homo sapiens
  Table 1.2; ZNF560; ENSG00000198028; HLA -A*68:01
TSSGVIEDRR

SEQ ID NO: 10708 - protein, 9 aa, Homo sapiens
  Table 1.2; ZNF560; ENSG00000198028; HLA -B*08:01,HLA-C*16:01
TSTIRKVSV

SEQ ID NO: 10709 - protein, 10 aa, Homo sapiens
  Table 1.2; ZNF560; ENSG00000198028; HLA -B*57:01,HLA-B*58:01
TSVSALQQEF

SEQ ID NO: 10710 - protein, 11 aa, Homo sapiens
  Table 1.2; ZNF560; ENSG00000198028; HLA -B*57:01,HLA-B*58:01
TSVSALQQEFW

SEQ ID NO: 10711 - protein, 9 aa, Homo sapiens
  Table 1.2; ZNF560; ENSG00000198028; HLA -A*03:01,HLA-A*26:01
TVPSGFLEH

SEQ ID NO: 10712 - protein, 10 aa, Homo sapiens
  Table 1.2; ZNF560; ENSG00000198028; HLA -A*02:07,HLA-A*68:02
TVPSGFLEHV

SEQ ID NO: 10713 - protein, 8 aa, Homo sapiens
  Table 1.2; ZNF560; ENSG00000198028; HLA -A*32:01,HLA-B*08:01,HLA-B*40:02,HLA-B*46:01,HLA-C*01:02, HLA-C*03:04,HLA-C*16:01
VAKVGFQL

SEQ ID NO: 10714 - protein, 9 aa, Homo sapiens
  Table 1.2; ZNF560; ENSG00000198028; HLA -A*23:01,HLA-A*24:02,HLA-B*57:01
VAKVGFQLF

SEQ ID NO: 10715 - protein, 10 aa, Homo sapiens
  Table 1.2; ZNF560; ENSG00000198028; HLA -A*25:01,HLA-B*57:01,HLA-B*58:01,HLA-C*16:04
VAVEFTQEEW

SEQ ID NO: 10716 - protein, 8 aa, Homo sapiens
  Table 1.2; ZNF560; ENSG00000198028; HLA -B*18:01,HLA-B*44:02,HLA-B*44:03,HLA-C*16:04
VEFTQEEW

SEQ ID NO: 10717 - protein, 10 aa, Homo sapiens
  Table 1.2; ZNF560; ENSG00000198028; HLA -A*30:01,HLA-B*40:01
VEFTQEEWTL

SEQ ID NO: 10718 - protein, 10 aa, Homo sapiens
  Table 1.2; ZNF560; ENSG00000198028; HLA -B*18:01,HLA-B*44:03
VETHIIKNPY

SEQ ID NO: 10719 - protein, 9 aa, Homo sapiens
  Table 1.2; ZNF560; ENSG00000198028; HLA -A*24:02
VFSKHGKSF

SEQ ID NO: 10720 - protein, 8 aa, Homo sapiens
  Table 1.2; ZNF560; ENSG00000198028; HLA -A*23:01,HLA-C*14:02
VFVSFSSL

SEQ ID NO: 10721 - protein, 9 aa, Homo sapiens
  Table 1.2; ZNF560; ENSG00000198028; HLA -A*23:01,HLA-A*24:02,HLA-A*29:02
VFVSFSSLF

SEQ ID NO: 10722 - protein, 9 aa, Homo sapiens
  Table 1.2; ZNF560; ENSG00000198028; HLA -A*02:04,HLA-A*03:01,HLA-A*03:02
VLQDWAIKH

SEQ ID NO: 10723 - protein, 9 aa, Homo sapiens
  Table 1.2; ZNF560; ENSG00000198028; HLA -A*02:04
VLQEWKMCL

SEQ ID NO: 10724 - protein, 9 aa, Homo sapiens
  Table 1.2; ZNF560; ENSG00000198028; HLA -A*02:01,HLA-A*02:03,HLA-A*02:04,HLA-A*02:07,HLA-B*55:01
VMLENYENV

SEQ ID NO: 10725 - protein, 11 aa, Homo sapiens
  Table 1.2; ZNF560; ENSG00000198028; HLA -A*03:02,HLA-A*11:01,HLA-B*27:02
VMLENYENVAK

SEQ ID NO: 10726 - protein, 9 aa, Homo sapiens
  Table 1.2; ZNF560; ENSG00000198028; HLA -A*02:01,HLA-A*02:03,HLA-A*02:04,HLA-A*02:07,HLA-A*24:02
VMLENYKNL

SEQ ID NO: 10727 - protein, 9 aa, Homo sapiens
  Table 1.2; ZNF560; ENSG00000198028; HLA -A*68:02,HLA-B*07:02,HLA-B*51:01,HLA-B*54:01,HLA-B*55:01, HLA-B*56:01
VPSGFLEHV

SEQ ID NO: 10728 - protein, 10 aa, Homo sapiens
  Table 1.2; ZNF560; ENSG00000198028; HLA -A*68:01
VPSGFLEHVR

SEQ ID NO: 10729 - protein, 8 aa, Homo sapiens
  Table 1.2; ZNF560; ENSG00000198028; HLA -B*58:01,HLA-C*16:01
VSALQQEF

SEQ ID NO: 10730 - protein, 9 aa, Homo sapiens
  Table 1.2; ZNF560; ENSG00000198028; HLA -B*57:01,HLA-B*58:01
VSALQQEFW

SEQ ID NO: 10731 - protein, 9 aa, Homo sapiens
  Table 1.2; ZNF560; ENSG00000198028; HLA -B*27:05,HLA-C*16:02
VSSSLVDHL

SEQ ID NO: 10732 - protein, 10 aa, Homo sapiens
  Table 1.2; ZNF560; ENSG00000198028; HLA -A*03:02,HLA-A*11:01,HLA-A*23:01,HLA-A*24:02,HLA-A*25:01, HLA-A*26:01,HLA-A*29:02,HLA-A*30:02,HLA-A*32:01,HLA-A*68:01, HLA-A*68:02,HLA-B*15:01,HLA-B*27:02,HLA-B*35:01,HLA-B*46:01,
  HLA-B*57:01,HLA-B*58:01,HLA-C*02:02,HLA-C*12:03
VTFDSVAVEF

SEQ ID NO: 10733 - protein, 10 aa, Homo sapiens
  Table 1.2; ZNF560; ENSG00000198028; HLA -A*11:01,HLA-B*27:02,HLA-B*46:01,HLA-B*57:01,HLA-B*58:01
VTFEDTAVDF

SEQ ID NO: 10734 - protein, 9 aa, Homo sapiens
  Table 1.2; ZNF560; ENSG00000198028; HLA -A*03:02
VVSSSLVDH

SEQ ID NO: 10735 - protein, 10 aa, Homo sapiens
  Table 1.2; ZNF560; ENSG00000198028; HLA -B*27:05
VVSSSLVDHL

SEQ ID NO: 10736 - protein, 9 aa, Homo sapiens
  Table 1.2; ZNF560; ENSG00000198028; HLA -B*08:01,HLA-B*51:01,HLA-B*54:01
WAIKHQTSV

SEQ ID NO: 10737 - protein, 9 aa, Homo sapiens
  Table 1.2; ZNF560; ENSG00000198028; HLA -A*33:03
WTLLDPAQR

SEQ ID NO: 10738 - protein, 8 aa, Homo sapiens
  Table 1.2; ZNF560; ENSG00000198028; HLA -B*08:01,HLA-B*46:01
YAKDLLSL

SEQ ID NO: 10739 - protein, 9 aa, Homo sapiens
  Table 1.2; ZNF560; ENSG00000198028; HLA -A*01:01,HLA-A*25:01,HLA-A*26:01,HLA-A*29:02,HLA-A*30:02, HLA-B*15:03,HLA-B*35:01,HLA-B*46:01,HLA-C*02:02,HLA-C*12:03
YAKDLLSLY

SEQ ID NO: 10740 - protein, 11 aa, Homo sapiens
  Table 1.2; ZNF560; ENSG00000198028; HLA -A*33:01
YAKDLLSLYNK

SEQ ID NO: 10741 - protein, 9 aa, Homo sapiens
  Table 1.2; ZNF560; ENSG00000198028; HLA -A*29:02
YCLTNCYQY

SEQ ID NO: 10742 - protein, 10 aa, Homo sapiens
  Table 1.2; ZNF560; ENSG00000198028; HLA -B*44:02,HLA-B*44:03
YEHKEYGKAF

SEQ ID NO: 10743 - protein, 9 aa, Homo sapiens
  Table 1.2; ZNF560; ENSG00000198028; HLA -A*23:01,HLA-A*24:02,HLA-A*30:01,HLA-A*32:01,HLA-B*08:01, HLA-B*15:01,HLA-B*15:03,HLA-B*18:01,HLA-B*27:02,HLA-B*37:01, HLA-B*40:01,HLA-B*40:02,HLA-B*44:02,HLA-B*44:03,HLA-B*49:01,
  HLA-C*07:04,HLA-C*16:04
YENVAKVGF

SEQ ID NO: 10744 - protein, 11 aa, Homo sapiens
  Table 1.2; ZNF560; ENSG00000198028; HLA -A*30:01
YENVAKVGFQL

SEQ ID NO: 10745 - protein, 10 aa, Homo sapiens
  Table 1.2; ZNF560; ENSG00000198028; HLA -A*29:02,HLA-A*30:02,HLA-B*46:01
YGKAFIYQSY

SEQ ID NO: 10746 - protein, 9 aa, Homo sapiens
  Table 1.2; ZNF560; ENSG00000198028; HLA -B*15:01,HLA-B*15:03,HLA-C*07:01
YKNLSSVGY

SEQ ID NO: 10747 - protein, 8 aa, Homo sapiens
  Table 1.2; ZNF560; ENSG00000198028; HLA -B*07:02,HLA-B*08:01,HLA-B*51:01,HLA-B*54:01
YPSLFGHL

SEQ ID NO: 10748 - protein, 9 aa, Homo sapiens
  Table 1.2; ZNF560; ENSG00000198028; HLA -A*33:01
YPSLFGHLR

SEQ ID NO: 10749 - protein, 10 aa, Homo sapiens
  Table 1.2; ZNF560; ENSG00000198028; HLA -B*54:01
YPSLFGHLRV

SEQ ID NO: 10750 - protein, 9 aa, Homo sapiens
  Table 1.2; ZNF560; ENSG00000198028; HLA -B*35:01,HLA-B*35:03,HLA-B*54:01
YPTHLNNHM

SEQ ID NO: 10751 - protein, 9 aa, Homo sapiens
  Table 1.2; ZNF560; ENSG00000198028; HLA -A*02:01,HLA-A*02:03,HLA-A*02:04,HLA-A*30:01
YQLFKPSLI

SEQ ID NO: 10752 - protein, 9 aa, Homo sapiens
  Table 1.2; ZNF560; ENSG00000198028; HLA -A*01:01
YRDVMLENY

SEQ ID NO: 10753 - protein, 9 aa, Homo sapiens
  Table 1.2; ZNF560; ENSG00000198028; HLA -A*01:01,HLA-A*29:02,HLA-A*30:02,HLA-B*18:01,HLA-B*35:01, HLA-B*55:01,HLA-B*58:01,HLA-C*04:01,HLA-C*05:01
YSDVMLENY

SEQ ID NO: 10754 - protein, 10 aa, Homo sapiens
  Table 1.2; ZNF560; ENSG00000198028; HLA -A*01:01
YSDVMLENYK

SEQ ID NO: 10755 - protein, 8 aa, Homo sapiens
  Table A; HLA-A*02:06; CREB3L1; V414I; 0
AADGIYTA

SEQ ID NO: 10756 - protein, 9 aa, Homo sapiens
  Table A; HLA-A*02:07; CREB3L1; V414I; 0
AADGIYTAS

SEQ ID NO: 10757 - protein, 9 aa, Homo sapiens
  Table A; HLA-A*02:05; SF3B1; R957Q; 0
AADLISQTA

SEQ ID NO: 10758 - protein, 9 aa, Homo sapiens
  Table A; HLA-A*02:07; SF3B1; R957Q; 0
AADLISQTA

SEQ ID NO: 10759 - protein, 9 aa, Homo sapiens
  Table A; HLA-B*15:02; SF3B1; R957Q; 0
AADLISQTA

SEQ ID NO: 10760 - protein, 9 aa, Homo sapiens
  Table A; HLA-B*35:02; SF3B1; R957Q; 0
AADLISQTA

SEQ ID NO: 10761 - protein, 9 aa, Homo sapiens
  Table A; HLA-B*35:03; SF3B1; R957Q; 0
AADLISQTA

SEQ ID NO: 10762 - protein, 9 aa, Homo sapiens
  Table A; HLA-B*35:12; SF3B1; R957Q; 0
AADLISQTA

SEQ ID NO: 10763 - protein, 9 aa, Homo sapiens
  Table A; HLA-B*48:01; SF3B1; R957Q; 0
AADLISQTA

SEQ ID NO: 10764 - protein, 9 aa, Homo sapiens
  Table A; HLA-B*54:01; SF3B1; R957Q; 0
AADLISQTA

SEQ ID NO: 10765 - protein, 9 aa, Homo sapiens
  Table A; HLA-B*55:02; SF3B1; R957Q; 0
AADLISQTA

SEQ ID NO: 10766 - protein, 9 aa, Homo sapiens
  Table A; HLA-B*56:01; SF3B1; R957Q; 0
AADLISQTA

SEQ ID NO: 10767 - protein, 9 aa, Homo sapiens
  Table A; HLA-B*58:01; SF3B1; R957Q; 0
AADLISQTA

SEQ ID NO: 10768 - protein, 9 aa, Homo sapiens
  Table A; HLA-C*05:01; SF3B1; R957Q; 1
AADLISQTA

SEQ ID NO: 10769 - protein, 9 aa, Homo sapiens
  Table A; HLA-C*08:01; SF3B1; R957Q; 0
AADLISQTA

SEQ ID NO: 10770 - protein, 9 aa, Homo sapiens
  Table A; HLA-C*08:02; SF3B1; R957Q; 1
AADLISQTA

SEQ ID NO: 10771 - protein, 10 aa, Homo sapiens
  Table A; HLA-A*02:01; SF3B1; R957Q; 1
AADLISQTAV

SEQ ID NO: 10772 - protein, 10 aa, Homo sapiens
  Table A; HLA-A*02:07; SF3B1; R957Q; 0
AADLISQTAV

SEQ ID NO: 10773 - protein, 10 aa, Homo sapiens
  Table A; HLA-C*05:01; SF3B1; R957Q; 1
AADLISQTAV

SEQ ID NO: 10774 - protein, 10 aa, Homo sapiens
  Table A; HLA-C*08:01; SF3B1; R957Q; 0
AADLISQTAV

SEQ ID NO: 10775 - protein, 10 aa, Homo sapiens
  Table A; HLA-C*08:02; SF3B1; R957Q; 1
AADLISQTAV

SEQ ID NO: 10776 - protein, 9 aa, Homo sapiens
  Table A; HLA-A*02:04; PPP2R1A; S256F; 0
AAEDKFWRV

SEQ ID NO: 10777 - protein, 9 aa, Homo sapiens
  Table A; HLA-A*02:06; PPP2R1A; S256F; 0
AAEDKFWRV

SEQ ID NO: 10778 - protein, 9 aa, Homo sapiens
  Table A; HLA-A*02:07; PPP2R1A; S256F; 0
AAEDKFWRV

SEQ ID NO: 10779 - protein, 9 aa, Homo sapiens
  Table A; HLA-A*68:02; PPP2R1A; S256F; 0
AAEDKFWRV

SEQ ID NO: 10780 - protein, 9 aa, Homo sapiens
  Table A; HLA-C*02:02; PPP2R1A; S256F; 0
AAEDKFWRV

SEQ ID NO: 10781 - protein, 9 aa, Homo sapiens
  Table A; HLA-C*05:01; PPP2R1A; S256F; 1
AAEDKFWRV

SEQ ID NO: 10782 - protein, 9 aa, Homo sapiens
  Table A; HLA-C*12:03; PPP2R1A; S256F; 1
AAEDKFWRV

SEQ ID NO: 10783 - protein, 9 aa, Homo sapiens
  Table A; HLA-C*15:02; PPP2R1A; S256F; 0
AAEDKFWRV

SEQ ID NO: 10784 - protein, 9 aa, Homo sapiens
  Table A; HLA-B*07:02; KRAS; G12A; 1
AAGVGKSAL

SEQ ID NO: 10785 - protein, 9 aa, Homo sapiens
  Table A; HLA-B*08:01; KRAS; G12A; 1
AAGVGKSAL

SEQ ID NO: 10786 - protein, 9 aa, Homo sapiens
  Table A; HLA-B*15:01; KRAS; G12A; 1
AAGVGKSAL

SEQ ID NO: 10787 - protein, 9 aa, Homo sapiens
  Table A; HLA-C*01:02; KRAS; G12A; 1
AAGVGKSAL

SEQ ID NO: 10788 - protein, 9 aa, Homo sapiens
  Table A; HLA-C*03:04; KRAS; G12A; 1
AAGVGKSAL

SEQ ID NO: 10789 - protein, 9 aa, Homo sapiens
  Table A; HLA-C*08:01; KRAS; G12A; 0
AAGVGKSAL

SEQ ID NO: 10790 - protein, 9 aa, Homo sapiens
  Table A; HLA-C*16:01; KRAS; G12A; 1
AAGVGKSAL

SEQ ID NO: 10791 - protein, 10 aa, Homo sapiens
  Table A; HLA-A*03:02; KDR; R1032Q; 0
AAQNILLSEK

SEQ ID NO: 10792 - protein, 10 aa, Homo sapiens
  Table A; HLA-A*11:01; KDR; R1032Q; 1
AAQNILLSEK

SEQ ID NO: 10793 - protein, 9 aa, Homo sapiens
  Table A; HLA-A*30:01; PCBP1; L100Q; 0
AASRPPVTQ

SEQ ID NO: 10794 - protein, 9 aa, Homo sapiens
  Table A; HLA-A*31:01; PCBP1; L100Q; 0
AASRPPVTQ

SEQ ID NO: 10795 - protein, 9 aa, Homo sapiens
  Table A; HLA-B*07:02; PCBP1; L100Q; 1
AASRPPVTQ

SEQ ID NO: 10796 - protein, 9 aa, Homo sapiens
  Table A; HLA-B*54:01; PCBP1; L100Q; 0
AASRPPVTQ

SEQ ID NO: 10797 - protein, 9 aa, Homo sapiens
  Table A; HLA-B*57:01; PCBP1; L100Q; 0
AASRPPVTQ

SEQ ID NO: 10798 - protein, 9 aa, Homo sapiens
  Table A; HLA-B*58:01; PCBP1; L100Q; 0
AASRPPVTQ

SEQ ID NO: 10799 - protein, 10 aa, Homo sapiens
  Table A; HLA-A*03:01; PCBP1; L100Q; 1
AASRPPVTQR

SEQ ID NO: 10800 - protein, 10 aa, Homo sapiens
  Table A; HLA-A*03:02; PCBP1; L100Q; 0
AASRPPVTQR

SEQ ID NO: 10801 - protein, 10 aa, Homo sapiens
  Table A; HLA-A*11:01; PCBP1; L100Q; 1
AASRPPVTQR

SEQ ID NO: 10802 - protein, 10 aa, Homo sapiens
  Table A; HLA-A*26:03; PCBP1; L100Q; 0
AASRPPVTQR

SEQ ID NO: 10803 - protein, 10 aa, Homo sapiens
  Table A; HLA-A*30:01; PCBP1; L100Q; 0
AASRPPVTQR

SEQ ID NO: 10804 - protein, 10 aa, Homo sapiens
  Table A; HLA-A*31:01; PCBP1; L100Q; 0
AASRPPVTQR

SEQ ID NO: 10805 - protein, 10 aa, Homo sapiens
  Table A; HLA-A*33:01; PCBP1; L100Q; 0
AASRPPVTQR

SEQ ID NO: 10806 - protein, 10 aa, Homo sapiens
  Table A; HLA-A*33:03; PCBP1; L100Q; 0
AASRPPVTQR

SEQ ID NO: 10807 - protein, 10 aa, Homo sapiens
  Table A; HLA-A*68:01; PCBP1; L100Q; 0
AASRPPVTQR

SEQ ID NO: 10808 - protein, 10 aa, Homo sapiens
  Table A; HLA-A*68:02; PCBP1; L100Q; 0
AASRPPVTQR

SEQ ID NO: 10809 - protein, 10 aa, Homo sapiens
  Table A; HLA-B*57:01; PCBP1; L100Q; 0
AASRPPVTQR

SEQ ID NO: 10810 - protein, 11 aa, Homo sapiens
  Table A; HLA-A*68:02; PCBP1; L100Q; 0
AASRPPVTQRL

SEQ ID NO: 10811 - protein, 9 aa, Homo sapiens
  Table A; HLA-B*07:02; KRAS; G12C; 1
ACGVGKSAL

SEQ ID NO: 10812 - protein, 9 aa, Homo sapiens
  Table A; HLA-C*01:02; KRAS; G12C; 1
ACGVGKSAL

SEQ ID NO: 10813 - protein, 9 aa, Homo sapiens
  Table A; HLA-B*07:02; NRAS; G12C; 1
ACGVGKSAL

SEQ ID NO: 10814 - protein, 9 aa, Homo sapiens
  Table A; HLA-C*01:02; NRAS; G12C; 0
ACGVGKSAL

SEQ ID NO: 10815 - protein, 10 aa, Homo sapiens
  Table A; HLA-A*02:03; CCND1; T286I; 0
ACIPTDVRDV

SEQ ID NO: 10816 - protein, 10 aa, Homo sapiens
  Table A; HLA-B*44:05; CCND1; T286I; 0
ACIPTDVRDV

SEQ ID NO: 10817 - protein, 8 aa, Homo sapiens
  Table A; HLA-B*48:01; CREB3L1; V414I; 0
ADGIYTAS

SEQ ID NO: 10818 - protein, 9 aa, Homo sapiens
  Table A; HLA-B*07:02; KRAS; G12D; 1
ADGVGKSAL

SEQ ID NO: 10819 - protein, 9 aa, Homo sapiens
  Table A; HLA-B*37:01; KRAS; G12D; 1
ADGVGKSAL

SEQ ID NO: 10820 - protein, 9 aa, Homo sapiens
  Table A; HLA-B*40:02; KRAS; G12D; 1
ADGVGKSAL

SEQ ID NO: 10821 - protein, 9 aa, Homo sapiens
  Table A; HLA-B*41:02; KRAS; G12D; 1
ADGVGKSAL

SEQ ID NO: 10822 - protein, 9 aa, Homo sapiens
  Table A; HLA-B*44:05; KRAS; G12D; 1
ADGVGKSAL

SEQ ID NO: 10823 - protein, 9 aa, Homo sapiens
  Table A; HLA-B*07:02; NRAS; G12D; 1
ADGVGKSAL

SEQ ID NO: 10824 - protein, 9 aa, Homo sapiens
  Table A; HLA-B*37:01; NRAS; G12D; 0
ADGVGKSAL

SEQ ID NO: 10825 - protein, 9 aa, Homo sapiens
  Table A; HLA-B*40:02; NRAS; G12D; 0
ADGVGKSAL

SEQ ID NO: 10826 - protein, 9 aa, Homo sapiens
  Table A; HLA-B*41:02; NRAS; G12D; 0
ADGVGKSAL

SEQ ID NO: 10827 - protein, 9 aa, Homo sapiens
  Table A; HLA-B*44:05; NRAS; G12D; 0
ADGVGKSAL

SEQ ID NO: 10828 - protein, 8 aa, Homo sapiens
  Table A; HLA-B*37:01; SF3B1; R957Q; 0
ADLISQTA

SEQ ID NO: 10829 - protein, 8 aa, Homo sapiens
  Table A; HLA-B*39:06; SF3B1; R957Q; 0
ADLISQTA

SEQ ID NO: 10830 - protein, 8 aa, Homo sapiens
  Table A; HLA-B*40:02; SF3B1; R957Q; 0
ADLISQTA

SEQ ID NO: 10831 - protein, 8 aa, Homo sapiens
  Table A; HLA-B*40:06; SF3B1; R957Q; 0
ADLISQTA

SEQ ID NO: 10832 - protein, 8 aa, Homo sapiens
  Table A; HLA-B*41:02; SF3B1; R957Q; 0
ADLISQTA

SEQ ID NO: 10833 - protein, 8 aa, Homo sapiens
  Table A; HLA-B*50:01; SF3B1; R957Q; 0
ADLISQTA

SEQ ID NO: 10834 - protein, 9 aa, Homo sapiens
  Table A; HLA-A*02:01; SF3B1; R957Q; 1
ADLISQTAV

SEQ ID NO: 10835 - protein, 9 aa, Homo sapiens
  Table A; HLA-A*02:05; SF3B1; R957Q; 0
ADLISQTAV

SEQ ID NO: 10836 - protein, 9 aa, Homo sapiens
  Table A; HLA-A*02:06; SF3B1; R957Q; 0
ADLISQTAV

SEQ ID NO: 10837 - protein, 9 aa, Homo sapiens
  Table A; HLA-A*30:01; SF3B1; R957Q; 0
ADLISQTAV

SEQ ID NO: 10838 - protein, 9 aa, Homo sapiens
  Table A; HLA-B*13:02; SF3B1; R957Q; 0
ADLISQTAV

SEQ ID NO: 10839 - protein, 9 aa, Homo sapiens
  Table A; HLA-B*37:01; SF3B1; R957Q; 0
ADLISQTAV

SEQ ID NO: 10840 - protein, 9 aa, Homo sapiens
  Table A; HLA-B*40:02; SF3B1; R957Q; 0
ADLISQTAV

SEQ ID NO: 10841 - protein, 9 aa, Homo sapiens
  Table A; HLA-B*40:06; SF3B1; R957Q; 0
ADLISQTAV

SEQ ID NO: 10842 - protein, 9 aa, Homo sapiens
  Table A; HLA-B*41:02; SF3B1; R957Q; 0
ADLISQTAV

SEQ ID NO: 10843 - protein, 9 aa, Homo sapiens
  Table A; HLA-B*44:05; SF3B1; R957Q; 0
ADLISQTAV

SEQ ID NO: 10844 - protein, 9 aa, Homo sapiens
  Table A; HLA-B*48:01; SF3B1; R957Q; 0
ADLISQTAV

SEQ ID NO: 10845 - protein, 9 aa, Homo sapiens
  Table A; HLA-B*49:01; SF3B1; R957Q; 0
ADLISQTAV

SEQ ID NO: 10846 - protein, 9 aa, Homo sapiens
  Table A; HLA-B*50:01; SF3B1; R957Q; 0
ADLISQTAV

SEQ ID NO: 10847 - protein, 9 aa, Homo sapiens
  Table A; HLA-C*08:03; SF3B1; R957Q; 0
ADLISQTAV

SEQ ID NO: 10848 - protein, 10 aa, Homo sapiens
  Table A; HLA-B*40:02; SF3B1; R957Q; 0
ADLISQTAVV

SEQ ID NO: 10849 - protein, 10 aa, Homo sapiens
  Table A; HLA-B*44:05; SF3B1; R957Q; 0
ADLISQTAVV

SEQ ID NO: 10850 - protein, 11 aa, Homo sapiens
  Table A; HLA-B*40:02; SF3B1; R957Q; 0
ADLISQTAVVM

SEQ ID NO: 10851 - protein, 11 aa, Homo sapiens
  Table A; HLA-B*44:05; SF3B1; R957Q; 0
ADLISQTAVVM

SEQ ID NO: 10852 - protein, 10 aa, Homo sapiens
  Table A; HLA-B*40:02; PTPRT; M903I; 0
ADLLQHITQI

SEQ ID NO: 10853 - protein, 10 aa, Homo sapiens
  Table A; HLA-B*44:05; PTPRT; M903I; 0
ADLLQHITQI

SEQ ID NO: 10854 - protein, 9 aa, Homo sapiens
  Table A; HLA-A*02:01; TPR; S2155L; 1
AEAIHLPQV

SEQ ID NO: 10855 - protein, 9 aa, Homo sapiens
  Table A; HLA-A*02:03; TPR; S2155L; 0
AEAIHLPQV

SEQ ID NO: 10856 - protein, 9 aa, Homo sapiens
  Table A; HLA-A*02:04; TPR; S2155L; 0
AEAIHLPQV

SEQ ID NO: 10857 - protein, 9 aa, Homo sapiens
  Table A; HLA-A*02:05; TPR; S2155L; 0
AEAIHLPQV

SEQ ID NO: 10858 - protein, 9 aa, Homo sapiens
  Table A; HLA-A*02:06; TPR; S2155L; 0
AEAIHLPQV

SEQ ID NO: 10859 - protein, 9 aa, Homo sapiens
  Table A; HLA-A*02:08; TPR; S2155L; 0
AEAIHLPQV

SEQ ID NO: 10860 - protein, 9 aa, Homo sapiens
  Table A; HLA-A*11:01; TPR; S2155L; 0
AEAIHLPQV

SEQ ID NO: 10861 - protein, 9 aa, Homo sapiens
  Table A; HLA-A*23:01; TPR; S2155L; 0
AEAIHLPQV

SEQ ID NO: 10862 - protein, 9 aa, Homo sapiens
  Table A; HLA-A*30:01; TPR; S2155L; 0
AEAIHLPQV

SEQ ID NO: 10863 - protein, 9 aa, Homo sapiens
  Table A; HLA-A*68:02; TPR; S2155L; 0
AEAIHLPQV

SEQ ID NO: 10864 - protein, 9 aa, Homo sapiens
  Table A; HLA-B*07:02; TPR; S2155L; 1
AEAIHLPQV

SEQ ID NO: 10865 - protein, 9 aa, Homo sapiens
  Table A; HLA-B*08:01; TPR; S2155L; 0
AEAIHLPQV

SEQ ID NO: 10866 - protein, 9 aa, Homo sapiens
  Table A; HLA-B*13:02; TPR; S2155L; 0
AEAIHLPQV

SEQ ID NO: 10867 - protein, 9 aa, Homo sapiens
  Table A; HLA-B*15:01; TPR; S2155L; 0
AEAIHLPQV

SEQ ID NO: 10868 - protein, 9 aa, Homo sapiens
  Table A; HLA-B*18:01; TPR; S2155L; 0
AEAIHLPQV

SEQ ID NO: 10869 - protein, 9 aa, Homo sapiens
  Table A; HLA-B*37:01; TPR; S2155L; 0
AEAIHLPQV

SEQ ID NO: 10870 - protein, 9 aa, Homo sapiens
  Table A; HLA-B*40:01; TPR; S2155L; 0
AEAIHLPQV

SEQ ID NO: 10871 - protein, 9 aa, Homo sapiens
  Table A; HLA-B*40:02; TPR; S2155L; 0
AEAIHLPQV

SEQ ID NO: 10872 - protein, 9 aa, Homo sapiens
  Table A; HLA-B*40:06; TPR; S2155L; 0
AEAIHLPQV

SEQ ID NO: 10873 - protein, 9 aa, Homo sapiens
  Table A; HLA-B*41:02; TPR; S2155L; 0
AEAIHLPQV

SEQ ID NO: 10874 - protein, 9 aa, Homo sapiens
  Table A; HLA-B*44:02; TPR; S2155L; 0
AEAIHLPQV

SEQ ID NO: 10875 - protein, 9 aa, Homo sapiens
  Table A; HLA-B*44:03; TPR; S2155L; 0
AEAIHLPQV

SEQ ID NO: 10876 - protein, 9 aa, Homo sapiens
  Table A; HLA-B*44:05; TPR; S2155L; 0
AEAIHLPQV

SEQ ID NO: 10877 - protein, 9 aa, Homo sapiens
  Table A; HLA-B*49:01; TPR; S2155L; 0
AEAIHLPQV

SEQ ID NO: 10878 - protein, 9 aa, Homo sapiens
  Table A; HLA-B*50:01; TPR; S2155L; 0
AEAIHLPQV

SEQ ID NO: 10879 - protein, 9 aa, Homo sapiens
  Table A; HLA-B*58:01; TPR; S2155L; 0
AEAIHLPQV

SEQ ID NO: 10880 - protein, 9 aa, Homo sapiens
  Table A; HLA-C*03:02; TPR; S2155L; 0
AEAIHLPQV

SEQ ID NO: 10881 - protein, 9 aa, Homo sapiens
  Table A; HLA-C*16:04; TPR; S2155L; 0
AEAIHLPQV

SEQ ID NO: 10882 - protein, 10 aa, Homo sapiens
  Table A; HLA-A*02:05; TPR; S2155L; 0
AEAIHLPQVA

SEQ ID NO: 10883 - protein, 10 aa, Homo sapiens
  Table A; HLA-A*02:08; TPR; S2155L; 0
AEAIHLPQVA

SEQ ID NO: 10884 - protein, 10 aa, Homo sapiens
  Table A; HLA-A*30:01; TPR; S2155L; 0
AEAIHLPQVA

SEQ ID NO: 10885 - protein, 10 aa, Homo sapiens
  Table A; HLA-B*40:02; TPR; S2155L; 0
AEAIHLPQVA

SEQ ID NO: 10886 - protein, 10 aa, Homo sapiens
  Table A; HLA-B*40:06; TPR; S2155L; 0
AEAIHLPQVA

SEQ ID NO: 10887 - protein, 10 aa, Homo sapiens
  Table A; HLA-B*41:02; TPR; S2155L; 0
AEAIHLPQVA

SEQ ID NO: 10888 - protein, 10 aa, Homo sapiens
  Table A; HLA-B*44:05; TPR; S2155L; 0
AEAIHLPQVA

SEQ ID NO: 10889 - protein, 10 aa, Homo sapiens
  Table A; HLA-B*49:01; TPR; S2155L; 0
AEAIHLPQVA

SEQ ID NO: 10890 - protein, 10 aa, Homo sapiens
  Table A; HLA-B*50:01; TPR; S2155L; 0
AEAIHLPQVA

SEQ ID NO: 10891 - protein, 8 aa, Homo sapiens
  Table A; HLA-B*49:01; PPP2R1A; S256F; 0
AEDKFWRV

SEQ ID NO: 10892 - protein, 10 aa, Homo sapiens
  Table A; HLA-B*44:03; PPP2R1A; S256F; 1
AEDKFWRVRY

SEQ ID NO: 10893 - protein, 9 aa, Homo sapiens
  Table A; HLA-B*40:01; CSMD3; R100Q; 1
AEEQNRIQI

SEQ ID NO: 10894 - protein, 9 aa, Homo sapiens
  Table A; HLA-B*40:02; CSMD3; R100Q; 0
AEEQNRIQI

SEQ ID NO: 10895 - protein, 9 aa, Homo sapiens
  Table A; HLA-B*41:02; CSMD3; R100Q; 0
AEEQNRIQI

SEQ ID NO: 10896 - protein, 9 aa, Homo sapiens
  Table A; HLA-B*44:02; CSMD3; R100Q; 1
AEEQNRIQI

SEQ ID NO: 10897 - protein, 9 aa, Homo sapiens
  Table A; HLA-B*44:03; CSMD3; R100Q; 1
AEEQNRIQI

SEQ ID NO: 10898 - protein, 9 aa, Homo sapiens
  Table A; HLA-B*44:05; CSMD3; R100Q; 0
AEEQNRIQI

SEQ ID NO: 10899 - protein, 9 aa, Homo sapiens
  Table A; HLA-B*49:01; CSMD3; R100Q; 0
AEEQNRIQI

SEQ ID NO: 10900 - protein, 10 aa, Homo sapiens
  Table A; HLA-B*41:02; CSMD3; R100Q; 0
AEEQNRIQIV

SEQ ID NO: 10901 - protein, 10 aa, Homo sapiens
  Table A; HLA-B*44:05; CSMD3; R100Q; 0
AEEQNRIQIV

SEQ ID NO: 10902 - protein, 10 aa, Homo sapiens
  Table A; HLA-B*49:01; CSMD3; R100Q; 0
AEEQNRIQIV

SEQ ID NO: 10903 - protein, 11 aa, Homo sapiens
  Table A; HLA-B*40:01; CSMD3; R100Q; 1
AEEQNRIQIVF

SEQ ID NO: 10904 - protein, 11 aa, Homo sapiens
  Table A; HLA-B*40:02; CSMD3; R100Q; 0
AEEQNRIQIVF

SEQ ID NO: 10905 - protein, 11 aa, Homo sapiens
  Table A; HLA-B*41:02; CSMD3; R100Q; 0
AEEQNRIQIVF

SEQ ID NO: 10906 - protein, 11 aa, Homo sapiens
  Table A; HLA-B*44:02; CSMD3; R100Q; 1
AEEQNRIQIVF

SEQ ID NO: 10907 - protein, 11 aa, Homo sapiens
  Table A; HLA-B*44:03; CSMD3; R100Q; 1
AEEQNRIQIVF

SEQ ID NO: 10908 - protein, 11 aa, Homo sapiens
  Table A; HLA-B*44:05; CSMD3; R100Q; 0
AEEQNRIQIVF

SEQ ID NO: 10909 - protein, 9 aa, Homo sapiens
  Table A; HLA-B*49:01; ATM; R2691C; 0
AEFCLAGGV

SEQ ID NO: 10910 - protein, 11 aa, Homo sapiens
  Table A; HLA-B*40:01; ATM; R2691C; 0
AEFCLAGGVNL

SEQ ID NO: 10911 - protein, 11 aa, Homo sapiens
  Table A; HLA-B*40:02; ATM; R2691C; 0
AEFCLAGGVNL

SEQ ID NO: 10912 - protein, 11 aa, Homo sapiens
  Table A; HLA-B*44:05; ATM; R2691C; 0
AEFCLAGGVNL

SEQ ID NO: 10913 - protein, 8 aa, Homo sapiens
  Table A; HLA-B*49:01; TNC; L1626I; 0
AEPEVDNI

SEQ ID NO: 10914 - protein, 9 aa, Homo sapiens
  Table A; HLA-B*40:01; TNC; L1626I; 1
AEPEVDNIL

SEQ ID NO: 10915 - protein, 9 aa, Homo sapiens
  Table A; HLA-B*40:02; TNC; L1626I; 0
AEPEVDNIL

SEQ ID NO: 10916 - protein, 9 aa, Homo sapiens
  Table A; HLA-B*41:02; TNC; L1626I; 0
AEPEVDNIL

SEQ ID NO: 10917 - protein, 9 aa, Homo sapiens
  Table A; HLA-B*44:05; TNC; L1626I; 0
AEPEVDNIL

SEQ ID NO: 10918 - protein, 10 aa, Homo sapiens
  Table A; HLA-B*40:02; TNC; L1626I; 0
AEPEVDNILV

SEQ ID NO: 10919 - protein, 10 aa, Homo sapiens
  Table A; HLA-B*44:05; TNC; L1626I; 0
AEPEVDNILV

SEQ ID NO: 10920 - protein, 10 aa, Homo sapiens
  Table A; HLA-B*49:01; TNC; L1626I; 0
AEPEVDNILV

SEQ ID NO: 10921 - protein, 10 aa, Homo sapiens
  Table A; HLA-B*40:02; POLE; S297F; 0
AETDQIMMIF

SEQ ID NO: 10922 - protein, 10 aa, Homo sapiens
  Table A; HLA-B*44:02; POLE; S297F; 0
AETDQIMMIF

SEQ ID NO: 10923 - protein, 10 aa, Homo sapiens
  Table A; HLA-B*44:03; POLE; S297F; 0
AETDQIMMIF

SEQ ID NO: 10924 - protein, 10 aa, Homo sapiens
  Table A; HLA-B*44:05; POLE; S297F; 0
AETDQIMMIF

SEQ ID NO: 10925 - protein, 11 aa, Homo sapiens
  Table A; HLA-B*44:03; POLE; S297F; 0
AETDQIMMIFY

SEQ ID NO: 10926 - protein, 10 aa, Homo sapiens
  Table A; HLA-A*02:01; RAC1; P29L; 1
AFLGEYIPTV

SEQ ID NO: 10927 - protein, 10 aa, Homo sapiens
  Table A; HLA-A*02:03; RAC1; P29L; 0
AFLGEYIPTV

SEQ ID NO: 10928 - protein, 10 aa, Homo sapiens
  Table A; HLA-A*02:04; RAC1; P29L; 0
AFLGEYIPTV

SEQ ID NO: 10929 - protein, 10 aa, Homo sapiens
  Table A; HLA-A*30:01; RAC1; P29L; 0
AFLGEYIPTV

SEQ ID NO: 10930 - protein, 11 aa, Homo sapiens
  Table A; HLA-A*23:01; RAC1; P29L; 0
AFLGEYIPTVF

SEQ ID NO: 10931 - protein, 9 aa, Homo sapiens
  Table A; HLA-B*48:01; RAC1; P29S; 0
AFSGEYIPT

SEQ ID NO: 10932 - protein, 9 aa, Homo sapiens
  Table A; HLA-C*08:03; RAC1; P29S; 0
AFSGEYIPT

SEQ ID NO: 10933 - protein, 10 aa, Homo sapiens
  Table A; HLA-A*02:01; RAC1; P29S; 1
AFSGEYIPTV

SEQ ID NO: 10934 - protein, 10 aa, Homo sapiens
  Table A; HLA-A*02:04; RAC1; P29S; 0
AFSGEYIPTV

SEQ ID NO: 10935 - protein, 11 aa, Homo sapiens
  Table A; HLA-A*23:01; RAC1; P29S; 0
AFSGEYIPTVF

SEQ ID NO: 10936 - protein, 9 aa, Homo sapiens
  Table A; HLA-A*30:04; CDKN2A; D108Y; 0
AGARLDVRY

SEQ ID NO: 10937 - protein, 9 aa, Homo sapiens
  Table A; HLA-B*15:01; CDKN2A; D108Y; 1
AGARLDVRY

SEQ ID NO: 10938 - protein, 9 aa, Homo sapiens
  Table A; HLA-B*35:01; CDKN2A; D108Y; 1
AGARLDVRY

SEQ ID NO: 10939 - protein, 9 aa, Homo sapiens
  Table A; HLA-B*57:01; CDKN2A; D108Y; 0
AGARLDVRY

SEQ ID NO: 10940 - protein, 10 aa, Homo sapiens
  Table A; HLA-A*11:01; CTNNB1; S37A; 1
AGATTTAPSL

SEQ ID NO: 10941 - protein, 10 aa, Homo sapiens
  Table A; HLA-B*40:02; CTNNB1; S37A; 0
AGATTTAPSL

SEQ ID NO: 10942 - protein, 10 aa, Homo sapiens
  Table A; HLA-B*44:05; CTNNB1; S37A; 0
AGATTTAPSL

SEQ ID NO: 10943 - protein, 9 aa, Homo sapiens
  Table A; HLA-B*07:02; KRAS; G13C; 1
AGCVGKSAL

SEQ ID NO: 10944 - protein, 9 aa, Homo sapiens
  Table A; HLA-B*08:01; KRAS; G13C; 1
AGCVGKSAL

SEQ ID NO: 10945 - protein, 9 aa, Homo sapiens
  Table A; HLA-B*07:02; KRAS; G13D; 1
AGDVGKSAL

SEQ ID NO: 10946 - protein, 9 aa, Homo sapiens
  Table A; HLA-B*08:01; KRAS; G13D; 1
AGDVGKSAL

SEQ ID NO: 10947 - protein, 9 aa, Homo sapiens
  Table A; HLA-B*15:01; KRAS; G13D; 1
AGDVGKSAL

SEQ ID NO: 10948 - protein, 9 aa, Homo sapiens
  Table A; HLA-B*15:13; KRAS; G13D; 0
AGDVGKSAL

SEQ ID NO: 10949 - protein, 9 aa, Homo sapiens
  Table A; HLA-B*35:02; KRAS; G13D; 0
AGDVGKSAL

SEQ ID NO: 10950 - protein, 9 aa, Homo sapiens
  Table A; HLA-B*39:01; KRAS; G13D; 0
AGDVGKSAL

SEQ ID NO: 10951 - protein, 9 aa, Homo sapiens
  Table A; HLA-B*41:02; KRAS; G13D; 0
AGDVGKSAL

SEQ ID NO: 10952 - protein, 9 aa, Homo sapiens
  Table A; HLA-C*03:04; KRAS; G13D; 1
AGDVGKSAL

SEQ ID NO: 10953 - protein, 9 aa, Homo sapiens
  Table A; HLA-C*05:01; KRAS; G13D; 1
AGDVGKSAL

SEQ ID NO: 10954 - protein, 9 aa, Homo sapiens
  Table A; HLA-C*08:01; KRAS; G13D; 0
AGDVGKSAL

SEQ ID NO: 10955 - protein, 9 aa, Homo sapiens
  Table A; HLA-C*08:02; KRAS; G13D; 1
AGDVGKSAL

SEQ ID NO: 10956 - protein, 8 aa, Homo sapiens
  Table A; HLA-B*39:06; KRAS; Q61H; 0
AGHEEYSA

SEQ ID NO: 10957 - protein, 8 aa, Homo sapiens
  Table A; HLA-B*39:06; NRAS; Q61H; 0
AGHEEYSA

SEQ ID NO: 10958 - protein, 9 aa, Homo sapiens
  Table A; HLA-B*15:01; KRAS; Q61H; 1
AGHEEYSAM

SEQ ID NO: 10959 - protein, 9 aa, Homo sapiens
  Table A; HLA-B*35:02; KRAS; Q61H; 0
AGHEEYSAM

SEQ ID NO: 10960 - protein, 9 aa, Homo sapiens
  Table A; HLA-B*35:08; KRAS; Q61H; 0
AGHEEYSAM

SEQ ID NO: 10961 - protein, 9 aa, Homo sapiens
  Table A; HLA-B*35:12; KRAS; Q61H; 0
AGHEEYSAM

SEQ ID NO: 10962 - protein, 9 aa, Homo sapiens
  Table A; HLA-C*08:01; KRAS; Q61H; 0
AGHEEYSAM

SEQ ID NO: 10963 - protein, 9 aa, Homo sapiens
  Table A; HLA-B*15:01; NRAS; Q61H; 1
AGHEEYSAM

SEQ ID NO: 10964 - protein, 9 aa, Homo sapiens
  Table A; HLA-B*15:13; NRAS; Q61H; 0
AGHEEYSAM

SEQ ID NO: 10965 - protein, 9 aa, Homo sapiens
  Table A; HLA-B*35:01; NRAS; Q61H; 1
AGHEEYSAM

SEQ ID NO: 10966 - protein, 9 aa, Homo sapiens
  Table A; HLA-B*35:02; NRAS; Q61H; 0
AGHEEYSAM

SEQ ID NO: 10967 - protein, 9 aa, Homo sapiens
  Table A; HLA-B*35:08; NRAS; Q61H; 0
AGHEEYSAM

SEQ ID NO: 10968 - protein, 9 aa, Homo sapiens
  Table A; HLA-B*35:12; NRAS; Q61H; 0
AGHEEYSAM

SEQ ID NO: 10969 - protein, 9 aa, Homo sapiens
  Table A; HLA-C*08:01; NRAS; Q61H; 0
AGHEEYSAM

SEQ ID NO: 10970 - protein, 9 aa, Homo sapiens
  Table A; HLA-B*15:01; HRAS; Q61K; 0
AGKEEYSAM

SEQ ID NO: 10971 - protein, 9 aa, Homo sapiens
  Table A; HLA-B*15:01; NRAS; Q61K; 1
AGKEEYSAM

SEQ ID NO: 10972 - protein, 10 aa, Homo sapiens
  Table A; HLA-A*31:01; NRAS; Q61K; 1
AGKEEYSAMR

SEQ ID NO: 10973 - protein, 9 aa, Homo sapiens
  Table A; HLA-B*15:01; PTEN; R130G; 1
AGKGGTGVM

SEQ ID NO: 10974 - protein, 9 aa, Homo sapiens
  Table A; HLA-B*46:01; PTEN; R130G; 0
AGKGGTGVM

SEQ ID NO: 10975 - protein, 9 aa, Homo sapiens
  Table A; HLA-B*15:01; PTEN; R130L; 1
AGKGLTGVM

SEQ ID NO: 10976 - protein, 9 aa, Homo sapiens
  Table A; HLA-B*41:02; PTEN; R130L; 0
AGKGLTGVM

SEQ ID NO: 10977 - protein, 9 aa, Homo sapiens
  Table A; HLA-B*07:02; PTEN; R130P; 1
AGKGPTGVM

SEQ ID NO: 10978 - protein, 9 aa, Homo sapiens
  Table A; HLA-B*15:01; PTEN; R130P; 1
AGKGPTGVM

SEQ ID NO: 10979 - protein, 9 aa, Homo sapiens
  Table A; HLA-B*15:03; PTEN; R130P; 0
AGKGPTGVM

SEQ ID NO: 10980 - protein, 9 aa, Homo sapiens
  Table A; HLA-B*41:02; PTEN; R130P; 0
AGKGPTGVM

SEQ ID NO: 10981 - protein, 10 aa, Homo sapiens
  Table A; HLA-B*44:05; PTEN; R130P; 0
AGKGPTGVMI

SEQ ID NO: 10982 - protein, 9 aa, Homo sapiens
  Table A; HLA-B*15:01; PTEN; R130Q; 1
AGKGQTGVM

SEQ ID NO: 10983 - protein, 8 aa, Homo sapiens
  Table A; HLA-B*39:06; KRAS; Q61L; 0
AGLEEYSA

SEQ ID NO: 10984 - protein, 8 aa, Homo sapiens
  Table A; HLA-B*39:06; NRAS; Q61L; 0
AGLEEYSA

SEQ ID NO: 10985 - protein, 9 aa, Homo sapiens
  Table A; HLA-B*15:01; KRAS; Q61L; 0
AGLEEYSAM

SEQ ID NO: 10986 - protein, 9 aa, Homo sapiens
  Table A; HLA-B*15:02; KRAS; Q61L; 0
AGLEEYSAM

SEQ ID NO: 10987 - protein, 9 aa, Homo sapiens
  Table A; HLA-B*35:08; KRAS; Q61L; 0
AGLEEYSAM

SEQ ID NO: 10988 - protein, 9 aa, Homo sapiens
  Table A; HLA-B*35:12; KRAS; Q61L; 0
AGLEEYSAM

SEQ ID NO: 10989 - protein, 9 aa, Homo sapiens
  Table A; HLA-C*08:01; KRAS; Q61L; 0
AGLEEYSAM

SEQ ID NO: 10990 - protein, 9 aa, Homo sapiens
  Table A; HLA-B*15:01; NRAS; Q61L; 1
AGLEEYSAM

SEQ ID NO: 10991 - protein, 9 aa, Homo sapiens
  Table A; HLA-B*15:02; NRAS; Q61L; 0
AGLEEYSAM

SEQ ID NO: 10992 - protein, 9 aa, Homo sapiens
  Table A; HLA-B*35:01; NRAS; Q61L; 1
AGLEEYSAM

SEQ ID NO: 10993 - protein, 9 aa, Homo sapiens
  Table A; HLA-B*35:02; NRAS; Q61L; 0
AGLEEYSAM

SEQ ID NO: 10994 - protein, 9 aa, Homo sapiens
  Table A; HLA-B*35:08; NRAS; Q61L; 0
AGLEEYSAM

SEQ ID NO: 10995 - protein, 9 aa, Homo sapiens
  Table A; HLA-B*35:12; NRAS; Q61L; 0
AGLEEYSAM

SEQ ID NO: 10996 - protein, 9 aa, Homo sapiens
  Table A; HLA-B*48:01; NRAS; Q61L; 0
AGLEEYSAM

SEQ ID NO: 10997 - protein, 9 aa, Homo sapiens
  Table A; HLA-C*08:01; NRAS; Q61L; 0
AGLEEYSAM

SEQ ID NO: 10998 - protein, 10 aa, Homo sapiens
  Table A; HLA-B*27:02; NRAS; Q61L; 0
AGLEEYSAMR

SEQ ID NO: 10999 - protein, 9 aa, Homo sapiens
  Table A; HLA-B*07:02; KRAS; Q61R; 1
AGREEYSAM

SEQ ID NO: 11000 - protein, 9 aa, Homo sapiens
  Table A; HLA-B*15:01; KRAS; Q61R; 0
AGREEYSAM

SEQ ID NO: 11001 - protein, 9 aa, Homo sapiens
  Table A; HLA-B*07:02; NRAS; Q61R; 1
AGREEYSAM

SEQ ID NO: 11002 - protein, 9 aa, Homo sapiens
  Table A; HLA-B*15:01; NRAS; Q61R; 1
AGREEYSAM

SEQ ID NO: 11003 - protein, 9 aa, Homo sapiens
  Table A; HLA-B*07:02; NRAS; G13R; 1
AGRVGKSAL

SEQ ID NO: 11004 - protein, 9 aa, Homo sapiens
  Table A; HLA-B*08:01; NRAS; G13R; 1
AGRVGKSAL

SEQ ID NO: 11005 - protein, 9 aa, Homo sapiens
  Table A; HLA-B*41:02; NRAS; G13R; 0
AGRVGKSAL

SEQ ID NO: 11006 - protein, 8 aa, Homo sapiens
  Table A; HLA-B*07:02; KRAS; G12A; 1
AGVGKSAL

SEQ ID NO: 11007 - protein, 8 aa, Homo sapiens
  Table A; HLA-B*08:01; KRAS; G12A; 1
AGVGKSAL

SEQ ID NO: 11008 - protein, 8 aa, Homo sapiens
  Table A; HLA-B*14:02; KRAS; G12A; 1
AGVGKSAL

SEQ ID NO: 11009 - protein, 8 aa, Homo sapiens
  Table A; HLA-B*41:02; KRAS; G12A; 0
AGVGKSAL

SEQ ID NO: 11010 - protein, 10 aa, Homo sapiens
  Table A; HLA-B*13:02; KRAS; G12A; 1
AGVGKSALTI

SEQ ID NO: 11011 - protein, 9 aa, Homo sapiens
  Table A; HLA-B*13:01; ARHGEF12; R113Q; 0
AGVQTGDQI

SEQ ID NO: 11012 - protein, 9 aa, Homo sapiens
  Table A; HLA-B*13:02; ARHGEF12; R113Q; 0
AGVQTGDQI

SEQ ID NO: 11013 - protein, 9 aa, Homo sapiens
  Table A; HLA-B*38:01; ARHGEF12; R113Q; 0
AGVQTGDQI

SEQ ID NO: 11014 - protein, 11 aa, Homo sapiens
  Table A; HLA-A*11:01; ARHGEF12; R113Q; 0
AGVQTGDQIIK

SEQ ID NO: 11015 - protein, 11 aa, Homo sapiens
  Table A; HLA-B*27:02; ARHGEF12; R113Q; 0
AGVQTGDQIIK

SEQ ID NO: 11016 - protein, 10 aa, Homo sapiens
  Table A; HLA-B*15:10; SIRPA; V233I; 0
AHITLQGDPL

SEQ ID NO: 11017 - protein, 10 aa, Homo sapiens
  Table A; HLA-B*38:01; SIRPA; V233I; 0
AHITLQGDPL

SEQ ID NO: 11018 - protein, 10 aa, Homo sapiens
  Table A; HLA-B*39:01; SIRPA; V233I; 0
AHITLQGDPL

SEQ ID NO: 11019 - protein, 10 aa, Homo sapiens
  Table A; HLA-B*40:02; SIRPA; V233I; 0
AHITLQGDPL

SEQ ID NO: 11020 - protein, 10 aa, Homo sapiens
  Table A; HLA-B*48:01; SIRPA; V233I; 0
AHITLQGDPL

SEQ ID NO: 11021 - protein, 10 aa, Homo sapiens
  Table A; HLA-C*08:03; SIRPA; V233I; 0
AHITLQGDPL

SEQ ID NO: 11022 - protein, 9 aa, Homo sapiens
  Table A; HLA-B*39:06; ACVR1; R206H; 0
AHQITLLEC

SEQ ID NO: 11023 - protein, 11 aa, Homo sapiens
  Table A; HLA-B*38:01; GRIN2A; R1067W; 0
AHSDISETSNW

SEQ ID NO: 11024 - protein, 10 aa, Homo sapiens
  Table A; HLA-B*15:10; CHST11; A159T; 0
AHVSTNLKTL

SEQ ID NO: 11025 - protein, 9 aa, Homo sapiens
  Table A; HLA-B*15:01; TP53; Y163H; 0
AIHKQSQHM

SEQ ID NO: 11026 - protein, 10 aa, Homo sapiens
  Table A; HLA-A*02:01; TPR; S2155L; 1
AIHLPQVAGV

SEQ ID NO: 11027 - protein, 10 aa, Homo sapiens
  Table A; HLA-A*02:03; TPR; S2155L; 0
AIHLPQVAGV

SEQ ID NO: 11028 - protein, 10 aa, Homo sapiens
  Table A; HLA-A*02:04; TPR; S2155L; 0
AIHLPQVAGV

SEQ ID NO: 11029 - protein, 10 aa, Homo sapiens
  Table A; HLA-A*02:07; TPR; S2155L; 0
AIHLPQVAGV

SEQ ID NO: 11030 - protein, 10 aa, Homo sapiens
  Table A; HLA-A*02:08; TPR; S2155L; 0
AIHLPQVAGV

SEQ ID NO: 11031 - protein, 10 aa, Homo sapiens
  Table A; HLA-B*40:02; TPR; S2155L; 0
AIHLPQVAGV

SEQ ID NO: 11032 - protein, 10 aa, Homo sapiens
  Table A; HLA-A*03:01; PIK3CA; E542K; 1
AISTRDPLSK

SEQ ID NO: 11033 - protein, 10 aa, Homo sapiens
  Table A; HLA-A*03:02; PIK3CA; E542K; 0
AISTRDPLSK

SEQ ID NO: 11034 - protein, 10 aa, Homo sapiens
  Table A; HLA-A*02:03; PIK3CA; E542V; 0
AISTRDPLSV

SEQ ID NO: 11035 - protein, 8 aa, Homo sapiens
  Table A; HLA-B*08:01; AXIN1; R146Q; 1
AIYQKYIL

SEQ ID NO: 11036 - protein, 10 aa, Homo sapiens
  Table A; HLA-A*02:04; FGFR2; C382R; 0
AIYRIGVFLI

SEQ ID NO: 11037 - protein, 9 aa, Homo sapiens
  Table A; HLA-B*15:03; TP53; S127F; 0
AKSVTCTYF

SEQ ID NO: 11038 - protein, 8 aa, Homo sapiens
  Table A; HLA-B*15:03; TP53; C141Y; 0
AKTYPVQL

SEQ ID NO: 11039 - protein, 8 aa, Homo sapiens
  Table A; HLA-B*48:01; TP53; C141Y; 0
AKTYPVQL

SEQ ID NO: 11040 - protein, 9 aa, Homo sapiens
  Table A; HLA-A*02:03; PIK3CA; M1043V; 0
ALEYFMKQV

SEQ ID NO: 11041 - protein, 9 aa, Homo sapiens
  Table A; HLA-A*02:07; PIK3CA; M1043V; 0
ALEYFMKQV

SEQ ID NO: 11042 - protein, 9 aa, Homo sapiens
  Table A; HLA-A*02:03; PIK3CA; H1047L; 0
ALHGGWTTK

SEQ ID NO: 11043 - protein, 9 aa, Homo sapiens
  Table A; HLA-A*03:01; PIK3CA; H1047L; 1
ALHGGWTTK

SEQ ID NO: 11044 - protein, 9 aa, Homo sapiens
  Table A; HLA-A*03:02; PIK3CA; H1047L; 0
ALHGGWTTK

SEQ ID NO: 11045 - protein, 9 aa, Homo sapiens
  Table A; HLA-A*11:01; PIK3CA; H1047L; 1
ALHGGWTTK

SEQ ID NO: 11046 - protein, 9 aa, Homo sapiens
  Table A; HLA-A*03:01; EZH2; E745K; 1
ALKYVGIKR

SEQ ID NO: 11047 - protein, 9 aa, Homo sapiens
  Table A; HLA-A*31:01; EZH2; E745K; 0
ALKYVGIKR

SEQ ID NO: 11048 - protein, 9 aa, Homo sapiens
  Table A; HLA-A*33:03; EZH2; E745K; 0
ALKYVGIKR

SEQ ID NO: 11049 - protein, 9 aa, Homo sapiens
  Table A; HLA-A*02:04; BAZ1A; R1480C; 0
ALNIICEKV

SEQ ID NO: 11050 - protein, 9 aa, Homo sapiens
  Table A; HLA-B*13:02; BAZ1A; R1480C; 0
ALNIICEKV

SEQ ID NO: 11051 - protein, 9 aa, Homo sapiens
  Table A; HLA-A*02:01; TP53; C135F; 1
ALNKMFFQL

SEQ ID NO: 11052 - protein, 9 aa, Homo sapiens
  Table A; HLA-A*02:03; TP53; C135F; 0
ALNKMFFQL

SEQ ID NO: 11053 - protein, 9 aa, Homo sapiens
  Table A; HLA-A*02:04; TP53; C135F; 0
ALNKMFFQL

SEQ ID NO: 11054 - protein, 9 aa, Homo sapiens
  Table A; HLA-A*02:07; TP53; C135F; 0
ALNKMFFQL

SEQ ID NO: 11055 - protein, 9 aa, Homo sapiens
  Table A; HLA-A*03:01; TP53; C135F; 1
ALNKMFFQL

SEQ ID NO: 11056 - protein, 9 aa, Homo sapiens
  Table A; HLA-A*02:01; TP53; F134L; 1
ALNKMLCQL

SEQ ID NO: 11057 - protein, 9 aa, Homo sapiens
  Table A; HLA-A*02:03; TP53; F134L; 0
ALNKMLCQL

SEQ ID NO: 11058 - protein, 9 aa, Homo sapiens
  Table A; HLA-A*02:04; TP53; F134L; 0
ALNKMLCQL

SEQ ID NO: 11059 - protein, 9 aa, Homo sapiens
  Table A; HLA-A*02:01; TP53; K132N; 1
ALNNMFCQL

SEQ ID NO: 11060 - protein, 9 aa, Homo sapiens
  Table A; HLA-A*02:03; TP53; K132N; 0
ALNNMFCQL

SEQ ID NO: 11061 - protein, 9 aa, Homo sapiens
  Table A; HLA-A*02:04; TP53; K132N; 0
ALNNMFCQL

SEQ ID NO: 11062 - protein, 9 aa, Homo sapiens
  Table A; HLA-A*02:07; TP53; K132N; 0
ALNNMFCQL

SEQ ID NO: 11063 - protein, 9 aa, Homo sapiens
  Table A; HLA-A*03:01; TP53; K132N; 1
ALNNMFCQL

SEQ ID NO: 11064 - protein, 9 aa, Homo sapiens
  Table A; HLA-A*31:01; TP53; K132N; 0
ALNNMFCQL

SEQ ID NO: 11065 - protein, 9 aa, Homo sapiens
  Table A; HLA-A*02:04; TP53; K132R; 0
ALNRMFCQL

SEQ ID NO: 11066 - protein, 8 aa, Homo sapiens
  Table A; HLA-A*31:01; MTOR; S2215Y; 0
ANDPTYLR

SEQ ID NO: 11067 - protein, 8 aa, Homo sapiens
  Table A; HLA-A*33:03; MTOR; S2215Y; 0
ANDPTYLR

SEQ ID NO: 11068 - protein, 9 aa, Homo sapiens
  Table A; HLA-A*03:01; MTOR; S2215Y; 1
ANDPTYLRK

SEQ ID NO: 11069 - protein, 9 aa, Homo sapiens
  Table A; HLA-A*03:02; MTOR; S2215Y; 0
ANDPTYLRK

SEQ ID NO: 11070 - protein, 9 aa, Homo sapiens
  Table A; HLA-A*11:01; MTOR; S2215Y; 1
ANDPTYLRK

SEQ ID NO: 11071 - protein, 9 aa, Homo sapiens
  Table A; HLA-B*35:01; CDH11; K357T; 1
ANVHIDPTF

SEQ ID NO: 11072 - protein, 9 aa, Homo sapiens
  Table A; HLA-B*35:02; CDH11; K357T; 0
ANVHIDPTF

SEQ ID NO: 11073 - protein, 9 aa, Homo sapiens
  Table A; HLA-B*35:03; CDH11; K357T; 0
ANVHIDPTF

SEQ ID NO: 11074 - protein, 9 aa, Homo sapiens
  Table A; HLA-B*35:12; CDH11; K357T; 0
ANVHIDPTF

SEQ ID NO: 11075 - protein, 9 aa, Homo sapiens
  Table A; HLA-B*57:01; CDH11; K357T; 0
ANVHIDPTF

SEQ ID NO: 11076 - protein, 9 aa, Homo sapiens
  Table A; HLA-B*58:01; CDH11; K357T; 0
ANVHIDPTF

SEQ ID NO: 11077 - protein, 8 aa, Homo sapiens
  Table A; HLA-A*26:01; CTNNB1; S45F; 0
APFLSGKG

SEQ ID NO: 11078 - protein, 8 aa, Homo sapiens
  Table A; HLA-B*07:02; CTNNB1; S45F; 1
APFLSGKG

SEQ ID NO: 11079 - protein, 8 aa, Homo sapiens
  Table A; HLA-B*54:01; CTNNB1; S45F; 0
APFLSGKG

SEQ ID NO: 11080 - protein, 8 aa, Homo sapiens
  Table A; HLA-B*55:01; CTNNB1; S45F; 0
APFLSGKG

SEQ ID NO: 11081 - protein, 8 aa, Homo sapiens
  Table A; HLA-B*55:02; CTNNB1; S45F; 0
APFLSGKG

SEQ ID NO: 11082 - protein, 8 aa, Homo sapiens
  Table A; HLA-B*56:01; CTNNB1; S45F; 0
APFLSGKG

SEQ ID NO: 11083 - protein, 10 aa, Homo sapiens
  Table A; HLA-B*07:02; CTNNB1; S45F; 1
APFLSGKGNP

SEQ ID NO: 11084 - protein, 10 aa, Homo sapiens
  Table A; HLA-B*55:01; CTNNB1; S45F; 0
APFLSGKGNP

SEQ ID NO: 11085 - protein, 10 aa, Homo sapiens
  Table A; HLA-B*55:02; CTNNB1; S45F; 0
APFLSGKGNP

SEQ ID NO: 11086 - protein, 10 aa, Homo sapiens
  Table A; HLA-B*56:01; CTNNB1; S45F; 0
APFLSGKGNP

SEQ ID NO: 11087 - protein, 8 aa, Homo sapiens
  Table A; HLA-A*11:01; ABI1; K445N; 1
APNNYIEK

SEQ ID NO: 11088 - protein, 9 aa, Homo sapiens
  Table A; HLA-A*02:01; ABI1; K445N; 1
APNNYIEKV

SEQ ID NO: 11089 - protein, 9 aa, Homo sapiens
  Table A; HLA-A*02:03; ABI1; K445N; 0
APNNYIEKV

SEQ ID NO: 11090 - protein, 9 aa, Homo sapiens
  Table A; HLA-A*02:06; ABI1; K445N; 0
APNNYIEKV

SEQ ID NO: 11091 - protein, 9 aa, Homo sapiens
  Table A; HLA-A*68:02; ABI1; K445N; 0
APNNYIEKV

SEQ ID NO: 11092 - protein, 9 aa, Homo sapiens
  Table A; HLA-B*07:02; ABI1; K445N; 1
APNNYIEKV

SEQ ID NO: 11093 - protein, 9 aa, Homo sapiens
  Table A; HLA-B*13:02; ABI1; K445N; 0
APNNYIEKV

SEQ ID NO: 11094 - protein, 9 aa, Homo sapiens
  Table A; HLA-B*35:03; ABI1; K445N; 0
APNNYIEKV

SEQ ID NO: 11095 - protein, 9 aa, Homo sapiens
  Table A; HLA-B*51:01; ABI1; K445N; 1
APNNYIEKV

SEQ ID NO: 11096 - protein, 9 aa, Homo sapiens
  Table A; HLA-B*54:01; ABI1; K445N; 0
APNNYIEKV

SEQ ID NO: 11097 - protein, 9 aa, Homo sapiens
  Table A; HLA-B*55:01; ABI1; K445N; 0
APNNYIEKV

SEQ ID NO: 11098 - protein, 9 aa, Homo sapiens
  Table A; HLA-B*55:02; ABI1; K445N; 0
APNNYIEKV

SEQ ID NO: 11099 - protein, 9 aa, Homo sapiens
  Table A; HLA-B*56:01; ABI1; K445N; 0
APNNYIEKV

SEQ ID NO: 11100 - protein, 10 aa, Homo sapiens
  Table A; HLA-B*54:01; ABI1; K445N; 0
APNNYIEKVV

SEQ ID NO: 11101 - protein, 10 aa, Homo sapiens
  Table A; HLA-B*55:02; ABI1; K445N; 0
APNNYIEKVV

SEQ ID NO: 11102 - protein, 10 aa, Homo sapiens
  Table A; HLA-B*56:01; ABI1; K445N; 0
APNNYIEKVV

SEQ ID NO: 11103 - protein, 11 aa, Homo sapiens
  Table A; HLA-B*54:01; ABI1; K445N; 0
APNNYIEKVVA

SEQ ID NO: 11104 - protein, 11 aa, Homo sapiens
  Table A; HLA-B*55:01; ABI1; K445N; 0
APNNYIEKVVA

SEQ ID NO: 11105 - protein, 11 aa, Homo sapiens
  Table A; HLA-B*55:02; ABI1; K445N; 0
APNNYIEKVVA

SEQ ID NO: 11106 - protein, 11 aa, Homo sapiens
  Table A; HLA-B*56:01; ABI1; K445N; 0
APNNYIEKVVA

SEQ ID NO: 11107 - protein, 10 aa, Homo sapiens
  Table A; HLA-B*07:02; ERBB4; R711C; 1
APNQAQLCIL

SEQ ID NO: 11108 - protein, 9 aa, Homo sapiens
  Table A; HLA-B*07:02; CDKN2A; P48L; 1
APNSYGRRL

SEQ ID NO: 11109 - protein, 10 aa, Homo sapiens
  Table A; HLA-B*07:02; CDKN2A; P48L; 1
APNSYGRRLI

SEQ ID NO: 11110 - protein, 9 aa, Homo sapiens
  Table A; HLA-B*51:01; TP53; I195N; 0
APPQHLNRV

SEQ ID NO: 11111 - protein, 9 aa, Homo sapiens
  Table A; HLA-B*55:01; TP53; I195N; 0
APPQHLNRV

SEQ ID NO: 11112 - protein, 9 aa, Homo sapiens
  Table A; HLA-B*07:02; TP53; I195T; 1
APPQHLTRV

SEQ ID NO: 11113 - protein, 9 aa, Homo sapiens
  Table A; HLA-B*51:01; TP53; I195T; 1
APPQHLTRV

SEQ ID NO: 11114 - protein, 9 aa, Homo sapiens
  Table A; HLA-A*02:07; TP53; H193L; 0
APPQLLIRV

SEQ ID NO: 11115 - protein, 9 aa, Homo sapiens
  Table A; HLA-A*68:02; TP53; H193L; 0
APPQLLIRV

SEQ ID NO: 11116 - protein, 9 aa, Homo sapiens
  Table A; HLA-B*39:06; TP53; H193L; 0
APPQLLIRV

SEQ ID NO: 11117 - protein, 9 aa, Homo sapiens
  Table A; HLA-B*51:01; TP53; H193L; 0
APPQLLIRV

SEQ ID NO: 11118 - protein, 9 aa, Homo sapiens
  Table A; HLA-B*54:01; TP53; H193L; 0
APPQLLIRV

SEQ ID NO: 11119 - protein, 9 aa, Homo sapiens
  Table A; HLA-B*55:02; TP53; H193L; 0
APPQLLIRV

SEQ ID NO: 11120 - protein, 9 aa, Homo sapiens
  Table A; HLA-B*56:01; TP53; H193L; 0
APPQLLIRV

SEQ ID NO: 11121 - protein, 9 aa, Homo sapiens
  Table A; HLA-A*02:07; TP53; H193Y; 0
APPQYLIRV

SEQ ID NO: 11122 - protein, 9 aa, Homo sapiens
  Table A; HLA-B*51:01; TP53; H193Y; 0
APPQYLIRV

SEQ ID NO: 11123 - protein, 9 aa, Homo sapiens
  Table A; HLA-B*54:01; TP53; H193Y; 0
APPQYLIRV

SEQ ID NO: 11124 - protein, 9 aa, Homo sapiens
  Table A; HLA-B*55:02; TP53; H193Y; 0
APPQYLIRV

SEQ ID NO: 11125 - protein, 9 aa, Homo sapiens
  Table A; HLA-B*56:01; TP53; H193Y; 0
APPQYLIRV

SEQ ID NO: 11126 - protein, 9 aa, Homo sapiens
  Table A; HLA-A*03:01; PIK3CA; H1047Q; 1
AQHGGWTTK

SEQ ID NO: 11127 - protein, 9 aa, Homo sapiens
  Table A; HLA-A*03:02; PIK3CA; H1047Q; 0
AQHGGWTTK

SEQ ID NO: 11128 - protein, 9 aa, Homo sapiens
  Table A; HLA-A*11:01; PIK3CA; H1047Q; 0
AQHGGWTTK

SEQ ID NO: 11129 - protein, 9 aa, Homo sapiens
  Table A; HLA-A*30:01; PIK3CA; H1047Q; 0
AQHGGWTTK

SEQ ID NO: 11130 - protein, 9 aa, Homo sapiens
  Table A; HLA-A*03:01; KDR; R1032Q; 1
AQNILLSEK

SEQ ID NO: 11131 - protein, 9 aa, Homo sapiens
  Table A; HLA-A*03:02; KDR; R1032Q; 0
AQNILLSEK

SEQ ID NO: 11132 - protein, 9 aa, Homo sapiens
  Table A; HLA-A*11:01; KDR; R1032Q; 1
AQNILLSEK

SEQ ID NO: 11133 - protein, 8 aa, Homo sapiens
  Table A; HLA-B*15:01; PTEN; D92E; 0
AQYPFEEH

SEQ ID NO: 11134 - protein, 8 aa, Homo sapiens
  Table A; HLA-B*48:01; PTEN; D92E; 0
AQYPFEEH

SEQ ID NO: 11135 - protein, 9 aa, Homo sapiens
  Table A; HLA-B*07:02; KRAS; G12R; 1
ARGVGKSAL

SEQ ID NO: 11136 - protein, 9 aa, Homo sapiens
  Table A; HLA-B*14:01; KRAS; G12R; 1
ARGVGKSAL

SEQ ID NO: 11137 - protein, 9 aa, Homo sapiens
  Table A; HLA-B*39:01; KRAS; G12R; 1
ARGVGKSAL

SEQ ID NO: 11138 - protein, 9 aa, Homo sapiens
  Table A; HLA-B*27:05; PIK3CA; H1047R; 1
ARHGGWTTK

SEQ ID NO: 11139 - protein, 8 aa, Homo sapiens
  Table A; HLA-B*39:06; CDKN2A; D108Y; 0
ARLDVRYA

SEQ ID NO: 11140 - protein, 9 aa, Homo sapiens
  Table A; HLA-B*27:05; CDKN2A; D108Y; 0
ARLDVRYAW

SEQ ID NO: 11141 - protein, 9 aa, Homo sapiens
  Table A; HLA-B*44:03; CDKN2A; D108Y; 1
ARLDVRYAW

SEQ ID NO: 11142 - protein, 9 aa, Homo sapiens
  Table A; HLA-B*57:01; CDKN2A; D108Y; 0
ARLDVRYAW

SEQ ID NO: 11143 - protein, 9 aa, Homo sapiens
  Table A; HLA-B*39:06; BIRC6; G271R; 0
ARPELRVGP

SEQ ID NO: 11144 - protein, 9 aa, Homo sapiens
  Table A; HLA-B*07:02; KRAS; G12S; 1
ASGVGKSAL

SEQ ID NO: 11145 - protein, 9 aa, Homo sapiens
  Table A; HLA-C*01:02; KRAS; G12S; 0
ASGVGKSAL

SEQ ID NO: 11146 - protein, 9 aa, Homo sapiens
  Table A; HLA-A*03:01; MAX; R60Q; 1
ASQAQILDK

SEQ ID NO: 11147 - protein, 9 aa, Homo sapiens
  Table A; HLA-A*03:02; MAX; R60Q; 0
ASQAQILDK

SEQ ID NO: 11148 - protein, 9 aa, Homo sapiens
  Table A; HLA-A*11:01; MAX; R60Q; 1
ASQAQILDK

SEQ ID NO: 11149 - protein, 8 aa, Homo sapiens
  Table A; HLA-A*11:01; PCBP1; L100Q; 1
ASRPPVTQ

SEQ ID NO: 11150 - protein, 8 aa, Homo sapiens
  Table A; HLA-A*30:01; PCBP1; L100Q; 0
ASRPPVTQ

SEQ ID NO: 11151 - protein, 8 aa, Homo sapiens
  Table A; HLA-A*31:01; PCBP1; L100Q; 0
ASRPPVTQ

SEQ ID NO: 11152 - protein, 8 aa, Homo sapiens
  Table A; HLA-B*07:02; PCBP1; L100Q; 1
ASRPPVTQ

SEQ ID NO: 11153 - protein, 8 aa, Homo sapiens
  Table A; HLA-B*08:01; PCBP1; L100Q; 1
ASRPPVTQ

SEQ ID NO: 11154 - protein, 8 aa, Homo sapiens
  Table A; HLA-B*15:01; PCBP1; L100Q; 1
ASRPPVTQ

SEQ ID NO: 11155 - protein, 8 aa, Homo sapiens
  Table A; HLA-B*57:01; PCBP1; L100Q; 0
ASRPPVTQ

SEQ ID NO: 11156 - protein, 8 aa, Homo sapiens
  Table A; HLA-B*58:01; PCBP1; L100Q; 0
ASRPPVTQ

SEQ ID NO: 11157 - protein, 9 aa, Homo sapiens
  Table A; HLA-A*02:03; PCBP1; L100Q; 0
ASRPPVTQR

SEQ ID NO: 11158 - protein, 9 aa, Homo sapiens
  Table A; HLA-A*03:01; PCBP1; L100Q; 1
ASRPPVTQR

SEQ ID NO: 11159 - protein, 9 aa, Homo sapiens
  Table A; HLA-A*03:02; PCBP1; L100Q; 0
ASRPPVTQR

SEQ ID NO: 11160 - protein, 9 aa, Homo sapiens
  Table A; HLA-A*11:01; PCBP1; L100Q; 1
ASRPPVTQR

SEQ ID NO: 11161 - protein, 9 aa, Homo sapiens
  Table A; HLA-A*26:03; PCBP1; L100Q; 0
ASRPPVTQR

SEQ ID NO: 11162 - protein, 9 aa, Homo sapiens
  Table A; HLA-A*30:01; PCBP1; L100Q; 0
ASRPPVTQR

SEQ ID NO: 11163 - protein, 9 aa, Homo sapiens
  Table A; HLA-A*31:01; PCBP1; L100Q; 0
ASRPPVTQR

SEQ ID NO: 11164 - protein, 9 aa, Homo sapiens
  Table A; HLA-A*33:01; PCBP1; L100Q; 0
ASRPPVTQR

SEQ ID NO: 11165 - protein, 9 aa, Homo sapiens
  Table A; HLA-A*33:03; PCBP1; L100Q; 0
ASRPPVTQR

SEQ ID NO: 11166 - protein, 9 aa, Homo sapiens
  Table A; HLA-A*68:01; PCBP1; L100Q; 0
ASRPPVTQR

SEQ ID NO: 11167 - protein, 9 aa, Homo sapiens
  Table A; HLA-B*07:02; PCBP1; L100Q; 1
ASRPPVTQR

SEQ ID NO: 11168 - protein, 9 aa, Homo sapiens
  Table A; HLA-B*15:01; PCBP1; L100Q; 1
ASRPPVTQR

SEQ ID NO: 11169 - protein, 9 aa, Homo sapiens
  Table A; HLA-B*27:05; PCBP1; L100Q; 0
ASRPPVTQR

SEQ ID NO: 11170 - protein, 9 aa, Homo sapiens
  Table A; HLA-B*50:01; PCBP1; L100Q; 0
ASRPPVTQR

SEQ ID NO: 11171 - protein, 9 aa, Homo sapiens
  Table A; HLA-B*54:01; PCBP1; L100Q; 0
ASRPPVTQR

SEQ ID NO: 11172 - protein, 9 aa, Homo sapiens
  Table A; HLA-B*55:01; PCBP1; L100Q; 0
ASRPPVTQR

SEQ ID NO: 11173 - protein, 9 aa, Homo sapiens
  Table A; HLA-B*57:01; PCBP1; L100Q; 0
ASRPPVTQR

SEQ ID NO: 11174 - protein, 9 aa, Homo sapiens
  Table A; HLA-B*58:01; PCBP1; L100Q; 0
ASRPPVTQR

SEQ ID NO: 11175 - protein, 9 aa, Homo sapiens
  Table A; HLA-C*03:02; PCBP1; L100Q; 0
ASRPPVTQR

SEQ ID NO: 11176 - protein, 10 aa, Homo sapiens
  Table A; HLA-A*02:03; PCBP1; L100Q; 0
ASRPPVTQRL

SEQ ID NO: 11177 - protein, 10 aa, Homo sapiens
  Table A; HLA-A*02:08; PCBP1; L100Q; 0
ASRPPVTQRL

SEQ ID NO: 11178 - protein, 10 aa, Homo sapiens
  Table A; HLA-A*03:01; PCBP1; L100Q; 1
ASRPPVTQRL

SEQ ID NO: 11179 - protein, 10 aa, Homo sapiens
  Table A; HLA-A*11:01; PCBP1; L100Q; 1
ASRPPVTQRL

SEQ ID NO: 11180 - protein, 10 aa, Homo sapiens
  Table A; HLA-A*30:01; PCBP1; L100Q; 0
ASRPPVTQRL

SEQ ID NO: 11181 - protein, 10 aa, Homo sapiens
  Table A; HLA-A*31:01; PCBP1; L100Q; 0
ASRPPVTQRL

SEQ ID NO: 11182 - protein, 10 aa, Homo sapiens
  Table A; HLA-B*07:02; PCBP1; L100Q; 1
ASRPPVTQRL

SEQ ID NO: 11183 - protein, 10 aa, Homo sapiens
  Table A; HLA-B*15:01; PCBP1; L100Q; 1
ASRPPVTQRL

SEQ ID NO: 11184 - protein, 10 aa, Homo sapiens
  Table A; HLA-B*40:02; PCBP1; L100Q; 0
ASRPPVTQRL

SEQ ID NO: 11185 - protein, 10 aa, Homo sapiens
  Table A; HLA-B*44:05; PCBP1; L100Q; 0
ASRPPVTQRL

SEQ ID NO: 11186 - protein, 10 aa, Homo sapiens
  Table A; HLA-B*57:01; PCBP1; L100Q; 0
ASRPPVTQRL

SEQ ID NO: 11187 - protein, 10 aa, Homo sapiens
  Table A; HLA-B*58:01; PCBP1; L100Q; 0
ASRPPVTQRL

SEQ ID NO: 11188 - protein, 10 aa, Homo sapiens
  Table A; HLA-C*15:02; PCBP1; L100Q; 0
ASRPPVTQRL

SEQ ID NO: 11189 - protein, 11 aa, Homo sapiens
  Table A; HLA-A*02:03; PCBP1; L100Q; 0
ASRPPVTQRLV

SEQ ID NO: 11190 - protein, 8 aa, Homo sapiens
  Table A; HLA-A*02:03; CTCF; K365T; 0
ASVEVSTL

SEQ ID NO: 11191 - protein, 8 aa, Homo sapiens
  Table A; HLA-A*02:05; CTCF; K365T; 0
ASVEVSTL

SEQ ID NO: 11192 - protein, 8 aa, Homo sapiens
  Table A; HLA-A*02:06; CTCF; K365T; 0
ASVEVSTL

SEQ ID NO: 11193 - protein, 8 aa, Homo sapiens
  Table A; HLA-A*23:01; CTCF; K365T; 0
ASVEVSTL

SEQ ID NO: 11194 - protein, 8 aa, Homo sapiens
  Table A; HLA-A*30:01; CTCF; K365T; 0
ASVEVSTL

SEQ ID NO: 11195 - protein, 8 aa, Homo sapiens
  Table A; HLA-B*07:02; CTCF; K365T; 1
ASVEVSTL

SEQ ID NO: 11196 - protein, 8 aa, Homo sapiens
  Table A; HLA-B*13:02; CTCF; K365T; 0
ASVEVSTL

SEQ ID NO: 11197 - protein, 8 aa, Homo sapiens
  Table A; HLA-B*14:02; CTCF; K365T; 0
ASVEVSTL

SEQ ID NO: 11198 - protein, 8 aa, Homo sapiens
  Table A; HLA-B*15:01; CTCF; K365T; 1
ASVEVSTL

SEQ ID NO: 11199 - protein, 8 aa, Homo sapiens
  Table A; HLA-B*15:03; CTCF; K365T; 0
ASVEVSTL

SEQ ID NO: 11200 - protein, 8 aa, Homo sapiens
  Table A; HLA-B*40:01; CTCF; K365T; 1
ASVEVSTL

SEQ ID NO: 11201 - protein, 8 aa, Homo sapiens
  Table A; HLA-B*40:02; CTCF; K365T; 0
ASVEVSTL

SEQ ID NO: 11202 - protein, 8 aa, Homo sapiens
  Table A; HLA-B*41:02; CTCF; K365T; 0
ASVEVSTL

SEQ ID NO: 11203 - protein, 8 aa, Homo sapiens
  Table A; HLA-B*44:05; CTCF; K365T; 0
ASVEVSTL

SEQ ID NO: 11204 - protein, 8 aa, Homo sapiens
  Table A; HLA-B*46:01; CTCF; K365T; 0
ASVEVSTL

SEQ ID NO: 11205 - protein, 8 aa, Homo sapiens
  Table A; HLA-B*48:01; CTCF; K365T; 0
ASVEVSTL

SEQ ID NO: 11206 - protein, 8 aa, Homo sapiens
  Table A; HLA-B*57:01; CTCF; K365T; 0
ASVEVSTL

SEQ ID NO: 11207 - protein, 8 aa, Homo sapiens
  Table A; HLA-B*58:01; CTCF; K365T; 0
ASVEVSTL

SEQ ID NO: 11208 - protein, 8 aa, Homo sapiens
  Table A; HLA-C*03:02; CTCF; K365T; 0
ASVEVSTL

SEQ ID NO: 11209 - protein, 8 aa, Homo sapiens
  Table A; HLA-C*03:03; CTCF; K365T; 1
ASVEVSTL

SEQ ID NO: 11210 - protein, 8 aa, Homo sapiens
  Table A; HLA-C*03:04; CTCF; K365T; 1
ASVEVSTL

SEQ ID NO: 11211 - protein, 8 aa, Homo sapiens
  Table A; HLA-C*08:01; CTCF; K365T; 0
ASVEVSTL

SEQ ID NO: 11212 - protein, 8 aa, Homo sapiens
  Table A; HLA-C*08:03; CTCF; K365T; 0
ASVEVSTL

SEQ ID NO: 11213 - protein, 8 aa, Homo sapiens
  Table A; HLA-C*12:03; CTCF; K365T; 1
ASVEVSTL

SEQ ID NO: 11214 - protein, 8 aa, Homo sapiens
  Table A; HLA-C*15:02; CTCF; K365T; 0
ASVEVSTL

SEQ ID NO: 11215 - protein, 9 aa, Homo sapiens
  Table A; HLA-A*03:01; CTCF; K365T; 1
ASVEVSTLK

SEQ ID NO: 11216 - protein, 9 aa, Homo sapiens
  Table A; HLA-A*03:02; CTCF; K365T; 0
ASVEVSTLK

SEQ ID NO: 11217 - protein, 9 aa, Homo sapiens
  Table A; HLA-A*11:01; CTCF; K365T; 1
ASVEVSTLK

SEQ ID NO: 11218 - protein, 9 aa, Homo sapiens
  Table A; HLA-A*26:03; CTCF; K365T; 0
ASVEVSTLK

SEQ ID NO: 11219 - protein, 9 aa, Homo sapiens
  Table A; HLA-A*30:01; CTCF; K365T; 0
ASVEVSTLK

SEQ ID NO: 11220 - protein, 9 aa, Homo sapiens
  Table A; HLA-A*31:01; CTCF; K365T; 0
ASVEVSTLK

SEQ ID NO: 11221 - protein, 9 aa, Homo sapiens
  Table A; HLA-A*33:03; CTCF; K365T; 0
ASVEVSTLK

SEQ ID NO: 11222 - protein, 9 aa, Homo sapiens
  Table A; HLA-A*68:01; CTCF; K365T; 0
ASVEVSTLK

SEQ ID NO: 11223 - protein, 9 aa, Homo sapiens
  Table A; HLA-A*68:02; CTCF; K365T; 0
ASVEVSTLK

SEQ ID NO: 11224 - protein, 9 aa, Homo sapiens
  Table A; HLA-B*13:02; CTCF; K365T; 0
ASVEVSTLK

SEQ ID NO: 11225 - protein, 9 aa, Homo sapiens
  Table A; HLA-B*27:02; CTCF; K365T; 0
ASVEVSTLK

SEQ ID NO: 11226 - protein, 9 aa, Homo sapiens
  Table A; HLA-B*27:05; CTCF; K365T; 0
ASVEVSTLK

SEQ ID NO: 11227 - protein, 9 aa, Homo sapiens
  Table A; HLA-B*57:01; CTCF; K365T; 0
ASVEVSTLK

SEQ ID NO: 11228 - protein, 9 aa, Homo sapiens
  Table A; HLA-B*58:01; CTCF; K365T; 0
ASVEVSTLK

SEQ ID NO: 11229 - protein, 9 aa, Homo sapiens
  Table A; HLA-C*08:03; CTCF; K365T; 0
ASVEVSTLK

SEQ ID NO: 11230 - protein, 10 aa, Homo sapiens
  Table A; HLA-A*11:01; CTCF; K365T; 1
ASVEVSTLKR

SEQ ID NO: 11231 - protein, 10 aa, Homo sapiens
  Table A; HLA-A*26:03; CTCF; K365T; 0
ASVEVSTLKR

SEQ ID NO: 11232 - protein, 10 aa, Homo sapiens
  Table A; HLA-A*68:01; CTCF; K365T; 0
ASVEVSTLKR

SEQ ID NO: 11233 - protein, 10 aa, Homo sapiens
  Table A; HLA-B*57:01; CTCF; K365T; 0
ASVEVSTLKR

SEQ ID NO: 11234 - protein, 9 aa, Homo sapiens
  Table A; HLA-A*02:01; CTNNB1; T41A; 1
ATAPSLSGK

SEQ ID NO: 11235 - protein, 9 aa, Homo sapiens
  Table A; HLA-A*02:03; CTNNB1; T41A; 0
ATAPSLSGK

SEQ ID NO: 11236 - protein, 9 aa, Homo sapiens
  Table A; HLA-A*02:08; CTNNB1; T41A; 0
ATAPSLSGK

SEQ ID NO: 11237 - protein, 9 aa, Homo sapiens
  Table A; HLA-A*03:01; CTNNB1; T41A; 1
ATAPSLSGK

SEQ ID NO: 11238 - protein, 9 aa, Homo sapiens
  Table A; HLA-A*03:02; CTNNB1; T41A; 0
ATAPSLSGK

SEQ ID NO: 11239 - protein, 9 aa, Homo sapiens
  Table A; HLA-A*11:01; CTNNB1; T41A; 1
ATAPSLSGK

SEQ ID NO: 11240 - protein, 9 aa, Homo sapiens
  Table A; HLA-A*26:01; CTNNB1; T41A; 1
ATAPSLSGK

SEQ ID NO: 11241 - protein, 9 aa, Homo sapiens
  Table A; HLA-A*26:03; CTNNB1; T41A; 0
ATAPSLSGK

SEQ ID NO: 11242 - protein, 9 aa, Homo sapiens
  Table A; HLA-A*30:01; CTNNB1; T41A; 1
ATAPSLSGK

SEQ ID NO: 11243 - protein, 9 aa, Homo sapiens
  Table A; HLA-A*31:01; CTNNB1; T41A; 1
ATAPSLSGK

SEQ ID NO: 11244 - protein, 9 aa, Homo sapiens
  Table A; HLA-A*33:03; CTNNB1; T41A; 0
ATAPSLSGK

SEQ ID NO: 11245 - protein, 9 aa, Homo sapiens
  Table A; HLA-A*68:01; CTNNB1; T41A; 1
ATAPSLSGK

SEQ ID NO: 11246 - protein, 9 aa, Homo sapiens
  Table A; HLA-A*68:02; CTNNB1; T41A; 0
ATAPSLSGK

SEQ ID NO: 11247 - protein, 9 aa, Homo sapiens
  Table A; HLA-B*27:02; CTNNB1; T41A; 0
ATAPSLSGK

SEQ ID NO: 11248 - protein, 9 aa, Homo sapiens
  Table A; HLA-B*27:05; CTNNB1; T41A; 1
ATAPSLSGK

SEQ ID NO: 11249 - protein, 9 aa, Homo sapiens
  Table A; HLA-B*57:01; CTNNB1; T41A; 1
ATAPSLSGK

SEQ ID NO: 11250 - protein, 9 aa, Homo sapiens
  Table A; HLA-B*58:01; CTNNB1; T41A; 0
ATAPSLSGK

SEQ ID NO: 11251 - protein, 10 aa, Homo sapiens
  Table A; HLA-A*02:05; CTNNB1; T41A; 0
ATAPSLSGKG

SEQ ID NO: 11252 - protein, 10 aa, Homo sapiens
  Table A; HLA-A*03:01; CTNNB1; T41A; 1
ATAPSLSGKG

SEQ ID NO: 11253 - protein, 10 aa, Homo sapiens
  Table A; HLA-A*11:01; CTNNB1; T41A; 1
ATAPSLSGKG

SEQ ID NO: 11254 - protein, 10 aa, Homo sapiens
  Table A; HLA-A*26:01; CTNNB1; T41A; 1
ATAPSLSGKG

SEQ ID NO: 11255 - protein, 10 aa, Homo sapiens
  Table A; HLA-A*29:02; CTNNB1; T41A; 1
ATAPSLSGKG

SEQ ID NO: 11256 - protein, 10 aa, Homo sapiens
  Table A; HLA-A*68:02; CTNNB1; T41A; 0
ATAPSLSGKG

SEQ ID NO: 11257 - protein, 8 aa, Homo sapiens
  Table A; HLA-A*02:01; CTNNB1; T41A; 1
ATATAPSL

SEQ ID NO: 11258 - protein, 8 aa, Homo sapiens
  Table A; HLA-A*02:03; CTNNB1; T41A; 0
ATATAPSL

SEQ ID NO: 11259 - protein, 8 aa, Homo sapiens
  Table A; HLA-A*02:04; CTNNB1; T41A; 0
ATATAPSL

SEQ ID NO: 11260 - protein, 8 aa, Homo sapiens
  Table A; HLA-A*02:05; CTNNB1; T41A; 0
ATATAPSL

SEQ ID NO: 11261 - protein, 8 aa, Homo sapiens
  Table A; HLA-A*02:06; CTNNB1; T41A; 0
ATATAPSL

SEQ ID NO: 11262 - protein, 8 aa, Homo sapiens
  Table A; HLA-A*03:02; CTNNB1; T41A; 0
ATATAPSL

SEQ ID NO: 11263 - protein, 8 aa, Homo sapiens
  Table A; HLA-A*11:01; CTNNB1; T41A; 1
ATATAPSL

SEQ ID NO: 11264 - protein, 8 aa, Homo sapiens
  Table A; HLA-A*30:01; CTNNB1; T41A; 1
ATATAPSL

SEQ ID NO: 11265 - protein, 8 aa, Homo sapiens
  Table A; HLA-B*07:02; CTNNB1; T41A; 1
ATATAPSL

SEQ ID NO: 11266 - protein, 8 aa, Homo sapiens
  Table A; HLA-B*08:01; CTNNB1; T41A; 1
ATATAPSL

SEQ ID NO: 11267 - protein, 8 aa, Homo sapiens
  Table A; HLA-B*13:02; CTNNB1; T41A; 1
ATATAPSL

SEQ ID NO: 11268 - protein, 8 aa, Homo sapiens
  Table A; HLA-B*15:01; CTNNB1; T41A; 1
ATATAPSL

SEQ ID NO: 11269 - protein, 8 aa, Homo sapiens
  Table A; HLA-B*15:02; CTNNB1; T41A; 0
ATATAPSL

SEQ ID NO: 11270 - protein, 8 aa, Homo sapiens
  Table A; HLA-B*15:10; CTNNB1; T41A; 0
ATATAPSL

SEQ ID NO: 11271 - protein, 8 aa, Homo sapiens
  Table A; HLA-B*27:05; CTNNB1; T41A; 1
ATATAPSL

SEQ ID NO: 11272 - protein, 8 aa, Homo sapiens
  Table A; HLA-B*35:03; CTNNB1; T41A; 1
ATATAPSL

SEQ ID NO: 11273 - protein, 8 aa, Homo sapiens
  Table A; HLA-B*37:01; CTNNB1; T41A; 1
ATATAPSL

SEQ ID NO: 11274 - protein, 8 aa, Homo sapiens
  Table A; HLA-B*38:01; CTNNB1; T41A; 1
ATATAPSL

SEQ ID NO: 11275 - protein, 8 aa, Homo sapiens
  Table A; HLA-B*39:01; CTNNB1; T41A; 1
ATATAPSL

SEQ ID NO: 11276 - protein, 8 aa, Homo sapiens
  Table A; HLA-B*40:01; CTNNB1; T41A; 1
ATATAPSL

SEQ ID NO: 11277 - protein, 8 aa, Homo sapiens
  Table A; HLA-B*40:02; CTNNB1; T41A; 1
ATATAPSL

SEQ ID NO: 11278 - protein, 8 aa, Homo sapiens
  Table A; HLA-B*41:02; CTNNB1; T41A; 0
ATATAPSL

SEQ ID NO: 11279 - protein, 8 aa, Homo sapiens
  Table A; HLA-B*44:05; CTNNB1; T41A; 0
ATATAPSL

SEQ ID NO: 11280 - protein, 8 aa, Homo sapiens
  Table A; HLA-B*46:01; CTNNB1; T41A; 0
ATATAPSL

SEQ ID NO: 11281 - protein, 8 aa, Homo sapiens
  Table A; HLA-B*48:01; CTNNB1; T41A; 0
ATATAPSL

SEQ ID NO: 11282 - protein, 8 aa, Homo sapiens
  Table A; HLA-B*57:01; CTNNB1; T41A; 1
ATATAPSL

SEQ ID NO: 11283 - protein, 8 aa, Homo sapiens
  Table A; HLA-B*58:01; CTNNB1; T41A; 0
ATATAPSL

SEQ ID NO: 11284 - protein, 8 aa, Homo sapiens
  Table A; HLA-C*01:02; CTNNB1; T41A; 1
ATATAPSL

SEQ ID NO: 11285 - protein, 8 aa, Homo sapiens
  Table A; HLA-C*03:03; CTNNB1; T41A; 1
ATATAPSL

SEQ ID NO: 11286 - protein, 8 aa, Homo sapiens
  Table A; HLA-C*03:04; CTNNB1; T41A; 1
ATATAPSL

SEQ ID NO: 11287 - protein, 8 aa, Homo sapiens
  Table A; HLA-C*08:01; CTNNB1; T41A; 0
ATATAPSL

SEQ ID NO: 11288 - protein, 8 aa, Homo sapiens
  Table A; HLA-C*08:03; CTNNB1; T41A; 0
ATATAPSL

SEQ ID NO: 11289 - protein, 8 aa, Homo sapiens
  Table A; HLA-C*14:02; CTNNB1; T41A; 1
ATATAPSL

SEQ ID NO: 11290 - protein, 8 aa, Homo sapiens
  Table A; HLA-C*14:03; CTNNB1; T41A; 0
ATATAPSL

SEQ ID NO: 11291 - protein, 8 aa, Homo sapiens
  Table A; HLA-C*15:02; CTNNB1; T41A; 1
ATATAPSL

SEQ ID NO: 11292 - protein, 8 aa, Homo sapiens
  Table A; HLA-C*16:01; CTNNB1; T41A; 1
ATATAPSL

SEQ ID NO: 11293 - protein, 8 aa, Homo sapiens
  Table A; HLA-C*16:02; CTNNB1; T41A; 0
ATATAPSL

SEQ ID NO: 11294 - protein, 8 aa, Homo sapiens
  Table A; HLA-C*17:01; CTNNB1; T41A; 0
ATATAPSL

SEQ ID NO: 11295 - protein, 9 aa, Homo sapiens
  Table A; HLA-A*01:01; CTNNB1; T41A; 1
ATATAPSLS

SEQ ID NO: 11296 - protein, 9 aa, Homo sapiens
  Table A; HLA-A*03:01; CTNNB1; T41A; 1
ATATAPSLS

SEQ ID NO: 11297 - protein, 9 aa, Homo sapiens
  Table A; HLA-A*03:02; CTNNB1; T41A; 0
ATATAPSLS

SEQ ID NO: 11298 - protein, 9 aa, Homo sapiens
  Table A; HLA-A*11:01; CTNNB1; T41A; 1
ATATAPSLS

SEQ ID NO: 11299 - protein, 10 aa, Homo sapiens
  Table A; HLA-A*01:01; CTNNB1; T41A; 1
ATATAPSLSG

SEQ ID NO: 11300 - protein, 10 aa, Homo sapiens
  Table A; HLA-A*03:01; CTNNB1; T41A; 1
ATATAPSLSG

SEQ ID NO: 11301 - protein, 10 aa, Homo sapiens
  Table A; HLA-A*11:01; CTNNB1; T41A; 1
ATATAPSLSG

SEQ ID NO: 11302 - protein, 10 aa, Homo sapiens
  Table A; HLA-A*30:01; CTNNB1; T41A; 1
ATATAPSLSG

SEQ ID NO: 11303 - protein, 10 aa, Homo sapiens
  Table A; HLA-A*68:01; CTNNB1; T41A; 1
ATATAPSLSG

SEQ ID NO: 11304 - protein, 10 aa, Homo sapiens
  Table A; HLA-B*08:01; CTNNB1; T41A; 1
ATATAPSLSG

SEQ ID NO: 11305 - protein, 10 aa, Homo sapiens
  Table A; HLA-B*58:01; CTNNB1; T41A; 0
ATATAPSLSG

SEQ ID NO: 11306 - protein, 11 aa, Homo sapiens
  Table A; HLA-A*03:01; CTNNB1; T41A; 1
ATATAPSLSGK

SEQ ID NO: 11307 - protein, 11 aa, Homo sapiens
  Table A; HLA-A*03:02; CTNNB1; T41A; 0
ATATAPSLSGK

SEQ ID NO: 11308 - protein, 11 aa, Homo sapiens
  Table A; HLA-A*11:01; CTNNB1; T41A; 1
ATATAPSLSGK

SEQ ID NO: 11309 - protein, 11 aa, Homo sapiens
  Table A; HLA-A*26:03; CTNNB1; T41A; 0
ATATAPSLSGK

SEQ ID NO: 11310 - protein, 11 aa, Homo sapiens
  Table A; HLA-A*30:01; CTNNB1; T41A; 1
ATATAPSLSGK

SEQ ID NO: 11311 - protein, 11 aa, Homo sapiens
  Table A; HLA-A*31:01; CTNNB1; T41A; 1
ATATAPSLSGK

SEQ ID NO: 11312 - protein, 11 aa, Homo sapiens
  Table A; HLA-A*33:03; CTNNB1; T41A; 0
ATATAPSLSGK

SEQ ID NO: 11313 - protein, 11 aa, Homo sapiens
  Table A; HLA-A*68:01; CTNNB1; T41A; 1
ATATAPSLSGK

SEQ ID NO: 11314 - protein, 11 aa, Homo sapiens
  Table A; HLA-A*68:02; CTNNB1; T41A; 0
ATATAPSLSGK

SEQ ID NO: 11315 - protein, 11 aa, Homo sapiens
  Table A; HLA-B*27:02; CTNNB1; T41A; 0
ATATAPSLSGK

SEQ ID NO: 11316 - protein, 11 aa, Homo sapiens
  Table A; HLA-B*57:01; CTNNB1; T41A; 1
ATATAPSLSGK

SEQ ID NO: 11317 - protein, 8 aa, Homo sapiens
  Table A; HLA-A*02:01; CTNNB1; T41I; 1
ATITAPSL

SEQ ID NO: 11318 - protein, 8 aa, Homo sapiens
  Table A; HLA-A*02:03; CTNNB1; T41I; 0
ATITAPSL

SEQ ID NO: 11319 - protein, 8 aa, Homo sapiens
  Table A; HLA-A*02:04; CTNNB1; T41I; 0
ATITAPSL

SEQ ID NO: 11320 - protein, 8 aa, Homo sapiens
  Table A; HLA-A*02:05; CTNNB1; T41I; 0
ATITAPSL

SEQ ID NO: 11321 - protein, 8 aa, Homo sapiens
  Table A; HLA-A*02:06; CTNNB1; T41I; 0
ATITAPSL

SEQ ID NO: 11322 - protein, 8 aa, Homo sapiens
  Table A; HLA-A*02:07; CTNNB1; T41I; 0
ATITAPSL

SEQ ID NO: 11323 - protein, 8 aa, Homo sapiens
  Table A; HLA-A*02:08; CTNNB1; T41I; 0
ATITAPSL

SEQ ID NO: 11324 - protein, 8 aa, Homo sapiens
  Table A; HLA-A*03:01; CTNNB1; T41I; 1
ATITAPSL

SEQ ID NO: 11325 - protein, 8 aa, Homo sapiens
  Table A; HLA-A*03:02; CTNNB1; T41I; 0
ATITAPSL

SEQ ID NO: 11326 - protein, 8 aa, Homo sapiens
  Table A; HLA-A*11:01; CTNNB1; T41I; 1
ATITAPSL

SEQ ID NO: 11327 - protein, 8 aa, Homo sapiens
  Table A; HLA-A*23:01; CTNNB1; T41I; 0
ATITAPSL

SEQ ID NO: 11328 - protein, 8 aa, Homo sapiens
  Table A; HLA-A*24:02; CTNNB1; T41I; 1
ATITAPSL

SEQ ID NO: 11329 - protein, 8 aa, Homo sapiens
  Table A; HLA-A*25:01; CTNNB1; T41I; 0
ATITAPSL

SEQ ID NO: 11330 - protein, 8 aa, Homo sapiens
  Table A; HLA-A*26:01; CTNNB1; T41I; 0
ATITAPSL

SEQ ID NO: 11331 - protein, 8 aa, Homo sapiens
  Table A; HLA-A*30:01; CTNNB1; T41I; 0
ATITAPSL

SEQ ID NO: 11332 - protein, 8 aa, Homo sapiens
  Table A; HLA-A*31:01; CTNNB1; T41I; 0
ATITAPSL

SEQ ID NO: 11333 - protein, 8 aa, Homo sapiens
  Table A; HLA-A*68:01; CTNNB1; T41I; 0
ATITAPSL

SEQ ID NO: 11334 - protein, 8 aa, Homo sapiens
  Table A; HLA-A*68:02; CTNNB1; T41I; 0
ATITAPSL

SEQ ID NO: 11335 - protein, 8 aa, Homo sapiens
  Table A; HLA-B*07:02; CTNNB1; T41I; 1
ATITAPSL

SEQ ID NO: 11336 - protein, 8 aa, Homo sapiens
  Table A; HLA-B*08:01; CTNNB1; T41I; 1
ATITAPSL

SEQ ID NO: 11337 - protein, 8 aa, Homo sapiens
  Table A; HLA-B*13:02; CTNNB1; T41I; 0
ATITAPSL

SEQ ID NO: 11338 - protein, 8 aa, Homo sapiens
  Table A; HLA-B*15:01; CTNNB1; T41I; 1
ATITAPSL

SEQ ID NO: 11339 - protein, 8 aa, Homo sapiens
  Table A; HLA-B*15:02; CTNNB1; T41I; 0
ATITAPSL

SEQ ID NO: 11340 - protein, 8 aa, Homo sapiens
  Table A; HLA-B*15:03; CTNNB1; T41I; 0
ATITAPSL

SEQ ID NO: 11341 - protein, 8 aa, Homo sapiens
  Table A; HLA-B*15:10; CTNNB1; T41I; 0
ATITAPSL

SEQ ID NO: 11342 - protein, 8 aa, Homo sapiens
  Table A; HLA-B*27:05; CTNNB1; T41I; 1
ATITAPSL

SEQ ID NO: 11343 - protein, 8 aa, Homo sapiens
  Table A; HLA-B*35:01; CTNNB1; T41I; 1
ATITAPSL

SEQ ID NO: 11344 - protein, 8 aa, Homo sapiens
  Table A; HLA-B*35:03; CTNNB1; T41I; 0
ATITAPSL

SEQ ID NO: 11345 - protein, 8 aa, Homo sapiens
  Table A; HLA-B*37:01; CTNNB1; T41I; 0
ATITAPSL

SEQ ID NO: 11346 - protein, 8 aa, Homo sapiens
  Table A; HLA-B*38:01; CTNNB1; T41I; 0
ATITAPSL

SEQ ID NO: 11347 - protein, 8 aa, Homo sapiens
  Table A; HLA-B*39:01; CTNNB1; T41I; 0
ATITAPSL

SEQ ID NO: 11348 - protein, 8 aa, Homo sapiens
  Table A; HLA-B*40:01; CTNNB1; T41I; 1
ATITAPSL

SEQ ID NO: 11349 - protein, 8 aa, Homo sapiens
  Table A; HLA-B*40:02; CTNNB1; T41I; 0
ATITAPSL

SEQ ID NO: 11350 - protein, 8 aa, Homo sapiens
  Table A; HLA-B*41:02; CTNNB1; T41I; 0
ATITAPSL

SEQ ID NO: 11351 - protein, 8 aa, Homo sapiens
  Table A; HLA-B*44:03; CTNNB1; T41I; 1
ATITAPSL

SEQ ID NO: 11352 - protein, 8 aa, Homo sapiens
  Table A; HLA-B*44:05; CTNNB1; T41I; 0
ATITAPSL

SEQ ID NO: 11353 - protein, 8 aa, Homo sapiens
  Table A; HLA-B*46:01; CTNNB1; T41I; 0
ATITAPSL

SEQ ID NO: 11354 - protein, 8 aa, Homo sapiens
  Table A; HLA-B*48:01; CTNNB1; T41I; 0
ATITAPSL

SEQ ID NO: 11355 - protein, 8 aa, Homo sapiens
  Table A; HLA-B*57:01; CTNNB1; T41I; 1
ATITAPSL

SEQ ID NO: 11356 - protein, 8 aa, Homo sapiens
  Table A; HLA-B*58:01; CTNNB1; T41I; 0
ATITAPSL

SEQ ID NO: 11357 - protein, 8 aa, Homo sapiens
  Table A; HLA-C*01:02; CTNNB1; T41I; 0
ATITAPSL

SEQ ID NO: 11358 - protein, 8 aa, Homo sapiens
  Table A; HLA-C*03:02; CTNNB1; T41I; 0
ATITAPSL

SEQ ID NO: 11359 - protein, 8 aa, Homo sapiens
  Table A; HLA-C*03:03; CTNNB1; T41I; 1
ATITAPSL

SEQ ID NO: 11360 - protein, 8 aa, Homo sapiens
  Table A; HLA-C*03:04; CTNNB1; T41I; 1
ATITAPSL

SEQ ID NO: 11361 - protein, 8 aa, Homo sapiens
  Table A; HLA-C*07:04; CTNNB1; T41I; 0
ATITAPSL

SEQ ID NO: 11362 - protein, 8 aa, Homo sapiens
  Table A; HLA-C*08:01; CTNNB1; T41I; 0
ATITAPSL

SEQ ID NO: 11363 - protein, 8 aa, Homo sapiens
  Table A; HLA-C*08:02; CTNNB1; T41I; 1
ATITAPSL

SEQ ID NO: 11364 - protein, 8 aa, Homo sapiens
  Table A; HLA-C*08:03; CTNNB1; T41I; 0
ATITAPSL

SEQ ID NO: 11365 - protein, 8 aa, Homo sapiens
  Table A; HLA-C*14:02; CTNNB1; T41I; 0
ATITAPSL

SEQ ID NO: 11366 - protein, 8 aa, Homo sapiens
  Table A; HLA-C*14:03; CTNNB1; T41I; 0
ATITAPSL

SEQ ID NO: 11367 - protein, 8 aa, Homo sapiens
  Table A; HLA-C*15:02; CTNNB1; T41I; 0
ATITAPSL

SEQ ID NO: 11368 - protein, 8 aa, Homo sapiens
  Table A; HLA-C*16:01; CTNNB1; T41I; 1
ATITAPSL

SEQ ID NO: 11369 - protein, 8 aa, Homo sapiens
  Table A; HLA-C*16:02; CTNNB1; T41I; 0
ATITAPSL

SEQ ID NO: 11370 - protein, 8 aa, Homo sapiens
  Table A; HLA-C*17:01; CTNNB1; T41I; 0
ATITAPSL

SEQ ID NO: 11371 - protein, 9 aa, Homo sapiens
  Table A; HLA-A*11:01; CTNNB1; T41I; 1
ATITAPSLS

SEQ ID NO: 11372 - protein, 9 aa, Homo sapiens
  Table A; HLA-A*31:01; CTNNB1; T41I; 0
ATITAPSLS

SEQ ID NO: 11373 - protein, 9 aa, Homo sapiens
  Table A; HLA-A*33:03; CTNNB1; T41I; 0
ATITAPSLS

SEQ ID NO: 11374 - protein, 9 aa, Homo sapiens
  Table A; HLA-A*68:01; CTNNB1; T41I; 0
ATITAPSLS

SEQ ID NO: 11375 - protein, 9 aa, Homo sapiens
  Table A; HLA-A*68:02; CTNNB1; T41I; 0
ATITAPSLS

SEQ ID NO: 11376 - protein, 9 aa, Homo sapiens
  Table A; HLA-B*27:05; CTNNB1; T41I; 1
ATITAPSLS

SEQ ID NO: 11377 - protein, 10 aa, Homo sapiens
  Table A; HLA-A*03:01; CTNNB1; T41I; 1
ATITAPSLSG

SEQ ID NO: 11378 - protein, 10 aa, Homo sapiens
  Table A; HLA-A*11:01; CTNNB1; T41I; 1
ATITAPSLSG

SEQ ID NO: 11379 - protein, 10 aa, Homo sapiens
  Table A; HLA-A*30:01; CTNNB1; T41I; 0
ATITAPSLSG

SEQ ID NO: 11380 - protein, 10 aa, Homo sapiens
  Table A; HLA-A*68:01; CTNNB1; T41I; 0
ATITAPSLSG

SEQ ID NO: 11381 - protein, 10 aa, Homo sapiens
  Table A; HLA-A*68:02; CTNNB1; T41I; 0
ATITAPSLSG

SEQ ID NO: 11382 - protein, 10 aa, Homo sapiens
  Table A; HLA-B*08:01; CTNNB1; T41I; 1
ATITAPSLSG

SEQ ID NO: 11383 - protein, 10 aa, Homo sapiens
  Table A; HLA-B*50:01; CTNNB1; T41I; 0
ATITAPSLSG

SEQ ID NO: 11384 - protein, 11 aa, Homo sapiens
  Table A; HLA-A*03:01; CTNNB1; T41I; 1
ATITAPSLSGK

SEQ ID NO: 11385 - protein, 11 aa, Homo sapiens
  Table A; HLA-A*03:02; CTNNB1; T41I; 0
ATITAPSLSGK

SEQ ID NO: 11386 - protein, 11 aa, Homo sapiens
  Table A; HLA-A*11:01; CTNNB1; T41I; 1
ATITAPSLSGK

SEQ ID NO: 11387 - protein, 11 aa, Homo sapiens
  Table A; HLA-A*26:03; CTNNB1; T41I; 0
ATITAPSLSGK

SEQ ID NO: 11388 - protein, 11 aa, Homo sapiens
  Table A; HLA-A*30:01; CTNNB1; T41I; 0
ATITAPSLSGK

SEQ ID NO: 11389 - protein, 11 aa, Homo sapiens
  Table A; HLA-A*31:01; CTNNB1; T41I; 0
ATITAPSLSGK

SEQ ID NO: 11390 - protein, 11 aa, Homo sapiens
  Table A; HLA-A*33:03; CTNNB1; T41I; 0
ATITAPSLSGK

SEQ ID NO: 11391 - protein, 11 aa, Homo sapiens
  Table A; HLA-A*68:01; CTNNB1; T41I; 0
ATITAPSLSGK

SEQ ID NO: 11392 - protein, 11 aa, Homo sapiens
  Table A; HLA-A*68:02; CTNNB1; T41I; 0
ATITAPSLSGK

SEQ ID NO: 11393 - protein, 11 aa, Homo sapiens
  Table A; HLA-B*27:02; CTNNB1; T41I; 0
ATITAPSLSGK

SEQ ID NO: 11394 - protein, 11 aa, Homo sapiens
  Table A; HLA-B*57:01; CTNNB1; T41I; 1
ATITAPSLSGK

SEQ ID NO: 11395 - protein, 11 aa, Homo sapiens
  Table A; HLA-B*58:01; CTNNB1; T41I; 0
ATITAPSLSGK

SEQ ID NO: 11396 - protein, 8 aa, Homo sapiens
  Table A; HLA-A*30:02; CDKN2A; H83Y; 0
ATLTRPVY

SEQ ID NO: 11397 - protein, 8 aa, Homo sapiens
  Table A; HLA-A*32:01; CDKN2A; H83Y; 0
ATLTRPVY

SEQ ID NO: 11398 - protein, 8 aa, Homo sapiens
  Table A; HLA-B*15:01; CDKN2A; H83Y; 0
ATLTRPVY

SEQ ID NO: 11399 - protein, 8 aa, Homo sapiens
  Table A; HLA-B*57:01; CDKN2A; H83Y; 0
ATLTRPVY

SEQ ID NO: 11400 - protein, 8 aa, Homo sapiens
  Table A; HLA-B*58:01; CDKN2A; H83Y; 0
ATLTRPVY

SEQ ID NO: 11401 - protein, 8 aa, Homo sapiens
  Table A; HLA-C*16:01; CDKN2A; H83Y; 0
ATLTRPVY

SEQ ID NO: 11402 - protein, 8 aa, Homo sapiens
  Table A; HLA-A*02:04; CTNNB1; S45F; 0
ATTTAPFL

SEQ ID NO: 11403 - protein, 8 aa, Homo sapiens
  Table A; HLA-A*02:06; CTNNB1; S45F; 0
ATTTAPFL

SEQ ID NO: 11404 - protein, 8 aa, Homo sapiens
  Table A; HLA-A*03:02; CTNNB1; S45F; 0
ATTTAPFL

SEQ ID NO: 11405 - protein, 8 aa, Homo sapiens
  Table A; HLA-A*11:01; CTNNB1; S45F; 1
ATTTAPFL

SEQ ID NO: 11406 - protein, 8 aa, Homo sapiens
  Table A; HLA-A*23:01; CTNNB1; S45F; 0
ATTTAPFL

SEQ ID NO: 11407 - protein, 8 aa, Homo sapiens
  Table A; HLA-A*30:01; CTNNB1; S45F; 0
ATTTAPFL

SEQ ID NO: 11408 - protein, 8 aa, Homo sapiens
  Table A; HLA-A*31:01; CTNNB1; S45F; 0
ATTTAPFL

SEQ ID NO: 11409 - protein, 8 aa, Homo sapiens
  Table A; HLA-A*68:02; CTNNB1; S45F; 0
ATTTAPFL

SEQ ID NO: 11410 - protein, 8 aa, Homo sapiens
  Table A; HLA-B*07:02; CTNNB1; S45F; 1
ATTTAPFL

SEQ ID NO: 11411 - protein, 8 aa, Homo sapiens
  Table A; HLA-B*13:02; CTNNB1; S45F; 0
ATTTAPFL

SEQ ID NO: 11412 - protein, 8 aa, Homo sapiens
  Table A; HLA-B*15:01; CTNNB1; S45F; 1
ATTTAPFL

SEQ ID NO: 11413 - protein, 8 aa, Homo sapiens
  Table A; HLA-B*15:10; CTNNB1; S45F; 0
ATTTAPFL

SEQ ID NO: 11414 - protein, 8 aa, Homo sapiens
  Table A; HLA-B*27:05; CTNNB1; S45F; 0
ATTTAPFL

SEQ ID NO: 11415 - protein, 8 aa, Homo sapiens
  Table A; HLA-B*39:01; CTNNB1; S45F; 0
ATTTAPFL

SEQ ID NO: 11416 - protein, 8 aa, Homo sapiens
  Table A; HLA-B*40:02; CTNNB1; S45F; 0
ATTTAPFL

SEQ ID NO: 11417 - protein, 8 aa, Homo sapiens
  Table A; HLA-B*44:05; CTNNB1; S45F; 0
ATTTAPFL

SEQ ID NO: 11418 - protein, 8 aa, Homo sapiens
  Table A; HLA-B*48:01; CTNNB1; S45F; 0
ATTTAPFL

SEQ ID NO: 11419 - protein, 8 aa, Homo sapiens
  Table A; HLA-B*57:01; CTNNB1; S45F; 1
ATTTAPFL

SEQ ID NO: 11420 - protein, 8 aa, Homo sapiens
  Table A; HLA-B*58:01; CTNNB1; S45F; 0
ATTTAPFL

SEQ ID NO: 11421 - protein, 8 aa, Homo sapiens
  Table A; HLA-C*03:03; CTNNB1; S45F; 1
ATTTAPFL

SEQ ID NO: 11422 - protein, 8 aa, Homo sapiens
  Table A; HLA-C*03:04; CTNNB1; S45F; 1
ATTTAPFL

SEQ ID NO: 11423 - protein, 8 aa, Homo sapiens
  Table A; HLA-C*08:01; CTNNB1; S45F; 0
ATTTAPFL

SEQ ID NO: 11424 - protein, 8 aa, Homo sapiens
  Table A; HLA-C*08:03; CTNNB1; S45F; 0
ATTTAPFL

SEQ ID NO: 11425 - protein, 8 aa, Homo sapiens
  Table A; HLA-C*14:03; CTNNB1; S45F; 0
ATTTAPFL

SEQ ID NO: 11426 - protein, 8 aa, Homo sapiens
  Table A; HLA-C*15:02; CTNNB1; S45F; 0
ATTTAPFL

SEQ ID NO: 11427 - protein, 8 aa, Homo sapiens
  Table A; HLA-C*16:01; CTNNB1; S45F; 0
ATTTAPFL

SEQ ID NO: 11428 - protein, 8 aa, Homo sapiens
  Table A; HLA-C*16:02; CTNNB1; S45F; 0
ATTTAPFL

SEQ ID NO: 11429 - protein, 8 aa, Homo sapiens
  Table A; HLA-C*17:01; CTNNB1; S45F; 0
ATTTAPFL

SEQ ID NO: 11430 - protein, 9 aa, Homo sapiens
  Table A; HLA-A*11:01; CTNNB1; S45F; 1
ATTTAPFLS

SEQ ID NO: 11431 - protein, 9 aa, Homo sapiens
  Table A; HLA-A*31:01; CTNNB1; S45F; 0
ATTTAPFLS

SEQ ID NO: 11432 - protein, 9 aa, Homo sapiens
  Table A; HLA-A*68:02; CTNNB1; S45F; 0
ATTTAPFLS

SEQ ID NO: 11433 - protein, 9 aa, Homo sapiens
  Table A; HLA-B*27:05; CTNNB1; S45F; 0
ATTTAPFLS

SEQ ID NO: 11434 - protein, 9 aa, Homo sapiens
  Table A; HLA-B*58:01; CTNNB1; S45F; 0
ATTTAPFLS

SEQ ID NO: 11435 - protein, 10 aa, Homo sapiens
  Table A; HLA-A*11:01; CTNNB1; S45F; 1
ATTTAPFLSG

SEQ ID NO: 11436 - protein, 11 aa, Homo sapiens
  Table A; HLA-A*03:01; CTNNB1; S45F; 1
ATTTAPFLSGK

SEQ ID NO: 11437 - protein, 11 aa, Homo sapiens
  Table A; HLA-A*03:02; CTNNB1; S45F; 0
ATTTAPFLSGK

SEQ ID NO: 11438 - protein, 11 aa, Homo sapiens
  Table A; HLA-A*11:01; CTNNB1; S45F; 1
ATTTAPFLSGK

SEQ ID NO: 11439 - protein, 11 aa, Homo sapiens
  Table A; HLA-A*31:01; CTNNB1; S45F; 0
ATTTAPFLSGK

SEQ ID NO: 11440 - protein, 11 aa, Homo sapiens
  Table A; HLA-A*68:01; CTNNB1; S45F; 0
ATTTAPFLSGK

SEQ ID NO: 11441 - protein, 11 aa, Homo sapiens
  Table A; HLA-A*68:02; CTNNB1; S45F; 0
ATTTAPFLSGK

SEQ ID NO: 11442 - protein, 11 aa, Homo sapiens
  Table A; HLA-B*27:02; CTNNB1; S45F; 0
ATTTAPFLSGK

SEQ ID NO: 11443 - protein, 8 aa, Homo sapiens
  Table A; HLA-A*11:01; CTNNB1; S45P; 1
ATTTAPPL

SEQ ID NO: 11444 - protein, 8 aa, Homo sapiens
  Table A; HLA-A*30:01; CTNNB1; S45P; 1
ATTTAPPL

SEQ ID NO: 11445 - protein, 8 aa, Homo sapiens
  Table A; HLA-B*07:02; CTNNB1; S45P; 1
ATTTAPPL

SEQ ID NO: 11446 - protein, 8 aa, Homo sapiens
  Table A; HLA-B*13:02; CTNNB1; S45P; 1
ATTTAPPL

SEQ ID NO: 11447 - protein, 8 aa, Homo sapiens
  Table A; HLA-B*15:01; CTNNB1; S45P; 1
ATTTAPPL

SEQ ID NO: 11448 - protein, 8 aa, Homo sapiens
  Table A; HLA-B*15:10; CTNNB1; S45P; 0
ATTTAPPL

SEQ ID NO: 11449 - protein, 8 aa, Homo sapiens
  Table A; HLA-B*35:03; CTNNB1; S45P; 1
ATTTAPPL

SEQ ID NO: 11450 - protein, 8 aa, Homo sapiens
  Table A; HLA-B*39:01; CTNNB1; S45P; 0
ATTTAPPL

SEQ ID NO: 11451 - protein, 8 aa, Homo sapiens
  Table A; HLA-B*40:02; CTNNB1; S45P; 0
ATTTAPPL

SEQ ID NO: 11452 - protein, 8 aa, Homo sapiens
  Table A; HLA-B*41:02; CTNNB1; S45P; 0
ATTTAPPL

SEQ ID NO: 11453 - protein, 8 aa, Homo sapiens
  Table A; HLA-B*44:05; CTNNB1; S45P; 0
ATTTAPPL

SEQ ID NO: 11454 - protein, 8 aa, Homo sapiens
  Table A; HLA-B*48:01; CTNNB1; S45P; 0
ATTTAPPL

SEQ ID NO: 11455 - protein, 8 aa, Homo sapiens
  Table A; HLA-B*58:01; CTNNB1; S45P; 0
ATTTAPPL

SEQ ID NO: 11456 - protein, 8 aa, Homo sapiens
  Table A; HLA-C*01:02; CTNNB1; S45P; 1
ATTTAPPL

SEQ ID NO: 11457 - protein, 8 aa, Homo sapiens
  Table A; HLA-C*03:03; CTNNB1; S45P; 1
ATTTAPPL

SEQ ID NO: 11458 - protein, 8 aa, Homo sapiens
  Table A; HLA-C*03:04; CTNNB1; S45P; 1
ATTTAPPL

SEQ ID NO: 11459 - protein, 8 aa, Homo sapiens
  Table A; HLA-C*08:01; CTNNB1; S45P; 0
ATTTAPPL

SEQ ID NO: 11460 - protein, 8 aa, Homo sapiens
  Table A; HLA-C*08:03; CTNNB1; S45P; 0
ATTTAPPL

SEQ ID NO: 11461 - protein, 8 aa, Homo sapiens
  Table A; HLA-C*14:02; CTNNB1; S45P; 0
ATTTAPPL

SEQ ID NO: 11462 - protein, 8 aa, Homo sapiens
  Table A; HLA-C*14:03; CTNNB1; S45P; 0
ATTTAPPL

SEQ ID NO: 11463 - protein, 8 aa, Homo sapiens
  Table A; HLA-C*16:01; CTNNB1; S45P; 1
ATTTAPPL

SEQ ID NO: 11464 - protein, 8 aa, Homo sapiens
  Table A; HLA-C*16:02; CTNNB1; S45P; 0
ATTTAPPL

SEQ ID NO: 11465 - protein, 9 aa, Homo sapiens
  Table A; HLA-A*11:01; CTNNB1; S45P; 1
ATTTAPPLS

SEQ ID NO: 11466 - protein, 9 aa, Homo sapiens
  Table A; HLA-A*30:01; CTNNB1; S45P; 1
ATTTAPPLS

SEQ ID NO: 11467 - protein, 9 aa, Homo sapiens
  Table A; HLA-B*13:02; CTNNB1; S45P; 1
ATTTAPPLS

SEQ ID NO: 11468 - protein, 9 aa, Homo sapiens
  Table A; HLA-B*48:01; CTNNB1; S45P; 0
ATTTAPPLS

SEQ ID NO: 11469 - protein, 9 aa, Homo sapiens
  Table A; HLA-B*58:01; CTNNB1; S45P; 0
ATTTAPPLS

SEQ ID NO: 11470 - protein, 9 aa, Homo sapiens
  Table A; HLA-C*08:03; CTNNB1; S45P; 0
ATTTAPPLS

SEQ ID NO: 11471 - protein, 10 aa, Homo sapiens
  Table A; HLA-A*11:01; CTNNB1; S45P; 1
ATTTAPPLSG

SEQ ID NO: 11472 - protein, 10 aa, Homo sapiens
  Table A; HLA-A*30:01; CTNNB1; S45P; 1
ATTTAPPLSG

SEQ ID NO: 11473 - protein, 11 aa, Homo sapiens
  Table A; HLA-A*03:01; CTNNB1; S45P; 1
ATTTAPPLSGK

SEQ ID NO: 11474 - protein, 11 aa, Homo sapiens
  Table A; HLA-A*03:02; CTNNB1; S45P; 0
ATTTAPPLSGK

SEQ ID NO: 11475 - protein, 11 aa, Homo sapiens
  Table A; HLA-A*11:01; CTNNB1; S45P; 1
ATTTAPPLSGK

SEQ ID NO: 11476 - protein, 11 aa, Homo sapiens
  Table A; HLA-A*31:01; CTNNB1; S45P; 1
ATTTAPPLSGK

SEQ ID NO: 11477 - protein, 11 aa, Homo sapiens
  Table A; HLA-A*68:01; CTNNB1; S45P; 1
ATTTAPPLSGK

SEQ ID NO: 11478 - protein, 11 aa, Homo sapiens
  Table A; HLA-A*68:02; CTNNB1; S45P; 0
ATTTAPPLSGK

SEQ ID NO: 11479 - protein, 11 aa, Homo sapiens
  Table A; HLA-B*27:02; CTNNB1; S45P; 0
ATTTAPPLSGK

SEQ ID NO: 11480 - protein, 9 aa, Homo sapiens
  Table A; HLA-A*03:01; PIK3CA; V344M; 1
ATYMNLNIR

SEQ ID NO: 11481 - protein, 9 aa, Homo sapiens
  Table A; HLA-A*11:01; PIK3CA; V344M; 1
ATYMNLNIR

SEQ ID NO: 11482 - protein, 9 aa, Homo sapiens
  Table A; HLA-A*31:01; PIK3CA; V344M; 0
ATYMNLNIR

SEQ ID NO: 11483 - protein, 9 aa, Homo sapiens
  Table A; HLA-A*33:03; PIK3CA; V344M; 0
ATYMNLNIR

SEQ ID NO: 11484 - protein, 9 aa, Homo sapiens
  Table A; HLA-A*68:01; PIK3CA; V344M; 0
ATYMNLNIR

SEQ ID NO: 11485 - protein, 9 aa, Homo sapiens
  Table A; HLA-A*03:01; PIK3CA; N345K; 1
ATYVKLNIR

SEQ ID NO: 11486 - protein, 9 aa, Homo sapiens
  Table A; HLA-A*11:01; PIK3CA; N345K; 1
ATYVKLNIR

SEQ ID NO: 11487 - protein, 9 aa, Homo sapiens
  Table A; HLA-A*31:01; PIK3CA; N345K; 0
ATYVKLNIR

SEQ ID NO: 11488 - protein, 9 aa, Homo sapiens
  Table A; HLA-A*33:03; PIK3CA; N345K; 0
ATYVKLNIR

SEQ ID NO: 11489 - protein, 10 aa, Homo sapiens
  Table A; HLA-A*31:01; KEAP1; G480W; 0
AVGGFDWTNR

SEQ ID NO: 11490 - protein, 10 aa, Homo sapiens
  Table A; HLA-A*33:03; KEAP1; G480W; 0
AVGGFDWTNR

SEQ ID NO: 11491 - protein, 9 aa, Homo sapiens
  Table A; HLA-B*07:02; KRAS; G12V; 1
AVGVGKSAL

SEQ ID NO: 11492 - protein, 9 aa, Homo sapiens
  Table A; HLA-B*08:01; KRAS; G12V; 1
AVGVGKSAL

SEQ ID NO: 11493 - protein, 9 aa, Homo sapiens
  Table A; HLA-B*15:01; KRAS; G12V; 1
AVGVGKSAL

SEQ ID NO: 11494 - protein, 9 aa, Homo sapiens
  Table A; HLA-B*48:01; KRAS; G12V; 0
AVGVGKSAL

SEQ ID NO: 11495 - protein, 9 aa, Homo sapiens
  Table A; HLA-C*01:02; KRAS; G12V; 1
AVGVGKSAL

SEQ ID NO: 11496 - protein, 9 aa, Homo sapiens
  Table A; HLA-C*17:01; ARID2; S297F; 0
AVILRNLFF

SEQ ID NO: 11497 - protein, 9 aa, Homo sapiens
  Table A; HLA-A*02:03; RAC1; A159V; 0
AVKYLECSV

SEQ ID NO: 11498 - protein, 9 aa, Homo sapiens
  Table A; HLA-A*30:01; RAC1; A159V; 0
AVKYLECSV

SEQ ID NO: 11499 - protein, 9 aa, Homo sapiens
  Table A; HLA-A*68:02; RAC1; A159V; 0
AVKYLECSV

SEQ ID NO: 11500 - protein, 9 aa, Homo sapiens
  Table A; HLA-B*13:02; RAC1; A159V; 0
AVKYLECSV

SEQ ID NO: 11501 - protein, 9 aa, Homo sapiens
  Table A; HLA-A*02:04; MTOR; E1799K; 0
AVMNFKAVL

SEQ ID NO: 11502 - protein, 9 aa, Homo sapiens
  Table A; HLA-B*07:02; MTOR; E1799K; 1
AVMNFKAVL

SEQ ID NO: 11503 - protein, 9 aa, Homo sapiens
  Table A; HLA-B*08:01; MTOR; E1799K; 1
AVMNFKAVL

SEQ ID NO: 11504 - protein, 9 aa, Homo sapiens
  Table A; HLA-B*15:01; MTOR; E1799K; 1
AVMNFKAVL

SEQ ID NO: 11505 - protein, 10 aa, Homo sapiens
  Table A; HLA-A*03:01; MTOR; E1799K; 1
AVMNFKAVLH

SEQ ID NO: 11506 - protein, 10 aa, Homo sapiens
  Table A; HLA-A*03:02; MTOR; E1799K; 0
AVMNFKAVLH

SEQ ID NO: 11507 - protein, 11 aa, Homo sapiens
  Table A; HLA-A*03:01; MTOR; E1799K; 1
AVMNFKAVLHY

SEQ ID NO: 11508 - protein, 11 aa, Homo sapiens
  Table A; HLA-A*29:02; MTOR; E1799K; 1
AVMNFKAVLHY

SEQ ID NO: 11509 - protein, 11 aa, Homo sapiens
  Table A; HLA-B*15:01; MTOR; E1799K; 1
AVMNFKAVLHY

SEQ ID NO: 11510 - protein, 9 aa, Homo sapiens
  Table A; HLA-A*32:01; ROBO2; D1014N; 0
AVNLPDPQW

SEQ ID NO: 11511 - protein, 9 aa, Homo sapiens
  Table A; HLA-B*13:01; ROBO2; D1014N; 0
AVNLPDPQW

SEQ ID NO: 11512 - protein, 9 aa, Homo sapiens
  Table A; HLA-B*15:01; ROBO2; D1014N; 1
AVNLPDPQW

SEQ ID NO: 11513 - protein, 9 aa, Homo sapiens
  Table A; HLA-B*15:13; ROBO2; D1014N; 0
AVNLPDPQW

SEQ ID NO: 11514 - protein, 9 aa, Homo sapiens
  Table A; HLA-B*35:02; ROBO2; D1014N; 0
AVNLPDPQW

SEQ ID NO: 11515 - protein, 9 aa, Homo sapiens
  Table A; HLA-B*35:12; ROBO2; D1014N; 0
AVNLPDPQW

SEQ ID NO: 11516 - protein, 9 aa, Homo sapiens
  Table A; HLA-B*38:01; ROBO2; D1014N; 0
AVNLPDPQW

SEQ ID NO: 11517 - protein, 9 aa, Homo sapiens
  Table A; HLA-B*57:01; ROBO2; D1014N; 0
AVNLPDPQW

SEQ ID NO: 11518 - protein, 9 aa, Homo sapiens
  Table A; HLA-B*58:01; ROBO2; D1014N; 0
AVNLPDPQW

SEQ ID NO: 11519 - protein, 10 aa, Homo sapiens
  Table A; HLA-A*03:02; ROBO2; D1014N; 0
AVNLPDPQWK

SEQ ID NO: 11520 - protein, 10 aa, Homo sapiens
  Table A; HLA-A*11:01; ROBO2; D1014N; 1
AVNLPDPQWK

SEQ ID NO: 11521 - protein, 9 aa, Homo sapiens
  Table A; HLA-A*11:01; CNTNAP2; R483Q; 1
AVQTNSPLQ

SEQ ID NO: 11522 - protein, 10 aa, Homo sapiens
  Table A; HLA-A*02:03; CNTNAP2; R483Q; 0
AVQTNSPLQV

SEQ ID NO: 11523 - protein, 10 aa, Homo sapiens
  Table A; HLA-A*03:02; CNTNAP2; R483Q; 0
AVQTNSPLQV

SEQ ID NO: 11524 - protein, 10 aa, Homo sapiens
  Table A; HLA-B*13:02; CNTNAP2; R483Q; 0
AVQTNSPLQV

SEQ ID NO: 11525 - protein, 11 aa, Homo sapiens
  Table A; HLA-A*03:01; CNTNAP2; R483Q; 1
AVQTNSPLQVK

SEQ ID NO: 11526 - protein, 11 aa, Homo sapiens
  Table A; HLA-A*03:02; CNTNAP2; R483Q; 0
AVQTNSPLQVK

SEQ ID NO: 11527 - protein, 11 aa, Homo sapiens
  Table A; HLA-A*11:01; CNTNAP2; R483Q; 1
AVQTNSPLQVK

SEQ ID NO: 11528 - protein, 11 aa, Homo sapiens
  Table A; HLA-A*31:01; CNTNAP2; R483Q; 0
AVQTNSPLQVK

SEQ ID NO: 11529 - protein, 11 aa, Homo sapiens
  Table A; HLA-A*68:01; CNTNAP2; R483Q; 0
AVQTNSPLQVK

SEQ ID NO: 11530 - protein, 9 aa, Homo sapiens
  Table A; HLA-A*31:01; PTK6; H126P; 0
AVRPYKIWR

SEQ ID NO: 11531 - protein, 10 aa, Homo sapiens
  Table A; HLA-A*31:01; PTK6; H126P; 0
AVRPYKIWRR

SEQ ID NO: 11532 - protein, 10 aa, Homo sapiens
  Table A; HLA-A*02:05; EGFR; G598V; 0
AVVMGENNTL

SEQ ID NO: 11533 - protein, 10 aa, Homo sapiens
  Table A; HLA-A*02:06; EGFR; G598V; 0
AVVMGENNTL

SEQ ID NO: 11534 - protein, 10 aa, Homo sapiens
  Table A; HLA-A*02:08; EGFR; G598V; 0
AVVMGENNTL

SEQ ID NO: 11535 - protein, 9 aa, Homo sapiens
  Table A; HLA-A*31:01; PIK3CA; H1047Y; 0
AYHGGWTTK

SEQ ID NO: 11536 - protein, 9 aa, Homo sapiens
  Table A; HLA-A*33:03; PIK3CA; H1047Y; 0
AYHGGWTTK

SEQ ID NO: 11537 - protein, 10 aa, Homo sapiens
  Table A; HLA-C*14:02; PIK3CA; H1047Y; 0
AYHGGWTTKM

SEQ ID NO: 11538 - protein, 9 aa, Homo sapiens
  Table A; HLA-A*68:02; PIK3CA; N345K; 0
CATYVKLNI

SEQ ID NO: 11539 - protein, 9 aa, Homo sapiens
  Table A; HLA-B*13:02; PIK3CA; N345K; 1
CATYVKLNI

SEQ ID NO: 11540 - protein, 11 aa, Homo sapiens
  Table A; HLA-B*40:02; CTCF; K365T; 0
CDYASVEVSTL

SEQ ID NO: 11541 - protein, 11 aa, Homo sapiens
  Table A; HLA-B*48:01; CTCF; K365T; 0
CDYASVEVSTL

SEQ ID NO: 11542 - protein, 11 aa, Homo sapiens
  Table A; HLA-C*08:03; CTCF; K365T; 0
CDYASVEVSTL

SEQ ID NO: 11543 - protein, 8 aa, Homo sapiens
  Table A; HLA-A*30:01; PIK3CA; R38C; 0
CEATLVTI

SEQ ID NO: 11544 - protein, 8 aa, Homo sapiens
  Table A; HLA-B*18:01; PIK3CA; R38C; 0
CEATLVTI

SEQ ID NO: 11545 - protein, 8 aa, Homo sapiens
  Table A; HLA-B*40:02; PIK3CA; R38C; 0
CEATLVTI

SEQ ID NO: 11546 - protein, 8 aa, Homo sapiens
  Table A; HLA-B*41:02; PIK3CA; R38C; 0
CEATLVTI

SEQ ID NO: 11547 - protein, 8 aa, Homo sapiens
  Table A; HLA-B*44:05; PIK3CA; R38C; 0
CEATLVTI

SEQ ID NO: 11548 - protein, 8 aa, Homo sapiens
  Table A; HLA-B*49:01; PIK3CA; R38C; 0
CEATLVTI

SEQ ID NO: 11549 - protein, 9 aa, Homo sapiens
  Table A; HLA-B*49:01; PIK3CA; R38C; 0
CEATLVTIK

SEQ ID NO: 11550 - protein, 8 aa, Homo sapiens
  Table A; HLA-B*14:02; SIRPA; V233I; 0
CEVAHITL

SEQ ID NO: 11551 - protein, 8 aa, Homo sapiens
  Table A; HLA-B*18:01; SIRPA; V233I; 0
CEVAHITL

SEQ ID NO: 11552 - protein, 8 aa, Homo sapiens
  Table A; HLA-B*37:01; SIRPA; V233I; 0
CEVAHITL

SEQ ID NO: 11553 - protein, 8 aa, Homo sapiens
  Table A; HLA-B*40:01; SIRPA; V233I; 0
CEVAHITL

SEQ ID NO: 11554 - protein, 8 aa, Homo sapiens
  Table A; HLA-B*40:02; SIRPA; V233I; 0
CEVAHITL

SEQ ID NO: 11555 - protein, 8 aa, Homo sapiens
  Table A; HLA-B*41:02; SIRPA; V233I; 0
CEVAHITL

SEQ ID NO: 11556 - protein, 8 aa, Homo sapiens
  Table A; HLA-B*44:05; SIRPA; V233I; 0
CEVAHITL

SEQ ID NO: 11557 - protein, 8 aa, Homo sapiens
  Table A; HLA-B*49:01; SIRPA; V233I; 0
CEVAHITL

SEQ ID NO: 11558 - protein, 11 aa, Homo sapiens
  Table A; HLA-B*15:01; CTNNB1; S33C; 1
CGIHSGATTTA

SEQ ID NO: 11559 - protein, 8 aa, Homo sapiens
  Table A; HLA-B*08:01; KRAS; G12C; 1
CGVGKSAL

SEQ ID NO: 11560 - protein, 8 aa, Homo sapiens
  Table A; HLA-B*08:01; NRAS; G12C; 1
CGVGKSAL

SEQ ID NO: 11561 - protein, 8 aa, Homo sapiens
  Table A; HLA-B*14:02; NRAS; G12C; 0
CGVGKSAL

SEQ ID NO: 11562 - protein, 8 aa, Homo sapiens
  Table A; HLA-B*15:10; CSMD3; R1529H; 0
CHDPGVPM

SEQ ID NO: 11563 - protein, 8 aa, Homo sapiens
  Table A; HLA-B*39:06; GNAS; R201H; 0
CHVLTSGI

SEQ ID NO: 11564 - protein, 9 aa, Homo sapiens
  Table A; HLA-C*01:02; CCND1; T286I; 0
CIPTDVRDV

SEQ ID NO: 11565 - protein, 10 aa, Homo sapiens
  Table A; HLA-A*03:01; ATM; R2691C; 1
CLAGGVNLPK

SEQ ID NO: 11566 - protein, 10 aa, Homo sapiens
  Table A; HLA-A*03:02; ATM; R2691C; 0
CLAGGVNLPK

SEQ ID NO: 11567 - protein, 10 aa, Homo sapiens
  Table A; HLA-A*11:01; ATM; R2691C; 0
CLAGGVNLPK

SEQ ID NO: 11568 - protein, 10 aa, Homo sapiens
  Table A; HLA-B*27:02; ATM; R2691C; 0
CLAGGVNLPK

SEQ ID NO: 11569 - protein, 8 aa, Homo sapiens
  Table A; HLA-C*05:01; TP53; Y205C; 1
CLDDRNTF

SEQ ID NO: 11570 - protein, 8 aa, Homo sapiens
  Table A; HLA-C*08:02; TP53; Y205C; 0
CLDDRNTF

SEQ ID NO: 11571 - protein, 8 aa, Homo sapiens
  Table A; HLA-B*13:02; PIK3CA; R38H; 0
CLHEATLV

SEQ ID NO: 11572 - protein, 10 aa, Homo sapiens
  Table A; HLA-A*02:01; PIK3CA; R38H; 1
CLHEATLVTI

SEQ ID NO: 11573 - protein, 10 aa, Homo sapiens
  Table A; HLA-A*02:03; PIK3CA; R38H; 0
CLHEATLVTI

SEQ ID NO: 11574 - protein, 10 aa, Homo sapiens
  Table A; HLA-A*02:04; PIK3CA; R38H; 0
CLHEATLVTI

SEQ ID NO: 11575 - protein, 11 aa, Homo sapiens
  Table A; HLA-A*03:02; HRAS; Q61K; 0
CLLDILDTAGK

SEQ ID NO: 11576 - protein, 11 aa, Homo sapiens
  Table A; HLA-A*03:02; NRAS; Q61K; 0
CLLDILDTAGK

SEQ ID NO: 11577 - protein, 11 aa, Homo sapiens
  Table A; HLA-A*02:04; KRAS; Q61L; 0
CLLDILDTAGL

SEQ ID NO: 11578 - protein, 11 aa, Homo sapiens
  Table A; HLA-A*02:04; NRAS; Q61L; 0
CLLDILDTAGL

SEQ ID NO: 11579 - protein, 10 aa, Homo sapiens
  Table A; HLA-B*15:01; PTPRC; Q895H; 1
CLMVHVEAQY

SEQ ID NO: 11580 - protein, 8 aa, Homo sapiens
  Table A; HLA-A*02:04; CTNNB1; N387K; 0
CLWTLRKL

SEQ ID NO: 11581 - protein, 8 aa, Homo sapiens
  Table A; HLA-C*16:01; SF3B1; R625C; 0
CNTTARAF

SEQ ID NO: 11582 - protein, 8 aa, Homo sapiens
  Table A; HLA-B*55:02; SMAD4; G352V; 0
CPIVTVDV

SEQ ID NO: 11583 - protein, 9 aa, Homo sapiens
  Table A; HLA-B*15:02; SMAD4; G352V; 0
CPIVTVDVY

SEQ ID NO: 11584 - protein, 9 aa, Homo sapiens
  Table A; HLA-B*27:02; SMAD4; G352V; 0
CPIVTVDVY

SEQ ID NO: 11585 - protein, 9 aa, Homo sapiens
  Table A; HLA-B*35:01; SMAD4; G352V; 1
CPIVTVDVY

SEQ ID NO: 11586 - protein, 9 aa, Homo sapiens
  Table A; HLA-B*35:03; SMAD4; G352V; 0
CPIVTVDVY

SEQ ID NO: 11587 - protein, 9 aa, Homo sapiens
  Table A; HLA-B*35:08; SMAD4; G352V; 0
CPIVTVDVY

SEQ ID NO: 11588 - protein, 9 aa, Homo sapiens
  Table A; HLA-A*02:01; TP53; C141Y; 1
CQLAKTYPV

SEQ ID NO: 11589 - protein, 9 aa, Homo sapiens
  Table A; HLA-B*13:02; TP53; C141Y; 0
CQLAKTYPV

SEQ ID NO: 11590 - protein, 9 aa, Homo sapiens
  Table A; HLA-B*48:01; TP53; C141Y; 0
CQLAKTYPV

SEQ ID NO: 11591 - protein, 9 aa, Homo sapiens
  Table A; HLA-B*15:01; TP63; R379C; 1
CQNTHGIQM

SEQ ID NO: 11592 - protein, 10 aa, Homo sapiens
  Table A; HLA-A*11:01; PPP2R1A; R183W; 1
CSDDTPMVRW

SEQ ID NO: 11593 - protein, 10 aa, Homo sapiens
  Table A; HLA-B*44:03; PPP2R1A; R183W; 1
CSDDTPMVRW

SEQ ID NO: 11594 - protein, 10 aa, Homo sapiens
  Table A; HLA-B*57:01; PPP2R1A; R183W; 0
CSDDTPMVRW

SEQ ID NO: 11595 - protein, 10 aa, Homo sapiens
  Table A; HLA-B*58:01; PPP2R1A; R183W; 0
CSDDTPMVRW

SEQ ID NO: 11596 - protein, 8 aa, Homo sapiens
  Table A; HLA-C*05:01; PPP2R1A; P179R; 1
CSDDTRMV

SEQ ID NO: 11597 - protein, 8 aa, Homo sapiens
  Table A; HLA-C*08:02; PPP2R1A; P179R; 1
CSDDTRMV

SEQ ID NO: 11598 - protein, 9 aa, Homo sapiens
  Table A; HLA-A*03:01; PPP2R1A; P179R; 1
CSDDTRMVR

SEQ ID NO: 11599 - protein, 9 aa, Homo sapiens
  Table A; HLA-A*11:01; PPP2R1A; P179R; 1
CSDDTRMVR

SEQ ID NO: 11600 - protein, 9 aa, Homo sapiens
  Table A; HLA-A*31:01; PPP2R1A; P179R; 1
CSDDTRMVR

SEQ ID NO: 11601 - protein, 9 aa, Homo sapiens
  Table A; HLA-A*33:03; PPP2R1A; P179R; 0
CSDDTRMVR

SEQ ID NO: 11602 - protein, 9 aa, Homo sapiens
  Table A; HLA-A*02:05; ISX; R86C; 0
CTTFTTEQL

SEQ ID NO: 11603 - protein, 9 aa, Homo sapiens
  Table A; HLA-A*02:06; ISX; R86C; 0
CTTFTTEQL

SEQ ID NO: 11604 - protein, 9 aa, Homo sapiens
  Table A; HLA-A*02:08; ISX; R86C; 0
CTTFTTEQL

SEQ ID NO: 11605 - protein, 9 aa, Homo sapiens
  Table A; HLA-A*68:02; ISX; R86C; 0
CTTFTTEQL

SEQ ID NO: 11606 - protein, 9 aa, Homo sapiens
  Table A; HLA-B*48:01; ISX; R86C; 0
CTTFTTEQL

SEQ ID NO: 11607 - protein, 9 aa, Homo sapiens
  Table A; HLA-B*50:01; ISX; R86C; 0
CTTFTTEQL

SEQ ID NO: 11608 - protein, 9 aa, Homo sapiens
  Table A; HLA-A*68:02; TP53; M237I; 0
CTTIHYNYI

SEQ ID NO: 11609 - protein, 9 aa, Homo sapiens
  Table A; HLA-A*03:01; RGS7; R44C; 1
CTVKSFLSK

SEQ ID NO: 11610 - protein, 9 aa, Homo sapiens
  Table A; HLA-A*11:01; RGS7; R44C; 1
CTVKSFLSK

SEQ ID NO: 11611 - protein, 9 aa, Homo sapiens
  Table A; HLA-A*03:01; TP53; S127F; 1
CTYFPALNK

SEQ ID NO: 11612 - protein, 9 aa, Homo sapiens
  Table A; HLA-A*03:02; TP53; S127F; 0
CTYFPALNK

SEQ ID NO: 11613 - protein, 9 aa, Homo sapiens
  Table A; HLA-A*11:01; TP53; S127F; 0
CTYFPALNK

SEQ ID NO: 11614 - protein, 9 aa, Homo sapiens
  Table A; HLA-A*03:01; TP53; L130F; 1
CTYSPAFNK

SEQ ID NO: 11615 - protein, 9 aa, Homo sapiens
  Table A; HLA-A*03:02; TP53; L130F; 0
CTYSPAFNK

SEQ ID NO: 11616 - protein, 9 aa, Homo sapiens
  Table A; HLA-A*11:01; TP53; L130F; 0
CTYSPAFNK

SEQ ID NO: 11617 - protein, 9 aa, Homo sapiens
  Table A; HLA-A*31:01; TP53; L130F; 0
CTYSPAFNK

SEQ ID NO: 11618 - protein, 9 aa, Homo sapiens
  Table A; HLA-A*33:03; TP53; L130F; 0
CTYSPAFNK

SEQ ID NO: 11619 - protein, 9 aa, Homo sapiens
  Table A; HLA-B*27:05; TP53; L130F; 0
CTYSPAFNK

SEQ ID NO: 11620 - protein, 10 aa, Homo sapiens
  Table A; HLA-A*03:01; TP53; L130F; 1
CTYSPAFNKM

SEQ ID NO: 11621 - protein, 9 aa, Homo sapiens
  Table A; HLA-A*03:01; TP53; K132R; 1
CTYSPALNR

SEQ ID NO: 11622 - protein, 9 aa, Homo sapiens
  Table A; HLA-A*03:02; TP53; K132R; 0
CTYSPALNR

SEQ ID NO: 11623 - protein, 9 aa, Homo sapiens
  Table A; HLA-A*11:01; TP53; K132R; 0
CTYSPALNR

SEQ ID NO: 11624 - protein, 9 aa, Homo sapiens
  Table A; HLA-A*26:03; TP53; K132R; 0
CTYSPALNR

SEQ ID NO: 11625 - protein, 9 aa, Homo sapiens
  Table A; HLA-A*31:01; TP53; K132R; 0
CTYSPALNR

SEQ ID NO: 11626 - protein, 9 aa, Homo sapiens
  Table A; HLA-A*33:01; TP53; K132R; 0
CTYSPALNR

SEQ ID NO: 11627 - protein, 9 aa, Homo sapiens
  Table A; HLA-A*33:03; TP53; K132R; 0
CTYSPALNR

SEQ ID NO: 11628 - protein, 9 aa, Homo sapiens
  Table A; HLA-A*68:01; TP53; K132R; 0
CTYSPALNR

SEQ ID NO: 11629 - protein, 10 aa, Homo sapiens
  Table A; HLA-A*03:02; RHOA; Y42C; 0
CVADIEVDGK

SEQ ID NO: 11630 - protein, 10 aa, Homo sapiens
  Table A; HLA-A*11:01; RHOA; Y42C; 1
CVADIEVDGK

SEQ ID NO: 11631 - protein, 10 aa, Homo sapiens
  Table A; HLA-A*68:01; RHOA; Y42C; 0
CVADIEVDGK

SEQ ID NO: 11632 - protein, 10 aa, Homo sapiens
  Table A; HLA-A*68:02; RHOA; Y42C; 0
CVADIEVDGK

SEQ ID NO: 11633 - protein, 10 aa, Homo sapiens
  Table A; HLA-B*27:02; RHOA; Y42C; 0
CVADIEVDGK

SEQ ID NO: 11634 - protein, 9 aa, Homo sapiens
  Table A; HLA-B*13:02; KRAS; G13C; 0
CVGKSALTI

SEQ ID NO: 11635 - protein, 11 aa, Homo sapiens
  Table A; HLA-A*03:01; GNAS; R201C; 1
CVLTSGIFETK

SEQ ID NO: 11636 - protein, 11 aa, Homo sapiens
  Table A; HLA-A*03:02; GNAS; R201C; 0
CVLTSGIFETK

SEQ ID NO: 11637 - protein, 11 aa, Homo sapiens
  Table A; HLA-A*11:01; GNAS; R201C; 0
CVLTSGIFETK

SEQ ID NO: 11638 - protein, 11 aa, Homo sapiens
  Table A; HLA-B*27:02; GNAS; R201C; 0
CVLTSGIFETK

SEQ ID NO: 11639 - protein, 9 aa, Homo sapiens
  Table A; HLA-A*03:01; FKBP9; R107H; 1
CVNERHFVK

SEQ ID NO: 11640 - protein, 9 aa, Homo sapiens
  Table A; HLA-A*03:02; FKBP9; R107H; 0
CVNERHFVK

SEQ ID NO: 11641 - protein, 9 aa, Homo sapiens
  Table A; HLA-A*11:01; FKBP9; R107H; 1
CVNERHFVK

SEQ ID NO: 11642 - protein, 8 aa, Homo sapiens
  Table A; HLA-B*14:02; DICER1; S1344L; 0
DAHEGRLL

SEQ ID NO: 11643 - protein, 8 aa, Homo sapiens
  Table A; HLA-B*51:01; DICER1; S1344L; 1
DAHEGRLL

SEQ ID NO: 11644 - protein, 8 aa, Homo sapiens
  Table A; HLA-C*03:04; DICER1; S1344L; 1
DAHEGRLL

SEQ ID NO: 11645 - protein, 8 aa, Homo sapiens
  Table A; HLA-C*16:01; DICER1; S1344L; 0
DAHEGRLL

SEQ ID NO: 11646 - protein, 9 aa, Homo sapiens
  Table A; HLA-A*25:01; DICER1; S1344L; 0
DAHEGRLLY

SEQ ID NO: 11647 - protein, 9 aa, Homo sapiens
  Table A; HLA-A*26:01; DICER1; S1344L; 0
DAHEGRLLY

SEQ ID NO: 11648 - protein, 9 aa, Homo sapiens
  Table A; HLA-A*29:02; DICER1; S1344L; 0
DAHEGRLLY

SEQ ID NO: 11649 - protein, 9 aa, Homo sapiens
  Table A; HLA-A*33:01; DICER1; S1344L; 0
DAHEGRLLY

SEQ ID NO: 11650 - protein, 9 aa, Homo sapiens
  Table A; HLA-B*15:02; DICER1; S1344L; 0
DAHEGRLLY

SEQ ID NO: 11651 - protein, 9 aa, Homo sapiens
  Table A; HLA-B*35:01; DICER1; S1344L; 1
DAHEGRLLY

SEQ ID NO: 11652 - protein, 9 aa, Homo sapiens
  Table A; HLA-B*35:08; DICER1; S1344L; 0
DAHEGRLLY

SEQ ID NO: 11653 - protein, 9 aa, Homo sapiens
  Table A; HLA-B*51:01; DICER1; S1344L; 1
DAHEGRLLY

SEQ ID NO: 11654 - protein, 9 aa, Homo sapiens
  Table A; HLA-C*03:02; DICER1; S1344L; 0
DAHEGRLLY

SEQ ID NO: 11655 - protein, 9 aa, Homo sapiens
  Table A; HLA-C*08:01; DICER1; S1344L; 0
DAHEGRLLY

SEQ ID NO: 11656 - protein, 10 aa, Homo sapiens
  Table A; HLA-A*33:01; DICER1; S1344L; 0
DAHEGRLLYM

SEQ ID NO: 11657 - protein, 10 aa, Homo sapiens
  Table A; HLA-B*51:01; DICER1; S1344L; 1
DAHEGRLLYM

SEQ ID NO: 11658 - protein, 11 aa, Homo sapiens
  Table A; HLA-A*33:01; DICER1; S1344L; 0
DAHEGRLLYMR

SEQ ID NO: 11659 - protein, 10 aa, Homo sapiens
  Table A; HLA-A*33:01; PIK3CA; H1047L; 0
DALHGGWTTK

SEQ ID NO: 11660 - protein, 10 aa, Homo sapiens
  Table A; HLA-A*68:01; PIK3CA; H1047L; 1
DALHGGWTTK

SEQ ID NO: 11661 - protein, 10 aa, Homo sapiens
  Table A; HLA-A*33:01; EZH2; E745K; 0
DALKYVGIKR

SEQ ID NO: 11662 - protein, 10 aa, Homo sapiens
  Table A; HLA-A*33:03; EZH2; E745K; 0
DALKYVGIKR

SEQ ID NO: 11663 - protein, 10 aa, Homo sapiens
  Table A; HLA-A*68:01; EZH2; E745K; 0
DALKYVGIKR

SEQ ID NO: 11664 - protein, 10 aa, Homo sapiens
  Table A; HLA-A*33:01; PIK3CA; H1047Q; 0
DAQHGGWTTK

SEQ ID NO: 11665 - protein, 8 aa, Homo sapiens
  Table A; HLA-B*51:01; CDKN2A; P114L; 1
DAWGRLLV

SEQ ID NO: 11666 - protein, 9 aa, Homo sapiens
  Table A; HLA-A*33:01; PIK3CA; H1047Y; 0
DAYHGGWTT

SEQ ID NO: 11667 - protein, 9 aa, Homo sapiens
  Table A; HLA-B*51:01; PIK3CA; H1047Y; 0
DAYHGGWTT

SEQ ID NO: 11668 - protein, 9 aa, Homo sapiens
  Table A; HLA-B*54:01; PIK3CA; H1047Y; 0
DAYHGGWTT

SEQ ID NO: 11669 - protein, 10 aa, Homo sapiens
  Table A; HLA-A*03:01; PIK3CA; H1047Y; 1
DAYHGGWTTK

SEQ ID NO: 11670 - protein, 10 aa, Homo sapiens
  Table A; HLA-A*33:01; PIK3CA; H1047Y; 0
DAYHGGWTTK

SEQ ID NO: 11671 - protein, 10 aa, Homo sapiens
  Table A; HLA-A*68:01; PIK3CA; H1047Y; 0
DAYHGGWTTK

SEQ ID NO: 11672 - protein, 10 aa, Homo sapiens
  Table A; HLA-A*68:02; PIK3CA; H1047Y; 0
DAYHGGWTTK

SEQ ID NO: 11673 - protein, 10 aa, Homo sapiens
  Table A; HLA-B*27:02; PIK3CA; H1047Y; 0
DAYHGGWTTK

SEQ ID NO: 11674 - protein, 10 aa, Homo sapiens
  Table A; HLA-B*51:01; PIK3CA; H1047Y; 0
DAYHGGWTTK

SEQ ID NO: 11675 - protein, 8 aa, Homo sapiens
  Table A; HLA-B*15:02; FGFR2; Y375C; 0
DCLEIAIY

SEQ ID NO: 11676 - protein, 9 aa, Homo sapiens
  Table A; HLA-A*26:01; TP53; Y234C; 0
DCTTIHCNY

SEQ ID NO: 11677 - protein, 9 aa, Homo sapiens
  Table A; HLA-A*33:01; TP53; Y234C; 0
DCTTIHCNY

SEQ ID NO: 11678 - protein, 8 aa, Homo sapiens
  Table A; HLA-A*33:01; TP53; R213Q; 0
DDRNTFQH

SEQ ID NO: 11679 - protein, 9 aa, Homo sapiens
  Table A; HLA-A*33:01; TP53; R213Q; 0
DDRNTFQHS

SEQ ID NO: 11680 - protein, 8 aa, Homo sapiens
  Table A; HLA-A*33:01; TP53; H214R; 0
DDRNTFRR

SEQ ID NO: 11681 - protein, 8 aa, Homo sapiens
  Table A; HLA-A*23:01; PPP2R1A; R183W; 0
DDTPMVRW

SEQ ID NO: 11682 - protein, 8 aa, Homo sapiens
  Table A; HLA-B*18:01; PPP2R1A; R183W; 1
DDTPMVRW

SEQ ID NO: 11683 - protein, 8 aa, Homo sapiens
  Table A; HLA-B*44:03; PPP2R1A; R183W; 1
DDTPMVRW

SEQ ID NO: 11684 - protein, 8 aa, Homo sapiens
  Table A; HLA-B*44:05; PPP2R1A; R183W; 0
DDTPMVRW

SEQ ID NO: 11685 - protein, 8 aa, Homo sapiens
  Table A; HLA-A*33:01; PPP2R1A; P179R; 0
DDTRMVRR

SEQ ID NO: 11686 - protein, 8 aa, Homo sapiens
  Table A; HLA-A*33:03; PPP2R1A; P179R; 0
DDTRMVRR

SEQ ID NO: 11687 - protein, 8 aa, Homo sapiens
  Table A; HLA-B*44:03; PIK3CB; E1051K; 0
DEALRKSW

SEQ ID NO: 11688 - protein, 8 aa, Homo sapiens
  Table A; HLA-B*18:01; CNTNAP2; R483Q; 1
DEASAVQT

SEQ ID NO: 11689 - protein, 8 aa, Homo sapiens
  Table A; HLA-B*18:01; NFE2L2; T80P; 0
DEEPGEFL

SEQ ID NO: 11690 - protein, 9 aa, Homo sapiens
  Table A; HLA-B*18:01; RGS7; R44C; 1
DEKNGIPIC

SEQ ID NO: 11691 - protein, 9 aa, Homo sapiens
  Table A; HLA-B*40:02; RGS7; R44C; 0
DEKNGIPIC

SEQ ID NO: 11692 - protein, 9 aa, Homo sapiens
  Table A; HLA-B*40:06; RGS7; R44C; 0
DEKNGIPIC

SEQ ID NO: 11693 - protein, 9 aa, Homo sapiens
  Table A; HLA-B*41:02; RGS7; R44C; 0
DEKNGIPIC

SEQ ID NO: 11694 - protein, 9 aa, Homo sapiens
  Table A; HLA-B*50:01; RGS7; R44C; 0
DEKNGIPIC

SEQ ID NO: 11695 - protein, 9 aa, Homo sapiens
  Table A; HLA-A*23:01; SF3B1; K700E; 0
DEQQEVRTI

SEQ ID NO: 11696 - protein, 9 aa, Homo sapiens
  Table A; HLA-A*30:01; SF3B1; K700E; 0
DEQQEVRTI

SEQ ID NO: 11697 - protein, 9 aa, Homo sapiens
  Table A; HLA-B*14:02; SF3B1; K700E; 0
DEQQEVRTI

SEQ ID NO: 11698 - protein, 9 aa, Homo sapiens
  Table A; HLA-B*18:01; SF3B1; K700E; 1
DEQQEVRTI

SEQ ID NO: 11699 - protein, 9 aa, Homo sapiens
  Table A; HLA-B*38:01; SF3B1; K700E; 0
DEQQEVRTI

SEQ ID NO: 11700 - protein, 9 aa, Homo sapiens
  Table A; HLA-B*39:01; SF3B1; K700E; 0
DEQQEVRTI

SEQ ID NO: 11701 - protein, 9 aa, Homo sapiens
  Table A; HLA-B*40:01; SF3B1; K700E; 1
DEQQEVRTI

SEQ ID NO: 11702 - protein, 9 aa, Homo sapiens
  Table A; HLA-B*40:02; SF3B1; K700E; 0
DEQQEVRTI

SEQ ID NO: 11703 - protein, 9 aa, Homo sapiens
  Table A; HLA-B*41:02; SF3B1; K700E; 0
DEQQEVRTI

SEQ ID NO: 11704 - protein, 9 aa, Homo sapiens
  Table A; HLA-B*44:02; SF3B1; K700E; 1
DEQQEVRTI

SEQ ID NO: 11705 - protein, 9 aa, Homo sapiens
  Table A; HLA-B*44:03; SF3B1; K700E; 1
DEQQEVRTI

SEQ ID NO: 11706 - protein, 9 aa, Homo sapiens
  Table A; HLA-B*44:05; SF3B1; K700E; 0
DEQQEVRTI

SEQ ID NO: 11707 - protein, 9 aa, Homo sapiens
  Table A; HLA-B*49:01; SF3B1; K700E; 0
DEQQEVRTI

SEQ ID NO: 11708 - protein, 9 aa, Homo sapiens
  Table A; HLA-B*51:01; SF3B1; K700E; 1
DEQQEVRTI

SEQ ID NO: 11709 - protein, 9 aa, Homo sapiens
  Table A; HLA-B*58:01; SF3B1; K700E; 0
DEQQEVRTI

SEQ ID NO: 11710 - protein, 11 aa, Homo sapiens
  Table A; HLA-B*39:06; SF3B1; K700E; 0
DEQQEVRTISA

SEQ ID NO: 11711 - protein, 8 aa, Homo sapiens
  Table A; HLA-B*18:01; NFE2L2; E79Q; 1
DEQTGEFL

SEQ ID NO: 11712 - protein, 9 aa, Homo sapiens
  Table A; HLA-B*18:01; PIK3CA; R88Q; 1
DETRQLCDL

SEQ ID NO: 11713 - protein, 8 aa, Homo sapiens
  Table A; HLA-B*18:01; SF3B1; R625C; 0
DEYVCNTT

SEQ ID NO: 11714 - protein, 9 aa, Homo sapiens
  Table A; HLA-A*02:05; SF3B1; R625C; 0
DEYVCNTTA

SEQ ID NO: 11715 - protein, 9 aa, Homo sapiens
  Table A; HLA-B*14:02; SF3B1; R625C; 0
DEYVCNTTA

SEQ ID NO: 11716 - protein, 9 aa, Homo sapiens
  Table A; HLA-B*18:01; SF3B1; R625C; 0
DEYVCNTTA

SEQ ID NO: 11717 - protein, 9 aa, Homo sapiens
  Table A; HLA-B*39:06; SF3B1; R625C; 0
DEYVCNTTA

SEQ ID NO: 11718 - protein, 9 aa, Homo sapiens
  Table A; HLA-B*40:06; SF3B1; R625C; 0
DEYVCNTTA

SEQ ID NO: 11719 - protein, 9 aa, Homo sapiens
  Table A; HLA-B*49:01; SF3B1; R625C; 0
DEYVCNTTA

SEQ ID NO: 11720 - protein, 9 aa, Homo sapiens
  Table A; HLA-B*50:01; SF3B1; R625C; 0
DEYVCNTTA

SEQ ID NO: 11721 - protein, 8 aa, Homo sapiens
  Table A; HLA-B*08:01; SF3B1; R625H; 1
DEYVHNTT

SEQ ID NO: 11722 - protein, 8 aa, Homo sapiens
  Table A; HLA-B*14:01; SF3B1; R625H; 0
DEYVHNTT

SEQ ID NO: 11723 - protein, 8 aa, Homo sapiens
  Table A; HLA-B*14:02; SF3B1; R625H; 0
DEYVHNTT

SEQ ID NO: 11724 - protein, 8 aa, Homo sapiens
  Table A; HLA-B*18:01; SF3B1; R625H; 0
DEYVHNTT

SEQ ID NO: 11725 - protein, 8 aa, Homo sapiens
  Table A; HLA-B*39:06; SF3B1; R625H; 0
DEYVHNTT

SEQ ID NO: 11726 - protein, 8 aa, Homo sapiens
  Table A; HLA-B*40:02; SF3B1; R625H; 0
DEYVHNTT

SEQ ID NO: 11727 - protein, 9 aa, Homo sapiens
  Table A; HLA-A*02:05; SF3B1; R625H; 0
DEYVHNTTA

SEQ ID NO: 11728 - protein, 9 aa, Homo sapiens
  Table A; HLA-A*02:08; SF3B1; R625H; 0
DEYVHNTTA

SEQ ID NO: 11729 - protein, 9 aa, Homo sapiens
  Table A; HLA-A*23:01; SF3B1; R625H; 0
DEYVHNTTA

SEQ ID NO: 11730 - protein, 9 aa, Homo sapiens
  Table A; HLA-A*30:01; SF3B1; R625H; 0
DEYVHNTTA

SEQ ID NO: 11731 - protein, 9 aa, Homo sapiens
  Table A; HLA-B*08:01; SF3B1; R625H; 1
DEYVHNTTA

SEQ ID NO: 11732 - protein, 9 aa, Homo sapiens
  Table A; HLA-B*14:01; SF3B1; R625H; 0
DEYVHNTTA

SEQ ID NO: 11733 - protein, 9 aa, Homo sapiens
  Table A; HLA-B*14:02; SF3B1; R625H; 0
DEYVHNTTA

SEQ ID NO: 11734 - protein, 9 aa, Homo sapiens
  Table A; HLA-B*15:02; SF3B1; R625H; 0
DEYVHNTTA

SEQ ID NO: 11735 - protein, 9 aa, Homo sapiens
  Table A; HLA-B*18:01; SF3B1; R625H; 0
DEYVHNTTA

SEQ ID NO: 11736 - protein, 9 aa, Homo sapiens
  Table A; HLA-B*37:01; SF3B1; R625H; 0
DEYVHNTTA

SEQ ID NO: 11737 - protein, 9 aa, Homo sapiens
  Table A; HLA-B*39:06; SF3B1; R625H; 0
DEYVHNTTA

SEQ ID NO: 11738 - protein, 9 aa, Homo sapiens
  Table A; HLA-B*40:02; SF3B1; R625H; 0
DEYVHNTTA

SEQ ID NO: 11739 - protein, 9 aa, Homo sapiens
  Table A; HLA-B*40:06; SF3B1; R625H; 0
DEYVHNTTA

SEQ ID NO: 11740 - protein, 9 aa, Homo sapiens
  Table A; HLA-B*41:02; SF3B1; R625H; 0
DEYVHNTTA

SEQ ID NO: 11741 - protein, 9 aa, Homo sapiens
  Table A; HLA-B*44:05; SF3B1; R625H; 0
DEYVHNTTA

SEQ ID NO: 11742 - protein, 9 aa, Homo sapiens
  Table A; HLA-B*48:01; SF3B1; R625H; 0
DEYVHNTTA

SEQ ID NO: 11743 - protein, 9 aa, Homo sapiens
  Table A; HLA-B*49:01; SF3B1; R625H; 0
DEYVHNTTA

SEQ ID NO: 11744 - protein, 9 aa, Homo sapiens
  Table A; HLA-B*50:01; SF3B1; R625H; 0
DEYVHNTTA

SEQ ID NO: 11745 - protein, 9 aa, Homo sapiens
  Table A; HLA-B*51:01; SF3B1; R625H; 0
DEYVHNTTA

SEQ ID NO: 11746 - protein, 9 aa, Homo sapiens
  Table A; HLA-B*54:01; SF3B1; R625H; 0
DEYVHNTTA

SEQ ID NO: 11747 - protein, 9 aa, Homo sapiens
  Table A; HLA-C*03:02; SF3B1; R625H; 0
DEYVHNTTA

SEQ ID NO: 11748 - protein, 9 aa, Homo sapiens
  Table A; HLA-C*08:01; SF3B1; R625H; 0
DEYVHNTTA

SEQ ID NO: 11749 - protein, 10 aa, Homo sapiens
  Table A; HLA-A*33:01; SF3B1; R625H; 0
DEYVHNTTAR

SEQ ID NO: 11750 - protein, 10 aa, Homo sapiens
  Table A; HLA-A*68:01; SF3B1; R625H; 0
DEYVHNTTAR

SEQ ID NO: 11751 - protein, 10 aa, Homo sapiens
  Table A; HLA-B*27:02; SF3B1; R625H; 0
DEYVHNTTAR

SEQ ID NO: 11752 - protein, 8 aa, Homo sapiens
  Table A; HLA-C*08:03; PIK3CA; D939G; 0
DFGHFLGH

SEQ ID NO: 11753 - protein, 8 aa, Homo sapiens
  Table A; HLA-A*33:03; CTNNB1; S33F; 0
DFGIHSGA

SEQ ID NO: 11754 - protein, 8 aa, Homo sapiens
  Table A; HLA-B*39:06; CTNNB1; S33F; 0
DFGIHSGA

SEQ ID NO: 11755 - protein, 8 aa, Homo sapiens
  Table A; HLA-B*48:01; CTNNB1; S33F; 0
DFGIHSGA

SEQ ID NO: 11756 - protein, 8 aa, Homo sapiens
  Table A; HLA-C*08:03; CTNNB1; S33F; 0
DFGIHSGA

SEQ ID NO: 11757 - protein, 9 aa, Homo sapiens
  Table A; HLA-B*48:01; CTNNB1; S33F; 0
DFGIHSGAT

SEQ ID NO: 11758 - protein, 9 aa, Homo sapiens
  Table A; HLA-C*08:03; CTNNB1; S33F; 0
DFGIHSGAT

SEQ ID NO: 11759 - protein, 8 aa, Homo sapiens
  Table A; HLA-B*08:01; EGFR; L861Q; 1
DFGLAKQL

SEQ ID NO: 11760 - protein, 9 aa, Homo sapiens
  Table A; HLA-A*23:01; KNSTRN; S24F; 0
DFHPLPPSY

SEQ ID NO: 11761 - protein, 9 aa, Homo sapiens
  Table A; HLA-A*26:01; KNSTRN; S24F; 1
DFHPLPPSY

SEQ ID NO: 11762 - protein, 9 aa, Homo sapiens
  Table A; HLA-A*29:01; KNSTRN; S24F; 0
DFHPLPPSY

SEQ ID NO: 11763 - protein, 9 aa, Homo sapiens
  Table A; HLA-A*29:02; KNSTRN; S24F; 1
DFHPLPPSY

SEQ ID NO: 11764 - protein, 9 aa, Homo sapiens
  Table A; HLA-A*30:02; KNSTRN; S24F; 0
DFHPLPPSY

SEQ ID NO: 11765 - protein, 9 aa, Homo sapiens
  Table A; HLA-B*15:02; KNSTRN; S24F; 0
DFHPLPPSY

SEQ ID NO: 11766 - protein, 9 aa, Homo sapiens
  Table A; HLA-B*18:01; KNSTRN; S24F; 1
DFHPLPPSY

SEQ ID NO: 11767 - protein, 9 aa, Homo sapiens
  Table A; HLA-B*35:01; KNSTRN; S24F; 1
DFHPLPPSY

SEQ ID NO: 11768 - protein, 9 aa, Homo sapiens
  Table A; HLA-B*39:01; KNSTRN; S24F; 0
DFHPLPPSY

SEQ ID NO: 11769 - protein, 9 aa, Homo sapiens
  Table A; HLA-C*08:01; KNSTRN; S24F; 0
DFHPLPPSY

SEQ ID NO: 11770 - protein, 9 aa, Homo sapiens
  Table A; HLA-C*14:02; KNSTRN; S24F; 0
DFHPLPPSY

SEQ ID NO: 11771 - protein, 10 aa, Homo sapiens
  Table A; HLA-A*33:01; KNSTRN; S24F; 0
DFHPLPPSYR

SEQ ID NO: 11772 - protein, 10 aa, Homo sapiens
  Table A; HLA-A*33:03; KNSTRN; S24F; 0
DFHPLPPSYR

SEQ ID NO: 11773 - protein, 8 aa, Homo sapiens
  Table A; HLA-B*39:06; NFE2L2; E82D; 0
DFLPIQPA

SEQ ID NO: 11774 - protein, 9 aa, Homo sapiens
  Table A; HLA-B*35:03; TPR; S2155L; 0
DGFAEAIHL

SEQ ID NO: 11775 - protein, 9 aa, Homo sapiens
  Table A; HLA-B*51:01; TPR; S2155L; 0
DGFAEAIHL

SEQ ID NO: 11776 - protein, 9 aa, Homo sapiens
  Table A; HLA-A*26:01; CREB3L1; V414I; 0
DGIYTASQM

SEQ ID NO: 11777 - protein, 9 aa, Homo sapiens
  Table A; HLA-A*26:02; CREB3L1; V414I; 0
DGIYTASQM

SEQ ID NO: 11778 - protein, 9 aa, Homo sapiens
  Table A; HLA-B*08:01; CREB3L1; V414I; 0
DGIYTASQM

SEQ ID NO: 11779 - protein, 9 aa, Homo sapiens
  Table A; HLA-B*15:02; CREB3L1; V414I; 0
DGIYTASQM

SEQ ID NO: 11780 - protein, 9 aa, Homo sapiens
  Table A; HLA-B*35:01; CREB3L1; V414I; 0
DGIYTASQM

SEQ ID NO: 11781 - protein, 9 aa, Homo sapiens
  Table A; HLA-B*51:01; CREB3L1; V414I; 0
DGIYTASQM

SEQ ID NO: 11782 - protein, 9 aa, Homo sapiens
  Table A; HLA-C*08:01; CREB3L1; V414I; 0
DGIYTASQM

SEQ ID NO: 11783 - protein, 11 aa, Homo sapiens
  Table A; HLA-A*33:01; TP53; I195N; 0
DGLAPPQHLNR

SEQ ID NO: 11784 - protein, 11 aa, Homo sapiens
  Table A; HLA-A*33:03; TP53; I195N; 0
DGLAPPQHLNR

SEQ ID NO: 11785 - protein, 11 aa, Homo sapiens
  Table A; HLA-A*33:01; TP53; I195T; 0
DGLAPPQHLTR

SEQ ID NO: 11786 - protein, 11 aa, Homo sapiens
  Table A; HLA-A*33:03; TP53; I195T; 0
DGLAPPQHLTR

SEQ ID NO: 11787 - protein, 11 aa, Homo sapiens
  Table A; HLA-A*68:01; TP53; I195T; 0
DGLAPPQHLTR

SEQ ID NO: 11788 - protein, 9 aa, Homo sapiens
  Table A; HLA-A*33:01; TP53; L194R; 0
DGLAPPQHR

SEQ ID NO: 11789 - protein, 9 aa, Homo sapiens
  Table A; HLA-A*33:03; TP53; L194R; 0
DGLAPPQHR

SEQ ID NO: 11790 - protein, 9 aa, Homo sapiens
  Table A; HLA-A*68:01; TP53; L194R; 0
DGLAPPQHR

SEQ ID NO: 11791 - protein, 10 aa, Homo sapiens
  Table A; HLA-B*51:01; TP53; L194R; 1
DGLAPPQHRI

SEQ ID NO: 11792 - protein, 11 aa, Homo sapiens
  Table A; HLA-A*33:01; TP53; L194R; 0
DGLAPPQHRIR

SEQ ID NO: 11793 - protein, 8 aa, Homo sapiens
  Table A; HLA-B*39:01; TP53; H193L; 0
DGLAPPQL

SEQ ID NO: 11794 - protein, 8 aa, Homo sapiens
  Table A; HLA-B*51:01; TP53; H193L; 0
DGLAPPQL

SEQ ID NO: 11795 - protein, 9 aa, Homo sapiens
  Table A; HLA-B*51:01; TP53; H193L; 0
DGLAPPQLL

SEQ ID NO: 11796 - protein, 10 aa, Homo sapiens
  Table A; HLA-B*51:01; TP53; H193L; 0
DGLAPPQLLI

SEQ ID NO: 11797 - protein, 11 aa, Homo sapiens
  Table A; HLA-A*33:01; TP53; H193L; 0
DGLAPPQLLIR

SEQ ID NO: 11798 - protein, 9 aa, Homo sapiens
  Table A; HLA-B*51:01; TP53; H193R; 0
DGLAPPQRL

SEQ ID NO: 11799 - protein, 10 aa, Homo sapiens
  Table A; HLA-B*51:01; TP53; H193R; 0
DGLAPPQRLI

SEQ ID NO: 11800 - protein, 11 aa, Homo sapiens
  Table A; HLA-A*33:01; TP53; H193R; 0
DGLAPPQRLIR

SEQ ID NO: 11801 - protein, 8 aa, Homo sapiens
  Table A; HLA-B*15:02; TP53; H193Y; 0
DGLAPPQY

SEQ ID NO: 11802 - protein, 8 aa, Homo sapiens
  Table A; HLA-B*18:01; TP53; H193Y; 0
DGLAPPQY

SEQ ID NO: 11803 - protein, 8 aa, Homo sapiens
  Table A; HLA-B*35:01; TP53; H193Y; 0
DGLAPPQY

SEQ ID NO: 11804 - protein, 8 aa, Homo sapiens
  Table A; HLA-B*39:01; TP53; H193Y; 0
DGLAPPQY

SEQ ID NO: 11805 - protein, 8 aa, Homo sapiens
  Table A; HLA-B*51:01; TP53; H193Y; 0
DGLAPPQY

SEQ ID NO: 11806 - protein, 11 aa, Homo sapiens
  Table A; HLA-A*33:01; TP53; H193Y; 0
DGLAPPQYLIR

SEQ ID NO: 11807 - protein, 8 aa, Homo sapiens
  Table A; HLA-B*51:01; PTPRT; E324K; 1
DGPIILKK

SEQ ID NO: 11808 - protein, 9 aa, Homo sapiens
  Table A; HLA-B*51:01; PTPRT; E324K; 1
DGPIILKKV

SEQ ID NO: 11809 - protein, 9 aa, Homo sapiens
  Table A; HLA-A*33:01; EP300; A1629V; 0
DGRDVFLTL

SEQ ID NO: 11810 - protein, 9 aa, Homo sapiens
  Table A; HLA-B*51:01; EP300; A1629V; 1
DGRDVFLTL

SEQ ID NO: 11811 - protein, 8 aa, Homo sapiens
  Table A; HLA-B*08:01; KRAS; G12D; 1
DGVGKSAL

SEQ ID NO: 11812 - protein, 8 aa, Homo sapiens
  Table A; HLA-B*14:01; KRAS; G12D; 1
DGVGKSAL

SEQ ID NO: 11813 - protein, 8 aa, Homo sapiens
  Table A; HLA-B*14:02; KRAS; G12D; 1
DGVGKSAL

SEQ ID NO: 11814 - protein, 8 aa, Homo sapiens
  Table A; HLA-B*07:02; NRAS; G12D; 1
DGVGKSAL

SEQ ID NO: 11815 - protein, 8 aa, Homo sapiens
  Table A; HLA-B*08:01; NRAS; G12D; 1
DGVGKSAL

SEQ ID NO: 11816 - protein, 8 aa, Homo sapiens
  Table A; HLA-B*14:01; NRAS; G12D; 0
DGVGKSAL

SEQ ID NO: 11817 - protein, 8 aa, Homo sapiens
  Table A; HLA-B*14:02; NRAS; G12D; 0
DGVGKSAL

SEQ ID NO: 11818 - protein, 8 aa, Homo sapiens
  Table A; HLA-B*48:01; NRAS; G12D; 0
DGVGKSAL

SEQ ID NO: 11819 - protein, 9 aa, Homo sapiens
  Table A; HLA-B*39:01; NRAS; G12D; 0
DGVGKSALT

SEQ ID NO: 11820 - protein, 10 aa, Homo sapiens
  Table A; HLA-B*51:01; KRAS; G12D; 1
DGVGKSALTI

SEQ ID NO: 11821 - protein, 10 aa, Homo sapiens
  Table A; HLA-B*51:01; NRAS; G12D; 0
DGVGKSALTI

SEQ ID NO: 11822 - protein, 8 aa, Homo sapiens
  Table A; HLA-B*08:01; CNTNAP2; E149K; 1
DGVVRHKL

SEQ ID NO: 11823 - protein, 8 aa, Homo sapiens
  Table A; HLA-B*14:02; CNTNAP2; E149K; 0
DGVVRHKL

SEQ ID NO: 11824 - protein, 8 aa, Homo sapiens
  Table A; HLA-B*15:10; TGFBR2; R528C; 0
DHDPEACL

SEQ ID NO: 11825 - protein, 8 aa, Homo sapiens
  Table A; HLA-B*35:02; TGFBR2; R528C; 0
DHDPEACL

SEQ ID NO: 11826 - protein, 8 aa, Homo sapiens
  Table A; HLA-B*35:12; TGFBR2; R528C; 0
DHDPEACL

SEQ ID NO: 11827 - protein, 8 aa, Homo sapiens
  Table A; HLA-B*38:01; TGFBR2; R528C; 0
DHDPEACL

SEQ ID NO: 11828 - protein, 8 aa, Homo sapiens
  Table A; HLA-B*39:01; TGFBR2; R528C; 0
DHDPEACL

SEQ ID NO: 11829 - protein, 8 aa, Homo sapiens
  Table A; HLA-B*39:06; SMAD4; R361H; 0
DHFCLGQL

SEQ ID NO: 11830 - protein, 10 aa, Homo sapiens
  Table A; HLA-B*39:06; PLCG1; R1275Q; 0
DHFDSQERRA

SEQ ID NO: 11831 - protein, 11 aa, Homo sapiens
  Table A; HLA-B*35:01; NFE2L2; R34G; 0
DIDLGVSGEVF

SEQ ID NO: 11832 - protein, 11 aa, Homo sapiens
  Table A; HLA-B*35:08; NFE2L2; R34G; 0
DIDLGVSGEVF

SEQ ID NO: 11833 - protein, 11 aa, Homo sapiens
  Table A; HLA-B*35:12; NFE2L2; R34G; 0
DIDLGVSGEVF

SEQ ID NO: 11834 - protein, 11 aa, Homo sapiens
  Table A; HLA-B*38:01; NFE2L2; R34G; 0
DIDLGVSGEVF

SEQ ID NO: 11835 - protein, 11 aa, Homo sapiens
  Table A; HLA-B*39:01; NFE2L2; R34G; 0
DIDLGVSGEVF

SEQ ID NO: 11836 - protein, 11 aa, Homo sapiens
  Table A; HLA-B*35:08; NFE2L2; R34Q; 0
DIDLGVSQEVF

SEQ ID NO: 11837 - protein, 11 aa, Homo sapiens
  Table A; HLA-B*38:01; NFE2L2; R34Q; 0
DIDLGVSQEVF

SEQ ID NO: 11838 - protein, 8 aa, Homo sapiens
  Table A; HLA-A*33:01; NFE2L2; D29G; 0
DIGLGVSR

SEQ ID NO: 11839 - protein, 8 aa, Homo sapiens
  Table A; HLA-A*33:03; NFE2L2; D29G; 0
DIGLGVSR

SEQ ID NO: 11840 - protein, 8 aa, Homo sapiens
  Table A; HLA-A*68:01; NFE2L2; D29G; 0
DIGLGVSR

SEQ ID NO: 11841 - protein, 8 aa, Homo sapiens
  Table A; HLA-A*26:03; NFE2L2; D29H; 0
DIHLGVSR

SEQ ID NO: 11842 - protein, 8 aa, Homo sapiens
  Table A; HLA-A*33:01; NFE2L2; D29H; 0
DIHLGVSR

SEQ ID NO: 11843 - protein, 8 aa, Homo sapiens
  Table A; HLA-A*33:03; NFE2L2; D29H; 0
DIHLGVSR

SEQ ID NO: 11844 - protein, 8 aa, Homo sapiens
  Table A; HLA-A*68:01; NFE2L2; D29H; 0
DIHLGVSR

SEQ ID NO: 11845 - protein, 8 aa, Homo sapiens
  Table A; HLA-B*15:02; NFE2L2; D29H; 0
DIHLGVSR

SEQ ID NO: 11846 - protein, 8 aa, Homo sapiens
  Table A; HLA-B*48:01; NFE2L2; D29H; 0
DIHLGVSR

SEQ ID NO: 11847 - protein, 10 aa, Homo sapiens
  Table A; HLA-A*33:03; NRAS; Q61H; 0
DILDTAGHEE

SEQ ID NO: 11848 - protein, 11 aa, Homo sapiens
  Table A; HLA-A*26:01; KRAS; Q61H; 1
DILDTAGHEEY

SEQ ID NO: 11849 - protein, 11 aa, Homo sapiens
  Table A; HLA-A*26:02; KRAS; Q61H; 0
DILDTAGHEEY

SEQ ID NO: 11850 - protein, 11 aa, Homo sapiens
  Table A; HLA-A*26:03; KRAS; Q61H; 0
DILDTAGHEEY

SEQ ID NO: 11851 - protein, 11 aa, Homo sapiens
  Table A; HLA-A*29:01; KRAS; Q61H; 0
DILDTAGHEEY

SEQ ID NO: 11852 - protein, 11 aa, Homo sapiens
  Table A; HLA-A*29:02; KRAS; Q61H; 1
DILDTAGHEEY

SEQ ID NO: 11853 - protein, 11 aa, Homo sapiens
  Table A; HLA-A*33:01; KRAS; Q61H; 0
DILDTAGHEEY

SEQ ID NO: 11854 - protein, 11 aa, Homo sapiens
  Table A; HLA-A*68:01; KRAS; Q61H; 1
DILDTAGHEEY

SEQ ID NO: 11855 - protein, 11 aa, Homo sapiens
  Table A; HLA-B*08:01; KRAS; Q61H; 1
DILDTAGHEEY

SEQ ID NO: 11856 - protein, 11 aa, Homo sapiens
  Table A; HLA-B*15:01; KRAS; Q61H; 1
DILDTAGHEEY

SEQ ID NO: 11857 - protein, 11 aa, Homo sapiens
  Table A; HLA-B*15:02; KRAS; Q61H; 0
DILDTAGHEEY

SEQ ID NO: 11858 - protein, 11 aa, Homo sapiens
  Table A; HLA-B*18:01; KRAS; Q61H; 1
DILDTAGHEEY

SEQ ID NO: 11859 - protein, 11 aa, Homo sapiens
  Table A; HLA-B*27:02; KRAS; Q61H; 0
DILDTAGHEEY

SEQ ID NO: 11860 - protein, 11 aa, Homo sapiens
  Table A; HLA-B*35:01; KRAS; Q61H; 1
DILDTAGHEEY

SEQ ID NO: 11861 - protein, 11 aa, Homo sapiens
  Table A; HLA-B*35:08; KRAS; Q61H; 0
DILDTAGHEEY

SEQ ID NO: 11862 - protein, 11 aa, Homo sapiens
  Table A; HLA-C*08:01; KRAS; Q61H; 0
DILDTAGHEEY

SEQ ID NO: 11863 - protein, 11 aa, Homo sapiens
  Table A; HLA-A*25:01; NRAS; Q61H; 0
DILDTAGHEEY

SEQ ID NO: 11864 - protein, 11 aa, Homo sapiens
  Table A; HLA-A*26:01; NRAS; Q61H; 0
DILDTAGHEEY

SEQ ID NO: 11865 - protein, 11 aa, Homo sapiens
  Table A; HLA-A*26:02; NRAS; Q61H; 0
DILDTAGHEEY

SEQ ID NO: 11866 - protein, 11 aa, Homo sapiens
  Table A; HLA-A*26:03; NRAS; Q61H; 0
DILDTAGHEEY

SEQ ID NO: 11867 - protein, 11 aa, Homo sapiens
  Table A; HLA-A*29:01; NRAS; Q61H; 0
DILDTAGHEEY

SEQ ID NO: 11868 - protein, 11 aa, Homo sapiens
  Table A; HLA-A*29:02; NRAS; Q61H; 0
DILDTAGHEEY

SEQ ID NO: 11869 - protein, 11 aa, Homo sapiens
  Table A; HLA-A*30:02; NRAS; Q61H; 0
DILDTAGHEEY

SEQ ID NO: 11870 - protein, 11 aa, Homo sapiens
  Table A; HLA-A*33:01; NRAS; Q61H; 0
DILDTAGHEEY

SEQ ID NO: 11871 - protein, 11 aa, Homo sapiens
  Table A; HLA-A*68:01; NRAS; Q61H; 0
DILDTAGHEEY

SEQ ID NO: 11872 - protein, 11 aa, Homo sapiens
  Table A; HLA-B*08:01; NRAS; Q61H; 1
DILDTAGHEEY

SEQ ID NO: 11873 - protein, 11 aa, Homo sapiens
  Table A; HLA-B*15:01; NRAS; Q61H; 1
DILDTAGHEEY

SEQ ID NO: 11874 - protein, 11 aa, Homo sapiens
  Table A; HLA-B*15:02; NRAS; Q61H; 0
DILDTAGHEEY

SEQ ID NO: 11875 - protein, 11 aa, Homo sapiens
  Table A; HLA-B*18:01; NRAS; Q61H; 1
DILDTAGHEEY

SEQ ID NO: 11876 - protein, 11 aa, Homo sapiens
  Table A; HLA-B*27:02; NRAS; Q61H; 0
DILDTAGHEEY

SEQ ID NO: 11877 - protein, 11 aa, Homo sapiens
  Table A; HLA-B*35:01; NRAS; Q61H; 1
DILDTAGHEEY

SEQ ID NO: 11878 - protein, 11 aa, Homo sapiens
  Table A; HLA-B*35:08; NRAS; Q61H; 0
DILDTAGHEEY

SEQ ID NO: 11879 - protein, 11 aa, Homo sapiens
  Table A; HLA-C*08:01; NRAS; Q61H; 0
DILDTAGHEEY

SEQ ID NO: 11880 - protein, 11 aa, Homo sapiens
  Table A; HLA-A*26:01; HRAS; Q61K; 0
DILDTAGKEEY

SEQ ID NO: 11881 - protein, 11 aa, Homo sapiens
  Table A; HLA-A*26:02; HRAS; Q61K; 0
DILDTAGKEEY

SEQ ID NO: 11882 - protein, 11 aa, Homo sapiens
  Table A; HLA-A*33:01; HRAS; Q61K; 0
DILDTAGKEEY

SEQ ID NO: 11883 - protein, 11 aa, Homo sapiens
  Table A; HLA-B*15:01; HRAS; Q61K; 0
DILDTAGKEEY

SEQ ID NO: 11884 - protein, 11 aa, Homo sapiens
  Table A; HLA-B*15:02; HRAS; Q61K; 0
DILDTAGKEEY

SEQ ID NO: 11885 - protein, 11 aa, Homo sapiens
  Table A; HLA-B*27:02; HRAS; Q61K; 0
DILDTAGKEEY

SEQ ID NO: 11886 - protein, 11 aa, Homo sapiens
  Table A; HLA-B*35:01; HRAS; Q61K; 0
DILDTAGKEEY

SEQ ID NO: 11887 - protein, 11 aa, Homo sapiens
  Table A; HLA-B*35:08; HRAS; Q61K; 0
DILDTAGKEEY

SEQ ID NO: 11888 - protein, 11 aa, Homo sapiens
  Table A; HLA-A*26:01; NRAS; Q61K; 1
DILDTAGKEEY

SEQ ID NO: 11889 - protein, 11 aa, Homo sapiens
  Table A; HLA-A*26:02; NRAS; Q61K; 0
DILDTAGKEEY

SEQ ID NO: 11890 - protein, 11 aa, Homo sapiens
  Table A; HLA-A*33:01; NRAS; Q61K; 1
DILDTAGKEEY

SEQ ID NO: 11891 - protein, 11 aa, Homo sapiens
  Table A; HLA-B*15:01; NRAS; Q61K; 1
DILDTAGKEEY

SEQ ID NO: 11892 - protein, 11 aa, Homo sapiens
  Table A; HLA-B*15:02; NRAS; Q61K; 0
DILDTAGKEEY

SEQ ID NO: 11893 - protein, 11 aa, Homo sapiens
  Table A; HLA-B*27:02; NRAS; Q61K; 0
DILDTAGKEEY

SEQ ID NO: 11894 - protein, 11 aa, Homo sapiens
  Table A; HLA-B*35:01; NRAS; Q61K; 1
DILDTAGKEEY

SEQ ID NO: 11895 - protein, 11 aa, Homo sapiens
  Table A; HLA-B*35:08; NRAS; Q61K; 0
DILDTAGKEEY

SEQ ID NO: 11896 - protein, 11 aa, Homo sapiens
  Table A; HLA-C*08:03; NRAS; Q61K; 0
DILDTAGKEEY

SEQ ID NO: 11897 - protein, 11 aa, Homo sapiens
  Table A; HLA-A*25:01; KRAS; Q61L; 0
DILDTAGLEEY

SEQ ID NO: 11898 - protein, 11 aa, Homo sapiens
  Table A; HLA-A*26:01; KRAS; Q61L; 0
DILDTAGLEEY

SEQ ID NO: 11899 - protein, 11 aa, Homo sapiens
  Table A; HLA-A*26:02; KRAS; Q61L; 0
DILDTAGLEEY

SEQ ID NO: 11900 - protein, 11 aa, Homo sapiens
  Table A; HLA-A*26:03; KRAS; Q61L; 0
DILDTAGLEEY

SEQ ID NO: 11901 - protein, 11 aa, Homo sapiens
  Table A; HLA-A*29:01; KRAS; Q61L; 0
DILDTAGLEEY

SEQ ID NO: 11902 - protein, 11 aa, Homo sapiens
  Table A; HLA-A*29:02; KRAS; Q61L; 0
DILDTAGLEEY

SEQ ID NO: 11903 - protein, 11 aa, Homo sapiens
  Table A; HLA-A*30:02; KRAS; Q61L; 0
DILDTAGLEEY

SEQ ID NO: 11904 - protein, 11 aa, Homo sapiens
  Table A; HLA-A*33:01; KRAS; Q61L; 0
DILDTAGLEEY

SEQ ID NO: 11905 - protein, 11 aa, Homo sapiens
  Table A; HLA-B*15:01; KRAS; Q61L; 0
DILDTAGLEEY

SEQ ID NO: 11906 - protein, 11 aa, Homo sapiens
  Table A; HLA-B*15:02; KRAS; Q61L; 0
DILDTAGLEEY

SEQ ID NO: 11907 - protein, 11 aa, Homo sapiens
  Table A; HLA-B*27:02; KRAS; Q61L; 0
DILDTAGLEEY

SEQ ID NO: 11908 - protein, 11 aa, Homo sapiens
  Table A; HLA-B*35:01; KRAS; Q61L; 0
DILDTAGLEEY

SEQ ID NO: 11909 - protein, 11 aa, Homo sapiens
  Table A; HLA-B*35:08; KRAS; Q61L; 0
DILDTAGLEEY

SEQ ID NO: 11910 - protein, 11 aa, Homo sapiens
  Table A; HLA-A*25:01; NRAS; Q61L; 1
DILDTAGLEEY

SEQ ID NO: 11911 - protein, 11 aa, Homo sapiens
  Table A; HLA-A*26:01; NRAS; Q61L; 1
DILDTAGLEEY

SEQ ID NO: 11912 - protein, 11 aa, Homo sapiens
  Table A; HLA-A*26:02; NRAS; Q61L; 0
DILDTAGLEEY

SEQ ID NO: 11913 - protein, 11 aa, Homo sapiens
  Table A; HLA-A*26:03; NRAS; Q61L; 0
DILDTAGLEEY

SEQ ID NO: 11914 - protein, 11 aa, Homo sapiens
  Table A; HLA-A*29:01; NRAS; Q61L; 0
DILDTAGLEEY

SEQ ID NO: 11915 - protein, 11 aa, Homo sapiens
  Table A; HLA-A*29:02; NRAS; Q61L; 1
DILDTAGLEEY

SEQ ID NO: 11916 - protein, 11 aa, Homo sapiens
  Table A; HLA-A*30:02; NRAS; Q61L; 0
DILDTAGLEEY

SEQ ID NO: 11917 - protein, 11 aa, Homo sapiens
  Table A; HLA-A*33:01; NRAS; Q61L; 0
DILDTAGLEEY

SEQ ID NO: 11918 - protein, 11 aa, Homo sapiens
  Table A; HLA-A*68:01; NRAS; Q61L; 1
DILDTAGLEEY

SEQ ID NO: 11919 - protein, 11 aa, Homo sapiens
  Table A; HLA-B*15:01; NRAS; Q61L; 1
DILDTAGLEEY

SEQ ID NO: 11920 - protein, 11 aa, Homo sapiens
  Table A; HLA-B*15:02; NRAS; Q61L; 0
DILDTAGLEEY

SEQ ID NO: 11921 - protein, 11 aa, Homo sapiens
  Table A; HLA-B*27:02; NRAS; Q61L; 0
DILDTAGLEEY

SEQ ID NO: 11922 - protein, 11 aa, Homo sapiens
  Table A; HLA-B*35:01; NRAS; Q61L; 1
DILDTAGLEEY

SEQ ID NO: 11923 - protein, 11 aa, Homo sapiens
  Table A; HLA-B*35:08; NRAS; Q61L; 0
DILDTAGLEEY

SEQ ID NO: 11924 - protein, 11 aa, Homo sapiens
  Table A; HLA-A*25:01; KRAS; Q61R; 0
DILDTAGREEY

SEQ ID NO: 11925 - protein, 11 aa, Homo sapiens
  Table A; HLA-A*26:01; KRAS; Q61R; 0
DILDTAGREEY

SEQ ID NO: 11926 - protein, 11 aa, Homo sapiens
  Table A; HLA-A*26:02; KRAS; Q61R; 0
DILDTAGREEY

SEQ ID NO: 11927 - protein, 11 aa, Homo sapiens
  Table A; HLA-B*15:01; KRAS; Q61R; 0
DILDTAGREEY

SEQ ID NO: 11928 - protein, 11 aa, Homo sapiens
  Table A; HLA-B*15:02; KRAS; Q61R; 0
DILDTAGREEY

SEQ ID NO: 11929 - protein, 11 aa, Homo sapiens
  Table A; HLA-B*18:01; KRAS; Q61R; 0
DILDTAGREEY

SEQ ID NO: 11930 - protein, 11 aa, Homo sapiens
  Table A; HLA-B*27:02; KRAS; Q61R; 0
DILDTAGREEY

SEQ ID NO: 11931 - protein, 11 aa, Homo sapiens
  Table A; HLA-B*35:01; KRAS; Q61R; 0
DILDTAGREEY

SEQ ID NO: 11932 - protein, 11 aa, Homo sapiens
  Table A; HLA-B*35:08; KRAS; Q61R; 0
DILDTAGREEY

SEQ ID NO: 11933 - protein, 11 aa, Homo sapiens
  Table A; HLA-B*44:03; KRAS; Q61R; 0
DILDTAGREEY

SEQ ID NO: 11934 - protein, 11 aa, Homo sapiens
  Table A; HLA-A*25:01; NRAS; Q61R; 1
DILDTAGREEY

SEQ ID NO: 11935 - protein, 11 aa, Homo sapiens
  Table A; HLA-A*26:01; NRAS; Q61R; 1
DILDTAGREEY

SEQ ID NO: 11936 - protein, 11 aa, Homo sapiens
  Table A; HLA-A*26:02; NRAS; Q61R; 0
DILDTAGREEY

SEQ ID NO: 11937 - protein, 11 aa, Homo sapiens
  Table A; HLA-A*33:01; NRAS; Q61R; 1
DILDTAGREEY

SEQ ID NO: 11938 - protein, 11 aa, Homo sapiens
  Table A; HLA-A*68:01; NRAS; Q61R; 1
DILDTAGREEY

SEQ ID NO: 11939 - protein, 11 aa, Homo sapiens
  Table A; HLA-B*15:01; NRAS; Q61R; 1
DILDTAGREEY

SEQ ID NO: 11940 - protein, 11 aa, Homo sapiens
  Table A; HLA-B*15:02; NRAS; Q61R; 0
DILDTAGREEY

SEQ ID NO: 11941 - protein, 11 aa, Homo sapiens
  Table A; HLA-B*18:01; NRAS; Q61R; 1
DILDTAGREEY

SEQ ID NO: 11942 - protein, 11 aa, Homo sapiens
  Table A; HLA-B*27:02; NRAS; Q61R; 0
DILDTAGREEY

SEQ ID NO: 11943 - protein, 11 aa, Homo sapiens
  Table A; HLA-B*35:01; NRAS; Q61R; 1
DILDTAGREEY

SEQ ID NO: 11944 - protein, 11 aa, Homo sapiens
  Table A; HLA-B*35:08; NRAS; Q61R; 0
DILDTAGREEY

SEQ ID NO: 11945 - protein, 11 aa, Homo sapiens
  Table A; HLA-B*44:03; NRAS; Q61R; 1
DILDTAGREEY

SEQ ID NO: 11946 - protein, 8 aa, Homo sapiens
  Table A; HLA-A*25:01; GRIN2A; R1067W; 0
DISETSNW

SEQ ID NO: 11947 - protein, 8 aa, Homo sapiens
  Table A; HLA-B*51:01; STAG1; A116T; 0
DITLLDLI

SEQ ID NO: 11948 - protein, 11 aa, Homo sapiens
  Table A; HLA-A*33:01; PTEN; S170N; 0
DKKGVTIPNQR

SEQ ID NO: 11949 - protein, 8 aa, Homo sapiens
  Table A; HLA-B*08:01; PIK3CA; E726K; 1
DKTQKVQM

SEQ ID NO: 11950 - protein, 8 aa, Homo sapiens
  Table A; HLA-B*14:02; PIK3CA; E726K; 1
DKTQKVQM

SEQ ID NO: 11951 - protein, 9 aa, Homo sapiens
  Table A; HLA-A*68:02; CCND1; T286I; 0
DLACIPTDV

SEQ ID NO: 11952 - protein, 10 aa, Homo sapiens
  Table A; HLA-A*26:03; CCND1; T286I; 0
DLACIPTDVR

SEQ ID NO: 11953 - protein, 10 aa, Homo sapiens
  Table A; HLA-A*68:01; CCND1; T286I; 0
DLACIPTDVR

SEQ ID NO: 11954 - protein, 10 aa, Homo sapiens
  Table A; HLA-A*68:02; CCND1; T286I; 0
DLACIPTDVR

SEQ ID NO: 11955 - protein, 10 aa, Homo sapiens
  Table A; HLA-B*27:02; CCND1; T286I; 0
DLACIPTDVR

SEQ ID NO: 11956 - protein, 9 aa, Homo sapiens
  Table A; HLA-B*15:01; NFE2L2; R34G; 1
DLGVSGEVF

SEQ ID NO: 11957 - protein, 9 aa, Homo sapiens
  Table A; HLA-B*15:02; NFE2L2; R34G; 0
DLGVSGEVF

SEQ ID NO: 11958 - protein, 9 aa, Homo sapiens
  Table A; HLA-B*38:01; NFE2L2; R34G; 0
DLGVSGEVF

SEQ ID NO: 11959 - protein, 9 aa, Homo sapiens
  Table A; HLA-C*08:01; NFE2L2; R34G; 0
DLGVSGEVF

SEQ ID NO: 11960 - protein, 8 aa, Homo sapiens
  Table A; HLA-B*48:01; NFE2L2; R34Q; 0
DLGVSQEV

SEQ ID NO: 11961 - protein, 8 aa, Homo sapiens
  Table A; HLA-C*08:03; NFE2L2; R34Q; 0
DLGVSQEV

SEQ ID NO: 11962 - protein, 9 aa, Homo sapiens
  Table A; HLA-B*15:02; NFE2L2; R34Q; 0
DLGVSQEVF

SEQ ID NO: 11963 - protein, 9 aa, Homo sapiens
  Table A; HLA-C*08:01; NFE2L2; R34Q; 0
DLGVSQEVF

SEQ ID NO: 11964 - protein, 9 aa, Homo sapiens
  Table A; HLA-A*26:03; PIK3R1; L573P; 0
DLIQPRKTR

SEQ ID NO: 11965 - protein, 9 aa, Homo sapiens
  Table A; HLA-A*33:01; PIK3R1; L573P; 0
DLIQPRKTR

SEQ ID NO: 11966 - protein, 9 aa, Homo sapiens
  Table A; HLA-A*33:03; PIK3R1; L573P; 0
DLIQPRKTR

SEQ ID NO: 11967 - protein, 8 aa, Homo sapiens
  Table A; HLA-A*26:01; SF3B1; R957Q; 0
DLISQTAV

SEQ ID NO: 11968 - protein, 8 aa, Homo sapiens
  Table A; HLA-A*68:02; SF3B1; R957Q; 0
DLISQTAV

SEQ ID NO: 11969 - protein, 8 aa, Homo sapiens
  Table A; HLA-B*08:01; SF3B1; R957Q; 1
DLISQTAV

SEQ ID NO: 11970 - protein, 8 aa, Homo sapiens
  Table A; HLA-B*13:02; SF3B1; R957Q; 0
DLISQTAV

SEQ ID NO: 11971 - protein, 8 aa, Homo sapiens
  Table A; HLA-B*15:02; SF3B1; R957Q; 0
DLISQTAV

SEQ ID NO: 11972 - protein, 8 aa, Homo sapiens
  Table A; HLA-B*39:01; SF3B1; R957Q; 0
DLISQTAV

SEQ ID NO: 11973 - protein, 8 aa, Homo sapiens
  Table A; HLA-B*39:06; SF3B1; R957Q; 0
DLISQTAV

SEQ ID NO: 11974 - protein, 8 aa, Homo sapiens
  Table A; HLA-B*48:01; SF3B1; R957Q; 0
DLISQTAV

SEQ ID NO: 11975 - protein, 8 aa, Homo sapiens
  Table A; HLA-B*51:01; SF3B1; R957Q; 1
DLISQTAV

SEQ ID NO: 11976 - protein, 8 aa, Homo sapiens
  Table A; HLA-C*08:01; SF3B1; R957Q; 0
DLISQTAV

SEQ ID NO: 11977 - protein, 9 aa, Homo sapiens
  Table A; HLA-A*02:01; SF3B1; R957Q; 1
DLISQTAVV

SEQ ID NO: 11978 - protein, 9 aa, Homo sapiens
  Table A; HLA-A*02:03; SF3B1; R957Q; 0
DLISQTAVV

SEQ ID NO: 11979 - protein, 9 aa, Homo sapiens
  Table A; HLA-A*02:04; SF3B1; R957Q; 0
DLISQTAVV

SEQ ID NO: 11980 - protein, 9 aa, Homo sapiens
  Table A; HLA-A*02:05; SF3B1; R957Q; 0
DLISQTAVV

SEQ ID NO: 11981 - protein, 9 aa, Homo sapiens
  Table A; HLA-A*25:01; SF3B1; R957Q; 0
DLISQTAVV

SEQ ID NO: 11982 - protein, 9 aa, Homo sapiens
  Table A; HLA-A*26:01; SF3B1; R957Q; 0
DLISQTAVV

SEQ ID NO: 11983 - protein, 9 aa, Homo sapiens
  Table A; HLA-A*26:02; SF3B1; R957Q; 0
DLISQTAVV

SEQ ID NO: 11984 - protein, 9 aa, Homo sapiens
  Table A; HLA-A*26:03; SF3B1; R957Q; 0
DLISQTAVV

SEQ ID NO: 11985 - protein, 9 aa, Homo sapiens
  Table A; HLA-A*33:01; SF3B1; R957Q; 0
DLISQTAVV

SEQ ID NO: 11986 - protein, 9 aa, Homo sapiens
  Table A; HLA-A*68:01; SF3B1; R957Q; 0
DLISQTAVV

SEQ ID NO: 11987 - protein, 9 aa, Homo sapiens
  Table A; HLA-A*68:02; SF3B1; R957Q; 0
DLISQTAVV

SEQ ID NO: 11988 - protein, 9 aa, Homo sapiens
  Table A; HLA-B*08:01; SF3B1; R957Q; 1
DLISQTAVV

SEQ ID NO: 11989 - protein, 9 aa, Homo sapiens
  Table A; HLA-B*13:02; SF3B1; R957Q; 0
DLISQTAVV

SEQ ID NO: 11990 - protein, 9 aa, Homo sapiens
  Table A; HLA-B*15:02; SF3B1; R957Q; 0
DLISQTAVV

SEQ ID NO: 11991 - protein, 9 aa, Homo sapiens
  Table A; HLA-B*35:03; SF3B1; R957Q; 0
DLISQTAVV

SEQ ID NO: 11992 - protein, 9 aa, Homo sapiens
  Table A; HLA-B*39:01; SF3B1; R957Q; 0
DLISQTAVV

SEQ ID NO: 11993 - protein, 9 aa, Homo sapiens
  Table A; HLA-B*39:06; SF3B1; R957Q; 0
DLISQTAVV

SEQ ID NO: 11994 - protein, 9 aa, Homo sapiens
  Table A; HLA-B*48:01; SF3B1; R957Q; 0
DLISQTAVV

SEQ ID NO: 11995 - protein, 9 aa, Homo sapiens
  Table A; HLA-B*51:01; SF3B1; R957Q; 1
DLISQTAVV

SEQ ID NO: 11996 - protein, 9 aa, Homo sapiens
  Table A; HLA-C*08:01; SF3B1; R957Q; 0
DLISQTAVV

SEQ ID NO: 11997 - protein, 10 aa, Homo sapiens
  Table A; HLA-A*26:01; SF3B1; R957Q; 0
DLISQTAVVM

SEQ ID NO: 11998 - protein, 10 aa, Homo sapiens
  Table A; HLA-A*26:02; SF3B1; R957Q; 0
DLISQTAVVM

SEQ ID NO: 11999 - protein, 10 aa, Homo sapiens
  Table A; HLA-A*26:03; SF3B1; R957Q; 0
DLISQTAVVM

SEQ ID NO: 12000 - protein, 10 aa, Homo sapiens
  Table A; HLA-A*68:01; SF3B1; R957Q; 0
DLISQTAVVM

SEQ ID NO: 12001 - protein, 10 aa, Homo sapiens
  Table A; HLA-A*68:02; SF3B1; R957Q; 0
DLISQTAVVM

SEQ ID NO: 12002 - protein, 10 aa, Homo sapiens
  Table A; HLA-B*08:01; SF3B1; R957Q; 1
DLISQTAVVM

SEQ ID NO: 12003 - protein, 10 aa, Homo sapiens
  Table A; HLA-B*15:01; SF3B1; R957Q; 1
DLISQTAVVM

SEQ ID NO: 12004 - protein, 10 aa, Homo sapiens
  Table A; HLA-B*15:02; SF3B1; R957Q; 0
DLISQTAVVM

SEQ ID NO: 12005 - protein, 10 aa, Homo sapiens
  Table A; HLA-B*35:01; SF3B1; R957Q; 1
DLISQTAVVM

SEQ ID NO: 12006 - protein, 10 aa, Homo sapiens
  Table A; HLA-B*35:03; SF3B1; R957Q; 0
DLISQTAVVM

SEQ ID NO: 12007 - protein, 10 aa, Homo sapiens
  Table A; HLA-B*39:01; SF3B1; R957Q; 0
DLISQTAVVM

SEQ ID NO: 12008 - protein, 10 aa, Homo sapiens
  Table A; HLA-B*48:01; SF3B1; R957Q; 0
DLISQTAVVM

SEQ ID NO: 12009 - protein, 10 aa, Homo sapiens
  Table A; HLA-C*08:01; SF3B1; R957Q; 0
DLISQTAVVM

SEQ ID NO: 12010 - protein, 10 aa, Homo sapiens
  Table A; HLA-C*08:03; SF3B1; R957Q; 0
DLISQTAVVM

SEQ ID NO: 12011 - protein, 11 aa, Homo sapiens
  Table A; HLA-A*03:02; SF3B1; R957Q; 0
DLISQTAVVMK

SEQ ID NO: 12012 - protein, 11 aa, Homo sapiens
  Table A; HLA-A*11:01; SF3B1; R957Q; 1
DLISQTAVVMK

SEQ ID NO: 12013 - protein, 11 aa, Homo sapiens
  Table A; HLA-A*33:01; SF3B1; R957Q; 0
DLISQTAVVMK

SEQ ID NO: 12014 - protein, 11 aa, Homo sapiens
  Table A; HLA-A*68:01; SF3B1; R957Q; 0
DLISQTAVVMK

SEQ ID NO: 12015 - protein, 11 aa, Homo sapiens
  Table A; HLA-A*68:02; SF3B1; R957Q; 0
DLISQTAVVMK

SEQ ID NO: 12016 - protein, 11 aa, Homo sapiens
  Table A; HLA-B*27:02; SF3B1; R957Q; 0
DLISQTAVVMK

SEQ ID NO: 12017 - protein, 9 aa, Homo sapiens
  Table A; HLA-A*02:01; PTPRT; M903I; 1
DLLQHITQI

SEQ ID NO: 12018 - protein, 9 aa, Homo sapiens
  Table A; HLA-A*02:03; PTPRT; M903I; 0
DLLQHITQI

SEQ ID NO: 12019 - protein, 9 aa, Homo sapiens
  Table A; HLA-A*02:04; PTPRT; M903I; 0
DLLQHITQI

SEQ ID NO: 12020 - protein, 9 aa, Homo sapiens
  Table A; HLA-A*23:01; PTPRT; M903I; 0
DLLQHITQI

SEQ ID NO: 12021 - protein, 9 aa, Homo sapiens
  Table A; HLA-A*26:02; PTPRT; M903I; 0
DLLQHITQI

SEQ ID NO: 12022 - protein, 9 aa, Homo sapiens
  Table A; HLA-A*68:02; PTPRT; M903I; 0
DLLQHITQI

SEQ ID NO: 12023 - protein, 9 aa, Homo sapiens
  Table A; HLA-B*08:01; PTPRT; M903I; 1
DLLQHITQI

SEQ ID NO: 12024 - protein, 9 aa, Homo sapiens
  Table A; HLA-B*13:02; PTPRT; M903I; 0
DLLQHITQI

SEQ ID NO: 12025 - protein, 9 aa, Homo sapiens
  Table A; HLA-B*15:02; PTPRT; M903I; 0
DLLQHITQI

SEQ ID NO: 12026 - protein, 9 aa, Homo sapiens
  Table A; HLA-B*51:01; PTPRT; M903I; 1
DLLQHITQI

SEQ ID NO: 12027 - protein, 9 aa, Homo sapiens
  Table A; HLA-C*08:01; PTPRT; M903I; 0
DLLQHITQI

SEQ ID NO: 12028 - protein, 8 aa, Homo sapiens
  Table A; HLA-B*08:01; GNAS; R201H; 1
DLLRCHVL

SEQ ID NO: 12029 - protein, 9 aa, Homo sapiens
  Table A; HLA-A*25:01; EP300; A1629V; 0
DLMDGRDVF

SEQ ID NO: 12030 - protein, 9 aa, Homo sapiens
  Table A; HLA-B*15:02; EP300; A1629V; 0
DLMDGRDVF

SEQ ID NO: 12031 - protein, 10 aa, Homo sapiens
  Table A; HLA-A*02:04; EP300; A1629V; 0
DLMDGRDVFL

SEQ ID NO: 12032 - protein, 10 aa, Homo sapiens
  Table A; HLA-A*68:02; EP300; A1629V; 0
DLMDGRDVFL

SEQ ID NO: 12033 - protein, 9 aa, Homo sapiens
  Table A; HLA-A*02:04; PIK3CA; R93Q; 0
DLQLFQPFL

SEQ ID NO: 12034 - protein, 10 aa, Homo sapiens
  Table A; HLA-A*33:01; PIK3CA; R93Q; 0
DLQLFQPFLK

SEQ ID NO: 12035 - protein, 10 aa, Homo sapiens
  Table A; HLA-B*27:02; PIK3CA; R93Q; 0
DLQLFQPFLK

SEQ ID NO: 12036 - protein, 8 aa, Homo sapiens
  Table A; HLA-B*15:02; PTPRB; R529Q; 0
DLVPGQKY

SEQ ID NO: 12037 - protein, 9 aa, Homo sapiens
  Table A; HLA-A*02:04; PIK3CA; R93W; 0
DLWLFQPFL

SEQ ID NO: 12038 - protein, 8 aa, Homo sapiens
  Table A; HLA-B*08:01; TP53; G245D; 1
DMNRRPIL

SEQ ID NO: 12039 - protein, 9 aa, Homo sapiens
  Table A; HLA-A*33:01; SF3B1; R625H; 0
DNMDEYVHN

SEQ ID NO: 12040 - protein, 10 aa, Homo sapiens
  Table A; HLA-A*26:03; PIK3CA; C378R; 0
DNVNTQRVPR

SEQ ID NO: 12041 - protein, 10 aa, Homo sapiens
  Table A; HLA-A*33:01; PIK3CA; C378R; 0
DNVNTQRVPR

SEQ ID NO: 12042 - protein, 10 aa, Homo sapiens
  Table A; HLA-A*33:03; PIK3CA; C378R; 0
DNVNTQRVPR

SEQ ID NO: 12043 - protein, 10 aa, Homo sapiens
  Table A; HLA-A*68:01; PIK3CA; C378R; 0
DNVNTQRVPR

SEQ ID NO: 12044 - protein, 10 aa, Homo sapiens
  Table A; HLA-A*68:02; PIK3CA; C378R; 0
DNVNTQRVPR

SEQ ID NO: 12045 - protein, 10 aa, Homo sapiens
  Table A; HLA-A*25:01; CDKN2A; H83Y; 0
DPATLTRPVY

SEQ ID NO: 12046 - protein, 10 aa, Homo sapiens
  Table A; HLA-A*26:01; CDKN2A; H83Y; 0
DPATLTRPVY

SEQ ID NO: 12047 - protein, 10 aa, Homo sapiens
  Table A; HLA-A*26:02; CDKN2A; H83Y; 0
DPATLTRPVY

SEQ ID NO: 12048 - protein, 10 aa, Homo sapiens
  Table A; HLA-A*68:01; CDKN2A; H83Y; 0
DPATLTRPVY

SEQ ID NO: 12049 - protein, 10 aa, Homo sapiens
  Table A; HLA-B*15:02; CDKN2A; H83Y; 0
DPATLTRPVY

SEQ ID NO: 12050 - protein, 10 aa, Homo sapiens
  Table A; HLA-B*18:01; CDKN2A; H83Y; 0
DPATLTRPVY

SEQ ID NO: 12051 - protein, 10 aa, Homo sapiens
  Table A; HLA-B*35:01; CDKN2A; H83Y; 0
DPATLTRPVY

SEQ ID NO: 12052 - protein, 10 aa, Homo sapiens
  Table A; HLA-B*35:08; CDKN2A; H83Y; 0
DPATLTRPVY

SEQ ID NO: 12053 - protein, 10 aa, Homo sapiens
  Table A; HLA-B*54:01; CDKN2A; H83Y; 0
DPATLTRPVY

SEQ ID NO: 12054 - protein, 10 aa, Homo sapiens
  Table A; HLA-C*08:01; CDKN2A; H83Y; 0
DPATLTRPVY

SEQ ID NO: 12055 - protein, 9 aa, Homo sapiens
  Table A; HLA-B*35:01; ABI1; K445N; 1
DPAWAPNNY

SEQ ID NO: 12056 - protein, 10 aa, Homo sapiens
  Table A; HLA-B*51:01; ABI1; K445N; 1
DPAWAPNNYI

SEQ ID NO: 12057 - protein, 8 aa, Homo sapiens
  Table A; HLA-B*08:01; PTPRK; E358K; 1
DPDTKYEI

SEQ ID NO: 12058 - protein, 8 aa, Homo sapiens
  Table A; HLA-B*35:02; PTPRK; E358K; 0
DPDTKYEI

SEQ ID NO: 12059 - protein, 8 aa, Homo sapiens
  Table A; HLA-B*35:12; PTPRK; E358K; 0
DPDTKYEI

SEQ ID NO: 12060 - protein, 8 aa, Homo sapiens
  Table A; HLA-B*51:01; CREB3L1; V414I; 0
DPLAADGI

SEQ ID NO: 12061 - protein, 9 aa, Homo sapiens
  Table A; HLA-B*15:02; CREB3L1; V414I; 0
DPLAADGIY

SEQ ID NO: 12062 - protein, 9 aa, Homo sapiens
  Table A; HLA-B*35:01; CREB3L1; V414I; 0
DPLAADGIY

SEQ ID NO: 12063 - protein, 9 aa, Homo sapiens
  Table A; HLA-B*35:03; CREB3L1; V414I; 0
DPLAADGIY

SEQ ID NO: 12064 - protein, 9 aa, Homo sapiens
  Table A; HLA-B*35:08; CREB3L1; V414I; 0
DPLAADGIY

SEQ ID NO: 12065 - protein, 9 aa, Homo sapiens
  Table A; HLA-B*35:12; CREB3L1; V414I; 0
DPLAADGIY

SEQ ID NO: 12066 - protein, 11 aa, Homo sapiens
  Table A; HLA-B*35:01; CREB3L1; V414I; 0
DPLAADGIYTA

SEQ ID NO: 12067 - protein, 11 aa, Homo sapiens
  Table A; HLA-B*35:03; CREB3L1; V414I; 0
DPLAADGIYTA

SEQ ID NO: 12068 - protein, 11 aa, Homo sapiens
  Table A; HLA-B*35:12; CREB3L1; V414I; 0
DPLAADGIYTA

SEQ ID NO: 12069 - protein, 11 aa, Homo sapiens
  Table A; HLA-B*39:06; CREB3L1; V414I; 0
DPLAADGIYTA

SEQ ID NO: 12070 - protein, 11 aa, Homo sapiens
  Table A; HLA-B*54:01; CREB3L1; V414I; 0
DPLAADGIYTA

SEQ ID NO: 12071 - protein, 11 aa, Homo sapiens
  Table A; HLA-B*55:02; CREB3L1; V414I; 0
DPLAADGIYTA

SEQ ID NO: 12072 - protein, 11 aa, Homo sapiens
  Table A; HLA-B*56:01; CREB3L1; V414I; 0
DPLAADGIYTA

SEQ ID NO: 12073 - protein, 8 aa, Homo sapiens
  Table A; HLA-B*35:02; PIK3CA; E545A; 0
DPLSEITA

SEQ ID NO: 12074 - protein, 8 aa, Homo sapiens
  Table A; HLA-B*35:12; PIK3CA; E545A; 0
DPLSEITA

SEQ ID NO: 12075 - protein, 8 aa, Homo sapiens
  Table A; HLA-B*39:06; PIK3CA; E545A; 0
DPLSEITA

SEQ ID NO: 12076 - protein, 8 aa, Homo sapiens
  Table A; HLA-B*54:01; PIK3CA; E545A; 0
DPLSEITA

SEQ ID NO: 12077 - protein, 11 aa, Homo sapiens
  Table A; HLA-B*27:02; PIK3CA; E545D; 0
DPLSEITDQEK

SEQ ID NO: 12078 - protein, 9 aa, Homo sapiens
  Table A; HLA-B*35:01; PIK3CA; Q546K; 1
DPLSEITEK

SEQ ID NO: 12079 - protein, 9 aa, Homo sapiens
  Table A; HLA-A*33:01; PIK3CA; Q546R; 0
DPLSEITER

SEQ ID NO: 12080 - protein, 9 aa, Homo sapiens
  Table A; HLA-A*33:03; PIK3CA; Q546R; 0
DPLSEITER

SEQ ID NO: 12081 - protein, 9 aa, Homo sapiens
  Table A; HLA-A*68:01; PIK3CA; Q546R; 0
DPLSEITER

SEQ ID NO: 12082 - protein, 9 aa, Homo sapiens
  Table A; HLA-B*27:02; PIK3CA; Q546R; 0
DPLSEITER

SEQ ID NO: 12083 - protein, 9 aa, Homo sapiens
  Table A; HLA-B*35:01; PIK3CA; Q546R; 1
DPLSEITER

SEQ ID NO: 12084 - protein, 11 aa, Homo sapiens
  Table A; HLA-B*27:02; PIK3CA; E545G; 0
DPLSEITGQEK

SEQ ID NO: 12085 - protein, 9 aa, Homo sapiens
  Table A; HLA-B*35:01; PIK3CA; E542V; 0
DPLSVITEQ

SEQ ID NO: 12086 - protein, 11 aa, Homo sapiens
  Table A; HLA-B*27:02; PIK3CA; E542V; 0
DPLSVITEQEK

SEQ ID NO: 12087 - protein, 11 aa, Homo sapiens
  Table A; HLA-B*35:01; CDH1; D254Y; 1
DPMEILITVTY

SEQ ID NO: 12088 - protein, 11 aa, Homo sapiens
  Table A; HLA-B*35:08; CDH1; D254Y; 0
DPMEILITVTY

SEQ ID NO: 12089 - protein, 10 aa, Homo sapiens
  Table A; HLA-B*54:01; MAPK1; E322K; 0
DPSDKPIAEA

SEQ ID NO: 12090 - protein, 10 aa, Homo sapiens
  Table A; HLA-B*35:03; SMAD4; R361H; 0
DPSGGDHFCL

SEQ ID NO: 12091 - protein, 8 aa, Homo sapiens
  Table A; HLA-B*08:01; ARHGEF12; R113Q; 1
DQIIKVNG

SEQ ID NO: 12092 - protein, 8 aa, Homo sapiens
  Table A; HLA-B*15:02; POLE; S297F; 0
DQIMMIFY

SEQ ID NO: 12093 - protein, 9 aa, Homo sapiens
  Table A; HLA-A*26:01; SMARCA4; G1232S; 0
DQKVIQASM

SEQ ID NO: 12094 - protein, 9 aa, Homo sapiens
  Table A; HLA-A*26:02; SMARCA4; G1232S; 0
DQKVIQASM

SEQ ID NO: 12095 - protein, 9 aa, Homo sapiens
  Table A; HLA-A*30:01; SMARCA4; G1232S; 0
DQKVIQASM

SEQ ID NO: 12096 - protein, 9 aa, Homo sapiens
  Table A; HLA-B*08:01; SMARCA4; G1232S; 1
DQKVIQASM

SEQ ID NO: 12097 - protein, 9 aa, Homo sapiens
  Table A; HLA-B*13:02; SMARCA4; G1232S; 0
DQKVIQASM

SEQ ID NO: 12098 - protein, 9 aa, Homo sapiens
  Table A; HLA-B*14:01; SMARCA4; G1232S; 0
DQKVIQASM

SEQ ID NO: 12099 - protein, 9 aa, Homo sapiens
  Table A; HLA-B*14:02; SMARCA4; G1232S; 0
DQKVIQASM

SEQ ID NO: 12100 - protein, 9 aa, Homo sapiens
  Table A; HLA-B*15:01; SMARCA4; G1232S; 0
DQKVIQASM

SEQ ID NO: 12101 - protein, 9 aa, Homo sapiens
  Table A; HLA-B*15:02; SMARCA4; G1232S; 0
DQKVIQASM

SEQ ID NO: 12102 - protein, 9 aa, Homo sapiens
  Table A; HLA-B*15:03; SMARCA4; G1232S; 0
DQKVIQASM

SEQ ID NO: 12103 - protein, 9 aa, Homo sapiens
  Table A; HLA-B*15:10; SMARCA4; G1232S; 0
DQKVIQASM

SEQ ID NO: 12104 - protein, 9 aa, Homo sapiens
  Table A; HLA-B*18:01; SMARCA4; G1232S; 0
DQKVIQASM

SEQ ID NO: 12105 - protein, 9 aa, Homo sapiens
  Table A; HLA-B*39:01; SMARCA4; G1232S; 0
DQKVIQASM

SEQ ID NO: 12106 - protein, 9 aa, Homo sapiens
  Table A; HLA-B*39:06; SMARCA4; G1232S; 0
DQKVIQASM

SEQ ID NO: 12107 - protein, 9 aa, Homo sapiens
  Table A; HLA-B*46:01; SMARCA4; G1232S; 0
DQKVIQASM

SEQ ID NO: 12108 - protein, 9 aa, Homo sapiens
  Table A; HLA-B*48:01; SMARCA4; G1232S; 0
DQKVIQASM

SEQ ID NO: 12109 - protein, 9 aa, Homo sapiens
  Table A; HLA-B*51:01; SMARCA4; G1232S; 0
DQKVIQASM

SEQ ID NO: 12110 - protein, 9 aa, Homo sapiens
  Table A; HLA-C*08:01; SMARCA4; G1232S; 0
DQKVIQASM

SEQ ID NO: 12111 - protein, 9 aa, Homo sapiens
  Table A; HLA-B*15:02; NT5C2; R8Q; 0
DQLQNAADM

SEQ ID NO: 12112 - protein, 8 aa, Homo sapiens
  Table A; HLA-B*14:02; ARID1A; G2087R; 0
DRLLHWAV

SEQ ID NO: 12113 - protein, 9 aa, Homo sapiens
  Table A; HLA-A*68:02; TP53; R213Q; 0
DRNTFQHSV

SEQ ID NO: 12114 - protein, 9 aa, Homo sapiens
  Table A; HLA-B*14:01; TP53; R213Q; 0
DRNTFQHSV

SEQ ID NO: 12115 - protein, 9 aa, Homo sapiens
  Table A; HLA-B*14:02; TP53; R213Q; 0
DRNTFQHSV

SEQ ID NO: 12116 - protein, 9 aa, Homo sapiens
  Table A; HLA-B*27:05; TP53; R213Q; 0
DRNTFQHSV

SEQ ID NO: 12117 - protein, 9 aa, Homo sapiens
  Table A; HLA-B*39:01; TP53; R213Q; 0
DRNTFQHSV

SEQ ID NO: 12118 - protein, 9 aa, Homo sapiens
  Table A; HLA-B*39:06; TP53; R213Q; 0
DRNTFQHSV

SEQ ID NO: 12119 - protein, 9 aa, Homo sapiens
  Table A; HLA-C*06:02; TP53; R213Q; 1
DRNTFQHSV

SEQ ID NO: 12120 - protein, 9 aa, Homo sapiens
  Table A; HLA-B*14:02; TP53; S215G; 0
DRNTFRHGV

SEQ ID NO: 12121 - protein, 9 aa, Homo sapiens
  Table A; HLA-B*14:01; TP53; V216M; 0
DRNTFRHSM

SEQ ID NO: 12122 - protein, 9 aa, Homo sapiens
  Table A; HLA-B*14:02; TP53; V216M; 0
DRNTFRHSM

SEQ ID NO: 12123 - protein, 9 aa, Homo sapiens
  Table A; HLA-B*14:01; TP53; H214R; 0
DRNTFRRSV

SEQ ID NO: 12124 - protein, 9 aa, Homo sapiens
  Table A; HLA-B*14:02; TP53; H214R; 0
DRNTFRRSV

SEQ ID NO: 12125 - protein, 11 aa, Homo sapiens
  Table A; HLA-A*33:01; TP53; L194R; 0
DSDGLAPPQHR

SEQ ID NO: 12126 - protein, 11 aa, Homo sapiens
  Table A; HLA-A*33:03; TP53; L194R; 0
DSDGLAPPQHR

SEQ ID NO: 12127 - protein, 11 aa, Homo sapiens
  Table A; HLA-A*68:01; TP53; L194R; 0
DSDGLAPPQHR

SEQ ID NO: 12128 - protein, 10 aa, Homo sapiens
  Table A; HLA-A*33:01; TP53; H193R; 0
DSDGLAPPQR

SEQ ID NO: 12129 - protein, 10 aa, Homo sapiens
  Table A; HLA-A*68:01; TP53; H193R; 0
DSDGLAPPQR

SEQ ID NO: 12130 - protein, 10 aa, Homo sapiens
  Table A; HLA-A*01:01; TP53; H193Y; 1
DSDGLAPPQY

SEQ ID NO: 12131 - protein, 10 aa, Homo sapiens
  Table A; HLA-A*26:01; TP53; H193Y; 0
DSDGLAPPQY

SEQ ID NO: 12132 - protein, 10 aa, Homo sapiens
  Table A; HLA-C*03:02; TP53; H193Y; 0
DSDGLAPPQY

SEQ ID NO: 12133 - protein, 9 aa, Homo sapiens
  Table A; HLA-B*48:01; CTNNB1; G34E; 0
DSEIHSGAT

SEQ ID NO: 12134 - protein, 9 aa, Homo sapiens
  Table A; HLA-C*08:03; CTNNB1; G34E; 0
DSEIHSGAT

SEQ ID NO: 12135 - protein, 8 aa, Homo sapiens
  Table A; HLA-B*48:01; CTNNB1; S37A; 0
DSGIHAGA

SEQ ID NO: 12136 - protein, 8 aa, Homo sapiens
  Table A; HLA-C*08:03; CTNNB1; S37A; 0
DSGIHAGA

SEQ ID NO: 12137 - protein, 9 aa, Homo sapiens
  Table A; HLA-B*08:01; CTNNB1; S37A; 1
DSGIHAGAT

SEQ ID NO: 12138 - protein, 9 aa, Homo sapiens
  Table A; HLA-B*48:01; CTNNB1; S37A; 0
DSGIHAGAT

SEQ ID NO: 12139 - protein, 9 aa, Homo sapiens
  Table A; HLA-C*08:03; CTNNB1; S37A; 0
DSGIHAGAT

SEQ ID NO: 12140 - protein, 8 aa, Homo sapiens
  Table A; HLA-B*39:06; CTNNB1; S37C; 0
DSGIHCGA

SEQ ID NO: 12141 - protein, 8 aa, Homo sapiens
  Table A; HLA-C*08:03; CTNNB1; S37C; 0
DSGIHCGA

SEQ ID NO: 12142 - protein, 8 aa, Homo sapiens
  Table A; HLA-A*11:01; CTNNB1; S37F; 1
DSGIHFGA

SEQ ID NO: 12143 - protein, 8 aa, Homo sapiens
  Table A; HLA-A*33:01; CTNNB1; S37F; 0
DSGIHFGA

SEQ ID NO: 12144 - protein, 8 aa, Homo sapiens
  Table A; HLA-A*33:03; CTNNB1; S37F; 0
DSGIHFGA

SEQ ID NO: 12145 - protein, 8 aa, Homo sapiens
  Table A; HLA-A*68:01; CTNNB1; S37F; 1
DSGIHFGA

SEQ ID NO: 12146 - protein, 8 aa, Homo sapiens
  Table A; HLA-A*68:02; CTNNB1; S37F; 0
DSGIHFGA

SEQ ID NO: 12147 - protein, 8 aa, Homo sapiens
  Table A; HLA-B*08:01; CTNNB1; S37F; 1
DSGIHFGA

SEQ ID NO: 12148 - protein, 8 aa, Homo sapiens
  Table A; HLA-B*39:06; CTNNB1; S37F; 0
DSGIHFGA

SEQ ID NO: 12149 - protein, 8 aa, Homo sapiens
  Table A; HLA-B*48:01; CTNNB1; S37F; 0
DSGIHFGA

SEQ ID NO: 12150 - protein, 8 aa, Homo sapiens
  Table A; HLA-B*54:01; CTNNB1; S37F; 0
DSGIHFGA

SEQ ID NO: 12151 - protein, 8 aa, Homo sapiens
  Table A; HLA-C*08:03; CTNNB1; S37F; 0
DSGIHFGA

SEQ ID NO: 12152 - protein, 9 aa, Homo sapiens
  Table A; HLA-A*11:01; CTNNB1; S37F; 1
DSGIHFGAT

SEQ ID NO: 12153 - protein, 9 aa, Homo sapiens
  Table A; HLA-A*33:03; CTNNB1; S37F; 0
DSGIHFGAT

SEQ ID NO: 12154 - protein, 9 aa, Homo sapiens
  Table A; HLA-B*08:01; CTNNB1; S37F; 1
DSGIHFGAT

SEQ ID NO: 12155 - protein, 9 aa, Homo sapiens
  Table A; HLA-B*48:01; CTNNB1; S37F; 0
DSGIHFGAT

SEQ ID NO: 12156 - protein, 9 aa, Homo sapiens
  Table A; HLA-C*08:03; CTNNB1; S37F; 0
DSGIHFGAT

SEQ ID NO: 12157 - protein, 8 aa, Homo sapiens
  Table A; HLA-A*68:01; CTNNB1; S37P; 0
DSGIHPGA

SEQ ID NO: 12158 - protein, 8 aa, Homo sapiens
  Table A; HLA-B*08:01; CTNNB1; S37P; 1
DSGIHPGA

SEQ ID NO: 12159 - protein, 8 aa, Homo sapiens
  Table A; HLA-B*39:06; CTNNB1; S37P; 0
DSGIHPGA

SEQ ID NO: 12160 - protein, 8 aa, Homo sapiens
  Table A; HLA-B*48:01; CTNNB1; S37P; 0
DSGIHPGA

SEQ ID NO: 12161 - protein, 8 aa, Homo sapiens
  Table A; HLA-B*54:01; CTNNB1; S37P; 0
DSGIHPGA

SEQ ID NO: 12162 - protein, 8 aa, Homo sapiens
  Table A; HLA-C*08:03; CTNNB1; S37P; 0
DSGIHPGA

SEQ ID NO: 12163 - protein, 9 aa, Homo sapiens
  Table A; HLA-B*08:01; CTNNB1; S37P; 1
DSGIHPGAT

SEQ ID NO: 12164 - protein, 9 aa, Homo sapiens
  Table A; HLA-B*48:01; CTNNB1; S37P; 0
DSGIHPGAT

SEQ ID NO: 12165 - protein, 9 aa, Homo sapiens
  Table A; HLA-C*08:03; CTNNB1; S37P; 0
DSGIHPGAT

SEQ ID NO: 12166 - protein, 11 aa, Homo sapiens
  Table A; HLA-A*33:01; BCORL1; K1207N; 0
DSHEEGSLENK

SEQ ID NO: 12167 - protein, 8 aa, Homo sapiens
  Table A; HLA-B*51:01; PIK3R1; N564D; 0
DSIKPDLI

SEQ ID NO: 12168 - protein, 10 aa, Homo sapiens
  Table A; HLA-A*68:01; PIK3R1; N564D; 0
DSIKPDLIQL

SEQ ID NO: 12169 - protein, 10 aa, Homo sapiens
  Table A; HLA-A*68:02; PIK3R1; N564D; 0
DSIKPDLIQL

SEQ ID NO: 12170 - protein, 11 aa, Homo sapiens
  Table A; HLA-A*11:01; PIK3R1; N564D; 0
DSIKPDLIQLR

SEQ ID NO: 12171 - protein, 11 aa, Homo sapiens
  Table A; HLA-A*26:03; PIK3R1; N564D; 0
DSIKPDLIQLR

SEQ ID NO: 12172 - protein, 11 aa, Homo sapiens
  Table A; HLA-A*31:01; PIK3R1; N564D; 0
DSIKPDLIQLR

SEQ ID NO: 12173 - protein, 11 aa, Homo sapiens
  Table A; HLA-A*33:01; PIK3R1; N564D; 0
DSIKPDLIQLR

SEQ ID NO: 12174 - protein, 11 aa, Homo sapiens
  Table A; HLA-A*33:03; PIK3R1; N564D; 0
DSIKPDLIQLR

SEQ ID NO: 12175 - protein, 11 aa, Homo sapiens
  Table A; HLA-A*68:01; PIK3R1; N564D; 0
DSIKPDLIQLR

SEQ ID NO: 12176 - protein, 11 aa, Homo sapiens
  Table A; HLA-A*68:02; PIK3R1; N564D; 0
DSIKPDLIQLR

SEQ ID NO: 12177 - protein, 11 aa, Homo sapiens
  Table A; HLA-B*27:02; PIK3R1; N564D; 0
DSIKPDLIQLR

SEQ ID NO: 12178 - protein, 8 aa, Homo sapiens
  Table A; HLA-A*33:01; ARHGAP5; V474A; 0
DSKEAYGR

SEQ ID NO: 12179 - protein, 8 aa, Homo sapiens
  Table A; HLA-A*33:03; ARHGAP5; V474A; 0
DSKEAYGR

SEQ ID NO: 12180 - protein, 11 aa, Homo sapiens
  Table A; HLA-A*33:01; ARHGAP5; V474A; 0
DSKEAYGRHQR

SEQ ID NO: 12181 - protein, 9 aa, Homo sapiens
  Table A; HLA-A*33:01; PLCG1; R1275Q; 0
DSQERRAPR

SEQ ID NO: 12182 - protein, 9 aa, Homo sapiens
  Table A; HLA-A*33:03; PLCG1; R1275Q; 0
DSQERRAPR

SEQ ID NO: 12183 - protein, 9 aa, Homo sapiens
  Table A; HLA-A*68:02; RUNX1T1; D198N; 0
DSSELLLNV

SEQ ID NO: 12184 - protein, 9 aa, Homo sapiens
  Table A; HLA-A*11:01; TP53; G266E; 0
DSSGNLLER

SEQ ID NO: 12185 - protein, 9 aa, Homo sapiens
  Table A; HLA-A*26:03; TP53; G266E; 0
DSSGNLLER

SEQ ID NO: 12186 - protein, 9 aa, Homo sapiens
  Table A; HLA-A*33:01; TP53; G266E; 0
DSSGNLLER

SEQ ID NO: 12187 - protein, 9 aa, Homo sapiens
  Table A; HLA-A*33:03; TP53; G266E; 0
DSSGNLLER

SEQ ID NO: 12188 - protein, 9 aa, Homo sapiens
  Table A; HLA-A*68:01; TP53; G266E; 0
DSSGNLLER

SEQ ID NO: 12189 - protein, 9 aa, Homo sapiens
  Table A; HLA-A*68:02; TP53; G266E; 0
DSSGNLLER

SEQ ID NO: 12190 - protein, 8 aa, Homo sapiens
  Table A; HLA-A*33:03; TP53; G266R; 0
DSSGNLLR

SEQ ID NO: 12191 - protein, 8 aa, Homo sapiens
  Table A; HLA-A*68:01; TP53; G266R; 0
DSSGNLLR

SEQ ID NO: 12192 - protein, 9 aa, Homo sapiens
  Table A; HLA-A*26:03; TP53; G266R; 0
DSSGNLLRR

SEQ ID NO: 12193 - protein, 9 aa, Homo sapiens
  Table A; HLA-A*33:01; TP53; G266R; 0
DSSGNLLRR

SEQ ID NO: 12194 - protein, 9 aa, Homo sapiens
  Table A; HLA-A*33:03; TP53; G266R; 0
DSSGNLLRR

SEQ ID NO: 12195 - protein, 9 aa, Homo sapiens
  Table A; HLA-A*68:01; TP53; G266R; 0
DSSGNLLRR

SEQ ID NO: 12196 - protein, 8 aa, Homo sapiens
  Table A; HLA-B*51:01; TP53; G266V; 0
DSSGNLLV

SEQ ID NO: 12197 - protein, 9 aa, Homo sapiens
  Table A; HLA-A*11:01; TP53; G266V; 0
DSSGNLLVR

SEQ ID NO: 12198 - protein, 9 aa, Homo sapiens
  Table A; HLA-A*26:03; TP53; G266V; 0
DSSGNLLVR

SEQ ID NO: 12199 - protein, 9 aa, Homo sapiens
  Table A; HLA-A*31:01; TP53; G266V; 0
DSSGNLLVR

SEQ ID NO: 12200 - protein, 9 aa, Homo sapiens
  Table A; HLA-A*33:01; TP53; G266V; 0
DSSGNLLVR

SEQ ID NO: 12201 - protein, 9 aa, Homo sapiens
  Table A; HLA-A*33:03; TP53; G266V; 0
DSSGNLLVR

SEQ ID NO: 12202 - protein, 9 aa, Homo sapiens
  Table A; HLA-A*68:01; TP53; G266V; 0
DSSGNLLVR

SEQ ID NO: 12203 - protein, 9 aa, Homo sapiens
  Table A; HLA-A*68:02; TP53; G266V; 0
DSSGNLLVR

SEQ ID NO: 12204 - protein, 10 aa, Homo sapiens
  Table A; HLA-A*68:01; TP53; G266V; 0
DSSGNLLVRN

SEQ ID NO: 12205 - protein, 9 aa, Homo sapiens
  Table A; HLA-A*26:03; TP53; G262V; 0
DSSVNLLGR

SEQ ID NO: 12206 - protein, 9 aa, Homo sapiens
  Table A; HLA-A*33:01; TP53; G262V; 0
DSSVNLLGR

SEQ ID NO: 12207 - protein, 9 aa, Homo sapiens
  Table A; HLA-A*33:03; TP53; G262V; 0
DSSVNLLGR

SEQ ID NO: 12208 - protein, 9 aa, Homo sapiens
  Table A; HLA-A*68:01; TP53; G262V; 0
DSSVNLLGR

SEQ ID NO: 12209 - protein, 10 aa, Homo sapiens
  Table A; HLA-A*01:01; TP53; V157F; 1
DSTPPPGTRF

SEQ ID NO: 12210 - protein, 10 aa, Homo sapiens
  Table A; HLA-A*25:01; TP53; V157F; 0
DSTPPPGTRF

SEQ ID NO: 12211 - protein, 10 aa, Homo sapiens
  Table A; HLA-A*26:01; TP53; V157F; 0
DSTPPPGTRF

SEQ ID NO: 12212 - protein, 10 aa, Homo sapiens
  Table A; HLA-A*26:02; TP53; V157F; 0
DSTPPPGTRF

SEQ ID NO: 12213 - protein, 10 aa, Homo sapiens
  Table A; HLA-A*68:01; TP53; V157F; 0
DSTPPPGTRF

SEQ ID NO: 12214 - protein, 11 aa, Homo sapiens
  Table A; HLA-A*33:01; TP53; V157F; 0
DSTPPPGTRFR

SEQ ID NO: 12215 - protein, 9 aa, Homo sapiens
  Table A; HLA-A*26:03; TP53; P151S; 0
DSTSPPGTR

SEQ ID NO: 12216 - protein, 9 aa, Homo sapiens
  Table A; HLA-A*33:01; TP53; P151S; 0
DSTSPPGTR

SEQ ID NO: 12217 - protein, 9 aa, Homo sapiens
  Table A; HLA-A*33:03; TP53; P151S; 0
DSTSPPGTR

SEQ ID NO: 12218 - protein, 9 aa, Homo sapiens
  Table A; HLA-A*68:01; TP53; P151S; 0
DSTSPPGTR

SEQ ID NO: 12219 - protein, 10 aa, Homo sapiens
  Table A; HLA-A*68:01; TP53; P151S; 0
DSTSPPGTRV

SEQ ID NO: 12220 - protein, 10 aa, Homo sapiens
  Table A; HLA-A*68:02; TP53; P151S; 0
DSTSPPGTRV

SEQ ID NO: 12221 - protein, 11 aa, Homo sapiens
  Table A; HLA-A*33:01; TP53; P151S; 0
DSTSPPGTRVR

SEQ ID NO: 12222 - protein, 11 aa, Homo sapiens
  Table A; HLA-A*33:03; TP53; P151S; 0
DSTSPPGTRVR

SEQ ID NO: 12223 - protein, 11 aa, Homo sapiens
  Table A; HLA-A*68:01; TP53; P151S; 0
DSTSPPGTRVR

SEQ ID NO: 12224 - protein, 8 aa, Homo sapiens
  Table A; HLA-B*08:01; CTNNB1; G34V; 1
DSVIHSGA

SEQ ID NO: 12225 - protein, 8 aa, Homo sapiens
  Table A; HLA-B*14:02; CTNNB1; G34V; 0
DSVIHSGA

SEQ ID NO: 12226 - protein, 8 aa, Homo sapiens
  Table A; HLA-B*39:06; CTNNB1; G34V; 0
DSVIHSGA

SEQ ID NO: 12227 - protein, 8 aa, Homo sapiens
  Table A; HLA-B*48:01; CTNNB1; G34V; 0
DSVIHSGA

SEQ ID NO: 12228 - protein, 8 aa, Homo sapiens
  Table A; HLA-B*51:01; CTNNB1; G34V; 1
DSVIHSGA

SEQ ID NO: 12229 - protein, 8 aa, Homo sapiens
  Table A; HLA-B*54:01; CTNNB1; G34V; 0
DSVIHSGA

SEQ ID NO: 12230 - protein, 8 aa, Homo sapiens
  Table A; HLA-C*08:03; CTNNB1; G34V; 0
DSVIHSGA

SEQ ID NO: 12231 - protein, 9 aa, Homo sapiens
  Table A; HLA-A*26:01; CTNNB1; G34V; 0
DSVIHSGAT

SEQ ID NO: 12232 - protein, 9 aa, Homo sapiens
  Table A; HLA-B*08:01; CTNNB1; G34V; 1
DSVIHSGAT

SEQ ID NO: 12233 - protein, 9 aa, Homo sapiens
  Table A; HLA-B*39:01; CTNNB1; G34V; 0
DSVIHSGAT

SEQ ID NO: 12234 - protein, 9 aa, Homo sapiens
  Table A; HLA-B*48:01; CTNNB1; G34V; 0
DSVIHSGAT

SEQ ID NO: 12235 - protein, 9 aa, Homo sapiens
  Table A; HLA-C*08:03; CTNNB1; G34V; 0
DSVIHSGAT

SEQ ID NO: 12236 - protein, 8 aa, Homo sapiens
  Table A; HLA-A*01:01; KRAS; Q61H; 1
DTAGHEEY

SEQ ID NO: 12237 - protein, 8 aa, Homo sapiens
  Table A; HLA-A*26:01; KRAS; Q61H; 1
DTAGHEEY

SEQ ID NO: 12238 - protein, 8 aa, Homo sapiens
  Table A; HLA-B*35:01; KRAS; Q61H; 1
DTAGHEEY

SEQ ID NO: 12239 - protein, 8 aa, Homo sapiens
  Table A; HLA-B*39:01; KRAS; Q61H; 0
DTAGHEEY

SEQ ID NO: 12240 - protein, 8 aa, Homo sapiens
  Table A; HLA-A*01:01; NRAS; Q61H; 1
DTAGHEEY

SEQ ID NO: 12241 - protein, 8 aa, Homo sapiens
  Table A; HLA-A*26:01; NRAS; Q61H; 0
DTAGHEEY

SEQ ID NO: 12242 - protein, 8 aa, Homo sapiens
  Table A; HLA-B*35:01; NRAS; Q61H; 1
DTAGHEEY

SEQ ID NO: 12243 - protein, 8 aa, Homo sapiens
  Table A; HLA-B*39:01; NRAS; Q61H; 0
DTAGHEEY

SEQ ID NO: 12244 - protein, 11 aa, Homo sapiens
  Table A; HLA-A*25:01; KRAS; Q61H; 1
DTAGHEEYSAM

SEQ ID NO: 12245 - protein, 11 aa, Homo sapiens
  Table A; HLA-A*26:01; KRAS; Q61H; 1
DTAGHEEYSAM

SEQ ID NO: 12246 - protein, 11 aa, Homo sapiens
  Table A; HLA-A*26:02; KRAS; Q61H; 0
DTAGHEEYSAM

SEQ ID NO: 12247 - protein, 11 aa, Homo sapiens
  Table A; HLA-A*26:03; KRAS; Q61H; 0
DTAGHEEYSAM

SEQ ID NO: 12248 - protein, 11 aa, Homo sapiens
  Table A; HLA-A*25:01; NRAS; Q61H; 0
DTAGHEEYSAM

SEQ ID NO: 12249 - protein, 11 aa, Homo sapiens
  Table A; HLA-A*26:01; NRAS; Q61H; 0
DTAGHEEYSAM

SEQ ID NO: 12250 - protein, 11 aa, Homo sapiens
  Table A; HLA-A*26:02; NRAS; Q61H; 0
DTAGHEEYSAM

SEQ ID NO: 12251 - protein, 11 aa, Homo sapiens
  Table A; HLA-A*26:03; NRAS; Q61H; 0
DTAGHEEYSAM

SEQ ID NO: 12252 - protein, 11 aa, Homo sapiens
  Table A; HLA-A*25:01; HRAS; Q61K; 0
DTAGKEEYSAM

SEQ ID NO: 12253 - protein, 11 aa, Homo sapiens
  Table A; HLA-A*26:01; HRAS; Q61K; 0
DTAGKEEYSAM

SEQ ID NO: 12254 - protein, 11 aa, Homo sapiens
  Table A; HLA-A*26:02; HRAS; Q61K; 0
DTAGKEEYSAM

SEQ ID NO: 12255 - protein, 11 aa, Homo sapiens
  Table A; HLA-A*25:01; NRAS; Q61K; 1
DTAGKEEYSAM

SEQ ID NO: 12256 - protein, 11 aa, Homo sapiens
  Table A; HLA-A*26:01; NRAS; Q61K; 1
DTAGKEEYSAM

SEQ ID NO: 12257 - protein, 11 aa, Homo sapiens
  Table A; HLA-A*26:02; NRAS; Q61K; 0
DTAGKEEYSAM

SEQ ID NO: 12258 - protein, 8 aa, Homo sapiens
  Table A; HLA-A*26:01; KRAS; Q61L; 0
DTAGLEEY

SEQ ID NO: 12259 - protein, 8 aa, Homo sapiens
  Table A; HLA-B*35:01; KRAS; Q61L; 0
DTAGLEEY

SEQ ID NO: 12260 - protein, 8 aa, Homo sapiens
  Table A; HLA-B*39:01; KRAS; Q61L; 0
DTAGLEEY

SEQ ID NO: 12261 - protein, 8 aa, Homo sapiens
  Table A; HLA-A*26:01; NRAS; Q61L; 1
DTAGLEEY

SEQ ID NO: 12262 - protein, 8 aa, Homo sapiens
  Table A; HLA-B*35:01; NRAS; Q61L; 1
DTAGLEEY

SEQ ID NO: 12263 - protein, 8 aa, Homo sapiens
  Table A; HLA-B*39:01; NRAS; Q61L; 0
DTAGLEEY

SEQ ID NO: 12264 - protein, 10 aa, Homo sapiens
  Table A; HLA-A*68:01; KRAS; Q61L; 0
DTAGLEEYSA

SEQ ID NO: 12265 - protein, 10 aa, Homo sapiens
  Table A; HLA-A*68:02; KRAS; Q61L; 0
DTAGLEEYSA

SEQ ID NO: 12266 - protein, 10 aa, Homo sapiens
  Table A; HLA-A*68:01; NRAS; Q61L; 1
DTAGLEEYSA

SEQ ID NO: 12267 - protein, 10 aa, Homo sapiens
  Table A; HLA-A*68:02; NRAS; Q61L; 0
DTAGLEEYSA

SEQ ID NO: 12268 - protein, 11 aa, Homo sapiens
  Table A; HLA-A*25:01; KRAS; Q61L; 0
DTAGLEEYSAM

SEQ ID NO: 12269 - protein, 11 aa, Homo sapiens
  Table A; HLA-A*26:01; KRAS; Q61L; 0
DTAGLEEYSAM

SEQ ID NO: 12270 - protein, 11 aa, Homo sapiens
  Table A; HLA-A*26:02; KRAS; Q61L; 0
DTAGLEEYSAM

SEQ ID NO: 12271 - protein, 11 aa, Homo sapiens
  Table A; HLA-A*26:03; KRAS; Q61L; 0
DTAGLEEYSAM

SEQ ID NO: 12272 - protein, 11 aa, Homo sapiens
  Table A; HLA-A*68:01; KRAS; Q61L; 0
DTAGLEEYSAM

SEQ ID NO: 12273 - protein, 11 aa, Homo sapiens
  Table A; HLA-A*25:01; NRAS; Q61L; 1
DTAGLEEYSAM

SEQ ID NO: 12274 - protein, 11 aa, Homo sapiens
  Table A; HLA-A*26:01; NRAS; Q61L; 1
DTAGLEEYSAM

SEQ ID NO: 12275 - protein, 11 aa, Homo sapiens
  Table A; HLA-A*26:02; NRAS; Q61L; 0
DTAGLEEYSAM

SEQ ID NO: 12276 - protein, 11 aa, Homo sapiens
  Table A; HLA-A*26:03; NRAS; Q61L; 0
DTAGLEEYSAM

SEQ ID NO: 12277 - protein, 11 aa, Homo sapiens
  Table A; HLA-A*68:01; NRAS; Q61L; 1
DTAGLEEYSAM

SEQ ID NO: 12278 - protein, 11 aa, Homo sapiens
  Table A; HLA-A*68:02; NRAS; Q61L; 0
DTAGLEEYSAM

SEQ ID NO: 12279 - protein, 8 aa, Homo sapiens
  Table A; HLA-A*26:01; KRAS; Q61R; 0
DTAGREEY

SEQ ID NO: 12280 - protein, 8 aa, Homo sapiens
  Table A; HLA-A*26:01; NRAS; Q61R; 1
DTAGREEY

SEQ ID NO: 12281 - protein, 8 aa, Homo sapiens
  Table A; HLA-C*16:01; NRAS; Q61R; 1
DTAGREEY

SEQ ID NO: 12282 - protein, 11 aa, Homo sapiens
  Table A; HLA-A*25:01; KRAS; Q61R; 0
DTAGREEYSAM

SEQ ID NO: 12283 - protein, 11 aa, Homo sapiens
  Table A; HLA-A*26:01; KRAS; Q61R; 0
DTAGREEYSAM

SEQ ID NO: 12284 - protein, 11 aa, Homo sapiens
  Table A; HLA-A*26:02; KRAS; Q61R; 0
DTAGREEYSAM

SEQ ID NO: 12285 - protein, 11 aa, Homo sapiens
  Table A; HLA-A*25:01; NRAS; Q61R; 1
DTAGREEYSAM

SEQ ID NO: 12286 - protein, 11 aa, Homo sapiens
  Table A; HLA-A*26:01; NRAS; Q61R; 1
DTAGREEYSAM

SEQ ID NO: 12287 - protein, 11 aa, Homo sapiens
  Table A; HLA-A*26:02; NRAS; Q61R; 0
DTAGREEYSAM

SEQ ID NO: 12288 - protein, 10 aa, Homo sapiens
  Table A; HLA-A*25:01; ARHGEF12; R705H; 0
DTLDGTPHTL

SEQ ID NO: 12289 - protein, 10 aa, Homo sapiens
  Table A; HLA-A*68:01; ARHGEF12; R705H; 0
DTLDGTPHTL

SEQ ID NO: 12290 - protein, 10 aa, Homo sapiens
  Table A; HLA-A*68:02; ARHGEF12; R705H; 0
DTLDGTPHTL

SEQ ID NO: 12291 - protein, 9 aa, Homo sapiens
  Table A; HLA-A*68:02; PPP2R1A; R183W; 0
DTPMVRWAA

SEQ ID NO: 12292 - protein, 9 aa, Homo sapiens
  Table A; HLA-B*39:06; PPP2R1A; R183W; 0
DTPMVRWAA

SEQ ID NO: 12293 - protein, 9 aa, Homo sapiens
  Table A; HLA-B*54:01; PPP2R1A; R183W; 0
DTPMVRWAA

SEQ ID NO: 12294 - protein, 8 aa, Homo sapiens
  Table A; HLA-B*18:01; PTK6; H126P; 1
DTQAVRPY

SEQ ID NO: 12295 - protein, 10 aa, Homo sapiens
  Table A; HLA-A*68:02; PTK6; H126P; 0
DTQAVRPYKI

SEQ ID NO: 12296 - protein, 9 aa, Homo sapiens
  Table A; HLA-B*51:01; KRAS; G13D; 1
DVGKSALTI

SEQ ID NO: 12297 - protein, 9 aa, Homo sapiens
  Table A; HLA-A*25:01; FAT1; D3120N; 0
DVNNNAPEF

SEQ ID NO: 12298 - protein, 9 aa, Homo sapiens
  Table A; HLA-A*26:01; FAT1; D3120N; 0
DVNNNAPEF

SEQ ID NO: 12299 - protein, 9 aa, Homo sapiens
  Table A; HLA-A*26:02; FAT1; D3120N; 0
DVNNNAPEF

SEQ ID NO: 12300 - protein, 9 aa, Homo sapiens
  Table A; HLA-A*33:01; FAT1; D3120N; 0
DVNNNAPEF

SEQ ID NO: 12301 - protein, 9 aa, Homo sapiens
  Table A; HLA-B*15:02; FAT1; D3120N; 0
DVNNNAPEF

SEQ ID NO: 12302 - protein, 9 aa, Homo sapiens
  Table A; HLA-B*35:01; FAT1; D3120N; 1
DVNNNAPEF

SEQ ID NO: 12303 - protein, 9 aa, Homo sapiens
  Table A; HLA-B*39:01; FAT1; D3120N; 0
DVNNNAPEF

SEQ ID NO: 12304 - protein, 9 aa, Homo sapiens
  Table A; HLA-A*25:01; PTPRD; S431L; 0
DVQARMLSL

SEQ ID NO: 12305 - protein, 9 aa, Homo sapiens
  Table A; HLA-B*08:01; PTPRD; S431L; 1
DVQARMLSL

SEQ ID NO: 12306 - protein, 9 aa, Homo sapiens
  Table A; HLA-B*14:02; PTPRD; S431L; 0
DVQARMLSL

SEQ ID NO: 12307 - protein, 9 aa, Homo sapiens
  Table A; HLA-A*25:01; PPP2R1A; R28C; 0
DVQLCLNSI

SEQ ID NO: 12308 - protein, 9 aa, Homo sapiens
  Table A; HLA-B*08:01; PPP2R1A; R28C; 1
DVQLCLNSI

SEQ ID NO: 12309 - protein, 9 aa, Homo sapiens
  Table A; HLA-B*51:01; PPP2R1A; R28C; 1
DVQLCLNSI

SEQ ID NO: 12310 - protein, 9 aa, Homo sapiens
  Table A; HLA-A*33:01; FGFR2; S252W; 1
DVVERWPHR

SEQ ID NO: 12311 - protein, 8 aa, Homo sapiens
  Table A; HLA-B*51:01; GRIN2A; S1425L; 0
DVYILEHV

SEQ ID NO: 12312 - protein, 9 aa, Homo sapiens
  Table A; HLA-B*15:02; GRIN2A; S1425L; 0
DVYILEHVM

SEQ ID NO: 12313 - protein, 9 aa, Homo sapiens
  Table A; HLA-B*35:01; GRIN2A; S1425L; 0
DVYILEHVM

SEQ ID NO: 12314 - protein, 9 aa, Homo sapiens
  Table A; HLA-C*08:01; GRIN2A; S1425L; 0
DVYILEHVM

SEQ ID NO: 12315 - protein, 11 aa, Homo sapiens
  Table A; HLA-A*33:01; SMAD4; G352V; 0
DVYVDPSGGDR

SEQ ID NO: 12316 - protein, 11 aa, Homo sapiens
  Table A; HLA-A*68:01; SMAD4; G352V; 0
DVYVDPSGGDR

SEQ ID NO: 12317 - protein, 9 aa, Homo sapiens
  Table A; HLA-A*33:03; CTCF; K365T; 0
DYASVEVST

SEQ ID NO: 12318 - protein, 9 aa, Homo sapiens
  Table A; HLA-B*27:02; CTCF; K365T; 0
DYASVEVST

SEQ ID NO: 12319 - protein, 9 aa, Homo sapiens
  Table A; HLA-B*39:01; CTCF; K365T; 0
DYASVEVST

SEQ ID NO: 12320 - protein, 9 aa, Homo sapiens
  Table A; HLA-B*39:06; CTCF; K365T; 0
DYASVEVST

SEQ ID NO: 12321 - protein, 10 aa, Homo sapiens
  Table A; HLA-A*23:01; CTCF; K365T; 0
DYASVEVSTL

SEQ ID NO: 12322 - protein, 10 aa, Homo sapiens
  Table A; HLA-A*24:02; CTCF; K365T; 1
DYASVEVSTL

SEQ ID NO: 12323 - protein, 10 aa, Homo sapiens
  Table A; HLA-A*25:01; CTCF; K365T; 0
DYASVEVSTL

SEQ ID NO: 12324 - protein, 10 aa, Homo sapiens
  Table A; HLA-A*33:03; CTCF; K365T; 0
DYASVEVSTL

SEQ ID NO: 12325 - protein, 10 aa, Homo sapiens
  Table A; HLA-A*68:01; CTCF; K365T; 0
DYASVEVSTL

SEQ ID NO: 12326 - protein, 10 aa, Homo sapiens
  Table A; HLA-A*68:02; CTCF; K365T; 0
DYASVEVSTL

SEQ ID NO: 12327 - protein, 10 aa, Homo sapiens
  Table A; HLA-B*38:01; CTCF; K365T; 0
DYASVEVSTL

SEQ ID NO: 12328 - protein, 10 aa, Homo sapiens
  Table A; HLA-B*39:01; CTCF; K365T; 0
DYASVEVSTL

SEQ ID NO: 12329 - protein, 10 aa, Homo sapiens
  Table A; HLA-B*44:05; CTCF; K365T; 0
DYASVEVSTL

SEQ ID NO: 12330 - protein, 10 aa, Homo sapiens
  Table A; HLA-B*48:01; CTCF; K365T; 0
DYASVEVSTL

SEQ ID NO: 12331 - protein, 11 aa, Homo sapiens
  Table A; HLA-A*33:01; CTCF; K365T; 0
DYASVEVSTLK

SEQ ID NO: 12332 - protein, 11 aa, Homo sapiens
  Table A; HLA-A*33:03; CTCF; K365T; 0
DYASVEVSTLK

SEQ ID NO: 12333 - protein, 11 aa, Homo sapiens
  Table A; HLA-A*68:01; CTCF; K365T; 0
DYASVEVSTLK

SEQ ID NO: 12334 - protein, 11 aa, Homo sapiens
  Table A; HLA-A*68:02; CTCF; K365T; 0
DYASVEVSTLK

SEQ ID NO: 12335 - protein, 11 aa, Homo sapiens
  Table A; HLA-B*27:02; CTCF; K365T; 0
DYASVEVSTLK

SEQ ID NO: 12336 - protein, 8 aa, Homo sapiens
  Table A; HLA-A*33:03; CTNNB1; S33Y; 0
DYGIHSGA

SEQ ID NO: 12337 - protein, 8 aa, Homo sapiens
  Table A; HLA-B*14:01; CTNNB1; S33Y; 0
DYGIHSGA

SEQ ID NO: 12338 - protein, 8 aa, Homo sapiens
  Table A; HLA-B*14:02; CTNNB1; S33Y; 0
DYGIHSGA

SEQ ID NO: 12339 - protein, 8 aa, Homo sapiens
  Table A; HLA-B*48:01; CTNNB1; S33Y; 0
DYGIHSGA

SEQ ID NO: 12340 - protein, 8 aa, Homo sapiens
  Table A; HLA-C*08:03; CTNNB1; S33Y; 0
DYGIHSGA

SEQ ID NO: 12341 - protein, 9 aa, Homo sapiens
  Table A; HLA-A*33:03; CTNNB1; S33Y; 0
DYGIHSGAT

SEQ ID NO: 12342 - protein, 9 aa, Homo sapiens
  Table A; HLA-B*08:01; CTNNB1; S33Y; 1
DYGIHSGAT

SEQ ID NO: 12343 - protein, 9 aa, Homo sapiens
  Table A; HLA-B*48:01; CTNNB1; S33Y; 0
DYGIHSGAT

SEQ ID NO: 12344 - protein, 9 aa, Homo sapiens
  Table A; HLA-C*08:03; CTNNB1; S33Y; 0
DYGIHSGAT

SEQ ID NO: 12345 - protein, 9 aa, Homo sapiens
  Table A; HLA-A*33:01; FGFR2; C382R; 0
DYLEIAIYR

SEQ ID NO: 12346 - protein, 9 aa, Homo sapiens
  Table A; HLA-A*33:03; FGFR2; C382R; 0
DYLEIAIYR

SEQ ID NO: 12347 - protein, 10 aa, Homo sapiens
  Table A; HLA-A*23:01; FGFR2; C382R; 0
DYLEIAIYRI

SEQ ID NO: 12348 - protein, 9 aa, Homo sapiens
  Table A; HLA-A*26:01; RGPD3; N756D; 0
DYSEGGPLY

SEQ ID NO: 12349 - protein, 9 aa, Homo sapiens
  Table A; HLA-A*29:02; RGPD3; N756D; 0
DYSEGGPLY

SEQ ID NO: 12350 - protein, 9 aa, Homo sapiens
  Table A; HLA-A*33:01; RGPD3; N756D; 0
DYSEGGPLY

SEQ ID NO: 12351 - protein, 9 aa, Homo sapiens
  Table A; HLA-B*18:01; RGPD3; N756D; 1
DYSEGGPLY

SEQ ID NO: 12352 - protein, 9 aa, Homo sapiens
  Table A; HLA-B*39:01; RGPD3; N756D; 0
DYSEGGPLY

SEQ ID NO: 12353 - protein, 10 aa, Homo sapiens
  Table A; HLA-A*33:01; RGPD3; N756D; 0
DYSEGGPLYK

SEQ ID NO: 12354 - protein, 10 aa, Homo sapiens
  Table A; HLA-A*33:03; RGPD3; N756D; 0
DYSEGGPLYK

SEQ ID NO: 12355 - protein, 10 aa, Homo sapiens
  Table A; HLA-A*68:01; RGPD3; N756D; 0
DYSEGGPLYK

SEQ ID NO: 12356 - protein, 11 aa, Homo sapiens
  Table A; HLA-A*33:01; RGPD3; N756D; 0
DYSEGGPLYKN

SEQ ID NO: 12357 - protein, 10 aa, Homo sapiens
  Table A; HLA-A*68:02; CDH11; K357T; 0
EAANVHIDPT

SEQ ID NO: 12358 - protein, 11 aa, Homo sapiens
  Table A; HLA-A*68:02; CDH11; K357T; 0
EAANVHIDPTF

SEQ ID NO: 12359 - protein, 11 aa, Homo sapiens
  Table A; HLA-B*35:01; CDH11; K357T; 1
EAANVHIDPTF

SEQ ID NO: 12360 - protein, 11 aa, Homo sapiens
  Table A; HLA-B*35:08; CDH11; K357T; 0
EAANVHIDPTF

SEQ ID NO: 12361 - protein, 8 aa, Homo sapiens
  Table A; HLA-B*51:01; MB21D2; Q311E; 0
EACKAIII

SEQ ID NO: 12362 - protein, 9 aa, Homo sapiens
  Table A; HLA-A*68:01; MB21D2; Q311E; 0
EACKAIIIK

SEQ ID NO: 12363 - protein, 10 aa, Homo sapiens
  Table A; HLA-A*68:01; MB21D2; Q311E; 0
EACKAIIIKL

SEQ ID NO: 12364 - protein, 10 aa, Homo sapiens
  Table A; HLA-A*68:02; MB21D2; Q311E; 0
EACKAIIIKL

SEQ ID NO: 12365 - protein, 10 aa, Homo sapiens
  Table A; HLA-A*33:03; ARHGAP5; V474A; 0
EADSKEAYGR

SEQ ID NO: 12366 - protein, 10 aa, Homo sapiens
  Table A; HLA-A*68:01; ARHGAP5; V474A; 0
EADSKEAYGR

SEQ ID NO: 12367 - protein, 10 aa, Homo sapiens
  Table A; HLA-B*35:02; TNC; L1626I; 0
EAEPEVDNIL

SEQ ID NO: 12368 - protein, 10 aa, Homo sapiens
  Table A; HLA-B*35:03; TNC; L1626I; 0
EAEPEVDNIL

SEQ ID NO: 12369 - protein, 10 aa, Homo sapiens
  Table A; HLA-B*35:12; TNC; L1626I; 0
EAEPEVDNIL

SEQ ID NO: 12370 - protein, 9 aa, Homo sapiens
  Table A; HLA-A*11:01; MAP2K1; K57N; 0
EAFLTQNQK

SEQ ID NO: 12371 - protein, 9 aa, Homo sapiens
  Table A; HLA-A*33:01; MAP2K1; K57N; 0
EAFLTQNQK

SEQ ID NO: 12372 - protein, 9 aa, Homo sapiens
  Table A; HLA-A*33:03; MAP2K1; K57N; 0
EAFLTQNQK

SEQ ID NO: 12373 - protein, 9 aa, Homo sapiens
  Table A; HLA-A*68:01; MAP2K1; K57N; 0
EAFLTQNQK

SEQ ID NO: 12374 - protein, 9 aa, Homo sapiens
  Table A; HLA-A*68:02; MAP2K1; K57N; 0
EAFLTQNQK

SEQ ID NO: 12375 - protein, 9 aa, Homo sapiens
  Table A; HLA-B*27:02; MAP2K1; K57N; 0
EAFLTQNQK

SEQ ID NO: 12376 - protein, 9 aa, Homo sapiens
  Table A; HLA-B*51:01; MAP2K1; K57N; 0
EAFLTQNQK

SEQ ID NO: 12377 - protein, 10 aa, Homo sapiens
  Table A; HLA-A*33:03; MAP2K1; K57N; 0
EAFLTQNQKV

SEQ ID NO: 12378 - protein, 10 aa, Homo sapiens
  Table A; HLA-A*68:01; MAP2K1; K57N; 0
EAFLTQNQKV

SEQ ID NO: 12379 - protein, 10 aa, Homo sapiens
  Table A; HLA-A*68:02; MAP2K1; K57N; 0
EAFLTQNQKV

SEQ ID NO: 12380 - protein, 10 aa, Homo sapiens
  Table A; HLA-B*51:01; MAP2K1; K57N; 0
EAFLTQNQKV

SEQ ID NO: 12381 - protein, 8 aa, Homo sapiens
  Table A; HLA-B*08:01; CHST11; A159T; 1
EAHVSTNL

SEQ ID NO: 12382 - protein, 8 aa, Homo sapiens
  Table A; HLA-B*48:01; CHST11; A159T; 0
EAHVSTNL

SEQ ID NO: 12383 - protein, 8 aa, Homo sapiens
  Table A; HLA-B*51:01; CHST11; A159T; 1
EAHVSTNL

SEQ ID NO: 12384 - protein, 9 aa, Homo sapiens
  Table A; HLA-A*33:03; CHST11; A159T; 0
EAHVSTNLK

SEQ ID NO: 12385 - protein, 9 aa, Homo sapiens
  Table A; HLA-A*68:01; CHST11; A159T; 0
EAHVSTNLK

SEQ ID NO: 12386 - protein, 8 aa, Homo sapiens
  Table A; HLA-A*02:03; TPR; S2155L; 0
EAIHLPQV

SEQ ID NO: 12387 - protein, 8 aa, Homo sapiens
  Table A; HLA-A*02:06; TPR; S2155L; 0
EAIHLPQV

SEQ ID NO: 12388 - protein, 8 aa, Homo sapiens
  Table A; HLA-A*11:01; TPR; S2155L; 0
EAIHLPQV

SEQ ID NO: 12389 - protein, 8 aa, Homo sapiens
  Table A; HLA-A*26:01; TPR; S2155L; 0
EAIHLPQV

SEQ ID NO: 12390 - protein, 8 aa, Homo sapiens
  Table A; HLA-A*26:03; TPR; S2155L; 0
EAIHLPQV

SEQ ID NO: 12391 - protein, 8 aa, Homo sapiens
  Table A; HLA-A*30:01; TPR; S2155L; 0
EAIHLPQV

SEQ ID NO: 12392 - protein, 8 aa, Homo sapiens
  Table A; HLA-A*33:03; TPR; S2155L; 0
EAIHLPQV

SEQ ID NO: 12393 - protein, 8 aa, Homo sapiens
  Table A; HLA-A*68:01; TPR; S2155L; 0
EAIHLPQV

SEQ ID NO: 12394 - protein, 8 aa, Homo sapiens
  Table A; HLA-A*68:02; TPR; S2155L; 0
EAIHLPQV

SEQ ID NO: 12395 - protein, 8 aa, Homo sapiens
  Table A; HLA-B*08:01; TPR; S2155L; 0
EAIHLPQV

SEQ ID NO: 12396 - protein, 8 aa, Homo sapiens
  Table A; HLA-B*13:02; TPR; S2155L; 0
EAIHLPQV

SEQ ID NO: 12397 - protein, 8 aa, Homo sapiens
  Table A; HLA-B*39:06; TPR; S2155L; 0
EAIHLPQV

SEQ ID NO: 12398 - protein, 8 aa, Homo sapiens
  Table A; HLA-B*40:02; TPR; S2155L; 0
EAIHLPQV

SEQ ID NO: 12399 - protein, 8 aa, Homo sapiens
  Table A; HLA-B*49:01; TPR; S2155L; 0
EAIHLPQV

SEQ ID NO: 12400 - protein, 8 aa, Homo sapiens
  Table A; HLA-B*51:01; TPR; S2155L; 0
EAIHLPQV

SEQ ID NO: 12401 - protein, 8 aa, Homo sapiens
  Table A; HLA-B*54:01; TPR; S2155L; 0
EAIHLPQV

SEQ ID NO: 12402 - protein, 8 aa, Homo sapiens
  Table A; HLA-B*55:01; TPR; S2155L; 0
EAIHLPQV

SEQ ID NO: 12403 - protein, 8 aa, Homo sapiens
  Table A; HLA-B*55:02; TPR; S2155L; 0
EAIHLPQV

SEQ ID NO: 12404 - protein, 8 aa, Homo sapiens
  Table A; HLA-B*56:01; TPR; S2155L; 0
EAIHLPQV

SEQ ID NO: 12405 - protein, 8 aa, Homo sapiens
  Table A; HLA-B*58:01; TPR; S2155L; 0
EAIHLPQV

SEQ ID NO: 12406 - protein, 8 aa, Homo sapiens
  Table A; HLA-C*03:02; TPR; S2155L; 0
EAIHLPQV

SEQ ID NO: 12407 - protein, 9 aa, Homo sapiens
  Table A; HLA-A*68:01; TPR; S2155L; 0
EAIHLPQVA

SEQ ID NO: 12408 - protein, 9 aa, Homo sapiens
  Table A; HLA-A*68:02; TPR; S2155L; 0
EAIHLPQVA

SEQ ID NO: 12409 - protein, 9 aa, Homo sapiens
  Table A; HLA-B*39:06; TPR; S2155L; 0
EAIHLPQVA

SEQ ID NO: 12410 - protein, 9 aa, Homo sapiens
  Table A; HLA-B*54:01; TPR; S2155L; 0
EAIHLPQVA

SEQ ID NO: 12411 - protein, 9 aa, Homo sapiens
  Table A; HLA-B*55:02; TPR; S2155L; 0
EAIHLPQVA

SEQ ID NO: 12412 - protein, 10 aa, Homo sapiens
  Table A; HLA-A*33:03; TPR; S2155L; 0
EAIHLPQVAG

SEQ ID NO: 12413 - protein, 10 aa, Homo sapiens
  Table A; HLA-A*68:01; TPR; S2155L; 0
EAIHLPQVAG

SEQ ID NO: 12414 - protein, 10 aa, Homo sapiens
  Table A; HLA-A*68:02; TPR; S2155L; 0
EAIHLPQVAG

SEQ ID NO: 12415 - protein, 10 aa, Homo sapiens
  Table A; HLA-B*54:01; TPR; S2155L; 0
EAIHLPQVAG

SEQ ID NO: 12416 - protein, 11 aa, Homo sapiens
  Table A; HLA-A*68:01; TPR; S2155L; 0
EAIHLPQVAGV

SEQ ID NO: 12417 - protein, 11 aa, Homo sapiens
  Table A; HLA-A*68:02; TPR; S2155L; 0
EAIHLPQVAGV

SEQ ID NO: 12418 - protein, 9 aa, Homo sapiens
  Table A; HLA-A*33:03; BCOR; N1425S; 0
EARRLIVSK

SEQ ID NO: 12419 - protein, 9 aa, Homo sapiens
  Table A; HLA-A*68:02; CNTNAP2; R483Q; 0
EASAVQTNS

SEQ ID NO: 12420 - protein, 11 aa, Homo sapiens
  Table A; HLA-A*68:01; CNTNAP2; R483Q; 0
EASAVQTNSPL

SEQ ID NO: 12421 - protein, 11 aa, Homo sapiens
  Table A; HLA-A*68:02; CNTNAP2; R483Q; 0
EASAVQTNSPL

SEQ ID NO: 12422 - protein, 8 aa, Homo sapiens
  Table A; HLA-A*33:03; ARHGAP5; V474A; 0
EAYGRHQR

SEQ ID NO: 12423 - protein, 8 aa, Homo sapiens
  Table A; HLA-A*33:03; ZNF429; L520R; 0
ECGKAFIR

SEQ ID NO: 12424 - protein, 9 aa, Homo sapiens
  Table A; HLA-B*15:02; TP53; Y205C; 0
ECLDDRNTF

SEQ ID NO: 12425 - protein, 10 aa, Homo sapiens
  Table A; HLA-A*33:03; TP53; Y205C; 0
ECLDDRNTFR

SEQ ID NO: 12426 - protein, 8 aa, Homo sapiens
  Table A; HLA-B*08:01; PIK3CA; E39K; 1
ECLRKATL

SEQ ID NO: 12427 - protein, 10 aa, Homo sapiens
  Table A; HLA-A*25:01; MAP2K1; P124S; 0
ECNSSYIVGF

SEQ ID NO: 12428 - protein, 10 aa, Homo sapiens
  Table A; HLA-A*26:01; MAP2K1; P124S; 1
ECNSSYIVGF

SEQ ID NO: 12429 - protein, 10 aa, Homo sapiens
  Table A; HLA-A*26:02; MAP2K1; P124S; 0
ECNSSYIVGF

SEQ ID NO: 12430 - protein, 10 aa, Homo sapiens
  Table A; HLA-A*33:03; MAP2K1; P124S; 0
ECNSSYIVGF

SEQ ID NO: 12431 - protein, 10 aa, Homo sapiens
  Table A; HLA-A*68:01; MAP2K1; P124S; 1
ECNSSYIVGF

SEQ ID NO: 12432 - protein, 8 aa, Homo sapiens
  Table A; HLA-A*31:01; RAC1; A159V; 0
ECSVLTQR

SEQ ID NO: 12433 - protein, 8 aa, Homo sapiens
  Table A; HLA-A*33:01; RAC1; A159V; 0
ECSVLTQR

SEQ ID NO: 12434 - protein, 8 aa, Homo sapiens
  Table A; HLA-A*33:03; RAC1; A159V; 0
ECSVLTQR

SEQ ID NO: 12435 - protein, 8 aa, Homo sapiens
  Table A; HLA-A*68:01; RAC1; A159V; 0
ECSVLTQR

SEQ ID NO: 12436 - protein, 10 aa, Homo sapiens
  Table A; HLA-A*68:02; RAC1; A159V; 0
ECSVLTQRGL

SEQ ID NO: 12437 - protein, 10 aa, Homo sapiens
  Table A; HLA-A*26:03; TP53; G266E; 0
EDSSGNLLER

SEQ ID NO: 12438 - protein, 10 aa, Homo sapiens
  Table A; HLA-A*33:01; TP53; G266E; 0
EDSSGNLLER

SEQ ID NO: 12439 - protein, 10 aa, Homo sapiens
  Table A; HLA-A*33:03; TP53; G266E; 0
EDSSGNLLER

SEQ ID NO: 12440 - protein, 10 aa, Homo sapiens
  Table A; HLA-A*68:01; TP53; G266E; 0
EDSSGNLLER

SEQ ID NO: 12441 - protein, 10 aa, Homo sapiens
  Table A; HLA-B*27:02; TP53; G266E; 0
EDSSGNLLER

SEQ ID NO: 12442 - protein, 9 aa, Homo sapiens
  Table A; HLA-A*26:03; TP53; G266R; 0
EDSSGNLLR

SEQ ID NO: 12443 - protein, 9 aa, Homo sapiens
  Table A; HLA-A*33:01; TP53; G266R; 0
EDSSGNLLR

SEQ ID NO: 12444 - protein, 9 aa, Homo sapiens
  Table A; HLA-A*33:03; TP53; G266R; 0
EDSSGNLLR

SEQ ID NO: 12445 - protein, 9 aa, Homo sapiens
  Table A; HLA-A*68:01; TP53; G266R; 0
EDSSGNLLR

SEQ ID NO: 12446 - protein, 9 aa, Homo sapiens
  Table A; HLA-B*27:02; TP53; G266R; 0
EDSSGNLLR

SEQ ID NO: 12447 - protein, 10 aa, Homo sapiens
  Table A; HLA-A*26:03; TP53; G266R; 0
EDSSGNLLRR

SEQ ID NO: 12448 - protein, 10 aa, Homo sapiens
  Table A; HLA-A*33:01; TP53; G266R; 0
EDSSGNLLRR

SEQ ID NO: 12449 - protein, 10 aa, Homo sapiens
  Table A; HLA-A*33:03; TP53; G266R; 0
EDSSGNLLRR

SEQ ID NO: 12450 - protein, 10 aa, Homo sapiens
  Table A; HLA-A*68:01; TP53; G266R; 0
EDSSGNLLRR

SEQ ID NO: 12451 - protein, 9 aa, Homo sapiens
  Table A; HLA-A*68:02; TP53; G266V; 0
EDSSGNLLV

SEQ ID NO: 12452 - protein, 9 aa, Homo sapiens
  Table A; HLA-B*38:01; TP53; G266V; 0
EDSSGNLLV

SEQ ID NO: 12453 - protein, 9 aa, Homo sapiens
  Table A; HLA-B*39:01; TP53; G266V; 0
EDSSGNLLV

SEQ ID NO: 12454 - protein, 10 aa, Homo sapiens
  Table A; HLA-A*26:03; TP53; G266V; 0
EDSSGNLLVR

SEQ ID NO: 12455 - protein, 10 aa, Homo sapiens
  Table A; HLA-A*33:01; TP53; G266V; 0
EDSSGNLLVR

SEQ ID NO: 12456 - protein, 10 aa, Homo sapiens
  Table A; HLA-A*33:03; TP53; G266V; 0
EDSSGNLLVR

SEQ ID NO: 12457 - protein, 10 aa, Homo sapiens
  Table A; HLA-A*68:01; TP53; G266V; 0
EDSSGNLLVR

SEQ ID NO: 12458 - protein, 10 aa, Homo sapiens
  Table A; HLA-B*27:02; TP53; G266V; 0
EDSSGNLLVR

SEQ ID NO: 12459 - protein, 8 aa, Homo sapiens
  Table A; HLA-B*37:01; TP53; G262V; 0
EDSSVNLL

SEQ ID NO: 12460 - protein, 8 aa, Homo sapiens
  Table A; HLA-B*38:01; TP53; G262V; 0
EDSSVNLL

SEQ ID NO: 12461 - protein, 8 aa, Homo sapiens
  Table A; HLA-B*40:02; TP53; G262V; 0
EDSSVNLL

SEQ ID NO: 12462 - protein, 8 aa, Homo sapiens
  Table A; HLA-B*41:02; TP53; G262V; 0
EDSSVNLL

SEQ ID NO: 12463 - protein, 8 aa, Homo sapiens
  Table A; HLA-B*44:05; TP53; G262V; 0
EDSSVNLL

SEQ ID NO: 12464 - protein, 8 aa, Homo sapiens
  Table A; HLA-B*48:01; TP53; G262V; 0
EDSSVNLL

SEQ ID NO: 12465 - protein, 10 aa, Homo sapiens
  Table A; HLA-A*26:03; TP53; G262V; 0
EDSSVNLLGR

SEQ ID NO: 12466 - protein, 10 aa, Homo sapiens
  Table A; HLA-A*33:01; TP53; G262V; 0
EDSSVNLLGR

SEQ ID NO: 12467 - protein, 10 aa, Homo sapiens
  Table A; HLA-A*33:03; TP53; G262V; 0
EDSSVNLLGR

SEQ ID NO: 12468 - protein, 10 aa, Homo sapiens
  Table A; HLA-A*68:01; TP53; G262V; 0
EDSSVNLLGR

SEQ ID NO: 12469 - protein, 10 aa, Homo sapiens
  Table A; HLA-A*68:02; TP53; G262V; 0
EDSSVNLLGR

SEQ ID NO: 12470 - protein, 10 aa, Homo sapiens
  Table A; HLA-B*27:02; TP53; G262V; 0
EDSSVNLLGR

SEQ ID NO: 12471 - protein, 10 aa, Homo sapiens
  Table A; HLA-B*44:05; FAT1; D3120N; 0
EDVNNNAPEF

SEQ ID NO: 12472 - protein, 8 aa, Homo sapiens
  Table A; HLA-A*33:01; ERBB2; V842I; 0
EDVRLIHR

SEQ ID NO: 12473 - protein, 8 aa, Homo sapiens
  Table A; HLA-A*33:03; ERBB2; V842I; 0
EDVRLIHR

SEQ ID NO: 12474 - protein, 10 aa, Homo sapiens
  Table A; HLA-A*26:01; RGPD3; N756D; 0
EDYSEGGPLY

SEQ ID NO: 12475 - protein, 10 aa, Homo sapiens
  Table A; HLA-B*35:01; RGPD3; N756D; 1
EDYSEGGPLY

SEQ ID NO: 12476 - protein, 10 aa, Homo sapiens
  Table A; HLA-B*35:08; RGPD3; N756D; 0
EDYSEGGPLY

SEQ ID NO: 12477 - protein, 10 aa, Homo sapiens
  Table A; HLA-C*08:03; RGPD3; N756D; 0
EDYSEGGPLY

SEQ ID NO: 12478 - protein, 11 aa, Homo sapiens
  Table A; HLA-A*11:01; RGPD3; N756D; 1
EDYSEGGPLYK

SEQ ID NO: 12479 - protein, 11 aa, Homo sapiens
  Table A; HLA-A*33:01; RGPD3; N756D; 0
EDYSEGGPLYK

SEQ ID NO: 12480 - protein, 11 aa, Homo sapiens
  Table A; HLA-A*33:03; RGPD3; N756D; 0
EDYSEGGPLYK

SEQ ID NO: 12481 - protein, 11 aa, Homo sapiens
  Table A; HLA-A*68:01; RGPD3; N756D; 0
EDYSEGGPLYK

SEQ ID NO: 12482 - protein, 11 aa, Homo sapiens
  Table A; HLA-A*68:02; RGPD3; N756D; 0
EDYSEGGPLYK

SEQ ID NO: 12483 - protein, 11 aa, Homo sapiens
  Table A; HLA-B*27:02; RGPD3; N756D; 0
EDYSEGGPLYK

SEQ ID NO: 12484 - protein, 11 aa, Homo sapiens
  Table A; HLA-C*08:03; RGPD3; N756D; 0
EDYSEGGPLYK

SEQ ID NO: 12485 - protein, 10 aa, Homo sapiens
  Table A; HLA-B*44:05; CCND1; T286I; 0
EEEEVDLACI

SEQ ID NO: 12486 - protein, 9 aa, Homo sapiens
  Table A; HLA-B*40:02; PIK3CA; K111E; 0
EEEILNREI

SEQ ID NO: 12487 - protein, 9 aa, Homo sapiens
  Table A; HLA-B*41:02; PIK3CA; K111E; 0
EEEILNREI

SEQ ID NO: 12488 - protein, 9 aa, Homo sapiens
  Table A; HLA-B*44:02; PIK3CA; K111E; 1
EEEILNREI

SEQ ID NO: 12489 - protein, 9 aa, Homo sapiens
  Table A; HLA-B*44:03; PIK3CA; K111E; 1
EEEILNREI

SEQ ID NO: 12490 - protein, 9 aa, Homo sapiens
  Table A; HLA-B*44:05; PIK3CA; K111E; 0
EEEILNREI

SEQ ID NO: 12491 - protein, 9 aa, Homo sapiens
  Table A; HLA-B*49:01; PIK3CA; K111E; 0
EEEILNREI

SEQ ID NO: 12492 - protein, 11 aa, Homo sapiens
  Table A; HLA-B*18:01; PIK3CA; K111E; 1
EEEILNREIGF

SEQ ID NO: 12493 - protein, 11 aa, Homo sapiens
  Table A; HLA-B*44:02; PIK3CA; K111E; 1
EEEILNREIGF

SEQ ID NO: 12494 - protein, 11 aa, Homo sapiens
  Table A; HLA-B*44:03; PIK3CA; K111E; 1
EEEILNREIGF

SEQ ID NO: 12495 - protein, 11 aa, Homo sapiens
  Table A; HLA-B*44:05; PIK3CA; K111E; 0
EEEILNREIGF

SEQ ID NO: 12496 - protein, 9 aa, Homo sapiens
  Table A; HLA-B*40:01; CCND1; T286I; 1
EEEVDLACI

SEQ ID NO: 12497 - protein, 9 aa, Homo sapiens
  Table A; HLA-B*44:05; CCND1; T286I; 0
EEEVDLACI

SEQ ID NO: 12498 - protein, 9 aa, Homo sapiens
  Table A; HLA-B*49:01; CCND1; T286I; 0
EEEVDLACI

SEQ ID NO: 12499 - protein, 10 aa, Homo sapiens
  Table A; HLA-A*68:02; PIK3CA; R88Q; 0
EEFFDETRQL

SEQ ID NO: 12500 - protein, 10 aa, Homo sapiens
  Table A; HLA-B*40:01; PIK3CA; R88Q; 1
EEFFDETRQL

SEQ ID NO: 12501 - protein, 10 aa, Homo sapiens
  Table A; HLA-B*40:02; PIK3CA; R88Q; 0
EEFFDETRQL

SEQ ID NO: 12502 - protein, 10 aa, Homo sapiens
  Table A; HLA-B*44:02; PIK3CA; R88Q; 1
EEFFDETRQL

SEQ ID NO: 12503 - protein, 10 aa, Homo sapiens
  Table A; HLA-B*44:03; PIK3CA; R88Q; 1
EEFFDETRQL

SEQ ID NO: 12504 - protein, 10 aa, Homo sapiens
  Table A; HLA-B*44:05; PIK3CA; R88Q; 0
EEFFDETRQL

SEQ ID NO: 12505 - protein, 10 aa, Homo sapiens
  Table A; HLA-B*49:01; PIK3CA; R88Q; 1
EEFFDETRQL

SEQ ID NO: 12506 - protein, 8 aa, Homo sapiens
  Table A; HLA-A*30:01; PTEN; D92E; 0
EEHNPPQL

SEQ ID NO: 12507 - protein, 8 aa, Homo sapiens
  Table A; HLA-B*18:01; PTEN; D92E; 0
EEHNPPQL

SEQ ID NO: 12508 - protein, 8 aa, Homo sapiens
  Table A; HLA-B*40:02; PTEN; D92E; 0
EEHNPPQL

SEQ ID NO: 12509 - protein, 8 aa, Homo sapiens
  Table A; HLA-B*41:02; PTEN; D92E; 0
EEHNPPQL

SEQ ID NO: 12510 - protein, 8 aa, Homo sapiens
  Table A; HLA-B*44:05; PTEN; D92E; 0
EEHNPPQL

SEQ ID NO: 12511 - protein, 10 aa, Homo sapiens
  Table A; HLA-B*40:02; PTEN; D92E; 0
EEHNPPQLEL

SEQ ID NO: 12512 - protein, 10 aa, Homo sapiens
  Table A; HLA-B*44:05; PTEN; D92E; 0
EEHNPPQLEL

SEQ ID NO: 12513 - protein, 8 aa, Homo sapiens
  Table A; HLA-A*23:01; PIK3CA; C420R; 0
EEHRPLAW

SEQ ID NO: 12514 - protein, 8 aa, Homo sapiens
  Table A; HLA-B*44:03; PIK3CA; C420R; 1
EEHRPLAW

SEQ ID NO: 12515 - protein, 8 aa, Homo sapiens
  Table A; HLA-B*40:02; PIK3CA; K111E; 0
EEILNREI

SEQ ID NO: 12516 - protein, 8 aa, Homo sapiens
  Table A; HLA-B*41:02; PIK3CA; K111E; 0
EEILNREI

SEQ ID NO: 12517 - protein, 8 aa, Homo sapiens
  Table A; HLA-B*44:05; PIK3CA; K111E; 0
EEILNREI

SEQ ID NO: 12518 - protein, 8 aa, Homo sapiens
  Table A; HLA-B*49:01; PIK3CA; K111E; 0
EEILNREI

SEQ ID NO: 12519 - protein, 10 aa, Homo sapiens
  Table A; HLA-A*23:01; PIK3CA; K111E; 0
EEILNREIGF

SEQ ID NO: 12520 - protein, 10 aa, Homo sapiens
  Table A; HLA-A*25:01; PIK3CA; K111E; 0
EEILNREIGF

SEQ ID NO: 12521 - protein, 10 aa, Homo sapiens
  Table A; HLA-A*30:01; PIK3CA; K111E; 0
EEILNREIGF

SEQ ID NO: 12522 - protein, 10 aa, Homo sapiens
  Table A; HLA-B*18:01; PIK3CA; K111E; 1
EEILNREIGF

SEQ ID NO: 12523 - protein, 10 aa, Homo sapiens
  Table A; HLA-B*37:01; PIK3CA; K111E; 0
EEILNREIGF

SEQ ID NO: 12524 - protein, 10 aa, Homo sapiens
  Table A; HLA-B*40:01; PIK3CA; K111E; 1
EEILNREIGF

SEQ ID NO: 12525 - protein, 10 aa, Homo sapiens
  Table A; HLA-B*40:02; PIK3CA; K111E; 0
EEILNREIGF

SEQ ID NO: 12526 - protein, 10 aa, Homo sapiens
  Table A; HLA-B*41:02; PIK3CA; K111E; 0
EEILNREIGF

SEQ ID NO: 12527 - protein, 10 aa, Homo sapiens
  Table A; HLA-B*44:02; PIK3CA; K111E; 1
EEILNREIGF

SEQ ID NO: 12528 - protein, 10 aa, Homo sapiens
  Table A; HLA-B*44:03; PIK3CA; K111E; 1
EEILNREIGF

SEQ ID NO: 12529 - protein, 10 aa, Homo sapiens
  Table A; HLA-B*44:05; PIK3CA; K111E; 0
EEILNREIGF

SEQ ID NO: 12530 - protein, 10 aa, Homo sapiens
  Table A; HLA-C*16:04; PIK3CA; K111E; 0
EEILNREIGF

SEQ ID NO: 12531 - protein, 9 aa, Homo sapiens
  Table A; HLA-B*44:05; SPOP; E50K; 0
EEMGKVIKS

SEQ ID NO: 12532 - protein, 9 aa, Homo sapiens
  Table A; HLA-A*23:01; PIK3CA; K111N; 0
EENILNREI

SEQ ID NO: 12533 - protein, 9 aa, Homo sapiens
  Table A; HLA-B*40:02; PIK3CA; K111N; 0
EENILNREI

SEQ ID NO: 12534 - protein, 9 aa, Homo sapiens
  Table A; HLA-B*41:02; PIK3CA; K111N; 0
EENILNREI

SEQ ID NO: 12535 - protein, 9 aa, Homo sapiens
  Table A; HLA-B*44:02; PIK3CA; K111N; 0
EENILNREI

SEQ ID NO: 12536 - protein, 9 aa, Homo sapiens
  Table A; HLA-B*44:03; PIK3CA; K111N; 0
EENILNREI

SEQ ID NO: 12537 - protein, 9 aa, Homo sapiens
  Table A; HLA-B*44:05; PIK3CA; K111N; 0
EENILNREI

SEQ ID NO: 12538 - protein, 9 aa, Homo sapiens
  Table A; HLA-B*49:01; PIK3CA; K111N; 0
EENILNREI

SEQ ID NO: 12539 - protein, 11 aa, Homo sapiens
  Table A; HLA-B*18:01; PIK3CA; K111N; 0
EENILNREIGF

SEQ ID NO: 12540 - protein, 11 aa, Homo sapiens
  Table A; HLA-B*44:02; PIK3CA; K111N; 0
EENILNREIGF

SEQ ID NO: 12541 - protein, 11 aa, Homo sapiens
  Table A; HLA-B*44:03; PIK3CA; K111N; 0
EENILNREIGF

SEQ ID NO: 12542 - protein, 11 aa, Homo sapiens
  Table A; HLA-B*44:05; PIK3CA; K111N; 0
EENILNREIGF

SEQ ID NO: 12543 - protein, 9 aa, Homo sapiens
  Table A; HLA-B*44:05; NFE2L2; T80P; 0
EEPGEFLPI

SEQ ID NO: 12544 - protein, 9 aa, Homo sapiens
  Table A; HLA-B*49:01; NFE2L2; T80P; 0
EEPGEFLPI

SEQ ID NO: 12545 - protein, 8 aa, Homo sapiens
  Table A; HLA-B*44:05; CSMD3; R100Q; 0
EEQNRIQI

SEQ ID NO: 12546 - protein, 9 aa, Homo sapiens
  Table A; HLA-B*41:02; CSMD3; R100Q; 0
EEQNRIQIV

SEQ ID NO: 12547 - protein, 9 aa, Homo sapiens
  Table A; HLA-B*44:05; CSMD3; R100Q; 0
EEQNRIQIV

SEQ ID NO: 12548 - protein, 9 aa, Homo sapiens
  Table A; HLA-B*49:01; CSMD3; R100Q; 0
EEQNRIQIV

SEQ ID NO: 12549 - protein, 10 aa, Homo sapiens
  Table A; HLA-A*23:01; CSMD3; R100Q; 0
EEQNRIQIVF

SEQ ID NO: 12550 - protein, 10 aa, Homo sapiens
  Table A; HLA-B*44:02; CSMD3; R100Q; 1
EEQNRIQIVF

SEQ ID NO: 12551 - protein, 10 aa, Homo sapiens
  Table A; HLA-B*44:03; CSMD3; R100Q; 1
EEQNRIQIVF

SEQ ID NO: 12552 - protein, 10 aa, Homo sapiens
  Table A; HLA-B*44:05; CSMD3; R100Q; 0
EEQNRIQIVF

SEQ ID NO: 12553 - protein, 9 aa, Homo sapiens
  Table A; HLA-B*49:01; NFE2L2; E82D; 0
EETGDFLPI

SEQ ID NO: 12554 - protein, 9 aa, Homo sapiens
  Table A; HLA-C*16:04; NFE2L2; E82D; 0
EETGDFLPI

SEQ ID NO: 12555 - protein, 10 aa, Homo sapiens
  Table A; HLA-A*68:01; SPOP; M117V; 0
EETKAVESQR

SEQ ID NO: 12556 - protein, 8 aa, Homo sapiens
  Table A; HLA-B*49:01; CCND1; T286I; 0
EEVDLACI

SEQ ID NO: 12557 - protein, 9 aa, Homo sapiens
  Table A; HLA-B*40:06; CCND1; T286I; 0
EEVDLACIP

SEQ ID NO: 12558 - protein, 9 aa, Homo sapiens
  Table A; HLA-B*50:01; CCND1; T286I; 0
EEVDLACIP

SEQ ID NO: 12559 - protein, 9 aa, Homo sapiens
  Table A; HLA-A*33:03; PIK3CA; R88Q; 0
EFFDETRQL

SEQ ID NO: 12560 - protein, 9 aa, Homo sapiens
  Table A; HLA-C*14:02; PIK3CA; R88Q; 1
EFFDETRQL

SEQ ID NO: 12561 - protein, 9 aa, Homo sapiens
  Table A; HLA-C*14:03; PIK3CA; R88Q; 0
EFFDETRQL

SEQ ID NO: 12562 - protein, 9 aa, Homo sapiens
  Table A; HLA-A*23:01; FAM135B; S11L; 0
EFLVELHKF

SEQ ID NO: 12563 - protein, 8 aa, Homo sapiens
  Table A; HLA-B*51:01; CSMD3; S300F; 0
EGFEPPTI

SEQ ID NO: 12564 - protein, 9 aa, Homo sapiens
  Table A; HLA-B*08:01; TP53; Y205C; 1
EGNLRVECL

SEQ ID NO: 12565 - protein, 9 aa, Homo sapiens
  Table A; HLA-B*14:01; TP53; Y205C; 0
EGNLRVECL

SEQ ID NO: 12566 - protein, 9 aa, Homo sapiens
  Table A; HLA-B*14:02; TP53; Y205C; 0
EGNLRVECL

SEQ ID NO: 12567 - protein, 10 aa, Homo sapiens
  Table A; HLA-B*38:01; PTPRD; R561Q; 0
EHGEEQQITI

SEQ ID NO: 12568 - protein, 10 aa, Homo sapiens
  Table A; HLA-B*39:01; PTPRD; R561Q; 0
EHGEEQQITI

SEQ ID NO: 12569 - protein, 9 aa, Homo sapiens
  Table A; HLA-B*39:06; DDIT3; R147H; 0
EHLTREVEA

SEQ ID NO: 12570 - protein, 9 aa, Homo sapiens
  Table A; HLA-B*15:10; PTEN; D92E; 0
EHNPPQLEL

SEQ ID NO: 12571 - protein, 9 aa, Homo sapiens
  Table A; HLA-B*35:03; PTEN; D92E; 0
EHNPPQLEL

SEQ ID NO: 12572 - protein, 9 aa, Homo sapiens
  Table A; HLA-B*38:01; PTEN; D92E; 0
EHNPPQLEL

SEQ ID NO: 12573 - protein, 9 aa, Homo sapiens
  Table A; HLA-B*39:01; PTEN; D92E; 0
EHNPPQLEL

SEQ ID NO: 12574 - protein, 9 aa, Homo sapiens
  Table A; HLA-B*39:06; PTEN; D92E; 0
EHNPPQLEL

SEQ ID NO: 12575 - protein, 9 aa, Homo sapiens
  Table A; HLA-B*44:05; PTEN; D92E; 0
EHNPPQLEL

SEQ ID NO: 12576 - protein, 9 aa, Homo sapiens
  Table A; HLA-B*48:01; PTEN; D92E; 0
EHNPPQLEL

SEQ ID NO: 12577 - protein, 10 aa, Homo sapiens
  Table A; HLA-B*38:01; PTEN; D92E; 0
EHNPPQLELI

SEQ ID NO: 12578 - protein, 9 aa, Homo sapiens
  Table A; HLA-B*15:10; CNTNAP2; R283H; 0
EHQGRSINL

SEQ ID NO: 12579 - protein, 9 aa, Homo sapiens
  Table A; HLA-B*38:01; CNTNAP2; R283H; 0
EHQGRSINL

SEQ ID NO: 12580 - protein, 9 aa, Homo sapiens
  Table A; HLA-B*39:01; CNTNAP2; R283H; 0
EHQGRSINL

SEQ ID NO: 12581 - protein, 9 aa, Homo sapiens
  Table A; HLA-A*68:02; FGFR2; C382R; 0
EIAIYRIGV

SEQ ID NO: 12582 - protein, 9 aa, Homo sapiens
  Table A; HLA-A*68:02; DDIT3; R147H; 0
EIEHLTREV

SEQ ID NO: 12583 - protein, 9 aa, Homo sapiens
  Table A; HLA-A*26:03; CTNNB1; G34E; 0
EIHSGATTT

SEQ ID NO: 12584 - protein, 9 aa, Homo sapiens
  Table A; HLA-A*33:03; CTNNB1; G34E; 0
EIHSGATTT

SEQ ID NO: 12585 - protein, 9 aa, Homo sapiens
  Table A; HLA-A*68:01; CTNNB1; G34E; 0
EIHSGATTT

SEQ ID NO: 12586 - protein, 9 aa, Homo sapiens
  Table A; HLA-B*08:01; CTNNB1; G34E; 1
EIHSGATTT

SEQ ID NO: 12587 - protein, 9 aa, Homo sapiens
  Table A; HLA-B*15:02; CTNNB1; G34E; 0
EIHSGATTT

SEQ ID NO: 12588 - protein, 9 aa, Homo sapiens
  Table A; HLA-B*48:01; CTNNB1; G34E; 0
EIHSGATTT

SEQ ID NO: 12589 - protein, 9 aa, Homo sapiens
  Table A; HLA-C*08:03; CTNNB1; G34E; 0
EIHSGATTT

SEQ ID NO: 12590 - protein, 10 aa, Homo sapiens
  Table A; HLA-A*02:03; CTNNB1; G34E; 0
EIHSGATTTA

SEQ ID NO: 12591 - protein, 10 aa, Homo sapiens
  Table A; HLA-A*02:05; CTNNB1; G34E; 0
EIHSGATTTA

SEQ ID NO: 12592 - protein, 10 aa, Homo sapiens
  Table A; HLA-A*02:08; CTNNB1; G34E; 0
EIHSGATTTA

SEQ ID NO: 12593 - protein, 10 aa, Homo sapiens
  Table A; HLA-A*25:01; CTNNB1; G34E; 0
EIHSGATTTA

SEQ ID NO: 12594 - protein, 10 aa, Homo sapiens
  Table A; HLA-A*26:01; CTNNB1; G34E; 0
EIHSGATTTA

SEQ ID NO: 12595 - protein, 10 aa, Homo sapiens
  Table A; HLA-A*26:02; CTNNB1; G34E; 0
EIHSGATTTA

SEQ ID NO: 12596 - protein, 10 aa, Homo sapiens
  Table A; HLA-A*26:03; CTNNB1; G34E; 0
EIHSGATTTA

SEQ ID NO: 12597 - protein, 10 aa, Homo sapiens
  Table A; HLA-A*33:03; CTNNB1; G34E; 0
EIHSGATTTA

SEQ ID NO: 12598 - protein, 10 aa, Homo sapiens
  Table A; HLA-A*68:01; CTNNB1; G34E; 0
EIHSGATTTA

SEQ ID NO: 12599 - protein, 10 aa, Homo sapiens
  Table A; HLA-A*68:02; CTNNB1; G34E; 0
EIHSGATTTA

SEQ ID NO: 12600 - protein, 10 aa, Homo sapiens
  Table A; HLA-B*39:06; CTNNB1; G34E; 0
EIHSGATTTA

SEQ ID NO: 12601 - protein, 10 aa, Homo sapiens
  Table A; HLA-B*50:01; CTNNB1; G34E; 0
EIHSGATTTA

SEQ ID NO: 12602 - protein, 10 aa, Homo sapiens
  Table A; HLA-B*54:01; CTNNB1; G34E; 0
EIHSGATTTA

SEQ ID NO: 12603 - protein, 10 aa, Homo sapiens
  Table A; HLA-C*08:01; CTNNB1; G34E; 0
EIHSGATTTA

SEQ ID NO: 12604 - protein, 8 aa, Homo sapiens
  Table A; HLA-B*15:02; CDH1; D254Y; 0
EILITVTY

SEQ ID NO: 12605 - protein, 8 aa, Homo sapiens
  Table A; HLA-B*35:01; CDH1; D254Y; 1
EILITVTY

SEQ ID NO: 12606 - protein, 8 aa, Homo sapiens
  Table A; HLA-C*08:01; CDH1; D254Y; 0
EILITVTY

SEQ ID NO: 12607 - protein, 9 aa, Homo sapiens
  Table A; HLA-A*26:03; CTNNB1; K335I; 0
EILLWTTSR

SEQ ID NO: 12608 - protein, 9 aa, Homo sapiens
  Table A; HLA-A*31:01; CTNNB1; K335I; 1
EILLWTTSR

SEQ ID NO: 12609 - protein, 9 aa, Homo sapiens
  Table A; HLA-A*33:01; CTNNB1; K335I; 0
EILLWTTSR

SEQ ID NO: 12610 - protein, 9 aa, Homo sapiens
  Table A; HLA-A*33:03; CTNNB1; K335I; 0
EILLWTTSR

SEQ ID NO: 12611 - protein, 9 aa, Homo sapiens
  Table A; HLA-A*68:01; CTNNB1; K335I; 1
EILLWTTSR

SEQ ID NO: 12612 - protein, 9 aa, Homo sapiens
  Table A; HLA-B*27:02; CTNNB1; K335I; 0
EILLWTTSR

SEQ ID NO: 12613 - protein, 10 aa, Homo sapiens
  Table A; HLA-A*68:02; CTNNB1; K335I; 0
EILLWTTSRV

SEQ ID NO: 12614 - protein, 9 aa, Homo sapiens
  Table A; HLA-A*23:01; PIK3CA; K111E; 0
EILNREIGF

SEQ ID NO: 12615 - protein, 9 aa, Homo sapiens
  Table A; HLA-A*25:01; PIK3CA; K111E; 0
EILNREIGF

SEQ ID NO: 12616 - protein, 9 aa, Homo sapiens
  Table A; HLA-A*26:01; PIK3CA; K111E; 0
EILNREIGF

SEQ ID NO: 12617 - protein, 9 aa, Homo sapiens
  Table A; HLA-A*26:02; PIK3CA; K111E; 0
EILNREIGF

SEQ ID NO: 12618 - protein, 9 aa, Homo sapiens
  Table A; HLA-A*68:02; PIK3CA; K111E; 0
EILNREIGF

SEQ ID NO: 12619 - protein, 9 aa, Homo sapiens
  Table A; HLA-B*08:01; PIK3CA; K111E; 1
EILNREIGF

SEQ ID NO: 12620 - protein, 9 aa, Homo sapiens
  Table A; HLA-B*15:02; PIK3CA; K111E; 0
EILNREIGF

SEQ ID NO: 12621 - protein, 9 aa, Homo sapiens
  Table A; HLA-A*26:03; FAM135B; S11L; 0
EIQGTVEFL

SEQ ID NO: 12622 - protein, 9 aa, Homo sapiens
  Table A; HLA-A*68:02; FAM135B; S11L; 0
EIQGTVEFL

SEQ ID NO: 12623 - protein, 10 aa, Homo sapiens
  Table A; HLA-A*68:02; PIK3CA; Q546P; 0
EITEPEKDFL

SEQ ID NO: 12624 - protein, 9 aa, Homo sapiens
  Table A; HLA-B*48:01; MAX; R60Q; 0
EKASQAQIL

SEQ ID NO: 12625 - protein, 9 aa, Homo sapiens
  Table A; HLA-A*02:01; TP53; R337L; 1
ELFEMFREL

SEQ ID NO: 12626 - protein, 9 aa, Homo sapiens
  Table A; HLA-A*02:03; TP53; R337L; 0
ELFEMFREL

SEQ ID NO: 12627 - protein, 9 aa, Homo sapiens
  Table A; HLA-A*02:04; TP53; R337L; 0
ELFEMFREL

SEQ ID NO: 12628 - protein, 9 aa, Homo sapiens
  Table A; HLA-A*02:07; TP53; R337L; 0
ELFEMFREL

SEQ ID NO: 12629 - protein, 9 aa, Homo sapiens
  Table A; HLA-A*68:02; TP53; R337L; 0
ELFEMFREL

SEQ ID NO: 12630 - protein, 10 aa, Homo sapiens
  Table A; HLA-A*26:03; STAG2; R370Q; 0
ELFTSQFKDR

SEQ ID NO: 12631 - protein, 10 aa, Homo sapiens
  Table A; HLA-A*33:03; STAG2; R370Q; 0
ELFTSQFKDR

SEQ ID NO: 12632 - protein, 11 aa, Homo sapiens
  Table A; HLA-A*68:02; STAG2; R370Q; 0
ELFTSQFKDRI

SEQ ID NO: 12633 - protein, 8 aa, Homo sapiens
  Table A; HLA-A*23:01; CHD4; R975H; 0
ELIVHVEL

SEQ ID NO: 12634 - protein, 8 aa, Homo sapiens
  Table A; HLA-A*26:03; CHD4; R975H; 0
ELIVHVEL

SEQ ID NO: 12635 - protein, 8 aa, Homo sapiens
  Table A; HLA-A*30:01; CHD4; R975H; 0
ELIVHVEL

SEQ ID NO: 12636 - protein, 8 aa, Homo sapiens
  Table A; HLA-A*33:03; CHD4; R975H; 0
ELIVHVEL

SEQ ID NO: 12637 - protein, 8 aa, Homo sapiens
  Table A; HLA-A*68:02; CHD4; R975H; 0
ELIVHVEL

SEQ ID NO: 12638 - protein, 8 aa, Homo sapiens
  Table A; HLA-B*07:02; CHD4; R975H; 1
ELIVHVEL

SEQ ID NO: 12639 - protein, 8 aa, Homo sapiens
  Table A; HLA-B*08:01; CHD4; R975H; 1
ELIVHVEL

SEQ ID NO: 12640 - protein, 8 aa, Homo sapiens
  Table A; HLA-B*14:01; CHD4; R975H; 0
ELIVHVEL

SEQ ID NO: 12641 - protein, 8 aa, Homo sapiens
  Table A; HLA-B*14:02; CHD4; R975H; 0
ELIVHVEL

SEQ ID NO: 12642 - protein, 8 aa, Homo sapiens
  Table A; HLA-B*15:02; CHD4; R975H; 0
ELIVHVEL

SEQ ID NO: 12643 - protein, 8 aa, Homo sapiens
  Table A; HLA-B*35:01; CHD4; R975H; 1
ELIVHVEL

SEQ ID NO: 12644 - protein, 8 aa, Homo sapiens
  Table A; HLA-B*35:03; CHD4; R975H; 0
ELIVHVEL

SEQ ID NO: 12645 - protein, 8 aa, Homo sapiens
  Table A; HLA-B*39:01; CHD4; R975H; 0
ELIVHVEL

SEQ ID NO: 12646 - protein, 8 aa, Homo sapiens
  Table A; HLA-B*40:01; CHD4; R975H; 1
ELIVHVEL

SEQ ID NO: 12647 - protein, 8 aa, Homo sapiens
  Table A; HLA-B*40:02; CHD4; R975H; 0
ELIVHVEL

SEQ ID NO: 12648 - protein, 8 aa, Homo sapiens
  Table A; HLA-B*41:02; CHD4; R975H; 0
ELIVHVEL

SEQ ID NO: 12649 - protein, 8 aa, Homo sapiens
  Table A; HLA-B*44:05; CHD4; R975H; 0
ELIVHVEL

SEQ ID NO: 12650 - protein, 8 aa, Homo sapiens
  Table A; HLA-B*48:01; CHD4; R975H; 0
ELIVHVEL

SEQ ID NO: 12651 - protein, 8 aa, Homo sapiens
  Table A; HLA-C*08:01; CHD4; R975H; 0
ELIVHVEL

SEQ ID NO: 12652 - protein, 8 aa, Homo sapiens
  Table A; HLA-C*08:03; CHD4; R975H; 0
ELIVHVEL

SEQ ID NO: 12653 - protein, 8 aa, Homo sapiens
  Table A; HLA-C*17:01; CHD4; R975H; 0
ELIVHVEL

SEQ ID NO: 12654 - protein, 11 aa, Homo sapiens
  Table A; HLA-B*27:02; RUNX1T1; D198N; 0
ELLLNVNENGK

SEQ ID NO: 12655 - protein, 10 aa, Homo sapiens
  Table A; HLA-A*25:01; PIK3CA; K111N; 0
ENILNREIGF

SEQ ID NO: 12656 - protein, 8 aa, Homo sapiens
  Table A; HLA-B*08:01; BCORL1; K1207N; 1
ENKAKSSF

SEQ ID NO: 12657 - protein, 9 aa, Homo sapiens
  Table A; HLA-A*33:03; BCORL1; K1207N; 0
ENKAKSSFR

SEQ ID NO: 12658 - protein, 8 aa, Homo sapiens
  Table A; HLA-A*33:03; PIK3R1; K567E; 0
EPDLIQLR

SEQ ID NO: 12659 - protein, 8 aa, Homo sapiens
  Table A; HLA-B*35:02; TNC; L1626I; 0
EPEVDNIL

SEQ ID NO: 12660 - protein, 8 aa, Homo sapiens
  Table A; HLA-B*35:12; TNC; L1626I; 0
EPEVDNIL

SEQ ID NO: 12661 - protein, 11 aa, Homo sapiens
  Table A; HLA-B*54:01; NFE2L2; T80P; 0
EPGEFLPIQPA

SEQ ID NO: 12662 - protein, 9 aa, Homo sapiens
  Table A; HLA-A*33:01; MTOR; A2056V; 0
EPLHVMMER

SEQ ID NO: 12663 - protein, 9 aa, Homo sapiens
  Table A; HLA-A*33:03; MTOR; A2056V; 0
EPLHVMMER

SEQ ID NO: 12664 - protein, 9 aa, Homo sapiens
  Table A; HLA-B*54:01; MTOR; A2056V; 0
EPLHVMMER

SEQ ID NO: 12665 - protein, 10 aa, Homo sapiens
  Table A; HLA-A*68:01; CNTNAP2; G362E; 0
EPSNVENLSF

SEQ ID NO: 12666 - protein, 10 aa, Homo sapiens
  Table A; HLA-B*35:01; CNTNAP2; G362E; 1
EPSNVENLSF

SEQ ID NO: 12667 - protein, 10 aa, Homo sapiens
  Table A; HLA-B*35:03; CNTNAP2; G362E; 0
EPSNVENLSF

SEQ ID NO: 12668 - protein, 10 aa, Homo sapiens
  Table A; HLA-B*35:08; CNTNAP2; G362E; 0
EPSNVENLSF

SEQ ID NO: 12669 - protein, 10 aa, Homo sapiens
  Table A; HLA-B*35:12; CNTNAP2; G362E; 0
EPSNVENLSF

SEQ ID NO: 12670 - protein, 10 aa, Homo sapiens
  Table A; HLA-B*38:01; CNTNAP2; G362E; 0
EPSNVENLSF

SEQ ID NO: 12671 - protein, 11 aa, Homo sapiens
  Table A; HLA-B*35:02; PIK3CA; K111E; 0
EPVGNREEEIL

SEQ ID NO: 12672 - protein, 11 aa, Homo sapiens
  Table A; HLA-B*35:03; PIK3CA; K111E; 0
EPVGNREEEIL

SEQ ID NO: 12673 - protein, 11 aa, Homo sapiens
  Table A; HLA-B*35:12; PIK3CA; K111E; 0
EPVGNREEEIL

SEQ ID NO: 12674 - protein, 11 aa, Homo sapiens
  Table A; HLA-B*07:02; PIK3CA; K111N; 1
EPVGNREENIL

SEQ ID NO: 12675 - protein, 11 aa, Homo sapiens
  Table A; HLA-B*35:02; PIK3CA; K111N; 0
EPVGNREENIL

SEQ ID NO: 12676 - protein, 11 aa, Homo sapiens
  Table A; HLA-B*35:03; PIK3CA; K111N; 0
EPVGNREENIL

SEQ ID NO: 12677 - protein, 11 aa, Homo sapiens
  Table A; HLA-B*35:12; PIK3CA; K111N; 0
EPVGNREENIL

SEQ ID NO: 12678 - protein, 8 aa, Homo sapiens
  Table A; HLA-B*15:02; CNTNAP2; T373M; 0
EPYMVPVF

SEQ ID NO: 12679 - protein, 8 aa, Homo sapiens
  Table A; HLA-B*35:01; CNTNAP2; T373M; 1
EPYMVPVF

SEQ ID NO: 12680 - protein, 8 aa, Homo sapiens
  Table A; HLA-B*51:01; CNTNAP2; T373M; 1
EPYMVPVF

SEQ ID NO: 12681 - protein, 8 aa, Homo sapiens
  Table A; HLA-B*54:01; CNTNAP2; T373M; 0
EPYMVPVF

SEQ ID NO: 12682 - protein, 8 aa, Homo sapiens
  Table A; HLA-C*08:01; CNTNAP2; T373M; 0
EPYMVPVF

SEQ ID NO: 12683 - protein, 9 aa, Homo sapiens
  Table A; HLA-A*68:02; CNTNAP2; T373M; 0
EPYMVPVFF

SEQ ID NO: 12684 - protein, 9 aa, Homo sapiens
  Table A; HLA-B*35:01; CNTNAP2; T373M; 1
EPYMVPVFF

SEQ ID NO: 12685 - protein, 9 aa, Homo sapiens
  Table A; HLA-B*54:01; CNTNAP2; T373M; 0
EPYMVPVFF

SEQ ID NO: 12686 - protein, 9 aa, Homo sapiens
  Table A; HLA-A*23:01; CSMD3; R100Q; 0
EQNRIQIVF

SEQ ID NO: 12687 - protein, 9 aa, Homo sapiens
  Table A; HLA-A*32:01; CSMD3; R100Q; 0
EQNRIQIVF

SEQ ID NO: 12688 - protein, 9 aa, Homo sapiens
  Table A; HLA-B*13:01; CSMD3; R100Q; 0
EQNRIQIVF

SEQ ID NO: 12689 - protein, 9 aa, Homo sapiens
  Table A; HLA-B*13:02; CSMD3; R100Q; 0
EQNRIQIVF

SEQ ID NO: 12690 - protein, 9 aa, Homo sapiens
  Table A; HLA-B*15:01; CSMD3; R100Q; 1
EQNRIQIVF

SEQ ID NO: 12691 - protein, 9 aa, Homo sapiens
  Table A; HLA-B*15:02; CSMD3; R100Q; 0
EQNRIQIVF

SEQ ID NO: 12692 - protein, 9 aa, Homo sapiens
  Table A; HLA-B*15:10; CSMD3; R100Q; 0
EQNRIQIVF

SEQ ID NO: 12693 - protein, 9 aa, Homo sapiens
  Table A; HLA-B*38:01; CSMD3; R100Q; 0
EQNRIQIVF

SEQ ID NO: 12694 - protein, 9 aa, Homo sapiens
  Table A; HLA-B*39:01; CSMD3; R100Q; 0
EQNRIQIVF

SEQ ID NO: 12695 - protein, 9 aa, Homo sapiens
  Table A; HLA-B*44:02; CSMD3; R100Q; 1
EQNRIQIVF

SEQ ID NO: 12696 - protein, 9 aa, Homo sapiens
  Table A; HLA-B*44:03; CSMD3; R100Q; 1
EQNRIQIVF

SEQ ID NO: 12697 - protein, 9 aa, Homo sapiens
  Table A; HLA-B*44:05; CSMD3; R100Q; 0
EQNRIQIVF

SEQ ID NO: 12698 - protein, 9 aa, Homo sapiens
  Table A; HLA-C*08:01; CSMD3; R100Q; 0
EQNRIQIVF

SEQ ID NO: 12699 - protein, 9 aa, Homo sapiens
  Table A; HLA-C*16:04; CSMD3; R100Q; 0
EQNRIQIVF

SEQ ID NO: 12700 - protein, 8 aa, Homo sapiens
  Table A; HLA-B*13:02; SF3B1; K700E; 0
EQQEVRTI

SEQ ID NO: 12701 - protein, 8 aa, Homo sapiens
  Table A; HLA-B*39:06; SF3B1; K700E; 0
EQQEVRTI

SEQ ID NO: 12702 - protein, 8 aa, Homo sapiens
  Table A; HLA-B*44:05; SF3B1; K700E; 0
EQQEVRTI

SEQ ID NO: 12703 - protein, 10 aa, Homo sapiens
  Table A; HLA-B*39:06; SF3B1; K700E; 0
EQQEVRTISA

SEQ ID NO: 12704 - protein, 10 aa, Homo sapiens
  Table A; HLA-B*54:01; SF3B1; K700E; 0
EQQEVRTISA

SEQ ID NO: 12705 - protein, 11 aa, Homo sapiens
  Table A; HLA-A*25:01; SF3B1; K700E; 0
EQQEVRTISAL

SEQ ID NO: 12706 - protein, 11 aa, Homo sapiens
  Table A; HLA-A*26:02; SF3B1; K700E; 0
EQQEVRTISAL

SEQ ID NO: 12707 - protein, 11 aa, Homo sapiens
  Table A; HLA-A*68:02; SF3B1; K700E; 0
EQQEVRTISAL

SEQ ID NO: 12708 - protein, 11 aa, Homo sapiens
  Table A; HLA-B*15:01; SF3B1; K700E; 1
EQQEVRTISAL

SEQ ID NO: 12709 - protein, 11 aa, Homo sapiens
  Table A; HLA-B*15:02; SF3B1; K700E; 0
EQQEVRTISAL

SEQ ID NO: 12710 - protein, 11 aa, Homo sapiens
  Table A; HLA-B*39:01; SF3B1; K700E; 0
EQQEVRTISAL

SEQ ID NO: 12711 - protein, 11 aa, Homo sapiens
  Table A; HLA-B*40:02; SF3B1; K700E; 0
EQQEVRTISAL

SEQ ID NO: 12712 - protein, 11 aa, Homo sapiens
  Table A; HLA-B*44:05; SF3B1; K700E; 0
EQQEVRTISAL

SEQ ID NO: 12713 - protein, 11 aa, Homo sapiens
  Table A; HLA-B*48:01; SF3B1; K700E; 0
EQQEVRTISAL

SEQ ID NO: 12714 - protein, 11 aa, Homo sapiens
  Table A; HLA-C*08:01; SF3B1; K700E; 0
EQQEVRTISAL

SEQ ID NO: 12715 - protein, 9 aa, Homo sapiens
  Table A; HLA-A*68:02; NFE2L2; E79Q; 0
EQTGEFLPI

SEQ ID NO: 12716 - protein, 9 aa, Homo sapiens
  Table A; HLA-B*13:02; NFE2L2; E79Q; 0
EQTGEFLPI

SEQ ID NO: 12717 - protein, 9 aa, Homo sapiens
  Table A; HLA-B*38:01; NFE2L2; E79Q; 0
EQTGEFLPI

SEQ ID NO: 12718 - protein, 9 aa, Homo sapiens
  Table A; HLA-B*39:01; NFE2L2; E79Q; 0
EQTGEFLPI

SEQ ID NO: 12719 - protein, 8 aa, Homo sapiens
  Table A; HLA-B*14:02; PDE4DIP; C1297R; 0
EREEHNSL

SEQ ID NO: 12720 - protein, 8 aa, Homo sapiens
  Table A; HLA-A*33:03; TP53; G266E; 0
ERNSFEVR

SEQ ID NO: 12721 - protein, 9 aa, Homo sapiens
  Table A; HLA-A*33:03; TP53; G266E; 0
ERNSFEVRV

SEQ ID NO: 12722 - protein, 9 aa, Homo sapiens
  Table A; HLA-A*68:02; TP53; G266E; 0
ERNSFEVRV

SEQ ID NO: 12723 - protein, 9 aa, Homo sapiens
  Table A; HLA-B*27:05; TP53; G266E; 0
ERNSFEVRV

SEQ ID NO: 12724 - protein, 9 aa, Homo sapiens
  Table A; HLA-B*38:01; TP53; G266E; 0
ERNSFEVRV

SEQ ID NO: 12725 - protein, 9 aa, Homo sapiens
  Table A; HLA-B*39:01; TP53; G266E; 0
ERNSFEVRV

SEQ ID NO: 12726 - protein, 9 aa, Homo sapiens
  Table A; HLA-B*39:06; TP53; G266E; 0
ERNSFEVRV

SEQ ID NO: 12727 - protein, 9 aa, Homo sapiens
  Table A; HLA-C*06:02; TP53; G266E; 0
ERNSFEVRV

SEQ ID NO: 12728 - protein, 10 aa, Homo sapiens
  Table A; HLA-A*68:01; ARID1A; G2087R; 0
ESICLPVLDR

SEQ ID NO: 12729 - protein, 9 aa, Homo sapiens
  Table A; HLA-A*68:02; SPOP; R121Q; 0
ESQQAYRFV

SEQ ID NO: 12730 - protein, 11 aa, Homo sapiens
  Table A; HLA-A*68:02; STAG1; A116T; 0
ESYKQDRDITL

SEQ ID NO: 12731 - protein, 10 aa, Homo sapiens
  Table A; HLA-A*01:01; POLE; S297F; 1
ETDQIMMIFY

SEQ ID NO: 12732 - protein, 10 aa, Homo sapiens
  Table A; HLA-A*68:02; NFE2L2; E82D; 0
ETGDFLPIQP

SEQ ID NO: 12733 - protein, 11 aa, Homo sapiens
  Table A; HLA-A*68:02; NFE2L2; E82D; 0
ETGDFLPIQPA

SEQ ID NO: 12734 - protein, 11 aa, Homo sapiens
  Table A; HLA-A*26:01; SPOP; R121Q; 0
ETKAMESQQAY

SEQ ID NO: 12735 - protein, 9 aa, Homo sapiens
  Table A; HLA-A*26:03; SPOP; M117V; 0
ETKAVESQR

SEQ ID NO: 12736 - protein, 9 aa, Homo sapiens
  Table A; HLA-A*31:01; SPOP; M117V; 0
ETKAVESQR

SEQ ID NO: 12737 - protein, 9 aa, Homo sapiens
  Table A; HLA-A*33:01; SPOP; M117V; 0
ETKAVESQR

SEQ ID NO: 12738 - protein, 9 aa, Homo sapiens
  Table A; HLA-A*33:03; SPOP; M117V; 0
ETKAVESQR

SEQ ID NO: 12739 - protein, 9 aa, Homo sapiens
  Table A; HLA-A*68:01; SPOP; M117V; 0
ETKAVESQR

SEQ ID NO: 12740 - protein, 11 aa, Homo sapiens
  Table A; HLA-A*25:01; SPOP; M117V; 0
ETKAVESQRAY

SEQ ID NO: 12741 - protein, 11 aa, Homo sapiens
  Table A; HLA-A*26:01; SPOP; M117V; 0
ETKAVESQRAY

SEQ ID NO: 12742 - protein, 9 aa, Homo sapiens
  Table A; HLA-A*33:03; PIK3CA; R88Q; 0
ETRQLCDLR

SEQ ID NO: 12743 - protein, 10 aa, Homo sapiens
  Table A; HLA-A*33:03; GRIN2A; R1067W; 0
ETSNWATCHR

SEQ ID NO: 12744 - protein, 10 aa, Homo sapiens
  Table A; HLA-A*68:02; KRAS; A146T; 0
ETSTKTRQGV

SEQ ID NO: 12745 - protein, 9 aa, Homo sapiens
  Table A; HLA-A*26:01; SIRPA; V233I; 0
EVAHITLQG

SEQ ID NO: 12746 - protein, 9 aa, Homo sapiens
  Table A; HLA-A*68:02; SIRPA; V233I; 0
EVAHITLQG

SEQ ID NO: 12747 - protein, 9 aa, Homo sapiens
  Table A; HLA-A*02:05; CTNND1; A781T; 0
EVITENLEA

SEQ ID NO: 12748 - protein, 9 aa, Homo sapiens
  Table A; HLA-A*02:06; CTNND1; A781T; 0
EVITENLEA

SEQ ID NO: 12749 - protein, 9 aa, Homo sapiens
  Table A; HLA-A*25:01; CTNND1; A781T; 0
EVITENLEA

SEQ ID NO: 12750 - protein, 9 aa, Homo sapiens
  Table A; HLA-A*26:01; CTNND1; A781T; 0
EVITENLEA

SEQ ID NO: 12751 - protein, 9 aa, Homo sapiens
  Table A; HLA-A*26:03; CTNND1; A781T; 0
EVITENLEA

SEQ ID NO: 12752 - protein, 9 aa, Homo sapiens
  Table A; HLA-A*68:01; CTNND1; A781T; 0
EVITENLEA

SEQ ID NO: 12753 - protein, 9 aa, Homo sapiens
  Table A; HLA-A*68:02; CTNND1; A781T; 0
EVITENLEA

SEQ ID NO: 12754 - protein, 9 aa, Homo sapiens
  Table A; HLA-B*13:02; CTNND1; A781T; 0
EVITENLEA

SEQ ID NO: 12755 - protein, 9 aa, Homo sapiens
  Table A; HLA-B*50:01; CTNND1; A781T; 0
EVITENLEA

SEQ ID NO: 12756 - protein, 9 aa, Homo sapiens
  Table A; HLA-B*54:01; CTNND1; A781T; 0
EVITENLEA

SEQ ID NO: 12757 - protein, 10 aa, Homo sapiens
  Table A; HLA-A*02:05; CTNND1; A781T; 0
EVITENLEAA

SEQ ID NO: 12758 - protein, 10 aa, Homo sapiens
  Table A; HLA-A*02:06; CTNND1; A781T; 0
EVITENLEAA

SEQ ID NO: 12759 - protein, 10 aa, Homo sapiens
  Table A; HLA-A*02:08; CTNND1; A781T; 0
EVITENLEAA

SEQ ID NO: 12760 - protein, 10 aa, Homo sapiens
  Table A; HLA-A*25:01; CTNND1; A781T; 0
EVITENLEAA

SEQ ID NO: 12761 - protein, 10 aa, Homo sapiens
  Table A; HLA-A*26:01; CTNND1; A781T; 0
EVITENLEAA

SEQ ID NO: 12762 - protein, 10 aa, Homo sapiens
  Table A; HLA-A*26:02; CTNND1; A781T; 0
EVITENLEAA

SEQ ID NO: 12763 - protein, 10 aa, Homo sapiens
  Table A; HLA-A*26:03; CTNND1; A781T; 0
EVITENLEAA

SEQ ID NO: 12764 - protein, 10 aa, Homo sapiens
  Table A; HLA-A*33:03; CTNND1; A781T; 0
EVITENLEAA

SEQ ID NO: 12765 - protein, 10 aa, Homo sapiens
  Table A; HLA-A*68:01; CTNND1; A781T; 0
EVITENLEAA

SEQ ID NO: 12766 - protein, 10 aa, Homo sapiens
  Table A; HLA-A*68:02; CTNND1; A781T; 0
EVITENLEAA

SEQ ID NO: 12767 - protein, 10 aa, Homo sapiens
  Table A; HLA-B*35:01; CTNND1; A781T; 0
EVITENLEAA

SEQ ID NO: 12768 - protein, 10 aa, Homo sapiens
  Table A; HLA-B*50:01; CTNND1; A781T; 0
EVITENLEAA

SEQ ID NO: 12769 - protein, 10 aa, Homo sapiens
  Table A; HLA-B*54:01; CTNND1; A781T; 0
EVITENLEAA

SEQ ID NO: 12770 - protein, 11 aa, Homo sapiens
  Table A; HLA-A*03:02; CTNND1; A781T; 0
EVITENLEAAK

SEQ ID NO: 12771 - protein, 11 aa, Homo sapiens
  Table A; HLA-A*11:01; CTNND1; A781T; 0
EVITENLEAAK

SEQ ID NO: 12772 - protein, 11 aa, Homo sapiens
  Table A; HLA-A*26:01; CTNND1; A781T; 0
EVITENLEAAK

SEQ ID NO: 12773 - protein, 11 aa, Homo sapiens
  Table A; HLA-A*26:03; CTNND1; A781T; 0
EVITENLEAAK

SEQ ID NO: 12774 - protein, 11 aa, Homo sapiens
  Table A; HLA-A*33:01; CTNND1; A781T; 0
EVITENLEAAK

SEQ ID NO: 12775 - protein, 11 aa, Homo sapiens
  Table A; HLA-A*33:03; CTNND1; A781T; 0
EVITENLEAAK

SEQ ID NO: 12776 - protein, 11 aa, Homo sapiens
  Table A; HLA-A*68:01; CTNND1; A781T; 0
EVITENLEAAK

SEQ ID NO: 12777 - protein, 11 aa, Homo sapiens
  Table A; HLA-A*68:02; CTNND1; A781T; 0
EVITENLEAAK

SEQ ID NO: 12778 - protein, 11 aa, Homo sapiens
  Table A; HLA-B*27:02; CTNND1; A781T; 0
EVITENLEAAK

SEQ ID NO: 12779 - protein, 8 aa, Homo sapiens
  Table A; HLA-A*68:02; MTOR; A2056V; 0
EVLEPLHV

SEQ ID NO: 12780 - protein, 8 aa, Homo sapiens
  Table A; HLA-B*13:02; MTOR; A2056V; 0
EVLEPLHV

SEQ ID NO: 12781 - protein, 8 aa, Homo sapiens
  Table A; HLA-B*39:06; MTOR; A2056V; 0
EVLEPLHV

SEQ ID NO: 12782 - protein, 8 aa, Homo sapiens
  Table A; HLA-B*51:01; MTOR; A2056V; 1
EVLEPLHV

SEQ ID NO: 12783 - protein, 9 aa, Homo sapiens
  Table A; HLA-A*25:01; MTOR; A2056V; 0
EVLEPLHVM

SEQ ID NO: 12784 - protein, 9 aa, Homo sapiens
  Table A; HLA-A*26:01; MTOR; A2056V; 0
EVLEPLHVM

SEQ ID NO: 12785 - protein, 9 aa, Homo sapiens
  Table A; HLA-A*26:02; MTOR; A2056V; 0
EVLEPLHVM

SEQ ID NO: 12786 - protein, 9 aa, Homo sapiens
  Table A; HLA-A*26:03; MTOR; A2056V; 0
EVLEPLHVM

SEQ ID NO: 12787 - protein, 9 aa, Homo sapiens
  Table A; HLA-A*33:01; MTOR; A2056V; 0
EVLEPLHVM

SEQ ID NO: 12788 - protein, 9 aa, Homo sapiens
  Table A; HLA-A*33:03; MTOR; A2056V; 0
EVLEPLHVM

SEQ ID NO: 12789 - protein, 9 aa, Homo sapiens
  Table A; HLA-A*68:02; MTOR; A2056V; 0
EVLEPLHVM

SEQ ID NO: 12790 - protein, 9 aa, Homo sapiens
  Table A; HLA-B*15:02; MTOR; A2056V; 0
EVLEPLHVM

SEQ ID NO: 12791 - protein, 9 aa, Homo sapiens
  Table A; HLA-B*35:01; MTOR; A2056V; 1
EVLEPLHVM

SEQ ID NO: 12792 - protein, 9 aa, Homo sapiens
  Table A; HLA-B*35:03; MTOR; A2056V; 0
EVLEPLHVM

SEQ ID NO: 12793 - protein, 9 aa, Homo sapiens
  Table A; HLA-B*54:01; MTOR; A2056V; 0
EVLEPLHVM

SEQ ID NO: 12794 - protein, 9 aa, Homo sapiens
  Table A; HLA-C*08:01; MTOR; A2056V; 0
EVLEPLHVM

SEQ ID NO: 12795 - protein, 10 aa, Homo sapiens
  Table A; HLA-A*26:02; MTOR; A2056V; 0
EVLEPLHVMM

SEQ ID NO: 12796 - protein, 10 aa, Homo sapiens
  Table A; HLA-A*33:03; MTOR; A2056V; 0
EVLEPLHVMM

SEQ ID NO: 12797 - protein, 10 aa, Homo sapiens
  Table A; HLA-A*68:01; MTOR; A2056V; 0
EVLEPLHVMM

SEQ ID NO: 12798 - protein, 10 aa, Homo sapiens
  Table A; HLA-A*68:02; MTOR; A2056V; 0
EVLEPLHVMM

SEQ ID NO: 12799 - protein, 8 aa, Homo sapiens
  Table A; HLA-A*02:03; SF3B1; K700E; 0
EVRTISAL

SEQ ID NO: 12800 - protein, 8 aa, Homo sapiens
  Table A; HLA-A*25:01; SF3B1; K700E; 0
EVRTISAL

SEQ ID NO: 12801 - protein, 8 aa, Homo sapiens
  Table A; HLA-A*26:01; SF3B1; K700E; 0
EVRTISAL

SEQ ID NO: 12802 - protein, 8 aa, Homo sapiens
  Table A; HLA-A*26:02; SF3B1; K700E; 0
EVRTISAL

SEQ ID NO: 12803 - protein, 8 aa, Homo sapiens
  Table A; HLA-A*26:03; SF3B1; K700E; 0
EVRTISAL

SEQ ID NO: 12804 - protein, 8 aa, Homo sapiens
  Table A; HLA-A*30:01; SF3B1; K700E; 0
EVRTISAL

SEQ ID NO: 12805 - protein, 8 aa, Homo sapiens
  Table A; HLA-A*33:03; SF3B1; K700E; 0
EVRTISAL

SEQ ID NO: 12806 - protein, 8 aa, Homo sapiens
  Table A; HLA-B*07:02; SF3B1; K700E; 1
EVRTISAL

SEQ ID NO: 12807 - protein, 8 aa, Homo sapiens
  Table A; HLA-B*08:01; SF3B1; K700E; 1
EVRTISAL

SEQ ID NO: 12808 - protein, 8 aa, Homo sapiens
  Table A; HLA-B*14:01; SF3B1; K700E; 0
EVRTISAL

SEQ ID NO: 12809 - protein, 8 aa, Homo sapiens
  Table A; HLA-B*14:02; SF3B1; K700E; 0
EVRTISAL

SEQ ID NO: 12810 - protein, 8 aa, Homo sapiens
  Table A; HLA-B*15:01; SF3B1; K700E; 1
EVRTISAL

SEQ ID NO: 12811 - protein, 8 aa, Homo sapiens
  Table A; HLA-B*15:02; SF3B1; K700E; 0
EVRTISAL

SEQ ID NO: 12812 - protein, 8 aa, Homo sapiens
  Table A; HLA-B*40:02; SF3B1; K700E; 0
EVRTISAL

SEQ ID NO: 12813 - protein, 8 aa, Homo sapiens
  Table A; HLA-B*48:01; SF3B1; K700E; 0
EVRTISAL

SEQ ID NO: 12814 - protein, 8 aa, Homo sapiens
  Table A; HLA-C*08:01; SF3B1; K700E; 0
EVRTISAL

SEQ ID NO: 12815 - protein, 8 aa, Homo sapiens
  Table A; HLA-C*12:03; SF3B1; K700E; 1
EVRTISAL

SEQ ID NO: 12816 - protein, 9 aa, Homo sapiens
  Table A; HLA-A*33:03; SF3B1; K700E; 0
EVRTISALA

SEQ ID NO: 12817 - protein, 9 aa, Homo sapiens
  Table A; HLA-A*68:02; SF3B1; K700E; 0
EVRTISALA

SEQ ID NO: 12818 - protein, 10 aa, Homo sapiens
  Table A; HLA-A*68:02; SF3B1; K700E; 0
EVRTISALAI

SEQ ID NO: 12819 - protein, 9 aa, Homo sapiens
  Table A; HLA-A*68:02; CTCF; K365T; 0
EVSTLKRHI

SEQ ID NO: 12820 - protein, 10 aa, Homo sapiens
  Table A; HLA-A*33:03; CTCF; K365T; 0
EVSTLKRHIR

SEQ ID NO: 12821 - protein, 11 aa, Homo sapiens
  Table A; HLA-A*68:02; RHOA; Y42C; 0
EVYVPTVFENC

SEQ ID NO: 12822 - protein, 11 aa, Homo sapiens
  Table A; HLA-A*31:01; NRAS; G13R; 0
EYKLVVVGAGR

SEQ ID NO: 12823 - protein, 11 aa, Homo sapiens
  Table A; HLA-A*33:01; NRAS; G13R; 0
EYKLVVVGAGR

SEQ ID NO: 12824 - protein, 11 aa, Homo sapiens
  Table A; HLA-A*33:03; NRAS; G13R; 0
EYKLVVVGAGR

SEQ ID NO: 12825 - protein, 10 aa, Homo sapiens
  Table A; HLA-A*33:03; KRAS; G12R; 0
EYKLVVVGAR

SEQ ID NO: 12826 - protein, 11 aa, Homo sapiens
  Table A; HLA-A*33:03; KRAS; G12S; 0
EYKLVVVGASG

SEQ ID NO: 12827 - protein, 11 aa, Homo sapiens
  Table A; HLA-A*33:03; TP53; H214R; 0
EYLDDRNTFRR

SEQ ID NO: 12828 - protein, 9 aa, Homo sapiens
  Table A; HLA-A*26:03; SF3B1; R625C; 0
EYVCNTTAR

SEQ ID NO: 12829 - protein, 9 aa, Homo sapiens
  Table A; HLA-A*33:01; SF3B1; R625C; 0
EYVCNTTAR

SEQ ID NO: 12830 - protein, 9 aa, Homo sapiens
  Table A; HLA-A*33:03; SF3B1; R625C; 0
EYVCNTTAR

SEQ ID NO: 12831 - protein, 9 aa, Homo sapiens
  Table A; HLA-A*68:01; SF3B1; R625C; 0
EYVCNTTAR

SEQ ID NO: 12832 - protein, 10 aa, Homo sapiens
  Table A; HLA-A*33:03; SF3B1; R625C; 0
EYVCNTTARA

SEQ ID NO: 12833 - protein, 11 aa, Homo sapiens
  Table A; HLA-A*23:01; SF3B1; R625C; 0
EYVCNTTARAF

SEQ ID NO: 12834 - protein, 8 aa, Homo sapiens
  Table A; HLA-A*33:03; SF3B1; R625H; 0
EYVHNTTA

SEQ ID NO: 12835 - protein, 8 aa, Homo sapiens
  Table A; HLA-B*39:06; SF3B1; R625H; 0
EYVHNTTA

SEQ ID NO: 12836 - protein, 9 aa, Homo sapiens
  Table A; HLA-A*25:01; SF3B1; R625H; 0
EYVHNTTAR

SEQ ID NO: 12837 - protein, 9 aa, Homo sapiens
  Table A; HLA-A*26:01; SF3B1; R625H; 0
EYVHNTTAR

SEQ ID NO: 12838 - protein, 9 aa, Homo sapiens
  Table A; HLA-A*26:03; SF3B1; R625H; 0
EYVHNTTAR

SEQ ID NO: 12839 - protein, 9 aa, Homo sapiens
  Table A; HLA-A*30:01; SF3B1; R625H; 0
EYVHNTTAR

SEQ ID NO: 12840 - protein, 9 aa, Homo sapiens
  Table A; HLA-A*31:01; SF3B1; R625H; 0
EYVHNTTAR

SEQ ID NO: 12841 - protein, 9 aa, Homo sapiens
  Table A; HLA-A*33:01; SF3B1; R625H; 0
EYVHNTTAR

SEQ ID NO: 12842 - protein, 9 aa, Homo sapiens
  Table A; HLA-A*33:03; SF3B1; R625H; 0
EYVHNTTAR

SEQ ID NO: 12843 - protein, 9 aa, Homo sapiens
  Table A; HLA-A*68:01; SF3B1; R625H; 0
EYVHNTTAR

SEQ ID NO: 12844 - protein, 9 aa, Homo sapiens
  Table A; HLA-A*68:02; SF3B1; R625H; 0
EYVHNTTAR

SEQ ID NO: 12845 - protein, 9 aa, Homo sapiens
  Table A; HLA-B*27:02; SF3B1; R625H; 0
EYVHNTTAR

SEQ ID NO: 12846 - protein, 9 aa, Homo sapiens
  Table A; HLA-B*35:01; SF3B1; R625H; 0
EYVHNTTAR

SEQ ID NO: 12847 - protein, 9 aa, Homo sapiens
  Table A; HLA-B*54:01; SF3B1; R625H; 0
EYVHNTTAR

SEQ ID NO: 12848 - protein, 10 aa, Homo sapiens
  Table A; HLA-A*33:03; SF3B1; R625H; 0
EYVHNTTARA

SEQ ID NO: 12849 - protein, 10 aa, Homo sapiens
  Table A; HLA-A*68:02; SF3B1; R625H; 0
EYVHNTTARA

SEQ ID NO: 12850 - protein, 11 aa, Homo sapiens
  Table A; HLA-A*23:01; SF3B1; R625H; 0
EYVHNTTARAF

SEQ ID NO: 12851 - protein, 11 aa, Homo sapiens
  Table A; HLA-A*24:02; SF3B1; R625H; 1
EYVHNTTARAF

SEQ ID NO: 12852 - protein, 11 aa, Homo sapiens
  Table A; HLA-A*31:01; SF3B1; R625H; 0
EYVHNTTARAF

SEQ ID NO: 12853 - protein, 11 aa, Homo sapiens
  Table A; HLA-A*33:03; SF3B1; R625H; 0
EYVHNTTARAF

SEQ ID NO: 12854 - protein, 10 aa, Homo sapiens
  Table A; HLA-A*02:07; TPR; S2155L; 0
FAEAIHLPQV

SEQ ID NO: 12855 - protein, 10 aa, Homo sapiens
  Table A; HLA-A*68:02; TPR; S2155L; 0
FAEAIHLPQV

SEQ ID NO: 12856 - protein, 10 aa, Homo sapiens
  Table A; HLA-B*54:01; TPR; S2155L; 0
FAEAIHLPQV

SEQ ID NO: 12857 - protein, 11 aa, Homo sapiens
  Table A; HLA-B*54:01; TPR; S2155L; 0
FAEAIHLPQVA

SEQ ID NO: 12858 - protein, 9 aa, Homo sapiens
  Table A; HLA-C*03:03; ATM; R2691C; 0
FCLAGGVNL

SEQ ID NO: 12859 - protein, 9 aa, Homo sapiens
  Table A; HLA-C*03:04; ATM; R2691C; 1
FCLAGGVNL

SEQ ID NO: 12860 - protein, 9 aa, Homo sapiens
  Table A; HLA-C*17:01; ATM; R2691C; 0
FCLAGGVNL

SEQ ID NO: 12861 - protein, 8 aa, Homo sapiens
  Table A; HLA-A*31:01; TP53; S241F; 0
FCMGGMNR

SEQ ID NO: 12862 - protein, 8 aa, Homo sapiens
  Table A; HLA-A*33:03; TP53; S241F; 0
FCMGGMNR

SEQ ID NO: 12863 - protein, 8 aa, Homo sapiens
  Table A; HLA-B*15:01; TP53; C141Y; 0
FCQLAKTY

SEQ ID NO: 12864 - protein, 8 aa, Homo sapiens
  Table A; HLA-B*15:02; TP53; C141Y; 0
FCQLAKTY

SEQ ID NO: 12865 - protein, 10 aa, Homo sapiens
  Table A; HLA-A*02:01; KEAP1; G480W; 1
FDWTNRLNSA

SEQ ID NO: 12866 - protein, 9 aa, Homo sapiens
  Table A; HLA-A*02:01; PTEN; D92E; 1
FEEHNPPQL

SEQ ID NO: 12867 - protein, 9 aa, Homo sapiens
  Table A; HLA-A*02:04; PTEN; D92E; 0
FEEHNPPQL

SEQ ID NO: 12868 - protein, 9 aa, Homo sapiens
  Table A; HLA-A*30:01; PTEN; D92E; 0
FEEHNPPQL

SEQ ID NO: 12869 - protein, 9 aa, Homo sapiens
  Table A; HLA-B*35:02; PTEN; D92E; 0
FEEHNPPQL

SEQ ID NO: 12870 - protein, 9 aa, Homo sapiens
  Table A; HLA-B*35:03; PTEN; D92E; 0
FEEHNPPQL

SEQ ID NO: 12871 - protein, 9 aa, Homo sapiens
  Table A; HLA-B*39:01; PTEN; D92E; 0
FEEHNPPQL

SEQ ID NO: 12872 - protein, 9 aa, Homo sapiens
  Table A; HLA-B*40:01; PTEN; D92E; 0
FEEHNPPQL

SEQ ID NO: 12873 - protein, 9 aa, Homo sapiens
  Table A; HLA-B*40:02; PTEN; D92E; 0
FEEHNPPQL

SEQ ID NO: 12874 - protein, 9 aa, Homo sapiens
  Table A; HLA-B*41:02; PTEN; D92E; 0
FEEHNPPQL

SEQ ID NO: 12875 - protein, 9 aa, Homo sapiens
  Table A; HLA-B*44:05; PTEN; D92E; 0
FEEHNPPQL

SEQ ID NO: 12876 - protein, 9 aa, Homo sapiens
  Table A; HLA-B*49:01; PTEN; D92E; 0
FEEHNPPQL

SEQ ID NO: 12877 - protein, 9 aa, Homo sapiens
  Table A; HLA-B*58:01; PTEN; D92E; 0
FEEHNPPQL

SEQ ID NO: 12878 - protein, 9 aa, Homo sapiens
  Table A; HLA-C*05:01; PTEN; D92E; 0
FEEHNPPQL

SEQ ID NO: 12879 - protein, 9 aa, Homo sapiens
  Table A; HLA-C*08:02; PTEN; D92E; 0
FEEHNPPQL

SEQ ID NO: 12880 - protein, 10 aa, Homo sapiens
  Table A; HLA-A*68:02; RHOA; Y42C; 0
FENCVADIEV

SEQ ID NO: 12881 - protein, 10 aa, Homo sapiens
  Table A; HLA-B*40:02; RHOA; Y42C; 0
FENCVADIEV

SEQ ID NO: 12882 - protein, 8 aa, Homo sapiens
  Table A; HLA-B*40:02; TP53; R273H; 0
FEVHVCAC

SEQ ID NO: 12883 - protein, 9 aa, Homo sapiens
  Table A; HLA-B*50:01; TP53; R273H; 0
FEVHVCACP

SEQ ID NO: 12884 - protein, 9 aa, Homo sapiens
  Table A; HLA-A*02:03; MTOR; A2056V; 0
FEVLEPLHV

SEQ ID NO: 12885 - protein, 9 aa, Homo sapiens
  Table A; HLA-A*30:01; MTOR; A2056V; 0
FEVLEPLHV

SEQ ID NO: 12886 - protein, 9 aa, Homo sapiens
  Table A; HLA-A*68:02; MTOR; A2056V; 0
FEVLEPLHV

SEQ ID NO: 12887 - protein, 9 aa, Homo sapiens
  Table A; HLA-B*13:02; MTOR; A2056V; 0
FEVLEPLHV

SEQ ID NO: 12888 - protein, 9 aa, Homo sapiens
  Table A; HLA-B*40:01; MTOR; A2056V; 1
FEVLEPLHV

SEQ ID NO: 12889 - protein, 9 aa, Homo sapiens
  Table A; HLA-B*40:02; MTOR; A2056V; 0
FEVLEPLHV

SEQ ID NO: 12890 - protein, 9 aa, Homo sapiens
  Table A; HLA-B*44:03; MTOR; A2056V; 1
FEVLEPLHV

SEQ ID NO: 12891 - protein, 9 aa, Homo sapiens
  Table A; HLA-B*49:01; MTOR; A2056V; 0
FEVLEPLHV

SEQ ID NO: 12892 - protein, 10 aa, Homo sapiens
  Table A; HLA-B*40:02; MTOR; A2056V; 0
FEVLEPLHVM

SEQ ID NO: 12893 - protein, 8 aa, Homo sapiens
  Table A; HLA-B*18:01; TP53; R273L; 0
FEVLVCAC

SEQ ID NO: 12894 - protein, 8 aa, Homo sapiens
  Table A; HLA-B*39:06; TP53; R273L; 0
FEVLVCAC

SEQ ID NO: 12895 - protein, 8 aa, Homo sapiens
  Table A; HLA-B*40:02; TP53; R273L; 0
FEVLVCAC

SEQ ID NO: 12896 - protein, 9 aa, Homo sapiens
  Table A; HLA-B*50:01; TP53; R273L; 0
FEVLVCACP

SEQ ID NO: 12897 - protein, 8 aa, Homo sapiens
  Table A; HLA-B*18:01; TP53; C275Y; 0
FEVRVYAC

SEQ ID NO: 12898 - protein, 8 aa, Homo sapiens
  Table A; HLA-B*39:06; TP53; C275Y; 0
FEVRVYAC

SEQ ID NO: 12899 - protein, 8 aa, Homo sapiens
  Table A; HLA-B*40:02; TP53; C275Y; 0
FEVRVYAC

SEQ ID NO: 12900 - protein, 9 aa, Homo sapiens
  Table A; HLA-B*50:01; TP53; C275Y; 0
FEVRVYACP

SEQ ID NO: 12901 - protein, 8 aa, Homo sapiens
  Table A; HLA-B*39:06; TP53; R273S; 0
FEVSVCAC

SEQ ID NO: 12902 - protein, 8 aa, Homo sapiens
  Table A; HLA-B*40:02; TP53; R273S; 0
FEVSVCAC

SEQ ID NO: 12903 - protein, 8 aa, Homo sapiens
  Table A; HLA-B*40:06; TP53; R273S; 0
FEVSVCAC

SEQ ID NO: 12904 - protein, 8 aa, Homo sapiens
  Table A; HLA-B*49:01; TP53; R273S; 0
FEVSVCAC

SEQ ID NO: 12905 - protein, 8 aa, Homo sapiens
  Table A; HLA-B*50:01; TP53; R273S; 0
FEVSVCAC

SEQ ID NO: 12906 - protein, 9 aa, Homo sapiens
  Table A; HLA-B*50:01; TP53; R273S; 0
FEVSVCACP

SEQ ID NO: 12907 - protein, 8 aa, Homo sapiens
  Table A; HLA-C*03:04; PIK3CA; R88Q; 1
FFDETRQL

SEQ ID NO: 12908 - protein, 8 aa, Homo sapiens
  Table A; HLA-C*04:01; PIK3CA; R88Q; 1
FFDETRQL

SEQ ID NO: 12909 - protein, 8 aa, Homo sapiens
  Table A; HLA-C*05:01; PIK3CA; R88Q; 1
FFDETRQL

SEQ ID NO: 12910 - protein, 8 aa, Homo sapiens
  Table A; HLA-C*08:02; PIK3CA; R88Q; 1
FFDETRQL

SEQ ID NO: 12911 - protein, 8 aa, Homo sapiens
  Table A; HLA-C*14:02; PIK3CA; R88Q; 1
FFDETRQL

SEQ ID NO: 12912 - protein, 8 aa, Homo sapiens
  Table A; HLA-C*14:03; PIK3CA; R88Q; 0
FFDETRQL

SEQ ID NO: 12913 - protein, 9 aa, Homo sapiens
  Table A; HLA-C*04:01; PIK3CA; R88Q; 1
FFDETRQLC

SEQ ID NO: 12914 - protein, 9 aa, Homo sapiens
  Table A; HLA-B*35:03; ARID2; S297F; 0
FFEEGNVKL

SEQ ID NO: 12915 - protein, 9 aa, Homo sapiens
  Table A; HLA-B*38:01; ARID2; S297F; 0
FFEEGNVKL

SEQ ID NO: 12916 - protein, 9 aa, Homo sapiens
  Table A; HLA-B*39:01; ARID2; S297F; 0
FFEEGNVKL

SEQ ID NO: 12917 - protein, 9 aa, Homo sapiens
  Table A; HLA-B*48:01; ARID2; S297F; 0
FFEEGNVKL

SEQ ID NO: 12918 - protein, 9 aa, Homo sapiens
  Table A; HLA-C*01:02; ARID2; S297F; 0
FFEEGNVKL

SEQ ID NO: 12919 - protein, 9 aa, Homo sapiens
  Table A; HLA-C*04:01; ARID2; S297F; 1
FFEEGNVKL

SEQ ID NO: 12920 - protein, 9 aa, Homo sapiens
  Table A; HLA-C*05:01; ARID2; S297F; 1
FFEEGNVKL

SEQ ID NO: 12921 - protein, 9 aa, Homo sapiens
  Table A; HLA-C*08:02; ARID2; S297F; 1
FFEEGNVKL

SEQ ID NO: 12922 - protein, 9 aa, Homo sapiens
  Table A; HLA-C*14:02; ARID2; S297F; 0
FFEEGNVKL

SEQ ID NO: 12923 - protein, 10 aa, Homo sapiens
  Table A; HLA-C*01:02; ARID2; S297F; 0
FFEEGNVKLL

SEQ ID NO: 12924 - protein, 10 aa, Homo sapiens
  Table A; HLA-C*03:04; ARID2; S297F; 1
FFEEGNVKLL

SEQ ID NO: 12925 - protein, 10 aa, Homo sapiens
  Table A; HLA-C*14:02; ARID2; S297F; 0
FFEEGNVKLL

SEQ ID NO: 12926 - protein, 9 aa, Homo sapiens
  Table A; HLA-C*14:02; RSPO2; R64Q; 0
FFFLQREGM

SEQ ID NO: 12927 - protein, 8 aa, Homo sapiens
  Table A; HLA-C*14:02; KDR; S1100F; 0
FFLGASPY

SEQ ID NO: 12928 - protein, 8 aa, Homo sapiens
  Table A; HLA-C*14:02; RSPO2; R64Q; 0
FFLQREGM

SEQ ID NO: 12929 - protein, 8 aa, Homo sapiens
  Table A; HLA-B*39:06; CTNNB1; S37F; 0
FGATTTAP

SEQ ID NO: 12930 - protein, 10 aa, Homo sapiens
  Table A; HLA-A*02:01; CTNNB1; S37F; 1
FGATTTAPSL

SEQ ID NO: 12931 - protein, 10 aa, Homo sapiens
  Table A; HLA-A*68:01; CTNNB1; S37F; 1
FGATTTAPSL

SEQ ID NO: 12932 - protein, 10 aa, Homo sapiens
  Table A; HLA-A*68:02; CTNNB1; S37F; 0
FGATTTAPSL

SEQ ID NO: 12933 - protein, 10 aa, Homo sapiens
  Table A; HLA-B*15:10; CTNNB1; S37F; 0
FGATTTAPSL

SEQ ID NO: 12934 - protein, 10 aa, Homo sapiens
  Table A; HLA-B*35:03; CTNNB1; S37F; 0
FGATTTAPSL

SEQ ID NO: 12935 - protein, 10 aa, Homo sapiens
  Table A; HLA-B*39:01; CTNNB1; S37F; 0
FGATTTAPSL

SEQ ID NO: 12936 - protein, 10 aa, Homo sapiens
  Table A; HLA-B*40:02; CTNNB1; S37F; 0
FGATTTAPSL

SEQ ID NO: 12937 - protein, 10 aa, Homo sapiens
  Table A; HLA-C*03:03; CTNNB1; S37F; 1
FGATTTAPSL

SEQ ID NO: 12938 - protein, 10 aa, Homo sapiens
  Table A; HLA-C*03:04; CTNNB1; S37F; 1
FGATTTAPSL

SEQ ID NO: 12939 - protein, 11 aa, Homo sapiens
  Table A; HLA-A*68:02; CTNNB1; S37F; 0
FGATTTAPSLS

SEQ ID NO: 12940 - protein, 8 aa, Homo sapiens
  Table A; HLA-A*02:05; MYCN; P44L; 0
FGGPDSTL

SEQ ID NO: 12941 - protein, 8 aa, Homo sapiens
  Table A; HLA-B*35:02; MYCN; P44L; 0
FGGPDSTL

SEQ ID NO: 12942 - protein, 8 aa, Homo sapiens
  Table A; HLA-B*35:03; MYCN; P44L; 0
FGGPDSTL

SEQ ID NO: 12943 - protein, 8 aa, Homo sapiens
  Table A; HLA-B*35:12; MYCN; P44L; 0
FGGPDSTL

SEQ ID NO: 12944 - protein, 8 aa, Homo sapiens
  Table A; HLA-B*38:01; MYCN; P44L; 0
FGGPDSTL

SEQ ID NO: 12945 - protein, 8 aa, Homo sapiens
  Table A; HLA-B*39:01; MYCN; P44L; 0
FGGPDSTL

SEQ ID NO: 12946 - protein, 8 aa, Homo sapiens
  Table A; HLA-B*48:01; MYCN; P44L; 0
FGGPDSTL

SEQ ID NO: 12947 - protein, 8 aa, Homo sapiens
  Table A; HLA-C*03:03; MYCN; P44L; 1
FGGPDSTL

SEQ ID NO: 12948 - protein, 8 aa, Homo sapiens
  Table A; HLA-C*03:04; MYCN; P44L; 1
FGGPDSTL

SEQ ID NO: 12949 - protein, 8 aa, Homo sapiens
  Table A; HLA-C*07:04; MYCN; P44L; 0
FGGPDSTL

SEQ ID NO: 12950 - protein, 8 aa, Homo sapiens
  Table A; HLA-C*08:01; MYCN; P44L; 0
FGGPDSTL

SEQ ID NO: 12951 - protein, 8 aa, Homo sapiens
  Table A; HLA-B*39:01; CTNNB1; S33F; 0
FGIHSGAT

SEQ ID NO: 12952 - protein, 9 aa, Homo sapiens
  Table A; HLA-A*02:05; CTNNB1; S33F; 0
FGIHSGATT

SEQ ID NO: 12953 - protein, 9 aa, Homo sapiens
  Table A; HLA-B*15:10; CTNNB1; S33F; 0
FGIHSGATT

SEQ ID NO: 12954 - protein, 9 aa, Homo sapiens
  Table A; HLA-B*35:03; CTNNB1; S33F; 0
FGIHSGATT

SEQ ID NO: 12955 - protein, 9 aa, Homo sapiens
  Table A; HLA-B*39:01; CTNNB1; S33F; 0
FGIHSGATT

SEQ ID NO: 12956 - protein, 9 aa, Homo sapiens
  Table A; HLA-B*54:01; CTNNB1; S33F; 0
FGIHSGATT

SEQ ID NO: 12957 - protein, 9 aa, Homo sapiens
  Table A; HLA-C*03:04; CTNNB1; S33F; 1
FGIHSGATT

SEQ ID NO: 12958 - protein, 10 aa, Homo sapiens
  Table A; HLA-B*08:01; CTNNB1; S33F; 1
FGIHSGATTT

SEQ ID NO: 12959 - protein, 10 aa, Homo sapiens
  Table A; HLA-B*48:01; CTNNB1; S33F; 0
FGIHSGATTT

SEQ ID NO: 12960 - protein, 10 aa, Homo sapiens
  Table A; HLA-C*08:03; CTNNB1; S33F; 0
FGIHSGATTT

SEQ ID NO: 12961 - protein, 11 aa, Homo sapiens
  Table A; HLA-A*02:01; CTNNB1; S33F; 1
FGIHSGATTTA

SEQ ID NO: 12962 - protein, 11 aa, Homo sapiens
  Table A; HLA-A*02:03; CTNNB1; S33F; 0
FGIHSGATTTA

SEQ ID NO: 12963 - protein, 11 aa, Homo sapiens
  Table A; HLA-A*02:05; CTNNB1; S33F; 0
FGIHSGATTTA

SEQ ID NO: 12964 - protein, 11 aa, Homo sapiens
  Table A; HLA-A*68:01; CTNNB1; S33F; 1
FGIHSGATTTA

SEQ ID NO: 12965 - protein, 11 aa, Homo sapiens
  Table A; HLA-B*08:01; CTNNB1; S33F; 1
FGIHSGATTTA

SEQ ID NO: 12966 - protein, 11 aa, Homo sapiens
  Table A; HLA-B*15:01; CTNNB1; S33F; 1
FGIHSGATTTA

SEQ ID NO: 12967 - protein, 11 aa, Homo sapiens
  Table A; HLA-B*46:01; CTNNB1; S33F; 0
FGIHSGATTTA

SEQ ID NO: 12968 - protein, 11 aa, Homo sapiens
  Table A; HLA-B*48:01; CTNNB1; S33F; 0
FGIHSGATTTA

SEQ ID NO: 12969 - protein, 11 aa, Homo sapiens
  Table A; HLA-B*50:01; CTNNB1; S33F; 0
FGIHSGATTTA

SEQ ID NO: 12970 - protein, 11 aa, Homo sapiens
  Table A; HLA-B*54:01; CTNNB1; S33F; 0
FGIHSGATTTA

SEQ ID NO: 12971 - protein, 9 aa, Homo sapiens
  Table A; HLA-B*08:01; EGFR; L861Q; 1
FGLAKQLGA

SEQ ID NO: 12972 - protein, 9 aa, Homo sapiens
  Table A; HLA-B*39:06; EGFR; L861Q; 0
FGLAKQLGA

SEQ ID NO: 12973 - protein, 9 aa, Homo sapiens
  Table A; HLA-B*54:01; EGFR; L861Q; 0
FGLAKQLGA

SEQ ID NO: 12974 - protein, 9 aa, Homo sapiens
  Table A; HLA-B*27:02; BRAF; K601E; 0
FGLATVESR

SEQ ID NO: 12975 - protein, 10 aa, Homo sapiens
  Table A; HLA-B*57:01; BRAF; K601E; 1
FGLATVESRW

SEQ ID NO: 12976 - protein, 9 aa, Homo sapiens
  Table A; HLA-A*02:03; EGFR; L858R; 0
FGRAKLLGA

SEQ ID NO: 12977 - protein, 9 aa, Homo sapiens
  Table A; HLA-B*54:01; TRRAP; S722F; 0
FGSVFLFAA

SEQ ID NO: 12978 - protein, 8 aa, Homo sapiens
  Table A; HLA-B*39:06; KNSTRN; S24F; 0
FHPLPPSY

SEQ ID NO: 12979 - protein, 9 aa, Homo sapiens
  Table A; HLA-A*26:03; KRAS; A146T; 0
FIETSTKTR

SEQ ID NO: 12980 - protein, 9 aa, Homo sapiens
  Table A; HLA-A*68:01; KRAS; A146T; 0
FIETSTKTR

SEQ ID NO: 12981 - protein, 10 aa, Homo sapiens
  Table A; HLA-A*02:01; TRRAP; S722F; 1
FLFAAENEQM

SEQ ID NO: 12982 - protein, 10 aa, Homo sapiens
  Table A; HLA-A*02:03; TRRAP; S722F; 0
FLFAAENEQM

SEQ ID NO: 12983 - protein, 10 aa, Homo sapiens
  Table A; HLA-A*02:04; TRRAP; S722F; 0
FLFAAENEQM

SEQ ID NO: 12984 - protein, 10 aa, Homo sapiens
  Table A; HLA-A*02:05; TRRAP; S722F; 0
FLFAAENEQM

SEQ ID NO: 12985 - protein, 10 aa, Homo sapiens
  Table A; HLA-A*02:07; TRRAP; S722F; 0
FLFAAENEQM

SEQ ID NO: 12986 - protein, 10 aa, Homo sapiens
  Table A; HLA-A*02:08; TRRAP; S722F; 0
FLFAAENEQM

SEQ ID NO: 12987 - protein, 10 aa, Homo sapiens
  Table A; HLA-B*13:01; TRRAP; S722F; 0
FLFAAENEQM

SEQ ID NO: 12988 - protein, 10 aa, Homo sapiens
  Table A; HLA-B*15:02; TRRAP; S722F; 0
FLFAAENEQM

SEQ ID NO: 12989 - protein, 10 aa, Homo sapiens
  Table A; HLA-C*08:01; TRRAP; S722F; 0
FLFAAENEQM

SEQ ID NO: 12990 - protein, 11 aa, Homo sapiens
  Table A; HLA-A*02:01; TRRAP; S722F; 1
FLFAAENEQML

SEQ ID NO: 12991 - protein, 11 aa, Homo sapiens
  Table A; HLA-A*02:03; TRRAP; S722F; 0
FLFAAENEQML

SEQ ID NO: 12992 - protein, 11 aa, Homo sapiens
  Table A; HLA-A*02:04; TRRAP; S722F; 0
FLFAAENEQML

SEQ ID NO: 12993 - protein, 11 aa, Homo sapiens
  Table A; HLA-A*02:05; TRRAP; S722F; 0
FLFAAENEQML

SEQ ID NO: 12994 - protein, 11 aa, Homo sapiens
  Table A; HLA-A*02:07; TRRAP; S722F; 0
FLFAAENEQML

SEQ ID NO: 12995 - protein, 11 aa, Homo sapiens
  Table A; HLA-B*48:01; TRRAP; S722F; 0
FLFAAENEQML

SEQ ID NO: 12996 - protein, 8 aa, Homo sapiens
  Table A; HLA-C*08:03; RAC1; P29L; 0
FLGEYIPT

SEQ ID NO: 12997 - protein, 9 aa, Homo sapiens
  Table A; HLA-A*02:01; RAC1; P29L; 1
FLGEYIPTV

SEQ ID NO: 12998 - protein, 9 aa, Homo sapiens
  Table A; HLA-A*02:03; RAC1; P29L; 0
FLGEYIPTV

SEQ ID NO: 12999 - protein, 9 aa, Homo sapiens
  Table A; HLA-A*02:04; RAC1; P29L; 0
FLGEYIPTV

SEQ ID NO: 13000 - protein, 9 aa, Homo sapiens
  Table A; HLA-A*02:05; RAC1; P29L; 0
FLGEYIPTV

SEQ ID NO: 13001 - protein, 9 aa, Homo sapiens
  Table A; HLA-A*02:06; RAC1; P29L; 0
FLGEYIPTV

SEQ ID NO: 13002 - protein, 9 aa, Homo sapiens
  Table A; HLA-A*02:07; RAC1; P29L; 0
FLGEYIPTV

SEQ ID NO: 13003 - protein, 9 aa, Homo sapiens
  Table A; HLA-A*02:08; RAC1; P29L; 0
FLGEYIPTV

SEQ ID NO: 13004 - protein, 9 aa, Homo sapiens
  Table A; HLA-A*30:01; RAC1; P29L; 0
FLGEYIPTV

SEQ ID NO: 13005 - protein, 9 aa, Homo sapiens
  Table A; HLA-A*68:02; RAC1; P29L; 0
FLGEYIPTV

SEQ ID NO: 13006 - protein, 9 aa, Homo sapiens
  Table A; HLA-B*08:01; RAC1; P29L; 1
FLGEYIPTV

SEQ ID NO: 13007 - protein, 9 aa, Homo sapiens
  Table A; HLA-B*13:02; RAC1; P29L; 0
FLGEYIPTV

SEQ ID NO: 13008 - protein, 9 aa, Homo sapiens
  Table A; HLA-B*35:03; RAC1; P29L; 0
FLGEYIPTV

SEQ ID NO: 13009 - protein, 9 aa, Homo sapiens
  Table A; HLA-B*39:06; RAC1; P29L; 0
FLGEYIPTV

SEQ ID NO: 13010 - protein, 9 aa, Homo sapiens
  Table A; HLA-B*40:02; RAC1; P29L; 0
FLGEYIPTV

SEQ ID NO: 13011 - protein, 9 aa, Homo sapiens
  Table A; HLA-B*48:01; RAC1; P29L; 0
FLGEYIPTV

SEQ ID NO: 13012 - protein, 9 aa, Homo sapiens
  Table A; HLA-B*50:01; RAC1; P29L; 0
FLGEYIPTV

SEQ ID NO: 13013 - protein, 9 aa, Homo sapiens
  Table A; HLA-B*51:01; RAC1; P29L; 1
FLGEYIPTV

SEQ ID NO: 13014 - protein, 9 aa, Homo sapiens
  Table A; HLA-B*54:01; RAC1; P29L; 0
FLGEYIPTV

SEQ ID NO: 13015 - protein, 9 aa, Homo sapiens
  Table A; HLA-C*07:04; RAC1; P29L; 0
FLGEYIPTV

SEQ ID NO: 13016 - protein, 9 aa, Homo sapiens
  Table A; HLA-C*15:02; RAC1; P29L; 0
FLGEYIPTV

SEQ ID NO: 13017 - protein, 10 aa, Homo sapiens
  Table A; HLA-A*02:01; RAC1; P29L; 1
FLGEYIPTVF

SEQ ID NO: 13018 - protein, 10 aa, Homo sapiens
  Table A; HLA-A*02:03; RAC1; P29L; 0
FLGEYIPTVF

SEQ ID NO: 13019 - protein, 10 aa, Homo sapiens
  Table A; HLA-A*02:04; RAC1; P29L; 0
FLGEYIPTVF

SEQ ID NO: 13020 - protein, 10 aa, Homo sapiens
  Table A; HLA-A*02:07; RAC1; P29L; 0
FLGEYIPTVF

SEQ ID NO: 13021 - protein, 10 aa, Homo sapiens
  Table A; HLA-A*29:02; RAC1; P29L; 0
FLGEYIPTVF

SEQ ID NO: 13022 - protein, 10 aa, Homo sapiens
  Table A; HLA-B*08:01; RAC1; P29L; 1
FLGEYIPTVF

SEQ ID NO: 13023 - protein, 10 aa, Homo sapiens
  Table A; HLA-B*15:01; RAC1; P29L; 1
FLGEYIPTVF

SEQ ID NO: 13024 - protein, 10 aa, Homo sapiens
  Table A; HLA-B*15:02; RAC1; P29L; 0
FLGEYIPTVF

SEQ ID NO: 13025 - protein, 10 aa, Homo sapiens
  Table A; HLA-B*27:02; RAC1; P29L; 0
FLGEYIPTVF

SEQ ID NO: 13026 - protein, 10 aa, Homo sapiens
  Table A; HLA-B*35:01; RAC1; P29L; 1
FLGEYIPTVF

SEQ ID NO: 13027 - protein, 10 aa, Homo sapiens
  Table A; HLA-C*08:01; RAC1; P29L; 0
FLGEYIPTVF

SEQ ID NO: 13028 - protein, 9 aa, Homo sapiens
  Table A; HLA-A*02:01; PIK3CA; G106V; 1
FLKVIEPVV

SEQ ID NO: 13029 - protein, 9 aa, Homo sapiens
  Table A; HLA-A*02:03; PIK3CA; G106V; 0
FLKVIEPVV

SEQ ID NO: 13030 - protein, 9 aa, Homo sapiens
  Table A; HLA-A*02:04; PIK3CA; G106V; 0
FLKVIEPVV

SEQ ID NO: 13031 - protein, 9 aa, Homo sapiens
  Table A; HLA-A*30:01; PIK3CA; G106V; 0
FLKVIEPVV

SEQ ID NO: 13032 - protein, 11 aa, Homo sapiens
  Table A; HLA-A*33:01; PIK3CA; G106V; 0
FLKVIEPVVNR

SEQ ID NO: 13033 - protein, 9 aa, Homo sapiens
  Table A; HLA-A*02:01; TP53; R110L; 1
FLLGFLHSG

SEQ ID NO: 13034 - protein, 9 aa, Homo sapiens
  Table A; HLA-A*02:04; TP53; R110L; 0
FLLGFLHSG

SEQ ID NO: 13035 - protein, 11 aa, Homo sapiens
  Table A; HLA-A*02:03; TP53; R110L; 0
FLLGFLHSGTA

SEQ ID NO: 13036 - protein, 8 aa, Homo sapiens
  Table A; HLA-B*13:02; MAP2K1; K57N; 0
FLTQNQKV

SEQ ID NO: 13037 - protein, 11 aa, Homo sapiens
  Table A; HLA-A*02:03; MAP2K1; K57N; 0
FLTQNQKVGEL

SEQ ID NO: 13038 - protein, 9 aa, Homo sapiens
  Table A; HLA-B*15:01; PIK3CA; M1043I; 1
FMKQINDAH

SEQ ID NO: 13039 - protein, 9 aa, Homo sapiens
  Table A; HLA-A*02:03; PIK3CA; H1047L; 0
FMKQMNDAL

SEQ ID NO: 13040 - protein, 9 aa, Homo sapiens
  Table A; HLA-A*02:04; PIK3CA; H1047L; 0
FMKQMNDAL

SEQ ID NO: 13041 - protein, 9 aa, Homo sapiens
  Table A; HLA-B*08:01; PIK3CA; H1047L; 1
FMKQMNDAL

SEQ ID NO: 13042 - protein, 9 aa, Homo sapiens
  Table A; HLA-B*46:01; PIK3CA; H1047L; 0
FMKQMNDAL

SEQ ID NO: 13043 - protein, 9 aa, Homo sapiens
  Table A; HLA-B*48:01; PIK3CA; H1047L; 0
FMKQMNDAL

SEQ ID NO: 13044 - protein, 9 aa, Homo sapiens
  Table A; HLA-A*31:01; PIK3CA; H1047R; 1
FMKQMNDAR

SEQ ID NO: 13045 - protein, 9 aa, Homo sapiens
  Table A; HLA-A*33:03; PIK3CA; H1047R; 0
FMKQMNDAR

SEQ ID NO: 13046 - protein, 9 aa, Homo sapiens
  Table A; HLA-A*29:01; PIK3CA; H1047Y; 0
FMKQMNDAY

SEQ ID NO: 13047 - protein, 9 aa, Homo sapiens
  Table A; HLA-A*29:02; PIK3CA; H1047Y; 0
FMKQMNDAY

SEQ ID NO: 13048 - protein, 9 aa, Homo sapiens
  Table A; HLA-A*30:02; PIK3CA; H1047Y; 0
FMKQMNDAY

SEQ ID NO: 13049 - protein, 9 aa, Homo sapiens
  Table A; HLA-B*15:01; PIK3CA; H1047Y; 1
FMKQMNDAY

SEQ ID NO: 13050 - protein, 9 aa, Homo sapiens
  Table A; HLA-B*15:02; PIK3CA; H1047Y; 0
FMKQMNDAY

SEQ ID NO: 13051 - protein, 9 aa, Homo sapiens
  Table A; HLA-B*15:03; PIK3CA; H1047Y; 0
FMKQMNDAY

SEQ ID NO: 13052 - protein, 9 aa, Homo sapiens
  Table A; HLA-B*46:01; PIK3CA; H1047Y; 0
FMKQMNDAY

SEQ ID NO: 13053 - protein, 9 aa, Homo sapiens
  Table A; HLA-C*08:01; PIK3CA; H1047Y; 0
FMKQMNDAY

SEQ ID NO: 13054 - protein, 9 aa, Homo sapiens
  Table A; HLA-B*15:01; PIK3CA; M1043V; 1
FMKQVNDAH

SEQ ID NO: 13055 - protein, 8 aa, Homo sapiens
  Table A; HLA-B*08:01; TP53; S127F; 1
FPALNKMF

SEQ ID NO: 13056 - protein, 8 aa, Homo sapiens
  Table A; HLA-B*35:01; TP53; S127F; 0
FPALNKMF

SEQ ID NO: 13057 - protein, 8 aa, Homo sapiens
  Table A; HLA-B*54:01; TP53; S127F; 0
FPALNKMF

SEQ ID NO: 13058 - protein, 9 aa, Homo sapiens
  Table A; HLA-B*54:01; TP53; S127F; 0
FPALNKMFC

SEQ ID NO: 13059 - protein, 11 aa, Homo sapiens
  Table A; HLA-B*07:02; MECOM; R750Q; 1
FPRSANLTQHL

SEQ ID NO: 13060 - protein, 11 aa, Homo sapiens
  Table A; HLA-B*54:01; MECOM; R750Q; 0
FPRSANLTQHL

SEQ ID NO: 13061 - protein, 8 aa, Homo sapiens
  Table A; HLA-B*39:06; TP53; R213Q; 0
FQHSVVVP

SEQ ID NO: 13062 - protein, 9 aa, Homo sapiens
  Table A; HLA-A*29:02; TP53; R213Q; 0
FQHSVVVPY

SEQ ID NO: 13063 - protein, 9 aa, Homo sapiens
  Table A; HLA-A*30:01; TP53; R213Q; 0
FQHSVVVPY

SEQ ID NO: 13064 - protein, 9 aa, Homo sapiens
  Table A; HLA-B*13:02; TP53; R213Q; 0
FQHSVVVPY

SEQ ID NO: 13065 - protein, 9 aa, Homo sapiens
  Table A; HLA-B*15:01; TP53; R213Q; 1
FQHSVVVPY

SEQ ID NO: 13066 - protein, 9 aa, Homo sapiens
  Table A; HLA-B*15:02; TP53; R213Q; 0
FQHSVVVPY

SEQ ID NO: 13067 - protein, 9 aa, Homo sapiens
  Table A; HLA-B*15:03; TP53; R213Q; 0
FQHSVVVPY

SEQ ID NO: 13068 - protein, 9 aa, Homo sapiens
  Table A; HLA-B*27:02; TP53; R213Q; 0
FQHSVVVPY

SEQ ID NO: 13069 - protein, 9 aa, Homo sapiens
  Table A; HLA-B*27:05; TP53; R213Q; 0
FQHSVVVPY

SEQ ID NO: 13070 - protein, 9 aa, Homo sapiens
  Table A; HLA-B*35:01; TP53; R213Q; 0
FQHSVVVPY

SEQ ID NO: 13071 - protein, 9 aa, Homo sapiens
  Table A; HLA-B*46:01; TP53; R213Q; 0
FQHSVVVPY

SEQ ID NO: 13072 - protein, 9 aa, Homo sapiens
  Table A; HLA-C*02:02; TP53; R213Q; 0
FQHSVVVPY

SEQ ID NO: 13073 - protein, 9 aa, Homo sapiens
  Table A; HLA-C*14:02; TP53; R213Q; 0
FQHSVVVPY

SEQ ID NO: 13074 - protein, 9 aa, Homo sapiens
  Table A; HLA-C*16:04; TP53; R213Q; 0
FQHSVVVPY

SEQ ID NO: 13075 - protein, 9 aa, Homo sapiens
  Table A; HLA-A*02:01; TP53; C135F; 1
FQLAKTCPV

SEQ ID NO: 13076 - protein, 9 aa, Homo sapiens
  Table A; HLA-A*02:03; TP53; C135F; 0
FQLAKTCPV

SEQ ID NO: 13077 - protein, 9 aa, Homo sapiens
  Table A; HLA-B*13:02; TP53; C135F; 0
FQLAKTCPV

SEQ ID NO: 13078 - protein, 9 aa, Homo sapiens
  Table A; HLA-B*39:06; TP53; C135F; 0
FQLAKTCPV

SEQ ID NO: 13079 - protein, 9 aa, Homo sapiens
  Table A; HLA-B*39:06; CSMD3; R2601Q; 0
FQLVGKSSA

SEQ ID NO: 13080 - protein, 9 aa, Homo sapiens
  Table A; HLA-B*38:01; POLE; P286R; 1
FRDAETDQI

SEQ ID NO: 13081 - protein, 9 aa, Homo sapiens
  Table A; HLA-B*27:02; TP53; S215G; 0
FRHGVVVPY

SEQ ID NO: 13082 - protein, 9 aa, Homo sapiens
  Table A; HLA-B*27:05; TP53; S215G; 0
FRHGVVVPY

SEQ ID NO: 13083 - protein, 9 aa, Homo sapiens
  Table A; HLA-C*06:02; TP53; S215G; 1
FRHGVVVPY

SEQ ID NO: 13084 - protein, 9 aa, Homo sapiens
  Table A; HLA-C*07:02; TP53; S215G; 1
FRHGVVVPY

SEQ ID NO: 13085 - protein, 9 aa, Homo sapiens
  Table A; HLA-B*27:05; TP53; V216M; 0
FRHSMVVPY

SEQ ID NO: 13086 - protein, 9 aa, Homo sapiens
  Table A; HLA-C*07:02; TP53; V216M; 1
FRHSMVVPY

SEQ ID NO: 13087 - protein, 9 aa, Homo sapiens
  Table A; HLA-C*07:02; TP53; H214R; 1
FRRSVVVPY

SEQ ID NO: 13088 - protein, 9 aa, Homo sapiens
  Table A; HLA-A*02:01; RAC1; P29S; 1
FSGEYIPTV

SEQ ID NO: 13089 - protein, 9 aa, Homo sapiens
  Table A; HLA-A*02:03; RAC1; P29S; 0
FSGEYIPTV

SEQ ID NO: 13090 - protein, 9 aa, Homo sapiens
  Table A; HLA-A*02:04; RAC1; P29S; 0
FSGEYIPTV

SEQ ID NO: 13091 - protein, 9 aa, Homo sapiens
  Table A; HLA-A*02:05; RAC1; P29S; 0
FSGEYIPTV

SEQ ID NO: 13092 - protein, 9 aa, Homo sapiens
  Table A; HLA-A*02:06; RAC1; P29S; 0
FSGEYIPTV

SEQ ID NO: 13093 - protein, 9 aa, Homo sapiens
  Table A; HLA-A*02:07; RAC1; P29S; 0
FSGEYIPTV

SEQ ID NO: 13094 - protein, 9 aa, Homo sapiens
  Table A; HLA-A*30:01; RAC1; P29S; 0
FSGEYIPTV

SEQ ID NO: 13095 - protein, 9 aa, Homo sapiens
  Table A; HLA-A*68:01; RAC1; P29S; 1
FSGEYIPTV

SEQ ID NO: 13096 - protein, 9 aa, Homo sapiens
  Table A; HLA-A*68:02; RAC1; P29S; 0
FSGEYIPTV

SEQ ID NO: 13097 - protein, 9 aa, Homo sapiens
  Table A; HLA-B*13:02; RAC1; P29S; 1
FSGEYIPTV

SEQ ID NO: 13098 - protein, 9 aa, Homo sapiens
  Table A; HLA-B*15:02; RAC1; P29S; 0
FSGEYIPTV

SEQ ID NO: 13099 - protein, 9 aa, Homo sapiens
  Table A; HLA-B*35:02; RAC1; P29S; 0
FSGEYIPTV

SEQ ID NO: 13100 - protein, 9 aa, Homo sapiens
  Table A; HLA-B*35:03; RAC1; P29S; 0
FSGEYIPTV

SEQ ID NO: 13101 - protein, 9 aa, Homo sapiens
  Table A; HLA-B*40:02; RAC1; P29S; 0
FSGEYIPTV

SEQ ID NO: 13102 - protein, 9 aa, Homo sapiens
  Table A; HLA-B*48:01; RAC1; P29S; 0
FSGEYIPTV

SEQ ID NO: 13103 - protein, 9 aa, Homo sapiens
  Table A; HLA-B*49:01; RAC1; P29S; 0
FSGEYIPTV

SEQ ID NO: 13104 - protein, 9 aa, Homo sapiens
  Table A; HLA-B*50:01; RAC1; P29S; 0
FSGEYIPTV

SEQ ID NO: 13105 - protein, 9 aa, Homo sapiens
  Table A; HLA-B*51:01; RAC1; P29S; 1
FSGEYIPTV

SEQ ID NO: 13106 - protein, 9 aa, Homo sapiens
  Table A; HLA-B*54:01; RAC1; P29S; 0
FSGEYIPTV

SEQ ID NO: 13107 - protein, 9 aa, Homo sapiens
  Table A; HLA-B*58:01; RAC1; P29S; 0
FSGEYIPTV

SEQ ID NO: 13108 - protein, 9 aa, Homo sapiens
  Table A; HLA-C*02:02; RAC1; P29S; 1
FSGEYIPTV

SEQ ID NO: 13109 - protein, 9 aa, Homo sapiens
  Table A; HLA-C*08:01; RAC1; P29S; 0
FSGEYIPTV

SEQ ID NO: 13110 - protein, 9 aa, Homo sapiens
  Table A; HLA-C*12:03; RAC1; P29S; 1
FSGEYIPTV

SEQ ID NO: 13111 - protein, 9 aa, Homo sapiens
  Table A; HLA-C*15:02; RAC1; P29S; 1
FSGEYIPTV

SEQ ID NO: 13112 - protein, 9 aa, Homo sapiens
  Table A; HLA-C*16:01; RAC1; P29S; 1
FSGEYIPTV

SEQ ID NO: 13113 - protein, 9 aa, Homo sapiens
  Table A; HLA-C*16:02; RAC1; P29S; 0
FSGEYIPTV

SEQ ID NO: 13114 - protein, 9 aa, Homo sapiens
  Table A; HLA-C*16:04; RAC1; P29S; 0
FSGEYIPTV

SEQ ID NO: 13115 - protein, 10 aa, Homo sapiens
  Table A; HLA-A*02:03; RAC1; P29S; 0
FSGEYIPTVF

SEQ ID NO: 13116 - protein, 10 aa, Homo sapiens
  Table A; HLA-A*26:02; RAC1; P29S; 0
FSGEYIPTVF

SEQ ID NO: 13117 - protein, 10 aa, Homo sapiens
  Table A; HLA-A*30:01; RAC1; P29S; 0
FSGEYIPTVF

SEQ ID NO: 13118 - protein, 10 aa, Homo sapiens
  Table A; HLA-A*68:01; RAC1; P29S; 1
FSGEYIPTVF

SEQ ID NO: 13119 - protein, 10 aa, Homo sapiens
  Table A; HLA-A*68:02; RAC1; P29S; 0
FSGEYIPTVF

SEQ ID NO: 13120 - protein, 10 aa, Homo sapiens
  Table A; HLA-B*15:01; RAC1; P29S; 1
FSGEYIPTVF

SEQ ID NO: 13121 - protein, 10 aa, Homo sapiens
  Table A; HLA-B*27:02; RAC1; P29S; 0
FSGEYIPTVF

SEQ ID NO: 13122 - protein, 10 aa, Homo sapiens
  Table A; HLA-B*35:01; RAC1; P29S; 1
FSGEYIPTVF

SEQ ID NO: 13123 - protein, 10 aa, Homo sapiens
  Table A; HLA-B*40:02; RAC1; P29S; 0
FSGEYIPTVF

SEQ ID NO: 13124 - protein, 10 aa, Homo sapiens
  Table A; HLA-B*44:05; RAC1; P29S; 0
FSGEYIPTVF

SEQ ID NO: 13125 - protein, 10 aa, Homo sapiens
  Table A; HLA-B*48:01; RAC1; P29S; 0
FSGEYIPTVF

SEQ ID NO: 13126 - protein, 10 aa, Homo sapiens
  Table A; HLA-B*57:01; RAC1; P29S; 1
FSGEYIPTVF

SEQ ID NO: 13127 - protein, 10 aa, Homo sapiens
  Table A; HLA-B*58:01; RAC1; P29S; 0
FSGEYIPTVF

SEQ ID NO: 13128 - protein, 10 aa, Homo sapiens
  Table A; HLA-C*02:02; RAC1; P29S; 1
FSGEYIPTVF

SEQ ID NO: 13129 - protein, 10 aa, Homo sapiens
  Table A; HLA-C*08:03; RAC1; P29S; 0
FSGEYIPTVF

SEQ ID NO: 13130 - protein, 10 aa, Homo sapiens
  Table A; HLA-C*12:03; RAC1; P29S; 1
FSGEYIPTVF

SEQ ID NO: 13131 - protein, 10 aa, Homo sapiens
  Table A; HLA-C*16:01; RAC1; P29S; 1
FSGEYIPTVF

SEQ ID NO: 13132 - protein, 10 aa, Homo sapiens
  Table A; HLA-C*17:01; RAC1; P29S; 0
FSGEYIPTVF

SEQ ID NO: 13133 - protein, 10 aa, Homo sapiens
  Table A; HLA-A*01:01; PTPRB; R529Q; 1
FTDLVPGQKY

SEQ ID NO: 13134 - protein, 10 aa, Homo sapiens
  Table A; HLA-A*29:01; PTPRB; R529Q; 0
FTDLVPGQKY

SEQ ID NO: 13135 - protein, 10 aa, Homo sapiens
  Table A; HLA-A*29:02; PTPRB; R529Q; 0
FTDLVPGQKY

SEQ ID NO: 13136 - protein, 10 aa, Homo sapiens
  Table A; HLA-B*35:01; PTPRB; R529Q; 0
FTDLVPGQKY

SEQ ID NO: 13137 - protein, 10 aa, Homo sapiens
  Table A; HLA-B*35:08; PTPRB; R529Q; 0
FTDLVPGQKY

SEQ ID NO: 13138 - protein, 10 aa, Homo sapiens
  Table A; HLA-B*58:01; PTPRB; R529Q; 0
FTDLVPGQKY

SEQ ID NO: 13139 - protein, 10 aa, Homo sapiens
  Table A; HLA-C*03:02; PTPRB; R529Q; 0
FTDLVPGQKY

SEQ ID NO: 13140 - protein, 9 aa, Homo sapiens
  Table A; HLA-A*68:02; STAG2; R370Q; 0
FTSQFKDRI

SEQ ID NO: 13141 - protein, 10 aa, Homo sapiens
  Table A; HLA-A*68:02; STAG2; R370Q; 0
FTSQFKDRIV

SEQ ID NO: 13142 - protein, 10 aa, Homo sapiens
  Table A; HLA-C*15:02; STAG2; R370Q; 0
FTSQFKDRIV

SEQ ID NO: 13143 - protein, 9 aa, Homo sapiens
  Table A; HLA-A*02:04; SPOP; F133L; 0
FVQGKDWGL

SEQ ID NO: 13144 - protein, 9 aa, Homo sapiens
  Table A; HLA-A*02:05; SPOP; F133L; 0
FVQGKDWGL

SEQ ID NO: 13145 - protein, 9 aa, Homo sapiens
  Table A; HLA-A*02:06; SPOP; F133L; 0
FVQGKDWGL

SEQ ID NO: 13146 - protein, 9 aa, Homo sapiens
  Table A; HLA-A*02:08; SPOP; F133L; 0
FVQGKDWGL

SEQ ID NO: 13147 - protein, 9 aa, Homo sapiens
  Table A; HLA-A*02:04; SPOP; F133V; 0
FVQGKDWGV

SEQ ID NO: 13148 - protein, 9 aa, Homo sapiens
  Table A; HLA-A*02:05; SPOP; F133V; 0
FVQGKDWGV

SEQ ID NO: 13149 - protein, 9 aa, Homo sapiens
  Table A; HLA-A*02:06; SPOP; F133V; 0
FVQGKDWGV

SEQ ID NO: 13150 - protein, 9 aa, Homo sapiens
  Table A; HLA-A*02:08; SPOP; F133V; 0
FVQGKDWGV

SEQ ID NO: 13151 - protein, 8 aa, Homo sapiens
  Table A; HLA-A*33:03; DCAF12L2; R378H; 0
FYDIHAQK

SEQ ID NO: 13152 - protein, 8 aa, Homo sapiens
  Table A; HLA-C*04:01; DCAF12L2; R378H; 1
FYDIHAQK

SEQ ID NO: 13153 - protein, 9 aa, Homo sapiens
  Table A; HLA-A*02:07; DCAF12L2; R378H; 0
FYDIHAQKF

SEQ ID NO: 13154 - protein, 9 aa, Homo sapiens
  Table A; HLA-A*23:01; DCAF12L2; R378H; 0
FYDIHAQKF

SEQ ID NO: 13155 - protein, 9 aa, Homo sapiens
  Table A; HLA-A*24:02; DCAF12L2; R378H; 0
FYDIHAQKF

SEQ ID NO: 13156 - protein, 9 aa, Homo sapiens
  Table A; HLA-A*29:02; DCAF12L2; R378H; 0
FYDIHAQKF

SEQ ID NO: 13157 - protein, 9 aa, Homo sapiens
  Table A; HLA-C*04:01; DCAF12L2; R378H; 1
FYDIHAQKF

SEQ ID NO: 13158 - protein, 9 aa, Homo sapiens
  Table A; HLA-C*05:01; DCAF12L2; R378H; 0
FYDIHAQKF

SEQ ID NO: 13159 - protein, 9 aa, Homo sapiens
  Table A; HLA-C*07:02; DCAF12L2; R378H; 1
FYDIHAQKF

SEQ ID NO: 13160 - protein, 9 aa, Homo sapiens
  Table A; HLA-C*08:02; DCAF12L2; R378H; 0
FYDIHAQKF

SEQ ID NO: 13161 - protein, 9 aa, Homo sapiens
  Table A; HLA-C*14:02; DCAF12L2; R378H; 0
FYDIHAQKF

SEQ ID NO: 13162 - protein, 9 aa, Homo sapiens
  Table A; HLA-C*14:03; DCAF12L2; R378H; 0
FYDIHAQKF

SEQ ID NO: 13163 - protein, 10 aa, Homo sapiens
  Table A; HLA-A*02:03; MYCN; P44L; 0
FYFGGPDSTL

SEQ ID NO: 13164 - protein, 10 aa, Homo sapiens
  Table A; HLA-A*23:01; MYCN; P44L; 0
FYFGGPDSTL

SEQ ID NO: 13165 - protein, 10 aa, Homo sapiens
  Table A; HLA-A*24:02; MYCN; P44L; 1
FYFGGPDSTL

SEQ ID NO: 13166 - protein, 10 aa, Homo sapiens
  Table A; HLA-B*35:03; MYCN; P44L; 0
FYFGGPDSTL

SEQ ID NO: 13167 - protein, 10 aa, Homo sapiens
  Table A; HLA-B*48:01; MYCN; P44L; 0
FYFGGPDSTL

SEQ ID NO: 13168 - protein, 10 aa, Homo sapiens
  Table A; HLA-C*03:03; MYCN; P44L; 1
FYFGGPDSTL

SEQ ID NO: 13169 - protein, 10 aa, Homo sapiens
  Table A; HLA-C*03:04; MYCN; P44L; 1
FYFGGPDSTL

SEQ ID NO: 13170 - protein, 10 aa, Homo sapiens
  Table A; HLA-C*14:02; MYCN; P44L; 0
FYFGGPDSTL

SEQ ID NO: 13171 - protein, 10 aa, Homo sapiens
  Table A; HLA-C*14:03; MYCN; P44L; 0
FYFGGPDSTL

SEQ ID NO: 13172 - protein, 9 aa, Homo sapiens
  Table A; HLA-A*24:02; POLE; S297F; 0
FYMIDGQGY

SEQ ID NO: 13173 - protein, 9 aa, Homo sapiens
  Table A; HLA-A*29:01; POLE; S297F; 0
FYMIDGQGY

SEQ ID NO: 13174 - protein, 9 aa, Homo sapiens
  Table A; HLA-A*29:02; POLE; S297F; 0
FYMIDGQGY

SEQ ID NO: 13175 - protein, 9 aa, Homo sapiens
  Table A; HLA-B*15:01; POLE; S297F; 0
FYMIDGQGY

SEQ ID NO: 13176 - protein, 9 aa, Homo sapiens
  Table A; HLA-B*15:02; POLE; S297F; 0
FYMIDGQGY

SEQ ID NO: 13177 - protein, 9 aa, Homo sapiens
  Table A; HLA-B*15:03; POLE; S297F; 0
FYMIDGQGY

SEQ ID NO: 13178 - protein, 9 aa, Homo sapiens
  Table A; HLA-B*35:01; POLE; S297F; 0
FYMIDGQGY

SEQ ID NO: 13179 - protein, 9 aa, Homo sapiens
  Table A; HLA-B*39:01; POLE; S297F; 0
FYMIDGQGY

SEQ ID NO: 13180 - protein, 9 aa, Homo sapiens
  Table A; HLA-C*14:02; POLE; S297F; 0
FYMIDGQGY

SEQ ID NO: 13181 - protein, 9 aa, Homo sapiens
  Table A; HLA-C*14:03; POLE; S297F; 0
FYMIDGQGY

SEQ ID NO: 13182 - protein, 11 aa, Homo sapiens
  Table A; HLA-A*23:01; POLE; S297F; 0
FYMIDGQGYLI

SEQ ID NO: 13183 - protein, 11 aa, Homo sapiens
  Table A; HLA-A*24:02; POLE; S297F; 0
FYMIDGQGYLI

SEQ ID NO: 13184 - protein, 9 aa, Homo sapiens
  Table A; HLA-B*54:01; KRAS; G12A; 0
GAAGVGKSA

SEQ ID NO: 13185 - protein, 9 aa, Homo sapiens
  Table A; HLA-B*56:01; KRAS; G12A; 0
GAAGVGKSA

SEQ ID NO: 13186 - protein, 9 aa, Homo sapiens
  Table A; HLA-C*03:04; KRAS; G12A; 1
GAAGVGKSA

SEQ ID NO: 13187 - protein, 10 aa, Homo sapiens
  Table A; HLA-B*07:02; KRAS; G12A; 1
GAAGVGKSAL

SEQ ID NO: 13188 - protein, 10 aa, Homo sapiens
  Table A; HLA-B*15:01; KRAS; G12A; 1
GAAGVGKSAL

SEQ ID NO: 13189 - protein, 10 aa, Homo sapiens
  Table A; HLA-B*40:01; KRAS; G12A; 1
GAAGVGKSAL

SEQ ID NO: 13190 - protein, 10 aa, Homo sapiens
  Table A; HLA-B*40:02; KRAS; G12A; 0
GAAGVGKSAL

SEQ ID NO: 13191 - protein, 10 aa, Homo sapiens
  Table A; HLA-B*48:01; KRAS; G12A; 0
GAAGVGKSAL

SEQ ID NO: 13192 - protein, 10 aa, Homo sapiens
  Table A; HLA-C*01:02; KRAS; G12A; 1
GAAGVGKSAL

SEQ ID NO: 13193 - protein, 10 aa, Homo sapiens
  Table A; HLA-C*03:03; KRAS; G12A; 1
GAAGVGKSAL

SEQ ID NO: 13194 - protein, 10 aa, Homo sapiens
  Table A; HLA-C*03:04; KRAS; G12A; 1
GAAGVGKSAL

SEQ ID NO: 13195 - protein, 10 aa, Homo sapiens
  Table A; HLA-B*07:02; KRAS; G12C; 1
GACGVGKSAL

SEQ ID NO: 13196 - protein, 10 aa, Homo sapiens
  Table A; HLA-B*48:01; KRAS; G12C; 0
GACGVGKSAL

SEQ ID NO: 13197 - protein, 10 aa, Homo sapiens
  Table A; HLA-C*03:04; KRAS; G12C; 1
GACGVGKSAL

SEQ ID NO: 13198 - protein, 10 aa, Homo sapiens
  Table A; HLA-B*07:02; NRAS; G12C; 1
GACGVGKSAL

SEQ ID NO: 13199 - protein, 10 aa, Homo sapiens
  Table A; HLA-B*15:01; NRAS; G12C; 0
GACGVGKSAL

SEQ ID NO: 13200 - protein, 10 aa, Homo sapiens
  Table A; HLA-B*48:01; NRAS; G12C; 0
GACGVGKSAL

SEQ ID NO: 13201 - protein, 10 aa, Homo sapiens
  Table A; HLA-C*03:04; NRAS; G12C; 1
GACGVGKSAL

SEQ ID NO: 13202 - protein, 10 aa, Homo sapiens
  Table A; HLA-A*02:07; KRAS; G12D; 0
GADGVGKSAL

SEQ ID NO: 13203 - protein, 10 aa, Homo sapiens
  Table A; HLA-B*07:02; KRAS; G12D; 1
GADGVGKSAL

SEQ ID NO: 13204 - protein, 10 aa, Homo sapiens
  Table A; HLA-B*13:01; KRAS; G12D; 0
GADGVGKSAL

SEQ ID NO: 13205 - protein, 10 aa, Homo sapiens
  Table A; HLA-B*15:02; KRAS; G12D; 0
GADGVGKSAL

SEQ ID NO: 13206 - protein, 10 aa, Homo sapiens
  Table A; HLA-B*15:13; KRAS; G12D; 0
GADGVGKSAL

SEQ ID NO: 13207 - protein, 10 aa, Homo sapiens
  Table A; HLA-B*35:02; KRAS; G12D; 1
GADGVGKSAL

SEQ ID NO: 13208 - protein, 10 aa, Homo sapiens
  Table A; HLA-B*35:03; KRAS; G12D; 1
GADGVGKSAL

SEQ ID NO: 13209 - protein, 10 aa, Homo sapiens
  Table A; HLA-B*35:12; KRAS; G12D; 0
GADGVGKSAL

SEQ ID NO: 13210 - protein, 10 aa, Homo sapiens
  Table A; HLA-B*40:01; KRAS; G12D; 1
GADGVGKSAL

SEQ ID NO: 13211 - protein, 10 aa, Homo sapiens
  Table A; HLA-B*48:01; KRAS; G12D; 0
GADGVGKSAL

SEQ ID NO: 13212 - protein, 10 aa, Homo sapiens
  Table A; HLA-C*01:02; KRAS; G12D; 1
GADGVGKSAL

SEQ ID NO: 13213 - protein, 10 aa, Homo sapiens
  Table A; HLA-C*03:03; KRAS; G12D; 1
GADGVGKSAL

SEQ ID NO: 13214 - protein, 10 aa, Homo sapiens
  Table A; HLA-C*03:04; KRAS; G12D; 1
GADGVGKSAL

SEQ ID NO: 13215 - protein, 10 aa, Homo sapiens
  Table A; HLA-C*05:01; KRAS; G12D; 1
GADGVGKSAL

SEQ ID NO: 13216 - protein, 10 aa, Homo sapiens
  Table A; HLA-C*08:01; KRAS; G12D; 0
GADGVGKSAL

SEQ ID NO: 13217 - protein, 10 aa, Homo sapiens
  Table A; HLA-C*08:02; KRAS; G12D; 1
GADGVGKSAL

SEQ ID NO: 13218 - protein, 10 aa, Homo sapiens
  Table A; HLA-A*02:06; NRAS; G12D; 0
GADGVGKSAL

SEQ ID NO: 13219 - protein, 10 aa, Homo sapiens
  Table A; HLA-A*02:07; NRAS; G12D; 0
GADGVGKSAL

SEQ ID NO: 13220 - protein, 10 aa, Homo sapiens
  Table A; HLA-B*07:02; NRAS; G12D; 1
GADGVGKSAL

SEQ ID NO: 13221 - protein, 10 aa, Homo sapiens
  Table A; HLA-B*13:01; NRAS; G12D; 0
GADGVGKSAL

SEQ ID NO: 13222 - protein, 10 aa, Homo sapiens
  Table A; HLA-B*15:01; NRAS; G12D; 1
GADGVGKSAL

SEQ ID NO: 13223 - protein, 10 aa, Homo sapiens
  Table A; HLA-B*15:02; NRAS; G12D; 0
GADGVGKSAL

SEQ ID NO: 13224 - protein, 10 aa, Homo sapiens
  Table A; HLA-B*15:13; NRAS; G12D; 0
GADGVGKSAL

SEQ ID NO: 13225 - protein, 10 aa, Homo sapiens
  Table A; HLA-B*35:02; NRAS; G12D; 0
GADGVGKSAL

SEQ ID NO: 13226 - protein, 10 aa, Homo sapiens
  Table A; HLA-B*35:03; NRAS; G12D; 0
GADGVGKSAL

SEQ ID NO: 13227 - protein, 10 aa, Homo sapiens
  Table A; HLA-B*35:12; NRAS; G12D; 0
GADGVGKSAL

SEQ ID NO: 13228 - protein, 10 aa, Homo sapiens
  Table A; HLA-B*39:01; NRAS; G12D; 0
GADGVGKSAL

SEQ ID NO: 13229 - protein, 10 aa, Homo sapiens
  Table A; HLA-B*40:01; NRAS; G12D; 1
GADGVGKSAL

SEQ ID NO: 13230 - protein, 10 aa, Homo sapiens
  Table A; HLA-B*44:05; NRAS; G12D; 0
GADGVGKSAL

SEQ ID NO: 13231 - protein, 10 aa, Homo sapiens
  Table A; HLA-B*48:01; NRAS; G12D; 0
GADGVGKSAL

SEQ ID NO: 13232 - protein, 10 aa, Homo sapiens
  Table A; HLA-C*01:02; NRAS; G12D; 0
GADGVGKSAL

SEQ ID NO: 13233 - protein, 10 aa, Homo sapiens
  Table A; HLA-C*03:03; NRAS; G12D; 0
GADGVGKSAL

SEQ ID NO: 13234 - protein, 10 aa, Homo sapiens
  Table A; HLA-C*03:04; NRAS; G12D; 1
GADGVGKSAL

SEQ ID NO: 13235 - protein, 10 aa, Homo sapiens
  Table A; HLA-C*05:01; NRAS; G12D; 1
GADGVGKSAL

SEQ ID NO: 13236 - protein, 10 aa, Homo sapiens
  Table A; HLA-C*08:01; NRAS; G12D; 0
GADGVGKSAL

SEQ ID NO: 13237 - protein, 10 aa, Homo sapiens
  Table A; HLA-C*08:02; NRAS; G12D; 0
GADGVGKSAL

SEQ ID NO: 13238 - protein, 10 aa, Homo sapiens
  Table A; HLA-B*07:02; KRAS; G13D; 1
GAGDVGKSAL

SEQ ID NO: 13239 - protein, 10 aa, Homo sapiens
  Table A; HLA-B*48:01; KRAS; G13D; 0
GAGDVGKSAL

SEQ ID NO: 13240 - protein, 10 aa, Homo sapiens
  Table A; HLA-C*01:02; KRAS; G13D; 1
GAGDVGKSAL

SEQ ID NO: 13241 - protein, 10 aa, Homo sapiens
  Table A; HLA-A*30:01; KRAS; G12R; 1
GARGVGKSAL

SEQ ID NO: 13242 - protein, 10 aa, Homo sapiens
  Table A; HLA-B*07:02; KRAS; G12R; 1
GARGVGKSAL

SEQ ID NO: 13243 - protein, 8 aa, Homo sapiens
  Table A; HLA-B*15:01; CDKN2A; D108Y; 1
GARLDVRY

SEQ ID NO: 13244 - protein, 8 aa, Homo sapiens
  Table A; HLA-B*57:01; CDKN2A; D108Y; 0
GARLDVRY

SEQ ID NO: 13245 - protein, 10 aa, Homo sapiens
  Table A; HLA-B*57:01; CDKN2A; D108Y; 0
GARLDVRYAW

SEQ ID NO: 13246 - protein, 11 aa, Homo sapiens
  Table A; HLA-C*16:01; DNAJB1; E18K; 0
GASDKEIKRAY

SEQ ID NO: 13247 - protein, 9 aa, Homo sapiens
  Table A; HLA-C*03:04; KRAS; G12S; 1
GASGVGKSA

SEQ ID NO: 13248 - protein, 10 aa, Homo sapiens
  Table A; HLA-B*07:02; KRAS; G12S; 1
GASGVGKSAL

SEQ ID NO: 13249 - protein, 10 aa, Homo sapiens
  Table A; HLA-B*15:01; KRAS; G12S; 1
GASGVGKSAL

SEQ ID NO: 13250 - protein, 10 aa, Homo sapiens
  Table A; HLA-B*40:01; KRAS; G12S; 1
GASGVGKSAL

SEQ ID NO: 13251 - protein, 10 aa, Homo sapiens
  Table A; HLA-B*48:01; KRAS; G12S; 0
GASGVGKSAL

SEQ ID NO: 13252 - protein, 10 aa, Homo sapiens
  Table A; HLA-C*01:02; KRAS; G12S; 0
GASGVGKSAL

SEQ ID NO: 13253 - protein, 10 aa, Homo sapiens
  Table A; HLA-C*03:04; KRAS; G12S; 1
GASGVGKSAL

SEQ ID NO: 13254 - protein, 9 aa, Homo sapiens
  Table A; HLA-A*02:01; CTNNB1; T41A; 1
GATATAPSL

SEQ ID NO: 13255 - protein, 9 aa, Homo sapiens
  Table A; HLA-A*02:04; CTNNB1; T41A; 0
GATATAPSL

SEQ ID NO: 13256 - protein, 9 aa, Homo sapiens
  Table A; HLA-A*02:05; CTNNB1; T41A; 0
GATATAPSL

SEQ ID NO: 13257 - protein, 9 aa, Homo sapiens
  Table A; HLA-A*02:06; CTNNB1; T41A; 0
GATATAPSL

SEQ ID NO: 13258 - protein, 9 aa, Homo sapiens
  Table A; HLA-A*11:01; CTNNB1; T41A; 1
GATATAPSL

SEQ ID NO: 13259 - protein, 9 aa, Homo sapiens
  Table A; HLA-A*30:01; CTNNB1; T41A; 1
GATATAPSL

SEQ ID NO: 13260 - protein, 9 aa, Homo sapiens
  Table A; HLA-A*68:02; CTNNB1; T41A; 0
GATATAPSL

SEQ ID NO: 13261 - protein, 9 aa, Homo sapiens
  Table A; HLA-B*07:02; CTNNB1; T41A; 1
GATATAPSL

SEQ ID NO: 13262 - protein, 9 aa, Homo sapiens
  Table A; HLA-B*13:01; CTNNB1; T41A; 0
GATATAPSL

SEQ ID NO: 13263 - protein, 9 aa, Homo sapiens
  Table A; HLA-B*13:02; CTNNB1; T41A; 1
GATATAPSL

SEQ ID NO: 13264 - protein, 9 aa, Homo sapiens
  Table A; HLA-B*15:01; CTNNB1; T41A; 1
GATATAPSL

SEQ ID NO: 13265 - protein, 9 aa, Homo sapiens
  Table A; HLA-B*15:02; CTNNB1; T41A; 0
GATATAPSL

SEQ ID NO: 13266 - protein, 9 aa, Homo sapiens
  Table A; HLA-B*15:10; CTNNB1; T41A; 0
GATATAPSL

SEQ ID NO: 13267 - protein, 9 aa, Homo sapiens
  Table A; HLA-B*15:13; CTNNB1; T41A; 0
GATATAPSL

SEQ ID NO: 13268 - protein, 9 aa, Homo sapiens
  Table A; HLA-B*35:01; CTNNB1; T41A; 1
GATATAPSL

SEQ ID NO: 13269 - protein, 9 aa, Homo sapiens
  Table A; HLA-B*35:02; CTNNB1; T41A; 1
GATATAPSL

SEQ ID NO: 13270 - protein, 9 aa, Homo sapiens
  Table A; HLA-B*35:03; CTNNB1; T41A; 1
GATATAPSL

SEQ ID NO: 13271 - protein, 9 aa, Homo sapiens
  Table A; HLA-B*35:12; CTNNB1; T41A; 0
GATATAPSL

SEQ ID NO: 13272 - protein, 9 aa, Homo sapiens
  Table A; HLA-B*38:01; CTNNB1; T41A; 1
GATATAPSL

SEQ ID NO: 13273 - protein, 9 aa, Homo sapiens
  Table A; HLA-B*39:01; CTNNB1; T41A; 1
GATATAPSL

SEQ ID NO: 13274 - protein, 9 aa, Homo sapiens
  Table A; HLA-B*40:01; CTNNB1; T41A; 1
GATATAPSL

SEQ ID NO: 13275 - protein, 9 aa, Homo sapiens
  Table A; HLA-B*40:02; CTNNB1; T41A; 1
GATATAPSL

SEQ ID NO: 13276 - protein, 9 aa, Homo sapiens
  Table A; HLA-B*41:02; CTNNB1; T41A; 0
GATATAPSL

SEQ ID NO: 13277 - protein, 9 aa, Homo sapiens
  Table A; HLA-B*44:05; CTNNB1; T41A; 0
GATATAPSL

SEQ ID NO: 13278 - protein, 9 aa, Homo sapiens
  Table A; HLA-B*46:01; CTNNB1; T41A; 0
GATATAPSL

SEQ ID NO: 13279 - protein, 9 aa, Homo sapiens
  Table A; HLA-B*48:01; CTNNB1; T41A; 0
GATATAPSL

SEQ ID NO: 13280 - protein, 9 aa, Homo sapiens
  Table A; HLA-B*51:01; CTNNB1; T41A; 1
GATATAPSL

SEQ ID NO: 13281 - protein, 9 aa, Homo sapiens
  Table A; HLA-B*58:01; CTNNB1; T41A; 0
GATATAPSL

SEQ ID NO: 13282 - protein, 9 aa, Homo sapiens
  Table A; HLA-C*02:02; CTNNB1; T41A; 1
GATATAPSL

SEQ ID NO: 13283 - protein, 9 aa, Homo sapiens
  Table A; HLA-C*03:03; CTNNB1; T41A; 1
GATATAPSL

SEQ ID NO: 13284 - protein, 9 aa, Homo sapiens
  Table A; HLA-C*03:04; CTNNB1; T41A; 1
GATATAPSL

SEQ ID NO: 13285 - protein, 9 aa, Homo sapiens
  Table A; HLA-C*08:01; CTNNB1; T41A; 0
GATATAPSL

SEQ ID NO: 13286 - protein, 9 aa, Homo sapiens
  Table A; HLA-C*08:03; CTNNB1; T41A; 0
GATATAPSL

SEQ ID NO: 13287 - protein, 9 aa, Homo sapiens
  Table A; HLA-C*12:03; CTNNB1; T41A; 1
GATATAPSL

SEQ ID NO: 13288 - protein, 9 aa, Homo sapiens
  Table A; HLA-C*15:02; CTNNB1; T41A; 1
GATATAPSL

SEQ ID NO: 13289 - protein, 9 aa, Homo sapiens
  Table A; HLA-C*16:01; CTNNB1; T41A; 1
GATATAPSL

SEQ ID NO: 13290 - protein, 9 aa, Homo sapiens
  Table A; HLA-C*16:02; CTNNB1; T41A; 0
GATATAPSL

SEQ ID NO: 13291 - protein, 9 aa, Homo sapiens
  Table A; HLA-C*16:04; CTNNB1; T41A; 0
GATATAPSL

SEQ ID NO: 13292 - protein, 9 aa, Homo sapiens
  Table A; HLA-C*17:01; CTNNB1; T41A; 0
GATATAPSL

SEQ ID NO: 13293 - protein, 10 aa, Homo sapiens
  Table A; HLA-B*48:01; CTNNB1; T41A; 0
GATATAPSLS

SEQ ID NO: 13294 - protein, 9 aa, Homo sapiens
  Table A; HLA-A*02:01; CTNNB1; T41I; 1
GATITAPSL

SEQ ID NO: 13295 - protein, 9 aa, Homo sapiens
  Table A; HLA-A*02:04; CTNNB1; T41I; 0
GATITAPSL

SEQ ID NO: 13296 - protein, 9 aa, Homo sapiens
  Table A; HLA-A*02:05; CTNNB1; T41I; 0
GATITAPSL

SEQ ID NO: 13297 - protein, 9 aa, Homo sapiens
  Table A; HLA-A*02:06; CTNNB1; T41I; 0
GATITAPSL

SEQ ID NO: 13298 - protein, 9 aa, Homo sapiens
  Table A; HLA-A*30:01; CTNNB1; T41I; 0
GATITAPSL

SEQ ID NO: 13299 - protein, 9 aa, Homo sapiens
  Table A; HLA-B*07:02; CTNNB1; T41I; 1
GATITAPSL

SEQ ID NO: 13300 - protein, 9 aa, Homo sapiens
  Table A; HLA-B*13:02; CTNNB1; T41I; 0
GATITAPSL

SEQ ID NO: 13301 - protein, 9 aa, Homo sapiens
  Table A; HLA-B*15:01; CTNNB1; T41I; 1
GATITAPSL

SEQ ID NO: 13302 - protein, 9 aa, Homo sapiens
  Table A; HLA-B*15:10; CTNNB1; T41I; 0
GATITAPSL

SEQ ID NO: 13303 - protein, 9 aa, Homo sapiens
  Table A; HLA-B*35:01; CTNNB1; T41I; 1
GATITAPSL

SEQ ID NO: 13304 - protein, 9 aa, Homo sapiens
  Table A; HLA-B*35:02; CTNNB1; T41I; 0
GATITAPSL

SEQ ID NO: 13305 - protein, 9 aa, Homo sapiens
  Table A; HLA-B*35:03; CTNNB1; T41I; 0
GATITAPSL

SEQ ID NO: 13306 - protein, 9 aa, Homo sapiens
  Table A; HLA-B*39:01; CTNNB1; T41I; 0
GATITAPSL

SEQ ID NO: 13307 - protein, 9 aa, Homo sapiens
  Table A; HLA-B*40:01; CTNNB1; T41I; 1
GATITAPSL

SEQ ID NO: 13308 - protein, 9 aa, Homo sapiens
  Table A; HLA-B*40:02; CTNNB1; T41I; 0
GATITAPSL

SEQ ID NO: 13309 - protein, 9 aa, Homo sapiens
  Table A; HLA-B*41:02; CTNNB1; T41I; 0
GATITAPSL

SEQ ID NO: 13310 - protein, 9 aa, Homo sapiens
  Table A; HLA-B*44:05; CTNNB1; T41I; 0
GATITAPSL

SEQ ID NO: 13311 - protein, 9 aa, Homo sapiens
  Table A; HLA-B*46:01; CTNNB1; T41I; 0
GATITAPSL

SEQ ID NO: 13312 - protein, 9 aa, Homo sapiens
  Table A; HLA-B*48:01; CTNNB1; T41I; 0
GATITAPSL

SEQ ID NO: 13313 - protein, 9 aa, Homo sapiens
  Table A; HLA-B*58:01; CTNNB1; T41I; 0
GATITAPSL

SEQ ID NO: 13314 - protein, 9 aa, Homo sapiens
  Table A; HLA-C*03:03; CTNNB1; T41I; 1
GATITAPSL

SEQ ID NO: 13315 - protein, 9 aa, Homo sapiens
  Table A; HLA-C*03:04; CTNNB1; T41I; 1
GATITAPSL

SEQ ID NO: 13316 - protein, 9 aa, Homo sapiens
  Table A; HLA-C*08:01; CTNNB1; T41I; 0
GATITAPSL

SEQ ID NO: 13317 - protein, 9 aa, Homo sapiens
  Table A; HLA-C*08:03; CTNNB1; T41I; 0
GATITAPSL

SEQ ID NO: 13318 - protein, 9 aa, Homo sapiens
  Table A; HLA-C*16:01; CTNNB1; T41I; 1
GATITAPSL

SEQ ID NO: 13319 - protein, 9 aa, Homo sapiens
  Table A; HLA-C*16:02; CTNNB1; T41I; 0
GATITAPSL

SEQ ID NO: 13320 - protein, 9 aa, Homo sapiens
  Table A; HLA-C*17:01; CTNNB1; T41I; 0
GATITAPSL

SEQ ID NO: 13321 - protein, 9 aa, Homo sapiens
  Table A; HLA-A*02:01; CTNNB1; S45F; 1
GATTTAPFL

SEQ ID NO: 13322 - protein, 9 aa, Homo sapiens
  Table A; HLA-A*02:04; CTNNB1; S45F; 0
GATTTAPFL

SEQ ID NO: 13323 - protein, 9 aa, Homo sapiens
  Table A; HLA-A*02:05; CTNNB1; S45F; 0
GATTTAPFL

SEQ ID NO: 13324 - protein, 9 aa, Homo sapiens
  Table A; HLA-A*02:06; CTNNB1; S45F; 0
GATTTAPFL

SEQ ID NO: 13325 - protein, 9 aa, Homo sapiens
  Table A; HLA-A*11:01; CTNNB1; S45F; 1
GATTTAPFL

SEQ ID NO: 13326 - protein, 9 aa, Homo sapiens
  Table A; HLA-A*30:01; CTNNB1; S45F; 0
GATTTAPFL

SEQ ID NO: 13327 - protein, 9 aa, Homo sapiens
  Table A; HLA-A*68:02; CTNNB1; S45F; 0
GATTTAPFL

SEQ ID NO: 13328 - protein, 9 aa, Homo sapiens
  Table A; HLA-B*13:02; CTNNB1; S45F; 0
GATTTAPFL

SEQ ID NO: 13329 - protein, 9 aa, Homo sapiens
  Table A; HLA-B*15:10; CTNNB1; S45F; 0
GATTTAPFL

SEQ ID NO: 13330 - protein, 9 aa, Homo sapiens
  Table A; HLA-B*27:05; CTNNB1; S45F; 0
GATTTAPFL

SEQ ID NO: 13331 - protein, 9 aa, Homo sapiens
  Table A; HLA-B*35:01; CTNNB1; S45F; 1
GATTTAPFL

SEQ ID NO: 13332 - protein, 9 aa, Homo sapiens
  Table A; HLA-B*35:03; CTNNB1; S45F; 0
GATTTAPFL

SEQ ID NO: 13333 - protein, 9 aa, Homo sapiens
  Table A; HLA-B*38:01; CTNNB1; S45F; 0
GATTTAPFL

SEQ ID NO: 13334 - protein, 9 aa, Homo sapiens
  Table A; HLA-B*39:01; CTNNB1; S45F; 0
GATTTAPFL

SEQ ID NO: 13335 - protein, 9 aa, Homo sapiens
  Table A; HLA-B*40:01; CTNNB1; S45F; 1
GATTTAPFL

SEQ ID NO: 13336 - protein, 9 aa, Homo sapiens
  Table A; HLA-B*40:02; CTNNB1; S45F; 0
GATTTAPFL

SEQ ID NO: 13337 - protein, 9 aa, Homo sapiens
  Table A; HLA-B*44:05; CTNNB1; S45F; 0
GATTTAPFL

SEQ ID NO: 13338 - protein, 9 aa, Homo sapiens
  Table A; HLA-B*48:01; CTNNB1; S45F; 0
GATTTAPFL

SEQ ID NO: 13339 - protein, 9 aa, Homo sapiens
  Table A; HLA-B*50:01; CTNNB1; S45F; 0
GATTTAPFL

SEQ ID NO: 13340 - protein, 9 aa, Homo sapiens
  Table A; HLA-B*58:01; CTNNB1; S45F; 0
GATTTAPFL

SEQ ID NO: 13341 - protein, 9 aa, Homo sapiens
  Table A; HLA-C*03:03; CTNNB1; S45F; 1
GATTTAPFL

SEQ ID NO: 13342 - protein, 9 aa, Homo sapiens
  Table A; HLA-C*03:04; CTNNB1; S45F; 1
GATTTAPFL

SEQ ID NO: 13343 - protein, 9 aa, Homo sapiens
  Table A; HLA-C*08:01; CTNNB1; S45F; 0
GATTTAPFL

SEQ ID NO: 13344 - protein, 9 aa, Homo sapiens
  Table A; HLA-C*08:03; CTNNB1; S45F; 0
GATTTAPFL

SEQ ID NO: 13345 - protein, 9 aa, Homo sapiens
  Table A; HLA-C*16:01; CTNNB1; S45F; 0
GATTTAPFL

SEQ ID NO: 13346 - protein, 9 aa, Homo sapiens
  Table A; HLA-C*16:02; CTNNB1; S45F; 0
GATTTAPFL

SEQ ID NO: 13347 - protein, 9 aa, Homo sapiens
  Table A; HLA-C*17:01; CTNNB1; S45F; 0
GATTTAPFL

SEQ ID NO: 13348 - protein, 9 aa, Homo sapiens
  Table A; HLA-A*02:06; CTNNB1; S45P; 0
GATTTAPPL

SEQ ID NO: 13349 - protein, 9 aa, Homo sapiens
  Table A; HLA-A*11:01; CTNNB1; S45P; 1
GATTTAPPL

SEQ ID NO: 13350 - protein, 9 aa, Homo sapiens
  Table A; HLA-A*30:01; CTNNB1; S45P; 1
GATTTAPPL

SEQ ID NO: 13351 - protein, 9 aa, Homo sapiens
  Table A; HLA-A*31:01; CTNNB1; S45P; 1
GATTTAPPL

SEQ ID NO: 13352 - protein, 9 aa, Homo sapiens
  Table A; HLA-A*68:01; CTNNB1; S45P; 1
GATTTAPPL

SEQ ID NO: 13353 - protein, 9 aa, Homo sapiens
  Table A; HLA-A*68:02; CTNNB1; S45P; 0
GATTTAPPL

SEQ ID NO: 13354 - protein, 9 aa, Homo sapiens
  Table A; HLA-B*07:02; CTNNB1; S45P; 1
GATTTAPPL

SEQ ID NO: 13355 - protein, 9 aa, Homo sapiens
  Table A; HLA-B*13:02; CTNNB1; S45P; 1
GATTTAPPL

SEQ ID NO: 13356 - protein, 9 aa, Homo sapiens
  Table A; HLA-B*15:01; CTNNB1; S45P; 1
GATTTAPPL

SEQ ID NO: 13357 - protein, 9 aa, Homo sapiens
  Table A; HLA-B*15:10; CTNNB1; S45P; 0
GATTTAPPL

SEQ ID NO: 13358 - protein, 9 aa, Homo sapiens
  Table A; HLA-B*35:01; CTNNB1; S45P; 1
GATTTAPPL

SEQ ID NO: 13359 - protein, 9 aa, Homo sapiens
  Table A; HLA-B*35:02; CTNNB1; S45P; 0
GATTTAPPL

SEQ ID NO: 13360 - protein, 9 aa, Homo sapiens
  Table A; HLA-B*35:03; CTNNB1; S45P; 1
GATTTAPPL

SEQ ID NO: 13361 - protein, 9 aa, Homo sapiens
  Table A; HLA-B*35:12; CTNNB1; S45P; 0
GATTTAPPL

SEQ ID NO: 13362 - protein, 9 aa, Homo sapiens
  Table A; HLA-B*39:01; CTNNB1; S45P; 0
GATTTAPPL

SEQ ID NO: 13363 - protein, 9 aa, Homo sapiens
  Table A; HLA-B*40:01; CTNNB1; S45P; 1
GATTTAPPL

SEQ ID NO: 13364 - protein, 9 aa, Homo sapiens
  Table A; HLA-B*40:02; CTNNB1; S45P; 0
GATTTAPPL

SEQ ID NO: 13365 - protein, 9 aa, Homo sapiens
  Table A; HLA-B*44:05; CTNNB1; S45P; 0
GATTTAPPL

SEQ ID NO: 13366 - protein, 9 aa, Homo sapiens
  Table A; HLA-B*46:01; CTNNB1; S45P; 0
GATTTAPPL

SEQ ID NO: 13367 - protein, 9 aa, Homo sapiens
  Table A; HLA-B*48:01; CTNNB1; S45P; 0
GATTTAPPL

SEQ ID NO: 13368 - protein, 9 aa, Homo sapiens
  Table A; HLA-B*58:01; CTNNB1; S45P; 0
GATTTAPPL

SEQ ID NO: 13369 - protein, 9 aa, Homo sapiens
  Table A; HLA-C*03:03; CTNNB1; S45P; 1
GATTTAPPL

SEQ ID NO: 13370 - protein, 9 aa, Homo sapiens
  Table A; HLA-C*03:04; CTNNB1; S45P; 1
GATTTAPPL

SEQ ID NO: 13371 - protein, 9 aa, Homo sapiens
  Table A; HLA-C*08:01; CTNNB1; S45P; 0
GATTTAPPL

SEQ ID NO: 13372 - protein, 9 aa, Homo sapiens
  Table A; HLA-C*08:03; CTNNB1; S45P; 0
GATTTAPPL

SEQ ID NO: 13373 - protein, 9 aa, Homo sapiens
  Table A; HLA-C*17:01; CTNNB1; S45P; 0
GATTTAPPL

SEQ ID NO: 13374 - protein, 9 aa, Homo sapiens
  Table A; HLA-A*02:05; KRAS; G12V; 1
GAVGVGKSA

SEQ ID NO: 13375 - protein, 9 aa, Homo sapiens
  Table A; HLA-B*54:01; KRAS; G12V; 0
GAVGVGKSA

SEQ ID NO: 13376 - protein, 9 aa, Homo sapiens
  Table A; HLA-B*56:01; KRAS; G12V; 1
GAVGVGKSA

SEQ ID NO: 13377 - protein, 9 aa, Homo sapiens
  Table A; HLA-C*03:04; KRAS; G12V; 1
GAVGVGKSA

SEQ ID NO: 13378 - protein, 10 aa, Homo sapiens
  Table A; HLA-A*02:06; KRAS; G12V; 1
GAVGVGKSAL

SEQ ID NO: 13379 - protein, 10 aa, Homo sapiens
  Table A; HLA-B*07:02; KRAS; G12V; 1
GAVGVGKSAL

SEQ ID NO: 13380 - protein, 10 aa, Homo sapiens
  Table A; HLA-B*15:01; KRAS; G12V; 1
GAVGVGKSAL

SEQ ID NO: 13381 - protein, 10 aa, Homo sapiens
  Table A; HLA-B*40:01; KRAS; G12V; 1
GAVGVGKSAL

SEQ ID NO: 13382 - protein, 10 aa, Homo sapiens
  Table A; HLA-B*40:02; KRAS; G12V; 1
GAVGVGKSAL

SEQ ID NO: 13383 - protein, 10 aa, Homo sapiens
  Table A; HLA-B*48:01; KRAS; G12V; 0
GAVGVGKSAL

SEQ ID NO: 13384 - protein, 10 aa, Homo sapiens
  Table A; HLA-C*03:03; KRAS; G12V; 1
GAVGVGKSAL

SEQ ID NO: 13385 - protein, 10 aa, Homo sapiens
  Table A; HLA-C*03:04; KRAS; G12V; 1
GAVGVGKSAL

SEQ ID NO: 13386 - protein, 10 aa, Homo sapiens
  Table A; HLA-C*08:01; KRAS; G12V; 0
GAVGVGKSAL

SEQ ID NO: 13387 - protein, 9 aa, Homo sapiens
  Table A; HLA-B*15:01; IDH1; R132C; 1
GCHAYGDQY

SEQ ID NO: 13388 - protein, 10 aa, Homo sapiens
  Table A; HLA-B*13:02; KRAS; G13C; 0
GCVGKSALTI

SEQ ID NO: 13389 - protein, 9 aa, Homo sapiens
  Table A; HLA-A*11:01; BRAF; V600E; 1
GDFGLATEK

SEQ ID NO: 13390 - protein, 9 aa, Homo sapiens
  Table A; HLA-B*27:02; BRAF; V600E; 1
GDFGLATEK

SEQ ID NO: 13391 - protein, 8 aa, Homo sapiens
  Table A; HLA-B*40:02; NFE2L2; E82D; 0
GDFLPIQP

SEQ ID NO: 13392 - protein, 8 aa, Homo sapiens
  Table A; HLA-B*40:06; NFE2L2; E82D; 0
GDFLPIQP

SEQ ID NO: 13393 - protein, 8 aa, Homo sapiens
  Table A; HLA-B*48:01; NFE2L2; E82D; 0
GDFLPIQP

SEQ ID NO: 13394 - protein, 9 aa, Homo sapiens
  Table A; HLA-A*02:05; NFE2L2; E82D; 0
GDFLPIQPA

SEQ ID NO: 13395 - protein, 9 aa, Homo sapiens
  Table A; HLA-B*40:02; NFE2L2; E82D; 0
GDFLPIQPA

SEQ ID NO: 13396 - protein, 9 aa, Homo sapiens
  Table A; HLA-B*40:06; NFE2L2; E82D; 0
GDFLPIQPA

SEQ ID NO: 13397 - protein, 9 aa, Homo sapiens
  Table A; HLA-B*50:01; NFE2L2; E82D; 0
GDFLPIQPA

SEQ ID NO: 13398 - protein, 9 aa, Homo sapiens
  Table A; HLA-A*03:01; PTPRT; E324K; 1
GDGPIILKK

SEQ ID NO: 13399 - protein, 9 aa, Homo sapiens
  Table A; HLA-A*11:01; PTPRT; E324K; 1
GDGPIILKK

SEQ ID NO: 13400 - protein, 9 aa, Homo sapiens
  Table A; HLA-B*27:02; PTPRT; E324K; 0
GDGPIILKK

SEQ ID NO: 13401 - protein, 9 aa, Homo sapiens
  Table A; HLA-B*37:01; TP53; G245D; 0
GDMNRRPIL

SEQ ID NO: 13402 - protein, 9 aa, Homo sapiens
  Table A; HLA-B*41:02; TP53; G245D; 0
GDMNRRPIL

SEQ ID NO: 13403 - protein, 11 aa, Homo sapiens
  Table A; HLA-B*40:02; ARHGEF12; R705H; 0
GDTLDGTPHTL

SEQ ID NO: 13404 - protein, 8 aa, Homo sapiens
  Table A; HLA-B*07:02; KRAS; G13D; 1
GDVGKSAL

SEQ ID NO: 13405 - protein, 8 aa, Homo sapiens
  Table A; HLA-B*40:02; KRAS; G13D; 0
GDVGKSAL

SEQ ID NO: 13406 - protein, 8 aa, Homo sapiens
  Table A; HLA-B*41:02; KRAS; G13D; 0
GDVGKSAL

SEQ ID NO: 13407 - protein, 8 aa, Homo sapiens
  Table A; HLA-B*48:01; KRAS; G13D; 0
GDVGKSAL

SEQ ID NO: 13408 - protein, 9 aa, Homo sapiens
  Table A; HLA-C*08:03; KRAS; G13D; 0
GDVGKSALT

SEQ ID NO: 13409 - protein, 10 aa, Homo sapiens
  Table A; HLA-B*13:02; KRAS; G13D; 1
GDVGKSALTI

SEQ ID NO: 13410 - protein, 10 aa, Homo sapiens
  Table A; HLA-B*40:02; KRAS; G13D; 0
GDVGKSALTI

SEQ ID NO: 13411 - protein, 8 aa, Homo sapiens
  Table A; HLA-B*49:01; PTPRD; R561Q; 0
GEEQQITI

SEQ ID NO: 13412 - protein, 8 aa, Homo sapiens
  Table A; HLA-B*40:01; NFE2L2; D77G; 0
GEETGEFL

SEQ ID NO: 13413 - protein, 8 aa, Homo sapiens
  Table A; HLA-B*40:02; NFE2L2; D77G; 0
GEETGEFL

SEQ ID NO: 13414 - protein, 10 aa, Homo sapiens
  Table A; HLA-B*40:01; NFE2L2; D77G; 0
GEETGEFLPI

SEQ ID NO: 13415 - protein, 10 aa, Homo sapiens
  Table A; HLA-B*40:02; NFE2L2; D77G; 0
GEETGEFLPI

SEQ ID NO: 13416 - protein, 10 aa, Homo sapiens
  Table A; HLA-B*44:05; NFE2L2; D77G; 0
GEETGEFLPI

SEQ ID NO: 13417 - protein, 10 aa, Homo sapiens
  Table A; HLA-B*49:01; NFE2L2; D77G; 0
GEETGEFLPI

SEQ ID NO: 13418 - protein, 9 aa, Homo sapiens
  Table A; HLA-B*13:01; PTPRD; R561Q; 0
GEHGEEQQI

SEQ ID NO: 13419 - protein, 9 aa, Homo sapiens
  Table A; HLA-B*40:01; PTPRD; R561Q; 0
GEHGEEQQI

SEQ ID NO: 13420 - protein, 9 aa, Homo sapiens
  Table A; HLA-B*40:02; PTPRD; R561Q; 0
GEHGEEQQI

SEQ ID NO: 13421 - protein, 9 aa, Homo sapiens
  Table A; HLA-B*41:02; PTPRD; R561Q; 0
GEHGEEQQI

SEQ ID NO: 13422 - protein, 9 aa, Homo sapiens
  Table A; HLA-B*44:03; PTPRD; R561Q; 0
GEHGEEQQI

SEQ ID NO: 13423 - protein, 9 aa, Homo sapiens
  Table A; HLA-B*44:05; PTPRD; R561Q; 0
GEHGEEQQI

SEQ ID NO: 13424 - protein, 9 aa, Homo sapiens
  Table A; HLA-B*49:01; PTPRD; R561Q; 0
GEHGEEQQI

SEQ ID NO: 13425 - protein, 11 aa, Homo sapiens
  Table A; HLA-B*40:01; PTPRD; R561Q; 0
GEHGEEQQITI

SEQ ID NO: 13426 - protein, 11 aa, Homo sapiens
  Table A; HLA-B*40:02; PTPRD; R561Q; 0
GEHGEEQQITI

SEQ ID NO: 13427 - protein, 11 aa, Homo sapiens
  Table A; HLA-B*44:05; PTPRD; R561Q; 0
GEHGEEQQITI

SEQ ID NO: 13428 - protein, 11 aa, Homo sapiens
  Table A; HLA-B*49:01; PTPRD; R561Q; 0
GEHGEEQQITI

SEQ ID NO: 13429 - protein, 9 aa, Homo sapiens
  Table A; HLA-A*02:05; CTCF; R377H; 0
GEHPFQCSL

SEQ ID NO: 13430 - protein, 9 aa, Homo sapiens
  Table A; HLA-A*02:08; CTCF; R377H; 0
GEHPFQCSL

SEQ ID NO: 13431 - protein, 9 aa, Homo sapiens
  Table A; HLA-A*30:01; CTCF; R377H; 0
GEHPFQCSL

SEQ ID NO: 13432 - protein, 9 aa, Homo sapiens
  Table A; HLA-B*07:02; CTCF; R377H; 1
GEHPFQCSL

SEQ ID NO: 13433 - protein, 9 aa, Homo sapiens
  Table A; HLA-B*14:02; CTCF; R377H; 0
GEHPFQCSL

SEQ ID NO: 13434 - protein, 9 aa, Homo sapiens
  Table A; HLA-B*15:10; CTCF; R377H; 0
GEHPFQCSL

SEQ ID NO: 13435 - protein, 9 aa, Homo sapiens
  Table A; HLA-B*18:01; CTCF; R377H; 1
GEHPFQCSL

SEQ ID NO: 13436 - protein, 9 aa, Homo sapiens
  Table A; HLA-B*37:01; CTCF; R377H; 0
GEHPFQCSL

SEQ ID NO: 13437 - protein, 9 aa, Homo sapiens
  Table A; HLA-B*40:01; CTCF; R377H; 1
GEHPFQCSL

SEQ ID NO: 13438 - protein, 9 aa, Homo sapiens
  Table A; HLA-B*40:02; CTCF; R377H; 0
GEHPFQCSL

SEQ ID NO: 13439 - protein, 9 aa, Homo sapiens
  Table A; HLA-B*40:06; CTCF; R377H; 0
GEHPFQCSL

SEQ ID NO: 13440 - protein, 9 aa, Homo sapiens
  Table A; HLA-B*41:02; CTCF; R377H; 0
GEHPFQCSL

SEQ ID NO: 13441 - protein, 9 aa, Homo sapiens
  Table A; HLA-B*44:02; CTCF; R377H; 1
GEHPFQCSL

SEQ ID NO: 13442 - protein, 9 aa, Homo sapiens
  Table A; HLA-B*44:03; CTCF; R377H; 1
GEHPFQCSL

SEQ ID NO: 13443 - protein, 9 aa, Homo sapiens
  Table A; HLA-B*44:05; CTCF; R377H; 0
GEHPFQCSL

SEQ ID NO: 13444 - protein, 9 aa, Homo sapiens
  Table A; HLA-B*48:01; CTCF; R377H; 0
GEHPFQCSL

SEQ ID NO: 13445 - protein, 9 aa, Homo sapiens
  Table A; HLA-B*49:01; CTCF; R377H; 0
GEHPFQCSL

SEQ ID NO: 13446 - protein, 9 aa, Homo sapiens
  Table A; HLA-B*50:01; CTCF; R377H; 0
GEHPFQCSL

SEQ ID NO: 13447 - protein, 9 aa, Homo sapiens
  Table A; HLA-A*30:01; MAX; R60Q; 0
GEKASQAQI

SEQ ID NO: 13448 - protein, 9 aa, Homo sapiens
  Table A; HLA-B*40:01; MAX; R60Q; 1
GEKASQAQI

SEQ ID NO: 13449 - protein, 9 aa, Homo sapiens
  Table A; HLA-B*40:02; MAX; R60Q; 0
GEKASQAQI

SEQ ID NO: 13450 - protein, 9 aa, Homo sapiens
  Table A; HLA-B*41:02; MAX; R60Q; 0
GEKASQAQI

SEQ ID NO: 13451 - protein, 9 aa, Homo sapiens
  Table A; HLA-B*44:03; MAX; R60Q; 1
GEKASQAQI

SEQ ID NO: 13452 - protein, 9 aa, Homo sapiens
  Table A; HLA-B*44:05; MAX; R60Q; 0
GEKASQAQI

SEQ ID NO: 13453 - protein, 9 aa, Homo sapiens
  Table A; HLA-B*49:01; MAX; R60Q; 0
GEKASQAQI

SEQ ID NO: 13454 - protein, 10 aa, Homo sapiens
  Table A; HLA-A*30:01; MAX; R60Q; 0
GEKASQAQIL

SEQ ID NO: 13455 - protein, 10 aa, Homo sapiens
  Table A; HLA-B*40:01; MAX; R60Q; 1
GEKASQAQIL

SEQ ID NO: 13456 - protein, 10 aa, Homo sapiens
  Table A; HLA-B*40:02; MAX; R60Q; 0
GEKASQAQIL

SEQ ID NO: 13457 - protein, 10 aa, Homo sapiens
  Table A; HLA-B*41:02; MAX; R60Q; 0
GEKASQAQIL

SEQ ID NO: 13458 - protein, 10 aa, Homo sapiens
  Table A; HLA-B*44:05; MAX; R60Q; 0
GEKASQAQIL

SEQ ID NO: 13459 - protein, 9 aa, Homo sapiens
  Table A; HLA-B*27:02; NFE2L2; R34G; 0
GEVFDFSQR

SEQ ID NO: 13460 - protein, 9 aa, Homo sapiens
  Table A; HLA-B*49:01; NFE2L2; R34G; 0
GEVFDFSQR

SEQ ID NO: 13461 - protein, 8 aa, Homo sapiens
  Table A; HLA-B*40:02; TPR; S2155L; 0
GFAEAIHL

SEQ ID NO: 13462 - protein, 8 aa, Homo sapiens
  Table A; HLA-C*14:02; TPR; S2155L; 0
GFAEAIHL

SEQ ID NO: 13463 - protein, 8 aa, Homo sapiens
  Table A; HLA-C*14:03; TPR; S2155L; 0
GFAEAIHL

SEQ ID NO: 13464 - protein, 11 aa, Homo sapiens
  Table A; HLA-A*02:01; TPR; S2155L; 1
GFAEAIHLPQV

SEQ ID NO: 13465 - protein, 8 aa, Homo sapiens
  Table A; HLA-C*04:01; KEAP1; G480W; 1
GFDWTNRL

SEQ ID NO: 13466 - protein, 9 aa, Homo sapiens
  Table A; HLA-A*02:03; KEAP1; G480W; 0
GGFDWTNRL

SEQ ID NO: 13467 - protein, 9 aa, Homo sapiens
  Table A; HLA-A*02:04; KEAP1; G480W; 0
GGFDWTNRL

SEQ ID NO: 13468 - protein, 9 aa, Homo sapiens
  Table A; HLA-A*02:05; KEAP1; G480W; 0
GGFDWTNRL

SEQ ID NO: 13469 - protein, 8 aa, Homo sapiens
  Table A; HLA-A*02:04; PREX2; H1404Y; 0
GGFKIYPV

SEQ ID NO: 13470 - protein, 8 aa, Homo sapiens
  Table A; HLA-B*39:06; PREX2; H1404Y; 0
GGFKIYPV

SEQ ID NO: 13471 - protein, 9 aa, Homo sapiens
  Table A; HLA-A*02:04; PREX2; H1404Y; 0
GGFKIYPVL

SEQ ID NO: 13472 - protein, 10 aa, Homo sapiens
  Table A; HLA-B*57:01; PREX2; H1404Y; 0
GGFKIYPVLF

SEQ ID NO: 13473 - protein, 9 aa, Homo sapiens
  Table A; HLA-B*15:01; IDH1; R132G; 1
GGHAYGDQY

SEQ ID NO: 13474 - protein, 9 aa, Homo sapiens
  Table A; HLA-B*15:03; IDH1; R132G; 0
GGHAYGDQY

SEQ ID NO: 13475 - protein, 9 aa, Homo sapiens
  Table A; HLA-B*39:01; IDH1; R132G; 0
GGHAYGDQY

SEQ ID NO: 13476 - protein, 10 aa, Homo sapiens
  Table A; HLA-B*48:01; SMARCA4; G1162S; 0
GGLSLNLQSA

SEQ ID NO: 13477 - protein, 9 aa, Homo sapiens
  Table A; HLA-B*07:02; TP53; R248L; 1
GGMNLRPIL

SEQ ID NO: 13478 - protein, 9 aa, Homo sapiens
  Table A; HLA-B*15:10; TP53; R248L; 0
GGMNLRPIL

SEQ ID NO: 13479 - protein, 9 aa, Homo sapiens
  Table A; HLA-B*27:05; TP53; R248L; 0
GGMNLRPIL

SEQ ID NO: 13480 - protein, 9 aa, Homo sapiens
  Table A; HLA-B*40:02; TP53; R248L; 0
GGMNLRPIL

SEQ ID NO: 13481 - protein, 9 aa, Homo sapiens
  Table A; HLA-B*41:02; TP53; R248L; 0
GGMNLRPIL

SEQ ID NO: 13482 - protein, 9 aa, Homo sapiens
  Table A; HLA-A*02:06; TP53; R248Q; 0
GGMNQRPIL

SEQ ID NO: 13483 - protein, 9 aa, Homo sapiens
  Table A; HLA-A*30:01; TP53; R248Q; 0
GGMNQRPIL

SEQ ID NO: 13484 - protein, 9 aa, Homo sapiens
  Table A; HLA-B*07:02; TP53; R248Q; 1
GGMNQRPIL

SEQ ID NO: 13485 - protein, 9 aa, Homo sapiens
  Table A; HLA-B*15:10; TP53; R248Q; 0
GGMNQRPIL

SEQ ID NO: 13486 - protein, 9 aa, Homo sapiens
  Table A; HLA-B*40:02; TP53; R248Q; 0
GGMNQRPIL

SEQ ID NO: 13487 - protein, 9 aa, Homo sapiens
  Table A; HLA-B*41:02; TP53; R248Q; 0
GGMNQRPIL

SEQ ID NO: 13488 - protein, 9 aa, Homo sapiens
  Table A; HLA-A*02:01; TP53; R249M; 1
GGMNRMPIL

SEQ ID NO: 13489 - protein, 9 aa, Homo sapiens
  Table A; HLA-A*02:04; TP53; R249M; 0
GGMNRMPIL

SEQ ID NO: 13490 - protein, 9 aa, Homo sapiens
  Table A; HLA-B*08:01; TP53; P250L; 0
GGMNRRLIL

SEQ ID NO: 13491 - protein, 9 aa, Homo sapiens
  Table A; HLA-A*02:01; TP53; R249S; 1
GGMNRSPIL

SEQ ID NO: 13492 - protein, 9 aa, Homo sapiens
  Table A; HLA-A*30:01; TP53; R249S; 0
GGMNRSPIL

SEQ ID NO: 13493 - protein, 9 aa, Homo sapiens
  Table A; HLA-B*15:10; TP53; R249S; 0
GGMNRSPIL

SEQ ID NO: 13494 - protein, 9 aa, Homo sapiens
  Table A; HLA-B*40:02; TP53; R249S; 0
GGMNRSPIL

SEQ ID NO: 13495 - protein, 9 aa, Homo sapiens
  Table A; HLA-B*41:02; TP53; R249S; 0
GGMNRSPIL

SEQ ID NO: 13496 - protein, 9 aa, Homo sapiens
  Table A; HLA-B*44:05; TP53; R249S; 0
GGMNRSPIL

SEQ ID NO: 13497 - protein, 9 aa, Homo sapiens
  Table A; HLA-B*48:01; TP53; R249S; 0
GGMNRSPIL

SEQ ID NO: 13498 - protein, 9 aa, Homo sapiens
  Table A; HLA-C*03:04; TP53; R249S; 1
GGMNRSPIL

SEQ ID NO: 13499 - protein, 9 aa, Homo sapiens
  Table A; HLA-A*02:04; TP53; R248W; 0
GGMNWRPIL

SEQ ID NO: 13500 - protein, 9 aa, Homo sapiens
  Table A; HLA-A*02:06; PTEN; R130G; 0
GGTGVMICA

SEQ ID NO: 13501 - protein, 9 aa, Homo sapiens
  Table A; HLA-B*39:01; IDH1; R132H; 1
GHHAYGDQY

SEQ ID NO: 13502 - protein, 9 aa, Homo sapiens
  Table A; HLA-B*15:10; FBXW7; R465C; 0
GHTSTVCCM

SEQ ID NO: 13503 - protein, 9 aa, Homo sapiens
  Table A; HLA-B*15:10; FBXW7; R465H; 0
GHTSTVHCM

SEQ ID NO: 13504 - protein, 9 aa, Homo sapiens
  Table A; HLA-B*27:05; FBXW7; R465H; 1
GHTSTVHCM

SEQ ID NO: 13505 - protein, 9 aa, Homo sapiens
  Table A; HLA-B*38:01; FBXW7; R465H; 0
GHTSTVHCM

SEQ ID NO: 13506 - protein, 8 aa, Homo sapiens
  Table A; HLA-B*39:06; FBXW7; R505C; 0
GHVAAVCC

SEQ ID NO: 13507 - protein, 9 aa, Homo sapiens
  Table A; HLA-B*15:10; FBXW7; R505C; 0
GHVAAVCCV

SEQ ID NO: 13508 - protein, 9 aa, Homo sapiens
  Table A; HLA-B*39:06; FBXW7; R505C; 0
GHVAAVCCV

SEQ ID NO: 13509 - protein, 8 aa, Homo sapiens
  Table A; HLA-B*39:06; FBXW7; R505G; 0
GHVAAVGC

SEQ ID NO: 13510 - protein, 9 aa, Homo sapiens
  Table A; HLA-B*15:10; FBXW7; R505G; 0
GHVAAVGCV

SEQ ID NO: 13511 - protein, 9 aa, Homo sapiens
  Table A; HLA-B*39:06; FBXW7; R505G; 0
GHVAAVGCV

SEQ ID NO: 13512 - protein, 8 aa, Homo sapiens
  Table A; HLA-C*08:03; CTNNB1; S37A; 0
GIHAGATT

SEQ ID NO: 13513 - protein, 9 aa, Homo sapiens
  Table A; HLA-A*02:03; CTNNB1; S37A; 0
GIHAGATTT

SEQ ID NO: 13514 - protein, 9 aa, Homo sapiens
  Table A; HLA-B*13:02; CTNNB1; S37A; 0
GIHAGATTT

SEQ ID NO: 13515 - protein, 9 aa, Homo sapiens
  Table A; HLA-B*15:01; CTNNB1; S37A; 1
GIHAGATTT

SEQ ID NO: 13516 - protein, 9 aa, Homo sapiens
  Table A; HLA-B*48:01; CTNNB1; S37A; 0
GIHAGATTT

SEQ ID NO: 13517 - protein, 9 aa, Homo sapiens
  Table A; HLA-C*08:03; CTNNB1; S37A; 0
GIHAGATTT

SEQ ID NO: 13518 - protein, 10 aa, Homo sapiens
  Table A; HLA-A*02:03; CTNNB1; S37A; 0
GIHAGATTTA

SEQ ID NO: 13519 - protein, 10 aa, Homo sapiens
  Table A; HLA-A*02:05; CTNNB1; S37A; 0
GIHAGATTTA

SEQ ID NO: 13520 - protein, 10 aa, Homo sapiens
  Table A; HLA-A*02:08; CTNNB1; S37A; 0
GIHAGATTTA

SEQ ID NO: 13521 - protein, 10 aa, Homo sapiens
  Table A; HLA-A*30:01; CTNNB1; S37A; 0
GIHAGATTTA

SEQ ID NO: 13522 - protein, 10 aa, Homo sapiens
  Table A; HLA-B*13:02; CTNNB1; S37A; 0
GIHAGATTTA

SEQ ID NO: 13523 - protein, 10 aa, Homo sapiens
  Table A; HLA-B*15:01; CTNNB1; S37A; 1
GIHAGATTTA

SEQ ID NO: 13524 - protein, 10 aa, Homo sapiens
  Table A; HLA-B*48:01; CTNNB1; S37A; 0
GIHAGATTTA

SEQ ID NO: 13525 - protein, 10 aa, Homo sapiens
  Table A; HLA-B*50:01; CTNNB1; S37A; 0
GIHAGATTTA

SEQ ID NO: 13526 - protein, 8 aa, Homo sapiens
  Table A; HLA-C*08:03; CTNNB1; S37F; 0
GIHFGATT

SEQ ID NO: 13527 - protein, 9 aa, Homo sapiens
  Table A; HLA-A*02:03; CTNNB1; S37F; 0
GIHFGATTT

SEQ ID NO: 13528 - protein, 9 aa, Homo sapiens
  Table A; HLA-B*13:02; CTNNB1; S37F; 1
GIHFGATTT

SEQ ID NO: 13529 - protein, 9 aa, Homo sapiens
  Table A; HLA-B*15:01; CTNNB1; S37F; 1
GIHFGATTT

SEQ ID NO: 13530 - protein, 9 aa, Homo sapiens
  Table A; HLA-B*46:01; CTNNB1; S37F; 0
GIHFGATTT

SEQ ID NO: 13531 - protein, 9 aa, Homo sapiens
  Table A; HLA-B*48:01; CTNNB1; S37F; 0
GIHFGATTT

SEQ ID NO: 13532 - protein, 9 aa, Homo sapiens
  Table A; HLA-C*08:03; CTNNB1; S37F; 0
GIHFGATTT

SEQ ID NO: 13533 - protein, 10 aa, Homo sapiens
  Table A; HLA-A*02:03; CTNNB1; S37F; 0
GIHFGATTTA

SEQ ID NO: 13534 - protein, 10 aa, Homo sapiens
  Table A; HLA-A*02:05; CTNNB1; S37F; 0
GIHFGATTTA

SEQ ID NO: 13535 - protein, 10 aa, Homo sapiens
  Table A; HLA-A*02:06; CTNNB1; S37F; 0
GIHFGATTTA

SEQ ID NO: 13536 - protein, 10 aa, Homo sapiens
  Table A; HLA-A*02:08; CTNNB1; S37F; 0
GIHFGATTTA

SEQ ID NO: 13537 - protein, 10 aa, Homo sapiens
  Table A; HLA-A*30:01; CTNNB1; S37F; 0
GIHFGATTTA

SEQ ID NO: 13538 - protein, 10 aa, Homo sapiens
  Table A; HLA-B*13:02; CTNNB1; S37F; 1
GIHFGATTTA

SEQ ID NO: 13539 - protein, 10 aa, Homo sapiens
  Table A; HLA-B*15:01; CTNNB1; S37F; 1
GIHFGATTTA

SEQ ID NO: 13540 - protein, 10 aa, Homo sapiens
  Table A; HLA-B*39:06; CTNNB1; S37F; 0
GIHFGATTTA

SEQ ID NO: 13541 - protein, 10 aa, Homo sapiens
  Table A; HLA-B*48:01; CTNNB1; S37F; 0
GIHFGATTTA

SEQ ID NO: 13542 - protein, 10 aa, Homo sapiens
  Table A; HLA-B*50:01; CTNNB1; S37F; 0
GIHFGATTTA

SEQ ID NO: 13543 - protein, 10 aa, Homo sapiens
  Table A; HLA-B*56:01; CTNNB1; S37F; 0
GIHFGATTTA

SEQ ID NO: 13544 - protein, 8 aa, Homo sapiens
  Table A; HLA-C*08:03; CTNNB1; S37P; 0
GIHPGATT

SEQ ID NO: 13545 - protein, 9 aa, Homo sapiens
  Table A; HLA-A*02:03; CTNNB1; S37P; 0
GIHPGATTT

SEQ ID NO: 13546 - protein, 9 aa, Homo sapiens
  Table A; HLA-B*15:01; CTNNB1; S37P; 1
GIHPGATTT

SEQ ID NO: 13547 - protein, 9 aa, Homo sapiens
  Table A; HLA-B*48:01; CTNNB1; S37P; 0
GIHPGATTT

SEQ ID NO: 13548 - protein, 9 aa, Homo sapiens
  Table A; HLA-C*08:03; CTNNB1; S37P; 0
GIHPGATTT

SEQ ID NO: 13549 - protein, 10 aa, Homo sapiens
  Table A; HLA-A*02:03; CTNNB1; S37P; 0
GIHPGATTTA

SEQ ID NO: 13550 - protein, 10 aa, Homo sapiens
  Table A; HLA-A*02:05; CTNNB1; S37P; 0
GIHPGATTTA

SEQ ID NO: 13551 - protein, 10 aa, Homo sapiens
  Table A; HLA-A*02:08; CTNNB1; S37P; 0
GIHPGATTTA

SEQ ID NO: 13552 - protein, 10 aa, Homo sapiens
  Table A; HLA-A*30:01; CTNNB1; S37P; 0
GIHPGATTTA

SEQ ID NO: 13553 - protein, 10 aa, Homo sapiens
  Table A; HLA-B*07:02; CTNNB1; S37P; 1
GIHPGATTTA

SEQ ID NO: 13554 - protein, 10 aa, Homo sapiens
  Table A; HLA-B*13:02; CTNNB1; S37P; 0
GIHPGATTTA

SEQ ID NO: 13555 - protein, 10 aa, Homo sapiens
  Table A; HLA-B*15:01; CTNNB1; S37P; 1
GIHPGATTTA

SEQ ID NO: 13556 - protein, 10 aa, Homo sapiens
  Table A; HLA-B*39:06; CTNNB1; S37P; 0
GIHPGATTTA

SEQ ID NO: 13557 - protein, 10 aa, Homo sapiens
  Table A; HLA-B*40:02; CTNNB1; S37P; 0
GIHPGATTTA

SEQ ID NO: 13558 - protein, 10 aa, Homo sapiens
  Table A; HLA-B*46:01; CTNNB1; S37P; 0
GIHPGATTTA

SEQ ID NO: 13559 - protein, 10 aa, Homo sapiens
  Table A; HLA-B*48:01; CTNNB1; S37P; 0
GIHPGATTTA

SEQ ID NO: 13560 - protein, 10 aa, Homo sapiens
  Table A; HLA-B*50:01; CTNNB1; S37P; 0
GIHPGATTTA

SEQ ID NO: 13561 - protein, 11 aa, Homo sapiens
  Table A; HLA-B*48:01; CTNNB1; S37P; 0
GIHPGATTTAP

SEQ ID NO: 13562 - protein, 9 aa, Homo sapiens
  Table A; HLA-A*02:03; CTNNB1; T41A; 0
GIHSGATAT

SEQ ID NO: 13563 - protein, 9 aa, Homo sapiens
  Table A; HLA-B*13:02; CTNNB1; T41A; 1
GIHSGATAT

SEQ ID NO: 13564 - protein, 9 aa, Homo sapiens
  Table A; HLA-B*15:01; CTNNB1; T41A; 1
GIHSGATAT

SEQ ID NO: 13565 - protein, 9 aa, Homo sapiens
  Table A; HLA-B*46:01; CTNNB1; T41A; 0
GIHSGATAT

SEQ ID NO: 13566 - protein, 9 aa, Homo sapiens
  Table A; HLA-B*48:01; CTNNB1; T41A; 0
GIHSGATAT

SEQ ID NO: 13567 - protein, 9 aa, Homo sapiens
  Table A; HLA-C*08:03; CTNNB1; T41A; 0
GIHSGATAT

SEQ ID NO: 13568 - protein, 10 aa, Homo sapiens
  Table A; HLA-A*02:01; CTNNB1; T41A; 1
GIHSGATATA

SEQ ID NO: 13569 - protein, 10 aa, Homo sapiens
  Table A; HLA-A*02:03; CTNNB1; T41A; 0
GIHSGATATA

SEQ ID NO: 13570 - protein, 10 aa, Homo sapiens
  Table A; HLA-A*02:05; CTNNB1; T41A; 0
GIHSGATATA

SEQ ID NO: 13571 - protein, 10 aa, Homo sapiens
  Table A; HLA-A*02:06; CTNNB1; T41A; 0
GIHSGATATA

SEQ ID NO: 13572 - protein, 10 aa, Homo sapiens
  Table A; HLA-A*02:08; CTNNB1; T41A; 0
GIHSGATATA

SEQ ID NO: 13573 - protein, 10 aa, Homo sapiens
  Table A; HLA-A*30:01; CTNNB1; T41A; 1
GIHSGATATA

SEQ ID NO: 13574 - protein, 10 aa, Homo sapiens
  Table A; HLA-B*13:02; CTNNB1; T41A; 1
GIHSGATATA

SEQ ID NO: 13575 - protein, 10 aa, Homo sapiens
  Table A; HLA-B*15:01; CTNNB1; T41A; 1
GIHSGATATA

SEQ ID NO: 13576 - protein, 10 aa, Homo sapiens
  Table A; HLA-B*40:02; CTNNB1; T41A; 1
GIHSGATATA

SEQ ID NO: 13577 - protein, 10 aa, Homo sapiens
  Table A; HLA-B*46:01; CTNNB1; T41A; 0
GIHSGATATA

SEQ ID NO: 13578 - protein, 10 aa, Homo sapiens
  Table A; HLA-B*48:01; CTNNB1; T41A; 0
GIHSGATATA

SEQ ID NO: 13579 - protein, 10 aa, Homo sapiens
  Table A; HLA-B*50:01; CTNNB1; T41A; 0
GIHSGATATA

SEQ ID NO: 13580 - protein, 10 aa, Homo sapiens
  Table A; HLA-B*55:02; CTNNB1; T41A; 0
GIHSGATATA

SEQ ID NO: 13581 - protein, 10 aa, Homo sapiens
  Table A; HLA-B*56:01; CTNNB1; T41A; 0
GIHSGATATA

SEQ ID NO: 13582 - protein, 11 aa, Homo sapiens
  Table A; HLA-B*15:01; CTNNB1; T41A; 1
GIHSGATATAP

SEQ ID NO: 13583 - protein, 8 aa, Homo sapiens
  Table A; HLA-B*13:02; CTNNB1; T41I; 0
GIHSGATI

SEQ ID NO: 13584 - protein, 8 aa, Homo sapiens
  Table A; HLA-B*15:01; CTNNB1; T41I; 1
GIHSGATI

SEQ ID NO: 13585 - protein, 8 aa, Homo sapiens
  Table A; HLA-B*48:01; CTNNB1; T41I; 0
GIHSGATI

SEQ ID NO: 13586 - protein, 9 aa, Homo sapiens
  Table A; HLA-B*15:01; CTNNB1; T41I; 1
GIHSGATIT

SEQ ID NO: 13587 - protein, 9 aa, Homo sapiens
  Table A; HLA-B*48:01; CTNNB1; T41I; 0
GIHSGATIT

SEQ ID NO: 13588 - protein, 9 aa, Homo sapiens
  Table A; HLA-C*08:03; CTNNB1; T41I; 0
GIHSGATIT

SEQ ID NO: 13589 - protein, 10 aa, Homo sapiens
  Table A; HLA-A*02:01; CTNNB1; T41I; 1
GIHSGATITA

SEQ ID NO: 13590 - protein, 10 aa, Homo sapiens
  Table A; HLA-A*02:03; CTNNB1; T41I; 0
GIHSGATITA

SEQ ID NO: 13591 - protein, 10 aa, Homo sapiens
  Table A; HLA-A*02:05; CTNNB1; T41I; 0
GIHSGATITA

SEQ ID NO: 13592 - protein, 10 aa, Homo sapiens
  Table A; HLA-A*02:06; CTNNB1; T41I; 0
GIHSGATITA

SEQ ID NO: 13593 - protein, 10 aa, Homo sapiens
  Table A; HLA-A*02:08; CTNNB1; T41I; 0
GIHSGATITA

SEQ ID NO: 13594 - protein, 10 aa, Homo sapiens
  Table A; HLA-A*03:01; CTNNB1; T41I; 1
GIHSGATITA

SEQ ID NO: 13595 - protein, 10 aa, Homo sapiens
  Table A; HLA-A*30:01; CTNNB1; T41I; 0
GIHSGATITA

SEQ ID NO: 13596 - protein, 10 aa, Homo sapiens
  Table A; HLA-B*13:02; CTNNB1; T41I; 0
GIHSGATITA

SEQ ID NO: 13597 - protein, 10 aa, Homo sapiens
  Table A; HLA-B*15:01; CTNNB1; T41I; 1
GIHSGATITA

SEQ ID NO: 13598 - protein, 10 aa, Homo sapiens
  Table A; HLA-B*39:06; CTNNB1; T41I; 0
GIHSGATITA

SEQ ID NO: 13599 - protein, 10 aa, Homo sapiens
  Table A; HLA-B*40:02; CTNNB1; T41I; 0
GIHSGATITA

SEQ ID NO: 13600 - protein, 10 aa, Homo sapiens
  Table A; HLA-B*48:01; CTNNB1; T41I; 0
GIHSGATITA

SEQ ID NO: 13601 - protein, 10 aa, Homo sapiens
  Table A; HLA-B*50:01; CTNNB1; T41I; 0
GIHSGATITA

SEQ ID NO: 13602 - protein, 10 aa, Homo sapiens
  Table A; HLA-B*55:02; CTNNB1; T41I; 0
GIHSGATITA

SEQ ID NO: 13603 - protein, 10 aa, Homo sapiens
  Table A; HLA-B*56:01; CTNNB1; T41I; 0
GIHSGATITA

SEQ ID NO: 13604 - protein, 11 aa, Homo sapiens
  Table A; HLA-B*48:01; CTNNB1; T41I; 0
GIHSGATITAP

SEQ ID NO: 13605 - protein, 10 aa, Homo sapiens
  Table A; HLA-A*03:01; TP63; E609K; 1
GILDHRQLHK

SEQ ID NO: 13606 - protein, 10 aa, Homo sapiens
  Table A; HLA-A*03:02; KRAS; A146T; 0
GIPFIETSTK

SEQ ID NO: 13607 - protein, 10 aa, Homo sapiens
  Table A; HLA-B*27:02; KRAS; A146T; 0
GIPFIETSTK

SEQ ID NO: 13608 - protein, 8 aa, Homo sapiens
  Table A; HLA-B*15:01; CREB3L1; V414I; 0
GIYTASQM

SEQ ID NO: 13609 - protein, 8 aa, Homo sapiens
  Table A; HLA-B*15:02; CREB3L1; V414I; 0
GIYTASQM

SEQ ID NO: 13610 - protein, 9 aa, Homo sapiens
  Table A; HLA-B*48:01; CREB3L1; V414I; 0
GIYTASQMP

SEQ ID NO: 13611 - protein, 11 aa, Homo sapiens
  Table A; HLA-A*03:01; CREB3L1; V414I; 1
GIYTASQMPSR

SEQ ID NO: 13612 - protein, 11 aa, Homo sapiens
  Table A; HLA-A*11:01; CREB3L1; V414I; 0
GIYTASQMPSR

SEQ ID NO: 13613 - protein, 11 aa, Homo sapiens
  Table A; HLA-A*68:01; CREB3L1; V414I; 0
GIYTASQMPSR

SEQ ID NO: 13614 - protein, 8 aa, Homo sapiens
  Table A; HLA-B*48:01; PTEN; R130G; 0
GKGGTGVM

SEQ ID NO: 13615 - protein, 9 aa, Homo sapiens
  Table A; HLA-B*48:01; PTEN; R130G; 0
GKGGTGVMI

SEQ ID NO: 13616 - protein, 8 aa, Homo sapiens
  Table A; HLA-B*48:01; PTEN; R130L; 0
GKGLTGVM

SEQ ID NO: 13617 - protein, 8 aa, Homo sapiens
  Table A; HLA-B*15:03; PTEN; R130P; 0
GKGPTGVM

SEQ ID NO: 13618 - protein, 8 aa, Homo sapiens
  Table A; HLA-B*39:01; PTEN; R130P; 0
GKGPTGVM

SEQ ID NO: 13619 - protein, 8 aa, Homo sapiens
  Table A; HLA-B*48:01; PTEN; R130P; 0
GKGPTGVM

SEQ ID NO: 13620 - protein, 9 aa, Homo sapiens
  Table A; HLA-B*15:03; PTEN; R130P; 0
GKGPTGVMI

SEQ ID NO: 13621 - protein, 9 aa, Homo sapiens
  Table A; HLA-B*48:01; PTEN; R130P; 0
GKGPTGVMI

SEQ ID NO: 13622 - protein, 9 aa, Homo sapiens
  Table A; HLA-C*08:03; PTEN; R130P; 0
GKGPTGVMI

SEQ ID NO: 13623 - protein, 8 aa, Homo sapiens
  Table A; HLA-B*48:01; PTEN; R130Q; 0
GKGQTGVM

SEQ ID NO: 13624 - protein, 9 aa, Homo sapiens
  Table A; HLA-B*48:01; PTEN; R130Q; 0
GKGQTGVMI

SEQ ID NO: 13625 - protein, 9 aa, Homo sapiens
  Table A; HLA-B*15:03; IDH2; R172K; 0
GKHAHGDQY

SEQ ID NO: 13626 - protein, 9 aa, Homo sapiens
  Table A; HLA-B*15:03; CNBD1; L396P; 0
GKPKEKESF

SEQ ID NO: 13627 - protein, 10 aa, Homo sapiens
  Table A; HLA-B*15:03; PTPRB; D1560N; 0
GKRNPTQQKF

SEQ ID NO: 13628 - protein, 9 aa, Homo sapiens
  Table A; HLA-B*15:01; SPOP; E50K; 1
GKVIKSSTF

SEQ ID NO: 13629 - protein, 9 aa, Homo sapiens
  Table A; HLA-B*15:03; SPOP; E50K; 0
GKVIKSSTF

SEQ ID NO: 13630 - protein, 9 aa, Homo sapiens
  Table A; HLA-B*48:01; SPOP; E50K; 0
GKVIKSSTF

SEQ ID NO: 13631 - protein, 9 aa, Homo sapiens
  Table A; HLA-B*15:03; EGFR; A289T; 0
GKYSFGTTC

SEQ ID NO: 13632 - protein, 9 aa, Homo sapiens
  Table A; HLA-B*15:03; EGFR; A289V; 0
GKYSFGVTC

SEQ ID NO: 13633 - protein, 9 aa, Homo sapiens
  Table A; HLA-B*48:01; EGFR; A289V; 0
GKYSFGVTC

SEQ ID NO: 13634 - protein, 9 aa, Homo sapiens
  Table A; HLA-B*50:01; EGFR; A289V; 0
GKYSFGVTC

SEQ ID NO: 13635 - protein, 10 aa, Homo sapiens
  Table A; HLA-A*03:01; TP53; I195N; 1
GLAPPQHLNR

SEQ ID NO: 13636 - protein, 10 aa, Homo sapiens
  Table A; HLA-A*03:02; TP53; I195N; 0
GLAPPQHLNR

SEQ ID NO: 13637 - protein, 10 aa, Homo sapiens
  Table A; HLA-A*26:03; TP53; I195N; 0
GLAPPQHLNR

SEQ ID NO: 13638 - protein, 10 aa, Homo sapiens
  Table A; HLA-A*31:01; TP53; I195N; 0
GLAPPQHLNR

SEQ ID NO: 13639 - protein, 10 aa, Homo sapiens
  Table A; HLA-A*68:01; TP53; I195N; 0
GLAPPQHLNR

SEQ ID NO: 13640 - protein, 10 aa, Homo sapiens
  Table A; HLA-B*27:02; TP53; I195N; 0
GLAPPQHLNR

SEQ ID NO: 13641 - protein, 11 aa, Homo sapiens
  Table A; HLA-A*02:01; TP53; I195N; 1
GLAPPQHLNRV

SEQ ID NO: 13642 - protein, 11 aa, Homo sapiens
  Table A; HLA-A*02:03; TP53; I195N; 0
GLAPPQHLNRV

SEQ ID NO: 13643 - protein, 11 aa, Homo sapiens
  Table A; HLA-A*02:04; TP53; I195N; 0
GLAPPQHLNRV

SEQ ID NO: 13644 - protein, 11 aa, Homo sapiens
  Table A; HLA-A*02:07; TP53; I195N; 0
GLAPPQHLNRV

SEQ ID NO: 13645 - protein, 11 aa, Homo sapiens
  Table A; HLA-A*68:02; TP53; I195N; 0
GLAPPQHLNRV

SEQ ID NO: 13646 - protein, 9 aa, Homo sapiens
  Table A; HLA-A*02:01; TP53; I195T; 1
GLAPPQHLT

SEQ ID NO: 13647 - protein, 9 aa, Homo sapiens
  Table A; HLA-A*02:03; TP53; I195T; 0
GLAPPQHLT

SEQ ID NO: 13648 - protein, 9 aa, Homo sapiens
  Table A; HLA-A*02:04; TP53; I195T; 0
GLAPPQHLT

SEQ ID NO: 13649 - protein, 9 aa, Homo sapiens
  Table A; HLA-A*02:05; TP53; I195T; 0
GLAPPQHLT

SEQ ID NO: 13650 - protein, 9 aa, Homo sapiens
  Table A; HLA-B*13:02; TP53; I195T; 0
GLAPPQHLT

SEQ ID NO: 13651 - protein, 9 aa, Homo sapiens
  Table A; HLA-B*48:01; TP53; I195T; 0
GLAPPQHLT

SEQ ID NO: 13652 - protein, 9 aa, Homo sapiens
  Table A; HLA-C*08:03; TP53; I195T; 0
GLAPPQHLT

SEQ ID NO: 13653 - protein, 10 aa, Homo sapiens
  Table A; HLA-A*03:01; TP53; I195T; 1
GLAPPQHLTR

SEQ ID NO: 13654 - protein, 10 aa, Homo sapiens
  Table A; HLA-A*03:02; TP53; I195T; 0
GLAPPQHLTR

SEQ ID NO: 13655 - protein, 10 aa, Homo sapiens
  Table A; HLA-A*11:01; TP53; I195T; 1
GLAPPQHLTR

SEQ ID NO: 13656 - protein, 10 aa, Homo sapiens
  Table A; HLA-A*26:03; TP53; I195T; 0
GLAPPQHLTR

SEQ ID NO: 13657 - protein, 10 aa, Homo sapiens
  Table A; HLA-A*31:01; TP53; I195T; 0
GLAPPQHLTR

SEQ ID NO: 13658 - protein, 10 aa, Homo sapiens
  Table A; HLA-A*68:01; TP53; I195T; 0
GLAPPQHLTR

SEQ ID NO: 13659 - protein, 10 aa, Homo sapiens
  Table A; HLA-B*27:02; TP53; I195T; 0
GLAPPQHLTR

SEQ ID NO: 13660 - protein, 11 aa, Homo sapiens
  Table A; HLA-A*02:01; TP53; I195T; 1
GLAPPQHLTRV

SEQ ID NO: 13661 - protein, 11 aa, Homo sapiens
  Table A; HLA-A*02:03; TP53; I195T; 0
GLAPPQHLTRV

SEQ ID NO: 13662 - protein, 11 aa, Homo sapiens
  Table A; HLA-A*02:04; TP53; I195T; 0
GLAPPQHLTRV

SEQ ID NO: 13663 - protein, 11 aa, Homo sapiens
  Table A; HLA-A*02:07; TP53; I195T; 0
GLAPPQHLTRV

SEQ ID NO: 13664 - protein, 11 aa, Homo sapiens
  Table A; HLA-A*68:02; TP53; I195T; 0
GLAPPQHLTRV

SEQ ID NO: 13665 - protein, 9 aa, Homo sapiens
  Table A; HLA-A*02:01; TP53; L194R; 1
GLAPPQHRI

SEQ ID NO: 13666 - protein, 9 aa, Homo sapiens
  Table A; HLA-A*02:03; TP53; L194R; 0
GLAPPQHRI

SEQ ID NO: 13667 - protein, 9 aa, Homo sapiens
  Table A; HLA-A*02:04; TP53; L194R; 0
GLAPPQHRI

SEQ ID NO: 13668 - protein, 9 aa, Homo sapiens
  Table A; HLA-A*02:05; TP53; L194R; 0
GLAPPQHRI

SEQ ID NO: 13669 - protein, 9 aa, Homo sapiens
  Table A; HLA-A*02:06; TP53; L194R; 0
GLAPPQHRI

SEQ ID NO: 13670 - protein, 9 aa, Homo sapiens
  Table A; HLA-A*02:07; TP53; L194R; 0
GLAPPQHRI

SEQ ID NO: 13671 - protein, 9 aa, Homo sapiens
  Table A; HLA-A*02:08; TP53; L194R; 0
GLAPPQHRI

SEQ ID NO: 13672 - protein, 9 aa, Homo sapiens
  Table A; HLA-B*13:01; TP53; L194R; 0
GLAPPQHRI

SEQ ID NO: 13673 - protein, 9 aa, Homo sapiens
  Table A; HLA-B*13:02; TP53; L194R; 0
GLAPPQHRI

SEQ ID NO: 13674 - protein, 9 aa, Homo sapiens
  Table A; HLA-B*15:01; TP53; L194R; 1
GLAPPQHRI

SEQ ID NO: 13675 - protein, 9 aa, Homo sapiens
  Table A; HLA-B*38:01; TP53; L194R; 0
GLAPPQHRI

SEQ ID NO: 13676 - protein, 9 aa, Homo sapiens
  Table A; HLA-B*40:02; TP53; L194R; 0
GLAPPQHRI

SEQ ID NO: 13677 - protein, 9 aa, Homo sapiens
  Table A; HLA-B*44:05; TP53; L194R; 0
GLAPPQHRI

SEQ ID NO: 13678 - protein, 9 aa, Homo sapiens
  Table A; HLA-B*48:01; TP53; L194R; 0
GLAPPQHRI

SEQ ID NO: 13679 - protein, 10 aa, Homo sapiens
  Table A; HLA-A*31:01; TP53; L194R; 0
GLAPPQHRIR

SEQ ID NO: 13680 - protein, 11 aa, Homo sapiens
  Table A; HLA-A*02:04; TP53; L194R; 0
GLAPPQHRIRV

SEQ ID NO: 13681 - protein, 8 aa, Homo sapiens
  Table A; HLA-C*17:01; TP53; H193L; 0
GLAPPQLL

SEQ ID NO: 13682 - protein, 9 aa, Homo sapiens
  Table A; HLA-A*02:01; TP53; H193L; 1
GLAPPQLLI

SEQ ID NO: 13683 - protein, 9 aa, Homo sapiens
  Table A; HLA-A*02:03; TP53; H193L; 0
GLAPPQLLI

SEQ ID NO: 13684 - protein, 9 aa, Homo sapiens
  Table A; HLA-A*02:04; TP53; H193L; 0
GLAPPQLLI

SEQ ID NO: 13685 - protein, 9 aa, Homo sapiens
  Table A; HLA-A*02:06; TP53; H193L; 0
GLAPPQLLI

SEQ ID NO: 13686 - protein, 9 aa, Homo sapiens
  Table A; HLA-A*03:01; TP53; H193L; 1
GLAPPQLLI

SEQ ID NO: 13687 - protein, 9 aa, Homo sapiens
  Table A; HLA-B*13:01; TP53; H193L; 0
GLAPPQLLI

SEQ ID NO: 13688 - protein, 9 aa, Homo sapiens
  Table A; HLA-B*13:02; TP53; H193L; 0
GLAPPQLLI

SEQ ID NO: 13689 - protein, 9 aa, Homo sapiens
  Table A; HLA-B*48:01; TP53; H193L; 0
GLAPPQLLI

SEQ ID NO: 13690 - protein, 11 aa, Homo sapiens
  Table A; HLA-A*02:01; TP53; H193L; 1
GLAPPQLLIRV

SEQ ID NO: 13691 - protein, 11 aa, Homo sapiens
  Table A; HLA-A*02:03; TP53; H193L; 0
GLAPPQLLIRV

SEQ ID NO: 13692 - protein, 11 aa, Homo sapiens
  Table A; HLA-A*02:04; TP53; H193L; 0
GLAPPQLLIRV

SEQ ID NO: 13693 - protein, 11 aa, Homo sapiens
  Table A; HLA-A*02:07; TP53; H193L; 0
GLAPPQLLIRV

SEQ ID NO: 13694 - protein, 11 aa, Homo sapiens
  Table A; HLA-A*68:02; TP53; H193L; 0
GLAPPQLLIRV

SEQ ID NO: 13695 - protein, 11 aa, Homo sapiens
  Table A; HLA-B*13:02; TP53; H193L; 0
GLAPPQLLIRV

SEQ ID NO: 13696 - protein, 8 aa, Homo sapiens
  Table A; HLA-A*02:04; TP53; H193R; 0
GLAPPQRL

SEQ ID NO: 13697 - protein, 8 aa, Homo sapiens
  Table A; HLA-B*39:01; TP53; H193R; 0
GLAPPQRL

SEQ ID NO: 13698 - protein, 8 aa, Homo sapiens
  Table A; HLA-C*17:01; TP53; H193R; 0
GLAPPQRL

SEQ ID NO: 13699 - protein, 9 aa, Homo sapiens
  Table A; HLA-A*02:01; TP53; H193R; 1
GLAPPQRLI

SEQ ID NO: 13700 - protein, 9 aa, Homo sapiens
  Table A; HLA-A*02:03; TP53; H193R; 0
GLAPPQRLI

SEQ ID NO: 13701 - protein, 9 aa, Homo sapiens
  Table A; HLA-A*02:04; TP53; H193R; 0
GLAPPQRLI

SEQ ID NO: 13702 - protein, 9 aa, Homo sapiens
  Table A; HLA-B*13:02; TP53; H193R; 0
GLAPPQRLI

SEQ ID NO: 13703 - protein, 9 aa, Homo sapiens
  Table A; HLA-B*15:10; TP53; H193R; 0
GLAPPQRLI

SEQ ID NO: 13704 - protein, 9 aa, Homo sapiens
  Table A; HLA-B*48:01; TP53; H193R; 0
GLAPPQRLI

SEQ ID NO: 13705 - protein, 10 aa, Homo sapiens
  Table A; HLA-A*31:01; TP53; H193R; 0
GLAPPQRLIR

SEQ ID NO: 13706 - protein, 11 aa, Homo sapiens
  Table A; HLA-A*02:01; TP53; H193R; 1
GLAPPQRLIRV

SEQ ID NO: 13707 - protein, 11 aa, Homo sapiens
  Table A; HLA-A*02:03; TP53; H193R; 0
GLAPPQRLIRV

SEQ ID NO: 13708 - protein, 11 aa, Homo sapiens
  Table A; HLA-A*02:04; TP53; H193R; 0
GLAPPQRLIRV

SEQ ID NO: 13709 - protein, 8 aa, Homo sapiens
  Table A; HLA-A*02:03; TP53; H193Y; 0
GLAPPQYL

SEQ ID NO: 13710 - protein, 8 aa, Homo sapiens
  Table A; HLA-A*02:04; TP53; H193Y; 0
GLAPPQYL

SEQ ID NO: 13711 - protein, 8 aa, Homo sapiens
  Table A; HLA-B*48:01; TP53; H193Y; 0
GLAPPQYL

SEQ ID NO: 13712 - protein, 8 aa, Homo sapiens
  Table A; HLA-C*17:01; TP53; H193Y; 0
GLAPPQYL

SEQ ID NO: 13713 - protein, 9 aa, Homo sapiens
  Table A; HLA-A*02:01; TP53; H193Y; 1
GLAPPQYLI

SEQ ID NO: 13714 - protein, 9 aa, Homo sapiens
  Table A; HLA-A*02:03; TP53; H193Y; 0
GLAPPQYLI

SEQ ID NO: 13715 - protein, 9 aa, Homo sapiens
  Table A; HLA-A*02:04; TP53; H193Y; 0
GLAPPQYLI

SEQ ID NO: 13716 - protein, 9 aa, Homo sapiens
  Table A; HLA-A*02:06; TP53; H193Y; 0
GLAPPQYLI

SEQ ID NO: 13717 - protein, 9 aa, Homo sapiens
  Table A; HLA-B*13:02; TP53; H193Y; 0
GLAPPQYLI

SEQ ID NO: 13718 - protein, 9 aa, Homo sapiens
  Table A; HLA-B*38:01; TP53; H193Y; 0
GLAPPQYLI

SEQ ID NO: 13719 - protein, 9 aa, Homo sapiens
  Table A; HLA-B*48:01; TP53; H193Y; 0
GLAPPQYLI

SEQ ID NO: 13720 - protein, 10 aa, Homo sapiens
  Table A; HLA-B*27:02; TP53; H193Y; 0
GLAPPQYLIR

SEQ ID NO: 13721 - protein, 11 aa, Homo sapiens
  Table A; HLA-A*02:01; TP53; H193Y; 1
GLAPPQYLIRV

SEQ ID NO: 13722 - protein, 11 aa, Homo sapiens
  Table A; HLA-A*02:03; TP53; H193Y; 0
GLAPPQYLIRV

SEQ ID NO: 13723 - protein, 11 aa, Homo sapiens
  Table A; HLA-A*02:04; TP53; H193Y; 0
GLAPPQYLIRV

SEQ ID NO: 13724 - protein, 11 aa, Homo sapiens
  Table A; HLA-A*02:07; TP53; H193Y; 0
GLAPPQYLIRV

SEQ ID NO: 13725 - protein, 11 aa, Homo sapiens
  Table A; HLA-A*68:02; TP53; H193Y; 0
GLAPPQYLIRV

SEQ ID NO: 13726 - protein, 9 aa, Homo sapiens
  Table A; HLA-B*13:01; BRAF; K601E; 0
GLATVESRW

SEQ ID NO: 13727 - protein, 9 aa, Homo sapiens
  Table A; HLA-B*15:13; BRAF; K601E; 0
GLATVESRW

SEQ ID NO: 13728 - protein, 9 aa, Homo sapiens
  Table A; HLA-B*44:03; BRAF; K601E; 1
GLATVESRW

SEQ ID NO: 13729 - protein, 9 aa, Homo sapiens
  Table A; HLA-B*57:01; BRAF; K601E; 1
GLATVESRW

SEQ ID NO: 13730 - protein, 9 aa, Homo sapiens
  Table A; HLA-B*58:01; BRAF; K601E; 0
GLATVESRW

SEQ ID NO: 13731 - protein, 8 aa, Homo sapiens
  Table A; HLA-A*02:01; NFE2L2; D29G; 1
GLGVSREV

SEQ ID NO: 13732 - protein, 8 aa, Homo sapiens
  Table A; HLA-A*02:03; NFE2L2; D29G; 0
GLGVSREV

SEQ ID NO: 13733 - protein, 8 aa, Homo sapiens
  Table A; HLA-B*13:02; NFE2L2; D29G; 0
GLGVSREV

SEQ ID NO: 13734 - protein, 9 aa, Homo sapiens
  Table A; HLA-B*15:01; NFE2L2; D29G; 1
GLGVSREVF

SEQ ID NO: 13735 - protein, 9 aa, Homo sapiens
  Table A; HLA-A*29:02; IDH1; R132L; 1
GLHAYGDQY

SEQ ID NO: 13736 - protein, 9 aa, Homo sapiens
  Table A; HLA-A*30:02; IDH1; R132L; 0
GLHAYGDQY

SEQ ID NO: 13737 - protein, 9 aa, Homo sapiens
  Table A; HLA-B*15:01; IDH1; R132L; 1
GLHAYGDQY

SEQ ID NO: 13738 - protein, 9 aa, Homo sapiens
  Table A; HLA-B*15:02; IDH1; R132L; 0
GLHAYGDQY

SEQ ID NO: 13739 - protein, 9 aa, Homo sapiens
  Table A; HLA-B*15:03; IDH1; R132L; 0
GLHAYGDQY

SEQ ID NO: 13740 - protein, 9 aa, Homo sapiens
  Table A; HLA-A*02:03; PIK3CA; E453K; 0
GLKDLLNPI

SEQ ID NO: 13741 - protein, 11 aa, Homo sapiens
  Table A; HLA-A*02:01; PIK3CA; E453K; 1
GLKDLLNPIGV

SEQ ID NO: 13742 - protein, 11 aa, Homo sapiens
  Table A; HLA-A*02:03; PIK3CA; E453K; 0
GLKDLLNPIGV

SEQ ID NO: 13743 - protein, 11 aa, Homo sapiens
  Table A; HLA-A*02:04; PIK3CA; E453K; 0
GLKDLLNPIGV

SEQ ID NO: 13744 - protein, 9 aa, Homo sapiens
  Table A; HLA-A*02:04; PIK3CA; E453Q; 0
GLQDLLNPI

SEQ ID NO: 13745 - protein, 11 aa, Homo sapiens
  Table A; HLA-A*02:01; PIK3CA; E453Q; 1
GLQDLLNPIGV

SEQ ID NO: 13746 - protein, 11 aa, Homo sapiens
  Table A; HLA-A*02:03; PIK3CA; E453Q; 0
GLQDLLNPIGV

SEQ ID NO: 13747 - protein, 11 aa, Homo sapiens
  Table A; HLA-A*02:04; PIK3CA; E453Q; 0
GLQDLLNPIGV

SEQ ID NO: 13748 - protein, 11 aa, Homo sapiens
  Table A; HLA-A*02:07; PIK3CA; E453Q; 0
GLQDLLNPIGV

SEQ ID NO: 13749 - protein, 9 aa, Homo sapiens
  Table A; HLA-A*02:03; SMARCA4; G1162S; 0
GLSLNLQSA

SEQ ID NO: 13750 - protein, 9 aa, Homo sapiens
  Table A; HLA-A*02:01; PTEN; R130L; 1
GLTGVMICA

SEQ ID NO: 13751 - protein, 9 aa, Homo sapiens
  Table A; HLA-A*02:06; PTEN; R130L; 0
GLTGVMICA

SEQ ID NO: 13752 - protein, 9 aa, Homo sapiens
  Table A; HLA-B*13:02; PTEN; R130L; 1
GLTGVMICA

SEQ ID NO: 13753 - protein, 9 aa, Homo sapiens
  Table A; HLA-B*50:01; PTEN; R130L; 0
GLTGVMICA

SEQ ID NO: 13754 - protein, 9 aa, Homo sapiens
  Table A; HLA-A*02:01; SF3B1; K700E; 1
GLVDEQQEV

SEQ ID NO: 13755 - protein, 9 aa, Homo sapiens
  Table A; HLA-A*02:03; SF3B1; K700E; 0
GLVDEQQEV

SEQ ID NO: 13756 - protein, 9 aa, Homo sapiens
  Table A; HLA-A*02:04; SF3B1; K700E; 0
GLVDEQQEV

SEQ ID NO: 13757 - protein, 9 aa, Homo sapiens
  Table A; HLA-A*02:05; SF3B1; K700E; 0
GLVDEQQEV

SEQ ID NO: 13758 - protein, 9 aa, Homo sapiens
  Table A; HLA-A*02:06; SF3B1; K700E; 0
GLVDEQQEV

SEQ ID NO: 13759 - protein, 9 aa, Homo sapiens
  Table A; HLA-A*02:07; SF3B1; K700E; 0
GLVDEQQEV

SEQ ID NO: 13760 - protein, 9 aa, Homo sapiens
  Table A; HLA-A*02:08; SF3B1; K700E; 0
GLVDEQQEV

SEQ ID NO: 13761 - protein, 9 aa, Homo sapiens
  Table A; HLA-B*13:01; SF3B1; K700E; 0
GLVDEQQEV

SEQ ID NO: 13762 - protein, 9 aa, Homo sapiens
  Table A; HLA-B*13:02; SF3B1; K700E; 0
GLVDEQQEV

SEQ ID NO: 13763 - protein, 9 aa, Homo sapiens
  Table A; HLA-B*15:01; SF3B1; K700E; 1
GLVDEQQEV

SEQ ID NO: 13764 - protein, 9 aa, Homo sapiens
  Table A; HLA-B*48:01; SF3B1; K700E; 0
GLVDEQQEV

SEQ ID NO: 13765 - protein, 9 aa, Homo sapiens
  Table A; HLA-B*50:01; SF3B1; K700E; 0
GLVDEQQEV

SEQ ID NO: 13766 - protein, 10 aa, Homo sapiens
  Table A; HLA-B*27:02; SF3B1; K700E; 0
GLVDEQQEVR

SEQ ID NO: 13767 - protein, 11 aa, Homo sapiens
  Table A; HLA-B*48:01; SF3B1; K700E; 0
GLVDEQQEVRT

SEQ ID NO: 13768 - protein, 11 aa, Homo sapiens
  Table A; HLA-C*08:03; SF3B1; K700E; 0
GLVDEQQEVRT

SEQ ID NO: 13769 - protein, 11 aa, Homo sapiens
  Table A; HLA-A*02:01; MTOR; A2056V; 1
GMFEVLEPLHV

SEQ ID NO: 13770 - protein, 11 aa, Homo sapiens
  Table A; HLA-A*02:03; MTOR; A2056V; 0
GMFEVLEPLHV

SEQ ID NO: 13771 - protein, 11 aa, Homo sapiens
  Table A; HLA-A*02:04; MTOR; A2056V; 0
GMFEVLEPLHV

SEQ ID NO: 13772 - protein, 11 aa, Homo sapiens
  Table A; HLA-A*02:07; MTOR; A2056V; 0
GMFEVLEPLHV

SEQ ID NO: 13773 - protein, 8 aa, Homo sapiens
  Table A; HLA-B*08:01; TP53; R248L; 1
GMNLRPIL

SEQ ID NO: 13774 - protein, 10 aa, Homo sapiens
  Table A; HLA-A*02:03; TP53; R248L; 0
GMNLRPILTI

SEQ ID NO: 13775 - protein, 8 aa, Homo sapiens
  Table A; HLA-B*08:01; TP53; R248Q; 1
GMNQRPIL

SEQ ID NO: 13776 - protein, 8 aa, Homo sapiens
  Table A; HLA-B*40:02; TP53; R248Q; 0
GMNQRPIL

SEQ ID NO: 13777 - protein, 8 aa, Homo sapiens
  Table A; HLA-B*41:02; TP53; R248Q; 0
GMNQRPIL

SEQ ID NO: 13778 - protein, 9 aa, Homo sapiens
  Table A; HLA-A*02:03; TP53; R248Q; 0
GMNQRPILT

SEQ ID NO: 13779 - protein, 10 aa, Homo sapiens
  Table A; HLA-A*02:03; TP53; R248Q; 0
GMNQRPILTI

SEQ ID NO: 13780 - protein, 10 aa, Homo sapiens
  Table A; HLA-B*13:02; TP53; R248Q; 1
GMNQRPILTI

SEQ ID NO: 13781 - protein, 10 aa, Homo sapiens
  Table A; HLA-B*13:02; TP53; R249M; 0
GMNRMPILTI

SEQ ID NO: 13782 - protein, 10 aa, Homo sapiens
  Table A; HLA-A*02:03; TP53; R249S; 0
GMNRSPILTI

SEQ ID NO: 13783 - protein, 10 aa, Homo sapiens
  Table A; HLA-B*13:02; TP53; R249S; 1
GMNRSPILTI

SEQ ID NO: 13784 - protein, 10 aa, Homo sapiens
  Table A; HLA-B*27:02; PTPRT; E324K; 0
GPIILKKVEY

SEQ ID NO: 13785 - protein, 10 aa, Homo sapiens
  Table A; HLA-B*35:01; PTPRT; E324K; 1
GPIILKKVEY

SEQ ID NO: 13786 - protein, 9 aa, Homo sapiens
  Table A; HLA-B*39:06; PTEN; R130P; 0
GPTGVMICA

SEQ ID NO: 13787 - protein, 9 aa, Homo sapiens
  Table A; HLA-B*54:01; PTEN; R130P; 0
GPTGVMICA

SEQ ID NO: 13788 - protein, 9 aa, Homo sapiens
  Table A; HLA-B*55:01; PTEN; R130P; 0
GPTGVMICA

SEQ ID NO: 13789 - protein, 9 aa, Homo sapiens
  Table A; HLA-B*55:02; PTEN; R130P; 0
GPTGVMICA

SEQ ID NO: 13790 - protein, 9 aa, Homo sapiens
  Table A; HLA-B*56:01; PTEN; R130P; 0
GPTGVMICA

SEQ ID NO: 13791 - protein, 10 aa, Homo sapiens
  Table A; HLA-B*35:01; PTEN; R130P; 1
GPTGVMICAY

SEQ ID NO: 13792 - protein, 8 aa, Homo sapiens
  Table A; HLA-B*13:02; PTPRB; R529Q; 0
GQKYMATV

SEQ ID NO: 13793 - protein, 9 aa, Homo sapiens
  Table A; HLA-A*30:01; BRAF; G466V; 0
GQRIGSVSF

SEQ ID NO: 13794 - protein, 9 aa, Homo sapiens
  Table A; HLA-B*13:02; BRAF; G466V; 0
GQRIGSVSF

SEQ ID NO: 13795 - protein, 9 aa, Homo sapiens
  Table A; HLA-B*15:01; BRAF; G466V; 1
GQRIGSVSF

SEQ ID NO: 13796 - protein, 9 aa, Homo sapiens
  Table A; HLA-B*15:02; BRAF; G466V; 0
GQRIGSVSF

SEQ ID NO: 13797 - protein, 9 aa, Homo sapiens
  Table A; HLA-B*15:03; BRAF; G466V; 0
GQRIGSVSF

SEQ ID NO: 13798 - protein, 9 aa, Homo sapiens
  Table A; HLA-B*46:01; BRAF; G466V; 0
GQRIGSVSF

SEQ ID NO: 13799 - protein, 9 aa, Homo sapiens
  Table A; HLA-B*48:01; BRAF; G466V; 0
GQRIGSVSF

SEQ ID NO: 13800 - protein, 9 aa, Homo sapiens
  Table A; HLA-C*08:01; BRAF; G466V; 0
GQRIGSVSF

SEQ ID NO: 13801 - protein, 9 aa, Homo sapiens
  Table A; HLA-C*08:03; BRAF; G466V; 0
GQRIGSVSF

SEQ ID NO: 13802 - protein, 8 aa, Homo sapiens
  Table A; HLA-B*13:02; PTEN; R130Q; 1
GQTGVMIC

SEQ ID NO: 13803 - protein, 8 aa, Homo sapiens
  Table A; HLA-B*39:06; PTEN; R130Q; 0
GQTGVMIC

SEQ ID NO: 13804 - protein, 8 aa, Homo sapiens
  Table A; HLA-B*48:01; PTEN; R130Q; 0
GQTGVMIC

SEQ ID NO: 13805 - protein, 9 aa, Homo sapiens
  Table A; HLA-A*02:05; PTEN; R130Q; 1
GQTGVMICA

SEQ ID NO: 13806 - protein, 9 aa, Homo sapiens
  Table A; HLA-A*02:06; PTEN; R130Q; 0
GQTGVMICA

SEQ ID NO: 13807 - protein, 9 aa, Homo sapiens
  Table A; HLA-A*02:08; PTEN; R130Q; 0
GQTGVMICA

SEQ ID NO: 13808 - protein, 9 aa, Homo sapiens
  Table A; HLA-B*13:02; PTEN; R130Q; 1
GQTGVMICA

SEQ ID NO: 13809 - protein, 9 aa, Homo sapiens
  Table A; HLA-B*15:01; PTEN; R130Q; 1
GQTGVMICA

SEQ ID NO: 13810 - protein, 9 aa, Homo sapiens
  Table A; HLA-B*39:06; PTEN; R130Q; 0
GQTGVMICA

SEQ ID NO: 13811 - protein, 9 aa, Homo sapiens
  Table A; HLA-B*48:01; PTEN; R130Q; 0
GQTGVMICA

SEQ ID NO: 13812 - protein, 9 aa, Homo sapiens
  Table A; HLA-B*50:01; PTEN; R130Q; 1
GQTGVMICA

SEQ ID NO: 13813 - protein, 10 aa, Homo sapiens
  Table A; HLA-A*30:02; PTEN; R130Q; 1
GQTGVMICAY

SEQ ID NO: 13814 - protein, 10 aa, Homo sapiens
  Table A; HLA-B*15:01; PTEN; R130Q; 1
GQTGVMICAY

SEQ ID NO: 13815 - protein, 10 aa, Homo sapiens
  Table A; HLA-B*27:02; PTEN; R130Q; 0
GQTGVMICAY

SEQ ID NO: 13816 - protein, 11 aa, Homo sapiens
  Table A; HLA-B*27:05; EGFR; L858R; 1
GRAKLLGAEEK

SEQ ID NO: 13817 - protein, 11 aa, Homo sapiens
  Table A; HLA-B*38:01; TP53; R283P; 0
GRDRPTEEENL

SEQ ID NO: 13818 - protein, 9 aa, Homo sapiens
  Table A; HLA-B*39:06; EP300; A1629V; 0
GRDVFLTLA

SEQ ID NO: 13819 - protein, 9 aa, Homo sapiens
  Table A; HLA-B*27:05; KRAS; Q61R; 0
GREEYSAMR

SEQ ID NO: 13820 - protein, 9 aa, Homo sapiens
  Table A; HLA-B*27:05; NRAS; Q61R; 1
GREEYSAMR

SEQ ID NO: 13821 - protein, 9 aa, Homo sapiens
  Table A; HLA-B*27:05; TP53; V272M; 0
GRNSFEMRV

SEQ ID NO: 13822 - protein, 9 aa, Homo sapiens
  Table A; HLA-C*06:02; TP53; V272M; 1
GRNSFEMRV

SEQ ID NO: 13823 - protein, 9 aa, Homo sapiens
  Table A; HLA-B*27:05; TP53; R273C; 1
GRNSFEVCV

SEQ ID NO: 13824 - protein, 9 aa, Homo sapiens
  Table A; HLA-B*39:01; TP53; R273C; 0
GRNSFEVCV

SEQ ID NO: 13825 - protein, 9 aa, Homo sapiens
  Table A; HLA-B*39:06; TP53; R273C; 0
GRNSFEVCV

SEQ ID NO: 13826 - protein, 9 aa, Homo sapiens
  Table A; HLA-B*27:05; TP53; R273H; 1
GRNSFEVHV

SEQ ID NO: 13827 - protein, 9 aa, Homo sapiens
  Table A; HLA-B*39:06; TP53; R273H; 0
GRNSFEVHV

SEQ ID NO: 13828 - protein, 9 aa, Homo sapiens
  Table A; HLA-C*06:02; TP53; R273H; 1
GRNSFEVHV

SEQ ID NO: 13829 - protein, 9 aa, Homo sapiens
  Table A; HLA-B*27:05; TP53; R273L; 0
GRNSFEVLV

SEQ ID NO: 13830 - protein, 9 aa, Homo sapiens
  Table A; HLA-C*06:02; TP53; R273L; 1
GRNSFEVLV

SEQ ID NO: 13831 - protein, 10 aa, Homo sapiens
  Table A; HLA-B*27:02; TP53; C275Y; 0
GRNSFEVRVY

SEQ ID NO: 13832 - protein, 10 aa, Homo sapiens
  Table A; HLA-B*27:05; TP53; C275Y; 0
GRNSFEVRVY

SEQ ID NO: 13833 - protein, 10 aa, Homo sapiens
  Table A; HLA-C*07:01; TP53; C275Y; 1
GRNSFEVRVY

SEQ ID NO: 13834 - protein, 9 aa, Homo sapiens
  Table A; HLA-B*13:02; TP53; R273S; 0
GRNSFEVSV

SEQ ID NO: 13835 - protein, 9 aa, Homo sapiens
  Table A; HLA-B*27:02; TP53; R273S; 0
GRNSFEVSV

SEQ ID NO: 13836 - protein, 9 aa, Homo sapiens
  Table A; HLA-B*27:05; TP53; R273S; 0
GRNSFEVSV

SEQ ID NO: 13837 - protein, 9 aa, Homo sapiens
  Table A; HLA-B*38:01; TP53; R273S; 0
GRNSFEVSV

SEQ ID NO: 13838 - protein, 9 aa, Homo sapiens
  Table A; HLA-B*39:01; TP53; R273S; 0
GRNSFEVSV

SEQ ID NO: 13839 - protein, 9 aa, Homo sapiens
  Table A; HLA-B*39:06; TP53; R273S; 0
GRNSFEVSV

SEQ ID NO: 13840 - protein, 9 aa, Homo sapiens
  Table A; HLA-B*48:01; TP53; R273S; 0
GRNSFEVSV

SEQ ID NO: 13841 - protein, 9 aa, Homo sapiens
  Table A; HLA-C*06:02; TP53; R273S; 0
GRNSFEVSV

SEQ ID NO: 13842 - protein, 9 aa, Homo sapiens
  Table A; HLA-C*08:03; TP53; R273S; 0
GRNSFEVSV

SEQ ID NO: 13843 - protein, 9 aa, Homo sapiens
  Table A; HLA-C*16:04; TP53; R273S; 0
GRNSFEVSV

SEQ ID NO: 13844 - protein, 9 aa, Homo sapiens
  Table A; HLA-B*27:05; TP53; E271K; 0
GRNSFKVRV

SEQ ID NO: 13845 - protein, 9 aa, Homo sapiens
  Table A; HLA-C*06:02; TP53; E271K; 1
GRNSFKVRV

SEQ ID NO: 13846 - protein, 8 aa, Homo sapiens
  Table A; HLA-B*27:05; CDKN2A; P48L; 0
GRRLIQVM

SEQ ID NO: 13847 - protein, 9 aa, Homo sapiens
  Table A; HLA-B*27:05; CDKN2A; P48L; 0
GRRLIQVMM

SEQ ID NO: 13848 - protein, 8 aa, Homo sapiens
  Table A; HLA-B*14:01; NRAS; G13R; 0
GRVGKSAL

SEQ ID NO: 13849 - protein, 8 aa, Homo sapiens
  Table A; HLA-B*14:02; NRAS; G13R; 0
GRVGKSAL

SEQ ID NO: 13850 - protein, 8 aa, Homo sapiens
  Table A; HLA-B*27:05; NRAS; G13R; 0
GRVGKSAL

SEQ ID NO: 13851 - protein, 9 aa, Homo sapiens
  Table A; HLA-B*27:05; NRAS; G13R; 0
GRVGKSALT

SEQ ID NO: 13852 - protein, 10 aa, Homo sapiens
  Table A; HLA-B*13:02; NRAS; G13R; 0
GRVGKSALTI

SEQ ID NO: 13853 - protein, 10 aa, Homo sapiens
  Table A; HLA-B*27:05; NRAS; G13R; 0
GRVGKSALTI

SEQ ID NO: 13854 - protein, 8 aa, Homo sapiens
  Table A; HLA-A*11:01; BRAF; G469V; 1
GSFVTVYK

SEQ ID NO: 13855 - protein, 8 aa, Homo sapiens
  Table A; HLA-A*02:06; BRAF; G469V; 0
GSGSFVTV

SEQ ID NO: 13856 - protein, 9 aa, Homo sapiens
  Table A; HLA-A*30:02; BRAF; G469V; 0
GSGSFVTVY

SEQ ID NO: 13857 - protein, 9 aa, Homo sapiens
  Table A; HLA-A*30:04; BRAF; G469V; 0
GSGSFVTVY

SEQ ID NO: 13858 - protein, 9 aa, Homo sapiens
  Table A; HLA-B*15:01; BRAF; G469V; 1
GSGSFVTVY

SEQ ID NO: 13859 - protein, 9 aa, Homo sapiens
  Table A; HLA-B*15:03; BRAF; G469V; 0
GSGSFVTVY

SEQ ID NO: 13860 - protein, 9 aa, Homo sapiens
  Table A; HLA-B*58:01; BRAF; G469V; 0
GSGSFVTVY

SEQ ID NO: 13861 - protein, 9 aa, Homo sapiens
  Table A; HLA-C*12:03; BRAF; G469V; 1
GSGSFVTVY

SEQ ID NO: 13862 - protein, 10 aa, Homo sapiens
  Table A; HLA-A*03:01; BRAF; G469V; 1
GSGSFVTVYK

SEQ ID NO: 13863 - protein, 10 aa, Homo sapiens
  Table A; HLA-A*03:02; BRAF; G469V; 0
GSGSFVTVYK

SEQ ID NO: 13864 - protein, 10 aa, Homo sapiens
  Table A; HLA-A*11:01; BRAF; G469V; 1
GSGSFVTVYK

SEQ ID NO: 13865 - protein, 10 aa, Homo sapiens
  Table A; HLA-B*27:02; BRAF; G469V; 0
GSGSFVTVYK

SEQ ID NO: 13866 - protein, 9 aa, Homo sapiens
  Table A; HLA-A*30:02; IDH1; R132S; 0
GSHAYGDQY

SEQ ID NO: 13867 - protein, 9 aa, Homo sapiens
  Table A; HLA-A*30:04; IDH1; R132S; 0
GSHAYGDQY

SEQ ID NO: 13868 - protein, 9 aa, Homo sapiens
  Table A; HLA-B*15:01; IDH1; R132S; 1
GSHAYGDQY

SEQ ID NO: 13869 - protein, 9 aa, Homo sapiens
  Table A; HLA-B*15:03; IDH1; R132S; 0
GSHAYGDQY

SEQ ID NO: 13870 - protein, 9 aa, Homo sapiens
  Table A; HLA-B*39:01; IDH1; R132S; 0
GSHAYGDQY

SEQ ID NO: 13871 - protein, 9 aa, Homo sapiens
  Table A; HLA-B*58:01; IDH1; R132S; 0
GSHAYGDQY

SEQ ID NO: 13872 - protein, 9 aa, Homo sapiens
  Table A; HLA-C*03:02; IDH1; R132S; 0
GSHAYGDQY

SEQ ID NO: 13873 - protein, 11 aa, Homo sapiens
  Table A; HLA-B*15:01; BCORL1; K1207N; 1
GSLENKAKSSF

SEQ ID NO: 13874 - protein, 11 aa, Homo sapiens
  Table A; HLA-B*58:01; BCORL1; K1207N; 0
GSLENKAKSSF

SEQ ID NO: 13875 - protein, 9 aa, Homo sapiens
  Table A; HLA-B*41:02; TP53; G245S; 0
GSMNRRPIL

SEQ ID NO: 13876 - protein, 9 aa, Homo sapiens
  Table A; HLA-C*16:01; TP53; G245S; 1
GSMNRRPIL

SEQ ID NO: 13877 - protein, 9 aa, Homo sapiens
  Table A; HLA-B*13:02; FBXW7; R479Q; 0
GSQDATLRV

SEQ ID NO: 13878 - protein, 9 aa, Homo sapiens
  Table A; HLA-C*15:02; FBXW7; R479Q; 0
GSQDATLRV

SEQ ID NO: 13879 - protein, 10 aa, Homo sapiens
  Table A; HLA-B*57:01; FBXW7; R479Q; 0
GSQDATLRVW

SEQ ID NO: 13880 - protein, 10 aa, Homo sapiens
  Table A; HLA-B*58:01; FBXW7; R479Q; 0
GSQDATLRVW

SEQ ID NO: 13881 - protein, 8 aa, Homo sapiens
  Table A; HLA-B*39:06; TRRAP; S722F; 0
GSVFLFAA

SEQ ID NO: 13882 - protein, 9 aa, Homo sapiens
  Table A; HLA-A*30:02; BRAF; G466V; 0
GSVSFGTVY

SEQ ID NO: 13883 - protein, 9 aa, Homo sapiens
  Table A; HLA-A*30:04; BRAF; G466V; 0
GSVSFGTVY

SEQ ID NO: 13884 - protein, 9 aa, Homo sapiens
  Table A; HLA-B*15:01; BRAF; G466V; 1
GSVSFGTVY

SEQ ID NO: 13885 - protein, 9 aa, Homo sapiens
  Table A; HLA-B*15:02; BRAF; G466V; 0
GSVSFGTVY

SEQ ID NO: 13886 - protein, 9 aa, Homo sapiens
  Table A; HLA-B*15:03; BRAF; G466V; 0
GSVSFGTVY

SEQ ID NO: 13887 - protein, 9 aa, Homo sapiens
  Table A; HLA-B*58:01; BRAF; G466V; 0
GSVSFGTVY

SEQ ID NO: 13888 - protein, 9 aa, Homo sapiens
  Table A; HLA-C*03:02; BRAF; G466V; 0
GSVSFGTVY

SEQ ID NO: 13889 - protein, 10 aa, Homo sapiens
  Table A; HLA-A*03:01; BRAF; G466V; 1
GSVSFGTVYK

SEQ ID NO: 13890 - protein, 10 aa, Homo sapiens
  Table A; HLA-A*03:02; BRAF; G466V; 0
GSVSFGTVYK

SEQ ID NO: 13891 - protein, 10 aa, Homo sapiens
  Table A; HLA-A*11:01; BRAF; G466V; 1
GSVSFGTVYK

SEQ ID NO: 13892 - protein, 10 aa, Homo sapiens
  Table A; HLA-B*27:02; FBXW7; R689W; 0
GSWNGTEETK

SEQ ID NO: 13893 - protein, 9 aa, Homo sapiens
  Table A; HLA-A*29:02; TP53; R110L; 0
GSYGFLLGF

SEQ ID NO: 13894 - protein, 9 aa, Homo sapiens
  Table A; HLA-B*57:01; TP53; R110L; 0
GSYGFLLGF

SEQ ID NO: 13895 - protein, 10 aa, Homo sapiens
  Table A; HLA-A*02:03; TP53; R110L; 0
GSYGFLLGFL

SEQ ID NO: 13896 - protein, 10 aa, Homo sapiens
  Table A; HLA-A*03:01; TP53; R110L; 1
GSYGFLLGFL

SEQ ID NO: 13897 - protein, 9 aa, Homo sapiens
  Table A; HLA-B*57:01; KAT6B; R1254H; 0
GTKHGLSKW

SEQ ID NO: 13898 - protein, 9 aa, Homo sapiens
  Table A; HLA-A*03:01; LIFR; E319K; 1
GTNVVFTTK

SEQ ID NO: 13899 - protein, 9 aa, Homo sapiens
  Table A; HLA-A*03:02; LIFR; E319K; 0
GTNVVFTTK

SEQ ID NO: 13900 - protein, 9 aa, Homo sapiens
  Table A; HLA-A*11:01; LIFR; E319K; 0
GTNVVFTTK

SEQ ID NO: 13901 - protein, 9 aa, Homo sapiens
  Table A; HLA-A*30:01; LIFR; E319K; 0
GTNVVFTTK

SEQ ID NO: 13902 - protein, 9 aa, Homo sapiens
  Table A; HLA-A*31:01; LIFR; E319K; 0
GTNVVFTTK

SEQ ID NO: 13903 - protein, 9 aa, Homo sapiens
  Table A; HLA-A*68:01; LIFR; E319K; 0
GTNVVFTTK

SEQ ID NO: 13904 - protein, 9 aa, Homo sapiens
  Table A; HLA-A*02:01; ARHGEF12; R705H; 1
GTPHTLNTV

SEQ ID NO: 13905 - protein, 9 aa, Homo sapiens
  Table A; HLA-A*02:03; ARHGEF12; R705H; 0
GTPHTLNTV

SEQ ID NO: 13906 - protein, 9 aa, Homo sapiens
  Table A; HLA-A*02:05; ARHGEF12; R705H; 0
GTPHTLNTV

SEQ ID NO: 13907 - protein, 9 aa, Homo sapiens
  Table A; HLA-A*02:06; ARHGEF12; R705H; 0
GTPHTLNTV

SEQ ID NO: 13908 - protein, 9 aa, Homo sapiens
  Table A; HLA-A*02:07; ARHGEF12; R705H; 0
GTPHTLNTV

SEQ ID NO: 13909 - protein, 9 aa, Homo sapiens
  Table A; HLA-A*02:08; ARHGEF12; R705H; 0
GTPHTLNTV

SEQ ID NO: 13910 - protein, 9 aa, Homo sapiens
  Table A; HLA-A*68:02; ARHGEF12; R705H; 0
GTPHTLNTV

SEQ ID NO: 13911 - protein, 9 aa, Homo sapiens
  Table A; HLA-B*50:01; ARHGEF12; R705H; 0
GTPHTLNTV

SEQ ID NO: 13912 - protein, 10 aa, Homo sapiens
  Table A; HLA-A*11:01; SMARCA4; E920K; 0
GTPLQNKLPK

SEQ ID NO: 13913 - protein, 9 aa, Homo sapiens
  Table A; HLA-A*02:01; FAM135B; S11L; 1
GTVEFLVEL

SEQ ID NO: 13914 - protein, 9 aa, Homo sapiens
  Table A; HLA-A*02:03; FAM135B; S11L; 0
GTVEFLVEL

SEQ ID NO: 13915 - protein, 9 aa, Homo sapiens
  Table A; HLA-A*02:04; FAM135B; S11L; 0
GTVEFLVEL

SEQ ID NO: 13916 - protein, 9 aa, Homo sapiens
  Table A; HLA-A*02:05; FAM135B; S11L; 0
GTVEFLVEL

SEQ ID NO: 13917 - protein, 9 aa, Homo sapiens
  Table A; HLA-A*02:06; FAM135B; S11L; 0
GTVEFLVEL

SEQ ID NO: 13918 - protein, 9 aa, Homo sapiens
  Table A; HLA-A*02:08; FAM135B; S11L; 0
GTVEFLVEL

SEQ ID NO: 13919 - protein, 9 aa, Homo sapiens
  Table A; HLA-A*68:02; FAM135B; S11L; 0
GTVEFLVEL

SEQ ID NO: 13920 - protein, 9 aa, Homo sapiens
  Table A; HLA-B*50:01; FAM135B; S11L; 0
GTVEFLVEL

SEQ ID NO: 13921 - protein, 9 aa, Homo sapiens
  Table A; HLA-C*15:02; FAM135B; S11L; 0
GTVEFLVEL

SEQ ID NO: 13922 - protein, 10 aa, Homo sapiens
  Table A; HLA-A*03:01; KEAP1; R470C; 1
GVAVLNCLLY

SEQ ID NO: 13923 - protein, 10 aa, Homo sapiens
  Table A; HLA-A*29:02; KEAP1; R470C; 0
GVAVLNCLLY

SEQ ID NO: 13924 - protein, 9 aa, Homo sapiens
  Table A; HLA-B*13:02; PABPC1; R518C; 0
GVCNPQQHL

SEQ ID NO: 13925 - protein, 9 aa, Homo sapiens
  Table A; HLA-B*13:02; KEAP1; D422N; 0
GVGVINGHI

SEQ ID NO: 13926 - protein, 10 aa, Homo sapiens
  Table A; HLA-B*15:01; KEAP1; D422N; 0
GVGVINGHIY

SEQ ID NO: 13927 - protein, 10 aa, Homo sapiens
  Table A; HLA-B*27:02; KEAP1; D422N; 0
GVGVINGHIY

SEQ ID NO: 13928 - protein, 8 aa, Homo sapiens
  Table A; HLA-A*26:01; KEAP1; D422N; 0
GVINGHIY

SEQ ID NO: 13929 - protein, 8 aa, Homo sapiens
  Table A; HLA-A*30:02; KEAP1; D422N; 0
GVINGHIY

SEQ ID NO: 13930 - protein, 8 aa, Homo sapiens
  Table A; HLA-B*15:01; KEAP1; D422N; 0
GVINGHIY

SEQ ID NO: 13931 - protein, 8 aa, Homo sapiens
  Table A; HLA-B*15:03; KEAP1; D422N; 0
GVINGHIY

SEQ ID NO: 13932 - protein, 8 aa, Homo sapiens
  Table A; HLA-B*27:05; KEAP1; D422N; 0
GVINGHIY

SEQ ID NO: 13933 - protein, 9 aa, Homo sapiens
  Table A; HLA-A*02:05; KEAP1; D422N; 0
GVINGHIYA

SEQ ID NO: 13934 - protein, 9 aa, Homo sapiens
  Table A; HLA-A*02:06; KEAP1; D422N; 0
GVINGHIYA

SEQ ID NO: 13935 - protein, 9 aa, Homo sapiens
  Table A; HLA-A*11:01; KEAP1; D422N; 0
GVINGHIYA

SEQ ID NO: 13936 - protein, 9 aa, Homo sapiens
  Table A; HLA-B*15:01; KEAP1; D422N; 0
GVINGHIYA

SEQ ID NO: 13937 - protein, 9 aa, Homo sapiens
  Table A; HLA-B*50:01; KEAP1; D422N; 0
GVINGHIYA

SEQ ID NO: 13938 - protein, 10 aa, Homo sapiens
  Table A; HLA-A*02:01; KEAP1; D422N; 1
GVINGHIYAV

SEQ ID NO: 13939 - protein, 10 aa, Homo sapiens
  Table A; HLA-A*02:03; KEAP1; D422N; 0
GVINGHIYAV

SEQ ID NO: 13940 - protein, 10 aa, Homo sapiens
  Table A; HLA-A*02:04; KEAP1; D422N; 0
GVINGHIYAV

SEQ ID NO: 13941 - protein, 10 aa, Homo sapiens
  Table A; HLA-A*02:05; KEAP1; D422N; 0
GVINGHIYAV

SEQ ID NO: 13942 - protein, 10 aa, Homo sapiens
  Table A; HLA-A*02:06; KEAP1; D422N; 0
GVINGHIYAV

SEQ ID NO: 13943 - protein, 10 aa, Homo sapiens
  Table A; HLA-A*02:07; KEAP1; D422N; 0
GVINGHIYAV

SEQ ID NO: 13944 - protein, 10 aa, Homo sapiens
  Table A; HLA-A*02:08; KEAP1; D422N; 0
GVINGHIYAV

SEQ ID NO: 13945 - protein, 10 aa, Homo sapiens
  Table A; HLA-A*03:01; KEAP1; D422N; 1
GVINGHIYAV

SEQ ID NO: 13946 - protein, 10 aa, Homo sapiens
  Table A; HLA-A*03:02; KEAP1; D422N; 0
GVINGHIYAV

SEQ ID NO: 13947 - protein, 10 aa, Homo sapiens
  Table A; HLA-A*11:01; KEAP1; D422N; 0
GVINGHIYAV

SEQ ID NO: 13948 - protein, 10 aa, Homo sapiens
  Table A; HLA-A*26:01; KEAP1; D422N; 0
GVINGHIYAV

SEQ ID NO: 13949 - protein, 10 aa, Homo sapiens
  Table A; HLA-A*26:03; KEAP1; D422N; 0
GVINGHIYAV

SEQ ID NO: 13950 - protein, 10 aa, Homo sapiens
  Table A; HLA-A*29:02; KEAP1; D422N; 0
GVINGHIYAV

SEQ ID NO: 13951 - protein, 10 aa, Homo sapiens
  Table A; HLA-A*30:01; KEAP1; D422N; 0
GVINGHIYAV

SEQ ID NO: 13952 - protein, 10 aa, Homo sapiens
  Table A; HLA-A*31:01; KEAP1; D422N; 0
GVINGHIYAV

SEQ ID NO: 13953 - protein, 10 aa, Homo sapiens
  Table A; HLA-A*68:02; KEAP1; D422N; 0
GVINGHIYAV

SEQ ID NO: 13954 - protein, 10 aa, Homo sapiens
  Table A; HLA-B*13:02; KEAP1; D422N; 0
GVINGHIYAV

SEQ ID NO: 13955 - protein, 10 aa, Homo sapiens
  Table A; HLA-B*15:01; KEAP1; D422N; 0
GVINGHIYAV

SEQ ID NO: 13956 - protein, 10 aa, Homo sapiens
  Table A; HLA-B*40:02; KEAP1; D422N; 0
GVINGHIYAV

SEQ ID NO: 13957 - protein, 10 aa, Homo sapiens
  Table A; HLA-B*50:01; KEAP1; D422N; 0
GVINGHIYAV

SEQ ID NO: 13958 - protein, 10 aa, Homo sapiens
  Table A; HLA-A*02:04; KDR; S1100F; 0
GVLLWEIFFL

SEQ ID NO: 13959 - protein, 9 aa, Homo sapiens
  Table A; HLA-B*07:02; TP53; G245V; 1
GVMNRRPIL

SEQ ID NO: 13960 - protein, 9 aa, Homo sapiens
  Table A; HLA-A*03:02; FAS; E261K; 0
GVNEAKIDK

SEQ ID NO: 13961 - protein, 9 aa, Homo sapiens
  Table A; HLA-A*11:01; FAS; E261K; 1
GVNEAKIDK

SEQ ID NO: 13962 - protein, 10 aa, Homo sapiens
  Table A; HLA-A*02:05; FAS; E261K; 0
GVNEAKIDKI

SEQ ID NO: 13963 - protein, 10 aa, Homo sapiens
  Table A; HLA-A*02:06; FAS; E261K; 0
GVNEAKIDKI

SEQ ID NO: 13964 - protein, 10 aa, Homo sapiens
  Table A; HLA-A*02:08; FAS; E261K; 0
GVNEAKIDKI

SEQ ID NO: 13965 - protein, 10 aa, Homo sapiens
  Table A; HLA-B*13:01; FAS; E261K; 0
GVNEAKIDKI

SEQ ID NO: 13966 - protein, 10 aa, Homo sapiens
  Table A; HLA-B*50:01; FAS; E261K; 0
GVNEAKIDKI

SEQ ID NO: 13967 - protein, 10 aa, Homo sapiens
  Table A; HLA-A*03:01; ARHGEF12; R113Q; 1
GVQTGDQIIK

SEQ ID NO: 13968 - protein, 10 aa, Homo sapiens
  Table A; HLA-A*03:02; ARHGEF12; R113Q; 0
GVQTGDQIIK

SEQ ID NO: 13969 - protein, 10 aa, Homo sapiens
  Table A; HLA-A*11:01; ARHGEF12; R113Q; 0
GVQTGDQIIK

SEQ ID NO: 13970 - protein, 10 aa, Homo sapiens
  Table A; HLA-B*27:02; ARHGEF12; R113Q; 0
GVQTGDQIIK

SEQ ID NO: 13971 - protein, 11 aa, Homo sapiens
  Table A; HLA-A*02:01; ARHGEF12; R113Q; 1
GVQTGDQIIKV

SEQ ID NO: 13972 - protein, 11 aa, Homo sapiens
  Table A; HLA-A*02:04; ARHGEF12; R113Q; 0
GVQTGDQIIKV

SEQ ID NO: 13973 - protein, 11 aa, Homo sapiens
  Table A; HLA-A*02:05; ARHGEF12; R113Q; 0
GVQTGDQIIKV

SEQ ID NO: 13974 - protein, 11 aa, Homo sapiens
  Table A; HLA-A*02:06; ARHGEF12; R113Q; 0
GVQTGDQIIKV

SEQ ID NO: 13975 - protein, 11 aa, Homo sapiens
  Table A; HLA-A*02:08; ARHGEF12; R113Q; 0
GVQTGDQIIKV

SEQ ID NO: 13976 - protein, 11 aa, Homo sapiens
  Table A; HLA-A*11:01; ARHGEF12; R113Q; 0
GVQTGDQIIKV

SEQ ID NO: 13977 - protein, 11 aa, Homo sapiens
  Table A; HLA-A*68:02; ARHGEF12; R113Q; 0
GVQTGDQIIKV

SEQ ID NO: 13978 - protein, 11 aa, Homo sapiens
  Table A; HLA-B*50:01; ARHGEF12; R113Q; 0
GVQTGDQIIKV

SEQ ID NO: 13979 - protein, 9 aa, Homo sapiens
  Table A; HLA-A*29:02; NFE2L2; R34G; 0
GVSGEVFDF

SEQ ID NO: 13980 - protein, 9 aa, Homo sapiens
  Table A; HLA-B*13:01; NFE2L2; R34G; 0
GVSGEVFDF

SEQ ID NO: 13981 - protein, 9 aa, Homo sapiens
  Table A; HLA-B*15:01; NFE2L2; R34G; 1
GVSGEVFDF

SEQ ID NO: 13982 - protein, 9 aa, Homo sapiens
  Table A; HLA-B*27:02; NFE2L2; R34G; 0
GVSGEVFDF

SEQ ID NO: 13983 - protein, 9 aa, Homo sapiens
  Table A; HLA-B*35:01; NFE2L2; R34G; 0
GVSGEVFDF

SEQ ID NO: 13984 - protein, 10 aa, Homo sapiens
  Table A; HLA-C*08:03; NFE2L2; R34G; 0
GVSGEVFDFS

SEQ ID NO: 13985 - protein, 9 aa, Homo sapiens
  Table A; HLA-B*15:01; NFE2L2; R34Q; 1
GVSQEVFDF

SEQ ID NO: 13986 - protein, 9 aa, Homo sapiens
  Table A; HLA-B*27:02; NFE2L2; R34Q; 0
GVSQEVFDF

SEQ ID NO: 13987 - protein, 8 aa, Homo sapiens
  Table A; HLA-A*31:01; PTEN; S170N; 0
GVTIPNQR

SEQ ID NO: 13988 - protein, 11 aa, Homo sapiens
  Table A; HLA-A*03:02; GLI1; R637Q; 0
GYNPNAGVTQR

SEQ ID NO: 13989 - protein, 11 aa, Homo sapiens
  Table A; HLA-A*31:01; GLI1; R637Q; 0
GYNPNAGVTQR

SEQ ID NO: 13990 - protein, 11 aa, Homo sapiens
  Table A; HLA-A*33:01; GLI1; R637Q; 0
GYNPNAGVTQR

SEQ ID NO: 13991 - protein, 11 aa, Homo sapiens
  Table A; HLA-A*33:03; GLI1; R637Q; 0
GYNPNAGVTQR

SEQ ID NO: 13992 - protein, 11 aa, Homo sapiens
  Table A; HLA-B*27:02; GLI1; R637Q; 0
GYNPNAGVTQR

SEQ ID NO: 13993 - protein, 11 aa, Homo sapiens
  Table A; HLA-A*31:01; A1CF; E34K; 0
GYSLVQKNGQR

SEQ ID NO: 13994 - protein, 11 aa, Homo sapiens
  Table A; HLA-A*23:01; SMAD4; R361C; 0
GYVDPSGGDCF

SEQ ID NO: 13995 - protein, 11 aa, Homo sapiens
  Table A; HLA-A*24:02; SMAD4; R361C; 1
GYVDPSGGDCF

SEQ ID NO: 13996 - protein, 11 aa, Homo sapiens
  Table A; HLA-B*13:01; SMAD4; R361C; 0
GYVDPSGGDCF

SEQ ID NO: 13997 - protein, 11 aa, Homo sapiens
  Table A; HLA-B*15:01; SMAD4; R361C; 1
GYVDPSGGDCF

SEQ ID NO: 13998 - protein, 11 aa, Homo sapiens
  Table A; HLA-B*15:03; SMAD4; R361C; 0
GYVDPSGGDCF

SEQ ID NO: 13999 - protein, 11 aa, Homo sapiens
  Table A; HLA-B*38:01; SMAD4; R361C; 0
GYVDPSGGDCF

SEQ ID NO: 14000 - protein, 11 aa, Homo sapiens
  Table A; HLA-B*39:01; SMAD4; R361C; 0
GYVDPSGGDCF

SEQ ID NO: 14001 - protein, 11 aa, Homo sapiens
  Table A; HLA-B*44:05; SMAD4; R361C; 0
GYVDPSGGDCF

SEQ ID NO: 14002 - protein, 11 aa, Homo sapiens
  Table A; HLA-B*48:01; SMAD4; R361C; 0
GYVDPSGGDCF

SEQ ID NO: 14003 - protein, 11 aa, Homo sapiens
  Table A; HLA-A*23:01; SMAD4; R361H; 0
GYVDPSGGDHF

SEQ ID NO: 14004 - protein, 11 aa, Homo sapiens
  Table A; HLA-A*24:02; SMAD4; R361H; 1
GYVDPSGGDHF

SEQ ID NO: 14005 - protein, 11 aa, Homo sapiens
  Table A; HLA-B*13:01; SMAD4; R361H; 0
GYVDPSGGDHF

SEQ ID NO: 14006 - protein, 11 aa, Homo sapiens
  Table A; HLA-B*38:01; SMAD4; R361H; 0
GYVDPSGGDHF

SEQ ID NO: 14007 - protein, 11 aa, Homo sapiens
  Table A; HLA-B*39:01; SMAD4; R361H; 0
GYVDPSGGDHF

SEQ ID NO: 14008 - protein, 11 aa, Homo sapiens
  Table A; HLA-B*44:05; SMAD4; R361H; 0
GYVDPSGGDHF

SEQ ID NO: 14009 - protein, 8 aa, Homo sapiens
  Table A; HLA-B*35:03; CTNNB1; S37A; 0
HAGATTTA

SEQ ID NO: 14010 - protein, 8 aa, Homo sapiens
  Table A; HLA-B*39:06; CTNNB1; S37A; 0
HAGATTTA

SEQ ID NO: 14011 - protein, 8 aa, Homo sapiens
  Table A; HLA-B*54:01; CTNNB1; S37A; 0
HAGATTTA

SEQ ID NO: 14012 - protein, 9 aa, Homo sapiens
  Table A; HLA-B*35:01; CTNNB1; S37A; 1
HAGATTTAP

SEQ ID NO: 14013 - protein, 9 aa, Homo sapiens
  Table A; HLA-B*35:03; CTNNB1; S37A; 0
HAGATTTAP

SEQ ID NO: 14014 - protein, 9 aa, Homo sapiens
  Table A; HLA-B*48:01; CTNNB1; S37A; 0
HAGATTTAP

SEQ ID NO: 14015 - protein, 9 aa, Homo sapiens
  Table A; HLA-B*54:01; CTNNB1; S37A; 0
HAGATTTAP

SEQ ID NO: 14016 - protein, 10 aa, Homo sapiens
  Table A; HLA-C*08:03; CTNNB1; S37A; 0
HAGATTTAPS

SEQ ID NO: 14017 - protein, 11 aa, Homo sapiens
  Table A; HLA-B*35:01; CTNNB1; S37A; 1
HAGATTTAPSL

SEQ ID NO: 14018 - protein, 11 aa, Homo sapiens
  Table A; HLA-B*35:03; CTNNB1; S37A; 0
HAGATTTAPSL

SEQ ID NO: 14019 - protein, 9 aa, Homo sapiens
  Table A; HLA-A*31:01; DCAF12L2; R378H; 0
HAQKFLEER

SEQ ID NO: 14020 - protein, 9 aa, Homo sapiens
  Table A; HLA-A*33:01; DCAF12L2; R378H; 0
HAQKFLEER

SEQ ID NO: 14021 - protein, 9 aa, Homo sapiens
  Table A; HLA-A*33:03; DCAF12L2; R378H; 0
HAQKFLEER

SEQ ID NO: 14022 - protein, 8 aa, Homo sapiens
  Table A; HLA-A*23:01; PIK3CA; R38H; 0
HEATLVTI

SEQ ID NO: 14023 - protein, 8 aa, Homo sapiens
  Table A; HLA-A*30:01; PIK3CA; R38H; 0
HEATLVTI

SEQ ID NO: 14024 - protein, 8 aa, Homo sapiens
  Table A; HLA-B*13:02; PIK3CA; R38H; 0
HEATLVTI

SEQ ID NO: 14025 - protein, 8 aa, Homo sapiens
  Table A; HLA-B*18:01; PIK3CA; R38H; 1
HEATLVTI

SEQ ID NO: 14026 - protein, 8 aa, Homo sapiens
  Table A; HLA-B*37:01; PIK3CA; R38H; 0
HEATLVTI

SEQ ID NO: 14027 - protein, 8 aa, Homo sapiens
  Table A; HLA-B*38:01; PIK3CA; R38H; 0
HEATLVTI

SEQ ID NO: 14028 - protein, 8 aa, Homo sapiens
  Table A; HLA-B*39:06; PIK3CA; R38H; 0
HEATLVTI

SEQ ID NO: 14029 - protein, 8 aa, Homo sapiens
  Table A; HLA-B*40:01; PIK3CA; R38H; 1
HEATLVTI

SEQ ID NO: 14030 - protein, 8 aa, Homo sapiens
  Table A; HLA-B*40:02; PIK3CA; R38H; 0
HEATLVTI

SEQ ID NO: 14031 - protein, 8 aa, Homo sapiens
  Table A; HLA-B*40:06; PIK3CA; R38H; 0
HEATLVTI

SEQ ID NO: 14032 - protein, 8 aa, Homo sapiens
  Table A; HLA-B*41:02; PIK3CA; R38H; 0
HEATLVTI

SEQ ID NO: 14033 - protein, 8 aa, Homo sapiens
  Table A; HLA-B*44:05; PIK3CA; R38H; 0
HEATLVTI

SEQ ID NO: 14034 - protein, 8 aa, Homo sapiens
  Table A; HLA-B*49:01; PIK3CA; R38H; 0
HEATLVTI

SEQ ID NO: 14035 - protein, 8 aa, Homo sapiens
  Table A; HLA-B*50:01; PIK3CA; R38H; 0
HEATLVTI

SEQ ID NO: 14036 - protein, 8 aa, Homo sapiens
  Table A; HLA-B*51:01; PIK3CA; R38H; 1
HEATLVTI

SEQ ID NO: 14037 - protein, 8 aa, Homo sapiens
  Table A; HLA-B*58:01; PIK3CA; R38H; 0
HEATLVTI

SEQ ID NO: 14038 - protein, 9 aa, Homo sapiens
  Table A; HLA-A*30:01; PIK3CA; R38H; 0
HEATLVTIK

SEQ ID NO: 14039 - protein, 9 aa, Homo sapiens
  Table A; HLA-A*68:01; PIK3CA; R38H; 0
HEATLVTIK

SEQ ID NO: 14040 - protein, 9 aa, Homo sapiens
  Table A; HLA-B*18:01; PIK3CA; R38H; 1
HEATLVTIK

SEQ ID NO: 14041 - protein, 9 aa, Homo sapiens
  Table A; HLA-B*27:02; PIK3CA; R38H; 0
HEATLVTIK

SEQ ID NO: 14042 - protein, 9 aa, Homo sapiens
  Table A; HLA-B*40:02; PIK3CA; R38H; 0
HEATLVTIK

SEQ ID NO: 14043 - protein, 9 aa, Homo sapiens
  Table A; HLA-B*49:01; PIK3CA; R38H; 0
HEATLVTIK

SEQ ID NO: 14044 - protein, 8 aa, Homo sapiens
  Table A; HLA-B*49:01; MAP2K1; P124S; 0
HECNSSYI

SEQ ID NO: 14045 - protein, 10 aa, Homo sapiens
  Table A; HLA-B*40:06; BCORL1; K1207N; 0
HEEGSLENKA

SEQ ID NO: 14046 - protein, 10 aa, Homo sapiens
  Table A; HLA-B*50:01; BCORL1; K1207N; 0
HEEGSLENKA

SEQ ID NO: 14047 - protein, 8 aa, Homo sapiens
  Table A; HLA-B*39:06; CTNNB1; S37F; 0
HFGATTTA

SEQ ID NO: 14048 - protein, 8 aa, Homo sapiens
  Table A; HLA-B*48:01; CTNNB1; S37F; 0
HFGATTTA

SEQ ID NO: 14049 - protein, 8 aa, Homo sapiens
  Table A; HLA-C*08:03; CTNNB1; S37F; 0
HFGATTTA

SEQ ID NO: 14050 - protein, 8 aa, Homo sapiens
  Table A; HLA-A*11:01; FKBP9; R107H; 1
HFVKIPPK

SEQ ID NO: 14051 - protein, 9 aa, Homo sapiens
  Table A; HLA-A*02:04; FKBP9; R107H; 0
HFVKIPPKL

SEQ ID NO: 14052 - protein, 9 aa, Homo sapiens
  Table A; HLA-A*23:01; FKBP9; R107H; 1
HFVKIPPKL

SEQ ID NO: 14053 - protein, 9 aa, Homo sapiens
  Table A; HLA-A*30:01; FKBP9; R107H; 0
HFVKIPPKL

SEQ ID NO: 14054 - protein, 11 aa, Homo sapiens
  Table A; HLA-A*29:02; FKBP9; R107H; 1
HFVKIPPKLAY

SEQ ID NO: 14055 - protein, 10 aa, Homo sapiens
  Table A; HLA-B*48:01; SF3B1; K700E; 0
HGLVDEQQEV

SEQ ID NO: 14056 - protein, 10 aa, Homo sapiens
  Table A; HLA-C*08:03; SF3B1; K700E; 0
HGLVDEQQEV

SEQ ID NO: 14057 - protein, 11 aa, Homo sapiens
  Table A; HLA-A*68:01; SF3B1; K700E; 0
HGLVDEQQEVR

SEQ ID NO: 14058 - protein, 11 aa, Homo sapiens
  Table A; HLA-B*27:02; SF3B1; K700E; 0
HGLVDEQQEVR

SEQ ID NO: 14059 - protein, 8 aa, Homo sapiens
  Table A; HLA-B*38:01; IDH1; R132H; 1
HHAYGDQY

SEQ ID NO: 14060 - protein, 8 aa, Homo sapiens
  Table A; HLA-B*39:01; IDH1; R132H; 1
HHAYGDQY

SEQ ID NO: 14061 - protein, 9 aa, Homo sapiens
  Table A; HLA-B*38:01; PREX2; E553K; 0
HHVLEKSKF

SEQ ID NO: 14062 - protein, 9 aa, Homo sapiens
  Table A; HLA-B*35:03; SIRPA; V233I; 0
HITLQGDPL

SEQ ID NO: 14063 - protein, 9 aa, Homo sapiens
  Table A; HLA-B*48:01; SIRPA; V233I; 0
HITLQGDPL

SEQ ID NO: 14064 - protein, 9 aa, Homo sapiens
  Table A; HLA-C*08:01; SIRPA; V233I; 0
HITLQGDPL

SEQ ID NO: 14065 - protein, 9 aa, Homo sapiens
  Table A; HLA-C*08:03; SIRPA; V233I; 0
HITLQGDPL

SEQ ID NO: 14066 - protein, 9 aa, Homo sapiens
  Table A; HLA-B*15:03; TP63; E609K; 0
HKFSSPSHL

SEQ ID NO: 14067 - protein, 8 aa, Homo sapiens
  Table A; HLA-B*35:08; PTPRK; E358K; 0
HLDPDTKY

SEQ ID NO: 14068 - protein, 8 aa, Homo sapiens
  Table A; HLA-B*39:01; PTPRK; E358K; 0
HLDPDTKY

SEQ ID NO: 14069 - protein, 10 aa, Homo sapiens
  Table A; HLA-A*02:01; PTPRK; E358K; 1
HLDPDTKYEI

SEQ ID NO: 14070 - protein, 10 aa, Homo sapiens
  Table A; HLA-A*02:04; PTPRK; E358K; 0
HLDPDTKYEI

SEQ ID NO: 14071 - protein, 10 aa, Homo sapiens
  Table A; HLA-A*02:06; PTPRK; E358K; 0
HLDPDTKYEI

SEQ ID NO: 14072 - protein, 10 aa, Homo sapiens
  Table A; HLA-A*02:07; PTPRK; E358K; 0
HLDPDTKYEI

SEQ ID NO: 14073 - protein, 10 aa, Homo sapiens
  Table A; HLA-B*13:01; PTPRK; E358K; 0
HLDPDTKYEI

SEQ ID NO: 14074 - protein, 10 aa, Homo sapiens
  Table A; HLA-B*13:02; PTPRK; E358K; 0
HLDPDTKYEI

SEQ ID NO: 14075 - protein, 10 aa, Homo sapiens
  Table A; HLA-B*38:01; PTPRK; E358K; 0
HLDPDTKYEI

SEQ ID NO: 14076 - protein, 8 aa, Homo sapiens
  Table A; HLA-A*02:01; NFE2L2; D29H; 1
HLGVSREV

SEQ ID NO: 14077 - protein, 8 aa, Homo sapiens
  Table A; HLA-A*02:03; NFE2L2; D29H; 0
HLGVSREV

SEQ ID NO: 14078 - protein, 8 aa, Homo sapiens
  Table A; HLA-B*08:01; NFE2L2; D29H; 1
HLGVSREV

SEQ ID NO: 14079 - protein, 8 aa, Homo sapiens
  Table A; HLA-B*13:02; NFE2L2; D29H; 0
HLGVSREV

SEQ ID NO: 14080 - protein, 8 aa, Homo sapiens
  Table A; HLA-B*15:10; NFE2L2; D29H; 0
HLGVSREV

SEQ ID NO: 14081 - protein, 9 aa, Homo sapiens
  Table A; HLA-B*15:01; NFE2L2; D29H; 0
HLGVSREVF

SEQ ID NO: 14082 - protein, 9 aa, Homo sapiens
  Table A; HLA-B*15:02; NFE2L2; D29H; 0
HLGVSREVF

SEQ ID NO: 14083 - protein, 8 aa, Homo sapiens
  Table A; HLA-A*02:03; TPR; S2155L; 0
HLPQVAGV

SEQ ID NO: 14084 - protein, 8 aa, Homo sapiens
  Table A; HLA-A*02:07; TPR; S2155L; 0
HLPQVAGV

SEQ ID NO: 14085 - protein, 8 aa, Homo sapiens
  Table A; HLA-B*13:02; TPR; S2155L; 0
HLPQVAGV

SEQ ID NO: 14086 - protein, 9 aa, Homo sapiens
  Table A; HLA-B*48:01; TPR; S2155L; 0
HLPQVAGVP

SEQ ID NO: 14087 - protein, 10 aa, Homo sapiens
  Table A; HLA-A*02:07; TPR; S2155L; 0
HLPQVAGVPR

SEQ ID NO: 14088 - protein, 10 aa, Homo sapiens
  Table A; HLA-A*26:03; TPR; S2155L; 0
HLPQVAGVPR

SEQ ID NO: 14089 - protein, 10 aa, Homo sapiens
  Table A; HLA-A*31:01; TPR; S2155L; 0
HLPQVAGVPR

SEQ ID NO: 14090 - protein, 10 aa, Homo sapiens
  Table A; HLA-A*33:01; TPR; S2155L; 0
HLPQVAGVPR

SEQ ID NO: 14091 - protein, 10 aa, Homo sapiens
  Table A; HLA-A*33:03; TPR; S2155L; 0
HLPQVAGVPR

SEQ ID NO: 14092 - protein, 10 aa, Homo sapiens
  Table A; HLA-A*68:01; TPR; S2155L; 0
HLPQVAGVPR

SEQ ID NO: 14093 - protein, 10 aa, Homo sapiens
  Table A; HLA-A*68:02; TPR; S2155L; 0
HLPQVAGVPR

SEQ ID NO: 14094 - protein, 10 aa, Homo sapiens
  Table A; HLA-B*27:02; TPR; S2155L; 0
HLPQVAGVPR

SEQ ID NO: 14095 - protein, 11 aa, Homo sapiens
  Table A; HLA-A*02:07; TPR; S2155L; 0
HLPQVAGVPRF

SEQ ID NO: 14096 - protein, 8 aa, Homo sapiens
  Table A; HLA-A*31:01; TP53; V173M; 0
HMTEVMRR

SEQ ID NO: 14097 - protein, 9 aa, Homo sapiens
  Table A; HLA-A*02:01; TP53; R175G; 1
HMTEVVRGC

SEQ ID NO: 14098 - protein, 9 aa, Homo sapiens
  Table A; HLA-A*02:03; TP53; R175G; 0
HMTEVVRGC

SEQ ID NO: 14099 - protein, 8 aa, Homo sapiens
  Table A; HLA-A*03:02; TP53; R175H; 0
HMTEVVRH

SEQ ID NO: 14100 - protein, 8 aa, Homo sapiens
  Table A; HLA-B*15:02; TP53; R175H; 0
HMTEVVRH

SEQ ID NO: 14101 - protein, 8 aa, Homo sapiens
  Table A; HLA-B*18:01; TP53; R175H; 1
HMTEVVRH

SEQ ID NO: 14102 - protein, 8 aa, Homo sapiens
  Table A; HLA-B*48:01; TP53; R175H; 0
HMTEVVRH

SEQ ID NO: 14103 - protein, 8 aa, Homo sapiens
  Table A; HLA-C*08:03; TP53; R175H; 0
HMTEVVRH

SEQ ID NO: 14104 - protein, 9 aa, Homo sapiens
  Table A; HLA-A*02:01; TP53; R175H; 1
HMTEVVRHC

SEQ ID NO: 14105 - protein, 9 aa, Homo sapiens
  Table A; HLA-A*02:04; TP53; C176F; 0
HMTEVVRRF

SEQ ID NO: 14106 - protein, 9 aa, Homo sapiens
  Table A; HLA-A*03:01; TP53; C176F; 1
HMTEVVRRF

SEQ ID NO: 14107 - protein, 9 aa, Homo sapiens
  Table A; HLA-A*23:01; TP53; C176F; 0
HMTEVVRRF

SEQ ID NO: 14108 - protein, 9 aa, Homo sapiens
  Table A; HLA-B*44:03; TP53; C176F; 1
HMTEVVRRF

SEQ ID NO: 14109 - protein, 9 aa, Homo sapiens
  Table A; HLA-B*57:01; TP53; C176F; 1
HMTEVVRRF

SEQ ID NO: 14110 - protein, 9 aa, Homo sapiens
  Table A; HLA-A*03:01; TP53; C176Y; 1
HMTEVVRRY

SEQ ID NO: 14111 - protein, 9 aa, Homo sapiens
  Table A; HLA-A*29:02; TP53; C176Y; 0
HMTEVVRRY

SEQ ID NO: 14112 - protein, 9 aa, Homo sapiens
  Table A; HLA-A*30:04; TP53; C176Y; 0
HMTEVVRRY

SEQ ID NO: 14113 - protein, 9 aa, Homo sapiens
  Table A; HLA-B*15:02; TP53; C176Y; 0
HMTEVVRRY

SEQ ID NO: 14114 - protein, 9 aa, Homo sapiens
  Table A; HLA-B*35:01; TP53; C176Y; 1
HMTEVVRRY

SEQ ID NO: 14115 - protein, 9 aa, Homo sapiens
  Table A; HLA-B*44:03; TP53; C176Y; 1
HMTEVVRRY

SEQ ID NO: 14116 - protein, 9 aa, Homo sapiens
  Table A; HLA-B*57:01; TP53; C176Y; 0
HMTEVVRRY

SEQ ID NO: 14117 - protein, 9 aa, Homo sapiens
  Table A; HLA-C*16:01; TP53; C176Y; 0
HMTEVVRRY

SEQ ID NO: 14118 - protein, 10 aa, Homo sapiens
  Table A; HLA-A*25:01; VHL; L89H; 0
HNFDGEPQPY

SEQ ID NO: 14119 - protein, 10 aa, Homo sapiens
  Table A; HLA-B*35:01; VHL; L89H; 1
HNFDGEPQPY

SEQ ID NO: 14120 - protein, 8 aa, Homo sapiens
  Table A; HLA-C*16:01; SF3B1; R625H; 0
HNTTARAF

SEQ ID NO: 14121 - protein, 10 aa, Homo sapiens
  Table A; HLA-B*35:01; CTCF; R377H; 1
HPFQCSLCSY

SEQ ID NO: 14122 - protein, 8 aa, Homo sapiens
  Table A; HLA-B*35:03; CTNNB1; S37P; 0
HPGATTTA

SEQ ID NO: 14123 - protein, 8 aa, Homo sapiens
  Table A; HLA-B*39:06; CTNNB1; S37P; 0
HPGATTTA

SEQ ID NO: 14124 - protein, 8 aa, Homo sapiens
  Table A; HLA-B*54:01; CTNNB1; S37P; 0
HPGATTTA

SEQ ID NO: 14125 - protein, 8 aa, Homo sapiens
  Table A; HLA-B*55:01; CTNNB1; S37P; 0
HPGATTTA

SEQ ID NO: 14126 - protein, 8 aa, Homo sapiens
  Table A; HLA-B*55:02; CTNNB1; S37P; 0
HPGATTTA

SEQ ID NO: 14127 - protein, 8 aa, Homo sapiens
  Table A; HLA-B*56:01; CTNNB1; S37P; 0
HPGATTTA

SEQ ID NO: 14128 - protein, 9 aa, Homo sapiens
  Table A; HLA-B*54:01; CTNNB1; S37P; 0
HPGATTTAP

SEQ ID NO: 14129 - protein, 9 aa, Homo sapiens
  Table A; HLA-B*55:01; CTNNB1; S37P; 0
HPGATTTAP

SEQ ID NO: 14130 - protein, 9 aa, Homo sapiens
  Table A; HLA-B*55:02; CTNNB1; S37P; 0
HPGATTTAP

SEQ ID NO: 14131 - protein, 11 aa, Homo sapiens
  Table A; HLA-B*07:02; CTNNB1; S37P; 1
HPGATTTAPSL

SEQ ID NO: 14132 - protein, 11 aa, Homo sapiens
  Table A; HLA-B*35:01; CTNNB1; S37P; 0
HPGATTTAPSL

SEQ ID NO: 14133 - protein, 11 aa, Homo sapiens
  Table A; HLA-B*35:03; CTNNB1; S37P; 0
HPGATTTAPSL

SEQ ID NO: 14134 - protein, 11 aa, Homo sapiens
  Table A; HLA-B*54:01; CTNNB1; S37P; 0
HPGATTTAPSL

SEQ ID NO: 14135 - protein, 11 aa, Homo sapiens
  Table A; HLA-B*55:02; CTNNB1; S37P; 0
HPGATTTAPSL

SEQ ID NO: 14136 - protein, 8 aa, Homo sapiens
  Table A; HLA-B*14:02; CNTNAP2; R283H; 0
HQGRSINL

SEQ ID NO: 14137 - protein, 8 aa, Homo sapiens
  Table A; HLA-B*15:10; CNTNAP2; R283H; 0
HQGRSINL

SEQ ID NO: 14138 - protein, 8 aa, Homo sapiens
  Table A; HLA-B*48:01; CNTNAP2; R283H; 0
HQGRSINL

SEQ ID NO: 14139 - protein, 8 aa, Homo sapiens
  Table A; HLA-B*13:02; ACVR1; R206H; 0
HQITLLEC

SEQ ID NO: 14140 - protein, 8 aa, Homo sapiens
  Table A; HLA-B*39:06; ACVR1; R206H; 0
HQITLLEC

SEQ ID NO: 14141 - protein, 9 aa, Homo sapiens
  Table A; HLA-A*02:05; ACVR1; R206H; 0
HQITLLECV

SEQ ID NO: 14142 - protein, 9 aa, Homo sapiens
  Table A; HLA-A*02:06; ACVR1; R206H; 0
HQITLLECV

SEQ ID NO: 14143 - protein, 9 aa, Homo sapiens
  Table A; HLA-A*02:08; ACVR1; R206H; 0
HQITLLECV

SEQ ID NO: 14144 - protein, 9 aa, Homo sapiens
  Table A; HLA-B*13:02; ACVR1; R206H; 0
HQITLLECV

SEQ ID NO: 14145 - protein, 9 aa, Homo sapiens
  Table A; HLA-B*39:06; ACVR1; R206H; 0
HQITLLECV

SEQ ID NO: 14146 - protein, 9 aa, Homo sapiens
  Table A; HLA-B*38:01; KDR; R1032Q; 0
HRDLAAQNI

SEQ ID NO: 14147 - protein, 10 aa, Homo sapiens
  Table A; HLA-B*58:01; GRIN2A; R1067W; 0
HSDISETSNW

SEQ ID NO: 14148 - protein, 8 aa, Homo sapiens
  Table A; HLA-B*39:06; CTNNB1; T41A; 0
HSGATATA

SEQ ID NO: 14149 - protein, 9 aa, Homo sapiens
  Table A; HLA-B*48:01; CTNNB1; T41A; 0
HSGATATAP

SEQ ID NO: 14150 - protein, 8 aa, Homo sapiens
  Table A; HLA-B*39:06; CTNNB1; T41I; 0
HSGATITA

SEQ ID NO: 14151 - protein, 8 aa, Homo sapiens
  Table A; HLA-B*54:01; CTNNB1; T41I; 0
HSGATITA

SEQ ID NO: 14152 - protein, 8 aa, Homo sapiens
  Table A; HLA-B*58:01; CTNNB1; T41I; 0
HSGATITA

SEQ ID NO: 14153 - protein, 8 aa, Homo sapiens
  Table A; HLA-C*08:03; CTNNB1; T41I; 0
HSGATITA

SEQ ID NO: 14154 - protein, 9 aa, Homo sapiens
  Table A; HLA-B*48:01; CTNNB1; T41I; 0
HSGATITAP

SEQ ID NO: 14155 - protein, 10 aa, Homo sapiens
  Table A; HLA-A*68:02; CTNNB1; S45F; 0
HSGATTTAPF

SEQ ID NO: 14156 - protein, 8 aa, Homo sapiens
  Table A; HLA-B*08:01; CTNNB1; D32H; 1
HSGIHSGA

SEQ ID NO: 14157 - protein, 8 aa, Homo sapiens
  Table A; HLA-B*39:06; CTNNB1; D32H; 0
HSGIHSGA

SEQ ID NO: 14158 - protein, 8 aa, Homo sapiens
  Table A; HLA-B*48:01; CTNNB1; D32H; 0
HSGIHSGA

SEQ ID NO: 14159 - protein, 8 aa, Homo sapiens
  Table A; HLA-C*08:03; CTNNB1; D32H; 0
HSGIHSGA

SEQ ID NO: 14160 - protein, 9 aa, Homo sapiens
  Table A; HLA-B*48:01; CTNNB1; D32H; 0
HSGIHSGAT

SEQ ID NO: 14161 - protein, 9 aa, Homo sapiens
  Table A; HLA-C*08:03; CTNNB1; D32H; 0
HSGIHSGAT

SEQ ID NO: 14162 - protein, 9 aa, Homo sapiens
  Table A; HLA-A*68:02; CNTNAP2; R283H; 0
HSVVIEHQG

SEQ ID NO: 14163 - protein, 10 aa, Homo sapiens
  Table A; HLA-A*68:01; CNTNAP2; R283H; 0
HSVVIEHQGR

SEQ ID NO: 14164 - protein, 9 aa, Homo sapiens
  Table A; HLA-A*68:02; CTCF; R377H; 0
HTGEHPFQC

SEQ ID NO: 14165 - protein, 10 aa, Homo sapiens
  Table A; HLA-A*26:01; FBXW7; R505G; 0
HVAAVGCVQY

SEQ ID NO: 14166 - protein, 10 aa, Homo sapiens
  Table A; HLA-A*26:02; FBXW7; R505G; 0
HVAAVGCVQY

SEQ ID NO: 14167 - protein, 10 aa, Homo sapiens
  Table A; HLA-A*26:03; FBXW7; R505G; 0
HVAAVGCVQY

SEQ ID NO: 14168 - protein, 10 aa, Homo sapiens
  Table A; HLA-A*29:01; FBXW7; R505G; 0
HVAAVGCVQY

SEQ ID NO: 14169 - protein, 10 aa, Homo sapiens
  Table A; HLA-A*29:02; FBXW7; R505G; 0
HVAAVGCVQY

SEQ ID NO: 14170 - protein, 10 aa, Homo sapiens
  Table A; HLA-A*30:04; FBXW7; R505G; 0
HVAAVGCVQY

SEQ ID NO: 14171 - protein, 10 aa, Homo sapiens
  Table A; HLA-A*68:01; FBXW7; R505G; 0
HVAAVGCVQY

SEQ ID NO: 14172 - protein, 10 aa, Homo sapiens
  Table A; HLA-B*15:01; FBXW7; R505G; 1
HVAAVGCVQY

SEQ ID NO: 14173 - protein, 10 aa, Homo sapiens
  Table A; HLA-B*15:02; FBXW7; R505G; 0
HVAAVGCVQY

SEQ ID NO: 14174 - protein, 10 aa, Homo sapiens
  Table A; HLA-B*35:01; FBXW7; R505G; 1
HVAAVGCVQY

SEQ ID NO: 14175 - protein, 10 aa, Homo sapiens
  Table A; HLA-B*35:08; FBXW7; R505G; 0
HVAAVGCVQY

SEQ ID NO: 14176 - protein, 9 aa, Homo sapiens
  Table A; HLA-A*03:01; CHD4; R975H; 1
HVELSPMQK

SEQ ID NO: 14177 - protein, 9 aa, Homo sapiens
  Table A; HLA-A*03:02; CHD4; R975H; 0
HVELSPMQK

SEQ ID NO: 14178 - protein, 9 aa, Homo sapiens
  Table A; HLA-A*11:01; CHD4; R975H; 1
HVELSPMQK

SEQ ID NO: 14179 - protein, 9 aa, Homo sapiens
  Table A; HLA-A*68:01; CHD4; R975H; 0
HVELSPMQK

SEQ ID NO: 14180 - protein, 10 aa, Homo sapiens
  Table A; HLA-A*03:01; CHD4; R975H; 1
HVELSPMQKK

SEQ ID NO: 14181 - protein, 10 aa, Homo sapiens
  Table A; HLA-A*03:02; CHD4; R975H; 0
HVELSPMQKK

SEQ ID NO: 14182 - protein, 10 aa, Homo sapiens
  Table A; HLA-A*11:01; CHD4; R975H; 1
HVELSPMQKK

SEQ ID NO: 14183 - protein, 9 aa, Homo sapiens
  Table A; HLA-A*31:01; EGFR; L858R; 1
HVKITDFGR

SEQ ID NO: 14184 - protein, 8 aa, Homo sapiens
  Table A; HLA-B*08:01; PREX2; E553K; 0
HVLEKSKF

SEQ ID NO: 14185 - protein, 9 aa, Homo sapiens
  Table A; HLA-A*03:01; PREX2; E553K; 1
HVLEKSKFK

SEQ ID NO: 14186 - protein, 9 aa, Homo sapiens
  Table A; HLA-A*11:01; PREX2; E553K; 0
HVLEKSKFK

SEQ ID NO: 14187 - protein, 8 aa, Homo sapiens
  Table A; HLA-B*15:02; GNAS; R201H; 0
HVLTSGIF

SEQ ID NO: 14188 - protein, 10 aa, Homo sapiens
  Table A; HLA-A*68:02; GNAS; R201H; 0
HVLTSGIFET

SEQ ID NO: 14189 - protein, 10 aa, Homo sapiens
  Table A; HLA-C*08:03; GNAS; R201H; 0
HVLTSGIFET

SEQ ID NO: 14190 - protein, 11 aa, Homo sapiens
  Table A; HLA-A*03:01; GNAS; R201H; 1
HVLTSGIFETK

SEQ ID NO: 14191 - protein, 11 aa, Homo sapiens
  Table A; HLA-A*03:02; GNAS; R201H; 0
HVLTSGIFETK

SEQ ID NO: 14192 - protein, 11 aa, Homo sapiens
  Table A; HLA-A*11:01; GNAS; R201H; 1
HVLTSGIFETK

SEQ ID NO: 14193 - protein, 11 aa, Homo sapiens
  Table A; HLA-A*31:01; GNAS; R201H; 0
HVLTSGIFETK

SEQ ID NO: 14194 - protein, 11 aa, Homo sapiens
  Table A; HLA-A*68:01; GNAS; R201H; 0
HVLTSGIFETK

SEQ ID NO: 14195 - protein, 11 aa, Homo sapiens
  Table A; HLA-A*68:02; GNAS; R201H; 0
HVLTSGIFETK

SEQ ID NO: 14196 - protein, 11 aa, Homo sapiens
  Table A; HLA-B*27:02; GNAS; R201H; 0
HVLTSGIFETK

SEQ ID NO: 14197 - protein, 11 aa, Homo sapiens
  Table A; HLA-B*07:02; MTOR; A2056V; 1
HVMMERGPQTL

SEQ ID NO: 14198 - protein, 9 aa, Homo sapiens
  Table A; HLA-A*02:03; CHST11; A159T; 0
HVSTNLKTL

SEQ ID NO: 14199 - protein, 9 aa, Homo sapiens
  Table A; HLA-A*02:04; CHST11; A159T; 0
HVSTNLKTL

SEQ ID NO: 14200 - protein, 9 aa, Homo sapiens
  Table A; HLA-A*02:05; CHST11; A159T; 0
HVSTNLKTL

SEQ ID NO: 14201 - protein, 9 aa, Homo sapiens
  Table A; HLA-A*02:06; CHST11; A159T; 0
HVSTNLKTL

SEQ ID NO: 14202 - protein, 9 aa, Homo sapiens
  Table A; HLA-A*02:08; CHST11; A159T; 0
HVSTNLKTL

SEQ ID NO: 14203 - protein, 9 aa, Homo sapiens
  Table A; HLA-A*68:02; CHST11; A159T; 0
HVSTNLKTL

SEQ ID NO: 14204 - protein, 9 aa, Homo sapiens
  Table A; HLA-B*15:02; CHST11; A159T; 0
HVSTNLKTL

SEQ ID NO: 14205 - protein, 9 aa, Homo sapiens
  Table A; HLA-C*16:02; CHST11; A159T; 0
HVSTNLKTL

SEQ ID NO: 14206 - protein, 9 aa, Homo sapiens
  Table A; HLA-A*23:01; CTNNB1; D32Y; 0
HWQQQSYLY

SEQ ID NO: 14207 - protein, 9 aa, Homo sapiens
  Table A; HLA-A*24:02; CTNNB1; D32Y; 1
HWQQQSYLY

SEQ ID NO: 14208 - protein, 9 aa, Homo sapiens
  Table A; HLA-A*29:01; CTNNB1; D32Y; 0
HWQQQSYLY

SEQ ID NO: 14209 - protein, 9 aa, Homo sapiens
  Table A; HLA-A*29:02; CTNNB1; D32Y; 1
HWQQQSYLY

SEQ ID NO: 14210 - protein, 9 aa, Homo sapiens
  Table A; HLA-A*23:01; TP53; S241F; 0
HYNYMCNSF

SEQ ID NO: 14211 - protein, 9 aa, Homo sapiens
  Table A; HLA-A*24:02; TP53; S241F; 1
HYNYMCNSF

SEQ ID NO: 14212 - protein, 9 aa, Homo sapiens
  Table A; HLA-C*14:02; TP53; S241F; 0
HYNYMCNSF

SEQ ID NO: 14213 - protein, 9 aa, Homo sapiens
  Table A; HLA-C*14:03; TP53; S241F; 0
HYNYMCNSF

SEQ ID NO: 14214 - protein, 8 aa, Homo sapiens
  Table A; HLA-B*08:01; PIK3CA; Y1021C; 1
IACIRKTL

SEQ ID NO: 14215 - protein, 8 aa, Homo sapiens
  Table A; HLA-C*16:01; PIK3CA; Y1021C; 0
IACIRKTL

SEQ ID NO: 14216 - protein, 9 aa, Homo sapiens
  Table A; HLA-C*16:01; FGFR2; C382R; 0
IAIYRIGVF

SEQ ID NO: 14217 - protein, 9 aa, Homo sapiens
  Table A; HLA-B*57:01; ARID2; S297F; 1
IAVILRNLF

SEQ ID NO: 14218 - protein, 10 aa, Homo sapiens
  Table A; HLA-B*57:01; ARID2; S297F; 1
IAVILRNLFF

SEQ ID NO: 14219 - protein, 9 aa, Homo sapiens
  Table A; HLA-C*08:02; SIRPA; V233I; 0
ICEVAHITL

SEQ ID NO: 14220 - protein, 9 aa, Homo sapiens
  Table A; HLA-A*02:04; ARID1A; G2087R; 0
ICLPVLDRL

SEQ ID NO: 14221 - protein, 9 aa, Homo sapiens
  Table A; HLA-A*30:01; NFE2L2; R34G; 0
IDLGVSGEV

SEQ ID NO: 14222 - protein, 9 aa, Homo sapiens
  Table A; HLA-A*68:01; NFE2L2; R34G; 0
IDLGVSGEV

SEQ ID NO: 14223 - protein, 9 aa, Homo sapiens
  Table A; HLA-A*68:02; NFE2L2; R34G; 0
IDLGVSGEV

SEQ ID NO: 14224 - protein, 9 aa, Homo sapiens
  Table A; HLA-B*13:02; NFE2L2; R34G; 0
IDLGVSGEV

SEQ ID NO: 14225 - protein, 9 aa, Homo sapiens
  Table A; HLA-B*37:01; NFE2L2; R34G; 0
IDLGVSGEV

SEQ ID NO: 14226 - protein, 9 aa, Homo sapiens
  Table A; HLA-B*39:01; NFE2L2; R34G; 0
IDLGVSGEV

SEQ ID NO: 14227 - protein, 9 aa, Homo sapiens
  Table A; HLA-B*40:02; NFE2L2; R34G; 0
IDLGVSGEV

SEQ ID NO: 14228 - protein, 9 aa, Homo sapiens
  Table A; HLA-B*41:02; NFE2L2; R34G; 0
IDLGVSGEV

SEQ ID NO: 14229 - protein, 9 aa, Homo sapiens
  Table A; HLA-B*48:01; NFE2L2; R34G; 0
IDLGVSGEV

SEQ ID NO: 14230 - protein, 9 aa, Homo sapiens
  Table A; HLA-B*49:01; NFE2L2; R34G; 0
IDLGVSGEV

SEQ ID NO: 14231 - protein, 9 aa, Homo sapiens
  Table A; HLA-B*51:01; NFE2L2; R34G; 0
IDLGVSGEV

SEQ ID NO: 14232 - protein, 10 aa, Homo sapiens
  Table A; HLA-A*23:01; NFE2L2; R34G; 0
IDLGVSGEVF

SEQ ID NO: 14233 - protein, 10 aa, Homo sapiens
  Table A; HLA-B*15:01; NFE2L2; R34G; 1
IDLGVSGEVF

SEQ ID NO: 14234 - protein, 10 aa, Homo sapiens
  Table A; HLA-B*18:01; NFE2L2; R34G; 0
IDLGVSGEVF

SEQ ID NO: 14235 - protein, 10 aa, Homo sapiens
  Table A; HLA-B*27:02; NFE2L2; R34G; 0
IDLGVSGEVF

SEQ ID NO: 14236 - protein, 10 aa, Homo sapiens
  Table A; HLA-B*38:01; NFE2L2; R34G; 0
IDLGVSGEVF

SEQ ID NO: 14237 - protein, 10 aa, Homo sapiens
  Table A; HLA-B*40:02; NFE2L2; R34G; 0
IDLGVSGEVF

SEQ ID NO: 14238 - protein, 10 aa, Homo sapiens
  Table A; HLA-B*44:05; NFE2L2; R34G; 0
IDLGVSGEVF

SEQ ID NO: 14239 - protein, 9 aa, Homo sapiens
  Table A; HLA-A*02:01; NFE2L2; R34Q; 1
IDLGVSQEV

SEQ ID NO: 14240 - protein, 9 aa, Homo sapiens
  Table A; HLA-A*02:06; NFE2L2; R34Q; 0
IDLGVSQEV

SEQ ID NO: 14241 - protein, 9 aa, Homo sapiens
  Table A; HLA-A*30:01; NFE2L2; R34Q; 0
IDLGVSQEV

SEQ ID NO: 14242 - protein, 9 aa, Homo sapiens
  Table A; HLA-A*68:02; NFE2L2; R34Q; 0
IDLGVSQEV

SEQ ID NO: 14243 - protein, 9 aa, Homo sapiens
  Table A; HLA-B*13:02; NFE2L2; R34Q; 0
IDLGVSQEV

SEQ ID NO: 14244 - protein, 9 aa, Homo sapiens
  Table A; HLA-B*15:10; NFE2L2; R34Q; 0
IDLGVSQEV

SEQ ID NO: 14245 - protein, 9 aa, Homo sapiens
  Table A; HLA-B*27:02; NFE2L2; R34Q; 0
IDLGVSQEV

SEQ ID NO: 14246 - protein, 9 aa, Homo sapiens
  Table A; HLA-B*35:03; NFE2L2; R34Q; 0
IDLGVSQEV

SEQ ID NO: 14247 - protein, 9 aa, Homo sapiens
  Table A; HLA-B*37:01; NFE2L2; R34Q; 0
IDLGVSQEV

SEQ ID NO: 14248 - protein, 9 aa, Homo sapiens
  Table A; HLA-B*38:01; NFE2L2; R34Q; 0
IDLGVSQEV

SEQ ID NO: 14249 - protein, 9 aa, Homo sapiens
  Table A; HLA-B*39:01; NFE2L2; R34Q; 0
IDLGVSQEV

SEQ ID NO: 14250 - protein, 9 aa, Homo sapiens
  Table A; HLA-B*40:01; NFE2L2; R34Q; 1
IDLGVSQEV

SEQ ID NO: 14251 - protein, 9 aa, Homo sapiens
  Table A; HLA-B*40:02; NFE2L2; R34Q; 0
IDLGVSQEV

SEQ ID NO: 14252 - protein, 9 aa, Homo sapiens
  Table A; HLA-B*41:02; NFE2L2; R34Q; 0
IDLGVSQEV

SEQ ID NO: 14253 - protein, 9 aa, Homo sapiens
  Table A; HLA-B*44:05; NFE2L2; R34Q; 0
IDLGVSQEV

SEQ ID NO: 14254 - protein, 9 aa, Homo sapiens
  Table A; HLA-B*48:01; NFE2L2; R34Q; 0
IDLGVSQEV

SEQ ID NO: 14255 - protein, 9 aa, Homo sapiens
  Table A; HLA-B*49:01; NFE2L2; R34Q; 0
IDLGVSQEV

SEQ ID NO: 14256 - protein, 9 aa, Homo sapiens
  Table A; HLA-B*51:01; NFE2L2; R34Q; 1
IDLGVSQEV

SEQ ID NO: 14257 - protein, 9 aa, Homo sapiens
  Table A; HLA-C*08:01; NFE2L2; R34Q; 0
IDLGVSQEV

SEQ ID NO: 14258 - protein, 9 aa, Homo sapiens
  Table A; HLA-C*08:03; NFE2L2; R34Q; 0
IDLGVSQEV

SEQ ID NO: 14259 - protein, 9 aa, Homo sapiens
  Table A; HLA-C*16:04; NFE2L2; R34Q; 0
IDLGVSQEV

SEQ ID NO: 14260 - protein, 10 aa, Homo sapiens
  Table A; HLA-B*27:02; NFE2L2; R34Q; 0
IDLGVSQEVF

SEQ ID NO: 14261 - protein, 10 aa, Homo sapiens
  Table A; HLA-B*40:02; NFE2L2; R34Q; 0
IDLGVSQEVF

SEQ ID NO: 14262 - protein, 10 aa, Homo sapiens
  Table A; HLA-B*44:05; NFE2L2; R34Q; 0
IDLGVSQEVF

SEQ ID NO: 14263 - protein, 9 aa, Homo sapiens
  Table A; HLA-A*30:01; CSMD3; S300F; 0
IEGFEPPTI

SEQ ID NO: 14264 - protein, 9 aa, Homo sapiens
  Table A; HLA-B*40:02; CSMD3; S300F; 0
IEGFEPPTI

SEQ ID NO: 14265 - protein, 9 aa, Homo sapiens
  Table A; HLA-B*44:05; CSMD3; S300F; 0
IEGFEPPTI

SEQ ID NO: 14266 - protein, 9 aa, Homo sapiens
  Table A; HLA-B*49:01; CSMD3; S300F; 0
IEGFEPPTI

SEQ ID NO: 14267 - protein, 8 aa, Homo sapiens
  Table A; HLA-B*40:02; DDIT3; R147H; 0
IEHLTREV

SEQ ID NO: 14268 - protein, 8 aa, Homo sapiens
  Table A; HLA-B*41:02; DDIT3; R147H; 0
IEHLTREV

SEQ ID NO: 14269 - protein, 8 aa, Homo sapiens
  Table A; HLA-B*49:01; DDIT3; R147H; 0
IEHLTREV

SEQ ID NO: 14270 - protein, 8 aa, Homo sapiens
  Table A; HLA-B*50:01; DDIT3; R147H; 0
IEHLTREV

SEQ ID NO: 14271 - protein, 10 aa, Homo sapiens
  Table A; HLA-B*50:01; DDIT3; R147H; 0
IEHLTREVEA

SEQ ID NO: 14272 - protein, 8 aa, Homo sapiens
  Table A; HLA-B*40:02; CNTNAP2; R283H; 0
IEHQGRSI

SEQ ID NO: 14273 - protein, 8 aa, Homo sapiens
  Table A; HLA-B*41:02; CNTNAP2; R283H; 0
IEHQGRSI

SEQ ID NO: 14274 - protein, 8 aa, Homo sapiens
  Table A; HLA-B*49:01; CNTNAP2; R283H; 0
IEHQGRSI

SEQ ID NO: 14275 - protein, 10 aa, Homo sapiens
  Table A; HLA-B*37:01; CNTNAP2; R283H; 0
IEHQGRSINL

SEQ ID NO: 14276 - protein, 10 aa, Homo sapiens
  Table A; HLA-B*40:02; CNTNAP2; R283H; 0
IEHQGRSINL

SEQ ID NO: 14277 - protein, 10 aa, Homo sapiens
  Table A; HLA-B*41:02; CNTNAP2; R283H; 0
IEHQGRSINL

SEQ ID NO: 14278 - protein, 10 aa, Homo sapiens
  Table A; HLA-B*44:05; CNTNAP2; R283H; 0
IEHQGRSINL

SEQ ID NO: 14279 - protein, 8 aa, Homo sapiens
  Table A; HLA-B*40:01; PIK3R1; K567E; 1
IEPDLIQL

SEQ ID NO: 14280 - protein, 8 aa, Homo sapiens
  Table A; HLA-B*40:02; PIK3R1; K567E; 0
IEPDLIQL

SEQ ID NO: 14281 - protein, 8 aa, Homo sapiens
  Table A; HLA-B*41:02; PIK3R1; K567E; 0
IEPDLIQL

SEQ ID NO: 14282 - protein, 8 aa, Homo sapiens
  Table A; HLA-B*49:01; PIK3R1; K567E; 0
IEPDLIQL

SEQ ID NO: 14283 - protein, 9 aa, Homo sapiens
  Table A; HLA-A*33:01; PIK3R1; K567E; 0
IEPDLIQLR

SEQ ID NO: 14284 - protein, 9 aa, Homo sapiens
  Table A; HLA-A*33:03; PIK3R1; K567E; 0
IEPDLIQLR

SEQ ID NO: 14285 - protein, 9 aa, Homo sapiens
  Table A; HLA-A*68:01; PIK3R1; K567E; 0
IEPDLIQLR

SEQ ID NO: 14286 - protein, 9 aa, Homo sapiens
  Table A; HLA-A*68:02; PIK3R1; K567E; 0
IEPDLIQLR

SEQ ID NO: 14287 - protein, 9 aa, Homo sapiens
  Table A; HLA-B*27:02; PIK3R1; K567E; 0
IEPDLIQLR

SEQ ID NO: 14288 - protein, 10 aa, Homo sapiens
  Table A; HLA-A*11:01; PIK3R1; K567E; 1
IEPDLIQLRK

SEQ ID NO: 14289 - protein, 10 aa, Homo sapiens
  Table A; HLA-B*27:02; PIK3R1; K567E; 0
IEPDLIQLRK

SEQ ID NO: 14290 - protein, 11 aa, Homo sapiens
  Table A; HLA-B*44:05; PIK3CA; R108H; 0
IEPVGNHEEKI

SEQ ID NO: 14291 - protein, 9 aa, Homo sapiens
  Table A; HLA-C*14:02; KDR; S1100F; 0
IFFLGASPY

SEQ ID NO: 14292 - protein, 10 aa, Homo sapiens
  Table A; HLA-A*29:02; POLE; S297F; 0
IFYMIDGQGY

SEQ ID NO: 14293 - protein, 10 aa, Homo sapiens
  Table A; HLA-B*27:02; POLE; S297F; 0
IFYMIDGQGY

SEQ ID NO: 14294 - protein, 10 aa, Homo sapiens
  Table A; HLA-B*27:02; BRAF; V600E; 1
IGDFGLATEK

SEQ ID NO: 14295 - protein, 10 aa, Homo sapiens
  Table A; HLA-A*11:01; PTPRT; E324K; 1
IGDGPIILKK

SEQ ID NO: 14296 - protein, 10 aa, Homo sapiens
  Table A; HLA-B*27:02; PTPRT; E324K; 0
IGDGPIILKK

SEQ ID NO: 14297 - protein, 9 aa, Homo sapiens
  Table A; HLA-A*02:04; NFE2L2; D29G; 0
IGLGVSREV

SEQ ID NO: 14298 - protein, 9 aa, Homo sapiens
  Table A; HLA-B*13:02; NFE2L2; D29G; 0
IGLGVSREV

SEQ ID NO: 14299 - protein, 9 aa, Homo sapiens
  Table A; HLA-B*15:10; NFE2L2; D29G; 0
IGLGVSREV

SEQ ID NO: 14300 - protein, 9 aa, Homo sapiens
  Table A; HLA-B*51:01; NFE2L2; D29G; 0
IGLGVSREV

SEQ ID NO: 14301 - protein, 9 aa, Homo sapiens
  Table A; HLA-B*57:01; NFE2L2; D29G; 0
IGLGVSREV

SEQ ID NO: 14302 - protein, 10 aa, Homo sapiens
  Table A; HLA-A*02:04; NFE2L2; D29G; 0
IGLGVSREVF

SEQ ID NO: 14303 - protein, 10 aa, Homo sapiens
  Table A; HLA-A*23:01; NFE2L2; D29G; 0
IGLGVSREVF

SEQ ID NO: 14304 - protein, 10 aa, Homo sapiens
  Table A; HLA-B*57:01; NFE2L2; D29G; 0
IGLGVSREVF

SEQ ID NO: 14305 - protein, 9 aa, Homo sapiens
  Table A; HLA-A*02:06; BRAF; G469V; 0
IGSGSFVTV

SEQ ID NO: 14306 - protein, 9 aa, Homo sapiens
  Table A; HLA-B*51:01; BRAF; G469V; 1
IGSGSFVTV

SEQ ID NO: 14307 - protein, 11 aa, Homo sapiens
  Table A; HLA-A*30:02; KEAP1; D422N; 0
IGVGVINGHIY

SEQ ID NO: 14308 - protein, 11 aa, Homo sapiens
  Table A; HLA-B*35:01; KEAP1; D422N; 0
IGVGVINGHIY

SEQ ID NO: 14309 - protein, 11 aa, Homo sapiens
  Table A; HLA-B*57:01; KEAP1; D422N; 0
IGVGVINGHIY

SEQ ID NO: 14310 - protein, 8 aa, Homo sapiens
  Table A; HLA-B*15:10; CTNNB1; S37A; 0
IHAGATTT

SEQ ID NO: 14311 - protein, 8 aa, Homo sapiens
  Table A; HLA-B*38:01; CTNNB1; S37A; 0
IHAGATTT

SEQ ID NO: 14312 - protein, 8 aa, Homo sapiens
  Table A; HLA-B*39:01; CTNNB1; S37A; 0
IHAGATTT

SEQ ID NO: 14313 - protein, 8 aa, Homo sapiens
  Table A; HLA-B*39:06; CTNNB1; S37A; 0
IHAGATTT

SEQ ID NO: 14314 - protein, 8 aa, Homo sapiens
  Table A; HLA-C*08:03; CTNNB1; S37A; 0
IHAGATTT

SEQ ID NO: 14315 - protein, 9 aa, Homo sapiens
  Table A; HLA-A*02:05; CTNNB1; S37A; 0
IHAGATTTA

SEQ ID NO: 14316 - protein, 9 aa, Homo sapiens
  Table A; HLA-B*15:10; CTNNB1; S37A; 0
IHAGATTTA

SEQ ID NO: 14317 - protein, 9 aa, Homo sapiens
  Table A; HLA-B*38:01; CTNNB1; S37A; 0
IHAGATTTA

SEQ ID NO: 14318 - protein, 9 aa, Homo sapiens
  Table A; HLA-B*39:01; CTNNB1; S37A; 0
IHAGATTTA

SEQ ID NO: 14319 - protein, 9 aa, Homo sapiens
  Table A; HLA-B*39:06; CTNNB1; S37A; 0
IHAGATTTA

SEQ ID NO: 14320 - protein, 9 aa, Homo sapiens
  Table A; HLA-B*48:01; CTNNB1; S37A; 0
IHAGATTTA

SEQ ID NO: 14321 - protein, 10 aa, Homo sapiens
  Table A; HLA-B*15:10; CTNNB1; S37A; 0
IHAGATTTAP

SEQ ID NO: 14322 - protein, 10 aa, Homo sapiens
  Table A; HLA-B*38:01; CTNNB1; S37A; 0
IHAGATTTAP

SEQ ID NO: 14323 - protein, 10 aa, Homo sapiens
  Table A; HLA-B*39:01; CTNNB1; S37A; 0
IHAGATTTAP

SEQ ID NO: 14324 - protein, 9 aa, Homo sapiens
  Table A; HLA-B*15:10; CTNNB1; S37C; 0
IHCGATTTA

SEQ ID NO: 14325 - protein, 9 aa, Homo sapiens
  Table A; HLA-B*39:01; CTNNB1; S37C; 0
IHCGATTTA

SEQ ID NO: 14326 - protein, 9 aa, Homo sapiens
  Table A; HLA-B*39:06; CTNNB1; S37C; 0
IHCGATTTA

SEQ ID NO: 14327 - protein, 9 aa, Homo sapiens
  Table A; HLA-B*15:10; PTEN; R130L; 0
IHCKAGKGL

SEQ ID NO: 14328 - protein, 8 aa, Homo sapiens
  Table A; HLA-B*15:10; ROBO2; D1014N; 0
IHELAVNL

SEQ ID NO: 14329 - protein, 8 aa, Homo sapiens
  Table A; HLA-B*39:01; ROBO2; D1014N; 0
IHELAVNL

SEQ ID NO: 14330 - protein, 8 aa, Homo sapiens
  Table A; HLA-B*15:10; CTNNB1; S37F; 0
IHFGATTT

SEQ ID NO: 14331 - protein, 8 aa, Homo sapiens
  Table A; HLA-B*27:05; CTNNB1; S37F; 1
IHFGATTT

SEQ ID NO: 14332 - protein, 8 aa, Homo sapiens
  Table A; HLA-B*39:01; CTNNB1; S37F; 0
IHFGATTT

SEQ ID NO: 14333 - protein, 8 aa, Homo sapiens
  Table A; HLA-B*39:06; CTNNB1; S37F; 0
IHFGATTT

SEQ ID NO: 14334 - protein, 8 aa, Homo sapiens
  Table A; HLA-B*48:01; CTNNB1; S37F; 0
IHFGATTT

SEQ ID NO: 14335 - protein, 8 aa, Homo sapiens
  Table A; HLA-C*08:03; CTNNB1; S37F; 0
IHFGATTT

SEQ ID NO: 14336 - protein, 9 aa, Homo sapiens
  Table A; HLA-A*02:05; CTNNB1; S37F; 0
IHFGATTTA

SEQ ID NO: 14337 - protein, 9 aa, Homo sapiens
  Table A; HLA-B*15:10; CTNNB1; S37F; 0
IHFGATTTA

SEQ ID NO: 14338 - protein, 9 aa, Homo sapiens
  Table A; HLA-B*38:01; CTNNB1; S37F; 1
IHFGATTTA

SEQ ID NO: 14339 - protein, 9 aa, Homo sapiens
  Table A; HLA-B*39:01; CTNNB1; S37F; 0
IHFGATTTA

SEQ ID NO: 14340 - protein, 9 aa, Homo sapiens
  Table A; HLA-B*39:06; CTNNB1; S37F; 0
IHFGATTTA

SEQ ID NO: 14341 - protein, 9 aa, Homo sapiens
  Table A; HLA-B*50:01; CTNNB1; S37F; 0
IHFGATTTA

SEQ ID NO: 14342 - protein, 9 aa, Homo sapiens
  Table A; HLA-B*54:01; CTNNB1; S37F; 0
IHFGATTTA

SEQ ID NO: 14343 - protein, 10 aa, Homo sapiens
  Table A; HLA-B*15:10; CTNNB1; S37F; 0
IHFGATTTAP

SEQ ID NO: 14344 - protein, 10 aa, Homo sapiens
  Table A; HLA-B*39:01; CTNNB1; S37F; 0
IHFGATTTAP

SEQ ID NO: 14345 - protein, 9 aa, Homo sapiens
  Table A; HLA-B*15:10; NFE2L2; D29H; 0
IHLGVSREV

SEQ ID NO: 14346 - protein, 9 aa, Homo sapiens
  Table A; HLA-B*39:06; NFE2L2; D29H; 0
IHLGVSREV

SEQ ID NO: 14347 - protein, 8 aa, Homo sapiens
  Table A; HLA-B*39:06; TPR; S2155L; 0
IHLPQVAG

SEQ ID NO: 14348 - protein, 9 aa, Homo sapiens
  Table A; HLA-A*02:01; TPR; S2155L; 1
IHLPQVAGV

SEQ ID NO: 14349 - protein, 9 aa, Homo sapiens
  Table A; HLA-A*02:04; TPR; S2155L; 0
IHLPQVAGV

SEQ ID NO: 14350 - protein, 9 aa, Homo sapiens
  Table A; HLA-B*15:10; TPR; S2155L; 0
IHLPQVAGV

SEQ ID NO: 14351 - protein, 9 aa, Homo sapiens
  Table A; HLA-B*39:01; TPR; S2155L; 0
IHLPQVAGV

SEQ ID NO: 14352 - protein, 9 aa, Homo sapiens
  Table A; HLA-B*39:06; TPR; S2155L; 0
IHLPQVAGV

SEQ ID NO: 14353 - protein, 11 aa, Homo sapiens
  Table A; HLA-A*31:01; TPR; S2155L; 0
IHLPQVAGVPR

SEQ ID NO: 14354 - protein, 11 aa, Homo sapiens
  Table A; HLA-A*33:03; TPR; S2155L; 0
IHLPQVAGVPR

SEQ ID NO: 14355 - protein, 11 aa, Homo sapiens
  Table A; HLA-B*27:02; TPR; S2155L; 0
IHLPQVAGVPR

SEQ ID NO: 14356 - protein, 8 aa, Homo sapiens
  Table A; HLA-B*39:06; CTNNB1; S37P; 0
IHPGATTT

SEQ ID NO: 14357 - protein, 9 aa, Homo sapiens
  Table A; HLA-B*15:10; CTNNB1; S37P; 0
IHPGATTTA

SEQ ID NO: 14358 - protein, 9 aa, Homo sapiens
  Table A; HLA-B*38:01; CTNNB1; S37P; 0
IHPGATTTA

SEQ ID NO: 14359 - protein, 9 aa, Homo sapiens
  Table A; HLA-B*39:01; CTNNB1; S37P; 0
IHPGATTTA

SEQ ID NO: 14360 - protein, 9 aa, Homo sapiens
  Table A; HLA-B*39:06; CTNNB1; S37P; 0
IHPGATTTA

SEQ ID NO: 14361 - protein, 8 aa, Homo sapiens
  Table A; HLA-B*15:10; CTNNB1; T41A; 0
IHSGATAT

SEQ ID NO: 14362 - protein, 8 aa, Homo sapiens
  Table A; HLA-B*39:01; CTNNB1; T41A; 1
IHSGATAT

SEQ ID NO: 14363 - protein, 8 aa, Homo sapiens
  Table A; HLA-B*39:06; CTNNB1; T41A; 0
IHSGATAT

SEQ ID NO: 14364 - protein, 8 aa, Homo sapiens
  Table A; HLA-C*08:03; CTNNB1; T41A; 0
IHSGATAT

SEQ ID NO: 14365 - protein, 9 aa, Homo sapiens
  Table A; HLA-B*15:10; CTNNB1; T41A; 0
IHSGATATA

SEQ ID NO: 14366 - protein, 9 aa, Homo sapiens
  Table A; HLA-B*38:01; CTNNB1; T41A; 1
IHSGATATA

SEQ ID NO: 14367 - protein, 9 aa, Homo sapiens
  Table A; HLA-B*39:01; CTNNB1; T41A; 1
IHSGATATA

SEQ ID NO: 14368 - protein, 9 aa, Homo sapiens
  Table A; HLA-B*39:06; CTNNB1; T41A; 0
IHSGATATA

SEQ ID NO: 14369 - protein, 10 aa, Homo sapiens
  Table A; HLA-B*15:10; CTNNB1; T41A; 0
IHSGATATAP

SEQ ID NO: 14370 - protein, 10 aa, Homo sapiens
  Table A; HLA-B*38:01; CTNNB1; T41A; 1
IHSGATATAP

SEQ ID NO: 14371 - protein, 10 aa, Homo sapiens
  Table A; HLA-B*39:01; CTNNB1; T41A; 1
IHSGATATAP

SEQ ID NO: 14372 - protein, 8 aa, Homo sapiens
  Table A; HLA-B*15:10; CTNNB1; T41I; 0
IHSGATIT

SEQ ID NO: 14373 - protein, 8 aa, Homo sapiens
  Table A; HLA-B*39:01; CTNNB1; T41I; 0
IHSGATIT

SEQ ID NO: 14374 - protein, 8 aa, Homo sapiens
  Table A; HLA-B*39:06; CTNNB1; T41I; 0
IHSGATIT

SEQ ID NO: 14375 - protein, 9 aa, Homo sapiens
  Table A; HLA-A*02:05; CTNNB1; T41I; 0
IHSGATITA

SEQ ID NO: 14376 - protein, 9 aa, Homo sapiens
  Table A; HLA-B*15:10; CTNNB1; T41I; 0
IHSGATITA

SEQ ID NO: 14377 - protein, 9 aa, Homo sapiens
  Table A; HLA-B*38:01; CTNNB1; T41I; 0
IHSGATITA

SEQ ID NO: 14378 - protein, 9 aa, Homo sapiens
  Table A; HLA-B*39:01; CTNNB1; T41I; 0
IHSGATITA

SEQ ID NO: 14379 - protein, 9 aa, Homo sapiens
  Table A; HLA-B*39:06; CTNNB1; T41I; 0
IHSGATITA

SEQ ID NO: 14380 - protein, 9 aa, Homo sapiens
  Table A; HLA-B*55:02; CTNNB1; T41I; 0
IHSGATITA

SEQ ID NO: 14381 - protein, 10 aa, Homo sapiens
  Table A; HLA-B*15:10; CTNNB1; T41I; 0
IHSGATITAP

SEQ ID NO: 14382 - protein, 10 aa, Homo sapiens
  Table A; HLA-B*38:01; CTNNB1; T41I; 0
IHSGATITAP

SEQ ID NO: 14383 - protein, 10 aa, Homo sapiens
  Table A; HLA-B*39:01; CTNNB1; T41I; 0
IHSGATITAP

SEQ ID NO: 14384 - protein, 11 aa, Homo sapiens
  Table A; HLA-B*15:10; CTNNB1; S45F; 0
IHSGATTTAPF

SEQ ID NO: 14385 - protein, 11 aa, Homo sapiens
  Table A; HLA-B*38:01; CTNNB1; S45F; 0
IHSGATTTAPF

SEQ ID NO: 14386 - protein, 9 aa, Homo sapiens
  Table A; HLA-A*02:05; CSMD3; R100Q; 0
IIAEEQNRI

SEQ ID NO: 14387 - protein, 9 aa, Homo sapiens
  Table A; HLA-B*13:02; CSMD3; R100Q; 0
IIAEEQNRI

SEQ ID NO: 14388 - protein, 9 aa, Homo sapiens
  Table A; HLA-B*50:01; CSMD3; R100Q; 0
IIAEEQNRI

SEQ ID NO: 14389 - protein, 11 aa, Homo sapiens
  Table A; HLA-A*02:04; PTPRT; E324K; 0
IIGDGPIILKK

SEQ ID NO: 14390 - protein, 11 aa, Homo sapiens
  Table A; HLA-A*03:01; PTPRT; E324K; 1
IIGDGPIILKK

SEQ ID NO: 14391 - protein, 11 aa, Homo sapiens
  Table A; HLA-A*03:02; PTPRT; E324K; 0
IIGDGPIILKK

SEQ ID NO: 14392 - protein, 11 aa, Homo sapiens
  Table A; HLA-A*11:01; PTPRT; E324K; 1
IIGDGPIILKK

SEQ ID NO: 14393 - protein, 11 aa, Homo sapiens
  Table A; HLA-B*27:02; PTPRT; E324K; 0
IIGDGPIILKK

SEQ ID NO: 14394 - protein, 8 aa, Homo sapiens
  Table A; HLA-A*30:02; IDH1; R132G; 0
IIIGGHAY

SEQ ID NO: 14395 - protein, 8 aa, Homo sapiens
  Table A; HLA-B*15:01; IDH1; R132G; 1
IIIGGHAY

SEQ ID NO: 14396 - protein, 8 aa, Homo sapiens
  Table A; HLA-B*46:01; IDH1; R132G; 0
IIIGGHAY

SEQ ID NO: 14397 - protein, 8 aa, Homo sapiens
  Table A; HLA-A*30:02; IDH1; R132S; 0
IIIGSHAY

SEQ ID NO: 14398 - protein, 8 aa, Homo sapiens
  Table A; HLA-B*15:01; IDH1; R132S; 1
IIIGSHAY

SEQ ID NO: 14399 - protein, 8 aa, Homo sapiens
  Table A; HLA-B*46:01; IDH1; R132S; 0
IIIGSHAY

SEQ ID NO: 14400 - protein, 8 aa, Homo sapiens
  Table A; HLA-A*31:01; CHD4; R1338I; 0
IIRKQVNY

SEQ ID NO: 14401 - protein, 8 aa, Homo sapiens
  Table A; HLA-B*15:01; CHD4; R1338I; 1
IIRKQVNY

SEQ ID NO: 14402 - protein, 8 aa, Homo sapiens
  Table A; HLA-B*15:02; CHD4; R1338I; 0
IIRKQVNY

SEQ ID NO: 14403 - protein, 8 aa, Homo sapiens
  Table A; HLA-B*57:01; CHD4; R1338I; 0
IIRKQVNY

SEQ ID NO: 14404 - protein, 9 aa, Homo sapiens
  Table A; HLA-B*15:03; PTPRT; M903I; 0
IKRGQGYGF

SEQ ID NO: 14405 - protein, 9 aa, Homo sapiens
  Table A; HLA-A*02:01; PIK3CA; N345K; 1
ILCATYVKL

SEQ ID NO: 14406 - protein, 9 aa, Homo sapiens
  Table A; HLA-A*02:04; PIK3CA; N345K; 0
ILCATYVKL

SEQ ID NO: 14407 - protein, 9 aa, Homo sapiens
  Table A; HLA-A*02:07; PIK3CA; N345K; 0
ILCATYVKL

SEQ ID NO: 14408 - protein, 9 aa, Homo sapiens
  Table A; HLA-A*03:01; TP63; E609K; 1
ILDHRQLHK

SEQ ID NO: 14409 - protein, 10 aa, Homo sapiens
  Table A; HLA-A*01:01; KRAS; Q61H; 1
ILDTAGHEEY

SEQ ID NO: 14410 - protein, 10 aa, Homo sapiens
  Table A; HLA-A*02:01; KRAS; Q61H; 1
ILDTAGHEEY

SEQ ID NO: 14411 - protein, 10 aa, Homo sapiens
  Table A; HLA-A*02:07; KRAS; Q61H; 0
ILDTAGHEEY

SEQ ID NO: 14412 - protein, 10 aa, Homo sapiens
  Table A; HLA-A*29:01; KRAS; Q61H; 0
ILDTAGHEEY

SEQ ID NO: 14413 - protein, 10 aa, Homo sapiens
  Table A; HLA-A*29:02; KRAS; Q61H; 1
ILDTAGHEEY

SEQ ID NO: 14414 - protein, 10 aa, Homo sapiens
  Table A; HLA-A*30:02; KRAS; Q61H; 0
ILDTAGHEEY

SEQ ID NO: 14415 - protein, 10 aa, Homo sapiens
  Table A; HLA-B*13:01; KRAS; Q61H; 0
ILDTAGHEEY

SEQ ID NO: 14416 - protein, 10 aa, Homo sapiens
  Table A; HLA-B*15:01; KRAS; Q61H; 1
ILDTAGHEEY

SEQ ID NO: 14417 - protein, 10 aa, Homo sapiens
  Table A; HLA-B*15:02; KRAS; Q61H; 0
ILDTAGHEEY

SEQ ID NO: 14418 - protein, 10 aa, Homo sapiens
  Table A; HLA-B*15:13; KRAS; Q61H; 0
ILDTAGHEEY

SEQ ID NO: 14419 - protein, 10 aa, Homo sapiens
  Table A; HLA-B*27:02; KRAS; Q61H; 0
ILDTAGHEEY

SEQ ID NO: 14420 - protein, 10 aa, Homo sapiens
  Table A; HLA-B*35:01; KRAS; Q61H; 1
ILDTAGHEEY

SEQ ID NO: 14421 - protein, 10 aa, Homo sapiens
  Table A; HLA-B*35:08; KRAS; Q61H; 0
ILDTAGHEEY

SEQ ID NO: 14422 - protein, 10 aa, Homo sapiens
  Table A; HLA-B*39:01; KRAS; Q61H; 0
ILDTAGHEEY

SEQ ID NO: 14423 - protein, 10 aa, Homo sapiens
  Table A; HLA-B*46:01; KRAS; Q61H; 0
ILDTAGHEEY

SEQ ID NO: 14424 - protein, 10 aa, Homo sapiens
  Table A; HLA-B*58:01; KRAS; Q61H; 0
ILDTAGHEEY

SEQ ID NO: 14425 - protein, 10 aa, Homo sapiens
  Table A; HLA-C*03:02; KRAS; Q61H; 0
ILDTAGHEEY

SEQ ID NO: 14426 - protein, 10 aa, Homo sapiens
  Table A; HLA-C*05:01; KRAS; Q61H; 1
ILDTAGHEEY

SEQ ID NO: 14427 - protein, 10 aa, Homo sapiens
  Table A; HLA-C*08:01; KRAS; Q61H; 0
ILDTAGHEEY

SEQ ID NO: 14428 - protein, 10 aa, Homo sapiens
  Table A; HLA-C*08:02; KRAS; Q61H; 1
ILDTAGHEEY

SEQ ID NO: 14429 - protein, 10 aa, Homo sapiens
  Table A; HLA-A*01:01; NRAS; Q61H; 1
ILDTAGHEEY

SEQ ID NO: 14430 - protein, 10 aa, Homo sapiens
  Table A; HLA-A*02:01; NRAS; Q61H; 1
ILDTAGHEEY

SEQ ID NO: 14431 - protein, 10 aa, Homo sapiens
  Table A; HLA-A*02:07; NRAS; Q61H; 0
ILDTAGHEEY

SEQ ID NO: 14432 - protein, 10 aa, Homo sapiens
  Table A; HLA-A*29:01; NRAS; Q61H; 0
ILDTAGHEEY

SEQ ID NO: 14433 - protein, 10 aa, Homo sapiens
  Table A; HLA-A*29:02; NRAS; Q61H; 0
ILDTAGHEEY

SEQ ID NO: 14434 - protein, 10 aa, Homo sapiens
  Table A; HLA-A*30:02; NRAS; Q61H; 0
ILDTAGHEEY

SEQ ID NO: 14435 - protein, 10 aa, Homo sapiens
  Table A; HLA-B*13:01; NRAS; Q61H; 0
ILDTAGHEEY

SEQ ID NO: 14436 - protein, 10 aa, Homo sapiens
  Table A; HLA-B*15:01; NRAS; Q61H; 1
ILDTAGHEEY

SEQ ID NO: 14437 - protein, 10 aa, Homo sapiens
  Table A; HLA-B*15:02; NRAS; Q61H; 0
ILDTAGHEEY

SEQ ID NO: 14438 - protein, 10 aa, Homo sapiens
  Table A; HLA-B*15:03; NRAS; Q61H; 0
ILDTAGHEEY

SEQ ID NO: 14439 - protein, 10 aa, Homo sapiens
  Table A; HLA-B*15:13; NRAS; Q61H; 0
ILDTAGHEEY

SEQ ID NO: 14440 - protein, 10 aa, Homo sapiens
  Table A; HLA-B*27:02; NRAS; Q61H; 0
ILDTAGHEEY

SEQ ID NO: 14441 - protein, 10 aa, Homo sapiens
  Table A; HLA-B*35:01; NRAS; Q61H; 1
ILDTAGHEEY

SEQ ID NO: 14442 - protein, 10 aa, Homo sapiens
  Table A; HLA-B*35:08; NRAS; Q61H; 0
ILDTAGHEEY

SEQ ID NO: 14443 - protein, 10 aa, Homo sapiens
  Table A; HLA-B*39:01; NRAS; Q61H; 0
ILDTAGHEEY

SEQ ID NO: 14444 - protein, 10 aa, Homo sapiens
  Table A; HLA-B*46:01; NRAS; Q61H; 0
ILDTAGHEEY

SEQ ID NO: 14445 - protein, 10 aa, Homo sapiens
  Table A; HLA-B*48:01; NRAS; Q61H; 0
ILDTAGHEEY

SEQ ID NO: 14446 - protein, 10 aa, Homo sapiens
  Table A; HLA-B*58:01; NRAS; Q61H; 0
ILDTAGHEEY

SEQ ID NO: 14447 - protein, 10 aa, Homo sapiens
  Table A; HLA-C*03:02; NRAS; Q61H; 0
ILDTAGHEEY

SEQ ID NO: 14448 - protein, 10 aa, Homo sapiens
  Table A; HLA-C*05:01; NRAS; Q61H; 1
ILDTAGHEEY

SEQ ID NO: 14449 - protein, 10 aa, Homo sapiens
  Table A; HLA-C*08:01; NRAS; Q61H; 0
ILDTAGHEEY

SEQ ID NO: 14450 - protein, 10 aa, Homo sapiens
  Table A; HLA-C*08:02; NRAS; Q61H; 0
ILDTAGHEEY

SEQ ID NO: 14451 - protein, 11 aa, Homo sapiens
  Table A; HLA-C*08:03; KRAS; Q61H; 0
ILDTAGHEEYS

SEQ ID NO: 14452 - protein, 11 aa, Homo sapiens
  Table A; HLA-C*08:03; NRAS; Q61H; 0
ILDTAGHEEYS

SEQ ID NO: 14453 - protein, 10 aa, Homo sapiens
  Table A; HLA-A*01:01; HRAS; Q61K; 1
ILDTAGKEEY

SEQ ID NO: 14454 - protein, 10 aa, Homo sapiens
  Table A; HLA-A*02:07; HRAS; Q61K; 0
ILDTAGKEEY

SEQ ID NO: 14455 - protein, 10 aa, Homo sapiens
  Table A; HLA-A*29:01; HRAS; Q61K; 0
ILDTAGKEEY

SEQ ID NO: 14456 - protein, 10 aa, Homo sapiens
  Table A; HLA-A*29:02; HRAS; Q61K; 0
ILDTAGKEEY

SEQ ID NO: 14457 - protein, 10 aa, Homo sapiens
  Table A; HLA-A*30:02; HRAS; Q61K; 0
ILDTAGKEEY

SEQ ID NO: 14458 - protein, 10 aa, Homo sapiens
  Table A; HLA-B*13:01; HRAS; Q61K; 0
ILDTAGKEEY

SEQ ID NO: 14459 - protein, 10 aa, Homo sapiens
  Table A; HLA-B*15:01; HRAS; Q61K; 0
ILDTAGKEEY

SEQ ID NO: 14460 - protein, 10 aa, Homo sapiens
  Table A; HLA-B*15:02; HRAS; Q61K; 0
ILDTAGKEEY

SEQ ID NO: 14461 - protein, 10 aa, Homo sapiens
  Table A; HLA-B*15:13; HRAS; Q61K; 0
ILDTAGKEEY

SEQ ID NO: 14462 - protein, 10 aa, Homo sapiens
  Table A; HLA-B*27:02; HRAS; Q61K; 0
ILDTAGKEEY

SEQ ID NO: 14463 - protein, 10 aa, Homo sapiens
  Table A; HLA-B*35:01; HRAS; Q61K; 0
ILDTAGKEEY

SEQ ID NO: 14464 - protein, 10 aa, Homo sapiens
  Table A; HLA-B*35:08; HRAS; Q61K; 0
ILDTAGKEEY

SEQ ID NO: 14465 - protein, 10 aa, Homo sapiens
  Table A; HLA-B*39:01; HRAS; Q61K; 0
ILDTAGKEEY

SEQ ID NO: 14466 - protein, 10 aa, Homo sapiens
  Table A; HLA-B*46:01; HRAS; Q61K; 0
ILDTAGKEEY

SEQ ID NO: 14467 - protein, 10 aa, Homo sapiens
  Table A; HLA-B*58:01; HRAS; Q61K; 0
ILDTAGKEEY

SEQ ID NO: 14468 - protein, 10 aa, Homo sapiens
  Table A; HLA-C*03:02; HRAS; Q61K; 0
ILDTAGKEEY

SEQ ID NO: 14469 - protein, 10 aa, Homo sapiens
  Table A; HLA-C*08:01; HRAS; Q61K; 0
ILDTAGKEEY

SEQ ID NO: 14470 - protein, 10 aa, Homo sapiens
  Table A; HLA-C*08:02; HRAS; Q61K; 0
ILDTAGKEEY

SEQ ID NO: 14471 - protein, 10 aa, Homo sapiens
  Table A; HLA-A*01:01; NRAS; Q61K; 1
ILDTAGKEEY

SEQ ID NO: 14472 - protein, 10 aa, Homo sapiens
  Table A; HLA-A*02:01; NRAS; Q61K; 1
ILDTAGKEEY

SEQ ID NO: 14473 - protein, 10 aa, Homo sapiens
  Table A; HLA-A*02:07; NRAS; Q61K; 0
ILDTAGKEEY

SEQ ID NO: 14474 - protein, 10 aa, Homo sapiens
  Table A; HLA-A*29:01; NRAS; Q61K; 0
ILDTAGKEEY

SEQ ID NO: 14475 - protein, 10 aa, Homo sapiens
  Table A; HLA-A*29:02; NRAS; Q61K; 1
ILDTAGKEEY

SEQ ID NO: 14476 - protein, 10 aa, Homo sapiens
  Table A; HLA-A*30:02; NRAS; Q61K; 1
ILDTAGKEEY

SEQ ID NO: 14477 - protein, 10 aa, Homo sapiens
  Table A; HLA-B*13:01; NRAS; Q61K; 0
ILDTAGKEEY

SEQ ID NO: 14478 - protein, 10 aa, Homo sapiens
  Table A; HLA-B*15:01; NRAS; Q61K; 1
ILDTAGKEEY

SEQ ID NO: 14479 - protein, 10 aa, Homo sapiens
  Table A; HLA-B*15:02; NRAS; Q61K; 0
ILDTAGKEEY

SEQ ID NO: 14480 - protein, 10 aa, Homo sapiens
  Table A; HLA-B*15:03; NRAS; Q61K; 0
ILDTAGKEEY

SEQ ID NO: 14481 - protein, 10 aa, Homo sapiens
  Table A; HLA-B*15:13; NRAS; Q61K; 0
ILDTAGKEEY

SEQ ID NO: 14482 - protein, 10 aa, Homo sapiens
  Table A; HLA-B*27:02; NRAS; Q61K; 0
ILDTAGKEEY

SEQ ID NO: 14483 - protein, 10 aa, Homo sapiens
  Table A; HLA-B*35:01; NRAS; Q61K; 1
ILDTAGKEEY

SEQ ID NO: 14484 - protein, 10 aa, Homo sapiens
  Table A; HLA-B*35:08; NRAS; Q61K; 0
ILDTAGKEEY

SEQ ID NO: 14485 - protein, 10 aa, Homo sapiens
  Table A; HLA-B*39:01; NRAS; Q61K; 1
ILDTAGKEEY

SEQ ID NO: 14486 - protein, 10 aa, Homo sapiens
  Table A; HLA-B*46:01; NRAS; Q61K; 0
ILDTAGKEEY

SEQ ID NO: 14487 - protein, 10 aa, Homo sapiens
  Table A; HLA-B*58:01; NRAS; Q61K; 0
ILDTAGKEEY

SEQ ID NO: 14488 - protein, 10 aa, Homo sapiens
  Table A; HLA-C*03:02; NRAS; Q61K; 0
ILDTAGKEEY

SEQ ID NO: 14489 - protein, 10 aa, Homo sapiens
  Table A; HLA-C*08:01; NRAS; Q61K; 0
ILDTAGKEEY

SEQ ID NO: 14490 - protein, 10 aa, Homo sapiens
  Table A; HLA-C*08:02; NRAS; Q61K; 1
ILDTAGKEEY

SEQ ID NO: 14491 - protein, 10 aa, Homo sapiens
  Table A; HLA-A*01:01; KRAS; Q61L; 1
ILDTAGLEEY

SEQ ID NO: 14492 - protein, 10 aa, Homo sapiens
  Table A; HLA-A*02:01; KRAS; Q61L; 1
ILDTAGLEEY

SEQ ID NO: 14493 - protein, 10 aa, Homo sapiens
  Table A; HLA-A*02:07; KRAS; Q61L; 0
ILDTAGLEEY

SEQ ID NO: 14494 - protein, 10 aa, Homo sapiens
  Table A; HLA-A*29:01; KRAS; Q61L; 0
ILDTAGLEEY

SEQ ID NO: 14495 - protein, 10 aa, Homo sapiens
  Table A; HLA-A*29:02; KRAS; Q61L; 0
ILDTAGLEEY

SEQ ID NO: 14496 - protein, 10 aa, Homo sapiens
  Table A; HLA-B*15:01; KRAS; Q61L; 0
ILDTAGLEEY

SEQ ID NO: 14497 - protein, 10 aa, Homo sapiens
  Table A; HLA-B*15:02; KRAS; Q61L; 0
ILDTAGLEEY

SEQ ID NO: 14498 - protein, 10 aa, Homo sapiens
  Table A; HLA-B*27:02; KRAS; Q61L; 0
ILDTAGLEEY

SEQ ID NO: 14499 - protein, 10 aa, Homo sapiens
  Table A; HLA-B*35:01; KRAS; Q61L; 0
ILDTAGLEEY

SEQ ID NO: 14500 - protein, 10 aa, Homo sapiens
  Table A; HLA-B*35:08; KRAS; Q61L; 0
ILDTAGLEEY

SEQ ID NO: 14501 - protein, 10 aa, Homo sapiens
  Table A; HLA-B*39:01; KRAS; Q61L; 0
ILDTAGLEEY

SEQ ID NO: 14502 - protein, 10 aa, Homo sapiens
  Table A; HLA-B*46:01; KRAS; Q61L; 0
ILDTAGLEEY

SEQ ID NO: 14503 - protein, 10 aa, Homo sapiens
  Table A; HLA-B*58:01; KRAS; Q61L; 0
ILDTAGLEEY

SEQ ID NO: 14504 - protein, 10 aa, Homo sapiens
  Table A; HLA-C*03:02; KRAS; Q61L; 0
ILDTAGLEEY

SEQ ID NO: 14505 - protein, 10 aa, Homo sapiens
  Table A; HLA-C*08:01; KRAS; Q61L; 0
ILDTAGLEEY

SEQ ID NO: 14506 - protein, 10 aa, Homo sapiens
  Table A; HLA-A*01:01; NRAS; Q61L; 1
ILDTAGLEEY

SEQ ID NO: 14507 - protein, 10 aa, Homo sapiens
  Table A; HLA-A*02:01; NRAS; Q61L; 1
ILDTAGLEEY

SEQ ID NO: 14508 - protein, 10 aa, Homo sapiens
  Table A; HLA-A*02:07; NRAS; Q61L; 0
ILDTAGLEEY

SEQ ID NO: 14509 - protein, 10 aa, Homo sapiens
  Table A; HLA-A*29:01; NRAS; Q61L; 0
ILDTAGLEEY

SEQ ID NO: 14510 - protein, 10 aa, Homo sapiens
  Table A; HLA-A*29:02; NRAS; Q61L; 1
ILDTAGLEEY

SEQ ID NO: 14511 - protein, 10 aa, Homo sapiens
  Table A; HLA-A*30:02; NRAS; Q61L; 0
ILDTAGLEEY

SEQ ID NO: 14512 - protein, 10 aa, Homo sapiens
  Table A; HLA-B*13:01; NRAS; Q61L; 0
ILDTAGLEEY

SEQ ID NO: 14513 - protein, 10 aa, Homo sapiens
  Table A; HLA-B*15:01; NRAS; Q61L; 1
ILDTAGLEEY

SEQ ID NO: 14514 - protein, 10 aa, Homo sapiens
  Table A; HLA-B*15:02; NRAS; Q61L; 0
ILDTAGLEEY

SEQ ID NO: 14515 - protein, 10 aa, Homo sapiens
  Table A; HLA-B*27:02; NRAS; Q61L; 0
ILDTAGLEEY

SEQ ID NO: 14516 - protein, 10 aa, Homo sapiens
  Table A; HLA-B*35:01; NRAS; Q61L; 1
ILDTAGLEEY

SEQ ID NO: 14517 - protein, 10 aa, Homo sapiens
  Table A; HLA-B*35:08; NRAS; Q61L; 0
ILDTAGLEEY

SEQ ID NO: 14518 - protein, 10 aa, Homo sapiens
  Table A; HLA-B*39:01; NRAS; Q61L; 0
ILDTAGLEEY

SEQ ID NO: 14519 - protein, 10 aa, Homo sapiens
  Table A; HLA-B*46:01; NRAS; Q61L; 0
ILDTAGLEEY

SEQ ID NO: 14520 - protein, 10 aa, Homo sapiens
  Table A; HLA-B*58:01; NRAS; Q61L; 0
ILDTAGLEEY

SEQ ID NO: 14521 - protein, 10 aa, Homo sapiens
  Table A; HLA-C*03:02; NRAS; Q61L; 0
ILDTAGLEEY

SEQ ID NO: 14522 - protein, 10 aa, Homo sapiens
  Table A; HLA-C*08:01; NRAS; Q61L; 0
ILDTAGLEEY

SEQ ID NO: 14523 - protein, 10 aa, Homo sapiens
  Table A; HLA-A*01:01; KRAS; Q61R; 1
ILDTAGREEY

SEQ ID NO: 14524 - protein, 10 aa, Homo sapiens
  Table A; HLA-A*02:01; KRAS; Q61R; 1
ILDTAGREEY

SEQ ID NO: 14525 - protein, 10 aa, Homo sapiens
  Table A; HLA-A*02:07; KRAS; Q61R; 0
ILDTAGREEY

SEQ ID NO: 14526 - protein, 10 aa, Homo sapiens
  Table A; HLA-A*29:01; KRAS; Q61R; 0
ILDTAGREEY

SEQ ID NO: 14527 - protein, 10 aa, Homo sapiens
  Table A; HLA-A*29:02; KRAS; Q61R; 0
ILDTAGREEY

SEQ ID NO: 14528 - protein, 10 aa, Homo sapiens
  Table A; HLA-A*30:02; KRAS; Q61R; 0
ILDTAGREEY

SEQ ID NO: 14529 - protein, 10 aa, Homo sapiens
  Table A; HLA-B*13:01; KRAS; Q61R; 0
ILDTAGREEY

SEQ ID NO: 14530 - protein, 10 aa, Homo sapiens
  Table A; HLA-B*15:01; KRAS; Q61R; 0
ILDTAGREEY

SEQ ID NO: 14531 - protein, 10 aa, Homo sapiens
  Table A; HLA-B*15:02; KRAS; Q61R; 0
ILDTAGREEY

SEQ ID NO: 14532 - protein, 10 aa, Homo sapiens
  Table A; HLA-B*15:03; KRAS; Q61R; 0
ILDTAGREEY

SEQ ID NO: 14533 - protein, 10 aa, Homo sapiens
  Table A; HLA-B*15:13; KRAS; Q61R; 0
ILDTAGREEY

SEQ ID NO: 14534 - protein, 10 aa, Homo sapiens
  Table A; HLA-B*27:02; KRAS; Q61R; 0
ILDTAGREEY

SEQ ID NO: 14535 - protein, 10 aa, Homo sapiens
  Table A; HLA-B*35:01; KRAS; Q61R; 0
ILDTAGREEY

SEQ ID NO: 14536 - protein, 10 aa, Homo sapiens
  Table A; HLA-B*35:08; KRAS; Q61R; 0
ILDTAGREEY

SEQ ID NO: 14537 - protein, 10 aa, Homo sapiens
  Table A; HLA-B*39:01; KRAS; Q61R; 0
ILDTAGREEY

SEQ ID NO: 14538 - protein, 10 aa, Homo sapiens
  Table A; HLA-B*46:01; KRAS; Q61R; 0
ILDTAGREEY

SEQ ID NO: 14539 - protein, 10 aa, Homo sapiens
  Table A; HLA-B*57:01; KRAS; Q61R; 0
ILDTAGREEY

SEQ ID NO: 14540 - protein, 10 aa, Homo sapiens
  Table A; HLA-B*58:01; KRAS; Q61R; 0
ILDTAGREEY

SEQ ID NO: 14541 - protein, 10 aa, Homo sapiens
  Table A; HLA-C*03:02; KRAS; Q61R; 0
ILDTAGREEY

SEQ ID NO: 14542 - protein, 10 aa, Homo sapiens
  Table A; HLA-C*08:01; KRAS; Q61R; 0
ILDTAGREEY

SEQ ID NO: 14543 - protein, 10 aa, Homo sapiens
  Table A; HLA-C*08:02; KRAS; Q61R; 0
ILDTAGREEY

SEQ ID NO: 14544 - protein, 10 aa, Homo sapiens
  Table A; HLA-A*01:01; NRAS; Q61R; 1
ILDTAGREEY

SEQ ID NO: 14545 - protein, 10 aa, Homo sapiens
  Table A; HLA-A*02:01; NRAS; Q61R; 1
ILDTAGREEY

SEQ ID NO: 14546 - protein, 10 aa, Homo sapiens
  Table A; HLA-A*02:07; NRAS; Q61R; 0
ILDTAGREEY

SEQ ID NO: 14547 - protein, 10 aa, Homo sapiens
  Table A; HLA-A*03:02; NRAS; Q61R; 0
ILDTAGREEY

SEQ ID NO: 14548 - protein, 10 aa, Homo sapiens
  Table A; HLA-A*29:01; NRAS; Q61R; 0
ILDTAGREEY

SEQ ID NO: 14549 - protein, 10 aa, Homo sapiens
  Table A; HLA-A*29:02; NRAS; Q61R; 1
ILDTAGREEY

SEQ ID NO: 14550 - protein, 10 aa, Homo sapiens
  Table A; HLA-A*30:02; NRAS; Q61R; 1
ILDTAGREEY

SEQ ID NO: 14551 - protein, 10 aa, Homo sapiens
  Table A; HLA-B*13:01; NRAS; Q61R; 0
ILDTAGREEY

SEQ ID NO: 14552 - protein, 10 aa, Homo sapiens
  Table A; HLA-B*15:01; NRAS; Q61R; 1
ILDTAGREEY

SEQ ID NO: 14553 - protein, 10 aa, Homo sapiens
  Table A; HLA-B*15:02; NRAS; Q61R; 0
ILDTAGREEY

SEQ ID NO: 14554 - protein, 10 aa, Homo sapiens
  Table A; HLA-B*15:03; NRAS; Q61R; 0
ILDTAGREEY

SEQ ID NO: 14555 - protein, 10 aa, Homo sapiens
  Table A; HLA-B*15:13; NRAS; Q61R; 0
ILDTAGREEY

SEQ ID NO: 14556 - protein, 10 aa, Homo sapiens
  Table A; HLA-B*18:01; NRAS; Q61R; 1
ILDTAGREEY

SEQ ID NO: 14557 - protein, 10 aa, Homo sapiens
  Table A; HLA-B*27:02; NRAS; Q61R; 0
ILDTAGREEY

SEQ ID NO: 14558 - protein, 10 aa, Homo sapiens
  Table A; HLA-B*35:01; NRAS; Q61R; 1
ILDTAGREEY

SEQ ID NO: 14559 - protein, 10 aa, Homo sapiens
  Table A; HLA-B*35:08; NRAS; Q61R; 0
ILDTAGREEY

SEQ ID NO: 14560 - protein, 10 aa, Homo sapiens
  Table A; HLA-B*39:01; NRAS; Q61R; 1
ILDTAGREEY

SEQ ID NO: 14561 - protein, 10 aa, Homo sapiens
  Table A; HLA-B*46:01; NRAS; Q61R; 0
ILDTAGREEY

SEQ ID NO: 14562 - protein, 10 aa, Homo sapiens
  Table A; HLA-B*57:01; NRAS; Q61R; 1
ILDTAGREEY

SEQ ID NO: 14563 - protein, 10 aa, Homo sapiens
  Table A; HLA-B*58:01; NRAS; Q61R; 1
ILDTAGREEY

SEQ ID NO: 14564 - protein, 10 aa, Homo sapiens
  Table A; HLA-C*03:02; NRAS; Q61R; 0
ILDTAGREEY

SEQ ID NO: 14565 - protein, 10 aa, Homo sapiens
  Table A; HLA-C*08:01; NRAS; Q61R; 0
ILDTAGREEY

SEQ ID NO: 14566 - protein, 10 aa, Homo sapiens
  Table A; HLA-C*08:02; NRAS; Q61R; 1
ILDTAGREEY

SEQ ID NO: 14567 - protein, 9 aa, Homo sapiens
  Table A; HLA-A*02:03; CREBBP; P2094L; 0
ILKSNLQLM

SEQ ID NO: 14568 - protein, 9 aa, Homo sapiens
  Table A; HLA-A*02:04; CREBBP; P2094L; 0
ILKSNLQLM

SEQ ID NO: 14569 - protein, 9 aa, Homo sapiens
  Table A; HLA-B*15:01; CREBBP; P2094L; 1
ILKSNLQLM

SEQ ID NO: 14570 - protein, 9 aa, Homo sapiens
  Table A; HLA-B*46:01; CREBBP; P2094L; 0
ILKSNLQLM

SEQ ID NO: 14571 - protein, 11 aa, Homo sapiens
  Table A; HLA-A*02:03; CREBBP; P2094L; 0
ILKSNLQLMAA

SEQ ID NO: 14572 - protein, 8 aa, Homo sapiens
  Table A; HLA-A*31:01; CTNNB1; K335I; 1
ILLWTTSR

SEQ ID NO: 14573 - protein, 9 aa, Homo sapiens
  Table A; HLA-A*02:01; CTNNB1; K335I; 1
ILLWTTSRV

SEQ ID NO: 14574 - protein, 9 aa, Homo sapiens
  Table A; HLA-A*02:03; CTNNB1; K335I; 0
ILLWTTSRV

SEQ ID NO: 14575 - protein, 9 aa, Homo sapiens
  Table A; HLA-A*02:04; CTNNB1; K335I; 0
ILLWTTSRV

SEQ ID NO: 14576 - protein, 9 aa, Homo sapiens
  Table A; HLA-A*02:07; CTNNB1; K335I; 0
ILLWTTSRV

SEQ ID NO: 14577 - protein, 9 aa, Homo sapiens
  Table A; HLA-A*03:01; CTNNB1; K335I; 1
ILLWTTSRV

SEQ ID NO: 14578 - protein, 10 aa, Homo sapiens
  Table A; HLA-A*02:03; CTNNB1; K335I; 0
ILLWTTSRVL

SEQ ID NO: 14579 - protein, 10 aa, Homo sapiens
  Table A; HLA-A*02:04; CTNNB1; K335I; 0
ILLWTTSRVL

SEQ ID NO: 14580 - protein, 10 aa, Homo sapiens
  Table A; HLA-A*03:01; CTNNB1; K335I; 1
ILLWTTSRVL

SEQ ID NO: 14581 - protein, 11 aa, Homo sapiens
  Table A; HLA-A*03:01; CTNNB1; K335I; 1
ILLWTTSRVLK

SEQ ID NO: 14582 - protein, 9 aa, Homo sapiens
  Table A; HLA-A*02:03; PIK3CA; G118D; 0
ILNREIDFA

SEQ ID NO: 14583 - protein, 9 aa, Homo sapiens
  Table A; HLA-A*02:01; NFE2L2; D29G; 1
ILWRQDIGL

SEQ ID NO: 14584 - protein, 9 aa, Homo sapiens
  Table A; HLA-A*02:04; NFE2L2; D29G; 0
ILWRQDIGL

SEQ ID NO: 14585 - protein, 9 aa, Homo sapiens
  Table A; HLA-A*02:07; NFE2L2; D29G; 0
ILWRQDIGL

SEQ ID NO: 14586 - protein, 11 aa, Homo sapiens
  Table A; HLA-A*02:04; NFE2L2; D29G; 0
ILWRQDIGLGV

SEQ ID NO: 14587 - protein, 11 aa, Homo sapiens
  Table A; HLA-A*02:07; NFE2L2; D29G; 0
ILWRQDIGLGV

SEQ ID NO: 14588 - protein, 9 aa, Homo sapiens
  Table A; HLA-A*02:01; NFE2L2; D29H; 1
ILWRQDIHL

SEQ ID NO: 14589 - protein, 9 aa, Homo sapiens
  Table A; HLA-A*02:04; NFE2L2; D29H; 0
ILWRQDIHL

SEQ ID NO: 14590 - protein, 9 aa, Homo sapiens
  Table A; HLA-A*02:07; NFE2L2; D29H; 0
ILWRQDIHL

SEQ ID NO: 14591 - protein, 9 aa, Homo sapiens
  Table A; HLA-A*02:03; CTNNB1; K335I; 0
IMRTYTYEI

SEQ ID NO: 14592 - protein, 9 aa, Homo sapiens
  Table A; HLA-A*02:04; CTNNB1; K335I; 0
IMRTYTYEI

SEQ ID NO: 14593 - protein, 9 aa, Homo sapiens
  Table A; HLA-A*02:07; CTNNB1; K335I; 0
IMRTYTYEI

SEQ ID NO: 14594 - protein, 9 aa, Homo sapiens
  Table A; HLA-A*24:02; CTNNB1; K335I; 1
IMRTYTYEI

SEQ ID NO: 14595 - protein, 9 aa, Homo sapiens
  Table A; HLA-A*30:01; CTNNB1; K335I; 0
IMRTYTYEI

SEQ ID NO: 14596 - protein, 9 aa, Homo sapiens
  Table A; HLA-B*48:01; CTNND1; A781T; 0
INEVITENL

SEQ ID NO: 14597 - protein, 9 aa, Homo sapiens
  Table A; HLA-C*08:02; CTNND1; A781T; 0
INEVITENL

SEQ ID NO: 14598 - protein, 8 aa, Homo sapiens
  Table A; HLA-A*02:01; KEAP1; D422N; 1
INGHIYAV

SEQ ID NO: 14599 - protein, 8 aa, Homo sapiens
  Table A; HLA-A*02:04; KEAP1; D422N; 0
INGHIYAV

SEQ ID NO: 14600 - protein, 8 aa, Homo sapiens
  Table A; HLA-A*11:01; KEAP1; D422N; 0
INGHIYAV

SEQ ID NO: 14601 - protein, 8 aa, Homo sapiens
  Table A; HLA-B*48:01; KEAP1; D422N; 0
INGHIYAV

SEQ ID NO: 14602 - protein, 8 aa, Homo sapiens
  Table A; HLA-B*54:01; KEAP1; D422N; 0
INGHIYAV

SEQ ID NO: 14603 - protein, 10 aa, Homo sapiens
  Table A; HLA-B*54:01; CHST11; A159T; 0
IPANEAHVST

SEQ ID NO: 14604 - protein, 10 aa, Homo sapiens
  Table A; HLA-B*56:01; CHST11; A159T; 0
IPANEAHVST

SEQ ID NO: 14605 - protein, 8 aa, Homo sapiens
  Table A; HLA-B*39:06; KRAS; A146T; 0
IPFIETST

SEQ ID NO: 14606 - protein, 8 aa, Homo sapiens
  Table A; HLA-B*54:01; KRAS; A146T; 0
IPFIETST

SEQ ID NO: 14607 - protein, 8 aa, Homo sapiens
  Table A; HLA-B*55:02; KRAS; A146T; 0
IPFIETST

SEQ ID NO: 14608 - protein, 8 aa, Homo sapiens
  Table A; HLA-B*56:01; KRAS; A146T; 0
IPFIETST

SEQ ID NO: 14609 - protein, 9 aa, Homo sapiens
  Table A; HLA-B*27:02; KRAS; A146T; 0
IPFIETSTK

SEQ ID NO: 14610 - protein, 9 aa, Homo sapiens
  Table A; HLA-B*51:01; KRAS; A146T; 1
IPFIETSTK

SEQ ID NO: 14611 - protein, 10 aa, Homo sapiens
  Table A; HLA-B*54:01; KRAS; A146T; 0
IPFIETSTKT

SEQ ID NO: 14612 - protein, 10 aa, Homo sapiens
  Table A; HLA-B*55:02; KRAS; A146T; 0
IPFIETSTKT

SEQ ID NO: 14613 - protein, 10 aa, Homo sapiens
  Table A; HLA-B*56:01; KRAS; A146T; 0
IPFIETSTKT

SEQ ID NO: 14614 - protein, 11 aa, Homo sapiens
  Table A; HLA-A*68:01; KRAS; A146T; 0
IPFIETSTKTR

SEQ ID NO: 14615 - protein, 11 aa, Homo sapiens
  Table A; HLA-B*27:02; KRAS; A146T; 0
IPFIETSTKTR

SEQ ID NO: 14616 - protein, 9 aa, Homo sapiens
  Table A; HLA-B*35:01; RGS7; R44C; 1
IPICTVKSF

SEQ ID NO: 14617 - protein, 10 aa, Homo sapiens
  Table A; HLA-B*27:02; EGFR; R108K; 0
IPLENLQIIK

SEQ ID NO: 14618 - protein, 11 aa, Homo sapiens
  Table A; HLA-B*54:01; EGFR; R108K; 0
IPLENLQIIKG

SEQ ID NO: 14619 - protein, 9 aa, Homo sapiens
  Table A; HLA-B*51:01; SFRP4; R232Q; 1
IPQTQVPLI

SEQ ID NO: 14620 - protein, 9 aa, Homo sapiens
  Table A; HLA-B*54:01; SFRP4; R232Q; 0
IPQTQVPLI

SEQ ID NO: 14621 - protein, 9 aa, Homo sapiens
  Table A; HLA-B*55:01; SFRP4; R232Q; 0
IPQTQVPLI

SEQ ID NO: 14622 - protein, 9 aa, Homo sapiens
  Table A; HLA-B*55:02; SFRP4; R232Q; 0
IPQTQVPLI

SEQ ID NO: 14623 - protein, 9 aa, Homo sapiens
  Table A; HLA-B*56:01; SFRP4; R232Q; 0
IPQTQVPLI

SEQ ID NO: 14624 - protein, 8 aa, Homo sapiens
  Table A; HLA-B*07:02; CCND1; T286I; 1
IPTDVRDV

SEQ ID NO: 14625 - protein, 8 aa, Homo sapiens
  Table A; HLA-B*51:01; CCND1; T286I; 1
IPTDVRDV

SEQ ID NO: 14626 - protein, 8 aa, Homo sapiens
  Table A; HLA-B*54:01; CCND1; T286I; 0
IPTDVRDV

SEQ ID NO: 14627 - protein, 8 aa, Homo sapiens
  Table A; HLA-B*55:01; CCND1; T286I; 0
IPTDVRDV

SEQ ID NO: 14628 - protein, 8 aa, Homo sapiens
  Table A; HLA-B*55:02; CCND1; T286I; 0
IPTDVRDV

SEQ ID NO: 14629 - protein, 8 aa, Homo sapiens
  Table A; HLA-B*56:01; CCND1; T286I; 0
IPTDVRDV

SEQ ID NO: 14630 - protein, 10 aa, Homo sapiens
  Table A; HLA-A*02:06; CCND1; T286I; 0
IPTDVRDVDI

SEQ ID NO: 14631 - protein, 10 aa, Homo sapiens
  Table A; HLA-A*68:01; CCND1; T286I; 0
IPTDVRDVDI

SEQ ID NO: 14632 - protein, 10 aa, Homo sapiens
  Table A; HLA-A*68:02; CCND1; T286I; 0
IPTDVRDVDI

SEQ ID NO: 14633 - protein, 10 aa, Homo sapiens
  Table A; HLA-B*07:02; CCND1; T286I; 1
IPTDVRDVDI

SEQ ID NO: 14634 - protein, 10 aa, Homo sapiens
  Table A; HLA-B*35:01; CCND1; T286I; 1
IPTDVRDVDI

SEQ ID NO: 14635 - protein, 10 aa, Homo sapiens
  Table A; HLA-B*35:02; CCND1; T286I; 0
IPTDVRDVDI

SEQ ID NO: 14636 - protein, 10 aa, Homo sapiens
  Table A; HLA-B*35:03; CCND1; T286I; 0
IPTDVRDVDI

SEQ ID NO: 14637 - protein, 10 aa, Homo sapiens
  Table A; HLA-B*35:08; CCND1; T286I; 0
IPTDVRDVDI

SEQ ID NO: 14638 - protein, 10 aa, Homo sapiens
  Table A; HLA-B*35:12; CCND1; T286I; 0
IPTDVRDVDI

SEQ ID NO: 14639 - protein, 10 aa, Homo sapiens
  Table A; HLA-B*38:01; CCND1; T286I; 0
IPTDVRDVDI

SEQ ID NO: 14640 - protein, 10 aa, Homo sapiens
  Table A; HLA-B*48:01; CCND1; T286I; 0
IPTDVRDVDI

SEQ ID NO: 14641 - protein, 10 aa, Homo sapiens
  Table A; HLA-B*51:01; CCND1; T286I; 1
IPTDVRDVDI

SEQ ID NO: 14642 - protein, 10 aa, Homo sapiens
  Table A; HLA-B*54:01; CCND1; T286I; 0
IPTDVRDVDI

SEQ ID NO: 14643 - protein, 10 aa, Homo sapiens
  Table A; HLA-B*55:02; CCND1; T286I; 0
IPTDVRDVDI

SEQ ID NO: 14644 - protein, 10 aa, Homo sapiens
  Table A; HLA-B*56:01; CCND1; T286I; 0
IPTDVRDVDI

SEQ ID NO: 14645 - protein, 9 aa, Homo sapiens
  Table A; HLA-B*57:01; CHD4; R1162W; 0
IQAFSRAHW

SEQ ID NO: 14646 - protein, 9 aa, Homo sapiens
  Table A; HLA-A*03:01; SMARCA4; G1232S; 1
IQASMFDQK

SEQ ID NO: 14647 - protein, 9 aa, Homo sapiens
  Table A; HLA-A*03:02; SMARCA4; G1232S; 0
IQASMFDQK

SEQ ID NO: 14648 - protein, 9 aa, Homo sapiens
  Table A; HLA-A*11:01; SMARCA4; G1232S; 0
IQASMFDQK

SEQ ID NO: 14649 - protein, 9 aa, Homo sapiens
  Table A; HLA-A*31:01; SMARCA4; G1232S; 0
IQASMFDQK

SEQ ID NO: 14650 - protein, 9 aa, Homo sapiens
  Table A; HLA-A*68:01; SMARCA4; G1232S; 0
IQASMFDQK

SEQ ID NO: 14651 - protein, 9 aa, Homo sapiens
  Table A; HLA-A*68:02; SMARCA4; G1232S; 0
IQASMFDQK

SEQ ID NO: 14652 - protein, 9 aa, Homo sapiens
  Table A; HLA-B*27:02; SMARCA4; G1232S; 0
IQASMFDQK

SEQ ID NO: 14653 - protein, 10 aa, Homo sapiens
  Table A; HLA-C*08:03; SMARCA4; G1232S; 0
IQASMFDQKS

SEQ ID NO: 14654 - protein, 8 aa, Homo sapiens
  Table A; HLA-A*02:05; FAM135B; S11L; 0
IQGTVEFL

SEQ ID NO: 14655 - protein, 9 aa, Homo sapiens
  Table A; HLA-B*13:02; FAM135B; S11L; 0
IQGTVEFLV

SEQ ID NO: 14656 - protein, 9 aa, Homo sapiens
  Table A; HLA-B*27:05; XPO1; R749Q; 0
IRSMQTVKR

SEQ ID NO: 14657 - protein, 8 aa, Homo sapiens
  Table A; HLA-B*08:01; SF3B1; R957Q; 1
ISQTAVVM

SEQ ID NO: 14658 - protein, 8 aa, Homo sapiens
  Table A; HLA-B*15:01; SF3B1; R957Q; 1
ISQTAVVM

SEQ ID NO: 14659 - protein, 8 aa, Homo sapiens
  Table A; HLA-B*15:02; SF3B1; R957Q; 0
ISQTAVVM

SEQ ID NO: 14660 - protein, 8 aa, Homo sapiens
  Table A; HLA-B*35:01; SF3B1; R957Q; 1
ISQTAVVM

SEQ ID NO: 14661 - protein, 8 aa, Homo sapiens
  Table A; HLA-B*35:03; SF3B1; R957Q; 0
ISQTAVVM

SEQ ID NO: 14662 - protein, 8 aa, Homo sapiens
  Table A; HLA-B*39:01; SF3B1; R957Q; 0
ISQTAVVM

SEQ ID NO: 14663 - protein, 8 aa, Homo sapiens
  Table A; HLA-B*46:01; SF3B1; R957Q; 0
ISQTAVVM

SEQ ID NO: 14664 - protein, 8 aa, Homo sapiens
  Table A; HLA-B*58:01; SF3B1; R957Q; 0
ISQTAVVM

SEQ ID NO: 14665 - protein, 8 aa, Homo sapiens
  Table A; HLA-C*03:04; SF3B1; R957Q; 1
ISQTAVVM

SEQ ID NO: 14666 - protein, 8 aa, Homo sapiens
  Table A; HLA-C*07:04; SF3B1; R957Q; 0
ISQTAVVM

SEQ ID NO: 14667 - protein, 8 aa, Homo sapiens
  Table A; HLA-C*08:03; SF3B1; R957Q; 0
ISQTAVVM

SEQ ID NO: 14668 - protein, 8 aa, Homo sapiens
  Table A; HLA-C*12:03; SF3B1; R957Q; 1
ISQTAVVM

SEQ ID NO: 14669 - protein, 8 aa, Homo sapiens
  Table A; HLA-C*14:02; SF3B1; R957Q; 0
ISQTAVVM

SEQ ID NO: 14670 - protein, 8 aa, Homo sapiens
  Table A; HLA-C*14:03; SF3B1; R957Q; 0
ISQTAVVM

SEQ ID NO: 14671 - protein, 8 aa, Homo sapiens
  Table A; HLA-C*16:01; SF3B1; R957Q; 1
ISQTAVVM

SEQ ID NO: 14672 - protein, 9 aa, Homo sapiens
  Table A; HLA-A*03:01; SF3B1; R957Q; 1
ISQTAVVMK

SEQ ID NO: 14673 - protein, 9 aa, Homo sapiens
  Table A; HLA-A*03:02; SF3B1; R957Q; 0
ISQTAVVMK

SEQ ID NO: 14674 - protein, 9 aa, Homo sapiens
  Table A; HLA-A*11:01; SF3B1; R957Q; 1
ISQTAVVMK

SEQ ID NO: 14675 - protein, 9 aa, Homo sapiens
  Table A; HLA-A*31:01; SF3B1; R957Q; 0
ISQTAVVMK

SEQ ID NO: 14676 - protein, 9 aa, Homo sapiens
  Table A; HLA-A*33:03; SF3B1; R957Q; 0
ISQTAVVMK

SEQ ID NO: 14677 - protein, 9 aa, Homo sapiens
  Table A; HLA-A*68:01; SF3B1; R957Q; 0
ISQTAVVMK

SEQ ID NO: 14678 - protein, 9 aa, Homo sapiens
  Table A; HLA-B*27:02; SF3B1; R957Q; 0
ISQTAVVMK

SEQ ID NO: 14679 - protein, 9 aa, Homo sapiens
  Table A; HLA-B*57:01; SF3B1; R957Q; 1
ISQTAVVMK

SEQ ID NO: 14680 - protein, 9 aa, Homo sapiens
  Table A; HLA-B*13:02; PIK3CA; E542V; 0
ISTRDPLSV

SEQ ID NO: 14681 - protein, 9 aa, Homo sapiens
  Table A; HLA-B*58:01; PIK3CA; E542V; 0
ISTRDPLSV

SEQ ID NO: 14682 - protein, 9 aa, Homo sapiens
  Table A; HLA-C*15:02; PIK3CA; E542V; 0
ISTRDPLSV

SEQ ID NO: 14683 - protein, 9 aa, Homo sapiens
  Table A; HLA-B*15:01; EP300; D1399N; 1
ISYLNSVHF

SEQ ID NO: 14684 - protein, 9 aa, Homo sapiens
  Table A; HLA-B*57:01; EP300; D1399N; 1
ISYLNSVHF

SEQ ID NO: 14685 - protein, 9 aa, Homo sapiens
  Table A; HLA-B*58:01; EP300; D1399N; 0
ISYLNSVHF

SEQ ID NO: 14686 - protein, 10 aa, Homo sapiens
  Table A; HLA-B*57:01; EP300; D1399N; 1
ISYLNSVHFF

SEQ ID NO: 14687 - protein, 9 aa, Homo sapiens
  Table A; HLA-A*02:03; RAC1; P29L; 0
ISYTTNAFL

SEQ ID NO: 14688 - protein, 9 aa, Homo sapiens
  Table A; HLA-A*02:05; RAC1; P29L; 0
ISYTTNAFL

SEQ ID NO: 14689 - protein, 9 aa, Homo sapiens
  Table A; HLA-A*02:06; RAC1; P29L; 0
ISYTTNAFL

SEQ ID NO: 14690 - protein, 9 aa, Homo sapiens
  Table A; HLA-A*68:02; RAC1; P29L; 0
ISYTTNAFL

SEQ ID NO: 14691 - protein, 9 aa, Homo sapiens
  Table A; HLA-B*13:02; RAC1; P29L; 0
ISYTTNAFL

SEQ ID NO: 14692 - protein, 9 aa, Homo sapiens
  Table A; HLA-B*15:02; RAC1; P29L; 0
ISYTTNAFL

SEQ ID NO: 14693 - protein, 9 aa, Homo sapiens
  Table A; HLA-B*57:01; RAC1; P29L; 0
ISYTTNAFL

SEQ ID NO: 14694 - protein, 9 aa, Homo sapiens
  Table A; HLA-B*58:01; RAC1; P29L; 0
ISYTTNAFL

SEQ ID NO: 14695 - protein, 9 aa, Homo sapiens
  Table A; HLA-C*03:03; RAC1; P29L; 1
ISYTTNAFL

SEQ ID NO: 14696 - protein, 9 aa, Homo sapiens
  Table A; HLA-C*03:04; RAC1; P29L; 1
ISYTTNAFL

SEQ ID NO: 14697 - protein, 9 aa, Homo sapiens
  Table A; HLA-C*08:01; RAC1; P29L; 0
ISYTTNAFL

SEQ ID NO: 14698 - protein, 9 aa, Homo sapiens
  Table A; HLA-C*15:02; RAC1; P29L; 0
ISYTTNAFL

SEQ ID NO: 14699 - protein, 9 aa, Homo sapiens
  Table A; HLA-C*17:01; RAC1; P29L; 0
ISYTTNAFL

SEQ ID NO: 14700 - protein, 10 aa, Homo sapiens
  Table A; HLA-A*68:02; RAC1; P29L; 0
ISYTTNAFLG

SEQ ID NO: 14701 - protein, 10 aa, Homo sapiens
  Table A; HLA-A*68:02; RAC1; P29S; 0
ISYTTNAFSG

SEQ ID NO: 14702 - protein, 9 aa, Homo sapiens
  Table A; HLA-A*02:01; CTNNB1; T41I; 1
ITAPSLSGK

SEQ ID NO: 14703 - protein, 9 aa, Homo sapiens
  Table A; HLA-A*02:03; CTNNB1; T41I; 0
ITAPSLSGK

SEQ ID NO: 14704 - protein, 9 aa, Homo sapiens
  Table A; HLA-A*02:08; CTNNB1; T41I; 0
ITAPSLSGK

SEQ ID NO: 14705 - protein, 9 aa, Homo sapiens
  Table A; HLA-A*03:01; CTNNB1; T41I; 1
ITAPSLSGK

SEQ ID NO: 14706 - protein, 9 aa, Homo sapiens
  Table A; HLA-A*03:02; CTNNB1; T41I; 0
ITAPSLSGK

SEQ ID NO: 14707 - protein, 9 aa, Homo sapiens
  Table A; HLA-A*11:01; CTNNB1; T41I; 1
ITAPSLSGK

SEQ ID NO: 14708 - protein, 9 aa, Homo sapiens
  Table A; HLA-A*26:01; CTNNB1; T41I; 0
ITAPSLSGK

SEQ ID NO: 14709 - protein, 9 aa, Homo sapiens
  Table A; HLA-A*26:03; CTNNB1; T41I; 0
ITAPSLSGK

SEQ ID NO: 14710 - protein, 9 aa, Homo sapiens
  Table A; HLA-A*30:01; CTNNB1; T41I; 0
ITAPSLSGK

SEQ ID NO: 14711 - protein, 9 aa, Homo sapiens
  Table A; HLA-A*31:01; CTNNB1; T41I; 0
ITAPSLSGK

SEQ ID NO: 14712 - protein, 9 aa, Homo sapiens
  Table A; HLA-A*33:03; CTNNB1; T41I; 0
ITAPSLSGK

SEQ ID NO: 14713 - protein, 9 aa, Homo sapiens
  Table A; HLA-A*68:01; CTNNB1; T41I; 0
ITAPSLSGK

SEQ ID NO: 14714 - protein, 9 aa, Homo sapiens
  Table A; HLA-A*68:02; CTNNB1; T41I; 0
ITAPSLSGK

SEQ ID NO: 14715 - protein, 9 aa, Homo sapiens
  Table A; HLA-B*27:05; CTNNB1; T41I; 1
ITAPSLSGK

SEQ ID NO: 14716 - protein, 9 aa, Homo sapiens
  Table A; HLA-B*46:01; CTNNB1; T41I; 0
ITAPSLSGK

SEQ ID NO: 14717 - protein, 9 aa, Homo sapiens
  Table A; HLA-B*57:01; CTNNB1; T41I; 1
ITAPSLSGK

SEQ ID NO: 14718 - protein, 9 aa, Homo sapiens
  Table A; HLA-B*58:01; CTNNB1; T41I; 0
ITAPSLSGK

SEQ ID NO: 14719 - protein, 10 aa, Homo sapiens
  Table A; HLA-A*02:05; CTNNB1; T41I; 0
ITAPSLSGKG

SEQ ID NO: 14720 - protein, 10 aa, Homo sapiens
  Table A; HLA-A*03:01; CTNNB1; T41I; 1
ITAPSLSGKG

SEQ ID NO: 14721 - protein, 10 aa, Homo sapiens
  Table A; HLA-A*11:01; CTNNB1; T41I; 1
ITAPSLSGKG

SEQ ID NO: 14722 - protein, 10 aa, Homo sapiens
  Table A; HLA-A*26:01; CTNNB1; T41I; 0
ITAPSLSGKG

SEQ ID NO: 14723 - protein, 10 aa, Homo sapiens
  Table A; HLA-A*29:02; CTNNB1; T41I; 1
ITAPSLSGKG

SEQ ID NO: 14724 - protein, 10 aa, Homo sapiens
  Table A; HLA-A*68:01; CTNNB1; T41I; 0
ITAPSLSGKG

SEQ ID NO: 14725 - protein, 10 aa, Homo sapiens
  Table A; HLA-A*68:02; CTNNB1; T41I; 0
ITAPSLSGKG

SEQ ID NO: 14726 - protein, 9 aa, Homo sapiens
  Table A; HLA-A*02:05; PIK3CA; E545A; 0
ITAQEKDFL

SEQ ID NO: 14727 - protein, 10 aa, Homo sapiens
  Table A; HLA-B*57:01; PIK3CA; E545A; 0
ITAQEKDFLW

SEQ ID NO: 14728 - protein, 10 aa, Homo sapiens
  Table A; HLA-A*68:02; EGFR; L861Q; 0
ITDFGLAKQL

SEQ ID NO: 14729 - protein, 8 aa, Homo sapiens
  Table A; HLA-A*03:01; EGFR; L858R; 1
ITDFGRAK

SEQ ID NO: 14730 - protein, 8 aa, Homo sapiens
  Table A; HLA-A*11:01; EGFR; L858R; 1
ITDFGRAK

SEQ ID NO: 14731 - protein, 9 aa, Homo sapiens
  Table A; HLA-C*03:04; EGFR; L858R; 1
ITDFGRAKL

SEQ ID NO: 14732 - protein, 9 aa, Homo sapiens
  Table A; HLA-C*05:01; EGFR; L858R; 1
ITDFGRAKL

SEQ ID NO: 14733 - protein, 9 aa, Homo sapiens
  Table A; HLA-C*08:02; EGFR; L858R; 1
ITDFGRAKL

SEQ ID NO: 14734 - protein, 8 aa, Homo sapiens
  Table A; HLA-C*05:01; PIK3CA; E545D; 1
ITDQEKDF

SEQ ID NO: 14735 - protein, 9 aa, Homo sapiens
  Table A; HLA-C*05:01; PIK3CA; E545D; 1
ITDQEKDFL

SEQ ID NO: 14736 - protein, 9 aa, Homo sapiens
  Table A; HLA-C*08:02; PIK3CA; E545D; 0
ITDQEKDFL

SEQ ID NO: 14737 - protein, 10 aa, Homo sapiens
  Table A; HLA-B*57:01; PIK3CA; E545D; 0
ITDQEKDFLW

SEQ ID NO: 14738 - protein, 10 aa, Homo sapiens
  Table A; HLA-A*01:01; ARHGAP5; V474A; 1
ITEADSKEAY

SEQ ID NO: 14739 - protein, 10 aa, Homo sapiens
  Table A; HLA-B*15:01; ARHGAP5; V474A; 1
ITEADSKEAY

SEQ ID NO: 14740 - protein, 10 aa, Homo sapiens
  Table A; HLA-B*35:08; ARHGAP5; V474A; 0
ITEADSKEAY

SEQ ID NO: 14741 - protein, 10 aa, Homo sapiens
  Table A; HLA-B*58:01; ARHGAP5; V474A; 0
ITEADSKEAY

SEQ ID NO: 14742 - protein, 10 aa, Homo sapiens
  Table A; HLA-C*03:02; ARHGAP5; V474A; 0
ITEADSKEAY

SEQ ID NO: 14743 - protein, 10 aa, Homo sapiens
  Table A; HLA-B*57:01; PIK3CA; Q546K; 0
ITEKEKDFLW

SEQ ID NO: 14744 - protein, 9 aa, Homo sapiens
  Table A; HLA-A*03:02; CTNND1; A781T; 0
ITENLEAAK

SEQ ID NO: 14745 - protein, 9 aa, Homo sapiens
  Table A; HLA-A*11:01; CTNND1; A781T; 0
ITENLEAAK

SEQ ID NO: 14746 - protein, 9 aa, Homo sapiens
  Table A; HLA-B*27:02; CTNND1; A781T; 0
ITENLEAAK

SEQ ID NO: 14747 - protein, 10 aa, Homo sapiens
  Table A; HLA-A*03:02; CTNND1; A781T; 0
ITENLEAAKK

SEQ ID NO: 14748 - protein, 10 aa, Homo sapiens
  Table A; HLA-A*11:01; CTNND1; A781T; 0
ITENLEAAKK

SEQ ID NO: 14749 - protein, 10 aa, Homo sapiens
  Table A; HLA-A*68:01; CTNND1; A781T; 0
ITENLEAAKK

SEQ ID NO: 14750 - protein, 10 aa, Homo sapiens
  Table A; HLA-A*68:02; CTNND1; A781T; 0
ITENLEAAKK

SEQ ID NO: 14751 - protein, 10 aa, Homo sapiens
  Table A; HLA-B*27:02; CTNND1; A781T; 0
ITENLEAAKK

SEQ ID NO: 14752 - protein, 10 aa, Homo sapiens
  Table A; HLA-B*57:01; PIK3CA; Q546P; 1
ITEPEKDFLW

SEQ ID NO: 14753 - protein, 10 aa, Homo sapiens
  Table A; HLA-B*57:01; PIK3CA; Q546R; 1
ITEREKDFLW

SEQ ID NO: 14754 - protein, 10 aa, Homo sapiens
  Table A; HLA-B*57:01; PIK3CA; E545G; 0
ITGQEKDFLW

SEQ ID NO: 14755 - protein, 10 aa, Homo sapiens
  Table A; HLA-B*57:01; PIK3CA; E545K; 1
ITKQEKDFLW

SEQ ID NO: 14756 - protein, 8 aa, Homo sapiens
  Table A; HLA-C*08:03; TP53; G262V; 0
ITLEDSSV

SEQ ID NO: 14757 - protein, 10 aa, Homo sapiens
  Table A; HLA-A*02:04; TP53; G262V; 0
ITLEDSSVNL

SEQ ID NO: 14758 - protein, 10 aa, Homo sapiens
  Table A; HLA-A*02:05; TP53; G262V; 0
ITLEDSSVNL

SEQ ID NO: 14759 - protein, 10 aa, Homo sapiens
  Table A; HLA-A*02:06; TP53; G262V; 0
ITLEDSSVNL

SEQ ID NO: 14760 - protein, 11 aa, Homo sapiens
  Table A; HLA-A*02:04; TP53; G262V; 0
ITLEDSSVNLL

SEQ ID NO: 14761 - protein, 11 aa, Homo sapiens
  Table A; HLA-A*02:05; TP53; G262V; 0
ITLEDSSVNLL

SEQ ID NO: 14762 - protein, 11 aa, Homo sapiens
  Table A; HLA-A*02:06; TP53; G262V; 0
ITLEDSSVNLL

SEQ ID NO: 14763 - protein, 11 aa, Homo sapiens
  Table A; HLA-A*02:08; TP53; G262V; 0
ITLEDSSVNLL

SEQ ID NO: 14764 - protein, 11 aa, Homo sapiens
  Table A; HLA-A*68:02; TP53; G262V; 0
ITLEDSSVNLL

SEQ ID NO: 14765 - protein, 11 aa, Homo sapiens
  Table A; HLA-B*38:01; TP53; G262V; 0
ITLEDSSVNLL

SEQ ID NO: 14766 - protein, 9 aa, Homo sapiens
  Table A; HLA-B*57:01; STAG1; A116T; 0
ITLLDLINF

SEQ ID NO: 14767 - protein, 9 aa, Homo sapiens
  Table A; HLA-B*58:01; STAG1; A116T; 0
ITLLDLINF

SEQ ID NO: 14768 - protein, 10 aa, Homo sapiens
  Table A; HLA-B*57:01; STAG1; A116T; 0
ITLLDLINFF

SEQ ID NO: 14769 - protein, 9 aa, Homo sapiens
  Table A; HLA-B*57:01; SIRPA; V233I; 0
ITLQGDPLR

SEQ ID NO: 14770 - protein, 9 aa, Homo sapiens
  Table A; HLA-A*26:03; CHD4; R975H; 0
IVHVELSPM

SEQ ID NO: 14771 - protein, 9 aa, Homo sapiens
  Table A; HLA-B*15:02; CHD4; R975H; 0
IVHVELSPM

SEQ ID NO: 14772 - protein, 9 aa, Homo sapiens
  Table A; HLA-B*35:01; CHD4; R975H; 1
IVHVELSPM

SEQ ID NO: 14773 - protein, 9 aa, Homo sapiens
  Table A; HLA-B*35:03; CHD4; R975H; 0
IVHVELSPM

SEQ ID NO: 14774 - protein, 9 aa, Homo sapiens
  Table A; HLA-B*35:08; CHD4; R975H; 0
IVHVELSPM

SEQ ID NO: 14775 - protein, 9 aa, Homo sapiens
  Table A; HLA-C*02:02; CHD4; R975H; 1
IVHVELSPM

SEQ ID NO: 14776 - protein, 9 aa, Homo sapiens
  Table A; HLA-C*08:01; CHD4; R975H; 0
IVHVELSPM

SEQ ID NO: 14777 - protein, 11 aa, Homo sapiens
  Table A; HLA-A*03:01; CHD4; R975H; 1
IVHVELSPMQK

SEQ ID NO: 14778 - protein, 11 aa, Homo sapiens
  Table A; HLA-A*03:02; CHD4; R975H; 0
IVHVELSPMQK

SEQ ID NO: 14779 - protein, 11 aa, Homo sapiens
  Table A; HLA-A*11:01; CHD4; R975H; 1
IVHVELSPMQK

SEQ ID NO: 14780 - protein, 11 aa, Homo sapiens
  Table A; HLA-A*68:01; CHD4; R975H; 0
IVHVELSPMQK

SEQ ID NO: 14781 - protein, 11 aa, Homo sapiens
  Table A; HLA-B*27:02; CHD4; R975H; 0
IVHVELSPMQK

SEQ ID NO: 14782 - protein, 10 aa, Homo sapiens
  Table A; HLA-A*02:05; BCOR; N1425S; 0
IVSKNAGETL

SEQ ID NO: 14783 - protein, 10 aa, Homo sapiens
  Table A; HLA-A*02:08; BCOR; N1425S; 0
IVSKNAGETL

SEQ ID NO: 14784 - protein, 10 aa, Homo sapiens
  Table A; HLA-B*13:01; BCOR; N1425S; 0
IVSKNAGETL

SEQ ID NO: 14785 - protein, 10 aa, Homo sapiens
  Table A; HLA-B*15:01; BCOR; N1425S; 1
IVSKNAGETL

SEQ ID NO: 14786 - protein, 10 aa, Homo sapiens
  Table A; HLA-B*38:01; BCOR; N1425S; 1
IVSKNAGETL

SEQ ID NO: 14787 - protein, 10 aa, Homo sapiens
  Table A; HLA-B*39:01; BCOR; N1425S; 0
IVSKNAGETL

SEQ ID NO: 14788 - protein, 11 aa, Homo sapiens
  Table A; HLA-A*02:08; BCOR; N1425S; 0
IVSKNAGETLL

SEQ ID NO: 14789 - protein, 10 aa, Homo sapiens
  Table A; HLA-A*23:01; BMP5; R208Q; 0
IYKDRSNNQF

SEQ ID NO: 14790 - protein, 10 aa, Homo sapiens
  Table A; HLA-A*24:02; BMP5; R208Q; 1
IYKDRSNNQF

SEQ ID NO: 14791 - protein, 10 aa, Homo sapiens
  Table A; HLA-C*14:02; BMP5; R208Q; 0
IYKDRSNNQF

SEQ ID NO: 14792 - protein, 10 aa, Homo sapiens
  Table A; HLA-C*14:03; BMP5; R208Q; 0
IYKDRSNNQF

SEQ ID NO: 14793 - protein, 10 aa, Homo sapiens
  Table A; HLA-C*01:02; PREX2; H1404Y; 0
IYPVLFAQAL

SEQ ID NO: 14794 - protein, 10 aa, Homo sapiens
  Table A; HLA-C*14:02; PREX2; H1404Y; 0
IYPVLFAQAL

SEQ ID NO: 14795 - protein, 9 aa, Homo sapiens
  Table A; HLA-A*24:02; FGFR2; C382R; 1
IYRIGVFLI

SEQ ID NO: 14796 - protein, 10 aa, Homo sapiens
  Table A; HLA-A*33:03; CREB3L1; V414I; 0
IYTASQMPSR

SEQ ID NO: 14797 - protein, 10 aa, Homo sapiens
  Table A; HLA-B*27:02; CREB3L1; V414I; 0
IYTASQMPSR

SEQ ID NO: 14798 - protein, 9 aa, Homo sapiens
  Table A; HLA-A*02:03; PTEN; R130L; 0
KAGKGLTGV

SEQ ID NO: 14799 - protein, 9 aa, Homo sapiens
  Table A; HLA-A*02:06; PTEN; R130L; 0
KAGKGLTGV

SEQ ID NO: 14800 - protein, 9 aa, Homo sapiens
  Table A; HLA-A*02:08; PTEN; R130L; 0
KAGKGLTGV

SEQ ID NO: 14801 - protein, 9 aa, Homo sapiens
  Table A; HLA-A*02:08; PTEN; R130Q; 0
KAGKGQTGV

SEQ ID NO: 14802 - protein, 11 aa, Homo sapiens
  Table A; HLA-A*03:01; PIK3CA; E542K; 1
KAISTRDPLSK

SEQ ID NO: 14803 - protein, 11 aa, Homo sapiens
  Table A; HLA-A*03:02; PIK3CA; E542K; 0
KAISTRDPLSK

SEQ ID NO: 14804 - protein, 9 aa, Homo sapiens
  Table A; HLA-A*29:01; SPOP; R121Q; 0
KAMESQQAY

SEQ ID NO: 14805 - protein, 9 aa, Homo sapiens
  Table A; HLA-A*30:02; SPOP; R121Q; 0
KAMESQQAY

SEQ ID NO: 14806 - protein, 9 aa, Homo sapiens
  Table A; HLA-A*30:04; SPOP; R121Q; 0
KAMESQQAY

SEQ ID NO: 14807 - protein, 9 aa, Homo sapiens
  Table A; HLA-A*32:01; SPOP; R121Q; 0
KAMESQQAY

SEQ ID NO: 14808 - protein, 9 aa, Homo sapiens
  Table A; HLA-B*15:01; SPOP; R121Q; 1
KAMESQQAY

SEQ ID NO: 14809 - protein, 9 aa, Homo sapiens
  Table A; HLA-B*15:02; SPOP; R121Q; 0
KAMESQQAY

SEQ ID NO: 14810 - protein, 9 aa, Homo sapiens
  Table A; HLA-B*15:03; SPOP; R121Q; 0
KAMESQQAY

SEQ ID NO: 14811 - protein, 9 aa, Homo sapiens
  Table A; HLA-B*15:13; SPOP; R121Q; 0
KAMESQQAY

SEQ ID NO: 14812 - protein, 9 aa, Homo sapiens
  Table A; HLA-B*35:01; SPOP; R121Q; 1
KAMESQQAY

SEQ ID NO: 14813 - protein, 9 aa, Homo sapiens
  Table A; HLA-B*35:08; SPOP; R121Q; 0
KAMESQQAY

SEQ ID NO: 14814 - protein, 9 aa, Homo sapiens
  Table A; HLA-B*46:01; SPOP; R121Q; 0
KAMESQQAY

SEQ ID NO: 14815 - protein, 9 aa, Homo sapiens
  Table A; HLA-B*57:01; SPOP; R121Q; 0
KAMESQQAY

SEQ ID NO: 14816 - protein, 9 aa, Homo sapiens
  Table A; HLA-B*58:01; SPOP; R121Q; 0
KAMESQQAY

SEQ ID NO: 14817 - protein, 9 aa, Homo sapiens
  Table A; HLA-C*02:02; SPOP; R121Q; 0
KAMESQQAY

SEQ ID NO: 14818 - protein, 9 aa, Homo sapiens
  Table A; HLA-C*03:02; SPOP; R121Q; 0
KAMESQQAY

SEQ ID NO: 14819 - protein, 9 aa, Homo sapiens
  Table A; HLA-C*14:03; SPOP; R121Q; 0
KAMESQQAY

SEQ ID NO: 14820 - protein, 9 aa, Homo sapiens
  Table A; HLA-C*16:01; SPOP; R121Q; 0
KAMESQQAY

SEQ ID NO: 14821 - protein, 9 aa, Homo sapiens
  Table A; HLA-C*16:02; SPOP; R121Q; 0
KAMESQQAY

SEQ ID NO: 14822 - protein, 9 aa, Homo sapiens
  Table A; HLA-C*16:04; SPOP; R121Q; 0
KAMESQQAY

SEQ ID NO: 14823 - protein, 10 aa, Homo sapiens
  Table A; HLA-A*11:01; SPOP; R121Q; 1
KAMESQQAYR

SEQ ID NO: 14824 - protein, 10 aa, Homo sapiens
  Table A; HLA-A*31:01; SPOP; R121Q; 0
KAMESQQAYR

SEQ ID NO: 14825 - protein, 10 aa, Homo sapiens
  Table A; HLA-A*33:03; SPOP; R121Q; 0
KAMESQQAYR

SEQ ID NO: 14826 - protein, 10 aa, Homo sapiens
  Table A; HLA-A*68:01; SPOP; R121Q; 0
KAMESQQAYR

SEQ ID NO: 14827 - protein, 11 aa, Homo sapiens
  Table A; HLA-B*57:01; SPOP; R121Q; 0
KAMESQQAYRF

SEQ ID NO: 14828 - protein, 10 aa, Homo sapiens
  Table A; HLA-A*03:01; MAX; R60Q; 1
KASQAQILDK

SEQ ID NO: 14829 - protein, 10 aa, Homo sapiens
  Table A; HLA-A*03:02; MAX; R60Q; 0
KASQAQILDK

SEQ ID NO: 14830 - protein, 10 aa, Homo sapiens
  Table A; HLA-A*11:01; MAX; R60Q; 1
KASQAQILDK

SEQ ID NO: 14831 - protein, 10 aa, Homo sapiens
  Table A; HLA-B*27:02; MAX; R60Q; 0
KASQAQILDK

SEQ ID NO: 14832 - protein, 11 aa, Homo sapiens
  Table A; HLA-A*02:05; MAX; R60Q; 0
KASQAQILDKA

SEQ ID NO: 14833 - protein, 11 aa, Homo sapiens
  Table A; HLA-A*02:08; MAX; R60Q; 0
KASQAQILDKA

SEQ ID NO: 14834 - protein, 8 aa, Homo sapiens
  Table A; HLA-A*03:02; PIK3CA; E39K; 0
KATLVTIK

SEQ ID NO: 14835 - protein, 9 aa, Homo sapiens
  Table A; HLA-A*03:01; PIK3CA; E39K; 1
KATLVTIKH

SEQ ID NO: 14836 - protein, 9 aa, Homo sapiens
  Table A; HLA-A*03:02; PIK3CA; E39K; 0
KATLVTIKH

SEQ ID NO: 14837 - protein, 9 aa, Homo sapiens
  Table A; HLA-A*11:01; PIK3CA; E39K; 1
KATLVTIKH

SEQ ID NO: 14838 - protein, 9 aa, Homo sapiens
  Table A; HLA-B*57:01; PIK3CA; E39K; 1
KATLVTIKH

SEQ ID NO: 14839 - protein, 9 aa, Homo sapiens
  Table A; HLA-B*58:01; PIK3CA; E39K; 0
KATLVTIKH

SEQ ID NO: 14840 - protein, 9 aa, Homo sapiens
  Table A; HLA-A*30:02; SPOP; M117V; 0
KAVESQRAY

SEQ ID NO: 14841 - protein, 9 aa, Homo sapiens
  Table A; HLA-A*30:04; SPOP; M117V; 0
KAVESQRAY

SEQ ID NO: 14842 - protein, 9 aa, Homo sapiens
  Table A; HLA-A*32:01; SPOP; M117V; 0
KAVESQRAY

SEQ ID NO: 14843 - protein, 9 aa, Homo sapiens
  Table A; HLA-B*15:01; SPOP; M117V; 1
KAVESQRAY

SEQ ID NO: 14844 - protein, 9 aa, Homo sapiens
  Table A; HLA-B*15:03; SPOP; M117V; 0
KAVESQRAY

SEQ ID NO: 14845 - protein, 9 aa, Homo sapiens
  Table A; HLA-B*35:01; SPOP; M117V; 0
KAVESQRAY

SEQ ID NO: 14846 - protein, 9 aa, Homo sapiens
  Table A; HLA-B*46:01; SPOP; M117V; 0
KAVESQRAY

SEQ ID NO: 14847 - protein, 9 aa, Homo sapiens
  Table A; HLA-B*57:01; SPOP; M117V; 0
KAVESQRAY

SEQ ID NO: 14848 - protein, 9 aa, Homo sapiens
  Table A; HLA-B*58:01; SPOP; M117V; 0
KAVESQRAY

SEQ ID NO: 14849 - protein, 9 aa, Homo sapiens
  Table A; HLA-C*03:02; SPOP; M117V; 0
KAVESQRAY

SEQ ID NO: 14850 - protein, 9 aa, Homo sapiens
  Table A; HLA-C*12:03; SPOP; M117V; 0
KAVESQRAY

SEQ ID NO: 14851 - protein, 9 aa, Homo sapiens
  Table A; HLA-C*16:01; SPOP; M117V; 0
KAVESQRAY

SEQ ID NO: 14852 - protein, 9 aa, Homo sapiens
  Table A; HLA-C*16:02; SPOP; M117V; 0
KAVESQRAY

SEQ ID NO: 14853 - protein, 9 aa, Homo sapiens
  Table A; HLA-C*16:04; SPOP; M117V; 0
KAVESQRAY

SEQ ID NO: 14854 - protein, 9 aa, Homo sapiens
  Table A; HLA-A*03:01; ESR1; E247K; 1
KCYKVGMMK

SEQ ID NO: 14855 - protein, 9 aa, Homo sapiens
  Table A; HLA-B*37:01; PIK3CA; E726K; 0
KDKTQKVQM

SEQ ID NO: 14856 - protein, 9 aa, Homo sapiens
  Table A; HLA-B*41:02; PIK3CA; E726K; 0
KDKTQKVQM

SEQ ID NO: 14857 - protein, 9 aa, Homo sapiens
  Table A; HLA-A*02:01; PIK3CA; E453K; 1
KDLLNPIGV

SEQ ID NO: 14858 - protein, 9 aa, Homo sapiens
  Table A; HLA-A*30:01; PIK3CA; E453K; 0
KDLLNPIGV

SEQ ID NO: 14859 - protein, 9 aa, Homo sapiens
  Table A; HLA-B*37:01; PIK3CA; E453K; 0
KDLLNPIGV

SEQ ID NO: 14860 - protein, 9 aa, Homo sapiens
  Table A; HLA-B*40:02; PIK3CA; E453K; 0
KDLLNPIGV

SEQ ID NO: 14861 - protein, 9 aa, Homo sapiens
  Table A; HLA-B*40:06; PIK3CA; E453K; 0
KDLLNPIGV

SEQ ID NO: 14862 - protein, 9 aa, Homo sapiens
  Table A; HLA-B*41:02; PIK3CA; E453K; 0
KDLLNPIGV

SEQ ID NO: 14863 - protein, 9 aa, Homo sapiens
  Table A; HLA-B*44:05; PIK3CA; E453K; 0
KDLLNPIGV

SEQ ID NO: 14864 - protein, 10 aa, Homo sapiens
  Table A; HLA-B*40:01; CREB3L1; V414I; 0
KEDPLAADGI

SEQ ID NO: 14865 - protein, 10 aa, Homo sapiens
  Table A; HLA-B*40:02; CREB3L1; V414I; 0
KEDPLAADGI

SEQ ID NO: 14866 - protein, 10 aa, Homo sapiens
  Table A; HLA-B*44:05; CREB3L1; V414I; 0
KEDPLAADGI

SEQ ID NO: 14867 - protein, 10 aa, Homo sapiens
  Table A; HLA-B*49:01; CREB3L1; V414I; 0
KEDPLAADGI

SEQ ID NO: 14868 - protein, 9 aa, Homo sapiens
  Table A; HLA-B*44:02; PIK3CA; C420R; 1
KEEHRPLAW

SEQ ID NO: 14869 - protein, 9 aa, Homo sapiens
  Table A; HLA-B*44:03; PIK3CA; C420R; 1
KEEHRPLAW

SEQ ID NO: 14870 - protein, 9 aa, Homo sapiens
  Table A; HLA-B*50:01; FGFR2; Y375C; 0
KEITASPDC

SEQ ID NO: 14871 - protein, 10 aa, Homo sapiens
  Table A; HLA-B*40:01; FGFR2; Y375C; 1
KEITASPDCL

SEQ ID NO: 14872 - protein, 10 aa, Homo sapiens
  Table A; HLA-B*40:02; FGFR2; Y375C; 0
KEITASPDCL

SEQ ID NO: 14873 - protein, 10 aa, Homo sapiens
  Table A; HLA-B*44:05; FGFR2; Y375C; 0
KEITASPDCL

SEQ ID NO: 14874 - protein, 9 aa, Homo sapiens
  Table A; HLA-C*06:02; PIK3CA; E81K; 0
KFFDETRRL

SEQ ID NO: 14875 - protein, 9 aa, Homo sapiens
  Table A; HLA-C*14:02; PIK3CA; E81K; 0
KFFDETRRL

SEQ ID NO: 14876 - protein, 9 aa, Homo sapiens
  Table A; HLA-A*02:03; PREX2; E553K; 0
KFKDEPLLF

SEQ ID NO: 14877 - protein, 9 aa, Homo sapiens
  Table A; HLA-A*23:01; PREX2; E553K; 0
KFKDEPLLF

SEQ ID NO: 14878 - protein, 9 aa, Homo sapiens
  Table A; HLA-A*24:02; PREX2; E553K; 0
KFKDEPLLF

SEQ ID NO: 14879 - protein, 9 aa, Homo sapiens
  Table A; HLA-A*29:02; PREX2; E553K; 0
KFKDEPLLF

SEQ ID NO: 14880 - protein, 9 aa, Homo sapiens
  Table A; HLA-A*30:01; PREX2; E553K; 0
KFKDEPLLF

SEQ ID NO: 14881 - protein, 9 aa, Homo sapiens
  Table A; HLA-A*31:01; PREX2; E553K; 0
KFKDEPLLF

SEQ ID NO: 14882 - protein, 9 aa, Homo sapiens
  Table A; HLA-B*57:01; PREX2; E553K; 0
KFKDEPLLF

SEQ ID NO: 14883 - protein, 9 aa, Homo sapiens
  Table A; HLA-C*14:02; PREX2; E553K; 0
KFKDEPLLF

SEQ ID NO: 14884 - protein, 10 aa, Homo sapiens
  Table A; HLA-A*31:01; PREX2; E553K; 0
KFKDEPLLFR

SEQ ID NO: 14885 - protein, 11 aa, Homo sapiens
  Table A; HLA-A*23:01; PREX2; E553K; 0
KFKDEPLLFRF

SEQ ID NO: 14886 - protein, 8 aa, Homo sapiens
  Table A; HLA-C*14:02; TP63; E609K; 0
KFSSPSHL

SEQ ID NO: 14887 - protein, 9 aa, Homo sapiens
  Table A; HLA-A*23:01; TP63; E609K; 0
KFSSPSHLL

SEQ ID NO: 14888 - protein, 9 aa, Homo sapiens
  Table A; HLA-A*24:02; TP63; E609K; 1
KFSSPSHLL

SEQ ID NO: 14889 - protein, 9 aa, Homo sapiens
  Table A; HLA-A*31:01; TP63; E609K; 0
KFSSPSHLL

SEQ ID NO: 14890 - protein, 9 aa, Homo sapiens
  Table A; HLA-B*48:01; TP63; E609K; 0
KFSSPSHLL

SEQ ID NO: 14891 - protein, 9 aa, Homo sapiens
  Table A; HLA-B*57:01; TP63; E609K; 0
KFSSPSHLL

SEQ ID NO: 14892 - protein, 9 aa, Homo sapiens
  Table A; HLA-C*14:02; TP63; E609K; 0
KFSSPSHLL

SEQ ID NO: 14893 - protein, 10 aa, Homo sapiens
  Table A; HLA-A*03:01; TP63; E609K; 1
KFSSPSHLLR

SEQ ID NO: 14894 - protein, 10 aa, Homo sapiens
  Table A; HLA-A*31:01; TP63; E609K; 0
KFSSPSHLLR

SEQ ID NO: 14895 - protein, 8 aa, Homo sapiens
  Table A; HLA-B*58:01; PTEN; R130G; 1
KGGTGVMI

SEQ ID NO: 14896 - protein, 9 aa, Homo sapiens
  Table A; HLA-A*31:01; PTEN; S170N; 0
KGVTIPNQR

SEQ ID NO: 14897 - protein, 9 aa, Homo sapiens
  Table A; HLA-A*68:01; PTEN; S170N; 0
KGVTIPNQR

SEQ ID NO: 14898 - protein, 9 aa, Homo sapiens
  Table A; HLA-B*57:01; PTEN; S170N; 0
KGVTIPNQR

SEQ ID NO: 14899 - protein, 10 aa, Homo sapiens
  Table A; HLA-A*02:03; HIST1H3B; E74K; 0
KIAQDFKTDL

SEQ ID NO: 14900 - protein, 10 aa, Homo sapiens
  Table A; HLA-A*02:05; HIST1H3B; E74K; 0
KIAQDFKTDL

SEQ ID NO: 14901 - protein, 10 aa, Homo sapiens
  Table A; HLA-A*02:08; HIST1H3B; E74K; 0
KIAQDFKTDL

SEQ ID NO: 14902 - protein, 10 aa, Homo sapiens
  Table A; HLA-B*07:02; HIST1H3B; E74K; 1
KIAQDFKTDL

SEQ ID NO: 14903 - protein, 10 aa, Homo sapiens
  Table A; HLA-B*40:01; HIST1H3B; E74K; 0
KIAQDFKTDL

SEQ ID NO: 14904 - protein, 10 aa, Homo sapiens
  Table A; HLA-B*48:01; HIST1H3B; E74K; 0
KIAQDFKTDL

SEQ ID NO: 14905 - protein, 11 aa, Homo sapiens
  Table A; HLA-A*03:01; BRAF; V600E; 1
KIGDFGLATEK

SEQ ID NO: 14906 - protein, 11 aa, Homo sapiens
  Table A; HLA-A*03:02; BRAF; V600E; 1
KIGDFGLATEK

SEQ ID NO: 14907 - protein, 11 aa, Homo sapiens
  Table A; HLA-A*11:01; BRAF; V600E; 1
KIGDFGLATEK

SEQ ID NO: 14908 - protein, 11 aa, Homo sapiens
  Table A; HLA-A*31:01; BRAF; V600E; 1
KIGDFGLATEK

SEQ ID NO: 14909 - protein, 11 aa, Homo sapiens
  Table A; HLA-B*27:02; BRAF; V600E; 1
KIGDFGLATEK

SEQ ID NO: 14910 - protein, 9 aa, Homo sapiens
  Table A; HLA-A*03:01; CHD4; R1338I; 1
KIIRKQVNY

SEQ ID NO: 14911 - protein, 9 aa, Homo sapiens
  Table A; HLA-B*15:01; CHD4; R1338I; 1
KIIRKQVNY

SEQ ID NO: 14912 - protein, 9 aa, Homo sapiens
  Table A; HLA-B*57:01; CHD4; R1338I; 0
KIIRKQVNY

SEQ ID NO: 14913 - protein, 9 aa, Homo sapiens
  Table A; HLA-A*03:01; EGFR; L858R; 1
KITDFGRAK

SEQ ID NO: 14914 - protein, 9 aa, Homo sapiens
  Table A; HLA-A*03:02; EGFR; L858R; 0
KITDFGRAK

SEQ ID NO: 14915 - protein, 9 aa, Homo sapiens
  Table A; HLA-A*11:01; EGFR; L858R; 1
KITDFGRAK

SEQ ID NO: 14916 - protein, 11 aa, Homo sapiens
  Table A; HLA-B*57:01; PIK3CA; E542K; 1
KITEQEKDFLW

SEQ ID NO: 14917 - protein, 10 aa, Homo sapiens
  Table A; HLA-A*02:03; PREX2; H1404Y; 0
KIYPVLFAQA

SEQ ID NO: 14918 - protein, 10 aa, Homo sapiens
  Table A; HLA-A*02:07; PREX2; H1404Y; 0
KIYPVLFAQA

SEQ ID NO: 14919 - protein, 10 aa, Homo sapiens
  Table A; HLA-A*02:08; PREX2; H1404Y; 0
KIYPVLFAQA

SEQ ID NO: 14920 - protein, 11 aa, Homo sapiens
  Table A; HLA-A*02:04; PREX2; H1404Y; 0
KIYPVLFAQAL

SEQ ID NO: 14921 - protein, 11 aa, Homo sapiens
  Table A; HLA-A*02:07; PREX2; H1404Y; 0
KIYPVLFAQAL

SEQ ID NO: 14922 - protein, 11 aa, Homo sapiens
  Table A; HLA-A*31:01; PREX2; H1404Y; 0
KIYPVLFAQAL

SEQ ID NO: 14923 - protein, 9 aa, Homo sapiens
  Table A; HLA-A*03:01; AXIN1; R146Q; 1
KLARAIYQK

SEQ ID NO: 14924 - protein, 9 aa, Homo sapiens
  Table A; HLA-A*02:07; STAG2; R370Q; 0
KLELFTSQF

SEQ ID NO: 14925 - protein, 9 aa, Homo sapiens
  Table A; HLA-A*23:01; STAG2; R370Q; 0
KLELFTSQF

SEQ ID NO: 14926 - protein, 9 aa, Homo sapiens
  Table A; HLA-C*05:01; STAG2; R370Q; 0
KLELFTSQF

SEQ ID NO: 14927 - protein, 9 aa, Homo sapiens
  Table A; HLA-C*08:02; STAG2; R370Q; 0
KLELFTSQF

SEQ ID NO: 14928 - protein, 9 aa, Homo sapiens
  Table A; HLA-A*02:04; XPO1; E571K; 0
KLFKFMHET

SEQ ID NO: 14929 - protein, 9 aa, Homo sapiens
  Table A; HLA-A*02:04; PRDM16; E237K; 0
KLFQSKLDL

SEQ ID NO: 14930 - protein, 10 aa, Homo sapiens
  Table A; HLA-A*03:01; HIST1H3B; E74K; 1
KLPFQRLVRK

SEQ ID NO: 14931 - protein, 8 aa, Homo sapiens
  Table A; HLA-A*02:04; SMARCA4; E920K; 0
KLPKLWAL

SEQ ID NO: 14932 - protein, 8 aa, Homo sapiens
  Table A; HLA-A*02:07; SMARCA4; E920K; 0
KLPKLWAL

SEQ ID NO: 14933 - protein, 9 aa, Homo sapiens
  Table A; HLA-A*02:04; SMARCA4; E920K; 0
KLPKLWALL

SEQ ID NO: 14934 - protein, 9 aa, Homo sapiens
  Table A; HLA-A*02:07; SMARCA4; E920K; 0
KLPKLWALL

SEQ ID NO: 14935 - protein, 9 aa, Homo sapiens
  Table A; HLA-A*02:04; CNTNAP2; E149K; 0
KLQHPIIAR

SEQ ID NO: 14936 - protein, 9 aa, Homo sapiens
  Table A; HLA-A*03:01; CNTNAP2; E149K; 1
KLQHPIIAR

SEQ ID NO: 14937 - protein, 9 aa, Homo sapiens
  Table A; HLA-A*03:02; CNTNAP2; E149K; 0
KLQHPIIAR

SEQ ID NO: 14938 - protein, 9 aa, Homo sapiens
  Table A; HLA-A*11:01; CNTNAP2; E149K; 1
KLQHPIIAR

SEQ ID NO: 14939 - protein, 9 aa, Homo sapiens
  Table A; HLA-A*31:01; CNTNAP2; E149K; 0
KLQHPIIAR

SEQ ID NO: 14940 - protein, 9 aa, Homo sapiens
  Table A; HLA-A*33:03; CNTNAP2; E149K; 0
KLQHPIIAR

SEQ ID NO: 14941 - protein, 10 aa, Homo sapiens
  Table A; HLA-A*03:01; CNTNAP2; E149K; 1
KLQHPIIARY

SEQ ID NO: 14942 - protein, 8 aa, Homo sapiens
  Table A; HLA-A*03:01; CTNNB1; N387K; 1
KLSDAATK

SEQ ID NO: 14943 - protein, 8 aa, Homo sapiens
  Table A; HLA-A*03:02; CTNNB1; N387K; 0
KLSDAATK

SEQ ID NO: 14944 - protein, 8 aa, Homo sapiens
  Table A; HLA-A*11:01; CTNNB1; N387K; 1
KLSDAATK

SEQ ID NO: 14945 - protein, 9 aa, Homo sapiens
  Table A; HLA-A*02:03; CTNNB1; N387K; 0
KLSDAATKQ

SEQ ID NO: 14946 - protein, 9 aa, Homo sapiens
  Table A; HLA-A*03:01; CTNNB1; N387K; 1
KLSDAATKQ

SEQ ID NO: 14947 - protein, 9 aa, Homo sapiens
  Table A; HLA-A*02:04; TRRAP; S722F; 0
KLVFGSVFL

SEQ ID NO: 14948 - protein, 9 aa, Homo sapiens
  Table A; HLA-C*17:01; TRRAP; S722F; 0
KLVFGSVFL

SEQ ID NO: 14949 - protein, 10 aa, Homo sapiens
  Table A; HLA-A*02:04; TRRAP; S722F; 0
KLVFGSVFLF

SEQ ID NO: 14950 - protein, 10 aa, Homo sapiens
  Table A; HLA-A*02:01; KRAS; G12A; 1
KLVVVGAAGV

SEQ ID NO: 14951 - protein, 10 aa, Homo sapiens
  Table A; HLA-A*02:03; KRAS; G12A; 0
KLVVVGAAGV

SEQ ID NO: 14952 - protein, 10 aa, Homo sapiens
  Table A; HLA-A*02:04; KRAS; G12A; 0
KLVVVGAAGV

SEQ ID NO: 14953 - protein, 10 aa, Homo sapiens
  Table A; HLA-A*02:08; KRAS; G12A; 0
KLVVVGAAGV

SEQ ID NO: 14954 - protein, 10 aa, Homo sapiens
  Table A; HLA-A*02:01; KRAS; G12C; 1
KLVVVGACGV

SEQ ID NO: 14955 - protein, 10 aa, Homo sapiens
  Table A; HLA-A*02:01; NRAS; G12C; 1
KLVVVGACGV

SEQ ID NO: 14956 - protein, 10 aa, Homo sapiens
  Table A; HLA-A*02:01; KRAS; G12D; 1
KLVVVGADGV

SEQ ID NO: 14957 - protein, 10 aa, Homo sapiens
  Table A; HLA-A*02:04; KRAS; G12D; 0
KLVVVGADGV

SEQ ID NO: 14958 - protein, 10 aa, Homo sapiens
  Table A; HLA-A*02:06; KRAS; G12D; 1
KLVVVGADGV

SEQ ID NO: 14959 - protein, 10 aa, Homo sapiens
  Table A; HLA-A*02:08; KRAS; G12D; 0
KLVVVGADGV

SEQ ID NO: 14960 - protein, 10 aa, Homo sapiens
  Table A; HLA-B*13:02; KRAS; G12D; 1
KLVVVGADGV

SEQ ID NO: 14961 - protein, 10 aa, Homo sapiens
  Table A; HLA-A*02:01; NRAS; G12D; 1
KLVVVGADGV

SEQ ID NO: 14962 - protein, 10 aa, Homo sapiens
  Table A; HLA-A*02:03; NRAS; G12D; 0
KLVVVGADGV

SEQ ID NO: 14963 - protein, 10 aa, Homo sapiens
  Table A; HLA-A*02:04; NRAS; G12D; 0
KLVVVGADGV

SEQ ID NO: 14964 - protein, 10 aa, Homo sapiens
  Table A; HLA-A*02:06; NRAS; G12D; 0
KLVVVGADGV

SEQ ID NO: 14965 - protein, 10 aa, Homo sapiens
  Table A; HLA-A*02:08; NRAS; G12D; 0
KLVVVGADGV

SEQ ID NO: 14966 - protein, 10 aa, Homo sapiens
  Table A; HLA-B*13:02; NRAS; G12D; 0
KLVVVGADGV

SEQ ID NO: 14967 - protein, 9 aa, Homo sapiens
  Table A; HLA-A*02:06; KRAS; G13C; 0
KLVVVGAGC

SEQ ID NO: 14968 - protein, 11 aa, Homo sapiens
  Table A; HLA-C*08:03; KRAS; G13D; 0
KLVVVGAGDVG

SEQ ID NO: 14969 - protein, 9 aa, Homo sapiens
  Table A; HLA-A*31:01; NRAS; G13R; 0
KLVVVGAGR

SEQ ID NO: 14970 - protein, 9 aa, Homo sapiens
  Table A; HLA-B*27:02; NRAS; G13R; 0
KLVVVGAGR

SEQ ID NO: 14971 - protein, 10 aa, Homo sapiens
  Table A; HLA-A*02:03; KRAS; G12R; 0
KLVVVGARGV

SEQ ID NO: 14972 - protein, 10 aa, Homo sapiens
  Table A; HLA-A*02:04; KRAS; G12R; 0
KLVVVGARGV

SEQ ID NO: 14973 - protein, 10 aa, Homo sapiens
  Table A; HLA-A*02:01; KRAS; G12S; 1
KLVVVGASGV

SEQ ID NO: 14974 - protein, 10 aa, Homo sapiens
  Table A; HLA-A*02:03; KRAS; G12S; 0
KLVVVGASGV

SEQ ID NO: 14975 - protein, 10 aa, Homo sapiens
  Table A; HLA-A*02:08; KRAS; G12S; 0
KLVVVGASGV

SEQ ID NO: 14976 - protein, 8 aa, Homo sapiens
  Table A; HLA-A*02:03; KRAS; G12V; 0
KLVVVGAV

SEQ ID NO: 14977 - protein, 8 aa, Homo sapiens
  Table A; HLA-B*13:02; KRAS; G12V; 1
KLVVVGAV

SEQ ID NO: 14978 - protein, 10 aa, Homo sapiens
  Table A; HLA-A*02:01; KRAS; G12V; 1
KLVVVGAVGV

SEQ ID NO: 14979 - protein, 10 aa, Homo sapiens
  Table A; HLA-A*02:03; KRAS; G12V; 0
KLVVVGAVGV

SEQ ID NO: 14980 - protein, 10 aa, Homo sapiens
  Table A; HLA-A*02:04; KRAS; G12V; 0
KLVVVGAVGV

SEQ ID NO: 14981 - protein, 10 aa, Homo sapiens
  Table A; HLA-A*02:06; KRAS; G12V; 1
KLVVVGAVGV

SEQ ID NO: 14982 - protein, 10 aa, Homo sapiens
  Table A; HLA-A*02:07; KRAS; G12V; 0
KLVVVGAVGV

SEQ ID NO: 14983 - protein, 10 aa, Homo sapiens
  Table A; HLA-A*02:08; KRAS; G12V; 0
KLVVVGAVGV

SEQ ID NO: 14984 - protein, 10 aa, Homo sapiens
  Table A; HLA-B*13:02; KRAS; G12V; 1
KLVVVGAVGV

SEQ ID NO: 14985 - protein, 9 aa, Homo sapiens
  Table A; HLA-A*03:01; CNBD1; L396P; 1
KLVYMGKPK

SEQ ID NO: 14986 - protein, 9 aa, Homo sapiens
  Table A; HLA-A*02:04; SMARCA4; E920K; 0
KLWALLNFL

SEQ ID NO: 14987 - protein, 9 aa, Homo sapiens
  Table A; HLA-A*02:07; SMARCA4; E920K; 0
KLWALLNFL

SEQ ID NO: 14988 - protein, 9 aa, Homo sapiens
  Table A; HLA-C*15:02; RGS7; R44C; 0
KNGIPICTV

SEQ ID NO: 14989 - protein, 10 aa, Homo sapiens
  Table A; HLA-B*35:01; MAPK1; E322K; 1
KPIAEAPFKF

SEQ ID NO: 14990 - protein, 10 aa, Homo sapiens
  Table A; HLA-B*35:03; MAPK1; E322K; 1
KPIAEAPFKF

SEQ ID NO: 14991 - protein, 9 aa, Homo sapiens
  Table A; HLA-B*54:01; BAZ1A; R1480C; 0
KPIALNIIC

SEQ ID NO: 14992 - protein, 9 aa, Homo sapiens
  Table A; HLA-B*55:02; IDH1; R132C; 0
KPIIIGCHA

SEQ ID NO: 14993 - protein, 9 aa, Homo sapiens
  Table A; HLA-B*56:01; IDH1; R132C; 0
KPIIIGCHA

SEQ ID NO: 14994 - protein, 10 aa, Homo sapiens
  Table A; HLA-B*27:02; IDH1; R132G; 0
KPIIIGGHAY

SEQ ID NO: 14995 - protein, 10 aa, Homo sapiens
  Table A; HLA-B*35:01; IDH1; R132G; 1
KPIIIGGHAY

SEQ ID NO: 14996 - protein, 10 aa, Homo sapiens
  Table A; HLA-B*35:08; IDH1; R132G; 0
KPIIIGGHAY

SEQ ID NO: 14997 - protein, 9 aa, Homo sapiens
  Table A; HLA-B*54:01; IDH1; R132H; 0
KPIIIGHHA

SEQ ID NO: 14998 - protein, 9 aa, Homo sapiens
  Table A; HLA-B*55:02; IDH1; R132H; 0
KPIIIGHHA

SEQ ID NO: 14999 - protein, 9 aa, Homo sapiens
  Table A; HLA-B*56:01; IDH1; R132H; 0
KPIIIGHHA

SEQ ID NO: 15000 - protein, 9 aa, Homo sapiens
  Table A; HLA-B*54:01; IDH1; R132L; 0
KPIIIGLHA

SEQ ID NO: 15001 - protein, 9 aa, Homo sapiens
  Table A; HLA-B*54:01; IDH1; R132S; 0
KPIIIGSHA

SEQ ID NO: 15002 - protein, 9 aa, Homo sapiens
  Table A; HLA-B*55:01; IDH1; R132S; 0
KPIIIGSHA

SEQ ID NO: 15003 - protein, 9 aa, Homo sapiens
  Table A; HLA-B*55:02; IDH1; R132S; 0
KPIIIGSHA

SEQ ID NO: 15004 - protein, 9 aa, Homo sapiens
  Table A; HLA-B*56:01; IDH1; R132S; 0
KPIIIGSHA

SEQ ID NO: 15005 - protein, 10 aa, Homo sapiens
  Table A; HLA-B*35:01; IDH1; R132S; 0
KPIIIGSHAY

SEQ ID NO: 15006 - protein, 9 aa, Homo sapiens
  Table A; HLA-B*54:01; IDH2; R172K; 0
KPITIGKHA

SEQ ID NO: 15007 - protein, 9 aa, Homo sapiens
  Table A; HLA-B*55:01; IDH2; R172K; 0
KPITIGKHA

SEQ ID NO: 15008 - protein, 9 aa, Homo sapiens
  Table A; HLA-B*55:02; IDH2; R172K; 0
KPITIGKHA

SEQ ID NO: 15009 - protein, 9 aa, Homo sapiens
  Table A; HLA-B*56:01; IDH2; R172K; 0
KPITIGKHA

SEQ ID NO: 15010 - protein, 8 aa, Homo sapiens
  Table A; HLA-B*07:02; CNBD1; L396P; 1
KPKEKESF

SEQ ID NO: 15011 - protein, 8 aa, Homo sapiens
  Table A; HLA-B*08:01; CNBD1; L396P; 1
KPKEKESF

SEQ ID NO: 15012 - protein, 8 aa, Homo sapiens
  Table A; HLA-B*51:01; SALL4; A368T; 1
KPPNISTV

SEQ ID NO: 15013 - protein, 9 aa, Homo sapiens
  Table A; HLA-B*07:02; FKBP9; R161Q; 1
KPPSCPQTI

SEQ ID NO: 15014 - protein, 9 aa, Homo sapiens
  Table A; HLA-B*51:01; FKBP9; R161Q; 1
KPPSCPQTI

SEQ ID NO: 15015 - protein, 8 aa, Homo sapiens
  Table A; HLA-B*13:01; STAG1; A116T; 0
KQDRDITL

SEQ ID NO: 15016 - protein, 8 aa, Homo sapiens
  Table A; HLA-B*38:01; STAG1; A116T; 0
KQDRDITL

SEQ ID NO: 15017 - protein, 8 aa, Homo sapiens
  Table A; HLA-B*48:01; STAG1; A116T; 0
KQDRDITL

SEQ ID NO: 15018 - protein, 8 aa, Homo sapiens
  Table A; HLA-C*05:01; STAG1; A116T; 1
KQDRDITL

SEQ ID NO: 15019 - protein, 8 aa, Homo sapiens
  Table A; HLA-C*08:02; STAG1; A116T; 0
KQDRDITL

SEQ ID NO: 15020 - protein, 8 aa, Homo sapiens
  Table A; HLA-C*08:03; STAG1; A116T; 0
KQDRDITL

SEQ ID NO: 15021 - protein, 9 aa, Homo sapiens
  Table A; HLA-A*02:06; STAG1; A116T; 0
KQDRDITLL

SEQ ID NO: 15022 - protein, 9 aa, Homo sapiens
  Table A; HLA-A*02:08; STAG1; A116T; 0
KQDRDITLL

SEQ ID NO: 15023 - protein, 9 aa, Homo sapiens
  Table A; HLA-B*13:01; STAG1; A116T; 0
KQDRDITLL

SEQ ID NO: 15024 - protein, 9 aa, Homo sapiens
  Table A; HLA-B*38:01; STAG1; A116T; 0
KQDRDITLL

SEQ ID NO: 15025 - protein, 9 aa, Homo sapiens
  Table A; HLA-B*48:01; STAG1; A116T; 0
KQDRDITLL

SEQ ID NO: 15026 - protein, 9 aa, Homo sapiens
  Table A; HLA-C*05:01; STAG1; A116T; 1
KQDRDITLL

SEQ ID NO: 15027 - protein, 9 aa, Homo sapiens
  Table A; HLA-C*08:02; STAG1; A116T; 0
KQDRDITLL

SEQ ID NO: 15028 - protein, 11 aa, Homo sapiens
  Table A; HLA-B*57:01; PIK3CA; M1043I; 1
KQINDAHHGGW

SEQ ID NO: 15029 - protein, 10 aa, Homo sapiens
  Table A; HLA-A*30:02; EGFR; L861Q; 0
KQLGAEEKEY

SEQ ID NO: 15030 - protein, 10 aa, Homo sapiens
  Table A; HLA-A*30:04; EGFR; L861Q; 0
KQLGAEEKEY

SEQ ID NO: 15031 - protein, 10 aa, Homo sapiens
  Table A; HLA-B*13:01; EGFR; L861Q; 0
KQLGAEEKEY

SEQ ID NO: 15032 - protein, 10 aa, Homo sapiens
  Table A; HLA-B*15:01; EGFR; L861Q; 1
KQLGAEEKEY

SEQ ID NO: 15033 - protein, 10 aa, Homo sapiens
  Table A; HLA-B*15:03; EGFR; L861Q; 0
KQLGAEEKEY

SEQ ID NO: 15034 - protein, 10 aa, Homo sapiens
  Table A; HLA-B*27:05; EGFR; L861Q; 0
KQLGAEEKEY

SEQ ID NO: 15035 - protein, 11 aa, Homo sapiens
  Table A; HLA-B*57:01; PIK3CA; H1047L; 1
KQMNDALHGGW

SEQ ID NO: 15036 - protein, 11 aa, Homo sapiens
  Table A; HLA-B*57:01; PIK3CA; H1047Q; 0
KQMNDAQHGGW

SEQ ID NO: 15037 - protein, 11 aa, Homo sapiens
  Table A; HLA-A*02:03; XPO1; R749Q; 0
KQPLIRSMQTV

SEQ ID NO: 15038 - protein, 10 aa, Homo sapiens
  Table A; HLA-A*30:01; MSN; E573K; 0
KQRIDKFESM

SEQ ID NO: 15039 - protein, 10 aa, Homo sapiens
  Table A; HLA-A*31:01; MSN; E573K; 0
KQRIDKFESM

SEQ ID NO: 15040 - protein, 11 aa, Homo sapiens
  Table A; HLA-A*31:01; TP53; V173L; 0
KQSQHMTEVLR

SEQ ID NO: 15041 - protein, 10 aa, Homo sapiens
  Table A; HLA-B*15:01; TP53; V173M; 0
KQSQHMTEVM

SEQ ID NO: 15042 - protein, 9 aa, Homo sapiens
  Table A; HLA-B*27:02; PTPRB; D1560N; 0
KRNPTQQKF

SEQ ID NO: 15043 - protein, 9 aa, Homo sapiens
  Table A; HLA-B*27:05; PTPRB; D1560N; 0
KRNPTQQKF

SEQ ID NO: 15044 - protein, 9 aa, Homo sapiens
  Table A; HLA-C*06:02; PTPRB; D1560N; 1
KRNPTQQKF

SEQ ID NO: 15045 - protein, 9 aa, Homo sapiens
  Table A; HLA-C*07:01; PTPRB; D1560N; 1
KRNPTQQKF

SEQ ID NO: 15046 - protein, 9 aa, Homo sapiens
  Table A; HLA-C*16:04; PTPRB; D1560N; 0
KRNPTQQKF

SEQ ID NO: 15047 - protein, 9 aa, Homo sapiens
  Table A; HLA-A*31:01; PTEN; G165R; 0
KRVTIPSQR

SEQ ID NO: 15048 - protein, 9 aa, Homo sapiens
  Table A; HLA-B*27:02; PTEN; G165R; 0
KRVTIPSQR

SEQ ID NO: 15049 - protein, 9 aa, Homo sapiens
  Table A; HLA-B*27:05; PTEN; G165R; 0
KRVTIPSQR

SEQ ID NO: 15050 - protein, 11 aa, Homo sapiens
  Table A; HLA-B*57:01; PREX2; E553K; 0
KSKFKDEPLLF

SEQ ID NO: 15051 - protein, 9 aa, Homo sapiens
  Table A; HLA-B*39:06; CREBBP; P2094L; 0
KSNLQLMAA

SEQ ID NO: 15052 - protein, 9 aa, Homo sapiens
  Table A; HLA-B*54:01; CREBBP; P2094L; 0
KSNLQLMAA

SEQ ID NO: 15053 - protein, 8 aa, Homo sapiens
  Table A; HLA-B*58:01; TP53; S127F; 0
KSVTCTYF

SEQ ID NO: 15054 - protein, 9 aa, Homo sapiens
  Table A; HLA-B*57:01; PIK3CB; E1051K; 0
KSWTTKVNW

SEQ ID NO: 15055 - protein, 10 aa, Homo sapiens
  Table A; HLA-A*68:02; CHD4; R975H; 0
KTELIVHVEL

SEQ ID NO: 15056 - protein, 10 aa, Homo sapiens
  Table A; HLA-B*57:01; CHD4; R975H; 1
KTELIVHVEL

SEQ ID NO: 15057 - protein, 10 aa, Homo sapiens
  Table A; HLA-B*58:01; CHD4; R975H; 0
KTELIVHVEL

SEQ ID NO: 15058 - protein, 9 aa, Homo sapiens
  Table A; HLA-A*02:04; PTPRT; E548K; 0
KTHHLFVGL

SEQ ID NO: 15059 - protein, 9 aa, Homo sapiens
  Table A; HLA-B*57:01; PTPRT; E548K; 0
KTHHLFVGL

SEQ ID NO: 15060 - protein, 9 aa, Homo sapiens
  Table A; HLA-C*15:02; PTPRT; E548K; 0
KTHHLFVGL

SEQ ID NO: 15061 - protein, 9 aa, Homo sapiens
  Table A; HLA-B*57:01; PIK3CB; R321Q; 0
KTQIISHVW

SEQ ID NO: 15062 - protein, 9 aa, Homo sapiens
  Table A; HLA-B*58:01; PIK3CB; R321Q; 0
KTQIISHVW

SEQ ID NO: 15063 - protein, 9 aa, Homo sapiens
  Table A; HLA-A*30:04; PIK3CA; E726K; 0
KTQKVQMKF

SEQ ID NO: 15064 - protein, 9 aa, Homo sapiens
  Table A; HLA-A*32:01; PIK3CA; E726K; 1
KTQKVQMKF

SEQ ID NO: 15065 - protein, 9 aa, Homo sapiens
  Table A; HLA-B*57:01; PIK3CA; E726K; 1
KTQKVQMKF

SEQ ID NO: 15066 - protein, 9 aa, Homo sapiens
  Table A; HLA-B*58:01; PIK3CA; E726K; 0
KTQKVQMKF

SEQ ID NO: 15067 - protein, 9 aa, Homo sapiens
  Table A; HLA-A*03:01; XPO1; E571K; 1
KTVVNKLFK

SEQ ID NO: 15068 - protein, 9 aa, Homo sapiens
  Table A; HLA-A*11:01; XPO1; E571K; 0
KTVVNKLFK

SEQ ID NO: 15069 - protein, 10 aa, Homo sapiens
  Table A; HLA-B*57:01; XPO1; E571K; 0
KTVVNKLFKF

SEQ ID NO: 15070 - protein, 8 aa, Homo sapiens
  Table A; HLA-B*57:01; TP53; C141Y; 0
KTYPVQLW

SEQ ID NO: 15071 - protein, 8 aa, Homo sapiens
  Table A; HLA-B*58:01; TP53; C141Y; 0
KTYPVQLW

SEQ ID NO: 15072 - protein, 9 aa, Homo sapiens
  Table A; HLA-A*03:01; TP53; C141Y; 1
KTYPVQLWV

SEQ ID NO: 15073 - protein, 9 aa, Homo sapiens
  Table A; HLA-A*68:02; TP53; C141Y; 0
KTYPVQLWV

SEQ ID NO: 15074 - protein, 9 aa, Homo sapiens
  Table A; HLA-B*13:02; TP53; C141Y; 0
KTYPVQLWV

SEQ ID NO: 15075 - protein, 9 aa, Homo sapiens
  Table A; HLA-C*12:03; TP53; C141Y; 0
KTYPVQLWV

SEQ ID NO: 15076 - protein, 9 aa, Homo sapiens
  Table A; HLA-C*15:02; TP53; C141Y; 0
KTYPVQLWV

SEQ ID NO: 15077 - protein, 10 aa, Homo sapiens
  Table A; HLA-A*02:08; TP53; R110L; 0
KTYQGSYGFL

SEQ ID NO: 15078 - protein, 10 aa, Homo sapiens
  Table A; HLA-A*03:01; TP53; R110L; 1
KTYQGSYGFL

SEQ ID NO: 15079 - protein, 11 aa, Homo sapiens
  Table A; HLA-A*02:04; TP53; R110L; 0
KTYQGSYGFLL

SEQ ID NO: 15080 - protein, 11 aa, Homo sapiens
  Table A; HLA-A*02:08; TP53; R110L; 0
KTYQGSYGFLL

SEQ ID NO: 15081 - protein, 11 aa, Homo sapiens
  Table A; HLA-A*03:01; TP53; R110L; 1
KTYQGSYGFLL

SEQ ID NO: 15082 - protein, 11 aa, Homo sapiens
  Table A; HLA-A*31:01; TP53; R110L; 0
KTYQGSYGFLL

SEQ ID NO: 15083 - protein, 11 aa, Homo sapiens
  Table A; HLA-B*57:01; TP53; R110L; 0
KTYQGSYGFLL

SEQ ID NO: 15084 - protein, 11 aa, Homo sapiens
  Table A; HLA-C*15:02; TP53; R110L; 0
KTYQGSYGFLL

SEQ ID NO: 15085 - protein, 9 aa, Homo sapiens
  Table A; HLA-A*02:08; PIK3CA; R108H; 0
KVIEPVGNH

SEQ ID NO: 15086 - protein, 9 aa, Homo sapiens
  Table A; HLA-A*03:01; PIK3CA; R108H; 1
KVIEPVGNH

SEQ ID NO: 15087 - protein, 9 aa, Homo sapiens
  Table A; HLA-A*03:02; PIK3CA; R108H; 0
KVIEPVGNH

SEQ ID NO: 15088 - protein, 9 aa, Homo sapiens
  Table A; HLA-A*11:01; PIK3CA; R108H; 1
KVIEPVGNH

SEQ ID NO: 15089 - protein, 9 aa, Homo sapiens
  Table A; HLA-A*26:01; PIK3CA; R108H; 1
KVIEPVGNH

SEQ ID NO: 15090 - protein, 9 aa, Homo sapiens
  Table A; HLA-A*26:03; PIK3CA; R108H; 0
KVIEPVGNH

SEQ ID NO: 15091 - protein, 9 aa, Homo sapiens
  Table A; HLA-A*30:01; PIK3CA; R108H; 0
KVIEPVGNH

SEQ ID NO: 15092 - protein, 9 aa, Homo sapiens
  Table A; HLA-A*30:02; PIK3CA; R108H; 0
KVIEPVGNH

SEQ ID NO: 15093 - protein, 9 aa, Homo sapiens
  Table A; HLA-A*31:01; PIK3CA; R108H; 0
KVIEPVGNH

SEQ ID NO: 15094 - protein, 9 aa, Homo sapiens
  Table A; HLA-B*15:01; PIK3CA; R108H; 1
KVIEPVGNH

SEQ ID NO: 15095 - protein, 9 aa, Homo sapiens
  Table A; HLA-B*48:01; PIK3CA; R108H; 0
KVIEPVGNH

SEQ ID NO: 15096 - protein, 9 aa, Homo sapiens
  Table A; HLA-B*57:01; PIK3CA; R108H; 1
KVIEPVGNH

SEQ ID NO: 15097 - protein, 9 aa, Homo sapiens
  Table A; HLA-B*58:01; PIK3CA; R108H; 0
KVIEPVGNH

SEQ ID NO: 15098 - protein, 10 aa, Homo sapiens
  Table A; HLA-A*02:05; PIK3CA; R108H; 0
KVIEPVGNHE

SEQ ID NO: 15099 - protein, 10 aa, Homo sapiens
  Table A; HLA-A*02:06; PIK3CA; R108H; 0
KVIEPVGNHE

SEQ ID NO: 15100 - protein, 10 aa, Homo sapiens
  Table A; HLA-A*11:01; PIK3CA; R108H; 1
KVIEPVGNHE

SEQ ID NO: 15101 - protein, 10 aa, Homo sapiens
  Table A; HLA-A*31:01; PIK3CA; R108H; 0
KVIEPVGNHE

SEQ ID NO: 15102 - protein, 9 aa, Homo sapiens
  Table A; HLA-A*02:01; PIK3CA; G106V; 1
KVIEPVVNR

SEQ ID NO: 15103 - protein, 9 aa, Homo sapiens
  Table A; HLA-A*02:04; PIK3CA; G106V; 0
KVIEPVVNR

SEQ ID NO: 15104 - protein, 9 aa, Homo sapiens
  Table A; HLA-A*02:05; PIK3CA; G106V; 0
KVIEPVVNR

SEQ ID NO: 15105 - protein, 9 aa, Homo sapiens
  Table A; HLA-A*02:06; PIK3CA; G106V; 0
KVIEPVVNR

SEQ ID NO: 15106 - protein, 9 aa, Homo sapiens
  Table A; HLA-A*02:07; PIK3CA; G106V; 0
KVIEPVVNR

SEQ ID NO: 15107 - protein, 9 aa, Homo sapiens
  Table A; HLA-A*02:08; PIK3CA; G106V; 0
KVIEPVVNR

SEQ ID NO: 15108 - protein, 9 aa, Homo sapiens
  Table A; HLA-A*03:01; PIK3CA; G106V; 1
KVIEPVVNR

SEQ ID NO: 15109 - protein, 9 aa, Homo sapiens
  Table A; HLA-A*03:02; PIK3CA; G106V; 0
KVIEPVVNR

SEQ ID NO: 15110 - protein, 9 aa, Homo sapiens
  Table A; HLA-A*11:01; PIK3CA; G106V; 0
KVIEPVVNR

SEQ ID NO: 15111 - protein, 9 aa, Homo sapiens
  Table A; HLA-A*26:01; PIK3CA; G106V; 0
KVIEPVVNR

SEQ ID NO: 15112 - protein, 9 aa, Homo sapiens
  Table A; HLA-A*26:03; PIK3CA; G106V; 0
KVIEPVVNR

SEQ ID NO: 15113 - protein, 9 aa, Homo sapiens
  Table A; HLA-A*30:01; PIK3CA; G106V; 0
KVIEPVVNR

SEQ ID NO: 15114 - protein, 9 aa, Homo sapiens
  Table A; HLA-A*31:01; PIK3CA; G106V; 0
KVIEPVVNR

SEQ ID NO: 15115 - protein, 9 aa, Homo sapiens
  Table A; HLA-A*33:01; PIK3CA; G106V; 0
KVIEPVVNR

SEQ ID NO: 15116 - protein, 9 aa, Homo sapiens
  Table A; HLA-A*33:03; PIK3CA; G106V; 0
KVIEPVVNR

SEQ ID NO: 15117 - protein, 9 aa, Homo sapiens
  Table A; HLA-A*68:01; PIK3CA; G106V; 0
KVIEPVVNR

SEQ ID NO: 15118 - protein, 9 aa, Homo sapiens
  Table A; HLA-A*68:02; PIK3CA; G106V; 0
KVIEPVVNR

SEQ ID NO: 15119 - protein, 9 aa, Homo sapiens
  Table A; HLA-B*15:01; PIK3CA; G106V; 0
KVIEPVVNR

SEQ ID NO: 15120 - protein, 9 aa, Homo sapiens
  Table A; HLA-B*27:02; PIK3CA; G106V; 0
KVIEPVVNR

SEQ ID NO: 15121 - protein, 9 aa, Homo sapiens
  Table A; HLA-B*27:05; PIK3CA; G106V; 0
KVIEPVVNR

SEQ ID NO: 15122 - protein, 9 aa, Homo sapiens
  Table A; HLA-B*50:01; PIK3CA; G106V; 0
KVIEPVVNR

SEQ ID NO: 15123 - protein, 9 aa, Homo sapiens
  Table A; HLA-B*57:01; PIK3CA; G106V; 0
KVIEPVVNR

SEQ ID NO: 15124 - protein, 9 aa, Homo sapiens
  Table A; HLA-B*58:01; PIK3CA; G106V; 0
KVIEPVVNR

SEQ ID NO: 15125 - protein, 8 aa, Homo sapiens
  Table A; HLA-A*23:01; SPOP; E50K; 0
KVIKSSTF

SEQ ID NO: 15126 - protein, 8 aa, Homo sapiens
  Table A; HLA-B*15:01; SPOP; E50K; 1
KVIKSSTF

SEQ ID NO: 15127 - protein, 8 aa, Homo sapiens
  Table A; HLA-B*58:01; SPOP; E50K; 0
KVIKSSTF

SEQ ID NO: 15128 - protein, 8 aa, Homo sapiens
  Table A; HLA-B*15:01; SMARCA4; G1232S; 0
KVIQASMF

SEQ ID NO: 15129 - protein, 8 aa, Homo sapiens
  Table A; HLA-B*57:01; SMARCA4; G1232S; 0
KVIQASMF

SEQ ID NO: 15130 - protein, 8 aa, Homo sapiens
  Table A; HLA-B*58:01; SMARCA4; G1232S; 0
KVIQASMF

SEQ ID NO: 15131 - protein, 11 aa, Homo sapiens
  Table A; HLA-A*03:01; SMARCA4; G1232S; 1
KVIQASMFDQK

SEQ ID NO: 15132 - protein, 11 aa, Homo sapiens
  Table A; HLA-A*03:02; SMARCA4; G1232S; 0
KVIQASMFDQK

SEQ ID NO: 15133 - protein, 11 aa, Homo sapiens
  Table A; HLA-A*11:01; SMARCA4; G1232S; 0
KVIQASMFDQK

SEQ ID NO: 15134 - protein, 11 aa, Homo sapiens
  Table A; HLA-B*27:02; SMARCA4; G1232S; 0
KVIQASMFDQK

SEQ ID NO: 15135 - protein, 10 aa, Homo sapiens
  Table A; HLA-A*03:01; EZH2; M667T; 1
KVYDKYTCSF

SEQ ID NO: 15136 - protein, 9 aa, Homo sapiens
  Table A; HLA-A*23:01; ZNRF3; R207W; 0
KYIDGEELW

SEQ ID NO: 15137 - protein, 8 aa, Homo sapiens
  Table A; HLA-A*23:01; RAC1; A159V; 0
KYLECSVL

SEQ ID NO: 15138 - protein, 8 aa, Homo sapiens
  Table A; HLA-B*41:02; RAC1; A159V; 0
KYLECSVL

SEQ ID NO: 15139 - protein, 8 aa, Homo sapiens
  Table A; HLA-B*48:01; RAC1; A159V; 0
KYLECSVL

SEQ ID NO: 15140 - protein, 8 aa, Homo sapiens
  Table A; HLA-C*14:02; RAC1; A159V; 0
KYLECSVL

SEQ ID NO: 15141 - protein, 8 aa, Homo sapiens
  Table A; HLA-C*14:03; RAC1; A159V; 0
KYLECSVL

SEQ ID NO: 15142 - protein, 9 aa, Homo sapiens
  Table A; HLA-A*23:01; RAC1; A159V; 0
KYLECSVLT

SEQ ID NO: 15143 - protein, 11 aa, Homo sapiens
  Table A; HLA-A*31:01; RAC1; A159V; 0
KYLECSVLTQR

SEQ ID NO: 15144 - protein, 11 aa, Homo sapiens
  Table A; HLA-A*33:03; RAC1; A159V; 0
KYLECSVLTQR

SEQ ID NO: 15145 - protein, 9 aa, Homo sapiens
  Table A; HLA-C*06:02; EGFR; A289V; 1
KYSFGVTCV

SEQ ID NO: 15146 - protein, 9 aa, Homo sapiens
  Table A; HLA-A*23:01; ATM; R337C; 0
KYSSGFCNI

SEQ ID NO: 15147 - protein, 9 aa, Homo sapiens
  Table A; HLA-A*24:02; ATM; R337C; 1
KYSSGFCNI

SEQ ID NO: 15148 - protein, 9 aa, Homo sapiens
  Table A; HLA-C*14:02; EZH2; E745K; 0
KYVGIKREM

SEQ ID NO: 15149 - protein, 9 aa, Homo sapiens
  Table A; HLA-A*02:01; CREB3L1; V414I; 1
LAADGIYTA

SEQ ID NO: 15150 - protein, 9 aa, Homo sapiens
  Table A; HLA-A*02:03; CREB3L1; V414I; 0
LAADGIYTA

SEQ ID NO: 15151 - protein, 9 aa, Homo sapiens
  Table A; HLA-A*02:04; CREB3L1; V414I; 0
LAADGIYTA

SEQ ID NO: 15152 - protein, 9 aa, Homo sapiens
  Table A; HLA-A*02:05; CREB3L1; V414I; 0
LAADGIYTA

SEQ ID NO: 15153 - protein, 9 aa, Homo sapiens
  Table A; HLA-A*02:06; CREB3L1; V414I; 0
LAADGIYTA

SEQ ID NO: 15154 - protein, 9 aa, Homo sapiens
  Table A; HLA-A*02:08; CREB3L1; V414I; 0
LAADGIYTA

SEQ ID NO: 15155 - protein, 9 aa, Homo sapiens
  Table A; HLA-A*30:01; CREB3L1; V414I; 0
LAADGIYTA

SEQ ID NO: 15156 - protein, 9 aa, Homo sapiens
  Table A; HLA-A*68:02; CREB3L1; V414I; 0
LAADGIYTA

SEQ ID NO: 15157 - protein, 9 aa, Homo sapiens
  Table A; HLA-B*15:02; CREB3L1; V414I; 0
LAADGIYTA

SEQ ID NO: 15158 - protein, 9 aa, Homo sapiens
  Table A; HLA-B*35:01; CREB3L1; V414I; 0
LAADGIYTA

SEQ ID NO: 15159 - protein, 9 aa, Homo sapiens
  Table A; HLA-B*35:03; CREB3L1; V414I; 0
LAADGIYTA

SEQ ID NO: 15160 - protein, 9 aa, Homo sapiens
  Table A; HLA-B*39:01; CREB3L1; V414I; 0
LAADGIYTA

SEQ ID NO: 15161 - protein, 9 aa, Homo sapiens
  Table A; HLA-B*39:06; CREB3L1; V414I; 0
LAADGIYTA

SEQ ID NO: 15162 - protein, 9 aa, Homo sapiens
  Table A; HLA-B*50:01; CREB3L1; V414I; 0
LAADGIYTA

SEQ ID NO: 15163 - protein, 9 aa, Homo sapiens
  Table A; HLA-B*54:01; CREB3L1; V414I; 0
LAADGIYTA

SEQ ID NO: 15164 - protein, 9 aa, Homo sapiens
  Table A; HLA-B*55:02; CREB3L1; V414I; 0
LAADGIYTA

SEQ ID NO: 15165 - protein, 9 aa, Homo sapiens
  Table A; HLA-B*56:01; CREB3L1; V414I; 0
LAADGIYTA

SEQ ID NO: 15166 - protein, 9 aa, Homo sapiens
  Table A; HLA-C*08:01; CREB3L1; V414I; 0
LAADGIYTA

SEQ ID NO: 15167 - protein, 9 aa, Homo sapiens
  Table A; HLA-C*12:03; CREB3L1; V414I; 0
LAADGIYTA

SEQ ID NO: 15168 - protein, 9 aa, Homo sapiens
  Table A; HLA-C*16:04; CREB3L1; V414I; 0
LAADGIYTA

SEQ ID NO: 15169 - protein, 8 aa, Homo sapiens
  Table A; HLA-C*17:01; KDR; R1032Q; 0
LAAQNILL

SEQ ID NO: 15170 - protein, 11 aa, Homo sapiens
  Table A; HLA-B*27:02; KDR; R1032Q; 0
LAAQNILLSEK

SEQ ID NO: 15171 - protein, 9 aa, Homo sapiens
  Table A; HLA-A*33:03; CCND1; T286I; 0
LACIPTDVR

SEQ ID NO: 15172 - protein, 9 aa, Homo sapiens
  Table A; HLA-A*68:01; CCND1; T286I; 0
LACIPTDVR

SEQ ID NO: 15173 - protein, 9 aa, Homo sapiens
  Table A; HLA-B*35:01; CCND1; T286I; 1
LACIPTDVR

SEQ ID NO: 15174 - protein, 9 aa, Homo sapiens
  Table A; HLA-A*30:01; TP53; C141Y; 0
LAKTYPVQL

SEQ ID NO: 15175 - protein, 9 aa, Homo sapiens
  Table A; HLA-B*08:01; TP53; C141Y; 0
LAKTYPVQL

SEQ ID NO: 15176 - protein, 9 aa, Homo sapiens
  Table A; HLA-C*02:02; TP53; C141Y; 0
LAKTYPVQL

SEQ ID NO: 15177 - protein, 9 aa, Homo sapiens
  Table A; HLA-C*12:03; TP53; C141Y; 0
LAKTYPVQL

SEQ ID NO: 15178 - protein, 9 aa, Homo sapiens
  Table A; HLA-C*16:01; TP53; C141Y; 0
LAKTYPVQL

SEQ ID NO: 15179 - protein, 9 aa, Homo sapiens
  Table A; HLA-C*16:02; TP53; C141Y; 0
LAKTYPVQL

SEQ ID NO: 15180 - protein, 9 aa, Homo sapiens
  Table A; HLA-C*17:01; TP53; C141Y; 0
LAKTYPVQL

SEQ ID NO: 15181 - protein, 10 aa, Homo sapiens
  Table A; HLA-B*57:01; TP53; C141Y; 0
LAKTYPVQLW

SEQ ID NO: 15182 - protein, 8 aa, Homo sapiens
  Table A; HLA-B*39:01; MTOR; S2215Y; 0
LANDPTYL

SEQ ID NO: 15183 - protein, 8 aa, Homo sapiens
  Table A; HLA-C*02:02; MTOR; S2215Y; 1
LANDPTYL

SEQ ID NO: 15184 - protein, 8 aa, Homo sapiens
  Table A; HLA-C*03:03; MTOR; S2215Y; 1
LANDPTYL

SEQ ID NO: 15185 - protein, 8 aa, Homo sapiens
  Table A; HLA-C*03:04; MTOR; S2215Y; 1
LANDPTYL

SEQ ID NO: 15186 - protein, 8 aa, Homo sapiens
  Table A; HLA-C*05:01; MTOR; S2215Y; 1
LANDPTYL

SEQ ID NO: 15187 - protein, 8 aa, Homo sapiens
  Table A; HLA-C*07:04; MTOR; S2215Y; 0
LANDPTYL

SEQ ID NO: 15188 - protein, 8 aa, Homo sapiens
  Table A; HLA-C*08:01; MTOR; S2215Y; 0
LANDPTYL

SEQ ID NO: 15189 - protein, 8 aa, Homo sapiens
  Table A; HLA-C*08:02; MTOR; S2215Y; 1
LANDPTYL

SEQ ID NO: 15190 - protein, 8 aa, Homo sapiens
  Table A; HLA-C*12:03; MTOR; S2215Y; 1
LANDPTYL

SEQ ID NO: 15191 - protein, 8 aa, Homo sapiens
  Table A; HLA-C*15:02; MTOR; S2215Y; 0
LANDPTYL

SEQ ID NO: 15192 - protein, 8 aa, Homo sapiens
  Table A; HLA-C*16:01; MTOR; S2215Y; 1
LANDPTYL

SEQ ID NO: 15193 - protein, 8 aa, Homo sapiens
  Table A; HLA-C*17:01; MTOR; S2215Y; 0
LANDPTYL

SEQ ID NO: 15194 - protein, 9 aa, Homo sapiens
  Table A; HLA-A*31:01; MTOR; S2215Y; 0
LANDPTYLR

SEQ ID NO: 15195 - protein, 9 aa, Homo sapiens
  Table A; HLA-A*33:01; MTOR; S2215Y; 0
LANDPTYLR

SEQ ID NO: 15196 - protein, 9 aa, Homo sapiens
  Table A; HLA-A*33:03; MTOR; S2215Y; 0
LANDPTYLR

SEQ ID NO: 15197 - protein, 9 aa, Homo sapiens
  Table A; HLA-A*68:01; MTOR; S2215Y; 0
LANDPTYLR

SEQ ID NO: 15198 - protein, 9 aa, Homo sapiens
  Table A; HLA-B*27:02; MTOR; S2215Y; 0
LANDPTYLR

SEQ ID NO: 15199 - protein, 9 aa, Homo sapiens
  Table A; HLA-B*54:01; MTOR; S2215Y; 0
LANDPTYLR

SEQ ID NO: 15200 - protein, 10 aa, Homo sapiens
  Table A; HLA-A*03:01; MTOR; S2215Y; 1
LANDPTYLRK

SEQ ID NO: 15201 - protein, 10 aa, Homo sapiens
  Table A; HLA-A*03:02; MTOR; S2215Y; 0
LANDPTYLRK

SEQ ID NO: 15202 - protein, 10 aa, Homo sapiens
  Table A; HLA-A*11:01; MTOR; S2215Y; 1
LANDPTYLRK

SEQ ID NO: 15203 - protein, 10 aa, Homo sapiens
  Table A; HLA-A*33:03; MTOR; S2215Y; 0
LANDPTYLRK

SEQ ID NO: 15204 - protein, 10 aa, Homo sapiens
  Table A; HLA-A*68:01; MTOR; S2215Y; 0
LANDPTYLRK

SEQ ID NO: 15205 - protein, 10 aa, Homo sapiens
  Table A; HLA-A*68:02; MTOR; S2215Y; 0
LANDPTYLRK

SEQ ID NO: 15206 - protein, 10 aa, Homo sapiens
  Table A; HLA-B*27:02; MTOR; S2215Y; 0
LANDPTYLRK

SEQ ID NO: 15207 - protein, 9 aa, Homo sapiens
  Table A; HLA-A*33:03; TP53; I195N; 0
LAPPQHLNR

SEQ ID NO: 15208 - protein, 9 aa, Homo sapiens
  Table A; HLA-A*68:01; TP53; I195N; 0
LAPPQHLNR

SEQ ID NO: 15209 - protein, 9 aa, Homo sapiens
  Table A; HLA-B*51:01; TP53; I195N; 0
LAPPQHLNR

SEQ ID NO: 15210 - protein, 9 aa, Homo sapiens
  Table A; HLA-A*68:01; TP53; I195T; 0
LAPPQHLTR

SEQ ID NO: 15211 - protein, 9 aa, Homo sapiens
  Table A; HLA-B*51:01; TP53; I195T; 1
LAPPQHLTR

SEQ ID NO: 15212 - protein, 10 aa, Homo sapiens
  Table A; HLA-A*02:07; TP53; I195T; 0
LAPPQHLTRV

SEQ ID NO: 15213 - protein, 8 aa, Homo sapiens
  Table A; HLA-B*51:01; TP53; H193L; 0
LAPPQLLI

SEQ ID NO: 15214 - protein, 10 aa, Homo sapiens
  Table A; HLA-A*02:07; TP53; H193L; 0
LAPPQLLIRV

SEQ ID NO: 15215 - protein, 10 aa, Homo sapiens
  Table A; HLA-A*68:02; TP53; H193L; 0
LAPPQLLIRV

SEQ ID NO: 15216 - protein, 8 aa, Homo sapiens
  Table A; HLA-B*51:01; TP53; H193R; 0
LAPPQRLI

SEQ ID NO: 15217 - protein, 8 aa, Homo sapiens
  Table A; HLA-B*51:01; TP53; H193Y; 0
LAPPQYLI

SEQ ID NO: 15218 - protein, 9 aa, Homo sapiens
  Table A; HLA-B*51:01; TP53; H193Y; 0
LAPPQYLIR

SEQ ID NO: 15219 - protein, 10 aa, Homo sapiens
  Table A; HLA-A*02:07; TP53; H193Y; 0
LAPPQYLIRV

SEQ ID NO: 15220 - protein, 10 aa, Homo sapiens
  Table A; HLA-A*68:02; TP53; H193Y; 0
LAPPQYLIRV

SEQ ID NO: 15221 - protein, 9 aa, Homo sapiens
  Table A; HLA-B*46:01; AXIN1; R146Q; 0
LARAIYQKY

SEQ ID NO: 15222 - protein, 9 aa, Homo sapiens
  Table A; HLA-C*02:02; AXIN1; R146Q; 0
LARAIYQKY

SEQ ID NO: 15223 - protein, 9 aa, Homo sapiens
  Table A; HLA-C*16:04; AXIN1; R146Q; 0
LARAIYQKY

SEQ ID NO: 15224 - protein, 8 aa, Homo sapiens
  Table A; HLA-B*57:01; BRAF; K601E; 1
LATVESRW

SEQ ID NO: 15225 - protein, 8 aa, Homo sapiens
  Table A; HLA-B*58:01; BRAF; K601E; 0
LATVESRW

SEQ ID NO: 15226 - protein, 10 aa, Homo sapiens
  Table A; HLA-B*35:01; ROBO2; D1014N; 1
LAVNLPDPQW

SEQ ID NO: 15227 - protein, 10 aa, Homo sapiens
  Table A; HLA-B*57:01; ROBO2; D1014N; 0
LAVNLPDPQW

SEQ ID NO: 15228 - protein, 10 aa, Homo sapiens
  Table A; HLA-B*58:01; ROBO2; D1014N; 0
LAVNLPDPQW

SEQ ID NO: 15229 - protein, 10 aa, Homo sapiens
  Table A; HLA-A*02:01; CTNNB1; S33C; 1
LDCGIHSGAT

SEQ ID NO: 15230 - protein, 9 aa, Homo sapiens
  Table A; HLA-C*08:02; NFE2L2; T80P; 0
LDEEPGEFL

SEQ ID NO: 15231 - protein, 8 aa, Homo sapiens
  Table A; HLA-A*02:01; CTNNB1; S33F; 1
LDFGIHSG

SEQ ID NO: 15232 - protein, 8 aa, Homo sapiens
  Table A; HLA-A*11:01; CTNNB1; S33F; 1
LDFGIHSG

SEQ ID NO: 15233 - protein, 8 aa, Homo sapiens
  Table A; HLA-B*08:01; CTNNB1; S33F; 1
LDFGIHSG

SEQ ID NO: 15234 - protein, 8 aa, Homo sapiens
  Table A; HLA-B*27:05; CTNNB1; S33F; 1
LDFGIHSG

SEQ ID NO: 15235 - protein, 8 aa, Homo sapiens
  Table A; HLA-B*40:02; CTNNB1; S33F; 0
LDFGIHSG

SEQ ID NO: 15236 - protein, 8 aa, Homo sapiens
  Table A; HLA-B*48:01; CTNNB1; S33F; 0
LDFGIHSG

SEQ ID NO: 15237 - protein, 8 aa, Homo sapiens
  Table A; HLA-B*54:01; CTNNB1; S33F; 0
LDFGIHSG

SEQ ID NO: 15238 - protein, 8 aa, Homo sapiens
  Table A; HLA-C*08:03; CTNNB1; S33F; 0
LDFGIHSG

SEQ ID NO: 15239 - protein, 9 aa, Homo sapiens
  Table A; HLA-A*02:03; CTNNB1; S33F; 0
LDFGIHSGA

SEQ ID NO: 15240 - protein, 9 aa, Homo sapiens
  Table A; HLA-A*02:05; CTNNB1; S33F; 0
LDFGIHSGA

SEQ ID NO: 15241 - protein, 9 aa, Homo sapiens
  Table A; HLA-A*68:02; CTNNB1; S33F; 0
LDFGIHSGA

SEQ ID NO: 15242 - protein, 9 aa, Homo sapiens
  Table A; HLA-B*39:06; CTNNB1; S33F; 0
LDFGIHSGA

SEQ ID NO: 15243 - protein, 9 aa, Homo sapiens
  Table A; HLA-B*40:02; CTNNB1; S33F; 0
LDFGIHSGA

SEQ ID NO: 15244 - protein, 9 aa, Homo sapiens
  Table A; HLA-B*40:06; CTNNB1; S33F; 0
LDFGIHSGA

SEQ ID NO: 15245 - protein, 9 aa, Homo sapiens
  Table A; HLA-B*48:01; CTNNB1; S33F; 0
LDFGIHSGA

SEQ ID NO: 15246 - protein, 9 aa, Homo sapiens
  Table A; HLA-B*50:01; CTNNB1; S33F; 0
LDFGIHSGA

SEQ ID NO: 15247 - protein, 9 aa, Homo sapiens
  Table A; HLA-B*54:01; CTNNB1; S33F; 0
LDFGIHSGA

SEQ ID NO: 15248 - protein, 10 aa, Homo sapiens
  Table A; HLA-A*02:01; CTNNB1; S33F; 1
LDFGIHSGAT

SEQ ID NO: 15249 - protein, 10 aa, Homo sapiens
  Table A; HLA-A*68:02; CTNNB1; S33F; 0
LDFGIHSGAT

SEQ ID NO: 15250 - protein, 10 aa, Homo sapiens
  Table A; HLA-B*40:02; CTNNB1; S33F; 0
LDFGIHSGAT

SEQ ID NO: 15251 - protein, 10 aa, Homo sapiens
  Table A; HLA-B*48:01; CTNNB1; S33F; 0
LDFGIHSGAT

SEQ ID NO: 15252 - protein, 10 aa, Homo sapiens
  Table A; HLA-C*07:04; CTNNB1; S33F; 0
LDFGIHSGAT

SEQ ID NO: 15253 - protein, 10 aa, Homo sapiens
  Table A; HLA-C*08:03; CTNNB1; S33F; 0
LDFGIHSGAT

SEQ ID NO: 15254 - protein, 8 aa, Homo sapiens
  Table A; HLA-B*40:02; ARHGEF12; R705H; 0
LDGTPHTL

SEQ ID NO: 15255 - protein, 8 aa, Homo sapiens
  Table A; HLA-B*48:01; ARHGEF12; R705H; 0
LDGTPHTL

SEQ ID NO: 15256 - protein, 8 aa, Homo sapiens
  Table A; HLA-C*08:03; ARHGEF12; R705H; 0
LDGTPHTL

SEQ ID NO: 15257 - protein, 9 aa, Homo sapiens
  Table A; HLA-B*27:02; HRAS; Q61K; 0
LDILDTAGK

SEQ ID NO: 15258 - protein, 9 aa, Homo sapiens
  Table A; HLA-B*27:02; NRAS; Q61K; 0
LDILDTAGK

SEQ ID NO: 15259 - protein, 9 aa, Homo sapiens
  Table A; HLA-B*40:02; KRAS; Q61L; 0
LDILDTAGL

SEQ ID NO: 15260 - protein, 9 aa, Homo sapiens
  Table A; HLA-B*40:02; NRAS; Q61L; 0
LDILDTAGL

SEQ ID NO: 15261 - protein, 9 aa, Homo sapiens
  Table A; HLA-B*44:05; NRAS; Q61L; 0
LDILDTAGL

SEQ ID NO: 15262 - protein, 9 aa, Homo sapiens
  Table A; HLA-B*27:02; KRAS; Q61R; 0
LDILDTAGR

SEQ ID NO: 15263 - protein, 9 aa, Homo sapiens
  Table A; HLA-B*27:02; NRAS; Q61R; 0
LDILDTAGR

SEQ ID NO: 15264 - protein, 8 aa, Homo sapiens
  Table A; HLA-B*37:01; CTNNB1; G34E; 0
LDSEIHSG

SEQ ID NO: 15265 - protein, 9 aa, Homo sapiens
  Table A; HLA-A*02:01; CTNNB1; G34E; 1
LDSEIHSGA

SEQ ID NO: 15266 - protein, 9 aa, Homo sapiens
  Table A; HLA-A*02:03; CTNNB1; G34E; 0
LDSEIHSGA

SEQ ID NO: 15267 - protein, 9 aa, Homo sapiens
  Table A; HLA-A*02:05; CTNNB1; G34E; 0
LDSEIHSGA

SEQ ID NO: 15268 - protein, 9 aa, Homo sapiens
  Table A; HLA-A*30:01; CTNNB1; G34E; 0
LDSEIHSGA

SEQ ID NO: 15269 - protein, 9 aa, Homo sapiens
  Table A; HLA-A*68:02; CTNNB1; G34E; 0
LDSEIHSGA

SEQ ID NO: 15270 - protein, 9 aa, Homo sapiens
  Table A; HLA-B*37:01; CTNNB1; G34E; 0
LDSEIHSGA

SEQ ID NO: 15271 - protein, 9 aa, Homo sapiens
  Table A; HLA-B*39:06; CTNNB1; G34E; 0
LDSEIHSGA

SEQ ID NO: 15272 - protein, 9 aa, Homo sapiens
  Table A; HLA-B*40:02; CTNNB1; G34E; 0
LDSEIHSGA

SEQ ID NO: 15273 - protein, 9 aa, Homo sapiens
  Table A; HLA-B*40:06; CTNNB1; G34E; 0
LDSEIHSGA

SEQ ID NO: 15274 - protein, 9 aa, Homo sapiens
  Table A; HLA-B*48:01; CTNNB1; G34E; 0
LDSEIHSGA

SEQ ID NO: 15275 - protein, 9 aa, Homo sapiens
  Table A; HLA-B*50:01; CTNNB1; G34E; 0
LDSEIHSGA

SEQ ID NO: 15276 - protein, 9 aa, Homo sapiens
  Table A; HLA-B*54:01; CTNNB1; G34E; 0
LDSEIHSGA

SEQ ID NO: 15277 - protein, 9 aa, Homo sapiens
  Table A; HLA-C*08:01; CTNNB1; G34E; 0
LDSEIHSGA

SEQ ID NO: 15278 - protein, 10 aa, Homo sapiens
  Table A; HLA-A*68:01; CTNNB1; G34E; 0
LDSEIHSGAT

SEQ ID NO: 15279 - protein, 10 aa, Homo sapiens
  Table A; HLA-A*68:02; CTNNB1; G34E; 0
LDSEIHSGAT

SEQ ID NO: 15280 - protein, 10 aa, Homo sapiens
  Table A; HLA-B*48:01; CTNNB1; G34E; 0
LDSEIHSGAT

SEQ ID NO: 15281 - protein, 8 aa, Homo sapiens
  Table A; HLA-A*02:01; CTNNB1; S37A; 1
LDSGIHAG

SEQ ID NO: 15282 - protein, 8 aa, Homo sapiens
  Table A; HLA-A*11:01; CTNNB1; S37A; 1
LDSGIHAG

SEQ ID NO: 15283 - protein, 8 aa, Homo sapiens
  Table A; HLA-B*37:01; CTNNB1; S37A; 0
LDSGIHAG

SEQ ID NO: 15284 - protein, 8 aa, Homo sapiens
  Table A; HLA-C*08:03; CTNNB1; S37A; 0
LDSGIHAG

SEQ ID NO: 15285 - protein, 9 aa, Homo sapiens
  Table A; HLA-A*02:01; CTNNB1; S37A; 1
LDSGIHAGA

SEQ ID NO: 15286 - protein, 9 aa, Homo sapiens
  Table A; HLA-A*02:03; CTNNB1; S37A; 0
LDSGIHAGA

SEQ ID NO: 15287 - protein, 9 aa, Homo sapiens
  Table A; HLA-A*02:05; CTNNB1; S37A; 0
LDSGIHAGA

SEQ ID NO: 15288 - protein, 9 aa, Homo sapiens
  Table A; HLA-A*02:08; CTNNB1; S37A; 0
LDSGIHAGA

SEQ ID NO: 15289 - protein, 9 aa, Homo sapiens
  Table A; HLA-A*30:01; CTNNB1; S37A; 0
LDSGIHAGA

SEQ ID NO: 15290 - protein, 9 aa, Homo sapiens
  Table A; HLA-A*31:01; CTNNB1; S37A; 0
LDSGIHAGA

SEQ ID NO: 15291 - protein, 9 aa, Homo sapiens
  Table A; HLA-A*68:01; CTNNB1; S37A; 0
LDSGIHAGA

SEQ ID NO: 15292 - protein, 9 aa, Homo sapiens
  Table A; HLA-A*68:02; CTNNB1; S37A; 0
LDSGIHAGA

SEQ ID NO: 15293 - protein, 9 aa, Homo sapiens
  Table A; HLA-B*08:01; CTNNB1; S37A; 1
LDSGIHAGA

SEQ ID NO: 15294 - protein, 9 aa, Homo sapiens
  Table A; HLA-B*15:10; CTNNB1; S37A; 0
LDSGIHAGA

SEQ ID NO: 15295 - protein, 9 aa, Homo sapiens
  Table A; HLA-B*27:05; CTNNB1; S37A; 0
LDSGIHAGA

SEQ ID NO: 15296 - protein, 9 aa, Homo sapiens
  Table A; HLA-B*37:01; CTNNB1; S37A; 0
LDSGIHAGA

SEQ ID NO: 15297 - protein, 9 aa, Homo sapiens
  Table A; HLA-B*39:06; CTNNB1; S37A; 0
LDSGIHAGA

SEQ ID NO: 15298 - protein, 9 aa, Homo sapiens
  Table A; HLA-B*40:02; CTNNB1; S37A; 0
LDSGIHAGA

SEQ ID NO: 15299 - protein, 9 aa, Homo sapiens
  Table A; HLA-B*40:06; CTNNB1; S37A; 0
LDSGIHAGA

SEQ ID NO: 15300 - protein, 9 aa, Homo sapiens
  Table A; HLA-B*41:02; CTNNB1; S37A; 0
LDSGIHAGA

SEQ ID NO: 15301 - protein, 9 aa, Homo sapiens
  Table A; HLA-B*48:01; CTNNB1; S37A; 0
LDSGIHAGA

SEQ ID NO: 15302 - protein, 9 aa, Homo sapiens
  Table A; HLA-B*50:01; CTNNB1; S37A; 0
LDSGIHAGA

SEQ ID NO: 15303 - protein, 9 aa, Homo sapiens
  Table A; HLA-B*54:01; CTNNB1; S37A; 0
LDSGIHAGA

SEQ ID NO: 15304 - protein, 9 aa, Homo sapiens
  Table A; HLA-B*55:01; CTNNB1; S37A; 0
LDSGIHAGA

SEQ ID NO: 15305 - protein, 9 aa, Homo sapiens
  Table A; HLA-B*56:01; CTNNB1; S37A; 0
LDSGIHAGA

SEQ ID NO: 15306 - protein, 9 aa, Homo sapiens
  Table A; HLA-C*08:03; CTNNB1; S37A; 0
LDSGIHAGA

SEQ ID NO: 15307 - protein, 10 aa, Homo sapiens
  Table A; HLA-A*68:02; CTNNB1; S37A; 0
LDSGIHAGAT

SEQ ID NO: 15308 - protein, 10 aa, Homo sapiens
  Table A; HLA-B*27:05; CTNNB1; S37A; 0
LDSGIHAGAT

SEQ ID NO: 15309 - protein, 10 aa, Homo sapiens
  Table A; HLA-B*48:01; CTNNB1; S37A; 0
LDSGIHAGAT

SEQ ID NO: 15310 - protein, 10 aa, Homo sapiens
  Table A; HLA-C*08:03; CTNNB1; S37A; 0
LDSGIHAGAT

SEQ ID NO: 15311 - protein, 8 aa, Homo sapiens
  Table A; HLA-A*02:01; CTNNB1; S37C; 1
LDSGIHCG

SEQ ID NO: 15312 - protein, 8 aa, Homo sapiens
  Table A; HLA-C*08:03; CTNNB1; S37C; 0
LDSGIHCG

SEQ ID NO: 15313 - protein, 9 aa, Homo sapiens
  Table A; HLA-A*02:01; CTNNB1; S37C; 1
LDSGIHCGA

SEQ ID NO: 15314 - protein, 9 aa, Homo sapiens
  Table A; HLA-A*68:01; CTNNB1; S37C; 1
LDSGIHCGA

SEQ ID NO: 15315 - protein, 9 aa, Homo sapiens
  Table A; HLA-A*68:02; CTNNB1; S37C; 0
LDSGIHCGA

SEQ ID NO: 15316 - protein, 9 aa, Homo sapiens
  Table A; HLA-B*27:05; CTNNB1; S37C; 1
LDSGIHCGA

SEQ ID NO: 15317 - protein, 9 aa, Homo sapiens
  Table A; HLA-B*37:01; CTNNB1; S37C; 0
LDSGIHCGA

SEQ ID NO: 15318 - protein, 9 aa, Homo sapiens
  Table A; HLA-B*40:06; CTNNB1; S37C; 0
LDSGIHCGA

SEQ ID NO: 15319 - protein, 9 aa, Homo sapiens
  Table A; HLA-B*50:01; CTNNB1; S37C; 0
LDSGIHCGA

SEQ ID NO: 15320 - protein, 9 aa, Homo sapiens
  Table A; HLA-B*54:01; CTNNB1; S37C; 0
LDSGIHCGA

SEQ ID NO: 15321 - protein, 9 aa, Homo sapiens
  Table A; HLA-A*02:01; CTNNB1; S37F; 1
LDSGIHFGA

SEQ ID NO: 15322 - protein, 9 aa, Homo sapiens
  Table A; HLA-A*30:01; CTNNB1; S37F; 0
LDSGIHFGA

SEQ ID NO: 15323 - protein, 9 aa, Homo sapiens
  Table A; HLA-A*68:01; CTNNB1; S37F; 1
LDSGIHFGA

SEQ ID NO: 15324 - protein, 9 aa, Homo sapiens
  Table A; HLA-A*68:02; CTNNB1; S37F; 0
LDSGIHFGA

SEQ ID NO: 15325 - protein, 9 aa, Homo sapiens
  Table A; HLA-B*27:05; CTNNB1; S37F; 1
LDSGIHFGA

SEQ ID NO: 15326 - protein, 9 aa, Homo sapiens
  Table A; HLA-B*37:01; CTNNB1; S37F; 0
LDSGIHFGA

SEQ ID NO: 15327 - protein, 9 aa, Homo sapiens
  Table A; HLA-B*39:06; CTNNB1; S37F; 0
LDSGIHFGA

SEQ ID NO: 15328 - protein, 9 aa, Homo sapiens
  Table A; HLA-B*40:02; CTNNB1; S37F; 0
LDSGIHFGA

SEQ ID NO: 15329 - protein, 9 aa, Homo sapiens
  Table A; HLA-B*40:06; CTNNB1; S37F; 0
LDSGIHFGA

SEQ ID NO: 15330 - protein, 9 aa, Homo sapiens
  Table A; HLA-B*48:01; CTNNB1; S37F; 0
LDSGIHFGA

SEQ ID NO: 15331 - protein, 9 aa, Homo sapiens
  Table A; HLA-B*50:01; CTNNB1; S37F; 0
LDSGIHFGA

SEQ ID NO: 15332 - protein, 9 aa, Homo sapiens
  Table A; HLA-B*54:01; CTNNB1; S37F; 0
LDSGIHFGA

SEQ ID NO: 15333 - protein, 10 aa, Homo sapiens
  Table A; HLA-A*68:01; CTNNB1; S37F; 1
LDSGIHFGAT

SEQ ID NO: 15334 - protein, 10 aa, Homo sapiens
  Table A; HLA-A*68:02; CTNNB1; S37F; 0
LDSGIHFGAT

SEQ ID NO: 15335 - protein, 10 aa, Homo sapiens
  Table A; HLA-B*48:01; CTNNB1; S37F; 0
LDSGIHFGAT

SEQ ID NO: 15336 - protein, 8 aa, Homo sapiens
  Table A; HLA-C*08:03; CTNNB1; S37P; 0
LDSGIHPG

SEQ ID NO: 15337 - protein, 9 aa, Homo sapiens
  Table A; HLA-A*02:01; CTNNB1; S37P; 1
LDSGIHPGA

SEQ ID NO: 15338 - protein, 9 aa, Homo sapiens
  Table A; HLA-A*02:03; CTNNB1; S37P; 0
LDSGIHPGA

SEQ ID NO: 15339 - protein, 9 aa, Homo sapiens
  Table A; HLA-A*02:05; CTNNB1; S37P; 0
LDSGIHPGA

SEQ ID NO: 15340 - protein, 9 aa, Homo sapiens
  Table A; HLA-A*30:01; CTNNB1; S37P; 0
LDSGIHPGA

SEQ ID NO: 15341 - protein, 9 aa, Homo sapiens
  Table A; HLA-A*68:01; CTNNB1; S37P; 0
LDSGIHPGA

SEQ ID NO: 15342 - protein, 9 aa, Homo sapiens
  Table A; HLA-A*68:02; CTNNB1; S37P; 0
LDSGIHPGA

SEQ ID NO: 15343 - protein, 9 aa, Homo sapiens
  Table A; HLA-B*08:01; CTNNB1; S37P; 1
LDSGIHPGA

SEQ ID NO: 15344 - protein, 9 aa, Homo sapiens
  Table A; HLA-B*15:10; CTNNB1; S37P; 0
LDSGIHPGA

SEQ ID NO: 15345 - protein, 9 aa, Homo sapiens
  Table A; HLA-B*27:05; CTNNB1; S37P; 0
LDSGIHPGA

SEQ ID NO: 15346 - protein, 9 aa, Homo sapiens
  Table A; HLA-B*37:01; CTNNB1; S37P; 0
LDSGIHPGA

SEQ ID NO: 15347 - protein, 9 aa, Homo sapiens
  Table A; HLA-B*39:06; CTNNB1; S37P; 0
LDSGIHPGA

SEQ ID NO: 15348 - protein, 9 aa, Homo sapiens
  Table A; HLA-B*40:02; CTNNB1; S37P; 0
LDSGIHPGA

SEQ ID NO: 15349 - protein, 9 aa, Homo sapiens
  Table A; HLA-B*40:06; CTNNB1; S37P; 0
LDSGIHPGA

SEQ ID NO: 15350 - protein, 9 aa, Homo sapiens
  Table A; HLA-B*41:02; CTNNB1; S37P; 0
LDSGIHPGA

SEQ ID NO: 15351 - protein, 9 aa, Homo sapiens
  Table A; HLA-B*44:05; CTNNB1; S37P; 0
LDSGIHPGA

SEQ ID NO: 15352 - protein, 9 aa, Homo sapiens
  Table A; HLA-B*48:01; CTNNB1; S37P; 0
LDSGIHPGA

SEQ ID NO: 15353 - protein, 9 aa, Homo sapiens
  Table A; HLA-B*50:01; CTNNB1; S37P; 0
LDSGIHPGA

SEQ ID NO: 15354 - protein, 9 aa, Homo sapiens
  Table A; HLA-B*54:01; CTNNB1; S37P; 0
LDSGIHPGA

SEQ ID NO: 15355 - protein, 9 aa, Homo sapiens
  Table A; HLA-B*55:01; CTNNB1; S37P; 0
LDSGIHPGA

SEQ ID NO: 15356 - protein, 9 aa, Homo sapiens
  Table A; HLA-B*55:02; CTNNB1; S37P; 0
LDSGIHPGA

SEQ ID NO: 15357 - protein, 9 aa, Homo sapiens
  Table A; HLA-B*56:01; CTNNB1; S37P; 0
LDSGIHPGA

SEQ ID NO: 15358 - protein, 9 aa, Homo sapiens
  Table A; HLA-C*08:03; CTNNB1; S37P; 0
LDSGIHPGA

SEQ ID NO: 15359 - protein, 10 aa, Homo sapiens
  Table A; HLA-A*02:01; CTNNB1; S37P; 1
LDSGIHPGAT

SEQ ID NO: 15360 - protein, 10 aa, Homo sapiens
  Table A; HLA-A*68:01; CTNNB1; S37P; 0
LDSGIHPGAT

SEQ ID NO: 15361 - protein, 10 aa, Homo sapiens
  Table A; HLA-A*68:02; CTNNB1; S37P; 0
LDSGIHPGAT

SEQ ID NO: 15362 - protein, 10 aa, Homo sapiens
  Table A; HLA-B*48:01; CTNNB1; S37P; 0
LDSGIHPGAT

SEQ ID NO: 15363 - protein, 10 aa, Homo sapiens
  Table A; HLA-C*08:03; CTNNB1; S37P; 0
LDSGIHPGAT

SEQ ID NO: 15364 - protein, 9 aa, Homo sapiens
  Table A; HLA-B*50:01; CTNNB1; G34R; 0
LDSRIHSGA

SEQ ID NO: 15365 - protein, 8 aa, Homo sapiens
  Table A; HLA-B*37:01; CTNNB1; G34V; 0
LDSVIHSG

SEQ ID NO: 15366 - protein, 9 aa, Homo sapiens
  Table A; HLA-A*02:01; CTNNB1; G34V; 1
LDSVIHSGA

SEQ ID NO: 15367 - protein, 9 aa, Homo sapiens
  Table A; HLA-A*02:05; CTNNB1; G34V; 0
LDSVIHSGA

SEQ ID NO: 15368 - protein, 9 aa, Homo sapiens
  Table A; HLA-A*31:01; CTNNB1; G34V; 0
LDSVIHSGA

SEQ ID NO: 15369 - protein, 9 aa, Homo sapiens
  Table A; HLA-A*68:01; CTNNB1; G34V; 0
LDSVIHSGA

SEQ ID NO: 15370 - protein, 9 aa, Homo sapiens
  Table A; HLA-A*68:02; CTNNB1; G34V; 0
LDSVIHSGA

SEQ ID NO: 15371 - protein, 9 aa, Homo sapiens
  Table A; HLA-B*37:01; CTNNB1; G34V; 0
LDSVIHSGA

SEQ ID NO: 15372 - protein, 9 aa, Homo sapiens
  Table A; HLA-B*40:02; CTNNB1; G34V; 0
LDSVIHSGA

SEQ ID NO: 15373 - protein, 9 aa, Homo sapiens
  Table A; HLA-B*40:06; CTNNB1; G34V; 0
LDSVIHSGA

SEQ ID NO: 15374 - protein, 9 aa, Homo sapiens
  Table A; HLA-B*48:01; CTNNB1; G34V; 0
LDSVIHSGA

SEQ ID NO: 15375 - protein, 9 aa, Homo sapiens
  Table A; HLA-B*50:01; CTNNB1; G34V; 0
LDSVIHSGA

SEQ ID NO: 15376 - protein, 9 aa, Homo sapiens
  Table A; HLA-B*54:01; CTNNB1; G34V; 0
LDSVIHSGA

SEQ ID NO: 15377 - protein, 10 aa, Homo sapiens
  Table A; HLA-A*68:01; CTNNB1; G34V; 0
LDSVIHSGAT

SEQ ID NO: 15378 - protein, 9 aa, Homo sapiens
  Table A; HLA-A*01:01; KRAS; Q61H; 1
LDTAGHEEY

SEQ ID NO: 15379 - protein, 9 aa, Homo sapiens
  Table A; HLA-B*15:01; KRAS; Q61H; 1
LDTAGHEEY

SEQ ID NO: 15380 - protein, 9 aa, Homo sapiens
  Table A; HLA-B*15:02; KRAS; Q61H; 0
LDTAGHEEY

SEQ ID NO: 15381 - protein, 9 aa, Homo sapiens
  Table A; HLA-B*18:01; KRAS; Q61H; 1
LDTAGHEEY

SEQ ID NO: 15382 - protein, 9 aa, Homo sapiens
  Table A; HLA-B*27:02; KRAS; Q61H; 0
LDTAGHEEY

SEQ ID NO: 15383 - protein, 9 aa, Homo sapiens
  Table A; HLA-B*35:01; KRAS; Q61H; 1
LDTAGHEEY

SEQ ID NO: 15384 - protein, 9 aa, Homo sapiens
  Table A; HLA-B*35:08; KRAS; Q61H; 0
LDTAGHEEY

SEQ ID NO: 15385 - protein, 9 aa, Homo sapiens
  Table A; HLA-B*48:01; KRAS; Q61H; 0
LDTAGHEEY

SEQ ID NO: 15386 - protein, 9 aa, Homo sapiens
  Table A; HLA-B*58:01; KRAS; Q61H; 0
LDTAGHEEY

SEQ ID NO: 15387 - protein, 9 aa, Homo sapiens
  Table A; HLA-C*03:02; KRAS; Q61H; 0
LDTAGHEEY

SEQ ID NO: 15388 - protein, 9 aa, Homo sapiens
  Table A; HLA-A*01:01; NRAS; Q61H; 1
LDTAGHEEY

SEQ ID NO: 15389 - protein, 9 aa, Homo sapiens
  Table A; HLA-B*15:01; NRAS; Q61H; 1
LDTAGHEEY

SEQ ID NO: 15390 - protein, 9 aa, Homo sapiens
  Table A; HLA-B*15:02; NRAS; Q61H; 0
LDTAGHEEY

SEQ ID NO: 15391 - protein, 9 aa, Homo sapiens
  Table A; HLA-B*18:01; NRAS; Q61H; 1
LDTAGHEEY

SEQ ID NO: 15392 - protein, 9 aa, Homo sapiens
  Table A; HLA-B*27:02; NRAS; Q61H; 0
LDTAGHEEY

SEQ ID NO: 15393 - protein, 9 aa, Homo sapiens
  Table A; HLA-B*35:01; NRAS; Q61H; 1
LDTAGHEEY

SEQ ID NO: 15394 - protein, 9 aa, Homo sapiens
  Table A; HLA-B*35:08; NRAS; Q61H; 0
LDTAGHEEY

SEQ ID NO: 15395 - protein, 9 aa, Homo sapiens
  Table A; HLA-B*39:01; NRAS; Q61H; 0
LDTAGHEEY

SEQ ID NO: 15396 - protein, 9 aa, Homo sapiens
  Table A; HLA-B*48:01; NRAS; Q61H; 0
LDTAGHEEY

SEQ ID NO: 15397 - protein, 9 aa, Homo sapiens
  Table A; HLA-B*58:01; NRAS; Q61H; 0
LDTAGHEEY

SEQ ID NO: 15398 - protein, 9 aa, Homo sapiens
  Table A; HLA-C*03:02; NRAS; Q61H; 0
LDTAGHEEY

SEQ ID NO: 15399 - protein, 9 aa, Homo sapiens
  Table A; HLA-C*16:04; NRAS; Q61H; 0
LDTAGHEEY

SEQ ID NO: 15400 - protein, 9 aa, Homo sapiens
  Table A; HLA-B*35:01; HRAS; Q61K; 0
LDTAGKEEY

SEQ ID NO: 15401 - protein, 9 aa, Homo sapiens
  Table A; HLA-B*35:08; HRAS; Q61K; 0
LDTAGKEEY

SEQ ID NO: 15402 - protein, 9 aa, Homo sapiens
  Table A; HLA-B*15:01; NRAS; Q61K; 1
LDTAGKEEY

SEQ ID NO: 15403 - protein, 9 aa, Homo sapiens
  Table A; HLA-B*18:01; NRAS; Q61K; 1
LDTAGKEEY

SEQ ID NO: 15404 - protein, 9 aa, Homo sapiens
  Table A; HLA-B*35:01; NRAS; Q61K; 1
LDTAGKEEY

SEQ ID NO: 15405 - protein, 9 aa, Homo sapiens
  Table A; HLA-B*35:08; NRAS; Q61K; 0
LDTAGKEEY

SEQ ID NO: 15406 - protein, 9 aa, Homo sapiens
  Table A; HLA-B*58:01; NRAS; Q61K; 0
LDTAGKEEY

SEQ ID NO: 15407 - protein, 9 aa, Homo sapiens
  Table A; HLA-B*18:01; KRAS; Q61L; 0
LDTAGLEEY

SEQ ID NO: 15408 - protein, 9 aa, Homo sapiens
  Table A; HLA-B*35:01; KRAS; Q61L; 0
LDTAGLEEY

SEQ ID NO: 15409 - protein, 9 aa, Homo sapiens
  Table A; HLA-B*35:08; KRAS; Q61L; 0
LDTAGLEEY

SEQ ID NO: 15410 - protein, 9 aa, Homo sapiens
  Table A; HLA-B*18:01; NRAS; Q61L; 1
LDTAGLEEY

SEQ ID NO: 15411 - protein, 9 aa, Homo sapiens
  Table A; HLA-B*35:01; NRAS; Q61L; 1
LDTAGLEEY

SEQ ID NO: 15412 - protein, 9 aa, Homo sapiens
  Table A; HLA-B*35:08; NRAS; Q61L; 0
LDTAGLEEY

SEQ ID NO: 15413 - protein, 9 aa, Homo sapiens
  Table A; HLA-B*15:01; KRAS; Q61R; 0
LDTAGREEY

SEQ ID NO: 15414 - protein, 9 aa, Homo sapiens
  Table A; HLA-B*35:01; KRAS; Q61R; 0
LDTAGREEY

SEQ ID NO: 15415 - protein, 9 aa, Homo sapiens
  Table A; HLA-B*35:08; KRAS; Q61R; 0
LDTAGREEY

SEQ ID NO: 15416 - protein, 9 aa, Homo sapiens
  Table A; HLA-C*03:02; KRAS; Q61R; 0
LDTAGREEY

SEQ ID NO: 15417 - protein, 9 aa, Homo sapiens
  Table A; HLA-B*15:01; NRAS; Q61R; 1
LDTAGREEY

SEQ ID NO: 15418 - protein, 9 aa, Homo sapiens
  Table A; HLA-B*18:01; NRAS; Q61R; 1
LDTAGREEY

SEQ ID NO: 15419 - protein, 9 aa, Homo sapiens
  Table A; HLA-B*35:01; NRAS; Q61R; 1
LDTAGREEY

SEQ ID NO: 15420 - protein, 9 aa, Homo sapiens
  Table A; HLA-B*35:08; NRAS; Q61R; 0
LDTAGREEY

SEQ ID NO: 15421 - protein, 9 aa, Homo sapiens
  Table A; HLA-C*03:02; NRAS; Q61R; 0
LDTAGREEY

SEQ ID NO: 15422 - protein, 8 aa, Homo sapiens
  Table A; HLA-A*02:01; CTNNB1; S33Y; 1
LDYGIHSG

SEQ ID NO: 15423 - protein, 8 aa, Homo sapiens
  Table A; HLA-A*11:01; CTNNB1; S33Y; 1
LDYGIHSG

SEQ ID NO: 15424 - protein, 8 aa, Homo sapiens
  Table A; HLA-A*31:01; CTNNB1; S33Y; 0
LDYGIHSG

SEQ ID NO: 15425 - protein, 8 aa, Homo sapiens
  Table A; HLA-A*68:01; CTNNB1; S33Y; 0
LDYGIHSG

SEQ ID NO: 15426 - protein, 8 aa, Homo sapiens
  Table A; HLA-B*08:01; CTNNB1; S33Y; 1
LDYGIHSG

SEQ ID NO: 15427 - protein, 8 aa, Homo sapiens
  Table A; HLA-B*27:05; CTNNB1; S33Y; 1
LDYGIHSG

SEQ ID NO: 15428 - protein, 8 aa, Homo sapiens
  Table A; HLA-B*40:02; CTNNB1; S33Y; 0
LDYGIHSG

SEQ ID NO: 15429 - protein, 8 aa, Homo sapiens
  Table A; HLA-B*48:01; CTNNB1; S33Y; 0
LDYGIHSG

SEQ ID NO: 15430 - protein, 8 aa, Homo sapiens
  Table A; HLA-B*54:01; CTNNB1; S33Y; 0
LDYGIHSG

SEQ ID NO: 15431 - protein, 8 aa, Homo sapiens
  Table A; HLA-C*08:03; CTNNB1; S33Y; 0
LDYGIHSG

SEQ ID NO: 15432 - protein, 9 aa, Homo sapiens
  Table A; HLA-A*02:03; CTNNB1; S33Y; 0
LDYGIHSGA

SEQ ID NO: 15433 - protein, 9 aa, Homo sapiens
  Table A; HLA-A*02:05; CTNNB1; S33Y; 0
LDYGIHSGA

SEQ ID NO: 15434 - protein, 9 aa, Homo sapiens
  Table A; HLA-A*02:07; CTNNB1; S33Y; 0
LDYGIHSGA

SEQ ID NO: 15435 - protein, 9 aa, Homo sapiens
  Table A; HLA-A*30:01; CTNNB1; S33Y; 0
LDYGIHSGA

SEQ ID NO: 15436 - protein, 9 aa, Homo sapiens
  Table A; HLA-A*68:01; CTNNB1; S33Y; 0
LDYGIHSGA

SEQ ID NO: 15437 - protein, 9 aa, Homo sapiens
  Table A; HLA-A*68:02; CTNNB1; S33Y; 0
LDYGIHSGA

SEQ ID NO: 15438 - protein, 9 aa, Homo sapiens
  Table A; HLA-B*08:01; CTNNB1; S33Y; 1
LDYGIHSGA

SEQ ID NO: 15439 - protein, 9 aa, Homo sapiens
  Table A; HLA-B*14:02; CTNNB1; S33Y; 0
LDYGIHSGA

SEQ ID NO: 15440 - protein, 9 aa, Homo sapiens
  Table A; HLA-B*18:01; CTNNB1; S33Y; 1
LDYGIHSGA

SEQ ID NO: 15441 - protein, 9 aa, Homo sapiens
  Table A; HLA-B*37:01; CTNNB1; S33Y; 0
LDYGIHSGA

SEQ ID NO: 15442 - protein, 9 aa, Homo sapiens
  Table A; HLA-B*39:06; CTNNB1; S33Y; 0
LDYGIHSGA

SEQ ID NO: 15443 - protein, 9 aa, Homo sapiens
  Table A; HLA-B*40:02; CTNNB1; S33Y; 0
LDYGIHSGA

SEQ ID NO: 15444 - protein, 9 aa, Homo sapiens
  Table A; HLA-B*40:06; CTNNB1; S33Y; 0
LDYGIHSGA

SEQ ID NO: 15445 - protein, 9 aa, Homo sapiens
  Table A; HLA-B*48:01; CTNNB1; S33Y; 0
LDYGIHSGA

SEQ ID NO: 15446 - protein, 9 aa, Homo sapiens
  Table A; HLA-B*49:01; CTNNB1; S33Y; 0
LDYGIHSGA

SEQ ID NO: 15447 - protein, 9 aa, Homo sapiens
  Table A; HLA-B*50:01; CTNNB1; S33Y; 0
LDYGIHSGA

SEQ ID NO: 15448 - protein, 9 aa, Homo sapiens
  Table A; HLA-B*54:01; CTNNB1; S33Y; 0
LDYGIHSGA

SEQ ID NO: 15449 - protein, 10 aa, Homo sapiens
  Table A; HLA-A*02:03; CTNNB1; S33Y; 0
LDYGIHSGAT

SEQ ID NO: 15450 - protein, 10 aa, Homo sapiens
  Table A; HLA-A*68:01; CTNNB1; S33Y; 0
LDYGIHSGAT

SEQ ID NO: 15451 - protein, 10 aa, Homo sapiens
  Table A; HLA-A*68:02; CTNNB1; S33Y; 0
LDYGIHSGAT

SEQ ID NO: 15452 - protein, 10 aa, Homo sapiens
  Table A; HLA-B*08:01; CTNNB1; S33Y; 1
LDYGIHSGAT

SEQ ID NO: 15453 - protein, 10 aa, Homo sapiens
  Table A; HLA-B*40:02; CTNNB1; S33Y; 0
LDYGIHSGAT

SEQ ID NO: 15454 - protein, 10 aa, Homo sapiens
  Table A; HLA-B*48:01; CTNNB1; S33Y; 0
LDYGIHSGAT

SEQ ID NO: 15455 - protein, 10 aa, Homo sapiens
  Table A; HLA-B*50:01; CTNNB1; S33Y; 0
LDYGIHSGAT

SEQ ID NO: 15456 - protein, 10 aa, Homo sapiens
  Table A; HLA-C*07:04; CTNNB1; S33Y; 0
LDYGIHSGAT

SEQ ID NO: 15457 - protein, 10 aa, Homo sapiens
  Table A; HLA-C*08:03; CTNNB1; S33Y; 0
LDYGIHSGAT

SEQ ID NO: 15458 - protein, 10 aa, Homo sapiens
  Table A; HLA-A*11:01; MAP2K1; K57N; 0
LEAFLTQNQK

SEQ ID NO: 15459 - protein, 10 aa, Homo sapiens
  Table A; HLA-A*68:02; MAP2K1; K57N; 0
LEAFLTQNQK

SEQ ID NO: 15460 - protein, 10 aa, Homo sapiens
  Table A; HLA-B*27:02; MAP2K1; K57N; 0
LEAFLTQNQK

SEQ ID NO: 15461 - protein, 11 aa, Homo sapiens
  Table A; HLA-B*49:01; MAP2K1; K57N; 0
LEAFLTQNQKV

SEQ ID NO: 15462 - protein, 9 aa, Homo sapiens
  Table A; HLA-A*30:01; PIK3CA; R38H; 0
LECLHEATL

SEQ ID NO: 15463 - protein, 9 aa, Homo sapiens
  Table A; HLA-B*40:01; PIK3CA; R38H; 1
LECLHEATL

SEQ ID NO: 15464 - protein, 9 aa, Homo sapiens
  Table A; HLA-B*40:02; PIK3CA; R38H; 0
LECLHEATL

SEQ ID NO: 15465 - protein, 9 aa, Homo sapiens
  Table A; HLA-B*41:02; PIK3CA; R38H; 0
LECLHEATL

SEQ ID NO: 15466 - protein, 9 aa, Homo sapiens
  Table A; HLA-B*44:05; PIK3CA; R38H; 0
LECLHEATL

SEQ ID NO: 15467 - protein, 9 aa, Homo sapiens
  Table A; HLA-B*49:01; PIK3CA; R38H; 0
LECLHEATL

SEQ ID NO: 15468 - protein, 9 aa, Homo sapiens
  Table A; HLA-A*23:01; RAC1; A159V; 0
LECSVLTQR

SEQ ID NO: 15469 - protein, 9 aa, Homo sapiens
  Table A; HLA-A*31:01; RAC1; A159V; 0
LECSVLTQR

SEQ ID NO: 15470 - protein, 9 aa, Homo sapiens
  Table A; HLA-A*33:01; RAC1; A159V; 0
LECSVLTQR

SEQ ID NO: 15471 - protein, 9 aa, Homo sapiens
  Table A; HLA-A*33:03; RAC1; A159V; 0
LECSVLTQR

SEQ ID NO: 15472 - protein, 9 aa, Homo sapiens
  Table A; HLA-A*68:01; RAC1; A159V; 0
LECSVLTQR

SEQ ID NO: 15473 - protein, 9 aa, Homo sapiens
  Table A; HLA-A*68:02; RAC1; A159V; 0
LECSVLTQR

SEQ ID NO: 15474 - protein, 9 aa, Homo sapiens
  Table A; HLA-B*27:02; RAC1; A159V; 0
LECSVLTQR

SEQ ID NO: 15475 - protein, 9 aa, Homo sapiens
  Table A; HLA-B*27:05; RAC1; A159V; 0
LECSVLTQR

SEQ ID NO: 15476 - protein, 11 aa, Homo sapiens
  Table A; HLA-A*68:01; TP53; G266E; 0
LEDSSGNLLER

SEQ ID NO: 15477 - protein, 11 aa, Homo sapiens
  Table A; HLA-B*27:02; TP53; G266E; 0
LEDSSGNLLER

SEQ ID NO: 15478 - protein, 10 aa, Homo sapiens
  Table A; HLA-B*27:02; TP53; G266R; 0
LEDSSGNLLR

SEQ ID NO: 15479 - protein, 10 aa, Homo sapiens
  Table A; HLA-B*40:01; TP53; G266V; 0
LEDSSGNLLV

SEQ ID NO: 15480 - protein, 10 aa, Homo sapiens
  Table A; HLA-B*49:01; TP53; G266V; 0
LEDSSGNLLV

SEQ ID NO: 15481 - protein, 11 aa, Homo sapiens
  Table A; HLA-A*68:01; TP53; G266V; 0
LEDSSGNLLVR

SEQ ID NO: 15482 - protein, 11 aa, Homo sapiens
  Table A; HLA-B*27:02; TP53; G266V; 0
LEDSSGNLLVR

SEQ ID NO: 15483 - protein, 8 aa, Homo sapiens
  Table A; HLA-B*40:01; TP53; G262V; 0
LEDSSVNL

SEQ ID NO: 15484 - protein, 8 aa, Homo sapiens
  Table A; HLA-B*40:02; TP53; G262V; 0
LEDSSVNL

SEQ ID NO: 15485 - protein, 8 aa, Homo sapiens
  Table A; HLA-B*44:05; TP53; G262V; 0
LEDSSVNL

SEQ ID NO: 15486 - protein, 8 aa, Homo sapiens
  Table A; HLA-B*49:01; TP53; G262V; 0
LEDSSVNL

SEQ ID NO: 15487 - protein, 8 aa, Homo sapiens
  Table A; HLA-C*08:02; TP53; G262V; 0
LEDSSVNL

SEQ ID NO: 15488 - protein, 9 aa, Homo sapiens
  Table A; HLA-A*02:07; TP53; G262V; 0
LEDSSVNLL

SEQ ID NO: 15489 - protein, 9 aa, Homo sapiens
  Table A; HLA-A*30:01; TP53; G262V; 0
LEDSSVNLL

SEQ ID NO: 15490 - protein, 9 aa, Homo sapiens
  Table A; HLA-B*38:01; TP53; G262V; 0
LEDSSVNLL

SEQ ID NO: 15491 - protein, 9 aa, Homo sapiens
  Table A; HLA-B*40:01; TP53; G262V; 0
LEDSSVNLL

SEQ ID NO: 15492 - protein, 9 aa, Homo sapiens
  Table A; HLA-B*40:02; TP53; G262V; 0
LEDSSVNLL

SEQ ID NO: 15493 - protein, 9 aa, Homo sapiens
  Table A; HLA-B*41:02; TP53; G262V; 0
LEDSSVNLL

SEQ ID NO: 15494 - protein, 9 aa, Homo sapiens
  Table A; HLA-B*44:05; TP53; G262V; 0
LEDSSVNLL

SEQ ID NO: 15495 - protein, 9 aa, Homo sapiens
  Table A; HLA-B*49:01; TP53; G262V; 0
LEDSSVNLL

SEQ ID NO: 15496 - protein, 9 aa, Homo sapiens
  Table A; HLA-B*58:01; TP53; G262V; 0
LEDSSVNLL

SEQ ID NO: 15497 - protein, 9 aa, Homo sapiens
  Table A; HLA-C*05:01; TP53; G262V; 1
LEDSSVNLL

SEQ ID NO: 15498 - protein, 9 aa, Homo sapiens
  Table A; HLA-C*08:02; TP53; G262V; 0
LEDSSVNLL

SEQ ID NO: 15499 - protein, 11 aa, Homo sapiens
  Table A; HLA-B*27:02; TP53; G262V; 0
LEDSSVNLLGR

SEQ ID NO: 15500 - protein, 9 aa, Homo sapiens
  Table A; HLA-B*50:01; FAT1; D3120N; 0
LEDVNNNAP

SEQ ID NO: 15501 - protein, 11 aa, Homo sapiens
  Table A; HLA-B*44:05; FAT1; D3120N; 0
LEDVNNNAPEF

SEQ ID NO: 15502 - protein, 10 aa, Homo sapiens
  Table A; HLA-B*40:01; RGPD3; N756D; 1
LEDYSEGGPL

SEQ ID NO: 15503 - protein, 8 aa, Homo sapiens
  Table A; HLA-A*02:05; GRIN2A; S1425L; 0
LEHVMPYA

SEQ ID NO: 15504 - protein, 8 aa, Homo sapiens
  Table A; HLA-B*40:06; GRIN2A; S1425L; 0
LEHVMPYA

SEQ ID NO: 15505 - protein, 8 aa, Homo sapiens
  Table A; HLA-B*50:01; GRIN2A; S1425L; 0
LEHVMPYA

SEQ ID NO: 15506 - protein, 9 aa, Homo sapiens
  Table A; HLA-A*02:05; GRIN2A; S1425L; 0
LEHVMPYAA

SEQ ID NO: 15507 - protein, 9 aa, Homo sapiens
  Table A; HLA-A*02:08; GRIN2A; S1425L; 0
LEHVMPYAA

SEQ ID NO: 15508 - protein, 9 aa, Homo sapiens
  Table A; HLA-B*18:01; GRIN2A; S1425L; 0
LEHVMPYAA

SEQ ID NO: 15509 - protein, 9 aa, Homo sapiens
  Table A; HLA-B*39:06; GRIN2A; S1425L; 0
LEHVMPYAA

SEQ ID NO: 15510 - protein, 9 aa, Homo sapiens
  Table A; HLA-B*40:02; GRIN2A; S1425L; 0
LEHVMPYAA

SEQ ID NO: 15511 - protein, 9 aa, Homo sapiens
  Table A; HLA-B*40:06; GRIN2A; S1425L; 0
LEHVMPYAA

SEQ ID NO: 15512 - protein, 9 aa, Homo sapiens
  Table A; HLA-B*50:01; GRIN2A; S1425L; 0
LEHVMPYAA

SEQ ID NO: 15513 - protein, 9 aa, Homo sapiens
  Table A; HLA-B*54:01; GRIN2A; S1425L; 0
LEHVMPYAA

SEQ ID NO: 15514 - protein, 8 aa, Homo sapiens
  Table A; HLA-B*40:06; CSMD3; S300F; 0
LEIEGFEP

SEQ ID NO: 15515 - protein, 8 aa, Homo sapiens
  Table A; HLA-B*50:01; CSMD3; S300F; 0
LEIEGFEP

SEQ ID NO: 15516 - protein, 9 aa, Homo sapiens
  Table A; HLA-A*02:05; CSMD3; S300F; 0
LEIEGFEPP

SEQ ID NO: 15517 - protein, 9 aa, Homo sapiens
  Table A; HLA-A*02:08; CSMD3; S300F; 0
LEIEGFEPP

SEQ ID NO: 15518 - protein, 9 aa, Homo sapiens
  Table A; HLA-B*40:06; CSMD3; S300F; 0
LEIEGFEPP

SEQ ID NO: 15519 - protein, 9 aa, Homo sapiens
  Table A; HLA-B*50:01; CSMD3; S300F; 0
LEIEGFEPP

SEQ ID NO: 15520 - protein, 11 aa, Homo sapiens
  Table A; HLA-B*49:01; CSMD3; S300F; 0
LEIEGFEPPTI

SEQ ID NO: 15521 - protein, 8 aa, Homo sapiens
  Table A; HLA-A*23:01; STAG2; R370Q; 0
LELFTSQF

SEQ ID NO: 15522 - protein, 8 aa, Homo sapiens
  Table A; HLA-B*15:01; STAG2; R370Q; 0
LELFTSQF

SEQ ID NO: 15523 - protein, 8 aa, Homo sapiens
  Table A; HLA-B*18:01; STAG2; R370Q; 0
LELFTSQF

SEQ ID NO: 15524 - protein, 8 aa, Homo sapiens
  Table A; HLA-B*37:01; STAG2; R370Q; 0
LELFTSQF

SEQ ID NO: 15525 - protein, 8 aa, Homo sapiens
  Table A; HLA-B*40:02; STAG2; R370Q; 0
LELFTSQF

SEQ ID NO: 15526 - protein, 8 aa, Homo sapiens
  Table A; HLA-B*44:05; STAG2; R370Q; 0
LELFTSQF

SEQ ID NO: 15527 - protein, 8 aa, Homo sapiens
  Table A; HLA-B*49:01; STAG2; R370Q; 0
LELFTSQF

SEQ ID NO: 15528 - protein, 9 aa, Homo sapiens
  Table A; HLA-A*23:01; BCORL1; K1207N; 0
LENKAKSSF

SEQ ID NO: 15529 - protein, 9 aa, Homo sapiens
  Table A; HLA-A*30:01; BCORL1; K1207N; 0
LENKAKSSF

SEQ ID NO: 15530 - protein, 9 aa, Homo sapiens
  Table A; HLA-B*07:02; BCORL1; K1207N; 1
LENKAKSSF

SEQ ID NO: 15531 - protein, 9 aa, Homo sapiens
  Table A; HLA-B*15:01; BCORL1; K1207N; 1
LENKAKSSF

SEQ ID NO: 15532 - protein, 9 aa, Homo sapiens
  Table A; HLA-B*18:01; BCORL1; K1207N; 1
LENKAKSSF

SEQ ID NO: 15533 - protein, 9 aa, Homo sapiens
  Table A; HLA-B*37:01; BCORL1; K1207N; 0
LENKAKSSF

SEQ ID NO: 15534 - protein, 9 aa, Homo sapiens
  Table A; HLA-B*41:02; BCORL1; K1207N; 0
LENKAKSSF

SEQ ID NO: 15535 - protein, 9 aa, Homo sapiens
  Table A; HLA-B*44:02; BCORL1; K1207N; 1
LENKAKSSF

SEQ ID NO: 15536 - protein, 9 aa, Homo sapiens
  Table A; HLA-B*44:03; BCORL1; K1207N; 1
LENKAKSSF

SEQ ID NO: 15537 - protein, 9 aa, Homo sapiens
  Table A; HLA-B*44:05; BCORL1; K1207N; 0
LENKAKSSF

SEQ ID NO: 15538 - protein, 8 aa, Homo sapiens
  Table A; HLA-B*37:01; MTOR; A2056V; 0
LEPLHVMM

SEQ ID NO: 15539 - protein, 9 aa, Homo sapiens
  Table A; HLA-A*30:01; CNTNAP2; G362E; 0
LEPSNVENL

SEQ ID NO: 15540 - protein, 9 aa, Homo sapiens
  Table A; HLA-B*40:01; CNTNAP2; G362E; 1
LEPSNVENL

SEQ ID NO: 15541 - protein, 9 aa, Homo sapiens
  Table A; HLA-B*40:02; CNTNAP2; G362E; 0
LEPSNVENL

SEQ ID NO: 15542 - protein, 9 aa, Homo sapiens
  Table A; HLA-B*41:02; CNTNAP2; G362E; 0
LEPSNVENL

SEQ ID NO: 15543 - protein, 9 aa, Homo sapiens
  Table A; HLA-B*44:05; CNTNAP2; G362E; 0
LEPSNVENL

SEQ ID NO: 15544 - protein, 11 aa, Homo sapiens
  Table A; HLA-B*44:03; CNTNAP2; G362E; 1
LEPSNVENLSF

SEQ ID NO: 15545 - protein, 11 aa, Homo sapiens
  Table A; HLA-B*44:05; CNTNAP2; G362E; 0
LEPSNVENLSF

SEQ ID NO: 15546 - protein, 8 aa, Homo sapiens
  Table A; HLA-A*30:01; TP53; G266E; 0
LERNSFEV

SEQ ID NO: 15547 - protein, 8 aa, Homo sapiens
  Table A; HLA-B*18:01; TP53; G266E; 0
LERNSFEV

SEQ ID NO: 15548 - protein, 8 aa, Homo sapiens
  Table A; HLA-B*40:02; TP53; G266E; 0
LERNSFEV

SEQ ID NO: 15549 - protein, 8 aa, Homo sapiens
  Table A; HLA-B*41:02; TP53; G266E; 0
LERNSFEV

SEQ ID NO: 15550 - protein, 8 aa, Homo sapiens
  Table A; HLA-B*49:01; TP53; G266E; 0
LERNSFEV

SEQ ID NO: 15551 - protein, 8 aa, Homo sapiens
  Table A; HLA-B*50:01; TP53; G266E; 0
LERNSFEV

SEQ ID NO: 15552 - protein, 9 aa, Homo sapiens
  Table A; HLA-A*30:01; TP53; G266E; 0
LERNSFEVR

SEQ ID NO: 15553 - protein, 9 aa, Homo sapiens
  Table A; HLA-A*31:01; TP53; G266E; 0
LERNSFEVR

SEQ ID NO: 15554 - protein, 8 aa, Homo sapiens
  Table A; HLA-B*49:01; PIK3CA; M1043I; 0
LEYFMKQI

SEQ ID NO: 15555 - protein, 8 aa, Homo sapiens
  Table A; HLA-B*40:02; PIK3CA; M1043V; 0
LEYFMKQV

SEQ ID NO: 15556 - protein, 8 aa, Homo sapiens
  Table A; HLA-B*49:01; PIK3CA; M1043V; 0
LEYFMKQV

SEQ ID NO: 15557 - protein, 8 aa, Homo sapiens
  Table A; HLA-B*50:01; PIK3CA; M1043V; 0
LEYFMKQV

SEQ ID NO: 15558 - protein, 9 aa, Homo sapiens
  Table A; HLA-C*08:01; ARID2; S297F; 0
LFFEEGNVK

SEQ ID NO: 15559 - protein, 10 aa, Homo sapiens
  Table A; HLA-A*02:01; ARID2; S297F; 1
LFFEEGNVKL

SEQ ID NO: 15560 - protein, 10 aa, Homo sapiens
  Table A; HLA-A*02:04; ARID2; S297F; 0
LFFEEGNVKL

SEQ ID NO: 15561 - protein, 10 aa, Homo sapiens
  Table A; HLA-A*02:05; ARID2; S297F; 0
LFFEEGNVKL

SEQ ID NO: 15562 - protein, 11 aa, Homo sapiens
  Table A; HLA-A*02:03; ARID2; S297F; 0
LFFEEGNVKLL

SEQ ID NO: 15563 - protein, 11 aa, Homo sapiens
  Table A; HLA-A*02:04; ARID2; S297F; 0
LFFEEGNVKLL

SEQ ID NO: 15564 - protein, 11 aa, Homo sapiens
  Table A; HLA-C*14:02; ARID2; S297F; 0
LFFEEGNVKLL

SEQ ID NO: 15565 - protein, 9 aa, Homo sapiens
  Table A; HLA-A*33:03; DCAF12L2; R378H; 0
LFYDIHAQK

SEQ ID NO: 15566 - protein, 10 aa, Homo sapiens
  Table A; HLA-A*23:01; DCAF12L2; R378H; 0
LFYDIHAQKF

SEQ ID NO: 15567 - protein, 10 aa, Homo sapiens
  Table A; HLA-A*24:02; DCAF12L2; R378H; 0
LFYDIHAQKF

SEQ ID NO: 15568 - protein, 10 aa, Homo sapiens
  Table A; HLA-A*29:02; DCAF12L2; R378H; 0
LFYDIHAQKF

SEQ ID NO: 15569 - protein, 10 aa, Homo sapiens
  Table A; HLA-C*14:02; DCAF12L2; R378H; 0
LFYDIHAQKF

SEQ ID NO: 15570 - protein, 9 aa, Homo sapiens
  Table A; HLA-C*05:01; NFE2L2; D77G; 1
LGEETGEFL

SEQ ID NO: 15571 - protein, 9 aa, Homo sapiens
  Table A; HLA-C*08:01; NFE2L2; D77G; 0
LGEETGEFL

SEQ ID NO: 15572 - protein, 9 aa, Homo sapiens
  Table A; HLA-C*08:02; NFE2L2; D77G; 0
LGEETGEFL

SEQ ID NO: 15573 - protein, 8 aa, Homo sapiens
  Table A; HLA-B*51:01; RAC1; P29L; 1
LGEYIPTV

SEQ ID NO: 15574 - protein, 9 aa, Homo sapiens
  Table A; HLA-A*23:01; RAC1; P29L; 0
LGEYIPTVF

SEQ ID NO: 15575 - protein, 9 aa, Homo sapiens
  Table A; HLA-B*35:01; RAC1; P29L; 1
LGEYIPTVF

SEQ ID NO: 15576 - protein, 9 aa, Homo sapiens
  Table A; HLA-B*35:02; RAC1; P29L; 0
LGEYIPTVF

SEQ ID NO: 15577 - protein, 9 aa, Homo sapiens
  Table A; HLA-B*35:03; RAC1; P29L; 0
LGEYIPTVF

SEQ ID NO: 15578 - protein, 9 aa, Homo sapiens
  Table A; HLA-B*35:12; RAC1; P29L; 0
LGEYIPTVF

SEQ ID NO: 15579 - protein, 9 aa, Homo sapiens
  Table A; HLA-C*04:01; RAC1; P29L; 1
LGEYIPTVF

SEQ ID NO: 15580 - protein, 9 aa, Homo sapiens
  Table A; HLA-C*05:01; RAC1; P29L; 1
LGEYIPTVF

SEQ ID NO: 15581 - protein, 9 aa, Homo sapiens
  Table A; HLA-C*08:02; RAC1; P29L; 0
LGEYIPTVF

SEQ ID NO: 15582 - protein, 8 aa, Homo sapiens
  Table A; HLA-B*15:02; TP53; V272M; 0
LGRNSFEM

SEQ ID NO: 15583 - protein, 9 aa, Homo sapiens
  Table A; HLA-A*31:01; TP53; V272M; 0
LGRNSFEMR

SEQ ID NO: 15584 - protein, 8 aa, Homo sapiens
  Table A; HLA-B*39:01; IDH1; R132L; 0
LHAYGDQY

SEQ ID NO: 15585 - protein, 9 aa, Homo sapiens
  Table A; HLA-B*15:10; PIK3CA; R38H; 0
LHEATLVTI

SEQ ID NO: 15586 - protein, 9 aa, Homo sapiens
  Table A; HLA-B*38:01; PIK3CA; R38H; 0
LHEATLVTI

SEQ ID NO: 15587 - protein, 9 aa, Homo sapiens
  Table A; HLA-B*39:01; PIK3CA; R38H; 0
LHEATLVTI

SEQ ID NO: 15588 - protein, 9 aa, Homo sapiens
  Table A; HLA-B*39:06; PIK3CA; R38H; 0
LHEATLVTI

SEQ ID NO: 15589 - protein, 9 aa, Homo sapiens
  Table A; HLA-A*68:02; CTNNB1; D32H; 0
LHSGIHSGA

SEQ ID NO: 15590 - protein, 9 aa, Homo sapiens
  Table A; HLA-B*15:10; CTNNB1; D32H; 0
LHSGIHSGA

SEQ ID NO: 15591 - protein, 9 aa, Homo sapiens
  Table A; HLA-B*27:05; CTNNB1; D32H; 0
LHSGIHSGA

SEQ ID NO: 15592 - protein, 9 aa, Homo sapiens
  Table A; HLA-B*39:01; CTNNB1; D32H; 0
LHSGIHSGA

SEQ ID NO: 15593 - protein, 9 aa, Homo sapiens
  Table A; HLA-B*39:06; CTNNB1; D32H; 0
LHSGIHSGA

SEQ ID NO: 15594 - protein, 9 aa, Homo sapiens
  Table A; HLA-B*50:01; CTNNB1; D32H; 0
LHSGIHSGA

SEQ ID NO: 15595 - protein, 9 aa, Homo sapiens
  Table A; HLA-B*54:01; CTNNB1; D32H; 0
LHSGIHSGA

SEQ ID NO: 15596 - protein, 8 aa, Homo sapiens
  Table A; HLA-A*02:04; TP53; P250L; 0
LILTIITL

SEQ ID NO: 15597 - protein, 8 aa, Homo sapiens
  Table A; HLA-C*17:01; TP53; P250L; 0
LILTIITL

SEQ ID NO: 15598 - protein, 8 aa, Homo sapiens
  Table A; HLA-A*02:03; XPO1; R749Q; 0
LIRSMQTV

SEQ ID NO: 15599 - protein, 8 aa, Homo sapiens
  Table A; HLA-B*13:02; XPO1; R749Q; 0
LIRSMQTV

SEQ ID NO: 15600 - protein, 9 aa, Homo sapiens
  Table A; HLA-A*03:01; XPO1; R749Q; 1
LIRSMQTVK

SEQ ID NO: 15601 - protein, 9 aa, Homo sapiens
  Table A; HLA-B*07:02; SF3B1; R957Q; 1
LISQTAVVM

SEQ ID NO: 15602 - protein, 9 aa, Homo sapiens
  Table A; HLA-B*15:01; SF3B1; R957Q; 1
LISQTAVVM

SEQ ID NO: 15603 - protein, 9 aa, Homo sapiens
  Table A; HLA-B*15:02; SF3B1; R957Q; 0
LISQTAVVM

SEQ ID NO: 15604 - protein, 9 aa, Homo sapiens
  Table A; HLA-B*15:10; SF3B1; R957Q; 0
LISQTAVVM

SEQ ID NO: 15605 - protein, 9 aa, Homo sapiens
  Table A; HLA-B*35:01; SF3B1; R957Q; 1
LISQTAVVM

SEQ ID NO: 15606 - protein, 9 aa, Homo sapiens
  Table A; HLA-B*35:02; SF3B1; R957Q; 0
LISQTAVVM

SEQ ID NO: 15607 - protein, 9 aa, Homo sapiens
  Table A; HLA-B*35:03; SF3B1; R957Q; 0
LISQTAVVM

SEQ ID NO: 15608 - protein, 9 aa, Homo sapiens
  Table A; HLA-B*35:08; SF3B1; R957Q; 0
LISQTAVVM

SEQ ID NO: 15609 - protein, 9 aa, Homo sapiens
  Table A; HLA-B*35:12; SF3B1; R957Q; 0
LISQTAVVM

SEQ ID NO: 15610 - protein, 9 aa, Homo sapiens
  Table A; HLA-B*39:01; SF3B1; R957Q; 0
LISQTAVVM

SEQ ID NO: 15611 - protein, 9 aa, Homo sapiens
  Table A; HLA-B*58:01; SF3B1; R957Q; 0
LISQTAVVM

SEQ ID NO: 15612 - protein, 9 aa, Homo sapiens
  Table A; HLA-C*07:04; SF3B1; R957Q; 0
LISQTAVVM

SEQ ID NO: 15613 - protein, 9 aa, Homo sapiens
  Table A; HLA-C*08:01; SF3B1; R957Q; 0
LISQTAVVM

SEQ ID NO: 15614 - protein, 10 aa, Homo sapiens
  Table A; HLA-A*03:01; SF3B1; R957Q; 1
LISQTAVVMK

SEQ ID NO: 15615 - protein, 10 aa, Homo sapiens
  Table A; HLA-A*03:02; SF3B1; R957Q; 0
LISQTAVVMK

SEQ ID NO: 15616 - protein, 10 aa, Homo sapiens
  Table A; HLA-A*11:01; SF3B1; R957Q; 1
LISQTAVVMK

SEQ ID NO: 15617 - protein, 10 aa, Homo sapiens
  Table A; HLA-A*68:01; SF3B1; R957Q; 0
LISQTAVVMK

SEQ ID NO: 15618 - protein, 10 aa, Homo sapiens
  Table A; HLA-A*68:02; SF3B1; R957Q; 0
LISQTAVVMK

SEQ ID NO: 15619 - protein, 10 aa, Homo sapiens
  Table A; HLA-B*27:02; SF3B1; R957Q; 0
LISQTAVVMK

SEQ ID NO: 15620 - protein, 8 aa, Homo sapiens
  Table A; HLA-B*39:06; PIK3CA; G106V; 0
LKVIEPVV

SEQ ID NO: 15621 - protein, 9 aa, Homo sapiens
  Table A; HLA-A*02:01; MTOR; S2215Y; 1
LLANDPTYL

SEQ ID NO: 15622 - protein, 9 aa, Homo sapiens
  Table A; HLA-A*02:03; MTOR; S2215Y; 0
LLANDPTYL

SEQ ID NO: 15623 - protein, 9 aa, Homo sapiens
  Table A; HLA-A*02:04; MTOR; S2215Y; 0
LLANDPTYL

SEQ ID NO: 15624 - protein, 9 aa, Homo sapiens
  Table A; HLA-A*02:05; MTOR; S2215Y; 0
LLANDPTYL

SEQ ID NO: 15625 - protein, 9 aa, Homo sapiens
  Table A; HLA-A*02:06; MTOR; S2215Y; 0
LLANDPTYL

SEQ ID NO: 15626 - protein, 9 aa, Homo sapiens
  Table A; HLA-A*02:07; MTOR; S2215Y; 0
LLANDPTYL

SEQ ID NO: 15627 - protein, 9 aa, Homo sapiens
  Table A; HLA-A*02:08; MTOR; S2215Y; 0
LLANDPTYL

SEQ ID NO: 15628 - protein, 9 aa, Homo sapiens
  Table A; HLA-B*13:02; MTOR; S2215Y; 0
LLANDPTYL

SEQ ID NO: 15629 - protein, 9 aa, Homo sapiens
  Table A; HLA-B*38:01; MTOR; S2215Y; 0
LLANDPTYL

SEQ ID NO: 15630 - protein, 9 aa, Homo sapiens
  Table A; HLA-B*39:01; MTOR; S2215Y; 0
LLANDPTYL

SEQ ID NO: 15631 - protein, 9 aa, Homo sapiens
  Table A; HLA-C*17:01; MTOR; S2215Y; 0
LLANDPTYL

SEQ ID NO: 15632 - protein, 10 aa, Homo sapiens
  Table A; HLA-B*27:02; MTOR; S2215Y; 0
LLANDPTYLR

SEQ ID NO: 15633 - protein, 10 aa, Homo sapiens
  Table A; HLA-B*27:02; HRAS; Q61K; 0
LLDILDTAGK

SEQ ID NO: 15634 - protein, 10 aa, Homo sapiens
  Table A; HLA-A*03:02; NRAS; Q61K; 0
LLDILDTAGK

SEQ ID NO: 15635 - protein, 10 aa, Homo sapiens
  Table A; HLA-B*27:02; NRAS; Q61K; 0
LLDILDTAGK

SEQ ID NO: 15636 - protein, 10 aa, Homo sapiens
  Table A; HLA-A*02:07; KRAS; Q61L; 0
LLDILDTAGL

SEQ ID NO: 15637 - protein, 10 aa, Homo sapiens
  Table A; HLA-A*02:07; NRAS; Q61L; 0
LLDILDTAGL

SEQ ID NO: 15638 - protein, 10 aa, Homo sapiens
  Table A; HLA-B*27:02; KRAS; Q61R; 0
LLDILDTAGR

SEQ ID NO: 15639 - protein, 10 aa, Homo sapiens
  Table A; HLA-B*27:02; NRAS; Q61R; 0
LLDILDTAGR

SEQ ID NO: 15640 - protein, 9 aa, Homo sapiens
  Table A; HLA-A*02:01; TP53; G266E; 1
LLERNSFEV

SEQ ID NO: 15641 - protein, 9 aa, Homo sapiens
  Table A; HLA-A*02:04; TP53; G266E; 0
LLERNSFEV

SEQ ID NO: 15642 - protein, 9 aa, Homo sapiens
  Table A; HLA-A*02:07; TP53; G266E; 0
LLERNSFEV

SEQ ID NO: 15643 - protein, 9 aa, Homo sapiens
  Table A; HLA-A*02:04; TP53; V272M; 0
LLGRNSFEM

SEQ ID NO: 15644 - protein, 11 aa, Homo sapiens
  Table A; HLA-A*02:04; RAC1; P29L; 0
LLISYTTNAFL

SEQ ID NO: 15645 - protein, 9 aa, Homo sapiens
  Table A; HLA-A*02:03; RGPD3; R816C; 0
LLKMICQEV

SEQ ID NO: 15646 - protein, 9 aa, Homo sapiens
  Table A; HLA-A*02:01; AR; F814V; 1
LLLVSIIPV

SEQ ID NO: 15647 - protein, 9 aa, Homo sapiens
  Table A; HLA-A*02:04; AR; F814V; 0
LLLVSIIPV

SEQ ID NO: 15648 - protein, 11 aa, Homo sapiens
  Table A; HLA-A*02:07; BIRC6; G271R; 0
LLPSARPELRV

SEQ ID NO: 15649 - protein, 8 aa, Homo sapiens
  Table A; HLA-A*02:03; PTPRT; M903I; 0
LLQHITQI

SEQ ID NO: 15650 - protein, 8 aa, Homo sapiens
  Table A; HLA-A*02:04; PTPRT; M903I; 0
LLQHITQI

SEQ ID NO: 15651 - protein, 9 aa, Homo sapiens
  Table A; HLA-A*03:02; PTPRT; M903I; 0
LLQHITQIK

SEQ ID NO: 15652 - protein, 9 aa, Homo sapiens
  Table A; HLA-A*02:01; CDKN2A; P114L; 1
LLVDLAEEL

SEQ ID NO: 15653 - protein, 9 aa, Homo sapiens
  Table A; HLA-A*02:03; CDKN2A; P114L; 0
LLVDLAEEL

SEQ ID NO: 15654 - protein, 9 aa, Homo sapiens
  Table A; HLA-A*02:04; CDKN2A; P114L; 0
LLVDLAEEL

SEQ ID NO: 15655 - protein, 9 aa, Homo sapiens
  Table A; HLA-A*02:05; CDKN2A; P114L; 0
LLVDLAEEL

SEQ ID NO: 15656 - protein, 9 aa, Homo sapiens
  Table A; HLA-A*02:06; CDKN2A; P114L; 0
LLVDLAEEL

SEQ ID NO: 15657 - protein, 9 aa, Homo sapiens
  Table A; HLA-A*02:07; CDKN2A; P114L; 0
LLVDLAEEL

SEQ ID NO: 15658 - protein, 9 aa, Homo sapiens
  Table A; HLA-A*02:08; CDKN2A; P114L; 0
LLVDLAEEL

SEQ ID NO: 15659 - protein, 9 aa, Homo sapiens
  Table A; HLA-A*68:02; CDKN2A; P114L; 0
LLVDLAEEL

SEQ ID NO: 15660 - protein, 9 aa, Homo sapiens
  Table A; HLA-B*13:01; CDKN2A; P114L; 0
LLVDLAEEL

SEQ ID NO: 15661 - protein, 9 aa, Homo sapiens
  Table A; HLA-B*13:02; CDKN2A; P114L; 1
LLVDLAEEL

SEQ ID NO: 15662 - protein, 9 aa, Homo sapiens
  Table A; HLA-B*15:01; CDKN2A; P114L; 1
LLVDLAEEL

SEQ ID NO: 15663 - protein, 9 aa, Homo sapiens
  Table A; HLA-B*15:02; CDKN2A; P114L; 0
LLVDLAEEL

SEQ ID NO: 15664 - protein, 9 aa, Homo sapiens
  Table A; HLA-B*15:13; CDKN2A; P114L; 0
LLVDLAEEL

SEQ ID NO: 15665 - protein, 9 aa, Homo sapiens
  Table A; HLA-B*35:01; CDKN2A; P114L; 1
LLVDLAEEL

SEQ ID NO: 15666 - protein, 9 aa, Homo sapiens
  Table A; HLA-B*35:02; CDKN2A; P114L; 0
LLVDLAEEL

SEQ ID NO: 15667 - protein, 9 aa, Homo sapiens
  Table A; HLA-B*35:03; CDKN2A; P114L; 0
LLVDLAEEL

SEQ ID NO: 15668 - protein, 9 aa, Homo sapiens
  Table A; HLA-B*38:01; CDKN2A; P114L; 0
LLVDLAEEL

SEQ ID NO: 15669 - protein, 9 aa, Homo sapiens
  Table A; HLA-B*39:01; CDKN2A; P114L; 0
LLVDLAEEL

SEQ ID NO: 15670 - protein, 9 aa, Homo sapiens
  Table A; HLA-B*40:01; CDKN2A; P114L; 1
LLVDLAEEL

SEQ ID NO: 15671 - protein, 9 aa, Homo sapiens
  Table A; HLA-B*40:02; CDKN2A; P114L; 0
LLVDLAEEL

SEQ ID NO: 15672 - protein, 9 aa, Homo sapiens
  Table A; HLA-B*48:01; CDKN2A; P114L; 0
LLVDLAEEL

SEQ ID NO: 15673 - protein, 9 aa, Homo sapiens
  Table A; HLA-B*50:01; CDKN2A; P114L; 0
LLVDLAEEL

SEQ ID NO: 15674 - protein, 9 aa, Homo sapiens
  Table A; HLA-C*08:01; CDKN2A; P114L; 0
LLVDLAEEL

SEQ ID NO: 15675 - protein, 9 aa, Homo sapiens
  Table A; HLA-C*08:03; CDKN2A; P114L; 0
LLVDLAEEL

SEQ ID NO: 15676 - protein, 9 aa, Homo sapiens
  Table A; HLA-C*17:01; CDKN2A; P114L; 0
LLVDLAEEL

SEQ ID NO: 15677 - protein, 9 aa, Homo sapiens
  Table A; HLA-A*02:01; TP53; G266V; 1
LLVRNSFEV

SEQ ID NO: 15678 - protein, 9 aa, Homo sapiens
  Table A; HLA-A*02:04; TP53; G266V; 0
LLVRNSFEV

SEQ ID NO: 15679 - protein, 11 aa, Homo sapiens
  Table A; HLA-A*02:04; AR; F814V; 0
LLVSIIPVDGL

SEQ ID NO: 15680 - protein, 11 aa, Homo sapiens
  Table A; HLA-A*02:07; AR; F814V; 0
LLVSIIPVDGL

SEQ ID NO: 15681 - protein, 8 aa, Homo sapiens
  Table A; HLA-A*02:04; KDR; S1100F; 0
LLWEIFFL

SEQ ID NO: 15682 - protein, 8 aa, Homo sapiens
  Table A; HLA-A*02:07; KDR; S1100F; 0
LLWEIFFL

SEQ ID NO: 15683 - protein, 10 aa, Homo sapiens
  Table A; HLA-B*57:01; KEAP1; G480W; 0
LLYAVGGFDW

SEQ ID NO: 15684 - protein, 9 aa, Homo sapiens
  Table A; HLA-A*02:01; EP300; A1629V; 1
LMDGRDVFL

SEQ ID NO: 15685 - protein, 9 aa, Homo sapiens
  Table A; HLA-A*02:06; EP300; A1629V; 0
LMDGRDVFL

SEQ ID NO: 15686 - protein, 9 aa, Homo sapiens
  Table A; HLA-A*02:07; EP300; A1629V; 0
LMDGRDVFL

SEQ ID NO: 15687 - protein, 9 aa, Homo sapiens
  Table A; HLA-C*04:01; EP300; A1629V; 1
LMDGRDVFL

SEQ ID NO: 15688 - protein, 9 aa, Homo sapiens
  Table A; HLA-C*05:01; EP300; A1629V; 1
LMDGRDVFL

SEQ ID NO: 15689 - protein, 9 aa, Homo sapiens
  Table A; HLA-C*08:02; EP300; A1629V; 0
LMDGRDVFL

SEQ ID NO: 15690 - protein, 9 aa, Homo sapiens
  Table A; HLA-C*17:01; EP300; A1629V; 0
LMDGRDVFL

SEQ ID NO: 15691 - protein, 11 aa, Homo sapiens
  Table A; HLA-A*02:07; EP300; A1629V; 0
LMDGRDVFLTL

SEQ ID NO: 15692 - protein, 9 aa, Homo sapiens
  Table A; HLA-A*29:01; PTPRC; Q895H; 0
LMVHVEAQY

SEQ ID NO: 15693 - protein, 9 aa, Homo sapiens
  Table A; HLA-A*29:02; PTPRC; Q895H; 0
LMVHVEAQY

SEQ ID NO: 15694 - protein, 9 aa, Homo sapiens
  Table A; HLA-A*30:02; PTPRC; Q895H; 0
LMVHVEAQY

SEQ ID NO: 15695 - protein, 9 aa, Homo sapiens
  Table A; HLA-A*30:04; PTPRC; Q895H; 0
LMVHVEAQY

SEQ ID NO: 15696 - protein, 9 aa, Homo sapiens
  Table A; HLA-B*15:01; PTPRC; Q895H; 1
LMVHVEAQY

SEQ ID NO: 15697 - protein, 9 aa, Homo sapiens
  Table A; HLA-B*15:02; PTPRC; Q895H; 0
LMVHVEAQY

SEQ ID NO: 15698 - protein, 9 aa, Homo sapiens
  Table A; HLA-B*27:02; PTPRC; Q895H; 0
LMVHVEAQY

SEQ ID NO: 15699 - protein, 9 aa, Homo sapiens
  Table A; HLA-B*46:01; PTPRC; Q895H; 0
LMVHVEAQY

SEQ ID NO: 15700 - protein, 9 aa, Homo sapiens
  Table A; HLA-B*58:01; PTPRC; Q895H; 0
LMVHVEAQY

SEQ ID NO: 15701 - protein, 9 aa, Homo sapiens
  Table A; HLA-C*08:01; PTPRC; Q895H; 0
LMVHVEAQY

SEQ ID NO: 15702 - protein, 10 aa, Homo sapiens
  Table A; HLA-A*02:01; PTPRC; Q895H; 1
LMVHVEAQYI

SEQ ID NO: 15703 - protein, 8 aa, Homo sapiens
  Table A; HLA-B*08:01; CREBBP; P2094L; 1
LNILKSNL

SEQ ID NO: 15704 - protein, 9 aa, Homo sapiens
  Table A; HLA-A*02:03; CTNNB1; D32N; 0
LNSGIHSGA

SEQ ID NO: 15705 - protein, 9 aa, Homo sapiens
  Table A; HLA-A*02:05; CTNNB1; D32N; 0
LNSGIHSGA

SEQ ID NO: 15706 - protein, 9 aa, Homo sapiens
  Table A; HLA-A*30:01; CTNNB1; D32N; 0
LNSGIHSGA

SEQ ID NO: 15707 - protein, 9 aa, Homo sapiens
  Table A; HLA-A*31:01; CTNNB1; D32N; 1
LNSGIHSGA

SEQ ID NO: 15708 - protein, 9 aa, Homo sapiens
  Table A; HLA-A*33:03; CTNNB1; D32N; 0
LNSGIHSGA

SEQ ID NO: 15709 - protein, 9 aa, Homo sapiens
  Table A; HLA-A*68:02; CTNNB1; D32N; 0
LNSGIHSGA

SEQ ID NO: 15710 - protein, 9 aa, Homo sapiens
  Table A; HLA-B*13:02; CTNNB1; D32N; 1
LNSGIHSGA

SEQ ID NO: 15711 - protein, 9 aa, Homo sapiens
  Table A; HLA-B*27:05; CTNNB1; D32N; 1
LNSGIHSGA

SEQ ID NO: 15712 - protein, 9 aa, Homo sapiens
  Table A; HLA-B*39:06; CTNNB1; D32N; 0
LNSGIHSGA

SEQ ID NO: 15713 - protein, 9 aa, Homo sapiens
  Table A; HLA-B*48:01; CTNNB1; D32N; 0
LNSGIHSGA

SEQ ID NO: 15714 - protein, 9 aa, Homo sapiens
  Table A; HLA-B*50:01; CTNNB1; D32N; 0
LNSGIHSGA

SEQ ID NO: 15715 - protein, 9 aa, Homo sapiens
  Table A; HLA-B*54:01; CTNNB1; D32N; 0
LNSGIHSGA

SEQ ID NO: 15716 - protein, 10 aa, Homo sapiens
  Table A; HLA-A*68:02; CTNNB1; D32N; 0
LNSGIHSGAT

SEQ ID NO: 15717 - protein, 10 aa, Homo sapiens
  Table A; HLA-B*48:01; CTNNB1; D32N; 0
LNSGIHSGAT

SEQ ID NO: 15718 - protein, 8 aa, Homo sapiens
  Table A; HLA-B*54:01; POLE; P286R; 0
LPLKFRDA

SEQ ID NO: 15719 - protein, 9 aa, Homo sapiens
  Table A; HLA-B*51:01; ERBB3; V104M; 1
LPLPNLRMV

SEQ ID NO: 15720 - protein, 9 aa, Homo sapiens
  Table A; HLA-B*54:01; ERBB3; V104M; 0
LPLPNLRMV

SEQ ID NO: 15721 - protein, 9 aa, Homo sapiens
  Table A; HLA-B*55:01; ERBB3; V104M; 0
LPLPNLRMV

SEQ ID NO: 15722 - protein, 9 aa, Homo sapiens
  Table A; HLA-B*56:01; ERBB3; V104M; 0
LPLPNLRMV

SEQ ID NO: 15723 - protein, 9 aa, Homo sapiens
  Table A; HLA-A*31:01; TPR; S2155L; 0
LPQVAGVPR

SEQ ID NO: 15724 - protein, 9 aa, Homo sapiens
  Table A; HLA-A*33:01; TPR; S2155L; 0
LPQVAGVPR

SEQ ID NO: 15725 - protein, 9 aa, Homo sapiens
  Table A; HLA-A*33:03; TPR; S2155L; 0
LPQVAGVPR

SEQ ID NO: 15726 - protein, 9 aa, Homo sapiens
  Table A; HLA-A*68:01; TPR; S2155L; 0
LPQVAGVPR

SEQ ID NO: 15727 - protein, 9 aa, Homo sapiens
  Table A; HLA-B*27:02; TPR; S2155L; 0
LPQVAGVPR

SEQ ID NO: 15728 - protein, 9 aa, Homo sapiens
  Table A; HLA-B*35:01; TPR; S2155L; 0
LPQVAGVPR

SEQ ID NO: 15729 - protein, 9 aa, Homo sapiens
  Table A; HLA-B*35:03; TPR; S2155L; 0
LPQVAGVPR

SEQ ID NO: 15730 - protein, 9 aa, Homo sapiens
  Table A; HLA-B*54:01; TPR; S2155L; 0
LPQVAGVPR

SEQ ID NO: 15731 - protein, 9 aa, Homo sapiens
  Table A; HLA-B*55:02; TPR; S2155L; 0
LPQVAGVPR

SEQ ID NO: 15732 - protein, 9 aa, Homo sapiens
  Table A; HLA-B*56:01; TPR; S2155L; 0
LPQVAGVPR

SEQ ID NO: 15733 - protein, 10 aa, Homo sapiens
  Table A; HLA-B*35:01; TPR; S2155L; 0
LPQVAGVPRF

SEQ ID NO: 15734 - protein, 10 aa, Homo sapiens
  Table A; HLA-B*51:01; BIRC6; G271R; 1
LPSARPELRV

SEQ ID NO: 15735 - protein, 10 aa, Homo sapiens
  Table A; HLA-B*54:01; BIRC6; G271R; 0
LPSARPELRV

SEQ ID NO: 15736 - protein, 10 aa, Homo sapiens
  Table A; HLA-A*02:01; PIK3CA; E453Q; 1
LQDLLNPIGV

SEQ ID NO: 15737 - protein, 9 aa, Homo sapiens
  Table A; HLA-B*15:01; EGFR; R108K; 1
LQIIKGNMY

SEQ ID NO: 15738 - protein, 9 aa, Homo sapiens
  Table A; HLA-B*15:03; EGFR; R108K; 0
LQIIKGNMY

SEQ ID NO: 15739 - protein, 8 aa, Homo sapiens
  Table A; HLA-B*15:10; TP53; R337L; 0
LQIRGREL

SEQ ID NO: 15740 - protein, 11 aa, Homo sapiens
  Table A; HLA-A*02:05; NFE2L2; E82D; 0
LQLDEETGDFL

SEQ ID NO: 15741 - protein, 11 aa, Homo sapiens
  Table A; HLA-A*02:06; NFE2L2; E82D; 0
LQLDEETGDFL

SEQ ID NO: 15742 - protein, 11 aa, Homo sapiens
  Table A; HLA-B*50:01; NFE2L2; E82D; 0
LQLDEETGDFL

SEQ ID NO: 15743 - protein, 10 aa, Homo sapiens
  Table A; HLA-B*15:01; NFE2L2; E79Q; 1
LQLDEQTGEF

SEQ ID NO: 15744 - protein, 10 aa, Homo sapiens
  Table A; HLA-B*39:01; NFE2L2; E79Q; 0
LQLDEQTGEF

SEQ ID NO: 15745 - protein, 11 aa, Homo sapiens
  Table A; HLA-A*02:05; NFE2L2; E79Q; 0
LQLDEQTGEFL

SEQ ID NO: 15746 - protein, 11 aa, Homo sapiens
  Table A; HLA-A*02:06; NFE2L2; E79Q; 0
LQLDEQTGEFL

SEQ ID NO: 15747 - protein, 11 aa, Homo sapiens
  Table A; HLA-B*50:01; NFE2L2; E79Q; 0
LQLDEQTGEFL

SEQ ID NO: 15748 - protein, 8 aa, Homo sapiens
  Table A; HLA-A*02:04; PIK3CA; R93Q; 0
LQLFQPFL

SEQ ID NO: 15749 - protein, 10 aa, Homo sapiens
  Table A; HLA-B*13:01; NFE2L2; D77G; 0
LQLGEETGEF

SEQ ID NO: 15750 - protein, 10 aa, Homo sapiens
  Table A; HLA-B*15:01; NFE2L2; D77G; 0
LQLGEETGEF

SEQ ID NO: 15751 - protein, 10 aa, Homo sapiens
  Table A; HLA-B*27:02; NFE2L2; D77G; 0
LQLGEETGEF

SEQ ID NO: 15752 - protein, 11 aa, Homo sapiens
  Table A; HLA-A*02:06; NFE2L2; D77G; 0
LQLGEETGEFL

SEQ ID NO: 15753 - protein, 11 aa, Homo sapiens
  Table A; HLA-B*50:01; NFE2L2; D77G; 0
LQLGEETGEFL

SEQ ID NO: 15754 - protein, 8 aa, Homo sapiens
  Table A; HLA-B*13:02; CREBBP; P2094L; 0
LQLMAAFI

SEQ ID NO: 15755 - protein, 9 aa, Homo sapiens
  Table A; HLA-B*57:01; SMARCA4; E920K; 0
LQNKLPKLW

SEQ ID NO: 15756 - protein, 9 aa, Homo sapiens
  Table A; HLA-B*15:01; RSPO2; R64Q; 0
LQREGMRQY

SEQ ID NO: 15757 - protein, 9 aa, Homo sapiens
  Table A; HLA-B*15:02; RSPO2; R64Q; 0
LQREGMRQY

SEQ ID NO: 15758 - protein, 9 aa, Homo sapiens
  Table A; HLA-B*15:03; RSPO2; R64Q; 0
LQREGMRQY

SEQ ID NO: 15759 - protein, 9 aa, Homo sapiens
  Table A; HLA-B*46:01; RSPO2; R64Q; 0
LQREGMRQY

SEQ ID NO: 15760 - protein, 9 aa, Homo sapiens
  Table A; HLA-C*08:01; RSPO2; R64Q; 0
LQREGMRQY

SEQ ID NO: 15761 - protein, 9 aa, Homo sapiens
  Table A; HLA-C*06:02; PIK3CA; E39K; 1
LRKATLVTI

SEQ ID NO: 15762 - protein, 8 aa, Homo sapiens
  Table A; HLA-B*39:06; CTNNB1; N387K; 0
LRKLSDAA

SEQ ID NO: 15763 - protein, 9 aa, Homo sapiens
  Table A; HLA-B*39:06; CTNNB1; N387K; 0
LRKLSDAAT

SEQ ID NO: 15764 - protein, 9 aa, Homo sapiens
  Table A; HLA-A*31:01; TP53; G266R; 0
LRRNSFEVR

SEQ ID NO: 15765 - protein, 8 aa, Homo sapiens
  Table A; HLA-B*27:05; PIK3CA; G1007R; 0
LRSGMPEL

SEQ ID NO: 15766 - protein, 8 aa, Homo sapiens
  Table A; HLA-C*07:02; PIK3CA; G1007R; 1
LRSGMPEL

SEQ ID NO: 15767 - protein, 9 aa, Homo sapiens
  Table A; HLA-B*14:01; BIRC6; G271R; 0
LRVGPGRSV

SEQ ID NO: 15768 - protein, 9 aa, Homo sapiens
  Table A; HLA-B*14:02; BIRC6; G271R; 0
LRVGPGRSV

SEQ ID NO: 15769 - protein, 9 aa, Homo sapiens
  Table A; HLA-B*15:10; BIRC6; G271R; 0
LRVGPGRSV

SEQ ID NO: 15770 - protein, 10 aa, Homo sapiens
  Table A; HLA-B*57:01; PTPRD; S431L; 0
LSLTTILVQW

SEQ ID NO: 15771 - protein, 10 aa, Homo sapiens
  Table A; HLA-C*03:04; SMARCA4; G1162S; 0
LSTRAGGLSL

SEQ ID NO: 15772 - protein, 9 aa, Homo sapiens
  Table A; HLA-A*02:01; CDKN2A; H83Y; 1
LTRPVYDAA

SEQ ID NO: 15773 - protein, 9 aa, Homo sapiens
  Table A; HLA-A*02:05; CDKN2A; H83Y; 0
LTRPVYDAA

SEQ ID NO: 15774 - protein, 9 aa, Homo sapiens
  Table A; HLA-A*02:08; CDKN2A; H83Y; 0
LTRPVYDAA

SEQ ID NO: 15775 - protein, 9 aa, Homo sapiens
  Table A; HLA-A*30:01; CDKN2A; H83Y; 0
LTRPVYDAA

SEQ ID NO: 15776 - protein, 9 aa, Homo sapiens
  Table A; HLA-A*68:02; CDKN2A; H83Y; 0
LTRPVYDAA

SEQ ID NO: 15777 - protein, 9 aa, Homo sapiens
  Table A; HLA-B*50:01; CDKN2A; H83Y; 0
LTRPVYDAA

SEQ ID NO: 15778 - protein, 9 aa, Homo sapiens
  Table A; HLA-B*54:01; CDKN2A; H83Y; 0
LTRPVYDAA

SEQ ID NO: 15779 - protein, 9 aa, Homo sapiens
  Table A; HLA-B*56:01; CDKN2A; H83Y; 0
LTRPVYDAA

SEQ ID NO: 15780 - protein, 9 aa, Homo sapiens
  Table A; HLA-B*57:01; CDKN2A; H83Y; 0
LTRPVYDAA

SEQ ID NO: 15781 - protein, 9 aa, Homo sapiens
  Table A; HLA-C*03:02; CDKN2A; H83Y; 0
LTRPVYDAA

SEQ ID NO: 15782 - protein, 10 aa, Homo sapiens
  Table A; HLA-A*31:01; CDKN2A; H83Y; 0
LTRPVYDAAR

SEQ ID NO: 15783 - protein, 9 aa, Homo sapiens
  Table A; HLA-A*31:01; TP53; I195T; 0
LTRVEGNLR

SEQ ID NO: 15784 - protein, 9 aa, Homo sapiens
  Table A; HLA-A*33:03; TP53; I195T; 0
LTRVEGNLR

SEQ ID NO: 15785 - protein, 9 aa, Homo sapiens
  Table A; HLA-A*68:02; RAF1; S257L; 0
LTSTPNVHM

SEQ ID NO: 15786 - protein, 9 aa, Homo sapiens
  Table A; HLA-B*58:01; RAF1; S257L; 0
LTSTPNVHM

SEQ ID NO: 15787 - protein, 10 aa, Homo sapiens
  Table A; HLA-A*02:08; RAF1; S257L; 0
LTSTPNVHMV

SEQ ID NO: 15788 - protein, 10 aa, Homo sapiens
  Table A; HLA-A*68:02; RAF1; S257L; 0
LTSTPNVHMV

SEQ ID NO: 15789 - protein, 8 aa, Homo sapiens
  Table A; HLA-B*57:01; PTPRD; S431L; 0
LTTILVQW

SEQ ID NO: 15790 - protein, 8 aa, Homo sapiens
  Table A; HLA-B*58:01; PTPRD; S431L; 0
LTTILVQW

SEQ ID NO: 15791 - protein, 8 aa, Homo sapiens
  Table A; HLA-A*02:01; SF3B1; K700E; 1
LVDEQQEV

SEQ ID NO: 15792 - protein, 8 aa, Homo sapiens
  Table A; HLA-A*02:06; SF3B1; K700E; 0
LVDEQQEV

SEQ ID NO: 15793 - protein, 8 aa, Homo sapiens
  Table A; HLA-A*02:07; SF3B1; K700E; 0
LVDEQQEV

SEQ ID NO: 15794 - protein, 8 aa, Homo sapiens
  Table A; HLA-B*13:02; SF3B1; K700E; 0
LVDEQQEV

SEQ ID NO: 15795 - protein, 8 aa, Homo sapiens
  Table A; HLA-B*48:01; SF3B1; K700E; 0
LVDEQQEV

SEQ ID NO: 15796 - protein, 8 aa, Homo sapiens
  Table A; HLA-C*05:01; SF3B1; K700E; 1
LVDEQQEV

SEQ ID NO: 15797 - protein, 8 aa, Homo sapiens
  Table A; HLA-C*08:02; SF3B1; K700E; 0
LVDEQQEV

SEQ ID NO: 15798 - protein, 9 aa, Homo sapiens
  Table A; HLA-A*02:07; SF3B1; K700E; 0
LVDEQQEVR

SEQ ID NO: 15799 - protein, 9 aa, Homo sapiens
  Table A; HLA-A*11:01; SF3B1; K700E; 1
LVDEQQEVR

SEQ ID NO: 15800 - protein, 9 aa, Homo sapiens
  Table A; HLA-A*26:03; SF3B1; K700E; 0
LVDEQQEVR

SEQ ID NO: 15801 - protein, 9 aa, Homo sapiens
  Table A; HLA-A*31:01; SF3B1; K700E; 0
LVDEQQEVR

SEQ ID NO: 15802 - protein, 9 aa, Homo sapiens
  Table A; HLA-A*33:03; SF3B1; K700E; 0
LVDEQQEVR

SEQ ID NO: 15803 - protein, 9 aa, Homo sapiens
  Table A; HLA-A*68:01; SF3B1; K700E; 0
LVDEQQEVR

SEQ ID NO: 15804 - protein, 9 aa, Homo sapiens
  Table A; HLA-A*68:02; SF3B1; K700E; 0
LVDEQQEVR

SEQ ID NO: 15805 - protein, 9 aa, Homo sapiens
  Table A; HLA-B*27:02; SF3B1; K700E; 0
LVDEQQEVR

SEQ ID NO: 15806 - protein, 9 aa, Homo sapiens
  Table A; HLA-B*35:01; SF3B1; K700E; 1
LVDEQQEVR

SEQ ID NO: 15807 - protein, 9 aa, Homo sapiens
  Table A; HLA-B*35:02; SF3B1; K700E; 0
LVDEQQEVR

SEQ ID NO: 15808 - protein, 9 aa, Homo sapiens
  Table A; HLA-B*35:08; SF3B1; K700E; 0
LVDEQQEVR

SEQ ID NO: 15809 - protein, 9 aa, Homo sapiens
  Table A; HLA-B*35:12; SF3B1; K700E; 0
LVDEQQEVR

SEQ ID NO: 15810 - protein, 9 aa, Homo sapiens
  Table A; HLA-B*48:01; SF3B1; K700E; 0
LVDEQQEVR

SEQ ID NO: 15811 - protein, 9 aa, Homo sapiens
  Table A; HLA-C*08:02; SF3B1; K700E; 0
LVDEQQEVR

SEQ ID NO: 15812 - protein, 10 aa, Homo sapiens
  Table A; HLA-C*08:03; SF3B1; K700E; 0
LVDEQQEVRT

SEQ ID NO: 15813 - protein, 11 aa, Homo sapiens
  Table A; HLA-A*02:07; SF3B1; K700E; 0
LVDEQQEVRTI

SEQ ID NO: 15814 - protein, 11 aa, Homo sapiens
  Table A; HLA-B*38:01; SF3B1; K700E; 0
LVDEQQEVRTI

SEQ ID NO: 15815 - protein, 8 aa, Homo sapiens
  Table A; HLA-A*02:07; CDKN2A; P114L; 0
LVDLAEEL

SEQ ID NO: 15816 - protein, 8 aa, Homo sapiens
  Table A; HLA-B*15:02; CDKN2A; P114L; 0
LVDLAEEL

SEQ ID NO: 15817 - protein, 8 aa, Homo sapiens
  Table A; HLA-B*35:02; CDKN2A; P114L; 0
LVDLAEEL

SEQ ID NO: 15818 - protein, 8 aa, Homo sapiens
  Table A; HLA-B*35:03; CDKN2A; P114L; 0
LVDLAEEL

SEQ ID NO: 15819 - protein, 8 aa, Homo sapiens
  Table A; HLA-B*35:08; CDKN2A; P114L; 0
LVDLAEEL

SEQ ID NO: 15820 - protein, 8 aa, Homo sapiens
  Table A; HLA-B*35:12; CDKN2A; P114L; 0
LVDLAEEL

SEQ ID NO: 15821 - protein, 8 aa, Homo sapiens
  Table A; HLA-B*39:01; CDKN2A; P114L; 0
LVDLAEEL

SEQ ID NO: 15822 - protein, 8 aa, Homo sapiens
  Table A; HLA-C*03:04; CDKN2A; P114L; 1
LVDLAEEL

SEQ ID NO: 15823 - protein, 8 aa, Homo sapiens
  Table A; HLA-C*04:01; CDKN2A; P114L; 1
LVDLAEEL

SEQ ID NO: 15824 - protein, 8 aa, Homo sapiens
  Table A; HLA-C*05:01; CDKN2A; P114L; 1
LVDLAEEL

SEQ ID NO: 15825 - protein, 8 aa, Homo sapiens
  Table A; HLA-C*08:01; CDKN2A; P114L; 0
LVDLAEEL

SEQ ID NO: 15826 - protein, 8 aa, Homo sapiens
  Table A; HLA-C*08:02; CDKN2A; P114L; 1
LVDLAEEL

SEQ ID NO: 15827 - protein, 8 aa, Homo sapiens
  Table A; HLA-C*17:01; CDKN2A; P114L; 0
LVDLAEEL

SEQ ID NO: 15828 - protein, 8 aa, Homo sapiens
  Table A; HLA-C*17:01; TRRAP; S722F; 0
LVFGSVFL

SEQ ID NO: 15829 - protein, 9 aa, Homo sapiens
  Table A; HLA-A*02:04; TRRAP; S722F; 0
LVFGSVFLF

SEQ ID NO: 15830 - protein, 9 aa, Homo sapiens
  Table A; HLA-A*29:02; TRRAP; S722F; 0
LVFGSVFLF

SEQ ID NO: 15831 - protein, 9 aa, Homo sapiens
  Table A; HLA-B*57:01; TRRAP; S722F; 0
LVFGSVFLF

SEQ ID NO: 15832 - protein, 9 aa, Homo sapiens
  Table A; HLA-C*02:02; TRRAP; S722F; 0
LVFGSVFLF

SEQ ID NO: 15833 - protein, 9 aa, Homo sapiens
  Table A; HLA-C*17:01; TRRAP; S722F; 0
LVFGSVFLF

SEQ ID NO: 15834 - protein, 10 aa, Homo sapiens
  Table A; HLA-A*02:03; TRRAP; S722F; 0
LVFGSVFLFA

SEQ ID NO: 15835 - protein, 10 aa, Homo sapiens
  Table A; HLA-A*68:02; TRRAP; S722F; 0
LVFGSVFLFA

SEQ ID NO: 15836 - protein, 10 aa, Homo sapiens
  Table A; HLA-B*54:01; TRRAP; S722F; 0
LVFGSVFLFA

SEQ ID NO: 15837 - protein, 11 aa, Homo sapiens
  Table A; HLA-B*54:01; TRRAP; S722F; 0
LVFGSVFLFAA

SEQ ID NO: 15838 - protein, 11 aa, Homo sapiens
  Table A; HLA-A*68:02; ACSL3; R232Q; 0
LVPRLQHIITV

SEQ ID NO: 15839 - protein, 9 aa, Homo sapiens
  Table A; HLA-B*07:02; HIST1H3B; E74K; 1
LVRKIAQDF

SEQ ID NO: 15840 - protein, 9 aa, Homo sapiens
  Table A; HLA-B*15:01; HIST1H3B; E74K; 0
LVRKIAQDF

SEQ ID NO: 15841 - protein, 9 aa, Homo sapiens
  Table A; HLA-B*15:02; HIST1H3B; E74K; 0
LVRKIAQDF

SEQ ID NO: 15842 - protein, 9 aa, Homo sapiens
  Table A; HLA-B*57:01; HIST1H3B; E74K; 0
LVRKIAQDF

SEQ ID NO: 15843 - protein, 9 aa, Homo sapiens
  Table A; HLA-C*02:02; HIST1H3B; E74K; 0
LVRKIAQDF

SEQ ID NO: 15844 - protein, 10 aa, Homo sapiens
  Table A; HLA-A*03:01; HIST1H3B; E74K; 1
LVRKIAQDFK

SEQ ID NO: 15845 - protein, 8 aa, Homo sapiens
  Table A; HLA-A*02:03; TP53; G266V; 0
LVRNSFEV

SEQ ID NO: 15846 - protein, 8 aa, Homo sapiens
  Table A; HLA-B*54:01; TP53; G266V; 0
LVRNSFEV

SEQ ID NO: 15847 - protein, 9 aa, Homo sapiens
  Table A; HLA-A*31:01; TP53; G266V; 0
LVRNSFEVR

SEQ ID NO: 15848 - protein, 9 aa, Homo sapiens
  Table A; HLA-A*33:01; TP53; G266V; 0
LVRNSFEVR

SEQ ID NO: 15849 - protein, 9 aa, Homo sapiens
  Table A; HLA-A*33:03; TP53; G266V; 0
LVRNSFEVR

SEQ ID NO: 15850 - protein, 8 aa, Homo sapiens
  Table A; HLA-A*26:01; CTNNB1; D32V; 1
LVSGIHSG

SEQ ID NO: 15851 - protein, 9 aa, Homo sapiens
  Table A; HLA-A*02:03; CTNNB1; D32V; 0
LVSGIHSGA

SEQ ID NO: 15852 - protein, 9 aa, Homo sapiens
  Table A; HLA-A*02:05; CTNNB1; D32V; 0
LVSGIHSGA

SEQ ID NO: 15853 - protein, 9 aa, Homo sapiens
  Table A; HLA-A*02:06; CTNNB1; D32V; 0
LVSGIHSGA

SEQ ID NO: 15854 - protein, 9 aa, Homo sapiens
  Table A; HLA-A*02:07; CTNNB1; D32V; 0
LVSGIHSGA

SEQ ID NO: 15855 - protein, 9 aa, Homo sapiens
  Table A; HLA-A*02:08; CTNNB1; D32V; 0
LVSGIHSGA

SEQ ID NO: 15856 - protein, 9 aa, Homo sapiens
  Table A; HLA-A*26:03; CTNNB1; D32V; 0
LVSGIHSGA

SEQ ID NO: 15857 - protein, 9 aa, Homo sapiens
  Table A; HLA-A*30:01; CTNNB1; D32V; 0
LVSGIHSGA

SEQ ID NO: 15858 - protein, 9 aa, Homo sapiens
  Table A; HLA-A*31:01; CTNNB1; D32V; 1
LVSGIHSGA

SEQ ID NO: 15859 - protein, 9 aa, Homo sapiens
  Table A; HLA-A*33:03; CTNNB1; D32V; 0
LVSGIHSGA

SEQ ID NO: 15860 - protein, 9 aa, Homo sapiens
  Table A; HLA-A*68:01; CTNNB1; D32V; 1
LVSGIHSGA

SEQ ID NO: 15861 - protein, 9 aa, Homo sapiens
  Table A; HLA-A*68:02; CTNNB1; D32V; 0
LVSGIHSGA

SEQ ID NO: 15862 - protein, 9 aa, Homo sapiens
  Table A; HLA-B*13:02; CTNNB1; D32V; 1
LVSGIHSGA

SEQ ID NO: 15863 - protein, 9 aa, Homo sapiens
  Table A; HLA-B*15:01; CTNNB1; D32V; 1
LVSGIHSGA

SEQ ID NO: 15864 - protein, 9 aa, Homo sapiens
  Table A; HLA-B*39:06; CTNNB1; D32V; 0
LVSGIHSGA

SEQ ID NO: 15865 - protein, 9 aa, Homo sapiens
  Table A; HLA-B*50:01; CTNNB1; D32V; 0
LVSGIHSGA

SEQ ID NO: 15866 - protein, 9 aa, Homo sapiens
  Table A; HLA-B*54:01; CTNNB1; D32V; 0
LVSGIHSGA

SEQ ID NO: 15867 - protein, 9 aa, Homo sapiens
  Table A; HLA-B*55:01; CTNNB1; D32V; 0
LVSGIHSGA

SEQ ID NO: 15868 - protein, 9 aa, Homo sapiens
  Table A; HLA-B*56:01; CTNNB1; D32V; 0
LVSGIHSGA

SEQ ID NO: 15869 - protein, 10 aa, Homo sapiens
  Table A; HLA-A*02:03; CTNNB1; D32V; 0
LVSGIHSGAT

SEQ ID NO: 15870 - protein, 10 aa, Homo sapiens
  Table A; HLA-A*03:02; CTNNB1; D32V; 0
LVSGIHSGAT

SEQ ID NO: 15871 - protein, 10 aa, Homo sapiens
  Table A; HLA-A*26:01; CTNNB1; D32V; 1
LVSGIHSGAT

SEQ ID NO: 15872 - protein, 10 aa, Homo sapiens
  Table A; HLA-A*68:01; CTNNB1; D32V; 1
LVSGIHSGAT

SEQ ID NO: 15873 - protein, 10 aa, Homo sapiens
  Table A; HLA-A*68:02; CTNNB1; D32V; 0
LVSGIHSGAT

SEQ ID NO: 15874 - protein, 10 aa, Homo sapiens
  Table A; HLA-B*39:01; CTNNB1; D32V; 0
LVSGIHSGAT

SEQ ID NO: 15875 - protein, 10 aa, Homo sapiens
  Table A; HLA-B*48:01; CTNNB1; D32V; 0
LVSGIHSGAT

SEQ ID NO: 15876 - protein, 10 aa, Homo sapiens
  Table A; HLA-C*08:03; CTNNB1; D32V; 0
LVSGIHSGAT

SEQ ID NO: 15877 - protein, 11 aa, Homo sapiens
  Table A; HLA-A*68:02; CTNNB1; D32V; 0
LVSGIHSGATT

SEQ ID NO: 15878 - protein, 10 aa, Homo sapiens
  Table A; HLA-A*02:08; AR; F814V; 0
LVSIIPVDGL

SEQ ID NO: 15879 - protein, 10 aa, Homo sapiens
  Table A; HLA-A*68:02; AR; F814V; 0
LVSIIPVDGL

SEQ ID NO: 15880 - protein, 9 aa, Homo sapiens
  Table A; HLA-A*02:01; KRAS; G12A; 1
LVVVGAAGV

SEQ ID NO: 15881 - protein, 9 aa, Homo sapiens
  Table A; HLA-A*02:03; KRAS; G12A; 0
LVVVGAAGV

SEQ ID NO: 15882 - protein, 9 aa, Homo sapiens
  Table A; HLA-A*02:05; KRAS; G12A; 0
LVVVGAAGV

SEQ ID NO: 15883 - protein, 9 aa, Homo sapiens
  Table A; HLA-A*02:06; KRAS; G12A; 0
LVVVGAAGV

SEQ ID NO: 15884 - protein, 9 aa, Homo sapiens
  Table A; HLA-A*68:02; KRAS; G12A; 0
LVVVGAAGV

SEQ ID NO: 15885 - protein, 9 aa, Homo sapiens
  Table A; HLA-B*50:01; KRAS; G12A; 0
LVVVGAAGV

SEQ ID NO: 15886 - protein, 11 aa, Homo sapiens
  Table A; HLA-A*03:01; KRAS; G12A; 1
LVVVGAAGVGK

SEQ ID NO: 15887 - protein, 11 aa, Homo sapiens
  Table A; HLA-A*03:02; KRAS; G12A; 0
LVVVGAAGVGK

SEQ ID NO: 15888 - protein, 11 aa, Homo sapiens
  Table A; HLA-A*11:01; KRAS; G12A; 1
LVVVGAAGVGK

SEQ ID NO: 15889 - protein, 11 aa, Homo sapiens
  Table A; HLA-A*68:01; KRAS; G12A; 1
LVVVGAAGVGK

SEQ ID NO: 15890 - protein, 11 aa, Homo sapiens
  Table A; HLA-B*27:02; KRAS; G12A; 0
LVVVGAAGVGK

SEQ ID NO: 15891 - protein, 9 aa, Homo sapiens
  Table A; HLA-A*02:06; KRAS; G12C; 0
LVVVGACGV

SEQ ID NO: 15892 - protein, 9 aa, Homo sapiens
  Table A; HLA-A*02:01; NRAS; G12C; 1
LVVVGACGV

SEQ ID NO: 15893 - protein, 9 aa, Homo sapiens
  Table A; HLA-A*02:06; NRAS; G12C; 0
LVVVGACGV

SEQ ID NO: 15894 - protein, 11 aa, Homo sapiens
  Table A; HLA-A*03:01; KRAS; G12C; 1
LVVVGACGVGK

SEQ ID NO: 15895 - protein, 11 aa, Homo sapiens
  Table A; HLA-A*03:02; KRAS; G12C; 0
LVVVGACGVGK

SEQ ID NO: 15896 - protein, 11 aa, Homo sapiens
  Table A; HLA-A*11:01; KRAS; G12C; 1
LVVVGACGVGK

SEQ ID NO: 15897 - protein, 11 aa, Homo sapiens
  Table A; HLA-B*27:02; KRAS; G12C; 0
LVVVGACGVGK

SEQ ID NO: 15898 - protein, 11 aa, Homo sapiens
  Table A; HLA-A*03:01; NRAS; G12C; 1
LVVVGACGVGK

SEQ ID NO: 15899 - protein, 11 aa, Homo sapiens
  Table A; HLA-A*03:02; NRAS; G12C; 0
LVVVGACGVGK

SEQ ID NO: 15900 - protein, 11 aa, Homo sapiens
  Table A; HLA-A*11:01; NRAS; G12C; 0
LVVVGACGVGK

SEQ ID NO: 15901 - protein, 11 aa, Homo sapiens
  Table A; HLA-B*27:02; NRAS; G12C; 0
LVVVGACGVGK

SEQ ID NO: 15902 - protein, 9 aa, Homo sapiens
  Table A; HLA-A*02:05; KRAS; G12D; 1
LVVVGADGV

SEQ ID NO: 15903 - protein, 9 aa, Homo sapiens
  Table A; HLA-A*02:06; KRAS; G12D; 1
LVVVGADGV

SEQ ID NO: 15904 - protein, 9 aa, Homo sapiens
  Table A; HLA-A*02:05; NRAS; G12D; 0
LVVVGADGV

SEQ ID NO: 15905 - protein, 9 aa, Homo sapiens
  Table A; HLA-A*02:06; NRAS; G12D; 0
LVVVGADGV

SEQ ID NO: 15906 - protein, 9 aa, Homo sapiens
  Table A; HLA-A*02:08; NRAS; G12D; 0
LVVVGADGV

SEQ ID NO: 15907 - protein, 11 aa, Homo sapiens
  Table A; HLA-A*03:02; KRAS; G12D; 1
LVVVGADGVGK

SEQ ID NO: 15908 - protein, 11 aa, Homo sapiens
  Table A; HLA-A*11:01; KRAS; G12D; 1
LVVVGADGVGK

SEQ ID NO: 15909 - protein, 11 aa, Homo sapiens
  Table A; HLA-A*68:01; KRAS; G12D; 1
LVVVGADGVGK

SEQ ID NO: 15910 - protein, 11 aa, Homo sapiens
  Table A; HLA-B*27:02; KRAS; G12D; 1
LVVVGADGVGK

SEQ ID NO: 15911 - protein, 11 aa, Homo sapiens
  Table A; HLA-A*03:01; NRAS; G12D; 1
LVVVGADGVGK

SEQ ID NO: 15912 - protein, 11 aa, Homo sapiens
  Table A; HLA-A*03:02; NRAS; G12D; 0
LVVVGADGVGK

SEQ ID NO: 15913 - protein, 11 aa, Homo sapiens
  Table A; HLA-A*11:01; NRAS; G12D; 1
LVVVGADGVGK

SEQ ID NO: 15914 - protein, 11 aa, Homo sapiens
  Table A; HLA-A*68:01; NRAS; G12D; 0
LVVVGADGVGK

SEQ ID NO: 15915 - protein, 11 aa, Homo sapiens
  Table A; HLA-B*27:02; NRAS; G12D; 0
LVVVGADGVGK

SEQ ID NO: 15916 - protein, 11 aa, Homo sapiens
  Table A; HLA-A*03:02; KRAS; G13D; 0
LVVVGAGDVGK

SEQ ID NO: 15917 - protein, 11 aa, Homo sapiens
  Table A; HLA-A*11:01; KRAS; G13D; 1
LVVVGAGDVGK

SEQ ID NO: 15918 - protein, 11 aa, Homo sapiens
  Table A; HLA-A*68:01; KRAS; G13D; 1
LVVVGAGDVGK

SEQ ID NO: 15919 - protein, 11 aa, Homo sapiens
  Table A; HLA-B*27:02; KRAS; G13D; 0
LVVVGAGDVGK

SEQ ID NO: 15920 - protein, 8 aa, Homo sapiens
  Table A; HLA-A*68:01; NRAS; G13R; 0
LVVVGAGR

SEQ ID NO: 15921 - protein, 11 aa, Homo sapiens
  Table A; HLA-A*03:02; NRAS; G13R; 0
LVVVGAGRVGK

SEQ ID NO: 15922 - protein, 11 aa, Homo sapiens
  Table A; HLA-A*11:01; NRAS; G13R; 0
LVVVGAGRVGK

SEQ ID NO: 15923 - protein, 11 aa, Homo sapiens
  Table A; HLA-A*68:01; NRAS; G13R; 0
LVVVGAGRVGK

SEQ ID NO: 15924 - protein, 9 aa, Homo sapiens
  Table A; HLA-A*02:03; KRAS; G12R; 0
LVVVGARGV

SEQ ID NO: 15925 - protein, 9 aa, Homo sapiens
  Table A; HLA-A*02:08; KRAS; G12R; 0
LVVVGARGV

SEQ ID NO: 15926 - protein, 9 aa, Homo sapiens
  Table A; HLA-A*02:03; KRAS; G12S; 0
LVVVGASGV

SEQ ID NO: 15927 - protein, 9 aa, Homo sapiens
  Table A; HLA-A*02:05; KRAS; G12S; 0
LVVVGASGV

SEQ ID NO: 15928 - protein, 9 aa, Homo sapiens
  Table A; HLA-A*02:06; KRAS; G12S; 0
LVVVGASGV

SEQ ID NO: 15929 - protein, 11 aa, Homo sapiens
  Table A; HLA-A*03:01; KRAS; G12S; 1
LVVVGASGVGK

SEQ ID NO: 15930 - protein, 11 aa, Homo sapiens
  Table A; HLA-A*03:02; KRAS; G12S; 0
LVVVGASGVGK

SEQ ID NO: 15931 - protein, 11 aa, Homo sapiens
  Table A; HLA-A*11:01; KRAS; G12S; 1
LVVVGASGVGK

SEQ ID NO: 15932 - protein, 11 aa, Homo sapiens
  Table A; HLA-A*68:01; KRAS; G12S; 0
LVVVGASGVGK

SEQ ID NO: 15933 - protein, 11 aa, Homo sapiens
  Table A; HLA-B*27:02; KRAS; G12S; 0
LVVVGASGVGK

SEQ ID NO: 15934 - protein, 9 aa, Homo sapiens
  Table A; HLA-A*02:01; KRAS; G12V; 1
LVVVGAVGV

SEQ ID NO: 15935 - protein, 9 aa, Homo sapiens
  Table A; HLA-A*02:03; KRAS; G12V; 0
LVVVGAVGV

SEQ ID NO: 15936 - protein, 9 aa, Homo sapiens
  Table A; HLA-A*02:05; KRAS; G12V; 1
LVVVGAVGV

SEQ ID NO: 15937 - protein, 9 aa, Homo sapiens
  Table A; HLA-A*02:06; KRAS; G12V; 1
LVVVGAVGV

SEQ ID NO: 15938 - protein, 9 aa, Homo sapiens
  Table A; HLA-A*68:02; KRAS; G12V; 1
LVVVGAVGV

SEQ ID NO: 15939 - protein, 9 aa, Homo sapiens
  Table A; HLA-B*13:02; KRAS; G12V; 1
LVVVGAVGV

SEQ ID NO: 15940 - protein, 11 aa, Homo sapiens
  Table A; HLA-A*03:01; KRAS; G12V; 1
LVVVGAVGVGK

SEQ ID NO: 15941 - protein, 11 aa, Homo sapiens
  Table A; HLA-A*03:02; KRAS; G12V; 1
LVVVGAVGVGK

SEQ ID NO: 15942 - protein, 11 aa, Homo sapiens
  Table A; HLA-A*11:01; KRAS; G12V; 1
LVVVGAVGVGK

SEQ ID NO: 15943 - protein, 11 aa, Homo sapiens
  Table A; HLA-A*68:01; KRAS; G12V; 1
LVVVGAVGVGK

SEQ ID NO: 15944 - protein, 11 aa, Homo sapiens
  Table A; HLA-B*27:02; KRAS; G12V; 1
LVVVGAVGVGK

SEQ ID NO: 15945 - protein, 8 aa, Homo sapiens
  Table A; HLA-A*03:01; CNBD1; L396P; 1
LVYMGKPK

SEQ ID NO: 15946 - protein, 10 aa, Homo sapiens
  Table A; HLA-A*03:01; CNBD1; L396P; 1
LVYMGKPKEK

SEQ ID NO: 15947 - protein, 10 aa, Homo sapiens
  Table A; HLA-A*03:02; CNBD1; L396P; 0
LVYMGKPKEK

SEQ ID NO: 15948 - protein, 10 aa, Homo sapiens
  Table A; HLA-A*11:01; CNBD1; L396P; 1
LVYMGKPKEK

SEQ ID NO: 15949 - protein, 10 aa, Homo sapiens
  Table A; HLA-A*68:01; CNBD1; L396P; 0
LVYMGKPKEK

SEQ ID NO: 15950 - protein, 9 aa, Homo sapiens
  Table A; HLA-A*23:01; KEAP1; G480W; 0
LYAVGGFDW

SEQ ID NO: 15951 - protein, 9 aa, Homo sapiens
  Table A; HLA-A*24:02; KEAP1; G480W; 1
LYAVGGFDW

SEQ ID NO: 15952 - protein, 8 aa, Homo sapiens
  Table A; HLA-A*31:01; CTNNB1; D32Y; 0
LYSGIHSG

SEQ ID NO: 15953 - protein, 8 aa, Homo sapiens
  Table A; HLA-A*33:03; CTNNB1; D32Y; 0
LYSGIHSG

SEQ ID NO: 15954 - protein, 9 aa, Homo sapiens
  Table A; HLA-A*02:03; CTNNB1; D32Y; 0
LYSGIHSGA

SEQ ID NO: 15955 - protein, 9 aa, Homo sapiens
  Table A; HLA-A*02:05; CTNNB1; D32Y; 0
LYSGIHSGA

SEQ ID NO: 15956 - protein, 9 aa, Homo sapiens
  Table A; HLA-A*29:02; CTNNB1; D32Y; 1
LYSGIHSGA

SEQ ID NO: 15957 - protein, 9 aa, Homo sapiens
  Table A; HLA-A*30:01; CTNNB1; D32Y; 0
LYSGIHSGA

SEQ ID NO: 15958 - protein, 9 aa, Homo sapiens
  Table A; HLA-A*31:01; CTNNB1; D32Y; 0
LYSGIHSGA

SEQ ID NO: 15959 - protein, 9 aa, Homo sapiens
  Table A; HLA-A*33:03; CTNNB1; D32Y; 0
LYSGIHSGA

SEQ ID NO: 15960 - protein, 9 aa, Homo sapiens
  Table A; HLA-A*68:02; CTNNB1; D32Y; 0
LYSGIHSGA

SEQ ID NO: 15961 - protein, 9 aa, Homo sapiens
  Table A; HLA-B*07:02; CTNNB1; D32Y; 1
LYSGIHSGA

SEQ ID NO: 15962 - protein, 9 aa, Homo sapiens
  Table A; HLA-B*39:06; CTNNB1; D32Y; 0
LYSGIHSGA

SEQ ID NO: 15963 - protein, 9 aa, Homo sapiens
  Table A; HLA-B*48:01; CTNNB1; D32Y; 0
LYSGIHSGA

SEQ ID NO: 15964 - protein, 9 aa, Homo sapiens
  Table A; HLA-B*50:01; CTNNB1; D32Y; 0
LYSGIHSGA

SEQ ID NO: 15965 - protein, 9 aa, Homo sapiens
  Table A; HLA-B*54:01; CTNNB1; D32Y; 0
LYSGIHSGA

SEQ ID NO: 15966 - protein, 9 aa, Homo sapiens
  Table A; HLA-C*14:02; CTNNB1; D32Y; 0
LYSGIHSGA

SEQ ID NO: 15967 - protein, 9 aa, Homo sapiens
  Table A; HLA-C*14:03; CTNNB1; D32Y; 0
LYSGIHSGA

SEQ ID NO: 15968 - protein, 10 aa, Homo sapiens
  Table A; HLA-A*02:01; CTNNB1; D32Y; 1
LYSGIHSGAT

SEQ ID NO: 15969 - protein, 10 aa, Homo sapiens
  Table A; HLA-A*29:02; CTNNB1; D32Y; 1
LYSGIHSGAT

SEQ ID NO: 15970 - protein, 10 aa, Homo sapiens
  Table A; HLA-A*68:02; CTNNB1; D32Y; 0
LYSGIHSGAT

SEQ ID NO: 15971 - protein, 10 aa, Homo sapiens
  Table A; HLA-B*08:01; CTNNB1; D32Y; 1
LYSGIHSGAT

SEQ ID NO: 15972 - protein, 10 aa, Homo sapiens
  Table A; HLA-B*27:05; CTNNB1; D32Y; 1
LYSGIHSGAT

SEQ ID NO: 15973 - protein, 10 aa, Homo sapiens
  Table A; HLA-B*48:01; CTNNB1; D32Y; 0
LYSGIHSGAT

SEQ ID NO: 15974 - protein, 8 aa, Homo sapiens
  Table A; HLA-B*37:01; PIK3R1; N564D; 0
MDSIKPDL

SEQ ID NO: 15975 - protein, 8 aa, Homo sapiens
  Table A; HLA-B*40:02; PIK3R1; N564D; 0
MDSIKPDL

SEQ ID NO: 15976 - protein, 8 aa, Homo sapiens
  Table A; HLA-B*41:02; PIK3R1; N564D; 0
MDSIKPDL

SEQ ID NO: 15977 - protein, 9 aa, Homo sapiens
  Table A; HLA-A*23:01; CDH1; D254Y; 0
MEILITVTY

SEQ ID NO: 15978 - protein, 9 aa, Homo sapiens
  Table A; HLA-B*15:01; CDH1; D254Y; 1
MEILITVTY

SEQ ID NO: 15979 - protein, 9 aa, Homo sapiens
  Table A; HLA-B*15:02; CDH1; D254Y; 0
MEILITVTY

SEQ ID NO: 15980 - protein, 9 aa, Homo sapiens
  Table A; HLA-B*18:01; CDH1; D254Y; 0
MEILITVTY

SEQ ID NO: 15981 - protein, 9 aa, Homo sapiens
  Table A; HLA-B*41:02; CDH1; D254Y; 0
MEILITVTY

SEQ ID NO: 15982 - protein, 9 aa, Homo sapiens
  Table A; HLA-B*44:02; CDH1; D254Y; 1
MEILITVTY

SEQ ID NO: 15983 - protein, 9 aa, Homo sapiens
  Table A; HLA-B*44:03; CDH1; D254Y; 0
MEILITVTY

SEQ ID NO: 15984 - protein, 9 aa, Homo sapiens
  Table A; HLA-B*44:05; CDH1; D254Y; 0
MEILITVTY

SEQ ID NO: 15985 - protein, 9 aa, Homo sapiens
  Table A; HLA-C*03:02; CDH1; D254Y; 0
MEILITVTY

SEQ ID NO: 15986 - protein, 9 aa, Homo sapiens
  Table A; HLA-C*08:01; CDH1; D254Y; 0
MEILITVTY

SEQ ID NO: 15987 - protein, 9 aa, Homo sapiens
  Table A; HLA-A*23:01; SPOP; R121Q; 0
MESQQAYRF

SEQ ID NO: 15988 - protein, 9 aa, Homo sapiens
  Table A; HLA-A*30:01; SPOP; R121Q; 0
MESQQAYRF

SEQ ID NO: 15989 - protein, 9 aa, Homo sapiens
  Table A; HLA-B*18:01; SPOP; R121Q; 1
MESQQAYRF

SEQ ID NO: 15990 - protein, 9 aa, Homo sapiens
  Table A; HLA-B*37:01; SPOP; R121Q; 0
MESQQAYRF

SEQ ID NO: 15991 - protein, 9 aa, Homo sapiens
  Table A; HLA-B*40:01; SPOP; R121Q; 1
MESQQAYRF

SEQ ID NO: 15992 - protein, 9 aa, Homo sapiens
  Table A; HLA-B*40:02; SPOP; R121Q; 0
MESQQAYRF

SEQ ID NO: 15993 - protein, 9 aa, Homo sapiens
  Table A; HLA-B*41:02; SPOP; R121Q; 0
MESQQAYRF

SEQ ID NO: 15994 - protein, 9 aa, Homo sapiens
  Table A; HLA-B*44:02; SPOP; R121Q; 1
MESQQAYRF

SEQ ID NO: 15995 - protein, 9 aa, Homo sapiens
  Table A; HLA-B*44:03; SPOP; R121Q; 1
MESQQAYRF

SEQ ID NO: 15996 - protein, 9 aa, Homo sapiens
  Table A; HLA-B*44:05; SPOP; R121Q; 0
MESQQAYRF

SEQ ID NO: 15997 - protein, 9 aa, Homo sapiens
  Table A; HLA-B*58:01; SPOP; R121Q; 0
MESQQAYRF

SEQ ID NO: 15998 - protein, 9 aa, Homo sapiens
  Table A; HLA-C*16:04; SPOP; R121Q; 0
MESQQAYRF

SEQ ID NO: 15999 - protein, 9 aa, Homo sapiens
  Table A; HLA-A*29:02; TP53; C141Y; 0
MFCQLAKTY

SEQ ID NO: 16000 - protein, 8 aa, Homo sapiens
  Table A; HLA-B*39:01; PIK3CA; H1047L; 0
MKQMNDAL

SEQ ID NO: 16001 - protein, 8 aa, Homo sapiens
  Table A; HLA-B*48:01; PIK3CA; H1047L; 0
MKQMNDAL

SEQ ID NO: 16002 - protein, 8 aa, Homo sapiens
  Table A; HLA-B*39:01; PIK3CA; H1047Y; 0
MKQMNDAY

SEQ ID NO: 16003 - protein, 9 aa, Homo sapiens
  Table A; HLA-A*02:01; PIK3CA; G1007R; 1
MLRSGMPEL

SEQ ID NO: 16004 - protein, 9 aa, Homo sapiens
  Table A; HLA-A*02:03; PIK3CA; G1007R; 0
MLRSGMPEL

SEQ ID NO: 16005 - protein, 9 aa, Homo sapiens
  Table A; HLA-A*02:04; PIK3CA; G1007R; 0
MLRSGMPEL

SEQ ID NO: 16006 - protein, 9 aa, Homo sapiens
  Table A; HLA-A*30:01; PIK3CA; G1007R; 0
MLRSGMPEL

SEQ ID NO: 16007 - protein, 9 aa, Homo sapiens
  Table A; HLA-B*07:02; PIK3CA; G1007R; 1
MLRSGMPEL

SEQ ID NO: 16008 - protein, 9 aa, Homo sapiens
  Table A; HLA-B*15:02; PIK3CA; G1007R; 0
MLRSGMPEL

SEQ ID NO: 16009 - protein, 9 aa, Homo sapiens
  Table A; HLA-B*15:10; PIK3CA; G1007R; 0
MLRSGMPEL

SEQ ID NO: 16010 - protein, 9 aa, Homo sapiens
  Table A; HLA-C*08:01; PIK3CA; G1007R; 0
MLRSGMPEL

SEQ ID NO: 16011 - protein, 10 aa, Homo sapiens
  Table A; HLA-A*02:04; PIK3CA; G1007R; 0
MMLRSGMPEL

SEQ ID NO: 16012 - protein, 9 aa, Homo sapiens
  Table A; HLA-A*29:01; MTOR; E1799K; 0
MNFKAVLHY

SEQ ID NO: 16013 - protein, 9 aa, Homo sapiens
  Table A; HLA-A*29:02; MTOR; E1799K; 1
MNFKAVLHY

SEQ ID NO: 16014 - protein, 9 aa, Homo sapiens
  Table A; HLA-C*15:02; TP53; R248Q; 0
MNQRPILTI

SEQ ID NO: 16015 - protein, 8 aa, Homo sapiens
  Table A; HLA-B*54:01; TP53; R249M; 0
MPILTIIT

SEQ ID NO: 16016 - protein, 9 aa, Homo sapiens
  Table A; HLA-A*68:02; TP53; R249M; 0
MPILTIITL

SEQ ID NO: 16017 - protein, 9 aa, Homo sapiens
  Table A; HLA-B*07:02; TP53; R249M; 1
MPILTIITL

SEQ ID NO: 16018 - protein, 9 aa, Homo sapiens
  Table A; HLA-B*08:01; TP53; R249M; 1
MPILTIITL

SEQ ID NO: 16019 - protein, 9 aa, Homo sapiens
  Table A; HLA-B*15:02; TP53; R249M; 0
MPILTIITL

SEQ ID NO: 16020 - protein, 9 aa, Homo sapiens
  Table A; HLA-B*15:10; TP53; R249M; 0
MPILTIITL

SEQ ID NO: 16021 - protein, 9 aa, Homo sapiens
  Table A; HLA-B*35:01; TP53; R249M; 1
MPILTIITL

SEQ ID NO: 16022 - protein, 9 aa, Homo sapiens
  Table A; HLA-B*35:02; TP53; R249M; 0
MPILTIITL

SEQ ID NO: 16023 - protein, 9 aa, Homo sapiens
  Table A; HLA-B*35:03; TP53; R249M; 0
MPILTIITL

SEQ ID NO: 16024 - protein, 9 aa, Homo sapiens
  Table A; HLA-B*35:08; TP53; R249M; 0
MPILTIITL

SEQ ID NO: 16025 - protein, 9 aa, Homo sapiens
  Table A; HLA-B*35:12; TP53; R249M; 0
MPILTIITL

SEQ ID NO: 16026 - protein, 9 aa, Homo sapiens
  Table A; HLA-B*51:01; TP53; R249M; 0
MPILTIITL

SEQ ID NO: 16027 - protein, 9 aa, Homo sapiens
  Table A; HLA-B*54:01; TP53; R249M; 0
MPILTIITL

SEQ ID NO: 16028 - protein, 9 aa, Homo sapiens
  Table A; HLA-B*55:01; TP53; R249M; 0
MPILTIITL

SEQ ID NO: 16029 - protein, 9 aa, Homo sapiens
  Table A; HLA-B*55:02; TP53; R249M; 0
MPILTIITL

SEQ ID NO: 16030 - protein, 9 aa, Homo sapiens
  Table A; HLA-B*56:01; TP53; R249M; 0
MPILTIITL

SEQ ID NO: 16031 - protein, 9 aa, Homo sapiens
  Table A; HLA-C*08:01; TP53; R249M; 0
MPILTIITL

SEQ ID NO: 16032 - protein, 10 aa, Homo sapiens
  Table A; HLA-B*35:01; CHD4; R975H; 1
MPSKTELIVH

SEQ ID NO: 16033 - protein, 10 aa, Homo sapiens
  Table A; HLA-B*35:03; CHD4; R975H; 0
MPSKTELIVH

SEQ ID NO: 16034 - protein, 10 aa, Homo sapiens
  Table A; HLA-B*35:08; CHD4; R975H; 0
MPSKTELIVH

SEQ ID NO: 16035 - protein, 10 aa, Homo sapiens
  Table A; HLA-B*35:12; CHD4; R975H; 0
MPSKTELIVH

SEQ ID NO: 16036 - protein, 10 aa, Homo sapiens
  Table A; HLA-B*54:01; CHD4; R975H; 0
MPSKTELIVH

SEQ ID NO: 16037 - protein, 11 aa, Homo sapiens
  Table A; HLA-A*68:02; CHD4; R975H; 0
MPSKTELIVHV

SEQ ID NO: 16038 - protein, 11 aa, Homo sapiens
  Table A; HLA-B*54:01; CHD4; R975H; 0
MPSKTELIVHV

SEQ ID NO: 16039 - protein, 9 aa, Homo sapiens
  Table A; HLA-A*31:01; POLQ; R995Q; 0
MQTIWVTGR

SEQ ID NO: 16040 - protein, 9 aa, Homo sapiens
  Table A; HLA-B*08:01; XPO1; R749Q; 1
MQTVKRETL

SEQ ID NO: 16041 - protein, 9 aa, Homo sapiens
  Table A; HLA-B*14:02; XPO1; R749Q; 0
MQTVKRETL

SEQ ID NO: 16042 - protein, 9 aa, Homo sapiens
  Table A; HLA-B*15:01; XPO1; R749Q; 1
MQTVKRETL

SEQ ID NO: 16043 - protein, 9 aa, Homo sapiens
  Table A; HLA-B*15:10; XPO1; R749Q; 0
MQTVKRETL

SEQ ID NO: 16044 - protein, 11 aa, Homo sapiens
  Table A; HLA-B*38:01; ARHGEF12; R113Q; 0
MRAGVQTGDQI

SEQ ID NO: 16045 - protein, 8 aa, Homo sapiens
  Table A; HLA-B*14:02; CTNNB1; K335I; 1
MRTYTYEI

SEQ ID NO: 16046 - protein, 8 aa, Homo sapiens
  Table A; HLA-B*38:01; CTNNB1; K335I; 0
MRTYTYEI

SEQ ID NO: 16047 - protein, 8 aa, Homo sapiens
  Table A; HLA-B*39:06; CTNNB1; K335I; 0
MRTYTYEI

SEQ ID NO: 16048 - protein, 8 aa, Homo sapiens
  Table A; HLA-A*11:01; ARID2; S990L; 0
MSLSSTPQ

SEQ ID NO: 16049 - protein, 8 aa, Homo sapiens
  Table A; HLA-B*57:01; TP53; C176F; 1
MTEVVRRF

SEQ ID NO: 16050 - protein, 8 aa, Homo sapiens
  Table A; HLA-B*58:01; TP53; C176Y; 0
MTEVVRRY

SEQ ID NO: 16051 - protein, 8 aa, Homo sapiens
  Table A; HLA-B*15:01; PTPRC; Q895H; 1
MVHVEAQY

SEQ ID NO: 16052 - protein, 8 aa, Homo sapiens
  Table A; HLA-B*15:02; PTPRC; Q895H; 0
MVHVEAQY

SEQ ID NO: 16053 - protein, 8 aa, Homo sapiens
  Table A; HLA-B*35:01; PTPRC; Q895H; 1
MVHVEAQY

SEQ ID NO: 16054 - protein, 8 aa, Homo sapiens
  Table A; HLA-B*35:08; PTPRC; Q895H; 0
MVHVEAQY

SEQ ID NO: 16055 - protein, 8 aa, Homo sapiens
  Table A; HLA-B*39:01; PTPRC; Q895H; 0
MVHVEAQY

SEQ ID NO: 16056 - protein, 8 aa, Homo sapiens
  Table A; HLA-B*46:01; PTPRC; Q895H; 0
MVHVEAQY

SEQ ID NO: 16057 - protein, 8 aa, Homo sapiens
  Table A; HLA-B*58:01; PTPRC; Q895H; 0
MVHVEAQY

SEQ ID NO: 16058 - protein, 8 aa, Homo sapiens
  Table A; HLA-C*08:01; PTPRC; Q895H; 0
MVHVEAQY

SEQ ID NO: 16059 - protein, 9 aa, Homo sapiens
  Table A; HLA-A*02:05; PTPRC; Q895H; 0
MVHVEAQYI

SEQ ID NO: 16060 - protein, 9 aa, Homo sapiens
  Table A; HLA-A*02:06; PTPRC; Q895H; 0
MVHVEAQYI

SEQ ID NO: 16061 - protein, 9 aa, Homo sapiens
  Table A; HLA-A*68:02; PTPRC; Q895H; 0
MVHVEAQYI

SEQ ID NO: 16062 - protein, 9 aa, Homo sapiens
  Table A; HLA-B*13:02; PTPRC; Q895H; 0
MVHVEAQYI

SEQ ID NO: 16063 - protein, 9 aa, Homo sapiens
  Table A; HLA-B*38:01; PTPRC; Q895H; 0
MVHVEAQYI

SEQ ID NO: 16064 - protein, 9 aa, Homo sapiens
  Table A; HLA-B*51:01; PTPRC; Q895H; 0
MVHVEAQYI

SEQ ID NO: 16065 - protein, 9 aa, Homo sapiens
  Table A; HLA-C*08:03; PTPRC; Q895H; 0
MVHVEAQYI

SEQ ID NO: 16066 - protein, 9 aa, Homo sapiens
  Table A; HLA-B*54:01; CNTNAP2; T373M; 0
MVPVFFNAT

SEQ ID NO: 16067 - protein, 8 aa, Homo sapiens
  Table A; HLA-A*26:01; ERBB3; V104M; 1
MVRGTQVY

SEQ ID NO: 16068 - protein, 8 aa, Homo sapiens
  Table A; HLA-B*15:01; ERBB3; V104M; 1
MVRGTQVY

SEQ ID NO: 16069 - protein, 8 aa, Homo sapiens
  Table A; HLA-B*15:02; ERBB3; V104M; 0
MVRGTQVY

SEQ ID NO: 16070 - protein, 8 aa, Homo sapiens
  Table A; HLA-C*08:01; ERBB3; V104M; 0
MVRGTQVY

SEQ ID NO: 16071 - protein, 10 aa, Homo sapiens
  Table A; HLA-A*02:01; TP53; V216M; 1
MVVPYEPPEV

SEQ ID NO: 16072 - protein, 10 aa, Homo sapiens
  Table A; HLA-A*02:03; TP53; V216M; 0
MVVPYEPPEV

SEQ ID NO: 16073 - protein, 10 aa, Homo sapiens
  Table A; HLA-A*02:04; TP53; V216M; 0
MVVPYEPPEV

SEQ ID NO: 16074 - protein, 10 aa, Homo sapiens
  Table A; HLA-A*02:05; TP53; V216M; 0
MVVPYEPPEV

SEQ ID NO: 16075 - protein, 10 aa, Homo sapiens
  Table A; HLA-A*02:06; TP53; V216M; 0
MVVPYEPPEV

SEQ ID NO: 16076 - protein, 10 aa, Homo sapiens
  Table A; HLA-A*02:07; TP53; V216M; 0
MVVPYEPPEV

SEQ ID NO: 16077 - protein, 10 aa, Homo sapiens
  Table A; HLA-A*02:08; TP53; V216M; 0
MVVPYEPPEV

SEQ ID NO: 16078 - protein, 10 aa, Homo sapiens
  Table A; HLA-A*26:01; TP53; V216M; 0
MVVPYEPPEV

SEQ ID NO: 16079 - protein, 10 aa, Homo sapiens
  Table A; HLA-A*26:02; TP53; V216M; 0
MVVPYEPPEV

SEQ ID NO: 16080 - protein, 10 aa, Homo sapiens
  Table A; HLA-A*30:01; TP53; V216M; 0
MVVPYEPPEV

SEQ ID NO: 16081 - protein, 10 aa, Homo sapiens
  Table A; HLA-A*68:01; TP53; V216M; 0
MVVPYEPPEV

SEQ ID NO: 16082 - protein, 10 aa, Homo sapiens
  Table A; HLA-A*68:02; TP53; V216M; 0
MVVPYEPPEV

SEQ ID NO: 16083 - protein, 10 aa, Homo sapiens
  Table A; HLA-B*35:01; TP53; V216M; 0
MVVPYEPPEV

SEQ ID NO: 16084 - protein, 10 aa, Homo sapiens
  Table A; HLA-B*35:02; TP53; V216M; 0
MVVPYEPPEV

SEQ ID NO: 16085 - protein, 10 aa, Homo sapiens
  Table A; HLA-B*35:03; TP53; V216M; 0
MVVPYEPPEV

SEQ ID NO: 16086 - protein, 10 aa, Homo sapiens
  Table A; HLA-B*35:12; TP53; V216M; 0
MVVPYEPPEV

SEQ ID NO: 16087 - protein, 10 aa, Homo sapiens
  Table A; HLA-B*39:01; TP53; V216M; 0
MVVPYEPPEV

SEQ ID NO: 16088 - protein, 10 aa, Homo sapiens
  Table A; HLA-B*40:02; TP53; V216M; 0
MVVPYEPPEV

SEQ ID NO: 16089 - protein, 10 aa, Homo sapiens
  Table A; HLA-B*50:01; TP53; V216M; 0
MVVPYEPPEV

SEQ ID NO: 16090 - protein, 10 aa, Homo sapiens
  Table A; HLA-B*51:01; TP53; V216M; 0
MVVPYEPPEV

SEQ ID NO: 16091 - protein, 10 aa, Homo sapiens
  Table A; HLA-B*54:01; TP53; V216M; 0
MVVPYEPPEV

SEQ ID NO: 16092 - protein, 8 aa, Homo sapiens
  Table A; HLA-B*51:01; RAC1; P29L; 1
NAFLGEYI

SEQ ID NO: 16093 - protein, 9 aa, Homo sapiens
  Table A; HLA-B*35:01; RAC1; P29L; 1
NAFLGEYIP

SEQ ID NO: 16094 - protein, 9 aa, Homo sapiens
  Table A; HLA-B*35:03; RAC1; P29L; 0
NAFLGEYIP

SEQ ID NO: 16095 - protein, 9 aa, Homo sapiens
  Table A; HLA-B*54:01; RAC1; P29L; 0
NAFLGEYIP

SEQ ID NO: 16096 - protein, 10 aa, Homo sapiens
  Table A; HLA-A*68:02; RAC1; P29L; 0
NAFLGEYIPT

SEQ ID NO: 16097 - protein, 10 aa, Homo sapiens
  Table A; HLA-B*27:02; RAC1; P29L; 0
NAFLGEYIPT

SEQ ID NO: 16098 - protein, 10 aa, Homo sapiens
  Table A; HLA-B*35:01; RAC1; P29L; 1
NAFLGEYIPT

SEQ ID NO: 16099 - protein, 10 aa, Homo sapiens
  Table A; HLA-B*48:01; RAC1; P29L; 0
NAFLGEYIPT

SEQ ID NO: 16100 - protein, 10 aa, Homo sapiens
  Table A; HLA-B*54:01; RAC1; P29L; 0
NAFLGEYIPT

SEQ ID NO: 16101 - protein, 10 aa, Homo sapiens
  Table A; HLA-C*08:03; RAC1; P29L; 0
NAFLGEYIPT

SEQ ID NO: 16102 - protein, 11 aa, Homo sapiens
  Table A; HLA-A*02:01; RAC1; P29L; 1
NAFLGEYIPTV

SEQ ID NO: 16103 - protein, 11 aa, Homo sapiens
  Table A; HLA-A*02:03; RAC1; P29L; 0
NAFLGEYIPTV

SEQ ID NO: 16104 - protein, 11 aa, Homo sapiens
  Table A; HLA-A*02:04; RAC1; P29L; 0
NAFLGEYIPTV

SEQ ID NO: 16105 - protein, 11 aa, Homo sapiens
  Table A; HLA-A*68:02; RAC1; P29L; 0
NAFLGEYIPTV

SEQ ID NO: 16106 - protein, 11 aa, Homo sapiens
  Table A; HLA-B*54:01; RAC1; P29L; 0
NAFLGEYIPTV

SEQ ID NO: 16107 - protein, 11 aa, Homo sapiens
  Table A; HLA-C*12:03; RAC1; P29L; 1
NAFLGEYIPTV

SEQ ID NO: 16108 - protein, 8 aa, Homo sapiens
  Table A; HLA-B*51:01; RAC1; P29S; 1
NAFSGEYI

SEQ ID NO: 16109 - protein, 9 aa, Homo sapiens
  Table A; HLA-B*35:01; RAC1; P29S; 1
NAFSGEYIP

SEQ ID NO: 16110 - protein, 9 aa, Homo sapiens
  Table A; HLA-B*35:02; RAC1; P29S; 0
NAFSGEYIP

SEQ ID NO: 16111 - protein, 9 aa, Homo sapiens
  Table A; HLA-B*35:03; RAC1; P29S; 0
NAFSGEYIP

SEQ ID NO: 16112 - protein, 9 aa, Homo sapiens
  Table A; HLA-B*39:06; RAC1; P29S; 0
NAFSGEYIP

SEQ ID NO: 16113 - protein, 9 aa, Homo sapiens
  Table A; HLA-B*54:01; RAC1; P29S; 0
NAFSGEYIP

SEQ ID NO: 16114 - protein, 9 aa, Homo sapiens
  Table A; HLA-C*12:03; RAC1; P29S; 1
NAFSGEYIP

SEQ ID NO: 16115 - protein, 9 aa, Homo sapiens
  Table A; HLA-C*16:04; RAC1; P29S; 0
NAFSGEYIP

SEQ ID NO: 16116 - protein, 10 aa, Homo sapiens
  Table A; HLA-A*02:05; RAC1; P29S; 0
NAFSGEYIPT

SEQ ID NO: 16117 - protein, 10 aa, Homo sapiens
  Table A; HLA-A*33:03; RAC1; P29S; 0
NAFSGEYIPT

SEQ ID NO: 16118 - protein, 10 aa, Homo sapiens
  Table A; HLA-A*68:01; RAC1; P29S; 1
NAFSGEYIPT

SEQ ID NO: 16119 - protein, 10 aa, Homo sapiens
  Table A; HLA-A*68:02; RAC1; P29S; 0
NAFSGEYIPT

SEQ ID NO: 16120 - protein, 10 aa, Homo sapiens
  Table A; HLA-B*08:01; RAC1; P29S; 1
NAFSGEYIPT

SEQ ID NO: 16121 - protein, 10 aa, Homo sapiens
  Table A; HLA-B*27:02; RAC1; P29S; 0
NAFSGEYIPT

SEQ ID NO: 16122 - protein, 10 aa, Homo sapiens
  Table A; HLA-B*35:01; RAC1; P29S; 1
NAFSGEYIPT

SEQ ID NO: 16123 - protein, 10 aa, Homo sapiens
  Table A; HLA-B*35:03; RAC1; P29S; 0
NAFSGEYIPT

SEQ ID NO: 16124 - protein, 10 aa, Homo sapiens
  Table A; HLA-B*48:01; RAC1; P29S; 0
NAFSGEYIPT

SEQ ID NO: 16125 - protein, 10 aa, Homo sapiens
  Table A; HLA-B*54:01; RAC1; P29S; 0
NAFSGEYIPT

SEQ ID NO: 16126 - protein, 10 aa, Homo sapiens
  Table A; HLA-C*07:04; RAC1; P29S; 0
NAFSGEYIPT

SEQ ID NO: 16127 - protein, 10 aa, Homo sapiens
  Table A; HLA-C*08:01; RAC1; P29S; 0
NAFSGEYIPT

SEQ ID NO: 16128 - protein, 10 aa, Homo sapiens
  Table A; HLA-C*08:03; RAC1; P29S; 0
NAFSGEYIPT

SEQ ID NO: 16129 - protein, 10 aa, Homo sapiens
  Table A; HLA-C*16:04; RAC1; P29S; 0
NAFSGEYIPT

SEQ ID NO: 16130 - protein, 11 aa, Homo sapiens
  Table A; HLA-A*02:01; RAC1; P29S; 1
NAFSGEYIPTV

SEQ ID NO: 16131 - protein, 11 aa, Homo sapiens
  Table A; HLA-A*02:03; RAC1; P29S; 0
NAFSGEYIPTV

SEQ ID NO: 16132 - protein, 11 aa, Homo sapiens
  Table A; HLA-A*02:04; RAC1; P29S; 0
NAFSGEYIPTV

SEQ ID NO: 16133 - protein, 11 aa, Homo sapiens
  Table A; HLA-A*02:05; RAC1; P29S; 0
NAFSGEYIPTV

SEQ ID NO: 16134 - protein, 11 aa, Homo sapiens
  Table A; HLA-A*02:07; RAC1; P29S; 0
NAFSGEYIPTV

SEQ ID NO: 16135 - protein, 11 aa, Homo sapiens
  Table A; HLA-A*30:01; RAC1; P29S; 0
NAFSGEYIPTV

SEQ ID NO: 16136 - protein, 11 aa, Homo sapiens
  Table A; HLA-A*68:02; RAC1; P29S; 0
NAFSGEYIPTV

SEQ ID NO: 16137 - protein, 11 aa, Homo sapiens
  Table A; HLA-B*50:01; RAC1; P29S; 0
NAFSGEYIPTV

SEQ ID NO: 16138 - protein, 11 aa, Homo sapiens
  Table A; HLA-B*51:01; RAC1; P29S; 1
NAFSGEYIPTV

SEQ ID NO: 16139 - protein, 11 aa, Homo sapiens
  Table A; HLA-B*54:01; RAC1; P29S; 0
NAFSGEYIPTV

SEQ ID NO: 16140 - protein, 11 aa, Homo sapiens
  Table A; HLA-C*12:03; RAC1; P29S; 1
NAFSGEYIPTV

SEQ ID NO: 16141 - protein, 11 aa, Homo sapiens
  Table A; HLA-C*16:02; RAC1; P29S; 0
NAFSGEYIPTV

SEQ ID NO: 16142 - protein, 8 aa, Homo sapiens
  Table A; HLA-B*14:02; PIK3CA; H1047L; 1
NDALHGGW

SEQ ID NO: 16143 - protein, 8 aa, Homo sapiens
  Table A; HLA-B*44:02; PIK3CA; H1047L; 1
NDALHGGW

SEQ ID NO: 16144 - protein, 8 aa, Homo sapiens
  Table A; HLA-B*44:03; PIK3CA; H1047L; 1
NDALHGGW

SEQ ID NO: 16145 - protein, 8 aa, Homo sapiens
  Table A; HLA-B*44:05; PIK3CA; H1047L; 0
NDALHGGW

SEQ ID NO: 16146 - protein, 8 aa, Homo sapiens
  Table A; HLA-B*44:05; PIK3CA; H1047Q; 0
NDAQHGGW

SEQ ID NO: 16147 - protein, 8 aa, Homo sapiens
  Table A; HLA-B*44:05; PIK3CA; H1047Y; 0
NDAYHGGW

SEQ ID NO: 16148 - protein, 9 aa, Homo sapiens
  Table A; HLA-A*68:02; GRIN2A; S1425L; 0
NDVYILEHV

SEQ ID NO: 16149 - protein, 9 aa, Homo sapiens
  Table A; HLA-A*23:01; CHST11; A159T; 0
NEAHVSTNL

SEQ ID NO: 16150 - protein, 9 aa, Homo sapiens
  Table A; HLA-A*30:01; CHST11; A159T; 0
NEAHVSTNL

SEQ ID NO: 16151 - protein, 9 aa, Homo sapiens
  Table A; HLA-A*68:02; CHST11; A159T; 0
NEAHVSTNL

SEQ ID NO: 16152 - protein, 9 aa, Homo sapiens
  Table A; HLA-B*18:01; CHST11; A159T; 1
NEAHVSTNL

SEQ ID NO: 16153 - protein, 9 aa, Homo sapiens
  Table A; HLA-B*38:01; CHST11; A159T; 0
NEAHVSTNL

SEQ ID NO: 16154 - protein, 9 aa, Homo sapiens
  Table A; HLA-B*39:01; CHST11; A159T; 0
NEAHVSTNL

SEQ ID NO: 16155 - protein, 9 aa, Homo sapiens
  Table A; HLA-B*40:01; CHST11; A159T; 1
NEAHVSTNL

SEQ ID NO: 16156 - protein, 9 aa, Homo sapiens
  Table A; HLA-B*40:02; CHST11; A159T; 0
NEAHVSTNL

SEQ ID NO: 16157 - protein, 9 aa, Homo sapiens
  Table A; HLA-B*41:02; CHST11; A159T; 0
NEAHVSTNL

SEQ ID NO: 16158 - protein, 9 aa, Homo sapiens
  Table A; HLA-B*44:02; CHST11; A159T; 1
NEAHVSTNL

SEQ ID NO: 16159 - protein, 9 aa, Homo sapiens
  Table A; HLA-B*44:03; CHST11; A159T; 1
NEAHVSTNL

SEQ ID NO: 16160 - protein, 9 aa, Homo sapiens
  Table A; HLA-B*44:05; CHST11; A159T; 0
NEAHVSTNL

SEQ ID NO: 16161 - protein, 9 aa, Homo sapiens
  Table A; HLA-B*49:01; CHST11; A159T; 0
NEAHVSTNL

SEQ ID NO: 16162 - protein, 9 aa, Homo sapiens
  Table A; HLA-B*58:01; CHST11; A159T; 0
NEAHVSTNL

SEQ ID NO: 16163 - protein, 10 aa, Homo sapiens
  Table A; HLA-A*68:01; CHST11; A159T; 0
NEAHVSTNLK

SEQ ID NO: 16164 - protein, 8 aa, Homo sapiens
  Table A; HLA-B*40:01; PPP2R1A; R28C; 1
NEDVQLCL

SEQ ID NO: 16165 - protein, 8 aa, Homo sapiens
  Table A; HLA-B*40:02; PPP2R1A; R28C; 0
NEDVQLCL

SEQ ID NO: 16166 - protein, 8 aa, Homo sapiens
  Table A; HLA-B*44:05; PPP2R1A; R28C; 0
NEDVQLCL

SEQ ID NO: 16167 - protein, 11 aa, Homo sapiens
  Table A; HLA-B*44:05; PPP2R1A; R28C; 0
NEDVQLCLNSI

SEQ ID NO: 16168 - protein, 8 aa, Homo sapiens
  Table A; HLA-A*23:01; CTNND1; A781T; 0
NEVITENL

SEQ ID NO: 16169 - protein, 8 aa, Homo sapiens
  Table A; HLA-A*30:01; CTNND1; A781T; 0
NEVITENL

SEQ ID NO: 16170 - protein, 8 aa, Homo sapiens
  Table A; HLA-B*18:01; CTNND1; A781T; 0
NEVITENL

SEQ ID NO: 16171 - protein, 8 aa, Homo sapiens
  Table A; HLA-B*37:01; CTNND1; A781T; 0
NEVITENL

SEQ ID NO: 16172 - protein, 8 aa, Homo sapiens
  Table A; HLA-B*40:01; CTNND1; A781T; 0
NEVITENL

SEQ ID NO: 16173 - protein, 8 aa, Homo sapiens
  Table A; HLA-B*40:02; CTNND1; A781T; 0
NEVITENL

SEQ ID NO: 16174 - protein, 8 aa, Homo sapiens
  Table A; HLA-B*41:02; CTNND1; A781T; 0
NEVITENL

SEQ ID NO: 16175 - protein, 8 aa, Homo sapiens
  Table A; HLA-B*44:05; CTNND1; A781T; 0
NEVITENL

SEQ ID NO: 16176 - protein, 8 aa, Homo sapiens
  Table A; HLA-B*49:01; CTNND1; A781T; 0
NEVITENL

SEQ ID NO: 16177 - protein, 8 aa, Homo sapiens
  Table A; HLA-B*58:01; CTNND1; A781T; 0
NEVITENL

SEQ ID NO: 16178 - protein, 10 aa, Homo sapiens
  Table A; HLA-A*02:05; CTNND1; A781T; 0
NEVITENLEA

SEQ ID NO: 16179 - protein, 10 aa, Homo sapiens
  Table A; HLA-B*40:02; CTNND1; A781T; 0
NEVITENLEA

SEQ ID NO: 16180 - protein, 10 aa, Homo sapiens
  Table A; HLA-B*50:01; CTNND1; A781T; 0
NEVITENLEA

SEQ ID NO: 16181 - protein, 11 aa, Homo sapiens
  Table A; HLA-B*40:02; CTNND1; A781T; 0
NEVITENLEAA

SEQ ID NO: 16182 - protein, 11 aa, Homo sapiens
  Table A; HLA-B*40:06; CTNND1; A781T; 0
NEVITENLEAA

SEQ ID NO: 16183 - protein, 11 aa, Homo sapiens
  Table A; HLA-B*50:01; CTNND1; A781T; 0
NEVITENLEAA

SEQ ID NO: 16184 - protein, 8 aa, Homo sapiens
  Table A; HLA-C*14:02; MTOR; E1799K; 0
NFKAVLHY

SEQ ID NO: 16185 - protein, 8 aa, Homo sapiens
  Table A; HLA-A*02:05; RGS7; R44C; 0
NGIPICTV

SEQ ID NO: 16186 - protein, 8 aa, Homo sapiens
  Table A; HLA-B*39:06; RGS7; R44C; 0
NGIPICTV

SEQ ID NO: 16187 - protein, 8 aa, Homo sapiens
  Table A; HLA-B*51:01; RGS7; R44C; 1
NGIPICTV

SEQ ID NO: 16188 - protein, 9 aa, Homo sapiens
  Table A; HLA-A*33:03; PIK3CA; R108H; 0
NHEEKILNR

SEQ ID NO: 16189 - protein, 9 aa, Homo sapiens
  Table A; HLA-A*68:01; PIK3CA; R108H; 0
NHEEKILNR

SEQ ID NO: 16190 - protein, 9 aa, Homo sapiens
  Table A; HLA-B*15:02; PIK3CA; K111N; 0
NILNREIGF

SEQ ID NO: 16191 - protein, 10 aa, Homo sapiens
  Table A; HLA-A*68:02; CTNNB1; K335I; 0
NIMRTYTYEI

SEQ ID NO: 16192 - protein, 9 aa, Homo sapiens
  Table A; HLA-A*02:04; SMARCA4; E920K; 0
NKLPKLWAL

SEQ ID NO: 16193 - protein, 10 aa, Homo sapiens
  Table A; HLA-B*27:02; ARID2; S297F; 0
NLFFEEGNVK

SEQ ID NO: 16194 - protein, 11 aa, Homo sapiens
  Table A; HLA-A*02:01; ARID2; S297F; 1
NLFFEEGNVKL

SEQ ID NO: 16195 - protein, 11 aa, Homo sapiens
  Table A; HLA-A*02:04; ARID2; S297F; 0
NLFFEEGNVKL

SEQ ID NO: 16196 - protein, 11 aa, Homo sapiens
  Table A; HLA-A*02:05; ARID2; S297F; 0
NLFFEEGNVKL

SEQ ID NO: 16197 - protein, 8 aa, Homo sapiens
  Table A; HLA-B*08:01; TP53; G266E; 1
NLLERNSF

SEQ ID NO: 16198 - protein, 10 aa, Homo sapiens
  Table A; HLA-A*02:01; TP53; G266E; 1
NLLERNSFEV

SEQ ID NO: 16199 - protein, 10 aa, Homo sapiens
  Table A; HLA-A*02:04; TP53; G266E; 0
NLLERNSFEV

SEQ ID NO: 16200 - protein, 11 aa, Homo sapiens
  Table A; HLA-A*33:01; TP53; G266E; 0
NLLERNSFEVR

SEQ ID NO: 16201 - protein, 11 aa, Homo sapiens
  Table A; HLA-A*33:01; TP53; E271K; 0
NLLGRNSFKVR

SEQ ID NO: 16202 - protein, 11 aa, Homo sapiens
  Table A; HLA-A*02:07; ROBO2; D1014N; 0
NLPDPQWKSSI

SEQ ID NO: 16203 - protein, 8 aa, Homo sapiens
  Table A; HLA-A*02:03; TP53; R248L; 0
NLRPILTI

SEQ ID NO: 16204 - protein, 8 aa, Homo sapiens
  Table A; HLA-B*13:02; TP53; R248L; 0
NLRPILTI

SEQ ID NO: 16205 - protein, 9 aa, Homo sapiens
  Table A; HLA-A*02:03; TP53; R248L; 0
NLRPILTII

SEQ ID NO: 16206 - protein, 9 aa, Homo sapiens
  Table A; HLA-A*02:04; TP53; R248L; 0
NLRPILTII

SEQ ID NO: 16207 - protein, 11 aa, Homo sapiens
  Table A; HLA-A*02:03; TP53; R248L; 0
NLRPILTIITL

SEQ ID NO: 16208 - protein, 11 aa, Homo sapiens
  Table A; HLA-A*02:04; TP53; R248L; 0
NLRPILTIITL

SEQ ID NO: 16209 - protein, 9 aa, Homo sapiens
  Table A; HLA-A*02:01; SF3B1; R625H; 1
NMDEYVHNT

SEQ ID NO: 16210 - protein, 9 aa, Homo sapiens
  Table A; HLA-A*02:07; SF3B1; R625H; 0
NMDEYVHNT

SEQ ID NO: 16211 - protein, 9 aa, Homo sapiens
  Table A; HLA-C*08:03; SF3B1; R625H; 0
NMDEYVHNT

SEQ ID NO: 16212 - protein, 10 aa, Homo sapiens
  Table A; HLA-B*48:01; SF3B1; R625H; 0
NMDEYVHNTT

SEQ ID NO: 16213 - protein, 9 aa, Homo sapiens
  Table A; HLA-B*39:06; ABI1; K445N; 0
NNYIEKVVA

SEQ ID NO: 16214 - protein, 9 aa, Homo sapiens
  Table A; HLA-A*33:01; GLI1; R637Q; 0
NPNAGVTQR

SEQ ID NO: 16215 - protein, 9 aa, Homo sapiens
  Table A; HLA-A*33:03; GLI1; R637Q; 0
NPNAGVTQR

SEQ ID NO: 16216 - protein, 9 aa, Homo sapiens
  Table A; HLA-A*68:01; GLI1; R637Q; 0
NPNAGVTQR

SEQ ID NO: 16217 - protein, 10 aa, Homo sapiens
  Table A; HLA-B*54:01; GLI1; R637Q; 0
NPNAGVTQRA

SEQ ID NO: 16218 - protein, 10 aa, Homo sapiens
  Table A; HLA-B*55:02; GLI1; R637Q; 0
NPNAGVTQRA

SEQ ID NO: 16219 - protein, 10 aa, Homo sapiens
  Table A; HLA-B*56:01; GLI1; R637Q; 0
NPNAGVTQRA

SEQ ID NO: 16220 - protein, 10 aa, Homo sapiens
  Table A; HLA-B*35:01; PTPRT; L695F; 1
NPPFSPLKSY

SEQ ID NO: 16221 - protein, 8 aa, Homo sapiens
  Table A; HLA-A*02:05; BMP5; R208Q; 0
NQFENETI

SEQ ID NO: 16222 - protein, 8 aa, Homo sapiens
  Table A; HLA-B*13:02; BMP5; R208Q; 0
NQFENETI

SEQ ID NO: 16223 - protein, 8 aa, Homo sapiens
  Table A; HLA-B*39:06; BMP5; R208Q; 0
NQFENETI

SEQ ID NO: 16224 - protein, 10 aa, Homo sapiens
  Table A; HLA-A*02:04; BMP5; R208Q; 0
NQFENETIKI

SEQ ID NO: 16225 - protein, 10 aa, Homo sapiens
  Table A; HLA-A*02:05; BMP5; R208Q; 0
NQFENETIKI

SEQ ID NO: 16226 - protein, 10 aa, Homo sapiens
  Table A; HLA-A*02:06; BMP5; R208Q; 0
NQFENETIKI

SEQ ID NO: 16227 - protein, 10 aa, Homo sapiens
  Table A; HLA-A*02:08; BMP5; R208Q; 0
NQFENETIKI

SEQ ID NO: 16228 - protein, 10 aa, Homo sapiens
  Table A; HLA-B*13:02; BMP5; R208Q; 0
NQFENETIKI

SEQ ID NO: 16229 - protein, 10 aa, Homo sapiens
  Table A; HLA-B*38:01; BMP5; R208Q; 0
NQFENETIKI

SEQ ID NO: 16230 - protein, 10 aa, Homo sapiens
  Table A; HLA-B*50:01; BMP5; R208Q; 0
NQFENETIKI

SEQ ID NO: 16231 - protein, 8 aa, Homo sapiens
  Table A; HLA-B*13:02; TP53; R248Q; 1
NQRPILTI

SEQ ID NO: 16232 - protein, 8 aa, Homo sapiens
  Table A; HLA-B*14:02; TP53; R248Q; 1
NQRPILTI

SEQ ID NO: 16233 - protein, 8 aa, Homo sapiens
  Table A; HLA-B*15:01; TP53; R248Q; 1
NQRPILTI

SEQ ID NO: 16234 - protein, 8 aa, Homo sapiens
  Table A; HLA-B*15:10; TP53; R248Q; 0
NQRPILTI

SEQ ID NO: 16235 - protein, 8 aa, Homo sapiens
  Table A; HLA-B*39:06; TP53; R248Q; 0
NQRPILTI

SEQ ID NO: 16236 - protein, 8 aa, Homo sapiens
  Table A; HLA-B*51:01; TP53; R248Q; 1
NQRPILTI

SEQ ID NO: 16237 - protein, 9 aa, Homo sapiens
  Table A; HLA-A*02:03; TP53; R248Q; 0
NQRPILTII

SEQ ID NO: 16238 - protein, 9 aa, Homo sapiens
  Table A; HLA-A*02:04; TP53; R248Q; 0
NQRPILTII

SEQ ID NO: 16239 - protein, 9 aa, Homo sapiens
  Table A; HLA-A*30:01; TP53; R248Q; 0
NQRPILTII

SEQ ID NO: 16240 - protein, 9 aa, Homo sapiens
  Table A; HLA-B*13:02; TP53; R248Q; 1
NQRPILTII

SEQ ID NO: 16241 - protein, 9 aa, Homo sapiens
  Table A; HLA-B*15:10; TP53; R248Q; 0
NQRPILTII

SEQ ID NO: 16242 - protein, 9 aa, Homo sapiens
  Table A; HLA-B*39:06; TP53; R248Q; 0
NQRPILTII

SEQ ID NO: 16243 - protein, 9 aa, Homo sapiens
  Table A; HLA-B*48:01; TP53; R248Q; 0
NQRPILTII

SEQ ID NO: 16244 - protein, 9 aa, Homo sapiens
  Table A; HLA-C*12:03; TP53; R248Q; 1
NQRPILTII

SEQ ID NO: 16245 - protein, 9 aa, Homo sapiens
  Table A; HLA-A*02:05; ARID2; S990L; 0
NQVPTAMSL

SEQ ID NO: 16246 - protein, 9 aa, Homo sapiens
  Table A; HLA-A*02:06; ARID2; S990L; 0
NQVPTAMSL

SEQ ID NO: 16247 - protein, 9 aa, Homo sapiens
  Table A; HLA-A*30:01; ARID2; S990L; 0
NQVPTAMSL

SEQ ID NO: 16248 - protein, 9 aa, Homo sapiens
  Table A; HLA-B*13:02; ARID2; S990L; 0
NQVPTAMSL

SEQ ID NO: 16249 - protein, 9 aa, Homo sapiens
  Table A; HLA-B*14:01; ARID2; S990L; 0
NQVPTAMSL

SEQ ID NO: 16250 - protein, 9 aa, Homo sapiens
  Table A; HLA-B*14:02; ARID2; S990L; 0
NQVPTAMSL

SEQ ID NO: 16251 - protein, 9 aa, Homo sapiens
  Table A; HLA-B*15:01; ARID2; S990L; 0
NQVPTAMSL

SEQ ID NO: 16252 - protein, 9 aa, Homo sapiens
  Table A; HLA-B*15:02; ARID2; S990L; 0
NQVPTAMSL

SEQ ID NO: 16253 - protein, 9 aa, Homo sapiens
  Table A; HLA-B*15:03; ARID2; S990L; 0
NQVPTAMSL

SEQ ID NO: 16254 - protein, 9 aa, Homo sapiens
  Table A; HLA-B*15:10; ARID2; S990L; 0
NQVPTAMSL

SEQ ID NO: 16255 - protein, 9 aa, Homo sapiens
  Table A; HLA-B*15:13; ARID2; S990L; 0
NQVPTAMSL

SEQ ID NO: 16256 - protein, 9 aa, Homo sapiens
  Table A; HLA-B*35:01; ARID2; S990L; 0
NQVPTAMSL

SEQ ID NO: 16257 - protein, 9 aa, Homo sapiens
  Table A; HLA-B*35:03; ARID2; S990L; 0
NQVPTAMSL

SEQ ID NO: 16258 - protein, 9 aa, Homo sapiens
  Table A; HLA-B*38:01; ARID2; S990L; 0
NQVPTAMSL

SEQ ID NO: 16259 - protein, 9 aa, Homo sapiens
  Table A; HLA-B*39:01; ARID2; S990L; 0
NQVPTAMSL

SEQ ID NO: 16260 - protein, 9 aa, Homo sapiens
  Table A; HLA-B*39:06; ARID2; S990L; 0
NQVPTAMSL

SEQ ID NO: 16261 - protein, 9 aa, Homo sapiens
  Table A; HLA-B*40:01; ARID2; S990L; 0
NQVPTAMSL

SEQ ID NO: 16262 - protein, 9 aa, Homo sapiens
  Table A; HLA-B*40:02; ARID2; S990L; 0
NQVPTAMSL

SEQ ID NO: 16263 - protein, 9 aa, Homo sapiens
  Table A; HLA-B*44:05; ARID2; S990L; 0
NQVPTAMSL

SEQ ID NO: 16264 - protein, 9 aa, Homo sapiens
  Table A; HLA-B*48:01; ARID2; S990L; 0
NQVPTAMSL

SEQ ID NO: 16265 - protein, 9 aa, Homo sapiens
  Table A; HLA-B*50:01; ARID2; S990L; 0
NQVPTAMSL

SEQ ID NO: 16266 - protein, 9 aa, Homo sapiens
  Table A; HLA-C*03:03; ARID2; S990L; 0
NQVPTAMSL

SEQ ID NO: 16267 - protein, 9 aa, Homo sapiens
  Table A; HLA-C*03:04; ARID2; S990L; 0
NQVPTAMSL

SEQ ID NO: 16268 - protein, 9 aa, Homo sapiens
  Table A; HLA-C*08:01; ARID2; S990L; 0
NQVPTAMSL

SEQ ID NO: 16269 - protein, 9 aa, Homo sapiens
  Table A; HLA-C*08:03; ARID2; S990L; 0
NQVPTAMSL

SEQ ID NO: 16270 - protein, 9 aa, Homo sapiens
  Table A; HLA-A*33:03; PIK3CA; K111N; 0
NREENILNR

SEQ ID NO: 16271 - protein, 9 aa, Homo sapiens
  Table A; HLA-B*27:02; PIK3CA; K111N; 0
NREENILNR

SEQ ID NO: 16272 - protein, 9 aa, Homo sapiens
  Table A; HLA-B*27:05; PIK3CA; K111N; 0
NREENILNR

SEQ ID NO: 16273 - protein, 10 aa, Homo sapiens
  Table A; HLA-B*27:05; KEAP1; D422N; 0
NRIGVGVING

SEQ ID NO: 16274 - protein, 10 aa, Homo sapiens
  Table A; HLA-B*39:01; KEAP1; D422N; 0
NRIGVGVING

SEQ ID NO: 16275 - protein, 8 aa, Homo sapiens
  Table A; HLA-B*14:01; TP53; R249M; 0
NRMPILTI

SEQ ID NO: 16276 - protein, 8 aa, Homo sapiens
  Table A; HLA-B*39:06; TP53; R249M; 0
NRMPILTI

SEQ ID NO: 16277 - protein, 8 aa, Homo sapiens
  Table A; HLA-C*06:02; TP53; R249M; 1
NRMPILTI

SEQ ID NO: 16278 - protein, 9 aa, Homo sapiens
  Table A; HLA-B*27:05; TP53; R249M; 0
NRMPILTII

SEQ ID NO: 16279 - protein, 9 aa, Homo sapiens
  Table A; HLA-B*38:01; TP53; R249M; 0
NRMPILTII

SEQ ID NO: 16280 - protein, 9 aa, Homo sapiens
  Table A; HLA-B*39:06; TP53; R249M; 0
NRMPILTII

SEQ ID NO: 16281 - protein, 9 aa, Homo sapiens
  Table A; HLA-C*06:02; TP53; R249M; 1
NRMPILTII

SEQ ID NO: 16282 - protein, 8 aa, Homo sapiens
  Table A; HLA-B*14:02; TP53; R249S; 1
NRSPILTI

SEQ ID NO: 16283 - protein, 8 aa, Homo sapiens
  Table A; HLA-B*38:01; TP53; R249S; 1
NRSPILTI

SEQ ID NO: 16284 - protein, 8 aa, Homo sapiens
  Table A; HLA-B*39:01; TP53; R249S; 0
NRSPILTI

SEQ ID NO: 16285 - protein, 8 aa, Homo sapiens
  Table A; HLA-C*06:02; TP53; R249S; 1
NRSPILTI

SEQ ID NO: 16286 - protein, 9 aa, Homo sapiens
  Table A; HLA-A*68:02; TP53; R249S; 0
NRSPILTII

SEQ ID NO: 16287 - protein, 9 aa, Homo sapiens
  Table A; HLA-B*27:05; TP53; R249S; 1
NRSPILTII

SEQ ID NO: 16288 - protein, 9 aa, Homo sapiens
  Table A; HLA-B*38:01; TP53; R249S; 1
NRSPILTII

SEQ ID NO: 16289 - protein, 9 aa, Homo sapiens
  Table A; HLA-C*06:02; TP53; R249S; 1
NRSPILTII

SEQ ID NO: 16290 - protein, 8 aa, Homo sapiens
  Table A; HLA-B*27:02; TP53; I195N; 0
NRVEGNLR

SEQ ID NO: 16291 - protein, 8 aa, Homo sapiens
  Table A; HLA-B*27:05; TP53; I195N; 0
NRVEGNLR

SEQ ID NO: 16292 - protein, 9 aa, Homo sapiens
  Table A; HLA-B*15:10; TP53; I195N; 0
NRVEGNLRV

SEQ ID NO: 16293 - protein, 9 aa, Homo sapiens
  Table A; HLA-B*27:05; TP53; I195N; 0
NRVEGNLRV

SEQ ID NO: 16294 - protein, 9 aa, Homo sapiens
  Table A; HLA-B*39:01; TP53; I195N; 0
NRVEGNLRV

SEQ ID NO: 16295 - protein, 9 aa, Homo sapiens
  Table A; HLA-B*39:06; TP53; I195N; 0
NRVEGNLRV

SEQ ID NO: 16296 - protein, 9 aa, Homo sapiens
  Table A; HLA-C*06:02; TP53; R249W; 1
NRWPILTII

SEQ ID NO: 16297 - protein, 9 aa, Homo sapiens
  Table A; HLA-A*11:01; CNTNAP2; E149K; 1
NSDGVVRHK

SEQ ID NO: 16298 - protein, 10 aa, Homo sapiens
  Table A; HLA-A*68:01; TP53; S241F; 0
NSFCMGGMNR

SEQ ID NO: 16299 - protein, 9 aa, Homo sapiens
  Table A; HLA-A*02:05; TP53; V272M; 0
NSFEMRVCA

SEQ ID NO: 16300 - protein, 9 aa, Homo sapiens
  Table A; HLA-B*39:06; TP53; V272M; 0
NSFEMRVCA

SEQ ID NO: 16301 - protein, 9 aa, Homo sapiens
  Table A; HLA-B*50:01; TP53; V272M; 0
NSFEMRVCA

SEQ ID NO: 16302 - protein, 9 aa, Homo sapiens
  Table A; HLA-B*54:01; TP53; V272M; 0
NSFEMRVCA

SEQ ID NO: 16303 - protein, 8 aa, Homo sapiens
  Table A; HLA-B*39:06; TP53; R273C; 0
NSFEVCVC

SEQ ID NO: 16304 - protein, 9 aa, Homo sapiens
  Table A; HLA-A*02:05; TP53; R273C; 0
NSFEVCVCA

SEQ ID NO: 16305 - protein, 9 aa, Homo sapiens
  Table A; HLA-A*68:02; TP53; R273C; 0
NSFEVCVCA

SEQ ID NO: 16306 - protein, 9 aa, Homo sapiens
  Table A; HLA-B*39:06; TP53; R273C; 0
NSFEVCVCA

SEQ ID NO: 16307 - protein, 9 aa, Homo sapiens
  Table A; HLA-B*54:01; TP53; R273C; 0
NSFEVCVCA

SEQ ID NO: 16308 - protein, 8 aa, Homo sapiens
  Table A; HLA-B*08:01; TP53; R273H; 1
NSFEVHVC

SEQ ID NO: 16309 - protein, 8 aa, Homo sapiens
  Table A; HLA-B*39:06; TP53; R273H; 0
NSFEVHVC

SEQ ID NO: 16310 - protein, 8 aa, Homo sapiens
  Table A; HLA-B*40:02; TP53; R273H; 0
NSFEVHVC

SEQ ID NO: 16311 - protein, 8 aa, Homo sapiens
  Table A; HLA-B*48:01; TP53; R273H; 0
NSFEVHVC

SEQ ID NO: 16312 - protein, 8 aa, Homo sapiens
  Table A; HLA-B*54:01; TP53; R273H; 0
NSFEVHVC

SEQ ID NO: 16313 - protein, 8 aa, Homo sapiens
  Table A; HLA-C*12:03; TP53; R273H; 1
NSFEVHVC

SEQ ID NO: 16314 - protein, 9 aa, Homo sapiens
  Table A; HLA-A*02:05; TP53; R273H; 0
NSFEVHVCA

SEQ ID NO: 16315 - protein, 9 aa, Homo sapiens
  Table A; HLA-A*02:06; TP53; R273H; 0
NSFEVHVCA

SEQ ID NO: 16316 - protein, 9 aa, Homo sapiens
  Table A; HLA-A*30:01; TP53; R273H; 0
NSFEVHVCA

SEQ ID NO: 16317 - protein, 9 aa, Homo sapiens
  Table A; HLA-A*68:01; TP53; R273H; 1
NSFEVHVCA

SEQ ID NO: 16318 - protein, 9 aa, Homo sapiens
  Table A; HLA-A*68:02; TP53; R273H; 0
NSFEVHVCA

SEQ ID NO: 16319 - protein, 9 aa, Homo sapiens
  Table A; HLA-B*39:06; TP53; R273H; 0
NSFEVHVCA

SEQ ID NO: 16320 - protein, 9 aa, Homo sapiens
  Table A; HLA-B*50:01; TP53; R273H; 0
NSFEVHVCA

SEQ ID NO: 16321 - protein, 9 aa, Homo sapiens
  Table A; HLA-B*54:01; TP53; R273H; 0
NSFEVHVCA

SEQ ID NO: 16322 - protein, 9 aa, Homo sapiens
  Table A; HLA-B*55:02; TP53; R273H; 0
NSFEVHVCA

SEQ ID NO: 16323 - protein, 9 aa, Homo sapiens
  Table A; HLA-C*08:01; TP53; R273H; 0
NSFEVHVCA

SEQ ID NO: 16324 - protein, 9 aa, Homo sapiens
  Table A; HLA-C*16:04; TP53; R273H; 0
NSFEVHVCA

SEQ ID NO: 16325 - protein, 8 aa, Homo sapiens
  Table A; HLA-B*39:06; TP53; R273L; 0
NSFEVLVC

SEQ ID NO: 16326 - protein, 8 aa, Homo sapiens
  Table A; HLA-B*54:01; TP53; R273L; 0
NSFEVLVC

SEQ ID NO: 16327 - protein, 8 aa, Homo sapiens
  Table A; HLA-C*12:03; TP53; R273L; 0
NSFEVLVC

SEQ ID NO: 16328 - protein, 9 aa, Homo sapiens
  Table A; HLA-A*02:05; TP53; R273L; 0
NSFEVLVCA

SEQ ID NO: 16329 - protein, 9 aa, Homo sapiens
  Table A; HLA-A*02:06; TP53; R273L; 0
NSFEVLVCA

SEQ ID NO: 16330 - protein, 9 aa, Homo sapiens
  Table A; HLA-A*68:01; TP53; R273L; 0
NSFEVLVCA

SEQ ID NO: 16331 - protein, 9 aa, Homo sapiens
  Table A; HLA-A*68:02; TP53; R273L; 0
NSFEVLVCA

SEQ ID NO: 16332 - protein, 9 aa, Homo sapiens
  Table A; HLA-B*39:06; TP53; R273L; 0
NSFEVLVCA

SEQ ID NO: 16333 - protein, 9 aa, Homo sapiens
  Table A; HLA-B*50:01; TP53; R273L; 0
NSFEVLVCA

SEQ ID NO: 16334 - protein, 9 aa, Homo sapiens
  Table A; HLA-B*54:01; TP53; R273L; 0
NSFEVLVCA

SEQ ID NO: 16335 - protein, 9 aa, Homo sapiens
  Table A; HLA-B*55:02; TP53; R273L; 0
NSFEVLVCA

SEQ ID NO: 16336 - protein, 9 aa, Homo sapiens
  Table A; HLA-B*56:01; TP53; R273L; 0
NSFEVLVCA

SEQ ID NO: 16337 - protein, 8 aa, Homo sapiens
  Table A; HLA-A*23:01; TP53; C275Y; 0
NSFEVRVY

SEQ ID NO: 16338 - protein, 8 aa, Homo sapiens
  Table A; HLA-B*08:01; TP53; C275Y; 0
NSFEVRVY

SEQ ID NO: 16339 - protein, 8 aa, Homo sapiens
  Table A; HLA-B*15:01; TP53; C275Y; 0
NSFEVRVY

SEQ ID NO: 16340 - protein, 8 aa, Homo sapiens
  Table A; HLA-B*15:02; TP53; C275Y; 0
NSFEVRVY

SEQ ID NO: 16341 - protein, 8 aa, Homo sapiens
  Table A; HLA-B*15:03; TP53; C275Y; 0
NSFEVRVY

SEQ ID NO: 16342 - protein, 8 aa, Homo sapiens
  Table A; HLA-B*18:01; TP53; C275Y; 0
NSFEVRVY

SEQ ID NO: 16343 - protein, 8 aa, Homo sapiens
  Table A; HLA-B*35:01; TP53; C275Y; 0
NSFEVRVY

SEQ ID NO: 16344 - protein, 8 aa, Homo sapiens
  Table A; HLA-B*46:01; TP53; C275Y; 0
NSFEVRVY

SEQ ID NO: 16345 - protein, 8 aa, Homo sapiens
  Table A; HLA-B*57:01; TP53; C275Y; 0
NSFEVRVY

SEQ ID NO: 16346 - protein, 8 aa, Homo sapiens
  Table A; HLA-B*58:01; TP53; C275Y; 0
NSFEVRVY

SEQ ID NO: 16347 - protein, 8 aa, Homo sapiens
  Table A; HLA-C*03:02; TP53; C275Y; 0
NSFEVRVY

SEQ ID NO: 16348 - protein, 8 aa, Homo sapiens
  Table A; HLA-C*07:01; TP53; C275Y; 1
NSFEVRVY

SEQ ID NO: 16349 - protein, 8 aa, Homo sapiens
  Table A; HLA-C*08:01; TP53; C275Y; 0
NSFEVRVY

SEQ ID NO: 16350 - protein, 8 aa, Homo sapiens
  Table A; HLA-C*12:03; TP53; C275Y; 0
NSFEVRVY

SEQ ID NO: 16351 - protein, 8 aa, Homo sapiens
  Table A; HLA-C*16:01; TP53; C275Y; 0
NSFEVRVY

SEQ ID NO: 16352 - protein, 8 aa, Homo sapiens
  Table A; HLA-C*16:02; TP53; C275Y; 0
NSFEVRVY

SEQ ID NO: 16353 - protein, 8 aa, Homo sapiens
  Table A; HLA-C*16:04; TP53; C275Y; 0
NSFEVRVY

SEQ ID NO: 16354 - protein, 9 aa, Homo sapiens
  Table A; HLA-A*02:05; TP53; C275Y; 0
NSFEVRVYA

SEQ ID NO: 16355 - protein, 9 aa, Homo sapiens
  Table A; HLA-A*33:03; TP53; C275Y; 0
NSFEVRVYA

SEQ ID NO: 16356 - protein, 9 aa, Homo sapiens
  Table A; HLA-A*68:02; TP53; C275Y; 0
NSFEVRVYA

SEQ ID NO: 16357 - protein, 9 aa, Homo sapiens
  Table A; HLA-B*39:06; TP53; C275Y; 0
NSFEVRVYA

SEQ ID NO: 16358 - protein, 9 aa, Homo sapiens
  Table A; HLA-B*54:01; TP53; C275Y; 0
NSFEVRVYA

SEQ ID NO: 16359 - protein, 9 aa, Homo sapiens
  Table A; HLA-B*56:01; TP53; C275Y; 0
NSFEVRVYA

SEQ ID NO: 16360 - protein, 8 aa, Homo sapiens
  Table A; HLA-B*14:01; TP53; R273S; 0
NSFEVSVC

SEQ ID NO: 16361 - protein, 8 aa, Homo sapiens
  Table A; HLA-B*39:06; TP53; R273S; 0
NSFEVSVC

SEQ ID NO: 16362 - protein, 8 aa, Homo sapiens
  Table A; HLA-B*40:02; TP53; R273S; 0
NSFEVSVC

SEQ ID NO: 16363 - protein, 8 aa, Homo sapiens
  Table A; HLA-B*48:01; TP53; R273S; 0
NSFEVSVC

SEQ ID NO: 16364 - protein, 8 aa, Homo sapiens
  Table A; HLA-B*54:01; TP53; R273S; 0
NSFEVSVC

SEQ ID NO: 16365 - protein, 8 aa, Homo sapiens
  Table A; HLA-C*12:03; TP53; R273S; 0
NSFEVSVC

SEQ ID NO: 16366 - protein, 9 aa, Homo sapiens
  Table A; HLA-A*02:05; TP53; R273S; 0
NSFEVSVCA

SEQ ID NO: 16367 - protein, 9 aa, Homo sapiens
  Table A; HLA-A*02:06; TP53; R273S; 0
NSFEVSVCA

SEQ ID NO: 16368 - protein, 9 aa, Homo sapiens
  Table A; HLA-A*68:01; TP53; R273S; 0
NSFEVSVCA

SEQ ID NO: 16369 - protein, 9 aa, Homo sapiens
  Table A; HLA-A*68:02; TP53; R273S; 0
NSFEVSVCA

SEQ ID NO: 16370 - protein, 9 aa, Homo sapiens
  Table A; HLA-B*39:06; TP53; R273S; 0
NSFEVSVCA

SEQ ID NO: 16371 - protein, 9 aa, Homo sapiens
  Table A; HLA-B*50:01; TP53; R273S; 0
NSFEVSVCA

SEQ ID NO: 16372 - protein, 9 aa, Homo sapiens
  Table A; HLA-B*54:01; TP53; R273S; 0
NSFEVSVCA

SEQ ID NO: 16373 - protein, 9 aa, Homo sapiens
  Table A; HLA-B*55:02; TP53; R273S; 0
NSFEVSVCA

SEQ ID NO: 16374 - protein, 9 aa, Homo sapiens
  Table A; HLA-B*56:01; TP53; R273S; 0
NSFEVSVCA

SEQ ID NO: 16375 - protein, 9 aa, Homo sapiens
  Table A; HLA-C*08:01; TP53; R273S; 0
NSFEVSVCA

SEQ ID NO: 16376 - protein, 9 aa, Homo sapiens
  Table A; HLA-B*39:06; TP53; E271K; 0
NSFKVRVCA

SEQ ID NO: 16377 - protein, 9 aa, Homo sapiens
  Table A; HLA-B*54:01; TP53; E271K; 0
NSFKVRVCA

SEQ ID NO: 16378 - protein, 8 aa, Homo sapiens
  Table A; HLA-C*08:03; CTNNB1; D32N; 0
NSGIHSGA

SEQ ID NO: 16379 - protein, 9 aa, Homo sapiens
  Table A; HLA-B*08:01; CTNNB1; D32N; 1
NSGIHSGAT

SEQ ID NO: 16380 - protein, 9 aa, Homo sapiens
  Table A; HLA-B*48:01; CTNNB1; D32N; 0
NSGIHSGAT

SEQ ID NO: 16381 - protein, 9 aa, Homo sapiens
  Table A; HLA-C*08:03; CTNNB1; D32N; 0
NSGIHSGAT

SEQ ID NO: 16382 - protein, 10 aa, Homo sapiens
  Table A; HLA-A*02:04; PIK3R1; K567E; 0
NSIEPDLIQL

SEQ ID NO: 16383 - protein, 10 aa, Homo sapiens
  Table A; HLA-A*02:05; PIK3R1; K567E; 0
NSIEPDLIQL

SEQ ID NO: 16384 - protein, 10 aa, Homo sapiens
  Table A; HLA-A*02:06; PIK3R1; K567E; 0
NSIEPDLIQL

SEQ ID NO: 16385 - protein, 10 aa, Homo sapiens
  Table A; HLA-A*02:07; PIK3R1; K567E; 0
NSIEPDLIQL

SEQ ID NO: 16386 - protein, 10 aa, Homo sapiens
  Table A; HLA-A*68:01; PIK3R1; K567E; 0
NSIEPDLIQL

SEQ ID NO: 16387 - protein, 10 aa, Homo sapiens
  Table A; HLA-A*68:02; PIK3R1; K567E; 0
NSIEPDLIQL

SEQ ID NO: 16388 - protein, 10 aa, Homo sapiens
  Table A; HLA-B*15:02; PIK3R1; K567E; 0
NSIEPDLIQL

SEQ ID NO: 16389 - protein, 10 aa, Homo sapiens
  Table A; HLA-B*35:03; PIK3R1; K567E; 0
NSIEPDLIQL

SEQ ID NO: 16390 - protein, 10 aa, Homo sapiens
  Table A; HLA-B*35:12; PIK3R1; K567E; 0
NSIEPDLIQL

SEQ ID NO: 16391 - protein, 10 aa, Homo sapiens
  Table A; HLA-B*50:01; PIK3R1; K567E; 0
NSIEPDLIQL

SEQ ID NO: 16392 - protein, 10 aa, Homo sapiens
  Table A; HLA-C*08:01; PIK3R1; K567E; 0
NSIEPDLIQL

SEQ ID NO: 16393 - protein, 11 aa, Homo sapiens
  Table A; HLA-A*11:01; PIK3R1; K567E; 1
NSIEPDLIQLR

SEQ ID NO: 16394 - protein, 11 aa, Homo sapiens
  Table A; HLA-A*26:03; PIK3R1; K567E; 0
NSIEPDLIQLR

SEQ ID NO: 16395 - protein, 11 aa, Homo sapiens
  Table A; HLA-A*31:01; PIK3R1; K567E; 0
NSIEPDLIQLR

SEQ ID NO: 16396 - protein, 11 aa, Homo sapiens
  Table A; HLA-A*33:01; PIK3R1; K567E; 0
NSIEPDLIQLR

SEQ ID NO: 16397 - protein, 11 aa, Homo sapiens
  Table A; HLA-A*33:03; PIK3R1; K567E; 0
NSIEPDLIQLR

SEQ ID NO: 16398 - protein, 11 aa, Homo sapiens
  Table A; HLA-A*68:01; PIK3R1; K567E; 0
NSIEPDLIQLR

SEQ ID NO: 16399 - protein, 11 aa, Homo sapiens
  Table A; HLA-A*68:02; PIK3R1; K567E; 0
NSIEPDLIQLR

SEQ ID NO: 16400 - protein, 11 aa, Homo sapiens
  Table A; HLA-B*57:01; PIK3R1; K567E; 0
NSIEPDLIQLR

SEQ ID NO: 16401 - protein, 11 aa, Homo sapiens
  Table A; HLA-A*11:01; PIK3R1; L573P; 0
NSIKPDLIQPR

SEQ ID NO: 16402 - protein, 11 aa, Homo sapiens
  Table A; HLA-A*26:03; PIK3R1; L573P; 0
NSIKPDLIQPR

SEQ ID NO: 16403 - protein, 11 aa, Homo sapiens
  Table A; HLA-A*31:01; PIK3R1; L573P; 0
NSIKPDLIQPR

SEQ ID NO: 16404 - protein, 11 aa, Homo sapiens
  Table A; HLA-A*33:01; PIK3R1; L573P; 0
NSIKPDLIQPR

SEQ ID NO: 16405 - protein, 11 aa, Homo sapiens
  Table A; HLA-A*33:03; PIK3R1; L573P; 0
NSIKPDLIQPR

SEQ ID NO: 16406 - protein, 11 aa, Homo sapiens
  Table A; HLA-A*68:01; PIK3R1; L573P; 0
NSIKPDLIQPR

SEQ ID NO: 16407 - protein, 11 aa, Homo sapiens
  Table A; HLA-A*68:02; PIK3R1; L573P; 0
NSIKPDLIQPR

SEQ ID NO: 16408 - protein, 11 aa, Homo sapiens
  Table A; HLA-B*27:02; PIK3R1; L573P; 0
NSIKPDLIQPR

SEQ ID NO: 16409 - protein, 11 aa, Homo sapiens
  Table A; HLA-B*54:01; PIK3R1; L573P; 0
NSIKPDLIQPR

SEQ ID NO: 16410 - protein, 11 aa, Homo sapiens
  Table A; HLA-B*57:01; PIK3R1; L573P; 0
NSIKPDLIQPR

SEQ ID NO: 16411 - protein, 10 aa, Homo sapiens
  Table A; HLA-A*68:01; TP53; G245V; 0
NSSCMGVMNR

SEQ ID NO: 16412 - protein, 10 aa, Homo sapiens
  Table A; HLA-A*68:01; TP53; G244S; 0
NSSCMSGMNR

SEQ ID NO: 16413 - protein, 10 aa, Homo sapiens
  Table A; HLA-A*33:01; TP53; C242F; 0
NSSFMGGMNR

SEQ ID NO: 16414 - protein, 10 aa, Homo sapiens
  Table A; HLA-A*33:03; TP53; C242F; 0
NSSFMGGMNR

SEQ ID NO: 16415 - protein, 10 aa, Homo sapiens
  Table A; HLA-A*68:01; TP53; C242F; 0
NSSFMGGMNR

SEQ ID NO: 16416 - protein, 8 aa, Homo sapiens
  Table A; HLA-B*37:01; MAP2K1; P124S; 0
NSSYIVGF

SEQ ID NO: 16417 - protein, 8 aa, Homo sapiens
  Table A; HLA-B*58:01; MAP2K1; P124S; 0
NSSYIVGF

SEQ ID NO: 16418 - protein, 9 aa, Homo sapiens
  Table A; HLA-A*01:01; MAP2K1; P124S; 1
NSSYIVGFY

SEQ ID NO: 16419 - protein, 9 aa, Homo sapiens
  Table A; HLA-A*26:01; MAP2K1; P124S; 1
NSSYIVGFY

SEQ ID NO: 16420 - protein, 9 aa, Homo sapiens
  Table A; HLA-A*29:01; MAP2K1; P124S; 0
NSSYIVGFY

SEQ ID NO: 16421 - protein, 9 aa, Homo sapiens
  Table A; HLA-A*29:02; MAP2K1; P124S; 1
NSSYIVGFY

SEQ ID NO: 16422 - protein, 9 aa, Homo sapiens
  Table A; HLA-A*30:02; MAP2K1; P124S; 0
NSSYIVGFY

SEQ ID NO: 16423 - protein, 9 aa, Homo sapiens
  Table A; HLA-A*30:04; MAP2K1; P124S; 0
NSSYIVGFY

SEQ ID NO: 16424 - protein, 9 aa, Homo sapiens
  Table A; HLA-A*68:02; MAP2K1; P124S; 0
NSSYIVGFY

SEQ ID NO: 16425 - protein, 9 aa, Homo sapiens
  Table A; HLA-B*58:01; MAP2K1; P124S; 0
NSSYIVGFY

SEQ ID NO: 16426 - protein, 10 aa, Homo sapiens
  Table A; HLA-A*68:02; MAP2K1; P124S; 0
NSSYIVGFYG

SEQ ID NO: 16427 - protein, 10 aa, Homo sapiens
  Table A; HLA-A*02:03; CDKN2A; P48L; 0
NSYGRRLIQV

SEQ ID NO: 16428 - protein, 8 aa, Homo sapiens
  Table A; HLA-A*68:02; TP53; R213Q; 0
NTFQHSVV

SEQ ID NO: 16429 - protein, 8 aa, Homo sapiens
  Table A; HLA-B*08:01; TP53; R213Q; 1
NTFQHSVV

SEQ ID NO: 16430 - protein, 8 aa, Homo sapiens
  Table A; HLA-B*14:01; TP53; R213Q; 0
NTFQHSVV

SEQ ID NO: 16431 - protein, 8 aa, Homo sapiens
  Table A; HLA-B*14:02; TP53; R213Q; 0
NTFQHSVV

SEQ ID NO: 16432 - protein, 8 aa, Homo sapiens
  Table A; HLA-C*08:03; TP53; R213Q; 0
NTFQHSVV

SEQ ID NO: 16433 - protein, 8 aa, Homo sapiens
  Table A; HLA-C*12:03; TP53; R213Q; 0
NTFQHSVV

SEQ ID NO: 16434 - protein, 8 aa, Homo sapiens
  Table A; HLA-C*16:01; TP53; R213Q; 0
NTFQHSVV

SEQ ID NO: 16435 - protein, 9 aa, Homo sapiens
  Table A; HLA-A*02:01; TP53; R213Q; 1
NTFQHSVVV

SEQ ID NO: 16436 - protein, 9 aa, Homo sapiens
  Table A; HLA-A*02:03; TP53; R213Q; 0
NTFQHSVVV

SEQ ID NO: 16437 - protein, 9 aa, Homo sapiens
  Table A; HLA-A*02:05; TP53; R213Q; 0
NTFQHSVVV

SEQ ID NO: 16438 - protein, 9 aa, Homo sapiens
  Table A; HLA-A*02:06; TP53; R213Q; 0
NTFQHSVVV

SEQ ID NO: 16439 - protein, 9 aa, Homo sapiens
  Table A; HLA-A*02:08; TP53; R213Q; 0
NTFQHSVVV

SEQ ID NO: 16440 - protein, 9 aa, Homo sapiens
  Table A; HLA-A*30:01; TP53; R213Q; 0
NTFQHSVVV

SEQ ID NO: 16441 - protein, 9 aa, Homo sapiens
  Table A; HLA-A*68:01; TP53; R213Q; 0
NTFQHSVVV

SEQ ID NO: 16442 - protein, 9 aa, Homo sapiens
  Table A; HLA-A*68:02; TP53; R213Q; 0
NTFQHSVVV

SEQ ID NO: 16443 - protein, 9 aa, Homo sapiens
  Table A; HLA-B*13:02; TP53; R213Q; 0
NTFQHSVVV

SEQ ID NO: 16444 - protein, 9 aa, Homo sapiens
  Table A; HLA-B*15:02; TP53; R213Q; 0
NTFQHSVVV

SEQ ID NO: 16445 - protein, 9 aa, Homo sapiens
  Table A; HLA-B*15:10; TP53; R213Q; 0
NTFQHSVVV

SEQ ID NO: 16446 - protein, 9 aa, Homo sapiens
  Table A; HLA-B*35:01; TP53; R213Q; 0
NTFQHSVVV

SEQ ID NO: 16447 - protein, 9 aa, Homo sapiens
  Table A; HLA-B*35:03; TP53; R213Q; 0
NTFQHSVVV

SEQ ID NO: 16448 - protein, 9 aa, Homo sapiens
  Table A; HLA-B*50:01; TP53; R213Q; 0
NTFQHSVVV

SEQ ID NO: 16449 - protein, 9 aa, Homo sapiens
  Table A; HLA-B*51:01; TP53; R213Q; 0
NTFQHSVVV

SEQ ID NO: 16450 - protein, 9 aa, Homo sapiens
  Table A; HLA-B*54:01; TP53; R213Q; 0
NTFQHSVVV

SEQ ID NO: 16451 - protein, 9 aa, Homo sapiens
  Table A; HLA-C*02:02; TP53; R213Q; 0
NTFQHSVVV

SEQ ID NO: 16452 - protein, 9 aa, Homo sapiens
  Table A; HLA-C*08:01; TP53; R213Q; 0
NTFQHSVVV

SEQ ID NO: 16453 - protein, 9 aa, Homo sapiens
  Table A; HLA-C*12:03; TP53; R213Q; 0
NTFQHSVVV

SEQ ID NO: 16454 - protein, 9 aa, Homo sapiens
  Table A; HLA-C*15:02; TP53; R213Q; 0
NTFQHSVVV

SEQ ID NO: 16455 - protein, 9 aa, Homo sapiens
  Table A; HLA-C*16:01; TP53; R213Q; 0
NTFQHSVVV

SEQ ID NO: 16456 - protein, 9 aa, Homo sapiens
  Table A; HLA-C*16:04; TP53; R213Q; 0
NTFQHSVVV

SEQ ID NO: 16457 - protein, 11 aa, Homo sapiens
  Table A; HLA-B*35:01; TP53; R213Q; 0
NTFQHSVVVPY

SEQ ID NO: 16458 - protein, 9 aa, Homo sapiens
  Table A; HLA-A*68:02; TP53; S215G; 0
NTFRHGVVV

SEQ ID NO: 16459 - protein, 9 aa, Homo sapiens
  Table A; HLA-B*54:01; TP53; S215G; 0
NTFRHGVVV

SEQ ID NO: 16460 - protein, 9 aa, Homo sapiens
  Table A; HLA-C*12:03; TP53; S215G; 0
NTFRHGVVV

SEQ ID NO: 16461 - protein, 9 aa, Homo sapiens
  Table A; HLA-C*15:02; TP53; S215G; 0
NTFRHGVVV

SEQ ID NO: 16462 - protein, 9 aa, Homo sapiens
  Table A; HLA-A*68:02; TP53; V216M; 0
NTFRHSMVV

SEQ ID NO: 16463 - protein, 9 aa, Homo sapiens
  Table A; HLA-C*12:03; TP53; V216M; 0
NTFRHSMVV

SEQ ID NO: 16464 - protein, 9 aa, Homo sapiens
  Table A; HLA-C*15:02; TP53; V216M; 0
NTFRHSMVV

SEQ ID NO: 16465 - protein, 9 aa, Homo sapiens
  Table A; HLA-A*68:02; TP53; H214R; 0
NTFRRSVVV

SEQ ID NO: 16466 - protein, 9 aa, Homo sapiens
  Table A; HLA-A*68:01; CTNND1; A781T; 0
NTINEVITE

SEQ ID NO: 16467 - protein, 9 aa, Homo sapiens
  Table A; HLA-A*68:02; CTNND1; A781T; 0
NTINEVITE

SEQ ID NO: 16468 - protein, 10 aa, Homo sapiens
  Table A; HLA-A*68:01; CTNND1; A781T; 0
NTINEVITEN

SEQ ID NO: 16469 - protein, 10 aa, Homo sapiens
  Table A; HLA-A*68:02; CTNND1; A781T; 0
NTINEVITEN

SEQ ID NO: 16470 - protein, 11 aa, Homo sapiens
  Table A; HLA-A*02:05; CTNND1; A781T; 0
NTINEVITENL

SEQ ID NO: 16471 - protein, 11 aa, Homo sapiens
  Table A; HLA-A*68:01; CTNND1; A781T; 0
NTINEVITENL

SEQ ID NO: 16472 - protein, 11 aa, Homo sapiens
  Table A; HLA-A*68:02; CTNND1; A781T; 0
NTINEVITENL

SEQ ID NO: 16473 - protein, 9 aa, Homo sapiens
  Table A; HLA-A*26:01; MSN; E573K; 0
NTKQRIDKF

SEQ ID NO: 16474 - protein, 9 aa, Homo sapiens
  Table A; HLA-A*26:02; MSN; E573K; 0
NTKQRIDKF

SEQ ID NO: 16475 - protein, 9 aa, Homo sapiens
  Table A; HLA-B*57:01; MSN; E573K; 0
NTKQRIDKF

SEQ ID NO: 16476 - protein, 10 aa, Homo sapiens
  Table A; HLA-B*58:01; MTOR; S2215Y; 0
NTLLANDPTY

SEQ ID NO: 16477 - protein, 8 aa, Homo sapiens
  Table A; HLA-B*15:02; CDH11; K357T; 0
NVHIDPTF

SEQ ID NO: 16478 - protein, 8 aa, Homo sapiens
  Table A; HLA-B*35:01; CDH11; K357T; 1
NVHIDPTF

SEQ ID NO: 16479 - protein, 8 aa, Homo sapiens
  Table A; HLA-B*35:02; CDH11; K357T; 0
NVHIDPTF

SEQ ID NO: 16480 - protein, 8 aa, Homo sapiens
  Table A; HLA-B*35:03; CDH11; K357T; 0
NVHIDPTF

SEQ ID NO: 16481 - protein, 8 aa, Homo sapiens
  Table A; HLA-B*35:12; CDH11; K357T; 0
NVHIDPTF

SEQ ID NO: 16482 - protein, 9 aa, Homo sapiens
  Table A; HLA-A*68:02; CDH11; K357T; 0
NVHIDPTFI

SEQ ID NO: 16483 - protein, 9 aa, Homo sapiens
  Table A; HLA-A*03:02; PIK3CA; C378R; 0
NVNTQRVPR

SEQ ID NO: 16484 - protein, 9 aa, Homo sapiens
  Table A; HLA-A*11:01; PIK3CA; C378R; 0
NVNTQRVPR

SEQ ID NO: 16485 - protein, 9 aa, Homo sapiens
  Table A; HLA-A*26:03; PIK3CA; C378R; 0
NVNTQRVPR

SEQ ID NO: 16486 - protein, 9 aa, Homo sapiens
  Table A; HLA-A*31:01; PIK3CA; C378R; 0
NVNTQRVPR

SEQ ID NO: 16487 - protein, 9 aa, Homo sapiens
  Table A; HLA-A*33:01; PIK3CA; C378R; 0
NVNTQRVPR

SEQ ID NO: 16488 - protein, 9 aa, Homo sapiens
  Table A; HLA-A*33:03; PIK3CA; C378R; 0
NVNTQRVPR

SEQ ID NO: 16489 - protein, 9 aa, Homo sapiens
  Table A; HLA-A*68:01; PIK3CA; C378R; 0
NVNTQRVPR

SEQ ID NO: 16490 - protein, 9 aa, Homo sapiens
  Table A; HLA-C*14:02; TP53; M237I; 0
NYICNSSCM

SEQ ID NO: 16491 - protein, 9 aa, Homo sapiens
  Table A; HLA-A*23:01; ERBB2; S310F; 0
NYLSTDVGF

SEQ ID NO: 16492 - protein, 9 aa, Homo sapiens
  Table A; HLA-A*24:02; ERBB2; S310F; 1
NYLSTDVGF

SEQ ID NO: 16493 - protein, 9 aa, Homo sapiens
  Table A; HLA-C*04:01; ERBB2; S310F; 1
NYLSTDVGF

SEQ ID NO: 16494 - protein, 9 aa, Homo sapiens
  Table A; HLA-C*14:02; ERBB2; S310F; 0
NYLSTDVGF

SEQ ID NO: 16495 - protein, 9 aa, Homo sapiens
  Table A; HLA-C*14:03; ERBB2; S310F; 0
NYLSTDVGF

SEQ ID NO: 16496 - protein, 9 aa, Homo sapiens
  Table A; HLA-A*29:01; ERBB2; S310Y; 0
NYLSTDVGY

SEQ ID NO: 16497 - protein, 9 aa, Homo sapiens
  Table A; HLA-A*29:02; ERBB2; S310Y; 0
NYLSTDVGY

SEQ ID NO: 16498 - protein, 9 aa, Homo sapiens
  Table A; HLA-C*14:02; ERBB2; S310Y; 0
NYLSTDVGY

SEQ ID NO: 16499 - protein, 9 aa, Homo sapiens
  Table A; HLA-C*14:03; ERBB2; S310Y; 0
NYLSTDVGY

SEQ ID NO: 16500 - protein, 8 aa, Homo sapiens
  Table A; HLA-C*14:02; TP53; C242F; 0
NYMCNSSF

SEQ ID NO: 16501 - protein, 8 aa, Homo sapiens
  Table A; HLA-C*14:03; TP53; C242F; 0
NYMCNSSF

SEQ ID NO: 16502 - protein, 9 aa, Homo sapiens
  Table A; HLA-C*14:02; TP53; C242F; 0
NYMCNSSFM

SEQ ID NO: 16503 - protein, 9 aa, Homo sapiens
  Table A; HLA-C*14:03; TP53; C242F; 0
NYMCNSSFM

SEQ ID NO: 16504 - protein, 9 aa, Homo sapiens
  Table A; HLA-C*14:02; TP53; N239S; 0
NYMCSSSCM

SEQ ID NO: 16505 - protein, 9 aa, Homo sapiens
  Table A; HLA-C*14:03; TP53; N239S; 0
NYMCSSSCM

SEQ ID NO: 16506 - protein, 9 aa, Homo sapiens
  Table A; HLA-A*23:01; TP53; C238F; 0
NYMFNSSCM

SEQ ID NO: 16507 - protein, 9 aa, Homo sapiens
  Table A; HLA-A*24:02; TP53; C238F; 0
NYMFNSSCM

SEQ ID NO: 16508 - protein, 9 aa, Homo sapiens
  Table A; HLA-C*14:02; TP53; C238F; 0
NYMFNSSCM

SEQ ID NO: 16509 - protein, 9 aa, Homo sapiens
  Table A; HLA-C*14:03; TP53; C238F; 0
NYMFNSSCM

SEQ ID NO: 16510 - protein, 9 aa, Homo sapiens
  Table A; HLA-A*24:02; TP53; C238Y; 1
NYMYNSSCM

SEQ ID NO: 16511 - protein, 9 aa, Homo sapiens
  Table A; HLA-C*14:02; TP53; C238Y; 0
NYMYNSSCM

SEQ ID NO: 16512 - protein, 9 aa, Homo sapiens
  Table A; HLA-C*14:03; TP53; C238Y; 0
NYMYNSSCM

SEQ ID NO: 16513 - protein, 9 aa, Homo sapiens
  Table A; HLA-A*23:01; VHL; S111N; 0
NYRGHLWLF

SEQ ID NO: 16514 - protein, 9 aa, Homo sapiens
  Table A; HLA-A*24:02; VHL; S111N; 1
NYRGHLWLF

SEQ ID NO: 16515 - protein, 9 aa, Homo sapiens
  Table A; HLA-C*06:02; VHL; S111N; 1
NYRGHLWLF

SEQ ID NO: 16516 - protein, 9 aa, Homo sapiens
  Table A; HLA-C*07:02; VHL; S111N; 1
NYRGHLWLF

SEQ ID NO: 16517 - protein, 9 aa, Homo sapiens
  Table A; HLA-B*35:01; CDKN2A; H83Y; 0
PATLTRPVY

SEQ ID NO: 16518 - protein, 9 aa, Homo sapiens
  Table A; HLA-C*16:01; CDKN2A; H83Y; 0
PATLTRPVY

SEQ ID NO: 16519 - protein, 9 aa, Homo sapiens
  Table A; HLA-A*30:01; PDE4DIP; C1297R; 0
PEREEHNSL

SEQ ID NO: 16520 - protein, 9 aa, Homo sapiens
  Table A; HLA-B*07:02; PDE4DIP; C1297R; 1
PEREEHNSL

SEQ ID NO: 16521 - protein, 9 aa, Homo sapiens
  Table A; HLA-B*14:02; PDE4DIP; C1297R; 0
PEREEHNSL

SEQ ID NO: 16522 - protein, 9 aa, Homo sapiens
  Table A; HLA-B*40:02; PDE4DIP; C1297R; 0
PEREEHNSL

SEQ ID NO: 16523 - protein, 9 aa, Homo sapiens
  Table A; HLA-B*41:02; PDE4DIP; C1297R; 0
PEREEHNSL

SEQ ID NO: 16524 - protein, 9 aa, Homo sapiens
  Table A; HLA-A*29:02; KRAS; A146T; 1
PFIETSTKT

SEQ ID NO: 16525 - protein, 9 aa, Homo sapiens
  Table A; HLA-B*15:01; IDH1; R132G; 1
PIIIGGHAY

SEQ ID NO: 16526 - protein, 9 aa, Homo sapiens
  Table A; HLA-B*15:01; IDH1; R132S; 1
PIIIGSHAY

SEQ ID NO: 16527 - protein, 8 aa, Homo sapiens
  Table A; HLA-B*15:02; SMAD4; G352V; 0
PIVTVDVY

SEQ ID NO: 16528 - protein, 8 aa, Homo sapiens
  Table A; HLA-B*35:01; SMAD4; G352V; 1
PIVTVDVY

SEQ ID NO: 16529 - protein, 10 aa, Homo sapiens
  Table A; HLA-A*02:01; CREB3L1; V414I; 1
PLAADGIYTA

SEQ ID NO: 16530 - protein, 9 aa, Homo sapiens
  Table A; HLA-A*02:03; XPO1; R749Q; 0
PLIRSMQTV

SEQ ID NO: 16531 - protein, 9 aa, Homo sapiens
  Table A; HLA-A*02:04; SMARCA4; E920K; 0
PLQNKLPKL

SEQ ID NO: 16532 - protein, 10 aa, Homo sapiens
  Table A; HLA-B*27:02; PIK3CA; E545D; 0
PLSEITDQEK

SEQ ID NO: 16533 - protein, 8 aa, Homo sapiens
  Table A; HLA-A*03:02; PIK3CA; Q546K; 0
PLSEITEK

SEQ ID NO: 16534 - protein, 8 aa, Homo sapiens
  Table A; HLA-A*11:01; PIK3CA; Q546K; 1
PLSEITEK

SEQ ID NO: 16535 - protein, 8 aa, Homo sapiens
  Table A; HLA-A*11:01; PIK3CA; Q546R; 1
PLSEITER

SEQ ID NO: 16536 - protein, 8 aa, Homo sapiens
  Table A; HLA-A*68:01; PIK3CA; Q546R; 0
PLSEITER

SEQ ID NO: 16537 - protein, 10 aa, Homo sapiens
  Table A; HLA-B*27:02; PIK3CA; E545G; 0
PLSEITGQEK

SEQ ID NO: 16538 - protein, 8 aa, Homo sapiens
  Table A; HLA-A*68:01; GLI1; R637Q; 0
PNAGVTQR

SEQ ID NO: 16539 - protein, 9 aa, Homo sapiens
  Table A; HLA-B*15:02; PTPRT; L695F; 0
PPFSPLKSY

SEQ ID NO: 16540 - protein, 9 aa, Homo sapiens
  Table A; HLA-B*35:01; PTPRT; L695F; 1
PPFSPLKSY

SEQ ID NO: 16541 - protein, 10 aa, Homo sapiens
  Table A; HLA-B*07:02; TP53; R158H; 1
PPPGTRVHAM

SEQ ID NO: 16542 - protein, 8 aa, Homo sapiens
  Table A; HLA-B*51:01; PCBP1; L100Q; 1
PPVTQRLV

SEQ ID NO: 16543 - protein, 8 aa, Homo sapiens
  Table A; HLA-C*08:03; PCBP1; L100Q; 0
PPVTQRLV

SEQ ID NO: 16544 - protein, 9 aa, Homo sapiens
  Table A; HLA-B*07:02; PCBP1; L100Q; 1
PPVTQRLVV

SEQ ID NO: 16545 - protein, 9 aa, Homo sapiens
  Table A; HLA-B*51:01; PCBP1; L100Q; 1
PPVTQRLVV

SEQ ID NO: 16546 - protein, 9 aa, Homo sapiens
  Table A; HLA-B*54:01; PCBP1; L100Q; 0
PPVTQRLVV

SEQ ID NO: 16547 - protein, 9 aa, Homo sapiens
  Table A; HLA-B*56:01; PCBP1; L100Q; 0
PPVTQRLVV

SEQ ID NO: 16548 - protein, 11 aa, Homo sapiens
  Table A; HLA-B*54:01; PCBP1; L100Q; 0
PPVTQRLVVPA

SEQ ID NO: 16549 - protein, 11 aa, Homo sapiens
  Table A; HLA-B*56:01; PCBP1; L100Q; 0
PPVTQRLVVPA

SEQ ID NO: 16550 - protein, 9 aa, Homo sapiens
  Table A; HLA-B*15:01; FKBP9; R161Q; 1
PQTIQVSDF

SEQ ID NO: 16551 - protein, 9 aa, Homo sapiens
  Table A; HLA-B*39:01; FKBP9; R161Q; 0
PQTIQVSDF

SEQ ID NO: 16552 - protein, 8 aa, Homo sapiens
  Table A; HLA-B*13:02; SFRP4; R232Q; 0
PQTQVPLI

SEQ ID NO: 16553 - protein, 8 aa, Homo sapiens
  Table A; HLA-A*68:01; TP53; R283P; 0
PTEEENLR

SEQ ID NO: 16554 - protein, 9 aa, Homo sapiens
  Table A; HLA-A*01:01; TP53; R283P; 1
PTEEENLRK

SEQ ID NO: 16555 - protein, 9 aa, Homo sapiens
  Table A; HLA-A*23:01; ARID1A; G2087R; 0
PVLDRLLHW

SEQ ID NO: 16556 - protein, 9 aa, Homo sapiens
  Table A; HLA-A*24:02; ARID1A; G2087R; 0
PVLDRLLHW

SEQ ID NO: 16557 - protein, 9 aa, Homo sapiens
  Table A; HLA-B*57:01; ARID1A; G2087R; 0
PVLDRLLHW

SEQ ID NO: 16558 - protein, 8 aa, Homo sapiens
  Table A; HLA-B*07:02; PCBP1; L100Q; 1
PVTQRLVV

SEQ ID NO: 16559 - protein, 10 aa, Homo sapiens
  Table A; HLA-A*25:01; CDKN2A; H83Y; 0
PVYDAAREGF

SEQ ID NO: 16560 - protein, 10 aa, Homo sapiens
  Table A; HLA-A*26:01; CDKN2A; H83Y; 0
PVYDAAREGF

SEQ ID NO: 16561 - protein, 8 aa, Homo sapiens
  Table A; HLA-A*24:02; CNTNAP2; T373M; 1
PYMVPVFF

SEQ ID NO: 16562 - protein, 9 aa, Homo sapiens
  Table A; HLA-A*02:05; SF3B1; R957Q; 0
QAADLISQT

SEQ ID NO: 16563 - protein, 9 aa, Homo sapiens
  Table A; HLA-A*30:01; SF3B1; R957Q; 0
QAADLISQT

SEQ ID NO: 16564 - protein, 9 aa, Homo sapiens
  Table A; HLA-A*33:03; SF3B1; R957Q; 0
QAADLISQT

SEQ ID NO: 16565 - protein, 9 aa, Homo sapiens
  Table A; HLA-A*68:01; SF3B1; R957Q; 0
QAADLISQT

SEQ ID NO: 16566 - protein, 9 aa, Homo sapiens
  Table A; HLA-A*68:02; SF3B1; R957Q; 0
QAADLISQT

SEQ ID NO: 16567 - protein, 9 aa, Homo sapiens
  Table A; HLA-C*12:03; SF3B1; R957Q; 1
QAADLISQT

SEQ ID NO: 16568 - protein, 10 aa, Homo sapiens
  Table A; HLA-A*02:05; SF3B1; R957Q; 0
QAADLISQTA

SEQ ID NO: 16569 - protein, 10 aa, Homo sapiens
  Table A; HLA-A*02:08; SF3B1; R957Q; 0
QAADLISQTA

SEQ ID NO: 16570 - protein, 10 aa, Homo sapiens
  Table A; HLA-A*30:01; SF3B1; R957Q; 0
QAADLISQTA

SEQ ID NO: 16571 - protein, 10 aa, Homo sapiens
  Table A; HLA-A*68:01; SF3B1; R957Q; 0
QAADLISQTA

SEQ ID NO: 16572 - protein, 10 aa, Homo sapiens
  Table A; HLA-A*68:02; SF3B1; R957Q; 0
QAADLISQTA

SEQ ID NO: 16573 - protein, 10 aa, Homo sapiens
  Table A; HLA-B*13:02; SF3B1; R957Q; 0
QAADLISQTA

SEQ ID NO: 16574 - protein, 10 aa, Homo sapiens
  Table A; HLA-B*35:01; SF3B1; R957Q; 1
QAADLISQTA

SEQ ID NO: 16575 - protein, 10 aa, Homo sapiens
  Table A; HLA-B*35:03; SF3B1; R957Q; 0
QAADLISQTA

SEQ ID NO: 16576 - protein, 10 aa, Homo sapiens
  Table A; HLA-B*39:06; SF3B1; R957Q; 0
QAADLISQTA

SEQ ID NO: 16577 - protein, 10 aa, Homo sapiens
  Table A; HLA-B*48:01; SF3B1; R957Q; 0
QAADLISQTA

SEQ ID NO: 16578 - protein, 10 aa, Homo sapiens
  Table A; HLA-B*50:01; SF3B1; R957Q; 0
QAADLISQTA

SEQ ID NO: 16579 - protein, 10 aa, Homo sapiens
  Table A; HLA-B*54:01; SF3B1; R957Q; 0
QAADLISQTA

SEQ ID NO: 16580 - protein, 10 aa, Homo sapiens
  Table A; HLA-B*55:01; SF3B1; R957Q; 0
QAADLISQTA

SEQ ID NO: 16581 - protein, 10 aa, Homo sapiens
  Table A; HLA-B*55:02; SF3B1; R957Q; 0
QAADLISQTA

SEQ ID NO: 16582 - protein, 10 aa, Homo sapiens
  Table A; HLA-B*56:01; SF3B1; R957Q; 0
QAADLISQTA

SEQ ID NO: 16583 - protein, 10 aa, Homo sapiens
  Table A; HLA-C*08:01; SF3B1; R957Q; 0
QAADLISQTA

SEQ ID NO: 16584 - protein, 10 aa, Homo sapiens
  Table A; HLA-C*12:03; SF3B1; R957Q; 1
QAADLISQTA

SEQ ID NO: 16585 - protein, 10 aa, Homo sapiens
  Table A; HLA-C*16:04; SF3B1; R957Q; 0
QAADLISQTA

SEQ ID NO: 16586 - protein, 11 aa, Homo sapiens
  Table A; HLA-A*02:01; SF3B1; R957Q; 1
QAADLISQTAV

SEQ ID NO: 16587 - protein, 11 aa, Homo sapiens
  Table A; HLA-A*02:03; SF3B1; R957Q; 0
QAADLISQTAV

SEQ ID NO: 16588 - protein, 11 aa, Homo sapiens
  Table A; HLA-A*02:05; SF3B1; R957Q; 0
QAADLISQTAV

SEQ ID NO: 16589 - protein, 11 aa, Homo sapiens
  Table A; HLA-A*02:06; SF3B1; R957Q; 0
QAADLISQTAV

SEQ ID NO: 16590 - protein, 11 aa, Homo sapiens
  Table A; HLA-A*30:01; SF3B1; R957Q; 0
QAADLISQTAV

SEQ ID NO: 16591 - protein, 11 aa, Homo sapiens
  Table A; HLA-A*68:01; SF3B1; R957Q; 0
QAADLISQTAV

SEQ ID NO: 16592 - protein, 11 aa, Homo sapiens
  Table A; HLA-A*68:02; SF3B1; R957Q; 0
QAADLISQTAV

SEQ ID NO: 16593 - protein, 11 aa, Homo sapiens
  Table A; HLA-B*13:02; SF3B1; R957Q; 0
QAADLISQTAV

SEQ ID NO: 16594 - protein, 11 aa, Homo sapiens
  Table A; HLA-B*35:01; SF3B1; R957Q; 1
QAADLISQTAV

SEQ ID NO: 16595 - protein, 11 aa, Homo sapiens
  Table A; HLA-B*35:03; SF3B1; R957Q; 0
QAADLISQTAV

SEQ ID NO: 16596 - protein, 11 aa, Homo sapiens
  Table A; HLA-B*48:01; SF3B1; R957Q; 0
QAADLISQTAV

SEQ ID NO: 16597 - protein, 11 aa, Homo sapiens
  Table A; HLA-B*54:01; SF3B1; R957Q; 0
QAADLISQTAV

SEQ ID NO: 16598 - protein, 11 aa, Homo sapiens
  Table A; HLA-C*16:04; SF3B1; R957Q; 0
QAADLISQTAV

SEQ ID NO: 16599 - protein, 10 aa, Homo sapiens
  Table A; HLA-A*02:06; PPP2R1A; S256F; 0
QAAEDKFWRV

SEQ ID NO: 16600 - protein, 10 aa, Homo sapiens
  Table A; HLA-A*68:02; PPP2R1A; S256F; 0
QAAEDKFWRV

SEQ ID NO: 16601 - protein, 11 aa, Homo sapiens
  Table A; HLA-A*30:02; MAX; R60Q; 0
QAQILDKATEY

SEQ ID NO: 16602 - protein, 11 aa, Homo sapiens
  Table A; HLA-B*35:01; MAX; R60Q; 1
QAQILDKATEY

SEQ ID NO: 16603 - protein, 8 aa, Homo sapiens
  Table A; HLA-A*03:02; SMARCA4; G1232S; 0
QASMFDQK

SEQ ID NO: 16604 - protein, 8 aa, Homo sapiens
  Table A; HLA-A*11:01; SMARCA4; G1232S; 0
QASMFDQK

SEQ ID NO: 16605 - protein, 9 aa, Homo sapiens
  Table A; HLA-B*57:01; PTK6; H126P; 1
QAVRPYKIW

SEQ ID NO: 16606 - protein, 9 aa, Homo sapiens
  Table A; HLA-B*51:01; MB21D2; Q311E; 0
QAYEACKAI

SEQ ID NO: 16607 - protein, 11 aa, Homo sapiens
  Table A; HLA-B*40:02; NFE2L2; R34G; 0
QDIDLGVSGEV

SEQ ID NO: 16608 - protein, 11 aa, Homo sapiens
  Table A; HLA-B*48:01; NFE2L2; R34G; 0
QDIDLGVSGEV

SEQ ID NO: 16609 - protein, 11 aa, Homo sapiens
  Table A; HLA-C*08:03; NFE2L2; R34G; 0
QDIDLGVSGEV

SEQ ID NO: 16610 - protein, 11 aa, Homo sapiens
  Table A; HLA-B*40:02; NFE2L2; R34Q; 0
QDIDLGVSQEV

SEQ ID NO: 16611 - protein, 11 aa, Homo sapiens
  Table A; HLA-B*44:05; NFE2L2; R34Q; 0
QDIDLGVSQEV

SEQ ID NO: 16612 - protein, 11 aa, Homo sapiens
  Table A; HLA-C*08:03; NFE2L2; R34Q; 0
QDIDLGVSQEV

SEQ ID NO: 16613 - protein, 9 aa, Homo sapiens
  Table A; HLA-A*11:01; NFE2L2; D29G; 0
QDIGLGVSR

SEQ ID NO: 16614 - protein, 9 aa, Homo sapiens
  Table A; HLA-A*31:01; NFE2L2; D29G; 0
QDIGLGVSR

SEQ ID NO: 16615 - protein, 9 aa, Homo sapiens
  Table A; HLA-A*33:01; NFE2L2; D29G; 0
QDIGLGVSR

SEQ ID NO: 16616 - protein, 9 aa, Homo sapiens
  Table A; HLA-A*33:03; NFE2L2; D29G; 0
QDIGLGVSR

SEQ ID NO: 16617 - protein, 9 aa, Homo sapiens
  Table A; HLA-A*68:01; NFE2L2; D29G; 0
QDIGLGVSR

SEQ ID NO: 16618 - protein, 9 aa, Homo sapiens
  Table A; HLA-A*68:02; NFE2L2; D29G; 0
QDIGLGVSR

SEQ ID NO: 16619 - protein, 9 aa, Homo sapiens
  Table A; HLA-B*27:02; NFE2L2; D29G; 0
QDIGLGVSR

SEQ ID NO: 16620 - protein, 9 aa, Homo sapiens
  Table A; HLA-B*27:05; NFE2L2; D29G; 0
QDIGLGVSR

SEQ ID NO: 16621 - protein, 11 aa, Homo sapiens
  Table A; HLA-B*40:02; NFE2L2; D29G; 0
QDIGLGVSREV

SEQ ID NO: 16622 - protein, 9 aa, Homo sapiens
  Table A; HLA-A*31:01; NFE2L2; D29H; 0
QDIHLGVSR

SEQ ID NO: 16623 - protein, 9 aa, Homo sapiens
  Table A; HLA-A*33:01; NFE2L2; D29H; 0
QDIHLGVSR

SEQ ID NO: 16624 - protein, 9 aa, Homo sapiens
  Table A; HLA-A*33:03; NFE2L2; D29H; 0
QDIHLGVSR

SEQ ID NO: 16625 - protein, 9 aa, Homo sapiens
  Table A; HLA-A*68:01; NFE2L2; D29H; 0
QDIHLGVSR

SEQ ID NO: 16626 - protein, 9 aa, Homo sapiens
  Table A; HLA-A*68:02; NFE2L2; D29H; 0
QDIHLGVSR

SEQ ID NO: 16627 - protein, 9 aa, Homo sapiens
  Table A; HLA-B*27:02; NFE2L2; D29H; 0
QDIHLGVSR

SEQ ID NO: 16628 - protein, 9 aa, Homo sapiens
  Table A; HLA-A*30:01; PIK3CA; E453Q; 0
QDLLNPIGV

SEQ ID NO: 16629 - protein, 9 aa, Homo sapiens
  Table A; HLA-B*37:01; PIK3CA; E453Q; 0
QDLLNPIGV

SEQ ID NO: 16630 - protein, 9 aa, Homo sapiens
  Table A; HLA-B*39:06; PIK3CA; E453Q; 0
QDLLNPIGV

SEQ ID NO: 16631 - protein, 9 aa, Homo sapiens
  Table A; HLA-B*40:02; PIK3CA; E453Q; 0
QDLLNPIGV

SEQ ID NO: 16632 - protein, 9 aa, Homo sapiens
  Table A; HLA-B*41:02; PIK3CA; E453Q; 0
QDLLNPIGV

SEQ ID NO: 16633 - protein, 9 aa, Homo sapiens
  Table A; HLA-B*37:01; GNAS; R201H; 0
QDLLRCHVL

SEQ ID NO: 16634 - protein, 8 aa, Homo sapiens
  Table A; HLA-B*41:02; STAG1; A116T; 0
QDRDITLL

SEQ ID NO: 16635 - protein, 8 aa, Homo sapiens
  Table A; HLA-B*41:02; PIK3CA; E81K; 0
QEAEREKF

SEQ ID NO: 16636 - protein, 8 aa, Homo sapiens
  Table A; HLA-B*44:05; PIK3CA; E81K; 0
QEAEREKF

SEQ ID NO: 16637 - protein, 9 aa, Homo sapiens
  Table A; HLA-B*37:01; PIK3CA; E81K; 0
QEAEREKFF

SEQ ID NO: 16638 - protein, 9 aa, Homo sapiens
  Table A; HLA-B*44:02; PIK3CA; E81K; 0
QEAEREKFF

SEQ ID NO: 16639 - protein, 9 aa, Homo sapiens
  Table A; HLA-B*44:03; PIK3CA; E81K; 0
QEAEREKFF

SEQ ID NO: 16640 - protein, 10 aa, Homo sapiens
  Table A; HLA-B*40:02; DDIT3; R147H; 0
QEIEHLTREV

SEQ ID NO: 16641 - protein, 10 aa, Homo sapiens
  Table A; HLA-B*44:05; DDIT3; R147H; 0
QEIEHLTREV

SEQ ID NO: 16642 - protein, 10 aa, Homo sapiens
  Table A; HLA-B*49:01; DDIT3; R147H; 0
QEIEHLTREV

SEQ ID NO: 16643 - protein, 10 aa, Homo sapiens
  Table A; HLA-B*50:01; DDIT3; R147H; 0
QEIEHLTREV

SEQ ID NO: 16644 - protein, 9 aa, Homo sapiens
  Table A; HLA-B*27:02; NFE2L2; R34Q; 0
QEVFDFSQR

SEQ ID NO: 16645 - protein, 9 aa, Homo sapiens
  Table A; HLA-B*49:01; NFE2L2; R34Q; 0
QEVFDFSQR

SEQ ID NO: 16646 - protein, 8 aa, Homo sapiens
  Table A; HLA-A*02:05; SF3B1; K700E; 0
QEVRTISA

SEQ ID NO: 16647 - protein, 8 aa, Homo sapiens
  Table A; HLA-A*02:08; SF3B1; K700E; 0
QEVRTISA

SEQ ID NO: 16648 - protein, 8 aa, Homo sapiens
  Table A; HLA-B*18:01; SF3B1; K700E; 1
QEVRTISA

SEQ ID NO: 16649 - protein, 8 aa, Homo sapiens
  Table A; HLA-B*39:06; SF3B1; K700E; 0
QEVRTISA

SEQ ID NO: 16650 - protein, 8 aa, Homo sapiens
  Table A; HLA-B*40:02; SF3B1; K700E; 0
QEVRTISA

SEQ ID NO: 16651 - protein, 8 aa, Homo sapiens
  Table A; HLA-B*40:06; SF3B1; K700E; 0
QEVRTISA

SEQ ID NO: 16652 - protein, 8 aa, Homo sapiens
  Table A; HLA-B*41:02; SF3B1; K700E; 0
QEVRTISA

SEQ ID NO: 16653 - protein, 8 aa, Homo sapiens
  Table A; HLA-B*49:01; SF3B1; K700E; 0
QEVRTISA

SEQ ID NO: 16654 - protein, 8 aa, Homo sapiens
  Table A; HLA-B*50:01; SF3B1; K700E; 0
QEVRTISA

SEQ ID NO: 16655 - protein, 9 aa, Homo sapiens
  Table A; HLA-A*02:05; SF3B1; K700E; 0
QEVRTISAL

SEQ ID NO: 16656 - protein, 9 aa, Homo sapiens
  Table A; HLA-A*02:06; SF3B1; K700E; 0
QEVRTISAL

SEQ ID NO: 16657 - protein, 9 aa, Homo sapiens
  Table A; HLA-A*23:01; SF3B1; K700E; 0
QEVRTISAL

SEQ ID NO: 16658 - protein, 9 aa, Homo sapiens
  Table A; HLA-A*30:01; SF3B1; K700E; 0
QEVRTISAL

SEQ ID NO: 16659 - protein, 9 aa, Homo sapiens
  Table A; HLA-A*68:02; SF3B1; K700E; 0
QEVRTISAL

SEQ ID NO: 16660 - protein, 9 aa, Homo sapiens
  Table A; HLA-B*07:02; SF3B1; K700E; 1
QEVRTISAL

SEQ ID NO: 16661 - protein, 9 aa, Homo sapiens
  Table A; HLA-B*13:02; SF3B1; K700E; 0
QEVRTISAL

SEQ ID NO: 16662 - protein, 9 aa, Homo sapiens
  Table A; HLA-B*14:02; SF3B1; K700E; 0
QEVRTISAL

SEQ ID NO: 16663 - protein, 9 aa, Homo sapiens
  Table A; HLA-B*15:01; SF3B1; K700E; 1
QEVRTISAL

SEQ ID NO: 16664 - protein, 9 aa, Homo sapiens
  Table A; HLA-B*15:10; SF3B1; K700E; 0
QEVRTISAL

SEQ ID NO: 16665 - protein, 9 aa, Homo sapiens
  Table A; HLA-B*18:01; SF3B1; K700E; 1
QEVRTISAL

SEQ ID NO: 16666 - protein, 9 aa, Homo sapiens
  Table A; HLA-B*37:01; SF3B1; K700E; 0
QEVRTISAL

SEQ ID NO: 16667 - protein, 9 aa, Homo sapiens
  Table A; HLA-B*38:01; SF3B1; K700E; 0
QEVRTISAL

SEQ ID NO: 16668 - protein, 9 aa, Homo sapiens
  Table A; HLA-B*39:01; SF3B1; K700E; 0
QEVRTISAL

SEQ ID NO: 16669 - protein, 9 aa, Homo sapiens
  Table A; HLA-B*40:01; SF3B1; K700E; 1
QEVRTISAL

SEQ ID NO: 16670 - protein, 9 aa, Homo sapiens
  Table A; HLA-B*40:02; SF3B1; K700E; 0
QEVRTISAL

SEQ ID NO: 16671 - protein, 9 aa, Homo sapiens
  Table A; HLA-B*40:06; SF3B1; K700E; 0
QEVRTISAL

SEQ ID NO: 16672 - protein, 9 aa, Homo sapiens
  Table A; HLA-B*41:02; SF3B1; K700E; 0
QEVRTISAL

SEQ ID NO: 16673 - protein, 9 aa, Homo sapiens
  Table A; HLA-B*44:02; SF3B1; K700E; 1
QEVRTISAL

SEQ ID NO: 16674 - protein, 9 aa, Homo sapiens
  Table A; HLA-B*44:03; SF3B1; K700E; 1
QEVRTISAL

SEQ ID NO: 16675 - protein, 9 aa, Homo sapiens
  Table A; HLA-B*44:05; SF3B1; K700E; 0
QEVRTISAL

SEQ ID NO: 16676 - protein, 9 aa, Homo sapiens
  Table A; HLA-B*48:01; SF3B1; K700E; 0
QEVRTISAL

SEQ ID NO: 16677 - protein, 9 aa, Homo sapiens
  Table A; HLA-B*49:01; SF3B1; K700E; 0
QEVRTISAL

SEQ ID NO: 16678 - protein, 9 aa, Homo sapiens
  Table A; HLA-B*50:01; SF3B1; K700E; 0
QEVRTISAL

SEQ ID NO: 16679 - protein, 9 aa, Homo sapiens
  Table A; HLA-B*58:01; SF3B1; K700E; 0
QEVRTISAL

SEQ ID NO: 16680 - protein, 9 aa, Homo sapiens
  Table A; HLA-C*03:02; SF3B1; K700E; 0
QEVRTISAL

SEQ ID NO: 16681 - protein, 9 aa, Homo sapiens
  Table A; HLA-C*08:01; SF3B1; K700E; 0
QEVRTISAL

SEQ ID NO: 16682 - protein, 9 aa, Homo sapiens
  Table A; HLA-C*08:03; SF3B1; K700E; 0
QEVRTISAL

SEQ ID NO: 16683 - protein, 9 aa, Homo sapiens
  Table A; HLA-C*16:04; SF3B1; K700E; 0
QEVRTISAL

SEQ ID NO: 16684 - protein, 11 aa, Homo sapiens
  Table A; HLA-B*40:02; SF3B1; K700E; 0
QEVRTISALAI

SEQ ID NO: 16685 - protein, 11 aa, Homo sapiens
  Table A; HLA-B*44:03; SF3B1; K700E; 1
QEVRTISALAI

SEQ ID NO: 16686 - protein, 11 aa, Homo sapiens
  Table A; HLA-B*44:05; SF3B1; K700E; 0
QEVRTISALAI

SEQ ID NO: 16687 - protein, 11 aa, Homo sapiens
  Table A; HLA-B*49:01; SF3B1; K700E; 0
QEVRTISALAI

SEQ ID NO: 16688 - protein, 9 aa, Homo sapiens
  Table A; HLA-A*23:01; STAG2; R370Q; 0
QFKDRIVSM

SEQ ID NO: 16689 - protein, 9 aa, Homo sapiens
  Table A; HLA-A*30:01; STAG2; R370Q; 0
QFKDRIVSM

SEQ ID NO: 16690 - protein, 9 aa, Homo sapiens
  Table A; HLA-A*33:03; STAG2; R370Q; 0
QFKDRIVSM

SEQ ID NO: 16691 - protein, 9 aa, Homo sapiens
  Table A; HLA-B*07:02; STAG2; R370Q; 1
QFKDRIVSM

SEQ ID NO: 16692 - protein, 9 aa, Homo sapiens
  Table A; HLA-B*08:01; STAG2; R370Q; 0
QFKDRIVSM

SEQ ID NO: 16693 - protein, 9 aa, Homo sapiens
  Table A; HLA-B*15:01; STAG2; R370Q; 0
QFKDRIVSM

SEQ ID NO: 16694 - protein, 9 aa, Homo sapiens
  Table A; HLA-B*15:02; STAG2; R370Q; 0
QFKDRIVSM

SEQ ID NO: 16695 - protein, 9 aa, Homo sapiens
  Table A; HLA-C*08:01; STAG2; R370Q; 0
QFKDRIVSM

SEQ ID NO: 16696 - protein, 9 aa, Homo sapiens
  Table A; HLA-C*14:02; STAG2; R370Q; 0
QFKDRIVSM

SEQ ID NO: 16697 - protein, 9 aa, Homo sapiens
  Table A; HLA-C*14:03; STAG2; R370Q; 0
QFKDRIVSM

SEQ ID NO: 16698 - protein, 9 aa, Homo sapiens
  Table A; HLA-B*15:10; PIK3CA; H1047Q; 0
QHGGWTTKM

SEQ ID NO: 16699 - protein, 9 aa, Homo sapiens
  Table A; HLA-B*38:01; PIK3CA; H1047Q; 0
QHGGWTTKM

SEQ ID NO: 16700 - protein, 8 aa, Homo sapiens
  Table A; HLA-B*39:06; ACSL3; R232Q; 0
QHIITVDG

SEQ ID NO: 16701 - protein, 9 aa, Homo sapiens
  Table A; HLA-B*27:02; ACSL3; R232Q; 0
QHIITVDGK

SEQ ID NO: 16702 - protein, 9 aa, Homo sapiens
  Table A; HLA-A*31:01; TP53; V173M; 0
QHMTEVMRR

SEQ ID NO: 16703 - protein, 9 aa, Homo sapiens
  Table A; HLA-B*15:10; TP53; R175H; 0
QHMTEVVRH

SEQ ID NO: 16704 - protein, 9 aa, Homo sapiens
  Table A; HLA-B*38:01; TP53; R175H; 1
QHMTEVVRH

SEQ ID NO: 16705 - protein, 8 aa, Homo sapiens
  Table A; HLA-B*15:01; EGFR; R108K; 1
QIIKGNMY

SEQ ID NO: 16706 - protein, 8 aa, Homo sapiens
  Table A; HLA-B*15:02; EGFR; R108K; 0
QIIKGNMY

SEQ ID NO: 16707 - protein, 9 aa, Homo sapiens
  Table A; HLA-A*01:01; EGFR; R108K; 1
QIIKGNMYY

SEQ ID NO: 16708 - protein, 9 aa, Homo sapiens
  Table A; HLA-A*26:01; EGFR; R108K; 0
QIIKGNMYY

SEQ ID NO: 16709 - protein, 9 aa, Homo sapiens
  Table A; HLA-A*29:02; EGFR; R108K; 0
QIIKGNMYY

SEQ ID NO: 16710 - protein, 9 aa, Homo sapiens
  Table A; HLA-A*30:04; EGFR; R108K; 0
QIIKGNMYY

SEQ ID NO: 16711 - protein, 9 aa, Homo sapiens
  Table A; HLA-B*15:01; EGFR; R108K; 1
QIIKGNMYY

SEQ ID NO: 16712 - protein, 9 aa, Homo sapiens
  Table A; HLA-B*15:02; EGFR; R108K; 0
QIIKGNMYY

SEQ ID NO: 16713 - protein, 9 aa, Homo sapiens
  Table A; HLA-B*57:01; EGFR; R108K; 0
QIIKGNMYY

SEQ ID NO: 16714 - protein, 9 aa, Homo sapiens
  Table A; HLA-B*58:01; EGFR; R108K; 0
QIIKGNMYY

SEQ ID NO: 16715 - protein, 9 aa, Homo sapiens
  Table A; HLA-B*07:02; ARHGEF12; R113Q; 1
QIIKVNGTL

SEQ ID NO: 16716 - protein, 9 aa, Homo sapiens
  Table A; HLA-B*15:01; ARHGEF12; R113Q; 1
QIIKVNGTL

SEQ ID NO: 16717 - protein, 9 aa, Homo sapiens
  Table A; HLA-B*58:01; ARHGEF12; R113Q; 0
QIIKVNGTL

SEQ ID NO: 16718 - protein, 10 aa, Homo sapiens
  Table A; HLA-A*02:03; ARHGEF12; R113Q; 0
QIIKVNGTLV

SEQ ID NO: 16719 - protein, 10 aa, Homo sapiens
  Table A; HLA-A*02:08; ARHGEF12; R113Q; 0
QIIKVNGTLV

SEQ ID NO: 16720 - protein, 10 aa, Homo sapiens
  Table A; HLA-A*25:01; PIK3CA; M1043I; 0
QINDAHHGGW

SEQ ID NO: 16721 - protein, 10 aa, Homo sapiens
  Table A; HLA-B*15:01; PTPRD; R561Q; 1
QITIEPGTSY

SEQ ID NO: 16722 - protein, 10 aa, Homo sapiens
  Table A; HLA-B*15:02; PTPRD; R561Q; 0
QITIEPGTSY

SEQ ID NO: 16723 - protein, 10 aa, Homo sapiens
  Table A; HLA-C*08:01; PTPRD; R561Q; 0
QITIEPGTSY

SEQ ID NO: 16724 - protein, 8 aa, Homo sapiens
  Table A; HLA-B*15:03; SMARCA4; G1232S; 0
QKVIQASM

SEQ ID NO: 16725 - protein, 9 aa, Homo sapiens
  Table A; HLA-B*15:03; SMARCA4; G1232S; 0
QKVIQASMF

SEQ ID NO: 16726 - protein, 10 aa, Homo sapiens
  Table A; HLA-A*02:03; TP53; C141Y; 0
QLAKTYPVQL

SEQ ID NO: 16727 - protein, 10 aa, Homo sapiens
  Table A; HLA-A*02:04; TP53; C141Y; 0
QLAKTYPVQL

SEQ ID NO: 16728 - protein, 9 aa, Homo sapiens
  Table A; HLA-B*35:08; NFE2L2; T80P; 0
QLDEEPGEF

SEQ ID NO: 16729 - protein, 9 aa, Homo sapiens
  Table A; HLA-B*39:01; NFE2L2; T80P; 0
QLDEEPGEF

SEQ ID NO: 16730 - protein, 9 aa, Homo sapiens
  Table A; HLA-C*05:01; NFE2L2; T80P; 1
QLDEEPGEF

SEQ ID NO: 16731 - protein, 9 aa, Homo sapiens
  Table A; HLA-C*08:02; NFE2L2; T80P; 0
QLDEEPGEF

SEQ ID NO: 16732 - protein, 10 aa, Homo sapiens
  Table A; HLA-A*02:01; NFE2L2; T80P; 1
QLDEEPGEFL

SEQ ID NO: 16733 - protein, 10 aa, Homo sapiens
  Table A; HLA-A*02:06; NFE2L2; T80P; 0
QLDEEPGEFL

SEQ ID NO: 16734 - protein, 10 aa, Homo sapiens
  Table A; HLA-A*02:07; NFE2L2; T80P; 0
QLDEEPGEFL

SEQ ID NO: 16735 - protein, 10 aa, Homo sapiens
  Table A; HLA-B*13:01; NFE2L2; T80P; 0
QLDEEPGEFL

SEQ ID NO: 16736 - protein, 10 aa, Homo sapiens
  Table A; HLA-B*38:01; NFE2L2; T80P; 0
QLDEEPGEFL

SEQ ID NO: 16737 - protein, 10 aa, Homo sapiens
  Table A; HLA-B*39:01; NFE2L2; T80P; 0
QLDEEPGEFL

SEQ ID NO: 16738 - protein, 10 aa, Homo sapiens
  Table A; HLA-B*48:01; NFE2L2; T80P; 0
QLDEEPGEFL

SEQ ID NO: 16739 - protein, 10 aa, Homo sapiens
  Table A; HLA-C*05:01; NFE2L2; T80P; 1
QLDEEPGEFL

SEQ ID NO: 16740 - protein, 10 aa, Homo sapiens
  Table A; HLA-C*08:02; NFE2L2; T80P; 0
QLDEEPGEFL

SEQ ID NO: 16741 - protein, 9 aa, Homo sapiens
  Table A; HLA-B*39:01; NFE2L2; E82D; 0
QLDEETGDF

SEQ ID NO: 16742 - protein, 9 aa, Homo sapiens
  Table A; HLA-C*08:02; NFE2L2; E82D; 0
QLDEETGDF

SEQ ID NO: 16743 - protein, 10 aa, Homo sapiens
  Table A; HLA-A*02:07; NFE2L2; E82D; 0
QLDEETGDFL

SEQ ID NO: 16744 - protein, 10 aa, Homo sapiens
  Table A; HLA-B*13:01; NFE2L2; E82D; 0
QLDEETGDFL

SEQ ID NO: 16745 - protein, 10 aa, Homo sapiens
  Table A; HLA-B*38:01; NFE2L2; E82D; 0
QLDEETGDFL

SEQ ID NO: 16746 - protein, 10 aa, Homo sapiens
  Table A; HLA-B*48:01; NFE2L2; E82D; 0
QLDEETGDFL

SEQ ID NO: 16747 - protein, 10 aa, Homo sapiens
  Table A; HLA-C*05:01; NFE2L2; E82D; 1
QLDEETGDFL

SEQ ID NO: 16748 - protein, 10 aa, Homo sapiens
  Table A; HLA-C*08:02; NFE2L2; E82D; 0
QLDEETGDFL

SEQ ID NO: 16749 - protein, 10 aa, Homo sapiens
  Table A; HLA-C*08:03; NFE2L2; E82D; 0
QLDEETGDFL

SEQ ID NO: 16750 - protein, 9 aa, Homo sapiens
  Table A; HLA-A*01:01; NFE2L2; E79Q; 1
QLDEQTGEF

SEQ ID NO: 16751 - protein, 9 aa, Homo sapiens
  Table A; HLA-A*02:07; NFE2L2; E79Q; 0
QLDEQTGEF

SEQ ID NO: 16752 - protein, 9 aa, Homo sapiens
  Table A; HLA-B*13:01; NFE2L2; E79Q; 0
QLDEQTGEF

SEQ ID NO: 16753 - protein, 9 aa, Homo sapiens
  Table A; HLA-B*15:01; NFE2L2; E79Q; 1
QLDEQTGEF

SEQ ID NO: 16754 - protein, 9 aa, Homo sapiens
  Table A; HLA-B*15:02; NFE2L2; E79Q; 0
QLDEQTGEF

SEQ ID NO: 16755 - protein, 9 aa, Homo sapiens
  Table A; HLA-B*35:08; NFE2L2; E79Q; 0
QLDEQTGEF

SEQ ID NO: 16756 - protein, 9 aa, Homo sapiens
  Table A; HLA-B*38:01; NFE2L2; E79Q; 0
QLDEQTGEF

SEQ ID NO: 16757 - protein, 9 aa, Homo sapiens
  Table A; HLA-B*39:01; NFE2L2; E79Q; 0
QLDEQTGEF

SEQ ID NO: 16758 - protein, 9 aa, Homo sapiens
  Table A; HLA-C*04:01; NFE2L2; E79Q; 1
QLDEQTGEF

SEQ ID NO: 16759 - protein, 9 aa, Homo sapiens
  Table A; HLA-C*05:01; NFE2L2; E79Q; 1
QLDEQTGEF

SEQ ID NO: 16760 - protein, 9 aa, Homo sapiens
  Table A; HLA-C*08:02; NFE2L2; E79Q; 1
QLDEQTGEF

SEQ ID NO: 16761 - protein, 10 aa, Homo sapiens
  Table A; HLA-A*02:01; NFE2L2; E79Q; 1
QLDEQTGEFL

SEQ ID NO: 16762 - protein, 10 aa, Homo sapiens
  Table A; HLA-A*02:06; NFE2L2; E79Q; 0
QLDEQTGEFL

SEQ ID NO: 16763 - protein, 10 aa, Homo sapiens
  Table A; HLA-A*02:07; NFE2L2; E79Q; 0
QLDEQTGEFL

SEQ ID NO: 16764 - protein, 10 aa, Homo sapiens
  Table A; HLA-B*13:01; NFE2L2; E79Q; 0
QLDEQTGEFL

SEQ ID NO: 16765 - protein, 10 aa, Homo sapiens
  Table A; HLA-B*38:01; NFE2L2; E79Q; 0
QLDEQTGEFL

SEQ ID NO: 16766 - protein, 10 aa, Homo sapiens
  Table A; HLA-B*39:01; NFE2L2; E79Q; 0
QLDEQTGEFL

SEQ ID NO: 16767 - protein, 10 aa, Homo sapiens
  Table A; HLA-B*48:01; NFE2L2; E79Q; 0
QLDEQTGEFL

SEQ ID NO: 16768 - protein, 10 aa, Homo sapiens
  Table A; HLA-C*05:01; NFE2L2; E79Q; 1
QLDEQTGEFL

SEQ ID NO: 16769 - protein, 10 aa, Homo sapiens
  Table A; HLA-C*08:02; NFE2L2; E79Q; 1
QLDEQTGEFL

SEQ ID NO: 16770 - protein, 9 aa, Homo sapiens
  Table A; HLA-A*02:03; PIK3CA; R93Q; 0
QLFQPFLKV

SEQ ID NO: 16771 - protein, 9 aa, Homo sapiens
  Table A; HLA-A*02:04; PIK3CA; R93Q; 0
QLFQPFLKV

SEQ ID NO: 16772 - protein, 9 aa, Homo sapiens
  Table A; HLA-A*02:07; PIK3CA; R93Q; 0
QLFQPFLKV

SEQ ID NO: 16773 - protein, 9 aa, Homo sapiens
  Table A; HLA-A*68:02; PIK3CA; R93Q; 0
QLFQPFLKV

SEQ ID NO: 16774 - protein, 9 aa, Homo sapiens
  Table A; HLA-B*13:02; PIK3CA; R93Q; 1
QLFQPFLKV

SEQ ID NO: 16775 - protein, 9 aa, Homo sapiens
  Table A; HLA-C*15:02; PIK3CA; R93Q; 0
QLFQPFLKV

SEQ ID NO: 16776 - protein, 9 aa, Homo sapiens
  Table A; HLA-B*13:01; NFE2L2; D77G; 0
QLGEETGEF

SEQ ID NO: 16777 - protein, 9 aa, Homo sapiens
  Table A; HLA-B*15:01; NFE2L2; D77G; 0
QLGEETGEF

SEQ ID NO: 16778 - protein, 9 aa, Homo sapiens
  Table A; HLA-B*15:02; NFE2L2; D77G; 0
QLGEETGEF

SEQ ID NO: 16779 - protein, 9 aa, Homo sapiens
  Table A; HLA-B*39:01; NFE2L2; D77G; 0
QLGEETGEF

SEQ ID NO: 16780 - protein, 10 aa, Homo sapiens
  Table A; HLA-A*02:05; NFE2L2; D77G; 0
QLGEETGEFL

SEQ ID NO: 16781 - protein, 9 aa, Homo sapiens
  Table A; HLA-A*02:01; CSMD3; R2601Q; 1
QLVGKSSAV

SEQ ID NO: 16782 - protein, 9 aa, Homo sapiens
  Table A; HLA-A*02:03; CSMD3; R2601Q; 0
QLVGKSSAV

SEQ ID NO: 16783 - protein, 9 aa, Homo sapiens
  Table A; HLA-B*08:01; CSMD3; R2601Q; 1
QLVGKSSAV

SEQ ID NO: 16784 - protein, 10 aa, Homo sapiens
  Table A; HLA-A*30:02; PIK3CA; H1047L; 0
QMNDALHGGW

SEQ ID NO: 16785 - protein, 10 aa, Homo sapiens
  Table A; HLA-B*15:13; PIK3CA; H1047L; 0
QMNDALHGGW

SEQ ID NO: 16786 - protein, 10 aa, Homo sapiens
  Table A; HLA-B*44:03; PIK3CA; H1047L; 1
QMNDALHGGW

SEQ ID NO: 16787 - protein, 10 aa, Homo sapiens
  Table A; HLA-A*25:01; PIK3CA; H1047Q; 0
QMNDAQHGGW

SEQ ID NO: 16788 - protein, 10 aa, Homo sapiens
  Table A; HLA-A*30:02; PIK3CA; H1047Q; 0
QMNDAQHGGW

SEQ ID NO: 16789 - protein, 10 aa, Homo sapiens
  Table A; HLA-A*32:01; PIK3CA; H1047Q; 0
QMNDAQHGGW

SEQ ID NO: 16790 - protein, 10 aa, Homo sapiens
  Table A; HLA-B*15:13; PIK3CA; H1047Q; 0
QMNDAQHGGW

SEQ ID NO: 16791 - protein, 10 aa, Homo sapiens
  Table A; HLA-B*44:03; PIK3CA; H1047Q; 0
QMNDAQHGGW

SEQ ID NO: 16792 - protein, 10 aa, Homo sapiens
  Table A; HLA-B*44:05; PIK3CA; H1047Q; 0
QMNDAQHGGW

SEQ ID NO: 16793 - protein, 9 aa, Homo sapiens
  Table A; HLA-A*03:02; MAP2K1; K57N; 0
QNQKVGELK

SEQ ID NO: 16794 - protein, 11 aa, Homo sapiens
  Table A; HLA-B*54:01; PIK3CA; G106V; 0
QPFLKVIEPVV

SEQ ID NO: 16795 - protein, 9 aa, Homo sapiens
  Table A; HLA-B*08:01; XPO1; R749Q; 1
QPLIRSMQT

SEQ ID NO: 16796 - protein, 10 aa, Homo sapiens
  Table A; HLA-B*07:02; XPO1; R749Q; 1
QPLIRSMQTV

SEQ ID NO: 16797 - protein, 10 aa, Homo sapiens
  Table A; HLA-B*51:01; XPO1; R749Q; 0
QPLIRSMQTV

SEQ ID NO: 16798 - protein, 10 aa, Homo sapiens
  Table A; HLA-B*54:01; XPO1; R749Q; 0
QPLIRSMQTV

SEQ ID NO: 16799 - protein, 10 aa, Homo sapiens
  Table A; HLA-B*55:01; XPO1; R749Q; 0
QPLIRSMQTV

SEQ ID NO: 16800 - protein, 10 aa, Homo sapiens
  Table A; HLA-B*55:02; XPO1; R749Q; 0
QPLIRSMQTV

SEQ ID NO: 16801 - protein, 10 aa, Homo sapiens
  Table A; HLA-B*56:01; XPO1; R749Q; 0
QPLIRSMQTV

SEQ ID NO: 16802 - protein, 10 aa, Homo sapiens
  Table A; HLA-B*50:01; SF3B1; R957Q; 0
QQAADLISQT

SEQ ID NO: 16803 - protein, 11 aa, Homo sapiens
  Table A; HLA-A*02:05; SF3B1; R957Q; 0
QQAADLISQTA

SEQ ID NO: 16804 - protein, 11 aa, Homo sapiens
  Table A; HLA-A*02:08; SF3B1; R957Q; 0
QQAADLISQTA

SEQ ID NO: 16805 - protein, 11 aa, Homo sapiens
  Table A; HLA-B*13:02; SF3B1; R957Q; 0
QQAADLISQTA

SEQ ID NO: 16806 - protein, 11 aa, Homo sapiens
  Table A; HLA-B*39:01; SF3B1; R957Q; 0
QQAADLISQTA

SEQ ID NO: 16807 - protein, 11 aa, Homo sapiens
  Table A; HLA-B*39:06; SF3B1; R957Q; 0
QQAADLISQTA

SEQ ID NO: 16808 - protein, 11 aa, Homo sapiens
  Table A; HLA-B*50:01; SF3B1; R957Q; 0
QQAADLISQTA

SEQ ID NO: 16809 - protein, 9 aa, Homo sapiens
  Table A; HLA-A*02:05; SF3B1; K700E; 0
QQEVRTISA

SEQ ID NO: 16810 - protein, 9 aa, Homo sapiens
  Table A; HLA-A*02:06; SF3B1; K700E; 0
QQEVRTISA

SEQ ID NO: 16811 - protein, 9 aa, Homo sapiens
  Table A; HLA-B*08:01; SF3B1; K700E; 1
QQEVRTISA

SEQ ID NO: 16812 - protein, 9 aa, Homo sapiens
  Table A; HLA-B*13:02; SF3B1; K700E; 0
QQEVRTISA

SEQ ID NO: 16813 - protein, 9 aa, Homo sapiens
  Table A; HLA-B*14:02; SF3B1; K700E; 0
QQEVRTISA

SEQ ID NO: 16814 - protein, 9 aa, Homo sapiens
  Table A; HLA-B*15:01; SF3B1; K700E; 1
QQEVRTISA

SEQ ID NO: 16815 - protein, 9 aa, Homo sapiens
  Table A; HLA-B*15:10; SF3B1; K700E; 0
QQEVRTISA

SEQ ID NO: 16816 - protein, 9 aa, Homo sapiens
  Table A; HLA-B*39:01; SF3B1; K700E; 0
QQEVRTISA

SEQ ID NO: 16817 - protein, 9 aa, Homo sapiens
  Table A; HLA-B*39:06; SF3B1; K700E; 0
QQEVRTISA

SEQ ID NO: 16818 - protein, 9 aa, Homo sapiens
  Table A; HLA-B*50:01; SF3B1; K700E; 0
QQEVRTISA

SEQ ID NO: 16819 - protein, 9 aa, Homo sapiens
  Table A; HLA-B*54:01; SF3B1; K700E; 0
QQEVRTISA

SEQ ID NO: 16820 - protein, 10 aa, Homo sapiens
  Table A; HLA-B*15:01; SF3B1; K700E; 1
QQEVRTISAL

SEQ ID NO: 16821 - protein, 10 aa, Homo sapiens
  Table A; HLA-B*15:10; SF3B1; K700E; 0
QQEVRTISAL

SEQ ID NO: 16822 - protein, 10 aa, Homo sapiens
  Table A; HLA-B*39:01; SF3B1; K700E; 0
QQEVRTISAL

SEQ ID NO: 16823 - protein, 10 aa, Homo sapiens
  Table A; HLA-B*48:01; SF3B1; K700E; 0
QQEVRTISAL

SEQ ID NO: 16824 - protein, 11 aa, Homo sapiens
  Table A; HLA-A*26:01; PTPRD; R561Q; 0
QQITIEPGTSY

SEQ ID NO: 16825 - protein, 11 aa, Homo sapiens
  Table A; HLA-B*15:01; PTPRD; R561Q; 1
QQITIEPGTSY

SEQ ID NO: 16826 - protein, 11 aa, Homo sapiens
  Table A; HLA-B*15:02; PTPRD; R561Q; 0
QQITIEPGTSY

SEQ ID NO: 16827 - protein, 11 aa, Homo sapiens
  Table A; HLA-B*15:03; PTPRD; R561Q; 0
QQITIEPGTSY

SEQ ID NO: 16828 - protein, 8 aa, Homo sapiens
  Table A; HLA-B*13:02; CDH10; R638Q; 0
QQKKEPLI

SEQ ID NO: 16829 - protein, 9 aa, Homo sapiens
  Table A; HLA-B*13:02; CDH10; R638Q; 0
QQKKEPLIL

SEQ ID NO: 16830 - protein, 8 aa, Homo sapiens
  Table A; HLA-B*15:01; ERBB2; R678Q; 0
QQQKIRKY

SEQ ID NO: 16831 - protein, 9 aa, Homo sapiens
  Table A; HLA-A*02:06; CTNNB1; S33C; 0
QQQSYLDCG

SEQ ID NO: 16832 - protein, 8 aa, Homo sapiens
  Table A; HLA-B*15:01; CTNNB1; S33F; 1
QQQSYLDF

SEQ ID NO: 16833 - protein, 10 aa, Homo sapiens
  Table A; HLA-B*38:01; CTNNB1; G34E; 0
QQQSYLDSEI

SEQ ID NO: 16834 - protein, 9 aa, Homo sapiens
  Table A; HLA-A*11:01; CTNNB1; G34R; 1
QQQSYLDSR

SEQ ID NO: 16835 - protein, 9 aa, Homo sapiens
  Table A; HLA-A*31:01; CTNNB1; G34R; 1
QQQSYLDSR

SEQ ID NO: 16836 - protein, 9 aa, Homo sapiens
  Table A; HLA-A*33:03; CTNNB1; G34R; 0
QQQSYLDSR

SEQ ID NO: 16837 - protein, 9 aa, Homo sapiens
  Table A; HLA-A*68:01; CTNNB1; G34R; 1
QQQSYLDSR

SEQ ID NO: 16838 - protein, 9 aa, Homo sapiens
  Table A; HLA-B*27:02; CTNNB1; G34R; 0
QQQSYLDSR

SEQ ID NO: 16839 - protein, 9 aa, Homo sapiens
  Table A; HLA-B*27:05; CTNNB1; G34R; 1
QQQSYLDSR

SEQ ID NO: 16840 - protein, 10 aa, Homo sapiens
  Table A; HLA-B*13:02; CTNNB1; G34R; 1
QQQSYLDSRI

SEQ ID NO: 16841 - protein, 10 aa, Homo sapiens
  Table A; HLA-B*38:01; CTNNB1; G34R; 1
QQQSYLDSRI

SEQ ID NO: 16842 - protein, 10 aa, Homo sapiens
  Table A; HLA-B*44:05; CTNNB1; G34R; 0
QQQSYLDSRI

SEQ ID NO: 16843 - protein, 9 aa, Homo sapiens
  Table A; HLA-A*02:01; CTNNB1; G34V; 1
QQQSYLDSV

SEQ ID NO: 16844 - protein, 9 aa, Homo sapiens
  Table A; HLA-A*02:03; CTNNB1; G34V; 0
QQQSYLDSV

SEQ ID NO: 16845 - protein, 9 aa, Homo sapiens
  Table A; HLA-A*02:04; CTNNB1; G34V; 0
QQQSYLDSV

SEQ ID NO: 16846 - protein, 9 aa, Homo sapiens
  Table A; HLA-A*02:05; CTNNB1; G34V; 0
QQQSYLDSV

SEQ ID NO: 16847 - protein, 9 aa, Homo sapiens
  Table A; HLA-A*02:06; CTNNB1; G34V; 0
QQQSYLDSV

SEQ ID NO: 16848 - protein, 9 aa, Homo sapiens
  Table A; HLA-A*02:08; CTNNB1; G34V; 0
QQQSYLDSV

SEQ ID NO: 16849 - protein, 9 aa, Homo sapiens
  Table A; HLA-A*31:01; CTNNB1; G34V; 0
QQQSYLDSV

SEQ ID NO: 16850 - protein, 9 aa, Homo sapiens
  Table A; HLA-B*13:02; CTNNB1; G34V; 0
QQQSYLDSV

SEQ ID NO: 16851 - protein, 9 aa, Homo sapiens
  Table A; HLA-B*27:05; CTNNB1; G34V; 1
QQQSYLDSV

SEQ ID NO: 16852 - protein, 9 aa, Homo sapiens
  Table A; HLA-B*38:01; CTNNB1; G34V; 0
QQQSYLDSV

SEQ ID NO: 16853 - protein, 9 aa, Homo sapiens
  Table A; HLA-B*39:01; CTNNB1; G34V; 0
QQQSYLDSV

SEQ ID NO: 16854 - protein, 9 aa, Homo sapiens
  Table A; HLA-B*39:06; CTNNB1; G34V; 0
QQQSYLDSV

SEQ ID NO: 16855 - protein, 9 aa, Homo sapiens
  Table A; HLA-B*48:01; CTNNB1; G34V; 0
QQQSYLDSV

SEQ ID NO: 16856 - protein, 9 aa, Homo sapiens
  Table A; HLA-B*50:01; CTNNB1; G34V; 0
QQQSYLDSV

SEQ ID NO: 16857 - protein, 10 aa, Homo sapiens
  Table A; HLA-B*38:01; CTNNB1; G34V; 0
QQQSYLDSVI

SEQ ID NO: 16858 - protein, 8 aa, Homo sapiens
  Table A; HLA-B*13:02; CTNNB1; S33Y; 0
QQQSYLDY

SEQ ID NO: 16859 - protein, 8 aa, Homo sapiens
  Table A; HLA-B*15:01; CTNNB1; S33Y; 1
QQQSYLDY

SEQ ID NO: 16860 - protein, 8 aa, Homo sapiens
  Table A; HLA-B*15:03; CTNNB1; S33Y; 0
QQQSYLDY

SEQ ID NO: 16861 - protein, 8 aa, Homo sapiens
  Table A; HLA-B*39:01; CTNNB1; S33Y; 0
QQQSYLDY

SEQ ID NO: 16862 - protein, 10 aa, Homo sapiens
  Table A; HLA-B*13:02; CTNNB1; S33Y; 0
QQQSYLDYGI

SEQ ID NO: 16863 - protein, 10 aa, Homo sapiens
  Table A; HLA-B*38:01; CTNNB1; S33Y; 0
QQQSYLDYGI

SEQ ID NO: 16864 - protein, 10 aa, Homo sapiens
  Table A; HLA-B*13:02; CTNNB1; D32H; 0
QQQSYLHSGI

SEQ ID NO: 16865 - protein, 10 aa, Homo sapiens
  Table A; HLA-B*13:02; CTNNB1; D32N; 1
QQQSYLNSGI

SEQ ID NO: 16866 - protein, 8 aa, Homo sapiens
  Table A; HLA-B*39:06; CTNNB1; D32V; 0
QQQSYLVS

SEQ ID NO: 16867 - protein, 9 aa, Homo sapiens
  Table A; HLA-A*31:01; CTNNB1; D32V; 1
QQQSYLVSG

SEQ ID NO: 16868 - protein, 10 aa, Homo sapiens
  Table A; HLA-B*13:02; CTNNB1; D32V; 1
QQQSYLVSGI

SEQ ID NO: 16869 - protein, 10 aa, Homo sapiens
  Table A; HLA-B*38:01; CTNNB1; D32V; 1
QQQSYLVSGI

SEQ ID NO: 16870 - protein, 10 aa, Homo sapiens
  Table A; HLA-B*13:02; CTNNB1; D32Y; 0
QQQSYLYSGI

SEQ ID NO: 16871 - protein, 10 aa, Homo sapiens
  Table A; HLA-B*38:01; CTNNB1; D32Y; 0
QQQSYLYSGI

SEQ ID NO: 16872 - protein, 9 aa, Homo sapiens
  Table A; HLA-A*02:05; CTNNB1; S33C; 0
QQSYLDCGI

SEQ ID NO: 16873 - protein, 9 aa, Homo sapiens
  Table A; HLA-B*13:01; CTNNB1; S33C; 0
QQSYLDCGI

SEQ ID NO: 16874 - protein, 9 aa, Homo sapiens
  Table A; HLA-B*13:02; CTNNB1; S33C; 1
QQSYLDCGI

SEQ ID NO: 16875 - protein, 9 aa, Homo sapiens
  Table A; HLA-B*38:01; CTNNB1; S33C; 0
QQSYLDCGI

SEQ ID NO: 16876 - protein, 9 aa, Homo sapiens
  Table A; HLA-A*02:05; CTNNB1; S33F; 0
QQSYLDFGI

SEQ ID NO: 16877 - protein, 9 aa, Homo sapiens
  Table A; HLA-A*68:02; CTNNB1; S33F; 0
QQSYLDFGI

SEQ ID NO: 16878 - protein, 9 aa, Homo sapiens
  Table A; HLA-B*13:02; CTNNB1; S33F; 1
QQSYLDFGI

SEQ ID NO: 16879 - protein, 9 aa, Homo sapiens
  Table A; HLA-B*38:01; CTNNB1; S33F; 1
QQSYLDFGI

SEQ ID NO: 16880 - protein, 9 aa, Homo sapiens
  Table A; HLA-A*02:05; CTNNB1; G34E; 0
QQSYLDSEI

SEQ ID NO: 16881 - protein, 9 aa, Homo sapiens
  Table A; HLA-A*68:02; CTNNB1; G34E; 0
QQSYLDSEI

SEQ ID NO: 16882 - protein, 9 aa, Homo sapiens
  Table A; HLA-B*13:01; CTNNB1; G34E; 0
QQSYLDSEI

SEQ ID NO: 16883 - protein, 9 aa, Homo sapiens
  Table A; HLA-B*13:02; CTNNB1; G34E; 0
QQSYLDSEI

SEQ ID NO: 16884 - protein, 9 aa, Homo sapiens
  Table A; HLA-B*38:01; CTNNB1; G34E; 0
QQSYLDSEI

SEQ ID NO: 16885 - protein, 9 aa, Homo sapiens
  Table A; HLA-B*39:01; CTNNB1; G34E; 0
QQSYLDSEI

SEQ ID NO: 16886 - protein, 9 aa, Homo sapiens
  Table A; HLA-A*02:05; CTNNB1; G34R; 0
QQSYLDSRI

SEQ ID NO: 16887 - protein, 9 aa, Homo sapiens
  Table A; HLA-A*02:06; CTNNB1; G34R; 0
QQSYLDSRI

SEQ ID NO: 16888 - protein, 9 aa, Homo sapiens
  Table A; HLA-A*68:02; CTNNB1; G34R; 0
QQSYLDSRI

SEQ ID NO: 16889 - protein, 9 aa, Homo sapiens
  Table A; HLA-B*13:01; CTNNB1; G34R; 0
QQSYLDSRI

SEQ ID NO: 16890 - protein, 9 aa, Homo sapiens
  Table A; HLA-B*13:02; CTNNB1; G34R; 1
QQSYLDSRI

SEQ ID NO: 16891 - protein, 9 aa, Homo sapiens
  Table A; HLA-B*38:01; CTNNB1; G34R; 1
QQSYLDSRI

SEQ ID NO: 16892 - protein, 8 aa, Homo sapiens
  Table A; HLA-B*13:02; CTNNB1; G34V; 0
QQSYLDSV

SEQ ID NO: 16893 - protein, 8 aa, Homo sapiens
  Table A; HLA-B*39:06; CTNNB1; G34V; 0
QQSYLDSV

SEQ ID NO: 16894 - protein, 9 aa, Homo sapiens
  Table A; HLA-A*02:05; CTNNB1; G34V; 0
QQSYLDSVI

SEQ ID NO: 16895 - protein, 9 aa, Homo sapiens
  Table A; HLA-A*68:02; CTNNB1; G34V; 0
QQSYLDSVI

SEQ ID NO: 16896 - protein, 9 aa, Homo sapiens
  Table A; HLA-B*13:01; CTNNB1; G34V; 0
QQSYLDSVI

SEQ ID NO: 16897 - protein, 9 aa, Homo sapiens
  Table A; HLA-B*13:02; CTNNB1; G34V; 0
QQSYLDSVI

SEQ ID NO: 16898 - protein, 9 aa, Homo sapiens
  Table A; HLA-B*15:10; CTNNB1; G34V; 0
QQSYLDSVI

SEQ ID NO: 16899 - protein, 9 aa, Homo sapiens
  Table A; HLA-B*38:01; CTNNB1; G34V; 0
QQSYLDSVI

SEQ ID NO: 16900 - protein, 9 aa, Homo sapiens
  Table A; HLA-B*39:01; CTNNB1; G34V; 0
QQSYLDSVI

SEQ ID NO: 16901 - protein, 10 aa, Homo sapiens
  Table A; HLA-C*08:03; CTNNB1; G34V; 0
QQSYLDSVIH

SEQ ID NO: 16902 - protein, 9 aa, Homo sapiens
  Table A; HLA-A*02:05; CTNNB1; S33Y; 0
QQSYLDYGI

SEQ ID NO: 16903 - protein, 9 aa, Homo sapiens
  Table A; HLA-A*02:06; CTNNB1; S33Y; 0
QQSYLDYGI

SEQ ID NO: 16904 - protein, 9 aa, Homo sapiens
  Table A; HLA-A*68:02; CTNNB1; S33Y; 0
QQSYLDYGI

SEQ ID NO: 16905 - protein, 9 aa, Homo sapiens
  Table A; HLA-B*13:01; CTNNB1; S33Y; 0
QQSYLDYGI

SEQ ID NO: 16906 - protein, 9 aa, Homo sapiens
  Table A; HLA-B*13:02; CTNNB1; S33Y; 0
QQSYLDYGI

SEQ ID NO: 16907 - protein, 9 aa, Homo sapiens
  Table A; HLA-B*38:01; CTNNB1; S33Y; 0
QQSYLDYGI

SEQ ID NO: 16908 - protein, 9 aa, Homo sapiens
  Table A; HLA-A*02:05; CTNNB1; D32H; 0
QQSYLHSGI

SEQ ID NO: 16909 - protein, 9 aa, Homo sapiens
  Table A; HLA-A*68:02; CTNNB1; D32H; 0
QQSYLHSGI

SEQ ID NO: 16910 - protein, 9 aa, Homo sapiens
  Table A; HLA-B*13:02; CTNNB1; D32H; 0
QQSYLHSGI

SEQ ID NO: 16911 - protein, 9 aa, Homo sapiens
  Table A; HLA-B*38:01; CTNNB1; D32H; 0
QQSYLHSGI

SEQ ID NO: 16912 - protein, 9 aa, Homo sapiens
  Table A; HLA-A*02:05; CTNNB1; D32N; 0
QQSYLNSGI

SEQ ID NO: 16913 - protein, 9 aa, Homo sapiens
  Table A; HLA-B*13:02; CTNNB1; D32N; 1
QQSYLNSGI

SEQ ID NO: 16914 - protein, 9 aa, Homo sapiens
  Table A; HLA-B*38:01; CTNNB1; D32N; 1
QQSYLNSGI

SEQ ID NO: 16915 - protein, 9 aa, Homo sapiens
  Table A; HLA-A*02:03; CTNNB1; D32V; 0
QQSYLVSGI

SEQ ID NO: 16916 - protein, 9 aa, Homo sapiens
  Table A; HLA-A*02:05; CTNNB1; D32V; 0
QQSYLVSGI

SEQ ID NO: 16917 - protein, 9 aa, Homo sapiens
  Table A; HLA-A*02:06; CTNNB1; D32V; 0
QQSYLVSGI

SEQ ID NO: 16918 - protein, 9 aa, Homo sapiens
  Table A; HLA-A*68:02; CTNNB1; D32V; 0
QQSYLVSGI

SEQ ID NO: 16919 - protein, 9 aa, Homo sapiens
  Table A; HLA-B*13:02; CTNNB1; D32V; 1
QQSYLVSGI

SEQ ID NO: 16920 - protein, 9 aa, Homo sapiens
  Table A; HLA-B*38:01; CTNNB1; D32V; 1
QQSYLVSGI

SEQ ID NO: 16921 - protein, 9 aa, Homo sapiens
  Table A; HLA-A*02:05; CTNNB1; D32Y; 0
QQSYLYSGI

SEQ ID NO: 16922 - protein, 9 aa, Homo sapiens
  Table A; HLA-B*13:02; CTNNB1; D32Y; 0
QQSYLYSGI

SEQ ID NO: 16923 - protein, 9 aa, Homo sapiens
  Table A; HLA-B*38:01; CTNNB1; D32Y; 0
QQSYLYSGI

SEQ ID NO: 16924 - protein, 8 aa, Homo sapiens
  Table A; HLA-B*27:05; RSPO2; R64Q; 0
QREGMRQY

SEQ ID NO: 16925 - protein, 9 aa, Homo sapiens
  Table A; HLA-A*02:05; MSN; E573K; 0
QRIDKFESM

SEQ ID NO: 16926 - protein, 9 aa, Homo sapiens
  Table A; HLA-A*02:06; MSN; E573K; 0
QRIDKFESM

SEQ ID NO: 16927 - protein, 9 aa, Homo sapiens
  Table A; HLA-A*02:07; MSN; E573K; 0
QRIDKFESM

SEQ ID NO: 16928 - protein, 9 aa, Homo sapiens
  Table A; HLA-A*23:01; MSN; E573K; 0
QRIDKFESM

SEQ ID NO: 16929 - protein, 9 aa, Homo sapiens
  Table A; HLA-A*24:02; MSN; E573K; 1
QRIDKFESM

SEQ ID NO: 16930 - protein, 9 aa, Homo sapiens
  Table A; HLA-A*26:01; MSN; E573K; 0
QRIDKFESM

SEQ ID NO: 16931 - protein, 9 aa, Homo sapiens
  Table A; HLA-A*26:03; MSN; E573K; 0
QRIDKFESM

SEQ ID NO: 16932 - protein, 9 aa, Homo sapiens
  Table A; HLA-A*30:01; MSN; E573K; 0
QRIDKFESM

SEQ ID NO: 16933 - protein, 9 aa, Homo sapiens
  Table A; HLA-A*31:01; MSN; E573K; 0
QRIDKFESM

SEQ ID NO: 16934 - protein, 9 aa, Homo sapiens
  Table A; HLA-A*33:03; MSN; E573K; 0
QRIDKFESM

SEQ ID NO: 16935 - protein, 9 aa, Homo sapiens
  Table A; HLA-A*68:01; MSN; E573K; 0
QRIDKFESM

SEQ ID NO: 16936 - protein, 9 aa, Homo sapiens
  Table A; HLA-A*68:02; MSN; E573K; 0
QRIDKFESM

SEQ ID NO: 16937 - protein, 9 aa, Homo sapiens
  Table A; HLA-B*07:02; MSN; E573K; 1
QRIDKFESM

SEQ ID NO: 16938 - protein, 9 aa, Homo sapiens
  Table A; HLA-B*08:01; MSN; E573K; 1
QRIDKFESM

SEQ ID NO: 16939 - protein, 9 aa, Homo sapiens
  Table A; HLA-B*14:01; MSN; E573K; 0
QRIDKFESM

SEQ ID NO: 16940 - protein, 9 aa, Homo sapiens
  Table A; HLA-B*14:02; MSN; E573K; 0
QRIDKFESM

SEQ ID NO: 16941 - protein, 9 aa, Homo sapiens
  Table A; HLA-B*15:01; MSN; E573K; 1
QRIDKFESM

SEQ ID NO: 16942 - protein, 9 aa, Homo sapiens
  Table A; HLA-B*15:02; MSN; E573K; 0
QRIDKFESM

SEQ ID NO: 16943 - protein, 9 aa, Homo sapiens
  Table A; HLA-B*15:03; MSN; E573K; 0
QRIDKFESM

SEQ ID NO: 16944 - protein, 9 aa, Homo sapiens
  Table A; HLA-B*15:10; MSN; E573K; 0
QRIDKFESM

SEQ ID NO: 16945 - protein, 9 aa, Homo sapiens
  Table A; HLA-B*15:13; MSN; E573K; 0
QRIDKFESM

SEQ ID NO: 16946 - protein, 9 aa, Homo sapiens
  Table A; HLA-B*18:01; MSN; E573K; 1
QRIDKFESM

SEQ ID NO: 16947 - protein, 9 aa, Homo sapiens
  Table A; HLA-B*27:02; MSN; E573K; 0
QRIDKFESM

SEQ ID NO: 16948 - protein, 9 aa, Homo sapiens
  Table A; HLA-B*27:05; MSN; E573K; 0
QRIDKFESM

SEQ ID NO: 16949 - protein, 9 aa, Homo sapiens
  Table A; HLA-B*35:01; MSN; E573K; 1
QRIDKFESM

SEQ ID NO: 16950 - protein, 9 aa, Homo sapiens
  Table A; HLA-B*35:02; MSN; E573K; 0
QRIDKFESM

SEQ ID NO: 16951 - protein, 9 aa, Homo sapiens
  Table A; HLA-B*35:03; MSN; E573K; 0
QRIDKFESM

SEQ ID NO: 16952 - protein, 9 aa, Homo sapiens
  Table A; HLA-B*35:12; MSN; E573K; 0
QRIDKFESM

SEQ ID NO: 16953 - protein, 9 aa, Homo sapiens
  Table A; HLA-B*38:01; MSN; E573K; 0
QRIDKFESM

SEQ ID NO: 16954 - protein, 9 aa, Homo sapiens
  Table A; HLA-B*39:01; MSN; E573K; 0
QRIDKFESM

SEQ ID NO: 16955 - protein, 9 aa, Homo sapiens
  Table A; HLA-B*39:06; MSN; E573K; 0
QRIDKFESM

SEQ ID NO: 16956 - protein, 9 aa, Homo sapiens
  Table A; HLA-B*40:01; MSN; E573K; 1
QRIDKFESM

SEQ ID NO: 16957 - protein, 9 aa, Homo sapiens
  Table A; HLA-B*40:02; MSN; E573K; 0
QRIDKFESM

SEQ ID NO: 16958 - protein, 9 aa, Homo sapiens
  Table A; HLA-B*41:02; MSN; E573K; 0
QRIDKFESM

SEQ ID NO: 16959 - protein, 9 aa, Homo sapiens
  Table A; HLA-B*44:03; MSN; E573K; 1
QRIDKFESM

SEQ ID NO: 16960 - protein, 9 aa, Homo sapiens
  Table A; HLA-B*44:05; MSN; E573K; 0
QRIDKFESM

SEQ ID NO: 16961 - protein, 9 aa, Homo sapiens
  Table A; HLA-B*48:01; MSN; E573K; 0
QRIDKFESM

SEQ ID NO: 16962 - protein, 9 aa, Homo sapiens
  Table A; HLA-B*50:01; MSN; E573K; 0
QRIDKFESM

SEQ ID NO: 16963 - protein, 9 aa, Homo sapiens
  Table A; HLA-B*58:01; MSN; E573K; 0
QRIDKFESM

SEQ ID NO: 16964 - protein, 9 aa, Homo sapiens
  Table A; HLA-C*06:02; MSN; E573K; 1
QRIDKFESM

SEQ ID NO: 16965 - protein, 9 aa, Homo sapiens
  Table A; HLA-C*07:01; MSN; E573K; 1
QRIDKFESM

SEQ ID NO: 16966 - protein, 9 aa, Homo sapiens
  Table A; HLA-C*07:02; MSN; E573K; 1
QRIDKFESM

SEQ ID NO: 16967 - protein, 9 aa, Homo sapiens
  Table A; HLA-C*08:01; MSN; E573K; 0
QRIDKFESM

SEQ ID NO: 16968 - protein, 9 aa, Homo sapiens
  Table A; HLA-C*08:03; MSN; E573K; 0
QRIDKFESM

SEQ ID NO: 16969 - protein, 9 aa, Homo sapiens
  Table A; HLA-C*16:04; MSN; E573K; 0
QRIDKFESM

SEQ ID NO: 16970 - protein, 11 aa, Homo sapiens
  Table A; HLA-B*27:05; BRAF; G469V; 1
QRIGSGSFVTV

SEQ ID NO: 16971 - protein, 11 aa, Homo sapiens
  Table A; HLA-B*39:01; BRAF; G469V; 0
QRIGSGSFVTV

SEQ ID NO: 16972 - protein, 8 aa, Homo sapiens
  Table A; HLA-B*27:02; BRAF; G466V; 0
QRIGSVSF

SEQ ID NO: 16973 - protein, 9 aa, Homo sapiens
  Table A; HLA-B*15:10; RAF1; S257L; 0
QRLTSTPNV

SEQ ID NO: 16974 - protein, 9 aa, Homo sapiens
  Table A; HLA-B*27:05; RAF1; S257L; 0
QRLTSTPNV

SEQ ID NO: 16975 - protein, 9 aa, Homo sapiens
  Table A; HLA-B*39:06; RAF1; S257L; 0
QRLTSTPNV

SEQ ID NO: 16976 - protein, 8 aa, Homo sapiens
  Table A; HLA-B*27:05; PCBP1; L100Q; 0
QRLVVPAT

SEQ ID NO: 16977 - protein, 8 aa, Homo sapiens
  Table A; HLA-B*39:06; PCBP1; L100Q; 0
QRLVVPAT

SEQ ID NO: 16978 - protein, 9 aa, Homo sapiens
  Table A; HLA-B*08:01; PCBP1; L100Q; 1
QRLVVPATQ

SEQ ID NO: 16979 - protein, 9 aa, Homo sapiens
  Table A; HLA-B*27:02; PCBP1; L100Q; 0
QRLVVPATQ

SEQ ID NO: 16980 - protein, 9 aa, Homo sapiens
  Table A; HLA-B*27:05; PCBP1; L100Q; 0
QRLVVPATQ

SEQ ID NO: 16981 - protein, 9 aa, Homo sapiens
  Table A; HLA-B*39:06; PCBP1; L100Q; 0
QRLVVPATQ

SEQ ID NO: 16982 - protein, 10 aa, Homo sapiens
  Table A; HLA-B*27:02; A1CF; E34K; 0
QRTGYSLVQK

SEQ ID NO: 16983 - protein, 10 aa, Homo sapiens
  Table A; HLA-B*27:05; A1CF; E34K; 1
QRTGYSLVQK

SEQ ID NO: 16984 - protein, 8 aa, Homo sapiens
  Table A; HLA-B*27:05; ACVR1; R206H; 0
QRTVAHQI

SEQ ID NO: 16985 - protein, 8 aa, Homo sapiens
  Table A; HLA-B*39:06; ACVR1; R206H; 0
QRTVAHQI

SEQ ID NO: 16986 - protein, 9 aa, Homo sapiens
  Table A; HLA-A*02:05; PIK3CA; Y1021C; 0
QSFDDIACI

SEQ ID NO: 16987 - protein, 9 aa, Homo sapiens
  Table A; HLA-A*02:06; PIK3CA; Y1021C; 0
QSFDDIACI

SEQ ID NO: 16988 - protein, 9 aa, Homo sapiens
  Table A; HLA-A*68:02; PIK3CA; Y1021C; 0
QSFDDIACI

SEQ ID NO: 16989 - protein, 9 aa, Homo sapiens
  Table A; HLA-B*13:02; PIK3CA; Y1021C; 0
QSFDDIACI

SEQ ID NO: 16990 - protein, 9 aa, Homo sapiens
  Table A; HLA-B*50:01; PIK3CA; Y1021C; 0
QSFDDIACI

SEQ ID NO: 16991 - protein, 9 aa, Homo sapiens
  Table A; HLA-B*58:01; PIK3CA; Y1021C; 0
QSFDDIACI

SEQ ID NO: 16992 - protein, 10 aa, Homo sapiens
  Table A; HLA-A*68:01; PIK3CA; Y1021C; 0
QSFDDIACIR

SEQ ID NO: 16993 - protein, 11 aa, Homo sapiens
  Table A; HLA-A*11:01; PIK3CA; Y1021C; 1
QSFDDIACIRK

SEQ ID NO: 16994 - protein, 9 aa, Homo sapiens
  Table A; HLA-B*57:01; ATM; R2691C; 0
QSFKAEFCL

SEQ ID NO: 16995 - protein, 10 aa, Homo sapiens
  Table A; HLA-A*11:01; TP53; V173L; 0
QSQHMTEVLR

SEQ ID NO: 16996 - protein, 10 aa, Homo sapiens
  Table A; HLA-A*31:01; TP53; V173L; 0
QSQHMTEVLR

SEQ ID NO: 16997 - protein, 10 aa, Homo sapiens
  Table A; HLA-A*33:03; TP53; V173L; 0
QSQHMTEVLR

SEQ ID NO: 16998 - protein, 10 aa, Homo sapiens
  Table A; HLA-A*68:01; TP53; V173L; 0
QSQHMTEVLR

SEQ ID NO: 16999 - protein, 9 aa, Homo sapiens
  Table A; HLA-B*15:01; TP53; V173M; 0
QSQHMTEVM

SEQ ID NO: 17000 - protein, 9 aa, Homo sapiens
  Table A; HLA-B*39:01; TP53; V173M; 0
QSQHMTEVM

SEQ ID NO: 17001 - protein, 10 aa, Homo sapiens
  Table A; HLA-A*31:01; TP53; V173M; 0
QSQHMTEVMR

SEQ ID NO: 17002 - protein, 10 aa, Homo sapiens
  Table A; HLA-A*68:01; TP53; V173M; 0
QSQHMTEVMR

SEQ ID NO: 17003 - protein, 8 aa, Homo sapiens
  Table A; HLA-B*13:02; CTNNB1; S33F; 1
QSYLDFGI

SEQ ID NO: 17004 - protein, 9 aa, Homo sapiens
  Table A; HLA-C*08:03; CTNNB1; S33F; 0
QSYLDFGIH

SEQ ID NO: 17005 - protein, 8 aa, Homo sapiens
  Table A; HLA-B*13:02; CTNNB1; G34E; 0
QSYLDSEI

SEQ ID NO: 17006 - protein, 8 aa, Homo sapiens
  Table A; HLA-B*51:01; CTNNB1; G34E; 0
QSYLDSEI

SEQ ID NO: 17007 - protein, 9 aa, Homo sapiens
  Table A; HLA-B*48:01; CTNNB1; G34E; 0
QSYLDSEIH

SEQ ID NO: 17008 - protein, 9 aa, Homo sapiens
  Table A; HLA-C*08:03; CTNNB1; G34E; 0
QSYLDSEIH

SEQ ID NO: 17009 - protein, 10 aa, Homo sapiens
  Table A; HLA-A*68:01; CTNNB1; S37A; 0
QSYLDSGIHA

SEQ ID NO: 17010 - protein, 10 aa, Homo sapiens
  Table A; HLA-A*68:02; CTNNB1; S37A; 0
QSYLDSGIHA

SEQ ID NO: 17011 - protein, 10 aa, Homo sapiens
  Table A; HLA-B*50:01; CTNNB1; S37A; 0
QSYLDSGIHA

SEQ ID NO: 17012 - protein, 10 aa, Homo sapiens
  Table A; HLA-B*54:01; CTNNB1; S37A; 0
QSYLDSGIHA

SEQ ID NO: 17013 - protein, 10 aa, Homo sapiens
  Table A; HLA-B*55:02; CTNNB1; S37A; 0
QSYLDSGIHA

SEQ ID NO: 17014 - protein, 11 aa, Homo sapiens
  Table A; HLA-A*31:01; CTNNB1; S37A; 0
QSYLDSGIHAG

SEQ ID NO: 17015 - protein, 11 aa, Homo sapiens
  Table A; HLA-A*68:02; CTNNB1; S37C; 0
QSYLDSGIHCG

SEQ ID NO: 17016 - protein, 10 aa, Homo sapiens
  Table A; HLA-A*01:01; CTNNB1; S37F; 1
QSYLDSGIHF

SEQ ID NO: 17017 - protein, 10 aa, Homo sapiens
  Table A; HLA-A*11:01; CTNNB1; S37F; 1
QSYLDSGIHF

SEQ ID NO: 17018 - protein, 10 aa, Homo sapiens
  Table A; HLA-A*26:01; CTNNB1; S37F; 1
QSYLDSGIHF

SEQ ID NO: 17019 - protein, 10 aa, Homo sapiens
  Table A; HLA-A*68:01; CTNNB1; S37F; 1
QSYLDSGIHF

SEQ ID NO: 17020 - protein, 10 aa, Homo sapiens
  Table A; HLA-A*68:02; CTNNB1; S37F; 0
QSYLDSGIHF

SEQ ID NO: 17021 - protein, 10 aa, Homo sapiens
  Table A; HLA-B*15:01; CTNNB1; S37F; 1
QSYLDSGIHF

SEQ ID NO: 17022 - protein, 10 aa, Homo sapiens
  Table A; HLA-B*15:02; CTNNB1; S37F; 0
QSYLDSGIHF

SEQ ID NO: 17023 - protein, 10 aa, Homo sapiens
  Table A; HLA-B*35:01; CTNNB1; S37F; 1
QSYLDSGIHF

SEQ ID NO: 17024 - protein, 10 aa, Homo sapiens
  Table A; HLA-B*57:01; CTNNB1; S37F; 1
QSYLDSGIHF

SEQ ID NO: 17025 - protein, 10 aa, Homo sapiens
  Table A; HLA-B*58:01; CTNNB1; S37F; 0
QSYLDSGIHF

SEQ ID NO: 17026 - protein, 10 aa, Homo sapiens
  Table A; HLA-C*03:04; CTNNB1; S37F; 1
QSYLDSGIHF

SEQ ID NO: 17027 - protein, 10 aa, Homo sapiens
  Table A; HLA-C*12:03; CTNNB1; S37F; 1
QSYLDSGIHF

SEQ ID NO: 17028 - protein, 11 aa, Homo sapiens
  Table A; HLA-A*31:01; CTNNB1; S37P; 0
QSYLDSGIHPG

SEQ ID NO: 17029 - protein, 11 aa, Homo sapiens
  Table A; HLA-A*68:01; CTNNB1; S37P; 0
QSYLDSGIHPG

SEQ ID NO: 17030 - protein, 11 aa, Homo sapiens
  Table A; HLA-A*68:02; CTNNB1; S37P; 0
QSYLDSGIHPG

SEQ ID NO: 17031 - protein, 8 aa, Homo sapiens
  Table A; HLA-B*13:02; CTNNB1; G34R; 1
QSYLDSRI

SEQ ID NO: 17032 - protein, 8 aa, Homo sapiens
  Table A; HLA-B*51:01; CTNNB1; G34R; 1
QSYLDSRI

SEQ ID NO: 17033 - protein, 9 aa, Homo sapiens
  Table A; HLA-A*03:01; CTNNB1; G34R; 1
QSYLDSRIH

SEQ ID NO: 17034 - protein, 9 aa, Homo sapiens
  Table A; HLA-B*48:01; CTNNB1; G34R; 0
QSYLDSRIH

SEQ ID NO: 17035 - protein, 8 aa, Homo sapiens
  Table A; HLA-B*13:02; CTNNB1; G34V; 0
QSYLDSVI

SEQ ID NO: 17036 - protein, 8 aa, Homo sapiens
  Table A; HLA-B*48:01; CTNNB1; G34V; 0
QSYLDSVI

SEQ ID NO: 17037 - protein, 8 aa, Homo sapiens
  Table A; HLA-B*51:01; CTNNB1; G34V; 1
QSYLDSVI

SEQ ID NO: 17038 - protein, 9 aa, Homo sapiens
  Table A; HLA-A*11:01; CTNNB1; G34V; 1
QSYLDSVIH

SEQ ID NO: 17039 - protein, 9 aa, Homo sapiens
  Table A; HLA-B*15:01; CTNNB1; G34V; 1
QSYLDSVIH

SEQ ID NO: 17040 - protein, 9 aa, Homo sapiens
  Table A; HLA-B*27:02; CTNNB1; G34V; 0
QSYLDSVIH

SEQ ID NO: 17041 - protein, 9 aa, Homo sapiens
  Table A; HLA-B*48:01; CTNNB1; G34V; 0
QSYLDSVIH

SEQ ID NO: 17042 - protein, 9 aa, Homo sapiens
  Table A; HLA-C*08:03; CTNNB1; G34V; 0
QSYLDSVIH

SEQ ID NO: 17043 - protein, 11 aa, Homo sapiens
  Table A; HLA-A*68:01; CTNNB1; G34V; 0
QSYLDSVIHSG

SEQ ID NO: 17044 - protein, 11 aa, Homo sapiens
  Table A; HLA-A*68:02; CTNNB1; G34V; 0
QSYLDSVIHSG

SEQ ID NO: 17045 - protein, 11 aa, Homo sapiens
  Table A; HLA-C*08:03; CTNNB1; G34V; 0
QSYLDSVIHSG

SEQ ID NO: 17046 - protein, 8 aa, Homo sapiens
  Table A; HLA-B*13:02; CTNNB1; S33Y; 0
QSYLDYGI

SEQ ID NO: 17047 - protein, 8 aa, Homo sapiens
  Table A; HLA-B*39:06; CTNNB1; S33Y; 0
QSYLDYGI

SEQ ID NO: 17048 - protein, 8 aa, Homo sapiens
  Table A; HLA-B*08:01; CTNNB1; D32H; 1
QSYLHSGI

SEQ ID NO: 17049 - protein, 8 aa, Homo sapiens
  Table A; HLA-B*13:02; CTNNB1; D32H; 0
QSYLHSGI

SEQ ID NO: 17050 - protein, 8 aa, Homo sapiens
  Table A; HLA-B*14:02; CTNNB1; D32H; 0
QSYLHSGI

SEQ ID NO: 17051 - protein, 8 aa, Homo sapiens
  Table A; HLA-B*51:01; CTNNB1; D32H; 0
QSYLHSGI

SEQ ID NO: 17052 - protein, 9 aa, Homo sapiens
  Table A; HLA-A*03:01; CTNNB1; D32H; 1
QSYLHSGIH

SEQ ID NO: 17053 - protein, 9 aa, Homo sapiens
  Table A; HLA-A*11:01; CTNNB1; D32H; 0
QSYLHSGIH

SEQ ID NO: 17054 - protein, 8 aa, Homo sapiens
  Table A; HLA-B*13:02; CTNNB1; D32N; 1
QSYLNSGI

SEQ ID NO: 17055 - protein, 8 aa, Homo sapiens
  Table A; HLA-B*51:01; CTNNB1; D32N; 1
QSYLNSGI

SEQ ID NO: 17056 - protein, 9 aa, Homo sapiens
  Table A; HLA-A*03:01; CTNNB1; D32N; 1
QSYLNSGIH

SEQ ID NO: 17057 - protein, 9 aa, Homo sapiens
  Table A; HLA-A*11:01; CTNNB1; D32N; 1
QSYLNSGIH

SEQ ID NO: 17058 - protein, 9 aa, Homo sapiens
  Table A; HLA-B*48:01; CTNNB1; D32N; 0
QSYLNSGIH

SEQ ID NO: 17059 - protein, 8 aa, Homo sapiens
  Table A; HLA-B*08:01; CTNNB1; D32V; 1
QSYLVSGI

SEQ ID NO: 17060 - protein, 8 aa, Homo sapiens
  Table A; HLA-B*13:02; CTNNB1; D32V; 1
QSYLVSGI

SEQ ID NO: 17061 - protein, 8 aa, Homo sapiens
  Table A; HLA-B*39:06; CTNNB1; D32V; 0
QSYLVSGI

SEQ ID NO: 17062 - protein, 8 aa, Homo sapiens
  Table A; HLA-B*40:02; CTNNB1; D32V; 0
QSYLVSGI

SEQ ID NO: 17063 - protein, 8 aa, Homo sapiens
  Table A; HLA-B*49:01; CTNNB1; D32V; 0
QSYLVSGI

SEQ ID NO: 17064 - protein, 8 aa, Homo sapiens
  Table A; HLA-B*51:01; CTNNB1; D32V; 1
QSYLVSGI

SEQ ID NO: 17065 - protein, 9 aa, Homo sapiens
  Table A; HLA-A*03:01; CTNNB1; D32V; 1
QSYLVSGIH

SEQ ID NO: 17066 - protein, 9 aa, Homo sapiens
  Table A; HLA-A*11:01; CTNNB1; D32V; 1
QSYLVSGIH

SEQ ID NO: 17067 - protein, 9 aa, Homo sapiens
  Table A; HLA-A*33:03; CTNNB1; D32V; 0
QSYLVSGIH

SEQ ID NO: 17068 - protein, 11 aa, Homo sapiens
  Table A; HLA-A*68:02; CTNNB1; D32V; 0
QSYLVSGIHSG

SEQ ID NO: 17069 - protein, 11 aa, Homo sapiens
  Table A; HLA-B*54:01; CTNNB1; D32V; 0
QSYLVSGIHSG

SEQ ID NO: 17070 - protein, 8 aa, Homo sapiens
  Table A; HLA-B*13:02; CTNNB1; D32Y; 0
QSYLYSGI

SEQ ID NO: 17071 - protein, 8 aa, Homo sapiens
  Table A; HLA-B*51:01; CTNNB1; D32Y; 1
QSYLYSGI

SEQ ID NO: 17072 - protein, 9 aa, Homo sapiens
  Table A; HLA-A*11:01; CTNNB1; D32Y; 1
QSYLYSGIH

SEQ ID NO: 17073 - protein, 8 aa, Homo sapiens
  Table A; HLA-B*48:01; SF3B1; R957Q; 0
QTAVVMKT

SEQ ID NO: 17074 - protein, 8 aa, Homo sapiens
  Table A; HLA-C*08:03; SF3B1; R957Q; 0
QTAVVMKT

SEQ ID NO: 17075 - protein, 9 aa, Homo sapiens
  Table A; HLA-A*02:05; SF3B1; R957Q; 0
QTAVVMKTC

SEQ ID NO: 17076 - protein, 9 aa, Homo sapiens
  Table A; HLA-A*68:02; SF3B1; R957Q; 0
QTAVVMKTC

SEQ ID NO: 17077 - protein, 9 aa, Homo sapiens
  Table A; HLA-B*50:01; SF3B1; R957Q; 0
QTAVVMKTC

SEQ ID NO: 17078 - protein, 9 aa, Homo sapiens
  Table A; HLA-A*02:03; ARHGEF12; R113Q; 0
QTGDQIIKV

SEQ ID NO: 17079 - protein, 9 aa, Homo sapiens
  Table A; HLA-A*02:04; ARHGEF12; R113Q; 0
QTGDQIIKV

SEQ ID NO: 17080 - protein, 9 aa, Homo sapiens
  Table A; HLA-A*02:05; ARHGEF12; R113Q; 0
QTGDQIIKV

SEQ ID NO: 17081 - protein, 9 aa, Homo sapiens
  Table A; HLA-A*02:06; ARHGEF12; R113Q; 0
QTGDQIIKV

SEQ ID NO: 17082 - protein, 9 aa, Homo sapiens
  Table A; HLA-A*02:08; ARHGEF12; R113Q; 0
QTGDQIIKV

SEQ ID NO: 17083 - protein, 9 aa, Homo sapiens
  Table A; HLA-A*68:01; ARHGEF12; R113Q; 0
QTGDQIIKV

SEQ ID NO: 17084 - protein, 9 aa, Homo sapiens
  Table A; HLA-A*68:02; ARHGEF12; R113Q; 0
QTGDQIIKV

SEQ ID NO: 17085 - protein, 9 aa, Homo sapiens
  Table A; HLA-B*13:02; ARHGEF12; R113Q; 0
QTGDQIIKV

SEQ ID NO: 17086 - protein, 9 aa, Homo sapiens
  Table A; HLA-B*50:01; ARHGEF12; R113Q; 0
QTGDQIIKV

SEQ ID NO: 17087 - protein, 9 aa, Homo sapiens
  Table A; HLA-C*15:02; ARHGEF12; R113Q; 0
QTGDQIIKV

SEQ ID NO: 17088 - protein, 8 aa, Homo sapiens
  Table A; HLA-A*26:01; FKBP9; R161Q; 1
QTIQVSDF

SEQ ID NO: 17089 - protein, 8 aa, Homo sapiens
  Table A; HLA-B*15:01; FKBP9; R161Q; 1
QTIQVSDF

SEQ ID NO: 17090 - protein, 9 aa, Homo sapiens
  Table A; HLA-A*02:05; FKBP9; R161Q; 0
QTIQVSDFV

SEQ ID NO: 17091 - protein, 9 aa, Homo sapiens
  Table A; HLA-A*02:06; FKBP9; R161Q; 0
QTIQVSDFV

SEQ ID NO: 17092 - protein, 9 aa, Homo sapiens
  Table A; HLA-A*02:08; FKBP9; R161Q; 0
QTIQVSDFV

SEQ ID NO: 17093 - protein, 9 aa, Homo sapiens
  Table A; HLA-A*68:02; FKBP9; R161Q; 0
QTIQVSDFV

SEQ ID NO: 17094 - protein, 9 aa, Homo sapiens
  Table A; HLA-B*13:02; FKBP9; R161Q; 0
QTIQVSDFV

SEQ ID NO: 17095 - protein, 10 aa, Homo sapiens
  Table A; HLA-A*68:01; FKBP9; R161Q; 0
QTIQVSDFVR

SEQ ID NO: 17096 - protein, 10 aa, Homo sapiens
  Table A; HLA-A*68:02; FKBP9; R161Q; 0
QTIQVSDFVR

SEQ ID NO: 17097 - protein, 10 aa, Homo sapiens
  Table A; HLA-B*27:02; FKBP9; R161Q; 0
QTIQVSDFVR

SEQ ID NO: 17098 - protein, 11 aa, Homo sapiens
  Table A; HLA-A*01:01; FKBP9; R161Q; 1
QTIQVSDFVRY

SEQ ID NO: 17099 - protein, 11 aa, Homo sapiens
  Table A; HLA-A*26:01; FKBP9; R161Q; 1
QTIQVSDFVRY

SEQ ID NO: 17100 - protein, 11 aa, Homo sapiens
  Table A; HLA-A*29:02; FKBP9; R161Q; 1
QTIQVSDFVRY

SEQ ID NO: 17101 - protein, 11 aa, Homo sapiens
  Table A; HLA-A*30:02; FKBP9; R161Q; 0
QTIQVSDFVRY

SEQ ID NO: 17102 - protein, 11 aa, Homo sapiens
  Table A; HLA-A*30:04; FKBP9; R161Q; 0
QTIQVSDFVRY

SEQ ID NO: 17103 - protein, 11 aa, Homo sapiens
  Table A; HLA-A*68:01; FKBP9; R161Q; 0
QTIQVSDFVRY

SEQ ID NO: 17104 - protein, 11 aa, Homo sapiens
  Table A; HLA-B*15:01; FKBP9; R161Q; 1
QTIQVSDFVRY

SEQ ID NO: 17105 - protein, 11 aa, Homo sapiens
  Table A; HLA-B*57:01; FKBP9; R161Q; 1
QTIQVSDFVRY

SEQ ID NO: 17106 - protein, 11 aa, Homo sapiens
  Table A; HLA-B*58:01; FKBP9; R161Q; 0
QTIQVSDFVRY

SEQ ID NO: 17107 - protein, 8 aa, Homo sapiens
  Table A; HLA-B*13:02; CNTNAP2; R483Q; 0
QTNSPLQV

SEQ ID NO: 17108 - protein, 8 aa, Homo sapiens
  Table A; HLA-C*15:02; CNTNAP2; R483Q; 0
QTNSPLQV

SEQ ID NO: 17109 - protein, 9 aa, Homo sapiens
  Table A; HLA-A*03:01; CNTNAP2; R483Q; 1
QTNSPLQVK

SEQ ID NO: 17110 - protein, 9 aa, Homo sapiens
  Table A; HLA-A*03:02; CNTNAP2; R483Q; 0
QTNSPLQVK

SEQ ID NO: 17111 - protein, 9 aa, Homo sapiens
  Table A; HLA-A*11:01; CNTNAP2; R483Q; 1
QTNSPLQVK

SEQ ID NO: 17112 - protein, 9 aa, Homo sapiens
  Table A; HLA-A*30:01; CNTNAP2; R483Q; 0
QTNSPLQVK

SEQ ID NO: 17113 - protein, 9 aa, Homo sapiens
  Table A; HLA-A*31:01; CNTNAP2; R483Q; 0
QTNSPLQVK

SEQ ID NO: 17114 - protein, 9 aa, Homo sapiens
  Table A; HLA-A*33:01; CNTNAP2; R483Q; 0
QTNSPLQVK

SEQ ID NO: 17115 - protein, 9 aa, Homo sapiens
  Table A; HLA-A*33:03; CNTNAP2; R483Q; 0
QTNSPLQVK

SEQ ID NO: 17116 - protein, 9 aa, Homo sapiens
  Table A; HLA-A*68:01; CNTNAP2; R483Q; 0
QTNSPLQVK

SEQ ID NO: 17117 - protein, 10 aa, Homo sapiens
  Table A; HLA-A*11:01; CNTNAP2; R483Q; 1
QTNSPLQVKT

SEQ ID NO: 17118 - protein, 10 aa, Homo sapiens
  Table A; HLA-C*08:03; CNTNAP2; R483Q; 0
QTNSPLQVKT

SEQ ID NO: 17119 - protein, 8 aa, Homo sapiens
  Table A; HLA-B*08:01; XPO1; R749Q; 1
QTVKRETL

SEQ ID NO: 17120 - protein, 8 aa, Homo sapiens
  Table A; HLA-B*14:02; XPO1; R749Q; 0
QTVKRETL

SEQ ID NO: 17121 - protein, 9 aa, Homo sapiens
  Table A; HLA-A*03:01; XPO1; R749Q; 1
QTVKRETLK

SEQ ID NO: 17122 - protein, 9 aa, Homo sapiens
  Table A; HLA-A*11:01; XPO1; R749Q; 0
QTVKRETLK

SEQ ID NO: 17123 - protein, 9 aa, Homo sapiens
  Table A; HLA-A*68:01; XPO1; R749Q; 0
QTVKRETLK

SEQ ID NO: 17124 - protein, 9 aa, Homo sapiens
  Table A; HLA-A*02:05; SIRPA; V233I; 0
QVICEVAHI

SEQ ID NO: 17125 - protein, 9 aa, Homo sapiens
  Table A; HLA-A*02:06; SIRPA; V233I; 0
QVICEVAHI

SEQ ID NO: 17126 - protein, 9 aa, Homo sapiens
  Table A; HLA-A*02:08; SIRPA; V233I; 0
QVICEVAHI

SEQ ID NO: 17127 - protein, 9 aa, Homo sapiens
  Table A; HLA-A*68:02; SIRPA; V233I; 0
QVICEVAHI

SEQ ID NO: 17128 - protein, 10 aa, Homo sapiens
  Table A; HLA-A*30:02; MAP2K1; P124S; 0
QVLHECNSSY

SEQ ID NO: 17129 - protein, 10 aa, Homo sapiens
  Table A; HLA-A*25:01; PIK3CA; M1043V; 0
QVNDAHHGGW

SEQ ID NO: 17130 - protein, 10 aa, Homo sapiens
  Table A; HLA-A*26:01; PIK3CA; M1043V; 0
QVNDAHHGGW

SEQ ID NO: 17131 - protein, 10 aa, Homo sapiens
  Table A; HLA-A*30:02; PIK3CA; M1043V; 0
QVNDAHHGGW

SEQ ID NO: 17132 - protein, 10 aa, Homo sapiens
  Table A; HLA-A*32:01; PIK3CA; M1043V; 0
QVNDAHHGGW

SEQ ID NO: 17133 - protein, 10 aa, Homo sapiens
  Table A; HLA-B*15:13; PIK3CA; M1043V; 0
QVNDAHHGGW

SEQ ID NO: 17134 - protein, 10 aa, Homo sapiens
  Table A; HLA-B*44:05; PIK3CA; M1043V; 0
QVNDAHHGGW

SEQ ID NO: 17135 - protein, 10 aa, Homo sapiens
  Table A; HLA-B*57:01; PIK3CA; M1043V; 0
QVNDAHHGGW

SEQ ID NO: 17136 - protein, 10 aa, Homo sapiens
  Table A; HLA-B*58:01; PIK3CA; M1043V; 0
QVNDAHHGGW

SEQ ID NO: 17137 - protein, 9 aa, Homo sapiens
  Table A; HLA-A*02:07; CRNKL1; S128F; 0
QVPLPVPRF

SEQ ID NO: 17138 - protein, 9 aa, Homo sapiens
  Table A; HLA-A*11:01; CRNKL1; S128F; 1
QVPLPVPRF

SEQ ID NO: 17139 - protein, 9 aa, Homo sapiens
  Table A; HLA-A*23:01; CRNKL1; S128F; 0
QVPLPVPRF

SEQ ID NO: 17140 - protein, 9 aa, Homo sapiens
  Table A; HLA-A*24:02; CRNKL1; S128F; 1
QVPLPVPRF

SEQ ID NO: 17141 - protein, 9 aa, Homo sapiens
  Table A; HLA-A*25:01; CRNKL1; S128F; 0
QVPLPVPRF

SEQ ID NO: 17142 - protein, 9 aa, Homo sapiens
  Table A; HLA-A*26:01; CRNKL1; S128F; 0
QVPLPVPRF

SEQ ID NO: 17143 - protein, 9 aa, Homo sapiens
  Table A; HLA-A*26:02; CRNKL1; S128F; 0
QVPLPVPRF

SEQ ID NO: 17144 - protein, 9 aa, Homo sapiens
  Table A; HLA-B*35:01; CRNKL1; S128F; 1
QVPLPVPRF

SEQ ID NO: 17145 - protein, 9 aa, Homo sapiens
  Table A; HLA-B*57:01; CRNKL1; S128F; 1
QVPLPVPRF

SEQ ID NO: 17146 - protein, 8 aa, Homo sapiens
  Table A; HLA-B*51:01; ARID2; S990L; 0
QVPTAMSL

SEQ ID NO: 17147 - protein, 8 aa, Homo sapiens
  Table A; HLA-C*01:02; ARID2; S990L; 0
QVPTAMSL

SEQ ID NO: 17148 - protein, 10 aa, Homo sapiens
  Table A; HLA-A*33:03; MAPK1; E322K; 0
QYYDPSDKPI

SEQ ID NO: 17149 - protein, 10 aa, Homo sapiens
  Table A; HLA-C*08:01; MAPK1; E322K; 0
QYYDPSDKPI

SEQ ID NO: 17150 - protein, 10 aa, Homo sapiens
  Table A; HLA-B*57:01; CDKN2A; D108Y; 0
RAGARLDVRY

SEQ ID NO: 17151 - protein, 9 aa, Homo sapiens
  Table A; HLA-B*58:01; SMARCA4; G1162S; 0
RAGGLSLNL

SEQ ID NO: 17152 - protein, 9 aa, Homo sapiens
  Table A; HLA-C*15:02; SMARCA4; G1162S; 0
RAGGLSLNL

SEQ ID NO: 17153 - protein, 9 aa, Homo sapiens
  Table A; HLA-C*17:01; SMARCA4; G1162S; 0
RAGGLSLNL

SEQ ID NO: 17154 - protein, 11 aa, Homo sapiens
  Table A; HLA-C*08:03; ARHGEF12; R113Q; 0
RAGVQTGDQII

SEQ ID NO: 17155 - protein, 9 aa, Homo sapiens
  Table A; HLA-A*03:01; CHD4; R1162W; 1
RAHWIGQNK

SEQ ID NO: 17156 - protein, 9 aa, Homo sapiens
  Table A; HLA-A*03:02; CHD4; R1162W; 0
RAHWIGQNK

SEQ ID NO: 17157 - protein, 9 aa, Homo sapiens
  Table A; HLA-A*11:01; CHD4; R1162W; 1
RAHWIGQNK

SEQ ID NO: 17158 - protein, 9 aa, Homo sapiens
  Table A; HLA-A*31:01; CHD4; R1162W; 0
RAHWIGQNK

SEQ ID NO: 17159 - protein, 9 aa, Homo sapiens
  Table A; HLA-A*33:03; CHD4; R1162W; 0
RAHWIGQNK

SEQ ID NO: 17160 - protein, 8 aa, Homo sapiens
  Table A; HLA-B*40:02; STAG1; A116T; 0
RDITLLDL

SEQ ID NO: 17161 - protein, 8 aa, Homo sapiens
  Table A; HLA-B*37:01; KDR; R1032Q; 0
RDLAAQNI

SEQ ID NO: 17162 - protein, 9 aa, Homo sapiens
  Table A; HLA-B*41:02; KDR; R1032Q; 0
RDLAAQNIL

SEQ ID NO: 17163 - protein, 9 aa, Homo sapiens
  Table A; HLA-B*39:06; PIK3CA; E545A; 0
RDPLSEITA

SEQ ID NO: 17164 - protein, 10 aa, Homo sapiens
  Table A; HLA-A*30:01; TP53; R283P; 0
RDRPTEEENL

SEQ ID NO: 17165 - protein, 10 aa, Homo sapiens
  Table A; HLA-B*40:02; TP53; R283P; 0
RDRPTEEENL

SEQ ID NO: 17166 - protein, 11 aa, Homo sapiens
  Table A; HLA-A*31:01; TP53; R283P; 0
RDRPTEEENLR

SEQ ID NO: 17167 - protein, 8 aa, Homo sapiens
  Table A; HLA-C*08:03; PTK6; H126P; 0
RDTQAVRP

SEQ ID NO: 17168 - protein, 10 aa, Homo sapiens
  Table A; HLA-B*40:01; PIK3CA; K111E; 1
REEEILNREI

SEQ ID NO: 17169 - protein, 10 aa, Homo sapiens
  Table A; HLA-B*40:02; PIK3CA; K111E; 0
REEEILNREI

SEQ ID NO: 17170 - protein, 10 aa, Homo sapiens
  Table A; HLA-B*41:02; PIK3CA; K111E; 0
REEEILNREI

SEQ ID NO: 17171 - protein, 10 aa, Homo sapiens
  Table A; HLA-B*44:03; PIK3CA; K111E; 1
REEEILNREI

SEQ ID NO: 17172 - protein, 10 aa, Homo sapiens
  Table A; HLA-B*44:05; PIK3CA; K111E; 0
REEEILNREI

SEQ ID NO: 17173 - protein, 10 aa, Homo sapiens
  Table A; HLA-B*49:01; PIK3CA; K111E; 0
REEEILNREI

SEQ ID NO: 17174 - protein, 10 aa, Homo sapiens
  Table A; HLA-B*40:01; PIK3CA; K111N; 0
REENILNREI

SEQ ID NO: 17175 - protein, 10 aa, Homo sapiens
  Table A; HLA-B*40:02; PIK3CA; K111N; 0
REENILNREI

SEQ ID NO: 17176 - protein, 10 aa, Homo sapiens
  Table A; HLA-B*41:02; PIK3CA; K111N; 0
REENILNREI

SEQ ID NO: 17177 - protein, 10 aa, Homo sapiens
  Table A; HLA-B*44:03; PIK3CA; K111N; 0
REENILNREI

SEQ ID NO: 17178 - protein, 10 aa, Homo sapiens
  Table A; HLA-B*44:05; PIK3CA; K111N; 0
REENILNREI

SEQ ID NO: 17179 - protein, 10 aa, Homo sapiens
  Table A; HLA-B*49:01; PIK3CA; K111N; 0
REENILNREI

SEQ ID NO: 17180 - protein, 9 aa, Homo sapiens
  Table A; HLA-A*23:01; PIK3CA; G118D; 0
REIDFAIGM

SEQ ID NO: 17181 - protein, 9 aa, Homo sapiens
  Table A; HLA-A*30:01; PIK3CA; G118D; 0
REIDFAIGM

SEQ ID NO: 17182 - protein, 9 aa, Homo sapiens
  Table A; HLA-B*18:01; PIK3CA; G118D; 1
REIDFAIGM

SEQ ID NO: 17183 - protein, 9 aa, Homo sapiens
  Table A; HLA-B*37:01; PIK3CA; G118D; 0
REIDFAIGM

SEQ ID NO: 17184 - protein, 9 aa, Homo sapiens
  Table A; HLA-B*40:01; PIK3CA; G118D; 1
REIDFAIGM

SEQ ID NO: 17185 - protein, 9 aa, Homo sapiens
  Table A; HLA-B*40:02; PIK3CA; G118D; 0
REIDFAIGM

SEQ ID NO: 17186 - protein, 9 aa, Homo sapiens
  Table A; HLA-B*40:06; PIK3CA; G118D; 0
REIDFAIGM

SEQ ID NO: 17187 - protein, 9 aa, Homo sapiens
  Table A; HLA-B*41:02; PIK3CA; G118D; 0
REIDFAIGM

SEQ ID NO: 17188 - protein, 9 aa, Homo sapiens
  Table A; HLA-B*44:02; PIK3CA; G118D; 1
REIDFAIGM

SEQ ID NO: 17189 - protein, 9 aa, Homo sapiens
  Table A; HLA-B*44:03; PIK3CA; G118D; 1
REIDFAIGM

SEQ ID NO: 17190 - protein, 9 aa, Homo sapiens
  Table A; HLA-B*44:05; PIK3CA; G118D; 0
REIDFAIGM

SEQ ID NO: 17191 - protein, 9 aa, Homo sapiens
  Table A; HLA-B*49:01; PIK3CA; G118D; 0
REIDFAIGM

SEQ ID NO: 17192 - protein, 9 aa, Homo sapiens
  Table A; HLA-B*50:01; PIK3CA; G118D; 0
REIDFAIGM

SEQ ID NO: 17193 - protein, 10 aa, Homo sapiens
  Table A; HLA-B*40:06; PIK3CA; G118D; 0
REIDFAIGMP

SEQ ID NO: 17194 - protein, 10 aa, Homo sapiens
  Table A; HLA-B*50:01; PIK3CA; G118D; 0
REIDFAIGMP

SEQ ID NO: 17195 - protein, 10 aa, Homo sapiens
  Table A; HLA-B*40:02; PIK3R1; N564D; 0
REIDKRMDSI

SEQ ID NO: 17196 - protein, 10 aa, Homo sapiens
  Table A; HLA-B*44:03; PIK3R1; N564D; 0
REIDKRMDSI

SEQ ID NO: 17197 - protein, 10 aa, Homo sapiens
  Table A; HLA-B*44:05; PIK3R1; N564D; 0
REIDKRMDSI

SEQ ID NO: 17198 - protein, 10 aa, Homo sapiens
  Table A; HLA-B*49:01; PIK3R1; N564D; 0
REIDKRMDSI

SEQ ID NO: 17199 - protein, 9 aa, Homo sapiens
  Table A; HLA-B*57:01; TP53; R337L; 0
RGRELFEMF

SEQ ID NO: 17200 - protein, 8 aa, Homo sapiens
  Table A; HLA-B*07:02; KRAS; G12R; 1
RGVGKSAL

SEQ ID NO: 17201 - protein, 8 aa, Homo sapiens
  Table A; HLA-B*08:01; KRAS; G12R; 1
RGVGKSAL

SEQ ID NO: 17202 - protein, 8 aa, Homo sapiens
  Table A; HLA-B*14:02; KRAS; G12R; 1
RGVGKSAL

SEQ ID NO: 17203 - protein, 10 aa, Homo sapiens
  Table A; HLA-B*13:02; KRAS; G12R; 1
RGVGKSALTI

SEQ ID NO: 17204 - protein, 8 aa, Homo sapiens
  Table A; HLA-C*05:01; MSN; E573K; 1
RIDKFESM

SEQ ID NO: 17205 - protein, 8 aa, Homo sapiens
  Table A; HLA-C*08:02; MSN; E573K; 0
RIDKFESM

SEQ ID NO: 17206 - protein, 10 aa, Homo sapiens
  Table A; HLA-A*02:08; BRAF; G469V; 0
RIGSGSFVTV

SEQ ID NO: 17207 - protein, 11 aa, Homo sapiens
  Table A; HLA-B*15:01; BRAF; G469V; 1
RIGSGSFVTVY

SEQ ID NO: 17208 - protein, 9 aa, Homo sapiens
  Table A; HLA-A*02:03; CTNNB1; G34R; 0
RIHSGATTT

SEQ ID NO: 17209 - protein, 9 aa, Homo sapiens
  Table A; HLA-A*02:08; CTNNB1; G34R; 0
RIHSGATTT

SEQ ID NO: 17210 - protein, 9 aa, Homo sapiens
  Table A; HLA-A*03:01; CTNNB1; G34R; 1
RIHSGATTT

SEQ ID NO: 17211 - protein, 9 aa, Homo sapiens
  Table A; HLA-B*13:02; CTNNB1; G34R; 1
RIHSGATTT

SEQ ID NO: 17212 - protein, 9 aa, Homo sapiens
  Table A; HLA-B*15:01; CTNNB1; G34R; 1
RIHSGATTT

SEQ ID NO: 17213 - protein, 9 aa, Homo sapiens
  Table A; HLA-B*48:01; CTNNB1; G34R; 0
RIHSGATTT

SEQ ID NO: 17214 - protein, 9 aa, Homo sapiens
  Table A; HLA-C*08:03; CTNNB1; G34R; 0
RIHSGATTT

SEQ ID NO: 17215 - protein, 10 aa, Homo sapiens
  Table A; HLA-A*02:03; CTNNB1; G34R; 0
RIHSGATTTA

SEQ ID NO: 17216 - protein, 10 aa, Homo sapiens
  Table A; HLA-A*02:05; CTNNB1; G34R; 0
RIHSGATTTA

SEQ ID NO: 17217 - protein, 10 aa, Homo sapiens
  Table A; HLA-A*02:08; CTNNB1; G34R; 0
RIHSGATTTA

SEQ ID NO: 17218 - protein, 10 aa, Homo sapiens
  Table A; HLA-A*03:01; CTNNB1; G34R; 1
RIHSGATTTA

SEQ ID NO: 17219 - protein, 10 aa, Homo sapiens
  Table A; HLA-A*30:01; CTNNB1; G34R; 0
RIHSGATTTA

SEQ ID NO: 17220 - protein, 10 aa, Homo sapiens
  Table A; HLA-B*07:02; CTNNB1; G34R; 1
RIHSGATTTA

SEQ ID NO: 17221 - protein, 10 aa, Homo sapiens
  Table A; HLA-B*13:02; CTNNB1; G34R; 1
RIHSGATTTA

SEQ ID NO: 17222 - protein, 10 aa, Homo sapiens
  Table A; HLA-B*15:01; CTNNB1; G34R; 1
RIHSGATTTA

SEQ ID NO: 17223 - protein, 10 aa, Homo sapiens
  Table A; HLA-B*39:06; CTNNB1; G34R; 0
RIHSGATTTA

SEQ ID NO: 17224 - protein, 10 aa, Homo sapiens
  Table A; HLA-B*48:01; CTNNB1; G34R; 0
RIHSGATTTA

SEQ ID NO: 17225 - protein, 10 aa, Homo sapiens
  Table A; HLA-B*50:01; CTNNB1; G34R; 0
RIHSGATTTA

SEQ ID NO: 17226 - protein, 10 aa, Homo sapiens
  Table A; HLA-B*55:01; CTNNB1; G34R; 0
RIHSGATTTA

SEQ ID NO: 17227 - protein, 10 aa, Homo sapiens
  Table A; HLA-B*56:01; CTNNB1; G34R; 0
RIHSGATTTA

SEQ ID NO: 17228 - protein, 9 aa, Homo sapiens
  Table A; HLA-A*31:01; TP53; L194R; 0
RIRVEGNLR

SEQ ID NO: 17229 - protein, 8 aa, Homo sapiens
  Table A; HLA-B*57:01; CDKN2A; D108Y; 0
RLDVRYAW

SEQ ID NO: 17230 - protein, 11 aa, Homo sapiens
  Table A; HLA-B*27:02; MAP2K1; K57N; 0
RLEAFLTQNQK

SEQ ID NO: 17231 - protein, 9 aa, Homo sapiens
  Table A; HLA-A*02:01; TP53; P250L; 1
RLILTIITL

SEQ ID NO: 17232 - protein, 9 aa, Homo sapiens
  Table A; HLA-A*02:03; TP53; P250L; 0
RLILTIITL

SEQ ID NO: 17233 - protein, 9 aa, Homo sapiens
  Table A; HLA-A*02:04; TP53; P250L; 0
RLILTIITL

SEQ ID NO: 17234 - protein, 9 aa, Homo sapiens
  Table A; HLA-A*02:07; TP53; P250L; 0
RLILTIITL

SEQ ID NO: 17235 - protein, 9 aa, Homo sapiens
  Table A; HLA-A*02:08; TP53; P250L; 0
RLILTIITL

SEQ ID NO: 17236 - protein, 9 aa, Homo sapiens
  Table A; HLA-B*48:01; TP53; P250L; 0
RLILTIITL

SEQ ID NO: 17237 - protein, 9 aa, Homo sapiens
  Table A; HLA-C*08:03; TP53; P250L; 0
RLILTIITL

SEQ ID NO: 17238 - protein, 9 aa, Homo sapiens
  Table A; HLA-C*17:01; TP53; P250L; 0
RLILTIITL

SEQ ID NO: 17239 - protein, 9 aa, Homo sapiens
  Table A; HLA-A*02:03; DDIT3; R147H; 0
RLKQEIEHL

SEQ ID NO: 17240 - protein, 9 aa, Homo sapiens
  Table A; HLA-A*02:04; DDIT3; R147H; 0
RLKQEIEHL

SEQ ID NO: 17241 - protein, 9 aa, Homo sapiens
  Table A; HLA-A*02:08; DDIT3; R147H; 0
RLKQEIEHL

SEQ ID NO: 17242 - protein, 10 aa, Homo sapiens
  Table A; HLA-A*02:04; CDKN2A; P114L; 0
RLLVDLAEEL

SEQ ID NO: 17243 - protein, 8 aa, Homo sapiens
  Table A; HLA-A*02:04; ACSL3; R232Q; 0
RLQHIITV

SEQ ID NO: 17244 - protein, 11 aa, Homo sapiens
  Table A; HLA-A*03:02; ACSL3; R232Q; 0
RLQHIITVDGK

SEQ ID NO: 17245 - protein, 8 aa, Homo sapiens
  Table A; HLA-B*13:02; RAF1; S257L; 0
RLTSTPNV

SEQ ID NO: 17246 - protein, 11 aa, Homo sapiens
  Table A; HLA-A*02:04; RAF1; S257L; 0
RLTSTPNVHMV

SEQ ID NO: 17247 - protein, 9 aa, Homo sapiens
  Table A; HLA-A*02:07; PIK3R1; N564D; 0
RMDSIKPDL

SEQ ID NO: 17248 - protein, 9 aa, Homo sapiens
  Table A; HLA-B*13:01; PIK3R1; N564D; 0
RMDSIKPDL

SEQ ID NO: 17249 - protein, 9 aa, Homo sapiens
  Table A; HLA-B*13:01; PIK3R1; K567E; 0
RMNSIEPDL

SEQ ID NO: 17250 - protein, 9 aa, Homo sapiens
  Table A; HLA-B*48:01; PIK3R1; K567E; 0
RMNSIEPDL

SEQ ID NO: 17251 - protein, 10 aa, Homo sapiens
  Table A; HLA-A*02:04; TP53; R249M; 0
RMPILTIITL

SEQ ID NO: 17252 - protein, 10 aa, Homo sapiens
  Table A; HLA-A*02:07; TP53; R249M; 0
RMPILTIITL

SEQ ID NO: 17253 - protein, 9 aa, Homo sapiens
  Table A; HLA-B*15:01; ERBB3; V104M; 1
RMVRGTQVY

SEQ ID NO: 17254 - protein, 9 aa, Homo sapiens
  Table A; HLA-C*08:02; PPP2R1A; R28C; 0
RNEDVQLCL

SEQ ID NO: 17255 - protein, 9 aa, Homo sapiens
  Table A; HLA-C*15:02; PPP2R1A; R28C; 0
RNEDVQLCL

SEQ ID NO: 17256 - protein, 9 aa, Homo sapiens
  Table A; HLA-C*15:02; PTPRT; E548K; 0
RNKTHHLFV

SEQ ID NO: 17257 - protein, 9 aa, Homo sapiens
  Table A; HLA-B*57:01; TP53; C275Y; 0
RNSFEVRVY

SEQ ID NO: 17258 - protein, 9 aa, Homo sapiens
  Table A; HLA-C*07:01; TP53; C275Y; 1
RNSFEVRVY

SEQ ID NO: 17259 - protein, 9 aa, Homo sapiens
  Table A; HLA-C*12:03; TP53; C275Y; 0
RNSFEVRVY

SEQ ID NO: 17260 - protein, 9 aa, Homo sapiens
  Table A; HLA-C*16:01; TP53; C275Y; 0
RNSFEVRVY

SEQ ID NO: 17261 - protein, 10 aa, Homo sapiens
  Table A; HLA-A*68:02; TP53; C275Y; 0
RNSFEVRVYA

SEQ ID NO: 17262 - protein, 9 aa, Homo sapiens
  Table A; HLA-C*15:02; TP53; R213Q; 0
RNTFQHSVV

SEQ ID NO: 17263 - protein, 9 aa, Homo sapiens
  Table A; HLA-C*15:02; TP53; V216M; 0
RNTFRHSMV

SEQ ID NO: 17264 - protein, 10 aa, Homo sapiens
  Table A; HLA-B*07:02; PIK3CA; C420R; 1
RPLAWGNINL

SEQ ID NO: 17265 - protein, 11 aa, Homo sapiens
  Table A; HLA-B*56:01; NRG1; L397P; 0
RPNGTGGPREC

SEQ ID NO: 17266 - protein, 8 aa, Homo sapiens
  Table A; HLA-B*07:02; PCBP1; L100Q; 1
RPPVTQRL

SEQ ID NO: 17267 - protein, 8 aa, Homo sapiens
  Table A; HLA-B*08:01; PCBP1; L100Q; 1
RPPVTQRL

SEQ ID NO: 17268 - protein, 8 aa, Homo sapiens
  Table A; HLA-B*51:01; PCBP1; L100Q; 1
RPPVTQRL

SEQ ID NO: 17269 - protein, 9 aa, Homo sapiens
  Table A; HLA-B*07:02; PCBP1; L100Q; 1
RPPVTQRLV

SEQ ID NO: 17270 - protein, 9 aa, Homo sapiens
  Table A; HLA-B*51:01; PCBP1; L100Q; 1
RPPVTQRLV

SEQ ID NO: 17271 - protein, 9 aa, Homo sapiens
  Table A; HLA-C*01:02; PCBP1; L100Q; 0
RPPVTQRLV

SEQ ID NO: 17272 - protein, 10 aa, Homo sapiens
  Table A; HLA-B*07:02; PCBP1; L100Q; 1
RPPVTQRLVV

SEQ ID NO: 17273 - protein, 10 aa, Homo sapiens
  Table A; HLA-B*51:01; PCBP1; L100Q; 1
RPPVTQRLVV

SEQ ID NO: 17274 - protein, 10 aa, Homo sapiens
  Table A; HLA-B*54:01; PCBP1; L100Q; 0
RPPVTQRLVV

SEQ ID NO: 17275 - protein, 10 aa, Homo sapiens
  Table A; HLA-B*55:02; PCBP1; L100Q; 0
RPPVTQRLVV

SEQ ID NO: 17276 - protein, 10 aa, Homo sapiens
  Table A; HLA-B*56:01; PCBP1; L100Q; 0
RPPVTQRLVV

SEQ ID NO: 17277 - protein, 8 aa, Homo sapiens
  Table A; HLA-B*35:02; TP53; R283P; 0
RPTEEENL

SEQ ID NO: 17278 - protein, 8 aa, Homo sapiens
  Table A; HLA-B*35:03; TP53; R283P; 0
RPTEEENL

SEQ ID NO: 17279 - protein, 8 aa, Homo sapiens
  Table A; HLA-B*35:12; TP53; R283P; 0
RPTEEENL

SEQ ID NO: 17280 - protein, 9 aa, Homo sapiens
  Table A; HLA-B*35:12; TP53; R283P; 0
RPTEEENLR

SEQ ID NO: 17281 - protein, 11 aa, Homo sapiens
  Table A; HLA-B*07:02; CDKN2A; H83Y; 1
RPVYDAAREGF

SEQ ID NO: 17282 - protein, 8 aa, Homo sapiens
  Table A; HLA-B*13:01; PPP2R1A; S256F; 0
RQAAEDKF

SEQ ID NO: 17283 - protein, 8 aa, Homo sapiens
  Table A; HLA-A*02:06; NFE2L2; D29G; 0
RQDIGLGV

SEQ ID NO: 17284 - protein, 8 aa, Homo sapiens
  Table A; HLA-B*13:02; NFE2L2; D29G; 0
RQDIGLGV

SEQ ID NO: 17285 - protein, 8 aa, Homo sapiens
  Table A; HLA-C*05:01; NFE2L2; D29G; 1
RQDIGLGV

SEQ ID NO: 17286 - protein, 8 aa, Homo sapiens
  Table A; HLA-C*08:02; NFE2L2; D29G; 0
RQDIGLGV

SEQ ID NO: 17287 - protein, 10 aa, Homo sapiens
  Table A; HLA-A*31:01; NFE2L2; D29G; 0
RQDIGLGVSR

SEQ ID NO: 17288 - protein, 10 aa, Homo sapiens
  Table A; HLA-B*27:02; NFE2L2; D29G; 0
RQDIGLGVSR

SEQ ID NO: 17289 - protein, 8 aa, Homo sapiens
  Table A; HLA-A*02:06; NFE2L2; D29H; 0
RQDIHLGV

SEQ ID NO: 17290 - protein, 8 aa, Homo sapiens
  Table A; HLA-B*13:02; NFE2L2; D29H; 0
RQDIHLGV

SEQ ID NO: 17291 - protein, 8 aa, Homo sapiens
  Table A; HLA-B*14:02; NFE2L2; D29H; 0
RQDIHLGV

SEQ ID NO: 17292 - protein, 8 aa, Homo sapiens
  Table A; HLA-B*39:06; NFE2L2; D29H; 0
RQDIHLGV

SEQ ID NO: 17293 - protein, 8 aa, Homo sapiens
  Table A; HLA-C*05:01; NFE2L2; D29H; 1
RQDIHLGV

SEQ ID NO: 17294 - protein, 8 aa, Homo sapiens
  Table A; HLA-C*08:02; NFE2L2; D29H; 0
RQDIHLGV

SEQ ID NO: 17295 - protein, 10 aa, Homo sapiens
  Table A; HLA-A*31:01; NFE2L2; D29H; 0
RQDIHLGVSR

SEQ ID NO: 17296 - protein, 11 aa, Homo sapiens
  Table A; HLA-A*31:01; SF3B1; R957Q; 0
RQQAADLISQT

SEQ ID NO: 17297 - protein, 9 aa, Homo sapiens
  Table A; HLA-B*15:01; ERBB2; R678Q; 0
RQQQKIRKY

SEQ ID NO: 17298 - protein, 9 aa, Homo sapiens
  Table A; HLA-C*06:02; CDKN2A; P48L; 1
RRLIQVMMM

SEQ ID NO: 17299 - protein, 9 aa, Homo sapiens
  Table A; HLA-B*27:05; TP53; G266R; 0
RRNSFEVRV

SEQ ID NO: 17300 - protein, 9 aa, Homo sapiens
  Table A; HLA-C*06:02; TP53; G266R; 0
RRNSFEVRV

SEQ ID NO: 17301 - protein, 9 aa, Homo sapiens
  Table A; HLA-B*27:05; TP53; E286K; 0
RRTEKENLR

SEQ ID NO: 17302 - protein, 9 aa, Homo sapiens
  Table A; HLA-A*02:05; MECOM; R750Q; 0
RSANLTQHL

SEQ ID NO: 17303 - protein, 9 aa, Homo sapiens
  Table A; HLA-A*02:08; MECOM; R750Q; 0
RSANLTQHL

SEQ ID NO: 17304 - protein, 9 aa, Homo sapiens
  Table A; HLA-B*58:01; MECOM; R750Q; 0
RSANLTQHL

SEQ ID NO: 17305 - protein, 9 aa, Homo sapiens
  Table A; HLA-C*15:02; MECOM; R750Q; 0
RSANLTQHL

SEQ ID NO: 17306 - protein, 9 aa, Homo sapiens
  Table A; HLA-B*15:01; CTCF; R377H; 1
RSHTGEHPF

SEQ ID NO: 17307 - protein, 9 aa, Homo sapiens
  Table A; HLA-B*57:01; CTCF; R377H; 0
RSHTGEHPF

SEQ ID NO: 17308 - protein, 9 aa, Homo sapiens
  Table A; HLA-B*58:01; CTCF; R377H; 0
RSHTGEHPF

SEQ ID NO: 17309 - protein, 9 aa, Homo sapiens
  Table A; HLA-C*07:01; CTCF; R377H; 1
RSHTGEHPF

SEQ ID NO: 17310 - protein, 9 aa, Homo sapiens
  Table A; HLA-C*15:02; CTCF; R377H; 0
RSHTGEHPF

SEQ ID NO: 17311 - protein, 9 aa, Homo sapiens
  Table A; HLA-C*16:01; CTCF; R377H; 0
RSHTGEHPF

SEQ ID NO: 17312 - protein, 8 aa, Homo sapiens
  Table A; HLA-A*11:01; XPO1; R749Q; 0
RSMQTVKR

SEQ ID NO: 17313 - protein, 8 aa, Homo sapiens
  Table A; HLA-A*31:01; XPO1; R749Q; 0
RSMQTVKR

SEQ ID NO: 17314 - protein, 11 aa, Homo sapiens
  Table A; HLA-B*07:02; XPO1; R749Q; 1
RSMQTVKRETL

SEQ ID NO: 17315 - protein, 9 aa, Homo sapiens
  Table A; HLA-B*57:01; PIK3CA; C378R; 0
RSNPRWNEW

SEQ ID NO: 17316 - protein, 10 aa, Homo sapiens
  Table A; HLA-C*01:02; TP53; R249S; 1
RSPILTIITL

SEQ ID NO: 17317 - protein, 10 aa, Homo sapiens
  Table A; HLA-A*03:01; TP53; E286K; 1
RTEKENLRKK

SEQ ID NO: 17318 - protein, 10 aa, Homo sapiens
  Table A; HLA-A*11:01; TP53; E286K; 1
RTEKENLRKK

SEQ ID NO: 17319 - protein, 9 aa, Homo sapiens
  Table A; HLA-A*03:01; A1CF; E34K; 1
RTGYSLVQK

SEQ ID NO: 17320 - protein, 9 aa, Homo sapiens
  Table A; HLA-A*03:02; A1CF; E34K; 0
RTGYSLVQK

SEQ ID NO: 17321 - protein, 9 aa, Homo sapiens
  Table A; HLA-A*11:01; A1CF; E34K; 1
RTGYSLVQK

SEQ ID NO: 17322 - protein, 9 aa, Homo sapiens
  Table A; HLA-A*31:01; A1CF; E34K; 0
RTGYSLVQK

SEQ ID NO: 17323 - protein, 9 aa, Homo sapiens
  Table A; HLA-A*68:01; A1CF; E34K; 0
RTGYSLVQK

SEQ ID NO: 17324 - protein, 8 aa, Homo sapiens
  Table A; HLA-A*31:01; TP53; E285K; 0
RTKEENLR

SEQ ID NO: 17325 - protein, 8 aa, Homo sapiens
  Table A; HLA-B*57:01; TP53; E285K; 0
RTKEENLR

SEQ ID NO: 17326 - protein, 9 aa, Homo sapiens
  Table A; HLA-A*03:01; TP53; E285K; 1
RTKEENLRK

SEQ ID NO: 17327 - protein, 9 aa, Homo sapiens
  Table A; HLA-A*11:01; TP53; E285K; 1
RTKEENLRK

SEQ ID NO: 17328 - protein, 10 aa, Homo sapiens
  Table A; HLA-A*03:01; TP53; E285K; 1
RTKEENLRKK

SEQ ID NO: 17329 - protein, 9 aa, Homo sapiens
  Table A; HLA-A*02:08; FBXW7; G423V; 0
RTLVGHTGV

SEQ ID NO: 17330 - protein, 11 aa, Homo sapiens
  Table A; HLA-B*57:01; FBXW7; G423V; 1
RTLVGHTGVVW

SEQ ID NO: 17331 - protein, 9 aa, Homo sapiens
  Table A; HLA-A*02:08; ACVR1; R206H; 0
RTVAHQITL

SEQ ID NO: 17332 - protein, 9 aa, Homo sapiens
  Table A; HLA-B*58:01; ACVR1; R206H; 0
RTVAHQITL

SEQ ID NO: 17333 - protein, 9 aa, Homo sapiens
  Table A; HLA-C*15:02; ACVR1; R206H; 0
RTVAHQITL

SEQ ID NO: 17334 - protein, 10 aa, Homo sapiens
  Table A; HLA-A*02:08; ACVR1; R206H; 0
RTVAHQITLL

SEQ ID NO: 17335 - protein, 9 aa, Homo sapiens
  Table A; HLA-A*02:04; CTNNB1; K335I; 0
RTYTYEILL

SEQ ID NO: 17336 - protein, 9 aa, Homo sapiens
  Table A; HLA-A*68:02; CTNNB1; K335I; 0
RTYTYEILL

SEQ ID NO: 17337 - protein, 9 aa, Homo sapiens
  Table A; HLA-B*57:01; CTNNB1; K335I; 1
RTYTYEILL

SEQ ID NO: 17338 - protein, 9 aa, Homo sapiens
  Table A; HLA-C*02:02; CTNNB1; K335I; 1
RTYTYEILL

SEQ ID NO: 17339 - protein, 9 aa, Homo sapiens
  Table A; HLA-C*07:01; CTNNB1; K335I; 1
RTYTYEILL

SEQ ID NO: 17340 - protein, 9 aa, Homo sapiens
  Table A; HLA-C*12:03; CTNNB1; K335I; 1
RTYTYEILL

SEQ ID NO: 17341 - protein, 9 aa, Homo sapiens
  Table A; HLA-C*15:02; CTNNB1; K335I; 0
RTYTYEILL

SEQ ID NO: 17342 - protein, 9 aa, Homo sapiens
  Table A; HLA-C*16:01; CTNNB1; K335I; 1
RTYTYEILL

SEQ ID NO: 17343 - protein, 9 aa, Homo sapiens
  Table A; HLA-C*17:01; CTNNB1; K335I; 0
RTYTYEILL

SEQ ID NO: 17344 - protein, 10 aa, Homo sapiens
  Table A; HLA-B*57:01; CTNNB1; K335I; 1
RTYTYEILLW

SEQ ID NO: 17345 - protein, 9 aa, Homo sapiens
  Table A; HLA-A*03:01; RUNX1T1; L265V; 1
RVDDMAIAH

SEQ ID NO: 17346 - protein, 9 aa, Homo sapiens
  Table A; HLA-A*03:02; RUNX1T1; L265V; 0
RVDDMAIAH

SEQ ID NO: 17347 - protein, 9 aa, Homo sapiens
  Table A; HLA-A*11:01; RUNX1T1; L265V; 1
RVDDMAIAH

SEQ ID NO: 17348 - protein, 11 aa, Homo sapiens
  Table A; HLA-A*01:01; RUNX1T1; L265V; 1
RVDDMAIAHHY

SEQ ID NO: 17349 - protein, 11 aa, Homo sapiens
  Table A; HLA-A*29:02; RUNX1T1; L265V; 0
RVDDMAIAHHY

SEQ ID NO: 17350 - protein, 11 aa, Homo sapiens
  Table A; HLA-A*30:02; RUNX1T1; L265V; 0
RVDDMAIAHHY

SEQ ID NO: 17351 - protein, 9 aa, Homo sapiens
  Table A; HLA-B*13:02; NRAS; G13R; 0
RVGKSALTI

SEQ ID NO: 17352 - protein, 9 aa, Homo sapiens
  Table A; HLA-C*15:02; NRAS; G13R; 0
RVGKSALTI

SEQ ID NO: 17353 - protein, 8 aa, Homo sapiens
  Table A; HLA-A*02:03; BIRC6; G271R; 0
RVGPGRSV

SEQ ID NO: 17354 - protein, 8 aa, Homo sapiens
  Table A; HLA-C*15:02; BIRC6; G271R; 0
RVGPGRSV

SEQ ID NO: 17355 - protein, 10 aa, Homo sapiens
  Table A; HLA-A*31:01; BIRC6; G271R; 0
RVGPGRSVDR

SEQ ID NO: 17356 - protein, 9 aa, Homo sapiens
  Table A; HLA-A*03:01; TP53; R158H; 1
RVHAMAIYK

SEQ ID NO: 17357 - protein, 9 aa, Homo sapiens
  Table A; HLA-A*03:02; TP53; R158H; 0
RVHAMAIYK

SEQ ID NO: 17358 - protein, 9 aa, Homo sapiens
  Table A; HLA-A*11:01; TP53; R158H; 0
RVHAMAIYK

SEQ ID NO: 17359 - protein, 9 aa, Homo sapiens
  Table A; HLA-B*57:01; PIK3CA; C378R; 0
RVPRSNPRW

SEQ ID NO: 17360 - protein, 9 aa, Homo sapiens
  Table A; HLA-A*03:01; TP53; Y163C; 1
RVRAMAICK

SEQ ID NO: 17361 - protein, 9 aa, Homo sapiens
  Table A; HLA-A*03:01; TP53; Y163H; 1
RVRAMAIHK

SEQ ID NO: 17362 - protein, 9 aa, Homo sapiens
  Table A; HLA-A*03:01; TP53; A159P; 1
RVRPMAIYK

SEQ ID NO: 17363 - protein, 9 aa, Homo sapiens
  Table A; HLA-A*03:02; TP53; A159P; 0
RVRPMAIYK

SEQ ID NO: 17364 - protein, 9 aa, Homo sapiens
  Table A; HLA-A*11:01; TP53; A159P; 1
RVRPMAIYK

SEQ ID NO: 17365 - protein, 9 aa, Homo sapiens
  Table A; HLA-A*31:01; TP53; A159P; 0
RVRPMAIYK

SEQ ID NO: 17366 - protein, 9 aa, Homo sapiens
  Table A; HLA-A*03:01; TP53; A159V; 1
RVRVMAIYK

SEQ ID NO: 17367 - protein, 8 aa, Homo sapiens
  Table A; HLA-A*31:01; PTEN; G165R; 0
RVTIPSQR

SEQ ID NO: 17368 - protein, 9 aa, Homo sapiens
  Table A; HLA-A*03:01; PTEN; G165R; 1
RVTIPSQRR

SEQ ID NO: 17369 - protein, 9 aa, Homo sapiens
  Table A; HLA-A*11:01; PTEN; G165R; 1
RVTIPSQRR

SEQ ID NO: 17370 - protein, 9 aa, Homo sapiens
  Table A; HLA-A*31:01; PTEN; G165R; 0
RVTIPSQRR

SEQ ID NO: 17371 - protein, 11 aa, Homo sapiens
  Table A; HLA-A*02:05; FBXW7; R479Q; 0
RVVSGSQDATL

SEQ ID NO: 17372 - protein, 11 aa, Homo sapiens
  Table A; HLA-A*02:06; FBXW7; R479Q; 0
RVVSGSQDATL

SEQ ID NO: 17373 - protein, 11 aa, Homo sapiens
  Table A; HLA-A*02:08; FBXW7; R479Q; 0
RVVSGSQDATL

SEQ ID NO: 17374 - protein, 11 aa, Homo sapiens
  Table A; HLA-B*13:01; FBXW7; R479Q; 0
RVVSGSQDATL

SEQ ID NO: 17375 - protein, 11 aa, Homo sapiens
  Table A; HLA-B*58:01; FBXW7; R479Q; 0
RVVSGSQDATL

SEQ ID NO: 17376 - protein, 10 aa, Homo sapiens
  Table A; HLA-A*02:03; EP300; D1399N; 0
RVYISYLNSV

SEQ ID NO: 17377 - protein, 10 aa, Homo sapiens
  Table A; HLA-A*02:04; EP300; D1399N; 0
RVYISYLNSV

SEQ ID NO: 17378 - protein, 10 aa, Homo sapiens
  Table A; HLA-A*02:08; EP300; D1399N; 0
RVYISYLNSV

SEQ ID NO: 17379 - protein, 11 aa, Homo sapiens
  Table A; HLA-A*31:01; TP53; D281Y; 0
RYRRTEEENLR

SEQ ID NO: 17380 - protein, 9 aa, Homo sapiens
  Table A; HLA-B*07:02; PTPN11; T468M; 1
SAGIGRTGM

SEQ ID NO: 17381 - protein, 9 aa, Homo sapiens
  Table A; HLA-A*31:01; MECOM; R750Q; 0
SANLTQHLR

SEQ ID NO: 17382 - protein, 9 aa, Homo sapiens
  Table A; HLA-A*33:01; MECOM; R750Q; 0
SANLTQHLR

SEQ ID NO: 17383 - protein, 9 aa, Homo sapiens
  Table A; HLA-A*33:03; MECOM; R750Q; 0
SANLTQHLR

SEQ ID NO: 17384 - protein, 9 aa, Homo sapiens
  Table A; HLA-A*68:01; MECOM; R750Q; 0
SANLTQHLR

SEQ ID NO: 17385 - protein, 9 aa, Homo sapiens
  Table A; HLA-B*07:02; CNTNAP2; R483Q; 1
SAVQTNSPL

SEQ ID NO: 17386 - protein, 9 aa, Homo sapiens
  Table A; HLA-B*15:02; CNTNAP2; R483Q; 0
SAVQTNSPL

SEQ ID NO: 17387 - protein, 9 aa, Homo sapiens
  Table A; HLA-B*35:01; CNTNAP2; R483Q; 1
SAVQTNSPL

SEQ ID NO: 17388 - protein, 9 aa, Homo sapiens
  Table A; HLA-B*35:02; CNTNAP2; R483Q; 0
SAVQTNSPL

SEQ ID NO: 17389 - protein, 9 aa, Homo sapiens
  Table A; HLA-B*35:03; CNTNAP2; R483Q; 0
SAVQTNSPL

SEQ ID NO: 17390 - protein, 9 aa, Homo sapiens
  Table A; HLA-B*35:12; CNTNAP2; R483Q; 0
SAVQTNSPL

SEQ ID NO: 17391 - protein, 9 aa, Homo sapiens
  Table A; HLA-B*48:01; CNTNAP2; R483Q; 0
SAVQTNSPL

SEQ ID NO: 17392 - protein, 9 aa, Homo sapiens
  Table A; HLA-C*03:03; CNTNAP2; R483Q; 1
SAVQTNSPL

SEQ ID NO: 17393 - protein, 9 aa, Homo sapiens
  Table A; HLA-C*03:04; CNTNAP2; R483Q; 1
SAVQTNSPL

SEQ ID NO: 17394 - protein, 9 aa, Homo sapiens
  Table A; HLA-C*08:01; CNTNAP2; R483Q; 0
SAVQTNSPL

SEQ ID NO: 17395 - protein, 9 aa, Homo sapiens
  Table A; HLA-A*31:01; TP53; R248L; 0
SCMGGMNLR

SEQ ID NO: 17396 - protein, 9 aa, Homo sapiens
  Table A; HLA-A*33:03; TP53; R248L; 0
SCMGGMNLR

SEQ ID NO: 17397 - protein, 9 aa, Homo sapiens
  Table A; HLA-A*68:01; TP53; R248L; 0
SCMGGMNLR

SEQ ID NO: 17398 - protein, 10 aa, Homo sapiens
  Table A; HLA-A*11:01; TP53; R248L; 0
SCMGGMNLRP

SEQ ID NO: 17399 - protein, 9 aa, Homo sapiens
  Table A; HLA-A*11:01; TP53; R248Q; 1
SCMGGMNQR

SEQ ID NO: 17400 - protein, 9 aa, Homo sapiens
  Table A; HLA-A*26:03; TP53; R248Q; 0
SCMGGMNQR

SEQ ID NO: 17401 - protein, 9 aa, Homo sapiens
  Table A; HLA-A*31:01; TP53; R248Q; 1
SCMGGMNQR

SEQ ID NO: 17402 - protein, 9 aa, Homo sapiens
  Table A; HLA-A*33:01; TP53; R248Q; 0
SCMGGMNQR

SEQ ID NO: 17403 - protein, 9 aa, Homo sapiens
  Table A; HLA-A*33:03; TP53; R248Q; 0
SCMGGMNQR

SEQ ID NO: 17404 - protein, 9 aa, Homo sapiens
  Table A; HLA-A*68:01; TP53; R248Q; 1
SCMGGMNQR

SEQ ID NO: 17405 - protein, 10 aa, Homo sapiens
  Table A; HLA-A*11:01; TP53; R248Q; 1
SCMGGMNQRP

SEQ ID NO: 17406 - protein, 9 aa, Homo sapiens
  Table A; HLA-B*15:01; TP53; R249M; 1
SCMGGMNRM

SEQ ID NO: 17407 - protein, 8 aa, Homo sapiens
  Table A; HLA-A*11:01; TP53; G245S; 1
SCMGSMNR

SEQ ID NO: 17408 - protein, 8 aa, Homo sapiens
  Table A; HLA-A*31:01; TP53; G245S; 0
SCMGSMNR

SEQ ID NO: 17409 - protein, 8 aa, Homo sapiens
  Table A; HLA-A*33:03; TP53; G245S; 0
SCMGSMNR

SEQ ID NO: 17410 - protein, 8 aa, Homo sapiens
  Table A; HLA-A*68:01; TP53; G245S; 0
SCMGSMNR

SEQ ID NO: 17411 - protein, 8 aa, Homo sapiens
  Table A; HLA-A*11:01; TP53; G245V; 1
SCMGVMNR

SEQ ID NO: 17412 - protein, 8 aa, Homo sapiens
  Table A; HLA-A*31:01; TP53; G245V; 0
SCMGVMNR

SEQ ID NO: 17413 - protein, 8 aa, Homo sapiens
  Table A; HLA-A*33:03; TP53; G245V; 0
SCMGVMNR

SEQ ID NO: 17414 - protein, 8 aa, Homo sapiens
  Table A; HLA-A*68:01; TP53; G245V; 0
SCMGVMNR

SEQ ID NO: 17415 - protein, 9 aa, Homo sapiens
  Table A; HLA-A*31:01; TP53; G245V; 0
SCMGVMNRR

SEQ ID NO: 17416 - protein, 9 aa, Homo sapiens
  Table A; HLA-A*33:03; TP53; G245V; 0
SCMGVMNRR

SEQ ID NO: 17417 - protein, 8 aa, Homo sapiens
  Table A; HLA-A*11:01; TP53; G244S; 1
SCMSGMNR

SEQ ID NO: 17418 - protein, 8 aa, Homo sapiens
  Table A; HLA-A*31:01; TP53; G244S; 0
SCMSGMNR

SEQ ID NO: 17419 - protein, 8 aa, Homo sapiens
  Table A; HLA-A*33:03; TP53; G244S; 0
SCMSGMNR

SEQ ID NO: 17420 - protein, 9 aa, Homo sapiens
  Table A; HLA-B*44:02; PPP2R1A; R183W; 1
SDDTPMVRW

SEQ ID NO: 17421 - protein, 9 aa, Homo sapiens
  Table A; HLA-B*44:03; PPP2R1A; R183W; 1
SDDTPMVRW

SEQ ID NO: 17422 - protein, 9 aa, Homo sapiens
  Table A; HLA-B*44:05; PPP2R1A; R183W; 0
SDDTPMVRW

SEQ ID NO: 17423 - protein, 8 aa, Homo sapiens
  Table A; HLA-A*03:01; PPP2R1A; P179R; 1
SDDTRMVR

SEQ ID NO: 17424 - protein, 8 aa, Homo sapiens
  Table A; HLA-A*11:01; PPP2R1A; P179R; 1
SDDTRMVR

SEQ ID NO: 17425 - protein, 8 aa, Homo sapiens
  Table A; HLA-A*31:01; PPP2R1A; P179R; 1
SDDTRMVR

SEQ ID NO: 17426 - protein, 8 aa, Homo sapiens
  Table A; HLA-A*33:03; PPP2R1A; P179R; 0
SDDTRMVR

SEQ ID NO: 17427 - protein, 9 aa, Homo sapiens
  Table A; HLA-A*30:01; TP53; H193L; 0
SDGLAPPQL

SEQ ID NO: 17428 - protein, 9 aa, Homo sapiens
  Table A; HLA-B*40:02; TP53; H193L; 0
SDGLAPPQL

SEQ ID NO: 17429 - protein, 9 aa, Homo sapiens
  Table A; HLA-B*41:02; TP53; H193L; 0
SDGLAPPQL

SEQ ID NO: 17430 - protein, 9 aa, Homo sapiens
  Table A; HLA-B*44:05; TP53; H193L; 0
SDGLAPPQL

SEQ ID NO: 17431 - protein, 9 aa, Homo sapiens
  Table A; HLA-B*48:01; TP53; H193L; 0
SDGLAPPQL

SEQ ID NO: 17432 - protein, 9 aa, Homo sapiens
  Table A; HLA-C*08:03; TP53; H193L; 0
SDGLAPPQL

SEQ ID NO: 17433 - protein, 9 aa, Homo sapiens
  Table A; HLA-A*68:01; TP53; H193R; 0
SDGLAPPQR

SEQ ID NO: 17434 - protein, 10 aa, Homo sapiens
  Table A; HLA-B*44:05; TP53; H193R; 0
SDGLAPPQRL

SEQ ID NO: 17435 - protein, 9 aa, Homo sapiens
  Table A; HLA-A*29:02; TP53; H193Y; 0
SDGLAPPQY

SEQ ID NO: 17436 - protein, 9 aa, Homo sapiens
  Table A; HLA-B*18:01; TP53; H193Y; 0
SDGLAPPQY

SEQ ID NO: 17437 - protein, 9 aa, Homo sapiens
  Table A; HLA-B*44:03; TP53; H193Y; 0
SDGLAPPQY

SEQ ID NO: 17438 - protein, 9 aa, Homo sapiens
  Table A; HLA-B*48:01; TP53; H193Y; 0
SDGLAPPQY

SEQ ID NO: 17439 - protein, 9 aa, Homo sapiens
  Table A; HLA-A*25:01; GRIN2A; R1067W; 0
SDISETSNW

SEQ ID NO: 17440 - protein, 9 aa, Homo sapiens
  Table A; HLA-B*15:13; GRIN2A; R1067W; 0
SDISETSNW

SEQ ID NO: 17441 - protein, 9 aa, Homo sapiens
  Table A; HLA-B*27:02; GRIN2A; R1067W; 0
SDISETSNW

SEQ ID NO: 17442 - protein, 9 aa, Homo sapiens
  Table A; HLA-B*44:02; GRIN2A; R1067W; 1
SDISETSNW

SEQ ID NO: 17443 - protein, 9 aa, Homo sapiens
  Table A; HLA-B*44:03; GRIN2A; R1067W; 0
SDISETSNW

SEQ ID NO: 17444 - protein, 9 aa, Homo sapiens
  Table A; HLA-B*44:05; GRIN2A; R1067W; 0
SDISETSNW

SEQ ID NO: 17445 - protein, 9 aa, Homo sapiens
  Table A; HLA-B*58:01; GRIN2A; R1067W; 0
SDISETSNW

SEQ ID NO: 17446 - protein, 9 aa, Homo sapiens
  Table A; HLA-C*16:04; GRIN2A; R1067W; 0
SDISETSNW

SEQ ID NO: 17447 - protein, 11 aa, Homo sapiens
  Table A; HLA-B*40:02; TP53; H193L; 0
SDSDGLAPPQL

SEQ ID NO: 17448 - protein, 11 aa, Homo sapiens
  Table A; HLA-A*68:01; TP53; H193R; 0
SDSDGLAPPQR

SEQ ID NO: 17449 - protein, 8 aa, Homo sapiens
  Table A; HLA-B*40:02; CTNNB1; G34E; 0
SEIHSGAT

SEQ ID NO: 17450 - protein, 9 aa, Homo sapiens
  Table A; HLA-A*02:05; CTNNB1; G34E; 0
SEIHSGATT

SEQ ID NO: 17451 - protein, 9 aa, Homo sapiens
  Table A; HLA-A*02:08; CTNNB1; G34E; 0
SEIHSGATT

SEQ ID NO: 17452 - protein, 9 aa, Homo sapiens
  Table A; HLA-A*30:01; CTNNB1; G34E; 0
SEIHSGATT

SEQ ID NO: 17453 - protein, 9 aa, Homo sapiens
  Table A; HLA-B*40:01; CTNNB1; G34E; 0
SEIHSGATT

SEQ ID NO: 17454 - protein, 9 aa, Homo sapiens
  Table A; HLA-B*40:02; CTNNB1; G34E; 0
SEIHSGATT

SEQ ID NO: 17455 - protein, 9 aa, Homo sapiens
  Table A; HLA-B*40:06; CTNNB1; G34E; 0
SEIHSGATT

SEQ ID NO: 17456 - protein, 9 aa, Homo sapiens
  Table A; HLA-B*41:02; CTNNB1; G34E; 0
SEIHSGATT

SEQ ID NO: 17457 - protein, 9 aa, Homo sapiens
  Table A; HLA-B*44:02; CTNNB1; G34E; 1
SEIHSGATT

SEQ ID NO: 17458 - protein, 9 aa, Homo sapiens
  Table A; HLA-B*44:03; CTNNB1; G34E; 0
SEIHSGATT

SEQ ID NO: 17459 - protein, 9 aa, Homo sapiens
  Table A; HLA-B*44:05; CTNNB1; G34E; 0
SEIHSGATT

SEQ ID NO: 17460 - protein, 9 aa, Homo sapiens
  Table A; HLA-B*49:01; CTNNB1; G34E; 0
SEIHSGATT

SEQ ID NO: 17461 - protein, 9 aa, Homo sapiens
  Table A; HLA-B*50:01; CTNNB1; G34E; 0
SEIHSGATT

SEQ ID NO: 17462 - protein, 10 aa, Homo sapiens
  Table A; HLA-A*30:01; CTNNB1; G34E; 0
SEIHSGATTT

SEQ ID NO: 17463 - protein, 10 aa, Homo sapiens
  Table A; HLA-A*31:01; CTNNB1; G34E; 0
SEIHSGATTT

SEQ ID NO: 17464 - protein, 10 aa, Homo sapiens
  Table A; HLA-B*40:01; CTNNB1; G34E; 0
SEIHSGATTT

SEQ ID NO: 17465 - protein, 10 aa, Homo sapiens
  Table A; HLA-B*40:02; CTNNB1; G34E; 0
SEIHSGATTT

SEQ ID NO: 17466 - protein, 10 aa, Homo sapiens
  Table A; HLA-B*40:06; CTNNB1; G34E; 0
SEIHSGATTT

SEQ ID NO: 17467 - protein, 10 aa, Homo sapiens
  Table A; HLA-B*41:02; CTNNB1; G34E; 0
SEIHSGATTT

SEQ ID NO: 17468 - protein, 10 aa, Homo sapiens
  Table A; HLA-B*44:03; CTNNB1; G34E; 0
SEIHSGATTT

SEQ ID NO: 17469 - protein, 10 aa, Homo sapiens
  Table A; HLA-B*44:05; CTNNB1; G34E; 0
SEIHSGATTT

SEQ ID NO: 17470 - protein, 10 aa, Homo sapiens
  Table A; HLA-B*49:01; CTNNB1; G34E; 0
SEIHSGATTT

SEQ ID NO: 17471 - protein, 10 aa, Homo sapiens
  Table A; HLA-B*50:01; CTNNB1; G34E; 0
SEIHSGATTT

SEQ ID NO: 17472 - protein, 10 aa, Homo sapiens
  Table A; HLA-C*08:03; CTNNB1; G34E; 0
SEIHSGATTT

SEQ ID NO: 17473 - protein, 11 aa, Homo sapiens
  Table A; HLA-A*02:05; CTNNB1; G34E; 0
SEIHSGATTTA

SEQ ID NO: 17474 - protein, 11 aa, Homo sapiens
  Table A; HLA-A*02:08; CTNNB1; G34E; 0
SEIHSGATTTA

SEQ ID NO: 17475 - protein, 11 aa, Homo sapiens
  Table A; HLA-A*11:01; CTNNB1; G34E; 0
SEIHSGATTTA

SEQ ID NO: 17476 - protein, 11 aa, Homo sapiens
  Table A; HLA-A*30:01; CTNNB1; G34E; 0
SEIHSGATTTA

SEQ ID NO: 17477 - protein, 11 aa, Homo sapiens
  Table A; HLA-B*07:02; CTNNB1; G34E; 1
SEIHSGATTTA

SEQ ID NO: 17478 - protein, 11 aa, Homo sapiens
  Table A; HLA-B*15:01; CTNNB1; G34E; 1
SEIHSGATTTA

SEQ ID NO: 17479 - protein, 11 aa, Homo sapiens
  Table A; HLA-B*40:01; CTNNB1; G34E; 0
SEIHSGATTTA

SEQ ID NO: 17480 - protein, 11 aa, Homo sapiens
  Table A; HLA-B*40:02; CTNNB1; G34E; 0
SEIHSGATTTA

SEQ ID NO: 17481 - protein, 11 aa, Homo sapiens
  Table A; HLA-B*40:06; CTNNB1; G34E; 0
SEIHSGATTTA

SEQ ID NO: 17482 - protein, 11 aa, Homo sapiens
  Table A; HLA-B*41:02; CTNNB1; G34E; 0
SEIHSGATTTA

SEQ ID NO: 17483 - protein, 11 aa, Homo sapiens
  Table A; HLA-B*44:03; CTNNB1; G34E; 0
SEIHSGATTTA

SEQ ID NO: 17484 - protein, 11 aa, Homo sapiens
  Table A; HLA-B*44:05; CTNNB1; G34E; 0
SEIHSGATTTA

SEQ ID NO: 17485 - protein, 11 aa, Homo sapiens
  Table A; HLA-B*49:01; CTNNB1; G34E; 0
SEIHSGATTTA

SEQ ID NO: 17486 - protein, 11 aa, Homo sapiens
  Table A; HLA-B*50:01; CTNNB1; G34E; 0
SEIHSGATTTA

SEQ ID NO: 17487 - protein, 11 aa, Homo sapiens
  Table A; HLA-B*55:02; CTNNB1; G34E; 0
SEIHSGATTTA

SEQ ID NO: 17488 - protein, 10 aa, Homo sapiens
  Table A; HLA-A*30:01; FAM135B; S11L; 0
SEIQGTVEFL

SEQ ID NO: 17489 - protein, 10 aa, Homo sapiens
  Table A; HLA-B*40:01; FAM135B; S11L; 0
SEIQGTVEFL

SEQ ID NO: 17490 - protein, 10 aa, Homo sapiens
  Table A; HLA-B*40:02; FAM135B; S11L; 0
SEIQGTVEFL

SEQ ID NO: 17491 - protein, 10 aa, Homo sapiens
  Table A; HLA-B*41:02; FAM135B; S11L; 0
SEIQGTVEFL

SEQ ID NO: 17492 - protein, 10 aa, Homo sapiens
  Table A; HLA-B*44:03; FAM135B; S11L; 0
SEIQGTVEFL

SEQ ID NO: 17493 - protein, 10 aa, Homo sapiens
  Table A; HLA-B*44:05; FAM135B; S11L; 0
SEIQGTVEFL

SEQ ID NO: 17494 - protein, 10 aa, Homo sapiens
  Table A; HLA-B*49:01; FAM135B; S11L; 0
SEIQGTVEFL

SEQ ID NO: 17495 - protein, 10 aa, Homo sapiens
  Table A; HLA-B*40:02; PIK3CA; E545A; 0
SEITAQEKDF

SEQ ID NO: 17496 - protein, 10 aa, Homo sapiens
  Table A; HLA-B*41:02; PIK3CA; E545A; 0
SEITAQEKDF

SEQ ID NO: 17497 - protein, 10 aa, Homo sapiens
  Table A; HLA-B*44:02; PIK3CA; E545A; 0
SEITAQEKDF

SEQ ID NO: 17498 - protein, 10 aa, Homo sapiens
  Table A; HLA-B*44:03; PIK3CA; E545A; 0
SEITAQEKDF

SEQ ID NO: 17499 - protein, 10 aa, Homo sapiens
  Table A; HLA-B*44:05; PIK3CA; E545A; 0
SEITAQEKDF

SEQ ID NO: 17500 - protein, 10 aa, Homo sapiens
  Table A; HLA-C*16:04; PIK3CA; E545A; 0
SEITAQEKDF

SEQ ID NO: 17501 - protein, 11 aa, Homo sapiens
  Table A; HLA-B*40:01; PIK3CA; E545A; 0
SEITAQEKDFL

SEQ ID NO: 17502 - protein, 11 aa, Homo sapiens
  Table A; HLA-B*40:02; PIK3CA; E545A; 0
SEITAQEKDFL

SEQ ID NO: 17503 - protein, 11 aa, Homo sapiens
  Table A; HLA-B*44:05; PIK3CA; E545A; 0
SEITAQEKDFL

SEQ ID NO: 17504 - protein, 10 aa, Homo sapiens
  Table A; HLA-B*40:02; PIK3CA; E545D; 0
SEITDQEKDF

SEQ ID NO: 17505 - protein, 10 aa, Homo sapiens
  Table A; HLA-B*44:02; PIK3CA; E545D; 1
SEITDQEKDF

SEQ ID NO: 17506 - protein, 10 aa, Homo sapiens
  Table A; HLA-B*44:03; PIK3CA; E545D; 0
SEITDQEKDF

SEQ ID NO: 17507 - protein, 10 aa, Homo sapiens
  Table A; HLA-B*44:05; PIK3CA; E545D; 0
SEITDQEKDF

SEQ ID NO: 17508 - protein, 10 aa, Homo sapiens
  Table A; HLA-C*16:04; PIK3CA; E545D; 0
SEITDQEKDF

SEQ ID NO: 17509 - protein, 11 aa, Homo sapiens
  Table A; HLA-B*40:01; PIK3CA; E545D; 0
SEITDQEKDFL

SEQ ID NO: 17510 - protein, 11 aa, Homo sapiens
  Table A; HLA-B*40:02; PIK3CA; E545D; 0
SEITDQEKDFL

SEQ ID NO: 17511 - protein, 11 aa, Homo sapiens
  Table A; HLA-B*44:05; PIK3CA; E545D; 0
SEITDQEKDFL

SEQ ID NO: 17512 - protein, 10 aa, Homo sapiens
  Table A; HLA-B*44:02; PIK3CA; Q546K; 1
SEITEKEKDF

SEQ ID NO: 17513 - protein, 10 aa, Homo sapiens
  Table A; HLA-B*44:03; PIK3CA; Q546K; 1
SEITEKEKDF

SEQ ID NO: 17514 - protein, 10 aa, Homo sapiens
  Table A; HLA-B*44:05; PIK3CA; Q546K; 0
SEITEKEKDF

SEQ ID NO: 17515 - protein, 11 aa, Homo sapiens
  Table A; HLA-B*40:01; PIK3CA; Q546K; 1
SEITEKEKDFL

SEQ ID NO: 17516 - protein, 11 aa, Homo sapiens
  Table A; HLA-B*40:02; PIK3CA; Q546K; 0
SEITEKEKDFL

SEQ ID NO: 17517 - protein, 11 aa, Homo sapiens
  Table A; HLA-B*44:05; PIK3CA; Q546K; 0
SEITEKEKDFL

SEQ ID NO: 17518 - protein, 10 aa, Homo sapiens
  Table A; HLA-B*44:02; PIK3CA; Q546P; 1
SEITEPEKDF

SEQ ID NO: 17519 - protein, 10 aa, Homo sapiens
  Table A; HLA-B*44:03; PIK3CA; Q546P; 1
SEITEPEKDF

SEQ ID NO: 17520 - protein, 10 aa, Homo sapiens
  Table A; HLA-B*44:05; PIK3CA; Q546P; 0
SEITEPEKDF

SEQ ID NO: 17521 - protein, 11 aa, Homo sapiens
  Table A; HLA-B*40:01; PIK3CA; Q546P; 1
SEITEPEKDFL

SEQ ID NO: 17522 - protein, 11 aa, Homo sapiens
  Table A; HLA-B*40:02; PIK3CA; Q546P; 0
SEITEPEKDFL

SEQ ID NO: 17523 - protein, 11 aa, Homo sapiens
  Table A; HLA-B*44:05; PIK3CA; Q546P; 0
SEITEPEKDFL

SEQ ID NO: 17524 - protein, 10 aa, Homo sapiens
  Table A; HLA-B*44:02; PIK3CA; Q546R; 1
SEITEREKDF

SEQ ID NO: 17525 - protein, 10 aa, Homo sapiens
  Table A; HLA-B*44:03; PIK3CA; Q546R; 1
SEITEREKDF

SEQ ID NO: 17526 - protein, 10 aa, Homo sapiens
  Table A; HLA-B*44:05; PIK3CA; Q546R; 0
SEITEREKDF

SEQ ID NO: 17527 - protein, 10 aa, Homo sapiens
  Table A; HLA-B*40:02; PIK3CA; E545G; 0
SEITGQEKDF

SEQ ID NO: 17528 - protein, 10 aa, Homo sapiens
  Table A; HLA-B*41:02; PIK3CA; E545G; 0
SEITGQEKDF

SEQ ID NO: 17529 - protein, 10 aa, Homo sapiens
  Table A; HLA-B*44:02; PIK3CA; E545G; 1
SEITGQEKDF

SEQ ID NO: 17530 - protein, 10 aa, Homo sapiens
  Table A; HLA-B*44:03; PIK3CA; E545G; 0
SEITGQEKDF

SEQ ID NO: 17531 - protein, 10 aa, Homo sapiens
  Table A; HLA-B*44:05; PIK3CA; E545G; 0
SEITGQEKDF

SEQ ID NO: 17532 - protein, 10 aa, Homo sapiens
  Table A; HLA-C*16:04; PIK3CA; E545G; 0
SEITGQEKDF

SEQ ID NO: 17533 - protein, 11 aa, Homo sapiens
  Table A; HLA-B*40:01; PIK3CA; E545G; 0
SEITGQEKDFL

SEQ ID NO: 17534 - protein, 11 aa, Homo sapiens
  Table A; HLA-B*40:02; PIK3CA; E545G; 0
SEITGQEKDFL

SEQ ID NO: 17535 - protein, 11 aa, Homo sapiens
  Table A; HLA-B*44:05; PIK3CA; E545G; 0
SEITGQEKDFL

SEQ ID NO: 17536 - protein, 10 aa, Homo sapiens
  Table A; HLA-B*44:02; PIK3CA; E545K; 1
SEITKQEKDF

SEQ ID NO: 17537 - protein, 10 aa, Homo sapiens
  Table A; HLA-B*44:03; PIK3CA; E545K; 1
SEITKQEKDF

SEQ ID NO: 17538 - protein, 10 aa, Homo sapiens
  Table A; HLA-B*44:05; PIK3CA; E545K; 0
SEITKQEKDF

SEQ ID NO: 17539 - protein, 9 aa, Homo sapiens
  Table A; HLA-B*50:01; GRIN2A; R1067W; 0
SETSNWATC

SEQ ID NO: 17540 - protein, 9 aa, Homo sapiens
  Table A; HLA-A*33:03; TP53; S241F; 0
SFCMGGMNR

SEQ ID NO: 17541 - protein, 8 aa, Homo sapiens
  Table A; HLA-C*04:01; PIK3CA; Y1021C; 1
SFDDIACI

SEQ ID NO: 17542 - protein, 9 aa, Homo sapiens
  Table A; HLA-A*33:03; PIK3CA; Y1021C; 0
SFDDIACIR

SEQ ID NO: 17543 - protein, 8 aa, Homo sapiens
  Table A; HLA-A*11:01; TP53; C242F; 1
SFMGGMNR

SEQ ID NO: 17544 - protein, 8 aa, Homo sapiens
  Table A; HLA-A*31:01; TP53; C242F; 0
SFMGGMNR

SEQ ID NO: 17545 - protein, 8 aa, Homo sapiens
  Table A; HLA-A*33:01; TP53; C242F; 0
SFMGGMNR

SEQ ID NO: 17546 - protein, 8 aa, Homo sapiens
  Table A; HLA-A*33:03; TP53; C242F; 0
SFMGGMNR

SEQ ID NO: 17547 - protein, 9 aa, Homo sapiens
  Table A; HLA-A*31:01; TP53; C242F; 0
SFMGGMNRR

SEQ ID NO: 17548 - protein, 9 aa, Homo sapiens
  Table A; HLA-A*33:03; TP53; C242F; 0
SFMGGMNRR

SEQ ID NO: 17549 - protein, 10 aa, Homo sapiens
  Table A; HLA-A*30:01; CTNNB1; T41A; 1
SGATATAPSL

SEQ ID NO: 17550 - protein, 10 aa, Homo sapiens
  Table A; HLA-B*40:02; CTNNB1; T41A; 1
SGATATAPSL

SEQ ID NO: 17551 - protein, 10 aa, Homo sapiens
  Table A; HLA-B*44:05; CTNNB1; T41A; 0
SGATATAPSL

SEQ ID NO: 17552 - protein, 10 aa, Homo sapiens
  Table A; HLA-B*48:01; CTNNB1; T41A; 0
SGATATAPSL

SEQ ID NO: 17553 - protein, 11 aa, Homo sapiens
  Table A; HLA-B*48:01; CTNNB1; T41A; 0
SGATATAPSLS

SEQ ID NO: 17554 - protein, 11 aa, Homo sapiens
  Table A; HLA-C*08:03; CTNNB1; T41A; 0
SGATATAPSLS

SEQ ID NO: 17555 - protein, 10 aa, Homo sapiens
  Table A; HLA-A*02:04; CTNNB1; T41I; 0
SGATITAPSL

SEQ ID NO: 17556 - protein, 10 aa, Homo sapiens
  Table A; HLA-A*11:01; CTNNB1; T41I; 1
SGATITAPSL

SEQ ID NO: 17557 - protein, 10 aa, Homo sapiens
  Table A; HLA-A*68:01; CTNNB1; T41I; 0
SGATITAPSL

SEQ ID NO: 17558 - protein, 10 aa, Homo sapiens
  Table A; HLA-B*35:03; CTNNB1; T41I; 0
SGATITAPSL

SEQ ID NO: 17559 - protein, 10 aa, Homo sapiens
  Table A; HLA-B*40:02; CTNNB1; T41I; 0
SGATITAPSL

SEQ ID NO: 17560 - protein, 10 aa, Homo sapiens
  Table A; HLA-B*44:05; CTNNB1; T41I; 0
SGATITAPSL

SEQ ID NO: 17561 - protein, 11 aa, Homo sapiens
  Table A; HLA-B*48:01; CTNNB1; T41I; 0
SGATITAPSLS

SEQ ID NO: 17562 - protein, 11 aa, Homo sapiens
  Table A; HLA-C*08:03; CTNNB1; T41I; 0
SGATITAPSLS

SEQ ID NO: 17563 - protein, 9 aa, Homo sapiens
  Table A; HLA-B*07:02; CTNNB1; S45F; 1
SGATTTAPF

SEQ ID NO: 17564 - protein, 9 aa, Homo sapiens
  Table A; HLA-B*15:01; CTNNB1; S45F; 1
SGATTTAPF

SEQ ID NO: 17565 - protein, 9 aa, Homo sapiens
  Table A; HLA-B*15:02; CTNNB1; S45F; 0
SGATTTAPF

SEQ ID NO: 17566 - protein, 9 aa, Homo sapiens
  Table A; HLA-B*35:01; CTNNB1; S45F; 1
SGATTTAPF

SEQ ID NO: 17567 - protein, 9 aa, Homo sapiens
  Table A; HLA-B*35:03; CTNNB1; S45F; 0
SGATTTAPF

SEQ ID NO: 17568 - protein, 9 aa, Homo sapiens
  Table A; HLA-B*35:08; CTNNB1; S45F; 0
SGATTTAPF

SEQ ID NO: 17569 - protein, 9 aa, Homo sapiens
  Table A; HLA-B*35:12; CTNNB1; S45F; 0
SGATTTAPF

SEQ ID NO: 17570 - protein, 9 aa, Homo sapiens
  Table A; HLA-B*39:01; CTNNB1; S45F; 0
SGATTTAPF

SEQ ID NO: 17571 - protein, 9 aa, Homo sapiens
  Table A; HLA-B*44:05; CTNNB1; S45F; 0
SGATTTAPF

SEQ ID NO: 17572 - protein, 9 aa, Homo sapiens
  Table A; HLA-B*46:01; CTNNB1; S45F; 0
SGATTTAPF

SEQ ID NO: 17573 - protein, 9 aa, Homo sapiens
  Table A; HLA-B*58:01; CTNNB1; S45F; 0
SGATTTAPF

SEQ ID NO: 17574 - protein, 9 aa, Homo sapiens
  Table A; HLA-C*08:01; CTNNB1; S45F; 0
SGATTTAPF

SEQ ID NO: 17575 - protein, 10 aa, Homo sapiens
  Table A; HLA-A*03:01; CTNNB1; S45F; 1
SGATTTAPFL

SEQ ID NO: 17576 - protein, 10 aa, Homo sapiens
  Table A; HLA-A*11:01; CTNNB1; S45F; 1
SGATTTAPFL

SEQ ID NO: 17577 - protein, 10 aa, Homo sapiens
  Table A; HLA-A*68:01; CTNNB1; S45F; 0
SGATTTAPFL

SEQ ID NO: 17578 - protein, 10 aa, Homo sapiens
  Table A; HLA-A*68:02; CTNNB1; S45F; 0
SGATTTAPFL

SEQ ID NO: 17579 - protein, 10 aa, Homo sapiens
  Table A; HLA-B*40:02; CTNNB1; S45F; 0
SGATTTAPFL

SEQ ID NO: 17580 - protein, 10 aa, Homo sapiens
  Table A; HLA-B*44:05; CTNNB1; S45F; 0
SGATTTAPFL

SEQ ID NO: 17581 - protein, 11 aa, Homo sapiens
  Table A; HLA-A*11:01; CTNNB1; S45F; 1
SGATTTAPFLS

SEQ ID NO: 17582 - protein, 10 aa, Homo sapiens
  Table A; HLA-A*11:01; CTNNB1; S45P; 1
SGATTTAPPL

SEQ ID NO: 17583 - protein, 10 aa, Homo sapiens
  Table A; HLA-A*68:01; CTNNB1; S45P; 1
SGATTTAPPL

SEQ ID NO: 17584 - protein, 10 aa, Homo sapiens
  Table A; HLA-B*35:03; CTNNB1; S45P; 1
SGATTTAPPL

SEQ ID NO: 17585 - protein, 10 aa, Homo sapiens
  Table A; HLA-B*40:02; CTNNB1; S45P; 0
SGATTTAPPL

SEQ ID NO: 17586 - protein, 11 aa, Homo sapiens
  Table A; HLA-A*11:01; CTNNB1; S45P; 1
SGATTTAPPLS

SEQ ID NO: 17587 - protein, 8 aa, Homo sapiens
  Table A; HLA-B*13:02; RAC1; P29S; 1
SGEYIPTV

SEQ ID NO: 17588 - protein, 8 aa, Homo sapiens
  Table A; HLA-B*39:06; RAC1; P29S; 0
SGEYIPTV

SEQ ID NO: 17589 - protein, 8 aa, Homo sapiens
  Table A; HLA-B*40:02; RAC1; P29S; 0
SGEYIPTV

SEQ ID NO: 17590 - protein, 8 aa, Homo sapiens
  Table A; HLA-B*51:01; RAC1; P29S; 1
SGEYIPTV

SEQ ID NO: 17591 - protein, 9 aa, Homo sapiens
  Table A; HLA-A*23:01; RAC1; P29S; 0
SGEYIPTVF

SEQ ID NO: 17592 - protein, 9 aa, Homo sapiens
  Table A; HLA-B*15:01; RAC1; P29S; 1
SGEYIPTVF

SEQ ID NO: 17593 - protein, 9 aa, Homo sapiens
  Table A; HLA-B*18:01; RAC1; P29S; 1
SGEYIPTVF

SEQ ID NO: 17594 - protein, 9 aa, Homo sapiens
  Table A; HLA-B*35:01; RAC1; P29S; 1
SGEYIPTVF

SEQ ID NO: 17595 - protein, 9 aa, Homo sapiens
  Table A; HLA-B*35:02; RAC1; P29S; 0
SGEYIPTVF

SEQ ID NO: 17596 - protein, 9 aa, Homo sapiens
  Table A; HLA-B*35:03; RAC1; P29S; 0
SGEYIPTVF

SEQ ID NO: 17597 - protein, 9 aa, Homo sapiens
  Table A; HLA-B*35:08; RAC1; P29S; 0
SGEYIPTVF

SEQ ID NO: 17598 - protein, 9 aa, Homo sapiens
  Table A; HLA-B*35:12; RAC1; P29S; 0
SGEYIPTVF

SEQ ID NO: 17599 - protein, 9 aa, Homo sapiens
  Table A; HLA-B*38:01; RAC1; P29S; 1
SGEYIPTVF

SEQ ID NO: 17600 - protein, 9 aa, Homo sapiens
  Table A; HLA-B*39:01; RAC1; P29S; 0
SGEYIPTVF

SEQ ID NO: 17601 - protein, 9 aa, Homo sapiens
  Table A; HLA-B*44:05; RAC1; P29S; 0
SGEYIPTVF

SEQ ID NO: 17602 - protein, 9 aa, Homo sapiens
  Table A; HLA-C*04:01; RAC1; P29S; 1
SGEYIPTVF

SEQ ID NO: 17603 - protein, 9 aa, Homo sapiens
  Table A; HLA-C*05:01; RAC1; P29S; 1
SGEYIPTVF

SEQ ID NO: 17604 - protein, 9 aa, Homo sapiens
  Table A; HLA-C*08:01; RAC1; P29S; 0
SGEYIPTVF

SEQ ID NO: 17605 - protein, 9 aa, Homo sapiens
  Table A; HLA-C*08:02; RAC1; P29S; 1
SGEYIPTVF

SEQ ID NO: 17606 - protein, 9 aa, Homo sapiens
  Table A; HLA-A*11:01; ATM; R337C; 0
SGFCNIAVK

SEQ ID NO: 17607 - protein, 10 aa, Homo sapiens
  Table A; HLA-B*48:01; CTNNB1; S37A; 0
SGIHAGATTT

SEQ ID NO: 17608 - protein, 10 aa, Homo sapiens
  Table A; HLA-C*08:03; CTNNB1; S37A; 0
SGIHAGATTT

SEQ ID NO: 17609 - protein, 11 aa, Homo sapiens
  Table A; HLA-A*02:05; CTNNB1; S37A; 0
SGIHAGATTTA

SEQ ID NO: 17610 - protein, 11 aa, Homo sapiens
  Table A; HLA-A*11:01; CTNNB1; S37A; 1
SGIHAGATTTA

SEQ ID NO: 17611 - protein, 11 aa, Homo sapiens
  Table A; HLA-B*15:01; CTNNB1; S37A; 1
SGIHAGATTTA

SEQ ID NO: 17612 - protein, 11 aa, Homo sapiens
  Table A; HLA-B*39:06; CTNNB1; S37A; 0
SGIHAGATTTA

SEQ ID NO: 17613 - protein, 11 aa, Homo sapiens
  Table A; HLA-B*46:01; CTNNB1; S37A; 0
SGIHAGATTTA

SEQ ID NO: 17614 - protein, 11 aa, Homo sapiens
  Table A; HLA-B*48:01; CTNNB1; S37A; 0
SGIHAGATTTA

SEQ ID NO: 17615 - protein, 11 aa, Homo sapiens
  Table A; HLA-B*50:01; CTNNB1; S37A; 0
SGIHAGATTTA

SEQ ID NO: 17616 - protein, 11 aa, Homo sapiens
  Table A; HLA-B*54:01; CTNNB1; S37A; 0
SGIHAGATTTA

SEQ ID NO: 17617 - protein, 10 aa, Homo sapiens
  Table A; HLA-C*08:03; CTNNB1; S37P; 0
SGIHPGATTT

SEQ ID NO: 17618 - protein, 11 aa, Homo sapiens
  Table A; HLA-B*39:06; CTNNB1; S37P; 0
SGIHPGATTTA

SEQ ID NO: 17619 - protein, 11 aa, Homo sapiens
  Table A; HLA-B*54:01; CTNNB1; S37P; 0
SGIHPGATTTA

SEQ ID NO: 17620 - protein, 9 aa, Homo sapiens
  Table A; HLA-A*02:05; CTNNB1; T41A; 0
SGIHSGATA

SEQ ID NO: 17621 - protein, 9 aa, Homo sapiens
  Table A; HLA-A*02:06; CTNNB1; T41A; 0
SGIHSGATA

SEQ ID NO: 17622 - protein, 9 aa, Homo sapiens
  Table A; HLA-B*07:02; CTNNB1; T41A; 1
SGIHSGATA

SEQ ID NO: 17623 - protein, 9 aa, Homo sapiens
  Table A; HLA-B*15:10; CTNNB1; T41A; 0
SGIHSGATA

SEQ ID NO: 17624 - protein, 9 aa, Homo sapiens
  Table A; HLA-B*39:06; CTNNB1; T41A; 0
SGIHSGATA

SEQ ID NO: 17625 - protein, 9 aa, Homo sapiens
  Table A; HLA-B*50:01; CTNNB1; T41A; 0
SGIHSGATA

SEQ ID NO: 17626 - protein, 9 aa, Homo sapiens
  Table A; HLA-B*54:01; CTNNB1; T41A; 0
SGIHSGATA

SEQ ID NO: 17627 - protein, 9 aa, Homo sapiens
  Table A; HLA-B*55:02; CTNNB1; T41A; 0
SGIHSGATA

SEQ ID NO: 17628 - protein, 9 aa, Homo sapiens
  Table A; HLA-B*56:01; CTNNB1; T41A; 0
SGIHSGATA

SEQ ID NO: 17629 - protein, 9 aa, Homo sapiens
  Table A; HLA-C*08:01; CTNNB1; T41A; 0
SGIHSGATA

SEQ ID NO: 17630 - protein, 10 aa, Homo sapiens
  Table A; HLA-B*48:01; CTNNB1; T41A; 0
SGIHSGATAT

SEQ ID NO: 17631 - protein, 10 aa, Homo sapiens
  Table A; HLA-C*08:03; CTNNB1; T41A; 0
SGIHSGATAT

SEQ ID NO: 17632 - protein, 11 aa, Homo sapiens
  Table A; HLA-A*02:05; CTNNB1; T41A; 0
SGIHSGATATA

SEQ ID NO: 17633 - protein, 11 aa, Homo sapiens
  Table A; HLA-A*68:01; CTNNB1; T41A; 1
SGIHSGATATA

SEQ ID NO: 17634 - protein, 11 aa, Homo sapiens
  Table A; HLA-B*48:01; CTNNB1; T41A; 0
SGIHSGATATA

SEQ ID NO: 17635 - protein, 11 aa, Homo sapiens
  Table A; HLA-B*50:01; CTNNB1; T41A; 0
SGIHSGATATA

SEQ ID NO: 17636 - protein, 9 aa, Homo sapiens
  Table A; HLA-A*02:05; CTNNB1; T41I; 0
SGIHSGATI

SEQ ID NO: 17637 - protein, 9 aa, Homo sapiens
  Table A; HLA-A*02:06; CTNNB1; T41I; 0
SGIHSGATI

SEQ ID NO: 17638 - protein, 9 aa, Homo sapiens
  Table A; HLA-A*30:01; CTNNB1; T41I; 0
SGIHSGATI

SEQ ID NO: 17639 - protein, 9 aa, Homo sapiens
  Table A; HLA-B*07:02; CTNNB1; T41I; 1
SGIHSGATI

SEQ ID NO: 17640 - protein, 9 aa, Homo sapiens
  Table A; HLA-B*13:02; CTNNB1; T41I; 0
SGIHSGATI

SEQ ID NO: 17641 - protein, 9 aa, Homo sapiens
  Table A; HLA-B*15:01; CTNNB1; T41I; 1
SGIHSGATI

SEQ ID NO: 17642 - protein, 9 aa, Homo sapiens
  Table A; HLA-B*15:02; CTNNB1; T41I; 0
SGIHSGATI

SEQ ID NO: 17643 - protein, 9 aa, Homo sapiens
  Table A; HLA-B*15:10; CTNNB1; T41I; 0
SGIHSGATI

SEQ ID NO: 17644 - protein, 9 aa, Homo sapiens
  Table A; HLA-B*15:13; CTNNB1; T41I; 0
SGIHSGATI

SEQ ID NO: 17645 - protein, 9 aa, Homo sapiens
  Table A; HLA-B*35:03; CTNNB1; T41I; 0
SGIHSGATI

SEQ ID NO: 17646 - protein, 9 aa, Homo sapiens
  Table A; HLA-B*38:01; CTNNB1; T41I; 0
SGIHSGATI

SEQ ID NO: 17647 - protein, 9 aa, Homo sapiens
  Table A; HLA-B*39:01; CTNNB1; T41I; 0
SGIHSGATI

SEQ ID NO: 17648 - protein, 9 aa, Homo sapiens
  Table A; HLA-B*40:01; CTNNB1; T41I; 1
SGIHSGATI

SEQ ID NO: 17649 - protein, 9 aa, Homo sapiens
  Table A; HLA-B*40:02; CTNNB1; T41I; 0
SGIHSGATI

SEQ ID NO: 17650 - protein, 9 aa, Homo sapiens
  Table A; HLA-B*44:05; CTNNB1; T41I; 0
SGIHSGATI

SEQ ID NO: 17651 - protein, 9 aa, Homo sapiens
  Table A; HLA-B*48:01; CTNNB1; T41I; 0
SGIHSGATI

SEQ ID NO: 17652 - protein, 9 aa, Homo sapiens
  Table A; HLA-B*51:01; CTNNB1; T41I; 1
SGIHSGATI

SEQ ID NO: 17653 - protein, 9 aa, Homo sapiens
  Table A; HLA-B*58:01; CTNNB1; T41I; 0
SGIHSGATI

SEQ ID NO: 17654 - protein, 9 aa, Homo sapiens
  Table A; HLA-C*03:03; CTNNB1; T41I; 1
SGIHSGATI

SEQ ID NO: 17655 - protein, 9 aa, Homo sapiens
  Table A; HLA-C*03:04; CTNNB1; T41I; 1
SGIHSGATI

SEQ ID NO: 17656 - protein, 9 aa, Homo sapiens
  Table A; HLA-C*08:01; CTNNB1; T41I; 0
SGIHSGATI

SEQ ID NO: 17657 - protein, 11 aa, Homo sapiens
  Table A; HLA-A*02:05; CTNNB1; T41I; 0
SGIHSGATITA

SEQ ID NO: 17658 - protein, 11 aa, Homo sapiens
  Table A; HLA-A*11:01; CTNNB1; T41I; 1
SGIHSGATITA

SEQ ID NO: 17659 - protein, 11 aa, Homo sapiens
  Table A; HLA-A*68:01; CTNNB1; T41I; 0
SGIHSGATITA

SEQ ID NO: 17660 - protein, 11 aa, Homo sapiens
  Table A; HLA-A*68:02; CTNNB1; T41I; 0
SGIHSGATITA

SEQ ID NO: 17661 - protein, 11 aa, Homo sapiens
  Table A; HLA-B*48:01; CTNNB1; T41I; 0
SGIHSGATITA

SEQ ID NO: 17662 - protein, 11 aa, Homo sapiens
  Table A; HLA-B*54:01; CTNNB1; T41I; 0
SGIHSGATITA

SEQ ID NO: 17663 - protein, 11 aa, Homo sapiens
  Table A; HLA-B*55:02; CTNNB1; T41I; 0
SGIHSGATITA

SEQ ID NO: 17664 - protein, 9 aa, Homo sapiens
  Table A; HLA-B*41:02; TP53; G244S; 0
SGMNRRPIL

SEQ ID NO: 17665 - protein, 10 aa, Homo sapiens
  Table A; HLA-B*15:01; TP53; G266E; 0
SGNLLERNSF

SEQ ID NO: 17666 - protein, 8 aa, Homo sapiens
  Table A; HLA-B*15:01; BRAF; G469V; 1
SGSFVTVY

SEQ ID NO: 17667 - protein, 8 aa, Homo sapiens
  Table A; HLA-B*18:01; BRAF; G469V; 1
SGSFVTVY

SEQ ID NO: 17668 - protein, 9 aa, Homo sapiens
  Table A; HLA-A*03:01; BRAF; G469V; 1
SGSFVTVYK

SEQ ID NO: 17669 - protein, 9 aa, Homo sapiens
  Table A; HLA-A*03:02; BRAF; G469V; 0
SGSFVTVYK

SEQ ID NO: 17670 - protein, 9 aa, Homo sapiens
  Table A; HLA-A*11:01; BRAF; G469V; 1
SGSFVTVYK

SEQ ID NO: 17671 - protein, 9 aa, Homo sapiens
  Table A; HLA-A*68:01; BRAF; G469V; 0
SGSFVTVYK

SEQ ID NO: 17672 - protein, 9 aa, Homo sapiens
  Table A; HLA-A*68:02; BRAF; G469V; 0
SGSFVTVYK

SEQ ID NO: 17673 - protein, 11 aa, Homo sapiens
  Table A; HLA-B*57:01; FBXW7; R479Q; 0
SGSQDATLRVW

SEQ ID NO: 17674 - protein, 8 aa, Homo sapiens
  Table A; HLA-B*07:02; KRAS; G12S; 1
SGVGKSAL

SEQ ID NO: 17675 - protein, 8 aa, Homo sapiens
  Table A; HLA-B*08:01; KRAS; G12S; 1
SGVGKSAL

SEQ ID NO: 17676 - protein, 8 aa, Homo sapiens
  Table A; HLA-B*14:02; KRAS; G12S; 0
SGVGKSAL

SEQ ID NO: 17677 - protein, 8 aa, Homo sapiens
  Table A; HLA-B*41:02; KRAS; G12S; 0
SGVGKSAL

SEQ ID NO: 17678 - protein, 10 aa, Homo sapiens
  Table A; HLA-B*13:02; KRAS; G12S; 0
SGVGKSALTI

SEQ ID NO: 17679 - protein, 8 aa, Homo sapiens
  Table A; HLA-B*39:01; IDH1; R132S; 0
SHAYGDQY

SEQ ID NO: 17680 - protein, 10 aa, Homo sapiens
  Table A; HLA-A*03:02; BCORL1; K1207N; 0
SHEEGSLENK

SEQ ID NO: 17681 - protein, 11 aa, Homo sapiens
  Table A; HLA-B*38:01; BCORL1; K1207N; 0
SHEEGSLENKA

SEQ ID NO: 17682 - protein, 11 aa, Homo sapiens
  Table A; HLA-B*39:06; BCORL1; K1207N; 0
SHEEGSLENKA

(The sequence listing continues in the following parts.)
